United States Patent Application Publication US 2005/0287570 A1 - sequence listing, part 9

SEQ ID NO: 170720 - DNA, 25 bp, Artificial
  Probe
gcagacctgatgtcatactgtgagg

SEQ ID NO: 170721 - DNA, 25 bp, Artificial
  Probe
tgcagacctgatgtcatactgtgag

SEQ ID NO: 170722 - DNA, 25 bp, Artificial
  Probe
acctgatgtcatactgtgaggagca

SEQ ID NO: 170723 - DNA, 25 bp, Artificial
  Probe
cataccgacctcagaaaacccattc

SEQ ID NO: 170724 - DNA, 25 bp, Artificial
  Probe
ataccgacctcagaaaacccattca

SEQ ID NO: 170725 - DNA, 25 bp, Artificial
  Probe
taccgacctcagaaaacccattcaa

SEQ ID NO: 170726 - DNA, 25 bp, Artificial
  Probe
attggaagcctccatcgaaagaata

SEQ ID NO: 170727 - DNA, 25 bp, Artificial
  Probe
tggaagcctccatcgaaagaataaa

SEQ ID NO: 170728 - DNA, 25 bp, Artificial
  Probe
ttggaagcctccatcgaaagaataa

SEQ ID NO: 170729 - DNA, 25 bp, Artificial
  Probe
gcataccgacctcagaaaacccatt

SEQ ID NO: 170730 - DNA, 25 bp, Artificial
  Probe
gattggaagcctccatcgaaagaat

SEQ ID NO: 170731 - DNA, 25 bp, Artificial
  Probe
agattggaagcctccatcgaaagaa

SEQ ID NO: 170732 - DNA, 25 bp, Artificial
  Probe
gagattggaagcctccatcgaaaga

SEQ ID NO: 170733 - DNA, 25 bp, Artificial
  Probe
tgagattggaagcctccatcgaaag

SEQ ID NO: 170734 - DNA, 25 bp, Artificial
  Probe
ctgagattggaagcctccatcgaaa

SEQ ID NO: 170735 - DNA, 25 bp, Artificial
  Probe
tttcaggaagatggaggagaagaaa

SEQ ID NO: 170736 - DNA, 25 bp, Artificial
  Probe
ttcaggaagatggaggagaagaaaa

SEQ ID NO: 170737 - DNA, 25 bp, Artificial
  Probe
ttttcaggaagatggaggagaagaa

SEQ ID NO: 170738 - DNA, 25 bp, Artificial
  Probe
atgttttcaggaagatggaggagaa

SEQ ID NO: 170739 - DNA, 25 bp, Artificial
  Probe
tcaggaagatggaggagaagaaaac

SEQ ID NO: 170740 - DNA, 25 bp, Artificial
  Probe
gatgttttcaggaagatggaggaga

SEQ ID NO: 170741 - DNA, 25 bp, Artificial
  Probe
gttttcaggaagatggaggagaaga

SEQ ID NO: 170742 - DNA, 25 bp, Artificial
  Probe
aggaagatggaggagaagaaaacac

SEQ ID NO: 170743 - DNA, 25 bp, Artificial
  Probe
caggaagatggaggagaagaaaaca

SEQ ID NO: 170744 - DNA, 25 bp, Artificial
  Probe
tgttttcaggaagatggaggagaag

SEQ ID NO: 170745 - DNA, 25 bp, Artificial
  Probe
cactctggatgttttcaggaagatg

SEQ ID NO: 170746 - DNA, 25 bp, Artificial
  Probe
ggatgttttcaggaagatggaggag

SEQ ID NO: 170747 - DNA, 25 bp, Artificial
  Probe
gatgtccccttttgcatatttagtg

SEQ ID NO: 170748 - DNA, 25 bp, Artificial
  Probe
gtgatgtccccttttgcatatttag

SEQ ID NO: 170749 - DNA, 25 bp, Artificial
  Probe
tgatgtccccttttgcatatttagt

SEQ ID NO: 170750 - DNA, 25 bp, Artificial
  Probe
agtgatgtccccttttgcatattta

SEQ ID NO: 170751 - DNA, 25 bp, Artificial
  Probe
tctggatgttttcaggaagatggag

SEQ ID NO: 170752 - DNA, 25 bp, Artificial
  Probe
ctctggatgttttcaggaagatgga

SEQ ID NO: 170753 - DNA, 25 bp, Artificial
  Probe
tccccttttgcatatttagtggttg

SEQ ID NO: 170754 - DNA, 25 bp, Artificial
  Probe
gtccccttttgcatatttagtggtt

SEQ ID NO: 170755 - DNA, 25 bp, Artificial
  Probe
actctggatgttttcaggaagatgg

SEQ ID NO: 170756 - DNA, 25 bp, Artificial
  Probe
atgtccccttttgcatatttagtgg

SEQ ID NO: 170757 - DNA, 25 bp, Artificial
  Probe
cccttttgcatatttagtggttggt

SEQ ID NO: 170758 - DNA, 25 bp, Artificial
  Probe
ggaagatggaggagaagaaaacacg

SEQ ID NO: 170759 - DNA, 25 bp, Artificial
  Probe
tggatgttttcaggaagatggagga

SEQ ID NO: 170760 - DNA, 25 bp, Artificial
  Probe
cagtgatgtccccttttgcatattt

SEQ ID NO: 170761 - DNA, 25 bp, Artificial
  Probe
ccactctggatgttttcaggaagat

SEQ ID NO: 170762 - DNA, 25 bp, Artificial
  Probe
ccccttttgcatatttagtggttgg

SEQ ID NO: 170763 - DNA, 25 bp, Artificial
  Probe
ctggatgttttcaggaagatggagg

SEQ ID NO: 170764 - DNA, 25 bp, Artificial
  Probe
aagaaaacacgtctgtgaacttgat

SEQ ID NO: 170765 - DNA, 25 bp, Artificial
  Probe
tgtccccttttgcatatttagtggt

SEQ ID NO: 170766 - DNA, 25 bp, Artificial
  Probe
gagaagaaaacacgtctgtgaactt

SEQ ID NO: 170767 - DNA, 25 bp, Artificial
  Probe
aagatggaggagaagaaaacacgtc

SEQ ID NO: 170768 - DNA, 25 bp, Artificial
  Probe
gaagatggaggagaagaaaacacgt

SEQ ID NO: 170769 - DNA, 25 bp, Artificial
  Probe
gaagaaaacacgtctgtgaacttga

SEQ ID NO: 170770 - DNA, 25 bp, Artificial
  Probe
agaagaaaacacgtctgtgaacttg

SEQ ID NO: 170771 - DNA, 25 bp, Artificial
  Probe
ccagtgatgtccccttttgcatatt

SEQ ID NO: 170772 - DNA, 25 bp, Artificial
  Probe
gatggaggagaagaaaacacgtctg

SEQ ID NO: 170773 - DNA, 25 bp, Artificial
  Probe
gaggagaagaaaacacgtctgtgaa

SEQ ID NO: 170774 - DNA, 25 bp, Artificial
  Probe
agatggaggagaagaaaacacgtct

SEQ ID NO: 170775 - DNA, 25 bp, Artificial
  Probe
ggagaagaaaacacgtctgtgaact

SEQ ID NO: 170776 - DNA, 25 bp, Artificial
  Probe
aggagaagaaaacacgtctgtgaac

SEQ ID NO: 170777 - DNA, 25 bp, Artificial
  Probe
atggaggagaagaaaacacgtctgt

SEQ ID NO: 170778 - DNA, 25 bp, Artificial
  Probe
ggaggagaagaaaacacgtctgtga

SEQ ID NO: 170779 - DNA, 25 bp, Artificial
  Probe
tggaggagaagaaaacacgtctgtg

SEQ ID NO: 170780 - DNA, 25 bp, Artificial
  Probe
ctccagaagaagaagaagaagaaga

SEQ ID NO: 170781 - DNA, 25 bp, Artificial
  Probe
acttagagatggagaacactgagat

SEQ ID NO: 170782 - DNA, 25 bp, Artificial
  Probe
aacttagagatggagaacactgaga

SEQ ID NO: 170783 - DNA, 25 bp, Artificial
  Probe
caactacactgaactctaaggaagg

SEQ ID NO: 170784 - DNA, 25 bp, Artificial
  Probe
ccaactacactgaactctaaggaag

SEQ ID NO: 170785 - DNA, 25 bp, Artificial
  Probe
tccagaagaagaagaagaagaagaa

SEQ ID NO: 170786 - DNA, 25 bp, Artificial
  Probe
aactacactgaactctaaggaaggt

SEQ ID NO: 170787 - DNA, 25 bp, Artificial
  Probe
ccagaagaagaagaagaagaagaag

SEQ ID NO: 170788 - DNA, 25 bp, Artificial
  Probe
tctccagaagaagaagaagaagaag

SEQ ID NO: 170789 - DNA, 25 bp, Artificial
  Probe
acactgaactctaaggaaggttatt

SEQ ID NO: 170790 - DNA, 25 bp, Artificial
  Probe
ctacactgaactctaaggaaggtta

SEQ ID NO: 170791 - DNA, 25 bp, Artificial
  Probe
actacactgaactctaaggaaggtt

SEQ ID NO: 170792 - DNA, 25 bp, Artificial
  Probe
cactgaactctaaggaaggttattc

SEQ ID NO: 170793 - DNA, 25 bp, Artificial
  Probe
tggatgatgacattcagttgacaat

SEQ ID NO: 170794 - DNA, 25 bp, Artificial
  Probe
cttagagatggagaacactgagatc

SEQ ID NO: 170795 - DNA, 25 bp, Artificial
  Probe
tacactgaactctaaggaaggttat

SEQ ID NO: 170796 - DNA, 25 bp, Artificial
  Probe
cagaagaagaagaagaagaagaaga

SEQ ID NO: 170797 - DNA, 25 bp, Artificial
  Probe
aattcatgtattgtgtctcttgtgc

SEQ ID NO: 170798 - DNA, 25 bp, Artificial
  Probe
atcagatcctaccagactctctatg

SEQ ID NO: 170799 - DNA, 25 bp, Artificial
  Probe
catcagatcctaccagactctctat

SEQ ID NO: 170800 - DNA, 25 bp, Artificial
  Probe
tgagatccatgagaacaaccataag

SEQ ID NO: 170801 - DNA, 25 bp, Artificial
  Probe
ctgagatccatgagaacaaccataa

SEQ ID NO: 170802 - DNA, 25 bp, Artificial
  Probe
tcatcagatcctaccagactctcta

SEQ ID NO: 170803 - DNA, 25 bp, Artificial
  Probe
attcagttgacaatgtggacatctc

SEQ ID NO: 170804 - DNA, 25 bp, Artificial
  Probe
aagaagaagaagaagaagaagaagt

SEQ ID NO: 170805 - DNA, 25 bp, Artificial
  Probe
actgagatccatgagaacaaccata

SEQ ID NO: 170806 - DNA, 25 bp, Artificial
  Probe
ctggatgatgacattcagttgacaa

SEQ ID NO: 170807 - DNA, 25 bp, Artificial
  Probe
gaacactgagatccatgagaacaac

SEQ ID NO: 170808 - DNA, 25 bp, Artificial
  Probe
agaacactgagatccatgagaacaa

SEQ ID NO: 170809 - DNA, 25 bp, Artificial
  Probe
gaactctaaggaaggttattcagat

SEQ ID NO: 170810 - DNA, 25 bp, Artificial
  Probe
gagatccatgagaacaaccataagc

SEQ ID NO: 170811 - DNA, 25 bp, Artificial
  Probe
ttcatcagatcctaccagactctct

SEQ ID NO: 170812 - DNA, 25 bp, Artificial
  Probe
tccaactacactgaactctaaggaa

SEQ ID NO: 170813 - DNA, 25 bp, Artificial
  Probe
ttctgacagagagatccatgaacaa

SEQ ID NO: 170814 - DNA, 25 bp, Artificial
  Probe
ctagtaagagagcttcctgaagaat

SEQ ID NO: 170815 - DNA, 25 bp, Artificial
  Probe
ctccaactacactgaactctaagga

SEQ ID NO: 170816 - DNA, 25 bp, Artificial
  Probe
gagaacactgagatccatgagaaca

SEQ ID NO: 170817 - DNA, 25 bp, Artificial
  Probe
gtattgtgtctcttgtgcattgtta

SEQ ID NO: 170818 - DNA, 25 bp, Artificial
  Probe
ctgctaccagttgactgtgattata

SEQ ID NO: 170819 - DNA, 25 bp, Artificial
  Probe
tattgtgtctcttgtgcattgttag

SEQ ID NO: 170820 - DNA, 25 bp, Artificial
  Probe
tgctaccagttgactgtgattataa

SEQ ID NO: 170821 - DNA, 25 bp, Artificial
  Probe
ctcttgctttccttgactttgtatt

SEQ ID NO: 170822 - DNA, 25 bp, Artificial
  Probe
tgacagagagatccatgaacaacag

SEQ ID NO: 170823 - DNA, 25 bp, Artificial
  Probe
ctgacagagagatccatgaacaaca

SEQ ID NO: 170824 - DNA, 25 bp, Artificial
  Probe
tcttgctttccttgactttgtattt

SEQ ID NO: 170825 - DNA, 25 bp, Artificial
  Probe
atccagccaaggtcatccactataa

SEQ ID NO: 170826 - DNA, 25 bp, Artificial
  Probe
gaacactcactgactgaagaacctg

SEQ ID NO: 170827 - DNA, 25 bp, Artificial
  Probe
ctgaacactcactgactgaagaacc

SEQ ID NO: 170828 - DNA, 25 bp, Artificial
  Probe
gatccagccaaggtcatccactata

SEQ ID NO: 170829 - DNA, 25 bp, Artificial
  Probe
tgaacactcactgactgaagaacct

SEQ ID NO: 170830 - DNA, 25 bp, Artificial
  Probe
gctgaacactcactgactgaagaac

SEQ ID NO: 170831 - DNA, 25 bp, Artificial
  Probe
ctcacagaggaggagataaggatgc

SEQ ID NO: 170832 - DNA, 25 bp, Artificial
  Probe
tccagccaaggtcatccactataaa

SEQ ID NO: 170833 - DNA, 25 bp, Artificial
  Probe
aaggtcatccactataaaagcagaa

SEQ ID NO: 170834 - DNA, 25 bp, Artificial
  Probe
aggtcatccactataaaagcagaac

SEQ ID NO: 170835 - DNA, 25 bp, Artificial
  Probe
caaggtcatccactataaaagcaga

SEQ ID NO: 170836 - DNA, 25 bp, Artificial
  Probe
gtcatccactataaaagcagaacaa

SEQ ID NO: 170837 - DNA, 25 bp, Artificial
  Probe
atagtctgcaagctattgaaatggg

SEQ ID NO: 170838 - DNA, 25 bp, Artificial
  Probe
ggtcatccactataaaagcagaaca

SEQ ID NO: 170839 - DNA, 25 bp, Artificial
  Probe
aacactcactgactgaagaacctgg

SEQ ID NO: 170840 - DNA, 25 bp, Artificial
  Probe
gcaagctattgaaatgggatggaag

SEQ ID NO: 170841 - DNA, 25 bp, Artificial
  Probe
tagtctgcaagctattgaaatggga

SEQ ID NO: 170842 - DNA, 25 bp, Artificial
  Probe
ccaaggtcatccactataaaagcag

SEQ ID NO: 170843 - DNA, 25 bp, Artificial
  Probe
cagccaaggtcatccactataaaag

SEQ ID NO: 170844 - DNA, 25 bp, Artificial
  Probe
cctaataaaccctggacttcccaag

SEQ ID NO: 170845 - DNA, 25 bp, Artificial
  Probe
taataaaccctggacttcccaagta

SEQ ID NO: 170846 - DNA, 25 bp, Artificial
  Probe
tcatccactataaaagcagaacaat

SEQ ID NO: 170847 - DNA, 25 bp, Artificial
  Probe
cactcactgactgaagaacctggag

SEQ ID NO: 170848 - DNA, 25 bp, Artificial
  Probe
gtctgcaagctattgaaatgggatg

SEQ ID NO: 170849 - DNA, 25 bp, Artificial
  Probe
ataaaccctggacttcccaagtaaa

SEQ ID NO: 170850 - DNA, 25 bp, Artificial
  Probe
aataaaccctggacttcccaagtaa

SEQ ID NO: 170851 - DNA, 25 bp, Artificial
  Probe
cgaagcagattctcactatgtgatt

SEQ ID NO: 170852 - DNA, 25 bp, Artificial
  Probe
agtctgcaagctattgaaatgggat

SEQ ID NO: 170853 - DNA, 25 bp, Artificial
  Probe
tcacagaggaggagataaggatgcc

SEQ ID NO: 170854 - DNA, 25 bp, Artificial
  Probe
ggctgaacactcactgactgaagaa

SEQ ID NO: 170855 - DNA, 25 bp, Artificial
  Probe
ctaataaaccctggacttcccaagt

SEQ ID NO: 170856 - DNA, 25 bp, Artificial
  Probe
ccagccaaggtcatccactataaaa

SEQ ID NO: 170857 - DNA, 25 bp, Artificial
  Probe
tgcaagctattgaaatgggatggaa

SEQ ID NO: 170858 - DNA, 25 bp, Artificial
  Probe
tcgaagcagattctcactatgtgat

SEQ ID NO: 170859 - DNA, 25 bp, Artificial
  Probe
catccactataaaagcagaacaata

SEQ ID NO: 170860 - DNA, 25 bp, Artificial
  Probe
agccaaggtcatccactataaaagc

SEQ ID NO: 170861 - DNA, 25 bp, Artificial
  Probe
acactcactgactgaagaacctgga

SEQ ID NO: 170862 - DNA, 25 bp, Artificial
  Probe
caagctattgaaatgggatggaagc

SEQ ID NO: 170863 - DNA, 25 bp, Artificial
  Probe
ccctaataaaccctggacttcccaa

SEQ ID NO: 170864 - DNA, 25 bp, Artificial
  Probe
ctgcaagctattgaaatgggatgga

SEQ ID NO: 170865 - DNA, 25 bp, Artificial
  Probe
tctgcaagctattgaaatgggatgg

SEQ ID NO: 170866 - DNA, 25 bp, Artificial
  Probe
aatagtctgcaagctattgaaatgg

SEQ ID NO: 170867 - DNA, 25 bp, Artificial
  Probe
gccaaggtcatccactataaaagca

SEQ ID NO: 170868 - DNA, 25 bp, Artificial
  Probe
ctattgaaatgggatggaagctggc

SEQ ID NO: 170869 - DNA, 25 bp, Artificial
  Probe
atccactataaaagcagaacaatag

SEQ ID NO: 170870 - DNA, 25 bp, Artificial
  Probe
aatccattcatcacactacacctta

SEQ ID NO: 170871 - DNA, 25 bp, Artificial
  Probe
cattcatcacactacaccttaacac

SEQ ID NO: 170872 - DNA, 25 bp, Artificial
  Probe
acttgaagagatgtagaatgtagca

SEQ ID NO: 170873 - DNA, 25 bp, Artificial
  Probe
atccattcatcacactacaccttaa

SEQ ID NO: 170874 - DNA, 25 bp, Artificial
  Probe
tccattcatcacactacaccttaac

SEQ ID NO: 170875 - DNA, 25 bp, Artificial
  Probe
attcatcacactacaccttaacacc

SEQ ID NO: 170876 - DNA, 25 bp, Artificial
  Probe
ccattcatcacactacaccttaaca

SEQ ID NO: 170877 - DNA, 25 bp, Artificial
  Probe
tcttctcaatgcttaattcttcagt

SEQ ID NO: 170878 - DNA, 25 bp, Artificial
  Probe
actcttctcaatgcttaattcttca

SEQ ID NO: 170879 - DNA, 25 bp, Artificial
  Probe
gaagaagatgaggaggaggaagaag

SEQ ID NO: 170880 - DNA, 25 bp, Artificial
  Probe
gctctggagaagaagtacaatgata

SEQ ID NO: 170881 - DNA, 25 bp, Artificial
  Probe
aactatctgtgaatcaatgttctgt

SEQ ID NO: 170882 - DNA, 25 bp, Artificial
  Probe
cttgaagagatgtagaatgtagcaa

SEQ ID NO: 170883 - DNA, 25 bp, Artificial
  Probe
tgttcatctgtaatggtctcatgtt

SEQ ID NO: 170884 - DNA, 25 bp, Artificial
  Probe
aagaagatgaggaggaggaagaaga

SEQ ID NO: 170885 - DNA, 25 bp, Artificial
  Probe
tgaagagatgtagaatgtagcaatt

SEQ ID NO: 170886 - DNA, 25 bp, Artificial
  Probe
tacttgaagagatgtagaatgtagc

SEQ ID NO: 170887 - DNA, 25 bp, Artificial
  Probe
ctcttctcaatgcttaattcttcag

SEQ ID NO: 170888 - DNA, 25 bp, Artificial
  Probe
tctgtaatggtctcatgttatctgt

SEQ ID NO: 170889 - DNA, 25 bp, Artificial
  Probe
gtgttcatctgtaatggtctcatgt

SEQ ID NO: 170890 - DNA, 25 bp, Artificial
  Probe
cttctcaatgcttaattcttcagtt

SEQ ID NO: 170891 - DNA, 25 bp, Artificial
  Probe
ttgaagagatgtagaatgtagcaat

SEQ ID NO: 170892 - DNA, 25 bp, Artificial
  Probe
ctgtaatggtctcatgttatctgtt

SEQ ID NO: 170893 - DNA, 25 bp, Artificial
  Probe
gttcatctgtaatggtctcatgtta

SEQ ID NO: 170894 - DNA, 25 bp, Artificial
  Probe
agaagatgaggaggaggaagaagag

SEQ ID NO: 170895 - DNA, 25 bp, Artificial
  Probe
actatctgtgaatcaatgttctgta

SEQ ID NO: 170896 - DNA, 25 bp, Artificial
  Probe
cttgtattagctgtgccttcattat

SEQ ID NO: 170897 - DNA, 25 bp, Artificial
  Probe
cagaactcctcaatgaagctaatgt

SEQ ID NO: 170898 - DNA, 25 bp, Artificial
  Probe
aactcttctcaatgcttaattcttc

SEQ ID NO: 170899 - DNA, 25 bp, Artificial
  Probe
agaactcctcaatgaagctaatgtt

SEQ ID NO: 170900 - DNA, 25 bp, Artificial
  Probe
cgtgttcatctgtaatggtctcatg

SEQ ID NO: 170901 - DNA, 25 bp, Artificial
  Probe
gaactcttctcaatgcttaattctt

SEQ ID NO: 170902 - DNA, 25 bp, Artificial
  Probe
ttgtattagctgtgccttcattatt

SEQ ID NO: 170903 - DNA, 25 bp, Artificial
  Probe
atctgtaatggtctcatgttatctg

SEQ ID NO: 170904 - DNA, 25 bp, Artificial
  Probe
catctgtaatggtctcatgttatct

SEQ ID NO: 170905 - DNA, 25 bp, Artificial
  Probe
tcatctgtaatggtctcatgttatc

SEQ ID NO: 170906 - DNA, 25 bp, Artificial
  Probe
atcagaactcctcaatgaagctaat

SEQ ID NO: 170907 - DNA, 25 bp, Artificial
  Probe
ggctctggagaagaagtacaatgat

SEQ ID NO: 170908 - DNA, 25 bp, Artificial
  Probe
tcagaactcctcaatgaagctaatg

SEQ ID NO: 170909 - DNA, 25 bp, Artificial
  Probe
catcagaactcctcaatgaagctaa

SEQ ID NO: 170910 - DNA, 25 bp, Artificial
  Probe
aaatccattcatcacactacacctt

SEQ ID NO: 170911 - DNA, 25 bp, Artificial
  Probe
cttcagtttctttacatttcccagc

SEQ ID NO: 170912 - DNA, 25 bp, Artificial
  Probe
gaaaggttgtcagttagatgggaat

SEQ ID NO: 170913 - DNA, 25 bp, Artificial
  Probe
tcttcagtttctttacatttcccag

SEQ ID NO: 170914 - DNA, 25 bp, Artificial
  Probe
ggaagaagatgaggaggaggaagaa

SEQ ID NO: 170915 - DNA, 25 bp, Artificial
  Probe
aagtgacaatcagaaccaggtacaa

SEQ ID NO: 170916 - DNA, 25 bp, Artificial
  Probe
gacgaggctaaatagaacacagtag

SEQ ID NO: 170917 - DNA, 25 bp, Artificial
  Probe
gtctgatccagtgcttaacttcaac

SEQ ID NO: 170918 - DNA, 25 bp, Artificial
  Probe
gtgaaattaaacccgttctaagtgt

SEQ ID NO: 170919 - DNA, 25 bp, Artificial
  Probe
tgtgaaattaaacccgttctaagtg

SEQ ID NO: 170920 - DNA, 25 bp, Artificial
  Probe
ctgtgaaattaaacccgttctaagt

SEQ ID NO: 170921 - DNA, 25 bp, Artificial
  Probe
tagatgctgtgaaattaaacccgtt

SEQ ID NO: 170922 - DNA, 25 bp, Artificial
  Probe
ttagatgctgtgaaattaaacccgt

SEQ ID NO: 170923 - DNA, 25 bp, Artificial
  Probe
ctaagaacacaccgatgactggaag

SEQ ID NO: 170924 - DNA, 25 bp, Artificial
  Probe
gctgtgaaattaaacccgttctaag

SEQ ID NO: 170925 - DNA, 25 bp, Artificial
  Probe
tttagatgctgtgaaattaaacccg

SEQ ID NO: 170926 - DNA, 25 bp, Artificial
  Probe
agtgacaatcagaaccaggtacaag

SEQ ID NO: 170927 - DNA, 25 bp, Artificial
  Probe
atgctgtgaaattaaacccgttcta

SEQ ID NO: 170928 - DNA, 25 bp, Artificial
  Probe
tgtctgatccagtgcttaacttcaa

SEQ ID NO: 170929 - DNA, 25 bp, Artificial
  Probe
tgctgtgaaattaaacccgttctaa

SEQ ID NO: 170930 - DNA, 25 bp, Artificial
  Probe
ttaaacccgttctaagtgtacttgt

SEQ ID NO: 170931 - DNA, 25 bp, Artificial
  Probe
gtaaagtgacaatcagaaccaggta

SEQ ID NO: 170932 - DNA, 25 bp, Artificial
  Probe
ccgttctaagtgtacttgtttgaat

SEQ ID NO: 170933 - DNA, 25 bp, Artificial
  Probe
tattgctgtaatttctgacatccca

SEQ ID NO: 170934 - DNA, 25 bp, Artificial
  Probe
taaacccgttctaagtgtacttgtt

SEQ ID NO: 170935 - DNA, 25 bp, Artificial
  Probe
ggacgaggctaaatagaacacagta

SEQ ID NO: 170936 - DNA, 25 bp, Artificial
  Probe
tgaaattaaacccgttctaagtgta

SEQ ID NO: 170937 - DNA, 25 bp, Artificial
  Probe
attaaacccgttctaagtgtacttg

SEQ ID NO: 170938 - DNA, 25 bp, Artificial
  Probe
atattgctgtaatttctgacatccc

SEQ ID NO: 170939 - DNA, 25 bp, Artificial
  Probe
attgctgtaatttctgacatcccaa

SEQ ID NO: 170940 - DNA, 25 bp, Artificial
  Probe
ctgtctgatccagtgcttaacttca

SEQ ID NO: 170941 - DNA, 25 bp, Artificial
  Probe
taaagtgacaatcagaaccaggtac

SEQ ID NO: 170942 - DNA, 25 bp, Artificial
  Probe
cccgttctaagtgtacttgtttgaa

SEQ ID NO: 170943 - DNA, 25 bp, Artificial
  Probe
ttgctgtaatttctgacatcccaaa

SEQ ID NO: 170944 - DNA, 25 bp, Artificial
  Probe
aaattaaacccgttctaagtgtact

SEQ ID NO: 170945 - DNA, 25 bp, Artificial
  Probe
tctgatccagtgcttaacttcaacc

SEQ ID NO: 170946 - DNA, 25 bp, Artificial
  Probe
aacccgttctaagtgtacttgtttg

SEQ ID NO: 170947 - DNA, 25 bp, Artificial
  Probe
gatgctgtgaaattaaacccgttct

SEQ ID NO: 170948 - DNA, 25 bp, Artificial
  Probe
agatgctgtgaaattaaacccgttc

SEQ ID NO: 170949 - DNA, 25 bp, Artificial
  Probe
aattaaacccgttctaagtgtactt

SEQ ID NO: 170950 - DNA, 25 bp, Artificial
  Probe
gaaattaaacccgttctaagtgtac

SEQ ID NO: 170951 - DNA, 25 bp, Artificial
  Probe
cgttctaagtgtacttgtttgaatt

SEQ ID NO: 170952 - DNA, 25 bp, Artificial
  Probe
tgcttaacttcaaccctagagtctg

SEQ ID NO: 170953 - DNA, 25 bp, Artificial
  Probe
gtgcttaacttcaaccctagagtct

SEQ ID NO: 170954 - DNA, 25 bp, Artificial
  Probe
agtgcttaacttcaaccctagagtc

SEQ ID NO: 170955 - DNA, 25 bp, Artificial
  Probe
acccgttctaagtgtacttgtttga

SEQ ID NO: 170956 - DNA, 25 bp, Artificial
  Probe
cagtgcttaacttcaaccctagagt

SEQ ID NO: 170957 - DNA, 25 bp, Artificial
  Probe
atccagtgcttaacttcaaccctag

SEQ ID NO: 170958 - DNA, 25 bp, Artificial
  Probe
aaagtgacaatcagaaccaggtaca

SEQ ID NO: 170959 - DNA, 25 bp, Artificial
  Probe
gatccagtgcttaacttcaacccta

SEQ ID NO: 170960 - DNA, 25 bp, Artificial
  Probe
cacttggataaccacagatttaccc

SEQ ID NO: 170961 - DNA, 25 bp, Artificial
  Probe
gcacttggataaccacagatttacc

SEQ ID NO: 170962 - DNA, 25 bp, Artificial
  Probe
ttggataaccacagatttacccgtc

SEQ ID NO: 170963 - DNA, 25 bp, Artificial
  Probe
cttggataaccacagatttacccgt

SEQ ID NO: 170964 - DNA, 25 bp, Artificial
  Probe
acttggataaccacagatttacccg

SEQ ID NO: 170965 - DNA, 25 bp, Artificial
  Probe
ttgcacttggataaccacagattta

SEQ ID NO: 170966 - DNA, 25 bp, Artificial
  Probe
tgcacttggataaccacagatttac

SEQ ID NO: 170967 - DNA, 25 bp, Artificial
  Probe
tttgcacttggataaccacagattt

SEQ ID NO: 170968 - DNA, 25 bp, Artificial
  Probe
ctttgcacttggataaccacagatt

SEQ ID NO: 170969 - DNA, 25 bp, Artificial
  Probe
tggataaccacagatttacccgtct

SEQ ID NO: 170970 - DNA, 25 bp, Artificial
  Probe
tctttgcacttggataaccacagat

SEQ ID NO: 170971 - DNA, 25 bp, Artificial
  Probe
tcaaaataaagtcttgtttcagtga

SEQ ID NO: 170972 - DNA, 25 bp, Artificial
  Probe
ctctttgcacttggataaccacaga

SEQ ID NO: 170973 - DNA, 25 bp, Artificial
  Probe
cctctgtatttctctctccttcccc

SEQ ID NO: 170974 - DNA, 25 bp, Artificial
  Probe
gtcaggttctgtattctttccccag

SEQ ID NO: 170975 - DNA, 25 bp, Artificial
  Probe
ttcaaaataaagtcttgtttcagtg

SEQ ID NO: 170976 - DNA, 25 bp, Artificial
  Probe
cttcaaaataaagtcttgtttcagt

SEQ ID NO: 170977 - DNA, 25 bp, Artificial
  Probe
caaaataaagtcttgtttcagtgaa

SEQ ID NO: 170978 - DNA, 25 bp, Artificial
  Probe
ggataaccacagatttacccgtctg

SEQ ID NO: 170979 - DNA, 25 bp, Artificial
  Probe
cctctttgcacttggataaccacag

SEQ ID NO: 170980 - DNA, 25 bp, Artificial
  Probe
ggtcaggttctgtattctttcccca

SEQ ID NO: 170981 - DNA, 25 bp, Artificial
  Probe
gatctacgccaacttcttcccctac

SEQ ID NO: 170982 - DNA, 25 bp, Artificial
  Probe
cgggtcaggttctgtattctttccc

SEQ ID NO: 170983 - DNA, 25 bp, Artificial
  Probe
acttcaaaataaagtcttgtttcag

SEQ ID NO: 170984 - DNA, 25 bp, Artificial
  Probe
caggttctgtattctttccccagac

SEQ ID NO: 170985 - DNA, 25 bp, Artificial
  Probe
tcaggttctgtattctttccccaga

SEQ ID NO: 170986 - DNA, 25 bp, Artificial
  Probe
ccgggtcaggttctgtattctttcc

SEQ ID NO: 170987 - DNA, 25 bp, Artificial
  Probe
aacttcaaaataaagtcttgtttca

SEQ ID NO: 170988 - DNA, 25 bp, Artificial
  Probe
aggttctgtattctttccccagaca

SEQ ID NO: 170989 - DNA, 25 bp, Artificial
  Probe
aaataaagtcttgtttcagtgaaaa

SEQ ID NO: 170990 - DNA, 25 bp, Artificial
  Probe
aaaataaagtcttgtttcagtgaaa

SEQ ID NO: 170991 - DNA, 25 bp, Artificial
  Probe
ggttctgtattctttccccagacag

SEQ ID NO: 170992 - DNA, 25 bp, Artificial
  Probe
gttctgtattctttccccagacagc

SEQ ID NO: 170993 - DNA, 25 bp, Artificial
  Probe
gggtcaggttctgtattctttcccc

SEQ ID NO: 170994 - DNA, 25 bp, Artificial
  Probe
agatctacgccaacttcttccccta

SEQ ID NO: 170995 - DNA, 25 bp, Artificial
  Probe
ttctgtattctttccccagacagct

SEQ ID NO: 170996 - DNA, 25 bp, Artificial
  Probe
gaagataacaagttctgtgctgact

SEQ ID NO: 170997 - DNA, 25 bp, Artificial
  Probe
ctggaggaagataacaagttctgtg

SEQ ID NO: 170998 - DNA, 25 bp, Artificial
  Probe
aagataacaagttctgtgctgactg

SEQ ID NO: 170999 - DNA, 25 bp, Artificial
  Probe
gaggaagataacaagttctgtgctg

SEQ ID NO: 171000 - DNA, 25 bp, Artificial
  Probe
ctgctggaggaagataacaagttct

SEQ ID NO: 171001 - DNA, 25 bp, Artificial
  Probe
ggaagataacaagttctgtgctgac

SEQ ID NO: 171002 - DNA, 25 bp, Artificial
  Probe
aggaagataacaagttctgtgctga

SEQ ID NO: 171003 - DNA, 25 bp, Artificial
  Probe
aatatatggaccgaagtctggacat

SEQ ID NO: 171004 - DNA, 25 bp, Artificial
  Probe
tgctggaggaagataacaagttctg

SEQ ID NO: 171005 - DNA, 25 bp, Artificial
  Probe
ggaaagagaaggatgataagtggaa

SEQ ID NO: 171006 - DNA, 25 bp, Artificial
  Probe
agtggactcaagaacagattcagtg

SEQ ID NO: 171007 - DNA, 25 bp, Artificial
  Probe
cagtggactcaagaacagattcagt

SEQ ID NO: 171008 - DNA, 25 bp, Artificial
  Probe
aagagaaggatgataagtggaaacg

SEQ ID NO: 171009 - DNA, 25 bp, Artificial
  Probe
aggaaagagaaggatgataagtgga

SEQ ID NO: 171010 - DNA, 25 bp, Artificial
  Probe
taggaaagagaaggatgataagtgg

SEQ ID NO: 171011 - DNA, 25 bp, Artificial
  Probe
atatatggaccgaagtctggacatc

SEQ ID NO: 171012 - DNA, 25 bp, Artificial
  Probe
gagaaggatgataagtggaaacgag

SEQ ID NO: 171013 - DNA, 25 bp, Artificial
  Probe
agagaaggatgataagtggaaacga

SEQ ID NO: 171014 - DNA, 25 bp, Artificial
  Probe
aaagagaaggatgataagtggaaac

SEQ ID NO: 171015 - DNA, 25 bp, Artificial
  Probe
ggaggaagataacaagttctgtgct

SEQ ID NO: 171016 - DNA, 25 bp, Artificial
  Probe
gctggaggaagataacaagttctgt

SEQ ID NO: 171017 - DNA, 25 bp, Artificial
  Probe
gatgataagtggaaacgaggaagtg

SEQ ID NO: 171018 - DNA, 25 bp, Artificial
  Probe
catgatgagctatggacagtcaatg

SEQ ID NO: 171019 - DNA, 25 bp, Artificial
  Probe
gaaagagaaggatgataagtggaaa

SEQ ID NO: 171020 - DNA, 25 bp, Artificial
  Probe
atgataagtggaaacgaggaagtga

SEQ ID NO: 171021 - DNA, 25 bp, Artificial
  Probe
aaggatgataagtggaaacgaggaa

SEQ ID NO: 171022 - DNA, 25 bp, Artificial
  Probe
tggaggaagataacaagttctgtgc

SEQ ID NO: 171023 - DNA, 25 bp, Artificial
  Probe
tatatggaccgaagtctggacatca

SEQ ID NO: 171024 - DNA, 25 bp, Artificial
  Probe
ccagtggactcaagaacagattcag

SEQ ID NO: 171025 - DNA, 25 bp, Artificial
  Probe
gaccagtggactcaagaacagattc

SEQ ID NO: 171026 - DNA, 25 bp, Artificial
  Probe
aagtcagaagaaacaggcaagaaac

SEQ ID NO: 171027 - DNA, 25 bp, Artificial
  Probe
caagtcagaagaaacaggcaagaaa

SEQ ID NO: 171028 - DNA, 25 bp, Artificial
  Probe
tgagaagaagaaatatatggaccga

SEQ ID NO: 171029 - DNA, 25 bp, Artificial
  Probe
aggatgataagtggaaacgaggaag

SEQ ID NO: 171030 - DNA, 25 bp, Artificial
  Probe
gaaggatgataagtggaaacgagga

SEQ ID NO: 171031 - DNA, 25 bp, Artificial
  Probe
agaaggatgataagtggaaacgagg

SEQ ID NO: 171032 - DNA, 25 bp, Artificial
  Probe
ttaggaaagagaaggatgataagtg

SEQ ID NO: 171033 - DNA, 25 bp, Artificial
  Probe
tgataagtggaaacgaggaagtgag

SEQ ID NO: 171034 - DNA, 25 bp, Artificial
  Probe
ggatgataagtggaaacgaggaagt

SEQ ID NO: 171035 - DNA, 25 bp, Artificial
  Probe
gaagaagaaatatatggaccgaagt

SEQ ID NO: 171036 - DNA, 25 bp, Artificial
  Probe
atgatgagctatggacagtcaatgg

SEQ ID NO: 171037 - DNA, 25 bp, Artificial
  Probe
agataacaagttctgtgctgactgc

SEQ ID NO: 171038 - DNA, 25 bp, Artificial
  Probe
ctcagtcctcagatgtggaaataaa

SEQ ID NO: 171039 - DNA, 25 bp, Artificial
  Probe
gactcaagaacagattcagtgcatg

SEQ ID NO: 171040 - DNA, 25 bp, Artificial
  Probe
agaagaagaaatatatggaccgaag

SEQ ID NO: 171041 - DNA, 25 bp, Artificial
  Probe
ctaagtcatcctcaaccaatccttc

SEQ ID NO: 171042 - DNA, 25 bp, Artificial
  Probe
caacctaagtcatcctcaaccaatc

SEQ ID NO: 171043 - DNA, 25 bp, Artificial
  Probe
tcaacctaagtcatcctcaaccaat

SEQ ID NO: 171044 - DNA, 25 bp, Artificial
  Probe
taagtcatcctcaaccaatccttca

SEQ ID NO: 171045 - DNA, 25 bp, Artificial
  Probe
cctaagtcatcctcaaccaatcctt

SEQ ID NO: 171046 - DNA, 25 bp, Artificial
  Probe
aacctaagtcatcctcaaccaatcc

SEQ ID NO: 171047 - DNA, 25 bp, Artificial
  Probe
ctcaacctaagtcatcctcaaccaa

SEQ ID NO: 171048 - DNA, 25 bp, Artificial
  Probe
gccattcctatcatatagtaagcag

SEQ ID NO: 171049 - DNA, 25 bp, Artificial
  Probe
ctcaacctaaatcctctcagacaaa

SEQ ID NO: 171050 - DNA, 25 bp, Artificial
  Probe
tcatcctcaaccaatccttcacaag

SEQ ID NO: 171051 - DNA, 25 bp, Artificial
  Probe
aagtcatcctcaaccaatccttcac

SEQ ID NO: 171052 - DNA, 25 bp, Artificial
  Probe
gtcatcctcaaccaatccttcacaa

SEQ ID NO: 171053 - DNA, 25 bp, Artificial
  Probe
acctaagtcatcctcaaccaatcct

SEQ ID NO: 171054 - DNA, 25 bp, Artificial
  Probe
aagtatcttagttgttggctgctcc

SEQ ID NO: 171055 - DNA, 25 bp, Artificial
  Probe
tgagaaagtatcttagttgttggct

SEQ ID NO: 171056 - DNA, 25 bp, Artificial
  Probe
gagaaagtatcttagttgttggctg

SEQ ID NO: 171057 - DNA, 25 bp, Artificial
  Probe
ctgagaaagtatcttagttgttggc

SEQ ID NO: 171058 - DNA, 25 bp, Artificial
  Probe
tctcaacctaaatcctctcagacaa

SEQ ID NO: 171059 - DNA, 25 bp, Artificial
  Probe
ctcaaccaatccttcacaagctaag

SEQ ID NO: 171060 - DNA, 25 bp, Artificial
  Probe
aagatatacatgaccgaattggata

SEQ ID NO: 171061 - DNA, 25 bp, Artificial
  Probe
aaagtatcttagttgttggctgctc

SEQ ID NO: 171062 - DNA, 25 bp, Artificial
  Probe
gaaagtatcttagttgttggctgct

SEQ ID NO: 171063 - DNA, 25 bp, Artificial
  Probe
ctctcaacctaaatcctctcagaca

SEQ ID NO: 171064 - DNA, 25 bp, Artificial
  Probe
agaaagtatcttagttgttggctgc

SEQ ID NO: 171065 - DNA, 25 bp, Artificial
  Probe
tctgtgtctgagaaagtatcttagt

SEQ ID NO: 171066 - DNA, 25 bp, Artificial
  Probe
ccattcctatcatatagtaagcaga

SEQ ID NO: 171067 - DNA, 25 bp, Artificial
  Probe
cctctgtgtctgagaaagtatctta

SEQ ID NO: 171068 - DNA, 25 bp, Artificial
  Probe
ctgcttatttggtgtggttaaatca

SEQ ID NO: 171069 - DNA, 25 bp, Artificial
  Probe
tgtttgtttgtttgagacagagttt

SEQ ID NO: 171070 - DNA, 25 bp, Artificial
  Probe
ttgtttgtttgtttgagacagagtt

SEQ ID NO: 171071 - DNA, 25 bp, Artificial
  Probe
tttgtttgtttgtttgagacagagt

SEQ ID NO: 171072 - DNA, 25 bp, Artificial
  Probe
tttgtttgtttgagacagagtttca

SEQ ID NO: 171073 - DNA, 25 bp, Artificial
  Probe
tctttgtttgtttgtttgagacaga

SEQ ID NO: 171074 - DNA, 25 bp, Artificial
  Probe
tgcttatttggtgtggttaaatcaa

SEQ ID NO: 171075 - DNA, 25 bp, Artificial
  Probe
ttgtttgtttgagacagagtttcac

SEQ ID NO: 171076 - DNA, 25 bp, Artificial
  Probe
gtttgtttgtttgagacagagtttc

SEQ ID NO: 171077 - DNA, 25 bp, Artificial
  Probe
ctttgtttgtttgtttgagacagag

SEQ ID NO: 171078 - DNA, 25 bp, Artificial
  Probe
gcttatttggtgtggttaaatcaac

SEQ ID NO: 171079 - DNA, 25 bp, Artificial
  Probe
cctgcttatttggtgtggttaaatc

SEQ ID NO: 171080 - DNA, 25 bp, Artificial
  Probe
agatatacatgaccgaattggatat

SEQ ID NO: 171081 - DNA, 25 bp, Artificial
  Probe
tctgagaaagtatcttagttgttgg

SEQ ID NO: 171082 - DNA, 25 bp, Artificial
  Probe
gtgtctgagaaagtatcttagttgt

SEQ ID NO: 171083 - DNA, 25 bp, Artificial
  Probe
tgtgtctgagaaagtatcttagttg

SEQ ID NO: 171084 - DNA, 25 bp, Artificial
  Probe
atttggtgtggttaaatcaactagc

SEQ ID NO: 171085 - DNA, 25 bp, Artificial
  Probe
aaactctctcatttgacccttatag

SEQ ID NO: 171086 - DNA, 25 bp, Artificial
  Probe
ctacaagagcaagccaacagagtaa

SEQ ID NO: 171087 - DNA, 25 bp, Artificial
  Probe
taatggaactttgatgatgcctttg

SEQ ID NO: 171088 - DNA, 25 bp, Artificial
  Probe
gtaatggaactttgatgatgccttt

SEQ ID NO: 171089 - DNA, 25 bp, Artificial
  Probe
gcaagtgaaagacaagaaagatgag

SEQ ID NO: 171090 - DNA, 25 bp, Artificial
  Probe
atcctcacctcattatggaactctg

SEQ ID NO: 171091 - DNA, 25 bp, Artificial
  Probe
catcctcacctcattatggaactct

SEQ ID NO: 171092 - DNA, 25 bp, Artificial
  Probe
aagtgaaagacaagaaagatgagac

SEQ ID NO: 171093 - DNA, 25 bp, Artificial
  Probe
caagtgaaagacaagaaagatgaga

SEQ ID NO: 171094 - DNA, 25 bp, Artificial
  Probe
gtgaaagacaagaaagatgagactc

SEQ ID NO: 171095 - DNA, 25 bp, Artificial
  Probe
aacagagtaaagtggaaggaagttt

SEQ ID NO: 171096 - DNA, 25 bp, Artificial
  Probe
tgaaagacaagaaagatgagactct

SEQ ID NO: 171097 - DNA, 25 bp, Artificial
  Probe
aaagacaagaaagatgagactctgg

SEQ ID NO: 171098 - DNA, 25 bp, Artificial
  Probe
gaaagacaagaaagatgagactctg

SEQ ID NO: 171099 - DNA, 25 bp, Artificial
  Probe
acagagtaaagtggaaggaagttta

SEQ ID NO: 171100 - DNA, 25 bp, Artificial
  Probe
caacagagtaaagtggaaggaagtt

SEQ ID NO: 171101 - DNA, 25 bp, Artificial
  Probe
agtgaaagacaagaaagatgagact

SEQ ID NO: 171102 - DNA, 25 bp, Artificial
  Probe
agtaatggaactttgatgatgcctt

SEQ ID NO: 171103 - DNA, 25 bp, Artificial
  Probe
aagtggaaggaagtttattcagaaa

SEQ ID NO: 171104 - DNA, 25 bp, Artificial
  Probe
aaagtggaaggaagtttattcagaa

SEQ ID NO: 171105 - DNA, 25 bp, Artificial
  Probe
aagacaagaaagatgagactctggt

SEQ ID NO: 171106 - DNA, 25 bp, Artificial
  Probe
cagagtaaagtggaaggaagtttat

SEQ ID NO: 171107 - DNA, 25 bp, Artificial
  Probe
tctacaagagcaagccaacagagta

SEQ ID NO: 171108 - DNA, 25 bp, Artificial
  Probe
ttccttgggtctcagtttctttctc

SEQ ID NO: 171109 - DNA, 25 bp, Artificial
  Probe
cttccttgggtctcagtttctttct

SEQ ID NO: 171110 - DNA, 25 bp, Artificial
  Probe
tacaagagcaagccaacagagtaaa

SEQ ID NO: 171111 - DNA, 25 bp, Artificial
  Probe
agacaagaaagatgagactctggtg

SEQ ID NO: 171112 - DNA, 25 bp, Artificial
  Probe
agtaaagtggaaggaagtttattca

SEQ ID NO: 171113 - DNA, 25 bp, Artificial
  Probe
gtaaagtggaaggaagtttattcag

SEQ ID NO: 171114 - DNA, 25 bp, Artificial
  Probe
taaagtggaaggaagtttattcaga

SEQ ID NO: 171115 - DNA, 25 bp, Artificial
  Probe
agagtaaagtggaaggaagtttatt

SEQ ID NO: 171116 - DNA, 25 bp, Artificial
  Probe
gtacaggaagatctacaagagcaag

SEQ ID NO: 171117 - DNA, 25 bp, Artificial
  Probe
gatctacaagagcaagccaacagag

SEQ ID NO: 171118 - DNA, 25 bp, Artificial
  Probe
ctcattatggaactctgggagaagg

SEQ ID NO: 171119 - DNA, 25 bp, Artificial
  Probe
cctcattatggaactctgggagaag

SEQ ID NO: 171120 - DNA, 25 bp, Artificial
  Probe
gagtaaagtggaaggaagtttattc

SEQ ID NO: 171121 - DNA, 25 bp, Artificial
  Probe
aatggaactttgatgatgcctttgc

SEQ ID NO: 171122 - DNA, 25 bp, Artificial
  Probe
ctgcaagtgaaagacaagaaagatg

SEQ ID NO: 171123 - DNA, 25 bp, Artificial
  Probe
tcctcacctcattatggaactctgg

SEQ ID NO: 171124 - DNA, 25 bp, Artificial
  Probe
gacaagaaagatgagactctggtgt

SEQ ID NO: 171125 - DNA, 25 bp, Artificial
  Probe
atctacaagagcaagccaacagagt

SEQ ID NO: 171126 - DNA, 25 bp, Artificial
  Probe
tgcaagtgaaagacaagaaagatga

SEQ ID NO: 171127 - DNA, 25 bp, Artificial
  Probe
tccttgggtctcagtttctttctct

SEQ ID NO: 171128 - DNA, 25 bp, Artificial
  Probe
acaagaaagatgagactctggtgtg

SEQ ID NO: 171129 - DNA, 25 bp, Artificial
  Probe
gaataggagggacatggaaccattt

SEQ ID NO: 171130 - DNA, 25 bp, Artificial
  Probe
acctcattatggaactctgggagaa

SEQ ID NO: 171131 - DNA, 25 bp, Artificial
  Probe
gataatggcgtgttatagcaatgtt

SEQ ID NO: 171132 - DNA, 25 bp, Artificial
  Probe
taggataatggcgtgttatagcaat

SEQ ID NO: 171133 - DNA, 25 bp, Artificial
  Probe
ttaggataatggcgtgttatagcaa

SEQ ID NO: 171134 - DNA, 25 bp, Artificial
  Probe
attaggataatggcgtgttatagca

SEQ ID NO: 171135 - DNA, 25 bp, Artificial
  Probe
cagtccatcaagtaacagaagcatt

SEQ ID NO: 171136 - DNA, 25 bp, Artificial
  Probe
gtaatcaccacataggcacacatac

SEQ ID NO: 171137 - DNA, 25 bp, Artificial
  Probe
gaagtatgacgcaactatggtagaa

SEQ ID NO: 171138 - DNA, 25 bp, Artificial
  Probe
aggataatggcgtgttatagcaatg

SEQ ID NO: 171139 - DNA, 25 bp, Artificial
  Probe
attatactgtggtctctcctagtgt

SEQ ID NO: 171140 - DNA, 25 bp, Artificial
  Probe
ctgaagtatgacgcaactatggtag

SEQ ID NO: 171141 - DNA, 25 bp, Artificial
  Probe
ggataatggcgtgttatagcaatgt

SEQ ID NO: 171142 - DNA, 25 bp, Artificial
  Probe
ttatactgtggtctctcctagtgtc

SEQ ID NO: 171143 - DNA, 25 bp, Artificial
  Probe
tgttggatacgaagttcttcattga

SEQ ID NO: 171144 - DNA, 25 bp, Artificial
  Probe
gtgttggatacgaagttcttcattg

SEQ ID NO: 171145 - DNA, 25 bp, Artificial
  Probe
gttggatacgaagttcttcattgat

SEQ ID NO: 171146 - DNA, 25 bp, Artificial
  Probe
tgaagtatgacgcaactatggtaga

SEQ ID NO: 171147 - DNA, 25 bp, Artificial
  Probe
tctgaagtatgacgcaactatggta

SEQ ID NO: 171148 - DNA, 25 bp, Artificial
  Probe
ttattcttagaacttggaagcactc

SEQ ID NO: 171149 - DNA, 25 bp, Artificial
  Probe
ttacaaggtacacgagttgatgatg

SEQ ID NO: 171150 - DNA, 25 bp, Artificial
  Probe
gttacaaggtacacgagttgatgat

SEQ ID NO: 171151 - DNA, 25 bp, Artificial
  Probe
acagtccatcaagtaacagaagcat

SEQ ID NO: 171152 - DNA, 25 bp, Artificial
  Probe
ggtgttggatacgaagttcttcatt

SEQ ID NO: 171153 - DNA, 25 bp, Artificial
  Probe
ttctggtgttggatacgaagttctt

SEQ ID NO: 171154 - DNA, 25 bp, Artificial
  Probe
taatcaccacataggcacacatacc

SEQ ID NO: 171155 - DNA, 25 bp, Artificial
  Probe
tattatactgtggtctctcctagtg

SEQ ID NO: 171156 - DNA, 25 bp, Artificial
  Probe
attattcttagaacttggaagcact

SEQ ID NO: 171157 - DNA, 25 bp, Artificial
  Probe
cattattcttagaacttggaagcac

SEQ ID NO: 171158 - DNA, 25 bp, Artificial
  Probe
tcattattcttagaacttggaagca

SEQ ID NO: 171159 - DNA, 25 bp, Artificial
  Probe
ttctgaagtatgacgcaactatggt

SEQ ID NO: 171160 - DNA, 25 bp, Artificial
  Probe
tgtaatcaccacataggcacacata

SEQ ID NO: 171161 - DNA, 25 bp, Artificial
  Probe
aaggtacacgagttgatgatgctaa

SEQ ID NO: 171162 - DNA, 25 bp, Artificial
  Probe
tattcttagaacttggaagcactcc

SEQ ID NO: 171163 - DNA, 25 bp, Artificial
  Probe
tggatacgaagttcttcattgataa

SEQ ID NO: 171164 - DNA, 25 bp, Artificial
  Probe
ttggatacgaagttcttcattgata

SEQ ID NO: 171165 - DNA, 25 bp, Artificial
  Probe
tatactgtggtctctcctagtgtcc

SEQ ID NO: 171166 - DNA, 25 bp, Artificial
  Probe
ttggaagcactcctcagaatatctt

SEQ ID NO: 171167 - DNA, 25 bp, Artificial
  Probe
ccttgctgattatttgaccattgtt

SEQ ID NO: 171168 - DNA, 25 bp, Artificial
  Probe
taccttgctgattatttgaccattg

SEQ ID NO: 171169 - DNA, 25 bp, Artificial
  Probe
agtccatcaagtaacagaagcattt

SEQ ID NO: 171170 - DNA, 25 bp, Artificial
  Probe
tgacgcaactatggtagaaataaac

SEQ ID NO: 171171 - DNA, 25 bp, Artificial
  Probe
tggtgttggatacgaagttcttcat

SEQ ID NO: 171172 - DNA, 25 bp, Artificial
  Probe
aggtacacgagttgatgatgctaag

SEQ ID NO: 171173 - DNA, 25 bp, Artificial
  Probe
gtccatcaagtaacagaagcattta

SEQ ID NO: 171174 - DNA, 25 bp, Artificial
  Probe
cacagtccatcaagtaacagaagca

SEQ ID NO: 171175 - DNA, 25 bp, Artificial
  Probe
aatggtagaagatgctgatggaaag

SEQ ID NO: 171176 - DNA, 25 bp, Artificial
  Probe
ttaacgaagagacattcaagcagat

SEQ ID NO: 171177 - DNA, 25 bp, Artificial
  Probe
aagaggagatgatggacatagtgaa

SEQ ID NO: 171178 - DNA, 25 bp, Artificial
  Probe
cacatacgcacattacctcttcaat

SEQ ID NO: 171179 - DNA, 25 bp, Artificial
  Probe
taacgaagagacattcaagcagatc

SEQ ID NO: 171180 - DNA, 25 bp, Artificial
  Probe
cgacatcaataaagacggctacata

SEQ ID NO: 171181 - DNA, 25 bp, Artificial
  Probe
taaagacggctacataaacaaagag

SEQ ID NO: 171182 - DNA, 25 bp, Artificial
  Probe
aacaaagaggagatgatggacatag

SEQ ID NO: 171183 - DNA, 25 bp, Artificial
  Probe
aaacaaagaggagatgatggacata

SEQ ID NO: 171184 - DNA, 25 bp, Artificial
  Probe
ggctacataaacaaagaggagatga

SEQ ID NO: 171185 - DNA, 25 bp, Artificial
  Probe
gacatcaataaagacggctacataa

SEQ ID NO: 171186 - DNA, 25 bp, Artificial
  Probe
gaggagatgatggacatagtgaaag

SEQ ID NO: 171187 - DNA, 25 bp, Artificial
  Probe
agaggagatgatggacatagtgaaa

SEQ ID NO: 171188 - DNA, 25 bp, Artificial
  Probe
aaagaggagatgatggacatagtga

SEQ ID NO: 171189 - DNA, 25 bp, Artificial
  Probe
caaagaggagatgatggacatagtg

SEQ ID NO: 171190 - DNA, 25 bp, Artificial
  Probe
tcaataaagacggctacataaacaa

SEQ ID NO: 171191 - DNA, 25 bp, Artificial
  Probe
aaagacggctacataaacaaagagg

SEQ ID NO: 171192 - DNA, 25 bp, Artificial
  Probe
acaaagaggagatgatggacatagt

SEQ ID NO: 171193 - DNA, 25 bp, Artificial
  Probe
atcaataaagacggctacataaaca

SEQ ID NO: 171194 - DNA, 25 bp, Artificial
  Probe
acatcaataaagacggctacataaa

SEQ ID NO: 171195 - DNA, 25 bp, Artificial
  Probe
ataaagacggctacataaacaaaga

SEQ ID NO: 171196 - DNA, 25 bp, Artificial
  Probe
gctacataaacaaagaggagatgat

SEQ ID NO: 171197 - DNA, 25 bp, Artificial
  Probe
catcaataaagacggctacataaac

SEQ ID NO: 171198 - DNA, 25 bp, Artificial
  Probe
acatacgcacattacctcttcaatg

SEQ ID NO: 171199 - DNA, 25 bp, Artificial
  Probe
cggctacataaacaaagaggagatg

SEQ ID NO: 171200 - DNA, 25 bp, Artificial
  Probe
ccagaggtagggactaataattctc

SEQ ID NO: 171201 - DNA, 25 bp, Artificial
  Probe
acggctacataaacaaagaggagat

SEQ ID NO: 171202 - DNA, 25 bp, Artificial
  Probe
caataaagacggctacataaacaaa

SEQ ID NO: 171203 - DNA, 25 bp, Artificial
  Probe
aagacggctacataaacaaagagga

SEQ ID NO: 171204 - DNA, 25 bp, Artificial
  Probe
tacgacatcaataaagacggctaca

SEQ ID NO: 171205 - DNA, 25 bp, Artificial
  Probe
gacgaacttcaccaagagagaactg

SEQ ID NO: 171206 - DNA, 25 bp, Artificial
  Probe
agacgaacttcaccaagagagaact

SEQ ID NO: 171207 - DNA, 25 bp, Artificial
  Probe
cagacgaacttcaccaagagagaac

SEQ ID NO: 171208 - DNA, 25 bp, Artificial
  Probe
tagtgaaagccatctatgacatgat

SEQ ID NO: 171209 - DNA, 25 bp, Artificial
  Probe
aataaagacggctacataaacaaag

SEQ ID NO: 171210 - DNA, 25 bp, Artificial
  Probe
gtacgacatcaataaagacggctac

SEQ ID NO: 171211 - DNA, 25 bp, Artificial
  Probe
gcacatacgcacattacctcttcaa

SEQ ID NO: 171212 - DNA, 25 bp, Artificial
  Probe
aggagatgatggacatagtgaaagc

SEQ ID NO: 171213 - DNA, 25 bp, Artificial
  Probe
gacggctacataaacaaagaggaga

SEQ ID NO: 171214 - DNA, 25 bp, Artificial
  Probe
agacggctacataaacaaagaggag

SEQ ID NO: 171215 - DNA, 25 bp, Artificial
  Probe
atttgtacgacatcaataaagacgg

SEQ ID NO: 171216 - DNA, 25 bp, Artificial
  Probe
aaatacacctatcctgtgctcaaag

SEQ ID NO: 171217 - DNA, 25 bp, Artificial
  Probe
gaaatacacctatcctgtgctcaaa

SEQ ID NO: 171218 - DNA, 25 bp, Artificial
  Probe
acgacatcaataaagacggctacat

SEQ ID NO: 171219 - DNA, 25 bp, Artificial
  Probe
tccagaggtagggactaataattct

SEQ ID NO: 171220 - DNA, 25 bp, Artificial
  Probe
acagacgaacttcaccaagagagaa

SEQ ID NO: 171221 - DNA, 25 bp, Artificial
  Probe
cttagccaagtgttatccaagttaa

SEQ ID NO: 171222 - DNA, 25 bp, Artificial
  Probe
atagtcaagtctctgtcaagtgaac

SEQ ID NO: 171223 - DNA, 25 bp, Artificial
  Probe
catagtcaagtctctgtcaagtgaa

SEQ ID NO: 171224 - DNA, 25 bp, Artificial
  Probe
ggaatggattacatagtcaagtctc

SEQ ID NO: 171225 - DNA, 25 bp, Artificial
  Probe
tggagactcacagatacagagatta

SEQ ID NO: 171226 - DNA, 25 bp, Artificial
  Probe
ggagactcacagatacagagattag

SEQ ID NO: 171227 - DNA, 25 bp, Artificial
  Probe
tacatagtcaagtctctgtcaagtg

SEQ ID NO: 171228 - DNA, 25 bp, Artificial
  Probe
ggattacatagtcaagtctctgtca

SEQ ID NO: 171229 - DNA, 25 bp, Artificial
  Probe
tggattacatagtcaagtctctgtc

SEQ ID NO: 171230 - DNA, 25 bp, Artificial
  Probe
tcagcaagttgaataagcaagatat

SEQ ID NO: 171231 - DNA, 25 bp, Artificial
  Probe
ttacatagtcaagtctctgtcaagt

SEQ ID NO: 171232 - DNA, 25 bp, Artificial
  Probe
atggattacatagtcaagtctctgt

SEQ ID NO: 171233 - DNA, 25 bp, Artificial
  Probe
aatggattacatagtcaagtctctg

SEQ ID NO: 171234 - DNA, 25 bp, Artificial
  Probe
gagactcacagatacagagattaga

SEQ ID NO: 171235 - DNA, 25 bp, Artificial
  Probe
aattcaattagtctcctgctgcttg

SEQ ID NO: 171236 - DNA, 25 bp, Artificial
  Probe
acatagtcaagtctctgtcaagtga

SEQ ID NO: 171237 - DNA, 25 bp, Artificial
  Probe
gaatggattacatagtcaagtctct

SEQ ID NO: 171238 - DNA, 25 bp, Artificial
  Probe
ctggagactcacagatacagagatt

SEQ ID NO: 171239 - DNA, 25 bp, Artificial
  Probe
gatctcagtgttattacaggtgctt

SEQ ID NO: 171240 - DNA, 25 bp, Artificial
  Probe
atgatctcagtgttattacaggtgc

SEQ ID NO: 171241 - DNA, 25 bp, Artificial
  Probe
tagtcaagtctctgtcaagtgaacc

SEQ ID NO: 171242 - DNA, 25 bp, Artificial
  Probe
tgatgatctcagtgttattacaggt

SEQ ID NO: 171243 - DNA, 25 bp, Artificial
  Probe
atcctagctcagaatcttcacaatt

SEQ ID NO: 171244 - DNA, 25 bp, Artificial
  Probe
aatcctagctcagaatcttcacaat

SEQ ID NO: 171245 - DNA, 25 bp, Artificial
  Probe
agactcacagatacagagattagaa

SEQ ID NO: 171246 - DNA, 25 bp, Artificial
  Probe
gatgatctcagtgttattacaggtg

SEQ ID NO: 171247 - DNA, 25 bp, Artificial
  Probe
attacatagtcaagtctctgtcaag

SEQ ID NO: 171248 - DNA, 25 bp, Artificial
  Probe
gattacatagtcaagtctctgtcaa

SEQ ID NO: 171249 - DNA, 25 bp, Artificial
  Probe
tgatctcagtgttattacaggtgct

SEQ ID NO: 171250 - DNA, 25 bp, Artificial
  Probe
attcaattagtctcctgctgcttgt

SEQ ID NO: 171251 - DNA, 25 bp, Artificial
  Probe
tctggacttcattaaactggacttt

SEQ ID NO: 171252 - DNA, 25 bp, Artificial
  Probe
actggagactcacagatacagagat

SEQ ID NO: 171253 - DNA, 25 bp, Artificial
  Probe
ctctggacttcattaaactggactt

SEQ ID NO: 171254 - DNA, 25 bp, Artificial
  Probe
atgatgatctcagtgttattacagg

SEQ ID NO: 171255 - DNA, 25 bp, Artificial
  Probe
tgtttatttcatttgacccacttgt

SEQ ID NO: 171256 - DNA, 25 bp, Artificial
  Probe
aactggagactcacagatacagaga

SEQ ID NO: 171257 - DNA, 25 bp, Artificial
  Probe
ctcagaatcttcacaatttggtcaa

SEQ ID NO: 171258 - DNA, 25 bp, Artificial
  Probe
gggaatggattacatagtcaagtct

SEQ ID NO: 171259 - DNA, 25 bp, Artificial
  Probe
agggaatggattacatagtcaagtc

SEQ ID NO: 171260 - DNA, 25 bp, Artificial
  Probe
gagggaatggattacatagtcaagt

SEQ ID NO: 171261 - DNA, 25 bp, Artificial
  Probe
agagggaatggattacatagtcaag

SEQ ID NO: 171262 - DNA, 25 bp, Artificial
  Probe
gagagggaatggattacatagtcaa

SEQ ID NO: 171263 - DNA, 25 bp, Artificial
  Probe
attggagagggaatggattacatag

SEQ ID NO: 171264 - DNA, 25 bp, Artificial
  Probe
tgatgatgatgatctcagtgttatt

SEQ ID NO: 171265 - DNA, 25 bp, Artificial
  Probe
ttgatgatgatgatctcagtgttat

SEQ ID NO: 171266 - DNA, 25 bp, Artificial
  Probe
atctgtgtaacttcaggatctgttc

SEQ ID NO: 171267 - DNA, 25 bp, Artificial
  Probe
catctgtgtaacttcaggatctgtt

SEQ ID NO: 171268 - DNA, 25 bp, Artificial
  Probe
gtgtaacttcaggatctgttctgtt

SEQ ID NO: 171269 - DNA, 25 bp, Artificial
  Probe
ctgtgtaacttcaggatctgttctg

SEQ ID NO: 171270 - DNA, 25 bp, Artificial
  Probe
tctgtgtaacttcaggatctgttct

SEQ ID NO: 171271 - DNA, 25 bp, Artificial
  Probe
tgtgtaacttcaggatctgttctgt

SEQ ID NO: 171272 - DNA, 25 bp, Artificial
  Probe
ccatctgtgtaacttcaggatctgt

SEQ ID NO: 171273 - DNA, 25 bp, Artificial
  Probe
gatctgttctgtttcaccatgtaac

SEQ ID NO: 171274 - DNA, 25 bp, Artificial
  Probe
ggatctgttctgtttcaccatgtaa

SEQ ID NO: 171275 - DNA, 25 bp, Artificial
  Probe
taacttcaggatctgttctgtttca

SEQ ID NO: 171276 - DNA, 25 bp, Artificial
  Probe
tgtaacttcaggatctgttctgttt

SEQ ID NO: 171277 - DNA, 25 bp, Artificial
  Probe
aggatctgttctgtttcaccatgta

SEQ ID NO: 171278 - DNA, 25 bp, Artificial
  Probe
gtaacttcaggatctgttctgtttc

SEQ ID NO: 171279 - DNA, 25 bp, Artificial
  Probe
aacttcaggatctgttctgtttcac

SEQ ID NO: 171280 - DNA, 25 bp, Artificial
  Probe
gccatctgtgtaacttcaggatctg

SEQ ID NO: 171281 - DNA, 25 bp, Artificial
  Probe
tacgtaaggactccaagatgtacaa

SEQ ID NO: 171282 - DNA, 25 bp, Artificial
  Probe
actacgtaaggactccaagatgtac

SEQ ID NO: 171283 - DNA, 25 bp, Artificial
  Probe
cactacgtaaggactccaagatgta

SEQ ID NO: 171284 - DNA, 25 bp, Artificial
  Probe
ctacgtaaggactccaagatgtaca

SEQ ID NO: 171285 - DNA, 25 bp, Artificial
  Probe
ttcaggatctgttctgtttcaccat

SEQ ID NO: 171286 - DNA, 25 bp, Artificial
  Probe
gtttcaccatgtaacacacaataca

SEQ ID NO: 171287 - DNA, 25 bp, Artificial
  Probe
acgtaaggactccaagatgtacaag

SEQ ID NO: 171288 - DNA, 25 bp, Artificial
  Probe
cttcaggatctgttctgtttcacca

SEQ ID NO: 171289 - DNA, 25 bp, Artificial
  Probe
acttcaggatctgttctgtttcacc

SEQ ID NO: 171290 - DNA, 25 bp, Artificial
  Probe
tcaggatctgttctgtttcaccatg

SEQ ID NO: 171291 - DNA, 25 bp, Artificial
  Probe
cgtaaggactccaagatgtacaagg

SEQ ID NO: 171292 - DNA, 25 bp, Artificial
  Probe
taaggactccaagatgtacaaggac

SEQ ID NO: 171293 - DNA, 25 bp, Artificial
  Probe
gtaaggactccaagatgtacaagga

SEQ ID NO: 171294 - DNA, 25 bp, Artificial
  Probe
caggatctgttctgtttcaccatgt

SEQ ID NO: 171295 - DNA, 25 bp, Artificial
  Probe
tgtttcaccatgtaacacacaatac

SEQ ID NO: 171296 - DNA, 25 bp, Artificial
  Probe
ctgtttcaccatgtaacacacaata

SEQ ID NO: 171297 - DNA, 25 bp, Artificial
  Probe
atctgttctgtttcaccatgtaaca

SEQ ID NO: 171298 - DNA, 25 bp, Artificial
  Probe
catggaggagaaggagatgttcgag

SEQ ID NO: 171299 - DNA, 25 bp, Artificial
  Probe
cgccatctgtgtaacttcaggatct

SEQ ID NO: 171300 - DNA, 25 bp, Artificial
  Probe
tctgtttcaccatgtaacacacaat

SEQ ID NO: 171301 - DNA, 25 bp, Artificial
  Probe
ttctgtttcaccatgtaacacacaa

SEQ ID NO: 171302 - DNA, 25 bp, Artificial
  Probe
tctgttctgtttcaccatgtaacac

SEQ ID NO: 171303 - DNA, 25 bp, Artificial
  Probe
ctgttctgtttcaccatgtaacaca

SEQ ID NO: 171304 - DNA, 25 bp, Artificial
  Probe
acgccatctgtgtaacttcaggatc

SEQ ID NO: 171305 - DNA, 25 bp, Artificial
  Probe
gttctgtttcaccatgtaacacaca

SEQ ID NO: 171306 - DNA, 25 bp, Artificial
  Probe
tgttctgtttcaccatgtaacacac

SEQ ID NO: 171307 - DNA, 25 bp, Artificial
  Probe
cacgccatctgtgtaacttcaggat

SEQ ID NO: 171308 - DNA, 25 bp, Artificial
  Probe
gcactacgtaaggactccaagatgt

SEQ ID NO: 171309 - DNA, 25 bp, Artificial
  Probe
gtgcatggaggagaaggagatgttc

SEQ ID NO: 171310 - DNA, 25 bp, Artificial
  Probe
tttcaccatgtaacacacaatacat

SEQ ID NO: 171311 - DNA, 25 bp, Artificial
  Probe
ggtccttatcttcactcatatccaa

SEQ ID NO: 171312 - DNA, 25 bp, Artificial
  Probe
atcttaactcacacaacattcctca

SEQ ID NO: 171313 - DNA, 25 bp, Artificial
  Probe
tcttaactcacacaacattcctcaa

SEQ ID NO: 171314 - DNA, 25 bp, Artificial
  Probe
tatcttcactcatatccaactcagg

SEQ ID NO: 171315 - DNA, 25 bp, Artificial
  Probe
cttaactcacacaacattcctcaat

SEQ ID NO: 171316 - DNA, 25 bp, Artificial
  Probe
gtccttatcttcactcatatccaac

SEQ ID NO: 171317 - DNA, 25 bp, Artificial
  Probe
tccttatcttcactcatatccaact

SEQ ID NO: 171318 - DNA, 25 bp, Artificial
  Probe
ccttatcttcactcatatccaactc

SEQ ID NO: 171319 - DNA, 25 bp, Artificial
  Probe
gatcttaactcacacaacattcctc

SEQ ID NO: 171320 - DNA, 25 bp, Artificial
  Probe
tatcctactgagttgtaccattctt

SEQ ID NO: 171321 - DNA, 25 bp, Artificial
  Probe
ttatcctactgagttgtaccattct

SEQ ID NO: 171322 - DNA, 25 bp, Artificial
  Probe
ttatcttcactcatatccaactcag

SEQ ID NO: 171323 - DNA, 25 bp, Artificial
  Probe
cttatcttcactcatatccaactca

SEQ ID NO: 171324 - DNA, 25 bp, Artificial
  Probe
atcttcactcatatccaactcagga

SEQ ID NO: 171325 - DNA, 25 bp, Artificial
  Probe
aggaattggtatgtaagatgtaagt

SEQ ID NO: 171326 - DNA, 25 bp, Artificial
  Probe
tgtcttagttacattctattgctgt

SEQ ID NO: 171327 - DNA, 25 bp, Artificial
  Probe
ggatcttaactcacacaacattcct

SEQ ID NO: 171328 - DNA, 25 bp, Artificial
  Probe
ccatacatacctcctaatctttccc

SEQ ID NO: 171329 - DNA, 25 bp, Artificial
  Probe
taagaagccctaacccaaatgtatt

SEQ ID NO: 171330 - DNA, 25 bp, Artificial
  Probe
tgtttactatcgtcaaaggctaaga

SEQ ID NO: 171331 - DNA, 25 bp, Artificial
  Probe
ctcctaatctttcccaaatagtcca

SEQ ID NO: 171332 - DNA, 25 bp, Artificial
  Probe
acctcctaatctttcccaaatagtc

SEQ ID NO: 171333 - DNA, 25 bp, Artificial
  Probe
cctcctaatctttcccaaatagtcc

SEQ ID NO: 171334 - DNA, 25 bp, Artificial
  Probe
gccatacatacctcctaatctttcc

SEQ ID NO: 171335 - DNA, 25 bp, Artificial
  Probe
tcttcactcatatccaactcaggac

SEQ ID NO: 171336 - DNA, 25 bp, Artificial
  Probe
ttaagaagccctaacccaaatgtat

SEQ ID NO: 171337 - DNA, 25 bp, Artificial
  Probe
cctaatctttcccaaatagtccaac

SEQ ID NO: 171338 - DNA, 25 bp, Artificial
  Probe
acatacctcctaatctttcccaaat

SEQ ID NO: 171339 - DNA, 25 bp, Artificial
  Probe
catacatacctcctaatctttccca

SEQ ID NO: 171340 - DNA, 25 bp, Artificial
  Probe
tagttacattctattgctgtgaaga

SEQ ID NO: 171341 - DNA, 25 bp, Artificial
  Probe
tcttagttacattctattgctgtga

SEQ ID NO: 171342 - DNA, 25 bp, Artificial
  Probe
gtcttagttacattctattgctgtg

SEQ ID NO: 171343 - DNA, 25 bp, Artificial
  Probe
cttctgttcatagggtgcttcttaa

SEQ ID NO: 171344 - DNA, 25 bp, Artificial
  Probe
tcctaatctttcccaaatagtccaa

SEQ ID NO: 171345 - DNA, 25 bp, Artificial
  Probe
aagaagccctaacccaaatgtattt

SEQ ID NO: 171346 - DNA, 25 bp, Artificial
  Probe
ttaactcacacaacattcctcaatg

SEQ ID NO: 171347 - DNA, 25 bp, Artificial
  Probe
tacatacctcctaatctttcccaaa

SEQ ID NO: 171348 - DNA, 25 bp, Artificial
  Probe
gttcatagggtgcttcttaactttg

SEQ ID NO: 171349 - DNA, 25 bp, Artificial
  Probe
actcatatccaactcaggacacttc

SEQ ID NO: 171350 - DNA, 25 bp, Artificial
  Probe
cttcactcatatccaactcaggaca

SEQ ID NO: 171351 - DNA, 25 bp, Artificial
  Probe
gggtccttatcttcactcatatcca

SEQ ID NO: 171352 - DNA, 25 bp, Artificial
  Probe
tgttcatagggtgcttcttaacttt

SEQ ID NO: 171353 - DNA, 25 bp, Artificial
  Probe
gtgcttcttaactttgcttgagata

SEQ ID NO: 171354 - DNA, 25 bp, Artificial
  Probe
aacctcaaagtttactgcctcataa

SEQ ID NO: 171355 - DNA, 25 bp, Artificial
  Probe
taacctcaaagtttactgcctcata

SEQ ID NO: 171356 - DNA, 25 bp, Artificial
  Probe
gtctatgaagatgagaagcggatta

SEQ ID NO: 171357 - DNA, 25 bp, Artificial
  Probe
ctatgaagatgagaagcggattatc

SEQ ID NO: 171358 - DNA, 25 bp, Artificial
  Probe
tctatgaagatgagaagcggattat

SEQ ID NO: 171359 - DNA, 25 bp, Artificial
  Probe
agtctatgaagatgagaagcggatt

SEQ ID NO: 171360 - DNA, 25 bp, Artificial
  Probe
aagtctatgaagatgagaagcggat

SEQ ID NO: 171361 - DNA, 25 bp, Artificial
  Probe
tactactagatcacttgtcctcttg

SEQ ID NO: 171362 - DNA, 25 bp, Artificial
  Probe
actactagatcacttgtcctcttgc

SEQ ID NO: 171363 - DNA, 25 bp, Artificial
  Probe
gatactactagatcacttgtcctct

SEQ ID NO: 171364 - DNA, 25 bp, Artificial
  Probe
tatccagaatcagatcacagctaag

SEQ ID NO: 171365 - DNA, 25 bp, Artificial
  Probe
cttatccagaatcagatcacagcta

SEQ ID NO: 171366 - DNA, 25 bp, Artificial
  Probe
ttatccagaatcagatcacagctaa

SEQ ID NO: 171367 - DNA, 25 bp, Artificial
  Probe
atactactagatcacttgtcctctt

SEQ ID NO: 171368 - DNA, 25 bp, Artificial
  Probe
ctactagatcacttgtcctcttgcc

SEQ ID NO: 171369 - DNA, 25 bp, Artificial
  Probe
tatggcttatccagaatcagatcac

SEQ ID NO: 171370 - DNA, 25 bp, Artificial
  Probe
aaagttaatgtcaaggaaaggatgc

SEQ ID NO: 171371 - DNA, 25 bp, Artificial
  Probe
tggaaagttaatgtcaaggaaagga

SEQ ID NO: 171372 - DNA, 25 bp, Artificial
  Probe
gtggaaagttaatgtcaaggaaagg

SEQ ID NO: 171373 - DNA, 25 bp, Artificial
  Probe
tgtggaaagttaatgtcaaggaaag

SEQ ID NO: 171374 - DNA, 25 bp, Artificial
  Probe
ttatggcttatccagaatcagatca

SEQ ID NO: 171375 - DNA, 25 bp, Artificial
  Probe
tttgcctaaatggaaacctgataaa

SEQ ID NO: 171376 - DNA, 25 bp, Artificial
  Probe
ggaaagttaatgtcaaggaaaggat

SEQ ID NO: 171377 - DNA, 25 bp, Artificial
  Probe
actgtgaagagactttattgcctat

SEQ ID NO: 171378 - DNA, 25 bp, Artificial
  Probe
ttatctgtttctgagaggatgcttt

SEQ ID NO: 171379 - DNA, 25 bp, Artificial
  Probe
gattatctgtttctgagaggatgct

SEQ ID NO: 171380 - DNA, 25 bp, Artificial
  Probe
gagagtttggcagaaatgttgaaag

SEQ ID NO: 171381 - DNA, 25 bp, Artificial
  Probe
tatctgtttctgagaggatgctttc

SEQ ID NO: 171382 - DNA, 25 bp, Artificial
  Probe
attatctgtttctgagaggatgctt

SEQ ID NO: 171383 - DNA, 25 bp, Artificial
  Probe
atgaagatgagaagcggattatctg

SEQ ID NO: 171384 - DNA, 25 bp, Artificial
  Probe
gaagatgagaagcggattatctgtt

SEQ ID NO: 171385 - DNA, 25 bp, Artificial
  Probe
tatgaagatgagaagcggattatct

SEQ ID NO: 171386 - DNA, 25 bp, Artificial
  Probe
gagtttggcagaaatgttgaaagtc

SEQ ID NO: 171387 - DNA, 25 bp, Artificial
  Probe
agagagtttggcagaaatgttgaaa

SEQ ID NO: 171388 - DNA, 25 bp, Artificial
  Probe
cggattatctgtttctgagaggatg

SEQ ID NO: 171389 - DNA, 25 bp, Artificial
  Probe
atccagaatcagatcacagctaagg

SEQ ID NO: 171390 - DNA, 25 bp, Artificial
  Probe
cactgtgaagagactttattgccta

SEQ ID NO: 171391 - DNA, 25 bp, Artificial
  Probe
ttgtggaaagttaatgtcaaggaaa

SEQ ID NO: 171392 - DNA, 25 bp, Artificial
  Probe
tttgtggaaagttaatgtcaaggaa

SEQ ID NO: 171393 - DNA, 25 bp, Artificial
  Probe
ggattatctgtttctgagaggatgc

SEQ ID NO: 171394 - DNA, 25 bp, Artificial
  Probe
ctgtgaagagactttattgcctatt

SEQ ID NO: 171395 - DNA, 25 bp, Artificial
  Probe
agagtttggcagaaatgttgaaagt

SEQ ID NO: 171396 - DNA, 25 bp, Artificial
  Probe
tacactgtgaagagactttattgcc

SEQ ID NO: 171397 - DNA, 25 bp, Artificial
  Probe
atggcttatccagaatcagatcaca

SEQ ID NO: 171398 - DNA, 25 bp, Artificial
  Probe
atacactgtgaagagactttattgc

SEQ ID NO: 171399 - DNA, 25 bp, Artificial
  Probe
tcttgcccgctcatttgttaataaa

SEQ ID NO: 171400 - DNA, 25 bp, Artificial
  Probe
gaaagttaatgtcaaggaaaggatg

SEQ ID NO: 171401 - DNA, 25 bp, Artificial
  Probe
aacttagagatggagaacactgagg

SEQ ID NO: 171402 - DNA, 25 bp, Artificial
  Probe
taacagagagatccatgaagaacag

SEQ ID NO: 171403 - DNA, 25 bp, Artificial
  Probe
ctaacagagagatccatgaagaaca

SEQ ID NO: 171404 - DNA, 25 bp, Artificial
  Probe
cttagagatggagaacactgaggtc

SEQ ID NO: 171405 - DNA, 25 bp, Artificial
  Probe
tctaacagagagatccatgaagaac

SEQ ID NO: 171406 - DNA, 25 bp, Artificial
  Probe
gattctggagagactagagtgaagg

SEQ ID NO: 171407 - DNA, 25 bp, Artificial
  Probe
attctggagagactagagtgaagga

SEQ ID NO: 171408 - DNA, 25 bp, Artificial
  Probe
cgattctggagagactagagtgaag

SEQ ID NO: 171409 - DNA, 25 bp, Artificial
  Probe
acttagagatggagaacactgaggt

SEQ ID NO: 171410 - DNA, 25 bp, Artificial
  Probe
aacagagagatccatgaagaacagg

SEQ ID NO: 171411 - DNA, 25 bp, Artificial
  Probe
ttctggagagactagagtgaaggag

SEQ ID NO: 171412 - DNA, 25 bp, Artificial
  Probe
caaagtaatgatggagaaagacagc

SEQ ID NO: 171413 - DNA, 25 bp, Artificial
  Probe
ggtcatatcaattctgcacaactta

SEQ ID NO: 171414 - DNA, 25 bp, Artificial
  Probe
aaagtaatgatggagaaagacagca

SEQ ID NO: 171415 - DNA, 25 bp, Artificial
  Probe
tatgtctgtgcttctaaatgttcgt

SEQ ID NO: 171416 - DNA, 25 bp, Artificial
  Probe
gtctgtgcttctaaatgttcgttaa

SEQ ID NO: 171417 - DNA, 25 bp, Artificial
  Probe
atatgtctgtgcttctaaatgttcg

SEQ ID NO: 171418 - DNA, 25 bp, Artificial
  Probe
tcaaccagaaagataaagaccatca

SEQ ID NO: 171419 - DNA, 25 bp, Artificial
  Probe
tgtctgtgcttctaaatgttcgtta

SEQ ID NO: 171420 - DNA, 25 bp, Artificial
  Probe
ccctgatgacaaatatcctgaatga

SEQ ID NO: 171421 - DNA, 25 bp, Artificial
  Probe
tccctgatgacaaatatcctgaatg

SEQ ID NO: 171422 - DNA, 25 bp, Artificial
  Probe
acttcaaccagaaagataaagacca

SEQ ID NO: 171423 - DNA, 25 bp, Artificial
  Probe
aaccagaaagataaagaccatcaac

SEQ ID NO: 171424 - DNA, 25 bp, Artificial
  Probe
caaccagaaagataaagaccatcaa

SEQ ID NO: 171425 - DNA, 25 bp, Artificial
  Probe
gacttcaaccagaaagataaagacc

SEQ ID NO: 171426 - DNA, 25 bp, Artificial
  Probe
aagtaatgatggagaaagacagcac

SEQ ID NO: 171427 - DNA, 25 bp, Artificial
  Probe
atcaattctgcacaacttagagatg

SEQ ID NO: 171428 - DNA, 25 bp, Artificial
  Probe
tctgtgcttctaaatgttcgttaag

SEQ ID NO: 171429 - DNA, 25 bp, Artificial
  Probe
atgtctgtgcttctaaatgttcgtt

SEQ ID NO: 171430 - DNA, 25 bp, Artificial
  Probe
ctgtgcttctaaatgttcgttaaga

SEQ ID NO: 171431 - DNA, 25 bp, Artificial
  Probe
accagaaagataaagaccatcaacg

SEQ ID NO: 171432 - DNA, 25 bp, Artificial
  Probe
taatgatggagaaagacagcacttc

SEQ ID NO: 171433 - DNA, 25 bp, Artificial
  Probe
cctgatgacaaatatcctgaatgaa

SEQ ID NO: 171434 - DNA, 25 bp, Artificial
  Probe
cagtaagagagcttcctgaagaata

SEQ ID NO: 171435 - DNA, 25 bp, Artificial
  Probe
tcattatgtgtgctagaggagaaac

SEQ ID NO: 171436 - DNA, 25 bp, Artificial
  Probe
ttcaaccagaaagataaagaccatc

SEQ ID NO: 171437 - DNA, 25 bp, Artificial
  Probe
cttcaaccagaaagataaagaccat

SEQ ID NO: 171438 - DNA, 25 bp, Artificial
  Probe
gtaatgatggagaaagacagcactt

SEQ ID NO: 171439 - DNA, 25 bp, Artificial
  Probe
tgacttcaaccagaaagataaagac

SEQ ID NO: 171440 - DNA, 25 bp, Artificial
  Probe
cagcattatcaggtctcagaaagtg

SEQ ID NO: 171441 - DNA, 25 bp, Artificial
  Probe
gtcatatcaattctgcacaacttag

SEQ ID NO: 171442 - DNA, 25 bp, Artificial
  Probe
ccagaaagataaagaccatcaacgg

SEQ ID NO: 171443 - DNA, 25 bp, Artificial
  Probe
cggtcatatcaattctgcacaactt

SEQ ID NO: 171444 - DNA, 25 bp, Artificial
  Probe
tcgattctggagagactagagtgaa

SEQ ID NO: 171445 - DNA, 25 bp, Artificial
  Probe
tcatatcaattctgcacaacttaga

SEQ ID NO: 171446 - DNA, 25 bp, Artificial
  Probe
ggacaattatctatatgccacctga

SEQ ID NO: 171447 - DNA, 25 bp, Artificial
  Probe
ctactgacatccaaggagaagaatt

SEQ ID NO: 171448 - DNA, 25 bp, Artificial
  Probe
actactgacatccaaggagaagaat

SEQ ID NO: 171449 - DNA, 25 bp, Artificial
  Probe
ttactagacactactgacatccaag

SEQ ID NO: 171450 - DNA, 25 bp, Artificial
  Probe
tactagacactactgacatccaagg

SEQ ID NO: 171451 - DNA, 25 bp, Artificial
  Probe
gacaattatctatatgccacctgaa

SEQ ID NO: 171452 - DNA, 25 bp, Artificial
  Probe
aactgaatatcctgatgttgcttgg

SEQ ID NO: 171453 - DNA, 25 bp, Artificial
  Probe
attactagacactactgacatccaa

SEQ ID NO: 171454 - DNA, 25 bp, Artificial
  Probe
aattactagacactactgacatcca

SEQ ID NO: 171455 - DNA, 25 bp, Artificial
  Probe
agacaattactagacactactgaca

SEQ ID NO: 171456 - DNA, 25 bp, Artificial
  Probe
caattactagacactactgacatcc

SEQ ID NO: 171457 - DNA, 25 bp, Artificial
  Probe
cactactgacatccaaggagaagaa

SEQ ID NO: 171458 - DNA, 25 bp, Artificial
  Probe
ctagacactactgacatccaaggag

SEQ ID NO: 171459 - DNA, 25 bp, Artificial
  Probe
tggaattatctctgaacatacctgt

SEQ ID NO: 171460 - DNA, 25 bp, Artificial
  Probe
ggaatagttactgaatacatgccaa

SEQ ID NO: 171461 - DNA, 25 bp, Artificial
  Probe
tagacactactgacatccaaggaga

SEQ ID NO: 171462 - DNA, 25 bp, Artificial
  Probe
atggaattatctctgaacatacctg

SEQ ID NO: 171463 - DNA, 25 bp, Artificial
  Probe
actagacactactgacatccaagga

SEQ ID NO: 171464 - DNA, 25 bp, Artificial
  Probe
acaattactagacactactgacatc

SEQ ID NO: 171465 - DNA, 25 bp, Artificial
  Probe
gacaattactagacactactgacat

SEQ ID NO: 171466 - DNA, 25 bp, Artificial
  Probe
gacactactgacatccaaggagaag

SEQ ID NO: 171467 - DNA, 25 bp, Artificial
  Probe
cagacaattactagacactactgac

SEQ ID NO: 171468 - DNA, 25 bp, Artificial
  Probe
gtcagacaattactagacactactg

SEQ ID NO: 171469 - DNA, 25 bp, Artificial
  Probe
agtcagacaattactagacactact

SEQ ID NO: 171470 - DNA, 25 bp, Artificial
  Probe
aatggaattatctctgaacatacct

SEQ ID NO: 171471 - DNA, 25 bp, Artificial
  Probe
acactactgacatccaaggagaaga

SEQ ID NO: 171472 - DNA, 25 bp, Artificial
  Probe
agacactactgacatccaaggagaa

SEQ ID NO: 171473 - DNA, 25 bp, Artificial
  Probe
aattacctgcacaatatgactcctc

SEQ ID NO: 171474 - DNA, 25 bp, Artificial
  Probe
gaggactatgaacttgttagtacca

SEQ ID NO: 171475 - DNA, 25 bp, Artificial
  Probe
gcacaatatgactcctcctttactt

SEQ ID NO: 171476 - DNA, 25 bp, Artificial
  Probe
agaggactatgaacttgttagtacc

SEQ ID NO: 171477 - DNA, 25 bp, Artificial
  Probe
gataacaaacaaatgggtcttcagc

SEQ ID NO: 171478 - DNA, 25 bp, Artificial
  Probe
aaggagggacaattatctatatgcc

SEQ ID NO: 171479 - DNA, 25 bp, Artificial
  Probe
aggactatgaacttgttagtaccaa

SEQ ID NO: 171480 - DNA, 25 bp, Artificial
  Probe
catgacttgaagactcagaatatct

SEQ ID NO: 171481 - DNA, 25 bp, Artificial
  Probe
gagggacaattatctatatgccacc

SEQ ID NO: 171482 - DNA, 25 bp, Artificial
  Probe
ggagggacaattatctatatgccac

SEQ ID NO: 171483 - DNA, 25 bp, Artificial
  Probe
aggagggacaattatctatatgcca

SEQ ID NO: 171484 - DNA, 25 bp, Artificial
  Probe
aaactgaatatcctgatgttgcttg

SEQ ID NO: 171485 - DNA, 25 bp, Artificial
  Probe
tactgacatccaaggagaagaattt

SEQ ID NO: 171486 - DNA, 25 bp, Artificial
  Probe
gggacaattatctatatgccacctg

SEQ ID NO: 171487 - DNA, 25 bp, Artificial
  Probe
agactcagaatatcttattggacaa

SEQ ID NO: 171488 - DNA, 25 bp, Artificial
  Probe
cacaatatgactcctcctttacttc

SEQ ID NO: 171489 - DNA, 25 bp, Artificial
  Probe
ggaattatctctgaacatacctgta

SEQ ID NO: 171490 - DNA, 25 bp, Artificial
  Probe
ggacatcgacctgttattaatgaag

SEQ ID NO: 171491 - DNA, 25 bp, Artificial
  Probe
tatgtgtgtctgtgtcttctcctta

SEQ ID NO: 171492 - DNA, 25 bp, Artificial
  Probe
gtcttatgtgtgtctgtgtcttctc

SEQ ID NO: 171493 - DNA, 25 bp, Artificial
  Probe
ttatgtgtgtctgtgtcttctcctt

SEQ ID NO: 171494 - DNA, 25 bp, Artificial
  Probe
atgtgtgtctgtgtcttctccttaa

SEQ ID NO: 171495 - DNA, 25 bp, Artificial
  Probe
cttatgtgtgtctgtgtcttctcct

SEQ ID NO: 171496 - DNA, 25 bp, Artificial
  Probe
tcttatgtgtgtctgtgtcttctcc

SEQ ID NO: 171497 - DNA, 25 bp, Artificial
  Probe
ggtcttatgtgtgtctgtgtcttct

SEQ ID NO: 171498 - DNA, 25 bp, Artificial
  Probe
gcacattatggagcattaaacactt

SEQ ID NO: 171499 - DNA, 25 bp, Artificial
  Probe
ttcacttagaagctgcacattatgg

SEQ ID NO: 171500 - DNA, 25 bp, Artificial
  Probe
cacttagaagctgcacattatggag

SEQ ID NO: 171501 - DNA, 25 bp, Artificial
  Probe
gtgtgtctgtgtcttctccttaaac

SEQ ID NO: 171502 - DNA, 25 bp, Artificial
  Probe
cacattatggagcattaaacacttt

SEQ ID NO: 171503 - DNA, 25 bp, Artificial
  Probe
tgtgtgtctgtgtcttctccttaaa

SEQ ID NO: 171504 - DNA, 25 bp, Artificial
  Probe
tcacttagaagctgcacattatgga

SEQ ID NO: 171505 - DNA, 25 bp, Artificial
  Probe
tctgtggttctctcctgtgtaaatg

SEQ ID NO: 171506 - DNA, 25 bp, Artificial
  Probe
gtctgtggttctctcctgtgtaaat

SEQ ID NO: 171507 - DNA, 25 bp, Artificial
  Probe
gtggttctctcctgtgtaaatgtca

SEQ ID NO: 171508 - DNA, 25 bp, Artificial
  Probe
tgtggttctctcctgtgtaaatgtc

SEQ ID NO: 171509 - DNA, 25 bp, Artificial
  Probe
ctgtggttctctcctgtgtaaatgt

SEQ ID NO: 171510 - DNA, 25 bp, Artificial
  Probe
gtgtctgtggttctctcctgtgtaa

SEQ ID NO: 171511 - DNA, 25 bp, Artificial
  Probe
tgtgtctgtgtcttctccttaaaca

SEQ ID NO: 171512 - DNA, 25 bp, Artificial
  Probe
tttcacttagaagctgcacattatg

SEQ ID NO: 171513 - DNA, 25 bp, Artificial
  Probe
ctagtgggtcttatgtgtgtctgtg

SEQ ID NO: 171514 - DNA, 25 bp, Artificial
  Probe
gggtcttatgtgtgtctgtgtcttc

SEQ ID NO: 171515 - DNA, 25 bp, Artificial
  Probe
tagtgggtcttatgtgtgtctgtgt

SEQ ID NO: 171516 - DNA, 25 bp, Artificial
  Probe
tggttctctcctgtgtaaatgtcac

SEQ ID NO: 171517 - DNA, 25 bp, Artificial
  Probe
tgtctgtggttctctcctgtgtaaa

SEQ ID NO: 171518 - DNA, 25 bp, Artificial
  Probe
tgggtcttatgtgtgtctgtgtctt

SEQ ID NO: 171519 - DNA, 25 bp, Artificial
  Probe
gaagctgcacattatggagcattaa

SEQ ID NO: 171520 - DNA, 25 bp, Artificial
  Probe
atggagcattaaacacttttgtcat

SEQ ID NO: 171521 - DNA, 25 bp, Artificial
  Probe
tggagcattaaacacttttgtcata

SEQ ID NO: 171522 - DNA, 25 bp, Artificial
  Probe
tatggagcattaaacacttttgtca

SEQ ID NO: 171523 - DNA, 25 bp, Artificial
  Probe
ggttctctcctgtgtaaatgtcacg

SEQ ID NO: 171524 - DNA, 25 bp, Artificial
  Probe
agaagctgcacattatggagcatta

SEQ ID NO: 171525 - DNA, 25 bp, Artificial
  Probe
tagaagctgcacattatggagcatt

SEQ ID NO: 171526 - DNA, 25 bp, Artificial
  Probe
ttagaagctgcacattatggagcat

SEQ ID NO: 171527 - DNA, 25 bp, Artificial
  Probe
gtgggtcttatgtgtgtctgtgtct

SEQ ID NO: 171528 - DNA, 25 bp, Artificial
  Probe
agtgggtcttatgtgtgtctgtgtc

SEQ ID NO: 171529 - DNA, 25 bp, Artificial
  Probe
ggagcattaaacacttttgtcataa

SEQ ID NO: 171530 - DNA, 25 bp, Artificial
  Probe
ttatggagcattaaacacttttgtc

SEQ ID NO: 171531 - DNA, 25 bp, Artificial
  Probe
acattatggagcattaaacactttt

SEQ ID NO: 171532 - DNA, 25 bp, Artificial
  Probe
acttagaagctgcacattatggagc

SEQ ID NO: 171533 - DNA, 25 bp, Artificial
  Probe
cattatggagcattaaacacttttg

SEQ ID NO: 171534 - DNA, 25 bp, Artificial
  Probe
ctgcacattatggagcattaaacac

SEQ ID NO: 171535 - DNA, 25 bp, Artificial
  Probe
tgcacattatggagcattaaacact

SEQ ID NO: 171536 - DNA, 25 bp, Artificial
  Probe
gtgtaccaggctatgatttctcttg

SEQ ID NO: 171537 - DNA, 25 bp, Artificial
  Probe
tgtgtaccaggctatgatttctctt

SEQ ID NO: 171538 - DNA, 25 bp, Artificial
  Probe
gtgtgtaccaggctatgatttctct

SEQ ID NO: 171539 - DNA, 25 bp, Artificial
  Probe
caggctatgatttctcttgcattaa

SEQ ID NO: 171540 - DNA, 25 bp, Artificial
  Probe
ccaggctatgatttctcttgcatta

SEQ ID NO: 171541 - DNA, 25 bp, Artificial
  Probe
tgtaccaggctatgatttctcttgc

SEQ ID NO: 171542 - DNA, 25 bp, Artificial
  Probe
aggctatgatttctcttgcattaaa

SEQ ID NO: 171543 - DNA, 25 bp, Artificial
  Probe
taccaggctatgatttctcttgcat

SEQ ID NO: 171544 - DNA, 25 bp, Artificial
  Probe
gacacactcaccataaacacatccc

SEQ ID NO: 171545 - DNA, 25 bp, Artificial
  Probe
gggacacactcaccataaacacatc

SEQ ID NO: 171546 - DNA, 25 bp, Artificial
  Probe
gccagagcagcagttgaatgtaatg

SEQ ID NO: 171547 - DNA, 25 bp, Artificial
  Probe
gtaccaggctatgatttctcttgca

SEQ ID NO: 171548 - DNA, 25 bp, Artificial
  Probe
agccagagcagcagttgaatgtaat

SEQ ID NO: 171549 - DNA, 25 bp, Artificial
  Probe
accaggctatgatttctcttgcatt

SEQ ID NO: 171550 - DNA, 25 bp, Artificial
  Probe
ggtgtgtaccaggctatgatttctc

SEQ ID NO: 171551 - DNA, 25 bp, Artificial
  Probe
ggacacactcaccataaacacatcc

SEQ ID NO: 171552 - DNA, 25 bp, Artificial
  Probe
ggctatgatttctcttgcattaaaa

SEQ ID NO: 171553 - DNA, 25 bp, Artificial
  Probe
gggtgtgtaccaggctatgatttct

SEQ ID NO: 171554 - DNA, 25 bp, Artificial
  Probe
ccagagcagcagttgaatgtaatgc

SEQ ID NO: 171555 - DNA, 25 bp, Artificial
  Probe
cagttgaatgtaatgctggggacag

SEQ ID NO: 171556 - DNA, 25 bp, Artificial
  Probe
acactcaccataaacacatccccag

SEQ ID NO: 171557 - DNA, 25 bp, Artificial
  Probe
cacactcaccataaacacatcccca

SEQ ID NO: 171558 - DNA, 25 bp, Artificial
  Probe
acacactcaccataaacacatcccc

SEQ ID NO: 171559 - DNA, 25 bp, Artificial
  Probe
ggggacacactcaccataaacacat

SEQ ID NO: 171560 - DNA, 25 bp, Artificial
  Probe
gctatgatttctcttgcattaaaat

SEQ ID NO: 171561 - DNA, 25 bp, Artificial
  Probe
cactcaccataaacacatccccagg

SEQ ID NO: 171562 - DNA, 25 bp, Artificial
  Probe
agttgaatgtaatgctggggacagg

SEQ ID NO: 171563 - DNA, 25 bp, Artificial
  Probe
tgatttctcttgcattaaaatgtat

SEQ ID NO: 171564 - DNA, 25 bp, Artificial
  Probe
atgatttctcttgcattaaaatgta

SEQ ID NO: 171565 - DNA, 25 bp, Artificial
  Probe
tatgatttctcttgcattaaaatgt

SEQ ID NO: 171566 - DNA, 25 bp, Artificial
  Probe
ggggtgtgtaccaggctatgatttc

SEQ ID NO: 171567 - DNA, 25 bp, Artificial
  Probe
ctatgatttctcttgcattaaaatg

SEQ ID NO: 171568 - DNA, 25 bp, Artificial
  Probe
aatcccaccaaatcatcctgaatct

SEQ ID NO: 171569 - DNA, 25 bp, Artificial
  Probe
caatcccaccaaatcatcctgaatc

SEQ ID NO: 171570 - DNA, 25 bp, Artificial
  Probe
atcccaccaaatcatcctgaatctg

SEQ ID NO: 171571 - DNA, 25 bp, Artificial
  Probe
accaaatcatcctgaatctgatctt

SEQ ID NO: 171572 - DNA, 25 bp, Artificial
  Probe
tatacacaatatacgaaaagccagc

SEQ ID NO: 171573 - DNA, 25 bp, Artificial
  Probe
caccaaatcatcctgaatctgatct

SEQ ID NO: 171574 - DNA, 25 bp, Artificial
  Probe
ccaaatcatcctgaatctgatcttt

SEQ ID NO: 171575 - DNA, 25 bp, Artificial
  Probe
ccaccaaatcatcctgaatctgatc

SEQ ID NO: 171576 - DNA, 25 bp, Artificial
  Probe
tcccaccaaatcatcctgaatctga

SEQ ID NO: 171577 - DNA, 25 bp, Artificial
  Probe
gcaatcccaccaaatcatcctgaat

SEQ ID NO: 171578 - DNA, 25 bp, Artificial
  Probe
atacacaatatacgaaaagccagct

SEQ ID NO: 171579 - DNA, 25 bp, Artificial
  Probe
aatatacgaaaagccagcttgaaaa

SEQ ID NO: 171580 - DNA, 25 bp, Artificial
  Probe
cccaccaaatcatcctgaatctgat

SEQ ID NO: 171581 - DNA, 25 bp, Artificial
  Probe
tacacaatatacgaaaagccagctt

SEQ ID NO: 171582 - DNA, 25 bp, Artificial
  Probe
caatatacgaaaagccagcttgaaa

SEQ ID NO: 171583 - DNA, 25 bp, Artificial
  Probe
ttatacacaatatacgaaaagccag

SEQ ID NO: 171584 - DNA, 25 bp, Artificial
  Probe
acaatatacgaaaagccagcttgaa

SEQ ID NO: 171585 - DNA, 25 bp, Artificial
  Probe
tttatacacaatatacgaaaagcca

SEQ ID NO: 171586 - DNA, 25 bp, Artificial
  Probe
cacaatatacgaaaagccagcttga

SEQ ID NO: 171587 - DNA, 25 bp, Artificial
  Probe
acacaatatacgaaaagccagcttg

SEQ ID NO: 171588 - DNA, 25 bp, Artificial
  Probe
caaatcatcctgaatctgatctttt

SEQ ID NO: 171589 - DNA, 25 bp, Artificial
  Probe
ttttatacacaatatacgaaaagcc

SEQ ID NO: 171590 - DNA, 25 bp, Artificial
  Probe
caagatgcggaagctcttcagtttc

SEQ ID NO: 171591 - DNA, 25 bp, Artificial
  Probe
aagatgcggaagctcttcagtttca

SEQ ID NO: 171592 - DNA, 25 bp, Artificial
  Probe
gctcatccttgtattctcagtagtt

SEQ ID NO: 171593 - DNA, 25 bp, Artificial
  Probe
tcatccttgtattctcagtagttcc

SEQ ID NO: 171594 - DNA, 25 bp, Artificial
  Probe
ccttgtattctcagtagttccgata

SEQ ID NO: 171595 - DNA, 25 bp, Artificial
  Probe
catccttgtattctcagtagttccg

SEQ ID NO: 171596 - DNA, 25 bp, Artificial
  Probe
tccttgtattctcagtagttccgat

SEQ ID NO: 171597 - DNA, 25 bp, Artificial
  Probe
atccttgtattctcagtagttccga

SEQ ID NO: 171598 - DNA, 25 bp, Artificial
  Probe
tgtattctcagtagttccgatatgt

SEQ ID NO: 171599 - DNA, 25 bp, Artificial
  Probe
ctcatccttgtattctcagtagttc

SEQ ID NO: 171600 - DNA, 25 bp, Artificial
  Probe
attctcagtagttccgatatgtacc

SEQ ID NO: 171601 - DNA, 25 bp, Artificial
  Probe
tctgtgaactgaggtcttaatatca

SEQ ID NO: 171602 - DNA, 25 bp, Artificial
  Probe
ctatcctgtgtgtgcctatgagatt

SEQ ID NO: 171603 - DNA, 25 bp, Artificial
  Probe
ttgtattctcagtagttccgatatg

SEQ ID NO: 171604 - DNA, 25 bp, Artificial
  Probe
ttctgtgaactgaggtcttaatatc

SEQ ID NO: 171605 - DNA, 25 bp, Artificial
  Probe
tatcctgtgtgtgcctatgagattg

SEQ ID NO: 171606 - DNA, 25 bp, Artificial
  Probe
cttgtattctcagtagttccgatat

SEQ ID NO: 171607 - DNA, 25 bp, Artificial
  Probe
cagctcatccttgtattctcagtag

SEQ ID NO: 171608 - DNA, 25 bp, Artificial
  Probe
agctcatccttgtattctcagtagt

SEQ ID NO: 171609 - DNA, 25 bp, Artificial
  Probe
gtattctcagtagttccgatatgta

SEQ ID NO: 171610 - DNA, 25 bp, Artificial
  Probe
tctatcctgtgtgtgcctatgagat

SEQ ID NO: 171611 - DNA, 25 bp, Artificial
  Probe
atctatcctgtgtgtgcctatgaga

SEQ ID NO: 171612 - DNA, 25 bp, Artificial
  Probe
gatctatcctgtgtgtgcctatgag

SEQ ID NO: 171613 - DNA, 25 bp, Artificial
  Probe
agtgtatcctgttagctccattctc

SEQ ID NO: 171614 - DNA, 25 bp, Artificial
  Probe
tttatttggctttctgtgaactgag

SEQ ID NO: 171615 - DNA, 25 bp, Artificial
  Probe
tgaatgttatcttatgagactctgt

SEQ ID NO: 171616 - DNA, 25 bp, Artificial
  Probe
tgtgaatgttatcttatgagactct

SEQ ID NO: 171617 - DNA, 25 bp, Artificial
  Probe
gtgtatcctgttagctccattctca

SEQ ID NO: 171618 - DNA, 25 bp, Artificial
  Probe
atttatttggctttctgtgaactga

SEQ ID NO: 171619 - DNA, 25 bp, Artificial
  Probe
gctttctgtgaactgaggtcttaat

SEQ ID NO: 171620 - DNA, 25 bp, Artificial
  Probe
gtgaatgttatcttatgagactctg

SEQ ID NO: 171621 - DNA, 25 bp, Artificial
  Probe
tattctcagtagttccgatatgtac

SEQ ID NO: 171622 - DNA, 25 bp, Artificial
  Probe
gcagctcatccttgtattctcagta

SEQ ID NO: 171623 - DNA, 25 bp, Artificial
  Probe
ttatttggctttctgtgaactgagg

SEQ ID NO: 171624 - DNA, 25 bp, Artificial
  Probe
ttctcagtagttccgatatgtaccc

SEQ ID NO: 171625 - DNA, 25 bp, Artificial
  Probe
tgtatcctgttagctccattctcag

SEQ ID NO: 171626 - DNA, 25 bp, Artificial
  Probe
ctttctgtgaactgaggtcttaata

SEQ ID NO: 171627 - DNA, 25 bp, Artificial
  Probe
agtctttgtcagataattccactgt

SEQ ID NO: 171628 - DNA, 25 bp, Artificial
  Probe
tatttatttggctttctgtgaactg

SEQ ID NO: 171629 - DNA, 25 bp, Artificial
  Probe
cagtgtatcctgttagctccattct

SEQ ID NO: 171630 - DNA, 25 bp, Artificial
  Probe
ctcagtagttccgatatgtaccctc

SEQ ID NO: 171631 - DNA, 25 bp, Artificial
  Probe
aagtctttgtcagataattccactg

SEQ ID NO: 171632 - DNA, 25 bp, Artificial
  Probe
cagtggtattcggatctatcctgtg

SEQ ID NO: 171633 - DNA, 25 bp, Artificial
  Probe
tctcagtagttccgatatgtaccct

SEQ ID NO: 171634 - DNA, 25 bp, Artificial
  Probe
atgtgaatgttatcttatgagactc

SEQ ID NO: 171635 - DNA, 25 bp, Artificial
  Probe
tatttggctttctgtgaactgaggt

SEQ ID NO: 171636 - DNA, 25 bp, Artificial
  Probe
gtctttgtcagataattccactgta

SEQ ID NO: 171637 - DNA, 25 bp, Artificial
  Probe
atagagatgatgctgagactgacat

SEQ ID NO: 171638 - DNA, 25 bp, Artificial
  Probe
gatagagatgatgctgagactgaca

SEQ ID NO: 171639 - DNA, 25 bp, Artificial
  Probe
tgatagagatgatgctgagactgac

SEQ ID NO: 171640 - DNA, 25 bp, Artificial
  Probe
ttgatagagatgatgctgagactga

SEQ ID NO: 171641 - DNA, 25 bp, Artificial
  Probe
tagagatgatgctgagactgacatt

SEQ ID NO: 171642 - DNA, 25 bp, Artificial
  Probe
aatcttggatactcagtggtgataa

SEQ ID NO: 171643 - DNA, 25 bp, Artificial
  Probe
atacagatgaggaatgtgtgttgag

SEQ ID NO: 171644 - DNA, 25 bp, Artificial
  Probe
gatacagatgaggaatgtgtgttga

SEQ ID NO: 171645 - DNA, 25 bp, Artificial
  Probe
tgatacagatgaggaatgtgtgttg

SEQ ID NO: 171646 - DNA, 25 bp, Artificial
  Probe
ttcaacaattctaactgtccgagtc

SEQ ID NO: 171647 - DNA, 25 bp, Artificial
  Probe
ctgatacagatgaggaatgtgtgtt

SEQ ID NO: 171648 - DNA, 25 bp, Artificial
  Probe
caattctaactgtccgagtctgaga

SEQ ID NO: 171649 - DNA, 25 bp, Artificial
  Probe
caacaattctaactgtccgagtctg

SEQ ID NO: 171650 - DNA, 25 bp, Artificial
  Probe
aacaattctaactgtccgagtctga

SEQ ID NO: 171651 - DNA, 25 bp, Artificial
  Probe
tcaacaattctaactgtccgagtct

SEQ ID NO: 171652 - DNA, 25 bp, Artificial
  Probe
acaattctaactgtccgagtctgag

SEQ ID NO: 171653 - DNA, 25 bp, Artificial
  Probe
gaggaatgtgtgttgagccatagat

SEQ ID NO: 171654 - DNA, 25 bp, Artificial
  Probe
cagaggcagacatactggtactatt

SEQ ID NO: 171655 - DNA, 25 bp, Artificial
  Probe
tttgatagagatgatgctgagactg

SEQ ID NO: 171656 - DNA, 25 bp, Artificial
  Probe
aggaatgtgtgttgagccatagatg

SEQ ID NO: 171657 - DNA, 25 bp, Artificial
  Probe
atgaggaatgtgtgttgagccatag

SEQ ID NO: 171658 - DNA, 25 bp, Artificial
  Probe
gatgaggaatgtgtgttgagccata

SEQ ID NO: 171659 - DNA, 25 bp, Artificial
  Probe
ctctctcttcatttccaaactcatt

SEQ ID NO: 171660 - DNA, 25 bp, Artificial
  Probe
gctctctcttcatttccaaactcat

SEQ ID NO: 171661 - DNA, 25 bp, Artificial
  Probe
cacataacatttcttggaaggtagg

SEQ ID NO: 171662 - DNA, 25 bp, Artificial
  Probe
gaaacaaacccaagattctcatcat

SEQ ID NO: 171663 - DNA, 25 bp, Artificial
  Probe
tgtgttgagccatagatggaataat

SEQ ID NO: 171664 - DNA, 25 bp, Artificial
  Probe
ttcattgctttcaaatcttctaccc

SEQ ID NO: 171665 - DNA, 25 bp, Artificial
  Probe
ggagacagatttcattgctttcaaa

SEQ ID NO: 171666 - DNA, 25 bp, Artificial
  Probe
ataacatttcttggaaggtaggcaa

SEQ ID NO: 171667 - DNA, 25 bp, Artificial
  Probe
cataacatttcttggaaggtaggca

SEQ ID NO: 171668 - DNA, 25 bp, Artificial
  Probe
acataacatttcttggaaggtaggc

SEQ ID NO: 171669 - DNA, 25 bp, Artificial
  Probe
ctgctgatacagatgaggaatgtgt

SEQ ID NO: 171670 - DNA, 25 bp, Artificial
  Probe
actgctgatacagatgaggaatgtg

SEQ ID NO: 171671 - DNA, 25 bp, Artificial
  Probe
cactgctgatacagatgaggaatgt

SEQ ID NO: 171672 - DNA, 25 bp, Artificial
  Probe
tctctcttcatttccaaactcattg

SEQ ID NO: 171673 - DNA, 25 bp, Artificial
  Probe
ggatactcagtggtgataaaggaaa

SEQ ID NO: 171674 - DNA, 25 bp, Artificial
  Probe
tcttcatttccaaactcattgactg

SEQ ID NO: 171675 - DNA, 25 bp, Artificial
  Probe
tcttggatactcagtggtgataaag

SEQ ID NO: 171676 - DNA, 25 bp, Artificial
  Probe
ctcttcatttccaaactcattgact

SEQ ID NO: 171677 - DNA, 25 bp, Artificial
  Probe
tctcttcatttccaaactcattgac

SEQ ID NO: 171678 - DNA, 25 bp, Artificial
  Probe
gtgtgttgagccatagatggaataa

SEQ ID NO: 171679 - DNA, 25 bp, Artificial
  Probe
agtctgagaaacaaacccaagattc

SEQ ID NO: 171680 - DNA, 25 bp, Artificial
  Probe
gagtctgagaaacaaacccaagatt

SEQ ID NO: 171681 - DNA, 25 bp, Artificial
  Probe
cttggatactcagtggtgataaagg

SEQ ID NO: 171682 - DNA, 25 bp, Artificial
  Probe
ggtaagagtgaagtattaggtgagg

SEQ ID NO: 171683 - DNA, 25 bp, Artificial
  Probe
aagagtgaagtattaggtgaggagt

SEQ ID NO: 171684 - DNA, 25 bp, Artificial
  Probe
agtgaagtattaggtgaggagtgtt

SEQ ID NO: 171685 - DNA, 25 bp, Artificial
  Probe
agagtgaagtattaggtgaggagtg

SEQ ID NO: 171686 - DNA, 25 bp, Artificial
  Probe
gtaagagtgaagtattaggtgagga

SEQ ID NO: 171687 - DNA, 25 bp, Artificial
  Probe
aggtaagagtgaagtattaggtgag

SEQ ID NO: 171688 - DNA, 25 bp, Artificial
  Probe
gagtgaagtattaggtgaggagtgt

SEQ ID NO: 171689 - DNA, 25 bp, Artificial
  Probe
taagagtgaagtattaggtgaggag

SEQ ID NO: 171690 - DNA, 25 bp, Artificial
  Probe
tgacatatccttaccaagaactagc

SEQ ID NO: 171691 - DNA, 25 bp, Artificial
  Probe
tatccttaccaagaactagccagat

SEQ ID NO: 171692 - DNA, 25 bp, Artificial
  Probe
atatccttaccaagaactagccaga

SEQ ID NO: 171693 - DNA, 25 bp, Artificial
  Probe
catatccttaccaagaactagccag

SEQ ID NO: 171694 - DNA, 25 bp, Artificial
  Probe
gacatatccttaccaagaactagcc

SEQ ID NO: 171695 - DNA, 25 bp, Artificial
  Probe
acatatccttaccaagaactagcca

SEQ ID NO: 171696 - DNA, 25 bp, Artificial
  Probe
aggtgactactaggtaagagtgaag

SEQ ID NO: 171697 - DNA, 25 bp, Artificial
  Probe
tctatgtactgtgaagaactgtgag

SEQ ID NO: 171698 - DNA, 25 bp, Artificial
  Probe
taggtgactactaggtaagagtgaa

SEQ ID NO: 171699 - DNA, 25 bp, Artificial
  Probe
atccttaccaagaactagccagatt

SEQ ID NO: 171700 - DNA, 25 bp, Artificial
  Probe
ggtgactactaggtaagagtgaagt

SEQ ID NO: 171701 - DNA, 25 bp, Artificial
  Probe
atctatgtactgtgaagaactgtga

SEQ ID NO: 171702 - DNA, 25 bp, Artificial
  Probe
ctatgtactgtgaagaactgtgagt

SEQ ID NO: 171703 - DNA, 25 bp, Artificial
  Probe
taggtaagagtgaagtattaggtga

SEQ ID NO: 171704 - DNA, 25 bp, Artificial
  Probe
ttggttcctgtctgtgatcttctag

SEQ ID NO: 171705 - DNA, 25 bp, Artificial
  Probe
cttggttcctgtctgtgatcttcta

SEQ ID NO: 171706 - DNA, 25 bp, Artificial
  Probe
catagtgttaatggtgttccaagtg

SEQ ID NO: 171707 - DNA, 25 bp, Artificial
  Probe
ctaggtaagagtgaagtattaggtg

SEQ ID NO: 171708 - DNA, 25 bp, Artificial
  Probe
ttctgtcaccacattgttcttgtac

SEQ ID NO: 171709 - DNA, 25 bp, Artificial
  Probe
actaggtaagagtgaagtattaggt

SEQ ID NO: 171710 - DNA, 25 bp, Artificial
  Probe
ttgacatatccttaccaagaactag

SEQ ID NO: 171711 - DNA, 25 bp, Artificial
  Probe
gtgaagtattaggtgaggagtgttt

SEQ ID NO: 171712 - DNA, 25 bp, Artificial
  Probe
tatctatgtactgtgaagaactgtg

SEQ ID NO: 171713 - DNA, 25 bp, Artificial
  Probe
agatttcatactgtgttcccgatat

SEQ ID NO: 171714 - DNA, 25 bp, Artificial
  Probe
actgactgtctgatatttctaaccc

SEQ ID NO: 171715 - DNA, 25 bp, Artificial
  Probe
atagtgttaatggtgttccaagtgc

SEQ ID NO: 171716 - DNA, 25 bp, Artificial
  Probe
gcatagtgttaatggtgttccaagt

SEQ ID NO: 171717 - DNA, 25 bp, Artificial
  Probe
gtgactactaggtaagagtgaagta

SEQ ID NO: 171718 - DNA, 25 bp, Artificial
  Probe
gttcctgtctgtgatcttctaggtt

SEQ ID NO: 171719 - DNA, 25 bp, Artificial
  Probe
gtaggtgactactaggtaagagtga

SEQ ID NO: 171720 - DNA, 25 bp, Artificial
  Probe
ttaccaagaactagccagatttcat

SEQ ID NO: 171721 - DNA, 25 bp, Artificial
  Probe
aagtctttgctcttctttctcttgg

SEQ ID NO: 171722 - DNA, 25 bp, Artificial
  Probe
ccaagaactagccagatttcatact

SEQ ID NO: 171723 - DNA, 25 bp, Artificial
  Probe
cttaccaagaactagccagatttca

SEQ ID NO: 171724 - DNA, 25 bp, Artificial
  Probe
ctggtaggtgactactaggtaagag

SEQ ID NO: 171725 - DNA, 25 bp, Artificial
  Probe
accaagaactagccagatttcatac

SEQ ID NO: 171726 - DNA, 25 bp, Artificial
  Probe
taccaagaactagccagatttcata

SEQ ID NO: 171727 - DNA, 25 bp, Artificial
  Probe
cacaattacctatctgaagaatgcc

SEQ ID NO: 171728 - DNA, 25 bp, Artificial
  Probe
attatggtagactcaagcagcattc

SEQ ID NO: 171729 - DNA, 25 bp, Artificial
  Probe
aattatggtagactcaagcagcatt

SEQ ID NO: 171730 - DNA, 25 bp, Artificial
  Probe
ttagtcaatgtatccaatcagcaat

SEQ ID NO: 171731 - DNA, 25 bp, Artificial
  Probe
attagtcaatgtatccaatcagcaa

SEQ ID NO: 171732 - DNA, 25 bp, Artificial
  Probe
gtcaatgtatccaatcagcaatatg

SEQ ID NO: 171733 - DNA, 25 bp, Artificial
  Probe
aattagtcaatgtatccaatcagca

SEQ ID NO: 171734 - DNA, 25 bp, Artificial
  Probe
agtcaatgtatccaatcagcaatat

SEQ ID NO: 171735 - DNA, 25 bp, Artificial
  Probe
tcacaattacctatctgaagaatgc

SEQ ID NO: 171736 - DNA, 25 bp, Artificial
  Probe
ttatggtagactcaagcagcattct

SEQ ID NO: 171737 - DNA, 25 bp, Artificial
  Probe
tcaatgtatccaatcagcaatatga

SEQ ID NO: 171738 - DNA, 25 bp, Artificial
  Probe
tagtcaatgtatccaatcagcaata

SEQ ID NO: 171739 - DNA, 25 bp, Artificial
  Probe
acttggtaagaatagctgattagga

SEQ ID NO: 171740 - DNA, 25 bp, Artificial
  Probe
tgtcacaattacctatctgaagaat

SEQ ID NO: 171741 - DNA, 25 bp, Artificial
  Probe
atgtcacaattacctatctgaagaa

SEQ ID NO: 171742 - DNA, 25 bp, Artificial
  Probe
aatgtcacaattacctatctgaaga

SEQ ID NO: 171743 - DNA, 25 bp, Artificial
  Probe
agcaggatgaaattatggtagactc

SEQ ID NO: 171744 - DNA, 25 bp, Artificial
  Probe
caagcaggatgaaattatggtagac

SEQ ID NO: 171745 - DNA, 25 bp, Artificial
  Probe
aagcaggatgaaattatggtagact

SEQ ID NO: 171746 - DNA, 25 bp, Artificial
  Probe
aattacctatctgaagaatgccctg

SEQ ID NO: 171747 - DNA, 25 bp, Artificial
  Probe
caattacctatctgaagaatgccct

SEQ ID NO: 171748 - DNA, 25 bp, Artificial
  Probe
gtcacaattacctatctgaagaatg

SEQ ID NO: 171749 - DNA, 25 bp, Artificial
  Probe
acaattacctatctgaagaatgccc

SEQ ID NO: 171750 - DNA, 25 bp, Artificial
  Probe
attacctatctgaagaatgccctga

SEQ ID NO: 171751 - DNA, 25 bp, Artificial
  Probe
ttacctatctgaagaatgccctgat

SEQ ID NO: 171752 - DNA, 25 bp, Artificial
  Probe
aacttggtaagaatagctgattagg

SEQ ID NO: 171753 - DNA, 25 bp, Artificial
  Probe
aaattatggtagactcaagcagcat

SEQ ID NO: 171754 - DNA, 25 bp, Artificial
  Probe
ttaattcaacaaaggcagttccaaa

SEQ ID NO: 171755 - DNA, 25 bp, Artificial
  Probe
tttaattcaacaaaggcagttccaa

SEQ ID NO: 171756 - DNA, 25 bp, Artificial
  Probe
cattctgccttcctctaacttcacc

SEQ ID NO: 171757 - DNA, 25 bp, Artificial
  Probe
gaaattatggtagactcaagcagca

SEQ ID NO: 171758 - DNA, 25 bp, Artificial
  Probe
taattcaacaaaggcagttccaaag

SEQ ID NO: 171759 - DNA, 25 bp, Artificial
  Probe
tatggtagactcaagcagcattctg

SEQ ID NO: 171760 - DNA, 25 bp, Artificial
  Probe
cttggtaagaatagctgattaggaa

SEQ ID NO: 171761 - DNA, 25 bp, Artificial
  Probe
gcaggatgaaattatggtagactca

SEQ ID NO: 171762 - DNA, 25 bp, Artificial
  Probe
agtgactgaggacatctttaattca

SEQ ID NO: 171763 - DNA, 25 bp, Artificial
  Probe
ggatgaaattatggtagactcaagc

SEQ ID NO: 171764 - DNA, 25 bp, Artificial
  Probe
aatgtgtgaggaatttgtcaagaat

SEQ ID NO: 171765 - DNA, 25 bp, Artificial
  Probe
ttcctctaacttcaccgtccagaat

SEQ ID NO: 171766 - DNA, 25 bp, Artificial
  Probe
cctatctgaagaatgccctgatgta

SEQ ID NO: 171767 - DNA, 25 bp, Artificial
  Probe
tacctatctgaagaatgccctgatg

SEQ ID NO: 171768 - DNA, 25 bp, Artificial
  Probe
gccctgaaattagtcaatgtatcca

SEQ ID NO: 171769 - DNA, 25 bp, Artificial
  Probe
ctatctgaagaatgccctgatgtac

SEQ ID NO: 171770 - DNA, 25 bp, Artificial
  Probe
gactgaggacatctttaattcaaca

SEQ ID NO: 171771 - DNA, 25 bp, Artificial
  Probe
tgactgaggacatctttaattcaac

SEQ ID NO: 171772 - DNA, 25 bp, Artificial
  Probe
ttacctcttctgtatctaagtgcct

SEQ ID NO: 171773 - DNA, 25 bp, Artificial
  Probe
attacctcttctgtatctaagtgcc

SEQ ID NO: 171774 - DNA, 25 bp, Artificial
  Probe
taagacgaacagaacttcaagaatg

SEQ ID NO: 171775 - DNA, 25 bp, Artificial
  Probe
cataagacgaacagaacttcaagaa

SEQ ID NO: 171776 - DNA, 25 bp, Artificial
  Probe
tacctcttctgtatctaagtgcctc

SEQ ID NO: 171777 - DNA, 25 bp, Artificial
  Probe
ccataagacgaacagaacttcaaga

SEQ ID NO: 171778 - DNA, 25 bp, Artificial
  Probe
ggagactggagagattagattagtg

SEQ ID NO: 171779 - DNA, 25 bp, Artificial
  Probe
ataagacgaacagaacttcaagaat

SEQ ID NO: 171780 - DNA, 25 bp, Artificial
  Probe
gagactggagagattagattagtgt

SEQ ID NO: 171781 - DNA, 25 bp, Artificial
  Probe
ctcttctgtatctaagtgcctcctg

SEQ ID NO: 171782 - DNA, 25 bp, Artificial
  Probe
gataacctgtcaatccactgtgaag

SEQ ID NO: 171783 - DNA, 25 bp, Artificial
  Probe
cttctgtatctaagtgcctcctgag

SEQ ID NO: 171784 - DNA, 25 bp, Artificial
  Probe
aagacgaacagaacttcaagaatgc

SEQ ID NO: 171785 - DNA, 25 bp, Artificial
  Probe
gccataagacgaacagaacttcaag

SEQ ID NO: 171786 - DNA, 25 bp, Artificial
  Probe
agataacctgtcaatccactgtgaa

SEQ ID NO: 171787 - DNA, 25 bp, Artificial
  Probe
agactggagagattagattagtgtc

SEQ ID NO: 171788 - DNA, 25 bp, Artificial
  Probe
gaggatgtcagataacctgtcaatc

SEQ ID NO: 171789 - DNA, 25 bp, Artificial
  Probe
gatgtcagataacctgtcaatccac

SEQ ID NO: 171790 - DNA, 25 bp, Artificial
  Probe
tcttctgtatctaagtgcctcctga

SEQ ID NO: 171791 - DNA, 25 bp, Artificial
  Probe
gactggagagattagattagtgtcc

SEQ ID NO: 171792 - DNA, 25 bp, Artificial
  Probe
atgtcagataacctgtcaatccact

SEQ ID NO: 171793 - DNA, 25 bp, Artificial
  Probe
ttctgtatctaagtgcctcctgagt

SEQ ID NO: 171794 - DNA, 25 bp, Artificial
  Probe
tgaggatgtcagataacctgtcaat

SEQ ID NO: 171795 - DNA, 25 bp, Artificial
  Probe
tattacctcttctgtatctaagtgc

SEQ ID NO: 171796 - DNA, 25 bp, Artificial
  Probe
agacgaacagaacttcaagaatgct

SEQ ID NO: 171797 - DNA, 25 bp, Artificial
  Probe
tgccataagacgaacagaacttcaa

SEQ ID NO: 171798 - DNA, 25 bp, Artificial
  Probe
cttgaggatgtcagataacctgtca

SEQ ID NO: 171799 - DNA, 25 bp, Artificial
  Probe
tctgtatctaagtgcctcctgagtc

SEQ ID NO: 171800 - DNA, 25 bp, Artificial
  Probe
cctcttctgtatctaagtgcctcct

SEQ ID NO: 171801 - DNA, 25 bp, Artificial
  Probe
gtcagataacctgtcaatccactgt

SEQ ID NO: 171802 - DNA, 25 bp, Artificial
  Probe
tgtcagataacctgtcaatccactg

SEQ ID NO: 171803 - DNA, 25 bp, Artificial
  Probe
cagataacctgtcaatccactgtga

SEQ ID NO: 171804 - DNA, 25 bp, Artificial
  Probe
tcagataacctgtcaatccactgtg

SEQ ID NO: 171805 - DNA, 25 bp, Artificial
  Probe
gatgcttgaggatgtcagataacct

SEQ ID NO: 171806 - DNA, 25 bp, Artificial
  Probe
acctcttctgtatctaagtgcctcc

SEQ ID NO: 171807 - DNA, 25 bp, Artificial
  Probe
gggagactggagagattagattagt

SEQ ID NO: 171808 - DNA, 25 bp, Artificial
  Probe
atgcttgaggatgtcagataacctg

SEQ ID NO: 171809 - DNA, 25 bp, Artificial
  Probe
ggatgcttgaggatgtcagataacc

SEQ ID NO: 171810 - DNA, 25 bp, Artificial
  Probe
gacgaacagaacttcaagaatgctg

SEQ ID NO: 171811 - DNA, 25 bp, Artificial
  Probe
cgggagtattacctcttctgtatct

SEQ ID NO: 171812 - DNA, 25 bp, Artificial
  Probe
gtgccataagacgaacagaacttca

SEQ ID NO: 171813 - DNA, 25 bp, Artificial
  Probe
cttcaacagcagtgactaactctcc

SEQ ID NO: 171814 - DNA, 25 bp, Artificial
  Probe
ataacctgtcaatccactgtgaagg

SEQ ID NO: 171815 - DNA, 25 bp, Artificial
  Probe
gcttgaggatgtcagataacctgtc

SEQ ID NO: 171816 - DNA, 25 bp, Artificial
  Probe
ctgtatctaagtgcctcctgagtcc

SEQ ID NO: 171817 - DNA, 25 bp, Artificial
  Probe
gcctctgcttcctaagtggtattaa

SEQ ID NO: 171818 - DNA, 25 bp, Artificial
  Probe
cctctgcttcctaagtggtattaaa

SEQ ID NO: 171819 - DNA, 25 bp, Artificial
  Probe
tgcttcctaagtggtattaaagtca

SEQ ID NO: 171820 - DNA, 25 bp, Artificial
  Probe
tctgcttcctaagtggtattaaagt

SEQ ID NO: 171821 - DNA, 25 bp, Artificial
  Probe
tgcctctgcttcctaagtggtatta

SEQ ID NO: 171822 - DNA, 25 bp, Artificial
  Probe
ctgcttcctaagtggtattaaagtc

SEQ ID NO: 171823 - DNA, 25 bp, Artificial
  Probe
ctctgcttcctaagtggtattaaag

SEQ ID NO: 171824 - DNA, 25 bp, Artificial
  Probe
gcttcctaagtggtattaaagtcat

SEQ ID NO: 171825 - DNA, 25 bp, Artificial
  Probe
tcctaagtggtattaaagtcatgcg

SEQ ID NO: 171826 - DNA, 25 bp, Artificial
  Probe
taatcgtatctgtctgacaatagtc

SEQ ID NO: 171827 - DNA, 25 bp, Artificial
  Probe
ttcctaagtggtattaaagtcatgc

SEQ ID NO: 171828 - DNA, 25 bp, Artificial
  Probe
ttcattagaagcagattgtattgat

SEQ ID NO: 171829 - DNA, 25 bp, Artificial
  Probe
ataatcgtatctgtctgacaatagt

SEQ ID NO: 171830 - DNA, 25 bp, Artificial
  Probe
agatcatctgcctctgcttcctaag

SEQ ID NO: 171831 - DNA, 25 bp, Artificial
  Probe
ctgcctctgcttcctaagtggtatt

SEQ ID NO: 171832 - DNA, 25 bp, Artificial
  Probe
gatcatctgcctctgcttcctaagt

SEQ ID NO: 171833 - DNA, 25 bp, Artificial
  Probe
atcatctgcctctgcttcctaagtg

SEQ ID NO: 171834 - DNA, 25 bp, Artificial
  Probe
tcattagaagcagattgtattgata

SEQ ID NO: 171835 - DNA, 25 bp, Artificial
  Probe
tttattcattttgtatggctggctc

SEQ ID NO: 171836 - DNA, 25 bp, Artificial
  Probe
cttcctaagtggtattaaagtcatg

SEQ ID NO: 171837 - DNA, 25 bp, Artificial
  Probe
catttattcattttgtatggctggc

SEQ ID NO: 171838 - DNA, 25 bp, Artificial
  Probe
atttattcattttgtatggctggct

SEQ ID NO: 171839 - DNA, 25 bp, Artificial
  Probe
tttcattagaagcagattgtattga

SEQ ID NO: 171840 - DNA, 25 bp, Artificial
  Probe
ttattcattttgtatggctggctca

SEQ ID NO: 171841 - DNA, 25 bp, Artificial
  Probe
aagatttcattagaagcagattgta

SEQ ID NO: 171842 - DNA, 25 bp, Artificial
  Probe
taagatttcattagaagcagattgt

SEQ ID NO: 171843 - DNA, 25 bp, Artificial
  Probe
gctaaaatcctaagacttgagatga

SEQ ID NO: 171844 - DNA, 25 bp, Artificial
  Probe
gggtagtttgttcatgtattgacat

SEQ ID NO: 171845 - DNA, 25 bp, Artificial
  Probe
tcgtatctgtctgacaatagtcatt

SEQ ID NO: 171846 - DNA, 25 bp, Artificial
  Probe
aatcgtatctgtctgacaatagtca

SEQ ID NO: 171847 - DNA, 25 bp, Artificial
  Probe
cattagaagcagattgtattgataa

SEQ ID NO: 171848 - DNA, 25 bp, Artificial
  Probe
tattcattttgtatggctggctcac

SEQ ID NO: 171849 - DNA, 25 bp, Artificial
  Probe
atcgtatctgtctgacaatagtcat

SEQ ID NO: 171850 - DNA, 25 bp, Artificial
  Probe
agatttcattagaagcagattgtat

SEQ ID NO: 171851 - DNA, 25 bp, Artificial
  Probe
aaatgtcctgaattctcaaattgct

SEQ ID NO: 171852 - DNA, 25 bp, Artificial
  Probe
ctgtccaggaactcactgtgtaaac

SEQ ID NO: 171853 - DNA, 25 bp, Artificial
  Probe
tctgcctctgcttcctaagtggtat

SEQ ID NO: 171854 - DNA, 25 bp, Artificial
  Probe
atctgcctctgcttcctaagtggta

SEQ ID NO: 171855 - DNA, 25 bp, Artificial
  Probe
tcatttattcattttgtatggctgg

SEQ ID NO: 171856 - DNA, 25 bp, Artificial
  Probe
tgtcctgaattctcaaattgctatt

SEQ ID NO: 171857 - DNA, 25 bp, Artificial
  Probe
aatgtcctgaattctcaaattgcta

SEQ ID NO: 171858 - DNA, 25 bp, Artificial
  Probe
actgtaacttcagaatgaatgttaa

SEQ ID NO: 171859 - DNA, 25 bp, Artificial
  Probe
aactgtaacttcagaatgaatgtta

SEQ ID NO: 171860 - DNA, 25 bp, Artificial
  Probe
atgtcctgaattctcaaattgctat

SEQ ID NO: 171861 - DNA, 25 bp, Artificial
  Probe
aaaatcctaagacttgagatgacaa

SEQ ID NO: 171862 - DNA, 25 bp, Artificial
  Probe
tccaatcgctcctcctctagtacag

SEQ ID NO: 171863 - DNA, 25 bp, Artificial
  Probe
ctccaatcgctcctcctctagtaca

SEQ ID NO: 171864 - DNA, 25 bp, Artificial
  Probe
gtgtgtgagactgtacccgttcatc

SEQ ID NO: 171865 - DNA, 25 bp, Artificial
  Probe
ttatacataagcaagagaagcgtct

SEQ ID NO: 171866 - DNA, 25 bp, Artificial
  Probe
tatacataagcaagagaagcgtctg

SEQ ID NO: 171867 - DNA, 25 bp, Artificial
  Probe
gcctgatcctctaagatatatggtg

SEQ ID NO: 171868 - DNA, 25 bp, Artificial
  Probe
agcctgatcctctaagatatatggt

SEQ ID NO: 171869 - DNA, 25 bp, Artificial
  Probe
aagatatatggtgtatgctgctgta

SEQ ID NO: 171870 - DNA, 25 bp, Artificial
  Probe
taagatatatggtgtatgctgctgt

SEQ ID NO: 171871 - DNA, 25 bp, Artificial
  Probe
agatatatggtgtatgctgctgtat

SEQ ID NO: 171872 - DNA, 25 bp, Artificial
  Probe
ctaagatatatggtgtatgctgctg

SEQ ID NO: 171873 - DNA, 25 bp, Artificial
  Probe
tctaagatatatggtgtatgctgct

SEQ ID NO: 171874 - DNA, 25 bp, Artificial
  Probe
ctctaagatatatggtgtatgctgc

SEQ ID NO: 171875 - DNA, 25 bp, Artificial
  Probe
gatatatggtgtatgctgctgtatt

SEQ ID NO: 171876 - DNA, 25 bp, Artificial
  Probe
cctgatcctctaagatatatggtgt

SEQ ID NO: 171877 - DNA, 25 bp, Artificial
  Probe
gagcctgatcctctaagatatatgg

SEQ ID NO: 171878 - DNA, 25 bp, Artificial
  Probe
cctctaagatatatggtgtatgctg

SEQ ID NO: 171879 - DNA, 25 bp, Artificial
  Probe
tcctctaagatatatggtgtatgct

SEQ ID NO: 171880 - DNA, 25 bp, Artificial
  Probe
ggagcctgatcctctaagatatatg

SEQ ID NO: 171881 - DNA, 25 bp, Artificial
  Probe
atacataagcaagagaagcgtctgt

SEQ ID NO: 171882 - DNA, 25 bp, Artificial
  Probe
tttatacataagcaagagaagcgtc

SEQ ID NO: 171883 - DNA, 25 bp, Artificial
  Probe
tacataagcaagagaagcgtctgtt

SEQ ID NO: 171884 - DNA, 25 bp, Artificial
  Probe
atatggtgtatgctgctgtatttac

SEQ ID NO: 171885 - DNA, 25 bp, Artificial
  Probe
ctttatacataagcaagagaagcgt

SEQ ID NO: 171886 - DNA, 25 bp, Artificial
  Probe
actttatacataagcaagagaagcg

SEQ ID NO: 171887 - DNA, 25 bp, Artificial
  Probe
tagatgccctttaacattgtgaaca

SEQ ID NO: 171888 - DNA, 25 bp, Artificial
  Probe
ctggttactgtcaagttcaagtggt

SEQ ID NO: 171889 - DNA, 25 bp, Artificial
  Probe
actggttactgtcaagttcaagtgg

SEQ ID NO: 171890 - DNA, 25 bp, Artificial
  Probe
ctagatgccctttaacattgtgaac

SEQ ID NO: 171891 - DNA, 25 bp, Artificial
  Probe
atcctctaagatatatggtgtatgc

SEQ ID NO: 171892 - DNA, 25 bp, Artificial
  Probe
tgaaaggaatgacagcagatgacta

SEQ ID NO: 171893 - DNA, 25 bp, Artificial
  Probe
gaaaggaatgacagcagatgactag

SEQ ID NO: 171894 - DNA, 25 bp, Artificial
  Probe
ataagcaagagaagcgtctgtttac

SEQ ID NO: 171895 - DNA, 25 bp, Artificial
  Probe
cataagcaagagaagcgtctgttta

SEQ ID NO: 171896 - DNA, 25 bp, Artificial
  Probe
tggttactgtcaagttcaagtggtg

SEQ ID NO: 171897 - DNA, 25 bp, Artificial
  Probe
tctggtattataaagcctgtgtgtg

SEQ ID NO: 171898 - DNA, 25 bp, Artificial
  Probe
gtctggtattataaagcctgtgtgt

SEQ ID NO: 171899 - DNA, 25 bp, Artificial
  Probe
atgccctttaacattgtgaacaaat

SEQ ID NO: 171900 - DNA, 25 bp, Artificial
  Probe
taacattgtgaacaaatagaccgtc

SEQ ID NO: 171901 - DNA, 25 bp, Artificial
  Probe
tgccctttaacattgtgaacaaata

SEQ ID NO: 171902 - DNA, 25 bp, Artificial
  Probe
gatgccctttaacattgtgaacaaa

SEQ ID NO: 171903 - DNA, 25 bp, Artificial
  Probe
ttaacattgtgaacaaatagaccgt

SEQ ID NO: 171904 - DNA, 25 bp, Artificial
  Probe
gccctttaacattgtgaacaaatag

SEQ ID NO: 171905 - DNA, 25 bp, Artificial
  Probe
tatatggtgtatgctgctgtattta

SEQ ID NO: 171906 - DNA, 25 bp, Artificial
  Probe
aggcaactttcagtcccttactata

SEQ ID NO: 171907 - DNA, 25 bp, Artificial
  Probe
aacattgtgaacaaatagaccgtct

SEQ ID NO: 171908 - DNA, 25 bp, Artificial
  Probe
tatttacagctcatcctctctccat

SEQ ID NO: 171909 - DNA, 25 bp, Artificial
  Probe
atatatggtgtatgctgctgtattt

SEQ ID NO: 171910 - DNA, 25 bp, Artificial
  Probe
gtttgagaacgtcatctaggacatg

SEQ ID NO: 171911 - DNA, 25 bp, Artificial
  Probe
tgtttgagaacgtcatctaggacat

SEQ ID NO: 171912 - DNA, 25 bp, Artificial
  Probe
ttgagaacgtcatctaggacatgta

SEQ ID NO: 171913 - DNA, 25 bp, Artificial
  Probe
tgagaacgtcatctaggacatgtag

SEQ ID NO: 171914 - DNA, 25 bp, Artificial
  Probe
ctgtttgagaacgtcatctaggaca

SEQ ID NO: 171915 - DNA, 25 bp, Artificial
  Probe
gaacgtcatctaggacatgtaggag

SEQ ID NO: 171916 - DNA, 25 bp, Artificial
  Probe
gagaacgtcatctaggacatgtagg

SEQ ID NO: 171917 - DNA, 25 bp, Artificial
  Probe
agaacgtcatctaggacatgtagga

SEQ ID NO: 171918 - DNA, 25 bp, Artificial
  Probe
agctgtttgagaacgtcatctagga

SEQ ID NO: 171919 - DNA, 25 bp, Artificial
  Probe
aacgtcatctaggacatgtaggagg

SEQ ID NO: 171920 - DNA, 25 bp, Artificial
  Probe
gctgtttgagaacgtcatctaggac

SEQ ID NO: 171921 - DNA, 25 bp, Artificial
  Probe
tttgagaacgtcatctaggacatgt

SEQ ID NO: 171922 - DNA, 25 bp, Artificial
  Probe
acgtcatctaggacatgtaggaggg

SEQ ID NO: 171923 - DNA, 25 bp, Artificial
  Probe
gcatatcctatccaaccatactaac

SEQ ID NO: 171924 - DNA, 25 bp, Artificial
  Probe
agcatatcctatccaaccatactaa

SEQ ID NO: 171925 - DNA, 25 bp, Artificial
  Probe
catatcctatccaaccatactaacg

SEQ ID NO: 171926 - DNA, 25 bp, Artificial
  Probe
tgagagagacacaccttcttactag

SEQ ID NO: 171927 - DNA, 25 bp, Artificial
  Probe
tagcatatcctatccaaccatacta

SEQ ID NO: 171928 - DNA, 25 bp, Artificial
  Probe
cctgagtatgattgtgagagagaca

SEQ ID NO: 171929 - DNA, 25 bp, Artificial
  Probe
ctgagtatgattgtgagagagacac

SEQ ID NO: 171930 - DNA, 25 bp, Artificial
  Probe
gtgagagagacacaccttcttacta

SEQ ID NO: 171931 - DNA, 25 bp, Artificial
  Probe
atagcatatcctatccaaccatact

SEQ ID NO: 171932 - DNA, 25 bp, Artificial
  Probe
tatcctatccaaccatactaacgtg

SEQ ID NO: 171933 - DNA, 25 bp, Artificial
  Probe
taaccctgagtatgattgtgagaga

SEQ ID NO: 171934 - DNA, 25 bp, Artificial
  Probe
gtaaccctgagtatgattgtgagag

SEQ ID NO: 171935 - DNA, 25 bp, Artificial
  Probe
atatcctatccaaccatactaacgt

SEQ ID NO: 171936 - DNA, 25 bp, Artificial
  Probe
aaccctgagtatgattgtgagagag

SEQ ID NO: 171937 - DNA, 25 bp, Artificial
  Probe
ccctgagtatgattgtgagagagac

SEQ ID NO: 171938 - DNA, 25 bp, Artificial
  Probe
ggtaaccctgagtatgattgtgaga

SEQ ID NO: 171939 - DNA, 25 bp, Artificial
  Probe
atttgtagcaagactttggaagcat

SEQ ID NO: 171940 - DNA, 25 bp, Artificial
  Probe
tttgtagcaagactttggaagcatt

SEQ ID NO: 171941 - DNA, 25 bp, Artificial
  Probe
gtcatttgtagcaagactttggaag

SEQ ID NO: 171942 - DNA, 25 bp, Artificial
  Probe
accctgagtatgattgtgagagaga

SEQ ID NO: 171943 - DNA, 25 bp, Artificial
  Probe
ttgtagcaagactttggaagcattc

SEQ ID NO: 171944 - DNA, 25 bp, Artificial
  Probe
tcatttgtagcaagactttggaagc

SEQ ID NO: 171945 - DNA, 25 bp, Artificial
  Probe
cagaaggtaaccctgagtatgattg

SEQ ID NO: 171946 - DNA, 25 bp, Artificial
  Probe
gaaggtaaccctgagtatgattgtg

SEQ ID NO: 171947 - DNA, 25 bp, Artificial
  Probe
agaaggtaaccctgagtatgattgt

SEQ ID NO: 171948 - DNA, 25 bp, Artificial
  Probe
catttgtagcaagactttggaagca

SEQ ID NO: 171949 - DNA, 25 bp, Artificial
  Probe
aaggtaaccctgagtatgattgtga

SEQ ID NO: 171950 - DNA, 25 bp, Artificial
  Probe
ttaaccagaaggtaaccctgagtat

SEQ ID NO: 171951 - DNA, 25 bp, Artificial
  Probe
aggtaaccctgagtatgattgtgag

SEQ ID NO: 171952 - DNA, 25 bp, Artificial
  Probe
ccagaaggtaaccctgagtatgatt

SEQ ID NO: 171953 - DNA, 25 bp, Artificial
  Probe
atcctatccaaccatactaacgtgg

SEQ ID NO: 171954 - DNA, 25 bp, Artificial
  Probe
taaccagaaggtaaccctgagtatg

SEQ ID NO: 171955 - DNA, 25 bp, Artificial
  Probe
gtagcaagactttggaagcattcac

SEQ ID NO: 171956 - DNA, 25 bp, Artificial
  Probe
tgtagcaagactttggaagcattca

SEQ ID NO: 171957 - DNA, 25 bp, Artificial
  Probe
agtgatcctgatctgtggcattcat

SEQ ID NO: 171958 - DNA, 25 bp, Artificial
  Probe
gtgatcctgatctgtggcattcatg

SEQ ID NO: 171959 - DNA, 25 bp, Artificial
  Probe
gcgttactgcgatagcatatcctat

SEQ ID NO: 171960 - DNA, 25 bp, Artificial
  Probe
caaccttgaagcgttactgcgatag

SEQ ID NO: 171961 - DNA, 25 bp, Artificial
  Probe
ttgaagcgttactgcgatagcatat

SEQ ID NO: 171962 - DNA, 25 bp, Artificial
  Probe
ccattccaaccttgaagcgttactg

SEQ ID NO: 171963 - DNA, 25 bp, Artificial
  Probe
gaccattccaaccttgaagcgttac

SEQ ID NO: 171964 - DNA, 25 bp, Artificial
  Probe
accagaaggtaaccctgagtatgat

SEQ ID NO: 171965 - DNA, 25 bp, Artificial
  Probe
agaccattccaaccttgaagcgtta

SEQ ID NO: 171966 - DNA, 25 bp, Artificial
  Probe
ttttgttttgttttgtcttggtcaa

SEQ ID NO: 171967 - DNA, 25 bp, Artificial
  Probe
aaccagaaggtaaccctgagtatga

SEQ ID NO: 171968 - DNA, 25 bp, Artificial
  Probe
tcctcaagatctggaactaacctcc

SEQ ID NO: 171969 - DNA, 25 bp, Artificial
  Probe
gagataaaagtcggggatggaatgg

SEQ ID NO: 171970 - DNA, 25 bp, Artificial
  Probe
ggagataaaagtcggggatggaatg

SEQ ID NO: 171971 - DNA, 25 bp, Artificial
  Probe
tggagataaaagtcggggatggaat

SEQ ID NO: 171972 - DNA, 25 bp, Artificial
  Probe
tttccataaaggaaccacttccaac

SEQ ID NO: 171973 - DNA, 25 bp, Artificial
  Probe
cttcctcaagatctggaactaacct

SEQ ID NO: 171974 - DNA, 25 bp, Artificial
  Probe
ttcctcaagatctggaactaacctc

SEQ ID NO: 171975 - DNA, 25 bp, Artificial
  Probe
tccttcctcaagatctggaactaac

SEQ ID NO: 171976 - DNA, 25 bp, Artificial
  Probe
ttccataaaggaaccacttccaact

SEQ ID NO: 171977 - DNA, 25 bp, Artificial
  Probe
ccttcctcaagatctggaactaacc

SEQ ID NO: 171978 - DNA, 25 bp, Artificial
  Probe
gtggagataaaagtcggggatggaa

SEQ ID NO: 171979 - DNA, 25 bp, Artificial
  Probe
agataaaagtcggggatggaatggg

SEQ ID NO: 171980 - DNA, 25 bp, Artificial
  Probe
actgtggagataaaagtcggggatg

SEQ ID NO: 171981 - DNA, 25 bp, Artificial
  Probe
cactgtggagataaaagtcggggat

SEQ ID NO: 171982 - DNA, 25 bp, Artificial
  Probe
ttttccataaaggaaccacttccaa

SEQ ID NO: 171983 - DNA, 25 bp, Artificial
  Probe
cctcaagatctggaactaacctccc

SEQ ID NO: 171984 - DNA, 25 bp, Artificial
  Probe
ctgtggagataaaagtcggggatgg

SEQ ID NO: 171985 - DNA, 25 bp, Artificial
  Probe
gataaaagtcggggatggaatgggg

SEQ ID NO: 171986 - DNA, 25 bp, Artificial
  Probe
tgtggagataaaagtcggggatgga

SEQ ID NO: 171987 - DNA, 25 bp, Artificial
  Probe
aagatctggaactaacctccccaac

SEQ ID NO: 171988 - DNA, 25 bp, Artificial
  Probe
caagatctggaactaacctccccaa

SEQ ID NO: 171989 - DNA, 25 bp, Artificial
  Probe
ctcaagatctggaactaacctcccc

SEQ ID NO: 171990 - DNA, 25 bp, Artificial
  Probe
tcaagatctggaactaacctcccca

SEQ ID NO: 171991 - DNA, 25 bp, Artificial
  Probe
cacactaggaagttaagtagatgct

SEQ ID NO: 171992 - DNA, 25 bp, Artificial
  Probe
cactaggaagttaagtagatgctca

SEQ ID NO: 171993 - DNA, 25 bp, Artificial
  Probe
acactaggaagttaagtagatgctc

SEQ ID NO: 171994 - DNA, 25 bp, Artificial
  Probe
ggcacactaggaagttaagtagatg

SEQ ID NO: 171995 - DNA, 25 bp, Artificial
  Probe
tggcacactaggaagttaagtagat

SEQ ID NO: 171996 - DNA, 25 bp, Artificial
  Probe
ttggcacactaggaagttaagtaga

SEQ ID NO: 171997 - DNA, 25 bp, Artificial
  Probe
actaggaagttaagtagatgctcat

SEQ ID NO: 171998 - DNA, 25 bp, Artificial
  Probe
ctaggaagttaagtagatgctcatt

SEQ ID NO: 171999 - DNA, 25 bp, Artificial
  Probe
tctgaagcgaagtttgtagaaagta

SEQ ID NO: 172000 - DNA, 25 bp, Artificial
  Probe
ctgaagcgaagtttgtagaaagtac

SEQ ID NO: 172001 - DNA, 25 bp, Artificial
  Probe
gacatagggtacacactgaagaaat

SEQ ID NO: 172002 - DNA, 25 bp, Artificial
  Probe
acatagggtacacactgaagaaatg

SEQ ID NO: 172003 - DNA, 25 bp, Artificial
  Probe
attctttggcacactaggaagttaa

SEQ ID NO: 172004 - DNA, 25 bp, Artificial
  Probe
tttggcacactaggaagttaagtag

SEQ ID NO: 172005 - DNA, 25 bp, Artificial
  Probe
ctttggcacactaggaagttaagta

SEQ ID NO: 172006 - DNA, 25 bp, Artificial
  Probe
ttctttggcacactaggaagttaag

SEQ ID NO: 172007 - DNA, 25 bp, Artificial
  Probe
tgacatagggtacacactgaagaaa

SEQ ID NO: 172008 - DNA, 25 bp, Artificial
  Probe
ttgacatagggtacacactgaagaa

SEQ ID NO: 172009 - DNA, 25 bp, Artificial
  Probe
tttgacatagggtacacactgaaga

SEQ ID NO: 172010 - DNA, 25 bp, Artificial
  Probe
aattcactttgacatagggtacaca

SEQ ID NO: 172011 - DNA, 25 bp, Artificial
  Probe
ctttgacatagggtacacactgaag

SEQ ID NO: 172012 - DNA, 25 bp, Artificial
  Probe
cattctttggcacactaggaagtta

SEQ ID NO: 172013 - DNA, 25 bp, Artificial
  Probe
attcactttgacatagggtacacac

SEQ ID NO: 172014 - DNA, 25 bp, Artificial
  Probe
aaattcactttgacatagggtacac

SEQ ID NO: 172015 - DNA, 25 bp, Artificial
  Probe
actttgacatagggtacacactgaa

SEQ ID NO: 172016 - DNA, 25 bp, Artificial
  Probe
atagggtacacactgaagaaatgtc

SEQ ID NO: 172017 - DNA, 25 bp, Artificial
  Probe
acacactgaagaaatgtcattacag

SEQ ID NO: 172018 - DNA, 25 bp, Artificial
  Probe
catagggtacacactgaagaaatgt

SEQ ID NO: 172019 - DNA, 25 bp, Artificial
  Probe
gaaccatcggaccttgctgttaatt

SEQ ID NO: 172020 - DNA, 25 bp, Artificial
  Probe
gcacactaggaagttaagtagatgc

SEQ ID NO: 172021 - DNA, 25 bp, Artificial
  Probe
ggtacacactgaagaaatgtcatta

SEQ ID NO: 172022 - DNA, 25 bp, Artificial
  Probe
taggaagttaagtagatgctcattt

SEQ ID NO: 172023 - DNA, 25 bp, Artificial
  Probe
tctttggcacactaggaagttaagt

SEQ ID NO: 172024 - DNA, 25 bp, Artificial
  Probe
gggtacacactgaagaaatgtcatt

SEQ ID NO: 172025 - DNA, 25 bp, Artificial
  Probe
catccattcaactggcacaaatata

SEQ ID NO: 172026 - DNA, 25 bp, Artificial
  Probe
ttcactttgacatagggtacacact

SEQ ID NO: 172027 - DNA, 25 bp, Artificial
  Probe
actggcacaaatatatgattgatgt

SEQ ID NO: 172028 - DNA, 25 bp, Artificial
  Probe
tagggtacacactgaagaaatgtca

SEQ ID NO: 172029 - DNA, 25 bp, Artificial
  Probe
tacacactgaagaaatgtcattaca

SEQ ID NO: 172030 - DNA, 25 bp, Artificial
  Probe
cactttgacatagggtacacactga

SEQ ID NO: 172031 - DNA, 25 bp, Artificial
  Probe
ttcaactggcacaaatatatgattg

SEQ ID NO: 172032 - DNA, 25 bp, Artificial
  Probe
tcatccattcaactggcacaaatat

SEQ ID NO: 172033 - DNA, 25 bp, Artificial
  Probe
aactggcacaaatatatgattgatg

SEQ ID NO: 172034 - DNA, 25 bp, Artificial
  Probe
caactggcacaaatatatgattgat

SEQ ID NO: 172035 - DNA, 25 bp, Artificial
  Probe
ccattcaactggcacaaatatatga

SEQ ID NO: 172036 - DNA, 25 bp, Artificial
  Probe
gaaagtctatttacaacatctgcgg

SEQ ID NO: 172037 - DNA, 25 bp, Artificial
  Probe
aaagtctatttacaacatctgcggt

SEQ ID NO: 172038 - DNA, 25 bp, Artificial
  Probe
aagtctatttacaacatctgcggtc

SEQ ID NO: 172039 - DNA, 25 bp, Artificial
  Probe
agaaagtctatttacaacatctgcg

SEQ ID NO: 172040 - DNA, 25 bp, Artificial
  Probe
gtctatttacaacatctgcggtcac

SEQ ID NO: 172041 - DNA, 25 bp, Artificial
  Probe
agtctatttacaacatctgcggtca

SEQ ID NO: 172042 - DNA, 25 bp, Artificial
  Probe
gctaatgagtctgccatcttccttg

SEQ ID NO: 172043 - DNA, 25 bp, Artificial
  Probe
tctatttacaacatctgcggtcaca

SEQ ID NO: 172044 - DNA, 25 bp, Artificial
  Probe
ggagtcaggttgtagaaagtctatt

SEQ ID NO: 172045 - DNA, 25 bp, Artificial
  Probe
aggagtcaggttgtagaaagtctat

SEQ ID NO: 172046 - DNA, 25 bp, Artificial
  Probe
caggagtcaggttgtagaaagtcta

SEQ ID NO: 172047 - DNA, 25 bp, Artificial
  Probe
ctaatgagtctgccatcttccttgg

SEQ ID NO: 172048 - DNA, 25 bp, Artificial
  Probe
ctatttacaacatctgcggtcacag

SEQ ID NO: 172049 - DNA, 25 bp, Artificial
  Probe
gagtcaggttgtagaaagtctattt

SEQ ID NO: 172050 - DNA, 25 bp, Artificial
  Probe
ccaggagtcaggttgtagaaagtct

SEQ ID NO: 172051 - DNA, 25 bp, Artificial
  Probe
gtcaggttgtagaaagtctatttac

SEQ ID NO: 172052 - DNA, 25 bp, Artificial
  Probe
agtcaggttgtagaaagtctattta

SEQ ID NO: 172053 - DNA, 25 bp, Artificial
  Probe
ttcccaggagtcaggttgtagaaag

SEQ ID NO: 172054 - DNA, 25 bp, Artificial
  Probe
cttcccaggagtcaggttgtagaaa

SEQ ID NO: 172055 - DNA, 25 bp, Artificial
  Probe
tagaaagtctatttacaacatctgc

SEQ ID NO: 172056 - DNA, 25 bp, Artificial
  Probe
tcaggttgtagaaagtctatttaca

SEQ ID NO: 172057 - DNA, 25 bp, Artificial
  Probe
cccaggagtcaggttgtagaaagtc

SEQ ID NO: 172058 - DNA, 25 bp, Artificial
  Probe
atgatctgcatctcatccttgcttc

SEQ ID NO: 172059 - DNA, 25 bp, Artificial
  Probe
tcccaggagtcaggttgtagaaagt

SEQ ID NO: 172060 - DNA, 25 bp, Artificial
  Probe
taatgagtctgccatcttccttggg

SEQ ID NO: 172061 - DNA, 25 bp, Artificial
  Probe
tatttacaacatctgcggtcacaga

SEQ ID NO: 172062 - DNA, 25 bp, Artificial
  Probe
gtagaaagtctatttacaacatctg

SEQ ID NO: 172063 - DNA, 25 bp, Artificial
  Probe
agaggctaatgagtctgccatcttc

SEQ ID NO: 172064 - DNA, 25 bp, Artificial
  Probe
atttacaacatctgcggtcacagaa

SEQ ID NO: 172065 - DNA, 25 bp, Artificial
  Probe
tgtagaaagtctatttacaacatct

SEQ ID NO: 172066 - DNA, 25 bp, Artificial
  Probe
cagaggctaatgagtctgccatctt

SEQ ID NO: 172067 - DNA, 25 bp, Artificial
  Probe
ctgtccacagaggctaatgagtctg

SEQ ID NO: 172068 - DNA, 25 bp, Artificial
  Probe
ggctaatgagtctgccatcttcctt

SEQ ID NO: 172069 - DNA, 25 bp, Artificial
  Probe
tttacaacatctgcggtcacagaag

SEQ ID NO: 172070 - DNA, 25 bp, Artificial
  Probe
tgatctgcatctcatccttgcttcc

SEQ ID NO: 172071 - DNA, 25 bp, Artificial
  Probe
gaggctaatgagtctgccatcttcc

SEQ ID NO: 172072 - DNA, 25 bp, Artificial
  Probe
caggttgtagaaagtctatttacaa

SEQ ID NO: 172073 - DNA, 25 bp, Artificial
  Probe
cacagaggctaatgagtctgccatc

SEQ ID NO: 172074 - DNA, 25 bp, Artificial
  Probe
aggctaatgagtctgccatcttcct

SEQ ID NO: 172075 - DNA, 25 bp, Artificial
  Probe
acagaggctaatgagtctgccatct

SEQ ID NO: 172076 - DNA, 25 bp, Artificial
  Probe
ttgtagaaagtctatttacaacatc

SEQ ID NO: 172077 - DNA, 25 bp, Artificial
  Probe
gcttctccattctagtagaccacaa

SEQ ID NO: 172078 - DNA, 25 bp, Artificial
  Probe
ctttcctcctaactaaaccctcttt

SEQ ID NO: 172079 - DNA, 25 bp, Artificial
  Probe
atctttcctcctaactaaaccctct

SEQ ID NO: 172080 - DNA, 25 bp, Artificial
  Probe
aatctttcctcctaactaaaccctc

SEQ ID NO: 172081 - DNA, 25 bp, Artificial
  Probe
tctttcctcctaactaaaccctctt

SEQ ID NO: 172082 - DNA, 25 bp, Artificial
  Probe
aaggcttctccattctagtagacca

SEQ ID NO: 172083 - DNA, 25 bp, Artificial
  Probe
tcaacataactgtggtgatatacat

SEQ ID NO: 172084 - DNA, 25 bp, Artificial
  Probe
aaatctttcctcctaactaaaccct

SEQ ID NO: 172085 - DNA, 25 bp, Artificial
  Probe
ctaactaaaccctctttacttgcct

SEQ ID NO: 172086 - DNA, 25 bp, Artificial
  Probe
tcctaactaaaccctctttacttgc

SEQ ID NO: 172087 - DNA, 25 bp, Artificial
  Probe
tcctcctaactaaaccctctttact

SEQ ID NO: 172088 - DNA, 25 bp, Artificial
  Probe
aactaaaccctctttacttgcctac

SEQ ID NO: 172089 - DNA, 25 bp, Artificial
  Probe
cctcctaactaaaccctctttactt

SEQ ID NO: 172090 - DNA, 25 bp, Artificial
  Probe
ttcctcctaactaaaccctctttac

SEQ ID NO: 172091 - DNA, 25 bp, Artificial
  Probe
taactaaaccctctttacttgccta

SEQ ID NO: 172092 - DNA, 25 bp, Artificial
  Probe
cttctccattctagtagaccacaaa

SEQ ID NO: 172093 - DNA, 25 bp, Artificial
  Probe
cctaactaaaccctctttacttgcc

SEQ ID NO: 172094 - DNA, 25 bp, Artificial
  Probe
tttcctcctaactaaaccctcttta

SEQ ID NO: 172095 - DNA, 25 bp, Artificial
  Probe
caacataactgtggtgatatacatt

SEQ ID NO: 172096 - DNA, 25 bp, Artificial
  Probe
ctcctaactaaaccctctttacttg

SEQ ID NO: 172097 - DNA, 25 bp, Artificial
  Probe
aggcttctccattctagtagaccac

SEQ ID NO: 172098 - DNA, 25 bp, Artificial
  Probe
actatactgaaactttaccaggcat

SEQ ID NO: 172099 - DNA, 25 bp, Artificial
  Probe
gactatactgaaactttaccaggca

SEQ ID NO: 172100 - DNA, 25 bp, Artificial
  Probe
tgactatactgaaactttaccaggc

SEQ ID NO: 172101 - DNA, 25 bp, Artificial
  Probe
ggtcatttatcctcatagacaaagc

SEQ ID NO: 172102 - DNA, 25 bp, Artificial
  Probe
tatactgaaactttaccaggcatct

SEQ ID NO: 172103 - DNA, 25 bp, Artificial
  Probe
aaaggcttctccattctagtagacc

SEQ ID NO: 172104 - DNA, 25 bp, Artificial
  Probe
atactgaaactttaccaggcatctg

SEQ ID NO: 172105 - DNA, 25 bp, Artificial
  Probe
ctatactgaaactttaccaggcatc

SEQ ID NO: 172106 - DNA, 25 bp, Artificial
  Probe
ctctttacttgcctaccctcagaaa

SEQ ID NO: 172107 - DNA, 25 bp, Artificial
  Probe
gggtcatttatcctcatagacaaag

SEQ ID NO: 172108 - DNA, 25 bp, Artificial
  Probe
actaaaccctctttacttgcctacc

SEQ ID NO: 172109 - DNA, 25 bp, Artificial
  Probe
gtgactatactgaaactttaccagg

SEQ ID NO: 172110 - DNA, 25 bp, Artificial
  Probe
ggcttctccattctagtagaccaca

SEQ ID NO: 172111 - DNA, 25 bp, Artificial
  Probe
agggtcatttatcctcatagacaaa

SEQ ID NO: 172112 - DNA, 25 bp, Artificial
  Probe
aagggtcatttatcctcatagacaa

SEQ ID NO: 172113 - DNA, 25 bp, Artificial
  Probe
catttatcctcatagacaaagctcg

SEQ ID NO: 172114 - DNA, 25 bp, Artificial
  Probe
ctcatagacaaagctcgaaagacta

SEQ ID NO: 172115 - DNA, 25 bp, Artificial
  Probe
tatcctcatagacaaagctcgaaag

SEQ ID NO: 172116 - DNA, 25 bp, Artificial
  Probe
ttatcctcatagacaaagctcgaaa

SEQ ID NO: 172117 - DNA, 25 bp, Artificial
  Probe
tttatcctcatagacaaagctcgaa

SEQ ID NO: 172118 - DNA, 25 bp, Artificial
  Probe
atttatcctcatagacaaagctcga

SEQ ID NO: 172119 - DNA, 25 bp, Artificial
  Probe
gggtgactatactgaaactttacca

SEQ ID NO: 172120 - DNA, 25 bp, Artificial
  Probe
cccttaaataagacatctcgatggt

SEQ ID NO: 172121 - DNA, 25 bp, Artificial
  Probe
aaataagacatctcgatggtaacgg

SEQ ID NO: 172122 - DNA, 25 bp, Artificial
  Probe
tttctgggtctactgtatcatttcc

SEQ ID NO: 172123 - DNA, 25 bp, Artificial
  Probe
cctttctgggtctactgtatcattt

SEQ ID NO: 172124 - DNA, 25 bp, Artificial
  Probe
atcatttccgtagtaaggtttgttc

SEQ ID NO: 172125 - DNA, 25 bp, Artificial
  Probe
tcatttccgtagtaaggtttgttcc

SEQ ID NO: 172126 - DNA, 25 bp, Artificial
  Probe
gtatcatttccgtagtaaggtttgt

SEQ ID NO: 172127 - DNA, 25 bp, Artificial
  Probe
tgtatcatttccgtagtaaggtttg

SEQ ID NO: 172128 - DNA, 25 bp, Artificial
  Probe
ctttctgggtctactgtatcatttc

SEQ ID NO: 172129 - DNA, 25 bp, Artificial
  Probe
agtgcctcaagtattccctagatat

SEQ ID NO: 172130 - DNA, 25 bp, Artificial
  Probe
gtgcctcaagtattccctagatatt

SEQ ID NO: 172131 - DNA, 25 bp, Artificial
  Probe
aagtgcctcaagtattccctagata

SEQ ID NO: 172132 - DNA, 25 bp, Artificial
  Probe
ctgtatcatttccgtagtaaggttt

SEQ ID NO: 172133 - DNA, 25 bp, Artificial
  Probe
ctgggtctactgtatcatttccgta

SEQ ID NO: 172134 - DNA, 25 bp, Artificial
  Probe
actgtatcatttccgtagtaaggtt

SEQ ID NO: 172135 - DNA, 25 bp, Artificial
  Probe
aaagtgcctcaagtattccctagat

SEQ ID NO: 172136 - DNA, 25 bp, Artificial
  Probe
gcctcaagtattccctagatattgt

SEQ ID NO: 172137 - DNA, 25 bp, Artificial
  Probe
tgcctcaagtattccctagatattg

SEQ ID NO: 172138 - DNA, 25 bp, Artificial
  Probe
tatcatttccgtagtaaggtttgtt

SEQ ID NO: 172139 - DNA, 25 bp, Artificial
  Probe
ttctgggtctactgtatcatttccg

SEQ ID NO: 172140 - DNA, 25 bp, Artificial
  Probe
ctgaagtgcctttcctaagactaac

SEQ ID NO: 172141 - DNA, 25 bp, Artificial
  Probe
ctaagactaacgagggtacagatat

SEQ ID NO: 172142 - DNA, 25 bp, Artificial
  Probe
tttgtaagataagtgacttcggctg

SEQ ID NO: 172143 - DNA, 25 bp, Artificial
  Probe
gtttgtaagataagtgacttcggct

SEQ ID NO: 172144 - DNA, 25 bp, Artificial
  Probe
ttgtaagataagtgacttcggctgc

SEQ ID NO: 172145 - DNA, 25 bp, Artificial
  Probe
gaatttctgggctgaactgaacatt

SEQ ID NO: 172146 - DNA, 25 bp, Artificial
  Probe
gaaagtgcctcaagtattccctaga

SEQ ID NO: 172147 - DNA, 25 bp, Artificial
  Probe
cgtagtaaggtttgttcctgaatga

SEQ ID NO: 172148 - DNA, 25 bp, Artificial
  Probe
gtaagataagtgacttcggctgctc

SEQ ID NO: 172149 - DNA, 25 bp, Artificial
  Probe
cctgaagtgcctttcctaagactaa

SEQ ID NO: 172150 - DNA, 25 bp, Artificial
  Probe
gtagtaaggtttgttcctgaatgaa

SEQ ID NO: 172151 - DNA, 25 bp, Artificial
  Probe
atttccgtagtaaggtttgttcctg

SEQ ID NO: 172152 - DNA, 25 bp, Artificial
  Probe
catttccgtagtaaggtttgttcct

SEQ ID NO: 172153 - DNA, 25 bp, Artificial
  Probe
catttctctctagcgtctcttgtga

SEQ ID NO: 172154 - DNA, 25 bp, Artificial
  Probe
tcatttctctctagcgtctcttgtg

SEQ ID NO: 172155 - DNA, 25 bp, Artificial
  Probe
gtcatttctctctagcgtctcttgt

SEQ ID NO: 172156 - DNA, 25 bp, Artificial
  Probe
aatttctgggctgaactgaacattg

SEQ ID NO: 172157 - DNA, 25 bp, Artificial
  Probe
cctaagactaacgagggtacagata

SEQ ID NO: 172158 - DNA, 25 bp, Artificial
  Probe
ggtgttcctggtcatttctctctag

SEQ ID NO: 172159 - DNA, 25 bp, Artificial
  Probe
gtttgggaaagtgcctcaagtattc

SEQ ID NO: 172160 - DNA, 25 bp, Artificial
  Probe
tctgggtctactgtatcatttccgt

SEQ ID NO: 172161 - DNA, 25 bp, Artificial
  Probe
aagtgcctttcctaagactaacgag

SEQ ID NO: 172162 - DNA, 25 bp, Artificial
  Probe
gaagtgcctttcctaagactaacga

SEQ ID NO: 172163 - DNA, 25 bp, Artificial
  Probe
ccgtagtaaggtttgttcctgaatg

SEQ ID NO: 172164 - DNA, 25 bp, Artificial
  Probe
tccgtagtaaggtttgttcctgaat

SEQ ID NO: 172165 - DNA, 25 bp, Artificial
  Probe
acctttctgggtctactgtatcatt

SEQ ID NO: 172166 - DNA, 25 bp, Artificial
  Probe
aaggacgtttgtaagataagtgact

SEQ ID NO: 172167 - DNA, 25 bp, Artificial
  Probe
gagacagtattgtgtagtccaagtt

SEQ ID NO: 172168 - DNA, 25 bp, Artificial
  Probe
ttgagacagtattgtgtagtccaag

SEQ ID NO: 172169 - DNA, 25 bp, Artificial
  Probe
agacagtattgtgtagtccaagttg

SEQ ID NO: 172170 - DNA, 25 bp, Artificial
  Probe
tgagacagtattgtgtagtccaagt

SEQ ID NO: 172171 - DNA, 25 bp, Artificial
  Probe
gacagtattgtgtagtccaagttgc

SEQ ID NO: 172172 - DNA, 25 bp, Artificial
  Probe
gagttgtgtgtagaaagacctaaga

SEQ ID NO: 172173 - DNA, 25 bp, Artificial
  Probe
agagttgtgtgtagaaagacctaag

SEQ ID NO: 172174 - DNA, 25 bp, Artificial
  Probe
gagagttgtgtgtagaaagacctaa

SEQ ID NO: 172175 - DNA, 25 bp, Artificial
  Probe
ctcttggtctcttgtctttactgta

SEQ ID NO: 172176 - DNA, 25 bp, Artificial
  Probe
tattgtgtagtccaagttgcctctg

SEQ ID NO: 172177 - DNA, 25 bp, Artificial
  Probe
gtattgtgtagtccaagttgcctct

SEQ ID NO: 172178 - DNA, 25 bp, Artificial
  Probe
agtattgtgtagtccaagttgcctc

SEQ ID NO: 172179 - DNA, 25 bp, Artificial
  Probe
tagcaccttcatttaccctacatag

SEQ ID NO: 172180 - DNA, 25 bp, Artificial
  Probe
agttgtgtgtagaaagacctaagaa

SEQ ID NO: 172181 - DNA, 25 bp, Artificial
  Probe
tgagagttgtgtgtagaaagaccta

SEQ ID NO: 172182 - DNA, 25 bp, Artificial
  Probe
agcaccttcatttaccctacataga

SEQ ID NO: 172183 - DNA, 25 bp, Artificial
  Probe
tcttggtctcttgtctttactgtat

SEQ ID NO: 172184 - DNA, 25 bp, Artificial
  Probe
gcaccttcatttaccctacatagaa

SEQ ID NO: 172185 - DNA, 25 bp, Artificial
  Probe
cagtattgtgtagtccaagttgcct

SEQ ID NO: 172186 - DNA, 25 bp, Artificial
  Probe
gttgtgtgtagaaagacctaagaac

SEQ ID NO: 172187 - DNA, 25 bp, Artificial
  Probe
agaccaggtttagagtaaaggaatg

SEQ ID NO: 172188 - DNA, 25 bp, Artificial
  Probe
gcagtaagaccaggtttagagtaaa

SEQ ID NO: 172189 - DNA, 25 bp, Artificial
  Probe
gtaagaccaggtttagagtaaagga

SEQ ID NO: 172190 - DNA, 25 bp, Artificial
  Probe
agtaagaccaggtttagagtaaagg

SEQ ID NO: 172191 - DNA, 25 bp, Artificial
  Probe
aagaccaggtttagagtaaaggaat

SEQ ID NO: 172192 - DNA, 25 bp, Artificial
  Probe
ttgtgtgtagaaagacctaagaaca

SEQ ID NO: 172193 - DNA, 25 bp, Artificial
  Probe
tgtgtgtagaaagacctaagaacat

SEQ ID NO: 172194 - DNA, 25 bp, Artificial
  Probe
ctgagagttgtgtgtagaaagacct

SEQ ID NO: 172195 - DNA, 25 bp, Artificial
  Probe
caccttcatttaccctacatagaaa

SEQ ID NO: 172196 - DNA, 25 bp, Artificial
  Probe
acagtattgtgtagtccaagttgcc

SEQ ID NO: 172197 - DNA, 25 bp, Artificial
  Probe
taagaccaggtttagagtaaaggaa

SEQ ID NO: 172198 - DNA, 25 bp, Artificial
  Probe
tttgagacagtattgtgtagtccaa

SEQ ID NO: 172199 - DNA, 25 bp, Artificial
  Probe
ggcagtaagaccaggtttagagtaa

SEQ ID NO: 172200 - DNA, 25 bp, Artificial
  Probe
gaccaggtttagagtaaaggaatgc

SEQ ID NO: 172201 - DNA, 25 bp, Artificial
  Probe
cagtaagaccaggtttagagtaaag

SEQ ID NO: 172202 - DNA, 25 bp, Artificial
  Probe
cttggtctcttgtctttactgtata

SEQ ID NO: 172203 - DNA, 25 bp, Artificial
  Probe
gctcttggtctcttgtctttactgt

SEQ ID NO: 172204 - DNA, 25 bp, Artificial
  Probe
ttggtctcttgtctttactgtataa

SEQ ID NO: 172205 - DNA, 25 bp, Artificial
  Probe
gtgtgtagaaagacctaagaacata

SEQ ID NO: 172206 - DNA, 25 bp, Artificial
  Probe
gataattcgcttagtgtaatagaga

SEQ ID NO: 172207 - DNA, 25 bp, Artificial
  Probe
agataattcgcttagtgtaatagag

SEQ ID NO: 172208 - DNA, 25 bp, Artificial
  Probe
attgtgtagtccaagttgcctctga

SEQ ID NO: 172209 - DNA, 25 bp, Artificial
  Probe
tgtgtagaaagacctaagaacatag

SEQ ID NO: 172210 - DNA, 25 bp, Artificial
  Probe
tggtctcttgtctttactgtataaa

SEQ ID NO: 172211 - DNA, 25 bp, Artificial
  Probe
accaggtttagagtaaaggaatgcc

SEQ ID NO: 172212 - DNA, 25 bp, Artificial
  Probe
aattccgataacgaacgagactctc

SEQ ID NO: 172213 - DNA, 25 bp, Artificial
  Probe
caccgagattgagcaataacaggtc

SEQ ID NO: 172214 - DNA, 25 bp, Artificial
  Probe
accgagattgagcaataacaggtct

SEQ ID NO: 172215 - DNA, 25 bp, Artificial
  Probe
ttcagccaccgagattgagcaataa

SEQ ID NO: 172216 - DNA, 25 bp, Artificial
  Probe
ccaccgagattgagcaataacaggt

SEQ ID NO: 172217 - DNA, 25 bp, Artificial
  Probe
ttactgtgaactcttgtctcttgga

SEQ ID NO: 172218 - DNA, 25 bp, Artificial
  Probe
ctattatcaattccagtcttccagg

SEQ ID NO: 172219 - DNA, 25 bp, Artificial
  Probe
gcaggctgaatgtctattatcaatt

SEQ ID NO: 172220 - DNA, 25 bp, Artificial
  Probe
gttactgtgaactcttgtctcttgg

SEQ ID NO: 172221 - DNA, 25 bp, Artificial
  Probe
gtctattatcaattccagtcttcca

SEQ ID NO: 172222 - DNA, 25 bp, Artificial
  Probe
tgtctattatcaattccagtcttcc

SEQ ID NO: 172223 - DNA, 25 bp, Artificial
  Probe
tctattatcaattccagtcttccag

SEQ ID NO: 172224 - DNA, 25 bp, Artificial
  Probe
tactgtgaactcttgtctcttggag

SEQ ID NO: 172225 - DNA, 25 bp, Artificial
  Probe
tatcaattccagtcttccaggattc

SEQ ID NO: 172226 - DNA, 25 bp, Artificial
  Probe
ttatcaattccagtcttccaggatt

SEQ ID NO: 172227 - DNA, 25 bp, Artificial
  Probe
attatcaattccagtcttccaggat

SEQ ID NO: 172228 - DNA, 25 bp, Artificial
  Probe
tattatcaattccagtcttccagga

SEQ ID NO: 172229 - DNA, 25 bp, Artificial
  Probe
ggctgaatgtctattatcaattcca

SEQ ID NO: 172230 - DNA, 25 bp, Artificial
  Probe
cgaatatctcctttgaatgctacct

SEQ ID NO: 172231 - DNA, 25 bp, Artificial
  Probe
tcaattccagtcttccaggattcat

SEQ ID NO: 172232 - DNA, 25 bp, Artificial
  Probe
atcaattccagtcttccaggattca

SEQ ID NO: 172233 - DNA, 25 bp, Artificial
  Probe
aaacttaactgtgtccgataccaaa

SEQ ID NO: 172234 - DNA, 25 bp, Artificial
  Probe
aggctgaatgtctattatcaattcc

SEQ ID NO: 172235 - DNA, 25 bp, Artificial
  Probe
attaatgtgtaggtgaatgcagatt

SEQ ID NO: 172236 - DNA, 25 bp, Artificial
  Probe
tacagttactctcgaatatctcctt

SEQ ID NO: 172237 - DNA, 25 bp, Artificial
  Probe
ttacagttactctcgaatatctcct

SEQ ID NO: 172238 - DNA, 25 bp, Artificial
  Probe
tgcaggctgaatgtctattatcaat

SEQ ID NO: 172239 - DNA, 25 bp, Artificial
  Probe
aatgaatttgctggcttctcgtata

SEQ ID NO: 172240 - DNA, 25 bp, Artificial
  Probe
caattccagtcttccaggattcatg

SEQ ID NO: 172241 - DNA, 25 bp, Artificial
  Probe
cagacttccagaaactcatccaatg

SEQ ID NO: 172242 - DNA, 25 bp, Artificial
  Probe
gctgaatgtctattatcaattccag

SEQ ID NO: 172243 - DNA, 25 bp, Artificial
  Probe
caggctgaatgtctattatcaattc

SEQ ID NO: 172244 - DNA, 25 bp, Artificial
  Probe
aaatgaatttgctggcttctcgtat

SEQ ID NO: 172245 - DNA, 25 bp, Artificial
  Probe
gaatatctcctttgaatgctaccta

SEQ ID NO: 172246 - DNA, 25 bp, Artificial
  Probe
agttactgtgaactcttgtctcttg

SEQ ID NO: 172247 - DNA, 25 bp, Artificial
  Probe
atatctcctttgaatgctacctaag

SEQ ID NO: 172248 - DNA, 25 bp, Artificial
  Probe
ttaatgtgtaggtgaatgcagattc

SEQ ID NO: 172249 - DNA, 25 bp, Artificial
  Probe
actcttgtctcttggaggaaacttt

SEQ ID NO: 172250 - DNA, 25 bp, Artificial
  Probe
aactcttgtctcttggaggaaactt

SEQ ID NO: 172251 - DNA, 25 bp, Artificial
  Probe
gtcatgtggagagcttgtcttagag

SEQ ID NO: 172252 - DNA, 25 bp, Artificial
  Probe
tgtgaactcttgtctcttggaggaa

SEQ ID NO: 172253 - DNA, 25 bp, Artificial
  Probe
atgtctattatcaattccagtcttc

SEQ ID NO: 172254 - DNA, 25 bp, Artificial
  Probe
ccagacttccagaaactcatccaat

SEQ ID NO: 172255 - DNA, 25 bp, Artificial
  Probe
taatgtgtaggtgaatgcagattcc

SEQ ID NO: 172256 - DNA, 25 bp, Artificial
  Probe
aatatctcctttgaatgctacctaa

SEQ ID NO: 172257 - DNA, 25 bp, Artificial
  Probe
tcgaatatctcctttgaatgctacc

SEQ ID NO: 172258 - DNA, 25 bp, Artificial
  Probe
ctctcgaatatctcctttgaatgct

SEQ ID NO: 172259 - DNA, 25 bp, Artificial
  Probe
ctcgaatatctcctttgaatgctac

SEQ ID NO: 172260 - DNA, 25 bp, Artificial
  Probe
tctcgaatatctcctttgaatgcta

SEQ ID NO: 172261 - DNA, 25 bp, Artificial
  Probe
cagttactgtgaactcttgtctctt

SEQ ID NO: 172262 - DNA, 25 bp, Artificial
  Probe
atctatttatctgtctgagccctac

SEQ ID NO: 172263 - DNA, 25 bp, Artificial
  Probe
atgtaatctggtcagtgaagtccat

SEQ ID NO: 172264 - DNA, 25 bp, Artificial
  Probe
taatctggtcagtgaagtccatgaa

SEQ ID NO: 172265 - DNA, 25 bp, Artificial
  Probe
atatctatttatctgtctgagccct

SEQ ID NO: 172266 - DNA, 25 bp, Artificial
  Probe
gatgtaatctggtcagtgaagtcca

SEQ ID NO: 172267 - DNA, 25 bp, Artificial
  Probe
atttatctgtctgagccctacattc

SEQ ID NO: 172268 - DNA, 25 bp, Artificial
  Probe
tctatttatctgtctgagccctaca

SEQ ID NO: 172269 - DNA, 25 bp, Artificial
  Probe
ctatttatctgtctgagccctacat

SEQ ID NO: 172270 - DNA, 25 bp, Artificial
  Probe
agatgtaatctggtcagtgaagtcc

SEQ ID NO: 172271 - DNA, 25 bp, Artificial
  Probe
tatttatctgtctgagccctacatt

SEQ ID NO: 172272 - DNA, 25 bp, Artificial
  Probe
tatctatttatctgtctgagcccta

SEQ ID NO: 172273 - DNA, 25 bp, Artificial
  Probe
tttatctgtctgagccctacattca

SEQ ID NO: 172274 - DNA, 25 bp, Artificial
  Probe
gtaatctggtcagtgaagtccatga

SEQ ID NO: 172275 - DNA, 25 bp, Artificial
  Probe
aatatctatttatctgtctgagccc

SEQ ID NO: 172276 - DNA, 25 bp, Artificial
  Probe
tgtaatctggtcagtgaagtccatg

SEQ ID NO: 172277 - DNA, 25 bp, Artificial
  Probe
ttatctgtctgagccctacattcac

SEQ ID NO: 172278 - DNA, 25 bp, Artificial
  Probe
aatctggtcagtgaagtccatgaag

SEQ ID NO: 172279 - DNA, 25 bp, Artificial
  Probe
ctggtcagtgaagtccatgaagatc

SEQ ID NO: 172280 - DNA, 25 bp, Artificial
  Probe
tctggtcagtgaagtccatgaagat

SEQ ID NO: 172281 - DNA, 25 bp, Artificial
  Probe
atctggtcagtgaagtccatgaaga

SEQ ID NO: 172282 - DNA, 25 bp, Artificial
  Probe
tatctgtctgagccctacattcacc

SEQ ID NO: 172283 - DNA, 25 bp, Artificial
  Probe
tggtcagtgaagtccatgaagatcc

SEQ ID NO: 172284 - DNA, 25 bp, Artificial
  Probe
aaatatctatttatctgtctgagcc

SEQ ID NO: 172285 - DNA, 25 bp, Artificial
  Probe
gtcagtgaagtccatgaagatccca

SEQ ID NO: 172286 - DNA, 25 bp, Artificial
  Probe
tcagtgaagtccatgaagatcccac

SEQ ID NO: 172287 - DNA, 25 bp, Artificial
  Probe
ccctacattcacccacttctccatg

SEQ ID NO: 172288 - DNA, 25 bp, Artificial
  Probe
ggtcagtgaagtccatgaagatccc

SEQ ID NO: 172289 - DNA, 25 bp, Artificial
  Probe
ccttttcccatccccatatccctag

SEQ ID NO: 172290 - DNA, 25 bp, Artificial
  Probe
cattcacccacttctccatgcacta

SEQ ID NO: 172291 - DNA, 25 bp, Artificial
  Probe
ctacattcacccacttctccatgca

SEQ ID NO: 172292 - DNA, 25 bp, Artificial
  Probe
tacattcacccacttctccatgcac

SEQ ID NO: 172293 - DNA, 25 bp, Artificial
  Probe
cccttttcccatccccatatcccta

SEQ ID NO: 172294 - DNA, 25 bp, Artificial
  Probe
cttttcccatccccatatccctagg

SEQ ID NO: 172295 - DNA, 25 bp, Artificial
  Probe
ttttcccatccccatatccctaggt

SEQ ID NO: 172296 - DNA, 25 bp, Artificial
  Probe
tttcccatccccatatccctaggtc

SEQ ID NO: 172297 - DNA, 25 bp, Artificial
  Probe
catccccatatccctaggtctccac

SEQ ID NO: 172298 - DNA, 25 bp, Artificial
  Probe
acctccacttcagttgtagaattaa

SEQ ID NO: 172299 - DNA, 25 bp, Artificial
  Probe
cctccacttcagttgtagaattaag

SEQ ID NO: 172300 - DNA, 25 bp, Artificial
  Probe
tacctccacttcagttgtagaatta

SEQ ID NO: 172301 - DNA, 25 bp, Artificial
  Probe
gactacatagcacctgagatcattg

SEQ ID NO: 172302 - DNA, 25 bp, Artificial
  Probe
agactacatagcacctgagatcatt

SEQ ID NO: 172303 - DNA, 25 bp, Artificial
  Probe
ctccagactaagattccagatcagc

SEQ ID NO: 172304 - DNA, 25 bp, Artificial
  Probe
gctccagactaagattccagatcag

SEQ ID NO: 172305 - DNA, 25 bp, Artificial
  Probe
cagactacatagcacctgagatcat

SEQ ID NO: 172306 - DNA, 25 bp, Artificial
  Probe
gactaagattccagatcagctctct

SEQ ID NO: 172307 - DNA, 25 bp, Artificial
  Probe
agactaagattccagatcagctctc

SEQ ID NO: 172308 - DNA, 25 bp, Artificial
  Probe
gatttccagggctttacttatgtga

SEQ ID NO: 172309 - DNA, 25 bp, Artificial
  Probe
cagactaagattccagatcagctct

SEQ ID NO: 172310 - DNA, 25 bp, Artificial
  Probe
atttccagggctttacttatgtgaa

SEQ ID NO: 172311 - DNA, 25 bp, Artificial
  Probe
tgatttccagggctttacttatgtg

SEQ ID NO: 172312 - DNA, 25 bp, Artificial
  Probe
ttcagttgtagaattaagtgggagg

SEQ ID NO: 172313 - DNA, 25 bp, Artificial
  Probe
cttcagttgtagaattaagtgggag

SEQ ID NO: 172314 - DNA, 25 bp, Artificial
  Probe
ctacctccacttcagttgtagaatt

SEQ ID NO: 172315 - DNA, 25 bp, Artificial
  Probe
tgctccagactaagattccagatca

SEQ ID NO: 172316 - DNA, 25 bp, Artificial
  Probe
tttccagggctttacttatgtgaac

SEQ ID NO: 172317 - DNA, 25 bp, Artificial
  Probe
ctgctccagactaagattccagatc

SEQ ID NO: 172318 - DNA, 25 bp, Artificial
  Probe
ccagactaagattccagatcagctc

SEQ ID NO: 172319 - DNA, 25 bp, Artificial
  Probe
cctacctccacttcagttgtagaat

SEQ ID NO: 172320 - DNA, 25 bp, Artificial
  Probe
tccagactaagattccagatcagct

SEQ ID NO: 172321 - DNA, 25 bp, Artificial
  Probe
ctgatttccagggctttacttatgt

SEQ ID NO: 172322 - DNA, 25 bp, Artificial
  Probe
ttggagtcctgctgtatgagatgtt

SEQ ID NO: 172323 - DNA, 25 bp, Artificial
  Probe
agttgtagaattaagtgggaggctg

SEQ ID NO: 172324 - DNA, 25 bp, Artificial
  Probe
cagttgtagaattaagtgggaggct

SEQ ID NO: 172325 - DNA, 25 bp, Artificial
  Probe
tcagttgtagaattaagtgggaggc

SEQ ID NO: 172326 - DNA, 25 bp, Artificial
  Probe
ctagatttgttccagaacccttcac

SEQ ID NO: 172327 - DNA, 25 bp, Artificial
  Probe
tagatttgttccagaacccttcact

SEQ ID NO: 172328 - DNA, 25 bp, Artificial
  Probe
gattgcctgctccagactaagattc

SEQ ID NO: 172329 - DNA, 25 bp, Artificial
  Probe
atcatggaacaaactgtcacctatc

SEQ ID NO: 172330 - DNA, 25 bp, Artificial
  Probe
ctccacttcagttgtagaattaagt

SEQ ID NO: 172331 - DNA, 25 bp, Artificial
  Probe
ggttctagactctatcttggtagtt

SEQ ID NO: 172332 - DNA, 25 bp, Artificial
  Probe
catcatggaacaaactgtcacctat

SEQ ID NO: 172333 - DNA, 25 bp, Artificial
  Probe
cctgctccagactaagattccagat

SEQ ID NO: 172334 - DNA, 25 bp, Artificial
  Probe
tcctacctccacttcagttgtagaa

SEQ ID NO: 172335 - DNA, 25 bp, Artificial
  Probe
ccagactacatagcacctgagatca

SEQ ID NO: 172336 - DNA, 25 bp, Artificial
  Probe
gctgatttccagggctttacttatg

SEQ ID NO: 172337 - DNA, 25 bp, Artificial
  Probe
ttccagggctttacttatgtgaacc

SEQ ID NO: 172338 - DNA, 25 bp, Artificial
  Probe
gagaggttggagagactggaaattg

SEQ ID NO: 172339 - DNA, 25 bp, Artificial
  Probe
agattgcctgctccagactaagatt

SEQ ID NO: 172340 - DNA, 25 bp, Artificial
  Probe
atagcacctgagatcattgcctatc

SEQ ID NO: 172341 - DNA, 25 bp, Artificial
  Probe
cttcggcatgtgtaaagagaatgtc

SEQ ID NO: 172342 - DNA, 25 bp, Artificial
  Probe
gacttcggcatgtgtaaagagaatg

SEQ ID NO: 172343 - DNA, 25 bp, Artificial
  Probe
gctattacttgtccagagagatgtc

SEQ ID NO: 172344 - DNA, 25 bp, Artificial
  Probe
ctattacttgtccagagagatgtct

SEQ ID NO: 172345 - DNA, 25 bp, Artificial
  Probe
agctattacttgtccagagagatgt

SEQ ID NO: 172346 - DNA, 25 bp, Artificial
  Probe
aagctattacttgtccagagagatg

SEQ ID NO: 172347 - DNA, 25 bp, Artificial
  Probe
tgataagctattacttgtccagaga

SEQ ID NO: 172348 - DNA, 25 bp, Artificial
  Probe
tatttaccgactataacagggatgg

SEQ ID NO: 172349 - DNA, 25 bp, Artificial
  Probe
taagctattacttgtccagagagat

SEQ ID NO: 172350 - DNA, 25 bp, Artificial
  Probe
ataagctattacttgtccagagaga

SEQ ID NO: 172351 - DNA, 25 bp, Artificial
  Probe
cctttccattcctttctgatttgaa

SEQ ID NO: 172352 - DNA, 25 bp, Artificial
  Probe
tgtttcactttcttctttctttcct

SEQ ID NO: 172353 - DNA, 25 bp, Artificial
  Probe
gttgataagctattacttgtccaga

SEQ ID NO: 172354 - DNA, 25 bp, Artificial
  Probe
atgtctcagtggttaagagcatctg

SEQ ID NO: 172355 - DNA, 25 bp, Artificial
  Probe
gataagctattacttgtccagagag

SEQ ID NO: 172356 - DNA, 25 bp, Artificial
  Probe
ccctttactcctaaatcatcaccaa

SEQ ID NO: 172357 - DNA, 25 bp, Artificial
  Probe
gagatgtctcagtggttaagagcat

SEQ ID NO: 172358 - DNA, 25 bp, Artificial
  Probe
ttgataagctattacttgtccagag

SEQ ID NO: 172359 - DNA, 25 bp, Artificial
  Probe
agttgataagctattacttgtccag

SEQ ID NO: 172360 - DNA, 25 bp, Artificial
  Probe
tctcagtggttaagagcatctgttg

SEQ ID NO: 172361 - DNA, 25 bp, Artificial
  Probe
gtctcagtggttaagagcatctgtt

SEQ ID NO: 172362 - DNA, 25 bp, Artificial
  Probe
tttccattcctttctgatttgaaga

SEQ ID NO: 172363 - DNA, 25 bp, Artificial
  Probe
ctttccattcctttctgatttgaag

SEQ ID NO: 172364 - DNA, 25 bp, Artificial
  Probe
gcctttccattcctttctgatttga

SEQ ID NO: 172365 - DNA, 25 bp, Artificial
  Probe
agcctttccattcctttctgatttg

SEQ ID NO: 172366 - DNA, 25 bp, Artificial
  Probe
gtttcactttcttctttctttcctt

SEQ ID NO: 172367 - DNA, 25 bp, Artificial
  Probe
atttaccgactataacagggatggc

SEQ ID NO: 172368 - DNA, 25 bp, Artificial
  Probe
atatttaccgactataacagggatg

SEQ ID NO: 172369 - DNA, 25 bp, Artificial
  Probe
gcctttatacctaatacacagagat

SEQ ID NO: 172370 - DNA, 25 bp, Artificial
  Probe
tggctcaagttgataagctattact

SEQ ID NO: 172371 - DNA, 25 bp, Artificial
  Probe
agagatgtctcagtggttaagagca

SEQ ID NO: 172372 - DNA, 25 bp, Artificial
  Probe
gactataacagggatggctcaagtt

SEQ ID NO: 172373 - DNA, 25 bp, Artificial
  Probe
tttcactttcttctttctttccttt

SEQ ID NO: 172374 - DNA, 25 bp, Artificial
  Probe
ataacagggatggctcaagttgata

SEQ ID NO: 172375 - DNA, 25 bp, Artificial
  Probe
tataacagggatggctcaagttgat

SEQ ID NO: 172376 - DNA, 25 bp, Artificial
  Probe
ggatggctcaagttgataagctatt

SEQ ID NO: 172377 - DNA, 25 bp, Artificial
  Probe
gccctttactcctaaatcatcacca

SEQ ID NO: 172378 - DNA, 25 bp, Artificial
  Probe
atggctcaagttgataagctattac

SEQ ID NO: 172379 - DNA, 25 bp, Artificial
  Probe
taacagggatggctcaagttgataa

SEQ ID NO: 172380 - DNA, 25 bp, Artificial
  Probe
actataacagggatggctcaagttg

SEQ ID NO: 172381 - DNA, 25 bp, Artificial
  Probe
gatggctcaagttgataagctatta

SEQ ID NO: 172382 - DNA, 25 bp, Artificial
  Probe
tgtctcagtggttaagagcatctgt

SEQ ID NO: 172383 - DNA, 25 bp, Artificial
  Probe
ctataacagggatggctcaagttga

SEQ ID NO: 172384 - DNA, 25 bp, Artificial
  Probe
tttaccgactataacagggatggct

SEQ ID NO: 172385 - DNA, 25 bp, Artificial
  Probe
agatgtggtgataactgggagagag

SEQ ID NO: 172386 - DNA, 25 bp, Artificial
  Probe
gagatgtggtgataactgggagaga

SEQ ID NO: 172387 - DNA, 25 bp, Artificial
  Probe
agagatgtggtgataactgggagag

SEQ ID NO: 172388 - DNA, 25 bp, Artificial
  Probe
cgacaaatgaacttgctatgaaagg

SEQ ID NO: 172389 - DNA, 25 bp, Artificial
  Probe
gacaaatgaacttgctatgaaaggc

SEQ ID NO: 172390 - DNA, 25 bp, Artificial
  Probe
gcgacaaatgaacttgctatgaaag

SEQ ID NO: 172391 - DNA, 25 bp, Artificial
  Probe
gtctttgaggatcaggaagtctaaa

SEQ ID NO: 172392 - DNA, 25 bp, Artificial
  Probe
aatggtagtcatcctaactgcactt

SEQ ID NO: 172393 - DNA, 25 bp, Artificial
  Probe
tagggtcaggaggaatgaggaatag

SEQ ID NO: 172394 - DNA, 25 bp, Artificial
  Probe
gtagggtcaggaggaatgaggaata

SEQ ID NO: 172395 - DNA, 25 bp, Artificial
  Probe
ggcgacaaatgaacttgctatgaaa

SEQ ID NO: 172396 - DNA, 25 bp, Artificial
  Probe
tttgaggatcaggaagtctaaagcc

SEQ ID NO: 172397 - DNA, 25 bp, Artificial
  Probe
tctttgaggatcaggaagtctaaag

SEQ ID NO: 172398 - DNA, 25 bp, Artificial
  Probe
ctttgaggatcaggaagtctaaagc

SEQ ID NO: 172399 - DNA, 25 bp, Artificial
  Probe
agagaggggagactataaatgaaga

SEQ ID NO: 172400 - DNA, 25 bp, Artificial
  Probe
agagagaggggagactataaatgaa

SEQ ID NO: 172401 - DNA, 25 bp, Artificial
  Probe
aagagagaggggagactataaatga

SEQ ID NO: 172402 - DNA, 25 bp, Artificial
  Probe
caagagagaggggagactataaatg

SEQ ID NO: 172403 - DNA, 25 bp, Artificial
  Probe
gagagaggggagactataaatgaag

SEQ ID NO: 172404 - DNA, 25 bp, Artificial
  Probe
ccaagagagaggggagactataaat

SEQ ID NO: 172405 - DNA, 25 bp, Artificial
  Probe
taagaaagtaggggaagggaagaaa

SEQ ID NO: 172406 - DNA, 25 bp, Artificial
  Probe
gagaggggagactataaatgaagaa

SEQ ID NO: 172407 - DNA, 25 bp, Artificial
  Probe
ctaagaaagtaggggaagggaagaa

SEQ ID NO: 172408 - DNA, 25 bp, Artificial
  Probe
atggtagtcatcctaactgcacttt

SEQ ID NO: 172409 - DNA, 25 bp, Artificial
  Probe
aaatggtagtcatcctaactgcact

SEQ ID NO: 172410 - DNA, 25 bp, Artificial
  Probe
cttggatagatacagctcccataca

SEQ ID NO: 172411 - DNA, 25 bp, Artificial
  Probe
agaggggagactataaatgaagaaa

SEQ ID NO: 172412 - DNA, 25 bp, Artificial
  Probe
ttggatagatacagctcccatacac

SEQ ID NO: 172413 - DNA, 25 bp, Artificial
  Probe
ctctaagaaagtaggggaagggaag

SEQ ID NO: 172414 - DNA, 25 bp, Artificial
  Probe
accaagagagaggggagactataaa

SEQ ID NO: 172415 - DNA, 25 bp, Artificial
  Probe
aaccaagagagaggggagactataa

SEQ ID NO: 172416 - DNA, 25 bp, Artificial
  Probe
aaaccaagagagaggggagactata

SEQ ID NO: 172417 - DNA, 25 bp, Artificial
  Probe
aagaaagtaggggaagggaagaaag

SEQ ID NO: 172418 - DNA, 25 bp, Artificial
  Probe
ccttggatagatacagctcccatac

SEQ ID NO: 172419 - DNA, 25 bp, Artificial
  Probe
tccttggatagatacagctcccata

SEQ ID NO: 172420 - DNA, 25 bp, Artificial
  Probe
tagtcatcctaactgcactttggaa

SEQ ID NO: 172421 - DNA, 25 bp, Artificial
  Probe
gaggggagactataaatgaagaaaa

SEQ ID NO: 172422 - DNA, 25 bp, Artificial
  Probe
ttgaggatcaggaagtctaaagcct

SEQ ID NO: 172423 - DNA, 25 bp, Artificial
  Probe
tctaagaaagtaggggaagggaaga

SEQ ID NO: 172424 - DNA, 25 bp, Artificial
  Probe
tggtagtcatcctaactgcactttg

SEQ ID NO: 172425 - DNA, 25 bp, Artificial
  Probe
gaagggaagaaagactgagagggac

SEQ ID NO: 172426 - DNA, 25 bp, Artificial
  Probe
cacaggtctctacttccccaaatac

SEQ ID NO: 172427 - DNA, 25 bp, Artificial
  Probe
gtagtcatcctaactgcactttgga

SEQ ID NO: 172428 - DNA, 25 bp, Artificial
  Probe
gaaagtaggggaagggaagaaagac

SEQ ID NO: 172429 - DNA, 25 bp, Artificial
  Probe
agaaagtaggggaagggaagaaaga

SEQ ID NO: 172430 - DNA, 25 bp, Artificial
  Probe
aggatcaggaagtctaaagcctcag

SEQ ID NO: 172431 - DNA, 25 bp, Artificial
  Probe
cttcctcccgtccttggatagatac

SEQ ID NO: 172432 - DNA, 25 bp, Artificial
  Probe
gtcatcctaactgcactttggaaac

SEQ ID NO: 172433 - DNA, 25 bp, Artificial
  Probe
tctgtcattgtccttcaaccttatt

SEQ ID NO: 172434 - DNA, 25 bp, Artificial
  Probe
ttctgtcattgtccttcaaccttat

SEQ ID NO: 172435 - DNA, 25 bp, Artificial
  Probe
cctatcttctgtcattgtccttcaa

SEQ ID NO: 172436 - DNA, 25 bp, Artificial
  Probe
tatcttctgtcattgtccttcaacc

SEQ ID NO: 172437 - DNA, 25 bp, Artificial
  Probe
ctatcttctgtcattgtccttcaac

SEQ ID NO: 172438 - DNA, 25 bp, Artificial
  Probe
cttctgtcattgtccttcaacctta

SEQ ID NO: 172439 - DNA, 25 bp, Artificial
  Probe
atagtgacttgtgaagatccaactt

SEQ ID NO: 172440 - DNA, 25 bp, Artificial
  Probe
aatagtgacttgtgaagatccaact

SEQ ID NO: 172441 - DNA, 25 bp, Artificial
  Probe
atcttctgtcattgtccttcaacct

SEQ ID NO: 172442 - DNA, 25 bp, Artificial
  Probe
tcttctgtcattgtccttcaacctt

SEQ ID NO: 172443 - DNA, 25 bp, Artificial
  Probe
taatagtgacttgtgaagatccaac

SEQ ID NO: 172444 - DNA, 25 bp, Artificial
  Probe
tctacacttagatggagttggtcaa

SEQ ID NO: 172445 - DNA, 25 bp, Artificial
  Probe
cgttactgtggtgattgtgtaggaa

SEQ ID NO: 172446 - DNA, 25 bp, Artificial
  Probe
ttcttccctatcttctgtcattgtc

SEQ ID NO: 172447 - DNA, 25 bp, Artificial
  Probe
tttcttccctatcttctgtcattgt

SEQ ID NO: 172448 - DNA, 25 bp, Artificial
  Probe
tgtttcttccctatcttctgtcatt

SEQ ID NO: 172449 - DNA, 25 bp, Artificial
  Probe
gtttcttccctatcttctgtcattg

SEQ ID NO: 172450 - DNA, 25 bp, Artificial
  Probe
ttaatagtgacttgtgaagatccaa

SEQ ID NO: 172451 - DNA, 25 bp, Artificial
  Probe
ttactgtggtgattgtgtaggaaag

SEQ ID NO: 172452 - DNA, 25 bp, Artificial
  Probe
gttactgtggtgattgtgtaggaaa

SEQ ID NO: 172453 - DNA, 25 bp, Artificial
  Probe
ttccctatcttctgtcattgtcctt

SEQ ID NO: 172454 - DNA, 25 bp, Artificial
  Probe
atgtttcttccctatcttctgtcat

SEQ ID NO: 172455 - DNA, 25 bp, Artificial
  Probe
ccaacattaattgcatcctatctca

SEQ ID NO: 172456 - DNA, 25 bp, Artificial
  Probe
ctgtcattgtccttcaaccttattt

SEQ ID NO: 172457 - DNA, 25 bp, Artificial
  Probe
tccctatcttctgtcattgtccttc

SEQ ID NO: 172458 - DNA, 25 bp, Artificial
  Probe
cttccctatcttctgtcattgtcct

SEQ ID NO: 172459 - DNA, 25 bp, Artificial
  Probe
tcttccctatcttctgtcattgtcc

SEQ ID NO: 172460 - DNA, 25 bp, Artificial
  Probe
tacacttagatggagttggtcaaag

SEQ ID NO: 172461 - DNA, 25 bp, Artificial
  Probe
ctacacttagatggagttggtcaaa

SEQ ID NO: 172462 - DNA, 25 bp, Artificial
  Probe
tacaaatgatgacagcgaagtgaag

SEQ ID NO: 172463 - DNA, 25 bp, Artificial
  Probe
ccctatcttctgtcattgtccttca

SEQ ID NO: 172464 - DNA, 25 bp, Artificial
  Probe
attaatagtgacttgtgaagatcca

SEQ ID NO: 172465 - DNA, 25 bp, Artificial
  Probe
tgcatgtatagtaattaggactcca

SEQ ID NO: 172466 - DNA, 25 bp, Artificial
  Probe
gcatgtatagtaattaggactccat

SEQ ID NO: 172467 - DNA, 25 bp, Artificial
  Probe
catgtttcttccctatcttctgtca

SEQ ID NO: 172468 - DNA, 25 bp, Artificial
  Probe
ctccatgtttcttccctatcttctg

SEQ ID NO: 172469 - DNA, 25 bp, Artificial
  Probe
ccatgtttcttccctatcttctgtc

SEQ ID NO: 172470 - DNA, 25 bp, Artificial
  Probe
attcctccatgtttcttccctatct

SEQ ID NO: 172471 - DNA, 25 bp, Artificial
  Probe
tagtgacttgtgaagatccaacttt

SEQ ID NO: 172472 - DNA, 25 bp, Artificial
  Probe
tccatgtttcttccctatcttctgt

SEQ ID NO: 172473 - DNA, 25 bp, Artificial
  Probe
ttcctccatgtttcttccctatctt

SEQ ID NO: 172474 - DNA, 25 bp, Artificial
  Probe
cattcctccatgtttcttccctatc

SEQ ID NO: 172475 - DNA, 25 bp, Artificial
  Probe
tactgtggtgattgtgtaggaaagg

SEQ ID NO: 172476 - DNA, 25 bp, Artificial
  Probe
cttagatggagttggtcaaagggaa

SEQ ID NO: 172477 - DNA, 25 bp, Artificial
  Probe
cctccatgtttcttccctatcttct

SEQ ID NO: 172478 - DNA, 25 bp, Artificial
  Probe
cagaagactgaaggaactgaaggac

SEQ ID NO: 172479 - DNA, 25 bp, Artificial
  Probe
agaagactgaaggaactgaaggacc

SEQ ID NO: 172480 - DNA, 25 bp, Artificial
  Probe
ctaagtacacttgctccttctgtgg

SEQ ID NO: 172481 - DNA, 25 bp, Artificial
  Probe
gaagactgaaggaactgaaggacca

SEQ ID NO: 172482 - DNA, 25 bp, Artificial
  Probe
gctaagtacacttgctccttctgtg

SEQ ID NO: 172483 - DNA, 25 bp, Artificial
  Probe
ctggtctgcaataaatgggctaatt

SEQ ID NO: 172484 - DNA, 25 bp, Artificial
  Probe
aagactgaaggaactgaaggaccag

SEQ ID NO: 172485 - DNA, 25 bp, Artificial
  Probe
tggtctgcaataaatgggctaattt

SEQ ID NO: 172486 - DNA, 25 bp, Artificial
  Probe
catcagaagactgaaggaactgaag

SEQ ID NO: 172487 - DNA, 25 bp, Artificial
  Probe
gcaataaatgggctaatttacacaa

SEQ ID NO: 172488 - DNA, 25 bp, Artificial
  Probe
cggaaaatggtgaagaaaattgaaa

SEQ ID NO: 172489 - DNA, 25 bp, Artificial
  Probe
atggtgaagaaaattgaaatcagcc

SEQ ID NO: 172490 - DNA, 25 bp, Artificial
  Probe
atcagaagactgaaggaactgaagg

SEQ ID NO: 172491 - DNA, 25 bp, Artificial
  Probe
gaagaaaattgaaatcagccagcac

SEQ ID NO: 172492 - DNA, 25 bp, Artificial
  Probe
aatggtgaagaaaattgaaatcagc

SEQ ID NO: 172493 - DNA, 25 bp, Artificial
  Probe
ggtgaagaaaattgaaatcagccag

SEQ ID NO: 172494 - DNA, 25 bp, Artificial
  Probe
cagtagaagcacctcctgagacttg

SEQ ID NO: 172495 - DNA, 25 bp, Artificial
  Probe
ccatcagaagactgaaggaactgaa

SEQ ID NO: 172496 - DNA, 25 bp, Artificial
  Probe
acgctaagtacacttgctccttctg

SEQ ID NO: 172497 - DNA, 25 bp, Artificial
  Probe
cacgctaagtacacttgctccttct

SEQ ID NO: 172498 - DNA, 25 bp, Artificial
  Probe
ggtctgcaataaatgggctaattta

SEQ ID NO: 172499 - DNA, 25 bp, Artificial
  Probe
tgcaataaatgggctaatttacaca

SEQ ID NO: 172500 - DNA, 25 bp, Artificial
  Probe
ttctgtggcaagaccaagatgaaga

SEQ ID NO: 172501 - DNA, 25 bp, Artificial
  Probe
gtgaagaaaattgaaatcagccagc

SEQ ID NO: 172502 - DNA, 25 bp, Artificial
  Probe
ctgcaataaatgggctaatttacac

SEQ ID NO: 172503 - DNA, 25 bp, Artificial
  Probe
tctgcaataaatgggctaatttaca

SEQ ID NO: 172504 - DNA, 25 bp, Artificial
  Probe
gtctgcaataaatgggctaatttac

SEQ ID NO: 172505 - DNA, 25 bp, Artificial
  Probe
tgaagaaaattgaaatcagccagca

SEQ ID NO: 172506 - DNA, 25 bp, Artificial
  Probe
cctggtctgcaataaatgggctaat

SEQ ID NO: 172507 - DNA, 25 bp, Artificial
  Probe
caataaatgggctaatttacacaac

SEQ ID NO: 172508 - DNA, 25 bp, Artificial
  Probe
cgctaagtacacttgctccttctgt

SEQ ID NO: 172509 - DNA, 25 bp, Artificial
  Probe
taagtacacttgctccttctgtggc

SEQ ID NO: 172510 - DNA, 25 bp, Artificial
  Probe
tcagaagactgaaggaactgaagga

SEQ ID NO: 172511 - DNA, 25 bp, Artificial
  Probe
ctgtggcaagaccaagatgaagaga

SEQ ID NO: 172512 - DNA, 25 bp, Artificial
  Probe
tctgtggcaagaccaagatgaagag

SEQ ID NO: 172513 - DNA, 25 bp, Artificial
  Probe
gaaggaactgaaggaccagtagaag

SEQ ID NO: 172514 - DNA, 25 bp, Artificial
  Probe
cctggacctacaataccacttctgc

SEQ ID NO: 172515 - DNA, 25 bp, Artificial
  Probe
gcctggacctacaataccacttctg

SEQ ID NO: 172516 - DNA, 25 bp, Artificial
  Probe
ggaaaatggtgaagaaaattgaaat

SEQ ID NO: 172517 - DNA, 25 bp, Artificial
  Probe
tggtgaagaaaattgaaatcagcca

SEQ ID NO: 172518 - DNA, 25 bp, Artificial
  Probe
cttctgtggcaagaccaagatgaag

SEQ ID NO: 172519 - DNA, 25 bp, Artificial
  Probe
aagaaaattgaaatcagccagcacg

SEQ ID NO: 172520 - DNA, 25 bp, Artificial
  Probe
tgtggcaagaccaagatgaagagac

SEQ ID NO: 172521 - DNA, 25 bp, Artificial
  Probe
ctggacctacaataccacttctgca

SEQ ID NO: 172522 - DNA, 25 bp, Artificial
  Probe
tgaaggaactgaaggaccagtagaa

SEQ ID NO: 172523 - DNA, 25 bp, Artificial
  Probe
tccttgagttgtaagcagaataata

SEQ ID NO: 172524 - DNA, 25 bp, Artificial
  Probe
ttgtattgtttgaaatccttgtggc

SEQ ID NO: 172525 - DNA, 25 bp, Artificial
  Probe
ccttgagttgtaagcagaataataa

SEQ ID NO: 172526 - DNA, 25 bp, Artificial
  Probe
tttgtattgtttgaaatccttgtgg

SEQ ID NO: 172527 - DNA, 25 bp, Artificial
  Probe
gactgacagttgtagaggatctgaa

SEQ ID NO: 172528 - DNA, 25 bp, Artificial
  Probe
gagactgacagttgtagaggatctg

SEQ ID NO: 172529 - DNA, 25 bp, Artificial
  Probe
tgtttgtattgtttgaaatccttgt

SEQ ID NO: 172530 - DNA, 25 bp, Artificial
  Probe
tgtgtttgtattgtttgaaatcctt

SEQ ID NO: 172531 - DNA, 25 bp, Artificial
  Probe
ttgtgtttgtattgtttgaaatcct

SEQ ID NO: 172532 - DNA, 25 bp, Artificial
  Probe
agactgacagttgtagaggatctga

SEQ ID NO: 172533 - DNA, 25 bp, Artificial
  Probe
gtttgtattgtttgaaatccttgtg

SEQ ID NO: 172534 - DNA, 25 bp, Artificial
  Probe
gtgtttgtattgtttgaaatccttg

SEQ ID NO: 172535 - DNA, 25 bp, Artificial
  Probe
tttgtgtttgtattgtttgaaatcc

SEQ ID NO: 172536 - DNA, 25 bp, Artificial
  Probe
aacgagactgacagttgtagaggat

SEQ ID NO: 172537 - DNA, 25 bp, Artificial
  Probe
cgagactgacagttgtagaggatct

SEQ ID NO: 172538 - DNA, 25 bp, Artificial
  Probe
aaggaacgagactgacagttgtaga

SEQ ID NO: 172539 - DNA, 25 bp, Artificial
  Probe
taaaggaacgagactgacagttgta

SEQ ID NO: 172540 - DNA, 25 bp, Artificial
  Probe
tttggtaaaggaacgagactgacag

SEQ ID NO: 172541 - DNA, 25 bp, Artificial
  Probe
actgacagttgtagaggatctgaaa

SEQ ID NO: 172542 - DNA, 25 bp, Artificial
  Probe
acgagactgacagttgtagaggatc

SEQ ID NO: 172543 - DNA, 25 bp, Artificial
  Probe
tttctttggtaaaggaacgagactg

SEQ ID NO: 172544 - DNA, 25 bp, Artificial
  Probe
gaacgagactgacagttgtagagga

SEQ ID NO: 172545 - DNA, 25 bp, Artificial
  Probe
aggaacgagactgacagttgtagag

SEQ ID NO: 172546 - DNA, 25 bp, Artificial
  Probe
gtctgaggctaatccattactcata

SEQ ID NO: 172547 - DNA, 25 bp, Artificial
  Probe
atggctatggtcaaaagaaagagtt

SEQ ID NO: 172548 - DNA, 25 bp, Artificial
  Probe
gatggctatggtcaaaagaaagagt

SEQ ID NO: 172549 - DNA, 25 bp, Artificial
  Probe
aaaggaacgagactgacagttgtag

SEQ ID NO: 172550 - DNA, 25 bp, Artificial
  Probe
ctatggtcaaaagaaagagttcctg

SEQ ID NO: 172551 - DNA, 25 bp, Artificial
  Probe
ttctttggtaaaggaacgagactga

SEQ ID NO: 172552 - DNA, 25 bp, Artificial
  Probe
tctgaggctaatccattactcatat

SEQ ID NO: 172553 - DNA, 25 bp, Artificial
  Probe
gctatggtcaaaagaaagagttcct

SEQ ID NO: 172554 - DNA, 25 bp, Artificial
  Probe
ggtctgaggctaatccattactcat

SEQ ID NO: 172555 - DNA, 25 bp, Artificial
  Probe
tatggtcaaaagaaagagttcctga

SEQ ID NO: 172556 - DNA, 25 bp, Artificial
  Probe
tggctatggtcaaaagaaagagttc

SEQ ID NO: 172557 - DNA, 25 bp, Artificial
  Probe
tagtgatggctatggtcaaaagaaa

SEQ ID NO: 172558 - DNA, 25 bp, Artificial
  Probe
cttgagttgtaagcagaataataat

SEQ ID NO: 172559 - DNA, 25 bp, Artificial
  Probe
atggtcaaaagaaagagttcctgaa

SEQ ID NO: 172560 - DNA, 25 bp, Artificial
  Probe
gtaaaggaacgagactgacagttgt

SEQ ID NO: 172561 - DNA, 25 bp, Artificial
  Probe
gtagtgatggctatggtcaaaagaa

SEQ ID NO: 172562 - DNA, 25 bp, Artificial
  Probe
tgatggctatggtcaaaagaaagag

SEQ ID NO: 172563 - DNA, 25 bp, Artificial
  Probe
tggtcaaaagaaagagttcctgaag

SEQ ID NO: 172564 - DNA, 25 bp, Artificial
  Probe
tctttggtaaaggaacgagactgac

SEQ ID NO: 172565 - DNA, 25 bp, Artificial
  Probe
atggtctgaggctaatccattactc

SEQ ID NO: 172566 - DNA, 25 bp, Artificial
  Probe
gtgatggctatggtcaaaagaaaga

SEQ ID NO: 172567 - DNA, 25 bp, Artificial
  Probe
agtgatggctatggtcaaaagaaag

SEQ ID NO: 172568 - DNA, 25 bp, Artificial
  Probe
ccattaaagtctttattcctgtgaa

SEQ ID NO: 172569 - DNA, 25 bp, Artificial
  Probe
gtttgtaggactgactgaaacacag

SEQ ID NO: 172570 - DNA, 25 bp, Artificial
  Probe
cattaaagtctttattcctgtgaaa

SEQ ID NO: 172571 - DNA, 25 bp, Artificial
  Probe
tttgtaggactgactgaaacacagt

SEQ ID NO: 172572 - DNA, 25 bp, Artificial
  Probe
aggcagtcctgtgtcacaaatactc

SEQ ID NO: 172573 - DNA, 25 bp, Artificial
  Probe
attaaagtctttattcctgtgaaaa

SEQ ID NO: 172574 - DNA, 25 bp, Artificial
  Probe
caggcagtcctgtgtcacaaatact

SEQ ID NO: 172575 - DNA, 25 bp, Artificial
  Probe
aagcaagtagtatagttccagttcc

SEQ ID NO: 172576 - DNA, 25 bp, Artificial
  Probe
ggtaagcaagtagtatagttccagt

SEQ ID NO: 172577 - DNA, 25 bp, Artificial
  Probe
gaagaagcactctctacagacatag

SEQ ID NO: 172578 - DNA, 25 bp, Artificial
  Probe
gtaagcaagtagtatagttccagtt

SEQ ID NO: 172579 - DNA, 25 bp, Artificial
  Probe
cgaagaagcactctctacagacata

SEQ ID NO: 172580 - DNA, 25 bp, Artificial
  Probe
taagcaagtagtatagttccagttc

SEQ ID NO: 172581 - DNA, 25 bp, Artificial
  Probe
aagaagcactctctacagacataga

SEQ ID NO: 172582 - DNA, 25 bp, Artificial
  Probe
tggtaagcaagtagtatagttccag

SEQ ID NO: 172583 - DNA, 25 bp, Artificial
  Probe
ttggtaagcaagtagtatagttcca

SEQ ID NO: 172584 - DNA, 25 bp, Artificial
  Probe
caagtagtatagttccagttcccaa

SEQ ID NO: 172585 - DNA, 25 bp, Artificial
  Probe
aagtagtatagttccagttcccaaa

SEQ ID NO: 172586 - DNA, 25 bp, Artificial
  Probe
agtagtatagttccagttcccaaac

SEQ ID NO: 172587 - DNA, 25 bp, Artificial
  Probe
tagtatagttccagttcccaaacct

SEQ ID NO: 172588 - DNA, 25 bp, Artificial
  Probe
gtagtatagttccagttcccaaacc

SEQ ID NO: 172589 - DNA, 25 bp, Artificial
  Probe
gtatagttccagttcccaaaccttc

SEQ ID NO: 172590 - DNA, 25 bp, Artificial
  Probe
agcaagtagtatagttccagttccc

SEQ ID NO: 172591 - DNA, 25 bp, Artificial
  Probe
ctagcaggtagaagaactggtgaag

SEQ ID NO: 172592 - DNA, 25 bp, Artificial
  Probe
agtatagttccagttcccaaacctt

SEQ ID NO: 172593 - DNA, 25 bp, Artificial
  Probe
gcaagtagtatagttccagttccca

SEQ ID NO: 172594 - DNA, 25 bp, Artificial
  Probe
gtagaagaactggtgaaggcttgac

SEQ ID NO: 172595 - DNA, 25 bp, Artificial
  Probe
acgaagaagcactctctacagacat

SEQ ID NO: 172596 - DNA, 25 bp, Artificial
  Probe
tatagttccagttcccaaaccttcc

SEQ ID NO: 172597 - DNA, 25 bp, Artificial
  Probe
agacgaagaagcactctctacagac

SEQ ID NO: 172598 - DNA, 25 bp, Artificial
  Probe
ctagaaacagagacgaagaagcact

SEQ ID NO: 172599 - DNA, 25 bp, Artificial
  Probe
gacgaagaagcactctctacagaca

SEQ ID NO: 172600 - DNA, 25 bp, Artificial
  Probe
tagcaggtagaagaactggtgaagg

SEQ ID NO: 172601 - DNA, 25 bp, Artificial
  Probe
tagaaacagagacgaagaagcactc

SEQ ID NO: 172602 - DNA, 25 bp, Artificial
  Probe
cctagcaggtagaagaactggtgaa

SEQ ID NO: 172603 - DNA, 25 bp, Artificial
  Probe
ggtagaagaactggtgaaggcttga

SEQ ID NO: 172604 - DNA, 25 bp, Artificial
  Probe
aggtagaagaactggtgaaggcttg

SEQ ID NO: 172605 - DNA, 25 bp, Artificial
  Probe
aaggagtcaacaactcattctctag

SEQ ID NO: 172606 - DNA, 25 bp, Artificial
  Probe
gtaaggagtcaacaactcattctct

SEQ ID NO: 172607 - DNA, 25 bp, Artificial
  Probe
ttgtaaggagtcaacaactcattct

SEQ ID NO: 172608 - DNA, 25 bp, Artificial
  Probe
cttgtaaggagtcaacaactcattc

SEQ ID NO: 172609 - DNA, 25 bp, Artificial
  Probe
tcttgtaaggagtcaacaactcatt

SEQ ID NO: 172610 - DNA, 25 bp, Artificial
  Probe
cttggtaagcaagtagtatagttcc

SEQ ID NO: 172611 - DNA, 25 bp, Artificial
  Probe
ccttggtaagcaagtagtatagttc

SEQ ID NO: 172612 - DNA, 25 bp, Artificial
  Probe
tgtaaggagtcaacaactcattctc

SEQ ID NO: 172613 - DNA, 25 bp, Artificial
  Probe
ctcttgtaaggagtcaacaactcat

SEQ ID NO: 172614 - DNA, 25 bp, Artificial
  Probe
taaggagtcaacaactcattctcta

SEQ ID NO: 172615 - DNA, 25 bp, Artificial
  Probe
ctacagacatagagaaaagtttgct

SEQ ID NO: 172616 - DNA, 25 bp, Artificial
  Probe
agacagcctcttgtaaggagtcaac

SEQ ID NO: 172617 - DNA, 25 bp, Artificial
  Probe
cagacagcctcttgtaaggagtcaa

SEQ ID NO: 172618 - DNA, 25 bp, Artificial
  Probe
caggtagaagaactggtgaaggctt

SEQ ID NO: 172619 - DNA, 25 bp, Artificial
  Probe
gtcaacaactcattctctagaaaca

SEQ ID NO: 172620 - DNA, 25 bp, Artificial
  Probe
cacatacatgcgaatctacaagaag

SEQ ID NO: 172621 - DNA, 25 bp, Artificial
  Probe
acatacatgcgaatctacaagaagg

SEQ ID NO: 172622 - DNA, 25 bp, Artificial
  Probe
gcatcattgtgaacaagcaagttaa

SEQ ID NO: 172623 - DNA, 25 bp, Artificial
  Probe
ccacatacatgcgaatctacaagaa

SEQ ID NO: 172624 - DNA, 25 bp, Artificial
  Probe
tacaaaggaaataaagaacccgaac

SEQ ID NO: 172625 - DNA, 25 bp, Artificial
  Probe
caaaggaaataaagaacccgaactg

SEQ ID NO: 172626 - DNA, 25 bp, Artificial
  Probe
acaaaggaaataaagaacccgaact

SEQ ID NO: 172627 - DNA, 25 bp, Artificial
  Probe
caagcaagttaaaggcaagattctg

SEQ ID NO: 172628 - DNA, 25 bp, Artificial
  Probe
atacaaaggaaataaagaacccgaa

SEQ ID NO: 172629 - DNA, 25 bp, Artificial
  Probe
gcgaatctacaagaagggtgatatt

SEQ ID NO: 172630 - DNA, 25 bp, Artificial
  Probe
aacaagcaagttaaaggcaagattc

SEQ ID NO: 172631 - DNA, 25 bp, Artificial
  Probe
gaacaagcaagttaaaggcaagatt

SEQ ID NO: 172632 - DNA, 25 bp, Artificial
  Probe
atattgtagacatcaagggaatggg

SEQ ID NO: 172633 - DNA, 25 bp, Artificial
  Probe
cgaatctacaagaagggtgatattg

SEQ ID NO: 172634 - DNA, 25 bp, Artificial
  Probe
acaagcaagttaaaggcaagattct

SEQ ID NO: 172635 - DNA, 25 bp, Artificial
  Probe
gatattgtagacatcaagggaatgg

SEQ ID NO: 172636 - DNA, 25 bp, Artificial
  Probe
caagaagggtgatattgtagacatc

SEQ ID NO: 172637 - DNA, 25 bp, Artificial
  Probe
ggcatcattgtgaacaagcaagtta

SEQ ID NO: 172638 - DNA, 25 bp, Artificial
  Probe
tgcgaatctacaagaagggtgatat

SEQ ID NO: 172639 - DNA, 25 bp, Artificial
  Probe
atgcgaatctacaagaagggtgata

SEQ ID NO: 172640 - DNA, 25 bp, Artificial
  Probe
tgaacaagcaagttaaaggcaagat

SEQ ID NO: 172641 - DNA, 25 bp, Artificial
  Probe
aaaggaaataaagaacccgaactgc

SEQ ID NO: 172642 - DNA, 25 bp, Artificial
  Probe
ggtactcggtatatgttctctagac

SEQ ID NO: 172643 - DNA, 25 bp, Artificial
  Probe
tatacaaaggaaataaagaacccga

SEQ ID NO: 172644 - DNA, 25 bp, Artificial
  Probe
aagcaagttaaaggcaagattctgg

SEQ ID NO: 172645 - DNA, 25 bp, Artificial
  Probe
tcattgtgaacaagcaagttaaagg

SEQ ID NO: 172646 - DNA, 25 bp, Artificial
  Probe
catcattgtgaacaagcaagttaaa

SEQ ID NO: 172647 - DNA, 25 bp, Artificial
  Probe
atcattgtgaacaagcaagttaaag

SEQ ID NO: 172648 - DNA, 25 bp, Artificial
  Probe
gccacatacatgcgaatctacaaga

SEQ ID NO: 172649 - DNA, 25 bp, Artificial
  Probe
catacatgcgaatctacaagaaggg

SEQ ID NO: 172650 - DNA, 25 bp, Artificial
  Probe
gtgaacaagcaagttaaaggcaaga

SEQ ID NO: 172651 - DNA, 25 bp, Artificial
  Probe
tattgtagacatcaagggaatgggc

SEQ ID NO: 172652 - DNA, 25 bp, Artificial
  Probe
atacatgcgaatctacaagaagggt

SEQ ID NO: 172653 - DNA, 25 bp, Artificial
  Probe
tacgaattcatggcctaatgtatac

SEQ ID NO: 172654 - DNA, 25 bp, Artificial
  Probe
cattgtgaacaagcaagttaaaggc

SEQ ID NO: 172655 - DNA, 25 bp, Artificial
  Probe
tgtgaacaagcaagttaaaggcaag

SEQ ID NO: 172656 - DNA, 25 bp, Artificial
  Probe
attgtgaacaagcaagttaaaggca

SEQ ID NO: 172657 - DNA, 25 bp, Artificial
  Probe
actcggtatatgttctctagacctt

SEQ ID NO: 172658 - DNA, 25 bp, Artificial
  Probe
ttgtgaacaagcaagttaaaggcaa

SEQ ID NO: 172659 - DNA, 25 bp, Artificial
  Probe
gtactcggtatatgttctctagacc

SEQ ID NO: 172660 - DNA, 25 bp, Artificial
  Probe
catacgaattcatggcctaatgtat

SEQ ID NO: 172661 - DNA, 25 bp, Artificial
  Probe
tactcggtatatgttctctagacct

SEQ ID NO: 172662 - DNA, 25 bp, Artificial
  Probe
ggtgaaggagaacgatcagaagaaa

SEQ ID NO: 172663 - DNA, 25 bp, Artificial
  Probe
aaaatgacgaacacaaaaggaaaga

SEQ ID NO: 172664 - DNA, 25 bp, Artificial
  Probe
caaaatgacgaacacaaaaggaaag

SEQ ID NO: 172665 - DNA, 25 bp, Artificial
  Probe
caataaggtggtatcgtcattatcc

SEQ ID NO: 172666 - DNA, 25 bp, Artificial
  Probe
acaataaggtggtatcgtcattatc

SEQ ID NO: 172667 - DNA, 25 bp, Artificial
  Probe
acacaataaggtggtatcgtcatta

SEQ ID NO: 172668 - DNA, 25 bp, Artificial
  Probe
aacacaataaggtggtatcgtcatt

SEQ ID NO: 172669 - DNA, 25 bp, Artificial
  Probe
caacacaataaggtggtatcgtcat

SEQ ID NO: 172670 - DNA, 25 bp, Artificial
  Probe
cacaataaggtggtatcgtcattat

SEQ ID NO: 172671 - DNA, 25 bp, Artificial
  Probe
aataaggtggtatcgtcattatcca

SEQ ID NO: 172672 - DNA, 25 bp, Artificial
  Probe
gttcttcatcccaacacaataaggt

SEQ ID NO: 172673 - DNA, 25 bp, Artificial
  Probe
ttcttcatcccaacacaataaggtg

SEQ ID NO: 172674 - DNA, 25 bp, Artificial
  Probe
ccaacacaataaggtggtatcgtca

SEQ ID NO: 172675 - DNA, 25 bp, Artificial
  Probe
catcccaacacaataaggtggtatc

SEQ ID NO: 172676 - DNA, 25 bp, Artificial
  Probe
tcatcccaacacaataaggtggtat

SEQ ID NO: 172677 - DNA, 25 bp, Artificial
  Probe
ttcatcccaacacaataaggtggta

SEQ ID NO: 172678 - DNA, 25 bp, Artificial
  Probe
atcccaacacaataaggtggtatcg

SEQ ID NO: 172679 - DNA, 25 bp, Artificial
  Probe
tcttcatcccaacacaataaggtgg

SEQ ID NO: 172680 - DNA, 25 bp, Artificial
  Probe
tatcgtcattatccacagtgacaga

SEQ ID NO: 172681 - DNA, 25 bp, Artificial
  Probe
gtatcgtcattatccacagtgacag

SEQ ID NO: 172682 - DNA, 25 bp, Artificial
  Probe
cttcatcccaacacaataaggtggt

SEQ ID NO: 172683 - DNA, 25 bp, Artificial
  Probe
atcgtcattatccacagtgacagat

SEQ ID NO: 172684 - DNA, 25 bp, Artificial
  Probe
tgttcttcatcccaacacaataagg

SEQ ID NO: 172685 - DNA, 25 bp, Artificial
  Probe
ggtatcgtcattatccacagtgaca

SEQ ID NO: 172686 - DNA, 25 bp, Artificial
  Probe
tggtatcgtcattatccacagtgac

SEQ ID NO: 172687 - DNA, 25 bp, Artificial
  Probe
cccaacacaataaggtggtatcgtc

SEQ ID NO: 172688 - DNA, 25 bp, Artificial
  Probe
tcgtcattatccacagtgacagatg

SEQ ID NO: 172689 - DNA, 25 bp, Artificial
  Probe
tcccaacacaataaggtggtatcgt

SEQ ID NO: 172690 - DNA, 25 bp, Artificial
  Probe
ttctcttcttgattcagacaacaga

SEQ ID NO: 172691 - DNA, 25 bp, Artificial
  Probe
tcttctcttcttgattcagacaaca

SEQ ID NO: 172692 - DNA, 25 bp, Artificial
  Probe
tctcttcttgattcagacaacagat

SEQ ID NO: 172693 - DNA, 25 bp, Artificial
  Probe
cttctcttcttgattcagacaacag

SEQ ID NO: 172694 - DNA, 25 bp, Artificial
  Probe
ttcttctcttcttgattcagacaac

SEQ ID NO: 172695 - DNA, 25 bp, Artificial
  Probe
aagtaatccttggctacctagtgag

SEQ ID NO: 172696 - DNA, 25 bp, Artificial
  Probe
tcttcttgattcagacaacagatcc

SEQ ID NO: 172697 - DNA, 25 bp, Artificial
  Probe
ctcttcttgattcagacaacagatc

SEQ ID NO: 172698 - DNA, 25 bp, Artificial
  Probe
gtaatccttggctacctagtgagtg

SEQ ID NO: 172699 - DNA, 25 bp, Artificial
  Probe
agtaatccttggctacctagtgagt

SEQ ID NO: 172700 - DNA, 25 bp, Artificial
  Probe
cttcttgattcagacaacagatccg

SEQ ID NO: 172701 - DNA, 25 bp, Artificial
  Probe
taatccttggctacctagtgagtgt

SEQ ID NO: 172702 - DNA, 25 bp, Artificial
  Probe
atccttggctacctagtgagtgtaa

SEQ ID NO: 172703 - DNA, 25 bp, Artificial
  Probe
aatccttggctacctagtgagtgta

SEQ ID NO: 172704 - DNA, 25 bp, Artificial
  Probe
tcttgattcagacaacagatccgaa

SEQ ID NO: 172705 - DNA, 25 bp, Artificial
  Probe
ttcttgattcagacaacagatccga

SEQ ID NO: 172706 - DNA, 25 bp, Artificial
  Probe
ctaggatgtcaggatagctcttctc

SEQ ID NO: 172707 - DNA, 25 bp, Artificial
  Probe
tataaacatcactggaagagacacc

SEQ ID NO: 172708 - DNA, 25 bp, Artificial
  Probe
catctctcctttcttctcttcttga

SEQ ID NO: 172709 - DNA, 25 bp, Artificial
  Probe
ccatctctcctttcttctcttcttg

SEQ ID NO: 172710 - DNA, 25 bp, Artificial
  Probe
tccatctctcctttcttctcttctt

SEQ ID NO: 172711 - DNA, 25 bp, Artificial
  Probe
cacgagactcagatgagaagagatt

SEQ ID NO: 172712 - DNA, 25 bp, Artificial
  Probe
ccacagcctttctataaacatcact

SEQ ID NO: 172713 - DNA, 25 bp, Artificial
  Probe
tctctcctttcttctcttcttgatt

SEQ ID NO: 172714 - DNA, 25 bp, Artificial
  Probe
agcctttctataaacatcactggaa

SEQ ID NO: 172715 - DNA, 25 bp, Artificial
  Probe
gcctttctataaacatcactggaag

SEQ ID NO: 172716 - DNA, 25 bp, Artificial
  Probe
tctcctttcttctcttcttgattca

SEQ ID NO: 172717 - DNA, 25 bp, Artificial
  Probe
ctataaacatcactggaagagacac

SEQ ID NO: 172718 - DNA, 25 bp, Artificial
  Probe
ctccatctctcctttcttctcttct

SEQ ID NO: 172719 - DNA, 25 bp, Artificial
  Probe
ctctcctttcttctcttcttgattc

SEQ ID NO: 172720 - DNA, 25 bp, Artificial
  Probe
ctcctttcttctcttcttgattcag

SEQ ID NO: 172721 - DNA, 25 bp, Artificial
  Probe
atctctcctttcttctcttcttgat

SEQ ID NO: 172722 - DNA, 25 bp, Artificial
  Probe
cagcctggaatcaataagagttggt

SEQ ID NO: 172723 - DNA, 25 bp, Artificial
  Probe
cctttcttctcttcttgattcagac

SEQ ID NO: 172724 - DNA, 25 bp, Artificial
  Probe
tcctttcttctcttcttgattcaga

SEQ ID NO: 172725 - DNA, 25 bp, Artificial
  Probe
tctataaacatcactggaagagaca

SEQ ID NO: 172726 - DNA, 25 bp, Artificial
  Probe
taaagtaatccttggctacctagtg

SEQ ID NO: 172727 - DNA, 25 bp, Artificial
  Probe
agtactcagtgagatagactagtgt

SEQ ID NO: 172728 - DNA, 25 bp, Artificial
  Probe
ctttcttctcttcttgattcagaca

SEQ ID NO: 172729 - DNA, 25 bp, Artificial
  Probe
aaagtaatccttggctacctagtga

SEQ ID NO: 172730 - DNA, 25 bp, Artificial
  Probe
cctccatctctcctttcttctcttc

SEQ ID NO: 172731 - DNA, 25 bp, Artificial
  Probe
cttctcctccatctctcctttcttc

SEQ ID NO: 172732 - DNA, 25 bp, Artificial
  Probe
agagaaagaactttagcatgaggaa

SEQ ID NO: 172733 - DNA, 25 bp, Artificial
  Probe
tccttggctacctagtgagtgtaag

SEQ ID NO: 172734 - DNA, 25 bp, Artificial
  Probe
ttaaagtaatccttggctacctagt

SEQ ID NO: 172735 - DNA, 25 bp, Artificial
  Probe
tatatcttctactgctaccgtccaa

SEQ ID NO: 172736 - DNA, 25 bp, Artificial
  Probe
ttatatcttctactgctaccgtcca

SEQ ID NO: 172737 - DNA, 25 bp, Artificial
  Probe
attgccaattcttgtataagccttc

SEQ ID NO: 172738 - DNA, 25 bp, Artificial
  Probe
ttgccaattcttgtataagccttcc

SEQ ID NO: 172739 - DNA, 25 bp, Artificial
  Probe
aattgccaattcttgtataagcctt

SEQ ID NO: 172740 - DNA, 25 bp, Artificial
  Probe
caccatctttcatttccatacactt

SEQ ID NO: 172741 - DNA, 25 bp, Artificial
  Probe
tttatatcttctactgctaccgtcc

SEQ ID NO: 172742 - DNA, 25 bp, Artificial
  Probe
cctttatatcttctactgctaccgt

SEQ ID NO: 172743 - DNA, 25 bp, Artificial
  Probe
acctttatatcttctactgctaccg

SEQ ID NO: 172744 - DNA, 25 bp, Artificial
  Probe
accatctttcatttccatacacttc

SEQ ID NO: 172745 - DNA, 25 bp, Artificial
  Probe
gctccagtgtcatttccttgtataa

SEQ ID NO: 172746 - DNA, 25 bp, Artificial
  Probe
catttccttgtataagccttcccta

SEQ ID NO: 172747 - DNA, 25 bp, Artificial
  Probe
gtgtcatttccttgtataagccttc

SEQ ID NO: 172748 - DNA, 25 bp, Artificial
  Probe
agtgtcatttccttgtataagcctt

SEQ ID NO: 172749 - DNA, 25 bp, Artificial
  Probe
ccatctttcatttccatacacttct

SEQ ID NO: 172750 - DNA, 25 bp, Artificial
  Probe
ccaccatctttcatttccatacact

SEQ ID NO: 172751 - DNA, 25 bp, Artificial
  Probe
atatcttctactgctaccgtccaaa

SEQ ID NO: 172752 - DNA, 25 bp, Artificial
  Probe
gtctcccataaccacatcaaatctc

SEQ ID NO: 172753 - DNA, 25 bp, Artificial
  Probe
tgtcatttccttgtataagccttcc

SEQ ID NO: 172754 - DNA, 25 bp, Artificial
  Probe
cagtgtcatttccttgtataagcct

SEQ ID NO: 172755 - DNA, 25 bp, Artificial
  Probe
tccagtgtcatttccttgtataagc

SEQ ID NO: 172756 - DNA, 25 bp, Artificial
  Probe
ctccagtgtcatttccttgtataag

SEQ ID NO: 172757 - DNA, 25 bp, Artificial
  Probe
ctcccaagtcagaacctttatatct

SEQ ID NO: 172758 - DNA, 25 bp, Artificial
  Probe
tctcccaagtcagaacctttatatc

SEQ ID NO: 172759 - DNA, 25 bp, Artificial
  Probe
tcccaagtcagaacctttatatctt

SEQ ID NO: 172760 - DNA, 25 bp, Artificial
  Probe
atttccttgtataagccttccctag

SEQ ID NO: 172761 - DNA, 25 bp, Artificial
  Probe
cccaagtcagaacctttatatcttc

SEQ ID NO: 172762 - DNA, 25 bp, Artificial
  Probe
ccaattcttgtataagccttcccat

SEQ ID NO: 172763 - DNA, 25 bp, Artificial
  Probe
ctttatatcttctactgctaccgtc

SEQ ID NO: 172764 - DNA, 25 bp, Artificial
  Probe
tcatttccttgtataagccttccct

SEQ ID NO: 172765 - DNA, 25 bp, Artificial
  Probe
gtcatttccttgtataagccttccc

SEQ ID NO: 172766 - DNA, 25 bp, Artificial
  Probe
tgctccagtgtcatttccttgtata

SEQ ID NO: 172767 - DNA, 25 bp, Artificial
  Probe
tttccttgtataagccttccctagt

SEQ ID NO: 172768 - DNA, 25 bp, Artificial
  Probe
cccaccatctttcatttccatacac

SEQ ID NO: 172769 - DNA, 25 bp, Artificial
  Probe
ccagtgtcatttccttgtataagcc

SEQ ID NO: 172770 - DNA, 25 bp, Artificial
  Probe
tatcttctactgctaccgtccaaac

SEQ ID NO: 172771 - DNA, 25 bp, Artificial
  Probe
ccttgtataagccttccctagtcat

SEQ ID NO: 172772 - DNA, 25 bp, Artificial
  Probe
ttccttgtataagccttccctagtc

SEQ ID NO: 172773 - DNA, 25 bp, Artificial
  Probe
tctcccataaccacatcaaatctcc

SEQ ID NO: 172774 - DNA, 25 bp, Artificial
  Probe
aattcttgtataagccttcccatga

SEQ ID NO: 172775 - DNA, 25 bp, Artificial
  Probe
attcttgtataagccttcccatgat

SEQ ID NO: 172776 - DNA, 25 bp, Artificial
  Probe
ttcttgtataagccttcccatgatc

SEQ ID NO: 172777 - DNA, 25 bp, Artificial
  Probe
cttgtataagccttccctagtcatg

SEQ ID NO: 172778 - DNA, 25 bp, Artificial
  Probe
caattcttgtataagccttcccatg

SEQ ID NO: 172779 - DNA, 25 bp, Artificial
  Probe
tcccataaccacatcaaatctccag

SEQ ID NO: 172780 - DNA, 25 bp, Artificial
  Probe
cagcaatccatcaatgaagccatac

SEQ ID NO: 172781 - DNA, 25 bp, Artificial
  Probe
acagcaatccatcaatgaagccata

SEQ ID NO: 172782 - DNA, 25 bp, Artificial
  Probe
ttgccttaatcgagttctgctacaa

SEQ ID NO: 172783 - DNA, 25 bp, Artificial
  Probe
cttaatcgagttctgctacaaatcc

SEQ ID NO: 172784 - DNA, 25 bp, Artificial
  Probe
ccttaatcgagttctgctacaaatc

SEQ ID NO: 172785 - DNA, 25 bp, Artificial
  Probe
agcaatccatcaatgaagccatacg

SEQ ID NO: 172786 - DNA, 25 bp, Artificial
  Probe
ttaatcgagttctgctacaaatccc

SEQ ID NO: 172787 - DNA, 25 bp, Artificial
  Probe
ccatcaatgaagccatacggacatc

SEQ ID NO: 172788 - DNA, 25 bp, Artificial
  Probe
gttgccttaatcgagttctgctaca

SEQ ID NO: 172789 - DNA, 25 bp, Artificial
  Probe
gccttaatcgagttctgctacaaat

SEQ ID NO: 172790 - DNA, 25 bp, Artificial
  Probe
aatccatcaatgaagccatacggac

SEQ ID NO: 172791 - DNA, 25 bp, Artificial
  Probe
caatccatcaatgaagccatacgga

SEQ ID NO: 172792 - DNA, 25 bp, Artificial
  Probe
catcaatgaagccatacggacatcg

SEQ ID NO: 172793 - DNA, 25 bp, Artificial
  Probe
cacagcaatccatcaatgaagccat

SEQ ID NO: 172794 - DNA, 25 bp, Artificial
  Probe
atcccacagcaatccatcaatgaag

SEQ ID NO: 172795 - DNA, 25 bp, Artificial
  Probe
gattgtaactggagcagacaggaaa

SEQ ID NO: 172796 - DNA, 25 bp, Artificial
  Probe
ggttgccttaatcgagttctgctac

SEQ ID NO: 172797 - DNA, 25 bp, Artificial
  Probe
tgccttaatcgagttctgctacaaa

SEQ ID NO: 172798 - DNA, 25 bp, Artificial
  Probe
attgtaactggagcagacaggaaac

SEQ ID NO: 172799 - DNA, 25 bp, Artificial
  Probe
gcaatccatcaatgaagccatacgg

SEQ ID NO: 172800 - DNA, 25 bp, Artificial
  Probe
taatcgagttctgctacaaatcccg

SEQ ID NO: 172801 - DNA, 25 bp, Artificial
  Probe
gatcccacagcaatccatcaatgaa

SEQ ID NO: 172802 - DNA, 25 bp, Artificial
  Probe
ggattgtaactggagcagacaggaa

SEQ ID NO: 172803 - DNA, 25 bp, Artificial
  Probe
acaggattgtaactggagcagacag

SEQ ID NO: 172804 - DNA, 25 bp, Artificial
  Probe
tggttgccttaatcgagttctgcta

SEQ ID NO: 172805 - DNA, 25 bp, Artificial
  Probe
tccatcaatgaagccatacggacat

SEQ ID NO: 172806 - DNA, 25 bp, Artificial
  Probe
atccatcaatgaagccatacggaca

SEQ ID NO: 172807 - DNA, 25 bp, Artificial
  Probe
cacaggattgtaactggagcagaca

SEQ ID NO: 172808 - DNA, 25 bp, Artificial
  Probe
atgaaagtgggaggtaacttggatt

SEQ ID NO: 172809 - DNA, 25 bp, Artificial
  Probe
atcaatgaagccatacggacatcga

SEQ ID NO: 172810 - DNA, 25 bp, Artificial
  Probe
cagtaaacctggcagtgttaaaact

SEQ ID NO: 172811 - DNA, 25 bp, Artificial
  Probe
catgctggttgccttaatcgagttc

SEQ ID NO: 172812 - DNA, 25 bp, Artificial
  Probe
tgaaagtgggaggtaacttggattc

SEQ ID NO: 172813 - DNA, 25 bp, Artificial
  Probe
atgctggttgccttaatcgagttct

SEQ ID NO: 172814 - DNA, 25 bp, Artificial
  Probe
catgaaagtgggaggtaacttggat

SEQ ID NO: 172815 - DNA, 25 bp, Artificial
  Probe
atcgagttctgctacaaatcccgta

SEQ ID NO: 172816 - DNA, 25 bp, Artificial
  Probe
caggattgtaactggagcagacagg

SEQ ID NO: 172817 - DNA, 25 bp, Artificial
  Probe
aggattgtaactggagcagacagga

SEQ ID NO: 172818 - DNA, 25 bp, Artificial
  Probe
gatgaagggtttctgtttgatccca

SEQ ID NO: 172819 - DNA, 25 bp, Artificial
  Probe
gaagcggatgaagggtttctgtttg

SEQ ID NO: 172820 - DNA, 25 bp, Artificial
  Probe
gcggatgaagggtttctgtttgatc

SEQ ID NO: 172821 - DNA, 25 bp, Artificial
  Probe
agcggatgaagggtttctgtttgat

SEQ ID NO: 172822 - DNA, 25 bp, Artificial
  Probe
atgaagggtttctgtttgatcccac

SEQ ID NO: 172823 - DNA, 25 bp, Artificial
  Probe
tcaatgaagccatacggacatcgac

SEQ ID NO: 172824 - DNA, 25 bp, Artificial
  Probe
ctggttgccttaatcgagttctgct

SEQ ID NO: 172825 - DNA, 25 bp, Artificial
  Probe
atcatcttactctcaaggaactcac

SEQ ID NO: 172826 - DNA, 25 bp, Artificial
  Probe
catcatcttactctcaaggaactca

SEQ ID NO: 172827 - DNA, 25 bp, Artificial
  Probe
gtcatcatcttactctcaaggaact

SEQ ID NO: 172828 - DNA, 25 bp, Artificial
  Probe
taggtcatcatcttactctcaagga

SEQ ID NO: 172829 - DNA, 25 bp, Artificial
  Probe
atcttactctcaaggaactcactct

SEQ ID NO: 172830 - DNA, 25 bp, Artificial
  Probe
catcttactctcaaggaactcactc

SEQ ID NO: 172831 - DNA, 25 bp, Artificial
  Probe
tcatcatcttactctcaaggaactc

SEQ ID NO: 172832 - DNA, 25 bp, Artificial
  Probe
tcatcttactctcaaggaactcact

SEQ ID NO: 172833 - DNA, 25 bp, Artificial
  Probe
ggtcatcatcttactctcaaggaac

SEQ ID NO: 172834 - DNA, 25 bp, Artificial
  Probe
aggtcatcatcttactctcaaggaa

SEQ ID NO: 172835 - DNA, 25 bp, Artificial
  Probe
ataggtcatcatcttactctcaagg

SEQ ID NO: 172836 - DNA, 25 bp, Artificial
  Probe
tcttactctcaaggaactcactctg

SEQ ID NO: 172837 - DNA, 25 bp, Artificial
  Probe
gataggtcatcatcttactctcaag

SEQ ID NO: 172838 - DNA, 25 bp, Artificial
  Probe
cttactctcaaggaactcactctgg

SEQ ID NO: 172839 - DNA, 25 bp, Artificial
  Probe
ttactctcaaggaactcactctgga

SEQ ID NO: 172840 - DNA, 25 bp, Artificial
  Probe
cacaggaaaggaaagagagactatt

SEQ ID NO: 172841 - DNA, 25 bp, Artificial
  Probe
tgattatcaagcagcaacagcaatt

SEQ ID NO: 172842 - DNA, 25 bp, Artificial
  Probe
gtaaatccaaacacacaattcctca

SEQ ID NO: 172843 - DNA, 25 bp, Artificial
  Probe
taaatccaaacacacaattcctcag

SEQ ID NO: 172844 - DNA, 25 bp, Artificial
  Probe
agtaaatccaaacacacaattcctc

SEQ ID NO: 172845 - DNA, 25 bp, Artificial
  Probe
acaggaaaggaaagagagactattc

SEQ ID NO: 172846 - DNA, 25 bp, Artificial
  Probe
ggaaagagagactattctatgaggc

SEQ ID NO: 172847 - DNA, 25 bp, Artificial
  Probe
gaaagagagactattctatgaggcg

SEQ ID NO: 172848 - DNA, 25 bp, Artificial
  Probe
caggaaaggaaagagagactattct

SEQ ID NO: 172849 - DNA, 25 bp, Artificial
  Probe
caagtggagaggagaagccattata

SEQ ID NO: 172850 - DNA, 25 bp, Artificial
  Probe
tactctcaaggaactcactctggag

SEQ ID NO: 172851 - DNA, 25 bp, Artificial
  Probe
aagtggagaggagaagccattataa

SEQ ID NO: 172852 - DNA, 25 bp, Artificial
  Probe
tagtaaatccaaacacacaattcct

SEQ ID NO: 172853 - DNA, 25 bp, Artificial
  Probe
gtagtaaatccaaacacacaattcc

SEQ ID NO: 172854 - DNA, 25 bp, Artificial
  Probe
ggtagtaaatccaaacacacaattc

SEQ ID NO: 172855 - DNA, 25 bp, Artificial
  Probe
gtgattatcaagcagcaacagcaat

SEQ ID NO: 172856 - DNA, 25 bp, Artificial
  Probe
aggaaagagagactattctatgagg

SEQ ID NO: 172857 - DNA, 25 bp, Artificial
  Probe
atgtagatttgaagcaggaaagcac

SEQ ID NO: 172858 - DNA, 25 bp, Artificial
  Probe
tatcaacaggtttgtattcaacgag

SEQ ID NO: 172859 - DNA, 25 bp, Artificial
  Probe
gcacaggaaaggaaagagagactat

SEQ ID NO: 172860 - DNA, 25 bp, Artificial
  Probe
ggagaggagaagccattataaagat

SEQ ID NO: 172861 - DNA, 25 bp, Artificial
  Probe
aaacactttcagaaaccactaattg

SEQ ID NO: 172862 - DNA, 25 bp, Artificial
  Probe
ttatcaacaggtttgtattcaacga

SEQ ID NO: 172863 - DNA, 25 bp, Artificial
  Probe
gttatcaacaggtttgtattcaacg

SEQ ID NO: 172864 - DNA, 25 bp, Artificial
  Probe
gaggttatcaacaggtttgtattca

SEQ ID NO: 172865 - DNA, 25 bp, Artificial
  Probe
tgaggttatcaacaggtttgtattc

SEQ ID NO: 172866 - DNA, 25 bp, Artificial
  Probe
aacactttcagaaaccactaattga

SEQ ID NO: 172867 - DNA, 25 bp, Artificial
  Probe
aaatccaaacacacaattcctcagg

SEQ ID NO: 172868 - DNA, 25 bp, Artificial
  Probe
gccattataaagatttcaccgaagt

SEQ ID NO: 172869 - DNA, 25 bp, Artificial
  Probe
aggaaaggaaagagagactattcta

SEQ ID NO: 172870 - DNA, 25 bp, Artificial
  Probe
atgtatgaatttgagtatcgcccaa

SEQ ID NO: 172871 - DNA, 25 bp, Artificial
  Probe
tgtatgaatttgagtatcgcccaag

SEQ ID NO: 172872 - DNA, 25 bp, Artificial
  Probe
catgtatgaatttgagtatcgccca

SEQ ID NO: 172873 - DNA, 25 bp, Artificial
  Probe
tcatgtatgaatttgagtatcgccc

SEQ ID NO: 172874 - DNA, 25 bp, Artificial
  Probe
catgtttgagaacctgaagctaaag

SEQ ID NO: 172875 - DNA, 25 bp, Artificial
  Probe
gtatgaatttgagtatcgcccaagc

SEQ ID NO: 172876 - DNA, 25 bp, Artificial
  Probe
cagaatatgaccagaaggaagggta

SEQ ID NO: 172877 - DNA, 25 bp, Artificial
  Probe
ccatgtttgagaacctgaagctaaa

SEQ ID NO: 172878 - DNA, 25 bp, Artificial
  Probe
agaatatgaccagaaggaagggtac

SEQ ID NO: 172879 - DNA, 25 bp, Artificial
  Probe
atgtttgagaacctgaagctaaagg

SEQ ID NO: 172880 - DNA, 25 bp, Artificial
  Probe
tatgaatttgagtatcgcccaagct

SEQ ID NO: 172881 - DNA, 25 bp, Artificial
  Probe
tctcagcaaaatggtgatgaaatac

SEQ ID NO: 172882 - DNA, 25 bp, Artificial
  Probe
ctcagcaaaatggtgatgaaatact

SEQ ID NO: 172883 - DNA, 25 bp, Artificial
  Probe
aatctcagcaaaatggtgatgaaat

SEQ ID NO: 172884 - DNA, 25 bp, Artificial
  Probe
caatctcagcaaaatggtgatgaaa

SEQ ID NO: 172885 - DNA, 25 bp, Artificial
  Probe
agcaaaatggtgatgaaatactggg

SEQ ID NO: 172886 - DNA, 25 bp, Artificial
  Probe
atctcagcaaaatggtgatgaaata

SEQ ID NO: 172887 - DNA, 25 bp, Artificial
  Probe
tcagcaaaatggtgatgaaatactg

SEQ ID NO: 172888 - DNA, 25 bp, Artificial
  Probe
ttccacagaagattttgtaaagaca

SEQ ID NO: 172889 - DNA, 25 bp, Artificial
  Probe
cagcaaaatggtgatgaaatactgg

SEQ ID NO: 172890 - DNA, 25 bp, Artificial
  Probe
ttcatgtatgaatttgagtatcgcc

SEQ ID NO: 172891 - DNA, 25 bp, Artificial
  Probe
tccacagaagattttgtaaagacat

SEQ ID NO: 172892 - DNA, 25 bp, Artificial
  Probe
cccaccttcatgtatgaatttgagt

SEQ ID NO: 172893 - DNA, 25 bp, Artificial
  Probe
ccaccttcatgtatgaatttgagta

SEQ ID NO: 172894 - DNA, 25 bp, Artificial
  Probe
cttcatgtatgaatttgagtatcgc

SEQ ID NO: 172895 - DNA, 25 bp, Artificial
  Probe
tgtttgagaacctgaagctaaaggg

SEQ ID NO: 172896 - DNA, 25 bp, Artificial
  Probe
tttgtaaagacataacacttcttgt

SEQ ID NO: 172897 - DNA, 25 bp, Artificial
  Probe
acataacacttcttgtctttgagac

SEQ ID NO: 172898 - DNA, 25 bp, Artificial
  Probe
gccatgtttgagaacctgaagctaa

SEQ ID NO: 172899 - DNA, 25 bp, Artificial
  Probe
ccagaatatgaccagaaggaagggt

SEQ ID NO: 172900 - DNA, 25 bp, Artificial
  Probe
attccacagaagattttgtaaagac

SEQ ID NO: 172901 - DNA, 25 bp, Artificial
  Probe
cataacacttcttgtctttgagact

SEQ ID NO: 172902 - DNA, 25 bp, Artificial
  Probe
ccttcatgtatgaatttgagtatcg

SEQ ID NO: 172903 - DNA, 25 bp, Artificial
  Probe
gcaaaatggtgatgaaatactgggc

SEQ ID NO: 172904 - DNA, 25 bp, Artificial
  Probe
aacctgaagctaaaggggaattatt

SEQ ID NO: 172905 - DNA, 25 bp, Artificial
  Probe
acctgaagctaaaggggaattattc

SEQ ID NO: 172906 - DNA, 25 bp, Artificial
  Probe
gaacctgaagctaaaggggaattat

SEQ ID NO: 172907 - DNA, 25 bp, Artificial
  Probe
gccagaatatgaccagaaggaaggg

SEQ ID NO: 172908 - DNA, 25 bp, Artificial
  Probe
ccacagaagattttgtaaagacata

SEQ ID NO: 172909 - DNA, 25 bp, Artificial
  Probe
ccaatctcagcaaaatggtgatgaa

SEQ ID NO: 172910 - DNA, 25 bp, Artificial
  Probe
agaacctgaagctaaaggggaatta

SEQ ID NO: 172911 - DNA, 25 bp, Artificial
  Probe
gacataacacttcttgtctttgaga

SEQ ID NO: 172912 - DNA, 25 bp, Artificial
  Probe
caccttcatgtatgaatttgagtat

SEQ ID NO: 172913 - DNA, 25 bp, Artificial
  Probe
cagaagaggagaccaatctcagcaa

SEQ ID NO: 172914 - DNA, 25 bp, Artificial
  Probe
accttcatgtatgaatttgagtatc

SEQ ID NO: 172915 - DNA, 25 bp, Artificial
  Probe
ccaagttccatctcctatatctaca

SEQ ID NO: 172916 - DNA, 25 bp, Artificial
  Probe
aaccaatatgaatgatgctcctgtg

SEQ ID NO: 172917 - DNA, 25 bp, Artificial
  Probe
caaccaatatgaatgatgctcctgt

SEQ ID NO: 172918 - DNA, 25 bp, Artificial
  Probe
caatatgaatgatgctcctgtggtc

SEQ ID NO: 172919 - DNA, 25 bp, Artificial
  Probe
tcaaccaatatgaatgatgctcctg

SEQ ID NO: 172920 - DNA, 25 bp, Artificial
  Probe
caagttccatctcctatatctacac

SEQ ID NO: 172921 - DNA, 25 bp, Artificial
  Probe
agttccatctcctatatctacactg

SEQ ID NO: 172922 - DNA, 25 bp, Artificial
  Probe
tcatctgtcagtggattcttgtgtt

SEQ ID NO: 172923 - DNA, 25 bp, Artificial
  Probe
tgtgtgtgtgtgtatgtatggtcat

SEQ ID NO: 172924 - DNA, 25 bp, Artificial
  Probe
gtgtgtatgtatggtcatgtgtgtt

SEQ ID NO: 172925 - DNA, 25 bp, Artificial
  Probe
aatatgaatgatgctcctgtggtca

SEQ ID NO: 172926 - DNA, 25 bp, Artificial
  Probe
aagttccatctcctatatctacact

SEQ ID NO: 172927 - DNA, 25 bp, Artificial
  Probe
gttccatctcctatatctacactgg

SEQ ID NO: 172928 - DNA, 25 bp, Artificial
  Probe
ctcatctgtcagtggattcttgtgt

SEQ ID NO: 172929 - DNA, 25 bp, Artificial
  Probe
gtgtgtgtatgtatggtcatgtgtg

SEQ ID NO: 172930 - DNA, 25 bp, Artificial
  Probe
gtgtgtgtgtatgtatggtcatgtg

SEQ ID NO: 172931 - DNA, 25 bp, Artificial
  Probe
gtgtgtgtgtgtatgtatggtcatg

SEQ ID NO: 172932 - DNA, 25 bp, Artificial
  Probe
acccaagttccatctcctatatcta

SEQ ID NO: 172933 - DNA, 25 bp, Artificial
  Probe
tttgtgtccatatctgtttgtgttt

SEQ ID NO: 172934 - DNA, 25 bp, Artificial
  Probe
ttatctccttggcatccttaaactt

SEQ ID NO: 172935 - DNA, 25 bp, Artificial
  Probe
cccaagttccatctcctatatctac

SEQ ID NO: 172936 - DNA, 25 bp, Artificial
  Probe
tatctccttggcatccttaaacttc

SEQ ID NO: 172937 - DNA, 25 bp, Artificial
  Probe
attatctccttggcatccttaaact

SEQ ID NO: 172938 - DNA, 25 bp, Artificial
  Probe
gacccaagttccatctcctatatct

SEQ ID NO: 172939 - DNA, 25 bp, Artificial
  Probe
cacacacacacacaaattaaactct

SEQ ID NO: 172940 - DNA, 25 bp, Artificial
  Probe
actcatctgtcagtggattcttgtg

SEQ ID NO: 172941 - DNA, 25 bp, Artificial
  Probe
tgtgtgtatgtatggtcatgtgtgt

SEQ ID NO: 172942 - DNA, 25 bp, Artificial
  Probe
tgtgtgtgtatgtatggtcatgtgt

SEQ ID NO: 172943 - DNA, 25 bp, Artificial
  Probe
tgtgtgtgtgtatgtatggtcatgt

SEQ ID NO: 172944 - DNA, 25 bp, Artificial
  Probe
gtgtgtgtgtgtgtatgtatggtca

SEQ ID NO: 172945 - DNA, 25 bp, Artificial
  Probe
tgtgtgtgtgtgtgtatgtatggtc

SEQ ID NO: 172946 - DNA, 25 bp, Artificial
  Probe
acacacacacacacaaattaaactc

SEQ ID NO: 172947 - DNA, 25 bp, Artificial
  Probe
ttgtgtccatatctgtttgtgttta

SEQ ID NO: 172948 - DNA, 25 bp, Artificial
  Probe
tgtgtttcctctttcaaccaatatg

SEQ ID NO: 172949 - DNA, 25 bp, Artificial
  Probe
aattatctccttggcatccttaaac

SEQ ID NO: 172950 - DNA, 25 bp, Artificial
  Probe
acacacacacacaaattaaactcta

SEQ ID NO: 172951 - DNA, 25 bp, Artificial
  Probe
cacacacacacacacaaattaaact

SEQ ID NO: 172952 - DNA, 25 bp, Artificial
  Probe
tgtgtccatatctgtttgtgtttat

SEQ ID NO: 172953 - DNA, 25 bp, Artificial
  Probe
cttgtgtttcctctttcaaccaata

SEQ ID NO: 172954 - DNA, 25 bp, Artificial
  Probe
acacacacacacacacaaattaaac

SEQ ID NO: 172955 - DNA, 25 bp, Artificial
  Probe
gattcttgtgtttcctctttcaacc

SEQ ID NO: 172956 - DNA, 25 bp, Artificial
  Probe
atccttaaacttctgtgtgtgtgtg

SEQ ID NO: 172957 - DNA, 25 bp, Artificial
  Probe
catccttaaacttctgtgtgtgtgt

SEQ ID NO: 172958 - DNA, 25 bp, Artificial
  Probe
gtgtgtgtgtgtgtgtatgtatggt

SEQ ID NO: 172959 - DNA, 25 bp, Artificial
  Probe
tgtgtgtgtgtgtgtgtatgtatgg

SEQ ID NO: 172960 - DNA, 25 bp, Artificial
  Probe
tagttctctcctttcgggtatctta

SEQ ID NO: 172961 - DNA, 25 bp, Artificial
  Probe
ttaagatgtgtttgtgtgtgtgttt

SEQ ID NO: 172962 - DNA, 25 bp, Artificial
  Probe
tttaagatgtgtttgtgtgtgtgtt

SEQ ID NO: 172963 - DNA, 25 bp, Artificial
  Probe
taagatgtgtttgtgtgtgtgtttg

SEQ ID NO: 172964 - DNA, 25 bp, Artificial
  Probe
agttctctcctttcgggtatcttaa

SEQ ID NO: 172965 - DNA, 25 bp, Artificial
  Probe
tttgtagttctctcctttcgggtat

SEQ ID NO: 172966 - DNA, 25 bp, Artificial
  Probe
gtagttctctcctttcgggtatctt

SEQ ID NO: 172967 - DNA, 25 bp, Artificial
  Probe
ttaatttctgtggtctctttcttcc

SEQ ID NO: 172968 - DNA, 25 bp, Artificial
  Probe
ttgtagttctctcctttcgggtatc

SEQ ID NO: 172969 - DNA, 25 bp, Artificial
  Probe
gtttgtagttctctcctttcgggta

SEQ ID NO: 172970 - DNA, 25 bp, Artificial
  Probe
aagatgtgtttgtgtgtgtgtttga

SEQ ID NO: 172971 - DNA, 25 bp, Artificial
  Probe
tgtagttctctcctttcgggtatct

SEQ ID NO: 172972 - DNA, 25 bp, Artificial
  Probe
atgtgtttgtgtgtgtgtttgactt

SEQ ID NO: 172973 - DNA, 25 bp, Artificial
  Probe
atatttgtgtatttaacagggaggg

SEQ ID NO: 172974 - DNA, 25 bp, Artificial
  Probe
tgtgtttgtgtgtgtgtttgacttt

SEQ ID NO: 172975 - DNA, 25 bp, Artificial
  Probe
gatgtgtttgtgtgtgtgtttgact

SEQ ID NO: 172976 - DNA, 25 bp, Artificial
  Probe
agatgtgtttgtgtgtgtgtttgac

SEQ ID NO: 172977 - DNA, 25 bp, Artificial
  Probe
taatttctgtggtctctttcttcca

SEQ ID NO: 172978 - DNA, 25 bp, Artificial
  Probe
aatttctgtggtctctttcttccaa

SEQ ID NO: 172979 - DNA, 25 bp, Artificial
  Probe
atttctgtggtctctttcttccaag

SEQ ID NO: 172980 - DNA, 25 bp, Artificial
  Probe
cagtttgtagttctctcctttcggg

SEQ ID NO: 172981 - DNA, 25 bp, Artificial
  Probe
ggtatcttaaggtccagtacaagcg

SEQ ID NO: 172982 - DNA, 25 bp, Artificial
  Probe
gggcagtttgtagttctctcctttc

SEQ ID NO: 172983 - DNA, 25 bp, Artificial
  Probe
gttctctcctttcgggtatcttaag

SEQ ID NO: 172984 - DNA, 25 bp, Artificial
  Probe
agtttgtagttctctcctttcgggt

SEQ ID NO: 172985 - DNA, 25 bp, Artificial
  Probe
ccttccagcgtattttgtatgtttt

SEQ ID NO: 172986 - DNA, 25 bp, Artificial
  Probe
ttttaagatgtgtttgtgtgtgtgt

SEQ ID NO: 172987 - DNA, 25 bp, Artificial
  Probe
attaatttctgtggtctctttcttc

SEQ ID NO: 172988 - DNA, 25 bp, Artificial
  Probe
gcagtttgtagttctctcctttcgg

SEQ ID NO: 172989 - DNA, 25 bp, Artificial
  Probe
ggcagtttgtagttctctcctttcg

SEQ ID NO: 172990 - DNA, 25 bp, Artificial
  Probe
attttaagatgtgtttgtgtgtgtg

SEQ ID NO: 172991 - DNA, 25 bp, Artificial
  Probe
tttcgggtatcttaaggtccagtac

SEQ ID NO: 172992 - DNA, 25 bp, Artificial
  Probe
ctttcgggtatcttaaggtccagta

SEQ ID NO: 172993 - DNA, 25 bp, Artificial
  Probe
gtgtttgtgtgtgtgtttgactttt

SEQ ID NO: 172994 - DNA, 25 bp, Artificial
  Probe
cccttccagcgtattttgtatgttt

SEQ ID NO: 172995 - DNA, 25 bp, Artificial
  Probe
tatttgtgtatttaacagggagggg

SEQ ID NO: 172996 - DNA, 25 bp, Artificial
  Probe
cgcacttcgtgtctaaagtctattt

SEQ ID NO: 172997 - DNA, 25 bp, Artificial
  Probe
gtctttattaatttctgtggtctct

SEQ ID NO: 172998 - DNA, 25 bp, Artificial
  Probe
agtctttattaatttctgtggtctc

SEQ ID NO: 172999 - DNA, 25 bp, Artificial
  Probe
cgggtatcttaaggtccagtacaag

SEQ ID NO: 173000 - DNA, 25 bp, Artificial
  Probe
tcgggtatcttaaggtccagtacaa

SEQ ID NO: 173001 - DNA, 25 bp, Artificial
  Probe
ttcgggtatcttaaggtccagtaca

SEQ ID NO: 173002 - DNA, 25 bp, Artificial
  Probe
gggtatcttaaggtccagtacaagc

SEQ ID NO: 173003 - DNA, 25 bp, Artificial
  Probe
tttctgtggtctctttcttccaagc

SEQ ID NO: 173004 - DNA, 25 bp, Artificial
  Probe
tattttaagatgtgtttgtgtgtgt

SEQ ID NO: 173005 - DNA, 25 bp, Artificial
  Probe
aagatacaatggaagtgagcagtac

SEQ ID NO: 173006 - DNA, 25 bp, Artificial
  Probe
ggattcaaccttgtgtactggatag

SEQ ID NO: 173007 - DNA, 25 bp, Artificial
  Probe
attcaaccttgtgtactggatagtt

SEQ ID NO: 173008 - DNA, 25 bp, Artificial
  Probe
gattcaaccttgtgtactggatagt

SEQ ID NO: 173009 - DNA, 25 bp, Artificial
  Probe
aagctggacactgtaattggttatt

SEQ ID NO: 173010 - DNA, 25 bp, Artificial
  Probe
aggattcaaccttgtgtactggata

SEQ ID NO: 173011 - DNA, 25 bp, Artificial
  Probe
aaagatacaatggaagtgagcagta

SEQ ID NO: 173012 - DNA, 25 bp, Artificial
  Probe
cctcgcttacagaacacaaattatt

SEQ ID NO: 173013 - DNA, 25 bp, Artificial
  Probe
tcctcgcttacagaacacaaattat

SEQ ID NO: 173014 - DNA, 25 bp, Artificial
  Probe
caaagatacaatggaagtgagcagt

SEQ ID NO: 173015 - DNA, 25 bp, Artificial
  Probe
tcagcatttatgtggataaggtaga

SEQ ID NO: 173016 - DNA, 25 bp, Artificial
  Probe
ttcctcgcttacagaacacaaatta

SEQ ID NO: 173017 - DNA, 25 bp, Artificial
  Probe
ctcgcttacagaacacaaattattg

SEQ ID NO: 173018 - DNA, 25 bp, Artificial
  Probe
ccaacctttgtcttcattgttcaat

SEQ ID NO: 173019 - DNA, 25 bp, Artificial
  Probe
tttcctcgcttacagaacacaaatt

SEQ ID NO: 173020 - DNA, 25 bp, Artificial
  Probe
cagcatttatgtggataaggtagat

SEQ ID NO: 173021 - DNA, 25 bp, Artificial
  Probe
atcagcatttatgtggataaggtag

SEQ ID NO: 173022 - DNA, 25 bp, Artificial
  Probe
taatatggaataagcatgtttgggc

SEQ ID NO: 173023 - DNA, 25 bp, Artificial
  Probe
ccttgtgtactggatagtttacctt

SEQ ID NO: 173024 - DNA, 25 bp, Artificial
  Probe
aaccttgtgtactggatagtttacc

SEQ ID NO: 173025 - DNA, 25 bp, Artificial
  Probe
ttcaaccttgtgtactggatagttt

SEQ ID NO: 173026 - DNA, 25 bp, Artificial
  Probe
caaccttgtgtactggatagtttac

SEQ ID NO: 173027 - DNA, 25 bp, Artificial
  Probe
tcaaccttgtgtactggatagttta

SEQ ID NO: 173028 - DNA, 25 bp, Artificial
  Probe
accttgtgtactggatagtttacct

SEQ ID NO: 173029 - DNA, 25 bp, Artificial
  Probe
caggattcaaccttgtgtactggat

SEQ ID NO: 173030 - DNA, 25 bp, Artificial
  Probe
tttccacaaagcagatatattcaga

SEQ ID NO: 173031 - DNA, 25 bp, Artificial
  Probe
aaatgagtttgccaacctttgtctt

SEQ ID NO: 173032 - DNA, 25 bp, Artificial
  Probe
caacctttgtcttcattgttcaata

SEQ ID NO: 173033 - DNA, 25 bp, Artificial
  Probe
agcatttatgtggataaggtagatt

SEQ ID NO: 173034 - DNA, 25 bp, Artificial
  Probe
agctggacactgtaattggttattt

SEQ ID NO: 173035 - DNA, 25 bp, Artificial
  Probe
aaagctggacactgtaattggttat

SEQ ID NO: 173036 - DNA, 25 bp, Artificial
  Probe
ttccacaaagcagatatattcagat

SEQ ID NO: 173037 - DNA, 25 bp, Artificial
  Probe
tttgccaacctttgtcttcattgtt

SEQ ID NO: 173038 - DNA, 25 bp, Artificial
  Probe
ttgtgtactggatagtttacctttc

SEQ ID NO: 173039 - DNA, 25 bp, Artificial
  Probe
cttgtgtactggatagtttaccttt

SEQ ID NO: 173040 - DNA, 25 bp, Artificial
  Probe
gcatttatgtggataaggtagattc

SEQ ID NO: 173041 - DNA, 25 bp, Artificial
  Probe
tgtgtactggatagtttacctttcc

SEQ ID NO: 173042 - DNA, 25 bp, Artificial
  Probe
gagtttgccaacctttgtcttcatt

SEQ ID NO: 173043 - DNA, 25 bp, Artificial
  Probe
aatgagtttgccaacctttgtcttc

SEQ ID NO: 173044 - DNA, 25 bp, Artificial
  Probe
agatacaatggaagtgagcagtact

SEQ ID NO: 173045 - DNA, 25 bp, Artificial
  Probe
atatcagcatttatgtggataaggt

SEQ ID NO: 173046 - DNA, 25 bp, Artificial
  Probe
gccaacctttgtcttcattgttcaa

SEQ ID NO: 173047 - DNA, 25 bp, Artificial
  Probe
ttgccaacctttgtcttcattgttc

SEQ ID NO: 173048 - DNA, 25 bp, Artificial
  Probe
agtttgccaacctttgtcttcattg

SEQ ID NO: 173049 - DNA, 25 bp, Artificial
  Probe
agtttacctttccaaagatacaatg

SEQ ID NO: 173050 - DNA, 25 bp, Artificial
  Probe
gttccatattgagtgctagtttgtg

SEQ ID NO: 173051 - DNA, 25 bp, Artificial
  Probe
agttccatattgagtgctagtttgt

SEQ ID NO: 173052 - DNA, 25 bp, Artificial
  Probe
ttccatattgagtgctagtttgtgt

SEQ ID NO: 173053 - DNA, 25 bp, Artificial
  Probe
aaggaaatcgtaacaaacttcttgg

SEQ ID NO: 173054 - DNA, 25 bp, Artificial
  Probe
aagttccatattgagtgctagtttg

SEQ ID NO: 173055 - DNA, 25 bp, Artificial
  Probe
tccatattgagtgctagtttgtgtg

SEQ ID NO: 173056 - DNA, 25 bp, Artificial
  Probe
gtttactcttgtactccctgatgta

SEQ ID NO: 173057 - DNA, 25 bp, Artificial
  Probe
gaaatcgtaacaaacttcttggctg

SEQ ID NO: 173058 - DNA, 25 bp, Artificial
  Probe
aaagttccatattgagtgctagttt

SEQ ID NO: 173059 - DNA, 25 bp, Artificial
  Probe
atattgagtgctagtttgtgtggga

SEQ ID NO: 173060 - DNA, 25 bp, Artificial
  Probe
catattgagtgctagtttgtgtggg

SEQ ID NO: 173061 - DNA, 25 bp, Artificial
  Probe
ggtttactcttgtactccctgatgt

SEQ ID NO: 173062 - DNA, 25 bp, Artificial
  Probe
ggaaatcgtaacaaacttcttggct

SEQ ID NO: 173063 - DNA, 25 bp, Artificial
  Probe
aggaaatcgtaacaaacttcttggc

SEQ ID NO: 173064 - DNA, 25 bp, Artificial
  Probe
aaagctgaaggaaatcgtaacaaac

SEQ ID NO: 173065 - DNA, 25 bp, Artificial
  Probe
caaagctgaaggaaatcgtaacaaa

SEQ ID NO: 173066 - DNA, 25 bp, Artificial
  Probe
aaatcgtaacaaacttcttggctgg

SEQ ID NO: 173067 - DNA, 25 bp, Artificial
  Probe
taaaggtttactcttgtactccctg

SEQ ID NO: 173068 - DNA, 25 bp, Artificial
  Probe
cagtaagatcacaaagttcgagagt

SEQ ID NO: 173069 - DNA, 25 bp, Artificial
  Probe
aaatcagcaccatttgtaaaggttt

SEQ ID NO: 173070 - DNA, 25 bp, Artificial
  Probe
aaggtttactcttgtactccctgat

SEQ ID NO: 173071 - DNA, 25 bp, Artificial
  Probe
aatcagcaccatttgtaaaggttta

SEQ ID NO: 173072 - DNA, 25 bp, Artificial
  Probe
aagctgaaggaaatcgtaacaaact

SEQ ID NO: 173073 - DNA, 25 bp, Artificial
  Probe
aaaggtttactcttgtactccctga

SEQ ID NO: 173074 - DNA, 25 bp, Artificial
  Probe
ccagtaagatcacaaagttcgagag

SEQ ID NO: 173075 - DNA, 25 bp, Artificial
  Probe
agctgaaggaaatcgtaacaaactt

SEQ ID NO: 173076 - DNA, 25 bp, Artificial
  Probe
tattatttaaagctcgacttcaggg

SEQ ID NO: 173077 - DNA, 25 bp, Artificial
  Probe
aggtttactcttgtactccctgatg

SEQ ID NO: 173078 - DNA, 25 bp, Artificial
  Probe
tgtaaaggtttactcttgtactccc

SEQ ID NO: 173079 - DNA, 25 bp, Artificial
  Probe
tattgagtgctagtttgtgtgggac

SEQ ID NO: 173080 - DNA, 25 bp, Artificial
  Probe
gtaaaggtttactcttgtactccct

SEQ ID NO: 173081 - DNA, 25 bp, Artificial
  Probe
gcaccatttgtaaaggtttactctt

SEQ ID NO: 173082 - DNA, 25 bp, Artificial
  Probe
atcagcaccatttgtaaaggtttac

SEQ ID NO: 173083 - DNA, 25 bp, Artificial
  Probe
agcaccatttgtaaaggtttactct

SEQ ID NO: 173084 - DNA, 25 bp, Artificial
  Probe
cagcaccatttgtaaaggtttactc

SEQ ID NO: 173085 - DNA, 25 bp, Artificial
  Probe
tcaggttattatttaaagctcgact

SEQ ID NO: 173086 - DNA, 25 bp, Artificial
  Probe
actcaggttattatttaaagctcga

SEQ ID NO: 173087 - DNA, 25 bp, Artificial
  Probe
tcagcaccatttgtaaaggtttact

SEQ ID NO: 173088 - DNA, 25 bp, Artificial
  Probe
ccatattgagtgctagtttgtgtgg

SEQ ID NO: 173089 - DNA, 25 bp, Artificial
  Probe
agtaagatcacaaagttcgagagtg

SEQ ID NO: 173090 - DNA, 25 bp, Artificial
  Probe
ctcaggttattatttaaagctcgac

SEQ ID NO: 173091 - DNA, 25 bp, Artificial
  Probe
accatttgtaaaggtttactcttgt

SEQ ID NO: 173092 - DNA, 25 bp, Artificial
  Probe
gctttggttttgtcatttattgtgg

SEQ ID NO: 173093 - DNA, 25 bp, Artificial
  Probe
tgctttggttttgtcatttattgtg

SEQ ID NO: 173094 - DNA, 25 bp, Artificial
  Probe
ttgtaaaggtttactcttgtactcc

SEQ ID NO: 173095 - DNA, 25 bp, Artificial
  Probe
tgttagttgtggtgtaggataagag

SEQ ID NO: 173096 - DNA, 25 bp, Artificial
  Probe
tagttgtggtgtaggataagaggaa

SEQ ID NO: 173097 - DNA, 25 bp, Artificial
  Probe
ttagttgtggtgtaggataagagga

SEQ ID NO: 173098 - DNA, 25 bp, Artificial
  Probe
gttagttgtggtgtaggataagagg

SEQ ID NO: 173099 - DNA, 25 bp, Artificial
  Probe
ttgttagttgtggtgtaggataaga

SEQ ID NO: 173100 - DNA, 25 bp, Artificial
  Probe
accttgaccttactacatagcagaa

SEQ ID NO: 173101 - DNA, 25 bp, Artificial
  Probe
gaccttgaccttactacatagcaga

SEQ ID NO: 173102 - DNA, 25 bp, Artificial
  Probe
tgaccttgaccttactacatagcag

SEQ ID NO: 173103 - DNA, 25 bp, Artificial
  Probe
ctgaccttgaccttactacatagca

SEQ ID NO: 173104 - DNA, 25 bp, Artificial
  Probe
agttgtggtgtaggataagaggaag

SEQ ID NO: 173105 - DNA, 25 bp, Artificial
  Probe
gaagtggatgttgttaggagaggaa

SEQ ID NO: 173106 - DNA, 25 bp, Artificial
  Probe
ggctgaccttgaccttactacatag

SEQ ID NO: 173107 - DNA, 25 bp, Artificial
  Probe
catggagtcaagactgaacatagag

SEQ ID NO: 173108 - DNA, 25 bp, Artificial
  Probe
gtggtgtaggataagaggaagcatc

SEQ ID NO: 173109 - DNA, 25 bp, Artificial
  Probe
tcatggagtcaagactgaacataga

SEQ ID NO: 173110 - DNA, 25 bp, Artificial
  Probe
ccttgaccttactacatagcagaaa

SEQ ID NO: 173111 - DNA, 25 bp, Artificial
  Probe
cggtaagtcatttggttgtttctaa

SEQ ID NO: 173112 - DNA, 25 bp, Artificial
  Probe
gtggaagtggatgttgttaggagag

SEQ ID NO: 173113 - DNA, 25 bp, Artificial
  Probe
gagtggaagtggatgttgttaggag

SEQ ID NO: 173114 - DNA, 25 bp, Artificial
  Probe
gtcatggagtcaagactgaacatag

SEQ ID NO: 173115 - DNA, 25 bp, Artificial
  Probe
gttgtggtgtaggataagaggaagc

SEQ ID NO: 173116 - DNA, 25 bp, Artificial
  Probe
taagtcatttggttgtttctaaggc

SEQ ID NO: 173117 - DNA, 25 bp, Artificial
  Probe
ggtttgttagttgtggtgtaggata

SEQ ID NO: 173118 - DNA, 25 bp, Artificial
  Probe
acggtaagtcatttggttgtttcta

SEQ ID NO: 173119 - DNA, 25 bp, Artificial
  Probe
tgtggtgtaggataagaggaagcat

SEQ ID NO: 173120 - DNA, 25 bp, Artificial
  Probe
gtttgttagttgtggtgtaggataa

SEQ ID NO: 173121 - DNA, 25 bp, Artificial
  Probe
caggagtggaagtggatgttgttag

SEQ ID NO: 173122 - DNA, 25 bp, Artificial
  Probe
ttgaccttactacatagcagaaagc

SEQ ID NO: 173123 - DNA, 25 bp, Artificial
  Probe
aagtcatttggttgtttctaaggca

SEQ ID NO: 173124 - DNA, 25 bp, Artificial
  Probe
gtggatgttgttaggagaggaaatg

SEQ ID NO: 173125 - DNA, 25 bp, Artificial
  Probe
tttgttagttgtggtgtaggataag

SEQ ID NO: 173126 - DNA, 25 bp, Artificial
  Probe
gggtaggatatagttcagaaacagt

SEQ ID NO: 173127 - DNA, 25 bp, Artificial
  Probe
agtggaagtggatgttgttaggaga

SEQ ID NO: 173128 - DNA, 25 bp, Artificial
  Probe
ttgtggtgtaggataagaggaagca

SEQ ID NO: 173129 - DNA, 25 bp, Artificial
  Probe
cttgaccttactacatagcagaaag

SEQ ID NO: 173130 - DNA, 25 bp, Artificial
  Probe
agtggatgttgttaggagaggaaat

SEQ ID NO: 173131 - DNA, 25 bp, Artificial
  Probe
atggagtcaagactgaacatagagc

SEQ ID NO: 173132 - DNA, 25 bp, Artificial
  Probe
aagtggatgttgttaggagaggaaa

SEQ ID NO: 173133 - DNA, 25 bp, Artificial
  Probe
agggtaggatatagttcagaaacag

SEQ ID NO: 173134 - DNA, 25 bp, Artificial
  Probe
gtagttcctgactttagacggtaag

SEQ ID NO: 173135 - DNA, 25 bp, Artificial
  Probe
gctagggtaggatatagttcagaaa

SEQ ID NO: 173136 - DNA, 25 bp, Artificial
  Probe
tcatttggttgtttctaaggcagtc

SEQ ID NO: 173137 - DNA, 25 bp, Artificial
  Probe
agtcatttggttgtttctaaggcag

SEQ ID NO: 173138 - DNA, 25 bp, Artificial
  Probe
gtaagtcatttggttgtttctaagg

SEQ ID NO: 173139 - DNA, 25 bp, Artificial
  Probe
ggtaagtcatttggttgtttctaag

SEQ ID NO: 173140 - DNA, 25 bp, Artificial
  Probe
gagaagtacatagcgtttacaggat

SEQ ID NO: 173141 - DNA, 25 bp, Artificial
  Probe
gattgggagaagtacatagcgttta

SEQ ID NO: 173142 - DNA, 25 bp, Artificial
  Probe
aagtacatagcgtttacaggatagc

SEQ ID NO: 173143 - DNA, 25 bp, Artificial
  Probe
attgggagaagtacatagcgtttac

SEQ ID NO: 173144 - DNA, 25 bp, Artificial
  Probe
agaagtacatagcgtttacaggata

SEQ ID NO: 173145 - DNA, 25 bp, Artificial
  Probe
gaagtacatagcgtttacaggatag

SEQ ID NO: 173146 - DNA, 25 bp, Artificial
  Probe
ttgggagaagtacatagcgtttaca

SEQ ID NO: 173147 - DNA, 25 bp, Artificial
  Probe
ggagaagtacatagcgtttacagga

SEQ ID NO: 173148 - DNA, 25 bp, Artificial
  Probe
tgggagaagtacatagcgtttacag

SEQ ID NO: 173149 - DNA, 25 bp, Artificial
  Probe
aagcctaagggaaagtaaaccagtg

SEQ ID NO: 173150 - DNA, 25 bp, Artificial
  Probe
caagcctaagggaaagtaaaccagt

SEQ ID NO: 173151 - DNA, 25 bp, Artificial
  Probe
acaagcctaagggaaagtaaaccag

SEQ ID NO: 173152 - DNA, 25 bp, Artificial
  Probe
ggattgggagaagtacatagcgttt

SEQ ID NO: 173153 - DNA, 25 bp, Artificial
  Probe
cacaagcctaagggaaagtaaacca

SEQ ID NO: 173154 - DNA, 25 bp, Artificial
  Probe
accacaagcctaagggaaagtaaac

SEQ ID NO: 173155 - DNA, 25 bp, Artificial
  Probe
caccacaagcctaagggaaagtaaa

SEQ ID NO: 173156 - DNA, 25 bp, Artificial
  Probe
gggagaagtacatagcgtttacagg

SEQ ID NO: 173157 - DNA, 25 bp, Artificial
  Probe
cctaagggaaagtaaaccagtgagc

SEQ ID NO: 173158 - DNA, 25 bp, Artificial
  Probe
gcctaagggaaagtaaaccagtgag

SEQ ID NO: 173159 - DNA, 25 bp, Artificial
  Probe
ctaagggaaagtaaaccagtgagcg

SEQ ID NO: 173160 - DNA, 25 bp, Artificial
  Probe
agcctaagggaaagtaaaccagtga

SEQ ID NO: 173161 - DNA, 25 bp, Artificial
  Probe
ccacaagcctaagggaaagtaaacc

SEQ ID NO: 173162 - DNA, 25 bp, Artificial
  Probe
taagggaaagtaaaccagtgagcga

SEQ ID NO: 173163 - DNA, 25 bp, Artificial
  Probe
gtacatagcgtttacaggatagctg

SEQ ID NO: 173164 - DNA, 25 bp, Artificial
  Probe
agtacatagcgtttacaggatagct

SEQ ID NO: 173165 - DNA, 25 bp, Artificial
  Probe
atagcgtttacaggatagctggtag

SEQ ID NO: 173166 - DNA, 25 bp, Artificial
  Probe
cttaacgctgggattgggagaagta

SEQ ID NO: 173167 - DNA, 25 bp, Artificial
  Probe
ttctcagtagcagcagacttaacgc

SEQ ID NO: 173168 - DNA, 25 bp, Artificial
  Probe
catagcgtttacaggatagctggta

SEQ ID NO: 173169 - DNA, 25 bp, Artificial
  Probe
tacatagcgtttacaggatagctgg

SEQ ID NO: 173170 - DNA, 25 bp, Artificial
  Probe
aagggaaagtaaaccagtgagcgaa

SEQ ID NO: 173171 - DNA, 25 bp, Artificial
  Probe
gggattgggagaagtacatagcgtt

SEQ ID NO: 173172 - DNA, 25 bp, Artificial
  Probe
ttaacgctgggattgggagaagtac

SEQ ID NO: 173173 - DNA, 25 bp, Artificial
  Probe
ccaccacaagcctaagggaaagtaa

SEQ ID NO: 173174 - DNA, 25 bp, Artificial
  Probe
ctgggattgggagaagtacatagcg

SEQ ID NO: 173175 - DNA, 25 bp, Artificial
  Probe
cgctgggattgggagaagtacatag

SEQ ID NO: 173176 - DNA, 25 bp, Artificial
  Probe
ttacaggatagctggtagcttacat

SEQ ID NO: 173177 - DNA, 25 bp, Artificial
  Probe
tacaggatagctggtagcttacatg

SEQ ID NO: 173178 - DNA, 25 bp, Artificial
  Probe
agggaaagtaaaccagtgagcgaac

SEQ ID NO: 173179 - DNA, 25 bp, Artificial
  Probe
acatagcgtttacaggatagctggt

SEQ ID NO: 173180 - DNA, 25 bp, Artificial
  Probe
tgggattgggagaagtacatagcgt

SEQ ID NO: 173181 - DNA, 25 bp, Artificial
  Probe
acgctgggattgggagaagtacata

SEQ ID NO: 173182 - DNA, 25 bp, Artificial
  Probe
tagcgtttacaggatagctggtagc

SEQ ID NO: 173183 - DNA, 25 bp, Artificial
  Probe
gtttacaggatagctggtagcttac

SEQ ID NO: 173184 - DNA, 25 bp, Artificial
  Probe
tttacaggatagctggtagcttaca

SEQ ID NO: 173185 - DNA, 25 bp, Artificial
  Probe
ctgaacaggtataatcaatgactca

SEQ ID NO: 173186 - DNA, 25 bp, Artificial
  Probe
cattagactataaataggcgtggac

SEQ ID NO: 173187 - DNA, 25 bp, Artificial
  Probe
cttgtgacagcagctaacagattaa

SEQ ID NO: 173188 - DNA, 25 bp, Artificial
  Probe
attagactataaataggcgtggacg

SEQ ID NO: 173189 - DNA, 25 bp, Artificial
  Probe
tcctgaacaggtataatcaatgact

SEQ ID NO: 173190 - DNA, 25 bp, Artificial
  Probe
cctgaacaggtataatcaatgactc

SEQ ID NO: 173191 - DNA, 25 bp, Artificial
  Probe
ctcctgaacaggtataatcaatgac

SEQ ID NO: 173192 - DNA, 25 bp, Artificial
  Probe
tctcctgaacaggtataatcaatga

SEQ ID NO: 173193 - DNA, 25 bp, Artificial
  Probe
ggtgagtgtaatttgccattagact

SEQ ID NO: 173194 - DNA, 25 bp, Artificial
  Probe
gtgagtgtaatttgccattagacta

SEQ ID NO: 173195 - DNA, 25 bp, Artificial
  Probe
ttctcctgaacaggtataatcaatg

SEQ ID NO: 173196 - DNA, 25 bp, Artificial
  Probe
acttgtgacagcagctaacagatta

SEQ ID NO: 173197 - DNA, 25 bp, Artificial
  Probe
tgagtgtaatttgccattagactat

SEQ ID NO: 173198 - DNA, 25 bp, Artificial
  Probe
ccattagactataaataggcgtgga

SEQ ID NO: 173199 - DNA, 25 bp, Artificial
  Probe
tggtgagtgtaatttgccattagac

SEQ ID NO: 173200 - DNA, 25 bp, Artificial
  Probe
gtggtgagtgtaatttgccattaga

SEQ ID NO: 173201 - DNA, 25 bp, Artificial
  Probe
ttgtgacagcagctaacagattaaa

SEQ ID NO: 173202 - DNA, 25 bp, Artificial
  Probe
ggtggtgagtgtaatttgccattag

SEQ ID NO: 173203 - DNA, 25 bp, Artificial
  Probe
gctaacagattaaaacaaaatggct

SEQ ID NO: 173204 - DNA, 25 bp, Artificial
  Probe
cacttgtgacagcagctaacagatt

SEQ ID NO: 173205 - DNA, 25 bp, Artificial
  Probe
ggctttatggcttttgaagaatcat

SEQ ID NO: 173206 - DNA, 25 bp, Artificial
  Probe
tacggctttatggcttttgaagaat

SEQ ID NO: 173207 - DNA, 25 bp, Artificial
  Probe
gagtgtaatttgccattagactata

SEQ ID NO: 173208 - DNA, 25 bp, Artificial
  Probe
ctacggctttatggcttttgaagaa

SEQ ID NO: 173209 - DNA, 25 bp, Artificial
  Probe
tttctcctgaacaggtataatcaat

SEQ ID NO: 173210 - DNA, 25 bp, Artificial
  Probe
acagattaaaacaaaatggctcttt

SEQ ID NO: 173211 - DNA, 25 bp, Artificial
  Probe
aacagattaaaacaaaatggctctt

SEQ ID NO: 173212 - DNA, 25 bp, Artificial
  Probe
tatggcttttgaagaatcatgtctg

SEQ ID NO: 173213 - DNA, 25 bp, Artificial
  Probe
gctttatggcttttgaagaatcatg

SEQ ID NO: 173214 - DNA, 25 bp, Artificial
  Probe
gacagcagctaacagattaaaacaa

SEQ ID NO: 173215 - DNA, 25 bp, Artificial
  Probe
acagcagctaacagattaaaacaaa

SEQ ID NO: 173216 - DNA, 25 bp, Artificial
  Probe
ttatggcttttgaagaatcatgtct

SEQ ID NO: 173217 - DNA, 25 bp, Artificial
  Probe
acggctttatggcttttgaagaatc

SEQ ID NO: 173218 - DNA, 25 bp, Artificial
  Probe
gtgacagcagctaacagattaaaac

SEQ ID NO: 173219 - DNA, 25 bp, Artificial
  Probe
tgacagcagctaacagattaaaaca

SEQ ID NO: 173220 - DNA, 25 bp, Artificial
  Probe
agctaacagattaaaacaaaatggc

SEQ ID NO: 173221 - DNA, 25 bp, Artificial
  Probe
cagcagctaacagattaaaacaaaa

SEQ ID NO: 173222 - DNA, 25 bp, Artificial
  Probe
cggctttatggcttttgaagaatca

SEQ ID NO: 173223 - DNA, 25 bp, Artificial
  Probe
agtgtaatttgccattagactataa

SEQ ID NO: 173224 - DNA, 25 bp, Artificial
  Probe
tttatggcttttgaagaatcatgtc

SEQ ID NO: 173225 - DNA, 25 bp, Artificial
  Probe
ctttatggcttttgaagaatcatgt

SEQ ID NO: 173226 - DNA, 25 bp, Artificial
  Probe
taacagattaaaacaaaatggctct

SEQ ID NO: 173227 - DNA, 25 bp, Artificial
  Probe
ctaacagattaaaacaaaatggctc

SEQ ID NO: 173228 - DNA, 25 bp, Artificial
  Probe
atggcttttgaagaatcatgtctgg

SEQ ID NO: 173229 - DNA, 25 bp, Artificial
  Probe
ttaaaacaaaatggctcttttcaga

SEQ ID NO: 173230 - DNA, 25 bp, Artificial
  Probe
cacagacactttgatccacttgatg

SEQ ID NO: 173231 - DNA, 25 bp, Artificial
  Probe
tcacagacactttgatccacttgat

SEQ ID NO: 173232 - DNA, 25 bp, Artificial
  Probe
ctggacaagatcacagacactttga

SEQ ID NO: 173233 - DNA, 25 bp, Artificial
  Probe
atcacagacactttgatccacttga

SEQ ID NO: 173234 - DNA, 25 bp, Artificial
  Probe
tggacaagatcacagacactttgat

SEQ ID NO: 173235 - DNA, 25 bp, Artificial
  Probe
acagacactttgatccacttgatgg

SEQ ID NO: 173236 - DNA, 25 bp, Artificial
  Probe
cctggacaagatcacagacactttg

SEQ ID NO: 173237 - DNA, 25 bp, Artificial
  Probe
tcctggacaagatcacagacacttt

SEQ ID NO: 173238 - DNA, 25 bp, Artificial
  Probe
gtcctggacaagatcacagacactt

SEQ ID NO: 173239 - DNA, 25 bp, Artificial
  Probe
gagtcctggacaagatcacagacac

SEQ ID NO: 173240 - DNA, 25 bp, Artificial
  Probe
cagacactttgatccacttgatggc

SEQ ID NO: 173241 - DNA, 25 bp, Artificial
  Probe
agtcctggacaagatcacagacact

SEQ ID NO: 173242 - DNA, 25 bp, Artificial
  Probe
agacactttgatccacttgatggcc

SEQ ID NO: 173243 - DNA, 25 bp, Artificial
  Probe
cagggatttgaatcatgtttgtgtc

SEQ ID NO: 173244 - DNA, 25 bp, Artificial
  Probe
gggatttgaatcatgtttgtgtcat

SEQ ID NO: 173245 - DNA, 25 bp, Artificial
  Probe
tttgaatcatgtttgtgtcatcagc

SEQ ID NO: 173246 - DNA, 25 bp, Artificial
  Probe
ggatttgaatcatgtttgtgtcatc

SEQ ID NO: 173247 - DNA, 25 bp, Artificial
  Probe
agggatttgaatcatgtttgtgtca

SEQ ID NO: 173248 - DNA, 25 bp, Artificial
  Probe
tcagggatttgaatcatgtttgtgt

SEQ ID NO: 173249 - DNA, 25 bp, Artificial
  Probe
cagactttgttggatttgaaattcc

SEQ ID NO: 173250 - DNA, 25 bp, Artificial
  Probe
atttgaatcatgtttgtgtcatcag

SEQ ID NO: 173251 - DNA, 25 bp, Artificial
  Probe
gatttgaatcatgtttgtgtcatca

SEQ ID NO: 173252 - DNA, 25 bp, Artificial
  Probe
aatcatgtttgtgtcatcagcgaaa

SEQ ID NO: 173253 - DNA, 25 bp, Artificial
  Probe
atcatgtttgtgtcatcagcgaaag

SEQ ID NO: 173254 - DNA, 25 bp, Artificial
  Probe
gaatcatgtttgtgtcatcagcgaa

SEQ ID NO: 173255 - DNA, 25 bp, Artificial
  Probe
ttgaatcatgtttgtgtcatcagcg

SEQ ID NO: 173256 - DNA, 25 bp, Artificial
  Probe
cttcagggatttgaatcatgtttgt

SEQ ID NO: 173257 - DNA, 25 bp, Artificial
  Probe
acttcagggatttgaatcatgtttg

SEQ ID NO: 173258 - DNA, 25 bp, Artificial
  Probe
cacttcagggatttgaatcatgttt

SEQ ID NO: 173259 - DNA, 25 bp, Artificial
  Probe
ttcagggatttgaatcatgtttgtg

SEQ ID NO: 173260 - DNA, 25 bp, Artificial
  Probe
aatgagcacttcagggatttgaatc

SEQ ID NO: 173261 - DNA, 25 bp, Artificial
  Probe
tgaatcatgtttgtgtcatcagcga

SEQ ID NO: 173262 - DNA, 25 bp, Artificial
  Probe
tcatgtttgtgtcatcagcgaaagt

SEQ ID NO: 173263 - DNA, 25 bp, Artificial
  Probe
gcacttcagggatttgaatcatgtt

SEQ ID NO: 173264 - DNA, 25 bp, Artificial
  Probe
gagcacttcagggatttgaatcatg

SEQ ID NO: 173265 - DNA, 25 bp, Artificial
  Probe
tgagcacttcagggatttgaatcat

SEQ ID NO: 173266 - DNA, 25 bp, Artificial
  Probe
atgagcacttcagggatttgaatca

SEQ ID NO: 173267 - DNA, 25 bp, Artificial
  Probe
agcacttcagggatttgaatcatgt

SEQ ID NO: 173268 - DNA, 25 bp, Artificial
  Probe
tttgttggatttgaaattccagaca

SEQ ID NO: 173269 - DNA, 25 bp, Artificial
  Probe
actttgttggatttgaaattccaga

SEQ ID NO: 173270 - DNA, 25 bp, Artificial
  Probe
agactttgttggatttgaaattcca

SEQ ID NO: 173271 - DNA, 25 bp, Artificial
  Probe
ctttgttggatttgaaattccagac

SEQ ID NO: 173272 - DNA, 25 bp, Artificial
  Probe
gactttgttggatttgaaattccag

SEQ ID NO: 173273 - DNA, 25 bp, Artificial
  Probe
catcagcactgtaatgagaataggc

SEQ ID NO: 173274 - DNA, 25 bp, Artificial
  Probe
gcatcagcactgtaatgagaatagg

SEQ ID NO: 173275 - DNA, 25 bp, Artificial
  Probe
cgcatcagcactgtaatgagaatag

SEQ ID NO: 173276 - DNA, 25 bp, Artificial
  Probe
acgcatcagcactgtaatgagaata

SEQ ID NO: 173277 - DNA, 25 bp, Artificial
  Probe
agacagctacagtgtacttatatgt

SEQ ID NO: 173278 - DNA, 25 bp, Artificial
  Probe
aatgtgggactttaagaattgcctg

SEQ ID NO: 173279 - DNA, 25 bp, Artificial
  Probe
aacgcatcagcactgtaatgagaat

SEQ ID NO: 173280 - DNA, 25 bp, Artificial
  Probe
aagacagctacagtgtacttatatg

SEQ ID NO: 173281 - DNA, 25 bp, Artificial
  Probe
aaccatctgtaaagagatccgatac

SEQ ID NO: 173282 - DNA, 25 bp, Artificial
  Probe
caaccatctgtaaagagatccgata

SEQ ID NO: 173283 - DNA, 25 bp, Artificial
  Probe
atctgtaaagagatccgataccctc

SEQ ID NO: 173284 - DNA, 25 bp, Artificial
  Probe
atgtgggactttaagaattgcctgg

SEQ ID NO: 173285 - DNA, 25 bp, Artificial
  Probe
catctgtaaagagatccgataccct

SEQ ID NO: 173286 - DNA, 25 bp, Artificial
  Probe
gacagctacagtgtacttatatgta

SEQ ID NO: 173287 - DNA, 25 bp, Artificial
  Probe
accatctgtaaagagatccgatacc

SEQ ID NO: 173288 - DNA, 25 bp, Artificial
  Probe
caatgtgggactttaagaattgcct

SEQ ID NO: 173289 - DNA, 25 bp, Artificial
  Probe
ctgtcgaagatggtctgtaggtaca

SEQ ID NO: 173290 - DNA, 25 bp, Artificial
  Probe
cactgtaatgagaataggccggtac

SEQ ID NO: 173291 - DNA, 25 bp, Artificial
  Probe
atcagcactgtaatgagaataggcc

SEQ ID NO: 173292 - DNA, 25 bp, Artificial
  Probe
gatggtctgtaggtacacgaggatg

SEQ ID NO: 173293 - DNA, 25 bp, Artificial
  Probe
gaagatggtctgtaggtacacgagg

SEQ ID NO: 173294 - DNA, 25 bp, Artificial
  Probe
aaacgcatcagcactgtaatgagaa

SEQ ID NO: 173295 - DNA, 25 bp, Artificial
  Probe
agatggtctgtaggtacacgaggat

SEQ ID NO: 173296 - DNA, 25 bp, Artificial
  Probe
tgtcgaagatggtctgtaggtacac

SEQ ID NO: 173297 - DNA, 25 bp, Artificial
  Probe
ccatctgtaaagagatccgataccc

SEQ ID NO: 173298 - DNA, 25 bp, Artificial
  Probe
acagctacagtgtacttatatgtaa

SEQ ID NO: 173299 - DNA, 25 bp, Artificial
  Probe
gtaatgagaataggccggtacacac

SEQ ID NO: 173300 - DNA, 25 bp, Artificial
  Probe
gggcaatgtgggactttaagaattg

SEQ ID NO: 173301 - DNA, 25 bp, Artificial
  Probe
aagatggtctgtaggtacacgagga

SEQ ID NO: 173302 - DNA, 25 bp, Artificial
  Probe
cgaagatggtctgtaggtacacgag

SEQ ID NO: 173303 - DNA, 25 bp, Artificial
  Probe
ggagagatggctcagcgattaagag

SEQ ID NO: 173304 - DNA, 25 bp, Artificial
  Probe
gataccctcttctggtgtgtctgaa

SEQ ID NO: 173305 - DNA, 25 bp, Artificial
  Probe
tctgtaaagagatccgataccctct

SEQ ID NO: 173306 - DNA, 25 bp, Artificial
  Probe
gctgtcgaagatggtctgtaggtac

SEQ ID NO: 173307 - DNA, 25 bp, Artificial
  Probe
ctgtaatgagaataggccggtacac

SEQ ID NO: 173308 - DNA, 25 bp, Artificial
  Probe
ctggagagatggctcagcgattaag

SEQ ID NO: 173309 - DNA, 25 bp, Artificial
  Probe
gtcgaagatggtctgtaggtacacg

SEQ ID NO: 173310 - DNA, 25 bp, Artificial
  Probe
cagctacagtgtacttatatgtaat

SEQ ID NO: 173311 - DNA, 25 bp, Artificial
  Probe
actgtaatgagaataggccggtaca

SEQ ID NO: 173312 - DNA, 25 bp, Artificial
  Probe
ctactcttccagaggtcctgagttc

SEQ ID NO: 173313 - DNA, 25 bp, Artificial
  Probe
tggagagatggctcagcgattaaga

SEQ ID NO: 173314 - DNA, 25 bp, Artificial
  Probe
tgctgtcgaagatggtctgtaggta

SEQ ID NO: 173315 - DNA, 25 bp, Artificial
  Probe
taatgagaataggccggtacacacg

SEQ ID NO: 173316 - DNA, 25 bp, Artificial
  Probe
gcactgtaatgagaataggccggta

SEQ ID NO: 173317 - DNA, 25 bp, Artificial
  Probe
gaaaacgcatcagcactgtaatgag

SEQ ID NO: 173318 - DNA, 25 bp, Artificial
  Probe
ctgtctctgttattcttagaagtgg

SEQ ID NO: 173319 - DNA, 25 bp, Artificial
  Probe
cctgtctctgttattcttagaagtg

SEQ ID NO: 173320 - DNA, 25 bp, Artificial
  Probe
gctacaactggatggactcatactc

SEQ ID NO: 173321 - DNA, 25 bp, Artificial
  Probe
ggtctctatgtatttcctttctgct

SEQ ID NO: 173322 - DNA, 25 bp, Artificial
  Probe
tggtctctatgtatttcctttctgc

SEQ ID NO: 173323 - DNA, 25 bp, Artificial
  Probe
taccaccctgtctctgttattctta

SEQ ID NO: 173324 - DNA, 25 bp, Artificial
  Probe
ccctggtctctatgtatttcctttc

SEQ ID NO: 173325 - DNA, 25 bp, Artificial
  Probe
cctggtctctatgtatttcctttct

SEQ ID NO: 173326 - DNA, 25 bp, Artificial
  Probe
tccctggtctctatgtatttccttt

SEQ ID NO: 173327 - DNA, 25 bp, Artificial
  Probe
gttgtccctggtctctatgtatttc

SEQ ID NO: 173328 - DNA, 25 bp, Artificial
  Probe
tctatgtatttcctttctgctctga

SEQ ID NO: 173329 - DNA, 25 bp, Artificial
  Probe
ctctatgtatttcctttctgctctg

SEQ ID NO: 173330 - DNA, 25 bp, Artificial
  Probe
tctctatgtatttcctttctgctct

SEQ ID NO: 173331 - DNA, 25 bp, Artificial
  Probe
gtctctatgtatttcctttctgctc

SEQ ID NO: 173332 - DNA, 25 bp, Artificial
  Probe
ctatgtatttcctttctgctctgag

SEQ ID NO: 173333 - DNA, 25 bp, Artificial
  Probe
ctacaactggatggactcatactcc

SEQ ID NO: 173334 - DNA, 25 bp, Artificial
  Probe
ctggtctctatgtatttcctttctg

SEQ ID NO: 173335 - DNA, 25 bp, Artificial
  Probe
gtccctggtctctatgtatttcctt

SEQ ID NO: 173336 - DNA, 25 bp, Artificial
  Probe
accaccctgtctctgttattcttag

SEQ ID NO: 173337 - DNA, 25 bp, Artificial
  Probe
ctaccaccctgtctctgttattctt

SEQ ID NO: 173338 - DNA, 25 bp, Artificial
  Probe
ttgtccctggtctctatgtatttcc

SEQ ID NO: 173339 - DNA, 25 bp, Artificial
  Probe
ccaccctgtctctgttattcttaga

SEQ ID NO: 173340 - DNA, 25 bp, Artificial
  Probe
ggttgtccctggtctctatgtattt

SEQ ID NO: 173341 - DNA, 25 bp, Artificial
  Probe
tgtctctgttattcttagaagtggg

SEQ ID NO: 173342 - DNA, 25 bp, Artificial
  Probe
caccctgtctctgttattcttagaa

SEQ ID NO: 173343 - DNA, 25 bp, Artificial
  Probe
ccctgtctctgttattcttagaagt

SEQ ID NO: 173344 - DNA, 25 bp, Artificial
  Probe
accctgtctctgttattcttagaag

SEQ ID NO: 173345 - DNA, 25 bp, Artificial
  Probe
tctaccaccctgtctctgttattct

SEQ ID NO: 173346 - DNA, 25 bp, Artificial
  Probe
gtctaccaccctgtctctgttattc

SEQ ID NO: 173347 - DNA, 25 bp, Artificial
  Probe
tgtccctggtctctatgtatttcct

SEQ ID NO: 173348 - DNA, 25 bp, Artificial
  Probe
ggctacaactggatggactcatact

SEQ ID NO: 173349 - DNA, 25 bp, Artificial
  Probe
ctggctacaactggatggactcata

SEQ ID NO: 173350 - DNA, 25 bp, Artificial
  Probe
agtctaccaccctgtctctgttatt

SEQ ID NO: 173351 - DNA, 25 bp, Artificial
  Probe
aagtctaccaccctgtctctgttat

SEQ ID NO: 173352 - DNA, 25 bp, Artificial
  Probe
tggctacaactggatggactcatac

SEQ ID NO: 173353 - DNA, 25 bp, Artificial
  Probe
caagtctaccaccctgtctctgtta

SEQ ID NO: 173354 - DNA, 25 bp, Artificial
  Probe
taagtgtgggatcaccattctcttt

SEQ ID NO: 173355 - DNA, 25 bp, Artificial
  Probe
ttaagtgtgggatcaccattctctt

SEQ ID NO: 173356 - DNA, 25 bp, Artificial
  Probe
tttaagtgtgggatcaccattctct

SEQ ID NO: 173357 - DNA, 25 bp, Artificial
  Probe
gggctattccagaggtattttaagt

SEQ ID NO: 173358 - DNA, 25 bp, Artificial
  Probe
ggggctattccagaggtattttaag

SEQ ID NO: 173359 - DNA, 25 bp, Artificial
  Probe
ggctattccagaggtattttaagtg

SEQ ID NO: 173360 - DNA, 25 bp, Artificial
  Probe
gctattccagaggtattttaagtgt

SEQ ID NO: 173361 - DNA, 25 bp, Artificial
  Probe
cagaggtattttaagtgtgggatca

SEQ ID NO: 173362 - DNA, 25 bp, Artificial
  Probe
ttattcttagaagtggggctattcc

SEQ ID NO: 173363 - DNA, 25 bp, Artificial
  Probe
ctaccgaagagtgttcaacctccag

SEQ ID NO: 173364 - DNA, 25 bp, Artificial
  Probe
actaccgaagagtgttcaacctcca

SEQ ID NO: 173365 - DNA, 25 bp, Artificial
  Probe
taagcagctcactcactaccgaaga

SEQ ID NO: 173366 - DNA, 25 bp, Artificial
  Probe
tcactaccgaagagtgttcaacctc

SEQ ID NO: 173367 - DNA, 25 bp, Artificial
  Probe
ctcactaccgaagagtgttcaacct

SEQ ID NO: 173368 - DNA, 25 bp, Artificial
  Probe
actcactaccgaagagtgttcaacc

SEQ ID NO: 173369 - DNA, 25 bp, Artificial
  Probe
cactaccgaagagtgttcaacctcc

SEQ ID NO: 173370 - DNA, 25 bp, Artificial
  Probe
gatcccaactggtttatgaagaaag

SEQ ID NO: 173371 - DNA, 25 bp, Artificial
  Probe
agatcccaactggtttatgaagaaa

SEQ ID NO: 173372 - DNA, 25 bp, Artificial
  Probe
gagatcccaactggtttatgaagaa

SEQ ID NO: 173373 - DNA, 25 bp, Artificial
  Probe
cagatcatcagttagaaagggaagg

SEQ ID NO: 173374 - DNA, 25 bp, Artificial
  Probe
atcccaactggtttatgaagaaagc

SEQ ID NO: 173375 - DNA, 25 bp, Artificial
  Probe
gcagatcatcagttagaaagggaag

SEQ ID NO: 173376 - DNA, 25 bp, Artificial
  Probe
cataagagggagttcacagacagtc

SEQ ID NO: 173377 - DNA, 25 bp, Artificial
  Probe
agatcatcagttagaaagggaaggc

SEQ ID NO: 173378 - DNA, 25 bp, Artificial
  Probe
ggagatcccaactggtttatgaaga

SEQ ID NO: 173379 - DNA, 25 bp, Artificial
  Probe
ataagagggagttcacagacagtca

SEQ ID NO: 173380 - DNA, 25 bp, Artificial
  Probe
ggcagatcatcagttagaaagggaa

SEQ ID NO: 173381 - DNA, 25 bp, Artificial
  Probe
taagagggagttcacagacagtcaa

SEQ ID NO: 173382 - DNA, 25 bp, Artificial
  Probe
tttatgaagaaagcccaggagcata

SEQ ID NO: 173383 - DNA, 25 bp, Artificial
  Probe
tatgaagaaagcccaggagcataag

SEQ ID NO: 173384 - DNA, 25 bp, Artificial
  Probe
gaagccaatgtcctttgaaagagac

SEQ ID NO: 173385 - DNA, 25 bp, Artificial
  Probe
tcccaactggtttatgaagaaagcc

SEQ ID NO: 173386 - DNA, 25 bp, Artificial
  Probe
gtttatgaagaaagcccaggagcat

SEQ ID NO: 173387 - DNA, 25 bp, Artificial
  Probe
tggagatcccaactggtttatgaag

SEQ ID NO: 173388 - DNA, 25 bp, Artificial
  Probe
agcataagagggagttcacagacag

SEQ ID NO: 173389 - DNA, 25 bp, Artificial
  Probe
gagcataagagggagttcacagaca

SEQ ID NO: 173390 - DNA, 25 bp, Artificial
  Probe
gtggagatcccaactggtttatgaa

SEQ ID NO: 173391 - DNA, 25 bp, Artificial
  Probe
atgaagaaagcccaggagcataaga

SEQ ID NO: 173392 - DNA, 25 bp, Artificial
  Probe
gcataagagggagttcacagacagt

SEQ ID NO: 173393 - DNA, 25 bp, Artificial
  Probe
ccaatgtcctttgaaagagaccctg

SEQ ID NO: 173394 - DNA, 25 bp, Artificial
  Probe
aagccaatgtcctttgaaagagacc

SEQ ID NO: 173395 - DNA, 25 bp, Artificial
  Probe
ggaagccaatgtcctttgaaagaga

SEQ ID NO: 173396 - DNA, 25 bp, Artificial
  Probe
cccaactggtttatgaagaaagccc

SEQ ID NO: 173397 - DNA, 25 bp, Artificial
  Probe
tgaagaaagcccaggagcataagag

SEQ ID NO: 173398 - DNA, 25 bp, Artificial
  Probe
ccaactggtttatgaagaaagccca

SEQ ID NO: 173399 - DNA, 25 bp, Artificial
  Probe
ggagcataagagggagttcacagac

SEQ ID NO: 173400 - DNA, 25 bp, Artificial
  Probe
caggagcataagagggagttcacag

SEQ ID NO: 173401 - DNA, 25 bp, Artificial
  Probe
ctatataggttcttagcccggacag

SEQ ID NO: 173402 - DNA, 25 bp, Artificial
  Probe
aagagggagttcacagacagtcaac

SEQ ID NO: 173403 - DNA, 25 bp, Artificial
  Probe
tggaagccaatgtcctttgaaagag

SEQ ID NO: 173404 - DNA, 25 bp, Artificial
  Probe
cggcagatcatcagttagaaaggga

SEQ ID NO: 173405 - DNA, 25 bp, Artificial
  Probe
aggagcataagagggagttcacaga

SEQ ID NO: 173406 - DNA, 25 bp, Artificial
  Probe
caatgtcctttgaaagagaccctgc

SEQ ID NO: 173407 - DNA, 25 bp, Artificial
  Probe
gatcatcagttagaaagggaaggcc

SEQ ID NO: 173408 - DNA, 25 bp, Artificial
  Probe
ttatgaagaaagcccaggagcataa

SEQ ID NO: 173409 - DNA, 25 bp, Artificial
  Probe
tatataggttcttagcccggacagc

SEQ ID NO: 173410 - DNA, 25 bp, Artificial
  Probe
gaagaaagcccaggagcataagagg

SEQ ID NO: 173411 - DNA, 25 bp, Artificial
  Probe
ggtttatgaagaaagcccaggagca

SEQ ID NO: 173412 - DNA, 25 bp, Artificial
  Probe
atcatcagttagaaagggaaggcca

SEQ ID NO: 173413 - DNA, 25 bp, Artificial
  Probe
cgtggagatcccaactggtttatga

SEQ ID NO: 173414 - DNA, 25 bp, Artificial
  Probe
tttgaaagagaccctgcctctacat

SEQ ID NO: 173415 - DNA, 25 bp, Artificial
  Probe
ctatggcttccttatatgtgactgt

SEQ ID NO: 173416 - DNA, 25 bp, Artificial
  Probe
atcctatggcttccttatatgtgac

SEQ ID NO: 173417 - DNA, 25 bp, Artificial
  Probe
cctatggcttccttatatgtgactg

SEQ ID NO: 173418 - DNA, 25 bp, Artificial
  Probe
tcctatggcttccttatatgtgact

SEQ ID NO: 173419 - DNA, 25 bp, Artificial
  Probe
gcttccttatatgtgactgtcctta

SEQ ID NO: 173420 - DNA, 25 bp, Artificial
  Probe
tatggcttccttatatgtgactgtc

SEQ ID NO: 173421 - DNA, 25 bp, Artificial
  Probe
catcctatggcttccttatatgtga

SEQ ID NO: 173422 - DNA, 25 bp, Artificial
  Probe
tggagccttatactgtatagaacct

SEQ ID NO: 173423 - DNA, 25 bp, Artificial
  Probe
gtggagccttatactgtatagaacc

SEQ ID NO: 173424 - DNA, 25 bp, Artificial
  Probe
tgtggagccttatactgtatagaac

SEQ ID NO: 173425 - DNA, 25 bp, Artificial
  Probe
atactctgtggagccttatactgta

SEQ ID NO: 173426 - DNA, 25 bp, Artificial
  Probe
cttcatactctgtggagccttatac

SEQ ID NO: 173427 - DNA, 25 bp, Artificial
  Probe
tcttcatactctgtggagccttata

SEQ ID NO: 173428 - DNA, 25 bp, Artificial
  Probe
ggagccttatactgtatagaacctt

SEQ ID NO: 173429 - DNA, 25 bp, Artificial
  Probe
ctgtggagccttatactgtatagaa

SEQ ID NO: 173430 - DNA, 25 bp, Artificial
  Probe
ttcatactctgtggagccttatact

SEQ ID NO: 173431 - DNA, 25 bp, Artificial
  Probe
tactctgtggagccttatactgtat

SEQ ID NO: 173432 - DNA, 25 bp, Artificial
  Probe
tctgtggagccttatactgtataga

SEQ ID NO: 173433 - DNA, 25 bp, Artificial
  Probe
ttcttcatactctgtggagccttat

SEQ ID NO: 173434 - DNA, 25 bp, Artificial
  Probe
tcatactctgtggagccttatactg

SEQ ID NO: 173435 - DNA, 25 bp, Artificial
  Probe
actctgtggagccttatactgtata

SEQ ID NO: 173436 - DNA, 25 bp, Artificial
  Probe
ctctgtggagccttatactgtatag

SEQ ID NO: 173437 - DNA, 25 bp, Artificial
  Probe
catactctgtggagccttatactgt

SEQ ID NO: 173438 - DNA, 25 bp, Artificial
  Probe
ggcttccttatatgtgactgtcctt

SEQ ID NO: 173439 - DNA, 25 bp, Artificial
  Probe
atggcttccttatatgtgactgtcc

SEQ ID NO: 173440 - DNA, 25 bp, Artificial
  Probe
cttccttatatgtgactgtccttat

SEQ ID NO: 173441 - DNA, 25 bp, Artificial
  Probe
tctattctgttcctttgccacttta

SEQ ID NO: 173442 - DNA, 25 bp, Artificial
  Probe
atagcctcatatttaacacttgggt

SEQ ID NO: 173443 - DNA, 25 bp, Artificial
  Probe
attctgttcctttgccactttatag

SEQ ID NO: 173444 - DNA, 25 bp, Artificial
  Probe
ctattctgttcctttgccactttat

SEQ ID NO: 173445 - DNA, 25 bp, Artificial
  Probe
ttctattctgttcctttgccacttt

SEQ ID NO: 173446 - DNA, 25 bp, Artificial
  Probe
tttctattctgttcctttgccactt

SEQ ID NO: 173447 - DNA, 25 bp, Artificial
  Probe
ttccttatatgtgactgtccttatt

SEQ ID NO: 173448 - DNA, 25 bp, Artificial
  Probe
gttaccatccctcagaaatccattt

SEQ ID NO: 173449 - DNA, 25 bp, Artificial
  Probe
gtcacagcaacattctaatttccag

SEQ ID NO: 173450 - DNA, 25 bp, Artificial
  Probe
tagcctcatatttaacacttgggtt

SEQ ID NO: 173451 - DNA, 25 bp, Artificial
  Probe
tggcttccttatatgtgactgtcct

SEQ ID NO: 173452 - DNA, 25 bp, Artificial
  Probe
ccatttctagtgtgacagggatatt

SEQ ID NO: 173453 - DNA, 25 bp, Artificial
  Probe
ttctgttcctttgccactttatagc

SEQ ID NO: 173454 - DNA, 25 bp, Artificial
  Probe
tcatatttaacacttgggttcttcc

SEQ ID NO: 173455 - DNA, 25 bp, Artificial
  Probe
cctcatatttaacacttgggttctt

SEQ ID NO: 173456 - DNA, 25 bp, Artificial
  Probe
gcctcatatttaacacttgggttct

SEQ ID NO: 173457 - DNA, 25 bp, Artificial
  Probe
agcctcatatttaacacttgggttc

SEQ ID NO: 173458 - DNA, 25 bp, Artificial
  Probe
tgttaccatccctcagaaatccatt

SEQ ID NO: 173459 - DNA, 25 bp, Artificial
  Probe
atttgactggataagtatctctggg

SEQ ID NO: 173460 - DNA, 25 bp, Artificial
  Probe
ctggagaatgtgctagagatcaata

SEQ ID NO: 173461 - DNA, 25 bp, Artificial
  Probe
tggagaatgtgctagagatcaataa

SEQ ID NO: 173462 - DNA, 25 bp, Artificial
  Probe
ggagaatgtgctagagatcaataag

SEQ ID NO: 173463 - DNA, 25 bp, Artificial
  Probe
cctggagaatgtgctagagatcaat

SEQ ID NO: 173464 - DNA, 25 bp, Artificial
  Probe
gagaatgtgctagagatcaataagc

SEQ ID NO: 173465 - DNA, 25 bp, Artificial
  Probe
agaatgtgctagagatcaataagcg

SEQ ID NO: 173466 - DNA, 25 bp, Artificial
  Probe
ctaagcgggaatatgagatagacgg

SEQ ID NO: 173467 - DNA, 25 bp, Artificial
  Probe
cctaagcgggaatatgagatagacg

SEQ ID NO: 173468 - DNA, 25 bp, Artificial
  Probe
ctagagatcaataagcggatcacag

SEQ ID NO: 173469 - DNA, 25 bp, Artificial
  Probe
gaatgtgctagagatcaataagcgg

SEQ ID NO: 173470 - DNA, 25 bp, Artificial
  Probe
tagagatcaataagcggatcacaga

SEQ ID NO: 173471 - DNA, 25 bp, Artificial
  Probe
atgtgctagagatcaataagcggat

SEQ ID NO: 173472 - DNA, 25 bp, Artificial
  Probe
aatgtgctagagatcaataagcgga

SEQ ID NO: 173473 - DNA, 25 bp, Artificial
  Probe
tcctaagcgggaatatgagatagac

SEQ ID NO: 173474 - DNA, 25 bp, Artificial
  Probe
gtcctaagcgggaatatgagataga

SEQ ID NO: 173475 - DNA, 25 bp, Artificial
  Probe
agagatcaataagcggatcacagag

SEQ ID NO: 173476 - DNA, 25 bp, Artificial
  Probe
gctagagatcaataagcggatcaca

SEQ ID NO: 173477 - DNA, 25 bp, Artificial
  Probe
tgctagagatcaataagcggatcac

SEQ ID NO: 173478 - DNA, 25 bp, Artificial
  Probe
gtgctagagatcaataagcggatca

SEQ ID NO: 173479 - DNA, 25 bp, Artificial
  Probe
tgtgctagagatcaataagcggatc

SEQ ID NO: 173480 - DNA, 25 bp, Artificial
  Probe
cgtcctaagcgggaatatgagatag

SEQ ID NO: 173481 - DNA, 25 bp, Artificial
  Probe
gatcaataagcggatcacagaggag

SEQ ID NO: 173482 - DNA, 25 bp, Artificial
  Probe
gagatcaataagcggatcacagagg

SEQ ID NO: 173483 - DNA, 25 bp, Artificial
  Probe
catccaggcacacaagttcattgag

SEQ ID NO: 173484 - DNA, 25 bp, Artificial
  Probe
caaagtgaaacgtgtcattgaagac

SEQ ID NO: 173485 - DNA, 25 bp, Artificial
  Probe
acaaagtgaaacgtgtcattgaaga

SEQ ID NO: 173486 - DNA, 25 bp, Artificial
  Probe
cacaaagtgaaacgtgtcattgaag

SEQ ID NO: 173487 - DNA, 25 bp, Artificial
  Probe
gacatccaggcacacaagttcattg

SEQ ID NO: 173488 - DNA, 25 bp, Artificial
  Probe
atcaataagcggatcacagaggagc

SEQ ID NO: 173489 - DNA, 25 bp, Artificial
  Probe
agatcaataagcggatcacagagga

SEQ ID NO: 173490 - DNA, 25 bp, Artificial
  Probe
taagcgggaatatgagatagacggc

SEQ ID NO: 173491 - DNA, 25 bp, Artificial
  Probe
acagctttgaagagatctatcacaa

SEQ ID NO: 173492 - DNA, 25 bp, Artificial
  Probe
gacagctttgaagagatctatcaca

SEQ ID NO: 173493 - DNA, 25 bp, Artificial
  Probe
ccctggagaatgtgctagagatcaa

SEQ ID NO: 173494 - DNA, 25 bp, Artificial
  Probe
aaagtgaaacgtgtcattgaagacc

SEQ ID NO: 173495 - DNA, 25 bp, Artificial
  Probe
aataagcggatcacagaggagcaag

SEQ ID NO: 173496 - DNA, 25 bp, Artificial
  Probe
cgacagctttgaagagatctatcac

SEQ ID NO: 173497 - DNA, 25 bp, Artificial
  Probe
acatccaggcacacaagttcattga

SEQ ID NO: 173498 - DNA, 25 bp, Artificial
  Probe
caataagcggatcacagaggagcaa

SEQ ID NO: 173499 - DNA, 25 bp, Artificial
  Probe
aagtgaaacgtgtcattgaagacct

SEQ ID NO: 173500 - DNA, 25 bp, Artificial
  Probe
caggagttcacagagtgcttctcag

SEQ ID NO: 173501 - DNA, 25 bp, Artificial
  Probe
acgtcctaagcgggaatatgagata

SEQ ID NO: 173502 - DNA, 25 bp, Artificial
  Probe
aaacgtgtcattgaagacctctcag

SEQ ID NO: 173503 - DNA, 25 bp, Artificial
  Probe
gaaacgtgtcattgaagacctctca

SEQ ID NO: 173504 - DNA, 25 bp, Artificial
  Probe
tgaaacgtgtcattgaagacctctc

SEQ ID NO: 173505 - DNA, 25 bp, Artificial
  Probe
ctcacaagacaacccagaaacagat

SEQ ID NO: 173506 - DNA, 25 bp, Artificial
  Probe
tgtgagaaacttcagcttatgagtg

SEQ ID NO: 173507 - DNA, 25 bp, Artificial
  Probe
tcacaagacaacccagaaacagatg

SEQ ID NO: 173508 - DNA, 25 bp, Artificial
  Probe
ctgtgagaaacttcagcttatgagt

SEQ ID NO: 173509 - DNA, 25 bp, Artificial
  Probe
cctgtgagaaacttcagcttatgag

SEQ ID NO: 173510 - DNA, 25 bp, Artificial
  Probe
ggctgttctctactgtttcctcaac

SEQ ID NO: 173511 - DNA, 25 bp, Artificial
  Probe
gtgagaaacttcagcttatgagtgc

SEQ ID NO: 173512 - DNA, 25 bp, Artificial
  Probe
atccctgtgagaaacttcagcttat

SEQ ID NO: 173513 - DNA, 25 bp, Artificial
  Probe
tggctgttctctactgtttcctcaa

SEQ ID NO: 173514 - DNA, 25 bp, Artificial
  Probe
gatatgatggagtagccatgctatg

SEQ ID NO: 173515 - DNA, 25 bp, Artificial
  Probe
gagaaacttcagcttatgagtgcag

SEQ ID NO: 173516 - DNA, 25 bp, Artificial
  Probe
atatgatggagtagccatgctatga

SEQ ID NO: 173517 - DNA, 25 bp, Artificial
  Probe
atggagtagccatgctatgaactat

SEQ ID NO: 173518 - DNA, 25 bp, Artificial
  Probe
tatgatggagtagccatgctatgaa

SEQ ID NO: 173519 - DNA, 25 bp, Artificial
  Probe
gatccctgtgagaaacttcagctta

SEQ ID NO: 173520 - DNA, 25 bp, Artificial
  Probe
catggtgatccctgtgagaaacttc

SEQ ID NO: 173521 - DNA, 25 bp, Artificial
  Probe
aagacagcagcttgtactatccaca

SEQ ID NO: 173522 - DNA, 25 bp, Artificial
  Probe
ggatatgatggagtagccatgctat

SEQ ID NO: 173523 - DNA, 25 bp, Artificial
  Probe
gatggagtagccatgctatgaacta

SEQ ID NO: 173524 - DNA, 25 bp, Artificial
  Probe
tgagaaacttcagcttatgagtgca

SEQ ID NO: 173525 - DNA, 25 bp, Artificial
  Probe
ccctgtgagaaacttcagcttatga

SEQ ID NO: 173526 - DNA, 25 bp, Artificial
  Probe
tccctgtgagaaacttcagcttatg

SEQ ID NO: 173527 - DNA, 25 bp, Artificial
  Probe
tgttctctactgtttcctcaacaag

SEQ ID NO: 173528 - DNA, 25 bp, Artificial
  Probe
ctgttctctactgtttcctcaacaa

SEQ ID NO: 173529 - DNA, 25 bp, Artificial
  Probe
tggagtagccatgctatgaactatg

SEQ ID NO: 173530 - DNA, 25 bp, Artificial
  Probe
gttctctactgtttcctcaacaagg

SEQ ID NO: 173531 - DNA, 25 bp, Artificial
  Probe
gtggctgttctctactgtttcctca

SEQ ID NO: 173532 - DNA, 25 bp, Artificial
  Probe
atggtgatccctgtgagaaacttca

SEQ ID NO: 173533 - DNA, 25 bp, Artificial
  Probe
tcatggtgatccctgtgagaaactt

SEQ ID NO: 173534 - DNA, 25 bp, Artificial
  Probe
agaaacttcagcttatgagtgcagg

SEQ ID NO: 173535 - DNA, 25 bp, Artificial
  Probe
ggagtagccatgctatgaactatgg

SEQ ID NO: 173536 - DNA, 25 bp, Artificial
  Probe
atgatggagtagccatgctatgaac

SEQ ID NO: 173537 - DNA, 25 bp, Artificial
  Probe
tggatatgatggagtagccatgcta

SEQ ID NO: 173538 - DNA, 25 bp, Artificial
  Probe
caaagctcttcaggaggaaaggatg

SEQ ID NO: 173539 - DNA, 25 bp, Artificial
  Probe
acagcagcttgtactatccacactc

SEQ ID NO: 173540 - DNA, 25 bp, Artificial
  Probe
gacagcagcttgtactatccacact

SEQ ID NO: 173541 - DNA, 25 bp, Artificial
  Probe
agacagcagcttgtactatccacac

SEQ ID NO: 173542 - DNA, 25 bp, Artificial
  Probe
cttgtactatccacactcccctaac

SEQ ID NO: 173543 - DNA, 25 bp, Artificial
  Probe
cacaagacaacccagaaacagatgc

SEQ ID NO: 173544 - DNA, 25 bp, Artificial
  Probe
ttgtcatggtgatccctgtgagaaa

SEQ ID NO: 173545 - DNA, 25 bp, Artificial
  Probe
cctcacaagacaacccagaaacaga

SEQ ID NO: 173546 - DNA, 25 bp, Artificial
  Probe
gtaggggctggatatgatggagtag

SEQ ID NO: 173547 - DNA, 25 bp, Artificial
  Probe
ggtggctgttctctactgtttcctc

SEQ ID NO: 173548 - DNA, 25 bp, Artificial
  Probe
attgatggagtaggggctggatatg

SEQ ID NO: 173549 - DNA, 25 bp, Artificial
  Probe
cattgatggagtaggggctggatat

SEQ ID NO: 173550 - DNA, 25 bp, Artificial
  Probe
tctctcattctcaagactctctcat

SEQ ID NO: 173551 - DNA, 25 bp, Artificial
  Probe
ttctctctcattctcaagactctct

SEQ ID NO: 173552 - DNA, 25 bp, Artificial
  Probe
gttctctctcattctcaagactctc

SEQ ID NO: 173553 - DNA, 25 bp, Artificial
  Probe
ctctcattctcaagactctctcatt

SEQ ID NO: 173554 - DNA, 25 bp, Artificial
  Probe
tctctctcattctcaagactctctc

SEQ ID NO: 173555 - DNA, 25 bp, Artificial
  Probe
tgttctctctcattctcaagactct

SEQ ID NO: 173556 - DNA, 25 bp, Artificial
  Probe
gtgttctctctcattctcaagactc

SEQ ID NO: 173557 - DNA, 25 bp, Artificial
  Probe
ctctctcattctcaagactctctca

SEQ ID NO: 173558 - DNA, 25 bp, Artificial
  Probe
ggtgttctctctcattctcaagact

SEQ ID NO: 173559 - DNA, 25 bp, Artificial
  Probe
ctggtgttctctctcattctcaaga

SEQ ID NO: 173560 - DNA, 25 bp, Artificial
  Probe
tggtgttctctctcattctcaagac

SEQ ID NO: 173561 - DNA, 25 bp, Artificial
  Probe
cctggtgttctctctcattctcaag

SEQ ID NO: 173562 - DNA, 25 bp, Artificial
  Probe
actctctcatttgatacaccatacc

SEQ ID NO: 173563 - DNA, 25 bp, Artificial
  Probe
ctctctcatttgatacaccataccc

SEQ ID NO: 173564 - DNA, 25 bp, Artificial
  Probe
gagaggaccaaggaacaaatagaac

SEQ ID NO: 173565 - DNA, 25 bp, Artificial
  Probe
gaggaccaaggaacaaatagaacag

SEQ ID NO: 173566 - DNA, 25 bp, Artificial
  Probe
ctcaataaaggcttgttccatcaaa

SEQ ID NO: 173567 - DNA, 25 bp, Artificial
  Probe
tactcaataaaggcttgttccatca

SEQ ID NO: 173568 - DNA, 25 bp, Artificial
  Probe
aagactctctcatttgatacaccat

SEQ ID NO: 173569 - DNA, 25 bp, Artificial
  Probe
gactctctcatttgatacaccatac

SEQ ID NO: 173570 - DNA, 25 bp, Artificial
  Probe
caagactctctcatttgatacacca

SEQ ID NO: 173571 - DNA, 25 bp, Artificial
  Probe
tctcattctcaagactctctcattt

SEQ ID NO: 173572 - DNA, 25 bp, Artificial
  Probe
gatatctcacttcagcacatcttcc

SEQ ID NO: 173573 - DNA, 25 bp, Artificial
  Probe
ggatatctcacttcagcacatcttc

SEQ ID NO: 173574 - DNA, 25 bp, Artificial
  Probe
gttgtctccttctttctgtttcctc

SEQ ID NO: 173575 - DNA, 25 bp, Artificial
  Probe
agaggaccaaggaacaaatagaaca

SEQ ID NO: 173576 - DNA, 25 bp, Artificial
  Probe
ctcattctcaagactctctcatttg

SEQ ID NO: 173577 - DNA, 25 bp, Artificial
  Probe
actcaataaaggcttgttccatcaa

SEQ ID NO: 173578 - DNA, 25 bp, Artificial
  Probe
ttgtctccttctttctgtttcctca

SEQ ID NO: 173579 - DNA, 25 bp, Artificial
  Probe
agactctctcatttgatacaccata

SEQ ID NO: 173580 - DNA, 25 bp, Artificial
  Probe
atggatatctcacttcagcacatct

SEQ ID NO: 173581 - DNA, 25 bp, Artificial
  Probe
tggatatctcacttcagcacatctt

SEQ ID NO: 173582 - DNA, 25 bp, Artificial
  Probe
gtgttgtctccttctttctgtttcc

SEQ ID NO: 173583 - DNA, 25 bp, Artificial
  Probe
ggtgttgtctccttctttctgtttc

SEQ ID NO: 173584 - DNA, 25 bp, Artificial
  Probe
ggagaggaccaaggaacaaatagaa

SEQ ID NO: 173585 - DNA, 25 bp, Artificial
  Probe
gtactcaataaaggcttgttccatc

SEQ ID NO: 173586 - DNA, 25 bp, Artificial
  Probe
tgttgtctccttctttctgtttcct

SEQ ID NO: 173587 - DNA, 25 bp, Artificial
  Probe
ccaaggaacaaatagaacagccatc

SEQ ID NO: 173588 - DNA, 25 bp, Artificial
  Probe
atatctcacttcagcacatcttccc

SEQ ID NO: 173589 - DNA, 25 bp, Artificial
  Probe
ggtactcaataaaggcttgttccat

SEQ ID NO: 173590 - DNA, 25 bp, Artificial
  Probe
tgatggatatctcacttcagcacat

SEQ ID NO: 173591 - DNA, 25 bp, Artificial
  Probe
actagagtaagacagaccagggtag

SEQ ID NO: 173592 - DNA, 25 bp, Artificial
  Probe
gactagagtaagacagaccagggta

SEQ ID NO: 173593 - DNA, 25 bp, Artificial
  Probe
aactaattcggagtctccttctgtc

SEQ ID NO: 173594 - DNA, 25 bp, Artificial
  Probe
tggtgttgtctccttctttctgttt

SEQ ID NO: 173595 - DNA, 25 bp, Artificial
  Probe
atcccgctaagtgtttagatttctt

SEQ ID NO: 173596 - DNA, 25 bp, Artificial
  Probe
tcccgctaagtgtttagatttcttc

SEQ ID NO: 173597 - DNA, 25 bp, Artificial
  Probe
gaatcccgctaagtgtttagatttc

SEQ ID NO: 173598 - DNA, 25 bp, Artificial
  Probe
aatcccgctaagtgtttagatttct

SEQ ID NO: 173599 - DNA, 25 bp, Artificial
  Probe
ggaatcccgctaagtgtttagattt

SEQ ID NO: 173600 - DNA, 25 bp, Artificial
  Probe
cccgctaagtgtttagatttcttcg

SEQ ID NO: 173601 - DNA, 25 bp, Artificial
  Probe
ctaagtgtttagatttcttcgccgc

SEQ ID NO: 173602 - DNA, 25 bp, Artificial
  Probe
gctaagtgtttagatttcttcgccg

SEQ ID NO: 173603 - DNA, 25 bp, Artificial
  Probe
cgctaagtgtttagatttcttcgcc

SEQ ID NO: 173604 - DNA, 25 bp, Artificial
  Probe
ccgctaagtgtttagatttcttcgc

SEQ ID NO: 173605 - DNA, 25 bp, Artificial
  Probe
taagtgtttagatttcttcgccgcc

SEQ ID NO: 173606 - DNA, 25 bp, Artificial
  Probe
cttagctctacaacagcctgatttc

SEQ ID NO: 173607 - DNA, 25 bp, Artificial
  Probe
ttagctctacaacagcctgatttcc

SEQ ID NO: 173608 - DNA, 25 bp, Artificial
  Probe
gcttagctctacaacagcctgattt

SEQ ID NO: 173609 - DNA, 25 bp, Artificial
  Probe
gggaatcccgctaagtgtttagatt

SEQ ID NO: 173610 - DNA, 25 bp, Artificial
  Probe
cgcttagctctacaacagcctgatt

SEQ ID NO: 173611 - DNA, 25 bp, Artificial
  Probe
tagctctacaacagcctgatttccc

SEQ ID NO: 173612 - DNA, 25 bp, Artificial
  Probe
gtgttctggagacctagggagttag

SEQ ID NO: 173613 - DNA, 25 bp, Artificial
  Probe
tactccttcgtcgaggtaggaagag

SEQ ID NO: 173614 - DNA, 25 bp, Artificial
  Probe
ctactccttcgtcgaggtaggaaga

SEQ ID NO: 173615 - DNA, 25 bp, Artificial
  Probe
cttctggagaaggaagcaggtgttc

SEQ ID NO: 173616 - DNA, 25 bp, Artificial
  Probe
actactccttcgtcgaggtaggaag

SEQ ID NO: 173617 - DNA, 25 bp, Artificial
  Probe
cactactccttcgtcgaggtaggaa

SEQ ID NO: 173618 - DNA, 25 bp, Artificial
  Probe
ctacaacagcctgatttccccgaaa

SEQ ID NO: 173619 - DNA, 25 bp, Artificial
  Probe
ggtgttctggagacctagggagtta

SEQ ID NO: 173620 - DNA, 25 bp, Artificial
  Probe
ggggaatcccgctaagtgtttagat

SEQ ID NO: 173621 - DNA, 25 bp, Artificial
  Probe
tgttctggagacctagggagttagg

SEQ ID NO: 173622 - DNA, 25 bp, Artificial
  Probe
tacaacagcctgatttccccgaaat

SEQ ID NO: 173623 - DNA, 25 bp, Artificial
  Probe
aacagcctgatttccccgaaatgat

SEQ ID NO: 173624 - DNA, 25 bp, Artificial
  Probe
agcctgatttccccgaaatgatgag

SEQ ID NO: 173625 - DNA, 25 bp, Artificial
  Probe
aacgagaacattgaagatgaggatt

SEQ ID NO: 173626 - DNA, 25 bp, Artificial
  Probe
gaacaacgagaacattgaagatgag

SEQ ID NO: 173627 - DNA, 25 bp, Artificial
  Probe
caacgagaacattgaagatgaggat

SEQ ID NO: 173628 - DNA, 25 bp, Artificial
  Probe
aacaacgagaacattgaagatgagg

SEQ ID NO: 173629 - DNA, 25 bp, Artificial
  Probe
ggaacaacgagaacattgaagatga

SEQ ID NO: 173630 - DNA, 25 bp, Artificial
  Probe
acaacgagaacattgaagatgagga

SEQ ID NO: 173631 - DNA, 25 bp, Artificial
  Probe
ctactcgtgtttcattaccatacct

SEQ ID NO: 173632 - DNA, 25 bp, Artificial
  Probe
tctactcgtgtttcattaccatacc

SEQ ID NO: 173633 - DNA, 25 bp, Artificial
  Probe
tactcgtgtttcattaccatacctg

SEQ ID NO: 173634 - DNA, 25 bp, Artificial
  Probe
gctctactcgtgtttcattaccata

SEQ ID NO: 173635 - DNA, 25 bp, Artificial
  Probe
gaaacttctgtctctaccctgtatg

SEQ ID NO: 173636 - DNA, 25 bp, Artificial
  Probe
ctctactcgtgtttcattaccatac

SEQ ID NO: 173637 - DNA, 25 bp, Artificial
  Probe
gagaacattgaagatgaggatttgg

SEQ ID NO: 173638 - DNA, 25 bp, Artificial
  Probe
tgtaacaaagtatcgggaatctgag

SEQ ID NO: 173639 - DNA, 25 bp, Artificial
  Probe
ctgtaacaaagtatcgggaatctga

SEQ ID NO: 173640 - DNA, 25 bp, Artificial
  Probe
aaatgacacctttgctctttagaca

SEQ ID NO: 173641 - DNA, 25 bp, Artificial
  Probe
cgagaacattgaagatgaggatttg

SEQ ID NO: 173642 - DNA, 25 bp, Artificial
  Probe
gaacattgaagatgaggatttggtg

SEQ ID NO: 173643 - DNA, 25 bp, Artificial
  Probe
agaacattgaagatgaggatttggt

SEQ ID NO: 173644 - DNA, 25 bp, Artificial
  Probe
acgagaacattgaagatgaggattt

SEQ ID NO: 173645 - DNA, 25 bp, Artificial
  Probe
cggaacaacgagaacattgaagatg

SEQ ID NO: 173646 - DNA, 25 bp, Artificial
  Probe
agtaggttggtctatgtggagtgag

SEQ ID NO: 173647 - DNA, 25 bp, Artificial
  Probe
aatgacacctttgctctttagacat

SEQ ID NO: 173648 - DNA, 25 bp, Artificial
  Probe
atgacacctttgctctttagacatc

SEQ ID NO: 173649 - DNA, 25 bp, Artificial
  Probe
gtaacaaagtatcgggaatctgagc

SEQ ID NO: 173650 - DNA, 25 bp, Artificial
  Probe
cagtaggttggtctatgtggagtga

SEQ ID NO: 173651 - DNA, 25 bp, Artificial
  Probe
tcagtaggttggtctatgtggagtg

SEQ ID NO: 173652 - DNA, 25 bp, Artificial
  Probe
cgaaacttctgtctctaccctgtat

SEQ ID NO: 173653 - DNA, 25 bp, Artificial
  Probe
cttctgtctctaccctgtatgctac

SEQ ID NO: 173654 - DNA, 25 bp, Artificial
  Probe
gacacctttgctctttagacatcaa

SEQ ID NO: 173655 - DNA, 25 bp, Artificial
  Probe
aacattgaagatgaggatttggtgg

SEQ ID NO: 173656 - DNA, 25 bp, Artificial
  Probe
aaacaaacgaaacttctgtctctac

SEQ ID NO: 173657 - DNA, 25 bp, Artificial
  Probe
caaacaaacgaaacttctgtctcta

SEQ ID NO: 173658 - DNA, 25 bp, Artificial
  Probe
aaacaaacaaacgaaacttctgtct

SEQ ID NO: 173659 - DNA, 25 bp, Artificial
  Probe
gctgtaacaaagtatcgggaatctg

SEQ ID NO: 173660 - DNA, 25 bp, Artificial
  Probe
ggagggagtaaggaaactgtcatat

SEQ ID NO: 173661 - DNA, 25 bp, Artificial
  Probe
aacaaacaaacgaaacttctgtctc

SEQ ID NO: 173662 - DNA, 25 bp, Artificial
  Probe
ctcagtaggttggtctatgtggagt

SEQ ID NO: 173663 - DNA, 25 bp, Artificial
  Probe
acttctgtctctaccctgtatgcta

SEQ ID NO: 173664 - DNA, 25 bp, Artificial
  Probe
aaacttctgtctctaccctgtatgc

SEQ ID NO: 173665 - DNA, 25 bp, Artificial
  Probe
aacaaacgaaacttctgtctctacc

SEQ ID NO: 173666 - DNA, 25 bp, Artificial
  Probe
ttgaggtgtttatcttcctatcagg

SEQ ID NO: 173667 - DNA, 25 bp, Artificial
  Probe
acaaacaaacgaaacttctgtctct

SEQ ID NO: 173668 - DNA, 25 bp, Artificial
  Probe
tgtctctaccctgtatgctaccttt

SEQ ID NO: 173669 - DNA, 25 bp, Artificial
  Probe
tttcagctataatgggacctacaag

SEQ ID NO: 173670 - DNA, 25 bp, Artificial
  Probe
gtcaacaggaagtcagacatctatg

SEQ ID NO: 173671 - DNA, 25 bp, Artificial
  Probe
caacaggaagtcagacatctatgtg

SEQ ID NO: 173672 - DNA, 25 bp, Artificial
  Probe
tcaacaggaagtcagacatctatgt

SEQ ID NO: 173673 - DNA, 25 bp, Artificial
  Probe
tcaagaataccaatgatgccaattc

SEQ ID NO: 173674 - DNA, 25 bp, Artificial
  Probe
aacaggaagtcagacatctatgtgt

SEQ ID NO: 173675 - DNA, 25 bp, Artificial
  Probe
cagacatctatgtgtgcatgatctc

SEQ ID NO: 173676 - DNA, 25 bp, Artificial
  Probe
aagaataccaatgatgccaattcct

SEQ ID NO: 173677 - DNA, 25 bp, Artificial
  Probe
caagaataccaatgatgccaattcc

SEQ ID NO: 173678 - DNA, 25 bp, Artificial
  Probe
ggtcaacaggaagtcagacatctat

SEQ ID NO: 173679 - DNA, 25 bp, Artificial
  Probe
ctcagaatcaggtcaacaggaagtc

SEQ ID NO: 173680 - DNA, 25 bp, Artificial
  Probe
atctatgtgtgcatgatctcctatg

SEQ ID NO: 173681 - DNA, 25 bp, Artificial
  Probe
catctatgtgtgcatgatctcctat

SEQ ID NO: 173682 - DNA, 25 bp, Artificial
  Probe
tcagacatctatgtgtgcatgatct

SEQ ID NO: 173683 - DNA, 25 bp, Artificial
  Probe
gtcagacatctatgtgtgcatgatc

SEQ ID NO: 173684 - DNA, 25 bp, Artificial
  Probe
gatttatatgagcccattgatgacg

SEQ ID NO: 173685 - DNA, 25 bp, Artificial
  Probe
agaataccaatgatgccaattcctg

SEQ ID NO: 173686 - DNA, 25 bp, Artificial
  Probe
agtcagacatctatgtgtgcatgat

SEQ ID NO: 173687 - DNA, 25 bp, Artificial
  Probe
ttctgttcctgctcctatgatgcta

SEQ ID NO: 173688 - DNA, 25 bp, Artificial
  Probe
cagaatcaggtcaacaggaagtcag

SEQ ID NO: 173689 - DNA, 25 bp, Artificial
  Probe
ccaaattatcatccctcagaatcag

SEQ ID NO: 173690 - DNA, 25 bp, Artificial
  Probe
acaggaagtcagacatctatgtgtg

SEQ ID NO: 173691 - DNA, 25 bp, Artificial
  Probe
gccaaattatcatccctcagaatca

SEQ ID NO: 173692 - DNA, 25 bp, Artificial
  Probe
tgccaaattatcatccctcagaatc

SEQ ID NO: 173693 - DNA, 25 bp, Artificial
  Probe
gtgttctgttcctgctcctatgatg

SEQ ID NO: 173694 - DNA, 25 bp, Artificial
  Probe
agaatcaggtcaacaggaagtcaga

SEQ ID NO: 173695 - DNA, 25 bp, Artificial
  Probe
atttatatgagcccattgatgacgg

SEQ ID NO: 173696 - DNA, 25 bp, Artificial
  Probe
tgatttatatgagcccattgatgac

SEQ ID NO: 173697 - DNA, 25 bp, Artificial
  Probe
gtgatttatatgagcccattgatga

SEQ ID NO: 173698 - DNA, 25 bp, Artificial
  Probe
agtgatttatatgagcccattgatg

SEQ ID NO: 173699 - DNA, 25 bp, Artificial
  Probe
cagtgatttatatgagcccattgat

SEQ ID NO: 173700 - DNA, 25 bp, Artificial
  Probe
tcagtgatttatatgagcccattga

SEQ ID NO: 173701 - DNA, 25 bp, Artificial
  Probe
aggtcaacaggaagtcagacatcta

SEQ ID NO: 173702 - DNA, 25 bp, Artificial
  Probe
tcagaatcaggtcaacaggaagtca

SEQ ID NO: 173703 - DNA, 25 bp, Artificial
  Probe
aaacagaatgatgtctttggagaag

SEQ ID NO: 173704 - DNA, 25 bp, Artificial
  Probe
aaagtttgtggctatcagtgattta

SEQ ID NO: 173705 - DNA, 25 bp, Artificial
  Probe
acatctatgtgtgcatgatctccta

SEQ ID NO: 173706 - DNA, 25 bp, Artificial
  Probe
atcaagaataccaatgatgccaatt

SEQ ID NO: 173707 - DNA, 25 bp, Artificial
  Probe
aagtttgtggctatcagtgatttat

SEQ ID NO: 173708 - DNA, 25 bp, Artificial
  Probe
attcctgccaaattatcatccctca

SEQ ID NO: 173709 - DNA, 25 bp, Artificial
  Probe
aattcctgccaaattatcatccctc

SEQ ID NO: 173710 - DNA, 25 bp, Artificial
  Probe
atcagtgatttatatgagcccattg

SEQ ID NO: 173711 - DNA, 25 bp, Artificial
  Probe
aattatcatccctcagaatcaggtc

SEQ ID NO: 173712 - DNA, 25 bp, Artificial
  Probe
ctgccaaattatcatccctcagaat

SEQ ID NO: 173713 - DNA, 25 bp, Artificial
  Probe
tctgttcctgctcctatgatgctac

SEQ ID NO: 173714 - DNA, 25 bp, Artificial
  Probe
caattcctgccaaattatcatccct

SEQ ID NO: 173715 - DNA, 25 bp, Artificial
  Probe
gtgatatgtcttacttggaacgaga

SEQ ID NO: 173716 - DNA, 25 bp, Artificial
  Probe
gttgtgtgatagaagtgactgttaa

SEQ ID NO: 173717 - DNA, 25 bp, Artificial
  Probe
tgatatgtcttacttggaacgagaa

SEQ ID NO: 173718 - DNA, 25 bp, Artificial
  Probe
gatatgtcttacttggaacgagaac

SEQ ID NO: 173719 - DNA, 25 bp, Artificial
  Probe
agtgatatgtcttacttggaacgag

SEQ ID NO: 173720 - DNA, 25 bp, Artificial
  Probe
aagttgtgtgatagaagtgactgtt

SEQ ID NO: 173721 - DNA, 25 bp, Artificial
  Probe
agttgtgtgatagaagtgactgtta

SEQ ID NO: 173722 - DNA, 25 bp, Artificial
  Probe
agaagttgtgtgatagaagtgactg

SEQ ID NO: 173723 - DNA, 25 bp, Artificial
  Probe
cagaagttgtgtgatagaagtgact

SEQ ID NO: 173724 - DNA, 25 bp, Artificial
  Probe
gaagttgtgtgatagaagtgactgt

SEQ ID NO: 173725 - DNA, 25 bp, Artificial
  Probe
acagtgtgttacagaagtgatatgt

SEQ ID NO: 173726 - DNA, 25 bp, Artificial
  Probe
cagtgtgttacagaagtgatatgtc

SEQ ID NO: 173727 - DNA, 25 bp, Artificial
  Probe
ttgtgtgatagaagtgactgttaat

SEQ ID NO: 173728 - DNA, 25 bp, Artificial
  Probe
gacagaagttgtgtgatagaagtga

SEQ ID NO: 173729 - DNA, 25 bp, Artificial
  Probe
agtgtgttacagaagtgatatgtct

SEQ ID NO: 173730 - DNA, 25 bp, Artificial
  Probe
acagaagttgtgtgatagaagtgac

SEQ ID NO: 173731 - DNA, 25 bp, Artificial
  Probe
gtgtgttacagaagtgatatgtctt

SEQ ID NO: 173732 - DNA, 25 bp, Artificial
  Probe
ggacagaagttgtgtgatagaagtg

SEQ ID NO: 173733 - DNA, 25 bp, Artificial
  Probe
gaccacagctactcaagatagaatt

SEQ ID NO: 173734 - DNA, 25 bp, Artificial
  Probe
tacagtgtgttacagaagtgatatg

SEQ ID NO: 173735 - DNA, 25 bp, Artificial
  Probe
tgtgtgatagaagtgactgttaata

SEQ ID NO: 173736 - DNA, 25 bp, Artificial
  Probe
ttacagtgtgttacagaagtgatat

SEQ ID NO: 173737 - DNA, 25 bp, Artificial
  Probe
ttctaaacggtggatgaagatgaat

SEQ ID NO: 173738 - DNA, 25 bp, Artificial
  Probe
tttctaaacggtggatgaagatgaa

SEQ ID NO: 173739 - DNA, 25 bp, Artificial
  Probe
cgaccacagctactcaagatagaat

SEQ ID NO: 173740 - DNA, 25 bp, Artificial
  Probe
cgaaagggagatgcttaaataatga

SEQ ID NO: 173741 - DNA, 25 bp, Artificial
  Probe
tgtgttacagaagtgatatgtctta

SEQ ID NO: 173742 - DNA, 25 bp, Artificial
  Probe
gctactcaagatagaatttggcaag

SEQ ID NO: 173743 - DNA, 25 bp, Artificial
  Probe
tctaaacggtggatgaagatgaatg

SEQ ID NO: 173744 - DNA, 25 bp, Artificial
  Probe
ctaaacggtggatgaagatgaatgg

SEQ ID NO: 173745 - DNA, 25 bp, Artificial
  Probe
gtgttacagaagtgatatgtcttac

SEQ ID NO: 173746 - DNA, 25 bp, Artificial
  Probe
actcaagatagaatttggcaagaaa

SEQ ID NO: 173747 - DNA, 25 bp, Artificial
  Probe
agtttacagtgtgttacagaagtga

SEQ ID NO: 173748 - DNA, 25 bp, Artificial
  Probe
aggaagtttacagtgtgttacagaa

SEQ ID NO: 173749 - DNA, 25 bp, Artificial
  Probe
tgttacagaagtgatatgtcttact

SEQ ID NO: 173750 - DNA, 25 bp, Artificial
  Probe
ggaagtttacagtgtgttacagaag

SEQ ID NO: 173751 - DNA, 25 bp, Artificial
  Probe
agggagatgcttaaataatgaactt

SEQ ID NO: 173752 - DNA, 25 bp, Artificial
  Probe
aagtttacagtgtgttacagaagtg

SEQ ID NO: 173753 - DNA, 25 bp, Artificial
  Probe
gtttacagtgtgttacagaagtgat

SEQ ID NO: 173754 - DNA, 25 bp, Artificial
  Probe
taggaagtttacagtgtgttacaga

SEQ ID NO: 173755 - DNA, 25 bp, Artificial
  Probe
ctactcaagatagaatttggcaaga

SEQ ID NO: 173756 - DNA, 25 bp, Artificial
  Probe
gaagtttacagtgtgttacagaagt

SEQ ID NO: 173757 - DNA, 25 bp, Artificial
  Probe
gtttctaaacggtggatgaagatga

SEQ ID NO: 173758 - DNA, 25 bp, Artificial
  Probe
ccttaggaagtttacagtgtgttac

SEQ ID NO: 173759 - DNA, 25 bp, Artificial
  Probe
aagggagatgcttaaataatgaact

SEQ ID NO: 173760 - DNA, 25 bp, Artificial
  Probe
agtggataagctggtatagatcatg

SEQ ID NO: 173761 - DNA, 25 bp, Artificial
  Probe
gtggataagctggtatagatcatgc

SEQ ID NO: 173762 - DNA, 25 bp, Artificial
  Probe
aagtggataagctggtatagatcat

SEQ ID NO: 173763 - DNA, 25 bp, Artificial
  Probe
taagtggataagctggtatagatca

SEQ ID NO: 173764 - DNA, 25 bp, Artificial
  Probe
gtaagtggataagctggtatagatc

SEQ ID NO: 173765 - DNA, 25 bp, Artificial
  Probe
ctggtatagatcatgctgtggtgtc

SEQ ID NO: 173766 - DNA, 25 bp, Artificial
  Probe
tatgccaccttacaaactgagacaa

SEQ ID NO: 173767 - DNA, 25 bp, Artificial
  Probe
gataagctggtatagatcatgctgt

SEQ ID NO: 173768 - DNA, 25 bp, Artificial
  Probe
ataagctggtatagatcatgctgtg

SEQ ID NO: 173769 - DNA, 25 bp, Artificial
  Probe
agattctgagcaagttggtgaacag

SEQ ID NO: 173770 - DNA, 25 bp, Artificial
  Probe
ggataagctggtatagatcatgctg

SEQ ID NO: 173771 - DNA, 25 bp, Artificial
  Probe
tggataagctggtatagatcatgct

SEQ ID NO: 173772 - DNA, 25 bp, Artificial
  Probe
gtatgccaccttacaaactgagaca

SEQ ID NO: 173773 - DNA, 25 bp, Artificial
  Probe
atgccaccttacaaactgagacaaa

SEQ ID NO: 173774 - DNA, 25 bp, Artificial
  Probe
gtatagatcatgctgtggtgtccag

SEQ ID NO: 173775 - DNA, 25 bp, Artificial
  Probe
taagctggtatagatcatgctgtgg

SEQ ID NO: 173776 - DNA, 25 bp, Artificial
  Probe
tggtatagatcatgctgtggtgtcc

SEQ ID NO: 173777 - DNA, 25 bp, Artificial
  Probe
cagattctgagcaagttggtgaaca

SEQ ID NO: 173778 - DNA, 25 bp, Artificial
  Probe
ccaccttacaaactgagacaaaccc

SEQ ID NO: 173779 - DNA, 25 bp, Artificial
  Probe
tgccaccttacaaactgagacaaac

SEQ ID NO: 173780 - DNA, 25 bp, Artificial
  Probe
tatagatcatgctgtggtgtccagg

SEQ ID NO: 173781 - DNA, 25 bp, Artificial
  Probe
ctgtgttctgtacctgtcagattct

SEQ ID NO: 173782 - DNA, 25 bp, Artificial
  Probe
gctggtatagatcatgctgtggtgt

SEQ ID NO: 173783 - DNA, 25 bp, Artificial
  Probe
tgtgttctgtacctgtcagattctg

SEQ ID NO: 173784 - DNA, 25 bp, Artificial
  Probe
ggtatagatcatgctgtggtgtcca

SEQ ID NO: 173785 - DNA, 25 bp, Artificial
  Probe
tgtatgccaccttacaaactgagac

SEQ ID NO: 173786 - DNA, 25 bp, Artificial
  Probe
gtgtatgccaccttacaaactgaga

SEQ ID NO: 173787 - DNA, 25 bp, Artificial
  Probe
agtctctcctccaacctgcttagtc

SEQ ID NO: 173788 - DNA, 25 bp, Artificial
  Probe
tatacatgaagtaaagcaattccat

SEQ ID NO: 173789 - DNA, 25 bp, Artificial
  Probe
atatacatgaagtaaagcaattcca

SEQ ID NO: 173790 - DNA, 25 bp, Artificial
  Probe
gccaccttacaaactgagacaaacc

SEQ ID NO: 173791 - DNA, 25 bp, Artificial
  Probe
ggcctgattaatatacatgaagtaa

SEQ ID NO: 173792 - DNA, 25 bp, Artificial
  Probe
ttacaaactgagacaaacccctgag

SEQ ID NO: 173793 - DNA, 25 bp, Artificial
  Probe
cttacaaactgagacaaacccctga

SEQ ID NO: 173794 - DNA, 25 bp, Artificial
  Probe
aagctggtatagatcatgctgtggt

SEQ ID NO: 173795 - DNA, 25 bp, Artificial
  Probe
tgttctgtacctgtcagattctgag

SEQ ID NO: 173796 - DNA, 25 bp, Artificial
  Probe
gtgttctgtacctgtcagattctga

SEQ ID NO: 173797 - DNA, 25 bp, Artificial
  Probe
atacatgaagtaaagcaattccatg

SEQ ID NO: 173798 - DNA, 25 bp, Artificial
  Probe
gctgtgttctgtacctgtcagattc

SEQ ID NO: 173799 - DNA, 25 bp, Artificial
  Probe
tacctgtcagattctgagcaagttg

SEQ ID NO: 173800 - DNA, 25 bp, Artificial
  Probe
gtacctgtcagattctgagcaagtt

SEQ ID NO: 173801 - DNA, 25 bp, Artificial
  Probe
ccttacaaactgagacaaacccctg

SEQ ID NO: 173802 - DNA, 25 bp, Artificial
  Probe
aatatacatgaagtaaagcaattcc

SEQ ID NO: 173803 - DNA, 25 bp, Artificial
  Probe
ctaggacgtgtatgccaccttacaa

SEQ ID NO: 173804 - DNA, 25 bp, Artificial
  Probe
agctggtatagatcatgctgtggtg

SEQ ID NO: 173805 - DNA, 25 bp, Artificial
  Probe
tactccaacgacatcatgctattaa

SEQ ID NO: 173806 - DNA, 25 bp, Artificial
  Probe
atactccaacgacatcatgctatta

SEQ ID NO: 173807 - DNA, 25 bp, Artificial
  Probe
aatactccaacgacatcatgctatt

SEQ ID NO: 173808 - DNA, 25 bp, Artificial
  Probe
acaacatcaaagaacaggagaagat

SEQ ID NO: 173809 - DNA, 25 bp, Artificial
  Probe
tctaagaaatactccaacgacatca

SEQ ID NO: 173810 - DNA, 25 bp, Artificial
  Probe
ctaacagtacaggaggatcaggagt

SEQ ID NO: 173811 - DNA, 25 bp, Artificial
  Probe
ctaagaaatactccaacgacatcat

SEQ ID NO: 173812 - DNA, 25 bp, Artificial
  Probe
taacagtacaggaggatcaggagtg

SEQ ID NO: 173813 - DNA, 25 bp, Artificial
  Probe
aggatcaggagtgtgagacttactt

SEQ ID NO: 173814 - DNA, 25 bp, Artificial
  Probe
ccacccagcctataattctaagaaa

SEQ ID NO: 173815 - DNA, 25 bp, Artificial
  Probe
atcaggagtgtgagacttactttaa

SEQ ID NO: 173816 - DNA, 25 bp, Artificial
  Probe
cttacaacaaagccaatcagatatg

SEQ ID NO: 173817 - DNA, 25 bp, Artificial
  Probe
ctccaacgacatcatgctattaaag

SEQ ID NO: 173818 - DNA, 25 bp, Artificial
  Probe
aaatactccaacgacatcatgctat

SEQ ID NO: 173819 - DNA, 25 bp, Artificial
  Probe
tacaacaaagccaatcagatatgtg

SEQ ID NO: 173820 - DNA, 25 bp, Artificial
  Probe
actccaacgacatcatgctattaaa

SEQ ID NO: 173821 - DNA, 25 bp, Artificial
  Probe
gaggatcaggagtgtgagacttact

SEQ ID NO: 173822 - DNA, 25 bp, Artificial
  Probe
gaaatactccaacgacatcatgcta

SEQ ID NO: 173823 - DNA, 25 bp, Artificial
  Probe
taagaaatactccaacgacatcatg

SEQ ID NO: 173824 - DNA, 25 bp, Artificial
  Probe
ttctaagaaatactccaacgacatc

SEQ ID NO: 173825 - DNA, 25 bp, Artificial
  Probe
ttacaacaaagccaatcagatatgt

SEQ ID NO: 173826 - DNA, 25 bp, Artificial
  Probe
gatcaggagtgtgagacttacttta

SEQ ID NO: 173827 - DNA, 25 bp, Artificial
  Probe
cccacccagcctataattctaagaa

SEQ ID NO: 173828 - DNA, 25 bp, Artificial
  Probe
cacccagcctataattctaagaaat

SEQ ID NO: 173829 - DNA, 25 bp, Artificial
  Probe
aattctaagaaatactccaacgaca

SEQ ID NO: 173830 - DNA, 25 bp, Artificial
  Probe
aagaaatactccaacgacatcatgc

SEQ ID NO: 173831 - DNA, 25 bp, Artificial
  Probe
attctaagaaatactccaacgacat

SEQ ID NO: 173832 - DNA, 25 bp, Artificial
  Probe
ggatcaggagtgtgagacttacttt

SEQ ID NO: 173833 - DNA, 25 bp, Artificial
  Probe
gctaacagtacaggaggatcaggag

SEQ ID NO: 173834 - DNA, 25 bp, Artificial
  Probe
tcaggagtgtgagacttactttaaa

SEQ ID NO: 173835 - DNA, 25 bp, Artificial
  Probe
agaaatactccaacgacatcatgct

SEQ ID NO: 173836 - DNA, 25 bp, Artificial
  Probe
acaacaaagccaatcagatatgtgc

SEQ ID NO: 173837 - DNA, 25 bp, Artificial
  Probe
ggaggatcaggagtgtgagacttac

SEQ ID NO: 173838 - DNA, 25 bp, Artificial
  Probe
aggaggatcaggagtgtgagactta

SEQ ID NO: 173839 - DNA, 25 bp, Artificial
  Probe
gcaagaggttgagctaacagtacag

SEQ ID NO: 173840 - DNA, 25 bp, Artificial
  Probe
agtctcaactttcctatcctggata

SEQ ID NO: 173841 - DNA, 25 bp, Artificial
  Probe
gtctcaactttcctatcctggataa

SEQ ID NO: 173842 - DNA, 25 bp, Artificial
  Probe
gagctaacagtacaggaggatcagg

SEQ ID NO: 173843 - DNA, 25 bp, Artificial
  Probe
acccagcctataattctaagaaata

SEQ ID NO: 173844 - DNA, 25 bp, Artificial
  Probe
tctcaactttcctatcctggataaa

SEQ ID NO: 173845 - DNA, 25 bp, Artificial
  Probe
tattaaagctgaagagtaaggccaa

SEQ ID NO: 173846 - DNA, 25 bp, Artificial
  Probe
ctattaaagctgaagagtaaggcca

SEQ ID NO: 173847 - DNA, 25 bp, Artificial
  Probe
cccagcctataattctaagaaatac

SEQ ID NO: 173848 - DNA, 25 bp, Artificial
  Probe
tcaactttcctatcctggataaagg

SEQ ID NO: 173849 - DNA, 25 bp, Artificial
  Probe
agctaacagtacaggaggatcagga

SEQ ID NO: 173850 - DNA, 25 bp, Artificial
  Probe
cttctctgtcttgttacaacctcag

SEQ ID NO: 173851 - DNA, 25 bp, Artificial
  Probe
cacttctctgtcttgttacaacctc

SEQ ID NO: 173852 - DNA, 25 bp, Artificial
  Probe
acttctctgtcttgttacaacctca

SEQ ID NO: 173853 - DNA, 25 bp, Artificial
  Probe
cattgtcagtgcctcatttcattag

SEQ ID NO: 173854 - DNA, 25 bp, Artificial
  Probe
ttctctgtcttgttacaacctcagt

SEQ ID NO: 173855 - DNA, 25 bp, Artificial
  Probe
accagaatattgaacttgtatcctt

SEQ ID NO: 173856 - DNA, 25 bp, Artificial
  Probe
tctgtcttgttacaacctcagtctc

SEQ ID NO: 173857 - DNA, 25 bp, Artificial
  Probe
ctctgtcttgttacaacctcagtct

SEQ ID NO: 173858 - DNA, 25 bp, Artificial
  Probe
tctctgtcttgttacaacctcagtc

SEQ ID NO: 173859 - DNA, 25 bp, Artificial
  Probe
atttcattagcccttgtccaaagag

SEQ ID NO: 173860 - DNA, 25 bp, Artificial
  Probe
ccattgtcagtgcctcatttcatta

SEQ ID NO: 173861 - DNA, 25 bp, Artificial
  Probe
ctcatttcattagcccttgtccaaa

SEQ ID NO: 173862 - DNA, 25 bp, Artificial
  Probe
catttcattagcccttgtccaaaga

SEQ ID NO: 173863 - DNA, 25 bp, Artificial
  Probe
tcatttcattagcccttgtccaaag

SEQ ID NO: 173864 - DNA, 25 bp, Artificial
  Probe
attgtcagtgcctcatttcattagc

SEQ ID NO: 173865 - DNA, 25 bp, Artificial
  Probe
ccacttctctgtcttgttacaacct

SEQ ID NO: 173866 - DNA, 25 bp, Artificial
  Probe
cattggctgaaccctgttaatagac

SEQ ID NO: 173867 - DNA, 25 bp, Artificial
  Probe
attggctgaaccctgttaatagact

SEQ ID NO: 173868 - DNA, 25 bp, Artificial
  Probe
gtaccagaatattgaacttgtatcc

SEQ ID NO: 173869 - DNA, 25 bp, Artificial
  Probe
ttggctgaaccctgttaatagactt

SEQ ID NO: 173870 - DNA, 25 bp, Artificial
  Probe
taccagaatattgaacttgtatcct

SEQ ID NO: 173871 - DNA, 25 bp, Artificial
  Probe
ctgtcttgttacaacctcagtctcc

SEQ ID NO: 173872 - DNA, 25 bp, Artificial
  Probe
gttacaacctcagtctcccagaatc

SEQ ID NO: 173873 - DNA, 25 bp, Artificial
  Probe
tggctgaaccctgttaatagacttg

SEQ ID NO: 173874 - DNA, 25 bp, Artificial
  Probe
gataggccacttctctgtcttgtta

SEQ ID NO: 173875 - DNA, 25 bp, Artificial
  Probe
ataggccacttctctgtcttgttac

SEQ ID NO: 173876 - DNA, 25 bp, Artificial
  Probe
ttacaacctcagtctcccagaatca

SEQ ID NO: 173877 - DNA, 25 bp, Artificial
  Probe
cctcatttcattagcccttgtccaa

SEQ ID NO: 173878 - DNA, 25 bp, Artificial
  Probe
accattgtcagtgcctcatttcatt

SEQ ID NO: 173879 - DNA, 25 bp, Artificial
  Probe
aaccattgtcagtgcctcatttcat

SEQ ID NO: 173880 - DNA, 25 bp, Artificial
  Probe
ggctgaaccctgttaatagacttgg

SEQ ID NO: 173881 - DNA, 25 bp, Artificial
  Probe
gcattggctgaaccctgttaataga

SEQ ID NO: 173882 - DNA, 25 bp, Artificial
  Probe
tgttacaacctcagtctcccagaat

SEQ ID NO: 173883 - DNA, 25 bp, Artificial
  Probe
tacaacctcagtctcccagaatcag

SEQ ID NO: 173884 - DNA, 25 bp, Artificial
  Probe
gttcatagggtcaagatgctggtac

SEQ ID NO: 173885 - DNA, 25 bp, Artificial
  Probe
gccacttctctgtcttgttacaacc

SEQ ID NO: 173886 - DNA, 25 bp, Artificial
  Probe
ttgtcagtgcctcatttcattagcc

SEQ ID NO: 173887 - DNA, 25 bp, Artificial
  Probe
agaaaataaagagagaaaacaccga

SEQ ID NO: 173888 - DNA, 25 bp, Artificial
  Probe
tttcattagcccttgtccaaagagc

SEQ ID NO: 173889 - DNA, 25 bp, Artificial
  Probe
cagtctttgctctctgttgacctag

SEQ ID NO: 173890 - DNA, 25 bp, Artificial
  Probe
ccagaatattgaacttgtatccttt

SEQ ID NO: 173891 - DNA, 25 bp, Artificial
  Probe
gaaaataaagagagaaaacaccgaa

SEQ ID NO: 173892 - DNA, 25 bp, Artificial
  Probe
ttgttacaacctcagtctcccagaa

SEQ ID NO: 173893 - DNA, 25 bp, Artificial
  Probe
ggttcatagggtcaagatgctggta

SEQ ID NO: 173894 - DNA, 25 bp, Artificial
  Probe
atagggagggagcatcaggtaagaa

SEQ ID NO: 173895 - DNA, 25 bp, Artificial
  Probe
cgattctttgctcaccttgtatcaa

SEQ ID NO: 173896 - DNA, 25 bp, Artificial
  Probe
tcgattctttgctcaccttgtatca

SEQ ID NO: 173897 - DNA, 25 bp, Artificial
  Probe
gattctttgctcaccttgtatcaag

SEQ ID NO: 173898 - DNA, 25 bp, Artificial
  Probe
atcgattctttgctcaccttgtatc

SEQ ID NO: 173899 - DNA, 25 bp, Artificial
  Probe
gctctgagaacagtttccagtcctc

SEQ ID NO: 173900 - DNA, 25 bp, Artificial
  Probe
atgcatctggtacagtgaaatcgat

SEQ ID NO: 173901 - DNA, 25 bp, Artificial
  Probe
tgtatcaaggaaagcttggaggttt

SEQ ID NO: 173902 - DNA, 25 bp, Artificial
  Probe
ttgtatcaaggaaagcttggaggtt

SEQ ID NO: 173903 - DNA, 25 bp, Artificial
  Probe
aaggaaagcttggaggttttctttt

SEQ ID NO: 173904 - DNA, 25 bp, Artificial
  Probe
cttgtatcaaggaaagcttggaggt

SEQ ID NO: 173905 - DNA, 25 bp, Artificial
  Probe
aggaaagcttggaggttttcttttg

SEQ ID NO: 173906 - DNA, 25 bp, Artificial
  Probe
ttctccaaacagctccaactgtgat

SEQ ID NO: 173907 - DNA, 25 bp, Artificial
  Probe
tatcaaggaaagcttggaggttttc

SEQ ID NO: 173908 - DNA, 25 bp, Artificial
  Probe
gtatcaaggaaagcttggaggtttt

SEQ ID NO: 173909 - DNA, 25 bp, Artificial
  Probe
gaaagcttggaggttttcttttggg

SEQ ID NO: 173910 - DNA, 25 bp, Artificial
  Probe
ggaaagcttggaggttttcttttgg

SEQ ID NO: 173911 - DNA, 25 bp, Artificial
  Probe
cttctccaaacagctccaactgtga

SEQ ID NO: 173912 - DNA, 25 bp, Artificial
  Probe
tcttctccaaacagctccaactgtg

SEQ ID NO: 173913 - DNA, 25 bp, Artificial
  Probe
gtcttctccaaacagctccaactgt

SEQ ID NO: 173914 - DNA, 25 bp, Artificial
  Probe
caaggaaagcttggaggttttcttt

SEQ ID NO: 173915 - DNA, 25 bp, Artificial
  Probe
tctccaaacagctccaactgtgatg

SEQ ID NO: 173916 - DNA, 25 bp, Artificial
  Probe
atcaaggaaagcttggaggttttct

SEQ ID NO: 173917 - DNA, 25 bp, Artificial
  Probe
tcaaggaaagcttggaggttttctt

SEQ ID NO: 173918 - DNA, 25 bp, Artificial
  Probe
ttcagtcccaaacagatcacagtat

SEQ ID NO: 173919 - DNA, 25 bp, Artificial
  Probe
gttactattgtgcaagatcggacag

SEQ ID NO: 173920 - DNA, 25 bp, Artificial
  Probe
ttactattgtgcaagatcggacagt

SEQ ID NO: 173921 - DNA, 25 bp, Artificial
  Probe
agttactattgtgcaagatcggaca

SEQ ID NO: 173922 - DNA, 25 bp, Artificial
  Probe
tcagtcccaaacagatcacagtatc

SEQ ID NO: 173923 - DNA, 25 bp, Artificial
  Probe
tactattgtgcaagatcggacagta

SEQ ID NO: 173924 - DNA, 25 bp, Artificial
  Probe
aacagatcacagtatcctggctaca

SEQ ID NO: 173925 - DNA, 25 bp, Artificial
  Probe
cttcagtcccaaacagatcacagta

SEQ ID NO: 173926 - DNA, 25 bp, Artificial
  Probe
actattgtgcaagatcggacagtag

SEQ ID NO: 173927 - DNA, 25 bp, Artificial
  Probe
acagatcacagtatcctggctacag

SEQ ID NO: 173928 - DNA, 25 bp, Artificial
  Probe
aaacagatcacagtatcctggctac

SEQ ID NO: 173929 - DNA, 25 bp, Artificial
  Probe
caaacagatcacagtatcctggcta

SEQ ID NO: 173930 - DNA, 25 bp, Artificial
  Probe
cagtcccaaacagatcacagtatcc

SEQ ID NO: 173931 - DNA, 25 bp, Artificial
  Probe
aacttcagtcccaaacagatcacag

SEQ ID NO: 173932 - DNA, 25 bp, Artificial
  Probe
agtcccaaacagatcacagtatcct

SEQ ID NO: 173933 - DNA, 25 bp, Artificial
  Probe
caacttcagtcccaaacagatcaca

SEQ ID NO: 173934 - DNA, 25 bp, Artificial
  Probe
gtcccaaacagatcacagtatcctg

SEQ ID NO: 173935 - DNA, 25 bp, Artificial
  Probe
ctattgtgcaagatcggacagtagc

SEQ ID NO: 173936 - DNA, 25 bp, Artificial
  Probe
ccaacttcagtcccaaacagatcac

SEQ ID NO: 173937 - DNA, 25 bp, Artificial
  Probe
caccaacttcagtcccaaacagatc

SEQ ID NO: 173938 - DNA, 25 bp, Artificial
  Probe
tattgtgcaagatcggacagtagct

SEQ ID NO: 173939 - DNA, 25 bp, Artificial
  Probe
accaacttcagtcccaaacagatca

SEQ ID NO: 173940 - DNA, 25 bp, Artificial
  Probe
acttcagtcccaaacagatcacagt

SEQ ID NO: 173941 - DNA, 25 bp, Artificial
  Probe
tcccaaacagatcacagtatcctgg

SEQ ID NO: 173942 - DNA, 25 bp, Artificial
  Probe
ccaccaacttcagtcccaaacagat

SEQ ID NO: 173943 - DNA, 25 bp, Artificial
  Probe
ctgtctcttcagagagtcagtcctc

SEQ ID NO: 173944 - DNA, 25 bp, Artificial
  Probe
gtagctcctcttggtttgcttactg

SEQ ID NO: 173945 - DNA, 25 bp, Artificial
  Probe
cagtagctcctcttggtttgcttac

SEQ ID NO: 173946 - DNA, 25 bp, Artificial
  Probe
agtagctcctcttggtttgcttact

SEQ ID NO: 173947 - DNA, 25 bp, Artificial
  Probe
ccaaacagatcacagtatcctggct

SEQ ID NO: 173948 - DNA, 25 bp, Artificial
  Probe
attgtgcaagatcggacagtagctc

SEQ ID NO: 173949 - DNA, 25 bp, Artificial
  Probe
tcactgtctcttcagagagtcagtc

SEQ ID NO: 173950 - DNA, 25 bp, Artificial
  Probe
acagtagctcctcttggtttgctta

SEQ ID NO: 173951 - DNA, 25 bp, Artificial
  Probe
ggtcactgtctcttcagagagtcag

SEQ ID NO: 173952 - DNA, 25 bp, Artificial
  Probe
ctggtcactgtctcttcagagagtc

SEQ ID NO: 173953 - DNA, 25 bp, Artificial
  Probe
gtcactgtctcttcagagagtcagt

SEQ ID NO: 173954 - DNA, 25 bp, Artificial
  Probe
cactgtctcttcagagagtcagtcc

SEQ ID NO: 173955 - DNA, 25 bp, Artificial
  Probe
tagctcctcttggtttgcttactgg

SEQ ID NO: 173956 - DNA, 25 bp, Artificial
  Probe
tctggtcactgtctcttcagagagt

SEQ ID NO: 173957 - DNA, 25 bp, Artificial
  Probe
actgtctcttcagagagtcagtcct

SEQ ID NO: 173958 - DNA, 25 bp, Artificial
  Probe
tggtcactgtctcttcagagagtca

SEQ ID NO: 173959 - DNA, 25 bp, Artificial
  Probe
tgtctcttcagagagtcagtcctcc

SEQ ID NO: 173960 - DNA, 25 bp, Artificial
  Probe
gacagtagctcctcttggtttgctt

SEQ ID NO: 173961 - DNA, 25 bp, Artificial
  Probe
cagatcacagtatcctggctacagg

SEQ ID NO: 173962 - DNA, 25 bp, Artificial
  Probe
gtctcttcagagagtcagtcctccc

SEQ ID NO: 173963 - DNA, 25 bp, Artificial
  Probe
ggcattgtctccttatcagttactt

SEQ ID NO: 173964 - DNA, 25 bp, Artificial
  Probe
gcaacacttaacgctacttagatat

SEQ ID NO: 173965 - DNA, 25 bp, Artificial
  Probe
tcctctctgagttctacagcatatt

SEQ ID NO: 173966 - DNA, 25 bp, Artificial
  Probe
gtcctctctgagttctacagcatat

SEQ ID NO: 173967 - DNA, 25 bp, Artificial
  Probe
ttactcactactccgtgcttacata

SEQ ID NO: 173968 - DNA, 25 bp, Artificial
  Probe
aggcattgtctccttatcagttact

SEQ ID NO: 173969 - DNA, 25 bp, Artificial
  Probe
tactcactactccgtgcttacatac

SEQ ID NO: 173970 - DNA, 25 bp, Artificial
  Probe
tgcaacacttaacgctacttagata

SEQ ID NO: 173971 - DNA, 25 bp, Artificial
  Probe
agccttattctttagcacaaacaac

SEQ ID NO: 173972 - DNA, 25 bp, Artificial
  Probe
cagccttattctttagcacaaacaa

SEQ ID NO: 173973 - DNA, 25 bp, Artificial
  Probe
cttattctttagcacaaacaacagc

SEQ ID NO: 173974 - DNA, 25 bp, Artificial
  Probe
gccttattctttagcacaaacaaca

SEQ ID NO: 173975 - DNA, 25 bp, Artificial
  Probe
gaacaagtttatgacatcccaatcc

SEQ ID NO: 173976 - DNA, 25 bp, Artificial
  Probe
aacaagtttatgacatcccaatcct

SEQ ID NO: 173977 - DNA, 25 bp, Artificial
  Probe
gcttctctgtgttgtcatctttaat

SEQ ID NO: 173978 - DNA, 25 bp, Artificial
  Probe
taaggactacacaggcttgttcttc

SEQ ID NO: 173979 - DNA, 25 bp, Artificial
  Probe
ctaaggactacacaggcttgttctt

SEQ ID NO: 173980 - DNA, 25 bp, Artificial
  Probe
gacagccttattctttagcacaaac

SEQ ID NO: 173981 - DNA, 25 bp, Artificial
  Probe
ctcactactccgtgcttacatacat

SEQ ID NO: 173982 - DNA, 25 bp, Artificial
  Probe
acaagtttatgacatcccaatcctc

SEQ ID NO: 173983 - DNA, 25 bp, Artificial
  Probe
ctgcaacacttaacgctacttagat

SEQ ID NO: 173984 - DNA, 25 bp, Artificial
  Probe
ccgtatgaggaaagataaagttgaa

SEQ ID NO: 173985 - DNA, 25 bp, Artificial
  Probe
ccttattctttagcacaaacaacag

SEQ ID NO: 173986 - DNA, 25 bp, Artificial
  Probe
acagccttattctttagcacaaaca

SEQ ID NO: 173987 - DNA, 25 bp, Artificial
  Probe
gcattgtctccttatcagttacttt

SEQ ID NO: 173988 - DNA, 25 bp, Artificial
  Probe
caacacttaacgctacttagatatt

SEQ ID NO: 173989 - DNA, 25 bp, Artificial
  Probe
gctttgaggaacaagtttatgacat

SEQ ID NO: 173990 - DNA, 25 bp, Artificial
  Probe
gtgttgtcatctttaatagaggtcc

SEQ ID NO: 173991 - DNA, 25 bp, Artificial
  Probe
tgagttctacagcatatttccacct

SEQ ID NO: 173992 - DNA, 25 bp, Artificial
  Probe
ggacagccttattctttagcacaaa

SEQ ID NO: 173993 - DNA, 25 bp, Artificial
  Probe
tgttgtcatctttaatagaggtcct

SEQ ID NO: 173994 - DNA, 25 bp, Artificial
  Probe
agataaagttgaagatccacagtcc

SEQ ID NO: 173995 - DNA, 25 bp, Artificial
  Probe
caagtttatgacatcccaatcctca

SEQ ID NO: 173996 - DNA, 25 bp, Artificial
  Probe
gtgtttcaagaaagacctacttcat

SEQ ID NO: 173997 - DNA, 25 bp, Artificial
  Probe
tgtgttgtcatctttaatagaggtc

SEQ ID NO: 173998 - DNA, 25 bp, Artificial
  Probe
ctgtgttgtcatctttaatagaggt

SEQ ID NO: 173999 - DNA, 25 bp, Artificial
  Probe
atttatcatgtggaggaaagacgaa

SEQ ID NO: 174000 - DNA, 25 bp, Artificial
  Probe
tttatcatgtggaggaaagacgaaa

SEQ ID NO: 174001 - DNA, 25 bp, Artificial
  Probe
tatttatcatgtggaggaaagacga

SEQ ID NO: 174002 - DNA, 25 bp, Artificial
  Probe
cgtgtttcaagaaagacctacttca

SEQ ID NO: 174003 - DNA, 25 bp, Artificial
  Probe
gataaagttgaagatccacagtccc

SEQ ID NO: 174004 - DNA, 25 bp, Artificial
  Probe
ttatcatgtggaggaaagacgaaag

SEQ ID NO: 174005 - DNA, 25 bp, Artificial
  Probe
tctgtgttgtcatctttaatagagg

SEQ ID NO: 174006 - DNA, 25 bp, Artificial
  Probe
aagataaagttgaagatccacagtc

SEQ ID NO: 174007 - DNA, 25 bp, Artificial
  Probe
ctctgagttctacagcatatttcca

SEQ ID NO: 174008 - DNA, 25 bp, Artificial
  Probe
agctgagattcaagattcatccatc

SEQ ID NO: 174009 - DNA, 25 bp, Artificial
  Probe
gtagcagagaaaggacaaacaataa

SEQ ID NO: 174010 - DNA, 25 bp, Artificial
  Probe
ggtagcagagaaaggacaaacaata

SEQ ID NO: 174011 - DNA, 25 bp, Artificial
  Probe
agattcaagattcatccatctccac

SEQ ID NO: 174012 - DNA, 25 bp, Artificial
  Probe
agcagagaaaggacaaacaataatt

SEQ ID NO: 174013 - DNA, 25 bp, Artificial
  Probe
gctgagattcaagattcatccatct

SEQ ID NO: 174014 - DNA, 25 bp, Artificial
  Probe
gaaaggacaaacaataattctcacg

SEQ ID NO: 174015 - DNA, 25 bp, Artificial
  Probe
gcagagaaaggacaaacaataattc

SEQ ID NO: 174016 - DNA, 25 bp, Artificial
  Probe
ggtacagacagactaagataaaggg

SEQ ID NO: 174017 - DNA, 25 bp, Artificial
  Probe
tagcagagaaaggacaaacaataat

SEQ ID NO: 174018 - DNA, 25 bp, Artificial
  Probe
tggtacagacagactaagataaagg

SEQ ID NO: 174019 - DNA, 25 bp, Artificial
  Probe
gattcaagattcatccatctccacg

SEQ ID NO: 174020 - DNA, 25 bp, Artificial
  Probe
aggtagcagagaaaggacaaacaat

SEQ ID NO: 174021 - DNA, 25 bp, Artificial
  Probe
gactccgatctatgagcagtatttc

SEQ ID NO: 174022 - DNA, 25 bp, Artificial
  Probe
atgaggtagcagagaaaggacaaac

SEQ ID NO: 174023 - DNA, 25 bp, Artificial
  Probe
gaggtagcagagaaaggacaaacaa

SEQ ID NO: 174024 - DNA, 25 bp, Artificial
  Probe
acgctgaagattcaacctacagaac

SEQ ID NO: 174025 - DNA, 25 bp, Artificial
  Probe
cacgctgaagattcaacctacagaa

SEQ ID NO: 174026 - DNA, 25 bp, Artificial
  Probe
ggactccgatctatgagcagtattt

SEQ ID NO: 174027 - DNA, 25 bp, Artificial
  Probe
aaaggacaaacaataattctcacgt

SEQ ID NO: 174028 - DNA, 25 bp, Artificial
  Probe
ctggtacagacagactaagataaag

SEQ ID NO: 174029 - DNA, 25 bp, Artificial
  Probe
gatctatgagcagtatttcggtccc

SEQ ID NO: 174030 - DNA, 25 bp, Artificial
  Probe
catgaggtagcagagaaaggacaaa

SEQ ID NO: 174031 - DNA, 25 bp, Artificial
  Probe
cgctgaagattcaacctacagaacc

SEQ ID NO: 174032 - DNA, 25 bp, Artificial
  Probe
attcaagattcatccatctccacgc

SEQ ID NO: 174033 - DNA, 25 bp, Artificial
  Probe
cagacagactaagataaaggggcta

SEQ ID NO: 174034 - DNA, 25 bp, Artificial
  Probe
tgaggtagcagagaaaggacaaaca

SEQ ID NO: 174035 - DNA, 25 bp, Artificial
  Probe
tacagacagactaagataaaggggc

SEQ ID NO: 174036 - DNA, 25 bp, Artificial
  Probe
ctacttccgcaacaagtctcctatg

SEQ ID NO: 174037 - DNA, 25 bp, Artificial
  Probe
acagactaagataaaggggctagag

SEQ ID NO: 174038 - DNA, 25 bp, Artificial
  Probe
gacagactaagataaaggggctaga

SEQ ID NO: 174039 - DNA, 25 bp, Artificial
  Probe
agacagactaagataaaggggctag

SEQ ID NO: 174040 - DNA, 25 bp, Artificial
  Probe
ttctggtacagacagactaagataa

SEQ ID NO: 174041 - DNA, 25 bp, Artificial
  Probe
gtacagacagactaagataaagggg

SEQ ID NO: 174042 - DNA, 25 bp, Artificial
  Probe
atctccacgctgaagattcaaccta

SEQ ID NO: 174043 - DNA, 25 bp, Artificial
  Probe
gactaagataaaggggctagagttg

SEQ ID NO: 174044 - DNA, 25 bp, Artificial
  Probe
agactaagataaaggggctagagtt

SEQ ID NO: 174045 - DNA, 25 bp, Artificial
  Probe
agaaaggacaaacaataattctcac

SEQ ID NO: 174046 - DNA, 25 bp, Artificial
  Probe
actccgatctatgagcagtatttcg

SEQ ID NO: 174047 - DNA, 25 bp, Artificial
  Probe
tctccacgctgaagattcaacctac

SEQ ID NO: 174048 - DNA, 25 bp, Artificial
  Probe
cagactaagataaaggggctagagt

SEQ ID NO: 174049 - DNA, 25 bp, Artificial
  Probe
acatgaggtagcagagaaaggacaa

SEQ ID NO: 174050 - DNA, 25 bp, Artificial
  Probe
gggactccgatctatgagcagtatt

SEQ ID NO: 174051 - DNA, 25 bp, Artificial
  Probe
ctaagataaaggggctagagttgct

SEQ ID NO: 174052 - DNA, 25 bp, Artificial
  Probe
agacatgaggtagcagagaaaggac

SEQ ID NO: 174053 - DNA, 25 bp, Artificial
  Probe
ggagttacatagataaggttcagcc

SEQ ID NO: 174054 - DNA, 25 bp, Artificial
  Probe
cggagttacatagataaggttcagc

SEQ ID NO: 174055 - DNA, 25 bp, Artificial
  Probe
ctatgttagtgtctatctgctgcca

SEQ ID NO: 174056 - DNA, 25 bp, Artificial
  Probe
agttacatagataaggttcagcctg

SEQ ID NO: 174057 - DNA, 25 bp, Artificial
  Probe
gagttacatagataaggttcagcct

SEQ ID NO: 174058 - DNA, 25 bp, Artificial
  Probe
cctatgttagtgtctatctgctgcc

SEQ ID NO: 174059 - DNA, 25 bp, Artificial
  Probe
gttacatagataaggttcagcctga

SEQ ID NO: 174060 - DNA, 25 bp, Artificial
  Probe
tatgttagtgtctatctgctgccag

SEQ ID NO: 174061 - DNA, 25 bp, Artificial
  Probe
aatggatgtaggaggactctcagac

SEQ ID NO: 174062 - DNA, 25 bp, Artificial
  Probe
caccattaagaagaacaccctgaac

SEQ ID NO: 174063 - DNA, 25 bp, Artificial
  Probe
attgcattcattcctacctccacat

SEQ ID NO: 174064 - DNA, 25 bp, Artificial
  Probe
ccggagttacatagataaggttcag

SEQ ID NO: 174065 - DNA, 25 bp, Artificial
  Probe
aaaccaccattaagaagaacaccct

SEQ ID NO: 174066 - DNA, 25 bp, Artificial
  Probe
ttgcattcattcctacctccacatt

SEQ ID NO: 174067 - DNA, 25 bp, Artificial
  Probe
aacattgcattcattcctacctcca

SEQ ID NO: 174068 - DNA, 25 bp, Artificial
  Probe
ccctatgttagtgtctatctgctgc

SEQ ID NO: 174069 - DNA, 25 bp, Artificial
  Probe
accattaagaagaacaccctgaacc

SEQ ID NO: 174070 - DNA, 25 bp, Artificial
  Probe
ccaccattaagaagaacaccctgaa

SEQ ID NO: 174071 - DNA, 25 bp, Artificial
  Probe
cagtaccactcctatacccagaaac

SEQ ID NO: 174072 - DNA, 25 bp, Artificial
  Probe
aaatggatgtaggaggactctcaga

SEQ ID NO: 174073 - DNA, 25 bp, Artificial
  Probe
cgacttccagtaccactcctatacc

SEQ ID NO: 174074 - DNA, 25 bp, Artificial
  Probe
ccgacttccagtaccactcctatac

SEQ ID NO: 174075 - DNA, 25 bp, Artificial
  Probe
gatatctgcttctctctccggtatg

SEQ ID NO: 174076 - DNA, 25 bp, Artificial
  Probe
gccggagttacatagataaggttca

SEQ ID NO: 174077 - DNA, 25 bp, Artificial
  Probe
atacgtggaactaggaggtagagtg

SEQ ID NO: 174078 - DNA, 25 bp, Artificial
  Probe
catacgtggaactaggaggtagagt

SEQ ID NO: 174079 - DNA, 25 bp, Artificial
  Probe
tccgacttccagtaccactcctata

SEQ ID NO: 174080 - DNA, 25 bp, Artificial
  Probe
tgcattcattcctacctccacattg

SEQ ID NO: 174081 - DNA, 25 bp, Artificial
  Probe
cattgcattcattcctacctccaca

SEQ ID NO: 174082 - DNA, 25 bp, Artificial
  Probe
acattgcattcattcctacctccac

SEQ ID NO: 174083 - DNA, 25 bp, Artificial
  Probe
aaccaccattaagaagaacaccctg

SEQ ID NO: 174084 - DNA, 25 bp, Artificial
  Probe
taccactcctatacccagaaaccac

SEQ ID NO: 174085 - DNA, 25 bp, Artificial
  Probe
caaacattgcattcattcctacctc

SEQ ID NO: 174086 - DNA, 25 bp, Artificial
  Probe
aaacattgcattcattcctacctcc

SEQ ID NO: 174087 - DNA, 25 bp, Artificial
  Probe
caggtattggacaagcaccagttag

SEQ ID NO: 174088 - DNA, 25 bp, Artificial
  Probe
atatctgcttctctctccggtatgt

SEQ ID NO: 174089 - DNA, 25 bp, Artificial
  Probe
ccattaagaagaacaccctgaaccc

SEQ ID NO: 174090 - DNA, 25 bp, Artificial
  Probe
caaataaatactcaacagcttggaa

SEQ ID NO: 174091 - DNA, 25 bp, Artificial
  Probe
ttacatagataaggttcagcctgaa

SEQ ID NO: 174092 - DNA, 25 bp, Artificial
  Probe
ggccggagttacatagataaggttc

SEQ ID NO: 174093 - DNA, 25 bp, Artificial
  Probe
agaaaaccaccattaagaagaacac

SEQ ID NO: 174094 - DNA, 25 bp, Artificial
  Probe
gaaaaccaccattaagaagaacacc

SEQ ID NO: 174095 - DNA, 25 bp, Artificial
  Probe
gtaccactcctatacccagaaacca

SEQ ID NO: 174096 - DNA, 25 bp, Artificial
  Probe
agtaccactcctatacccagaaacc

SEQ ID NO: 174097 - DNA, 25 bp, Artificial
  Probe
ccagtaccactcctatacccagaaa

SEQ ID NO: 174098 - DNA, 25 bp, Artificial
  Probe
gattgatgaatgcttagtaactgcc

SEQ ID NO: 174099 - DNA, 25 bp, Artificial
  Probe
tgattgatgaatgcttagtaactgc

SEQ ID NO: 174100 - DNA, 25 bp, Artificial
  Probe
attgatgaatgcttagtaactgcct

SEQ ID NO: 174101 - DNA, 25 bp, Artificial
  Probe
ttgatgaatgcttagtaactgcctt

SEQ ID NO: 174102 - DNA, 25 bp, Artificial
  Probe
aatgagagtaacttcttccaaccag

SEQ ID NO: 174103 - DNA, 25 bp, Artificial
  Probe
taatgagagtaacttcttccaacca

SEQ ID NO: 174104 - DNA, 25 bp, Artificial
  Probe
aatgactacctccacttactcactc

SEQ ID NO: 174105 - DNA, 25 bp, Artificial
  Probe
ttaatgagagtaacttcttccaacc

SEQ ID NO: 174106 - DNA, 25 bp, Artificial
  Probe
cagaatacacttcacacagcaacat

SEQ ID NO: 174107 - DNA, 25 bp, Artificial
  Probe
caatgactacctccacttactcact

SEQ ID NO: 174108 - DNA, 25 bp, Artificial
  Probe
ttgattgatgaatgcttagtaactg

SEQ ID NO: 174109 - DNA, 25 bp, Artificial
  Probe
atgactacctccacttactcactct

SEQ ID NO: 174110 - DNA, 25 bp, Artificial
  Probe
agtaacttcttccaaccagcttaat

SEQ ID NO: 174111 - DNA, 25 bp, Artificial
  Probe
gtaacttcttccaaccagcttaatt

SEQ ID NO: 174112 - DNA, 25 bp, Artificial
  Probe
gacagaatacacttcacacagcaac

SEQ ID NO: 174113 - DNA, 25 bp, Artificial
  Probe
gagtaacttcttccaaccagcttaa

SEQ ID NO: 174114 - DNA, 25 bp, Artificial
  Probe
ctatgagatagagaacggagtgctc

SEQ ID NO: 174115 - DNA, 25 bp, Artificial
  Probe
agaatacacttcacacagcaacatg

SEQ ID NO: 174116 - DNA, 25 bp, Artificial
  Probe
atgagagtaacttcttccaaccagc

SEQ ID NO: 174117 - DNA, 25 bp, Artificial
  Probe
cattcaaatcgtgtgctactgtaat

SEQ ID NO: 174118 - DNA, 25 bp, Artificial
  Probe
ttcaaatcgtgtgctactgtaatac

SEQ ID NO: 174119 - DNA, 25 bp, Artificial
  Probe
gactacctccacttactcactctga

SEQ ID NO: 174120 - DNA, 25 bp, Artificial
  Probe
atgagtgtccttacctgctaaatat

SEQ ID NO: 174121 - DNA, 25 bp, Artificial
  Probe
tgaatgcttagtaactgcctttaac

SEQ ID NO: 174122 - DNA, 25 bp, Artificial
  Probe
tcattcaaatcgtgtgctactgtaa

SEQ ID NO: 174123 - DNA, 25 bp, Artificial
  Probe
ttcattcaaatcgtgtgctactgta

SEQ ID NO: 174124 - DNA, 25 bp, Artificial
  Probe
agagtaacttcttccaaccagctta

SEQ ID NO: 174125 - DNA, 25 bp, Artificial
  Probe
acagaatacacttcacacagcaaca

SEQ ID NO: 174126 - DNA, 25 bp, Artificial
  Probe
tcaaatcgtgtgctactgtaatacc

SEQ ID NO: 174127 - DNA, 25 bp, Artificial
  Probe
aattcattcaaatcgtgtgctactg

SEQ ID NO: 174128 - DNA, 25 bp, Artificial
  Probe
tgatgaatgcttagtaactgccttt

SEQ ID NO: 174129 - DNA, 25 bp, Artificial
  Probe
gtaatacccaacccgctaactttaa

SEQ ID NO: 174130 - DNA, 25 bp, Artificial
  Probe
gatgaatgcttagtaactgccttta

SEQ ID NO: 174131 - DNA, 25 bp, Artificial
  Probe
attcattcaaatcgtgtgctactgt

SEQ ID NO: 174132 - DNA, 25 bp, Artificial
  Probe
tgactacctccacttactcactctg

SEQ ID NO: 174133 - DNA, 25 bp, Artificial
  Probe
attcaaatcgtgtgctactgtaata

SEQ ID NO: 174134 - DNA, 25 bp, Artificial
  Probe
tttagaaattccctggtgctattcc

SEQ ID NO: 174135 - DNA, 25 bp, Artificial
  Probe
ctaggcaatgactacctccacttac

SEQ ID NO: 174136 - DNA, 25 bp, Artificial
  Probe
atgaatgcttagtaactgcctttaa

SEQ ID NO: 174137 - DNA, 25 bp, Artificial
  Probe
gcaatgactacctccacttactcac

SEQ ID NO: 174138 - DNA, 25 bp, Artificial
  Probe
aatctcaatggcatttactaccctg

SEQ ID NO: 174139 - DNA, 25 bp, Artificial
  Probe
caatctcaatggcatttactaccct

SEQ ID NO: 174140 - DNA, 25 bp, Artificial
  Probe
tcaattctgagtctgtttaaccgaa

SEQ ID NO: 174141 - DNA, 25 bp, Artificial
  Probe
attccattgttctttgtactgtagc

SEQ ID NO: 174142 - DNA, 25 bp, Artificial
  Probe
gctattccattgttctttgtactgt

SEQ ID NO: 174143 - DNA, 25 bp, Artificial
  Probe
tccttattgacatggtactgaatcg

SEQ ID NO: 174144 - DNA, 25 bp, Artificial
  Probe
acatccttattgacatggtactgaa

SEQ ID NO: 174145 - DNA, 25 bp, Artificial
  Probe
cctacatccttattgacatggtact

SEQ ID NO: 174146 - DNA, 25 bp, Artificial
  Probe
ttattgacatggtactgaatcgcat

SEQ ID NO: 174147 - DNA, 25 bp, Artificial
  Probe
cttattgacatggtactgaatcgca

SEQ ID NO: 174148 - DNA, 25 bp, Artificial
  Probe
tacatccttattgacatggtactga

SEQ ID NO: 174149 - DNA, 25 bp, Artificial
  Probe
ctacatccttattgacatggtactg

SEQ ID NO: 174150 - DNA, 25 bp, Artificial
  Probe
atccttattgacatggtactgaatc

SEQ ID NO: 174151 - DNA, 25 bp, Artificial
  Probe
catccttattgacatggtactgaat

SEQ ID NO: 174152 - DNA, 25 bp, Artificial
  Probe
ccttattgacatggtactgaatcgc

SEQ ID NO: 174153 - DNA, 25 bp, Artificial
  Probe
cgaaaggagtgaaggagattgatat

SEQ ID NO: 174154 - DNA, 25 bp, Artificial
  Probe
acctacatccttattgacatggtac

SEQ ID NO: 174155 - DNA, 25 bp, Artificial
  Probe
cacctacatccttattgacatggta

SEQ ID NO: 174156 - DNA, 25 bp, Artificial
  Probe
atgattctggcatacatggaggatc

SEQ ID NO: 174157 - DNA, 25 bp, Artificial
  Probe
aaggtgaaggcaacatcaagaagaa

SEQ ID NO: 174158 - DNA, 25 bp, Artificial
  Probe
caggcacctacatccttattgacat

SEQ ID NO: 174159 - DNA, 25 bp, Artificial
  Probe
cgttctaaggaccagtttgagtttg

SEQ ID NO: 174160 - DNA, 25 bp, Artificial
  Probe
catcctgacttcttaccctatgacc

SEQ ID NO: 174161 - DNA, 25 bp, Artificial
  Probe
ccatcctgacttcttaccctatgac

SEQ ID NO: 174162 - DNA, 25 bp, Artificial
  Probe
gttctaaggaccagtttgagtttgc

SEQ ID NO: 174163 - DNA, 25 bp, Artificial
  Probe
aggcacctacatccttattgacatg

SEQ ID NO: 174164 - DNA, 25 bp, Artificial
  Probe
atcctgacttcttaccctatgacca

SEQ ID NO: 174165 - DNA, 25 bp, Artificial
  Probe
gattctggcatacatggaggatcac

SEQ ID NO: 174166 - DNA, 25 bp, Artificial
  Probe
tcctgacttcttaccctatgaccat

SEQ ID NO: 174167 - DNA, 25 bp, Artificial
  Probe
gacaggcacctacatccttattgac

SEQ ID NO: 174168 - DNA, 25 bp, Artificial
  Probe
aaggagtgaaggagattgatatcgc

SEQ ID NO: 174169 - DNA, 25 bp, Artificial
  Probe
gcgaaaggagtgaaggagattgata

SEQ ID NO: 174170 - DNA, 25 bp, Artificial
  Probe
aggtgaaggcaacatcaagaagaac

SEQ ID NO: 174171 - DNA, 25 bp, Artificial
  Probe
caaggtgaaggcaacatcaagaaga

SEQ ID NO: 174172 - DNA, 25 bp, Artificial
  Probe
ggcacctacatccttattgacatgg

SEQ ID NO: 174173 - DNA, 25 bp, Artificial
  Probe
aggaaagtgaacaagtgctacagag

SEQ ID NO: 174174 - DNA, 25 bp, Artificial
  Probe
acaaggtgaaggcaacatcaagaag

SEQ ID NO: 174175 - DNA, 25 bp, Artificial
  Probe
caggacacatgattctggcatacat

SEQ ID NO: 174176 - DNA, 25 bp, Artificial
  Probe
gcacctacatccttattgacatggt

SEQ ID NO: 174177 - DNA, 25 bp, Artificial
  Probe
cctgacttcttaccctatgaccatg

SEQ ID NO: 174178 - DNA, 25 bp, Artificial
  Probe
ccgttctaaggaccagtttgagttt

SEQ ID NO: 174179 - DNA, 25 bp, Artificial
  Probe
caggaaagtgaacaagtgctacaga

SEQ ID NO: 174180 - DNA, 25 bp, Artificial
  Probe
acaggcacctacatccttattgaca

SEQ ID NO: 174181 - DNA, 25 bp, Artificial
  Probe
ggagtgaaggagattgatatcgctg

SEQ ID NO: 174182 - DNA, 25 bp, Artificial
  Probe
aggagtgaaggagattgatatcgct

SEQ ID NO: 174183 - DNA, 25 bp, Artificial
  Probe
aaaggagtgaaggagattgatatcg

SEQ ID NO: 174184 - DNA, 25 bp, Artificial
  Probe
catctccacaggacacatgattctg

SEQ ID NO: 174185 - DNA, 25 bp, Artificial
  Probe
gacatctccacaggacacatgattc

SEQ ID NO: 174186 - DNA, 25 bp, Artificial
  Probe
gaaaggagtgaaggagattgatatc

SEQ ID NO: 174187 - DNA, 25 bp, Artificial
  Probe
tattgacatggtactgaatcgcatg

SEQ ID NO: 174188 - DNA, 25 bp, Artificial
  Probe
actgttatctagtaagtggcagcac

SEQ ID NO: 174189 - DNA, 25 bp, Artificial
  Probe
caatctcaacaacgtcaccactatc

SEQ ID NO: 174190 - DNA, 25 bp, Artificial
  Probe
tcccttggcactgttatctagtaag

SEQ ID NO: 174191 - DNA, 25 bp, Artificial
  Probe
ctcccttggcactgttatctagtaa

SEQ ID NO: 174192 - DNA, 25 bp, Artificial
  Probe
cccttggcactgttatctagtaagt

SEQ ID NO: 174193 - DNA, 25 bp, Artificial
  Probe
cttcctaagcctctactgacagcaa

SEQ ID NO: 174194 - DNA, 25 bp, Artificial
  Probe
aatctcaacaacgtcaccactatcc

SEQ ID NO: 174195 - DNA, 25 bp, Artificial
  Probe
ccaatctcaacaacgtcaccactat

SEQ ID NO: 174196 - DNA, 25 bp, Artificial
  Probe
caaatgctaatgattcacaccacgc

SEQ ID NO: 174197 - DNA, 25 bp, Artificial
  Probe
ttcctaagcctctactgacagcaaa

SEQ ID NO: 174198 - DNA, 25 bp, Artificial
  Probe
ttttacagataaataaaggggcggt

SEQ ID NO: 174199 - DNA, 25 bp, Artificial
  Probe
tttacagataaataaaggggcggtg

SEQ ID NO: 174200 - DNA, 25 bp, Artificial
  Probe
tccaatctcaacaacgtcaccacta

SEQ ID NO: 174201 - DNA, 25 bp, Artificial
  Probe
tcctaagcctctactgacagcaaag

SEQ ID NO: 174202 - DNA, 25 bp, Artificial
  Probe
cttggcactgttatctagtaagtgg

SEQ ID NO: 174203 - DNA, 25 bp, Artificial
  Probe
ccttggcactgttatctagtaagtg

SEQ ID NO: 174204 - DNA, 25 bp, Artificial
  Probe
attttacagataaataaaggggcgg

SEQ ID NO: 174205 - DNA, 25 bp, Artificial
  Probe
gctcccttggcactgttatctagta

SEQ ID NO: 174206 - DNA, 25 bp, Artificial
  Probe
cattttacagataaataaaggggcg

SEQ ID NO: 174207 - DNA, 25 bp, Artificial
  Probe
cgtactcctattccattttacagat

SEQ ID NO: 174208 - DNA, 25 bp, Artificial
  Probe
cttgggatatggaggctactgtgac

SEQ ID NO: 174209 - DNA, 25 bp, Artificial
  Probe
ttacagataaataaaggggcggtgg

SEQ ID NO: 174210 - DNA, 25 bp, Artificial
  Probe
ccattttacagataaataaaggggc

SEQ ID NO: 174211 - DNA, 25 bp, Artificial
  Probe
ctgttatctagtaagtggcagcact

SEQ ID NO: 174212 - DNA, 25 bp, Artificial
  Probe
agccttcctaagcctctactgacag

SEQ ID NO: 174213 - DNA, 25 bp, Artificial
  Probe
acgtactcctattccattttacaga

SEQ ID NO: 174214 - DNA, 25 bp, Artificial
  Probe
tgttatctagtaagtggcagcactg

SEQ ID NO: 174215 - DNA, 25 bp, Artificial
  Probe
cactgttatctagtaagtggcagca

SEQ ID NO: 174216 - DNA, 25 bp, Artificial
  Probe
gagccttcctaagcctctactgaca

SEQ ID NO: 174217 - DNA, 25 bp, Artificial
  Probe
tgagccttcctaagcctctactgac

SEQ ID NO: 174218 - DNA, 25 bp, Artificial
  Probe
gtgagccttcctaagcctctactga

SEQ ID NO: 174219 - DNA, 25 bp, Artificial
  Probe
aagtccaatctcaacaacgtcacca

SEQ ID NO: 174220 - DNA, 25 bp, Artificial
  Probe
gagccatcctatctgtctgcatctg

SEQ ID NO: 174221 - DNA, 25 bp, Artificial
  Probe
ttggcactgttatctagtaagtggc

SEQ ID NO: 174222 - DNA, 25 bp, Artificial
  Probe
ttgggatatggaggctactgtgact

SEQ ID NO: 174223 - DNA, 25 bp, Artificial
  Probe
aaagtccaatctcaacaacgtcacc

SEQ ID NO: 174224 - DNA, 25 bp, Artificial
  Probe
ccatcctatctgtctgcatctggag

SEQ ID NO: 174225 - DNA, 25 bp, Artificial
  Probe
catctagggtcaaaactcgtctgag

SEQ ID NO: 174226 - DNA, 25 bp, Artificial
  Probe
gaaaagtccaatctcaacaacgtca

SEQ ID NO: 174227 - DNA, 25 bp, Artificial
  Probe
gttatctagtaagtggcagcactgg

SEQ ID NO: 174228 - DNA, 25 bp, Artificial
  Probe
ggcactgttatctagtaagtggcag

SEQ ID NO: 174229 - DNA, 25 bp, Artificial
  Probe
agaaaagtccaatctcaacaacgtc

SEQ ID NO: 174230 - DNA, 25 bp, Artificial
  Probe
cggaagacagagaaaagtccaatct

SEQ ID NO: 174231 - DNA, 25 bp, Artificial
  Probe
aaaagtccaatctcaacaacgtcac

SEQ ID NO: 174232 - DNA, 25 bp, Artificial
  Probe
catcctatctgtctgcatctggagc

SEQ ID NO: 174233 - DNA, 25 bp, Artificial
  Probe
taagaaggctgaatggagaatggag

SEQ ID NO: 174234 - DNA, 25 bp, Artificial
  Probe
gaggtaagaaggctgaatggagaat

SEQ ID NO: 174235 - DNA, 25 bp, Artificial
  Probe
gtaagaaggctgaatggagaatgga

SEQ ID NO: 174236 - DNA, 25 bp, Artificial
  Probe
aggtaagaaggctgaatggagaatg

SEQ ID NO: 174237 - DNA, 25 bp, Artificial
  Probe
tagacagaggtaagaaggctgaatg

SEQ ID NO: 174238 - DNA, 25 bp, Artificial
  Probe
ctagacagaggtaagaaggctgaat

SEQ ID NO: 174239 - DNA, 25 bp, Artificial
  Probe
gagatttaacaatgaaagagggagc

SEQ ID NO: 174240 - DNA, 25 bp, Artificial
  Probe
tggagatttaacaatgaaagaggga

SEQ ID NO: 174241 - DNA, 25 bp, Artificial
  Probe
gctggagatttaacaatgaaagagg

SEQ ID NO: 174242 - DNA, 25 bp, Artificial
  Probe
ctggagatttaacaatgaaagaggg

SEQ ID NO: 174243 - DNA, 25 bp, Artificial
  Probe
agaggtaagaaggctgaatggagaa

SEQ ID NO: 174244 - DNA, 25 bp, Artificial
  Probe
ggagatttaacaatgaaagagggag

SEQ ID NO: 174245 - DNA, 25 bp, Artificial
  Probe
agatttaacaatgaaagagggagcc

SEQ ID NO: 174246 - DNA, 25 bp, Artificial
  Probe
atttaacaatgaaagagggagccag

SEQ ID NO: 174247 - DNA, 25 bp, Artificial
  Probe
gatttaacaatgaaagagggagcca

SEQ ID NO: 174248 - DNA, 25 bp, Artificial
  Probe
ggtaagaaggctgaatggagaatgg

SEQ ID NO: 174249 - DNA, 25 bp, Artificial
  Probe
agctggagatttaacaatgaaagag

SEQ ID NO: 174250 - DNA, 25 bp, Artificial
  Probe
cctagacagaggtaagaaggctgaa

SEQ ID NO: 174251 - DNA, 25 bp, Artificial
  Probe
ttcagtttaggttcagtgatagaaa

SEQ ID NO: 174252 - DNA, 25 bp, Artificial
  Probe
tttcagtttaggttcagtgatagaa

SEQ ID NO: 174253 - DNA, 25 bp, Artificial
  Probe
cagaggtaagaaggctgaatggaga

SEQ ID NO: 174254 - DNA, 25 bp, Artificial
  Probe
tttaacaatgaaagagggagccagg

SEQ ID NO: 174255 - DNA, 25 bp, Artificial
  Probe
aagaaggctgaatggagaatggagg

SEQ ID NO: 174256 - DNA, 25 bp, Artificial
  Probe
acagaggtaagaaggctgaatggag

SEQ ID NO: 174257 - DNA, 25 bp, Artificial
  Probe
gacagaggtaagaaggctgaatgga

SEQ ID NO: 174258 - DNA, 25 bp, Artificial
  Probe
agacagaggtaagaaggctgaatgg

SEQ ID NO: 174259 - DNA, 25 bp, Artificial
  Probe
gtcaagtacgccaagtgtatgtgtg

SEQ ID NO: 174260 - DNA, 25 bp, Artificial
  Probe
ggttttcagtttaggttcagtgata

SEQ ID NO: 174261 - DNA, 25 bp, Artificial
  Probe
gggttttcagtttaggttcagtgat

SEQ ID NO: 174262 - DNA, 25 bp, Artificial
  Probe
gttttcagtttaggttcagtgatag

SEQ ID NO: 174263 - DNA, 25 bp, Artificial
  Probe
tcagtttaggttcagtgatagaaaa

SEQ ID NO: 174264 - DNA, 25 bp, Artificial
  Probe
ttttcagtttaggttcagtgataga

SEQ ID NO: 174265 - DNA, 25 bp, Artificial
  Probe
gtcacagaccataaaagaacacagg

SEQ ID NO: 174266 - DNA, 25 bp, Artificial
  Probe
ggtcaagtacgccaagtgtatgtgt

SEQ ID NO: 174267 - DNA, 25 bp, Artificial
  Probe
acagaccataaaagaacacaggttg

SEQ ID NO: 174268 - DNA, 25 bp, Artificial
  Probe
cacagaccataaaagaacacaggtt

SEQ ID NO: 174269 - DNA, 25 bp, Artificial
  Probe
ggggttttcagtttaggttcagtga

SEQ ID NO: 174270 - DNA, 25 bp, Artificial
  Probe
cagaccataaaagaacacaggttgg

SEQ ID NO: 174271 - DNA, 25 bp, Artificial
  Probe
tcacagaccataaaagaacacaggt

SEQ ID NO: 174272 - DNA, 25 bp, Artificial
  Probe
aagtcactttgacagtgtaagctag

SEQ ID NO: 174273 - DNA, 25 bp, Artificial
  Probe
aaagtcactttgacagtgtaagcta

SEQ ID NO: 174274 - DNA, 25 bp, Artificial
  Probe
tcaagtacgccaagtgtatgtgtgg

SEQ ID NO: 174275 - DNA, 25 bp, Artificial
  Probe
ttaacaatgaaagagggagccaggc

SEQ ID NO: 174276 - DNA, 25 bp, Artificial
  Probe
tcactttgacagtgtaagctaggac

SEQ ID NO: 174277 - DNA, 25 bp, Artificial
  Probe
gtcactttgacagtgtaagctagga

SEQ ID NO: 174278 - DNA, 25 bp, Artificial
  Probe
aacaagatagcaactggaatgaatg

SEQ ID NO: 174279 - DNA, 25 bp, Artificial
  Probe
cctaacaagatagcaactggaatga

SEQ ID NO: 174280 - DNA, 25 bp, Artificial
  Probe
ctcaaggtccagttctcattatgtt

SEQ ID NO: 174281 - DNA, 25 bp, Artificial
  Probe
tcaaggtccagttctcattatgtta

SEQ ID NO: 174282 - DNA, 25 bp, Artificial
  Probe
ctaacaagatagcaactggaatgaa

SEQ ID NO: 174283 - DNA, 25 bp, Artificial
  Probe
aagatagcaactggaatgaatggtg

SEQ ID NO: 174284 - DNA, 25 bp, Artificial
  Probe
caagatagcaactggaatgaatggt

SEQ ID NO: 174285 - DNA, 25 bp, Artificial
  Probe
acaagatagcaactggaatgaatgg

SEQ ID NO: 174286 - DNA, 25 bp, Artificial
  Probe
ggtccagttctcattatgttattca

SEQ ID NO: 174287 - DNA, 25 bp, Artificial
  Probe
caaggtccagttctcattatgttat

SEQ ID NO: 174288 - DNA, 25 bp, Artificial
  Probe
taacaagatagcaactggaatgaat

SEQ ID NO: 174289 - DNA, 25 bp, Artificial
  Probe
aggtccagttctcattatgttattc

SEQ ID NO: 174290 - DNA, 25 bp, Artificial
  Probe
ggaatcctcttattggcatcagaag

SEQ ID NO: 174291 - DNA, 25 bp, Artificial
  Probe
actcaaggtccagttctcattatgt

SEQ ID NO: 174292 - DNA, 25 bp, Artificial
  Probe
ggtcacactgagatgttagactatt

SEQ ID NO: 174293 - DNA, 25 bp, Artificial
  Probe
gaatcctcttattggcatcagaagc

SEQ ID NO: 174294 - DNA, 25 bp, Artificial
  Probe
aaggtccagttctcattatgttatt

SEQ ID NO: 174295 - DNA, 25 bp, Artificial
  Probe
tggtcacactgagatgttagactat

SEQ ID NO: 174296 - DNA, 25 bp, Artificial
  Probe
ttggtcacactgagatgttagacta

SEQ ID NO: 174297 - DNA, 25 bp, Artificial
  Probe
ttcttgtgatgtctctccactaatg

SEQ ID NO: 174298 - DNA, 25 bp, Artificial
  Probe
tcctaacaagatagcaactggaatg

SEQ ID NO: 174299 - DNA, 25 bp, Artificial
  Probe
aatcaatctccagttcacagacagg

SEQ ID NO: 174300 - DNA, 25 bp, Artificial
  Probe
ttctcaaatcaatctccagttcaca

SEQ ID NO: 174301 - DNA, 25 bp, Artificial
  Probe
tctcattatgttattcatggacacc

SEQ ID NO: 174302 - DNA, 25 bp, Artificial
  Probe
tttctcaaatcaatctccagttcac

SEQ ID NO: 174303 - DNA, 25 bp, Artificial
  Probe
tctcaaatcaatctccagttcacag

SEQ ID NO: 174304 - DNA, 25 bp, Artificial
  Probe
atcctcttattggcatcagaagcta

SEQ ID NO: 174305 - DNA, 25 bp, Artificial
  Probe
tctacaaggatatacccatcaactg

SEQ ID NO: 174306 - DNA, 25 bp, Artificial
  Probe
tcctcttattggcatcagaagctaa

SEQ ID NO: 174307 - DNA, 25 bp, Artificial
  Probe
ctcaaatcaatctccagttcacaga

SEQ ID NO: 174308 - DNA, 25 bp, Artificial
  Probe
gaaggaatcctcttattggcatcag

SEQ ID NO: 174309 - DNA, 25 bp, Artificial
  Probe
ttctacaaggatatacccatcaact

SEQ ID NO: 174310 - DNA, 25 bp, Artificial
  Probe
aaatcaatctccagttcacagacag

SEQ ID NO: 174311 - DNA, 25 bp, Artificial
  Probe
tcaaatcaatctccagttcacagac

SEQ ID NO: 174312 - DNA, 25 bp, Artificial
  Probe
tcttgtgatgtctctccactaatgc

SEQ ID NO: 174313 - DNA, 25 bp, Artificial
  Probe
gtccagttctcattatgttattcat

SEQ ID NO: 174314 - DNA, 25 bp, Artificial
  Probe
caaatcaatctccagttcacagaca

SEQ ID NO: 174315 - DNA, 25 bp, Artificial
  Probe
aggaatcctcttattggcatcagaa

SEQ ID NO: 174316 - DNA, 25 bp, Artificial
  Probe
aaggaatcctcttattggcatcaga

SEQ ID NO: 174317 - DNA, 25 bp, Artificial
  Probe
agaaggaatcctcttattggcatca

SEQ ID NO: 174318 - DNA, 25 bp, Artificial
  Probe
aatcctcttattggcatcagaagct

SEQ ID NO: 174319 - DNA, 25 bp, Artificial
  Probe
tacaaggatatacccatcaactgtg

SEQ ID NO: 174320 - DNA, 25 bp, Artificial
  Probe
ctacaaggatatacccatcaactgt

SEQ ID NO: 174321 - DNA, 25 bp, Artificial
  Probe
tttctacaaggatatacccatcaac

SEQ ID NO: 174322 - DNA, 25 bp, Artificial
  Probe
gtttctacaaggatatacccatcaa

SEQ ID NO: 174323 - DNA, 25 bp, Artificial
  Probe
attaagcagacaaggacttcttcaa

SEQ ID NO: 174324 - DNA, 25 bp, Artificial
  Probe
aattaagcagacaaggacttcttca

SEQ ID NO: 174325 - DNA, 25 bp, Artificial
  Probe
atgattccatcttatgctcttcacc

SEQ ID NO: 174326 - DNA, 25 bp, Artificial
  Probe
ttaagcagacaaggacttcttcaac

SEQ ID NO: 174327 - DNA, 25 bp, Artificial
  Probe
catgattccatcttatgctcttcac

SEQ ID NO: 174328 - DNA, 25 bp, Artificial
  Probe
agacaaggacttcttcaaccaacaa

SEQ ID NO: 174329 - DNA, 25 bp, Artificial
  Probe
aatggaatacctggatatggtgttg

SEQ ID NO: 174330 - DNA, 25 bp, Artificial
  Probe
ttgatagtaaccttgtctctgtaat

SEQ ID NO: 174331 - DNA, 25 bp, Artificial
  Probe
ccacatctggttgtctctgttaatt

SEQ ID NO: 174332 - DNA, 25 bp, Artificial
  Probe
gtgatggaaatggaatacctggata

SEQ ID NO: 174333 - DNA, 25 bp, Artificial
  Probe
cctatgatactgtgatggaaatgga

SEQ ID NO: 174334 - DNA, 25 bp, Artificial
  Probe
acctatgatactgtgatggaaatgg

SEQ ID NO: 174335 - DNA, 25 bp, Artificial
  Probe
agtgacagaacaggaacttaacctt

SEQ ID NO: 174336 - DNA, 25 bp, Artificial
  Probe
atggaaatggaatacctggatatgg

SEQ ID NO: 174337 - DNA, 25 bp, Artificial
  Probe
tactgtgatggaaatggaatacctg

SEQ ID NO: 174338 - DNA, 25 bp, Artificial
  Probe
tcagtgacagaacaggaacttaacc

SEQ ID NO: 174339 - DNA, 25 bp, Artificial
  Probe
taagcagacaaggacttcttcaacc

SEQ ID NO: 174340 - DNA, 25 bp, Artificial
  Probe
atactgtgatggaaatggaatacct

SEQ ID NO: 174341 - DNA, 25 bp, Artificial
  Probe
acaaagaatctcatacagccctatc

SEQ ID NO: 174342 - DNA, 25 bp, Artificial
  Probe
gacaaagaatctcatacagccctat

SEQ ID NO: 174343 - DNA, 25 bp, Artificial
  Probe
gattccatcttatgctcttcaccgt

SEQ ID NO: 174344 - DNA, 25 bp, Artificial
  Probe
cacgccagtatatgagatgttaaac

SEQ ID NO: 174345 - DNA, 25 bp, Artificial
  Probe
atggaatacctggatatggtgttga

SEQ ID NO: 174346 - DNA, 25 bp, Artificial
  Probe
gatactgtgatggaaatggaatacc

SEQ ID NO: 174347 - DNA, 25 bp, Artificial
  Probe
tgatagtaaccttgtctctgtaatt

SEQ ID NO: 174348 - DNA, 25 bp, Artificial
  Probe
tgatggaaatggaatacctggatat

SEQ ID NO: 174349 - DNA, 25 bp, Artificial
  Probe
caaagaatctcatacagccctatcc

SEQ ID NO: 174350 - DNA, 25 bp, Artificial
  Probe
tggaatacctggatatggtgttgaa

SEQ ID NO: 174351 - DNA, 25 bp, Artificial
  Probe
gatggaaatggaatacctggatatg

SEQ ID NO: 174352 - DNA, 25 bp, Artificial
  Probe
aatctcatacagccctatccgatat

SEQ ID NO: 174353 - DNA, 25 bp, Artificial
  Probe
cttcagaaatgtggtgtctaagaac

SEQ ID NO: 174354 - DNA, 25 bp, Artificial
  Probe
tccacatctggttgtctctgttaat

SEQ ID NO: 174355 - DNA, 25 bp, Artificial
  Probe
atccacatctggttgtctctgttaa

SEQ ID NO: 174356 - DNA, 25 bp, Artificial
  Probe
catctggttgtctctgttaatttct

SEQ ID NO: 174357 - DNA, 25 bp, Artificial
  Probe
agaacaccagaccctttaatttatg

SEQ ID NO: 174358 - DNA, 25 bp, Artificial
  Probe
tgattccatcttatgctcttcaccg

SEQ ID NO: 174359 - DNA, 25 bp, Artificial
  Probe
tgaaattaagcagacaaggacttct

SEQ ID NO: 174360 - DNA, 25 bp, Artificial
  Probe
tctaagaacaccagaccctttaatt

SEQ ID NO: 174361 - DNA, 25 bp, Artificial
  Probe
aaattaagcagacaaggacttcttc

SEQ ID NO: 174362 - DNA, 25 bp, Artificial
  Probe
gaaattaagcagacaaggacttctt

SEQ ID NO: 174363 - DNA, 25 bp, Artificial
  Probe
tgatactgtgatggaaatggaatac

SEQ ID NO: 174364 - DNA, 25 bp, Artificial
  Probe
gtcagtgacagaacaggaacttaac

SEQ ID NO: 174365 - DNA, 25 bp, Artificial
  Probe
agtcagtgacagaacaggaacttaa

SEQ ID NO: 174366 - DNA, 25 bp, Artificial
  Probe
gaatctcatacagccctatccgata

SEQ ID NO: 174367 - DNA, 25 bp, Artificial
  Probe
aatgaaaccctcagattgtatccaa

SEQ ID NO: 174368 - DNA, 25 bp, Artificial
  Probe
ttgttctctgttcgtcttctaccta

SEQ ID NO: 174369 - DNA, 25 bp, Artificial
  Probe
ctcttagttgctgaatcaaggtatg

SEQ ID NO: 174370 - DNA, 25 bp, Artificial
  Probe
tcttagttgctgaatcaaggtatgc

SEQ ID NO: 174371 - DNA, 25 bp, Artificial
  Probe
tgttctctgttcgtcttctacctag

SEQ ID NO: 174372 - DNA, 25 bp, Artificial
  Probe
gttctctgttcgtcttctacctaga

SEQ ID NO: 174373 - DNA, 25 bp, Artificial
  Probe
cctcttagttgctgaatcaaggtat

SEQ ID NO: 174374 - DNA, 25 bp, Artificial
  Probe
ttctgcctcttagttgctgaatcaa

SEQ ID NO: 174375 - DNA, 25 bp, Artificial
  Probe
atttgttctctgttcgtcttctacc

SEQ ID NO: 174376 - DNA, 25 bp, Artificial
  Probe
atatgagtacactgtagctgtcttc

SEQ ID NO: 174377 - DNA, 25 bp, Artificial
  Probe
ttcaagcccttcactaatctacttc

SEQ ID NO: 174378 - DNA, 25 bp, Artificial
  Probe
attcaagcccttcactaatctactt

SEQ ID NO: 174379 - DNA, 25 bp, Artificial
  Probe
aatttgttctctgttcgtcttctac

SEQ ID NO: 174380 - DNA, 25 bp, Artificial
  Probe
tattcaagcccttcactaatctact

SEQ ID NO: 174381 - DNA, 25 bp, Artificial
  Probe
cttctgcctcttagttgctgaatca

SEQ ID NO: 174382 - DNA, 25 bp, Artificial
  Probe
tatgagtacactgtagctgtcttca

SEQ ID NO: 174383 - DNA, 25 bp, Artificial
  Probe
caagcccttcactaatctacttcag

SEQ ID NO: 174384 - DNA, 25 bp, Artificial
  Probe
tgaatttgttctctgttcgtcttct

SEQ ID NO: 174385 - DNA, 25 bp, Artificial
  Probe
tctgcctcttagttgctgaatcaag

SEQ ID NO: 174386 - DNA, 25 bp, Artificial
  Probe
gtgaatttgttctctgttcgtcttc

SEQ ID NO: 174387 - DNA, 25 bp, Artificial
  Probe
tcaagcccttcactaatctacttca

SEQ ID NO: 174388 - DNA, 25 bp, Artificial
  Probe
gaatttgttctctgttcgtcttcta

SEQ ID NO: 174389 - DNA, 25 bp, Artificial
  Probe
agtgaatttgttctctgttcgtctt

SEQ ID NO: 174390 - DNA, 25 bp, Artificial
  Probe
tttgttctctgttcgtcttctacct

SEQ ID NO: 174391 - DNA, 25 bp, Artificial
  Probe
ttattcaagcccttcactaatctac

SEQ ID NO: 174392 - DNA, 25 bp, Artificial
  Probe
tatatgagtacactgtagctgtctt

SEQ ID NO: 174393 - DNA, 25 bp, Artificial
  Probe
ttatatgagtacactgtagctgtct

SEQ ID NO: 174394 - DNA, 25 bp, Artificial
  Probe
cttaaacaagtatcccttccactcc

SEQ ID NO: 174395 - DNA, 25 bp, Artificial
  Probe
aagcccttcactaatctacttcagt

SEQ ID NO: 174396 - DNA, 25 bp, Artificial
  Probe
atttattcaagcccttcactaatct

SEQ ID NO: 174397 - DNA, 25 bp, Artificial
  Probe
gcctcttagttgctgaatcaaggta

SEQ ID NO: 174398 - DNA, 25 bp, Artificial
  Probe
tattgggttgtcaggtctttgctat

SEQ ID NO: 174399 - DNA, 25 bp, Artificial
  Probe
ttaaacaagtatcccttccactcca

SEQ ID NO: 174400 - DNA, 25 bp, Artificial
  Probe
tcttctacctagaacagtgcctaat

SEQ ID NO: 174401 - DNA, 25 bp, Artificial
  Probe
ttctctgttcgtcttctacctagaa

SEQ ID NO: 174402 - DNA, 25 bp, Artificial
  Probe
atgagtacactgtagctgtcttcag

SEQ ID NO: 174403 - DNA, 25 bp, Artificial
  Probe
ttctacctagaacagtgcctaatag

SEQ ID NO: 174404 - DNA, 25 bp, Artificial
  Probe
cttctacctagaacagtgcctaata

SEQ ID NO: 174405 - DNA, 25 bp, Artificial
  Probe
taaacaagtatcccttccactccag

SEQ ID NO: 174406 - DNA, 25 bp, Artificial
  Probe
tttattcaagcccttcactaatcta

SEQ ID NO: 174407 - DNA, 25 bp, Artificial
  Probe
gtcttctacctagaacagtgcctaa

SEQ ID NO: 174408 - DNA, 25 bp, Artificial
  Probe
acttcagtgaatttgttctctgttc

SEQ ID NO: 174409 - DNA, 25 bp, Artificial
  Probe
cttcagtgaatttgttctctgttcg

SEQ ID NO: 174410 - DNA, 25 bp, Artificial
  Probe
cagtgaatttgttctctgttcgtct

SEQ ID NO: 174411 - DNA, 25 bp, Artificial
  Probe
tcagtgaatttgttctctgttcgtc

SEQ ID NO: 174412 - DNA, 25 bp, Artificial
  Probe
attgggttgtcaggtctttgctatt

SEQ ID NO: 174413 - DNA, 25 bp, Artificial
  Probe
acctgtagtcctaataccttgagag

SEQ ID NO: 174414 - DNA, 25 bp, Artificial
  Probe
tacctgtagtcctaataccttgaga

SEQ ID NO: 174415 - DNA, 25 bp, Artificial
  Probe
tgtacctgtagtcctaataccttga

SEQ ID NO: 174416 - DNA, 25 bp, Artificial
  Probe
ttgaagccagtccttgtcctatatt

SEQ ID NO: 174417 - DNA, 25 bp, Artificial
  Probe
gtacctgtagtcctaataccttgag

SEQ ID NO: 174418 - DNA, 25 bp, Artificial
  Probe
atgtacctgtagtcctaataccttg

SEQ ID NO: 174419 - DNA, 25 bp, Artificial
  Probe
gtgtatcagacctatgtgtgactct

SEQ ID NO: 174420 - DNA, 25 bp, Artificial
  Probe
aagccagtccttgtcctatattgag

SEQ ID NO: 174421 - DNA, 25 bp, Artificial
  Probe
gaagccagtccttgtcctatattga

SEQ ID NO: 174422 - DNA, 25 bp, Artificial
  Probe
catgtacctgtagtcctaatacctt

SEQ ID NO: 174423 - DNA, 25 bp, Artificial
  Probe
ctactgtgtatcagacctatgtgtg

SEQ ID NO: 174424 - DNA, 25 bp, Artificial
  Probe
tctactgtgtatcagacctatgtgt

SEQ ID NO: 174425 - DNA, 25 bp, Artificial
  Probe
tactgtgtatcagacctatgtgtga

SEQ ID NO: 174426 - DNA, 25 bp, Artificial
  Probe
tgtgtatcagacctatgtgtgactc

SEQ ID NO: 174427 - DNA, 25 bp, Artificial
  Probe
tgaagccagtccttgtcctatattg

SEQ ID NO: 174428 - DNA, 25 bp, Artificial
  Probe
atctactgtgtatcagacctatgtg

SEQ ID NO: 174429 - DNA, 25 bp, Artificial
  Probe
cctatgtgtgactctgctaaccatt

SEQ ID NO: 174430 - DNA, 25 bp, Artificial
  Probe
cctgtagtcctaataccttgagagg

SEQ ID NO: 174431 - DNA, 25 bp, Artificial
  Probe
ctgtgtatcagacctatgtgtgact

SEQ ID NO: 174432 - DNA, 25 bp, Artificial
  Probe
actgtgtatcagacctatgtgtgac

SEQ ID NO: 174433 - DNA, 25 bp, Artificial
  Probe
gtagtcctaataccttgagaggctg

SEQ ID NO: 174434 - DNA, 25 bp, Artificial
  Probe
ctgtagtcctaataccttgagaggc

SEQ ID NO: 174435 - DNA, 25 bp, Artificial
  Probe
tgtagtcctaataccttgagaggct

SEQ ID NO: 174436 - DNA, 25 bp, Artificial
  Probe
tatctactgtgtatcagacctatgt

SEQ ID NO: 174437 - DNA, 25 bp, Artificial
  Probe
ctatgtgtgactctgctaaccattt

SEQ ID NO: 174438 - DNA, 25 bp, Artificial
  Probe
actatctactgtgtatcagacctat

SEQ ID NO: 174439 - DNA, 25 bp, Artificial
  Probe
tttgaagccagtccttgtcctatat

SEQ ID NO: 174440 - DNA, 25 bp, Artificial
  Probe
ctatctactgtgtatcagacctatg

SEQ ID NO: 174441 - DNA, 25 bp, Artificial
  Probe
acctatgtgtgactctgctaaccat

SEQ ID NO: 174442 - DNA, 25 bp, Artificial
  Probe
ctttgaagccagtccttgtcctata

SEQ ID NO: 174443 - DNA, 25 bp, Artificial
  Probe
gtcctatattgagggtcctatcctt

SEQ ID NO: 174444 - DNA, 25 bp, Artificial
  Probe
cttgtcctatattgagggtcctatc

SEQ ID NO: 174445 - DNA, 25 bp, Artificial
  Probe
ttgtcctatattgagggtcctatcc

SEQ ID NO: 174446 - DNA, 25 bp, Artificial
  Probe
ccttgtcctatattgagggtcctat

SEQ ID NO: 174447 - DNA, 25 bp, Artificial
  Probe
agacctatgtgtgactctgctaacc

SEQ ID NO: 174448 - DNA, 25 bp, Artificial
  Probe
gacctatgtgtgactctgctaacca

SEQ ID NO: 174449 - DNA, 25 bp, Artificial
  Probe
tcctatattgagggtcctatcctta

SEQ ID NO: 174450 - DNA, 25 bp, Artificial
  Probe
tgtcctatattgagggtcctatcct

SEQ ID NO: 174451 - DNA, 25 bp, Artificial
  Probe
tagtcctaataccttgagaggctgc

SEQ ID NO: 174452 - DNA, 25 bp, Artificial
  Probe
tgagggtcctatccttaataaacct

SEQ ID NO: 174453 - DNA, 25 bp, Artificial
  Probe
tccttgtcctatattgagggtccta

SEQ ID NO: 174454 - DNA, 25 bp, Artificial
  Probe
ttgagggtcctatccttaataaacc

SEQ ID NO: 174455 - DNA, 25 bp, Artificial
  Probe
cctatattgagggtcctatccttaa

SEQ ID NO: 174456 - DNA, 25 bp, Artificial
  Probe
agccagtccttgtcctatattgagg

SEQ ID NO: 174457 - DNA, 25 bp, Artificial
  Probe
cagtccttgtcctatattgagggtc

SEQ ID NO: 174458 - DNA, 25 bp, Artificial
  Probe
ctatgacacagaggtaggtgaaact

SEQ ID NO: 174459 - DNA, 25 bp, Artificial
  Probe
tatgacacagaggtaggtgaaactg

SEQ ID NO: 174460 - DNA, 25 bp, Artificial
  Probe
gctatgacacagaggtaggtgaaac

SEQ ID NO: 174461 - DNA, 25 bp, Artificial
  Probe
cactgctatttggaagaagttttcg

SEQ ID NO: 174462 - DNA, 25 bp, Artificial
  Probe
actgctatttggaagaagttttcgg

SEQ ID NO: 174463 - DNA, 25 bp, Artificial
  Probe
agccactgctatttggaagaagttt

SEQ ID NO: 174464 - DNA, 25 bp, Artificial
  Probe
ccactgctatttggaagaagttttc

SEQ ID NO: 174465 - DNA, 25 bp, Artificial
  Probe
ggctatgacacagaggtaggtgaaa

SEQ ID NO: 174466 - DNA, 25 bp, Artificial
  Probe
aagagccactgctatttggaagaag

SEQ ID NO: 174467 - DNA, 25 bp, Artificial
  Probe
atgacacagaggtaggtgaaactgg

SEQ ID NO: 174468 - DNA, 25 bp, Artificial
  Probe
gagccactgctatttggaagaagtt

SEQ ID NO: 174469 - DNA, 25 bp, Artificial
  Probe
caagagccactgctatttggaagaa

SEQ ID NO: 174470 - DNA, 25 bp, Artificial
  Probe
gccactgctatttggaagaagtttt

SEQ ID NO: 174471 - DNA, 25 bp, Artificial
  Probe
caccacatcctcttcctcaaagaag

SEQ ID NO: 174472 - DNA, 25 bp, Artificial
  Probe
gacaagagccactgctatttggaag

SEQ ID NO: 174473 - DNA, 25 bp, Artificial
  Probe
agagccactgctatttggaagaagt

SEQ ID NO: 174474 - DNA, 25 bp, Artificial
  Probe
agtatgatcaccactacctgcacac

SEQ ID NO: 174475 - DNA, 25 bp, Artificial
  Probe
ccaccacatcctcttcctcaaagaa

SEQ ID NO: 174476 - DNA, 25 bp, Artificial
  Probe
acaagagccactgctatttggaaga

SEQ ID NO: 174477 - DNA, 25 bp, Artificial
  Probe
cagtatgatcaccactacctgcaca

SEQ ID NO: 174478 - DNA, 25 bp, Artificial
  Probe
cacagaggtaggtgaaactgggaac

SEQ ID NO: 174479 - DNA, 25 bp, Artificial
  Probe
ggtccagtatgatcaccactacctg

SEQ ID NO: 174480 - DNA, 25 bp, Artificial
  Probe
ctcttcctcaaagaaggctctgtct

SEQ ID NO: 174481 - DNA, 25 bp, Artificial
  Probe
atcctcttcctcaaagaaggctctg

SEQ ID NO: 174482 - DNA, 25 bp, Artificial
  Probe
catcctcttcctcaaagaaggctct

SEQ ID NO: 174483 - DNA, 25 bp, Artificial
  Probe
taaacaagaaagaggccctggctta

SEQ ID NO: 174484 - DNA, 25 bp, Artificial
  Probe
accacatcctcttcctcaaagaagg

SEQ ID NO: 174485 - DNA, 25 bp, Artificial
  Probe
acatcctcttcctcaaagaaggctc

SEQ ID NO: 174486 - DNA, 25 bp, Artificial
  Probe
acacagaggtaggtgaaactgggaa

SEQ ID NO: 174487 - DNA, 25 bp, Artificial
  Probe
gtccagtatgatcaccactacctgc

SEQ ID NO: 174488 - DNA, 25 bp, Artificial
  Probe
cacatcctcttcctcaaagaaggct

SEQ ID NO: 174489 - DNA, 25 bp, Artificial
  Probe
ccagtatgatcaccactacctgcac

SEQ ID NO: 174490 - DNA, 25 bp, Artificial
  Probe
tccagtatgatcaccactacctgca

SEQ ID NO: 174491 - DNA, 25 bp, Artificial
  Probe
ggacaagagccactgctatttggaa

SEQ ID NO: 174492 - DNA, 25 bp, Artificial
  Probe
cctcttcctcaaagaaggctctgtc

SEQ ID NO: 174493 - DNA, 25 bp, Artificial
  Probe
tcctcttcctcaaagaaggctctgt

SEQ ID NO: 174494 - DNA, 25 bp, Artificial
  Probe
ctaaacaagaaagaggccctggctt

SEQ ID NO: 174495 - DNA, 25 bp, Artificial
  Probe
ccacatcctcttcctcaaagaaggc

SEQ ID NO: 174496 - DNA, 25 bp, Artificial
  Probe
ctggtccagtatgatcaccactacc

SEQ ID NO: 174497 - DNA, 25 bp, Artificial
  Probe
cctggtccagtatgatcaccactac

SEQ ID NO: 174498 - DNA, 25 bp, Artificial
  Probe
tcctggtccagtatgatcaccacta

SEQ ID NO: 174499 - DNA, 25 bp, Artificial
  Probe
tggtccagtatgatcaccactacct

SEQ ID NO: 174500 - DNA, 25 bp, Artificial
  Probe
ctcctggtccagtatgatcaccact

SEQ ID NO: 174501 - DNA, 25 bp, Artificial
  Probe
ggaaaatattgcctatggcctgacg

SEQ ID NO: 174502 - DNA, 25 bp, Artificial
  Probe
gaaaatattgcctatggcctgacgc

SEQ ID NO: 174503 - DNA, 25 bp, Artificial
  Probe
ctcaacacgcatatagaattcacat

SEQ ID NO: 174504 - DNA, 25 bp, Artificial
  Probe
tcaacacgcatatagaattcacatg

SEQ ID NO: 174505 - DNA, 25 bp, Artificial
  Probe
gctcaacacgcatatagaattcaca

SEQ ID NO: 174506 - DNA, 25 bp, Artificial
  Probe
atcgagctgtgagattcctcctatt

SEQ ID NO: 174507 - DNA, 25 bp, Artificial
  Probe
atgacacacactactgaggacagac

SEQ ID NO: 174508 - DNA, 25 bp, Artificial
  Probe
cgctcaacacgcatatagaattcac

SEQ ID NO: 174509 - DNA, 25 bp, Artificial
  Probe
gatcgagctgtgagattcctcctat

SEQ ID NO: 174510 - DNA, 25 bp, Artificial
  Probe
catgacacacactactgaggacaga

SEQ ID NO: 174511 - DNA, 25 bp, Artificial
  Probe
gggtctttgaggagaaaacacattt

SEQ ID NO: 174512 - DNA, 25 bp, Artificial
  Probe
cacacactactgaggacagacacag

SEQ ID NO: 174513 - DNA, 25 bp, Artificial
  Probe
gacacacactactgaggacagacac

SEQ ID NO: 174514 - DNA, 25 bp, Artificial
  Probe
ccgctcaacacgcatatagaattca

SEQ ID NO: 174515 - DNA, 25 bp, Artificial
  Probe
tcgagctgtgagattcctcctattt

SEQ ID NO: 174516 - DNA, 25 bp, Artificial
  Probe
agatcgagctgtgagattcctccta

SEQ ID NO: 174517 - DNA, 25 bp, Artificial
  Probe
tgacacacactactgaggacagaca

SEQ ID NO: 174518 - DNA, 25 bp, Artificial
  Probe
ggtctttgaggagaaaacacatttc

SEQ ID NO: 174519 - DNA, 25 bp, Artificial
  Probe
gagctgtgagattcctcctattttg

SEQ ID NO: 174520 - DNA, 25 bp, Artificial
  Probe
acacacactactgaggacagacaca

SEQ ID NO: 174521 - DNA, 25 bp, Artificial
  Probe
ggggtctttgaggagaaaacacatt

SEQ ID NO: 174522 - DNA, 25 bp, Artificial
  Probe
gagattcctcctattttgggcactg

SEQ ID NO: 174523 - DNA, 25 bp, Artificial
  Probe
ctgtgagattcctcctattttgggc

SEQ ID NO: 174524 - DNA, 25 bp, Artificial
  Probe
gctgtgagattcctcctattttggg

SEQ ID NO: 174525 - DNA, 25 bp, Artificial
  Probe
gcatgacacacactactgaggacag

SEQ ID NO: 174526 - DNA, 25 bp, Artificial
  Probe
agctgtgagattcctcctattttgg

SEQ ID NO: 174527 - DNA, 25 bp, Artificial
  Probe
gaaaggagggagcaccaacttacag

SEQ ID NO: 174528 - DNA, 25 bp, Artificial
  Probe
cagaaaggagggagcaccaacttac

SEQ ID NO: 174529 - DNA, 25 bp, Artificial
  Probe
cgagctgtgagattcctcctatttt

SEQ ID NO: 174530 - DNA, 25 bp, Artificial
  Probe
tgagattcctcctattttgggcact

SEQ ID NO: 174531 - DNA, 25 bp, Artificial
  Probe
cagaagaggctgatccagaaaggag

SEQ ID NO: 174532 - DNA, 25 bp, Artificial
  Probe
tgtgagattcctcctattttgggca

SEQ ID NO: 174533 - DNA, 25 bp, Artificial
  Probe
gtgagattcctcctattttgggcac

SEQ ID NO: 174534 - DNA, 25 bp, Artificial
  Probe
caacacgcatatagaattcacatgc

SEQ ID NO: 174535 - DNA, 25 bp, Artificial
  Probe
aacacgcatatagaattcacatgca

SEQ ID NO: 174536 - DNA, 25 bp, Artificial
  Probe
cccgctcaacacgcatatagaattc

SEQ ID NO: 174537 - DNA, 25 bp, Artificial
  Probe
agattcctcctattttgggcactgg

SEQ ID NO: 174538 - DNA, 25 bp, Artificial
  Probe
acacgcatatagaattcacatgcag

SEQ ID NO: 174539 - DNA, 25 bp, Artificial
  Probe
ctcagatcgagctgtgagattcctc

SEQ ID NO: 174540 - DNA, 25 bp, Artificial
  Probe
atgcatgacacacactactgaggac

SEQ ID NO: 174541 - DNA, 25 bp, Artificial
  Probe
gattcctcctattttgggcactggg

SEQ ID NO: 174542 - DNA, 25 bp, Artificial
  Probe
tttgaggagaaaacacatttcttcc

SEQ ID NO: 174543 - DNA, 25 bp, Artificial
  Probe
gtctttgaggagaaaacacatttct

SEQ ID NO: 174544 - DNA, 25 bp, Artificial
  Probe
ttgaggagaaaacacatttcttcca

SEQ ID NO: 174545 - DNA, 25 bp, Artificial
  Probe
tctttgaggagaaaacacatttctt

SEQ ID NO: 174546 - DNA, 25 bp, Artificial
  Probe
tgaggagaaaacacatttcttccag

SEQ ID NO: 174547 - DNA, 25 bp, Artificial
  Probe
ctttgaggagaaaacacatttcttc

SEQ ID NO: 174548 - DNA, 25 bp, Artificial
  Probe
gagagacgtgagacagttccagttg

SEQ ID NO: 174549 - DNA, 25 bp, Artificial
  Probe
agagagacgtgagacagttccagtt

SEQ ID NO: 174550 - DNA, 25 bp, Artificial
  Probe
caatgtccaggacaaggacctcttt

SEQ ID NO: 174551 - DNA, 25 bp, Artificial
  Probe
aatgtccaggacaaggacctctttt

SEQ ID NO: 174552 - DNA, 25 bp, Artificial
  Probe
atgtccaggacaaggacctcttttc

SEQ ID NO: 174553 - DNA, 25 bp, Artificial
  Probe
taagttcattggatctgagatgtga

SEQ ID NO: 174554 - DNA, 25 bp, Artificial
  Probe
aagttcattggatctgagatgtgag

SEQ ID NO: 174555 - DNA, 25 bp, Artificial
  Probe
gttcattggatctgagatgtgagtt

SEQ ID NO: 174556 - DNA, 25 bp, Artificial
  Probe
ctaagttcattggatctgagatgtg

SEQ ID NO: 174557 - DNA, 25 bp, Artificial
  Probe
tctaagttcattggatctgagatgt

SEQ ID NO: 174558 - DNA, 25 bp, Artificial
  Probe
agttcattggatctgagatgtgagt

SEQ ID NO: 174559 - DNA, 25 bp, Artificial
  Probe
ttctaagttcattggatctgagatg

SEQ ID NO: 174560 - DNA, 25 bp, Artificial
  Probe
tgtgggatttctaagttcattggat

SEQ ID NO: 174561 - DNA, 25 bp, Artificial
  Probe
ctggtgtgggatttctaagttcatt

SEQ ID NO: 174562 - DNA, 25 bp, Artificial
  Probe
caagggtgtgtagtgtctcaatatc

SEQ ID NO: 174563 - DNA, 25 bp, Artificial
  Probe
gtgtgggatttctaagttcattgga

SEQ ID NO: 174564 - DNA, 25 bp, Artificial
  Probe
aagggtgtgtagtgtctcaatatca

SEQ ID NO: 174565 - DNA, 25 bp, Artificial
  Probe
tggtgtgggatttctaagttcattg

SEQ ID NO: 174566 - DNA, 25 bp, Artificial
  Probe
gtgggatttctaagttcattggatc

SEQ ID NO: 174567 - DNA, 25 bp, Artificial
  Probe
tgggatttctaagttcattggatct

SEQ ID NO: 174568 - DNA, 25 bp, Artificial
  Probe
atgaaacaagagtccatccattaaa

SEQ ID NO: 174569 - DNA, 25 bp, Artificial
  Probe
gggatttctaagttcattggatctg

SEQ ID NO: 174570 - DNA, 25 bp, Artificial
  Probe
ggtgtgggatttctaagttcattgg

SEQ ID NO: 174571 - DNA, 25 bp, Artificial
  Probe
cagtacgctctctttgtttgttaag

SEQ ID NO: 174572 - DNA, 25 bp, Artificial
  Probe
actttgttcagagacacatacttca

SEQ ID NO: 174573 - DNA, 25 bp, Artificial
  Probe
tgactttgttcagagacacatactt

SEQ ID NO: 174574 - DNA, 25 bp, Artificial
  Probe
ctttgttcagagacacatacttcag

SEQ ID NO: 174575 - DNA, 25 bp, Artificial
  Probe
gactttgttcagagacacatacttc

SEQ ID NO: 174576 - DNA, 25 bp, Artificial
  Probe
ttcattggatctgagatgtgagttt

SEQ ID NO: 174577 - DNA, 25 bp, Artificial
  Probe
ttgttcagagacacatacttcagcg

SEQ ID NO: 174578 - DNA, 25 bp, Artificial
  Probe
ccagtacgctctctttgtttgttaa

SEQ ID NO: 174579 - DNA, 25 bp, Artificial
  Probe
tttgttcagagacacatacttcagc

SEQ ID NO: 174580 - DNA, 25 bp, Artificial
  Probe
taagcacagtaatgtttgagccatc

SEQ ID NO: 174581 - DNA, 25 bp, Artificial
  Probe
ctaagcacagtaatgtttgagccat

SEQ ID NO: 174582 - DNA, 25 bp, Artificial
  Probe
ggatttctaagttcattggatctga

SEQ ID NO: 174583 - DNA, 25 bp, Artificial
  Probe
gcaagggtgtgtagtgtctcaatat

SEQ ID NO: 174584 - DNA, 25 bp, Artificial
  Probe
ctctaagcacagtaatgtttgagcc

SEQ ID NO: 174585 - DNA, 25 bp, Artificial
  Probe
ttctcatctaagcctagcgtttgaa

SEQ ID NO: 174586 - DNA, 25 bp, Artificial
  Probe
tttctcatctaagcctagcgtttga

SEQ ID NO: 174587 - DNA, 25 bp, Artificial
  Probe
aatttgaatggcacctaaaccagta

SEQ ID NO: 174588 - DNA, 25 bp, Artificial
  Probe
cgttcttatctgttccaccacactg

SEQ ID NO: 174589 - DNA, 25 bp, Artificial
  Probe
accagtacgctctctttgtttgtta

SEQ ID NO: 174590 - DNA, 25 bp, Artificial
  Probe
agggtgtgtagtgtctcaatatcac

SEQ ID NO: 174591 - DNA, 25 bp, Artificial
  Probe
cacaacctaaatgcagattcaaacc

SEQ ID NO: 174592 - DNA, 25 bp, Artificial
  Probe
ccacaacctaaatgcagattcaaac

SEQ ID NO: 174593 - DNA, 25 bp, Artificial
  Probe
gctggtgtgggatttctaagttcat

SEQ ID NO: 174594 - DNA, 25 bp, Artificial
  Probe
ggtgtgtagtgtctcaatatcacgt

SEQ ID NO: 174595 - DNA, 25 bp, Artificial
  Probe
tctaagcacagtaatgtttgagcca

SEQ ID NO: 174596 - DNA, 25 bp, Artificial
  Probe
tttctaagttcattggatctgagat

SEQ ID NO: 174597 - DNA, 25 bp, Artificial
  Probe
atttctaagttcattggatctgaga

SEQ ID NO: 174598 - DNA, 25 bp, Artificial
  Probe
tctcaattccattagactgaaggtt

SEQ ID NO: 174599 - DNA, 25 bp, Artificial
  Probe
gtgccacctaatctcaattccatta

SEQ ID NO: 174600 - DNA, 25 bp, Artificial
  Probe
atctcaattccattagactgaaggt

SEQ ID NO: 174601 - DNA, 25 bp, Artificial
  Probe
attccattagactgaaggttaatcc

SEQ ID NO: 174602 - DNA, 25 bp, Artificial
  Probe
aatctcaattccattagactgaagg

SEQ ID NO: 174603 - DNA, 25 bp, Artificial
  Probe
ctcaattccattagactgaaggtta

SEQ ID NO: 174604 - DNA, 25 bp, Artificial
  Probe
tcaattccattagactgaaggttaa

SEQ ID NO: 174605 - DNA, 25 bp, Artificial
  Probe
caactcaatggagacaattaggtgc

SEQ ID NO: 174606 - DNA, 25 bp, Artificial
  Probe
tggatgtgtaagagagagaaatgtt

SEQ ID NO: 174607 - DNA, 25 bp, Artificial
  Probe
atggatgtgtaagagagagaaatgt

SEQ ID NO: 174608 - DNA, 25 bp, Artificial
  Probe
tagactttcactcaggactcagaat

SEQ ID NO: 174609 - DNA, 25 bp, Artificial
  Probe
ttccattagactgaaggttaatccc

SEQ ID NO: 174610 - DNA, 25 bp, Artificial
  Probe
ggatgtgtaagagagagaaatgttt

SEQ ID NO: 174611 - DNA, 25 bp, Artificial
  Probe
ccaactcaatggagacaattaggtg

SEQ ID NO: 174612 - DNA, 25 bp, Artificial
  Probe
caattccattagactgaaggttaat

SEQ ID NO: 174613 - DNA, 25 bp, Artificial
  Probe
ttcactcaggactcagaatcaggtt

SEQ ID NO: 174614 - DNA, 25 bp, Artificial
  Probe
ctagactttcactcaggactcagaa

SEQ ID NO: 174615 - DNA, 25 bp, Artificial
  Probe
agactttcactcaggactcagaatc

SEQ ID NO: 174616 - DNA, 25 bp, Artificial
  Probe
ggttgcccactggttatagttaatt

SEQ ID NO: 174617 - DNA, 25 bp, Artificial
  Probe
aattccattagactgaaggttaatc

SEQ ID NO: 174618 - DNA, 25 bp, Artificial
  Probe
aactcaatggagacaattaggtgcc

SEQ ID NO: 174619 - DNA, 25 bp, Artificial
  Probe
tccattagactgaaggttaatcccg

SEQ ID NO: 174620 - DNA, 25 bp, Artificial
  Probe
tcactcaggactcagaatcaggttc

SEQ ID NO: 174621 - DNA, 25 bp, Artificial
  Probe
catggatgtgtaagagagagaaatg

SEQ ID NO: 174622 - DNA, 25 bp, Artificial
  Probe
actttcactcaggactcagaatcag

SEQ ID NO: 174623 - DNA, 25 bp, Artificial
  Probe
gactttcactcaggactcagaatca

SEQ ID NO: 174624 - DNA, 25 bp, Artificial
  Probe
tgtgtaagagagagaaatgtttcaa

SEQ ID NO: 174625 - DNA, 25 bp, Artificial
  Probe
aaccaagcacaacatccaactcaat

SEQ ID NO: 174626 - DNA, 25 bp, Artificial
  Probe
atgtgtaagagagagaaatgtttca

SEQ ID NO: 174627 - DNA, 25 bp, Artificial
  Probe
ttaaccaaccaaccaagcacaacat

SEQ ID NO: 174628 - DNA, 25 bp, Artificial
  Probe
acatggatgtgtaagagagagaaat

SEQ ID NO: 174629 - DNA, 25 bp, Artificial
  Probe
ctttcactcaggactcagaatcagg

SEQ ID NO: 174630 - DNA, 25 bp, Artificial
  Probe
gttgcccactggttatagttaatta

SEQ ID NO: 174631 - DNA, 25 bp, Artificial
  Probe
gatgtgtaagagagagaaatgtttc

SEQ ID NO: 174632 - DNA, 25 bp, Artificial
  Probe
taatctcaattccattagactgaag

SEQ ID NO: 174633 - DNA, 25 bp, Artificial
  Probe
gccacctaatctcaattccattaga

SEQ ID NO: 174634 - DNA, 25 bp, Artificial
  Probe
tgccacctaatctcaattccattag

SEQ ID NO: 174635 - DNA, 25 bp, Artificial
  Probe
ccacctaatctcaattccattagac

SEQ ID NO: 174636 - DNA, 25 bp, Artificial
  Probe
taaccaaccaaccaagcacaacatc

SEQ ID NO: 174637 - DNA, 25 bp, Artificial
  Probe
agagagagaaatgtttcaattcatc

SEQ ID NO: 174638 - DNA, 25 bp, Artificial
  Probe
gagagagaaatgtttcaattcatct

SEQ ID NO: 174639 - DNA, 25 bp, Artificial
  Probe
tgagtcactaccaatatttcaatgt

SEQ ID NO: 174640 - DNA, 25 bp, Artificial
  Probe
gtgtaagagagagaaatgtttcaat

SEQ ID NO: 174641 - DNA, 25 bp, Artificial
  Probe
tgcccactggttatagttaattatt

SEQ ID NO: 174642 - DNA, 25 bp, Artificial
  Probe
ttgcccactggttatagttaattat

SEQ ID NO: 174643 - DNA, 25 bp, Artificial
  Probe
gaagatgactggatggagaacattg

SEQ ID NO: 174644 - DNA, 25 bp, Artificial
  Probe
aagatgactggatggagaacattga

SEQ ID NO: 174645 - DNA, 25 bp, Artificial
  Probe
agatgactggatggagaacattgac

SEQ ID NO: 174646 - DNA, 25 bp, Artificial
  Probe
gaaggttgactgtaaggagttggaa

SEQ ID NO: 174647 - DNA, 25 bp, Artificial
  Probe
cgaagatgactggatggagaacatt

SEQ ID NO: 174648 - DNA, 25 bp, Artificial
  Probe
aaggttgactgtaaggagttggaac

SEQ ID NO: 174649 - DNA, 25 bp, Artificial
  Probe
ctgtgctctaggatgtctgatgttg

SEQ ID NO: 174650 - DNA, 25 bp, Artificial
  Probe
ctgaaggttgactgtaaggagttgg

SEQ ID NO: 174651 - DNA, 25 bp, Artificial
  Probe
agtaaacccagtggaaactagaatt

SEQ ID NO: 174652 - DNA, 25 bp, Artificial
  Probe
gagtaaacccagtggaaactagaat

SEQ ID NO: 174653 - DNA, 25 bp, Artificial
  Probe
cttcatggtagaggtgagtggaatg

SEQ ID NO: 174654 - DNA, 25 bp, Artificial
  Probe
tgatgagctgaaggttgactgtaag

SEQ ID NO: 174655 - DNA, 25 bp, Artificial
  Probe
tgaaggttgactgtaaggagttgga

SEQ ID NO: 174656 - DNA, 25 bp, Artificial
  Probe
gtgatgagctgaaggttgactgtaa

SEQ ID NO: 174657 - DNA, 25 bp, Artificial
  Probe
gttgactgtaaggagttggaacctc

SEQ ID NO: 174658 - DNA, 25 bp, Artificial
  Probe
ttgactgtaaggagttggaacctct

SEQ ID NO: 174659 - DNA, 25 bp, Artificial
  Probe
gctgaaggttgactgtaaggagttg

SEQ ID NO: 174660 - DNA, 25 bp, Artificial
  Probe
ggagtaaacccagtggaaactagaa

SEQ ID NO: 174661 - DNA, 25 bp, Artificial
  Probe
gatgagctgaaggttgactgtaagg

SEQ ID NO: 174662 - DNA, 25 bp, Artificial
  Probe
ctctctacattccttcagggatcat

SEQ ID NO: 174663 - DNA, 25 bp, Artificial
  Probe
actgtaaggagttggaacctctcag

SEQ ID NO: 174664 - DNA, 25 bp, Artificial
  Probe
gactgtaaggagttggaacctctca

SEQ ID NO: 174665 - DNA, 25 bp, Artificial
  Probe
tgactgtaaggagttggaacctctc

SEQ ID NO: 174666 - DNA, 25 bp, Artificial
  Probe
catggtagaggtgagtggaatgaaa

SEQ ID NO: 174667 - DNA, 25 bp, Artificial
  Probe
atgagctgaaggttgactgtaagga

SEQ ID NO: 174668 - DNA, 25 bp, Artificial
  Probe
tctctacattccttcagggatcatg

SEQ ID NO: 174669 - DNA, 25 bp, Artificial
  Probe
tgtgctctaggatgtctgatgttgg

SEQ ID NO: 174670 - DNA, 25 bp, Artificial
  Probe
ccgaagatgactggatggagaacat

SEQ ID NO: 174671 - DNA, 25 bp, Artificial
  Probe
ccttcatggtagaggtgagtggaat

SEQ ID NO: 174672 - DNA, 25 bp, Artificial
  Probe
ggtagaggtgagtggaatgaaaatc

SEQ ID NO: 174673 - DNA, 25 bp, Artificial
  Probe
agctgaaggttgactgtaaggagtt

SEQ ID NO: 174674 - DNA, 25 bp, Artificial
  Probe
gctgtgctctaggatgtctgatgtt

SEQ ID NO: 174675 - DNA, 25 bp, Artificial
  Probe
gtagaggtgagtggaatgaaaatct

SEQ ID NO: 174676 - DNA, 25 bp, Artificial
  Probe
agttggaacctctcagcttcagtag

SEQ ID NO: 174677 - DNA, 25 bp, Artificial
  Probe
ctctacattccttcagggatcatgg

SEQ ID NO: 174678 - DNA, 25 bp, Artificial
  Probe
tcatggtagaggtgagtggaatgaa

SEQ ID NO: 174679 - DNA, 25 bp, Artificial
  Probe
ttcatggtagaggtgagtggaatga

SEQ ID NO: 174680 - DNA, 25 bp, Artificial
  Probe
ggtgagtggaatgaaaatctaggtt

SEQ ID NO: 174681 - DNA, 25 bp, Artificial
  Probe
gtgagtggaatgaaaatctaggttt

SEQ ID NO: 174682 - DNA, 25 bp, Artificial
  Probe
tgagctgaaggttgactgtaaggag

SEQ ID NO: 174683 - DNA, 25 bp, Artificial
  Probe
gaggtgagtggaatgaaaatctagg

SEQ ID NO: 174684 - DNA, 25 bp, Artificial
  Probe
agaggtgagtggaatgaaaatctag

SEQ ID NO: 174685 - DNA, 25 bp, Artificial
  Probe
tggtagaggtgagtggaatgaaaat

SEQ ID NO: 174686 - DNA, 25 bp, Artificial
  Probe
atggtagaggtgagtggaatgaaaa

SEQ ID NO: 174687 - DNA, 25 bp, Artificial
  Probe
gtaaacccagtggaaactagaattc

SEQ ID NO: 174688 - DNA, 25 bp, Artificial
  Probe
catctattccttatcagcctactcc

SEQ ID NO: 174689 - DNA, 25 bp, Artificial
  Probe
tgtcatctattccttatcagcctac

SEQ ID NO: 174690 - DNA, 25 bp, Artificial
  Probe
gtcatctattccttatcagcctact

SEQ ID NO: 174691 - DNA, 25 bp, Artificial
  Probe
aatgtcatctattccttatcagcct

SEQ ID NO: 174692 - DNA, 25 bp, Artificial
  Probe
caatgtcatctattccttatcagcc

SEQ ID NO: 174693 - DNA, 25 bp, Artificial
  Probe
tcatctattccttatcagcctactc

SEQ ID NO: 174694 - DNA, 25 bp, Artificial
  Probe
atgtcatctattccttatcagccta

SEQ ID NO: 174695 - DNA, 25 bp, Artificial
  Probe
acaatgtcatctattccttatcagc

SEQ ID NO: 174696 - DNA, 25 bp, Artificial
  Probe
atctattccttatcagcctactccc

SEQ ID NO: 174697 - DNA, 25 bp, Artificial
  Probe
gaaagaggatgacaaggaaattgac

SEQ ID NO: 174698 - DNA, 25 bp, Artificial
  Probe
ctattccttatcagcctactcccac

SEQ ID NO: 174699 - DNA, 25 bp, Artificial
  Probe
tctattccttatcagcctactccca

SEQ ID NO: 174700 - DNA, 25 bp, Artificial
  Probe
aaagaggatgacaaggaaattgacc

SEQ ID NO: 174701 - DNA, 25 bp, Artificial
  Probe
aacaatgtcatctattccttatcag

SEQ ID NO: 174702 - DNA, 25 bp, Artificial
  Probe
cgaaagaggatgacaaggaaattga

SEQ ID NO: 174703 - DNA, 25 bp, Artificial
  Probe
tattccttatcagcctactcccact

SEQ ID NO: 174704 - DNA, 25 bp, Artificial
  Probe
gatttcagaaacactcacatcacca

SEQ ID NO: 174705 - DNA, 25 bp, Artificial
  Probe
gagcagatcagtgatttcagaaaca

SEQ ID NO: 174706 - DNA, 25 bp, Artificial
  Probe
atttcagaaacactcacatcaccac

SEQ ID NO: 174707 - DNA, 25 bp, Artificial
  Probe
ggagcagatcagtgatttcagaaac

SEQ ID NO: 174708 - DNA, 25 bp, Artificial
  Probe
atcgaaagaggatgacaaggaaatt

SEQ ID NO: 174709 - DNA, 25 bp, Artificial
  Probe
tggagcagatcagtgatttcagaaa

SEQ ID NO: 174710 - DNA, 25 bp, Artificial
  Probe
ctccatagacgtgtaaatagcttgt

SEQ ID NO: 174711 - DNA, 25 bp, Artificial
  Probe
tccatagacgtgtaaatagcttgtg

SEQ ID NO: 174712 - DNA, 25 bp, Artificial
  Probe
aagaggatgacaaggaaattgacct

SEQ ID NO: 174713 - DNA, 25 bp, Artificial
  Probe
cctccatagacgtgtaaatagcttg

SEQ ID NO: 174714 - DNA, 25 bp, Artificial
  Probe
agcagatcagtgatttcagaaacac

SEQ ID NO: 174715 - DNA, 25 bp, Artificial
  Probe
acctccatagacgtgtaaatagctt

SEQ ID NO: 174716 - DNA, 25 bp, Artificial
  Probe
tcgaaagaggatgacaaggaaattg

SEQ ID NO: 174717 - DNA, 25 bp, Artificial
  Probe
attccttatcagcctactcccactc

SEQ ID NO: 174718 - DNA, 25 bp, Artificial
  Probe
catagacgtgtaaatagcttgtgca

SEQ ID NO: 174719 - DNA, 25 bp, Artificial
  Probe
agaggatgacaaggaaattgacctg

SEQ ID NO: 174720 - DNA, 25 bp, Artificial
  Probe
ccatagacgtgtaaatagcttgtgc

SEQ ID NO: 174721 - DNA, 25 bp, Artificial
  Probe
ctggagcagatcagtgatttcagaa

SEQ ID NO: 174722 - DNA, 25 bp, Artificial
  Probe
ggagtcctatcaaaacaatgtcatc

SEQ ID NO: 174723 - DNA, 25 bp, Artificial
  Probe
gattgtactctcctgcctcatagcc

SEQ ID NO: 174724 - DNA, 25 bp, Artificial
  Probe
tttcagaaacactcacatcaccacc

SEQ ID NO: 174725 - DNA, 25 bp, Artificial
  Probe
gagtcctatcaaaacaatgtcatct

SEQ ID NO: 174726 - DNA, 25 bp, Artificial
  Probe
tgatttcagaaacactcacatcacc

SEQ ID NO: 174727 - DNA, 25 bp, Artificial
  Probe
ataaacagttttccacctcgtcaat

SEQ ID NO: 174728 - DNA, 25 bp, Artificial
  Probe
taaacagttttccacctcgtcaatt

SEQ ID NO: 174729 - DNA, 25 bp, Artificial
  Probe
ttccttatcagcctactcccactct

SEQ ID NO: 174730 - DNA, 25 bp, Artificial
  Probe
aaacaatgtcatctattccttatca

SEQ ID NO: 174731 - DNA, 25 bp, Artificial
  Probe
cacctccatagacgtgtaaatagct

SEQ ID NO: 174732 - DNA, 25 bp, Artificial
  Probe
agcacctccatagacgtgtaaatag

SEQ ID NO: 174733 - DNA, 25 bp, Artificial
  Probe
atgttcccagtatctttgcacaaac

SEQ ID NO: 174734 - DNA, 25 bp, Artificial
  Probe
catgttcccagtatctttgcacaaa

SEQ ID NO: 174735 - DNA, 25 bp, Artificial
  Probe
gtttacatgttcccagtatctttgc

SEQ ID NO: 174736 - DNA, 25 bp, Artificial
  Probe
tttacatgttcccagtatctttgca

SEQ ID NO: 174737 - DNA, 25 bp, Artificial
  Probe
tgtttacatgttcccagtatctttg

SEQ ID NO: 174738 - DNA, 25 bp, Artificial
  Probe
tgggagcgccttattatttcttatt

SEQ ID NO: 174739 - DNA, 25 bp, Artificial
  Probe
gtgggagcgccttattatttcttat

SEQ ID NO: 174740 - DNA, 25 bp, Artificial
  Probe
ttcccagtatctttgcacaaaccag

SEQ ID NO: 174741 - DNA, 25 bp, Artificial
  Probe
ttacatgttcccagtatctttgcac

SEQ ID NO: 174742 - DNA, 25 bp, Artificial
  Probe
gggagcgccttattatttcttatta

SEQ ID NO: 174743 - DNA, 25 bp, Artificial
  Probe
atgtttacatgttcccagtatcttt

SEQ ID NO: 174744 - DNA, 25 bp, Artificial
  Probe
agtgggagcgccttattatttctta

SEQ ID NO: 174745 - DNA, 25 bp, Artificial
  Probe
gttcccagtatctttgcacaaacca

SEQ ID NO: 174746 - DNA, 25 bp, Artificial
  Probe
attaagtgggagcgccttattattt

SEQ ID NO: 174747 - DNA, 25 bp, Artificial
  Probe
aattaagtgggagcgccttattatt

SEQ ID NO: 174748 - DNA, 25 bp, Artificial
  Probe
gaattaagtgggagcgccttattat

SEQ ID NO: 174749 - DNA, 25 bp, Artificial
  Probe
cacgcctacctctccatgtttacat

SEQ ID NO: 174750 - DNA, 25 bp, Artificial
  Probe
ttaagtgggagcgccttattatttc

SEQ ID NO: 174751 - DNA, 25 bp, Artificial
  Probe
tgttcccagtatctttgcacaaacc

SEQ ID NO: 174752 - DNA, 25 bp, Artificial
  Probe
taagtgggagcgccttattatttct

SEQ ID NO: 174753 - DNA, 25 bp, Artificial
  Probe
agaattaagtgggagcgccttatta

SEQ ID NO: 174754 - DNA, 25 bp, Artificial
  Probe
tacatgttcccagtatctttgcaca

SEQ ID NO: 174755 - DNA, 25 bp, Artificial
  Probe
aagtgggagcgccttattatttctt

SEQ ID NO: 174756 - DNA, 25 bp, Artificial
  Probe
ggagcgccttattatttcttattat

SEQ ID NO: 174757 - DNA, 25 bp, Artificial
  Probe
tactccgtgactacctgagttcctt

SEQ ID NO: 174758 - DNA, 25 bp, Artificial
  Probe
acatgttcccagtatctttgcacaa

SEQ ID NO: 174759 - DNA, 25 bp, Artificial
  Probe
ccatgtttacatgttcccagtatct

SEQ ID NO: 174760 - DNA, 25 bp, Artificial
  Probe
tccatgtttacatgttcccagtatc

SEQ ID NO: 174761 - DNA, 25 bp, Artificial
  Probe
ctccatgtttacatgttcccagtat

SEQ ID NO: 174762 - DNA, 25 bp, Artificial
  Probe
cagaattaagtgggagcgccttatt

SEQ ID NO: 174763 - DNA, 25 bp, Artificial
  Probe
tcccagtatctttgcacaaaccagg

SEQ ID NO: 174764 - DNA, 25 bp, Artificial
  Probe
catgtttacatgttcccagtatctt

SEQ ID NO: 174765 - DNA, 25 bp, Artificial
  Probe
ctacctctccatgtttacatgttcc

SEQ ID NO: 174766 - DNA, 25 bp, Artificial
  Probe
cctacctctccatgtttacatgttc

SEQ ID NO: 174767 - DNA, 25 bp, Artificial
  Probe
gtactccgtgactacctgagttcct

SEQ ID NO: 174768 - DNA, 25 bp, Artificial
  Probe
tctccatgtttacatgttcccagta

SEQ ID NO: 174769 - DNA, 25 bp, Artificial
  Probe
tacctctccatgtttacatgttccc

SEQ ID NO: 174770 - DNA, 25 bp, Artificial
  Probe
ctcgagtaggatggtagcacgtaac

SEQ ID NO: 174771 - DNA, 25 bp, Artificial
  Probe
gagcgccttattatttcttattatt

SEQ ID NO: 174772 - DNA, 25 bp, Artificial
  Probe
ctctccatgtttacatgttcccagt

SEQ ID NO: 174773 - DNA, 25 bp, Artificial
  Probe
gcctacctctccatgtttacatgtt

SEQ ID NO: 174774 - DNA, 25 bp, Artificial
  Probe
tgactacctgagttccttccccttc

SEQ ID NO: 174775 - DNA, 25 bp, Artificial
  Probe
gagtaggatggtagcacgtaaccag

SEQ ID NO: 174776 - DNA, 25 bp, Artificial
  Probe
cctctccatgtttacatgttcccag

SEQ ID NO: 174777 - DNA, 25 bp, Artificial
  Probe
acgcctacctctccatgtttacatg

SEQ ID NO: 174778 - DNA, 25 bp, Artificial
  Probe
attgagtaacatttgtggaaggaac

SEQ ID NO: 174779 - DNA, 25 bp, Artificial
  Probe
gattgagtaacatttgtggaaggaa

SEQ ID NO: 174780 - DNA, 25 bp, Artificial
  Probe
aaggattgagtaacatttgtggaag

SEQ ID NO: 174781 - DNA, 25 bp, Artificial
  Probe
aggattgagtaacatttgtggaagg

SEQ ID NO: 174782 - DNA, 25 bp, Artificial
  Probe
ggattgagtaacatttgtggaagga

SEQ ID NO: 174783 - DNA, 25 bp, Artificial
  Probe
caaggattgagtaacatttgtggaa

SEQ ID NO: 174784 - DNA, 25 bp, Artificial
  Probe
gagcaaggattgagtaacatttgtg

SEQ ID NO: 174785 - DNA, 25 bp, Artificial
  Probe
ctctttcttggtttctgagtctgag

SEQ ID NO: 174786 - DNA, 25 bp, Artificial
  Probe
ttgagtaacatttgtggaaggaaca

SEQ ID NO: 174787 - DNA, 25 bp, Artificial
  Probe
tctttcttggtttctgagtctgagg

SEQ ID NO: 174788 - DNA, 25 bp, Artificial
  Probe
tctaactaatcaaactgtgaccaga

SEQ ID NO: 174789 - DNA, 25 bp, Artificial
  Probe
gtctaactaatcaaactgtgaccag

SEQ ID NO: 174790 - DNA, 25 bp, Artificial
  Probe
tcgtctaactaatcaaactgtgacc

SEQ ID NO: 174791 - DNA, 25 bp, Artificial
  Probe
caccgagcaaggattgagtaacatt

SEQ ID NO: 174792 - DNA, 25 bp, Artificial
  Probe
taactaatcaaactgtgaccagagc

SEQ ID NO: 174793 - DNA, 25 bp, Artificial
  Probe
cgtctaactaatcaaactgtgacca

SEQ ID NO: 174794 - DNA, 25 bp, Artificial
  Probe
gcaaggattgagtaacatttgtgga

SEQ ID NO: 174795 - DNA, 25 bp, Artificial
  Probe
agcaaggattgagtaacatttgtgg

SEQ ID NO: 174796 - DNA, 25 bp, Artificial
  Probe
ctaactaatcaaactgtgaccagag

SEQ ID NO: 174797 - DNA, 25 bp, Artificial
  Probe
aatcgtctaactaatcaaactgtga

SEQ ID NO: 174798 - DNA, 25 bp, Artificial
  Probe
aaatcgtctaactaatcaaactgtg

SEQ ID NO: 174799 - DNA, 25 bp, Artificial
  Probe
cgagcaaggattgagtaacatttgt

SEQ ID NO: 174800 - DNA, 25 bp, Artificial
  Probe
atcgtctaactaatcaaactgtgac

SEQ ID NO: 174801 - DNA, 25 bp, Artificial
  Probe
ctaatcaaactgtgaccagagcatt

SEQ ID NO: 174802 - DNA, 25 bp, Artificial
  Probe
gtgttcttgtccctttctacctgaa

SEQ ID NO: 174803 - DNA, 25 bp, Artificial
  Probe
taatcaaactgtgaccagagcattg

SEQ ID NO: 174804 - DNA, 25 bp, Artificial
  Probe
tgagtaacatttgtggaaggaacac

SEQ ID NO: 174805 - DNA, 25 bp, Artificial
  Probe
gagtgttcttgtccctttctacctg

SEQ ID NO: 174806 - DNA, 25 bp, Artificial
  Probe
ccgagcaaggattgagtaacatttg

SEQ ID NO: 174807 - DNA, 25 bp, Artificial
  Probe
agtgttcttgtccctttctacctga

SEQ ID NO: 174808 - DNA, 25 bp, Artificial
  Probe
gagtaacatttgtggaaggaacacc

SEQ ID NO: 174809 - DNA, 25 bp, Artificial
  Probe
accgagcaaggattgagtaacattt

SEQ ID NO: 174810 - DNA, 25 bp, Artificial
  Probe
actaatcaaactgtgaccagagcat

SEQ ID NO: 174811 - DNA, 25 bp, Artificial
  Probe
aactaatcaaactgtgaccagagca

SEQ ID NO: 174812 - DNA, 25 bp, Artificial
  Probe
gctctttcttggtttctgagtctga

SEQ ID NO: 174813 - DNA, 25 bp, Artificial
  Probe
gcaatgggaaaatcgtctaactaat

SEQ ID NO: 174814 - DNA, 25 bp, Artificial
  Probe
tgttcttgtccctttctacctgaaa

SEQ ID NO: 174815 - DNA, 25 bp, Artificial
  Probe
tttgtaaaatcgctactgctttcta

SEQ ID NO: 174816 - DNA, 25 bp, Artificial
  Probe
ttttgtaaaatcgctactgctttct

SEQ ID NO: 174817 - DNA, 25 bp, Artificial
  Probe
ctttcttggtttctgagtctgaggc

SEQ ID NO: 174818 - DNA, 25 bp, Artificial
  Probe
cttttgtaaaatcgctactgctttc

SEQ ID NO: 174819 - DNA, 25 bp, Artificial
  Probe
ccttttgtaaaatcgctactgcttt

SEQ ID NO: 174820 - DNA, 25 bp, Artificial
  Probe
ggcaatgggaaaatcgtctaactaa

SEQ ID NO: 174821 - DNA, 25 bp, Artificial
  Probe
ttgtaaaatcgctactgctttctag

SEQ ID NO: 174822 - DNA, 25 bp, Artificial
  Probe
ctggagtgttcttgtccctttctac

SEQ ID NO: 174823 - DNA, 25 bp, Artificial
  Probe
aaagatgacccagatcatgtttgag

SEQ ID NO: 174824 - DNA, 25 bp, Artificial
  Probe
gacccagatcatgtttgagaccttc

SEQ ID NO: 174825 - DNA, 25 bp, Artificial
  Probe
aagatgacccagatcatgtttgaga

SEQ ID NO: 174826 - DNA, 25 bp, Artificial
  Probe
ccagatcatgtttgagaccttcaac

SEQ ID NO: 174827 - DNA, 25 bp, Artificial
  Probe
agatgacccagatcatgtttgagac

SEQ ID NO: 174828 - DNA, 25 bp, Artificial
  Probe
acccagatcatgtttgagaccttca

SEQ ID NO: 174829 - DNA, 25 bp, Artificial
  Probe
tgacccagatcatgtttgagacctt

SEQ ID NO: 174830 - DNA, 25 bp, Artificial
  Probe
cccagatcatgtttgagaccttcaa

SEQ ID NO: 174831 - DNA, 25 bp, Artificial
  Probe
gatgacccagatcatgtttgagacc

SEQ ID NO: 174832 - DNA, 25 bp, Artificial
  Probe
gaaaagatgacccagatcatgtttg

SEQ ID NO: 174833 - DNA, 25 bp, Artificial
  Probe
aaaagatgacccagatcatgtttga

SEQ ID NO: 174834 - DNA, 25 bp, Artificial
  Probe
tgaaaagatgacccagatcatgttt

SEQ ID NO: 174835 - DNA, 25 bp, Artificial
  Probe
atgacccagatcatgtttgagacct

SEQ ID NO: 174836 - DNA, 25 bp, Artificial
  Probe
gtgaaaagatgacccagatcatgtt

SEQ ID NO: 174837 - DNA, 25 bp, Artificial
  Probe
caaccgtgaaaagatgacccagatc

SEQ ID NO: 174838 - DNA, 25 bp, Artificial
  Probe
aaccgtgaaaagatgacccagatca

SEQ ID NO: 174839 - DNA, 25 bp, Artificial
  Probe
cgtgaaaagatgacccagatcatgt

SEQ ID NO: 174840 - DNA, 25 bp, Artificial
  Probe
ccaaccgtgaaaagatgacccagat

SEQ ID NO: 174841 - DNA, 25 bp, Artificial
  Probe
ccgtgaaaagatgacccagatcatg

SEQ ID NO: 174842 - DNA, 25 bp, Artificial
  Probe
accgtgaaaagatgacccagatcat

SEQ ID NO: 174843 - DNA, 25 bp, Artificial
  Probe
gaagatcaagatcattgctcctcct

SEQ ID NO: 174844 - DNA, 25 bp, Artificial
  Probe
tcctagcaccatgaagatcaagatc

SEQ ID NO: 174845 - DNA, 25 bp, Artificial
  Probe
ctcctagcaccatgaagatcaagat

SEQ ID NO: 174846 - DNA, 25 bp, Artificial
  Probe
aagatcaagatcattgctcctcctg

SEQ ID NO: 174847 - DNA, 25 bp, Artificial
  Probe
tgaagatcaagatcattgctcctcc

SEQ ID NO: 174848 - DNA, 25 bp, Artificial
  Probe
cctagcaccatgaagatcaagatca

SEQ ID NO: 174849 - DNA, 25 bp, Artificial
  Probe
gatcaagatcattgctcctcctgag

SEQ ID NO: 174850 - DNA, 25 bp, Artificial
  Probe
atgaagatcaagatcattgctcctc

SEQ ID NO: 174851 - DNA, 25 bp, Artificial
  Probe
tagcaccatgaagatcaagatcatt

SEQ ID NO: 174852 - DNA, 25 bp, Artificial
  Probe
ctagcaccatgaagatcaagatcat

SEQ ID NO: 174853 - DNA, 25 bp, Artificial
  Probe
catgaagatcaagatcattgctcct

SEQ ID NO: 174854 - DNA, 25 bp, Artificial
  Probe
agatcaagatcattgctcctcctga

SEQ ID NO: 174855 - DNA, 25 bp, Artificial
  Probe
accatgaagatcaagatcattgctc

SEQ ID NO: 174856 - DNA, 25 bp, Artificial
  Probe
caccatgaagatcaagatcattgct

SEQ ID NO: 174857 - DNA, 25 bp, Artificial
  Probe
agcaccatgaagatcaagatcattg

SEQ ID NO: 174858 - DNA, 25 bp, Artificial
  Probe
ccatgaagatcaagatcattgctcc

SEQ ID NO: 174859 - DNA, 25 bp, Artificial
  Probe
gcaccatgaagatcaagatcattgc

SEQ ID NO: 174860 - DNA, 25 bp, Artificial
  Probe
gctcctagcaccatgaagatcaaga

SEQ ID NO: 174861 - DNA, 25 bp, Artificial
  Probe
cttccttcctgggtatggaatcctg

SEQ ID NO: 174862 - DNA, 25 bp, Artificial
  Probe
ttccttcctgggtatggaatcctgt

SEQ ID NO: 174863 - DNA, 25 bp, Artificial
  Probe
ccttccttcctgggtatggaatcct

SEQ ID NO: 174864 - DNA, 1920 bp, Rattus norvegicus
tcgcgctccttacctggttgatcctgccagtagcatatgcttgtctcaaagattaagccatgcatgtctaagtacgcacggccggtacagtgaaactgcgaatggctcattaaatcagttatggttcctttgtcgctcgctcctctcctacttggataactgtggtaattctagagctaatacatgccgacgggcgctgaccccccttcccgtgggggggacgcgtgcatttatcagatcaaaaccaacccggtcagccccctcccggctccggccgggggtcgggcgccggacggctttggtgactctagataacctcgggccgatcgcacgccctccgtggcggcgacgacccattcgaacgtctgccctatcaactttcgatggtagtcgccgtgcctaccatggtgaccacgggtgacggggaatcagggttcgattccggagagggagcctgagaaacggctaccacatccaaggaaggcagcaggcgcgcaaattacccactcccgacccggggaggtagtgacgaaaaataacaatacaggactctttcgaggccctgtaattggaatgagtccactttaaatcctttaacgaggatccattggagggcaagtctggtgccagcagccgcggtaattccagctccaatagcgtatattaaagttgctgcagttaaaaagctcgtagttggatcttgggagcgggcgggcggtccgccgcgaggcgagtcaccgcccgtccccgccccttgcctctcggcgccccctcgatgctcttagctgagtgtcccgcggggcccgaagcgtttactttgaaaaaattagagtgttcaaagcaggcccgagccgcctagataccgcagctaggaataatggaataggaccgcggttctattttgttggttttcggaactgaggccatgattaagagggacggccgggggcattcgtattgcgccgctagaggtgaaattcttggaccggcgcaagacggaccagagcgaaagcatttgccaagaatgttttcattaatcaagaacgaaagtcggaggttcgaagacgatcagataccgtcgtagttccgaccataaacgatgccgactggcgatgcggcggcgttattcccatgacccgccgggcagcttccgggaaaccaaagtctttgggttccggggggagtatggttgcaaagctgaaacttaaaggaattgacggaagggcaccaccaggagtgggcctgcggcttaatttgactcaacacgggaaacctcacccggcccggacacggacaggattgacagattgatagctctttctcgattccgtgggtggtggtgcatggccgttcttagttggtggagcgatttgtctggttaattccgataacgaacgagactctggcatgctaactagttacgcgacccccgagcggtcggcgtcccccaacttcttagagggacaagtggcgttcagccacccgagattgagcaataacaggtctgtgatgcccttagatgtccggggctgcacgcgcgctacactgactggctcagcgtgtgcctaccctacgccggcaggcgcgggtaacccgttgaaccccattcgtgatggggatcggggattgcaattattccccatgaacgaggaattcccagtaagtgcgggtcataagcttgcgttgattaagtccctgccctttgtacacaccgcccgtcgctactaccgattggatggtttagtgaggccctcggatcggccccgccggggtcggcccacggccttgcggagcgctgagaagacggtcgaacttgactatctagaggaagtaaaagtcgtaacaaggtttccgtaggtgaacctgcggaaggatcattaacggagaaggccgaggggggtcgtcgtcccgtccctcttg

SEQ ID NO: 174865 - DNA, 1920 bp, Rattus norvegicus; identical to SEQ ID NO: 174864

SEQ ID NO: 174866 - DNA, 1920 bp, Rattus norvegicus; identical to SEQ ID NO: 174864

SEQ ID NO: 174867 - DNA, 511 bp, Rattus norvegicus
gggcccgtgttccatccagggcgggctgaggagggctggggaggctgtaggccacgcgaggcaggcaggcaggcaggcagcccccgggctggggcgtgcggatggggctcgggcaggggtgaggggcgcgcggaaggcaggacgcgacgactttcttaggtgtgggctctctgtcgtctgggctctgggctctgggctctgggctctgggctctgggctggggactcgggactcgggactcgggactcgggactcgggactcgggggcttggggcttgctggctgtctgacgtgccaccggtgggggtgggccgggcgggcctggcgggcggctgagcgagcgcagcaggtcggcgagggctgccctcgtctacggccataccaccctgaacgcgcccgatctcgtctgatctcggaagctaagcagggtcgggcctggttagtacttggatgggagaccgcctgggaataccgggtgctgtaggctttttggactcccttttggccgcgg

SEQ ID NO: 174868 - DNA, 4100 bp, Rattus norvegicus
  misc_feature (3859)..(3859): n is a, c, g, or t
acctcttcctcaactcacttctctctactctcacttttttttttcttcttcttttttttttttttttttttttttttttttgcaaaagaagggggtaaaaaaatgctgcactgtcgggcgaggccggtgagtgagcgagccggagccaatcagcgcccgccgttccgaaattgccttttatggctcgagtggccgctgtggcgtcctataaaacccggcggcgcaacgcgcgccactgtcgagtccgcgtccacccgcgagtacaacctccttgcagctcctccgtcccggtccacacccgccaccaggtaagcagggacgtcgggcccagcgggccccaactttaccttggccactacctcgctgcaggatcgtgaggaacactcagaagggacaccgtagaggggtggagcgtggtaccgggccgcggagcagctggcaaagcttaactttcccggcccctagggtgtagagtgtttgcagtcgtattcccgcggtgtggacactcgtgggtacgctcctgcttggtgcgcggggcttggggacacactagagtcgcggtgtgggcatttggagagccggtgcggctgcgggtgttaagccgcatctgtccaccttgaggggcaacagtattggggtcaggcgttacaatcacgctttgatggcctatgggtctttgtccaaaccggttttgccattcggcttggcgggcgcggcggggccgctcggccgggtgggggctgggatgccattgcgcgtgcgcgctctatcactgggcattggggccgtgcgcgctggggagggaactcttcctctccccctcttccgagttaagagttgcgcgtgcgtattgagactaggagcgcggccgccccgggttgggcgagggcgggccgtccaccggaaggggcggggtcgtagcggctaggcgcctgctcgcgcttcctgctgggtgtggtcgcctcccgcgcgcgcactagccgcccgtcgcctcagtgtaggcgggcctgtgcccgtttggggaggggcggaggcctggcttcctgccgtgggtccgcctccgggccagcgtttgccttttatggtaataatgcggctgtcctgcgcttcctttgtcccctgagcttgggcgcgcccctggcggctcgaggccgcggctcgccggaagtgggcagggcggcagcggctgctcttggcggctccgcggtgaccatagccctcttttgtgccttgatagttcgccatggatgacgatatcgctgcgctcgtcgtcgacaacggctccggcatgtgcaaggccggcttcgcgggcgacgatgctccccgggccgtcttcccctccatcgtgggccgccctaggcaccaggtaagtgaccctttactttgggagtggcagccctagggttttcttgggggtcgatgccagtgctgagaacgttgttctcctccgcagggtgtgatggtgggtatgggtcagaaggactcctacgtgggcgacgaggcccagagcaagagaggcatcctgaccctgaagtaccccattgaacacggcattgtaaccaactgggacgatatggagaagatttggcaccacactttctacaatgagctgcgtgtggcccctgaggagcaccctgtgctgctcaccgaggcccctctgaaccctaaggccaaccgtgaaaagatgacccaggtcagtatcctgggtgaccctccccttcttattgggtcaacttctcagcacgcccttctctaattgtctttcttctgccatgtcccataggactctcttctatgagctgagtctcccttggaactttgcagtttctgctctttcccagatgaggtcttttttttctctcgatcgcctttctgactaggtgttttaaacccctacagtgctgtgggtgtaggtactaacaatggctcgtgtgacaaagctaatgaggctggtgataaatggccttggagtgtgtattcagtagatgacagtaggtctaaatggagcccctgtcctgatactcccagcacacttaacttagctgtgttcttgccctctttgcatgtctcactcaaatctatccttacagtctcacctgccctgagtgtttcttgtggctttaggagcttgacaatactgtattcctttctctacagatcatgtttgagaccttcaacaccccagccatgtacgtagccatccaggctgtgttgtccctgtatgcctctggtcgtaccactggcattgtgatggactccggagacggggtcacccacactgtgcccatctatgagggttacgcgctccctcatgccatcctgcgtctggacctggctggccgggacctgacagactacctcatgaagatcctgaccgagcgtggctacagcttcaccaccacagctgagagggaaatcgtgcgtgacattaaagagaagctgtgctatgttgccctagacttcgagcaagagatggccactgccgcatcctcttcctccctggagaagagctatgagctgcctgacggtcaggtcatcactatcggcaatgagcggttccgatgccccgaggctctcttccagccttccttcctgggtaagttgtagtctcgtcccttctccatctaaaggtgaccaatgctggaggccacactgtaactctgatctcttgcttttcctttcaggtatggaatcctgtggcatccatgaaactacattcaattccatcatgaagtgtgacgttgacatccgtaaagacctctatgccaacacagtgctgtctggtggcaccaccatgtacccaggcatcgctgacaggatgcagaaggagattactgccctggctcctagcaccatgaagatcaaggtaagcagccttagcctggacccatagtggggtgtggtcagccctgtagttgtagccaactctcttggcttaaggaacaacccagcatccagaatgctcacaatcactgtcttgctttcttcagatcattgctcctcctgagcgcaagtactctgtgtggattggtggctctatcctggcctcactgtccaccttccagcagatgtggatcagcaagcaggagtacgatgagtccggcccctccatcgtgcaccgcaaatgcttctaggcggactgttactgagctgcgttttacaccctttctttgacaaaacctaacttgcgcagaaaaaaaaaatgagacatttggcatggctttattgtttttttgttttttgtttttgttttttttaaattttttttttaaaaaggttttttttttttgttttgttttggcgcttttgactcaaggatttaaaaactggaacggtgaaggcgaccgcagttggttggagcaaacatcccccaaagttctacaatgtggctgaggactttgattgtacattgttttttgtttttggtttttttaatagtcactccaagtatccacggcatagatggttacaggaagtccctcaccctcccaaaagccacccccaactcctaaggggaggatggctgcatccatgccctgagtccacaccgggaaggtgacagcattgcttctgtgtaaattatgtacttgcaaacatttttttaaatcttccgccttaatacttcatttttgtttttaatttctgaatggtcagccattcgtggcctgccccttttttttgtccccccaacttgatgtatgaaggctttggtctccctgggagtggtttgaggtgttgaggcgccagggctggcctgtacactgacgtgagaccgttttaataaaagtgcacaccttacaaacaagtttgtggctctgtggcttctactgggtgtggggagcaggctgggtgggtgtgnaactccacgtgggggaggggcaatttagggtgggctggccttgcctgatagctagtgggagggctaaaggatcatgatctttaatgaggtctcataaataccccaccttcggtcttgagggagggtgaggagttgggaaggtatctccctgacacctggccaagctggcctcatcaaccctactttcctcagccagggggaggtccacatcctcccacctgcatagcttgcgtctagaggc

SEQ ID NO: 174869 - DNA, 4100 bp, Rattus norvegicus; identical to SEQ ID NO: 174868
  misc_feature (3859)..(3859): n is a, c, g, or t

SEQ ID NO: 174870 - DNA, 4100 bp, Rattus norvegicus; identical to SEQ ID NO: 174868
  misc_feature (3859)..(3859): n is a, c, g, or t

SEQ ID NO: 174871 - DNA, 1272 bp, Rattus norvegicus
ctctctgctcctccctgttctagagacagccgcatcttcttgtgcagtgccagcctcgtctcatagacaagatggtgaaggtcggtgtgaacggatttggccgtatcggacgcctggttaccagggctgccttctcttgtgacaaagtggacattgttgccatcaacgaccccttcattgacctcaactacatggtctacatgttccagtatgactctacccacggcaagttcaacggcacagtcaaggctgagaatgggaagctggtcatcaacgggaaacccatcaccatcttccaggagcgagatcccgtcaagatcaaatggggtgatgctggtgctgagtatgtcgtggagtctactggcgtcttcaccaccatggagaaggctggggctcacctgaagggtggggccaaaagggtcatcatctccgccccttccgctgatgcccccatgtttgtgatgggtgtgaaccacgagaaatatgacaactccctcaagattgtcagcaatgcatcctgcaccaccaactgcttagcccccctggccaaggtcatccatgacaactttggcatcgtggaagggctcatgaccacagtccatgccatcactgccactcagaagactgtggatggcccctctggaaagctgtggcgtgatggccgtggggcagcccagaacatcatccctgcatccactggtgctgccaaggctgtgggcaaggtcatcccagagctgaacgggaagctcactggcatggccttccgtgttcctacccccaatgtatccgttgtggatctgacatgccgcctggagaaacctgccaagtatgatgacatcaagaaggtggtgaagcaggcggccgagggcccactaaagggcatcctgggctacactgaggaccaggttgtctcctgtgacttcaacagcaactcccattcttccacctttgatgctggggctggcattgctctcaatgacaacattgtgaagctcatttcctggtatgacaatgaatatggctacagcaacagggtggtggacctcatggcctacatggcctccaaggagtaagaaaccctggaccacccagcccagcaaggatactgagagcaagagagaggccctcagttgctgaggagtccccatcccaactcagcccccaacactgagcatctccctcacaattccatcccagaccccataacaacaggaggggcctggggagccctcccttctctcgaataccatcaataaagttcgctgcaccctc

SEQ ID NO: 174872 - DNA, 1272 bp, Rattus norvegicus; identical to SEQ ID NO: 174871

SEQ ID NO: 174873 - DNA, 1272 bp, Rattus norvegicus; identical to SEQ ID NO: 174871

SEQ ID NO: 174874 - DNA, 3653 bp, Rattus norvegicus; identical to SEQ ID NO: 3766

SEQ ID NO: 174875 - DNA, 3653 bp, Rattus norvegicus; identical to SEQ ID NO: 3766

SEQ ID NO: 174876 - DNA, 3653 bp, Rattus norvegicus; identical to SEQ ID NO: 3766

SEQ ID NO: 174877 - DNA, 150 bp, Rattus norvegicus
ctaggtctgtgtgatctggctggaatgacacacctttaatccctctggctggaatatagacatgactttatgagtcaagccagtctgatctacagagtgagttctgggacagccaagactatatagagaaaccctatctcaaaaaaaaaa

SEQ ID NO: 174878 - DNA, 187 bp, Rattus norvegicus
aaggctggaagatggctcagtggttaggagcactggctacccttcttgaggacctgggttcagttccctgcgcccacaagtggctcacaactgaggactccagtcctaggaaatcccatgaactccaaaagggcaactcatgtagtacacttacaaacacacaggtaaatacttacagacataaaat

SEQ ID NO: 174879 - DNA, 1049 bp, Escherichia coli
atggctcaccgcccacgctggacattgtcgcaagtcacagaattatttgaaaaaccgttgctggatctgctgtttgaagcgcagcaggtgcatcgccagcatttcgatcctcgtcaggtgcaggtcagcacgttgctgtcgattaagaccggagcttgtccggaagattgcaaatactgcccgcaaacgtcgcgctacaaaaccgggctggaagccgagcggttgatggaagttgaacaggtgctggagtcggcgcgcaaagcgaaagcggcaggatcgacgcgcttctgtatgggcgcggcgtggaagaatccccacgaacgcgatatgccgtacctggaacaaatggtgcagggggtaaaagcgatggggctggaggcgtgtatgacgctgggcacgttgagtgaatctcaggcgcagcgcctcgcgaacgccgggctggattactacaaccacaacctggacacctcgccggagttttacggcaatatcatcaccacacgcacttatcaggaacgcctcgatacgctggaaaaagtgcgcgatgccgggatcaaagtctgttctggcggcattgtgggcttaggcgaaacggtaaaagatcgcgccggattattgctgcaactggcaaacctgccgacgccgccggaaagcgtgccaatcaacatgctggtgaaggtgaaaggcacgccgcttgccgataacgatgatgtcgatgcctttgattttattcgcaccattgcggtcgcgcggatcatgatgccaacctcttacgtgcgcctttctgccggacgcgagcagatgaacgaacagactcaggcgatgtgctttatggcaggcgcaaactcgattttctacggttgcaaactgctgaccacgccgaatccggaagaagataaagacctgcaactgttccgcaaactggggctaaatccgcagcaaactgccgtgctggcaggggataacgaacaacagcaacgtcttgaacaggcgctgatgaccccggacaccgacgaatattacaacgcggcagcattatgagctggcag

SEQ ID NO: 174880 - DNA, 1049 bp, Escherichia coli; identical to SEQ ID NO: 174879

SEQ ID NO: 174881 - DNA, 1049 bp, Escherichia coli; identical to SEQ ID NO: 174879

SEQ ID NO: 174882 - DNA, 748 bp, Escherichia coli
atggcaacggttaataaacaagccattgcagcggcatttggtcgggcagccgcacactatgagcaacatgcagatctacagcgccagagtgctgacgccttactggcaatgcttccacagcgtaaatacacccacgtactggacgcgggttgtggacctggctggatgagccgccactggcgggaacgtcacgcgcaggtgacggccttagatctctcgccgccaatgcttgttcaggcacgccagaaggatgccgcagaccattatctggcgggagatatcgaatccctgccgttagcgactgcgacgttcgatcttgcatggagcaatctcgcagtgcagtggtgcggtaatttatccacggcactccgcgagctgtatcgggtggtgcgccccaaaggcgtggtcgcgtttaccacgctggtgcagggatcgttacccgaacgtcatcaggcgtggcaggcggtggacgagcgtccgcatgctaatcgctttttaccgccagatgaaatcgaacagtcgctgaacggcgtgcattatcaacatcatattcagcccatcacgctgtggtttgatgatgcgctcagtgccatgcgttcgctgaaaggcatcggtgccacgcatcttcatgaagggcgcgacccgcgaatattaacgcgttcgcagttgcagcgattgcaactggcctggccgcaacagcaggggcgatatcctctgacgtatcatctttttttgggagtgattgctc

SEQ ID NO: 174883 - DNA, 748 bp, Escherichia coli; identical to SEQ ID NO: 174882

SEQ ID NO: 174884 - DNA, 652 bp, Escherichia coli
aaacgttattttgtcaccggaacggataccgaagtggggaaaactgtcgccagttgtgcacttttacaagccgcaaaggcagcaggctaccggacggcaggttataaaccggtcgcctctggcagcgaaaagaccccggaaggtttacgcaatagcgacgcgctggcgttacagcgcaacagcagcctgcagctggattacgcaacagtaaatccttacaccttcgcagaacccacttcgccgcacatcatcagcgcgcaagagggcagaccgatagaatcattggtaatgagcgccggattacgcgcgcttgaacaacaggctgactgggtgttagtggaaggtgctggcggctggtttacgccgctttctgacactttcacttttgcagattgggtaacacaggaacaactgccggtgatactggtagttggtgtgaaactcggctgtattaatcacgcgatgttgactgcacaggtaatacaacacgccggactgactctggcgggttgggtggcgaacgatgttacgcctccgggaaaacgtcacgctgaatatatgaccacgctcacccgcatgattcccgcgccgctgctgggagagatcccctggcttgcagaaaatccagaaaatgcggcaaccggaaagtaca

SEQ ID NO: 174885 - DNA, 652 bp, Escherichia coli; identical to SEQ ID NO: 174884

SEQ ID NO: 174886 - DNA, 1032 bp, Bacteriophage P1
atgtccaatttactgaccgtacaccaaaatttgcctgcattaccggtcgatgcaacgagtgatgaggttcgcaagaacctgatggacatgttcagggatcgccaggcgttttctgagcatacctggaaaatgcttctgtccgtttgccggtcgtgggcggcatggtgcaagttgaataaccggaaatggtttcccgcagaacctgaagatgttcgcgattatcttctatatcttcaggcgcgcggtctggcagtaaaaactatccagcaacatttgggccagctaaacatgcttcatcgtcggtccgggctgccacgaccaagtgacagcaatgctgtttcactggttatgcggcggatccgaaaagaaaacgttgatgccggtgaacgtgcaaaacaggctctagcgttcgaacgcactgatttcgaccaggttcgttcactcatggaaaatagcgatcgctgccaggatatacgtaatctggcatttctggggattgcttataacaccctgttacgtatagccgaaattgccaggatcagggttaaagatatctcacgtactgacggtgggagaatgttaatccatattggcagaacgaaaacgctggttagcaccgcaggtgtagagaaggcacttagcctgggggtaactaaactggtcgagcgatggatttccgtctctggtgtagctgatgatccgaataactacctgttttgccgggtcagaaaaaatggtgttgccgcgccatctgccaccagccagctatcaactcgcgccctggaagggatttttgaagcaactcatcgattgatttacggcgctaaggatgactctggtcagagatacctggcctggtctggacacagtgcccgtgtcggagccgcgcgagatatggcccgcgctggagtttcaataccggagatcatgcaagctggtggctggaccaatgtaaatattgtcatgaactatatccgtaacctggatagtgaaacaggggcaatggtgcgcctgctggaagatggcgattag

SEQ ID NO: 174887 - DNA, 1032 bp, Bacteriophage P1; identical to SEQ ID NO: 174886

SEQ ID NO: 174888 - DNA, 6540 bp, Bacillus subtilis
gggactaccctaaataaggatgaggggcggcggtcagccgccttttttctattacatgtcagcgcggaagcggatttttattttcatcaagcgtaaatccttctccgagcacatcgtgaacatcgcttaccgctacaaaggcatggggatcaatggagttaatcacgcttttcagcatcaccaattcatttttcggcaccacacaataaagtacatctatatcctcttttgtgtaggaaccttgtcctttcaaaatggtgacgccccgttccatttcttcaagaatctttttctgaatcaggtcgtttttcgaagagatgatcgtagcgcctttagcagcgtatccgccttcctgaataaaatcgattaatcttgccgctacaaatacagctaccagcgtatacatcgcttctttataggagagataagtaagcaaagacaaaatgatgacgcaggcatcgaaagcaaacatcgttctgcccatcggaatcccaaaatacttattcactaaacgtgcgatgatatcaacaccgcctgtcgtaccgccgaacttaaaaataatacccagtccggctccgatgaatacgccggcaaataaagcggcgagcgctaagtcgtgctgaaggggcatatggatttcatatcgctgaaagatgctgaggaacaaagacaaggctacagtgccgacaagggtataaacaaacattgtcctgccgagcatgtggaaaagggcataaagcaaaagtgtaatacctgtaaaaccgccctcagccagattgttctgcatattgaaatgaaccaagccaaatgaaaaaattgccgctccgattaaaataaaaaatatgttttttaatctaatttctccaagcatcacacaaaaccccttttccttccattagatagcgtttatattatagtggatgaaaaagaaaacagcaaacgtgcttaaacatttgtcaaacgtatctgaattagctaacatgtaagaggatgataggaggtttcgttcagtgagtgataaaacaatgaaagacatacaggctgaagtagaccgttacataggccaatttaaagaaggatattttagcccgctggccatgatggcgaggctgactgaagaactgggcgagcttgccagagaagtgaatcaccgttatggagaaaaaccaaaaaaagcgactgaagatgataaaagcatggaagaggaaataggcgatgtgctatttgtattggtttgtttagccaactctcttgatatctctttagaggaagctcacgaccgagtcatgcataaatttaatacaagagataaagatcgctggaccagaaaagaagaaggaaagtagaggagatcaagatgtcaaacgaaacaattaaattagtcattgcgggaccgcgtggaagaatggggcaggaagctgttaaattggcagaacgaacaccacattttgaccttgtaggggccatagaccatacatacgatcagcaaaaattatctgatgtgatgcctgttgagtcagatgctttcatttacacagatatccatgcctgttttacagaaacacaaccggatgtcttgattgatttaacaacgcccgaaatcggaaaagtacatacaaaaattgcattagagcacggagtccgtccagttgtcggaacaaccggtttctcagaagctgatttaaaagagctcacatctttaacagaagaaaaagggatcggagccatcatcgcgccaaattttgcgctcggtgcgatactgatgatgaaattttcaaaaatggctgccaactattttgaggatgttgagattattgagcttcatcatgaccagaagcttgacgcaccaagcggaactgcgcttaaaacagcggaaatgatttcagaagtccgtaaagaaaagcagcaaggacatccggatgaaaaagaaattctcccaggagcaagaggagcggagcaaaacggtattcgcttgcacaggcttcagatacgccatgattcttataaccgtgcttctttcatgtcaggcgttaaactgtcagtcgaacaagtcatgaagattgatcagcttgtgtatggtttagaaaatatcattgattagacggggggataaacaatgaaaattgctttgatcgcgcatgacaagaaaaaacaggatatggttcaatttacgactgcctatcgggatattttaaagaatcatgatctatacgcaaccggaaccacagggttgaaaattcatgaggcgacaggtcttcaaattgaacgttttcaatccggccctttagggggagaccagcaaatcggtgcactgatcgctgccaatgcactcgatcttgtcatttttttgcgcgacccgctgaccgcgcagccgcatgaaccggatgtctcggcattaatccgtttatgtgatgtgtattccattccgctcgccacaaatatgggtactgcggaaattcttgtgcgcacacttgatgaaggtgttttcgaattccgtgaccttcttcggggagaagagccgaatgtataatgctgacgttcttgcttttggcgcccacagtgatgatgtcgagatcggaatgggcggcacaatagcgaagtttgtcaaacaggaaaaaaaagtaatgatatgcgatttgacagaagcggaactctcttctaacggtacggtcagtttgcgtaaagaagaagcagctgaagcagcccgcatattaggcgcagataaaagaattcagctaacgcttccagaccgcggcctaataatgagtgatcaggcaattcggtcaattgtcactgtcatcagaatctgtcggccaaaagcggtttttatgccgtataaaaaggatcgccatccggatcacggcaatgcggctgcactggtggaagaagcgatcttttccgccggaatccataaatataaagacgaaaaaagccttccggcgcataaagtcagcaaggtttactattatatgataaatggttttcatcagccggattttgttattgatatctcggatacaatagaggcaaagaaacaaagcctcaacgcctacaaaagccagtttatcccgtcaaaggattccgtttctactcctctgacgaatgggtatattgaaatcgttgaagcgagagaaaagctttacggtaaagaagcgggcgtggagtatgccgaagtttcttttccaaacggatgctgatgcttgatcatgatgtgcttgggggcgaacaatgagaaaactagggaagcagcttgctgaaaagggacatgaaatccatttcatcacatcaagcattccgtttagactgaatacatatcatcccaatattcattttcatgaagttgaggttaatcaatatgctgtttttaagtatcctccgtatgatttgacattggcaagcaaaatcgctgaggtggcggaacgggagaatttagacattatccatgctcactatgctctcccgcatgccgtttgcgcctatcttgcaaaacaaatgctgaaacgcaatatcggcattgttaccactttgcatggcacggatatcacggtgttaggttatgatccgtctctaaaagatctgatccgttttgctattgagtcatcagacagggtgacggccgtctcctcagcgcttgcggctgaaacatacgatttaattaaaccggagaaaaaaattgaaacgatttataactttatagacgagcgcgtgtatctgaagaaaaacacagcggcaattaaagagaaacatggaattttaccagatgaaaaagtcgtcatccatgtgtccaacttcagaaaagttaaacgcgtgcaggatgtcatccgtgtgttccgcaatatcgctggcaaaacgaaagcgaagctgcttttagtcggagacggtccggagaaatcgacagcctgcgagcttatcagaaaatatggcttggaagaccaagtcttaatgcttggaaatcaagaccgtgttgaagatctttattctattagcgatttgaagctgctgctatctgaaaaagaaagctttggccttgtcctgcttgaagcgatggcttgcggagtgccttgtattggaacaaacattggcggtatccctgaggttataaaaaacaatgtgagcggatttttggtggatgtcggtgatgttacggccgcaacagcccgcgcgatgagcattttagaagatgaacagctaagcaatcgttttacaaaggcggcaatagagatgcttgaaaatgaattttcttctaaaaaaattgtcagccagtatgaacagatttatgccgatttagcagaaccggagtgatcacatggaaaaagtttttatcaaagcacttcccgtgctccgcatcttaatcgaagcgggccatcaggcttattttgtcgggggcgcagttcgtgacagctatatgaaacgaacgatcggagatgtcgatatcgcgacagatgcggcacctgatcaagtagaacggctgtttcagcggactgttgatgtaggcaaagatgaatctgattatgttgatttcagaagaccgtcagaagtgcaatttatctcatcattagaagaggatctaaaacgcagagatttaacgatcaatgcgatggccatgacagcggacgggaaggtgcttgattattttggcggcaagaaagatattgatcagaaagtgattcgaaccgttggaaagcctgaggatagatttcaagaggatgcgcttcgtatgctgagagccgtacgctttatgagccagcttggctttacgctttcaccggaaacagaagaagccattgcgaaagaaaaatcactcctctcccatgtttcagtcgaacgaaaaactatagagtttgagaaattgctgcagggaagagcttctcgccaggcgcttcaaacactcattcaaacgagattgtatgaagagcttcctggtttttatcataaacgagaaaacctgatttcaacgagtgagtttccattcttctctttaacatcccgtgaggagctttgggctgctcttttaattaaccttggcatagttttgaaagacgcgccccttttcctgaaagcctggaagctcccgggaaaagtgatcaaggaagccattcacattgccgatacgtttggccagagccttgacgcaatgacaatgtacagagctgggaaaaaagcactgctctcagcggccaaaatatcgcagcttcggcaaaacgaaaaactggatgaaaagaaactgaaggacattcagtacgcttatcaaaacctgccgatcaaaagccttaaggatcttgatatcacgggtaaggacttgcttgcgcttcgaaaccggccggccggaaaatgggtgtcagaagaattacagtggatcgagcaggctgttgtgacagggaagctctccaatcaaaagaaacacatagaggagtggctgaagacatgcggtcaacattaagaaaagaccttattgaattattttctcaggccggcaatgaatttatttccggccaaaaaatcagtgatgctctcggctgttcaagaactgctgtgtggaagcatattgaagagcttcggaaagagggttatgaagtagaagccgttagaagaaaaggatatcggctcatcaaaaaacccggaaaactcagtgaaagcgaaattcgttttggattaaaaacggaagtgatgggccagcatcttatttaccatgacgttctttcaagcacgcaaaaaacggctcatgagctcgcgaataataacgcaccggaaggcacccttgaaggaaacggtgtttggatgagcctgattttgcggcctgacattccgctccaaaaaacaccgcagctgactctgcttgctgcagtagctgttgtgcagggaatagaagaggcagcaggcatccaaacggatattaaatggccaaatgatattttgattaacggaaaaaaaacagtcggtatcctaacggaaatgcaggctgaagaagaccgcgtacgttcagtgatcattgggatcggcattaacgttaaccagcagcctaatgattttccagatgaattgaaggacatcgcgacaagcctcagccaagctgctggggaaaaaattgatcgggccggcgtcatccagcatattttactatgctttgagaaacggtaccgggattatatgacgcacggatttacgccgattaagcttttatgggaaagctatgcgctcggtattggcactaatatgagagccagaacgttaaacggaaccttttacggtaaggcgttaggtatagatgatgaaggcgttctgcttttagaaacgaacgaaggcattaaaaaaatctattctgccgatatcgaattgggctaatgtgttggtacaagcccgttgattttggtatacttccattgggcagtatcgcctgcgaactgcacctattattaaaatagatagacattgcagcagtctgccttgatccaaaaaaggactgggacagagggatgaaactcgccgaactttagaaagtgaagaatccttctcgttgtaacggaaggttttttggcttgc

SEQ ID NO: 174889 - DNA, 6540 bp, Bacillus subtilis; identical to SEQ ID NO: 174888

SEQ ID NO: 174890 - DNA, 6540 bp, Bacillus subtilis; identical to SEQ ID NO: 174888

SEQ ID NO: 174891 - DNA, 1612 bp, Bacillus subtilis
aagcttggcaacaaatgagccgtcttgtcctcatgatactcgttgctttatttcatataaaagggctcgtcatcggatttacagtgctaattatgccatggcaagcatcaaatcccttcagacaccgtacttatggccgctgattccctttaacggaaaggcgctgtggcaggtgcttgtcccgacagcgaaacctggcgcaaaagtaagacccagcatcgttcaccccaaaaatcgcttaaggcagcctaccaattcataatcgcattgaaactgactgaagagtatgataatgtatgtcttaattatgaagggacagtccataaaactgtcctttcatccataagcggagaaagagggaatgacattgttcttacacggcacaagcagacaaaatcaacatggtcatttagaaatcggaggtgtggatgctctctatttagcggagaaatatggtacacctctttacgtatatgatgtggctttaatacgtgagcgtgctaaaagctttaagcaggcgtttatttctgcagggctgaaagcacaggtggcatatgcgagcaaagcattctcatcagtcgcaatgattcagctcgctgaggaagagggactttctttagatgtcgtatccggaggagagctatatacggctgttgcagcaggctttccggcagaacgcatccactttcatggaaacaataagagcagggaagaactgcggatggcgcttgagcaccgcatcggctgcattgtggtggataatttctatgaaatcgcgcttcttgaagacctatgtaaagaaacgggtcactccatcgatgttcttcttcggatcacgcccggagtagaagcgcatacgcatgactacattacaacgggccaggaagattcaaagtttggtttcgatcttcataacggacaaactgaacgggccattgaacaagtattacaatcggaacacattcagctgctgggtgtccattgccatatcggctcgcaaatctttgatacggccggttttgtgttagcagcggaaaaaatcttcaaaaaactagacgaatggagagattcatattcatttgtatccaaggtgctgaatcttggaggaggtttcggtattcgttatacggaagatgatgaaccgcttcatgccactgaatacgttgaaaaaattatcgaagctgtgaaagaaaatgcttcccgttacggttttgacattccggaaatttggatcgaaccgggccgttctctcgtgggagacgcaggcacaactctttatacggttggctctcaaaaagaagtggataagctgtacaatcgtttcatcattcggcgtgcgaattaagaaaggtctcattgcgcctgtaaagcttacgcgtatttctgctccttcaagcacctttagtgcatccagcatatattttggactaaaagagatatttaattcctcaccttcaatttgatccgcaacaattgcttccacaactttaccgatttctggcgaattggaagaaatttcaatggattcagccggttttgcggacagttttacaacgttgttgcgtccctctctagctaaaagagatgcacgatcaatggcctgaaggaattc

SEQ ID NO: 174892 - DNA, 1612 bp, Bacillus subtilis; identical to SEQ ID NO: 174891

SEQ ID NO: 174893 - DNA, 1612 bp, Bacillus subtilis; identical to SEQ ID NO: 174891

SEQ ID NO: 174894 - DNA, 3360 bp, Bacillus subtilis
  misc_feature (2982)..(2982): n is a, c, g, or t
ataatacacacttatacagactcctaaataagaaattaaatgattgggagtgcgaaaatgaaggatgtttcaaaaaatcaagaagaaaatataagcgacacggcattaacaaacgaactgattcatctgcttggccattcccggcatgattggatgaataagctgcagctgattaaaggaaacttaagcttacagaagtatgaccgtgtctttgaaatgattgaagaaatggttatagacgcaaagcacgaatcaaagctctcaaacctgaaaacaccgcatttggcgtttgattttcttacgtttaattggaaaacccattatatgacgcttgaatatgaagttctcggagaaattaaggatttgtcggcttatgatcaaaagctggcgaaactgatgagaaagctgtttcatctgtttgatcaagcagtcagcagagagagtgaaaatcatttaacggtttcgcttcaaacggatcatcctgacagacagctgattctgtaccttgattttcacggcgcctttgccgatccatctgcttttgatgatattcggcagaatggatatgaggacgttgatatcatgcgttttgaaatcacgagtcacgaatgtctgattgaaattgggttggactagcggagtttttaacggtttagaacggaggacattatgtttgtagatcaggtcaaagtatatgtaaaaggcggcgacggcggcaacggtatggttgcgtttcgccgtgaaaaatatgtgccgaaaggcggccctgccggcggtgacggaggaaagggaggagacgtcgtttttgaagtagatgaaggtctccgcaccctgatggattttagatacaaaaaacactttaaagcgattcgcggcgagcatggcatgtccaaaaaccagcacgggcgaaatgctgatgatatggtcattaaagttccgccgggcaccgttgtgacagacgatgatacaaaacaggtcatcgctgatttaacagagcacggacagcgggctgtcattgcaagaggcggaagaggcggaagaggaaatagccgctttgctacaccggctaatcccgcgcctcagctttcagaaaacggcgagccgggaaaagaacgctacattgttcttgaattaaaagtgcttgcagatgtcggacttgtcgggttcccgagtgtgggaaaatctactttgctgtctgttgtctcatctgcaaaaccgaaaattgcggactatcactttacaacgcttgtcccgaatctcggcatggttgaaacggatgacggacgcagctttgtcatggctgatttgccagggctgattgaaggcgcacaccaaggcgtcggactgggccaccagtttttgcgccatattgaacggacgagggttattgttcatgtcattgacatgtcaggcttagaaggccgtgatccatatgatgattatcttacgattaaccaggagctgagcgagtacaatctgcgtctcactgagcgtccgcaaattatcgttgcaaataaaatggacatgccggaggctgcggaaaatctcgaagcctttaaagaaaagctgacggatgattatccggtattcccgatcagtgcggtgacaagagaaggtctgcgtgagcttctgtttgaggttgccaatcagcttgagaacacaccggaattcccgctgtatgacgaggaagagcttacacaaaaccgtgtcatgtacacgatggaaaatgaagaagtgccatttaacattacacgcgatccagacggtgtatttgtgctttcaggagacagccttgagcggttattcaagatgactgatttctcacgtgatgaatcggttaaacggtttgcaagacagatgcgcggaatgggtgttgatgaagcactcagagaacgcggagccaaggatggagatataatcaggcttctggaatttgaatttgaatttattgattaatcaatgttggctgaaaagagagcctggtgccaggctctctattttaaaggggggatgcaaatgaaagaggagacattttatcttgtccgtgaagatgtattgcccgatgcaatgagaaaaacattagaagtcaaaaagctgcttgatcgacaaaaagcagattcagtagcagatgccgttcaaaaggtcgatttaagtagaagtgcgttttataaatacagggatgctgtttttccattctacaccatggtaaaagaacaaattatcacacttttctttcatttggaggataggtcaggtgcgttatctcagcttcttcaggcggtagctgattctggaagcaacgttctttccattcaccagaccattccgcttcaaggcagagcaaatgtgacactgtctatcagtacgtcggcaatggaagaagacattcatacattaatgaataagctcaggaagtttgattttgtagaaaaggttgaaatattaggttcaggtgcataagggagagaaaatcgtcatgaaagtcggttatttaggtccagcagctacatttacacatctagcagtcagttcttgttttcaaaacggcgccgaacatgttgcttaccgcaccattccggagtgtatagatgcagccgttgcaggcgaagttgattttgcttttgttcctttggaaaatgctttagaaggatctgttaatctaacaatagactatttaatacatgaacagcctttgccaatcgtgggtgaaatgacgttgccgattcaccagcacttgctcgtccatccctcaagagagaatgcatggaaagagctcgacaaaatttactcacattcacacgcgattgcgcaatgccataaatttcttcatcgacattttccttccgttccatatgaatacgccaattctaccggggcggcagcaaagtttgtcagtgaccatcccgagctgaatatcggggtcattgccaatgatatggcagcttctacatacgaattaaaaatcgtgaaacgggatatacnggattatagggacaatcatacaagatttattatcctgtctcccgatgaaaacatatcttttgaagtgaattcaaaattgagctctaggcccaaaacgaccttaatggtcatgctgccgcaggatgatcagtccggggcgctgcatagagtgctgtctgcattttcttggagaaatttaaacctgtcaaaaattgagtcacgtccgactaaaaccggattaggccattatttctttattattgatattgagaaagcgtttgatgatgtattgattccaggggccatgcaggagcttgaagcactcggctgcaaagtgaggcttctgggtgcataccagtcttaccaattataaaaaaagcccactagagggcttttttt

SEQ ID NO: 174895 - DNA, 3360 bp, Bacillus subtilis; identical to SEQ ID NO: 174894
  misc_feature (2982)..(2982): n is a, c, g, or t

SEQ ID NO: 174896 - DNA, 3360 bp, Bacillus subtilis; identical to SEQ ID NO: 174894
  misc_feature (2982)..(2982): n is a, c, g, or t

SEQ ID NO: 174897 - DNA, 2403 bp, Bacillus subtilis
gaattcatgtaaaagatgaggttggttcattctcgaaaattacatctgtgttctcagagcggggcgtgacgtttgaaaaaatccttcagctgccaattaaaggccatgatgagttagctgaaatcgtaattgtcacacatcatacatcagaagctgatttcagtgatatcctgcaaaacctaaatgatttggaagtcgttcaagaagtcaaaagcacatatcgtgtagaagggaacggttggagctaatgtggaaaggacttatccatcaatataaagaatttttacctgtaacagatcaaacaccggcgctaactttacatgaaggaaacacacctcttattcacctgccgaagctgtctgagcagctcggaattgagcttcatgtcaaaacggaaggcgtcaatcctacgggatcatttaaagatcgcggaatggttatggctgtggcaaaggcaaaagaagaaggcaatgacacgattatgtgcgcgtcaacaggtaacacttccgctgctgcggcagcatatgcagcccgtgctaacatgaaatgcattgtcatcatcccgaacggaaaaattgcatttggaaaactcgctcaagctgtcatgtacggagccgagattatcgcaattgacggaaactttgacgatgcgcttaaaattgtccgttccatctgtgagaaatcaccgattgcccttgtcaactcagtcaacccttaccgcattgaaggccaaaaaactgctgccttcgaagtgtgcgaacagctgggggaagcgcctgatgttttagcgatcccggtcggaaatgctggaaacatcactgcgtactggaagggcttcaaggaatatcatgagaaaaacggcacaggccttccgaaaatgcgcggctttgaagctgagggtgcggcggcaatcgtgcgcaatgaagtgattgaaaatccggaaacaatagcgacagccattcgtatcggaaacccggcaagctgggacaaagctgtaaaggcagccgaggaatccaatgggaaaattgacgaagtcactgatgatgaaatccttcacgcatatcagctgatcgcccgtgtagaaggcgtgtttgcagaaccaggttcttgcgcgtctatcgcaggagtgctgaaacaggtgaaatccggagaaattccgaaaggcagcaaggtcgtagctgtgttaacaggaaacggactgaaagatccgaacacagcggtcgacatttcagaaatcaagcctgtcacattgccgactgatgaagacagcatccttgaatatgtaaaaggagcggcccgtgtatgaacgaagccgacatgctgttctctgtcactgttcccggaagcacagctaacctaggccccggctttgattcagtcggaatggcgctcagcagatatttgaagctgaccgtctttgaaagcgacaaatggtcttttgaggctgaaacagaaacagtcgccggaattccgggcggtacagataacctgatctaccaagtggctaaacggaccgcagatttgtacggaaaagaaatgcctcctgtccatgtgaaggtgtggagcgacatcccgcttgcacgcggccttggcagcagcgccgcagcgattgtagcggccattgaactggctgatgaattatgcggcttaaagctgtctgaagcggacaagctgcatttagcgagtctagaagaaggacacccggacaatgctggcgcttctctcgtcggcggacttgtgatcggcctgcatgaggatgacgagacccaaatgatccgcgtcccgaatgctgacattgacgtagtcgttgtcattcctttttatgaagtgctgacaagagacgcgagagacgtgcttccgaaggagtttccatatgccgatgccgtaaaagcaagtgctgtcagcaatatcctcattgctgcgatcatgtccaaggattggccgcttgtcgggaaaatcatgaagaaggatatgttccatcagccgtaccgggcgatgcttgtgcctgagctgtcaaaagtagagcacgtcgccgagatgaagggcgcatatggaacggctctcagcggagcaggcccaacgattctcgtcatgaccgaaaaaggaaagggagaagagctaaaagaacagctcgcgcttcatttccctcattgtgaagtagacgctttgaccgttccgaaagagggaagtataatagagcgaaatcctttatatcaagtaaaaagtgtatagatcatgccaagcgttcctcagcgtcagcggagggcgcctttttttgctggagataaaggagttttattagaaacgaatacatgtaaaggaggagatgaatatgaaaagctgataaccgcagacgacatcacagcgattgtctctgtgaccagtcctcaatacgccccagac

SEQ ID NO: 174898 - DNA, 2403 bp, Bacillus subtilis; identical to SEQ ID NO: 174897

SEQ ID NO: 174899 - DNA, 2525 bp, Bacillus subtilis
ctcgagccaacaccgagagagacatacggcgggtgtattgcctacattgggtttgacgggaatatcgactcttgtattacgattcgcacgatgagtgtaaagaacggtgttgcatcgatacaggcaggtgctggcattgttgctgattctgttccggaagccgaatacgaagaaagctgtaataaagccggtgcgctgctgaaaacgattcatattgcagaagacatgtttcatagcaaggaggataaagctgatgaacagatttctacaattgtgcgttgacggaaaaacccttactgccggtgaggctgaaacgctgatgaatatgatgatggcagcggaaatgactccttctgaaatgggggggatattgtcaattcttgctcatcggggggagacgccagaagagcttgcgggttttgtgaaggcaatgcgggcacacgctcttacagtcgatggacttcctgatattgttgatacatgcggaacagggggagacggtatttccacttttaatatctcaacggcctcggcaattgttgcctcggcagctggtgcgaaaatcgctaagcatggcaatcgctctgtctcttctaaaagcggaagcgctgatgttttagaggagctagaggtttctattcaaaccactcccgaaaaggtcaaaagcagcattgaaacaaacaacatgggatttctttttgcgccgctttaccattcgtctatgaaacatgtagcaggtactagaaaagagctaggtttcagaacggtatttaatctgcttgggccgctcagcaatcctttacaggcgaagcgtcaggtgattggggtctattctgttgaaaaagctggactgatggcaagcgcactggagacgtttcagccgaagcacgtcatgtttgtatcaagccgtgacggtttagatgagctttcaattacagcaccgaccgacgtgattgaattaaaggacggagagcgccgggaatataccgtttcacccgaagatttcggtttcacaaatggcagacttgaagatttacaggtgcagtcaccgaaagagagcgcctatctcattcagaatatttttgaaaataaaagcagcagttccgctttatctattacggcttttaatgcgggagctgcgatttacacggcgggaattaccgcctcactgaaggaaggaacggagctggcgttagagacgattacaagcggaggcgctgccgcgcagcttgaacgactaaagcagaaagaggaagagatctatgcttgaaaaaatcatcaaacaaaagaaagaagaagtgaaaacactggttttgccggtagagcagcctttcgagaaacgttcatttaaggaggcgctggcaagcccgaatcggtttatcgggttgattgccgaagtgaagaaagcatcgccgtcaaaagggcttattaaagaggattttgtgcctgtgcagattgcaatagactatgaggctgcgaaggcagatgcgatttccgttttaacagacaccccgttttttcaaggggaaaacagttatttatcagacgtaaagcgtgctgtttcgattcctgtacttagaaaagattttattcttgattctcttcaagtagaggaatcaagaagaatcggagcggatgccatattgttaatcggcgaggtgcttgatcccttacaccttcatgaattatatcttgaagcaggtgaaaaggggatggacgtgttagtggaggttcatgatgcatcaacgctagaacaaatattgaaagtgttcacacccgacattctcggcgtaaataatcgaaacctaaaaacgtttgaaacatctgtaaagcagacagaacaaatcgcatctctcgttccgaaagaatccttgcttgtcagcgaaagcggaatcggttctttagaacatttaacatttgtcaatgaacatggggcgcgagctgtacttatcggtgaatcattgatgagacaaacttctcagcgtaaagcaatccatgctttgtttagggagtgaggttgtgaagaaaccggcattaaaatattgcggtattcggtcactaaaggatttgcagcttgcggcggaatcacaggctgattacctaggatttatttttgctaaaagcaaacgaaaagtatctccggaagatgtgaaaaaatggctgaaccaagttcgtgtcgaaaaacaggttgcaggtgtttttgttaatgaatcaatagagacgatgtcacgtattgccaagagcttgaagctcgacgtcattcagcttcacggtgatgaaaaaccggcggatgctgctgctcttcgcaagctgacaggctgtgaaatatggaaggcgcttcaccatcaagataacacaactcaagaaatagcccgctttaaagataatgttgacggctttgtgattgattcatctgtaaaagggtctagaggcggaactggtgttgcattttcttgggaatgtgtgccggaatatcagcaggcggctattggtaaacgctgttttatcgcaggcggcgtggatcc

SEQ ID NO: 174900 - DNA, 2525 bp, Bacillus subtilis; identical to SEQ ID NO: 174899

SEQ ID NO: 174901 - DNA, 2525 bp, Bacillus subtilis; identical to SEQ ID NO: 174899

SEQ ID NO: 174902 - DNA, 4100 bp, Rattus norvegicus; identical to SEQ ID NO: 174868
  misc_feature (3859)..(3859): n is a, c, g, or t

SEQ ID NO: 174903 - DNA, 4100 bp, Rattus norvegicus; identical to SEQ ID NO: 174868
  misc_feature (3859)..(3859): n is a, c, g, or t

SEQ ID NO: 174904 - DNA, 4100 bp, Rattus norvegicus; identical to SEQ ID NO: 174868
  misc_feature (3859)..(3859): n is a, c, g, or t

SEQ ID NO: 174905 - DNA, 1049 bp, Escherichia coli
atggctcaccgcccacgctggacattgtcgcaagtcacagaattatttgaaaaaccgttgctggatctgctgtttgaagcgcagcaggtgcatcgccagcatttcgatcctcgtcaggtgcaggtcagcacgttgctgtcgattaagaccggagcttgtccggaagattgcaaatactgcccgcaaagctcgcgctacaaaaccgggctggaagccgagcggttgatggaagttgaacaggtgctggagtcggcgcgcaaagcgaaagcggcaggatcgacgcgcttctgtatgggcgcggcgtggaagaatccccacgaacgcgatatgccgtacctggaacaaatggtgcagggggtaaaagcgatggggctggaggcgtgtatgacgctgggcacgttgagtgaatctcaggcgcagcgcctcgcgaacgccgggctggattactacaaccacaacctggacacctcgccggagttttacggcaatatcatcaccacacgcacttatcaggaacgcctcgatacgctggaaaaagtgcgcgatgccgggatcaaagtctgttctggcggcattgtgggcttaggcgaaacggtaaaagatcgcgccggattattgctgcaactggcaaacctgccgacgccgccggaaagcgtgccaatcaacatgctggtgaaggtgaaaggcacgccgcttgccgataacgatgatgtcgatgcctttgattttattcgcaccattgcggtcgcgcggatcatgatgccaacctcttacgtgcgcctttctgccggacgcgagcagatgaacgaacagactcaggcgatgtgctttatggcaggcgcaaactcgattttctacggttgcaaactgctgaccacgccgaatccggaagaagataaagacctgcaactgttccgcaaactggggctaaatccgcagcaaactgccgtgctggcaggggataacgaacaacagcaacgtcttgaacaggcgctgatgaccccggacaccgacgaatattacaacgcggcagcattatgagctggcag

SEQ ID NO: 174906 - DNA, 1049 bp, Escherichia coli; identical to SEQ ID NO: 174905

SEQ ID NO: 174907 - DNA, 1049 bp, Escherichia coli; identical to SEQ ID NO: 174905

SEQ ID NO: 174908 - DNA, 1049 bp, Escherichia coli; identical to SEQ ID NO: 174905

SEQ ID NO: 174909 - DNA, 1049 bp, Escherichia coli; identical to SEQ ID NO: 174905

SEQ ID NO: 174910 - DNA, 1049 bp, Escherichia coli; identical to SEQ ID NO: 174905

SEQ ID NO: 174911 - DNA, 1049 bp, Escherichia coli; identical to SEQ ID NO: 174905

SEQ ID NO: 174912 - DNA, 1049 bp, Escherichia coli; identical to SEQ ID NO: 174905

SEQ ID NO: 174913 - DNA, 1049 bp, Escherichia coli; identical to SEQ ID NO: 174905

SEQ ID NO: 174914 - DNA, 1049 bp, Escherichia coli; identical to SEQ ID NO: 174905

SEQ ID NO: 174915 - DNA, 1049 bp, Escherichia coli; identical to SEQ ID NO: 174905

SEQ ID NO: 174916 - DNA, 1049 bp, Escherichia coli; identical to SEQ ID NO: 174905

SEQ ID NO: 174917 - DNA, 1049 bp, Escherichia coli; identical to SEQ ID NO: 174905

SEQ ID NO: 174918 - DNA, 1049 bp, Escherichia coli; identical to SEQ ID NO: 174905

SEQ ID NO: 174919 - DNA, 1049 bp, Escherichia coli; identical to SEQ ID NO: 174905

SEQ ID NO: 174920 - DNA, 751 bp, Escherichia coli
atggcaacggttaataaacaagccattgcagcggcatttggtcgggcagccgcacactatgagcaacatgcagatctacagcgccagagtgctgacgccttactggcaatgcttccacagcgtaaatacacccacgtactggacgcgggttgtggacctggctggatgagccgccactggcgggaacgtcacgcgcaggtgacggccttagatctctcgccgccaatgcttgttcaggcacgccagaaggatgccgcagaccattatctggcgggagatatcgaatccctgccgttagcgactgcgacgttcgatcttgcatggagcaatctcgcagtgcagtggtgcggtaatttatccacggcactccgcgagctgtatcgggtggtgcgccccaaaggcgtggtcgcgtttaccacgctggtgcagggatcgttacccgaactgcatcaggcgtggcaggcggtggacgagcgtccgcatgctaatcgctttttaccgccagatgaaatcgaacagtcgctgaacggcgtgcattatcaacatcatattcagcccatcacgctgtggtttgatgatgcgctcagtgccatgcgttcgctgaaaggcatcggtgccacgcatcttcatgaagggcgcgacccgcgaatattaacgcgttcgcagttgcagcgattgcaactggcctggccgcaacagcaggggcgatatcctctgacgtatcatctttttttgggagtgattgctcgtg

SEQ ID NO: 174921 - DNA, 751 bp, Escherichia coli; identical to SEQ ID NO: 174920

SEQ ID NO: 174922 - DNA, 751 bp, Escherichia coli; identical to SEQ ID NO: 174920

SEQ ID NO: 174923 - DNA, 751 bp, Escherichia coli; identical to SEQ ID NO: 174920

SEQ ID NO: 174924 - DNA, 751 bp, Escherichia coli; identical to SEQ ID NO: 174920

SEQ ID NO: 174925 - DNA, 751 bp, Escherichia coli; identical to SEQ ID NO: 174920

SEQ ID NO: 174926 - DNA, 751 bp, Escherichia coli; identical to SEQ ID NO: 174920

SEQ ID NO: 174927 - DNA, 751 bp, Escherichia coli; identical to SEQ ID NO: 174920

SEQ ID NO: 174928 - DNA, 751 bp, Escherichia coli; identical to SEQ ID NO: 174920

SEQ ID NO: 174929 - DNA, 751 bp, Escherichia coli; identical to SEQ ID NO: 174920

SEQ ID NO: 174930 - DNA, 661 bp, Escherichia coli
gtgagtaaacgttattttgtcaccggaacggataccgaagtggggaaaactgtcgccagttgtgcacttttacaagccgcaaaggcagcaggctaccggacggcaggttataaaccggtcgcctctggcagcgaaaagaccccggaaggtttacgcaatagcgacgcgctggcgttacagcgcaacagcagcctgcagctggattacgcaacagtaaatccttacaccttcgcagaacccacttcgccgcacatcatcagcgcgcaagagggcagaccgatagaatcattggtaatgagcgccggattacgcgcgcttgaacaacaggctgactgggtgttagtggaaggtgctggcggctggtttacgccgctttctgacactttcacttttgcagattgggtaacacaggaacaactgccggtgatactggtagttggtgtgaaactcggctgtattaatcacgcgatgttgactgcacaggtaatacaacacgccggactgactctggcgggttgggtggcgaacgatgttacgcctccgggaaaacgtcacgctgaatatatgaccacgctcacccgcatgattcccgcgccgctgctgggagagatcccctggcttgcagaaaatccagaaaatgcggcaaccggaaagtacataa

SEQ ID NO: 174931 - DNA, 661 bp, Escherichia coli; identical to SEQ ID NO: 174930

SEQ ID NO: 174932 - DNA, 661 bp, Escherichia coli; identical to SEQ ID NO: 174930

SEQ ID NO: 174933 - DNA, 661 bp, Escherichia coli; identical to SEQ ID NO: 174930

SEQ ID NO: 174934 - DNA, 661 bp, Escherichia coli; identical to SEQ ID NO: 174930

SEQ ID NO: 174935 - DNA, 661 bp, Escherichia coli; identical to SEQ ID NO: 174930

SEQ ID NO: 174936 - DNA, 1032 bp, Bacteriophage P1
atgtccaatttactgaccgtacaccaaaatttgcctgcattaccggtcgatgcaacgagtgatgaggttcgcaagaacctgatggacatgttcagggatcgccaggcgttttctgagcatacctggaaaatgcttctgtccgtttgccggtcgtgggcggcatggtgcaagttgaataaccggaaatggtttcccgcagaacctgaagatgttcgcgattatcttctatatcttcaggcgcgcggtctggcagtaaaaactatccagcaacatttgggccagctaaacatgcttcatcgtcggtccgggctgccacgaccaagtgacagcaatgctgtttcactggttatgcggcggatccgaaaagaaaacgttgatgccggtgaacgtgcaaaacaggctctagcgttcgaacgcactgatttcgaccaggttcgttcactcatggaaaatagcgatcgctgccaggatatacgtaatctggcatttctggggattgcttataacaccctgttacgtatagccgaaattgccaggatcagggttaaagatatctcacgtactgacggtgggagaatgttaatccatattggcagaacgaaaacgctggttagcaccgcaggtgtagagaaggcacttagcctgggggtaactaaactggtcgagcgatggatttccgtctctggtgtagctgatgatccgaataactacctgttttgccgggtcagaaaaaatggtgttgccgcgccatctgccaccagccagctatcaactcgcgccctggaagggatttttgaagcaactcatcgattgatttacggcgctaaggatgactctggtcagagatacctggcctggtctggacacagtgcccgtgtcggagccgcgcgagatatggcccgcgctggagtttcaataccggagatcatgcaagctggtggctggaccaatgtaaatattgtcatgaactatatccgtaacctggatagtgaaacaggggcaatggtgcgcctgctggaagatgccgattag

SEQ ID NO: 174937 - DNA, 1032 bp, Bacteriophage P1; identical to SEQ ID NO: 174936

SEQ ID NO: 174938 - DNA, 1032 bp, Bacteriophage P1; identical to SEQ ID NO: 174936

SEQ ID NO: 174939 - DNA, 1032 bp, Bacteriophage P1; identical to SEQ ID NO: 174936

SEQ ID NO: 174940 - DNA, 1032 bp, Bacteriophage P1; identical to SEQ ID NO: 174936

SEQ ID NO: 174941 - DNA, 1032 bp, Bacteriophage P1; identical to SEQ ID NO: 174936

SEQ ID NO: 174942 - DNA, 1032 bp, Bacteriophage P1; identical to SEQ ID NO: 174936

SEQ ID NO: 174943 - DNA, 1032 bp, Bacteriophage P1; identical to SEQ ID NO: 174936

SEQ ID NO: 174944 - DNA, 1032 bp, Bacteriophage P1; identical to SEQ ID NO: 174936

SEQ ID NO: 174945 - DNA, 1032 bp, Bacteriophage P1; identical to SEQ ID NO: 174936

SEQ ID NO: 174946 - DNA, 1840 bp, Bacillus subtilis
atgtcaaacgaaacaattaaattagtcattgcgggaccgcgtggaagaatggggcaggaagctgttaaattggcagaacgaacaccacattttgaccttgtaggggccatagaccatacatacgatcagcaaaaattatctgatgtgatgcctgttgagtcagatgctttcatttacacagatatccatgcctgttttacagaaacacaaccggatgtcttgattgatttaacaacgcccgaaatcggaaaagtacatacaaaaattgcattagagcacggagtccgtccagttgtcggaacaaccggtttctcagaagctgatttaaaagagctcacatctttaacagaagaaaaagggatcggagccatcatcgcgccaaattttgcgctcggtgcgatactgatgatgaaattttcaaaaatggctgccaactattttgaggatgttgagattattgagcttcatcatgaccagaagcttgacgcaccaagcggaactgcgcttaaaacagcggaaatgatttcagaagtccgtaaagaaaagcagcaaggacatccggatgaaaaagaaattctcccaggagcaagaggagcggagcaaaacggtattcgcttgcacaggcttcagatacgccatgattcttataaccgtgcttctttcatgtcaggcgttaaactgtcagtcgaacaagtcatgaagattgatcagcttgtgtatggtttagaaaatatcattgattagacggggggataaacaatgaaaattgctttgatcgcgcatgacaagaaaaaacaggatatggttcaatttacgactgcctatcgggatattttaaagaatcatgatctatacgcaaccggaaccacagggttgaaaattcatgaggcgacaggtcttcaaattgaacgttttcaatccggccctttagggggagaccagcaaatcggtgcactgatcgctgccaatgcactcgatcttgtcatttttttgcgcgacccgctgaccgcgcagccgcatgaaccggatgtctcggcattaatccgtttatgtgatgtgtattccattccgctcgccacaaatatgggtactgcggaaattcttgtgcgcacacttgatgaaggtgttttcgaattccgtgaccttcttcggggagaagagccgaatgtataatgctgacgttcttgcttttggcgcccacagtgatgatgtcgagatcggaatgggcggcacaatagcgaagtttgtcaaacaggaaaaaaaagtaatgatatgcgatttgacagaagcggaactctcttctaacggtacggtcagtttgcgtaaagaagaagcagctgaagcagcccgcatattaggcgcagataaaagaattcagctaacgcttccagaccgcggcctaataatgagtgatcaggcaattcggtcaattgtcactgtcatcagaatctgtcggccaaaagcggtttttatgccgtataaaaaggatcgccatccggatcacggcaatgcggctgcactggtggaagaagcgatcttttccgccggaatccataaatataaagacgaaaaaagccttccggcgcataaagtcagcaaggtttactattatatgataaatggttttcatcagccggattttgttattgatatctcggatacaatagaggcaaagaaacaaagcctcaacgcctacaaaagccagtttatcccgtcaaaggattccgtttctactcctctgacgaatgggtatattgaaatcgttgaagcgagagaaaagctttacggtaaagaagcgggcgtggagtatgccgaagtttcttttccaaacggatgctga

SEQ ID NO: 174947 - DNA, 1840 bp, Bacillus subtilis; identical to SEQ ID NO: 174946

SEQ ID NO: 174948 - DNA, 1840 bp, Bacillus subtilis; identical to SEQ ID NO: 174946

SEQ ID NO: 174949 - DNA, 1840 bp, Bacillus subtilis; identical to SEQ ID NO: 174946

SEQ ID NO: 174950 - DNA, 1840 bp, Bacillus subtilis; identical to SEQ ID NO: 174946

SEQ ID NO: 174951 - DNA, 1840 bp, Bacillus subtilis; identical to SEQ ID NO: 174946

SEQ ID NO: 174952 - DNA, 1840 bp, Bacillus subtilis; identical to SEQ ID NO: 174946

SEQ ID NO: 174953 - DNA, 1840 bp, Bacillus subtilis; identical to SEQ ID NO: 174946

SEQ ID NO: 174954 - DNA, 1840 bp, Bacillus subtilis; identical to SEQ ID NO: 174946

SEQ ID NO: 174955 - DNA, 1840 bp, Bacillus subtilis; identical to SEQ ID NO: 174946

SEQ ID NO: 174956 - DNA, 1840 bp, Bacillus subtilis; identical to SEQ ID NO: 174946

SEQ ID NO: 174957 - DNA, 1840 bp, Bacillus subtilis; identical to SEQ ID NO: 174946

SEQ ID NO: 174958 - DNA, 1840 bp, Bacillus subtilis; identical to SEQ ID NO: 174946

SEQ ID NO: 174959 - DNA, 1840 bp, Bacillus subtilis; identical to SEQ ID NO: 174946

SEQ ID NO: 174960 - DNA, 1840 bp, Bacillus subtilis; identical to SEQ ID NO: 174946

SEQ ID NO: 174961 - DNA, 1233 bp, Rattus norvegicus
ggtcagtgccggcctcgtctcatagacaagatggtgaaggtcggtgtcaacggatttggccgtattggccgcctggtcaccagggctgccttctcttgtgacaaagtggacattgttgccatcaacgaccccttcattgacctcaactacatggtctacatgttccagtatgattctacccacggcaagttcaatggcacagtcaaggctgagaatgggaagctggtcatcaatgggaaacccatcaccatcttccaggagcgcgatcccgctaacatcaaatggggtgatgctggtgctgagtatgtcgtggagtctactggcgtcttcaccaccatggagaaggctggggctcacctgaagggtggtgccaaaagggtcatcatctccgccccttccgctgatgcccccatgtttgtgatgggtgtgaaccacgagaaatatgacaactccctcaagattgtcagcaatgcatcctgcaccaccaactgcttagcccccctggccaaggtcatccatgacaactttggcatcgtggaagggctcatgaccacagtccatgccatcactgccactcagaagactgtggatggcccctctggaaagctgtggcgtgatggccgtggggcagcccagaacatcatccctgcatccactggtgctgccaaggctgtgggcaaggtcatcccagagctgaacgggaagctcactggcatggccttccgtgttcctacccccaatgtatccgttgtggatctgacatgccgcctggagaaacctgccaagtatgatgacatcaagaaggtggtgaagcaggcggccgagggcccactaaagggcatcctgggctacactgaggaccaggttgtctcctgtgacttcaacagcaactcccattcctccacctttgatgctggggctggcattgctctcaatgacaactttgtgaagctcatttcctggtatgacaatgaatatggctacagcaacagggtggtggacctcatggcctacatggcctccaaggagtaagaaacccctggaccacccagcccagcaaggatactgagagcaagagagaggccctcagttgcctgagagtccccatcccaactcagcccccaacactgagcactctccctcacaattccatcccagaccccataacaacaggaggggcctggggagccctcccttctctcgaataccatcaataaagttcgctgcaccctc

SEQ ID NO: 174962 - DNA, 1233 bp, Rattus norvegicus; identical to SEQ ID NO: 174961

SEQ ID NO: 174963 - DNA, 1233 bp, Rattus norvegicus; identical to SEQ ID NO: 174961

SEQ ID NO: 174964 - DNA, 984 bp, Bacillus subtilis
atgacattgttcttacacggcacaagcagacaaaatcaacatggtcatttagaaatcggaggtgtggatgctctctatttagcggagaaatatggtacacctctttacgtatatgatgtggctttaatacgtgagcgtgctaaaagctttaagcaggcgtttatttctgcagggctgaaagcacaggtggcatatgcgagcaaagcattctcatcagtcgcaatgattcagctcgctgaggaagagggactttctttagatgtcgtatccggagagagctatatacggctgttgcagcaggctttccggcagaacgcatccactttcatggaaacaataagagcagggaagaactgcggatggcgcttgagcaccgcatcggctgcattgtggtggataatttctatgaaatcgtcgcttcttgaagacctatgtaaagaaacgggtcactccatcgatgttcttcttcggatcacgcccggagtagaagcgcatacgcatgactacattacaacgggccaggaagattcaaagtttggtttcgatcttcataacggacaaactgaacgggccattgaacaagtattacaatcggaacacattcagctgctgggtgtccattgccatatcggctcgcaaatctttgatacggccggttttgtgttagcagcggaaaaaatcttcaaaaaactagacgaatggagagattcatattcatttgtatccaaggtgctgaatcttggaggaggtttcggcattcgttatacggaagatgatgaaccgcttcatgccactgaatacgttgaaaaaattatcgaagctgtgaaagaaaatgcttcccgttacggttttgacattccggaaatttggatcgaaccgggccgttctctcgtgggagacgcaggcacaactctttatacggttggctctcaaaaagaagtggataagctgtacaatcgtttcatcattcggcgtgcgaattaa

SEQ ID NO: 174965 - DNA, 984 bp, Bacillus subtilis; identical to SEQ ID NO: 174964

SEQ ID NO: 174966 - DNA, 984 bp, Bacillus subtilis; identical to SEQ ID NO: 174964

SEQ ID NO: 174967 - DNA, 1318 bp, Bacillus subtilis
atgaaagaggagacattttatcttgtccgtgaagatgtattgcccgatgcaatgagaaaaacattagaagtcaaaaagctgcttgatcgaaaaaaagcagattcagtagcagatgccgttcaaaaggtcgatttaagtagaagtgcgttttataaatacagggatgctgtttttccattctacaccatggtaaaagaacaaattatcacacttttctttcatttggaggataggtcaggtgcgttatctcagcttcttcaggcggtagctgattctggaagcaacgttctttccattcaccagaccattccgcttcaaggcagagcaaatgtgacactgtctatcagtacgtcggcaatggaagaagacattcatacattaatgaataagctcaggaagtttgattttgtagaaaaggttgaaatattaggttcaggtgcataagggagagaaaatcgtcatgaaagtcggttatttaggtccagcagctacatttacacatctagcagtcagttcttgttttcaaaacggcgccgaacatgttgcttaccgcaccattccggagtgtatagatgcagccgttgcaggcgaagttgattttgcttttgttcctttggaaaatgctttagaaggatctgttaatctaacaatagactatttaatacatgaacagcctttgccaatcgtgggtgaaatgacgttgccgattcaccagcacttgctcgtccatccctcaagagagaatgcatggaaagagctcgacaaaatttactcacattcacacgcgattgcgcaatgccataaatttcttcatcgacattttccttccgttccatatgaatacgccaattctaccggggcggcagcaaagtttgtcagtgaccatcccgagctgaatatcggggtcattgccaatgatatggcagcttctacatacgaattaaaaatcgtgaaacgggatatacaggattatagggacaatcatacaagatttgttatcctgtctcccgatgaaaacatatcttttgaagtgaattcaaaattgagctctaggcccaaaacgaccttaatggtcatgctgccgcaggatgatcagtccggggcgctgcatagagtgctgtctgcattttcttggagaaatttaaacctgtcaaaaattgagtcacgtccgactaaaaccggattaggccattatttctttattattgatattgagaaagcgtttgatgatgtattgattccaggggccatgcaggagcttgaagcactcggctgcaaagtgaggcttctgggtgcataccagtcttaccaattataa

SEQ ID NO: 174968 - DNA, 1318 bp, Bacillus subtilis; identical to SEQ ID NO: 174967

SEQ ID NO: 174969 - DNA, 1318 bp, Bacillus subtilis; identical to SEQ ID NO: 174967

SEQ ID NO: 174970 - DNA, 3945 bp, Rattus norvegicus
cgcggcggccacggcttgaggcgacggggcgaagatgctgaagttccaaacagttcgagggggcctgaggctcctgggtgtccgccgatcctccacagcccccgttgcctccccaaatgtccggcgtctggagtacaagcccatcaagaaagtaatggtggccaacagaggtgagattgccatccgagtgtttcgtgcctgcacagagctgggtatccgcacagtggctgtctactcggagcaggacacaggccagatgcaccggcagaaagctgatgaagcctaccttattggccgtgggctggctcctgtgcaagcctacctgcacattccagacatcattaaggtggccaaggagaatggtgtagatgctgtgcaccctggctatgggttcctctcagagagagcagactttgcccaggcctgccaagatgctggagtccgattcattggtccaagcccagaggtggtccgcaagatgggagacaaggtggaagcccgggccattgccattgctgcaggcgttccagtggtccctggcactaattcccccatcaattccctgcatgaggcacacgagttctctaacacctatggtttccctattatcttcaaggctgcctatggaggtgggggccgtggcatgagggttgtgcatagctacgaggagctggaagagaattacacccgggcctaccctgaggccttggcagcctttgggaatggggcattgtttgtggagaaattcattgagaagccaagacacattgaggtgcagatcctaggggaccaatatgggaacatcttgcacttgtatgagcgggactgctccatccagcggcggcaccagaaggtggtagagattgcccctgctacccacctggacccccaacttcggtcacgcctcaccagtgactctgtcaaacttgccaagcaggttggctatgagaatgcaggcactgtggagttcctggtggacaagcatggcaagcactacttcatcgaggtcaattcccgcctgcaggtggagcacacggtcactgaggagattacagatgtggacctggtccatgctcagatccatgtgtccgaaggccggagcctgcctgacctaggcctgcggcaggaaaacatccgaatcaatggttgtgccattcagtgtcgggtcaccactgaggaccctgcacgcagcttccagccagacactggccgcattgaggttttccggagtggtgagggcatgggcatccgcctggacaatgcctcagcattccagggagctgtcatatccccccactatgactccctgctcgtcaaagtcattgcccatggcaaagaccaccctacagctgccaccaagatgagcagagccctggcggagttccgtgtccgaggtgtaaagaccaacatccccttcctgcagaatgtgctcaacaaccagcagttcctagcgggcattgtggacacccagttcatcgatgagaaccccgagctgttccagctgcggcctgcacagaaccgggcccagaagttgctacattaccttggacacgtcatggtcaatggccctaccactccaatccccgtcaaggtcagtcccagccctgtggaccccattgttcctgtggtgcccataggcccacccccagctggtttcagagacatccttctgcgagaggggccagagggctttgccagagctgtgcggaatcaccaggggctgctgctaatggacacaaccttccgggatgcccaccagtcactacttgccactagagtgcgcacacacgatctcaaaaagattgcaccctacgttgcccacaacttcaacaacctcttcagcatagagaactggggaggagccacatttgacgtggccatgcgcttcttgtatgagtgcccctggcggcggctccaggagctccgggagctcatccccaacatcccattccagatgctactgaggggggccaatgctgtgggctacaccaactaccctgacaacgtggtcttcaagttctgtgaggtggccaaagagaatggcatggacgtcttccggatctttgactcccttaactacctgccaaacatgctgctgggcatggaagcagctggcagtgctgggggtgtggtggaagctgccatctcctacacgggtgacgtggctgaccccagtcgcactaaatactcactggagtactacatgggcttagctgaagaactggtgcgagccggcactcacatcctctgcattaaggacatggcaggcctgctgaagcctgcagcatgcaccatgctggtcagctccctccgggaccggttccccgacctcccactgcacatccatacccatgacacatcagggtcaggtgtggcagccatgttggcctgtgcacaagctggggctgatgttgtggatgtggcagtcgactctatgtctgggatgacctcacagcccagcatgggggccctggtggcctgtaccaaagggactcctctggacacagaggtacccctggagcgtgtgtttgactacagtgagtattgggaaggggctcgggggctgtatgcagcctttgattgcacggctaccatgaagtctggcaactcagacgtgtatgagaatgaggatccagggggccagtacaccaacctacacttccaggcccacagcatgggacttggctccaagttcaaggaggtcaagaaggcctatgtggaggctaaccagatgctgggggacctcatcaaggtgacaccatcctccaagattgtgggggatctggcccagttcatggtgcagaacgggttgagccgggcagaggcagaagctcaggcagaagagctgtccttcccccgctctgtggtggagttcctgcagggctacattggcattccccatgggggtttccctgaacccttccgttctaaggtgctaaaggacctgccaaggatagaaggagggcctggagcctccctccctcccttgaacctgaaggagctggagaaggacctgattgataggcatggagaggaggtgaccccagaggacgttctctctgcagccatgtaccctgatgtctttgctcagttcaaagacttcacggctacctttggccccctggatagcctgaatactcgtctctttcttcaaggacccaaaattgcagaggagtttgaggttgagctggaacggggcaagaccttgcacatcaaagccctggctgtaagcgacctgaaccgtgctggccagaggcaggtgttctttgaactcaatgggcagcttcgatccattctggttaaagacacccaggccatgaaggagatgcacttccatcccaaggccttgaaggatgtgaagggccaaattggggcccctatgcctgggaaggtcatagacgtcaaggtggcagcaggagccaaggtggttaagggccagcccctctgtgtgctcagcgccatgaagatggagactgtggtgacttcgcccatggagggcactatccgaaaggttcacgtgaccaaggacatgactctggaaggcgatgacctcatcctagagattgagtgatcttactccagactggcagcctggccaaccctaccccaagcctctcaacagaagctgtgcagccagggcaggcccaggcagtacctgagggctaggccttgaggtcctgtcccatgggacagcacacacactacctgcaatggccctcccattcccttcagctatttgtccttgtcttgctggcaggcagttctcacatattcatctcttgccaaataagggtctgctcctcgtgggagaccacaggtgtacagtaggtggccttgtacctgggagaggggttctacctctgggggtagagggaagaagacctaattcataggtcctgggaaatttgctcaataaaagtggccttcccttgccctccacaaaaa

SEQ ID NO: 174971 - DNA, 3945 bp, Rattus norvegicus; identical to SEQ ID NO: 174970

SEQ ID NO: 174972 - DNA, 3945 bp, Rattus norvegicus; identical to SEQ ID NO: 174970

SEQ ID NO: 174973 - DNA, 3945 bp, Rattus norvegicus; identical to SEQ ID NO: 174970

SEQ ID NO: 174974 - DNA, 1982 bp, Bacillus subtilis
atgtggaaaggacttatccatcaatataaagaatttttacctgtaacagatcaaacaccggcgctaactttacatgaaggaaacacacctcttattcacctgccgaagctgtctgagcagctcggaattgagcttcatgtcaaaacggaaggcgtcaatcctacgggatcatttaaagatcgcggaatggttatggctgtggcaaaggcaaaagaagaaggcaatgacacgattatgtgcgcgtcaacaggtaacacttccgctgctgcggcagcatatgcagcccgtgctaacatgaaatgcattgtcatcatcccgaacggaaaaattgcatttggaaaactcgctcaagctgtcatgtacggagccgagattatcgcaattgacggaaactttgacgatgcgcttaaaattgtccgttccatctgtgagaaatcaccgattgcccttgtcaactcagtcaacccttaccgcattgaaggccaaaaaactgctgccttcgaagtgtgcgaacagctgggggaagcgcctgatgttttagcgatcccggtcggaaatgctggaaacatcactgcgtactggaagggcttcaaggaatatcatgagaaaaacggcacaggccttccgaaaatgcgcggctttgaagctgagggtgcggcggcaatcgtgcgcaatgaagtgattgaaaatccggaaacaatagcgacagccattcgtatcggaaacccggcaagctgggacaaagctgtaaaggcagccgaggaatccaatgggaaaattgacgaagtcactgatgatgaaatccttcacgcatatcagctgatcgcccgtgtagaaggcgtgtttgcagaaccaggttcttgcgcgtctatcgcaggagtgctgaaacaggtgaaatccggagaaattccgaaaggcagcaaggtcgtagctgtgttaacaggaaacggactgaaagatccgaacacagcggtcgacatttcagaaatcaagcctgtcacattgccgactgatgaagacagcatccttgaatatgtaaaaggagcggcccgtgtatgaacgaagccgacatgctgttctctgtcactgttcccggaagcacagctaacctaggccccggctttgattcagtcggaatggcgctcagcagatatttgaagctgaccgtctttgaaagcgacaaatggtcttttgaggctgaaacagaaacagtcgccggaattcgcggtacagataacctgatctaccaagtggctaaacggaccgcagatttgtacggaaaagaaatgcctcctgtccatgtgaaggtgtggagcgacatcccgcttgcacgcggccttggcagcagcgccgcagcgattgtagcggccattgaactggctgatgaattatgcggcttaaagctgtctgaagcggacaagctgcatttagcgagtctagaagaaggacacccggacaatgctggcgcttctctcgtcggcggacttgtgatcggcctgcatgaggatgacgagacccaaatgatccgcgtcccgaatgctgacattgacgtagtcgttgtcattcctttttatgaagtgctgacaagagacgcgagagacgtgcttccgaaggagtttccatatgccgatgccgtaaaagcaagtgctgtcagcaatatcctcattgctgcgatcatgtccaaggattggccgcttgtcgggaaaatcatgaagaaggatatgttccatcagccgtaccgggcgatgcttgtgcctgagctgtcaaaagtagagcacgtcgccgagatgaagggcgcatatggaacggctctcagcggagcaggcccaacgattctcgtcatgaccgaaaaaggaaagggagaagagctaaaagaacagctcgcgcttcatttccctcattgtgaagtagacgctttgaccgttccgaaagagggaagtataatagagcgaaatcctttatatcaagtaaaaagtgtatag

SEQ ID NO: 174975 - DNA, 1982 bp, Bacillus subtilis; identical to SEQ ID NO: 174974

SEQ ID NO: 174976 - DNA, 1982 bp, Bacillus subtilis; identical to SEQ ID NO: 174974

SEQ ID NO: 174977 - DNA, 3413 bp, Rattus norvegicus
catagagttcactgacatcatcaagcagctgagccagaatacatatactcctcgtgaggctggatctcagaaagacgagaatcttgcctattatattgaaaatctgttccatgactttaaattcagcaaagtctggcgagatgaacattatgtgaagattcaagtgaaaaacagtgtttctcaaaacttggtgaccataaattcaggtagtaacattgacccagtggaggctcctgagggttatgtggcatttagtaaagctggagaagttactggtaaactggtccatgctaattttggcactaaaaaggactttgaagaattaaattattctgtgaatggatctttagtgattgttagagcagggaaaattacttttgcagaaaaggttgcaaatgcccaaagctttaatgcaattggtgtcctcatctacatggacaggaatacgttccccgttgttgaggcagaccttcaattctttggacatgctcatctaggaactggggatccatatacacctggctttccttctttcaaccatactcagtttccgccatctcagtcatctggattgccttctatacctgtgcagacgatctcaagagctcctgcagaaaagctattcaaaaacatggaaggaaactgtcctcctagttggaatatagattcctcatgtaagctggaactttcacagaatcaaaatgtgaagctcactgtgaacaatgtactgaaagaaacaagaatacttaacatctttggcgttattaaaggctatgaggaaccagaccgctacattgtagtaggagcccagagagacgcttggggccctggtgttgcgaagtccagtgtgggaacaggtcttctgttgaaacttgcccaagtattctcagatatgatttcaaaagatggatttagacccagcaggagtattatctttgccagctggactgcaggagactatggagctgttggtccgactgagtggctggaggggtacctttcatctttgcatctaaaggctttcacttacattaatctggataaagtcgtcctgggtactagcaacttcaaggtttctgccagccccctattatatacacttatggggaagataatgcaggacgtaaagcatccgattgatggaaaatatctatatcgaaacagtaattggattagcaaaattgaggaactttccttggacaatgctgcattcccttttcttgcatattcaggaatcccagcagtttctttctgtttttgtgaggatgaggactatccttatttgggcactaaactagatacctatgagatattaattcagaaagttcctcagctcaaccaaatggttcgtacagcagcagaggtggccggtcagttcattattaaacttacccatgacattgagttgaccctggactatgagatgtacaacagcaaactactgtcatttatgaaggatctgaaccagttcaaagcagatataaaagatatgggtctaagtctacaatggctgtattctgctcgtggagactacttccgtgctacttctagactaacaactgattttcataatgctgagaaaacaaacagattcgtcatgagggaaatcaatgatcgtattatgaaagtggagtatcacttcctgtcaccctatgtatctccaagagagtctcctttccgacacatcttctggggctctggctctcacaccctctcagctttagtggagaacctgagacttcgtcagaaaaatatcactgctttcaatgaaacgctcttcagaaaccagttggccctggctacgtggactattcagggagttgcaaatgccctctctggtgacatttggaatattgacaatgagttttaaatgtaatgtgcataattaagtgagagagggtagtctgtttctagacttgagctggttgtgctaaattttcattagagctcgaattaatgttaaaaattctacccaatcatctaatgtgtttaggcagcagcttttagtgcagggttggacccacacttcaagttacagtggacaacactttccatgttcatgataccttcttagattatctttagaattttgagtcttttgtaataccttgctctttgcttcatggtcatgaaaatgtcagaaccagttgtaagaacattgctataagtcctgagggcactactagtatcttgaggtgggaggaagagggtgtatgtgaggggcagagtggtcgctgggtgtgattccccatctccatctgaccctcactgggattctccaattgagctgtatgcctgaaggatttagctggcttccattcccctaaagtagacagttacttttcagaagaggtgcaacttgttttcttgccagcaaggttgaactaggtccttctgctggataaaagaaaggaagtttgtctgtttacaggaataaggccttattggtttaacctttgtgttatttaggatgagaccagaagccaaagacttcaagttttctctccactgtcatctacccagtagtctttagttctttgggttgttttgtttttgttttgtttttcttttccaacactttctgaaaaagaacaggtttagactcagtctgtcagcagaacacactgccgagctcggtacccggggatcctctagagtcgacctgcaggcatgcaagctttccctatagtgagtcgtattagagcttggtgcatgcctgcaggtcgactctagaggatccccgggtaccgagctctggccaaagtgctggtcttcagggaagctctgtcgtttttggcactgagatatttattgtttatttatcagtgacagagttcactataaatagtgtttttttaatagaagataattatcggaagcagtgccttccataattatgacagttatactgtcgttttcttttaataaaagcagcatctgctaatgagacccacagatactggaagttttgcacttacggtcagcacttgcgggctttagaaaggagaaagccacaagccaaacaatatccgatgagctagaagaggattgggttaaataagagattcctagttgagttggaaaaaaatgataattctaagtccagtgagttgtggccaagttaaatgtcatttaaaggctatgatagtacatcaacaaaattctatagctcagtttattcaagatgtaactcaaatccaattttgcaaaatttccagtacctttgtcacaaacttaactcacattatcgggagcagtgtcttccataatgtataaagaacaaggtagtttttgcctaccacagtgtctatatcggagacagtgacctccatatgttacactaagggtgtacgtaattatcgggaacagtgtttcccataattttcttcatgcgatgacatcttcaaagcttg

SEQ ID NO: 174978 - DNA, 3413 bp, Rattus norvegicus; identical to SEQ ID NO: 174977

SEQ ID NO: 174979 - DNA, 3413 bp, Rattus norvegicus; identical to SEQ ID NO: 174977

SEQ ID NO: 174980 - DNA, 2525 bp, Bacillus subtilis; identical to SEQ ID NO: 174899

SEQ ID NO: 174981 - DNA, 2525 bp, Bacillus subtilis; identical to SEQ ID NO: 174899

SEQ ID NO: 174982 - DNA, 2480 bp, Bacillus subtilis
ctcgagccaacaccgagagagacatacggcgggtgtattgcctacattgggtttgacgggaatatcgactcttgtattacgattcgcacgatgagtgtaaagaacggtgttgcatcgatacaggcaggtgctggcattgttgctgattctgttccggaagccgaatacgaagaaagctgtaataaagccggtgcgctgctgaaaacgattcatattgcagaagacatgtttcatagcaaggaggataaagctgatgaacagatttctacaattgtgcgttgacggaaaaacccttactgccggtgaggctgaaacgctgatgaatatgatgatggcagcggaaatgactccttctgaaatgggggggatattgtcaattcttgctcatcggggggagacgccagaagagcttgcgggttttgtgaaggcaatgcgggcacacgctcttacagtcgatggacttcctgatattgttgatacatgcggaacagggggagacggtatttccacttttaatatctcaacggcctcggcaattgttgcctcggcagctggtgcgaaaatcgctaagcatggcaatcgctctgtctcttctaaaagcggaagcgctgatgttttagaggagctagaggtttctattcaaaccactcccgaaaaggtcaaaagcagcattgaaacaaacaacatgggatttctttttgcgccgctttaccattcgtctatgaaacatgtagcaggtactagaaaagagctaggtttcagaacggtatttaatctgcttgggccgctcagcaatcctttacaggcgaagcgtcaggtgattggggtctattctgttgaaaaagctggactgatggcaagcgcactggagacgtttcagccgaagcacgtcatgtttgtatcaagccgtgacggtttagatgagctttcaattacagcaccgaccgacgtgattgaattaaaggacggagagcgccgggaatataccgtttcacccgaagatttcggtttcacaaatggcagacttgaagatttacaggtgcagtcaccgaaagagagcgcctatctcattcagaatatttttgaaaataaaagcagcagttccgctttatctattacggcttttaatgcgggagctgcgatttacacggcgggaattaccgcctcactgaaggaaggaacggagctggcgttagagacgattacaagcggaggcgctgccgcgcagcttgaacgactaaagcagaaagaggaagagatctatgcttgaaaaaatcatcaaacaaaagaaagaagaagtgaaaacactggttttgccggtagagcagcctttcgagaaacgttcatttaaggaggcgctggcaagcccgaatcggtttatcgggttgattgccgaagtgaagaaagcatcgccgtcaaaagggcttattaaagaggattttgtgcctgtgcagattgcaatagactatgaggctgcgaaggcagatgcgatttccgttttaacagacaccccgttttttcaaggggaaaacagttatttatcagacgtaaagcgtgctgtttcgattcctgtacttagaaaagattttattcttgattctcttcaagtagaggaatcaagaagaatcggagcggatgccatattgttaatcggcgaggtgcttgatcccttacaccttcatgaattatatcttgaagcaggtgaaaaggggatggacgtgttagtggaggttcatgatgcatcaacgctagaacaaatattgaaagtgttcacacccgacattctcggcgtaaataatcgaaacctaaaaacgtttgaaacatctgtaaagcagacagaacaaatcgcatctctcgttccgaaagaatccttgcttgtcagcgaaagcggaatcggttctttagaacatttaacatttgtcaatgaacatggggcgcgagctgtacttatcggtgaatcattgatgagacaaacttctcagcgtaaagcaatccatgctttgtttagggagtgaggttgtgaagaaaccggcattaaaatattgcggtattcggtcactaaaggatttgcagcttgcggcggaatcacaggctgattacctaggatttatttttgctaaaagcaaacgaaaagtatctccggaagatgtgaaaaaatggctgaaccaagttcgtgtcgaaaaacaggttgcaggtgtttttgttaatgaatcaatagagacgatgtcacgtattgccaagagcttgaagctcgacgtcattcagcttcacggtgatgaaaaaccggcggatgctgctgctcttcgcaagctgacaggctgtgaaatatggaaggcgcttcaccatcaagataacacaactcaagaaatagcccgctttaaagataatgttgacggctttgtgattgattcatctgtaaaagggtctagaggcggaactggtgttgcattttcttgggaatgtgtgccggaatatcagca

SEQ ID NO: 174983 - DNA, 25 bp, Artificial
  Probe sequence
gccagagttccaggaacactgtgga

SEQ ID NO: 174984 - DNA, 25 bp, Artificial
  Probe sequence
tctgcggattgatgacattgtctct

SEQ ID NO: 174985 - DNA, 25 bp, Artificial
  Probe sequence
ctacaaacatacaaaacagcagtgg

SEQ ID NO: 174986 - DNA, 25 bp, Artificial
  Probe sequence
tgactggtgtggaacaatggccata

SEQ ID NO: 174987 - DNA, 25 bp, Artificial
  Probe sequence
aactgtggggccagtaccattcgtc

SEQ ID NO: 174988 - DNA, 25 bp, Artificial
  Probe sequence
tgctaagcaaggtgactgaaccaca

SEQ ID NO: 174989 - DNA, 25 bp, Artificial
  Probe sequence
acacacaggagaattgtgagacctg

SEQ ID NO: 174990 - DNA, 25 bp, Artificial
  Probe sequence
atttgggagccattggctgtgaagc

SEQ ID NO: 174991 - DNA, 25 bp, Artificial
  Probe sequence
ccggcaaaccggtgctccagatgct

SEQ ID NO: 174992 - DNA, 25 bp, Artificial
  Probe sequence
tgacattgtctctggccacaagaag

SEQ ID NO: 174993 - DNA, 25 bp, Artificial
  Probe sequence
agtgctaagcaaggtgactgaacca

SEQ ID NO: 174994 - DNA, 25 bp, Artificial
  Probe sequence
gttccaggaacactgtggacatctt

SEQ ID NO: 174995 - DNA, 25 bp, Artificial
  Probe sequence
gtatctcttctgttgtaagcttcca

SEQ ID NO: 174996 - DNA, 25 bp, Artificial
  Probe sequence
cagacaaatctaagcccatgactgg

SEQ ID NO: 174997 - DNA, 25 bp, Artificial
  Probe sequence
cagaaccggcaaaccggtgctccag

SEQ ID NO: 174998 - DNA, 25 bp, Artificial
  Probe sequence
tggccacaagaagaagggtgatgac

SEQ ID NO: 174999 - DNA, 25 bp, Artificial
  Probe sequence
aacagcagtggagactgcagttctg

SEQ ID NO: 175000 - DNA, 25 bp, Artificial
  Probe sequence
ccagtctgtcccatctcggtttgca

SEQ ID NO: 175001 - DNA, 25 bp, Artificial
  Probe sequence
gtgatgaccagaaccggcaaaccgg

SEQ ID NO: 175002 - DNA, 25 bp, Artificial
  Probe sequence
actgaaccacagaaccagcagtctc

SEQ ID NO: 175003 - DNA, 25 bp, Artificial
  Probe sequence
aacatacaaaacagcagtggagact

SEQ ID NO: 175004 - DNA, 25 bp, Artificial
  Probe sequence
ctggccaggagtgagtgctaagcaa

SEQ ID NO: 175005 - DNA, 25 bp, Artificial
  Probe sequence
caaggtgactgaaccacagaaccag

SEQ ID NO: 175006 - DNA, 25 bp, Artificial
  Probe sequence
cagttctgcttctgcggattgatga

SEQ ID NO: 175007 - DNA, 25 bp, Artificial
  Probe sequence
ccttcgggccaagcacacacaggag

SEQ ID NO: 175008 - DNA, 25 bp, Artificial
  Probe sequence
ttgtctctggccacaagaagaaggg

SEQ ID NO: 175009 - DNA, 25 bp, Artificial
  Probe sequence
attcgtctgcttacctcccttcggg

SEQ ID NO: 175010 - DNA, 25 bp, Artificial
  Probe sequence
taccttagtggacatgaaagagctg

SEQ ID NO: 175011 - DNA, 25 bp, Artificial
  Probe sequence
tacaaaacagcagtggagactgcag

SEQ ID NO: 175012 - DNA, 25 bp, Artificial
  Probe sequence
tcggaccttgatccagaactgtggg

SEQ ID NO: 175013 - DNA, 25 bp, Artificial
  Probe sequence
ctgcttctgcggattgatgacattg

SEQ ID NO: 175014 - DNA, 25 bp, Artificial
  Probe sequence
attggctgtgaagctacaaacatac

SEQ ID NO: 175015 - DNA, 25 bp, Artificial
  Probe sequence
aaatctaagcccatgactggtgtgg

SEQ ID NO: 175016 - DNA, 25 bp, Artificial
  Probe sequence
gatccagaactgtggggccagtacc

SEQ ID NO: 175017 - DNA, 25 bp, Artificial
  Probe sequence
catctttgtttgcaaaggatcaggt

SEQ ID NO: 175018 - DNA, 25 bp, Artificial
  Probe sequence
atctcggtttgcaaaaagcactgac

SEQ ID NO: 175019 - DNA, 25 bp, Artificial
  Probe sequence
ggaacaatggccatatagggctgtg

SEQ ID NO: 175020 - DNA, 25 bp, Artificial
  Probe sequence
tgctccagatgctggccaggagtga

SEQ ID NO: 175021 - DNA, 25 bp, Artificial
  Probe sequence
gccagtaccattcgtctgcttacct

SEQ ID NO: 175022 - DNA, 25 bp, Artificial
  Probe sequence
ctttcctgagccagagttccaggaa

SEQ ID NO: 175023 - DNA, 25 bp, Artificial
  Probe sequence
gattgatgacattgtctctggccac

SEQ ID NO: 175024 - DNA, 25 bp, Artificial
  Probe sequence
tggtgagactggtaccttagtggac

SEQ ID NO: 175025 - DNA, 25 bp, Artificial
  Probe sequence
gtttgcaaaaagcactgacgtgtat

SEQ ID NO: 175026 - DNA, 25 bp, Artificial
  Probe sequence
agggtgatgaccagaaccggcaaac

SEQ ID NO: 175027 - DNA, 25 bp, Artificial
  Probe sequence
gctacaaacatacaaaacagcagtg

SEQ ID NO: 175028 - DNA, 25 bp, Artificial
  Probe sequence
gaacaatggccatatagggctgtgg

SEQ ID NO: 175029 - DNA, 25 bp, Artificial
  Probe sequence
gcagctatgaagacccttacggtga

SEQ ID NO: 175030 - DNA, 25 bp, Artificial
  Probe sequence
agacccttacggtgatgaccgagtt

SEQ ID NO: 175031 - DNA, 25 bp, Artificial
  Probe sequence
gaccgagttcacttcccagcttcta

SEQ ID NO: 175032 - DNA, 25 bp, Artificial
  Probe sequence
gagaggactttctacgctctgtgta

SEQ ID NO: 175033 - DNA, 25 bp, Artificial
  Probe sequence
ctatgaagacccttacggtgatgac

SEQ ID NO: 175034 - DNA, 25 bp, Artificial
  Probe sequence
tgccgagggccgattttcttctgac

SEQ ID NO: 175035 - DNA, 25 bp, Artificial
  Probe sequence
cagtctcctcgcagctatgaagacc

SEQ ID NO: 175036 - DNA, 25 bp, Artificial
  Probe sequence
cttacggtgatgaccgagttcactt

SEQ ID NO: 175037 - DNA, 25 bp, Artificial
  Probe sequence
catcaagacggctgcctgccgaggg

SEQ ID NO: 175038 - DNA, 25 bp, Artificial
  Probe sequence
tacgctctgtgtaggtgttagatct

SEQ ID NO: 175039 - DNA, 25 bp, Artificial
  Probe sequence
cctgcagtctcctcgcagctatgaa

SEQ ID NO: 175040 - DNA, 25 bp, Artificial
  Probe sequence
agactgtacctgcagtctcctcgca

SEQ ID NO: 175041 - DNA, 25 bp, Artificial
  Probe sequence
actgattactcaacgcagtatggac

SEQ ID NO: 175042 - DNA, 25 bp, Artificial
  Probe sequence
gttacagcaccaacagctgtactat

SEQ ID NO: 175043 - DNA, 25 bp, Artificial
  Probe sequence
tctactgattactcaacgcagtatg

SEQ ID NO: 175044 - DNA, 25 bp, Artificial
  Probe sequence
ggtccccggactcctgggtgtagca

SEQ ID NO: 175045 - DNA, 25 bp, Artificial
  Probe sequence
tcctgggtgtagcatcaagacggct

SEQ ID NO: 175046 - DNA, 25 bp, Artificial
  Probe sequence
aacgaccttcttatagagccgaaca

SEQ ID NO: 175047 - DNA, 25 bp, Artificial
  Probe sequence
cttatagagccgaacagtaccctgg

SEQ ID NO: 175048 - DNA, 25 bp, Artificial
  Probe sequence
tccccggactcctgggtgtagcatc

SEQ ID NO: 175049 - DNA, 25 bp, Artificial
  Probe sequence
cttgctgatgatggtgaccgtgaaa

SEQ ID NO: 175050 - DNA, 25 bp, Artificial
  Probe sequence
cggtgatgaccgagttcacttccca

SEQ ID NO: 175051 - DNA, 25 bp, Artificial
  Probe sequence
gactgtacctgcagtctcctcgcag

SEQ ID NO: 175052 - DNA, 25 bp, Artificial
  Probe sequence
tagagccgaacagtaccctgggtcc

SEQ ID NO: 175053 - DNA, 25 bp, Artificial
  Probe sequence
taaacgaccttcttatagagccgaa

SEQ ID NO: 175054 - DNA, 25 bp, Artificial
  Probe sequence
agctgtactatcaagatgactccac

SEQ ID NO: 175055 - DNA, 25 bp, Artificial
  Probe sequence
actaaacgaccttcttatagagccg

SEQ ID NO: 175056 - DNA, 25 bp, Artificial
  Probe sequence
acagactgtacctgcagtctcctcg

SEQ ID NO: 175057 - DNA, 25 bp, Artificial
  Probe sequence
ggactgaaatcaaccacaaattacg

SEQ ID NO: 175058 - DNA, 25 bp, Artificial
  Probe sequence
agcttctactgattactcaacgcag

SEQ ID NO: 175059 - DNA, 25 bp, Artificial
  Probe sequence
accaacagctgtactatcaagatga

SEQ ID NO: 175060 - DNA, 25 bp, Artificial
  Probe sequence
cagcaccaacagctgtactatcaag

SEQ ID NO: 175061 - DNA, 25 bp, Artificial
  Probe sequence
cggactcctgggtgtagcatcaaga

SEQ ID NO: 175062 - DNA, 25 bp, Artificial
  Probe sequence
ggctgcctgccgagggccgattttc

SEQ ID NO: 175063 - DNA, 25 bp, Artificial
  Probe sequence
agaggactttctacgctctgtgtag

SEQ ID NO: 175064 - DNA, 25 bp, Artificial
  Probe sequence
tctgactctgcttggactgagggga

SEQ ID NO: 175065 - DNA, 25 bp, Artificial
  Probe sequence
tgtactatcaagatgactccaccag

SEQ ID NO: 175066 - DNA, 25 bp, Artificial
  Probe sequence
accttcttatagagccgaacagtac

SEQ ID NO: 175067 - DNA, 25 bp, Artificial
  Probe sequence
gagtccgtcttgctgatgatggtga

SEQ ID NO: 175068 - DNA, 25 bp, Artificial
  Probe sequence
attactcaacgcagtatggactgaa

SEQ ID NO: 175069 - DNA, 25 bp, Artificial
  Probe sequence
ctcaacgcagtatggactgaaatca

SEQ ID NO: 175070 - DNA, 25 bp, Artificial
  Probe sequence
gactttctacgctctgtgtaggtgt

SEQ ID NO: 175071 - DNA, 25 bp, Artificial
  Probe sequence
atgaagacccttacggtgatgaccg

SEQ ID NO: 175072 - DNA, 25 bp, Artificial
  Probe sequence
tgtacctgcagtctcctcgcagcta

SEQ ID NO: 175073 - DNA, 25 bp, Artificial
  Probe sequence
caacgcagtatggactgaaatcaac

SEQ ID NO: 175074 - DNA, 25 bp, Artificial
  Probe sequence
gcttctactgattactcaacgcagt

SEQ ID NO: 175075 - DNA, 25 bp, Artificial
  Probe sequence
aggtacccaggcttagagcagtata

SEQ ID NO: 175076 - DNA, 25 bp, Artificial
  Probe sequence
atcttccctggcactgaggtcctgg

SEQ ID NO: 175077 - DNA, 25 bp, Artificial
  Probe sequence
agctgagttcagaggctttgggcca

SEQ ID NO: 175078 - DNA, 25 bp, Artificial
  Probe sequence
gggactcaacccaggcctttgcata

SEQ ID NO: 175079 - DNA, 25 bp, Artificial
  Probe sequence
ggctttgggccacttactcggtact

SEQ ID NO: 175080 - DNA, 25 bp, Artificial
  Probe sequence
ctgggcttcccagtctggtcccggg

SEQ ID NO: 175081 - DNA, 25 bp, Artificial
  Probe sequence
ttcctgcttcactcctcaagcaggt

SEQ ID NO: 175082 - DNA, 25 bp, Artificial
  Probe sequence
tcatgggactcaacccaggcctttg

SEQ ID NO: 175083 - DNA, 25 bp, Artificial
  Probe sequence
gaaccccaggccaggttatgggtct

SEQ ID NO: 175084 - DNA, 25 bp, Artificial
  Probe sequence
aggcttagagcagtataggaatgcc

SEQ ID NO: 175085 - DNA, 25 bp, Artificial
  Probe sequence
tcctcagtaccgtcagcttgcaggg

SEQ ID NO: 175086 - DNA, 25 bp, Artificial
  Probe sequence
gtgatggggcccatacctcacaggc

SEQ ID NO: 175087 - DNA, 25 bp, Artificial
  Probe sequence
cccacagctgagttcagaggctttg

SEQ ID NO: 175088 - DNA, 25 bp, Artificial
  Probe sequence
agcaccatgtgatggggcccatacc

SEQ ID NO: 175089 - DNA, 25 bp, Artificial
  Probe sequence
aggaatgcctaccatcaggcctctc

SEQ ID NO: 175090 - DNA, 25 bp, Artificial
  Probe sequence
tgatggggcccatacctcacaggcc

SEQ ID NO: 175091 - DNA, 25 bp, Artificial
  Probe sequence
gaggcctcaatgaggcccagcaaag

SEQ ID NO: 175092 - DNA, 25 bp, Artificial
  Probe sequence
ttcactcctcaagcaggtacccagg

SEQ ID NO: 175093 - DNA, 25 bp, Artificial
  Probe sequence
accgtcagcttgcagggactgagcc

SEQ ID NO: 175094 - DNA, 25 bp, Artificial
  Probe sequence
tcaatgaggcccagcaaaggcattc

SEQ ID NO: 175095 - DNA, 25 bp, Artificial
  Probe sequence
tcagtaccgtcagcttgcagggact

SEQ ID NO: 175096 - DNA, 25 bp, Artificial
  Probe sequence
cggtactctgggaaccccaggccag

SEQ ID NO: 175097 - DNA, 25 bp, Artificial
  Probe sequence
gtcctggaggcctcaatgaggccca

SEQ ID NO: 175098 - DNA, 25 bp, Artificial
  Probe sequence
aaaggcattcccacagctgagttca

SEQ ID NO: 175099 - DNA, 25 bp, Artificial
  Probe sequence
tcaacccaggcctttgcatattatg

SEQ ID NO: 175100 - DNA, 25 bp, Artificial
  Probe sequence
tctgggaaccccaggccaggttatg

SEQ ID NO: 175101 - DNA, 25 bp, Artificial
  Probe sequence
tataggaatgcctaccatcaggcct

SEQ ID NO: 175102 - DNA, 25 bp, Artificial
  Probe sequence
cattcccacagctgagttcagaggc

SEQ ID NO: 175103 - DNA, 25 bp, Artificial
  Probe sequence
ggcactgaggtcctggaggcctcaa

SEQ ID NO: 175104 - DNA, 25 bp, Artificial
  Probe sequence
ccgtcagcttgcagggactgagcca

SEQ ID NO: 175105 - DNA, 25 bp, Artificial
  Probe sequence
ccagcaaaggcattcccacagctga

SEQ ID NO: 175106 - DNA, 25 bp, Artificial
  Probe sequence
tactcggtactctgggaaccccagg

SEQ ID NO: 175107 - DNA, 25 bp, Artificial
  Probe sequence
ggtactctgggaaccccaggccagg

SEQ ID NO: 175108 - DNA, 25 bp, Artificial
  Probe sequence
tgctctggggtttcctgcttcactc

SEQ ID NO: 175109 - DNA, 25 bp, Artificial
  Probe sequence
gagttcagaggctttgggccactta

SEQ ID NO: 175110 - DNA, 25 bp, Artificial
  Probe sequence
tgggccacttactcggtactctggg

SEQ ID NO: 175111 - DNA, 25 bp, Artificial
  Probe sequence
cagcaaaggcattcccacagctgag

SEQ ID NO: 175112 - DNA, 25 bp, Artificial
  Probe sequence
caggccaggttatgggtctctgtct

SEQ ID NO: 175113 - DNA, 25 bp, Artificial
  Probe sequence
gaggcccagcaaaggcattcccaca

SEQ ID NO: 175114 - DNA, 25 bp, Artificial
  Probe sequence
aagcaggtacccaggcttagagcag

SEQ ID NO: 175115 - DNA, 25 bp, Artificial
  Probe sequence
ggaggcctcaatgaggcccagcaaa

SEQ ID NO: 175116 - DNA, 25 bp, Artificial
  Probe sequence
cctcaagcaggtacccaggcttaga

SEQ ID NO: 175117 - DNA, 25 bp, Artificial
  Probe sequence
gttcagaggctttgggccacttact

SEQ ID NO: 175118 - DNA, 25 bp, Artificial
  Probe sequence
tgtcttcactgaggaaagcccctac

SEQ ID NO: 175119 - DNA, 25 bp, Artificial
  Probe sequence
ccaggttatgggtctctgtcttcac

SEQ ID NO: 175120 - DNA, 25 bp, Artificial
  Probe sequence
ttactcggtactctgggaaccccag

SEQ ID NO: 175121 - DNA, 25 bp, Artificial
  Probe sequence
ccccatgggctttggagtcaagagg

SEQ ID NO: 175122 - DNA, 25 bp, Artificial
  Probe sequence
gcagtggtagccaccatggtggcct

SEQ ID NO: 175123 - DNA, 25 bp, Artificial
  Probe sequence
tgccctactgggaagtgcagcctgc

SEQ ID NO: 175124 - DNA, 25 bp, Artificial
  Probe sequence
gccttggtgagagtctctgaggaac

SEQ ID NO: 175125 - DNA, 25 bp, Artificial
  Probe sequence
gaccgcctggccatccaatttggaa

SEQ ID NO: 175126 - DNA, 25 bp, Artificial
  Probe sequence
ggcctactataatggcatcagcctc

SEQ ID NO: 175127 - DNA, 25 bp, Artificial
  Probe sequence
tgccccatgggctttggagtcaaga

SEQ ID NO: 175128 - DNA, 25 bp, Artificial
  Probe sequence
ttcctctggctcctaagcatgcaca

SEQ ID NO: 175129 - DNA, 25 bp, Artificial
  Probe sequence
tcctaagcatgcacatatgcacatg

SEQ ID NO: 175130 - DNA, 25 bp, Artificial
  Probe sequence
tgagagtctctgaggaacatagcca

SEQ ID NO: 175131 - DNA, 25 bp, Artificial
  Probe sequence
aggaacatagccagttgttccacag

SEQ ID NO: 175132 - DNA, 25 bp, Artificial
  Probe sequence
tttggagtcaagagggcctactata

SEQ ID NO: 175133 - DNA, 25 bp, Artificial
  Probe sequence
ttcaacaaccctgtgccctactggg

SEQ ID NO: 175134 - DNA, 25 bp, Artificial
  Probe sequence
ctggccatccaatttggaaattata

SEQ ID NO: 175135 - DNA, 25 bp, Artificial
  Probe sequence
accatggtggccttggtgagagtct

SEQ ID NO: 175136 - DNA, 25 bp, Artificial
  Probe sequence
cctggccatccaatttggaaattat

SEQ ID NO: 175137 - DNA, 25 bp, Artificial
  Probe sequence
catagccagttgttccacaggggaa

SEQ ID NO: 175138 - DNA, 25 bp, Artificial
  Probe sequence
ctttggagtcaagagggcctactat

SEQ ID NO: 175139 - DNA, 25 bp, Artificial
  Probe sequence
ctctgaggaacatagccagttgttc

SEQ ID NO: 175140 - DNA, 25 bp, Artificial
  Probe sequence
ggctttggagtcaagagggcctact

SEQ ID NO: 175141 - DNA, 25 bp, Artificial
  Probe sequence
tggtagccaccatggtggccttggt

SEQ ID NO: 175142 - DNA, 25 bp, Artificial
  Probe sequence
gcttcctctggctcctaagcatgca

SEQ ID NO: 175143 - DNA, 25 bp, Artificial
  Probe sequence
tctctgaggaacatagccagttgtt

SEQ ID NO: 175144 - DNA, 25 bp, Artificial
  Probe sequence
tagccaccatggtggccttggtgag

SEQ ID NO: 175145 - DNA, 25 bp, Artificial
  Probe sequence
aaccctgtgccctactgggaagtgc

SEQ ID NO: 175146 - DNA, 25 bp, Artificial
  Probe sequence
agtctctgaggaacatagccagttg

SEQ ID NO: 175147 - DNA, 25 bp, Artificial
  Probe sequence
catggtggccttggtgagagtctct

SEQ ID NO: 175148 - DNA, 25 bp, Artificial
  Probe sequence
aagcaaagaagcaacacctttgttc

SEQ ID NO: 175149 - DNA, 25 bp, Artificial
  Probe sequence
ctctggctcctaagcatgcacatat

SEQ ID NO: 175150 - DNA, 25 bp, Artificial
  Probe sequence
ctactgggaagtgcagcctgccacc

SEQ ID NO: 175151 - DNA, 25 bp, Artificial
  Probe sequence
actgggaagtgcagcctgccacctt

SEQ ID NO: 175152 - DNA, 25 bp, Artificial
  Probe sequence
gtcaagagggcctactataatggca

SEQ ID NO: 175153 - DNA, 25 bp, Artificial
  Probe sequence
agaagcagtggtagccaccatggtg

SEQ ID NO: 175154 - DNA, 25 bp, Artificial
  Probe sequence
tgggcatcaacgatttctgccccat

SEQ ID NO: 175155 - DNA, 25 bp, Artificial
  Probe sequence
aagcatgcacatatgcacatggcct

SEQ ID NO: 175156 - DNA, 25 bp, Artificial
  Probe sequence
tgcacatatgcacatggcctggcct

SEQ ID NO: 175157 - DNA, 25 bp, Artificial
  Probe sequence
atagccagttgttccacaggggaag

SEQ ID NO: 175158 - DNA, 25 bp, Artificial
  Probe sequence
agtggtagccaccatggtggccttg

SEQ ID NO: 175159 - DNA, 25 bp, Artificial
  Probe sequence
tctggctcctaagcatgcacatatg

SEQ ID NO: 175160 - DNA, 25 bp, Artificial
  Probe sequence
atttctgccccatgggctttggagt

SEQ ID NO: 175161 - DNA, 25 bp, Artificial
  Probe sequence
gcaaagaagcaacacctttgttccc

SEQ ID NO: 175162 - DNA, 25 bp, Artificial
  Probe sequence
gtagccaccatggtggccttggtga

SEQ ID NO: 175163 - DNA, 25 bp, Artificial
  Probe sequence
gccctactgggaagtgcagcctgcc

SEQ ID NO: 175164 - DNA, 25 bp, Artificial
  Probe sequence
gatttctgccccatgggctttggag

SEQ ID NO: 175165 - DNA, 25 bp, Artificial
  Probe sequence
gctcctaagcatgcacatatgcaca

SEQ ID NO: 175166 - DNA, 25 bp, Artificial
  Probe sequence
aagagggcctactataatggcatca

SEQ ID NO: 175167 - DNA, 25 bp, Artificial
  Probe sequence
ctgagctgaacgaccccgtgcggca

SEQ ID NO: 175168 - DNA, 25 bp, Artificial
  Probe sequence
taagcttgtgggagagttcctcgaa

SEQ ID NO: 175169 - DNA, 25 bp, Artificial
  Probe sequence
tgcatcagccttacattcatctgtg

SEQ ID NO: 175170 - DNA, 25 bp, Artificial
  Probe sequence
gcatcagccttacattcatctgtga

SEQ ID NO: 175171 - DNA, 25 bp, Artificial
  Probe sequence
gggtatcgaccgagtcaccatgttt

SEQ ID NO: 175172 - DNA, 25 bp, Artificial
  Probe sequence
cttgataagcttgtgggagagttcc

SEQ ID NO: 175173 - DNA, 25 bp, Artificial
  Probe sequence
atatgcaatgcgtacactgagctga

SEQ ID NO: 175174 - DNA, 25 bp, Artificial
  Probe sequence
tgaacgaccccgtgcggcagagaca

SEQ ID NO: 175175 - DNA, 25 bp, Artificial
  Probe sequence
agagggtctaactgagcgcttcgag

SEQ ID NO: 175176 - DNA, 25 bp, Artificial
  Probe sequence
gtgacatgcatcagccttacattca

SEQ ID NO: 175177 - DNA, 25 bp, Artificial
  Probe sequence
accgttgcaaagagggtctaactga

SEQ ID NO: 175178 - DNA, 25 bp, Artificial
  Probe sequence
ccttgataagcttgtgggagagttc

SEQ ID NO: 175179 - DNA, 25 bp, Artificial
  Probe sequence
gcatgggtatcgaccgagtcaccat

SEQ ID NO: 175180 - DNA, 25 bp, Artificial
  Probe sequence
acaactgtttgaagaacaggccaag

SEQ ID NO: 175181 - DNA, 25 bp, Artificial
  Probe sequence
agtcctctggccaaatggcaccgtt

SEQ ID NO: 175182 - DNA, 25 bp, Artificial
  Probe sequence
cctctggccaaatggcaccgttgca

SEQ ID NO: 175183 - DNA, 25 bp, Artificial
  Probe sequence
actgagctgaacgaccccgtgcggc

SEQ ID NO: 175184 - DNA, 25 bp, Artificial
  Probe sequence
ggccatgttcatagatgagaacttc

SEQ ID NO: 175185 - DNA, 25 bp, Artificial
  Probe sequence
ctaactgagcgcttcgagctgtttg

SEQ ID NO: 175186 - DNA, 25 bp, Artificial
  Probe sequence
agggtctaactgagcgcttcgagct

SEQ ID NO: 175187 - DNA, 25 bp, Artificial
  Probe sequence
ctgtgatcacccacagatcatgagt

SEQ ID NO: 175188 - DNA, 25 bp, Artificial
  Probe sequence
gggcatgggtatcgaccgagtcacc

SEQ ID NO: 175189 - DNA, 25 bp, Artificial
  Probe sequence
caaatggcaccgttgcaaagagggt

SEQ ID NO: 175190 - DNA, 25 bp, Artificial
  Probe sequence
tctgtactgccctggagtacgggct

SEQ ID NO: 175191 - DNA, 25 bp, Artificial
  Probe sequence
ctgctggtgacgatgaggccatgtt

SEQ ID NO: 175192 - DNA, 25 bp, Artificial
  Probe sequence
acccacagatcatgagtcctctggc

SEQ ID NO: 175193 - DNA, 25 bp, Artificial
  Probe sequence
cttcgagctgtttgtcatgaagaag

SEQ ID NO: 175194 - DNA, 25 bp, Artificial
  Probe sequence
tcatgagtcctctggccaaatggca

SEQ ID NO: 175195 - DNA, 25 bp, Artificial
  Probe sequence
gatcacccacagatcatgagtcctc

SEQ ID NO: 175196 - DNA, 25 bp, Artificial
  Probe sequence
gctggtgacgatgaggccatgttca

SEQ ID NO: 175197 - DNA, 25 bp, Artificial
  Probe sequence
cgatgaggccatgttcatagatgag

SEQ ID NO: 175198 - DNA, 25 bp, Artificial
  Probe sequence
ctggtgacgatgaggccatgttcat

SEQ ID NO: 175199 - DNA, 25 bp, Artificial
  Probe sequence
ccacagatcatgagtcctctggcca

SEQ ID NO: 175200 - DNA, 25 bp, Artificial
  Probe sequence
tgggagagttcctcgaagtgacatg

SEQ ID NO: 175201 - DNA, 25 bp, Artificial
  Probe sequence
tgtgggagagttcctcgaagtgaca

SEQ ID NO: 175202 - DNA, 25 bp, Artificial
  Probe sequence
gaacttctgtactgccctggagtac

SEQ ID NO: 175203 - DNA, 25 bp, Artificial
  Probe sequence
gacgatgaggccatgttcatagatg

SEQ ID NO: 175204 - DNA, 25 bp, Artificial
  Probe sequence
aggccatgttcatagatgagaactt

SEQ ID NO: 175205 - DNA, 25 bp, Artificial
  Probe sequence
gaagaacaggccaaggccaaggctg

SEQ ID NO: 175206 - DNA, 25 bp, Artificial
  Probe sequence
cgtgcggcagagacaactgtttgaa

SEQ ID NO: 175207 - DNA, 25 bp, Artificial
  Probe sequence
accccgtgcggcagagacaactgtt

SEQ ID NO: 175208 - DNA, 25 bp, Artificial
  Probe sequence
agatgagaacttctgtactgccctg

SEQ ID NO: 175209 - DNA, 25 bp, Artificial
  Probe sequence
cttgtgggagagttcctcgaagtga

SEQ ID NO: 175210 - DNA, 25 bp, Artificial
  Probe sequence
tacactgagctgaacgaccccgtgc

SEQ ID NO: 175211 - DNA, 25 bp, Artificial
  Probe sequence
tggccaaatggcaccgttgcaaaga

SEQ ID NO: 175212 - DNA, 25 bp, Artificial
  Probe sequence
tactgccctggagtacgggctgccc

SEQ ID NO: 175213 - DNA, 25 bp, Artificial
  Probe sequence
ctctgctgtccatggcttctggaag

SEQ ID NO: 175214 - DNA, 25 bp, Artificial
  Probe sequence
gtcacttgtccgaacgaaaaagtcg

SEQ ID NO: 175215 - DNA, 25 bp, Artificial
  Probe sequence
gcctttgtcacttgtccgaacgaaa

SEQ ID NO: 175216 - DNA, 25 bp, Artificial
  Probe sequence
cactgcccgtggagcaggggaatcc

SEQ ID NO: 175217 - DNA, 25 bp, Artificial
  Probe sequence
atgaagttgccgaggtgatcgcact

SEQ ID NO: 175218 - DNA, 25 bp, Artificial
  Probe sequence
tcaggctctggcaaggccctaccat

SEQ ID NO: 175219 - DNA, 25 bp, Artificial
  Probe sequence
aaagtcgccaaggagattgccaggg

SEQ ID NO: 175220 - DNA, 25 bp, Artificial
  Probe sequence
atctgcactgggtgcaccaggtcac

SEQ ID NO: 175221 - DNA, 25 bp, Artificial
  Probe sequence
gccttttattgctaccccgagctct

SEQ ID NO: 175222 - DNA, 25 bp, Artificial
  Probe sequence
ggaatcccccgtatctgcactgggt

SEQ ID NO: 175223 - DNA, 25 bp, Artificial
  Probe sequence
atgattaaaacacaaagctccctgg

SEQ ID NO: 175224 - DNA, 25 bp, Artificial
  Probe sequence
ccttttattgctaccccgagctctg

SEQ ID NO: 175225 - DNA, 25 bp, Artificial
  Probe sequence
caggctctggcaaggccctaccatg

SEQ ID NO: 175226 - DNA, 25 bp, Artificial
  Probe sequence
gattaaaacacaaagctccctggtc

SEQ ID NO: 175227 - DNA, 25 bp, Artificial
  Probe sequence
atcccccgtatctgcactgggtgca

SEQ ID NO: 175228 - DNA, 25 bp, Artificial
  Probe sequence
agagtttgtccgatctgtgcaccct

SEQ ID NO: 175229 - DNA, 25 bp, Artificial
  Probe sequence
tgcccgtggagcaggggaatccccc

SEQ ID NO: 175230 - DNA, 25 bp, Artificial
  Probe sequence
ccgagctctgctgtccatggcttct

SEQ ID NO: 175231 - DNA, 25 bp, Artificial
  Probe sequence
catccatctatgaatggaaaggaaa

SEQ ID NO: 175232 - DNA, 25 bp, Artificial
  Probe sequence
ccaggatcagtctctgcagcctttg

SEQ ID NO: 175233 - DNA, 25 bp, Artificial
  Probe sequence
cgaacgaaaaagtcgccaaggagat

SEQ ID NO: 175234 - DNA, 25 bp, Artificial
  Probe sequence
ctgccggtggcttcccgccttttat

SEQ ID NO: 175235 - DNA, 25 bp, Artificial
  Probe sequence
ttgtccgaacgaaaaagtcgccaag

SEQ ID NO: 175236 - DNA, 25 bp, Artificial
  Probe sequence
atgctcttgggcttccacatgatga

SEQ ID NO: 175237 - DNA, 25 bp, Artificial
  Probe sequence
cgcagatcacatccatctatgaatg

SEQ ID NO: 175238 - DNA, 25 bp, Artificial
  Probe sequence
tggcttcccgccttttattgctacc

SEQ ID NO: 175239 - DNA, 25 bp, Artificial
  Probe sequence
cccttatgaagttgccgaggtgatc

SEQ ID NO: 175240 - DNA, 25 bp, Artificial
  Probe sequence
ctgtccatggcttctggaagccctc

SEQ ID NO: 175241 - DNA, 25 bp, Artificial
  Probe sequence
aggccctaccatgacaagccctgtt

SEQ ID NO: 175242 - DNA, 25 bp, Artificial
  Probe sequence
tgcctgccttactgccggtggcttc

SEQ ID NO: 175243 - DNA, 25 bp, Artificial
  Probe sequence
gaagcgcctggcagcctgcgtcaac

SEQ ID NO: 175244 - DNA, 25 bp, Artificial
  Probe sequence
tggagcaggggaatcccccgtatct

SEQ ID NO: 175245 - DNA, 25 bp, Artificial
  Probe sequence
tccatggcttctggaagccctccgt

SEQ ID NO: 175246 - DNA, 25 bp, Artificial
  Probe sequence
tccctggtccctgctctgacagagt

SEQ ID NO: 175247 - DNA, 25 bp, Artificial
  Probe sequence
cgggctccggctacgttccaggatc

SEQ ID NO: 175248 - DNA, 25 bp, Artificial
  Probe sequence
ttgccgaggtgatcgcactgcccgt

SEQ ID NO: 175249 - DNA, 25 bp, Artificial
  Probe sequence
gtgcaccaggtcacggaatcagtgt

SEQ ID NO: 175250 - DNA, 25 bp, Artificial
  Probe sequence
aggtgatcgcactgcccgtggagca

SEQ ID NO: 175251 - DNA, 25 bp, Artificial
  Probe sequence
tcacttgtccgaacgaaaaagtcgc

SEQ ID NO: 175252 - DNA, 25 bp, Artificial
  Probe sequence
gctcaatgctcttgggcttccacat

SEQ ID NO: 175253 - DNA, 25 bp, Artificial
  Probe sequence
ggaatcagtgtcaggctctggcaag

SEQ ID NO: 175254 - DNA, 25 bp, Artificial
  Probe sequence
ctggcaaggccctaccatgacaagc

SEQ ID NO: 175255 - DNA, 25 bp, Artificial
  Probe sequence
tagagaagcgcctggcagcctgcgt

SEQ ID NO: 175256 - DNA, 25 bp, Artificial
  Probe sequence
tcgccaaggagattgccagggcagt

SEQ ID NO: 175257 - DNA, 25 bp, Artificial
  Probe sequence
gtctctgcagcctttgtcacttgtc

SEQ ID NO: 175258 - DNA, 25 bp, Artificial
  Probe sequence
cagcttcctctgctcaatgctcttg

SEQ ID NO: 175259 - DNA, 25 bp, Artificial
  Probe sequence
gaactgttttaaacctttgtgtgct

SEQ ID NO: 175260 - DNA, 25 bp, Artificial
  Probe sequence
gtgtgtaatccttgttgctttcctg

SEQ ID NO: 175261 - DNA, 25 bp, Artificial
  Probe sequence
gtatgtagctgcactacaacagatt

SEQ ID NO: 175262 - DNA, 25 bp, Artificial
  Probe sequence
tgcctgaattgtactgtatgtagct

SEQ ID NO: 175263 - DNA, 25 bp, Artificial
  Probe sequence
tccatgcataaagtttagtgagacg

SEQ ID NO: 175264 - DNA, 25 bp, Artificial
  Probe sequence
cagaactgttttaaacctttgtgtg

SEQ ID NO: 175265 - DNA, 25 bp, Artificial
  Probe sequence
tgtactgtatgtagctgcactacaa

SEQ ID NO: 175266 - DNA, 25 bp, Artificial
  Probe sequence
gtaatttgttgcacactatgtaaca

SEQ ID NO: 175267 - DNA, 25 bp, Artificial
  Probe sequence
tgtaatttgttgcacactatgtaac

SEQ ID NO: 175268 - DNA, 25 bp, Artificial
  Probe sequence
cagtttccatgcataaagtttagtg

SEQ ID NO: 175269 - DNA, 25 bp, Artificial
  Probe sequence
gtaatccttgttgctttcctgatac

SEQ ID NO: 175270 - DNA, 25 bp, Artificial
  Probe sequence
aacagcacaaccagtgtctgtcagt

SEQ ID NO: 175271 - DNA, 25 bp, Artificial
  Probe sequence
ctgttttaaacctttgtgtgctggt

SEQ ID NO: 175272 - DNA, 25 bp, Artificial
  Probe sequence
atccttgttgctttcctgataccag

SEQ ID NO: 175273 - DNA, 25 bp, Artificial
  Probe sequence
ctcacagcaatgaattcgcaatctg

SEQ ID NO: 175274 - DNA, 25 bp, Artificial
  Probe sequence
taccagatcgtttcccgtggttggt

SEQ ID NO: 175275 - DNA, 25 bp, Artificial
  Probe sequence
tccacaaggtcagagattgtaaatg

SEQ ID NO: 175276 - DNA, 25 bp, Artificial
  Probe sequence
ctagttcttcctggtagagttataa

SEQ ID NO: 175277 - DNA, 25 bp, Artificial
  Probe sequence
gattcttaccgtttccacaaggtca

SEQ ID NO: 175278 - DNA, 25 bp, Artificial
  Probe sequence
caaacagcacaaccagtgtctgtca

SEQ ID NO: 175279 - DNA, 25 bp, Artificial
  Probe sequence
gttgcacactatgtaacaaaactga

SEQ ID NO: 175280 - DNA, 25 bp, Artificial
  Probe sequence
ctgaattgtactgtatgtagctgca

SEQ ID NO: 175281 - DNA, 25 bp, Artificial
  Probe sequence
ttccatgcataaagtttagtgagac

SEQ ID NO: 175282 - DNA, 25 bp, Artificial
  Probe sequence
agtcttctgaagatgaagttcagcc

SEQ ID NO: 175283 - DNA, 25 bp, Artificial
  Probe sequence
gctttcctgataccagatcgtttcc

SEQ ID NO: 175284 - DNA, 25 bp, Artificial
  Probe sequence
tagtcttctgaagatgaagttcagc

SEQ ID NO: 175285 - DNA, 25 bp, Artificial
  Probe sequence
atgtgtgtaatccttgttgctttcc

SEQ ID NO: 175286 - DNA, 25 bp, Artificial
  Probe sequence
tgttgcacactatgtaacaaaactg

SEQ ID NO: 175287 - DNA, 25 bp, Artificial
  Probe sequence
tgcacactatgtaacaaaactgaag

SEQ ID NO: 175288 - DNA, 25 bp, Artificial
  Probe sequence
gttcagccattttgtatcaaacagc

SEQ ID NO: 175289 - DNA, 25 bp, Artificial
  Probe sequence
tgaattgtactgtatgtagctgcac

SEQ ID NO: 175290 - DNA, 25 bp, Artificial
  Probe sequence
tttgtatcaaacagcacaaccagtg

SEQ ID NO: 175291 - DNA, 25 bp, Artificial
  Probe sequence
agttcagccattttgtatcaaacag

SEQ ID NO: 175292 - DNA, 25 bp, Artificial
  Probe sequence
atgtagctgcactacaacagattct

SEQ ID NO: 175293 - DNA, 25 bp, Artificial
  Probe sequence
tgaagttcagccattttgtatcaaa

SEQ ID NO: 175294 - DNA, 25 bp, Artificial
  Probe sequence
tttcctgataccagatcgtttcccg

SEQ ID NO: 175295 - DNA, 25 bp, Artificial
  Probe sequence
taagatctgatttgctagttcttcc

SEQ ID NO: 175296 - DNA, 25 bp, Artificial
  Probe sequence
aattgtactgtatgtagctgcacta

SEQ ID NO: 175297 - DNA, 25 bp, Artificial
  Probe sequence
gaagttcagccattttgtatcaaac

SEQ ID NO: 175298 - DNA, 25 bp, Artificial
  Probe sequence
aatgaattcgcaatctgaacccaag

SEQ ID NO: 175299 - DNA, 25 bp, Artificial
  Probe sequence
ttgcctgaattgtactgtatgtagc

SEQ ID NO: 175300 - DNA, 25 bp, Artificial
  Probe sequence
ttcgcaatctgaacccaagtgaaaa

SEQ ID NO: 175301 - DNA, 25 bp, Artificial
  Probe sequence
cacagcaatgaattcgcaatctgaa

SEQ ID NO: 175302 - DNA, 25 bp, Artificial
  Probe sequence
caaattgcctgaattgtactgtatg

SEQ ID NO: 175303 - DNA, 25 bp, Artificial
  Probe sequence
aatgtgtgtaatccttgttgctttc

SEQ ID NO: 175304 - DNA, 25 bp, Artificial
  Probe sequence
ttcagaactgttttaaacctttgtg

SEQ ID NO: 175305 - DNA, 25 bp, Artificial
  Probe sequence
cagaaccgagtttctaaggctacct

SEQ ID NO: 175306 - DNA, 25 bp, Artificial
  Probe sequence
gtattctctcctgtacctcttgagc

SEQ ID NO: 175307 - DNA, 25 bp, Artificial
  Probe sequence
gtatcccttctgtaaaatttgtgat

SEQ ID NO: 175308 - DNA, 25 bp, Artificial
  Probe sequence
cttgagccttgaactttgacctctg

SEQ ID NO: 175309 - DNA, 25 bp, Artificial
  Probe sequence
atgctgtgccctaaagtgtattttt

SEQ ID NO: 175310 - DNA, 25 bp, Artificial
  Probe sequence
gttggtggtcttctgttctttgggc

SEQ ID NO: 175311 - DNA, 25 bp, Artificial
  Probe sequence
aaggctacctttgtattctctcctg

SEQ ID NO: 175312 - DNA, 25 bp, Artificial
  Probe sequence
ctgtacctcttgagccttgaacttt

SEQ ID NO: 175313 - DNA, 25 bp, Artificial
  Probe sequence
acctctgcagcaataaagcagcatt

SEQ ID NO: 175314 - DNA, 25 bp, Artificial
  Probe sequence
tttgatgtgttcaggacgcatgtac

SEQ ID NO: 175315 - DNA, 25 bp, Artificial
  Probe sequence
gcacgatttctgtttagataataca

SEQ ID NO: 175316 - DNA, 25 bp, Artificial
  Probe sequence
acctcttgagccttgaactttgacc

SEQ ID NO: 175317 - DNA, 25 bp, Artificial
  Probe sequence
tgaactttgacctctgcagcaataa

SEQ ID NO: 175318 - DNA, 25 bp, Artificial
  Probe sequence
gtttattatggcacatcagcacgat

SEQ ID NO: 175319 - DNA, 25 bp, Artificial
  Probe sequence
taaacagaaccgagtttctaaggct

SEQ ID NO: 175320 - DNA, 25 bp, Artificial
  Probe sequence
ctctgcagcaataaagcagcatttc

SEQ ID NO: 175321 - DNA, 25 bp, Artificial
  Probe sequence
ctttgggctatgcatctgagatgtt

SEQ ID NO: 175322 - DNA, 25 bp, Artificial
  Probe sequence
gtgatacaatgctgtgccctaaagt

SEQ ID NO: 175323 - DNA, 25 bp, Artificial
  Probe sequence
gcagcatttctacacatataaggtc

SEQ ID NO: 175324 - DNA, 25 bp, Artificial
  Probe sequence
tcttctgttctttgggctatgcatc

SEQ ID NO: 175325 - DNA, 25 bp, Artificial
  Probe sequence
gtgcataccacttttgttcttggtt

SEQ ID NO: 175326 - DNA, 25 bp, Artificial
  Probe sequence
cgcatgtacataatgcgtgcatacc

SEQ ID NO: 175327 - DNA, 25 bp, Artificial
  Probe sequence
acgcatgtacataatgcgtgcatac

SEQ ID NO: 175328 - DNA, 25 bp, Artificial
  Probe sequence
tggtggtcttctgttctttgggcta

SEQ ID NO: 175329 - DNA, 25 bp, Artificial
  Probe sequence
aagtatcccttctgtaaaatttgtg

SEQ ID NO: 175330 - DNA, 25 bp, Artificial
  Probe sequence
tgttctttgggctatgcatctgaga

SEQ ID NO: 175331 - DNA, 25 bp, Artificial
  Probe sequence
tgtattctctcctgtacctcttgag

SEQ ID NO: 175332 - DNA, 25 bp, Artificial
  Probe sequence
tctctcctgtacctcttgagccttg

SEQ ID NO: 175333 - DNA, 25 bp, Artificial
  Probe sequence
aatgctgtgccctaaagtgtatttt

SEQ ID NO: 175334 - DNA, 25 bp, Artificial
  Probe sequence
ggtggtcttctgttctttgggctat

SEQ ID NO: 175335 - DNA, 25 bp, Artificial
  Probe sequence
gaactttgacctctgcagcaataaa

SEQ ID NO: 175336 - DNA, 25 bp, Artificial
  Probe sequence
acataatgcgtgcataccacttttg

SEQ ID NO: 175337 - DNA, 25 bp, Artificial
  Probe sequence
aatttgtgatacaatgctgtgccct

SEQ ID NO: 175338 - DNA, 25 bp, Artificial
  Probe sequence
tgttcaggacgcatgtacataatgc

SEQ ID NO: 175339 - DNA, 25 bp, Artificial
  Probe sequence
ttcaggacgcatgtacataatgcgt

SEQ ID NO: 175340 - DNA, 25 bp, Artificial
  Probe sequence
gatacaatgctgtgccctaaagtgt

SEQ ID NO: 175341 - DNA, 25 bp, Artificial
  Probe sequence
gtttctaaggctacctttgtattct

SEQ ID NO: 175342 - DNA, 25 bp, Artificial
  Probe sequence
gcataccacttttgttcttggtttg

SEQ ID NO: 175343 - DNA, 25 bp, Artificial
  Probe sequence
tttgacctctgcagcaataaagcag

SEQ ID NO: 175344 - DNA, 25 bp, Artificial
  Probe sequence
ataatgcgtgcataccacttttgtt

SEQ ID NO: 175345 - DNA, 25 bp, Artificial
  Probe sequence
ggctacctttgtattctctcctgta

SEQ ID NO: 175346 - DNA, 25 bp, Artificial
  Probe sequence
actttgacctctgcagcaataaagc

SEQ ID NO: 175347 - DNA, 25 bp, Artificial
  Probe sequence
aagcagcatttctacacatataagg

SEQ ID NO: 175348 - DNA, 25 bp, Artificial
  Probe sequence
gatgtgttcaggacgcatgtacata

SEQ ID NO: 175349 - DNA, 25 bp, Artificial
  Probe sequence
gccttgaactttgacctctgcagca

SEQ ID NO: 175350 - DNA, 25 bp, Artificial
  Probe sequence
gtacataatgcgtgcataccacttt

SEQ ID NO: 175351 - DNA, 25 bp, Artificial
  Probe sequence
gtgaaggcaccctttggacccacct

SEQ ID NO: 175352 - DNA, 25 bp, Artificial
  Probe sequence
gtacatgtgatgtttgactgtacca

SEQ ID NO: 175353 - DNA, 25 bp, Artificial
  Probe sequence
tgatgtttgactgtaccatcgactg

SEQ ID NO: 175354 - DNA, 25 bp, Artificial
  Probe sequence
ccccatgaacccagactagctgtgg

SEQ ID NO: 175355 - DNA, 25 bp, Artificial
  Probe sequence
tgcaaactgtcctaggaaaacttaa

SEQ ID NO: 175356 - DNA, 25 bp, Artificial
  Probe sequence
gagactccatttctggggttttgta

SEQ ID NO: 175357 - DNA, 25 bp, Artificial
  Probe sequence
ttgcatgcagccacttgggtcccag

SEQ ID NO: 175358 - DNA, 25 bp, Artificial
  Probe sequence
ctccaggcaaggtgaaggcaccctt

SEQ ID NO: 175359 - DNA, 25 bp, Artificial
  Probe sequence
ggaagttcagcgttgtatgtctctc

SEQ ID NO: 175360 - DNA, 25 bp, Artificial
  Probe sequence
gccccctgtgtgtcccgagcagaga

SEQ ID NO: 175361 - DNA, 25 bp, Artificial
  Probe sequence
gggttttgtatatctccaggcaagg

SEQ ID NO: 175362 - DNA, 25 bp, Artificial
  Probe sequence
ctaaatcttgtgttctgtacatgtg

SEQ ID NO: 175363 - DNA, 25 bp, Artificial
  Probe sequence
taaactagttatcacttcctgagtg

SEQ ID NO: 175364 - DNA, 25 bp, Artificial
  Probe sequence
gactagctgtggtgccagaaaccca

SEQ ID NO: 175365 - DNA, 25 bp, Artificial
  Probe sequence
gattaatacttcagggatccttaat

SEQ ID NO: 175366 - DNA, 25 bp, Artificial
  Probe sequence
gaatcagtagggtcacgcgaatgcc

SEQ ID NO: 175367 - DNA, 25 bp, Artificial
  Probe sequence
gggtcacgcgaatgcctcactatac

SEQ ID NO: 175368 - DNA, 25 bp, Artificial
  Probe sequence
atcagtagggtcacgcgaatgcctc

SEQ ID NO: 175369 - DNA, 25 bp, Artificial
  Probe sequence
agtgttgcatgcagccacttgggtc

SEQ ID NO: 175370 - DNA, 25 bp, Artificial
  Probe sequence
caggagtttcctgaggtgaatcagt

SEQ ID NO: 175371 - DNA, 25 bp, Artificial
  Probe sequence
ttctggggttttgtatatctccagg

SEQ ID NO: 175372 - DNA, 25 bp, Artificial
  Probe sequence
cagttcatctaaatcttgtgttctg

SEQ ID NO: 175373 - DNA, 25 bp, Artificial
  Probe sequence
acatgtgatgtttgactgtaccatc

SEQ ID NO: 175374 - DNA, 25 bp, Artificial
  Probe sequence
tcctgaggtgaatcagtagggtcac

SEQ ID NO: 175375 - DNA, 25 bp, Artificial
  Probe sequence
gtggtgccagaaacccaacttaaca

SEQ ID NO: 175376 - DNA, 25 bp, Artificial
  Probe sequence
agatgcatatcaaaagcttggcttg

SEQ ID NO: 175377 - DNA, 25 bp, Artificial
  Probe sequence
ctgtgtgtcccgagcagagactcca

SEQ ID NO: 175378 - DNA, 25 bp, Artificial
  Probe sequence
agcttggcttgaaagcctaattaag

SEQ ID NO: 175379 - DNA, 25 bp, Artificial
  Probe sequence
cacgcgaatgcctcactatactatg

SEQ ID NO: 175380 - DNA, 25 bp, Artificial
  Probe sequence
ccatttctggggttttgtatatctc

SEQ ID NO: 175381 - DNA, 25 bp, Artificial
  Probe sequence
ccagtgagatctcagtaggattaat

SEQ ID NO: 175382 - DNA, 25 bp, Artificial
  Probe sequence
taacaacagctctcagtgcaaactg

SEQ ID NO: 175383 - DNA, 25 bp, Artificial
  Probe sequence
atatctccaggcaaggtgaaggcac

SEQ ID NO: 175384 - DNA, 25 bp, Artificial
  Probe sequence
ttgtatatctccaggcaaggtgaag

SEQ ID NO: 175385 - DNA, 25 bp, Artificial
  Probe sequence
cacttgggtcccaggagtttcctga

SEQ ID NO: 175386 - DNA, 25 bp, Artificial
  Probe sequence
gttcatctaaatcttgtgttctgta

SEQ ID NO: 175387 - DNA, 25 bp, Artificial
  Probe sequence
tagggtcacgcgaatgcctcactat

SEQ ID NO: 175388 - DNA, 25 bp, Artificial
  Probe sequence
tgacttgagtccagtgagatctcag

SEQ ID NO: 175389 - DNA, 25 bp, Artificial
  Probe sequence
catcgactgttatggaagttcagcg

SEQ ID NO: 175390 - DNA, 25 bp, Artificial
  Probe sequence
tttcctgaggtgaatcagtagggtc

SEQ ID NO: 175391 - DNA, 25 bp, Artificial
  Probe sequence
agctgtggtgccagaaacccaactt

SEQ ID NO: 175392 - DNA, 25 bp, Artificial
  Probe sequence
atatcaaaagcttggcttgaaagcc

SEQ ID NO: 175393 - DNA, 25 bp, Artificial
  Probe sequence
ttgagtccagtgagatctcagtagg

SEQ ID NO: 175394 - DNA, 25 bp, Artificial
  Probe sequence
cagccacttgggtcccaggagtttc

SEQ ID NO: 175395 - DNA, 25 bp, Artificial
  Probe sequence
ccgagcagagactccatttctgggg

SEQ ID NO: 175396 - DNA, 25 bp, Artificial
  Probe sequence
atctaaatcttgtgttctgtacatg

SEQ ID NO: 175397 - DNA, 25 bp, Artificial
  Probe sequence
gcctggggcattttggggaacccat

SEQ ID NO: 175398 - DNA, 25 bp, Artificial
  Probe sequence
tcacacagaagcacgggtctctcct

SEQ ID NO: 175399 - DNA, 25 bp, Artificial
  Probe sequence
aacctgcccagctgacgcgtctgaa

SEQ ID NO: 175400 - DNA, 25 bp, Artificial
  Probe sequence
ggtctctcctcaatctttgctgcat

SEQ ID NO: 175401 - DNA, 25 bp, Artificial
  Probe sequence
aagcgtcctcagtccctcaattgtc

SEQ ID NO: 175402 - DNA, 25 bp, Artificial
  Probe sequence
tgcctacagggctgttccccggcaa

SEQ ID NO: 175403 - DNA, 25 bp, Artificial
  Probe sequence
gtgcttctccagctccgaggactct

SEQ ID NO: 175404 - DNA, 25 bp, Artificial
  Probe sequence
ctcagaacagggtgcttctccagct

SEQ ID NO: 175405 - DNA, 25 bp, Artificial
  Probe sequence
gcttcctggtactcgcggcatctca

SEQ ID NO: 175406 - DNA, 25 bp, Artificial
  Probe sequence
ggactctgcctacagggctgttccc

SEQ ID NO: 175407 - DNA, 25 bp, Artificial
  Probe sequence
acttctgtcaggaagcgccccagct

SEQ ID NO: 175408 - DNA, 25 bp, Artificial
  Probe sequence
ctgcctgaggctcaggctaccagct

SEQ ID NO: 175409 - DNA, 25 bp, Artificial
  Probe sequence
caggccagcgccaggttgaagcgtc

SEQ ID NO: 175410 - DNA, 25 bp, Artificial
  Probe sequence
cctatacatactggaataggtttta

SEQ ID NO: 175411 - DNA, 25 bp, Artificial
  Probe sequence
caggttgaagcgtcctcagtccctc

SEQ ID NO: 175412 - DNA, 25 bp, Artificial
  Probe sequence
gcgccaggttgaagcgtcctcagtc

SEQ ID NO: 175413 - DNA, 25 bp, Artificial
  Probe sequence
ttatctttggggagcctggggcatt

SEQ ID NO: 175414 - DNA, 25 bp, Artificial
  Probe sequence
accagctttgggacacagcttcctg

SEQ ID NO: 175415 - DNA, 25 bp, Artificial
  Probe sequence
tttggggaacccatggatctcttac

SEQ ID NO: 175416 - DNA, 25 bp, Artificial
  Probe sequence
aagcagggaacctgcccagctgacg

SEQ ID NO: 175417 - DNA, 25 bp, Artificial
  Probe sequence
cagctccgaggactctgcctacagg

SEQ ID NO: 175418 - DNA, 25 bp, Artificial
  Probe sequence
ctggttgctgccacttctgtcagga

SEQ ID NO: 175419 - DNA, 25 bp, Artificial
  Probe sequence
tgaggctcaggctaccagctttggg

SEQ ID NO: 175420 - DNA, 25 bp, Artificial
  Probe sequence
gaagcagggaacctgcccagctgac

SEQ ID NO: 175421 - DNA, 25 bp, Artificial
  Probe sequence
cagaagcacgggtctctcctcaatc

SEQ ID NO: 175422 - DNA, 25 bp, Artificial
  Probe sequence
aagccgagaactcagtccccaggca

SEQ ID NO: 175423 - DNA, 25 bp, Artificial
  Probe sequence
gctgccacttctgtcaggaagcgcc

SEQ ID NO: 175424 - DNA, 25 bp, Artificial
  Probe sequence
ccagctgacgcgtctgaactggaac

SEQ ID NO: 175425 - DNA, 25 bp, Artificial
  Probe sequence
ccatctcaggccagcgccaggttga

SEQ ID NO: 175426 - DNA, 25 bp, Artificial
  Probe sequence
ggcattttggggaacccatggatct

SEQ ID NO: 175427 - DNA, 25 bp, Artificial
  Probe sequence
tcctagaatgggaagcagggaacct

SEQ ID NO: 175428 - DNA, 25 bp, Artificial
  Probe sequence
ggctaccagctttgggacacagctt

SEQ ID NO: 175429 - DNA, 25 bp, Artificial
  Probe sequence
ggcaagccgagaactcagtccccag

SEQ ID NO: 175430 - DNA, 25 bp, Artificial
  Probe sequence
gcatctcagaacagggtgcttctcc

SEQ ID NO: 175431 - DNA, 25 bp, Artificial
  Probe sequence
cgtcttcctgactcacacagaagca

SEQ ID NO: 175432 - DNA, 25 bp, Artificial
  Probe sequence
tctgtgtacccgacctgaacatagg

SEQ ID NO: 175433 - DNA, 25 bp, Artificial
  Probe sequence
acaaccttctgtgtacccgacctga

SEQ ID NO: 175434 - DNA, 25 bp, Artificial
  Probe sequence
gggaacctgcccagctgacgcgtct

SEQ ID NO: 175435 - DNA, 25 bp, Artificial
  Probe sequence
ggtactcgcggcatctcagaacagg

SEQ ID NO: 175436 - DNA, 25 bp, Artificial
  Probe sequence
gaggactctgcctacagggctgttc

SEQ ID NO: 175437 - DNA, 25 bp, Artificial
  Probe sequence
cctggggcattttggggaacccatg

SEQ ID NO: 175438 - DNA, 25 bp, Artificial
  Probe sequence
gcattttggggaacccatggatctc

SEQ ID NO: 175439 - DNA, 25 bp, Artificial
  Probe sequence
tcacttgaacccaggagctttaaaa

SEQ ID NO: 175440 - DNA, 25 bp, Artificial
  Probe sequence
catgctggttgctgccacttctgtc

SEQ ID NO: 175441 - DNA, 25 bp, Artificial
  Probe sequence
caaccttctgtgtacccgacctgaa

SEQ ID NO: 175442 - DNA, 25 bp, Artificial
  Probe sequence
gcctacagggctgttccccggcaag

SEQ ID NO: 175443 - DNA, 25 bp, Artificial
  Probe sequence
ctgcgctcacatacaggcgaggagg

SEQ ID NO: 175444 - DNA, 25 bp, Artificial
  Probe sequence
gactttgcagccatggagtttctag

SEQ ID NO: 175445 - DNA, 25 bp, Artificial
  Probe sequence
gtcaatgatgatgcttccaggacaa

SEQ ID NO: 175446 - DNA, 25 bp, Artificial
  Probe sequence
cagccatggagtttctagatgggga

SEQ ID NO: 175447 - DNA, 25 bp, Artificial
  Probe sequence
ctgagcgcgggaccagccacagcat

SEQ ID NO: 175448 - DNA, 25 bp, Artificial
  Probe sequence
ctcctgccactctaagtattgaatg

SEQ ID NO: 175449 - DNA, 25 bp, Artificial
  Probe sequence
gagcgcgggaccagccacagcatgc

SEQ ID NO: 175450 - DNA, 25 bp, Artificial
  Probe sequence
atgctgactttgcagccatggagtt

SEQ ID NO: 175451 - DNA, 25 bp, Artificial
  Probe sequence
tgatgatgcttccaggacaaagcaa

SEQ ID NO: 175452 - DNA, 25 bp, Artificial
  Probe sequence
tctagatggggacaaccgtagactg

SEQ ID NO: 175453 - DNA, 25 bp, Artificial
  Probe sequence
cagttcgtgcccttccgagagttcc

SEQ ID NO: 175454 - DNA, 25 bp, Artificial
  Probe sequence
ctccctttgtcagagtcaatgatga

SEQ ID NO: 175455 - DNA, 25 bp, Artificial
  Probe sequence
cacatacaggcgaggaggcagcccg

SEQ ID NO: 175456 - DNA, 25 bp, Artificial
  Probe sequence
cgtgcccttccgagagttccgcaat

SEQ ID NO: 175457 - DNA, 25 bp, Artificial
  Probe sequence
atggagtttctagatggggacaacc

SEQ ID NO: 175458 - DNA, 25 bp, Artificial
  Probe sequence
tcctcagcaggtagtgcagtatttc

SEQ ID NO: 175459 - DNA, 25 bp, Artificial
  Probe sequence
agcggtgcttgcagagcttcctcag

SEQ ID NO: 175460 - DNA, 25 bp, Artificial
  Probe sequence
cgagagttccgcaatgcagccaaag

SEQ ID NO: 175461 - DNA, 25 bp, Artificial
  Probe sequence
caactcggagcctgcctgagcgcgg

SEQ ID NO: 175462 - DNA, 25 bp, Artificial
  Probe sequence
ggaacatgcacgttcaccctgcttc

SEQ ID NO: 175463 - DNA, 25 bp, Artificial
  Probe sequence
gaccagccacagcatgccagctgag

SEQ ID NO: 175464 - DNA, 25 bp, Artificial
  Probe sequence
atgcagccaaagaaacgctggctaa

SEQ ID NO: 175465 - DNA, 25 bp, Artificial
  Probe sequence
gcccataggggctccctttgtcaga

SEQ ID NO: 175466 - DNA, 25 bp, Artificial
  Probe sequence
caggaacatgcacgttcaccctgct

SEQ ID NO: 175467 - DNA, 25 bp, Artificial
  Probe sequence
cgcaatgcagccaaagaaacgctgg

SEQ ID NO: 175468 - DNA, 25 bp, Artificial
  Probe sequence
cttcctcagcaggtagtgcagtatt

SEQ ID NO: 175469 - DNA, 25 bp, Artificial
  Probe sequence
agttcgtgcccttccgagagttccg

SEQ ID NO: 175470 - DNA, 25 bp, Artificial
  Probe sequence
aacgctggctaaagcggtgcttgca

SEQ ID NO: 175471 - DNA, 25 bp, Artificial
  Probe sequence
aggcagcccgggacattgtgcagtt

SEQ ID NO: 175472 - DNA, 25 bp, Artificial
  Probe sequence
acaaccgtagactgcgctcacatac

SEQ ID NO: 175473 - DNA, 25 bp, Artificial
  Probe sequence
tagatggggacaaccgtagactgcg

SEQ ID NO: 175474 - DNA, 25 bp, Artificial
  Probe sequence
ttgtgcagttcgtgcccttccgaga

SEQ ID NO: 175475 - DNA, 25 bp, Artificial
  Probe sequence
cctttgtcagagtcaatgatgatgc

SEQ ID NO: 175476 - DNA, 25 bp, Artificial
  Probe sequence
tgcttccaggacaaagcaactccct

SEQ ID NO: 175477 - DNA, 25 bp, Artificial
  Probe sequence
gggaccagccacagcatgccagctg

SEQ ID NO: 175478 - DNA, 25 bp, Artificial
  Probe sequence
cgtagactgcgctcacatacaggcg

SEQ ID NO: 175479 - DNA, 25 bp, Artificial
  Probe sequence
tggggacaaccgtagactgcgctca

SEQ ID NO: 175480 - DNA, 25 bp, Artificial
  Probe sequence
gttccgcaatgcagccaaagaaacg

SEQ ID NO: 175481 - DNA, 25 bp, Artificial
  Probe sequence
tcagcaggtagtgcagtatttcaag

SEQ ID NO: 175482 - DNA, 25 bp, Artificial
  Probe sequence
tggctaaagcggtgcttgcagagct

SEQ ID NO: 175483 - DNA, 25 bp, Artificial
  Probe sequence
aggggctccctttgtcagagtcaat

SEQ ID NO: 175484 - DNA, 25 bp, Artificial
  Probe sequence
ttctagatggggacaaccgtagact

SEQ ID NO: 175485 - DNA, 25 bp, Artificial
  Probe sequence
ataggggctccctttgtcagagtca

SEQ ID NO: 175486 - DNA, 25 bp, Artificial
  Probe sequence
ccttccgagagttccgcaatgcagc

SEQ ID NO: 175487 - DNA, 25 bp, Artificial
  Probe sequence
gcgctcacatacaggcgaggaggca

SEQ ID NO: 175488 - DNA, 25 bp, Artificial
  Probe sequence
tgcagccatggagtttctagatggg

SEQ ID NO: 175489 - DNA, 25 bp, Artificial
  Probe sequence
tattggctgaagaccagtcacagcc

SEQ ID NO: 175490 - DNA, 25 bp, Artificial
  Probe sequence
tctaaccccagacctgttcacggtt

SEQ ID NO: 175491 - DNA, 25 bp, Artificial
  Probe sequence
ttgtaagcctttctattcccaacgg

SEQ ID NO: 175492 - DNA, 25 bp, Artificial
  Probe sequence
cacttttaagacaatattggctgaa

SEQ ID NO: 175493 - DNA, 25 bp, Artificial
  Probe sequence
gcctagtatctaaccccagacctgt

SEQ ID NO: 175494 - DNA, 25 bp, Artificial
  Probe sequence
ttctctaacggattcatgtgtagct

SEQ ID NO: 175495 - DNA, 25 bp, Artificial
  Probe sequence
ccagtcacagccatttcaataatgg

SEQ ID NO: 175496 - DNA, 25 bp, Artificial
  Probe sequence
gtatctaaccccagacctgttcacg

SEQ ID NO: 175497 - DNA, 25 bp, Artificial
  Probe sequence
cggtttcacttttaagacaatattg

SEQ ID NO: 175498 - DNA, 25 bp, Artificial
  Probe sequence
tctaacggattcatgtgtagctcaa

SEQ ID NO: 175499 - DNA, 25 bp, Artificial
  Probe sequence
agccatttcaataatggaggcaaaa

SEQ ID NO: 175500 - DNA, 25 bp, Artificial
  Probe sequence
agcctacttctctaacggattcatg

SEQ ID NO: 175501 - DNA, 25 bp, Artificial
  Probe sequence
cagccatttcaataatggaggcaaa

SEQ ID NO: 175502 - DNA, 25 bp, Artificial
  Probe sequence
ttctgtgacacctgacactgccagc

SEQ ID NO: 175503 - DNA, 25 bp, Artificial
  Probe sequence
cccagacctgttcacggtttcactt

SEQ ID NO: 175504 - DNA, 25 bp, Artificial
  Probe sequence
tgtgacacctgacactgccagccta

SEQ ID NO: 175505 - DNA, 25 bp, Artificial
  Probe sequence
cttctctaacggattcatgtgtagc

SEQ ID NO: 175506 - DNA, 25 bp, Artificial
  Probe sequence
cacgggtctttgtaagcctttctat

SEQ ID NO: 175507 - DNA, 25 bp, Artificial
  Probe sequence
ccatttcaataatggaggcaaaaag

SEQ ID NO: 175508 - DNA, 25 bp, Artificial
  Probe sequence
agttttcatgatcagtcctacgtca

SEQ ID NO: 175509 - DNA, 25 bp, Artificial
  Probe sequence
acaatattggctgaagaccagtcac

SEQ ID NO: 175510 - DNA, 25 bp, Artificial
  Probe sequence
tggctgaagaccagtcacagccatt

SEQ ID NO: 175511 - DNA, 25 bp, Artificial
  Probe sequence
aagcctttctattcccaacggtgag

SEQ ID NO: 175512 - DNA, 25 bp, Artificial
  Probe sequence
ttcacttttaagacaatattggctg

SEQ ID NO: 175513 - DNA, 25 bp, Artificial
  Probe sequence
aacggtgaggtttctgtgacacctg

SEQ ID NO: 175514 - DNA, 25 bp, Artificial
  Probe sequence
tgcctagtatctaaccccagacctg

SEQ ID NO: 175515 - DNA, 25 bp, Artificial
  Probe sequence
tgttcacggtttcacttttaagaca

SEQ ID NO: 175516 - DNA, 25 bp, Artificial
  Probe sequence
ttcccaacggtgaggtttctgtgac

SEQ ID NO: 175517 - DNA, 25 bp, Artificial
  Probe sequence
gttttcatgatcagtcctacgtcat

SEQ ID NO: 175518 - DNA, 25 bp, Artificial
  Probe sequence
tgaagaccagtcacagccatttcaa

SEQ ID NO: 175519 - DNA, 25 bp, Artificial
  Probe sequence
acggattcatgtgtagctcaataaa

SEQ ID NO: 175520 - DNA, 25 bp, Artificial
  Probe sequence
gtttcacttttaagacaatattggc

SEQ ID NO: 175521 - DNA, 25 bp, Artificial
  Probe sequence
aggtttctgtgacacctgacactgc

SEQ ID NO: 175522 - DNA, 25 bp, Artificial
  Probe sequence
acggtgaggtttctgtgacacctga

SEQ ID NO: 175523 - DNA, 25 bp, Artificial
  Probe sequence
ttaaagccagttttcatgatcagtc

SEQ ID NO: 175524 - DNA, 25 bp, Artificial
  Probe sequence
atctaaccccagacctgttcacggt

SEQ ID NO: 175525 - DNA, 25 bp, Artificial
  Probe sequence
gccagcctacttctctaacggattc

SEQ ID NO: 175526 - DNA, 25 bp, Artificial
  Probe sequence
tcacttttaagacaatattggctga

SEQ ID NO: 175527 - DNA, 25 bp, Artificial
  Probe sequence
tgaggtttctgtgacacctgacact

SEQ ID NO: 175528 - DNA, 25 bp, Artificial
  Probe sequence
cctacttctctaacggattcatgtg

SEQ ID NO: 175529 - DNA, 25 bp, Artificial
  Probe sequence
tattcccaacggtgaggtttctgtg

SEQ ID NO: 175530 - DNA, 25 bp, Artificial
  Probe sequence
actgccagcctacttctctaacgga

SEQ ID NO: 175531 - DNA, 25 bp, Artificial
  Probe sequence
ctgccagcctacttctctaacggat

SEQ ID NO: 175532 - DNA, 25 bp, Artificial
  Probe sequence
gtcacagccatttcaataatggagg

SEQ ID NO: 175533 - DNA, 25 bp, Artificial
  Probe sequence
ccagttttcatgatcagtcctacgt

SEQ ID NO: 175534 - DNA, 25 bp, Artificial
  Probe sequence
ccagacctgttcacggtttcacttt

SEQ ID NO: 175535 - DNA, 25 bp, Artificial
  Probe sequence
aagaccgaccacagattgcaagagt

SEQ ID NO: 175536 - DNA, 25 bp, Artificial
  Probe sequence
atggaacatctagaccctgatgaag

SEQ ID NO: 175537 - DNA, 25 bp, Artificial
  Probe sequence
actctacggagttggcagcacagat

SEQ ID NO: 175538 - DNA, 25 bp, Artificial
  Probe sequence
tgctcggaacaaagcaattacctcg

SEQ ID NO: 175539 - DNA, 25 bp, Artificial
  Probe sequence
tcatggatgtcatcgctatttgctg

SEQ ID NO: 175540 - DNA, 25 bp, Artificial
  Probe sequence
tacaaagaccgaccacagattgcaa

SEQ ID NO: 175541 - DNA, 25 bp, Artificial
  Probe sequence
gcacttcagggtcattgagaaggtc

SEQ ID NO: 175542 - DNA, 25 bp, Artificial
  Probe sequence
gaacaaagcaattacctcgctgctt

SEQ ID NO: 175543 - DNA, 25 bp, Artificial
  Probe sequence
tgacgtcatggatgtcatcgctatt

SEQ ID NO: 175544 - DNA, 25 bp, Artificial
  Probe sequence
cagactctacggagttggcagcaca

SEQ ID NO: 175545 - DNA, 25 bp, Artificial
  Probe sequence
tcgctatttgctgtccaaagtacaa

SEQ ID NO: 175546 - DNA, 25 bp, Artificial
  Probe sequence
tacggagttggcagcacagatgaat

SEQ ID NO: 175547 - DNA, 25 bp, Artificial
  Probe sequence
caaatgctcggaacaaagcaattac

SEQ ID NO: 175548 - DNA, 25 bp, Artificial
  Probe sequence
agcagcagacacagaagatgaggag

SEQ ID NO: 175549 - DNA, 25 bp, Artificial
  Probe sequence
agactctacggagttggcagcacag

SEQ ID NO: 175550 - DNA, 25 bp, Artificial
  Probe sequence
gcagcagacacagaagatgaggaga

SEQ ID NO: 175551 - DNA, 25 bp, Artificial
  Probe sequence
attcatggaacatctagaccctgat

SEQ ID NO: 175552 - DNA, 25 bp, Artificial
  Probe sequence
ggatgtcatcgctatttgctgtcca

SEQ ID NO: 175553 - DNA, 25 bp, Artificial
  Probe sequence
caaagaccgaccacagattgcaaga

SEQ ID NO: 175554 - DNA, 25 bp, Artificial
  Probe sequence
cccagcagcagacacagaagatgag

SEQ ID NO: 175555 - DNA, 25 bp, Artificial
  Probe sequence
aggaggcacttcagggtcattgaga

SEQ ID NO: 175556 - DNA, 25 bp, Artificial
  Probe sequence
tggaacatctagaccctgatgaaga

SEQ ID NO: 175557 - DNA, 25 bp, Artificial
  Probe sequence
tagtgcagagaaccagcagtggcgt

SEQ ID NO: 175558 - DNA, 25 bp, Artificial
  Probe sequence
tgtcatcgctatttgctgtccaaag

SEQ ID NO: 175559 - DNA, 25 bp, Artificial
  Probe sequence
aattcagactctacggagttggcag

SEQ ID NO: 175560 - DNA, 25 bp, Artificial
  Probe sequence
aagtgttgacgtcatggatgtcatc

SEQ ID NO: 175561 - DNA, 25 bp, Artificial
  Probe sequence
ggcacttcagggtcattgagaaggt

SEQ ID NO: 175562 - DNA, 25 bp, Artificial
  Probe sequence
ccacagattgcaagagtagtgcaga

SEQ ID NO: 175563 - DNA, 25 bp, Artificial
  Probe sequence
tagcacaaatgctcggaacaaagca

SEQ ID NO: 175564 - DNA, 25 bp, Artificial
  Probe sequence
attgcaagagtagtgcagagaacca

SEQ ID NO: 175565 - DNA, 25 bp, Artificial
  Probe sequence
aaagcaattacctcgctgcttggag

SEQ ID NO: 175566 - DNA, 25 bp, Artificial
  Probe sequence
cggagttggcagcacagatgaatga

SEQ ID NO: 175567 - DNA, 25 bp, Artificial
  Probe sequence
agaggtgtcggctagcacaaatgct

SEQ ID NO: 175568 - DNA, 25 bp, Artificial
  Probe sequence
aaacgaaattcagactctacggagt

SEQ ID NO: 175569 - DNA, 25 bp, Artificial
  Probe sequence
tccaaagtacaaagaccgaccacag

SEQ ID NO: 175570 - DNA, 25 bp, Artificial
  Probe sequence
ggaacaaagcaattacctcgctgct

SEQ ID NO: 175571 - DNA, 25 bp, Artificial
  Probe sequence
caaagcaattacctcgctgcttgga

SEQ ID NO: 175572 - DNA, 25 bp, Artificial
  Probe sequence
gtacaaagaccgaccacagattgca

SEQ ID NO: 175573 - DNA, 25 bp, Artificial
  Probe sequence
ccagcagcagacacagaagatgagg

SEQ ID NO: 175574 - DNA, 25 bp, Artificial
  Probe sequence
tgctgtccaaagtacaaagaccgac

SEQ ID NO: 175575 - DNA, 25 bp, Artificial
  Probe sequence
ctgtccaaagtacaaagaccgacca

SEQ ID NO: 175576 - DNA, 25 bp, Artificial
  Probe sequence
ctagcacaaatgctcggaacaaagc

SEQ ID NO: 175577 - DNA, 25 bp, Artificial
  Probe sequence
caaagtacaaagaccgaccacagat

SEQ ID NO: 175578 - DNA, 25 bp, Artificial
  Probe sequence
gtgttgacgtcatggatgtcatcgc

SEQ ID NO: 175579 - DNA, 25 bp, Artificial
  Probe sequence
cttcagggtcattgagaaggtcaaa

SEQ ID NO: 175580 - DNA, 25 bp, Artificial
  Probe sequence
tgtccaaagtacaaagaccgaccac

SEQ ID NO: 175581 - DNA, 25 bp, Artificial
  Probe sequence
ttgctccattgaatttgccacgcat

SEQ ID NO: 175582 - DNA, 25 bp, Artificial
  Probe sequence
ggccacctctgtgatgccttcactg

SEQ ID NO: 175583 - DNA, 25 bp, Artificial
  Probe sequence
aatcccaaggccatgctgaacaaag

SEQ ID NO: 175584 - DNA, 25 bp, Artificial
  Probe sequence
gtccagctctacagggcaagctgag

SEQ ID NO: 175585 - DNA, 25 bp, Artificial
  Probe sequence
ctccagtgcccatctttaagtgcct

SEQ ID NO: 175586 - DNA, 25 bp, Artificial
  Probe sequence
gagaacctacgcatggtggtagttg

SEQ ID NO: 175587 - DNA, 25 bp, Artificial
  Probe sequence
cccagggctggctgacaaggtcttc

SEQ ID NO: 175588 - DNA, 25 bp, Artificial
  Probe sequence
gggacattgctccattgaatttgcc

SEQ ID NO: 175589 - DNA, 25 bp, Artificial
  Probe sequence
tccatcaatcccaaggccatgctga

SEQ ID NO: 175590 - DNA, 25 bp, Artificial
  Probe sequence
ggccctactgctcatgattctatac

SEQ ID NO: 175591 - DNA, 25 bp, Artificial
  Probe sequence
tagttgacctgttcactgcagggat

SEQ ID NO: 175592 - DNA, 25 bp, Artificial
  Probe sequence
tcacgagttgtgacattgaagtgca

SEQ ID NO: 175593 - DNA, 25 bp, Artificial
  Probe sequence
ccatcaatcccaaggccatgctgaa

SEQ ID NO: 175594 - DNA, 25 bp, Artificial
  Probe sequence
caaggtcttccaaggtcagaagacc

SEQ ID NO: 175595 - DNA, 25 bp, Artificial
  Probe sequence
tctttaagtgcctgggtgtgaagcc

SEQ ID NO: 175596 - DNA, 25 bp, Artificial
  Probe sequence
tcatgattctatacccggatgtgca

SEQ ID NO: 175597 - DNA, 25 bp, Artificial
  Probe sequence
gatcgcatccctcatttttgcccgt

SEQ ID NO: 175598 - DNA, 25 bp, Artificial
  Probe sequence
attgaatttgccacgcatcacgagt

SEQ ID NO: 175599 - DNA, 25 bp, Artificial
  Probe sequence
agaacaggaccacctgggaccctgc

SEQ ID NO: 175600 - DNA, 25 bp, Artificial
  Probe sequence
gcactgctgcgcatcccagggctgg

SEQ ID NO: 175601 - DNA, 25 bp, Artificial
  Probe sequence
taacctgctggctgagaacaggacc

SEQ ID NO: 175602 - DNA, 25 bp, Artificial
  Probe sequence
tttgcccgtcgctttgaatatgaag

SEQ ID NO: 175603 - DNA, 25 bp, Artificial
  Probe sequence
catttttgcccgtcgctttgaatat

SEQ ID NO: 175604 - DNA, 25 bp, Artificial
  Probe sequence
cctacgcatggtggtagttgacctg

SEQ ID NO: 175605 - DNA, 25 bp, Artificial
  Probe sequence
ctactgctcatgattctatacccgg

SEQ ID NO: 175606 - DNA, 25 bp, Artificial
  Probe sequence
agaagtctctggtttcattcctgag

SEQ ID NO: 175607 - DNA, 25 bp, Artificial
  Probe sequence
agcgctttggggacattgctccatt

SEQ ID NO: 175608 - DNA, 25 bp, Artificial
  Probe sequence
ctgctggctgagaacaggaccacct

SEQ ID NO: 175609 - DNA, 25 bp, Artificial
  Probe sequence
gctccattgaatttgccacgcatca

SEQ ID NO: 175610 - DNA, 25 bp, Artificial
  Probe sequence
tccaaggtcagaagaccttcatggc

SEQ ID NO: 175611 - DNA, 25 bp, Artificial
  Probe sequence
atatgaagacccttacctcatcagg

SEQ ID NO: 175612 - DNA, 25 bp, Artificial
  Probe sequence
ctaattccagtccagctctacaggg

SEQ ID NO: 175613 - DNA, 25 bp, Artificial
  Probe sequence
taagtgcctgggtgtgaagcccaga

SEQ ID NO: 175614 - DNA, 25 bp, Artificial
  Probe sequence
gagaacaggaccacctgggaccctg

SEQ ID NO: 175615 - DNA, 25 bp, Artificial
  Probe sequence
gttcttaacacgttcccagcactgc

SEQ ID NO: 175616 - DNA, 25 bp, Artificial
  Probe sequence
tggtagttgacctgttcactgcagg

SEQ ID NO: 175617 - DNA, 25 bp, Artificial
  Probe sequence
ttgcccgtcgctttgaatatgaaga

SEQ ID NO: 175618 - DNA, 25 bp, Artificial
  Probe sequence
caacagactgaaagcggtgcaggaa

SEQ ID NO: 175619 - DNA, 25 bp, Artificial
  Probe sequence
gcctgggtgtgaagcccagatccca

SEQ ID NO: 175620 - DNA, 25 bp, Artificial
  Probe sequence
tgtgaagcccagatcccaaggtgtg

SEQ ID NO: 175621 - DNA, 25 bp, Artificial
  Probe sequence
ctatacccggatgtgcagcgcagag

SEQ ID NO: 175622 - DNA, 25 bp, Artificial
  Probe sequence
gctctacagggcaagctgagccacg

SEQ ID NO: 175623 - DNA, 25 bp, Artificial
  Probe sequence
catgctgaacaaagccttgtgtaat

SEQ ID NO: 175624 - DNA, 25 bp, Artificial
  Probe sequence
tggctgacaaggtcttccaaggtca

SEQ ID NO: 175625 - DNA, 25 bp, Artificial
  Probe sequence
ttctatacccggatgtgcagcgcag

SEQ ID NO: 175626 - DNA, 25 bp, Artificial
  Probe sequence
ggtgtgaagcccagatcccaaggtg

SEQ ID NO: 175627 - DNA, 25 bp, Artificial
  Probe sequence
tctttgcctttctccttagcccttc

SEQ ID NO: 175628 - DNA, 25 bp, Artificial
  Probe sequence
ctctgtgcattcaaacgttagaagg

SEQ ID NO: 175629 - DNA, 25 bp, Artificial
  Probe sequence
agattaaaacagttctgtggctgcc

SEQ ID NO: 175630 - DNA, 25 bp, Artificial
  Probe sequence
agtgtcatacacagattaaaacagt

SEQ ID NO: 175631 - DNA, 25 bp, Artificial
  Probe sequence
tctagtccagcctctaccttagtgt

SEQ ID NO: 175632 - DNA, 25 bp, Artificial
  Probe sequence
aaagaaattctagtccagcctctac

SEQ ID NO: 175633 - DNA, 25 bp, Artificial
  Probe sequence
ggtgtctttgcctttctccttagcc

SEQ ID NO: 175634 - DNA, 25 bp, Artificial
  Probe sequence
agcgactatggtgtctttgcctttc

SEQ ID NO: 175635 - DNA, 25 bp, Artificial
  Probe sequence
ccagcgactatggtgtctttgcctt

SEQ ID NO: 175636 - DNA, 25 bp, Artificial
  Probe sequence
taccagctctgtgcattcaaacgtt

SEQ ID NO: 175637 - DNA, 25 bp, Artificial
  Probe sequence
ctaccagctctgtgcattcaaacgt

SEQ ID NO: 175638 - DNA, 25 bp, Artificial
  Probe sequence
cgactatggtgtctttgcctttctc

SEQ ID NO: 175639 - DNA, 25 bp, Artificial
  Probe sequence
gactatggtgtctttgcctttctcc

SEQ ID NO: 175640 - DNA, 25 bp, Artificial
  Probe sequence
gtgtctttgcctttctccttagccc

SEQ ID NO: 175641 - DNA, 25 bp, Artificial
  Probe sequence
atgaatttgccacacaagacttctc

SEQ ID NO: 175642 - DNA, 25 bp, Artificial
  Probe sequence
gcgactatggtgtctttgcctttct

SEQ ID NO: 175643 - DNA, 25 bp, Artificial
  Probe sequence
gattaaaacagttctgtggctgcca

SEQ ID NO: 175644 - DNA, 25 bp, Artificial
  Probe sequence
cagcgactatggtgtctttgccttt

SEQ ID NO: 175645 - DNA, 25 bp, Artificial
  Probe sequence
agtccagcctctaccttagtgtcat

SEQ ID NO: 175646 - DNA, 25 bp, Artificial
  Probe sequence
accagctctgtgcattcaaacgtta

SEQ ID NO: 175647 - DNA, 25 bp, Artificial
  Probe sequence
cagattaaaacagttctgtggctgc

SEQ ID NO: 175648 - DNA, 25 bp, Artificial
  Probe sequence
tgtgcattcaaacgttagaaggaaa

SEQ ID NO: 175649 - DNA, 25 bp, Artificial
  Probe sequence
ctatggtgtctttgcctttctcctt

SEQ ID NO: 175650 - DNA, 25 bp, Artificial
  Probe sequence
tccagcctctaccttagtgtcatac

SEQ ID NO: 175651 - DNA, 25 bp, Artificial
  Probe sequence
ttgcagacattgtcccaatgaattt

SEQ ID NO: 175652 - DNA, 25 bp, Artificial
  Probe sequence
gctctgtgcattcaaacgttagaag

SEQ ID NO: 175653 - DNA, 25 bp, Artificial
  Probe sequence
tgtcccaatgaatttgccacacaag

SEQ ID NO: 175654 - DNA, 25 bp, Artificial
  Probe sequence
gcattcaaacgttagaaggaaagaa

SEQ ID NO: 175655 - DNA, 25 bp, Artificial
  Probe sequence
agctctgtgcattcaaacgttagaa

SEQ ID NO: 175656 - DNA, 25 bp, Artificial
  Probe sequence
actatggtgtctttgcctttctcct

SEQ ID NO: 175657 - DNA, 25 bp, Artificial
  Probe sequence
ttctagtccagcctctaccttagtg

SEQ ID NO: 175658 - DNA, 25 bp, Artificial
  Probe sequence
ctagtccagcctctaccttagtgtc

SEQ ID NO: 175659 - DNA, 25 bp, Artificial
  Probe sequence
gtcatacacagattaaaacagttct

SEQ ID NO: 175660 - DNA, 25 bp, Artificial
  Probe sequence
cagacattgtcccaatgaatttgcc

SEQ ID NO: 175661 - DNA, 25 bp, Artificial
  Probe sequence
gtccagcctctaccttagtgtcata

SEQ ID NO: 175662 - DNA, 25 bp, Artificial
  Probe sequence
ccagctctgtgcattcaaacgttag

SEQ ID NO: 175663 - DNA, 25 bp, Artificial
  Probe sequence
ttgtcccaatgaatttgccacacaa

SEQ ID NO: 175664 - DNA, 25 bp, Artificial
  Probe sequence
gcctctaccttagtgtcatacacag

SEQ ID NO: 175665 - DNA, 25 bp, Artificial
  Probe sequence
tagtccagcctctaccttagtgtca

SEQ ID NO: 175666 - DNA, 25 bp, Artificial
  Probe sequence
cagctctgtgcattcaaacgttaga

SEQ ID NO: 175667 - DNA, 25 bp, Artificial
  Probe sequence
tctgtgcattcaaacgttagaagga

SEQ ID NO: 175668 - DNA, 25 bp, Artificial
  Probe sequence
tagtgtcatacacagattaaaacag

SEQ ID NO: 175669 - DNA, 25 bp, Artificial
  Probe sequence
ctgtgcattcaaacgttagaaggaa

SEQ ID NO: 175670 - DNA, 25 bp, Artificial
  Probe sequence
gtcccaatgaatttgccacacaaga

SEQ ID NO: 175671 - DNA, 25 bp, Artificial
  Probe sequence
tttgcagacattgtcccaatgaatt

SEQ ID NO: 175672 - DNA, 25 bp, Artificial
  Probe sequence
gtgtcatacacagattaaaacagtt

SEQ ID NO: 175673 - DNA, 25 bp, Artificial
  Probe sequence
aacataagatcaggctttggatgag

SEQ ID NO: 175674 - DNA, 25 bp, Artificial
  Probe sequence
aagatcaggctttggatgagtgttc

SEQ ID NO: 175675 - DNA, 25 bp, Artificial
  Probe sequence
cataagatcaggctttggatgagtg

SEQ ID NO: 175676 - DNA, 25 bp, Artificial
  Probe sequence
ggcatatccacaggaaccccaacag

SEQ ID NO: 175677 - DNA, 25 bp, Artificial
  Probe sequence
tcttttctggttggcatatccacag

SEQ ID NO: 175678 - DNA, 25 bp, Artificial
  Probe sequence
tctggttggcatatccacaggaacc

SEQ ID NO: 175679 - DNA, 25 bp, Artificial
  Probe sequence
atgagtgttcttttctggttggcat

SEQ ID NO: 175680 - DNA, 25 bp, Artificial
  Probe sequence
ttttctggttggcatatccacagga

SEQ ID NO: 175681 - DNA, 25 bp, Artificial
  Probe sequence
gatcaggctttggatgagtgttctt

SEQ ID NO: 175682 - DNA, 25 bp, Artificial
  Probe sequence
gtgttcttttctggttggcatatcc

SEQ ID NO: 175683 - DNA, 25 bp, Artificial
  Probe sequence
ttctggttggcatatccacaggaac

SEQ ID NO: 175684 - DNA, 25 bp, Artificial
  Probe sequence
agtgttcttttctggttggcatatc

SEQ ID NO: 175685 - DNA, 25 bp, Artificial
  Probe sequence
gagtgttcttttctggttggcatat

SEQ ID NO: 175686 - DNA, 25 bp, Artificial
  Probe sequence
gatgagtgttcttttctggttggca

SEQ ID NO: 175687 - DNA, 25 bp, Artificial
  Probe sequence
tgagtgttcttttctggttggcata

SEQ ID NO: 175688 - DNA, 25 bp, Artificial
  Probe sequence
cttttctggttggcatatccacagg

SEQ ID NO: 175689 - DNA, 25 bp, Artificial
  Probe sequence
agatcaggctttggatgagtgttct

SEQ ID NO: 175690 - DNA, 25 bp, Artificial
  Probe sequence
gttcttttctggttggcatatccac

SEQ ID NO: 175691 - DNA, 25 bp, Artificial
  Probe sequence
ggatgagtgttcttttctggttggc

SEQ ID NO: 175692 - DNA, 25 bp, Artificial
  Probe sequence
tgttcttttctggttggcatatcca

SEQ ID NO: 175693 - DNA, 25 bp, Artificial
  Probe sequence
atcaggctttggatgagtgttcttt

SEQ ID NO: 175694 - DNA, 25 bp, Artificial
  Probe sequence
tttctggttggcatatccacaggaa

SEQ ID NO: 175695 - DNA, 25 bp, Artificial
  Probe sequence
ataagatcaggctttggatgagtgt

SEQ ID NO: 175696 - DNA, 25 bp, Artificial
  Probe sequence
ctttggatgagtgttcttttctggt

SEQ ID NO: 175697 - DNA, 25 bp, Artificial
  Probe sequence
tggcatatccacaggaaccccaaca

SEQ ID NO: 175698 - DNA, 25 bp, Artificial
  Probe sequence
taagatcaggctttggatgagtgtt

SEQ ID NO: 175699 - DNA, 25 bp, Artificial
  Probe sequence
tggatgagtgttcttttctggttgg

SEQ ID NO: 175700 - DNA, 25 bp, Artificial
  Probe sequence
ttcttttctggttggcatatccaca

SEQ ID NO: 175701 - DNA, 25 bp, Artificial
  Probe sequence
tcaggctttggatgagtgttctttt

SEQ ID NO: 175702 - DNA, 25 bp, Artificial
  Probe sequence
acataagatcaggctttggatgagt

SEQ ID NO: 175703 - DNA, 25 bp, Artificial
  Probe sequence
gctttggatgagtgttcttttctgg

SEQ ID NO: 175704 - DNA, 25 bp, Artificial
  Probe sequence
tcagatcatcccacaggtctgacag

SEQ ID NO: 175705 - DNA, 25 bp, Artificial
  Probe sequence
tccttaaagtggtccgaggagagct

SEQ ID NO: 175706 - DNA, 25 bp, Artificial
  Probe sequence
ggagtcatcttatcagccatcatct

SEQ ID NO: 175707 - DNA, 25 bp, Artificial
  Probe sequence
ttcacggcaggtcatggcggcaaga

SEQ ID NO: 175708 - DNA, 25 bp, Artificial
  Probe sequence
atgaaaattcagatcatcccacagg

SEQ ID NO: 175709 - DNA, 25 bp, Artificial
  Probe sequence
tgctgctgaagtacaatggagtcca

SEQ ID NO: 175710 - DNA, 25 bp, Artificial
  Probe sequence
agctgctggcctgcagagcctctgt

SEQ ID NO: 175711 - DNA, 25 bp, Artificial
  Probe sequence
tctgttgatgtggacatgcacctgg

SEQ ID NO: 175712 - DNA, 25 bp, Artificial
  Probe sequence
gaagcagactccagccaaaacgcaa

SEQ ID NO: 175713 - DNA, 25 bp, Artificial
  Probe sequence
cacctggacctgcatggtttattta

SEQ ID NO: 175714 - DNA, 25 bp, Artificial
  Probe sequence
gtgaaaatgacttcacggcaggtca

SEQ ID NO: 175715 - DNA, 25 bp, Artificial
  Probe sequence
tattccggatgcaggctggaatgca

SEQ ID NO: 175716 - DNA, 25 bp, Artificial
  Probe sequence
caagtcctccttaaagtggtccgag

SEQ ID NO: 175717 - DNA, 25 bp, Artificial
  Probe sequence
gctggcctgcagagcctctgtttgt

SEQ ID NO: 175718 - DNA, 25 bp, Artificial
  Probe sequence
gagtccagtcccaaccaagatacta

SEQ ID NO: 175719 - DNA, 25 bp, Artificial
  Probe sequence
aagctgccctttttacttattctgg

SEQ ID NO: 175720 - DNA, 25 bp, Artificial
  Probe sequence
tgacttcacggcaggtcatggcggc

SEQ ID NO: 175721 - DNA, 25 bp, Artificial
  Probe sequence
tctcaccaagtcctccttaaagtgg

SEQ ID NO: 175722 - DNA, 25 bp, Artificial
  Probe sequence
aaattcagatcatcccacaggtctg

SEQ ID NO: 175723 - DNA, 25 bp, Artificial
  Probe sequence
gtggacatgcacctggacctgcatg

SEQ ID NO: 175724 - DNA, 25 bp, Artificial
  Probe sequence
agttttacggaattggctcgcgcct

SEQ ID NO: 175725 - DNA, 25 bp, Artificial
  Probe sequence
tgaaaatgacttcacggcaggtcat

SEQ ID NO: 175726 - DNA, 25 bp, Artificial
  Probe sequence
gttttacggaattggctcgcgcctc

SEQ ID NO: 175727 - DNA, 25 bp, Artificial
  Probe sequence
ggtcatggcggcaagagcctttaat

SEQ ID NO: 175728 - DNA, 25 bp, Artificial
  Probe sequence
tacggaattggctcgcgcctctgtt

SEQ ID NO: 175729 - DNA, 25 bp, Artificial
  Probe sequence
cgggaagccatatcgctacatcttt

SEQ ID NO: 175730 - DNA, 25 bp, Artificial
  Probe sequence
ttgggccatggtgaaaatgacttca

SEQ ID NO: 175731 - DNA, 25 bp, Artificial
  Probe sequence
atgcaggctggaatgcagtgaagca

SEQ ID NO: 175732 - DNA, 25 bp, Artificial
  Probe sequence
gctcacaacgggaagccatatcgct

SEQ ID NO: 175733 - DNA, 25 bp, Artificial
  Probe sequence
ttggctcgcgcctctgttgatgtgg

SEQ ID NO: 175734 - DNA, 25 bp, Artificial
  Probe sequence
ctcacaacgggaagccatatcgcta

SEQ ID NO: 175735 - DNA, 25 bp, Artificial
  Probe sequence
aagccatatcgctacatctttgctg

SEQ ID NO: 175736 - DNA, 25 bp, Artificial
  Probe sequence
gatcatcccacaggtctgacagcac

SEQ ID NO: 175737 - DNA, 25 bp, Artificial
  Probe sequence
aagtacaatggagtccagtcccaac

SEQ ID NO: 175738 - DNA, 25 bp, Artificial
  Probe sequence
aacgggaagccatatcgctacatct

SEQ ID NO: 175739 - DNA, 25 bp, Artificial
  Probe sequence
ttgatgtggacatgcacctggacct

SEQ ID NO: 175740 - DNA, 25 bp, Artificial
  Probe sequence
tgatggagtcatcttatcagccatc

SEQ ID NO: 175741 - DNA, 25 bp, Artificial
  Probe sequence
aatggagtccagtcccaaccaagat

SEQ ID NO: 175742 - DNA, 25 bp, Artificial
  Probe sequence
tgcagagcctctgtttgtccccaca

SEQ ID NO: 175743 - DNA, 25 bp, Artificial
  Probe sequence
tatttattccggatgcaggctggaa

SEQ ID NO: 175744 - DNA, 25 bp, Artificial
  Probe sequence
tgcagtgaagcagactccagccaaa

SEQ ID NO: 175745 - DNA, 25 bp, Artificial
  Probe sequence
actccagccaaaacgcaagaggatg

SEQ ID NO: 175746 - DNA, 25 bp, Artificial
  Probe sequence
cagcaccaggattgggccatggtga

SEQ ID NO: 175747 - DNA, 25 bp, Artificial
  Probe sequence
attgggccatggtgaaaatgacttc

SEQ ID NO: 175748 - DNA, 25 bp, Artificial
  Probe sequence
attatgctcacaacgggaagccata

SEQ ID NO: 175749 - DNA, 25 bp, Artificial
  Probe sequence
ctttttacttattctggatgcgaaa

SEQ ID NO: 175750 - DNA, 25 bp, Artificial
  Probe sequence
cctttgcatgttttagtagctaatt

SEQ ID NO: 175751 - DNA, 25 bp, Artificial
  Probe sequence
cttagctttctgaggttgttcagac

SEQ ID NO: 175752 - DNA, 25 bp, Artificial
  Probe sequence
ctcttagctttctgaggttgttcag

SEQ ID NO: 175753 - DNA, 25 bp, Artificial
  Probe sequence
tgaggttgttcagactgcagcagtc

SEQ ID NO: 175754 - DNA, 25 bp, Artificial
  Probe sequence
cagacatgttcctggtacctttttt

SEQ ID NO: 175755 - DNA, 25 bp, Artificial
  Probe sequence
cccctttgcatgttttagtagctaa

SEQ ID NO: 175756 - DNA, 25 bp, Artificial
  Probe sequence
aagagaaataccagcccggccgtcg

SEQ ID NO: 175757 - DNA, 25 bp, Artificial
  Probe sequence
gtcctgttacctttttggtgtggat

SEQ ID NO: 175758 - DNA, 25 bp, Artificial
  Probe sequence
tcctgttacctttttggtgtggata

SEQ ID NO: 175759 - DNA, 25 bp, Artificial
  Probe sequence
agactgcagcagtctgacctacagt

SEQ ID NO: 175760 - DNA, 25 bp, Artificial
  Probe sequence
tcagacatgttcctggtaccttttt

SEQ ID NO: 175761 - DNA, 25 bp, Artificial
  Probe sequence
tgggtcccctttgcatgttttagta

SEQ ID NO: 175762 - DNA, 25 bp, Artificial
  Probe sequence
ccatgggtcccctttgcatgtttta

SEQ ID NO: 175763 - DNA, 25 bp, Artificial
  Probe sequence
ctaaggactatctctttaaaggaat

SEQ ID NO: 175764 - DNA, 25 bp, Artificial
  Probe sequence
cagcagtctgacctacagtttgttt

SEQ ID NO: 175765 - DNA, 25 bp, Artificial
  Probe sequence
tcttagctttctgaggttgttcaga

SEQ ID NO: 175766 - DNA, 25 bp, Artificial
  Probe sequence
ctttctgaggttgttcagactgcag

SEQ ID NO: 175767 - DNA, 25 bp, Artificial
  Probe sequence
ctgcagcagtctgacctacagtttg

SEQ ID NO: 175768 - DNA, 25 bp, Artificial
  Probe sequence
tttctgaggttgttcagactgcagc

SEQ ID NO: 175769 - DNA, 25 bp, Artificial
  Probe sequence
tcccctttgcatgttttagtagcta

SEQ ID NO: 175770 - DNA, 25 bp, Artificial
  Probe sequence
agagaacatggctttctcttagctt

SEQ ID NO: 175771 - DNA, 25 bp, Artificial
  Probe sequence
ttttcagacatgttcctggtacctt

SEQ ID NO: 175772 - DNA, 25 bp, Artificial
  Probe sequence
gctttctcttagctttctgaggttg

SEQ ID NO: 175773 - DNA, 25 bp, Artificial
  Probe sequence
gtcccctttgcatgttttagtagct

SEQ ID NO: 175774 - DNA, 25 bp, Artificial
  Probe sequence
ggactatctctttaaaggaattctc

SEQ ID NO: 175775 - DNA, 25 bp, Artificial
  Probe sequence
atgggtcccctttgcatgttttagt

SEQ ID NO: 175776 - DNA, 25 bp, Artificial
  Probe sequence
catgggtcccctttgcatgttttag

SEQ ID NO: 175777 - DNA, 25 bp, Artificial
  Probe sequence
gagaacatggctttctcttagcttt

SEQ ID NO: 175778 - DNA, 25 bp, Artificial
  Probe sequence
ggttgttcagactgcagcagtctga

SEQ ID NO: 175779 - DNA, 25 bp, Artificial
  Probe sequence
aggactatctctttaaaggaattct

SEQ ID NO: 175780 - DNA, 25 bp, Artificial
  Probe sequence
cttttccatgggtcccctttgcatg

SEQ ID NO: 175781 - DNA, 25 bp, Artificial
  Probe sequence
tcagactgcagcagtctgacctaca

SEQ ID NO: 175782 - DNA, 25 bp, Artificial
  Probe sequence
gaacatggctttctcttagctttct

SEQ ID NO: 175783 - DNA, 25 bp, Artificial
  Probe sequence
taagagaaataccagcccggccgtc

SEQ ID NO: 175784 - DNA, 25 bp, Artificial
  Probe sequence
agctttctgaggttgttcagactgc

SEQ ID NO: 175785 - DNA, 25 bp, Artificial
  Probe sequence
tgcagcagtctgacctacagtttgt

SEQ ID NO: 175786 - DNA, 25 bp, Artificial
  Probe sequence
ttgttttcagacatgttcctggtac

SEQ ID NO: 175787 - DNA, 25 bp, Artificial
  Probe sequence
agaacatggctttctcttagctttc

SEQ ID NO: 175788 - DNA, 25 bp, Artificial
  Probe sequence
tagctttctgaggttgttcagactg

SEQ ID NO: 175789 - DNA, 25 bp, Artificial
  Probe sequence
tgttttcagacatgttcctggtacc

SEQ ID NO: 175790 - DNA, 25 bp, Artificial
  Probe sequence
tctcttagctttctgaggttgttca

SEQ ID NO: 175791 - DNA, 25 bp, Artificial
  Probe sequence
gactgcagcagtctgacctacagtt

SEQ ID NO: 175792 - DNA, 25 bp, Artificial
  Probe sequence
tagtatacttttccatgggtcccct

SEQ ID NO: 175793 - DNA, 25 bp, Artificial
  Probe sequence
acatggctttctcttagctttctga

SEQ ID NO: 175794 - DNA, 25 bp, Artificial
  Probe sequence
tatacttttccatgggtcccctttg

SEQ ID NO: 175795 - DNA, 25 bp, Artificial
  Probe sequence
aggttgttcagactgcagcagtctg

SEQ ID NO: 175796 - DNA, 25 bp, Artificial
  Probe sequence
tgtctgtaactagtaggcaaacagt

SEQ ID NO: 175797 - DNA, 25 bp, Artificial
  Probe sequence
cacacaaggtcattaaaaggactgg

SEQ ID NO: 175798 - DNA, 25 bp, Artificial
  Probe sequence
cttcccattgtggaggattaggttt

SEQ ID NO: 175799 - DNA, 25 bp, Artificial
  Probe sequence
caaatgagctggtgcccttctcacc

SEQ ID NO: 175800 - DNA, 25 bp, Artificial
  Probe sequence
gtggccttccatattaaacccagaa

SEQ ID NO: 175801 - DNA, 25 bp, Artificial
  Probe sequence
ttcctgaagggcttatattctgggc

SEQ ID NO: 175802 - DNA, 25 bp, Artificial
  Probe sequence
ctttgaaatgtctgacagtgctgtg

SEQ ID NO: 175803 - DNA, 25 bp, Artificial
  Probe sequence
gtctgaacacagctatatatgataa

SEQ ID NO: 175804 - DNA, 25 bp, Artificial
  Probe sequence
atgtctgacagtgctgtgactcaca

SEQ ID NO: 175805 - DNA, 25 bp, Artificial
  Probe sequence
tgcagatagagcaccaacacatata

SEQ ID NO: 175806 - DNA, 25 bp, Artificial
  Probe sequence
gctgtgactcacagcctgcatagca

SEQ ID NO: 175807 - DNA, 25 bp, Artificial
  Probe sequence
cagatggcatgagtagggcacacca

SEQ ID NO: 175808 - DNA, 25 bp, Artificial
  Probe sequence
acccaagcctagacctggagagttg

SEQ ID NO: 175809 - DNA, 25 bp, Artificial
  Probe sequence
ggcaaacagttcatatctcacacag

SEQ ID NO: 175810 - DNA, 25 bp, Artificial
  Probe sequence
atatctcacacagacatgaatgcag

SEQ ID NO: 175811 - DNA, 25 bp, Artificial
  Probe sequence
tcgtaatgtgaaacccttcaaatga

SEQ ID NO: 175812 - DNA, 25 bp, Artificial
  Probe sequence
ttctggtgtgtctaaagcgacatgg

SEQ ID NO: 175813 - DNA, 25 bp, Artificial
  Probe sequence
cacacagacatgaatgcagatagag

SEQ ID NO: 175814 - DNA, 25 bp, Artificial
  Probe sequence
catgagtagggcacaccatggtcaa

SEQ ID NO: 175815 - DNA, 25 bp, Artificial
  Probe sequence
tctctagcattgcaatttccctgag

SEQ ID NO: 175816 - DNA, 25 bp, Artificial
  Probe sequence
gcagatagagcaccaacacatataa

SEQ ID NO: 175817 - DNA, 25 bp, Artificial
  Probe sequence
atattctgggccttcccattgtgga

SEQ ID NO: 175818 - DNA, 25 bp, Artificial
  Probe sequence
agcattgcaatttccctgagcctta

SEQ ID NO: 175819 - DNA, 25 bp, Artificial
  Probe sequence
ctcaaagggcccatgtcaataaact

SEQ ID NO: 175820 - DNA, 25 bp, Artificial
  Probe sequence
ataaggcaagttccaagatagccaa

SEQ ID NO: 175821 - DNA, 25 bp, Artificial
  Probe sequence
tgatgaacgcttcagccaaccattc

SEQ ID NO: 175822 - DNA, 25 bp, Artificial
  Probe sequence
tgtctttgaaatgtctgacagtgct

SEQ ID NO: 175823 - DNA, 25 bp, Artificial
  Probe sequence
gtgtctaaagcgacatggtaactcg

SEQ ID NO: 175824 - DNA, 25 bp, Artificial
  Probe sequence
tcacagcctgcatagcagctcctat

SEQ ID NO: 175825 - DNA, 25 bp, Artificial
  Probe sequence
aaacccagaatctccactcaaaggg

SEQ ID NO: 175826 - DNA, 25 bp, Artificial
  Probe sequence
tctggtgtgtctaaagcgacatggt

SEQ ID NO: 175827 - DNA, 25 bp, Artificial
  Probe sequence
cctagacctggagagttggctcaat

SEQ ID NO: 175828 - DNA, 25 bp, Artificial
  Probe sequence
agtgctgtgactcacagcctgcata

SEQ ID NO: 175829 - DNA, 25 bp, Artificial
  Probe sequence
tgagccaagggatatctggcatctg

SEQ ID NO: 175830 - DNA, 25 bp, Artificial
  Probe sequence
atctccactcaaagggcccatgtca

SEQ ID NO: 175831 - DNA, 25 bp, Artificial
  Probe sequence
gggatatctggcatctgcaactcct

SEQ ID NO: 175832 - DNA, 25 bp, Artificial
  Probe sequence
ttttaaatggccagacagatggcat

SEQ ID NO: 175833 - DNA, 25 bp, Artificial
  Probe sequence
gctggtgcccttctcaccagtttgc

SEQ ID NO: 175834 - DNA, 25 bp, Artificial
  Probe sequence
gggcttatattctgggccttcccat

SEQ ID NO: 175835 - DNA, 25 bp, Artificial
  Probe sequence
cctataaggcaagttccaagatagc

SEQ ID NO: 175836 - DNA, 25 bp, Artificial
  Probe sequence
ttccgtaggccgtcatttgatgaac

SEQ ID NO: 175837 - DNA, 25 bp, Artificial
  Probe sequence
ttgaaaaaacccaagcctagacctg

SEQ ID NO: 175838 - DNA, 25 bp, Artificial
  Probe sequence
ttaaaatcccttcatcgacgctgag

SEQ ID NO: 175839 - DNA, 25 bp, Artificial
  Probe sequence
ttttttaactgtgtggccttccata

SEQ ID NO: 175840 - DNA, 25 bp, Artificial
  Probe sequence
ctccttttccgtaggccgtcatttg

SEQ ID NO: 175841 - DNA, 25 bp, Artificial
  Probe sequence
gttcaccatctgtcttggttataaa

SEQ ID NO: 175842 - DNA, 25 bp, Artificial
  Probe sequence
aagctattctactgcgctagattga

SEQ ID NO: 175843 - DNA, 25 bp, Artificial
  Probe sequence
tgatgtcctgctgtccgtctcacgc

SEQ ID NO: 175844 - DNA, 25 bp, Artificial
  Probe sequence
gccctcagctgtaacagtgccgagg

SEQ ID NO: 175845 - DNA, 25 bp, Artificial
  Probe sequence
taaagtcacactttgtgcttcagac

SEQ ID NO: 175846 - DNA, 25 bp, Artificial
  Probe sequence
cctcagctgtaacagtgccgaggga

SEQ ID NO: 175847 - DNA, 25 bp, Artificial
  Probe sequence
attctactgcgctagattgaatgcc

SEQ ID NO: 175848 - DNA, 25 bp, Artificial
  Probe sequence
tctggtggcccatacttactctact

SEQ ID NO: 175849 - DNA, 25 bp, Artificial
  Probe sequence
cagagtatgggcagcacagacaact

SEQ ID NO: 175850 - DNA, 25 bp, Artificial
  Probe sequence
aaatgtcatgacttgatgtcctgct

SEQ ID NO: 175851 - DNA, 25 bp, Artificial
  Probe sequence
tgaccaggcggttgggtctctctct

SEQ ID NO: 175852 - DNA, 25 bp, Artificial
  Probe sequence
aaagtcatgacttaagtggcacggg

SEQ ID NO: 175853 - DNA, 25 bp, Artificial
  Probe sequence
caggcggttgggtctctctctgaga

SEQ ID NO: 175854 - DNA, 25 bp, Artificial
  Probe sequence
attaaaatgtcatgacttgatgtcc

SEQ ID NO: 175855 - DNA, 25 bp, Artificial
  Probe sequence
acgccctcagctgtaacagtgccga

SEQ ID NO: 175856 - DNA, 25 bp, Artificial
  Probe sequence
taaagaatgggctctcaatacttga

SEQ ID NO: 175857 - DNA, 25 bp, Artificial
  Probe sequence
gactgaatgaccagagtatgggcag

SEQ ID NO: 175858 - DNA, 25 bp, Artificial
  Probe sequence
gaaatggattcactgaccaaggaca

SEQ ID NO: 175859 - DNA, 25 bp, Artificial
  Probe sequence
ggaccaggtactgaagaaggagacc

SEQ ID NO: 175860 - DNA, 25 bp, Artificial
  Probe sequence
tccagatgtccatggccttgctgag

SEQ ID NO: 175861 - DNA, 25 bp, Artificial
  Probe sequence
tgcactttcatactcagcccctgag

SEQ ID NO: 175862 - DNA, 25 bp, Artificial
  Probe sequence
cagctgtaacagtgccgagggagtc

SEQ ID NO: 175863 - DNA, 25 bp, Artificial
  Probe sequence
tgccctttccagatgtccatggcct

SEQ ID NO: 175864 - DNA, 25 bp, Artificial
  Probe sequence
agagaaaccctaaagaatgggctct

SEQ ID NO: 175865 - DNA, 25 bp, Artificial
  Probe sequence
tcatgacttaagtggcacggggaca

SEQ ID NO: 175866 - DNA, 25 bp, Artificial
  Probe sequence
atctggtggcccatacttactctac

SEQ ID NO: 175867 - DNA, 25 bp, Artificial
  Probe sequence
gcactttcatactcagcccctgagg

SEQ ID NO: 175868 - DNA, 25 bp, Artificial
  Probe sequence
atgaccagagtatgggcagcacaga

SEQ ID NO: 175869 - DNA, 25 bp, Artificial
  Probe sequence
cagtgccgagggagtcactgaagaa

SEQ ID NO: 175870 - DNA, 25 bp, Artificial
  Probe sequence
gcggttgggtctctctctgagaatt

SEQ ID NO: 175871 - DNA, 25 bp, Artificial
  Probe sequence
tctctatttcaacactgaattcggg

SEQ ID NO: 175872 - DNA, 25 bp, Artificial
  Probe sequence
cacggggacacctaaagtcacactt

SEQ ID NO: 175873 - DNA, 25 bp, Artificial
  Probe sequence
aaccctaaagaatgggctctcaata

SEQ ID NO: 175874 - DNA, 25 bp, Artificial
  Probe sequence
tctcacgccctcagctgtaacagtg

SEQ ID NO: 175875 - DNA, 25 bp, Artificial
  Probe sequence
gtgtatgcaaatgtccctttaatgc

SEQ ID NO: 175876 - DNA, 25 bp, Artificial
  Probe sequence
agtggcacggggacacctaaagtca

SEQ ID NO: 175877 - DNA, 25 bp, Artificial
  Probe sequence
gtaacagtgccgagggagtcactga

SEQ ID NO: 175878 - DNA, 25 bp, Artificial
  Probe sequence
ggtctctctctgagaatttcatttt

SEQ ID NO: 175879 - DNA, 25 bp, Artificial
  Probe sequence
ggacacctaaagtcacactttgtgc

SEQ ID NO: 175880 - DNA, 25 bp, Artificial
  Probe sequence
gtcacactttgtgcttcagacatac

SEQ ID NO: 175881 - DNA, 25 bp, Artificial
  Probe sequence
cattaaaatgtcatgacttgatgtc

SEQ ID NO: 175882 - DNA, 25 bp, Artificial
  Probe sequence
gacttaagtggcacggggacaccta

SEQ ID NO: 175883 - DNA, 25 bp, Artificial
  Probe sequence
attcaagctattctactgcgctaga

SEQ ID NO: 175884 - DNA, 25 bp, Artificial
  Probe sequence
gaccaggcaggctccataccagtaa

SEQ ID NO: 175885 - DNA, 25 bp, Artificial
  Probe sequence
agcaactgccctttccagatgtcca

SEQ ID NO: 175886 - DNA, 25 bp, Artificial
  Probe sequence
aaatggattcactgaccaaggacat

SEQ ID NO: 175887 - DNA, 25 bp, Artificial
  Probe sequence
gctccataccagtaagagaaaccct

SEQ ID NO: 175888 - DNA, 25 bp, Artificial
  Probe sequence
gaggctctcccgaggctcgttgcca

SEQ ID NO: 175889 - DNA, 25 bp, Artificial
  Probe sequence
agggtgcgggagttggaaagcgagc

SEQ ID NO: 175890 - DNA, 25 bp, Artificial
  Probe sequence
ctaagggccaagagccgtgatgtgg

SEQ ID NO: 175891 - DNA, 25 bp, Artificial
  Probe sequence
gaaagcgagctggatgcagagcaga

SEQ ID NO: 175892 - DNA, 25 bp, Artificial
  Probe sequence
aagggggcccacaaatatgagcgca

SEQ ID NO: 175893 - DNA, 25 bp, Artificial
  Probe sequence
agaatgaggctctcccgaggctcgt

SEQ ID NO: 175894 - DNA, 25 bp, Artificial
  Probe sequence
ggaccgcaagaacatcctccgactc

SEQ ID NO: 175895 - DNA, 25 bp, Artificial
  Probe sequence
ggcccacaaatatgagcgcaaagtc

SEQ ID NO: 175896 - DNA, 25 bp, Artificial
  Probe sequence
gaagggggcccacaaatatgagcgc

SEQ ID NO: 175897 - DNA, 25 bp, Artificial
  Probe sequence
agagatgacttaccaggccgaggag

SEQ ID NO: 175898 - DNA, 25 bp, Artificial
  Probe sequence
gggcccacaaatatgagcgcaaagt

SEQ ID NO: 175899 - DNA, 25 bp, Artificial
  Probe sequence
atcctccgactccaggacctggtag

SEQ ID NO: 175900 - DNA, 25 bp, Artificial
  Probe sequence
gcccacaaatatgagcgcaaagtca

SEQ ID NO: 175901 - DNA, 25 bp, Artificial
  Probe sequence
ggaagaatgaggctctcccgaggct

SEQ ID NO: 175902 - DNA, 25 bp, Artificial
  Probe sequence
tgaagctctgaagggggcccacaaa

SEQ ID NO: 175903 - DNA, 25 bp, Artificial
  Probe sequence
tctcccgaggctcgttgccatgggc

SEQ ID NO: 175904 - DNA, 25 bp, Artificial
  Probe sequence
aggaccgcaagaacatcctccgact

SEQ ID NO: 175905 - DNA, 25 bp, Artificial
  Probe sequence
tagacaagctgcaggccaaagtgaa

SEQ ID NO: 175906 - DNA, 25 bp, Artificial
  Probe sequence
gaagaatgaggctctcccgaggctc

SEQ ID NO: 175907 - DNA, 25 bp, Artificial
  Probe sequence
aagctgcaggccaaagtgaagtcct

SEQ ID NO: 175908 - DNA, 25 bp, Artificial
  Probe sequence
ggggcccacaaatatgagcgcaaag

SEQ ID NO: 175909 - DNA, 25 bp, Artificial
  Probe sequence
ggtagacaagctgcaggccaaagtg

SEQ ID NO: 175910 - DNA, 25 bp, Artificial
  Probe sequence
gagatgacttaccaggccgaggagg

SEQ ID NO: 175911 - DNA, 25 bp, Artificial
  Probe sequence
gggggcccacaaatatgagcgcaaa

SEQ ID NO: 175912 - DNA, 25 bp, Artificial
  Probe sequence
tgggaaaaataaaccctcctgcata

SEQ ID NO: 175913 - DNA, 25 bp, Artificial
  Probe sequence
tgtgggaggccagaagatggaagaa

SEQ ID NO: 175914 - DNA, 25 bp, Artificial
  Probe sequence
tccaggagagcagagggagactggg

SEQ ID NO: 175915 - DNA, 25 bp, Artificial
  Probe sequence
ctgcaggccaaagtgaagtcctaca

SEQ ID NO: 175916 - DNA, 25 bp, Artificial
  Probe sequence
tcccgaggctcgttgccatgggcca

SEQ ID NO: 175917 - DNA, 25 bp, Artificial
  Probe sequence
agctgcaggccaaagtgaagtccta

SEQ ID NO: 175918 - DNA, 25 bp, Artificial
  Probe sequence
cccacaaatatgagcgcaaagtcaa

SEQ ID NO: 175919 - DNA, 25 bp, Artificial
  Probe sequence
caagctgcaggccaaagtgaagtcc

SEQ ID NO: 175920 - DNA, 25 bp, Artificial
  Probe sequence
gttggaaagcgagctggatgcagag

SEQ ID NO: 175921 - DNA, 25 bp, Artificial
  Probe sequence
ctctcccgaggctcgttgccatggg

SEQ ID NO: 175922 - DNA, 25 bp, Artificial
  Probe sequence
ccacaaatatgagcgcaaagtcaaa

SEQ ID NO: 175923 - DNA, 25 bp, Artificial
  Probe sequence
gtagacaagctgcaggccaaagtga

SEQ ID NO: 175924 - DNA, 25 bp, Artificial
  Probe sequence
agggggcccacaaatatgagcgcaa

SEQ ID NO: 175925 - DNA, 25 bp, Artificial
  Probe sequence
gacaagctgcaggccaaagtgaagt

SEQ ID NO: 175926 - DNA, 25 bp, Artificial
  Probe sequence
tggtagacaagctgcaggccaaagt

SEQ ID NO: 175927 - DNA, 25 bp, Artificial
  Probe sequence
gaggaccgcaagaacatcctccgac

SEQ ID NO: 175928 - DNA, 25 bp, Artificial
  Probe sequence
aaagcgagctggatgcagagcagaa

SEQ ID NO: 175929 - DNA, 25 bp, Artificial
  Probe sequence
ccaagagccgtgatgtgggaggcca

SEQ ID NO: 175930 - DNA, 25 bp, Artificial
  Probe sequence
aggagctgaagctctgaagggggcc

SEQ ID NO: 175931 - DNA, 25 bp, Artificial
  Probe sequence
atatgagcgcaaagtcaaagagatg

SEQ ID NO: 175932 - DNA, 25 bp, Artificial
  Probe sequence
caaagagatgacttaccaggccgag

SEQ ID NO: 175933 - DNA, 25 bp, Artificial
  Probe sequence
aaccctcctgcatactcataaaaaa

SEQ ID NO: 175934 - DNA, 25 bp, Artificial
  Probe sequence
tgctgtctgctctgcccgggtagga

SEQ ID NO: 175935 - DNA, 25 bp, Artificial
  Probe sequence
catatatcttgctgtacaatgcctg

SEQ ID NO: 175936 - DNA, 25 bp, Artificial
  Probe sequence
cgtgatcgtggcagatgggtcttca

SEQ ID NO: 175937 - DNA, 25 bp, Artificial
  Probe sequence
gaactgttacctaggcatttcaaaa

SEQ ID NO: 175938 - DNA, 25 bp, Artificial
  Probe sequence
aaatcgtgatcgtggcagatgggtc

SEQ ID NO: 175939 - DNA, 25 bp, Artificial
  Probe sequence
taagccacgtgctgtctgctctgcc

SEQ ID NO: 175940 - DNA, 25 bp, Artificial
  Probe sequence
tgcccgggtaggaattgcatcagaa

SEQ ID NO: 175941 - DNA, 25 bp, Artificial
  Probe sequence
tgttcgtaccccaaatgattgaatt

SEQ ID NO: 175942 - DNA, 25 bp, Artificial
  Probe sequence
tgttacctaggcatttcaaaacagg

SEQ ID NO: 175943 - DNA, 25 bp, Artificial
  Probe sequence
agcagccaagcagaggactgtatct

SEQ ID NO: 175944 - DNA, 25 bp, Artificial
  Probe sequence
tggcagatgggtcttcatagaaacc

SEQ ID NO: 175945 - DNA, 25 bp, Artificial
  Probe sequence
gttacctaggcatttcaaaacagga

SEQ ID NO: 175946 - DNA, 25 bp, Artificial
  Probe sequence
tgaactgttacctaggcatttcaaa

SEQ ID NO: 175947 - DNA, 25 bp, Artificial
  Probe sequence
catgtatgcttgagtatctaactct

SEQ ID NO: 175948 - DNA, 25 bp, Artificial
  Probe sequence
atgtctttattcaaacttcataggg

SEQ ID NO: 175949 - DNA, 25 bp, Artificial
  Probe sequence
agccaagcagaggactgtatctaaa

SEQ ID NO: 175950 - DNA, 25 bp, Artificial
  Probe sequence
ctgtacaatgcctgtgatattgaag

SEQ ID NO: 175951 - DNA, 25 bp, Artificial
  Probe sequence
atgtatgcttgagtatctaactctg

SEQ ID NO: 175952 - DNA, 25 bp, Artificial
  Probe sequence
actctggagtcaatgaatgcactga

SEQ ID NO: 175953 - DNA, 25 bp, Artificial
  Probe sequence
tgggtcttcatagaaaccatgtctt

SEQ ID NO: 175954 - DNA, 25 bp, Artificial
  Probe sequence
ggaaataccgtcaacagactcttct

SEQ ID NO: 175955 - DNA, 25 bp, Artificial
  Probe sequence
aaagtaagccacgtgctgtctgctc

SEQ ID NO: 175956 - DNA, 25 bp, Artificial
  Probe sequence
caggaaataccgtcaacagactctt

SEQ ID NO: 175957 - DNA, 25 bp, Artificial
  Probe sequence
acttcatagggcaatattttgaact

SEQ ID NO: 175958 - DNA, 25 bp, Artificial
  Probe sequence
cacgtgctgtctgctctgcccgggt

SEQ ID NO: 175959 - DNA, 25 bp, Artificial
  Probe sequence
ctaggcatttcaaaacaggaaatac

SEQ ID NO: 175960 - DNA, 25 bp, Artificial
  Probe sequence
cttttcatgtatgcttgagtatcta

SEQ ID NO: 175961 - DNA, 25 bp, Artificial
  Probe sequence
gtctttattcaaacttcatagggca

SEQ ID NO: 175962 - DNA, 25 bp, Artificial
  Probe sequence
aatattttgaactgttacctaggca

SEQ ID NO: 175963 - DNA, 25 bp, Artificial
  Probe sequence
gctctgcccgggtaggaattgcatc

SEQ ID NO: 175964 - DNA, 25 bp, Artificial
  Probe sequence
cttccgtctagcagccaagcagagg

SEQ ID NO: 175965 - DNA, 25 bp, Artificial
  Probe sequence
ggtcttcatagaaaccatgtcttta

SEQ ID NO: 175966 - DNA, 25 bp, Artificial
  Probe sequence
gtggcagatgggtcttcatagaaac

SEQ ID NO: 175967 - DNA, 25 bp, Artificial
  Probe sequence
tacctaggcatttcaaaacaggaaa

SEQ ID NO: 175968 - DNA, 25 bp, Artificial
  Probe sequence
cgtgctgtctgctctgcccgggtag

SEQ ID NO: 175969 - DNA, 25 bp, Artificial
  Probe sequence
gatcgtggcagatgggtcttcatag

SEQ ID NO: 175970 - DNA, 25 bp, Artificial
  Probe sequence
tatgcttgagtatctaactctggag

SEQ ID NO: 175971 - DNA, 25 bp, Artificial
  Probe sequence
cttcatagggcaatattttgaactg

SEQ ID NO: 175972 - DNA, 25 bp, Artificial
  Probe sequence
cttgctgtacaatgcctgtgatatt

SEQ ID NO: 175973 - DNA, 25 bp, Artificial
  Probe sequence
tttcatgtatgcttgagtatctaac

SEQ ID NO: 175974 - DNA, 25 bp, Artificial
  Probe sequence
ccgtcaacagactcttctccaagag

SEQ ID NO: 175975 - DNA, 25 bp, Artificial
  Probe sequence
ccaagagcaggttttactgttgttt

SEQ ID NO: 175976 - DNA, 25 bp, Artificial
  Probe sequence
aggactgtatctaaatcgtgatcgt

SEQ ID NO: 175977 - DNA, 25 bp, Artificial
  Probe sequence
ctaaatcgtgatcgtggcagatggg

SEQ ID NO: 175978 - DNA, 25 bp, Artificial
  Probe sequence
agtaagccacgtgctgtctgctctg

SEQ ID NO: 175979 - DNA, 25 bp, Artificial
  Probe sequence
tttgaactgttacctaggcatttca

SEQ ID NO: 175980 - DNA, 25 bp, Artificial
  Probe sequence
tgtcacttgttagctcattctccag

SEQ ID NO: 175981 - DNA, 25 bp, Artificial
  Probe sequence
ggtttggattctatgtctacaatct

SEQ ID NO: 175982 - DNA, 25 bp, Artificial
  Probe
atagatacctaccttctcagaatgg

SEQ ID NO: 175983 - DNA, 25 bp, Artificial
  Probe
atcaactgtctttcttggtgtatga

SEQ ID NO: 175984 - DNA, 25 bp, Artificial
  Probe
atctctccacagttcatggtttatg

SEQ ID NO: 175985 - DNA, 25 bp, Artificial
  Probe
gatcttgtcacttgttagctcattc

SEQ ID NO: 175986 - DNA, 25 bp, Artificial
  Probe
aggcaaacaagtatctcatctgttg

SEQ ID NO: 175987 - DNA, 25 bp, Artificial
  Probe
ctgcttcttatctcgccaattgggc

SEQ ID NO: 175988 - DNA, 25 bp, Artificial
  Probe
ttatgctaattcactctgtataagg

SEQ ID NO: 175989 - DNA, 25 bp, Artificial
  Probe
agaatagctttatctttgtgcctca

SEQ ID NO: 175990 - DNA, 25 bp, Artificial
  Probe
cctcagagagagcagctggaatcca

SEQ ID NO: 175991 - DNA, 25 bp, Artificial
  Probe
ttcactctgtataaggtttggattc

SEQ ID NO: 175992 - DNA, 25 bp, Artificial
  Probe
gtcacttgttagctcattctccagc

SEQ ID NO: 175993 - DNA, 25 bp, Artificial
  Probe
ggtttatgctaattcactctgtata

SEQ ID NO: 175994 - DNA, 25 bp, Artificial
  Probe
ttggattctatgtctacaatcttgc

SEQ ID NO: 175995 - DNA, 25 bp, Artificial
  Probe
ttcttggtgtatgaacagagacttc

SEQ ID NO: 175996 - DNA, 25 bp, Artificial
  Probe
actgtctttcttggtgtatgaacag

SEQ ID NO: 175997 - DNA, 25 bp, Artificial
  Probe
gaaatcaatcaactgtctttcttgg

SEQ ID NO: 175998 - DNA, 25 bp, Artificial
  Probe
cagctggaatccaggcccagggtca

SEQ ID NO: 175999 - DNA, 25 bp, Artificial
  Probe
cagttcatggtttatgctaattcac

SEQ ID NO: 176000 - DNA, 25 bp, Artificial
  Probe
tctttgtgcctcagagagagcagct

SEQ ID NO: 176001 - DNA, 25 bp, Artificial
  Probe
tctttcttggtgtatgaacagagac

SEQ ID NO: 176002 - DNA, 25 bp, Artificial
  Probe
tcactctgtataaggtttggattct

SEQ ID NO: 176003 - DNA, 25 bp, Artificial
  Probe
atgaacagagacttctgaaggtcac

SEQ ID NO: 176004 - DNA, 25 bp, Artificial
  Probe
tatctttgtgcctcagagagagcag

SEQ ID NO: 176005 - DNA, 25 bp, Artificial
  Probe
gcagttctctaatccccagtgtgtg

SEQ ID NO: 176006 - DNA, 25 bp, Artificial
  Probe
agagagcagctggaatccaggccca

SEQ ID NO: 176007 - DNA, 25 bp, Artificial
  Probe
tcttatctcgccaattgggctgagg

SEQ ID NO: 176008 - DNA, 25 bp, Artificial
  Probe
ctcctgtgaatggaatggagaaatc

SEQ ID NO: 176009 - DNA, 25 bp, Artificial
  Probe
gatacctaccttctcagaatggaga

SEQ ID NO: 176010 - DNA, 25 bp, Artificial
  Probe
gaaggtcacttctcatcctgaatca

SEQ ID NO: 176011 - DNA, 25 bp, Artificial
  Probe
ttatctcgccaattgggctgaggca

SEQ ID NO: 176012 - DNA, 25 bp, Artificial
  Probe
acagaatcaccgagtgtgtgaaaaa

SEQ ID NO: 176013 - DNA, 25 bp, Artificial
  Probe
acaagtatctcatctgttgagaata

SEQ ID NO: 176014 - DNA, 25 bp, Artificial
  Probe
tcatctgttgagaatagctttatct

SEQ ID NO: 176015 - DNA, 25 bp, Artificial
  Probe
catctcctgtgaatggaatggagaa

SEQ ID NO: 176016 - DNA, 25 bp, Artificial
  Probe
tctctaatccccagtgtgtgttcat

SEQ ID NO: 176017 - DNA, 25 bp, Artificial
  Probe
ctgtctttcttggtgtatgaacaga

SEQ ID NO: 176018 - DNA, 25 bp, Artificial
  Probe
ccaattgggctgaggcaaacaagta

SEQ ID NO: 176019 - DNA, 25 bp, Artificial
  Probe
gctttatctttgtgcctcagagaga

SEQ ID NO: 176020 - DNA, 25 bp, Artificial
  Probe
cgccaattgggctgaggcaaacaag

SEQ ID NO: 176021 - DNA, 25 bp, Artificial
  Probe
ttgtgcctcagagagagcagctgga

SEQ ID NO: 176022 - DNA, 25 bp, Artificial
  Probe
gaatccaggcccagggtcactgctc

SEQ ID NO: 176023 - DNA, 25 bp, Artificial
  Probe
ctaattcactctgtataaggtttgg

SEQ ID NO: 176024 - DNA, 25 bp, Artificial
  Probe
gatctgcttcttatctcgccaattg

SEQ ID NO: 176025 - DNA, 25 bp, Artificial
  Probe
tactgcagttctctaatccccagtg

SEQ ID NO: 176026 - DNA, 25 bp, Artificial
  Probe
gaggtcacagataacaccaattgga

SEQ ID NO: 176027 - DNA, 25 bp, Artificial
  Probe
aagtgacagttttgccctcagagtt

SEQ ID NO: 176028 - DNA, 25 bp, Artificial
  Probe
cgtagcccctctttatgactttatg

SEQ ID NO: 176029 - DNA, 25 bp, Artificial
  Probe
gcagggcaggtaccagcaaggcaaa

SEQ ID NO: 176030 - DNA, 25 bp, Artificial
  Probe
tgccctcagagttgggagcaaagaa

SEQ ID NO: 176031 - DNA, 25 bp, Artificial
  Probe
ctgggcattgtggatgctgcccaga

SEQ ID NO: 176032 - DNA, 25 bp, Artificial
  Probe
aaagttccaatttacatgtggaaca

SEQ ID NO: 176033 - DNA, 25 bp, Artificial
  Probe
tgtaaaatgtcctggcaggagcact

SEQ ID NO: 176034 - DNA, 25 bp, Artificial
  Probe
cattgtggatgctgcccagagtttg

SEQ ID NO: 176035 - DNA, 25 bp, Artificial
  Probe
tttacatgtggaacattgaagttcc

SEQ ID NO: 176036 - DNA, 25 bp, Artificial
  Probe
ggcaaagaatttctctgcagggcaa

SEQ ID NO: 176037 - DNA, 25 bp, Artificial
  Probe
gaaacggcagccttgcaaactgtgg

SEQ ID NO: 176038 - DNA, 25 bp, Artificial
  Probe
gaagactacttaagaccaaggtagt

SEQ ID NO: 176039 - DNA, 25 bp, Artificial
  Probe
tggatgctgcccagagtttggcaga

SEQ ID NO: 176040 - DNA, 25 bp, Artificial
  Probe
agttccattaaggaaacggcagcct

SEQ ID NO: 176041 - DNA, 25 bp, Artificial
  Probe
gtagcctgtaaaatgtcctggcagg

SEQ ID NO: 176042 - DNA, 25 bp, Artificial
  Probe
acattgaagttccattaaggaaacg

SEQ ID NO: 176043 - DNA, 25 bp, Artificial
  Probe
caggtaccagcaaggcaaagaattt

SEQ ID NO: 176044 - DNA, 25 bp, Artificial
  Probe
ctctggttcctgaggctggtaagga

SEQ ID NO: 176045 - DNA, 25 bp, Artificial
  Probe
tacctttgggctgcacgtagcccct

SEQ ID NO: 176046 - DNA, 25 bp, Artificial
  Probe
ctgcccagagtttggcagaggaagt

SEQ ID NO: 176047 - DNA, 25 bp, Artificial
  Probe
aggtagtagcctgtaaaatgtcctg

SEQ ID NO: 176048 - DNA, 25 bp, Artificial
  Probe
tctctgcagggcaaagggggccttt

SEQ ID NO: 176049 - DNA, 25 bp, Artificial
  Probe
ctcagcatcagtctattcaagaatg

SEQ ID NO: 176050 - DNA, 25 bp, Artificial
  Probe
agaatttctctgcagggcaaagggg

SEQ ID NO: 176051 - DNA, 25 bp, Artificial
  Probe
gttccaatttacatgtggaacattg

SEQ ID NO: 176052 - DNA, 25 bp, Artificial
  Probe
agactacttaagaccaaggtagtag

SEQ ID NO: 176053 - DNA, 25 bp, Artificial
  Probe
cagcatcagtctattcaagaatgat

SEQ ID NO: 176054 - DNA, 25 bp, Artificial
  Probe
acatcaccaggtgacaggagtggtg

SEQ ID NO: 176055 - DNA, 25 bp, Artificial
  Probe
gcccctctttatgactttatgagtc

SEQ ID NO: 176056 - DNA, 25 bp, Artificial
  Probe
gaagtgacagttttgccctcagagt

SEQ ID NO: 176057 - DNA, 25 bp, Artificial
  Probe
gttcctgaggctggtaaggatcaga

SEQ ID NO: 176058 - DNA, 25 bp, Artificial
  Probe
gcacgtagcccctctttatgacttt

SEQ ID NO: 176059 - DNA, 25 bp, Artificial
  Probe
gaccaaggtagtagcctgtaaaatg

SEQ ID NO: 176060 - DNA, 25 bp, Artificial
  Probe
ttgcaaactgtggacatcaccaggt

SEQ ID NO: 176061 - DNA, 25 bp, Artificial
  Probe
cattgaagttccattaaggaaacgg

SEQ ID NO: 176062 - DNA, 25 bp, Artificial
  Probe
ctggactctggttcctgaggctggt

SEQ ID NO: 176063 - DNA, 25 bp, Artificial
  Probe
gcagccttgcaaactgtggacatca

SEQ ID NO: 176064 - DNA, 25 bp, Artificial
  Probe
taaggaaacggcagccttgcaaact

SEQ ID NO: 176065 - DNA, 25 bp, Artificial
  Probe
acagttttgccctcagagttgggag

SEQ ID NO: 176066 - DNA, 25 bp, Artificial
  Probe
ttccattaaggaaacggcagccttg

SEQ ID NO: 176067 - DNA, 25 bp, Artificial
  Probe
taccagcaaggcaaagaatttctct

SEQ ID NO: 176068 - DNA, 25 bp, Artificial
  Probe
tgggctgcacgtagcccctctttat

SEQ ID NO: 176069 - DNA, 25 bp, Artificial
  Probe
acaccaattggaagggaccagtcgg

SEQ ID NO: 176070 - DNA, 25 bp, Artificial
  Probe
aaatgtcctggcaggagcactgagg

SEQ ID NO: 176071 - DNA, 25 bp, Artificial
  Probe
taagaccaaggtagtagcctgtaaa

SEQ ID NO: 176072 - DNA, 25 bp, Artificial
  Probe
aatgaggacgagtggccatggacct

SEQ ID NO: 176073 - DNA, 25 bp, Artificial
  Probe
gtgtccctcatctgggccctggcta

SEQ ID NO: 176074 - DNA, 25 bp, Artificial
  Probe
cccacatcttacaggaaacatcagg

SEQ ID NO: 176075 - DNA, 25 bp, Artificial
  Probe
actctgagagatttgggtgaccaga

SEQ ID NO: 176076 - DNA, 25 bp, Artificial
  Probe
gctctgtagatcttctccagactcc

SEQ ID NO: 176077 - DNA, 25 bp, Artificial
  Probe
ctgagttttcggtgccactctgaga

SEQ ID NO: 176078 - DNA, 25 bp, Artificial
  Probe
gaaacatcaggcagaggtgtccctc

SEQ ID NO: 176079 - DNA, 25 bp, Artificial
  Probe
ggcactggaccctcgctctctttat

SEQ ID NO: 176080 - DNA, 25 bp, Artificial
  Probe
gaggtgattgctttcagccagccaa

SEQ ID NO: 176081 - DNA, 25 bp, Artificial
  Probe
gggagcaggatgctctgtagatctt

SEQ ID NO: 176082 - DNA, 25 bp, Artificial
  Probe
gtagtggctgagttttcggtgccac

SEQ ID NO: 176083 - DNA, 25 bp, Artificial
  Probe
caaccccatgtagcaggaaaacagt

SEQ ID NO: 176084 - DNA, 25 bp, Artificial
  Probe
gtgattgctttcagccagccaaccc

SEQ ID NO: 176085 - DNA, 25 bp, Artificial
  Probe
ccctggaatgaggacgagtggccat

SEQ ID NO: 176086 - DNA, 25 bp, Artificial
  Probe
tttcccaggctaaaaataggcggag

SEQ ID NO: 176087 - DNA, 25 bp, Artificial
  Probe
ccttgggctcagaggcttggttctg

SEQ ID NO: 176088 - DNA, 25 bp, Artificial
  Probe
tttctgctgcccaggatttgtcact

SEQ ID NO: 176089 - DNA, 25 bp, Artificial
  Probe
ctggctagaaactgccctggaatga

SEQ ID NO: 176090 - DNA, 25 bp, Artificial
  Probe
tagaaactgccctggaatgaggacg

SEQ ID NO: 176091 - DNA, 25 bp, Artificial
  Probe
tcatctgggccctggctagaaactg

SEQ ID NO: 176092 - DNA, 25 bp, Artificial
  Probe
cggaggtgtccaggacaacataact

SEQ ID NO: 176093 - DNA, 25 bp, Artificial
  Probe
tcctccctaaacctcagctataggg

SEQ ID NO: 176094 - DNA, 25 bp, Artificial
  Probe
caggaaaacagttgcccatactcac

SEQ ID NO: 176095 - DNA, 25 bp, Artificial
  Probe
ggtcagattgcctggccagtcagct

SEQ ID NO: 176096 - DNA, 25 bp, Artificial
  Probe
acgagtggccatggacctgggcact

SEQ ID NO: 176097 - DNA, 25 bp, Artificial
  Probe
ctattctggttctccgcagcctgag

SEQ ID NO: 176098 - DNA, 25 bp, Artificial
  Probe
tcagctatagggaggccttgggctc

SEQ ID NO: 176099 - DNA, 25 bp, Artificial
  Probe
tacaggaaacatcaggcagaggtgt

SEQ ID NO: 176100 - DNA, 25 bp, Artificial
  Probe
gattgcctggccagtcagctttccc

SEQ ID NO: 176101 - DNA, 25 bp, Artificial
  Probe
ttgtcactggcgatcccacatctta

SEQ ID NO: 176102 - DNA, 25 bp, Artificial
  Probe
catggtttctgctgcccaggatttg

SEQ ID NO: 176103 - DNA, 25 bp, Artificial
  Probe
gtcagctttcccaggctaaaaatag

SEQ ID NO: 176104 - DNA, 25 bp, Artificial
  Probe
gcgatcccacatcttacaggaaaca

SEQ ID NO: 176105 - DNA, 25 bp, Artificial
  Probe
gctttcccaggctaaaaataggcgg

SEQ ID NO: 176106 - DNA, 25 bp, Artificial
  Probe
gccttgggctcagaggcttggttct

SEQ ID NO: 176107 - DNA, 25 bp, Artificial
  Probe
atggacctgggcactggaccctcgc

SEQ ID NO: 176108 - DNA, 25 bp, Artificial
  Probe
caggacaacataactgaggagagag

SEQ ID NO: 176109 - DNA, 25 bp, Artificial
  Probe
aggatttgtcactggcgatcccaca

SEQ ID NO: 176110 - DNA, 25 bp, Artificial
  Probe
gttgcccatactcacctgtctctga

SEQ ID NO: 176111 - DNA, 25 bp, Artificial
  Probe
cagactccactattctggttctccg

SEQ ID NO: 176112 - DNA, 25 bp, Artificial
  Probe
ccatactcacctgtctctgaattgg

SEQ ID NO: 176113 - DNA, 25 bp, Artificial
  Probe
gcattgcaagctactcatgtctcct

SEQ ID NO: 176114 - DNA, 25 bp, Artificial
  Probe
ccccatgtagcaggaaaacagttgc

SEQ ID NO: 176115 - DNA, 25 bp, Artificial
  Probe
ctggttctccgcagcctgaggagag

SEQ ID NO: 176116 - DNA, 25 bp, Artificial
  Probe
aactgccctggaatgaggacgagtg

SEQ ID NO: 176117 - DNA, 25 bp, Artificial
  Probe
tggacctgggcactggaccctcgct

SEQ ID NO: 176118 - DNA, 25 bp, Artificial
  Probe
agtctccaggcctgatgcattcaca

SEQ ID NO: 176119 - DNA, 25 bp, Artificial
  Probe
agagcggatggcactcgggtctcac

SEQ ID NO: 176120 - DNA, 25 bp, Artificial
  Probe
cgtccagcgatctcacgctgttctg

SEQ ID NO: 176121 - DNA, 25 bp, Artificial
  Probe
caggaaggccttggaagctaacatg

SEQ ID NO: 176122 - DNA, 25 bp, Artificial
  Probe
atgccctcattgcttcctttggcct

SEQ ID NO: 176123 - DNA, 25 bp, Artificial
  Probe
atggcactcgggtctcactgacgct

SEQ ID NO: 176124 - DNA, 25 bp, Artificial
  Probe
tgtttgcccttcttttgggtgaccg

SEQ ID NO: 176125 - DNA, 25 bp, Artificial
  Probe
cccagttcaggctggtccaggaatg

SEQ ID NO: 176126 - DNA, 25 bp, Artificial
  Probe
tgccctcattgcttcctttggcctt

SEQ ID NO: 176127 - DNA, 25 bp, Artificial
  Probe
cagttcaggctggtccaggaatgga

SEQ ID NO: 176128 - DNA, 25 bp, Artificial
  Probe
atccgtccagcgatctcacgctgtt

SEQ ID NO: 176129 - DNA, 25 bp, Artificial
  Probe
ctggctggctttctgaggtcaggct

SEQ ID NO: 176130 - DNA, 25 bp, Artificial
  Probe
tctcactgacgctgttctgaaacca

SEQ ID NO: 176131 - DNA, 25 bp, Artificial
  Probe
ccggccctgtgactctgtgtgcaag

SEQ ID NO: 176132 - DNA, 25 bp, Artificial
  Probe
ttcaggctggtccaggaatggatgt

SEQ ID NO: 176133 - DNA, 25 bp, Artificial
  Probe
agcccggatggctctcctctgtttt

SEQ ID NO: 176134 - DNA, 25 bp, Artificial
  Probe
ttcccagtctccaggcctgatgcat

SEQ ID NO: 176135 - DNA, 25 bp, Artificial
  Probe
cgggtctcactgacgctgttctgaa

SEQ ID NO: 176136 - DNA, 25 bp, Artificial
  Probe
agcaaggccttctgccaagaggagg

SEQ ID NO: 176137 - DNA, 25 bp, Artificial
  Probe
ccttggaagctaacatgctttcact

SEQ ID NO: 176138 - DNA, 25 bp, Artificial
  Probe
ggagcaaggccttctgccaagagga

SEQ ID NO: 176139 - DNA, 25 bp, Artificial
  Probe
catctggctggctttctgaggtcag

SEQ ID NO: 176140 - DNA, 25 bp, Artificial
  Probe
tccatgccctcattgcttcctttgg

SEQ ID NO: 176141 - DNA, 25 bp, Artificial
  Probe
gtgactctgtgtgcaagcccagcag

SEQ ID NO: 176142 - DNA, 25 bp, Artificial
  Probe
tctgaaaccatctggctggctttct

SEQ ID NO: 176143 - DNA, 25 bp, Artificial
  Probe
aatacctggtgctaacatcccatgc

SEQ ID NO: 176144 - DNA, 25 bp, Artificial
  Probe
ctgccaagaggaggagcatgtcccc

SEQ ID NO: 176145 - DNA, 25 bp, Artificial
  Probe
tcctgcccagttcaggctggtccag

SEQ ID NO: 176146 - DNA, 25 bp, Artificial
  Probe
gcgatctcacgctgttctgtaaata

SEQ ID NO: 176147 - DNA, 25 bp, Artificial
  Probe
cggccatactgctgatcacacttgc

SEQ ID NO: 176148 - DNA, 25 bp, Artificial
  Probe
ctaacatgctttcactactggaggg

SEQ ID NO: 176149 - DNA, 25 bp, Artificial
  Probe
tccagcgatctcacgctgttctgta

SEQ ID NO: 176150 - DNA, 25 bp, Artificial
  Probe
ggcaggaaggccttggaagctaaca

SEQ ID NO: 176151 - DNA, 25 bp, Artificial
  Probe
aggccttctgccaagaggaggagca

SEQ ID NO: 176152 - DNA, 25 bp, Artificial
  Probe
ttcacaaggtgaaccccattgccct

SEQ ID NO: 176153 - DNA, 25 bp, Artificial
  Probe
gtaaatacctggtgctaacatccca

SEQ ID NO: 176154 - DNA, 25 bp, Artificial
  Probe
tacctggtgctaacatcccatgccg

SEQ ID NO: 176155 - DNA, 25 bp, Artificial
  Probe
cttggaagctaacatgctttcacta

SEQ ID NO: 176156 - DNA, 25 bp, Artificial
  Probe
ctgtcatcggccatactgctgatca

SEQ ID NO: 176157 - DNA, 25 bp, Artificial
  Probe
aggccttggaagctaacatgctttc

SEQ ID NO: 176158 - DNA, 25 bp, Artificial
  Probe
agcggatggcactcgggtctcactg

SEQ ID NO: 176159 - DNA, 25 bp, Artificial
  Probe
attcccagtctccaggcctgatgca

SEQ ID NO: 176160 - DNA, 25 bp, Artificial
  Probe
aaaccatctggctggctttctgagg

SEQ ID NO: 176161 - DNA, 25 bp, Artificial
  Probe
gaaggccttggaagctaacatgctt

SEQ ID NO: 176162 - DNA, 25 bp, Artificial
  Probe
ggatggctctcctctgtttttggtt

SEQ ID NO: 176163 - DNA, 25 bp, Artificial
  Probe
gtgtaacgtgctggtgatctttttc

SEQ ID NO: 176164 - DNA, 25 bp, Artificial
  Probe
gcttactctaaaaggcgaactcaac

SEQ ID NO: 176165 - DNA, 25 bp, Artificial
  Probe
ctttcagactctgtctcctaaatgg

SEQ ID NO: 176166 - DNA, 25 bp, Artificial
  Probe
tgaggtaaactgaccgactggtccc

SEQ ID NO: 176167 - DNA, 25 bp, Artificial
  Probe
gctttgggccccatgtgattagatc

SEQ ID NO: 176168 - DNA, 25 bp, Artificial
  Probe
tggtgaccataataacgcttactct

SEQ ID NO: 176169 - DNA, 25 bp, Artificial
  Probe
tgcaatgggccagcatctccctcag

SEQ ID NO: 176170 - DNA, 25 bp, Artificial
  Probe
tccaagtggcatgagacaagcagct

SEQ ID NO: 176171 - DNA, 25 bp, Artificial
  Probe
aacctgatatgttcagggttatctt

SEQ ID NO: 176172 - DNA, 25 bp, Artificial
  Probe
gccccatgtgattagatcaactaga

SEQ ID NO: 176173 - DNA, 25 bp, Artificial
  Probe
ggccctgacacagtcattttctcct

SEQ ID NO: 176174 - DNA, 25 bp, Artificial
  Probe
agccaggactgaggagtgaacctga

SEQ ID NO: 176175 - DNA, 25 bp, Artificial
  Probe
accctgggctccatttcagccagtg

SEQ ID NO: 176176 - DNA, 25 bp, Artificial
  Probe
tctggagccagtcttcctgggcgtg

SEQ ID NO: 176177 - DNA, 25 bp, Artificial
  Probe
cattgatagccgtgggctctggagc

SEQ ID NO: 176178 - DNA, 25 bp, Artificial
  Probe
atagtcccttctcctcaggtgtcta

SEQ ID NO: 176179 - DNA, 25 bp, Artificial
  Probe
tcctcagggccctgacacagtcatt

SEQ ID NO: 176180 - DNA, 25 bp, Artificial
  Probe
atctgcatcagcatctctctgctgc

SEQ ID NO: 176181 - DNA, 25 bp, Artificial
  Probe
cagggttatctttcctggggacagg

SEQ ID NO: 176182 - DNA, 25 bp, Artificial
  Probe
ctgtaacctgagctgaagcaggagg

SEQ ID NO: 176183 - DNA, 25 bp, Artificial
  Probe
agtagccaggactgaggagtgaacc

SEQ ID NO: 176184 - DNA, 25 bp, Artificial
  Probe
ttcttctgggctccaaccctgggct

SEQ ID NO: 176185 - DNA, 25 bp, Artificial
  Probe
tccatttcagccagtgaggtaaact

SEQ ID NO: 176186 - DNA, 25 bp, Artificial
  Probe
gtagccgctttgctcctgtgtcctc

SEQ ID NO: 176187 - DNA, 25 bp, Artificial
  Probe
agaggcctgcaatgggccagcatct

SEQ ID NO: 176188 - DNA, 25 bp, Artificial
  Probe
acacacctggcctgggctttgggcc

SEQ ID NO: 176189 - DNA, 25 bp, Artificial
  Probe
gcgtgccctgtgactgggccatgtt

SEQ ID NO: 176190 - DNA, 25 bp, Artificial
  Probe
aggagtagccgctttgctcctgtgt

SEQ ID NO: 176191 - DNA, 25 bp, Artificial
  Probe
tcttcctgggcgtgccctgtgactg

SEQ ID NO: 176192 - DNA, 25 bp, Artificial
  Probe
cgtttgggctttctgactttgtgag

SEQ ID NO: 176193 - DNA, 25 bp, Artificial
  Probe
aaccctgggctccatttcagccagt

SEQ ID NO: 176194 - DNA, 25 bp, Artificial
  Probe
ataataacgcttactctaaaaggcg

SEQ ID NO: 176195 - DNA, 25 bp, Artificial
  Probe
gttcaaaggcaggagccaggcaata

SEQ ID NO: 176196 - DNA, 25 bp, Artificial
  Probe
gaagaggcctgcaatgggccagcat

SEQ ID NO: 176197 - DNA, 25 bp, Artificial
  Probe
tttcttctcagactctgaccgtttg

SEQ ID NO: 176198 - DNA, 25 bp, Artificial
  Probe
catccccaggtagctgtcgacctgg

SEQ ID NO: 176199 - DNA, 25 bp, Artificial
  Probe
caagacctgctagtcaagagaaaaa

SEQ ID NO: 176200 - DNA, 25 bp, Artificial
  Probe
ctggcctgggctttgggccccatgt

SEQ ID NO: 176201 - DNA, 25 bp, Artificial
  Probe
tcactctcttgcatagtacatctgg

SEQ ID NO: 176202 - DNA, 25 bp, Artificial
  Probe
ccagtgggcaccagaagaggcaaga

SEQ ID NO: 176203 - DNA, 25 bp, Artificial
  Probe
tacctgtgggaagaggcctgcaatg

SEQ ID NO: 176204 - DNA, 25 bp, Artificial
  Probe
atgagacaagcagcttagcgtagtt

SEQ ID NO: 176205 - DNA, 25 bp, Artificial
  Probe
tgacagtgacaagctccagtgggca

SEQ ID NO: 176206 - DNA, 25 bp, Artificial
  Probe
tcagccagtgaggtaaactgaccga

SEQ ID NO: 176207 - DNA, 25 bp, Artificial
  Probe
ctcctaaatggtgaccataataacg

SEQ ID NO: 176208 - DNA, 25 bp, Artificial
  Probe
ggtcactctacctttcagactctgt

SEQ ID NO: 176209 - DNA, 25 bp, Artificial
  Probe
gggacaggaactaacccaagacctg

SEQ ID NO: 176210 - DNA, 25 bp, Artificial
  Probe
tcaacatacacttgggaaggaagaa

SEQ ID NO: 176211 - DNA, 25 bp, Artificial
  Probe
ggtacctgcattttaccttcagcaa

SEQ ID NO: 176212 - DNA, 25 bp, Artificial
  Probe
agaccgtatttcaacatacacttgg

SEQ ID NO: 176213 - DNA, 25 bp, Artificial
  Probe
actggggaccgcagacacggtgaaa

SEQ ID NO: 176214 - DNA, 25 bp, Artificial
  Probe
tgctgcggacatcctcgatccacag

SEQ ID NO: 176215 - DNA, 25 bp, Artificial
  Probe
gctgtctctgggtacctgcatttta

SEQ ID NO: 176216 - DNA, 25 bp, Artificial
  Probe
cattcccaacagacggaggttcaag

SEQ ID NO: 176217 - DNA, 25 bp, Artificial
  Probe
ggagactgcctgctgcggacatcct

SEQ ID NO: 176218 - DNA, 25 bp, Artificial
  Probe
ctacttttgcttttagcagattcag

SEQ ID NO: 176219 - DNA, 25 bp, Artificial
  Probe
aaattctactctaatcgctatgtgg

SEQ ID NO: 176220 - DNA, 25 bp, Artificial
  Probe
aaaccctctcacatgcttctgcagg

SEQ ID NO: 176221 - DNA, 25 bp, Artificial
  Probe
gaggagactgcctgctgcggacatc

SEQ ID NO: 176222 - DNA, 25 bp, Artificial
  Probe
tctcacatgcttctgcaggaggaca

SEQ ID NO: 176223 - DNA, 25 bp, Artificial
  Probe
tccccattgcccagaggaactaaca

SEQ ID NO: 176224 - DNA, 25 bp, Artificial
  Probe
gagaagaccaatcagcctccctaat

SEQ ID NO: 176225 - DNA, 25 bp, Artificial
  Probe
tcagccaacagacaagacgtccgtc

SEQ ID NO: 176226 - DNA, 25 bp, Artificial
  Probe
atgcttctgcaggaggacattttgt

SEQ ID NO: 176227 - DNA, 25 bp, Artificial
  Probe
cacagccccatgctgtctctgggta

SEQ ID NO: 176228 - DNA, 25 bp, Artificial
  Probe
tgagaagaccaatcagcctccctaa

SEQ ID NO: 176229 - DNA, 25 bp, Artificial
  Probe
ctgttaaggtcaagtgaaggtcaca

SEQ ID NO: 176230 - DNA, 25 bp, Artificial
  Probe
gcagattcagccaacagacaagacg

SEQ ID NO: 176231 - DNA, 25 bp, Artificial
  Probe
tctctgttaaggtcaagtgaaggtc

SEQ ID NO: 176232 - DNA, 25 bp, Artificial
  Probe
ggttgcattcccaacagacggaggt

SEQ ID NO: 176233 - DNA, 25 bp, Artificial
  Probe
ctggtcctgaaggataagcaggagt

SEQ ID NO: 176234 - DNA, 25 bp, Artificial
  Probe
taaagcagggcagtccactctgcta

SEQ ID NO: 176235 - DNA, 25 bp, Artificial
  Probe
ggtcacagtgtctcattttattctt

SEQ ID NO: 176236 - DNA, 25 bp, Artificial
  Probe
ccatgctgtctctgggtacctgcat

SEQ ID NO: 176237 - DNA, 25 bp, Artificial
  Probe
gcatcaaaagctgctgcaaattcta

SEQ ID NO: 176238 - DNA, 25 bp, Artificial
  Probe
attctactctaatcgctatgtggga

SEQ ID NO: 176239 - DNA, 25 bp, Artificial
  Probe
cccaacagacggaggttcaaggcgc

SEQ ID NO: 176240 - DNA, 25 bp, Artificial
  Probe
catacacttgggaaggaagaaccaa

SEQ ID NO: 176241 - DNA, 25 bp, Artificial
  Probe
catggtggtgttcagtgagaagacc

SEQ ID NO: 176242 - DNA, 25 bp, Artificial
  Probe
tttagcagattcagccaacagacaa

SEQ ID NO: 176243 - DNA, 25 bp, Artificial
  Probe
ccctaataaagcagggcagtccact

SEQ ID NO: 176244 - DNA, 25 bp, Artificial
  Probe
aatcagcctccctaataaagcaggg

SEQ ID NO: 176245 - DNA, 25 bp, Artificial
  Probe
gtgaaggtcacagtgtctcatttta

SEQ ID NO: 176246 - DNA, 25 bp, Artificial
  Probe
acagacggaggttcaaggcgctgct

SEQ ID NO: 176247 - DNA, 25 bp, Artificial
  Probe
tgcccagaggaactaacatggtggt

SEQ ID NO: 176248 - DNA, 25 bp, Artificial
  Probe
gctttgtgttttagaccgtatttca

SEQ ID NO: 176249 - DNA, 25 bp, Artificial
  Probe
caaaggttgcattcccaacagacgg

SEQ ID NO: 176250 - DNA, 25 bp, Artificial
  Probe
tgcttctgcaggaggacattttgtt

SEQ ID NO: 176251 - DNA, 25 bp, Artificial
  Probe
tattcttcccaagacaagttctgtg

SEQ ID NO: 176252 - DNA, 25 bp, Artificial
  Probe
ctgggctttgtgttttagaccgtat

SEQ ID NO: 176253 - DNA, 25 bp, Artificial
  Probe
gctgctgcaaattctactctaatcg

SEQ ID NO: 176254 - DNA, 25 bp, Artificial
  Probe
ggcagtccactctgctataaaccct

SEQ ID NO: 176255 - DNA, 25 bp, Artificial
  Probe
ttcgtctgggctttgtgttttagac

SEQ ID NO: 176256 - DNA, 25 bp, Artificial
  Probe
gggctaaatccgcagcaaactgccg

SEQ ID NO: 176257 - DNA, 25 bp, Artificial
  Probe
cgcagcaaactgccgtgctggcagg

SEQ ID NO: 176258 - DNA, 25 bp, Artificial
  Probe
acagcaacgtcttgaacaggcgctg

SEQ ID NO: 176259 - DNA, 25 bp, Artificial
  Probe
cgtcttgaacaggcgctgatgaccc

SEQ ID NO: 176260 - DNA, 25 bp, Artificial
  Probe
ggtcgcgcggatcatgatgccaacc

SEQ ID NO: 176261 - DNA, 25 bp, Artificial
  Probe
acaggcgctgatgaccccggacacc

SEQ ID NO: 176262 - DNA, 25 bp, Artificial
  Probe
ggatcatgatgccaacctcttacgt

SEQ ID NO: 176263 - DNA, 25 bp, Artificial
  Probe
atattacaacgcggcagcattatga

SEQ ID NO: 176264 - DNA, 25 bp, Artificial
  Probe
tgccaacctcttacgtgcgcctttc

SEQ ID NO: 176265 - DNA, 25 bp, Artificial
  Probe
gcgcctttctgccggacgcgagcag

SEQ ID NO: 176266 - DNA, 25 bp, Artificial
  Probe
gccggacgcgagcagatgaacgaac

SEQ ID NO: 176267 - DNA, 25 bp, Artificial
  Probe
cgagcagatgaacgaacagactcag

SEQ ID NO: 176268 - DNA, 25 bp, Artificial
  Probe
gatgaacgaacagactcaggcgatg

SEQ ID NO: 176269 - DNA, 25 bp, Artificial
  Probe
aacagactcaggcgatgtgctttat

SEQ ID NO: 176270 - DNA, 25 bp, Artificial
  Probe
tcaggcgatgtgctttatggcaggc

SEQ ID NO: 176271 - DNA, 25 bp, Artificial
  Probe
gtgctttatggcaggcgcaaactcg

SEQ ID NO: 176272 - DNA, 25 bp, Artificial
  Probe
atggcaggcgcaaactcgattttct

SEQ ID NO: 176273 - DNA, 25 bp, Artificial
  Probe
tacggttgcaaactgctgaccacgc

SEQ ID NO: 176274 - DNA, 25 bp, Artificial
  Probe
caaactgctgaccacgccgaatccg

SEQ ID NO: 176275 - DNA, 25 bp, Artificial
  Probe
gacctgcaactgttccgcaaactgg

SEQ ID NO: 176276 - DNA, 25 bp, Artificial
  Probe
gacattgtcgcaagtcacagaatta

SEQ ID NO: 176277 - DNA, 25 bp, Artificial
  Probe
caaagcgaaagcggcaggatcgacg

SEQ ID NO: 176278 - DNA, 25 bp, Artificial
  Probe
attgtcgcaagtcacagaattattt

SEQ ID NO: 176279 - DNA, 25 bp, Artificial
  Probe
ggcaggatcgacgcgcttctgtatg

SEQ ID NO: 176280 - DNA, 25 bp, Artificial
  Probe
gttgctggatctgctgtttgaagcg

SEQ ID NO: 176281 - DNA, 25 bp, Artificial
  Probe
ggatctgctgtttgaagcgcagcag

SEQ ID NO: 176282 - DNA, 25 bp, Artificial
  Probe
gcgcagcaggtgcatcgccagcatt

SEQ ID NO: 176283 - DNA, 25 bp, Artificial
  Probe
gcaggtgcatcgccagcatttcgat

SEQ ID NO: 176284 - DNA, 25 bp, Artificial
  Probe
gcatcgccagcatttcgatcctcgt

SEQ ID NO: 176285 - DNA, 25 bp, Artificial
  Probe
gcatttcgatcctcgtcaggtgcag

SEQ ID NO: 176286 - DNA, 25 bp, Artificial
  Probe
cgatcctcgtcaggtgcaggtcagc

SEQ ID NO: 176287 - DNA, 25 bp, Artificial
  Probe
tcgtcaggtgcaggtcagcacgttg

SEQ ID NO: 176288 - DNA, 25 bp, Artificial
  Probe
gcaggtcagcacgttgctgtcgatt

SEQ ID NO: 176289 - DNA, 25 bp, Artificial
  Probe
cagcacgttgctgtcgattaagacc

SEQ ID NO: 176290 - DNA, 25 bp, Artificial
  Probe
gctgtcgattaagaccggagcttgt

SEQ ID NO: 176291 - DNA, 25 bp, Artificial
  Probe
agcttgtccggaagattgcaaatac

SEQ ID NO: 176292 - DNA, 25 bp, Artificial
  Probe
agattgcaaatactgcccgcaaacg

SEQ ID NO: 176293 - DNA, 25 bp, Artificial
  Probe
caaatactgcccgcaaacgtcgcgc

SEQ ID NO: 176294 - DNA, 25 bp, Artificial
  Probe
tgaacaggtgctggagtcggcgcgc

SEQ ID NO: 176295 - DNA, 25 bp, Artificial
  Probe
ggagtcggcgcgcaaagcgaaagcg

SEQ ID NO: 176296 - DNA, 25 bp, Artificial
  Probe
tggtgaaggtgaaaggcacgccgct

SEQ ID NO: 176297 - DNA, 25 bp, Artificial
  Probe
acgccgcttgccgataacgatgatg

SEQ ID NO: 176298 - DNA, 25 bp, Artificial
  Probe
gccggagttttacggcaatatcatc

SEQ ID NO: 176299 - DNA, 25 bp, Artificial
  Probe
ttgccgataacgatgatgtcgatgc

SEQ ID NO: 176300 - DNA, 25 bp, Artificial
  Probe
gttttacggcaatatcatcaccaca

SEQ ID NO: 176301 - DNA, 25 bp, Artificial
  Probe
acgatgatgtcgatgcctttgattt

SEQ ID NO: 176302 - DNA, 25 bp, Artificial
  Probe
gcaatatcatcaccacacgcactta

SEQ ID NO: 176303 - DNA, 25 bp, Artificial
  Probe
atcaccacacgcacttatcaggaac

SEQ ID NO: 176304 - DNA, 25 bp, Artificial
  Probe
acgcacttatcaggaacgcctcgat

SEQ ID NO: 176305 - DNA, 25 bp, Artificial
  Probe
atacgctggaaaaagtgcgcgatgc

SEQ ID NO: 176306 - DNA, 25 bp, Artificial
  Probe
ggaaaaagtgcgcgatgccgggatc

SEQ ID NO: 176307 - DNA, 25 bp, Artificial
  Probe
agtgcgcgatgccgggatcaaagtc

SEQ ID NO: 176308 - DNA, 25 bp, Artificial
  Probe
gccgggatcaaagtctgttctggcg

SEQ ID NO: 176309 - DNA, 25 bp, Artificial
  Probe
aagtctgttctggcggcattgtggg

SEQ ID NO: 176310 - DNA, 25 bp, Artificial
  Probe
aagatcgcgccggattattgctgca

SEQ ID NO: 176311 - DNA, 25 bp, Artificial
  Probe
gccggattattgctgcaactggcaa

SEQ ID NO: 176312 - DNA, 25 bp, Artificial
  Probe
attgctgcaactggcaaacctgccg

SEQ ID NO: 176313 - DNA, 25 bp, Artificial
  Probe
cgccggaaagcgtgccaatcaacat

SEQ ID NO: 176314 - DNA, 25 bp, Artificial
  Probe
aagcgtgccaatcaacatgctggtg

SEQ ID NO: 176315 - DNA, 25 bp, Artificial
  Probe
caatcaacatgctggtgaaggtgaa

SEQ ID NO: 176316 - DNA, 25 bp, Artificial
  Probe
atgatgcgctcagtgccatgcgttc

SEQ ID NO: 176317 - DNA, 25 bp, Artificial
  Probe
ctcagtgccatgcgttcgctgaaag

SEQ ID NO: 176318 - DNA, 25 bp, Artificial
  Probe
catgcgttcgctgaaaggcatcggt

SEQ ID NO: 176319 - DNA, 25 bp, Artificial
  Probe
ctgaaaggcatcggtgccacgcatc

SEQ ID NO: 176320 - DNA, 25 bp, Artificial
  Probe
ggcatcggtgccacgcatcttcatg

SEQ ID NO: 176321 - DNA, 25 bp, Artificial
  Probe
tgccacgcatcttcatgaagggcgc

SEQ ID NO: 176322 - DNA, 25 bp, Artificial
  Probe
atcttcatgaagggcgcgacccgcg

SEQ ID NO: 176323 - DNA, 25 bp, Artificial
  Probe
attaacgcgttcgcagttgcagcga

SEQ ID NO: 176324 - DNA, 25 bp, Artificial
  Probe
tacccgaacgtcatcaggcgtggca

SEQ ID NO: 176325 - DNA, 25 bp, Artificial
  Probe
gcgttcgcagttgcagcgattgcaa

SEQ ID NO: 176326 - DNA, 25 bp, Artificial
  Probe
ggtggacgagcgtccgcatgctaat

SEQ ID NO: 176327 - DNA, 25 bp, Artificial
  Probe
agttgcagcgattgcaactggcctg

SEQ ID NO: 176328 - DNA, 25 bp, Artificial
  Probe
cgtccgcatgctaatcgctttttac

SEQ ID NO: 176329 - DNA, 25 bp, Artificial
  Probe
tttaccgccagatgaaatcgaacag

SEQ ID NO: 176330 - DNA, 25 bp, Artificial
  Probe
gatgaaatcgaacagtcgctgaacg

SEQ ID NO: 176331 - DNA, 25 bp, Artificial
  Probe
aacagtcgctgaacggcgtgcatta

SEQ ID NO: 176332 - DNA, 25 bp, Artificial
  Probe
acatcatattcagcccatcacgctg

SEQ ID NO: 176333 - DNA, 25 bp, Artificial
  Probe
ttcagcccatcacgctgtggtttga

SEQ ID NO: 176334 - DNA, 25 bp, Artificial
  Probe
atcacgctgtggtttgatgatgcgc

SEQ ID NO: 176335 - DNA, 25 bp, Artificial
  Probe
ggtttgatgatgcgctcagtgccat

SEQ ID NO: 176336 - DNA, 25 bp, Artificial
  Probe
tgttcaggcacgccagaaggatgcc

SEQ ID NO: 176337 - DNA, 25 bp, Artificial
  Probe
agaaggatgccgcagaccattatct

SEQ ID NO: 176338 - DNA, 25 bp, Artificial
  Probe
gccgcagaccattatctggcgggag

SEQ ID NO: 176339 - DNA, 25 bp, Artificial
  Probe
cgttagcgactgcgacgttcgatct

SEQ ID NO: 176340 - DNA, 25 bp, Artificial
  Probe
cgacgttcgatcttgcatggagcaa

SEQ ID NO: 176341 - DNA, 25 bp, Artificial
  Probe
gatcttgcatggagcaatctcgcag

SEQ ID NO: 176342 - DNA, 25 bp, Artificial
  Probe
cagcggcatttggtcgggcagccgc

SEQ ID NO: 176343 - DNA, 25 bp, Artificial
  Probe
caatctcgcagtgcagtggtgcggt

SEQ ID NO: 176344 - DNA, 25 bp, Artificial
  Probe
gtcgggcagccgcacactatgagca

SEQ ID NO: 176345 - DNA, 25 bp, Artificial
  Probe
atttatccacggcactccgcgagct

SEQ ID NO: 176346 - DNA, 25 bp, Artificial
  Probe
cgcacactatgagcaacatgcagat

SEQ ID NO: 176347 - DNA, 25 bp, Artificial
  Probe
aacatgcagatctacagcgccagag

SEQ ID NO: 176348 - DNA, 25 bp, Artificial
  Probe
tacagcgccagagtgctgacgcctt

SEQ ID NO: 176349 - DNA, 25 bp, Artificial
  Probe
gagtgctgacgccttactggcaatg

SEQ ID NO: 176350 - DNA, 25 bp, Artificial
  Probe
tactggcaatgcttccacagcgtaa

SEQ ID NO: 176351 - DNA, 25 bp, Artificial
  Probe
gggttgtggacctggctggatgagc

SEQ ID NO: 176352 - DNA, 25 bp, Artificial
  Probe
tgagccgccactggcgggaacgtca

SEQ ID NO: 176353 - DNA, 25 bp, Artificial
  Probe
gcgcaggtgacggccttagatctct

SEQ ID NO: 176354 - DNA, 25 bp, Artificial
  Probe
gccttagatctctcgccgccaatgc

SEQ ID NO: 176355 - DNA, 25 bp, Artificial
  Probe
gccgccaatgcttgttcaggcacgc

SEQ ID NO: 176356 - DNA, 25 bp, Artificial
  Probe
cgtcacgctgaatatatgaccacgc

SEQ ID NO: 176357 - DNA, 25 bp, Artificial
  Probe
acgctgaatatatgaccacgctcac

SEQ ID NO: 176358 - DNA, 25 bp, Artificial
  Probe
ctgaatatatgaccacgctcacccg

SEQ ID NO: 176359 - DNA, 25 bp, Artificial
  Probe
gaatatatgaccacgctcacccgca

SEQ ID NO: 176360 - DNA, 25 bp, Artificial
  Probe
cccgcatgattcccgcgccgctgct

SEQ ID NO: 176361 - DNA, 25 bp, Artificial
  Probe
catgattcccgcgccgctgctggga

SEQ ID NO: 176362 - DNA, 25 bp, Artificial
  Probe
gattcccgcgccgctgctgggagag

SEQ ID NO: 176363 - DNA, 25 bp, Artificial
  Probe
cgcgccgctgctgggagagatcccc

SEQ ID NO: 176364 - DNA, 25 bp, Artificial
  Probe
ccgctgctgggagagatcccctggc

SEQ ID NO: 176365 - DNA, 25 bp, Artificial
  Probe
ctgctgggagagatcccctggcttg

SEQ ID NO: 176366 - DNA, 25 bp, Artificial
  Probe
gctgggagagatcccctggcttgca

SEQ ID NO: 176367 - DNA, 25 bp, Artificial
  Probe
ggagagatcccctggcttgcagaaa

SEQ ID NO: 176368 - DNA, 25 bp, Artificial
  Probe
ggtgctggcggctggtttacgccgc

SEQ ID NO: 176369 - DNA, 25 bp, Artificial
  Probe
gagatcccctggcttgcagaaaatc

SEQ ID NO: 176370 - DNA, 25 bp, Artificial
  Probe
ctttctgacactttcacttttgcag

SEQ ID NO: 176371 - DNA, 25 bp, Artificial
  Probe
atcccctggcttgcagaaaatccag

SEQ ID NO: 176372 - DNA, 25 bp, Artificial
  Probe
tgacactttcacttttgcagattgg

SEQ ID NO: 176373 - DNA, 25 bp, Artificial
  Probe
tttgcagattgggtaacacaggaac

SEQ ID NO: 176374 - DNA, 25 bp, Artificial
  Probe
gaaaacgtcacgctgaatatatgac

SEQ ID NO: 176375 - DNA, 25 bp, Artificial
  Probe
aaacgtcacgctgaatatatgacca

SEQ ID NO: 176376 - DNA, 25 bp, Artificial
  Probe
gcgctggcgttacagcgcaacagca

SEQ ID NO: 176377 - DNA, 25 bp, Artificial
  Probe
cgttacagcgcaacagcagcctgca

SEQ ID NO: 176378 - DNA, 25 bp, Artificial
  Probe
agcgcaacagcagcctgcagctgga

SEQ ID NO: 176379 - DNA, 25 bp, Artificial
  Probe
cagcagcctgcagctggattacgca

SEQ ID NO: 176380 - DNA, 25 bp, Artificial
  Probe
ctgcagctggattacgcaacagtaa

SEQ ID NO: 176381 - DNA, 25 bp, Artificial
  Probe
catcagcgcgcaagagggcagaccg

SEQ ID NO: 176382 - DNA, 25 bp, Artificial
  Probe
cgcaagagggcagaccgatagaatc

SEQ ID NO: 176383 - DNA, 25 bp, Artificial
  Probe
gggcagaccgatagaatcattggta

SEQ ID NO: 176384 - DNA, 25 bp, Artificial
  Probe
gaccgatagaatcattggtaatgag

SEQ ID NO: 176385 - DNA, 25 bp, Artificial
  Probe
agaatcattggtaatgagcgccgga

SEQ ID NO: 176386 - DNA, 25 bp, Artificial
  Probe
gggaaaactgtcgccagttgtgcac

SEQ ID NO: 176387 - DNA, 25 bp, Artificial
  Probe
ttggtaatgagcgccggattacgcg

SEQ ID NO: 176388 - DNA, 25 bp, Artificial
  Probe
cgccagttgtgcacttttacaagcc

SEQ ID NO: 176389 - DNA, 25 bp, Artificial
  Probe
atgagcgccggattacgcgcgcttg

SEQ ID NO: 176390 - DNA, 25 bp, Artificial
  Probe
cacttttacaagccgcaaaggcagc

SEQ ID NO: 176391 - DNA, 25 bp, Artificial
  Probe
caagccgcaaaggcagcaggctacc

SEQ ID NO: 176392 - DNA, 25 bp, Artificial
  Probe
gcaaaggcagcaggctaccggacgg

SEQ ID NO: 176393 - DNA, 25 bp, Artificial
  Probe
aggtttacgcaatagcgacgcgctg

SEQ ID NO: 176394 - DNA, 25 bp, Artificial
  Probe
cgcaatagcgacgcgctggcgttac

SEQ ID NO: 176395 - DNA, 25 bp, Artificial
  Probe
gcgacgcgctggcgttacagcgcaa

SEQ ID NO: 176396 - DNA, 25 bp, Artificial
  Probe
tggtcgagcgatggatttccgtctc

SEQ ID NO: 176397 - DNA, 25 bp, Artificial
  Probe
atggatttccgtctctggtgtagct

SEQ ID NO: 176398 - DNA, 25 bp, Artificial
  Probe
gtctctggtgtagctgatgatccga

SEQ ID NO: 176399 - DNA, 25 bp, Artificial
  Probe
tgtagctgatgatccgaataactac

SEQ ID NO: 176400 - DNA, 25 bp, Artificial
  Probe
accagccagctatcaactcgcgccc

SEQ ID NO: 176401 - DNA, 25 bp, Artificial
  Probe
gcaactcatcgattgatttacggcg

SEQ ID NO: 176402 - DNA, 25 bp, Artificial
  Probe
gattgatttacggcgctaaggatga

SEQ ID NO: 176403 - DNA, 25 bp, Artificial
  Probe
taaggatgactctggtcagagatac

SEQ ID NO: 176404 - DNA, 25 bp, Artificial
  Probe
tggtcagagatacctggcctggtct

SEQ ID NO: 176405 - DNA, 25 bp, Artificial
  Probe
ctggtctggacacagtgcccgtgtc

SEQ ID NO: 176406 - DNA, 25 bp, Artificial
  Probe
gtgcccgtgtcggagccgcgcgaga

SEQ ID NO: 176407 - DNA, 25 bp, Artificial
  Probe
cgagatatggcccgcgctggagttt

SEQ ID NO: 176408 - DNA, 25 bp, Artificial
  Probe
ggagtttcaataccggagatcatgc

SEQ ID NO: 176409 - DNA, 25 bp, Artificial
  Probe
ggagatcatgcaagctggtggctgg

SEQ ID NO: 176410 - DNA, 25 bp, Artificial
  Probe
ctggtggctggaccaatgtaaatat

SEQ ID NO: 176411 - DNA, 25 bp, Artificial
  Probe
ccaatgtaaatattgtcatgaacta

SEQ ID NO: 176412 - DNA, 25 bp, Artificial
  Probe
cgctggttagcaccgcaggtgtaga

SEQ ID NO: 176413 - DNA, 25 bp, Artificial
  Probe
ttgtcatgaactatatccgtaacct

SEQ ID NO: 176414 - DNA, 25 bp, Artificial
  Probe
caccgcaggtgtagagaaggcactt

SEQ ID NO: 176415 - DNA, 25 bp, Artificial
  Probe
tagtgaaacaggggcaatggtgcgc

SEQ ID NO: 176416 - DNA, 25 bp, Artificial
  Probe
gacatgttcagggatcgccaggcgt

SEQ ID NO: 176417 - DNA, 25 bp, Artificial
  Probe
gccaggcgttttctgagcatacctg

SEQ ID NO: 176418 - DNA, 25 bp, Artificial
  Probe
gcggcatggtgcaagttgaataacc

SEQ ID NO: 176419 - DNA, 25 bp, Artificial
  Probe
gaagatgttcgcgattatcttctat

SEQ ID NO: 176420 - DNA, 25 bp, Artificial
  Probe
tctatatcttcaggcgcgcggtctg

SEQ ID NO: 176421 - DNA, 25 bp, Artificial
  Probe
gcaacatttgggccagctaaacatg

SEQ ID NO: 176422 - DNA, 25 bp, Artificial
  Probe
ccagctaaacatgcttcatcgtcgg

SEQ ID NO: 176423 - DNA, 25 bp, Artificial
  Probe
ccgggctgccacgaccaagtgacag

SEQ ID NO: 176424 - DNA, 25 bp, Artificial
  Probe
gaccaagtgacagcaatgctgtttc

SEQ ID NO: 176425 - DNA, 25 bp, Artificial
  Probe
aatgctgtttcactggttatgcggc

SEQ ID NO: 176426 - DNA, 25 bp, Artificial
  Probe
atgccggtgaacgtgcaaaacaggc

SEQ ID NO: 176427 - DNA, 25 bp, Artificial
  Probe
acgtgcaaaacaggctctagcgttc

SEQ ID NO: 176428 - DNA, 25 bp, Artificial
  Probe
ctctagcgttcgaacgcactgattt

SEQ ID NO: 176429 - DNA, 25 bp, Artificial
  Probe
tcgttcactcatggaaaatagcgat

SEQ ID NO: 176430 - DNA, 25 bp, Artificial
  Probe
atttgcctgcattaccggtcgatgc

SEQ ID NO: 176431 - DNA, 25 bp, Artificial
  Probe
atggaaaatagcgatcgctgccagg

SEQ ID NO: 176432 - DNA, 25 bp, Artificial
  Probe
taccggtcgatgcaacgagtgatga

SEQ ID NO: 176433 - DNA, 25 bp, Artificial
  Probe
tcagggttaaagatatctcacgtac

SEQ ID NO: 176434 - DNA, 25 bp, Artificial
  Probe
gagtgatgaggttcgcaagaacctg

SEQ ID NO: 176435 - DNA, 25 bp, Artificial
  Probe
gcaagaacctgatggacatgttcag

SEQ ID NO: 176436 - DNA, 25 bp, Artificial
  Probe
ttgatatctcggatacaatagaggc

SEQ ID NO: 176437 - DNA, 25 bp, Artificial
  Probe
tccggatcacggcaatgcggctgca

SEQ ID NO: 176438 - DNA, 25 bp, Artificial
  Probe
gaagcagctgaagcagcccgcatat

SEQ ID NO: 176439 - DNA, 25 bp, Artificial
  Probe
aagaattcagctaacgcttccagac

SEQ ID NO: 176440 - DNA, 25 bp, Artificial
  Probe
tgatcaggcaattcggtcaattgtc

SEQ ID NO: 176441 - DNA, 25 bp, Artificial
  Probe
agaagaagcagctgaagcagcccgc

SEQ ID NO: 176442 - DNA, 25 bp, Artificial
  Probe
gataaatggttttcatcagccggat

SEQ ID NO: 176443 - DNA, 25 bp, Artificial
  Probe
ggcaatgcggctgcactggtggaag

SEQ ID NO: 176444 - DNA, 25 bp, Artificial
  Probe
ggtatattgaaatcgttgaagcgag

SEQ ID NO: 176445 - DNA, 25 bp, Artificial
  Probe
catcagaatctgtcggccaaaagcg

SEQ ID NO: 176446 - DNA, 25 bp, Artificial
  Probe
attcggtcaattgtcactgtcatca

SEQ ID NO: 176447 - DNA, 25 bp, Artificial
  Probe
ctactcctctgacgaatgggtatat

SEQ ID NO: 176448 - DNA, 25 bp, Artificial
  Probe
gtcactgtcatcagaatctgtcggc

SEQ ID NO: 176449 - DNA, 25 bp, Artificial
  Probe
aggatcgccatccggatcacggcaa

SEQ ID NO: 176450 - DNA, 25 bp, Artificial
  Probe
aatgagtgatcaggcaattcggtca

SEQ ID NO: 176451 - DNA, 25 bp, Artificial
  Probe
gccttccggcgcataaagtcagcaa

SEQ ID NO: 176452 - DNA, 25 bp, Artificial
  Probe
tcaattgtcactgtcatcagaatct

SEQ ID NO: 176453 - DNA, 25 bp, Artificial
  Probe
gctgaagcagcccgcatattaggcg

SEQ ID NO: 176454 - DNA, 25 bp, Artificial
  Probe
gcagcccgcatattaggcgcagata

SEQ ID NO: 176455 - DNA, 25 bp, Artificial
  Probe
ttttgttattgatatctcggataca

SEQ ID NO: 176456 - DNA, 25 bp, Artificial
  Probe
gaagcttgacgcaccaagcggaact

SEQ ID NO: 176457 - DNA, 25 bp, Artificial
  Probe
tacacagatatccatgcctgtttta

SEQ ID NO: 176458 - DNA, 25 bp, Artificial
  Probe
gagattattgagcttcatcatgacc

SEQ ID NO: 176459 - DNA, 25 bp, Artificial
  Probe
gatatccatgcctgttttacagaaa

SEQ ID NO: 176460 - DNA, 25 bp, Artificial
  Probe
cgctcggtgcgatactgatgatgaa

SEQ ID NO: 176461 - DNA, 25 bp, Artificial
  Probe
aaaaattgcattagagcacggagtc

SEQ ID NO: 176462 - DNA, 25 bp, Artificial
  Probe
gtgatgcctgttgagtcagatgctt

SEQ ID NO: 176463 - DNA, 25 bp, Artificial
  Probe
ttgagtcagatgctttcatttacac

SEQ ID NO: 176464 - DNA, 25 bp, Artificial
  Probe
tatctgatgtgatgcctgttgagtc

SEQ ID NO: 176465 - DNA, 25 bp, Artificial
  Probe
agcagcaaggacatccggatgaaaa

SEQ ID NO: 176466 - DNA, 25 bp, Artificial
  Probe
tgccaactattttgaggatgttgag

SEQ ID NO: 176467 - DNA, 25 bp, Artificial
  Probe
tgctttcatttacacagatatccat

SEQ ID NO: 176468 - DNA, 25 bp, Artificial
  Probe
tggcagaacgaacaccacattttga

SEQ ID NO: 176469 - DNA, 25 bp, Artificial
  Probe
agcttcatcatgaccagaagcttga

SEQ ID NO: 176470 - DNA, 25 bp, Artificial
  Probe
tcatcgcgccaaattttgcgctcgg

SEQ ID NO: 176471 - DNA, 25 bp, Artificial
  Probe
gagccatcatcgcgccaaattttgc

SEQ ID NO: 176472 - DNA, 25 bp, Artificial
  Probe
agggatcggagccatcatcgcgcca

SEQ ID NO: 176473 - DNA, 25 bp, Artificial
  Probe
aaattttgcgctcggtgcgatactg

SEQ ID NO: 176474 - DNA, 25 bp, Artificial
  Probe
catgaccagaagcttgacgcaccaa

SEQ ID NO: 176475 - DNA, 25 bp, Artificial
  Probe
caagcggaactgcgcttaaaacagc

SEQ ID NO: 176476 - DNA, 25 bp, Artificial
  Probe
cattaatccgtttatgtgatgtgta

SEQ ID NO: 176477 - DNA, 25 bp, Artificial
  Probe
gctcgccacaaatatgggtactgcg

SEQ ID NO: 176478 - DNA, 25 bp, Artificial
  Probe
cccgctgaccgcgcagccgcatgaa

SEQ ID NO: 176479 - DNA, 25 bp, Artificial
  Probe
agcaaatcggtgcactgatcgctgc

SEQ ID NO: 176480 - DNA, 25 bp, Artificial
  Probe
aaattcttgtgcgcacacttgatga

SEQ ID NO: 176481 - DNA, 25 bp, Artificial
  Probe
aggatatggttcaatttacgactgc

SEQ ID NO: 176482 - DNA, 25 bp, Artificial
  Probe
atgaagattgatcagcttgtgtatg

SEQ ID NO: 176483 - DNA, 25 bp, Artificial
  Probe
gctgccaatgcactcgatcttgtca

SEQ ID NO: 176484 - DNA, 25 bp, Artificial
  Probe
tcatgatctatacgcaaccggaacc

SEQ ID NO: 176485 - DNA, 25 bp, Artificial
  Probe
ttcatgaggcgacaggtcttcaaat

SEQ ID NO: 176486 - DNA, 25 bp, Artificial
  Probe
tgaaaattgctttgatcgcgcatga

SEQ ID NO: 176487 - DNA, 25 bp, Artificial
  Probe
tcaatttacgactgcctatcgggat

SEQ ID NO: 176488 - DNA, 25 bp, Artificial
  Probe
catgtcaggcgttaaactgtcagtc

SEQ ID NO: 176489 - DNA, 25 bp, Artificial
  Probe
cacagtgatgatgtcgagatcggaa

SEQ ID NO: 176490 - DNA, 25 bp, Artificial
  Probe
gcttttggcgcccacagtgatgatg

SEQ ID NO: 176491 - DNA, 25 bp, Artificial
  Probe
tgcactgatcgctgccaatgcactc

SEQ ID NO: 176492 - DNA, 25 bp, Artificial
  Probe
gatgtctcggcattaatccgtttat

SEQ ID NO: 176493 - DNA, 25 bp, Artificial
  Probe
gcgcacacttgatgaaggtgttttc

SEQ ID NO: 176494 - DNA, 25 bp, Artificial
  Probe
tgatgtgtattccattccgctcgcc

SEQ ID NO: 176495 - DNA, 25 bp, Artificial
  Probe
atgctgacgttcttgcttttggcgc

SEQ ID NO: 176496 - DNA, 25 bp, Artificial
  Probe
tgaaccgcttcatgccactgaatac

SEQ ID NO: 176497 - DNA, 25 bp, Artificial
  Probe
aagatgatgaaccgcttcatgccac

SEQ ID NO: 176498 - DNA, 25 bp, Artificial
  Probe
aatcgtttcatcattcggcgtgcga

SEQ ID NO: 176499 - DNA, 25 bp, Artificial
  Probe
tacaatcgtttcatcattcggcgtg

SEQ ID NO: 176500 - DNA, 25 bp, Artificial
  Probe
agctgtacaatcgtttcatcattcg

SEQ ID NO: 176501 - DNA, 25 bp, Artificial
  Probe
catattcatttgtatccaaggtgct

SEQ ID NO: 176502 - DNA, 25 bp, Artificial
  Probe
accgcttcatgccactgaatacgtt

SEQ ID NO: 176503 - DNA, 25 bp, Artificial
  Probe
tgggagacgcaggcacaactcttta

SEQ ID NO: 176504 - DNA, 25 bp, Artificial
  Probe
tatccaaggtgctgaatcttggagg

SEQ ID NO: 176505 - DNA, 25 bp, Artificial
  Probe
ctgtacaatcgtttcatcattcggc

SEQ ID NO: 176506 - DNA, 25 bp, Artificial
  Probe
cgtttcatcattcggcgtgcgaatt

SEQ ID NO: 176507 - DNA, 25 bp, Artificial
  Probe
tggagagattcatattcatttgtat

SEQ ID NO: 176508 - DNA, 25 bp, Artificial
  Probe
tattcgttatacggaagatgatgaa

SEQ ID NO: 176509 - DNA, 25 bp, Artificial
  Probe
catttgtatccaaggtgctgaatct

SEQ ID NO: 176510 - DNA, 25 bp, Artificial
  Probe
attcatattcatttgtatccaaggt

SEQ ID NO: 176511 - DNA, 25 bp, Artificial
  Probe
gagacgcaggcacaactctttatac

SEQ ID NO: 176512 - DNA, 25 bp, Artificial
  Probe
ataagctgtacaatcgtttcatcat

SEQ ID NO: 176513 - DNA, 25 bp, Artificial
  Probe
tttgtatccaaggtgctgaatcttg

SEQ ID NO: 176514 - DNA, 25 bp, Artificial
  Probe
atgatgaaccgcttcatgccactga

SEQ ID NO: 176515 - DNA, 25 bp, Artificial
  Probe
gcacaactctttatacggttggctc

SEQ ID NO: 176516 - DNA, 25 bp, Artificial
  Probe
gcagacaaaatcaacatggtcattt

SEQ ID NO: 176517 - DNA, 25 bp, Artificial
  Probe
cattctcatcagtcgcaatgattca

SEQ ID NO: 176518 - DNA, 25 bp, Artificial
  Probe
ggagagctatatacggctgttgcag

SEQ ID NO: 176519 - DNA, 25 bp, Artificial
  Probe
cacctctttacgtatatgatgtggc

SEQ ID NO: 176520 - DNA, 25 bp, Artificial
  Probe
atgtcgtatccggaggagagctata

SEQ ID NO: 176521 - DNA, 25 bp, Artificial
  Probe
gtatatgatgtggctttaatacgtg

SEQ ID NO: 176522 - DNA, 25 bp, Artificial
  Probe
catcagtcgcaatgattcagctcgc

SEQ ID NO: 176523 - DNA, 25 bp, Artificial
  Probe
gcaaagcattctcatcagtcgcaat

SEQ ID NO: 176524 - DNA, 25 bp, Artificial
  Probe
tagaaatcggaggtgtggatgctct

SEQ ID NO: 176525 - DNA, 25 bp, Artificial
  Probe
gcaggcgtttatttctgcagggctg

SEQ ID NO: 176526 - DNA, 25 bp, Artificial
  Probe
tggtacacctctttacgtatatgat

SEQ ID NO: 176527 - DNA, 25 bp, Artificial
  Probe
gggctgaaagcacaggtggcatatg

SEQ ID NO: 176528 - DNA, 25 bp, Artificial
  Probe
tggatgctctctatttagcggagaa

SEQ ID NO: 176529 - DNA, 25 bp, Artificial
  Probe
tcgcaatgattcagctcgctgagga

SEQ ID NO: 176530 - DNA, 25 bp, Artificial
  Probe
ggcatatgcgagcaaagcattctca

SEQ ID NO: 176531 - DNA, 25 bp, Artificial
  Probe
atgcgagcaaagcattctcatcagt

SEQ ID NO: 176532 - DNA, 25 bp, Artificial
  Probe
aggtgtggatgctctctatttagcg

SEQ ID NO: 176533 - DNA, 25 bp, Artificial
  Probe
tttatttctgcagggctgaaagcac

SEQ ID NO: 176534 - DNA, 25 bp, Artificial
  Probe
tctttagatgtcgtatccggaggag

SEQ ID NO: 176535 - DNA, 25 bp, Artificial
  Probe
tttaagcaggcgtttatttctgcag

SEQ ID NO: 176536 - DNA, 25 bp, Artificial
  Probe
aacacattcagctgctgggtgtcca

SEQ ID NO: 176537 - DNA, 25 bp, Artificial
  Probe
ggataatttctatgaaatcgcgctt

SEQ ID NO: 176538 - DNA, 25 bp, Artificial
  Probe
tcgatcttcataacggacaaactga

SEQ ID NO: 176539 - DNA, 25 bp, Artificial
  Probe
atacgcatgactacattacaacggg

SEQ ID NO: 176540 - DNA, 25 bp, Artificial
  Probe
cgcttgagcaccgcatcggctgcat

SEQ ID NO: 176541 - DNA, 25 bp, Artificial
  Probe
ttcggatcacgcccggagtagaagc

SEQ ID NO: 176542 - DNA, 25 bp, Artificial
  Probe
cattcagctgctgggtgtccattgc

SEQ ID NO: 176543 - DNA, 25 bp, Artificial
  Probe
aatcggaacacattcagctgctggg

SEQ ID NO: 176544 - DNA, 25 bp, Artificial
  Probe
tagaagcgcatacgcatgactacat

SEQ ID NO: 176545 - DNA, 25 bp, Artificial
  Probe
aatcgcgcttcttgaagacctatgt

SEQ ID NO: 176546 - DNA, 25 bp, Artificial
  Probe
gtcactccatcgatgttcttcttcg

SEQ ID NO: 176547 - DNA, 25 bp, Artificial
  Probe
agctgctgggtgtccattgccatat

SEQ ID NO: 176548 - DNA, 25 bp, Artificial
  Probe
attacaatcggaacacattcagctg

SEQ ID NO: 176549 - DNA, 25 bp, Artificial
  Probe
agcgcatacgcatgactacattaca

SEQ ID NO: 176550 - DNA, 25 bp, Artificial
  Probe
ctatgaaatcgcgcttcttgaagac

SEQ ID NO: 176551 - DNA, 25 bp, Artificial
  Probe
atttctatgaaatcgcgcttcttga

SEQ ID NO: 176552 - DNA, 25 bp, Artificial
  Probe
gcatcggctgcattgtggtggataa

SEQ ID NO: 176553 - DNA, 25 bp, Artificial
  Probe
gatggcgcttgagcaccgcatcggc

SEQ ID NO: 176554 - DNA, 25 bp, Artificial
  Probe
gatcacgcccggagtagaagcgcat

SEQ ID NO: 176555 - DNA, 25 bp, Artificial
  Probe
gcaccgcatcggctgcattgtggtg

SEQ ID NO: 176556 - DNA, 25 bp, Artificial
  Probe
cttctgggtgcataccagtcttacc

SEQ ID NO: 176557 - DNA, 25 bp, Artificial
  Probe
agtgaggcttctgggtgcataccag

SEQ ID NO: 176558 - DNA, 25 bp, Artificial
  Probe
gaattcaaaattgagctctaggccc

SEQ ID NO: 176559 - DNA, 25 bp, Artificial
  Probe
atggcagcttctacatacgaattaa

SEQ ID NO: 176560 - DNA, 25 bp, Artificial
  Probe
gtcagtgaccatcccgagctgaata

SEQ ID NO: 176561 - DNA, 25 bp, Artificial
  Probe
ctgtctcccgatgaaaacatatctt

SEQ ID NO: 176562 - DNA, 25 bp, Artificial
  Probe
catgctgccgcaggatgatcagtcc

SEQ ID NO: 176563 - DNA, 25 bp, Artificial
  Probe
cggggcgctgcatagagtgctgtct

SEQ ID NO: 176564 - DNA, 25 bp, Artificial
  Probe
tatcggggtcattgccaatgatatg

SEQ ID NO: 176565 - DNA, 25 bp, Artificial
  Probe
ccatcccgagctgaatatcggggtc

SEQ ID NO: 176566 - DNA, 25 bp, Artificial
  Probe
aagtttgtcagtgaccatcccgagc

SEQ ID NO: 176567 - DNA, 25 bp, Artificial
  Probe
gtgctgtctgcattttcttggagaa

SEQ ID NO: 176568 - DNA, 25 bp, Artificial
  Probe
gagctgaatatcggggtcattgcca

SEQ ID NO: 176569 - DNA, 25 bp, Artificial
  Probe
gccaatgatatggcagcttctacat

SEQ ID NO: 176570 - DNA, 25 bp, Artificial
  Probe
ctgcatagagtgctgtctgcatttt

SEQ ID NO: 176571 - DNA, 25 bp, Artificial
  Probe
gtattgattccaggggccatgcagg

SEQ ID NO: 176572 - DNA, 25 bp, Artificial
  Probe
aggggccatgcaggagcttgaagca

SEQ ID NO: 176573 - DNA, 25 bp, Artificial
  Probe
ggatgatcagtccggggcgctgcat

SEQ ID NO: 176574 - DNA, 25 bp, Artificial
  Probe
tgatgatgtattgattccaggggcc

SEQ ID NO: 176575 - DNA, 25 bp, Artificial
  Probe
ttaatggtcatgctgccgcaggatg

SEQ ID NO: 176576 - DNA, 25 bp, Artificial
  Probe
taggtcaggtgcgttatctcagctt

SEQ ID NO: 176577 - DNA, 25 bp, Artificial
  Probe
aagatgtattgcccgatgcaatgag

SEQ ID NO: 176578 - DNA, 25 bp, Artificial
  Probe
atcttgtccgtgaagatgtattgcc

SEQ ID NO: 176579 - DNA, 25 bp, Artificial
  Probe
gcaaatgtgacactgtctatcagta

SEQ ID NO: 176580 - DNA, 25 bp, Artificial
  Probe
tacagggatgctgtttttccattct

SEQ ID NO: 176581 - DNA, 25 bp, Artificial
  Probe
cagtagcagatgccgttcaaaaggt

SEQ ID NO: 176582 - DNA, 25 bp, Artificial
  Probe
agcagattcagtagcagatgccgtt

SEQ ID NO: 176583 - DNA, 25 bp, Artificial
  Probe
gcgttatctcagcttcttcaggcgg

SEQ ID NO: 176584 - DNA, 25 bp, Artificial
  Probe
gacattttatcttgtccgtgaagat

SEQ ID NO: 176585 - DNA, 25 bp, Artificial
  Probe
accagaccattccgcttcaaggcag

SEQ ID NO: 176586 - DNA, 25 bp, Artificial
  Probe
gtattgcccgatgcaatgagaaaaa

SEQ ID NO: 176587 - DNA, 25 bp, Artificial
  Probe
tctttccattcaccagaccattccg

SEQ ID NO: 176588 - DNA, 25 bp, Artificial
  Probe
cactgtctatcagtacgtcggcaat

SEQ ID NO: 176589 - DNA, 25 bp, Artificial
  Probe
ggaggataggtcaggtgcgttatct

SEQ ID NO: 176590 - DNA, 25 bp, Artificial
  Probe
ggcggtagctgattctggaagcaac

SEQ ID NO: 176591 - DNA, 25 bp, Artificial
  Probe
ctcagcttcttcaggcggtagctga

SEQ ID NO: 176592 - DNA, 25 bp, Artificial
  Probe
cgcttcaaggcagagcaaatgtgac

SEQ ID NO: 176593 - DNA, 25 bp, Artificial
  Probe
ctgattctggaagcaacgttctttc

SEQ ID NO: 176594 - DNA, 25 bp, Artificial
  Probe
tcttcaggcggtagctgattctgga

SEQ ID NO: 176595 - DNA, 25 bp, Artificial
  Probe
ccattccgcttcaaggcagagcaaa

SEQ ID NO: 176596 - DNA, 25 bp, Artificial
  Probe
gagctcgacaaaatttactcacatt

SEQ ID NO: 176597 - DNA, 25 bp, Artificial
  Probe
tcaaaacggcgccgaacatgttgct

SEQ ID NO: 176598 - DNA, 25 bp, Artificial
  Probe
ccgcaccattccggagtgtatagat

SEQ ID NO: 176599 - DNA, 25 bp, Artificial
  Probe
tcacattcacacgcgattgcgcaat

SEQ ID NO: 176600 - DNA, 25 bp, Artificial
  Probe
ttatttaggtccagcagctacattt

SEQ ID NO: 176601 - DNA, 25 bp, Artificial
  Probe
acacgcgattgcgcaatgccataaa

SEQ ID NO: 176602 - DNA, 25 bp, Artificial
  Probe
cgaacatgttgcttaccgcaccatt

SEQ ID NO: 176603 - DNA, 25 bp, Artificial
  Probe
cacttgctcgtccatccctcaagag

SEQ ID NO: 176604 - DNA, 25 bp, Artificial
  Probe
aatttactcacattcacacgcgatt

SEQ ID NO: 176605 - DNA, 25 bp, Artificial
  Probe
gacgttgccgattcaccagcacttg

SEQ ID NO: 176606 - DNA, 25 bp, Artificial
  Probe
attgcgcaatgccataaatttcttc

SEQ ID NO: 176607 - DNA, 25 bp, Artificial
  Probe
catgaacagcctttgccaatcgtgg

SEQ ID NO: 176608 - DNA, 25 bp, Artificial
  Probe
gtgtatagatgcagccgttgcaggc

SEQ ID NO: 176609 - DNA, 25 bp, Artificial
  Probe
ctatttaatacatgaacagcctttg

SEQ ID NO: 176610 - DNA, 25 bp, Artificial
  Probe
gctacatttacacatctagcagtca

SEQ ID NO: 176611 - DNA, 25 bp, Artificial
  Probe
tacacatctagcagtcagttcttgt

SEQ ID NO: 176612 - DNA, 25 bp, Artificial
  Probe
gggtgaaatgacgttgccgattcac

SEQ ID NO: 176613 - DNA, 25 bp, Artificial
  Probe
gaaatattaggttcaggtgcataag

SEQ ID NO: 176614 - DNA, 25 bp, Artificial
  Probe
aggtccagcagctacatttacacat

SEQ ID NO: 176615 - DNA, 25 bp, Artificial
  Probe
gatgcagccgttgcaggcgaagttg

SEQ ID NO: 176616 - DNA, 25 bp, Artificial
  Probe
cgcttctctcgtcggcggacttgtg

SEQ ID NO: 176617 - DNA, 25 bp, Artificial
  Probe
agtagagcacgtcgccgagatgaag

SEQ ID NO: 176618 - DNA, 25 bp, Artificial
  Probe
cggcctgcatgaggatgacgagacc

SEQ ID NO: 176619 - DNA, 25 bp, Artificial
  Probe
tgctgtcagcaatatcctcattgct

SEQ ID NO: 176620 - DNA, 25 bp, Artificial
  Probe
ccaaatgatccgcgtcccgaatgct

SEQ ID NO: 176621 - DNA, 25 bp, Artificial
  Probe
gctcgcgcttcatttccctcattgt

SEQ ID NO: 176622 - DNA, 25 bp, Artificial
  Probe
cggagcaggcccaacgattctcgtc

SEQ ID NO: 176623 - DNA, 25 bp, Artificial
  Probe
cccgaatgctgacattgacgtagtc

SEQ ID NO: 176624 - DNA, 25 bp, Artificial
  Probe
gaaggagtttccatatgccgatgcc

SEQ ID NO: 176625 - DNA, 25 bp, Artificial
  Probe
catgtccaaggattggccgcttgtc

SEQ ID NO: 176626 - DNA, 25 bp, Artificial
  Probe
tgtcattcctttttatgaagtgctg

SEQ ID NO: 176627 - DNA, 25 bp, Artificial
  Probe
tgaagtgctgacaagagacgcgaga

SEQ ID NO: 176628 - DNA, 25 bp, Artificial
  Probe
tgccgatgccgtaaaagcaagtgct

SEQ ID NO: 176629 - DNA, 25 bp, Artificial
  Probe
agaaggacacccggacaatgctggc

SEQ ID NO: 176630 - DNA, 25 bp, Artificial
  Probe
agacgcgagagacgtgcttccgaag

SEQ ID NO: 176631 - DNA, 25 bp, Artificial
  Probe
gtaccgggcgatgcttgtgcctgag

SEQ ID NO: 176632 - DNA, 25 bp, Artificial
  Probe
atatggaacggctctcagcggagca

SEQ ID NO: 176633 - DNA, 25 bp, Artificial
  Probe
cctcattgctgcgatcatgtccaag

SEQ ID NO: 176634 - DNA, 25 bp, Artificial
  Probe
cggcggacttgtgatcggcctgcat

SEQ ID NO: 176635 - DNA, 25 bp, Artificial
  Probe
gttccatcagccgtaccgggcgatg

SEQ ID NO: 176636 - DNA, 25 bp, Artificial
  Probe
gcgtcaacaggtaacacttccgctg

SEQ ID NO: 176637 - DNA, 25 bp, Artificial
  Probe
gtccgttccatctgtgagaaatcac

SEQ ID NO: 176638 - DNA, 25 bp, Artificial
  Probe
gctggaaacatcactgcgtactgga

SEQ ID NO: 176639 - DNA, 25 bp, Artificial
  Probe
gcggcggcaatcgtgcgcaatgaag

SEQ ID NO: 176640 - DNA, 25 bp, Artificial
  Probe
cacttccgctgctgcggcagcatat

SEQ ID NO: 176641 - DNA, 25 bp, Artificial
  Probe
tgcattgtcatcatcccgaacggaa

SEQ ID NO: 176642 - DNA, 25 bp, Artificial
  Probe
gaaggcaatgacacgattatgtgcg

SEQ ID NO: 176643 - DNA, 25 bp, Artificial
  Probe
gcaatcgtgcgcaatgaagtgattg

SEQ ID NO: 176644 - DNA, 25 bp, Artificial
  Probe
tcagtcaacccttaccgcattgaag

SEQ ID NO: 176645 - DNA, 25 bp, Artificial
  Probe
cagcccgtgctaacatgaaatgcat

SEQ ID NO: 176646 - DNA, 25 bp, Artificial
  Probe
ctgtaacagatcaaacaccggcgct

SEQ ID NO: 176647 - DNA, 25 bp, Artificial
  Probe
gggatcatttaaagatcgcggaatg

SEQ ID NO: 176648 - DNA, 25 bp, Artificial
  Probe
acacctcttattcacctgccgaagc

SEQ ID NO: 176649 - DNA, 25 bp, Artificial
  Probe
cggcagcatatgcagcccgtgctaa

SEQ ID NO: 176650 - DNA, 25 bp, Artificial
  Probe
tgtgagaaatcaccgattgcccttg

SEQ ID NO: 176651 - DNA, 25 bp, Artificial
  Probe
acacgattatgtgcgcgtcaacagg

SEQ ID NO: 176652 - DNA, 25 bp, Artificial
  Probe
catgagaaaaacggcacaggccttc

SEQ ID NO: 176653 - DNA, 25 bp, Artificial
  Probe
gaattgagcttcatgtcaaaacgga

SEQ ID NO: 176654 - DNA, 25 bp, Artificial
  Probe
ggaaaactcgctcaagctgtcatgt

SEQ ID NO: 176655 - DNA, 25 bp, Artificial
  Probe
ctgctgccttcgaagtgtgcgaaca

SEQ ID NO: 176656 - DNA, 25 bp, Artificial
  Probe
cctgtcacattgccgactgatgaag

SEQ ID NO: 176657 - DNA, 25 bp, Artificial
  Probe
actgatgatgaaatccttcacgcat

SEQ ID NO: 176658 - DNA, 25 bp, Artificial
  Probe
cagaaccaggttcttgcgcgtctat

SEQ ID NO: 176659 - DNA, 25 bp, Artificial
  Probe
gtaaaggcagccgaggaatccaatg

SEQ ID NO: 176660 - DNA, 25 bp, Artificial
  Probe
atccttcacgcatatcagctgatcg

SEQ ID NO: 176661 - DNA, 25 bp, Artificial
  Probe
gctttgattcagtcggaatggcgct

SEQ ID NO: 176662 - DNA, 25 bp, Artificial
  Probe
acgaagccgacatgctgttctctgt

SEQ ID NO: 176663 - DNA, 25 bp, Artificial
  Probe
tgcgcgtctatcgcaggagtgctga

SEQ ID NO: 176664 - DNA, 25 bp, Artificial
  Probe
gcggtcgacatttcagaaatcaagc

SEQ ID NO: 176665 - DNA, 25 bp, Artificial
  Probe
cagataacctgatctaccaagtggc

SEQ ID NO: 176666 - DNA, 25 bp, Artificial
  Probe
gacagcatccttgaatatgtaaaag

SEQ ID NO: 176667 - DNA, 25 bp, Artificial
  Probe
tatcagctgatcgcccgtgtagaag

SEQ ID NO: 176668 - DNA, 25 bp, Artificial
  Probe
cagatatttgaagctgaccgtcttt

SEQ ID NO: 176669 - DNA, 25 bp, Artificial
  Probe
ctcctgtccatgtgaaggtgtggag

SEQ ID NO: 176670 - DNA, 25 bp, Artificial
  Probe
tcagaaatcaagcctgtcacattgc

SEQ ID NO: 176671 - DNA, 25 bp, Artificial
  Probe
tcggaatggcgctcagcagatattt

SEQ ID NO: 176672 - DNA, 25 bp, Artificial
  Probe
tgctgttctctgtcactgttcccgg

SEQ ID NO: 176673 - DNA, 25 bp, Artificial
  Probe
aaggcagcaaggtcgtagctgtgtt

SEQ ID NO: 176674 - DNA, 25 bp, Artificial
  Probe
aagatccgaacacagcggtcgacat

SEQ ID NO: 176675 - DNA, 25 bp, Artificial
  Probe
tgaccgtctttgaaagcgacaaatg

SEQ ID NO: 176676 - DNA, 25 bp, Artificial
  Probe
ttcagcttcacggtgatgaaaaacc

SEQ ID NO: 176677 - DNA, 25 bp, Artificial
  Probe
gcgcttcaccatcaagataacacaa

SEQ ID NO: 176678 - DNA, 25 bp, Artificial
  Probe
tgccggaatatcagcaggcggctat

SEQ ID NO: 176679 - DNA, 25 bp, Artificial
  Probe
agctgacaggctgtgaaatatggaa

SEQ ID NO: 176680 - DNA, 25 bp, Artificial
  Probe
gcggcggaatcacaggctgattacc

SEQ ID NO: 176681 - DNA, 25 bp, Artificial
  Probe
tgggaatgtgtgccggaatatcagc

SEQ ID NO: 176682 - DNA, 25 bp, Artificial
  Probe
atcaatagagacgatgtcacgtatt

SEQ ID NO: 176683 - DNA, 25 bp, Artificial
  Probe
ggatgctgctgctcttcgcaagctg

SEQ ID NO: 176684 - DNA, 25 bp, Artificial
  Probe
atgttgacggctttgtgattgattc

SEQ ID NO: 176685 - DNA, 25 bp, Artificial
  Probe
gcgagctgtacttatcggtgaatca

SEQ ID NO: 176686 - DNA, 25 bp, Artificial
  Probe
acgatgtcacgtattgccaagagct

SEQ ID NO: 176687 - DNA, 25 bp, Artificial
  Probe
tctcagcgtaaagcaatccatgctt

SEQ ID NO: 176688 - DNA, 25 bp, Artificial
  Probe
tttgcagcttgcggcggaatcacag

SEQ ID NO: 176689 - DNA, 25 bp, Artificial
  Probe
ctcgacgtcattcagcttcacggtg

SEQ ID NO: 176690 - DNA, 25 bp, Artificial
  Probe
gtattgccaagagcttgaagctcga

SEQ ID NO: 176691 - DNA, 25 bp, Artificial
  Probe
ttaacatttgtcaatgaacatgggg

SEQ ID NO: 176692 - DNA, 25 bp, Artificial
  Probe
atgagacaaacttctcagcgtaaag

SEQ ID NO: 176693 - DNA, 25 bp, Artificial
  Probe
gtcactaaaggatttgcagcttgcg

SEQ ID NO: 176694 - DNA, 25 bp, Artificial
  Probe
ttgattcatctgtaaaagggtctag

SEQ ID NO: 176695 - DNA, 25 bp, Artificial
  Probe
gagcttgaagctcgacgtcattcag

SEQ ID NO: 176696 - DNA, 25 bp, Artificial
  Probe
aagccggtgcgctgctgaaaacgat

SEQ ID NO: 176697 - DNA, 25 bp, Artificial
  Probe
tatgatgatggcagcggaaatgact

SEQ ID NO: 176698 - DNA, 25 bp, Artificial
  Probe
tggacttcctgatattgttgataca

SEQ ID NO: 176699 - DNA, 25 bp, Artificial
  Probe
tatctcaacggcctcggcaattgtt

SEQ ID NO: 176700 - DNA, 25 bp, Artificial
  Probe
cgctaagcatggcaatcgctctgtc

SEQ ID NO: 176701 - DNA, 25 bp, Artificial
  Probe
tacaggcaggtgctggcattgttgc

SEQ ID NO: 176702 - DNA, 25 bp, Artificial
  Probe
acacgctcttacagtcgatggactt

SEQ ID NO: 176703 - DNA, 25 bp, Artificial
  Probe
ctgatgaacagatttctacaattgt

SEQ ID NO: 176704 - DNA, 25 bp, Artificial
  Probe
cttgtattacgattcgcacgatgag

SEQ ID NO: 176705 - DNA, 25 bp, Artificial
  Probe
gatattgtcaattcttgctcatcgg

SEQ ID NO: 176706 - DNA, 25 bp, Artificial
  Probe
gattcgcacgatgagtgtaaagaac

SEQ ID NO: 176707 - DNA, 25 bp, Artificial
  Probe
cattgttgctgattctgttccggaa

SEQ ID NO: 176708 - DNA, 25 bp, Artificial
  Probe
gttgcctcggcagctggtgcgaaaa

SEQ ID NO: 176709 - DNA, 25 bp, Artificial
  Probe
caatgcgggcacacgctcttacagt

SEQ ID NO: 176710 - DNA, 25 bp, Artificial
  Probe
gaaaacgattcatattgcagaagac

SEQ ID NO: 176711 - DNA, 25 bp, Artificial
  Probe
tactgccggtgaggctgaaacgctg

SEQ ID NO: 176712 - DNA, 25 bp, Artificial
  Probe
ctcggcaattgttgcctcggcagct

SEQ ID NO: 176713 - DNA, 25 bp, Artificial
  Probe
gttttgtgaaggcaatgcgggcaca

SEQ ID NO: 176714 - DNA, 25 bp, Artificial
  Probe
cggtgttgcatcgatacaggcaggt

SEQ ID NO: 176715 - DNA, 25 bp, Artificial
  Probe
caatcgctctgtctcttctaaaagc

SEQ ID NO: 176716 - DNA, 25 bp, Artificial
  Probe
gcagattgcaatagactatgaggct

SEQ ID NO: 176717 - DNA, 25 bp, Artificial
  Probe
gatttcggtttcacaaatggcagac

SEQ ID NO: 176718 - DNA, 25 bp, Artificial
  Probe
ttttgtgcctgtgcagattgcaata

SEQ ID NO: 176719 - DNA, 25 bp, Artificial
  Probe
actatgaggctgcgaaggcagatgc

SEQ ID NO: 176720 - DNA, 25 bp, Artificial
  Probe
gaggcgctggcaagcccgaatcggt

SEQ ID NO: 176721 - DNA, 25 bp, Artificial
  Probe
caccgaaagagagcgcctatctcat

SEQ ID NO: 176722 - DNA, 25 bp, Artificial
  Probe
gattacaagcggaggcgctgccgcg

SEQ ID NO: 176723 - DNA, 25 bp, Artificial
  Probe
agacgattacaagcggaggcgctgc

SEQ ID NO: 176724 - DNA, 25 bp, Artificial
  Probe
tttacaggtgcagtcaccgaaagag

SEQ ID NO: 176725 - DNA, 25 bp, Artificial
  Probe
atagactatgaggctgcgaaggcag

SEQ ID NO: 176726 - DNA, 25 bp, Artificial
  Probe
tttcacaaatggcagacttgaagat

SEQ ID NO: 176727 - DNA, 25 bp, Artificial
  Probe
ttaaagaggattttgtgcctgtgca

SEQ ID NO: 176728 - DNA, 25 bp, Artificial
  Probe
ccgcgcagcttgaacgactaaagca

SEQ ID NO: 176729 - DNA, 25 bp, Artificial
  Probe
gcagcagttccgctttatctattac

SEQ ID NO: 176730 - DNA, 25 bp, Artificial
  Probe
gagcagcctttcgagaaacgttcat

SEQ ID NO: 176731 - DNA, 25 bp, Artificial
  Probe
gcttttaatgcgggagctgcgattt

SEQ ID NO: 176732 - DNA, 25 bp, Artificial
  Probe
gcagcttgaacgactaaagcagaaa

SEQ ID NO: 176733 - DNA, 25 bp, Artificial
  Probe
aagagagcgcctatctcattcagaa

SEQ ID NO: 176734 - DNA, 25 bp, Artificial
  Probe
ttagagacgattacaagcggaggcg

SEQ ID NO: 176735 - DNA, 25 bp, Artificial
  Probe
gagcgcctatctcattcagaatatt

SEQ ID NO: 176736 - DNA, 25 bp, Artificial
  Probe
atcctgggctacactgaggaccagg

SEQ ID NO: 176737 - DNA, 25 bp, Artificial
  Probe
attgctctcaatgacaacattgtga

SEQ ID NO: 176738 - DNA, 25 bp, Artificial
  Probe
aatgtatccgttgtggatctgacat

SEQ ID NO: 176739 - DNA, 25 bp, Artificial
  Probe
ctcaatgacaacattgtgaagctca

SEQ ID NO: 176740 - DNA, 25 bp, Artificial
  Probe
gttgtctcctgtgacttcaacagca

SEQ ID NO: 176741 - DNA, 25 bp, Artificial
  Probe
cattcttccacctttgatgctgggg

SEQ ID NO: 176742 - DNA, 25 bp, Artificial
  Probe
tcctgtgacttcaacagcaactccc

SEQ ID NO: 176743 - DNA, 25 bp, Artificial
  Probe
ggctacactgaggaccaggttgtct

SEQ ID NO: 176744 - DNA, 25 bp, Artificial
  Probe
aagctcatttcctggtatgacaatg

SEQ ID NO: 176745 - DNA, 25 bp, Artificial
  Probe
gaccaggttgtctcctgtgacttca

SEQ ID NO: 176746 - DNA, 25 bp, Artificial
  Probe
atttcctggtatgacaatgaatatg

SEQ ID NO: 176747 - DNA, 25 bp, Artificial
  Probe
gctggcattgctctcaatgacaaca

SEQ ID NO: 176748 - DNA, 25 bp, Artificial
  Probe
gtggacctcatggcctacatggcct

SEQ ID NO: 176749 - DNA, 25 bp, Artificial
  Probe
gtggatctgacatgccgcctggaga

SEQ ID NO: 176750 - DNA, 25 bp, Artificial
  Probe
ctgacatgccgcctggagaaacctg

SEQ ID NO: 176751 - DNA, 25 bp, Artificial
  Probe
ctggagaaacctgccaagtatgatg

SEQ ID NO: 176752 - DNA, 25 bp, Artificial
  Probe
gacttcaacagcaactcccattctt

SEQ ID NO: 176753 - DNA, 25 bp, Artificial
  Probe
tccgttgtggatctgacatgccgcc

SEQ ID NO: 176754 - DNA, 25 bp, Artificial
  Probe
aaacctgccaagtatgatgacatca

SEQ ID NO: 176755 - DNA, 25 bp, Artificial
  Probe
aagggcatcctgggctacactgagg

SEQ ID NO: 176756 - DNA, 25 bp, Artificial
  Probe
tgatgctggtgctgagtatgtcgtg

SEQ ID NO: 176757 - DNA, 25 bp, Artificial
  Probe
caccatcttccaggagcgagatccc

SEQ ID NO: 176758 - DNA, 25 bp, Artificial
  Probe
cttctcttgtgacaaagtggacatt

SEQ ID NO: 176759 - DNA, 25 bp, Artificial
  Probe
tactggcgtcttcaccaccatggag

SEQ ID NO: 176760 - DNA, 25 bp, Artificial
  Probe
cgtcaagatcaaatggggtgatgct

SEQ ID NO: 176761 - DNA, 25 bp, Artificial
  Probe
ggagcgagatcccgtcaagatcaaa

SEQ ID NO: 176762 - DNA, 25 bp, Artificial
  Probe
tgagtatgtcgtggagtctactggc

SEQ ID NO: 176763 - DNA, 25 bp, Artificial
  Probe
tgttgccatcaacgaccccttcatt

SEQ ID NO: 176764 - DNA, 25 bp, Artificial
  Probe
ctacatgttccagtatgactctacc

SEQ ID NO: 176765 - DNA, 25 bp, Artificial
  Probe
ggctgccttctcttgtgacaaagtg

SEQ ID NO: 176766 - DNA, 25 bp, Artificial
  Probe
cttccaggagcgagatcccgtcaag

SEQ ID NO: 176767 - DNA, 25 bp, Artificial
  Probe
tgacctcaactacatggtctacatg

SEQ ID NO: 176768 - DNA, 25 bp, Artificial
  Probe
tggtgctgagtatgtcgtggagtct

SEQ ID NO: 176769 - DNA, 25 bp, Artificial
  Probe
caactacatggtctacatgttccag

SEQ ID NO: 176770 - DNA, 25 bp, Artificial
  Probe
cttcattgacctcaactacatggtc

SEQ ID NO: 176771 - DNA, 25 bp, Artificial
  Probe
cgtcttcaccaccatggagaaggct

SEQ ID NO: 176772 - DNA, 25 bp, Artificial
  Probe
caagttcaacggcacagtcaaggct

SEQ ID NO: 176773 - DNA, 25 bp, Artificial
  Probe
cacagtcaaggctgagaatgggaag

SEQ ID NO: 176774 - DNA, 25 bp, Artificial
  Probe
taccagggctgccttctcttgtgac

SEQ ID NO: 176775 - DNA, 25 bp, Artificial
  Probe
tgtcgtggagtctactggcgtcttc

SEQ ID NO: 176776 - DNA, 25 bp, Artificial
  Probe
tgaccacagtccatgccatcactgc

SEQ ID NO: 176777 - DNA, 25 bp, Artificial
  Probe
ccctcaagattgtcagcaatgcatc

SEQ ID NO: 176778 - DNA, 25 bp, Artificial
  Probe
gggcagcccagaacatcatccctgc

SEQ ID NO: 176779 - DNA, 25 bp, Artificial
  Probe
agaagactgtggatggcccctctgg

SEQ ID NO: 176780 - DNA, 25 bp, Artificial
  Probe
tggaagggctcatgaccacagtcca

SEQ ID NO: 176781 - DNA, 25 bp, Artificial
  Probe
tcactgccactcagaagactgtgga

SEQ ID NO: 176782 - DNA, 25 bp, Artificial
  Probe
atggcccctctggaaagctgtggcg

SEQ ID NO: 176783 - DNA, 25 bp, Artificial
  Probe
ccgctgatgcccccatgtttgtgat

SEQ ID NO: 176784 - DNA, 25 bp, Artificial
  Probe
cctctggaaagctgtggcgtgatgg

SEQ ID NO: 176785 - DNA, 25 bp, Artificial
  Probe
catccactggtgctgccaaggctgt

SEQ ID NO: 176786 - DNA, 25 bp, Artificial
  Probe
aatatgacaactccctcaagattgt

SEQ ID NO: 176787 - DNA, 25 bp, Artificial
  Probe
ccatgtttgtgatgggtgtgaacca

SEQ ID NO: 176788 - DNA, 25 bp, Artificial
  Probe
aggctgtgggcaaggtcatcccaga

SEQ ID NO: 176789 - DNA, 25 bp, Artificial
  Probe
ggctcatgaccacagtccatgccat

SEQ ID NO: 176790 - DNA, 25 bp, Artificial
  Probe
ctgccaaggctgtgggcaaggtcat

SEQ ID NO: 176791 - DNA, 25 bp, Artificial
  Probe
tcatccatgacaactttggcatcgt

SEQ ID NO: 176792 - DNA, 25 bp, Artificial
  Probe
ccctggccaaggtcatccatgacaa

SEQ ID NO: 176793 - DNA, 25 bp, Artificial
  Probe
agattgtcagcaatgcatcctgcac

SEQ ID NO: 176794 - DNA, 25 bp, Artificial
  Probe
atgacaactttggcatcgtggaagg

SEQ ID NO: 176795 - DNA, 25 bp, Artificial
  Probe
atgccatcactgccactcagaagac

SEQ ID NO: 176796 - DNA, 25 bp, Artificial
  Probe
gccatccttcagcagctgggtttga

SEQ ID NO: 176797 - DNA, 25 bp, Artificial
  Probe
aatgcctgctacatggaggagatga

SEQ ID NO: 176798 - DNA, 25 bp, Artificial
  Probe
accatgatgacctgtgcgtatgaag

SEQ ID NO: 176799 - DNA, 25 bp, Artificial
  Probe
ttgaacagcacgtgtgacgacagta

SEQ ID NO: 176800 - DNA, 25 bp, Artificial
  Probe
tgtgacgacagtatcctggtcaaga

SEQ ID NO: 176801 - DNA, 25 bp, Artificial
  Probe
atgatgacctgtgcgtatgaagaac

SEQ ID NO: 176802 - DNA, 25 bp, Artificial
  Probe
gatgacatcagaacagactttgaca

SEQ ID NO: 176803 - DNA, 25 bp, Artificial
  Probe
gtgggcaccatgatgacctgtgcgt

SEQ ID NO: 176804 - DNA, 25 bp, Artificial
  Probe
gacaatgggtgtctggatgacatca

SEQ ID NO: 176805 - DNA, 25 bp, Artificial
  Probe
cttcatccacacttctccagaatca

SEQ ID NO: 176806 - DNA, 25 bp, Artificial
  Probe
tttctctctcagattgagagtgacc

SEQ ID NO: 176807 - DNA, 25 bp, Artificial
  Probe
ggtgacaatgggtgtctggatgaca

SEQ ID NO: 176808 - DNA, 25 bp, Artificial
  Probe
gagaacagaggcctagaccatctga

SEQ ID NO: 176809 - DNA, 25 bp, Artificial
  Probe
accaatgcctgctacatggaggaga

SEQ ID NO: 176810 - DNA, 25 bp, Artificial
  Probe
aaccagggccagatgtgcatcaaca

SEQ ID NO: 176811 - DNA, 25 bp, Artificial
  Probe
ggcaccaatgcctgctacatggagg

SEQ ID NO: 176812 - DNA, 25 bp, Artificial
  Probe
ttctccagaatcatgcaccaaactg

SEQ ID NO: 176813 - DNA, 25 bp, Artificial
  Probe
gactgtgagggccatgatgtagcct

SEQ ID NO: 176814 - DNA, 25 bp, Artificial
  Probe
ctcctgtctgaagacggcagcggca

SEQ ID NO: 176815 - DNA, 25 bp, Artificial
  Probe
gggaaccagggccagatgtgcatca

SEQ ID NO: 176816 - DNA, 25 bp, Artificial
  Probe
cgtcagcatggagtctgagatctac

SEQ ID NO: 176817 - DNA, 25 bp, Artificial
  Probe
ttatgatgaccaacagtgtgaagtc

SEQ ID NO: 176818 - DNA, 25 bp, Artificial
  Probe
tgaggctgtactgatcacgtggaca

SEQ ID NO: 176819 - DNA, 25 bp, Artificial
  Probe
gcagctgttcgagaagatggtgagc

SEQ ID NO: 176820 - DNA, 25 bp, Artificial
  Probe
tccaacagcctccgtcaagatgctg

SEQ ID NO: 176821 - DNA, 25 bp, Artificial
  Probe
tgaagtcggcctgatcattggcaca

SEQ ID NO: 176822 - DNA, 25 bp, Artificial
  Probe
cggcctgatcattggcacaggcacc

SEQ ID NO: 176823 - DNA, 25 bp, Artificial
  Probe
atccaagatagatgaggctgtactg

SEQ ID NO: 176824 - DNA, 25 bp, Artificial
  Probe
cgctgactgcctgggagacttcatg

SEQ ID NO: 176825 - DNA, 25 bp, Artificial
  Probe
gatcattggcacaggcaccaatgct

SEQ ID NO: 176826 - DNA, 25 bp, Artificial
  Probe
gatgacctgcggttatgatgaccaa

SEQ ID NO: 176827 - DNA, 25 bp, Artificial
  Probe
ctatgatgctaacattgtcgccgtg

SEQ ID NO: 176828 - DNA, 25 bp, Artificial
  Probe
tggcacaggcaccaatgcttgctac

SEQ ID NO: 176829 - DNA, 25 bp, Artificial
  Probe
tcatgtcgctgactgcctgggagac

SEQ ID NO: 176830 - DNA, 25 bp, Artificial
  Probe
gaacatcgtgcatggcagtggaacc

SEQ ID NO: 176831 - DNA, 25 bp, Artificial
  Probe
caatgcttgctacatggaggaactg

SEQ ID NO: 176832 - DNA, 25 bp, Artificial
  Probe
catggagtctgagatctacgacacc

SEQ ID NO: 176833 - DNA, 25 bp, Artificial
  Probe
tgggaagcagctgttcgagaagatg

SEQ ID NO: 176834 - DNA, 25 bp, Artificial
  Probe
cccagagaacatcgtgcatggcagt

SEQ ID NO: 176835 - DNA, 25 bp, Artificial
  Probe
tttcgatcatgtcgctgactgcctg

SEQ ID NO: 176836 - DNA, 25 bp, Artificial
  Probe
tcgtctcctgcatctctgacttcct

SEQ ID NO: 176837 - DNA, 25 bp, Artificial
  Probe
tccagcacatctgcacgatcgtctc

SEQ ID NO: 176838 - DNA, 25 bp, Artificial
  Probe
ctctctacaagatgcacccacagta

SEQ ID NO: 176839 - DNA, 25 bp, Artificial
  Probe
tggctgagcagcacattcggcagat

SEQ ID NO: 176840 - DNA, 25 bp, Artificial
  Probe
tcatgcagggcaccggggatgagct

SEQ ID NO: 176841 - DNA, 25 bp, Artificial
  Probe
tcctctcagagagtggcacgggcaa

SEQ ID NO: 176842 - DNA, 25 bp, Artificial
  Probe
actgtgtgtcggtccagcacatctg

SEQ ID NO: 176843 - DNA, 25 bp, Artificial
  Probe
gcacgatcgtctccttccgatcagc

SEQ ID NO: 176844 - DNA, 25 bp, Artificial
  Probe
tggagccgtctgatgttgactgtgt

SEQ ID NO: 176845 - DNA, 25 bp, Artificial
  Probe
tgtttgaccacatcgtctcctgcat

SEQ ID NO: 176846 - DNA, 25 bp, Artificial
  Probe
tgaggcgcctggtgcctgactccga

SEQ ID NO: 176847 - DNA, 25 bp, Artificial
  Probe
agcagcacattcggcagattgagga

SEQ ID NO: 176848 - DNA, 25 bp, Artificial
  Probe
tctcatttccctgccatcagacgaa

SEQ ID NO: 176849 - DNA, 25 bp, Artificial
  Probe
gcatcactccagagctgctcacgag

SEQ ID NO: 176850 - DNA, 25 bp, Artificial
  Probe
aagggcgcatcactccagagctgct

SEQ ID NO: 176851 - DNA, 25 bp, Artificial
  Probe
accgcctggctgagcagcacattcg

SEQ ID NO: 176852 - DNA, 25 bp, Artificial
  Probe
gcaagcagacgctgatggaggtgaa

SEQ ID NO: 176853 - DNA, 25 bp, Artificial
  Probe
cctgcatctctgacttcctggacta

SEQ ID NO: 176854 - DNA, 25 bp, Artificial
  Probe
atgttgactgtgtgtcggtccagca

SEQ ID NO: 176855 - DNA, 25 bp, Artificial
  Probe
atgagctgtttgaccacatcgtctc

SEQ ID NO: 176856 - DNA, 25 bp, Artificial
  Probe
caccttccagcagatgtggatcagc

SEQ ID NO: 176857 - DNA, 25 bp, Artificial
  Probe
gatgtggatcagcaagcaggagtac

SEQ ID NO: 176858 - DNA, 25 bp, Artificial
  Probe
gatcagcaagcaggagtacgatgag

SEQ ID NO: 176859 - DNA, 25 bp, Artificial
  Probe
gatcaagatcattgctcctcctgag

SEQ ID NO: 176860 - DNA, 25 bp, Artificial
  Probe
tgccaacacagtgctgtctggtggc

SEQ ID NO: 176861 - DNA, 25 bp, Artificial
  Probe
ggctcctagcaccatgaagatcaag

SEQ ID NO: 176862 - DNA, 25 bp, Artificial
  Probe
catgtacccaggcatcgctgacagg

SEQ ID NO: 176863 - DNA, 25 bp, Artificial
  Probe
attcaattccatcatgaagtgtgac

SEQ ID NO: 176864 - DNA, 25 bp, Artificial
  Probe
tgccctggctcctagcaccatgaag

SEQ ID NO: 176865 - DNA, 25 bp, Artificial
  Probe
catcgctgacaggatgcagaaggag

SEQ ID NO: 176866 - DNA, 25 bp, Artificial
  Probe
cacagtgctgtctggtggcaccacc

SEQ ID NO: 176867 - DNA, 25 bp, Artificial
  Probe
ggtcatcactatcggcaatgagcgg

SEQ ID NO: 176868 - DNA, 25 bp, Artificial
  Probe
tgctcctcctgagcgcaagtactct

SEQ ID NO: 176869 - DNA, 25 bp, Artificial
  Probe
catcgtgcaccgcaaatgcttctag

SEQ ID NO: 176870 - DNA, 25 bp, Artificial
  Probe
cccaggcatcgctgacaggatgcag

SEQ ID NO: 176871 - DNA, 25 bp, Artificial
  Probe
ttccatcatgaagtgtgacgttgac

SEQ ID NO: 176872 - DNA, 25 bp, Artificial
  Probe
atcctgtggcatccatgaaactaca

SEQ ID NO: 176873 - DNA, 25 bp, Artificial
  Probe
tgtgtggattggtggctctatcctg

SEQ ID NO: 176874 - DNA, 25 bp, Artificial
  Probe
gatcattgctcctcctgagcgcaag

SEQ ID NO: 176875 - DNA, 25 bp, Artificial
  Probe
gattggtggctctatcctggcctca

SEQ ID NO: 176876 - DNA, 25 bp, Artificial
  Probe
tttctacaatgagctgcgtgtggcc

SEQ ID NO: 176877 - DNA, 25 bp, Artificial
  Probe
cgaggcccagagcaagagaggcatc

SEQ ID NO: 176878 - DNA, 25 bp, Artificial
  Probe
gtccgccatgtgcaaggccggcttc

SEQ ID NO: 176879 - DNA, 25 bp, Artificial
  Probe
tatcgctgcgctcgtcgtcgacaac

SEQ ID NO: 176880 - DNA, 25 bp, Artificial
  Probe
catcgtgggccgccctaggcaccag

SEQ ID NO: 176881 - DNA, 25 bp, Artificial
  Probe
ttggcaccacactttctacaatgag

SEQ ID NO: 176882 - DNA, 25 bp, Artificial
  Probe
ccgccctaggcaccagggtgtgatg

SEQ ID NO: 176883 - DNA, 25 bp, Artificial
  Probe
gatttggcaccacactttctacaat

SEQ ID NO: 176884 - DNA, 25 bp, Artificial
  Probe
ccctgaggagcaccctgtgctgctc

SEQ ID NO: 176885 - DNA, 25 bp, Artificial
  Probe
gagaggcatcctgaccctgaagtac

SEQ ID NO: 176886 - DNA, 25 bp, Artificial
  Probe
ctacaatgagctgcgtgtggcccct

SEQ ID NO: 176887 - DNA, 25 bp, Artificial
  Probe
gcgtgtggcccctgaggagcaccct

SEQ ID NO: 176888 - DNA, 25 bp, Artificial
  Probe
cactttctacaatgagctgcgtgtg

SEQ ID NO: 176889 - DNA, 25 bp, Artificial
  Probe
tgtgctgctcaccgaggcccctctg

SEQ ID NO: 176890 - DNA, 25 bp, Artificial
  Probe
ggcccctgaggagcaccctgtgctg

SEQ ID NO: 176891 - DNA, 25 bp, Artificial
  Probe
cgccatgtgcaaggccggcttcgcg

SEQ ID NO: 176892 - DNA, 25 bp, Artificial
  Probe
cgctgcgctcgtcgtcgacaacggg

SEQ ID NO: 176893 - DNA, 25 bp, Artificial
  Probe
gcaccacactttctacaatgagctg

SEQ ID NO: 176894 - DNA, 25 bp, Artificial
  Probe
caactgggacgatatggagaagatt

SEQ ID NO: 176895 - DNA, 25 bp, Artificial
  Probe
cgacaacgggtccgccatgtgcaag

SEQ ID NO: 176896 - DNA, 25 bp, Artificial
  Probe
caccaccacagctgagagggaaatc

SEQ ID NO: 176897 - DNA, 25 bp, Artificial
  Probe
tgttgccctagacttcgagcaagag

SEQ ID NO: 176898 - DNA, 25 bp, Artificial
  Probe
ctctggtcgtaccactggcattgtg

SEQ ID NO: 176899 - DNA, 25 bp, Artificial
  Probe
tgtgttgtccctgtatgcctctggt

SEQ ID NO: 176900 - DNA, 25 bp, Artificial
  Probe
catctatgagggttacgcgctccct

SEQ ID NO: 176901 - DNA, 25 bp, Artificial
  Probe
gaagatcctgaccgagcgtggctac

SEQ ID NO: 176902 - DNA, 25 bp, Artificial
  Probe
cctagacttcgagcaagagatggcc

SEQ ID NO: 176903 - DNA, 25 bp, Artificial
  Probe
agactacctcatgaagatcctgacc

SEQ ID NO: 176904 - DNA, 25 bp, Artificial
  Probe
cattgtgatggactccggagacggg

SEQ ID NO: 176905 - DNA, 25 bp, Artificial
  Probe
agccatccaggctgtgttgtccctg

SEQ ID NO: 176906 - DNA, 25 bp, Artificial
  Probe
gcaagagatggccactgccgcatcc

SEQ ID NO: 176907 - DNA, 25 bp, Artificial
  Probe
cgagcgtggctacagcttcaccacc

SEQ ID NO: 176908 - DNA, 25 bp, Artificial
  Probe
ggaaatcgtgcgtgacattaaagag

SEQ ID NO: 176909 - DNA, 25 bp, Artificial
  Probe
gtgctatgttgccctagacttcgag

SEQ ID NO: 176910 - DNA, 25 bp, Artificial
  Probe
cactggcattgtgatggactccgga

SEQ ID NO: 176911 - DNA, 25 bp, Artificial
  Probe
cctgacagactacctcatgaagatc

SEQ ID NO: 176912 - DNA, 25 bp, Artificial
  Probe
tggctacagcttcaccaccacagct

SEQ ID NO: 176913 - DNA, 25 bp, Artificial
  Probe
gaagctgtgctatgttgccctagac

SEQ ID NO: 176914 - DNA, 25 bp, Artificial
  Probe
ccaggctgtgttgtccctgtatgcc

SEQ ID NO: 176915 - DNA, 25 bp, Artificial
  Probe
ggtcacccacactgtgcccatctat

SEQ ID NO: 176916 - DNA, 25 bp, Artificial
  Probe
ccgatctcgtctgatctcggaagct

SEQ ID NO: 176917 - DNA, 25 bp, Artificial
  Probe
gtctgatctcggaagctaagcaggg

SEQ ID NO: 176918 - DNA, 25 bp, Artificial
  Probe
cccgatctcgtctgatctcggaagc

SEQ ID NO: 176919 - DNA, 25 bp, Artificial
  Probe
tagtacttggatgggagaccgcctg

SEQ ID NO: 176920 - DNA, 25 bp, Artificial
  Probe
cgatctcgtctgatctcggaagcta

SEQ ID NO: 176921 - DNA, 25 bp, Artificial
  Probe
cctgaacgcgcccgatctcgtctga

SEQ ID NO: 176922 - DNA, 25 bp, Artificial
  Probe
atctcgtctgatctcggaagctaag

SEQ ID NO: 176923 - DNA, 25 bp, Artificial
  Probe
gcgcccgatctcgtctgatctcgga

SEQ ID NO: 176924 - DNA, 25 bp, Artificial
  Probe
tgatctcggaagctaagcagggtcg

SEQ ID NO: 176925 - DNA, 25 bp, Artificial
  Probe
tctgatctcggaagctaagcagggt

SEQ ID NO: 176926 - DNA, 25 bp, Artificial
  Probe
acgcgcccgatctcgtctgatctcg

SEQ ID NO: 176927 - DNA, 25 bp, Artificial
  Probe
tgaacgcgcccgatctcgtctgatc

SEQ ID NO: 176928 - DNA, 25 bp, Artificial
  Probe
tctcgtctgatctcggaagctaagc

SEQ ID NO: 176929 - DNA, 25 bp, Artificial
  Probe
aacgcgcccgatctcgtctgatctc

SEQ ID NO: 176930 - DNA, 25 bp, Artificial
  Probe
gcccgatctcgtctgatctcggaag

SEQ ID NO: 176931 - DNA, 25 bp, Artificial
  Probe
cgcgcccgatctcgtctgatctcgg

SEQ ID NO: 176932 - DNA, 25 bp, Artificial
  Probe
tcgtctgatctcggaagctaagcag

SEQ ID NO: 176933 - DNA, 25 bp, Artificial
  Probe
ctgaacgcgcccgatctcgtctgat

SEQ ID NO: 176934 - DNA, 25 bp, Artificial
  Probe
ctgatctcggaagctaagcagggtc

SEQ ID NO: 176935 - DNA, 25 bp, Artificial
  Probe
ctcgtctgatctcggaagctaagca

SEQ ID NO: 176936 - DNA, 25 bp, Artificial
  Probe
ctgatctacagagtgagttctggga

SEQ ID NO: 176937 - DNA, 25 bp, Artificial
  Probe
tatagacatgactttatgagtcaag

SEQ ID NO: 176938 - DNA, 25 bp, Artificial
  Probe
caagccagtctgatctacagagtga

SEQ ID NO: 176939 - DNA, 25 bp, Artificial
  Probe
tccctctggctggaatatagacatg

SEQ ID NO: 176940 - DNA, 25 bp, Artificial
  Probe
cacctttaatccctctggctggaat

SEQ ID NO: 176941 - DNA, 25 bp, Artificial
  Probe
acagccaagactatatagagaaacc

SEQ ID NO: 176942 - DNA, 25 bp, Artificial
  Probe
gccagtctgatctacagagtgagtt

SEQ ID NO: 176943 - DNA, 25 bp, Artificial
  Probe
atctacagagtgagttctgggacag

SEQ ID NO: 176944 - DNA, 25 bp, Artificial
  Probe
tctgggacagccaagactatataga

SEQ ID NO: 176945 - DNA, 25 bp, Artificial
  Probe
gatctggctggaatgacacaccttt

SEQ ID NO: 176946 - DNA, 25 bp, Artificial
  Probe
atgacacacctttaatccctctggc

SEQ ID NO: 176947 - DNA, 25 bp, Artificial
  Probe
agtcaagccagtctgatctacagag

SEQ ID NO: 176948 - DNA, 25 bp, Artificial
  Probe
tttatgagtcaagccagtctgatct

SEQ ID NO: 176949 - DNA, 25 bp, Artificial
  Probe
tacagagtgagttctgggacagcca

SEQ ID NO: 176950 - DNA, 25 bp, Artificial
  Probe
taatccctctggctggaatatagac

SEQ ID NO: 176951 - DNA, 25 bp, Artificial
  Probe
acacacctttaatccctctggctgg

SEQ ID NO: 176952 - DNA, 25 bp, Artificial
  Probe
gctggaatgacacacctttaatccc

SEQ ID NO: 176953 - DNA, 25 bp, Artificial
  Probe
gactttatgagtcaagccagtctga

SEQ ID NO: 176954 - DNA, 25 bp, Artificial
  Probe
agttctgggacagccaagactatat

SEQ ID NO: 176955 - DNA, 25 bp, Artificial
  Probe
gtgagttctgggacagccaagacta

SEQ ID NO: 176956 - DNA, 25 bp, Artificial
  Probe
tccaaaagggcaactcatgtagtac

SEQ ID NO: 176957 - DNA, 25 bp, Artificial
  Probe
gtcctaggaaatcccatgaactcca

SEQ ID NO: 176958 - DNA, 25 bp, Artificial
  Probe
tgggttcagttccctgcgcccacaa

SEQ ID NO: 176959 - DNA, 25 bp, Artificial
  Probe
actcatgtagtacacttacaaacac

SEQ ID NO: 176960 - DNA, 25 bp, Artificial
  Probe
caaacacacaggtaaatacttacag

SEQ ID NO: 176961 - DNA, 25 bp, Artificial
  Probe
aactccaaaagggcaactcatgtag

SEQ ID NO: 176962 - DNA, 25 bp, Artificial
  Probe
gagcactggctacccttcttgagga

SEQ ID NO: 176963 - DNA, 25 bp, Artificial
  Probe
ccagtcctaggaaatcccatgaact

SEQ ID NO: 176964 - DNA, 25 bp, Artificial
  Probe
taggagcactggctacccttcttga

SEQ ID NO: 176965 - DNA, 25 bp, Artificial
  Probe
cccacaagtggctcacaactgagga

SEQ ID NO: 176966 - DNA, 25 bp, Artificial
  Probe
ctcagtggttaggagcactggctac

SEQ ID NO: 176967 - DNA, 25 bp, Artificial
  Probe
actccagtcctaggaaatcccatga

SEQ ID NO: 176968 - DNA, 25 bp, Artificial
  Probe
ctgaggactccagtcctaggaaatc

SEQ ID NO: 176969 - DNA, 25 bp, Artificial
  Probe
gcaactcatgtagtacacttacaaa

SEQ ID NO: 176970 - DNA, 25 bp, Artificial
  Probe
tggctcagtggttaggagcactggc

SEQ ID NO: 176971 - DNA, 25 bp, Artificial
  Probe
cactggctacccttcttgaggacct

SEQ ID NO: 176972 - DNA, 25 bp, Artificial
  Probe
tcacaactgaggactccagtcctag

SEQ ID NO: 176973 - DNA, 25 bp, Artificial
  Probe
acaagtggctcacaactgaggactc

SEQ ID NO: 176974 - DNA, 25 bp, Artificial
  Probe
agtggctcacaactgaggactccag

SEQ ID NO: 176975 - DNA, 25 bp, Artificial
  Probe
catgtagtacacttacaaacacaca

SEQ ID NO: 176976 - DNA, 25 bp, Artificial
  Probe
tcaggggcactgattagagtcagtg

SEQ ID NO: 176977 - DNA, 25 bp, Artificial
  Probe
gattagagtcagtggcctctactgc

SEQ ID NO: 176978 - DNA, 25 bp, Artificial
  Probe
agtcagtggcctctactgcactctt

SEQ ID NO: 176979 - DNA, 25 bp, Artificial
  Probe
gcaatgtgcagctgcaagcttcccc

SEQ ID NO: 176980 - DNA, 25 bp, Artificial
  Probe
aagctgcagcaatgtgcagctgcaa

SEQ ID NO: 176981 - DNA, 25 bp, Artificial
  Probe
ccagctcccggacacgtactaagtg

SEQ ID NO: 176982 - DNA, 25 bp, Artificial
  Probe
cttagcctcaggttaatggaggatg

SEQ ID NO: 176983 - DNA, 25 bp, Artificial
  Probe
aggctttcaggcagaggccagaaga

SEQ ID NO: 176984 - DNA, 25 bp, Artificial
  Probe
gtcagtggcctctactgcactcttc

SEQ ID NO: 176985 - DNA, 25 bp, Artificial
  Probe
caggctttggccttgcaagtgaact

SEQ ID NO: 176986 - DNA, 25 bp, Artificial
  Probe
gccacctctccactgtgatgtatgt

SEQ ID NO: 176987 - DNA, 25 bp, Artificial
  Probe
ctcttcccaccagagaagcacagat

SEQ ID NO: 176988 - DNA, 25 bp, Artificial
  Probe
ctggccctggccttactcttcaggg

SEQ ID NO: 176989 - DNA, 25 bp, Artificial
  Probe
gatggtgtgctccaagggcctgcct

SEQ ID NO: 176990 - DNA, 25 bp, Artificial
  Probe
cctgtacagggctccaaggagccca

SEQ ID NO: 176991 - DNA, 25 bp, Artificial
  Probe
caattctaagcaagtgtgtggaagc

SEQ ID NO: 176992 - DNA, 25 bp, Artificial
  Probe
gtctgttcccacaggcgtgtgaagt

SEQ ID NO: 176993 - DNA, 25 bp, Artificial
  Probe
ctgacaagaggctttcaggcagagg

SEQ ID NO: 176994 - DNA, 25 bp, Artificial
  Probe
gcactgattagagtcagtggcctct

SEQ ID NO: 176995 - DNA, 25 bp, Artificial
  Probe
ctctcctcaggctttggccttgcaa

SEQ ID NO: 176996 - DNA, 25 bp, Artificial
  Probe
gcctatctggccacaacaagctgca

SEQ ID NO: 176997 - DNA, 25 bp, Artificial
  Probe
cccttggagagcaactgacaagagg

SEQ ID NO: 176998 - DNA, 25 bp, Artificial
  Probe
tgcctcctgtacagggctccaagga

SEQ ID NO: 176999 - DNA, 25 bp, Artificial
  Probe
aggatgggcacaattctaagcaagt

SEQ ID NO: 177000 - DNA, 25 bp, Artificial
  Probe
gctgtggcctgctcccttggagagc

SEQ ID NO: 177001 - DNA, 25 bp, Artificial
  Probe
cctgagcctatctggccacaacaag

SEQ ID NO: 177002 - DNA, 25 bp, Artificial
  Probe
tgaggaccagccaggatgggcacaa

SEQ ID NO: 177003 - DNA, 25 bp, Artificial
  Probe
aagcacagatccaggggcactgccc

SEQ ID NO: 177004 - DNA, 25 bp, Artificial
  Probe
tggtgtgctccaagggcctgcctcc

SEQ ID NO: 177005 - DNA, 25 bp, Artificial
  Probe
ccggctgtggcctgctcccttggag

SEQ ID NO: 177006 - DNA, 25 bp, Artificial
  Probe
aaggagcccagctcccggacacgta

SEQ ID NO: 177007 - DNA, 25 bp, Artificial
  Probe
tcttcaggggcactgattagagtca

SEQ ID NO: 177008 - DNA, 25 bp, Artificial
  Probe
tactaagtgcctagggttgccggct

SEQ ID NO: 177009 - DNA, 25 bp, Artificial
  Probe
ctgcctcctgtacagggctccaagg

SEQ ID NO: 177010 - DNA, 25 bp, Artificial
  Probe
gagcaactgacaagaggctttcagg

SEQ ID NO: 177011 - DNA, 25 bp, Artificial
  Probe
agtgcagctctcctcaggctttggc

SEQ ID NO: 177012 - DNA, 25 bp, Artificial
  Probe
ttcccacaggcgtgtgaagtgaccg

SEQ ID NO: 177013 - DNA, 25 bp, Artificial
  Probe
tggaagcaggtgctgccctggccct

SEQ ID NO: 177014 - DNA, 25 bp, Artificial
  Probe
ggttgccggctgtggcctgctccct

SEQ ID NO: 177015 - DNA, 25 bp, Artificial
  Probe
gccttactcttcaggggcactgatt

SEQ ID NO: 177016 - DNA, 25 bp, Artificial
  Probe
caagggcctgcctcctgtacagggc

SEQ ID NO: 177017 - DNA, 25 bp, Artificial
  Probe
agggcctgcctcctgtacagggctc

SEQ ID NO: 177018 - DNA, 25 bp, Artificial
  Probe
tcccacaggcgtgtgaagtgaccgg

SEQ ID NO: 177019 - DNA, 25 bp, Artificial
  Probe
gaaggggccagtgcagctctcctca

SEQ ID NO: 177020 - DNA, 25 bp, Artificial
  Probe
gaccagccaggatgggcacaattct

SEQ ID NO: 177021 - DNA, 25 bp, Artificial
  Probe
ctcctcaggctttggccttgcaagt

SEQ ID NO: 177022 - DNA, 25 bp, Artificial
  Probe
ccccaagatgacaaaacagcctcgt

SEQ ID NO: 177023 - DNA, 25 bp, Artificial
  Probe
taaacacatctggtttagtgcagtt

SEQ ID NO: 177024 - DNA, 25 bp, Artificial
  Probe
caagatgacaaaacagcctcgtgcc

SEQ ID NO: 177025 - DNA, 25 bp, Artificial
  Probe
tccacctcatgagacagccatcgtg

SEQ ID NO: 177026 - DNA, 25 bp, Artificial
  Probe
tctctgtcttgtgatactgattggc

SEQ ID NO: 177027 - DNA, 25 bp, Artificial
  Probe
acctcatgagacagccatcgtgaga

SEQ ID NO: 177028 - DNA, 25 bp, Artificial
  Probe
tacttcctgtctctgtcttgtgata

SEQ ID NO: 177029 - DNA, 25 bp, Artificial
  Probe
ttgtgatactgattggcacaaggcc

SEQ ID NO: 177030 - DNA, 25 bp, Artificial
  Probe
aacacatctggtttagtgcagtttt

SEQ ID NO: 177031 - DNA, 25 bp, Artificial
  Probe
tgtctctgtcttgtgatactgattg

SEQ ID NO: 177032 - DNA, 25 bp, Artificial
  Probe
aagatgacaaaacagcctcgtgccg

SEQ ID NO: 177033 - DNA, 25 bp, Artificial
  Probe
ggcccccaagatgacaaaacagcct

SEQ ID NO: 177034 - DNA, 25 bp, Artificial
  Probe
gactgatgcacacattgtcacttgt

SEQ ID NO: 177035 - DNA, 25 bp, Artificial
  Probe
tttaaacacatctggtttagtgcag

SEQ ID NO: 177036 - DNA, 25 bp, Artificial
  Probe
ttaaacacatctggtttagtgcagt

SEQ ID NO: 177037 - DNA, 25 bp, Artificial
  Probe
ccacctcatgagacagccatcgtga

SEQ ID NO: 177038 - DNA, 25 bp, Artificial
  Probe
cttgtgatactgattggcacaaggc

SEQ ID NO: 177039 - DNA, 25 bp, Artificial
  Probe
cacaaggcccccaagatgacaaaac

SEQ ID NO: 177040 - DNA, 25 bp, Artificial
  Probe
cctgtctctgtcttgtgatactgat

SEQ ID NO: 177041 - DNA, 25 bp, Artificial
  Probe
tgtccacctcatgagacagccatcg

SEQ ID NO: 177042 - DNA, 25 bp, Artificial
  Probe
aaggcccccaagatgacaaaacagc

SEQ ID NO: 177043 - DNA, 25 bp, Artificial
  Probe
aatttaaacacatctggtttagtgc

SEQ ID NO: 177044 - DNA, 25 bp, Artificial
  Probe
ccatcgtgagactgatgcacacatt

SEQ ID NO: 177045 - DNA, 25 bp, Artificial
  Probe
catgagacagccatcgtgagactga

SEQ ID NO: 177046 - DNA, 25 bp, Artificial
  Probe
tgtcttgtgatactgattggcacaa

SEQ ID NO: 177047 - DNA, 25 bp, Artificial
  Probe
gtgcctttacttcctgtctctgtct

SEQ ID NO: 177048 - DNA, 25 bp, Artificial
  Probe
ctgattggcacaaggcccccaagat

SEQ ID NO: 177049 - DNA, 25 bp, Artificial
  Probe
caaggcccccaagatgacaaaacag

SEQ ID NO: 177050 - DNA, 25 bp, Artificial
  Probe
acacatctggtttagtgcagttttc

SEQ ID NO: 177051 - DNA, 25 bp, Artificial
  Probe
atactgattggcacaaggcccccaa

SEQ ID NO: 177052 - DNA, 25 bp, Artificial
  Probe
acttcctgtctctgtcttgtgatac

SEQ ID NO: 177053 - DNA, 25 bp, Artificial
  Probe
catctggtttagtgcagttttcttc

SEQ ID NO: 177054 - DNA, 25 bp, Artificial
  Probe
ttcctgtctctgtcttgtgatactg

SEQ ID NO: 177055 - DNA, 25 bp, Artificial
  Probe
gtagtcctctctgtccacctcatga

SEQ ID NO: 177056 - DNA, 25 bp, Artificial
  Probe
atgagacagccatcgtgagactgat

SEQ ID NO: 177057 - DNA, 25 bp, Artificial
  Probe
acatctggtttagtgcagttttctt

SEQ ID NO: 177058 - DNA, 25 bp, Artificial
  Probe
tctgtccacctcatgagacagccat

SEQ ID NO: 177059 - DNA, 25 bp, Artificial
  Probe
gagacagccatcgtgagactgatgc

SEQ ID NO: 177060 - DNA, 25 bp, Artificial
  Probe
cagccatcgtgagactgatgcacac

SEQ ID NO: 177061 - DNA, 25 bp, Artificial
  Probe
tgagactgatgcacacattgtcact

SEQ ID NO: 177062 - DNA, 25 bp, Artificial
  Probe
actgattggcacaaggcccccaaga

SEQ ID NO: 177063 - DNA, 25 bp, Artificial
  Probe
tcgtgagactgatgcacacattgtc

SEQ ID NO: 177064 - DNA, 25 bp, Artificial
  Probe
gatgcacacattgtcacttgttaat

SEQ ID NO: 177065 - DNA, 25 bp, Artificial
  Probe
gcctttacttcctgtctctgtcttg

SEQ ID NO: 177066 - DNA, 25 bp, Artificial
  Probe
ctctgtcttgtgatactgattggca

SEQ ID NO: 177067 - DNA, 25 bp, Artificial
  Probe
gacagccatcgtgagactgatgcac

SEQ ID NO: 177068 - DNA, 25 bp, Artificial
  Probe
aggacattgctgacaacttccaggc

SEQ ID NO: 177069 - DNA, 25 bp, Artificial
  Probe
tcctcaacaaactgcgggctcgaca

SEQ ID NO: 177070 - DNA, 25 bp, Artificial
  Probe
aacttccaggcatttgtgtgggagc

SEQ ID NO: 177071 - DNA, 25 bp, Artificial
  Probe
acaacgaggacattgctgacaactt

SEQ ID NO: 177072 - DNA, 25 bp, Artificial
  Probe
ctggagattattccacgacagctgt

SEQ ID NO: 177073 - DNA, 25 bp, Artificial
  Probe
atgccaaggccctggagattattcc

SEQ ID NO: 177074 - DNA, 25 bp, Artificial
  Probe
acagctgtgtgacaacgctggcttt

SEQ ID NO: 177075 - DNA, 25 bp, Artificial
  Probe
caacttccaggcatttgtgtgggag

SEQ ID NO: 177076 - DNA, 25 bp, Artificial
  Probe
caaacatcctcaacaaactgcgggc

SEQ ID NO: 177077 - DNA, 25 bp, Artificial
  Probe
gccaaggccctggagattattccac

SEQ ID NO: 177078 - DNA, 25 bp, Artificial
  Probe
ggtggacatcaacaacgaggacatt

SEQ ID NO: 177079 - DNA, 25 bp, Artificial
  Probe
tggacatcaacaacgaggacattgc

SEQ ID NO: 177080 - DNA, 25 bp, Artificial
  Probe
tcaacgctctgacagcagcttctga

SEQ ID NO: 177081 - DNA, 25 bp, Artificial
  Probe
ttccacgacagctgtgtgacaacgc

SEQ ID NO: 177082 - DNA, 25 bp, Artificial
  Probe
acttccaggcatttgtgtgggagcc

SEQ ID NO: 177083 - DNA, 25 bp, Artificial
  Probe
ccctggagattattccacgacagct

SEQ ID NO: 177084 - DNA, 25 bp, Artificial
  Probe
aactgcgggctcgacatgcacaggg

SEQ ID NO: 177085 - DNA, 25 bp, Artificial
  Probe
aacatcctcaacaaactgcgggctc

SEQ ID NO: 177086 - DNA, 25 bp, Artificial
  Probe
aacgaggacattgctgacaacttcc

SEQ ID NO: 177087 - DNA, 25 bp, Artificial
  Probe
tccaggcatttgtgtgggagccagc

SEQ ID NO: 177088 - DNA, 25 bp, Artificial
  Probe
gccctggagattattccacgacagc

SEQ ID NO: 177089 - DNA, 25 bp, Artificial
  Probe
gccatggtgcgcatcaacgctctga

SEQ ID NO: 177090 - DNA, 25 bp, Artificial
  Probe
catttgtgtgggagccagccatggt

SEQ ID NO: 177091 - DNA, 25 bp, Artificial
  Probe
caaactgcgggctcgacatgcacag

SEQ ID NO: 177092 - DNA, 25 bp, Artificial
  Probe
gatcggggcatatgccaaggccctg

SEQ ID NO: 177093 - DNA, 25 bp, Artificial
  Probe
acatcctcaacaaactgcgggctcg

SEQ ID NO: 177094 - DNA, 25 bp, Artificial
  Probe
acgacagctgtgtgacaacgctggc

SEQ ID NO: 177095 - DNA, 25 bp, Artificial
  Probe
tggtgcgcatcaacgctctgacagc

SEQ ID NO: 177096 - DNA, 25 bp, Artificial
  Probe
caacaacgaggacattgctgacaac

SEQ ID NO: 177097 - DNA, 25 bp, Artificial
  Probe
caggcatttgtgtgggagccagcca

SEQ ID NO: 177098 - DNA, 25 bp, Artificial
  Probe
ctgacaacttccaggcatttgtgtg

SEQ ID NO: 177099 - DNA, 25 bp, Artificial
  Probe
gggcatatgccaaggccctggagat

SEQ ID NO: 177100 - DNA, 25 bp, Artificial
  Probe
agccagccatggtgcgcatcaacgc

SEQ ID NO: 177101 - DNA, 25 bp, Artificial
  Probe
atggtgcgcatcaacgctctgacag

SEQ ID NO: 177102 - DNA, 25 bp, Artificial
  Probe
aaggccctggagattattccacgac

SEQ ID NO: 177103 - DNA, 25 bp, Artificial
  Probe
cgcatcaacgctctgacagcagctt

SEQ ID NO: 177104 - DNA, 25 bp, Artificial
  Probe
gagattattccacgacagctgtgtg

SEQ ID NO: 177105 - DNA, 25 bp, Artificial
  Probe
tgctgacaacttccaggcatttgtg

SEQ ID NO: 177106 - DNA, 25 bp, Artificial
  Probe
catcaacaacgaggacattgctgac

SEQ ID NO: 177107 - DNA, 25 bp, Artificial
  Probe
ttgatcggggcatatgccaaggccc

SEQ ID NO: 177108 - DNA, 25 bp, Artificial
  Probe
attgctgacaacttccaggcatttg

SEQ ID NO: 177109 - DNA, 25 bp, Artificial
  Probe
ggacattgctgacaacttccaggca

SEQ ID NO: 177110 - DNA, 25 bp, Artificial
  Probe
gggagccagccatggtgcgcatcaa

SEQ ID NO: 177111 - DNA, 25 bp, Artificial
  Probe
tgatcggggcatatgccaaggccct

SEQ ID NO: 177112 - DNA, 25 bp, Artificial
  Probe
cattgctgacaacttccaggcattt

SEQ ID NO: 177113 - DNA, 25 bp, Artificial
  Probe
gagccagccatggtgcgcatcaacg

SEQ ID NO: 177114 - DNA, 25 bp, Artificial
  Probe
aaattagagatcaccatgctgtccc

SEQ ID NO: 177115 - DNA, 25 bp, Artificial
  Probe
aacggttggatcagccgatgacaga

SEQ ID NO: 177116 - DNA, 25 bp, Artificial
  Probe
cgtgcactggtgcttgagctgtgct

SEQ ID NO: 177117 - DNA, 25 bp, Artificial
  Probe
acagagattgtgagccgagtgtcaa

SEQ ID NO: 177118 - DNA, 25 bp, Artificial
  Probe
gtgagccgagtgtcaaagagaaagc

SEQ ID NO: 177119 - DNA, 25 bp, Artificial
  Probe
taagctcaaggaacggttggatcag

SEQ ID NO: 177120 - DNA, 25 bp, Artificial
  Probe
tcaagagtggacattgtgggatcgc

SEQ ID NO: 177121 - DNA, 25 bp, Artificial
  Probe
ttgctgcgcctcgtcaccagtacta

SEQ ID NO: 177122 - DNA, 25 bp, Artificial
  Probe
atcaccatgctgtcccagggtgtgt

SEQ ID NO: 177123 - DNA, 25 bp, Artificial
  Probe
gtcgaggtcccctatgtacgatata

SEQ ID NO: 177124 - DNA, 25 bp, Artificial
  Probe
cacaaattagagatcaccatgctgt

SEQ ID NO: 177125 - DNA, 25 bp, Artificial
  Probe
ttcggaacctcttgctgcgcctcgt

SEQ ID NO: 177126 - DNA, 25 bp, Artificial
  Probe
tcgctttgaagtacaagggctacag

SEQ ID NO: 177127 - DNA, 25 bp, Artificial
  Probe
tggcgaggacgtcgaggtcccctat

SEQ ID NO: 177128 - DNA, 25 bp, Artificial
  Probe
gttccttgattactttaagacggag

SEQ ID NO: 177129 - DNA, 25 bp, Artificial
  Probe
tgagccgagtgtcaaagagaaagct

SEQ ID NO: 177130 - DNA, 25 bp, Artificial
  Probe
tgacagagattgtgagccgagtgtc

SEQ ID NO: 177131 - DNA, 25 bp, Artificial
  Probe
ggtgtgtccatgctctattctttct

SEQ ID NO: 177132 - DNA, 25 bp, Artificial
  Probe
gtacaagggctacagcctaatggtg

SEQ ID NO: 177133 - DNA, 25 bp, Artificial
  Probe
gattactttaagacggagcacaaat

SEQ ID NO: 177134 - DNA, 25 bp, Artificial
  Probe
aggaacggttggatcagccgatgac

SEQ ID NO: 177135 - DNA, 25 bp, Artificial
  Probe
gactctcaagcagttccttgattac

SEQ ID NO: 177136 - DNA, 25 bp, Artificial
  Probe
ctttaagacggagcacaaattagag

SEQ ID NO: 177137 - DNA, 25 bp, Artificial
  Probe
cagtactataatcaagagtggacat

SEQ ID NO: 177138 - DNA, 25 bp, Artificial
  Probe
tgggatcgctttgaagtacaagggc

SEQ ID NO: 177139 - DNA, 25 bp, Artificial
  Probe
tttcttcatgccagctgctaagctc

SEQ ID NO: 177140 - DNA, 25 bp, Artificial
  Probe
ccgccatgtgcgtgcactggtgctt

SEQ ID NO: 177141 - DNA, 25 bp, Artificial
  Probe
agcctaatggtgaggagatgactct

SEQ ID NO: 177142 - DNA, 25 bp, Artificial
  Probe
gcgcctcgtcaccagtactataatc

SEQ ID NO: 177143 - DNA, 25 bp, Artificial
  Probe
ccatgctgtcccagggtgtgtccat

SEQ ID NO: 177144 - DNA, 25 bp, Artificial
  Probe
tcaaggaacggttggatcagccgat

SEQ ID NO: 177145 - DNA, 25 bp, Artificial
  Probe
aggacgtcgaggtcccctatgtacg

SEQ ID NO: 177146 - DNA, 25 bp, Artificial
  Probe
tcgtcaccagtactataatcaagag

SEQ ID NO: 177147 - DNA, 25 bp, Artificial
  Probe
ggctacagcctaatggtgaggagat

SEQ ID NO: 177148 - DNA, 25 bp, Artificial
  Probe
gctgtcccagggtgtgtccatgctc

SEQ ID NO: 177149 - DNA, 25 bp, Artificial
  Probe
ggatcgctttgaagtacaagggcta

SEQ ID NO: 177150 - DNA, 25 bp, Artificial
  Probe
aagtacaagggctacagcctaatgg

SEQ ID NO: 177151 - DNA, 25 bp, Artificial
  Probe
atgtgcgtgcactggtgcttgagct

SEQ ID NO: 177152 - DNA, 25 bp, Artificial
  Probe
agccgatgacagagattgtgagccg

SEQ ID NO: 177153 - DNA, 25 bp, Artificial
  Probe
ttggatcagccgatgacagagattg

SEQ ID NO: 177154 - DNA, 25 bp, Artificial
  Probe
caagcagttccttgattactttaag

SEQ ID NO: 177155 - DNA, 25 bp, Artificial
  Probe
actttaagacggagcacaaattaga

SEQ ID NO: 177156 - DNA, 25 bp, Artificial
  Probe
gcgaggacgtcgaggtcccctatgt

SEQ ID NO: 177157 - DNA, 25 bp, Artificial
  Probe
tgtgctgcaacgatgaaagtggcga

SEQ ID NO: 177158 - DNA, 25 bp, Artificial
  Probe
ggagatgactctcaagcagttcctt

SEQ ID NO: 177159 - DNA, 25 bp, Artificial
  Probe
ctcaaggaacggttggatcagccga

SEQ ID NO: 177160 - DNA, 25 bp, Artificial
  Probe
attggctttatcctctttagagtta

SEQ ID NO: 177161 - DNA, 25 bp, Artificial
  Probe
cagattctgatagcaaagcgacttt

SEQ ID NO: 177162 - DNA, 25 bp, Artificial
  Probe
aactagcatatctgcctttattgtg

SEQ ID NO: 177163 - DNA, 25 bp, Artificial
  Probe
aagcgactttagtcctgagctcttg

SEQ ID NO: 177164 - DNA, 25 bp, Artificial
  Probe
ctgaataggcgatcacaacgtgcat

SEQ ID NO: 177165 - DNA, 25 bp, Artificial
  Probe
agtgtgaactggaccctgttgctaa

SEQ ID NO: 177166 - DNA, 25 bp, Artificial
  Probe
taagtgtgaactggaccctgttgct

SEQ ID NO: 177167 - DNA, 25 bp, Artificial
  Probe
agtaaaattgccatattgcacatgt

SEQ ID NO: 177168 - DNA, 25 bp, Artificial
  Probe
gcaaagcgactttagtcctgagctc

SEQ ID NO: 177169 - DNA, 25 bp, Artificial
  Probe
gtaaaattgccatattgcacatgtc

SEQ ID NO: 177170 - DNA, 25 bp, Artificial
  Probe
ttattgtgtttgtcattagcctgac

SEQ ID NO: 177171 - DNA, 25 bp, Artificial
  Probe
gatagcaaagcgactttagtcctga

SEQ ID NO: 177172 - DNA, 25 bp, Artificial
  Probe
ttgccatattgcacatgtcttaatg

SEQ ID NO: 177173 - DNA, 25 bp, Artificial
  Probe
attgtgtttgtcattagcctgacta

SEQ ID NO: 177174 - DNA, 25 bp, Artificial
  Probe
ttagtgctaagtgtgaactggaccc

SEQ ID NO: 177175 - DNA, 25 bp, Artificial
  Probe
aatacagattctgatagcaaagcga

SEQ ID NO: 177176 - DNA, 25 bp, Artificial
  Probe
agcatatctgcctttattgtgtttg

SEQ ID NO: 177177 - DNA, 25 bp, Artificial
  Probe
tagcctgactagaaaggactttaaa

SEQ ID NO: 177178 - DNA, 25 bp, Artificial
  Probe
tgctaagcctcagcaagcaatcatc

SEQ ID NO: 177179 - DNA, 25 bp, Artificial
  Probe
cgtgcattgtgcttctttgagaata

SEQ ID NO: 177180 - DNA, 25 bp, Artificial
  Probe
agctcttgtgaggaaaggcattggc

SEQ ID NO: 177181 - DNA, 25 bp, Artificial
  Probe
taacggatcacaaatacagattctg

SEQ ID NO: 177182 - DNA, 25 bp, Artificial
  Probe
accctgttgctaagcctcagcaagc

SEQ ID NO: 177183 - DNA, 25 bp, Artificial
  Probe
tacagattctgatagcaaagcgact

SEQ ID NO: 177184 - DNA, 25 bp, Artificial
  Probe
agcaagcaatcatcctaggtagggt

SEQ ID NO: 177185 - DNA, 25 bp, Artificial
  Probe
tgaactggaccctgttgctaagcct

SEQ ID NO: 177186 - DNA, 25 bp, Artificial
  Probe
gtgtttgtcattagcctgactagaa

SEQ ID NO: 177187 - DNA, 25 bp, Artificial
  Probe
aaaggcattggctttatcctcttta

SEQ ID NO: 177188 - DNA, 25 bp, Artificial
  Probe
ttgtcattagcctgactagaaagga

SEQ ID NO: 177189 - DNA, 25 bp, Artificial
  Probe
gaatcttgtctcaatgctcataacg

SEQ ID NO: 177190 - DNA, 25 bp, Artificial
  Probe
gatcacaaatacagattctgatagc

SEQ ID NO: 177191 - DNA, 25 bp, Artificial
  Probe
tagcaaagcgactttagtcctgagc

SEQ ID NO: 177192 - DNA, 25 bp, Artificial
  Probe
tgttgctaagcctcagcaagcaatc

SEQ ID NO: 177193 - DNA, 25 bp, Artificial
  Probe
cctctttagagttagactgttgggg

SEQ ID NO: 177194 - DNA, 25 bp, Artificial
  Probe
tagtcctgagctcttgtgaggaaag

SEQ ID NO: 177195 - DNA, 25 bp, Artificial
  Probe
gtctcaatgctcataacggatcaca

SEQ ID NO: 177196 - DNA, 25 bp, Artificial
  Probe
caatcatcctaggtagggttaacaa

SEQ ID NO: 177197 - DNA, 25 bp, Artificial
  Probe
ttctgatagcaaagcgactttagtc

SEQ ID NO: 177198 - DNA, 25 bp, Artificial
  Probe
ctgttgctgaataggcgatcacaac

SEQ ID NO: 177199 - DNA, 25 bp, Artificial
  Probe
ctgagctcttgtgaggaaaggcatt

SEQ ID NO: 177200 - DNA, 25 bp, Artificial
  Probe
tttagtcctgagctcttgtgaggaa

SEQ ID NO: 177201 - DNA, 25 bp, Artificial
  Probe
tgctcataacggatcacaaatacag

SEQ ID NO: 177202 - DNA, 25 bp, Artificial
  Probe
tagtgctaagtgtgaactggaccct

SEQ ID NO: 177203 - DNA, 25 bp, Artificial
  Probe
gcctttattgtgtttgtcattagcc

SEQ ID NO: 177204 - DNA, 25 bp, Artificial
  Probe
gctcataacggatcacaaatacaga

SEQ ID NO: 177205 - DNA, 25 bp, Artificial
  Probe
caaagcgactttagtcctgagctct

SEQ ID NO: 177206 - DNA, 25 bp, Artificial
  Probe
ccatgaaggtacgtgtggttctcaa

SEQ ID NO: 177207 - DNA, 25 bp, Artificial
  Probe
caaagtgacggacgatctagtctgt

SEQ ID NO: 177208 - DNA, 25 bp, Artificial
  Probe
aatcccgcagtgtcgctatggaaac

SEQ ID NO: 177209 - DNA, 25 bp, Artificial
  Probe
aaagctgggagaccagcctgtgtcc

SEQ ID NO: 177210 - DNA, 25 bp, Artificial
  Probe
attgagaaattccacagtcagttaa

SEQ ID NO: 177211 - DNA, 25 bp, Artificial
  Probe
tctacttggcggaccccatgaaggt

SEQ ID NO: 177212 - DNA, 25 bp, Artificial
  Probe
aacagaccaagctcaagatgtaaag

SEQ ID NO: 177213 - DNA, 25 bp, Artificial
  Probe
aagtgacggacgatctagtctgttt

SEQ ID NO: 177214 - DNA, 25 bp, Artificial
  Probe
ctagtctgtttggtgtacagaacag

SEQ ID NO: 177215 - DNA, 25 bp, Artificial
  Probe
gttctcaagtacaggcatgttgatg

SEQ ID NO: 177216 - DNA, 25 bp, Artificial
  Probe
tccacagtcagttaatgcgacttat

SEQ ID NO: 177217 - DNA, 25 bp, Artificial
  Probe
cgcgatgcctcagttccagacctgg

SEQ ID NO: 177218 - DNA, 25 bp, Artificial
  Probe
tcagttaatgcgacttatggtggcc

SEQ ID NO: 177219 - DNA, 25 bp, Artificial
  Probe
agaagctctacttggcggaccccat

SEQ ID NO: 177220 - DNA, 25 bp, Artificial
  Probe
aaggaatcccgcagtgtcgctatgg

SEQ ID NO: 177221 - DNA, 25 bp, Artificial
  Probe
ttggcggaccccatgaaggtacgtg

SEQ ID NO: 177222 - DNA, 25 bp, Artificial
  Probe
tgcttcgcggcctcgtttcgcgctg

SEQ ID NO: 177223 - DNA, 25 bp, Artificial
  Probe
agaccaagctcaagatgtaaagaag

SEQ ID NO: 177224 - DNA, 25 bp, Artificial
  Probe
agctgggagaccagcctgtgtccta

SEQ ID NO: 177225 - DNA, 25 bp, Artificial
  Probe
tgtatcaaagtgacggacgatctag

SEQ ID NO: 177226 - DNA, 25 bp, Artificial
  Probe
cagccgcgcggctgagaagctctac

SEQ ID NO: 177227 - DNA, 25 bp, Artificial
  Probe
gcgtttcttgcttcgcggcctcgtt

SEQ ID NO: 177228 - DNA, 25 bp, Artificial
  Probe
gggagaccagcctgtgtcctaaggt

SEQ ID NO: 177229 - DNA, 25 bp, Artificial
  Probe
tggcggaccccatgaaggtacgtgt

SEQ ID NO: 177230 - DNA, 25 bp, Artificial
  Probe
atgcctcagttccagacctgggagg

SEQ ID NO: 177231 - DNA, 25 bp, Artificial
  Probe
cgcgcggctgagaagctctacttgg

SEQ ID NO: 177232 - DNA, 25 bp, Artificial
  Probe
cggaccccatgaaggtacgtgtggt

SEQ ID NO: 177233 - DNA, 25 bp, Artificial
  Probe
acagtcagttaatgcgacttatggt

SEQ ID NO: 177234 - DNA, 25 bp, Artificial
  Probe
tcaaagtgacggacgatctagtctg

SEQ ID NO: 177235 - DNA, 25 bp, Artificial
  Probe
gaaggtacgtgtggttctcaagtac

SEQ ID NO: 177236 - DNA, 25 bp, Artificial
  Probe
tgtcagtgcgacagcgcgtttcttg

SEQ ID NO: 177237 - DNA, 25 bp, Artificial
  Probe
cagtgtcgctatggaaacagaatga

SEQ ID NO: 177238 - DNA, 25 bp, Artificial
  Probe
tgcgacagcgcgtttcttgcttcgc

SEQ ID NO: 177239 - DNA, 25 bp, Artificial
  Probe
accaagctcaagatgtaaagaagat

SEQ ID NO: 177240 - DNA, 25 bp, Artificial
  Probe
ttatggtggccaaggaatcccgcag

SEQ ID NO: 177241 - DNA, 25 bp, Artificial
  Probe
ccacagtcagttaatgcgacttatg

SEQ ID NO: 177242 - DNA, 25 bp, Artificial
  Probe
cgatctagtctgtttggtgtacaga

SEQ ID NO: 177243 - DNA, 25 bp, Artificial
  Probe
cggctgagaagctctacttggcgga

SEQ ID NO: 177244 - DNA, 25 bp, Artificial
  Probe
ttgtgtatcaaagtgacggacgatc

SEQ ID NO: 177245 - DNA, 25 bp, Artificial
  Probe
ccgcagtgtcgctatggaaacagaa

SEQ ID NO: 177246 - DNA, 25 bp, Artificial
  Probe
gtggccaaggaatcccgcagtgtcg

SEQ ID NO: 177247 - DNA, 25 bp, Artificial
  Probe
cttatggtggccaaggaatcccgca

SEQ ID NO: 177248 - DNA, 25 bp, Artificial
  Probe
tgcgacttatggtggccaaggaatc

SEQ ID NO: 177249 - DNA, 25 bp, Artificial
  Probe
gagaaattccacagtcagttaatgc

SEQ ID NO: 177250 - DNA, 25 bp, Artificial
  Probe
tgtacagaacagaccaagctcaaga

SEQ ID NO: 177251 - DNA, 25 bp, Artificial
  Probe
tgtttggtgtacagaacagaccaag

SEQ ID NO: 177252 - DNA, 25 bp, Artificial
  Probe
agtagggtcattgctggttcccagg

SEQ ID NO: 177253 - DNA, 25 bp, Artificial
  Probe
ccagaagtgtctggtgtcagctgag

SEQ ID NO: 177254 - DNA, 25 bp, Artificial
  Probe
tcacgtaagggcagaggaaactttc

SEQ ID NO: 177255 - DNA, 25 bp, Artificial
  Probe
acagtgcctatgacggatcaataaa

SEQ ID NO: 177256 - DNA, 25 bp, Artificial
  Probe
tggaccgaggtgatatcttgactca

SEQ ID NO: 177257 - DNA, 25 bp, Artificial
  Probe
caccccagaagtgtctggtgtcagc

SEQ ID NO: 177258 - DNA, 25 bp, Artificial
  Probe
gcccctcaacaagaaagtagggtca

SEQ ID NO: 177259 - DNA, 25 bp, Artificial
  Probe
ccaagtgttgcagaagtttgcacat

SEQ ID NO: 177260 - DNA, 25 bp, Artificial
  Probe
ggccatctaagaggatgagacatca

SEQ ID NO: 177261 - DNA, 25 bp, Artificial
  Probe
gaaagcccctcaacaagaaagtagg

SEQ ID NO: 177262 - DNA, 25 bp, Artificial
  Probe
gttctgcaacagatgccaaatatta

SEQ ID NO: 177263 - DNA, 25 bp, Artificial
  Probe
gaatctgtcccgagaaagcccctca

SEQ ID NO: 177264 - DNA, 25 bp, Artificial
  Probe
ctgataatgtttttgtctgtcaccc

SEQ ID NO: 177265 - DNA, 25 bp, Artificial
  Probe
gattttatagttctgcaacagatgc

SEQ ID NO: 177266 - DNA, 25 bp, Artificial
  Probe
ggtcattgctggttcccaggggcca

SEQ ID NO: 177267 - DNA, 25 bp, Artificial
  Probe
ggaaactttctgagacttctccccg

SEQ ID NO: 177268 - DNA, 25 bp, Artificial
  Probe
tcacccagaaaatgtattggcgtgc

SEQ ID NO: 177269 - DNA, 25 bp, Artificial
  Probe
tgaggatcacgctttgcccaatact

SEQ ID NO: 177270 - DNA, 25 bp, Artificial
  Probe
tttttgtctgtcacccagaaaatgt

SEQ ID NO: 177271 - DNA, 25 bp, Artificial
  Probe
agaagtttgcacatgcaaccgtgta

SEQ ID NO: 177272 - DNA, 25 bp, Artificial
  Probe
tctgatggaccgaggtgatatcttg

SEQ ID NO: 177273 - DNA, 25 bp, Artificial
  Probe
gaacagagagccacagatcttgtga

SEQ ID NO: 177274 - DNA, 25 bp, Artificial
  Probe
tttgcacatgcaaccgtgtattaat

SEQ ID NO: 177275 - DNA, 25 bp, Artificial
  Probe
tgtctgtcacccagaaaatgtattg

SEQ ID NO: 177276 - DNA, 25 bp, Artificial
  Probe
aatctgtcccgagaaagcccctcaa

SEQ ID NO: 177277 - DNA, 25 bp, Artificial
  Probe
taatttatgtacagtgcctatgacg

SEQ ID NO: 177278 - DNA, 25 bp, Artificial
  Probe
tagatttcaccgtactttctggtgg

SEQ ID NO: 177279 - DNA, 25 bp, Artificial
  Probe
gtcattgctggttcccaggggccat

SEQ ID NO: 177280 - DNA, 25 bp, Artificial
  Probe
gaaactttctgagacttctccccgt

SEQ ID NO: 177281 - DNA, 25 bp, Artificial
  Probe
ccacagatcttgtgacactgagggg

SEQ ID NO: 177282 - DNA, 25 bp, Artificial
  Probe
tcaccgtactttctggtggtgtttt

SEQ ID NO: 177283 - DNA, 25 bp, Artificial
  Probe
cagctgaggatcacgctttgcccaa

SEQ ID NO: 177284 - DNA, 25 bp, Artificial
  Probe
ttcccaggggccatctaagaggatg

SEQ ID NO: 177285 - DNA, 25 bp, Artificial
  Probe
ggatgagacatcacgtaagggcaga

SEQ ID NO: 177286 - DNA, 25 bp, Artificial
  Probe
ccgtgtattaattgccagtgtttaa

SEQ ID NO: 177287 - DNA, 25 bp, Artificial
  Probe
gaaatagaatctgtcccgagaaagc

SEQ ID NO: 177288 - DNA, 25 bp, Artificial
  Probe
catgcaaccgtgtattaattgccag

SEQ ID NO: 177289 - DNA, 25 bp, Artificial
  Probe
cgagaaagcccctcaacaagaaagt

SEQ ID NO: 177290 - DNA, 25 bp, Artificial
  Probe
ggaaatagaatctgtcccgagaaag

SEQ ID NO: 177291 - DNA, 25 bp, Artificial
  Probe
atgtacagtgcctatgacggatcaa

SEQ ID NO: 177292 - DNA, 25 bp, Artificial
  Probe
gaaagtagggtcattgctggttccc

SEQ ID NO: 177293 - DNA, 25 bp, Artificial
  Probe
aggatcacgctttgcccaatactta

SEQ ID NO: 177294 - DNA, 25 bp, Artificial
  Probe
cagaagtctgatggaccgaggtgat

SEQ ID NO: 177295 - DNA, 25 bp, Artificial
  Probe
atttatgtacagtgcctatgacgga

SEQ ID NO: 177296 - DNA, 25 bp, Artificial
  Probe
tgagacatcacgtaagggcagagga

SEQ ID NO: 177297 - DNA, 25 bp, Artificial
  Probe
aaggccaagtgttgcagaagtttgc

SEQ ID NO: 177298 - DNA, 25 bp, Artificial
  Probe
gagtatgttgccttcctgggggcct

SEQ ID NO: 177299 - DNA, 25 bp, Artificial
  Probe
atggatgatctggaccgtaacaagg

SEQ ID NO: 177300 - DNA, 25 bp, Artificial
  Probe
gtcagtcatggcatgccccctggat

SEQ ID NO: 177301 - DNA, 25 bp, Artificial
  Probe
tgatctggaccgtaacaaggatcag

SEQ ID NO: 177302 - DNA, 25 bp, Artificial
  Probe
agctcaccattggtgctaagctgca

SEQ ID NO: 177303 - DNA, 25 bp, Artificial
  Probe
ctttgatctacaatgaagctctgaa

SEQ ID NO: 177304 - DNA, 25 bp, Artificial
  Probe
tcggccttctcgtggctatcttcca

SEQ ID NO: 177305 - DNA, 25 bp, Artificial
  Probe
gccatcggccttctcgtggctatct

SEQ ID NO: 177306 - DNA, 25 bp, Artificial
  Probe
agtaaacttccaggagtatgttgcc

SEQ ID NO: 177307 - DNA, 25 bp, Artificial
  Probe
ggtgacaagcacaccctgagcaaga

SEQ ID NO: 177308 - DNA, 25 bp, Artificial
  Probe
gaccgtaacaaggatcaggaagtaa

SEQ ID NO: 177309 - DNA, 25 bp, Artificial
  Probe
ctcgtggctatcttccacaagtact

SEQ ID NO: 177310 - DNA, 25 bp, Artificial
  Probe
cattggtgctaagctgcaggatgct

SEQ ID NO: 177311 - DNA, 25 bp, Artificial
  Probe
tggatgatctggaccgtaacaagga

SEQ ID NO: 177312 - DNA, 25 bp, Artificial
  Probe
ctgatggatgatctggaccgtaaca

SEQ ID NO: 177313 - DNA, 25 bp, Artificial
  Probe
gctatcttccacaagtactctggca

SEQ ID NO: 177314 - DNA, 25 bp, Artificial
  Probe
atgttgccttcctgggggccttggc

SEQ ID NO: 177315 - DNA, 25 bp, Artificial
  Probe
agctgcaggatgctgaaattgcaag

SEQ ID NO: 177316 - DNA, 25 bp, Artificial
  Probe
gctcaccattggtgctaagctgcag

SEQ ID NO: 177317 - DNA, 25 bp, Artificial
  Probe
agtatgttgccttcctgggggcctt

SEQ ID NO: 177318 - DNA, 25 bp, Artificial
  Probe
ccttggctttgatctacaatgaagc

SEQ ID NO: 177319 - DNA, 25 bp, Artificial
  Probe
agctgatccagaaggagctcaccat

SEQ ID NO: 177320 - DNA, 25 bp, Artificial
  Probe
tcagtcatggcatgccccctggatc

SEQ ID NO: 177321 - DNA, 25 bp, Artificial
  Probe
aaggctgatggatgatctggaccgt

SEQ ID NO: 177322 - DNA, 25 bp, Artificial
  Probe
tctagcccagtggtcagtcatggca

SEQ ID NO: 177323 - DNA, 25 bp, Artificial
  Probe
acaagcacaccctgagcaagaagga

SEQ ID NO: 177324 - DNA, 25 bp, Artificial
  Probe
gctaagctgcaggatgctgaaattg

SEQ ID NO: 177325 - DNA, 25 bp, Artificial
  Probe
tccaggagtatgttgccttcctggg

SEQ ID NO: 177326 - DNA, 25 bp, Artificial
  Probe
tctggaccgtaacaaggatcaggaa

SEQ ID NO: 177327 - DNA, 25 bp, Artificial
  Probe
agtggtcagtcatggcatgccccct

SEQ ID NO: 177328 - DNA, 25 bp, Artificial
  Probe
tcctgggggccttggctttgatcta

SEQ ID NO: 177329 - DNA, 25 bp, Artificial
  Probe
agcccagtggtcagtcatggcatgc

SEQ ID NO: 177330 - DNA, 25 bp, Artificial
  Probe
aggctgatggatgatctggaccgta

SEQ ID NO: 177331 - DNA, 25 bp, Artificial
  Probe
tggcatgccccctggatcaggccat

SEQ ID NO: 177332 - DNA, 25 bp, Artificial
  Probe
caagcacaccctgagcaagaaggag

SEQ ID NO: 177333 - DNA, 25 bp, Artificial
  Probe
gggggccttggctttgatctacaat

SEQ ID NO: 177334 - DNA, 25 bp, Artificial
  Probe
tatcttccacaagtactctggcaag

SEQ ID NO: 177335 - DNA, 25 bp, Artificial
  Probe
aggccatcggccttctcgtggctat

SEQ ID NO: 177336 - DNA, 25 bp, Artificial
  Probe
tggctatcttccacaagtactctgg

SEQ ID NO: 177337 - DNA, 25 bp, Artificial
  Probe
ctcaccattggtgctaagctgcagg

SEQ ID NO: 177338 - DNA, 25 bp, Artificial
  Probe
ggagctcaccattggtgctaagctg

SEQ ID NO: 177339 - DNA, 25 bp, Artificial
  Probe
aaacttccaggagtatgttgccttc

SEQ ID NO: 177340 - DNA, 25 bp, Artificial
  Probe
ccttctcgtggctatcttccacaag

SEQ ID NO: 177341 - DNA, 25 bp, Artificial
  Probe
ttcctgggggccttggctttgatct

SEQ ID NO: 177342 - DNA, 25 bp, Artificial
  Probe
atccagaaggagctcaccattggtg

SEQ ID NO: 177343 - DNA, 25 bp, Artificial
  Probe
tggatcaggccatcggccttctcgt

SEQ ID NO: 177344 - DNA, 25 bp, Artificial
  Probe
aagatcattttcgaggacgatcggt

SEQ ID NO: 177345 - DNA, 25 bp, Artificial
  Probe
gatcattttcgaggacgatcggtgt

SEQ ID NO: 177346 - DNA, 25 bp, Artificial
  Probe
tgaactggcctcctggttaagcagg

SEQ ID NO: 177347 - DNA, 25 bp, Artificial
  Probe
gctccagtaatttcaatggcacaca

SEQ ID NO: 177348 - DNA, 25 bp, Artificial
  Probe
gccgcgatggctgacgagattgcca

SEQ ID NO: 177349 - DNA, 25 bp, Artificial
  Probe
cgatggctgacgagattgccaaggc

SEQ ID NO: 177350 - DNA, 25 bp, Artificial
  Probe
gcacatatcccagatttctgtggca

SEQ ID NO: 177351 - DNA, 25 bp, Artificial
  Probe
ttctctaggtagttggcaagctcca

SEQ ID NO: 177352 - DNA, 25 bp, Artificial
  Probe
ggctgacgagattgccaaggctcaa

SEQ ID NO: 177353 - DNA, 25 bp, Artificial
  Probe
ccagtaatttcaatggcacacatag

SEQ ID NO: 177354 - DNA, 25 bp, Artificial
  Probe
aactggcctcctggttaagcaggtt

SEQ ID NO: 177355 - DNA, 25 bp, Artificial
  Probe
tttcgaggacgatcggtgtcttgct

SEQ ID NO: 177356 - DNA, 25 bp, Artificial
  Probe
ttgccaaggctcaagtggcccagcc

SEQ ID NO: 177357 - DNA, 25 bp, Artificial
  Probe
agatcattttcgaggacgatcggtg

SEQ ID NO: 177358 - DNA, 25 bp, Artificial
  Probe
tctctaggtagttggcaagctccag

SEQ ID NO: 177359 - DNA, 25 bp, Artificial
  Probe
cgcgatggctgacgagattgccaag

SEQ ID NO: 177360 - DNA, 25 bp, Artificial
  Probe
tggcaagctccagtaatttcaatgg

SEQ ID NO: 177361 - DNA, 25 bp, Artificial
  Probe
tttcaatggcacacatagttttgcc

SEQ ID NO: 177362 - DNA, 25 bp, Artificial
  Probe
aggtagttggcaagctccagtaatt

SEQ ID NO: 177363 - DNA, 25 bp, Artificial
  Probe
ctggcctcctggttaagcaggttgg

SEQ ID NO: 177364 - DNA, 25 bp, Artificial
  Probe
tccttctctaggtagttggcaagct

SEQ ID NO: 177365 - DNA, 25 bp, Artificial
  Probe
aatttcaatggcacacatagttttg

SEQ ID NO: 177366 - DNA, 25 bp, Artificial
  Probe
ccttctctaggtagttggcaagctc

SEQ ID NO: 177367 - DNA, 25 bp, Artificial
  Probe
atttcaatggcacacatagttttgc

SEQ ID NO: 177368 - DNA, 25 bp, Artificial
  Probe
gattgccaaggctcaagtggcccag

SEQ ID NO: 177369 - DNA, 25 bp, Artificial
  Probe
aagtatccttctctaggtagttggc

SEQ ID NO: 177370 - DNA, 25 bp, Artificial
  Probe
cacatatcccagatttctgtggcag

SEQ ID NO: 177371 - DNA, 25 bp, Artificial
  Probe
acgagattgccaaggctcaagtggc

SEQ ID NO: 177372 - DNA, 25 bp, Artificial
  Probe
caatggcacacatagttttgcctgt

SEQ ID NO: 177373 - DNA, 25 bp, Artificial
  Probe
tatccttctctaggtagttggcaag

SEQ ID NO: 177374 - DNA, 25 bp, Artificial
  Probe
agcacatatcccagatttctgtggc

SEQ ID NO: 177375 - DNA, 25 bp, Artificial
  Probe
ccaagatcattttcgaggacgatcg

SEQ ID NO: 177376 - DNA, 25 bp, Artificial
  Probe
agctccagtaatttcaatggcacac

SEQ ID NO: 177377 - DNA, 25 bp, Artificial
  Probe
gataagtatccttctctaggtagtt

SEQ ID NO: 177378 - DNA, 25 bp, Artificial
  Probe
gtagttggcaagctccagtaatttc

SEQ ID NO: 177379 - DNA, 25 bp, Artificial
  Probe
gatgaactggcctcctggttaagca

SEQ ID NO: 177380 - DNA, 25 bp, Artificial
  Probe
gggataagtatccttctctaggtag

SEQ ID NO: 177381 - DNA, 25 bp, Artificial
  Probe
caagctccagtaatttcaatggcac

SEQ ID NO: 177382 - DNA, 25 bp, Artificial
  Probe
agttggcaagctccagtaatttcaa

SEQ ID NO: 177383 - DNA, 25 bp, Artificial
  Probe
aatggcacacatagttttgcctgtg

SEQ ID NO: 177384 - DNA, 25 bp, Artificial
  Probe
ggccaagatcattttcgaggacgat

SEQ ID NO: 177385 - DNA, 25 bp, Artificial
  Probe
agtatccttctctaggtagttggca

SEQ ID NO: 177386 - DNA, 25 bp, Artificial
  Probe
cattttcgaggacgatcggtgtctt

SEQ ID NO: 177387 - DNA, 25 bp, Artificial
  Probe
gacgagattgccaaggctcaagtgg

SEQ ID NO: 177388 - DNA, 25 bp, Artificial
  Probe
cccggccaagatcattttcgaggac

SEQ ID NO: 177389 - DNA, 25 bp, Artificial
  Probe
gatggctgacgagattgccaaggct

SEQ ID NO: 177390 - DNA, 25 bp, Artificial
  Probe
attatgggctcaactttccaaattg

SEQ ID NO: 177391 - DNA, 25 bp, Artificial
  Probe
gtagtttgactattcctatacgttt

SEQ ID NO: 177392 - DNA, 25 bp, Artificial
  Probe
tcaaaacatcatttgggatttgaac

SEQ ID NO: 177393 - DNA, 25 bp, Artificial
  Probe
atgtagtttgactattcctatacgt

SEQ ID NO: 177394 - DNA, 25 bp, Artificial
  Probe
ttcatggcccccagggaattatggg

SEQ ID NO: 177395 - DNA, 25 bp, Artificial
  Probe
tgggctcaactttccaaattgtttg

SEQ ID NO: 177396 - DNA, 25 bp, Artificial
  Probe
cagcatgatactgacacttggtaaa

SEQ ID NO: 177397 - DNA, 25 bp, Artificial
  Probe
cccagcatgatactgacacttggta

SEQ ID NO: 177398 - DNA, 25 bp, Artificial
  Probe
ccccagcatgatactgacacttggt

SEQ ID NO: 177399 - DNA, 25 bp, Artificial
  Probe
tatgggctcaactttccaaattgtt

SEQ ID NO: 177400 - DNA, 25 bp, Artificial
  Probe
ggcccccagggaattatgggctcaa

SEQ ID NO: 177401 - DNA, 25 bp, Artificial
  Probe
tggcccccagggaattatgggctca

SEQ ID NO: 177402 - DNA, 25 bp, Artificial
  Probe
ctatacgtttctatctattgatggg

SEQ ID NO: 177403 - DNA, 25 bp, Artificial
  Probe
catcaaaacatcatttgggatttga

SEQ ID NO: 177404 - DNA, 25 bp, Artificial
  Probe
agcatgatactgacacttggtaaat

SEQ ID NO: 177405 - DNA, 25 bp, Artificial
  Probe
tgtagtttgactattcctatacgtt

SEQ ID NO: 177406 - DNA, 25 bp, Artificial
  Probe
ggaattatgggctcaactttccaaa

SEQ ID NO: 177407 - DNA, 25 bp, Artificial
  Probe
gcccccagggaattatgggctcaac

SEQ ID NO: 177408 - DNA, 25 bp, Artificial
  Probe
ccagcatgatactgacacttggtaa

SEQ ID NO: 177409 - DNA, 25 bp, Artificial
  Probe
acatcatttgggatttgaaccccca

SEQ ID NO: 177410 - DNA, 25 bp, Artificial
  Probe
cccccagggaattatgggctcaact

SEQ ID NO: 177411 - DNA, 25 bp, Artificial
  Probe
ttatgggctcaactttccaaattgt

SEQ ID NO: 177412 - DNA, 25 bp, Artificial
  Probe
cctatacgtttctatctattgatgg

SEQ ID NO: 177413 - DNA, 25 bp, Artificial
  Probe
catgatactgacacttggtaaatgt

SEQ ID NO: 177414 - DNA, 25 bp, Artificial
  Probe
gaattatgggctcaactttccaaat

SEQ ID NO: 177415 - DNA, 25 bp, Artificial
  Probe
acatcaaaacatcatttgggatttg

SEQ ID NO: 177416 - DNA, 25 bp, Artificial
  Probe
atgggctcaactttccaaattgttt

SEQ ID NO: 177417 - DNA, 25 bp, Artificial
  Probe
gcatgatactgacacttggtaaatg

SEQ ID NO: 177418 - DNA, 25 bp, Artificial
  Probe
gggctcaactttccaaattgtttgt

SEQ ID NO: 177419 - DNA, 25 bp, Artificial
  Probe
ggctcaactttccaaattgtttgtt

SEQ ID NO: 177420 - DNA, 25 bp, Artificial
  Probe
tttatttacctgtgcggtgactgta

SEQ ID NO: 177421 - DNA, 25 bp, Artificial
  Probe
ggcttcctggttcatgtctgttctt

SEQ ID NO: 177422 - DNA, 25 bp, Artificial
  Probe
tcaggcacttactgcgactccttgt

SEQ ID NO: 177423 - DNA, 25 bp, Artificial
  Probe
catgtctgttctttgtgttactgca

SEQ ID NO: 177424 - DNA, 25 bp, Artificial
  Probe
caaatgctgaggacagagaaagccc

SEQ ID NO: 177425 - DNA, 25 bp, Artificial
  Probe
atgggtgacctaaggcttcctggtt

SEQ ID NO: 177426 - DNA, 25 bp, Artificial
  Probe
actgcagtgaactgccctacatatc

SEQ ID NO: 177427 - DNA, 25 bp, Artificial
  Probe
atacacagaatcaggcacttactgc

SEQ ID NO: 177428 - DNA, 25 bp, Artificial
  Probe
acagaatcaggcacttactgcgact

SEQ ID NO: 177429 - DNA, 25 bp, Artificial
  Probe
gaaagcccctctgtaaaacgcatga

SEQ ID NO: 177430 - DNA, 25 bp, Artificial
  Probe
ctgccctacatatcttaaattggtg

SEQ ID NO: 177431 - DNA, 25 bp, Artificial
  Probe
gtctcctaagataaagtttttgcag

SEQ ID NO: 177432 - DNA, 25 bp, Artificial
  Probe
gtaaaacgcatgaggatggacacat

SEQ ID NO: 177433 - DNA, 25 bp, Artificial
  Probe
agagaaagcccctctgtaaaacgca

SEQ ID NO: 177434 - DNA, 25 bp, Artificial
  Probe
cctttacatatatatgtatgtcggt

SEQ ID NO: 177435 - DNA, 25 bp, Artificial
  Probe
cagagaaacgtgtacccatatataa

SEQ ID NO: 177436 - DNA, 25 bp, Artificial
  Probe
cagagcaccttgtagagacagacca

SEQ ID NO: 177437 - DNA, 25 bp, Artificial
  Probe
cttgtaggtatgcagatgtgtgcac

SEQ ID NO: 177438 - DNA, 25 bp, Artificial
  Probe
tggacacatgggtgacctaaggctt

SEQ ID NO: 177439 - DNA, 25 bp, Artificial
  Probe
tagagacagaccagcctggcacttc

SEQ ID NO: 177440 - DNA, 25 bp, Artificial
  Probe
gactacttgtctcctaagataaagt

SEQ ID NO: 177441 - DNA, 25 bp, Artificial
  Probe
tgtgcacacggcacacagagcacct

SEQ ID NO: 177442 - DNA, 25 bp, Artificial
  Probe
ggtatgcagatgtgtgcacacggca

SEQ ID NO: 177443 - DNA, 25 bp, Artificial
  Probe
tccaattgtgcttggccgacctcca

SEQ ID NO: 177444 - DNA, 25 bp, Artificial
  Probe
gcacttactgcgactccttgtaggt

SEQ ID NO: 177445 - DNA, 25 bp, Artificial
  Probe
cccctctgtaaaacgcatgaggatg

SEQ ID NO: 177446 - DNA, 25 bp, Artificial
  Probe
gcccctctgtaaaacgcatgaggat

SEQ ID NO: 177447 - DNA, 25 bp, Artificial
  Probe
ttacctgtgcggtgactgtagttac

SEQ ID NO: 177448 - DNA, 25 bp, Artificial
  Probe
tctgtaaaacgcatgaggatggaca

SEQ ID NO: 177449 - DNA, 25 bp, Artificial
  Probe
cagctcctacgatggcagtgaccgg

SEQ ID NO: 177450 - DNA, 25 bp, Artificial
  Probe
agatgtgtgcacacggcacacagag

SEQ ID NO: 177451 - DNA, 25 bp, Artificial
  Probe
tgtgcttggccgacctccaaatgct

SEQ ID NO: 177452 - DNA, 25 bp, Artificial
  Probe
gtttttgcagagaaacgtgtaccca

SEQ ID NO: 177453 - DNA, 25 bp, Artificial
  Probe
gacagaccagcctggcacttccttg

SEQ ID NO: 177454 - DNA, 25 bp, Artificial
  Probe
ccttgtagagacagaccagcctggc

SEQ ID NO: 177455 - DNA, 25 bp, Artificial
  Probe
cttgtctcctaagataaagtttttg

SEQ ID NO: 177456 - DNA, 25 bp, Artificial
  Probe
gcacacagagcaccttgtagagaca

SEQ ID NO: 177457 - DNA, 25 bp, Artificial
  Probe
tttttgcagagaaacgtgtacccat

SEQ ID NO: 177458 - DNA, 25 bp, Artificial
  Probe
tccacattagcctgcagaaacctag

SEQ ID NO: 177459 - DNA, 25 bp, Artificial
  Probe
cacggggcgacttccattctccaat

SEQ ID NO: 177460 - DNA, 25 bp, Artificial
  Probe
ctgcagaaacctaggggcccctatt

SEQ ID NO: 177461 - DNA, 25 bp, Artificial
  Probe
gtgtgtgttgcatacacagaatcag

SEQ ID NO: 177462 - DNA, 25 bp, Artificial
  Probe
gccctacatatcttaaattggtgaa

SEQ ID NO: 177463 - DNA, 25 bp, Artificial
  Probe
ttccttggactacttgtctcctaag

SEQ ID NO: 177464 - DNA, 25 bp, Artificial
  Probe
gaccagcctggcacttccttggact

SEQ ID NO: 177465 - DNA, 25 bp, Artificial
  Probe
gcacttccttggactacttgtctcc

SEQ ID NO: 177466 - DNA, 25 bp, Artificial
  Probe
agatggcttccagatacccgtgttc

SEQ ID NO: 177467 - DNA, 25 bp, Artificial
  Probe
gtgatattccccacaggcacgttaa

SEQ ID NO: 177468 - DNA, 25 bp, Artificial
  Probe
caagatggcttccagatacccgtgt

SEQ ID NO: 177469 - DNA, 25 bp, Artificial
  Probe
cacgttaactgttgcacttttgaat

SEQ ID NO: 177470 - DNA, 25 bp, Artificial
  Probe
gtcttccaatccaagatggcttcca

SEQ ID NO: 177471 - DNA, 25 bp, Artificial
  Probe
gagcaactccatagagagggtcttc

SEQ ID NO: 177472 - DNA, 25 bp, Artificial
  Probe
tgtgtgagagcaactccatagagag

SEQ ID NO: 177473 - DNA, 25 bp, Artificial
  Probe
taactgtgatattccccacaggcac

SEQ ID NO: 177474 - DNA, 25 bp, Artificial
  Probe
ttacatgttcccaacatggtggtgt

SEQ ID NO: 177475 - DNA, 25 bp, Artificial
  Probe
tggcttccagatacccgtgttcatg

SEQ ID NO: 177476 - DNA, 25 bp, Artificial
  Probe
gggtcttccaatccaagatggcttc

SEQ ID NO: 177477 - DNA, 25 bp, Artificial
  Probe
tccaatccaagatggcttccagata

SEQ ID NO: 177478 - DNA, 25 bp, Artificial
  Probe
tcttccaatccaagatggcttccag

SEQ ID NO: 177479 - DNA, 25 bp, Artificial
  Probe
catgttcccaacatggtggtgtggt

SEQ ID NO: 177480 - DNA, 25 bp, Artificial
  Probe
gatattccccacaggcacgttaact

SEQ ID NO: 177481 - DNA, 25 bp, Artificial
  Probe
cccaacatggtggtgtggtaaatgt

SEQ ID NO: 177482 - DNA, 25 bp, Artificial
  Probe
taactgttgcacttttgaatgtcca

SEQ ID NO: 177483 - DNA, 25 bp, Artificial
  Probe
agagggtcttccaatccaagatggc

SEQ ID NO: 177484 - DNA, 25 bp, Artificial
  Probe
ttaactgtgatattccccacaggca

SEQ ID NO: 177485 - DNA, 25 bp, Artificial
  Probe
tacatgttcccaacatggtggtgtg

SEQ ID NO: 177486 - DNA, 25 bp, Artificial
  Probe
gttgcacttttgaatgtccaaaatt

SEQ ID NO: 177487 - DNA, 25 bp, Artificial
  Probe
tgttgcacttttgaatgtccaaaat

SEQ ID NO: 177488 - DNA, 25 bp, Artificial
  Probe
agagcaactccatagagagggtctt

SEQ ID NO: 177489 - DNA, 25 bp, Artificial
  Probe
atccaagatggcttccagatacccg

SEQ ID NO: 177490 - DNA, 25 bp, Artificial
  Probe
ccacaggcacgttaactgttgcact

SEQ ID NO: 177491 - DNA, 25 bp, Artificial
  Probe
aactccatagagagggtcttccaat

SEQ ID NO: 177492 - DNA, 25 bp, Artificial
  Probe
ttaactgttgcacttttgaatgtcc

SEQ ID NO: 177493 - DNA, 25 bp, Artificial
  Probe
ggcacgttaactgttgcacttttga

SEQ ID NO: 177494 - DNA, 25 bp, Artificial
  Probe
actgttgcacttttgaatgtccaaa

SEQ ID NO: 177495 - DNA, 25 bp, Artificial
  Probe
ccccacaggcacgttaactgttgca

SEQ ID NO: 177496 - DNA, 25 bp, Artificial
  Probe
atggcttccagatacccgtgttcat

SEQ ID NO: 177497 - DNA, 25 bp, Artificial
  Probe
tccagatacccgtgttcatgttttg

SEQ ID NO: 177498 - DNA, 25 bp, Artificial
  Probe
agggtcttccaatccaagatggctt

SEQ ID NO: 177499 - DNA, 25 bp, Artificial
  Probe
caggcacgttaactgttgcactttt

SEQ ID NO: 177500 - DNA, 25 bp, Artificial
  Probe
gtgtgagagcaactccatagagagg

SEQ ID NO: 177501 - DNA, 25 bp, Artificial
  Probe
gttcccaacatggtggtgtggtaaa

SEQ ID NO: 177502 - DNA, 25 bp, Artificial
  Probe
caactccatagagagggtcttccaa

SEQ ID NO: 177503 - DNA, 25 bp, Artificial
  Probe
ttcccaacatggtggtgtggtaaat

SEQ ID NO: 177504 - DNA, 25 bp, Artificial
  Probe
ccatagagagggtcttccaatccaa

SEQ ID NO: 177505 - DNA, 25 bp, Artificial
  Probe
ccagatacccgtgttcatgttttgt

SEQ ID NO: 177506 - DNA, 25 bp, Artificial
  Probe
gagagggtcttccaatccaagatgg

SEQ ID NO: 177507 - DNA, 25 bp, Artificial
  Probe
ttccccacaggcacgttaactgttg

SEQ ID NO: 177508 - DNA, 25 bp, Artificial
  Probe
catagagagggtcttccaatccaag

SEQ ID NO: 177509 - DNA, 25 bp, Artificial
  Probe
atacttacatgttcccaacatggtg

SEQ ID NO: 177510 - DNA, 25 bp, Artificial
  Probe
gcaactccatagagagggtcttcca

SEQ ID NO: 177511 - DNA, 25 bp, Artificial
  Probe
gcacgttaactgttgcacttttgaa

SEQ ID NO: 177512 - DNA, 25 bp, Artificial
  Probe
tctgtacttcctttgtggttggcta

SEQ ID NO: 177513 - DNA, 25 bp, Artificial
  Probe
acttccataatctatattaaatgag

SEQ ID NO: 177514 - DNA, 25 bp, Artificial
  Probe
gtggttggctatcttttttatattt

SEQ ID NO: 177515 - DNA, 25 bp, Artificial
  Probe
atctaaaacttccataatctatatt

SEQ ID NO: 177516 - DNA, 25 bp, Artificial
  Probe
aaacttccataatctatattaaatg

SEQ ID NO: 177517 - DNA, 25 bp, Artificial
  Probe
ctgtacttcctttgtggttggctat

SEQ ID NO: 177518 - DNA, 25 bp, Artificial
  Probe
ttcctttgtggttggctatcttttt

SEQ ID NO: 177519 - DNA, 25 bp, Artificial
  Probe
gttgccatatctaaaacttccataa

SEQ ID NO: 177520 - DNA, 25 bp, Artificial
  Probe
ttgtggttggctatcttttttatat

SEQ ID NO: 177521 - DNA, 25 bp, Artificial
  Probe
atgttactagcttaaagcttaattt

SEQ ID NO: 177522 - DNA, 25 bp, Artificial
  Probe
aaaacttccataatctatattaaat

SEQ ID NO: 177523 - DNA, 25 bp, Artificial
  Probe
aaattatgttactagcttaaagctt

SEQ ID NO: 177524 - DNA, 25 bp, Artificial
  Probe
cttcctttgtggttggctatctttt

SEQ ID NO: 177525 - DNA, 25 bp, Artificial
  Probe
tgtacttcctttgtggttggctatc

SEQ ID NO: 177526 - DNA, 25 bp, Artificial
  Probe
ttactagcttaaagcttaatttgat

SEQ ID NO: 177527 - DNA, 25 bp, Artificial
  Probe
gccttgttgccatatctaaaacttc

SEQ ID NO: 177528 - DNA, 25 bp, Artificial
  Probe
tattaaatgagggtttctgtacttc

SEQ ID NO: 177529 - DNA, 25 bp, Artificial
  Probe
ctaaaacttccataatctatattaa

SEQ ID NO: 177530 - DNA, 25 bp, Artificial
  Probe
atatctaaaacttccataatctata

SEQ ID NO: 177531 - DNA, 25 bp, Artificial
  Probe
catatctaaaacttccataatctat

SEQ ID NO: 177532 - DNA, 25 bp, Artificial
  Probe
tcctttgtggttggctatctttttt

SEQ ID NO: 177533 - DNA, 25 bp, Artificial
  Probe
tccataatctatattaaatgagggt

SEQ ID NO: 177534 - DNA, 25 bp, Artificial
  Probe
ttgccatatctaaaacttccataat

SEQ ID NO: 177535 - DNA, 25 bp, Artificial
  Probe
gtacttcctttgtggttggctatct

SEQ ID NO: 177536 - DNA, 25 bp, Artificial
  Probe
ccttgttgccatatctaaaacttcc

SEQ ID NO: 177537 - DNA, 25 bp, Artificial
  Probe
tgagggtttctgtacttcctttgtg

SEQ ID NO: 177538 - DNA, 25 bp, Artificial
  Probe
cttccataatctatattaaatgagg

SEQ ID NO: 177539 - DNA, 25 bp, Artificial
  Probe
gctgccttgttgccatatctaaaac

SEQ ID NO: 177540 - DNA, 25 bp, Artificial
  Probe
ctgccttgttgccatatctaaaact

SEQ ID NO: 177541 - DNA, 25 bp, Artificial
  Probe
atattaaatgagggtttctgtactt

SEQ ID NO: 177542 - DNA, 25 bp, Artificial
  Probe
ggtttctgtacttcctttgtggttg

SEQ ID NO: 177543 - DNA, 25 bp, Artificial
  Probe
acttcctttgtggttggctatcttt

SEQ ID NO: 177544 - DNA, 25 bp, Artificial
  Probe
ccataatctatattaaatgagggtt

SEQ ID NO: 177545 - DNA, 25 bp, Artificial
  Probe
ccatatctaaaacttccataatcta

SEQ ID NO: 177546 - DNA, 25 bp, Artificial
  Probe
tggttggctatcttttttatattta

SEQ ID NO: 177547 - DNA, 25 bp, Artificial
  Probe
tacttcctttgtggttggctatctt

SEQ ID NO: 177548 - DNA, 25 bp, Artificial
  Probe
gttactagcttaaagcttaatttga

SEQ ID NO: 177549 - DNA, 25 bp, Artificial
  Probe
gccatatctaaaacttccataatct

SEQ ID NO: 177550 - DNA, 25 bp, Artificial
  Probe
tgttgccatatctaaaacttccata

SEQ ID NO: 177551 - DNA, 25 bp, Artificial
  Probe
aattatgttactagcttaaagctta

SEQ ID NO: 177552 - DNA, 25 bp, Artificial
  Probe
ctttgtggttggctatcttttttat

SEQ ID NO: 177553 - DNA, 25 bp, Artificial
  Probe
gagggtttctgtacttcctttgtgg

SEQ ID NO: 177554 - DNA, 25 bp, Artificial
  Probe
ttctgtacttcctttgtggttggct

SEQ ID NO: 177555 - DNA, 25 bp, Artificial
  Probe
atgagggtttctgtacttcctttgt

SEQ ID NO: 177556 - DNA, 25 bp, Artificial
  Probe
aacttccataatctatattaaatga

SEQ ID NO: 177557 - DNA, 25 bp, Artificial
  Probe
aaaattatgttactagcttaaagct

SEQ ID NO: 177558 - DNA, 25 bp, Artificial
  Probe
gaacacagtctcttctagcaaatgt

SEQ ID NO: 177559 - DNA, 25 bp, Artificial
  Probe
tctcttctagcaaatgtgtttttga

SEQ ID NO: 177560 - DNA, 25 bp, Artificial
  Probe
gtctcttctagcaaatgtgtttttg

SEQ ID NO: 177561 - DNA, 25 bp, Artificial
  Probe
gcagaacacagtctcttctagcaaa

SEQ ID NO: 177562 - DNA, 25 bp, Artificial
  Probe
caatccaccaacaagtgtggatgtt

SEQ ID NO: 177563 - DNA, 25 bp, Artificial
  Probe
atccaccaacaagtgtggatgttgc

SEQ ID NO: 177564 - DNA, 25 bp, Artificial
  Probe
cagaacacagtctcttctagcaaat

SEQ ID NO: 177565 - DNA, 25 bp, Artificial
  Probe
ctcttctagcaaatgtgtttttgaa

SEQ ID NO: 177566 - DNA, 25 bp, Artificial
  Probe
tcaatccaccaacaagtgtggatgt

SEQ ID NO: 177567 - DNA, 25 bp, Artificial
  Probe
cagtctcttctagcaaatgtgtttt

SEQ ID NO: 177568 - DNA, 25 bp, Artificial
  Probe
ggaagtttgtcaatccaccaacaag

SEQ ID NO: 177569 - DNA, 25 bp, Artificial
  Probe
agaacacagtctcttctagcaaatg

SEQ ID NO: 177570 - DNA, 25 bp, Artificial
  Probe
acaagtgtggatgttgcagaacaca

SEQ ID NO: 177571 - DNA, 25 bp, Artificial
  Probe
cttctagcaaatgtgtttttgaagc

SEQ ID NO: 177572 - DNA, 25 bp, Artificial
  Probe
tgtcaatccaccaacaagtgtggat

SEQ ID NO: 177573 - DNA, 25 bp, Artificial
  Probe
tccaccaacaagtgtggatgttgca

SEQ ID NO: 177574 - DNA, 25 bp, Artificial
  Probe
tttgtcaatccaccaacaagtgtgg

SEQ ID NO: 177575 - DNA, 25 bp, Artificial
  Probe
gttgcagaacacagtctcttctagc

SEQ ID NO: 177576 - DNA, 25 bp, Artificial
  Probe
aatccaccaacaagtgtggatgttg

SEQ ID NO: 177577 - DNA, 25 bp, Artificial
  Probe
accaacaagtgtggatgttgcagaa

SEQ ID NO: 177578 - DNA, 25 bp, Artificial
  Probe
aagtttgtcaatccaccaacaagtg

SEQ ID NO: 177579 - DNA, 25 bp, Artificial
  Probe
caccaacaagtgtggatgttgcaga

SEQ ID NO: 177580 - DNA, 25 bp, Artificial
  Probe
tctagcaaatgtgtttttgaagcga

SEQ ID NO: 177581 - DNA, 25 bp, Artificial
  Probe
cacagtctcttctagcaaatgtgtt

SEQ ID NO: 177582 - DNA, 25 bp, Artificial
  Probe
agtctcttctagcaaatgtgttttt

SEQ ID NO: 177583 - DNA, 25 bp, Artificial
  Probe
tgttgcagaacacagtctcttctag

SEQ ID NO: 177584 - DNA, 25 bp, Artificial
  Probe
tgcagaacacagtctcttctagcaa

SEQ ID NO: 177585 - DNA, 25 bp, Artificial
  Probe
tcttctagcaaatgtgtttttgaag

SEQ ID NO: 177586 - DNA, 25 bp, Artificial
  Probe
atgttgcagaacacagtctcttcta

SEQ ID NO: 177587 - DNA, 25 bp, Artificial
  Probe
acacagtctcttctagcaaatgtgt

SEQ ID NO: 177588 - DNA, 25 bp, Artificial
  Probe
ttgcagaacacagtctcttctagca

SEQ ID NO: 177589 - DNA, 25 bp, Artificial
  Probe
ttgtcaatccaccaacaagtgtgga

SEQ ID NO: 177590 - DNA, 25 bp, Artificial
  Probe
aacacagtctcttctagcaaatgtg

SEQ ID NO: 177591 - DNA, 25 bp, Artificial
  Probe
ccaccaacaagtgtggatgttgcag

SEQ ID NO: 177592 - DNA, 25 bp, Artificial
  Probe
acagtctcttctagcaaatgtgttt

SEQ ID NO: 177593 - DNA, 25 bp, Artificial
  Probe
ttctagcaaatgtgtttttgaagcg

SEQ ID NO: 177594 - DNA, 25 bp, Artificial
  Probe
gtcaatccaccaacaagtgtggatg

SEQ ID NO: 177595 - DNA, 25 bp, Artificial
  Probe
agtttgtcaatccaccaacaagtgt

SEQ ID NO: 177596 - DNA, 25 bp, Artificial
  Probe
aacaagtgtggatgttgcagaacac

SEQ ID NO: 177597 - DNA, 25 bp, Artificial
  Probe
gtttgtcaatccaccaacaagtgtg

SEQ ID NO: 177598 - DNA, 25 bp, Artificial
  Probe
gaagtttgtcaatccaccaacaagt

SEQ ID NO: 177599 - DNA, 25 bp, Artificial
  Probe
tcccagggcttgaatgagaagcgcg

SEQ ID NO: 177600 - DNA, 25 bp, Artificial
  Probe
tgaggccgcatacaaaggcccagct

SEQ ID NO: 177601 - DNA, 25 bp, Artificial
  Probe
ctcagattctctgctttgctaaaag

SEQ ID NO: 177602 - DNA, 25 bp, Artificial
  Probe
ttagatcacattcctgaggctagac

SEQ ID NO: 177603 - DNA, 25 bp, Artificial
  Probe
aattcccagggcttgaatgagaagc

SEQ ID NO: 177604 - DNA, 25 bp, Artificial
  Probe
ctgaggccgcatacaaaggcccagc

SEQ ID NO: 177605 - DNA, 25 bp, Artificial
  Probe
aaggtcatcggatgctgtttttctg

SEQ ID NO: 177606 - DNA, 25 bp, Artificial
  Probe
aagcgcgcggcctcagattctctgc

SEQ ID NO: 177607 - DNA, 25 bp, Artificial
  Probe
cggatgctgtttttctgcctgagtc

SEQ ID NO: 177608 - DNA, 25 bp, Artificial
  Probe
cctgaggccgcatacaaaggcccag

SEQ ID NO: 177609 - DNA, 25 bp, Artificial
  Probe
tcctgaggccgcatacaaaggccca

SEQ ID NO: 177610 - DNA, 25 bp, Artificial
  Probe
gatctagtcaacgtcaattcccagg

SEQ ID NO: 177611 - DNA, 25 bp, Artificial
  Probe
agtcaacgtcaattcccagggcttg

SEQ ID NO: 177612 - DNA, 25 bp, Artificial
  Probe
agatcacattcctgaggctagaccc

SEQ ID NO: 177613 - DNA, 25 bp, Artificial
  Probe
cgcgcggcctcagattctctgcttt

SEQ ID NO: 177614 - DNA, 25 bp, Artificial
  Probe
ctctgctttgctaaaagtgttagat

SEQ ID NO: 177615 - DNA, 25 bp, Artificial
  Probe
tatttggccacttcatcctcctgag

SEQ ID NO: 177616 - DNA, 25 bp, Artificial
  Probe
caaggtcatcggatgctgtttttct

SEQ ID NO: 177617 - DNA, 25 bp, Artificial
  Probe
ttcatcctcctgaggccgcatacaa

SEQ ID NO: 177618 - DNA, 25 bp, Artificial
  Probe
aagtgttagatcacattcctgaggc

SEQ ID NO: 177619 - DNA, 25 bp, Artificial
  Probe
cattcctgaggctagaccccaaggt

SEQ ID NO: 177620 - DNA, 25 bp, Artificial
  Probe
agcgcgcggcctcagattctctgct

SEQ ID NO: 177621 - DNA, 25 bp, Artificial
  Probe
aaattacacctgcaaggtcatcgga

SEQ ID NO: 177622 - DNA, 25 bp, Artificial
  Probe
acgtcaattcccagggcttgaatga

SEQ ID NO: 177623 - DNA, 25 bp, Artificial
  Probe
attacacctgcaaggtcatcggatg

SEQ ID NO: 177624 - DNA, 25 bp, Artificial
  Probe
gtcatcggatgctgtttttctgcct

SEQ ID NO: 177625 - DNA, 25 bp, Artificial
  Probe
gcctcagattctctgctttgctaaa

SEQ ID NO: 177626 - DNA, 25 bp, Artificial
  Probe
cccagggcttgaatgagaagcgcgc

SEQ ID NO: 177627 - DNA, 25 bp, Artificial
  Probe
aggtctatccccttatttggccact

SEQ ID NO: 177628 - DNA, 25 bp, Artificial
  Probe
atcacattcctgaggctagacccca

SEQ ID NO: 177629 - DNA, 25 bp, Artificial
  Probe
atacaaaggcccagctatccaagta

SEQ ID NO: 177630 - DNA, 25 bp, Artificial
  Probe
ggccgcatacaaaggcccagctatc

SEQ ID NO: 177631 - DNA, 25 bp, Artificial
  Probe
aggatctagtcaacgtcaattccca

SEQ ID NO: 177632 - DNA, 25 bp, Artificial
  Probe
ggtctatccccttatttggccactt

SEQ ID NO: 177633 - DNA, 25 bp, Artificial
  Probe
gtcaacgtcaattcccagggcttga

SEQ ID NO: 177634 - DNA, 25 bp, Artificial
  Probe
gattctctgctttgctaaaagtgtt

SEQ ID NO: 177635 - DNA, 25 bp, Artificial
  Probe
tcagattctctgctttgctaaaagt

SEQ ID NO: 177636 - DNA, 25 bp, Artificial
  Probe
cctgcaaggtcatcggatgctgttt

SEQ ID NO: 177637 - DNA, 25 bp, Artificial
  Probe
aggtcatcggatgctgtttttctgc

SEQ ID NO: 177638 - DNA, 25 bp, Artificial
  Probe
ttctctgctttgctaaaagtgttag

SEQ ID NO: 177639 - DNA, 25 bp, Artificial
  Probe
gttagatcacattcctgaggctaga

SEQ ID NO: 177640 - DNA, 25 bp, Artificial
  Probe
tttggccacttcatcctcctgaggc

SEQ ID NO: 177641 - DNA, 25 bp, Artificial
  Probe
ggcctcagattctctgctttgctaa

SEQ ID NO: 177642 - DNA, 25 bp, Artificial
  Probe
ttcctgaggctagaccccaaggtct

SEQ ID NO: 177643 - DNA, 25 bp, Artificial
  Probe
gtgttagatcacattcctgaggcta

SEQ ID NO: 177644 - DNA, 25 bp, Artificial
  Probe
tgctttgctaaaagtgttagatcac

SEQ ID NO: 177645 - DNA, 25 bp, Artificial
  Probe
cggcctacatggtgggtttctgttt

SEQ ID NO: 177646 - DNA, 25 bp, Artificial
  Probe
gtacagtggccctttggtttgttag

SEQ ID NO: 177647 - DNA, 25 bp, Artificial
  Probe
cttactgtagcgtcagtctgtgtaa

SEQ ID NO: 177648 - DNA, 25 bp, Artificial
  Probe
gtgctttggcttgatgtctacagta

SEQ ID NO: 177649 - DNA, 25 bp, Artificial
  Probe
agtaggcttgtcagacaaaatacaa

SEQ ID NO: 177650 - DNA, 25 bp, Artificial
  Probe
gcatcaaggaacttaaccggcctac

SEQ ID NO: 177651 - DNA, 25 bp, Artificial
  Probe
ttgactgaatctcctagatttttgt

SEQ ID NO: 177652 - DNA, 25 bp, Artificial
  Probe
ttggcttgatgtctacagtacttgt

SEQ ID NO: 177653 - DNA, 25 bp, Artificial
  Probe
aaccagctttgaggaaatttagact

SEQ ID NO: 177654 - DNA, 25 bp, Artificial
  Probe
gccttctacttatttctaaaagagg

SEQ ID NO: 177655 - DNA, 25 bp, Artificial
  Probe
ataaccagtacagtggccctttggt

SEQ ID NO: 177656 - DNA, 25 bp, Artificial
  Probe
tacaagatgcccagttagatttgaa

SEQ ID NO: 177657 - DNA, 25 bp, Artificial
  Probe
ctggtctctgtgtgacccaccagga

SEQ ID NO: 177658 - DNA, 25 bp, Artificial
  Probe
tctaaacctggtagtcctaacagtt

SEQ ID NO: 177659 - DNA, 25 bp, Artificial
  Probe
gtttctgtttaaaacatctctgtga

SEQ ID NO: 177660 - DNA, 25 bp, Artificial
  Probe
ctctggtctttatagctttcaccag

SEQ ID NO: 177661 - DNA, 25 bp, Artificial
  Probe
agattttgactgaatctcctagatt

SEQ ID NO: 177662 - DNA, 25 bp, Artificial
  Probe
ccatcagtaggcttgtcagacaaaa

SEQ ID NO: 177663 - DNA, 25 bp, Artificial
  Probe
gtaaattctctggtctttatagctt

SEQ ID NO: 177664 - DNA, 25 bp, Artificial
  Probe
taattttgcatttgtccatcagtag

SEQ ID NO: 177665 - DNA, 25 bp, Artificial
  Probe
aacctggtagtcctaacagtttgat

SEQ ID NO: 177666 - DNA, 25 bp, Artificial
  Probe
tgtaattgtactttcttactgtagc

SEQ ID NO: 177667 - DNA, 25 bp, Artificial
  Probe
tacaaaaccagctttgaggaaattt

SEQ ID NO: 177668 - DNA, 25 bp, Artificial
  Probe
cttatttctaaaagagggcatcaag

SEQ ID NO: 177669 - DNA, 25 bp, Artificial
  Probe
ggcaattttctagctcaagtatatt

SEQ ID NO: 177670 - DNA, 25 bp, Artificial
  Probe
ctttcttactgtagcgtcagtctgt

SEQ ID NO: 177671 - DNA, 25 bp, Artificial
  Probe
cagtggccctttggtttgttagtgg

SEQ ID NO: 177672 - DNA, 25 bp, Artificial
  Probe
ttgtccatcagtaggcttgtcagac

SEQ ID NO: 177673 - DNA, 25 bp, Artificial
  Probe
ttgtgctttggcttgatgtctacag

SEQ ID NO: 177674 - DNA, 25 bp, Artificial
  Probe
atttaacctgtaattgtgctttggc

SEQ ID NO: 177675 - DNA, 25 bp, Artificial
  Probe
tgaatttcaggcaattttctagctc

SEQ ID NO: 177676 - DNA, 25 bp, Artificial
  Probe
taaccggcctacatggtgggtttct

SEQ ID NO: 177677 - DNA, 25 bp, Artificial
  Probe
ggaaatttagactgttcctgatgac

SEQ ID NO: 177678 - DNA, 25 bp, Artificial
  Probe
tgatcacaaaaggaggctcacagca

SEQ ID NO: 177679 - DNA, 25 bp, Artificial
  Probe
cctgtaattgtgctttggcttgatg

SEQ ID NO: 177680 - DNA, 25 bp, Artificial
  Probe
tcaaggaacttaaccggcctacatg

SEQ ID NO: 177681 - DNA, 25 bp, Artificial
  Probe
ctgttcctgatgacagtgtttggag

SEQ ID NO: 177682 - DNA, 25 bp, Artificial
  Probe
gcgtcagtctgtgtaaataaccagt

SEQ ID NO: 177683 - DNA, 25 bp, Artificial
  Probe
tttcaccaggaatgaaagacatttt

SEQ ID NO: 177684 - DNA, 25 bp, Artificial
  Probe
tttctaaacctggtagtcctaacag

SEQ ID NO: 177685 - DNA, 25 bp, Artificial
  Probe
ttctatgtagtttttctaaacctgg

SEQ ID NO: 177686 - DNA, 25 bp, Artificial
  Probe
tgtaaataaccagtacagtggccct

SEQ ID NO: 177687 - DNA, 25 bp, Artificial
  Probe
tgcccagttagatttgaatttcagg

SEQ ID NO: 177688 - DNA, 25 bp, Artificial
  Probe
tttgatcacaaaaggaggctcacag

SEQ ID NO: 177689 - DNA, 25 bp, Artificial
  Probe
ttctggtctctgtgtgacccaccag

SEQ ID NO: 177690 - DNA, 25 bp, Artificial
  Probe
aaaggaggctcacagcatgtaaatt

SEQ ID NO: 177691 - DNA, 25 bp, Artificial
  Probe
atatacaagtgaagcccgagccgac

SEQ ID NO: 177692 - DNA, 25 bp, Artificial
  Probe
acctctgatgaatcgcactgtccgt

SEQ ID NO: 177693 - DNA, 25 bp, Artificial
  Probe
ttcaacctctgatgaatcgcactgt

SEQ ID NO: 177694 - DNA, 25 bp, Artificial
  Probe
atccttccgccatgactatgtgctc

SEQ ID NO: 177695 - DNA, 25 bp, Artificial
  Probe
atgaatcgcactgtccgttcatcct

SEQ ID NO: 177696 - DNA, 25 bp, Artificial
  Probe
ctgatgaatcgcactgtccgttcat

SEQ ID NO: 177697 - DNA, 25 bp, Artificial
  Probe
aagtgaagcccgagccgactgccag

SEQ ID NO: 177698 - DNA, 25 bp, Artificial
  Probe
accatgatcagcttgaacagtttcg

SEQ ID NO: 177699 - DNA, 25 bp, Artificial
  Probe
atgtgctcaatatacaagtgaagcc

SEQ ID NO: 177700 - DNA, 25 bp, Artificial
  Probe
cgccatgactatgtgctcaatatac

SEQ ID NO: 177701 - DNA, 25 bp, Artificial
  Probe
ccatgatcagcttgaacagtttcgg

SEQ ID NO: 177702 - DNA, 25 bp, Artificial
  Probe
cggaccctgcttttcacatctgagg

SEQ ID NO: 177703 - DNA, 25 bp, Artificial
  Probe
agcttgaacagtttcggaccctgct

SEQ ID NO: 177704 - DNA, 25 bp, Artificial
  Probe
tgctcaatatacaagtgaagcccga

SEQ ID NO: 177705 - DNA, 25 bp, Artificial
  Probe
agtttcggaccctgcttttcacatc

SEQ ID NO: 177706 - DNA, 25 bp, Artificial
  Probe
tccgccatgactatgtgctcaatat

SEQ ID NO: 177707 - DNA, 25 bp, Artificial
  Probe
actatgtgctcaatatacaagtgaa

SEQ ID NO: 177708 - DNA, 25 bp, Artificial
  Probe
tcggaccctgcttttcacatctgag

SEQ ID NO: 177709 - DNA, 25 bp, Artificial
  Probe
catgactatgtgctcaatatacaag

SEQ ID NO: 177710 - DNA, 25 bp, Artificial
  Probe
agcccgagccgactgccagcgaagt

SEQ ID NO: 177711 - DNA, 25 bp, Artificial
  Probe
tccttccgccatgactatgtgctca

SEQ ID NO: 177712 - DNA, 25 bp, Artificial
  Probe
tgactatgtgctcaatatacaagtg

SEQ ID NO: 177713 - DNA, 25 bp, Artificial
  Probe
tgtgctcaatatacaagtgaagccc

SEQ ID NO: 177714 - DNA, 25 bp, Artificial
  Probe
gcatcttgttttaatgcatattagc

SEQ ID NO: 177715 - DNA, 25 bp, Artificial
  Probe
tatgtgctcaatatacaagtgaagc

SEQ ID NO: 177716 - DNA, 25 bp, Artificial
  Probe
cgaccatgatcagcttgaacagttt

SEQ ID NO: 177717 - DNA, 25 bp, Artificial
  Probe
ccttccgccatgactatgtgctcaa

SEQ ID NO: 177718 - DNA, 25 bp, Artificial
  Probe
cttcaacctctgatgaatcgcactg

SEQ ID NO: 177719 - DNA, 25 bp, Artificial
  Probe
gtcgaccatgatcagcttgaacagt

SEQ ID NO: 177720 - DNA, 25 bp, Artificial
  Probe
atcagcttgaacagtttcggaccct

SEQ ID NO: 177721 - DNA, 25 bp, Artificial
  Probe
gcccacttcaacctctgatgaatcg

SEQ ID NO: 177722 - DNA, 25 bp, Artificial
  Probe
gaacagtttcggaccctgcttttca

SEQ ID NO: 177723 - DNA, 25 bp, Artificial
  Probe
atgactatgtgctcaatatacaagt

SEQ ID NO: 177724 - DNA, 25 bp, Artificial
  Probe
gcttgaacagtttcggaccctgctt

SEQ ID NO: 177725 - DNA, 25 bp, Artificial
  Probe
aagcccgagccgactgccagcgaag

SEQ ID NO: 177726 - DNA, 25 bp, Artificial
  Probe
cttccgccatgactatgtgctcaat

SEQ ID NO: 177727 - DNA, 25 bp, Artificial
  Probe
tttcggaccctgcttttcacatctg

SEQ ID NO: 177728 - DNA, 25 bp, Artificial
  Probe
gccatgactatgtgctcaatataca

SEQ ID NO: 177729 - DNA, 25 bp, Artificial
  Probe
gtttcggaccctgcttttcacatct

SEQ ID NO: 177730 - DNA, 25 bp, Artificial
  Probe
caacctctgatgaatcgcactgtcc

SEQ ID NO: 177731 - DNA, 25 bp, Artificial
  Probe
gaggtcgaccatgatcagcttgaac

SEQ ID NO: 177732 - DNA, 25 bp, Artificial
  Probe
ggtcgaccatgatcagcttgaacag

SEQ ID NO: 177733 - DNA, 25 bp, Artificial
  Probe
tcagcttgaacagtttcggaccctg

SEQ ID NO: 177734 - DNA, 25 bp, Artificial
  Probe
tgaatcgcactgtccgttcatcctt

SEQ ID NO: 177735 - DNA, 25 bp, Artificial
  Probe
caatatacaagtgaagcccgagccg

SEQ ID NO: 177736 - DNA, 25 bp, Artificial
  Probe
tgatcagcttgaacagtttcggacc

SEQ ID NO: 177737 - DNA, 25 bp, Artificial
  Probe
ctaaaacagactgtcaatatgggcc

SEQ ID NO: 177738 - DNA, 25 bp, Artificial
  Probe
ctctgtcatcggtgtggcaagagct

SEQ ID NO: 177739 - DNA, 25 bp, Artificial
  Probe
agataccagtgcacactaacacatg

SEQ ID NO: 177740 - DNA, 25 bp, Artificial
  Probe
acccaagaaacgagccttcctgact

SEQ ID NO: 177741 - DNA, 25 bp, Artificial
  Probe
ggaaaatgccactgttactcattga

SEQ ID NO: 177742 - DNA, 25 bp, Artificial
  Probe
tgacctgagcaaacggacaccagga

SEQ ID NO: 177743 - DNA, 25 bp, Artificial
  Probe
catgctgcaggctgtctgtagcaag

SEQ ID NO: 177744 - DNA, 25 bp, Artificial
  Probe
aacacatgctgcaggctgtctgtag

SEQ ID NO: 177745 - DNA, 25 bp, Artificial
  Probe
gtctgtatcagatattattgactac

SEQ ID NO: 177746 - DNA, 25 bp, Artificial
  Probe
caggaaaatgccactgttactcatt

SEQ ID NO: 177747 - DNA, 25 bp, Artificial
  Probe
acggacaccaggactaaaacagact

SEQ ID NO: 177748 - DNA, 25 bp, Artificial
  Probe
ctgactctgtcatcggtgtggcaag

SEQ ID NO: 177749 - DNA, 25 bp, Artificial
  Probe
agactgtcaatatgggccctgagtt

SEQ ID NO: 177750 - DNA, 25 bp, Artificial
  Probe
ctgtagcaagttacccaagaaacga

SEQ ID NO: 177751 - DNA, 25 bp, Artificial
  Probe
accaggactaaaacagactgtcaat

SEQ ID NO: 177752 - DNA, 25 bp, Artificial
  Probe
ggactaaaacagactgtcaatatgg

SEQ ID NO: 177753 - DNA, 25 bp, Artificial
  Probe
ctatttgttgggaactgggcttcgg

SEQ ID NO: 177754 - DNA, 25 bp, Artificial
  Probe
caaacggacaccaggactaaaacag

SEQ ID NO: 177755 - DNA, 25 bp, Artificial
  Probe
gcaagttacccaagaaacgagcctt

SEQ ID NO: 177756 - DNA, 25 bp, Artificial
  Probe
aacagactgtcaatatgggccctga

SEQ ID NO: 177757 - DNA, 25 bp, Artificial
  Probe
agcaagttacccaagaaacgagcct

SEQ ID NO: 177758 - DNA, 25 bp, Artificial
  Probe
tgagttctgccctgtcctgtaaagt

SEQ ID NO: 177759 - DNA, 25 bp, Artificial
  Probe
gcaaacggacaccaggactaaaaca

SEQ ID NO: 177760 - DNA, 25 bp, Artificial
  Probe
accgaggatctagataccagtgcac

SEQ ID NO: 177761 - DNA, 25 bp, Artificial
  Probe
acttcaggaaaatgccactgttact

SEQ ID NO: 177762 - DNA, 25 bp, Artificial
  Probe
gacttcctgtctgtatcagatatta

SEQ ID NO: 177763 - DNA, 25 bp, Artificial
  Probe
ctgagcaaacggacaccaggactaa

SEQ ID NO: 177764 - DNA, 25 bp, Artificial
  Probe
tgggccctgagttctgccctgtcct

SEQ ID NO: 177765 - DNA, 25 bp, Artificial
  Probe
gaaacgagccttcctgactctgtca

SEQ ID NO: 177766 - DNA, 25 bp, Artificial
  Probe
ctgtcatcggtgtggcaagagcttg

SEQ ID NO: 177767 - DNA, 25 bp, Artificial
  Probe
atcggtgtggcaagagcttgacctg

SEQ ID NO: 177768 - DNA, 25 bp, Artificial
  Probe
ggacttcctgtctgtatcagatatt

SEQ ID NO: 177769 - DNA, 25 bp, Artificial
  Probe
ttcctgtctgtatcagatattattg

SEQ ID NO: 177770 - DNA, 25 bp, Artificial
  Probe
gttacccaagaaacgagccttcctg

SEQ ID NO: 177771 - DNA, 25 bp, Artificial
  Probe
tgttactcattgatggaaaaaaccg

SEQ ID NO: 177772 - DNA, 25 bp, Artificial
  Probe
catcggtgtggcaagagcttgacct

SEQ ID NO: 177773 - DNA, 25 bp, Artificial
  Probe
taccagtgcacactaacacatgctg

SEQ ID NO: 177774 - DNA, 25 bp, Artificial
  Probe
gtggcaagagcttgacctgagcaaa

SEQ ID NO: 177775 - DNA, 25 bp, Artificial
  Probe
ttactcattgatggaaaaaaccgag

SEQ ID NO: 177776 - DNA, 25 bp, Artificial
  Probe
caagtctatttgttgggaactgggc

SEQ ID NO: 177777 - DNA, 25 bp, Artificial
  Probe
cgaggatctagataccagtgcacac

SEQ ID NO: 177778 - DNA, 25 bp, Artificial
  Probe
caatatgggccctgagttctgccct

SEQ ID NO: 177779 - DNA, 25 bp, Artificial
  Probe
ctgtctgtatcagatattattgact

SEQ ID NO: 177780 - DNA, 25 bp, Artificial
  Probe
gatctagataccagtgcacactaac

SEQ ID NO: 177781 - DNA, 25 bp, Artificial
  Probe
aaatgccactgttactcattgatgg

SEQ ID NO: 177782 - DNA, 25 bp, Artificial
  Probe
attattgactacttcaggaaaatgc

SEQ ID NO: 177783 - DNA, 25 bp, Artificial
  Probe
gtggaccatgcctaaagattccgcc

SEQ ID NO: 177784 - DNA, 25 bp, Artificial
  Probe
cagtgccagggtgaccaggcctcct

SEQ ID NO: 177785 - DNA, 25 bp, Artificial
  Probe
tgaagtccaaggaaggagggaccaa

SEQ ID NO: 177786 - DNA, 25 bp, Artificial
  Probe
tgtaatactgccatttccaagcagt

SEQ ID NO: 177787 - DNA, 25 bp, Artificial
  Probe
caactttgattgaatgggtgctgcg

SEQ ID NO: 177788 - DNA, 25 bp, Artificial
  Probe
gggaagattcacagcttctgaagtt

SEQ ID NO: 177789 - DNA, 25 bp, Artificial
  Probe
ttctttactgggagcgacctgaaaa

SEQ ID NO: 177790 - DNA, 25 bp, Artificial
  Probe
gtgaagatgcctaacgcaccaaaac

SEQ ID NO: 177791 - DNA, 25 bp, Artificial
  Probe
cgttagatccgttgttgatctaaaa

SEQ ID NO: 177792 - DNA, 25 bp, Artificial
  Probe
tcaaatgacggcaatatagaatcgt

SEQ ID NO: 177793 - DNA, 25 bp, Artificial
  Probe
taacgcaccaaaactacacacgagg

SEQ ID NO: 177794 - DNA, 25 bp, Artificial
  Probe
ttttccccagatcttgtattacgtg

SEQ ID NO: 177795 - DNA, 25 bp, Artificial
  Probe
tcttccacttcttccaaaagggctg

SEQ ID NO: 177796 - DNA, 25 bp, Artificial
  Probe
catttccaagcagtgtttttggtag

SEQ ID NO: 177797 - DNA, 25 bp, Artificial
  Probe
gaaagacgcaccaggtttcctgcag

SEQ ID NO: 177798 - DNA, 25 bp, Artificial
  Probe
taaacagacttttcaaatgacggca

SEQ ID NO: 177799 - DNA, 25 bp, Artificial
  Probe
tgagaccgcccagaagggccaggtc

SEQ ID NO: 177800 - DNA, 25 bp, Artificial
  Probe
tttcagacgagcacaaatcaaaatg

SEQ ID NO: 177801 - DNA, 25 bp, Artificial
  Probe
acacctggccagtgccagggtgacc

SEQ ID NO: 177802 - DNA, 25 bp, Artificial
  Probe
tgaagatgcctaacgcaccaaaact

SEQ ID NO: 177803 - DNA, 25 bp, Artificial
  Probe
tttcttggccatattcaagtctttg

SEQ ID NO: 177804 - DNA, 25 bp, Artificial
  Probe
agtgccagggtgaccaggcctcctc

SEQ ID NO: 177805 - DNA, 25 bp, Artificial
  Probe
catctcgtttatactgtggtggtgt

SEQ ID NO: 177806 - DNA, 25 bp, Artificial
  Probe
tccgcccaaagacaggcgagccatg

SEQ ID NO: 177807 - DNA, 25 bp, Artificial
  Probe
ggactgactccgataaaagggtgtg

SEQ ID NO: 177808 - DNA, 25 bp, Artificial
  Probe
gagaacagctggagaccgatgagac

SEQ ID NO: 177809 - DNA, 25 bp, Artificial
  Probe
aaagcatcgcgaaagagcctttgag

SEQ ID NO: 177810 - DNA, 25 bp, Artificial
  Probe
gccctcgatccgttgccaactttga

SEQ ID NO: 177811 - DNA, 25 bp, Artificial
  Probe
catattcaagtctttggggaacaaa

SEQ ID NO: 177812 - DNA, 25 bp, Artificial
  Probe
catccttgccgtaaacttgggaata

SEQ ID NO: 177813 - DNA, 25 bp, Artificial
  Probe
cccagatcttgtattacgtgttttt

SEQ ID NO: 177814 - DNA, 25 bp, Artificial
  Probe
gaactgctgcaaaacggtaatttat

SEQ ID NO: 177815 - DNA, 25 bp, Artificial
  Probe
ctctgctcctcgacagtgtttttct

SEQ ID NO: 177816 - DNA, 25 bp, Artificial
  Probe
agctggagaccgatgagactctttc

SEQ ID NO: 177817 - DNA, 25 bp, Artificial
  Probe
gcatccttgccgtaaacttgggaat

SEQ ID NO: 177818 - DNA, 25 bp, Artificial
  Probe
ttaacagactgaacaggaaagccaa

SEQ ID NO: 177819 - DNA, 25 bp, Artificial
  Probe
ttccaaaagggctgcctaaaagatc

SEQ ID NO: 177820 - DNA, 25 bp, Artificial
  Probe
aggaacaaggacatctcgtttatac

SEQ ID NO: 177821 - DNA, 25 bp, Artificial
  Probe
caaagacaggcgagccatggcccta

SEQ ID NO: 177822 - DNA, 25 bp, Artificial
  Probe
agaatcgttagatccgttgttgatc

SEQ ID NO: 177823 - DNA, 25 bp, Artificial
  Probe
aatacttatgaactgctgcaaaacg

SEQ ID NO: 177824 - DNA, 25 bp, Artificial
  Probe
tgaacccgggctttgccgactgccg

SEQ ID NO: 177825 - DNA, 25 bp, Artificial
  Probe
tttatttctggactgactccgataa

SEQ ID NO: 177826 - DNA, 25 bp, Artificial
  Probe
tgcctctgagataagagagaccccc

SEQ ID NO: 177827 - DNA, 25 bp, Artificial
  Probe
atgcctaaagattccgccgctaata

SEQ ID NO: 177828 - DNA, 25 bp, Artificial
  Probe
ggaaaagacagcaccaaccgcgcac

SEQ ID NO: 177829 - DNA, 25 bp, Artificial
  Probe
ttaaaacaccatgtttggaagagca

SEQ ID NO: 177830 - DNA, 25 bp, Artificial
  Probe
ggcctccttttacgttgaatctgat

SEQ ID NO: 177831 - DNA, 25 bp, Artificial
  Probe
ggcgacggactcgttcataggaata

SEQ ID NO: 177832 - DNA, 25 bp, Artificial
  Probe
ttcacaggttttgaagctgaccttt

SEQ ID NO: 177833 - DNA, 25 bp, Artificial
  Probe
agcgcagctgggaagttcacaggtt

SEQ ID NO: 177834 - DNA, 25 bp, Artificial
  Probe
agactggacaaaggagtgtggcaac

SEQ ID NO: 177835 - DNA, 25 bp, Artificial
  Probe
cggactcgttcataggaataaaatc

SEQ ID NO: 177836 - DNA, 25 bp, Artificial
  Probe
gctgacctttttctgcgaagttcac

SEQ ID NO: 177837 - DNA, 25 bp, Artificial
  Probe
ctgacctttttctgcgaagttcact

SEQ ID NO: 177838 - DNA, 25 bp, Artificial
  Probe
tccttttacgttgaatctgatgctt

SEQ ID NO: 177839 - DNA, 25 bp, Artificial
  Probe
cttttacgttgaatctgatgctttg

SEQ ID NO: 177840 - DNA, 25 bp, Artificial
  Probe
tctgatgctttgagttttaaaacac

SEQ ID NO: 177841 - DNA, 25 bp, Artificial
  Probe
aacaccatgtttggaagagcaagaa

SEQ ID NO: 177842 - DNA, 25 bp, Artificial
  Probe
gcaacagtgaccacagctgcggcga

SEQ ID NO: 177843 - DNA, 25 bp, Artificial
  Probe
acaccatgtttggaagagcaagaag

SEQ ID NO: 177844 - DNA, 25 bp, Artificial
  Probe
gcgaagttcactttaatacgagaca

SEQ ID NO: 177845 - DNA, 25 bp, Artificial
  Probe
gcgggcctccttttacgttgaatct

SEQ ID NO: 177846 - DNA, 25 bp, Artificial
  Probe
cgaagttcactttaatacgagacat

SEQ ID NO: 177847 - DNA, 25 bp, Artificial
  Probe
gcgcagctgggaagttcacaggttt

SEQ ID NO: 177848 - DNA, 25 bp, Artificial
  Probe
ctgatgctttgagttttaaaacacc

SEQ ID NO: 177849 - DNA, 25 bp, Artificial
  Probe
gactcgttcataggaataaaatctt

SEQ ID NO: 177850 - DNA, 25 bp, Artificial
  Probe
ctgcggcgacggactcgttcatagg

SEQ ID NO: 177851 - DNA, 25 bp, Artificial
  Probe
cagctgggaagttcacaggttttga

SEQ ID NO: 177852 - DNA, 25 bp, Artificial
  Probe
tttaaaacaccatgtttggaagagc

SEQ ID NO: 177853 - DNA, 25 bp, Artificial
  Probe
ctgcgaagttcactttaatacgaga

SEQ ID NO: 177854 - DNA, 25 bp, Artificial
  Probe
aggttttgaagctgacctttttctg

SEQ ID NO: 177855 - DNA, 25 bp, Artificial
  Probe
gttttgaagctgacctttttctgcg

SEQ ID NO: 177856 - DNA, 25 bp, Artificial
  Probe
gaagctgacctttttctgcgaagtt

SEQ ID NO: 177857 - DNA, 25 bp, Artificial
  Probe
gttcacaggttttgaagctgacctt

SEQ ID NO: 177858 - DNA, 25 bp, Artificial
  Probe
agttcactttaatacgagacatttg

SEQ ID NO: 177859 - DNA, 25 bp, Artificial
  Probe
aacagtgaccacagctgcggcgacg

SEQ ID NO: 177860 - DNA, 25 bp, Artificial
  Probe
acagtgaccacagctgcggcgacgg

SEQ ID NO: 177861 - DNA, 25 bp, Artificial
  Probe
acggactcgttcataggaataaaat

SEQ ID NO: 177862 - DNA, 25 bp, Artificial
  Probe
gaagttcactttaatacgagacatt

SEQ ID NO: 177863 - DNA, 25 bp, Artificial
  Probe
ggttttgaagctgacctttttctgc

SEQ ID NO: 177864 - DNA, 25 bp, Artificial
  Probe
acagctgcggcgacggactcgttca

SEQ ID NO: 177865 - DNA, 25 bp, Artificial
  Probe
ttctgcgaagttcactttaatacga

SEQ ID NO: 177866 - DNA, 25 bp, Artificial
  Probe
gtgtggcaacagtgaccacagctgc

SEQ ID NO: 177867 - DNA, 25 bp, Artificial
  Probe
gaagttcacaggttttgaagctgac

SEQ ID NO: 177868 - DNA, 25 bp, Artificial
  Probe
gcggcgacggactcgttcataggaa

SEQ ID NO: 177869 - DNA, 25 bp, Artificial
  Probe
gcctccttttacgttgaatctgatg

SEQ ID NO: 177870 - DNA, 25 bp, Artificial
  Probe
agtgaccacagctgcggcgacggac

SEQ ID NO: 177871 - DNA, 25 bp, Artificial
  Probe
ggcaacagtgaccacagctgcggcg

SEQ ID NO: 177872 - DNA, 25 bp, Artificial
  Probe
tttctgcgaagttcactttaatacg

SEQ ID NO: 177873 - DNA, 25 bp, Artificial
  Probe
gttcactttaatacgagacatttga

SEQ ID NO: 177874 - DNA, 25 bp, Artificial
  Probe
ttttgaagctgacctttttctgcga

SEQ ID NO: 177875 - DNA, 25 bp, Artificial
  Probe
agagtgctgccccaagggatgaggg

SEQ ID NO: 177876 - DNA, 25 bp, Artificial
  Probe
agatgaagagtgctgccccaaggga

SEQ ID NO: 177877 - DNA, 25 bp, Artificial
  Probe
agaagaccctcactggcacgttgcg

SEQ ID NO: 177878 - DNA, 25 bp, Artificial
  Probe
gcacgttgcgcagatgaagagtgct

SEQ ID NO: 177879 - DNA, 25 bp, Artificial
  Probe
caggtcctcagaagaccctcactgg

SEQ ID NO: 177880 - DNA, 25 bp, Artificial
  Probe
acaggtcctcagaagaccctcactg

SEQ ID NO: 177881 - DNA, 25 bp, Artificial
  Probe
cctcagaagaccctcactggcacgt

SEQ ID NO: 177882 - DNA, 25 bp, Artificial
  Probe
cacgttgcgcagatgaagagtgctg

SEQ ID NO: 177883 - DNA, 25 bp, Artificial
  Probe
acctcgttctggacaggtcctcaga

SEQ ID NO: 177884 - DNA, 25 bp, Artificial
  Probe
gttctggacaggtcctcagaagacc

SEQ ID NO: 177885 - DNA, 25 bp, Artificial
  Probe
actggcacgttgcgcagatgaagag

SEQ ID NO: 177886 - DNA, 25 bp, Artificial
  Probe
ctcagaagaccctcactggcacgtt

SEQ ID NO: 177887 - DNA, 25 bp, Artificial
  Probe
cgttgcgcagatgaagagtgctgcc

SEQ ID NO: 177888 - DNA, 25 bp, Artificial
  Probe
tcagaagaccctcactggcacgttg

SEQ ID NO: 177889 - DNA, 25 bp, Artificial
  Probe
gtgctgccccaagggatgaggggaa

SEQ ID NO: 177890 - DNA, 25 bp, Artificial
  Probe
aggtcctcagaagaccctcactggc

SEQ ID NO: 177891 - DNA, 25 bp, Artificial
  Probe
tcgttctggacaggtcctcagaaga

SEQ ID NO: 177892 - DNA, 25 bp, Artificial
  Probe
cctcgttctggacaggtcctcagaa

SEQ ID NO: 177893 - DNA, 25 bp, Artificial
  Probe
ggtcctcagaagaccctcactggca

SEQ ID NO: 177894 - DNA, 25 bp, Artificial
  Probe
gaagagtgctgccccaagggatgag

SEQ ID NO: 177895 - DNA, 25 bp, Artificial
  Probe
gaccctcactggcacgttgcgcaga

SEQ ID NO: 177896 - DNA, 25 bp, Artificial
  Probe
aagaccctcactggcacgttgcgca

SEQ ID NO: 177897 - DNA, 25 bp, Artificial
  Probe
ggcacgttgcgcagatgaagagtgc

SEQ ID NO: 177898 - DNA, 25 bp, Artificial
  Probe
acgttgcgcagatgaagagtgctgc

SEQ ID NO: 177899 - DNA, 25 bp, Artificial
  Probe
tcactggcacgttgcgcagatgaag

SEQ ID NO: 177900 - DNA, 25 bp, Artificial
  Probe
cgttctggacaggtcctcagaagac

SEQ ID NO: 177901 - DNA, 25 bp, Artificial
  Probe
gatgaagagtgctgccccaagggat

SEQ ID NO: 177902 - DNA, 25 bp, Artificial
  Probe
agaccctcactggcacgttgcgcag

SEQ ID NO: 177903 - DNA, 25 bp, Artificial
  Probe
gacaggtcctcagaagaccctcact

SEQ ID NO: 177904 - DNA, 25 bp, Artificial
  Probe
accctcactggcacgttgcgcagat

SEQ ID NO: 177905 - DNA, 25 bp, Artificial
  Probe
cagaagaccctcactggcacgttgc

SEQ ID NO: 177906 - DNA, 25 bp, Artificial
  Probe
gagtgctgccccaagggatgagggg

SEQ ID NO: 177907 - DNA, 25 bp, Artificial
  Probe
ttctggacaggtcctcagaagaccc

SEQ ID NO: 177908 - DNA, 25 bp, Artificial
  Probe
ctcgttctggacaggtcctcagaag

SEQ ID NO: 177909 - DNA, 25 bp, Artificial
  Probe
ggacaggtcctcagaagaccctcac

SEQ ID NO: 177910 - DNA, 25 bp, Artificial
  Probe
cctcactggcacgttgcgcagatga

SEQ ID NO: 177911 - DNA, 25 bp, Artificial
  Probe
tggcacgttgcgcagatgaagagtg

SEQ ID NO: 177912 - DNA, 25 bp, Artificial
  Probe
tgctgccccaagggatgaggggaag

SEQ ID NO: 177913 - DNA, 25 bp, Artificial
  Probe
ctggcacgttgcgcagatgaagagt

SEQ ID NO: 177914 - DNA, 25 bp, Artificial
  Probe
ccctcactggcacgttgcgcagatg

SEQ ID NO: 177915 - DNA, 25 bp, Artificial
  Probe
atgaagagtgctgccccaagggatg

SEQ ID NO: 177916 - DNA, 25 bp, Artificial
  Probe
gaagaccctcactggcacgttgcgc

SEQ ID NO: 177917 - DNA, 25 bp, Artificial
  Probe
ctggacaggtcctcagaagaccctc

SEQ ID NO: 177918 - DNA, 25 bp, Artificial
  Probe
tctggacaggtcctcagaagaccct

SEQ ID NO: 177919 - DNA, 25 bp, Artificial
  Probe
gtcctcagaagaccctcactggcac

SEQ ID NO: 177920 - DNA, 25 bp, Artificial
  Probe
tggacaggtcctcagaagaccctca

SEQ ID NO: 177921 - DNA, 25 bp, Artificial
  Probe
ggtattagtacgaccatgaccttca

SEQ ID NO: 177922 - DNA, 25 bp, Artificial
  Probe
gactcttctgacattccttaatagg

SEQ ID NO: 177923 - DNA, 25 bp, Artificial
  Probe
tcttcccagaccactgcagtcagga

SEQ ID NO: 177924 - DNA, 25 bp, Artificial
  Probe
gttcacgtagcatagctcttcctcc

SEQ ID NO: 177925 - DNA, 25 bp, Artificial
  Probe
cttgggcaagtcaccagtgtctctc

SEQ ID NO: 177926 - DNA, 25 bp, Artificial
  Probe
gatcctgtaggttcacccatttttt

SEQ ID NO: 177927 - DNA, 25 bp, Artificial
  Probe
aacaccctagttcacgtagcatagc

SEQ ID NO: 177928 - DNA, 25 bp, Artificial
  Probe
tgacctgtgaggtattagtacgacc

SEQ ID NO: 177929 - DNA, 25 bp, Artificial
  Probe
agactctctccgtgaccttgggcaa

SEQ ID NO: 177930 - DNA, 25 bp, Artificial
  Probe
ccaggctgtgacgaaagggcccacg

SEQ ID NO: 177931 - DNA, 25 bp, Artificial
  Probe
gatacatctctgtctactgatcctg

SEQ ID NO: 177932 - DNA, 25 bp, Artificial
  Probe
tagaaatattactccagcatagcag

SEQ ID NO: 177933 - DNA, 25 bp, Artificial
  Probe
gccccactgcatggtatcgattttt

SEQ ID NO: 177934 - DNA, 25 bp, Artificial
  Probe
ggtgagcgtgcgtctgtaatccctt

SEQ ID NO: 177935 - DNA, 25 bp, Artificial
  Probe
ggttaacccacaagatacatctctg

SEQ ID NO: 177936 - DNA, 25 bp, Artificial
  Probe
gcggtgcggcccagagaaacttcct

SEQ ID NO: 177937 - DNA, 25 bp, Artificial
  Probe
cagcccagtcagaggcaggctcagg

SEQ ID NO: 177938 - DNA, 25 bp, Artificial
  Probe
acacggtccatttcctagaggcttc

SEQ ID NO: 177939 - DNA, 25 bp, Artificial
  Probe
actggttctgttcttttatatgcag

SEQ ID NO: 177940 - DNA, 25 bp, Artificial
  Probe
tgcctacctcacagggtcactctga

SEQ ID NO: 177941 - DNA, 25 bp, Artificial
  Probe
cacgggaatcaccatcgccaacatt

SEQ ID NO: 177942 - DNA, 25 bp, Artificial
  Probe
cagtgacgctagtgcgcacacacac

SEQ ID NO: 177943 - DNA, 25 bp, Artificial
  Probe
cgggaatcaccatcgccaacatttc

SEQ ID NO: 177944 - DNA, 25 bp, Artificial
  Probe
attactccagcatagcaggaaaaaa

SEQ ID NO: 177945 - DNA, 25 bp, Artificial
  Probe
tttcctagaggcttccgcccaaggg

SEQ ID NO: 177946 - DNA, 25 bp, Artificial
  Probe
ttcctagaggcttccgcccaagggc

SEQ ID NO: 177947 - DNA, 25 bp, Artificial
  Probe
tagtacgaccatgaccttcagccct

SEQ ID NO: 177948 - DNA, 25 bp, Artificial
  Probe
ccctcaaagagaggttacagaggtt

SEQ ID NO: 177949 - DNA, 25 bp, Artificial
  Probe
gaggcaggctcaggactcttctgac

SEQ ID NO: 177950 - DNA, 25 bp, Artificial
  Probe
gtgttaaccagtatttccttgcttt

SEQ ID NO: 177951 - DNA, 25 bp, Artificial
  Probe
ctgcaaggccctctacctagggaca

SEQ ID NO: 177952 - DNA, 25 bp, Artificial
  Probe
ggttgaaataacacccatcctgcct

SEQ ID NO: 177953 - DNA, 25 bp, Artificial
  Probe
caggaacagcccagtcagaggcagg

SEQ ID NO: 177954 - DNA, 25 bp, Artificial
  Probe
tggtttgctcactccctaaagaatc

SEQ ID NO: 177955 - DNA, 25 bp, Artificial
  Probe
cgcccaagggcatcttccagtgacg

SEQ ID NO: 177956 - DNA, 25 bp, Artificial
  Probe
taacaagccccacaaagtgattctg

SEQ ID NO: 177957 - DNA, 25 bp, Artificial
  Probe
gcttcaacaggcaggcaataatctc

SEQ ID NO: 177958 - DNA, 25 bp, Artificial
  Probe
ttgagtcctcagtcccttcagactc

SEQ ID NO: 177959 - DNA, 25 bp, Artificial
  Probe
ccatccctcaaagagaggttacaga

SEQ ID NO: 177960 - DNA, 25 bp, Artificial
  Probe
accggaactggcagaatcaaatgta

SEQ ID NO: 177961 - DNA, 25 bp, Artificial
  Probe
aataggttcattctttgctaaaggc

SEQ ID NO: 177962 - DNA, 25 bp, Artificial
  Probe
gcaggcaataatctcttcccagacc

SEQ ID NO: 177963 - DNA, 25 bp, Artificial
  Probe
aaatgtcaacacatcacaggtcaag

SEQ ID NO: 177964 - DNA, 25 bp, Artificial
  Probe
cttcagactctctccgtgaccttgg

SEQ ID NO: 177965 - DNA, 25 bp, Artificial
  Probe
cacacgactgctttcaattagaccg

SEQ ID NO: 177966 - DNA, 25 bp, Artificial
  Probe
ctctgtaacagactggggttgaaat

SEQ ID NO: 177967 - DNA, 25 bp, Artificial
  Probe
tcttccattgtccttatgtaggttc

SEQ ID NO: 177968 - DNA, 25 bp, Artificial
  Probe
catcccagaatcagggggcctctgc

SEQ ID NO: 177969 - DNA, 25 bp, Artificial
  Probe
tccgacaacggctggctgggaatga

SEQ ID NO: 177970 - DNA, 25 bp, Artificial
  Probe
tgctggagtcttgaagggagctcca

SEQ ID NO: 177971 - DNA, 25 bp, Artificial
  Probe
aggcccagattaaaggcgagtctgc

SEQ ID NO: 177972 - DNA, 25 bp, Artificial
  Probe
ggcatgattcccataaccctagcct

SEQ ID NO: 177973 - DNA, 25 bp, Artificial
  Probe
ttctatgcggcgtctcagtgatctc

SEQ ID NO: 177974 - DNA, 25 bp, Artificial
  Probe
tcacctgagaagtggagcagagacg

SEQ ID NO: 177975 - DNA, 25 bp, Artificial
  Probe
aatcagggggcctctgcaatccaga

SEQ ID NO: 177976 - DNA, 25 bp, Artificial
  Probe
agatagtccgacaacggctggctgg

SEQ ID NO: 177977 - DNA, 25 bp, Artificial
  Probe
cagccagggcctggtggtcctgcca

SEQ ID NO: 177978 - DNA, 25 bp, Artificial
  Probe
gcttggtttctatgcggcgtctcag

SEQ ID NO: 177979 - DNA, 25 bp, Artificial
  Probe
aggagcaggacagtcagcagttcat

SEQ ID NO: 177980 - DNA, 25 bp, Artificial
  Probe
ccttatgtaggttcccagccgaggg

SEQ ID NO: 177981 - DNA, 25 bp, Artificial
  Probe
cctccattaggctggcctgggtgat

SEQ ID NO: 177982 - DNA, 25 bp, Artificial
  Probe
tgaagggagctccagtgccagtgaa

SEQ ID NO: 177983 - DNA, 25 bp, Artificial
  Probe
ggcctgggtgattttattgactgac

SEQ ID NO: 177984 - DNA, 25 bp, Artificial
  Probe
attgctgcagcctctgcttcagcgc

SEQ ID NO: 177985 - DNA, 25 bp, Artificial
  Probe
agtcttgaagggagctccagtgcca

SEQ ID NO: 177986 - DNA, 25 bp, Artificial
  Probe
aaggtgagcttggtttctatgcggc

SEQ ID NO: 177987 - DNA, 25 bp, Artificial
  Probe
agcgcccttctaggttccctctgga

SEQ ID NO: 177988 - DNA, 25 bp, Artificial
  Probe
actctgctaataaaggtgagcttgg

SEQ ID NO: 177989 - DNA, 25 bp, Artificial
  Probe
cagagacgggcctccattaggctgg

SEQ ID NO: 177990 - DNA, 25 bp, Artificial
  Probe
gatctcggcatgattcccataaccc

SEQ ID NO: 177991 - DNA, 25 bp, Artificial
  Probe
tcaagccaggcctaacatcccagaa

SEQ ID NO: 177992 - DNA, 25 bp, Artificial
  Probe
agtttcccttgtcacctgagaagtg

SEQ ID NO: 177993 - DNA, 25 bp, Artificial
  Probe
ctgccatgtttgagccgcaaggagg

SEQ ID NO: 177994 - DNA, 25 bp, Artificial
  Probe
cttcagtatgtgctggagtcttgaa

SEQ ID NO: 177995 - DNA, 25 bp, Artificial
  Probe
ttgactgacagctgatgtgagtgac

SEQ ID NO: 177996 - DNA, 25 bp, Artificial
  Probe
aatggatgtgccagcaagcaaagcg

SEQ ID NO: 177997 - DNA, 25 bp, Artificial
  Probe
ggctggcctgggtgattttattgac

SEQ ID NO: 177998 - DNA, 25 bp, Artificial
  Probe
gcgcaaaagctcttcttccattgtc

SEQ ID NO: 177999 - DNA, 25 bp, Artificial
  Probe
acaagactgggtgtctcggctgctc

SEQ ID NO: 178000 - DNA, 25 bp, Artificial
  Probe
gtgaggcccagattaaaggcgagtc

SEQ ID NO: 178001 - DNA, 25 bp, Artificial
  Probe
gcgagtctgcccactttaacaattc

SEQ ID NO: 178002 - DNA, 25 bp, Artificial
  Probe
taaaggcgagtctgcccactttaac

SEQ ID NO: 178003 - DNA, 25 bp, Artificial
  Probe
gtgtaagaagccagtggctgctcag

SEQ ID NO: 178004 - DNA, 25 bp, Artificial
  Probe
gcccttctaggttccctctggacat

SEQ ID NO: 178005 - DNA, 25 bp, Artificial
  Probe
cctcagtttcccttgtcacctgaga

SEQ ID NO: 178006 - DNA, 25 bp, Artificial
  Probe
acaacggctggctgggaatgaaaag

SEQ ID NO: 178007 - DNA, 25 bp, Artificial
  Probe
ccagtgccagtgaaggaatggatgt

SEQ ID NO: 178008 - DNA, 25 bp, Artificial
  Probe
tgatgtgagtgaccagccagggcct

SEQ ID NO: 178009 - DNA, 25 bp, Artificial
  Probe
ggttccctctggacattcctccaat

SEQ ID NO: 178010 - DNA, 25 bp, Artificial
  Probe
agctccagtgccagtgaaggaatgg

SEQ ID NO: 178011 - DNA, 25 bp, Artificial
  Probe
gtctcagtgatctcggcatgattcc

SEQ ID NO: 178012 - DNA, 25 bp, Artificial
  Probe
attaaaggcgagtctgcccacttta

SEQ ID NO: 178013 - DNA, 25 bp, Artificial
  Probe
cggactcatggtgctgcacgctgag

SEQ ID NO: 178014 - DNA, 25 bp, Artificial
  Probe
gtggcgcaaatcctgctggagctgc

SEQ ID NO: 178015 - DNA, 25 bp, Artificial
  Probe
tgctcttggttaagtgtttaatcac

SEQ ID NO: 178016 - DNA, 25 bp, Artificial
  Probe
gtgggtgctgtacctgctcttggtt

SEQ ID NO: 178017 - DNA, 25 bp, Artificial
  Probe
caagtgggtgctgtacctgctcttg

SEQ ID NO: 178018 - DNA, 25 bp, Artificial
  Probe
gttgcaagtgggtgctgtacctgct

SEQ ID NO: 178019 - DNA, 25 bp, Artificial
  Probe
gtttaatcacgctgtccactgcctt

SEQ ID NO: 178020 - DNA, 25 bp, Artificial
  Probe
gccttcctcctttgtcttattgtgg

SEQ ID NO: 178021 - DNA, 25 bp, Artificial
  Probe
tgctgtacctgctcttggttaagtg

SEQ ID NO: 178022 - DNA, 25 bp, Artificial
  Probe
tcatgactgacaacgggctccggga

SEQ ID NO: 178023 - DNA, 25 bp, Artificial
  Probe
gaggtccagctgttcatgactgaca

SEQ ID NO: 178024 - DNA, 25 bp, Artificial
  Probe
tgctgcacgctgagatgttgtggtt

SEQ ID NO: 178025 - DNA, 25 bp, Artificial
  Probe
actggcgggaactggcatcggactc

SEQ ID NO: 178026 - DNA, 25 bp, Artificial
  Probe
tgttcatgactgacaacgggctccg

SEQ ID NO: 178027 - DNA, 25 bp, Artificial
  Probe
atcctgctggagctgctggtatgcg

SEQ ID NO: 178028 - DNA, 25 bp, Artificial
  Probe
acccggcggcaggtggcgcaaatcc

SEQ ID NO: 178029 - DNA, 25 bp, Artificial
  Probe
cgcaaatcctgctggagctgctggt

SEQ ID NO: 178030 - DNA, 25 bp, Artificial
  Probe
gtcttccatgccaaggaggtccagc

SEQ ID NO: 178031 - DNA, 25 bp, Artificial
  Probe
aagtgggtgctgtacctgctcttgg

SEQ ID NO: 178032 - DNA, 25 bp, Artificial
  Probe
caaatcctgctggagctgctggtat

SEQ ID NO: 178033 - DNA, 25 bp, Artificial
  Probe
ttcatgactgacaacgggctccggg

SEQ ID NO: 178034 - DNA, 25 bp, Artificial
  Probe
caggtggcgcaaatcctgctggagc

SEQ ID NO: 178035 - DNA, 25 bp, Artificial
  Probe
tgtggtcttccatgccaaggaggtc

SEQ ID NO: 178036 - DNA, 25 bp, Artificial
  Probe
ttgtcttattgtggtcttccatgcc

SEQ ID NO: 178037 - DNA, 25 bp, Artificial
  Probe
cttattgtggtcttccatgccaagg

SEQ ID NO: 178038 - DNA, 25 bp, Artificial
  Probe
cccggcggcaggtggcgcaaatcct

SEQ ID NO: 178039 - DNA, 25 bp, Artificial
  Probe
aggtggcgcaaatcctgctggagct

SEQ ID NO: 178040 - DNA, 25 bp, Artificial
  Probe
taagtgtttaatcacgctgtccact

SEQ ID NO: 178041 - DNA, 25 bp, Artificial
  Probe
gggaggccacagactcacaggcctg

SEQ ID NO: 178042 - DNA, 25 bp, Artificial
  Probe
aagtgtttaatcacgctgtccactg

SEQ ID NO: 178043 - DNA, 25 bp, Artificial
  Probe
aggaggtccagctgttcatgactga

SEQ ID NO: 178044 - DNA, 25 bp, Artificial
  Probe
ctcatggtgctgcacgctgagatgt

SEQ ID NO: 178045 - DNA, 25 bp, Artificial
  Probe
cgggaactggcatcggactcatggt

SEQ ID NO: 178046 - DNA, 25 bp, Artificial
  Probe
cctgctcttggttaagtgtttaatc

SEQ ID NO: 178047 - DNA, 25 bp, Artificial
  Probe
tccatgccaaggaggtccagctgtt

SEQ ID NO: 178048 - DNA, 25 bp, Artificial
  Probe
tcatggtgctgcacgctgagatgtt

SEQ ID NO: 178049 - DNA, 25 bp, Artificial
  Probe
attgtggtcttccatgccaaggagg

SEQ ID NO: 178050 - DNA, 25 bp, Artificial
  Probe
aaatcctgctggagctgctggtatg

SEQ ID NO: 178051 - DNA, 25 bp, Artificial
  Probe
gcacgctgagatgttgtggttcctg

SEQ ID NO: 178052 - DNA, 25 bp, Artificial
  Probe
ggactcatggtgctgcacgctgaga

SEQ ID NO: 178053 - DNA, 25 bp, Artificial
  Probe
aactggcatcggactcatggtgctg

SEQ ID NO: 178054 - DNA, 25 bp, Artificial
  Probe
tgtacctgctcttggttaagtgttt

SEQ ID NO: 178055 - DNA, 25 bp, Artificial
  Probe
ttaagtgtttaatcacgctgtccac

SEQ ID NO: 178056 - DNA, 25 bp, Artificial
  Probe
aggtccagctgttcatgactgacaa

SEQ ID NO: 178057 - DNA, 25 bp, Artificial
  Probe
gtccagctgttcatgactgacaacg

SEQ ID NO: 178058 - DNA, 25 bp, Artificial
  Probe
ggcgcaaatcctgctggagctgctg

SEQ ID NO: 178059 - DNA, 25 bp, Artificial
  Probe
gtgcaccaacaaatgtttgactgga

SEQ ID NO: 178060 - DNA, 25 bp, Artificial
  Probe
gctacgtacaacctatcctgtgtat

SEQ ID NO: 178061 - DNA, 25 bp, Artificial
  Probe
agttaggatttttcgcttgcagcaa

SEQ ID NO: 178062 - DNA, 25 bp, Artificial
  Probe
tttttcgcttgcagcaaaggaatgt

SEQ ID NO: 178063 - DNA, 25 bp, Artificial
  Probe
aatgcccccaagtgtctgccatctt

SEQ ID NO: 178064 - DNA, 25 bp, Artificial
  Probe
cgcttgcagcaaaggaatgtatata

SEQ ID NO: 178065 - DNA, 25 bp, Artificial
  Probe
catgttatccagaatcagttaggat

SEQ ID NO: 178066 - DNA, 25 bp, Artificial
  Probe
ttctctggtggatgccttgtttctg

SEQ ID NO: 178067 - DNA, 25 bp, Artificial
  Probe
tagagtagtttctctggtggatgcc

SEQ ID NO: 178068 - DNA, 25 bp, Artificial
  Probe
cagttgttagtactctcacgacagt

SEQ ID NO: 178069 - DNA, 25 bp, Artificial
  Probe
tgtctgccatcttccgctgaaagta

SEQ ID NO: 178070 - DNA, 25 bp, Artificial
  Probe
gaggacgcgtgcaccaacaaatgtt

SEQ ID NO: 178071 - DNA, 25 bp, Artificial
  Probe
gatttcaaaggaatgcccccaagtg

SEQ ID NO: 178072 - DNA, 25 bp, Artificial
  Probe
taaagcatgttatccagaatcagtt

SEQ ID NO: 178073 - DNA, 25 bp, Artificial
  Probe
ccaacaaatgtttgactggatatga

SEQ ID NO: 178074 - DNA, 25 bp, Artificial
  Probe
aggatttttcgcttgcagcaaagga

SEQ ID NO: 178075 - DNA, 25 bp, Artificial
  Probe
tcacgacagtgtttttaaaggctag

SEQ ID NO: 178076 - DNA, 25 bp, Artificial
  Probe
cgctgaaagtattcccaacagttgg

SEQ ID NO: 178077 - DNA, 25 bp, Artificial
  Probe
gtttctctggtggatgccttgtttc

SEQ ID NO: 178078 - DNA, 25 bp, Artificial
  Probe
tatccagaatcagttaggatttttc

SEQ ID NO: 178079 - DNA, 25 bp, Artificial
  Probe
gaaagtattcccaacagttggagga

SEQ ID NO: 178080 - DNA, 25 bp, Artificial
  Probe
caagtgtctgccatcttccgctgaa

SEQ ID NO: 178081 - DNA, 25 bp, Artificial
  Probe
cgcctttgatttcaaaggaatgccc

SEQ ID NO: 178082 - DNA, 25 bp, Artificial
  Probe
aggaatgcccccaagtgtctgccat

SEQ ID NO: 178083 - DNA, 25 bp, Artificial
  Probe
agagcgcctttgatttcaaaggaat

SEQ ID NO: 178084 - DNA, 25 bp, Artificial
  Probe
tggaggacgcgtgcaccaacaaatg

SEQ ID NO: 178085 - DNA, 25 bp, Artificial
  Probe
atccagaatcagttaggatttttcg

SEQ ID NO: 178086 - DNA, 25 bp, Artificial
  Probe
gagcgcctttgatttcaaaggaatg

SEQ ID NO: 178087 - DNA, 25 bp, Artificial
  Probe
agcagttgttagtactctcacgaca

SEQ ID NO: 178088 - DNA, 25 bp, Artificial
  Probe
cttccgctgaaagtattcccaacag

SEQ ID NO: 178089 - DNA, 25 bp, Artificial
  Probe
cgcgtgcaccaacaaatgtttgact

SEQ ID NO: 178090 - DNA, 25 bp, Artificial
  Probe
gccatcttccgctgaaagtattccc

SEQ ID NO: 178091 - DNA, 25 bp, Artificial
  Probe
actgctacgtacaacctatcctgtg

SEQ ID NO: 178092 - DNA, 25 bp, Artificial
  Probe
gtttctgaaactgctacgtacaacc

SEQ ID NO: 178093 - DNA, 25 bp, Artificial
  Probe
aagtattcccaacagttggaggacg

SEQ ID NO: 178094 - DNA, 25 bp, Artificial
  Probe
ttggaggacgcgtgcaccaacaaat

SEQ ID NO: 178095 - DNA, 25 bp, Artificial
  Probe
atcagttaggatttttcgcttgcag

SEQ ID NO: 178096 - DNA, 25 bp, Artificial
  Probe
ggatttttcgcttgcagcaaaggaa

SEQ ID NO: 178097 - DNA, 25 bp, Artificial
  Probe
accactgaattcaaagagagagagc

SEQ ID NO: 178098 - DNA, 25 bp, Artificial
  Probe
cacgacagtgtttttaaaggctagg

SEQ ID NO: 178099 - DNA, 25 bp, Artificial
  Probe
gaaaccactgaattcaaagagagag

SEQ ID NO: 178100 - DNA, 25 bp, Artificial
  Probe
aaccactgaattcaaagagagagag

SEQ ID NO: 178101 - DNA, 25 bp, Artificial
  Probe
tatcctgtgtataacatttcgtacg

SEQ ID NO: 178102 - DNA, 25 bp, Artificial
  Probe
atttcaaaggaatgcccccaagtgt

SEQ ID NO: 178103 - DNA, 25 bp, Artificial
  Probe
gtggatgccttgtttctgaaactgc

SEQ ID NO: 178104 - DNA, 25 bp, Artificial
  Probe
aacagttggaggacgcgtgcaccaa

SEQ ID NO: 178105 - DNA, 25 bp, Artificial
  Probe
acctaacctggtctacatggtcacg

SEQ ID NO: 178106 - DNA, 25 bp, Artificial
  Probe
gcacctaacctggtctacatggtca

SEQ ID NO: 178107 - DNA, 25 bp, Artificial
  Probe
cacggggaaccctgcctctgatgag

SEQ ID NO: 178108 - DNA, 25 bp, Artificial
  Probe
cctggagacatccaggtggtaccca

SEQ ID NO: 178109 - DNA, 25 bp, Artificial
  Probe
cctaacctggtctacatggtcacgg

SEQ ID NO: 178110 - DNA, 25 bp, Artificial
  Probe
ctgcctctgatgagatcaggaggtt

SEQ ID NO: 178111 - DNA, 25 bp, Artificial
  Probe
accctgcctctgatgagatcaggag

SEQ ID NO: 178112 - DNA, 25 bp, Artificial
  Probe
cctgcaggaactggagaggatcagc

SEQ ID NO: 178113 - DNA, 25 bp, Artificial
  Probe
gtctacatggtcacggggaaccctg

SEQ ID NO: 178114 - DNA, 25 bp, Artificial
  Probe
ctaacctggtctacatggtcacggg

SEQ ID NO: 178115 - DNA, 25 bp, Artificial
  Probe
ggagcaggcacctaacctggtctac

SEQ ID NO: 178116 - DNA, 25 bp, Artificial
  Probe
gccaacctgcaggaactggagagga

SEQ ID NO: 178117 - DNA, 25 bp, Artificial
  Probe
tccagggccaacctgcaggaactgg

SEQ ID NO: 178118 - DNA, 25 bp, Artificial
  Probe
cctctgatgagatcaggaggttgcc

SEQ ID NO: 178119 - DNA, 25 bp, Artificial
  Probe
gggaaccctgcctctgatgagatca

SEQ ID NO: 178120 - DNA, 25 bp, Artificial
  Probe
ccaacctgcaggaactggagaggat

SEQ ID NO: 178121 - DNA, 25 bp, Artificial
  Probe
aaccctgcctctgatgagatcagga

SEQ ID NO: 178122 - DNA, 25 bp, Artificial
  Probe
agatcaggaggttgcctggagacat

SEQ ID NO: 178123 - DNA, 25 bp, Artificial
  Probe
tgcctctgatgagatcaggaggttg

SEQ ID NO: 178124 - DNA, 25 bp, Artificial
  Probe
ggttccagggccaacctgcaggaac

SEQ ID NO: 178125 - DNA, 25 bp, Artificial
  Probe
atggtcacggggaaccctgcctctg

SEQ ID NO: 178126 - DNA, 25 bp, Artificial
  Probe
acatccaggtggtacccattggggt

SEQ ID NO: 178127 - DNA, 25 bp, Artificial
  Probe
gggagcaggcacctaacctggtcta

SEQ ID NO: 178128 - DNA, 25 bp, Artificial
  Probe
ctctgatgagatcaggaggttgcct

SEQ ID NO: 178129 - DNA, 25 bp, Artificial
  Probe
agcaggcacctaacctggtctacat

SEQ ID NO: 178130 - DNA, 25 bp, Artificial
  Probe
caggcacctaacctggtctacatgg

SEQ ID NO: 178131 - DNA, 25 bp, Artificial
  Probe
ttccagggccaacctgcaggaactg

SEQ ID NO: 178132 - DNA, 25 bp, Artificial
  Probe
ttgcctggagacatccaggtggtac

SEQ ID NO: 178133 - DNA, 25 bp, Artificial
  Probe
gagaccgggagcaggcacctaacct

SEQ ID NO: 178134 - DNA, 25 bp, Artificial
  Probe
gcctggagacatccaggtggtaccc

SEQ ID NO: 178135 - DNA, 25 bp, Artificial
  Probe
caacctgcaggaactggagaggatc

SEQ ID NO: 178136 - DNA, 25 bp, Artificial
  Probe
agaggatcagcagacccatcactcc

SEQ ID NO: 178137 - DNA, 25 bp, Artificial
  Probe
agggccaacctgcaggaactggaga

SEQ ID NO: 178138 - DNA, 25 bp, Artificial
  Probe
tggtcacggggaaccctgcctctga

SEQ ID NO: 178139 - DNA, 25 bp, Artificial
  Probe
acctggtctacatggtcacggggaa

SEQ ID NO: 178140 - DNA, 25 bp, Artificial
  Probe
ggagacatccaggtggtacccattg

SEQ ID NO: 178141 - DNA, 25 bp, Artificial
  Probe
ccagggccaacctgcaggaactgga

SEQ ID NO: 178142 - DNA, 25 bp, Artificial
  Probe
ctggagacatccaggtggtacccat

SEQ ID NO: 178143 - DNA, 25 bp, Artificial
  Probe
tggtctacatggtcacggggaaccc

SEQ ID NO: 178144 - DNA, 25 bp, Artificial
  Probe
catccaggtggtacccattggggtg

SEQ ID NO: 178145 - DNA, 25 bp, Artificial
  Probe
cgggagcaggcacctaacctggtct

SEQ ID NO: 178146 - DNA, 25 bp, Artificial
  Probe
gagaggatcagcagacccatcactc

SEQ ID NO: 178147 - DNA, 25 bp, Artificial
  Probe
ggtctacatggtcacggggaaccct

SEQ ID NO: 178148 - DNA, 25 bp, Artificial
  Probe
gcaggcacctaacctggtctacatg

SEQ ID NO: 178149 - DNA, 25 bp, Artificial
  Probe
caggaggttgcctggagacatccag

SEQ ID NO: 178150 - DNA, 25 bp, Artificial
  Probe
gttgcctggagacatccaggtggta

SEQ ID NO: 178151 - DNA, 25 bp, Artificial
  Probe
ccagatctctgactggcctcagaag

SEQ ID NO: 178152 - DNA, 25 bp, Artificial
  Probe
catgccagtgattgttgtccttgga

SEQ ID NO: 178153 - DNA, 25 bp, Artificial
  Probe
ccacacatacctacatctgggaaag

SEQ ID NO: 178154 - DNA, 25 bp, Artificial
  Probe
ctccagcatgccagtgattgttgtc

SEQ ID NO: 178155 - DNA, 25 bp, Artificial
  Probe
gctatgctcatgttctaggcagcaa

SEQ ID NO: 178156 - DNA, 25 bp, Artificial
  Probe
ggtgaggcccatcaccagagggcct

SEQ ID NO: 178157 - DNA, 25 bp, Artificial
  Probe
accgactccagcatgccagtgattg

SEQ ID NO: 178158 - DNA, 25 bp, Artificial
  Probe
ttctaggcagcaaggctttccagat

SEQ ID NO: 178159 - DNA, 25 bp, Artificial
  Probe
cagagggcctacctgcaaggtcctt

SEQ ID NO: 178160 - DNA, 25 bp, Artificial
  Probe
tatgctcatgttctaggcagcaagg

SEQ ID NO: 178161 - DNA, 25 bp, Artificial
  Probe
tacctgcaaggtccttgcgtggagt

SEQ ID NO: 178162 - DNA, 25 bp, Artificial
  Probe
agcatgccagtgattgttgtccttg

SEQ ID NO: 178163 - DNA, 25 bp, Artificial
  Probe
tgactggcctcagaaggcatgaaaa

SEQ ID NO: 178164 - DNA, 25 bp, Artificial
  Probe
atgctcatgttctaggcagcaaggc

SEQ ID NO: 178165 - DNA, 25 bp, Artificial
  Probe
tcaccgactccagcatgccagtgat

SEQ ID NO: 178166 - DNA, 25 bp, Artificial
  Probe
actggcctcagaaggcatgaaaaga

SEQ ID NO: 178167 - DNA, 25 bp, Artificial
  Probe
aaaggcagctatgctcatgttctag

SEQ ID NO: 178168 - DNA, 25 bp, Artificial
  Probe
catgttctaggcagcaaggctttcc

SEQ ID NO: 178169 - DNA, 25 bp, Artificial
  Probe
caaggctttccagatctctgactgg

SEQ ID NO: 178170 - DNA, 25 bp, Artificial
  Probe
cacacatacctacatctgggaaagg

SEQ ID NO: 178171 - DNA, 25 bp, Artificial
  Probe
atgttctaggcagcaaggctttcca

SEQ ID NO: 178172 - DNA, 25 bp, Artificial
  Probe
ggctccacacatacctacatctggg

SEQ ID NO: 178173 - DNA, 25 bp, Artificial
  Probe
tctgactggcctcagaaggcatgaa

SEQ ID NO: 178174 - DNA, 25 bp, Artificial
  Probe
cctacatctgggaaaggagacgctg

SEQ ID NO: 178175 - DNA, 25 bp, Artificial
  Probe
tacatctgggaaaggagacgctgct

SEQ ID NO: 178176 - DNA, 25 bp, Artificial
  Probe
tgttctaggcagcaaggctttccag

SEQ ID NO: 178177 - DNA, 25 bp, Artificial
  Probe
ggcagctatgctcatgttctaggca

SEQ ID NO: 178178 - DNA, 25 bp, Artificial
  Probe
gtccttgcgtggagtggctccacac

SEQ ID NO: 178179 - DNA, 25 bp, Artificial
  Probe
acctgcaaggtccttgcgtggagtg

SEQ ID NO: 178180 - DNA, 25 bp, Artificial
  Probe
ggcagcaaggctttccagatctctg

SEQ ID NO: 178181 - DNA, 25 bp, Artificial
  Probe
gtgaggcccatcaccagagggccta

SEQ ID NO: 178182 - DNA, 25 bp, Artificial
  Probe
cagatctctgactggcctcagaagg

SEQ ID NO: 178183 - DNA, 25 bp, Artificial
  Probe
ttccagatctctgactggcctcaga

SEQ ID NO: 178184 - DNA, 25 bp, Artificial
  Probe
ggcctacctgcaaggtccttgcgtg

SEQ ID NO: 178185 - DNA, 25 bp, Artificial
  Probe
aaggtccttgcgtggagtggctcca

SEQ ID NO: 178186 - DNA, 25 bp, Artificial
  Probe
gagtggctccacacatacctacatc

SEQ ID NO: 178187 - DNA, 25 bp, Artificial
  Probe
cacatacctacatctgggaaaggag

SEQ ID NO: 178188 - DNA, 25 bp, Artificial
  Probe
attcaccgactccagcatgccagtg

SEQ ID NO: 178189 - DNA, 25 bp, Artificial
  Probe
caccagagggcctacctgcaaggtc

SEQ ID NO: 178190 - DNA, 25 bp, Artificial
  Probe
ccgactccagcatgccagtgattgt

SEQ ID NO: 178191 - DNA, 25 bp, Artificial
  Probe
gcctcagaaggcatgaaaagacagt

SEQ ID NO: 178192 - DNA, 25 bp, Artificial
  Probe
agggcctacctgcaaggtccttgcg

SEQ ID NO: 178193 - DNA, 25 bp, Artificial
  Probe
ggctttccagatctctgactggcct

SEQ ID NO: 178194 - DNA, 25 bp, Artificial
  Probe
gtggctccacacatacctacatctg

SEQ ID NO: 178195 - DNA, 25 bp, Artificial
  Probe
cagcaaggctttccagatctctgac

SEQ ID NO: 178196 - DNA, 25 bp, Artificial
  Probe
ggagtggctccacacatacctacat

SEQ ID NO: 178197 - DNA, 25 bp, Artificial
  Probe
actgagcgtcaagacccagtcgggg

SEQ ID NO: 178198 - DNA, 25 bp, Artificial
  Probe
ggaagactgtcaacggtcacctgga

SEQ ID NO: 178199 - DNA, 25 bp, Artificial
  Probe
agaagatcccgctggtactgagccg

SEQ ID NO: 178200 - DNA, 25 bp, Artificial
  Probe
tcggtagctcccagttagcccagca

SEQ ID NO: 178201 - DNA, 25 bp, Artificial
  Probe
cccagttagcccagcagaagatagg

SEQ ID NO: 178202 - DNA, 25 bp, Artificial
  Probe
gtacccccaagagaggttactacat

SEQ ID NO: 178203 - DNA, 25 bp, Artificial
  Probe
ccagctgcctggacccattcgggag

SEQ ID NO: 178204 - DNA, 25 bp, Artificial
  Probe
agcgccacttcttcacactgagcgt

SEQ ID NO: 178205 - DNA, 25 bp, Artificial
  Probe
gcagcttttcgctgcagagtgaccc

SEQ ID NO: 178206 - DNA, 25 bp, Artificial
  Probe
gaggcacatggcacaagcacaaaaa

SEQ ID NO: 178207 - DNA, 25 bp, Artificial
  Probe
gaccaagaacctacgcatccagtgc

SEQ ID NO: 178208 - DNA, 25 bp, Artificial
  Probe
cccccaagagaggttactacatcta

SEQ ID NO: 178209 - DNA, 25 bp, Artificial
  Probe
gactcctatgagaaagtgacccagc

SEQ ID NO: 178210 - DNA, 25 bp, Artificial
  Probe
tagctcccagttagcccagcagaag

SEQ ID NO: 178211 - DNA, 25 bp, Artificial
  Probe
cctcctctgaggttcaggagcagcc

SEQ ID NO: 178212 - DNA, 25 bp, Artificial
  Probe
agaggttactacatctattctgggg

SEQ ID NO: 178213 - DNA, 25 bp, Artificial
  Probe
tcgctgcagagtgacccccggagca

SEQ ID NO: 178214 - DNA, 25 bp, Artificial
  Probe
tccactttaaagagcaaagaaaggg

SEQ ID NO: 178215 - DNA, 25 bp, Artificial
  Probe
gcctggacccattcgggagttcctg

SEQ ID NO: 178216 - DNA, 25 bp, Artificial
  Probe
tcctccgaggcacatggcacaagca

SEQ ID NO: 178217 - DNA, 25 bp, Artificial
  Probe
agaacctacgcatccagtgcgaggg

SEQ ID NO: 178218 - DNA, 25 bp, Artificial
  Probe
ctgcctggacccattcgggagttcc

SEQ ID NO: 178219 - DNA, 25 bp, Artificial
  Probe
ctgagcgtcaagacccagtcgggga

SEQ ID NO: 178220 - DNA, 25 bp, Artificial
  Probe
cagtcggggaccaagaacctacgca

SEQ ID NO: 178221 - DNA, 25 bp, Artificial
  Probe
ctaccctccagcatctttgtcggaa

SEQ ID NO: 178222 - DNA, 25 bp, Artificial
  Probe
ttcttcacactgagcgtcaagaccc

SEQ ID NO: 178223 - DNA, 25 bp, Artificial
  Probe
cccaatggtcggtagctcccagtta

SEQ ID NO: 178224 - DNA, 25 bp, Artificial
  Probe
aagtgacccagctgcctggacccat

SEQ ID NO: 178225 - DNA, 25 bp, Artificial
  Probe
gacccattcgggagttcctggacca

SEQ ID NO: 178226 - DNA, 25 bp, Artificial
  Probe
ctccgaggcacatggcacaagcaca

SEQ ID NO: 178227 - DNA, 25 bp, Artificial
  Probe
atggtcggtagctcccagttagccc

SEQ ID NO: 178228 - DNA, 25 bp, Artificial
  Probe
acgtggctaccctccagcatctttg

SEQ ID NO: 178229 - DNA, 25 bp, Artificial
  Probe
agttggtgcaccactacatgccgcc

SEQ ID NO: 178230 - DNA, 25 bp, Artificial
  Probe
aggttactacatctattctgggggc

SEQ ID NO: 178231 - DNA, 25 bp, Artificial
  Probe
gtcaagacccagtcggggaccaaga

SEQ ID NO: 178232 - DNA, 25 bp, Artificial
  Probe
ttatccgcgacagctcgggccagcg

SEQ ID NO: 178233 - DNA, 25 bp, Artificial
  Probe
tgaggttcaggagcagccacctgcc

SEQ ID NO: 178234 - DNA, 25 bp, Artificial
  Probe
tggcacaagcacaaaaatccagccc

SEQ ID NO: 178235 - DNA, 25 bp, Artificial
  Probe
ccagtgccccgctttgactgtgtac

SEQ ID NO: 178236 - DNA, 25 bp, Artificial
  Probe
tcacactgagcgtcaagacccagtc

SEQ ID NO: 178237 - DNA, 25 bp, Artificial
  Probe
gcgtcaagacccagtcggggaccaa

SEQ ID NO: 178238 - DNA, 25 bp, Artificial
  Probe
gaaagtgacccagctgcctggaccc

SEQ ID NO: 178239 - DNA, 25 bp, Artificial
  Probe
ctggaccagtatgatgctccacttt

SEQ ID NO: 178240 - DNA, 25 bp, Artificial
  Probe
ccagcatctttgtcggaagactgtc

SEQ ID NO: 178241 - DNA, 25 bp, Artificial
  Probe
ggagttcctggaccagtatgatgct

SEQ ID NO: 178242 - DNA, 25 bp, Artificial
  Probe
gatcccgctggtactgagccgacct

SEQ ID NO: 178243 - DNA, 25 bp, Artificial
  Probe
actcacataggattctgggagtccc

SEQ ID NO: 178244 - DNA, 25 bp, Artificial
  Probe
gctgtccgtgcctagggtaaaacaa

SEQ ID NO: 178245 - DNA, 25 bp, Artificial
  Probe
taggattctgggagtccctgaaacc

SEQ ID NO: 178246 - DNA, 25 bp, Artificial
  Probe
caaaccatcactgtgaggacagcag

SEQ ID NO: 178247 - DNA, 25 bp, Artificial
  Probe
ccatcactgtgaggacagcagccca

SEQ ID NO: 178248 - DNA, 25 bp, Artificial
  Probe
agtgtcacctttacaatctgggaga

SEQ ID NO: 178249 - DNA, 25 bp, Artificial
  Probe
tctgggagtccctgaaacccaatca

SEQ ID NO: 178250 - DNA, 25 bp, Artificial
  Probe
atagtgtcacctttacaatctggga

SEQ ID NO: 178251 - DNA, 25 bp, Artificial
  Probe
ctgtgaggacagcagcccaacaacc

SEQ ID NO: 178252 - DNA, 25 bp, Artificial
  Probe
accatcactgtgaggacagcagccc

SEQ ID NO: 178253 - DNA, 25 bp, Artificial
  Probe
gcagctgtcttcatgctagagaccg

SEQ ID NO: 178254 - DNA, 25 bp, Artificial
  Probe
gggagtccctgaaacccaatcatgt

SEQ ID NO: 178255 - DNA, 25 bp, Artificial
  Probe
agagtcacaaaccatcactgtgagg

SEQ ID NO: 178256 - DNA, 25 bp, Artificial
  Probe
tgtgaggacagcagcccaacaaccc

SEQ ID NO: 178257 - DNA, 25 bp, Artificial
  Probe
tggaccccatagtgtcacctttaca

SEQ ID NO: 178258 - DNA, 25 bp, Artificial
  Probe
tgctagagaccgagagtcacaaacc

SEQ ID NO: 178259 - DNA, 25 bp, Artificial
  Probe
ccatagtgtcacctttacaatctgg

SEQ ID NO: 178260 - DNA, 25 bp, Artificial
  Probe
cagctgtcttcatgctagagaccga

SEQ ID NO: 178261 - DNA, 25 bp, Artificial
  Probe
atcactgtgaggacagcagcccaac

SEQ ID NO: 178262 - DNA, 25 bp, Artificial
  Probe
tccactcacataggattctgggagt

SEQ ID NO: 178263 - DNA, 25 bp, Artificial
  Probe
cactcacataggattctgggagtcc

SEQ ID NO: 178264 - DNA, 25 bp, Artificial
  Probe
gctagagaccgagagtcacaaacca

SEQ ID NO: 178265 - DNA, 25 bp, Artificial
  Probe
agtcacaaaccatcactgtgaggac

SEQ ID NO: 178266 - DNA, 25 bp, Artificial
  Probe
ggaccccatagtgtcacctttacaa

SEQ ID NO: 178267 - DNA, 25 bp, Artificial
  Probe
ctgggagtccctgaaacccaatcat

SEQ ID NO: 178268 - DNA, 25 bp, Artificial
  Probe
cagttggaccccatagtgtcacctt

SEQ ID NO: 178269 - DNA, 25 bp, Artificial
  Probe
tcttcatgctagagaccgagagtca

SEQ ID NO: 178270 - DNA, 25 bp, Artificial
  Probe
agctgtcttcatgctagagaccgag

SEQ ID NO: 178271 - DNA, 25 bp, Artificial
  Probe
ggagtccctgaaacccaatcatgtc

SEQ ID NO: 178272 - DNA, 25 bp, Artificial
  Probe
actgtgaggacagcagcccaacaac

SEQ ID NO: 178273 - DNA, 25 bp, Artificial
  Probe
ggcagctgtcttcatgctagagacc

SEQ ID NO: 178274 - DNA, 25 bp, Artificial
  Probe
agaccgagagtcacaaaccatcact

SEQ ID NO: 178275 - DNA, 25 bp, Artificial
  Probe
ggattctgggagtccctgaaaccca

SEQ ID NO: 178276 - DNA, 25 bp, Artificial
  Probe
ttggaccccatagtgtcacctttac

SEQ ID NO: 178277 - DNA, 25 bp, Artificial
  Probe
ctagagaccgagagtcacaaaccat

SEQ ID NO: 178278 - DNA, 25 bp, Artificial
  Probe
aaaccatcactgtgaggacagcagc

SEQ ID NO: 178279 - DNA, 25 bp, Artificial
  Probe
gagtcacaaaccatcactgtgagga

SEQ ID NO: 178280 - DNA, 25 bp, Artificial
  Probe
tagagaccgagagtcacaaaccatc

SEQ ID NO: 178281 - DNA, 25 bp, Artificial
  Probe
ccgagagtcacaaaccatcactgtg

SEQ ID NO: 178282 - DNA, 25 bp, Artificial
  Probe
gtcacaaaccatcactgtgaggaca

SEQ ID NO: 178283 - DNA, 25 bp, Artificial
  Probe
tagtgtcacctttacaatctgggag

SEQ ID NO: 178284 - DNA, 25 bp, Artificial
  Probe
tcactgtgaggacagcagcccaaca

SEQ ID NO: 178285 - DNA, 25 bp, Artificial
  Probe
cctccactcacataggattctggga

SEQ ID NO: 178286 - DNA, 25 bp, Artificial
  Probe
ccactcacataggattctgggagtc

SEQ ID NO: 178287 - DNA, 25 bp, Artificial
  Probe
agttggaccccatagtgtcaccttt

SEQ ID NO: 178288 - DNA, 25 bp, Artificial
  Probe
cacaaaccatcactgtgaggacagc

SEQ ID NO: 178289 - DNA, 25 bp, Artificial
  Probe
ccagaaacaactttgtagttggtag

SEQ ID NO: 178290 - DNA, 25 bp, Artificial
  Probe
gttaagagctgctctttcagagggc

SEQ ID NO: 178291 - DNA, 25 bp, Artificial
  Probe
ccaaatggcagttcacaactggttc

SEQ ID NO: 178292 - DNA, 25 bp, Artificial
  Probe
tctgcaggcactaggcacatatatg

SEQ ID NO: 178293 - DNA, 25 bp, Artificial
  Probe
atcgaagatcattgttcagaaacca

SEQ ID NO: 178294 - DNA, 25 bp, Artificial
  Probe
acaccagaaacaactttgtagttgg

SEQ ID NO: 178295 - DNA, 25 bp, Artificial
  Probe
attaaagtttactgcagagagacca

SEQ ID NO: 178296 - DNA, 25 bp, Artificial
  Probe
agggccctaatttgattcccagtat

SEQ ID NO: 178297 - DNA, 25 bp, Artificial
  Probe
cacaccagaaacaactttgtagttg

SEQ ID NO: 178298 - DNA, 25 bp, Artificial
  Probe
tcaaagaatcatagttcctaggatt

SEQ ID NO: 178299 - DNA, 25 bp, Artificial
  Probe
agctgctctttcagagggccctaat

SEQ ID NO: 178300 - DNA, 25 bp, Artificial
  Probe
caccagaaacaactttgtagttggt

SEQ ID NO: 178301 - DNA, 25 bp, Artificial
  Probe
gcagttcacaactggttctttaatt

SEQ ID NO: 178302 - DNA, 25 bp, Artificial
  Probe
ttcagagggccctaatttgattccc

SEQ ID NO: 178303 - DNA, 25 bp, Artificial
  Probe
tttactgcagagagaccattaaccc

SEQ ID NO: 178304 - DNA, 25 bp, Artificial
  Probe
cataatcgaagatcattgttcagaa

SEQ ID NO: 178305 - DNA, 25 bp, Artificial
  Probe
atgcttcaatcgttactagttagac

SEQ ID NO: 178306 - DNA, 25 bp, Artificial
  Probe
aatggcagttcacaactggttcttt

SEQ ID NO: 178307 - DNA, 25 bp, Artificial
  Probe
caatcgttactagttagacaaaatg

SEQ ID NO: 178308 - DNA, 25 bp, Artificial
  Probe
gagagaccattaaccccttcaggaa

SEQ ID NO: 178309 - DNA, 25 bp, Artificial
  Probe
gcttcaatcgttactagttagacaa

SEQ ID NO: 178310 - DNA, 25 bp, Artificial
  Probe
cagagagaccattaaccccttcagg

SEQ ID NO: 178311 - DNA, 25 bp, Artificial
  Probe
tctttaattacagtttcaggagatc

SEQ ID NO: 178312 - DNA, 25 bp, Artificial
  Probe
agtttactgcagagagaccattaac

SEQ ID NO: 178313 - DNA, 25 bp, Artificial
  Probe
tggtgctgtggttaagagctgctct

SEQ ID NO: 178314 - DNA, 25 bp, Artificial
  Probe
ttacagtttcaggagatctgatgtc

SEQ ID NO: 178315 - DNA, 25 bp, Artificial
  Probe
gtttactgcagagagaccattaacc

SEQ ID NO: 178316 - DNA, 25 bp, Artificial
  Probe
cattgttcagaaaccagaaagattc

SEQ ID NO: 178317 - DNA, 25 bp, Artificial
  Probe
tggcagttcacaactggttctttaa

SEQ ID NO: 178318 - DNA, 25 bp, Artificial
  Probe
actggttctttaattacagtttcag

SEQ ID NO: 178319 - DNA, 25 bp, Artificial
  Probe
ggccctaatttgattcccagtatcc

SEQ ID NO: 178320 - DNA, 25 bp, Artificial
  Probe
ctggttctttaattacagtttcagg

SEQ ID NO: 178321 - DNA, 25 bp, Artificial
  Probe
atcattgttcagaaaccagaaagat

SEQ ID NO: 178322 - DNA, 25 bp, Artificial
  Probe
tggttaagagctgctctttcagagg

SEQ ID NO: 178323 - DNA, 25 bp, Artificial
  Probe
aacataatcgaagatcattgttcag

SEQ ID NO: 178324 - DNA, 25 bp, Artificial
  Probe
aagagctgctctttcagagggccct

SEQ ID NO: 178325 - DNA, 25 bp, Artificial
  Probe
acagtttcaggagatctgatgtcct

SEQ ID NO: 178326 - DNA, 25 bp, Artificial
  Probe
agatcattgttcagaaaccagaaag

SEQ ID NO: 178327 - DNA, 25 bp, Artificial
  Probe
caaagaatcatagttcctaggatta

SEQ ID NO: 178328 - DNA, 25 bp, Artificial
  Probe
atggtgctgtggttaagagctgctc

SEQ ID NO: 178329 - DNA, 25 bp, Artificial
  Probe
tgttcagaaaccagaaagattctgg

SEQ ID NO: 178330 - DNA, 25 bp, Artificial
  Probe
tactgcagagagaccattaacccct

SEQ ID NO: 178331 - DNA, 25 bp, Artificial
  Probe
cctctgcaggcactaggcacatata

SEQ ID NO: 178332 - DNA, 25 bp, Artificial
  Probe
agagctaattatactcaacacggaa

SEQ ID NO: 178333 - DNA, 25 bp, Artificial
  Probe
tatccaaatggcagttcacaactgg

SEQ ID NO: 178334 - DNA, 25 bp, Artificial
  Probe
aatcgaagatcattgttcagaaacc

SEQ ID NO: 178335 - DNA, 25 bp, Artificial
  Probe
acttaagatgacactggagaagcag

SEQ ID NO: 178336 - DNA, 25 bp, Artificial
  Probe
gcacctagtttacacacattcaggc

SEQ ID NO: 178337 - DNA, 25 bp, Artificial
  Probe
cccggcaacttaagatgacactgga

SEQ ID NO: 178338 - DNA, 25 bp, Artificial
  Probe
aaactctatggtagaatttcacatg

SEQ ID NO: 178339 - DNA, 25 bp, Artificial
  Probe
taaagtgtcactaccacacagcccg

SEQ ID NO: 178340 - DNA, 25 bp, Artificial
  Probe
caactgtctgtaacgctttttaaga

SEQ ID NO: 178341 - DNA, 25 bp, Artificial
  Probe
ctctcggaagaggagacgcccctgg

SEQ ID NO: 178342 - DNA, 25 bp, Artificial
  Probe
tttaagagtgtttccgatcccaccg

SEQ ID NO: 178343 - DNA, 25 bp, Artificial
  Probe
cacattcaggcattttgcagctatg

SEQ ID NO: 178344 - DNA, 25 bp, Artificial
  Probe
caggcattttgcagctatgtctttc

SEQ ID NO: 178345 - DNA, 25 bp, Artificial
  Probe
tcactgctctatgacgatgggctct

SEQ ID NO: 178346 - DNA, 25 bp, Artificial
  Probe
gctctatgacgatgggctctcggaa

SEQ ID NO: 178347 - DNA, 25 bp, Artificial
  Probe
acagcccggcaacttaagatgacac

SEQ ID NO: 178348 - DNA, 25 bp, Artificial
  Probe
agtttacacacattcaggcattttg

SEQ ID NO: 178349 - DNA, 25 bp, Artificial
  Probe
cagctatgtctttctaaaaggatgt

SEQ ID NO: 178350 - DNA, 25 bp, Artificial
  Probe
ggctctcggaagaggagacgcccct

SEQ ID NO: 178351 - DNA, 25 bp, Artificial
  Probe
gcccggcaacttaagatgacactgg

SEQ ID NO: 178352 - DNA, 25 bp, Artificial
  Probe
ccaactgtctgtaacgctttttaag

SEQ ID NO: 178353 - DNA, 25 bp, Artificial
  Probe
tagattctagcaacgcagtcccctc

SEQ ID NO: 178354 - DNA, 25 bp, Artificial
  Probe
actagattctagcaacgcagtcccc

SEQ ID NO: 178355 - DNA, 25 bp, Artificial
  Probe
gcattttgcagctatgtctttctaa

SEQ ID NO: 178356 - DNA, 25 bp, Artificial
  Probe
gcagctatgtctttctaaaaggatg

SEQ ID NO: 178357 - DNA, 25 bp, Artificial
  Probe
ggactcactgctctatgacgatggg

SEQ ID NO: 178358 - DNA, 25 bp, Artificial
  Probe
aggagacgcccctggtggactgtaa

SEQ ID NO: 178359 - DNA, 25 bp, Artificial
  Probe
tgtaaatatccgactttgcacctag

SEQ ID NO: 178360 - DNA, 25 bp, Artificial
  Probe
tgcacctagtttacacacattcagg

SEQ ID NO: 178361 - DNA, 25 bp, Artificial
  Probe
cattcaggcattttgcagctatgtc

SEQ ID NO: 178362 - DNA, 25 bp, Artificial
  Probe
tttgcagctatgtctttctaaaagg

SEQ ID NO: 178363 - DNA, 25 bp, Artificial
  Probe
gcatttactagattctagcaacgca

SEQ ID NO: 178364 - DNA, 25 bp, Artificial
  Probe
gtagaatttcacatgcatttactag

SEQ ID NO: 178365 - DNA, 25 bp, Artificial
  Probe
gcaacttaagatgacactggagaag

SEQ ID NO: 178366 - DNA, 25 bp, Artificial
  Probe
agacgcccctggtggactgtaacag

SEQ ID NO: 178367 - DNA, 25 bp, Artificial
  Probe
cccctggtggactgtaacagtgctc

SEQ ID NO: 178368 - DNA, 25 bp, Artificial
  Probe
acgcccctggtggactgtaacagtg

SEQ ID NO: 178369 - DNA, 25 bp, Artificial
  Probe
ttacacacattcaggcattttgcag

SEQ ID NO: 178370 - DNA, 25 bp, Artificial
  Probe
cctggtggactgtaacagtgctccc

SEQ ID NO: 178371 - DNA, 25 bp, Artificial
  Probe
cttcggactcactgctctatgacga

SEQ ID NO: 178372 - DNA, 25 bp, Artificial
  Probe
acacattcaggcattttgcagctat

SEQ ID NO: 178373 - DNA, 25 bp, Artificial
  Probe
atgcatttactagattctagcaacg

SEQ ID NO: 178374 - DNA, 25 bp, Artificial
  Probe
aaagtgtcactaccacacagcccgg

SEQ ID NO: 178375 - DNA, 25 bp, Artificial
  Probe
ttttgcagctatgtctttctaaaag

SEQ ID NO: 178376 - DNA, 25 bp, Artificial
  Probe
gtttacacacattcaggcattttgc

SEQ ID NO: 178377 - DNA, 25 bp, Artificial
  Probe
actcactgctctatgacgatgggct

SEQ ID NO: 178378 - DNA, 25 bp, Artificial
  Probe
gtaaatatccgactttgcacctagt

SEQ ID NO: 178379 - DNA, 25 bp, Artificial
  Probe
ttactagattctagcaacgcagtcc

SEQ ID NO: 178380 - DNA, 25 bp, Artificial
  Probe
ctgctctatgacgatgggctctcgg

SEQ ID NO: 178381 - DNA, 25 bp, Artificial
  Probe
aggcagacccagtatgaaatagtaa

SEQ ID NO: 178382 - DNA, 25 bp, Artificial
  Probe
cctggtaaggcagacccagtatgaa

SEQ ID NO: 178383 - DNA, 25 bp, Artificial
  Probe
agcttttcctggtaaggcagaccca

SEQ ID NO: 178384 - DNA, 25 bp, Artificial
  Probe
aaggcagacccagtatgaaatagta

SEQ ID NO: 178385 - DNA, 25 bp, Artificial
  Probe
tataatagcttttcctggtaaggca

SEQ ID NO: 178386 - DNA, 25 bp, Artificial
  Probe
gttgaaatccattcagtttccatgt

SEQ ID NO: 178387 - DNA, 25 bp, Artificial
  Probe
tgaaatagtaaccatttgggctata

SEQ ID NO: 178388 - DNA, 25 bp, Artificial
  Probe
gtaaggcagacccagtatgaaatag

SEQ ID NO: 178389 - DNA, 25 bp, Artificial
  Probe
agattcctataatagcttttcctgg

SEQ ID NO: 178390 - DNA, 25 bp, Artificial
  Probe
ggcagacccagtatgaaatagtaac

SEQ ID NO: 178391 - DNA, 25 bp, Artificial
  Probe
ctataatagcttttcctggtaaggc

SEQ ID NO: 178392 - DNA, 25 bp, Artificial
  Probe
cagtttccatgttagctaagttact

SEQ ID NO: 178393 - DNA, 25 bp, Artificial
  Probe
gttactgtaagattcctataatagc

SEQ ID NO: 178394 - DNA, 25 bp, Artificial
  Probe
gcttttcctggtaaggcagacccag

SEQ ID NO: 178395 - DNA, 25 bp, Artificial
  Probe
aatagcttttcctggtaaggcagac

SEQ ID NO: 178396 - DNA, 25 bp, Artificial
  Probe
gcagacccagtatgaaatagtaacc

SEQ ID NO: 178397 - DNA, 25 bp, Artificial
  Probe
attcagtttccatgttagctaagtt

SEQ ID NO: 178398 - DNA, 25 bp, Artificial
  Probe
gaaatccattcagtttccatgttag

SEQ ID NO: 178399 - DNA, 25 bp, Artificial
  Probe
tcctggtaaggcagacccagtatga

SEQ ID NO: 178400 - DNA, 25 bp, Artificial
  Probe
agtttccatgttagctaagttactg

SEQ ID NO: 178401 - DNA, 25 bp, Artificial
  Probe
ttcagtttccatgttagctaagtta

SEQ ID NO: 178402 - DNA, 25 bp, Artificial
  Probe
cagacccagtatgaaatagtaacca

SEQ ID NO: 178403 - DNA, 25 bp, Artificial
  Probe
ctggtaaggcagacccagtatgaaa

SEQ ID NO: 178404 - DNA, 25 bp, Artificial
  Probe
agacccagtatgaaatagtaaccat

SEQ ID NO: 178405 - DNA, 25 bp, Artificial
  Probe
ttccatgttagctaagttactgtaa

SEQ ID NO: 178406 - DNA, 25 bp, Artificial
  Probe
tcagtttccatgttagctaagttac

SEQ ID NO: 178407 - DNA, 25 bp, Artificial
  Probe
tgttgaaatccattcagtttccatg

SEQ ID NO: 178408 - DNA, 25 bp, Artificial
  Probe
ccatttgggctatatttacatgcta

SEQ ID NO: 178409 - DNA, 25 bp, Artificial
  Probe
atttgggctatatttacatgctact

SEQ ID NO: 178410 - DNA, 25 bp, Artificial
  Probe
gttagctaagttactgtaagattcc

SEQ ID NO: 178411 - DNA, 25 bp, Artificial
  Probe
tagcttttcctggtaaggcagaccc

SEQ ID NO: 178412 - DNA, 25 bp, Artificial
  Probe
gattcctataatagcttttcctggt

SEQ ID NO: 178413 - DNA, 25 bp, Artificial
  Probe
tccatgttagctaagttactgtaag

SEQ ID NO: 178414 - DNA, 25 bp, Artificial
  Probe
tcctataatagcttttcctggtaag

SEQ ID NO: 178415 - DNA, 25 bp, Artificial
  Probe
atagcttttcctggtaaggcagacc

SEQ ID NO: 178416 - DNA, 25 bp, Artificial
  Probe
taaggcagacccagtatgaaatagt

SEQ ID NO: 178417 - DNA, 25 bp, Artificial
  Probe
ccattcagtttccatgttagctaag

SEQ ID NO: 178418 - DNA, 25 bp, Artificial
  Probe
tttccatgttagctaagttactgta

SEQ ID NO: 178419 - DNA, 25 bp, Artificial
  Probe
ccatgttagctaagttactgtaaga

SEQ ID NO: 178420 - DNA, 25 bp, Artificial
  Probe
gtttccatgttagctaagttactgt

SEQ ID NO: 178421 - DNA, 25 bp, Artificial
  Probe
accatttgggctatatttacatgct

SEQ ID NO: 178422 - DNA, 25 bp, Artificial
  Probe
cctataatagcttttcctggtaagg

SEQ ID NO: 178423 - DNA, 25 bp, Artificial
  Probe
taatagcttttcctggtaaggcaga

SEQ ID NO: 178424 - DNA, 25 bp, Artificial
  Probe
tccattcagtttccatgttagctaa

SEQ ID NO: 178425 - DNA, 25 bp, Artificial
  Probe
cattcagtttccatgttagctaagt

SEQ ID NO: 178426 - DNA, 25 bp, Artificial
  Probe
aaccatttgggctatatttacatgc

SEQ ID NO: 178427 - DNA, 25 bp, Artificial
  Probe
cggccttgccacaaccgtgagaagg

SEQ ID NO: 178428 - DNA, 25 bp, Artificial
  Probe
tccatgctgcggattctgtggtgag

SEQ ID NO: 178429 - DNA, 25 bp, Artificial
  Probe
aggcaggcacctatgccggccttgc

SEQ ID NO: 178430 - DNA, 25 bp, Artificial
  Probe
gccacgacaagatgggcattcccat

SEQ ID NO: 178431 - DNA, 25 bp, Artificial
  Probe
acaaccgtgagaaggccaagggcct

SEQ ID NO: 178432 - DNA, 25 bp, Artificial
  Probe
acctgggctttgagaagaacgcagg

SEQ ID NO: 178433 - DNA, 25 bp, Artificial
  Probe
cacttcagctgctcccactgtggga

SEQ ID NO: 178434 - DNA, 25 bp, Artificial
  Probe
tcccactgtgggaaggagctgacct

SEQ ID NO: 178435 - DNA, 25 bp, Artificial
  Probe
cattcccatctgtggggcttgccgc

SEQ ID NO: 178436 - DNA, 25 bp, Artificial
  Probe
ccactgtgggaaggagctgacctct

SEQ ID NO: 178437 - DNA, 25 bp, Artificial
  Probe
gtgatcaaggccatgaacgccaact

SEQ ID NO: 178438 - DNA, 25 bp, Artificial
  Probe
attctgtggtgagtttgtcatcggc

SEQ ID NO: 178439 - DNA, 25 bp, Artificial
  Probe
ggaaggagctgacctctgatgcccg

SEQ ID NO: 178440 - DNA, 25 bp, Artificial
  Probe
tcatcggccgcgtgatcaaggccat

SEQ ID NO: 178441 - DNA, 25 bp, Artificial
  Probe
gccgcgtgatcaaggccatgaacgc

SEQ ID NO: 178442 - DNA, 25 bp, Artificial
  Probe
gctgacctctgatgcccgagagctg

SEQ ID NO: 178443 - DNA, 25 bp, Artificial
  Probe
atgggcattcccatctgtggggctt

SEQ ID NO: 178444 - DNA, 25 bp, Artificial
  Probe
agctggctgacctgggctttgagaa

SEQ ID NO: 178445 - DNA, 25 bp, Artificial
  Probe
tggcatccgggctgcttccgctgtg

SEQ ID NO: 178446 - DNA, 25 bp, Artificial
  Probe
gccatgaacgccaactggcatccgg

SEQ ID NO: 178447 - DNA, 25 bp, Artificial
  Probe
gtgagtttgtcatcggccgcgtgat

SEQ ID NO: 178448 - DNA, 25 bp, Artificial
  Probe
gcaggcaggcacctatgccggcctt

SEQ ID NO: 178449 - DNA, 25 bp, Artificial
  Probe
ttcgctccatgctgcggattctgtg

SEQ ID NO: 178450 - DNA, 25 bp, Artificial
  Probe
catgctgcggattctgtggtgagtt

SEQ ID NO: 178451 - DNA, 25 bp, Artificial
  Probe
tactgcctgccttgccacgacaaga

SEQ ID NO: 178452 - DNA, 25 bp, Artificial
  Probe
ttgccacaaccgtgagaaggccaag

SEQ ID NO: 178453 - DNA, 25 bp, Artificial
  Probe
acgccaactggcatccgggctgctt

SEQ ID NO: 178454 - DNA, 25 bp, Artificial
  Probe
aggccaagggcctgggcaaatgcat

SEQ ID NO: 178455 - DNA, 25 bp, Artificial
  Probe
ctctgatgcccgagagctgaagggt

SEQ ID NO: 178456 - DNA, 25 bp, Artificial
  Probe
ctgctcccactgtgggaaggagctg

SEQ ID NO: 178457 - DNA, 25 bp, Artificial
  Probe
gccggccttgccacaaccgtgagaa

SEQ ID NO: 178458 - DNA, 25 bp, Artificial
  Probe
ctgcggattctgtggtgagtttgtc

SEQ ID NO: 178459 - DNA, 25 bp, Artificial
  Probe
gctgcttccgctgtgagctgtgcga

SEQ ID NO: 178460 - DNA, 25 bp, Artificial
  Probe
aagggcctgggcaaatgcatctgcc

SEQ ID NO: 178461 - DNA, 25 bp, Artificial
  Probe
tcaaggccatgaacgccaactggca

SEQ ID NO: 178462 - DNA, 25 bp, Artificial
  Probe
gctgacctgggctttgagaagaacg

SEQ ID NO: 178463 - DNA, 25 bp, Artificial
  Probe
cttccgctgtgagctgtgcgacgtg

SEQ ID NO: 178464 - DNA, 25 bp, Artificial
  Probe
agagctgaagggtgagctctactgc

SEQ ID NO: 178465 - DNA, 25 bp, Artificial
  Probe
tccaaatgctgttcgctccatgctg

SEQ ID NO: 178466 - DNA, 25 bp, Artificial
  Probe
atccgggctgcttccgctgtgagct

SEQ ID NO: 178467 - DNA, 25 bp, Artificial
  Probe
ggtgagctctactgcctgccttgcc

SEQ ID NO: 178468 - DNA, 25 bp, Artificial
  Probe
cggattctgtggtgagtttgtcatc

SEQ ID NO: 178469 - DNA, 25 bp, Artificial
  Probe
tcacctcgacattgatgagcagccc

SEQ ID NO: 178470 - DNA, 25 bp, Artificial
  Probe
atctgtggggcttgccgccggccca

SEQ ID NO: 178471 - DNA, 25 bp, Artificial
  Probe
ctgtggtgagtttgtcatcggccgc

SEQ ID NO: 178472 - DNA, 25 bp, Artificial
  Probe
cccgagagctgaagggtgagctcta

SEQ ID NO: 178473 - DNA, 25 bp, Artificial
  Probe
tcaatgttctgcatacaccttgatg

SEQ ID NO: 178474 - DNA, 25 bp, Artificial
  Probe
gcgcctcctcgttaaatacaaacgt

SEQ ID NO: 178475 - DNA, 25 bp, Artificial
  Probe
caggtcatctgaaggggctcatcca

SEQ ID NO: 178476 - DNA, 25 bp, Artificial
  Probe
gaacagcttcagaacaaatctaatg

SEQ ID NO: 178477 - DNA, 25 bp, Artificial
  Probe
aagatgctctgtaacacagaaccat

SEQ ID NO: 178478 - DNA, 25 bp, Artificial
  Probe
cagtgacttcaaatcccagaaagca

SEQ ID NO: 178479 - DNA, 25 bp, Artificial
  Probe
ctcgttaaatacaaacgtcactgtg

SEQ ID NO: 178480 - DNA, 25 bp, Artificial
  Probe
gaacctcatgtcacctatgtatgaa

SEQ ID NO: 178481 - DNA, 25 bp, Artificial
  Probe
gcactgcatcaatgttctgcataca

SEQ ID NO: 178482 - DNA, 25 bp, Artificial
  Probe
gtgtaaagcgcctcctcgttaaata

SEQ ID NO: 178483 - DNA, 25 bp, Artificial
  Probe
gctccaagaaccaaacaaggattac

SEQ ID NO: 178484 - DNA, 25 bp, Artificial
  Probe
atgttctgcatacaccttgatgcaa

SEQ ID NO: 178485 - DNA, 25 bp, Artificial
  Probe
caccttgatgcaaaggaaatcttaa

SEQ ID NO: 178486 - DNA, 25 bp, Artificial
  Probe
aaggggctcatccacttcctgctct

SEQ ID NO: 178487 - DNA, 25 bp, Artificial
  Probe
acaccaaaaagtacagtgtaaagcg

SEQ ID NO: 178488 - DNA, 25 bp, Artificial
  Probe
agttttcctccgtgacctcgtgttg

SEQ ID NO: 178489 - DNA, 25 bp, Artificial
  Probe
aaggctccaagaaccaaacaaggat

SEQ ID NO: 178490 - DNA, 25 bp, Artificial
  Probe
gcatcaatgttctgcatacaccttg

SEQ ID NO: 178491 - DNA, 25 bp, Artificial
  Probe
tcacctatgtatgaaatggtcaaaa

SEQ ID NO: 178492 - DNA, 25 bp, Artificial
  Probe
aatacaaacgtcactgtgatgcact

SEQ ID NO: 178493 - DNA, 25 bp, Artificial
  Probe
tccttagttttcctccgtgacctcg

SEQ ID NO: 178494 - DNA, 25 bp, Artificial
  Probe
gattactacagtcacattccgagaa

SEQ ID NO: 178495 - DNA, 25 bp, Artificial
  Probe
ctgtgatgcactgcatcaatgttct

SEQ ID NO: 178496 - DNA, 25 bp, Artificial
  Probe
gaaccaaacaaggattactacagtc

SEQ ID NO: 178497 - DNA, 25 bp, Artificial
  Probe
tttagctgatcagtgacttcaaatc

SEQ ID NO: 178498 - DNA, 25 bp, Artificial
  Probe
agtcacattccgagaaaggaaattt

SEQ ID NO: 178499 - DNA, 25 bp, Artificial
  Probe
gatttagctgatcagtgacttcaaa

SEQ ID NO: 178500 - DNA, 25 bp, Artificial
  Probe
ctgcatacaccttgatgcaaaggaa

SEQ ID NO: 178501 - DNA, 25 bp, Artificial
  Probe
gaaatcttaagttgcaccctgttta

SEQ ID NO: 178502 - DNA, 25 bp, Artificial
  Probe
ctacagtcacattccgagaaaggaa

SEQ ID NO: 178503 - DNA, 25 bp, Artificial
  Probe
gggctcatccacttcctgctctgta

SEQ ID NO: 178504 - DNA, 25 bp, Artificial
  Probe
aaccacaagatgctctgtaacacag

SEQ ID NO: 178505 - DNA, 25 bp, Artificial
  Probe
taaatacaaacgtcactgtgatgca

SEQ ID NO: 178506 - DNA, 25 bp, Artificial
  Probe
agcgcctcctcgttaaatacaaacg

SEQ ID NO: 178507 - DNA, 25 bp, Artificial
  Probe
gagatttagctgatcagtgacttca

SEQ ID NO: 178508 - DNA, 25 bp, Artificial
  Probe
cgtcactgtgatgcactgcatcaat

SEQ ID NO: 178509 - DNA, 25 bp, Artificial
  Probe
tgcactgcatcaatgttctgcatac

SEQ ID NO: 178510 - DNA, 25 bp, Artificial
  Probe
gtaaagcgcctcctcgttaaataca

SEQ ID NO: 178511 - DNA, 25 bp, Artificial
  Probe
caaacgtcactgtgatgcactgcat

SEQ ID NO: 178512 - DNA, 25 bp, Artificial
  Probe
tacaaacgtcactgtgatgcactgc

SEQ ID NO: 178513 - DNA, 25 bp, Artificial
  Probe
ggattactacagtcacattccgaga

SEQ ID NO: 178514 - DNA, 25 bp, Artificial
  Probe
cctcatgtcacctatgtatgaaatg

SEQ ID NO: 178515 - DNA, 25 bp, Artificial
  Probe
agtgacttcaaatcccagaaagcat

SEQ ID NO: 178516 - DNA, 25 bp, Artificial
  Probe
tgaaggggctcatccacttcctgct

SEQ ID NO: 178517 - DNA, 25 bp, Artificial
  Probe
ttactacagtcacattccgagaaag

SEQ ID NO: 178518 - DNA, 25 bp, Artificial
  Probe
tgatgcactgcatcaatgttctgca

SEQ ID NO: 178519 - DNA, 25 bp, Artificial
  Probe
atattcagcgggatgaactggcacc

SEQ ID NO: 178520 - DNA, 25 bp, Artificial
  Probe
tgcgcaagaagaaaccctatggcac

SEQ ID NO: 178521 - DNA, 25 bp, Artificial
  Probe
ttcagcgggatgaactggcaccagc

SEQ ID NO: 178522 - DNA, 25 bp, Artificial
  Probe
aggctccctcattgtcctatccttg

SEQ ID NO: 178523 - DNA, 25 bp, Artificial
  Probe
gagaggccttgtcaggtctgctgat

SEQ ID NO: 178524 - DNA, 25 bp, Artificial
  Probe
aactggcaccagctgggactggagt

SEQ ID NO: 178525 - DNA, 25 bp, Artificial
  Probe
tggaagaacgaccttgaccccaact

SEQ ID NO: 178526 - DNA, 25 bp, Artificial
  Probe
tctgggtcccagtgtatgtcacccc

SEQ ID NO: 178527 - DNA, 25 bp, Artificial
  Probe
agaacgaccttgaccccaactctag

SEQ ID NO: 178528 - DNA, 25 bp, Artificial
  Probe
gaagaaaccctatggcactatcagc

SEQ ID NO: 178529 - DNA, 25 bp, Artificial
  Probe
cagaggcatggctatgagaacccca

SEQ ID NO: 178530 - DNA, 25 bp, Artificial
  Probe
ccttgtcaggtctgctgatcatggg

SEQ ID NO: 178531 - DNA, 25 bp, Artificial
  Probe
aacttcagaggcatggctatgagaa

SEQ ID NO: 178532 - DNA, 25 bp, Artificial
  Probe
aaaccctatggcactatcagccatg

SEQ ID NO: 178533 - DNA, 25 bp, Artificial
  Probe
aggagcagcagctccgggaacttca

SEQ ID NO: 178534 - DNA, 25 bp, Artificial
  Probe
gaggagcagcagctccgggaacttc

SEQ ID NO: 178535 - DNA, 25 bp, Artificial
  Probe
acttcagaggcatggctatgagaac

SEQ ID NO: 178536 - DNA, 25 bp, Artificial
  Probe
atccttgctgcttctgcgcaagaag

SEQ ID NO: 178537 - DNA, 25 bp, Artificial
  Probe
agcagctccgggaacttcagaggca

SEQ ID NO: 178538 - DNA, 25 bp, Artificial
  Probe
tcccgagaggccttgtcaggtctgc

SEQ ID NO: 178539 - DNA, 25 bp, Artificial
  Probe
ggatgaactggcaccagctgggact

SEQ ID NO: 178540 - DNA, 25 bp, Artificial
  Probe
gtgaccaccatctgggtcccagtgt

SEQ ID NO: 178541 - DNA, 25 bp, Artificial
  Probe
ctgcttctgcgcaagaagaaaccct

SEQ ID NO: 178542 - DNA, 25 bp, Artificial
  Probe
agaagaaaccctatggcactatcag

SEQ ID NO: 178543 - DNA, 25 bp, Artificial
  Probe
cattgtcctatccttgctgcttctg

SEQ ID NO: 178544 - DNA, 25 bp, Artificial
  Probe
catcagatattcagcgggatgaact

SEQ ID NO: 178545 - DNA, 25 bp, Artificial
  Probe
tggaattcaccgtcccacgtttctt

SEQ ID NO: 178546 - DNA, 25 bp, Artificial
  Probe
ccaccatctgggtcccagtgtatgt

SEQ ID NO: 178547 - DNA, 25 bp, Artificial
  Probe
gaggtggaccccatgctgaccctgg

SEQ ID NO: 178548 - DNA, 25 bp, Artificial
  Probe
tcaggtctgctgatcatgggagctg

SEQ ID NO: 178549 - DNA, 25 bp, Artificial
  Probe
aatttattgctccttaaggtgacca

SEQ ID NO: 178550 - DNA, 25 bp, Artificial
  Probe
catctgggtcccagtgtatgtcacc

SEQ ID NO: 178551 - DNA, 25 bp, Artificial
  Probe
cgggaacttcagaggcatggctatg

SEQ ID NO: 178552 - DNA, 25 bp, Artificial
  Probe
gaggaggctccctcattgtcctatc

SEQ ID NO: 178553 - DNA, 25 bp, Artificial
  Probe
ccttgctgcttctgcgcaagaagaa

SEQ ID NO: 178554 - DNA, 25 bp, Artificial
  Probe
tatggcactatcagccatggagtgg

SEQ ID NO: 178555 - DNA, 25 bp, Artificial
  Probe
agctgccttcagctgaaccctactg

SEQ ID NO: 178556 - DNA, 25 bp, Artificial
  Probe
tcctggaagaacgaccttgacccca

SEQ ID NO: 178557 - DNA, 25 bp, Artificial
  Probe
caccagctgggactggagtgtcccg

SEQ ID NO: 178558 - DNA, 25 bp, Artificial
  Probe
aggccttgtcaggtctgctgatcat

SEQ ID NO: 178559 - DNA, 25 bp, Artificial
  Probe
gaccccatgctgaccctggaggagc

SEQ ID NO: 178560 - DNA, 25 bp, Artificial
  Probe
cacctaccgcttcctggaagaacga

SEQ ID NO: 178561 - DNA, 25 bp, Artificial
  Probe
tctagctgccttcagctgaacccta

SEQ ID NO: 178562 - DNA, 25 bp, Artificial
  Probe
gaagaacgaccttgaccccaactct

SEQ ID NO: 178563 - DNA, 25 bp, Artificial
  Probe
tggagtgtcccgagaggccttgtca

SEQ ID NO: 178564 - DNA, 25 bp, Artificial
  Probe
tgtcaggtctgctgatcatgggagc

SEQ ID NO: 178565 - DNA, 25 bp, Artificial
  Probe
acacagggtacagaggctgaagatg

SEQ ID NO: 178566 - DNA, 25 bp, Artificial
  Probe
caagtccccgaggaggctccgcgtt

SEQ ID NO: 178567 - DNA, 25 bp, Artificial
  Probe
gcgaatgcacacagggtacagaggc

SEQ ID NO: 178568 - DNA, 25 bp, Artificial
  Probe
acgcgaatgcacacagggtacagag

SEQ ID NO: 178569 - DNA, 25 bp, Artificial
  Probe
tctcttggctggtcaagtgttattt

SEQ ID NO: 178570 - DNA, 25 bp, Artificial
  Probe
attgggattgaacctctatgcctgt

SEQ ID NO: 178571 - DNA, 25 bp, Artificial
  Probe
tttcacgcgaatgcacacagggtac

SEQ ID NO: 178572 - DNA, 25 bp, Artificial
  Probe
attcccgcaggctgaaccagaagag

SEQ ID NO: 178573 - DNA, 25 bp, Artificial
  Probe
attgaacctctatgcctgtccgtgc

SEQ ID NO: 178574 - DNA, 25 bp, Artificial
  Probe
acgtagcccctttagatttcacgcg

SEQ ID NO: 178575 - DNA, 25 bp, Artificial
  Probe
cccgcaggctgaaccagaagagtag

SEQ ID NO: 178576 - DNA, 25 bp, Artificial
  Probe
agatttcacgcgaatgcacacaggg

SEQ ID NO: 178577 - DNA, 25 bp, Artificial
  Probe
ttctcttggctggtcaagtgttatt

SEQ ID NO: 178578 - DNA, 25 bp, Artificial
  Probe
ttttctcttggctggtcaagtgtta

SEQ ID NO: 178579 - DNA, 25 bp, Artificial
  Probe
tgggattgaacctctatgcctgtcc

SEQ ID NO: 178580 - DNA, 25 bp, Artificial
  Probe
tggagcttttcaggaagcaacacac

SEQ ID NO: 178581 - DNA, 25 bp, Artificial
  Probe
gattgaacctctatgcctgtccgtg

SEQ ID NO: 178582 - DNA, 25 bp, Artificial
  Probe
tgatgggtaacgtagcccctttaga

SEQ ID NO: 178583 - DNA, 25 bp, Artificial
  Probe
ccctttagatttcacgcgaatgcac

SEQ ID NO: 178584 - DNA, 25 bp, Artificial
  Probe
ggaagcaacacacatctcattcccg

SEQ ID NO: 178585 - DNA, 25 bp, Artificial
  Probe
cgcaggctgaaccagaagagtagag

SEQ ID NO: 178586 - DNA, 25 bp, Artificial
  Probe
aggctgaaccagaagagtagagaac

SEQ ID NO: 178587 - DNA, 25 bp, Artificial
  Probe
cttggctggtcaagtgttatttaac

SEQ ID NO: 178588 - DNA, 25 bp, Artificial
  Probe
gatgggtaacgtagcccctttagat

SEQ ID NO: 178589 - DNA, 25 bp, Artificial
  Probe
atgcacacagggtacagaggctgaa

SEQ ID NO: 178590 - DNA, 25 bp, Artificial
  Probe
aagtccccgaggaggctccgcgttg

SEQ ID NO: 178591 - DNA, 25 bp, Artificial
  Probe
taacgtagcccctttagatttcacg

SEQ ID NO: 178592 - DNA, 25 bp, Artificial
  Probe
gagcttttcaggaagcaacacacat

SEQ ID NO: 178593 - DNA, 25 bp, Artificial
  Probe
ggctccgcgttgagaaactgttgag

SEQ ID NO: 178594 - DNA, 25 bp, Artificial
  Probe
aggctccgcgttgagaaactgttga

SEQ ID NO: 178595 - DNA, 25 bp, Artificial
  Probe
tcccgcaggctgaaccagaagagta

SEQ ID NO: 178596 - DNA, 25 bp, Artificial
  Probe
aactggagcttttcaggaagcaaca

SEQ ID NO: 178597 - DNA, 25 bp, Artificial
  Probe
taactggagcttttcaggaagcaac

SEQ ID NO: 178598 - DNA, 25 bp, Artificial
  Probe
tatgcctgtccgtgctccttaaata

SEQ ID NO: 178599 - DNA, 25 bp, Artificial
  Probe
ccccgaggaggctccgcgttgagaa

SEQ ID NO: 178600 - DNA, 25 bp, Artificial
  Probe
cacagggtacagaggctgaagatga

SEQ ID NO: 178601 - DNA, 25 bp, Artificial
  Probe
gcttttcaggaagcaacacacatct

SEQ ID NO: 178602 - DNA, 25 bp, Artificial
  Probe
ctcttggctggtcaagtgttattta

SEQ ID NO: 178603 - DNA, 25 bp, Artificial
  Probe
gcaggctgaaccagaagagtagaga

SEQ ID NO: 178604 - DNA, 25 bp, Artificial
  Probe
ctggagcttttcaggaagcaacaca

SEQ ID NO: 178605 - DNA, 25 bp, Artificial
  Probe
cgtagcccctttagatttcacgcga

SEQ ID NO: 178606 - DNA, 25 bp, Artificial
  Probe
cacacagggtacagaggctgaagat

SEQ ID NO: 178607 - DNA, 25 bp, Artificial
  Probe
tccgcgttgagaaactgttgagtgt

SEQ ID NO: 178608 - DNA, 25 bp, Artificial
  Probe
ggaggctccgcgttgagaaactgtt

SEQ ID NO: 178609 - DNA, 25 bp, Artificial
  Probe
gtagcccctttagatttcacgcgaa

SEQ ID NO: 178610 - DNA, 25 bp, Artificial
  Probe
cctttagatttcacgcgaatgcaca

SEQ ID NO: 178611 - DNA, 25 bp, Artificial
  Probe
cactggcacgagagcgccttgacac

SEQ ID NO: 178612 - DNA, 25 bp, Artificial
  Probe
tctcatggatctgtagtatgttctg

SEQ ID NO: 178613 - DNA, 25 bp, Artificial
  Probe
atttctcttcactggcacgagagcg

SEQ ID NO: 178614 - DNA, 25 bp, Artificial
  Probe
ccttgacacctgttctaagcaagca

SEQ ID NO: 178615 - DNA, 25 bp, Artificial
  Probe
gtttacctacgcaggaattgactgt

SEQ ID NO: 178616 - DNA, 25 bp, Artificial
  Probe
gaattgactgttctgctgaagaagc

SEQ ID NO: 178617 - DNA, 25 bp, Artificial
  Probe
tcatcatatagctctcatggatctg

SEQ ID NO: 178618 - DNA, 25 bp, Artificial
  Probe
tatgtgtttgggaccctcatcatat

SEQ ID NO: 178619 - DNA, 25 bp, Artificial
  Probe
gaatgcctgcttgtggtttcatata

SEQ ID NO: 178620 - DNA, 25 bp, Artificial
  Probe
tctgctgaagaagcagcctagggca

SEQ ID NO: 178621 - DNA, 25 bp, Artificial
  Probe
ctacgcaggaattgactgttctgct

SEQ ID NO: 178622 - DNA, 25 bp, Artificial
  Probe
tgacacctgttctaagcaagcaacc

SEQ ID NO: 178623 - DNA, 25 bp, Artificial
  Probe
agcctagggcagaatccttcctgca

SEQ ID NO: 178624 - DNA, 25 bp, Artificial
  Probe
cctgttctaagcaagcaacccactg

SEQ ID NO: 178625 - DNA, 25 bp, Artificial
  Probe
cactgccaagagatgtgatatagaa

SEQ ID NO: 178626 - DNA, 25 bp, Artificial
  Probe
caacccactgccaagagatgtgata

SEQ ID NO: 178627 - DNA, 25 bp, Artificial
  Probe
ggaccctcatcatatagctctcatg

SEQ ID NO: 178628 - DNA, 25 bp, Artificial
  Probe
atattgtgctatgtgtttgggaccc

SEQ ID NO: 178629 - DNA, 25 bp, Artificial
  Probe
gttctgactctaatatgactgtata

SEQ ID NO: 178630 - DNA, 25 bp, Artificial
  Probe
atcagaatgcctgcttgtggtttca

SEQ ID NO: 178631 - DNA, 25 bp, Artificial
  Probe
cttcactggcacgagagcgccttga

SEQ ID NO: 178632 - DNA, 25 bp, Artificial
  Probe
tctaagcaagcaacccactgccaag

SEQ ID NO: 178633 - DNA, 25 bp, Artificial
  Probe
tcatggatctgtagtatgttctgac

SEQ ID NO: 178634 - DNA, 25 bp, Artificial
  Probe
cacgagagcgccttgacacctgttc

SEQ ID NO: 178635 - DNA, 25 bp, Artificial
  Probe
ctaagatcagaatgcctgcttgtgg

SEQ ID NO: 178636 - DNA, 25 bp, Artificial
  Probe
tgctaagatcagaatgcctgcttgt

SEQ ID NO: 178637 - DNA, 25 bp, Artificial
  Probe
gcgccttgacacctgttctaagcaa

SEQ ID NO: 178638 - DNA, 25 bp, Artificial
  Probe
gactctaatatgactgtatatactg

SEQ ID NO: 178639 - DNA, 25 bp, Artificial
  Probe
tggatctgtagtatgttctgactct

SEQ ID NO: 178640 - DNA, 25 bp, Artificial
  Probe
ggatctgtagtatgttctgactcta

SEQ ID NO: 178641 - DNA, 25 bp, Artificial
  Probe
gaccctcatcatatagctctcatgg

SEQ ID NO: 178642 - DNA, 25 bp, Artificial
  Probe
agaagtttacctacgcaggaattga

SEQ ID NO: 178643 - DNA, 25 bp, Artificial
  Probe
gtgctatgtgtttgggaccctcatc

SEQ ID NO: 178644 - DNA, 25 bp, Artificial
  Probe
gacacctgttctaagcaagcaaccc

SEQ ID NO: 178645 - DNA, 25 bp, Artificial
  Probe
gttctaagcaagcaacccactgcca

SEQ ID NO: 178646 - DNA, 25 bp, Artificial
  Probe
gatcagaatgcctgcttgtggtttc

SEQ ID NO: 178647 - DNA, 25 bp, Artificial
  Probe
gaatccttcctgcatgattgccatt

SEQ ID NO: 178648 - DNA, 25 bp, Artificial
  Probe
caagcaacccactgccaagagatgt

SEQ ID NO: 178649 - DNA, 25 bp, Artificial
  Probe
ctcttcactggcacgagagcgcctt

SEQ ID NO: 178650 - DNA, 25 bp, Artificial
  Probe
agcaagcaacccactgccaagagat

SEQ ID NO: 178651 - DNA, 25 bp, Artificial
  Probe
gcagcctagggcagaatccttcctg

SEQ ID NO: 178652 - DNA, 25 bp, Artificial
  Probe
tagtatgttctgactctaatatgac

SEQ ID NO: 178653 - DNA, 25 bp, Artificial
  Probe
tgtttgggaccctcatcatatagct

SEQ ID NO: 178654 - DNA, 25 bp, Artificial
  Probe
gcatgattgccatttctcttcactg

SEQ ID NO: 178655 - DNA, 25 bp, Artificial
  Probe
ctgtagtatgttctgactctaatat

SEQ ID NO: 178656 - DNA, 25 bp, Artificial
  Probe
tctgtagtatgttctgactctaata

SEQ ID NO: 178657 - DNA, 25 bp, Artificial
  Probe
aggagacacagtgtggtcgtcattc

SEQ ID NO: 178658 - DNA, 25 bp, Artificial
  Probe
ccgatgccagtgttagtgttgaaat

SEQ ID NO: 178659 - DNA, 25 bp, Artificial
  Probe
taagaataagccaccaacttcatgg

SEQ ID NO: 178660 - DNA, 25 bp, Artificial
  Probe
tgctgggttttcaagatgtgactct

SEQ ID NO: 178661 - DNA, 25 bp, Artificial
  Probe
taagccaccaacttcatggtgtgcc

SEQ ID NO: 178662 - DNA, 25 bp, Artificial
  Probe
ttgatttgttcttgaacttccaagc

SEQ ID NO: 178663 - DNA, 25 bp, Artificial
  Probe
gtggtcgtcattcctattccctcac

SEQ ID NO: 178664 - DNA, 25 bp, Artificial
  Probe
tggacccttgttcacttctccggca

SEQ ID NO: 178665 - DNA, 25 bp, Artificial
  Probe
aacagacgcgggagaaagcctggcc

SEQ ID NO: 178666 - DNA, 25 bp, Artificial
  Probe
cagcagtaacagacgcgggagaaag

SEQ ID NO: 178667 - DNA, 25 bp, Artificial
  Probe
tggcctgctgggttttcaagatgtg

SEQ ID NO: 178668 - DNA, 25 bp, Artificial
  Probe
gtggtgccaggcaggagaacaattc

SEQ ID NO: 178669 - DNA, 25 bp, Artificial
  Probe
gtgccaggcaggagaacaattcact

SEQ ID NO: 178670 - DNA, 25 bp, Artificial
  Probe
acttgctaagacagttctcactctg

SEQ ID NO: 178671 - DNA, 25 bp, Artificial
  Probe
agaccttgagggtgtgaaagaatcc

SEQ ID NO: 178672 - DNA, 25 bp, Artificial
  Probe
tactgccccagcagtaacagacgcg

SEQ ID NO: 178673 - DNA, 25 bp, Artificial
  Probe
cataatctatggagccctagacctt

SEQ ID NO: 178674 - DNA, 25 bp, Artificial
  Probe
tctatggagccctagaccttgaggg

SEQ ID NO: 178675 - DNA, 25 bp, Artificial
  Probe
gttcttgaacttccaagctgtttcc

SEQ ID NO: 178676 - DNA, 25 bp, Artificial
  Probe
ggttttcaagatgtgactctgcata

SEQ ID NO: 178677 - DNA, 25 bp, Artificial
  Probe
cctctgaatctgattgtgggattgt

SEQ ID NO: 178678 - DNA, 25 bp, Artificial
  Probe
agcttctgctggacccttgttcact

SEQ ID NO: 178679 - DNA, 25 bp, Artificial
  Probe
gcaactgtagctggtaagaataagc

SEQ ID NO: 178680 - DNA, 25 bp, Artificial
  Probe
gaacttccaagctgtttcctctgaa

SEQ ID NO: 178681 - DNA, 25 bp, Artificial
  Probe
caactgtagctggtaagaataagcc

SEQ ID NO: 178682 - DNA, 25 bp, Artificial
  Probe
agcctggcctgctgggttttcaaga

SEQ ID NO: 178683 - DNA, 25 bp, Artificial
  Probe
gccccagcagtaacagacgcgggag

SEQ ID NO: 178684 - DNA, 25 bp, Artificial
  Probe
ctcacctgccgatgccagtgttagt

SEQ ID NO: 178685 - DNA, 25 bp, Artificial
  Probe
tgtcacctcagcagggcagcacgat

SEQ ID NO: 178686 - DNA, 25 bp, Artificial
  Probe
cctcacctgccgatgccagtgttag

SEQ ID NO: 178687 - DNA, 25 bp, Artificial
  Probe
cctcagcagggcagcacgatgagct

SEQ ID NO: 178688 - DNA, 25 bp, Artificial
  Probe
actctgcctgtcaggcctcatctta

SEQ ID NO: 178689 - DNA, 25 bp, Artificial
  Probe
cctgccgatgccagtgttagtgttg

SEQ ID NO: 178690 - DNA, 25 bp, Artificial
  Probe
ttccaagctgtttcctctgaatctg

SEQ ID NO: 178691 - DNA, 25 bp, Artificial
  Probe
acagttctcactctgcctgtcaggc

SEQ ID NO: 178692 - DNA, 25 bp, Artificial
  Probe
atggagccctagaccttgagggtgt

SEQ ID NO: 178693 - DNA, 25 bp, Artificial
  Probe
ccctagaccttgagggtgtgaaaga

SEQ ID NO: 178694 - DNA, 25 bp, Artificial
  Probe
gccaccaacttcatggtgtgcctga

SEQ ID NO: 178695 - DNA, 25 bp, Artificial
  Probe
gaccttgagggtgtgaaagaatcct

SEQ ID NO: 178696 - DNA, 25 bp, Artificial
  Probe
ggagaacaattcacttgctaagaca

SEQ ID NO: 178697 - DNA, 25 bp, Artificial
  Probe
ttgaacttccaagctgtttcctctg

SEQ ID NO: 178698 - DNA, 25 bp, Artificial
  Probe
tctgctggacccttgttcacttctc

SEQ ID NO: 178699 - DNA, 25 bp, Artificial
  Probe
gcctgtcaggcctcatcttagaagt

SEQ ID NO: 178700 - DNA, 25 bp, Artificial
  Probe
cacgaggagacacagtgtggtcgtc

SEQ ID NO: 178701 - DNA, 25 bp, Artificial
  Probe
gaacaattcacttgctaagacagtt

SEQ ID NO: 178702 - DNA, 25 bp, Artificial
  Probe
gaaagcctggcctgctgggttttca

SEQ ID NO: 178703 - DNA, 25 bp, Artificial
  Probe
tagcggtagcacctcctccgccagc

SEQ ID NO: 178704 - DNA, 25 bp, Artificial
  Probe
ctagcggtagcacctcctccgccag

SEQ ID NO: 178705 - DNA, 25 bp, Artificial
  Probe
gcttttcctagcggtagcacctcct

SEQ ID NO: 178706 - DNA, 25 bp, Artificial
  Probe
ctgcttttcctagcggtagcacctc

SEQ ID NO: 178707 - DNA, 25 bp, Artificial
  Probe
cttcctcctcagaccgcttttcccg

SEQ ID NO: 178708 - DNA, 25 bp, Artificial
  Probe
cactgcttttcctagcggtagcacc

SEQ ID NO: 178709 - DNA, 25 bp, Artificial
  Probe
tcctcagaccgcttttcccgcgagc

SEQ ID NO: 178710 - DNA, 25 bp, Artificial
  Probe
cctcactgcttttcctagcggtagc

SEQ ID NO: 178711 - DNA, 25 bp, Artificial
  Probe
ttcctagcggtagcacctcctccgc

SEQ ID NO: 178712 - DNA, 25 bp, Artificial
  Probe
ctcctcagaccgcttttcccgcgag

SEQ ID NO: 178713 - DNA, 25 bp, Artificial
  Probe
tcactgcttttcctagcggtagcac

SEQ ID NO: 178714 - DNA, 25 bp, Artificial
  Probe
tttcctagcggtagcacctcctccg

SEQ ID NO: 178715 - DNA, 25 bp, Artificial
  Probe
gaccgcttttcccgcgagccgaccg

SEQ ID NO: 178716 - DNA, 25 bp, Artificial
  Probe
tcctagcggtagcacctcctccgcc

SEQ ID NO: 178717 - DNA, 25 bp, Artificial
  Probe
ttacctcactgcttttcctagcggt

SEQ ID NO: 178718 - DNA, 25 bp, Artificial
  Probe
ttttcctagcggtagcacctcctcc

SEQ ID NO: 178719 - DNA, 25 bp, Artificial
  Probe
actgcttttcctagcggtagcacct

SEQ ID NO: 178720 - DNA, 25 bp, Artificial
  Probe
tcctcctcagaccgcttttcccgcg

SEQ ID NO: 178721 - DNA, 25 bp, Artificial
  Probe
ctcactgcttttcctagcggtagca

SEQ ID NO: 178722 - DNA, 25 bp, Artificial
  Probe
cctcagaccgcttttcccgcgagcc

SEQ ID NO: 178723 - DNA, 25 bp, Artificial
  Probe
cagaccgcttttcccgcgagccgac

SEQ ID NO: 178724 - DNA, 25 bp, Artificial
  Probe
tacctcactgcttttcctagcggta

SEQ ID NO: 178725 - DNA, 25 bp, Artificial
  Probe
cttttcctagcggtagcacctcctc

SEQ ID NO: 178726 - DNA, 25 bp, Artificial
  Probe
cttacctcactgcttttcctagcgg

SEQ ID NO: 178727 - DNA, 25 bp, Artificial
  Probe
acctcactgcttttcctagcggtag

SEQ ID NO: 178728 - DNA, 25 bp, Artificial
  Probe
tcagaccgcttttcccgcgagccga

SEQ ID NO: 178729 - DNA, 25 bp, Artificial
  Probe
gcttacctcactgcttttcctagcg

SEQ ID NO: 178730 - DNA, 25 bp, Artificial
  Probe
cctagcggtagcacctcctccgcca

SEQ ID NO: 178731 - DNA, 25 bp, Artificial
  Probe
cctcctcagaccgcttttcccgcga

SEQ ID NO: 178732 - DNA, 25 bp, Artificial
  Probe
agcggtagcacctcctccgccagct

SEQ ID NO: 178733 - DNA, 25 bp, Artificial
  Probe
ttcctcctcagaccgcttttcccgc

SEQ ID NO: 178734 - DNA, 25 bp, Artificial
  Probe
tgcttttcctagcggtagcacctcc

SEQ ID NO: 178735 - DNA, 25 bp, Artificial
  Probe
ctcagaccgcttttcccgcgagccg

SEQ ID NO: 178736 - DNA, 25 bp, Artificial
  Probe
gacagaatcatactttctggcttac

SEQ ID NO: 178737 - DNA, 25 bp, Artificial
  Probe
aggacagaatcatactttctggctt

SEQ ID NO: 178738 - DNA, 25 bp, Artificial
  Probe
acacacacacagagtcatcttgaag

SEQ ID NO: 178739 - DNA, 25 bp, Artificial
  Probe
gaaagagacctgctagtggccgtct

SEQ ID NO: 178740 - DNA, 25 bp, Artificial
  Probe
tacacatggcctcactgcccaatgt

SEQ ID NO: 178741 - DNA, 25 bp, Artificial
  Probe
aagagacctgctagtggccgtctat

SEQ ID NO: 178742 - DNA, 25 bp, Artificial
  Probe
ttgcccaggacagaatcatactttc

SEQ ID NO: 178743 - DNA, 25 bp, Artificial
  Probe
tcatatcaggactttttacttcgtg

SEQ ID NO: 178744 - DNA, 25 bp, Artificial
  Probe
gttgtacattccagaatgaaagcac

SEQ ID NO: 178745 - DNA, 25 bp, Artificial
  Probe
ctttttacttcgtgactacacatgg

SEQ ID NO: 178746 - DNA, 25 bp, Artificial
  Probe
cgtacgtctgccatgaaaatagaaa

SEQ ID NO: 178747 - DNA, 25 bp, Artificial
  Probe
ttaaagatgtctgtaacgtacgtct

SEQ ID NO: 178748 - DNA, 25 bp, Artificial
  Probe
caggactttttacttcgtgactaca

SEQ ID NO: 178749 - DNA, 25 bp, Artificial
  Probe
ttgttgtacattccagaatgaaagc

SEQ ID NO: 178750 - DNA, 25 bp, Artificial
  Probe
gtaacgtacgtctgccatgaaaata

SEQ ID NO: 178751 - DNA, 25 bp, Artificial
  Probe
aagatgtctgtaacgtacgtctgcc

SEQ ID NO: 178752 - DNA, 25 bp, Artificial
  Probe
gcctcactgcccaatgtatgagatg

SEQ ID NO: 178753 - DNA, 25 bp, Artificial
  Probe
tcttaaagatgtctgtaacgtacgt

SEQ ID NO: 178754 - DNA, 25 bp, Artificial
  Probe
ctgcccaatgtatgagatgaagatg

SEQ ID NO: 178755 - DNA, 25 bp, Artificial
  Probe
attatgtctatgaaactcacactgg

SEQ ID NO: 178756 - DNA, 25 bp, Artificial
  Probe
aaatgtgactacatgtctagctgac

SEQ ID NO: 178757 - DNA, 25 bp, Artificial
  Probe
tacattccagaatgaaagcacttgt

SEQ ID NO: 178758 - DNA, 25 bp, Artificial
  Probe
ctaaatcttaaagatgtctgtaacg

SEQ ID NO: 178759 - DNA, 25 bp, Artificial
  Probe
ttccagaatgaaagcacttgtatac

SEQ ID NO: 178760 - DNA, 25 bp, Artificial
  Probe
cgaactaaatcttaaagatgtctgt

SEQ ID NO: 178761 - DNA, 25 bp, Artificial
  Probe
cattgttgtacattccagaatgaaa

SEQ ID NO: 178762 - DNA, 25 bp, Artificial
  Probe
ccagcctggaattctaatgtcacca

SEQ ID NO: 178763 - DNA, 25 bp, Artificial
  Probe
acacatggcctcactgcccaatgta

SEQ ID NO: 178764 - DNA, 25 bp, Artificial
  Probe
cttacttttgccagcctggaattct

SEQ ID NO: 178765 - DNA, 25 bp, Artificial
  Probe
ggactttttacttcgtgactacaca

SEQ ID NO: 178766 - DNA, 25 bp, Artificial
  Probe
tcgtgactacacatggcctcactgc

SEQ ID NO: 178767 - DNA, 25 bp, Artificial
  Probe
ctggcttacttttgccagcctggaa

SEQ ID NO: 178768 - DNA, 25 bp, Artificial
  Probe
gtctagctgacttgcccaggacaga

SEQ ID NO: 178769 - DNA, 25 bp, Artificial
  Probe
cttttgccagcctggaattctaatg

SEQ ID NO: 178770 - DNA, 25 bp, Artificial
  Probe
aatcttaaagatgtctgtaacgtac

SEQ ID NO: 178771 - DNA, 25 bp, Artificial
  Probe
cactggagactaagtcttaggtgaa

SEQ ID NO: 178772 - DNA, 25 bp, Artificial
  Probe
cgtctgccatgaaaatagaaagaga

SEQ ID NO: 178773 - DNA, 25 bp, Artificial
  Probe
cacagagtcatcttgaaggaaatgt

SEQ ID NO: 178774 - DNA, 25 bp, Artificial
  Probe
cattccagaatgaaagcacttgtat

SEQ ID NO: 178775 - DNA, 25 bp, Artificial
  Probe
tagaaagagacctgctagtggccgt

SEQ ID NO: 178776 - DNA, 25 bp, Artificial
  Probe
atactttctggcttacttttgccag

SEQ ID NO: 178777 - DNA, 25 bp, Artificial
  Probe
acatggcctcactgcccaatgtatg

SEQ ID NO: 178778 - DNA, 25 bp, Artificial
  Probe
gctgacttgcccaggacagaatcat

SEQ ID NO: 178779 - DNA, 25 bp, Artificial
  Probe
acttcgtgactacacatggcctcac

SEQ ID NO: 178780 - DNA, 25 bp, Artificial
  Probe
gtatccaattgcttcttgatgactt

SEQ ID NO: 178781 - DNA, 25 bp, Artificial
  Probe
aacattgttgtacattccagaatga

SEQ ID NO: 178782 - DNA, 25 bp, Artificial
  Probe
tgaccgccagattggggaatttacg

SEQ ID NO: 178783 - DNA, 25 bp, Artificial
  Probe
gaagagaccaaaatcaacagctcca

SEQ ID NO: 178784 - DNA, 25 bp, Artificial
  Probe
ccagctccgtctgtgccaggtgtct

SEQ ID NO: 178785 - DNA, 25 bp, Artificial
  Probe
ctgtactgtcaggtgcactttgatg

SEQ ID NO: 178786 - DNA, 25 bp, Artificial
  Probe
ctgcctggaagaattctcagccaca

SEQ ID NO: 178787 - DNA, 25 bp, Artificial
  Probe
cagctccgtctgtgccaggtgtctg

SEQ ID NO: 178788 - DNA, 25 bp, Artificial
  Probe
ccctgcgctgcctggaagaattctc

SEQ ID NO: 178789 - DNA, 25 bp, Artificial
  Probe
tgcgctgcctggaagaattctcagc

SEQ ID NO: 178790 - DNA, 25 bp, Artificial
  Probe
ggaagaattctcagccacagcagcg

SEQ ID NO: 178791 - DNA, 25 bp, Artificial
  Probe
ctggccctgcgctgcctggaagaat

SEQ ID NO: 178792 - DNA, 25 bp, Artificial
  Probe
tctacctgaagctggacttgctggt

SEQ ID NO: 178793 - DNA, 25 bp, Artificial
  Probe
ctgaagctggacttgctggtgaatg

SEQ ID NO: 178794 - DNA, 25 bp, Artificial
  Probe
tcccctgggctcatcttaaggctgc

SEQ ID NO: 178795 - DNA, 25 bp, Artificial
  Probe
ctgcggccagggtcttcccttcgga

SEQ ID NO: 178796 - DNA, 25 bp, Artificial
  Probe
ggaaggcagtctacctgaagctgga

SEQ ID NO: 178797 - DNA, 25 bp, Artificial
  Probe
cctctgcgctatgaccgccagattg

SEQ ID NO: 178798 - DNA, 25 bp, Artificial
  Probe
attctcagccacagcagcgagctct

SEQ ID NO: 178799 - DNA, 25 bp, Artificial
  Probe
ctcccctgggctcatcttaaggctg

SEQ ID NO: 178800 - DNA, 25 bp, Artificial
  Probe
gctatgaccgccagattggggaatt

SEQ ID NO: 178801 - DNA, 25 bp, Artificial
  Probe
tcactgaggggtcctgctctcccag

SEQ ID NO: 178802 - DNA, 25 bp, Artificial
  Probe
gaaggcagtctacctgaagctggac

SEQ ID NO: 178803 - DNA, 25 bp, Artificial
  Probe
ctctgcgctatgaccgccagattgg

SEQ ID NO: 178804 - DNA, 25 bp, Artificial
  Probe
gggctctactacctgtactgtcagg

SEQ ID NO: 178805 - DNA, 25 bp, Artificial
  Probe
ctctactacctgtactgtcaggtgc

SEQ ID NO: 178806 - DNA, 25 bp, Artificial
  Probe
cactgaggggtcctgctctcccagg

SEQ ID NO: 178807 - DNA, 25 bp, Artificial
  Probe
tcaagttcactgaggggtcctgctc

SEQ ID NO: 178808 - DNA, 25 bp, Artificial
  Probe
cagtctacctgaagctggacttgct

SEQ ID NO: 178809 - DNA, 25 bp, Artificial
  Probe
acagccaggacaggatggagcacag

SEQ ID NO: 178810 - DNA, 25 bp, Artificial
  Probe
tccgtctgtgccaggtgtctgggct

SEQ ID NO: 178811 - DNA, 25 bp, Artificial
  Probe
aattctcagccacagcagcgagctc

SEQ ID NO: 178812 - DNA, 25 bp, Artificial
  Probe
gaggggtcctgctctcccaggttct

SEQ ID NO: 178813 - DNA, 25 bp, Artificial
  Probe
acctgaagctggacttgctggtgaa

SEQ ID NO: 178814 - DNA, 25 bp, Artificial
  Probe
ctatgaccgccagattggggaattt

SEQ ID NO: 178815 - DNA, 25 bp, Artificial
  Probe
ctactacctgtactgtcaggtgcac

SEQ ID NO: 178816 - DNA, 25 bp, Artificial
  Probe
ggctgggctctactacctgtactgt

SEQ ID NO: 178817 - DNA, 25 bp, Artificial
  Probe
actacctgtactgtcaggtgcactt

SEQ ID NO: 178818 - DNA, 25 bp, Artificial
  Probe
tgggctctactacctgtactgtcag

SEQ ID NO: 178819 - DNA, 25 bp, Artificial
  Probe
ggcagtctacctgaagctggacttg

SEQ ID NO: 178820 - DNA, 25 bp, Artificial
  Probe
gagaccaaaatcaacagctccagcc

SEQ ID NO: 178821 - DNA, 25 bp, Artificial
  Probe
gtctacctgaagctggacttgctgg

SEQ ID NO: 178822 - DNA, 25 bp, Artificial
  Probe
gctgggctctactacctgtactgtc

SEQ ID NO: 178823 - DNA, 25 bp, Artificial
  Probe
tggaagaattctcagccacagcagc

SEQ ID NO: 178824 - DNA, 25 bp, Artificial
  Probe
tgtctgggctgttgcctctgcggcc

SEQ ID NO: 178825 - DNA, 25 bp, Artificial
  Probe
gcggccagggtcttcccttcggatc

SEQ ID NO: 178826 - DNA, 25 bp, Artificial
  Probe
actgtcaggtgcactttgatgaggg

SEQ ID NO: 178827 - DNA, 25 bp, Artificial
  Probe
ttcactgaggggtcctgctctccca

SEQ ID NO: 178828 - DNA, 25 bp, Artificial
  Probe
ccggccccacaacttgccagtgctc

SEQ ID NO: 178829 - DNA, 25 bp, Artificial
  Probe
cagcagcgtgagctagaggccttgg

SEQ ID NO: 178830 - DNA, 25 bp, Artificial
  Probe
gcccagcagcgtgagctagaggcct

SEQ ID NO: 178831 - DNA, 25 bp, Artificial
  Probe
gaacacagagtgctcagacagactc

SEQ ID NO: 178832 - DNA, 25 bp, Artificial
  Probe
agctagaggccttggaacaccggat

SEQ ID NO: 178833 - DNA, 25 bp, Artificial
  Probe
tgctcagacagactctgaggcaaaa

SEQ ID NO: 178834 - DNA, 25 bp, Artificial
  Probe
aggcagcccagcagcgtgagctaga

SEQ ID NO: 178835 - DNA, 25 bp, Artificial
  Probe
ccagcagcgtgagctagaggccttg

SEQ ID NO: 178836 - DNA, 25 bp, Artificial
  Probe
cccagcagcgtgagctagaggcctt

SEQ ID NO: 178837 - DNA, 25 bp, Artificial
  Probe
agactctgaggcaaaagcatctgga

SEQ ID NO: 178838 - DNA, 25 bp, Artificial
  Probe
gctcagacagactctgaggcaaaag

SEQ ID NO: 178839 - DNA, 25 bp, Artificial
  Probe
ggcagcccagcagcgtgagctagag

SEQ ID NO: 178840 - DNA, 25 bp, Artificial
  Probe
agcgtgagctagaggccttggaaca

SEQ ID NO: 178841 - DNA, 25 bp, Artificial
  Probe
cagactctgaggcaaaagcatctgg

SEQ ID NO: 178842 - DNA, 25 bp, Artificial
  Probe
caaaagcatctggaagcccagcagt

SEQ ID NO: 178843 - DNA, 25 bp, Artificial
  Probe
gaacgaacacagagtgctcagacag

SEQ ID NO: 178844 - DNA, 25 bp, Artificial
  Probe
cacaacttgccagtgctccaggcag

SEQ ID NO: 178845 - DNA, 25 bp, Artificial
  Probe
aaagcatctggaagcccagcagtcc

SEQ ID NO: 178846 - DNA, 25 bp, Artificial
  Probe
gtgctcagacagactctgaggcaaa

SEQ ID NO: 178847 - DNA, 25 bp, Artificial
  Probe
acgaacacagagtgctcagacagac

SEQ ID NO: 178848 - DNA, 25 bp, Artificial
  Probe
aacgaacacagagtgctcagacaga

SEQ ID NO: 178849 - DNA, 25 bp, Artificial
  Probe
agacagactctgaggcaaaagcatc

SEQ ID NO: 178850 - DNA, 25 bp, Artificial
  Probe
gactctgaggcaaaagcatctggaa

SEQ ID NO: 178851 - DNA, 25 bp, Artificial
  Probe
tctgaggcaaaagcatctggaagcc

SEQ ID NO: 178852 - DNA, 25 bp, Artificial
  Probe
acaacttgccagtgctccaggcagc

SEQ ID NO: 178853 - DNA, 25 bp, Artificial
  Probe
gctagaggccttggaacaccggatc

SEQ ID NO: 178854 - DNA, 25 bp, Artificial
  Probe
gagctagaggccttggaacaccgga

SEQ ID NO: 178855 - DNA, 25 bp, Artificial
  Probe
acacagagtgctcagacagactctg

SEQ ID NO: 178856 - DNA, 25 bp, Artificial
  Probe
aacttgccagtgctccaggcagccc

SEQ ID NO: 178857 - DNA, 25 bp, Artificial
  Probe
cgaacacagagtgctcagacagact

SEQ ID NO: 178858 - DNA, 25 bp, Artificial
  Probe
tcagacagactctgaggcaaaagca

SEQ ID NO: 178859 - DNA, 25 bp, Artificial
  Probe
agcccagcagcgtgagctagaggcc

SEQ ID NO: 178860 - DNA, 25 bp, Artificial
  Probe
ctagaggccttggaacaccggatcc

SEQ ID NO: 178861 - DNA, 25 bp, Artificial
  Probe
ccagcagtcctgccggccccacaac

SEQ ID NO: 178862 - DNA, 25 bp, Artificial
  Probe
cagcgtgagctagaggccttggaac

SEQ ID NO: 178863 - DNA, 25 bp, Artificial
  Probe
gagtgctcagacagactctgaggca

SEQ ID NO: 178864 - DNA, 25 bp, Artificial
  Probe
agtgctcagacagactctgaggcaa

SEQ ID NO: 178865 - DNA, 25 bp, Artificial
  Probe
ctctgaggcaaaagcatctggaagc

SEQ ID NO: 178866 - DNA, 25 bp, Artificial
  Probe
cacagagtgctcagacagactctga

SEQ ID NO: 178867 - DNA, 25 bp, Artificial
  Probe
acagagtgctcagacagactctgag

SEQ ID NO: 178868 - DNA, 25 bp, Artificial
  Probe
cagacagactctgaggcaaaagcat

SEQ ID NO: 178869 - DNA, 25 bp, Artificial
  Probe
aacacagagtgctcagacagactct

SEQ ID NO: 178870 - DNA, 25 bp, Artificial
  Probe
agagtgctcagacagactctgaggc

SEQ ID NO: 178871 - DNA, 25 bp, Artificial
  Probe
caggcagcccagcagcgtgagctag

SEQ ID NO: 178872 - DNA, 25 bp, Artificial
  Probe
atctggaagcccagcagtcctgccg

SEQ ID NO: 178873 - DNA, 25 bp, Artificial
  Probe
ctcagacagactctgaggcaaaagc

SEQ ID NO: 178874 - DNA, 25 bp, Artificial
  Probe
cttgccctagccagatgatagaaga

SEQ ID NO: 178875 - DNA, 25 bp, Artificial
  Probe
gcactaccggaaacacacaggtgca

SEQ ID NO: 178876 - DNA, 25 bp, Artificial
  Probe
aagtgtaaccactgcgacaggtgtt

SEQ ID NO: 178877 - DNA, 25 bp, Artificial
  Probe
ttgcccggagcgatgagctcacaag

SEQ ID NO: 178878 - DNA, 25 bp, Artificial
  Probe
tgctctccatatgaagagacatatc

SEQ ID NO: 178879 - DNA, 25 bp, Artificial
  Probe
gcgagcactggctgctgactccagc

SEQ ID NO: 178880 - DNA, 25 bp, Artificial
  Probe
aggcactaccggaaacacacaggtg

SEQ ID NO: 178881 - DNA, 25 bp, Artificial
  Probe
cgttttgcccggagcgatgagctca

SEQ ID NO: 178882 - DNA, 25 bp, Artificial
  Probe
tccagcactactggatctcttcctg

SEQ ID NO: 178883 - DNA, 25 bp, Artificial
  Probe
caagagcaaaacaaccgcaaaggcc

SEQ ID NO: 178884 - DNA, 25 bp, Artificial
  Probe
gccagagttgccatggcagcagcca

SEQ ID NO: 178885 - DNA, 25 bp, Artificial
  Probe
tgccatggcagcagccaatgtccga

SEQ ID NO: 178886 - DNA, 25 bp, Artificial
  Probe
cagcagccaatgtccgaaggaaatg

SEQ ID NO: 178887 - DNA, 25 bp, Artificial
  Probe
aaaggccagagttgccatggcagca

SEQ ID NO: 178888 - DNA, 25 bp, Artificial
  Probe
aaggaaatgccgtgaccagaggact

SEQ ID NO: 178889 - DNA, 25 bp, Artificial
  Probe
atgccttgccctagccagatgatag

SEQ ID NO: 178890 - DNA, 25 bp, Artificial
  Probe
ctccaggtctgatcatcttgctctc

SEQ ID NO: 178891 - DNA, 25 bp, Artificial
  Probe
caggtgagattccttacaagtgctc

SEQ ID NO: 178892 - DNA, 25 bp, Artificial
  Probe
atggcagcagccaatgtccgaagga

SEQ ID NO: 178893 - DNA, 25 bp, Artificial
  Probe
tcacaaggcactaccggaaacacac

SEQ ID NO: 178894 - DNA, 25 bp, Artificial
  Probe
accgcaaaggccagagttgccatgg

SEQ ID NO: 178895 - DNA, 25 bp, Artificial
  Probe
tttcttatgccttgccctagccaga

SEQ ID NO: 178896 - DNA, 25 bp, Artificial
  Probe
agttgccatggcagcagccaatgtc

SEQ ID NO: 178897 - DNA, 25 bp, Artificial
  Probe
gatgagctcacaaggcactaccgga

SEQ ID NO: 178898 - DNA, 25 bp, Artificial
  Probe
aagccaggtgaactgggcgagcact

SEQ ID NO: 178899 - DNA, 25 bp, Artificial
  Probe
atttcttatgccttgccctagccag

SEQ ID NO: 178900 - DNA, 25 bp, Artificial
  Probe
tccttacaagtgctcatgggaagga

SEQ ID NO: 178901 - DNA, 25 bp, Artificial
  Probe
gctctccatatgaagagacatatct

SEQ ID NO: 178902 - DNA, 25 bp, Artificial
  Probe
tgcctcgcagaagaaagttctcact

SEQ ID NO: 178903 - DNA, 25 bp, Artificial
  Probe
tgaccagaggactggacttcaggcg

SEQ ID NO: 178904 - DNA, 25 bp, Artificial
  Probe
gactccagcactactggatctcttc

SEQ ID NO: 178905 - DNA, 25 bp, Artificial
  Probe
tatgccttgccctagccagatgata

SEQ ID NO: 178906 - DNA, 25 bp, Artificial
  Probe
cctagccagatgatagaagacaagg

SEQ ID NO: 178907 - DNA, 25 bp, Artificial
  Probe
tgatcatcttgctctccatatgaag

SEQ ID NO: 178908 - DNA, 25 bp, Artificial
  Probe
ggaaacacacaggtgcaaagccctt

SEQ ID NO: 178909 - DNA, 25 bp, Artificial
  Probe
ccagagttgccatggcagcagccaa

SEQ ID NO: 178910 - DNA, 25 bp, Artificial
  Probe
agccaatgtccgaaggaaatgccgt

SEQ ID NO: 178911 - DNA, 25 bp, Artificial
  Probe
ggactcttacaggtgagattcctta

SEQ ID NO: 178912 - DNA, 25 bp, Artificial
  Probe
cttacaggtgagattccttacaagt

SEQ ID NO: 178913 - DNA, 25 bp, Artificial
  Probe
gtgcaaagccctttaagtgtaacca

SEQ ID NO: 178914 - DNA, 25 bp, Artificial
  Probe
aactgggcgagcactggctgctgac

SEQ ID NO: 178915 - DNA, 25 bp, Artificial
  Probe
ctgggcgagcactggctgctgactc

SEQ ID NO: 178916 - DNA, 25 bp, Artificial
  Probe
gggagcactgcctcgcagaagaaag

SEQ ID NO: 178917 - DNA, 25 bp, Artificial
  Probe
tgtccgaaggaaatgccgtgaccag

SEQ ID NO: 178918 - DNA, 25 bp, Artificial
  Probe
agctcacaaggcactaccggaaaca

SEQ ID NO: 178919 - DNA, 25 bp, Artificial
  Probe
gcactgcctcgcagaagaaagttct

SEQ ID NO: 178920 - DNA, 25 bp, Artificial
  Probe
cttgaaaacacagacattgaaggaa

SEQ ID NO: 178921 - DNA, 25 bp, Artificial
  Probe
tgctggcattcttaaaagagcgtcg

SEQ ID NO: 178922 - DNA, 25 bp, Artificial
  Probe
gcttgatccagactgactaagtctg

SEQ ID NO: 178923 - DNA, 25 bp, Artificial
  Probe
gcattgctcttccacatttgagaac

SEQ ID NO: 178924 - DNA, 25 bp, Artificial
  Probe
gtctggctataccaagttttcattc

SEQ ID NO: 178925 - DNA, 25 bp, Artificial
  Probe
ttctcttgccagtggcaatacctgc

SEQ ID NO: 178926 - DNA, 25 bp, Artificial
  Probe
agagcgtcgcccattagcattgctc

SEQ ID NO: 178927 - DNA, 25 bp, Artificial
  Probe
actaagtctggctataccaagtttt

SEQ ID NO: 178928 - DNA, 25 bp, Artificial
  Probe
aacttgaaaacacagacattgaagg

SEQ ID NO: 178929 - DNA, 25 bp, Artificial
  Probe
gtgctttgtgctctctggtaggatt

SEQ ID NO: 178930 - DNA, 25 bp, Artificial
  Probe
ggcaatacctgcaggagcccctcag

SEQ ID NO: 178931 - DNA, 25 bp, Artificial
  Probe
agtctagaagcttgatccagactga

SEQ ID NO: 178932 - DNA, 25 bp, Artificial
  Probe
aatacctgcaggagcccctcagcag

SEQ ID NO: 178933 - DNA, 25 bp, Artificial
  Probe
tgcaggagcccctcagcagatgctg

SEQ ID NO: 178934 - DNA, 25 bp, Artificial
  Probe
ctagaagcttgatccagactgacta

SEQ ID NO: 178935 - DNA, 25 bp, Artificial
  Probe
cttgccagtggcaatacctgcagga

SEQ ID NO: 178936 - DNA, 25 bp, Artificial
  Probe
agatgctggcattcttaaaagagcg

SEQ ID NO: 178937 - DNA, 25 bp, Artificial
  Probe
tagcattgctcttccacatttgaga

SEQ ID NO: 178938 - DNA, 25 bp, Artificial
  Probe
ttagcattgctcttccacatttgag

SEQ ID NO: 178939 - DNA, 25 bp, Artificial
  Probe
ttgtgctctctggtaggattgttca

SEQ ID NO: 178940 - DNA, 25 bp, Artificial
  Probe
acttctcttgccagtggcaatacct

SEQ ID NO: 178941 - DNA, 25 bp, Artificial
  Probe
gatccagactgactaagtctggcta

SEQ ID NO: 178942 - DNA, 25 bp, Artificial
  Probe
attgctcttccacatttgagaactg

SEQ ID NO: 178943 - DNA, 25 bp, Artificial
  Probe
taataggtatctgtgctttgtgctc

SEQ ID NO: 178944 - DNA, 25 bp, Artificial
  Probe
gcattcttaaaagagcgtcgcccat

SEQ ID NO: 178945 - DNA, 25 bp, Artificial
  Probe
gtggcaatacctgcaggagcccctc

SEQ ID NO: 178946 - DNA, 25 bp, Artificial
  Probe
cttaaaagagcgtcgcccattagca

SEQ ID NO: 178947 - DNA, 25 bp, Artificial
  Probe
cagtggcaatacctgcaggagcccc

SEQ ID NO: 178948 - DNA, 25 bp, Artificial
  Probe
aagtctggctataccaagttttcat

SEQ ID NO: 178949 - DNA, 25 bp, Artificial
  Probe
tccagactgactaagtctggctata

SEQ ID NO: 178950 - DNA, 25 bp, Artificial
  Probe
cagactgactaagtctggctatacc

SEQ ID NO: 178951 - DNA, 25 bp, Artificial
  Probe
ccctcagcagatgctggcattctta

SEQ ID NO: 178952 - DNA, 25 bp, Artificial
  Probe
gcagatgctggcattcttaaaagag

SEQ ID NO: 178953 - DNA, 25 bp, Artificial
  Probe
atcagagtctagaagcttgatccag

SEQ ID NO: 178954 - DNA, 25 bp, Artificial
  Probe
ttgagaactgctgacgtgctgtgga

SEQ ID NO: 178955 - DNA, 25 bp, Artificial
  Probe
ctggcattcttaaaagagcgtcgcc

SEQ ID NO: 178956 - DNA, 25 bp, Artificial
  Probe
ggtatctgtgctttgtgctctctgg

SEQ ID NO: 178957 - DNA, 25 bp, Artificial
  Probe
acatttgagaactgctgacgtgctg

SEQ ID NO: 178958 - DNA, 25 bp, Artificial
  Probe
aagcttgatccagactgactaagtc

SEQ ID NO: 178959 - DNA, 25 bp, Artificial
  Probe
ctcagcagatgctggcattcttaaa

SEQ ID NO: 178960 - DNA, 25 bp, Artificial
  Probe
atccacttctcttgccagtggcaat

SEQ ID NO: 178961 - DNA, 25 bp, Artificial
  Probe
cattcttaaaagagcgtcgcccatt

SEQ ID NO: 178962 - DNA, 25 bp, Artificial
  Probe
gcgtcgcccattagcattgctcttc

SEQ ID NO: 178963 - DNA, 25 bp, Artificial
  Probe
cctggatccacttctcttgccagtg

SEQ ID NO: 178964 - DNA, 25 bp, Artificial
  Probe
atgctggcattcttaaaagagcgtc

SEQ ID NO: 178965 - DNA, 25 bp, Artificial
  Probe
gtcgcccattagcattgctcttcca

SEQ ID NO: 178966 - DNA, 25 bp, Artificial
  Probe
taatagtcactccaagtatccacgg

SEQ ID NO: 178967 - DNA, 25 bp, Artificial
  Probe
ttgttttggcgcttttgactcaagg

SEQ ID NO: 178968 - DNA, 25 bp, Artificial
  Probe
acggtgaaggcgaccgcagttggtt

SEQ ID NO: 178969 - DNA, 25 bp, Artificial
  Probe
ggcgcttttgactcaaggatttaaa

SEQ ID NO: 178970 - DNA, 25 bp, Artificial
  Probe
tccaagtatccacggcatagatggt

SEQ ID NO: 178971 - DNA, 25 bp, Artificial
  Probe
ccacggcatagatggttacaggaag

SEQ ID NO: 178972 - DNA, 25 bp, Artificial
  Probe
ctccaagtatccacggcatagatgg

SEQ ID NO: 178973 - DNA, 25 bp, Artificial
  Probe
tacaggaagtccctcaccctcccaa

SEQ ID NO: 178974 - DNA, 25 bp, Artificial
  Probe
tttgttttggcgcttttgactcaag

SEQ ID NO: 178975 - DNA, 25 bp, Artificial
  Probe
cactccaagtatccacggcatagat

SEQ ID NO: 178976 - DNA, 25 bp, Artificial
  Probe
ccccaaagttctacaatgtggctga

SEQ ID NO: 178977 - DNA, 25 bp, Artificial
  Probe
caatgtggctgaggactttgattgt

SEQ ID NO: 178978 - DNA, 25 bp, Artificial
  Probe
ttggcgcttttgactcaaggattta

SEQ ID NO: 178979 - DNA, 25 bp, Artificial
  Probe
aatagtcactccaagtatccacggc

SEQ ID NO: 178980 - DNA, 25 bp, Artificial
  Probe
gaacggtgaaggcgaccgcagttgg

SEQ ID NO: 178981 - DNA, 25 bp, Artificial
  Probe
tggcatggctttattgtttttttgt

SEQ ID NO: 178982 - DNA, 25 bp, Artificial
  Probe
gcgaccgcagttggttggagcaaac

SEQ ID NO: 178983 - DNA, 25 bp, Artificial
  Probe
ttctacaatgtggctgaggactttg

SEQ ID NO: 178984 - DNA, 25 bp, Artificial
  Probe
agtatccacggcatagatggttaca

SEQ ID NO: 178985 - DNA, 25 bp, Artificial
  Probe
gtatccacggcatagatggttacag

SEQ ID NO: 178986 - DNA, 25 bp, Artificial
  Probe
gactttgattgtacattgttttttg

SEQ ID NO: 178987 - DNA, 25 bp, Artificial
  Probe
acggcatagatggttacaggaagtc

SEQ ID NO: 178988 - DNA, 25 bp, Artificial
  Probe
agttctacaatgtggctgaggactt

SEQ ID NO: 178989 - DNA, 25 bp, Artificial
  Probe
tttggcgcttttgactcaaggattt

SEQ ID NO: 178990 - DNA, 25 bp, Artificial
  Probe
gaccgcagttggttggagcaaacat

SEQ ID NO: 178991 - DNA, 25 bp, Artificial
  Probe
aagtatccacggcatagatggttac

SEQ ID NO: 178992 - DNA, 25 bp, Artificial
  Probe
tggttacaggaagtccctcaccctc

SEQ ID NO: 178993 - DNA, 25 bp, Artificial
  Probe
tacaatgtggctgaggactttgatt

SEQ ID NO: 178994 - DNA, 25 bp, Artificial
  Probe
cgaccgcagttggttggagcaaaca

SEQ ID NO: 178995 - DNA, 25 bp, Artificial
  Probe
tcccccaaagttctacaatgtggct

SEQ ID NO: 178996 - DNA, 25 bp, Artificial
  Probe
tctacaatgtggctgaggactttga

SEQ ID NO: 178997 - DNA, 25 bp, Artificial
  Probe
tggctgaggactttgattgtacatt

SEQ ID NO: 178998 - DNA, 25 bp, Artificial
  Probe
gtcactccaagtatccacggcatag

SEQ ID NO: 178999 - DNA, 25 bp, Artificial
  Probe
tgagacatttggcatggctttattg

SEQ ID NO: 179000 - DNA, 25 bp, Artificial
  Probe
gttttggcgcttttgactcaaggat

SEQ ID NO: 179001 - DNA, 25 bp, Artificial
  Probe
catcccccaaagttctacaatgtgg

SEQ ID NO: 179002 - DNA, 25 bp, Artificial
  Probe
cccaaagttctacaatgtggctgag

SEQ ID NO: 179003 - DNA, 25 bp, Artificial
  Probe
gttctacaatgtggctgaggacttt

SEQ ID NO: 179004 - DNA, 25 bp, Artificial
  Probe
tccacggcatagatggttacaggaa

SEQ ID NO: 179005 - DNA, 25 bp, Artificial
  Probe
gagcaaacatcccccaaagttctac

SEQ ID NO: 179006 - DNA, 25 bp, Artificial
  Probe
ggagcaaacatcccccaaagttcta

SEQ ID NO: 179007 - DNA, 25 bp, Artificial
  Probe
accgcagttggttggagcaaacatc

SEQ ID NO: 179008 - DNA, 25 bp, Artificial
  Probe
atccacggcatagatggttacagga

SEQ ID NO: 179009 - DNA, 25 bp, Artificial
  Probe
gcgcttttgactcaaggatttaaaa

SEQ ID NO: 179010 - DNA, 25 bp, Artificial
  Probe
atagtcactccaagtatccacggca

SEQ ID NO: 179011 - DNA, 25 bp, Artificial
  Probe
tttaatagtcactccaagtatccac

SEQ ID NO: 179012 - DNA, 25 bp, Artificial
  Probe
ttttggcgcttttgactcaaggatt

SEQ ID NO: 179013 - DNA, 25 bp, Artificial
  Probe
aacatcccccaaagttctacaatgt

SEQ ID NO: 179014 - DNA, 25 bp, Artificial
  Probe
gttttgttttggcgcttttgactca

SEQ ID NO: 179015 - DNA, 25 bp, Artificial
  Probe
tttggcatggctttattgttttttt

SEQ ID NO: 179016 - DNA, 25 bp, Artificial
  Probe
tttgattgtacattgttttttgttt

SEQ ID NO: 179017 - DNA, 25 bp, Artificial
  Probe
tagtcactccaagtatccacggcat

SEQ ID NO: 179018 - DNA, 25 bp, Artificial
  Probe
ttttaatagtcactccaagtatcca

SEQ ID NO: 179019 - DNA, 25 bp, Artificial
  Probe
gattgtacattgttttttgtttttg

SEQ ID NO: 179020 - DNA, 25 bp, Artificial
  Probe
tgttttggcgcttttgactcaagga

SEQ ID NO: 179021 - DNA, 25 bp, Artificial
  Probe
aggactttgattgtacattgttttt

SEQ ID NO: 179022 - DNA, 25 bp, Artificial
  Probe
actccaagtatccacggcatagatg

SEQ ID NO: 179023 - DNA, 25 bp, Artificial
  Probe
tgtggctgaggactttgattgtaca

SEQ ID NO: 179024 - DNA, 25 bp, Artificial
  Probe
ccaaagttctacaatgtggctgagg

SEQ ID NO: 179025 - DNA, 25 bp, Artificial
  Probe
actttgattgtacattgttttttgt

SEQ ID NO: 179026 - DNA, 25 bp, Artificial
  Probe
atggttacaggaagtccctcaccct

SEQ ID NO: 179027 - DNA, 25 bp, Artificial
  Probe
gcatggctttattgtttttttgttt

SEQ ID NO: 179028 - DNA, 25 bp, Artificial
  Probe
tttttttaatagtcactccaagtat

SEQ ID NO: 179029 - DNA, 25 bp, Artificial
  Probe
aactggaacggtgaaggcgaccgca

SEQ ID NO: 179030 - DNA, 25 bp, Artificial
  Probe
ttttgactcaaggatttaaaaactg

SEQ ID NO: 179031 - DNA, 25 bp, Artificial
  Probe
ggcgaccgcagttggttggagcaaa

SEQ ID NO: 179032 - DNA, 25 bp, Artificial
  Probe
agtcactccaagtatccacggcata

SEQ ID NO: 179033 - DNA, 25 bp, Artificial
  Probe
ttacaggaagtccctcaccctccca

SEQ ID NO: 179034 - DNA, 25 bp, Artificial
  Probe
tatccacggcatagatggttacagg

SEQ ID NO: 179035 - DNA, 25 bp, Artificial
  Probe
ttgttttgttttggcgcttttgact

SEQ ID NO: 179036 - DNA, 25 bp, Artificial
  Probe
ctcctaaggggaggatggctgcatc

SEQ ID NO: 179037 - DNA, 25 bp, Artificial
  Probe
cccaactcctaaggggaggatggct

SEQ ID NO: 179038 - DNA, 25 bp, Artificial
  Probe
cccccaaagttctacaatgtggctg

SEQ ID NO: 179039 - DNA, 25 bp, Artificial
  Probe
tggcgcttttgactcaaggatttaa

SEQ ID NO: 179040 - DNA, 25 bp, Artificial
  Probe
tcactccaagtatccacggcataga

SEQ ID NO: 179041 - DNA, 25 bp, Artificial
  Probe
ccgcagttggttggagcaaacatcc

SEQ ID NO: 179042 - DNA, 25 bp, Artificial
  Probe
ttaatagtcactccaagtatccacg

SEQ ID NO: 179043 - DNA, 25 bp, Artificial
  Probe
ctacaatgtggctgaggactttgat

SEQ ID NO: 179044 - DNA, 25 bp, Artificial
  Probe
gttggagcaaacatcccccaaagtt

SEQ ID NO: 179045 - DNA, 25 bp, Artificial
  Probe
atcccccaaagttctacaatgtggc

SEQ ID NO: 179046 - DNA, 25 bp, Artificial
  Probe
tggctggccgggacctgacagacta

SEQ ID NO: 179047 - DNA, 25 bp, Artificial
  Probe
accacactttctacaatgagctgcg

SEQ ID NO: 179048 - DNA, 25 bp, Artificial
  Probe
tggatgacgatatcgctgcgctcgt

SEQ ID NO: 179049 - DNA, 25 bp, Artificial
  Probe
accccattgaacacggcattgtaac

SEQ ID NO: 179050 - DNA, 25 bp, Artificial
  Probe
agatcatgtttgagaccttcaacac

SEQ ID NO: 179051 - DNA, 25 bp, Artificial
  Probe
tgcctctggtcgtaccactggcatt

SEQ ID NO: 179052 - DNA, 25 bp, Artificial
  Probe
ctgaagtaccccattgaacacggca

SEQ ID NO: 179053 - DNA, 25 bp, Artificial
  Probe
ctgtgttgtccctgtatgcctctgg

SEQ ID NO: 179054 - DNA, 25 bp, Artificial
  Probe
tgaccctgaagtaccccattgaaca

SEQ ID NO: 179055 - DNA, 25 bp, Artificial
  Probe
cgtaccactggcattgtgatggact

SEQ ID NO: 179056 - DNA, 25 bp, Artificial
  Probe
attgaacacggcattgtaaccaact

SEQ ID NO: 179057 - DNA, 25 bp, Artificial
  Probe
cacactgtgcccatctatgagggtt

SEQ ID NO: 179058 - DNA, 25 bp, Artificial
  Probe
gtcagaaggactcctacgtgggcga

SEQ ID NO: 179059 - DNA, 25 bp, Artificial
  Probe
ccagatcatgtttgagaccttcaac

SEQ ID NO: 179060 - DNA, 25 bp, Artificial
  Probe
cctgtatgcctctggtcgtaccact

SEQ ID NO: 179061 - DNA, 25 bp, Artificial
  Probe
ccagccatgtacgtagccatccagg

SEQ ID NO: 179062 - DNA, 25 bp, Artificial
  Probe
agaggcatcctgaccctgaagtacc

SEQ ID NO: 179063 - DNA, 25 bp, Artificial
  Probe
tccctgtatgcctctggtcgtacca

SEQ ID NO: 179064 - DNA, 25 bp, Artificial
  Probe
acccagatcatgtttgagaccttca

SEQ ID NO: 179065 - DNA, 25 bp, Artificial
  Probe
tgtttgagaccttcaacaccccagc

SEQ ID NO: 179066 - DNA, 25 bp, Artificial
  Probe
ccggcatgtgcaaggccggcttcgc

SEQ ID NO: 179067 - DNA, 25 bp, Artificial
  Probe
atgaagatcctgaccgagcgtggct

SEQ ID NO: 179068 - DNA, 25 bp, Artificial
  Probe
gatcatgtttgagaccttcaacacc

SEQ ID NO: 179069 - DNA, 25 bp, Artificial
  Probe
atgtttgagaccttcaacaccccag

SEQ ID NO: 179070 - DNA, 25 bp, Artificial
  Probe
gttgtccctgtatgcctctggtcgt

SEQ ID NO: 179071 - DNA, 25 bp, Artificial
  Probe
aagatgacccagatcatgtttgaga

SEQ ID NO: 179072 - DNA, 25 bp, Artificial
  Probe
aacggctccggcatgtgcaaggccg

SEQ ID NO: 179073 - DNA, 25 bp, Artificial
  Probe
tgccatcctgcgtctggacctggct

SEQ ID NO: 179074 - DNA, 25 bp, Artificial
  Probe
acgtagccatccaggctgtgttgtc

SEQ ID NO: 179075 - DNA, 25 bp, Artificial
  Probe
catctatgagggttacgcgctccct

SEQ ID NO: 179076 - DNA, 25 bp, Artificial
  Probe
actggcattgtgatggactccggag

SEQ ID NO: 179077 - DNA, 25 bp, Artificial
  Probe
aggcccagagcaagagaggcatcct

SEQ ID NO: 179078 - DNA, 25 bp, Artificial
  Probe
tcctgcgtctggacctggctggccg

SEQ ID NO: 179079 - DNA, 25 bp, Artificial
  Probe
attgtaaccaactgggacgatatgg

SEQ ID NO: 179080 - DNA, 25 bp, Artificial
  Probe
tctatgagggttacgcgctccctca

SEQ ID NO: 179081 - DNA, 25 bp, Artificial
  Probe
ccgccctaggcaccagggtgtgatg

SEQ ID NO: 179082 - DNA, 25 bp, Artificial
  Probe
gaagatttggcaccacactttctac

SEQ ID NO: 179083 - DNA, 25 bp, Artificial
  Probe
ttggcaccacactttctacaatgag

SEQ ID NO: 179084 - DNA, 25 bp, Artificial
  Probe
tggactccggagacggggtcaccca

SEQ ID NO: 179085 - DNA, 25 bp, Artificial
  Probe
gccgccctaggcaccagggtgtgat

SEQ ID NO: 179086 - DNA, 25 bp, Artificial
  Probe
taaccaactgggacgatatggagaa

SEQ ID NO: 179087 - DNA, 25 bp, Artificial
  Probe
ggccaaccgtgaaaagatgacccag

SEQ ID NO: 179088 - DNA, 25 bp, Artificial
  Probe
gaggagcaccctgtgctgctcaccg

SEQ ID NO: 179089 - DNA, 25 bp, Artificial
  Probe
agatcctgaccgagcgtggctacag

SEQ ID NO: 179090 - DNA, 25 bp, Artificial
  Probe
gctccggcatgtgcaaggccggctt

SEQ ID NO: 179091 - DNA, 25 bp, Artificial
  Probe
catcctgcgtctggacctggctggc

SEQ ID NO: 179092 - DNA, 25 bp, Artificial
  Probe
gcattgtaaccaactgggacgatat

SEQ ID NO: 179093 - DNA, 25 bp, Artificial
  Probe
gtcgacaacggctccggcatgtgca

SEQ ID NO: 179094 - DNA, 25 bp, Artificial
  Probe
tctacaatgagctgcgtgtggcccc

SEQ ID NO: 179095 - DNA, 25 bp, Artificial
  Probe
tgacgatatcgctgcgctcgtcgtc

SEQ ID NO: 179096 - DNA, 25 bp, Artificial
  Probe
agccatccaggctgtgttgtccctg

SEQ ID NO: 179097 - DNA, 25 bp, Artificial
  Probe
tcgtcgtcgacaacggctccggcat

SEQ ID NO: 179098 - DNA, 25 bp, Artificial
  Probe
ccaactgggacgatatggagaagat

SEQ ID NO: 179099 - DNA, 25 bp, Artificial
  Probe
tgtatgcctctggtcgtaccactgg

SEQ ID NO: 179100 - DNA, 25 bp, Artificial
  Probe
agaaggactcctacgtgggcgacga

SEQ ID NO: 179101 - DNA, 25 bp, Artificial
  Probe
taaggccaaccgtgaaaagatgacc

SEQ ID NO: 179102 - DNA, 25 bp, Artificial
  Probe
acgaggcccagagcaagagaggcat

SEQ ID NO: 179103 - DNA, 25 bp, Artificial
  Probe
ggctggccgggacctgacagactac

SEQ ID NO: 179104 - DNA, 25 bp, Artificial
  Probe
tggtcgtaccactggcattgtgatg

SEQ ID NO: 179105 - DNA, 25 bp, Artificial
  Probe
atgtacgtagccatccaggctgtgt

SEQ ID NO: 179106 - DNA, 25 bp, Artificial
  Probe
gccatcctgcgtctggacctggctg

SEQ ID NO: 179107 - DNA, 25 bp, Artificial
  Probe
tcgctgcgctcgtcgtcgacaacgg

SEQ ID NO: 179108 - DNA, 25 bp, Artificial
  Probe
atatcgctgcgctcgtcgtcgacaa

SEQ ID NO: 179109 - DNA, 25 bp, Artificial
  Probe
gctgcgctcgtcgtcgacaacggct

SEQ ID NO: 179110 - DNA, 25 bp, Artificial
  Probe
gcgtgtggcccctgaggagcaccct

SEQ ID NO: 179111 - DNA, 25 bp, Artificial
  Probe
ggcccctgaggagcaccctgtgctg

SEQ ID NO: 179112 - DNA, 25 bp, Artificial
  Probe
ccatccaggctgtgttgtccctgta

SEQ ID NO: 179113 - DNA, 25 bp, Artificial
  Probe
agggttacgcgctccctcatgccat

SEQ ID NO: 179114 - DNA, 25 bp, Artificial
  Probe
tatgcctctggtcgtaccactggca

SEQ ID NO: 179115 - DNA, 25 bp, Artificial
  Probe
agtaccccattgaacacggcattgt

SEQ ID NO: 179116 - DNA, 25 bp, Artificial
  Probe
tgcccatctatgagggttacgcgct

SEQ ID NO: 179117 - DNA, 25 bp, Artificial
  Probe
gcaccacactttctacaatgagctg

SEQ ID NO: 179118 - DNA, 25 bp, Artificial
  Probe
ctctgaaccctaaggccaaccgtga

SEQ ID NO: 179119 - DNA, 25 bp, Artificial
  Probe
caatgagctgcgtgtggcccctgag

SEQ ID NO: 179120 - DNA, 25 bp, Artificial
  Probe
gagcaccctgtgctgctcaccgagg

SEQ ID NO: 179121 - DNA, 25 bp, Artificial
  Probe
aagagaggcatcctgaccctgaagt

SEQ ID NO: 179122 - DNA, 25 bp, Artificial
  Probe
cagccatgtacgtagccatccaggc

SEQ ID NO: 179123 - DNA, 25 bp, Artificial
  Probe
aggccaaccgtgaaaagatgaccca

SEQ ID NO: 179124 - DNA, 25 bp, Artificial
  Probe
atcctgaccctgaagtaccccattg

SEQ ID NO: 179125 - DNA, 25 bp, Artificial
  Probe
tggcattgtgatggactccggagac

SEQ ID NO: 179126 - DNA, 25 bp, Artificial
  Probe
ttctttgacaaaacctaacttgcgc

SEQ ID NO: 179127 - DNA, 25 bp, Artificial
  Probe
aatgcttctaggcggactgttactg

SEQ ID NO: 179128 - DNA, 25 bp, Artificial
  Probe
caaatgcttctaggcggactgttac

SEQ ID NO: 179129 - DNA, 25 bp, Artificial
  Probe
tttctttgacaaaacctaacttgcg

SEQ ID NO: 179130 - DNA, 25 bp, Artificial
  Probe
tactgagctgcgttttacacccttt

SEQ ID NO: 179131 - DNA, 25 bp, Artificial
  Probe
tgacaaaacctaacttgcgcagaaa

SEQ ID NO: 179132 - DNA, 25 bp, Artificial
  Probe
actgagctgcgttttacaccctttc

SEQ ID NO: 179133 - DNA, 25 bp, Artificial
  Probe
cggactgttactgagctgcgtttta

SEQ ID NO: 179134 - DNA, 25 bp, Artificial
  Probe
ttctaggcggactgttactgagctg

SEQ ID NO: 179135 - DNA, 25 bp, Artificial
  Probe
gacaaaacctaacttgcgcagaaaa

SEQ ID NO: 179136 - DNA, 25 bp, Artificial
  Probe
tgttactgagctgcgttttacaccc

SEQ ID NO: 179137 - DNA, 25 bp, Artificial
  Probe
ctgttactgagctgcgttttacacc

SEQ ID NO: 179138 - DNA, 25 bp, Artificial
  Probe
ggactgttactgagctgcgttttac

SEQ ID NO: 179139 - DNA, 25 bp, Artificial
  Probe
aaatgcttctaggcggactgttact

SEQ ID NO: 179140 - DNA, 25 bp, Artificial
  Probe
tttgacaaaacctaacttgcgcaga

SEQ ID NO: 179141 - DNA, 25 bp, Artificial
  Probe
tgcgttttacaccctttctttgaca

SEQ ID NO: 179142 - DNA, 25 bp, Artificial
  Probe
atgcttctaggcggactgttactga

SEQ ID NO: 179143 - DNA, 25 bp, Artificial
  Probe
agctgcgttttacaccctttctttg

SEQ ID NO: 179144 - DNA, 25 bp, Artificial
  Probe
ctaggcggactgttactgagctgcg

SEQ ID NO: 179145 - DNA, 25 bp, Artificial
  Probe
tgcttctaggcggactgttactgag

SEQ ID NO: 179146 - DNA, 25 bp, Artificial
  Probe
ctttgacaaaacctaacttgcgcag

SEQ ID NO: 179147 - DNA, 25 bp, Artificial
  Probe
gcggactgttactgagctgcgtttt

SEQ ID NO: 179148 - DNA, 25 bp, Artificial
  Probe
aggcggactgttactgagctgcgtt

SEQ ID NO: 179149 - DNA, 25 bp, Artificial
  Probe
actgttactgagctgcgttttacac

SEQ ID NO: 179150 - DNA, 25 bp, Artificial
  Probe
tctaggcggactgttactgagctgc

SEQ ID NO: 179151 - DNA, 25 bp, Artificial
  Probe
gagctgcgttttacaccctttcttt

SEQ ID NO: 179152 - DNA, 25 bp, Artificial
  Probe
tctttgacaaaacctaacttgcgca

SEQ ID NO: 179153 - DNA, 25 bp, Artificial
  Probe
ttgacaaaacctaacttgcgcagaa

SEQ ID NO: 179154 - DNA, 25 bp, Artificial
  Probe
cttctaggcggactgttactgagct

SEQ ID NO: 179155 - DNA, 25 bp, Artificial
  Probe
gcttctaggcggactgttactgagc

SEQ ID NO: 179156 - DNA, 25 bp, Artificial
  Probe
tgagctgcgttttacaccctttctt

SEQ ID NO: 179157 - DNA, 25 bp, Artificial
  Probe
gttactgagctgcgttttacaccct

SEQ ID NO: 179158 - DNA, 25 bp, Artificial
  Probe
ttactgagctgcgttttacaccctt

SEQ ID NO: 179159 - DNA, 25 bp, Artificial
  Probe
ctgagctgcgttttacaccctttct

SEQ ID NO: 179160 - DNA, 25 bp, Artificial
  Probe
ggcggactgttactgagctgcgttt

SEQ ID NO: 179161 - DNA, 25 bp, Artificial
  Probe
taggcggactgttactgagctgcgt

SEQ ID NO: 179162 - DNA, 25 bp, Artificial
  Probe
gctgcgttttacaccctttctttga

SEQ ID NO: 179163 - DNA, 25 bp, Artificial
  Probe
gactgttactgagctgcgttttaca

SEQ ID NO: 179164 - DNA, 25 bp, Artificial
  Probe
ggaacatctcatcaatgccatgtcc

SEQ ID NO: 179165 - DNA, 25 bp, Artificial
  Probe
tcatacaagctatcacactggtgtc

SEQ ID NO: 179166 - DNA, 25 bp, Artificial
  Probe
atcaggccccagagctggctgtcct

SEQ ID NO: 179167 - DNA, 25 bp, Artificial
  Probe
tggctgtcctctaaaaatctcaccg

SEQ ID NO: 179168 - DNA, 25 bp, Artificial
  Probe
tctaaaaatctcaccgaggaaagaa

SEQ ID NO: 179169 - DNA, 25 bp, Artificial
  Probe
gtccatagagagctgaaaggaagac

SEQ ID NO: 179170 - DNA, 25 bp, Artificial
  Probe
ccttccagaaggacagtgaacacca

SEQ ID NO: 179171 - DNA, 25 bp, Artificial
  Probe
aggccccagagctggctgtcctcta

SEQ ID NO: 179172 - DNA, 25 bp, Artificial
  Probe
catgtccatagagagctgaaaggaa

SEQ ID NO: 179173 - DNA, 25 bp, Artificial
  Probe
cccatcacagtgtgagctcagtaca

SEQ ID NO: 179174 - DNA, 25 bp, Artificial
  Probe
ggaagacattctgttcctggaagaa

SEQ ID NO: 179175 - DNA, 25 bp, Artificial
  Probe
agaaggaaaggctcctctgtcaatg

SEQ ID NO: 179176 - DNA, 25 bp, Artificial
  Probe
gctcagtacactacgggcaaggaga

SEQ ID NO: 179177 - DNA, 25 bp, Artificial
  Probe
tctcaccgaggaaagaaggaaaggc

SEQ ID NO: 179178 - DNA, 25 bp, Artificial
  Probe
tgctgctttgcatgaaaactcattt

SEQ ID NO: 179179 - DNA, 25 bp, Artificial
  Probe
agactcatacaagctatcacactgg

SEQ ID NO: 179180 - DNA, 25 bp, Artificial
  Probe
cttccagaaggacagtgaacaccac

SEQ ID NO: 179181 - DNA, 25 bp, Artificial
  Probe
agctgagaggcttgagccaaatggt

SEQ ID NO: 179182 - DNA, 25 bp, Artificial
  Probe
tctgtcaatggcagccatgtttctt

SEQ ID NO: 179183 - DNA, 25 bp, Artificial
  Probe
ctcatcaatgccatgtccatagaga

SEQ ID NO: 179184 - DNA, 25 bp, Artificial
  Probe
atcacagtgtgagctcagtacacta

SEQ ID NO: 179185 - DNA, 25 bp, Artificial
  Probe
agaaggtggccctttaagctgagag

SEQ ID NO: 179186 - DNA, 25 bp, Artificial
  Probe
ctcctctgtcaatggcagccatgtt

SEQ ID NO: 179187 - DNA, 25 bp, Artificial
  Probe
gccaaatggttctgcctctgtgact

SEQ ID NO: 179188 - DNA, 25 bp, Artificial
  Probe
ctgttcctggaagaaagactcatac

SEQ ID NO: 179189 - DNA, 25 bp, Artificial
  Probe
agtgtgagctcagtacactacgggc

SEQ ID NO: 179190 - DNA, 25 bp, Artificial
  Probe
gtcctctaaaaatctcaccgaggaa

SEQ ID NO: 179191 - DNA, 25 bp, Artificial
  Probe
cggttccttccagaaggacagtgaa

SEQ ID NO: 179192 - DNA, 25 bp, Artificial
  Probe
ggctcctctgtcaatggcagccatg

SEQ ID NO: 179193 - DNA, 25 bp, Artificial
  Probe
ctttaagctgagaggcttgagccaa

SEQ ID NO: 179194 - DNA, 25 bp, Artificial
  Probe
tgtgagctcagtacactacgggcaa

SEQ ID NO: 179195 - DNA, 25 bp, Artificial
  Probe
tatcaggccccagagctggctgtcc

SEQ ID NO: 179196 - DNA, 25 bp, Artificial
  Probe
atgtttcttcatagccggttccttc

SEQ ID NO: 179197 - DNA, 25 bp, Artificial
  Probe
gaggcttgagccaaatggttctgcc

SEQ ID NO: 179198 - DNA, 25 bp, Artificial
  Probe
cttcatagccggttccttccagaag

SEQ ID NO: 179199 - DNA, 25 bp, Artificial
  Probe
aatggttctgcctctgtgactgctg

SEQ ID NO: 179200 - DNA, 25 bp, Artificial
  Probe
cactggtgtctcaaaaggaagatgg

SEQ ID NO: 179201 - DNA, 25 bp, Artificial
  Probe
aagctgagaggcttgagccaaatgg

SEQ ID NO: 179202 - DNA, 25 bp, Artificial
  Probe
accacccatcacagtgtgagctcag

SEQ ID NO: 179203 - DNA, 25 bp, Artificial
  Probe
tagccggttccttccagaaggacag

SEQ ID NO: 179204 - DNA, 25 bp, Artificial
  Probe
gctggctgtcctctaaaaatctcac

SEQ ID NO: 179205 - DNA, 25 bp, Artificial
  Probe
cccagagctggctgtcctctaaaaa

SEQ ID NO: 179206 - DNA, 25 bp, Artificial
  Probe
tcaatggcagccatgtttcttcata

SEQ ID NO: 179207 - DNA, 25 bp, Artificial
  Probe
aatctcaccgaggaaagaaggaaag

SEQ ID NO: 179208 - DNA, 25 bp, Artificial
  Probe
aaggtggccctttaagctgagaggc

SEQ ID NO: 179209 - DNA, 25 bp, Artificial
  Probe
cctctaaaaatctcaccgaggaaag

SEQ ID NO: 179210 - DNA, 25 bp, Artificial
  Probe
acaggctttggctagtaatgtcagg

SEQ ID NO: 179211 - DNA, 25 bp, Artificial
  Probe
gggtaatccggcagtgggattcatt

SEQ ID NO: 179212 - DNA, 25 bp, Artificial
  Probe
tcctggaaagcttccctttatgttt

SEQ ID NO: 179213 - DNA, 25 bp, Artificial
  Probe
ctaatttgttgaagggcctcaacca

SEQ ID NO: 179214 - DNA, 25 bp, Artificial
  Probe
gccagcagtacatggcacagcccaa

SEQ ID NO: 179215 - DNA, 25 bp, Artificial
  Probe
gtctggggcttgtgccccttgttgt

SEQ ID NO: 179216 - DNA, 25 bp, Artificial
  Probe
gagtcttttccatgctctgatcacc

SEQ ID NO: 179217 - DNA, 25 bp, Artificial
  Probe
gccccttgttgttcgttctgcttct

SEQ ID NO: 179218 - DNA, 25 bp, Artificial
  Probe
gctgcctcagaactcatttgcttct

SEQ ID NO: 179219 - DNA, 25 bp, Artificial
  Probe
gatcacctaagctgcctcagaactc

SEQ ID NO: 179220 - DNA, 25 bp, Artificial
  Probe
ctttggctagtaatgtcaggcgtgg

SEQ ID NO: 179221 - DNA, 25 bp, Artificial
  Probe
cacactcaaagaagggtggtttatc

SEQ ID NO: 179222 - DNA, 25 bp, Artificial
  Probe
tccggcagtgggattcattcatatc

SEQ ID NO: 179223 - DNA, 25 bp, Artificial
  Probe
tgttgaagggcctcaaccacactca

SEQ ID NO: 179224 - DNA, 25 bp, Artificial
  Probe
gcttctctccttcctggaaagcttc

SEQ ID NO: 179225 - DNA, 25 bp, Artificial
  Probe
gcagtacatggcacagcccaagcca

SEQ ID NO: 179226 - DNA, 25 bp, Artificial
  Probe
gacatcttaaagagtcttgataatc

SEQ ID NO: 179227 - DNA, 25 bp, Artificial
  Probe
tcaaccacactcaaagaagggtggt

SEQ ID NO: 179228 - DNA, 25 bp, Artificial
  Probe
gttgttcgttctgcttctttgcccc

SEQ ID NO: 179229 - DNA, 25 bp, Artificial
  Probe
ttttgcagtgtctggggcttgtgcc

SEQ ID NO: 179230 - DNA, 25 bp, Artificial
  Probe
cctaggccagcctggagtcttttcc

SEQ ID NO: 179231 - DNA, 25 bp, Artificial
  Probe
gtcttgataatcctgacattgctaa

SEQ ID NO: 179232 - DNA, 25 bp, Artificial
  Probe
gtaatccggcagtgggattcattca

SEQ ID NO: 179233 - DNA, 25 bp, Artificial
  Probe
tattttgaccccagatgtccagatg

SEQ ID NO: 179234 - DNA, 25 bp, Artificial
  Probe
atttgcttctctccttcctggaaag

SEQ ID NO: 179235 - DNA, 25 bp, Artificial
  Probe
ccttcctggaaagcttccctttatg

SEQ ID NO: 179236 - DNA, 25 bp, Artificial
  Probe
acattgctaaataggggtaatccgg

SEQ ID NO: 179237 - DNA, 25 bp, Artificial
  Probe
tgataatcctgacattgctaaatag

SEQ ID NO: 179238 - DNA, 25 bp, Artificial
  Probe
tgggattcattcatatcttcctgca

SEQ ID NO: 179239 - DNA, 25 bp, Artificial
  Probe
ttaggcacaggctttggctagtaat

SEQ ID NO: 179240 - DNA, 25 bp, Artificial
  Probe
agtgtctggggcttgtgccccttgt

SEQ ID NO: 179241 - DNA, 25 bp, Artificial
  Probe
tggtttaggcacaggctttggctag

SEQ ID NO: 179242 - DNA, 25 bp, Artificial
  Probe
gcggggtcctattgttctaatttgt

SEQ ID NO: 179243 - DNA, 25 bp, Artificial
  Probe
ggtggtttatcttcgacatcttaaa

SEQ ID NO: 179244 - DNA, 25 bp, Artificial
  Probe
tgcactcctgccagcagtacatggc

SEQ ID NO: 179245 - DNA, 25 bp, Artificial
  Probe
ggcttgtgccccttgttgttcgttc

SEQ ID NO: 179246 - DNA, 25 bp, Artificial
  Probe
gatgtccagatgttttgcagtgtct

SEQ ID NO: 179247 - DNA, 25 bp, Artificial
  Probe
atcttcgacatcttaaagagtcttg

SEQ ID NO: 179248 - DNA, 25 bp, Artificial
  Probe
ttgttctaatttgttgaagggcctc

SEQ ID NO: 179249 - DNA, 25 bp, Artificial
  Probe
gtttatcttcgacatcttaaagagt

SEQ ID NO: 179250 - DNA, 25 bp, Artificial
  Probe
cctaagctgcctcagaactcatttg

SEQ ID NO: 179251 - DNA, 25 bp, Artificial
  Probe
gggattcattcatatcttcctgcac

SEQ ID NO: 179252 - DNA, 25 bp, Artificial
  Probe
aggcacaggctttggctagtaatgt

SEQ ID NO: 179253 - DNA, 25 bp, Artificial
  Probe
ccacactcaaagaagggtggtttat

SEQ ID NO: 179254 - DNA, 25 bp, Artificial
  Probe
ttccatgctctgatcacctaagctg

SEQ ID NO: 179255 - DNA, 25 bp, Artificial
  Probe
aagagtcttgataatcctgacattg

SEQ ID NO: 179256 - DNA, 25 bp, Artificial
  Probe
gtatctcatcgctgtgatgtgtgga

SEQ ID NO: 179257 - DNA, 25 bp, Artificial
  Probe
tggtgacctagacctcagagctgtt

SEQ ID NO: 179258 - DNA, 25 bp, Artificial
  Probe
cggcacgagggtgatttctacttgg

SEQ ID NO: 179259 - DNA, 25 bp, Artificial
  Probe
cttgattgaataccttacagcctag

SEQ ID NO: 179260 - DNA, 25 bp, Artificial
  Probe
ctgtatcatagtaggacctatgtat

SEQ ID NO: 179261 - DNA, 25 bp, Artificial
  Probe
tcatagtaggacctatgtatctcat

SEQ ID NO: 179262 - DNA, 25 bp, Artificial
  Probe
tatgtactgtatcatagtaggacct

SEQ ID NO: 179263 - DNA, 25 bp, Artificial
  Probe
cgagggtgatttctacttggcaacc

SEQ ID NO: 179264 - DNA, 25 bp, Artificial
  Probe
tctcatcgctgtgatgtgtggacgg

SEQ ID NO: 179265 - DNA, 25 bp, Artificial
  Probe
tgaaactggatactcgatttttatc

SEQ ID NO: 179266 - DNA, 25 bp, Artificial
  Probe
tcagagctgttcttagtttaagact

SEQ ID NO: 179267 - DNA, 25 bp, Artificial
  Probe
tccttgcatctaaaggccttgtggt

SEQ ID NO: 179268 - DNA, 25 bp, Artificial
  Probe
acagcctagacctcagtacaaaaag

SEQ ID NO: 179269 - DNA, 25 bp, Artificial
  Probe
ggacctatgtatctcatcgctgtga

SEQ ID NO: 179270 - DNA, 25 bp, Artificial
  Probe
ctagacctcagtacaaaaaggtatt

SEQ ID NO: 179271 - DNA, 25 bp, Artificial
  Probe
ccttgcatctaaaggccttgtggtt

SEQ ID NO: 179272 - DNA, 25 bp, Artificial
  Probe
agtaagactttcaggcacttcttcc

SEQ ID NO: 179273 - DNA, 25 bp, Artificial
  Probe
atagtaggacctatgtatctcatcg

SEQ ID NO: 179274 - DNA, 25 bp, Artificial
  Probe
gggtgatttctacttggcaaccttt

SEQ ID NO: 179275 - DNA, 25 bp, Artificial
  Probe
agacctcagagctgttcttagttta

SEQ ID NO: 179276 - DNA, 25 bp, Artificial
  Probe
gcctagacctcagtacaaaaaggta

SEQ ID NO: 179277 - DNA, 25 bp, Artificial
  Probe
cagtaagactttcaggcacttcttc

SEQ ID NO: 179278 - DNA, 25 bp, Artificial
  Probe
aagtaatccttgcatctaaaggcct

SEQ ID NO: 179279 - DNA, 25 bp, Artificial
  Probe
tatcatagtaggacctatgtatctc

SEQ ID NO: 179280 - DNA, 25 bp, Artificial
  Probe
aaagtaatccttgcatctaaaggcc

SEQ ID NO: 179281 - DNA, 25 bp, Artificial
  Probe
cctagacctcagagctgttcttagt

SEQ ID NO: 179282 - DNA, 25 bp, Artificial
  Probe
cctatgtatctcatcgctgtgatgt

SEQ ID NO: 179283 - DNA, 25 bp, Artificial
  Probe
gtgatttctacttggcaaccttttt

SEQ ID NO: 179284 - DNA, 25 bp, Artificial
  Probe
tgtactgtatcatagtaggacctat

SEQ ID NO: 179285 - DNA, 25 bp, Artificial
  Probe
tactgtatcatagtaggacctatgt

SEQ ID NO: 179286 - DNA, 25 bp, Artificial
  Probe
cagagctgttcttagtttaagactg

SEQ ID NO: 179287 - DNA, 25 bp, Artificial
  Probe
ctatgtatctcatcgctgtgatgtg

SEQ ID NO: 179288 - DNA, 25 bp, Artificial
  Probe
gttttttcagtaagactttcaggca

SEQ ID NO: 179289 - DNA, 25 bp, Artificial
  Probe
aaatggtgacctagacctcagagct

SEQ ID NO: 179290 - DNA, 25 bp, Artificial
  Probe
aatggtgacctagacctcagagctg

SEQ ID NO: 179291 - DNA, 25 bp, Artificial
  Probe
atcatagtaggacctatgtatctca

SEQ ID NO: 179292 - DNA, 25 bp, Artificial
  Probe
ctagacctcagagctgttcttagtt

SEQ ID NO: 179293 - DNA, 25 bp, Artificial
  Probe
ttttttcagtaagactttcaggcac

SEQ ID NO: 179294 - DNA, 25 bp, Artificial
  Probe
gtatgtactgtatcatagtaggacc

SEQ ID NO: 179295 - DNA, 25 bp, Artificial
  Probe
tcagtaagactttcaggcacttctt

SEQ ID NO: 179296 - DNA, 25 bp, Artificial
  Probe
acctatgtatctcatcgctgtgatg

SEQ ID NO: 179297 - DNA, 25 bp, Artificial
  Probe
gattgaataccttacagcctagacc

SEQ ID NO: 179298 - DNA, 25 bp, Artificial
  Probe
gccccagacggaaggtttgaaactg

SEQ ID NO: 179299 - DNA, 25 bp, Artificial
  Probe
tgattgaataccttacagcctagac

SEQ ID NO: 179300 - DNA, 25 bp, Artificial
  Probe
gacctcagtacaaaaaggtattgaa

SEQ ID NO: 179301 - DNA, 25 bp, Artificial
  Probe
agggtgatttctacttggcaacctt

SEQ ID NO: 179302 - DNA, 25 bp, Artificial
  Probe
ggtcgtgcagcctccgactatactg

SEQ ID NO: 179303 - DNA, 25 bp, Artificial
  Probe
tgctgggttgcaatattttgctgct

SEQ ID NO: 179304 - DNA, 25 bp, Artificial
  Probe
aaagttaattcagatacctatcgag

SEQ ID NO: 179305 - DNA, 25 bp, Artificial
  Probe
caccagcaaagtgtaatggtcgtgc

SEQ ID NO: 179306 - DNA, 25 bp, Artificial
  Probe
tttccctgtgggtcatagtcatacc

SEQ ID NO: 179307 - DNA, 25 bp, Artificial
  Probe
catgtacgttgatgtagcatcattt

SEQ ID NO: 179308 - DNA, 25 bp, Artificial
  Probe
ggtttactaacagtaactgccattt

SEQ ID NO: 179309 - DNA, 25 bp, Artificial
  Probe
tggctggtttactaacagtaactgc

SEQ ID NO: 179310 - DNA, 25 bp, Artificial
  Probe
gaatctacttgctgggttgcaatat

SEQ ID NO: 179311 - DNA, 25 bp, Artificial
  Probe
gggttgtttccctgtgggtcatagt

SEQ ID NO: 179312 - DNA, 25 bp, Artificial
  Probe
actaacagtaactgccatttcgtgt

SEQ ID NO: 179313 - DNA, 25 bp, Artificial
  Probe
atgttactccttaacatgtacgttg

SEQ ID NO: 179314 - DNA, 25 bp, Artificial
  Probe
tactaacagtaactgccatttcgtg

SEQ ID NO: 179315 - DNA, 25 bp, Artificial
  Probe
gtgttccgtggctggtttactaaca

SEQ ID NO: 179316 - DNA, 25 bp, Artificial
  Probe
tcctttaatgggttgtttccctgtg

SEQ ID NO: 179317 - DNA, 25 bp, Artificial
  Probe
agtcataccttctgatgaagttgag

SEQ ID NO: 179318 - DNA, 25 bp, Artificial
  Probe
taatggtcgtgcagcctccgactat

SEQ ID NO: 179319 - DNA, 25 bp, Artificial
  Probe
taaagtgttccgtggctggtttact

SEQ ID NO: 179320 - DNA, 25 bp, Artificial
  Probe
gtgcagcctccgactatactgagac

SEQ ID NO: 179321 - DNA, 25 bp, Artificial
  Probe
tcagatacctatcgagatggtaact

SEQ ID NO: 179322 - DNA, 25 bp, Artificial
  Probe
tgaagttgagccaacaccagcaaag

SEQ ID NO: 179323 - DNA, 25 bp, Artificial
  Probe
gttgcaatattttgctgctggactt

SEQ ID NO: 179324 - DNA, 25 bp, Artificial
  Probe
tgcactctaggctgaaccatgctga

SEQ ID NO: 179325 - DNA, 25 bp, Artificial
  Probe
cgtggctggtttactaacagtaact

SEQ ID NO: 179326 - DNA, 25 bp, Artificial
  Probe
tgccatttcgtgtccgtggtaacaa

SEQ ID NO: 179327 - DNA, 25 bp, Artificial
  Probe
acagtaactgccatttcgtgtccgt

SEQ ID NO: 179328 - DNA, 25 bp, Artificial
  Probe
gttgtttccctgtgggtcatagtca

SEQ ID NO: 179329 - DNA, 25 bp, Artificial
  Probe
tgggtcatagtcataccttctgatg

SEQ ID NO: 179330 - DNA, 25 bp, Artificial
  Probe
tccgtggctggtttactaacagtaa

SEQ ID NO: 179331 - DNA, 25 bp, Artificial
  Probe
tttcgtgtccgtggtaacaaagtga

SEQ ID NO: 179332 - DNA, 25 bp, Artificial
  Probe
agatacctatcgagatggtaactgt

SEQ ID NO: 179333 - DNA, 25 bp, Artificial
  Probe
ttgtggatgaacaccctatctccct

SEQ ID NO: 179334 - DNA, 25 bp, Artificial
  Probe
tggtttactaacagtaactgccatt

SEQ ID NO: 179335 - DNA, 25 bp, Artificial
  Probe
ccctgtgggtcatagtcataccttc

SEQ ID NO: 179336 - DNA, 25 bp, Artificial
  Probe
ctacttgctgggttgcaatattttg

SEQ ID NO: 179337 - DNA, 25 bp, Artificial
  Probe
cctacttgtattatgcagaaagtta

SEQ ID NO: 179338 - DNA, 25 bp, Artificial
  Probe
taatgggttgtttccctgtgggtca

SEQ ID NO: 179339 - DNA, 25 bp, Artificial
  Probe
cttctgatgaagttgagccaacacc

SEQ ID NO: 179340 - DNA, 25 bp, Artificial
  Probe
cctgtgttcttcctttaatgggttg

SEQ ID NO: 179341 - DNA, 25 bp, Artificial
  Probe
tgtccgtggtaacaaagtgacttgt

SEQ ID NO: 179342 - DNA, 25 bp, Artificial
  Probe
aaagtgtaatggtcgtgcagcctcc

SEQ ID NO: 179343 - DNA, 25 bp, Artificial
  Probe
agactgcactctaggctgaaccatg

SEQ ID NO: 179344 - DNA, 25 bp, Artificial
  Probe
tcataccttctgatgaagttgagcc

SEQ ID NO: 179345 - DNA, 25 bp, Artificial
  Probe
ttaattcagatacctatcgagatgg

SEQ ID NO: 179346 - DNA, 25 bp, Artificial
  Probe
ctatcgagatggtaactgtaaagac

SEQ ID NO: 179347 - DNA, 25 bp, Artificial
  Probe
attcagatacctatcgagatggtaa

SEQ ID NO: 179348 - DNA, 25 bp, Artificial
  Probe
aagaggttccacacacattttcttg

SEQ ID NO: 179349 - DNA, 25 bp, Artificial
  Probe
ggtttccacggactcatcttccgac

SEQ ID NO: 179350 - DNA, 25 bp, Artificial
  Probe
tgcaaatacaatgtagcttacagct

SEQ ID NO: 179351 - DNA, 25 bp, Artificial
  Probe
aggagaaactcaagtcccagtggaa

SEQ ID NO: 179352 - DNA, 25 bp, Artificial
  Probe
caaggatccaaaagcctactttgtt

SEQ ID NO: 179353 - DNA, 25 bp, Artificial
  Probe
atcaaggctgccagggtttccacgg

SEQ ID NO: 179354 - DNA, 25 bp, Artificial
  Probe
cccagtgctgccaaggatccaaaag

SEQ ID NO: 179355 - DNA, 25 bp, Artificial
  Probe
tctttccgccattatatcaaggctg

SEQ ID NO: 179356 - DNA, 25 bp, Artificial
  Probe
caacggtcatgaaccctaagtttgc

SEQ ID NO: 179357 - DNA, 25 bp, Artificial
  Probe
gccattatatcaaggctgccagggt

SEQ ID NO: 179358 - DNA, 25 bp, Artificial
  Probe
gattgttccggagtcccaagaggtt

SEQ ID NO: 179359 - DNA, 25 bp, Artificial
  Probe
ggtcatgaaccctaagtttgctgag

SEQ ID NO: 179360 - DNA, 25 bp, Artificial
  Probe
atacaatgtagcttacagctcgccc

SEQ ID NO: 179361 - DNA, 25 bp, Artificial
  Probe
aggctgccagggtttccacggactc

SEQ ID NO: 179362 - DNA, 25 bp, Artificial
  Probe
cacatatatcagaatcatgtgtgta

SEQ ID NO: 179363 - DNA, 25 bp, Artificial
  Probe
catctggaaggctcttacccacctg

SEQ ID NO: 179364 - DNA, 25 bp, Artificial
  Probe
cagacgctttgagaaggagaaactc

SEQ ID NO: 179365 - DNA, 25 bp, Artificial
  Probe
tacaatcttgccacagagcctgcag

SEQ ID NO: 179366 - DNA, 25 bp, Artificial
  Probe
cctaagtttgctgagagctagagaa

SEQ ID NO: 179367 - DNA, 25 bp, Artificial
  Probe
cctgtccgttgtattatatgtgagt

SEQ ID NO: 179368 - DNA, 25 bp, Artificial
  Probe
gagaaactcaagtcccagtggaaca

SEQ ID NO: 179369 - DNA, 25 bp, Artificial
  Probe
cctgcagattgttccggagtcccaa

SEQ ID NO: 179370 - DNA, 25 bp, Artificial
  Probe
tcaatgaatacagacgctttgagaa

SEQ ID NO: 179371 - DNA, 25 bp, Artificial
  Probe
acatcctgtccgttgtattatatgt

SEQ ID NO: 179372 - DNA, 25 bp, Artificial
  Probe
tgccacagagcctgcagattgttcc

SEQ ID NO: 179373 - DNA, 25 bp, Artificial
  Probe
ttcaagagcgccacgacaacggtca

SEQ ID NO: 179374 - DNA, 25 bp, Artificial
  Probe
ccacgacaacggtcatgaaccctaa

SEQ ID NO: 179375 - DNA, 25 bp, Artificial
  Probe
tggaaggctcttacccacctgactg

SEQ ID NO: 179376 - DNA, 25 bp, Artificial
  Probe
tatattgttaacatcctgtccgttg

SEQ ID NO: 179377 - DNA, 25 bp, Artificial
  Probe
tctcagtaaaggtggccccagctta

SEQ ID NO: 179378 - DNA, 25 bp, Artificial
  Probe
cattttcttgcataaagggaagacg

SEQ ID NO: 179379 - DNA, 25 bp, Artificial
  Probe
gaggttccacacacattttcttgca

SEQ ID NO: 179380 - DNA, 25 bp, Artificial
  Probe
gacctatacaatcttgccacagagc

SEQ ID NO: 179381 - DNA, 25 bp, Artificial
  Probe
ttccggagtcccaagaggttccaca

SEQ ID NO: 179382 - DNA, 25 bp, Artificial
  Probe
gccagggtttccacggactcatctt

SEQ ID NO: 179383 - DNA, 25 bp, Artificial
  Probe
agattgttccggagtcccaagaggt

SEQ ID NO: 179384 - DNA, 25 bp, Artificial
  Probe
cacacacattttcttgcataaaggg

SEQ ID NO: 179385 - DNA, 25 bp, Artificial
  Probe
ctgactgacctcaatgaatacagac

SEQ ID NO: 179386 - DNA, 25 bp, Artificial
  Probe
cgacctatacaatcttgccacagag

SEQ ID NO: 179387 - DNA, 25 bp, Artificial
  Probe
gttaacatcctgtccgttgtattat

SEQ ID NO: 179388 - DNA, 25 bp, Artificial
  Probe
caagtcccagtggaacaacgacaac

SEQ ID NO: 179389 - DNA, 25 bp, Artificial
  Probe
ttatatcaaggctgccagggtttcc

SEQ ID NO: 179390 - DNA, 25 bp, Artificial
  Probe
atcttgccacagagcctgcagattg

SEQ ID NO: 179391 - DNA, 25 bp, Artificial
  Probe
ggtctcagtaaaggtggccccagct

SEQ ID NO: 179392 - DNA, 25 bp, Artificial
  Probe
ataataaagcttccattcagggctg

SEQ ID NO: 179393 - DNA, 25 bp, Artificial
  Probe
gtcccaagaggttccacacacattt

SEQ ID NO: 179394 - DNA, 25 bp, Artificial
  Probe
cctttcttcagactccgtccaagga

SEQ ID NO: 179395 - DNA, 25 bp, Artificial
  Probe
caacagcgcccctggtggacaggat

SEQ ID NO: 179396 - DNA, 25 bp, Artificial
  Probe
tcagactccgtccaaggagatgctc

SEQ ID NO: 179397 - DNA, 25 bp, Artificial
  Probe
cgcccagcagcagtatggcttccag

SEQ ID NO: 179398 - DNA, 25 bp, Artificial
  Probe
gaacacgctggctccatatcgtgaa

SEQ ID NO: 179399 - DNA, 25 bp, Artificial
  Probe
gcccagcagcagtatggcttccagc

SEQ ID NO: 179400 - DNA, 25 bp, Artificial
  Probe
tccttgtggtcctcttcctccatgg

SEQ ID NO: 179401 - DNA, 25 bp, Artificial
  Probe
tggttcggcaaagcagcctgagtta

SEQ ID NO: 179402 - DNA, 25 bp, Artificial
  Probe
cttgtggtcctcttcctccatggca

SEQ ID NO: 179403 - DNA, 25 bp, Artificial
  Probe
ttgtggtcctcttcctccatggcag

SEQ ID NO: 179404 - DNA, 25 bp, Artificial
  Probe
tcctttcttcagactccgtccaagg

SEQ ID NO: 179405 - DNA, 25 bp, Artificial
  Probe
ttccaggcagacagcctcaacagcg

SEQ ID NO: 179406 - DNA, 25 bp, Artificial
  Probe
cggaatcggaacacgctggctccat

SEQ ID NO: 179407 - DNA, 25 bp, Artificial
  Probe
gactccgtccaaggagatgctctcc

SEQ ID NO: 179408 - DNA, 25 bp, Artificial
  Probe
cacgctggctccatatcgtgaaatt

SEQ ID NO: 179409 - DNA, 25 bp, Artificial
  Probe
agactccgtccaaggagatgctctc

SEQ ID NO: 179410 - DNA, 25 bp, Artificial
  Probe
gctggctccatatcgtgaaattttt

SEQ ID NO: 179411 - DNA, 25 bp, Artificial
  Probe
aacagcgcccctggtggacaggatg

SEQ ID NO: 179412 - DNA, 25 bp, Artificial
  Probe
ctttcttcagactccgtccaaggag

SEQ ID NO: 179413 - DNA, 25 bp, Artificial
  Probe
ttgccatggcagcaaagatccctcc

SEQ ID NO: 179414 - DNA, 25 bp, Artificial
  Probe
tttgtggacggaatcggaacacgct

SEQ ID NO: 179415 - DNA, 25 bp, Artificial
  Probe
tggtgacccttccaggcagacagcc

SEQ ID NO: 179416 - DNA, 25 bp, Artificial
  Probe
atggttcggcaaagcagcctgagtt

SEQ ID NO: 179417 - DNA, 25 bp, Artificial
  Probe
acccccttgccatggcagcaaagat

SEQ ID NO: 179418 - DNA, 25 bp, Artificial
  Probe
acgctggctccatatcgtgaaattt

SEQ ID NO: 179419 - DNA, 25 bp, Artificial
  Probe
ggtgacccttccaggcagacagcct

SEQ ID NO: 179420 - DNA, 25 bp, Artificial
  Probe
ccttgccatggcagcaaagatccct

SEQ ID NO: 179421 - DNA, 25 bp, Artificial
  Probe
ttcagactccgtccaaggagatgct

SEQ ID NO: 179422 - DNA, 25 bp, Artificial
  Probe
cagactccgtccaaggagatgctct

SEQ ID NO: 179423 - DNA, 25 bp, Artificial
  Probe
tgtggtcctcttcctccatggcagc

SEQ ID NO: 179424 - DNA, 25 bp, Artificial
  Probe
cgctggctccatatcgtgaaatttt

SEQ ID NO: 179425 - DNA, 25 bp, Artificial
  Probe
cattggtgacccttccaggcagaca

SEQ ID NO: 179426 - DNA, 25 bp, Artificial
  Probe
ttttgtggacggaatcggaacacgc

SEQ ID NO: 179427 - DNA, 25 bp, Artificial
  Probe
cccgagccatgagagtgaggacttt

SEQ ID NO: 179428 - DNA, 25 bp, Artificial
  Probe
attggtgacccttccaggcagacag

SEQ ID NO: 179429 - DNA, 25 bp, Artificial
  Probe
ccagcagcagtatggcttccagcac

SEQ ID NO: 179430 - DNA, 25 bp, Artificial
  Probe
acacgctggctccatatcgtgaaat

SEQ ID NO: 179431 - DNA, 25 bp, Artificial
  Probe
gtggtcctcttcctccatggcagca

SEQ ID NO: 179432 - DNA, 25 bp, Artificial
  Probe
ggttcggcaaagcagcctgagttat

SEQ ID NO: 179433 - DNA, 25 bp, Artificial
  Probe
ccgagccatgagagtgaggactttc

SEQ ID NO: 179434 - DNA, 25 bp, Artificial
  Probe
cttgccatggcagcaaagatccctc

SEQ ID NO: 179435 - DNA, 25 bp, Artificial
  Probe
gttcggcaaagcagcctgagttatt

SEQ ID NO: 179436 - DNA, 25 bp, Artificial
  Probe
gacggaatcggaacacgctggctcc

SEQ ID NO: 179437 - DNA, 25 bp, Artificial
  Probe
acggaatcggaacacgctggctcca

SEQ ID NO: 179438 - DNA, 25 bp, Artificial
  Probe
gcccgagccatgagagtgaggactt

SEQ ID NO: 179439 - DNA, 25 bp, Artificial
  Probe
atcggaacacgctggctccatatcg

SEQ ID NO: 179440 - DNA, 25 bp, Artificial
  Probe
agctacagtacaataaagctggtaa

SEQ ID NO: 179441 - DNA, 25 bp, Artificial
  Probe
gcgactctcggagaacttccagcag

SEQ ID NO: 179442 - DNA, 25 bp, Artificial
  Probe
ggtacggtcatttcttctgccttcc

SEQ ID NO: 179443 - DNA, 25 bp, Artificial
  Probe
agagtatccggaggttcaccacctc

SEQ ID NO: 179444 - DNA, 25 bp, Artificial
  Probe
ctgcttatgatgaccgtgtactttg

SEQ ID NO: 179445 - DNA, 25 bp, Artificial
  Probe
agtggcggttactgcttatgatgac

SEQ ID NO: 179446 - DNA, 25 bp, Artificial
  Probe
tgtactttggatctggatttgctgc

SEQ ID NO: 179447 - DNA, 25 bp, Artificial
  Probe
acggtcatttcttctgccttccgtc

SEQ ID NO: 179448 - DNA, 25 bp, Artificial
  Probe
tctcggagaacttccagcagcagca

SEQ ID NO: 179449 - DNA, 25 bp, Artificial
  Probe
tccgtctttgcgactctcggagaac

SEQ ID NO: 179450 - DNA, 25 bp, Artificial
  Probe
ggatttgctgctcctttctttatag

SEQ ID NO: 179451 - DNA, 25 bp, Artificial
  Probe
ttctgccttccgtctttgcgactct

SEQ ID NO: 179452 - DNA, 25 bp, Artificial
  Probe
tctttgcgactctcggagaacttcc

SEQ ID NO: 179453 - DNA, 25 bp, Artificial
  Probe
acttccagcagcagcatgttgggcc

SEQ ID NO: 179454 - DNA, 25 bp, Artificial
  Probe
ggtggtacggtcatttcttctgcct

SEQ ID NO: 179455 - DNA, 25 bp, Artificial
  Probe
tgcgactctcggagaacttccagca

SEQ ID NO: 179456 - DNA, 25 bp, Artificial
  Probe
ttgggccagagtatccggaggttca

SEQ ID NO: 179457 - DNA, 25 bp, Artificial
  Probe
tttcttctgccttccgtctttgcga

SEQ ID NO: 179458 - DNA, 25 bp, Artificial
  Probe
tgctcctttctttatagtaaggccc

SEQ ID NO: 179459 - DNA, 25 bp, Artificial
  Probe
gtacggtcatttcttctgccttccg

SEQ ID NO: 179460 - DNA, 25 bp, Artificial
  Probe
tgccttccgtctttgcgactctcgg

SEQ ID NO: 179461 - DNA, 25 bp, Artificial
  Probe
tttgccgttttcagtggaaaacaag

SEQ ID NO: 179462 - DNA, 25 bp, Artificial
  Probe
aaaggaaccagcacagagctaactt

SEQ ID NO: 179463 - DNA, 25 bp, Artificial
  Probe
catcccattaacagaatgaagaaag

SEQ ID NO: 179464 - DNA, 25 bp, Artificial
  Probe
atgaaagctacagtacaataaagct

SEQ ID NO: 179465 - DNA, 25 bp, Artificial
  Probe
aaagctacagtacaataaagctggt

SEQ ID NO: 179466 - DNA, 25 bp, Artificial
  Probe
ctttctttatagtaaggccccagct

SEQ ID NO: 179467 - DNA, 25 bp, Artificial
  Probe
tgggccagagtatccggaggttcac

SEQ ID NO: 179468 - DNA, 25 bp, Artificial
  Probe
acaagtggcggttactgcttatgat

SEQ ID NO: 179469 - DNA, 25 bp, Artificial
  Probe
ttctttatagtaaggccccagctac

SEQ ID NO: 179470 - DNA, 25 bp, Artificial
  Probe
cagagtatccggaggttcaccacct

SEQ ID NO: 179471 - DNA, 25 bp, Artificial
  Probe
gccgttttcagtggaaaacaagtgg

SEQ ID NO: 179472 - DNA, 25 bp, Artificial
  Probe
ccagcagcagcatgttgggccagag

SEQ ID NO: 179473 - DNA, 25 bp, Artificial
  Probe
tccagcagcagcatgttgggccaga

SEQ ID NO: 179474 - DNA, 25 bp, Artificial
  Probe
tcccattaacagaatgaagaaagtt

SEQ ID NO: 179475 - DNA, 25 bp, Artificial
  Probe
cgttttcagtggaaaacaagtggcg

SEQ ID NO: 179476 - DNA, 25 bp, Artificial
  Probe
ttgctgctcctttctttatagtaag

SEQ ID NO: 179477 - DNA, 25 bp, Artificial
  Probe
cagagctaacttacaggttttctta

SEQ ID NO: 179478 - DNA, 25 bp, Artificial
  Probe
caagtggcggttactgcttatgatg

SEQ ID NO: 179479 - DNA, 25 bp, Artificial
  Probe
tcctttctttatagtaaggccccag

SEQ ID NO: 179480 - DNA, 25 bp, Artificial
  Probe
ctacagtacaataaagctggtaaaa

SEQ ID NO: 179481 - DNA, 25 bp, Artificial
  Probe
ggtcatttcttctgccttccgtctt

SEQ ID NO: 179482 - DNA, 25 bp, Artificial
  Probe
gagctaacttacaggttttcttaag

SEQ ID NO: 179483 - DNA, 25 bp, Artificial
  Probe
atttcttctgccttccgtctttgcg

SEQ ID NO: 179484 - DNA, 25 bp, Artificial
  Probe
ttatgatgaccgtgtactttggatc

SEQ ID NO: 179485 - DNA, 25 bp, Artificial
  Probe
gatctggatttgctgctcctttctt

SEQ ID NO: 179486 - DNA, 25 bp, Artificial
  Probe
cgaatggaacttgctgagacccagc

SEQ ID NO: 179487 - DNA, 25 bp, Artificial
  Probe
tctgccctatactttgggatagatt

SEQ ID NO: 179488 - DNA, 25 bp, Artificial
  Probe
ggatgtgccacgtggaccacttggt

SEQ ID NO: 179489 - DNA, 25 bp, Artificial
  Probe
tggcttcctgcttgcctgggccttc

SEQ ID NO: 179490 - DNA, 25 bp, Artificial
  Probe
tgacagactggcttcctgcttgcct

SEQ ID NO: 179491 - DNA, 25 bp, Artificial
  Probe
ttgcctgggccttctgccctatact

SEQ ID NO: 179492 - DNA, 25 bp, Artificial
  Probe
cgtcccatccacagttgtcagttgt

SEQ ID NO: 179493 - DNA, 25 bp, Artificial
  Probe
ccttctgccctatactttgggatag

SEQ ID NO: 179494 - DNA, 25 bp, Artificial
  Probe
ggccttctgccctatactttgggat

SEQ ID NO: 179495 - DNA, 25 bp, Artificial
  Probe
tcttacgtcatgagtgtcaaatgtg

SEQ ID NO: 179496 - DNA, 25 bp, Artificial
  Probe
accagatgtcactctgcagcaggct

SEQ ID NO: 179497 - DNA, 25 bp, Artificial
  Probe
aggggaccagatgtcactctgcagc

SEQ ID NO: 179498 - DNA, 25 bp, Artificial
  Probe
tacacagtcaataaagcgaatggaa

SEQ ID NO: 179499 - DNA, 25 bp, Artificial
  Probe
gaccagatgtcactctgcagcaggc

SEQ ID NO: 179500 - DNA, 25 bp, Artificial
  Probe
tgtgccacgtggaccacttggttga

SEQ ID NO: 179501 - DNA, 25 bp, Artificial
  Probe
gcagtccttgacattaaagagagaa

SEQ ID NO: 179502 - DNA, 25 bp, Artificial
  Probe
accacttggttgacagactggcttc

SEQ ID NO: 179503 - DNA, 25 bp, Artificial
  Probe
ttggttgacagactggcttcctgct

SEQ ID NO: 179504 - DNA, 25 bp, Artificial
  Probe
tggaacttgctgagacccagccggc

SEQ ID NO: 179505 - DNA, 25 bp, Artificial
  Probe
tgccctatactttgggatagattgg

SEQ ID NO: 179506 - DNA, 25 bp, Artificial
  Probe
ccgtcccatccacagttgtcagttg

SEQ ID NO: 179507 - DNA, 25 bp, Artificial
  Probe
aaggcagtccttgacattaaagaga

SEQ ID NO: 179508 - DNA, 25 bp, Artificial
  Probe
accccacaaggcagtccttgacatt

SEQ ID NO: 179509 - DNA, 25 bp, Artificial
  Probe
ttctgccctatactttgggatagat

SEQ ID NO: 179510 - DNA, 25 bp, Artificial
  Probe
aatggaacttgctgagacccagccg

SEQ ID NO: 179511 - DNA, 25 bp, Artificial
  Probe
agatgtcactctgcagcaggctgat

SEQ ID NO: 179512 - DNA, 25 bp, Artificial
  Probe
ctggcttcctgcttgcctgggcctt

SEQ ID NO: 179513 - DNA, 25 bp, Artificial
  Probe
gcctgggccttctgccctatacttt

SEQ ID NO: 179514 - DNA, 25 bp, Artificial
  Probe
ctatacacagtcaataaagcgaatg

SEQ ID NO: 179515 - DNA, 25 bp, Artificial
  Probe
ccccacaaggcagtccttgacatta

SEQ ID NO: 179516 - DNA, 25 bp, Artificial
  Probe
ttacgtcatgagtgtcaaatgtgtc

SEQ ID NO: 179517 - DNA, 25 bp, Artificial
  Probe
acgtggaccacttggttgacagact

SEQ ID NO: 179518 - DNA, 25 bp, Artificial
  Probe
ccacagttgtcagttgtgaagaggg

SEQ ID NO: 179519 - DNA, 25 bp, Artificial
  Probe
ccaaactgttcttacgtcatgagtg

SEQ ID NO: 179520 - DNA, 25 bp, Artificial
  Probe
ggggaccagatgtcactctgcagca

SEQ ID NO: 179521 - DNA, 25 bp, Artificial
  Probe
acttggttgacagactggcttcctg

SEQ ID NO: 179522 - DNA, 25 bp, Artificial
  Probe
agactggcttcctgcttgcctgggc

SEQ ID NO: 179523 - DNA, 25 bp, Artificial
  Probe
gttcttacgtcatgagtgtcaaatg

SEQ ID NO: 179524 - DNA, 25 bp, Artificial
  Probe
ccccaaactgttcttacgtcatgag

SEQ ID NO: 179525 - DNA, 25 bp, Artificial
  Probe
cccacaaggcagtccttgacattaa

SEQ ID NO: 179526 - DNA, 25 bp, Artificial
  Probe
tggttgacagactggcttcctgctt

SEQ ID NO: 179527 - DNA, 25 bp, Artificial
  Probe
cccatccacagttgtcagttgtgaa

SEQ ID NO: 179528 - DNA, 25 bp, Artificial
  Probe
tgtcactctgcagcaggctgatggg

SEQ ID NO: 179529 - DNA, 25 bp, Artificial
  Probe
gtggaccacttggttgacagactgg

SEQ ID NO: 179530 - DNA, 25 bp, Artificial
  Probe
ggaacttgctgagacccagccggcc

SEQ ID NO: 179531 - DNA, 25 bp, Artificial
  Probe
cgtcatgagtgtcaaatgtgtcccc

SEQ ID NO: 179532 - DNA, 25 bp, Artificial
  Probe
gagaaaagcagttgcccgaagctga

SEQ ID NO: 179533 - DNA, 25 bp, Artificial
  Probe
tgcgcgaaagggacgcctacaagga

SEQ ID NO: 179534 - DNA, 25 bp, Artificial
  Probe
cacgtcctggagtcggagaagaacc

SEQ ID NO: 179535 - DNA, 25 bp, Artificial
  Probe
aaacggctcgagcagcgacaaccct

SEQ ID NO: 179536 - DNA, 25 bp, Artificial
  Probe
gagaaaacggctcgagcagcgacaa

SEQ ID NO: 179537 - DNA, 25 bp, Artificial
  Probe
accagctgctgcagcaggtcgacca

SEQ ID NO: 179538 - DNA, 25 bp, Artificial
  Probe
tcaagagggtgcagcagagacacgt

SEQ ID NO: 179539 - DNA, 25 bp, Artificial
  Probe
tgccgcttcaagagggtgcagcaga

SEQ ID NO: 179540 - DNA, 25 bp, Artificial
  Probe
tgctgcagcaggtcgaccacctcaa

SEQ ID NO: 179541 - DNA, 25 bp, Artificial
  Probe
gaaagggacgcctacaaggagaaat

SEQ ID NO: 179542 - DNA, 25 bp, Artificial
  Probe
gcttcaagagggtgcagcagagaca

SEQ ID NO: 179543 - DNA, 25 bp, Artificial
  Probe
cagtcctgccgcttcaagagggtgc

SEQ ID NO: 179544 - DNA, 25 bp, Artificial
  Probe
atgcttatcccgtgagagaactcgg

SEQ ID NO: 179545 - DNA, 25 bp, Artificial
  Probe
tgtacccaagggactcttctacatc

SEQ ID NO: 179546 - DNA, 25 bp, Artificial
  Probe
agatctccaggctggtgcgcgaaag

SEQ ID NO: 179547 - DNA, 25 bp, Artificial
  Probe
agaaccagctgctgcagcaggtcga

SEQ ID NO: 179548 - DNA, 25 bp, Artificial
  Probe
agaactcggcccacaaagcacaaaa

SEQ ID NO: 179549 - DNA, 25 bp, Artificial
  Probe
ggacgcctacaaggagaaatacgag

SEQ ID NO: 179550 - DNA, 25 bp, Artificial
  Probe
tcccgaatttttcatgtacccaagg

SEQ ID NO: 179551 - DNA, 25 bp, Artificial
  Probe
tcctggagtcggagaagaaccagct

SEQ ID NO: 179552 - DNA, 25 bp, Artificial
  Probe
tatgatgccggcatgcttatcccgt

SEQ ID NO: 179553 - DNA, 25 bp, Artificial
  Probe
tcaagcaggagatctccaggctggt

SEQ ID NO: 179554 - DNA, 25 bp, Artificial
  Probe
caggtcgaccacctcaagcaggaga

SEQ ID NO: 179555 - DNA, 25 bp, Artificial
  Probe
tcccgtgagagaactcggcccacaa

SEQ ID NO: 179556 - DNA, 25 bp, Artificial
  Probe
ttcctggcgtctacaagaagcgctt

SEQ ID NO: 179557 - DNA, 25 bp, Artificial
  Probe
ccggcatgcttatcccgtgagagaa

SEQ ID NO: 179558 - DNA, 25 bp, Artificial
  Probe
gcccgaagctgaacagaaaatatga

SEQ ID NO: 179559 - DNA, 25 bp, Artificial
  Probe
gtgcagcagagacacgtcctggagt

SEQ ID NO: 179560 - DNA, 25 bp, Artificial
  Probe
ggttccgagaaaacggctcgagcag

SEQ ID NO: 179561 - DNA, 25 bp, Artificial
  Probe
gctgcagcaggtcgaccacctcaag

SEQ ID NO: 179562 - DNA, 25 bp, Artificial
  Probe
tttcatgtacccaagggactcttct

SEQ ID NO: 179563 - DNA, 25 bp, Artificial
  Probe
gcagcaggtcgaccacctcaagcag

SEQ ID NO: 179564 - DNA, 25 bp, Artificial
  Probe
gaatttttcatgtacccaagggact

SEQ ID NO: 179565 - DNA, 25 bp, Artificial
  Probe
agctgctgcagcaggtcgaccacct

SEQ ID NO: 179566 - DNA, 25 bp, Artificial
  Probe
agcagttgcccgaagctgaacagaa

SEQ ID NO: 179567 - DNA, 25 bp, Artificial
  Probe
cagcgggttccgagaaaacggctcg

SEQ ID NO: 179568 - DNA, 25 bp, Artificial
  Probe
tatgcccagtcctgccgcttcaaga

SEQ ID NO: 179569 - DNA, 25 bp, Artificial
  Probe
ctacatctgtgatgtgagaaaagca

SEQ ID NO: 179570 - DNA, 25 bp, Artificial
  Probe
aacggctcgagcagcgacaaccctt

SEQ ID NO: 179571 - DNA, 25 bp, Artificial
  Probe
gggtgtttttcctggcgtctacaag

SEQ ID NO: 179572 - DNA, 25 bp, Artificial
  Probe
aagcaggagatctccaggctggtgc

SEQ ID NO: 179573 - DNA, 25 bp, Artificial
  Probe
cggagaagaaccagctgctgcagca

SEQ ID NO: 179574 - DNA, 25 bp, Artificial
  Probe
gaactcggcccacaaagcacaaaaa

SEQ ID NO: 179575 - DNA, 25 bp, Artificial
  Probe
ttcatgtacccaagggactcttcta

SEQ ID NO: 179576 - DNA, 25 bp, Artificial
  Probe
acccaagggactcttctacatctgt

SEQ ID NO: 179577 - DNA, 25 bp, Artificial
  Probe
cgagaaaacggctcgagcagcgaca

SEQ ID NO: 179578 - DNA, 25 bp, Artificial
  Probe
cggcctacgaggacgaggtgtcctt

SEQ ID NO: 179579 - DNA, 25 bp, Artificial
  Probe
tcgagaactttctccctgggttgcc

SEQ ID NO: 179580 - DNA, 25 bp, Artificial
  Probe
gcggccatacgcatctacgacctgg

SEQ ID NO: 179581 - DNA, 25 bp, Artificial
  Probe
ctgttccgctactgcgcaggcgcgt

SEQ ID NO: 179582 - DNA, 25 bp, Artificial
  Probe
cgaggtgtccttcctggacgtacac

SEQ ID NO: 179583 - DNA, 25 bp, Artificial
  Probe
gacgaaaccgtcctgttccgctact

SEQ ID NO: 179584 - DNA, 25 bp, Artificial
  Probe
tctgggctacacgtcggacgaaacc

SEQ ID NO: 179585 - DNA, 25 bp, Artificial
  Probe
ggtgtccttcctggacgtacacagc

SEQ ID NO: 179586 - DNA, 25 bp, Artificial
  Probe
acggcctacgaggacgaggtgtcct

SEQ ID NO: 179587 - DNA, 25 bp, Artificial
  Probe
agagcgggtgcgagcgcacccgtgc

SEQ ID NO: 179588 - DNA, 25 bp, Artificial
  Probe
gacgaggtgtccttcctggacgtac

SEQ ID NO: 179589 - DNA, 25 bp, Artificial
  Probe
aggtgtccttcctggacgtacacag

SEQ ID NO: 179590 - DNA, 25 bp, Artificial
  Probe
acgcggtggagcttcgagaactttc

SEQ ID NO: 179591 - DNA, 25 bp, Artificial
  Probe
ggtctgggctacacgtcggacgaaa

SEQ ID NO: 179592 - DNA, 25 bp, Artificial
  Probe
ggccatacgcatctacgacctgggc

SEQ ID NO: 179593 - DNA, 25 bp, Artificial
  Probe
gcgaggcggccatacgcatctacga

SEQ ID NO: 179594 - DNA, 25 bp, Artificial
  Probe
tgtccttcctggacgtacacagccg

SEQ ID NO: 179595 - DNA, 25 bp, Artificial
  Probe
cctacgaggacgaggtgtccttcct

SEQ ID NO: 179596 - DNA, 25 bp, Artificial
  Probe
gcatctacgacctgggcctgcggcg

SEQ ID NO: 179597 - DNA, 25 bp, Artificial
  Probe
tgcgaggcggccatacgcatctacg

SEQ ID NO: 179598 - DNA, 25 bp, Artificial
  Probe
gcctacgaggacgaggtgtccttcc

SEQ ID NO: 179599 - DNA, 25 bp, Artificial
  Probe
gtgtccttcctggacgtacacagcc

SEQ ID NO: 179600 - DNA, 25 bp, Artificial
  Probe
gtcctgttccgctactgcgcaggcg

SEQ ID NO: 179601 - DNA, 25 bp, Artificial
  Probe
ttcgagaactttctccctgggttgc

SEQ ID NO: 179602 - DNA, 25 bp, Artificial
  Probe
cggccatacgcatctacgacctggg

SEQ ID NO: 179603 - DNA, 25 bp, Artificial
  Probe
tgcgccagcgacgacgcgtgcgcaa

SEQ ID NO: 179604 - DNA, 25 bp, Artificial
  Probe
cgaggcggccatacgcatctacgac

SEQ ID NO: 179605 - DNA, 25 bp, Artificial
  Probe
ccgtgcgggctgcgcgagctcgagg

SEQ ID NO: 179606 - DNA, 25 bp, Artificial
  Probe
gaggtgtccttcctggacgtacaca

SEQ ID NO: 179607 - DNA, 25 bp, Artificial
  Probe
cgcggtggagcttcgagaactttct

SEQ ID NO: 179608 - DNA, 25 bp, Artificial
  Probe
acgaggacgaggtgtccttcctgga

SEQ ID NO: 179609 - DNA, 25 bp, Artificial
  Probe
ctgggctacacgtcggacgaaaccg

SEQ ID NO: 179610 - DNA, 25 bp, Artificial
  Probe
gctacacgtcggacgaaaccgtcct

SEQ ID NO: 179611 - DNA, 25 bp, Artificial
  Probe
aggacgaggtgtccttcctggacgt

SEQ ID NO: 179612 - DNA, 25 bp, Artificial
  Probe
acgaggtgtccttcctggacgtaca

SEQ ID NO: 179613 - DNA, 25 bp, Artificial
  Probe
acgcatctacgacctgggcctgcgg

SEQ ID NO: 179614 - DNA, 25 bp, Artificial
  Probe
ggcctacgaggacgaggtgtccttc

SEQ ID NO: 179615 - DNA, 25 bp, Artificial
  Probe
ctacacgtcggacgaaaccgtcctg

SEQ ID NO: 179616 - DNA, 25 bp, Artificial
  Probe
tacacgtcggacgaaaccgtcctgt

SEQ ID NO: 179617 - DNA, 25 bp, Artificial
  Probe
gaaaccgtcctgttccgctactgcg

SEQ ID NO: 179618 - DNA, 25 bp, Artificial
  Probe
gggtctgggctacacgtcggacgaa

SEQ ID NO: 179619 - DNA, 25 bp, Artificial
  Probe
ggacgaggtgtccttcctggacgta

SEQ ID NO: 179620 - DNA, 25 bp, Artificial
  Probe
gtctgggctacacgtcggacgaaac

SEQ ID NO: 179621 - DNA, 25 bp, Artificial
  Probe
gcgccagcgacgacgcgtgcgcaaa

SEQ ID NO: 179622 - DNA, 25 bp, Artificial
  Probe
acgaaaccgtcctgttccgctactg

SEQ ID NO: 179623 - DNA, 25 bp, Artificial
  Probe
tacgaggacgaggtgtccttcctgg

SEQ ID NO: 179624 - DNA, 25 bp, Artificial
  Probe
tgagcaaccgaaactctggtcacag

SEQ ID NO: 179625 - DNA, 25 bp, Artificial
  Probe
cactctctggcttgtaaccagtccg

SEQ ID NO: 179626 - DNA, 25 bp, Artificial
  Probe
ctgggctgttcctttgttgatattc

SEQ ID NO: 179627 - DNA, 25 bp, Artificial
  Probe
gatttccactctctggcttgtaacc

SEQ ID NO: 179628 - DNA, 25 bp, Artificial
  Probe
gggctgttcctttgttgatattcta

SEQ ID NO: 179629 - DNA, 25 bp, Artificial
  Probe
ccagtccgggttgactaaactggat

SEQ ID NO: 179630 - DNA, 25 bp, Artificial
  Probe
atattctagagttctggagctgagc

SEQ ID NO: 179631 - DNA, 25 bp, Artificial
  Probe
gtcattccaaacaaataaaggaggc

SEQ ID NO: 179632 - DNA, 25 bp, Artificial
  Probe
ctgtcatagctcagctttcccgtca

SEQ ID NO: 179633 - DNA, 25 bp, Artificial
  Probe
atgacagactcctgaggacagctgt

SEQ ID NO: 179634 - DNA, 25 bp, Artificial
  Probe
tctggcttgtaaccagtccgggttg

SEQ ID NO: 179635 - DNA, 25 bp, Artificial
  Probe
caaccgaaactctggtcacaggact

SEQ ID NO: 179636 - DNA, 25 bp, Artificial
  Probe
cctgaggacagctgtcctcttctac

SEQ ID NO: 179637 - DNA, 25 bp, Artificial
  Probe
ggccctatgacagactcctgaggac

SEQ ID NO: 179638 - DNA, 25 bp, Artificial
  Probe
actgagcaaccgaaactctggtcac

SEQ ID NO: 179639 - DNA, 25 bp, Artificial
  Probe
ggtcacttgtgatttccactctctg

SEQ ID NO: 179640 - DNA, 25 bp, Artificial
  Probe
tctttaatgtactggccctatgaca

SEQ ID NO: 179641 - DNA, 25 bp, Artificial
  Probe
agtccgggttgactaaactggatgt

SEQ ID NO: 179642 - DNA, 25 bp, Artificial
  Probe
tctagagttctggagctgagcaaat

SEQ ID NO: 179643 - DNA, 25 bp, Artificial
  Probe
ctgttcctttgttgatattctagag

SEQ ID NO: 179644 - DNA, 25 bp, Artificial
  Probe
gtgggtcacttgtgatttccactct

SEQ ID NO: 179645 - DNA, 25 bp, Artificial
  Probe
aggcctcgaaatggacattcgcatg

SEQ ID NO: 179646 - DNA, 25 bp, Artificial
  Probe
gcttgtaaccagtccgggttgacta

SEQ ID NO: 179647 - DNA, 25 bp, Artificial
  Probe
tgagcaaatgcctgtcatagctcag

SEQ ID NO: 179648 - DNA, 25 bp, Artificial
  Probe
acagactcctgaggacagctgtcct

SEQ ID NO: 179649 - DNA, 25 bp, Artificial
  Probe
atatagtggcaattctactgggctg

SEQ ID NO: 179650 - DNA, 25 bp, Artificial
  Probe
ctagagttctggagctgagcaaatg

SEQ ID NO: 179651 - DNA, 25 bp, Artificial
  Probe
cctttgttgatattctagagttctg

SEQ ID NO: 179652 - DNA, 25 bp, Artificial
  Probe
tccgggttgactaaactggatgtga

SEQ ID NO: 179653 - DNA, 25 bp, Artificial
  Probe
cagactcctgaggacagctgtcctc

SEQ ID NO: 179654 - DNA, 25 bp, Artificial
  Probe
attctactgggctgttcctttgttg

SEQ ID NO: 179655 - DNA, 25 bp, Artificial
  Probe
ctggcttgtaaccagtccgggttga

SEQ ID NO: 179656 - DNA, 25 bp, Artificial
  Probe
tggtcacaggactgcctgtgtgatc

SEQ ID NO: 179657 - DNA, 25 bp, Artificial
  Probe
cattccaaacaaataaaggaggcct

SEQ ID NO: 179658 - DNA, 25 bp, Artificial
  Probe
caggactgcctgtgtgatcctgggt

SEQ ID NO: 179659 - DNA, 25 bp, Artificial
  Probe
cacaggactgcctgtgtgatcctgg

SEQ ID NO: 179660 - DNA, 25 bp, Artificial
  Probe
ccgtcattccaaacaaataaaggag

SEQ ID NO: 179661 - DNA, 25 bp, Artificial
  Probe
taaaggaggcctcgaaatggacatt

SEQ ID NO: 179662 - DNA, 25 bp, Artificial
  Probe
aatgcctgtcatagctcagctttcc

SEQ ID NO: 179663 - DNA, 25 bp, Artificial
  Probe
gcctgtcatagctcagctttcccgt

SEQ ID NO: 179664 - DNA, 25 bp, Artificial
  Probe
atggactgagcaaccgaaactctgg

SEQ ID NO: 179665 - DNA, 25 bp, Artificial
  Probe
atgtactggccctatgacagactcc

SEQ ID NO: 179666 - DNA, 25 bp, Artificial
  Probe
tttctttaatgtactggccctatga

SEQ ID NO: 179667 - DNA, 25 bp, Artificial
  Probe
ctggccctatgacagactcctgagg

SEQ ID NO: 179668 - DNA, 25 bp, Artificial
  Probe
gtcatagctcagctttcccgtcatt

SEQ ID NO: 179669 - DNA, 25 bp, Artificial
  Probe
tggcaattctactgggctgttcctt

SEQ ID NO: 179670 - DNA, 25 bp, Artificial
  Probe
ggtcctgttgctgattcctccacga

SEQ ID NO: 179671 - DNA, 25 bp, Artificial
  Probe
cagacgatggcacagcaggacagtg

SEQ ID NO: 179672 - DNA, 25 bp, Artificial
  Probe
cctgttgctgattcctccacgaggg

SEQ ID NO: 179673 - DNA, 25 bp, Artificial
  Probe
cttcaatgggtgtgtctcttctcac

SEQ ID NO: 179674 - DNA, 25 bp, Artificial
  Probe
agtcccccaagcaagagatttcgga

SEQ ID NO: 179675 - DNA, 25 bp, Artificial
  Probe
cccaagcaagagatttcggaaggaa

SEQ ID NO: 179676 - DNA, 25 bp, Artificial
  Probe
tgggtcctgttgctgattcctccac

SEQ ID NO: 179677 - DNA, 25 bp, Artificial
  Probe
gacctgggccgttagaaaacagcta

SEQ ID NO: 179678 - DNA, 25 bp, Artificial
  Probe
tgtgggtcctgttgctgattcctcc

SEQ ID NO: 179679 - DNA, 25 bp, Artificial
  Probe
ttacctctacgtccttcaatgggtg

SEQ ID NO: 179680 - DNA, 25 bp, Artificial
  Probe
gaagcaactgggacctgggccgtta

SEQ ID NO: 179681 - DNA, 25 bp, Artificial
  Probe
ctctacgtccttcaatgggtgtgtc

SEQ ID NO: 179682 - DNA, 25 bp, Artificial
  Probe
tacctctacgtccttcaatgggtgt

SEQ ID NO: 179683 - DNA, 25 bp, Artificial
  Probe
aatgggtgtgtctcttctcaccctt

SEQ ID NO: 179684 - DNA, 25 bp, Artificial
  Probe
cttctcacccttgtcgagatgccag

SEQ ID NO: 179685 - DNA, 25 bp, Artificial
  Probe
ttcaatgggtgtgtctcttctcacc

SEQ ID NO: 179686 - DNA, 25 bp, Artificial
  Probe
gtcccccaagcaagagatttcggaa

SEQ ID NO: 179687 - DNA, 25 bp, Artificial
  Probe
cctctgtgggtcctgttgctgattc

SEQ ID NO: 179688 - DNA, 25 bp, Artificial
  Probe
gttacctctacgtccttcaatgggt

SEQ ID NO: 179689 - DNA, 25 bp, Artificial
  Probe
gcagacgatggcacagcaggacagt

SEQ ID NO: 179690 - DNA, 25 bp, Artificial
  Probe
tcccccaagcaagagatttcggaag

SEQ ID NO: 179691 - DNA, 25 bp, Artificial
  Probe
atttataagacgagtgtggccaccc

SEQ ID NO: 179692 - DNA, 25 bp, Artificial
  Probe
ctgtgggtcctgttgctgattcctc

SEQ ID NO: 179693 - DNA, 25 bp, Artificial
  Probe
tgtcgagatgccagtcccccaagca

SEQ ID NO: 179694 - DNA, 25 bp, Artificial
  Probe
tcttctcacccttgtcgagatgcca

SEQ ID NO: 179695 - DNA, 25 bp, Artificial
  Probe
ccagtcccccaagcaagagatttcg

SEQ ID NO: 179696 - DNA, 25 bp, Artificial
  Probe
gtcgagatgccagtcccccaagcaa

SEQ ID NO: 179697 - DNA, 25 bp, Artificial
  Probe
tccttcaatgggtgtgtctcttctc

SEQ ID NO: 179698 - DNA, 25 bp, Artificial
  Probe
ctacgtccttcaatgggtgtgtctc

SEQ ID NO: 179699 - DNA, 25 bp, Artificial
  Probe
tgttgctgattcctccacgagggtg

SEQ ID NO: 179700 - DNA, 25 bp, Artificial
  Probe
aagcaactgggacctgggccgttag

SEQ ID NO: 179701 - DNA, 25 bp, Artificial
  Probe
tcaatgggtgtgtctcttctcaccc

SEQ ID NO: 179702 - DNA, 25 bp, Artificial
  Probe
gcaactgggacctgggccgttagaa

SEQ ID NO: 179703 - DNA, 25 bp, Artificial
  Probe
ccttggcctctgtgggtcctgttgc

SEQ ID NO: 179704 - DNA, 25 bp, Artificial
  Probe
tcgagatgccagtcccccaagcaag

SEQ ID NO: 179705 - DNA, 25 bp, Artificial
  Probe
ccccttggcctctgtgggtcctgtt

SEQ ID NO: 179706 - DNA, 25 bp, Artificial
  Probe
tacgtccttcaatgggtgtgtctct

SEQ ID NO: 179707 - DNA, 25 bp, Artificial
  Probe
ggcctctgtgggtcctgttgctgat

SEQ ID NO: 179708 - DNA, 25 bp, Artificial
  Probe
ggacctgggccgttagaaaacagct

SEQ ID NO: 179709 - DNA, 25 bp, Artificial
  Probe
cctgggccgttagaaaacagctatg

SEQ ID NO: 179710 - DNA, 25 bp, Artificial
  Probe
tctcacccttgtcgagatgccagtc

SEQ ID NO: 179711 - DNA, 25 bp, Artificial
  Probe
ctgttgctgattcctccacgagggt

SEQ ID NO: 179712 - DNA, 25 bp, Artificial
  Probe
atggttacctctacgtccttcaatg

SEQ ID NO: 179713 - DNA, 25 bp, Artificial
  Probe
ccccaagcaagagatttcggaagga

SEQ ID NO: 179714 - DNA, 25 bp, Artificial
  Probe
cccttggcctctgtgggtcctgttg

SEQ ID NO: 179715 - DNA, 25 bp, Artificial
  Probe
ctctgtgggtcctgttgctgattcc

SEQ ID NO: 179716 - DNA, 25 bp, Artificial
  Probe
tccctgttgcccattgccaataagc

SEQ ID NO: 179717 - DNA, 25 bp, Artificial
  Probe
tttcaaaagcatctctgtgaccaag

SEQ ID NO: 179718 - DNA, 25 bp, Artificial
  Probe
agttccagaagtgatccagatcctc

SEQ ID NO: 179719 - DNA, 25 bp, Artificial
  Probe
ccagctccagattgggggtcccagg

SEQ ID NO: 179720 - DNA, 25 bp, Artificial
  Probe
agagagaccacagtgacccatcaag

SEQ ID NO: 179721 - DNA, 25 bp, Artificial
  Probe
gcttaagtacccagatagtcaccaa

SEQ ID NO: 179722 - DNA, 25 bp, Artificial
  Probe
gtcatcctggggtcttaaatgtgtg

SEQ ID NO: 179723 - DNA, 25 bp, Artificial
  Probe
gagagtcatgcaaaacctgaatcct

SEQ ID NO: 179724 - DNA, 25 bp, Artificial
  Probe
agatcctccaagatcttcagctttg

SEQ ID NO: 179725 - DNA, 25 bp, Artificial
  Probe
ttgctgtcatcctggggtcttaaat

SEQ ID NO: 179726 - DNA, 25 bp, Artificial
  Probe
cactaagccagatgggacagtggag

SEQ ID NO: 179727 - DNA, 25 bp, Artificial
  Probe
aacacctggtgtgagattgcgagag

SEQ ID NO: 179728 - DNA, 25 bp, Artificial
  Probe
gaaggtctgggtccacttcttcaac

SEQ ID NO: 179729 - DNA, 25 bp, Artificial
  Probe
gtttcggtcccgatagctttcttga

SEQ ID NO: 179730 - DNA, 25 bp, Artificial
  Probe
tgactcccaggtttcccaggaaggt

SEQ ID NO: 179731 - DNA, 25 bp, Artificial
  Probe
cccatgacagttccagaagtgatcc

SEQ ID NO: 179732 - DNA, 25 bp, Artificial
  Probe
ttttccatcctggacctgcttctag

SEQ ID NO: 179733 - DNA, 25 bp, Artificial
  Probe
atcaagaagcccatgacagttccag

SEQ ID NO: 179734 - DNA, 25 bp, Artificial
  Probe
ttggatgatacatggcctgtgagtc

SEQ ID NO: 179735 - DNA, 25 bp, Artificial
  Probe
ccagatgggacagtggaggaacacc

SEQ ID NO: 179736 - DNA, 25 bp, Artificial
  Probe
gagaccacagtgacccatcaagaag

SEQ ID NO: 179737 - DNA, 25 bp, Artificial
  Probe
gagtcatgcaaaacctgaatcctcc

SEQ ID NO: 179738 - DNA, 25 bp, Artificial
  Probe
ccttttcataggttggatgatacat

SEQ ID NO: 179739 - DNA, 25 bp, Artificial
  Probe
acaaggatcttgactcccaggtttc

SEQ ID NO: 179740 - DNA, 25 bp, Artificial
  Probe
gaggaacaccgcactgtggtggaca

SEQ ID NO: 179741 - DNA, 25 bp, Artificial
  Probe
acaattaatcgagcttatgccagtc

SEQ ID NO: 179742 - DNA, 25 bp, Artificial
  Probe
gtcccagggaccttttcataggttg

SEQ ID NO: 179743 - DNA, 25 bp, Artificial
  Probe
agaggggcagacacttcgtgactca

SEQ ID NO: 179744 - DNA, 25 bp, Artificial
  Probe
tcctccaaaccagctccagattggg

SEQ ID NO: 179745 - DNA, 25 bp, Artificial
  Probe
tagagccagagaggacaaggatctt

SEQ ID NO: 179746 - DNA, 25 bp, Artificial
  Probe
cctggggtcttaaatgtgtggaaca

SEQ ID NO: 179747 - DNA, 25 bp, Artificial
  Probe
ctgtgagtccccattctagagccag

SEQ ID NO: 179748 - DNA, 25 bp, Artificial
  Probe
atggcctgtgagtccccattctaga

SEQ ID NO: 179749 - DNA, 25 bp, Artificial
  Probe
tgatcccttttccatcctggacctg

SEQ ID NO: 179750 - DNA, 25 bp, Artificial
  Probe
cacagtgacccatcaagaagcccat

SEQ ID NO: 179751 - DNA, 25 bp, Artificial
  Probe
tgatacatggcctgtgagtccccat

SEQ ID NO: 179752 - DNA, 25 bp, Artificial
  Probe
acaccgcactgtggtggacagtgag

SEQ ID NO: 179753 - DNA, 25 bp, Artificial
  Probe
cttgaacttcagaggccttcaggtc

SEQ ID NO: 179754 - DNA, 25 bp, Artificial
  Probe
tcaccaacccaggatctttgagggg

SEQ ID NO: 179755 - DNA, 25 bp, Artificial
  Probe
acttcagaggccttcaggtccttcc

SEQ ID NO: 179756 - DNA, 25 bp, Artificial
  Probe
tttcccaggaaggtctgggtccact

SEQ ID NO: 179757 - DNA, 25 bp, Artificial
  Probe
gtcttggagagtcatgcaaaacctg

SEQ ID NO: 179758 - DNA, 25 bp, Artificial
  Probe
ttcagaggccttcaggtccttccca

SEQ ID NO: 179759 - DNA, 25 bp, Artificial
  Probe
gatccagatcctccaagatcttcag

SEQ ID NO: 179760 - DNA, 25 bp, Artificial
  Probe
gacaaggatcttgactcccaggttt

SEQ ID NO: 179761 - DNA, 25 bp, Artificial
  Probe
tgcttctaggacgttggtttcggtc

SEQ ID NO: 179762 - DNA, 25 bp, Artificial
  Probe
agctacatatgctagaaaagctctg

SEQ ID NO: 179763 - DNA, 25 bp, Artificial
  Probe
ttccactgagcgtcacaataaaaga

SEQ ID NO: 179764 - DNA, 25 bp, Artificial
  Probe
ttagagtccctatggcaagaaggct

SEQ ID NO: 179765 - DNA, 25 bp, Artificial
  Probe
ccagttgctgtcacaggagtgagtg

SEQ ID NO: 179766 - DNA, 25 bp, Artificial
  Probe
atataatacaagtgccttagcatgt

SEQ ID NO: 179767 - DNA, 25 bp, Artificial
  Probe
ctggagccacgcttagaagagagta

SEQ ID NO: 179768 - DNA, 25 bp, Artificial
  Probe
agtagcctgccctacaatggtctac

SEQ ID NO: 179769 - DNA, 25 bp, Artificial
  Probe
ggtcgctgagtttccctgtgctcct

SEQ ID NO: 179770 - DNA, 25 bp, Artificial
  Probe
ggtctacactggtcgctgagtttcc

SEQ ID NO: 179771 - DNA, 25 bp, Artificial
  Probe
agtaagctggtttacagatgtttcc

SEQ ID NO: 179772 - DNA, 25 bp, Artificial
  Probe
cgctcttgtgcctctcctaggactg

SEQ ID NO: 179773 - DNA, 25 bp, Artificial
  Probe
tctgaattcaggtcccagttgctgt

SEQ ID NO: 179774 - DNA, 25 bp, Artificial
  Probe
cgtgcgctcttgtgcctctcctagg

SEQ ID NO: 179775 - DNA, 25 bp, Artificial
  Probe
tacactggtcgctgagtttccctgt

SEQ ID NO: 179776 - DNA, 25 bp, Artificial
  Probe
gaaacagtcaaatcatgaagctaca

SEQ ID NO: 179777 - DNA, 25 bp, Artificial
  Probe
catgtgttgcagctgtcaccactac

SEQ ID NO: 179778 - DNA, 25 bp, Artificial
  Probe
tgctgtgattagagtccctatggca

SEQ ID NO: 179779 - DNA, 25 bp, Artificial
  Probe
tctccttttaaaggagaaacagtca

SEQ ID NO: 179780 - DNA, 25 bp, Artificial
  Probe
ctgtgattagagtccctatggcaag

SEQ ID NO: 179781 - DNA, 25 bp, Artificial
  Probe
aaagctctgaattcaggtcccagtt

SEQ ID NO: 179782 - DNA, 25 bp, Artificial
  Probe
tctagttgtgggtcctcacagcctt

SEQ ID NO: 179783 - DNA, 25 bp, Artificial
  Probe
gctcctcctcactgtgttataaatg

SEQ ID NO: 179784 - DNA, 25 bp, Artificial
  Probe
atgtttccactgagcgtcacaataa

SEQ ID NO: 179785 - DNA, 25 bp, Artificial
  Probe
aagagagtagcctgccctacaatgg

SEQ ID NO: 179786 - DNA, 25 bp, Artificial
  Probe
cctcctcactgtgttataaatgctg

SEQ ID NO: 179787 - DNA, 25 bp, Artificial
  Probe
gcccctggagccacgcttagaagag

SEQ ID NO: 179788 - DNA, 25 bp, Artificial
  Probe
gttgtgggtcctcacagccttgccc

SEQ ID NO: 179789 - DNA, 25 bp, Artificial
  Probe
gtagtaagcgctctagttgtgggtc

SEQ ID NO: 179790 - DNA, 25 bp, Artificial
  Probe
ctacagtaagctggtttacagatgt

SEQ ID NO: 179791 - DNA, 25 bp, Artificial
  Probe
agtccctatggcaagaaggcttttt

SEQ ID NO: 179792 - DNA, 25 bp, Artificial
  Probe
ctctcctaggactggggccaagggt

SEQ ID NO: 179793 - DNA, 25 bp, Artificial
  Probe
ggcccggcagccagaatatccaagg

SEQ ID NO: 179794 - DNA, 25 bp, Artificial
  Probe
cctcactgtgttataaatgctgtga

SEQ ID NO: 179795 - DNA, 25 bp, Artificial
  Probe
gattagagtccctatggcaagaagg

SEQ ID NO: 179796 - DNA, 25 bp, Artificial
  Probe
gcgctctagttgtgggtcctcacag

SEQ ID NO: 179797 - DNA, 25 bp, Artificial
  Probe
ccacgcttagaagagagtagcctgc

SEQ ID NO: 179798 - DNA, 25 bp, Artificial
  Probe
aattcaggtcccagttgctgtcaca

SEQ ID NO: 179799 - DNA, 25 bp, Artificial
  Probe
gtgttgcagctgtcaccactacagt

SEQ ID NO: 179800 - DNA, 25 bp, Artificial
  Probe
tggtttacagatgtttccactgagc

SEQ ID NO: 179801 - DNA, 25 bp, Artificial
  Probe
aatacaagtgccttagcatgtgttg

SEQ ID NO: 179802 - DNA, 25 bp, Artificial
  Probe
tagaaaagctctgaattcaggtccc

SEQ ID NO: 179803 - DNA, 25 bp, Artificial
  Probe
ggcagccagaatatccaagggctgg

SEQ ID NO: 179804 - DNA, 25 bp, Artificial
  Probe
atatgctagaaaagctctgaattca

SEQ ID NO: 179805 - DNA, 25 bp, Artificial
  Probe
gtcaaatcatgaagctacatatgct

SEQ ID NO: 179806 - DNA, 25 bp, Artificial
  Probe
gcagggcccggcagccagaatatcc

SEQ ID NO: 179807 - DNA, 25 bp, Artificial
  Probe
gtccctatggcaagaaggctttttt

SEQ ID NO: 179808 - DNA, 25 bp, Artificial
  Probe
gtctttggaaagcttgacctctcaa

SEQ ID NO: 179809 - DNA, 25 bp, Artificial
  Probe
tgtcccaatgggtccctagataatt

SEQ ID NO: 179810 - DNA, 25 bp, Artificial
  Probe
tctgcgcgcttgtggcctctctgaa

SEQ ID NO: 179811 - DNA, 25 bp, Artificial
  Probe
agcttctcaagcatatcaatagtag

SEQ ID NO: 179812 - DNA, 25 bp, Artificial
  Probe
tctcatgtccgtaggccctgtgctc

SEQ ID NO: 179813 - DNA, 25 bp, Artificial
  Probe
tatagtttgggctacgaccaatccg

SEQ ID NO: 179814 - DNA, 25 bp, Artificial
  Probe
gaaccttctaaagtcaggattcctc

SEQ ID NO: 179815 - DNA, 25 bp, Artificial
  Probe
gaaagcttgacctctcaataatcgc

SEQ ID NO: 179816 - DNA, 25 bp, Artificial
  Probe
tccactgtatggttttgtaaacaac

SEQ ID NO: 179817 - DNA, 25 bp, Artificial
  Probe
agctcacctgcatgcgtcttcctgt

SEQ ID NO: 179818 - DNA, 25 bp, Artificial
  Probe
ttgttcaaaataggtccactgtatg

SEQ ID NO: 179819 - DNA, 25 bp, Artificial
  Probe
gattggaaatctcatgtccgtaggc

SEQ ID NO: 179820 - DNA, 25 bp, Artificial
  Probe
aggccctgtgctctgcggagctcac

SEQ ID NO: 179821 - DNA, 25 bp, Artificial
  Probe
atccgtattggcttgttcaaaatag

SEQ ID NO: 179822 - DNA, 25 bp, Artificial
  Probe
aatagtagtcatacaactctctgcg

SEQ ID NO: 179823 - DNA, 25 bp, Artificial
  Probe
tgtgctctgcggagctcacctgcat

SEQ ID NO: 179824 - DNA, 25 bp, Artificial
  Probe
attggcttgttcaaaataggtccac

SEQ ID NO: 179825 - DNA, 25 bp, Artificial
  Probe
ataactgtcccaatgggtccctaga

SEQ ID NO: 179826 - DNA, 25 bp, Artificial
  Probe
tgaaaattttctatccagatagtcg

SEQ ID NO: 179827 - DNA, 25 bp, Artificial
  Probe
gcttctcaagcatatcaatagtagt

SEQ ID NO: 179828 - DNA, 25 bp, Artificial
  Probe
ctctgcgcgcttgtggcctctctga

SEQ ID NO: 179829 - DNA, 25 bp, Artificial
  Probe
ccaatgggtccctagataatttcga

SEQ ID NO: 179830 - DNA, 25 bp, Artificial
  Probe
gcgcttgtggcctctctgaatctcc

SEQ ID NO: 179831 - DNA, 25 bp, Artificial
  Probe
tccagatagtcgaatctgaatatat

SEQ ID NO: 179832 - DNA, 25 bp, Artificial
  Probe
agcttcactcggtgtatgattttat

SEQ ID NO: 179833 - DNA, 25 bp, Artificial
  Probe
ccgtaggccctgtgctctgcggagc

SEQ ID NO: 179834 - DNA, 25 bp, Artificial
  Probe
tcaaaataggtccactgtatggttt

SEQ ID NO: 179835 - DNA, 25 bp, Artificial
  Probe
ttcaaaccgagattggaaatctcat

SEQ ID NO: 179836 - DNA, 25 bp, Artificial
  Probe
gatgagcttcactcggtgtatgatt

SEQ ID NO: 179837 - DNA, 25 bp, Artificial
  Probe
accaatccgtattggcttgttcaaa

SEQ ID NO: 179838 - DNA, 25 bp, Artificial
  Probe
ttagccttaataactgtcccaatgg

SEQ ID NO: 179839 - DNA, 25 bp, Artificial
  Probe
gtcttaactgaatctgtgaatatac

SEQ ID NO: 179840 - DNA, 25 bp, Artificial
  Probe
taactgtcccaatgggtccctagat

SEQ ID NO: 179841 - DNA, 25 bp, Artificial
  Probe
ggtccctagataatttcgatactcc

SEQ ID NO: 179842 - DNA, 25 bp, Artificial
  Probe
catacaactctctgcgcgcttgtgg

SEQ ID NO: 179843 - DNA, 25 bp, Artificial
  Probe
ggtccactgtatggttttgtaaaca

SEQ ID NO: 179844 - DNA, 25 bp, Artificial
  Probe
acgaccaatccgtattggcttgttc

SEQ ID NO: 179845 - DNA, 25 bp, Artificial
  Probe
ggaaatctcatgtccgtaggccctg

SEQ ID NO: 179846 - DNA, 25 bp, Artificial
  Probe
tttatatagctctgcgtcttaactg

SEQ ID NO: 179847 - DNA, 25 bp, Artificial
  Probe
cttacagtttgtaaaccttagtgat

SEQ ID NO: 179848 - DNA, 25 bp, Artificial
  Probe
tccctaaaggtctttggaaagcttg

SEQ ID NO: 179849 - DNA, 25 bp, Artificial
  Probe
cagtttgtaaaccttagtgatgagc

SEQ ID NO: 179850 - DNA, 25 bp, Artificial
  Probe
ttttctatccagatagtcgaatctg

SEQ ID NO: 179851 - DNA, 25 bp, Artificial
  Probe
gccttaataactgtcccaatgggtc

SEQ ID NO: 179852 - DNA, 25 bp, Artificial
  Probe
gcttcactcggtgtatgattttata

SEQ ID NO: 179853 - DNA, 25 bp, Artificial
  Probe
ctattgaaccttctaaagtcaggat

SEQ ID NO: 179854 - DNA, 25 bp, Artificial
  Probe
tcagagacaactcaacaatgggtta

SEQ ID NO: 179855 - DNA, 25 bp, Artificial
  Probe
gggttacatggcagcaaagaaacac

SEQ ID NO: 179856 - DNA, 25 bp, Artificial
  Probe
accttaaggcaaaaggcagaggctg

SEQ ID NO: 179857 - DNA, 25 bp, Artificial
  Probe
gaaagatctggtcatcttgctgtac

SEQ ID NO: 179858 - DNA, 25 bp, Artificial
  Probe
cccagacccatgctaacaggatcta

SEQ ID NO: 179859 - DNA, 25 bp, Artificial
  Probe
tttccggtggatttctgtccacatt

SEQ ID NO: 179860 - DNA, 25 bp, Artificial
  Probe
gtacctatgtactgtaatatgtggc

SEQ ID NO: 179861 - DNA, 25 bp, Artificial
  Probe
aaccttaaggcaaaaggcagaggct

SEQ ID NO: 179862 - DNA, 25 bp, Artificial
  Probe
aagatctggtcatcttgctgtacga

SEQ ID NO: 179863 - DNA, 25 bp, Artificial
  Probe
aaaggcagaggctgacaagaatgac

SEQ ID NO: 179864 - DNA, 25 bp, Artificial
  Probe
tgacccaaaggtgataaacgttgtt

SEQ ID NO: 179865 - DNA, 25 bp, Artificial
  Probe
gcagcaaagaaacacctggagataa

SEQ ID NO: 179866 - DNA, 25 bp, Artificial
  Probe
tccggcttcagtctggaagatcccc

SEQ ID NO: 179867 - DNA, 25 bp, Artificial
  Probe
cttccggcttcagtctggaagatcc

SEQ ID NO: 179868 - DNA, 25 bp, Artificial
  Probe
tatattttccatgatttccggtgga

SEQ ID NO: 179869 - DNA, 25 bp, Artificial
  Probe
caatgggttacatggcagcaaagaa

SEQ ID NO: 179870 - DNA, 25 bp, Artificial
  Probe
catgatttccggtggatttctgtcc

SEQ ID NO: 179871 - DNA, 25 bp, Artificial
  Probe
cagtctggaagatccccagacccat

SEQ ID NO: 179872 - DNA, 25 bp, Artificial
  Probe
gaaacagcactcctgtcttccggct

SEQ ID NO: 179873 - DNA, 25 bp, Artificial
  Probe
agccctcagagacaactcaacaatg

SEQ ID NO: 179874 - DNA, 25 bp, Artificial
  Probe
tattgaaaccttaaggcaaaaggca

SEQ ID NO: 179875 - DNA, 25 bp, Artificial
  Probe
acaatgggttacatggcagcaaaga

SEQ ID NO: 179876 - DNA, 25 bp, Artificial
  Probe
ctcaacaatgggttacatggcagca

SEQ ID NO: 179877 - DNA, 25 bp, Artificial
  Probe
ttttccatgatttccggtggatttc

SEQ ID NO: 179878 - DNA, 25 bp, Artificial
  Probe
gctcaagccctcagagacaactcaa

SEQ ID NO: 179879 - DNA, 25 bp, Artificial
  Probe
tggaagatccccagacccatgctaa

SEQ ID NO: 179880 - DNA, 25 bp, Artificial
  Probe
caagtctgtgaaagatctggtcatc

SEQ ID NO: 179881 - DNA, 25 bp, Artificial
  Probe
tgaaagatctggtcatcttgctgta

SEQ ID NO: 179882 - DNA, 25 bp, Artificial
  Probe
ccagacccatgctaacaggatctac

SEQ ID NO: 179883 - DNA, 25 bp, Artificial
  Probe
ggcttcagtctggaagatccccaga

SEQ ID NO: 179884 - DNA, 25 bp, Artificial
  Probe
atctataggttgacccaaaggtgat

SEQ ID NO: 179885 - DNA, 25 bp, Artificial
  Probe
tgatctataggttgacccaaaggtg

SEQ ID NO: 179886 - DNA, 25 bp, Artificial
  Probe
gaagatccccagacccatgctaaca

SEQ ID NO: 179887 - DNA, 25 bp, Artificial
  Probe
catgaaagctcaagccctcagagac

SEQ ID NO: 179888 - DNA, 25 bp, Artificial
  Probe
atccccagacccatgctaacaggat

SEQ ID NO: 179889 - DNA, 25 bp, Artificial
  Probe
ctgtcttccggcttcagtctggaag

SEQ ID NO: 179890 - DNA, 25 bp, Artificial
  Probe
gttgacccaaaggtgataaacgttg

SEQ ID NO: 179891 - DNA, 25 bp, Artificial
  Probe
ggcagcaaagaaacacctggagata

SEQ ID NO: 179892 - DNA, 25 bp, Artificial
  Probe
attgaaaccttaaggcaaaaggcag

SEQ ID NO: 179893 - DNA, 25 bp, Artificial
  Probe
taggttgacccaaaggtgataaacg

SEQ ID NO: 179894 - DNA, 25 bp, Artificial
  Probe
aagctcaagccctcagagacaactc

SEQ ID NO: 179895 - DNA, 25 bp, Artificial
  Probe
tccggtggatttctgtccacattta

SEQ ID NO: 179896 - DNA, 25 bp, Artificial
  Probe
agcactcctgtcttccggcttcagt

SEQ ID NO: 179897 - DNA, 25 bp, Artificial
  Probe
tcaacaatgggttacatggcagcaa

SEQ ID NO: 179898 - DNA, 25 bp, Artificial
  Probe
ggttacatggcagcaaagaaacacc

SEQ ID NO: 179899 - DNA, 25 bp, Artificial
  Probe
ccggtggatttctgtccacatttaa

SEQ ID NO: 179900 - DNA, 25 bp, Artificial
  Probe
agactcaaacccaggaagaggtgag

SEQ ID NO: 179901 - DNA, 25 bp, Artificial
  Probe
gaaccaatccatgaagaatgaggat

SEQ ID NO: 179902 - DNA, 25 bp, Artificial
  Probe
ccaaatcaataaagcattataaata

SEQ ID NO: 179903 - DNA, 25 bp, Artificial
  Probe
acattgcctatgaagatgtggtcgg

SEQ ID NO: 179904 - DNA, 25 bp, Artificial
  Probe
acttataaggccttttctatcgtgt

SEQ ID NO: 179905 - DNA, 25 bp, Artificial
  Probe
tggtcgggggagaagactggagtcc

SEQ ID NO: 179906 - DNA, 25 bp, Artificial
  Probe
ttctggagccaaatcaataaagcat

SEQ ID NO: 179907 - DNA, 25 bp, Artificial
  Probe
taaggccttttctatcgtgtgtttt

SEQ ID NO: 179908 - DNA, 25 bp, Artificial
  Probe
tatacgaaccaatccatgaagaatg

SEQ ID NO: 179909 - DNA, 25 bp, Artificial
  Probe
atacgaaccaatccatgaagaatga

SEQ ID NO: 179910 - DNA, 25 bp, Artificial
  Probe
atagagactcaaacccaggaagagg

SEQ ID NO: 179911 - DNA, 25 bp, Artificial
  Probe
ggagtcctatggaggagaaaataga

SEQ ID NO: 179912 - DNA, 25 bp, Artificial
  Probe
tataaggccttttctatcgtgtgtt

SEQ ID NO: 179913 - DNA, 25 bp, Artificial
  Probe
ccaatccatgaagaatgaggatacc

SEQ ID NO: 179914 - DNA, 25 bp, Artificial
  Probe
gagactcaaacccaggaagaggtga

SEQ ID NO: 179915 - DNA, 25 bp, Artificial
  Probe
attgcctatgaagatgtggtcgggg

SEQ ID NO: 179916 - DNA, 25 bp, Artificial
  Probe
acgaaccaatccatgaagaatgagg

SEQ ID NO: 179917 - DNA, 25 bp, Artificial
  Probe
agccaaatcaataaagcattataaa

SEQ ID NO: 179918 - DNA, 25 bp, Artificial
  Probe
caaacccaggaagaggtgagagaca

SEQ ID NO: 179919 - DNA, 25 bp, Artificial
  Probe
aaacccaggaagaggtgagagacag

SEQ ID NO: 179920 - DNA, 25 bp, Artificial
  Probe
cattgcctatgaagatgtggtcggg

SEQ ID NO: 179921 - DNA, 25 bp, Artificial
  Probe
tttacttataaggccttttctatcg

SEQ ID NO: 179922 - DNA, 25 bp, Artificial
  Probe
tacattgcctatgaagatgtggtcg

SEQ ID NO: 179923 - DNA, 25 bp, Artificial
  Probe
atatacgaaccaatccatgaagaat

SEQ ID NO: 179924 - DNA, 25 bp, Artificial
  Probe
tcaaacccaggaagaggtgagagac

SEQ ID NO: 179925 - DNA, 25 bp, Artificial
  Probe
aaaatagagactcaaacccaggaag

SEQ ID NO: 179926 - DNA, 25 bp, Artificial
  Probe
aaatagagactcaaacccaggaaga

SEQ ID NO: 179927 - DNA, 25 bp, Artificial
  Probe
gactcaaacccaggaagaggtgaga

SEQ ID NO: 179928 - DNA, 25 bp, Artificial
  Probe
tagagactcaaacccaggaagaggt

SEQ ID NO: 179929 - DNA, 25 bp, Artificial
  Probe
cgaaccaatccatgaagaatgagga

SEQ ID NO: 179930 - DNA, 25 bp, Artificial
  Probe
accaatccatgaagaatgaggatac

SEQ ID NO: 179931 - DNA, 25 bp, Artificial
  Probe
ctacattgcctatgaagatgtggtc

SEQ ID NO: 179932 - DNA, 25 bp, Artificial
  Probe
cacagaaatatacgaaccaatccat

SEQ ID NO: 179933 - DNA, 25 bp, Artificial
  Probe
tctggagccaaatcaataaagcatt

SEQ ID NO: 179934 - DNA, 25 bp, Artificial
  Probe
aacccaggaagaggtgagagacagc

SEQ ID NO: 179935 - DNA, 25 bp, Artificial
  Probe
tacttataaggccttttctatcgtg

SEQ ID NO: 179936 - DNA, 25 bp, Artificial
  Probe
ataaggccttttctatcgtgtgttt

SEQ ID NO: 179937 - DNA, 25 bp, Artificial
  Probe
actacattgcctatgaagatgtggt

SEQ ID NO: 179938 - DNA, 25 bp, Artificial
  Probe
aggccttttctatcgtgtgttttat

SEQ ID NO: 179939 - DNA, 25 bp, Artificial
  Probe
aatagagactcaaacccaggaagag

SEQ ID NO: 179940 - DNA, 25 bp, Artificial
  Probe
agaagactggagtcctatggaggag

SEQ ID NO: 179941 - DNA, 25 bp, Artificial
  Probe
aaccaatccatgaagaatgaggata

SEQ ID NO: 179942 - DNA, 25 bp, Artificial
  Probe
tacgaaccaatccatgaagaatgag

SEQ ID NO: 179943 - DNA, 25 bp, Artificial
  Probe
gaaatatacgaaccaatccatgaag

SEQ ID NO: 179944 - DNA, 25 bp, Artificial
  Probe
ttataaggccttttctatcgtgtgt

SEQ ID NO: 179945 - DNA, 25 bp, Artificial
  Probe
cttataaggccttttctatcgtgtg

SEQ ID NO: 179946 - DNA, 25 bp, Artificial
  Probe
taaggaagcggcatgctcaaagcgg

SEQ ID NO: 179947 - DNA, 25 bp, Artificial
  Probe
gcccattcgccaatagtgagcgatt

SEQ ID NO: 179948 - DNA, 25 bp, Artificial
  Probe
cggtccagtatcctgagaatccctt

SEQ ID NO: 179949 - DNA, 25 bp, Artificial
  Probe
tgagcgattcaatccggccgcgtta

SEQ ID NO: 179950 - DNA, 25 bp, Artificial
  Probe
gggcccattcgccaatagtgagcga

SEQ ID NO: 179951 - DNA, 25 bp, Artificial
  Probe
caagcgggaggaaaccgcggtccag

SEQ ID NO: 179952 - DNA, 25 bp, Artificial
  Probe
ccagtatcctgagaatcccttgcgg

SEQ ID NO: 179953 - DNA, 25 bp, Artificial
  Probe
cccattcgccaatagtgagcgattc

SEQ ID NO: 179954 - DNA, 25 bp, Artificial
  Probe
gtatcctgagaatcccttgcggggt

SEQ ID NO: 179955 - DNA, 25 bp, Artificial
  Probe
ccaaaaacaaagaagcacaaacaca

SEQ ID NO: 179956 - DNA, 25 bp, Artificial
  Probe
aaggagcatgggacgcatagagagc

SEQ ID NO: 179957 - DNA, 25 bp, Artificial
  Probe
cctgagaatcccttgcggggtaagg

SEQ ID NO: 179958 - DNA, 25 bp, Artificial
  Probe
agcatgggacgcatagagagcatac

SEQ ID NO: 179959 - DNA, 25 bp, Artificial
  Probe
cttgcggggtaaggaagcggcatgc

SEQ ID NO: 179960 - DNA, 25 bp, Artificial
  Probe
cagtatcctgagaatcccttgcggg

SEQ ID NO: 179961 - DNA, 25 bp, Artificial
  Probe
caaacacaacaaagagaagaaacaa

SEQ ID NO: 179962 - DNA, 25 bp, Artificial
  Probe
aggaaaccgcggtccagtatcctga

SEQ ID NO: 179963 - DNA, 25 bp, Artificial
  Probe
gtgagcgattcaatccggccgcgtt

SEQ ID NO: 179964 - DNA, 25 bp, Artificial
  Probe
gccgggcccattcgccaatagtgag

SEQ ID NO: 179965 - DNA, 25 bp, Artificial
  Probe
aaggaagcggcatgctcaaagcggc

SEQ ID NO: 179966 - DNA, 25 bp, Artificial
  Probe
gagcgattcaatccggccgcgttac

SEQ ID NO: 179967 - DNA, 25 bp, Artificial
  Probe
ttcgccaatagtgagcgattcaatc

SEQ ID NO: 179968 - DNA, 25 bp, Artificial
  Probe
gaggaaaccgcggtccagtatcctg

SEQ ID NO: 179969 - DNA, 25 bp, Artificial
  Probe
cattcgccaatagtgagcgattcaa

SEQ ID NO: 179970 - DNA, 25 bp, Artificial
  Probe
agtatcctgagaatcccttgcgggg

SEQ ID NO: 179971 - DNA, 25 bp, Artificial
  Probe
aaaccgcggtccagtatcctgagaa

SEQ ID NO: 179972 - DNA, 25 bp, Artificial
  Probe
ggcccattcgccaatagtgagcgat

SEQ ID NO: 179973 - DNA, 25 bp, Artificial
  Probe
gaaaccgcggtccagtatcctgaga

SEQ ID NO: 179974 - DNA, 25 bp, Artificial
  Probe
tcgccaatagtgagcgattcaatcc

SEQ ID NO: 179975 - DNA, 25 bp, Artificial
  Probe
tccagtatcctgagaatcccttgcg

SEQ ID NO: 179976 - DNA, 25 bp, Artificial
  Probe
ggaaaccgcggtccagtatcctgag

SEQ ID NO: 179977 - DNA, 25 bp, Artificial
  Probe
aagcggcgaggaggaaggagcatgg

SEQ ID NO: 179978 - DNA, 25 bp, Artificial
  Probe
attcgccaatagtgagcgattcaat

SEQ ID NO: 179979 - DNA, 25 bp, Artificial
  Probe
ctgagaatcccttgcggggtaagga

SEQ ID NO: 179980 - DNA, 25 bp, Artificial
  Probe
ccattcgccaatagtgagcgattca

SEQ ID NO: 179981 - DNA, 25 bp, Artificial
  Probe
gtaaggaagcggcatgctcaaagcg

SEQ ID NO: 179982 - DNA, 25 bp, Artificial
  Probe
aatccggccgcgttacaagcgggag

SEQ ID NO: 179983 - DNA, 25 bp, Artificial
  Probe
ggccgggcccattcgccaatagtga

SEQ ID NO: 179984 - DNA, 25 bp, Artificial
  Probe
aaccgcggtccagtatcctgagaat

SEQ ID NO: 179985 - DNA, 25 bp, Artificial
  Probe
gcgttacaagcgggaggaaaccgcg

SEQ ID NO: 179986 - DNA, 25 bp, Artificial
  Probe
accgcggtccagtatcctgagaatc

SEQ ID NO: 179987 - DNA, 25 bp, Artificial
  Probe
tatcctgagaatcccttgcggggta

SEQ ID NO: 179988 - DNA, 25 bp, Artificial
  Probe
tagtgagcgattcaatccggccgcg

SEQ ID NO: 179989 - DNA, 25 bp, Artificial
  Probe
ccgcggtccagtatcctgagaatcc

SEQ ID NO: 179990 - DNA, 25 bp, Artificial
  Probe
atagtgagcgattcaatccggccgc

SEQ ID NO: 179991 - DNA, 25 bp, Artificial
  Probe
agtgagcgattcaatccggccgcgt

SEQ ID NO: 179992 - DNA, 25 bp, Artificial
  Probe
gcaaatcccaaaatttgtagtctgt

SEQ ID NO: 179993 - DNA, 25 bp, Artificial
  Probe
aggagcagtaccagccgcctctggg

SEQ ID NO: 179994 - DNA, 25 bp, Artificial
  Probe
ctgtatttaggtttaccactgcttg

SEQ ID NO: 179995 - DNA, 25 bp, Artificial
  Probe
tacgcaggtgtctctggattctttt

SEQ ID NO: 179996 - DNA, 25 bp, Artificial
  Probe
tgtcacagatgagacacagactgtg

SEQ ID NO: 179997 - DNA, 25 bp, Artificial
  Probe
tgtgggttgtcacagatgagacaca

SEQ ID NO: 179998 - DNA, 25 bp, Artificial
  Probe
tccccaaatctctacgcaggtgtct

SEQ ID NO: 179999 - DNA, 25 bp, Artificial
  Probe
agactgtggatcatttgtgctgtac

SEQ ID NO: 180000 - DNA, 25 bp, Artificial
  Probe
aaatctctacgcaggtgtctctgga

SEQ ID NO: 180001 - DNA, 25 bp, Artificial
  Probe
tgtatttaggtttaccactgcttgt

SEQ ID NO: 180002 - DNA, 25 bp, Artificial
  Probe
atttctgtatttaggtttaccactg

SEQ ID NO: 180003 - DNA, 25 bp, Artificial
  Probe
cactgcttgttcaaagaacaattgc

SEQ ID NO: 180004 - DNA, 25 bp, Artificial
  Probe
gtctctccaacaaggcaaaggttaa

SEQ ID NO: 180005 - DNA, 25 bp, Artificial
  Probe
cacagactgtggatcatttgtgctg

SEQ ID NO: 180006 - DNA, 25 bp, Artificial
  Probe
cgcctctgggtctccactgtgggtt

SEQ ID NO: 180007 - DNA, 25 bp, Artificial
  Probe
actgtgggttgtcacagatgagaca

SEQ ID NO: 180008 - DNA, 25 bp, Artificial
  Probe
gggtctccactgtgggttgtcacag

SEQ ID NO: 180009 - DNA, 25 bp, Artificial
  Probe
ttacgtccccaaatctctacgcagg

SEQ ID NO: 180010 - DNA, 25 bp, Artificial
  Probe
tgggttgtcacagatgagacacaga

SEQ ID NO: 180011 - DNA, 25 bp, Artificial
  Probe
taggtttaccactgcttgttcaaag

SEQ ID NO: 180012 - DNA, 25 bp, Artificial
  Probe
tttctgtatttaggtttaccactgc

SEQ ID NO: 180013 - DNA, 25 bp, Artificial
  Probe
atttgtagtctgtctctccaacaag

SEQ ID NO: 180014 - DNA, 25 bp, Artificial
  Probe
ctctgggtctccactgtgggttgtc

SEQ ID NO: 180015 - DNA, 25 bp, Artificial
  Probe
ctgtggatcatttgtgctgtactta

SEQ ID NO: 180016 - DNA, 25 bp, Artificial
  Probe
tgtagtctgtctctccaacaaggca

SEQ ID NO: 180017 - DNA, 25 bp, Artificial
  Probe
cagatgagacacagactgtggatca

SEQ ID NO: 180018 - DNA, 25 bp, Artificial
  Probe
aggcaaatcccaaaatttgtagtct

SEQ ID NO: 180019 - DNA, 25 bp, Artificial
  Probe
cgtccccaaatctctacgcaggtgt

SEQ ID NO: 180020 - DNA, 25 bp, Artificial
  Probe
ctccactgtgggttgtcacagatga

SEQ ID NO: 180021 - DNA, 25 bp, Artificial
  Probe
ggatcatttgtgctgtacttatttc

SEQ ID NO: 180022 - DNA, 25 bp, Artificial
  Probe
actgtggatcatttgtgctgtactt

SEQ ID NO: 180023 - DNA, 25 bp, Artificial
  Probe
tccaacaaggcaaaggttaaggagc

SEQ ID NO: 180024 - DNA, 25 bp, Artificial
  Probe
tcttgacccttaaaggaaaattcag

SEQ ID NO: 180025 - DNA, 25 bp, Artificial
  Probe
tttgtagtctgtctctccaacaagg

SEQ ID NO: 180026 - DNA, 25 bp, Artificial
  Probe
ttaaggagcagtaccagccgcctct

SEQ ID NO: 180027 - DNA, 25 bp, Artificial
  Probe
ctctacgcaggtgtctctggattct

SEQ ID NO: 180028 - DNA, 25 bp, Artificial
  Probe
ccactgcttgttcaaagaacaattg

SEQ ID NO: 180029 - DNA, 25 bp, Artificial
  Probe
ctccaacaaggcaaaggttaaggag

SEQ ID NO: 180030 - DNA, 25 bp, Artificial
  Probe
gttgtcacagatgagacacagactg

SEQ ID NO: 180031 - DNA, 25 bp, Artificial
  Probe
cagactgtggatcatttgtgctgta

SEQ ID NO: 180032 - DNA, 25 bp, Artificial
  Probe
ttctgtatttaggtttaccactgct

SEQ ID NO: 180033 - DNA, 25 bp, Artificial
  Probe
gtttaccactgcttgttcaaagaac

SEQ ID NO: 180034 - DNA, 25 bp, Artificial
  Probe
gtagtctgtctctccaacaaggcaa

SEQ ID NO: 180035 - DNA, 25 bp, Artificial
  Probe
gactgtggatcatttgtgctgtact

SEQ ID NO: 180036 - DNA, 25 bp, Artificial
  Probe
gatgagacacagactgtggatcatt

SEQ ID NO: 180037 - DNA, 25 bp, Artificial
  Probe
cacagatgagacacagactgtggat

SEQ ID NO: 180038 - DNA, 25 bp, Artificial
  Probe
cgtcatgtggcttttgcagttcccc

SEQ ID NO: 180039 - DNA, 25 bp, Artificial
  Probe
tcctattaagtctttactggagagc

SEQ ID NO: 180040 - DNA, 25 bp, Artificial
  Probe
ttgtggtggcccagctccacactct

SEQ ID NO: 180041 - DNA, 25 bp, Artificial
  Probe
gtctcctttcctaccttgtggtggc

SEQ ID NO: 180042 - DNA, 25 bp, Artificial
  Probe
actcctattaagtctttactggaga

SEQ ID NO: 180043 - DNA, 25 bp, Artificial
  Probe
tgaccgaggaccaatgacgtcatgt

SEQ ID NO: 180044 - DNA, 25 bp, Artificial
  Probe
ttcctaccttgtggtggcccagctc

SEQ ID NO: 180045 - DNA, 25 bp, Artificial
  Probe
catgtggcttttgcagttccccact

SEQ ID NO: 180046 - DNA, 25 bp, Artificial
  Probe
tctcctttcctaccttgtggtggcc

SEQ ID NO: 180047 - DNA, 25 bp, Artificial
  Probe
ccaagggctgtgtgtttggtgcctc

SEQ ID NO: 180048 - DNA, 25 bp, Artificial
  Probe
tcaggcaccgagaagaaaggaacct

SEQ ID NO: 180049 - DNA, 25 bp, Artificial
  Probe
tctccctcaggcaccgagaagaaag

SEQ ID NO: 180050 - DNA, 25 bp, Artificial
  Probe
cactcctattaagtctttactggag

SEQ ID NO: 180051 - DNA, 25 bp, Artificial
  Probe
gtggtggcccagctccacactctgt

SEQ ID NO: 180052 - DNA, 25 bp, Artificial
  Probe
ggagcctagggactaactctactcc

SEQ ID NO: 180053 - DNA, 25 bp, Artificial
  Probe
acgtcatgtggcttttgcagttccc

SEQ ID NO: 180054 - DNA, 25 bp, Artificial
  Probe
gcctagggactaactctactcctca

SEQ ID NO: 180055 - DNA, 25 bp, Artificial
  Probe
aaggaaccttgatagcctctgccca

SEQ ID NO: 180056 - DNA, 25 bp, Artificial
  Probe
cctcaggcaccgagaagaaaggaac

SEQ ID NO: 180057 - DNA, 25 bp, Artificial
  Probe
aatgacgtcatgtggcttttgcagt

SEQ ID NO: 180058 - DNA, 25 bp, Artificial
  Probe
ctgctgtctcctttcctaccttgtg

SEQ ID NO: 180059 - DNA, 25 bp, Artificial
  Probe
ttccgggagcctagggactaactct

SEQ ID NO: 180060 - DNA, 25 bp, Artificial
  Probe
ctcaggcaccgagaagaaaggaacc

SEQ ID NO: 180061 - DNA, 25 bp, Artificial
  Probe
aaaggaaccttgatagcctctgccc

SEQ ID NO: 180062 - DNA, 25 bp, Artificial
  Probe
aggaaccttgatagcctctgcccaa

SEQ ID NO: 180063 - DNA, 25 bp, Artificial
  Probe
atgaccgaggaccaatgacgtcatg

SEQ ID NO: 180064 - DNA, 25 bp, Artificial
  Probe
aggaccaatgacgtcatgtggcttt

SEQ ID NO: 180065 - DNA, 25 bp, Artificial
  Probe
tgctgtctcctttcctaccttgtgg

SEQ ID NO: 180066 - DNA, 25 bp, Artificial
  Probe
ccaatgacgtcatgtggcttttgca

SEQ ID NO: 180067 - DNA, 25 bp, Artificial
  Probe
tgtggtggcccagctccacactctg

SEQ ID NO: 180068 - DNA, 25 bp, Artificial
  Probe
tcctttcctaccttgtggtggccca

SEQ ID NO: 180069 - DNA, 25 bp, Artificial
  Probe
tgtctcctttcctaccttgtggtgg

SEQ ID NO: 180070 - DNA, 25 bp, Artificial
  Probe
tttcctaccttgtggtggcccagct

SEQ ID NO: 180071 - DNA, 25 bp, Artificial
  Probe
cccaagggctgtgtgtttggtgcct

SEQ ID NO: 180072 - DNA, 25 bp, Artificial
  Probe
tattaagtctttactggagagccag

SEQ ID NO: 180073 - DNA, 25 bp, Artificial
  Probe
gaccaatgacgtcatgtggcttttg

SEQ ID NO: 180074 - DNA, 25 bp, Artificial
  Probe
agggactaactctactcctcacctg

SEQ ID NO: 180075 - DNA, 25 bp, Artificial
  Probe
agggctgtgtgtttggtgcctctcc

SEQ ID NO: 180076 - DNA, 25 bp, Artificial
  Probe
accgaggaccaatgacgtcatgtgg

SEQ ID NO: 180077 - DNA, 25 bp, Artificial
  Probe
caatgacgtcatgtggcttttgcag

SEQ ID NO: 180078 - DNA, 25 bp, Artificial
  Probe
cgaggaccaatgacgtcatgtggct

SEQ ID NO: 180079 - DNA, 25 bp, Artificial
  Probe
gccccatgaccgaggaccaatgacg

SEQ ID NO: 180080 - DNA, 25 bp, Artificial
  Probe
ccatgaccgaggaccaatgacgtca

SEQ ID NO: 180081 - DNA, 25 bp, Artificial
  Probe
gagcctagggactaactctactcct

SEQ ID NO: 180082 - DNA, 25 bp, Artificial
  Probe
cctattaagtctttactggagagcc

SEQ ID NO: 180083 - DNA, 25 bp, Artificial
  Probe
ccccaagggctgtgtgtttggtgcc

SEQ ID NO: 180084 - DNA, 25 bp, Artificial
  Probe
tcaaggtcctggacccagaagggaa

SEQ ID NO: 180085 - DNA, 25 bp, Artificial
  Probe
ctgctatgtcatcacacacggtgac

SEQ ID NO: 180086 - DNA, 25 bp, Artificial
  Probe
tttcccaggaggagatcaagaatat

SEQ ID NO: 180087 - DNA, 25 bp, Artificial
  Probe
tggaggagctgcttaccacgcagtg

SEQ ID NO: 180088 - DNA, 25 bp, Artificial
  Probe
agccttcaaggtcctggacccagaa

SEQ ID NO: 180089 - DNA, 25 bp, Artificial
  Probe
taggggacccgaggtctcagaagac

SEQ ID NO: 180090 - DNA, 25 bp, Artificial
  Probe
acacggtgacgctaaggaccaggaa

SEQ ID NO: 180091 - DNA, 25 bp, Artificial
  Probe
atcactggagccttcaaggtcctgg

SEQ ID NO: 180092 - DNA, 25 bp, Artificial
  Probe
gggacccgaggtctcagaagaccca

SEQ ID NO: 180093 - DNA, 25 bp, Artificial
  Probe
aaagcaattcttggaggagctgctt

SEQ ID NO: 180094 - DNA, 25 bp, Artificial
  Probe
ataggggacccgaggtctcagaaga

SEQ ID NO: 180095 - DNA, 25 bp, Artificial
  Probe
cactggagccttcaaggtcctggac

SEQ ID NO: 180096 - DNA, 25 bp, Artificial
  Probe
acccagataggcttgtagccgcacc

SEQ ID NO: 180097 - DNA, 25 bp, Artificial
  Probe
tgtgggcagccttccctccagatgt

SEQ ID NO: 180098 - DNA, 25 bp, Artificial
  Probe
atgtgggcagccttccctccagatg

SEQ ID NO: 180099 - DNA, 25 bp, Artificial
  Probe
ggatgtgatcactggagccttcaag

SEQ ID NO: 180100 - DNA, 25 bp, Artificial
  Probe
gaggagctgcttaccacgcagtgcg

SEQ ID NO: 180101 - DNA, 25 bp, Artificial
  Probe
tgggcggcaacgtggactacaagaa

SEQ ID NO: 180102 - DNA, 25 bp, Artificial
  Probe
ctcagaagacccagataggcttgta

SEQ ID NO: 180103 - DNA, 25 bp, Artificial
  Probe
catcacacacggtgacgctaaggac

SEQ ID NO: 180104 - DNA, 25 bp, Artificial
  Probe
cccgaggatgtgatcactggagcct

SEQ ID NO: 180105 - DNA, 25 bp, Artificial
  Probe
tgtgatcactggagccttcaaggtc

SEQ ID NO: 180106 - DNA, 25 bp, Artificial
  Probe
gcagtgcgaccgattttcccaggag

SEQ ID NO: 180107 - DNA, 25 bp, Artificial
  Probe
caggaataggggacccgaggtctca

SEQ ID NO: 180108 - DNA, 25 bp, Artificial
  Probe
acatctgctatgtcatcacacacgg

SEQ ID NO: 180109 - DNA, 25 bp, Artificial
  Probe
tcaaaaagcaattcttggaggagct

SEQ ID NO: 180110 - DNA, 25 bp, Artificial
  Probe
atgtcatcacacacggtgacgctaa

SEQ ID NO: 180111 - DNA, 25 bp, Artificial
  Probe
tcacacacggtgacgctaaggacca

SEQ ID NO: 180112 - DNA, 25 bp, Artificial
  Probe
ttcccaggaggagatcaagaatatg

SEQ ID NO: 180113 - DNA, 25 bp, Artificial
  Probe
atcaaaaagcaattcttggaggagc

SEQ ID NO: 180114 - DNA, 25 bp, Artificial
  Probe
aagggcaccatcaaaaagcaattct

SEQ ID NO: 180115 - DNA, 25 bp, Artificial
  Probe
cttcaaggtcctggacccagaaggg

SEQ ID NO: 180116 - DNA, 25 bp, Artificial
  Probe
accgattttcccaggaggagatcaa

SEQ ID NO: 180117 - DNA, 25 bp, Artificial
  Probe
gaatatgtgggcagccttccctcca

SEQ ID NO: 180118 - DNA, 25 bp, Artificial
  Probe
aggtctcagaagacccagataggct

SEQ ID NO: 180119 - DNA, 25 bp, Artificial
  Probe
tgcgaccgattttcccaggaggaga

SEQ ID NO: 180120 - DNA, 25 bp, Artificial
  Probe
ggaagggcaccatcaaaaagcaatt

SEQ ID NO: 180121 - DNA, 25 bp, Artificial
  Probe
cggcaacgtggactacaagaacatc

SEQ ID NO: 180122 - DNA, 25 bp, Artificial
  Probe
ttggaggagctgcttaccacgcagt

SEQ ID NO: 180123 - DNA, 25 bp, Artificial
  Probe
agtgcgaccgattttcccaggagga

SEQ ID NO: 180124 - DNA, 25 bp, Artificial
  Probe
aggagctgcttaccacgcagtgcga

SEQ ID NO: 180125 - DNA, 25 bp, Artificial
  Probe
gaagacccagataggcttgtagccg

SEQ ID NO: 180126 - DNA, 25 bp, Artificial
  Probe
atctgctatgtcatcacacacggtg

SEQ ID NO: 180127 - DNA, 25 bp, Artificial
  Probe
gcttaccacgcagtgcgaccgattt

SEQ ID NO: 180128 - DNA, 25 bp, Artificial
  Probe
cttaccacgcagtgcgaccgatttt

SEQ ID NO: 180129 - DNA, 25 bp, Artificial
  Probe
cggtgacgctaaggaccaggaatag

SEQ ID NO: 180130 - DNA, 25 bp, Artificial
  Probe
ggcaatgagctcaccctggctgact

SEQ ID NO: 180131 - DNA, 25 bp, Artificial
  Probe
agtgcatcggtacttgagcaacgct

SEQ ID NO: 180132 - DNA, 25 bp, Artificial
  Probe
acgctcgggaagaattcgcctccac

SEQ ID NO: 180133 - DNA, 25 bp, Artificial
  Probe
atgagggcatctctcagaggaagtt

SEQ ID NO: 180134 - DNA, 25 bp, Artificial
  Probe
agagaagggactcctgaaagccctg

SEQ ID NO: 180135 - DNA, 25 bp, Artificial
  Probe
gagtgcatcggtacttgagcaacgc

SEQ ID NO: 180136 - DNA, 25 bp, Artificial
  Probe
ggtacttgagcaacgcttacgctcg

SEQ ID NO: 180137 - DNA, 25 bp, Artificial
  Probe
agtacagaggattcaccatcccgga

SEQ ID NO: 180138 - DNA, 25 bp, Artificial
  Probe
ccacctgtcctgacgatgaagagat

SEQ ID NO: 180139 - DNA, 25 bp, Artificial
  Probe
agcgccgaggatgagggcatctctc

SEQ ID NO: 180140 - DNA, 25 bp, Artificial
  Probe
aggatgagggcatctctcagaggaa

SEQ ID NO: 180141 - DNA, 25 bp, Artificial
  Probe
cttacgctcgggaagaattcgcctc

SEQ ID NO: 180142 - DNA, 25 bp, Artificial
  Probe
ttccgtggagtgcatcggtacttga

SEQ ID NO: 180143 - DNA, 25 bp, Artificial
  Probe
tgtcctgacgatgaagagatagagc

SEQ ID NO: 180144 - DNA, 25 bp, Artificial
  Probe
tgacaacctagagaagggactcctg

SEQ ID NO: 180145 - DNA, 25 bp, Artificial
  Probe
aagccctgaaggttctagacaatta

SEQ ID NO: 180146 - DNA, 25 bp, Artificial
  Probe
agtccaggtggtgtgcaaaaagtac

SEQ ID NO: 180147 - DNA, 25 bp, Artificial
  Probe
caacgcttacgctcgggaagaattc

SEQ ID NO: 180148 - DNA, 25 bp, Artificial
  Probe
atagagctggcctatgagcaagtgg

SEQ ID NO: 180149 - DNA, 25 bp, Artificial
  Probe
gatgagggcatctctcagaggaagt

SEQ ID NO: 180150 - DNA, 25 bp, Artificial
  Probe
cgttccgtggagtgcatcggtactt

SEQ ID NO: 180151 - DNA, 25 bp, Artificial
  Probe
agggcatctctcagaggaagtttct

SEQ ID NO: 180152 - DNA, 25 bp, Artificial
  Probe
catctctcagaggaagtttctggat

SEQ ID NO: 180153 - DNA, 25 bp, Artificial
  Probe
gccctgaaggttctagacaattact

SEQ ID NO: 180154 - DNA, 25 bp, Artificial
  Probe
aaaccagcgccgaggatgagggcat

SEQ ID NO: 180155 - DNA, 25 bp, Artificial
  Probe
cctagagaagggactcctgaaagcc

SEQ ID NO: 180156 - DNA, 25 bp, Artificial
  Probe
acctgtcctgacgatgaagagatag

SEQ ID NO: 180157 - DNA, 25 bp, Artificial
  Probe
agaagggactcctgaaagccctgaa

SEQ ID NO: 180158 - DNA, 25 bp, Artificial
  Probe
tgcatcggtacttgagcaacgctta

SEQ ID NO: 180159 - DNA, 25 bp, Artificial
  Probe
tccacctgtcctgacgatgaagaga

SEQ ID NO: 180160 - DNA, 25 bp, Artificial
  Probe
ggttctagacaattacttgacatcc

SEQ ID NO: 180161 - DNA, 25 bp, Artificial
  Probe
cttgagcaacgcttacgctcgggaa

SEQ ID NO: 180162 - DNA, 25 bp, Artificial
  Probe
ccctcaatgacaacctagagaaggg

SEQ ID NO: 180163 - DNA, 25 bp, Artificial
  Probe
gggactcctgaaagccctgaaggtt

SEQ ID NO: 180164 - DNA, 25 bp, Artificial
  Probe
cctgaaagccctgaaggttctagac

SEQ ID NO: 180165 - DNA, 25 bp, Artificial
  Probe
tacagaggattcaccatcccggagg

SEQ ID NO: 180166 - DNA, 25 bp, Artificial
  Probe
tctctcagaggaagtttctggatgg

SEQ ID NO: 180167 - DNA, 25 bp, Artificial
  Probe
ctcccggaagaagtggatgaaacca

SEQ ID NO: 180168 - DNA, 25 bp, Artificial
  Probe
tcaccatcccggaggcgttccgtgg

SEQ ID NO: 180169 - DNA, 25 bp, Artificial
  Probe
tccaggtggtgtgcaaaaagtacag

SEQ ID NO: 180170 - DNA, 25 bp, Artificial
  Probe
catagtccaggtggtgtgcaaaaag

SEQ ID NO: 180171 - DNA, 25 bp, Artificial
  Probe
aggttctagacaattacttgacatc

SEQ ID NO: 180172 - DNA, 25 bp, Artificial
  Probe
gatggcaatgagctcaccctggctg

SEQ ID NO: 180173 - DNA, 25 bp, Artificial
  Probe
gaggattcaccatcccggaggcgtt

SEQ ID NO: 180174 - DNA, 25 bp, Artificial
  Probe
ggagtgcatcggtacttgagcaacg

SEQ ID NO: 180175 - DNA, 25 bp, Artificial
  Probe
tgagcaacgcttacgctcgggaaga

SEQ ID NO: 180176 - DNA, 25 bp, Artificial
  Probe
aatgtcagcgccatctgtctaaagt

SEQ ID NO: 180177 - DNA, 25 bp, Artificial
  Probe
gtgcaggagtctagccaggagctct

SEQ ID NO: 180178 - DNA, 25 bp, Artificial
  Probe
agtctagccaggagctctcctcctg

SEQ ID NO: 180179 - DNA, 25 bp, Artificial
  Probe
ccacaggcaagaacgtgggctgcct

SEQ ID NO: 180180 - DNA, 25 bp, Artificial
  Probe
aggaatgctacctaacatcctgatc

SEQ ID NO: 180181 - DNA, 25 bp, Artificial
  Probe
agaatgcagccaaccgggggctaaa

SEQ ID NO: 180182 - DNA, 25 bp, Artificial
  Probe
agtgggtccagcaggtttcaggcct

SEQ ID NO: 180183 - DNA, 25 bp, Artificial
  Probe
caaccgggggctaaaagccagcgag

SEQ ID NO: 180184 - DNA, 25 bp, Artificial
  Probe
ctccgtcctgatccagcagtaactg

SEQ ID NO: 180185 - DNA, 25 bp, Artificial
  Probe
taaaggaccatgtgcaatactaaaa

SEQ ID NO: 180186 - DNA, 25 bp, Artificial
  Probe
ctgcccaggccacaggcaagaacgt

SEQ ID NO: 180187 - DNA, 25 bp, Artificial
  Probe
ggaagccttccactgcagaaaataa

SEQ ID NO: 180188 - DNA, 25 bp, Artificial
  Probe
aggcttctaggtctgcaagtgggaa

SEQ ID NO: 180189 - DNA, 25 bp, Artificial
  Probe
ctcctcctgccacgaagacatttga

SEQ ID NO: 180190 - DNA, 25 bp, Artificial
  Probe
ggaatgctacctaacatcctgatca

SEQ ID NO: 180191 - DNA, 25 bp, Artificial
  Probe
cgtctcggagatgtaaagaactgat

SEQ ID NO: 180192 - DNA, 25 bp, Artificial
  Probe
agacaatgaggctgccaagatcaca

SEQ ID NO: 180193 - DNA, 25 bp, Artificial
  Probe
ttcacagtagacaatgaggctgcca

SEQ ID NO: 180194 - DNA, 25 bp, Artificial
  Probe
cagcgagtgggtccagcaggtttca

SEQ ID NO: 180195 - DNA, 25 bp, Artificial
  Probe
gaaggacatgtctgcccaggccaca

SEQ ID NO: 180196 - DNA, 25 bp, Artificial
  Probe
gcccagctccgtctcggagatgtaa

SEQ ID NO: 180197 - DNA, 25 bp, Artificial
  Probe
ttgggacctttcagcagccctccgt

SEQ ID NO: 180198 - DNA, 25 bp, Artificial
  Probe
gtcctgtgattcattgcccctttcc

SEQ ID NO: 180199 - DNA, 25 bp, Artificial
  Probe
gcctggagctgtcctgtgattcatt

SEQ ID NO: 180200 - DNA, 25 bp, Artificial
  Probe
ttccattctgctctgagccataatg

SEQ ID NO: 180201 - DNA, 25 bp, Artificial
  Probe
agctggctacttcctttgcccagct

SEQ ID NO: 180202 - DNA, 25 bp, Artificial
  Probe
ccgacaaccagtcatgttcaggtgc

SEQ ID NO: 180203 - DNA, 25 bp, Artificial
  Probe
caggcaagaacgtgggctgccttca

SEQ ID NO: 180204 - DNA, 25 bp, Artificial
  Probe
gtcactacccaggaatgctacctaa

SEQ ID NO: 180205 - DNA, 25 bp, Artificial
  Probe
ctaacatcctgatcacgtctagatg

SEQ ID NO: 180206 - DNA, 25 bp, Artificial
  Probe
ggaaggacatgtctgcccaggccac

SEQ ID NO: 180207 - DNA, 25 bp, Artificial
  Probe
gcagtaactggaacgcgcctggagc

SEQ ID NO: 180208 - DNA, 25 bp, Artificial
  Probe
ttgcccctttccattctgctctgag

SEQ ID NO: 180209 - DNA, 25 bp, Artificial
  Probe
acatgtctgcccaggccacaggcaa

SEQ ID NO: 180210 - DNA, 25 bp, Artificial
  Probe
gagggaagccctctcaggaaagcat

SEQ ID NO: 180211 - DNA, 25 bp, Artificial
  Probe
gtgggctgccttcaggaagcactgc

SEQ ID NO: 180212 - DNA, 25 bp, Artificial
  Probe
ctggaacgcgcctggagctgtcctg

SEQ ID NO: 180213 - DNA, 25 bp, Artificial
  Probe
ccagcgagtgggtccagcaggtttc

SEQ ID NO: 180214 - DNA, 25 bp, Artificial
  Probe
cgaagacatttgagtcttgggacct

SEQ ID NO: 180215 - DNA, 25 bp, Artificial
  Probe
gaagccctctcaggaaagcatctcc

SEQ ID NO: 180216 - DNA, 25 bp, Artificial
  Probe
ggagtctagccaggagctctcctcc

SEQ ID NO: 180217 - DNA, 25 bp, Artificial
  Probe
agccataatgtcagcgccatctgtc

SEQ ID NO: 180218 - DNA, 25 bp, Artificial
  Probe
cttctaggtctgcaagtgggaagga

SEQ ID NO: 180219 - DNA, 25 bp, Artificial
  Probe
ccagcaggtttcaggcctgatggat

SEQ ID NO: 180220 - DNA, 25 bp, Artificial
  Probe
gggaaggaagccttccactgcagaa

SEQ ID NO: 180221 - DNA, 25 bp, Artificial
  Probe
catgttcaggtgcaggagtctagcc

SEQ ID NO: 180222 - DNA, 25 bp, Artificial
  Probe
catacctcagttttaccctgccagg

SEQ ID NO: 180223 - DNA, 25 bp, Artificial
  Probe
ttttaccctgccagggctccagctg

SEQ ID NO: 180224 - DNA, 25 bp, Artificial
  Probe
agcagcagtacaagttcttgccttc

SEQ ID NO: 180225 - DNA, 25 bp, Artificial
  Probe
gttacaaacccaacaggtcaagctc

SEQ ID NO: 180226 - DNA, 25 bp, Artificial
  Probe
tgccactaccaaagccttctgggct

SEQ ID NO: 180227 - DNA, 25 bp, Artificial
  Probe
tgaggaaacccctgtatttaatgca

SEQ ID NO: 180228 - DNA, 25 bp, Artificial
  Probe
agagactgtgcctgccactaccaaa

SEQ ID NO: 180229 - DNA, 25 bp, Artificial
  Probe
gaaacccctgtatttaatgcagacc

SEQ ID NO: 180230 - DNA, 25 bp, Artificial
  Probe
acccctgtatttaatgcagacccag

SEQ ID NO: 180231 - DNA, 25 bp, Artificial
  Probe
actaccaaagccttctgggctgctc

SEQ ID NO: 180232 - DNA, 25 bp, Artificial
  Probe
tgccccagctacctgtggagcctga

SEQ ID NO: 180233 - DNA, 25 bp, Artificial
  Probe
agctacctgtggagcctgagggtta

SEQ ID NO: 180234 - DNA, 25 bp, Artificial
  Probe
agatgcttcggaaggaacgagagct

SEQ ID NO: 180235 - DNA, 25 bp, Artificial
  Probe
cagctacctgtggagcctgagggtt

SEQ ID NO: 180236 - DNA, 25 bp, Artificial
  Probe
aaagcttgcccagatccggcagcag

SEQ ID NO: 180237 - DNA, 25 bp, Artificial
  Probe
ttgcccagattatcgcagcacagga

SEQ ID NO: 180238 - DNA, 25 bp, Artificial
  Probe
cagagcttcgagacgagcactgagg

SEQ ID NO: 180239 - DNA, 25 bp, Artificial
  Probe
agcccagagactgtgcctgccacta

SEQ ID NO: 180240 - DNA, 25 bp, Artificial
  Probe
ctgtggagcctgagggttacaaacc

SEQ ID NO: 180241 - DNA, 25 bp, Artificial
  Probe
ggttacaaacccaacaggtcaagct

SEQ ID NO: 180242 - DNA, 25 bp, Artificial
  Probe
cccaacaggtcaagctccaataaag

SEQ ID NO: 180243 - DNA, 25 bp, Artificial
  Probe
agtacaagttcttgccttcagagct

SEQ ID NO: 180244 - DNA, 25 bp, Artificial
  Probe
cccctgtatttaatgcagacccagc

SEQ ID NO: 180245 - DNA, 25 bp, Artificial
  Probe
accaaagccttctgggctgctcagg

SEQ ID NO: 180246 - DNA, 25 bp, Artificial
  Probe
agcttgcccagatccggcagcagca

SEQ ID NO: 180247 - DNA, 25 bp, Artificial
  Probe
ttctgggctgctcagggcccaagct

SEQ ID NO: 180248 - DNA, 25 bp, Artificial
  Probe
tccagagtattaacgctccaagagt

SEQ ID NO: 180249 - DNA, 25 bp, Artificial
  Probe
tcgcagcacaggaagagatgcttcg

SEQ ID NO: 180250 - DNA, 25 bp, Artificial
  Probe
tcagttttaccctgccagggctcca

SEQ ID NO: 180251 - DNA, 25 bp, Artificial
  Probe
acctgtggagcctgagggttacaaa

SEQ ID NO: 180252 - DNA, 25 bp, Artificial
  Probe
agcactgaggaaacccctgtattta

SEQ ID NO: 180253 - DNA, 25 bp, Artificial
  Probe
tctgggctgctcagggcccaagctg

SEQ ID NO: 180254 - DNA, 25 bp, Artificial
  Probe
acgagcactgaggaaacccctgtat

SEQ ID NO: 180255 - DNA, 25 bp, Artificial
  Probe
ccagattatcgcagcacaggaagag

SEQ ID NO: 180256 - DNA, 25 bp, Artificial
  Probe
gccttctgggctgctcagggcccaa

SEQ ID NO: 180257 - DNA, 25 bp, Artificial
  Probe
gtattaacgctccaagagtattatt

SEQ ID NO: 180258 - DNA, 25 bp, Artificial
  Probe
gagtattaacgctccaagagtatta

SEQ ID NO: 180259 - DNA, 25 bp, Artificial
  Probe
tacctcagttttaccctgccagggc

SEQ ID NO: 180260 - DNA, 25 bp, Artificial
  Probe
cccagatccggcagcagcagtacaa

SEQ ID NO: 180261 - DNA, 25 bp, Artificial
  Probe
tcggaaaaagcttgcccagatccgg

SEQ ID NO: 180262 - DNA, 25 bp, Artificial
  Probe
cggcagcagcagtacaagttcttgc

SEQ ID NO: 180263 - DNA, 25 bp, Artificial
  Probe
gctgccatacctcagttttaccctg

SEQ ID NO: 180264 - DNA, 25 bp, Artificial
  Probe
caagttcttgccttcagagcttcga

SEQ ID NO: 180265 - DNA, 25 bp, Artificial
  Probe
cgagacgagcactgaggaaacccct

SEQ ID NO: 180266 - DNA, 25 bp, Artificial
  Probe
ctcggaaaaagcttgcccagatccg

SEQ ID NO: 180267 - DNA, 25 bp, Artificial
  Probe
ccctccagagtattaacgctccaag

SEQ ID NO: 180268 - DNA, 25 bp, Artificial
  Probe
acaaccctgccactggaagcagggg

SEQ ID NO: 180269 - DNA, 25 bp, Artificial
  Probe
tcccctagttttccaagggtgtatg

SEQ ID NO: 180270 - DNA, 25 bp, Artificial
  Probe
aaaggccctggctctgggtctggaa

SEQ ID NO: 180271 - DNA, 25 bp, Artificial
  Probe
cccagcggtgccttgtgcaatgtca

SEQ ID NO: 180272 - DNA, 25 bp, Artificial
  Probe
gcctcccagaggaccaatgaaatga

SEQ ID NO: 180273 - DNA, 25 bp, Artificial
  Probe
tgtagttgtgggtcttagcttcctt

SEQ ID NO: 180274 - DNA, 25 bp, Artificial
  Probe
tgctagatgtcctatgtattatatc

SEQ ID NO: 180275 - DNA, 25 bp, Artificial
  Probe
aaatgagactcttcacgaacggcca

SEQ ID NO: 180276 - DNA, 25 bp, Artificial
  Probe
gattcttgccaaaatgagactcttc

SEQ ID NO: 180277 - DNA, 25 bp, Artificial
  Probe
tcttagcttccttcctccggctgag

SEQ ID NO: 180278 - DNA, 25 bp, Artificial
  Probe
ctgagacttatactggcttccccac

SEQ ID NO: 180279 - DNA, 25 bp, Artificial
  Probe
gctgagacttatactggcttcccca

SEQ ID NO: 180280 - DNA, 25 bp, Artificial
  Probe
tctggtctctgtgtcccagcggtgc

SEQ ID NO: 180281 - DNA, 25 bp, Artificial
  Probe
tgctctgattcttgccaaaatgaga

SEQ ID NO: 180282 - DNA, 25 bp, Artificial
  Probe
gatatcaacacttgtatctggtctc

SEQ ID NO: 180283 - DNA, 25 bp, Artificial
  Probe
ttggttttgctctgattcttgccaa

SEQ ID NO: 180284 - DNA, 25 bp, Artificial
  Probe
aaccctgccactggaagcaggggtg

SEQ ID NO: 180285 - DNA, 25 bp, Artificial
  Probe
cttgtatctggtctctgtgtcccag

SEQ ID NO: 180286 - DNA, 25 bp, Artificial
  Probe
gtgccttgtgcaatgtcagtgtgcg

SEQ ID NO: 180287 - DNA, 25 bp, Artificial
  Probe
catgctagatgtcctatgtattata

SEQ ID NO: 180288 - DNA, 25 bp, Artificial
  Probe
gcaatgtcagtgtgcgcgtctatgc

SEQ ID NO: 180289 - DNA, 25 bp, Artificial
  Probe
gtgtcccagcggtgccttgtgcaat

SEQ ID NO: 180290 - DNA, 25 bp, Artificial
  Probe
aatttgtacacaaccctgccactgg

SEQ ID NO: 180291 - DNA, 25 bp, Artificial
  Probe
tcttgccaaaatgagactcttcacg

SEQ ID NO: 180292 - DNA, 25 bp, Artificial
  Probe
aaggccctggctctgggtctggaaa

SEQ ID NO: 180293 - DNA, 25 bp, Artificial
  Probe
gggtggactgcttccttctcttctt

SEQ ID NO: 180294 - DNA, 25 bp, Artificial
  Probe
ctgattcttgccaaaatgagactct

SEQ ID NO: 180295 - DNA, 25 bp, Artificial
  Probe
gctctgggtctggaaagaaggccac

SEQ ID NO: 180296 - DNA, 25 bp, Artificial
  Probe
aaggggctgagtgaggctctcattc

SEQ ID NO: 180297 - DNA, 25 bp, Artificial
  Probe
cctagttttccaagggtgtatgtag

SEQ ID NO: 180298 - DNA, 25 bp, Artificial
  Probe
ggacacaaagtttcatgctagatgt

SEQ ID NO: 180299 - DNA, 25 bp, Artificial
  Probe
agttgtgggtcttagcttccttcct

SEQ ID NO: 180300 - DNA, 25 bp, Artificial
  Probe
tcccagaggaccaatgaaatgaagt

SEQ ID NO: 180301 - DNA, 25 bp, Artificial
  Probe
ccttcctccggctgagacttatact

SEQ ID NO: 180302 - DNA, 25 bp, Artificial
  Probe
gactcttcacgaacggccaggggaa

SEQ ID NO: 180303 - DNA, 25 bp, Artificial
  Probe
cggctgagacttatactggcttccc

SEQ ID NO: 180304 - DNA, 25 bp, Artificial
  Probe
atctggtctctgtgtcccagcggtg

SEQ ID NO: 180305 - DNA, 25 bp, Artificial
  Probe
ggtggactgcttccttctcttcttt

SEQ ID NO: 180306 - DNA, 25 bp, Artificial
  Probe
tcagtgtgcgcgtctatgctaaacc

SEQ ID NO: 180307 - DNA, 25 bp, Artificial
  Probe
tctctgtgtcccagcggtgccttgt

SEQ ID NO: 180308 - DNA, 25 bp, Artificial
  Probe
ccaaaatgagactcttcacgaacgg

SEQ ID NO: 180309 - DNA, 25 bp, Artificial
  Probe
cacaaagtttcatgctagatgtcct

SEQ ID NO: 180310 - DNA, 25 bp, Artificial
  Probe
aacacttgtatctggtctctgtgtc

SEQ ID NO: 180311 - DNA, 25 bp, Artificial
  Probe
ttgtgggtcttagcttccttcctcc

SEQ ID NO: 180312 - DNA, 25 bp, Artificial
  Probe
gcgcgtctatgctaaaccaccattt

SEQ ID NO: 180313 - DNA, 25 bp, Artificial
  Probe
ctctgggtctggaaagaaggccacc

SEQ ID NO: 180314 - DNA, 25 bp, Artificial
  Probe
ggcttttattcttcccattaggctc

SEQ ID NO: 180315 - DNA, 25 bp, Artificial
  Probe
agcatgggtcactaggctctgcatg

SEQ ID NO: 180316 - DNA, 25 bp, Artificial
  Probe
cattaggctccaaacttgcagaccc

SEQ ID NO: 180317 - DNA, 25 bp, Artificial
  Probe
tctgcatgctcttgtttcatctgaa

SEQ ID NO: 180318 - DNA, 25 bp, Artificial
  Probe
cccattaggctccaaacttgcagac

SEQ ID NO: 180319 - DNA, 25 bp, Artificial
  Probe
gctcttgtttcatctgaaaggcttt

SEQ ID NO: 180320 - DNA, 25 bp, Artificial
  Probe
gtcactaggctctgcatgctcttgt

SEQ ID NO: 180321 - DNA, 25 bp, Artificial
  Probe
ggctctgcatgctcttgtttcatct

SEQ ID NO: 180322 - DNA, 25 bp, Artificial
  Probe
aggcttttattcttcccattaggct

SEQ ID NO: 180323 - DNA, 25 bp, Artificial
  Probe
taggctccaaacttgcagacccacg

SEQ ID NO: 180324 - DNA, 25 bp, Artificial
  Probe
tgtttcatctgaaaggcttttattc

SEQ ID NO: 180325 - DNA, 25 bp, Artificial
  Probe
ggctccaaacttgcagacccacggt

SEQ ID NO: 180326 - DNA, 25 bp, Artificial
  Probe
tgctcttgtttcatctgaaaggctt

SEQ ID NO: 180327 - DNA, 25 bp, Artificial
  Probe
gtttcatctgaaaggcttttattct

SEQ ID NO: 180328 - DNA, 25 bp, Artificial
  Probe
atgctcttgtttcatctgaaaggct

SEQ ID NO: 180329 - DNA, 25 bp, Artificial
  Probe
gctccaaacttgcagacccacggtg

SEQ ID NO: 180330 - DNA, 25 bp, Artificial
  Probe
gagcatgggtcactaggctctgcat

SEQ ID NO: 180331 - DNA, 25 bp, Artificial
  Probe
aggctccaaacttgcagacccacgg

SEQ ID NO: 180332 - DNA, 25 bp, Artificial
  Probe
cttgtttcatctgaaaggcttttat

SEQ ID NO: 180333 - DNA, 25 bp, Artificial
  Probe
gggtcactaggctctgcatgctctt

SEQ ID NO: 180334 - DNA, 25 bp, Artificial
  Probe
agagcatgggtcactaggctctgca

SEQ ID NO: 180335 - DNA, 25 bp, Artificial
  Probe
tgggtcactaggctctgcatgctct

SEQ ID NO: 180336 - DNA, 25 bp, Artificial
  Probe
aggctctgcatgctcttgtttcatc

SEQ ID NO: 180337 - DNA, 25 bp, Artificial
  Probe
attaggctccaaacttgcagaccca

SEQ ID NO: 180338 - DNA, 25 bp, Artificial
  Probe
ctcttgtttcatctgaaaggctttt

SEQ ID NO: 180339 - DNA, 25 bp, Artificial
  Probe
gctctgcatgctcttgtttcatctg

SEQ ID NO: 180340 - DNA, 25 bp, Artificial
  Probe
ttaggctccaaacttgcagacccac

SEQ ID NO: 180341 - DNA, 25 bp, Artificial
  Probe
ttgtttcatctgaaaggcttttatt

SEQ ID NO: 180342 - DNA, 25 bp, Artificial
  Probe
tttcatctgaaaggcttttattctt

SEQ ID NO: 180343 - DNA, 25 bp, Artificial
  Probe
gcttttattcttcccattaggctcc

SEQ ID NO: 180344 - DNA, 25 bp, Artificial
  Probe
ctgcatgctcttgtttcatctgaaa

SEQ ID NO: 180345 - DNA, 25 bp, Artificial
  Probe
tgcatgctcttgtttcatctgaaag

SEQ ID NO: 180346 - DNA, 25 bp, Artificial
  Probe
tcccattaggctccaaacttgcaga

SEQ ID NO: 180347 - DNA, 25 bp, Artificial
  Probe
taggctctgcatgctcttgtttcat

SEQ ID NO: 180348 - DNA, 25 bp, Artificial
  Probe
cactaggctctgcatgctcttgttt

SEQ ID NO: 180349 - DNA, 25 bp, Artificial
  Probe
gcatgctcttgtttcatctgaaagg

SEQ ID NO: 180350 - DNA, 25 bp, Artificial
  Probe
atctgaaaggcttttattcttccca

SEQ ID NO: 180351 - DNA, 25 bp, Artificial
  Probe
tcactaggctctgcatgctcttgtt

SEQ ID NO: 180352 - DNA, 25 bp, Artificial
  Probe
actaggctctgcatgctcttgtttc

SEQ ID NO: 180353 - DNA, 25 bp, Artificial
  Probe
ccattaggctccaaacttgcagacc

SEQ ID NO: 180354 - DNA, 25 bp, Artificial
  Probe
catgctcttgtttcatctgaaaggc

SEQ ID NO: 180355 - DNA, 25 bp, Artificial
  Probe
gaaaggcttttattcttcccattag

SEQ ID NO: 180356 - DNA, 25 bp, Artificial
  Probe
tcttgtttcatctgaaaggctttta

SEQ ID NO: 180357 - DNA, 25 bp, Artificial
  Probe
ctctgcatgctcttgtttcatctga

SEQ ID NO: 180358 - DNA, 25 bp, Artificial
  Probe
ctaggctctgcatgctcttgtttca

SEQ ID NO: 180359 - DNA, 25 bp, Artificial
  Probe
ggtcactaggctctgcatgctcttg

SEQ ID NO: 180360 - DNA, 25 bp, Artificial
  Probe
cacaaactggcttcctgtcgctaaa

SEQ ID NO: 180361 - DNA, 25 bp, Artificial
  Probe
tgtcgctaaatgtcactggtccatt

SEQ ID NO: 180362 - DNA, 25 bp, Artificial
  Probe
ggtccatttgtttctctgtcctcag

SEQ ID NO: 180363 - DNA, 25 bp, Artificial
  Probe
ctaggttccagctgagtttgtgtta

SEQ ID NO: 180364 - DNA, 25 bp, Artificial
  Probe
gcttcctgtcgctaaatgtcactgg

SEQ ID NO: 180365 - DNA, 25 bp, Artificial
  Probe
ttaagcggcgtgttggcgtgcacaa

SEQ ID NO: 180366 - DNA, 25 bp, Artificial
  Probe
ttcctgtcgctaaatgtcactggtc

SEQ ID NO: 180367 - DNA, 25 bp, Artificial
  Probe
cgctaaatgtcactggtccatttgt

SEQ ID NO: 180368 - DNA, 25 bp, Artificial
  Probe
tccatttgtttctctgtcctcaggc

SEQ ID NO: 180369 - DNA, 25 bp, Artificial
  Probe
ccggtgcatgctgttcttggtggct

SEQ ID NO: 180370 - DNA, 25 bp, Artificial
  Probe
gctcgatgggacttggcccagcgcc

SEQ ID NO: 180371 - DNA, 25 bp, Artificial
  Probe
cccggtgcatgctgttcttggtggc

SEQ ID NO: 180372 - DNA, 25 bp, Artificial
  Probe
tcactggtccatttgtttctctgtc

SEQ ID NO: 180373 - DNA, 25 bp, Artificial
  Probe
ccagctgagtttgtgttaagcggcg

SEQ ID NO: 180374 - DNA, 25 bp, Artificial
  Probe
ctgtcctcaggctaaacgcaccaag

SEQ ID NO: 180375 - DNA, 25 bp, Artificial
  Probe
tgttggcgtgcacaaactggcttcc

SEQ ID NO: 180376 - DNA, 25 bp, Artificial
  Probe
aaatgtcactggtccatttgtttct

SEQ ID NO: 180377 - DNA, 25 bp, Artificial
  Probe
ttggcgtgcacaaactggcttcctg

SEQ ID NO: 180378 - DNA, 25 bp, Artificial
  Probe
tttgtttctctgtcctcaggctaaa

SEQ ID NO: 180379 - DNA, 25 bp, Artificial
  Probe
catttgtttctctgtcctcaggcta

SEQ ID NO: 180380 - DNA, 25 bp, Artificial
  Probe
gctaaatgtcactggtccatttgtt

SEQ ID NO: 180381 - DNA, 25 bp, Artificial
  Probe
atgctgttcttggtggctgagcttg

SEQ ID NO: 180382 - DNA, 25 bp, Artificial
  Probe
ggttccagctgagtttgtgttaagc

SEQ ID NO: 180383 - DNA, 25 bp, Artificial
  Probe
gcgtgcacaaactggcttcctgtcg

SEQ ID NO: 180384 - DNA, 25 bp, Artificial
  Probe
tttctctgtcctcaggctaaacgca

SEQ ID NO: 180385 - DNA, 25 bp, Artificial
  Probe
aactggcttcctgtcgctaaatgtc

SEQ ID NO: 180386 - DNA, 25 bp, Artificial
  Probe
tgctgttcttggtggctgagcttga

SEQ ID NO: 180387 - DNA, 25 bp, Artificial
  Probe
actggtccatttgtttctctgtcct

SEQ ID NO: 180388 - DNA, 25 bp, Artificial
  Probe
ggagccttgcgctcccggtgcatgc

SEQ ID NO: 180389 - DNA, 25 bp, Artificial
  Probe
gtgttggcgtgcacaaactggcttc

SEQ ID NO: 180390 - DNA, 25 bp, Artificial
  Probe
tcccggtgcatgctgttcttggtgg

SEQ ID NO: 180391 - DNA, 25 bp, Artificial
  Probe
caaactggcttcctgtcgctaaatg

SEQ ID NO: 180392 - DNA, 25 bp, Artificial
  Probe
gcacaaactggcttcctgtcgctaa

SEQ ID NO: 180393 - DNA, 25 bp, Artificial
  Probe
tgcatgctgttcttggtggctgagc

SEQ ID NO: 180394 - DNA, 25 bp, Artificial
  Probe
ttccagctgagtttgtgttaagcgg

SEQ ID NO: 180395 - DNA, 25 bp, Artificial
  Probe
atgtcactggtccatttgtttctct

SEQ ID NO: 180396 - DNA, 25 bp, Artificial
  Probe
taagcggcgtgttggcgtgcacaaa

SEQ ID NO: 180397 - DNA, 25 bp, Artificial
  Probe
ctcgatgggacttggcccagcgccg

SEQ ID NO: 180398 - DNA, 25 bp, Artificial
  Probe
ttgcgctcccggtgcatgctgttct

SEQ ID NO: 180399 - DNA, 25 bp, Artificial
  Probe
actaggttccagctgagtttgtgtt

SEQ ID NO: 180400 - DNA, 25 bp, Artificial
  Probe
ttctctgtcctcaggctaaacgcac

SEQ ID NO: 180401 - DNA, 25 bp, Artificial
  Probe
actggcttcctgtcgctaaatgtca

SEQ ID NO: 180402 - DNA, 25 bp, Artificial
  Probe
ggcgtgcacaaactggcttcctgtc

SEQ ID NO: 180403 - DNA, 25 bp, Artificial
  Probe
gcgtgttggcgtgcacaaactggct

SEQ ID NO: 180404 - DNA, 25 bp, Artificial
  Probe
ctgtcgctaaatgtcactggtccat

SEQ ID NO: 180405 - DNA, 25 bp, Artificial
  Probe
gtttctctgtcctcaggctaaacgc

SEQ ID NO: 180406 - DNA, 25 bp, Artificial
  Probe
aaagttaacagatcttctagcctca

SEQ ID NO: 180407 - DNA, 25 bp, Artificial
  Probe
gttaacagatcttctagcctcatgg

SEQ ID NO: 180408 - DNA, 25 bp, Artificial
  Probe
tcttctagcctcatggaatactgtt

SEQ ID NO: 180409 - DNA, 25 bp, Artificial
  Probe
tactgttgaacctagagcactgtct

SEQ ID NO: 180410 - DNA, 25 bp, Artificial
  Probe
tggaatactgttgaacctagagcac

SEQ ID NO: 180411 - DNA, 25 bp, Artificial
  Probe
ttctagcctcatggaatactgttga

SEQ ID NO: 180412 - DNA, 25 bp, Artificial
  Probe
aacctagagcactgtcttgattctt

SEQ ID NO: 180413 - DNA, 25 bp, Artificial
  Probe
ctagcctcatggaatactgttgaac

SEQ ID NO: 180414 - DNA, 25 bp, Artificial
  Probe
tagagcactgtcttgattcttttgt

SEQ ID NO: 180415 - DNA, 25 bp, Artificial
  Probe
ctgtcttgattcttttgtgtgtgtg

SEQ ID NO: 180416 - DNA, 25 bp, Artificial
  Probe
aagttaacagatcttctagcctcat

SEQ ID NO: 180417 - DNA, 25 bp, Artificial
  Probe
aacagatcttctagcctcatggaat

SEQ ID NO: 180418 - DNA, 25 bp, Artificial
  Probe
gcactgtcttgattcttttgtgtgt

SEQ ID NO: 180419 - DNA, 25 bp, Artificial
  Probe
acctagagcactgtcttgattcttt

SEQ ID NO: 180420 - DNA, 25 bp, Artificial
  Probe
tgatattttgctagttaacaaagtt

SEQ ID NO: 180421 - DNA, 25 bp, Artificial
  Probe
caaagttaacagatcttctagcctc

SEQ ID NO: 180422 - DNA, 25 bp, Artificial
  Probe
ctgttgaacctagagcactgtcttg

SEQ ID NO: 180423 - DNA, 25 bp, Artificial
  Probe
tgttgaacctagagcactgtcttga

SEQ ID NO: 180424 - DNA, 25 bp, Artificial
  Probe
agagcactgtcttgattcttttgtg

SEQ ID NO: 180425 - DNA, 25 bp, Artificial
  Probe
gtcttgattcttttgtgtgtgtgtg

SEQ ID NO: 180426 - DNA, 25 bp, Artificial
  Probe
cttgattcttttgtgtgtgtgtgtg

SEQ ID NO: 180427 - DNA, 25 bp, Artificial
  Probe
cttctagcctcatggaatactgttg

SEQ ID NO: 180428 - DNA, 25 bp, Artificial
  Probe
ttgattcttttgtgtgtgtgtgtgt

SEQ ID NO: 180429 - DNA, 25 bp, Artificial
  Probe
gttgaacctagagcactgtcttgat

SEQ ID NO: 180430 - DNA, 25 bp, Artificial
  Probe
cactgtcttgattcttttgtgtgtg

SEQ ID NO: 180431 - DNA, 25 bp, Artificial
  Probe
agcctcatggaatactgttgaacct

SEQ ID NO: 180432 - DNA, 25 bp, Artificial
  Probe
agcactgtcttgattcttttgtgtg

SEQ ID NO: 180433 - DNA, 25 bp, Artificial
  Probe
agttaacagatcttctagcctcatg

SEQ ID NO: 180434 - DNA, 25 bp, Artificial
  Probe
tgaacctagagcactgtcttgattc

SEQ ID NO: 180435 - DNA, 25 bp, Artificial
  Probe
gcctcatggaatactgttgaaccta

SEQ ID NO: 180436 - DNA, 25 bp, Artificial
  Probe
gaatactgttgaacctagagcactg

SEQ ID NO: 180437 - DNA, 25 bp, Artificial
  Probe
ctagagcactgtcttgattcttttg

SEQ ID NO: 180438 - DNA, 25 bp, Artificial
  Probe
gaacctagagcactgtcttgattct

SEQ ID NO: 180439 - DNA, 25 bp, Artificial
  Probe
ttgaacctagagcactgtcttgatt

SEQ ID NO: 180440 - DNA, 25 bp, Artificial
  Probe
acagatcttctagcctcatggaata

SEQ ID NO: 180441 - DNA, 25 bp, Artificial
  Probe
cctcatggaatactgttgaacctag

SEQ ID NO: 180442 - DNA, 25 bp, Artificial
  Probe
aatactgttgaacctagagcactgt

SEQ ID NO: 180443 - DNA, 25 bp, Artificial
  Probe
tagcctcatggaatactgttgaacc

SEQ ID NO: 180444 - DNA, 25 bp, Artificial
  Probe
taacagatcttctagcctcatggaa

SEQ ID NO: 180445 - DNA, 25 bp, Artificial
  Probe
tagaaatatacctgttttgttctaa

SEQ ID NO: 180446 - DNA, 25 bp, Artificial
  Probe
gatcttctagcctcatggaatactg

SEQ ID NO: 180447 - DNA, 25 bp, Artificial
  Probe
tctagcctcatggaatactgttgaa

SEQ ID NO: 180448 - DNA, 25 bp, Artificial
  Probe
agatcttctagcctcatggaatact

SEQ ID NO: 180449 - DNA, 25 bp, Artificial
  Probe
actgttgaacctagagcactgtctt

SEQ ID NO: 180450 - DNA, 25 bp, Artificial
  Probe
ttaacagatcttctagcctcatgga

SEQ ID NO: 180451 - DNA, 25 bp, Artificial
  Probe
atactgttgaacctagagcactgtc

SEQ ID NO: 180452 - DNA, 25 bp, Artificial
  Probe
gaccaactggccaactgtgaggaca

SEQ ID NO: 180453 - DNA, 25 bp, Artificial
  Probe
gggatatacatccaagtggacgaat

SEQ ID NO: 180454 - DNA, 25 bp, Artificial
  Probe
ttctgggataactcaaaggagcgat

SEQ ID NO: 180455 - DNA, 25 bp, Artificial
  Probe
agaacatggtagaccaactggccaa

SEQ ID NO: 180456 - DNA, 25 bp, Artificial
  Probe
gtgacccagaagaaacagtataagg

SEQ ID NO: 180457 - DNA, 25 bp, Artificial
  Probe
ctcaaaggagcgatggggatataca

SEQ ID NO: 180458 - DNA, 25 bp, Artificial
  Probe
gacgaaattgcctccaatcaaagtg

SEQ ID NO: 180459 - DNA, 25 bp, Artificial
  Probe
tgatgggacagacttcccgagcatc

SEQ ID NO: 180460 - DNA, 25 bp, Artificial
  Probe
catccaagtggacgaatgactactc

SEQ ID NO: 180461 - DNA, 25 bp, Artificial
  Probe
gatgggactggagtccagttgctct

SEQ ID NO: 180462 - DNA, 25 bp, Artificial
  Probe
cactctcagatgaggctcgacccgg

SEQ ID NO: 180463 - DNA, 25 bp, Artificial
  Probe
tgccagctggtttggctacatgccg

SEQ ID NO: 180464 - DNA, 25 bp, Artificial
  Probe
actggagtccagttgctctctcctc

SEQ ID NO: 180465 - DNA, 25 bp, Artificial
  Probe
cgagcatctcgctgggctgaccctg

SEQ ID NO: 180466 - DNA, 25 bp, Artificial
  Probe
accactttgcccagcgacagagctg

SEQ ID NO: 180467 - DNA, 25 bp, Artificial
  Probe
tcaatcctgaggaagaaatacagag

SEQ ID NO: 180468 - DNA, 25 bp, Artificial
  Probe
acagacttcccgagcatctcgctgg

SEQ ID NO: 180469 - DNA, 25 bp, Artificial
  Probe
ctttgcccagcgacagagctgcatg

SEQ ID NO: 180470 - DNA, 25 bp, Artificial
  Probe
tcctcccagtgcagatctgctcatg

SEQ ID NO: 180471 - DNA, 25 bp, Artificial
  Probe
agagctgcatgaatacgtttgccag

SEQ ID NO: 180472 - DNA, 25 bp, Artificial
  Probe
agacattgaacgactttgaggaatc

SEQ ID NO: 180473 - DNA, 25 bp, Artificial
  Probe
aatacgtttgccagctggtttggct

SEQ ID NO: 180474 - DNA, 25 bp, Artificial
  Probe
agctggtttggctacatgccgctga

SEQ ID NO: 180475 - DNA, 25 bp, Artificial
  Probe
ctgcatgaatacgtttgccagctgg

SEQ ID NO: 180476 - DNA, 25 bp, Artificial
  Probe
ccagccagcctgaagaacatggtag

SEQ ID NO: 180477 - DNA, 25 bp, Artificial
  Probe
tacctgccagccagcctgaagaaca

SEQ ID NO: 180478 - DNA, 25 bp, Artificial
  Probe
tgtattcccattacctgccagccag

SEQ ID NO: 180479 - DNA, 25 bp, Artificial
  Probe
attgcctccaatcaaagtgacccag

SEQ ID NO: 180480 - DNA, 25 bp, Artificial
  Probe
atgggacagacttcccgagcatctc

SEQ ID NO: 180481 - DNA, 25 bp, Artificial
  Probe
tcaaagtgacccagaagaaacagta

SEQ ID NO: 180482 - DNA, 25 bp, Artificial
  Probe
ttaaagaccaagtctcaatcctgag

SEQ ID NO: 180483 - DNA, 25 bp, Artificial
  Probe
ttcccgagcatctcgctgggctgac

SEQ ID NO: 180484 - DNA, 25 bp, Artificial
  Probe
gactttgaggaatcccactgagtgg

SEQ ID NO: 180485 - DNA, 25 bp, Artificial
  Probe
tacatgccgctgatccactctcaga

SEQ ID NO: 180486 - DNA, 25 bp, Artificial
  Probe
attgaacgactttgaggaatcccac

SEQ ID NO: 180487 - DNA, 25 bp, Artificial
  Probe
ggtttggctacatgccgctgatcca

SEQ ID NO: 180488 - DNA, 25 bp, Artificial
  Probe
catgaatacgtttgccagctggttt

SEQ ID NO: 180489 - DNA, 25 bp, Artificial
  Probe
tggacgaatgactactccatggtgt

SEQ ID NO: 180490 - DNA, 25 bp, Artificial
  Probe
ggtcctctttaaagaccaagtctca

SEQ ID NO: 180491 - DNA, 25 bp, Artificial
  Probe
ctgtgacgaaattgcctccaatcaa

SEQ ID NO: 180492 - DNA, 25 bp, Artificial
  Probe
cagatgaggctcgacccggtcctct

SEQ ID NO: 180493 - DNA, 25 bp, Artificial
  Probe
cagcctgaagaacatggtagaccaa

SEQ ID NO: 180494 - DNA, 25 bp, Artificial
  Probe
ctcagatgaggctcgacccggtcct

SEQ ID NO: 180495 - DNA, 25 bp, Artificial
  Probe
tggtagaccaactggccaactgtga

SEQ ID NO: 180496 - DNA, 25 bp, Artificial
  Probe
ccaatcaaagtgacccagaagaaac

SEQ ID NO: 180497 - DNA, 25 bp, Artificial
  Probe
ggagctgctatctaccacaaatatt

SEQ ID NO: 180498 - DNA, 25 bp, Artificial
  Probe
tcgcgcggatcatgatgccaacctc

SEQ ID NO: 180499 - DNA, 25 bp, Artificial
  Probe
acgtcttgaacaggcgctgatgacc

SEQ ID NO: 180500 - DNA, 25 bp, Artificial
  Probe
ctaaatccgcagcaaactgccgtgc

SEQ ID NO: 180501 - DNA, 25 bp, Artificial
  Probe
gcgctgatgaccccggacaccgacg

SEQ ID NO: 180502 - DNA, 25 bp, Artificial
  Probe
ggcgctgatgaccccggacaccgac

SEQ ID NO: 180503 - DNA, 25 bp, Artificial
  Probe
tcttacgtgcgcctttctgccggac

SEQ ID NO: 180504 - DNA, 25 bp, Artificial
  Probe
tttattcgcaccattgcggtcgcgc

SEQ ID NO: 180505 - DNA, 25 bp, Artificial
  Probe
ttttattcgcaccattgcggtcgcg

SEQ ID NO: 180506 - DNA, 25 bp, Artificial
  Probe
aggcgatgtgctttatggcaggcgc

SEQ ID NO: 180507 - DNA, 25 bp, Artificial
  Probe
taacgaacaacagcaacgtcttgaa

SEQ ID NO: 180508 - DNA, 25 bp, Artificial
  Probe
aaatccgcagcaaactgccgtgctg

SEQ ID NO: 180509 - DNA, 25 bp, Artificial
  Probe
atgtgctttatggcaggcgcaaact

SEQ ID NO: 180510 - DNA, 25 bp, Artificial
  Probe
atattacaacgcggcagcattatga

SEQ ID NO: 180511 - DNA, 25 bp, Artificial
  Probe
tctgccggacgcgagcagatgaacg

SEQ ID NO: 180512 - DNA, 25 bp, Artificial
  Probe
ctttgattttattcgcaccattgcg

SEQ ID NO: 180513 - DNA, 25 bp, Artificial
  Probe
ttgcggtcgcgcggatcatgatgcc

SEQ ID NO: 180514 - DNA, 25 bp, Artificial
  Probe
agatgaacgaacagactcaggcgat

SEQ ID NO: 180515 - DNA, 25 bp, Artificial
  Probe
acgaacagactcaggcgatgtgctt

SEQ ID NO: 180516 - DNA, 25 bp, Artificial
  Probe
tttctacggttgcaaactgctgacc

SEQ ID NO: 180517 - DNA, 25 bp, Artificial
  Probe
gcaggcgcaaactcgattttctacg

SEQ ID NO: 180518 - DNA, 25 bp, Artificial
  Probe
atgaacgaacagactcaggcgatgt

SEQ ID NO: 180519 - DNA, 25 bp, Artificial
  Probe
atcatgatgccaacctcttacgtgc

SEQ ID NO: 180520 - DNA, 25 bp, Artificial
  Probe
cctttctgccggacgcgagcagatg

SEQ ID NO: 180521 - DNA, 25 bp, Artificial
  Probe
cgtgcgcctttctgccggacgcgag

SEQ ID NO: 180522 - DNA, 25 bp, Artificial
  Probe
ctcttacgtgcgcctttctgccgga

SEQ ID NO: 180523 - DNA, 25 bp, Artificial
  Probe
acagcaacgtcttgaacaggcgctg

SEQ ID NO: 180524 - DNA, 25 bp, Artificial
  Probe
caaactgctgaccacgccgaatccg

SEQ ID NO: 180525 - DNA, 25 bp, Artificial
  Probe
gaacgaacagactcaggcgatgtgc

SEQ ID NO: 180526 - DNA, 25 bp, Artificial
  Probe
acaacagcaacgtcttgaacaggcg

SEQ ID NO: 180527 - DNA, 25 bp, Artificial
  Probe
caggcgctgatgaccccggacaccg

SEQ ID NO: 180528 - DNA, 25 bp, Artificial
  Probe
ccgacgaatattacaacgcggcagc

SEQ ID NO: 180529 - DNA, 25 bp, Artificial
  Probe
ttttctacggttgcaaactgctgac

SEQ ID NO: 180530 - DNA, 25 bp, Artificial
  Probe
accattgcggtcgcgcggatcatga

SEQ ID NO: 180531 - DNA, 25 bp, Artificial
  Probe
gcaacgtcttgaacaggcgctgatg

SEQ ID NO: 180532 - DNA, 25 bp, Artificial
  Probe
gcagcaaactgccgtgctggcaggg

SEQ ID NO: 180533 - DNA, 25 bp, Artificial
  Probe
ctggggctaaatccgcagcaaactg

SEQ ID NO: 180534 - DNA, 25 bp, Artificial
  Probe
tgccggacgcgagcagatgaacgaa

SEQ ID NO: 180535 - DNA, 25 bp, Artificial
  Probe
agacctgcaactgttccgcaaactg

SEQ ID NO: 180536 - DNA, 25 bp, Artificial
  Probe
caacctcttacgtgcgcctttctgc

SEQ ID NO: 180537 - DNA, 25 bp, Artificial
  Probe
tcaggcgatgtgctttatggcaggc

SEQ ID NO: 180538 - DNA, 25 bp, Artificial
  Probe
ttgattttattcgcaccattgcggt

SEQ ID NO: 180539 - DNA, 25 bp, Artificial
  Probe
tgcaactgttccgcaaactggggct

SEQ ID NO: 180540 - DNA, 25 bp, Artificial
  Probe
aatattacaacgcggcagcattatg

SEQ ID NO: 180541 - DNA, 25 bp, Artificial
  Probe
cgcaaactggggctaaatccgcagc

SEQ ID NO: 180542 - DNA, 25 bp, Artificial
  Probe
gcggtcgcgcggatcatgatgccaa

SEQ ID NO: 180543 - DNA, 25 bp, Artificial
  Probe
tttgattttattcgcaccattgcgg

SEQ ID NO: 180544 - DNA, 25 bp, Artificial
  Probe
tgatgccaacctcttacgtgcgcct

SEQ ID NO: 180545 - DNA, 25 bp, Artificial
  Probe
ctgctgaccacgccgaatccggaag

SEQ ID NO: 180546 - DNA, 25 bp, Artificial
  Probe
ataacgaacaacagcaacgtcttga

SEQ ID NO: 180547 - DNA, 25 bp, Artificial
  Probe
attttctacggttgcaaactgctga

SEQ ID NO: 180548 - DNA, 25 bp, Artificial
  Probe
ggtcgcgcggatcatgatgccaacc

SEQ ID NO: 180549 - DNA, 25 bp, Artificial
  Probe
gtcgcgcggatcatgatgccaacct

SEQ ID NO: 180550 - DNA, 25 bp, Artificial
  Probe
actcaggcgatgtgctttatggcag

SEQ ID NO: 180551 - DNA, 25 bp, Artificial
  Probe
ccgcagcaaactgccgtgctggcag

SEQ ID NO: 180552 - DNA, 25 bp, Artificial
  Probe
caaactggggctaaatccgcagcaa

SEQ ID NO: 180553 - DNA, 25 bp, Artificial
  Probe
cggttgcaaactgctgaccacgccg

SEQ ID NO: 180554 - DNA, 25 bp, Artificial
  Probe
caggcgatgtgctttatggcaggcg

SEQ ID NO: 180555 - DNA, 25 bp, Artificial
  Probe
ggacgcgagcagatgaacgaacaga

SEQ ID NO: 180556 - DNA, 25 bp, Artificial
  Probe
caccgacgaatattacaacgcggca

SEQ ID NO: 180557 - DNA, 25 bp, Artificial
  Probe
tcgcaccattgcggtcgcgcggatc

SEQ ID NO: 180558 - DNA, 25 bp, Artificial
  Probe
gctgaccacgccgaatccggaagaa

SEQ ID NO: 180559 - DNA, 25 bp, Artificial
  Probe
caacgtcttgaacaggcgctgatga

SEQ ID NO: 180560 - DNA, 25 bp, Artificial
  Probe
actgctgaccacgccgaatccggaa

SEQ ID NO: 180561 - DNA, 25 bp, Artificial
  Probe
agcaacgtcttgaacaggcgctgat

SEQ ID NO: 180562 - DNA, 25 bp, Artificial
  Probe
gcaactgttccgcaaactggggcta

SEQ ID NO: 180563 - DNA, 25 bp, Artificial
  Probe
ggatcatgatgccaacctcttacgt

SEQ ID NO: 180564 - DNA, 25 bp, Artificial
  Probe
ctgcaactgttccgcaaactggggc

SEQ ID NO: 180565 - DNA, 25 bp, Artificial
  Probe
gcgcctttctgccggacgcgagcag

SEQ ID NO: 180566 - DNA, 25 bp, Artificial
  Probe
tacggttgcaaactgctgaccacgc

SEQ ID NO: 180567 - DNA, 25 bp, Artificial
  Probe
gcgatgtgctttatggcaggcgcaa

SEQ ID NO: 180568 - DNA, 25 bp, Artificial
  Probe
gccggacgcgagcagatgaacgaac

SEQ ID NO: 180569 - DNA, 25 bp, Artificial
  Probe
gataaagacctgcaactgttccgca

SEQ ID NO: 180570 - DNA, 25 bp, Artificial
  Probe
agactcaggcgatgtgctttatggc

SEQ ID NO: 180571 - DNA, 25 bp, Artificial
  Probe
gatgcctttgattttattcgcacca

SEQ ID NO: 180572 - DNA, 25 bp, Artificial
  Probe
tacgtgcgcctttctgccggacgcg

SEQ ID NO: 180573 - DNA, 25 bp, Artificial
  Probe
tccgcaaactggggctaaatccgca

SEQ ID NO: 180574 - DNA, 25 bp, Artificial
  Probe
cggatcatgatgccaacctcttacg

SEQ ID NO: 180575 - DNA, 25 bp, Artificial
  Probe
tctacggttgcaaactgctgaccac

SEQ ID NO: 180576 - DNA, 25 bp, Artificial
  Probe
cgacgaatattacaacgcggcagca

SEQ ID NO: 180577 - DNA, 25 bp, Artificial
  Probe
aatccgcagcaaactgccgtgctgg

SEQ ID NO: 180578 - DNA, 25 bp, Artificial
  Probe
atgcctttgattttattcgcaccat

SEQ ID NO: 180579 - DNA, 25 bp, Artificial
  Probe
gttgcaaactgctgaccacgccgaa

SEQ ID NO: 180580 - DNA, 25 bp, Artificial
  Probe
tgcgcctttctgccggacgcgagca

SEQ ID NO: 180581 - DNA, 25 bp, Artificial
  Probe
cattgcggtcgcgcggatcatgatg

SEQ ID NO: 180582 - DNA, 25 bp, Artificial
  Probe
ggctaaatccgcagcaaactgccgt

SEQ ID NO: 180583 - DNA, 25 bp, Artificial
  Probe
aacgaacagactcaggcgatgtgct

SEQ ID NO: 180584 - DNA, 25 bp, Artificial
  Probe
cgaacaacagcaacgtcttgaacag

SEQ ID NO: 180585 - DNA, 25 bp, Artificial
  Probe
gatgtcgatgcctttgattttattc

SEQ ID NO: 180586 - DNA, 25 bp, Artificial
  Probe
gacgaatattacaacgcggcagcat

SEQ ID NO: 180587 - DNA, 25 bp, Artificial
  Probe
atgatgccaacctcttacgtgcgcc

SEQ ID NO: 180588 - DNA, 25 bp, Artificial
  Probe
gattttattcgcaccattgcggtcg

SEQ ID NO: 180589 - DNA, 25 bp, Artificial
  Probe
attcgcaccattgcggtcgcgcgga

SEQ ID NO: 180590 - DNA, 25 bp, Artificial
  Probe
gaacagactcaggcgatgtgcttta

SEQ ID NO: 180591 - DNA, 25 bp, Artificial
  Probe
gcgcggatcatgatgccaacctctt

SEQ ID NO: 180592 - DNA, 25 bp, Artificial
  Probe
gcaccattgcggtcgcgcggatcat

SEQ ID NO: 180593 - DNA, 25 bp, Artificial
  Probe
cgctgatgaccccggacaccgacga

SEQ ID NO: 180594 - DNA, 25 bp, Artificial
  Probe
cgaatattacaacgcggcagcatta

SEQ ID NO: 180595 - DNA, 25 bp, Artificial
  Probe
gtcgatgcctttgattttattcgca

SEQ ID NO: 180596 - DNA, 25 bp, Artificial
  Probe
acagactcaggcgatgtgctttatg

SEQ ID NO: 180597 - DNA, 25 bp, Artificial
  Probe
catgatgccaacctcttacgtgcgc

SEQ ID NO: 180598 - DNA, 25 bp, Artificial
  Probe
caacagcaacgtcttgaacaggcgc

SEQ ID NO: 180599 - DNA, 25 bp, Artificial
  Probe
attgcggtcgcgcggatcatgatgc

SEQ ID NO: 180600 - DNA, 25 bp, Artificial
  Probe
aactgctgaccacgccgaatccgga

SEQ ID NO: 180601 - DNA, 25 bp, Artificial
  Probe
acggttgcaaactgctgaccacgcc

SEQ ID NO: 180602 - DNA, 25 bp, Artificial
  Probe
ggcaggcgcaaactcgattttctac

SEQ ID NO: 180603 - DNA, 25 bp, Artificial
  Probe
tgctttatggcaggcgcaaactcga

SEQ ID NO: 180604 - DNA, 25 bp, Artificial
  Probe
tgcaaactgctgaccacgccgaatc

SEQ ID NO: 180605 - DNA, 25 bp, Artificial
  Probe
tgaccacgccgaatccggaagaaga

SEQ ID NO: 180606 - DNA, 25 bp, Artificial
  Probe
ttcgcaccattgcggtcgcgcggat

SEQ ID NO: 180607 - DNA, 25 bp, Artificial
  Probe
ggggctaaatccgcagcaaactgcc

SEQ ID NO: 180608 - DNA, 25 bp, Artificial
  Probe
gatgtcgatgcctttgattttattc

SEQ ID NO: 180609 - DNA, 25 bp, Artificial
  Probe
actcaggcgatgtgctttatggcag

SEQ ID NO: 180610 - DNA, 25 bp, Artificial
  Probe
acgtcttgaacaggcgctgatgacc

SEQ ID NO: 180611 - DNA, 25 bp, Artificial
  Probe
gtcgatgcctttgattttattcgca

SEQ ID NO: 180612 - DNA, 25 bp, Artificial
  Probe
tcaggcgatgtgctttatggcaggc

SEQ ID NO: 180613 - DNA, 25 bp, Artificial
  Probe
caggcgctgatgaccccggacaccg

SEQ ID NO: 180614 - DNA, 25 bp, Artificial
  Probe
gatgcctttgattttattcgcacca

SEQ ID NO: 180615 - DNA, 25 bp, Artificial
  Probe
caggcgatgtgctttatggcaggcg

SEQ ID NO: 180616 - DNA, 25 bp, Artificial
  Probe
ggcgctgatgaccccggacaccgac

SEQ ID NO: 180617 - DNA, 25 bp, Artificial
  Probe
atgcctttgattttattcgcaccat

SEQ ID NO: 180618 - DNA, 25 bp, Artificial
  Probe
aggcgatgtgctttatggcaggcgc

SEQ ID NO: 180619 - DNA, 25 bp, Artificial
  Probe
gcgctgatgaccccggacaccgacg

SEQ ID NO: 180620 - DNA, 25 bp, Artificial
  Probe
ctttgattttattcgcaccattgcg

SEQ ID NO: 180621 - DNA, 25 bp, Artificial
  Probe
gcgatgtgctttatggcaggcgcaa

SEQ ID NO: 180622 - DNA, 25 bp, Artificial
  Probe
cgctgatgaccccggacaccgacga

SEQ ID NO: 180623 - DNA, 25 bp, Artificial
  Probe
tttgattttattcgcaccattgcgg

SEQ ID NO: 180624 - DNA, 25 bp, Artificial
  Probe
atgtgctttatggcaggcgcaaact

SEQ ID NO: 180625 - DNA, 25 bp, Artificial
  Probe
caccgacgaatattacaacgcggca

SEQ ID NO: 180626 - DNA, 25 bp, Artificial
  Probe
ttgattttattcgcaccattgcggt

SEQ ID NO: 180627 - DNA, 25 bp, Artificial
  Probe
tgctttatggcaggcgcaaactcga

SEQ ID NO: 180628 - DNA, 25 bp, Artificial
  Probe
ccgacgaatattacaacgcggcagc

SEQ ID NO: 180629 - DNA, 25 bp, Artificial
  Probe
gattttattcgcaccattgcggtcg

SEQ ID NO: 180630 - DNA, 25 bp, Artificial
  Probe
ggcaggcgcaaactcgattttctac

SEQ ID NO: 180631 - DNA, 25 bp, Artificial
  Probe
cgacgaatattacaacgcggcagca

SEQ ID NO: 180632 - DNA, 25 bp, Artificial
  Probe
ttttattcgcaccattgcggtcgcg

SEQ ID NO: 180633 - DNA, 25 bp, Artificial
  Probe
gcaggcgcaaactcgattttctacg

SEQ ID NO: 180634 - DNA, 25 bp, Artificial
  Probe
gacgaatattacaacgcggcagcat

SEQ ID NO: 180635 - DNA, 25 bp, Artificial
  Probe
tttattcgcaccattgcggtcgcgc

SEQ ID NO: 180636 - DNA, 25 bp, Artificial
  Probe
attttctacggttgcaaactgctga

SEQ ID NO: 180637 - DNA, 25 bp, Artificial
  Probe
cgaatattacaacgcggcagcatta

SEQ ID NO: 180638 - DNA, 25 bp, Artificial
  Probe
attcgcaccattgcggtcgcgcgga

SEQ ID NO: 180639 - DNA, 25 bp, Artificial
  Probe
ttttctacggttgcaaactgctgac

SEQ ID NO: 180640 - DNA, 25 bp, Artificial
  Probe
aatattacaacgcggcagcattatg

SEQ ID NO: 180641 - DNA, 25 bp, Artificial
  Probe
ttcgcaccattgcggtcgcgcggat

SEQ ID NO: 180642 - DNA, 25 bp, Artificial
  Probe
tttctacggttgcaaactgctgacc

SEQ ID NO: 180643 - DNA, 25 bp, Artificial
  Probe
atattacaacgcggcagcattatga

SEQ ID NO: 180644 - DNA, 25 bp, Artificial
  Probe
tcgcaccattgcggtcgcgcggatc

SEQ ID NO: 180645 - DNA, 25 bp, Artificial
  Probe
tctacggttgcaaactgctgaccac

SEQ ID NO: 180646 - DNA, 25 bp, Artificial
  Probe
gcaccattgcggtcgcgcggatcat

SEQ ID NO: 180647 - DNA, 25 bp, Artificial
  Probe
tacggttgcaaactgctgaccacgc

SEQ ID NO: 180648 - DNA, 25 bp, Artificial
  Probe
accattgcggtcgcgcggatcatga

SEQ ID NO: 180649 - DNA, 25 bp, Artificial
  Probe
acggttgcaaactgctgaccacgcc

SEQ ID NO: 180650 - DNA, 25 bp, Artificial
  Probe
cattgcggtcgcgcggatcatgatg

SEQ ID NO: 180651 - DNA, 25 bp, Artificial
  Probe
cggttgcaaactgctgaccacgccg

SEQ ID NO: 180652 - DNA, 25 bp, Artificial
  Probe
attgcggtcgcgcggatcatgatgc

SEQ ID NO: 180653 - DNA, 25 bp, Artificial
  Probe
gttgcaaactgctgaccacgccgaa

SEQ ID NO: 180654 - DNA, 25 bp, Artificial
  Probe
ttgcggtcgcgcggatcatgatgcc

SEQ ID NO: 180655 - DNA, 25 bp, Artificial
  Probe
tgcaaactgctgaccacgccgaatc

SEQ ID NO: 180656 - DNA, 25 bp, Artificial
  Probe
gcggtcgcgcggatcatgatgccaa

SEQ ID NO: 180657 - DNA, 25 bp, Artificial
  Probe
caaactgctgaccacgccgaatccg

SEQ ID NO: 180658 - DNA, 25 bp, Artificial
  Probe
ggtcgcgcggatcatgatgccaacc

SEQ ID NO: 180659 - DNA, 25 bp, Artificial
  Probe
aactgctgaccacgccgaatccgga

SEQ ID NO: 180660 - DNA, 25 bp, Artificial
  Probe
gtcgcgcggatcatgatgccaacct

SEQ ID NO: 180661 - DNA, 25 bp, Artificial
  Probe
actgctgaccacgccgaatccggaa

SEQ ID NO: 180662 - DNA, 25 bp, Artificial
  Probe
tcgcgcggatcatgatgccaacctc

SEQ ID NO: 180663 - DNA, 25 bp, Artificial
  Probe
ctgctgaccacgccgaatccggaag

SEQ ID NO: 180664 - DNA, 25 bp, Artificial
  Probe
gcgcggatcatgatgccaacctctt

SEQ ID NO: 180665 - DNA, 25 bp, Artificial
  Probe
gctgaccacgccgaatccggaagaa

SEQ ID NO: 180666 - DNA, 25 bp, Artificial
  Probe
cggatcatgatgccaacctcttacg

SEQ ID NO: 180667 - DNA, 25 bp, Artificial
  Probe
tgaccacgccgaatccggaagaaga

SEQ ID NO: 180668 - DNA, 25 bp, Artificial
  Probe
ggatcatgatgccaacctcttacgt

SEQ ID NO: 180669 - DNA, 25 bp, Artificial
  Probe
gataaagacctgcaactgttccgca

SEQ ID NO: 180670 - DNA, 25 bp, Artificial
  Probe
atcatgatgccaacctcttacgtgc

SEQ ID NO: 180671 - DNA, 25 bp, Artificial
  Probe
agacctgcaactgttccgcaaactg

SEQ ID NO: 180672 - DNA, 25 bp, Artificial
  Probe
catgatgccaacctcttacgtgcgc

SEQ ID NO: 180673 - DNA, 25 bp, Artificial
  Probe
ctgcaactgttccgcaaactggggc

SEQ ID NO: 180674 - DNA, 25 bp, Artificial
  Probe
atgatgccaacctcttacgtgcgcc

SEQ ID NO: 180675 - DNA, 25 bp, Artificial
  Probe
tgcaactgttccgcaaactggggct

SEQ ID NO: 180676 - DNA, 25 bp, Artificial
  Probe
tgatgccaacctcttacgtgcgcct

SEQ ID NO: 180677 - DNA, 25 bp, Artificial
  Probe
gcaactgttccgcaaactggggcta

SEQ ID NO: 180678 - DNA, 25 bp, Artificial
  Probe
caacctcttacgtgcgcctttctgc

SEQ ID NO: 180679 - DNA, 25 bp, Artificial
  Probe
tccgcaaactggggctaaatccgca

SEQ ID NO: 180680 - DNA, 25 bp, Artificial
  Probe
ctcttacgtgcgcctttctgccgga

SEQ ID NO: 180681 - DNA, 25 bp, Artificial
  Probe
cgcaaactggggctaaatccgcagc

SEQ ID NO: 180682 - DNA, 25 bp, Artificial
  Probe
tcttacgtgcgcctttctgccggac

SEQ ID NO: 180683 - DNA, 25 bp, Artificial
  Probe
caaactggggctaaatccgcagcaa

SEQ ID NO: 180684 - DNA, 25 bp, Artificial
  Probe
tacgtgcgcctttctgccggacgcg

SEQ ID NO: 180685 - DNA, 25 bp, Artificial
  Probe
ctggggctaaatccgcagcaaactg

SEQ ID NO: 180686 - DNA, 25 bp, Artificial
  Probe
cgtgcgcctttctgccggacgcgag

SEQ ID NO: 180687 - DNA, 25 bp, Artificial
  Probe
ggggctaaatccgcagcaaactgcc

SEQ ID NO: 180688 - DNA, 25 bp, Artificial
  Probe
tgcgcctttctgccggacgcgagca

SEQ ID NO: 180689 - DNA, 25 bp, Artificial
  Probe
ggctaaatccgcagcaaactgccgt

SEQ ID NO: 180690 - DNA, 25 bp, Artificial
  Probe
gcgcctttctgccggacgcgagcag

SEQ ID NO: 180691 - DNA, 25 bp, Artificial
  Probe
ctaaatccgcagcaaactgccgtgc

SEQ ID NO: 180692 - DNA, 25 bp, Artificial
  Probe
cctttctgccggacgcgagcagatg

SEQ ID NO: 180693 - DNA, 25 bp, Artificial
  Probe
aaatccgcagcaaactgccgtgctg

SEQ ID NO: 180694 - DNA, 25 bp, Artificial
  Probe
tctgccggacgcgagcagatgaacg

SEQ ID NO: 180695 - DNA, 25 bp, Artificial
  Probe
aatccgcagcaaactgccgtgctgg

SEQ ID NO: 180696 - DNA, 25 bp, Artificial
  Probe
tgccggacgcgagcagatgaacgaa

SEQ ID NO: 180697 - DNA, 25 bp, Artificial
  Probe
ccgcagcaaactgccgtgctggcag

SEQ ID NO: 180698 - DNA, 25 bp, Artificial
  Probe
gccggacgcgagcagatgaacgaac

SEQ ID NO: 180699 - DNA, 25 bp, Artificial
  Probe
gcagcaaactgccgtgctggcaggg

SEQ ID NO: 180700 - DNA, 25 bp, Artificial
  Probe
ggacgcgagcagatgaacgaacaga

SEQ ID NO: 180701 - DNA, 25 bp, Artificial
  Probe
ataacgaacaacagcaacgtcttga

SEQ ID NO: 180702 - DNA, 25 bp, Artificial
  Probe
agatgaacgaacagactcaggcgat

SEQ ID NO: 180703 - DNA, 25 bp, Artificial
  Probe
taacgaacaacagcaacgtcttgaa

SEQ ID NO: 180704 - DNA, 25 bp, Artificial
  Probe
atgaacgaacagactcaggcgatgt

SEQ ID NO: 180705 - DNA, 25 bp, Artificial
  Probe
cgaacaacagcaacgtcttgaacag

SEQ ID NO: 180706 - DNA, 25 bp, Artificial
  Probe
gaacgaacagactcaggcgatgtgc

SEQ ID NO: 180707 - DNA, 25 bp, Artificial
  Probe
acaacagcaacgtcttgaacaggcg

SEQ ID NO: 180708 - DNA, 25 bp, Artificial
  Probe
aacgaacagactcaggcgatgtgct

SEQ ID NO: 180709 - DNA, 25 bp, Artificial
  Probe
caacagcaacgtcttgaacaggcgc

SEQ ID NO: 180710 - DNA, 25 bp, Artificial
  Probe
acgaacagactcaggcgatgtgctt

SEQ ID NO: 180711 - DNA, 25 bp, Artificial
  Probe
acagcaacgtcttgaacaggcgctg

SEQ ID NO: 180712 - DNA, 25 bp, Artificial
  Probe
gaacagactcaggcgatgtgcttta

SEQ ID NO: 180713 - DNA, 25 bp, Artificial
  Probe
agcaacgtcttgaacaggcgctgat

SEQ ID NO: 180714 - DNA, 25 bp, Artificial
  Probe
acagactcaggcgatgtgctttatg

SEQ ID NO: 180715 - DNA, 25 bp, Artificial
  Probe
gcaacgtcttgaacaggcgctgatg

SEQ ID NO: 180716 - DNA, 25 bp, Artificial
  Probe
agactcaggcgatgtgctttatggc

SEQ ID NO: 180717 - DNA, 25 bp, Artificial
  Probe
caacgtcttgaacaggcgctgatga

SEQ ID NO: 180718 - DNA, 25 bp, Artificial
  Probe
gatgtcgatgcctttgattttattc

SEQ ID NO: 180719 - DNA, 25 bp, Artificial
  Probe
actcaggcgatgtgctttatggcag

SEQ ID NO: 180720 - DNA, 25 bp, Artificial
  Probe
acgtcttgaacaggcgctgatgacc

SEQ ID NO: 180721 - DNA, 25 bp, Artificial
  Probe
gtcgatgcctttgattttattcgca

SEQ ID NO: 180722 - DNA, 25 bp, Artificial
  Probe
tcaggcgatgtgctttatggcaggc

SEQ ID NO: 180723 - DNA, 25 bp, Artificial
  Probe
caggcgctgatgaccccggacaccg

SEQ ID NO: 180724 - DNA, 25 bp, Artificial
  Probe
gatgcctttgattttattcgcacca

SEQ ID NO: 180725 - DNA, 25 bp, Artificial
  Probe
caggcgatgtgctttatggcaggcg

SEQ ID NO: 180726 - DNA, 25 bp, Artificial
  Probe
ggcgctgatgaccccggacaccgac

SEQ ID NO: 180727 - DNA, 25 bp, Artificial
  Probe
atgcctttgattttattcgcaccat

SEQ ID NO: 180728 - DNA, 25 bp, Artificial
  Probe
aggcgatgtgctttatggcaggcgc

SEQ ID NO: 180729 - DNA, 25 bp, Artificial
  Probe
gcgctgatgaccccggacaccgacg

SEQ ID NO: 180730 - DNA, 25 bp, Artificial
  Probe
ctttgattttattcgcaccattgcg

SEQ ID NO: 180731 - DNA, 25 bp, Artificial
  Probe
gcgatgtgctttatggcaggcgcaa

SEQ ID NO: 180732 - DNA, 25 bp, Artificial
  Probe
cgctgatgaccccggacaccgacga

SEQ ID NO: 180733 - DNA, 25 bp, Artificial
  Probe
tttgattttattcgcaccattgcgg

SEQ ID NO: 180734 - DNA, 25 bp, Artificial
  Probe
atgtgctttatggcaggcgcaaact

SEQ ID NO: 180735 - DNA, 25 bp, Artificial
  Probe
caccgacgaatattacaacgcggca

SEQ ID NO: 180736 - DNA, 25 bp, Artificial
  Probe
ttgattttattcgcaccattgcggt

SEQ ID NO: 180737 - DNA, 25 bp, Artificial
  Probe
tgctttatggcaggcgcaaactcga

SEQ ID NO: 180738 - DNA, 25 bp, Artificial
  Probe
ccgacgaatattacaacgcggcagc

SEQ ID NO: 180739 - DNA, 25 bp, Artificial
  Probe
gattttattcgcaccattgcggtcg

SEQ ID NO: 180740 - DNA, 25 bp, Artificial
  Probe
ggcaggcgcaaactcgattttctac

SEQ ID NO: 180741 - DNA, 25 bp, Artificial
  Probe
cgacgaatattacaacgcggcagca

SEQ ID NO: 180742 - DNA, 25 bp, Artificial
  Probe
ttttattcgcaccattgcggtcgcg

SEQ ID NO: 180743 - DNA, 25 bp, Artificial
  Probe
gcaggcgcaaactcgattttctacg

SEQ ID NO: 180744 - DNA, 25 bp, Artificial
  Probe
gacgaatattacaacgcggcagcat

SEQ ID NO: 180745 - DNA, 25 bp, Artificial
  Probe
tttattcgcaccattgcggtcgcgc

SEQ ID NO: 180746 - DNA, 25 bp, Artificial
  Probe
attttctacggttgcaaactgctga

SEQ ID NO: 180747 - DNA, 25 bp, Artificial
  Probe
cgaatattacaacgcggcagcatta

SEQ ID NO: 180748 - DNA, 25 bp, Artificial
  Probe
attcgcaccattgcggtcgcgcgga

SEQ ID NO: 180749 - DNA, 25 bp, Artificial
  Probe
ttttctacggttgcaaactgctgac

SEQ ID NO: 180750 - DNA, 25 bp, Artificial
  Probe
aatattacaacgcggcagcattatg

SEQ ID NO: 180751 - DNA, 25 bp, Artificial
  Probe
ttcgcaccattgcggtcgcgcggat

SEQ ID NO: 180752 - DNA, 25 bp, Artificial
  Probe
tttctacggttgcaaactgctgacc

SEQ ID NO: 180753 - DNA, 25 bp, Artificial
  Probe
atattacaacgcggcagcattatga

SEQ ID NO: 180754 - DNA, 25 bp, Artificial
  Probe
tcgcaccattgcggtcgcgcggatc

SEQ ID NO: 180755 - DNA, 25 bp, Artificial
  Probe
tctacggttgcaaactgctgaccac

SEQ ID NO: 180756 - DNA, 25 bp, Artificial
  Probe
gcaccattgcggtcgcgcggatcat

SEQ ID NO: 180757 - DNA, 25 bp, Artificial
  Probe
tacggttgcaaactgctgaccacgc

SEQ ID NO: 180758 - DNA, 25 bp, Artificial
  Probe
accattgcggtcgcgcggatcatga

SEQ ID NO: 180759 - DNA, 25 bp, Artificial
  Probe
acggttgcaaactgctgaccacgcc

SEQ ID NO: 180760 - DNA, 25 bp, Artificial
  Probe
cattgcggtcgcgcggatcatgatg

SEQ ID NO: 180761 - DNA, 25 bp, Artificial
  Probe
cggttgcaaactgctgaccacgccg

SEQ ID NO: 180762 - DNA, 25 bp, Artificial
  Probe
attgcggtcgcgcggatcatgatgc

SEQ ID NO: 180763 - DNA, 25 bp, Artificial
  Probe
gttgcaaactgctgaccacgccgaa

SEQ ID NO: 180764 - DNA, 25 bp, Artificial
  Probe
ttgcggtcgcgcggatcatgatgcc

SEQ ID NO: 180765 - DNA, 25 bp, Artificial
  Probe
tgcaaactgctgaccacgccgaatc

SEQ ID NO: 180766 - DNA, 25 bp, Artificial
  Probe
gcggtcgcgcggatcatgatgccaa

SEQ ID NO: 180767 - DNA, 25 bp, Artificial
  Probe
caaactgctgaccacgccgaatccg

SEQ ID NO: 180768 - DNA, 25 bp, Artificial
  Probe
ggtcgcgcggatcatgatgccaacc

SEQ ID NO: 180769 - DNA, 25 bp, Artificial
  Probe
aactgctgaccacgccgaatccgga

SEQ ID NO: 180770 - DNA, 25 bp, Artificial
  Probe
gtcgcgcggatcatgatgccaacct

SEQ ID NO: 180771 - DNA, 25 bp, Artificial
  Probe
actgctgaccacgccgaatccggaa

SEQ ID NO: 180772 - DNA, 25 bp, Artificial
  Probe
tcgcgcggatcatgatgccaacctc

SEQ ID NO: 180773 - DNA, 25 bp, Artificial
  Probe
ctgctgaccacgccgaatccggaag

SEQ ID NO: 180774 - DNA, 25 bp, Artificial
  Probe
gcgcggatcatgatgccaacctctt

SEQ ID NO: 180775 - DNA, 25 bp, Artificial
  Probe
gctgaccacgccgaatccggaagaa

SEQ ID NO: 180776 - DNA, 25 bp, Artificial
  Probe
cggatcatgatgccaacctcttacg

SEQ ID NO: 180777 - DNA, 25 bp, Artificial
  Probe
tgaccacgccgaatccggaagaaga

SEQ ID NO: 180778 - DNA, 25 bp, Artificial
  Probe
ggatcatgatgccaacctcttacgt

SEQ ID NO: 180779 - DNA, 25 bp, Artificial
  Probe
gataaagacctgcaactgttccgca

SEQ ID NO: 180780 - DNA, 25 bp, Artificial
  Probe
atcatgatgccaacctcttacgtgc

SEQ ID NO: 180781 - DNA, 25 bp, Artificial
  Probe
agacctgcaactgttccgcaaactg

SEQ ID NO: 180782 - DNA, 25 bp, Artificial
  Probe
catgatgccaacctcttacgtgcgc

SEQ ID NO: 180783 - DNA, 25 bp, Artificial
  Probe
ctgcaactgttccgcaaactggggc

SEQ ID NO: 180784 - DNA, 25 bp, Artificial
  Probe
atgatgccaacctcttacgtgcgcc

SEQ ID NO: 180785 - DNA, 25 bp, Artificial
  Probe
tgcaactgttccgcaaactggggct

SEQ ID NO: 180786 - DNA, 25 bp, Artificial
  Probe
tgatgccaacctcttacgtgcgcct

SEQ ID NO: 180787 - DNA, 25 bp, Artificial
  Probe
gcaactgttccgcaaactggggcta

SEQ ID NO: 180788 - DNA, 25 bp, Artificial
  Probe
caacctcttacgtgcgcctttctgc

SEQ ID NO: 180789 - DNA, 25 bp, Artificial
  Probe
tccgcaaactggggctaaatccgca

SEQ ID NO: 180790 - DNA, 25 bp, Artificial
  Probe
ctcttacgtgcgcctttctgccgga

SEQ ID NO: 180791 - DNA, 25 bp, Artificial
  Probe
cgcaaactggggctaaatccgcagc

SEQ ID NO: 180792 - DNA, 25 bp, Artificial
  Probe
tcttacgtgcgcctttctgccggac

SEQ ID NO: 180793 - DNA, 25 bp, Artificial
  Probe
caaactggggctaaatccgcagcaa

SEQ ID NO: 180794 - DNA, 25 bp, Artificial
  Probe
tacgtgcgcctttctgccggacgcg

SEQ ID NO: 180795 - DNA, 25 bp, Artificial
  Probe
ctggggctaaatccgcagcaaactg

SEQ ID NO: 180796 - DNA, 25 bp, Artificial
  Probe
cgtgcgcctttctgccggacgcgag

SEQ ID NO: 180797 - DNA, 25 bp, Artificial
  Probe
ggggctaaatccgcagcaaactgcc

SEQ ID NO: 180798 - DNA, 25 bp, Artificial
  Probe
tgcgcctttctgccggacgcgagca

SEQ ID NO: 180799 - DNA, 25 bp, Artificial
  Probe
ggctaaatccgcagcaaactgccgt

SEQ ID NO: 180800 - DNA, 25 bp, Artificial
  Probe
gcgcctttctgccggacgcgagcag

SEQ ID NO: 180801 - DNA, 25 bp, Artificial
  Probe
ctaaatccgcagcaaactgccgtgc

SEQ ID NO: 180802 - DNA, 25 bp, Artificial
  Probe
cctttctgccggacgcgagcagatg

SEQ ID NO: 180803 - DNA, 25 bp, Artificial
  Probe
aaatccgcagcaaactgccgtgctg

SEQ ID NO: 180804 - DNA, 25 bp, Artificial
  Probe
tctgccggacgcgagcagatgaacg

SEQ ID NO: 180805 - DNA, 25 bp, Artificial
  Probe
aatccgcagcaaactgccgtgctgg

SEQ ID NO: 180806 - DNA, 25 bp, Artificial
  Probe
tgccggacgcgagcagatgaacgaa

SEQ ID NO: 180807 - DNA, 25 bp, Artificial
  Probe
ccgcagcaaactgccgtgctggcag

SEQ ID NO: 180808 - DNA, 25 bp, Artificial
  Probe
gccggacgcgagcagatgaacgaac

SEQ ID NO: 180809 - DNA, 25 bp, Artificial
  Probe
gcagcaaactgccgtgctggcaggg

SEQ ID NO: 180810 - DNA, 25 bp, Artificial
  Probe
ggacgcgagcagatgaacgaacaga

SEQ ID NO: 180811 - DNA, 25 bp, Artificial
  Probe
ataacgaacaacagcaacgtcttga

SEQ ID NO: 180812 - DNA, 25 bp, Artificial
  Probe
agatgaacgaacagactcaggcgat

SEQ ID NO: 180813 - DNA, 25 bp, Artificial
  Probe
taacgaacaacagcaacgtcttgaa

SEQ ID NO: 180814 - DNA, 25 bp, Artificial
  Probe
atgaacgaacagactcaggcgatgt

SEQ ID NO: 180815 - DNA, 25 bp, Artificial
  Probe
cgaacaacagcaacgtcttgaacag

SEQ ID NO: 180816 - DNA, 25 bp, Artificial
  Probe
gaacgaacagactcaggcgatgtgc

SEQ ID NO: 180817 - DNA, 25 bp, Artificial
  Probe
acaacagcaacgtcttgaacaggcg

SEQ ID NO: 180818 - DNA, 25 bp, Artificial
  Probe
aacgaacagactcaggcgatgtgct

SEQ ID NO: 180819 - DNA, 25 bp, Artificial
  Probe
caacagcaacgtcttgaacaggcgc

SEQ ID NO: 180820 - DNA, 25 bp, Artificial
  Probe
acgaacagactcaggcgatgtgctt

SEQ ID NO: 180821 - DNA, 25 bp, Artificial
  Probe
acagcaacgtcttgaacaggcgctg

SEQ ID NO: 180822 - DNA, 25 bp, Artificial
  Probe
gaacagactcaggcgatgtgcttta

SEQ ID NO: 180823 - DNA, 25 bp, Artificial
  Probe
agcaacgtcttgaacaggcgctgat

SEQ ID NO: 180824 - DNA, 25 bp, Artificial
  Probe
acagactcaggcgatgtgctttatg

SEQ ID NO: 180825 - DNA, 25 bp, Artificial
  Probe
gcaacgtcttgaacaggcgctgatg

SEQ ID NO: 180826 - DNA, 25 bp, Artificial
  Probe
agactcaggcgatgtgctttatggc

SEQ ID NO: 180827 - DNA, 25 bp, Artificial
  Probe
caacgtcttgaacaggcgctgatga

SEQ ID NO: 180828 - DNA, 25 bp, Artificial
  Probe
gatgtcgatgcctttgattttattc

SEQ ID NO: 180829 - DNA, 25 bp, Artificial
  Probe
actcaggcgatgtgctttatggcag

SEQ ID NO: 180830 - DNA, 25 bp, Artificial
  Probe
acgtcttgaacaggcgctgatgacc

SEQ ID NO: 180831 - DNA, 25 bp, Artificial
  Probe
gtcgatgcctttgattttattcgca

SEQ ID NO: 180832 - DNA, 25 bp, Artificial
  Probe
tcaggcgatgtgctttatggcaggc

SEQ ID NO: 180833 - DNA, 25 bp, Artificial
  Probe
caggcgctgatgaccccggacaccg

SEQ ID NO: 180834 - DNA, 25 bp, Artificial
  Probe
gatgcctttgattttattcgcacca

SEQ ID NO: 180835 - DNA, 25 bp, Artificial
  Probe
caggcgatgtgctttatggcaggcg

SEQ ID NO: 180836 - DNA, 25 bp, Artificial
  Probe
ggcgctgatgaccccggacaccgac

SEQ ID NO: 180837 - DNA, 25 bp, Artificial
  Probe
atgcctttgattttattcgcaccat

SEQ ID NO: 180838 - DNA, 25 bp, Artificial
  Probe
aggcgatgtgctttatggcaggcgc

SEQ ID NO: 180839 - DNA, 25 bp, Artificial
  Probe
gcgctgatgaccccggacaccgacg

SEQ ID NO: 180840 - DNA, 25 bp, Artificial
  Probe
ctttgattttattcgcaccattgcg

SEQ ID NO: 180841 - DNA, 25 bp, Artificial
  Probe
gcgatgtgctttatggcaggcgcaa

SEQ ID NO: 180842 - DNA, 25 bp, Artificial
  Probe
cgctgatgaccccggacaccgacga

SEQ ID NO: 180843 - DNA, 25 bp, Artificial
  Probe
tttgattttattcgcaccattgcgg

SEQ ID NO: 180844 - DNA, 25 bp, Artificial
  Probe
atgtgctttatggcaggcgcaaact

SEQ ID NO: 180845 - DNA, 25 bp, Artificial
  Probe
caccgacgaatattacaacgcggca

SEQ ID NO: 180846 - DNA, 25 bp, Artificial
  Probe
ttgattttattcgcaccattgcggt

SEQ ID NO: 180847 - DNA, 25 bp, Artificial
  Probe
tgctttatggcaggcgcaaactcga

SEQ ID NO: 180848 - DNA, 25 bp, Artificial
  Probe
ccgacgaatattacaacgcggcagc

SEQ ID NO: 180849 - DNA, 25 bp, Artificial
  Probe
gattttattcgcaccattgcggtcg

SEQ ID NO: 180850 - DNA, 25 bp, Artificial
  Probe
ggcaggcgcaaactcgattttctac

SEQ ID NO: 180851 - DNA, 25 bp, Artificial
  Probe
cgacgaatattacaacgcggcagca

SEQ ID NO: 180852 - DNA, 25 bp, Artificial
  Probe
ttttattcgcaccattgcggtcgcg

SEQ ID NO: 180853 - DNA, 25 bp, Artificial
  Probe
gcaggcgcaaactcgattttctacg

SEQ ID NO: 180854 - DNA, 25 bp, Artificial
  Probe
gacgaatattacaacgcggcagcat

SEQ ID NO: 180855 - DNA, 25 bp, Artificial
  Probe
tttattcgcaccattgcggtcgcgc

SEQ ID NO: 180856 - DNA, 25 bp, Artificial
  Probe
attttctacggttgcaaactgctga

SEQ ID NO: 180857 - DNA, 25 bp, Artificial
  Probe
cgaatattacaacgcggcagcatta

SEQ ID NO: 180858 - DNA, 25 bp, Artificial
  Probe
attcgcaccattgcggtcgcgcgga

SEQ ID NO: 180859 - DNA, 25 bp, Artificial
  Probe
ttttctacggttgcaaactgctgac

SEQ ID NO: 180860 - DNA, 25 bp, Artificial
  Probe
aatattacaacgcggcagcattatg

SEQ ID NO: 180861 - DNA, 25 bp, Artificial
  Probe
ttcgcaccattgcggtcgcgcggat

SEQ ID NO: 180862 - DNA, 25 bp, Artificial
  Probe
tttctacggttgcaaactgctgacc

SEQ ID NO: 180863 - DNA, 25 bp, Artificial
  Probe
atattacaacgcggcagcattatga

SEQ ID NO: 180864 - DNA, 25 bp, Artificial
  Probe
tcgcaccattgcggtcgcgcggatc

SEQ ID NO: 180865 - DNA, 25 bp, Artificial
  Probe
tctacggttgcaaactgctgaccac

SEQ ID NO: 180866 - DNA, 25 bp, Artificial
  Probe
gcaccattgcggtcgcgcggatcat

SEQ ID NO: 180867 - DNA, 25 bp, Artificial
  Probe
tacggttgcaaactgctgaccacgc

SEQ ID NO: 180868 - DNA, 25 bp, Artificial
  Probe
accattgcggtcgcgcggatcatga

SEQ ID NO: 180869 - DNA, 25 bp, Artificial
  Probe
acggttgcaaactgctgaccacgcc

SEQ ID NO: 180870 - DNA, 25 bp, Artificial
  Probe
cattgcggtcgcgcggatcatgatg

SEQ ID NO: 180871 - DNA, 25 bp, Artificial
  Probe
cggttgcaaactgctgaccacgccg

SEQ ID NO: 180872 - DNA, 25 bp, Artificial
  Probe
attgcggtcgcgcggatcatgatgc

SEQ ID NO: 180873 - DNA, 25 bp, Artificial
  Probe
gttgcaaactgctgaccacgccgaa

SEQ ID NO: 180874 - DNA, 25 bp, Artificial
  Probe
ttgcggtcgcgcggatcatgatgcc

SEQ ID NO: 180875 - DNA, 25 bp, Artificial
  Probe
tgcaaactgctgaccacgccgaatc

SEQ ID NO: 180876 - DNA, 25 bp, Artificial
  Probe
gcggtcgcgcggatcatgatgccaa

SEQ ID NO: 180877 - DNA, 25 bp, Artificial
  Probe
caaactgctgaccacgccgaatccg

SEQ ID NO: 180878 - DNA, 25 bp, Artificial
  Probe
ggtcgcgcggatcatgatgccaacc

SEQ ID NO: 180879 - DNA, 25 bp, Artificial
  Probe
aactgctgaccacgccgaatccgga

SEQ ID NO: 180880 - DNA, 25 bp, Artificial
  Probe
gtcgcgcggatcatgatgccaacct

SEQ ID NO: 180881 - DNA, 25 bp, Artificial
  Probe
actgctgaccacgccgaatccggaa

SEQ ID NO: 180882 - DNA, 25 bp, Artificial
  Probe
tcgcgcggatcatgatgccaacctc

SEQ ID NO: 180883 - DNA, 25 bp, Artificial
  Probe
ctgctgaccacgccgaatccggaag

SEQ ID NO: 180884 - DNA, 25 bp, Artificial
  Probe
gcgcggatcatgatgccaacctctt

SEQ ID NO: 180885 - DNA, 25 bp, Artificial
  Probe
gctgaccacgccgaatccggaagaa

SEQ ID NO: 180886 - DNA, 25 bp, Artificial
  Probe
cggatcatgatgccaacctcttacg

SEQ ID NO: 180887 - DNA, 25 bp, Artificial
  Probe
tgaccacgccgaatccggaagaaga

SEQ ID NO: 180888 - DNA, 25 bp, Artificial
  Probe
ggatcatgatgccaacctcttacgt

SEQ ID NO: 180889 - DNA, 25 bp, Artificial
  Probe
gataaagacctgcaactgttccgca

SEQ ID NO: 180890 - DNA, 25 bp, Artificial
  Probe
atcatgatgccaacctcttacgtgc

SEQ ID NO: 180891 - DNA, 25 bp, Artificial
  Probe
agacctgcaactgttccgcaaactg

SEQ ID NO: 180892 - DNA, 25 bp, Artificial
  Probe
catgatgccaacctcttacgtgcgc

SEQ ID NO: 180893 - DNA, 25 bp, Artificial
  Probe
ctgcaactgttccgcaaactggggc

SEQ ID NO: 180894 - DNA, 25 bp, Artificial
  Probe
atgatgccaacctcttacgtgcgcc

SEQ ID NO: 180895 - DNA, 25 bp, Artificial
  Probe
tgcaactgttccgcaaactggggct

SEQ ID NO: 180896 - DNA, 25 bp, Artificial
  Probe
tgatgccaacctcttacgtgcgcct

SEQ ID NO: 180897 - DNA, 25 bp, Artificial
  Probe
gcaactgttccgcaaactggggcta

SEQ ID NO: 180898 - DNA, 25 bp, Artificial
  Probe
caacctcttacgtgcgcctttctgc

SEQ ID NO: 180899 - DNA, 25 bp, Artificial
  Probe
tccgcaaactggggctaaatccgca

SEQ ID NO: 180900 - DNA, 25 bp, Artificial
  Probe
ctcttacgtgcgcctttctgccgga

SEQ ID NO: 180901 - DNA, 25 bp, Artificial
  Probe
cgcaaactggggctaaatccgcagc

SEQ ID NO: 180902 - DNA, 25 bp, Artificial
  Probe
tcttacgtgcgcctttctgccggac

SEQ ID NO: 180903 - DNA, 25 bp, Artificial
  Probe
caaactggggctaaatccgcagcaa

SEQ ID NO: 180904 - DNA, 25 bp, Artificial
  Probe
tacgtgcgcctttctgccggacgcg

SEQ ID NO: 180905 - DNA, 25 bp, Artificial
  Probe
ctggggctaaatccgcagcaaactg

SEQ ID NO: 180906 - DNA, 25 bp, Artificial
  Probe
cgtgcgcctttctgccggacgcgag

SEQ ID NO: 180907 - DNA, 25 bp, Artificial
  Probe
ggggctaaatccgcagcaaactgcc

SEQ ID NO: 180908 - DNA, 25 bp, Artificial
  Probe
tgcgcctttctgccggacgcgagca

SEQ ID NO: 180909 - DNA, 25 bp, Artificial
  Probe
ggctaaatccgcagcaaactgccgt

SEQ ID NO: 180910 - DNA, 25 bp, Artificial
  Probe
gcgcctttctgccggacgcgagcag

SEQ ID NO: 180911 - DNA, 25 bp, Artificial
  Probe
ctaaatccgcagcaaactgccgtgc

SEQ ID NO: 180912 - DNA, 25 bp, Artificial
  Probe
cctttctgccggacgcgagcagatg

SEQ ID NO: 180913 - DNA, 25 bp, Artificial
  Probe
aaatccgcagcaaactgccgtgctg

SEQ ID NO: 180914 - DNA, 25 bp, Artificial
  Probe
tctgccggacgcgagcagatgaacg

SEQ ID NO: 180915 - DNA, 25 bp, Artificial
  Probe
aatccgcagcaaactgccgtgctgg

SEQ ID NO: 180916 - DNA, 25 bp, Artificial
  Probe
tgccggacgcgagcagatgaacgaa

SEQ ID NO: 180917 - DNA, 25 bp, Artificial
  Probe
ccgcagcaaactgccgtgctggcag

SEQ ID NO: 180918 - DNA, 25 bp, Artificial
  Probe
gccggacgcgagcagatgaacgaac

SEQ ID NO: 180919 - DNA, 25 bp, Artificial
  Probe
gcagcaaactgccgtgctggcaggg

SEQ ID NO: 180920 - DNA, 25 bp, Artificial
  Probe
ggacgcgagcagatgaacgaacaga

SEQ ID NO: 180921 - DNA, 25 bp, Artificial
  Probe
ataacgaacaacagcaacgtcttga

SEQ ID NO: 180922 - DNA, 25 bp, Artificial
  Probe
agatgaacgaacagactcaggcgat

SEQ ID NO: 180923 - DNA, 25 bp, Artificial
  Probe
taacgaacaacagcaacgtcttgaa

SEQ ID NO: 180924 - DNA, 25 bp, Artificial
  Probe
atgaacgaacagactcaggcgatgt

SEQ ID NO: 180925 - DNA, 25 bp, Artificial
  Probe
cgaacaacagcaacgtcttgaacag

SEQ ID NO: 180926 - DNA, 25 bp, Artificial
  Probe
gaacgaacagactcaggcgatgtgc

SEQ ID NO: 180927 - DNA, 25 bp, Artificial
  Probe
acaacagcaacgtcttgaacaggcg

SEQ ID NO: 180928 - DNA, 25 bp, Artificial
  Probe
aacgaacagactcaggcgatgtgct

SEQ ID NO: 180929 - DNA, 25 bp, Artificial
  Probe
caacagcaacgtcttgaacaggcgc

SEQ ID NO: 180930 - DNA, 25 bp, Artificial
  Probe
acgaacagactcaggcgatgtgctt

SEQ ID NO: 180931 - DNA, 25 bp, Artificial
  Probe
acagcaacgtcttgaacaggcgctg

SEQ ID NO: 180932 - DNA, 25 bp, Artificial
  Probe
gaacagactcaggcgatgtgcttta

SEQ ID NO: 180933 - DNA, 25 bp, Artificial
  Probe
agcaacgtcttgaacaggcgctgat

SEQ ID NO: 180934 - DNA, 25 bp, Artificial
  Probe
acagactcaggcgatgtgctttatg

SEQ ID NO: 180935 - DNA, 25 bp, Artificial
  Probe
gcaacgtcttgaacaggcgctgatg

SEQ ID NO: 180936 - DNA, 25 bp, Artificial
  Probe
agactcaggcgatgtgctttatggc

SEQ ID NO: 180937 - DNA, 25 bp, Artificial
  Probe
caacgtcttgaacaggcgctgatga

SEQ ID NO: 180938 - DNA, 25 bp, Artificial
  Probe
gatgtcgatgcctttgattttattc

SEQ ID NO: 180939 - DNA, 25 bp, Artificial
  Probe
actcaggcgatgtgctttatggcag

SEQ ID NO: 180940 - DNA, 25 bp, Artificial
  Probe
acgtcttgaacaggcgctgatgacc

SEQ ID NO: 180941 - DNA, 25 bp, Artificial
  Probe
gtcgatgcctttgattttattcgca

SEQ ID NO: 180942 - DNA, 25 bp, Artificial
  Probe
tcaggcgatgtgctttatggcaggc

SEQ ID NO: 180943 - DNA, 25 bp, Artificial
  Probe
caggcgctgatgaccccggacaccg

SEQ ID NO: 180944 - DNA, 25 bp, Artificial
  Probe
gatgcctttgattttattcgcacca

SEQ ID NO: 180945 - DNA, 25 bp, Artificial
  Probe
caggcgatgtgctttatggcaggcg

SEQ ID NO: 180946 - DNA, 25 bp, Artificial
  Probe
ggcgctgatgaccccggacaccgac

SEQ ID NO: 180947 - DNA, 25 bp, Artificial
  Probe
atgcctttgattttattcgcaccat

SEQ ID NO: 180948 - DNA, 25 bp, Artificial
  Probe
aggcgatgtgctttatggcaggcgc

SEQ ID NO: 180949 - DNA, 25 bp, Artificial
  Probe
gcgctgatgaccccggacaccgacg

SEQ ID NO: 180950 - DNA, 25 bp, Artificial
  Probe
ctttgattttattcgcaccattgcg

SEQ ID NO: 180951 - DNA, 25 bp, Artificial
  Probe
gcgatgtgctttatggcaggcgcaa

SEQ ID NO: 180952 - DNA, 25 bp, Artificial
  Probe
cgctgatgaccccggacaccgacga

SEQ ID NO: 180953 - DNA, 25 bp, Artificial
  Probe
tttgattttattcgcaccattgcgg

SEQ ID NO: 180954 - DNA, 25 bp, Artificial
  Probe
atgtgctttatggcaggcgcaaact

SEQ ID NO: 180955 - DNA, 25 bp, Artificial
  Probe
caccgacgaatattacaacgcggca

SEQ ID NO: 180956 - DNA, 25 bp, Artificial
  Probe
ttgattttattcgcaccattgcggt

SEQ ID NO: 180957 - DNA, 25 bp, Artificial
  Probe
tgctttatggcaggcgcaaactcga

SEQ ID NO: 180958 - DNA, 25 bp, Artificial
  Probe
ccgacgaatattacaacgcggcagc

SEQ ID NO: 180959 - DNA, 25 bp, Artificial
  Probe
gattttattcgcaccattgcggtcg

SEQ ID NO: 180960 - DNA, 25 bp, Artificial
  Probe
ggcaggcgcaaactcgattttctac

SEQ ID NO: 180961 - DNA, 25 bp, Artificial
  Probe
cgacgaatattacaacgcggcagca

SEQ ID NO: 180962 - DNA, 25 bp, Artificial
  Probe
ttttattcgcaccattgcggtcgcg

SEQ ID NO: 180963 - DNA, 25 bp, Artificial
  Probe
gcaggcgcaaactcgattttctacg

SEQ ID NO: 180964 - DNA, 25 bp, Artificial
  Probe
gacgaatattacaacgcggcagcat

SEQ ID NO: 180965 - DNA, 25 bp, Artificial
  Probe
tttattcgcaccattgcggtcgcgc

SEQ ID NO: 180966 - DNA, 25 bp, Artificial
  Probe
attttctacggttgcaaactgctga

SEQ ID NO: 180967 - DNA, 25 bp, Artificial
  Probe
cgaatattacaacgcggcagcatta

SEQ ID NO: 180968 - DNA, 25 bp, Artificial
  Probe
attcgcaccattgcggtcgcgcgga

SEQ ID NO: 180969 - DNA, 25 bp, Artificial
  Probe
ttttctacggttgcaaactgctgac

SEQ ID NO: 180970 - DNA, 25 bp, Artificial
  Probe
aatattacaacgcggcagcattatg

SEQ ID NO: 180971 - DNA, 25 bp, Artificial
  Probe
ttcgcaccattgcggtcgcgcggat

SEQ ID NO: 180972 - DNA, 25 bp, Artificial
  Probe
tttctacggttgcaaactgctgacc

SEQ ID NO: 180973 - DNA, 25 bp, Artificial
  Probe
atattacaacgcggcagcattatga

SEQ ID NO: 180974 - DNA, 25 bp, Artificial
  Probe
tcgcaccattgcggtcgcgcggatc

SEQ ID NO: 180975 - DNA, 25 bp, Artificial
  Probe
tctacggttgcaaactgctgaccac

SEQ ID NO: 180976 - DNA, 25 bp, Artificial
  Probe
gcaccattgcggtcgcgcggatcat

SEQ ID NO: 180977 - DNA, 25 bp, Artificial
  Probe
tacggttgcaaactgctgaccacgc

SEQ ID NO: 180978 - DNA, 25 bp, Artificial
  Probe
accattgcggtcgcgcggatcatga

SEQ ID NO: 180979 - DNA, 25 bp, Artificial
  Probe
acggttgcaaactgctgaccacgcc

SEQ ID NO: 180980 - DNA, 25 bp, Artificial
  Probe
cattgcggtcgcgcggatcatgatg

SEQ ID NO: 180981 - DNA, 25 bp, Artificial
  Probe
cggttgcaaactgctgaccacgccg

SEQ ID NO: 180982 - DNA, 25 bp, Artificial
  Probe
attgcggtcgcgcggatcatgatgc

SEQ ID NO: 180983 - DNA, 25 bp, Artificial
  Probe
gttgcaaactgctgaccacgccgaa

SEQ ID NO: 180984 - DNA, 25 bp, Artificial
  Probe
ttgcggtcgcgcggatcatgatgcc

SEQ ID NO: 180985 - DNA, 25 bp, Artificial
  Probe
tgcaaactgctgaccacgccgaatc

SEQ ID NO: 180986 - DNA, 25 bp, Artificial
  Probe
gcggtcgcgcggatcatgatgccaa

SEQ ID NO: 180987 - DNA, 25 bp, Artificial
  Probe
caaactgctgaccacgccgaatccg

SEQ ID NO: 180988 - DNA, 25 bp, Artificial
  Probe
ggtcgcgcggatcatgatgccaacc

SEQ ID NO: 180989 - DNA, 25 bp, Artificial
  Probe
aactgctgaccacgccgaatccgga

SEQ ID NO: 180990 - DNA, 25 bp, Artificial
  Probe
gtcgcgcggatcatgatgccaacct

SEQ ID NO: 180991 - DNA, 25 bp, Artificial
  Probe
actgctgaccacgccgaatccggaa

SEQ ID NO: 180992 - DNA, 25 bp, Artificial
  Probe
tcgcgcggatcatgatgccaacctc

SEQ ID NO: 180993 - DNA, 25 bp, Artificial
  Probe
ctgctgaccacgccgaatccggaag

SEQ ID NO: 180994 - DNA, 25 bp, Artificial
  Probe
gcgcggatcatgatgccaacctctt

SEQ ID NO: 180995 - DNA, 25 bp, Artificial
  Probe
gctgaccacgccgaatccggaagaa

SEQ ID NO: 180996 - DNA, 25 bp, Artificial
  Probe
cggatcatgatgccaacctcttacg

SEQ ID NO: 180997 - DNA, 25 bp, Artificial
  Probe
tgaccacgccgaatccggaagaaga

SEQ ID NO: 180998 - DNA, 25 bp, Artificial
  Probe
ggatcatgatgccaacctcttacgt

SEQ ID NO: 180999 - DNA, 25 bp, Artificial
  Probe
gataaagacctgcaactgttccgca

SEQ ID NO: 181000 - DNA, 25 bp, Artificial
  Probe
atcatgatgccaacctcttacgtgc

SEQ ID NO: 181001 - DNA, 25 bp, Artificial
  Probe
agacctgcaactgttccgcaaactg

SEQ ID NO: 181002 - DNA, 25 bp, Artificial
  Probe
catgatgccaacctcttacgtgcgc

SEQ ID NO: 181003 - DNA, 25 bp, Artificial
  Probe
ctgcaactgttccgcaaactggggc

SEQ ID NO: 181004 - DNA, 25 bp, Artificial
  Probe
atgatgccaacctcttacgtgcgcc

SEQ ID NO: 181005 - DNA, 25 bp, Artificial
  Probe
tgcaactgttccgcaaactggggct

SEQ ID NO: 181006 - DNA, 25 bp, Artificial
  Probe
tgatgccaacctcttacgtgcgcct

SEQ ID NO: 181007 - DNA, 25 bp, Artificial
  Probe
gcaactgttccgcaaactggggcta

SEQ ID NO: 181008 - DNA, 25 bp, Artificial
  Probe
caacctcttacgtgcgcctttctgc

SEQ ID NO: 181009 - DNA, 25 bp, Artificial
  Probe
tccgcaaactggggctaaatccgca

SEQ ID NO: 181010 - DNA, 25 bp, Artificial
  Probe
ctcttacgtgcgcctttctgccgga

SEQ ID NO: 181011 - DNA, 25 bp, Artificial
  Probe
cgcaaactggggctaaatccgcagc

SEQ ID NO: 181012 - DNA, 25 bp, Artificial
  Probe
tcttacgtgcgcctttctgccggac

SEQ ID NO: 181013 - DNA, 25 bp, Artificial
  Probe
caaactggggctaaatccgcagcaa

SEQ ID NO: 181014 - DNA, 25 bp, Artificial
  Probe
tacgtgcgcctttctgccggacgcg

SEQ ID NO: 181015 - DNA, 25 bp, Artificial
  Probe
ctggggctaaatccgcagcaaactg

SEQ ID NO: 181016 - DNA, 25 bp, Artificial
  Probe
cgtgcgcctttctgccggacgcgag

SEQ ID NO: 181017 - DNA, 25 bp, Artificial
  Probe
ggggctaaatccgcagcaaactgcc

SEQ ID NO: 181018 - DNA, 25 bp, Artificial
  Probe
tgcgcctttctgccggacgcgagca

SEQ ID NO: 181019 - DNA, 25 bp, Artificial
  Probe
ggctaaatccgcagcaaactgccgt

SEQ ID NO: 181020 - DNA, 25 bp, Artificial
  Probe
gcgcctttctgccggacgcgagcag

SEQ ID NO: 181021 - DNA, 25 bp, Artificial
  Probe
ctaaatccgcagcaaactgccgtgc

SEQ ID NO: 181022 - DNA, 25 bp, Artificial
  Probe
cctttctgccggacgcgagcagatg

SEQ ID NO: 181023 - DNA, 25 bp, Artificial
  Probe
aaatccgcagcaaactgccgtgctg

SEQ ID NO: 181024 - DNA, 25 bp, Artificial
  Probe
tctgccggacgcgagcagatgaacg

SEQ ID NO: 181025 - DNA, 25 bp, Artificial
  Probe
aatccgcagcaaactgccgtgctgg

SEQ ID NO: 181026 - DNA, 25 bp, Artificial
  Probe
tgccggacgcgagcagatgaacgaa

SEQ ID NO: 181027 - DNA, 25 bp, Artificial
  Probe
ccgcagcaaactgccgtgctggcag

SEQ ID NO: 181028 - DNA, 25 bp, Artificial
  Probe
gccggacgcgagcagatgaacgaac

SEQ ID NO: 181029 - DNA, 25 bp, Artificial
  Probe
gcagcaaactgccgtgctggcaggg

SEQ ID NO: 181030 - DNA, 25 bp, Artificial
  Probe
ggacgcgagcagatgaacgaacaga

SEQ ID NO: 181031 - DNA, 25 bp, Artificial
  Probe
ataacgaacaacagcaacgtcttga

SEQ ID NO: 181032 - DNA, 25 bp, Artificial
  Probe
agatgaacgaacagactcaggcgat

SEQ ID NO: 181033 - DNA, 25 bp, Artificial
  Probe
taacgaacaacagcaacgtcttgaa

SEQ ID NO: 181034 - DNA, 25 bp, Artificial
  Probe
atgaacgaacagactcaggcgatgt

SEQ ID NO: 181035 - DNA, 25 bp, Artificial
  Probe
cgaacaacagcaacgtcttgaacag

SEQ ID NO: 181036 - DNA, 25 bp, Artificial
  Probe
gaacgaacagactcaggcgatgtgc

SEQ ID NO: 181037 - DNA, 25 bp, Artificial
  Probe
acaacagcaacgtcttgaacaggcg

SEQ ID NO: 181038 - DNA, 25 bp, Artificial
  Probe
aacgaacagactcaggcgatgtgct

SEQ ID NO: 181039 - DNA, 25 bp, Artificial
  Probe
caacagcaacgtcttgaacaggcgc

SEQ ID NO: 181040 - DNA, 25 bp, Artificial
  Probe
acgaacagactcaggcgatgtgctt

SEQ ID NO: 181041 - DNA, 25 bp, Artificial
  Probe
acagcaacgtcttgaacaggcgctg

SEQ ID NO: 181042 - DNA, 25 bp, Artificial
  Probe
gaacagactcaggcgatgtgcttta

SEQ ID NO: 181043 - DNA, 25 bp, Artificial
  Probe
agcaacgtcttgaacaggcgctgat

SEQ ID NO: 181044 - DNA, 25 bp, Artificial
  Probe
acagactcaggcgatgtgctttatg

SEQ ID NO: 181045 - DNA, 25 bp, Artificial
  Probe
gcaacgtcttgaacaggcgctgatg

SEQ ID NO: 181046 - DNA, 25 bp, Artificial
  Probe
agactcaggcgatgtgctttatggc

SEQ ID NO: 181047 - DNA, 25 bp, Artificial
  Probe
caacgtcttgaacaggcgctgatga

SEQ ID NO: 181048 - DNA, 25 bp, Artificial
  Probe
tttgaaaaaccgttgctggatctgc

SEQ ID NO: 181049 - DNA, 25 bp, Artificial
  Probe
tcggcgcgcaaagcgaaagcggcag

SEQ ID NO: 181050 - DNA, 25 bp, Artificial
  Probe
cgcaaagcgaaagcggcaggatcga

SEQ ID NO: 181051 - DNA, 25 bp, Artificial
  Probe
caaatactgcccgcaaagctcgcgc

SEQ ID NO: 181052 - DNA, 25 bp, Artificial
  Probe
cagcaggtgcatcgccagcatttcg

SEQ ID NO: 181053 - DNA, 25 bp, Artificial
  Probe
ggtgcatcgccagcatttcgatcct

SEQ ID NO: 181054 - DNA, 25 bp, Artificial
  Probe
cgttgctggatctgctgtttgaagc

SEQ ID NO: 181055 - DNA, 25 bp, Artificial
  Probe
ccgttgctggatctgctgtttgaag

SEQ ID NO: 181056 - DNA, 25 bp, Artificial
  Probe
gctgtttgaagcgcagcaggtgcat

SEQ ID NO: 181057 - DNA, 25 bp, Artificial
  Probe
ctcgtcaggtgcaggtcagcacgtt

SEQ ID NO: 181058 - DNA, 25 bp, Artificial
  Probe
aatactgcccgcaaagctcgcgcta

SEQ ID NO: 181059 - DNA, 25 bp, Artificial
  Probe
tctgctgtttgaagcgcagcaggtg

SEQ ID NO: 181060 - DNA, 25 bp, Artificial
  Probe
tgcatcgccagcatttcgatcctcg

SEQ ID NO: 181061 - DNA, 25 bp, Artificial
  Probe
ttgctgtcgattaagaccggagctt

SEQ ID NO: 181062 - DNA, 25 bp, Artificial
  Probe
tcgtcaggtgcaggtcagcacgttg

SEQ ID NO: 181063 - DNA, 25 bp, Artificial
  Probe
accgttgctggatctgctgtttgaa

SEQ ID NO: 181064 - DNA, 25 bp, Artificial
  Probe
gcatttcgatcctcgtcaggtgcag

SEQ ID NO: 181065 - DNA, 25 bp, Artificial
  Probe
gtcgcaagtcacagaattatttgaa

SEQ ID NO: 181066 - DNA, 25 bp, Artificial
  Probe
caggtcagcacgttgctgtcgatta

SEQ ID NO: 181067 - DNA, 25 bp, Artificial
  Probe
cacgctggacattgtcgcaagtcac

SEQ ID NO: 181068 - DNA, 25 bp, Artificial
  Probe
cgcgcaaagcgaaagcggcaggatc

SEQ ID NO: 181069 - DNA, 25 bp, Artificial
  Probe
aagcgaaagcggcaggatcgacgcg

SEQ ID NO: 181070 - DNA, 25 bp, Artificial
  Probe
cattgtcgcaagtcacagaattatt

SEQ ID NO: 181071 - DNA, 25 bp, Artificial
  Probe
tcgccagcatttcgatcctcgtcag

SEQ ID NO: 181072 - DNA, 25 bp, Artificial
  Probe
gacattgtcgcaagtcacagaatta

SEQ ID NO: 181073 - DNA, 25 bp, Artificial
  Probe
tgctggatctgctgtttgaagcgca

SEQ ID NO: 181074 - DNA, 25 bp, Artificial
  Probe
tgcccgcaaagctcgcgctacaaaa

SEQ ID NO: 181075 - DNA, 25 bp, Artificial
  Probe
agcggcaggatcgacgcgcttctgt

SEQ ID NO: 181076 - DNA, 25 bp, Artificial
  Probe
gcaaatactgcccgcaaagctcgcg

SEQ ID NO: 181077 - DNA, 25 bp, Artificial
  Probe
ggatctgctgtttgaagcgcagcag

SEQ ID NO: 181078 - DNA, 25 bp, Artificial
  Probe
tggatctgctgtttgaagcgcagca

SEQ ID NO: 181079 - DNA, 25 bp, Artificial
  Probe
gctggatctgctgtttgaagcgcag

SEQ ID NO: 181080 - DNA, 25 bp, Artificial
  Probe
aagttgaacaggtgctggagtcggc

SEQ ID NO: 181081 - DNA, 25 bp, Artificial
  Probe
gagcttgtccggaagattgcaaata

SEQ ID NO: 181082 - DNA, 25 bp, Artificial
  Probe
cggagcttgtccggaagattgcaaa

SEQ ID NO: 181083 - DNA, 25 bp, Artificial
  Probe
atcgccagcatttcgatcctcgtca

SEQ ID NO: 181084 - DNA, 25 bp, Artificial
  Probe
caggtgcaggtcagcacgttgctgt

SEQ ID NO: 181085 - DNA, 25 bp, Artificial
  Probe
gaccggagcttgtccggaagattgc

SEQ ID NO: 181086 - DNA, 25 bp, Artificial
  Probe
ggtgcaggtcagcacgttgctgtcg

SEQ ID NO: 181087 - DNA, 25 bp, Artificial
  Probe
ggacattgtcgcaagtcacagaatt

SEQ ID NO: 181088 - DNA, 25 bp, Artificial
  Probe
tttcgatcctcgtcaggtgcaggtc

SEQ ID NO: 181089 - DNA, 25 bp, Artificial
  Probe
cgaaagcggcaggatcgacgcgctt

SEQ ID NO: 181090 - DNA, 25 bp, Artificial
  Probe
tcagcacgttgctgtcgattaagac

SEQ ID NO: 181091 - DNA, 25 bp, Artificial
  Probe
gattgcaaatactgcccgcaaagct

SEQ ID NO: 181092 - DNA, 25 bp, Artificial
  Probe
tgtttgaagcgcagcaggtgcatcg

SEQ ID NO: 181093 - DNA, 25 bp, Artificial
  Probe
aagccgagcggttgatggaagttga

SEQ ID NO: 181094 - DNA, 25 bp, Artificial
  Probe
tgctgtcgattaagaccggagcttg

SEQ ID NO: 181095 - DNA, 25 bp, Artificial
  Probe
aggtgcaggtcagcacgttgctgtc

SEQ ID NO: 181096 - DNA, 25 bp, Artificial
  Probe
gtgcatcgccagcatttcgatcctc

SEQ ID NO: 181097 - DNA, 25 bp, Artificial
  Probe
atcctcgtcaggtgcaggtcagcac

SEQ ID NO: 181098 - DNA, 25 bp, Artificial
  Probe
cgcaagtcacagaattatttgaaaa

SEQ ID NO: 181099 - DNA, 25 bp, Artificial
  Probe
aaaccgttgctggatctgctgtttg

SEQ ID NO: 181100 - DNA, 25 bp, Artificial
  Probe
cgcagcaggtgcatcgccagcattt

SEQ ID NO: 181101 - DNA, 25 bp, Artificial
  Probe
gatcctcgtcaggtgcaggtcagca

SEQ ID NO: 181102 - DNA, 25 bp, Artificial
  Probe
gccagcatttcgatcctcgtcaggt

SEQ ID NO: 181103 - DNA, 25 bp, Artificial
  Probe
cagcacgttgctgtcgattaagacc

SEQ ID NO: 181104 - DNA, 25 bp, Artificial
  Probe
cgagcggttgatggaagttgaacag

SEQ ID NO: 181105 - DNA, 25 bp, Artificial
  Probe
gcatcgccagcatttcgatcctcgt

SEQ ID NO: 181106 - DNA, 25 bp, Artificial
  Probe
agcatttcgatcctcgtcaggtgca

SEQ ID NO: 181107 - DNA, 25 bp, Artificial
  Probe
gcccacgctggacattgtcgcaagt

SEQ ID NO: 181108 - DNA, 25 bp, Artificial
  Probe
gttgctgtcgattaagaccggagct

SEQ ID NO: 181109 - DNA, 25 bp, Artificial
  Probe
caaagcgaaagcggcaggatcgacg

SEQ ID NO: 181110 - DNA, 25 bp, Artificial
  Probe
aagcggcaggatcgacgcgcttctg

SEQ ID NO: 181111 - DNA, 25 bp, Artificial
  Probe
ctggagtcggcgcgcaaagcgaaag

SEQ ID NO: 181112 - DNA, 25 bp, Artificial
  Probe
tgtcgattaagaccggagcttgtcc

SEQ ID NO: 181113 - DNA, 25 bp, Artificial
  Probe
aagcgcagcaggtgcatcgccagca

SEQ ID NO: 181114 - DNA, 25 bp, Artificial
  Probe
tcaggtgcaggtcagcacgttgctg

SEQ ID NO: 181115 - DNA, 25 bp, Artificial
  Probe
gctgtcgattaagaccggagcttgt

SEQ ID NO: 181116 - DNA, 25 bp, Artificial
  Probe
cgttgctgtcgattaagaccggagc

SEQ ID NO: 181117 - DNA, 25 bp, Artificial
  Probe
agattgcaaatactgcccgcaaagc

SEQ ID NO: 181118 - DNA, 25 bp, Artificial
  Probe
aggatcgacgcgcttctgtatgggc

SEQ ID NO: 181119 - DNA, 25 bp, Artificial
  Probe
gatcgacgcgcttctgtatgggcgc

SEQ ID NO: 181120 - DNA, 25 bp, Artificial
  Probe
cgatcctcgtcaggtgcaggtcagc

SEQ ID NO: 181121 - DNA, 25 bp, Artificial
  Probe
gttgctggatctgctgtttgaagcg

SEQ ID NO: 181122 - DNA, 25 bp, Artificial
  Probe
ccggagcttgtccggaagattgcaa

SEQ ID NO: 181123 - DNA, 25 bp, Artificial
  Probe
cttgtccggaagattgcaaatactg

SEQ ID NO: 181124 - DNA, 25 bp, Artificial
  Probe
tggagtcggcgcgcaaagcgaaagc

SEQ ID NO: 181125 - DNA, 25 bp, Artificial
  Probe
cacgttgctgtcgattaagaccgga

SEQ ID NO: 181126 - DNA, 25 bp, Artificial
  Probe
cccacgctggacattgtcgcaagtc

SEQ ID NO: 181127 - DNA, 25 bp, Artificial
  Probe
atcgacgcgcttctgtatgggcgcg

SEQ ID NO: 181128 - DNA, 25 bp, Artificial
  Probe
tggaagaatccccacgaacgcgata

SEQ ID NO: 181129 - DNA, 25 bp, Artificial
  Probe
tcgatcctcgtcaggtgcaggtcag

SEQ ID NO: 181130 - DNA, 25 bp, Artificial
  Probe
tactgcccgcaaagctcgcgctaca

SEQ ID NO: 181131 - DNA, 25 bp, Artificial
  Probe
attgcaaatactgcccgcaaagctc

SEQ ID NO: 181132 - DNA, 25 bp, Artificial
  Probe
agcacgttgctgtcgattaagaccg

SEQ ID NO: 181133 - DNA, 25 bp, Artificial
  Probe
aagattgcaaatactgcccgcaaag

SEQ ID NO: 181134 - DNA, 25 bp, Artificial
  Probe
aggtgcatcgccagcatttcgatcc

SEQ ID NO: 181135 - DNA, 25 bp, Artificial
  Probe
ctgctgtttgaagcgcagcaggtgc

SEQ ID NO: 181136 - DNA, 25 bp, Artificial
  Probe
caggatcgacgcgcttctgtatggg

SEQ ID NO: 181137 - DNA, 25 bp, Artificial
  Probe
gaatccccacgaacgcgatatgccg

SEQ ID NO: 181138 - DNA, 25 bp, Artificial
  Probe
tgtcgcaagtcacagaattatttga

SEQ ID NO: 181139 - DNA, 25 bp, Artificial
  Probe
ctgtttgaagcgcagcaggtgcatc

SEQ ID NO: 181140 - DNA, 25 bp, Artificial
  Probe
tgctggagtcggcgcgcaaagcgaa

SEQ ID NO: 181141 - DNA, 25 bp, Artificial
  Probe
gcaggtgcatcgccagcatttcgat

SEQ ID NO: 181142 - DNA, 25 bp, Artificial
  Probe
atttcgatcctcgtcaggtgcaggt

SEQ ID NO: 181143 - DNA, 25 bp, Artificial
  Probe
gcccgcaaagctcgcgctacaaaac

SEQ ID NO: 181144 - DNA, 25 bp, Artificial
  Probe
cggcaggatcgacgcgcttctgtat

SEQ ID NO: 181145 - DNA, 25 bp, Artificial
  Probe
tgcaggtcagcacgttgctgtcgat

SEQ ID NO: 181146 - DNA, 25 bp, Artificial
  Probe
ggcaggatcgacgcgcttctgtatg

SEQ ID NO: 181147 - DNA, 25 bp, Artificial
  Probe
gtttgaagcgcagcaggtgcatcgc

SEQ ID NO: 181148 - DNA, 25 bp, Artificial
  Probe
agcgaaagcggcaggatcgacgcgc

SEQ ID NO: 181149 - DNA, 25 bp, Artificial
  Probe
aggtcagcacgttgctgtcgattaa

SEQ ID NO: 181150 - DNA, 25 bp, Artificial
  Probe
cgcccacgctggacattgtcgcaag

SEQ ID NO: 181151 - DNA, 25 bp, Artificial
  Probe
gcaaagcgaaagcggcaggatcgac

SEQ ID NO: 181152 - DNA, 25 bp, Artificial
  Probe
attgtcgcaagtcacagaattattt

SEQ ID NO: 181153 - DNA, 25 bp, Artificial
  Probe
ccagcatttcgatcctcgtcaggtg

SEQ ID NO: 181154 - DNA, 25 bp, Artificial
  Probe
cctcgtcaggtgcaggtcagcacgt

SEQ ID NO: 181155 - DNA, 25 bp, Artificial
  Probe
ggagcttgtccggaagattgcaaat

SEQ ID NO: 181156 - DNA, 25 bp, Artificial
  Probe
gcaggtcagcacgttgctgtcgatt

SEQ ID NO: 181157 - DNA, 25 bp, Artificial
  Probe
gcaggatcgacgcgcttctgtatgg

SEQ ID NO: 181158 - DNA, 25 bp, Artificial
  Probe
tcgccagcatttcgatcctcgtcag

SEQ ID NO: 181159 - DNA, 25 bp, Artificial
  Probe
cgagcggttgatggaagttgaacag

SEQ ID NO: 181160 - DNA, 25 bp, Artificial
  Probe
gccagcatttcgatcctcgtcaggt

SEQ ID NO: 181161 - DNA, 25 bp, Artificial
  Probe
aagttgaacaggtgctggagtcggc

SEQ ID NO: 181162 - DNA, 25 bp, Artificial
  Probe
ccagcatttcgatcctcgtcaggtg

SEQ ID NO: 181163 - DNA, 25 bp, Artificial
  Probe
tgctggagtcggcgcgcaaagcgaa

SEQ ID NO: 181164 - DNA, 25 bp, Artificial
  Probe
agcatttcgatcctcgtcaggtgca

SEQ ID NO: 181165 - DNA, 25 bp, Artificial
  Probe
ctggagtcggcgcgcaaagcgaaag

SEQ ID NO: 181166 - DNA, 25 bp, Artificial
  Probe
gcatttcgatcctcgtcaggtgcag

SEQ ID NO: 181167 - DNA, 25 bp, Artificial
  Probe
tggagtcggcgcgcaaagcgaaagc

SEQ ID NO: 181168 - DNA, 25 bp, Artificial
  Probe
atttcgatcctcgtcaggtgcaggt

SEQ ID NO: 181169 - DNA, 25 bp, Artificial
  Probe
tcggcgcgcaaagcgaaagcggcag

SEQ ID NO: 181170 - DNA, 25 bp, Artificial
  Probe
tttcgatcctcgtcaggtgcaggtc

SEQ ID NO: 181171 - DNA, 25 bp, Artificial
  Probe
cgcgcaaagcgaaagcggcaggatc

SEQ ID NO: 181172 - DNA, 25 bp, Artificial
  Probe
tcgatcctcgtcaggtgcaggtcag

SEQ ID NO: 181173 - DNA, 25 bp, Artificial
  Probe
cgcaaagcgaaagcggcaggatcga

SEQ ID NO: 181174 - DNA, 25 bp, Artificial
  Probe
cgatcctcgtcaggtgcaggtcagc

SEQ ID NO: 181175 - DNA, 25 bp, Artificial
  Probe
gcaaagcgaaagcggcaggatcgac

SEQ ID NO: 181176 - DNA, 25 bp, Artificial
  Probe
gatcctcgtcaggtgcaggtcagca

SEQ ID NO: 181177 - DNA, 25 bp, Artificial
  Probe
caaagcgaaagcggcaggatcgacg

SEQ ID NO: 181178 - DNA, 25 bp, Artificial
  Probe
atcctcgtcaggtgcaggtcagcac

SEQ ID NO: 181179 - DNA, 25 bp, Artificial
  Probe
aagcgaaagcggcaggatcgacgcg

SEQ ID NO: 181180 - DNA, 25 bp, Artificial
  Probe
cctcgtcaggtgcaggtcagcacgt

SEQ ID NO: 181181 - DNA, 25 bp, Artificial
  Probe
agcgaaagcggcaggatcgacgcgc

SEQ ID NO: 181182 - DNA, 25 bp, Artificial
  Probe
cgcccacgctggacattgtcgcaag

SEQ ID NO: 181183 - DNA, 25 bp, Artificial
  Probe
ctcgtcaggtgcaggtcagcacgtt

SEQ ID NO: 181184 - DNA, 25 bp, Artificial
  Probe
cgaaagcggcaggatcgacgcgctt

SEQ ID NO: 181185 - DNA, 25 bp, Artificial
  Probe
gcccacgctggacattgtcgcaagt

SEQ ID NO: 181186 - DNA, 25 bp, Artificial
  Probe
tcgtcaggtgcaggtcagcacgttg

SEQ ID NO: 181187 - DNA, 25 bp, Artificial
  Probe
aagcggcaggatcgacgcgcttctg

SEQ ID NO: 181188 - DNA, 25 bp, Artificial
  Probe
cccacgctggacattgtcgcaagtc

SEQ ID NO: 181189 - DNA, 25 bp, Artificial
  Probe
tcaggtgcaggtcagcacgttgctg

SEQ ID NO: 181190 - DNA, 25 bp, Artificial
  Probe
agcggcaggatcgacgcgcttctgt

SEQ ID NO: 181191 - DNA, 25 bp, Artificial
  Probe
cacgctggacattgtcgcaagtcac

SEQ ID NO: 181192 - DNA, 25 bp, Artificial
  Probe
caggtgcaggtcagcacgttgctgt

SEQ ID NO: 181193 - DNA, 25 bp, Artificial
  Probe
cggcaggatcgacgcgcttctgtat

SEQ ID NO: 181194 - DNA, 25 bp, Artificial
  Probe
ggacattgtcgcaagtcacagaatt

SEQ ID NO: 181195 - DNA, 25 bp, Artificial
  Probe
aggtgcaggtcagcacgttgctgtc

SEQ ID NO: 181196 - DNA, 25 bp, Artificial
  Probe
ggcaggatcgacgcgcttctgtatg

SEQ ID NO: 181197 - DNA, 25 bp, Artificial
  Probe
gacattgtcgcaagtcacagaatta

SEQ ID NO: 181198 - DNA, 25 bp, Artificial
  Probe
ggtgcaggtcagcacgttgctgtcg

SEQ ID NO: 181199 - DNA, 25 bp, Artificial
  Probe
gcaggatcgacgcgcttctgtatgg

SEQ ID NO: 181200 - DNA, 25 bp, Artificial
  Probe
cattgtcgcaagtcacagaattatt

SEQ ID NO: 181201 - DNA, 25 bp, Artificial
  Probe
tgcaggtcagcacgttgctgtcgat

SEQ ID NO: 181202 - DNA, 25 bp, Artificial
  Probe
caggatcgacgcgcttctgtatggg

SEQ ID NO: 181203 - DNA, 25 bp, Artificial
  Probe
attgtcgcaagtcacagaattattt

SEQ ID NO: 181204 - DNA, 25 bp, Artificial
  Probe
gcaggtcagcacgttgctgtcgatt

SEQ ID NO: 181205 - DNA, 25 bp, Artificial
  Probe
aggatcgacgcgcttctgtatgggc

SEQ ID NO: 181206 - DNA, 25 bp, Artificial
  Probe
tgtcgcaagtcacagaattatttga

SEQ ID NO: 181207 - DNA, 25 bp, Artificial
  Probe
caggtcagcacgttgctgtcgatta

SEQ ID NO: 181208 - DNA, 25 bp, Artificial
  Probe
gatcgacgcgcttctgtatgggcgc

SEQ ID NO: 181209 - DNA, 25 bp, Artificial
  Probe
gtcgcaagtcacagaattatttgaa

SEQ ID NO: 181210 - DNA, 25 bp, Artificial
  Probe
aggtcagcacgttgctgtcgattaa

SEQ ID NO: 181211 - DNA, 25 bp, Artificial
  Probe
atcgacgcgcttctgtatgggcgcg

SEQ ID NO: 181212 - DNA, 25 bp, Artificial
  Probe
cgcaagtcacagaattatttgaaaa

SEQ ID NO: 181213 - DNA, 25 bp, Artificial
  Probe
tcagcacgttgctgtcgattaagac

SEQ ID NO: 181214 - DNA, 25 bp, Artificial
  Probe
tggaagaatccccacgaacgcgata

SEQ ID NO: 181215 - DNA, 25 bp, Artificial
  Probe
tttgaaaaaccgttgctggatctgc

SEQ ID NO: 181216 - DNA, 25 bp, Artificial
  Probe
cagcacgttgctgtcgattaagacc

SEQ ID NO: 181217 - DNA, 25 bp, Artificial
  Probe
gaatccccacgaacgcgatatgccg

SEQ ID NO: 181218 - DNA, 25 bp, Artificial
  Probe
aaaccgttgctggatctgctgtttg

SEQ ID NO: 181219 - DNA, 25 bp, Artificial
  Probe
agcacgttgctgtcgattaagaccg

SEQ ID NO: 181220 - DNA, 25 bp, Artificial
  Probe
accgttgctggatctgctgtttgaa

SEQ ID NO: 181221 - DNA, 25 bp, Artificial
  Probe
cacgttgctgtcgattaagaccgga

SEQ ID NO: 181222 - DNA, 25 bp, Artificial
  Probe
ccgttgctggatctgctgtttgaag

SEQ ID NO: 181223 - DNA, 25 bp, Artificial
  Probe
cgttgctgtcgattaagaccggagc

SEQ ID NO: 181224 - DNA, 25 bp, Artificial
  Probe
cgttgctggatctgctgtttgaagc

SEQ ID NO: 181225 - DNA, 25 bp, Artificial
  Probe
gttgctgtcgattaagaccggagct

SEQ ID NO: 181226 - DNA, 25 bp, Artificial
  Probe
gttgctggatctgctgtttgaagcg

SEQ ID NO: 181227 - DNA, 25 bp, Artificial
  Probe
ttgctgtcgattaagaccggagctt

SEQ ID NO: 181228 - DNA, 25 bp, Artificial
  Probe
tgctggatctgctgtttgaagcgca

SEQ ID NO: 181229 - DNA, 25 bp, Artificial
  Probe
tgctgtcgattaagaccggagcttg

SEQ ID NO: 181230 - DNA, 25 bp, Artificial
  Probe
gctggatctgctgtttgaagcgcag

SEQ ID NO: 181231 - DNA, 25 bp, Artificial
  Probe
gctgtcgattaagaccggagcttgt

SEQ ID NO: 181232 - DNA, 25 bp, Artificial
  Probe
tggatctgctgtttgaagcgcagca

SEQ ID NO: 181233 - DNA, 25 bp, Artificial
  Probe
tgtcgattaagaccggagcttgtcc

SEQ ID NO: 181234 - DNA, 25 bp, Artificial
  Probe
ggatctgctgtttgaagcgcagcag

SEQ ID NO: 181235 - DNA, 25 bp, Artificial
  Probe
gaccggagcttgtccggaagattgc

SEQ ID NO: 181236 - DNA, 25 bp, Artificial
  Probe
tctgctgtttgaagcgcagcaggtg

SEQ ID NO: 181237 - DNA, 25 bp, Artificial
  Probe
ccggagcttgtccggaagattgcaa

SEQ ID NO: 181238 - DNA, 25 bp, Artificial
  Probe
ctgctgtttgaagcgcagcaggtgc

SEQ ID NO: 181239 - DNA, 25 bp, Artificial
  Probe
cggagcttgtccggaagattgcaaa

SEQ ID NO: 181240 - DNA, 25 bp, Artificial
  Probe
gctgtttgaagcgcagcaggtgcat

SEQ ID NO: 181241 - DNA, 25 bp, Artificial
  Probe
ggagcttgtccggaagattgcaaat

SEQ ID NO: 181242 - DNA, 25 bp, Artificial
  Probe
ctgtttgaagcgcagcaggtgcatc

SEQ ID NO: 181243 - DNA, 25 bp, Artificial
  Probe
gagcttgtccggaagattgcaaata

SEQ ID NO: 181244 - DNA, 25 bp, Artificial
  Probe
tgtttgaagcgcagcaggtgcatcg

SEQ ID NO: 181245 - DNA, 25 bp, Artificial
  Probe
cttgtccggaagattgcaaatactg

SEQ ID NO: 181246 - DNA, 25 bp, Artificial
  Probe
gtttgaagcgcagcaggtgcatcgc

SEQ ID NO: 181247 - DNA, 25 bp, Artificial
  Probe
aagattgcaaatactgcccgcaaag

SEQ ID NO: 181248 - DNA, 25 bp, Artificial
  Probe
aagcgcagcaggtgcatcgccagca

SEQ ID NO: 181249 - DNA, 25 bp, Artificial
  Probe
agattgcaaatactgcccgcaaagc

SEQ ID NO: 181250 - DNA, 25 bp, Artificial
  Probe
cgcagcaggtgcatcgccagcattt

SEQ ID NO: 181251 - DNA, 25 bp, Artificial
  Probe
gattgcaaatactgcccgcaaagct

SEQ ID NO: 181252 - DNA, 25 bp, Artificial
  Probe
cagcaggtgcatcgccagcatttcg

SEQ ID NO: 181253 - DNA, 25 bp, Artificial
  Probe
attgcaaatactgcccgcaaagctc

SEQ ID NO: 181254 - DNA, 25 bp, Artificial
  Probe
gcaggtgcatcgccagcatttcgat

SEQ ID NO: 181255 - DNA, 25 bp, Artificial
  Probe
gcaaatactgcccgcaaagctcgcg

SEQ ID NO: 181256 - DNA, 25 bp, Artificial
  Probe
aggtgcatcgccagcatttcgatcc

SEQ ID NO: 181257 - DNA, 25 bp, Artificial
  Probe
caaatactgcccgcaaagctcgcgc

SEQ ID NO: 181258 - DNA, 25 bp, Artificial
  Probe
ggtgcatcgccagcatttcgatcct

SEQ ID NO: 181259 - DNA, 25 bp, Artificial
  Probe
aatactgcccgcaaagctcgcgcta

SEQ ID NO: 181260 - DNA, 25 bp, Artificial
  Probe
gtgcatcgccagcatttcgatcctc

SEQ ID NO: 181261 - DNA, 25 bp, Artificial
  Probe
tactgcccgcaaagctcgcgctaca

SEQ ID NO: 181262 - DNA, 25 bp, Artificial
  Probe
tgcatcgccagcatttcgatcctcg

SEQ ID NO: 181263 - DNA, 25 bp, Artificial
  Probe
tgcccgcaaagctcgcgctacaaaa

SEQ ID NO: 181264 - DNA, 25 bp, Artificial
  Probe
gcatcgccagcatttcgatcctcgt

SEQ ID NO: 181265 - DNA, 25 bp, Artificial
  Probe
gcccgcaaagctcgcgctacaaaac

SEQ ID NO: 181266 - DNA, 25 bp, Artificial
  Probe
atcgccagcatttcgatcctcgtca

SEQ ID NO: 181267 - DNA, 25 bp, Artificial
  Probe
aagccgagcggttgatggaagttga

SEQ ID NO: 181268 - DNA, 25 bp, Artificial
  Probe
tcgccagcatttcgatcctcgtcag

SEQ ID NO: 181269 - DNA, 25 bp, Artificial
  Probe
cgagcggttgatggaagttgaacag

SEQ ID NO: 181270 - DNA, 25 bp, Artificial
  Probe
gccagcatttcgatcctcgtcaggt

SEQ ID NO: 181271 - DNA, 25 bp, Artificial
  Probe
aagttgaacaggtgctggagtcggc

SEQ ID NO: 181272 - DNA, 25 bp, Artificial
  Probe
ccagcatttcgatcctcgtcaggtg

SEQ ID NO: 181273 - DNA, 25 bp, Artificial
  Probe
tgctggagtcggcgcgcaaagcgaa

SEQ ID NO: 181274 - DNA, 25 bp, Artificial
  Probe
agcatttcgatcctcgtcaggtgca

SEQ ID NO: 181275 - DNA, 25 bp, Artificial
  Probe
ctggagtcggcgcgcaaagcgaaag

SEQ ID NO: 181276 - DNA, 25 bp, Artificial
  Probe
gcatttcgatcctcgtcaggtgcag

SEQ ID NO: 181277 - DNA, 25 bp, Artificial
  Probe
tggagtcggcgcgcaaagcgaaagc

SEQ ID NO: 181278 - DNA, 25 bp, Artificial
  Probe
atttcgatcctcgtcaggtgcaggt

SEQ ID NO: 181279 - DNA, 25 bp, Artificial
  Probe
tcggcgcgcaaagcgaaagcggcag

SEQ ID NO: 181280 - DNA, 25 bp, Artificial
  Probe
tttcgatcctcgtcaggtgcaggtc

SEQ ID NO: 181281 - DNA, 25 bp, Artificial
  Probe
cgcgcaaagcgaaagcggcaggatc

SEQ ID NO: 181282 - DNA, 25 bp, Artificial
  Probe
tcgatcctcgtcaggtgcaggtcag

SEQ ID NO: 181283 - DNA, 25 bp, Artificial
  Probe
cgcaaagcgaaagcggcaggatcga

SEQ ID NO: 181284 - DNA, 25 bp, Artificial
  Probe
cgatcctcgtcaggtgcaggtcagc

SEQ ID NO: 181285 - DNA, 25 bp, Artificial
  Probe
gcaaagcgaaagcggcaggatcgac

SEQ ID NO: 181286 - DNA, 25 bp, Artificial
  Probe
gatcctcgtcaggtgcaggtcagca

SEQ ID NO: 181287 - DNA, 25 bp, Artificial
  Probe
caaagcgaaagcggcaggatcgacg

SEQ ID NO: 181288 - DNA, 25 bp, Artificial
  Probe
atcctcgtcaggtgcaggtcagcac

SEQ ID NO: 181289 - DNA, 25 bp, Artificial
  Probe
aagcgaaagcggcaggatcgacgcg

SEQ ID NO: 181290 - DNA, 25 bp, Artificial
  Probe
cctcgtcaggtgcaggtcagcacgt

SEQ ID NO: 181291 - DNA, 25 bp, Artificial
  Probe
agcgaaagcggcaggatcgacgcgc

SEQ ID NO: 181292 - DNA, 25 bp, Artificial
  Probe
cgcccacgctggacattgtcgcaag

SEQ ID NO: 181293 - DNA, 25 bp, Artificial
  Probe
ctcgtcaggtgcaggtcagcacgtt

SEQ ID NO: 181294 - DNA, 25 bp, Artificial
  Probe
cgaaagcggcaggatcgacgcgctt

SEQ ID NO: 181295 - DNA, 25 bp, Artificial
  Probe
gcccacgctggacattgtcgcaagt

SEQ ID NO: 181296 - DNA, 25 bp, Artificial
  Probe
tcgtcaggtgcaggtcagcacgttg

SEQ ID NO: 181297 - DNA, 25 bp, Artificial
  Probe
aagcggcaggatcgacgcgcttctg

SEQ ID NO: 181298 - DNA, 25 bp, Artificial
  Probe
cccacgctggacattgtcgcaagtc

SEQ ID NO: 181299 - DNA, 25 bp, Artificial
  Probe
tcaggtgcaggtcagcacgttgctg

SEQ ID NO: 181300 - DNA, 25 bp, Artificial
  Probe
agcggcaggatcgacgcgcttctgt

SEQ ID NO: 181301 - DNA, 25 bp, Artificial
  Probe
cacgctggacattgtcgcaagtcac

SEQ ID NO: 181302 - DNA, 25 bp, Artificial
  Probe
caggtgcaggtcagcacgttgctgt

SEQ ID NO: 181303 - DNA, 25 bp, Artificial
  Probe
cggcaggatcgacgcgcttctgtat

SEQ ID NO: 181304 - DNA, 25 bp, Artificial
  Probe
ggacattgtcgcaagtcacagaatt

SEQ ID NO: 181305 - DNA, 25 bp, Artificial
  Probe
aggtgcaggtcagcacgttgctgtc

SEQ ID NO: 181306 - DNA, 25 bp, Artificial
  Probe
ggcaggatcgacgcgcttctgtatg

SEQ ID NO: 181307 - DNA, 25 bp, Artificial
  Probe
gacattgtcgcaagtcacagaatta

SEQ ID NO: 181308 - DNA, 25 bp, Artificial
  Probe
ggtgcaggtcagcacgttgctgtcg

SEQ ID NO: 181309 - DNA, 25 bp, Artificial
  Probe
gcaggatcgacgcgcttctgtatgg

SEQ ID NO: 181310 - DNA, 25 bp, Artificial
  Probe
cattgtcgcaagtcacagaattatt

SEQ ID NO: 181311 - DNA, 25 bp, Artificial
  Probe
tgcaggtcagcacgttgctgtcgat

SEQ ID NO: 181312 - DNA, 25 bp, Artificial
  Probe
caggatcgacgcgcttctgtatggg

SEQ ID NO: 181313 - DNA, 25 bp, Artificial
  Probe
attgtcgcaagtcacagaattattt

SEQ ID NO: 181314 - DNA, 25 bp, Artificial
  Probe
gcaggtcagcacgttgctgtcgatt

SEQ ID NO: 181315 - DNA, 25 bp, Artificial
  Probe
aggatcgacgcgcttctgtatgggc

SEQ ID NO: 181316 - DNA, 25 bp, Artificial
  Probe
tgtcgcaagtcacagaattatttga

SEQ ID NO: 181317 - DNA, 25 bp, Artificial
  Probe
caggtcagcacgttgctgtcgatta

SEQ ID NO: 181318 - DNA, 25 bp, Artificial
  Probe
gatcgacgcgcttctgtatgggcgc

SEQ ID NO: 181319 - DNA, 25 bp, Artificial
  Probe
gtcgcaagtcacagaattatttgaa

SEQ ID NO: 181320 - DNA, 25 bp, Artificial
  Probe
aggtcagcacgttgctgtcgattaa

SEQ ID NO: 181321 - DNA, 25 bp, Artificial
  Probe
atcgacgcgcttctgtatgggcgcg

SEQ ID NO: 181322 - DNA, 25 bp, Artificial
  Probe
cgcaagtcacagaattatttgaaaa

SEQ ID NO: 181323 - DNA, 25 bp, Artificial
  Probe
tcagcacgttgctgtcgattaagac

SEQ ID NO: 181324 - DNA, 25 bp, Artificial
  Probe
tggaagaatccccacgaacgcgata

SEQ ID NO: 181325 - DNA, 25 bp, Artificial
  Probe
tttgaaaaaccgttgctggatctgc

SEQ ID NO: 181326 - DNA, 25 bp, Artificial
  Probe
cagcacgttgctgtcgattaagacc

SEQ ID NO: 181327 - DNA, 25 bp, Artificial
  Probe
gaatccccacgaacgcgatatgccg

SEQ ID NO: 181328 - DNA, 25 bp, Artificial
  Probe
aaaccgttgctggatctgctgtttg

SEQ ID NO: 181329 - DNA, 25 bp, Artificial
  Probe
agcacgttgctgtcgattaagaccg

SEQ ID NO: 181330 - DNA, 25 bp, Artificial
  Probe
accgttgctggatctgctgtttgaa

SEQ ID NO: 181331 - DNA, 25 bp, Artificial
  Probe
cacgttgctgtcgattaagaccgga

SEQ ID NO: 181332 - DNA, 25 bp, Artificial
  Probe
ccgttgctggatctgctgtttgaag

SEQ ID NO: 181333 - DNA, 25 bp, Artificial
  Probe
cgttgctgtcgattaagaccggagc

SEQ ID NO: 181334 - DNA, 25 bp, Artificial
  Probe
cgttgctggatctgctgtttgaagc

SEQ ID NO: 181335 - DNA, 25 bp, Artificial
  Probe
gttgctgtcgattaagaccggagct

SEQ ID NO: 181336 - DNA, 25 bp, Artificial
  Probe
gttgctggatctgctgtttgaagcg

SEQ ID NO: 181337 - DNA, 25 bp, Artificial
  Probe
ttgctgtcgattaagaccggagctt

SEQ ID NO: 181338 - DNA, 25 bp, Artificial
  Probe
tgctggatctgctgtttgaagcgca

SEQ ID NO: 181339 - DNA, 25 bp, Artificial
  Probe
tgctgtcgattaagaccggagcttg

SEQ ID NO: 181340 - DNA, 25 bp, Artificial
  Probe
gctggatctgctgtttgaagcgcag

SEQ ID NO: 181341 - DNA, 25 bp, Artificial
  Probe
gctgtcgattaagaccggagcttgt

SEQ ID NO: 181342 - DNA, 25 bp, Artificial
  Probe
tggatctgctgtttgaagcgcagca

SEQ ID NO: 181343 - DNA, 25 bp, Artificial
  Probe
tgtcgattaagaccggagcttgtcc

SEQ ID NO: 181344 - DNA, 25 bp, Artificial
  Probe
ggatctgctgtttgaagcgcagcag

SEQ ID NO: 181345 - DNA, 25 bp, Artificial
  Probe
gaccggagcttgtccggaagattgc

SEQ ID NO: 181346 - DNA, 25 bp, Artificial
  Probe
tctgctgtttgaagcgcagcaggtg

SEQ ID NO: 181347 - DNA, 25 bp, Artificial
  Probe
ccggagcttgtccggaagattgcaa

SEQ ID NO: 181348 - DNA, 25 bp, Artificial
  Probe
ctgctgtttgaagcgcagcaggtgc

SEQ ID NO: 181349 - DNA, 25 bp, Artificial
  Probe
cggagcttgtccggaagattgcaaa

SEQ ID NO: 181350 - DNA, 25 bp, Artificial
  Probe
gctgtttgaagcgcagcaggtgcat

SEQ ID NO: 181351 - DNA, 25 bp, Artificial
  Probe
ggagcttgtccggaagattgcaaat

SEQ ID NO: 181352 - DNA, 25 bp, Artificial
  Probe
ctgtttgaagcgcagcaggtgcatc

SEQ ID NO: 181353 - DNA, 25 bp, Artificial
  Probe
gagcttgtccggaagattgcaaata

SEQ ID NO: 181354 - DNA, 25 bp, Artificial
  Probe
tgtttgaagcgcagcaggtgcatcg

SEQ ID NO: 181355 - DNA, 25 bp, Artificial
  Probe
cttgtccggaagattgcaaatactg

SEQ ID NO: 181356 - DNA, 25 bp, Artificial
  Probe
gtttgaagcgcagcaggtgcatcgc

SEQ ID NO: 181357 - DNA, 25 bp, Artificial
  Probe
aagattgcaaatactgcccgcaaag

SEQ ID NO: 181358 - DNA, 25 bp, Artificial
  Probe
aagcgcagcaggtgcatcgccagca

SEQ ID NO: 181359 - DNA, 25 bp, Artificial
  Probe
agattgcaaatactgcccgcaaagc

SEQ ID NO: 181360 - DNA, 25 bp, Artificial
  Probe
cgcagcaggtgcatcgccagcattt

SEQ ID NO: 181361 - DNA, 25 bp, Artificial
  Probe
gattgcaaatactgcccgcaaagct

SEQ ID NO: 181362 - DNA, 25 bp, Artificial
  Probe
cagcaggtgcatcgccagcatttcg

SEQ ID NO: 181363 - DNA, 25 bp, Artificial
  Probe
attgcaaatactgcccgcaaagctc

SEQ ID NO: 181364 - DNA, 25 bp, Artificial
  Probe
gcaggtgcatcgccagcatttcgat

SEQ ID NO: 181365 - DNA, 25 bp, Artificial
  Probe
gcaaatactgcccgcaaagctcgcg

SEQ ID NO: 181366 - DNA, 25 bp, Artificial
  Probe
aggtgcatcgccagcatttcgatcc

SEQ ID NO: 181367 - DNA, 25 bp, Artificial
  Probe
caaatactgcccgcaaagctcgcgc

SEQ ID NO: 181368 - DNA, 25 bp, Artificial
  Probe
ggtgcatcgccagcatttcgatcct

SEQ ID NO: 181369 - DNA, 25 bp, Artificial
  Probe
aatactgcccgcaaagctcgcgcta

SEQ ID NO: 181370 - DNA, 25 bp, Artificial
  Probe
gtgcatcgccagcatttcgatcctc

SEQ ID NO: 181371 - DNA, 25 bp, Artificial
  Probe
tactgcccgcaaagctcgcgctaca

SEQ ID NO: 181372 - DNA, 25 bp, Artificial
  Probe
tgcatcgccagcatttcgatcctcg

SEQ ID NO: 181373 - DNA, 25 bp, Artificial
  Probe
tgcccgcaaagctcgcgctacaaaa

SEQ ID NO: 181374 - DNA, 25 bp, Artificial
  Probe
gcatcgccagcatttcgatcctcgt

SEQ ID NO: 181375 - DNA, 25 bp, Artificial
  Probe
gcccgcaaagctcgcgctacaaaac

SEQ ID NO: 181376 - DNA, 25 bp, Artificial
  Probe
atcgccagcatttcgatcctcgtca

SEQ ID NO: 181377 - DNA, 25 bp, Artificial
  Probe
aagccgagcggttgatggaagttga

SEQ ID NO: 181378 - DNA, 25 bp, Artificial
  Probe
tcgccagcatttcgatcctcgtcag

SEQ ID NO: 181379 - DNA, 25 bp, Artificial
  Probe
cgagcggttgatggaagttgaacag

SEQ ID NO: 181380 - DNA, 25 bp, Artificial
  Probe
gccagcatttcgatcctcgtcaggt

SEQ ID NO: 181381 - DNA, 25 bp, Artificial
  Probe
aagttgaacaggtgctggagtcggc

SEQ ID NO: 181382 - DNA, 25 bp, Artificial
  Probe
ccagcatttcgatcctcgtcaggtg

SEQ ID NO: 181383 - DNA, 25 bp, Artificial
  Probe
tgctggagtcggcgcgcaaagcgaa

SEQ ID NO: 181384 - DNA, 25 bp, Artificial
  Probe
agcatttcgatcctcgtcaggtgca

SEQ ID NO: 181385 - DNA, 25 bp, Artificial
  Probe
ctggagtcggcgcgcaaagcgaaag

SEQ ID NO: 181386 - DNA, 25 bp, Artificial
  Probe
gcatttcgatcctcgtcaggtgcag

SEQ ID NO: 181387 - DNA, 25 bp, Artificial
  Probe
tggagtcggcgcgcaaagcgaaagc

SEQ ID NO: 181388 - DNA, 25 bp, Artificial
  Probe
atttcgatcctcgtcaggtgcaggt

SEQ ID NO: 181389 - DNA, 25 bp, Artificial
  Probe
tcggcgcgcaaagcgaaagcggcag

SEQ ID NO: 181390 - DNA, 25 bp, Artificial
  Probe
tttcgatcctcgtcaggtgcaggtc

SEQ ID NO: 181391 - DNA, 25 bp, Artificial
  Probe
cgcgcaaagcgaaagcggcaggatc

SEQ ID NO: 181392 - DNA, 25 bp, Artificial
  Probe
tcgatcctcgtcaggtgcaggtcag

SEQ ID NO: 181393 - DNA, 25 bp, Artificial
  Probe
cgcaaagcgaaagcggcaggatcga

SEQ ID NO: 181394 - DNA, 25 bp, Artificial
  Probe
cgatcctcgtcaggtgcaggtcagc

SEQ ID NO: 181395 - DNA, 25 bp, Artificial
  Probe
gcaaagcgaaagcggcaggatcgac

SEQ ID NO: 181396 - DNA, 25 bp, Artificial
  Probe
gatcctcgtcaggtgcaggtcagca

SEQ ID NO: 181397 - DNA, 25 bp, Artificial
  Probe
caaagcgaaagcggcaggatcgacg

SEQ ID NO: 181398 - DNA, 25 bp, Artificial
  Probe
atcctcgtcaggtgcaggtcagcac

SEQ ID NO: 181399 - DNA, 25 bp, Artificial
  Probe
aagcgaaagcggcaggatcgacgcg

SEQ ID NO: 181400 - DNA, 25 bp, Artificial
  Probe
cctcgtcaggtgcaggtcagcacgt

SEQ ID NO: 181401 - DNA, 25 bp, Artificial
  Probe
agcgaaagcggcaggatcgacgcgc

SEQ ID NO: 181402 - DNA, 25 bp, Artificial
  Probe
cgcccacgctggacattgtcgcaag

SEQ ID NO: 181403 - DNA, 25 bp, Artificial
  Probe
ctcgtcaggtgcaggtcagcacgtt

SEQ ID NO: 181404 - DNA, 25 bp, Artificial
  Probe
cgaaagcggcaggatcgacgcgctt

SEQ ID NO: 181405 - DNA, 25 bp, Artificial
  Probe
gcccacgctggacattgtcgcaagt

SEQ ID NO: 181406 - DNA, 25 bp, Artificial
  Probe
tcgtcaggtgcaggtcagcacgttg

SEQ ID NO: 181407 - DNA, 25 bp, Artificial
  Probe
aagcggcaggatcgacgcgcttctg

SEQ ID NO: 181408 - DNA, 25 bp, Artificial
  Probe
cccacgctggacattgtcgcaagtc

SEQ ID NO: 181409 - DNA, 25 bp, Artificial
  Probe
tcaggtgcaggtcagcacgttgctg

SEQ ID NO: 181410 - DNA, 25 bp, Artificial
  Probe
agcggcaggatcgacgcgcttctgt

SEQ ID NO: 181411 - DNA, 25 bp, Artificial
  Probe
cacgctggacattgtcgcaagtcac

SEQ ID NO: 181412 - DNA, 25 bp, Artificial
  Probe
caggtgcaggtcagcacgttgctgt

SEQ ID NO: 181413 - DNA, 25 bp, Artificial
  Probe
cggcaggatcgacgcgcttctgtat

SEQ ID NO: 181414 - DNA, 25 bp, Artificial
  Probe
ggacattgtcgcaagtcacagaatt

SEQ ID NO: 181415 - DNA, 25 bp, Artificial
  Probe
aggtgcaggtcagcacgttgctgtc

SEQ ID NO: 181416 - DNA, 25 bp, Artificial
  Probe
ggcaggatcgacgcgcttctgtatg

SEQ ID NO: 181417 - DNA, 25 bp, Artificial
  Probe
gacattgtcgcaagtcacagaatta

SEQ ID NO: 181418 - DNA, 25 bp, Artificial
  Probe
ggtgcaggtcagcacgttgctgtcg

SEQ ID NO: 181419 - DNA, 25 bp, Artificial
  Probe
gcaggatcgacgcgcttctgtatgg

SEQ ID NO: 181420 - DNA, 25 bp, Artificial
  Probe
cattgtcgcaagtcacagaattatt

SEQ ID NO: 181421 - DNA, 25 bp, Artificial
  Probe
tgcaggtcagcacgttgctgtcgat

SEQ ID NO: 181422 - DNA, 25 bp, Artificial
  Probe
caggatcgacgcgcttctgtatggg

SEQ ID NO: 181423 - DNA, 25 bp, Artificial
  Probe
attgtcgcaagtcacagaattattt

SEQ ID NO: 181424 - DNA, 25 bp, Artificial
  Probe
gcaggtcagcacgttgctgtcgatt

SEQ ID NO: 181425 - DNA, 25 bp, Artificial
  Probe
aggatcgacgcgcttctgtatgggc

SEQ ID NO: 181426 - DNA, 25 bp, Artificial
  Probe
tgtcgcaagtcacagaattatttga

SEQ ID NO: 181427 - DNA, 25 bp, Artificial
  Probe
caggtcagcacgttgctgtcgatta

SEQ ID NO: 181428 - DNA, 25 bp, Artificial
  Probe
gatcgacgcgcttctgtatgggcgc

SEQ ID NO: 181429 - DNA, 25 bp, Artificial
  Probe
gtcgcaagtcacagaattatttgaa

SEQ ID NO: 181430 - DNA, 25 bp, Artificial
  Probe
aggtcagcacgttgctgtcgattaa

SEQ ID NO: 181431 - DNA, 25 bp, Artificial
  Probe
atcgacgcgcttctgtatgggcgcg

SEQ ID NO: 181432 - DNA, 25 bp, Artificial
  Probe
cgcaagtcacagaattatttgaaaa

SEQ ID NO: 181433 - DNA, 25 bp, Artificial
  Probe
tcagcacgttgctgtcgattaagac

SEQ ID NO: 181434 - DNA, 25 bp, Artificial
  Probe
tggaagaatccccacgaacgcgata

SEQ ID NO: 181435 - DNA, 25 bp, Artificial
  Probe
tttgaaaaaccgttgctggatctgc

SEQ ID NO: 181436 - DNA, 25 bp, Artificial
  Probe
cagcacgttgctgtcgattaagacc

SEQ ID NO: 181437 - DNA, 25 bp, Artificial
  Probe
gaatccccacgaacgcgatatgccg

SEQ ID NO: 181438 - DNA, 25 bp, Artificial
  Probe
aaaccgttgctggatctgctgtttg

SEQ ID NO: 181439 - DNA, 25 bp, Artificial
  Probe
agcacgttgctgtcgattaagaccg

SEQ ID NO: 181440 - DNA, 25 bp, Artificial
  Probe
accgttgctggatctgctgtttgaa

SEQ ID NO: 181441 - DNA, 25 bp, Artificial
  Probe
cacgttgctgtcgattaagaccgga

SEQ ID NO: 181442 - DNA, 25 bp, Artificial
  Probe
ccgttgctggatctgctgtttgaag

SEQ ID NO: 181443 - DNA, 25 bp, Artificial
  Probe
cgttgctgtcgattaagaccggagc

SEQ ID NO: 181444 - DNA, 25 bp, Artificial
  Probe
cgttgctggatctgctgtttgaagc

SEQ ID NO: 181445 - DNA, 25 bp, Artificial
  Probe
gttgctgtcgattaagaccggagct

SEQ ID NO: 181446 - DNA, 25 bp, Artificial
  Probe
gttgctggatctgctgtttgaagcg

SEQ ID NO: 181447 - DNA, 25 bp, Artificial
  Probe
ttgctgtcgattaagaccggagctt

SEQ ID NO: 181448 - DNA, 25 bp, Artificial
  Probe
tgctggatctgctgtttgaagcgca

SEQ ID NO: 181449 - DNA, 25 bp, Artificial
  Probe
tgctgtcgattaagaccggagcttg

SEQ ID NO: 181450 - DNA, 25 bp, Artificial
  Probe
gctggatctgctgtttgaagcgcag

SEQ ID NO: 181451 - DNA, 25 bp, Artificial
  Probe
gctgtcgattaagaccggagcttgt

SEQ ID NO: 181452 - DNA, 25 bp, Artificial
  Probe
tggatctgctgtttgaagcgcagca

SEQ ID NO: 181453 - DNA, 25 bp, Artificial
  Probe
tgtcgattaagaccggagcttgtcc

SEQ ID NO: 181454 - DNA, 25 bp, Artificial
  Probe
ggatctgctgtttgaagcgcagcag

SEQ ID NO: 181455 - DNA, 25 bp, Artificial
  Probe
gaccggagcttgtccggaagattgc

SEQ ID NO: 181456 - DNA, 25 bp, Artificial
  Probe
tctgctgtttgaagcgcagcaggtg

SEQ ID NO: 181457 - DNA, 25 bp, Artificial
  Probe
ccggagcttgtccggaagattgcaa

SEQ ID NO: 181458 - DNA, 25 bp, Artificial
  Probe
ctgctgtttgaagcgcagcaggtgc

SEQ ID NO: 181459 - DNA, 25 bp, Artificial
  Probe
cggagcttgtccggaagattgcaaa

SEQ ID NO: 181460 - DNA, 25 bp, Artificial
  Probe
gctgtttgaagcgcagcaggtgcat

SEQ ID NO: 181461 - DNA, 25 bp, Artificial
  Probe
ggagcttgtccggaagattgcaaat

SEQ ID NO: 181462 - DNA, 25 bp, Artificial
  Probe
ctgtttgaagcgcagcaggtgcatc

SEQ ID NO: 181463 - DNA, 25 bp, Artificial
  Probe
gagcttgtccggaagattgcaaata

SEQ ID NO: 181464 - DNA, 25 bp, Artificial
  Probe
tgtttgaagcgcagcaggtgcatcg

SEQ ID NO: 181465 - DNA, 25 bp, Artificial
  Probe
cttgtccggaagattgcaaatactg

SEQ ID NO: 181466 - DNA, 25 bp, Artificial
  Probe
gtttgaagcgcagcaggtgcatcgc

SEQ ID NO: 181467 - DNA, 25 bp, Artificial
  Probe
aagattgcaaatactgcccgcaaag

SEQ ID NO: 181468 - DNA, 25 bp, Artificial
  Probe
aagcgcagcaggtgcatcgccagca

SEQ ID NO: 181469 - DNA, 25 bp, Artificial
  Probe
agattgcaaatactgcccgcaaagc

SEQ ID NO: 181470 - DNA, 25 bp, Artificial
  Probe
cgcagcaggtgcatcgccagcattt

SEQ ID NO: 181471 - DNA, 25 bp, Artificial
  Probe
gattgcaaatactgcccgcaaagct

SEQ ID NO: 181472 - DNA, 25 bp, Artificial
  Probe
cagcaggtgcatcgccagcatttcg

SEQ ID NO: 181473 - DNA, 25 bp, Artificial
  Probe
attgcaaatactgcccgcaaagctc

SEQ ID NO: 181474 - DNA, 25 bp, Artificial
  Probe
gcaggtgcatcgccagcatttcgat

SEQ ID NO: 181475 - DNA, 25 bp, Artificial
  Probe
gcaaatactgcccgcaaagctcgcg

SEQ ID NO: 181476 - DNA, 25 bp, Artificial
  Probe
aggtgcatcgccagcatttcgatcc

SEQ ID NO: 181477 - DNA, 25 bp, Artificial
  Probe
caaatactgcccgcaaagctcgcgc

SEQ ID NO: 181478 - DNA, 25 bp, Artificial
  Probe
ggtgcatcgccagcatttcgatcct

SEQ ID NO: 181479 - DNA, 25 bp, Artificial
  Probe
aatactgcccgcaaagctcgcgcta

SEQ ID NO: 181480 - DNA, 25 bp, Artificial
  Probe
gtgcatcgccagcatttcgatcctc

SEQ ID NO: 181481 - DNA, 25 bp, Artificial
  Probe
tactgcccgcaaagctcgcgctaca

SEQ ID NO: 181482 - DNA, 25 bp, Artificial
  Probe
tgcatcgccagcatttcgatcctcg

SEQ ID NO: 181483 - DNA, 25 bp, Artificial
  Probe
tgcccgcaaagctcgcgctacaaaa

SEQ ID NO: 181484 - DNA, 25 bp, Artificial
  Probe
gcatcgccagcatttcgatcctcgt

SEQ ID NO: 181485 - DNA, 25 bp, Artificial
  Probe
gcccgcaaagctcgcgctacaaaac

SEQ ID NO: 181486 - DNA, 25 bp, Artificial
  Probe
atcgccagcatttcgatcctcgtca

SEQ ID NO: 181487 - DNA, 25 bp, Artificial
  Probe
aagccgagcggttgatggaagttga

SEQ ID NO: 181488 - DNA, 25 bp, Artificial
  Probe
tcgccagcatttcgatcctcgtcag

SEQ ID NO: 181489 - DNA, 25 bp, Artificial
  Probe
cgagcggttgatggaagttgaacag

SEQ ID NO: 181490 - DNA, 25 bp, Artificial
  Probe
gccagcatttcgatcctcgtcaggt

SEQ ID NO: 181491 - DNA, 25 bp, Artificial
  Probe
aagttgaacaggtgctggagtcggc

SEQ ID NO: 181492 - DNA, 25 bp, Artificial
  Probe
ccagcatttcgatcctcgtcaggtg

SEQ ID NO: 181493 - DNA, 25 bp, Artificial
  Probe
tgctggagtcggcgcgcaaagcgaa

SEQ ID NO: 181494 - DNA, 25 bp, Artificial
  Probe
agcatttcgatcctcgtcaggtgca

SEQ ID NO: 181495 - DNA, 25 bp, Artificial
  Probe
ctggagtcggcgcgcaaagcgaaag

SEQ ID NO: 181496 - DNA, 25 bp, Artificial
  Probe
gcatttcgatcctcgtcaggtgcag

SEQ ID NO: 181497 - DNA, 25 bp, Artificial
  Probe
tggagtcggcgcgcaaagcgaaagc

SEQ ID NO: 181498 - DNA, 25 bp, Artificial
  Probe
atttcgatcctcgtcaggtgcaggt

SEQ ID NO: 181499 - DNA, 25 bp, Artificial
  Probe
tcggcgcgcaaagcgaaagcggcag

SEQ ID NO: 181500 - DNA, 25 bp, Artificial
  Probe
tttcgatcctcgtcaggtgcaggtc

SEQ ID NO: 181501 - DNA, 25 bp, Artificial
  Probe
cgcgcaaagcgaaagcggcaggatc

SEQ ID NO: 181502 - DNA, 25 bp, Artificial
  Probe
tcgatcctcgtcaggtgcaggtcag

SEQ ID NO: 181503 - DNA, 25 bp, Artificial
  Probe
cgcaaagcgaaagcggcaggatcga

SEQ ID NO: 181504 - DNA, 25 bp, Artificial
  Probe
cgatcctcgtcaggtgcaggtcagc

SEQ ID NO: 181505 - DNA, 25 bp, Artificial
  Probe
gcaaagcgaaagcggcaggatcgac

SEQ ID NO: 181506 - DNA, 25 bp, Artificial
  Probe
gatcctcgtcaggtgcaggtcagca

SEQ ID NO: 181507 - DNA, 25 bp, Artificial
  Probe
caaagcgaaagcggcaggatcgacg

SEQ ID NO: 181508 - DNA, 25 bp, Artificial
  Probe
atcctcgtcaggtgcaggtcagcac

SEQ ID NO: 181509 - DNA, 25 bp, Artificial
  Probe
aagcgaaagcggcaggatcgacgcg

SEQ ID NO: 181510 - DNA, 25 bp, Artificial
  Probe
cctcgtcaggtgcaggtcagcacgt

SEQ ID NO: 181511 - DNA, 25 bp, Artificial
  Probe
agcgaaagcggcaggatcgacgcgc

SEQ ID NO: 181512 - DNA, 25 bp, Artificial
  Probe
cgcccacgctggacattgtcgcaag

SEQ ID NO: 181513 - DNA, 25 bp, Artificial
  Probe
ctcgtcaggtgcaggtcagcacgtt

SEQ ID NO: 181514 - DNA, 25 bp, Artificial
  Probe
cgaaagcggcaggatcgacgcgctt

SEQ ID NO: 181515 - DNA, 25 bp, Artificial
  Probe
gcccacgctggacattgtcgcaagt

SEQ ID NO: 181516 - DNA, 25 bp, Artificial
  Probe
tcgtcaggtgcaggtcagcacgttg

SEQ ID NO: 181517 - DNA, 25 bp, Artificial
  Probe
aagcggcaggatcgacgcgcttctg

SEQ ID NO: 181518 - DNA, 25 bp, Artificial
  Probe
cccacgctggacattgtcgcaagtc

SEQ ID NO: 181519 - DNA, 25 bp, Artificial
  Probe
tcaggtgcaggtcagcacgttgctg

SEQ ID NO: 181520 - DNA, 25 bp, Artificial
  Probe
agcggcaggatcgacgcgcttctgt

SEQ ID NO: 181521 - DNA, 25 bp, Artificial
  Probe
cacgctggacattgtcgcaagtcac

SEQ ID NO: 181522 - DNA, 25 bp, Artificial
  Probe
caggtgcaggtcagcacgttgctgt

SEQ ID NO: 181523 - DNA, 25 bp, Artificial
  Probe
cggcaggatcgacgcgcttctgtat

SEQ ID NO: 181524 - DNA, 25 bp, Artificial
  Probe
ggacattgtcgcaagtcacagaatt

SEQ ID NO: 181525 - DNA, 25 bp, Artificial
  Probe
aggtgcaggtcagcacgttgctgtc

SEQ ID NO: 181526 - DNA, 25 bp, Artificial
  Probe
ggcaggatcgacgcgcttctgtatg

SEQ ID NO: 181527 - DNA, 25 bp, Artificial
  Probe
gacattgtcgcaagtcacagaatta

SEQ ID NO: 181528 - DNA, 25 bp, Artificial
  Probe
ggtgcaggtcagcacgttgctgtcg

SEQ ID NO: 181529 - DNA, 25 bp, Artificial
  Probe
gcaggatcgacgcgcttctgtatgg

SEQ ID NO: 181530 - DNA, 25 bp, Artificial
  Probe
cattgtcgcaagtcacagaattatt

SEQ ID NO: 181531 - DNA, 25 bp, Artificial
  Probe
tgcaggtcagcacgttgctgtcgat

SEQ ID NO: 181532 - DNA, 25 bp, Artificial
  Probe
caggatcgacgcgcttctgtatggg

SEQ ID NO: 181533 - DNA, 25 bp, Artificial
  Probe
attgtcgcaagtcacagaattattt

SEQ ID NO: 181534 - DNA, 25 bp, Artificial
  Probe
gcaggtcagcacgttgctgtcgatt

SEQ ID NO: 181535 - DNA, 25 bp, Artificial
  Probe
aggatcgacgcgcttctgtatgggc

SEQ ID NO: 181536 - DNA, 25 bp, Artificial
  Probe
tgtcgcaagtcacagaattatttga

SEQ ID NO: 181537 - DNA, 25 bp, Artificial
  Probe
caggtcagcacgttgctgtcgatta

SEQ ID NO: 181538 - DNA, 25 bp, Artificial
  Probe
gatcgacgcgcttctgtatgggcgc

SEQ ID NO: 181539 - DNA, 25 bp, Artificial
  Probe
gtcgcaagtcacagaattatttgaa

SEQ ID NO: 181540 - DNA, 25 bp, Artificial
  Probe
aggtcagcacgttgctgtcgattaa

SEQ ID NO: 181541 - DNA, 25 bp, Artificial
  Probe
atcgacgcgcttctgtatgggcgcg

SEQ ID NO: 181542 - DNA, 25 bp, Artificial
  Probe
cgcaagtcacagaattatttgaaaa

SEQ ID NO: 181543 - DNA, 25 bp, Artificial
  Probe
tcagcacgttgctgtcgattaagac

SEQ ID NO: 181544 - DNA, 25 bp, Artificial
  Probe
tggaagaatccccacgaacgcgata

SEQ ID NO: 181545 - DNA, 25 bp, Artificial
  Probe
tttgaaaaaccgttgctggatctgc

SEQ ID NO: 181546 - DNA, 25 bp, Artificial
  Probe
cagcacgttgctgtcgattaagacc

SEQ ID NO: 181547 - DNA, 25 bp, Artificial
  Probe
gaatccccacgaacgcgatatgccg

SEQ ID NO: 181548 - DNA, 25 bp, Artificial
  Probe
aaaccgttgctggatctgctgtttg

SEQ ID NO: 181549 - DNA, 25 bp, Artificial
  Probe
agcacgttgctgtcgattaagaccg

SEQ ID NO: 181550 - DNA, 25 bp, Artificial
  Probe
accgttgctggatctgctgtttgaa

SEQ ID NO: 181551 - DNA, 25 bp, Artificial
  Probe
cacgttgctgtcgattaagaccgga

SEQ ID NO: 181552 - DNA, 25 bp, Artificial
  Probe
ccgttgctggatctgctgtttgaag

SEQ ID NO: 181553 - DNA, 25 bp, Artificial
  Probe
cgttgctgtcgattaagaccggagc

SEQ ID NO: 181554 - DNA, 25 bp, Artificial
  Probe
cgttgctggatctgctgtttgaagc

SEQ ID NO: 181555 - DNA, 25 bp, Artificial
  Probe
gttgctgtcgattaagaccggagct

SEQ ID NO: 181556 - DNA, 25 bp, Artificial
  Probe
gttgctggatctgctgtttgaagcg

SEQ ID NO: 181557 - DNA, 25 bp, Artificial
  Probe
ttgctgtcgattaagaccggagctt

SEQ ID NO: 181558 - DNA, 25 bp, Artificial
  Probe
tgctggatctgctgtttgaagcgca

SEQ ID NO: 181559 - DNA, 25 bp, Artificial
  Probe
tgctgtcgattaagaccggagcttg

SEQ ID NO: 181560 - DNA, 25 bp, Artificial
  Probe
gctggatctgctgtttgaagcgcag

SEQ ID NO: 181561 - DNA, 25 bp, Artificial
  Probe
gctgtcgattaagaccggagcttgt

SEQ ID NO: 181562 - DNA, 25 bp, Artificial
  Probe
tggatctgctgtttgaagcgcagca

SEQ ID NO: 181563 - DNA, 25 bp, Artificial
  Probe
tgtcgattaagaccggagcttgtcc

SEQ ID NO: 181564 - DNA, 25 bp, Artificial
  Probe
ggatctgctgtttgaagcgcagcag

SEQ ID NO: 181565 - DNA, 25 bp, Artificial
  Probe
gaccggagcttgtccggaagattgc

SEQ ID NO: 181566 - DNA, 25 bp, Artificial
  Probe
tctgctgtttgaagcgcagcaggtg

SEQ ID NO: 181567 - DNA, 25 bp, Artificial
  Probe
ccggagcttgtccggaagattgcaa

SEQ ID NO: 181568 - DNA, 25 bp, Artificial
  Probe
ctgctgtttgaagcgcagcaggtgc

SEQ ID NO: 181569 - DNA, 25 bp, Artificial
  Probe
cggagcttgtccggaagattgcaaa

SEQ ID NO: 181570 - DNA, 25 bp, Artificial
  Probe
gctgtttgaagcgcagcaggtgcat

SEQ ID NO: 181571 - DNA, 25 bp, Artificial
  Probe
ggagcttgtccggaagattgcaaat

SEQ ID NO: 181572 - DNA, 25 bp, Artificial
  Probe
ctgtttgaagcgcagcaggtgcatc

SEQ ID NO: 181573 - DNA, 25 bp, Artificial
  Probe
gagcttgtccggaagattgcaaata

SEQ ID NO: 181574 - DNA, 25 bp, Artificial
  Probe
tgtttgaagcgcagcaggtgcatcg

SEQ ID NO: 181575 - DNA, 25 bp, Artificial
  Probe
cttgtccggaagattgcaaatactg

SEQ ID NO: 181576 - DNA, 25 bp, Artificial
  Probe
gtttgaagcgcagcaggtgcatcgc

SEQ ID NO: 181577 - DNA, 25 bp, Artificial
  Probe
aagattgcaaatactgcccgcaaag

SEQ ID NO: 181578 - DNA, 25 bp, Artificial
  Probe
aagcgcagcaggtgcatcgccagca

SEQ ID NO: 181579 - DNA, 25 bp, Artificial
  Probe
agattgcaaatactgcccgcaaagc

SEQ ID NO: 181580 - DNA, 25 bp, Artificial
  Probe
cgcagcaggtgcatcgccagcattt

SEQ ID NO: 181581 - DNA, 25 bp, Artificial
  Probe
gattgcaaatactgcccgcaaagct

SEQ ID NO: 181582 - DNA, 25 bp, Artificial
  Probe
cagcaggtgcatcgccagcatttcg

SEQ ID NO: 181583 - DNA, 25 bp, Artificial
  Probe
attgcaaatactgcccgcaaagctc

SEQ ID NO: 181584 - DNA, 25 bp, Artificial
  Probe
gcaggtgcatcgccagcatttcgat

SEQ ID NO: 181585 - DNA, 25 bp, Artificial
  Probe
gcaaatactgcccgcaaagctcgcg

SEQ ID NO: 181586 - DNA, 25 bp, Artificial
  Probe
aggtgcatcgccagcatttcgatcc

SEQ ID NO: 181587 - DNA, 25 bp, Artificial
  Probe
caaatactgcccgcaaagctcgcgc

SEQ ID NO: 181588 - DNA, 25 bp, Artificial
  Probe
ggtgcatcgccagcatttcgatcct

SEQ ID NO: 181589 - DNA, 25 bp, Artificial
  Probe
aatactgcccgcaaagctcgcgcta

SEQ ID NO: 181590 - DNA, 25 bp, Artificial
  Probe
gtgcatcgccagcatttcgatcctc

SEQ ID NO: 181591 - DNA, 25 bp, Artificial
  Probe
tactgcccgcaaagctcgcgctaca

SEQ ID NO: 181592 - DNA, 25 bp, Artificial
  Probe
tgcatcgccagcatttcgatcctcg

SEQ ID NO: 181593 - DNA, 25 bp, Artificial
  Probe
tgcccgcaaagctcgcgctacaaaa

SEQ ID NO: 181594 - DNA, 25 bp, Artificial
  Probe
gcatcgccagcatttcgatcctcgt

SEQ ID NO: 181595 - DNA, 25 bp, Artificial
  Probe
gcccgcaaagctcgcgctacaaaac

SEQ ID NO: 181596 - DNA, 25 bp, Artificial
  Probe
atcgccagcatttcgatcctcgtca

SEQ ID NO: 181597 - DNA, 25 bp, Artificial
  Probe
aagccgagcggttgatggaagttga

SEQ ID NO: 181598 - DNA, 25 bp, Artificial
  Probe
tgccaatcaacatgctggtgaaggt

SEQ ID NO: 181599 - DNA, 25 bp, Artificial
  Probe
cgcctcgatacgctggaaaaagtgc

SEQ ID NO: 181600 - DNA, 25 bp, Artificial
  Probe
tgacgctgggcacgttgagtgaatc

SEQ ID NO: 181601 - DNA, 25 bp, Artificial
  Probe
cgccgccggaaagcgtgccaatcaa

SEQ ID NO: 181602 - DNA, 25 bp, Artificial
  Probe
attgctgcaactggcaaacctgccg

SEQ ID NO: 181603 - DNA, 25 bp, Artificial
  Probe
aagatcgcgccggattattgctgca

SEQ ID NO: 181604 - DNA, 25 bp, Artificial
  Probe
aatcaacatgctggtgaaggtgaaa

SEQ ID NO: 181605 - DNA, 25 bp, Artificial
  Probe
caatatcatcaccacacgcacttat

SEQ ID NO: 181606 - DNA, 25 bp, Artificial
  Probe
cgccggattattgctgcaactggca

SEQ ID NO: 181607 - DNA, 25 bp, Artificial
  Probe
aaagtgcgcgatgccgggatcaaag

SEQ ID NO: 181608 - DNA, 25 bp, Artificial
  Probe
gcgatgccgggatcaaagtctgttc

SEQ ID NO: 181609 - DNA, 25 bp, Artificial
  Probe
gacgccgccggaaagcgtgccaatc

SEQ ID NO: 181610 - DNA, 25 bp, Artificial
  Probe
ccacacgcacttatcaggaacgcct

SEQ ID NO: 181611 - DNA, 25 bp, Artificial
  Probe
atcgcgccggattattgctgcaact

SEQ ID NO: 181612 - DNA, 25 bp, Artificial
  Probe
tctcaggcgcagcgcctcgcgaacg

SEQ ID NO: 181613 - DNA, 25 bp, Artificial
  Probe
aagtgcgcgatgccgggatcaaagt

SEQ ID NO: 181614 - DNA, 25 bp, Artificial
  Probe
aaagcgtgccaatcaacatgctggt

SEQ ID NO: 181615 - DNA, 25 bp, Artificial
  Probe
acttatcaggaacgcctcgatacgc

SEQ ID NO: 181616 - DNA, 25 bp, Artificial
  Probe
atcaaagtctgttctggcggcattg

SEQ ID NO: 181617 - DNA, 25 bp, Artificial
  Probe
gccaatcaacatgctggtgaaggtg

SEQ ID NO: 181618 - DNA, 25 bp, Artificial
  Probe
acgcacttatcaggaacgcctcgat

SEQ ID NO: 181619 - DNA, 25 bp, Artificial
  Probe
cgttgagtgaatctcaggcgcagcg

SEQ ID NO: 181620 - DNA, 25 bp, Artificial
  Probe
caaagtctgttctggcggcattgtg

SEQ ID NO: 181621 - DNA, 25 bp, Artificial
  Probe
gccgccggaaagcgtgccaatcaac

SEQ ID NO: 181622 - DNA, 25 bp, Artificial
  Probe
tgcaactggcaaacctgccgacgcc

SEQ ID NO: 181623 - DNA, 25 bp, Artificial
  Probe
agcgcctcgcgaacgccgggctgga

SEQ ID NO: 181624 - DNA, 25 bp, Artificial
  Probe
gcaactggcaaacctgccgacgccg

SEQ ID NO: 181625 - DNA, 25 bp, Artificial
  Probe
tgttctggcggcattgtgggcttag

SEQ ID NO: 181626 - DNA, 25 bp, Artificial
  Probe
tgctgcaactggcaaacctgccgac

SEQ ID NO: 181627 - DNA, 25 bp, Artificial
  Probe
gctgcaactggcaaacctgccgacg

SEQ ID NO: 181628 - DNA, 25 bp, Artificial
  Probe
ttttacggcaatatcatcaccacac

SEQ ID NO: 181629 - DNA, 25 bp, Artificial
  Probe
gcgccggattattgctgcaactggc

SEQ ID NO: 181630 - DNA, 25 bp, Artificial
  Probe
tgagtgaatctcaggcgcagcgcct

SEQ ID NO: 181631 - DNA, 25 bp, Artificial
  Probe
tttacggcaatatcatcaccacacg

SEQ ID NO: 181632 - DNA, 25 bp, Artificial
  Probe
agtgcgcgatgccgggatcaaagtc

SEQ ID NO: 181633 - DNA, 25 bp, Artificial
  Probe
tcaccacacgcacttatcaggaacg

SEQ ID NO: 181634 - DNA, 25 bp, Artificial
  Probe
cttatcaggaacgcctcgatacgct

SEQ ID NO: 181635 - DNA, 25 bp, Artificial
  Probe
agcgtgccaatcaacatgctggtga

SEQ ID NO: 181636 - DNA, 25 bp, Artificial
  Probe
aatctcaggcgcagcgcctcgcgaa

SEQ ID NO: 181637 - DNA, 25 bp, Artificial
  Probe
caacatgctggtgaaggtgaaaggc

SEQ ID NO: 181638 - DNA, 25 bp, Artificial
  Probe
acggcaatatcatcaccacacgcac

SEQ ID NO: 181639 - DNA, 25 bp, Artificial
  Probe
cgggatcaaagtctgttctggcggc

SEQ ID NO: 181640 - DNA, 25 bp, Artificial
  Probe
gcggcattgtgggcttaggcgaaac

SEQ ID NO: 181641 - DNA, 25 bp, Artificial
  Probe
atcaggaacgcctcgatacgctgga

SEQ ID NO: 181642 - DNA, 25 bp, Artificial
  Probe
cgtgccaatcaacatgctggtgaag

SEQ ID NO: 181643 - DNA, 25 bp, Artificial
  Probe
tggattactacaaccacaacctgga

SEQ ID NO: 181644 - DNA, 25 bp, Artificial
  Probe
gtctgttctggcggcattgtgggct

SEQ ID NO: 181645 - DNA, 25 bp, Artificial
  Probe
gagttttacggcaatatcatcacca

SEQ ID NO: 181646 - DNA, 25 bp, Artificial
  Probe
agatcgcgccggattattgctgcaa

SEQ ID NO: 181647 - DNA, 25 bp, Artificial
  Probe
gcgtgccaatcaacatgctggtgaa

SEQ ID NO: 181648 - DNA, 25 bp, Artificial
  Probe
acgctgggcacgttgagtgaatctc

SEQ ID NO: 181649 - DNA, 25 bp, Artificial
  Probe
gattactacaaccacaacctggaca

SEQ ID NO: 181650 - DNA, 25 bp, Artificial
  Probe
gctgggcacgttgagtgaatctcag

SEQ ID NO: 181651 - DNA, 25 bp, Artificial
  Probe
ccggattattgctgcaactggcaaa

SEQ ID NO: 181652 - DNA, 25 bp, Artificial
  Probe
gttttacggcaatatcatcaccaca

SEQ ID NO: 181653 - DNA, 25 bp, Artificial
  Probe
ggaaagcgtgccaatcaacatgctg

SEQ ID NO: 181654 - DNA, 25 bp, Artificial
  Probe
gccgacgccgccggaaagcgtgcca

SEQ ID NO: 181655 - DNA, 25 bp, Artificial
  Probe
accacacgcacttatcaggaacgcc

SEQ ID NO: 181656 - DNA, 25 bp, Artificial
  Probe
tgccgggatcaaagtctgttctggc

SEQ ID NO: 181657 - DNA, 25 bp, Artificial
  Probe
tcaaagtctgttctggcggcattgt

SEQ ID NO: 181658 - DNA, 25 bp, Artificial
  Probe
tcgcgccggattattgctgcaactg

SEQ ID NO: 181659 - DNA, 25 bp, Artificial
  Probe
gatcaaagtctgttctggcggcatt

SEQ ID NO: 181660 - DNA, 25 bp, Artificial
  Probe
gcgcctcgcgaacgccgggctggat

SEQ ID NO: 181661 - DNA, 25 bp, Artificial
  Probe
caccacacgcacttatcaggaacgc

SEQ ID NO: 181662 - DNA, 25 bp, Artificial
  Probe
aagtctgttctggcggcattgtggg

SEQ ID NO: 181663 - DNA, 25 bp, Artificial
  Probe
gctggattactacaaccacaacctg

SEQ ID NO: 181664 - DNA, 25 bp, Artificial
  Probe
ctgccgacgccgccggaaagcgtgc

SEQ ID NO: 181665 - DNA, 25 bp, Artificial
  Probe
tcgcgaacgccgggctggattacta

SEQ ID NO: 181666 - DNA, 25 bp, Artificial
  Probe
atgccgggatcaaagtctgttctgg

SEQ ID NO: 181667 - DNA, 25 bp, Artificial
  Probe
ttatcaggaacgcctcgatacgctg

SEQ ID NO: 181668 - DNA, 25 bp, Artificial
  Probe
ctcgatacgctggaaaaagtgcgcg

SEQ ID NO: 181669 - DNA, 25 bp, Artificial
  Probe
cacgcacttatcaggaacgcctcga

SEQ ID NO: 181670 - DNA, 25 bp, Artificial
  Probe
tcatcaccacacgcacttatcagga

SEQ ID NO: 181671 - DNA, 25 bp, Artificial
  Probe
cgcacttatcaggaacgcctcgata

SEQ ID NO: 181672 - DNA, 25 bp, Artificial
  Probe
ttacggcaatatcatcaccacacgc

SEQ ID NO: 181673 - DNA, 25 bp, Artificial
  Probe
cgccggaaagcgtgccaatcaacat

SEQ ID NO: 181674 - DNA, 25 bp, Artificial
  Probe
ccgccggaaagcgtgccaatcaaca

SEQ ID NO: 181675 - DNA, 25 bp, Artificial
  Probe
ggatcaaagtctgttctggcggcat

SEQ ID NO: 181676 - DNA, 25 bp, Artificial
  Probe
tcaggaacgcctcgatacgctggaa

SEQ ID NO: 181677 - DNA, 25 bp, Artificial
  Probe
gcacttatcaggaacgcctcgatac

SEQ ID NO: 181678 - DNA, 25 bp, Artificial
  Probe
tacgctggaaaaagtgcgcgatgcc

SEQ ID NO: 181679 - DNA, 25 bp, Artificial
  Probe
caatcaacatgctggtgaaggtgaa

SEQ ID NO: 181680 - DNA, 25 bp, Artificial
  Probe
gtaaaagatcgcgccggattattgc

SEQ ID NO: 181681 - DNA, 25 bp, Artificial
  Probe
cggaaagcgtgccaatcaacatgct

SEQ ID NO: 181682 - DNA, 25 bp, Artificial
  Probe
tgtatgacgctgggcacgttgagtg

SEQ ID NO: 181683 - DNA, 25 bp, Artificial
  Probe
tgccgacgccgccggaaagcgtgcc

SEQ ID NO: 181684 - DNA, 25 bp, Artificial
  Probe
cgcgccggattattgctgcaactgg

SEQ ID NO: 181685 - DNA, 25 bp, Artificial
  Probe
tatgacgctgggcacgttgagtgaa

SEQ ID NO: 181686 - DNA, 25 bp, Artificial
  Probe
aggcgtgtatgacgctgggcacgtt

SEQ ID NO: 181687 - DNA, 25 bp, Artificial
  Probe
agtctgttctggcggcattgtgggc

SEQ ID NO: 181688 - DNA, 25 bp, Artificial
  Probe
cacacgcacttatcaggaacgcctc

SEQ ID NO: 181689 - DNA, 25 bp, Artificial
  Probe
tgaatctcaggcgcagcgcctcgcg

SEQ ID NO: 181690 - DNA, 25 bp, Artificial
  Probe
ctgcaactggcaaacctgccgacgc

SEQ ID NO: 181691 - DNA, 25 bp, Artificial
  Probe
cgatgccgggatcaaagtctgttct

SEQ ID NO: 181692 - DNA, 25 bp, Artificial
  Probe
tgcgcgatgccgggatcaaagtctg

SEQ ID NO: 181693 - DNA, 25 bp, Artificial
  Probe
cggattattgctgcaactggcaaac

SEQ ID NO: 181694 - DNA, 25 bp, Artificial
  Probe
ttattgctgcaactggcaaacctgc

SEQ ID NO: 181695 - DNA, 25 bp, Artificial
  Probe
gcctcgcgaacgccgggctggatta

SEQ ID NO: 181696 - DNA, 25 bp, Artificial
  Probe
agtgaatctcaggcgcagcgcctcg

SEQ ID NO: 181697 - DNA, 25 bp, Artificial
  Probe
gccggaaagcgtgccaatcaacatg

SEQ ID NO: 181698 - DNA, 25 bp, Artificial
  Probe
gcctcgatacgctggaaaaagtgcg

SEQ ID NO: 181699 - DNA, 25 bp, Artificial
  Probe
cgtgtatgacgctgggcacgttgag

SEQ ID NO: 181700 - DNA, 25 bp, Artificial
  Probe
cgcgatgccgggatcaaagtctgtt

SEQ ID NO: 181701 - DNA, 25 bp, Artificial
  Probe
attattgctgcaactggcaaacctg

SEQ ID NO: 181702 - DNA, 25 bp, Artificial
  Probe
gcgcgatgccgggatcaaagtctgt

SEQ ID NO: 181703 - DNA, 25 bp, Artificial
  Probe
tcaacatgctggtgaaggtgaaagg

SEQ ID NO: 181704 - DNA, 25 bp, Artificial
  Probe
ggcaatatcatcaccacacgcactt

SEQ ID NO: 181705 - DNA, 25 bp, Artificial
  Probe
cggcaatatcatcaccacacgcact

SEQ ID NO: 181706 - DNA, 25 bp, Artificial
  Probe
tattgctgcaactggcaaacctgcc

SEQ ID NO: 181707 - DNA, 25 bp, Artificial
  Probe
ctgttctggcggcattgtgggctta

SEQ ID NO: 181708 - DNA, 25 bp, Artificial
  Probe
acggcaatatcatcaccacacgcac

SEQ ID NO: 181709 - DNA, 25 bp, Artificial
  Probe
tcgcgccggattattgctgcaactg

SEQ ID NO: 181710 - DNA, 25 bp, Artificial
  Probe
cggcaatatcatcaccacacgcact

SEQ ID NO: 181711 - DNA, 25 bp, Artificial
  Probe
cgcgccggattattgctgcaactgg

SEQ ID NO: 181712 - DNA, 25 bp, Artificial
  Probe
ggcaatatcatcaccacacgcactt

SEQ ID NO: 181713 - DNA, 25 bp, Artificial
  Probe
gcgccggattattgctgcaactggc

SEQ ID NO: 181714 - DNA, 25 bp, Artificial
  Probe
caatatcatcaccacacgcacttat

SEQ ID NO: 181715 - DNA, 25 bp, Artificial
  Probe
cgccggattattgctgcaactggca

SEQ ID NO: 181716 - DNA, 25 bp, Artificial
  Probe
tcatcaccacacgcacttatcagga

SEQ ID NO: 181717 - DNA, 25 bp, Artificial
  Probe
ccggattattgctgcaactggcaaa

SEQ ID NO: 181718 - DNA, 25 bp, Artificial
  Probe
tcaccacacgcacttatcaggaacg

SEQ ID NO: 181719 - DNA, 25 bp, Artificial
  Probe
cggattattgctgcaactggcaaac

SEQ ID NO: 181720 - DNA, 25 bp, Artificial
  Probe
caccacacgcacttatcaggaacgc

SEQ ID NO: 181721 - DNA, 25 bp, Artificial
  Probe
attattgctgcaactggcaaacctg

SEQ ID NO: 181722 - DNA, 25 bp, Artificial
  Probe
accacacgcacttatcaggaacgcc

SEQ ID NO: 181723 - DNA, 25 bp, Artificial
  Probe
ttattgctgcaactggcaaacctgc

SEQ ID NO: 181724 - DNA, 25 bp, Artificial
  Probe
ccacacgcacttatcaggaacgcct

SEQ ID NO: 181725 - DNA, 25 bp, Artificial
  Probe
tattgctgcaactggcaaacctgcc

SEQ ID NO: 181726 - DNA, 25 bp, Artificial
  Probe
cacacgcacttatcaggaacgcctc

SEQ ID NO: 181727 - DNA, 25 bp, Artificial
  Probe
attgctgcaactggcaaacctgccg

SEQ ID NO: 181728 - DNA, 25 bp, Artificial
  Probe
cacgcacttatcaggaacgcctcga

SEQ ID NO: 181729 - DNA, 25 bp, Artificial
  Probe
tgctgcaactggcaaacctgccgac

SEQ ID NO: 181730 - DNA, 25 bp, Artificial
  Probe
acgcacttatcaggaacgcctcgat

SEQ ID NO: 181731 - DNA, 25 bp, Artificial
  Probe
gctgcaactggcaaacctgccgacg

SEQ ID NO: 181732 - DNA, 25 bp, Artificial
  Probe
cgcacttatcaggaacgcctcgata

SEQ ID NO: 181733 - DNA, 25 bp, Artificial
  Probe
ctgcaactggcaaacctgccgacgc

SEQ ID NO: 181734 - DNA, 25 bp, Artificial
  Probe
gcacttatcaggaacgcctcgatac

SEQ ID NO: 181735 - DNA, 25 bp, Artificial
  Probe
tgcaactggcaaacctgccgacgcc

SEQ ID NO: 181736 - DNA, 25 bp, Artificial
  Probe
acttatcaggaacgcctcgatacgc

SEQ ID NO: 181737 - DNA, 25 bp, Artificial
  Probe
gcaactggcaaacctgccgacgccg

SEQ ID NO: 181738 - DNA, 25 bp, Artificial
  Probe
cttatcaggaacgcctcgatacgct

SEQ ID NO: 181739 - DNA, 25 bp, Artificial
  Probe
ctgccgacgccgccggaaagcgtgc

SEQ ID NO: 181740 - DNA, 25 bp, Artificial
  Probe
ttatcaggaacgcctcgatacgctg

SEQ ID NO: 181741 - DNA, 25 bp, Artificial
  Probe
tgccgacgccgccggaaagcgtgcc

SEQ ID NO: 181742 - DNA, 25 bp, Artificial
  Probe
atcaggaacgcctcgatacgctgga

SEQ ID NO: 181743 - DNA, 25 bp, Artificial
  Probe
gccgacgccgccggaaagcgtgcca

SEQ ID NO: 181744 - DNA, 25 bp, Artificial
  Probe
tcaggaacgcctcgatacgctggaa

SEQ ID NO: 181745 - DNA, 25 bp, Artificial
  Probe
gacgccgccggaaagcgtgccaatc

SEQ ID NO: 181746 - DNA, 25 bp, Artificial
  Probe
cgcctcgatacgctggaaaaagtgc

SEQ ID NO: 181747 - DNA, 25 bp, Artificial
  Probe
cgccgccggaaagcgtgccaatcaa

SEQ ID NO: 181748 - DNA, 25 bp, Artificial
  Probe
gcctcgatacgctggaaaaagtgcg

SEQ ID NO: 181749 - DNA, 25 bp, Artificial
  Probe
gccgccggaaagcgtgccaatcaac

SEQ ID NO: 181750 - DNA, 25 bp, Artificial
  Probe
ctcgatacgctggaaaaagtgcgcg

SEQ ID NO: 181751 - DNA, 25 bp, Artificial
  Probe
ccgccggaaagcgtgccaatcaaca

SEQ ID NO: 181752 - DNA, 25 bp, Artificial
  Probe
tacgctggaaaaagtgcgcgatgcc

SEQ ID NO: 181753 - DNA, 25 bp, Artificial
  Probe
cgccggaaagcgtgccaatcaacat

SEQ ID NO: 181754 - DNA, 25 bp, Artificial
  Probe
aaagtgcgcgatgccgggatcaaag

SEQ ID NO: 181755 - DNA, 25 bp, Artificial
  Probe
gccggaaagcgtgccaatcaacatg

SEQ ID NO: 181756 - DNA, 25 bp, Artificial
  Probe
aggcgtgtatgacgctgggcacgtt

SEQ ID NO: 181757 - DNA, 25 bp, Artificial
  Probe
aagtgcgcgatgccgggatcaaagt

SEQ ID NO: 181758 - DNA, 25 bp, Artificial
  Probe
cggaaagcgtgccaatcaacatgct

SEQ ID NO: 181759 - DNA, 25 bp, Artificial
  Probe
cgtgtatgacgctgggcacgttgag

SEQ ID NO: 181760 - DNA, 25 bp, Artificial
  Probe
agtgcgcgatgccgggatcaaagtc

SEQ ID NO: 181761 - DNA, 25 bp, Artificial
  Probe
ggaaagcgtgccaatcaacatgctg

SEQ ID NO: 181762 - DNA, 25 bp, Artificial
  Probe
tgtatgacgctgggcacgttgagtg

SEQ ID NO: 181763 - DNA, 25 bp, Artificial
  Probe
tgcgcgatgccgggatcaaagtctg

SEQ ID NO: 181764 - DNA, 25 bp, Artificial
  Probe
aaagcgtgccaatcaacatgctggt

SEQ ID NO: 181765 - DNA, 25 bp, Artificial
  Probe
tatgacgctgggcacgttgagtgaa

SEQ ID NO: 181766 - DNA, 25 bp, Artificial
  Probe
gcgcgatgccgggatcaaagtctgt

SEQ ID NO: 181767 - DNA, 25 bp, Artificial
  Probe
agcgtgccaatcaacatgctggtga

SEQ ID NO: 181768 - DNA, 25 bp, Artificial
  Probe
tgacgctgggcacgttgagtgaatc

SEQ ID NO: 181769 - DNA, 25 bp, Artificial
  Probe
cgcgatgccgggatcaaagtctgtt

SEQ ID NO: 181770 - DNA, 25 bp, Artificial
  Probe
gcgtgccaatcaacatgctggtgaa

SEQ ID NO: 181771 - DNA, 25 bp, Artificial
  Probe
acgctgggcacgttgagtgaatctc

SEQ ID NO: 181772 - DNA, 25 bp, Artificial
  Probe
gcgatgccgggatcaaagtctgttc

SEQ ID NO: 181773 - DNA, 25 bp, Artificial
  Probe
cgtgccaatcaacatgctggtgaag

SEQ ID NO: 181774 - DNA, 25 bp, Artificial
  Probe
gctgggcacgttgagtgaatctcag

SEQ ID NO: 181775 - DNA, 25 bp, Artificial
  Probe
cgatgccgggatcaaagtctgttct

SEQ ID NO: 181776 - DNA, 25 bp, Artificial
  Probe
tgccaatcaacatgctggtgaaggt

SEQ ID NO: 181777 - DNA, 25 bp, Artificial
  Probe
cgttgagtgaatctcaggcgcagcg

SEQ ID NO: 181778 - DNA, 25 bp, Artificial
  Probe
atgccgggatcaaagtctgttctgg

SEQ ID NO: 181779 - DNA, 25 bp, Artificial
  Probe
gccaatcaacatgctggtgaaggtg

SEQ ID NO: 181780 - DNA, 25 bp, Artificial
  Probe
tgagtgaatctcaggcgcagcgcct

SEQ ID NO: 181781 - DNA, 25 bp, Artificial
  Probe
tgccgggatcaaagtctgttctggc

SEQ ID NO: 181782 - DNA, 25 bp, Artificial
  Probe
caatcaacatgctggtgaaggtgaa

SEQ ID NO: 181783 - DNA, 25 bp, Artificial
  Probe
agtgaatctcaggcgcagcgcctcg

SEQ ID NO: 181784 - DNA, 25 bp, Artificial
  Probe
cgggatcaaagtctgttctggcggc

SEQ ID NO: 181785 - DNA, 25 bp, Artificial
  Probe
aatcaacatgctggtgaaggtgaaa

SEQ ID NO: 181786 - DNA, 25 bp, Artificial
  Probe
tgaatctcaggcgcagcgcctcgcg

SEQ ID NO: 181787 - DNA, 25 bp, Artificial
  Probe
ggatcaaagtctgttctggcggcat

SEQ ID NO: 181788 - DNA, 25 bp, Artificial
  Probe
tcaacatgctggtgaaggtgaaagg

SEQ ID NO: 181789 - DNA, 25 bp, Artificial
  Probe
aatctcaggcgcagcgcctcgcgaa

SEQ ID NO: 181790 - DNA, 25 bp, Artificial
  Probe
gatcaaagtctgttctggcggcatt

SEQ ID NO: 181791 - DNA, 25 bp, Artificial
  Probe
caacatgctggtgaaggtgaaaggc

SEQ ID NO: 181792 - DNA, 25 bp, Artificial
  Probe
tctcaggcgcagcgcctcgcgaacg

SEQ ID NO: 181793 - DNA, 25 bp, Artificial
  Probe
atcaaagtctgttctggcggcattg

SEQ ID NO: 181794 - DNA, 25 bp, Artificial
  Probe
agcgcctcgcgaacgccgggctgga

SEQ ID NO: 181795 - DNA, 25 bp, Artificial
  Probe
tcaaagtctgttctggcggcattgt

SEQ ID NO: 181796 - DNA, 25 bp, Artificial
  Probe
gcgcctcgcgaacgccgggctggat

SEQ ID NO: 181797 - DNA, 25 bp, Artificial
  Probe
caaagtctgttctggcggcattgtg

SEQ ID NO: 181798 - DNA, 25 bp, Artificial
  Probe
gcctcgcgaacgccgggctggatta

SEQ ID NO: 181799 - DNA, 25 bp, Artificial
  Probe
aagtctgttctggcggcattgtggg

SEQ ID NO: 181800 - DNA, 25 bp, Artificial
  Probe
tcgcgaacgccgggctggattacta

SEQ ID NO: 181801 - DNA, 25 bp, Artificial
  Probe
agtctgttctggcggcattgtgggc

SEQ ID NO: 181802 - DNA, 25 bp, Artificial
  Probe
gctggattactacaaccacaacctg

SEQ ID NO: 181803 - DNA, 25 bp, Artificial
  Probe
gtctgttctggcggcattgtgggct

SEQ ID NO: 181804 - DNA, 25 bp, Artificial
  Probe
tggattactacaaccacaacctgga

SEQ ID NO: 181805 - DNA, 25 bp, Artificial
  Probe
ctgttctggcggcattgtgggctta

SEQ ID NO: 181806 - DNA, 25 bp, Artificial
  Probe
gattactacaaccacaacctggaca

SEQ ID NO: 181807 - DNA, 25 bp, Artificial
  Probe
tgttctggcggcattgtgggcttag

SEQ ID NO: 181808 - DNA, 25 bp, Artificial
  Probe
gagttttacggcaatatcatcacca

SEQ ID NO: 181809 - DNA, 25 bp, Artificial
  Probe
gcggcattgtgggcttaggcgaaac

SEQ ID NO: 181810 - DNA, 25 bp, Artificial
  Probe
gttttacggcaatatcatcaccaca

SEQ ID NO: 181811 - DNA, 25 bp, Artificial
  Probe
gtaaaagatcgcgccggattattgc

SEQ ID NO: 181812 - DNA, 25 bp, Artificial
  Probe
ttttacggcaatatcatcaccacac

SEQ ID NO: 181813 - DNA, 25 bp, Artificial
  Probe
aagatcgcgccggattattgctgca

SEQ ID NO: 181814 - DNA, 25 bp, Artificial
  Probe
tttacggcaatatcatcaccacacg

SEQ ID NO: 181815 - DNA, 25 bp, Artificial
  Probe
agatcgcgccggattattgctgcaa

SEQ ID NO: 181816 - DNA, 25 bp, Artificial
  Probe
ttacggcaatatcatcaccacacgc

SEQ ID NO: 181817 - DNA, 25 bp, Artificial
  Probe
atcgcgccggattattgctgcaact

SEQ ID NO: 181818 - DNA, 25 bp, Artificial
  Probe
acggcaatatcatcaccacacgcac

SEQ ID NO: 181819 - DNA, 25 bp, Artificial
  Probe
tcgcgccggattattgctgcaactg

SEQ ID NO: 181820 - DNA, 25 bp, Artificial
  Probe
cggcaatatcatcaccacacgcact

SEQ ID NO: 181821 - DNA, 25 bp, Artificial
  Probe
cgcgccggattattgctgcaactgg

SEQ ID NO: 181822 - DNA, 25 bp, Artificial
  Probe
ggcaatatcatcaccacacgcactt

SEQ ID NO: 181823 - DNA, 25 bp, Artificial
  Probe
gcgccggattattgctgcaactggc

SEQ ID NO: 181824 - DNA, 25 bp, Artificial
  Probe
caatatcatcaccacacgcacttat

SEQ ID NO: 181825 - DNA, 25 bp, Artificial
  Probe
cgccggattattgctgcaactggca

SEQ ID NO: 181826 - DNA, 25 bp, Artificial
  Probe
tcatcaccacacgcacttatcagga

SEQ ID NO: 181827 - DNA, 25 bp, Artificial
  Probe
ccggattattgctgcaactggcaaa

SEQ ID NO: 181828 - DNA, 25 bp, Artificial
  Probe
tcaccacacgcacttatcaggaacg

SEQ ID NO: 181829 - DNA, 25 bp, Artificial
  Probe
cggattattgctgcaactggcaaac

SEQ ID NO: 181830 - DNA, 25 bp, Artificial
  Probe
caccacacgcacttatcaggaacgc

SEQ ID NO: 181831 - DNA, 25 bp, Artificial
  Probe
attattgctgcaactggcaaacctg

SEQ ID NO: 181832 - DNA, 25 bp, Artificial
  Probe
accacacgcacttatcaggaacgcc

SEQ ID NO: 181833 - DNA, 25 bp, Artificial
  Probe
ttattgctgcaactggcaaacctgc

SEQ ID NO: 181834 - DNA, 25 bp, Artificial
  Probe
ccacacgcacttatcaggaacgcct

SEQ ID NO: 181835 - DNA, 25 bp, Artificial
  Probe
tattgctgcaactggcaaacctgcc

SEQ ID NO: 181836 - DNA, 25 bp, Artificial
  Probe
cacacgcacttatcaggaacgcctc

SEQ ID NO: 181837 - DNA, 25 bp, Artificial
  Probe
attgctgcaactggcaaacctgccg

SEQ ID NO: 181838 - DNA, 25 bp, Artificial
  Probe
cacgcacttatcaggaacgcctcga

SEQ ID NO: 181839 - DNA, 25 bp, Artificial
  Probe
tgctgcaactggcaaacctgccgac

SEQ ID NO: 181840 - DNA, 25 bp, Artificial
  Probe
acgcacttatcaggaacgcctcgat

SEQ ID NO: 181841 - DNA, 25 bp, Artificial
  Probe
gctgcaactggcaaacctgccgacg

SEQ ID NO: 181842 - DNA, 25 bp, Artificial
  Probe
cgcacttatcaggaacgcctcgata

SEQ ID NO: 181843 - DNA, 25 bp, Artificial
  Probe
ctgcaactggcaaacctgccgacgc

SEQ ID NO: 181844 - DNA, 25 bp, Artificial
  Probe
gcacttatcaggaacgcctcgatac

SEQ ID NO: 181845 - DNA, 25 bp, Artificial
  Probe
tgcaactggcaaacctgccgacgcc

SEQ ID NO: 181846 - DNA, 25 bp, Artificial
  Probe
acttatcaggaacgcctcgatacgc

SEQ ID NO: 181847 - DNA, 25 bp, Artificial
  Probe
gcaactggcaaacctgccgacgccg

SEQ ID NO: 181848 - DNA, 25 bp, Artificial
  Probe
cttatcaggaacgcctcgatacgct

SEQ ID NO: 181849 - DNA, 25 bp, Artificial
  Probe
ctgccgacgccgccggaaagcgtgc

SEQ ID NO: 181850 - DNA, 25 bp, Artificial
  Probe
ttatcaggaacgcctcgatacgctg

SEQ ID NO: 181851 - DNA, 25 bp, Artificial
  Probe
tgccgacgccgccggaaagcgtgcc

SEQ ID NO: 181852 - DNA, 25 bp, Artificial
  Probe
atcaggaacgcctcgatacgctgga

SEQ ID NO: 181853 - DNA, 25 bp, Artificial
  Probe
gccgacgccgccggaaagcgtgcca

SEQ ID NO: 181854 - DNA, 25 bp, Artificial
  Probe
tcaggaacgcctcgatacgctggaa

SEQ ID NO: 181855 - DNA, 25 bp, Artificial
  Probe
gacgccgccggaaagcgtgccaatc

SEQ ID NO: 181856 - DNA, 25 bp, Artificial
  Probe
cgcctcgatacgctggaaaaagtgc

SEQ ID NO: 181857 - DNA, 25 bp, Artificial
  Probe
cgccgccggaaagcgtgccaatcaa

SEQ ID NO: 181858 - DNA, 25 bp, Artificial
  Probe
gcctcgatacgctggaaaaagtgcg

SEQ ID NO: 181859 - DNA, 25 bp, Artificial
  Probe
gccgccggaaagcgtgccaatcaac

SEQ ID NO: 181860 - DNA, 25 bp, Artificial
  Probe
ctcgatacgctggaaaaagtgcgcg

SEQ ID NO: 181861 - DNA, 25 bp, Artificial
  Probe
ccgccggaaagcgtgccaatcaaca

SEQ ID NO: 181862 - DNA, 25 bp, Artificial
  Probe
tacgctggaaaaagtgcgcgatgcc

SEQ ID NO: 181863 - DNA, 25 bp, Artificial
  Probe
cgccggaaagcgtgccaatcaacat

SEQ ID NO: 181864 - DNA, 25 bp, Artificial
  Probe
aaagtgcgcgatgccgggatcaaag

SEQ ID NO: 181865 - DNA, 25 bp, Artificial
  Probe
gccggaaagcgtgccaatcaacatg

SEQ ID NO: 181866 - DNA, 25 bp, Artificial
  Probe
aggcgtgtatgacgctgggcacgtt

SEQ ID NO: 181867 - DNA, 25 bp, Artificial
  Probe
aagtgcgcgatgccgggatcaaagt

SEQ ID NO: 181868 - DNA, 25 bp, Artificial
  Probe
cggaaagcgtgccaatcaacatgct

SEQ ID NO: 181869 - DNA, 25 bp, Artificial
  Probe
cgtgtatgacgctgggcacgttgag

SEQ ID NO: 181870 - DNA, 25 bp, Artificial
  Probe
agtgcgcgatgccgggatcaaagtc

SEQ ID NO: 181871 - DNA, 25 bp, Artificial
  Probe
ggaaagcgtgccaatcaacatgctg

SEQ ID NO: 181872 - DNA, 25 bp, Artificial
  Probe
tgtatgacgctgggcacgttgagtg

SEQ ID NO: 181873 - DNA, 25 bp, Artificial
  Probe
tgcgcgatgccgggatcaaagtctg

SEQ ID NO: 181874 - DNA, 25 bp, Artificial
  Probe
aaagcgtgccaatcaacatgctggt

SEQ ID NO: 181875 - DNA, 25 bp, Artificial
  Probe
tatgacgctgggcacgttgagtgaa

SEQ ID NO: 181876 - DNA, 25 bp, Artificial
  Probe
gcgcgatgccgggatcaaagtctgt

SEQ ID NO: 181877 - DNA, 25 bp, Artificial
  Probe
agcgtgccaatcaacatgctggtga

SEQ ID NO: 181878 - DNA, 25 bp, Artificial
  Probe
tgacgctgggcacgttgagtgaatc

SEQ ID NO: 181879 - DNA, 25 bp, Artificial
  Probe
cgcgatgccgggatcaaagtctgtt

SEQ ID NO: 181880 - DNA, 25 bp, Artificial
  Probe
gcgtgccaatcaacatgctggtgaa

SEQ ID NO: 181881 - DNA, 25 bp, Artificial
  Probe
acgctgggcacgttgagtgaatctc

SEQ ID NO: 181882 - DNA, 25 bp, Artificial
  Probe
gcgatgccgggatcaaagtctgttc

SEQ ID NO: 181883 - DNA, 25 bp, Artificial
  Probe
cgtgccaatcaacatgctggtgaag

SEQ ID NO: 181884 - DNA, 25 bp, Artificial
  Probe
gctgggcacgttgagtgaatctcag

SEQ ID NO: 181885 - DNA, 25 bp, Artificial
  Probe
cgatgccgggatcaaagtctgttct

SEQ ID NO: 181886 - DNA, 25 bp, Artificial
  Probe
tgccaatcaacatgctggtgaaggt

SEQ ID NO: 181887 - DNA, 25 bp, Artificial
  Probe
cgttgagtgaatctcaggcgcagcg

SEQ ID NO: 181888 - DNA, 25 bp, Artificial
  Probe
atgccgggatcaaagtctgttctgg

SEQ ID NO: 181889 - DNA, 25 bp, Artificial
  Probe
gccaatcaacatgctggtgaaggtg

SEQ ID NO: 181890 - DNA, 25 bp, Artificial
  Probe
tgagtgaatctcaggcgcagcgcct

SEQ ID NO: 181891 - DNA, 25 bp, Artificial
  Probe
tgccgggatcaaagtctgttctggc

SEQ ID NO: 181892 - DNA, 25 bp, Artificial
  Probe
caatcaacatgctggtgaaggtgaa

SEQ ID NO: 181893 - DNA, 25 bp, Artificial
  Probe
agtgaatctcaggcgcagcgcctcg

SEQ ID NO: 181894 - DNA, 25 bp, Artificial
  Probe
cgggatcaaagtctgttctggcggc

SEQ ID NO: 181895 - DNA, 25 bp, Artificial
  Probe
aatcaacatgctggtgaaggtgaaa

SEQ ID NO: 181896 - DNA, 25 bp, Artificial
  Probe
tgaatctcaggcgcagcgcctcgcg

SEQ ID NO: 181897 - DNA, 25 bp, Artificial
  Probe
ggatcaaagtctgttctggcggcat

SEQ ID NO: 181898 - DNA, 25 bp, Artificial
  Probe
tcaacatgctggtgaaggtgaaagg

SEQ ID NO: 181899 - DNA, 25 bp, Artificial
  Probe
aatctcaggcgcagcgcctcgcgaa

SEQ ID NO: 181900 - DNA, 25 bp, Artificial
  Probe
gatcaaagtctgttctggcggcatt

SEQ ID NO: 181901 - DNA, 25 bp, Artificial
  Probe
caacatgctggtgaaggtgaaaggc

SEQ ID NO: 181902 - DNA, 25 bp, Artificial
  Probe
tctcaggcgcagcgcctcgcgaacg

SEQ ID NO: 181903 - DNA, 25 bp, Artificial
  Probe
atcaaagtctgttctggcggcattg

SEQ ID NO: 181904 - DNA, 25 bp, Artificial
  Probe
agcgcctcgcgaacgccgggctgga

SEQ ID NO: 181905 - DNA, 25 bp, Artificial
  Probe
tcaaagtctgttctggcggcattgt

SEQ ID NO: 181906 - DNA, 25 bp, Artificial
  Probe
gcgcctcgcgaacgccgggctggat

SEQ ID NO: 181907 - DNA, 25 bp, Artificial
  Probe
caaagtctgttctggcggcattgtg

SEQ ID NO: 181908 - DNA, 25 bp, Artificial
  Probe
gcctcgcgaacgccgggctggatta

SEQ ID NO: 181909 - DNA, 25 bp, Artificial
  Probe
aagtctgttctggcggcattgtggg

SEQ ID NO: 181910 - DNA, 25 bp, Artificial
  Probe
tcgcgaacgccgggctggattacta

SEQ ID NO: 181911 - DNA, 25 bp, Artificial
  Probe
agtctgttctggcggcattgtgggc

SEQ ID NO: 181912 - DNA, 25 bp, Artificial
  Probe
gctggattactacaaccacaacctg

SEQ ID NO: 181913 - DNA, 25 bp, Artificial
  Probe
gtctgttctggcggcattgtgggct

SEQ ID NO: 181914 - DNA, 25 bp, Artificial
  Probe
tggattactacaaccacaacctgga

SEQ ID NO: 181915 - DNA, 25 bp, Artificial
  Probe
ctgttctggcggcattgtgggctta

SEQ ID NO: 181916 - DNA, 25 bp, Artificial
  Probe
gattactacaaccacaacctggaca

SEQ ID NO: 181917 - DNA, 25 bp, Artificial
  Probe
tgttctggcggcattgtgggcttag

SEQ ID NO: 181918 - DNA, 25 bp, Artificial
  Probe
gagttttacggcaatatcatcacca

SEQ ID NO: 181919 - DNA, 25 bp, Artificial
  Probe
gcggcattgtgggcttaggcgaaac

SEQ ID NO: 181920 - DNA, 25 bp, Artificial
  Probe
gttttacggcaatatcatcaccaca

SEQ ID NO: 181921 - DNA, 25 bp, Artificial
  Probe
gtaaaagatcgcgccggattattgc

SEQ ID NO: 181922 - DNA, 25 bp, Artificial
  Probe
ttttacggcaatatcatcaccacac

SEQ ID NO: 181923 - DNA, 25 bp, Artificial
  Probe
aagatcgcgccggattattgctgca

SEQ ID NO: 181924 - DNA, 25 bp, Artificial
  Probe
tttacggcaatatcatcaccacacg

SEQ ID NO: 181925 - DNA, 25 bp, Artificial
  Probe
agatcgcgccggattattgctgcaa

SEQ ID NO: 181926 - DNA, 25 bp, Artificial
  Probe
ttacggcaatatcatcaccacacgc

SEQ ID NO: 181927 - DNA, 25 bp, Artificial
  Probe
atcgcgccggattattgctgcaact

SEQ ID NO: 181928 - DNA, 25 bp, Artificial
  Probe
acggcaatatcatcaccacacgcac

SEQ ID NO: 181929 - DNA, 25 bp, Artificial
  Probe
tcgcgccggattattgctgcaactg

SEQ ID NO: 181930 - DNA, 25 bp, Artificial
  Probe
cggcaatatcatcaccacacgcact

SEQ ID NO: 181931 - DNA, 25 bp, Artificial
  Probe
cgcgccggattattgctgcaactgg

SEQ ID NO: 181932 - DNA, 25 bp, Artificial
  Probe
ggcaatatcatcaccacacgcactt

SEQ ID NO: 181933 - DNA, 25 bp, Artificial
  Probe
gcgccggattattgctgcaactggc

SEQ ID NO: 181934 - DNA, 25 bp, Artificial
  Probe
caatatcatcaccacacgcacttat

SEQ ID NO: 181935 - DNA, 25 bp, Artificial
  Probe
cgccggattattgctgcaactggca

SEQ ID NO: 181936 - DNA, 25 bp, Artificial
  Probe
tcatcaccacacgcacttatcagga

SEQ ID NO: 181937 - DNA, 25 bp, Artificial
  Probe
ccggattattgctgcaactggcaaa

SEQ ID NO: 181938 - DNA, 25 bp, Artificial
  Probe
tcaccacacgcacttatcaggaacg

SEQ ID NO: 181939 - DNA, 25 bp, Artificial
  Probe
cggattattgctgcaactggcaaac

SEQ ID NO: 181940 - DNA, 25 bp, Artificial
  Probe
caccacacgcacttatcaggaacgc

SEQ ID NO: 181941 - DNA, 25 bp, Artificial
  Probe
attattgctgcaactggcaaacctg

SEQ ID NO: 181942 - DNA, 25 bp, Artificial
  Probe
accacacgcacttatcaggaacgcc

SEQ ID NO: 181943 - DNA, 25 bp, Artificial
  Probe
ttattgctgcaactggcaaacctgc

SEQ ID NO: 181944 - DNA, 25 bp, Artificial
  Probe
ccacacgcacttatcaggaacgcct

SEQ ID NO: 181945 - DNA, 25 bp, Artificial
  Probe
tattgctgcaactggcaaacctgcc

SEQ ID NO: 181946 - DNA, 25 bp, Artificial
  Probe
cacacgcacttatcaggaacgcctc

SEQ ID NO: 181947 - DNA, 25 bp, Artificial
  Probe
attgctgcaactggcaaacctgccg

SEQ ID NO: 181948 - DNA, 25 bp, Artificial
  Probe
cacgcacttatcaggaacgcctcga

SEQ ID NO: 181949 - DNA, 25 bp, Artificial
  Probe
tgctgcaactggcaaacctgccgac

SEQ ID NO: 181950 - DNA, 25 bp, Artificial
  Probe
acgcacttatcaggaacgcctcgat

SEQ ID NO: 181951 - DNA, 25 bp, Artificial
  Probe
gctgcaactggcaaacctgccgacg

SEQ ID NO: 181952 - DNA, 25 bp, Artificial
  Probe
cgcacttatcaggaacgcctcgata

SEQ ID NO: 181953 - DNA, 25 bp, Artificial
  Probe
ctgcaactggcaaacctgccgacgc

SEQ ID NO: 181954 - DNA, 25 bp, Artificial
  Probe
gcacttatcaggaacgcctcgatac

SEQ ID NO: 181955 - DNA, 25 bp, Artificial
  Probe
tgcaactggcaaacctgccgacgcc

SEQ ID NO: 181956 - DNA, 25 bp, Artificial
  Probe
acttatcaggaacgcctcgatacgc

SEQ ID NO: 181957 - DNA, 25 bp, Artificial
  Probe
gcaactggcaaacctgccgacgccg

SEQ ID NO: 181958 - DNA, 25 bp, Artificial
  Probe
cttatcaggaacgcctcgatacgct

SEQ ID NO: 181959 - DNA, 25 bp, Artificial
  Probe
ctgccgacgccgccggaaagcgtgc

SEQ ID NO: 181960 - DNA, 25 bp, Artificial
  Probe
ttatcaggaacgcctcgatacgctg

SEQ ID NO: 181961 - DNA, 25 bp, Artificial
  Probe
tgccgacgccgccggaaagcgtgcc

SEQ ID NO: 181962 - DNA, 25 bp, Artificial
  Probe
atcaggaacgcctcgatacgctgga

SEQ ID NO: 181963 - DNA, 25 bp, Artificial
  Probe
gccgacgccgccggaaagcgtgcca

SEQ ID NO: 181964 - DNA, 25 bp, Artificial
  Probe
tcaggaacgcctcgatacgctggaa

SEQ ID NO: 181965 - DNA, 25 bp, Artificial
  Probe
gacgccgccggaaagcgtgccaatc

SEQ ID NO: 181966 - DNA, 25 bp, Artificial
  Probe
cgcctcgatacgctggaaaaagtgc

SEQ ID NO: 181967 - DNA, 25 bp, Artificial
  Probe
cgccgccggaaagcgtgccaatcaa

SEQ ID NO: 181968 - DNA, 25 bp, Artificial
  Probe
gcctcgatacgctggaaaaagtgcg

SEQ ID NO: 181969 - DNA, 25 bp, Artificial
  Probe
gccgccggaaagcgtgccaatcaac

SEQ ID NO: 181970 - DNA, 25 bp, Artificial
  Probe
ctcgatacgctggaaaaagtgcgcg

SEQ ID NO: 181971 - DNA, 25 bp, Artificial
  Probe
ccgccggaaagcgtgccaatcaaca

SEQ ID NO: 181972 - DNA, 25 bp, Artificial
  Probe
tacgctggaaaaagtgcgcgatgcc

SEQ ID NO: 181973 - DNA, 25 bp, Artificial
  Probe
cgccggaaagcgtgccaatcaacat

SEQ ID NO: 181974 - DNA, 25 bp, Artificial
  Probe
aaagtgcgcgatgccgggatcaaag

SEQ ID NO: 181975 - DNA, 25 bp, Artificial
  Probe
gccggaaagcgtgccaatcaacatg

SEQ ID NO: 181976 - DNA, 25 bp, Artificial
  Probe
aggcgtgtatgacgctgggcacgtt

SEQ ID NO: 181977 - DNA, 25 bp, Artificial
  Probe
aagtgcgcgatgccgggatcaaagt

SEQ ID NO: 181978 - DNA, 25 bp, Artificial
  Probe
cggaaagcgtgccaatcaacatgct

SEQ ID NO: 181979 - DNA, 25 bp, Artificial
  Probe
cgtgtatgacgctgggcacgttgag

SEQ ID NO: 181980 - DNA, 25 bp, Artificial
  Probe
agtgcgcgatgccgggatcaaagtc

SEQ ID NO: 181981 - DNA, 25 bp, Artificial
  Probe
ggaaagcgtgccaatcaacatgctg

SEQ ID NO: 181982 - DNA, 25 bp, Artificial
  Probe
tgtatgacgctgggcacgttgagtg

SEQ ID NO: 181983 - DNA, 25 bp, Artificial
  Probe
tgcgcgatgccgggatcaaagtctg

SEQ ID NO: 181984 - DNA, 25 bp, Artificial
  Probe
aaagcgtgccaatcaacatgctggt

SEQ ID NO: 181985 - DNA, 25 bp, Artificial
  Probe
tatgacgctgggcacgttgagtgaa

SEQ ID NO: 181986 - DNA, 25 bp, Artificial
  Probe
gcgcgatgccgggatcaaagtctgt

SEQ ID NO: 181987 - DNA, 25 bp, Artificial
  Probe
agcgtgccaatcaacatgctggtga

SEQ ID NO: 181988 - DNA, 25 bp, Artificial
  Probe
tgacgctgggcacgttgagtgaatc

SEQ ID NO: 181989 - DNA, 25 bp, Artificial
  Probe
cgcgatgccgggatcaaagtctgtt

SEQ ID NO: 181990 - DNA, 25 bp, Artificial
  Probe
gcgtgccaatcaacatgctggtgaa

SEQ ID NO: 181991 - DNA, 25 bp, Artificial
  Probe
acgctgggcacgttgagtgaatctc

SEQ ID NO: 181992 - DNA, 25 bp, Artificial
  Probe
gcgatgccgggatcaaagtctgttc

SEQ ID NO: 181993 - DNA, 25 bp, Artificial
  Probe
cgtgccaatcaacatgctggtgaag

SEQ ID NO: 181994 - DNA, 25 bp, Artificial
  Probe
gctgggcacgttgagtgaatctcag

SEQ ID NO: 181995 - DNA, 25 bp, Artificial
  Probe
cgatgccgggatcaaagtctgttct

SEQ ID NO: 181996 - DNA, 25 bp, Artificial
  Probe
tgccaatcaacatgctggtgaaggt

SEQ ID NO: 181997 - DNA, 25 bp, Artificial
  Probe
cgttgagtgaatctcaggcgcagcg

SEQ ID NO: 181998 - DNA, 25 bp, Artificial
  Probe
atgccgggatcaaagtctgttctgg

SEQ ID NO: 181999 - DNA, 25 bp, Artificial
  Probe
gccaatcaacatgctggtgaaggtg

SEQ ID NO: 182000 - DNA, 25 bp, Artificial
  Probe
tgagtgaatctcaggcgcagcgcct

SEQ ID NO: 182001 - DNA, 25 bp, Artificial
  Probe
tgccgggatcaaagtctgttctggc

SEQ ID NO: 182002 - DNA, 25 bp, Artificial
  Probe
caatcaacatgctggtgaaggtgaa

SEQ ID NO: 182003 - DNA, 25 bp, Artificial
  Probe
agtgaatctcaggcgcagcgcctcg

SEQ ID NO: 182004 - DNA, 25 bp, Artificial
  Probe
cgggatcaaagtctgttctggcggc

SEQ ID NO: 182005 - DNA, 25 bp, Artificial
  Probe
aatcaacatgctggtgaaggtgaaa

SEQ ID NO: 182006 - DNA, 25 bp, Artificial
  Probe
tgaatctcaggcgcagcgcctcgcg

SEQ ID NO: 182007 - DNA, 25 bp, Artificial
  Probe
ggatcaaagtctgttctggcggcat

SEQ ID NO: 182008 - DNA, 25 bp, Artificial
  Probe
tcaacatgctggtgaaggtgaaagg

SEQ ID NO: 182009 - DNA, 25 bp, Artificial
  Probe
aatctcaggcgcagcgcctcgcgaa

SEQ ID NO: 182010 - DNA, 25 bp, Artificial
  Probe
gatcaaagtctgttctggcggcatt

SEQ ID NO: 182011 - DNA, 25 bp, Artificial
  Probe
caacatgctggtgaaggtgaaaggc

SEQ ID NO: 182012 - DNA, 25 bp, Artificial
  Probe
tctcaggcgcagcgcctcgcgaacg

SEQ ID NO: 182013 - DNA, 25 bp, Artificial
  Probe
atcaaagtctgttctggcggcattg

SEQ ID NO: 182014 - DNA, 25 bp, Artificial
  Probe
agcgcctcgcgaacgccgggctgga

SEQ ID NO: 182015 - DNA, 25 bp, Artificial
  Probe
tcaaagtctgttctggcggcattgt

SEQ ID NO: 182016 - DNA, 25 bp, Artificial
  Probe
gcgcctcgcgaacgccgggctggat

SEQ ID NO: 182017 - DNA, 25 bp, Artificial
  Probe
caaagtctgttctggcggcattgtg

SEQ ID NO: 182018 - DNA, 25 bp, Artificial
  Probe
gcctcgcgaacgccgggctggatta

SEQ ID NO: 182019 - DNA, 25 bp, Artificial
  Probe
aagtctgttctggcggcattgtggg

SEQ ID NO: 182020 - DNA, 25 bp, Artificial
  Probe
tcgcgaacgccgggctggattacta

SEQ ID NO: 182021 - DNA, 25 bp, Artificial
  Probe
agtctgttctggcggcattgtgggc

SEQ ID NO: 182022 - DNA, 25 bp, Artificial
  Probe
gctggattactacaaccacaacctg

SEQ ID NO: 182023 - DNA, 25 bp, Artificial
  Probe
gtctgttctggcggcattgtgggct

SEQ ID NO: 182024 - DNA, 25 bp, Artificial
  Probe
tggattactacaaccacaacctgga

SEQ ID NO: 182025 - DNA, 25 bp, Artificial
  Probe
ctgttctggcggcattgtgggctta

SEQ ID NO: 182026 - DNA, 25 bp, Artificial
  Probe
gattactacaaccacaacctggaca

SEQ ID NO: 182027 - DNA, 25 bp, Artificial
  Probe
tgttctggcggcattgtgggcttag

SEQ ID NO: 182028 - DNA, 25 bp, Artificial
  Probe
gagttttacggcaatatcatcacca

SEQ ID NO: 182029 - DNA, 25 bp, Artificial
  Probe
gcggcattgtgggcttaggcgaaac

SEQ ID NO: 182030 - DNA, 25 bp, Artificial
  Probe
gttttacggcaatatcatcaccaca

SEQ ID NO: 182031 - DNA, 25 bp, Artificial
  Probe
gtaaaagatcgcgccggattattgc

SEQ ID NO: 182032 - DNA, 25 bp, Artificial
  Probe
ttttacggcaatatcatcaccacac

SEQ ID NO: 182033 - DNA, 25 bp, Artificial
  Probe
aagatcgcgccggattattgctgca

SEQ ID NO: 182034 - DNA, 25 bp, Artificial
  Probe
tttacggcaatatcatcaccacacg

SEQ ID NO: 182035 - DNA, 25 bp, Artificial
  Probe
agatcgcgccggattattgctgcaa

SEQ ID NO: 182036 - DNA, 25 bp, Artificial
  Probe
ttacggcaatatcatcaccacacgc

SEQ ID NO: 182037 - DNA, 25 bp, Artificial
  Probe
atcgcgccggattattgctgcaact

SEQ ID NO: 182038 - DNA, 25 bp, Artificial
  Probe
acggcaatatcatcaccacacgcac

SEQ ID NO: 182039 - DNA, 25 bp, Artificial
  Probe
tcgcgccggattattgctgcaactg

SEQ ID NO: 182040 - DNA, 25 bp, Artificial
  Probe
cggcaatatcatcaccacacgcact

SEQ ID NO: 182041 - DNA, 25 bp, Artificial
  Probe
cgcgccggattattgctgcaactgg

SEQ ID NO: 182042 - DNA, 25 bp, Artificial
  Probe
ggcaatatcatcaccacacgcactt

SEQ ID NO: 182043 - DNA, 25 bp, Artificial
  Probe
gcgccggattattgctgcaactggc

SEQ ID NO: 182044 - DNA, 25 bp, Artificial
  Probe
caatatcatcaccacacgcacttat

SEQ ID NO: 182045 - DNA, 25 bp, Artificial
  Probe
cgccggattattgctgcaactggca

SEQ ID NO: 182046 - DNA, 25 bp, Artificial
  Probe
tcatcaccacacgcacttatcagga

SEQ ID NO: 182047 - DNA, 25 bp, Artificial
  Probe
ccggattattgctgcaactggcaaa

SEQ ID NO: 182048 - DNA, 25 bp, Artificial
  Probe
tcaccacacgcacttatcaggaacg

SEQ ID NO: 182049 - DNA, 25 bp, Artificial
  Probe
cggattattgctgcaactggcaaac

SEQ ID NO: 182050 - DNA, 25 bp, Artificial
  Probe
caccacacgcacttatcaggaacgc

SEQ ID NO: 182051 - DNA, 25 bp, Artificial
  Probe
attattgctgcaactggcaaacctg

SEQ ID NO: 182052 - DNA, 25 bp, Artificial
  Probe
accacacgcacttatcaggaacgcc

SEQ ID NO: 182053 - DNA, 25 bp, Artificial
  Probe
ttattgctgcaactggcaaacctgc

SEQ ID NO: 182054 - DNA, 25 bp, Artificial
  Probe
ccacacgcacttatcaggaacgcct

SEQ ID NO: 182055 - DNA, 25 bp, Artificial
  Probe
tattgctgcaactggcaaacctgcc

SEQ ID NO: 182056 - DNA, 25 bp, Artificial
  Probe
cacacgcacttatcaggaacgcctc

SEQ ID NO: 182057 - DNA, 25 bp, Artificial
  Probe
attgctgcaactggcaaacctgccg

SEQ ID NO: 182058 - DNA, 25 bp, Artificial
  Probe
cacgcacttatcaggaacgcctcga

SEQ ID NO: 182059 - DNA, 25 bp, Artificial
  Probe
tgctgcaactggcaaacctgccgac

SEQ ID NO: 182060 - DNA, 25 bp, Artificial
  Probe
acgcacttatcaggaacgcctcgat

SEQ ID NO: 182061 - DNA, 25 bp, Artificial
  Probe
gctgcaactggcaaacctgccgacg

SEQ ID NO: 182062 - DNA, 25 bp, Artificial
  Probe
cgcacttatcaggaacgcctcgata

SEQ ID NO: 182063 - DNA, 25 bp, Artificial
  Probe
ctgcaactggcaaacctgccgacgc

SEQ ID NO: 182064 - DNA, 25 bp, Artificial
  Probe
gcacttatcaggaacgcctcgatac

SEQ ID NO: 182065 - DNA, 25 bp, Artificial
  Probe
tgcaactggcaaacctgccgacgcc

SEQ ID NO: 182066 - DNA, 25 bp, Artificial
  Probe
acttatcaggaacgcctcgatacgc

SEQ ID NO: 182067 - DNA, 25 bp, Artificial
  Probe
gcaactggcaaacctgccgacgccg

SEQ ID NO: 182068 - DNA, 25 bp, Artificial
  Probe
cttatcaggaacgcctcgatacgct

SEQ ID NO: 182069 - DNA, 25 bp, Artificial
  Probe
ctgccgacgccgccggaaagcgtgc

SEQ ID NO: 182070 - DNA, 25 bp, Artificial
  Probe
ttatcaggaacgcctcgatacgctg

SEQ ID NO: 182071 - DNA, 25 bp, Artificial
  Probe
tgccgacgccgccggaaagcgtgcc

SEQ ID NO: 182072 - DNA, 25 bp, Artificial
  Probe
atcaggaacgcctcgatacgctgga

SEQ ID NO: 182073 - DNA, 25 bp, Artificial
  Probe
gccgacgccgccggaaagcgtgcca

SEQ ID NO: 182074 - DNA, 25 bp, Artificial
  Probe
tcaggaacgcctcgatacgctggaa

SEQ ID NO: 182075 - DNA, 25 bp, Artificial
  Probe
gacgccgccggaaagcgtgccaatc

SEQ ID NO: 182076 - DNA, 25 bp, Artificial
  Probe
cgcctcgatacgctggaaaaagtgc

SEQ ID NO: 182077 - DNA, 25 bp, Artificial
  Probe
cgccgccggaaagcgtgccaatcaa

SEQ ID NO: 182078 - DNA, 25 bp, Artificial
  Probe
gcctcgatacgctggaaaaagtgcg

SEQ ID NO: 182079 - DNA, 25 bp, Artificial
  Probe
gccgccggaaagcgtgccaatcaac

SEQ ID NO: 182080 - DNA, 25 bp, Artificial
  Probe
ctcgatacgctggaaaaagtgcgcg

SEQ ID NO: 182081 - DNA, 25 bp, Artificial
  Probe
ccgccggaaagcgtgccaatcaaca

SEQ ID NO: 182082 - DNA, 25 bp, Artificial
  Probe
tacgctggaaaaagtgcgcgatgcc

SEQ ID NO: 182083 - DNA, 25 bp, Artificial
  Probe
cgccggaaagcgtgccaatcaacat

SEQ ID NO: 182084 - DNA, 25 bp, Artificial
  Probe
aaagtgcgcgatgccgggatcaaag

SEQ ID NO: 182085 - DNA, 25 bp, Artificial
  Probe
gccggaaagcgtgccaatcaacatg

SEQ ID NO: 182086 - DNA, 25 bp, Artificial
  Probe
aggcgtgtatgacgctgggcacgtt

SEQ ID NO: 182087 - DNA, 25 bp, Artificial
  Probe
aagtgcgcgatgccgggatcaaagt

SEQ ID NO: 182088 - DNA, 25 bp, Artificial
  Probe
cggaaagcgtgccaatcaacatgct

SEQ ID NO: 182089 - DNA, 25 bp, Artificial
  Probe
cgtgtatgacgctgggcacgttgag

SEQ ID NO: 182090 - DNA, 25 bp, Artificial
  Probe
agtgcgcgatgccgggatcaaagtc

SEQ ID NO: 182091 - DNA, 25 bp, Artificial
  Probe
ggaaagcgtgccaatcaacatgctg

SEQ ID NO: 182092 - DNA, 25 bp, Artificial
  Probe
tgtatgacgctgggcacgttgagtg

SEQ ID NO: 182093 - DNA, 25 bp, Artificial
  Probe
tgcgcgatgccgggatcaaagtctg

SEQ ID NO: 182094 - DNA, 25 bp, Artificial
  Probe
aaagcgtgccaatcaacatgctggt

SEQ ID NO: 182095 - DNA, 25 bp, Artificial
  Probe
tatgacgctgggcacgttgagtgaa

SEQ ID NO: 182096 - DNA, 25 bp, Artificial
  Probe
gcgcgatgccgggatcaaagtctgt

SEQ ID NO: 182097 - DNA, 25 bp, Artificial
  Probe
agcgtgccaatcaacatgctggtga

SEQ ID NO: 182098 - DNA, 25 bp, Artificial
  Probe
tgacgctgggcacgttgagtgaatc

SEQ ID NO: 182099 - DNA, 25 bp, Artificial
  Probe
cgcgatgccgggatcaaagtctgtt

SEQ ID NO: 182100 - DNA, 25 bp, Artificial
  Probe
gcgtgccaatcaacatgctggtgaa

SEQ ID NO: 182101 - DNA, 25 bp, Artificial
  Probe
acgctgggcacgttgagtgaatctc

SEQ ID NO: 182102 - DNA, 25 bp, Artificial
  Probe
gcgatgccgggatcaaagtctgttc

SEQ ID NO: 182103 - DNA, 25 bp, Artificial
  Probe
cgtgccaatcaacatgctggtgaag

SEQ ID NO: 182104 - DNA, 25 bp, Artificial
  Probe
gctgggcacgttgagtgaatctcag

SEQ ID NO: 182105 - DNA, 25 bp, Artificial
  Probe
cgatgccgggatcaaagtctgttct

SEQ ID NO: 182106 - DNA, 25 bp, Artificial
  Probe
tgccaatcaacatgctggtgaaggt

SEQ ID NO: 182107 - DNA, 25 bp, Artificial
  Probe
cgttgagtgaatctcaggcgcagcg

SEQ ID NO: 182108 - DNA, 25 bp, Artificial
  Probe
atgccgggatcaaagtctgttctgg

SEQ ID NO: 182109 - DNA, 25 bp, Artificial
  Probe
gccaatcaacatgctggtgaaggtg

SEQ ID NO: 182110 - DNA, 25 bp, Artificial
  Probe
tgagtgaatctcaggcgcagcgcct

SEQ ID NO: 182111 - DNA, 25 bp, Artificial
  Probe
tgccgggatcaaagtctgttctggc

SEQ ID NO: 182112 - DNA, 25 bp, Artificial
  Probe
caatcaacatgctggtgaaggtgaa

SEQ ID NO: 182113 - DNA, 25 bp, Artificial
  Probe
agtgaatctcaggcgcagcgcctcg

SEQ ID NO: 182114 - DNA, 25 bp, Artificial
  Probe
cgggatcaaagtctgttctggcggc

SEQ ID NO: 182115 - DNA, 25 bp, Artificial
  Probe
aatcaacatgctggtgaaggtgaaa

SEQ ID NO: 182116 - DNA, 25 bp, Artificial
  Probe
tgaatctcaggcgcagcgcctcgcg

SEQ ID NO: 182117 - DNA, 25 bp, Artificial
  Probe
ggatcaaagtctgttctggcggcat

SEQ ID NO: 182118 - DNA, 25 bp, Artificial
  Probe
tcaacatgctggtgaaggtgaaagg

SEQ ID NO: 182119 - DNA, 25 bp, Artificial
  Probe
aatctcaggcgcagcgcctcgcgaa

SEQ ID NO: 182120 - DNA, 25 bp, Artificial
  Probe
gatcaaagtctgttctggcggcatt

SEQ ID NO: 182121 - DNA, 25 bp, Artificial
  Probe
caacatgctggtgaaggtgaaaggc

SEQ ID NO: 182122 - DNA, 25 bp, Artificial
  Probe
tctcaggcgcagcgcctcgcgaacg

SEQ ID NO: 182123 - DNA, 25 bp, Artificial
  Probe
atcaaagtctgttctggcggcattg

SEQ ID NO: 182124 - DNA, 25 bp, Artificial
  Probe
agcgcctcgcgaacgccgggctgga

SEQ ID NO: 182125 - DNA, 25 bp, Artificial
  Probe
tcaaagtctgttctggcggcattgt

SEQ ID NO: 182126 - DNA, 25 bp, Artificial
  Probe
gcgcctcgcgaacgccgggctggat

SEQ ID NO: 182127 - DNA, 25 bp, Artificial
  Probe
caaagtctgttctggcggcattgtg

SEQ ID NO: 182128 - DNA, 25 bp, Artificial
  Probe
gcctcgcgaacgccgggctggatta

SEQ ID NO: 182129 - DNA, 25 bp, Artificial
  Probe
aagtctgttctggcggcattgtggg

SEQ ID NO: 182130 - DNA, 25 bp, Artificial
  Probe
tcgcgaacgccgggctggattacta

SEQ ID NO: 182131 - DNA, 25 bp, Artificial
  Probe
agtctgttctggcggcattgtgggc

SEQ ID NO: 182132 - DNA, 25 bp, Artificial
  Probe
gctggattactacaaccacaacctg

SEQ ID NO: 182133 - DNA, 25 bp, Artificial
  Probe
gtctgttctggcggcattgtgggct

SEQ ID NO: 182134 - DNA, 25 bp, Artificial
  Probe
tggattactacaaccacaacctgga

SEQ ID NO: 182135 - DNA, 25 bp, Artificial
  Probe
ctgttctggcggcattgtgggctta

SEQ ID NO: 182136 - DNA, 25 bp, Artificial
  Probe
gattactacaaccacaacctggaca

SEQ ID NO: 182137 - DNA, 25 bp, Artificial
  Probe
tgttctggcggcattgtgggcttag

SEQ ID NO: 182138 - DNA, 25 bp, Artificial
  Probe
gagttttacggcaatatcatcacca

SEQ ID NO: 182139 - DNA, 25 bp, Artificial
  Probe
gcggcattgtgggcttaggcgaaac

SEQ ID NO: 182140 - DNA, 25 bp, Artificial
  Probe
gttttacggcaatatcatcaccaca

SEQ ID NO: 182141 - DNA, 25 bp, Artificial
  Probe
gtaaaagatcgcgccggattattgc

SEQ ID NO: 182142 - DNA, 25 bp, Artificial
  Probe
ttttacggcaatatcatcaccacac

SEQ ID NO: 182143 - DNA, 25 bp, Artificial
  Probe
aagatcgcgccggattattgctgca

SEQ ID NO: 182144 - DNA, 25 bp, Artificial
  Probe
tttacggcaatatcatcaccacacg

SEQ ID NO: 182145 - DNA, 25 bp, Artificial
  Probe
agatcgcgccggattattgctgcaa

SEQ ID NO: 182146 - DNA, 25 bp, Artificial
  Probe
ttacggcaatatcatcaccacacgc

SEQ ID NO: 182147 - DNA, 25 bp, Artificial
  Probe
atcgcgccggattattgctgcaact

SEQ ID NO: 182148 - DNA, 25 bp, Artificial
  Probe
atcaacatcatattcagcccatcac

SEQ ID NO: 182149 - DNA, 25 bp, Artificial
  Probe
ccgcatgctaatcgctttttaccgc

SEQ ID NO: 182150 - DNA, 25 bp, Artificial
  Probe
acccgaactgcatcaggcgtggcag

SEQ ID NO: 182151 - DNA, 25 bp, Artificial
  Probe
tcatattcagcccatcacgctgtgg

SEQ ID NO: 182152 - DNA, 25 bp, Artificial
  Probe
catcacgctgtggtttgatgatgcg

SEQ ID NO: 182153 - DNA, 25 bp, Artificial
  Probe
tcggtgccacgcatcttcatgaagg

SEQ ID NO: 182154 - DNA, 25 bp, Artificial
  Probe
tgcagggatcgttacccgaactgca

SEQ ID NO: 182155 - DNA, 25 bp, Artificial
  Probe
agcgattgcaactggcctggccgca

SEQ ID NO: 182156 - DNA, 25 bp, Artificial
  Probe
aacagcaggggcgatatcctctgac

SEQ ID NO: 182157 - DNA, 25 bp, Artificial
  Probe
atcatattcagcccatcacgctgtg

SEQ ID NO: 182158 - DNA, 25 bp, Artificial
  Probe
ggtgccacgcatcttcatgaagggc

SEQ ID NO: 182159 - DNA, 25 bp, Artificial
  Probe
cgatatcctctgacgtatcatcttt

SEQ ID NO: 182160 - DNA, 25 bp, Artificial
  Probe
gcatcttcatgaagggcgcgacccg

SEQ ID NO: 182161 - DNA, 25 bp, Artificial
  Probe
tgcgctcagtgccatgcgttcgctg

SEQ ID NO: 182162 - DNA, 25 bp, Artificial
  Probe
tccgcatgctaatcgctttttaccg

SEQ ID NO: 182163 - DNA, 25 bp, Artificial
  Probe
cgctcagtgccatgcgttcgctgaa

SEQ ID NO: 182164 - DNA, 25 bp, Artificial
  Probe
agcaggggcgatatcctctgacgta

SEQ ID NO: 182165 - DNA, 25 bp, Artificial
  Probe
gtgccacgcatcttcatgaagggcg

SEQ ID NO: 182166 - DNA, 25 bp, Artificial
  Probe
gtgccatgcgttcgctgaaaggcat

SEQ ID NO: 182167 - DNA, 25 bp, Artificial
  Probe
attgcaactggcctggccgcaacag

SEQ ID NO: 182168 - DNA, 25 bp, Artificial
  Probe
tgcattatcaacatcatattcagcc

SEQ ID NO: 182169 - DNA, 25 bp, Artificial
  Probe
aacgcgttcgcagttgcagcgattg

SEQ ID NO: 182170 - DNA, 25 bp, Artificial
  Probe
aaggcatcggtgccacgcatcttca

SEQ ID NO: 182171 - DNA, 25 bp, Artificial
  Probe
gcaactggcctggccgcaacagcag

SEQ ID NO: 182172 - DNA, 25 bp, Artificial
  Probe
tttaccgccagatgaaatcgaacag

SEQ ID NO: 182173 - DNA, 25 bp, Artificial
  Probe
gctgaacggcgtgcattatcaacat

SEQ ID NO: 182174 - DNA, 25 bp, Artificial
  Probe
atcacgctgtggtttgatgatgcgc

SEQ ID NO: 182175 - DNA, 25 bp, Artificial
  Probe
ttcgctgaaaggcatcggtgccacg

SEQ ID NO: 182176 - DNA, 25 bp, Artificial
  Probe
agtcgctgaacggcgtgcattatca

SEQ ID NO: 182177 - DNA, 25 bp, Artificial
  Probe
ggtggacgagcgtccgcatgctaat

SEQ ID NO: 182178 - DNA, 25 bp, Artificial
  Probe
cacgcatcttcatgaagggcgcgac

SEQ ID NO: 182179 - DNA, 25 bp, Artificial
  Probe
gatatcctctgacgtatcatctttt

SEQ ID NO: 182180 - DNA, 25 bp, Artificial
  Probe
atgaaatcgaacagtcgctgaacgg

SEQ ID NO: 182181 - DNA, 25 bp, Artificial
  Probe
agcgtccgcatgctaatcgcttttt

SEQ ID NO: 182182 - DNA, 25 bp, Artificial
  Probe
acatcatattcagcccatcacgctg

SEQ ID NO: 182183 - DNA, 25 bp, Artificial
  Probe
ccgcaacagcaggggcgatatcctc

SEQ ID NO: 182184 - DNA, 25 bp, Artificial
  Probe
ttgcaactggcctggccgcaacagc

SEQ ID NO: 182185 - DNA, 25 bp, Artificial
  Probe
atgatgcgctcagtgccatgcgttc

SEQ ID NO: 182186 - DNA, 25 bp, Artificial
  Probe
cacgctggtgcagggatcgttaccc

SEQ ID NO: 182187 - DNA, 25 bp, Artificial
  Probe
agcccatcacgctgtggtttgatga

SEQ ID NO: 182188 - DNA, 25 bp, Artificial
  Probe
ttttaccgccagatgaaatcgaaca

SEQ ID NO: 182189 - DNA, 25 bp, Artificial
  Probe
cagtgccatgcgttcgctgaaaggc

SEQ ID NO: 182190 - DNA, 25 bp, Artificial
  Probe
gcgatatcctctgacgtatcatctt

SEQ ID NO: 182191 - DNA, 25 bp, Artificial
  Probe
tgccacgcatcttcatgaagggcgc

SEQ ID NO: 182192 - DNA, 25 bp, Artificial
  Probe
cgtgcattatcaacatcatattcag

SEQ ID NO: 182193 - DNA, 25 bp, Artificial
  Probe
cgttcgcagttgcagcgattgcaac

SEQ ID NO: 182194 - DNA, 25 bp, Artificial
  Probe
gcgtccgcatgctaatcgcttttta

SEQ ID NO: 182195 - DNA, 25 bp, Artificial
  Probe
taacgcgttcgcagttgcagcgatt

SEQ ID NO: 182196 - DNA, 25 bp, Artificial
  Probe
gcgttcgcagttgcagcgattgcaa

SEQ ID NO: 182197 - DNA, 25 bp, Artificial
  Probe
gcagcgattgcaactggcctggccg

SEQ ID NO: 182198 - DNA, 25 bp, Artificial
  Probe
gaaaggcatcggtgccacgcatctt

SEQ ID NO: 182199 - DNA, 25 bp, Artificial
  Probe
gaacggcgtgcattatcaacatcat

SEQ ID NO: 182200 - DNA, 25 bp, Artificial
  Probe
gtttgatgatgcgctcagtgccatg

SEQ ID NO: 182201 - DNA, 25 bp, Artificial
  Probe
gattgcaactggcctggccgcaaca

SEQ ID NO: 182202 - DNA, 25 bp, Artificial
  Probe
tgaaaggcatcggtgccacgcatct

SEQ ID NO: 182203 - DNA, 25 bp, Artificial
  Probe
accacgctggtgcagggatcgttac

SEQ ID NO: 182204 - DNA, 25 bp, Artificial
  Probe
catgaagggcgcgacccgcgaatat

SEQ ID NO: 182205 - DNA, 25 bp, Artificial
  Probe
caacatcatattcagcccatcacgc

SEQ ID NO: 182206 - DNA, 25 bp, Artificial
  Probe
gcaacagcaggggcgatatcctctg

SEQ ID NO: 182207 - DNA, 25 bp, Artificial
  Probe
gcgttcgctgaaaggcatcggtgcc

SEQ ID NO: 182208 - DNA, 25 bp, Artificial
  Probe
ttcatgaagggcgcgacccgcgaat

SEQ ID NO: 182209 - DNA, 25 bp, Artificial
  Probe
gctcagtgccatgcgttcgctgaaa

SEQ ID NO: 182210 - DNA, 25 bp, Artificial
  Probe
attaacgcgttcgcagttgcagcga

SEQ ID NO: 182211 - DNA, 25 bp, Artificial
  Probe
ctcagtgccatgcgttcgctgaaag

SEQ ID NO: 182212 - DNA, 25 bp, Artificial
  Probe
ccatcacgctgtggtttgatgatgc

SEQ ID NO: 182213 - DNA, 25 bp, Artificial
  Probe
tgcgttcgctgaaaggcatcggtgc

SEQ ID NO: 182214 - DNA, 25 bp, Artificial
  Probe
actggcctggccgcaacagcagggg

SEQ ID NO: 182215 - DNA, 25 bp, Artificial
  Probe
aggcatcggtgccacgcatcttcat

SEQ ID NO: 182216 - DNA, 25 bp, Artificial
  Probe
ttatcaacatcatattcagcccatc

SEQ ID NO: 182217 - DNA, 25 bp, Artificial
  Probe
tcgctttttaccgccagatgaaatc

SEQ ID NO: 182218 - DNA, 25 bp, Artificial
  Probe
acggcgtgcattatcaacatcatat

SEQ ID NO: 182219 - DNA, 25 bp, Artificial
  Probe
tattcagcccatcacgctgtggttt

SEQ ID NO: 182220 - DNA, 25 bp, Artificial
  Probe
agttgcagcgattgcaactggcctg

SEQ ID NO: 182221 - DNA, 25 bp, Artificial
  Probe
ggccgcaacagcaggggcgatatcc

SEQ ID NO: 182222 - DNA, 25 bp, Artificial
  Probe
aggggcgatatcctctgacgtatca

SEQ ID NO: 182223 - DNA, 25 bp, Artificial
  Probe
atgcgctcagtgccatgcgttcgct

SEQ ID NO: 182224 - DNA, 25 bp, Artificial
  Probe
acgagcgtccgcatgctaatcgctt

SEQ ID NO: 182225 - DNA, 25 bp, Artificial
  Probe
gcgtgcattatcaacatcatattca

SEQ ID NO: 182226 - DNA, 25 bp, Artificial
  Probe
gggatcgttacccgaactgcatcag

SEQ ID NO: 182227 - DNA, 25 bp, Artificial
  Probe
tgaaatcgaacagtcgctgaacggc

SEQ ID NO: 182228 - DNA, 25 bp, Artificial
  Probe
catcggtgccacgcatcttcatgaa

SEQ ID NO: 182229 - DNA, 25 bp, Artificial
  Probe
catgcgttcgctgaaaggcatcggt

SEQ ID NO: 182230 - DNA, 25 bp, Artificial
  Probe
gcagggatcgttacccgaactgcat

SEQ ID NO: 182231 - DNA, 25 bp, Artificial
  Probe
atcttcatgaagggcgcgacccgcg

SEQ ID NO: 182232 - DNA, 25 bp, Artificial
  Probe
cgttacccgaactgcatcaggcgtg

SEQ ID NO: 182233 - DNA, 25 bp, Artificial
  Probe
tggacgagcgtccgcatgctaatcg

SEQ ID NO: 182234 - DNA, 25 bp, Artificial
  Probe
gcattatcaacatcatattcagccc

SEQ ID NO: 182235 - DNA, 25 bp, Artificial
  Probe
gatcgttacccgaactgcatcaggc

SEQ ID NO: 182236 - DNA, 25 bp, Artificial
  Probe
cgaactgcatcaggcgtggcaggcg

SEQ ID NO: 182237 - DNA, 25 bp, Artificial
  Probe
gaatattaacgcgttcgcagttgca

SEQ ID NO: 182238 - DNA, 25 bp, Artificial
  Probe
cgcatgctaatcgctttttaccgcc

SEQ ID NO: 182239 - DNA, 25 bp, Artificial
  Probe
cgagcgtccgcatgctaatcgcttt

SEQ ID NO: 182240 - DNA, 25 bp, Artificial
  Probe
atatcctctgacgtatcatcttttt

SEQ ID NO: 182241 - DNA, 25 bp, Artificial
  Probe
aatcgaacagtcgctgaacggcgtg

SEQ ID NO: 182242 - DNA, 25 bp, Artificial
  Probe
aacggcgtgcattatcaacatcata

SEQ ID NO: 182243 - DNA, 25 bp, Artificial
  Probe
gttgcagcgattgcaactggcctgg

SEQ ID NO: 182244 - DNA, 25 bp, Artificial
  Probe
gtcgctgaacggcgtgcattatcaa

SEQ ID NO: 182245 - DNA, 25 bp, Artificial
  Probe
aactgcatcaggcgtggcaggcggt

SEQ ID NO: 182246 - DNA, 25 bp, Artificial
  Probe
gccgcaacagcaggggcgatatcct

SEQ ID NO: 182247 - DNA, 25 bp, Artificial
  Probe
aacatcatattcagcccatcacgct

SEQ ID NO: 182248 - DNA, 25 bp, Artificial
  Probe
cgaacagtcgctgaacggcgtgcat

SEQ ID NO: 182249 - DNA, 25 bp, Artificial
  Probe
tgcaactggcctggccgcaacagca

SEQ ID NO: 182250 - DNA, 25 bp, Artificial
  Probe
tacccgaactgcatcaggcgtggca

SEQ ID NO: 182251 - DNA, 25 bp, Artificial
  Probe
tcatgaagggcgcgacccgcgaata

SEQ ID NO: 182252 - DNA, 25 bp, Artificial
  Probe
cgctgaacggcgtgcattatcaaca

SEQ ID NO: 182253 - DNA, 25 bp, Artificial
  Probe
cgctgaaaggcatcggtgccacgca

SEQ ID NO: 182254 - DNA, 25 bp, Artificial
  Probe
gttcgcagttgcagcgattgcaact

SEQ ID NO: 182255 - DNA, 25 bp, Artificial
  Probe
ggggcgatatcctctgacgtatcat

SEQ ID NO: 182256 - DNA, 25 bp, Artificial
  Probe
tgaagggcgcgacccgcgaatatta

SEQ ID NO: 182257 - DNA, 25 bp, Artificial
  Probe
ttcagcccatcacgctgtggtttga

SEQ ID NO: 182258 - DNA, 25 bp, Artificial
  Probe
acgagcgtccgcatgctaatcgctt

SEQ ID NO: 182259 - DNA, 25 bp, Artificial
  Probe
gcgttcgctgaaaggcatcggtgcc

SEQ ID NO: 182260 - DNA, 25 bp, Artificial
  Probe
cgagcgtccgcatgctaatcgcttt

SEQ ID NO: 182261 - DNA, 25 bp, Artificial
  Probe
ttcgctgaaaggcatcggtgccacg

SEQ ID NO: 182262 - DNA, 25 bp, Artificial
  Probe
agcgtccgcatgctaatcgcttttt

SEQ ID NO: 182263 - DNA, 25 bp, Artificial
  Probe
cgctgaaaggcatcggtgccacgca

SEQ ID NO: 182264 - DNA, 25 bp, Artificial
  Probe
gcgtccgcatgctaatcgcttttta

SEQ ID NO: 182265 - DNA, 25 bp, Artificial
  Probe
tgaaaggcatcggtgccacgcatct

SEQ ID NO: 182266 - DNA, 25 bp, Artificial
  Probe
tccgcatgctaatcgctttttaccg

SEQ ID NO: 182267 - DNA, 25 bp, Artificial
  Probe
gaaaggcatcggtgccacgcatctt

SEQ ID NO: 182268 - DNA, 25 bp, Artificial
  Probe
ccgcatgctaatcgctttttaccgc

SEQ ID NO: 182269 - DNA, 25 bp, Artificial
  Probe
aaggcatcggtgccacgcatcttca

SEQ ID NO: 182270 - DNA, 25 bp, Artificial
  Probe
cgcatgctaatcgctttttaccgcc

SEQ ID NO: 182271 - DNA, 25 bp, Artificial
  Probe
aggcatcggtgccacgcatcttcat

SEQ ID NO: 182272 - DNA, 25 bp, Artificial
  Probe
tcgctttttaccgccagatgaaatc

SEQ ID NO: 182273 - DNA, 25 bp, Artificial
  Probe
catcggtgccacgcatcttcatgaa

SEQ ID NO: 182274 - DNA, 25 bp, Artificial
  Probe
ttttaccgccagatgaaatcgaaca

SEQ ID NO: 182275 - DNA, 25 bp, Artificial
  Probe
tcggtgccacgcatcttcatgaagg

SEQ ID NO: 182276 - DNA, 25 bp, Artificial
  Probe
tttaccgccagatgaaatcgaacag

SEQ ID NO: 182277 - DNA, 25 bp, Artificial
  Probe
ggtgccacgcatcttcatgaagggc

SEQ ID NO: 182278 - DNA, 25 bp, Artificial
  Probe
atgaaatcgaacagtcgctgaacgg

SEQ ID NO: 182279 - DNA, 25 bp, Artificial
  Probe
gtgccacgcatcttcatgaagggcg

SEQ ID NO: 182280 - DNA, 25 bp, Artificial
  Probe
tgaaatcgaacagtcgctgaacggc

SEQ ID NO: 182281 - DNA, 25 bp, Artificial
  Probe
tgccacgcatcttcatgaagggcgc

SEQ ID NO: 182282 - DNA, 25 bp, Artificial
  Probe
aatcgaacagtcgctgaacggcgtg

SEQ ID NO: 182283 - DNA, 25 bp, Artificial
  Probe
cacgcatcttcatgaagggcgcgac

SEQ ID NO: 182284 - DNA, 25 bp, Artificial
  Probe
cgaacagtcgctgaacggcgtgcat

SEQ ID NO: 182285 - DNA, 25 bp, Artificial
  Probe
gcatcttcatgaagggcgcgacccg

SEQ ID NO: 182286 - DNA, 25 bp, Artificial
  Probe
agtcgctgaacggcgtgcattatca

SEQ ID NO: 182287 - DNA, 25 bp, Artificial
  Probe
atcttcatgaagggcgcgacccgcg

SEQ ID NO: 182288 - DNA, 25 bp, Artificial
  Probe
gtcgctgaacggcgtgcattatcaa

SEQ ID NO: 182289 - DNA, 25 bp, Artificial
  Probe
ttcatgaagggcgcgacccgcgaat

SEQ ID NO: 182290 - DNA, 25 bp, Artificial
  Probe
cgctgaacggcgtgcattatcaaca

SEQ ID NO: 182291 - DNA, 25 bp, Artificial
  Probe
tcatgaagggcgcgacccgcgaata

SEQ ID NO: 182292 - DNA, 25 bp, Artificial
  Probe
gctgaacggcgtgcattatcaacat

SEQ ID NO: 182293 - DNA, 25 bp, Artificial
  Probe
catgaagggcgcgacccgcgaatat

SEQ ID NO: 182294 - DNA, 25 bp, Artificial
  Probe
gaacggcgtgcattatcaacatcat

SEQ ID NO: 182295 - DNA, 25 bp, Artificial
  Probe
tgaagggcgcgacccgcgaatatta

SEQ ID NO: 182296 - DNA, 25 bp, Artificial
  Probe
aacggcgtgcattatcaacatcata

SEQ ID NO: 182297 - DNA, 25 bp, Artificial
  Probe
gaatattaacgcgttcgcagttgca

SEQ ID NO: 182298 - DNA, 25 bp, Artificial
  Probe
acggcgtgcattatcaacatcatat

SEQ ID NO: 182299 - DNA, 25 bp, Artificial
  Probe
attaacgcgttcgcagttgcagcga

SEQ ID NO: 182300 - DNA, 25 bp, Artificial
  Probe
gcgtgcattatcaacatcatattca

SEQ ID NO: 182301 - DNA, 25 bp, Artificial
  Probe
taacgcgttcgcagttgcagcgatt

SEQ ID NO: 182302 - DNA, 25 bp, Artificial
  Probe
cgtgcattatcaacatcatattcag

SEQ ID NO: 182303 - DNA, 25 bp, Artificial
  Probe
aacgcgttcgcagttgcagcgattg

SEQ ID NO: 182304 - DNA, 25 bp, Artificial
  Probe
tgcattatcaacatcatattcagcc

SEQ ID NO: 182305 - DNA, 25 bp, Artificial
  Probe
gcgttcgcagttgcagcgattgcaa

SEQ ID NO: 182306 - DNA, 25 bp, Artificial
  Probe
gcattatcaacatcatattcagccc

SEQ ID NO: 182307 - DNA, 25 bp, Artificial
  Probe
cgttcgcagttgcagcgattgcaac

SEQ ID NO: 182308 - DNA, 25 bp, Artificial
  Probe
ttatcaacatcatattcagcccatc

SEQ ID NO: 182309 - DNA, 25 bp, Artificial
  Probe
gttcgcagttgcagcgattgcaact

SEQ ID NO: 182310 - DNA, 25 bp, Artificial
  Probe
atcaacatcatattcagcccatcac

SEQ ID NO: 182311 - DNA, 25 bp, Artificial
  Probe
agttgcagcgattgcaactggcctg

SEQ ID NO: 182312 - DNA, 25 bp, Artificial
  Probe
caacatcatattcagcccatcacgc

SEQ ID NO: 182313 - DNA, 25 bp, Artificial
  Probe
gttgcagcgattgcaactggcctgg

SEQ ID NO: 182314 - DNA, 25 bp, Artificial
  Probe
aacatcatattcagcccatcacgct

SEQ ID NO: 182315 - DNA, 25 bp, Artificial
  Probe
gcagcgattgcaactggcctggccg

SEQ ID NO: 182316 - DNA, 25 bp, Artificial
  Probe
acatcatattcagcccatcacgctg

SEQ ID NO: 182317 - DNA, 25 bp, Artificial
  Probe
agcgattgcaactggcctggccgca

SEQ ID NO: 182318 - DNA, 25 bp, Artificial
  Probe
atcatattcagcccatcacgctgtg

SEQ ID NO: 182319 - DNA, 25 bp, Artificial
  Probe
gattgcaactggcctggccgcaaca

SEQ ID NO: 182320 - DNA, 25 bp, Artificial
  Probe
tcatattcagcccatcacgctgtgg

SEQ ID NO: 182321 - DNA, 25 bp, Artificial
  Probe
attgcaactggcctggccgcaacag

SEQ ID NO: 182322 - DNA, 25 bp, Artificial
  Probe
tattcagcccatcacgctgtggttt

SEQ ID NO: 182323 - DNA, 25 bp, Artificial
  Probe
ttgcaactggcctggccgcaacagc

SEQ ID NO: 182324 - DNA, 25 bp, Artificial
  Probe
ttcagcccatcacgctgtggtttga

SEQ ID NO: 182325 - DNA, 25 bp, Artificial
  Probe
tgcaactggcctggccgcaacagca

SEQ ID NO: 182326 - DNA, 25 bp, Artificial
  Probe
agcccatcacgctgtggtttgatga

SEQ ID NO: 182327 - DNA, 25 bp, Artificial
  Probe
gcaactggcctggccgcaacagcag

SEQ ID NO: 182328 - DNA, 25 bp, Artificial
  Probe
ccatcacgctgtggtttgatgatgc

SEQ ID NO: 182329 - DNA, 25 bp, Artificial
  Probe
actggcctggccgcaacagcagggg

SEQ ID NO: 182330 - DNA, 25 bp, Artificial
  Probe
accacgctggtgcagggatcgttac

SEQ ID NO: 182331 - DNA, 25 bp, Artificial
  Probe
catcacgctgtggtttgatgatgcg

SEQ ID NO: 182332 - DNA, 25 bp, Artificial
  Probe
ggccgcaacagcaggggcgatatcc

SEQ ID NO: 182333 - DNA, 25 bp, Artificial
  Probe
cacgctggtgcagggatcgttaccc

SEQ ID NO: 182334 - DNA, 25 bp, Artificial
  Probe
atcacgctgtggtttgatgatgcgc

SEQ ID NO: 182335 - DNA, 25 bp, Artificial
  Probe
gccgcaacagcaggggcgatatcct

SEQ ID NO: 182336 - DNA, 25 bp, Artificial
  Probe
tgcagggatcgttacccgaactgca

SEQ ID NO: 182337 - DNA, 25 bp, Artificial
  Probe
gtttgatgatgcgctcagtgccatg

SEQ ID NO: 182338 - DNA, 25 bp, Artificial
  Probe
ccgcaacagcaggggcgatatcctc

SEQ ID NO: 182339 - DNA, 25 bp, Artificial
  Probe
gcagggatcgttacccgaactgcat

SEQ ID NO: 182340 - DNA, 25 bp, Artificial
  Probe
atgatgcgctcagtgccatgcgttc

SEQ ID NO: 182341 - DNA, 25 bp, Artificial
  Probe
gcaacagcaggggcgatatcctctg

SEQ ID NO: 182342 - DNA, 25 bp, Artificial
  Probe
gggatcgttacccgaactgcatcag

SEQ ID NO: 182343 - DNA, 25 bp, Artificial
  Probe
atgcgctcagtgccatgcgttcgct

SEQ ID NO: 182344 - DNA, 25 bp, Artificial
  Probe
aacagcaggggcgatatcctctgac

SEQ ID NO: 182345 - DNA, 25 bp, Artificial
  Probe
gatcgttacccgaactgcatcaggc

SEQ ID NO: 182346 - DNA, 25 bp, Artificial
  Probe
tgcgctcagtgccatgcgttcgctg

SEQ ID NO: 182347 - DNA, 25 bp, Artificial
  Probe
agcaggggcgatatcctctgacgta

SEQ ID NO: 182348 - DNA, 25 bp, Artificial
  Probe
cgttacccgaactgcatcaggcgtg

SEQ ID NO: 182349 - DNA, 25 bp, Artificial
  Probe
cgctcagtgccatgcgttcgctgaa

SEQ ID NO: 182350 - DNA, 25 bp, Artificial
  Probe
aggggcgatatcctctgacgtatca

SEQ ID NO: 182351 - DNA, 25 bp, Artificial
  Probe
tacccgaactgcatcaggcgtggca

SEQ ID NO: 182352 - DNA, 25 bp, Artificial
  Probe
gctcagtgccatgcgttcgctgaaa

SEQ ID NO: 182353 - DNA, 25 bp, Artificial
  Probe
ggggcgatatcctctgacgtatcat

SEQ ID NO: 182354 - DNA, 25 bp, Artificial
  Probe
acccgaactgcatcaggcgtggcag

SEQ ID NO: 182355 - DNA, 25 bp, Artificial
  Probe
ctcagtgccatgcgttcgctgaaag

SEQ ID NO: 182356 - DNA, 25 bp, Artificial
  Probe
gcgatatcctctgacgtatcatctt

SEQ ID NO: 182357 - DNA, 25 bp, Artificial
  Probe
cgaactgcatcaggcgtggcaggcg

SEQ ID NO: 182358 - DNA, 25 bp, Artificial
  Probe
cagtgccatgcgttcgctgaaaggc

SEQ ID NO: 182359 - DNA, 25 bp, Artificial
  Probe
cgatatcctctgacgtatcatcttt

SEQ ID NO: 182360 - DNA, 25 bp, Artificial
  Probe
aactgcatcaggcgtggcaggcggt

SEQ ID NO: 182361 - DNA, 25 bp, Artificial
  Probe
gtgccatgcgttcgctgaaaggcat

SEQ ID NO: 182362 - DNA, 25 bp, Artificial
  Probe
gatatcctctgacgtatcatctttt

SEQ ID NO: 182363 - DNA, 25 bp, Artificial
  Probe
ggtggacgagcgtccgcatgctaat

SEQ ID NO: 182364 - DNA, 25 bp, Artificial
  Probe
catgcgttcgctgaaaggcatcggt

SEQ ID NO: 182365 - DNA, 25 bp, Artificial
  Probe
atatcctctgacgtatcatcttttt

SEQ ID NO: 182366 - DNA, 25 bp, Artificial
  Probe
tggacgagcgtccgcatgctaatcg

SEQ ID NO: 182367 - DNA, 25 bp, Artificial
  Probe
tgcgttcgctgaaaggcatcggtgc

SEQ ID NO: 182368 - DNA, 25 bp, Artificial
  Probe
acgagcgtccgcatgctaatcgctt

SEQ ID NO: 182369 - DNA, 25 bp, Artificial
  Probe
gcgttcgctgaaaggcatcggtgcc

SEQ ID NO: 182370 - DNA, 25 bp, Artificial
  Probe
cgagcgtccgcatgctaatcgcttt

SEQ ID NO: 182371 - DNA, 25 bp, Artificial
  Probe
ttcgctgaaaggcatcggtgccacg

SEQ ID NO: 182372 - DNA, 25 bp, Artificial
  Probe
agcgtccgcatgctaatcgcttttt

SEQ ID NO: 182373 - DNA, 25 bp, Artificial
  Probe
cgctgaaaggcatcggtgccacgca

SEQ ID NO: 182374 - DNA, 25 bp, Artificial
  Probe
gcgtccgcatgctaatcgcttttta

SEQ ID NO: 182375 - DNA, 25 bp, Artificial
  Probe
tgaaaggcatcggtgccacgcatct

SEQ ID NO: 182376 - DNA, 25 bp, Artificial
  Probe
tccgcatgctaatcgctttttaccg

SEQ ID NO: 182377 - DNA, 25 bp, Artificial
  Probe
gaaaggcatcggtgccacgcatctt

SEQ ID NO: 182378 - DNA, 25 bp, Artificial
  Probe
ccgcatgctaatcgctttttaccgc

SEQ ID NO: 182379 - DNA, 25 bp, Artificial
  Probe
aaggcatcggtgccacgcatcttca

SEQ ID NO: 182380 - DNA, 25 bp, Artificial
  Probe
cgcatgctaatcgctttttaccgcc

SEQ ID NO: 182381 - DNA, 25 bp, Artificial
  Probe
aggcatcggtgccacgcatcttcat

SEQ ID NO: 182382 - DNA, 25 bp, Artificial
  Probe
tcgctttttaccgccagatgaaatc

SEQ ID NO: 182383 - DNA, 25 bp, Artificial
  Probe
catcggtgccacgcatcttcatgaa

SEQ ID NO: 182384 - DNA, 25 bp, Artificial
  Probe
ttttaccgccagatgaaatcgaaca

SEQ ID NO: 182385 - DNA, 25 bp, Artificial
  Probe
tcggtgccacgcatcttcatgaagg

SEQ ID NO: 182386 - DNA, 25 bp, Artificial
  Probe
tttaccgccagatgaaatcgaacag

SEQ ID NO: 182387 - DNA, 25 bp, Artificial
  Probe
ggtgccacgcatcttcatgaagggc

SEQ ID NO: 182388 - DNA, 25 bp, Artificial
  Probe
atgaaatcgaacagtcgctgaacgg

SEQ ID NO: 182389 - DNA, 25 bp, Artificial
  Probe
gtgccacgcatcttcatgaagggcg

SEQ ID NO: 182390 - DNA, 25 bp, Artificial
  Probe
tgaaatcgaacagtcgctgaacggc

SEQ ID NO: 182391 - DNA, 25 bp, Artificial
  Probe
tgccacgcatcttcatgaagggcgc

SEQ ID NO: 182392 - DNA, 25 bp, Artificial
  Probe
aatcgaacagtcgctgaacggcgtg

SEQ ID NO: 182393 - DNA, 25 bp, Artificial
  Probe
cacgcatcttcatgaagggcgcgac

SEQ ID NO: 182394 - DNA, 25 bp, Artificial
  Probe
cgaacagtcgctgaacggcgtgcat

SEQ ID NO: 182395 - DNA, 25 bp, Artificial
  Probe
gcatcttcatgaagggcgcgacccg

SEQ ID NO: 182396 - DNA, 25 bp, Artificial
  Probe
agtcgctgaacggcgtgcattatca

SEQ ID NO: 182397 - DNA, 25 bp, Artificial
  Probe
atcttcatgaagggcgcgacccgcg

SEQ ID NO: 182398 - DNA, 25 bp, Artificial
  Probe
gtcgctgaacggcgtgcattatcaa

SEQ ID NO: 182399 - DNA, 25 bp, Artificial
  Probe
ttcatgaagggcgcgacccgcgaat

SEQ ID NO: 182400 - DNA, 25 bp, Artificial
  Probe
cgctgaacggcgtgcattatcaaca

SEQ ID NO: 182401 - DNA, 25 bp, Artificial
  Probe
tcatgaagggcgcgacccgcgaata

SEQ ID NO: 182402 - DNA, 25 bp, Artificial
  Probe
gctgaacggcgtgcattatcaacat

SEQ ID NO: 182403 - DNA, 25 bp, Artificial
  Probe
catgaagggcgcgacccgcgaatat

SEQ ID NO: 182404 - DNA, 25 bp, Artificial
  Probe
gaacggcgtgcattatcaacatcat

SEQ ID NO: 182405 - DNA, 25 bp, Artificial
  Probe
tgaagggcgcgacccgcgaatatta

SEQ ID NO: 182406 - DNA, 25 bp, Artificial
  Probe
aacggcgtgcattatcaacatcata

SEQ ID NO: 182407 - DNA, 25 bp, Artificial
  Probe
gaatattaacgcgttcgcagttgca

SEQ ID NO: 182408 - DNA, 25 bp, Artificial
  Probe
acggcgtgcattatcaacatcatat

SEQ ID NO: 182409 - DNA, 25 bp, Artificial
  Probe
attaacgcgttcgcagttgcagcga

SEQ ID NO: 182410 - DNA, 25 bp, Artificial
  Probe
gcgtgcattatcaacatcatattca

SEQ ID NO: 182411 - DNA, 25 bp, Artificial
  Probe
taacgcgttcgcagttgcagcgatt

SEQ ID NO: 182412 - DNA, 25 bp, Artificial
  Probe
cgtgcattatcaacatcatattcag

SEQ ID NO: 182413 - DNA, 25 bp, Artificial
  Probe
aacgcgttcgcagttgcagcgattg

SEQ ID NO: 182414 - DNA, 25 bp, Artificial
  Probe
tgcattatcaacatcatattcagcc

SEQ ID NO: 182415 - DNA, 25 bp, Artificial
  Probe
gcgttcgcagttgcagcgattgcaa

SEQ ID NO: 182416 - DNA, 25 bp, Artificial
  Probe
gcattatcaacatcatattcagccc

SEQ ID NO: 182417 - DNA, 25 bp, Artificial
  Probe
cgttcgcagttgcagcgattgcaac

SEQ ID NO: 182418 - DNA, 25 bp, Artificial
  Probe
ttatcaacatcatattcagcccatc

SEQ ID NO: 182419 - DNA, 25 bp, Artificial
  Probe
gttcgcagttgcagcgattgcaact

SEQ ID NO: 182420 - DNA, 25 bp, Artificial
  Probe
atcaacatcatattcagcccatcac

SEQ ID NO: 182421 - DNA, 25 bp, Artificial
  Probe
agttgcagcgattgcaactggcctg

SEQ ID NO: 182422 - DNA, 25 bp, Artificial
  Probe
caacatcatattcagcccatcacgc

SEQ ID NO: 182423 - DNA, 25 bp, Artificial
  Probe
gttgcagcgattgcaactggcctgg

SEQ ID NO: 182424 - DNA, 25 bp, Artificial
  Probe
aacatcatattcagcccatcacgct

SEQ ID NO: 182425 - DNA, 25 bp, Artificial
  Probe
gcagcgattgcaactggcctggccg

SEQ ID NO: 182426 - DNA, 25 bp, Artificial
  Probe
acatcatattcagcccatcacgctg

SEQ ID NO: 182427 - DNA, 25 bp, Artificial
  Probe
agcgattgcaactggcctggccgca

SEQ ID NO: 182428 - DNA, 25 bp, Artificial
  Probe
atcatattcagcccatcacgctgtg

SEQ ID NO: 182429 - DNA, 25 bp, Artificial
  Probe
gattgcaactggcctggccgcaaca

SEQ ID NO: 182430 - DNA, 25 bp, Artificial
  Probe
tcatattcagcccatcacgctgtgg

SEQ ID NO: 182431 - DNA, 25 bp, Artificial
  Probe
attgcaactggcctggccgcaacag

SEQ ID NO: 182432 - DNA, 25 bp, Artificial
  Probe
tattcagcccatcacgctgtggttt

SEQ ID NO: 182433 - DNA, 25 bp, Artificial
  Probe
ttgcaactggcctggccgcaacagc

SEQ ID NO: 182434 - DNA, 25 bp, Artificial
  Probe
ttcagcccatcacgctgtggtttga

SEQ ID NO: 182435 - DNA, 25 bp, Artificial
  Probe
tgcaactggcctggccgcaacagca

SEQ ID NO: 182436 - DNA, 25 bp, Artificial
  Probe
agcccatcacgctgtggtttgatga

SEQ ID NO: 182437 - DNA, 25 bp, Artificial
  Probe
gcaactggcctggccgcaacagcag

SEQ ID NO: 182438 - DNA, 25 bp, Artificial
  Probe
ccatcacgctgtggtttgatgatgc

SEQ ID NO: 182439 - DNA, 25 bp, Artificial
  Probe
actggcctggccgcaacagcagggg

SEQ ID NO: 182440 - DNA, 25 bp, Artificial
  Probe
accacgctggtgcagggatcgttac

SEQ ID NO: 182441 - DNA, 25 bp, Artificial
  Probe
catcacgctgtggtttgatgatgcg

SEQ ID NO: 182442 - DNA, 25 bp, Artificial
  Probe
ggccgcaacagcaggggcgatatcc

SEQ ID NO: 182443 - DNA, 25 bp, Artificial
  Probe
cacgctggtgcagggatcgttaccc

SEQ ID NO: 182444 - DNA, 25 bp, Artificial
  Probe
atcacgctgtggtttgatgatgcgc

SEQ ID NO: 182445 - DNA, 25 bp, Artificial
  Probe
gccgcaacagcaggggcgatatcct

SEQ ID NO: 182446 - DNA, 25 bp, Artificial
  Probe
tgcagggatcgttacccgaactgca

SEQ ID NO: 182447 - DNA, 25 bp, Artificial
  Probe
gtttgatgatgcgctcagtgccatg

SEQ ID NO: 182448 - DNA, 25 bp, Artificial
  Probe
ccgcaacagcaggggcgatatcctc

SEQ ID NO: 182449 - DNA, 25 bp, Artificial
  Probe
gcagggatcgttacccgaactgcat

SEQ ID NO: 182450 - DNA, 25 bp, Artificial
  Probe
atgatgcgctcagtgccatgcgttc

SEQ ID NO: 182451 - DNA, 25 bp, Artificial
  Probe
gcaacagcaggggcgatatcctctg

SEQ ID NO: 182452 - DNA, 25 bp, Artificial
  Probe
gggatcgttacccgaactgcatcag

SEQ ID NO: 182453 - DNA, 25 bp, Artificial
  Probe
atgcgctcagtgccatgcgttcgct

SEQ ID NO: 182454 - DNA, 25 bp, Artificial
  Probe
aacagcaggggcgatatcctctgac

SEQ ID NO: 182455 - DNA, 25 bp, Artificial
  Probe
gatcgttacccgaactgcatcaggc

SEQ ID NO: 182456 - DNA, 25 bp, Artificial
  Probe
tgcgctcagtgccatgcgttcgctg

SEQ ID NO: 182457 - DNA, 25 bp, Artificial
  Probe
agcaggggcgatatcctctgacgta

SEQ ID NO: 182458 - DNA, 25 bp, Artificial
  Probe
cgttacccgaactgcatcaggcgtg

SEQ ID NO: 182459 - DNA, 25 bp, Artificial
  Probe
cgctcagtgccatgcgttcgctgaa

SEQ ID NO: 182460 - DNA, 25 bp, Artificial
  Probe
aggggcgatatcctctgacgtatca

SEQ ID NO: 182461 - DNA, 25 bp, Artificial
  Probe
tacccgaactgcatcaggcgtggca

SEQ ID NO: 182462 - DNA, 25 bp, Artificial
  Probe
gctcagtgccatgcgttcgctgaaa

SEQ ID NO: 182463 - DNA, 25 bp, Artificial
  Probe
ggggcgatatcctctgacgtatcat

SEQ ID NO: 182464 - DNA, 25 bp, Artificial
  Probe
acccgaactgcatcaggcgtggcag

SEQ ID NO: 182465 - DNA, 25 bp, Artificial
  Probe
ctcagtgccatgcgttcgctgaaag

SEQ ID NO: 182466 - DNA, 25 bp, Artificial
  Probe
gcgatatcctctgacgtatcatctt

SEQ ID NO: 182467 - DNA, 25 bp, Artificial
  Probe
cgaactgcatcaggcgtggcaggcg

SEQ ID NO: 182468 - DNA, 25 bp, Artificial
  Probe
cagtgccatgcgttcgctgaaaggc

SEQ ID NO: 182469 - DNA, 25 bp, Artificial
  Probe
cgatatcctctgacgtatcatcttt

SEQ ID NO: 182470 - DNA, 25 bp, Artificial
  Probe
aactgcatcaggcgtggcaggcggt

SEQ ID NO: 182471 - DNA, 25 bp, Artificial
  Probe
gtgccatgcgttcgctgaaaggcat

SEQ ID NO: 182472 - DNA, 25 bp, Artificial
  Probe
gatatcctctgacgtatcatctttt

SEQ ID NO: 182473 - DNA, 25 bp, Artificial
  Probe
ggtggacgagcgtccgcatgctaat

SEQ ID NO: 182474 - DNA, 25 bp, Artificial
  Probe
catgcgttcgctgaaaggcatcggt

SEQ ID NO: 182475 - DNA, 25 bp, Artificial
  Probe
atatcctctgacgtatcatcttttt

SEQ ID NO: 182476 - DNA, 25 bp, Artificial
  Probe
tggacgagcgtccgcatgctaatcg

SEQ ID NO: 182477 - DNA, 25 bp, Artificial
  Probe
tgcgttcgctgaaaggcatcggtgc

SEQ ID NO: 182478 - DNA, 25 bp, Artificial
  Probe
acgagcgtccgcatgctaatcgctt

SEQ ID NO: 182479 - DNA, 25 bp, Artificial
  Probe
gcgttcgctgaaaggcatcggtgcc

SEQ ID NO: 182480 - DNA, 25 bp, Artificial
  Probe
cgagcgtccgcatgctaatcgcttt

SEQ ID NO: 182481 - DNA, 25 bp, Artificial
  Probe
ttcgctgaaaggcatcggtgccacg

SEQ ID NO: 182482 - DNA, 25 bp, Artificial
  Probe
agcgtccgcatgctaatcgcttttt

SEQ ID NO: 182483 - DNA, 25 bp, Artificial
  Probe
cgctgaaaggcatcggtgccacgca

SEQ ID NO: 182484 - DNA, 25 bp, Artificial
  Probe
gcgtccgcatgctaatcgcttttta

SEQ ID NO: 182485 - DNA, 25 bp, Artificial
  Probe
tgaaaggcatcggtgccacgcatct

SEQ ID NO: 182486 - DNA, 25 bp, Artificial
  Probe
tccgcatgctaatcgctttttaccg

SEQ ID NO: 182487 - DNA, 25 bp, Artificial
  Probe
gaaaggcatcggtgccacgcatctt

SEQ ID NO: 182488 - DNA, 25 bp, Artificial
  Probe
ccgcatgctaatcgctttttaccgc

SEQ ID NO: 182489 - DNA, 25 bp, Artificial
  Probe
aaggcatcggtgccacgcatcttca

SEQ ID NO: 182490 - DNA, 25 bp, Artificial
  Probe
cgcatgctaatcgctttttaccgcc

SEQ ID NO: 182491 - DNA, 25 bp, Artificial
  Probe
aggcatcggtgccacgcatcttcat

SEQ ID NO: 182492 - DNA, 25 bp, Artificial
  Probe
tcgctttttaccgccagatgaaatc

SEQ ID NO: 182493 - DNA, 25 bp, Artificial
  Probe
catcggtgccacgcatcttcatgaa

SEQ ID NO: 182494 - DNA, 25 bp, Artificial
  Probe
ttttaccgccagatgaaatcgaaca

SEQ ID NO: 182495 - DNA, 25 bp, Artificial
  Probe
tcggtgccacgcatcttcatgaagg

SEQ ID NO: 182496 - DNA, 25 bp, Artificial
  Probe
tttaccgccagatgaaatcgaacag

SEQ ID NO: 182497 - DNA, 25 bp, Artificial
  Probe
ggtgccacgcatcttcatgaagggc

SEQ ID NO: 182498 - DNA, 25 bp, Artificial
  Probe
atgaaatcgaacagtcgctgaacgg

SEQ ID NO: 182499 - DNA, 25 bp, Artificial
  Probe
gtgccacgcatcttcatgaagggcg

SEQ ID NO: 182500 - DNA, 25 bp, Artificial
  Probe
tgaaatcgaacagtcgctgaacggc

SEQ ID NO: 182501 - DNA, 25 bp, Artificial
  Probe
tgccacgcatcttcatgaagggcgc

SEQ ID NO: 182502 - DNA, 25 bp, Artificial
  Probe
aatcgaacagtcgctgaacggcgtg

SEQ ID NO: 182503 - DNA, 25 bp, Artificial
  Probe
cacgcatcttcatgaagggcgcgac

SEQ ID NO: 182504 - DNA, 25 bp, Artificial
  Probe
cgaacagtcgctgaacggcgtgcat

SEQ ID NO: 182505 - DNA, 25 bp, Artificial
  Probe
gcatcttcatgaagggcgcgacccg

SEQ ID NO: 182506 - DNA, 25 bp, Artificial
  Probe
agtcgctgaacggcgtgcattatca

SEQ ID NO: 182507 - DNA, 25 bp, Artificial
  Probe
atcttcatgaagggcgcgacccgcg

SEQ ID NO: 182508 - DNA, 25 bp, Artificial
  Probe
gtcgctgaacggcgtgcattatcaa

SEQ ID NO: 182509 - DNA, 25 bp, Artificial
  Probe
ttcatgaagggcgcgacccgcgaat

SEQ ID NO: 182510 - DNA, 25 bp, Artificial
  Probe
cgctgaacggcgtgcattatcaaca

SEQ ID NO: 182511 - DNA, 25 bp, Artificial
  Probe
tcatgaagggcgcgacccgcgaata

SEQ ID NO: 182512 - DNA, 25 bp, Artificial
  Probe
gctgaacggcgtgcattatcaacat

SEQ ID NO: 182513 - DNA, 25 bp, Artificial
  Probe
catgaagggcgcgacccgcgaatat

SEQ ID NO: 182514 - DNA, 25 bp, Artificial
  Probe
gaacggcgtgcattatcaacatcat

SEQ ID NO: 182515 - DNA, 25 bp, Artificial
  Probe
tgaagggcgcgacccgcgaatatta

SEQ ID NO: 182516 - DNA, 25 bp, Artificial
  Probe
aacggcgtgcattatcaacatcata

SEQ ID NO: 182517 - DNA, 25 bp, Artificial
  Probe
gaatattaacgcgttcgcagttgca

SEQ ID NO: 182518 - DNA, 25 bp, Artificial
  Probe
acggcgtgcattatcaacatcatat

SEQ ID NO: 182519 - DNA, 25 bp, Artificial
  Probe
attaacgcgttcgcagttgcagcga

SEQ ID NO: 182520 - DNA, 25 bp, Artificial
  Probe
gcgtgcattatcaacatcatattca

SEQ ID NO: 182521 - DNA, 25 bp, Artificial
  Probe
taacgcgttcgcagttgcagcgatt

SEQ ID NO: 182522 - DNA, 25 bp, Artificial
  Probe
cgtgcattatcaacatcatattcag

SEQ ID NO: 182523 - DNA, 25 bp, Artificial
  Probe
aacgcgttcgcagttgcagcgattg

SEQ ID NO: 182524 - DNA, 25 bp, Artificial
  Probe
tgcattatcaacatcatattcagcc

SEQ ID NO: 182525 - DNA, 25 bp, Artificial
  Probe
gcgttcgcagttgcagcgattgcaa

SEQ ID NO: 182526 - DNA, 25 bp, Artificial
  Probe
gcattatcaacatcatattcagccc

SEQ ID NO: 182527 - DNA, 25 bp, Artificial
  Probe
cgttcgcagttgcagcgattgcaac

SEQ ID NO: 182528 - DNA, 25 bp, Artificial
  Probe
ttatcaacatcatattcagcccatc

SEQ ID NO: 182529 - DNA, 25 bp, Artificial
  Probe
gttcgcagttgcagcgattgcaact

SEQ ID NO: 182530 - DNA, 25 bp, Artificial
  Probe
atcaacatcatattcagcccatcac

SEQ ID NO: 182531 - DNA, 25 bp, Artificial
  Probe
agttgcagcgattgcaactggcctg

SEQ ID NO: 182532 - DNA, 25 bp, Artificial
  Probe
caacatcatattcagcccatcacgc

SEQ ID NO: 182533 - DNA, 25 bp, Artificial
  Probe
gttgcagcgattgcaactggcctgg

SEQ ID NO: 182534 - DNA, 25 bp, Artificial
  Probe
aacatcatattcagcccatcacgct

SEQ ID NO: 182535 - DNA, 25 bp, Artificial
  Probe
gcagcgattgcaactggcctggccg

SEQ ID NO: 182536 - DNA, 25 bp, Artificial
  Probe
acatcatattcagcccatcacgctg

SEQ ID NO: 182537 - DNA, 25 bp, Artificial
  Probe
agcgattgcaactggcctggccgca

SEQ ID NO: 182538 - DNA, 25 bp, Artificial
  Probe
atcatattcagcccatcacgctgtg

SEQ ID NO: 182539 - DNA, 25 bp, Artificial
  Probe
gattgcaactggcctggccgcaaca

SEQ ID NO: 182540 - DNA, 25 bp, Artificial
  Probe
tcatattcagcccatcacgctgtgg

SEQ ID NO: 182541 - DNA, 25 bp, Artificial
  Probe
attgcaactggcctggccgcaacag

SEQ ID NO: 182542 - DNA, 25 bp, Artificial
  Probe
tattcagcccatcacgctgtggttt

SEQ ID NO: 182543 - DNA, 25 bp, Artificial
  Probe
ttgcaactggcctggccgcaacagc

SEQ ID NO: 182544 - DNA, 25 bp, Artificial
  Probe
ttcagcccatcacgctgtggtttga

SEQ ID NO: 182545 - DNA, 25 bp, Artificial
  Probe
tgcaactggcctggccgcaacagca

SEQ ID NO: 182546 - DNA, 25 bp, Artificial
  Probe
agcccatcacgctgtggtttgatga

SEQ ID NO: 182547 - DNA, 25 bp, Artificial
  Probe
gcaactggcctggccgcaacagcag

SEQ ID NO: 182548 - DNA, 25 bp, Artificial
  Probe
ccatcacgctgtggtttgatgatgc

SEQ ID NO: 182549 - DNA, 25 bp, Artificial
  Probe
actggcctggccgcaacagcagggg

SEQ ID NO: 182550 - DNA, 25 bp, Artificial
  Probe
accacgctggtgcagggatcgttac

SEQ ID NO: 182551 - DNA, 25 bp, Artificial
  Probe
catcacgctgtggtttgatgatgcg

SEQ ID NO: 182552 - DNA, 25 bp, Artificial
  Probe
ggccgcaacagcaggggcgatatcc

SEQ ID NO: 182553 - DNA, 25 bp, Artificial
  Probe
cacgctggtgcagggatcgttaccc

SEQ ID NO: 182554 - DNA, 25 bp, Artificial
  Probe
atcacgctgtggtttgatgatgcgc

SEQ ID NO: 182555 - DNA, 25 bp, Artificial
  Probe
gccgcaacagcaggggcgatatcct

SEQ ID NO: 182556 - DNA, 25 bp, Artificial
  Probe
tgcagggatcgttacccgaactgca

SEQ ID NO: 182557 - DNA, 25 bp, Artificial
  Probe
gtttgatgatgcgctcagtgccatg

SEQ ID NO: 182558 - DNA, 25 bp, Artificial
  Probe
ccgcaacagcaggggcgatatcctc

SEQ ID NO: 182559 - DNA, 25 bp, Artificial
  Probe
gcagggatcgttacccgaactgcat

SEQ ID NO: 182560 - DNA, 25 bp, Artificial
  Probe
atgatgcgctcagtgccatgcgttc

SEQ ID NO: 182561 - DNA, 25 bp, Artificial
  Probe
gcaacagcaggggcgatatcctctg

SEQ ID NO: 182562 - DNA, 25 bp, Artificial
  Probe
gggatcgttacccgaactgcatcag

SEQ ID NO: 182563 - DNA, 25 bp, Artificial
  Probe
atgcgctcagtgccatgcgttcgct

SEQ ID NO: 182564 - DNA, 25 bp, Artificial
  Probe
aacagcaggggcgatatcctctgac

SEQ ID NO: 182565 - DNA, 25 bp, Artificial
  Probe
gatcgttacccgaactgcatcaggc

SEQ ID NO: 182566 - DNA, 25 bp, Artificial
  Probe
tgcgctcagtgccatgcgttcgctg

SEQ ID NO: 182567 - DNA, 25 bp, Artificial
  Probe
agcaggggcgatatcctctgacgta

SEQ ID NO: 182568 - DNA, 25 bp, Artificial
  Probe
cgttacccgaactgcatcaggcgtg

SEQ ID NO: 182569 - DNA, 25 bp, Artificial
  Probe
cgctcagtgccatgcgttcgctgaa

SEQ ID NO: 182570 - DNA, 25 bp, Artificial
  Probe
aggggcgatatcctctgacgtatca

SEQ ID NO: 182571 - DNA, 25 bp, Artificial
  Probe
tacccgaactgcatcaggcgtggca

SEQ ID NO: 182572 - DNA, 25 bp, Artificial
  Probe
gctcagtgccatgcgttcgctgaaa

SEQ ID NO: 182573 - DNA, 25 bp, Artificial
  Probe
ggggcgatatcctctgacgtatcat

SEQ ID NO: 182574 - DNA, 25 bp, Artificial
  Probe
acccgaactgcatcaggcgtggcag

SEQ ID NO: 182575 - DNA, 25 bp, Artificial
  Probe
ctcagtgccatgcgttcgctgaaag

SEQ ID NO: 182576 - DNA, 25 bp, Artificial
  Probe
gcgatatcctctgacgtatcatctt

SEQ ID NO: 182577 - DNA, 25 bp, Artificial
  Probe
cgaactgcatcaggcgtggcaggcg

SEQ ID NO: 182578 - DNA, 25 bp, Artificial
  Probe
cagtgccatgcgttcgctgaaaggc

SEQ ID NO: 182579 - DNA, 25 bp, Artificial
  Probe
cgatatcctctgacgtatcatcttt

SEQ ID NO: 182580 - DNA, 25 bp, Artificial
  Probe
aactgcatcaggcgtggcaggcggt

SEQ ID NO: 182581 - DNA, 25 bp, Artificial
  Probe
gtgccatgcgttcgctgaaaggcat

SEQ ID NO: 182582 - DNA, 25 bp, Artificial
  Probe
gatatcctctgacgtatcatctttt

SEQ ID NO: 182583 - DNA, 25 bp, Artificial
  Probe
ggtggacgagcgtccgcatgctaat

SEQ ID NO: 182584 - DNA, 25 bp, Artificial
  Probe
catgcgttcgctgaaaggcatcggt

SEQ ID NO: 182585 - DNA, 25 bp, Artificial
  Probe
atatcctctgacgtatcatcttttt

SEQ ID NO: 182586 - DNA, 25 bp, Artificial
  Probe
tggacgagcgtccgcatgctaatcg

SEQ ID NO: 182587 - DNA, 25 bp, Artificial
  Probe
tgcgttcgctgaaaggcatcggtgc

SEQ ID NO: 182588 - DNA, 25 bp, Artificial
  Probe
acgagcgtccgcatgctaatcgctt

SEQ ID NO: 182589 - DNA, 25 bp, Artificial
  Probe
gcgttcgctgaaaggcatcggtgcc

SEQ ID NO: 182590 - DNA, 25 bp, Artificial
  Probe
cgagcgtccgcatgctaatcgcttt

SEQ ID NO: 182591 - DNA, 25 bp, Artificial
  Probe
ttcgctgaaaggcatcggtgccacg

SEQ ID NO: 182592 - DNA, 25 bp, Artificial
  Probe
agcgtccgcatgctaatcgcttttt

SEQ ID NO: 182593 - DNA, 25 bp, Artificial
  Probe
cgctgaaaggcatcggtgccacgca

SEQ ID NO: 182594 - DNA, 25 bp, Artificial
  Probe
gcgtccgcatgctaatcgcttttta

SEQ ID NO: 182595 - DNA, 25 bp, Artificial
  Probe
tgaaaggcatcggtgccacgcatct

SEQ ID NO: 182596 - DNA, 25 bp, Artificial
  Probe
tccgcatgctaatcgctttttaccg

SEQ ID NO: 182597 - DNA, 25 bp, Artificial
  Probe
gaaaggcatcggtgccacgcatctt

SEQ ID NO: 182598 - DNA, 25 bp, Artificial
  Probe
ccgcatgctaatcgctttttaccgc

SEQ ID NO: 182599 - DNA, 25 bp, Artificial
  Probe
aaggcatcggtgccacgcatcttca

SEQ ID NO: 182600 - DNA, 25 bp, Artificial
  Probe
cgcatgctaatcgctttttaccgcc

SEQ ID NO: 182601 - DNA, 25 bp, Artificial
  Probe
aggcatcggtgccacgcatcttcat

SEQ ID NO: 182602 - DNA, 25 bp, Artificial
  Probe
tcgctttttaccgccagatgaaatc

SEQ ID NO: 182603 - DNA, 25 bp, Artificial
  Probe
catcggtgccacgcatcttcatgaa

SEQ ID NO: 182604 - DNA, 25 bp, Artificial
  Probe
ttttaccgccagatgaaatcgaaca

SEQ ID NO: 182605 - DNA, 25 bp, Artificial
  Probe
tcggtgccacgcatcttcatgaagg

SEQ ID NO: 182606 - DNA, 25 bp, Artificial
  Probe
tttaccgccagatgaaatcgaacag

SEQ ID NO: 182607 - DNA, 25 bp, Artificial
  Probe
ggtgccacgcatcttcatgaagggc

SEQ ID NO: 182608 - DNA, 25 bp, Artificial
  Probe
atgaaatcgaacagtcgctgaacgg

SEQ ID NO: 182609 - DNA, 25 bp, Artificial
  Probe
gtgccacgcatcttcatgaagggcg

SEQ ID NO: 182610 - DNA, 25 bp, Artificial
  Probe
tgaaatcgaacagtcgctgaacggc

SEQ ID NO: 182611 - DNA, 25 bp, Artificial
  Probe
tgccacgcatcttcatgaagggcgc

SEQ ID NO: 182612 - DNA, 25 bp, Artificial
  Probe
aatcgaacagtcgctgaacggcgtg

SEQ ID NO: 182613 - DNA, 25 bp, Artificial
  Probe
cacgcatcttcatgaagggcgcgac

SEQ ID NO: 182614 - DNA, 25 bp, Artificial
  Probe
cgaacagtcgctgaacggcgtgcat

SEQ ID NO: 182615 - DNA, 25 bp, Artificial
  Probe
gcatcttcatgaagggcgcgacccg

SEQ ID NO: 182616 - DNA, 25 bp, Artificial
  Probe
agtcgctgaacggcgtgcattatca

SEQ ID NO: 182617 - DNA, 25 bp, Artificial
  Probe
atcttcatgaagggcgcgacccgcg

SEQ ID NO: 182618 - DNA, 25 bp, Artificial
  Probe
gtcgctgaacggcgtgcattatcaa

SEQ ID NO: 182619 - DNA, 25 bp, Artificial
  Probe
ttcatgaagggcgcgacccgcgaat

SEQ ID NO: 182620 - DNA, 25 bp, Artificial
  Probe
cgctgaacggcgtgcattatcaaca

SEQ ID NO: 182621 - DNA, 25 bp, Artificial
  Probe
tcatgaagggcgcgacccgcgaata

SEQ ID NO: 182622 - DNA, 25 bp, Artificial
  Probe
gctgaacggcgtgcattatcaacat

SEQ ID NO: 182623 - DNA, 25 bp, Artificial
  Probe
catgaagggcgcgacccgcgaatat

SEQ ID NO: 182624 - DNA, 25 bp, Artificial
  Probe
gaacggcgtgcattatcaacatcat

SEQ ID NO: 182625 - DNA, 25 bp, Artificial
  Probe
tgaagggcgcgacccgcgaatatta

SEQ ID NO: 182626 - DNA, 25 bp, Artificial
  Probe
aacggcgtgcattatcaacatcata

SEQ ID NO: 182627 - DNA, 25 bp, Artificial
  Probe
gaatattaacgcgttcgcagttgca

SEQ ID NO: 182628 - DNA, 25 bp, Artificial
  Probe
acggcgtgcattatcaacatcatat

SEQ ID NO: 182629 - DNA, 25 bp, Artificial
  Probe
attaacgcgttcgcagttgcagcga

SEQ ID NO: 182630 - DNA, 25 bp, Artificial
  Probe
gcgtgcattatcaacatcatattca

SEQ ID NO: 182631 - DNA, 25 bp, Artificial
  Probe
taacgcgttcgcagttgcagcgatt

SEQ ID NO: 182632 - DNA, 25 bp, Artificial
  Probe
cgtgcattatcaacatcatattcag

SEQ ID NO: 182633 - DNA, 25 bp, Artificial
  Probe
aacgcgttcgcagttgcagcgattg

SEQ ID NO: 182634 - DNA, 25 bp, Artificial
  Probe
tgcattatcaacatcatattcagcc

SEQ ID NO: 182635 - DNA, 25 bp, Artificial
  Probe
gcgttcgcagttgcagcgattgcaa

SEQ ID NO: 182636 - DNA, 25 bp, Artificial
  Probe
gcattatcaacatcatattcagccc

SEQ ID NO: 182637 - DNA, 25 bp, Artificial
  Probe
cgttcgcagttgcagcgattgcaac

SEQ ID NO: 182638 - DNA, 25 bp, Artificial
  Probe
ttatcaacatcatattcagcccatc

SEQ ID NO: 182639 - DNA, 25 bp, Artificial
  Probe
gttcgcagttgcagcgattgcaact

SEQ ID NO: 182640 - DNA, 25 bp, Artificial
  Probe
atcaacatcatattcagcccatcac

SEQ ID NO: 182641 - DNA, 25 bp, Artificial
  Probe
agttgcagcgattgcaactggcctg

SEQ ID NO: 182642 - DNA, 25 bp, Artificial
  Probe
caacatcatattcagcccatcacgc

SEQ ID NO: 182643 - DNA, 25 bp, Artificial
  Probe
gttgcagcgattgcaactggcctgg

SEQ ID NO: 182644 - DNA, 25 bp, Artificial
  Probe
aacatcatattcagcccatcacgct

SEQ ID NO: 182645 - DNA, 25 bp, Artificial
  Probe
gcagcgattgcaactggcctggccg

SEQ ID NO: 182646 - DNA, 25 bp, Artificial
  Probe
acatcatattcagcccatcacgctg

SEQ ID NO: 182647 - DNA, 25 bp, Artificial
  Probe
agcgattgcaactggcctggccgca

SEQ ID NO: 182648 - DNA, 25 bp, Artificial
  Probe
atcatattcagcccatcacgctgtg

SEQ ID NO: 182649 - DNA, 25 bp, Artificial
  Probe
gattgcaactggcctggccgcaaca

SEQ ID NO: 182650 - DNA, 25 bp, Artificial
  Probe
tcatattcagcccatcacgctgtgg

SEQ ID NO: 182651 - DNA, 25 bp, Artificial
  Probe
attgcaactggcctggccgcaacag

SEQ ID NO: 182652 - DNA, 25 bp, Artificial
  Probe
tattcagcccatcacgctgtggttt

SEQ ID NO: 182653 - DNA, 25 bp, Artificial
  Probe
ttgcaactggcctggccgcaacagc

SEQ ID NO: 182654 - DNA, 25 bp, Artificial
  Probe
ttcagcccatcacgctgtggtttga

SEQ ID NO: 182655 - DNA, 25 bp, Artificial
  Probe
tgcaactggcctggccgcaacagca

SEQ ID NO: 182656 - DNA, 25 bp, Artificial
  Probe
agcccatcacgctgtggtttgatga

SEQ ID NO: 182657 - DNA, 25 bp, Artificial
  Probe
gcaactggcctggccgcaacagcag

SEQ ID NO: 182658 - DNA, 25 bp, Artificial
  Probe
ccatcacgctgtggtttgatgatgc

SEQ ID NO: 182659 - DNA, 25 bp, Artificial
  Probe
actggcctggccgcaacagcagggg

SEQ ID NO: 182660 - DNA, 25 bp, Artificial
  Probe
accacgctggtgcagggatcgttac

SEQ ID NO: 182661 - DNA, 25 bp, Artificial
  Probe
catcacgctgtggtttgatgatgcg

SEQ ID NO: 182662 - DNA, 25 bp, Artificial
  Probe
ggccgcaacagcaggggcgatatcc

SEQ ID NO: 182663 - DNA, 25 bp, Artificial
  Probe
cacgctggtgcagggatcgttaccc

SEQ ID NO: 182664 - DNA, 25 bp, Artificial
  Probe
atcacgctgtggtttgatgatgcgc

SEQ ID NO: 182665 - DNA, 25 bp, Artificial
  Probe
gccgcaacagcaggggcgatatcct

SEQ ID NO: 182666 - DNA, 25 bp, Artificial
  Probe
tgcagggatcgttacccgaactgca

SEQ ID NO: 182667 - DNA, 25 bp, Artificial
  Probe
gtttgatgatgcgctcagtgccatg

SEQ ID NO: 182668 - DNA, 25 bp, Artificial
  Probe
ccgcaacagcaggggcgatatcctc

SEQ ID NO: 182669 - DNA, 25 bp, Artificial
  Probe
gcagggatcgttacccgaactgcat

SEQ ID NO: 182670 - DNA, 25 bp, Artificial
  Probe
atgatgcgctcagtgccatgcgttc

SEQ ID NO: 182671 - DNA, 25 bp, Artificial
  Probe
gcaacagcaggggcgatatcctctg

SEQ ID NO: 182672 - DNA, 25 bp, Artificial
  Probe
gggatcgttacccgaactgcatcag

SEQ ID NO: 182673 - DNA, 25 bp, Artificial
  Probe
atgcgctcagtgccatgcgttcgct

SEQ ID NO: 182674 - DNA, 25 bp, Artificial
  Probe
aacagcaggggcgatatcctctgac

SEQ ID NO: 182675 - DNA, 25 bp, Artificial
  Probe
gatcgttacccgaactgcatcaggc

SEQ ID NO: 182676 - DNA, 25 bp, Artificial
  Probe
tgcgctcagtgccatgcgttcgctg

SEQ ID NO: 182677 - DNA, 25 bp, Artificial
  Probe
agcaggggcgatatcctctgacgta

SEQ ID NO: 182678 - DNA, 25 bp, Artificial
  Probe
cgttacccgaactgcatcaggcgtg

SEQ ID NO: 182679 - DNA, 25 bp, Artificial
  Probe
cgctcagtgccatgcgttcgctgaa

SEQ ID NO: 182680 - DNA, 25 bp, Artificial
  Probe
aggggcgatatcctctgacgtatca

SEQ ID NO: 182681 - DNA, 25 bp, Artificial
  Probe
tacccgaactgcatcaggcgtggca

SEQ ID NO: 182682 - DNA, 25 bp, Artificial
  Probe
gctcagtgccatgcgttcgctgaaa

SEQ ID NO: 182683 - DNA, 25 bp, Artificial
  Probe
ggggcgatatcctctgacgtatcat

SEQ ID NO: 182684 - DNA, 25 bp, Artificial
  Probe
acccgaactgcatcaggcgtggcag

SEQ ID NO: 182685 - DNA, 25 bp, Artificial
  Probe
ctcagtgccatgcgttcgctgaaag

SEQ ID NO: 182686 - DNA, 25 bp, Artificial
  Probe
gcgatatcctctgacgtatcatctt

SEQ ID NO: 182687 - DNA, 25 bp, Artificial
  Probe
cgaactgcatcaggcgtggcaggcg

SEQ ID NO: 182688 - DNA, 25 bp, Artificial
  Probe
cagtgccatgcgttcgctgaaaggc

SEQ ID NO: 182689 - DNA, 25 bp, Artificial
  Probe
cgatatcctctgacgtatcatcttt

SEQ ID NO: 182690 - DNA, 25 bp, Artificial
  Probe
aactgcatcaggcgtggcaggcggt

SEQ ID NO: 182691 - DNA, 25 bp, Artificial
  Probe
gtgccatgcgttcgctgaaaggcat

SEQ ID NO: 182692 - DNA, 25 bp, Artificial
  Probe
gatatcctctgacgtatcatctttt

SEQ ID NO: 182693 - DNA, 25 bp, Artificial
  Probe
ggtggacgagcgtccgcatgctaat

SEQ ID NO: 182694 - DNA, 25 bp, Artificial
  Probe
catgcgttcgctgaaaggcatcggt

SEQ ID NO: 182695 - DNA, 25 bp, Artificial
  Probe
atatcctctgacgtatcatcttttt

SEQ ID NO: 182696 - DNA, 25 bp, Artificial
  Probe
tggacgagcgtccgcatgctaatcg

SEQ ID NO: 182697 - DNA, 25 bp, Artificial
  Probe
tgcgttcgctgaaaggcatcggtgc

SEQ ID NO: 182698 - DNA, 25 bp, Artificial
  Probe
aatccctgccgttagcgactgcgac

SEQ ID NO: 182699 - DNA, 25 bp, Artificial
  Probe
gacggccttagatctctcgccgcca

SEQ ID NO: 182700 - DNA, 25 bp, Artificial
  Probe
gcttccacagcgtaaatacacccac

SEQ ID NO: 182701 - DNA, 25 bp, Artificial
  Probe
ctgccgttagcgactgcgacgttcg

SEQ ID NO: 182702 - DNA, 25 bp, Artificial
  Probe
tggtcgggcagccgcacactatgag

SEQ ID NO: 182703 - DNA, 25 bp, Artificial
  Probe
cgtcacgcgcaggtgacggccttag

SEQ ID NO: 182704 - DNA, 25 bp, Artificial
  Probe
tacagcgccagagtgctgacgcctt

SEQ ID NO: 182705 - DNA, 25 bp, Artificial
  Probe
ctatgagcaacatgcagatctacag

SEQ ID NO: 182706 - DNA, 25 bp, Artificial
  Probe
atccacggcactccgcgagctgtat

SEQ ID NO: 182707 - DNA, 25 bp, Artificial
  Probe
gccttagatctctcgccgccaatgc

SEQ ID NO: 182708 - DNA, 25 bp, Artificial
  Probe
atgccgcagaccattatctggcggg

SEQ ID NO: 182709 - DNA, 25 bp, Artificial
  Probe
caggcacgccagaaggatgccgcag

SEQ ID NO: 182710 - DNA, 25 bp, Artificial
  Probe
tggacctggctggatgagccgccac

SEQ ID NO: 182711 - DNA, 25 bp, Artificial
  Probe
cctggctggatgagccgccactggc

SEQ ID NO: 182712 - DNA, 25 bp, Artificial
  Probe
ggcaatgcttccacagcgtaaatac

SEQ ID NO: 182713 - DNA, 25 bp, Artificial
  Probe
caagccattgcagcggcatttggtc

SEQ ID NO: 182714 - DNA, 25 bp, Artificial
  Probe
tcacgcgcaggtgacggccttagat

SEQ ID NO: 182715 - DNA, 25 bp, Artificial
  Probe
gagtgctgacgccttactggcaatg

SEQ ID NO: 182716 - DNA, 25 bp, Artificial
  Probe
cgccaatgcttgttcaggcacgcca

SEQ ID NO: 182717 - DNA, 25 bp, Artificial
  Probe
acgccttactggcaatgcttccaca

SEQ ID NO: 182718 - DNA, 25 bp, Artificial
  Probe
cagagtgctgacgccttactggcaa

SEQ ID NO: 182719 - DNA, 25 bp, Artificial
  Probe
taaacaagccattgcagcggcattt

SEQ ID NO: 182720 - DNA, 25 bp, Artificial
  Probe
gcgccagagtgctgacgccttactg

SEQ ID NO: 182721 - DNA, 25 bp, Artificial
  Probe
gtgcagtggtgcggtaatttatcca

SEQ ID NO: 182722 - DNA, 25 bp, Artificial
  Probe
actatgagcaacatgcagatctaca

SEQ ID NO: 182723 - DNA, 25 bp, Artificial
  Probe
gctgacgccttactggcaatgcttc

SEQ ID NO: 182724 - DNA, 25 bp, Artificial
  Probe
atccctgccgttagcgactgcgacg

SEQ ID NO: 182725 - DNA, 25 bp, Artificial
  Probe
tagatctctcgccgccaatgcttgt

SEQ ID NO: 182726 - DNA, 25 bp, Artificial
  Probe
ccacggcactccgcgagctgtatcg

SEQ ID NO: 182727 - DNA, 25 bp, Artificial
  Probe
ttagcgactgcgacgttcgatcttg

SEQ ID NO: 182728 - DNA, 25 bp, Artificial
  Probe
gtcgggcagccgcacactatgagca

SEQ ID NO: 182729 - DNA, 25 bp, Artificial
  Probe
catgcagatctacagcgccagagtg

SEQ ID NO: 182730 - DNA, 25 bp, Artificial
  Probe
tctcgcagtgcagtggtgcggtaat

SEQ ID NO: 182731 - DNA, 25 bp, Artificial
  Probe
gttcgatcttgcatggagcaatctc

SEQ ID NO: 182732 - DNA, 25 bp, Artificial
  Probe
tcgaatccctgccgttagcgactgc

SEQ ID NO: 182733 - DNA, 25 bp, Artificial
  Probe
tcgccgccaatgcttgttcaggcac

SEQ ID NO: 182734 - DNA, 25 bp, Artificial
  Probe
gtgacggccttagatctctcgccgc

SEQ ID NO: 182735 - DNA, 25 bp, Artificial
  Probe
gcatttggtcgggcagccgcacact

SEQ ID NO: 182736 - DNA, 25 bp, Artificial
  Probe
gcagccgcacactatgagcaacatg

SEQ ID NO: 182737 - DNA, 25 bp, Artificial
  Probe
gcatggagcaatctcgcagtgcagt

SEQ ID NO: 182738 - DNA, 25 bp, Artificial
  Probe
cttgttcaggcacgccagaaggatg

SEQ ID NO: 182739 - DNA, 25 bp, Artificial
  Probe
gccttactggcaatgcttccacagc

SEQ ID NO: 182740 - DNA, 25 bp, Artificial
  Probe
actgcgacgttcgatcttgcatgga

SEQ ID NO: 182741 - DNA, 25 bp, Artificial
  Probe
ggttaataaacaagccattgcagcg

SEQ ID NO: 182742 - DNA, 25 bp, Artificial
  Probe
aggtgacggccttagatctctcgcc

SEQ ID NO: 182743 - DNA, 25 bp, Artificial
  Probe
cacgcgcaggtgacggccttagatc

SEQ ID NO: 182744 - DNA, 25 bp, Artificial
  Probe
cagatctacagcgccagagtgctga

SEQ ID NO: 182745 - DNA, 25 bp, Artificial
  Probe
tatcgaatccctgccgttagcgact

SEQ ID NO: 182746 - DNA, 25 bp, Artificial
  Probe
tcttgcatggagcaatctcgcagtg

SEQ ID NO: 182747 - DNA, 25 bp, Artificial
  Probe
gcaggtgacggccttagatctctcg

SEQ ID NO: 182748 - DNA, 25 bp, Artificial
  Probe
cattgcagcggcatttggtcgggca

SEQ ID NO: 182749 - DNA, 25 bp, Artificial
  Probe
ggcacgccagaaggatgccgcagac

SEQ ID NO: 182750 - DNA, 25 bp, Artificial
  Probe
gcacgccagaaggatgccgcagacc

SEQ ID NO: 182751 - DNA, 25 bp, Artificial
  Probe
gcaatgcttccacagcgtaaataca

SEQ ID NO: 182752 - DNA, 25 bp, Artificial
  Probe
cagccgcacactatgagcaacatgc

SEQ ID NO: 182753 - DNA, 25 bp, Artificial
  Probe
gccgcacactatgagcaacatgcag

SEQ ID NO: 182754 - DNA, 25 bp, Artificial
  Probe
gagccgccactggcgggaacgtcac

SEQ ID NO: 182755 - DNA, 25 bp, Artificial
  Probe
gttaataaacaagccattgcagcgg

SEQ ID NO: 182756 - DNA, 25 bp, Artificial
  Probe
aaggatgccgcagaccattatctgg

SEQ ID NO: 182757 - DNA, 25 bp, Artificial
  Probe
agaaggatgccgcagaccattatct

SEQ ID NO: 182758 - DNA, 25 bp, Artificial
  Probe
gatatcgaatccctgccgttagcga

SEQ ID NO: 182759 - DNA, 25 bp, Artificial
  Probe
atgcagatctacagcgccagagtgc

SEQ ID NO: 182760 - DNA, 25 bp, Artificial
  Probe
agccattgcagcggcatttggtcgg

SEQ ID NO: 182761 - DNA, 25 bp, Artificial
  Probe
taatttatccacggcactccgcgag

SEQ ID NO: 182762 - DNA, 25 bp, Artificial
  Probe
gagatatcgaatccctgccgttagc

SEQ ID NO: 182763 - DNA, 25 bp, Artificial
  Probe
catttggtcgggcagccgcacacta

SEQ ID NO: 182764 - DNA, 25 bp, Artificial
  Probe
acggccttagatctctcgccgccaa

SEQ ID NO: 182765 - DNA, 25 bp, Artificial
  Probe
agcgccagagtgctgacgccttact

SEQ ID NO: 182766 - DNA, 25 bp, Artificial
  Probe
cagcgccagagtgctgacgccttac

SEQ ID NO: 182767 - DNA, 25 bp, Artificial
  Probe
gtgcggtaatttatccacggcactc

SEQ ID NO: 182768 - DNA, 25 bp, Artificial
  Probe
acgttcgatcttgcatggagcaatc

SEQ ID NO: 182769 - DNA, 25 bp, Artificial
  Probe
acggcactccgcgagctgtatcggg

SEQ ID NO: 182770 - DNA, 25 bp, Artificial
  Probe
tttggtcgggcagccgcacactatg

SEQ ID NO: 182771 - DNA, 25 bp, Artificial
  Probe
atgagcaacatgcagatctacagcg

SEQ ID NO: 182772 - DNA, 25 bp, Artificial
  Probe
atggagcaatctcgcagtgcagtgg

SEQ ID NO: 182773 - DNA, 25 bp, Artificial
  Probe
cgacgttcgatcttgcatggagcaa

SEQ ID NO: 182774 - DNA, 25 bp, Artificial
  Probe
atgcttgttcaggcacgccagaagg

SEQ ID NO: 182775 - DNA, 25 bp, Artificial
  Probe
gtgctgacgccttactggcaatgct

SEQ ID NO: 182776 - DNA, 25 bp, Artificial
  Probe
atgcttccacagcgtaaatacaccc

SEQ ID NO: 182777 - DNA, 25 bp, Artificial
  Probe
tgttcaggcacgccagaaggatgcc

SEQ ID NO: 182778 - DNA, 25 bp, Artificial
  Probe
gatgagccgccactggcgggaacgt

SEQ ID NO: 182779 - DNA, 25 bp, Artificial
  Probe
gagcaacatgcagatctacagcgcc

SEQ ID NO: 182780 - DNA, 25 bp, Artificial
  Probe
gacgccttactggcaatgcttccac

SEQ ID NO: 182781 - DNA, 25 bp, Artificial
  Probe
caatgcttccacagcgtaaatacac

SEQ ID NO: 182782 - DNA, 25 bp, Artificial
  Probe
gccgccaatgcttgttcaggcacgc

SEQ ID NO: 182783 - DNA, 25 bp, Artificial
  Probe
tactggcaatgcttccacagcgtaa

SEQ ID NO: 182784 - DNA, 25 bp, Artificial
  Probe
aatgcttgttcaggcacgccagaag

SEQ ID NO: 182785 - DNA, 25 bp, Artificial
  Probe
ttatccacggcactccgcgagctgt

SEQ ID NO: 182786 - DNA, 25 bp, Artificial
  Probe
tgcttgttcaggcacgccagaagga

SEQ ID NO: 182787 - DNA, 25 bp, Artificial
  Probe
gacctggctggatgagccgccactg

SEQ ID NO: 182788 - DNA, 25 bp, Artificial
  Probe
ggatgccgcagaccattatctggcg

SEQ ID NO: 182789 - DNA, 25 bp, Artificial
  Probe
tcgatcttgcatggagcaatctcgc

SEQ ID NO: 182790 - DNA, 25 bp, Artificial
  Probe
cgccagaaggatgccgcagaccatt

SEQ ID NO: 182791 - DNA, 25 bp, Artificial
  Probe
gcgactgcgacgttcgatcttgcat

SEQ ID NO: 182792 - DNA, 25 bp, Artificial
  Probe
acgcgcaggtgacggccttagatct

SEQ ID NO: 182793 - DNA, 25 bp, Artificial
  Probe
cactccgcgagctgtatcgggtggt

SEQ ID NO: 182794 - DNA, 25 bp, Artificial
  Probe
tctcgccgccaatgcttgttcaggc

SEQ ID NO: 182795 - DNA, 25 bp, Artificial
  Probe
tctctcgccgccaatgcttgttcag

SEQ ID NO: 182796 - DNA, 25 bp, Artificial
  Probe
tctacagcgccagagtgctgacgcc

SEQ ID NO: 182797 - DNA, 25 bp, Artificial
  Probe
cttactggcaatgcttccacagcgt

SEQ ID NO: 182798 - DNA, 25 bp, Artificial
  Probe
aacatgcagatctacagcgccagag

SEQ ID NO: 182799 - DNA, 25 bp, Artificial
  Probe
tgcagatctacagcgccagagtgct

SEQ ID NO: 182800 - DNA, 25 bp, Artificial
  Probe
agcgactgcgacgttcgatcttgca

SEQ ID NO: 182801 - DNA, 25 bp, Artificial
  Probe
tgccgcagaccattatctggcggga

SEQ ID NO: 182802 - DNA, 25 bp, Artificial
  Probe
gccgttagcgactgcgacgttcgat

SEQ ID NO: 182803 - DNA, 25 bp, Artificial
  Probe
cagcggcatttggtcgggcagccgc

SEQ ID NO: 182804 - DNA, 25 bp, Artificial
  Probe
tggagcaatctcgcagtgcagtggt

SEQ ID NO: 182805 - DNA, 25 bp, Artificial
  Probe
tggtgcgccccaaaggcgtggtcgc

SEQ ID NO: 182806 - DNA, 25 bp, Artificial
  Probe
ggcagccgcacactatgagcaacat

SEQ ID NO: 182807 - DNA, 25 bp, Artificial
  Probe
gcggcatttggtcgggcagccgcac

SEQ ID NO: 182808 - DNA, 25 bp, Artificial
  Probe
gttaataaacaagccattgcagcgg

SEQ ID NO: 182809 - DNA, 25 bp, Artificial
  Probe
cgtcacgcgcaggtgacggccttag

SEQ ID NO: 182810 - DNA, 25 bp, Artificial
  Probe
tggagcaatctcgcagtgcagtggt

SEQ ID NO: 182811 - DNA, 25 bp, Artificial
  Probe
taaacaagccattgcagcggcattt

SEQ ID NO: 182812 - DNA, 25 bp, Artificial
  Probe
tcacgcgcaggtgacggccttagat

SEQ ID NO: 182813 - DNA, 25 bp, Artificial
  Probe
tctcgcagtgcagtggtgcggtaat

SEQ ID NO: 182814 - DNA, 25 bp, Artificial
  Probe
caagccattgcagcggcatttggtc

SEQ ID NO: 182815 - DNA, 25 bp, Artificial
  Probe
cacgcgcaggtgacggccttagatc

SEQ ID NO: 182816 - DNA, 25 bp, Artificial
  Probe
gtgcagtggtgcggtaatttatcca

SEQ ID NO: 182817 - DNA, 25 bp, Artificial
  Probe
agccattgcagcggcatttggtcgg

SEQ ID NO: 182818 - DNA, 25 bp, Artificial
  Probe
acgcgcaggtgacggccttagatct

SEQ ID NO: 182819 - DNA, 25 bp, Artificial
  Probe
gtgcggtaatttatccacggcactc

SEQ ID NO: 182820 - DNA, 25 bp, Artificial
  Probe
cattgcagcggcatttggtcgggca

SEQ ID NO: 182821 - DNA, 25 bp, Artificial
  Probe
gcaggtgacggccttagatctctcg

SEQ ID NO: 182822 - DNA, 25 bp, Artificial
  Probe
taatttatccacggcactccgcgag

SEQ ID NO: 182823 - DNA, 25 bp, Artificial
  Probe
cagcggcatttggtcgggcagccgc

SEQ ID NO: 182824 - DNA, 25 bp, Artificial
  Probe
aggtgacggccttagatctctcgcc

SEQ ID NO: 182825 - DNA, 25 bp, Artificial
  Probe
ttatccacggcactccgcgagctgt

SEQ ID NO: 182826 - DNA, 25 bp, Artificial
  Probe
gcggcatttggtcgggcagccgcac

SEQ ID NO: 182827 - DNA, 25 bp, Artificial
  Probe
gtgacggccttagatctctcgccgc

SEQ ID NO: 182828 - DNA, 25 bp, Artificial
  Probe
atccacggcactccgcgagctgtat

SEQ ID NO: 182829 - DNA, 25 bp, Artificial
  Probe
gcatttggtcgggcagccgcacact

SEQ ID NO: 182830 - DNA, 25 bp, Artificial
  Probe
gacggccttagatctctcgccgcca

SEQ ID NO: 182831 - DNA, 25 bp, Artificial
  Probe
ccacggcactccgcgagctgtatcg

SEQ ID NO: 182832 - DNA, 25 bp, Artificial
  Probe
catttggtcgggcagccgcacacta

SEQ ID NO: 182833 - DNA, 25 bp, Artificial
  Probe
acggccttagatctctcgccgccaa

SEQ ID NO: 182834 - DNA, 25 bp, Artificial
  Probe
acggcactccgcgagctgtatcggg

SEQ ID NO: 182835 - DNA, 25 bp, Artificial
  Probe
tttggtcgggcagccgcacactatg

SEQ ID NO: 182836 - DNA, 25 bp, Artificial
  Probe
gccttagatctctcgccgccaatgc

SEQ ID NO: 182837 - DNA, 25 bp, Artificial
  Probe
cactccgcgagctgtatcgggtggt

SEQ ID NO: 182838 - DNA, 25 bp, Artificial
  Probe
tggtcgggcagccgcacactatgag

SEQ ID NO: 182839 - DNA, 25 bp, Artificial
  Probe
tagatctctcgccgccaatgcttgt

SEQ ID NO: 182840 - DNA, 25 bp, Artificial
  Probe
tggtgcgccccaaaggcgtggtcgc

SEQ ID NO: 182841 - DNA, 25 bp, Artificial
  Probe
gtcgggcagccgcacactatgagca

SEQ ID NO: 182842 - DNA, 25 bp, Artificial
  Probe
tctctcgccgccaatgcttgttcag

SEQ ID NO: 182843 - DNA, 25 bp, Artificial
  Probe
ggcagccgcacactatgagcaacat

SEQ ID NO: 182844 - DNA, 25 bp, Artificial
  Probe
tctcgccgccaatgcttgttcaggc

SEQ ID NO: 182845 - DNA, 25 bp, Artificial
  Probe
gcagccgcacactatgagcaacatg

SEQ ID NO: 182846 - DNA, 25 bp, Artificial
  Probe
tcgccgccaatgcttgttcaggcac

SEQ ID NO: 182847 - DNA, 25 bp, Artificial
  Probe
cagccgcacactatgagcaacatgc

SEQ ID NO: 182848 - DNA, 25 bp, Artificial
  Probe
gccgccaatgcttgttcaggcacgc

SEQ ID NO: 182849 - DNA, 25 bp, Artificial
  Probe
gccgcacactatgagcaacatgcag

SEQ ID NO: 182850 - DNA, 25 bp, Artificial
  Probe
cgccaatgcttgttcaggcacgcca

SEQ ID NO: 182851 - DNA, 25 bp, Artificial
  Probe
actatgagcaacatgcagatctaca

SEQ ID NO: 182852 - DNA, 25 bp, Artificial
  Probe
aatgcttgttcaggcacgccagaag

SEQ ID NO: 182853 - DNA, 25 bp, Artificial
  Probe
ctatgagcaacatgcagatctacag

SEQ ID NO: 182854 - DNA, 25 bp, Artificial
  Probe
atgcttgttcaggcacgccagaagg

SEQ ID NO: 182855 - DNA, 25 bp, Artificial
  Probe
atgagcaacatgcagatctacagcg

SEQ ID NO: 182856 - DNA, 25 bp, Artificial
  Probe
tgcttgttcaggcacgccagaagga

SEQ ID NO: 182857 - DNA, 25 bp, Artificial
  Probe
gagcaacatgcagatctacagcgcc

SEQ ID NO: 182858 - DNA, 25 bp, Artificial
  Probe
cttgttcaggcacgccagaaggatg

SEQ ID NO: 182859 - DNA, 25 bp, Artificial
  Probe
aacatgcagatctacagcgccagag

SEQ ID NO: 182860 - DNA, 25 bp, Artificial
  Probe
tgttcaggcacgccagaaggatgcc

SEQ ID NO: 182861 - DNA, 25 bp, Artificial
  Probe
catgcagatctacagcgccagagtg

SEQ ID NO: 182862 - DNA, 25 bp, Artificial
  Probe
caggcacgccagaaggatgccgcag

SEQ ID NO: 182863 - DNA, 25 bp, Artificial
  Probe
atgcagatctacagcgccagagtgc

SEQ ID NO: 182864 - DNA, 25 bp, Artificial
  Probe
ggcacgccagaaggatgccgcagac

SEQ ID NO: 182865 - DNA, 25 bp, Artificial
  Probe
tgcagatctacagcgccagagtgct

SEQ ID NO: 182866 - DNA, 25 bp, Artificial
  Probe
gcacgccagaaggatgccgcagacc

SEQ ID NO: 182867 - DNA, 25 bp, Artificial
  Probe
cagatctacagcgccagagtgctga

SEQ ID NO: 182868 - DNA, 25 bp, Artificial
  Probe
cgccagaaggatgccgcagaccatt

SEQ ID NO: 182869 - DNA, 25 bp, Artificial
  Probe
tctacagcgccagagtgctgacgcc

SEQ ID NO: 182870 - DNA, 25 bp, Artificial
  Probe
agaaggatgccgcagaccattatct

SEQ ID NO: 182871 - DNA, 25 bp, Artificial
  Probe
tacagcgccagagtgctgacgcctt

SEQ ID NO: 182872 - DNA, 25 bp, Artificial
  Probe
aaggatgccgcagaccattatctgg

SEQ ID NO: 182873 - DNA, 25 bp, Artificial
  Probe
cagcgccagagtgctgacgccttac

SEQ ID NO: 182874 - DNA, 25 bp, Artificial
  Probe
ggatgccgcagaccattatctggcg

SEQ ID NO: 182875 - DNA, 25 bp, Artificial
  Probe
agcgccagagtgctgacgccttact

SEQ ID NO: 182876 - DNA, 25 bp, Artificial
  Probe
atgccgcagaccattatctggcggg

SEQ ID NO: 182877 - DNA, 25 bp, Artificial
  Probe
gcgccagagtgctgacgccttactg

SEQ ID NO: 182878 - DNA, 25 bp, Artificial
  Probe
tgccgcagaccattatctggcggga

SEQ ID NO: 182879 - DNA, 25 bp, Artificial
  Probe
cagagtgctgacgccttactggcaa

SEQ ID NO: 182880 - DNA, 25 bp, Artificial
  Probe
gagatatcgaatccctgccgttagc

SEQ ID NO: 182881 - DNA, 25 bp, Artificial
  Probe
gagtgctgacgccttactggcaatg

SEQ ID NO: 182882 - DNA, 25 bp, Artificial
  Probe
gatatcgaatccctgccgttagcga

SEQ ID NO: 182883 - DNA, 25 bp, Artificial
  Probe
gtgctgacgccttactggcaatgct

SEQ ID NO: 182884 - DNA, 25 bp, Artificial
  Probe
tatcgaatccctgccgttagcgact

SEQ ID NO: 182885 - DNA, 25 bp, Artificial
  Probe
gctgacgccttactggcaatgcttc

SEQ ID NO: 182886 - DNA, 25 bp, Artificial
  Probe
tcgaatccctgccgttagcgactgc

SEQ ID NO: 182887 - DNA, 25 bp, Artificial
  Probe
gacgccttactggcaatgcttccac

SEQ ID NO: 182888 - DNA, 25 bp, Artificial
  Probe
aatccctgccgttagcgactgcgac

SEQ ID NO: 182889 - DNA, 25 bp, Artificial
  Probe
acgccttactggcaatgcttccaca

SEQ ID NO: 182890 - DNA, 25 bp, Artificial
  Probe
atccctgccgttagcgactgcgacg

SEQ ID NO: 182891 - DNA, 25 bp, Artificial
  Probe
gccttactggcaatgcttccacagc

SEQ ID NO: 182892 - DNA, 25 bp, Artificial
  Probe
ctgccgttagcgactgcgacgttcg

SEQ ID NO: 182893 - DNA, 25 bp, Artificial
  Probe
cttactggcaatgcttccacagcgt

SEQ ID NO: 182894 - DNA, 25 bp, Artificial
  Probe
gccgttagcgactgcgacgttcgat

SEQ ID NO: 182895 - DNA, 25 bp, Artificial
  Probe
tactggcaatgcttccacagcgtaa

SEQ ID NO: 182896 - DNA, 25 bp, Artificial
  Probe
ttagcgactgcgacgttcgatcttg

SEQ ID NO: 182897 - DNA, 25 bp, Artificial
  Probe
ggcaatgcttccacagcgtaaatac

SEQ ID NO: 182898 - DNA, 25 bp, Artificial
  Probe
agcgactgcgacgttcgatcttgca

SEQ ID NO: 182899 - DNA, 25 bp, Artificial
  Probe
gcaatgcttccacagcgtaaataca

SEQ ID NO: 182900 - DNA, 25 bp, Artificial
  Probe
gcgactgcgacgttcgatcttgcat

SEQ ID NO: 182901 - DNA, 25 bp, Artificial
  Probe
caatgcttccacagcgtaaatacac

SEQ ID NO: 182902 - DNA, 25 bp, Artificial
  Probe
actgcgacgttcgatcttgcatgga

SEQ ID NO: 182903 - DNA, 25 bp, Artificial
  Probe
atgcttccacagcgtaaatacaccc

SEQ ID NO: 182904 - DNA, 25 bp, Artificial
  Probe
cgacgttcgatcttgcatggagcaa

SEQ ID NO: 182905 - DNA, 25 bp, Artificial
  Probe
gcttccacagcgtaaatacacccac

SEQ ID NO: 182906 - DNA, 25 bp, Artificial
  Probe
acgttcgatcttgcatggagcaatc

SEQ ID NO: 182907 - DNA, 25 bp, Artificial
  Probe
tggacctggctggatgagccgccac

SEQ ID NO: 182908 - DNA, 25 bp, Artificial
  Probe
gttcgatcttgcatggagcaatctc

SEQ ID NO: 182909 - DNA, 25 bp, Artificial
  Probe
gacctggctggatgagccgccactg

SEQ ID NO: 182910 - DNA, 25 bp, Artificial
  Probe
tcgatcttgcatggagcaatctcgc

SEQ ID NO: 182911 - DNA, 25 bp, Artificial
  Probe
cctggctggatgagccgccactggc

SEQ ID NO: 182912 - DNA, 25 bp, Artificial
  Probe
tcttgcatggagcaatctcgcagtg

SEQ ID NO: 182913 - DNA, 25 bp, Artificial
  Probe
gatgagccgccactggcgggaacgt

SEQ ID NO: 182914 - DNA, 25 bp, Artificial
  Probe
gcatggagcaatctcgcagtgcagt

SEQ ID NO: 182915 - DNA, 25 bp, Artificial
  Probe
ggttaataaacaagccattgcagcg

SEQ ID NO: 182916 - DNA, 25 bp, Artificial
  Probe
gagccgccactggcgggaacgtcac

SEQ ID NO: 182917 - DNA, 25 bp, Artificial
  Probe
atggagcaatctcgcagtgcagtgg

SEQ ID NO: 182918 - DNA, 25 bp, Artificial
  Probe
gttaataaacaagccattgcagcgg

SEQ ID NO: 182919 - DNA, 25 bp, Artificial
  Probe
cgtcacgcgcaggtgacggccttag

SEQ ID NO: 182920 - DNA, 25 bp, Artificial
  Probe
tggagcaatctcgcagtgcagtggt

SEQ ID NO: 182921 - DNA, 25 bp, Artificial
  Probe
taaacaagccattgcagcggcattt

SEQ ID NO: 182922 - DNA, 25 bp, Artificial
  Probe
tcacgcgcaggtgacggccttagat

SEQ ID NO: 182923 - DNA, 25 bp, Artificial
  Probe
tctcgcagtgcagtggtgcggtaat

SEQ ID NO: 182924 - DNA, 25 bp, Artificial
  Probe
caagccattgcagcggcatttggtc

SEQ ID NO: 182925 - DNA, 25 bp, Artificial
  Probe
cacgcgcaggtgacggccttagatc

SEQ ID NO: 182926 - DNA, 25 bp, Artificial
  Probe
gtgcagtggtgcggtaatttatcca

SEQ ID NO: 182927 - DNA, 25 bp, Artificial
  Probe
agccattgcagcggcatttggtcgg

SEQ ID NO: 182928 - DNA, 25 bp, Artificial
  Probe
acgcgcaggtgacggccttagatct

SEQ ID NO: 182929 - DNA, 25 bp, Artificial
  Probe
gtgcggtaatttatccacggcactc

SEQ ID NO: 182930 - DNA, 25 bp, Artificial
  Probe
cattgcagcggcatttggtcgggca

SEQ ID NO: 182931 - DNA, 25 bp, Artificial
  Probe
gcaggtgacggccttagatctctcg

SEQ ID NO: 182932 - DNA, 25 bp, Artificial
  Probe
taatttatccacggcactccgcgag

SEQ ID NO: 182933 - DNA, 25 bp, Artificial
  Probe
cagcggcatttggtcgggcagccgc

SEQ ID NO: 182934 - DNA, 25 bp, Artificial
  Probe
aggtgacggccttagatctctcgcc

SEQ ID NO: 182935 - DNA, 25 bp, Artificial
  Probe
ttatccacggcactccgcgagctgt

SEQ ID NO: 182936 - DNA, 25 bp, Artificial
  Probe
gcggcatttggtcgggcagccgcac

SEQ ID NO: 182937 - DNA, 25 bp, Artificial
  Probe
gtgacggccttagatctctcgccgc

SEQ ID NO: 182938 - DNA, 25 bp, Artificial
  Probe
atccacggcactccgcgagctgtat

SEQ ID NO: 182939 - DNA, 25 bp, Artificial
  Probe
gcatttggtcgggcagccgcacact

SEQ ID NO: 182940 - DNA, 25 bp, Artificial
  Probe
gacggccttagatctctcgccgcca

SEQ ID NO: 182941 - DNA, 25 bp, Artificial
  Probe
ccacggcactccgcgagctgtatcg

SEQ ID NO: 182942 - DNA, 25 bp, Artificial
  Probe
catttggtcgggcagccgcacacta

SEQ ID NO: 182943 - DNA, 25 bp, Artificial
  Probe
acggccttagatctctcgccgccaa

SEQ ID NO: 182944 - DNA, 25 bp, Artificial
  Probe
acggcactccgcgagctgtatcggg

SEQ ID NO: 182945 - DNA, 25 bp, Artificial
  Probe
tttggtcgggcagccgcacactatg

SEQ ID NO: 182946 - DNA, 25 bp, Artificial
  Probe
gccttagatctctcgccgccaatgc

SEQ ID NO: 182947 - DNA, 25 bp, Artificial
  Probe
cactccgcgagctgtatcgggtggt

SEQ ID NO: 182948 - DNA, 25 bp, Artificial
  Probe
tggtcgggcagccgcacactatgag

SEQ ID NO: 182949 - DNA, 25 bp, Artificial
  Probe
tagatctctcgccgccaatgcttgt

SEQ ID NO: 182950 - DNA, 25 bp, Artificial
  Probe
tggtgcgccccaaaggcgtggtcgc

SEQ ID NO: 182951 - DNA, 25 bp, Artificial
  Probe
gtcgggcagccgcacactatgagca

SEQ ID NO: 182952 - DNA, 25 bp, Artificial
  Probe
tctctcgccgccaatgcttgttcag

SEQ ID NO: 182953 - DNA, 25 bp, Artificial
  Probe
ggcagccgcacactatgagcaacat

SEQ ID NO: 182954 - DNA, 25 bp, Artificial
  Probe
tctcgccgccaatgcttgttcaggc

SEQ ID NO: 182955 - DNA, 25 bp, Artificial
  Probe
gcagccgcacactatgagcaacatg

SEQ ID NO: 182956 - DNA, 25 bp, Artificial
  Probe
tcgccgccaatgcttgttcaggcac

SEQ ID NO: 182957 - DNA, 25 bp, Artificial
  Probe
cagccgcacactatgagcaacatgc

SEQ ID NO: 182958 - DNA, 25 bp, Artificial
  Probe
gccgccaatgcttgttcaggcacgc

SEQ ID NO: 182959 - DNA, 25 bp, Artificial
  Probe
gccgcacactatgagcaacatgcag

SEQ ID NO: 182960 - DNA, 25 bp, Artificial
  Probe
cgccaatgcttgttcaggcacgcca

SEQ ID NO: 182961 - DNA, 25 bp, Artificial
  Probe
actatgagcaacatgcagatctaca

SEQ ID NO: 182962 - DNA, 25 bp, Artificial
  Probe
aatgcttgttcaggcacgccagaag

SEQ ID NO: 182963 - DNA, 25 bp, Artificial
  Probe
ctatgagcaacatgcagatctacag

SEQ ID NO: 182964 - DNA, 25 bp, Artificial
  Probe
atgcttgttcaggcacgccagaagg

SEQ ID NO: 182965 - DNA, 25 bp, Artificial
  Probe
atgagcaacatgcagatctacagcg

SEQ ID NO: 182966 - DNA, 25 bp, Artificial
  Probe
tgcttgttcaggcacgccagaagga

SEQ ID NO: 182967 - DNA, 25 bp, Artificial
  Probe
gagcaacatgcagatctacagcgcc

SEQ ID NO: 182968 - DNA, 25 bp, Artificial
  Probe
cttgttcaggcacgccagaaggatg

SEQ ID NO: 182969 - DNA, 25 bp, Artificial
  Probe
aacatgcagatctacagcgccagag

SEQ ID NO: 182970 - DNA, 25 bp, Artificial
  Probe
tgttcaggcacgccagaaggatgcc

SEQ ID NO: 182971 - DNA, 25 bp, Artificial
  Probe
catgcagatctacagcgccagagtg

SEQ ID NO: 182972 - DNA, 25 bp, Artificial
  Probe
caggcacgccagaaggatgccgcag

SEQ ID NO: 182973 - DNA, 25 bp, Artificial
  Probe
atgcagatctacagcgccagagtgc

SEQ ID NO: 182974 - DNA, 25 bp, Artificial
  Probe
ggcacgccagaaggatgccgcagac

SEQ ID NO: 182975 - DNA, 25 bp, Artificial
  Probe
tgcagatctacagcgccagagtgct

SEQ ID NO: 182976 - DNA, 25 bp, Artificial
  Probe
gcacgccagaaggatgccgcagacc

SEQ ID NO: 182977 - DNA, 25 bp, Artificial
  Probe
cagatctacagcgccagagtgctga

SEQ ID NO: 182978 - DNA, 25 bp, Artificial
  Probe
cgccagaaggatgccgcagaccatt

SEQ ID NO: 182979 - DNA, 25 bp, Artificial
  Probe
tctacagcgccagagtgctgacgcc

SEQ ID NO: 182980 - DNA, 25 bp, Artificial
  Probe
agaaggatgccgcagaccattatct

SEQ ID NO: 182981 - DNA, 25 bp, Artificial
  Probe
tacagcgccagagtgctgacgcctt

SEQ ID NO: 182982 - DNA, 25 bp, Artificial
  Probe
aaggatgccgcagaccattatctgg

SEQ ID NO: 182983 - DNA, 25 bp, Artificial
  Probe
cagcgccagagtgctgacgccttac

SEQ ID NO: 182984 - DNA, 25 bp, Artificial
  Probe
ggatgccgcagaccattatctggcg

SEQ ID NO: 182985 - DNA, 25 bp, Artificial
  Probe
agcgccagagtgctgacgccttact

SEQ ID NO: 182986 - DNA, 25 bp, Artificial
  Probe
atgccgcagaccattatctggcggg

SEQ ID NO: 182987 - DNA, 25 bp, Artificial
  Probe
gcgccagagtgctgacgccttactg

SEQ ID NO: 182988 - DNA, 25 bp, Artificial
  Probe
tgccgcagaccattatctggcggga

SEQ ID NO: 182989 - DNA, 25 bp, Artificial
  Probe
cagagtgctgacgccttactggcaa

SEQ ID NO: 182990 - DNA, 25 bp, Artificial
  Probe
gagatatcgaatccctgccgttagc

SEQ ID NO: 182991 - DNA, 25 bp, Artificial
  Probe
gagtgctgacgccttactggcaatg

SEQ ID NO: 182992 - DNA, 25 bp, Artificial
  Probe
gatatcgaatccctgccgttagcga

SEQ ID NO: 182993 - DNA, 25 bp, Artificial
  Probe
gtgctgacgccttactggcaatgct

SEQ ID NO: 182994 - DNA, 25 bp, Artificial
  Probe
tatcgaatccctgccgttagcgact

SEQ ID NO: 182995 - DNA, 25 bp, Artificial
  Probe
gctgacgccttactggcaatgcttc

SEQ ID NO: 182996 - DNA, 25 bp, Artificial
  Probe
tcgaatccctgccgttagcgactgc

SEQ ID NO: 182997 - DNA, 25 bp, Artificial
  Probe
gacgccttactggcaatgcttccac

SEQ ID NO: 182998 - DNA, 25 bp, Artificial
  Probe
aatccctgccgttagcgactgcgac

SEQ ID NO: 182999 - DNA, 25 bp, Artificial
  Probe
acgccttactggcaatgcttccaca

SEQ ID NO: 183000 - DNA, 25 bp, Artificial
  Probe
atccctgccgttagcgactgcgacg

SEQ ID NO: 183001 - DNA, 25 bp, Artificial
  Probe
gccttactggcaatgcttccacagc

SEQ ID NO: 183002 - DNA, 25 bp, Artificial
  Probe
ctgccgttagcgactgcgacgttcg

SEQ ID NO: 183003 - DNA, 25 bp, Artificial
  Probe
cttactggcaatgcttccacagcgt

SEQ ID NO: 183004 - DNA, 25 bp, Artificial
  Probe
gccgttagcgactgcgacgttcgat

SEQ ID NO: 183005 - DNA, 25 bp, Artificial
  Probe
tactggcaatgcttccacagcgtaa

SEQ ID NO: 183006 - DNA, 25 bp, Artificial
  Probe
ttagcgactgcgacgttcgatcttg

SEQ ID NO: 183007 - DNA, 25 bp, Artificial
  Probe
ggcaatgcttccacagcgtaaatac

SEQ ID NO: 183008 - DNA, 25 bp, Artificial
  Probe
agcgactgcgacgttcgatcttgca

SEQ ID NO: 183009 - DNA, 25 bp, Artificial
  Probe
gcaatgcttccacagcgtaaataca

SEQ ID NO: 183010 - DNA, 25 bp, Artificial
  Probe
gcgactgcgacgttcgatcttgcat

SEQ ID NO: 183011 - DNA, 25 bp, Artificial
  Probe
caatgcttccacagcgtaaatacac

SEQ ID NO: 183012 - DNA, 25 bp, Artificial
  Probe
actgcgacgttcgatcttgcatgga

SEQ ID NO: 183013 - DNA, 25 bp, Artificial
  Probe
atgcttccacagcgtaaatacaccc

SEQ ID NO: 183014 - DNA, 25 bp, Artificial
  Probe
cgacgttcgatcttgcatggagcaa

SEQ ID NO: 183015 - DNA, 25 bp, Artificial
  Probe
gcttccacagcgtaaatacacccac

SEQ ID NO: 183016 - DNA, 25 bp, Artificial
  Probe
acgttcgatcttgcatggagcaatc

SEQ ID NO: 183017 - DNA, 25 bp, Artificial
  Probe
tggacctggctggatgagccgccac

SEQ ID NO: 183018 - DNA, 25 bp, Artificial
  Probe
gttcgatcttgcatggagcaatctc

SEQ ID NO: 183019 - DNA, 25 bp, Artificial
  Probe
gacctggctggatgagccgccactg

SEQ ID NO: 183020 - DNA, 25 bp, Artificial
  Probe
tcgatcttgcatggagcaatctcgc

SEQ ID NO: 183021 - DNA, 25 bp, Artificial
  Probe
cctggctggatgagccgccactggc

SEQ ID NO: 183022 - DNA, 25 bp, Artificial
  Probe
tcttgcatggagcaatctcgcagtg

SEQ ID NO: 183023 - DNA, 25 bp, Artificial
  Probe
gatgagccgccactggcgggaacgt

SEQ ID NO: 183024 - DNA, 25 bp, Artificial
  Probe
gcatggagcaatctcgcagtgcagt

SEQ ID NO: 183025 - DNA, 25 bp, Artificial
  Probe
ggttaataaacaagccattgcagcg

SEQ ID NO: 183026 - DNA, 25 bp, Artificial
  Probe
gagccgccactggcgggaacgtcac

SEQ ID NO: 183027 - DNA, 25 bp, Artificial
  Probe
atggagcaatctcgcagtgcagtgg

SEQ ID NO: 183028 - DNA, 25 bp, Artificial
  Probe
gttaataaacaagccattgcagcgg

SEQ ID NO: 183029 - DNA, 25 bp, Artificial
  Probe
cgtcacgcgcaggtgacggccttag

SEQ ID NO: 183030 - DNA, 25 bp, Artificial
  Probe
tggagcaatctcgcagtgcagtggt

SEQ ID NO: 183031 - DNA, 25 bp, Artificial
  Probe
taaacaagccattgcagcggcattt

SEQ ID NO: 183032 - DNA, 25 bp, Artificial
  Probe
tcacgcgcaggtgacggccttagat

SEQ ID NO: 183033 - DNA, 25 bp, Artificial
  Probe
tctcgcagtgcagtggtgcggtaat

SEQ ID NO: 183034 - DNA, 25 bp, Artificial
  Probe
caagccattgcagcggcatttggtc

SEQ ID NO: 183035 - DNA, 25 bp, Artificial
  Probe
cacgcgcaggtgacggccttagatc

SEQ ID NO: 183036 - DNA, 25 bp, Artificial
  Probe
gtgcagtggtgcggtaatttatcca

SEQ ID NO: 183037 - DNA, 25 bp, Artificial
  Probe
agccattgcagcggcatttggtcgg

SEQ ID NO: 183038 - DNA, 25 bp, Artificial
  Probe
acgcgcaggtgacggccttagatct

SEQ ID NO: 183039 - DNA, 25 bp, Artificial
  Probe
gtgcggtaatttatccacggcactc

SEQ ID NO: 183040 - DNA, 25 bp, Artificial
  Probe
cattgcagcggcatttggtcgggca

SEQ ID NO: 183041 - DNA, 25 bp, Artificial
  Probe
gcaggtgacggccttagatctctcg

SEQ ID NO: 183042 - DNA, 25 bp, Artificial
  Probe
taatttatccacggcactccgcgag

SEQ ID NO: 183043 - DNA, 25 bp, Artificial
  Probe
cagcggcatttggtcgggcagccgc

SEQ ID NO: 183044 - DNA, 25 bp, Artificial
  Probe
aggtgacggccttagatctctcgcc

SEQ ID NO: 183045 - DNA, 25 bp, Artificial
  Probe
ttatccacggcactccgcgagctgt

SEQ ID NO: 183046 - DNA, 25 bp, Artificial
  Probe
gcggcatttggtcgggcagccgcac

SEQ ID NO: 183047 - DNA, 25 bp, Artificial
  Probe
gtgacggccttagatctctcgccgc

SEQ ID NO: 183048 - DNA, 25 bp, Artificial
  Probe
atccacggcactccgcgagctgtat

SEQ ID NO: 183049 - DNA, 25 bp, Artificial
  Probe
gcatttggtcgggcagccgcacact

SEQ ID NO: 183050 - DNA, 25 bp, Artificial
  Probe
gacggccttagatctctcgccgcca

SEQ ID NO: 183051 - DNA, 25 bp, Artificial
  Probe
ccacggcactccgcgagctgtatcg

SEQ ID NO: 183052 - DNA, 25 bp, Artificial
  Probe
catttggtcgggcagccgcacacta

SEQ ID NO: 183053 - DNA, 25 bp, Artificial
  Probe
acggccttagatctctcgccgccaa

SEQ ID NO: 183054 - DNA, 25 bp, Artificial
  Probe
acggcactccgcgagctgtatcggg

SEQ ID NO: 183055 - DNA, 25 bp, Artificial
  Probe
tttggtcgggcagccgcacactatg

SEQ ID NO: 183056 - DNA, 25 bp, Artificial
  Probe
gccttagatctctcgccgccaatgc

SEQ ID NO: 183057 - DNA, 25 bp, Artificial
  Probe
cactccgcgagctgtatcgggtggt

SEQ ID NO: 183058 - DNA, 25 bp, Artificial
  Probe
tggtcgggcagccgcacactatgag

SEQ ID NO: 183059 - DNA, 25 bp, Artificial
  Probe
tagatctctcgccgccaatgcttgt

SEQ ID NO: 183060 - DNA, 25 bp, Artificial
  Probe
tggtgcgccccaaaggcgtggtcgc

SEQ ID NO: 183061 - DNA, 25 bp, Artificial
  Probe
gtcgggcagccgcacactatgagca

SEQ ID NO: 183062 - DNA, 25 bp, Artificial
  Probe
tctctcgccgccaatgcttgttcag

SEQ ID NO: 183063 - DNA, 25 bp, Artificial
  Probe
ggcagccgcacactatgagcaacat

SEQ ID NO: 183064 - DNA, 25 bp, Artificial
  Probe
tctcgccgccaatgcttgttcaggc

SEQ ID NO: 183065 - DNA, 25 bp, Artificial
  Probe
gcagccgcacactatgagcaacatg

SEQ ID NO: 183066 - DNA, 25 bp, Artificial
  Probe
tcgccgccaatgcttgttcaggcac

SEQ ID NO: 183067 - DNA, 25 bp, Artificial
  Probe
cagccgcacactatgagcaacatgc

SEQ ID NO: 183068 - DNA, 25 bp, Artificial
  Probe
gccgccaatgcttgttcaggcacgc

SEQ ID NO: 183069 - DNA, 25 bp, Artificial
  Probe
gccgcacactatgagcaacatgcag

SEQ ID NO: 183070 - DNA, 25 bp, Artificial
  Probe
cgccaatgcttgttcaggcacgcca

SEQ ID NO: 183071 - DNA, 25 bp, Artificial
  Probe
actatgagcaacatgcagatctaca

SEQ ID NO: 183072 - DNA, 25 bp, Artificial
  Probe
aatgcttgttcaggcacgccagaag

SEQ ID NO: 183073 - DNA, 25 bp, Artificial
  Probe
ctatgagcaacatgcagatctacag

SEQ ID NO: 183074 - DNA, 25 bp, Artificial
  Probe
atgcttgttcaggcacgccagaagg

SEQ ID NO: 183075 - DNA, 25 bp, Artificial
  Probe
atgagcaacatgcagatctacagcg

SEQ ID NO: 183076 - DNA, 25 bp, Artificial
  Probe
tgcttgttcaggcacgccagaagga

SEQ ID NO: 183077 - DNA, 25 bp, Artificial
  Probe
gagcaacatgcagatctacagcgcc

SEQ ID NO: 183078 - DNA, 25 bp, Artificial
  Probe
cttgttcaggcacgccagaaggatg

SEQ ID NO: 183079 - DNA, 25 bp, Artificial
  Probe
aacatgcagatctacagcgccagag

SEQ ID NO: 183080 - DNA, 25 bp, Artificial
  Probe
tgttcaggcacgccagaaggatgcc

SEQ ID NO: 183081 - DNA, 25 bp, Artificial
  Probe
catgcagatctacagcgccagagtg

SEQ ID NO: 183082 - DNA, 25 bp, Artificial
  Probe
caggcacgccagaaggatgccgcag

SEQ ID NO: 183083 - DNA, 25 bp, Artificial
  Probe
atgcagatctacagcgccagagtgc

SEQ ID NO: 183084 - DNA, 25 bp, Artificial
  Probe
ggcacgccagaaggatgccgcagac

SEQ ID NO: 183085 - DNA, 25 bp, Artificial
  Probe
tgcagatctacagcgccagagtgct

SEQ ID NO: 183086 - DNA, 25 bp, Artificial
  Probe
gcacgccagaaggatgccgcagacc

SEQ ID NO: 183087 - DNA, 25 bp, Artificial
  Probe
cagatctacagcgccagagtgctga

SEQ ID NO: 183088 - DNA, 25 bp, Artificial
  Probe
cgccagaaggatgccgcagaccatt

SEQ ID NO: 183089 - DNA, 25 bp, Artificial
  Probe
tctacagcgccagagtgctgacgcc

SEQ ID NO: 183090 - DNA, 25 bp, Artificial
  Probe
agaaggatgccgcagaccattatct

SEQ ID NO: 183091 - DNA, 25 bp, Artificial
  Probe
tacagcgccagagtgctgacgcctt

SEQ ID NO: 183092 - DNA, 25 bp, Artificial
  Probe
aaggatgccgcagaccattatctgg

SEQ ID NO: 183093 - DNA, 25 bp, Artificial
  Probe
cagcgccagagtgctgacgccttac

SEQ ID NO: 183094 - DNA, 25 bp, Artificial
  Probe
ggatgccgcagaccattatctggcg

SEQ ID NO: 183095 - DNA, 25 bp, Artificial
  Probe
agcgccagagtgctgacgccttact

SEQ ID NO: 183096 - DNA, 25 bp, Artificial
  Probe
atgccgcagaccattatctggcggg

SEQ ID NO: 183097 - DNA, 25 bp, Artificial
  Probe
gcgccagagtgctgacgccttactg

SEQ ID NO: 183098 - DNA, 25 bp, Artificial
  Probe
tgccgcagaccattatctggcggga

SEQ ID NO: 183099 - DNA, 25 bp, Artificial
  Probe
cagagtgctgacgccttactggcaa

SEQ ID NO: 183100 - DNA, 25 bp, Artificial
  Probe
gagatatcgaatccctgccgttagc

SEQ ID NO: 183101 - DNA, 25 bp, Artificial
  Probe
gagtgctgacgccttactggcaatg

SEQ ID NO: 183102 - DNA, 25 bp, Artificial
  Probe
gatatcgaatccctgccgttagcga

SEQ ID NO: 183103 - DNA, 25 bp, Artificial
  Probe
gtgctgacgccttactggcaatgct

SEQ ID NO: 183104 - DNA, 25 bp, Artificial
  Probe
tatcgaatccctgccgttagcgact

SEQ ID NO: 183105 - DNA, 25 bp, Artificial
  Probe
gctgacgccttactggcaatgcttc

SEQ ID NO: 183106 - DNA, 25 bp, Artificial
  Probe
tcgaatccctgccgttagcgactgc

SEQ ID NO: 183107 - DNA, 25 bp, Artificial
  Probe
gacgccttactggcaatgcttccac

SEQ ID NO: 183108 - DNA, 25 bp, Artificial
  Probe
aatccctgccgttagcgactgcgac

SEQ ID NO: 183109 - DNA, 25 bp, Artificial
  Probe
acgccttactggcaatgcttccaca

SEQ ID NO: 183110 - DNA, 25 bp, Artificial
  Probe
atccctgccgttagcgactgcgacg

SEQ ID NO: 183111 - DNA, 25 bp, Artificial
  Probe
gccttactggcaatgcttccacagc

SEQ ID NO: 183112 - DNA, 25 bp, Artificial
  Probe
ctgccgttagcgactgcgacgttcg

SEQ ID NO: 183113 - DNA, 25 bp, Artificial
  Probe
cttactggcaatgcttccacagcgt

SEQ ID NO: 183114 - DNA, 25 bp, Artificial
  Probe
gccgttagcgactgcgacgttcgat

SEQ ID NO: 183115 - DNA, 25 bp, Artificial
  Probe
tactggcaatgcttccacagcgtaa

SEQ ID NO: 183116 - DNA, 25 bp, Artificial
  Probe
ttagcgactgcgacgttcgatcttg

SEQ ID NO: 183117 - DNA, 25 bp, Artificial
  Probe
ggcaatgcttccacagcgtaaatac

SEQ ID NO: 183118 - DNA, 25 bp, Artificial
  Probe
agcgactgcgacgttcgatcttgca

SEQ ID NO: 183119 - DNA, 25 bp, Artificial
  Probe
gcaatgcttccacagcgtaaataca

SEQ ID NO: 183120 - DNA, 25 bp, Artificial
  Probe
gcgactgcgacgttcgatcttgcat

SEQ ID NO: 183121 - DNA, 25 bp, Artificial
  Probe
caatgcttccacagcgtaaatacac

SEQ ID NO: 183122 - DNA, 25 bp, Artificial
  Probe
actgcgacgttcgatcttgcatgga

SEQ ID NO: 183123 - DNA, 25 bp, Artificial
  Probe
atgcttccacagcgtaaatacaccc

SEQ ID NO: 183124 - DNA, 25 bp, Artificial
  Probe
cgacgttcgatcttgcatggagcaa

SEQ ID NO: 183125 - DNA, 25 bp, Artificial
  Probe
gcttccacagcgtaaatacacccac

SEQ ID NO: 183126 - DNA, 25 bp, Artificial
  Probe
acgttcgatcttgcatggagcaatc

SEQ ID NO: 183127 - DNA, 25 bp, Artificial
  Probe
tggacctggctggatgagccgccac

SEQ ID NO: 183128 - DNA, 25 bp, Artificial
  Probe
gttcgatcttgcatggagcaatctc

SEQ ID NO: 183129 - DNA, 25 bp, Artificial
  Probe
gacctggctggatgagccgccactg

SEQ ID NO: 183130 - DNA, 25 bp, Artificial
  Probe
tcgatcttgcatggagcaatctcgc

SEQ ID NO: 183131 - DNA, 25 bp, Artificial
  Probe
cctggctggatgagccgccactggc

SEQ ID NO: 183132 - DNA, 25 bp, Artificial
  Probe
tcttgcatggagcaatctcgcagtg

SEQ ID NO: 183133 - DNA, 25 bp, Artificial
  Probe
gatgagccgccactggcgggaacgt

SEQ ID NO: 183134 - DNA, 25 bp, Artificial
  Probe
gcatggagcaatctcgcagtgcagt

SEQ ID NO: 183135 - DNA, 25 bp, Artificial
  Probe
ggttaataaacaagccattgcagcg

SEQ ID NO: 183136 - DNA, 25 bp, Artificial
  Probe
gagccgccactggcgggaacgtcac

SEQ ID NO: 183137 - DNA, 25 bp, Artificial
  Probe
atggagcaatctcgcagtgcagtgg

SEQ ID NO: 183138 - DNA, 25 bp, Artificial
  Probe
gttaataaacaagccattgcagcgg

SEQ ID NO: 183139 - DNA, 25 bp, Artificial
  Probe
cgtcacgcgcaggtgacggccttag

SEQ ID NO: 183140 - DNA, 25 bp, Artificial
  Probe
tggagcaatctcgcagtgcagtggt

SEQ ID NO: 183141 - DNA, 25 bp, Artificial
  Probe
taaacaagccattgcagcggcattt

SEQ ID NO: 183142 - DNA, 25 bp, Artificial
  Probe
tcacgcgcaggtgacggccttagat

SEQ ID NO: 183143 - DNA, 25 bp, Artificial
  Probe
tctcgcagtgcagtggtgcggtaat

SEQ ID NO: 183144 - DNA, 25 bp, Artificial
  Probe
caagccattgcagcggcatttggtc

SEQ ID NO: 183145 - DNA, 25 bp, Artificial
  Probe
cacgcgcaggtgacggccttagatc

SEQ ID NO: 183146 - DNA, 25 bp, Artificial
  Probe
gtgcagtggtgcggtaatttatcca

SEQ ID NO: 183147 - DNA, 25 bp, Artificial
  Probe
agccattgcagcggcatttggtcgg

SEQ ID NO: 183148 - DNA, 25 bp, Artificial
  Probe
acgcgcaggtgacggccttagatct

SEQ ID NO: 183149 - DNA, 25 bp, Artificial
  Probe
gtgcggtaatttatccacggcactc

SEQ ID NO: 183150 - DNA, 25 bp, Artificial
  Probe
cattgcagcggcatttggtcgggca

SEQ ID NO: 183151 - DNA, 25 bp, Artificial
  Probe
gcaggtgacggccttagatctctcg

SEQ ID NO: 183152 - DNA, 25 bp, Artificial
  Probe
taatttatccacggcactccgcgag

SEQ ID NO: 183153 - DNA, 25 bp, Artificial
  Probe
cagcggcatttggtcgggcagccgc

SEQ ID NO: 183154 - DNA, 25 bp, Artificial
  Probe
aggtgacggccttagatctctcgcc

SEQ ID NO: 183155 - DNA, 25 bp, Artificial
  Probe
ttatccacggcactccgcgagctgt

SEQ ID NO: 183156 - DNA, 25 bp, Artificial
  Probe
gcggcatttggtcgggcagccgcac

SEQ ID NO: 183157 - DNA, 25 bp, Artificial
  Probe
gtgacggccttagatctctcgccgc

SEQ ID NO: 183158 - DNA, 25 bp, Artificial
  Probe
atccacggcactccgcgagctgtat

SEQ ID NO: 183159 - DNA, 25 bp, Artificial
  Probe
gcatttggtcgggcagccgcacact

SEQ ID NO: 183160 - DNA, 25 bp, Artificial
  Probe
gacggccttagatctctcgccgcca

SEQ ID NO: 183161 - DNA, 25 bp, Artificial
  Probe
ccacggcactccgcgagctgtatcg

SEQ ID NO: 183162 - DNA, 25 bp, Artificial
  Probe
catttggtcgggcagccgcacacta

SEQ ID NO: 183163 - DNA, 25 bp, Artificial
  Probe
acggccttagatctctcgccgccaa

SEQ ID NO: 183164 - DNA, 25 bp, Artificial
  Probe
acggcactccgcgagctgtatcggg

SEQ ID NO: 183165 - DNA, 25 bp, Artificial
  Probe
tttggtcgggcagccgcacactatg

SEQ ID NO: 183166 - DNA, 25 bp, Artificial
  Probe
gccttagatctctcgccgccaatgc

SEQ ID NO: 183167 - DNA, 25 bp, Artificial
  Probe
cactccgcgagctgtatcgggtggt

SEQ ID NO: 183168 - DNA, 25 bp, Artificial
  Probe
tggtcgggcagccgcacactatgag

SEQ ID NO: 183169 - DNA, 25 bp, Artificial
  Probe
tagatctctcgccgccaatgcttgt

SEQ ID NO: 183170 - DNA, 25 bp, Artificial
  Probe
tggtgcgccccaaaggcgtggtcgc

SEQ ID NO: 183171 - DNA, 25 bp, Artificial
  Probe
gtcgggcagccgcacactatgagca

SEQ ID NO: 183172 - DNA, 25 bp, Artificial
  Probe
tctctcgccgccaatgcttgttcag

SEQ ID NO: 183173 - DNA, 25 bp, Artificial
  Probe
ggcagccgcacactatgagcaacat

SEQ ID NO: 183174 - DNA, 25 bp, Artificial
  Probe
tctcgccgccaatgcttgttcaggc

SEQ ID NO: 183175 - DNA, 25 bp, Artificial
  Probe
gcagccgcacactatgagcaacatg

SEQ ID NO: 183176 - DNA, 25 bp, Artificial
  Probe
tcgccgccaatgcttgttcaggcac

SEQ ID NO: 183177 - DNA, 25 bp, Artificial
  Probe
cagccgcacactatgagcaacatgc

SEQ ID NO: 183178 - DNA, 25 bp, Artificial
  Probe
gccgccaatgcttgttcaggcacgc

SEQ ID NO: 183179 - DNA, 25 bp, Artificial
  Probe
gccgcacactatgagcaacatgcag

SEQ ID NO: 183180 - DNA, 25 bp, Artificial
  Probe
cgccaatgcttgttcaggcacgcca

SEQ ID NO: 183181 - DNA, 25 bp, Artificial
  Probe
actatgagcaacatgcagatctaca

SEQ ID NO: 183182 - DNA, 25 bp, Artificial
  Probe
aatgcttgttcaggcacgccagaag

SEQ ID NO: 183183 - DNA, 25 bp, Artificial
  Probe
ctatgagcaacatgcagatctacag

SEQ ID NO: 183184 - DNA, 25 bp, Artificial
  Probe
atgcttgttcaggcacgccagaagg

SEQ ID NO: 183185 - DNA, 25 bp, Artificial
  Probe
atgagcaacatgcagatctacagcg

SEQ ID NO: 183186 - DNA, 25 bp, Artificial
  Probe
tgcttgttcaggcacgccagaagga

SEQ ID NO: 183187 - DNA, 25 bp, Artificial
  Probe
gagcaacatgcagatctacagcgcc

SEQ ID NO: 183188 - DNA, 25 bp, Artificial
  Probe
cttgttcaggcacgccagaaggatg

SEQ ID NO: 183189 - DNA, 25 bp, Artificial
  Probe
aacatgcagatctacagcgccagag

SEQ ID NO: 183190 - DNA, 25 bp, Artificial
  Probe
tgttcaggcacgccagaaggatgcc

SEQ ID NO: 183191 - DNA, 25 bp, Artificial
  Probe
catgcagatctacagcgccagagtg

SEQ ID NO: 183192 - DNA, 25 bp, Artificial
  Probe
caggcacgccagaaggatgccgcag

SEQ ID NO: 183193 - DNA, 25 bp, Artificial
  Probe
atgcagatctacagcgccagagtgc

SEQ ID NO: 183194 - DNA, 25 bp, Artificial
  Probe
ggcacgccagaaggatgccgcagac

SEQ ID NO: 183195 - DNA, 25 bp, Artificial
  Probe
tgcagatctacagcgccagagtgct

SEQ ID NO: 183196 - DNA, 25 bp, Artificial
  Probe
gcacgccagaaggatgccgcagacc

SEQ ID NO: 183197 - DNA, 25 bp, Artificial
  Probe
cagatctacagcgccagagtgctga

SEQ ID NO: 183198 - DNA, 25 bp, Artificial
  Probe
cgccagaaggatgccgcagaccatt

SEQ ID NO: 183199 - DNA, 25 bp, Artificial
  Probe
tctacagcgccagagtgctgacgcc

SEQ ID NO: 183200 - DNA, 25 bp, Artificial
  Probe
agaaggatgccgcagaccattatct

SEQ ID NO: 183201 - DNA, 25 bp, Artificial
  Probe
tacagcgccagagtgctgacgcctt

SEQ ID NO: 183202 - DNA, 25 bp, Artificial
  Probe
aaggatgccgcagaccattatctgg

SEQ ID NO: 183203 - DNA, 25 bp, Artificial
  Probe
cagcgccagagtgctgacgccttac

SEQ ID NO: 183204 - DNA, 25 bp, Artificial
  Probe
ggatgccgcagaccattatctggcg

SEQ ID NO: 183205 - DNA, 25 bp, Artificial
  Probe
agcgccagagtgctgacgccttact

SEQ ID NO: 183206 - DNA, 25 bp, Artificial
  Probe
atgccgcagaccattatctggcggg

SEQ ID NO: 183207 - DNA, 25 bp, Artificial
  Probe
gcgccagagtgctgacgccttactg

SEQ ID NO: 183208 - DNA, 25 bp, Artificial
  Probe
tgccgcagaccattatctggcggga

SEQ ID NO: 183209 - DNA, 25 bp, Artificial
  Probe
cagagtgctgacgccttactggcaa

SEQ ID NO: 183210 - DNA, 25 bp, Artificial
  Probe
gagatatcgaatccctgccgttagc

SEQ ID NO: 183211 - DNA, 25 bp, Artificial
  Probe
gagtgctgacgccttactggcaatg

SEQ ID NO: 183212 - DNA, 25 bp, Artificial
  Probe
gatatcgaatccctgccgttagcga

SEQ ID NO: 183213 - DNA, 25 bp, Artificial
  Probe
gtgctgacgccttactggcaatgct

SEQ ID NO: 183214 - DNA, 25 bp, Artificial
  Probe
tatcgaatccctgccgttagcgact

SEQ ID NO: 183215 - DNA, 25 bp, Artificial
  Probe
gctgacgccttactggcaatgcttc

SEQ ID NO: 183216 - DNA, 25 bp, Artificial
  Probe
tcgaatccctgccgttagcgactgc

SEQ ID NO: 183217 - DNA, 25 bp, Artificial
  Probe
gacgccttactggcaatgcttccac

SEQ ID NO: 183218 - DNA, 25 bp, Artificial
  Probe
aatccctgccgttagcgactgcgac

SEQ ID NO: 183219 - DNA, 25 bp, Artificial
  Probe
acgccttactggcaatgcttccaca

SEQ ID NO: 183220 - DNA, 25 bp, Artificial
  Probe
atccctgccgttagcgactgcgacg

SEQ ID NO: 183221 - DNA, 25 bp, Artificial
  Probe
gccttactggcaatgcttccacagc

SEQ ID NO: 183222 - DNA, 25 bp, Artificial
  Probe
ctgccgttagcgactgcgacgttcg

SEQ ID NO: 183223 - DNA, 25 bp, Artificial
  Probe
cttactggcaatgcttccacagcgt

SEQ ID NO: 183224 - DNA, 25 bp, Artificial
  Probe
gccgttagcgactgcgacgttcgat

SEQ ID NO: 183225 - DNA, 25 bp, Artificial
  Probe
tactggcaatgcttccacagcgtaa

SEQ ID NO: 183226 - DNA, 25 bp, Artificial
  Probe
ttagcgactgcgacgttcgatcttg

SEQ ID NO: 183227 - DNA, 25 bp, Artificial
  Probe
ggcaatgcttccacagcgtaaatac

SEQ ID NO: 183228 - DNA, 25 bp, Artificial
  Probe
agcgactgcgacgttcgatcttgca

SEQ ID NO: 183229 - DNA, 25 bp, Artificial
  Probe
gcaatgcttccacagcgtaaataca

SEQ ID NO: 183230 - DNA, 25 bp, Artificial
  Probe
gcgactgcgacgttcgatcttgcat

SEQ ID NO: 183231 - DNA, 25 bp, Artificial
  Probe
caatgcttccacagcgtaaatacac

SEQ ID NO: 183232 - DNA, 25 bp, Artificial
  Probe
actgcgacgttcgatcttgcatgga

SEQ ID NO: 183233 - DNA, 25 bp, Artificial
  Probe
atgcttccacagcgtaaatacaccc

SEQ ID NO: 183234 - DNA, 25 bp, Artificial
  Probe
cgacgttcgatcttgcatggagcaa

SEQ ID NO: 183235 - DNA, 25 bp, Artificial
  Probe
gcttccacagcgtaaatacacccac

SEQ ID NO: 183236 - DNA, 25 bp, Artificial
  Probe
acgttcgatcttgcatggagcaatc

SEQ ID NO: 183237 - DNA, 25 bp, Artificial
  Probe
tggacctggctggatgagccgccac

SEQ ID NO: 183238 - DNA, 25 bp, Artificial
  Probe
gttcgatcttgcatggagcaatctc

SEQ ID NO: 183239 - DNA, 25 bp, Artificial
  Probe
gacctggctggatgagccgccactg

SEQ ID NO: 183240 - DNA, 25 bp, Artificial
  Probe
tcgatcttgcatggagcaatctcgc

SEQ ID NO: 183241 - DNA, 25 bp, Artificial
  Probe
cctggctggatgagccgccactggc

SEQ ID NO: 183242 - DNA, 25 bp, Artificial
  Probe
tcttgcatggagcaatctcgcagtg

SEQ ID NO: 183243 - DNA, 25 bp, Artificial
  Probe
gatgagccgccactggcgggaacgt

SEQ ID NO: 183244 - DNA, 25 bp, Artificial
  Probe
gcatggagcaatctcgcagtgcagt

SEQ ID NO: 183245 - DNA, 25 bp, Artificial
  Probe
ggttaataaacaagccattgcagcg

SEQ ID NO: 183246 - DNA, 25 bp, Artificial
  Probe
gagccgccactggcgggaacgtcac

SEQ ID NO: 183247 - DNA, 25 bp, Artificial
  Probe
atggagcaatctcgcagtgcagtgg

SEQ ID NO: 183248 - DNA, 25 bp, Artificial
  Probe
caggtaatacaacacgccggactga

SEQ ID NO: 183249 - DNA, 25 bp, Artificial
  Probe
gctttctgacactttcacttttgca

SEQ ID NO: 183250 - DNA, 25 bp, Artificial
  Probe
ctgacactttcacttttgcagattg

SEQ ID NO: 183251 - DNA, 25 bp, Artificial
  Probe
gctgtattaatcacgcgatgttgac

SEQ ID NO: 183252 - DNA, 25 bp, Artificial
  Probe
gtaacacaggaacaactgccggtga

SEQ ID NO: 183253 - DNA, 25 bp, Artificial
  Probe
tgtattaatcacgcgatgttgactg

SEQ ID NO: 183254 - DNA, 25 bp, Artificial
  Probe
ttaatcacgcgatgttgactgcaca

SEQ ID NO: 183255 - DNA, 25 bp, Artificial
  Probe
ctggcttgcagaaaatccagaaaat

SEQ ID NO: 183256 - DNA, 25 bp, Artificial
  Probe
caacacgccggactgactctggcgg

SEQ ID NO: 183257 - DNA, 25 bp, Artificial
  Probe
gatgttgactgcacaggtaatacaa

SEQ ID NO: 183258 - DNA, 25 bp, Artificial
  Probe
gtgctggcggctggtttacgccgct

SEQ ID NO: 183259 - DNA, 25 bp, Artificial
  Probe
gtattaatcacgcgatgttgactgc

SEQ ID NO: 183260 - DNA, 25 bp, Artificial
  Probe
tggcttgcagaaaatccagaaaatg

SEQ ID NO: 183261 - DNA, 25 bp, Artificial
  Probe
tgcacaggtaatacaacacgccgga

SEQ ID NO: 183262 - DNA, 25 bp, Artificial
  Probe
ctgaatatatgaccacgctcacccg

SEQ ID NO: 183263 - DNA, 25 bp, Artificial
  Probe
ttctgacactttcacttttgcagat

SEQ ID NO: 183264 - DNA, 25 bp, Artificial
  Probe
ggctgtattaatcacgcgatgttga

SEQ ID NO: 183265 - DNA, 25 bp, Artificial
  Probe
acgtcacgctgaatatatgaccacg

SEQ ID NO: 183266 - DNA, 25 bp, Artificial
  Probe
tgctgggagagatcccctggcttgc

SEQ ID NO: 183267 - DNA, 25 bp, Artificial
  Probe
tctgacactttcacttttgcagatt

SEQ ID NO: 183268 - DNA, 25 bp, Artificial
  Probe
ccctggcttgcagaaaatccagaaa

SEQ ID NO: 183269 - DNA, 25 bp, Artificial
  Probe
ccgcgccgctgctgggagagatccc

SEQ ID NO: 183270 - DNA, 25 bp, Artificial
  Probe
cgctgctgggagagatcccctggct

SEQ ID NO: 183271 - DNA, 25 bp, Artificial
  Probe
ggaaaacgtcacgctgaatatatga

SEQ ID NO: 183272 - DNA, 25 bp, Artificial
  Probe
gaacaactgccggtgatactggtag

SEQ ID NO: 183273 - DNA, 25 bp, Artificial
  Probe
ttcacttttgcagattgggtaacac

SEQ ID NO: 183274 - DNA, 25 bp, Artificial
  Probe
aatatatgaccacgctcacccgcat

SEQ ID NO: 183275 - DNA, 25 bp, Artificial
  Probe
acaacacgccggactgactctggcg

SEQ ID NO: 183276 - DNA, 25 bp, Artificial
  Probe
tgctggcggctggtttacgccgctt

SEQ ID NO: 183277 - DNA, 25 bp, Artificial
  Probe
ggagagatcccctggcttgcagaaa

SEQ ID NO: 183278 - DNA, 25 bp, Artificial
  Probe
gttgactgcacaggtaatacaacac

SEQ ID NO: 183279 - DNA, 25 bp, Artificial
  Probe
acgcgatgttgactgcacaggtaat

SEQ ID NO: 183280 - DNA, 25 bp, Artificial
  Probe
ctgccggtgatactggtagttggtg

SEQ ID NO: 183281 - DNA, 25 bp, Artificial
  Probe
ttggtgtgaaactcggctgtattaa

SEQ ID NO: 183282 - DNA, 25 bp, Artificial
  Probe
tcggctgtattaatcacgcgatgtt

SEQ ID NO: 183283 - DNA, 25 bp, Artificial
  Probe
gccgctgctgggagagatcccctgg

SEQ ID NO: 183284 - DNA, 25 bp, Artificial
  Probe
tcacttttgcagattgggtaacaca

SEQ ID NO: 183285 - DNA, 25 bp, Artificial
  Probe
tttctgacactttcacttttgcaga

SEQ ID NO: 183286 - DNA, 25 bp, Artificial
  Probe
gatactggtagttggtgtgaaactc

SEQ ID NO: 183287 - DNA, 25 bp, Artificial
  Probe
acacaggaacaactgccggtgatac

SEQ ID NO: 183288 - DNA, 25 bp, Artificial
  Probe
gacactttcacttttgcagattggg

SEQ ID NO: 183289 - DNA, 25 bp, Artificial
  Probe
gtgatactggtagttggtgtgaaac

SEQ ID NO: 183290 - DNA, 25 bp, Artificial
  Probe
tattaatcacgcgatgttgactgca

SEQ ID NO: 183291 - DNA, 25 bp, Artificial
  Probe
gcgatgttgactgcacaggtaatac

SEQ ID NO: 183292 - DNA, 25 bp, Artificial
  Probe
taatacaacacgccggactgactct

SEQ ID NO: 183293 - DNA, 25 bp, Artificial
  Probe
ccggtgatactggtagttggtgtga

SEQ ID NO: 183294 - DNA, 25 bp, Artificial
  Probe
cacgcgatgttgactgcacaggtaa

SEQ ID NO: 183295 - DNA, 25 bp, Artificial
  Probe
taacacaggaacaactgccggtgat

SEQ ID NO: 183296 - DNA, 25 bp, Artificial
  Probe
actgcacaggtaatacaacacgccg

SEQ ID NO: 183297 - DNA, 25 bp, Artificial
  Probe
actcggctgtattaatcacgcgatg

SEQ ID NO: 183298 - DNA, 25 bp, Artificial
  Probe
gagagatcccctggcttgcagaaaa

SEQ ID NO: 183299 - DNA, 25 bp, Artificial
  Probe
aaactcggctgtattaatcacgcga

SEQ ID NO: 183300 - DNA, 25 bp, Artificial
  Probe
tacaacacgccggactgactctggc

SEQ ID NO: 183301 - DNA, 25 bp, Artificial
  Probe
tgggagagatcccctggcttgcaga

SEQ ID NO: 183302 - DNA, 25 bp, Artificial
  Probe
caggaacaactgccggtgatactgg

SEQ ID NO: 183303 - DNA, 25 bp, Artificial
  Probe
cctggcttgcagaaaatccagaaaa

SEQ ID NO: 183304 - DNA, 25 bp, Artificial
  Probe
tgccggtgatactggtagttggtgt

SEQ ID NO: 183305 - DNA, 25 bp, Artificial
  Probe
tcccctggcttgcagaaaatccaga

SEQ ID NO: 183306 - DNA, 25 bp, Artificial
  Probe
ggtgtgaaactcggctgtattaatc

SEQ ID NO: 183307 - DNA, 25 bp, Artificial
  Probe
atatatgaccacgctcacccgcatg

SEQ ID NO: 183308 - DNA, 25 bp, Artificial
  Probe
aaacgtcacgctgaatatatgacca

SEQ ID NO: 183309 - DNA, 25 bp, Artificial
  Probe
gctggtttacgccgctttctgacac

SEQ ID NO: 183310 - DNA, 25 bp, Artificial
  Probe
gaatatatgaccacgctcacccgca

SEQ ID NO: 183311 - DNA, 25 bp, Artificial
  Probe
tttacgccgctttctgacactttca

SEQ ID NO: 183312 - DNA, 25 bp, Artificial
  Probe
caacaggctgactgggtgttagtgg

SEQ ID NO: 183313 - DNA, 25 bp, Artificial
  Probe
gttggtgtgaaactcggctgtatta

SEQ ID NO: 183314 - DNA, 25 bp, Artificial
  Probe
tttgcagattgggtaacacaggaac

SEQ ID NO: 183315 - DNA, 25 bp, Artificial
  Probe
tttcacttttgcagattgggtaaca

SEQ ID NO: 183316 - DNA, 25 bp, Artificial
  Probe
ctcggctgtattaatcacgcgatgt

SEQ ID NO: 183317 - DNA, 25 bp, Artificial
  Probe
cacttttgcagattgggtaacacag

SEQ ID NO: 183318 - DNA, 25 bp, Artificial
  Probe
tatatgaccacgctcacccgcatga

SEQ ID NO: 183319 - DNA, 25 bp, Artificial
  Probe
ccgctgctgggagagatcccctggc

SEQ ID NO: 183320 - DNA, 25 bp, Artificial
  Probe
atcccctggcttgcagaaaatccag

SEQ ID NO: 183321 - DNA, 25 bp, Artificial
  Probe
gcgccgctgctgggagagatcccct

SEQ ID NO: 183322 - DNA, 25 bp, Artificial
  Probe
ctgctgggagagatcccctggcttg

SEQ ID NO: 183323 - DNA, 25 bp, Artificial
  Probe
aactcggctgtattaatcacgcgat

SEQ ID NO: 183324 - DNA, 25 bp, Artificial
  Probe
agatcccctggcttgcagaaaatcc

SEQ ID NO: 183325 - DNA, 25 bp, Artificial
  Probe
agagatcccctggcttgcagaaaat

SEQ ID NO: 183326 - DNA, 25 bp, Artificial
  Probe
atcacgcgatgttgactgcacaggt

SEQ ID NO: 183327 - DNA, 25 bp, Artificial
  Probe
gtgaaactcggctgtattaatcacg

SEQ ID NO: 183328 - DNA, 25 bp, Artificial
  Probe
cacaggaacaactgccggtgatact

SEQ ID NO: 183329 - DNA, 25 bp, Artificial
  Probe
gtaatacaacacgccggactgactc

SEQ ID NO: 183330 - DNA, 25 bp, Artificial
  Probe
ttgactgcacaggtaatacaacacg

SEQ ID NO: 183331 - DNA, 25 bp, Artificial
  Probe
cgccgctgctgggagagatcccctg

SEQ ID NO: 183332 - DNA, 25 bp, Artificial
  Probe
cgtcacgctgaatatatgaccacgc

SEQ ID NO: 183333 - DNA, 25 bp, Artificial
  Probe
ggaacaactgccggtgatactggta

SEQ ID NO: 183334 - DNA, 25 bp, Artificial
  Probe
ctttctgacactttcacttttgcag

SEQ ID NO: 183335 - DNA, 25 bp, Artificial
  Probe
tgatactggtagttggtgtgaaact

SEQ ID NO: 183336 - DNA, 25 bp, Artificial
  Probe
tgtgaaactcggctgtattaatcac

SEQ ID NO: 183337 - DNA, 25 bp, Artificial
  Probe
tacgccgctttctgacactttcact

SEQ ID NO: 183338 - DNA, 25 bp, Artificial
  Probe
aacacaggaacaactgccggtgata

SEQ ID NO: 183339 - DNA, 25 bp, Artificial
  Probe
ggctggtttacgccgctttctgaca

SEQ ID NO: 183340 - DNA, 25 bp, Artificial
  Probe
acaacaggctgactgggtgttagtg

SEQ ID NO: 183341 - DNA, 25 bp, Artificial
  Probe
aacaggctgactgggtgttagtgga

SEQ ID NO: 183342 - DNA, 25 bp, Artificial
  Probe
tggtgtgaaactcggctgtattaat

SEQ ID NO: 183343 - DNA, 25 bp, Artificial
  Probe
atgttgactgcacaggtaatacaac

SEQ ID NO: 183344 - DNA, 25 bp, Artificial
  Probe
tgaaactcggctgtattaatcacgc

SEQ ID NO: 183345 - DNA, 25 bp, Artificial
  Probe
tgacactttcacttttgcagattgg

SEQ ID NO: 183346 - DNA, 25 bp, Artificial
  Probe
gtgtgaaactcggctgtattaatca

SEQ ID NO: 183347 - DNA, 25 bp, Artificial
  Probe
attaatcacgcgatgttgactgcac

SEQ ID NO: 183348 - DNA, 25 bp, Artificial
  Probe
aatcacgcgatgttgactgcacagg

SEQ ID NO: 183349 - DNA, 25 bp, Artificial
  Probe
cgcgatgttgactgcacaggtaata

SEQ ID NO: 183350 - DNA, 25 bp, Artificial
  Probe
cggctgtattaatcacgcgatgttg

SEQ ID NO: 183351 - DNA, 25 bp, Artificial
  Probe
gggaaaacgtcacgctgaatatatg

SEQ ID NO: 183352 - DNA, 25 bp, Artificial
  Probe
atacaacacgccggactgactctgg

SEQ ID NO: 183353 - DNA, 25 bp, Artificial
  Probe
ttacgccgctttctgacactttcac

SEQ ID NO: 183354 - DNA, 25 bp, Artificial
  Probe
gagatcccctggcttgcagaaaatc

SEQ ID NO: 183355 - DNA, 25 bp, Artificial
  Probe
gatcccctggcttgcagaaaatcca

SEQ ID NO: 183356 - DNA, 25 bp, Artificial
  Probe
gctgaatatatgaccacgctcaccc

SEQ ID NO: 183357 - DNA, 25 bp, Artificial
  Probe
taatcacgcgatgttgactgcacag

SEQ ID NO: 183358 - DNA, 25 bp, Artificial
  Probe
ttggtgtgaaactcggctgtattaa

SEQ ID NO: 183359 - DNA, 25 bp, Artificial
  Probe
atatatgaccacgctcacccgcatg

SEQ ID NO: 183360 - DNA, 25 bp, Artificial
  Probe
tggtgtgaaactcggctgtattaat

SEQ ID NO: 183361 - DNA, 25 bp, Artificial
  Probe
tatatgaccacgctcacccgcatga

SEQ ID NO: 183362 - DNA, 25 bp, Artificial
  Probe
ggtgtgaaactcggctgtattaatc

SEQ ID NO: 183363 - DNA, 25 bp, Artificial
  Probe
ccgcgccgctgctgggagagatccc

SEQ ID NO: 183364 - DNA, 25 bp, Artificial
  Probe
gtgtgaaactcggctgtattaatca

SEQ ID NO: 183365 - DNA, 25 bp, Artificial
  Probe
gcgccgctgctgggagagatcccct

SEQ ID NO: 183366 - DNA, 25 bp, Artificial
  Probe
tgtgaaactcggctgtattaatcac

SEQ ID NO: 183367 - DNA, 25 bp, Artificial
  Probe
cgccgctgctgggagagatcccctg

SEQ ID NO: 183368 - DNA, 25 bp, Artificial
  Probe
gtgaaactcggctgtattaatcacg

SEQ ID NO: 183369 - DNA, 25 bp, Artificial
  Probe
gccgctgctgggagagatcccctgg

SEQ ID NO: 183370 - DNA, 25 bp, Artificial
  Probe
tgaaactcggctgtattaatcacgc

SEQ ID NO: 183371 - DNA, 25 bp, Artificial
  Probe
ccgctgctgggagagatcccctggc

SEQ ID NO: 183372 - DNA, 25 bp, Artificial
  Probe
aaactcggctgtattaatcacgcga

SEQ ID NO: 183373 - DNA, 25 bp, Artificial
  Probe
cgctgctgggagagatcccctggct

SEQ ID NO: 183374 - DNA, 25 bp, Artificial
  Probe
aactcggctgtattaatcacgcgat

SEQ ID NO: 183375 - DNA, 25 bp, Artificial
  Probe
ctgctgggagagatcccctggcttg

SEQ ID NO: 183376 - DNA, 25 bp, Artificial
  Probe
actcggctgtattaatcacgcgatg

SEQ ID NO: 183377 - DNA, 25 bp, Artificial
  Probe
tgctgggagagatcccctggcttgc

SEQ ID NO: 183378 - DNA, 25 bp, Artificial
  Probe
ctcggctgtattaatcacgcgatgt

SEQ ID NO: 183379 - DNA, 25 bp, Artificial
  Probe
tgggagagatcccctggcttgcaga

SEQ ID NO: 183380 - DNA, 25 bp, Artificial
  Probe
acaacaggctgactgggtgttagtg

SEQ ID NO: 183381 - DNA, 25 bp, Artificial
  Probe
tcggctgtattaatcacgcgatgtt

SEQ ID NO: 183382 - DNA, 25 bp, Artificial
  Probe
ggagagatcccctggcttgcagaaa

SEQ ID NO: 183383 - DNA, 25 bp, Artificial
  Probe
caacaggctgactgggtgttagtgg

SEQ ID NO: 183384 - DNA, 25 bp, Artificial
  Probe
cggctgtattaatcacgcgatgttg

SEQ ID NO: 183385 - DNA, 25 bp, Artificial
  Probe
gagagatcccctggcttgcagaaaa

SEQ ID NO: 183386 - DNA, 25 bp, Artificial
  Probe
aacaggctgactgggtgttagtgga

SEQ ID NO: 183387 - DNA, 25 bp, Artificial
  Probe
ggctgtattaatcacgcgatgttga

SEQ ID NO: 183388 - DNA, 25 bp, Artificial
  Probe
agagatcccctggcttgcagaaaat

SEQ ID NO: 183389 - DNA, 25 bp, Artificial
  Probe
gtgctggcggctggtttacgccgct

SEQ ID NO: 183390 - DNA, 25 bp, Artificial
  Probe
gctgtattaatcacgcgatgttgac

SEQ ID NO: 183391 - DNA, 25 bp, Artificial
  Probe
gagatcccctggcttgcagaaaatc

SEQ ID NO: 183392 - DNA, 25 bp, Artificial
  Probe
tgctggcggctggtttacgccgctt

SEQ ID NO: 183393 - DNA, 25 bp, Artificial
  Probe
tgtattaatcacgcgatgttgactg

SEQ ID NO: 183394 - DNA, 25 bp, Artificial
  Probe
agatcccctggcttgcagaaaatcc

SEQ ID NO: 183395 - DNA, 25 bp, Artificial
  Probe
ggctggtttacgccgctttctgaca

SEQ ID NO: 183396 - DNA, 25 bp, Artificial
  Probe
gtattaatcacgcgatgttgactgc

SEQ ID NO: 183397 - DNA, 25 bp, Artificial
  Probe
gatcccctggcttgcagaaaatcca

SEQ ID NO: 183398 - DNA, 25 bp, Artificial
  Probe
gctggtttacgccgctttctgacac

SEQ ID NO: 183399 - DNA, 25 bp, Artificial
  Probe
tattaatcacgcgatgttgactgca

SEQ ID NO: 183400 - DNA, 25 bp, Artificial
  Probe
atcccctggcttgcagaaaatccag

SEQ ID NO: 183401 - DNA, 25 bp, Artificial
  Probe
tttacgccgctttctgacactttca

SEQ ID NO: 183402 - DNA, 25 bp, Artificial
  Probe
attaatcacgcgatgttgactgcac

SEQ ID NO: 183403 - DNA, 25 bp, Artificial
  Probe
tcccctggcttgcagaaaatccaga

SEQ ID NO: 183404 - DNA, 25 bp, Artificial
  Probe
ttacgccgctttctgacactttcac

SEQ ID NO: 183405 - DNA, 25 bp, Artificial
  Probe
ttaatcacgcgatgttgactgcaca

SEQ ID NO: 183406 - DNA, 25 bp, Artificial
  Probe
ccctggcttgcagaaaatccagaaa

SEQ ID NO: 183407 - DNA, 25 bp, Artificial
  Probe
tacgccgctttctgacactttcact

SEQ ID NO: 183408 - DNA, 25 bp, Artificial
  Probe
taatcacgcgatgttgactgcacag

SEQ ID NO: 183409 - DNA, 25 bp, Artificial
  Probe
cctggcttgcagaaaatccagaaaa

SEQ ID NO: 183410 - DNA, 25 bp, Artificial
  Probe
gctttctgacactttcacttttgca

SEQ ID NO: 183411 - DNA, 25 bp, Artificial
  Probe
aatcacgcgatgttgactgcacagg

SEQ ID NO: 183412 - DNA, 25 bp, Artificial
  Probe
ctggcttgcagaaaatccagaaaat

SEQ ID NO: 183413 - DNA, 25 bp, Artificial
  Probe
ctttctgacactttcacttttgcag

SEQ ID NO: 183414 - DNA, 25 bp, Artificial
  Probe
atcacgcgatgttgactgcacaggt

SEQ ID NO: 183415 - DNA, 25 bp, Artificial
  Probe
tggcttgcagaaaatccagaaaatg

SEQ ID NO: 183416 - DNA, 25 bp, Artificial
  Probe
tttctgacactttcacttttgcaga

SEQ ID NO: 183417 - DNA, 25 bp, Artificial
  Probe
cacgcgatgttgactgcacaggtaa

SEQ ID NO: 183418 - DNA, 25 bp, Artificial
  Probe
ttctgacactttcacttttgcagat

SEQ ID NO: 183419 - DNA, 25 bp, Artificial
  Probe
acgcgatgttgactgcacaggtaat

SEQ ID NO: 183420 - DNA, 25 bp, Artificial
  Probe
tctgacactttcacttttgcagatt

SEQ ID NO: 183421 - DNA, 25 bp, Artificial
  Probe
cgcgatgttgactgcacaggtaata

SEQ ID NO: 183422 - DNA, 25 bp, Artificial
  Probe
ctgacactttcacttttgcagattg

SEQ ID NO: 183423 - DNA, 25 bp, Artificial
  Probe
gcgatgttgactgcacaggtaatac

SEQ ID NO: 183424 - DNA, 25 bp, Artificial
  Probe
tgacactttcacttttgcagattgg

SEQ ID NO: 183425 - DNA, 25 bp, Artificial
  Probe
gatgttgactgcacaggtaatacaa

SEQ ID NO: 183426 - DNA, 25 bp, Artificial
  Probe
gacactttcacttttgcagattggg

SEQ ID NO: 183427 - DNA, 25 bp, Artificial
  Probe
atgttgactgcacaggtaatacaac

SEQ ID NO: 183428 - DNA, 25 bp, Artificial
  Probe
tttcacttttgcagattgggtaaca

SEQ ID NO: 183429 - DNA, 25 bp, Artificial
  Probe
gttgactgcacaggtaatacaacac

SEQ ID NO: 183430 - DNA, 25 bp, Artificial
  Probe
ttcacttttgcagattgggtaacac

SEQ ID NO: 183431 - DNA, 25 bp, Artificial
  Probe
ttgactgcacaggtaatacaacacg

SEQ ID NO: 183432 - DNA, 25 bp, Artificial
  Probe
tcacttttgcagattgggtaacaca

SEQ ID NO: 183433 - DNA, 25 bp, Artificial
  Probe
actgcacaggtaatacaacacgccg

SEQ ID NO: 183434 - DNA, 25 bp, Artificial
  Probe
cacttttgcagattgggtaacacag

SEQ ID NO: 183435 - DNA, 25 bp, Artificial
  Probe
tgcacaggtaatacaacacgccgga

SEQ ID NO: 183436 - DNA, 25 bp, Artificial
  Probe
tttgcagattgggtaacacaggaac

SEQ ID NO: 183437 - DNA, 25 bp, Artificial
  Probe
caggtaatacaacacgccggactga

SEQ ID NO: 183438 - DNA, 25 bp, Artificial
  Probe
gtaacacaggaacaactgccggtga

SEQ ID NO: 183439 - DNA, 25 bp, Artificial
  Probe
gtaatacaacacgccggactgactc

SEQ ID NO: 183440 - DNA, 25 bp, Artificial
  Probe
taacacaggaacaactgccggtgat

SEQ ID NO: 183441 - DNA, 25 bp, Artificial
  Probe
taatacaacacgccggactgactct

SEQ ID NO: 183442 - DNA, 25 bp, Artificial
  Probe
aacacaggaacaactgccggtgata

SEQ ID NO: 183443 - DNA, 25 bp, Artificial
  Probe
atacaacacgccggactgactctgg

SEQ ID NO: 183444 - DNA, 25 bp, Artificial
  Probe
acacaggaacaactgccggtgatac

SEQ ID NO: 183445 - DNA, 25 bp, Artificial
  Probe
tacaacacgccggactgactctggc

SEQ ID NO: 183446 - DNA, 25 bp, Artificial
  Probe
cacaggaacaactgccggtgatact

SEQ ID NO: 183447 - DNA, 25 bp, Artificial
  Probe
acaacacgccggactgactctggcg

SEQ ID NO: 183448 - DNA, 25 bp, Artificial
  Probe
caggaacaactgccggtgatactgg

SEQ ID NO: 183449 - DNA, 25 bp, Artificial
  Probe
caacacgccggactgactctggcgg

SEQ ID NO: 183450 - DNA, 25 bp, Artificial
  Probe
ggaacaactgccggtgatactggta

SEQ ID NO: 183451 - DNA, 25 bp, Artificial
  Probe
gggaaaacgtcacgctgaatatatg

SEQ ID NO: 183452 - DNA, 25 bp, Artificial
  Probe
gaacaactgccggtgatactggtag

SEQ ID NO: 183453 - DNA, 25 bp, Artificial
  Probe
ggaaaacgtcacgctgaatatatga

SEQ ID NO: 183454 - DNA, 25 bp, Artificial
  Probe
ctgccggtgatactggtagttggtg

SEQ ID NO: 183455 - DNA, 25 bp, Artificial
  Probe
aaacgtcacgctgaatatatgacca

SEQ ID NO: 183456 - DNA, 25 bp, Artificial
  Probe
tgccggtgatactggtagttggtgt

SEQ ID NO: 183457 - DNA, 25 bp, Artificial
  Probe
acgtcacgctgaatatatgaccacg

SEQ ID NO: 183458 - DNA, 25 bp, Artificial
  Probe
ccggtgatactggtagttggtgtga

SEQ ID NO: 183459 - DNA, 25 bp, Artificial
  Probe
cgtcacgctgaatatatgaccacgc

SEQ ID NO: 183460 - DNA, 25 bp, Artificial
  Probe
gtgatactggtagttggtgtgaaac

SEQ ID NO: 183461 - DNA, 25 bp, Artificial
  Probe
gctgaatatatgaccacgctcaccc

SEQ ID NO: 183462 - DNA, 25 bp, Artificial
  Probe
tgatactggtagttggtgtgaaact

SEQ ID NO: 183463 - DNA, 25 bp, Artificial
  Probe
ctgaatatatgaccacgctcacccg

SEQ ID NO: 183464 - DNA, 25 bp, Artificial
  Probe
gatactggtagttggtgtgaaactc

SEQ ID NO: 183465 - DNA, 25 bp, Artificial
  Probe
gaatatatgaccacgctcacccgca

SEQ ID NO: 183466 - DNA, 25 bp, Artificial
  Probe
gttggtgtgaaactcggctgtatta

SEQ ID NO: 183467 - DNA, 25 bp, Artificial
  Probe
aatatatgaccacgctcacccgcat

SEQ ID NO: 183468 - DNA, 25 bp, Artificial
  Probe
ttggtgtgaaactcggctgtattaa

SEQ ID NO: 183469 - DNA, 25 bp, Artificial
  Probe
atatatgaccacgctcacccgcatg

SEQ ID NO: 183470 - DNA, 25 bp, Artificial
  Probe
tggtgtgaaactcggctgtattaat

SEQ ID NO: 183471 - DNA, 25 bp, Artificial
  Probe
tatatgaccacgctcacccgcatga

SEQ ID NO: 183472 - DNA, 25 bp, Artificial
  Probe
ggtgtgaaactcggctgtattaatc

SEQ ID NO: 183473 - DNA, 25 bp, Artificial
  Probe
ccgcgccgctgctgggagagatccc

SEQ ID NO: 183474 - DNA, 25 bp, Artificial
  Probe
gtgtgaaactcggctgtattaatca

SEQ ID NO: 183475 - DNA, 25 bp, Artificial
  Probe
gcgccgctgctgggagagatcccct

SEQ ID NO: 183476 - DNA, 25 bp, Artificial
  Probe
tgtgaaactcggctgtattaatcac

SEQ ID NO: 183477 - DNA, 25 bp, Artificial
  Probe
cgccgctgctgggagagatcccctg

SEQ ID NO: 183478 - DNA, 25 bp, Artificial
  Probe
gtgaaactcggctgtattaatcacg

SEQ ID NO: 183479 - DNA, 25 bp, Artificial
  Probe
gccgctgctgggagagatcccctgg

SEQ ID NO: 183480 - DNA, 25 bp, Artificial
  Probe
tgaaactcggctgtattaatcacgc

SEQ ID NO: 183481 - DNA, 25 bp, Artificial
  Probe
ccgctgctgggagagatcccctggc

SEQ ID NO: 183482 - DNA, 25 bp, Artificial
  Probe
aaactcggctgtattaatcacgcga

SEQ ID NO: 183483 - DNA, 25 bp, Artificial
  Probe
cgctgctgggagagatcccctggct

SEQ ID NO: 183484 - DNA, 25 bp, Artificial
  Probe
aactcggctgtattaatcacgcgat

SEQ ID NO: 183485 - DNA, 25 bp, Artificial
  Probe
ctgctgggagagatcccctggcttg

SEQ ID NO: 183486 - DNA, 25 bp, Artificial
  Probe
actcggctgtattaatcacgcgatg

SEQ ID NO: 183487 - DNA, 25 bp, Artificial
  Probe
tgctgggagagatcccctggcttgc

SEQ ID NO: 183488 - DNA, 25 bp, Artificial
  Probe
ctcggctgtattaatcacgcgatgt

SEQ ID NO: 183489 - DNA, 25 bp, Artificial
  Probe
tgggagagatcccctggcttgcaga

SEQ ID NO: 183490 - DNA, 25 bp, Artificial
  Probe
acaacaggctgactgggtgttagtg

SEQ ID NO: 183491 - DNA, 25 bp, Artificial
  Probe
tcggctgtattaatcacgcgatgtt

SEQ ID NO: 183492 - DNA, 25 bp, Artificial
  Probe
ggagagatcccctggcttgcagaaa

SEQ ID NO: 183493 - DNA, 25 bp, Artificial
  Probe
caacaggctgactgggtgttagtgg

SEQ ID NO: 183494 - DNA, 25 bp, Artificial
  Probe
cggctgtattaatcacgcgatgttg

SEQ ID NO: 183495 - DNA, 25 bp, Artificial
  Probe
gagagatcccctggcttgcagaaaa

SEQ ID NO: 183496 - DNA, 25 bp, Artificial
  Probe
aacaggctgactgggtgttagtgga

SEQ ID NO: 183497 - DNA, 25 bp, Artificial
  Probe
ggctgtattaatcacgcgatgttga

SEQ ID NO: 183498 - DNA, 25 bp, Artificial
  Probe
agagatcccctggcttgcagaaaat

SEQ ID NO: 183499 - DNA, 25 bp, Artificial
  Probe
gtgctggcggctggtttacgccgct

SEQ ID NO: 183500 - DNA, 25 bp, Artificial
  Probe
gctgtattaatcacgcgatgttgac

SEQ ID NO: 183501 - DNA, 25 bp, Artificial
  Probe
gagatcccctggcttgcagaaaatc

SEQ ID NO: 183502 - DNA, 25 bp, Artificial
  Probe
tgctggcggctggtttacgccgctt

SEQ ID NO: 183503 - DNA, 25 bp, Artificial
  Probe
tgtattaatcacgcgatgttgactg

SEQ ID NO: 183504 - DNA, 25 bp, Artificial
  Probe
agatcccctggcttgcagaaaatcc

SEQ ID NO: 183505 - DNA, 25 bp, Artificial
  Probe
ggctggtttacgccgctttctgaca

SEQ ID NO: 183506 - DNA, 25 bp, Artificial
  Probe
gtattaatcacgcgatgttgactgc

SEQ ID NO: 183507 - DNA, 25 bp, Artificial
  Probe
gatcccctggcttgcagaaaatcca

SEQ ID NO: 183508 - DNA, 25 bp, Artificial
  Probe
gctggtttacgccgctttctgacac

SEQ ID NO: 183509 - DNA, 25 bp, Artificial
  Probe
tattaatcacgcgatgttgactgca

SEQ ID NO: 183510 - DNA, 25 bp, Artificial
  Probe
atcccctggcttgcagaaaatccag

SEQ ID NO: 183511 - DNA, 25 bp, Artificial
  Probe
tttacgccgctttctgacactttca

SEQ ID NO: 183512 - DNA, 25 bp, Artificial
  Probe
attaatcacgcgatgttgactgcac

SEQ ID NO: 183513 - DNA, 25 bp, Artificial
  Probe
tcccctggcttgcagaaaatccaga

SEQ ID NO: 183514 - DNA, 25 bp, Artificial
  Probe
ttacgccgctttctgacactttcac

SEQ ID NO: 183515 - DNA, 25 bp, Artificial
  Probe
ttaatcacgcgatgttgactgcaca

SEQ ID NO: 183516 - DNA, 25 bp, Artificial
  Probe
ccctggcttgcagaaaatccagaaa

SEQ ID NO: 183517 - DNA, 25 bp, Artificial
  Probe
tacgccgctttctgacactttcact

SEQ ID NO: 183518 - DNA, 25 bp, Artificial
  Probe
taatcacgcgatgttgactgcacag

SEQ ID NO: 183519 - DNA, 25 bp, Artificial
  Probe
cctggcttgcagaaaatccagaaaa

SEQ ID NO: 183520 - DNA, 25 bp, Artificial
  Probe
gctttctgacactttcacttttgca

SEQ ID NO: 183521 - DNA, 25 bp, Artificial
  Probe
aatcacgcgatgttgactgcacagg

SEQ ID NO: 183522 - DNA, 25 bp, Artificial
  Probe
ctggcttgcagaaaatccagaaaat

SEQ ID NO: 183523 - DNA, 25 bp, Artificial
  Probe
ctttctgacactttcacttttgcag

SEQ ID NO: 183524 - DNA, 25 bp, Artificial
  Probe
atcacgcgatgttgactgcacaggt

SEQ ID NO: 183525 - DNA, 25 bp, Artificial
  Probe
tggcttgcagaaaatccagaaaatg

SEQ ID NO: 183526 - DNA, 25 bp, Artificial
  Probe
tttctgacactttcacttttgcaga

SEQ ID NO: 183527 - DNA, 25 bp, Artificial
  Probe
cacgcgatgttgactgcacaggtaa

SEQ ID NO: 183528 - DNA, 25 bp, Artificial
  Probe
ttctgacactttcacttttgcagat

SEQ ID NO: 183529 - DNA, 25 bp, Artificial
  Probe
acgcgatgttgactgcacaggtaat

SEQ ID NO: 183530 - DNA, 25 bp, Artificial
  Probe
tctgacactttcacttttgcagatt

SEQ ID NO: 183531 - DNA, 25 bp, Artificial
  Probe
cgcgatgttgactgcacaggtaata

SEQ ID NO: 183532 - DNA, 25 bp, Artificial
  Probe
ctgacactttcacttttgcagattg

SEQ ID NO: 183533 - DNA, 25 bp, Artificial
  Probe
gcgatgttgactgcacaggtaatac

SEQ ID NO: 183534 - DNA, 25 bp, Artificial
  Probe
tgacactttcacttttgcagattgg

SEQ ID NO: 183535 - DNA, 25 bp, Artificial
  Probe
gatgttgactgcacaggtaatacaa

SEQ ID NO: 183536 - DNA, 25 bp, Artificial
  Probe
gacactttcacttttgcagattggg

SEQ ID NO: 183537 - DNA, 25 bp, Artificial
  Probe
atgttgactgcacaggtaatacaac

SEQ ID NO: 183538 - DNA, 25 bp, Artificial
  Probe
tttcacttttgcagattgggtaaca

SEQ ID NO: 183539 - DNA, 25 bp, Artificial
  Probe
gttgactgcacaggtaatacaacac

SEQ ID NO: 183540 - DNA, 25 bp, Artificial
  Probe
ttcacttttgcagattgggtaacac

SEQ ID NO: 183541 - DNA, 25 bp, Artificial
  Probe
ttgactgcacaggtaatacaacacg

SEQ ID NO: 183542 - DNA, 25 bp, Artificial
  Probe
tcacttttgcagattgggtaacaca

SEQ ID NO: 183543 - DNA, 25 bp, Artificial
  Probe
actgcacaggtaatacaacacgccg

SEQ ID NO: 183544 - DNA, 25 bp, Artificial
  Probe
cacttttgcagattgggtaacacag

SEQ ID NO: 183545 - DNA, 25 bp, Artificial
  Probe
tgcacaggtaatacaacacgccgga

SEQ ID NO: 183546 - DNA, 25 bp, Artificial
  Probe
tttgcagattgggtaacacaggaac

SEQ ID NO: 183547 - DNA, 25 bp, Artificial
  Probe
caggtaatacaacacgccggactga

SEQ ID NO: 183548 - DNA, 25 bp, Artificial
  Probe
gtaacacaggaacaactgccggtga

SEQ ID NO: 183549 - DNA, 25 bp, Artificial
  Probe
gtaatacaacacgccggactgactc

SEQ ID NO: 183550 - DNA, 25 bp, Artificial
  Probe
taacacaggaacaactgccggtgat

SEQ ID NO: 183551 - DNA, 25 bp, Artificial
  Probe
taatacaacacgccggactgactct

SEQ ID NO: 183552 - DNA, 25 bp, Artificial
  Probe
aacacaggaacaactgccggtgata

SEQ ID NO: 183553 - DNA, 25 bp, Artificial
  Probe
atacaacacgccggactgactctgg

SEQ ID NO: 183554 - DNA, 25 bp, Artificial
  Probe
acacaggaacaactgccggtgatac

SEQ ID NO: 183555 - DNA, 25 bp, Artificial
  Probe
tacaacacgccggactgactctggc

SEQ ID NO: 183556 - DNA, 25 bp, Artificial
  Probe
cacaggaacaactgccggtgatact

SEQ ID NO: 183557 - DNA, 25 bp, Artificial
  Probe
acaacacgccggactgactctggcg

SEQ ID NO: 183558 - DNA, 25 bp, Artificial
  Probe
caggaacaactgccggtgatactgg

SEQ ID NO: 183559 - DNA, 25 bp, Artificial
  Probe
caacacgccggactgactctggcgg

SEQ ID NO: 183560 - DNA, 25 bp, Artificial
  Probe
ggaacaactgccggtgatactggta

SEQ ID NO: 183561 - DNA, 25 bp, Artificial
  Probe
gggaaaacgtcacgctgaatatatg

SEQ ID NO: 183562 - DNA, 25 bp, Artificial
  Probe
gaacaactgccggtgatactggtag

SEQ ID NO: 183563 - DNA, 25 bp, Artificial
  Probe
ggaaaacgtcacgctgaatatatga

SEQ ID NO: 183564 - DNA, 25 bp, Artificial
  Probe
ctgccggtgatactggtagttggtg

SEQ ID NO: 183565 - DNA, 25 bp, Artificial
  Probe
aaacgtcacgctgaatatatgacca

SEQ ID NO: 183566 - DNA, 25 bp, Artificial
  Probe
tgccggtgatactggtagttggtgt

SEQ ID NO: 183567 - DNA, 25 bp, Artificial
  Probe
acgtcacgctgaatatatgaccacg

SEQ ID NO: 183568 - DNA, 25 bp, Artificial
  Probe
ccggtgatactggtagttggtgtga

SEQ ID NO: 183569 - DNA, 25 bp, Artificial
  Probe
cgtcacgctgaatatatgaccacgc

SEQ ID NO: 183570 - DNA, 25 bp, Artificial
  Probe
gtgatactggtagttggtgtgaaac

SEQ ID NO: 183571 - DNA, 25 bp, Artificial
  Probe
gctgaatatatgaccacgctcaccc

SEQ ID NO: 183572 - DNA, 25 bp, Artificial
  Probe
tgatactggtagttggtgtgaaact

SEQ ID NO: 183573 - DNA, 25 bp, Artificial
  Probe
ctgaatatatgaccacgctcacccg

SEQ ID NO: 183574 - DNA, 25 bp, Artificial
  Probe
gatactggtagttggtgtgaaactc

SEQ ID NO: 183575 - DNA, 25 bp, Artificial
  Probe
gaatatatgaccacgctcacccgca

SEQ ID NO: 183576 - DNA, 25 bp, Artificial
  Probe
gttggtgtgaaactcggctgtatta

SEQ ID NO: 183577 - DNA, 25 bp, Artificial
  Probe
aatatatgaccacgctcacccgcat

SEQ ID NO: 183578 - DNA, 25 bp, Artificial
  Probe
ttggtgtgaaactcggctgtattaa

SEQ ID NO: 183579 - DNA, 25 bp, Artificial
  Probe
atatatgaccacgctcacccgcatg

SEQ ID NO: 183580 - DNA, 25 bp, Artificial
  Probe
tggtgtgaaactcggctgtattaat

SEQ ID NO: 183581 - DNA, 25 bp, Artificial
  Probe
tatatgaccacgctcacccgcatga

SEQ ID NO: 183582 - DNA, 25 bp, Artificial
  Probe
ggtgtgaaactcggctgtattaatc

SEQ ID NO: 183583 - DNA, 25 bp, Artificial
  Probe
ccgcgccgctgctgggagagatccc

SEQ ID NO: 183584 - DNA, 25 bp, Artificial
  Probe
gtgtgaaactcggctgtattaatca

SEQ ID NO: 183585 - DNA, 25 bp, Artificial
  Probe
gcgccgctgctgggagagatcccct

SEQ ID NO: 183586 - DNA, 25 bp, Artificial
  Probe
tgtgaaactcggctgtattaatcac

SEQ ID NO: 183587 - DNA, 25 bp, Artificial
  Probe
cgccgctgctgggagagatcccctg

SEQ ID NO: 183588 - DNA, 25 bp, Artificial
  Probe
gtgaaactcggctgtattaatcacg

SEQ ID NO: 183589 - DNA, 25 bp, Artificial
  Probe
gccgctgctgggagagatcccctgg

SEQ ID NO: 183590 - DNA, 25 bp, Artificial
  Probe
tgaaactcggctgtattaatcacgc

SEQ ID NO: 183591 - DNA, 25 bp, Artificial
  Probe
ccgctgctgggagagatcccctggc

SEQ ID NO: 183592 - DNA, 25 bp, Artificial
  Probe
aaactcggctgtattaatcacgcga

SEQ ID NO: 183593 - DNA, 25 bp, Artificial
  Probe
cgctgctgggagagatcccctggct

SEQ ID NO: 183594 - DNA, 25 bp, Artificial
  Probe
aactcggctgtattaatcacgcgat

SEQ ID NO: 183595 - DNA, 25 bp, Artificial
  Probe
ctgctgggagagatcccctggcttg

SEQ ID NO: 183596 - DNA, 25 bp, Artificial
  Probe
actcggctgtattaatcacgcgatg

SEQ ID NO: 183597 - DNA, 25 bp, Artificial
  Probe
tgctgggagagatcccctggcttgc

SEQ ID NO: 183598 - DNA, 25 bp, Artificial
  Probe
ctcggctgtattaatcacgcgatgt

SEQ ID NO: 183599 - DNA, 25 bp, Artificial
  Probe
tgggagagatcccctggcttgcaga

SEQ ID NO: 183600 - DNA, 25 bp, Artificial
  Probe
acaacaggctgactgggtgttagtg

SEQ ID NO: 183601 - DNA, 25 bp, Artificial
  Probe
tcggctgtattaatcacgcgatgtt

SEQ ID NO: 183602 - DNA, 25 bp, Artificial
  Probe
ggagagatcccctggcttgcagaaa

SEQ ID NO: 183603 - DNA, 25 bp, Artificial
  Probe
caacaggctgactgggtgttagtgg

SEQ ID NO: 183604 - DNA, 25 bp, Artificial
  Probe
cggctgtattaatcacgcgatgttg

SEQ ID NO: 183605 - DNA, 25 bp, Artificial
  Probe
gagagatcccctggcttgcagaaaa

SEQ ID NO: 183606 - DNA, 25 bp, Artificial
  Probe
aacaggctgactgggtgttagtgga

SEQ ID NO: 183607 - DNA, 25 bp, Artificial
  Probe
ggctgtattaatcacgcgatgttga

SEQ ID NO: 183608 - DNA, 25 bp, Artificial
  Probe
agagatcccctggcttgcagaaaat

SEQ ID NO: 183609 - DNA, 25 bp, Artificial
  Probe
gtgctggcggctggtttacgccgct

SEQ ID NO: 183610 - DNA, 25 bp, Artificial
  Probe
gctgtattaatcacgcgatgttgac

SEQ ID NO: 183611 - DNA, 25 bp, Artificial
  Probe
gagatcccctggcttgcagaaaatc

SEQ ID NO: 183612 - DNA, 25 bp, Artificial
  Probe
tgctggcggctggtttacgccgctt

SEQ ID NO: 183613 - DNA, 25 bp, Artificial
  Probe
tgtattaatcacgcgatgttgactg

SEQ ID NO: 183614 - DNA, 25 bp, Artificial
  Probe
agatcccctggcttgcagaaaatcc

SEQ ID NO: 183615 - DNA, 25 bp, Artificial
  Probe
ggctggtttacgccgctttctgaca

SEQ ID NO: 183616 - DNA, 25 bp, Artificial
  Probe
gtattaatcacgcgatgttgactgc

SEQ ID NO: 183617 - DNA, 25 bp, Artificial
  Probe
gatcccctggcttgcagaaaatcca

SEQ ID NO: 183618 - DNA, 25 bp, Artificial
  Probe
gctggtttacgccgctttctgacac

SEQ ID NO: 183619 - DNA, 25 bp, Artificial
  Probe
tattaatcacgcgatgttgactgca

SEQ ID NO: 183620 - DNA, 25 bp, Artificial
  Probe
atcccctggcttgcagaaaatccag

SEQ ID NO: 183621 - DNA, 25 bp, Artificial
  Probe
tttacgccgctttctgacactttca

SEQ ID NO: 183622 - DNA, 25 bp, Artificial
  Probe
attaatcacgcgatgttgactgcac

SEQ ID NO: 183623 - DNA, 25 bp, Artificial
  Probe
tcccctggcttgcagaaaatccaga

SEQ ID NO: 183624 - DNA, 25 bp, Artificial
  Probe
ttacgccgctttctgacactttcac

SEQ ID NO: 183625 - DNA, 25 bp, Artificial
  Probe
ttaatcacgcgatgttgactgcaca

SEQ ID NO: 183626 - DNA, 25 bp, Artificial
  Probe
ccctggcttgcagaaaatccagaaa

SEQ ID NO: 183627 - DNA, 25 bp, Artificial
  Probe
tacgccgctttctgacactttcact

SEQ ID NO: 183628 - DNA, 25 bp, Artificial
  Probe
taatcacgcgatgttgactgcacag

SEQ ID NO: 183629 - DNA, 25 bp, Artificial
  Probe
cctggcttgcagaaaatccagaaaa

SEQ ID NO: 183630 - DNA, 25 bp, Artificial
  Probe
gctttctgacactttcacttttgca

SEQ ID NO: 183631 - DNA, 25 bp, Artificial
  Probe
aatcacgcgatgttgactgcacagg

SEQ ID NO: 183632 - DNA, 25 bp, Artificial
  Probe
ctggcttgcagaaaatccagaaaat

SEQ ID NO: 183633 - DNA, 25 bp, Artificial
  Probe
ctttctgacactttcacttttgcag

SEQ ID NO: 183634 - DNA, 25 bp, Artificial
  Probe
atcacgcgatgttgactgcacaggt

SEQ ID NO: 183635 - DNA, 25 bp, Artificial
  Probe
tggcttgcagaaaatccagaaaatg

SEQ ID NO: 183636 - DNA, 25 bp, Artificial
  Probe
tttctgacactttcacttttgcaga

SEQ ID NO: 183637 - DNA, 25 bp, Artificial
  Probe
cacgcgatgttgactgcacaggtaa

SEQ ID NO: 183638 - DNA, 25 bp, Artificial
  Probe
ttctgacactttcacttttgcagat

SEQ ID NO: 183639 - DNA, 25 bp, Artificial
  Probe
acgcgatgttgactgcacaggtaat

SEQ ID NO: 183640 - DNA, 25 bp, Artificial
  Probe
tctgacactttcacttttgcagatt

SEQ ID NO: 183641 - DNA, 25 bp, Artificial
  Probe
cgcgatgttgactgcacaggtaata

SEQ ID NO: 183642 - DNA, 25 bp, Artificial
  Probe
ctgacactttcacttttgcagattg

SEQ ID NO: 183643 - DNA, 25 bp, Artificial
  Probe
gcgatgttgactgcacaggtaatac

SEQ ID NO: 183644 - DNA, 25 bp, Artificial
  Probe
tgacactttcacttttgcagattgg

SEQ ID NO: 183645 - DNA, 25 bp, Artificial
  Probe
gatgttgactgcacaggtaatacaa

SEQ ID NO: 183646 - DNA, 25 bp, Artificial
  Probe
gacactttcacttttgcagattggg

SEQ ID NO: 183647 - DNA, 25 bp, Artificial
  Probe
atgttgactgcacaggtaatacaac

SEQ ID NO: 183648 - DNA, 25 bp, Artificial
  Probe
tttcacttttgcagattgggtaaca

SEQ ID NO: 183649 - DNA, 25 bp, Artificial
  Probe
gttgactgcacaggtaatacaacac

SEQ ID NO: 183650 - DNA, 25 bp, Artificial
  Probe
ttcacttttgcagattgggtaacac

SEQ ID NO: 183651 - DNA, 25 bp, Artificial
  Probe
ttgactgcacaggtaatacaacacg

SEQ ID NO: 183652 - DNA, 25 bp, Artificial
  Probe
tcacttttgcagattgggtaacaca

SEQ ID NO: 183653 - DNA, 25 bp, Artificial
  Probe
actgcacaggtaatacaacacgccg

SEQ ID NO: 183654 - DNA, 25 bp, Artificial
  Probe
cacttttgcagattgggtaacacag

SEQ ID NO: 183655 - DNA, 25 bp, Artificial
  Probe
tgcacaggtaatacaacacgccgga

SEQ ID NO: 183656 - DNA, 25 bp, Artificial
  Probe
tttgcagattgggtaacacaggaac

SEQ ID NO: 183657 - DNA, 25 bp, Artificial
  Probe
caggtaatacaacacgccggactga

SEQ ID NO: 183658 - DNA, 25 bp, Artificial
  Probe
gtaacacaggaacaactgccggtga

SEQ ID NO: 183659 - DNA, 25 bp, Artificial
  Probe
gtaatacaacacgccggactgactc

SEQ ID NO: 183660 - DNA, 25 bp, Artificial
  Probe
taacacaggaacaactgccggtgat

SEQ ID NO: 183661 - DNA, 25 bp, Artificial
  Probe
taatacaacacgccggactgactct

SEQ ID NO: 183662 - DNA, 25 bp, Artificial
  Probe
aacacaggaacaactgccggtgata

SEQ ID NO: 183663 - DNA, 25 bp, Artificial
  Probe
atacaacacgccggactgactctgg

SEQ ID NO: 183664 - DNA, 25 bp, Artificial
  Probe
acacaggaacaactgccggtgatac

SEQ ID NO: 183665 - DNA, 25 bp, Artificial
  Probe
tacaacacgccggactgactctggc

SEQ ID NO: 183666 - DNA, 25 bp, Artificial
  Probe
cacaggaacaactgccggtgatact

SEQ ID NO: 183667 - DNA, 25 bp, Artificial
  Probe
acaacacgccggactgactctggcg

SEQ ID NO: 183668 - DNA, 25 bp, Artificial
  Probe
caggaacaactgccggtgatactgg

SEQ ID NO: 183669 - DNA, 25 bp, Artificial
  Probe
caacacgccggactgactctggcgg

SEQ ID NO: 183670 - DNA, 25 bp, Artificial
  Probe
ggaacaactgccggtgatactggta

SEQ ID NO: 183671 - DNA, 25 bp, Artificial
  Probe
gggaaaacgtcacgctgaatatatg

SEQ ID NO: 183672 - DNA, 25 bp, Artificial
  Probe
gaacaactgccggtgatactggtag

SEQ ID NO: 183673 - DNA, 25 bp, Artificial
  Probe
ggaaaacgtcacgctgaatatatga

SEQ ID NO: 183674 - DNA, 25 bp, Artificial
  Probe
ctgccggtgatactggtagttggtg

SEQ ID NO: 183675 - DNA, 25 bp, Artificial
  Probe
aaacgtcacgctgaatatatgacca

SEQ ID NO: 183676 - DNA, 25 bp, Artificial
  Probe
tgccggtgatactggtagttggtgt

SEQ ID NO: 183677 - DNA, 25 bp, Artificial
  Probe
acgtcacgctgaatatatgaccacg

SEQ ID NO: 183678 - DNA, 25 bp, Artificial
  Probe
ccggtgatactggtagttggtgtga

SEQ ID NO: 183679 - DNA, 25 bp, Artificial
  Probe
cgtcacgctgaatatatgaccacgc

SEQ ID NO: 183680 - DNA, 25 bp, Artificial
  Probe
gtgatactggtagttggtgtgaaac

SEQ ID NO: 183681 - DNA, 25 bp, Artificial
  Probe
gctgaatatatgaccacgctcaccc

SEQ ID NO: 183682 - DNA, 25 bp, Artificial
  Probe
tgatactggtagttggtgtgaaact

SEQ ID NO: 183683 - DNA, 25 bp, Artificial
  Probe
ctgaatatatgaccacgctcacccg

SEQ ID NO: 183684 - DNA, 25 bp, Artificial
  Probe
gatactggtagttggtgtgaaactc

SEQ ID NO: 183685 - DNA, 25 bp, Artificial
  Probe
gaatatatgaccacgctcacccgca

SEQ ID NO: 183686 - DNA, 25 bp, Artificial
  Probe
gttggtgtgaaactcggctgtatta

SEQ ID NO: 183687 - DNA, 25 bp, Artificial
  Probe
aatatatgaccacgctcacccgcat

SEQ ID NO: 183688 - DNA, 25 bp, Artificial
  Probe
ttggtgtgaaactcggctgtattaa

SEQ ID NO: 183689 - DNA, 25 bp, Artificial
  Probe
atatatgaccacgctcacccgcatg

SEQ ID NO: 183690 - DNA, 25 bp, Artificial
  Probe
tggtgtgaaactcggctgtattaat

SEQ ID NO: 183691 - DNA, 25 bp, Artificial
  Probe
tatatgaccacgctcacccgcatga

SEQ ID NO: 183692 - DNA, 25 bp, Artificial
  Probe
ggtgtgaaactcggctgtattaatc

SEQ ID NO: 183693 - DNA, 25 bp, Artificial
  Probe
ccgcgccgctgctgggagagatccc

SEQ ID NO: 183694 - DNA, 25 bp, Artificial
  Probe
gtgtgaaactcggctgtattaatca

SEQ ID NO: 183695 - DNA, 25 bp, Artificial
  Probe
gcgccgctgctgggagagatcccct

SEQ ID NO: 183696 - DNA, 25 bp, Artificial
  Probe
tgtgaaactcggctgtattaatcac

SEQ ID NO: 183697 - DNA, 25 bp, Artificial
  Probe
cgccgctgctgggagagatcccctg

SEQ ID NO: 183698 - DNA, 25 bp, Artificial
  Probe
gtgaaactcggctgtattaatcacg

SEQ ID NO: 183699 - DNA, 25 bp, Artificial
  Probe
gccgctgctgggagagatcccctgg

SEQ ID NO: 183700 - DNA, 25 bp, Artificial
  Probe
tgaaactcggctgtattaatcacgc

SEQ ID NO: 183701 - DNA, 25 bp, Artificial
  Probe
ccgctgctgggagagatcccctggc

SEQ ID NO: 183702 - DNA, 25 bp, Artificial
  Probe
aaactcggctgtattaatcacgcga

SEQ ID NO: 183703 - DNA, 25 bp, Artificial
  Probe
cgctgctgggagagatcccctggct

SEQ ID NO: 183704 - DNA, 25 bp, Artificial
  Probe
aactcggctgtattaatcacgcgat

SEQ ID NO: 183705 - DNA, 25 bp, Artificial
  Probe
ctgctgggagagatcccctggcttg

SEQ ID NO: 183706 - DNA, 25 bp, Artificial
  Probe
actcggctgtattaatcacgcgatg

SEQ ID NO: 183707 - DNA, 25 bp, Artificial
  Probe
tgctgggagagatcccctggcttgc

SEQ ID NO: 183708 - DNA, 25 bp, Artificial
  Probe
ctcggctgtattaatcacgcgatgt

SEQ ID NO: 183709 - DNA, 25 bp, Artificial
  Probe
tgggagagatcccctggcttgcaga

SEQ ID NO: 183710 - DNA, 25 bp, Artificial
  Probe
acaacaggctgactgggtgttagtg

SEQ ID NO: 183711 - DNA, 25 bp, Artificial
  Probe
tcggctgtattaatcacgcgatgtt

SEQ ID NO: 183712 - DNA, 25 bp, Artificial
  Probe
ggagagatcccctggcttgcagaaa

SEQ ID NO: 183713 - DNA, 25 bp, Artificial
  Probe
caacaggctgactgggtgttagtgg

SEQ ID NO: 183714 - DNA, 25 bp, Artificial
  Probe
cggctgtattaatcacgcgatgttg

SEQ ID NO: 183715 - DNA, 25 bp, Artificial
  Probe
gagagatcccctggcttgcagaaaa

SEQ ID NO: 183716 - DNA, 25 bp, Artificial
  Probe
aacaggctgactgggtgttagtgga

SEQ ID NO: 183717 - DNA, 25 bp, Artificial
  Probe
ggctgtattaatcacgcgatgttga

SEQ ID NO: 183718 - DNA, 25 bp, Artificial
  Probe
agagatcccctggcttgcagaaaat

SEQ ID NO: 183719 - DNA, 25 bp, Artificial
  Probe
gtgctggcggctggtttacgccgct

SEQ ID NO: 183720 - DNA, 25 bp, Artificial
  Probe
gctgtattaatcacgcgatgttgac

SEQ ID NO: 183721 - DNA, 25 bp, Artificial
  Probe
gagatcccctggcttgcagaaaatc

SEQ ID NO: 183722 - DNA, 25 bp, Artificial
  Probe
tgctggcggctggtttacgccgctt

SEQ ID NO: 183723 - DNA, 25 bp, Artificial
  Probe
tgtattaatcacgcgatgttgactg

SEQ ID NO: 183724 - DNA, 25 bp, Artificial
  Probe
agatcccctggcttgcagaaaatcc

SEQ ID NO: 183725 - DNA, 25 bp, Artificial
  Probe
ggctggtttacgccgctttctgaca

SEQ ID NO: 183726 - DNA, 25 bp, Artificial
  Probe
gtattaatcacgcgatgttgactgc

SEQ ID NO: 183727 - DNA, 25 bp, Artificial
  Probe
gatcccctggcttgcagaaaatcca

SEQ ID NO: 183728 - DNA, 25 bp, Artificial
  Probe
gctggtttacgccgctttctgacac

SEQ ID NO: 183729 - DNA, 25 bp, Artificial
  Probe
tattaatcacgcgatgttgactgca

SEQ ID NO: 183730 - DNA, 25 bp, Artificial
  Probe
atcccctggcttgcagaaaatccag

SEQ ID NO: 183731 - DNA, 25 bp, Artificial
  Probe
tttacgccgctttctgacactttca

SEQ ID NO: 183732 - DNA, 25 bp, Artificial
  Probe
attaatcacgcgatgttgactgcac

SEQ ID NO: 183733 - DNA, 25 bp, Artificial
  Probe
tcccctggcttgcagaaaatccaga

SEQ ID NO: 183734 - DNA, 25 bp, Artificial
  Probe
ttacgccgctttctgacactttcac

SEQ ID NO: 183735 - DNA, 25 bp, Artificial
  Probe
ttaatcacgcgatgttgactgcaca

SEQ ID NO: 183736 - DNA, 25 bp, Artificial
  Probe
ccctggcttgcagaaaatccagaaa

SEQ ID NO: 183737 - DNA, 25 bp, Artificial
  Probe
tacgccgctttctgacactttcact

SEQ ID NO: 183738 - DNA, 25 bp, Artificial
  Probe
taatcacgcgatgttgactgcacag

SEQ ID NO: 183739 - DNA, 25 bp, Artificial
  Probe
cctggcttgcagaaaatccagaaaa

SEQ ID NO: 183740 - DNA, 25 bp, Artificial
  Probe
gctttctgacactttcacttttgca

SEQ ID NO: 183741 - DNA, 25 bp, Artificial
  Probe
aatcacgcgatgttgactgcacagg

SEQ ID NO: 183742 - DNA, 25 bp, Artificial
  Probe
ctggcttgcagaaaatccagaaaat

SEQ ID NO: 183743 - DNA, 25 bp, Artificial
  Probe
ctttctgacactttcacttttgcag

SEQ ID NO: 183744 - DNA, 25 bp, Artificial
  Probe
atcacgcgatgttgactgcacaggt

SEQ ID NO: 183745 - DNA, 25 bp, Artificial
  Probe
tggcttgcagaaaatccagaaaatg

SEQ ID NO: 183746 - DNA, 25 bp, Artificial
  Probe
tttctgacactttcacttttgcaga

SEQ ID NO: 183747 - DNA, 25 bp, Artificial
  Probe
cacgcgatgttgactgcacaggtaa

SEQ ID NO: 183748 - DNA, 25 bp, Artificial
  Probe
ttctgacactttcacttttgcagat

SEQ ID NO: 183749 - DNA, 25 bp, Artificial
  Probe
acgcgatgttgactgcacaggtaat

SEQ ID NO: 183750 - DNA, 25 bp, Artificial
  Probe
tctgacactttcacttttgcagatt

SEQ ID NO: 183751 - DNA, 25 bp, Artificial
  Probe
cgcgatgttgactgcacaggtaata

SEQ ID NO: 183752 - DNA, 25 bp, Artificial
  Probe
ctgacactttcacttttgcagattg

SEQ ID NO: 183753 - DNA, 25 bp, Artificial
  Probe
gcgatgttgactgcacaggtaatac

SEQ ID NO: 183754 - DNA, 25 bp, Artificial
  Probe
tgacactttcacttttgcagattgg

SEQ ID NO: 183755 - DNA, 25 bp, Artificial
  Probe
gatgttgactgcacaggtaatacaa

SEQ ID NO: 183756 - DNA, 25 bp, Artificial
  Probe
gacactttcacttttgcagattggg

SEQ ID NO: 183757 - DNA, 25 bp, Artificial
  Probe
atgttgactgcacaggtaatacaac

SEQ ID NO: 183758 - DNA, 25 bp, Artificial
  Probe
tttcacttttgcagattgggtaaca

SEQ ID NO: 183759 - DNA, 25 bp, Artificial
  Probe
gttgactgcacaggtaatacaacac

SEQ ID NO: 183760 - DNA, 25 bp, Artificial
  Probe
ttcacttttgcagattgggtaacac

SEQ ID NO: 183761 - DNA, 25 bp, Artificial
  Probe
ttgactgcacaggtaatacaacacg

SEQ ID NO: 183762 - DNA, 25 bp, Artificial
  Probe
tcacttttgcagattgggtaacaca

SEQ ID NO: 183763 - DNA, 25 bp, Artificial
  Probe
actgcacaggtaatacaacacgccg

SEQ ID NO: 183764 - DNA, 25 bp, Artificial
  Probe
cacttttgcagattgggtaacacag

SEQ ID NO: 183765 - DNA, 25 bp, Artificial
  Probe
tgcacaggtaatacaacacgccgga

SEQ ID NO: 183766 - DNA, 25 bp, Artificial
  Probe
tttgcagattgggtaacacaggaac

SEQ ID NO: 183767 - DNA, 25 bp, Artificial
  Probe
caggtaatacaacacgccggactga

SEQ ID NO: 183768 - DNA, 25 bp, Artificial
  Probe
gtaacacaggaacaactgccggtga

SEQ ID NO: 183769 - DNA, 25 bp, Artificial
  Probe
gtaatacaacacgccggactgactc

SEQ ID NO: 183770 - DNA, 25 bp, Artificial
  Probe
taacacaggaacaactgccggtgat

SEQ ID NO: 183771 - DNA, 25 bp, Artificial
  Probe
taatacaacacgccggactgactct

SEQ ID NO: 183772 - DNA, 25 bp, Artificial
  Probe
aacacaggaacaactgccggtgata

SEQ ID NO: 183773 - DNA, 25 bp, Artificial
  Probe
atacaacacgccggactgactctgg

SEQ ID NO: 183774 - DNA, 25 bp, Artificial
  Probe
acacaggaacaactgccggtgatac

SEQ ID NO: 183775 - DNA, 25 bp, Artificial
  Probe
tacaacacgccggactgactctggc

SEQ ID NO: 183776 - DNA, 25 bp, Artificial
  Probe
cacaggaacaactgccggtgatact

SEQ ID NO: 183777 - DNA, 25 bp, Artificial
  Probe
acaacacgccggactgactctggcg

SEQ ID NO: 183778 - DNA, 25 bp, Artificial
  Probe
caggaacaactgccggtgatactgg

SEQ ID NO: 183779 - DNA, 25 bp, Artificial
  Probe
caacacgccggactgactctggcgg

SEQ ID NO: 183780 - DNA, 25 bp, Artificial
  Probe
ggaacaactgccggtgatactggta

SEQ ID NO: 183781 - DNA, 25 bp, Artificial
  Probe
gggaaaacgtcacgctgaatatatg

SEQ ID NO: 183782 - DNA, 25 bp, Artificial
  Probe
gaacaactgccggtgatactggtag

SEQ ID NO: 183783 - DNA, 25 bp, Artificial
  Probe
ggaaaacgtcacgctgaatatatga

SEQ ID NO: 183784 - DNA, 25 bp, Artificial
  Probe
ctgccggtgatactggtagttggtg

SEQ ID NO: 183785 - DNA, 25 bp, Artificial
  Probe
aaacgtcacgctgaatatatgacca

SEQ ID NO: 183786 - DNA, 25 bp, Artificial
  Probe
tgccggtgatactggtagttggtgt

SEQ ID NO: 183787 - DNA, 25 bp, Artificial
  Probe
acgtcacgctgaatatatgaccacg

SEQ ID NO: 183788 - DNA, 25 bp, Artificial
  Probe
ccggtgatactggtagttggtgtga

SEQ ID NO: 183789 - DNA, 25 bp, Artificial
  Probe
cgtcacgctgaatatatgaccacgc

SEQ ID NO: 183790 - DNA, 25 bp, Artificial
  Probe
gtgatactggtagttggtgtgaaac

SEQ ID NO: 183791 - DNA, 25 bp, Artificial
  Probe
gctgaatatatgaccacgctcaccc

SEQ ID NO: 183792 - DNA, 25 bp, Artificial
  Probe
tgatactggtagttggtgtgaaact

SEQ ID NO: 183793 - DNA, 25 bp, Artificial
  Probe
ctgaatatatgaccacgctcacccg

SEQ ID NO: 183794 - DNA, 25 bp, Artificial
  Probe
gatactggtagttggtgtgaaactc

SEQ ID NO: 183795 - DNA, 25 bp, Artificial
  Probe
gaatatatgaccacgctcacccgca

SEQ ID NO: 183796 - DNA, 25 bp, Artificial
  Probe
gttggtgtgaaactcggctgtatta

SEQ ID NO: 183797 - DNA, 25 bp, Artificial
  Probe
aatatatgaccacgctcacccgcat

SEQ ID NO: 183798 - DNA, 25 bp, Artificial
  Probe
cctgcagctggattacgcaacagta

SEQ ID NO: 183799 - DNA, 25 bp, Artificial
  Probe
agcagcctgcagctggattacgcaa

SEQ ID NO: 183800 - DNA, 25 bp, Artificial
  Probe
tcgcctctggcagcgaaaagacccc

SEQ ID NO: 183801 - DNA, 25 bp, Artificial
  Probe
gccagttgtgcacttttacaagccg

SEQ ID NO: 183802 - DNA, 25 bp, Artificial
  Probe
atagcgacgcgctggcgttacagcg

SEQ ID NO: 183803 - DNA, 25 bp, Artificial
  Probe
ggaaaactgtcgccagttgtgcact

SEQ ID NO: 183804 - DNA, 25 bp, Artificial
  Probe
ggtcgcctctggcagcgaaaagacc

SEQ ID NO: 183805 - DNA, 25 bp, Artificial
  Probe
tacagcgcaacagcagcctgcagct

SEQ ID NO: 183806 - DNA, 25 bp, Artificial
  Probe
cgacgcgctggcgttacagcgcaac

SEQ ID NO: 183807 - DNA, 25 bp, Artificial
  Probe
gccgcaaaggcagcaggctaccgga

SEQ ID NO: 183808 - DNA, 25 bp, Artificial
  Probe
gattacgcaacagtaaatccttaca

SEQ ID NO: 183809 - DNA, 25 bp, Artificial
  Probe
acagcagcctgcagctggattacgc

SEQ ID NO: 183810 - DNA, 25 bp, Artificial
  Probe
acttttacaagccgcaaaggcagca

SEQ ID NO: 183811 - DNA, 25 bp, Artificial
  Probe
agctggattacgcaacagtaaatcc

SEQ ID NO: 183812 - DNA, 25 bp, Artificial
  Probe
agcgcaacagcagcctgcagctgga

SEQ ID NO: 183813 - DNA, 25 bp, Artificial
  Probe
gcacttttacaagccgcaaaggcag

SEQ ID NO: 183814 - DNA, 25 bp, Artificial
  Probe
aggtttacgcaatagcgacgcgctg

SEQ ID NO: 183815 - DNA, 25 bp, Artificial
  Probe
cagcctgcagctggattacgcaaca

SEQ ID NO: 183816 - DNA, 25 bp, Artificial
  Probe
gttacagcgcaacagcagcctgcag

SEQ ID NO: 183817 - DNA, 25 bp, Artificial
  Probe
tcgccagttgtgcacttttacaagc

SEQ ID NO: 183818 - DNA, 25 bp, Artificial
  Probe
tcagcgcgcaagagggcagaccgat

SEQ ID NO: 183819 - DNA, 25 bp, Artificial
  Probe
gttgtgcacttttacaagccgcaaa

SEQ ID NO: 183820 - DNA, 25 bp, Artificial
  Probe
tacgcaatagcgacgcgctggcgtt

SEQ ID NO: 183821 - DNA, 25 bp, Artificial
  Probe
cacatcatcagcgcgcaagagggca

SEQ ID NO: 183822 - DNA, 25 bp, Artificial
  Probe
gctggattacgcaacagtaaatcct

SEQ ID NO: 183823 - DNA, 25 bp, Artificial
  Probe
acgcgctggcgttacagcgcaacag

SEQ ID NO: 183824 - DNA, 25 bp, Artificial
  Probe
gcacatcatcagcgcgcaagagggc

SEQ ID NO: 183825 - DNA, 25 bp, Artificial
  Probe
aatagcgacgcgctggcgttacagc

SEQ ID NO: 183826 - DNA, 25 bp, Artificial
  Probe
gcgcaacagcagcctgcagctggat

SEQ ID NO: 183827 - DNA, 25 bp, Artificial
  Probe
actgtcgccagttgtgcacttttac

SEQ ID NO: 183828 - DNA, 25 bp, Artificial
  Probe
aacagcagcctgcagctggattacg

SEQ ID NO: 183829 - DNA, 25 bp, Artificial
  Probe
gccgcacatcatcagcgcgcaagag

SEQ ID NO: 183830 - DNA, 25 bp, Artificial
  Probe
tagcgacgcgctggcgttacagcgc

SEQ ID NO: 183831 - DNA, 25 bp, Artificial
  Probe
agcgacgcgctggcgttacagcgca

SEQ ID NO: 183832 - DNA, 25 bp, Artificial
  Probe
gtcgccagttgtgcacttttacaag

SEQ ID NO: 183833 - DNA, 25 bp, Artificial
  Probe
tggcgttacagcgcaacagcagcct

SEQ ID NO: 183834 - DNA, 25 bp, Artificial
  Probe
agttgtgcacttttacaagccgcaa

SEQ ID NO: 183835 - DNA, 25 bp, Artificial
  Probe
gcctgcagctggattacgcaacagt

SEQ ID NO: 183836 - DNA, 25 bp, Artificial
  Probe
ttgtgcacttttacaagccgcaaag

SEQ ID NO: 183837 - DNA, 25 bp, Artificial
  Probe
catcatcagcgcgcaagagggcaga

SEQ ID NO: 183838 - DNA, 25 bp, Artificial
  Probe
cagcaggctaccggacggcaggtta

SEQ ID NO: 183839 - DNA, 25 bp, Artificial
  Probe
gcaggctaccggacggcaggttata

SEQ ID NO: 183840 - DNA, 25 bp, Artificial
  Probe
cgccagttgtgcacttttacaagcc

SEQ ID NO: 183841 - DNA, 25 bp, Artificial
  Probe
agcctgcagctggattacgcaacag

SEQ ID NO: 183842 - DNA, 25 bp, Artificial
  Probe
ggcgttacagcgcaacagcagcctg

SEQ ID NO: 183843 - DNA, 25 bp, Artificial
  Probe
tgtgcacttttacaagccgcaaagg

SEQ ID NO: 183844 - DNA, 25 bp, Artificial
  Probe
caacagcagcctgcagctggattac

SEQ ID NO: 183845 - DNA, 25 bp, Artificial
  Probe
taaaccggtcgcctctggcagcgaa

SEQ ID NO: 183846 - DNA, 25 bp, Artificial
  Probe
cttttacaagccgcaaaggcagcag

SEQ ID NO: 183847 - DNA, 25 bp, Artificial
  Probe
aaaggcagcaggctaccggacggca

SEQ ID NO: 183848 - DNA, 25 bp, Artificial
  Probe
tgcagctggattacgcaacagtaaa

SEQ ID NO: 183849 - DNA, 25 bp, Artificial
  Probe
gacgcgctggcgttacagcgcaaca

SEQ ID NO: 183850 - DNA, 25 bp, Artificial
  Probe
tgcacttttacaagccgcaaaggca

SEQ ID NO: 183851 - DNA, 25 bp, Artificial
  Probe
ctgtcgccagttgtgcacttttaca

SEQ ID NO: 183852 - DNA, 25 bp, Artificial
  Probe
cgcgcaagagggcagaccgatagaa

SEQ ID NO: 183853 - DNA, 25 bp, Artificial
  Probe
catcagcgcgcaagagggcagaccg

SEQ ID NO: 183854 - DNA, 25 bp, Artificial
  Probe
cgcaacagcagcctgcagctggatt

SEQ ID NO: 183855 - DNA, 25 bp, Artificial
  Probe
gcgttacagcgcaacagcagcctgc

SEQ ID NO: 183856 - DNA, 25 bp, Artificial
  Probe
gcaacagcagcctgcagctggatta

SEQ ID NO: 183857 - DNA, 25 bp, Artificial
  Probe
gcaaaggcagcaggctaccggacgg

SEQ ID NO: 183858 - DNA, 25 bp, Artificial
  Probe
caatagcgacgcgctggcgttacag

SEQ ID NO: 183859 - DNA, 25 bp, Artificial
  Probe
acaagccgcaaaggcagcaggctac

SEQ ID NO: 183860 - DNA, 25 bp, Artificial
  Probe
acgcaatagcgacgcgctggcgtta

SEQ ID NO: 183861 - DNA, 25 bp, Artificial
  Probe
cgcaaaggcagcaggctaccggacg

SEQ ID NO: 183862 - DNA, 25 bp, Artificial
  Probe
tttacaagccgcaaaggcagcaggc

SEQ ID NO: 183863 - DNA, 25 bp, Artificial
  Probe
cgcaatagcgacgcgctggcgttac

SEQ ID NO: 183864 - DNA, 25 bp, Artificial
  Probe
ttacgcaatagcgacgcgctggcgt

SEQ ID NO: 183865 - DNA, 25 bp, Artificial
  Probe
cagcgcaacagcagcctgcagctgg

SEQ ID NO: 183866 - DNA, 25 bp, Artificial
  Probe
cagcgcgcaagagggcagaccgata

SEQ ID NO: 183867 - DNA, 25 bp, Artificial
  Probe
ttacaagccgcaaaggcagcaggct

SEQ ID NO: 183868 - DNA, 25 bp, Artificial
  Probe
ccagttgtgcacttttacaagccgc

SEQ ID NO: 183869 - DNA, 25 bp, Artificial
  Probe
ggggaaaactgtcgccagttgtgca

SEQ ID NO: 183870 - DNA, 25 bp, Artificial
  Probe
cagttgtgcacttttacaagccgca

SEQ ID NO: 183871 - DNA, 25 bp, Artificial
  Probe
cacttttacaagccgcaaaggcagc

SEQ ID NO: 183872 - DNA, 25 bp, Artificial
  Probe
gcgctggcgttacagcgcaacagca

SEQ ID NO: 183873 - DNA, 25 bp, Artificial
  Probe
cgccgcacatcatcagcgcgcaaga

SEQ ID NO: 183874 - DNA, 25 bp, Artificial
  Probe
acagcgcaacagcagcctgcagctg

SEQ ID NO: 183875 - DNA, 25 bp, Artificial
  Probe
cggtcgcctctggcagcgaaaagac

SEQ ID NO: 183876 - DNA, 25 bp, Artificial
  Probe
agcgcgcaagagggcagaccgatag

SEQ ID NO: 183877 - DNA, 25 bp, Artificial
  Probe
agccgcaaaggcagcaggctaccgg

SEQ ID NO: 183878 - DNA, 25 bp, Artificial
  Probe
cgttacagcgcaacagcagcctgca

SEQ ID NO: 183879 - DNA, 25 bp, Artificial
  Probe
ttacagcgcaacagcagcctgcagc

SEQ ID NO: 183880 - DNA, 25 bp, Artificial
  Probe
ccgcacatcatcagcgcgcaagagg

SEQ ID NO: 183881 - DNA, 25 bp, Artificial
  Probe
gcaatagcgacgcgctggcgttaca

SEQ ID NO: 183882 - DNA, 25 bp, Artificial
  Probe
tataaaccggtcgcctctggcagcg

SEQ ID NO: 183883 - DNA, 25 bp, Artificial
  Probe
caagccgcaaaggcagcaggctacc

SEQ ID NO: 183884 - DNA, 25 bp, Artificial
  Probe
atcatcagcgcgcaagagggcagac

SEQ ID NO: 183885 - DNA, 25 bp, Artificial
  Probe
ctgcagctggattacgcaacagtaa

SEQ ID NO: 183886 - DNA, 25 bp, Artificial
  Probe
cgcacatcatcagcgcgcaagaggg

SEQ ID NO: 183887 - DNA, 25 bp, Artificial
  Probe
tttacgcaatagcgacgcgctggcg

SEQ ID NO: 183888 - DNA, 25 bp, Artificial
  Probe
gtttacgcaatagcgacgcgctggc

SEQ ID NO: 183889 - DNA, 25 bp, Artificial
  Probe
gcgacgcgctggcgttacagcgcaa

SEQ ID NO: 183890 - DNA, 25 bp, Artificial
  Probe
cagcagcctgcagctggattacgca

SEQ ID NO: 183891 - DNA, 25 bp, Artificial
  Probe
gtcgcctctggcagcgaaaagaccc

SEQ ID NO: 183892 - DNA, 25 bp, Artificial
  Probe
gcagctggattacgcaacagtaaat

SEQ ID NO: 183893 - DNA, 25 bp, Artificial
  Probe
cgcgctggcgttacagcgcaacagc

SEQ ID NO: 183894 - DNA, 25 bp, Artificial
  Probe
aactgtcgccagttgtgcactttta

SEQ ID NO: 183895 - DNA, 25 bp, Artificial
  Probe
gcagcaggctaccggacggcaggtt

SEQ ID NO: 183896 - DNA, 25 bp, Artificial
  Probe
tgtcgccagttgtgcacttttacaa

SEQ ID NO: 183897 - DNA, 25 bp, Artificial
  Probe
ttcgccgcacatcatcagcgcgcaa

SEQ ID NO: 183898 - DNA, 25 bp, Artificial
  Probe
ccgcaaaggcagcaggctaccggac

SEQ ID NO: 183899 - DNA, 25 bp, Artificial
  Probe
atcagcgcgcaagagggcagaccga

SEQ ID NO: 183900 - DNA, 25 bp, Artificial
  Probe
tcatcagcgcgcaagagggcagacc

SEQ ID NO: 183901 - DNA, 25 bp, Artificial
  Probe
ggtttacgcaatagcgacgcgctgg

SEQ ID NO: 183902 - DNA, 25 bp, Artificial
  Probe
acatcatcagcgcgcaagagggcag

SEQ ID NO: 183903 - DNA, 25 bp, Artificial
  Probe
ccggtcgcctctggcagcgaaaaga

SEQ ID NO: 183904 - DNA, 25 bp, Artificial
  Probe
cagtaaatccttacaccttcgcaga

SEQ ID NO: 183905 - DNA, 25 bp, Artificial
  Probe
ttttacaagccgcaaaggcagcagg

SEQ ID NO: 183906 - DNA, 25 bp, Artificial
  Probe
gcagcctgcagctggattacgcaac

SEQ ID NO: 183907 - DNA, 25 bp, Artificial
  Probe
gtgcacttttacaagccgcaaaggc

SEQ ID NO: 183908 - DNA, 25 bp, Artificial
  Probe
tacaagccgcaaaggcagcaggcta

SEQ ID NO: 183909 - DNA, 25 bp, Artificial
  Probe
cagctggattacgcaacagtaaatc

SEQ ID NO: 183910 - DNA, 25 bp, Artificial
  Probe
aaggcagcaggctaccggacggcag

SEQ ID NO: 183911 - DNA, 25 bp, Artificial
  Probe
ctggcgttacagcgcaacagcagcc

SEQ ID NO: 183912 - DNA, 25 bp, Artificial
  Probe
ttataaaccggtcgcctctggcagc

SEQ ID NO: 183913 - DNA, 25 bp, Artificial
  Probe
caaaggcagcaggctaccggacggc

SEQ ID NO: 183914 - DNA, 25 bp, Artificial
  Probe
gggaaaactgtcgccagttgtgcac

SEQ ID NO: 183915 - DNA, 25 bp, Artificial
  Probe
tcgccgcacatcatcagcgcgcaag

SEQ ID NO: 183916 - DNA, 25 bp, Artificial
  Probe
aagccgcaaaggcagcaggctaccg

SEQ ID NO: 183917 - DNA, 25 bp, Artificial
  Probe
gcgcgcaagagggcagaccgataga

SEQ ID NO: 183918 - DNA, 25 bp, Artificial
  Probe
tctggacacagtgcccgtgtcggag

SEQ ID NO: 183919 - DNA, 25 bp, Artificial
  Probe
catgaactatatccgtaacctggat

SEQ ID NO: 183920 - DNA, 25 bp, Artificial
  Probe
aataccggagatcatgcaagctggt

SEQ ID NO: 183921 - DNA, 25 bp, Artificial
  Probe
ggttagcaccgcaggtgtagagaag

SEQ ID NO: 183922 - DNA, 25 bp, Artificial
  Probe
ccggagatcatgcaagctggtggct

SEQ ID NO: 183923 - DNA, 25 bp, Artificial
  Probe
ttcaataccggagatcatgcaagct

SEQ ID NO: 183924 - DNA, 25 bp, Artificial
  Probe
atttccgtctctggtgtagctgatg

SEQ ID NO: 183925 - DNA, 25 bp, Artificial
  Probe
aacgctggttagcaccgcaggtgta

SEQ ID NO: 183926 - DNA, 25 bp, Artificial
  Probe
gatttacggcgctaaggatgactct

SEQ ID NO: 183927 - DNA, 25 bp, Artificial
  Probe
cggcgctaaggatgactctggtcag

SEQ ID NO: 183928 - DNA, 25 bp, Artificial
  Probe
actctggtcagagatacctggcctg

SEQ ID NO: 183929 - DNA, 25 bp, Artificial
  Probe
atatggcccgcgctggagtttcaat

SEQ ID NO: 183930 - DNA, 25 bp, Artificial
  Probe
caatggtgcgcctgctggaagatgc

SEQ ID NO: 183931 - DNA, 25 bp, Artificial
  Probe
gatacctggcctggtctggacacag

SEQ ID NO: 183932 - DNA, 25 bp, Artificial
  Probe
ctctggtgtagctgatgatccgaat

SEQ ID NO: 183933 - DNA, 25 bp, Artificial
  Probe
gagccgcgcgagatatggcccgcgc

SEQ ID NO: 183934 - DNA, 25 bp, Artificial
  Probe
aatggtgttgccgcgccatctgcca

SEQ ID NO: 183935 - DNA, 25 bp, Artificial
  Probe
cgagatatggcccgcgctggagttt

SEQ ID NO: 183936 - DNA, 25 bp, Artificial
  Probe
atggatttccgtctctggtgtagct

SEQ ID NO: 183937 - DNA, 25 bp, Artificial
  Probe
aacaggggcaatggtgcgcctgctg

SEQ ID NO: 183938 - DNA, 25 bp, Artificial
  Probe
atgcaagctggtggctggaccaatg

SEQ ID NO: 183939 - DNA, 25 bp, Artificial
  Probe
tttcaataccggagatcatgcaagc

SEQ ID NO: 183940 - DNA, 25 bp, Artificial
  Probe
ctggtcagagatacctggcctggtc

SEQ ID NO: 183941 - DNA, 25 bp, Artificial
  Probe
ctcatcgattgatttacggcgctaa

SEQ ID NO: 183942 - DNA, 25 bp, Artificial
  Probe
atggtgcgcctgctggaagatgccg

SEQ ID NO: 183943 - DNA, 25 bp, Artificial
  Probe
tggacacagtgcccgtgtcggagcc

SEQ ID NO: 183944 - DNA, 25 bp, Artificial
  Probe
tgactctggtcagagatacctggcc

SEQ ID NO: 183945 - DNA, 25 bp, Artificial
  Probe
gatttttgaagcaactcatcgattg

SEQ ID NO: 183946 - DNA, 25 bp, Artificial
  Probe
ccgtgtcggagccgcgcgagatatg

SEQ ID NO: 183947 - DNA, 25 bp, Artificial
  Probe
gaaacaggggcaatggtgcgcctgc

SEQ ID NO: 183948 - DNA, 25 bp, Artificial
  Probe
atggcccgcgctggagtttcaatac

SEQ ID NO: 183949 - DNA, 25 bp, Artificial
  Probe
aatattgtcatgaactatatccgta

SEQ ID NO: 183950 - DNA, 25 bp, Artificial
  Probe
gtcagagatacctggcctggtctgg

SEQ ID NO: 183951 - DNA, 25 bp, Artificial
  Probe
tggtgttgccgcgccatctgccacc

SEQ ID NO: 183952 - DNA, 25 bp, Artificial
  Probe
tgaactatatccgtaacctggatag

SEQ ID NO: 183953 - DNA, 25 bp, Artificial
  Probe
acagtgcccgtgtcggagccgcgcg

SEQ ID NO: 183954 - DNA, 25 bp, Artificial
  Probe
agatcatgcaagctggtggctggac

SEQ ID NO: 183955 - DNA, 25 bp, Artificial
  Probe
actatatccgtaacctggatagtga

SEQ ID NO: 183956 - DNA, 25 bp, Artificial
  Probe
tgcaagctggtggctggaccaatgt

SEQ ID NO: 183957 - DNA, 25 bp, Artificial
  Probe
agatatggcccgcgctggagtttca

SEQ ID NO: 183958 - DNA, 25 bp, Artificial
  Probe
gtctctggtgtagctgatgatccga

SEQ ID NO: 183959 - DNA, 25 bp, Artificial
  Probe
gtaactaaactggtcgagcgatgga

SEQ ID NO: 183960 - DNA, 25 bp, Artificial
  Probe
cagctatcaactcgcgccctggaag

SEQ ID NO: 183961 - DNA, 25 bp, Artificial
  Probe
cgctggagtttcaataccggagatc

SEQ ID NO: 183962 - DNA, 25 bp, Artificial
  Probe
gctgatgatccgaataactacctgt

SEQ ID NO: 183963 - DNA, 25 bp, Artificial
  Probe
cgcgagatatggcccgcgctggagt

SEQ ID NO: 183964 - DNA, 25 bp, Artificial
  Probe
gctaaggatgactctggtcagagat

SEQ ID NO: 183965 - DNA, 25 bp, Artificial
  Probe
cgcgcgagatatggcccgcgctgga

SEQ ID NO: 183966 - DNA, 25 bp, Artificial
  Probe
tattgtcatgaactatatccgtaac

SEQ ID NO: 183967 - DNA, 25 bp, Artificial
  Probe
tggcccgcgctggagtttcaatacc

SEQ ID NO: 183968 - DNA, 25 bp, Artificial
  Probe
ggcaatggtgcgcctgctggaagat

SEQ ID NO: 183969 - DNA, 25 bp, Artificial
  Probe
tttttgaagcaactcatcgattgat

SEQ ID NO: 183970 - DNA, 25 bp, Artificial
  Probe
tctggtcagagatacctggcctggt

SEQ ID NO: 183971 - DNA, 25 bp, Artificial
  Probe
ggtgcgcctgctggaagatgccgat

SEQ ID NO: 183972 - DNA, 25 bp, Artificial
  Probe
tggttagcaccgcaggtgtagagaa

SEQ ID NO: 183973 - DNA, 25 bp, Artificial
  Probe
tttgaagcaactcatcgattgattt

SEQ ID NO: 183974 - DNA, 25 bp, Artificial
  Probe
tttacggcgctaaggatgactctgg

SEQ ID NO: 183975 - DNA, 25 bp, Artificial
  Probe
atccatattggcagaacgaaaacgc

SEQ ID NO: 183976 - DNA, 25 bp, Artificial
  Probe
gcgctaaggatgactctggtcagag

SEQ ID NO: 183977 - DNA, 25 bp, Artificial
  Probe
agcaactcatcgattgatttacggc

SEQ ID NO: 183978 - DNA, 25 bp, Artificial
  Probe
cacagtgcccgtgtcggagccgcgc

SEQ ID NO: 183979 - DNA, 25 bp, Artificial
  Probe
agtttcaataccggagatcatgcaa

SEQ ID NO: 183980 - DNA, 25 bp, Artificial
  Probe
ttgtcatgaactatatccgtaacct

SEQ ID NO: 183981 - DNA, 25 bp, Artificial
  Probe
agaatgttaatccatattggcagaa

SEQ ID NO: 183982 - DNA, 25 bp, Artificial
  Probe
tggatttccgtctctggtgtagctg

SEQ ID NO: 183983 - DNA, 25 bp, Artificial
  Probe
agcgatggatttccgtctctggtgt

SEQ ID NO: 183984 - DNA, 25 bp, Artificial
  Probe
gaatgttaatccatattggcagaac

SEQ ID NO: 183985 - DNA, 25 bp, Artificial
  Probe
catcgattgatttacggcgctaagg

SEQ ID NO: 183986 - DNA, 25 bp, Artificial
  Probe
gcctggtctggacacagtgcccgtg

SEQ ID NO: 183987 - DNA, 25 bp, Artificial
  Probe
cgagcgatggatttccgtctctggt

SEQ ID NO: 183988 - DNA, 25 bp, Artificial
  Probe
atcatgcaagctggtggctggacca

SEQ ID NO: 183989 - DNA, 25 bp, Artificial
  Probe
tcgattgatttacggcgctaaggat

SEQ ID NO: 183990 - DNA, 25 bp, Artificial
  Probe
taatccatattggcagaacgaaaac

SEQ ID NO: 183991 - DNA, 25 bp, Artificial
  Probe
ctggtctggacacagtgcccgtgtc

SEQ ID NO: 183992 - DNA, 25 bp, Artificial
  Probe
aactcatcgattgatttacggcgct

SEQ ID NO: 183993 - DNA, 25 bp, Artificial
  Probe
gttaatccatattggcagaacgaaa

SEQ ID NO: 183994 - DNA, 25 bp, Artificial
  Probe
ggatttccgtctctggtgtagctga

SEQ ID NO: 183995 - DNA, 25 bp, Artificial
  Probe
gacacagtgcccgtgtcggagccgc

SEQ ID NO: 183996 - DNA, 25 bp, Artificial
  Probe
ctggagtttcaataccggagatcat

SEQ ID NO: 183997 - DNA, 25 bp, Artificial
  Probe
taaggatgactctggtcagagatac

SEQ ID NO: 183998 - DNA, 25 bp, Artificial
  Probe
gtcatgaactatatccgtaacctgg

SEQ ID NO: 183999 - DNA, 25 bp, Artificial
  Probe
cgctggttagcaccgcaggtgtaga

SEQ ID NO: 184000 - DNA, 25 bp, Artificial
  Probe
cggagccgcgcgagatatggcccgc

SEQ ID NO: 184001 - DNA, 25 bp, Artificial
  Probe
gagatacctggcctggtctggacac

SEQ ID NO: 184002 - DNA, 25 bp, Artificial
  Probe
ttgatttacggcgctaaggatgact

SEQ ID NO: 184003 - DNA, 25 bp, Artificial
  Probe
gattgatttacggcgctaaggatga

SEQ ID NO: 184004 - DNA, 25 bp, Artificial
  Probe
cagagatacctggcctggtctggac

SEQ ID NO: 184005 - DNA, 25 bp, Artificial
  Probe
ttagcaccgcaggtgtagagaaggc

SEQ ID NO: 184006 - DNA, 25 bp, Artificial
  Probe
gtcgagcgatggatttccgtctctg

SEQ ID NO: 184007 - DNA, 25 bp, Artificial
  Probe
cgtctctggtgtagctgatgatccg

SEQ ID NO: 184008 - DNA, 25 bp, Artificial
  Probe
gtcggagccgcgcgagatatggccc

SEQ ID NO: 184009 - DNA, 25 bp, Artificial
  Probe
gcgcctgctggaagatgccgattag

SEQ ID NO: 184010 - DNA, 25 bp, Artificial
  Probe
ttttgaagcaactcatcgattgatt

SEQ ID NO: 184011 - DNA, 25 bp, Artificial
  Probe
ctatatccgtaacctggatagtgaa

SEQ ID NO: 184012 - DNA, 25 bp, Artificial
  Probe
tgcgcctgctggaagatgccgatta

SEQ ID NO: 184013 - DNA, 25 bp, Artificial
  Probe
tggtcgagcgatggatttccgtctc

SEQ ID NO: 184014 - DNA, 25 bp, Artificial
  Probe
ttccgtctctggtgtagctgatgat

SEQ ID NO: 184015 - DNA, 25 bp, Artificial
  Probe
caagctggtggctggaccaatgtaa

SEQ ID NO: 184016 - DNA, 25 bp, Artificial
  Probe
tgatgatccgaataactacctgttt

SEQ ID NO: 184017 - DNA, 25 bp, Artificial
  Probe
agctggtggctggaccaatgtaaat

SEQ ID NO: 184018 - DNA, 25 bp, Artificial
  Probe
tgtagctgatgatccgaataactac

SEQ ID NO: 184019 - DNA, 25 bp, Artificial
  Probe
tacggcgctaaggatgactctggtc

SEQ ID NO: 184020 - DNA, 25 bp, Artificial
  Probe
atacctggcctggtctggacacagt

SEQ ID NO: 184021 - DNA, 25 bp, Artificial
  Probe
gcaactcatcgattgatttacggcg

SEQ ID NO: 184022 - DNA, 25 bp, Artificial
  Probe
caccgcaggtgtagagaaggcactt

SEQ ID NO: 184023 - DNA, 25 bp, Artificial
  Probe
ggtctggacacagtgcccgtgtcgg

SEQ ID NO: 184024 - DNA, 25 bp, Artificial
  Probe
tcaataccggagatcatgcaagctg

SEQ ID NO: 184025 - DNA, 25 bp, Artificial
  Probe
gccagctatcaactcgcgccctgga

SEQ ID NO: 184026 - DNA, 25 bp, Artificial
  Probe
cggagatcatgcaagctggtggctg

SEQ ID NO: 184027 - DNA, 25 bp, Artificial
  Probe
ctaaactggtcgagcgatggatttc

SEQ ID NO: 184028 - DNA, 25 bp, Artificial
  Probe
gctgatgatccgaataactacctgt

SEQ ID NO: 184029 - DNA, 25 bp, Artificial
  Probe
agatatggcccgcgctggagtttca

SEQ ID NO: 184030 - DNA, 25 bp, Artificial
  Probe
tgatgatccgaataactacctgttt

SEQ ID NO: 184031 - DNA, 25 bp, Artificial
  Probe
atatggcccgcgctggagtttcaat

SEQ ID NO: 184032 - DNA, 25 bp, Artificial
  Probe
aatggtgttgccgcgccatctgcca

SEQ ID NO: 184033 - DNA, 25 bp, Artificial
  Probe
atggcccgcgctggagtttcaatac

SEQ ID NO: 184034 - DNA, 25 bp, Artificial
  Probe
tggtgttgccgcgccatctgccacc

SEQ ID NO: 184035 - DNA, 25 bp, Artificial
  Probe
tggcccgcgctggagtttcaatacc

SEQ ID NO: 184036 - DNA, 25 bp, Artificial
  Probe
gccagctatcaactcgcgccctgga

SEQ ID NO: 184037 - DNA, 25 bp, Artificial
  Probe
cgctggagtttcaataccggagatc

SEQ ID NO: 184038 - DNA, 25 bp, Artificial
  Probe
cagctatcaactcgcgccctggaag

SEQ ID NO: 184039 - DNA, 25 bp, Artificial
  Probe
ctggagtttcaataccggagatcat

SEQ ID NO: 184040 - DNA, 25 bp, Artificial
  Probe
gatttttgaagcaactcatcgattg

SEQ ID NO: 184041 - DNA, 25 bp, Artificial
  Probe
agtttcaataccggagatcatgcaa

SEQ ID NO: 184042 - DNA, 25 bp, Artificial
  Probe
tttttgaagcaactcatcgattgat

SEQ ID NO: 184043 - DNA, 25 bp, Artificial
  Probe
tttcaataccggagatcatgcaagc

SEQ ID NO: 184044 - DNA, 25 bp, Artificial
  Probe
ttttgaagcaactcatcgattgatt

SEQ ID NO: 184045 - DNA, 25 bp, Artificial
  Probe
ttcaataccggagatcatgcaagct

SEQ ID NO: 184046 - DNA, 25 bp, Artificial
  Probe
tttgaagcaactcatcgattgattt

SEQ ID NO: 184047 - DNA, 25 bp, Artificial
  Probe
tcaataccggagatcatgcaagctg

SEQ ID NO: 184048 - DNA, 25 bp, Artificial
  Probe
agcaactcatcgattgatttacggc

SEQ ID NO: 184049 - DNA, 25 bp, Artificial
  Probe
aataccggagatcatgcaagctggt

SEQ ID NO: 184050 - DNA, 25 bp, Artificial
  Probe
gcaactcatcgattgatttacggcg

SEQ ID NO: 184051 - DNA, 25 bp, Artificial
  Probe
ccggagatcatgcaagctggtggct

SEQ ID NO: 184052 - DNA, 25 bp, Artificial
  Probe
aactcatcgattgatttacggcgct

SEQ ID NO: 184053 - DNA, 25 bp, Artificial
  Probe
cggagatcatgcaagctggtggctg

SEQ ID NO: 184054 - DNA, 25 bp, Artificial
  Probe
ctcatcgattgatttacggcgctaa

SEQ ID NO: 184055 - DNA, 25 bp, Artificial
  Probe
agatcatgcaagctggtggctggac

SEQ ID NO: 184056 - DNA, 25 bp, Artificial
  Probe
catcgattgatttacggcgctaagg

SEQ ID NO: 184057 - DNA, 25 bp, Artificial
  Probe
atcatgcaagctggtggctggacca

SEQ ID NO: 184058 - DNA, 25 bp, Artificial
  Probe
tcgattgatttacggcgctaaggat

SEQ ID NO: 184059 - DNA, 25 bp, Artificial
  Probe
atgcaagctggtggctggaccaatg

SEQ ID NO: 184060 - DNA, 25 bp, Artificial
  Probe
gattgatttacggcgctaaggatga

SEQ ID NO: 184061 - DNA, 25 bp, Artificial
  Probe
tgcaagctggtggctggaccaatgt

SEQ ID NO: 184062 - DNA, 25 bp, Artificial
  Probe
ttgatttacggcgctaaggatgact

SEQ ID NO: 184063 - DNA, 25 bp, Artificial
  Probe
caagctggtggctggaccaatgtaa

SEQ ID NO: 184064 - DNA, 25 bp, Artificial
  Probe
gatttacggcgctaaggatgactct

SEQ ID NO: 184065 - DNA, 25 bp, Artificial
  Probe
agctggtggctggaccaatgtaaat

SEQ ID NO: 184066 - DNA, 25 bp, Artificial
  Probe
tttacggcgctaaggatgactctgg

SEQ ID NO: 184067 - DNA, 25 bp, Artificial
  Probe
aatattgtcatgaactatatccgta

SEQ ID NO: 184068 - DNA, 25 bp, Artificial
  Probe
tacggcgctaaggatgactctggtc

SEQ ID NO: 184069 - DNA, 25 bp, Artificial
  Probe
tattgtcatgaactatatccgtaac

SEQ ID NO: 184070 - DNA, 25 bp, Artificial
  Probe
cggcgctaaggatgactctggtcag

SEQ ID NO: 184071 - DNA, 25 bp, Artificial
  Probe
ttgtcatgaactatatccgtaacct

SEQ ID NO: 184072 - DNA, 25 bp, Artificial
  Probe
gcgctaaggatgactctggtcagag

SEQ ID NO: 184073 - DNA, 25 bp, Artificial
  Probe
gtcatgaactatatccgtaacctgg

SEQ ID NO: 184074 - DNA, 25 bp, Artificial
  Probe
agaatgttaatccatattggcagaa

SEQ ID NO: 184075 - DNA, 25 bp, Artificial
  Probe
gctaaggatgactctggtcagagat

SEQ ID NO: 184076 - DNA, 25 bp, Artificial
  Probe
catgaactatatccgtaacctggat

SEQ ID NO: 184077 - DNA, 25 bp, Artificial
  Probe
gaatgttaatccatattggcagaac

SEQ ID NO: 184078 - DNA, 25 bp, Artificial
  Probe
taaggatgactctggtcagagatac

SEQ ID NO: 184079 - DNA, 25 bp, Artificial
  Probe
tgaactatatccgtaacctggatag

SEQ ID NO: 184080 - DNA, 25 bp, Artificial
  Probe
gttaatccatattggcagaacgaaa

SEQ ID NO: 184081 - DNA, 25 bp, Artificial
  Probe
tgactctggtcagagatacctggcc

SEQ ID NO: 184082 - DNA, 25 bp, Artificial
  Probe
actatatccgtaacctggatagtga

SEQ ID NO: 184083 - DNA, 25 bp, Artificial
  Probe
taatccatattggcagaacgaaaac

SEQ ID NO: 184084 - DNA, 25 bp, Artificial
  Probe
actctggtcagagatacctggcctg

SEQ ID NO: 184085 - DNA, 25 bp, Artificial
  Probe
ctatatccgtaacctggatagtgaa

SEQ ID NO: 184086 - DNA, 25 bp, Artificial
  Probe
atccatattggcagaacgaaaacgc

SEQ ID NO: 184087 - DNA, 25 bp, Artificial
  Probe
tctggtcagagatacctggcctggt

SEQ ID NO: 184088 - DNA, 25 bp, Artificial
  Probe
gaaacaggggcaatggtgcgcctgc

SEQ ID NO: 184089 - DNA, 25 bp, Artificial
  Probe
aacgctggttagcaccgcaggtgta

SEQ ID NO: 184090 - DNA, 25 bp, Artificial
  Probe
ctggtcagagatacctggcctggtc

SEQ ID NO: 184091 - DNA, 25 bp, Artificial
  Probe
aacaggggcaatggtgcgcctgctg

SEQ ID NO: 184092 - DNA, 25 bp, Artificial
  Probe
cgctggttagcaccgcaggtgtaga

SEQ ID NO: 184093 - DNA, 25 bp, Artificial
  Probe
gtcagagatacctggcctggtctgg

SEQ ID NO: 184094 - DNA, 25 bp, Artificial
  Probe
ggcaatggtgcgcctgctggaagat

SEQ ID NO: 184095 - DNA, 25 bp, Artificial
  Probe
tggttagcaccgcaggtgtagagaa

SEQ ID NO: 184096 - DNA, 25 bp, Artificial
  Probe
cagagatacctggcctggtctggac

SEQ ID NO: 184097 - DNA, 25 bp, Artificial
  Probe
caatggtgcgcctgctggaagatgc

SEQ ID NO: 184098 - DNA, 25 bp, Artificial
  Probe
ggttagcaccgcaggtgtagagaag

SEQ ID NO: 184099 - DNA, 25 bp, Artificial
  Probe
gagatacctggcctggtctggacac

SEQ ID NO: 184100 - DNA, 25 bp, Artificial
  Probe
atggtgcgcctgctggaagatgccg

SEQ ID NO: 184101 - DNA, 25 bp, Artificial
  Probe
ttagcaccgcaggtgtagagaaggc

SEQ ID NO: 184102 - DNA, 25 bp, Artificial
  Probe
gatacctggcctggtctggacacag

SEQ ID NO: 184103 - DNA, 25 bp, Artificial
  Probe
ggtgcgcctgctggaagatgccgat

SEQ ID NO: 184104 - DNA, 25 bp, Artificial
  Probe
caccgcaggtgtagagaaggcactt

SEQ ID NO: 184105 - DNA, 25 bp, Artificial
  Probe
atacctggcctggtctggacacagt

SEQ ID NO: 184106 - DNA, 25 bp, Artificial
  Probe
tgcgcctgctggaagatgccgatta

SEQ ID NO: 184107 - DNA, 25 bp, Artificial
  Probe
gtaactaaactggtcgagcgatgga

SEQ ID NO: 184108 - DNA, 25 bp, Artificial
  Probe
gcctggtctggacacagtgcccgtg

SEQ ID NO: 184109 - DNA, 25 bp, Artificial
  Probe
gcgcctgctggaagatgccgattag

SEQ ID NO: 184110 - DNA, 25 bp, Artificial
  Probe
ctaaactggtcgagcgatggatttc

SEQ ID NO: 184111 - DNA, 25 bp, Artificial
  Probe
ctggtctggacacagtgcccgtgtc

SEQ ID NO: 184112 - DNA, 25 bp, Artificial
  Probe
tggtcgagcgatggatttccgtctc

SEQ ID NO: 184113 - DNA, 25 bp, Artificial
  Probe
ggtctggacacagtgcccgtgtcgg

SEQ ID NO: 184114 - DNA, 25 bp, Artificial
  Probe
gtcgagcgatggatttccgtctctg

SEQ ID NO: 184115 - DNA, 25 bp, Artificial
  Probe
tctggacacagtgcccgtgtcggag

SEQ ID NO: 184116 - DNA, 25 bp, Artificial
  Probe
cgagcgatggatttccgtctctggt

SEQ ID NO: 184117 - DNA, 25 bp, Artificial
  Probe
tggacacagtgcccgtgtcggagcc

SEQ ID NO: 184118 - DNA, 25 bp, Artificial
  Probe
agcgatggatttccgtctctggtgt

SEQ ID NO: 184119 - DNA, 25 bp, Artificial
  Probe
gacacagtgcccgtgtcggagccgc

SEQ ID NO: 184120 - DNA, 25 bp, Artificial
  Probe
atggatttccgtctctggtgtagct

SEQ ID NO: 184121 - DNA, 25 bp, Artificial
  Probe
cacagtgcccgtgtcggagccgcgc

SEQ ID NO: 184122 - DNA, 25 bp, Artificial
  Probe
tggatttccgtctctggtgtagctg

SEQ ID NO: 184123 - DNA, 25 bp, Artificial
  Probe
acagtgcccgtgtcggagccgcgcg

SEQ ID NO: 184124 - DNA, 25 bp, Artificial
  Probe
ggatttccgtctctggtgtagctga

SEQ ID NO: 184125 - DNA, 25 bp, Artificial
  Probe
ccgtgtcggagccgcgcgagatatg

SEQ ID NO: 184126 - DNA, 25 bp, Artificial
  Probe
atttccgtctctggtgtagctgatg

SEQ ID NO: 184127 - DNA, 25 bp, Artificial
  Probe
gtcggagccgcgcgagatatggccc

SEQ ID NO: 184128 - DNA, 25 bp, Artificial
  Probe
ttccgtctctggtgtagctgatgat

SEQ ID NO: 184129 - DNA, 25 bp, Artificial
  Probe
cggagccgcgcgagatatggcccgc

SEQ ID NO: 184130 - DNA, 25 bp, Artificial
  Probe
cgtctctggtgtagctgatgatccg

SEQ ID NO: 184131 - DNA, 25 bp, Artificial
  Probe
gagccgcgcgagatatggcccgcgc

SEQ ID NO: 184132 - DNA, 25 bp, Artificial
  Probe
gtctctggtgtagctgatgatccga

SEQ ID NO: 184133 - DNA, 25 bp, Artificial
  Probe
cgcgcgagatatggcccgcgctgga

SEQ ID NO: 184134 - DNA, 25 bp, Artificial
  Probe
ctctggtgtagctgatgatccgaat

SEQ ID NO: 184135 - DNA, 25 bp, Artificial
  Probe
cgcgagatatggcccgcgctggagt

SEQ ID NO: 184136 - DNA, 25 bp, Artificial
  Probe
tgtagctgatgatccgaataactac

SEQ ID NO: 184137 - DNA, 25 bp, Artificial
  Probe
cgagatatggcccgcgctggagttt

SEQ ID NO: 184138 - DNA, 25 bp, Artificial
  Probe
gctgatgatccgaataactacctgt

SEQ ID NO: 184139 - DNA, 25 bp, Artificial
  Probe
agatatggcccgcgctggagtttca

SEQ ID NO: 184140 - DNA, 25 bp, Artificial
  Probe
tgatgatccgaataactacctgttt

SEQ ID NO: 184141 - DNA, 25 bp, Artificial
  Probe
atatggcccgcgctggagtttcaat

SEQ ID NO: 184142 - DNA, 25 bp, Artificial
  Probe
aatggtgttgccgcgccatctgcca

SEQ ID NO: 184143 - DNA, 25 bp, Artificial
  Probe
atggcccgcgctggagtttcaatac

SEQ ID NO: 184144 - DNA, 25 bp, Artificial
  Probe
tggtgttgccgcgccatctgccacc

SEQ ID NO: 184145 - DNA, 25 bp, Artificial
  Probe
tggcccgcgctggagtttcaatacc

SEQ ID NO: 184146 - DNA, 25 bp, Artificial
  Probe
gccagctatcaactcgcgccctgga

SEQ ID NO: 184147 - DNA, 25 bp, Artificial
  Probe
cgctggagtttcaataccggagatc

SEQ ID NO: 184148 - DNA, 25 bp, Artificial
  Probe
cagctatcaactcgcgccctggaag

SEQ ID NO: 184149 - DNA, 25 bp, Artificial
  Probe
ctggagtttcaataccggagatcat

SEQ ID NO: 184150 - DNA, 25 bp, Artificial
  Probe
gatttttgaagcaactcatcgattg

SEQ ID NO: 184151 - DNA, 25 bp, Artificial
  Probe
agtttcaataccggagatcatgcaa

SEQ ID NO: 184152 - DNA, 25 bp, Artificial
  Probe
tttttgaagcaactcatcgattgat

SEQ ID NO: 184153 - DNA, 25 bp, Artificial
  Probe
tttcaataccggagatcatgcaagc

SEQ ID NO: 184154 - DNA, 25 bp, Artificial
  Probe
ttttgaagcaactcatcgattgatt

SEQ ID NO: 184155 - DNA, 25 bp, Artificial
  Probe
ttcaataccggagatcatgcaagct

SEQ ID NO: 184156 - DNA, 25 bp, Artificial
  Probe
tttgaagcaactcatcgattgattt

SEQ ID NO: 184157 - DNA, 25 bp, Artificial
  Probe
tcaataccggagatcatgcaagctg

SEQ ID NO: 184158 - DNA, 25 bp, Artificial
  Probe
agcaactcatcgattgatttacggc

SEQ ID NO: 184159 - DNA, 25 bp, Artificial
  Probe
aataccggagatcatgcaagctggt

SEQ ID NO: 184160 - DNA, 25 bp, Artificial
  Probe
gcaactcatcgattgatttacggcg

SEQ ID NO: 184161 - DNA, 25 bp, Artificial
  Probe
ccggagatcatgcaagctggtggct

SEQ ID NO: 184162 - DNA, 25 bp, Artificial
  Probe
aactcatcgattgatttacggcgct

SEQ ID NO: 184163 - DNA, 25 bp, Artificial
  Probe
cggagatcatgcaagctggtggctg

SEQ ID NO: 184164 - DNA, 25 bp, Artificial
  Probe
ctcatcgattgatttacggcgctaa

SEQ ID NO: 184165 - DNA, 25 bp, Artificial
  Probe
agatcatgcaagctggtggctggac

SEQ ID NO: 184166 - DNA, 25 bp, Artificial
  Probe
catcgattgatttacggcgctaagg

SEQ ID NO: 184167 - DNA, 25 bp, Artificial
  Probe
atcatgcaagctggtggctggacca

SEQ ID NO: 184168 - DNA, 25 bp, Artificial
  Probe
tcgattgatttacggcgctaaggat

SEQ ID NO: 184169 - DNA, 25 bp, Artificial
  Probe
atgcaagctggtggctggaccaatg

SEQ ID NO: 184170 - DNA, 25 bp, Artificial
  Probe
gattgatttacggcgctaaggatga

SEQ ID NO: 184171 - DNA, 25 bp, Artificial
  Probe
tgcaagctggtggctggaccaatgt

SEQ ID NO: 184172 - DNA, 25 bp, Artificial
  Probe
ttgatttacggcgctaaggatgact

SEQ ID NO: 184173 - DNA, 25 bp, Artificial
  Probe
caagctggtggctggaccaatgtaa

SEQ ID NO: 184174 - DNA, 25 bp, Artificial
  Probe
gatttacggcgctaaggatgactct

SEQ ID NO: 184175 - DNA, 25 bp, Artificial
  Probe
agctggtggctggaccaatgtaaat

SEQ ID NO: 184176 - DNA, 25 bp, Artificial
  Probe
tttacggcgctaaggatgactctgg

SEQ ID NO: 184177 - DNA, 25 bp, Artificial
  Probe
aatattgtcatgaactatatccgta

SEQ ID NO: 184178 - DNA, 25 bp, Artificial
  Probe
tacggcgctaaggatgactctggtc

SEQ ID NO: 184179 - DNA, 25 bp, Artificial
  Probe
tattgtcatgaactatatccgtaac

SEQ ID NO: 184180 - DNA, 25 bp, Artificial
  Probe
cggcgctaaggatgactctggtcag

SEQ ID NO: 184181 - DNA, 25 bp, Artificial
  Probe
ttgtcatgaactatatccgtaacct

SEQ ID NO: 184182 - DNA, 25 bp, Artificial
  Probe
gcgctaaggatgactctggtcagag

SEQ ID NO: 184183 - DNA, 25 bp, Artificial
  Probe
gtcatgaactatatccgtaacctgg

SEQ ID NO: 184184 - DNA, 25 bp, Artificial
  Probe
agaatgttaatccatattggcagaa

SEQ ID NO: 184185 - DNA, 25 bp, Artificial
  Probe
gctaaggatgactctggtcagagat

SEQ ID NO: 184186 - DNA, 25 bp, Artificial
  Probe
catgaactatatccgtaacctggat

SEQ ID NO: 184187 - DNA, 25 bp, Artificial
  Probe
gaatgttaatccatattggcagaac

SEQ ID NO: 184188 - DNA, 25 bp, Artificial
  Probe
taaggatgactctggtcagagatac

SEQ ID NO: 184189 - DNA, 25 bp, Artificial
  Probe
tgaactatatccgtaacctggatag

SEQ ID NO: 184190 - DNA, 25 bp, Artificial
  Probe
gttaatccatattggcagaacgaaa

SEQ ID NO: 184191 - DNA, 25 bp, Artificial
  Probe
tgactctggtcagagatacctggcc

SEQ ID NO: 184192 - DNA, 25 bp, Artificial
  Probe
actatatccgtaacctggatagtga

SEQ ID NO: 184193 - DNA, 25 bp, Artificial
  Probe
taatccatattggcagaacgaaaac

SEQ ID NO: 184194 - DNA, 25 bp, Artificial
  Probe
actctggtcagagatacctggcctg

SEQ ID NO: 184195 - DNA, 25 bp, Artificial
  Probe
ctatatccgtaacctggatagtgaa

SEQ ID NO: 184196 - DNA, 25 bp, Artificial
  Probe
atccatattggcagaacgaaaacgc

SEQ ID NO: 184197 - DNA, 25 bp, Artificial
  Probe
tctggtcagagatacctggcctggt

SEQ ID NO: 184198 - DNA, 25 bp, Artificial
  Probe
gaaacaggggcaatggtgcgcctgc

SEQ ID NO: 184199 - DNA, 25 bp, Artificial
  Probe
aacgctggttagcaccgcaggtgta

SEQ ID NO: 184200 - DNA, 25 bp, Artificial
  Probe
ctggtcagagatacctggcctggtc

SEQ ID NO: 184201 - DNA, 25 bp, Artificial
  Probe
aacaggggcaatggtgcgcctgctg

SEQ ID NO: 184202 - DNA, 25 bp, Artificial
  Probe
cgctggttagcaccgcaggtgtaga

SEQ ID NO: 184203 - DNA, 25 bp, Artificial
  Probe
gtcagagatacctggcctggtctgg

SEQ ID NO: 184204 - DNA, 25 bp, Artificial
  Probe
ggcaatggtgcgcctgctggaagat

SEQ ID NO: 184205 - DNA, 25 bp, Artificial
  Probe
tggttagcaccgcaggtgtagagaa

SEQ ID NO: 184206 - DNA, 25 bp, Artificial
  Probe
cagagatacctggcctggtctggac

SEQ ID NO: 184207 - DNA, 25 bp, Artificial
  Probe
caatggtgcgcctgctggaagatgc

SEQ ID NO: 184208 - DNA, 25 bp, Artificial
  Probe
ggttagcaccgcaggtgtagagaag

SEQ ID NO: 184209 - DNA, 25 bp, Artificial
  Probe
gagatacctggcctggtctggacac

SEQ ID NO: 184210 - DNA, 25 bp, Artificial
  Probe
atggtgcgcctgctggaagatgccg

SEQ ID NO: 184211 - DNA, 25 bp, Artificial
  Probe
ttagcaccgcaggtgtagagaaggc

SEQ ID NO: 184212 - DNA, 25 bp, Artificial
  Probe
gatacctggcctggtctggacacag

SEQ ID NO: 184213 - DNA, 25 bp, Artificial
  Probe
ggtgcgcctgctggaagatgccgat

SEQ ID NO: 184214 - DNA, 25 bp, Artificial
  Probe
caccgcaggtgtagagaaggcactt

SEQ ID NO: 184215 - DNA, 25 bp, Artificial
  Probe
atacctggcctggtctggacacagt

SEQ ID NO: 184216 - DNA, 25 bp, Artificial
  Probe
tgcgcctgctggaagatgccgatta

SEQ ID NO: 184217 - DNA, 25 bp, Artificial
  Probe
gtaactaaactggtcgagcgatgga

SEQ ID NO: 184218 - DNA, 25 bp, Artificial
  Probe
gcctggtctggacacagtgcccgtg

SEQ ID NO: 184219 - DNA, 25 bp, Artificial
  Probe
gcgcctgctggaagatgccgattag

SEQ ID NO: 184220 - DNA, 25 bp, Artificial
  Probe
ctaaactggtcgagcgatggatttc

SEQ ID NO: 184221 - DNA, 25 bp, Artificial
  Probe
ctggtctggacacagtgcccgtgtc

SEQ ID NO: 184222 - DNA, 25 bp, Artificial
  Probe
tggtcgagcgatggatttccgtctc

SEQ ID NO: 184223 - DNA, 25 bp, Artificial
  Probe
ggtctggacacagtgcccgtgtcgg

SEQ ID NO: 184224 - DNA, 25 bp, Artificial
  Probe
gtcgagcgatggatttccgtctctg

SEQ ID NO: 184225 - DNA, 25 bp, Artificial
  Probe
tctggacacagtgcccgtgtcggag

SEQ ID NO: 184226 - DNA, 25 bp, Artificial
  Probe
cgagcgatggatttccgtctctggt

SEQ ID NO: 184227 - DNA, 25 bp, Artificial
  Probe
tggacacagtgcccgtgtcggagcc

SEQ ID NO: 184228 - DNA, 25 bp, Artificial
  Probe
agcgatggatttccgtctctggtgt

SEQ ID NO: 184229 - DNA, 25 bp, Artificial
  Probe
gacacagtgcccgtgtcggagccgc

SEQ ID NO: 184230 - DNA, 25 bp, Artificial
  Probe
atggatttccgtctctggtgtagct

SEQ ID NO: 184231 - DNA, 25 bp, Artificial
  Probe
cacagtgcccgtgtcggagccgcgc

SEQ ID NO: 184232 - DNA, 25 bp, Artificial
  Probe
tggatttccgtctctggtgtagctg

SEQ ID NO: 184233 - DNA, 25 bp, Artificial
  Probe
acagtgcccgtgtcggagccgcgcg

SEQ ID NO: 184234 - DNA, 25 bp, Artificial
  Probe
ggatttccgtctctggtgtagctga

SEQ ID NO: 184235 - DNA, 25 bp, Artificial
  Probe
ccgtgtcggagccgcgcgagatatg

SEQ ID NO: 184236 - DNA, 25 bp, Artificial
  Probe
atttccgtctctggtgtagctgatg

SEQ ID NO: 184237 - DNA, 25 bp, Artificial
  Probe
gtcggagccgcgcgagatatggccc

SEQ ID NO: 184238 - DNA, 25 bp, Artificial
  Probe
ttccgtctctggtgtagctgatgat

SEQ ID NO: 184239 - DNA, 25 bp, Artificial
  Probe
cggagccgcgcgagatatggcccgc

SEQ ID NO: 184240 - DNA, 25 bp, Artificial
  Probe
cgtctctggtgtagctgatgatccg

SEQ ID NO: 184241 - DNA, 25 bp, Artificial
  Probe
gagccgcgcgagatatggcccgcgc

SEQ ID NO: 184242 - DNA, 25 bp, Artificial
  Probe
gtctctggtgtagctgatgatccga

SEQ ID NO: 184243 - DNA, 25 bp, Artificial
  Probe
cgcgcgagatatggcccgcgctgga

SEQ ID NO: 184244 - DNA, 25 bp, Artificial
  Probe
ctctggtgtagctgatgatccgaat

SEQ ID NO: 184245 - DNA, 25 bp, Artificial
  Probe
cgcgagatatggcccgcgctggagt

SEQ ID NO: 184246 - DNA, 25 bp, Artificial
  Probe
tgtagctgatgatccgaataactac

SEQ ID NO: 184247 - DNA, 25 bp, Artificial
  Probe
cgagatatggcccgcgctggagttt

SEQ ID NO: 184248 - DNA, 25 bp, Artificial
  Probe
gctgatgatccgaataactacctgt

SEQ ID NO: 184249 - DNA, 25 bp, Artificial
  Probe
agatatggcccgcgctggagtttca

SEQ ID NO: 184250 - DNA, 25 bp, Artificial
  Probe
tgatgatccgaataactacctgttt

SEQ ID NO: 184251 - DNA, 25 bp, Artificial
  Probe
atatggcccgcgctggagtttcaat

SEQ ID NO: 184252 - DNA, 25 bp, Artificial
  Probe
aatggtgttgccgcgccatctgcca

SEQ ID NO: 184253 - DNA, 25 bp, Artificial
  Probe
atggcccgcgctggagtttcaatac

SEQ ID NO: 184254 - DNA, 25 bp, Artificial
  Probe
tggtgttgccgcgccatctgccacc

SEQ ID NO: 184255 - DNA, 25 bp, Artificial
  Probe
tggcccgcgctggagtttcaatacc

SEQ ID NO: 184256 - DNA, 25 bp, Artificial
  Probe
gccagctatcaactcgcgccctgga

SEQ ID NO: 184257 - DNA, 25 bp, Artificial
  Probe
cgctggagtttcaataccggagatc

SEQ ID NO: 184258 - DNA, 25 bp, Artificial
  Probe
cagctatcaactcgcgccctggaag

SEQ ID NO: 184259 - DNA, 25 bp, Artificial
  Probe
ctggagtttcaataccggagatcat

SEQ ID NO: 184260 - DNA, 25 bp, Artificial
  Probe
gatttttgaagcaactcatcgattg

SEQ ID NO: 184261 - DNA, 25 bp, Artificial
  Probe
agtttcaataccggagatcatgcaa

SEQ ID NO: 184262 - DNA, 25 bp, Artificial
  Probe
tttttgaagcaactcatcgattgat

SEQ ID NO: 184263 - DNA, 25 bp, Artificial
  Probe
tttcaataccggagatcatgcaagc

SEQ ID NO: 184264 - DNA, 25 bp, Artificial
  Probe
ttttgaagcaactcatcgattgatt

SEQ ID NO: 184265 - DNA, 25 bp, Artificial
  Probe
ttcaataccggagatcatgcaagct

SEQ ID NO: 184266 - DNA, 25 bp, Artificial
  Probe
tttgaagcaactcatcgattgattt

SEQ ID NO: 184267 - DNA, 25 bp, Artificial
  Probe
tcaataccggagatcatgcaagctg

SEQ ID NO: 184268 - DNA, 25 bp, Artificial
  Probe
agcaactcatcgattgatttacggc

SEQ ID NO: 184269 - DNA, 25 bp, Artificial
  Probe
aataccggagatcatgcaagctggt

SEQ ID NO: 184270 - DNA, 25 bp, Artificial
  Probe
gcaactcatcgattgatttacggcg

SEQ ID NO: 184271 - DNA, 25 bp, Artificial
  Probe
ccggagatcatgcaagctggtggct

SEQ ID NO: 184272 - DNA, 25 bp, Artificial
  Probe
aactcatcgattgatttacggcgct

SEQ ID NO: 184273 - DNA, 25 bp, Artificial
  Probe
cggagatcatgcaagctggtggctg

SEQ ID NO: 184274 - DNA, 25 bp, Artificial
  Probe
ctcatcgattgatttacggcgctaa

SEQ ID NO: 184275 - DNA, 25 bp, Artificial
  Probe
agatcatgcaagctggtggctggac

SEQ ID NO: 184276 - DNA, 25 bp, Artificial
  Probe
catcgattgatttacggcgctaagg

SEQ ID NO: 184277 - DNA, 25 bp, Artificial
  Probe
atcatgcaagctggtggctggacca

SEQ ID NO: 184278 - DNA, 25 bp, Artificial
  Probe
tcgattgatttacggcgctaaggat

SEQ ID NO: 184279 - DNA, 25 bp, Artificial
  Probe
atgcaagctggtggctggaccaatg

SEQ ID NO: 184280 - DNA, 25 bp, Artificial
  Probe
gattgatttacggcgctaaggatga

SEQ ID NO: 184281 - DNA, 25 bp, Artificial
  Probe
tgcaagctggtggctggaccaatgt

SEQ ID NO: 184282 - DNA, 25 bp, Artificial
  Probe
ttgatttacggcgctaaggatgact

SEQ ID NO: 184283 - DNA, 25 bp, Artificial
  Probe
caagctggtggctggaccaatgtaa

SEQ ID NO: 184284 - DNA, 25 bp, Artificial
  Probe
gatttacggcgctaaggatgactct

SEQ ID NO: 184285 - DNA, 25 bp, Artificial
  Probe
agctggtggctggaccaatgtaaat

SEQ ID NO: 184286 - DNA, 25 bp, Artificial
  Probe
tttacggcgctaaggatgactctgg

SEQ ID NO: 184287 - DNA, 25 bp, Artificial
  Probe
aatattgtcatgaactatatccgta

SEQ ID NO: 184288 - DNA, 25 bp, Artificial
  Probe
tacggcgctaaggatgactctggtc

SEQ ID NO: 184289 - DNA, 25 bp, Artificial
  Probe
tattgtcatgaactatatccgtaac

SEQ ID NO: 184290 - DNA, 25 bp, Artificial
  Probe
cggcgctaaggatgactctggtcag

SEQ ID NO: 184291 - DNA, 25 bp, Artificial
  Probe
ttgtcatgaactatatccgtaacct

SEQ ID NO: 184292 - DNA, 25 bp, Artificial
  Probe
gcgctaaggatgactctggtcagag

SEQ ID NO: 184293 - DNA, 25 bp, Artificial
  Probe
gtcatgaactatatccgtaacctgg

SEQ ID NO: 184294 - DNA, 25 bp, Artificial
  Probe
agaatgttaatccatattggcagaa

SEQ ID NO: 184295 - DNA, 25 bp, Artificial
  Probe
gctaaggatgactctggtcagagat

SEQ ID NO: 184296 - DNA, 25 bp, Artificial
  Probe
catgaactatatccgtaacctggat

SEQ ID NO: 184297 - DNA, 25 bp, Artificial
  Probe
gaatgttaatccatattggcagaac

SEQ ID NO: 184298 - DNA, 25 bp, Artificial
  Probe
taaggatgactctggtcagagatac

SEQ ID NO: 184299 - DNA, 25 bp, Artificial
  Probe
tgaactatatccgtaacctggatag

SEQ ID NO: 184300 - DNA, 25 bp, Artificial
  Probe
gttaatccatattggcagaacgaaa

SEQ ID NO: 184301 - DNA, 25 bp, Artificial
  Probe
tgactctggtcagagatacctggcc

SEQ ID NO: 184302 - DNA, 25 bp, Artificial
  Probe
actatatccgtaacctggatagtga

SEQ ID NO: 184303 - DNA, 25 bp, Artificial
  Probe
taatccatattggcagaacgaaaac

SEQ ID NO: 184304 - DNA, 25 bp, Artificial
  Probe
actctggtcagagatacctggcctg

SEQ ID NO: 184305 - DNA, 25 bp, Artificial
  Probe
ctatatccgtaacctggatagtgaa

SEQ ID NO: 184306 - DNA, 25 bp, Artificial
  Probe
atccatattggcagaacgaaaacgc

SEQ ID NO: 184307 - DNA, 25 bp, Artificial
  Probe
tctggtcagagatacctggcctggt

SEQ ID NO: 184308 - DNA, 25 bp, Artificial
  Probe
gaaacaggggcaatggtgcgcctgc

SEQ ID NO: 184309 - DNA, 25 bp, Artificial
  Probe
aacgctggttagcaccgcaggtgta

SEQ ID NO: 184310 - DNA, 25 bp, Artificial
  Probe
ctggtcagagatacctggcctggtc

SEQ ID NO: 184311 - DNA, 25 bp, Artificial
  Probe
aacaggggcaatggtgcgcctgctg

SEQ ID NO: 184312 - DNA, 25 bp, Artificial
  Probe
cgctggttagcaccgcaggtgtaga

SEQ ID NO: 184313 - DNA, 25 bp, Artificial
  Probe
gtcagagatacctggcctggtctgg

SEQ ID NO: 184314 - DNA, 25 bp, Artificial
  Probe
ggcaatggtgcgcctgctggaagat

SEQ ID NO: 184315 - DNA, 25 bp, Artificial
  Probe
tggttagcaccgcaggtgtagagaa

SEQ ID NO: 184316 - DNA, 25 bp, Artificial
  Probe
cagagatacctggcctggtctggac

SEQ ID NO: 184317 - DNA, 25 bp, Artificial
  Probe
caatggtgcgcctgctggaagatgc

SEQ ID NO: 184318 - DNA, 25 bp, Artificial
  Probe
ggttagcaccgcaggtgtagagaag

SEQ ID NO: 184319 - DNA, 25 bp, Artificial
  Probe
gagatacctggcctggtctggacac

SEQ ID NO: 184320 - DNA, 25 bp, Artificial
  Probe
atggtgcgcctgctggaagatgccg

SEQ ID NO: 184321 - DNA, 25 bp, Artificial
  Probe
ttagcaccgcaggtgtagagaaggc

SEQ ID NO: 184322 - DNA, 25 bp, Artificial
  Probe
gatacctggcctggtctggacacag

SEQ ID NO: 184323 - DNA, 25 bp, Artificial
  Probe
ggtgcgcctgctggaagatgccgat

SEQ ID NO: 184324 - DNA, 25 bp, Artificial
  Probe
caccgcaggtgtagagaaggcactt

SEQ ID NO: 184325 - DNA, 25 bp, Artificial
  Probe
atacctggcctggtctggacacagt

SEQ ID NO: 184326 - DNA, 25 bp, Artificial
  Probe
tgcgcctgctggaagatgccgatta

SEQ ID NO: 184327 - DNA, 25 bp, Artificial
  Probe
gtaactaaactggtcgagcgatgga

SEQ ID NO: 184328 - DNA, 25 bp, Artificial
  Probe
gcctggtctggacacagtgcccgtg

SEQ ID NO: 184329 - DNA, 25 bp, Artificial
  Probe
gcgcctgctggaagatgccgattag

SEQ ID NO: 184330 - DNA, 25 bp, Artificial
  Probe
ctaaactggtcgagcgatggatttc

SEQ ID NO: 184331 - DNA, 25 bp, Artificial
  Probe
ctggtctggacacagtgcccgtgtc

SEQ ID NO: 184332 - DNA, 25 bp, Artificial
  Probe
tggtcgagcgatggatttccgtctc

SEQ ID NO: 184333 - DNA, 25 bp, Artificial
  Probe
ggtctggacacagtgcccgtgtcgg

SEQ ID NO: 184334 - DNA, 25 bp, Artificial
  Probe
gtcgagcgatggatttccgtctctg

SEQ ID NO: 184335 - DNA, 25 bp, Artificial
  Probe
tctggacacagtgcccgtgtcggag

SEQ ID NO: 184336 - DNA, 25 bp, Artificial
  Probe
cgagcgatggatttccgtctctggt

SEQ ID NO: 184337 - DNA, 25 bp, Artificial
  Probe
tggacacagtgcccgtgtcggagcc

SEQ ID NO: 184338 - DNA, 25 bp, Artificial
  Probe
agcgatggatttccgtctctggtgt

SEQ ID NO: 184339 - DNA, 25 bp, Artificial
  Probe
gacacagtgcccgtgtcggagccgc

SEQ ID NO: 184340 - DNA, 25 bp, Artificial
  Probe
atggatttccgtctctggtgtagct

SEQ ID NO: 184341 - DNA, 25 bp, Artificial
  Probe
cacagtgcccgtgtcggagccgcgc

SEQ ID NO: 184342 - DNA, 25 bp, Artificial
  Probe
tggatttccgtctctggtgtagctg

SEQ ID NO: 184343 - DNA, 25 bp, Artificial
  Probe
acagtgcccgtgtcggagccgcgcg

SEQ ID NO: 184344 - DNA, 25 bp, Artificial
  Probe
ggatttccgtctctggtgtagctga

SEQ ID NO: 184345 - DNA, 25 bp, Artificial
  Probe
ccgtgtcggagccgcgcgagatatg

SEQ ID NO: 184346 - DNA, 25 bp, Artificial
  Probe
atttccgtctctggtgtagctgatg

SEQ ID NO: 184347 - DNA, 25 bp, Artificial
  Probe
gtcggagccgcgcgagatatggccc

SEQ ID NO: 184348 - DNA, 25 bp, Artificial
  Probe
ttccgtctctggtgtagctgatgat

SEQ ID NO: 184349 - DNA, 25 bp, Artificial
  Probe
cggagccgcgcgagatatggcccgc

SEQ ID NO: 184350 - DNA, 25 bp, Artificial
  Probe
cgtctctggtgtagctgatgatccg

SEQ ID NO: 184351 - DNA, 25 bp, Artificial
  Probe
gagccgcgcgagatatggcccgcgc

SEQ ID NO: 184352 - DNA, 25 bp, Artificial
  Probe
gtctctggtgtagctgatgatccga

SEQ ID NO: 184353 - DNA, 25 bp, Artificial
  Probe
cgcgcgagatatggcccgcgctgga

SEQ ID NO: 184354 - DNA, 25 bp, Artificial
  Probe
ctctggtgtagctgatgatccgaat

SEQ ID NO: 184355 - DNA, 25 bp, Artificial
  Probe
cgcgagatatggcccgcgctggagt

SEQ ID NO: 184356 - DNA, 25 bp, Artificial
  Probe
tgtagctgatgatccgaataactac

SEQ ID NO: 184357 - DNA, 25 bp, Artificial
  Probe
cgagatatggcccgcgctggagttt

SEQ ID NO: 184358 - DNA, 25 bp, Artificial
  Probe
gctgatgatccgaataactacctgt

SEQ ID NO: 184359 - DNA, 25 bp, Artificial
  Probe
agatatggcccgcgctggagtttca

SEQ ID NO: 184360 - DNA, 25 bp, Artificial
  Probe
tgatgatccgaataactacctgttt

SEQ ID NO: 184361 - DNA, 25 bp, Artificial
  Probe
atatggcccgcgctggagtttcaat

SEQ ID NO: 184362 - DNA, 25 bp, Artificial
  Probe
aatggtgttgccgcgccatctgcca

SEQ ID NO: 184363 - DNA, 25 bp, Artificial
  Probe
atggcccgcgctggagtttcaatac

SEQ ID NO: 184364 - DNA, 25 bp, Artificial
  Probe
tggtgttgccgcgccatctgccacc

SEQ ID NO: 184365 - DNA, 25 bp, Artificial
  Probe
tggcccgcgctggagtttcaatacc

SEQ ID NO: 184366 - DNA, 25 bp, Artificial
  Probe
gccagctatcaactcgcgccctgga

SEQ ID NO: 184367 - DNA, 25 bp, Artificial
  Probe
cgctggagtttcaataccggagatc

SEQ ID NO: 184368 - DNA, 25 bp, Artificial
  Probe
cagctatcaactcgcgccctggaag

SEQ ID NO: 184369 - DNA, 25 bp, Artificial
  Probe
ctggagtttcaataccggagatcat

SEQ ID NO: 184370 - DNA, 25 bp, Artificial
  Probe
gatttttgaagcaactcatcgattg

SEQ ID NO: 184371 - DNA, 25 bp, Artificial
  Probe
agtttcaataccggagatcatgcaa

SEQ ID NO: 184372 - DNA, 25 bp, Artificial
  Probe
tttttgaagcaactcatcgattgat

SEQ ID NO: 184373 - DNA, 25 bp, Artificial
  Probe
tttcaataccggagatcatgcaagc

SEQ ID NO: 184374 - DNA, 25 bp, Artificial
  Probe
ttttgaagcaactcatcgattgatt

SEQ ID NO: 184375 - DNA, 25 bp, Artificial
  Probe
ttcaataccggagatcatgcaagct

SEQ ID NO: 184376 - DNA, 25 bp, Artificial
  Probe
tttgaagcaactcatcgattgattt

SEQ ID NO: 184377 - DNA, 25 bp, Artificial
  Probe
tcaataccggagatcatgcaagctg

SEQ ID NO: 184378 - DNA, 25 bp, Artificial
  Probe
agcaactcatcgattgatttacggc

SEQ ID NO: 184379 - DNA, 25 bp, Artificial
  Probe
aataccggagatcatgcaagctggt

SEQ ID NO: 184380 - DNA, 25 bp, Artificial
  Probe
gcaactcatcgattgatttacggcg

SEQ ID NO: 184381 - DNA, 25 bp, Artificial
  Probe
ccggagatcatgcaagctggtggct

SEQ ID NO: 184382 - DNA, 25 bp, Artificial
  Probe
aactcatcgattgatttacggcgct

SEQ ID NO: 184383 - DNA, 25 bp, Artificial
  Probe
cggagatcatgcaagctggtggctg

SEQ ID NO: 184384 - DNA, 25 bp, Artificial
  Probe
ctcatcgattgatttacggcgctaa

SEQ ID NO: 184385 - DNA, 25 bp, Artificial
  Probe
agatcatgcaagctggtggctggac

SEQ ID NO: 184386 - DNA, 25 bp, Artificial
  Probe
catcgattgatttacggcgctaagg

SEQ ID NO: 184387 - DNA, 25 bp, Artificial
  Probe
atcatgcaagctggtggctggacca

SEQ ID NO: 184388 - DNA, 25 bp, Artificial
  Probe
tcgattgatttacggcgctaaggat

SEQ ID NO: 184389 - DNA, 25 bp, Artificial
  Probe
atgcaagctggtggctggaccaatg

SEQ ID NO: 184390 - DNA, 25 bp, Artificial
  Probe
gattgatttacggcgctaaggatga

SEQ ID NO: 184391 - DNA, 25 bp, Artificial
  Probe
tgcaagctggtggctggaccaatgt

SEQ ID NO: 184392 - DNA, 25 bp, Artificial
  Probe
ttgatttacggcgctaaggatgact

SEQ ID NO: 184393 - DNA, 25 bp, Artificial
  Probe
caagctggtggctggaccaatgtaa

SEQ ID NO: 184394 - DNA, 25 bp, Artificial
  Probe
gatttacggcgctaaggatgactct

SEQ ID NO: 184395 - DNA, 25 bp, Artificial
  Probe
agctggtggctggaccaatgtaaat

SEQ ID NO: 184396 - DNA, 25 bp, Artificial
  Probe
tttacggcgctaaggatgactctgg

SEQ ID NO: 184397 - DNA, 25 bp, Artificial
  Probe
aatattgtcatgaactatatccgta

SEQ ID NO: 184398 - DNA, 25 bp, Artificial
  Probe
tacggcgctaaggatgactctggtc

SEQ ID NO: 184399 - DNA, 25 bp, Artificial
  Probe
tattgtcatgaactatatccgtaac

SEQ ID NO: 184400 - DNA, 25 bp, Artificial
  Probe
cggcgctaaggatgactctggtcag

SEQ ID NO: 184401 - DNA, 25 bp, Artificial
  Probe
ttgtcatgaactatatccgtaacct

SEQ ID NO: 184402 - DNA, 25 bp, Artificial
  Probe
gcgctaaggatgactctggtcagag

SEQ ID NO: 184403 - DNA, 25 bp, Artificial
  Probe
gtcatgaactatatccgtaacctgg

SEQ ID NO: 184404 - DNA, 25 bp, Artificial
  Probe
agaatgttaatccatattggcagaa

SEQ ID NO: 184405 - DNA, 25 bp, Artificial
  Probe
gctaaggatgactctggtcagagat

SEQ ID NO: 184406 - DNA, 25 bp, Artificial
  Probe
catgaactatatccgtaacctggat

SEQ ID NO: 184407 - DNA, 25 bp, Artificial
  Probe
gaatgttaatccatattggcagaac

SEQ ID NO: 184408 - DNA, 25 bp, Artificial
  Probe
taaggatgactctggtcagagatac

SEQ ID NO: 184409 - DNA, 25 bp, Artificial
  Probe
tgaactatatccgtaacctggatag

SEQ ID NO: 184410 - DNA, 25 bp, Artificial
  Probe
gttaatccatattggcagaacgaaa

SEQ ID NO: 184411 - DNA, 25 bp, Artificial
  Probe
tgactctggtcagagatacctggcc

SEQ ID NO: 184412 - DNA, 25 bp, Artificial
  Probe
actatatccgtaacctggatagtga

SEQ ID NO: 184413 - DNA, 25 bp, Artificial
  Probe
taatccatattggcagaacgaaaac

SEQ ID NO: 184414 - DNA, 25 bp, Artificial
  Probe
actctggtcagagatacctggcctg

SEQ ID NO: 184415 - DNA, 25 bp, Artificial
  Probe
ctatatccgtaacctggatagtgaa

SEQ ID NO: 184416 - DNA, 25 bp, Artificial
  Probe
atccatattggcagaacgaaaacgc

SEQ ID NO: 184417 - DNA, 25 bp, Artificial
  Probe
tctggtcagagatacctggcctggt

SEQ ID NO: 184418 - DNA, 25 bp, Artificial
  Probe
gaaacaggggcaatggtgcgcctgc

SEQ ID NO: 184419 - DNA, 25 bp, Artificial
  Probe
aacgctggttagcaccgcaggtgta

SEQ ID NO: 184420 - DNA, 25 bp, Artificial
  Probe
ctggtcagagatacctggcctggtc

SEQ ID NO: 184421 - DNA, 25 bp, Artificial
  Probe
aacaggggcaatggtgcgcctgctg

SEQ ID NO: 184422 - DNA, 25 bp, Artificial
  Probe
cgctggttagcaccgcaggtgtaga

SEQ ID NO: 184423 - DNA, 25 bp, Artificial
  Probe
gtcagagatacctggcctggtctgg

SEQ ID NO: 184424 - DNA, 25 bp, Artificial
  Probe
ggcaatggtgcgcctgctggaagat

SEQ ID NO: 184425 - DNA, 25 bp, Artificial
  Probe
tggttagcaccgcaggtgtagagaa

SEQ ID NO: 184426 - DNA, 25 bp, Artificial
  Probe
cagagatacctggcctggtctggac

SEQ ID NO: 184427 - DNA, 25 bp, Artificial
  Probe
caatggtgcgcctgctggaagatgc

SEQ ID NO: 184428 - DNA, 25 bp, Artificial
  Probe
ggttagcaccgcaggtgtagagaag

SEQ ID NO: 184429 - DNA, 25 bp, Artificial
  Probe
gagatacctggcctggtctggacac

SEQ ID NO: 184430 - DNA, 25 bp, Artificial
  Probe
atggtgcgcctgctggaagatgccg

SEQ ID NO: 184431 - DNA, 25 bp, Artificial
  Probe
ttagcaccgcaggtgtagagaaggc

SEQ ID NO: 184432 - DNA, 25 bp, Artificial
  Probe
gatacctggcctggtctggacacag

SEQ ID NO: 184433 - DNA, 25 bp, Artificial
  Probe
ggtgcgcctgctggaagatgccgat

SEQ ID NO: 184434 - DNA, 25 bp, Artificial
  Probe
caccgcaggtgtagagaaggcactt

SEQ ID NO: 184435 - DNA, 25 bp, Artificial
  Probe
atacctggcctggtctggacacagt

SEQ ID NO: 184436 - DNA, 25 bp, Artificial
  Probe
tgcgcctgctggaagatgccgatta

SEQ ID NO: 184437 - DNA, 25 bp, Artificial
  Probe
gtaactaaactggtcgagcgatgga

SEQ ID NO: 184438 - DNA, 25 bp, Artificial
  Probe
gcctggtctggacacagtgcccgtg

SEQ ID NO: 184439 - DNA, 25 bp, Artificial
  Probe
gcgcctgctggaagatgccgattag

SEQ ID NO: 184440 - DNA, 25 bp, Artificial
  Probe
ctaaactggtcgagcgatggatttc

SEQ ID NO: 184441 - DNA, 25 bp, Artificial
  Probe
ctggtctggacacagtgcccgtgtc

SEQ ID NO: 184442 - DNA, 25 bp, Artificial
  Probe
tggtcgagcgatggatttccgtctc

SEQ ID NO: 184443 - DNA, 25 bp, Artificial
  Probe
ggtctggacacagtgcccgtgtcgg

SEQ ID NO: 184444 - DNA, 25 bp, Artificial
  Probe
gtcgagcgatggatttccgtctctg

SEQ ID NO: 184445 - DNA, 25 bp, Artificial
  Probe
tctggacacagtgcccgtgtcggag

SEQ ID NO: 184446 - DNA, 25 bp, Artificial
  Probe
cgagcgatggatttccgtctctggt

SEQ ID NO: 184447 - DNA, 25 bp, Artificial
  Probe
tggacacagtgcccgtgtcggagcc

SEQ ID NO: 184448 - DNA, 25 bp, Artificial
  Probe
agcgatggatttccgtctctggtgt

SEQ ID NO: 184449 - DNA, 25 bp, Artificial
  Probe
gacacagtgcccgtgtcggagccgc

SEQ ID NO: 184450 - DNA, 25 bp, Artificial
  Probe
atggatttccgtctctggtgtagct

SEQ ID NO: 184451 - DNA, 25 bp, Artificial
  Probe
cacagtgcccgtgtcggagccgcgc

SEQ ID NO: 184452 - DNA, 25 bp, Artificial
  Probe
tggatttccgtctctggtgtagctg

SEQ ID NO: 184453 - DNA, 25 bp, Artificial
  Probe
acagtgcccgtgtcggagccgcgcg

SEQ ID NO: 184454 - DNA, 25 bp, Artificial
  Probe
ggatttccgtctctggtgtagctga

SEQ ID NO: 184455 - DNA, 25 bp, Artificial
  Probe
ccgtgtcggagccgcgcgagatatg

SEQ ID NO: 184456 - DNA, 25 bp, Artificial
  Probe
atttccgtctctggtgtagctgatg

SEQ ID NO: 184457 - DNA, 25 bp, Artificial
  Probe
gtcggagccgcgcgagatatggccc

SEQ ID NO: 184458 - DNA, 25 bp, Artificial
  Probe
ttccgtctctggtgtagctgatgat

SEQ ID NO: 184459 - DNA, 25 bp, Artificial
  Probe
cggagccgcgcgagatatggcccgc

SEQ ID NO: 184460 - DNA, 25 bp, Artificial
  Probe
cgtctctggtgtagctgatgatccg

SEQ ID NO: 184461 - DNA, 25 bp, Artificial
  Probe
gagccgcgcgagatatggcccgcgc

SEQ ID NO: 184462 - DNA, 25 bp, Artificial
  Probe
gtctctggtgtagctgatgatccga

SEQ ID NO: 184463 - DNA, 25 bp, Artificial
  Probe
cgcgcgagatatggcccgcgctgga

SEQ ID NO: 184464 - DNA, 25 bp, Artificial
  Probe
ctctggtgtagctgatgatccgaat

SEQ ID NO: 184465 - DNA, 25 bp, Artificial
  Probe
cgcgagatatggcccgcgctggagt

SEQ ID NO: 184466 - DNA, 25 bp, Artificial
  Probe
tgtagctgatgatccgaataactac

SEQ ID NO: 184467 - DNA, 25 bp, Artificial
  Probe
cgagatatggcccgcgctggagttt

SEQ ID NO: 184468 - DNA, 25 bp, Artificial
  Probe
gaccaggttcgttcactcatggaaa

SEQ ID NO: 184469 - DNA, 25 bp, Artificial
  Probe
ttcactggttatgcggcggatccga

SEQ ID NO: 184470 - DNA, 25 bp, Artificial
  Probe
ccaggcgttttctgagcatacctgg

SEQ ID NO: 184471 - DNA, 25 bp, Artificial
  Probe
tcgtcggtccgggctgccacgacca

SEQ ID NO: 184472 - DNA, 25 bp, Artificial
  Probe
acgttgatgccggtgaacgtgcaaa

SEQ ID NO: 184473 - DNA, 25 bp, Artificial
  Probe
catgttcagggatcgccaggcgttt

SEQ ID NO: 184474 - DNA, 25 bp, Artificial
  Probe
ccaagtgacagcaatgctgtttcac

SEQ ID NO: 184475 - DNA, 25 bp, Artificial
  Probe
tgcattaccggtcgatgcaacgagt

SEQ ID NO: 184476 - DNA, 25 bp, Artificial
  Probe
gaacctgaagatgttcgcgattatc

SEQ ID NO: 184477 - DNA, 25 bp, Artificial
  Probe
ttcccgcagaacctgaagatgttcg

SEQ ID NO: 184478 - DNA, 25 bp, Artificial
  Probe
ctgtttcactggttatgcggcggat

SEQ ID NO: 184479 - DNA, 25 bp, Artificial
  Probe
gcatttctggggattgcttataaca

SEQ ID NO: 184480 - DNA, 25 bp, Artificial
  Probe
tatatcttcaggcgcgcggtctggc

SEQ ID NO: 184481 - DNA, 25 bp, Artificial
  Probe
atgttcgcgattatcttctatatct

SEQ ID NO: 184482 - DNA, 25 bp, Artificial
  Probe
gagcatacctggaaaatgcttctgt

SEQ ID NO: 184483 - DNA, 25 bp, Artificial
  Probe
tatccagcaacatttgggccagcta

SEQ ID NO: 184484 - DNA, 25 bp, Artificial
  Probe
aatgctgtttcactggttatgcggc

SEQ ID NO: 184485 - DNA, 25 bp, Artificial
  Probe
tcatcgtcggtccgggctgccacga

SEQ ID NO: 184486 - DNA, 25 bp, Artificial
  Probe
tccagcaacatttgggccagctaaa

SEQ ID NO: 184487 - DNA, 25 bp, Artificial
  Probe
tgggccagctaaacatgcttcatcg

SEQ ID NO: 184488 - DNA, 25 bp, Artificial
  Probe
gctgccacgaccaagtgacagcaat

SEQ ID NO: 184489 - DNA, 25 bp, Artificial
  Probe
tggttatgcggcggatccgaaaaga

SEQ ID NO: 184490 - DNA, 25 bp, Artificial
  Probe
gggccagctaaacatgcttcatcgt

SEQ ID NO: 184491 - DNA, 25 bp, Artificial
  Probe
actatccagcaacatttgggccagc

SEQ ID NO: 184492 - DNA, 25 bp, Artificial
  Probe
agaacctgatggacatgttcaggga

SEQ ID NO: 184493 - DNA, 25 bp, Artificial
  Probe
aatagcgatcgctgccaggatatac

SEQ ID NO: 184494 - DNA, 25 bp, Artificial
  Probe
gcttcatcgtcggtccgggctgcca

SEQ ID NO: 184495 - DNA, 25 bp, Artificial
  Probe
gttcgcaagaacctgatggacatgt

SEQ ID NO: 184496 - DNA, 25 bp, Artificial
  Probe
ggccagctaaacatgcttcatcgtc

SEQ ID NO: 184497 - DNA, 25 bp, Artificial
  Probe
gggctgccacgaccaagtgacagca

SEQ ID NO: 184498 - DNA, 25 bp, Artificial
  Probe
ttctgagcatacctggaaaatgctt

SEQ ID NO: 184499 - DNA, 25 bp, Artificial
  Probe
atcttctatatcttcaggcgcgcgg

SEQ ID NO: 184500 - DNA, 25 bp, Artificial
  Probe
gttcgcgattatcttctatatcttc

SEQ ID NO: 184501 - DNA, 25 bp, Artificial
  Probe
ggtcgatgcaacgagtgatgaggtt

SEQ ID NO: 184502 - DNA, 25 bp, Artificial
  Probe
tagcgatcgctgccaggatatacgt

SEQ ID NO: 184503 - DNA, 25 bp, Artificial
  Probe
gaccaagtgacagcaatgctgtttc

SEQ ID NO: 184504 - DNA, 25 bp, Artificial
  Probe
ttttctgagcatacctggaaaatgc

SEQ ID NO: 184505 - DNA, 25 bp, Artificial
  Probe
ctatatcttcaggcgcgcggtctgg

SEQ ID NO: 184506 - DNA, 25 bp, Artificial
  Probe
attaccggtcgatgcaacgagtgat

SEQ ID NO: 184507 - DNA, 25 bp, Artificial
  Probe
atggacatgttcagggatcgccagg

SEQ ID NO: 184508 - DNA, 25 bp, Artificial
  Probe
tcccgcagaacctgaagatgttcgc

SEQ ID NO: 184509 - DNA, 25 bp, Artificial
  Probe
aacatgcttcatcgtcggtccgggc

SEQ ID NO: 184510 - DNA, 25 bp, Artificial
  Probe
cagggatcgccaggcgttttctgag

SEQ ID NO: 184511 - DNA, 25 bp, Artificial
  Probe
tttctgagcatacctggaaaatgct

SEQ ID NO: 184512 - DNA, 25 bp, Artificial
  Probe
atttgcctgcattaccggtcgatgc

SEQ ID NO: 184513 - DNA, 25 bp, Artificial
  Probe
gatttcgaccaggttcgttcactca

SEQ ID NO: 184514 - DNA, 25 bp, Artificial
  Probe
acgaccaagtgacagcaatgctgtt

SEQ ID NO: 184515 - DNA, 25 bp, Artificial
  Probe
acgtgcaaaacaggctctagcgttc

SEQ ID NO: 184516 - DNA, 25 bp, Artificial
  Probe
gcatacctggaaaatgcttctgtcc

SEQ ID NO: 184517 - DNA, 25 bp, Artificial
  Probe
gcgatcgctgccaggatatacgtaa

SEQ ID NO: 184518 - DNA, 25 bp, Artificial
  Probe
gcaacatttgggccagctaaacatg

SEQ ID NO: 184519 - DNA, 25 bp, Artificial
  Probe
gcaatgctgtttcactggttatgcg

SEQ ID NO: 184520 - DNA, 25 bp, Artificial
  Probe
tctatatcttcaggcgcgcggtctg

SEQ ID NO: 184521 - DNA, 25 bp, Artificial
  Probe
aggttcgcaagaacctgatggacat

SEQ ID NO: 184522 - DNA, 25 bp, Artificial
  Probe
gacagcaatgctgtttcactggtta

SEQ ID NO: 184523 - DNA, 25 bp, Artificial
  Probe
aatttgcctgcattaccggtcgatg

SEQ ID NO: 184524 - DNA, 25 bp, Artificial
  Probe
ttcgaacgcactgatttcgaccagg

SEQ ID NO: 184525 - DNA, 25 bp, Artificial
  Probe
attatcttctatatcttcaggcgcg

SEQ ID NO: 184526 - DNA, 25 bp, Artificial
  Probe
cagcaacatttgggccagctaaaca

SEQ ID NO: 184527 - DNA, 25 bp, Artificial
  Probe
ttgcctgcattaccggtcgatgcaa

SEQ ID NO: 184528 - DNA, 25 bp, Artificial
  Probe
gatcgccaggcgttttctgagcata

SEQ ID NO: 184529 - DNA, 25 bp, Artificial
  Probe
acatgcttcatcgtcggtccgggct

SEQ ID NO: 184530 - DNA, 25 bp, Artificial
  Probe
ccagctaaacatgcttcatcgtcgg

SEQ ID NO: 184531 - DNA, 25 bp, Artificial
  Probe
tcgccaggcgttttctgagcatacc

SEQ ID NO: 184532 - DNA, 25 bp, Artificial
  Probe
gccaggcgttttctgagcatacctg

SEQ ID NO: 184533 - DNA, 25 bp, Artificial
  Probe
cactgatttcgaccaggttcgttca

SEQ ID NO: 184534 - DNA, 25 bp, Artificial
  Probe
gtgcaaaacaggctctagcgttcga

SEQ ID NO: 184535 - DNA, 25 bp, Artificial
  Probe
cgaccaggttcgttcactcatggaa

SEQ ID NO: 184536 - DNA, 25 bp, Artificial
  Probe
gtttcactggttatgcggcggatcc

SEQ ID NO: 184537 - DNA, 25 bp, Artificial
  Probe
ctgcattaccggtcgatgcaacgag

SEQ ID NO: 184538 - DNA, 25 bp, Artificial
  Probe
tagcgttcgaacgcactgatttcga

SEQ ID NO: 184539 - DNA, 25 bp, Artificial
  Probe
cttcaggcgcgcggtctggcagtaa

SEQ ID NO: 184540 - DNA, 25 bp, Artificial
  Probe
ctgatggacatgttcagggatcgcc

SEQ ID NO: 184541 - DNA, 25 bp, Artificial
  Probe
cgaccaagtgacagcaatgctgttt

SEQ ID NO: 184542 - DNA, 25 bp, Artificial
  Probe
ggctgccacgaccaagtgacagcaa

SEQ ID NO: 184543 - DNA, 25 bp, Artificial
  Probe
aacaggctctagcgttcgaacgcac

SEQ ID NO: 184544 - DNA, 25 bp, Artificial
  Probe
tcgcaagaacctgatggacatgttc

SEQ ID NO: 184545 - DNA, 25 bp, Artificial
  Probe
taccggtcgatgcaacgagtgatga

SEQ ID NO: 184546 - DNA, 25 bp, Artificial
  Probe
cagcaatgctgtttcactggttatg

SEQ ID NO: 184547 - DNA, 25 bp, Artificial
  Probe
atgcttcatcgtcggtccgggctgc

SEQ ID NO: 184548 - DNA, 25 bp, Artificial
  Probe
ttgatgccggtgaacgtgcaaaaca

SEQ ID NO: 184549 - DNA, 25 bp, Artificial
  Probe
gcattaccggtcgatgcaacgagtg

SEQ ID NO: 184550 - DNA, 25 bp, Artificial
  Probe
tgggcggcatggtgcaagttgaata

SEQ ID NO: 184551 - DNA, 25 bp, Artificial
  Probe
agctaaacatgcttcatcgtcggtc

SEQ ID NO: 184552 - DNA, 25 bp, Artificial
  Probe
gggatcgccaggcgttttctgagca

SEQ ID NO: 184553 - DNA, 25 bp, Artificial
  Probe
gatcgctgccaggatatacgtaatc

SEQ ID NO: 184554 - DNA, 25 bp, Artificial
  Probe
tgatgccggtgaacgtgcaaaacag

SEQ ID NO: 184555 - DNA, 25 bp, Artificial
  Probe
tcgttcactcatggaaaatagcgat

SEQ ID NO: 184556 - DNA, 25 bp, Artificial
  Probe
acctgaagatgttcgcgattatctt

SEQ ID NO: 184557 - DNA, 25 bp, Artificial
  Probe
gaccgtacaccaaaatttgcctgca

SEQ ID NO: 184558 - DNA, 25 bp, Artificial
  Probe
ttatcttctatatcttcaggcgcgc

SEQ ID NO: 184559 - DNA, 25 bp, Artificial
  Probe
ggctctagcgttcgaacgcactgat

SEQ ID NO: 184560 - DNA, 25 bp, Artificial
  Probe
gattatcttctatatcttcaggcgc

SEQ ID NO: 184561 - DNA, 25 bp, Artificial
  Probe
gtcgatgcaacgagtgatgaggttc

SEQ ID NO: 184562 - DNA, 25 bp, Artificial
  Probe
cgagtgatgaggttcgcaagaacct

SEQ ID NO: 184563 - DNA, 25 bp, Artificial
  Probe
ggcgttttctgagcatacctggaaa

SEQ ID NO: 184564 - DNA, 25 bp, Artificial
  Probe
caggcgcgcggtctggcagtaaaaa

SEQ ID NO: 184565 - DNA, 25 bp, Artificial
  Probe
gaagatgttcgcgattatcttctat

SEQ ID NO: 184566 - DNA, 25 bp, Artificial
  Probe
acatttgggccagctaaacatgctt

SEQ ID NO: 184567 - DNA, 25 bp, Artificial
  Probe
gctgtttcactggttatgcggcgga

SEQ ID NO: 184568 - DNA, 25 bp, Artificial
  Probe
tgccacgaccaagtgacagcaatgc

SEQ ID NO: 184569 - DNA, 25 bp, Artificial
  Probe
agcgttcgaacgcactgatttcgac

SEQ ID NO: 184570 - DNA, 25 bp, Artificial
  Probe
cgttcactcatggaaaatagcgatc

SEQ ID NO: 184571 - DNA, 25 bp, Artificial
  Probe
acctgatggacatgttcagggatcg

SEQ ID NO: 184572 - DNA, 25 bp, Artificial
  Probe
gcagtaaaaactatccagcaacatt

SEQ ID NO: 184573 - DNA, 25 bp, Artificial
  Probe
gacatgttcagggatcgccaggcgt

SEQ ID NO: 184574 - DNA, 25 bp, Artificial
  Probe
ttcagggatcgccaggcgttttctg

SEQ ID NO: 184575 - DNA, 25 bp, Artificial
  Probe
tgtccaatttactgaccgtacacca

SEQ ID NO: 184576 - DNA, 25 bp, Artificial
  Probe
ccgggctgccacgaccaagtgacag

SEQ ID NO: 184577 - DNA, 25 bp, Artificial
  Probe
gcactgatttcgaccaggttcgttc

SEQ ID NO: 184578 - DNA, 25 bp, Artificial
  Probe
gttcgcaagaacctgatggacatgt

SEQ ID NO: 184579 - DNA, 25 bp, Artificial
  Probe
agctaaacatgcttcatcgtcggtc

SEQ ID NO: 184580 - DNA, 25 bp, Artificial
  Probe
tcgcaagaacctgatggacatgttc

SEQ ID NO: 184581 - DNA, 25 bp, Artificial
  Probe
aacatgcttcatcgtcggtccgggc

SEQ ID NO: 184582 - DNA, 25 bp, Artificial
  Probe
agaacctgatggacatgttcaggga

SEQ ID NO: 184583 - DNA, 25 bp, Artificial
  Probe
acatgcttcatcgtcggtccgggct

SEQ ID NO: 184584 - DNA, 25 bp, Artificial
  Probe
acctgatggacatgttcagggatcg

SEQ ID NO: 184585 - DNA, 25 bp, Artificial
  Probe
atgcttcatcgtcggtccgggctgc

SEQ ID NO: 184586 - DNA, 25 bp, Artificial
  Probe
ctgatggacatgttcagggatcgcc

SEQ ID NO: 184587 - DNA, 25 bp, Artificial
  Probe
gcttcatcgtcggtccgggctgcca

SEQ ID NO: 184588 - DNA, 25 bp, Artificial
  Probe
atggacatgttcagggatcgccagg

SEQ ID NO: 184589 - DNA, 25 bp, Artificial
  Probe
tcatcgtcggtccgggctgccacga

SEQ ID NO: 184590 - DNA, 25 bp, Artificial
  Probe
gacatgttcagggatcgccaggcgt

SEQ ID NO: 184591 - DNA, 25 bp, Artificial
  Probe
tcgtcggtccgggctgccacgacca

SEQ ID NO: 184592 - DNA, 25 bp, Artificial
  Probe
catgttcagggatcgccaggcgttt

SEQ ID NO: 184593 - DNA, 25 bp, Artificial
  Probe
ccgggctgccacgaccaagtgacag

SEQ ID NO: 184594 - DNA, 25 bp, Artificial
  Probe
ttcagggatcgccaggcgttttctg

SEQ ID NO: 184595 - DNA, 25 bp, Artificial
  Probe
gggctgccacgaccaagtgacagca

SEQ ID NO: 184596 - DNA, 25 bp, Artificial
  Probe
cagggatcgccaggcgttttctgag

SEQ ID NO: 184597 - DNA, 25 bp, Artificial
  Probe
ggctgccacgaccaagtgacagcaa

SEQ ID NO: 184598 - DNA, 25 bp, Artificial
  Probe
gggatcgccaggcgttttctgagca

SEQ ID NO: 184599 - DNA, 25 bp, Artificial
  Probe
gctgccacgaccaagtgacagcaat

SEQ ID NO: 184600 - DNA, 25 bp, Artificial
  Probe
gatcgccaggcgttttctgagcata

SEQ ID NO: 184601 - DNA, 25 bp, Artificial
  Probe
tgccacgaccaagtgacagcaatgc

SEQ ID NO: 184602 - DNA, 25 bp, Artificial
  Probe
tcgccaggcgttttctgagcatacc

SEQ ID NO: 184603 - DNA, 25 bp, Artificial
  Probe
acgaccaagtgacagcaatgctgtt

SEQ ID NO: 184604 - DNA, 25 bp, Artificial
  Probe
gccaggcgttttctgagcatacctg

SEQ ID NO: 184605 - DNA, 25 bp, Artificial
  Probe
cgaccaagtgacagcaatgctgttt

SEQ ID NO: 184606 - DNA, 25 bp, Artificial
  Probe
ccaggcgttttctgagcatacctgg

SEQ ID NO: 184607 - DNA, 25 bp, Artificial
  Probe
gaccaagtgacagcaatgctgtttc

SEQ ID NO: 184608 - DNA, 25 bp, Artificial
  Probe
ggcgttttctgagcatacctggaaa

SEQ ID NO: 184609 - DNA, 25 bp, Artificial
  Probe
ccaagtgacagcaatgctgtttcac

SEQ ID NO: 184610 - DNA, 25 bp, Artificial
  Probe
ttttctgagcatacctggaaaatgc

SEQ ID NO: 184611 - DNA, 25 bp, Artificial
  Probe
gacagcaatgctgtttcactggtta

SEQ ID NO: 184612 - DNA, 25 bp, Artificial
  Probe
tttctgagcatacctggaaaatgct

SEQ ID NO: 184613 - DNA, 25 bp, Artificial
  Probe
cagcaatgctgtttcactggttatg

SEQ ID NO: 184614 - DNA, 25 bp, Artificial
  Probe
ttctgagcatacctggaaaatgctt

SEQ ID NO: 184615 - DNA, 25 bp, Artificial
  Probe
gcaatgctgtttcactggttatgcg

SEQ ID NO: 184616 - DNA, 25 bp, Artificial
  Probe
gagcatacctggaaaatgcttctgt

SEQ ID NO: 184617 - DNA, 25 bp, Artificial
  Probe
aatgctgtttcactggttatgcggc

SEQ ID NO: 184618 - DNA, 25 bp, Artificial
  Probe
gcatacctggaaaatgcttctgtcc

SEQ ID NO: 184619 - DNA, 25 bp, Artificial
  Probe
gctgtttcactggttatgcggcgga

SEQ ID NO: 184620 - DNA, 25 bp, Artificial
  Probe
tgggcggcatggtgcaagttgaata

SEQ ID NO: 184621 - DNA, 25 bp, Artificial
  Probe
ctgtttcactggttatgcggcggat

SEQ ID NO: 184622 - DNA, 25 bp, Artificial
  Probe
ttcccgcagaacctgaagatgttcg

SEQ ID NO: 184623 - DNA, 25 bp, Artificial
  Probe
gtttcactggttatgcggcggatcc

SEQ ID NO: 184624 - DNA, 25 bp, Artificial
  Probe
tcccgcagaacctgaagatgttcgc

SEQ ID NO: 184625 - DNA, 25 bp, Artificial
  Probe
ttcactggttatgcggcggatccga

SEQ ID NO: 184626 - DNA, 25 bp, Artificial
  Probe
gaacctgaagatgttcgcgattatc

SEQ ID NO: 184627 - DNA, 25 bp, Artificial
  Probe
tggttatgcggcggatccgaaaaga

SEQ ID NO: 184628 - DNA, 25 bp, Artificial
  Probe
acctgaagatgttcgcgattatctt

SEQ ID NO: 184629 - DNA, 25 bp, Artificial
  Probe
acgttgatgccggtgaacgtgcaaa

SEQ ID NO: 184630 - DNA, 25 bp, Artificial
  Probe
gaagatgttcgcgattatcttctat

SEQ ID NO: 184631 - DNA, 25 bp, Artificial
  Probe
ttgatgccggtgaacgtgcaaaaca

SEQ ID NO: 184632 - DNA, 25 bp, Artificial
  Probe
atgttcgcgattatcttctatatct

SEQ ID NO: 184633 - DNA, 25 bp, Artificial
  Probe
tgatgccggtgaacgtgcaaaacag

SEQ ID NO: 184634 - DNA, 25 bp, Artificial
  Probe
gttcgcgattatcttctatatcttc

SEQ ID NO: 184635 - DNA, 25 bp, Artificial
  Probe
acgtgcaaaacaggctctagcgttc

SEQ ID NO: 184636 - DNA, 25 bp, Artificial
  Probe
gattatcttctatatcttcaggcgc

SEQ ID NO: 184637 - DNA, 25 bp, Artificial
  Probe
gtgcaaaacaggctctagcgttcga

SEQ ID NO: 184638 - DNA, 25 bp, Artificial
  Probe
attatcttctatatcttcaggcgcg

SEQ ID NO: 184639 - DNA, 25 bp, Artificial
  Probe
aacaggctctagcgttcgaacgcac

SEQ ID NO: 184640 - DNA, 25 bp, Artificial
  Probe
ttatcttctatatcttcaggcgcgc

SEQ ID NO: 184641 - DNA, 25 bp, Artificial
  Probe
ggctctagcgttcgaacgcactgat

SEQ ID NO: 184642 - DNA, 25 bp, Artificial
  Probe
atcttctatatcttcaggcgcgcgg

SEQ ID NO: 184643 - DNA, 25 bp, Artificial
  Probe
tagcgttcgaacgcactgatttcga

SEQ ID NO: 184644 - DNA, 25 bp, Artificial
  Probe
tctatatcttcaggcgcgcggtctg

SEQ ID NO: 184645 - DNA, 25 bp, Artificial
  Probe
agcgttcgaacgcactgatttcgac

SEQ ID NO: 184646 - DNA, 25 bp, Artificial
  Probe
ctatatcttcaggcgcgcggtctgg

SEQ ID NO: 184647 - DNA, 25 bp, Artificial
  Probe
ttcgaacgcactgatttcgaccagg

SEQ ID NO: 184648 - DNA, 25 bp, Artificial
  Probe
tgtccaatttactgaccgtacacca

SEQ ID NO: 184649 - DNA, 25 bp, Artificial
  Probe
tatatcttcaggcgcgcggtctggc

SEQ ID NO: 184650 - DNA, 25 bp, Artificial
  Probe
gcactgatttcgaccaggttcgttc

SEQ ID NO: 184651 - DNA, 25 bp, Artificial
  Probe
gaccgtacaccaaaatttgcctgca

SEQ ID NO: 184652 - DNA, 25 bp, Artificial
  Probe
cttcaggcgcgcggtctggcagtaa

SEQ ID NO: 184653 - DNA, 25 bp, Artificial
  Probe
cactgatttcgaccaggttcgttca

SEQ ID NO: 184654 - DNA, 25 bp, Artificial
  Probe
aatttgcctgcattaccggtcgatg

SEQ ID NO: 184655 - DNA, 25 bp, Artificial
  Probe
caggcgcgcggtctggcagtaaaaa

SEQ ID NO: 184656 - DNA, 25 bp, Artificial
  Probe
gatttcgaccaggttcgttcactca

SEQ ID NO: 184657 - DNA, 25 bp, Artificial
  Probe
atttgcctgcattaccggtcgatgc

SEQ ID NO: 184658 - DNA, 25 bp, Artificial
  Probe
gcagtaaaaactatccagcaacatt

SEQ ID NO: 184659 - DNA, 25 bp, Artificial
  Probe
cgaccaggttcgttcactcatggaa

SEQ ID NO: 184660 - DNA, 25 bp, Artificial
  Probe
ttgcctgcattaccggtcgatgcaa

SEQ ID NO: 184661 - DNA, 25 bp, Artificial
  Probe
actatccagcaacatttgggccagc

SEQ ID NO: 184662 - DNA, 25 bp, Artificial
  Probe
gaccaggttcgttcactcatggaaa

SEQ ID NO: 184663 - DNA, 25 bp, Artificial
  Probe
ctgcattaccggtcgatgcaacgag

SEQ ID NO: 184664 - DNA, 25 bp, Artificial
  Probe
tatccagcaacatttgggccagcta

SEQ ID NO: 184665 - DNA, 25 bp, Artificial
  Probe
tcgttcactcatggaaaatagcgat

SEQ ID NO: 184666 - DNA, 25 bp, Artificial
  Probe
tgcattaccggtcgatgcaacgagt

SEQ ID NO: 184667 - DNA, 25 bp, Artificial
  Probe
tccagcaacatttgggccagctaaa

SEQ ID NO: 184668 - DNA, 25 bp, Artificial
  Probe
cgttcactcatggaaaatagcgatc

SEQ ID NO: 184669 - DNA, 25 bp, Artificial
  Probe
gcattaccggtcgatgcaacgagtg

SEQ ID NO: 184670 - DNA, 25 bp, Artificial
  Probe
cagcaacatttgggccagctaaaca

SEQ ID NO: 184671 - DNA, 25 bp, Artificial
  Probe
aatagcgatcgctgccaggatatac

SEQ ID NO: 184672 - DNA, 25 bp, Artificial
  Probe
attaccggtcgatgcaacgagtgat

SEQ ID NO: 184673 - DNA, 25 bp, Artificial
  Probe
gcaacatttgggccagctaaacatg

SEQ ID NO: 184674 - DNA, 25 bp, Artificial
  Probe
tagcgatcgctgccaggatatacgt

SEQ ID NO: 184675 - DNA, 25 bp, Artificial
  Probe
taccggtcgatgcaacgagtgatga

SEQ ID NO: 184676 - DNA, 25 bp, Artificial
  Probe
acatttgggccagctaaacatgctt

SEQ ID NO: 184677 - DNA, 25 bp, Artificial
  Probe
gcgatcgctgccaggatatacgtaa

SEQ ID NO: 184678 - DNA, 25 bp, Artificial
  Probe
ggtcgatgcaacgagtgatgaggtt

SEQ ID NO: 184679 - DNA, 25 bp, Artificial
  Probe
tgggccagctaaacatgcttcatcg

SEQ ID NO: 184680 - DNA, 25 bp, Artificial
  Probe
gatcgctgccaggatatacgtaatc

SEQ ID NO: 184681 - DNA, 25 bp, Artificial
  Probe
gtcgatgcaacgagtgatgaggttc

SEQ ID NO: 184682 - DNA, 25 bp, Artificial
  Probe
gggccagctaaacatgcttcatcgt

SEQ ID NO: 184683 - DNA, 25 bp, Artificial
  Probe
gcatttctggggattgcttataaca

SEQ ID NO: 184684 - DNA, 25 bp, Artificial
  Probe
cgagtgatgaggttcgcaagaacct

SEQ ID NO: 184685 - DNA, 25 bp, Artificial
  Probe
ggccagctaaacatgcttcatcgtc

SEQ ID NO: 184686 - DNA, 25 bp, Artificial
  Probe
aggttcgcaagaacctgatggacat

SEQ ID NO: 184687 - DNA, 25 bp, Artificial
  Probe
ccagctaaacatgcttcatcgtcgg

SEQ ID NO: 184688 - DNA, 25 bp, Artificial
  Probe
gttcgcaagaacctgatggacatgt

SEQ ID NO: 184689 - DNA, 25 bp, Artificial
  Probe
agctaaacatgcttcatcgtcggtc

SEQ ID NO: 184690 - DNA, 25 bp, Artificial
  Probe
tcgcaagaacctgatggacatgttc

SEQ ID NO: 184691 - DNA, 25 bp, Artificial
  Probe
aacatgcttcatcgtcggtccgggc

SEQ ID NO: 184692 - DNA, 25 bp, Artificial
  Probe
agaacctgatggacatgttcaggga

SEQ ID NO: 184693 - DNA, 25 bp, Artificial
  Probe
acatgcttcatcgtcggtccgggct

SEQ ID NO: 184694 - DNA, 25 bp, Artificial
  Probe
acctgatggacatgttcagggatcg

SEQ ID NO: 184695 - DNA, 25 bp, Artificial
  Probe
atgcttcatcgtcggtccgggctgc

SEQ ID NO: 184696 - DNA, 25 bp, Artificial
  Probe
ctgatggacatgttcagggatcgcc

SEQ ID NO: 184697 - DNA, 25 bp, Artificial
  Probe
gcttcatcgtcggtccgggctgcca

SEQ ID NO: 184698 - DNA, 25 bp, Artificial
  Probe
atggacatgttcagggatcgccagg

SEQ ID NO: 184699 - DNA, 25 bp, Artificial
  Probe
tcatcgtcggtccgggctgccacga

SEQ ID NO: 184700 - DNA, 25 bp, Artificial
  Probe
gacatgttcagggatcgccaggcgt

SEQ ID NO: 184701 - DNA, 25 bp, Artificial
  Probe
tcgtcggtccgggctgccacgacca

SEQ ID NO: 184702 - DNA, 25 bp, Artificial
  Probe
catgttcagggatcgccaggcgttt

SEQ ID NO: 184703 - DNA, 25 bp, Artificial
  Probe
ccgggctgccacgaccaagtgacag

SEQ ID NO: 184704 - DNA, 25 bp, Artificial
  Probe
ttcagggatcgccaggcgttttctg

SEQ ID NO: 184705 - DNA, 25 bp, Artificial
  Probe
gggctgccacgaccaagtgacagca

SEQ ID NO: 184706 - DNA, 25 bp, Artificial
  Probe
cagggatcgccaggcgttttctgag

SEQ ID NO: 184707 - DNA, 25 bp, Artificial
  Probe
ggctgccacgaccaagtgacagcaa

SEQ ID NO: 184708 - DNA, 25 bp, Artificial
  Probe
gggatcgccaggcgttttctgagca

SEQ ID NO: 184709 - DNA, 25 bp, Artificial
  Probe
gctgccacgaccaagtgacagcaat

SEQ ID NO: 184710 - DNA, 25 bp, Artificial
  Probe
gatcgccaggcgttttctgagcata

SEQ ID NO: 184711 - DNA, 25 bp, Artificial
  Probe
tgccacgaccaagtgacagcaatgc

SEQ ID NO: 184712 - DNA, 25 bp, Artificial
  Probe
tcgccaggcgttttctgagcatacc

SEQ ID NO: 184713 - DNA, 25 bp, Artificial
  Probe
acgaccaagtgacagcaatgctgtt

SEQ ID NO: 184714 - DNA, 25 bp, Artificial
  Probe
gccaggcgttttctgagcatacctg

SEQ ID NO: 184715 - DNA, 25 bp, Artificial
  Probe
cgaccaagtgacagcaatgctgttt

SEQ ID NO: 184716 - DNA, 25 bp, Artificial
  Probe
ccaggcgttttctgagcatacctgg

SEQ ID NO: 184717 - DNA, 25 bp, Artificial
  Probe
gaccaagtgacagcaatgctgtttc

SEQ ID NO: 184718 - DNA, 25 bp, Artificial
  Probe
ggcgttttctgagcatacctggaaa

SEQ ID NO: 184719 - DNA, 25 bp, Artificial
  Probe
ccaagtgacagcaatgctgtttcac

SEQ ID NO: 184720 - DNA, 25 bp, Artificial
  Probe
ttttctgagcatacctggaaaatgc

SEQ ID NO: 184721 - DNA, 25 bp, Artificial
  Probe
gacagcaatgctgtttcactggtta

SEQ ID NO: 184722 - DNA, 25 bp, Artificial
  Probe
tttctgagcatacctggaaaatgct

SEQ ID NO: 184723 - DNA, 25 bp, Artificial
  Probe
cagcaatgctgtttcactggttatg

SEQ ID NO: 184724 - DNA, 25 bp, Artificial
  Probe
ttctgagcatacctggaaaatgctt

SEQ ID NO: 184725 - DNA, 25 bp, Artificial
  Probe
gcaatgctgtttcactggttatgcg

SEQ ID NO: 184726 - DNA, 25 bp, Artificial
  Probe
gagcatacctggaaaatgcttctgt

SEQ ID NO: 184727 - DNA, 25 bp, Artificial
  Probe
aatgctgtttcactggttatgcggc

SEQ ID NO: 184728 - DNA, 25 bp, Artificial
  Probe
gcatacctggaaaatgcttctgtcc

SEQ ID NO: 184729 - DNA, 25 bp, Artificial
  Probe
gctgtttcactggttatgcggcgga

SEQ ID NO: 184730 - DNA, 25 bp, Artificial
  Probe
tgggcggcatggtgcaagttgaata

SEQ ID NO: 184731 - DNA, 25 bp, Artificial
  Probe
ctgtttcactggttatgcggcggat

SEQ ID NO: 184732 - DNA, 25 bp, Artificial
  Probe
ttcccgcagaacctgaagatgttcg

SEQ ID NO: 184733 - DNA, 25 bp, Artificial
  Probe
gtttcactggttatgcggcggatcc

SEQ ID NO: 184734 - DNA, 25 bp, Artificial
  Probe
tcccgcagaacctgaagatgttcgc

SEQ ID NO: 184735 - DNA, 25 bp, Artificial
  Probe
ttcactggttatgcggcggatccga

SEQ ID NO: 184736 - DNA, 25 bp, Artificial
  Probe
gaacctgaagatgttcgcgattatc

SEQ ID NO: 184737 - DNA, 25 bp, Artificial
  Probe
tggttatgcggcggatccgaaaaga

SEQ ID NO: 184738 - DNA, 25 bp, Artificial
  Probe
acctgaagatgttcgcgattatctt

SEQ ID NO: 184739 - DNA, 25 bp, Artificial
  Probe
acgttgatgccggtgaacgtgcaaa

SEQ ID NO: 184740 - DNA, 25 bp, Artificial
  Probe
gaagatgttcgcgattatcttctat

SEQ ID NO: 184741 - DNA, 25 bp, Artificial
  Probe
ttgatgccggtgaacgtgcaaaaca

SEQ ID NO: 184742 - DNA, 25 bp, Artificial
  Probe
atgttcgcgattatcttctatatct

SEQ ID NO: 184743 - DNA, 25 bp, Artificial
  Probe
tgatgccggtgaacgtgcaaaacag

SEQ ID NO: 184744 - DNA, 25 bp, Artificial
  Probe
gttcgcgattatcttctatatcttc

SEQ ID NO: 184745 - DNA, 25 bp, Artificial
  Probe
acgtgcaaaacaggctctagcgttc

SEQ ID NO: 184746 - DNA, 25 bp, Artificial
  Probe
gattatcttctatatcttcaggcgc

SEQ ID NO: 184747 - DNA, 25 bp, Artificial
  Probe
gtgcaaaacaggctctagcgttcga

SEQ ID NO: 184748 - DNA, 25 bp, Artificial
  Probe
attatcttctatatcttcaggcgcg

SEQ ID NO: 184749 - DNA, 25 bp, Artificial
  Probe
aacaggctctagcgttcgaacgcac

SEQ ID NO: 184750 - DNA, 25 bp, Artificial
  Probe
ttatcttctatatcttcaggcgcgc

SEQ ID NO: 184751 - DNA, 25 bp, Artificial
  Probe
ggctctagcgttcgaacgcactgat

SEQ ID NO: 184752 - DNA, 25 bp, Artificial
  Probe
atcttctatatcttcaggcgcgcgg

SEQ ID NO: 184753 - DNA, 25 bp, Artificial
  Probe
tagcgttcgaacgcactgatttcga

SEQ ID NO: 184754 - DNA, 25 bp, Artificial
  Probe
tctatatcttcaggcgcgcggtctg

SEQ ID NO: 184755 - DNA, 25 bp, Artificial
  Probe
agcgttcgaacgcactgatttcgac

SEQ ID NO: 184756 - DNA, 25 bp, Artificial
  Probe
ctatatcttcaggcgcgcggtctgg

SEQ ID NO: 184757 - DNA, 25 bp, Artificial
  Probe
ttcgaacgcactgatttcgaccagg

SEQ ID NO: 184758 - DNA, 25 bp, Artificial
  Probe
tgtccaatttactgaccgtacacca

SEQ ID NO: 184759 - DNA, 25 bp, Artificial
  Probe
tatatcttcaggcgcgcggtctggc

SEQ ID NO: 184760 - DNA, 25 bp, Artificial
  Probe
gcactgatttcgaccaggttcgttc

SEQ ID NO: 184761 - DNA, 25 bp, Artificial
  Probe
gaccgtacaccaaaatttgcctgca

SEQ ID NO: 184762 - DNA, 25 bp, Artificial
  Probe
cttcaggcgcgcggtctggcagtaa

SEQ ID NO: 184763 - DNA, 25 bp, Artificial
  Probe
cactgatttcgaccaggttcgttca

SEQ ID NO: 184764 - DNA, 25 bp, Artificial
  Probe
aatttgcctgcattaccggtcgatg

SEQ ID NO: 184765 - DNA, 25 bp, Artificial
  Probe
caggcgcgcggtctggcagtaaaaa

SEQ ID NO: 184766 - DNA, 25 bp, Artificial
  Probe
gatttcgaccaggttcgttcactca

SEQ ID NO: 184767 - DNA, 25 bp, Artificial
  Probe
atttgcctgcattaccggtcgatgc

SEQ ID NO: 184768 - DNA, 25 bp, Artificial
  Probe
gcagtaaaaactatccagcaacatt

SEQ ID NO: 184769 - DNA, 25 bp, Artificial
  Probe
cgaccaggttcgttcactcatggaa

SEQ ID NO: 184770 - DNA, 25 bp, Artificial
  Probe
ttgcctgcattaccggtcgatgcaa

SEQ ID NO: 184771 - DNA, 25 bp, Artificial
  Probe
actatccagcaacatttgggccagc

SEQ ID NO: 184772 - DNA, 25 bp, Artificial
  Probe
gaccaggttcgttcactcatggaaa

SEQ ID NO: 184773 - DNA, 25 bp, Artificial
  Probe
ctgcattaccggtcgatgcaacgag

SEQ ID NO: 184774 - DNA, 25 bp, Artificial
  Probe
tatccagcaacatttgggccagcta

SEQ ID NO: 184775 - DNA, 25 bp, Artificial
  Probe
tcgttcactcatggaaaatagcgat

SEQ ID NO: 184776 - DNA, 25 bp, Artificial
  Probe
tgcattaccggtcgatgcaacgagt

SEQ ID NO: 184777 - DNA, 25 bp, Artificial
  Probe
tccagcaacatttgggccagctaaa

SEQ ID NO: 184778 - DNA, 25 bp, Artificial
  Probe
cgttcactcatggaaaatagcgatc

SEQ ID NO: 184779 - DNA, 25 bp, Artificial
  Probe
gcattaccggtcgatgcaacgagtg

SEQ ID NO: 184780 - DNA, 25 bp, Artificial
  Probe
cagcaacatttgggccagctaaaca

SEQ ID NO: 184781 - DNA, 25 bp, Artificial
  Probe
aatagcgatcgctgccaggatatac

SEQ ID NO: 184782 - DNA, 25 bp, Artificial
  Probe
attaccggtcgatgcaacgagtgat

SEQ ID NO: 184783 - DNA, 25 bp, Artificial
  Probe
gcaacatttgggccagctaaacatg

SEQ ID NO: 184784 - DNA, 25 bp, Artificial
  Probe
tagcgatcgctgccaggatatacgt

SEQ ID NO: 184785 - DNA, 25 bp, Artificial
  Probe
taccggtcgatgcaacgagtgatga

SEQ ID NO: 184786 - DNA, 25 bp, Artificial
  Probe
acatttgggccagctaaacatgctt

SEQ ID NO: 184787 - DNA, 25 bp, Artificial
  Probe
gcgatcgctgccaggatatacgtaa

SEQ ID NO: 184788 - DNA, 25 bp, Artificial
  Probe
ggtcgatgcaacgagtgatgaggtt

SEQ ID NO: 184789 - DNA, 25 bp, Artificial
  Probe
tgggccagctaaacatgcttcatcg

SEQ ID NO: 184790 - DNA, 25 bp, Artificial
  Probe
gatcgctgccaggatatacgtaatc

SEQ ID NO: 184791 - DNA, 25 bp, Artificial
  Probe
gtcgatgcaacgagtgatgaggttc

SEQ ID NO: 184792 - DNA, 25 bp, Artificial
  Probe
gggccagctaaacatgcttcatcgt

SEQ ID NO: 184793 - DNA, 25 bp, Artificial
  Probe
gcatttctggggattgcttataaca

SEQ ID NO: 184794 - DNA, 25 bp, Artificial
  Probe
cgagtgatgaggttcgcaagaacct

SEQ ID NO: 184795 - DNA, 25 bp, Artificial
  Probe
ggccagctaaacatgcttcatcgtc

SEQ ID NO: 184796 - DNA, 25 bp, Artificial
  Probe
aggttcgcaagaacctgatggacat

SEQ ID NO: 184797 - DNA, 25 bp, Artificial
  Probe
ccagctaaacatgcttcatcgtcgg

SEQ ID NO: 184798 - DNA, 25 bp, Artificial
  Probe
gttcgcaagaacctgatggacatgt

SEQ ID NO: 184799 - DNA, 25 bp, Artificial
  Probe
agctaaacatgcttcatcgtcggtc

SEQ ID NO: 184800 - DNA, 25 bp, Artificial
  Probe
tcgcaagaacctgatggacatgttc

SEQ ID NO: 184801 - DNA, 25 bp, Artificial
  Probe
aacatgcttcatcgtcggtccgggc

SEQ ID NO: 184802 - DNA, 25 bp, Artificial
  Probe
agaacctgatggacatgttcaggga

SEQ ID NO: 184803 - DNA, 25 bp, Artificial
  Probe
acatgcttcatcgtcggtccgggct

SEQ ID NO: 184804 - DNA, 25 bp, Artificial
  Probe
acctgatggacatgttcagggatcg

SEQ ID NO: 184805 - DNA, 25 bp, Artificial
  Probe
atgcttcatcgtcggtccgggctgc

SEQ ID NO: 184806 - DNA, 25 bp, Artificial
  Probe
ctgatggacatgttcagggatcgcc

SEQ ID NO: 184807 - DNA, 25 bp, Artificial
  Probe
gcttcatcgtcggtccgggctgcca

SEQ ID NO: 184808 - DNA, 25 bp, Artificial
  Probe
atggacatgttcagggatcgccagg

SEQ ID NO: 184809 - DNA, 25 bp, Artificial
  Probe
tcatcgtcggtccgggctgccacga

SEQ ID NO: 184810 - DNA, 25 bp, Artificial
  Probe
gacatgttcagggatcgccaggcgt

SEQ ID NO: 184811 - DNA, 25 bp, Artificial
  Probe
tcgtcggtccgggctgccacgacca

SEQ ID NO: 184812 - DNA, 25 bp, Artificial
  Probe
catgttcagggatcgccaggcgttt

SEQ ID NO: 184813 - DNA, 25 bp, Artificial
  Probe
ccgggctgccacgaccaagtgacag

SEQ ID NO: 184814 - DNA, 25 bp, Artificial
  Probe
ttcagggatcgccaggcgttttctg

SEQ ID NO: 184815 - DNA, 25 bp, Artificial
  Probe
gggctgccacgaccaagtgacagca

SEQ ID NO: 184816 - DNA, 25 bp, Artificial
  Probe
cagggatcgccaggcgttttctgag

SEQ ID NO: 184817 - DNA, 25 bp, Artificial
  Probe
ggctgccacgaccaagtgacagcaa

SEQ ID NO: 184818 - DNA, 25 bp, Artificial
  Probe
gggatcgccaggcgttttctgagca

SEQ ID NO: 184819 - DNA, 25 bp, Artificial
  Probe
gctgccacgaccaagtgacagcaat

SEQ ID NO: 184820 - DNA, 25 bp, Artificial
  Probe
gatcgccaggcgttttctgagcata

SEQ ID NO: 184821 - DNA, 25 bp, Artificial
  Probe
tgccacgaccaagtgacagcaatgc

SEQ ID NO: 184822 - DNA, 25 bp, Artificial
  Probe
tcgccaggcgttttctgagcatacc

SEQ ID NO: 184823 - DNA, 25 bp, Artificial
  Probe
acgaccaagtgacagcaatgctgtt

SEQ ID NO: 184824 - DNA, 25 bp, Artificial
  Probe
gccaggcgttttctgagcatacctg

SEQ ID NO: 184825 - DNA, 25 bp, Artificial
  Probe
cgaccaagtgacagcaatgctgttt

SEQ ID NO: 184826 - DNA, 25 bp, Artificial
  Probe
ccaggcgttttctgagcatacctgg

SEQ ID NO: 184827 - DNA, 25 bp, Artificial
  Probe
gaccaagtgacagcaatgctgtttc

SEQ ID NO: 184828 - DNA, 25 bp, Artificial
  Probe
ggcgttttctgagcatacctggaaa

SEQ ID NO: 184829 - DNA, 25 bp, Artificial
  Probe
ccaagtgacagcaatgctgtttcac

SEQ ID NO: 184830 - DNA, 25 bp, Artificial
  Probe
ttttctgagcatacctggaaaatgc

SEQ ID NO: 184831 - DNA, 25 bp, Artificial
  Probe
gacagcaatgctgtttcactggtta

SEQ ID NO: 184832 - DNA, 25 bp, Artificial
  Probe
tttctgagcatacctggaaaatgct

SEQ ID NO: 184833 - DNA, 25 bp, Artificial
  Probe
cagcaatgctgtttcactggttatg

SEQ ID NO: 184834 - DNA, 25 bp, Artificial
  Probe
ttctgagcatacctggaaaatgctt

SEQ ID NO: 184835 - DNA, 25 bp, Artificial
  Probe
gcaatgctgtttcactggttatgcg

SEQ ID NO: 184836 - DNA, 25 bp, Artificial
  Probe
gagcatacctggaaaatgcttctgt

SEQ ID NO: 184837 - DNA, 25 bp, Artificial
  Probe
aatgctgtttcactggttatgcggc

SEQ ID NO: 184838 - DNA, 25 bp, Artificial
  Probe
gcatacctggaaaatgcttctgtcc

SEQ ID NO: 184839 - DNA, 25 bp, Artificial
  Probe
gctgtttcactggttatgcggcgga

SEQ ID NO: 184840 - DNA, 25 bp, Artificial
  Probe
tgggcggcatggtgcaagttgaata

SEQ ID NO: 184841 - DNA, 25 bp, Artificial
  Probe
ctgtttcactggttatgcggcggat

SEQ ID NO: 184842 - DNA, 25 bp, Artificial
  Probe
ttcccgcagaacctgaagatgttcg

SEQ ID NO: 184843 - DNA, 25 bp, Artificial
  Probe
gtttcactggttatgcggcggatcc

SEQ ID NO: 184844 - DNA, 25 bp, Artificial
  Probe
tcccgcagaacctgaagatgttcgc

SEQ ID NO: 184845 - DNA, 25 bp, Artificial
  Probe
ttcactggttatgcggcggatccga

SEQ ID NO: 184846 - DNA, 25 bp, Artificial
  Probe
gaacctgaagatgttcgcgattatc

SEQ ID NO: 184847 - DNA, 25 bp, Artificial
  Probe
tggttatgcggcggatccgaaaaga

SEQ ID NO: 184848 - DNA, 25 bp, Artificial
  Probe
acctgaagatgttcgcgattatctt

SEQ ID NO: 184849 - DNA, 25 bp, Artificial
  Probe
acgttgatgccggtgaacgtgcaaa

SEQ ID NO: 184850 - DNA, 25 bp, Artificial
  Probe
gaagatgttcgcgattatcttctat

SEQ ID NO: 184851 - DNA, 25 bp, Artificial
  Probe
ttgatgccggtgaacgtgcaaaaca

SEQ ID NO: 184852 - DNA, 25 bp, Artificial
  Probe
atgttcgcgattatcttctatatct

SEQ ID NO: 184853 - DNA, 25 bp, Artificial
  Probe
tgatgccggtgaacgtgcaaaacag

SEQ ID NO: 184854 - DNA, 25 bp, Artificial
  Probe
gttcgcgattatcttctatatcttc

SEQ ID NO: 184855 - DNA, 25 bp, Artificial
  Probe
acgtgcaaaacaggctctagcgttc

SEQ ID NO: 184856 - DNA, 25 bp, Artificial
  Probe
gattatcttctatatcttcaggcgc

SEQ ID NO: 184857 - DNA, 25 bp, Artificial
  Probe
gtgcaaaacaggctctagcgttcga

SEQ ID NO: 184858 - DNA, 25 bp, Artificial
  Probe
attatcttctatatcttcaggcgcg

SEQ ID NO: 184859 - DNA, 25 bp, Artificial
  Probe
aacaggctctagcgttcgaacgcac

SEQ ID NO: 184860 - DNA, 25 bp, Artificial
  Probe
ttatcttctatatcttcaggcgcgc

SEQ ID NO: 184861 - DNA, 25 bp, Artificial
  Probe
ggctctagcgttcgaacgcactgat

SEQ ID NO: 184862 - DNA, 25 bp, Artificial
  Probe
atcttctatatcttcaggcgcgcgg

SEQ ID NO: 184863 - DNA, 25 bp, Artificial
  Probe
tagcgttcgaacgcactgatttcga

SEQ ID NO: 184864 - DNA, 25 bp, Artificial
  Probe
tctatatcttcaggcgcgcggtctg

SEQ ID NO: 184865 - DNA, 25 bp, Artificial
  Probe
agcgttcgaacgcactgatttcgac

SEQ ID NO: 184866 - DNA, 25 bp, Artificial
  Probe
ctatatcttcaggcgcgcggtctgg

SEQ ID NO: 184867 - DNA, 25 bp, Artificial
  Probe
ttcgaacgcactgatttcgaccagg

SEQ ID NO: 184868 - DNA, 25 bp, Artificial
  Probe
tgtccaatttactgaccgtacacca

SEQ ID NO: 184869 - DNA, 25 bp, Artificial
  Probe
tatatcttcaggcgcgcggtctggc

SEQ ID NO: 184870 - DNA, 25 bp, Artificial
  Probe
gcactgatttcgaccaggttcgttc

SEQ ID NO: 184871 - DNA, 25 bp, Artificial
  Probe
gaccgtacaccaaaatttgcctgca

SEQ ID NO: 184872 - DNA, 25 bp, Artificial
  Probe
cttcaggcgcgcggtctggcagtaa

SEQ ID NO: 184873 - DNA, 25 bp, Artificial
  Probe
cactgatttcgaccaggttcgttca

SEQ ID NO: 184874 - DNA, 25 bp, Artificial
  Probe
aatttgcctgcattaccggtcgatg

SEQ ID NO: 184875 - DNA, 25 bp, Artificial
  Probe
caggcgcgcggtctggcagtaaaaa

SEQ ID NO: 184876 - DNA, 25 bp, Artificial
  Probe
gatttcgaccaggttcgttcactca

SEQ ID NO: 184877 - DNA, 25 bp, Artificial
  Probe
atttgcctgcattaccggtcgatgc

SEQ ID NO: 184878 - DNA, 25 bp, Artificial
  Probe
gcagtaaaaactatccagcaacatt

SEQ ID NO: 184879 - DNA, 25 bp, Artificial
  Probe
cgaccaggttcgttcactcatggaa

SEQ ID NO: 184880 - DNA, 25 bp, Artificial
  Probe
ttgcctgcattaccggtcgatgcaa

SEQ ID NO: 184881 - DNA, 25 bp, Artificial
  Probe
actatccagcaacatttgggccagc

SEQ ID NO: 184882 - DNA, 25 bp, Artificial
  Probe
gaccaggttcgttcactcatggaaa

SEQ ID NO: 184883 - DNA, 25 bp, Artificial
  Probe
ctgcattaccggtcgatgcaacgag

SEQ ID NO: 184884 - DNA, 25 bp, Artificial
  Probe
tatccagcaacatttgggccagcta

SEQ ID NO: 184885 - DNA, 25 bp, Artificial
  Probe
tcgttcactcatggaaaatagcgat

SEQ ID NO: 184886 - DNA, 25 bp, Artificial
  Probe
tgcattaccggtcgatgcaacgagt

SEQ ID NO: 184887 - DNA, 25 bp, Artificial
  Probe
tccagcaacatttgggccagctaaa

SEQ ID NO: 184888 - DNA, 25 bp, Artificial
  Probe
cgttcactcatggaaaatagcgatc

SEQ ID NO: 184889 - DNA, 25 bp, Artificial
  Probe
gcattaccggtcgatgcaacgagtg

SEQ ID NO: 184890 - DNA, 25 bp, Artificial
  Probe
cagcaacatttgggccagctaaaca

SEQ ID NO: 184891 - DNA, 25 bp, Artificial
  Probe
aatagcgatcgctgccaggatatac

SEQ ID NO: 184892 - DNA, 25 bp, Artificial
  Probe
attaccggtcgatgcaacgagtgat

SEQ ID NO: 184893 - DNA, 25 bp, Artificial
  Probe
gcaacatttgggccagctaaacatg

SEQ ID NO: 184894 - DNA, 25 bp, Artificial
  Probe
tagcgatcgctgccaggatatacgt

SEQ ID NO: 184895 - DNA, 25 bp, Artificial
  Probe
taccggtcgatgcaacgagtgatga

SEQ ID NO: 184896 - DNA, 25 bp, Artificial
  Probe
acatttgggccagctaaacatgctt

SEQ ID NO: 184897 - DNA, 25 bp, Artificial
  Probe
gcgatcgctgccaggatatacgtaa

SEQ ID NO: 184898 - DNA, 25 bp, Artificial
  Probe
ggtcgatgcaacgagtgatgaggtt

SEQ ID NO: 184899 - DNA, 25 bp, Artificial
  Probe
tgggccagctaaacatgcttcatcg

SEQ ID NO: 184900 - DNA, 25 bp, Artificial
  Probe
gatcgctgccaggatatacgtaatc

SEQ ID NO: 184901 - DNA, 25 bp, Artificial
  Probe
gtcgatgcaacgagtgatgaggttc

SEQ ID NO: 184902 - DNA, 25 bp, Artificial
  Probe
gggccagctaaacatgcttcatcgt

SEQ ID NO: 184903 - DNA, 25 bp, Artificial
  Probe
gcatttctggggattgcttataaca

SEQ ID NO: 184904 - DNA, 25 bp, Artificial
  Probe
cgagtgatgaggttcgcaagaacct

SEQ ID NO: 184905 - DNA, 25 bp, Artificial
  Probe
ggccagctaaacatgcttcatcgtc

SEQ ID NO: 184906 - DNA, 25 bp, Artificial
  Probe
aggttcgcaagaacctgatggacat

SEQ ID NO: 184907 - DNA, 25 bp, Artificial
  Probe
ccagctaaacatgcttcatcgtcgg

SEQ ID NO: 184908 - DNA, 25 bp, Artificial
  Probe
gttcgcaagaacctgatggacatgt

SEQ ID NO: 184909 - DNA, 25 bp, Artificial
  Probe
agctaaacatgcttcatcgtcggtc

SEQ ID NO: 184910 - DNA, 25 bp, Artificial
  Probe
tcgcaagaacctgatggacatgttc

SEQ ID NO: 184911 - DNA, 25 bp, Artificial
  Probe
aacatgcttcatcgtcggtccgggc

SEQ ID NO: 184912 - DNA, 25 bp, Artificial
  Probe
agaacctgatggacatgttcaggga

SEQ ID NO: 184913 - DNA, 25 bp, Artificial
  Probe
acatgcttcatcgtcggtccgggct

SEQ ID NO: 184914 - DNA, 25 bp, Artificial
  Probe
acctgatggacatgttcagggatcg

SEQ ID NO: 184915 - DNA, 25 bp, Artificial
  Probe
atgcttcatcgtcggtccgggctgc

SEQ ID NO: 184916 - DNA, 25 bp, Artificial
  Probe
ctgatggacatgttcagggatcgcc

SEQ ID NO: 184917 - DNA, 25 bp, Artificial
  Probe
gcttcatcgtcggtccgggctgcca

SEQ ID NO: 184918 - DNA, 25 bp, Artificial
  Probe
atggacatgttcagggatcgccagg

SEQ ID NO: 184919 - DNA, 25 bp, Artificial
  Probe
tcatcgtcggtccgggctgccacga

SEQ ID NO: 184920 - DNA, 25 bp, Artificial
  Probe
gacatgttcagggatcgccaggcgt

SEQ ID NO: 184921 - DNA, 25 bp, Artificial
  Probe
tcgtcggtccgggctgccacgacca

SEQ ID NO: 184922 - DNA, 25 bp, Artificial
  Probe
catgttcagggatcgccaggcgttt

SEQ ID NO: 184923 - DNA, 25 bp, Artificial
  Probe
ccgggctgccacgaccaagtgacag

SEQ ID NO: 184924 - DNA, 25 bp, Artificial
  Probe
ttcagggatcgccaggcgttttctg

SEQ ID NO: 184925 - DNA, 25 bp, Artificial
  Probe
gggctgccacgaccaagtgacagca

SEQ ID NO: 184926 - DNA, 25 bp, Artificial
  Probe
cagggatcgccaggcgttttctgag

SEQ ID NO: 184927 - DNA, 25 bp, Artificial
  Probe
ggctgccacgaccaagtgacagcaa

SEQ ID NO: 184928 - DNA, 25 bp, Artificial
  Probe
gggatcgccaggcgttttctgagca

SEQ ID NO: 184929 - DNA, 25 bp, Artificial
  Probe
gctgccacgaccaagtgacagcaat

SEQ ID NO: 184930 - DNA, 25 bp, Artificial
  Probe
gatcgccaggcgttttctgagcata

SEQ ID NO: 184931 - DNA, 25 bp, Artificial
  Probe
tgccacgaccaagtgacagcaatgc

SEQ ID NO: 184932 - DNA, 25 bp, Artificial
  Probe
tcgccaggcgttttctgagcatacc

SEQ ID NO: 184933 - DNA, 25 bp, Artificial
  Probe
acgaccaagtgacagcaatgctgtt

SEQ ID NO: 184934 - DNA, 25 bp, Artificial
  Probe
gccaggcgttttctgagcatacctg

SEQ ID NO: 184935 - DNA, 25 bp, Artificial
  Probe
cgaccaagtgacagcaatgctgttt

SEQ ID NO: 184936 - DNA, 25 bp, Artificial
  Probe
ccaggcgttttctgagcatacctgg

SEQ ID NO: 184937 - DNA, 25 bp, Artificial
  Probe
gaccaagtgacagcaatgctgtttc

SEQ ID NO: 184938 - DNA, 25 bp, Artificial
  Probe
ggcgttttctgagcatacctggaaa

SEQ ID NO: 184939 - DNA, 25 bp, Artificial
  Probe
ccaagtgacagcaatgctgtttcac

SEQ ID NO: 184940 - DNA, 25 bp, Artificial
  Probe
ttttctgagcatacctggaaaatgc

SEQ ID NO: 184941 - DNA, 25 bp, Artificial
  Probe
gacagcaatgctgtttcactggtta

SEQ ID NO: 184942 - DNA, 25 bp, Artificial
  Probe
tttctgagcatacctggaaaatgct

SEQ ID NO: 184943 - DNA, 25 bp, Artificial
  Probe
cagcaatgctgtttcactggttatg

SEQ ID NO: 184944 - DNA, 25 bp, Artificial
  Probe
ttctgagcatacctggaaaatgctt

SEQ ID NO: 184945 - DNA, 25 bp, Artificial
  Probe
gcaatgctgtttcactggttatgcg

SEQ ID NO: 184946 - DNA, 25 bp, Artificial
  Probe
gagcatacctggaaaatgcttctgt

SEQ ID NO: 184947 - DNA, 25 bp, Artificial
  Probe
aatgctgtttcactggttatgcggc

SEQ ID NO: 184948 - DNA, 25 bp, Artificial
  Probe
gcatacctggaaaatgcttctgtcc

SEQ ID NO: 184949 - DNA, 25 bp, Artificial
  Probe
gctgtttcactggttatgcggcgga

SEQ ID NO: 184950 - DNA, 25 bp, Artificial
  Probe
tgggcggcatggtgcaagttgaata

SEQ ID NO: 184951 - DNA, 25 bp, Artificial
  Probe
ctgtttcactggttatgcggcggat

SEQ ID NO: 184952 - DNA, 25 bp, Artificial
  Probe
ttcccgcagaacctgaagatgttcg

SEQ ID NO: 184953 - DNA, 25 bp, Artificial
  Probe
gtttcactggttatgcggcggatcc

SEQ ID NO: 184954 - DNA, 25 bp, Artificial
  Probe
tcccgcagaacctgaagatgttcgc

SEQ ID NO: 184955 - DNA, 25 bp, Artificial
  Probe
ttcactggttatgcggcggatccga

SEQ ID NO: 184956 - DNA, 25 bp, Artificial
  Probe
gaacctgaagatgttcgcgattatc

SEQ ID NO: 184957 - DNA, 25 bp, Artificial
  Probe
tggttatgcggcggatccgaaaaga

SEQ ID NO: 184958 - DNA, 25 bp, Artificial
  Probe
acctgaagatgttcgcgattatctt

SEQ ID NO: 184959 - DNA, 25 bp, Artificial
  Probe
acgttgatgccggtgaacgtgcaaa

SEQ ID NO: 184960 - DNA, 25 bp, Artificial
  Probe
gaagatgttcgcgattatcttctat

SEQ ID NO: 184961 - DNA, 25 bp, Artificial
  Probe
ttgatgccggtgaacgtgcaaaaca

SEQ ID NO: 184962 - DNA, 25 bp, Artificial
  Probe
atgttcgcgattatcttctatatct

SEQ ID NO: 184963 - DNA, 25 bp, Artificial
  Probe
tgatgccggtgaacgtgcaaaacag

SEQ ID NO: 184964 - DNA, 25 bp, Artificial
  Probe
gttcgcgattatcttctatatcttc

SEQ ID NO: 184965 - DNA, 25 bp, Artificial
  Probe
acgtgcaaaacaggctctagcgttc

SEQ ID NO: 184966 - DNA, 25 bp, Artificial
  Probe
gattatcttctatatcttcaggcgc

SEQ ID NO: 184967 - DNA, 25 bp, Artificial
  Probe
gtgcaaaacaggctctagcgttcga

SEQ ID NO: 184968 - DNA, 25 bp, Artificial
  Probe
attatcttctatatcttcaggcgcg

SEQ ID NO: 184969 - DNA, 25 bp, Artificial
  Probe
aacaggctctagcgttcgaacgcac

SEQ ID NO: 184970 - DNA, 25 bp, Artificial
  Probe
ttatcttctatatcttcaggcgcgc

SEQ ID NO: 184971 - DNA, 25 bp, Artificial
  Probe
ggctctagcgttcgaacgcactgat

SEQ ID NO: 184972 - DNA, 25 bp, Artificial
  Probe
atcttctatatcttcaggcgcgcgg

SEQ ID NO: 184973 - DNA, 25 bp, Artificial
  Probe
tagcgttcgaacgcactgatttcga

SEQ ID NO: 184974 - DNA, 25 bp, Artificial
  Probe
tctatatcttcaggcgcgcggtctg

SEQ ID NO: 184975 - DNA, 25 bp, Artificial
  Probe
agcgttcgaacgcactgatttcgac

SEQ ID NO: 184976 - DNA, 25 bp, Artificial
  Probe
ctatatcttcaggcgcgcggtctgg

SEQ ID NO: 184977 - DNA, 25 bp, Artificial
  Probe
ttcgaacgcactgatttcgaccagg

SEQ ID NO: 184978 - DNA, 25 bp, Artificial
  Probe
tgtccaatttactgaccgtacacca

SEQ ID NO: 184979 - DNA, 25 bp, Artificial
  Probe
tatatcttcaggcgcgcggtctggc

SEQ ID NO: 184980 - DNA, 25 bp, Artificial
  Probe
gcactgatttcgaccaggttcgttc

SEQ ID NO: 184981 - DNA, 25 bp, Artificial
  Probe
gaccgtacaccaaaatttgcctgca

SEQ ID NO: 184982 - DNA, 25 bp, Artificial
  Probe
cttcaggcgcgcggtctggcagtaa

SEQ ID NO: 184983 - DNA, 25 bp, Artificial
  Probe
cactgatttcgaccaggttcgttca

SEQ ID NO: 184984 - DNA, 25 bp, Artificial
  Probe
aatttgcctgcattaccggtcgatg

SEQ ID NO: 184985 - DNA, 25 bp, Artificial
  Probe
caggcgcgcggtctggcagtaaaaa

SEQ ID NO: 184986 - DNA, 25 bp, Artificial
  Probe
gatttcgaccaggttcgttcactca

SEQ ID NO: 184987 - DNA, 25 bp, Artificial
  Probe
atttgcctgcattaccggtcgatgc

SEQ ID NO: 184988 - DNA, 25 bp, Artificial
  Probe
gcagtaaaaactatccagcaacatt

SEQ ID NO: 184989 - DNA, 25 bp, Artificial
  Probe
cgaccaggttcgttcactcatggaa

SEQ ID NO: 184990 - DNA, 25 bp, Artificial
  Probe
ttgcctgcattaccggtcgatgcaa

SEQ ID NO: 184991 - DNA, 25 bp, Artificial
  Probe
actatccagcaacatttgggccagc

SEQ ID NO: 184992 - DNA, 25 bp, Artificial
  Probe
gaccaggttcgttcactcatggaaa

SEQ ID NO: 184993 - DNA, 25 bp, Artificial
  Probe
ctgcattaccggtcgatgcaacgag

SEQ ID NO: 184994 - DNA, 25 bp, Artificial
  Probe
tatccagcaacatttgggccagcta

SEQ ID NO: 184995 - DNA, 25 bp, Artificial
  Probe
tcgttcactcatggaaaatagcgat

SEQ ID NO: 184996 - DNA, 25 bp, Artificial
  Probe
tgcattaccggtcgatgcaacgagt

SEQ ID NO: 184997 - DNA, 25 bp, Artificial
  Probe
tccagcaacatttgggccagctaaa

SEQ ID NO: 184998 - DNA, 25 bp, Artificial
  Probe
cgttcactcatggaaaatagcgatc

SEQ ID NO: 184999 - DNA, 25 bp, Artificial
  Probe
gcattaccggtcgatgcaacgagtg

SEQ ID NO: 185000 - DNA, 25 bp, Artificial
  Probe
cagcaacatttgggccagctaaaca

SEQ ID NO: 185001 - DNA, 25 bp, Artificial
  Probe
aatagcgatcgctgccaggatatac

SEQ ID NO: 185002 - DNA, 25 bp, Artificial
  Probe
attaccggtcgatgcaacgagtgat

SEQ ID NO: 185003 - DNA, 25 bp, Artificial
  Probe
gcaacatttgggccagctaaacatg

SEQ ID NO: 185004 - DNA, 25 bp, Artificial
  Probe
tagcgatcgctgccaggatatacgt

SEQ ID NO: 185005 - DNA, 25 bp, Artificial
  Probe
taccggtcgatgcaacgagtgatga

SEQ ID NO: 185006 - DNA, 25 bp, Artificial
  Probe
acatttgggccagctaaacatgctt

SEQ ID NO: 185007 - DNA, 25 bp, Artificial
  Probe
gcgatcgctgccaggatatacgtaa

SEQ ID NO: 185008 - DNA, 25 bp, Artificial
  Probe
ggtcgatgcaacgagtgatgaggtt

SEQ ID NO: 185009 - DNA, 25 bp, Artificial
  Probe
tgggccagctaaacatgcttcatcg

SEQ ID NO: 185010 - DNA, 25 bp, Artificial
  Probe
gatcgctgccaggatatacgtaatc

SEQ ID NO: 185011 - DNA, 25 bp, Artificial
  Probe
gtcgatgcaacgagtgatgaggttc

SEQ ID NO: 185012 - DNA, 25 bp, Artificial
  Probe
gggccagctaaacatgcttcatcgt

SEQ ID NO: 185013 - DNA, 25 bp, Artificial
  Probe
gcatttctggggattgcttataaca

SEQ ID NO: 185014 - DNA, 25 bp, Artificial
  Probe
cgagtgatgaggttcgcaagaacct

SEQ ID NO: 185015 - DNA, 25 bp, Artificial
  Probe
ggccagctaaacatgcttcatcgtc

SEQ ID NO: 185016 - DNA, 25 bp, Artificial
  Probe
aggttcgcaagaacctgatggacat

SEQ ID NO: 185017 - DNA, 25 bp, Artificial
  Probe
ccagctaaacatgcttcatcgtcgg

SEQ ID NO: 185018 - DNA, 25 bp, Artificial
  Probe
actgccttaggctatggcctggtct

SEQ ID NO: 185019 - DNA, 25 bp, Artificial
  Probe
cagtcctaggaaccatgcctgtcac

SEQ ID NO: 185020 - DNA, 25 bp, Artificial
  Probe
gctgttagtaccatgtctacccgtt

SEQ ID NO: 185021 - DNA, 25 bp, Artificial
  Probe
aggctatggcctggtctgtgcccct

SEQ ID NO: 185022 - DNA, 25 bp, Artificial
  Probe
gtaaacagttatctacagtcctagg

SEQ ID NO: 185023 - DNA, 25 bp, Artificial
  Probe
accatggaccgcaatgtgtagtaag

SEQ ID NO: 185024 - DNA, 25 bp, Artificial
  Probe
ggccaggagttccttgggtcagcac

SEQ ID NO: 185025 - DNA, 25 bp, Artificial
  Probe
aggaaccatgcctgtcacctaacca

SEQ ID NO: 185026 - DNA, 25 bp, Artificial
  Probe
cactacattagacagtgacacccag

SEQ ID NO: 185027 - DNA, 25 bp, Artificial
  Probe
aacagttatctacagtcctaggaac

SEQ ID NO: 185028 - DNA, 25 bp, Artificial
  Probe
catgtctacccgttaccatggaccg

SEQ ID NO: 185029 - DNA, 25 bp, Artificial
  Probe
tcctaggaaccatgcctgtcaccta

SEQ ID NO: 185030 - DNA, 25 bp, Artificial
  Probe
agagctgttagtaccatgtctaccc

SEQ ID NO: 185031 - DNA, 25 bp, Artificial
  Probe
acacccagaggttctcttaggaggg

SEQ ID NO: 185032 - DNA, 25 bp, Artificial
  Probe
cagtgacacccagaggttctcttag

SEQ ID NO: 185033 - DNA, 25 bp, Artificial
  Probe
catggaccgcaatgtgtagtaagga

SEQ ID NO: 185034 - DNA, 25 bp, Artificial
  Probe
cacttgctggccaggagttccttgg

SEQ ID NO: 185035 - DNA, 25 bp, Artificial
  Probe
gtgtctggcagtgacaggccagccc

SEQ ID NO: 185036 - DNA, 25 bp, Artificial
  Probe
ccaggagttccttgggtcagcacgt

SEQ ID NO: 185037 - DNA, 25 bp, Artificial
  Probe
ccttgggtcagcacgtggacccttc

SEQ ID NO: 185038 - DNA, 25 bp, Artificial
  Probe
gagctgttagtaccatgtctacccg

SEQ ID NO: 185039 - DNA, 25 bp, Artificial
  Probe
ggtctgtgcccctaaacactacatt

SEQ ID NO: 185040 - DNA, 25 bp, Artificial
  Probe
gggtcagcacgtggacccttccaaa

SEQ ID NO: 185041 - DNA, 25 bp, Artificial
  Probe
ccgttaccatggaccgcaatgtgta

SEQ ID NO: 185042 - DNA, 25 bp, Artificial
  Probe
acctactgccttaggctatggcctg

SEQ ID NO: 185043 - DNA, 25 bp, Artificial
  Probe
agtgacacccagaggttctcttagg

SEQ ID NO: 185044 - DNA, 25 bp, Artificial
  Probe
gttatctacagtcctaggaaccatg

SEQ ID NO: 185045 - DNA, 25 bp, Artificial
  Probe
atgtctacccgttaccatggaccgc

SEQ ID NO: 185046 - DNA, 25 bp, Artificial
  Probe
acagtgacacccagaggttctctta

SEQ ID NO: 185047 - DNA, 25 bp, Artificial
  Probe
ttgctggccaggagttccttgggtc

SEQ ID NO: 185048 - DNA, 25 bp, Artificial
  Probe
ttagacagtgacacccagaggttct

SEQ ID NO: 185049 - DNA, 25 bp, Artificial
  Probe
gagttccttgggtcagcacgtggac

SEQ ID NO: 185050 - DNA, 25 bp, Artificial
  Probe
agagagctgttagtaccatgtctac

SEQ ID NO: 185051 - DNA, 25 bp, Artificial
  Probe
tgttagtaccatgtctacccgttac

SEQ ID NO: 185052 - DNA, 25 bp, Artificial
  Probe
acagtcctaggaaccatgcctgtca

SEQ ID NO: 185053 - DNA, 25 bp, Artificial
  Probe
tgtctacccgttaccatggaccgca

SEQ ID NO: 185054 - DNA, 25 bp, Artificial
  Probe
cacccagaggttctcttaggagggt

SEQ ID NO: 185055 - DNA, 25 bp, Artificial
  Probe
cagttatctacagtcctaggaacca

SEQ ID NO: 185056 - DNA, 25 bp, Artificial
  Probe
taggctatggcctggtctgtgcccc

SEQ ID NO: 185057 - DNA, 25 bp, Artificial
  Probe
cacctactgccttaggctatggcct

SEQ ID NO: 185058 - DNA, 25 bp, Artificial
  Probe
tgccttaggctatggcctggtctgt

SEQ ID NO: 185059 - DNA, 25 bp, Artificial
  Probe
taaacagttatctacagtcctagga

SEQ ID NO: 185060 - DNA, 25 bp, Artificial
  Probe
tacattagacagtgacacccagagg

SEQ ID NO: 185061 - DNA, 25 bp, Artificial
  Probe
tgggtcagcacgtggacccttccaa

SEQ ID NO: 185062 - DNA, 25 bp, Artificial
  Probe
tatggcctggtctgtgcccctaaac

SEQ ID NO: 185063 - DNA, 25 bp, Artificial
  Probe
tggcctggtctgtgcccctaaacac

SEQ ID NO: 185064 - DNA, 25 bp, Artificial
  Probe
gtcccagctgaaatcccagtcacaa

SEQ ID NO: 185065 - DNA, 25 bp, Artificial
  Probe
ctgtccaaatggaggcttaatgcta

SEQ ID NO: 185066 - DNA, 25 bp, Artificial
  Probe
cccactcgtatttatcgataaaggc

SEQ ID NO: 185067 - DNA, 25 bp, Artificial
  Probe
gtgctctccaataaacagagccttc

SEQ ID NO: 185068 - DNA, 25 bp, Artificial
  Probe
acgtgtagaggagtcacctgacctg

SEQ ID NO: 185069 - DNA, 25 bp, Artificial
  Probe
agaagatgagcttgcccaacaaaag

SEQ ID NO: 185070 - DNA, 25 bp, Artificial
  Probe
gaaagcttggccagtccagtaaaac

SEQ ID NO: 185071 - DNA, 25 bp, Artificial
  Probe
gcaaacgttcacagactcaaaagaa

SEQ ID NO: 185072 - DNA, 25 bp, Artificial
  Probe
aatctttccaccatggtccgggaat

SEQ ID NO: 185073 - DNA, 25 bp, Artificial
  Probe
atgcaaacgttcacagactcaaaag

SEQ ID NO: 185074 - DNA, 25 bp, Artificial
  Probe
gcaccactacatctccagaaagacg

SEQ ID NO: 185075 - DNA, 25 bp, Artificial
  Probe
agcatcaaatcaagggcaaaggata

SEQ ID NO: 185076 - DNA, 25 bp, Artificial
  Probe
gaggcttaatgctataccaaggcac

SEQ ID NO: 185077 - DNA, 25 bp, Artificial
  Probe
ctctcaagaattaaaacacgtgtag

SEQ ID NO: 185078 - DNA, 25 bp, Artificial
  Probe
cacaaaccaagctgaaatcccacgg

SEQ ID NO: 185079 - DNA, 25 bp, Artificial
  Probe
atatgacctgcatcaagacctgccc

SEQ ID NO: 185080 - DNA, 25 bp, Artificial
  Probe
cccaagtgcgccaacaacatgcaaa

SEQ ID NO: 185081 - DNA, 25 bp, Artificial
  Probe
ggaagaggcccctgaagaaagcatc

SEQ ID NO: 185082 - DNA, 25 bp, Artificial
  Probe
gccaacaacatgcaaacgttcacag

SEQ ID NO: 185083 - DNA, 25 bp, Artificial
  Probe
gatggcatcttttcaagtaataaac

SEQ ID NO: 185084 - DNA, 25 bp, Artificial
  Probe
caagcagccgggataggaatctatg

SEQ ID NO: 185085 - DNA, 25 bp, Artificial
  Probe
gcaccttcactgagtaacacattcg

SEQ ID NO: 185086 - DNA, 25 bp, Artificial
  Probe
aagtaaaatcccatgaagcccaagt

SEQ ID NO: 185087 - DNA, 25 bp, Artificial
  Probe
ctcttgtagagttacacagaataga

SEQ ID NO: 185088 - DNA, 25 bp, Artificial
  Probe
gcccaacaaaagtcccagctgaaat

SEQ ID NO: 185089 - DNA, 25 bp, Artificial
  Probe
acatctccagaaagacgtttctcag

SEQ ID NO: 185090 - DNA, 25 bp, Artificial
  Probe
gtcaaaatctccaagttcctattgg

SEQ ID NO: 185091 - DNA, 25 bp, Artificial
  Probe
ggcagtgttcatcacacaaaatctt

SEQ ID NO: 185092 - DNA, 25 bp, Artificial
  Probe
cacaaaagcagacaggtttgaagga

SEQ ID NO: 185093 - DNA, 25 bp, Artificial
  Probe
gcttctctgaagttctacaaagcac

SEQ ID NO: 185094 - DNA, 25 bp, Artificial
  Probe
tgaaagaacagaacactcttgtaga

SEQ ID NO: 185095 - DNA, 25 bp, Artificial
  Probe
tccttccagagactttctaaagttg

SEQ ID NO: 185096 - DNA, 25 bp, Artificial
  Probe
atggatgccatgacccactcacaca

SEQ ID NO: 185097 - DNA, 25 bp, Artificial
  Probe
aagcagccgggataggaatctatgg

SEQ ID NO: 185098 - DNA, 25 bp, Artificial
  Probe
caagtgtttcccaataaagacattg

SEQ ID NO: 185099 - DNA, 25 bp, Artificial
  Probe
aacctcacgcaggtgctctccaata

SEQ ID NO: 185100 - DNA, 25 bp, Artificial
  Probe
ataccaaggcaccttcactgagtaa

SEQ ID NO: 185101 - DNA, 25 bp, Artificial
  Probe
aggtgaaatcacaaaccaagctgaa

SEQ ID NO: 185102 - DNA, 25 bp, Artificial
  Probe
ccagtccagtaaaacagtagcattc

SEQ ID NO: 185103 - DNA, 25 bp, Artificial
  Probe
cgcttccaaccctatcatgggtact

SEQ ID NO: 185104 - DNA, 25 bp, Artificial
  Probe
cttctggagaagcaagcagccggga

SEQ ID NO: 185105 - DNA, 25 bp, Artificial
  Probe
gcttaatgctataccaaggcacctt

SEQ ID NO: 185106 - DNA, 25 bp, Artificial
  Probe
gttggagcaacctcacgcaggtgct

SEQ ID NO: 185107 - DNA, 25 bp, Artificial
  Probe
tctatggacacagagaagaacagga

SEQ ID NO: 185108 - DNA, 25 bp, Artificial
  Probe
aaaggatatgacctgcatcaagacc

SEQ ID NO: 185109 - DNA, 25 bp, Artificial
  Probe
ccaaacagggcagctaaagaccgcg

SEQ ID NO: 185110 - DNA, 25 bp, Artificial
  Probe
cctaacaatgtttgcagataaaaga

SEQ ID NO: 185111 - DNA, 25 bp, Artificial
  Probe
tgcccatgatgtatctcccctggtc

SEQ ID NO: 185112 - DNA, 25 bp, Artificial
  Probe
aagatattgcatacagccagatact

SEQ ID NO: 185113 - DNA, 25 bp, Artificial
  Probe
tcctattctggttgataaagcgtta

SEQ ID NO: 185114 - DNA, 25 bp, Artificial
  Probe
tgctcacacaacactgcccatgatg

SEQ ID NO: 185115 - DNA, 25 bp, Artificial
  Probe
tttgcaaaatccaatcagatgactg

SEQ ID NO: 185116 - DNA, 25 bp, Artificial
  Probe
ctattctggttgataaagcgttaca

SEQ ID NO: 185117 - DNA, 25 bp, Artificial
  Probe
aatatggcctaacaatgtttgcaga

SEQ ID NO: 185118 - DNA, 25 bp, Artificial
  Probe
tccaatcagatgactggaaaacgaa

SEQ ID NO: 185119 - DNA, 25 bp, Artificial
  Probe
acaatgtgtgtcatttcatgacact

SEQ ID NO: 185120 - DNA, 25 bp, Artificial
  Probe
catttcatgacactcgtggaaaaca

SEQ ID NO: 185121 - DNA, 25 bp, Artificial
  Probe
aggtcactcttctggcatgggtcag

SEQ ID NO: 185122 - DNA, 25 bp, Artificial
  Probe
tacagccagatactagagcaggatc

SEQ ID NO: 185123 - DNA, 25 bp, Artificial
  Probe
tttatcactgctgtgaacagatgaa

SEQ ID NO: 185124 - DNA, 25 bp, Artificial
  Probe
aatgtttgcaaaatccaatcagatg

SEQ ID NO: 185125 - DNA, 25 bp, Artificial
  Probe
cactgctgtgaacagatgaacaatg

SEQ ID NO: 185126 - DNA, 25 bp, Artificial
  Probe
ccccaggtcactcttctggcatggg

SEQ ID NO: 185127 - DNA, 25 bp, Artificial
  Probe
ttgcatacagccagatactagagca

SEQ ID NO: 185128 - DNA, 25 bp, Artificial
  Probe
actcttctggcatgggtcagggaaa

SEQ ID NO: 185129 - DNA, 25 bp, Artificial
  Probe
tttgccctaaggagaaacaagtaag

SEQ ID NO: 185130 - DNA, 25 bp, Artificial
  Probe
tcatgacactcgtggaaaacagtga

SEQ ID NO: 185131 - DNA, 25 bp, Artificial
  Probe
tattttatcactgctgtgaacagat

SEQ ID NO: 185132 - DNA, 25 bp, Artificial
  Probe
agaccagcatttgtttaaagcacat

SEQ ID NO: 185133 - DNA, 25 bp, Artificial
  Probe
gcaaaatccaatcagatgactggaa

SEQ ID NO: 185134 - DNA, 25 bp, Artificial
  Probe
agctgcttttattggaaagaccagc

SEQ ID NO: 185135 - DNA, 25 bp, Artificial
  Probe
tgcatacagccagatactagagcag

SEQ ID NO: 185136 - DNA, 25 bp, Artificial
  Probe
gaccagcatttgtttaaagcacatt

SEQ ID NO: 185137 - DNA, 25 bp, Artificial
  Probe
tataatatggcctaacaatgtttgc

SEQ ID NO: 185138 - DNA, 25 bp, Artificial
  Probe
tttcatgacactcgtggaaaacagt

SEQ ID NO: 185139 - DNA, 25 bp, Artificial
  Probe
cccaggtcactcttctggcatgggt

SEQ ID NO: 185140 - DNA, 25 bp, Artificial
  Probe
tccacccggagtagggatggagaaa

SEQ ID NO: 185141 - DNA, 25 bp, Artificial
  Probe
actgcccatgatgtatctcccctgg

SEQ ID NO: 185142 - DNA, 25 bp, Artificial
  Probe
aagaccagcatttgtttaaagcaca

SEQ ID NO: 185143 - DNA, 25 bp, Artificial
  Probe
gctcacacaacactgcccatgatgt

SEQ ID NO: 185144 - DNA, 25 bp, Artificial
  Probe
caatgtgtgtcatttcatgacactc

SEQ ID NO: 185145 - DNA, 25 bp, Artificial
  Probe
cactcttctggcatgggtcagggaa

SEQ ID NO: 185146 - DNA, 25 bp, Artificial
  Probe
acactcgtggaaaacagtgattttt

SEQ ID NO: 185147 - DNA, 25 bp, Artificial
  Probe
gatattgcatacagccagatactag

SEQ ID NO: 185148 - DNA, 25 bp, Artificial
  Probe
gaaagctgcttttattggaaagacc

SEQ ID NO: 185149 - DNA, 25 bp, Artificial
  Probe
catacagccagatactagagcagga

SEQ ID NO: 185150 - DNA, 25 bp, Artificial
  Probe
ctgcccatgatgtatctcccctggt

SEQ ID NO: 185151 - DNA, 25 bp, Artificial
  Probe
gaaagaccagcatttgtttaaagca

SEQ ID NO: 185152 - DNA, 25 bp, Artificial
  Probe
tgtcatttcatgacactcgtggaaa

SEQ ID NO: 185153 - DNA, 25 bp, Artificial
  Probe
aaatccaatcagatgactggaaaac

SEQ ID NO: 185154 - DNA, 25 bp, Artificial
  Probe
ttgccctaaggagaaacaagtaaga

SEQ ID NO: 185155 - DNA, 25 bp, Artificial
  Probe
cactctcctattctggttgataaag

SEQ ID NO: 185156 - DNA, 25 bp, Artificial
  Probe
tgtgcctgtgctggctgaaatttct

SEQ ID NO: 185157 - DNA, 25 bp, Artificial
  Probe
gtttatagctaatcatgtgcctgtg

SEQ ID NO: 185158 - DNA, 25 bp, Artificial
  Probe
agctaatcatgtgcctgtgctggct

SEQ ID NO: 185159 - DNA, 25 bp, Artificial
  Probe
tatagctaatcatgtgcctgtgctg

SEQ ID NO: 185160 - DNA, 25 bp, Artificial
  Probe
ctgaaatttcttatgacttgcttac

SEQ ID NO: 185161 - DNA, 25 bp, Artificial
  Probe
ttcttatgacttgcttacttgggga

SEQ ID NO: 185162 - DNA, 25 bp, Artificial
  Probe
gtgctggctgaaatttcttatgact

SEQ ID NO: 185163 - DNA, 25 bp, Artificial
  Probe
tgtttatagctaatcatgtgcctgt

SEQ ID NO: 185164 - DNA, 25 bp, Artificial
  Probe
tcatgtgcctgtgctggctgaaatt

SEQ ID NO: 185165 - DNA, 25 bp, Artificial
  Probe
gacatcgttgtttatagctaatcat

SEQ ID NO: 185166 - DNA, 25 bp, Artificial
  Probe
tgggtgctttttgttttattcttct

SEQ ID NO: 185167 - DNA, 25 bp, Artificial
  Probe
catgtgcctgtgctggctgaaattt

SEQ ID NO: 185168 - DNA, 25 bp, Artificial
  Probe
ctgtgctggctgaaatttcttatga

SEQ ID NO: 185169 - DNA, 25 bp, Artificial
  Probe
ttcttcttgacatcgttgtttatag

SEQ ID NO: 185170 - DNA, 25 bp, Artificial
  Probe
cctgtgctggctgaaatttcttatg

SEQ ID NO: 185171 - DNA, 25 bp, Artificial
  Probe
gttgtttatagctaatcatgtgcct

SEQ ID NO: 185172 - DNA, 25 bp, Artificial
  Probe
gcctgtgctggctgaaatttcttat

SEQ ID NO: 185173 - DNA, 25 bp, Artificial
  Probe
acatcgttgtttatagctaatcatg

SEQ ID NO: 185174 - DNA, 25 bp, Artificial
  Probe
atagctaatcatgtgcctgtgctgg

SEQ ID NO: 185175 - DNA, 25 bp, Artificial
  Probe
taacatgggtgctttttgttttatt

SEQ ID NO: 185176 - DNA, 25 bp, Artificial
  Probe
cttcttgacatcgttgtttatagct

SEQ ID NO: 185177 - DNA, 25 bp, Artificial
  Probe
aatcatgtgcctgtgctggctgaaa

SEQ ID NO: 185178 - DNA, 25 bp, Artificial
  Probe
tcttatgacttgcttacttggggag

SEQ ID NO: 185179 - DNA, 25 bp, Artificial
  Probe
ttgacatcgttgtttatagctaatc

SEQ ID NO: 185180 - DNA, 25 bp, Artificial
  Probe
aatttcttatgacttgcttacttgg

SEQ ID NO: 185181 - DNA, 25 bp, Artificial
  Probe
atcatgtgcctgtgctggctgaaat

SEQ ID NO: 185182 - DNA, 25 bp, Artificial
  Probe
ttacttggggaggaacatttggtat

SEQ ID NO: 185183 - DNA, 25 bp, Artificial
  Probe
ttgtttatagctaatcatgtgcctg

SEQ ID NO: 185184 - DNA, 25 bp, Artificial
  Probe
ctaatcatgtgcctgtgctggctga

SEQ ID NO: 185185 - DNA, 25 bp, Artificial
  Probe
cttgacatcgttgtttatagctaat

SEQ ID NO: 185186 - DNA, 25 bp, Artificial
  Probe
ttcttgacatcgttgtttatagcta

SEQ ID NO: 185187 - DNA, 25 bp, Artificial
  Probe
aaatttcttatgacttgcttacttg

SEQ ID NO: 185188 - DNA, 25 bp, Artificial
  Probe
tagctaatcatgtgcctgtgctggc

SEQ ID NO: 185189 - DNA, 25 bp, Artificial
  Probe
ggtgctttttgttttattcttcttg

SEQ ID NO: 185190 - DNA, 25 bp, Artificial
  Probe
tcttcttgacatcgttgtttatagc

SEQ ID NO: 185191 - DNA, 25 bp, Artificial
  Probe
tgcctgtgctggctgaaatttctta

SEQ ID NO: 185192 - DNA, 25 bp, Artificial
  Probe
atttcttatgacttgcttacttggg

SEQ ID NO: 185193 - DNA, 25 bp, Artificial
  Probe
tcttgacatcgttgtttatagctaa

SEQ ID NO: 185194 - DNA, 25 bp, Artificial
  Probe
tttatagctaatcatgtgcctgtgc

SEQ ID NO: 185195 - DNA, 25 bp, Artificial
  Probe
cttatgacttgcttacttggggagg

SEQ ID NO: 185196 - DNA, 25 bp, Artificial
  Probe
tgtgctggctgaaatttcttatgac

SEQ ID NO: 185197 - DNA, 25 bp, Artificial
  Probe
tttcttatgacttgcttacttgggg

SEQ ID NO: 185198 - DNA, 25 bp, Artificial
  Probe
atgtgcctgtgctggctgaaatttc

SEQ ID NO: 185199 - DNA, 25 bp, Artificial
  Probe
taatcatgtgcctgtgctggctgaa

SEQ ID NO: 185200 - DNA, 25 bp, Artificial
  Probe
ttatagctaatcatgtgcctgtgct

SEQ ID NO: 185201 - DNA, 25 bp, Artificial
  Probe
tgacatcgttgtttatagctaatca

SEQ ID NO: 185202 - DNA, 25 bp, Artificial
  Probe
ggaagcaacatgcaaggatgttcct

SEQ ID NO: 185203 - DNA, 25 bp, Artificial
  Probe
gctttcttccaggaactctgttctt

SEQ ID NO: 185204 - DNA, 25 bp, Artificial
  Probe
acaagggaacccaggcaagtgtcag

SEQ ID NO: 185205 - DNA, 25 bp, Artificial
  Probe
ttaccttcacggagaccacgctttt

SEQ ID NO: 185206 - DNA, 25 bp, Artificial
  Probe
ataacttgtgtatcaactggcgcag

SEQ ID NO: 185207 - DNA, 25 bp, Artificial
  Probe
cacgcttttagagtgcaaataactt

SEQ ID NO: 185208 - DNA, 25 bp, Artificial
  Probe
ggcctctttctatcaaggatacctt

SEQ ID NO: 185209 - DNA, 25 bp, Artificial
  Probe
aggtggctcaaacaagggaagcaac

SEQ ID NO: 185210 - DNA, 25 bp, Artificial
  Probe
taacaaggggcctctttctatcaag

SEQ ID NO: 185211 - DNA, 25 bp, Artificial
  Probe
actccaggaatgttaagatgtctta

SEQ ID NO: 185212 - DNA, 25 bp, Artificial
  Probe
gggtatgtcataactgccaatgaca

SEQ ID NO: 185213 - DNA, 25 bp, Artificial
  Probe
gatgggaaacgctctgatctccagg

SEQ ID NO: 185214 - DNA, 25 bp, Artificial
  Probe
gcaggaagacccagaccacccagtt

SEQ ID NO: 185215 - DNA, 25 bp, Artificial
  Probe
cataactgccaatgacaaggggtga

SEQ ID NO: 185216 - DNA, 25 bp, Artificial
  Probe
ccagaccacccagttctgtagtgct

SEQ ID NO: 185217 - DNA, 25 bp, Artificial
  Probe
gaagacccagaccacccagttctgt

SEQ ID NO: 185218 - DNA, 25 bp, Artificial
  Probe
tgtgaccatggatgggaaacgctct

SEQ ID NO: 185219 - DNA, 25 bp, Artificial
  Probe
aaagtgcctgtgaccatggatggga

SEQ ID NO: 185220 - DNA, 25 bp, Artificial
  Probe
gtcataactgccaatgacaaggggt

SEQ ID NO: 185221 - DNA, 25 bp, Artificial
  Probe
ccatccagtggcaggaagacccaga

SEQ ID NO: 185222 - DNA, 25 bp, Artificial
  Probe
ctacatcattgtgtaattaaagtgc

SEQ ID NO: 185223 - DNA, 25 bp, Artificial
  Probe
gtcagccagaggtggctcaaacaag

SEQ ID NO: 185224 - DNA, 25 bp, Artificial
  Probe
ttcacggagaccacgcttttagagt

SEQ ID NO: 185225 - DNA, 25 bp, Artificial
  Probe
ccagtggcaggaagacccagaccac

SEQ ID NO: 185226 - DNA, 25 bp, Artificial
  Probe
ccagaggtggctcaaacaagggaag

SEQ ID NO: 185227 - DNA, 25 bp, Artificial
  Probe
aagtgtcagccagaggtggctcaaa

SEQ ID NO: 185228 - DNA, 25 bp, Artificial
  Probe
agaccacccagttctgtagtgctcc

SEQ ID NO: 185229 - DNA, 25 bp, Artificial
  Probe
atgttaagatgtcttaccttcacgg

SEQ ID NO: 185230 - DNA, 25 bp, Artificial
  Probe
gggaacccaggcaagtgtcagccag

SEQ ID NO: 185231 - DNA, 25 bp, Artificial
  Probe
aagcaacatgcaaggatgttcctag

SEQ ID NO: 185232 - DNA, 25 bp, Artificial
  Probe
gtagtgctcccacagtaatggcaca

SEQ ID NO: 185233 - DNA, 25 bp, Artificial
  Probe
gttctgtagtgctcccacagtaatg

SEQ ID NO: 185234 - DNA, 25 bp, Artificial
  Probe
taaagtgcctgctgggatttagctc

SEQ ID NO: 185235 - DNA, 25 bp, Artificial
  Probe
actggcgcagaagatagggtatgtc

SEQ ID NO: 185236 - DNA, 25 bp, Artificial
  Probe
atcaactggcgcagaagatagggta

SEQ ID NO: 185237 - DNA, 25 bp, Artificial
  Probe
cccaggcaagtgtcagccagaggtg

SEQ ID NO: 185238 - DNA, 25 bp, Artificial
  Probe
cggagaccacgcttttagagtgcaa

SEQ ID NO: 185239 - DNA, 25 bp, Artificial
  Probe
tgtcttaccttcacggagaccacgc

SEQ ID NO: 185240 - DNA, 25 bp, Artificial
  Probe
gaagcaagtcctgctttcttccagg

SEQ ID NO: 185241 - DNA, 25 bp, Artificial
  Probe
ttgtgtatcaactggcgcagaagat

SEQ ID NO: 185242 - DNA, 25 bp, Artificial
  Probe
ccagtccgtgccagatactccagga

SEQ ID NO: 185243 - DNA, 25 bp, Artificial
  Probe
attaaagtgcctgctgggatttagc

SEQ ID NO: 185244 - DNA, 25 bp, Artificial
  Probe
acccagttctgtagtgctcccacag

SEQ ID NO: 185245 - DNA, 25 bp, Artificial
  Probe
gtatgtcataactgccaatgacaag

SEQ ID NO: 185246 - DNA, 25 bp, Artificial
  Probe
ttcctagcagaggaacagtaacaag

SEQ ID NO: 185247 - DNA, 25 bp, Artificial
  Probe
agtaatggcacaatgacagtcagtg

SEQ ID NO: 185248 - DNA, 25 bp, Artificial
  Probe
ctcaggtggacaatcatctggagag

SEQ ID NO: 185249 - DNA, 25 bp, Artificial
  Probe
ggtggacaatcatctggagagcccg

SEQ ID NO: 185250 - DNA, 25 bp, Artificial
  Probe
agagcccgccttgggccagggactt

SEQ ID NO: 185251 - DNA, 25 bp, Artificial
  Probe
ccttgggccagggactttcacttca

SEQ ID NO: 185252 - DNA, 25 bp, Artificial
  Probe
ttgggccagggactttcacttcaag

SEQ ID NO: 185253 - DNA, 25 bp, Artificial
  Probe
gcccgccttgggccagggactttca

SEQ ID NO: 185254 - DNA, 25 bp, Artificial
  Probe
gactttcacttcaagccgagtcccc

SEQ ID NO: 185255 - DNA, 25 bp, Artificial
  Probe
agcggcctcaggtggacaatcatct

SEQ ID NO: 185256 - DNA, 25 bp, Artificial
  Probe
tggacaatcatctggagagcccgcc

SEQ ID NO: 185257 - DNA, 25 bp, Artificial
  Probe
aatcatctggagagcccgccttggg

SEQ ID NO: 185258 - DNA, 25 bp, Artificial
  Probe
gggactttcacttcaagccgagtcc

SEQ ID NO: 185259 - DNA, 25 bp, Artificial
  Probe
ggctccgagccatctagcgactcgg

SEQ ID NO: 185260 - DNA, 25 bp, Artificial
  Probe
ggactttcacttcaagccgagtccc

SEQ ID NO: 185261 - DNA, 25 bp, Artificial
  Probe
caggtggacaatcatctggagagcc

SEQ ID NO: 185262 - DNA, 25 bp, Artificial
  Probe
gagcggcctcaggtggacaatcatc

SEQ ID NO: 185263 - DNA, 25 bp, Artificial
  Probe
cggcctcaggtggacaatcatctgg

SEQ ID NO: 185264 - DNA, 25 bp, Artificial
  Probe
gacaatcatctggagagcccgcctt

SEQ ID NO: 185265 - DNA, 25 bp, Artificial
  Probe
agggactttcacttcaagccgagtc

SEQ ID NO: 185266 - DNA, 25 bp, Artificial
  Probe
tcaggtggacaatcatctggagagc

SEQ ID NO: 185267 - DNA, 25 bp, Artificial
  Probe
gcgagcggcctcaggtggacaatca

SEQ ID NO: 185268 - DNA, 25 bp, Artificial
  Probe
gtggacaatcatctggagagcccgc

SEQ ID NO: 185269 - DNA, 25 bp, Artificial
  Probe
ccgagccatctagcgactcggcgag

SEQ ID NO: 185270 - DNA, 25 bp, Artificial
  Probe
cgagcggcctcaggtggacaatcat

SEQ ID NO: 185271 - DNA, 25 bp, Artificial
  Probe
acaatcatctggagagcccgccttg

SEQ ID NO: 185272 - DNA, 25 bp, Artificial
  Probe
cagggactttcacttcaagccgagt

SEQ ID NO: 185273 - DNA, 25 bp, Artificial
  Probe
gcggcctcaggtggacaatcatctg

SEQ ID NO: 185274 - DNA, 25 bp, Artificial
  Probe
gccagggactttcacttcaagccga

SEQ ID NO: 185275 - DNA, 25 bp, Artificial
  Probe
aggctccgagccatctagcgactcg

SEQ ID NO: 185276 - DNA, 25 bp, Artificial
  Probe
gcctcaggtggacaatcatctggag

SEQ ID NO: 185277 - DNA, 25 bp, Artificial
  Probe
ccagggactttcacttcaagccgag

SEQ ID NO: 185278 - DNA, 25 bp, Artificial
  Probe
tgggccagggactttcacttcaagc

SEQ ID NO: 185279 - DNA, 25 bp, Artificial
  Probe
ggccagggactttcacttcaagccg

SEQ ID NO: 185280 - DNA, 25 bp, Artificial
  Probe
atcatctggagagcccgccttgggc

SEQ ID NO: 185281 - DNA, 25 bp, Artificial
  Probe
cctcaggtggacaatcatctggaga

SEQ ID NO: 185282 - DNA, 25 bp, Artificial
  Probe
agccatctagcgactcggcgagcgg

SEQ ID NO: 185283 - DNA, 25 bp, Artificial
  Probe
ccgccttgggccagggactttcact

SEQ ID NO: 185284 - DNA, 25 bp, Artificial
  Probe
ggcctcaggtggacaatcatctgga

SEQ ID NO: 185285 - DNA, 25 bp, Artificial
  Probe
ctggagagcccgccttgggccaggg

SEQ ID NO: 185286 - DNA, 25 bp, Artificial
  Probe
ggacaatcatctggagagcccgcct

SEQ ID NO: 185287 - DNA, 25 bp, Artificial
  Probe
gggccagggactttcacttcaagcc

SEQ ID NO: 185288 - DNA, 25 bp, Artificial
  Probe
cttgggccagggactttcacttcaa

SEQ ID NO: 185289 - DNA, 25 bp, Artificial
  Probe
ggcgagcggcctcaggtggacaatc

SEQ ID NO: 185290 - DNA, 25 bp, Artificial
  Probe
aggtggacaatcatctggagagccc

SEQ ID NO: 185291 - DNA, 25 bp, Artificial
  Probe
gagccatctagcgactcggcgagcg

SEQ ID NO: 185292 - DNA, 25 bp, Artificial
  Probe
gccatctagcgactcggcgagcggc

SEQ ID NO: 185293 - DNA, 25 bp, Artificial
  Probe
caatcatctggagagcccgccttgg

SEQ ID NO: 185294 - DNA, 25 bp, Artificial
  Probe
tccctgatccgcaagcatgcgcaga

SEQ ID NO: 185295 - DNA, 25 bp, Artificial
  Probe
agtttgccatgtacccgccatcgat

SEQ ID NO: 185296 - DNA, 25 bp, Artificial
  Probe
aagagcagcacaacggctccaagtc

SEQ ID NO: 185297 - DNA, 25 bp, Artificial
  Probe
tgacctgtgaggaagccattcgggc

SEQ ID NO: 185298 - DNA, 25 bp, Artificial
  Probe
tgtctcaaagcctgccaggagcaaa

SEQ ID NO: 185299 - DNA, 25 bp, Artificial
  Probe
gcaagcatgcgcagaccttcatcgc

SEQ ID NO: 185300 - DNA, 25 bp, Artificial
  Probe
ggatgttgacctgtgaggaagccat

SEQ ID NO: 185301 - DNA, 25 bp, Artificial
  Probe
cctgccaggagcaaatcgaggctgt

SEQ ID NO: 185302 - DNA, 25 bp, Artificial
  Probe
gcttcagcaggacgaggaagtgaat

SEQ ID NO: 185303 - DNA, 25 bp, Artificial
  Probe
ctgtgaaaccccaggagctgctgga

SEQ ID NO: 185304 - DNA, 25 bp, Artificial
  Probe
tgacggagctgctggccaagatcac

SEQ ID NO: 185305 - DNA, 25 bp, Artificial
  Probe
tgaagtggaacctggctgcagtaac

SEQ ID NO: 185306 - DNA, 25 bp, Artificial
  Probe
cccctacagacgtgcgggatgttga

SEQ ID NO: 185307 - DNA, 25 bp, Artificial
  Probe
cacccctacagacgtgcgggatgtt

SEQ ID NO: 185308 - DNA, 25 bp, Artificial
  Probe
tggaagatccggaccaagccaccac

SEQ ID NO: 185309 - DNA, 25 bp, Artificial
  Probe
actcacgtgcgatgccctgacggag

SEQ ID NO: 185310 - DNA, 25 bp, Artificial
  Probe
ggagcagccatctgcgggcttcagc

SEQ ID NO: 185311 - DNA, 25 bp, Artificial
  Probe
cgtgcgatgccctgacggagctgct

SEQ ID NO: 185312 - DNA, 25 bp, Artificial
  Probe
ctgccccagcagaaggagaagctgt

SEQ ID NO: 185313 - DNA, 25 bp, Artificial
  Probe
tgggagcagccatctgcgggcttca

SEQ ID NO: 185314 - DNA, 25 bp, Artificial
  Probe
agctgtccctgatccgcaagcatgc

SEQ ID NO: 185315 - DNA, 25 bp, Artificial
  Probe
tcgatgatcgcaactggaagcgtgg

SEQ ID NO: 185316 - DNA, 25 bp, Artificial
  Probe
gagctgctggccaagatcacccaca

SEQ ID NO: 185317 - DNA, 25 bp, Artificial
  Probe
caattctgtgaaaccccaggagctg

SEQ ID NO: 185318 - DNA, 25 bp, Artificial
  Probe
ccatctgcgggcttcagcaggacga

SEQ ID NO: 185319 - DNA, 25 bp, Artificial
  Probe
aggagcaaatcgaggctgtgctgct

SEQ ID NO: 185320 - DNA, 25 bp, Artificial
  Probe
ttgagcacatcctacgcaagctgcc

SEQ ID NO: 185321 - DNA, 25 bp, Artificial
  Probe
aaagctgtgtatttacaccgacaat

SEQ ID NO: 185322 - DNA, 25 bp, Artificial
  Probe
tgaaaccccaggagctgctggagtg

SEQ ID NO: 185323 - DNA, 25 bp, Artificial
  Probe
caccgacaattctgtgaaaccccag

SEQ ID NO: 185324 - DNA, 25 bp, Artificial
  Probe
ggaacctggctgcagtaacccctca

SEQ ID NO: 185325 - DNA, 25 bp, Artificial
  Probe
tcagcaggacgaggaagtgaatgca

SEQ ID NO: 185326 - DNA, 25 bp, Artificial
  Probe
agaaggagaagctgtccctgatccg

SEQ ID NO: 185327 - DNA, 25 bp, Artificial
  Probe
cagcacaacggctccaagtctgtgg

SEQ ID NO: 185328 - DNA, 25 bp, Artificial
  Probe
gctgactgccgaaaagctgtgtatt

SEQ ID NO: 185329 - DNA, 25 bp, Artificial
  Probe
acgacttcattgagcacatcctacg

SEQ ID NO: 185330 - DNA, 25 bp, Artificial
  Probe
cccgccatcgatgatcgcaactgga

SEQ ID NO: 185331 - DNA, 25 bp, Artificial
  Probe
caaagcctgccaggagcaaatcgag

SEQ ID NO: 185332 - DNA, 25 bp, Artificial
  Probe
atgccctgacggagctgctggccaa

SEQ ID NO: 185333 - DNA, 25 bp, Artificial
  Probe
agagagaggcgtgttcgtcatctgc

SEQ ID NO: 185334 - DNA, 25 bp, Artificial
  Probe
ccacaccgatgtggattgtctcaaa

SEQ ID NO: 185335 - DNA, 25 bp, Artificial
  Probe
gaagtgaatgcactcacgtgcgatg

SEQ ID NO: 185336 - DNA, 25 bp, Artificial
  Probe
agtctgtggaagatccggaccaagc

SEQ ID NO: 185337 - DNA, 25 bp, Artificial
  Probe
catctgcgggcttcagcaggacgag

SEQ ID NO: 185338 - DNA, 25 bp, Artificial
  Probe
caactggaagcgtgggagcagccat

SEQ ID NO: 185339 - DNA, 25 bp, Artificial
  Probe
gtatttacaccgacaattctgtgaa

SEQ ID NO: 185340 - DNA, 25 bp, Artificial
  Probe
ggcaaaaagcacacccacgacctta

SEQ ID NO: 185341 - DNA, 25 bp, Artificial
  Probe
agagcagtgccgagtgaccctggct

SEQ ID NO: 185342 - DNA, 25 bp, Artificial
  Probe
ccagcagggtgaccttaagaattaa

SEQ ID NO: 185343 - DNA, 25 bp, Artificial
  Probe
cgaaactaacaactgcaaagggaag

SEQ ID NO: 185344 - DNA, 25 bp, Artificial
  Probe
cattttggatgctggtgctaaactt

SEQ ID NO: 185345 - DNA, 25 bp, Artificial
  Probe
gaaggagcccgcactgtccatcaag

SEQ ID NO: 185346 - DNA, 25 bp, Artificial
  Probe
aaacttccaagtgtcatgatttaag

SEQ ID NO: 185347 - DNA, 25 bp, Artificial
  Probe
gatgctggtgctaaacttccaagtg

SEQ ID NO: 185348 - DNA, 25 bp, Artificial
  Probe
ccaccagcagggtgaccttaagaat

SEQ ID NO: 185349 - DNA, 25 bp, Artificial
  Probe
acctgcacaggcagagagcagcctc

SEQ ID NO: 185350 - DNA, 25 bp, Artificial
  Probe
gctctctctgaaatgtgcagtaaca

SEQ ID NO: 185351 - DNA, 25 bp, Artificial
  Probe
cagcagggtgaccttaagaattaat

SEQ ID NO: 185352 - DNA, 25 bp, Artificial
  Probe
gaaactaacaactgcaaagggaagg

SEQ ID NO: 185353 - DNA, 25 bp, Artificial
  Probe
ttggatgctggtgctaaacttccaa

SEQ ID NO: 185354 - DNA, 25 bp, Artificial
  Probe
tgtccatcaagctgcgtcccgggaa

SEQ ID NO: 185355 - DNA, 25 bp, Artificial
  Probe
tgcgtcccgggaacctgcacaggca

SEQ ID NO: 185356 - DNA, 25 bp, Artificial
  Probe
gtcccgggaacctgcacaggcagag

SEQ ID NO: 185357 - DNA, 25 bp, Artificial
  Probe
tctacgaaactaacaactgcaaagg

SEQ ID NO: 185358 - DNA, 25 bp, Artificial
  Probe
cgaacagagcagtgccgagtgaccc

SEQ ID NO: 185359 - DNA, 25 bp, Artificial
  Probe
tggatgctggtgctaaacttccaag

SEQ ID NO: 185360 - DNA, 25 bp, Artificial
  Probe
tggtgctaaacttccaagtgtcatg

SEQ ID NO: 185361 - DNA, 25 bp, Artificial
  Probe
taacaactgcaaagggaaggagccc

SEQ ID NO: 185362 - DNA, 25 bp, Artificial
  Probe
ttcaccaccagcagggtgaccttaa

SEQ ID NO: 185363 - DNA, 25 bp, Artificial
  Probe
attaataccacatggggattgcccc

SEQ ID NO: 185364 - DNA, 25 bp, Artificial
  Probe
catctaagcaataaaacggaagact

SEQ ID NO: 185365 - DNA, 25 bp, Artificial
  Probe
gctaaacttccaagtgtcatgattt

SEQ ID NO: 185366 - DNA, 25 bp, Artificial
  Probe
tctctgaaatgtgcagtaacaagtt

SEQ ID NO: 185367 - DNA, 25 bp, Artificial
  Probe
caccgaacagagcagtgccgagtga

SEQ ID NO: 185368 - DNA, 25 bp, Artificial
  Probe
cttacatagctctctctgaaatgtg

SEQ ID NO: 185369 - DNA, 25 bp, Artificial
  Probe
agcagtgccgagtgaccctggctcc

SEQ ID NO: 185370 - DNA, 25 bp, Artificial
  Probe
ggagcccgcactgtccatcaagctg

SEQ ID NO: 185371 - DNA, 25 bp, Artificial
  Probe
tattaataccacatggggattgccc

SEQ ID NO: 185372 - DNA, 25 bp, Artificial
  Probe
cttccaagtgtcatgatttaagaag

SEQ ID NO: 185373 - DNA, 25 bp, Artificial
  Probe
agaatgtttactgctattctctacg

SEQ ID NO: 185374 - DNA, 25 bp, Artificial
  Probe
actgtccatcaagctgcgtcccggg

SEQ ID NO: 185375 - DNA, 25 bp, Artificial
  Probe
aactaacaactgcaaagggaaggag

SEQ ID NO: 185376 - DNA, 25 bp, Artificial
  Probe
cgggaacctgcacaggcagagagca

SEQ ID NO: 185377 - DNA, 25 bp, Artificial
  Probe
cttcaccaccagcagggtgacctta

SEQ ID NO: 185378 - DNA, 25 bp, Artificial
  Probe
ttcattttggatgctggtgctaaac

SEQ ID NO: 185379 - DNA, 25 bp, Artificial
  Probe
aaggcaaaaagcacacccacgacct

SEQ ID NO: 185380 - DNA, 25 bp, Artificial
  Probe
acatagctctctctgaaatgtgcag

SEQ ID NO: 185381 - DNA, 25 bp, Artificial
  Probe
catcaagctgcgtcccgggaacctg

SEQ ID NO: 185382 - DNA, 25 bp, Artificial
  Probe
gaatgtttactgctattctctacga

SEQ ID NO: 185383 - DNA, 25 bp, Artificial
  Probe
tacgaaactaacaactgcaaaggga

SEQ ID NO: 185384 - DNA, 25 bp, Artificial
  Probe
aacttccaagtgtcatgatttaaga

SEQ ID NO: 185385 - DNA, 25 bp, Artificial
  Probe
ccaccgaacagagcagtgccgagtg

SEQ ID NO: 185386 - DNA, 25 bp, Artificial
  Probe
agcttatttgtgacgaaggttccaa

SEQ ID NO: 185387 - DNA, 25 bp, Artificial
  Probe
ctacctccaagaagaacactgtatg

SEQ ID NO: 185388 - DNA, 25 bp, Artificial
  Probe
agaagctgtgaacactgtgatagct

SEQ ID NO: 185389 - DNA, 25 bp, Artificial
  Probe
ctatgcaatggctttttaaggaaca

SEQ ID NO: 185390 - DNA, 25 bp, Artificial
  Probe
ttaatagtttgttggcccaactcag

SEQ ID NO: 185391 - DNA, 25 bp, Artificial
  Probe
aagctgtgaacactgtgatagctcg

SEQ ID NO: 185392 - DNA, 25 bp, Artificial
  Probe
cagtttatcaggacaaattttagct

SEQ ID NO: 185393 - DNA, 25 bp, Artificial
  Probe
agcttgtttgtcatggcacaaatgt

SEQ ID NO: 185394 - DNA, 25 bp, Artificial
  Probe
gttggcccaactcagttctttccaa

SEQ ID NO: 185395 - DNA, 25 bp, Artificial
  Probe
tttagcttgtttgtcatggcacaaa

SEQ ID NO: 185396 - DNA, 25 bp, Artificial
  Probe
gtttgaacagtttccacacaaccga

SEQ ID NO: 185397 - DNA, 25 bp, Artificial
  Probe
tttgtcatggcacaaatgtctggaa

SEQ ID NO: 185398 - DNA, 25 bp, Artificial
  Probe
gcttatttgtgacgaaggttccaaa

SEQ ID NO: 185399 - DNA, 25 bp, Artificial
  Probe
ctgtgaacactgtgatagctcgggc

SEQ ID NO: 185400 - DNA, 25 bp, Artificial
  Probe
cttaatagtttgttggcccaactca

SEQ ID NO: 185401 - DNA, 25 bp, Artificial
  Probe
acactgtgatagctcgggctggagc

SEQ ID NO: 185402 - DNA, 25 bp, Artificial
  Probe
tgagcttatttgtgacgaaggttcc

SEQ ID NO: 185403 - DNA, 25 bp, Artificial
  Probe
atggcacaaatgtctggaaaagctt

SEQ ID NO: 185404 - DNA, 25 bp, Artificial
  Probe
ggttccaaagtatcagataccacac

SEQ ID NO: 185405 - DNA, 25 bp, Artificial
  Probe
tagcttgtttgtcatggcacaaatg

SEQ ID NO: 185406 - DNA, 25 bp, Artificial
  Probe
agctgtgaacactgtgatagctcgg

SEQ ID NO: 185407 - DNA, 25 bp, Artificial
  Probe
acctccaagaagaacactgtatgag

SEQ ID NO: 185408 - DNA, 25 bp, Artificial
  Probe
tgtcatggcacaaatgtctggaaaa

SEQ ID NO: 185409 - DNA, 25 bp, Artificial
  Probe
caaattttagcttgtttgtcatggc

SEQ ID NO: 185410 - DNA, 25 bp, Artificial
  Probe
aaggttccaaagtatcagataccac

SEQ ID NO: 185411 - DNA, 25 bp, Artificial
  Probe
tgttggcccaactcagttctttcca

SEQ ID NO: 185412 - DNA, 25 bp, Artificial
  Probe
gtttgttggcccaactcagttcttt

SEQ ID NO: 185413 - DNA, 25 bp, Artificial
  Probe
tttgttggcccaactcagttctttc

SEQ ID NO: 185414 - DNA, 25 bp, Artificial
  Probe
aacactgtatgagcttatttgtgac

SEQ ID NO: 185415 - DNA, 25 bp, Artificial
  Probe
cactgtatgagcttatttgtgacga

SEQ ID NO: 185416 - DNA, 25 bp, Artificial
  Probe
aacactgtgatagctcgggctggag

SEQ ID NO: 185417 - DNA, 25 bp, Artificial
  Probe
tagaagctgtgaacactgtgatagc

SEQ ID NO: 185418 - DNA, 25 bp, Artificial
  Probe
gagcttatttgtgacgaaggttcca

SEQ ID NO: 185419 - DNA, 25 bp, Artificial
  Probe
attttagcttgtttgtcatggcaca

SEQ ID NO: 185420 - DNA, 25 bp, Artificial
  Probe
gtttgtcatggcacaaatgtctgga

SEQ ID NO: 185421 - DNA, 25 bp, Artificial
  Probe
ttgtgacgaaggttccaaagtatca

SEQ ID NO: 185422 - DNA, 25 bp, Artificial
  Probe
gcttgtttgtcatggcacaaatgtc

SEQ ID NO: 185423 - DNA, 25 bp, Artificial
  Probe
ggcccaactcagttctttccaactg

SEQ ID NO: 185424 - DNA, 25 bp, Artificial
  Probe
ctccaagaagaacactgtatgagct

SEQ ID NO: 185425 - DNA, 25 bp, Artificial
  Probe
tatgcaatggctttttaaggaacac

SEQ ID NO: 185426 - DNA, 25 bp, Artificial
  Probe
aattttagcttgtttgtcatggcac

SEQ ID NO: 185427 - DNA, 25 bp, Artificial
  Probe
agtttccacacaaccgaactcctgg

SEQ ID NO: 185428 - DNA, 25 bp, Artificial
  Probe
cagaagatcagtttatcaggacaaa

SEQ ID NO: 185429 - DNA, 25 bp, Artificial
  Probe
gctgtgaacactgtgatagctcggg

SEQ ID NO: 185430 - DNA, 25 bp, Artificial
  Probe
tttgtgacgaaggttccaaagtatc

SEQ ID NO: 185431 - DNA, 25 bp, Artificial
  Probe
tgcaatggctttttaaggaacacag

SEQ ID NO: 185432 - DNA, 25 bp, Artificial
  Probe
agtccatagagaactatgtgcagat

SEQ ID NO: 185433 - DNA, 25 bp, Artificial
  Probe
gagatgttttgtcctaccacattcc

SEQ ID NO: 185434 - DNA, 25 bp, Artificial
  Probe
tgcagattgatatcaccagagtatt

SEQ ID NO: 185435 - DNA, 25 bp, Artificial
  Probe
gtgtgggaacacaccttcacaccgc

SEQ ID NO: 185436 - DNA, 25 bp, Artificial
  Probe
tcacaccgcgggagtacttgacttc

SEQ ID NO: 185437 - DNA, 25 bp, Artificial
  Probe
ctacacaggagattgcaaagccatc

SEQ ID NO: 185438 - DNA, 25 bp, Artificial
  Probe
acattcaatgcagaggaatactctg

SEQ ID NO: 185439 - DNA, 25 bp, Artificial
  Probe
tcctgcaatgaaagcatttgtgaat

SEQ ID NO: 185440 - DNA, 25 bp, Artificial
  Probe
ctaaatcaattgttggaatgaccat

SEQ ID NO: 185441 - DNA, 25 bp, Artificial
  Probe
cggagttatgcttctccataaatta

SEQ ID NO: 185442 - DNA, 25 bp, Artificial
  Probe
ttgatgttctaacacaaatgaggac

SEQ ID NO: 185443 - DNA, 25 bp, Artificial
  Probe
acaagttgctgaacttaagaaactt

SEQ ID NO: 185444 - DNA, 25 bp, Artificial
  Probe
cagattgatatcaccagagtattta

SEQ ID NO: 185445 - DNA, 25 bp, Artificial
  Probe
aacaggctggtagtgaccaaccttg

SEQ ID NO: 185446 - DNA, 25 bp, Artificial
  Probe
attgatcctgccttagtagtagctc

SEQ ID NO: 185447 - DNA, 25 bp, Artificial
  Probe
aagattatcatctgttgacagtgtc

SEQ ID NO: 185448 - DNA, 25 bp, Artificial
  Probe
gcaaagccatcagaacttctgacaa

SEQ ID NO: 185449 - DNA, 25 bp, Artificial
  Probe
attaacattcaatgcagaggaatac

SEQ ID NO: 185450 - DNA, 25 bp, Artificial
  Probe
gaaccaaccatcacgagtctgtata

SEQ ID NO: 185451 - DNA, 25 bp, Artificial
  Probe
ggcacaagaagcactgagagatgtt

SEQ ID NO: 185452 - DNA, 25 bp, Artificial
  Probe
ggctgcactctttaaaagattatca

SEQ ID NO: 185453 - DNA, 25 bp, Artificial
  Probe
aactatgtgcagattgatatcacca

SEQ ID NO: 185454 - DNA, 25 bp, Artificial
  Probe
catctgttgacagtgtcttgaaaag

SEQ ID NO: 185455 - DNA, 25 bp, Artificial
  Probe
gtataatcaggctacacaggagatt

SEQ ID NO: 185456 - DNA, 25 bp, Artificial
  Probe
tatacaaactggtacttggaaacgt

SEQ ID NO: 185457 - DNA, 25 bp, Artificial
  Probe
gaatatatgactgtactccagtcca

SEQ ID NO: 185458 - DNA, 25 bp, Artificial
  Probe
gtgaatttacccacagaaaatgaat

SEQ ID NO: 185459 - DNA, 25 bp, Artificial
  Probe
ggcccatatgggatgaagttcctaa

SEQ ID NO: 185460 - DNA, 25 bp, Artificial
  Probe
taaattatgttccaaacatggcagt

SEQ ID NO: 185461 - DNA, 25 bp, Artificial
  Probe
tccgattcactaaatcaattgttgg

SEQ ID NO: 185462 - DNA, 25 bp, Artificial
  Probe
ggatgaagttcctaagcgagagtct

SEQ ID NO: 185463 - DNA, 25 bp, Artificial
  Probe
gggaacacaccttcacaccgcggga

SEQ ID NO: 185464 - DNA, 25 bp, Artificial
  Probe
tgaccatgtataatcaggctacaca

SEQ ID NO: 185465 - DNA, 25 bp, Artificial
  Probe
gaacttctgacaagcgtaagagaat

SEQ ID NO: 185466 - DNA, 25 bp, Artificial
  Probe
gacttctcatctggaaatccgattc

SEQ ID NO: 185467 - DNA, 25 bp, Artificial
  Probe
atagcttattttcctgcaatgaaag

SEQ ID NO: 185468 - DNA, 25 bp, Artificial
  Probe
gaaatgaggtcgttgtcagagctct

SEQ ID NO: 185469 - DNA, 25 bp, Artificial
  Probe
aacacaacacttagacagccatgga

SEQ ID NO: 185470 - DNA, 25 bp, Artificial
  Probe
aatgaccatgtataatcaggctaca

SEQ ID NO: 185471 - DNA, 25 bp, Artificial
  Probe
ccatcacgagtctgtatacaaactg

SEQ ID NO: 185472 - DNA, 25 bp, Artificial
  Probe
aacatggcagtgtgggaacacacct

SEQ ID NO: 185473 - DNA, 25 bp, Artificial
  Probe
ttatccttccggtcactggcacaag

SEQ ID NO: 185474 - DNA, 25 bp, Artificial
  Probe
tggccatatagcttattttcctgca

SEQ ID NO: 185475 - DNA, 25 bp, Artificial
  Probe
agagatgttttgtcctaccacattc

SEQ ID NO: 185476 - DNA, 25 bp, Artificial
  Probe
tattaagacaagtcagcaatggcca

SEQ ID NO: 185477 - DNA, 25 bp, Artificial
  Probe
cgagagtcttatgtggcatatttca

SEQ ID NO: 185478 - DNA, 25 bp, Artificial
  Probe
ttttatgccactgaagtggagccgt

SEQ ID NO: 185479 - DNA, 25 bp, Artificial
  Probe
gcagaaatggcaagccctcgcagac

SEQ ID NO: 185480 - DNA, 25 bp, Artificial
  Probe
aatggcaagccctcgcagaccagca

SEQ ID NO: 185481 - DNA, 25 bp, Artificial
  Probe
tgcccctgctggatggctgcaggaa

SEQ ID NO: 185482 - DNA, 25 bp, Artificial
  Probe
cctgacccacgtctcagaagactgt

SEQ ID NO: 185483 - DNA, 25 bp, Artificial
  Probe
aactgcattcccacacgcagcttgg

SEQ ID NO: 185484 - DNA, 25 bp, Artificial
  Probe
cacgcagcttggttatgcttgggga

SEQ ID NO: 185485 - DNA, 25 bp, Artificial
  Probe
actgtttgcccctgctggatggctg

SEQ ID NO: 185486 - DNA, 25 bp, Artificial
  Probe
ttcgaactgccctaggcctggtttc

SEQ ID NO: 185487 - DNA, 25 bp, Artificial
  Probe
ctgccctaggcctggtttcgccata

SEQ ID NO: 185488 - DNA, 25 bp, Artificial
  Probe
ctctaacactttgataagagtggtg

SEQ ID NO: 185489 - DNA, 25 bp, Artificial
  Probe
gggtgttcgaactgccctaggcctg

SEQ ID NO: 185490 - DNA, 25 bp, Artificial
  Probe
tgctacctactttccgtgcttttgt

SEQ ID NO: 185491 - DNA, 25 bp, Artificial
  Probe
agaccagcaggagaagacgctcctt

SEQ ID NO: 185492 - DNA, 25 bp, Artificial
  Probe
ttaggggcgaactgaatgtgtcctg

SEQ ID NO: 185493 - DNA, 25 bp, Artificial
  Probe
tgtttcagagattgctacctacttt

SEQ ID NO: 185494 - DNA, 25 bp, Artificial
  Probe
gaataaccggcctttgtgtttctga

SEQ ID NO: 185495 - DNA, 25 bp, Artificial
  Probe
tgtatgaggccctgacccacgtctc

SEQ ID NO: 185496 - DNA, 25 bp, Artificial
  Probe
taaagccatcctgaaattaacgctg

SEQ ID NO: 185497 - DNA, 25 bp, Artificial
  Probe
gaagtggagccgtcagtcatgccca

SEQ ID NO: 185498 - DNA, 25 bp, Artificial
  Probe
ctcgagtgcactttgccactgctgt

SEQ ID NO: 185499 - DNA, 25 bp, Artificial
  Probe
tcgaactgccctaggcctggtttcg

SEQ ID NO: 185500 - DNA, 25 bp, Artificial
  Probe
gtttctgagtcaccagtctttcaaa

SEQ ID NO: 185501 - DNA, 25 bp, Artificial
  Probe
cgttaggaatcgttctcggaagtgg

SEQ ID NO: 185502 - DNA, 25 bp, Artificial
  Probe
gcactttgccactgctgtattttat

SEQ ID NO: 185503 - DNA, 25 bp, Artificial
  Probe
ccactgaagtggagccgtcagtcat

SEQ ID NO: 185504 - DNA, 25 bp, Artificial
  Probe
tgcagctgtatgaggccctgaccca

SEQ ID NO: 185505 - DNA, 25 bp, Artificial
  Probe
attcccacacgcagcttggttatgc

SEQ ID NO: 185506 - DNA, 25 bp, Artificial
  Probe
ccaccgggtgttcgaactgccctag

SEQ ID NO: 185507 - DNA, 25 bp, Artificial
  Probe
ctgctggatggctgcaggaagaaca

SEQ ID NO: 185508 - DNA, 25 bp, Artificial
  Probe
gagaagacgctccttaatggggaga

SEQ ID NO: 185509 - DNA, 25 bp, Artificial
  Probe
gcgaactgaatgtgtcctgggacat

SEQ ID NO: 185510 - DNA, 25 bp, Artificial
  Probe
tatgaggccctgacccacgtctcag

SEQ ID NO: 185511 - DNA, 25 bp, Artificial
  Probe
gcccactctaacactttgataagag

SEQ ID NO: 185512 - DNA, 25 bp, Artificial
  Probe
tggtgtaaactgcattcccacacgc

SEQ ID NO: 185513 - DNA, 25 bp, Artificial
  Probe
gtgcactttgccactgctgtatttt

SEQ ID NO: 185514 - DNA, 25 bp, Artificial
  Probe
cctggtttcgccatacactatgcag

SEQ ID NO: 185515 - DNA, 25 bp, Artificial
  Probe
gagccgtcagtcatgcccactctaa

SEQ ID NO: 185516 - DNA, 25 bp, Artificial
  Probe
tatttttgcacaacttctgagagca

SEQ ID NO: 185517 - DNA, 25 bp, Artificial
  Probe
tgtcctgggacatttaaagccatcc

SEQ ID NO: 185518 - DNA, 25 bp, Artificial
  Probe
cagaagactgtttgcccctgctgga

SEQ ID NO: 185519 - DNA, 25 bp, Artificial
  Probe
ttcatagacgccatctgcttgcagc

SEQ ID NO: 185520 - DNA, 25 bp, Artificial
  Probe
ctaggcctggtttcgccatacacta

SEQ ID NO: 185521 - DNA, 25 bp, Artificial
  Probe
aggagaagacgctccttaatgggga

SEQ ID NO: 185522 - DNA, 25 bp, Artificial
  Probe
ttgggttcatagacgccatctgctt

SEQ ID NO: 185523 - DNA, 25 bp, Artificial
  Probe
cttctgagagcatgaggtgtttcag

SEQ ID NO: 185524 - DNA, 25 bp, Artificial
  Probe
tttgttattgatatctcggatacaa

SEQ ID NO: 185525 - DNA, 25 bp, Artificial
  Probe
ttcatcagccggattttgttattga

SEQ ID NO: 185526 - DNA, 25 bp, Artificial
  Probe
cctctgacgaatgggtatattgaaa

SEQ ID NO: 185527 - DNA, 25 bp, Artificial
  Probe
cttccagaccgcggcctaataatga

SEQ ID NO: 185528 - DNA, 25 bp, Artificial
  Probe
tcagctaacgcttccagaccgcggc

SEQ ID NO: 185529 - DNA, 25 bp, Artificial
  Probe
ttccagaccgcggcctaataatgag

SEQ ID NO: 185530 - DNA, 25 bp, Artificial
  Probe
atcagaatctgtcggccaaaagcgg

SEQ ID NO: 185531 - DNA, 25 bp, Artificial
  Probe
agtcagcaaggtttactattatatg

SEQ ID NO: 185532 - DNA, 25 bp, Artificial
  Probe
tccggatcacggcaatgcggctgca

SEQ ID NO: 185533 - DNA, 25 bp, Artificial
  Probe
gaattcagctaacgcttccagaccg

SEQ ID NO: 185534 - DNA, 25 bp, Artificial
  Probe
ttgttattgatatctcggatacaat

SEQ ID NO: 185535 - DNA, 25 bp, Artificial
  Probe
gtcaattgtcactgtcatcagaatc

SEQ ID NO: 185536 - DNA, 25 bp, Artificial
  Probe
tattgaaatcgttgaagcgagagaa

SEQ ID NO: 185537 - DNA, 25 bp, Artificial
  Probe
gttattgatatctcggatacaatag

SEQ ID NO: 185538 - DNA, 25 bp, Artificial
  Probe
agaattcagctaacgcttccagacc

SEQ ID NO: 185539 - DNA, 25 bp, Artificial
  Probe
agctgaagcagcccgcatattaggc

SEQ ID NO: 185540 - DNA, 25 bp, Artificial
  Probe
actcctctgacgaatgggtatattg

SEQ ID NO: 185541 - DNA, 25 bp, Artificial
  Probe
atgatatgcgatttgacagaagcgg

SEQ ID NO: 185542 - DNA, 25 bp, Artificial
  Probe
gcagctgaagcagcccgcatattag

SEQ ID NO: 185543 - DNA, 25 bp, Artificial
  Probe
atcagccggattttgttattgatat

SEQ ID NO: 185544 - DNA, 25 bp, Artificial
  Probe
agaccgcggcctaataatgagtgat

SEQ ID NO: 185545 - DNA, 25 bp, Artificial
  Probe
gaagcagctgaagcagcccgcatat

SEQ ID NO: 185546 - DNA, 25 bp, Artificial
  Probe
aagccttccggcgcataaagtcagc

SEQ ID NO: 185547 - DNA, 25 bp, Artificial
  Probe
ccgcatattaggcgcagataaaaga

SEQ ID NO: 185548 - DNA, 25 bp, Artificial
  Probe
agcccgcatattaggcgcagataaa

SEQ ID NO: 185549 - DNA, 25 bp, Artificial
  Probe
ccatccggatcacggcaatgcggct

SEQ ID NO: 185550 - DNA, 25 bp, Artificial
  Probe
atattgaaatcgttgaagcgagaga

SEQ ID NO: 185551 - DNA, 25 bp, Artificial
  Probe
tcatcagccggattttgttattgat

SEQ ID NO: 185552 - DNA, 25 bp, Artificial
  Probe
ctgaagcagcccgcatattaggcgc

SEQ ID NO: 185553 - DNA, 25 bp, Artificial
  Probe
cggatcacggcaatgcggctgcact

SEQ ID NO: 185554 - DNA, 25 bp, Artificial
  Probe
gacagaagcggaactctcttctaac

SEQ ID NO: 185555 - DNA, 25 bp, Artificial
  Probe
tccagaccgcggcctaataatgagt

SEQ ID NO: 185556 - DNA, 25 bp, Artificial
  Probe
tgatcaggcaattcggtcaattgtc

SEQ ID NO: 185557 - DNA, 25 bp, Artificial
  Probe
gcccgcatattaggcgcagataaaa

SEQ ID NO: 185558 - DNA, 25 bp, Artificial
  Probe
attgatatctcggatacaatagagg

SEQ ID NO: 185559 - DNA, 25 bp, Artificial
  Probe
cttccggcgcataaagtcagcaagg

SEQ ID NO: 185560 - DNA, 25 bp, Artificial
  Probe
atatgcgatttgacagaagcggaac

SEQ ID NO: 185561 - DNA, 25 bp, Artificial
  Probe
catccggatcacggcaatgcggctg

SEQ ID NO: 185562 - DNA, 25 bp, Artificial
  Probe
tcacggcaatgcggctgcactggtg

SEQ ID NO: 185563 - DNA, 25 bp, Artificial
  Probe
tcatcagaatctgtcggccaaaagc

SEQ ID NO: 185564 - DNA, 25 bp, Artificial
  Probe
catattaggcgcagataaaagaatt

SEQ ID NO: 185565 - DNA, 25 bp, Artificial
  Probe
cagccggattttgttattgatatct

SEQ ID NO: 185566 - DNA, 25 bp, Artificial
  Probe
catcagaatctgtcggccaaaagcg

SEQ ID NO: 185567 - DNA, 25 bp, Artificial
  Probe
tgatatctcggatacaatagaggca

SEQ ID NO: 185568 - DNA, 25 bp, Artificial
  Probe
tgagtgatcaggcaattcggtcaat

SEQ ID NO: 185569 - DNA, 25 bp, Artificial
  Probe
caattcggtcaattgtcactgtcat

SEQ ID NO: 185570 - DNA, 25 bp, Artificial
  Probe
attcggtcaattgtcactgtcatca

SEQ ID NO: 185571 - DNA, 25 bp, Artificial
  Probe
ttcggtcaattgtcactgtcatcag

SEQ ID NO: 185572 - DNA, 25 bp, Artificial
  Probe
gagtgatcaggcaattcggtcaatt

SEQ ID NO: 185573 - DNA, 25 bp, Artificial
  Probe
ctactcctctgacgaatgggtatat

SEQ ID NO: 185574 - DNA, 25 bp, Artificial
  Probe
tcctctgacgaatgggtatattgaa

SEQ ID NO: 185575 - DNA, 25 bp, Artificial
  Probe
tttctactcctctgacgaatgggta

SEQ ID NO: 185576 - DNA, 25 bp, Artificial
  Probe
tgaaatcgttgaagcgagagaaaag

SEQ ID NO: 185577 - DNA, 25 bp, Artificial
  Probe
agtgatcaggcaattcggtcaattg

SEQ ID NO: 185578 - DNA, 25 bp, Artificial
  Probe
tactcctctgacgaatgggtatatt

SEQ ID NO: 185579 - DNA, 25 bp, Artificial
  Probe
gtcactgtcatcagaatctgtcggc

SEQ ID NO: 185580 - DNA, 25 bp, Artificial
  Probe
tgcactggtggaagaagcgatcttt

SEQ ID NO: 185581 - DNA, 25 bp, Artificial
  Probe
acggcaatgcggctgcactggtgga

SEQ ID NO: 185582 - DNA, 25 bp, Artificial
  Probe
gatcacggcaatgcggctgcactgg

SEQ ID NO: 185583 - DNA, 25 bp, Artificial
  Probe
ttgtcactgtcatcagaatctgtcg

SEQ ID NO: 185584 - DNA, 25 bp, Artificial
  Probe
ggatcgccatccggatcacggcaat

SEQ ID NO: 185585 - DNA, 25 bp, Artificial
  Probe
agaagcagctgaagcagcccgcata

SEQ ID NO: 185586 - DNA, 25 bp, Artificial
  Probe
tcggtcaattgtcactgtcatcaga

SEQ ID NO: 185587 - DNA, 25 bp, Artificial
  Probe
ttctactcctctgacgaatgggtat

SEQ ID NO: 185588 - DNA, 25 bp, Artificial
  Probe
gctgcactggtggaagaagcgatct

SEQ ID NO: 185589 - DNA, 25 bp, Artificial
  Probe
atgcggctgcactggtggaagaagc

SEQ ID NO: 185590 - DNA, 25 bp, Artificial
  Probe
actgtcatcagaatctgtcggccaa

SEQ ID NO: 185591 - DNA, 25 bp, Artificial
  Probe
gctaacgcttccagaccgcggccta

SEQ ID NO: 185592 - DNA, 25 bp, Artificial
  Probe
agcagcccgcatattaggcgcagat

SEQ ID NO: 185593 - DNA, 25 bp, Artificial
  Probe
tcagaatctgtcggccaaaagcggt

SEQ ID NO: 185594 - DNA, 25 bp, Artificial
  Probe
ctgtcatcagaatctgtcggccaaa

SEQ ID NO: 185595 - DNA, 25 bp, Artificial
  Probe
atcacggcaatgcggctgcactggt

SEQ ID NO: 185596 - DNA, 25 bp, Artificial
  Probe
attgtcactgtcatcagaatctgtc

SEQ ID NO: 185597 - DNA, 25 bp, Artificial
  Probe
accgcggcctaataatgagtgatca

SEQ ID NO: 185598 - DNA, 25 bp, Artificial
  Probe
aggatcgccatccggatcacggcaa

SEQ ID NO: 185599 - DNA, 25 bp, Artificial
  Probe
tccggcgcataaagtcagcaaggtt

SEQ ID NO: 185600 - DNA, 25 bp, Artificial
  Probe
ttcagctaacgcttccagaccgcgg

SEQ ID NO: 185601 - DNA, 25 bp, Artificial
  Probe
agcagctgaagcagcccgcatatta

SEQ ID NO: 185602 - DNA, 25 bp, Artificial
  Probe
aatgatatgcgatttgacagaagcg

SEQ ID NO: 185603 - DNA, 25 bp, Artificial
  Probe
gtcatcagaatctgtcggccaaaag

SEQ ID NO: 185604 - DNA, 25 bp, Artificial
  Probe
attcagctaacgcttccagaccgcg

SEQ ID NO: 185605 - DNA, 25 bp, Artificial
  Probe
gcaatgcggctgcactggtggaaga

SEQ ID NO: 185606 - DNA, 25 bp, Artificial
  Probe
ggtcaattgtcactgtcatcagaat

SEQ ID NO: 185607 - DNA, 25 bp, Artificial
  Probe
aattgtcactgtcatcagaatctgt

SEQ ID NO: 185608 - DNA, 25 bp, Artificial
  Probe
cactgtcatcagaatctgtcggcca

SEQ ID NO: 185609 - DNA, 25 bp, Artificial
  Probe
aaaggatcgccatccggatcacggc

SEQ ID NO: 185610 - DNA, 25 bp, Artificial
  Probe
gaaatcgttgaagcgagagaaaagc

SEQ ID NO: 185611 - DNA, 25 bp, Artificial
  Probe
atatctcggatacaatagaggcaaa

SEQ ID NO: 185612 - DNA, 25 bp, Artificial
  Probe
atgcgatttgacagaagcggaactc

SEQ ID NO: 185613 - DNA, 25 bp, Artificial
  Probe
gccttccggcgcataaagtcagcaa

SEQ ID NO: 185614 - DNA, 25 bp, Artificial
  Probe
gatcgccatccggatcacggcaatg

SEQ ID NO: 185615 - DNA, 25 bp, Artificial
  Probe
ggctgcactggtggaagaagcgatc

SEQ ID NO: 185616 - DNA, 25 bp, Artificial
  Probe
aagcagcccgcatattaggcgcaga

SEQ ID NO: 185617 - DNA, 25 bp, Artificial
  Probe
gatatctcggatacaatagaggcaa

SEQ ID NO: 185618 - DNA, 25 bp, Artificial
  Probe
cagaccgcggcctaataatgagtga

SEQ ID NO: 185619 - DNA, 25 bp, Artificial
  Probe
tcaattgtcactgtcatcagaatct

SEQ ID NO: 185620 - DNA, 25 bp, Artificial
  Probe
atctcggatacaatagaggcaaaga

SEQ ID NO: 185621 - DNA, 25 bp, Artificial
  Probe
aatgcggctgcactggtggaagaag

SEQ ID NO: 185622 - DNA, 25 bp, Artificial
  Probe
gattccgtttctactcctctgacga

SEQ ID NO: 185623 - DNA, 25 bp, Artificial
  Probe
ccttccggcgcataaagtcagcaag

SEQ ID NO: 185624 - DNA, 25 bp, Artificial
  Probe
ggcaattcggtcaattgtcactgtc

SEQ ID NO: 185625 - DNA, 25 bp, Artificial
  Probe
gctgaagcagcccgcatattaggcg

SEQ ID NO: 185626 - DNA, 25 bp, Artificial
  Probe
gcagcccgcatattaggcgcagata

SEQ ID NO: 185627 - DNA, 25 bp, Artificial
  Probe
ccggatcacggcaatgcggctgcac

SEQ ID NO: 185628 - DNA, 25 bp, Artificial
  Probe
ttttgttattgatatctcggataca

SEQ ID NO: 185629 - DNA, 25 bp, Artificial
  Probe
gcaattcggtcaattgtcactgtca

SEQ ID NO: 185630 - DNA, 25 bp, Artificial
  Probe
tgaagcagcccgcatattaggcgca

SEQ ID NO: 185631 - DNA, 25 bp, Artificial
  Probe
tttcatcagccggattttgttattg

SEQ ID NO: 185632 - DNA, 25 bp, Artificial
  Probe
tttgacagaagcggaactctcttct

SEQ ID NO: 185633 - DNA, 25 bp, Artificial
  Probe
gatcaggcaattcggtcaattgtca

SEQ ID NO: 185634 - DNA, 25 bp, Artificial
  Probe
atatgcgatttgacagaagcggaac

SEQ ID NO: 185635 - DNA, 25 bp, Artificial
  Probe
cactgtcatcagaatctgtcggcca

SEQ ID NO: 185636 - DNA, 25 bp, Artificial
  Probe
ttctactcctctgacgaatgggtat

SEQ ID NO: 185637 - DNA, 25 bp, Artificial
  Probe
atgcgatttgacagaagcggaactc

SEQ ID NO: 185638 - DNA, 25 bp, Artificial
  Probe
actgtcatcagaatctgtcggccaa

SEQ ID NO: 185639 - DNA, 25 bp, Artificial
  Probe
ctactcctctgacgaatgggtatat

SEQ ID NO: 185640 - DNA, 25 bp, Artificial
  Probe
tttgacagaagcggaactctcttct

SEQ ID NO: 185641 - DNA, 25 bp, Artificial
  Probe
ctgtcatcagaatctgtcggccaaa

SEQ ID NO: 185642 - DNA, 25 bp, Artificial
  Probe
tactcctctgacgaatgggtatatt

SEQ ID NO: 185643 - DNA, 25 bp, Artificial
  Probe
gacagaagcggaactctcttctaac

SEQ ID NO: 185644 - DNA, 25 bp, Artificial
  Probe
gtcatcagaatctgtcggccaaaag

SEQ ID NO: 185645 - DNA, 25 bp, Artificial
  Probe
actcctctgacgaatgggtatattg

SEQ ID NO: 185646 - DNA, 25 bp, Artificial
  Probe
agaagcagctgaagcagcccgcata

SEQ ID NO: 185647 - DNA, 25 bp, Artificial
  Probe
tcatcagaatctgtcggccaaaagc

SEQ ID NO: 185648 - DNA, 25 bp, Artificial
  Probe
tcctctgacgaatgggtatattgaa

SEQ ID NO: 185649 - DNA, 25 bp, Artificial
  Probe
gaagcagctgaagcagcccgcatat

SEQ ID NO: 185650 - DNA, 25 bp, Artificial
  Probe
catcagaatctgtcggccaaaagcg

SEQ ID NO: 185651 - DNA, 25 bp, Artificial
  Probe
cctctgacgaatgggtatattgaaa

SEQ ID NO: 185652 - DNA, 25 bp, Artificial
  Probe
agcagctgaagcagcccgcatatta

SEQ ID NO: 185653 - DNA, 25 bp, Artificial
  Probe
atcagaatctgtcggccaaaagcgg

SEQ ID NO: 185654 - DNA, 25 bp, Artificial
  Probe
atattgaaatcgttgaagcgagaga

SEQ ID NO: 185655 - DNA, 25 bp, Artificial
  Probe
gcagctgaagcagcccgcatattag

SEQ ID NO: 185656 - DNA, 25 bp, Artificial
  Probe
tcagaatctgtcggccaaaagcggt

SEQ ID NO: 185657 - DNA, 25 bp, Artificial
  Probe
tattgaaatcgttgaagcgagagaa

SEQ ID NO: 185658 - DNA, 25 bp, Artificial
  Probe
agctgaagcagcccgcatattaggc

SEQ ID NO: 185659 - DNA, 25 bp, Artificial
  Probe
aaaggatcgccatccggatcacggc

SEQ ID NO: 185660 - DNA, 25 bp, Artificial
  Probe
tgaaatcgttgaagcgagagaaaag

SEQ ID NO: 185661 - DNA, 25 bp, Artificial
  Probe
gctgaagcagcccgcatattaggcg

SEQ ID NO: 185662 - DNA, 25 bp, Artificial
  Probe
aggatcgccatccggatcacggcaa

SEQ ID NO: 185663 - DNA, 25 bp, Artificial
  Probe
gaaatcgttgaagcgagagaaaagc

SEQ ID NO: 185664 - DNA, 25 bp, Artificial
  Probe
ctgaagcagcccgcatattaggcgc

SEQ ID NO: 185665 - DNA, 25 bp, Artificial
  Probe
ggatcgccatccggatcacggcaat

SEQ ID NO: 185666 - DNA, 25 bp, Artificial
  Probe
tgaagcagcccgcatattaggcgca

SEQ ID NO: 185667 - DNA, 25 bp, Artificial
  Probe
gatcgccatccggatcacggcaatg

SEQ ID NO: 185668 - DNA, 25 bp, Artificial
  Probe
aagcagcccgcatattaggcgcaga

SEQ ID NO: 185669 - DNA, 25 bp, Artificial
  Probe
ccatccggatcacggcaatgcggct

SEQ ID NO: 185670 - DNA, 25 bp, Artificial
  Probe
agcagcccgcatattaggcgcagat

SEQ ID NO: 185671 - DNA, 25 bp, Artificial
  Probe
catccggatcacggcaatgcggctg

SEQ ID NO: 185672 - DNA, 25 bp, Artificial
  Probe
gcagcccgcatattaggcgcagata

SEQ ID NO: 185673 - DNA, 25 bp, Artificial
  Probe
tccggatcacggcaatgcggctgca

SEQ ID NO: 185674 - DNA, 25 bp, Artificial
  Probe
agcccgcatattaggcgcagataaa

SEQ ID NO: 185675 - DNA, 25 bp, Artificial
  Probe
ccggatcacggcaatgcggctgcac

SEQ ID NO: 185676 - DNA, 25 bp, Artificial
  Probe
gcccgcatattaggcgcagataaaa

SEQ ID NO: 185677 - DNA, 25 bp, Artificial
  Probe
cggatcacggcaatgcggctgcact

SEQ ID NO: 185678 - DNA, 25 bp, Artificial
  Probe
ccgcatattaggcgcagataaaaga

SEQ ID NO: 185679 - DNA, 25 bp, Artificial
  Probe
gatcacggcaatgcggctgcactgg

SEQ ID NO: 185680 - DNA, 25 bp, Artificial
  Probe
catattaggcgcagataaaagaatt

SEQ ID NO: 185681 - DNA, 25 bp, Artificial
  Probe
atcacggcaatgcggctgcactggt

SEQ ID NO: 185682 - DNA, 25 bp, Artificial
  Probe
agaattcagctaacgcttccagacc

SEQ ID NO: 185683 - DNA, 25 bp, Artificial
  Probe
tcacggcaatgcggctgcactggtg

SEQ ID NO: 185684 - DNA, 25 bp, Artificial
  Probe
gaattcagctaacgcttccagaccg

SEQ ID NO: 185685 - DNA, 25 bp, Artificial
  Probe
acggcaatgcggctgcactggtgga

SEQ ID NO: 185686 - DNA, 25 bp, Artificial
  Probe
attcagctaacgcttccagaccgcg

SEQ ID NO: 185687 - DNA, 25 bp, Artificial
  Probe
gcaatgcggctgcactggtggaaga

SEQ ID NO: 185688 - DNA, 25 bp, Artificial
  Probe
ttcagctaacgcttccagaccgcgg

SEQ ID NO: 185689 - DNA, 25 bp, Artificial
  Probe
aatgcggctgcactggtggaagaag

SEQ ID NO: 185690 - DNA, 25 bp, Artificial
  Probe
tcagctaacgcttccagaccgcggc

SEQ ID NO: 185691 - DNA, 25 bp, Artificial
  Probe
atgcggctgcactggtggaagaagc

SEQ ID NO: 185692 - DNA, 25 bp, Artificial
  Probe
gctaacgcttccagaccgcggccta

SEQ ID NO: 185693 - DNA, 25 bp, Artificial
  Probe
ggctgcactggtggaagaagcgatc

SEQ ID NO: 185694 - DNA, 25 bp, Artificial
  Probe
cttccagaccgcggcctaataatga

SEQ ID NO: 185695 - DNA, 25 bp, Artificial
  Probe
gctgcactggtggaagaagcgatct

SEQ ID NO: 185696 - DNA, 25 bp, Artificial
  Probe
ttccagaccgcggcctaataatgag

SEQ ID NO: 185697 - DNA, 25 bp, Artificial
  Probe
tgcactggtggaagaagcgatcttt

SEQ ID NO: 185698 - DNA, 25 bp, Artificial
  Probe
tccagaccgcggcctaataatgagt

SEQ ID NO: 185699 - DNA, 25 bp, Artificial
  Probe
aagccttccggcgcataaagtcagc

SEQ ID NO: 185700 - DNA, 25 bp, Artificial
  Probe
cagaccgcggcctaataatgagtga

SEQ ID NO: 185701 - DNA, 25 bp, Artificial
  Probe
gccttccggcgcataaagtcagcaa

SEQ ID NO: 185702 - DNA, 25 bp, Artificial
  Probe
agaccgcggcctaataatgagtgat

SEQ ID NO: 185703 - DNA, 25 bp, Artificial
  Probe
ccttccggcgcataaagtcagcaag

SEQ ID NO: 185704 - DNA, 25 bp, Artificial
  Probe
accgcggcctaataatgagtgatca

SEQ ID NO: 185705 - DNA, 25 bp, Artificial
  Probe
cttccggcgcataaagtcagcaagg

SEQ ID NO: 185706 - DNA, 25 bp, Artificial
  Probe
tgagtgatcaggcaattcggtcaat

SEQ ID NO: 185707 - DNA, 25 bp, Artificial
  Probe
tccggcgcataaagtcagcaaggtt

SEQ ID NO: 185708 - DNA, 25 bp, Artificial
  Probe
gagtgatcaggcaattcggtcaatt

SEQ ID NO: 185709 - DNA, 25 bp, Artificial
  Probe
agtcagcaaggtttactattatatg

SEQ ID NO: 185710 - DNA, 25 bp, Artificial
  Probe
agtgatcaggcaattcggtcaattg

SEQ ID NO: 185711 - DNA, 25 bp, Artificial
  Probe
tttcatcagccggattttgttattg

SEQ ID NO: 185712 - DNA, 25 bp, Artificial
  Probe
tgatcaggcaattcggtcaattgtc

SEQ ID NO: 185713 - DNA, 25 bp, Artificial
  Probe
ttcatcagccggattttgttattga

SEQ ID NO: 185714 - DNA, 25 bp, Artificial
  Probe
gatcaggcaattcggtcaattgtca

SEQ ID NO: 185715 - DNA, 25 bp, Artificial
  Probe
tcatcagccggattttgttattgat

SEQ ID NO: 185716 - DNA, 25 bp, Artificial
  Probe
ggcaattcggtcaattgtcactgtc

SEQ ID NO: 185717 - DNA, 25 bp, Artificial
  Probe
atcagccggattttgttattgatat

SEQ ID NO: 185718 - DNA, 25 bp, Artificial
  Probe
gcaattcggtcaattgtcactgtca

SEQ ID NO: 185719 - DNA, 25 bp, Artificial
  Probe
cagccggattttgttattgatatct

SEQ ID NO: 185720 - DNA, 25 bp, Artificial
  Probe
caattcggtcaattgtcactgtcat

SEQ ID NO: 185721 - DNA, 25 bp, Artificial
  Probe
ttttgttattgatatctcggataca

SEQ ID NO: 185722 - DNA, 25 bp, Artificial
  Probe
attcggtcaattgtcactgtcatca

SEQ ID NO: 185723 - DNA, 25 bp, Artificial
  Probe
tttgttattgatatctcggatacaa

SEQ ID NO: 185724 - DNA, 25 bp, Artificial
  Probe
ttcggtcaattgtcactgtcatcag

SEQ ID NO: 185725 - DNA, 25 bp, Artificial
  Probe
ttgttattgatatctcggatacaat

SEQ ID NO: 185726 - DNA, 25 bp, Artificial
  Probe
tcggtcaattgtcactgtcatcaga

SEQ ID NO: 185727 - DNA, 25 bp, Artificial
  Probe
gttattgatatctcggatacaatag

SEQ ID NO: 185728 - DNA, 25 bp, Artificial
  Probe
ggtcaattgtcactgtcatcagaat

SEQ ID NO: 185729 - DNA, 25 bp, Artificial
  Probe
attgatatctcggatacaatagagg

SEQ ID NO: 185730 - DNA, 25 bp, Artificial
  Probe
gtcaattgtcactgtcatcagaatc

SEQ ID NO: 185731 - DNA, 25 bp, Artificial
  Probe
tgatatctcggatacaatagaggca

SEQ ID NO: 185732 - DNA, 25 bp, Artificial
  Probe
tcaattgtcactgtcatcagaatct

SEQ ID NO: 185733 - DNA, 25 bp, Artificial
  Probe
gatatctcggatacaatagaggcaa

SEQ ID NO: 185734 - DNA, 25 bp, Artificial
  Probe
aattgtcactgtcatcagaatctgt

SEQ ID NO: 185735 - DNA, 25 bp, Artificial
  Probe
atatctcggatacaatagaggcaaa

SEQ ID NO: 185736 - DNA, 25 bp, Artificial
  Probe
attgtcactgtcatcagaatctgtc

SEQ ID NO: 185737 - DNA, 25 bp, Artificial
  Probe
atctcggatacaatagaggcaaaga

SEQ ID NO: 185738 - DNA, 25 bp, Artificial
  Probe
aatgatatgcgatttgacagaagcg

SEQ ID NO: 185739 - DNA, 25 bp, Artificial
  Probe
ttgtcactgtcatcagaatctgtcg

SEQ ID NO: 185740 - DNA, 25 bp, Artificial
  Probe
gattccgtttctactcctctgacga

SEQ ID NO: 185741 - DNA, 25 bp, Artificial
  Probe
atgatatgcgatttgacagaagcgg

SEQ ID NO: 185742 - DNA, 25 bp, Artificial
  Probe
gtcactgtcatcagaatctgtcggc

SEQ ID NO: 185743 - DNA, 25 bp, Artificial
  Probe
tttctactcctctgacgaatgggta

SEQ ID NO: 185744 - DNA, 25 bp, Artificial
  Probe
atatgcgatttgacagaagcggaac

SEQ ID NO: 185745 - DNA, 25 bp, Artificial
  Probe
cactgtcatcagaatctgtcggcca

SEQ ID NO: 185746 - DNA, 25 bp, Artificial
  Probe
ttctactcctctgacgaatgggtat

SEQ ID NO: 185747 - DNA, 25 bp, Artificial
  Probe
atgcgatttgacagaagcggaactc

SEQ ID NO: 185748 - DNA, 25 bp, Artificial
  Probe
actgtcatcagaatctgtcggccaa

SEQ ID NO: 185749 - DNA, 25 bp, Artificial
  Probe
ctactcctctgacgaatgggtatat

SEQ ID NO: 185750 - DNA, 25 bp, Artificial
  Probe
tttgacagaagcggaactctcttct

SEQ ID NO: 185751 - DNA, 25 bp, Artificial
  Probe
ctgtcatcagaatctgtcggccaaa

SEQ ID NO: 185752 - DNA, 25 bp, Artificial
  Probe
tactcctctgacgaatgggtatatt

SEQ ID NO: 185753 - DNA, 25 bp, Artificial
  Probe
gacagaagcggaactctcttctaac

SEQ ID NO: 185754 - DNA, 25 bp, Artificial
  Probe
gtcatcagaatctgtcggccaaaag

SEQ ID NO: 185755 - DNA, 25 bp, Artificial
  Probe
actcctctgacgaatgggtatattg

SEQ ID NO: 185756 - DNA, 25 bp, Artificial
  Probe
agaagcagctgaagcagcccgcata

SEQ ID NO: 185757 - DNA, 25 bp, Artificial
  Probe
tcatcagaatctgtcggccaaaagc

SEQ ID NO: 185758 - DNA, 25 bp, Artificial
  Probe
tcctctgacgaatgggtatattgaa

SEQ ID NO: 185759 - DNA, 25 bp, Artificial
  Probe
gaagcagctgaagcagcccgcatat

SEQ ID NO: 185760 - DNA, 25 bp, Artificial
  Probe
catcagaatctgtcggccaaaagcg

SEQ ID NO: 185761 - DNA, 25 bp, Artificial
  Probe
cctctgacgaatgggtatattgaaa

SEQ ID NO: 185762 - DNA, 25 bp, Artificial
  Probe
agcagctgaagcagcccgcatatta

SEQ ID NO: 185763 - DNA, 25 bp, Artificial
  Probe
atcagaatctgtcggccaaaagcgg

SEQ ID NO: 185764 - DNA, 25 bp, Artificial
  Probe
atattgaaatcgttgaagcgagaga

SEQ ID NO: 185765 - DNA, 25 bp, Artificial
  Probe
gcagctgaagcagcccgcatattag

SEQ ID NO: 185766 - DNA, 25 bp, Artificial
  Probe
tcagaatctgtcggccaaaagcggt

SEQ ID NO: 185767 - DNA, 25 bp, Artificial
  Probe
tattgaaatcgttgaagcgagagaa

SEQ ID NO: 185768 - DNA, 25 bp, Artificial
  Probe
agctgaagcagcccgcatattaggc

SEQ ID NO: 185769 - DNA, 25 bp, Artificial
  Probe
aaaggatcgccatccggatcacggc

SEQ ID NO: 185770 - DNA, 25 bp, Artificial
  Probe
tgaaatcgttgaagcgagagaaaag

SEQ ID NO: 185771 - DNA, 25 bp, Artificial
  Probe
gctgaagcagcccgcatattaggcg

SEQ ID NO: 185772 - DNA, 25 bp, Artificial
  Probe
aggatcgccatccggatcacggcaa

SEQ ID NO: 185773 - DNA, 25 bp, Artificial
  Probe
gaaatcgttgaagcgagagaaaagc

SEQ ID NO: 185774 - DNA, 25 bp, Artificial
  Probe
ctgaagcagcccgcatattaggcgc

SEQ ID NO: 185775 - DNA, 25 bp, Artificial
  Probe
ggatcgccatccggatcacggcaat

SEQ ID NO: 185776 - DNA, 25 bp, Artificial
  Probe
tgaagcagcccgcatattaggcgca

SEQ ID NO: 185777 - DNA, 25 bp, Artificial
  Probe
gatcgccatccggatcacggcaatg

SEQ ID NO: 185778 - DNA, 25 bp, Artificial
  Probe
aagcagcccgcatattaggcgcaga

SEQ ID NO: 185779 - DNA, 25 bp, Artificial
  Probe
ccatccggatcacggcaatgcggct

SEQ ID NO: 185780 - DNA, 25 bp, Artificial
  Probe
agcagcccgcatattaggcgcagat

SEQ ID NO: 185781 - DNA, 25 bp, Artificial
  Probe
catccggatcacggcaatgcggctg

SEQ ID NO: 185782 - DNA, 25 bp, Artificial
  Probe
gcagcccgcatattaggcgcagata

SEQ ID NO: 185783 - DNA, 25 bp, Artificial
  Probe
tccggatcacggcaatgcggctgca

SEQ ID NO: 185784 - DNA, 25 bp, Artificial
  Probe
agcccgcatattaggcgcagataaa

SEQ ID NO: 185785 - DNA, 25 bp, Artificial
  Probe
ccggatcacggcaatgcggctgcac

SEQ ID NO: 185786 - DNA, 25 bp, Artificial
  Probe
gcccgcatattaggcgcagataaaa

SEQ ID NO: 185787 - DNA, 25 bp, Artificial
  Probe
cggatcacggcaatgcggctgcact

SEQ ID NO: 185788 - DNA, 25 bp, Artificial
  Probe
ccgcatattaggcgcagataaaaga

SEQ ID NO: 185789 - DNA, 25 bp, Artificial
  Probe
gatcacggcaatgcggctgcactgg

SEQ ID NO: 185790 - DNA, 25 bp, Artificial
  Probe
catattaggcgcagataaaagaatt

SEQ ID NO: 185791 - DNA, 25 bp, Artificial
  Probe
atcacggcaatgcggctgcactggt

SEQ ID NO: 185792 - DNA, 25 bp, Artificial
  Probe
agaattcagctaacgcttccagacc

SEQ ID NO: 185793 - DNA, 25 bp, Artificial
  Probe
tcacggcaatgcggctgcactggtg

SEQ ID NO: 185794 - DNA, 25 bp, Artificial
  Probe
gaattcagctaacgcttccagaccg

SEQ ID NO: 185795 - DNA, 25 bp, Artificial
  Probe
acggcaatgcggctgcactggtgga

SEQ ID NO: 185796 - DNA, 25 bp, Artificial
  Probe
attcagctaacgcttccagaccgcg

SEQ ID NO: 185797 - DNA, 25 bp, Artificial
  Probe
gcaatgcggctgcactggtggaaga

SEQ ID NO: 185798 - DNA, 25 bp, Artificial
  Probe
ttcagctaacgcttccagaccgcgg

SEQ ID NO: 185799 - DNA, 25 bp, Artificial
  Probe
aatgcggctgcactggtggaagaag

SEQ ID NO: 185800 - DNA, 25 bp, Artificial
  Probe
tcagctaacgcttccagaccgcggc

SEQ ID NO: 185801 - DNA, 25 bp, Artificial
  Probe
atgcggctgcactggtggaagaagc

SEQ ID NO: 185802 - DNA, 25 bp, Artificial
  Probe
gctaacgcttccagaccgcggccta

SEQ ID NO: 185803 - DNA, 25 bp, Artificial
  Probe
ggctgcactggtggaagaagcgatc

SEQ ID NO: 185804 - DNA, 25 bp, Artificial
  Probe
cttccagaccgcggcctaataatga

SEQ ID NO: 185805 - DNA, 25 bp, Artificial
  Probe
gctgcactggtggaagaagcgatct

SEQ ID NO: 185806 - DNA, 25 bp, Artificial
  Probe
ttccagaccgcggcctaataatgag

SEQ ID NO: 185807 - DNA, 25 bp, Artificial
  Probe
tgcactggtggaagaagcgatcttt

SEQ ID NO: 185808 - DNA, 25 bp, Artificial
  Probe
tccagaccgcggcctaataatgagt

SEQ ID NO: 185809 - DNA, 25 bp, Artificial
  Probe
aagccttccggcgcataaagtcagc

SEQ ID NO: 185810 - DNA, 25 bp, Artificial
  Probe
cagaccgcggcctaataatgagtga

SEQ ID NO: 185811 - DNA, 25 bp, Artificial
  Probe
gccttccggcgcataaagtcagcaa

SEQ ID NO: 185812 - DNA, 25 bp, Artificial
  Probe
agaccgcggcctaataatgagtgat

SEQ ID NO: 185813 - DNA, 25 bp, Artificial
  Probe
ccttccggcgcataaagtcagcaag

SEQ ID NO: 185814 - DNA, 25 bp, Artificial
  Probe
accgcggcctaataatgagtgatca

SEQ ID NO: 185815 - DNA, 25 bp, Artificial
  Probe
cttccggcgcataaagtcagcaagg

SEQ ID NO: 185816 - DNA, 25 bp, Artificial
  Probe
tgagtgatcaggcaattcggtcaat

SEQ ID NO: 185817 - DNA, 25 bp, Artificial
  Probe
tccggcgcataaagtcagcaaggtt

SEQ ID NO: 185818 - DNA, 25 bp, Artificial
  Probe
gagtgatcaggcaattcggtcaatt

SEQ ID NO: 185819 - DNA, 25 bp, Artificial
  Probe
agtcagcaaggtttactattatatg

SEQ ID NO: 185820 - DNA, 25 bp, Artificial
  Probe
agtgatcaggcaattcggtcaattg

SEQ ID NO: 185821 - DNA, 25 bp, Artificial
  Probe
tttcatcagccggattttgttattg

SEQ ID NO: 185822 - DNA, 25 bp, Artificial
  Probe
tgatcaggcaattcggtcaattgtc

SEQ ID NO: 185823 - DNA, 25 bp, Artificial
  Probe
ttcatcagccggattttgttattga

SEQ ID NO: 185824 - DNA, 25 bp, Artificial
  Probe
gatcaggcaattcggtcaattgtca

SEQ ID NO: 185825 - DNA, 25 bp, Artificial
  Probe
tcatcagccggattttgttattgat

SEQ ID NO: 185826 - DNA, 25 bp, Artificial
  Probe
ggcaattcggtcaattgtcactgtc

SEQ ID NO: 185827 - DNA, 25 bp, Artificial
  Probe
atcagccggattttgttattgatat

SEQ ID NO: 185828 - DNA, 25 bp, Artificial
  Probe
gcaattcggtcaattgtcactgtca

SEQ ID NO: 185829 - DNA, 25 bp, Artificial
  Probe
cagccggattttgttattgatatct

SEQ ID NO: 185830 - DNA, 25 bp, Artificial
  Probe
caattcggtcaattgtcactgtcat

SEQ ID NO: 185831 - DNA, 25 bp, Artificial
  Probe
ttttgttattgatatctcggataca

SEQ ID NO: 185832 - DNA, 25 bp, Artificial
  Probe
attcggtcaattgtcactgtcatca

SEQ ID NO: 185833 - DNA, 25 bp, Artificial
  Probe
tttgttattgatatctcggatacaa

SEQ ID NO: 185834 - DNA, 25 bp, Artificial
  Probe
ttcggtcaattgtcactgtcatcag

SEQ ID NO: 185835 - DNA, 25 bp, Artificial
  Probe
ttgttattgatatctcggatacaat

SEQ ID NO: 185836 - DNA, 25 bp, Artificial
  Probe
tcggtcaattgtcactgtcatcaga

SEQ ID NO: 185837 - DNA, 25 bp, Artificial
  Probe
gttattgatatctcggatacaatag

SEQ ID NO: 185838 - DNA, 25 bp, Artificial
  Probe
ggtcaattgtcactgtcatcagaat

SEQ ID NO: 185839 - DNA, 25 bp, Artificial
  Probe
attgatatctcggatacaatagagg

SEQ ID NO: 185840 - DNA, 25 bp, Artificial
  Probe
gtcaattgtcactgtcatcagaatc

SEQ ID NO: 185841 - DNA, 25 bp, Artificial
  Probe
tgatatctcggatacaatagaggca

SEQ ID NO: 185842 - DNA, 25 bp, Artificial
  Probe
tcaattgtcactgtcatcagaatct

SEQ ID NO: 185843 - DNA, 25 bp, Artificial
  Probe
gatatctcggatacaatagaggcaa

SEQ ID NO: 185844 - DNA, 25 bp, Artificial
  Probe
aattgtcactgtcatcagaatctgt

SEQ ID NO: 185845 - DNA, 25 bp, Artificial
  Probe
atatctcggatacaatagaggcaaa

SEQ ID NO: 185846 - DNA, 25 bp, Artificial
  Probe
attgtcactgtcatcagaatctgtc

SEQ ID NO: 185847 - DNA, 25 bp, Artificial
  Probe
atctcggatacaatagaggcaaaga

SEQ ID NO: 185848 - DNA, 25 bp, Artificial
  Probe
aatgatatgcgatttgacagaagcg

SEQ ID NO: 185849 - DNA, 25 bp, Artificial
  Probe
ttgtcactgtcatcagaatctgtcg

SEQ ID NO: 185850 - DNA, 25 bp, Artificial
  Probe
gattccgtttctactcctctgacga

SEQ ID NO: 185851 - DNA, 25 bp, Artificial
  Probe
atgatatgcgatttgacagaagcgg

SEQ ID NO: 185852 - DNA, 25 bp, Artificial
  Probe
gtcactgtcatcagaatctgtcggc

SEQ ID NO: 185853 - DNA, 25 bp, Artificial
  Probe
tttctactcctctgacgaatgggta

SEQ ID NO: 185854 - DNA, 25 bp, Artificial
  Probe
atatgcgatttgacagaagcggaac

SEQ ID NO: 185855 - DNA, 25 bp, Artificial
  Probe
cactgtcatcagaatctgtcggcca

SEQ ID NO: 185856 - DNA, 25 bp, Artificial
  Probe
ttctactcctctgacgaatgggtat

SEQ ID NO: 185857 - DNA, 25 bp, Artificial
  Probe
atgcgatttgacagaagcggaactc

SEQ ID NO: 185858 - DNA, 25 bp, Artificial
  Probe
actgtcatcagaatctgtcggccaa

SEQ ID NO: 185859 - DNA, 25 bp, Artificial
  Probe
ctactcctctgacgaatgggtatat

SEQ ID NO: 185860 - DNA, 25 bp, Artificial
  Probe
tttgacagaagcggaactctcttct

SEQ ID NO: 185861 - DNA, 25 bp, Artificial
  Probe
ctgtcatcagaatctgtcggccaaa

SEQ ID NO: 185862 - DNA, 25 bp, Artificial
  Probe
tactcctctgacgaatgggtatatt

SEQ ID NO: 185863 - DNA, 25 bp, Artificial
  Probe
gacagaagcggaactctcttctaac

SEQ ID NO: 185864 - DNA, 25 bp, Artificial
  Probe
gtcatcagaatctgtcggccaaaag

SEQ ID NO: 185865 - DNA, 25 bp, Artificial
  Probe
actcctctgacgaatgggtatattg

SEQ ID NO: 185866 - DNA, 25 bp, Artificial
  Probe
agaagcagctgaagcagcccgcata

SEQ ID NO: 185867 - DNA, 25 bp, Artificial
  Probe
tcatcagaatctgtcggccaaaagc

SEQ ID NO: 185868 - DNA, 25 bp, Artificial
  Probe
tcctctgacgaatgggtatattgaa

SEQ ID NO: 185869 - DNA, 25 bp, Artificial
  Probe
gaagcagctgaagcagcccgcatat

SEQ ID NO: 185870 - DNA, 25 bp, Artificial
  Probe
catcagaatctgtcggccaaaagcg

SEQ ID NO: 185871 - DNA, 25 bp, Artificial
  Probe
cctctgacgaatgggtatattgaaa

SEQ ID NO: 185872 - DNA, 25 bp, Artificial
  Probe
agcagctgaagcagcccgcatatta

SEQ ID NO: 185873 - DNA, 25 bp, Artificial
  Probe
atcagaatctgtcggccaaaagcgg

SEQ ID NO: 185874 - DNA, 25 bp, Artificial
  Probe
atattgaaatcgttgaagcgagaga

SEQ ID NO: 185875 - DNA, 25 bp, Artificial
  Probe
gcagctgaagcagcccgcatattag

SEQ ID NO: 185876 - DNA, 25 bp, Artificial
  Probe
tcagaatctgtcggccaaaagcggt

SEQ ID NO: 185877 - DNA, 25 bp, Artificial
  Probe
tattgaaatcgttgaagcgagagaa

SEQ ID NO: 185878 - DNA, 25 bp, Artificial
  Probe
agctgaagcagcccgcatattaggc

SEQ ID NO: 185879 - DNA, 25 bp, Artificial
  Probe
aaaggatcgccatccggatcacggc

SEQ ID NO: 185880 - DNA, 25 bp, Artificial
  Probe
tgaaatcgttgaagcgagagaaaag

SEQ ID NO: 185881 - DNA, 25 bp, Artificial
  Probe
gctgaagcagcccgcatattaggcg

SEQ ID NO: 185882 - DNA, 25 bp, Artificial
  Probe
aggatcgccatccggatcacggcaa

SEQ ID NO: 185883 - DNA, 25 bp, Artificial
  Probe
gaaatcgttgaagcgagagaaaagc

SEQ ID NO: 185884 - DNA, 25 bp, Artificial
  Probe
ctgaagcagcccgcatattaggcgc

SEQ ID NO: 185885 - DNA, 25 bp, Artificial
  Probe
ggatcgccatccggatcacggcaat

SEQ ID NO: 185886 - DNA, 25 bp, Artificial
  Probe
tgaagcagcccgcatattaggcgca

SEQ ID NO: 185887 - DNA, 25 bp, Artificial
  Probe
gatcgccatccggatcacggcaatg

SEQ ID NO: 185888 - DNA, 25 bp, Artificial
  Probe
aagcagcccgcatattaggcgcaga

SEQ ID NO: 185889 - DNA, 25 bp, Artificial
  Probe
ccatccggatcacggcaatgcggct

SEQ ID NO: 185890 - DNA, 25 bp, Artificial
  Probe
agcagcccgcatattaggcgcagat

SEQ ID NO: 185891 - DNA, 25 bp, Artificial
  Probe
catccggatcacggcaatgcggctg

SEQ ID NO: 185892 - DNA, 25 bp, Artificial
  Probe
gcagcccgcatattaggcgcagata

SEQ ID NO: 185893 - DNA, 25 bp, Artificial
  Probe
tccggatcacggcaatgcggctgca

SEQ ID NO: 185894 - DNA, 25 bp, Artificial
  Probe
agcccgcatattaggcgcagataaa

SEQ ID NO: 185895 - DNA, 25 bp, Artificial
  Probe
ccggatcacggcaatgcggctgcac

SEQ ID NO: 185896 - DNA, 25 bp, Artificial
  Probe
gcccgcatattaggcgcagataaaa

SEQ ID NO: 185897 - DNA, 25 bp, Artificial
  Probe
cggatcacggcaatgcggctgcact

SEQ ID NO: 185898 - DNA, 25 bp, Artificial
  Probe
ccgcatattaggcgcagataaaaga

SEQ ID NO: 185899 - DNA, 25 bp, Artificial
  Probe
gatcacggcaatgcggctgcactgg

SEQ ID NO: 185900 - DNA, 25 bp, Artificial
  Probe
catattaggcgcagataaaagaatt

SEQ ID NO: 185901 - DNA, 25 bp, Artificial
  Probe
atcacggcaatgcggctgcactggt

SEQ ID NO: 185902 - DNA, 25 bp, Artificial
  Probe
agaattcagctaacgcttccagacc

SEQ ID NO: 185903 - DNA, 25 bp, Artificial
  Probe
tcacggcaatgcggctgcactggtg

SEQ ID NO: 185904 - DNA, 25 bp, Artificial
  Probe
gaattcagctaacgcttccagaccg

SEQ ID NO: 185905 - DNA, 25 bp, Artificial
  Probe
acggcaatgcggctgcactggtgga

SEQ ID NO: 185906 - DNA, 25 bp, Artificial
  Probe
attcagctaacgcttccagaccgcg

SEQ ID NO: 185907 - DNA, 25 bp, Artificial
  Probe
gcaatgcggctgcactggtggaaga

SEQ ID NO: 185908 - DNA, 25 bp, Artificial
  Probe
ttcagctaacgcttccagaccgcgg

SEQ ID NO: 185909 - DNA, 25 bp, Artificial
  Probe
aatgcggctgcactggtggaagaag

SEQ ID NO: 185910 - DNA, 25 bp, Artificial
  Probe
tcagctaacgcttccagaccgcggc

SEQ ID NO: 185911 - DNA, 25 bp, Artificial
  Probe
atgcggctgcactggtggaagaagc

SEQ ID NO: 185912 - DNA, 25 bp, Artificial
  Probe
gctaacgcttccagaccgcggccta

SEQ ID NO: 185913 - DNA, 25 bp, Artificial
  Probe
ggctgcactggtggaagaagcgatc

SEQ ID NO: 185914 - DNA, 25 bp, Artificial
  Probe
cttccagaccgcggcctaataatga

SEQ ID NO: 185915 - DNA, 25 bp, Artificial
  Probe
gctgcactggtggaagaagcgatct

SEQ ID NO: 185916 - DNA, 25 bp, Artificial
  Probe
ttccagaccgcggcctaataatgag

SEQ ID NO: 185917 - DNA, 25 bp, Artificial
  Probe
tgcactggtggaagaagcgatcttt

SEQ ID NO: 185918 - DNA, 25 bp, Artificial
  Probe
tccagaccgcggcctaataatgagt

SEQ ID NO: 185919 - DNA, 25 bp, Artificial
  Probe
aagccttccggcgcataaagtcagc

SEQ ID NO: 185920 - DNA, 25 bp, Artificial
  Probe
cagaccgcggcctaataatgagtga

SEQ ID NO: 185921 - DNA, 25 bp, Artificial
  Probe
gccttccggcgcataaagtcagcaa

SEQ ID NO: 185922 - DNA, 25 bp, Artificial
  Probe
agaccgcggcctaataatgagtgat

SEQ ID NO: 185923 - DNA, 25 bp, Artificial
  Probe
ccttccggcgcataaagtcagcaag

SEQ ID NO: 185924 - DNA, 25 bp, Artificial
  Probe
accgcggcctaataatgagtgatca

SEQ ID NO: 185925 - DNA, 25 bp, Artificial
  Probe
cttccggcgcataaagtcagcaagg

SEQ ID NO: 185926 - DNA, 25 bp, Artificial
  Probe
tgagtgatcaggcaattcggtcaat

SEQ ID NO: 185927 - DNA, 25 bp, Artificial
  Probe
tccggcgcataaagtcagcaaggtt

SEQ ID NO: 185928 - DNA, 25 bp, Artificial
  Probe
gagtgatcaggcaattcggtcaatt

SEQ ID NO: 185929 - DNA, 25 bp, Artificial
  Probe
agtcagcaaggtttactattatatg

SEQ ID NO: 185930 - DNA, 25 bp, Artificial
  Probe
agtgatcaggcaattcggtcaattg

SEQ ID NO: 185931 - DNA, 25 bp, Artificial
  Probe
tttcatcagccggattttgttattg

SEQ ID NO: 185932 - DNA, 25 bp, Artificial
  Probe
tgatcaggcaattcggtcaattgtc

SEQ ID NO: 185933 - DNA, 25 bp, Artificial
  Probe
ttcatcagccggattttgttattga

SEQ ID NO: 185934 - DNA, 25 bp, Artificial
  Probe
gatcaggcaattcggtcaattgtca

SEQ ID NO: 185935 - DNA, 25 bp, Artificial
  Probe
tcatcagccggattttgttattgat

SEQ ID NO: 185936 - DNA, 25 bp, Artificial
  Probe
ggcaattcggtcaattgtcactgtc

SEQ ID NO: 185937 - DNA, 25 bp, Artificial
  Probe
atcagccggattttgttattgatat

SEQ ID NO: 185938 - DNA, 25 bp, Artificial
  Probe
gcaattcggtcaattgtcactgtca

SEQ ID NO: 185939 - DNA, 25 bp, Artificial
  Probe
cagccggattttgttattgatatct

SEQ ID NO: 185940 - DNA, 25 bp, Artificial
  Probe
caattcggtcaattgtcactgtcat

SEQ ID NO: 185941 - DNA, 25 bp, Artificial
  Probe
ttttgttattgatatctcggataca

SEQ ID NO: 185942 - DNA, 25 bp, Artificial
  Probe
attcggtcaattgtcactgtcatca

SEQ ID NO: 185943 - DNA, 25 bp, Artificial
  Probe
tttgttattgatatctcggatacaa

SEQ ID NO: 185944 - DNA, 25 bp, Artificial
  Probe
ttcggtcaattgtcactgtcatcag

SEQ ID NO: 185945 - DNA, 25 bp, Artificial
  Probe
ttgttattgatatctcggatacaat

SEQ ID NO: 185946 - DNA, 25 bp, Artificial
  Probe
tcggtcaattgtcactgtcatcaga

SEQ ID NO: 185947 - DNA, 25 bp, Artificial
  Probe
gttattgatatctcggatacaatag

SEQ ID NO: 185948 - DNA, 25 bp, Artificial
  Probe
ggtcaattgtcactgtcatcagaat

SEQ ID NO: 185949 - DNA, 25 bp, Artificial
  Probe
attgatatctcggatacaatagagg

SEQ ID NO: 185950 - DNA, 25 bp, Artificial
  Probe
gtcaattgtcactgtcatcagaatc

SEQ ID NO: 185951 - DNA, 25 bp, Artificial
  Probe
tgatatctcggatacaatagaggca

SEQ ID NO: 185952 - DNA, 25 bp, Artificial
  Probe
tcaattgtcactgtcatcagaatct

SEQ ID NO: 185953 - DNA, 25 bp, Artificial
  Probe
gatatctcggatacaatagaggcaa

SEQ ID NO: 185954 - DNA, 25 bp, Artificial
  Probe
aattgtcactgtcatcagaatctgt

SEQ ID NO: 185955 - DNA, 25 bp, Artificial
  Probe
atatctcggatacaatagaggcaaa

SEQ ID NO: 185956 - DNA, 25 bp, Artificial
  Probe
attgtcactgtcatcagaatctgtc

SEQ ID NO: 185957 - DNA, 25 bp, Artificial
  Probe
atctcggatacaatagaggcaaaga

SEQ ID NO: 185958 - DNA, 25 bp, Artificial
  Probe
aatgatatgcgatttgacagaagcg

SEQ ID NO: 185959 - DNA, 25 bp, Artificial
  Probe
ttgtcactgtcatcagaatctgtcg

SEQ ID NO: 185960 - DNA, 25 bp, Artificial
  Probe
gattccgtttctactcctctgacga

SEQ ID NO: 185961 - DNA, 25 bp, Artificial
  Probe
atgatatgcgatttgacagaagcgg

SEQ ID NO: 185962 - DNA, 25 bp, Artificial
  Probe
gtcactgtcatcagaatctgtcggc

SEQ ID NO: 185963 - DNA, 25 bp, Artificial
  Probe
tttctactcctctgacgaatgggta

SEQ ID NO: 185964 - DNA, 25 bp, Artificial
  Probe
atatgcgatttgacagaagcggaac

SEQ ID NO: 185965 - DNA, 25 bp, Artificial
  Probe
cactgtcatcagaatctgtcggcca

SEQ ID NO: 185966 - DNA, 25 bp, Artificial
  Probe
ttctactcctctgacgaatgggtat

SEQ ID NO: 185967 - DNA, 25 bp, Artificial
  Probe
atgcgatttgacagaagcggaactc

SEQ ID NO: 185968 - DNA, 25 bp, Artificial
  Probe
actgtcatcagaatctgtcggccaa

SEQ ID NO: 185969 - DNA, 25 bp, Artificial
  Probe
ctactcctctgacgaatgggtatat

SEQ ID NO: 185970 - DNA, 25 bp, Artificial
  Probe
tttgacagaagcggaactctcttct

SEQ ID NO: 185971 - DNA, 25 bp, Artificial
  Probe
ctgtcatcagaatctgtcggccaaa

SEQ ID NO: 185972 - DNA, 25 bp, Artificial
  Probe
tactcctctgacgaatgggtatatt

SEQ ID NO: 185973 - DNA, 25 bp, Artificial
  Probe
gacagaagcggaactctcttctaac

SEQ ID NO: 185974 - DNA, 25 bp, Artificial
  Probe
gtcatcagaatctgtcggccaaaag

SEQ ID NO: 185975 - DNA, 25 bp, Artificial
  Probe
actcctctgacgaatgggtatattg

SEQ ID NO: 185976 - DNA, 25 bp, Artificial
  Probe
agaagcagctgaagcagcccgcata

SEQ ID NO: 185977 - DNA, 25 bp, Artificial
  Probe
tcatcagaatctgtcggccaaaagc

SEQ ID NO: 185978 - DNA, 25 bp, Artificial
  Probe
tcctctgacgaatgggtatattgaa

SEQ ID NO: 185979 - DNA, 25 bp, Artificial
  Probe
gaagcagctgaagcagcccgcatat

SEQ ID NO: 185980 - DNA, 25 bp, Artificial
  Probe
catcagaatctgtcggccaaaagcg

SEQ ID NO: 185981 - DNA, 25 bp, Artificial
  Probe
cctctgacgaatgggtatattgaaa

SEQ ID NO: 185982 - DNA, 25 bp, Artificial
  Probe
agcagctgaagcagcccgcatatta

SEQ ID NO: 185983 - DNA, 25 bp, Artificial
  Probe
atcagaatctgtcggccaaaagcgg

SEQ ID NO: 185984 - DNA, 25 bp, Artificial
  Probe
atattgaaatcgttgaagcgagaga

SEQ ID NO: 185985 - DNA, 25 bp, Artificial
  Probe
gcagctgaagcagcccgcatattag

SEQ ID NO: 185986 - DNA, 25 bp, Artificial
  Probe
tcagaatctgtcggccaaaagcggt

SEQ ID NO: 185987 - DNA, 25 bp, Artificial
  Probe
tattgaaatcgttgaagcgagagaa

SEQ ID NO: 185988 - DNA, 25 bp, Artificial
  Probe
agctgaagcagcccgcatattaggc

SEQ ID NO: 185989 - DNA, 25 bp, Artificial
  Probe
aaaggatcgccatccggatcacggc

SEQ ID NO: 185990 - DNA, 25 bp, Artificial
  Probe
tgaaatcgttgaagcgagagaaaag

SEQ ID NO: 185991 - DNA, 25 bp, Artificial
  Probe
gctgaagcagcccgcatattaggcg

SEQ ID NO: 185992 - DNA, 25 bp, Artificial
  Probe
aggatcgccatccggatcacggcaa

SEQ ID NO: 185993 - DNA, 25 bp, Artificial
  Probe
gaaatcgttgaagcgagagaaaagc

SEQ ID NO: 185994 - DNA, 25 bp, Artificial
  Probe
ctgaagcagcccgcatattaggcgc

SEQ ID NO: 185995 - DNA, 25 bp, Artificial
  Probe
ggatcgccatccggatcacggcaat

SEQ ID NO: 185996 - DNA, 25 bp, Artificial
  Probe
tgaagcagcccgcatattaggcgca

SEQ ID NO: 185997 - DNA, 25 bp, Artificial
  Probe
gatcgccatccggatcacggcaatg

SEQ ID NO: 185998 - DNA, 25 bp, Artificial
  Probe
aagcagcccgcatattaggcgcaga

SEQ ID NO: 185999 - DNA, 25 bp, Artificial
  Probe
ccatccggatcacggcaatgcggct

SEQ ID NO: 186000 - DNA, 25 bp, Artificial
  Probe
agcagcccgcatattaggcgcagat

SEQ ID NO: 186001 - DNA, 25 bp, Artificial
  Probe
catccggatcacggcaatgcggctg

SEQ ID NO: 186002 - DNA, 25 bp, Artificial
  Probe
gcagcccgcatattaggcgcagata

SEQ ID NO: 186003 - DNA, 25 bp, Artificial
  Probe
tccggatcacggcaatgcggctgca

SEQ ID NO: 186004 - DNA, 25 bp, Artificial
  Probe
agcccgcatattaggcgcagataaa

SEQ ID NO: 186005 - DNA, 25 bp, Artificial
  Probe
ccggatcacggcaatgcggctgcac

SEQ ID NO: 186006 - DNA, 25 bp, Artificial
  Probe
gcccgcatattaggcgcagataaaa

SEQ ID NO: 186007 - DNA, 25 bp, Artificial
  Probe
cggatcacggcaatgcggctgcact

SEQ ID NO: 186008 - DNA, 25 bp, Artificial
  Probe
ccgcatattaggcgcagataaaaga

SEQ ID NO: 186009 - DNA, 25 bp, Artificial
  Probe
gatcacggcaatgcggctgcactgg

SEQ ID NO: 186010 - DNA, 25 bp, Artificial
  Probe
catattaggcgcagataaaagaatt

SEQ ID NO: 186011 - DNA, 25 bp, Artificial
  Probe
atcacggcaatgcggctgcactggt

SEQ ID NO: 186012 - DNA, 25 bp, Artificial
  Probe
agaattcagctaacgcttccagacc

SEQ ID NO: 186013 - DNA, 25 bp, Artificial
  Probe
tcacggcaatgcggctgcactggtg

SEQ ID NO: 186014 - DNA, 25 bp, Artificial
  Probe
gaattcagctaacgcttccagaccg

SEQ ID NO: 186015 - DNA, 25 bp, Artificial
  Probe
acggcaatgcggctgcactggtgga

SEQ ID NO: 186016 - DNA, 25 bp, Artificial
  Probe
attcagctaacgcttccagaccgcg

SEQ ID NO: 186017 - DNA, 25 bp, Artificial
  Probe
gcaatgcggctgcactggtggaaga

SEQ ID NO: 186018 - DNA, 25 bp, Artificial
  Probe
ttcagctaacgcttccagaccgcgg

SEQ ID NO: 186019 - DNA, 25 bp, Artificial
  Probe
aatgcggctgcactggtggaagaag

SEQ ID NO: 186020 - DNA, 25 bp, Artificial
  Probe
tcagctaacgcttccagaccgcggc

SEQ ID NO: 186021 - DNA, 25 bp, Artificial
  Probe
atgcggctgcactggtggaagaagc

SEQ ID NO: 186022 - DNA, 25 bp, Artificial
  Probe
gctaacgcttccagaccgcggccta

SEQ ID NO: 186023 - DNA, 25 bp, Artificial
  Probe
ggctgcactggtggaagaagcgatc

SEQ ID NO: 186024 - DNA, 25 bp, Artificial
  Probe
cttccagaccgcggcctaataatga

SEQ ID NO: 186025 - DNA, 25 bp, Artificial
  Probe
gctgcactggtggaagaagcgatct

SEQ ID NO: 186026 - DNA, 25 bp, Artificial
  Probe
ttccagaccgcggcctaataatgag

SEQ ID NO: 186027 - DNA, 25 bp, Artificial
  Probe
tgcactggtggaagaagcgatcttt

SEQ ID NO: 186028 - DNA, 25 bp, Artificial
  Probe
tccagaccgcggcctaataatgagt

SEQ ID NO: 186029 - DNA, 25 bp, Artificial
  Probe
aagccttccggcgcataaagtcagc

SEQ ID NO: 186030 - DNA, 25 bp, Artificial
  Probe
cagaccgcggcctaataatgagtga

SEQ ID NO: 186031 - DNA, 25 bp, Artificial
  Probe
gccttccggcgcataaagtcagcaa

SEQ ID NO: 186032 - DNA, 25 bp, Artificial
  Probe
agaccgcggcctaataatgagtgat

SEQ ID NO: 186033 - DNA, 25 bp, Artificial
  Probe
ccttccggcgcataaagtcagcaag

SEQ ID NO: 186034 - DNA, 25 bp, Artificial
  Probe
accgcggcctaataatgagtgatca

SEQ ID NO: 186035 - DNA, 25 bp, Artificial
  Probe
cttccggcgcataaagtcagcaagg

SEQ ID NO: 186036 - DNA, 25 bp, Artificial
  Probe
tgagtgatcaggcaattcggtcaat

SEQ ID NO: 186037 - DNA, 25 bp, Artificial
  Probe
tccggcgcataaagtcagcaaggtt

SEQ ID NO: 186038 - DNA, 25 bp, Artificial
  Probe
gagtgatcaggcaattcggtcaatt

SEQ ID NO: 186039 - DNA, 25 bp, Artificial
  Probe
agtcagcaaggtttactattatatg

SEQ ID NO: 186040 - DNA, 25 bp, Artificial
  Probe
agtgatcaggcaattcggtcaattg

SEQ ID NO: 186041 - DNA, 25 bp, Artificial
  Probe
tttcatcagccggattttgttattg

SEQ ID NO: 186042 - DNA, 25 bp, Artificial
  Probe
tgatcaggcaattcggtcaattgtc

SEQ ID NO: 186043 - DNA, 25 bp, Artificial
  Probe
ttcatcagccggattttgttattga

SEQ ID NO: 186044 - DNA, 25 bp, Artificial
  Probe
gatcaggcaattcggtcaattgtca

SEQ ID NO: 186045 - DNA, 25 bp, Artificial
  Probe
tcatcagccggattttgttattgat

SEQ ID NO: 186046 - DNA, 25 bp, Artificial
  Probe
ggcaattcggtcaattgtcactgtc

SEQ ID NO: 186047 - DNA, 25 bp, Artificial
  Probe
atcagccggattttgttattgatat

SEQ ID NO: 186048 - DNA, 25 bp, Artificial
  Probe
gcaattcggtcaattgtcactgtca

SEQ ID NO: 186049 - DNA, 25 bp, Artificial
  Probe
cagccggattttgttattgatatct

SEQ ID NO: 186050 - DNA, 25 bp, Artificial
  Probe
caattcggtcaattgtcactgtcat

SEQ ID NO: 186051 - DNA, 25 bp, Artificial
  Probe
ttttgttattgatatctcggataca

SEQ ID NO: 186052 - DNA, 25 bp, Artificial
  Probe
attcggtcaattgtcactgtcatca

SEQ ID NO: 186053 - DNA, 25 bp, Artificial
  Probe
tttgttattgatatctcggatacaa

SEQ ID NO: 186054 - DNA, 25 bp, Artificial
  Probe
ttcggtcaattgtcactgtcatcag

SEQ ID NO: 186055 - DNA, 25 bp, Artificial
  Probe
ttgttattgatatctcggatacaat

SEQ ID NO: 186056 - DNA, 25 bp, Artificial
  Probe
tcggtcaattgtcactgtcatcaga

SEQ ID NO: 186057 - DNA, 25 bp, Artificial
  Probe
gttattgatatctcggatacaatag

SEQ ID NO: 186058 - DNA, 25 bp, Artificial
  Probe
ggtcaattgtcactgtcatcagaat

SEQ ID NO: 186059 - DNA, 25 bp, Artificial
  Probe
attgatatctcggatacaatagagg

SEQ ID NO: 186060 - DNA, 25 bp, Artificial
  Probe
gtcaattgtcactgtcatcagaatc

SEQ ID NO: 186061 - DNA, 25 bp, Artificial
  Probe
tgatatctcggatacaatagaggca

SEQ ID NO: 186062 - DNA, 25 bp, Artificial
  Probe
tcaattgtcactgtcatcagaatct

SEQ ID NO: 186063 - DNA, 25 bp, Artificial
  Probe
gatatctcggatacaatagaggcaa

SEQ ID NO: 186064 - DNA, 25 bp, Artificial
  Probe
aattgtcactgtcatcagaatctgt

SEQ ID NO: 186065 - DNA, 25 bp, Artificial
  Probe
atatctcggatacaatagaggcaaa

SEQ ID NO: 186066 - DNA, 25 bp, Artificial
  Probe
attgtcactgtcatcagaatctgtc

SEQ ID NO: 186067 - DNA, 25 bp, Artificial
  Probe
atctcggatacaatagaggcaaaga

SEQ ID NO: 186068 - DNA, 25 bp, Artificial
  Probe
aatgatatgcgatttgacagaagcg

SEQ ID NO: 186069 - DNA, 25 bp, Artificial
  Probe
ttgtcactgtcatcagaatctgtcg

SEQ ID NO: 186070 - DNA, 25 bp, Artificial
  Probe
gattccgtttctactcctctgacga

SEQ ID NO: 186071 - DNA, 25 bp, Artificial
  Probe
atgatatgcgatttgacagaagcgg

SEQ ID NO: 186072 - DNA, 25 bp, Artificial
  Probe
gtcactgtcatcagaatctgtcggc

SEQ ID NO: 186073 - DNA, 25 bp, Artificial
  Probe
tttctactcctctgacgaatgggta

SEQ ID NO: 186074 - DNA, 25 bp, Artificial
  Probe
acagaaacacaaccggatgtcttga

SEQ ID NO: 186075 - DNA, 25 bp, Artificial
  Probe
gccatcatcgcgccaaattttgcgc

SEQ ID NO: 186076 - DNA, 25 bp, Artificial
  Probe
aagcttgacgcaccaagcggaactg

SEQ ID NO: 186077 - DNA, 25 bp, Artificial
  Probe
acgcaccaagcggaactgcgcttaa

SEQ ID NO: 186078 - DNA, 25 bp, Artificial
  Probe
gtcagatgctttcatttacacagat

SEQ ID NO: 186079 - DNA, 25 bp, Artificial
  Probe
gaagcttgacgcaccaagcggaact

SEQ ID NO: 186080 - DNA, 25 bp, Artificial
  Probe
aaagcagcaaggacatccggatgaa

SEQ ID NO: 186081 - DNA, 25 bp, Artificial
  Probe
cttgtaggggccatagaccatacat

SEQ ID NO: 186082 - DNA, 25 bp, Artificial
  Probe
ttctcccaggagcaagaggagcgga

SEQ ID NO: 186083 - DNA, 25 bp, Artificial
  Probe
tctgatgtgatgcctgttgagtcag

SEQ ID NO: 186084 - DNA, 25 bp, Artificial
  Probe
attgcattagagcacggagtccgtc

SEQ ID NO: 186085 - DNA, 25 bp, Artificial
  Probe
gagtcagatgctttcatttacacag

SEQ ID NO: 186086 - DNA, 25 bp, Artificial
  Probe
ttgcgctcggtgcgatactgatgat

SEQ ID NO: 186087 - DNA, 25 bp, Artificial
  Probe
ggccatagaccatacatacgatcag

SEQ ID NO: 186088 - DNA, 25 bp, Artificial
  Probe
gccaactattttgaggatgttgaga

SEQ ID NO: 186089 - DNA, 25 bp, Artificial
  Probe
agtcattgcgggaccgcgtggaaga

SEQ ID NO: 186090 - DNA, 25 bp, Artificial
  Probe
taggggccatagaccatacatacga

SEQ ID NO: 186091 - DNA, 25 bp, Artificial
  Probe
attagtcattgcgggaccgcgtgga

SEQ ID NO: 186092 - DNA, 25 bp, Artificial
  Probe
cgccaaattttgcgctcggtgcgat

SEQ ID NO: 186093 - DNA, 25 bp, Artificial
  Probe
cgcgccaaattttgcgctcggtgcg

SEQ ID NO: 186094 - DNA, 25 bp, Artificial
  Probe
gaccagaagcttgacgcaccaagcg

SEQ ID NO: 186095 - DNA, 25 bp, Artificial
  Probe
tgcgctcggtgcgatactgatgatg

SEQ ID NO: 186096 - DNA, 25 bp, Artificial
  Probe
ctttcatttacacagatatccatgc

SEQ ID NO: 186097 - DNA, 25 bp, Artificial
  Probe
tagaccatacatacgatcagcaaaa

SEQ ID NO: 186098 - DNA, 25 bp, Artificial
  Probe
atcggagccatcatcgcgccaaatt

SEQ ID NO: 186099 - DNA, 25 bp, Artificial
  Probe
gcaccaagcggaactgcgcttaaaa

SEQ ID NO: 186100 - DNA, 25 bp, Artificial
  Probe
ttgcattagagcacggagtccgtcc

SEQ ID NO: 186101 - DNA, 25 bp, Artificial
  Probe
cagaaacacaaccggatgtcttgat

SEQ ID NO: 186102 - DNA, 25 bp, Artificial
  Probe
aaattctcccaggagcaagaggagc

SEQ ID NO: 186103 - DNA, 25 bp, Artificial
  Probe
ctcccaggagcaagaggagcggagc

SEQ ID NO: 186104 - DNA, 25 bp, Artificial
  Probe
ccaactattttgaggatgttgagat

SEQ ID NO: 186105 - DNA, 25 bp, Artificial
  Probe
tgtaggggccatagaccatacatac

SEQ ID NO: 186106 - DNA, 25 bp, Artificial
  Probe
gatatccatgcctgttttacagaaa

SEQ ID NO: 186107 - DNA, 25 bp, Artificial
  Probe
ccaaattttgcgctcggtgcgatac

SEQ ID NO: 186108 - DNA, 25 bp, Artificial
  Probe
tgcattagagcacggagtccgtcca

SEQ ID NO: 186109 - DNA, 25 bp, Artificial
  Probe
tacatacaaaaattgcattagagca

SEQ ID NO: 186110 - DNA, 25 bp, Artificial
  Probe
ccatcatcgcgccaaattttgcgct

SEQ ID NO: 186111 - DNA, 25 bp, Artificial
  Probe
cacaaccggatgtcttgattgattt

SEQ ID NO: 186112 - DNA, 25 bp, Artificial
  Probe
cgctcggtgcgatactgatgatgaa

SEQ ID NO: 186113 - DNA, 25 bp, Artificial
  Probe
agcttgacgcaccaagcggaactgc

SEQ ID NO: 186114 - DNA, 25 bp, Artificial
  Probe
ggatcggagccatcatcgcgccaaa

SEQ ID NO: 186115 - DNA, 25 bp, Artificial
  Probe
tgcgcttaaaacagcggaaatgatt

SEQ ID NO: 186116 - DNA, 25 bp, Artificial
  Probe
tttgcgctcggtgcgatactgatga

SEQ ID NO: 186117 - DNA, 25 bp, Artificial
  Probe
acaaccggatgtcttgattgattta

SEQ ID NO: 186118 - DNA, 25 bp, Artificial
  Probe
ttggcagaacgaacaccacattttg

SEQ ID NO: 186119 - DNA, 25 bp, Artificial
  Probe
cagaagcttgacgcaccaagcggaa

SEQ ID NO: 186120 - DNA, 25 bp, Artificial
  Probe
gctgccaactattttgaggatgttg

SEQ ID NO: 186121 - DNA, 25 bp, Artificial
  Probe
gtgatgcctgttgagtcagatgctt

SEQ ID NO: 186122 - DNA, 25 bp, Artificial
  Probe
aagagctcacatctttaacagaaga

SEQ ID NO: 186123 - DNA, 25 bp, Artificial
  Probe
atcatgaccagaagcttgacgcacc

SEQ ID NO: 186124 - DNA, 25 bp, Artificial
  Probe
ttattgagcttcatcatgaccagaa

SEQ ID NO: 186125 - DNA, 25 bp, Artificial
  Probe
ttcatttacacagatatccatgcct

SEQ ID NO: 186126 - DNA, 25 bp, Artificial
  Probe
tatctgatgtgatgcctgttgagtc

SEQ ID NO: 186127 - DNA, 25 bp, Artificial
  Probe
ttgagtcagatgctttcatttacac

SEQ ID NO: 186128 - DNA, 25 bp, Artificial
  Probe
ggggccatagaccatacatacgatc

SEQ ID NO: 186129 - DNA, 25 bp, Artificial
  Probe
attatctgatgtgatgcctgttgag

SEQ ID NO: 186130 - DNA, 25 bp, Artificial
  Probe
gagcttcatcatgaccagaagcttg

SEQ ID NO: 186131 - DNA, 25 bp, Artificial
  Probe
atagaccatacatacgatcagcaaa

SEQ ID NO: 186132 - DNA, 25 bp, Artificial
  Probe
ctgatgtgatgcctgttgagtcaga

SEQ ID NO: 186133 - DNA, 25 bp, Artificial
  Probe
caaattttgcgctcggtgcgatact

SEQ ID NO: 186134 - DNA, 25 bp, Artificial
  Probe
gcacggagtccgtccagttgtcgga

SEQ ID NO: 186135 - DNA, 25 bp, Artificial
  Probe
tcatttacacagatatccatgcctg

SEQ ID NO: 186136 - DNA, 25 bp, Artificial
  Probe
cagatgctttcatttacacagatat

SEQ ID NO: 186137 - DNA, 25 bp, Artificial
  Probe
gcggaactgcgcttaaaacagcgga

SEQ ID NO: 186138 - DNA, 25 bp, Artificial
  Probe
agcagcaaggacatccggatgaaaa

SEQ ID NO: 186139 - DNA, 25 bp, Artificial
  Probe
attattgagcttcatcatgaccaga

SEQ ID NO: 186140 - DNA, 25 bp, Artificial
  Probe
tcgcgccaaattttgcgctcggtgc

SEQ ID NO: 186141 - DNA, 25 bp, Artificial
  Probe
tgccaactattttgaggatgttgag

SEQ ID NO: 186142 - DNA, 25 bp, Artificial
  Probe
tgtgatgcctgttgagtcagatgct

SEQ ID NO: 186143 - DNA, 25 bp, Artificial
  Probe
tccatgcctgttttacagaaacaca

SEQ ID NO: 186144 - DNA, 25 bp, Artificial
  Probe
ccaggagcaagaggagcggagcaaa

SEQ ID NO: 186145 - DNA, 25 bp, Artificial
  Probe
tgctttcatttacacagatatccat

SEQ ID NO: 186146 - DNA, 25 bp, Artificial
  Probe
aaattatctgatgtgatgcctgttg

SEQ ID NO: 186147 - DNA, 25 bp, Artificial
  Probe
tcggtgcgatactgatgatgaaatt

SEQ ID NO: 186148 - DNA, 25 bp, Artificial
  Probe
tcatcatgaccagaagcttgacgca

SEQ ID NO: 186149 - DNA, 25 bp, Artificial
  Probe
agcttcatcatgaccagaagcttga

SEQ ID NO: 186150 - DNA, 25 bp, Artificial
  Probe
gatgcctgttgagtcagatgctttc

SEQ ID NO: 186151 - DNA, 25 bp, Artificial
  Probe
aaattttgcgctcggtgcgatactg

SEQ ID NO: 186152 - DNA, 25 bp, Artificial
  Probe
atgctttcatttacacagatatcca

SEQ ID NO: 186153 - DNA, 25 bp, Artificial
  Probe
tcatcgcgccaaattttgcgctcgg

SEQ ID NO: 186154 - DNA, 25 bp, Artificial
  Probe
tcggagccatcatcgcgccaaattt

SEQ ID NO: 186155 - DNA, 25 bp, Artificial
  Probe
tggctgccaactattttgaggatgt

SEQ ID NO: 186156 - DNA, 25 bp, Artificial
  Probe
tgcctgttgagtcagatgctttcat

SEQ ID NO: 186157 - DNA, 25 bp, Artificial
  Probe
ttagagcacggagtccgtccagttg

SEQ ID NO: 186158 - DNA, 25 bp, Artificial
  Probe
gagccatcatcgcgccaaattttgc

SEQ ID NO: 186159 - DNA, 25 bp, Artificial
  Probe
attgagcttcatcatgaccagaagc

SEQ ID NO: 186160 - DNA, 25 bp, Artificial
  Probe
cacagatatccatgcctgttttaca

SEQ ID NO: 186161 - DNA, 25 bp, Artificial
  Probe
cctgttgagtcagatgctttcattt

SEQ ID NO: 186162 - DNA, 25 bp, Artificial
  Probe
acacaaccggatgtcttgattgatt

SEQ ID NO: 186163 - DNA, 25 bp, Artificial
  Probe
agtcagatgctttcatttacacaga

SEQ ID NO: 186164 - DNA, 25 bp, Artificial
  Probe
cttgacgcaccaagcggaactgcgc

SEQ ID NO: 186165 - DNA, 25 bp, Artificial
  Probe
aaagggatcggagccatcatcgcgc

SEQ ID NO: 186166 - DNA, 25 bp, Artificial
  Probe
gacgcaccaagcggaactgcgctta

SEQ ID NO: 186167 - DNA, 25 bp, Artificial
  Probe
agggatcggagccatcatcgcgcca

SEQ ID NO: 186168 - DNA, 25 bp, Artificial
  Probe
ttctcagaagctgatttaaaagagc

SEQ ID NO: 186169 - DNA, 25 bp, Artificial
  Probe
gaaattctcccaggagcaagaggag

SEQ ID NO: 186170 - DNA, 25 bp, Artificial
  Probe
ttgaccttgtaggggccatagacca

SEQ ID NO: 186171 - DNA, 25 bp, Artificial
  Probe
catgaccagaagcttgacgcaccaa

SEQ ID NO: 186172 - DNA, 25 bp, Artificial
  Probe
ccatagaccatacatacgatcagca

SEQ ID NO: 186173 - DNA, 25 bp, Artificial
  Probe
cagcaaggacatccggatgaaaaag

SEQ ID NO: 186174 - DNA, 25 bp, Artificial
  Probe
tgaccagaagcttgacgcaccaagc

SEQ ID NO: 186175 - DNA, 25 bp, Artificial
  Probe
atggctgccaactattttgaggatg

SEQ ID NO: 186176 - DNA, 25 bp, Artificial
  Probe
ttcatcatgaccagaagcttgacgc

SEQ ID NO: 186177 - DNA, 25 bp, Artificial
  Probe
gaacaaccggtttctcagaagctga

SEQ ID NO: 186178 - DNA, 25 bp, Artificial
  Probe
cagatatccatgcctgttttacaga

SEQ ID NO: 186179 - DNA, 25 bp, Artificial
  Probe
catcatcgcgccaaattttgcgctc

SEQ ID NO: 186180 - DNA, 25 bp, Artificial
  Probe
gagctcacatctttaacagaagaaa

SEQ ID NO: 186181 - DNA, 25 bp, Artificial
  Probe
tgatgtgatgcctgttgagtcagat

SEQ ID NO: 186182 - DNA, 25 bp, Artificial
  Probe
ctattttgaggatgttgagattatt

SEQ ID NO: 186183 - DNA, 25 bp, Artificial
  Probe
acacaaccggatgtcttgattgatt

SEQ ID NO: 186184 - DNA, 25 bp, Artificial
  Probe
catgaccagaagcttgacgcaccaa

SEQ ID NO: 186185 - DNA, 25 bp, Artificial
  Probe
cacaaccggatgtcttgattgattt

SEQ ID NO: 186186 - DNA, 25 bp, Artificial
  Probe
tgaccagaagcttgacgcaccaagc

SEQ ID NO: 186187 - DNA, 25 bp, Artificial
  Probe
acaaccggatgtcttgattgattta

SEQ ID NO: 186188 - DNA, 25 bp, Artificial
  Probe
gaccagaagcttgacgcaccaagcg

SEQ ID NO: 186189 - DNA, 25 bp, Artificial
  Probe
tacatacaaaaattgcattagagca

SEQ ID NO: 186190 - DNA, 25 bp, Artificial
  Probe
cagaagcttgacgcaccaagcggaa

SEQ ID NO: 186191 - DNA, 25 bp, Artificial
  Probe
attgcattagagcacggagtccgtc

SEQ ID NO: 186192 - DNA, 25 bp, Artificial
  Probe
gaagcttgacgcaccaagcggaact

SEQ ID NO: 186193 - DNA, 25 bp, Artificial
  Probe
ttgcattagagcacggagtccgtcc

SEQ ID NO: 186194 - DNA, 25 bp, Artificial
  Probe
aagcttgacgcaccaagcggaactg

SEQ ID NO: 186195 - DNA, 25 bp, Artificial
  Probe
tgcattagagcacggagtccgtcca

SEQ ID NO: 186196 - DNA, 25 bp, Artificial
  Probe
agcttgacgcaccaagcggaactgc

SEQ ID NO: 186197 - DNA, 25 bp, Artificial
  Probe
ttagagcacggagtccgtccagttg

SEQ ID NO: 186198 - DNA, 25 bp, Artificial
  Probe
cttgacgcaccaagcggaactgcgc

SEQ ID NO: 186199 - DNA, 25 bp, Artificial
  Probe
gcacggagtccgtccagttgtcgga

SEQ ID NO: 186200 - DNA, 25 bp, Artificial
  Probe
gacgcaccaagcggaactgcgctta

SEQ ID NO: 186201 - DNA, 25 bp, Artificial
  Probe
gaacaaccggtttctcagaagctga

SEQ ID NO: 186202 - DNA, 25 bp, Artificial
  Probe
acgcaccaagcggaactgcgcttaa

SEQ ID NO: 186203 - DNA, 25 bp, Artificial
  Probe
attagtcattgcgggaccgcgtgga

SEQ ID NO: 186204 - DNA, 25 bp, Artificial
  Probe
ttctcagaagctgatttaaaagagc

SEQ ID NO: 186205 - DNA, 25 bp, Artificial
  Probe
gcaccaagcggaactgcgcttaaaa

SEQ ID NO: 186206 - DNA, 25 bp, Artificial
  Probe
agtcattgcgggaccgcgtggaaga

SEQ ID NO: 186207 - DNA, 25 bp, Artificial
  Probe
aagagctcacatctttaacagaaga

SEQ ID NO: 186208 - DNA, 25 bp, Artificial
  Probe
gcggaactgcgcttaaaacagcgga

SEQ ID NO: 186209 - DNA, 25 bp, Artificial
  Probe
ttggcagaacgaacaccacattttg

SEQ ID NO: 186210 - DNA, 25 bp, Artificial
  Probe
gagctcacatctttaacagaagaaa

SEQ ID NO: 186211 - DNA, 25 bp, Artificial
  Probe
tgcgcttaaaacagcggaaatgatt

SEQ ID NO: 186212 - DNA, 25 bp, Artificial
  Probe
ttgaccttgtaggggccatagacca

SEQ ID NO: 186213 - DNA, 25 bp, Artificial
  Probe
aaagggatcggagccatcatcgcgc

SEQ ID NO: 186214 - DNA, 25 bp, Artificial
  Probe
aaagcagcaaggacatccggatgaa

SEQ ID NO: 186215 - DNA, 25 bp, Artificial
  Probe
cttgtaggggccatagaccatacat

SEQ ID NO: 186216 - DNA, 25 bp, Artificial
  Probe
agggatcggagccatcatcgcgcca

SEQ ID NO: 186217 - DNA, 25 bp, Artificial
  Probe
agcagcaaggacatccggatgaaaa

SEQ ID NO: 186218 - DNA, 25 bp, Artificial
  Probe
tgtaggggccatagaccatacatac

SEQ ID NO: 186219 - DNA, 25 bp, Artificial
  Probe
ggatcggagccatcatcgcgccaaa

SEQ ID NO: 186220 - DNA, 25 bp, Artificial
  Probe
cagcaaggacatccggatgaaaaag

SEQ ID NO: 186221 - DNA, 25 bp, Artificial
  Probe
taggggccatagaccatacatacga

SEQ ID NO: 186222 - DNA, 25 bp, Artificial
  Probe
atcggagccatcatcgcgccaaatt

SEQ ID NO: 186223 - DNA, 25 bp, Artificial
  Probe
gaaattctcccaggagcaagaggag

SEQ ID NO: 186224 - DNA, 25 bp, Artificial
  Probe
ggggccatagaccatacatacgatc

SEQ ID NO: 186225 - DNA, 25 bp, Artificial
  Probe
tcggagccatcatcgcgccaaattt

SEQ ID NO: 186226 - DNA, 25 bp, Artificial
  Probe
aaattctcccaggagcaagaggagc

SEQ ID NO: 186227 - DNA, 25 bp, Artificial
  Probe
ggccatagaccatacatacgatcag

SEQ ID NO: 186228 - DNA, 25 bp, Artificial
  Probe
gagccatcatcgcgccaaattttgc

SEQ ID NO: 186229 - DNA, 25 bp, Artificial
  Probe
ttctcccaggagcaagaggagcgga

SEQ ID NO: 186230 - DNA, 25 bp, Artificial
  Probe
ccatagaccatacatacgatcagca

SEQ ID NO: 186231 - DNA, 25 bp, Artificial
  Probe
gccatcatcgcgccaaattttgcgc

SEQ ID NO: 186232 - DNA, 25 bp, Artificial
  Probe
ctcccaggagcaagaggagcggagc

SEQ ID NO: 186233 - DNA, 25 bp, Artificial
  Probe
atagaccatacatacgatcagcaaa

SEQ ID NO: 186234 - DNA, 25 bp, Artificial
  Probe
ccatcatcgcgccaaattttgcgct

SEQ ID NO: 186235 - DNA, 25 bp, Artificial
  Probe
ccaggagcaagaggagcggagcaaa

SEQ ID NO: 186236 - DNA, 25 bp, Artificial
  Probe
tagaccatacatacgatcagcaaaa

SEQ ID NO: 186237 - DNA, 25 bp, Artificial
  Probe
catcatcgcgccaaattttgcgctc

SEQ ID NO: 186238 - DNA, 25 bp, Artificial
  Probe
aaattatctgatgtgatgcctgttg

SEQ ID NO: 186239 - DNA, 25 bp, Artificial
  Probe
tcatcgcgccaaattttgcgctcgg

SEQ ID NO: 186240 - DNA, 25 bp, Artificial
  Probe
attatctgatgtgatgcctgttgag

SEQ ID NO: 186241 - DNA, 25 bp, Artificial
  Probe
tcgcgccaaattttgcgctcggtgc

SEQ ID NO: 186242 - DNA, 25 bp, Artificial
  Probe
tatctgatgtgatgcctgttgagtc

SEQ ID NO: 186243 - DNA, 25 bp, Artificial
  Probe
cgcgccaaattttgcgctcggtgcg

SEQ ID NO: 186244 - DNA, 25 bp, Artificial
  Probe
tctgatgtgatgcctgttgagtcag

SEQ ID NO: 186245 - DNA, 25 bp, Artificial
  Probe
cgccaaattttgcgctcggtgcgat

SEQ ID NO: 186246 - DNA, 25 bp, Artificial
  Probe
ctgatgtgatgcctgttgagtcaga

SEQ ID NO: 186247 - DNA, 25 bp, Artificial
  Probe
ccaaattttgcgctcggtgcgatac

SEQ ID NO: 186248 - DNA, 25 bp, Artificial
  Probe
tgatgtgatgcctgttgagtcagat

SEQ ID NO: 186249 - DNA, 25 bp, Artificial
  Probe
caaattttgcgctcggtgcgatact

SEQ ID NO: 186250 - DNA, 25 bp, Artificial
  Probe
tgtgatgcctgttgagtcagatgct

SEQ ID NO: 186251 - DNA, 25 bp, Artificial
  Probe
aaattttgcgctcggtgcgatactg

SEQ ID NO: 186252 - DNA, 25 bp, Artificial
  Probe
gtgatgcctgttgagtcagatgctt

SEQ ID NO: 186253 - DNA, 25 bp, Artificial
  Probe
tttgcgctcggtgcgatactgatga

SEQ ID NO: 186254 - DNA, 25 bp, Artificial
  Probe
gatgcctgttgagtcagatgctttc

SEQ ID NO: 186255 - DNA, 25 bp, Artificial
  Probe
ttgcgctcggtgcgatactgatgat

SEQ ID NO: 186256 - DNA, 25 bp, Artificial
  Probe
tgcctgttgagtcagatgctttcat

SEQ ID NO: 186257 - DNA, 25 bp, Artificial
  Probe
tgcgctcggtgcgatactgatgatg

SEQ ID NO: 186258 - DNA, 25 bp, Artificial
  Probe
cctgttgagtcagatgctttcattt

SEQ ID NO: 186259 - DNA, 25 bp, Artificial
  Probe
cgctcggtgcgatactgatgatgaa

SEQ ID NO: 186260 - DNA, 25 bp, Artificial
  Probe
ttgagtcagatgctttcatttacac

SEQ ID NO: 186261 - DNA, 25 bp, Artificial
  Probe
tcggtgcgatactgatgatgaaatt

SEQ ID NO: 186262 - DNA, 25 bp, Artificial
  Probe
gagtcagatgctttcatttacacag

SEQ ID NO: 186263 - DNA, 25 bp, Artificial
  Probe
atggctgccaactattttgaggatg

SEQ ID NO: 186264 - DNA, 25 bp, Artificial
  Probe
agtcagatgctttcatttacacaga

SEQ ID NO: 186265 - DNA, 25 bp, Artificial
  Probe
tggctgccaactattttgaggatgt

SEQ ID NO: 186266 - DNA, 25 bp, Artificial
  Probe
gtcagatgctttcatttacacagat

SEQ ID NO: 186267 - DNA, 25 bp, Artificial
  Probe
gctgccaactattttgaggatgttg

SEQ ID NO: 186268 - DNA, 25 bp, Artificial
  Probe
cagatgctttcatttacacagatat

SEQ ID NO: 186269 - DNA, 25 bp, Artificial
  Probe
tgccaactattttgaggatgttgag

SEQ ID NO: 186270 - DNA, 25 bp, Artificial
  Probe
atgctttcatttacacagatatcca

SEQ ID NO: 186271 - DNA, 25 bp, Artificial
  Probe
gccaactattttgaggatgttgaga

SEQ ID NO: 186272 - DNA, 25 bp, Artificial
  Probe
tgctttcatttacacagatatccat

SEQ ID NO: 186273 - DNA, 25 bp, Artificial
  Probe
ccaactattttgaggatgttgagat

SEQ ID NO: 186274 - DNA, 25 bp, Artificial
  Probe
ctttcatttacacagatatccatgc

SEQ ID NO: 186275 - DNA, 25 bp, Artificial
  Probe
ctattttgaggatgttgagattatt

SEQ ID NO: 186276 - DNA, 25 bp, Artificial
  Probe
ttcatttacacagatatccatgcct

SEQ ID NO: 186277 - DNA, 25 bp, Artificial
  Probe
attattgagcttcatcatgaccaga

SEQ ID NO: 186278 - DNA, 25 bp, Artificial
  Probe
tcatttacacagatatccatgcctg

SEQ ID NO: 186279 - DNA, 25 bp, Artificial
  Probe
ttattgagcttcatcatgaccagaa

SEQ ID NO: 186280 - DNA, 25 bp, Artificial
  Probe
cacagatatccatgcctgttttaca

SEQ ID NO: 186281 - DNA, 25 bp, Artificial
  Probe
attgagcttcatcatgaccagaagc

SEQ ID NO: 186282 - DNA, 25 bp, Artificial
  Probe
cagatatccatgcctgttttacaga

SEQ ID NO: 186283 - DNA, 25 bp, Artificial
  Probe
gagcttcatcatgaccagaagcttg

SEQ ID NO: 186284 - DNA, 25 bp, Artificial
  Probe
gatatccatgcctgttttacagaaa

SEQ ID NO: 186285 - DNA, 25 bp, Artificial
  Probe
agcttcatcatgaccagaagcttga

SEQ ID NO: 186286 - DNA, 25 bp, Artificial
  Probe
tccatgcctgttttacagaaacaca

SEQ ID NO: 186287 - DNA, 25 bp, Artificial
  Probe
ttcatcatgaccagaagcttgacgc

SEQ ID NO: 186288 - DNA, 25 bp, Artificial
  Probe
acagaaacacaaccggatgtcttga

SEQ ID NO: 186289 - DNA, 25 bp, Artificial
  Probe
tcatcatgaccagaagcttgacgca

SEQ ID NO: 186290 - DNA, 25 bp, Artificial
  Probe
cagaaacacaaccggatgtcttgat

SEQ ID NO: 186291 - DNA, 25 bp, Artificial
  Probe
atcatgaccagaagcttgacgcacc

SEQ ID NO: 186292 - DNA, 25 bp, Artificial
  Probe
acacaaccggatgtcttgattgatt

SEQ ID NO: 186293 - DNA, 25 bp, Artificial
  Probe
catgaccagaagcttgacgcaccaa

SEQ ID NO: 186294 - DNA, 25 bp, Artificial
  Probe
cacaaccggatgtcttgattgattt

SEQ ID NO: 186295 - DNA, 25 bp, Artificial
  Probe
tgaccagaagcttgacgcaccaagc

SEQ ID NO: 186296 - DNA, 25 bp, Artificial
  Probe
acaaccggatgtcttgattgattta

SEQ ID NO: 186297 - DNA, 25 bp, Artificial
  Probe
gaccagaagcttgacgcaccaagcg

SEQ ID NO: 186298 - DNA, 25 bp, Artificial
  Probe
tacatacaaaaattgcattagagca

SEQ ID NO: 186299 - DNA, 25 bp, Artificial
  Probe
cagaagcttgacgcaccaagcggaa

SEQ ID NO: 186300 - DNA, 25 bp, Artificial
  Probe
attgcattagagcacggagtccgtc

SEQ ID NO: 186301 - DNA, 25 bp, Artificial
  Probe
gaagcttgacgcaccaagcggaact

SEQ ID NO: 186302 - DNA, 25 bp, Artificial
  Probe
ttgcattagagcacggagtccgtcc

SEQ ID NO: 186303 - DNA, 25 bp, Artificial
  Probe
aagcttgacgcaccaagcggaactg

SEQ ID NO: 186304 - DNA, 25 bp, Artificial
  Probe
tgcattagagcacggagtccgtcca

SEQ ID NO: 186305 - DNA, 25 bp, Artificial
  Probe
agcttgacgcaccaagcggaactgc

SEQ ID NO: 186306 - DNA, 25 bp, Artificial
  Probe
ttagagcacggagtccgtccagttg

SEQ ID NO: 186307 - DNA, 25 bp, Artificial
  Probe
cttgacgcaccaagcggaactgcgc

SEQ ID NO: 186308 - DNA, 25 bp, Artificial
  Probe
gcacggagtccgtccagttgtcgga

SEQ ID NO: 186309 - DNA, 25 bp, Artificial
  Probe
gacgcaccaagcggaactgcgctta

SEQ ID NO: 186310 - DNA, 25 bp, Artificial
  Probe
gaacaaccggtttctcagaagctga

SEQ ID NO: 186311 - DNA, 25 bp, Artificial
  Probe
acgcaccaagcggaactgcgcttaa

SEQ ID NO: 186312 - DNA, 25 bp, Artificial
  Probe
attagtcattgcgggaccgcgtgga

SEQ ID NO: 186313 - DNA, 25 bp, Artificial
  Probe
ttctcagaagctgatttaaaagagc

SEQ ID NO: 186314 - DNA, 25 bp, Artificial
  Probe
gcaccaagcggaactgcgcttaaaa

SEQ ID NO: 186315 - DNA, 25 bp, Artificial
  Probe
agtcattgcgggaccgcgtggaaga

SEQ ID NO: 186316 - DNA, 25 bp, Artificial
  Probe
aagagctcacatctttaacagaaga

SEQ ID NO: 186317 - DNA, 25 bp, Artificial
  Probe
gcggaactgcgcttaaaacagcgga

SEQ ID NO: 186318 - DNA, 25 bp, Artificial
  Probe
ttggcagaacgaacaccacattttg

SEQ ID NO: 186319 - DNA, 25 bp, Artificial
  Probe
gagctcacatctttaacagaagaaa

SEQ ID NO: 186320 - DNA, 25 bp, Artificial
  Probe
tgcgcttaaaacagcggaaatgatt

SEQ ID NO: 186321 - DNA, 25 bp, Artificial
  Probe
ttgaccttgtaggggccatagacca

SEQ ID NO: 186322 - DNA, 25 bp, Artificial
  Probe
aaagggatcggagccatcatcgcgc

SEQ ID NO: 186323 - DNA, 25 bp, Artificial
  Probe
aaagcagcaaggacatccggatgaa

SEQ ID NO: 186324 - DNA, 25 bp, Artificial
  Probe
cttgtaggggccatagaccatacat

SEQ ID NO: 186325 - DNA, 25 bp, Artificial
  Probe
agggatcggagccatcatcgcgcca

SEQ ID NO: 186326 - DNA, 25 bp, Artificial
  Probe
agcagcaaggacatccggatgaaaa

SEQ ID NO: 186327 - DNA, 25 bp, Artificial
  Probe
tgtaggggccatagaccatacatac

SEQ ID NO: 186328 - DNA, 25 bp, Artificial
  Probe
ggatcggagccatcatcgcgccaaa

SEQ ID NO: 186329 - DNA, 25 bp, Artificial
  Probe
cagcaaggacatccggatgaaaaag

SEQ ID NO: 186330 - DNA, 25 bp, Artificial
  Probe
taggggccatagaccatacatacga

SEQ ID NO: 186331 - DNA, 25 bp, Artificial
  Probe
atcggagccatcatcgcgccaaatt

SEQ ID NO: 186332 - DNA, 25 bp, Artificial
  Probe
gaaattctcccaggagcaagaggag

SEQ ID NO: 186333 - DNA, 25 bp, Artificial
  Probe
ggggccatagaccatacatacgatc

SEQ ID NO: 186334 - DNA, 25 bp, Artificial
  Probe
tcggagccatcatcgcgccaaattt

SEQ ID NO: 186335 - DNA, 25 bp, Artificial
  Probe
aaattctcccaggagcaagaggagc

SEQ ID NO: 186336 - DNA, 25 bp, Artificial
  Probe
ggccatagaccatacatacgatcag

SEQ ID NO: 186337 - DNA, 25 bp, Artificial
  Probe
gagccatcatcgcgccaaattttgc

SEQ ID NO: 186338 - DNA, 25 bp, Artificial
  Probe
ttctcccaggagcaagaggagcgga

SEQ ID NO: 186339 - DNA, 25 bp, Artificial
  Probe
ccatagaccatacatacgatcagca

SEQ ID NO: 186340 - DNA, 25 bp, Artificial
  Probe
gccatcatcgcgccaaattttgcgc

SEQ ID NO: 186341 - DNA, 25 bp, Artificial
  Probe
ctcccaggagcaagaggagcggagc

SEQ ID NO: 186342 - DNA, 25 bp, Artificial
  Probe
atagaccatacatacgatcagcaaa

SEQ ID NO: 186343 - DNA, 25 bp, Artificial
  Probe
ccatcatcgcgccaaattttgcgct

SEQ ID NO: 186344 - DNA, 25 bp, Artificial
  Probe
ccaggagcaagaggagcggagcaaa

SEQ ID NO: 186345 - DNA, 25 bp, Artificial
  Probe
tagaccatacatacgatcagcaaaa

SEQ ID NO: 186346 - DNA, 25 bp, Artificial
  Probe
catcatcgcgccaaattttgcgctc

SEQ ID NO: 186347 - DNA, 25 bp, Artificial
  Probe
aaattatctgatgtgatgcctgttg

SEQ ID NO: 186348 - DNA, 25 bp, Artificial
  Probe
tcatcgcgccaaattttgcgctcgg

SEQ ID NO: 186349 - DNA, 25 bp, Artificial
  Probe
attatctgatgtgatgcctgttgag

SEQ ID NO: 186350 - DNA, 25 bp, Artificial
  Probe
tcgcgccaaattttgcgctcggtgc

SEQ ID NO: 186351 - DNA, 25 bp, Artificial
  Probe
tatctgatgtgatgcctgttgagtc

SEQ ID NO: 186352 - DNA, 25 bp, Artificial
  Probe
cgcgccaaattttgcgctcggtgcg

SEQ ID NO: 186353 - DNA, 25 bp, Artificial
  Probe
tctgatgtgatgcctgttgagtcag

SEQ ID NO: 186354 - DNA, 25 bp, Artificial
  Probe
cgccaaattttgcgctcggtgcgat

SEQ ID NO: 186355 - DNA, 25 bp, Artificial
  Probe
ctgatgtgatgcctgttgagtcaga

SEQ ID NO: 186356 - DNA, 25 bp, Artificial
  Probe
ccaaattttgcgctcggtgcgatac

SEQ ID NO: 186357 - DNA, 25 bp, Artificial
  Probe
tgatgtgatgcctgttgagtcagat

SEQ ID NO: 186358 - DNA, 25 bp, Artificial
  Probe
caaattttgcgctcggtgcgatact

SEQ ID NO: 186359 - DNA, 25 bp, Artificial
  Probe
tgtgatgcctgttgagtcagatgct

SEQ ID NO: 186360 - DNA, 25 bp, Artificial
  Probe
aaattttgcgctcggtgcgatactg

SEQ ID NO: 186361 - DNA, 25 bp, Artificial
  Probe
gtgatgcctgttgagtcagatgctt

SEQ ID NO: 186362 - DNA, 25 bp, Artificial
  Probe
tttgcgctcggtgcgatactgatga

SEQ ID NO: 186363 - DNA, 25 bp, Artificial
  Probe
gatgcctgttgagtcagatgctttc

SEQ ID NO: 186364 - DNA, 25 bp, Artificial
  Probe
ttgcgctcggtgcgatactgatgat

SEQ ID NO: 186365 - DNA, 25 bp, Artificial
  Probe
tgcctgttgagtcagatgctttcat

SEQ ID NO: 186366 - DNA, 25 bp, Artificial
  Probe
tgcgctcggtgcgatactgatgatg

SEQ ID NO: 186367 - DNA, 25 bp, Artificial
  Probe
cctgttgagtcagatgctttcattt

SEQ ID NO: 186368 - DNA, 25 bp, Artificial
  Probe
cgctcggtgcgatactgatgatgaa

SEQ ID NO: 186369 - DNA, 25 bp, Artificial
  Probe
ttgagtcagatgctttcatttacac

SEQ ID NO: 186370 - DNA, 25 bp, Artificial
  Probe
tcggtgcgatactgatgatgaaatt

SEQ ID NO: 186371 - DNA, 25 bp, Artificial
  Probe
gagtcagatgctttcatttacacag

SEQ ID NO: 186372 - DNA, 25 bp, Artificial
  Probe
atggctgccaactattttgaggatg

SEQ ID NO: 186373 - DNA, 25 bp, Artificial
  Probe
agtcagatgctttcatttacacaga

SEQ ID NO: 186374 - DNA, 25 bp, Artificial
  Probe
tggctgccaactattttgaggatgt

SEQ ID NO: 186375 - DNA, 25 bp, Artificial
  Probe
gtcagatgctttcatttacacagat

SEQ ID NO: 186376 - DNA, 25 bp, Artificial
  Probe
gctgccaactattttgaggatgttg

SEQ ID NO: 186377 - DNA, 25 bp, Artificial
  Probe
cagatgctttcatttacacagatat

SEQ ID NO: 186378 - DNA, 25 bp, Artificial
  Probe
tgccaactattttgaggatgttgag

SEQ ID NO: 186379 - DNA, 25 bp, Artificial
  Probe
atgctttcatttacacagatatcca

SEQ ID NO: 186380 - DNA, 25 bp, Artificial
  Probe
gccaactattttgaggatgttgaga

SEQ ID NO: 186381 - DNA, 25 bp, Artificial
  Probe
tgctttcatttacacagatatccat

SEQ ID NO: 186382 - DNA, 25 bp, Artificial
  Probe
ccaactattttgaggatgttgagat

SEQ ID NO: 186383 - DNA, 25 bp, Artificial
  Probe
ctttcatttacacagatatccatgc

SEQ ID NO: 186384 - DNA, 25 bp, Artificial
  Probe
ctattttgaggatgttgagattatt

SEQ ID NO: 186385 - DNA, 25 bp, Artificial
  Probe
ttcatttacacagatatccatgcct

SEQ ID NO: 186386 - DNA, 25 bp, Artificial
  Probe
attattgagcttcatcatgaccaga

SEQ ID NO: 186387 - DNA, 25 bp, Artificial
  Probe
tcatttacacagatatccatgcctg

SEQ ID NO: 186388 - DNA, 25 bp, Artificial
  Probe
ttattgagcttcatcatgaccagaa

SEQ ID NO: 186389 - DNA, 25 bp, Artificial
  Probe
cacagatatccatgcctgttttaca

SEQ ID NO: 186390 - DNA, 25 bp, Artificial
  Probe
attgagcttcatcatgaccagaagc

SEQ ID NO: 186391 - DNA, 25 bp, Artificial
  Probe
cagatatccatgcctgttttacaga

SEQ ID NO: 186392 - DNA, 25 bp, Artificial
  Probe
gagcttcatcatgaccagaagcttg

SEQ ID NO: 186393 - DNA, 25 bp, Artificial
  Probe
gatatccatgcctgttttacagaaa

SEQ ID NO: 186394 - DNA, 25 bp, Artificial
  Probe
agcttcatcatgaccagaagcttga

SEQ ID NO: 186395 - DNA, 25 bp, Artificial
  Probe
tccatgcctgttttacagaaacaca

SEQ ID NO: 186396 - DNA, 25 bp, Artificial
  Probe
ttcatcatgaccagaagcttgacgc

SEQ ID NO: 186397 - DNA, 25 bp, Artificial
  Probe
acagaaacacaaccggatgtcttga

SEQ ID NO: 186398 - DNA, 25 bp, Artificial
  Probe
tcatcatgaccagaagcttgacgca

SEQ ID NO: 186399 - DNA, 25 bp, Artificial
  Probe
cagaaacacaaccggatgtcttgat

SEQ ID NO: 186400 - DNA, 25 bp, Artificial
  Probe
atcatgaccagaagcttgacgcacc

SEQ ID NO: 186401 - DNA, 25 bp, Artificial
  Probe
acacaaccggatgtcttgattgatt

SEQ ID NO: 186402 - DNA, 25 bp, Artificial
  Probe
catgaccagaagcttgacgcaccaa

SEQ ID NO: 186403 - DNA, 25 bp, Artificial
  Probe
cacaaccggatgtcttgattgattt

SEQ ID NO: 186404 - DNA, 25 bp, Artificial
  Probe
tgaccagaagcttgacgcaccaagc

SEQ ID NO: 186405 - DNA, 25 bp, Artificial
  Probe
acaaccggatgtcttgattgattta

SEQ ID NO: 186406 - DNA, 25 bp, Artificial
  Probe
gaccagaagcttgacgcaccaagcg

SEQ ID NO: 186407 - DNA, 25 bp, Artificial
  Probe
tacatacaaaaattgcattagagca

SEQ ID NO: 186408 - DNA, 25 bp, Artificial
  Probe
cagaagcttgacgcaccaagcggaa

SEQ ID NO: 186409 - DNA, 25 bp, Artificial
  Probe
attgcattagagcacggagtccgtc

SEQ ID NO: 186410 - DNA, 25 bp, Artificial
  Probe
gaagcttgacgcaccaagcggaact

SEQ ID NO: 186411 - DNA, 25 bp, Artificial
  Probe
ttgcattagagcacggagtccgtcc

SEQ ID NO: 186412 - DNA, 25 bp, Artificial
  Probe
aagcttgacgcaccaagcggaactg

SEQ ID NO: 186413 - DNA, 25 bp, Artificial
  Probe
tgcattagagcacggagtccgtcca

SEQ ID NO: 186414 - DNA, 25 bp, Artificial
  Probe
agcttgacgcaccaagcggaactgc

SEQ ID NO: 186415 - DNA, 25 bp, Artificial
  Probe
ttagagcacggagtccgtccagttg

SEQ ID NO: 186416 - DNA, 25 bp, Artificial
  Probe
cttgacgcaccaagcggaactgcgc

SEQ ID NO: 186417 - DNA, 25 bp, Artificial
  Probe
gcacggagtccgtccagttgtcgga

SEQ ID NO: 186418 - DNA, 25 bp, Artificial
  Probe
gacgcaccaagcggaactgcgctta

SEQ ID NO: 186419 - DNA, 25 bp, Artificial
  Probe
gaacaaccggtttctcagaagctga

SEQ ID NO: 186420 - DNA, 25 bp, Artificial
  Probe
acgcaccaagcggaactgcgcttaa

SEQ ID NO: 186421 - DNA, 25 bp, Artificial
  Probe
attagtcattgcgggaccgcgtgga

SEQ ID NO: 186422 - DNA, 25 bp, Artificial
  Probe
ttctcagaagctgatttaaaagagc

SEQ ID NO: 186423 - DNA, 25 bp, Artificial
  Probe
gcaccaagcggaactgcgcttaaaa

SEQ ID NO: 186424 - DNA, 25 bp, Artificial
  Probe
agtcattgcgggaccgcgtggaaga

SEQ ID NO: 186425 - DNA, 25 bp, Artificial
  Probe
aagagctcacatctttaacagaaga

SEQ ID NO: 186426 - DNA, 25 bp, Artificial
  Probe
gcggaactgcgcttaaaacagcgga

SEQ ID NO: 186427 - DNA, 25 bp, Artificial
  Probe
ttggcagaacgaacaccacattttg

SEQ ID NO: 186428 - DNA, 25 bp, Artificial
  Probe
gagctcacatctttaacagaagaaa

SEQ ID NO: 186429 - DNA, 25 bp, Artificial
  Probe
tgcgcttaaaacagcggaaatgatt

SEQ ID NO: 186430 - DNA, 25 bp, Artificial
  Probe
ttgaccttgtaggggccatagacca

SEQ ID NO: 186431 - DNA, 25 bp, Artificial
  Probe
aaagggatcggagccatcatcgcgc

SEQ ID NO: 186432 - DNA, 25 bp, Artificial
  Probe
aaagcagcaaggacatccggatgaa

SEQ ID NO: 186433 - DNA, 25 bp, Artificial
  Probe
cttgtaggggccatagaccatacat

SEQ ID NO: 186434 - DNA, 25 bp, Artificial
  Probe
agggatcggagccatcatcgcgcca

SEQ ID NO: 186435 - DNA, 25 bp, Artificial
  Probe
agcagcaaggacatccggatgaaaa

SEQ ID NO: 186436 - DNA, 25 bp, Artificial
  Probe
tgtaggggccatagaccatacatac

SEQ ID NO: 186437 - DNA, 25 bp, Artificial
  Probe
ggatcggagccatcatcgcgccaaa

SEQ ID NO: 186438 - DNA, 25 bp, Artificial
  Probe
cagcaaggacatccggatgaaaaag

SEQ ID NO: 186439 - DNA, 25 bp, Artificial
  Probe
taggggccatagaccatacatacga

SEQ ID NO: 186440 - DNA, 25 bp, Artificial
  Probe
atcggagccatcatcgcgccaaatt

SEQ ID NO: 186441 - DNA, 25 bp, Artificial
  Probe
gaaattctcccaggagcaagaggag

SEQ ID NO: 186442 - DNA, 25 bp, Artificial
  Probe
ggggccatagaccatacatacgatc

SEQ ID NO: 186443 - DNA, 25 bp, Artificial
  Probe
tcggagccatcatcgcgccaaattt

SEQ ID NO: 186444 - DNA, 25 bp, Artificial
  Probe
aaattctcccaggagcaagaggagc

SEQ ID NO: 186445 - DNA, 25 bp, Artificial
  Probe
ggccatagaccatacatacgatcag

SEQ ID NO: 186446 - DNA, 25 bp, Artificial
  Probe
gagccatcatcgcgccaaattttgc

SEQ ID NO: 186447 - DNA, 25 bp, Artificial
  Probe
ttctcccaggagcaagaggagcgga

SEQ ID NO: 186448 - DNA, 25 bp, Artificial
  Probe
ccatagaccatacatacgatcagca

SEQ ID NO: 186449 - DNA, 25 bp, Artificial
  Probe
gccatcatcgcgccaaattttgcgc

SEQ ID NO: 186450 - DNA, 25 bp, Artificial
  Probe
ctcccaggagcaagaggagcggagc

SEQ ID NO: 186451 - DNA, 25 bp, Artificial
  Probe
atagaccatacatacgatcagcaaa

SEQ ID NO: 186452 - DNA, 25 bp, Artificial
  Probe
ccatcatcgcgccaaattttgcgct

SEQ ID NO: 186453 - DNA, 25 bp, Artificial
  Probe
ccaggagcaagaggagcggagcaaa

SEQ ID NO: 186454 - DNA, 25 bp, Artificial
  Probe
tagaccatacatacgatcagcaaaa

SEQ ID NO: 186455 - DNA, 25 bp, Artificial
  Probe
catcatcgcgccaaattttgcgctc

SEQ ID NO: 186456 - DNA, 25 bp, Artificial
  Probe
aaattatctgatgtgatgcctgttg

SEQ ID NO: 186457 - DNA, 25 bp, Artificial
  Probe
tcatcgcgccaaattttgcgctcgg

SEQ ID NO: 186458 - DNA, 25 bp, Artificial
  Probe
attatctgatgtgatgcctgttgag

SEQ ID NO: 186459 - DNA, 25 bp, Artificial
  Probe
tcgcgccaaattttgcgctcggtgc

SEQ ID NO: 186460 - DNA, 25 bp, Artificial
  Probe
tatctgatgtgatgcctgttgagtc

SEQ ID NO: 186461 - DNA, 25 bp, Artificial
  Probe
cgcgccaaattttgcgctcggtgcg

SEQ ID NO: 186462 - DNA, 25 bp, Artificial
  Probe
tctgatgtgatgcctgttgagtcag

SEQ ID NO: 186463 - DNA, 25 bp, Artificial
  Probe
cgccaaattttgcgctcggtgcgat

SEQ ID NO: 186464 - DNA, 25 bp, Artificial
  Probe
ctgatgtgatgcctgttgagtcaga

SEQ ID NO: 186465 - DNA, 25 bp, Artificial
  Probe
ccaaattttgcgctcggtgcgatac

SEQ ID NO: 186466 - DNA, 25 bp, Artificial
  Probe
tgatgtgatgcctgttgagtcagat

SEQ ID NO: 186467 - DNA, 25 bp, Artificial
  Probe
caaattttgcgctcggtgcgatact

SEQ ID NO: 186468 - DNA, 25 bp, Artificial
  Probe
tgtgatgcctgttgagtcagatgct

SEQ ID NO: 186469 - DNA, 25 bp, Artificial
  Probe
aaattttgcgctcggtgcgatactg

SEQ ID NO: 186470 - DNA, 25 bp, Artificial
  Probe
gtgatgcctgttgagtcagatgctt

SEQ ID NO: 186471 - DNA, 25 bp, Artificial
  Probe
tttgcgctcggtgcgatactgatga

SEQ ID NO: 186472 - DNA, 25 bp, Artificial
  Probe
gatgcctgttgagtcagatgctttc

SEQ ID NO: 186473 - DNA, 25 bp, Artificial
  Probe
ttgcgctcggtgcgatactgatgat

SEQ ID NO: 186474 - DNA, 25 bp, Artificial
  Probe
tgcctgttgagtcagatgctttcat

SEQ ID NO: 186475 - DNA, 25 bp, Artificial
  Probe
tgcgctcggtgcgatactgatgatg

SEQ ID NO: 186476 - DNA, 25 bp, Artificial
  Probe
cctgttgagtcagatgctttcattt

SEQ ID NO: 186477 - DNA, 25 bp, Artificial
  Probe
cgctcggtgcgatactgatgatgaa

SEQ ID NO: 186478 - DNA, 25 bp, Artificial
  Probe
ttgagtcagatgctttcatttacac

SEQ ID NO: 186479 - DNA, 25 bp, Artificial
  Probe
tcggtgcgatactgatgatgaaatt

SEQ ID NO: 186480 - DNA, 25 bp, Artificial
  Probe
gagtcagatgctttcatttacacag

SEQ ID NO: 186481 - DNA, 25 bp, Artificial
  Probe
atggctgccaactattttgaggatg

SEQ ID NO: 186482 - DNA, 25 bp, Artificial
  Probe
agtcagatgctttcatttacacaga

SEQ ID NO: 186483 - DNA, 25 bp, Artificial
  Probe
tggctgccaactattttgaggatgt

SEQ ID NO: 186484 - DNA, 25 bp, Artificial
  Probe
gtcagatgctttcatttacacagat

SEQ ID NO: 186485 - DNA, 25 bp, Artificial
  Probe
gctgccaactattttgaggatgttg

SEQ ID NO: 186486 - DNA, 25 bp, Artificial
  Probe
cagatgctttcatttacacagatat

SEQ ID NO: 186487 - DNA, 25 bp, Artificial
  Probe
tgccaactattttgaggatgttgag

SEQ ID NO: 186488 - DNA, 25 bp, Artificial
  Probe
atgctttcatttacacagatatcca

SEQ ID NO: 186489 - DNA, 25 bp, Artificial
  Probe
gccaactattttgaggatgttgaga

SEQ ID NO: 186490 - DNA, 25 bp, Artificial
  Probe
tgctttcatttacacagatatccat

SEQ ID NO: 186491 - DNA, 25 bp, Artificial
  Probe
ccaactattttgaggatgttgagat

SEQ ID NO: 186492 - DNA, 25 bp, Artificial
  Probe
ctttcatttacacagatatccatgc

SEQ ID NO: 186493 - DNA, 25 bp, Artificial
  Probe
ctattttgaggatgttgagattatt

SEQ ID NO: 186494 - DNA, 25 bp, Artificial
  Probe
ttcatttacacagatatccatgcct

SEQ ID NO: 186495 - DNA, 25 bp, Artificial
  Probe
attattgagcttcatcatgaccaga

SEQ ID NO: 186496 - DNA, 25 bp, Artificial
  Probe
tcatttacacagatatccatgcctg

SEQ ID NO: 186497 - DNA, 25 bp, Artificial
  Probe
ttattgagcttcatcatgaccagaa

SEQ ID NO: 186498 - DNA, 25 bp, Artificial
  Probe
cacagatatccatgcctgttttaca

SEQ ID NO: 186499 - DNA, 25 bp, Artificial
  Probe
attgagcttcatcatgaccagaagc

SEQ ID NO: 186500 - DNA, 25 bp, Artificial
  Probe
cagatatccatgcctgttttacaga

SEQ ID NO: 186501 - DNA, 25 bp, Artificial
  Probe
gagcttcatcatgaccagaagcttg

SEQ ID NO: 186502 - DNA, 25 bp, Artificial
  Probe
gatatccatgcctgttttacagaaa

SEQ ID NO: 186503 - DNA, 25 bp, Artificial
  Probe
agcttcatcatgaccagaagcttga

SEQ ID NO: 186504 - DNA, 25 bp, Artificial
  Probe
tccatgcctgttttacagaaacaca

SEQ ID NO: 186505 - DNA, 25 bp, Artificial
  Probe
ttcatcatgaccagaagcttgacgc

SEQ ID NO: 186506 - DNA, 25 bp, Artificial
  Probe
acagaaacacaaccggatgtcttga

SEQ ID NO: 186507 - DNA, 25 bp, Artificial
  Probe
tcatcatgaccagaagcttgacgca

SEQ ID NO: 186508 - DNA, 25 bp, Artificial
  Probe
cagaaacacaaccggatgtcttgat

SEQ ID NO: 186509 - DNA, 25 bp, Artificial
  Probe
atcatgaccagaagcttgacgcacc

SEQ ID NO: 186510 - DNA, 25 bp, Artificial
  Probe
acacaaccggatgtcttgattgatt

SEQ ID NO: 186511 - DNA, 25 bp, Artificial
  Probe
catgaccagaagcttgacgcaccaa

SEQ ID NO: 186512 - DNA, 25 bp, Artificial
  Probe
cacaaccggatgtcttgattgattt

SEQ ID NO: 186513 - DNA, 25 bp, Artificial
  Probe
tgaccagaagcttgacgcaccaagc

SEQ ID NO: 186514 - DNA, 25 bp, Artificial
  Probe
acaaccggatgtcttgattgattta

SEQ ID NO: 186515 - DNA, 25 bp, Artificial
  Probe
gaccagaagcttgacgcaccaagcg

SEQ ID NO: 186516 - DNA, 25 bp, Artificial
  Probe
tacatacaaaaattgcattagagca

SEQ ID NO: 186517 - DNA, 25 bp, Artificial
  Probe
cagaagcttgacgcaccaagcggaa

SEQ ID NO: 186518 - DNA, 25 bp, Artificial
  Probe
attgcattagagcacggagtccgtc

SEQ ID NO: 186519 - DNA, 25 bp, Artificial
  Probe
gaagcttgacgcaccaagcggaact

SEQ ID NO: 186520 - DNA, 25 bp, Artificial
  Probe
ttgcattagagcacggagtccgtcc

SEQ ID NO: 186521 - DNA, 25 bp, Artificial
  Probe
aagcttgacgcaccaagcggaactg

SEQ ID NO: 186522 - DNA, 25 bp, Artificial
  Probe
tgcattagagcacggagtccgtcca

SEQ ID NO: 186523 - DNA, 25 bp, Artificial
  Probe
agcttgacgcaccaagcggaactgc

SEQ ID NO: 186524 - DNA, 25 bp, Artificial
  Probe
ttagagcacggagtccgtccagttg

SEQ ID NO: 186525 - DNA, 25 bp, Artificial
  Probe
cttgacgcaccaagcggaactgcgc

SEQ ID NO: 186526 - DNA, 25 bp, Artificial
  Probe
gcacggagtccgtccagttgtcgga

SEQ ID NO: 186527 - DNA, 25 bp, Artificial
  Probe
gacgcaccaagcggaactgcgctta

SEQ ID NO: 186528 - DNA, 25 bp, Artificial
  Probe
gaacaaccggtttctcagaagctga

SEQ ID NO: 186529 - DNA, 25 bp, Artificial
  Probe
acgcaccaagcggaactgcgcttaa

SEQ ID NO: 186530 - DNA, 25 bp, Artificial
  Probe
attagtcattgcgggaccgcgtgga

SEQ ID NO: 186531 - DNA, 25 bp, Artificial
  Probe
ttctcagaagctgatttaaaagagc

SEQ ID NO: 186532 - DNA, 25 bp, Artificial
  Probe
gcaccaagcggaactgcgcttaaaa

SEQ ID NO: 186533 - DNA, 25 bp, Artificial
  Probe
agtcattgcgggaccgcgtggaaga

SEQ ID NO: 186534 - DNA, 25 bp, Artificial
  Probe
aagagctcacatctttaacagaaga

SEQ ID NO: 186535 - DNA, 25 bp, Artificial
  Probe
gcggaactgcgcttaaaacagcgga

SEQ ID NO: 186536 - DNA, 25 bp, Artificial
  Probe
ttggcagaacgaacaccacattttg

SEQ ID NO: 186537 - DNA, 25 bp, Artificial
  Probe
gagctcacatctttaacagaagaaa

SEQ ID NO: 186538 - DNA, 25 bp, Artificial
  Probe
tgcgcttaaaacagcggaaatgatt

SEQ ID NO: 186539 - DNA, 25 bp, Artificial
  Probe
ttgaccttgtaggggccatagacca

SEQ ID NO: 186540 - DNA, 25 bp, Artificial
  Probe
aaagggatcggagccatcatcgcgc

SEQ ID NO: 186541 - DNA, 25 bp, Artificial
  Probe
aaagcagcaaggacatccggatgaa

SEQ ID NO: 186542 - DNA, 25 bp, Artificial
  Probe
cttgtaggggccatagaccatacat

SEQ ID NO: 186543 - DNA, 25 bp, Artificial
  Probe
agggatcggagccatcatcgcgcca

SEQ ID NO: 186544 - DNA, 25 bp, Artificial
  Probe
agcagcaaggacatccggatgaaaa

SEQ ID NO: 186545 - DNA, 25 bp, Artificial
  Probe
tgtaggggccatagaccatacatac

SEQ ID NO: 186546 - DNA, 25 bp, Artificial
  Probe
ggatcggagccatcatcgcgccaaa

SEQ ID NO: 186547 - DNA, 25 bp, Artificial
  Probe
cagcaaggacatccggatgaaaaag

SEQ ID NO: 186548 - DNA, 25 bp, Artificial
  Probe
taggggccatagaccatacatacga

SEQ ID NO: 186549 - DNA, 25 bp, Artificial
  Probe
atcggagccatcatcgcgccaaatt

SEQ ID NO: 186550 - DNA, 25 bp, Artificial
  Probe
gaaattctcccaggagcaagaggag

SEQ ID NO: 186551 - DNA, 25 bp, Artificial
  Probe
ggggccatagaccatacatacgatc

SEQ ID NO: 186552 - DNA, 25 bp, Artificial
  Probe
tcggagccatcatcgcgccaaattt

SEQ ID NO: 186553 - DNA, 25 bp, Artificial
  Probe
aaattctcccaggagcaagaggagc

SEQ ID NO: 186554 - DNA, 25 bp, Artificial
  Probe
ggccatagaccatacatacgatcag

SEQ ID NO: 186555 - DNA, 25 bp, Artificial
  Probe
gagccatcatcgcgccaaattttgc

SEQ ID NO: 186556 - DNA, 25 bp, Artificial
  Probe
ttctcccaggagcaagaggagcgga

SEQ ID NO: 186557 - DNA, 25 bp, Artificial
  Probe
ccatagaccatacatacgatcagca

SEQ ID NO: 186558 - DNA, 25 bp, Artificial
  Probe
gccatcatcgcgccaaattttgcgc

SEQ ID NO: 186559 - DNA, 25 bp, Artificial
  Probe
ctcccaggagcaagaggagcggagc

SEQ ID NO: 186560 - DNA, 25 bp, Artificial
  Probe
atagaccatacatacgatcagcaaa

SEQ ID NO: 186561 - DNA, 25 bp, Artificial
  Probe
ccatcatcgcgccaaattttgcgct

SEQ ID NO: 186562 - DNA, 25 bp, Artificial
  Probe
ccaggagcaagaggagcggagcaaa

SEQ ID NO: 186563 - DNA, 25 bp, Artificial
  Probe
tagaccatacatacgatcagcaaaa

SEQ ID NO: 186564 - DNA, 25 bp, Artificial
  Probe
catcatcgcgccaaattttgcgctc

SEQ ID NO: 186565 - DNA, 25 bp, Artificial
  Probe
aaattatctgatgtgatgcctgttg

SEQ ID NO: 186566 - DNA, 25 bp, Artificial
  Probe
tcatcgcgccaaattttgcgctcgg

SEQ ID NO: 186567 - DNA, 25 bp, Artificial
  Probe
attatctgatgtgatgcctgttgag

SEQ ID NO: 186568 - DNA, 25 bp, Artificial
  Probe
tcgcgccaaattttgcgctcggtgc

SEQ ID NO: 186569 - DNA, 25 bp, Artificial
  Probe
tatctgatgtgatgcctgttgagtc

SEQ ID NO: 186570 - DNA, 25 bp, Artificial
  Probe
cgcgccaaattttgcgctcggtgcg

SEQ ID NO: 186571 - DNA, 25 bp, Artificial
  Probe
tctgatgtgatgcctgttgagtcag

SEQ ID NO: 186572 - DNA, 25 bp, Artificial
  Probe
cgccaaattttgcgctcggtgcgat

SEQ ID NO: 186573 - DNA, 25 bp, Artificial
  Probe
ctgatgtgatgcctgttgagtcaga

SEQ ID NO: 186574 - DNA, 25 bp, Artificial
  Probe
ccaaattttgcgctcggtgcgatac

SEQ ID NO: 186575 - DNA, 25 bp, Artificial
  Probe
tgatgtgatgcctgttgagtcagat

SEQ ID NO: 186576 - DNA, 25 bp, Artificial
  Probe
caaattttgcgctcggtgcgatact

SEQ ID NO: 186577 - DNA, 25 bp, Artificial
  Probe
tgtgatgcctgttgagtcagatgct

SEQ ID NO: 186578 - DNA, 25 bp, Artificial
  Probe
aaattttgcgctcggtgcgatactg

SEQ ID NO: 186579 - DNA, 25 bp, Artificial
  Probe
gtgatgcctgttgagtcagatgctt

SEQ ID NO: 186580 - DNA, 25 bp, Artificial
  Probe
tttgcgctcggtgcgatactgatga

SEQ ID NO: 186581 - DNA, 25 bp, Artificial
  Probe
gatgcctgttgagtcagatgctttc

SEQ ID NO: 186582 - DNA, 25 bp, Artificial
  Probe
ttgcgctcggtgcgatactgatgat

SEQ ID NO: 186583 - DNA, 25 bp, Artificial
  Probe
tgcctgttgagtcagatgctttcat

SEQ ID NO: 186584 - DNA, 25 bp, Artificial
  Probe
tgcgctcggtgcgatactgatgatg

SEQ ID NO: 186585 - DNA, 25 bp, Artificial
  Probe
cctgttgagtcagatgctttcattt

SEQ ID NO: 186586 - DNA, 25 bp, Artificial
  Probe
cgctcggtgcgatactgatgatgaa

SEQ ID NO: 186587 - DNA, 25 bp, Artificial
  Probe
ttgagtcagatgctttcatttacac

SEQ ID NO: 186588 - DNA, 25 bp, Artificial
  Probe
tcggtgcgatactgatgatgaaatt

SEQ ID NO: 186589 - DNA, 25 bp, Artificial
  Probe
gagtcagatgctttcatttacacag

SEQ ID NO: 186590 - DNA, 25 bp, Artificial
  Probe
atggctgccaactattttgaggatg

SEQ ID NO: 186591 - DNA, 25 bp, Artificial
  Probe
agtcagatgctttcatttacacaga

SEQ ID NO: 186592 - DNA, 25 bp, Artificial
  Probe
tggctgccaactattttgaggatgt

SEQ ID NO: 186593 - DNA, 25 bp, Artificial
  Probe
gtcagatgctttcatttacacagat

SEQ ID NO: 186594 - DNA, 25 bp, Artificial
  Probe
gctgccaactattttgaggatgttg

SEQ ID NO: 186595 - DNA, 25 bp, Artificial
  Probe
cagatgctttcatttacacagatat

SEQ ID NO: 186596 - DNA, 25 bp, Artificial
  Probe
tgccaactattttgaggatgttgag

SEQ ID NO: 186597 - DNA, 25 bp, Artificial
  Probe
atgctttcatttacacagatatcca

SEQ ID NO: 186598 - DNA, 25 bp, Artificial
  Probe
gccaactattttgaggatgttgaga

SEQ ID NO: 186599 - DNA, 25 bp, Artificial
  Probe
tgctttcatttacacagatatccat

SEQ ID NO: 186600 - DNA, 25 bp, Artificial
  Probe
ccaactattttgaggatgttgagat

SEQ ID NO: 186601 - DNA, 25 bp, Artificial
  Probe
ctttcatttacacagatatccatgc

SEQ ID NO: 186602 - DNA, 25 bp, Artificial
  Probe
ctattttgaggatgttgagattatt

SEQ ID NO: 186603 - DNA, 25 bp, Artificial
  Probe
ttcatttacacagatatccatgcct

SEQ ID NO: 186604 - DNA, 25 bp, Artificial
  Probe
attattgagcttcatcatgaccaga

SEQ ID NO: 186605 - DNA, 25 bp, Artificial
  Probe
tcatttacacagatatccatgcctg

SEQ ID NO: 186606 - DNA, 25 bp, Artificial
  Probe
ttattgagcttcatcatgaccagaa

SEQ ID NO: 186607 - DNA, 25 bp, Artificial
  Probe
cacagatatccatgcctgttttaca

SEQ ID NO: 186608 - DNA, 25 bp, Artificial
  Probe
attgagcttcatcatgaccagaagc

SEQ ID NO: 186609 - DNA, 25 bp, Artificial
  Probe
cagatatccatgcctgttttacaga

SEQ ID NO: 186610 - DNA, 25 bp, Artificial
  Probe
gagcttcatcatgaccagaagcttg

SEQ ID NO: 186611 - DNA, 25 bp, Artificial
  Probe
gatatccatgcctgttttacagaaa

SEQ ID NO: 186612 - DNA, 25 bp, Artificial
  Probe
agcttcatcatgaccagaagcttga

SEQ ID NO: 186613 - DNA, 25 bp, Artificial
  Probe
tccatgcctgttttacagaaacaca

SEQ ID NO: 186614 - DNA, 25 bp, Artificial
  Probe
ttcatcatgaccagaagcttgacgc

SEQ ID NO: 186615 - DNA, 25 bp, Artificial
  Probe
acagaaacacaaccggatgtcttga

SEQ ID NO: 186616 - DNA, 25 bp, Artificial
  Probe
tcatcatgaccagaagcttgacgca

SEQ ID NO: 186617 - DNA, 25 bp, Artificial
  Probe
cagaaacacaaccggatgtcttgat

SEQ ID NO: 186618 - DNA, 25 bp, Artificial
  Probe
atcatgaccagaagcttgacgcacc

SEQ ID NO: 186619 - DNA, 25 bp, Artificial
  Probe
cactgatcgctgccaatgcactcga

SEQ ID NO: 186620 - DNA, 25 bp, Artificial
  Probe
catgaaccggatgtctcggcattaa

SEQ ID NO: 186621 - DNA, 25 bp, Artificial
  Probe
gccgcatgaaccggatgtctcggca

SEQ ID NO: 186622 - DNA, 25 bp, Artificial
  Probe
gctgaccgcgcagccgcatgaaccg

SEQ ID NO: 186623 - DNA, 25 bp, Artificial
  Probe
tcttgcttttggcgcccacagtgat

SEQ ID NO: 186624 - DNA, 25 bp, Artificial
  Probe
gcaaatcggtgcactgatcgctgcc

SEQ ID NO: 186625 - DNA, 25 bp, Artificial
  Probe
gctgacgttcttgcttttggcgccc

SEQ ID NO: 186626 - DNA, 25 bp, Artificial
  Probe
cttttggcgcccacagtgatgatgt

SEQ ID NO: 186627 - DNA, 25 bp, Artificial
  Probe
atgtctcggcattaatccgtttatg

SEQ ID NO: 186628 - DNA, 25 bp, Artificial
  Probe
cattaatccgtttatgtgatgtgta

SEQ ID NO: 186629 - DNA, 25 bp, Artificial
  Probe
tgtgtattccattccgctcgccaca

SEQ ID NO: 186630 - DNA, 25 bp, Artificial
  Probe
ccgcgcagccgcatgaaccggatgt

SEQ ID NO: 186631 - DNA, 25 bp, Artificial
  Probe
ttgtgcgcacacttgatgaaggtgt

SEQ ID NO: 186632 - DNA, 25 bp, Artificial
  Probe
gaaccggatgtctcggcattaatcc

SEQ ID NO: 186633 - DNA, 25 bp, Artificial
  Probe
taaccgtgcttctttcatgtcaggc

SEQ ID NO: 186634 - DNA, 25 bp, Artificial
  Probe
caatgcactcgatcttgtcattttt

SEQ ID NO: 186635 - DNA, 25 bp, Artificial
  Probe
cgctgccaatgcactcgatcttgtc

SEQ ID NO: 186636 - DNA, 25 bp, Artificial
  Probe
aaattgctttgatcgcgcatgacaa

SEQ ID NO: 186637 - DNA, 25 bp, Artificial
  Probe
tacgactgcctatcgggatatttta

SEQ ID NO: 186638 - DNA, 25 bp, Artificial
  Probe
attgatcagcttgtgtatggtttag

SEQ ID NO: 186639 - DNA, 25 bp, Artificial
  Probe
ttggcgcccacagtgatgatgtcga

SEQ ID NO: 186640 - DNA, 25 bp, Artificial
  Probe
tcttcggggagaagagccgaatgta

SEQ ID NO: 186641 - DNA, 25 bp, Artificial
  Probe
tggttcaatttacgactgcctatcg

SEQ ID NO: 186642 - DNA, 25 bp, Artificial
  Probe
ggcgcccacagtgatgatgtcgaga

SEQ ID NO: 186643 - DNA, 25 bp, Artificial
  Probe
accgcgcagccgcatgaaccggatg

SEQ ID NO: 186644 - DNA, 25 bp, Artificial
  Probe
cggtgcactgatcgctgccaatgca

SEQ ID NO: 186645 - DNA, 25 bp, Artificial
  Probe
tcatgaggcgacaggtcttcaaatt

SEQ ID NO: 186646 - DNA, 25 bp, Artificial
  Probe
aatcatgatctatacgcaaccggaa

SEQ ID NO: 186647 - DNA, 25 bp, Artificial
  Probe
catgattcttataaccgtgcttctt

SEQ ID NO: 186648 - DNA, 25 bp, Artificial
  Probe
tcttataaccgtgcttctttcatgt

SEQ ID NO: 186649 - DNA, 25 bp, Artificial
  Probe
tcgccacaaatatgggtactgcgga

SEQ ID NO: 186650 - DNA, 25 bp, Artificial
  Probe
ttcttgtgcgcacacttgatgaagg

SEQ ID NO: 186651 - DNA, 25 bp, Artificial
  Probe
ctttcatgtcaggcgttaaactgtc

SEQ ID NO: 186652 - DNA, 25 bp, Artificial
  Probe
cgcccacagtgatgatgtcgagatc

SEQ ID NO: 186653 - DNA, 25 bp, Artificial
  Probe
tgtataatgctgacgttcttgcttt

SEQ ID NO: 186654 - DNA, 25 bp, Artificial
  Probe
attccgctcgccacaaatatgggta

SEQ ID NO: 186655 - DNA, 25 bp, Artificial
  Probe
ggtgcactgatcgctgccaatgcac

SEQ ID NO: 186656 - DNA, 25 bp, Artificial
  Probe
gttaaactgtcagtcgaacaagtca

SEQ ID NO: 186657 - DNA, 25 bp, Artificial
  Probe
tgccaatgcactcgatcttgtcatt

SEQ ID NO: 186658 - DNA, 25 bp, Artificial
  Probe
agcaaatcggtgcactgatcgctgc

SEQ ID NO: 186659 - DNA, 25 bp, Artificial
  Probe
ggaaattcttgtgcgcacacttgat

SEQ ID NO: 186660 - DNA, 25 bp, Artificial
  Probe
aaattcttgtgcgcacacttgatga

SEQ ID NO: 186661 - DNA, 25 bp, Artificial
  Probe
aattcatgaggcgacaggtcttcaa

SEQ ID NO: 186662 - DNA, 25 bp, Artificial
  Probe
caaatcggtgcactgatcgctgcca

SEQ ID NO: 186663 - DNA, 25 bp, Artificial
  Probe
tgcgcacacttgatgaaggtgtttt

SEQ ID NO: 186664 - DNA, 25 bp, Artificial
  Probe
tttatgtgatgtgtattccattccg

SEQ ID NO: 186665 - DNA, 25 bp, Artificial
  Probe
agattgatcagcttgtgtatggttt

SEQ ID NO: 186666 - DNA, 25 bp, Artificial
  Probe
tactgcggaaattcttgtgcgcaca

SEQ ID NO: 186667 - DNA, 25 bp, Artificial
  Probe
ttaaactgtcagtcgaacaagtcat

SEQ ID NO: 186668 - DNA, 25 bp, Artificial
  Probe
gaatcatgatctatacgcaaccgga

SEQ ID NO: 186669 - DNA, 25 bp, Artificial
  Probe
ttttggcgcccacagtgatgatgtc

SEQ ID NO: 186670 - DNA, 25 bp, Artificial
  Probe
agaatcatgatctatacgcaaccgg

SEQ ID NO: 186671 - DNA, 25 bp, Artificial
  Probe
gaccagcaaatcggtgcactgatcg

SEQ ID NO: 186672 - DNA, 25 bp, Artificial
  Probe
aagattgatcagcttgtgtatggtt

SEQ ID NO: 186673 - DNA, 25 bp, Artificial
  Probe
gcagccgcatgaaccggatgtctcg

SEQ ID NO: 186674 - DNA, 25 bp, Artificial
  Probe
tgatctatacgcaaccggaaccaca

SEQ ID NO: 186675 - DNA, 25 bp, Artificial
  Probe
ggtactgcggaaattcttgtgcgca

SEQ ID NO: 186676 - DNA, 25 bp, Artificial
  Probe
gctgccaatgcactcgatcttgtca

SEQ ID NO: 186677 - DNA, 25 bp, Artificial
  Probe
aactgtcagtcgaacaagtcatgaa

SEQ ID NO: 186678 - DNA, 25 bp, Artificial
  Probe
acgccatgattcttataaccgtgct

SEQ ID NO: 186679 - DNA, 25 bp, Artificial
  Probe
gtgcttctttcatgtcaggcgttaa

SEQ ID NO: 186680 - DNA, 25 bp, Artificial
  Probe
gcgcagccgcatgaaccggatgtct

SEQ ID NO: 186681 - DNA, 25 bp, Artificial
  Probe
ataaccgtgcttctttcatgtcagg

SEQ ID NO: 186682 - DNA, 25 bp, Artificial
  Probe
catgaggcgacaggtcttcaaattg

SEQ ID NO: 186683 - DNA, 25 bp, Artificial
  Probe
ggagaccagcaaatcggtgcactga

SEQ ID NO: 186684 - DNA, 25 bp, Artificial
  Probe
gatcgctgccaatgcactcgatctt

SEQ ID NO: 186685 - DNA, 25 bp, Artificial
  Probe
tcatgatctatacgcaaccggaacc

SEQ ID NO: 186686 - DNA, 25 bp, Artificial
  Probe
agccgcatgaaccggatgtctcggc

SEQ ID NO: 186687 - DNA, 25 bp, Artificial
  Probe
ttccgctcgccacaaatatgggtac

SEQ ID NO: 186688 - DNA, 25 bp, Artificial
  Probe
gggagaccagcaaatcggtgcactg

SEQ ID NO: 186689 - DNA, 25 bp, Artificial
  Probe
aatgcactcgatcttgtcatttttt

SEQ ID NO: 186690 - DNA, 25 bp, Artificial
  Probe
ttcatgaggcgacaggtcttcaaat

SEQ ID NO: 186691 - DNA, 25 bp, Artificial
  Probe
tgaaaattgctttgatcgcgcatga

SEQ ID NO: 186692 - DNA, 25 bp, Artificial
  Probe
gatcagcttgtgtatggtttagaaa

SEQ ID NO: 186693 - DNA, 25 bp, Artificial
  Probe
tcaatttacgactgcctatcgggat

SEQ ID NO: 186694 - DNA, 25 bp, Artificial
  Probe
tatggttcaatttacgactgcctat

SEQ ID NO: 186695 - DNA, 25 bp, Artificial
  Probe
aaccgtgcttctttcatgtcaggcg

SEQ ID NO: 186696 - DNA, 25 bp, Artificial
  Probe
gttcttgcttttggcgcccacagtg

SEQ ID NO: 186697 - DNA, 25 bp, Artificial
  Probe
tatgggtactgcggaaattcttgtg

SEQ ID NO: 186698 - DNA, 25 bp, Artificial
  Probe
atatggttcaatttacgactgccta

SEQ ID NO: 186699 - DNA, 25 bp, Artificial
  Probe
ccgctcgccacaaatatgggtactg

SEQ ID NO: 186700 - DNA, 25 bp, Artificial
  Probe
catgtcaggcgttaaactgtcagtc

SEQ ID NO: 186701 - DNA, 25 bp, Artificial
  Probe
tcatgtcaggcgttaaactgtcagt

SEQ ID NO: 186702 - DNA, 25 bp, Artificial
  Probe
tcggtgcactgatcgctgccaatgc

SEQ ID NO: 186703 - DNA, 25 bp, Artificial
  Probe
tcttgtgcgcacacttgatgaaggt

SEQ ID NO: 186704 - DNA, 25 bp, Artificial
  Probe
ttcatgtcaggcgttaaactgtcag

SEQ ID NO: 186705 - DNA, 25 bp, Artificial
  Probe
ctgcggaaattcttgtgcgcacact

SEQ ID NO: 186706 - DNA, 25 bp, Artificial
  Probe
gcttttggcgcccacagtgatgatg

SEQ ID NO: 186707 - DNA, 25 bp, Artificial
  Probe
tgcactgatcgctgccaatgcactc

SEQ ID NO: 186708 - DNA, 25 bp, Artificial
  Probe
ataatgctgacgttcttgcttttgg

SEQ ID NO: 186709 - DNA, 25 bp, Artificial
  Probe
ctgatcgctgccaatgcactcgatc

SEQ ID NO: 186710 - DNA, 25 bp, Artificial
  Probe
gatgtctcggcattaatccgtttat

SEQ ID NO: 186711 - DNA, 25 bp, Artificial
  Probe
gcgcacacttgatgaaggtgttttc

SEQ ID NO: 186712 - DNA, 25 bp, Artificial
  Probe
tgcttctttcatgtcaggcgttaaa

SEQ ID NO: 186713 - DNA, 25 bp, Artificial
  Probe
cggcattaatccgtttatgtgatgt

SEQ ID NO: 186714 - DNA, 25 bp, Artificial
  Probe
taatccgtttatgtgatgtgtattc

SEQ ID NO: 186715 - DNA, 25 bp, Artificial
  Probe
ttctttcatgtcaggcgttaaactg

SEQ ID NO: 186716 - DNA, 25 bp, Artificial
  Probe
tgatgtgtattccattccgctcgcc

SEQ ID NO: 186717 - DNA, 25 bp, Artificial
  Probe
tcaggcgttaaactgtcagtcgaac

SEQ ID NO: 186718 - DNA, 25 bp, Artificial
  Probe
atgctgacgttcttgcttttggcgc

SEQ ID NO: 186719 - DNA, 25 bp, Artificial
  Probe
tctcggcattaatccgtttatgtga

SEQ ID NO: 186720 - DNA, 25 bp, Artificial
  Probe
ccagcaaatcggtgcactgatcgct

SEQ ID NO: 186721 - DNA, 25 bp, Artificial
  Probe
agtgatgatgtcgagatcggaatgg

SEQ ID NO: 186722 - DNA, 25 bp, Artificial
  Probe
gtcagtcgaacaagtcatgaagatt

SEQ ID NO: 186723 - DNA, 25 bp, Artificial
  Probe
ctcgccacaaatatgggtactgcgg

SEQ ID NO: 186724 - DNA, 25 bp, Artificial
  Probe
tcggcattaatccgtttatgtgatg

SEQ ID NO: 186725 - DNA, 25 bp, Artificial
  Probe
tgacgttcttgcttttggcgcccac

SEQ ID NO: 186726 - DNA, 25 bp, Artificial
  Probe
gctttgatcgcgcatgacaagaaaa

SEQ ID NO: 186727 - DNA, 25 bp, Artificial
  Probe
attccgctcgccacaaatatgggta

SEQ ID NO: 186728 - DNA, 25 bp, Artificial
  Probe
tcaatttacgactgcctatcgggat

SEQ ID NO: 186729 - DNA, 25 bp, Artificial
  Probe
ttccgctcgccacaaatatgggtac

SEQ ID NO: 186730 - DNA, 25 bp, Artificial
  Probe
tacgactgcctatcgggatatttta

SEQ ID NO: 186731 - DNA, 25 bp, Artificial
  Probe
ccgctcgccacaaatatgggtactg

SEQ ID NO: 186732 - DNA, 25 bp, Artificial
  Probe
agaatcatgatctatacgcaaccgg

SEQ ID NO: 186733 - DNA, 25 bp, Artificial
  Probe
ctcgccacaaatatgggtactgcgg

SEQ ID NO: 186734 - DNA, 25 bp, Artificial
  Probe
gaatcatgatctatacgcaaccgga

SEQ ID NO: 186735 - DNA, 25 bp, Artificial
  Probe
tcgccacaaatatgggtactgcgga

SEQ ID NO: 186736 - DNA, 25 bp, Artificial
  Probe
aatcatgatctatacgcaaccggaa

SEQ ID NO: 186737 - DNA, 25 bp, Artificial
  Probe
tatgggtactgcggaaattcttgtg

SEQ ID NO: 186738 - DNA, 25 bp, Artificial
  Probe
tcatgatctatacgcaaccggaacc

SEQ ID NO: 186739 - DNA, 25 bp, Artificial
  Probe
ggtactgcggaaattcttgtgcgca

SEQ ID NO: 186740 - DNA, 25 bp, Artificial
  Probe
tgatctatacgcaaccggaaccaca

SEQ ID NO: 186741 - DNA, 25 bp, Artificial
  Probe
tactgcggaaattcttgtgcgcaca

SEQ ID NO: 186742 - DNA, 25 bp, Artificial
  Probe
aattcatgaggcgacaggtcttcaa

SEQ ID NO: 186743 - DNA, 25 bp, Artificial
  Probe
ctgcggaaattcttgtgcgcacact

SEQ ID NO: 186744 - DNA, 25 bp, Artificial
  Probe
ttcatgaggcgacaggtcttcaaat

SEQ ID NO: 186745 - DNA, 25 bp, Artificial
  Probe
ggaaattcttgtgcgcacacttgat

SEQ ID NO: 186746 - DNA, 25 bp, Artificial
  Probe
tcatgaggcgacaggtcttcaaatt

SEQ ID NO: 186747 - DNA, 25 bp, Artificial
  Probe
aaattcttgtgcgcacacttgatga

SEQ ID NO: 186748 - DNA, 25 bp, Artificial
  Probe
catgaggcgacaggtcttcaaattg

SEQ ID NO: 186749 - DNA, 25 bp, Artificial
  Probe
ttcttgtgcgcacacttgatgaagg

SEQ ID NO: 186750 - DNA, 25 bp, Artificial
  Probe
gggagaccagcaaatcggtgcactg

SEQ ID NO: 186751 - DNA, 25 bp, Artificial
  Probe
tcttgtgcgcacacttgatgaaggt

SEQ ID NO: 186752 - DNA, 25 bp, Artificial
  Probe
ggagaccagcaaatcggtgcactga

SEQ ID NO: 186753 - DNA, 25 bp, Artificial
  Probe
ttgtgcgcacacttgatgaaggtgt

SEQ ID NO: 186754 - DNA, 25 bp, Artificial
  Probe
gaccagcaaatcggtgcactgatcg

SEQ ID NO: 186755 - DNA, 25 bp, Artificial
  Probe
tgcgcacacttgatgaaggtgtttt

SEQ ID NO: 186756 - DNA, 25 bp, Artificial
  Probe
ccagcaaatcggtgcactgatcgct

SEQ ID NO: 186757 - DNA, 25 bp, Artificial
  Probe
gcgcacacttgatgaaggtgttttc

SEQ ID NO: 186758 - DNA, 25 bp, Artificial
  Probe
agcaaatcggtgcactgatcgctgc

SEQ ID NO: 186759 - DNA, 25 bp, Artificial
  Probe
tcttcggggagaagagccgaatgta

SEQ ID NO: 186760 - DNA, 25 bp, Artificial
  Probe
gcaaatcggtgcactgatcgctgcc

SEQ ID NO: 186761 - DNA, 25 bp, Artificial
  Probe
tgtataatgctgacgttcttgcttt

SEQ ID NO: 186762 - DNA, 25 bp, Artificial
  Probe
caaatcggtgcactgatcgctgcca

SEQ ID NO: 186763 - DNA, 25 bp, Artificial
  Probe
ataatgctgacgttcttgcttttgg

SEQ ID NO: 186764 - DNA, 25 bp, Artificial
  Probe
tcggtgcactgatcgctgccaatgc

SEQ ID NO: 186765 - DNA, 25 bp, Artificial
  Probe
atgctgacgttcttgcttttggcgc

SEQ ID NO: 186766 - DNA, 25 bp, Artificial
  Probe
cggtgcactgatcgctgccaatgca

SEQ ID NO: 186767 - DNA, 25 bp, Artificial
  Probe
gctgacgttcttgcttttggcgccc

SEQ ID NO: 186768 - DNA, 25 bp, Artificial
  Probe
ggtgcactgatcgctgccaatgcac

SEQ ID NO: 186769 - DNA, 25 bp, Artificial
  Probe
tgacgttcttgcttttggcgcccac

SEQ ID NO: 186770 - DNA, 25 bp, Artificial
  Probe
acgccatgattcttataaccgtgct

SEQ ID NO: 186771 - DNA, 25 bp, Artificial
  Probe
tgcactgatcgctgccaatgcactc

SEQ ID NO: 186772 - DNA, 25 bp, Artificial
  Probe
gttcttgcttttggcgcccacagtg

SEQ ID NO: 186773 - DNA, 25 bp, Artificial
  Probe
catgattcttataaccgtgcttctt

SEQ ID NO: 186774 - DNA, 25 bp, Artificial
  Probe
cactgatcgctgccaatgcactcga

SEQ ID NO: 186775 - DNA, 25 bp, Artificial
  Probe
tcttgcttttggcgcccacagtgat

SEQ ID NO: 186776 - DNA, 25 bp, Artificial
  Probe
tcttataaccgtgcttctttcatgt

SEQ ID NO: 186777 - DNA, 25 bp, Artificial
  Probe
ctgatcgctgccaatgcactcgatc

SEQ ID NO: 186778 - DNA, 25 bp, Artificial
  Probe
gcttttggcgcccacagtgatgatg

SEQ ID NO: 186779 - DNA, 25 bp, Artificial
  Probe
ataaccgtgcttctttcatgtcagg

SEQ ID NO: 186780 - DNA, 25 bp, Artificial
  Probe
gatcgctgccaatgcactcgatctt

SEQ ID NO: 186781 - DNA, 25 bp, Artificial
  Probe
cttttggcgcccacagtgatgatgt

SEQ ID NO: 186782 - DNA, 25 bp, Artificial
  Probe
taaccgtgcttctttcatgtcaggc

SEQ ID NO: 186783 - DNA, 25 bp, Artificial
  Probe
cgctgccaatgcactcgatcttgtc

SEQ ID NO: 186784 - DNA, 25 bp, Artificial
  Probe
ttttggcgcccacagtgatgatgtc

SEQ ID NO: 186785 - DNA, 25 bp, Artificial
  Probe
aaccgtgcttctttcatgtcaggcg

SEQ ID NO: 186786 - DNA, 25 bp, Artificial
  Probe
gctgccaatgcactcgatcttgtca

SEQ ID NO: 186787 - DNA, 25 bp, Artificial
  Probe
ttggcgcccacagtgatgatgtcga

SEQ ID NO: 186788 - DNA, 25 bp, Artificial
  Probe
gtgcttctttcatgtcaggcgttaa

SEQ ID NO: 186789 - DNA, 25 bp, Artificial
  Probe
tgccaatgcactcgatcttgtcatt

SEQ ID NO: 186790 - DNA, 25 bp, Artificial
  Probe
ggcgcccacagtgatgatgtcgaga

SEQ ID NO: 186791 - DNA, 25 bp, Artificial
  Probe
tgcttctttcatgtcaggcgttaaa

SEQ ID NO: 186792 - DNA, 25 bp, Artificial
  Probe
caatgcactcgatcttgtcattttt

SEQ ID NO: 186793 - DNA, 25 bp, Artificial
  Probe
cgcccacagtgatgatgtcgagatc

SEQ ID NO: 186794 - DNA, 25 bp, Artificial
  Probe
ttctttcatgtcaggcgttaaactg

SEQ ID NO: 186795 - DNA, 25 bp, Artificial
  Probe
aatgcactcgatcttgtcatttttt

SEQ ID NO: 186796 - DNA, 25 bp, Artificial
  Probe
agtgatgatgtcgagatcggaatgg

SEQ ID NO: 186797 - DNA, 25 bp, Artificial
  Probe
ctttcatgtcaggcgttaaactgtc

SEQ ID NO: 186798 - DNA, 25 bp, Artificial
  Probe
gctgaccgcgcagccgcatgaaccg

SEQ ID NO: 186799 - DNA, 25 bp, Artificial
  Probe
ttcatgtcaggcgttaaactgtcag

SEQ ID NO: 186800 - DNA, 25 bp, Artificial
  Probe
accgcgcagccgcatgaaccggatg

SEQ ID NO: 186801 - DNA, 25 bp, Artificial
  Probe
tcatgtcaggcgttaaactgtcagt

SEQ ID NO: 186802 - DNA, 25 bp, Artificial
  Probe
ccgcgcagccgcatgaaccggatgt

SEQ ID NO: 186803 - DNA, 25 bp, Artificial
  Probe
catgtcaggcgttaaactgtcagtc

SEQ ID NO: 186804 - DNA, 25 bp, Artificial
  Probe
gcgcagccgcatgaaccggatgtct

SEQ ID NO: 186805 - DNA, 25 bp, Artificial
  Probe
tcaggcgttaaactgtcagtcgaac

SEQ ID NO: 186806 - DNA, 25 bp, Artificial
  Probe
gcagccgcatgaaccggatgtctcg

SEQ ID NO: 186807 - DNA, 25 bp, Artificial
  Probe
gttaaactgtcagtcgaacaagtca

SEQ ID NO: 186808 - DNA, 25 bp, Artificial
  Probe
agccgcatgaaccggatgtctcggc

SEQ ID NO: 186809 - DNA, 25 bp, Artificial
  Probe
ttaaactgtcagtcgaacaagtcat

SEQ ID NO: 186810 - DNA, 25 bp, Artificial
  Probe
gccgcatgaaccggatgtctcggca

SEQ ID NO: 186811 - DNA, 25 bp, Artificial
  Probe
aactgtcagtcgaacaagtcatgaa

SEQ ID NO: 186812 - DNA, 25 bp, Artificial
  Probe
catgaaccggatgtctcggcattaa

SEQ ID NO: 186813 - DNA, 25 bp, Artificial
  Probe
gtcagtcgaacaagtcatgaagatt

SEQ ID NO: 186814 - DNA, 25 bp, Artificial
  Probe
gaaccggatgtctcggcattaatcc

SEQ ID NO: 186815 - DNA, 25 bp, Artificial
  Probe
aagattgatcagcttgtgtatggtt

SEQ ID NO: 186816 - DNA, 25 bp, Artificial
  Probe
gatgtctcggcattaatccgtttat

SEQ ID NO: 186817 - DNA, 25 bp, Artificial
  Probe
agattgatcagcttgtgtatggttt

SEQ ID NO: 186818 - DNA, 25 bp, Artificial
  Probe
atgtctcggcattaatccgtttatg

SEQ ID NO: 186819 - DNA, 25 bp, Artificial
  Probe
attgatcagcttgtgtatggtttag

SEQ ID NO: 186820 - DNA, 25 bp, Artificial
  Probe
tctcggcattaatccgtttatgtga

SEQ ID NO: 186821 - DNA, 25 bp, Artificial
  Probe
gatcagcttgtgtatggtttagaaa

SEQ ID NO: 186822 - DNA, 25 bp, Artificial
  Probe
tcggcattaatccgtttatgtgatg

SEQ ID NO: 186823 - DNA, 25 bp, Artificial
  Probe
tgaaaattgctttgatcgcgcatga

SEQ ID NO: 186824 - DNA, 25 bp, Artificial
  Probe
cggcattaatccgtttatgtgatgt

SEQ ID NO: 186825 - DNA, 25 bp, Artificial
  Probe
aaattgctttgatcgcgcatgacaa

SEQ ID NO: 186826 - DNA, 25 bp, Artificial
  Probe
cattaatccgtttatgtgatgtgta

SEQ ID NO: 186827 - DNA, 25 bp, Artificial
  Probe
gctttgatcgcgcatgacaagaaaa

SEQ ID NO: 186828 - DNA, 25 bp, Artificial
  Probe
taatccgtttatgtgatgtgtattc

SEQ ID NO: 186829 - DNA, 25 bp, Artificial
  Probe
atatggttcaatttacgactgccta

SEQ ID NO: 186830 - DNA, 25 bp, Artificial
  Probe
tttatgtgatgtgtattccattccg

SEQ ID NO: 186831 - DNA, 25 bp, Artificial
  Probe
tatggttcaatttacgactgcctat

SEQ ID NO: 186832 - DNA, 25 bp, Artificial
  Probe
tgatgtgtattccattccgctcgcc

SEQ ID NO: 186833 - DNA, 25 bp, Artificial
  Probe
tggttcaatttacgactgcctatcg

SEQ ID NO: 186834 - DNA, 25 bp, Artificial
  Probe
tgtgtattccattccgctcgccaca

SEQ ID NO: 186835 - DNA, 25 bp, Artificial
  Probe
attccgctcgccacaaatatgggta

SEQ ID NO: 186836 - DNA, 25 bp, Artificial
  Probe
tcaatttacgactgcctatcgggat

SEQ ID NO: 186837 - DNA, 25 bp, Artificial
  Probe
ttccgctcgccacaaatatgggtac

SEQ ID NO: 186838 - DNA, 25 bp, Artificial
  Probe
tacgactgcctatcgggatatttta

SEQ ID NO: 186839 - DNA, 25 bp, Artificial
  Probe
ccgctcgccacaaatatgggtactg

SEQ ID NO: 186840 - DNA, 25 bp, Artificial
  Probe
agaatcatgatctatacgcaaccgg

SEQ ID NO: 186841 - DNA, 25 bp, Artificial
  Probe
ctcgccacaaatatgggtactgcgg

SEQ ID NO: 186842 - DNA, 25 bp, Artificial
  Probe
gaatcatgatctatacgcaaccgga

SEQ ID NO: 186843 - DNA, 25 bp, Artificial
  Probe
tcgccacaaatatgggtactgcgga

SEQ ID NO: 186844 - DNA, 25 bp, Artificial
  Probe
aatcatgatctatacgcaaccggaa

SEQ ID NO: 186845 - DNA, 25 bp, Artificial
  Probe
tatgggtactgcggaaattcttgtg

SEQ ID NO: 186846 - DNA, 25 bp, Artificial
  Probe
tcatgatctatacgcaaccggaacc

SEQ ID NO: 186847 - DNA, 25 bp, Artificial
  Probe
ggtactgcggaaattcttgtgcgca

SEQ ID NO: 186848 - DNA, 25 bp, Artificial
  Probe
tgatctatacgcaaccggaaccaca

SEQ ID NO: 186849 - DNA, 25 bp, Artificial
  Probe
tactgcggaaattcttgtgcgcaca

SEQ ID NO: 186850 - DNA, 25 bp, Artificial
  Probe
aattcatgaggcgacaggtcttcaa

SEQ ID NO: 186851 - DNA, 25 bp, Artificial
  Probe
ctgcggaaattcttgtgcgcacact

SEQ ID NO: 186852 - DNA, 25 bp, Artificial
  Probe
ttcatgaggcgacaggtcttcaaat

SEQ ID NO: 186853 - DNA, 25 bp, Artificial
  Probe
ggaaattcttgtgcgcacacttgat

SEQ ID NO: 186854 - DNA, 25 bp, Artificial
  Probe
tcatgaggcgacaggtcttcaaatt

SEQ ID NO: 186855 - DNA, 25 bp, Artificial
  Probe
aaattcttgtgcgcacacttgatga

SEQ ID NO: 186856 - DNA, 25 bp, Artificial
  Probe
catgaggcgacaggtcttcaaattg

SEQ ID NO: 186857 - DNA, 25 bp, Artificial
  Probe
ttcttgtgcgcacacttgatgaagg

SEQ ID NO: 186858 - DNA, 25 bp, Artificial
  Probe
gggagaccagcaaatcggtgcactg

SEQ ID NO: 186859 - DNA, 25 bp, Artificial
  Probe
tcttgtgcgcacacttgatgaaggt

SEQ ID NO: 186860 - DNA, 25 bp, Artificial
  Probe
ggagaccagcaaatcggtgcactga

SEQ ID NO: 186861 - DNA, 25 bp, Artificial
  Probe
ttgtgcgcacacttgatgaaggtgt

SEQ ID NO: 186862 - DNA, 25 bp, Artificial
  Probe
gaccagcaaatcggtgcactgatcg

SEQ ID NO: 186863 - DNA, 25 bp, Artificial
  Probe
tgcgcacacttgatgaaggtgtttt

SEQ ID NO: 186864 - DNA, 25 bp, Artificial
  Probe
ccagcaaatcggtgcactgatcgct

SEQ ID NO: 186865 - DNA, 25 bp, Artificial
  Probe
gcgcacacttgatgaaggtgttttc

SEQ ID NO: 186866 - DNA, 25 bp, Artificial
  Probe
agcaaatcggtgcactgatcgctgc

SEQ ID NO: 186867 - DNA, 25 bp, Artificial
  Probe
tcttcggggagaagagccgaatgta

SEQ ID NO: 186868 - DNA, 25 bp, Artificial
  Probe
gcaaatcggtgcactgatcgctgcc

SEQ ID NO: 186869 - DNA, 25 bp, Artificial
  Probe
tgtataatgctgacgttcttgcttt

SEQ ID NO: 186870 - DNA, 25 bp, Artificial
  Probe
caaatcggtgcactgatcgctgcca

SEQ ID NO: 186871 - DNA, 25 bp, Artificial
  Probe
ataatgctgacgttcttgcttttgg

SEQ ID NO: 186872 - DNA, 25 bp, Artificial
  Probe
tcggtgcactgatcgctgccaatgc

SEQ ID NO: 186873 - DNA, 25 bp, Artificial
  Probe
atgctgacgttcttgcttttggcgc

SEQ ID NO: 186874 - DNA, 25 bp, Artificial
  Probe
cggtgcactgatcgctgccaatgca

SEQ ID NO: 186875 - DNA, 25 bp, Artificial
  Probe
gctgacgttcttgcttttggcgccc

SEQ ID NO: 186876 - DNA, 25 bp, Artificial
  Probe
ggtgcactgatcgctgccaatgcac

SEQ ID NO: 186877 - DNA, 25 bp, Artificial
  Probe
tgacgttcttgcttttggcgcccac

SEQ ID NO: 186878 - DNA, 25 bp, Artificial
  Probe
acgccatgattcttataaccgtgct

SEQ ID NO: 186879 - DNA, 25 bp, Artificial
  Probe
tgcactgatcgctgccaatgcactc

SEQ ID NO: 186880 - DNA, 25 bp, Artificial
  Probe
gttcttgcttttggcgcccacagtg

SEQ ID NO: 186881 - DNA, 25 bp, Artificial
  Probe
catgattcttataaccgtgcttctt

SEQ ID NO: 186882 - DNA, 25 bp, Artificial
  Probe
cactgatcgctgccaatgcactcga

SEQ ID NO: 186883 - DNA, 25 bp, Artificial
  Probe
tcttgcttttggcgcccacagtgat

SEQ ID NO: 186884 - DNA, 25 bp, Artificial
  Probe
tcttataaccgtgcttctttcatgt

SEQ ID NO: 186885 - DNA, 25 bp, Artificial
  Probe
ctgatcgctgccaatgcactcgatc

SEQ ID NO: 186886 - DNA, 25 bp, Artificial
  Probe
gcttttggcgcccacagtgatgatg

SEQ ID NO: 186887 - DNA, 25 bp, Artificial
  Probe
ataaccgtgcttctttcatgtcagg

SEQ ID NO: 186888 - DNA, 25 bp, Artificial
  Probe
gatcgctgccaatgcactcgatctt

SEQ ID NO: 186889 - DNA, 25 bp, Artificial
  Probe
cttttggcgcccacagtgatgatgt

SEQ ID NO: 186890 - DNA, 25 bp, Artificial
  Probe
taaccgtgcttctttcatgtcaggc

SEQ ID NO: 186891 - DNA, 25 bp, Artificial
  Probe
cgctgccaatgcactcgatcttgtc

SEQ ID NO: 186892 - DNA, 25 bp, Artificial
  Probe
ttttggcgcccacagtgatgatgtc

SEQ ID NO: 186893 - DNA, 25 bp, Artificial
  Probe
aaccgtgcttctttcatgtcaggcg

SEQ ID NO: 186894 - DNA, 25 bp, Artificial
  Probe
gctgccaatgcactcgatcttgtca

SEQ ID NO: 186895 - DNA, 25 bp, Artificial
  Probe
ttggcgcccacagtgatgatgtcga

SEQ ID NO: 186896 - DNA, 25 bp, Artificial
  Probe
gtgcttctttcatgtcaggcgttaa

SEQ ID NO: 186897 - DNA, 25 bp, Artificial
  Probe
tgccaatgcactcgatcttgtcatt

SEQ ID NO: 186898 - DNA, 25 bp, Artificial
  Probe
ggcgcccacagtgatgatgtcgaga

SEQ ID NO: 186899 - DNA, 25 bp, Artificial
  Probe
tgcttctttcatgtcaggcgttaaa

SEQ ID NO: 186900 - DNA, 25 bp, Artificial
  Probe
caatgcactcgatcttgtcattttt

SEQ ID NO: 186901 - DNA, 25 bp, Artificial
  Probe
cgcccacagtgatgatgtcgagatc

SEQ ID NO: 186902 - DNA, 25 bp, Artificial
  Probe
ttctttcatgtcaggcgttaaactg

SEQ ID NO: 186903 - DNA, 25 bp, Artificial
  Probe
aatgcactcgatcttgtcatttttt

SEQ ID NO: 186904 - DNA, 25 bp, Artificial
  Probe
agtgatgatgtcgagatcggaatgg

SEQ ID NO: 186905 - DNA, 25 bp, Artificial
  Probe
ctttcatgtcaggcgttaaactgtc

SEQ ID NO: 186906 - DNA, 25 bp, Artificial
  Probe
gctgaccgcgcagccgcatgaaccg

SEQ ID NO: 186907 - DNA, 25 bp, Artificial
  Probe
ttcatgtcaggcgttaaactgtcag

SEQ ID NO: 186908 - DNA, 25 bp, Artificial
  Probe
accgcgcagccgcatgaaccggatg

SEQ ID NO: 186909 - DNA, 25 bp, Artificial
  Probe
tcatgtcaggcgttaaactgtcagt

SEQ ID NO: 186910 - DNA, 25 bp, Artificial
  Probe
ccgcgcagccgcatgaaccggatgt

SEQ ID NO: 186911 - DNA, 25 bp, Artificial
  Probe
catgtcaggcgttaaactgtcagtc

SEQ ID NO: 186912 - DNA, 25 bp, Artificial
  Probe
gcgcagccgcatgaaccggatgtct

SEQ ID NO: 186913 - DNA, 25 bp, Artificial
  Probe
tcaggcgttaaactgtcagtcgaac

SEQ ID NO: 186914 - DNA, 25 bp, Artificial
  Probe
gcagccgcatgaaccggatgtctcg

SEQ ID NO: 186915 - DNA, 25 bp, Artificial
  Probe
gttaaactgtcagtcgaacaagtca

SEQ ID NO: 186916 - DNA, 25 bp, Artificial
  Probe
agccgcatgaaccggatgtctcggc

SEQ ID NO: 186917 - DNA, 25 bp, Artificial
  Probe
ttaaactgtcagtcgaacaagtcat

SEQ ID NO: 186918 - DNA, 25 bp, Artificial
  Probe
gccgcatgaaccggatgtctcggca

SEQ ID NO: 186919 - DNA, 25 bp, Artificial
  Probe
aactgtcagtcgaacaagtcatgaa

SEQ ID NO: 186920 - DNA, 25 bp, Artificial
  Probe
catgaaccggatgtctcggcattaa

SEQ ID NO: 186921 - DNA, 25 bp, Artificial
  Probe
gtcagtcgaacaagtcatgaagatt

SEQ ID NO: 186922 - DNA, 25 bp, Artificial
  Probe
gaaccggatgtctcggcattaatcc

SEQ ID NO: 186923 - DNA, 25 bp, Artificial
  Probe
aagattgatcagcttgtgtatggtt

SEQ ID NO: 186924 - DNA, 25 bp, Artificial
  Probe
gatgtctcggcattaatccgtttat

SEQ ID NO: 186925 - DNA, 25 bp, Artificial
  Probe
agattgatcagcttgtgtatggttt

SEQ ID NO: 186926 - DNA, 25 bp, Artificial
  Probe
atgtctcggcattaatccgtttatg

SEQ ID NO: 186927 - DNA, 25 bp, Artificial
  Probe
attgatcagcttgtgtatggtttag

SEQ ID NO: 186928 - DNA, 25 bp, Artificial
  Probe
tctcggcattaatccgtttatgtga

SEQ ID NO: 186929 - DNA, 25 bp, Artificial
  Probe
gatcagcttgtgtatggtttagaaa

SEQ ID NO: 186930 - DNA, 25 bp, Artificial
  Probe
tcggcattaatccgtttatgtgatg

SEQ ID NO: 186931 - DNA, 25 bp, Artificial
  Probe
tgaaaattgctttgatcgcgcatga

SEQ ID NO: 186932 - DNA, 25 bp, Artificial
  Probe
cggcattaatccgtttatgtgatgt

SEQ ID NO: 186933 - DNA, 25 bp, Artificial
  Probe
aaattgctttgatcgcgcatgacaa

SEQ ID NO: 186934 - DNA, 25 bp, Artificial
  Probe
cattaatccgtttatgtgatgtgta

SEQ ID NO: 186935 - DNA, 25 bp, Artificial
  Probe
gctttgatcgcgcatgacaagaaaa

SEQ ID NO: 186936 - DNA, 25 bp, Artificial
  Probe
taatccgtttatgtgatgtgtattc

SEQ ID NO: 186937 - DNA, 25 bp, Artificial
  Probe
atatggttcaatttacgactgccta

SEQ ID NO: 186938 - DNA, 25 bp, Artificial
  Probe
tttatgtgatgtgtattccattccg

SEQ ID NO: 186939 - DNA, 25 bp, Artificial
  Probe
tatggttcaatttacgactgcctat

SEQ ID NO: 186940 - DNA, 25 bp, Artificial
  Probe
tgatgtgtattccattccgctcgcc

SEQ ID NO: 186941 - DNA, 25 bp, Artificial
  Probe
tggttcaatttacgactgcctatcg

SEQ ID NO: 186942 - DNA, 25 bp, Artificial
  Probe
tgtgtattccattccgctcgccaca

SEQ ID NO: 186943 - DNA, 25 bp, Artificial
  Probe
tcaatttacgactgcctatcgggat

SEQ ID NO: 186944 - DNA, 25 bp, Artificial
  Probe
attccgctcgccacaaatatgggta

SEQ ID NO: 186945 - DNA, 25 bp, Artificial
  Probe
tacgactgcctatcgggatatttta

SEQ ID NO: 186946 - DNA, 25 bp, Artificial
  Probe
ttccgctcgccacaaatatgggtac

SEQ ID NO: 186947 - DNA, 25 bp, Artificial
  Probe
agaatcatgatctatacgcaaccgg

SEQ ID NO: 186948 - DNA, 25 bp, Artificial
  Probe
ccgctcgccacaaatatgggtactg

SEQ ID NO: 186949 - DNA, 25 bp, Artificial
  Probe
gaatcatgatctatacgcaaccgga

SEQ ID NO: 186950 - DNA, 25 bp, Artificial
  Probe
ctcgccacaaatatgggtactgcgg

SEQ ID NO: 186951 - DNA, 25 bp, Artificial
  Probe
aatcatgatctatacgcaaccggaa

SEQ ID NO: 186952 - DNA, 25 bp, Artificial
  Probe
tcgccacaaatatgggtactgcgga

SEQ ID NO: 186953 - DNA, 25 bp, Artificial
  Probe
tcatgatctatacgcaaccggaacc

SEQ ID NO: 186954 - DNA, 25 bp, Artificial
  Probe
tatgggtactgcggaaattcttgtg

SEQ ID NO: 186955 - DNA, 25 bp, Artificial
  Probe
tgatctatacgcaaccggaaccaca

SEQ ID NO: 186956 - DNA, 25 bp, Artificial
  Probe
ggtactgcggaaattcttgtgcgca

SEQ ID NO: 186957 - DNA, 25 bp, Artificial
  Probe
aattcatgaggcgacaggtcttcaa

SEQ ID NO: 186958 - DNA, 25 bp, Artificial
  Probe
tactgcggaaattcttgtgcgcaca

SEQ ID NO: 186959 - DNA, 25 bp, Artificial
  Probe
ttcatgaggcgacaggtcttcaaat

SEQ ID NO: 186960 - DNA, 25 bp, Artificial
  Probe
ctgcggaaattcttgtgcgcacact

SEQ ID NO: 186961 - DNA, 25 bp, Artificial
  Probe
tcatgaggcgacaggtcttcaaatt

SEQ ID NO: 186962 - DNA, 25 bp, Artificial
  Probe
ggaaattcttgtgcgcacacttgat

SEQ ID NO: 186963 - DNA, 25 bp, Artificial
  Probe
catgaggcgacaggtcttcaaattg

SEQ ID NO: 186964 - DNA, 25 bp, Artificial
  Probe
aaattcttgtgcgcacacttgatga

SEQ ID NO: 186965 - DNA, 25 bp, Artificial
  Probe
gggagaccagcaaatcggtgcactg

SEQ ID NO: 186966 - DNA, 25 bp, Artificial
  Probe
ttcttgtgcgcacacttgatgaagg

SEQ ID NO: 186967 - DNA, 25 bp, Artificial
  Probe
ggagaccagcaaatcggtgcactga

SEQ ID NO: 186968 - DNA, 25 bp, Artificial
  Probe
tcttgtgcgcacacttgatgaaggt

SEQ ID NO: 186969 - DNA, 25 bp, Artificial
  Probe
gaccagcaaatcggtgcactgatcg

SEQ ID NO: 186970 - DNA, 25 bp, Artificial
  Probe
ttgtgcgcacacttgatgaaggtgt

SEQ ID NO: 186971 - DNA, 25 bp, Artificial
  Probe
ccagcaaatcggtgcactgatcgct

SEQ ID NO: 186972 - DNA, 25 bp, Artificial
  Probe
tgcgcacacttgatgaaggtgtttt

SEQ ID NO: 186973 - DNA, 25 bp, Artificial
  Probe
agcaaatcggtgcactgatcgctgc

SEQ ID NO: 186974 - DNA, 25 bp, Artificial
  Probe
gcgcacacttgatgaaggtgttttc

SEQ ID NO: 186975 - DNA, 25 bp, Artificial
  Probe
gcaaatcggtgcactgatcgctgcc

SEQ ID NO: 186976 - DNA, 25 bp, Artificial
  Probe
tcttcggggagaagagccgaatgta

SEQ ID NO: 186977 - DNA, 25 bp, Artificial
  Probe
caaatcggtgcactgatcgctgcca

SEQ ID NO: 186978 - DNA, 25 bp, Artificial
  Probe
tgtataatgctgacgttcttgcttt

SEQ ID NO: 186979 - DNA, 25 bp, Artificial
  Probe
tcggtgcactgatcgctgccaatgc

SEQ ID NO: 186980 - DNA, 25 bp, Artificial
  Probe
ataatgctgacgttcttgcttttgg

SEQ ID NO: 186981 - DNA, 25 bp, Artificial
  Probe
cggtgcactgatcgctgccaatgca

SEQ ID NO: 186982 - DNA, 25 bp, Artificial
  Probe
atgctgacgttcttgcttttggcgc

SEQ ID NO: 186983 - DNA, 25 bp, Artificial
  Probe
ggtgcactgatcgctgccaatgcac

SEQ ID NO: 186984 - DNA, 25 bp, Artificial
  Probe
gctgacgttcttgcttttggcgccc

SEQ ID NO: 186985 - DNA, 25 bp, Artificial
  Probe
acgccatgattcttataaccgtgct

SEQ ID NO: 186986 - DNA, 25 bp, Artificial
  Probe
tgcactgatcgctgccaatgcactc

SEQ ID NO: 186987 - DNA, 25 bp, Artificial
  Probe
tgacgttcttgcttttggcgcccac

SEQ ID NO: 186988 - DNA, 25 bp, Artificial
  Probe
catgattcttataaccgtgcttctt

SEQ ID NO: 186989 - DNA, 25 bp, Artificial
  Probe
cactgatcgctgccaatgcactcga

SEQ ID NO: 186990 - DNA, 25 bp, Artificial
  Probe
gttcttgcttttggcgcccacagtg

SEQ ID NO: 186991 - DNA, 25 bp, Artificial
  Probe
tcttataaccgtgcttctttcatgt

SEQ ID NO: 186992 - DNA, 25 bp, Artificial
  Probe
ctgatcgctgccaatgcactcgatc

SEQ ID NO: 186993 - DNA, 25 bp, Artificial
  Probe
tcttgcttttggcgcccacagtgat

SEQ ID NO: 186994 - DNA, 25 bp, Artificial
  Probe
ataaccgtgcttctttcatgtcagg

SEQ ID NO: 186995 - DNA, 25 bp, Artificial
  Probe
gatcgctgccaatgcactcgatctt

SEQ ID NO: 186996 - DNA, 25 bp, Artificial
  Probe
gcttttggcgcccacagtgatgatg

SEQ ID NO: 186997 - DNA, 25 bp, Artificial
  Probe
taaccgtgcttctttcatgtcaggc

SEQ ID NO: 186998 - DNA, 25 bp, Artificial
  Probe
cgctgccaatgcactcgatcttgtc

SEQ ID NO: 186999 - DNA, 25 bp, Artificial
  Probe
cttttggcgcccacagtgatgatgt

SEQ ID NO: 187000 - DNA, 25 bp, Artificial
  Probe
aaccgtgcttctttcatgtcaggcg

SEQ ID NO: 187001 - DNA, 25 bp, Artificial
  Probe
gctgccaatgcactcgatcttgtca

SEQ ID NO: 187002 - DNA, 25 bp, Artificial
  Probe
ttttggcgcccacagtgatgatgtc

SEQ ID NO: 187003 - DNA, 25 bp, Artificial
  Probe
gtgcttctttcatgtcaggcgttaa

SEQ ID NO: 187004 - DNA, 25 bp, Artificial
  Probe
tgccaatgcactcgatcttgtcatt

SEQ ID NO: 187005 - DNA, 25 bp, Artificial
  Probe
ttggcgcccacagtgatgatgtcga

SEQ ID NO: 187006 - DNA, 25 bp, Artificial
  Probe
tgcttctttcatgtcaggcgttaaa

SEQ ID NO: 187007 - DNA, 25 bp, Artificial
  Probe
caatgcactcgatcttgtcattttt

SEQ ID NO: 187008 - DNA, 25 bp, Artificial
  Probe
ggcgcccacagtgatgatgtcgaga

SEQ ID NO: 187009 - DNA, 25 bp, Artificial
  Probe
ttctttcatgtcaggcgttaaactg

SEQ ID NO: 187010 - DNA, 25 bp, Artificial
  Probe
aatgcactcgatcttgtcatttttt

SEQ ID NO: 187011 - DNA, 25 bp, Artificial
  Probe
cgcccacagtgatgatgtcgagatc

SEQ ID NO: 187012 - DNA, 25 bp, Artificial
  Probe
ctttcatgtcaggcgttaaactgtc

SEQ ID NO: 187013 - DNA, 25 bp, Artificial
  Probe
gctgaccgcgcagccgcatgaaccg

SEQ ID NO: 187014 - DNA, 25 bp, Artificial
  Probe
agtgatgatgtcgagatcggaatgg

SEQ ID NO: 187015 - DNA, 25 bp, Artificial
  Probe
ttcatgtcaggcgttaaactgtcag

SEQ ID NO: 187016 - DNA, 25 bp, Artificial
  Probe
accgcgcagccgcatgaaccggatg

SEQ ID NO: 187017 - DNA, 25 bp, Artificial
  Probe
tcatgtcaggcgttaaactgtcagt

SEQ ID NO: 187018 - DNA, 25 bp, Artificial
  Probe
ccgcgcagccgcatgaaccggatgt

SEQ ID NO: 187019 - DNA, 25 bp, Artificial
  Probe
catgtcaggcgttaaactgtcagtc

SEQ ID NO: 187020 - DNA, 25 bp, Artificial
  Probe
gcgcagccgcatgaaccggatgtct

SEQ ID NO: 187021 - DNA, 25 bp, Artificial
  Probe
tcaggcgttaaactgtcagtcgaac

SEQ ID NO: 187022 - DNA, 25 bp, Artificial
  Probe
gcagccgcatgaaccggatgtctcg

SEQ ID NO: 187023 - DNA, 25 bp, Artificial
  Probe
gttaaactgtcagtcgaacaagtca

SEQ ID NO: 187024 - DNA, 25 bp, Artificial
  Probe
agccgcatgaaccggatgtctcggc

SEQ ID NO: 187025 - DNA, 25 bp, Artificial
  Probe
ttaaactgtcagtcgaacaagtcat

SEQ ID NO: 187026 - DNA, 25 bp, Artificial
  Probe
gccgcatgaaccggatgtctcggca

SEQ ID NO: 187027 - DNA, 25 bp, Artificial
  Probe
aactgtcagtcgaacaagtcatgaa

SEQ ID NO: 187028 - DNA, 25 bp, Artificial
  Probe
catgaaccggatgtctcggcattaa

SEQ ID NO: 187029 - DNA, 25 bp, Artificial
  Probe
gtcagtcgaacaagtcatgaagatt

SEQ ID NO: 187030 - DNA, 25 bp, Artificial
  Probe
gaaccggatgtctcggcattaatcc

SEQ ID NO: 187031 - DNA, 25 bp, Artificial
  Probe
aagattgatcagcttgtgtatggtt

SEQ ID NO: 187032 - DNA, 25 bp, Artificial
  Probe
gatgtctcggcattaatccgtttat

SEQ ID NO: 187033 - DNA, 25 bp, Artificial
  Probe
agattgatcagcttgtgtatggttt

SEQ ID NO: 187034 - DNA, 25 bp, Artificial
  Probe
atgtctcggcattaatccgtttatg

SEQ ID NO: 187035 - DNA, 25 bp, Artificial
  Probe
attgatcagcttgtgtatggtttag

SEQ ID NO: 187036 - DNA, 25 bp, Artificial
  Probe
tctcggcattaatccgtttatgtga

SEQ ID NO: 187037 - DNA, 25 bp, Artificial
  Probe
gatcagcttgtgtatggtttagaaa

SEQ ID NO: 187038 - DNA, 25 bp, Artificial
  Probe
tcggcattaatccgtttatgtgatg

SEQ ID NO: 187039 - DNA, 25 bp, Artificial
  Probe
tgaaaattgctttgatcgcgcatga

SEQ ID NO: 187040 - DNA, 25 bp, Artificial
  Probe
cggcattaatccgtttatgtgatgt

SEQ ID NO: 187041 - DNA, 25 bp, Artificial
  Probe
aaattgctttgatcgcgcatgacaa

SEQ ID NO: 187042 - DNA, 25 bp, Artificial
  Probe
cattaatccgtttatgtgatgtgta

SEQ ID NO: 187043 - DNA, 25 bp, Artificial
  Probe
gctttgatcgcgcatgacaagaaaa

SEQ ID NO: 187044 - DNA, 25 bp, Artificial
  Probe
taatccgtttatgtgatgtgtattc

SEQ ID NO: 187045 - DNA, 25 bp, Artificial
  Probe
atatggttcaatttacgactgccta

SEQ ID NO: 187046 - DNA, 25 bp, Artificial
  Probe
tttatgtgatgtgtattccattccg

SEQ ID NO: 187047 - DNA, 25 bp, Artificial
  Probe
tatggttcaatttacgactgcctat

SEQ ID NO: 187048 - DNA, 25 bp, Artificial
  Probe
tgatgtgtattccattccgctcgcc

SEQ ID NO: 187049 - DNA, 25 bp, Artificial
  Probe
tggttcaatttacgactgcctatcg

SEQ ID NO: 187050 - DNA, 25 bp, Artificial
  Probe
tgtgtattccattccgctcgccaca

SEQ ID NO: 187051 - DNA, 25 bp, Artificial
  Probe
tcaatttacgactgcctatcgggat

SEQ ID NO: 187052 - DNA, 25 bp, Artificial
  Probe
attccgctcgccacaaatatgggta

SEQ ID NO: 187053 - DNA, 25 bp, Artificial
  Probe
tacgactgcctatcgggatatttta

SEQ ID NO: 187054 - DNA, 25 bp, Artificial
  Probe
ttccgctcgccacaaatatgggtac

SEQ ID NO: 187055 - DNA, 25 bp, Artificial
  Probe
agaatcatgatctatacgcaaccgg

SEQ ID NO: 187056 - DNA, 25 bp, Artificial
  Probe
ccgctcgccacaaatatgggtactg

SEQ ID NO: 187057 - DNA, 25 bp, Artificial
  Probe
gaatcatgatctatacgcaaccgga

SEQ ID NO: 187058 - DNA, 25 bp, Artificial
  Probe
ctcgccacaaatatgggtactgcgg

SEQ ID NO: 187059 - DNA, 25 bp, Artificial
  Probe
aatcatgatctatacgcaaccggaa

SEQ ID NO: 187060 - DNA, 25 bp, Artificial
  Probe
tcgccacaaatatgggtactgcgga

SEQ ID NO: 187061 - DNA, 25 bp, Artificial
  Probe
tcatgatctatacgcaaccggaacc

SEQ ID NO: 187062 - DNA, 25 bp, Artificial
  Probe
tatgggtactgcggaaattcttgtg

SEQ ID NO: 187063 - DNA, 25 bp, Artificial
  Probe
tgatctatacgcaaccggaaccaca

SEQ ID NO: 187064 - DNA, 25 bp, Artificial
  Probe
ggtactgcggaaattcttgtgcgca

SEQ ID NO: 187065 - DNA, 25 bp, Artificial
  Probe
aattcatgaggcgacaggtcttcaa

SEQ ID NO: 187066 - DNA, 25 bp, Artificial
  Probe
tactgcggaaattcttgtgcgcaca

SEQ ID NO: 187067 - DNA, 25 bp, Artificial
  Probe
ttcatgaggcgacaggtcttcaaat

SEQ ID NO: 187068 - DNA, 25 bp, Artificial
  Probe
ctgcggaaattcttgtgcgcacact

SEQ ID NO: 187069 - DNA, 25 bp, Artificial
  Probe
tcatgaggcgacaggtcttcaaatt

SEQ ID NO: 187070 - DNA, 25 bp, Artificial
  Probe
ggaaattcttgtgcgcacacttgat

SEQ ID NO: 187071 - DNA, 25 bp, Artificial
  Probe
catgaggcgacaggtcttcaaattg

SEQ ID NO: 187072 - DNA, 25 bp, Artificial
  Probe
aaattcttgtgcgcacacttgatga

SEQ ID NO: 187073 - DNA, 25 bp, Artificial
  Probe
gggagaccagcaaatcggtgcactg

SEQ ID NO: 187074 - DNA, 25 bp, Artificial
  Probe
ttcttgtgcgcacacttgatgaagg

SEQ ID NO: 187075 - DNA, 25 bp, Artificial
  Probe
ggagaccagcaaatcggtgcactga

SEQ ID NO: 187076 - DNA, 25 bp, Artificial
  Probe
tcttgtgcgcacacttgatgaaggt

SEQ ID NO: 187077 - DNA, 25 bp, Artificial
  Probe
gaccagcaaatcggtgcactgatcg

SEQ ID NO: 187078 - DNA, 25 bp, Artificial
  Probe
ttgtgcgcacacttgatgaaggtgt

SEQ ID NO: 187079 - DNA, 25 bp, Artificial
  Probe
ccagcaaatcggtgcactgatcgct

SEQ ID NO: 187080 - DNA, 25 bp, Artificial
  Probe
tgcgcacacttgatgaaggtgtttt

SEQ ID NO: 187081 - DNA, 25 bp, Artificial
  Probe
agcaaatcggtgcactgatcgctgc

SEQ ID NO: 187082 - DNA, 25 bp, Artificial
  Probe
gcgcacacttgatgaaggtgttttc

SEQ ID NO: 187083 - DNA, 25 bp, Artificial
  Probe
gcaaatcggtgcactgatcgctgcc

SEQ ID NO: 187084 - DNA, 25 bp, Artificial
  Probe
tcttcggggagaagagccgaatgta

SEQ ID NO: 187085 - DNA, 25 bp, Artificial
  Probe
caaatcggtgcactgatcgctgcca

SEQ ID NO: 187086 - DNA, 25 bp, Artificial
  Probe
tgtataatgctgacgttcttgcttt

SEQ ID NO: 187087 - DNA, 25 bp, Artificial
  Probe
tcggtgcactgatcgctgccaatgc

SEQ ID NO: 187088 - DNA, 25 bp, Artificial
  Probe
ataatgctgacgttcttgcttttgg

SEQ ID NO: 187089 - DNA, 25 bp, Artificial
  Probe
cggtgcactgatcgctgccaatgca

SEQ ID NO: 187090 - DNA, 25 bp, Artificial
  Probe
atgctgacgttcttgcttttggcgc

SEQ ID NO: 187091 - DNA, 25 bp, Artificial
  Probe
ggtgcactgatcgctgccaatgcac

SEQ ID NO: 187092 - DNA, 25 bp, Artificial
  Probe
gctgacgttcttgcttttggcgccc

SEQ ID NO: 187093 - DNA, 25 bp, Artificial
  Probe
acgccatgattcttataaccgtgct

SEQ ID NO: 187094 - DNA, 25 bp, Artificial
  Probe
tgcactgatcgctgccaatgcactc

SEQ ID NO: 187095 - DNA, 25 bp, Artificial
  Probe
tgacgttcttgcttttggcgcccac

SEQ ID NO: 187096 - DNA, 25 bp, Artificial
  Probe
catgattcttataaccgtgcttctt

SEQ ID NO: 187097 - DNA, 25 bp, Artificial
  Probe
cactgatcgctgccaatgcactcga

SEQ ID NO: 187098 - DNA, 25 bp, Artificial
  Probe
gttcttgcttttggcgcccacagtg

SEQ ID NO: 187099 - DNA, 25 bp, Artificial
  Probe
tcttataaccgtgcttctttcatgt

SEQ ID NO: 187100 - DNA, 25 bp, Artificial
  Probe
ctgatcgctgccaatgcactcgatc

SEQ ID NO: 187101 - DNA, 25 bp, Artificial
  Probe
tcttgcttttggcgcccacagtgat

SEQ ID NO: 187102 - DNA, 25 bp, Artificial
  Probe
ataaccgtgcttctttcatgtcagg

SEQ ID NO: 187103 - DNA, 25 bp, Artificial
  Probe
gatcgctgccaatgcactcgatctt

SEQ ID NO: 187104 - DNA, 25 bp, Artificial
  Probe
gcttttggcgcccacagtgatgatg

SEQ ID NO: 187105 - DNA, 25 bp, Artificial
  Probe
taaccgtgcttctttcatgtcaggc

SEQ ID NO: 187106 - DNA, 25 bp, Artificial
  Probe
cgctgccaatgcactcgatcttgtc

SEQ ID NO: 187107 - DNA, 25 bp, Artificial
  Probe
cttttggcgcccacagtgatgatgt

SEQ ID NO: 187108 - DNA, 25 bp, Artificial
  Probe
aaccgtgcttctttcatgtcaggcg

SEQ ID NO: 187109 - DNA, 25 bp, Artificial
  Probe
gctgccaatgcactcgatcttgtca

SEQ ID NO: 187110 - DNA, 25 bp, Artificial
  Probe
ttttggcgcccacagtgatgatgtc

SEQ ID NO: 187111 - DNA, 25 bp, Artificial
  Probe
gtgcttctttcatgtcaggcgttaa

SEQ ID NO: 187112 - DNA, 25 bp, Artificial
  Probe
tgccaatgcactcgatcttgtcatt

SEQ ID NO: 187113 - DNA, 25 bp, Artificial
  Probe
ttggcgcccacagtgatgatgtcga

SEQ ID NO: 187114 - DNA, 25 bp, Artificial
  Probe
tgcttctttcatgtcaggcgttaaa

SEQ ID NO: 187115 - DNA, 25 bp, Artificial
  Probe
caatgcactcgatcttgtcattttt

SEQ ID NO: 187116 - DNA, 25 bp, Artificial
  Probe
ggcgcccacagtgatgatgtcgaga

SEQ ID NO: 187117 - DNA, 25 bp, Artificial
  Probe
ttctttcatgtcaggcgttaaactg

SEQ ID NO: 187118 - DNA, 25 bp, Artificial
  Probe
aatgcactcgatcttgtcatttttt

SEQ ID NO: 187119 - DNA, 25 bp, Artificial
  Probe
cgcccacagtgatgatgtcgagatc

SEQ ID NO: 187120 - DNA, 25 bp, Artificial
  Probe
ctttcatgtcaggcgttaaactgtc

SEQ ID NO: 187121 - DNA, 25 bp, Artificial
  Probe
gctgaccgcgcagccgcatgaaccg

SEQ ID NO: 187122 - DNA, 25 bp, Artificial
  Probe
agtgatgatgtcgagatcggaatgg

SEQ ID NO: 187123 - DNA, 25 bp, Artificial
  Probe
ttcatgtcaggcgttaaactgtcag

SEQ ID NO: 187124 - DNA, 25 bp, Artificial
  Probe
accgcgcagccgcatgaaccggatg

SEQ ID NO: 187125 - DNA, 25 bp, Artificial
  Probe
tcatgtcaggcgttaaactgtcagt

SEQ ID NO: 187126 - DNA, 25 bp, Artificial
  Probe
ccgcgcagccgcatgaaccggatgt

SEQ ID NO: 187127 - DNA, 25 bp, Artificial
  Probe
catgtcaggcgttaaactgtcagtc

SEQ ID NO: 187128 - DNA, 25 bp, Artificial
  Probe
gcgcagccgcatgaaccggatgtct

SEQ ID NO: 187129 - DNA, 25 bp, Artificial
  Probe
tcaggcgttaaactgtcagtcgaac

SEQ ID NO: 187130 - DNA, 25 bp, Artificial
  Probe
gcagccgcatgaaccggatgtctcg

SEQ ID NO: 187131 - DNA, 25 bp, Artificial
  Probe
gttaaactgtcagtcgaacaagtca

SEQ ID NO: 187132 - DNA, 25 bp, Artificial
  Probe
agccgcatgaaccggatgtctcggc

SEQ ID NO: 187133 - DNA, 25 bp, Artificial
  Probe
ttaaactgtcagtcgaacaagtcat

SEQ ID NO: 187134 - DNA, 25 bp, Artificial
  Probe
gccgcatgaaccggatgtctcggca

SEQ ID NO: 187135 - DNA, 25 bp, Artificial
  Probe
aactgtcagtcgaacaagtcatgaa

SEQ ID NO: 187136 - DNA, 25 bp, Artificial
  Probe
catgaaccggatgtctcggcattaa

SEQ ID NO: 187137 - DNA, 25 bp, Artificial
  Probe
gtcagtcgaacaagtcatgaagatt

SEQ ID NO: 187138 - DNA, 25 bp, Artificial
  Probe
gaaccggatgtctcggcattaatcc

SEQ ID NO: 187139 - DNA, 25 bp, Artificial
  Probe
aagattgatcagcttgtgtatggtt

SEQ ID NO: 187140 - DNA, 25 bp, Artificial
  Probe
gatgtctcggcattaatccgtttat

SEQ ID NO: 187141 - DNA, 25 bp, Artificial
  Probe
agattgatcagcttgtgtatggttt

SEQ ID NO: 187142 - DNA, 25 bp, Artificial
  Probe
atgtctcggcattaatccgtttatg

SEQ ID NO: 187143 - DNA, 25 bp, Artificial
  Probe
attgatcagcttgtgtatggtttag

SEQ ID NO: 187144 - DNA, 25 bp, Artificial
  Probe
tctcggcattaatccgtttatgtga

SEQ ID NO: 187145 - DNA, 25 bp, Artificial
  Probe
gatcagcttgtgtatggtttagaaa

SEQ ID NO: 187146 - DNA, 25 bp, Artificial
  Probe
tcggcattaatccgtttatgtgatg

SEQ ID NO: 187147 - DNA, 25 bp, Artificial
  Probe
tgaaaattgctttgatcgcgcatga

SEQ ID NO: 187148 - DNA, 25 bp, Artificial
  Probe
cggcattaatccgtttatgtgatgt

SEQ ID NO: 187149 - DNA, 25 bp, Artificial
  Probe
aaattgctttgatcgcgcatgacaa

SEQ ID NO: 187150 - DNA, 25 bp, Artificial
  Probe
cattaatccgtttatgtgatgtgta

SEQ ID NO: 187151 - DNA, 25 bp, Artificial
  Probe
gctttgatcgcgcatgacaagaaaa

SEQ ID NO: 187152 - DNA, 25 bp, Artificial
  Probe
taatccgtttatgtgatgtgtattc

SEQ ID NO: 187153 - DNA, 25 bp, Artificial
  Probe
atatggttcaatttacgactgccta

SEQ ID NO: 187154 - DNA, 25 bp, Artificial
  Probe
tttatgtgatgtgtattccattccg

SEQ ID NO: 187155 - DNA, 25 bp, Artificial
  Probe
tatggttcaatttacgactgcctat

SEQ ID NO: 187156 - DNA, 25 bp, Artificial
  Probe
tgatgtgtattccattccgctcgcc

SEQ ID NO: 187157 - DNA, 25 bp, Artificial
  Probe
tggttcaatttacgactgcctatcg

SEQ ID NO: 187158 - DNA, 25 bp, Artificial
  Probe
tgtgtattccattccgctcgccaca

SEQ ID NO: 187159 - DNA, 25 bp, Artificial
  Probe
atcctgggctacactgaggaccagg

SEQ ID NO: 187160 - DNA, 25 bp, Artificial
  Probe
atactgagagcaagagagaggccct

SEQ ID NO: 187161 - DNA, 25 bp, Artificial
  Probe
attgctctcaatgacaactttgtga

SEQ ID NO: 187162 - DNA, 25 bp, Artificial
  Probe
tgacaactttgtgaagctcatttcc

SEQ ID NO: 187163 - DNA, 25 bp, Artificial
  Probe
ctcaatgacaactttgtgaagctca

SEQ ID NO: 187164 - DNA, 25 bp, Artificial
  Probe
cctgggctacactgaggaccaggtt

SEQ ID NO: 187165 - DNA, 25 bp, Artificial
  Probe
tcatggcctacatggcctccaagga

SEQ ID NO: 187166 - DNA, 25 bp, Artificial
  Probe
tgtgaagctcatttcctggtatgac

SEQ ID NO: 187167 - DNA, 25 bp, Artificial
  Probe
ttgtctcctgtgacttcaacagcaa

SEQ ID NO: 187168 - DNA, 25 bp, Artificial
  Probe
ggcatcctgggctacactgaggacc

SEQ ID NO: 187169 - DNA, 25 bp, Artificial
  Probe
ctacatggcctccaaggagtaagaa

SEQ ID NO: 187170 - DNA, 25 bp, Artificial
  Probe
acaactttgtgaagctcatttcctg

SEQ ID NO: 187171 - DNA, 25 bp, Artificial
  Probe
ggttgtctcctgtgacttcaacagc

SEQ ID NO: 187172 - DNA, 25 bp, Artificial
  Probe
aagctcatttcctggtatgacaatg

SEQ ID NO: 187173 - DNA, 25 bp, Artificial
  Probe
accaggttgtctcctgtgacttcaa

SEQ ID NO: 187174 - DNA, 25 bp, Artificial
  Probe
actgaggaccaggttgtctcctgtg

SEQ ID NO: 187175 - DNA, 25 bp, Artificial
  Probe
cctacatggcctccaaggagtaaga

SEQ ID NO: 187176 - DNA, 25 bp, Artificial
  Probe
tggtggacctcatggcctacatggc

SEQ ID NO: 187177 - DNA, 25 bp, Artificial
  Probe
agctcatttcctggtatgacaatga

SEQ ID NO: 187178 - DNA, 25 bp, Artificial
  Probe
ctgaggaccaggttgtctcctgtga

SEQ ID NO: 187179 - DNA, 25 bp, Artificial
  Probe
gacaactttgtgaagctcatttcct

SEQ ID NO: 187180 - DNA, 25 bp, Artificial
  Probe
cattgctctcaatgacaactttgtg

SEQ ID NO: 187181 - DNA, 25 bp, Artificial
  Probe
agaggccctcagttgcctgagagtc

SEQ ID NO: 187182 - DNA, 25 bp, Artificial
  Probe
tcctgggctacactgaggaccaggt

SEQ ID NO: 187183 - DNA, 25 bp, Artificial
  Probe
gaccaggttgtctcctgtgacttca

SEQ ID NO: 187184 - DNA, 25 bp, Artificial
  Probe
tacactgaggaccaggttgtctcct

SEQ ID NO: 187185 - DNA, 25 bp, Artificial
  Probe
gcctacatggcctccaaggagtaag

SEQ ID NO: 187186 - DNA, 25 bp, Artificial
  Probe
caatgacaactttgtgaagctcatt

SEQ ID NO: 187187 - DNA, 25 bp, Artificial
  Probe
gaataccatcaataaagttcgctgc

SEQ ID NO: 187188 - DNA, 25 bp, Artificial
  Probe
tgctctcaatgacaactttgtgaag

SEQ ID NO: 187189 - DNA, 25 bp, Artificial
  Probe
cgaataccatcaataaagttcgctg

SEQ ID NO: 187190 - DNA, 25 bp, Artificial
  Probe
gtggtggacctcatggcctacatgg

SEQ ID NO: 187191 - DNA, 25 bp, Artificial
  Probe
gggctacactgaggaccaggttgtc

SEQ ID NO: 187192 - DNA, 25 bp, Artificial
  Probe
actttgtgaagctcatttcctggta

SEQ ID NO: 187193 - DNA, 25 bp, Artificial
  Probe
gctcatttcctggtatgacaatgaa

SEQ ID NO: 187194 - DNA, 25 bp, Artificial
  Probe
ccagcccagcaaggatactgagagc

SEQ ID NO: 187195 - DNA, 25 bp, Artificial
  Probe
gagaggccctcagttgcctgagagt

SEQ ID NO: 187196 - DNA, 25 bp, Artificial
  Probe
aggaccaggttgtctcctgtgactt

SEQ ID NO: 187197 - DNA, 25 bp, Artificial
  Probe
acatggcctccaaggagtaagaaac

SEQ ID NO: 187198 - DNA, 25 bp, Artificial
  Probe
catttcctggtatgacaatgaatat

SEQ ID NO: 187199 - DNA, 25 bp, Artificial
  Probe
ggcattgctctcaatgacaactttg

SEQ ID NO: 187200 - DNA, 25 bp, Artificial
  Probe
tctcaatgacaactttgtgaagctc

SEQ ID NO: 187201 - DNA, 25 bp, Artificial
  Probe
ttgctctcaatgacaactttgtgaa

SEQ ID NO: 187202 - DNA, 25 bp, Artificial
  Probe
gctacactgaggaccaggttgtctc

SEQ ID NO: 187203 - DNA, 25 bp, Artificial
  Probe
cagcccagcaaggatactgagagca

SEQ ID NO: 187204 - DNA, 25 bp, Artificial
  Probe
caggttgtctcctgtgacttcaaca

SEQ ID NO: 187205 - DNA, 25 bp, Artificial
  Probe
gctctcaatgacaactttgtgaagc

SEQ ID NO: 187206 - DNA, 25 bp, Artificial
  Probe
atgacaactttgtgaagctcatttc

SEQ ID NO: 187207 - DNA, 25 bp, Artificial
  Probe
gaggaccaggttgtctcctgtgact

SEQ ID NO: 187208 - DNA, 25 bp, Artificial
  Probe
tgaagctcatttcctggtatgacaa

SEQ ID NO: 187209 - DNA, 25 bp, Artificial
  Probe
ctggcattgctctcaatgacaactt

SEQ ID NO: 187210 - DNA, 25 bp, Artificial
  Probe
ggctggcattgctctcaatgacaac

SEQ ID NO: 187211 - DNA, 25 bp, Artificial
  Probe
tggcattgctctcaatgacaacttt

SEQ ID NO: 187212 - DNA, 25 bp, Artificial
  Probe
gaggccctcagttgcctgagagtcc

SEQ ID NO: 187213 - DNA, 25 bp, Artificial
  Probe
aggttgtctcctgtgacttcaacag

SEQ ID NO: 187214 - DNA, 25 bp, Artificial
  Probe
ctgggctacactgaggaccaggttg

SEQ ID NO: 187215 - DNA, 25 bp, Artificial
  Probe
ctttgtgaagctcatttcctggtat

SEQ ID NO: 187216 - DNA, 25 bp, Artificial
  Probe
agcccagcaaggatactgagagcaa

SEQ ID NO: 187217 - DNA, 25 bp, Artificial
  Probe
gaatatggctacagcaacagggtgg

SEQ ID NO: 187218 - DNA, 25 bp, Artificial
  Probe
agagaggccctcagttgcctgagag

SEQ ID NO: 187219 - DNA, 25 bp, Artificial
  Probe
ctacactgaggaccaggttgtctcc

SEQ ID NO: 187220 - DNA, 25 bp, Artificial
  Probe
caactttgtgaagctcatttcctgg

SEQ ID NO: 187221 - DNA, 25 bp, Artificial
  Probe
aatatggctacagcaacagggtggt

SEQ ID NO: 187222 - DNA, 25 bp, Artificial
  Probe
ccaggttgtctcctgtgacttcaac

SEQ ID NO: 187223 - DNA, 25 bp, Artificial
  Probe
agagagaggccctcagttgcctgag

SEQ ID NO: 187224 - DNA, 25 bp, Artificial
  Probe
catcctgggctacactgaggaccag

SEQ ID NO: 187225 - DNA, 25 bp, Artificial
  Probe
tttgtgaagctcatttcctggtatg

SEQ ID NO: 187226 - DNA, 25 bp, Artificial
  Probe
ttcctggtatgacaatgaatatggc

SEQ ID NO: 187227 - DNA, 25 bp, Artificial
  Probe
ctcatggcctacatggcctccaagg

SEQ ID NO: 187228 - DNA, 25 bp, Artificial
  Probe
cccagaccccataacaacaggaggg

SEQ ID NO: 187229 - DNA, 25 bp, Artificial
  Probe
tcaatgacaactttgtgaagctcat

SEQ ID NO: 187230 - DNA, 25 bp, Artificial
  Probe
gcccagcaaggatactgagagcaag

SEQ ID NO: 187231 - DNA, 25 bp, Artificial
  Probe
gcattgctctcaatgacaactttgt

SEQ ID NO: 187232 - DNA, 25 bp, Artificial
  Probe
cactgaggaccaggttgtctcctgt

SEQ ID NO: 187233 - DNA, 25 bp, Artificial
  Probe
tgggctacactgaggaccaggttgt

SEQ ID NO: 187234 - DNA, 25 bp, Artificial
  Probe
cccagcaaggatactgagagcaaga

SEQ ID NO: 187235 - DNA, 25 bp, Artificial
  Probe
ctcatttcctggtatgacaatgaat

SEQ ID NO: 187236 - DNA, 25 bp, Artificial
  Probe
catggcctccaaggagtaagaaacc

SEQ ID NO: 187237 - DNA, 25 bp, Artificial
  Probe
taaagggcatcctgggctacactga

SEQ ID NO: 187238 - DNA, 25 bp, Artificial
  Probe
gggctggcattgctctcaatgacaa

SEQ ID NO: 187239 - DNA, 25 bp, Artificial
  Probe
gccttctcttgtgacaaagtggaca

SEQ ID NO: 187240 - DNA, 25 bp, Artificial
  Probe
gggaagctggtcatcaatgggaaac

SEQ ID NO: 187241 - DNA, 25 bp, Artificial
  Probe
tgtcaacggatttggccgtattggc

SEQ ID NO: 187242 - DNA, 25 bp, Artificial
  Probe
atttggccgtattggccgcctggtc

SEQ ID NO: 187243 - DNA, 25 bp, Artificial
  Probe
cggcaagttcaatggcacagtcaag

SEQ ID NO: 187244 - DNA, 25 bp, Artificial
  Probe
ggtcaccagggctgccttctcttgt

SEQ ID NO: 187245 - DNA, 25 bp, Artificial
  Probe
tattggccgcctggtcaccagggct

SEQ ID NO: 187246 - DNA, 25 bp, Artificial
  Probe
agggctgccttctcttgtgacaaag

SEQ ID NO: 187247 - DNA, 25 bp, Artificial
  Probe
tggcgtcttcaccaccatggagaag

SEQ ID NO: 187248 - DNA, 25 bp, Artificial
  Probe
gatttggccgtattggccgcctggt

SEQ ID NO: 187249 - DNA, 25 bp, Artificial
  Probe
agtatgtcgtggagtctactggcgt

SEQ ID NO: 187250 - DNA, 25 bp, Artificial
  Probe
gctaacatcaaatggggtgatgctg

SEQ ID NO: 187251 - DNA, 25 bp, Artificial
  Probe
caatggcacagtcaaggctgagaat

SEQ ID NO: 187252 - DNA, 25 bp, Artificial
  Probe
agttcaatggcacagtcaaggctga

SEQ ID NO: 187253 - DNA, 25 bp, Artificial
  Probe
ttggccgcctggtcaccagggctgc

SEQ ID NO: 187254 - DNA, 25 bp, Artificial
  Probe
ggcgtcttcaccaccatggagaagg

SEQ ID NO: 187255 - DNA, 25 bp, Artificial
  Probe
ctgagtatgtcgtggagtctactgg

SEQ ID NO: 187256 - DNA, 25 bp, Artificial
  Probe
tccaggagcgcgatcccgctaacat

SEQ ID NO: 187257 - DNA, 25 bp, Artificial
  Probe
aagttcaatggcacagtcaaggctg

SEQ ID NO: 187258 - DNA, 25 bp, Artificial
  Probe
tacatggtctacatgttccagtatg

SEQ ID NO: 187259 - DNA, 25 bp, Artificial
  Probe
gtgctgagtatgtcgtggagtctac

SEQ ID NO: 187260 - DNA, 25 bp, Artificial
  Probe
catcaccatcttccaggagcgcgat

SEQ ID NO: 187261 - DNA, 25 bp, Artificial
  Probe
atggcacagtcaaggctgagaatgg

SEQ ID NO: 187262 - DNA, 25 bp, Artificial
  Probe
tctactggcgtcttcaccaccatgg

SEQ ID NO: 187263 - DNA, 25 bp, Artificial
  Probe
ggtgtcaacggatttggccgtattg

SEQ ID NO: 187264 - DNA, 25 bp, Artificial
  Probe
agctggtcatcaatgggaaacccat

SEQ ID NO: 187265 - DNA, 25 bp, Artificial
  Probe
gcccccatgtttgtgatgggtgtga

SEQ ID NO: 187266 - DNA, 25 bp, Artificial
  Probe
tactggcgtcttcaccaccatggag

SEQ ID NO: 187267 - DNA, 25 bp, Artificial
  Probe
gtctacatgttccagtatgattcta

SEQ ID NO: 187268 - DNA, 25 bp, Artificial
  Probe
ctgatgcccccatgtttgtgatggg

SEQ ID NO: 187269 - DNA, 25 bp, Artificial
  Probe
ctcttgtgacaaagtggacattgtt

SEQ ID NO: 187270 - DNA, 25 bp, Artificial
  Probe
cggatttggccgtattggccgcctg

SEQ ID NO: 187271 - DNA, 25 bp, Artificial
  Probe
tgagtatgtcgtggagtctactggc

SEQ ID NO: 187272 - DNA, 25 bp, Artificial
  Probe
gtcatcaatgggaaacccatcacca

SEQ ID NO: 187273 - DNA, 25 bp, Artificial
  Probe
tctacccacggcaagttcaatggca

SEQ ID NO: 187274 - DNA, 25 bp, Artificial
  Probe
cagtcaaggctgagaatgggaagct

SEQ ID NO: 187275 - DNA, 25 bp, Artificial
  Probe
gatgcccccatgtttgtgatgggtg

SEQ ID NO: 187276 - DNA, 25 bp, Artificial
  Probe
agtctactggcgtcttcaccaccat

SEQ ID NO: 187277 - DNA, 25 bp, Artificial
  Probe
acagtcaaggctgagaatgggaagc

SEQ ID NO: 187278 - DNA, 25 bp, Artificial
  Probe
tgccttctcttgtgacaaagtggac

SEQ ID NO: 187279 - DNA, 25 bp, Artificial
  Probe
cagtatgattctacccacggcaagt

SEQ ID NO: 187280 - DNA, 25 bp, Artificial
  Probe
aaagtggacattgttgccatcaacg

SEQ ID NO: 187281 - DNA, 25 bp, Artificial
  Probe
tgttccagtatgattctacccacgg

SEQ ID NO: 187282 - DNA, 25 bp, Artificial
  Probe
ctacccacggcaagttcaatggcac

SEQ ID NO: 187283 - DNA, 25 bp, Artificial
  Probe
acccacggcaagttcaatggcacag

SEQ ID NO: 187284 - DNA, 25 bp, Artificial
  Probe
tgacctcaactacatggtctacatg

SEQ ID NO: 187285 - DNA, 25 bp, Artificial
  Probe
tctcttgtgacaaagtggacattgt

SEQ ID NO: 187286 - DNA, 25 bp, Artificial
  Probe
atgttccagtatgattctacccacg

SEQ ID NO: 187287 - DNA, 25 bp, Artificial
  Probe
tcccgctaacatcaaatggggtgat

SEQ ID NO: 187288 - DNA, 25 bp, Artificial
  Probe
gtcttcaccaccatggagaaggctg

SEQ ID NO: 187289 - DNA, 25 bp, Artificial
  Probe
gtcgtggagtctactggcgtcttca

SEQ ID NO: 187290 - DNA, 25 bp, Artificial
  Probe
cgtggagtctactggcgtcttcacc

SEQ ID NO: 187291 - DNA, 25 bp, Artificial
  Probe
ccgctaacatcaaatggggtgatgc

SEQ ID NO: 187292 - DNA, 25 bp, Artificial
  Probe
accagggctgccttctcttgtgaca

SEQ ID NO: 187293 - DNA, 25 bp, Artificial
  Probe
caactacatggtctacatgttccag

SEQ ID NO: 187294 - DNA, 25 bp, Artificial
  Probe
atgtcgtggagtctactggcgtctt

SEQ ID NO: 187295 - DNA, 25 bp, Artificial
  Probe
cgtcttcaccaccatggagaaggct

SEQ ID NO: 187296 - DNA, 25 bp, Artificial
  Probe
cttcaccaccatggagaaggctggg

SEQ ID NO: 187297 - DNA, 25 bp, Artificial
  Probe
atgattctacccacggcaagttcaa

SEQ ID NO: 187298 - DNA, 25 bp, Artificial
  Probe
gctgatgcccccatgtttgtgatgg

SEQ ID NO: 187299 - DNA, 25 bp, Artificial
  Probe
gggctgccttctcttgtgacaaagt

SEQ ID NO: 187300 - DNA, 25 bp, Artificial
  Probe
cacagtcaaggctgagaatgggaag

SEQ ID NO: 187301 - DNA, 25 bp, Artificial
  Probe
aagctggtcatcaatgggaaaccca

SEQ ID NO: 187302 - DNA, 25 bp, Artificial
  Probe
ttccagtatgattctacccacggca

SEQ ID NO: 187303 - DNA, 25 bp, Artificial
  Probe
catggtctacatgttccagtatgat

SEQ ID NO: 187304 - DNA, 25 bp, Artificial
  Probe
gacctcaactacatggtctacatgt

SEQ ID NO: 187305 - DNA, 25 bp, Artificial
  Probe
gtgccaaaagggtcatcatctccgc

SEQ ID NO: 187306 - DNA, 25 bp, Artificial
  Probe
tggtctacatgttccagtatgattc

SEQ ID NO: 187307 - DNA, 25 bp, Artificial
  Probe
gcgcgatcccgctaacatcaaatgg

SEQ ID NO: 187308 - DNA, 25 bp, Artificial
  Probe
ctacatggtctacatgttccagtat

SEQ ID NO: 187309 - DNA, 25 bp, Artificial
  Probe
atcaccatcttccaggagcgcgatc

SEQ ID NO: 187310 - DNA, 25 bp, Artificial
  Probe
ggaaacccatcaccatcttccagga

SEQ ID NO: 187311 - DNA, 25 bp, Artificial
  Probe
catcaaatggggtgatgctggtgct

SEQ ID NO: 187312 - DNA, 25 bp, Artificial
  Probe
atcccgctaacatcaaatggggtga

SEQ ID NO: 187313 - DNA, 25 bp, Artificial
  Probe
gttgccatcaacgaccccttcattg

SEQ ID NO: 187314 - DNA, 25 bp, Artificial
  Probe
agtggacattgttgccatcaacgac

SEQ ID NO: 187315 - DNA, 25 bp, Artificial
  Probe
cccacggcaagttcaatggcacagt

SEQ ID NO: 187316 - DNA, 25 bp, Artificial
  Probe
tgggaaacccatcaccatcttccag

SEQ ID NO: 187317 - DNA, 25 bp, Artificial
  Probe
gacattgttgccatcaacgacccct

SEQ ID NO: 187318 - DNA, 25 bp, Artificial
  Probe
gtattggccgcctggtcaccagggc

SEQ ID NO: 187319 - DNA, 25 bp, Artificial
  Probe
cctggagaaacctgccaagtatgat

SEQ ID NO: 187320 - DNA, 25 bp, Artificial
  Probe
gtggggcagcccagaacatcatccc

SEQ ID NO: 187321 - DNA, 25 bp, Artificial
  Probe
cctgcatccactggtgctgccaagg

SEQ ID NO: 187322 - DNA, 25 bp, Artificial
  Probe
atcactgccactcagaagactgtgg

SEQ ID NO: 187323 - DNA, 25 bp, Artificial
  Probe
catcccagagctgaacgggaagctc

SEQ ID NO: 187324 - DNA, 25 bp, Artificial
  Probe
ccctctggaaagctgtggcgtgatg

SEQ ID NO: 187325 - DNA, 25 bp, Artificial
  Probe
tttggcatcgtggaagggctcatga

SEQ ID NO: 187326 - DNA, 25 bp, Artificial
  Probe
gaagggctcatgaccacagtccatg

SEQ ID NO: 187327 - DNA, 25 bp, Artificial
  Probe
ccaatgtatccgttgtggatctgac

SEQ ID NO: 187328 - DNA, 25 bp, Artificial
  Probe
aacctgccaagtatgatgacatcaa

SEQ ID NO: 187329 - DNA, 25 bp, Artificial
  Probe
cgggaagctcactggcatggccttc

SEQ ID NO: 187330 - DNA, 25 bp, Artificial
  Probe
agctcactggcatggccttccgtgt

SEQ ID NO: 187331 - DNA, 25 bp, Artificial
  Probe
agaagactgtggatggcccctctgg

SEQ ID NO: 187332 - DNA, 25 bp, Artificial
  Probe
aactccctcaagattgtcagcaatg

SEQ ID NO: 187333 - DNA, 25 bp, Artificial
  Probe
tggcccctctggaaagctgtggcgt

SEQ ID NO: 187334 - DNA, 25 bp, Artificial
  Probe
tgccgcctggagaaacctgccaagt

SEQ ID NO: 187335 - DNA, 25 bp, Artificial
  Probe
gacaactccctcaagattgtcagca

SEQ ID NO: 187336 - DNA, 25 bp, Artificial
  Probe
ggggcagcccagaacatcatccctg

SEQ ID NO: 187337 - DNA, 25 bp, Artificial
  Probe
attgtcagcaatgcatcctgcacca

SEQ ID NO: 187338 - DNA, 25 bp, Artificial
  Probe
aggtcatcccagagctgaacgggaa

SEQ ID NO: 187339 - DNA, 25 bp, Artificial
  Probe
ctgtgggcaaggtcatcccagagct

SEQ ID NO: 187340 - DNA, 25 bp, Artificial
  Probe
atgaccacagtccatgccatcactg

SEQ ID NO: 187341 - DNA, 25 bp, Artificial
  Probe
acccccaatgtatccgttgtggatc

SEQ ID NO: 187342 - DNA, 25 bp, Artificial
  Probe
tggaagggctcatgaccacagtcca

SEQ ID NO: 187343 - DNA, 25 bp, Artificial
  Probe
tggcatcgtggaagggctcatgacc

SEQ ID NO: 187344 - DNA, 25 bp, Artificial
  Probe
agggctcatgaccacagtccatgcc

SEQ ID NO: 187345 - DNA, 25 bp, Artificial
  Probe
aactttggcatcgtggaagggctca

SEQ ID NO: 187346 - DNA, 25 bp, Artificial
  Probe
agctgaacgggaagctcactggcat

SEQ ID NO: 187347 - DNA, 25 bp, Artificial
  Probe
ctgcatccactggtgctgccaaggc

SEQ ID NO: 187348 - DNA, 25 bp, Artificial
  Probe
gtgggcaaggtcatcccagagctga

SEQ ID NO: 187349 - DNA, 25 bp, Artificial
  Probe
aaggctgtgggcaaggtcatcccag

SEQ ID NO: 187350 - DNA, 25 bp, Artificial
  Probe
cctggccaaggtcatccatgacaac

SEQ ID NO: 187351 - DNA, 25 bp, Artificial
  Probe
aacgggaagctcactggcatggcct

SEQ ID NO: 187352 - DNA, 25 bp, Artificial
  Probe
gagaaacctgccaagtatgatgaca

SEQ ID NO: 187353 - DNA, 25 bp, Artificial
  Probe
aggtcatccatgacaactttggcat

SEQ ID NO: 187354 - DNA, 25 bp, Artificial
  Probe
ttgtcagcaatgcatcctgcaccac

SEQ ID NO: 187355 - DNA, 25 bp, Artificial
  Probe
tgccactcagaagactgtggatggc

SEQ ID NO: 187356 - DNA, 25 bp, Artificial
  Probe
actggcatggccttccgtgttccta

SEQ ID NO: 187357 - DNA, 25 bp, Artificial
  Probe
tacccccaatgtatccgttgtggat

SEQ ID NO: 187358 - DNA, 25 bp, Artificial
  Probe
gtatccgttgtggatctgacatgcc

SEQ ID NO: 187359 - DNA, 25 bp, Artificial
  Probe
ccatgacaactttggcatcgtggaa

SEQ ID NO: 187360 - DNA, 25 bp, Artificial
  Probe
ccgttgtggatctgacatgccgcct

SEQ ID NO: 187361 - DNA, 25 bp, Artificial
  Probe
caaggtcatcccagagctgaacggg

SEQ ID NO: 187362 - DNA, 25 bp, Artificial
  Probe
tgggcaaggtcatcccagagctgaa

SEQ ID NO: 187363 - DNA, 25 bp, Artificial
  Probe
gcccctctggaaagctgtggcgtga

SEQ ID NO: 187364 - DNA, 25 bp, Artificial
  Probe
tcccagagctgaacgggaagctcac

SEQ ID NO: 187365 - DNA, 25 bp, Artificial
  Probe
gtggatctgacatgccgcctggaga

SEQ ID NO: 187366 - DNA, 25 bp, Artificial
  Probe
tggggcagcccagaacatcatccct

SEQ ID NO: 187367 - DNA, 25 bp, Artificial
  Probe
ggccaaggtcatccatgacaacttt

SEQ ID NO: 187368 - DNA, 25 bp, Artificial
  Probe
cactcagaagactgtggatggcccc

SEQ ID NO: 187369 - DNA, 25 bp, Artificial
  Probe
aggctgtgggcaaggtcatcccaga

SEQ ID NO: 187370 - DNA, 25 bp, Artificial
  Probe
gagaaatatgacaactccctcaaga

SEQ ID NO: 187371 - DNA, 25 bp, Artificial
  Probe
ggctcatgaccacagtccatgccat

SEQ ID NO: 187372 - DNA, 25 bp, Artificial
  Probe
aagggctcatgaccacagtccatgc

SEQ ID NO: 187373 - DNA, 25 bp, Artificial
  Probe
tgtatccgttgtggatctgacatgc

SEQ ID NO: 187374 - DNA, 25 bp, Artificial
  Probe
ctgccaaggctgtgggcaaggtcat

SEQ ID NO: 187375 - DNA, 25 bp, Artificial
  Probe
ctcaagattgtcagcaatgcatcct

SEQ ID NO: 187376 - DNA, 25 bp, Artificial
  Probe
caatgtatccgttgtggatctgaca

SEQ ID NO: 187377 - DNA, 25 bp, Artificial
  Probe
aagctcactggcatggccttccgtg

SEQ ID NO: 187378 - DNA, 25 bp, Artificial
  Probe
tggccgtggggcagcccagaacatc

SEQ ID NO: 187379 - DNA, 25 bp, Artificial
  Probe
gatggcccctctggaaagctgtggc

SEQ ID NO: 187380 - DNA, 25 bp, Artificial
  Probe
tcatccatgacaactttggcatcgt

SEQ ID NO: 187381 - DNA, 25 bp, Artificial
  Probe
gtggatggcccctctggaaagctgt

SEQ ID NO: 187382 - DNA, 25 bp, Artificial
  Probe
atgacaactccctcaagattgtcag

SEQ ID NO: 187383 - DNA, 25 bp, Artificial
  Probe
gacaactttggcatcgtggaagggc

SEQ ID NO: 187384 - DNA, 25 bp, Artificial
  Probe
aagattgtcagcaatgcatcctgca

SEQ ID NO: 187385 - DNA, 25 bp, Artificial
  Probe
ctggcatggccttccgtgttcctac

SEQ ID NO: 187386 - DNA, 25 bp, Artificial
  Probe
gcctggagaaacctgccaagtatga

SEQ ID NO: 187387 - DNA, 25 bp, Artificial
  Probe
cgttgtggatctgacatgccgcctg

SEQ ID NO: 187388 - DNA, 25 bp, Artificial
  Probe
ccctggccaaggtcatccatgacaa

SEQ ID NO: 187389 - DNA, 25 bp, Artificial
  Probe
gaaacctgccaagtatgatgacatc

SEQ ID NO: 187390 - DNA, 25 bp, Artificial
  Probe
atccactggtgctgccaaggctgtg

SEQ ID NO: 187391 - DNA, 25 bp, Artificial
  Probe
aaggtcatccatgacaactttggca

SEQ ID NO: 187392 - DNA, 25 bp, Artificial
  Probe
ccatcactgccactcagaagactgt

SEQ ID NO: 187393 - DNA, 25 bp, Artificial
  Probe
tccctcaagattgtcagcaatgcat

SEQ ID NO: 187394 - DNA, 25 bp, Artificial
  Probe
gcatccactggtgctgccaaggctg

SEQ ID NO: 187395 - DNA, 25 bp, Artificial
  Probe
actgccactcagaagactgtggatg

SEQ ID NO: 187396 - DNA, 25 bp, Artificial
  Probe
tggatggcccctctggaaagctgtg

SEQ ID NO: 187397 - DNA, 25 bp, Artificial
  Probe
catccatgacaactttggcatcgtg

SEQ ID NO: 187398 - DNA, 25 bp, Artificial
  Probe
actccctcaagattgtcagcaatgc

SEQ ID NO: 187399 - DNA, 25 bp, Artificial
  Probe
gacgtcttacactcatgagccgtcc

SEQ ID NO: 187400 - DNA, 25 bp, Artificial
  Probe
caagcacaatagacgcccaagaagt

SEQ ID NO: 187401 - DNA, 25 bp, Artificial
  Probe
ccttcactaggattaaaaactgacg

SEQ ID NO: 187402 - DNA, 25 bp, Artificial
  Probe
gaagacctatgttttgactcctaca

SEQ ID NO: 187403 - DNA, 25 bp, Artificial
  Probe
gtatactaatctcatccgaagacgt

SEQ ID NO: 187404 - DNA, 25 bp, Artificial
  Probe
tgacgcaatcccaggccgtctaaat

SEQ ID NO: 187405 - DNA, 25 bp, Artificial
  Probe
atcccaggccgtctaaatcaagcta

SEQ ID NO: 187406 - DNA, 25 bp, Artificial
  Probe
caggtgagcttcgtctattagaagt

SEQ ID NO: 187407 - DNA, 25 bp, Artificial
  Probe
ttcatgcctattgtactagaaatag

SEQ ID NO: 187408 - DNA, 25 bp, Artificial
  Probe
aatcccaggccgtctaaatcaagct

SEQ ID NO: 187409 - DNA, 25 bp, Artificial
  Probe
catccgaagacgtcttacactcatg

SEQ ID NO: 187410 - DNA, 25 bp, Artificial
  Probe
gaaatctgcggctcaaatcacagtt

SEQ ID NO: 187411 - DNA, 25 bp, Artificial
  Probe
agacgcccaagaagtggaaacaatt

SEQ ID NO: 187412 - DNA, 25 bp, Artificial
  Probe
actcatgagccgtcccttcactagg

SEQ ID NO: 187413 - DNA, 25 bp, Artificial
  Probe
ggacaatccttccagctgttattct

SEQ ID NO: 187414 - DNA, 25 bp, Artificial
  Probe
acgaatacaccgactatgaagacct

SEQ ID NO: 187415 - DNA, 25 bp, Artificial
  Probe
aaactgacgcaatcccaggccgtct

SEQ ID NO: 187416 - DNA, 25 bp, Artificial
  Probe
gacatcaaatcgaccaggcctattc

SEQ ID NO: 187417 - DNA, 25 bp, Artificial
  Probe
gagccgtcccttcactaggattaaa

SEQ ID NO: 187418 - DNA, 25 bp, Artificial
  Probe
aaactataggtcaccaatgatactg

SEQ ID NO: 187419 - DNA, 25 bp, Artificial
  Probe
ccaaccaatgacttaaaaccaggtg

SEQ ID NO: 187420 - DNA, 25 bp, Artificial
  Probe
acaatttggacaatccttccagctg

SEQ ID NO: 187421 - DNA, 25 bp, Artificial
  Probe
ttaaaaccaggtgagcttcgtctat

SEQ ID NO: 187422 - DNA, 25 bp, Artificial
  Probe
agctacgaatacaccgactatgaag

SEQ ID NO: 187423 - DNA, 25 bp, Artificial
  Probe
atctgcggctcaaatcacagtttca

SEQ ID NO: 187424 - DNA, 25 bp, Artificial
  Probe
cagtttcatgcctattgtactagaa

SEQ ID NO: 187425 - DNA, 25 bp, Artificial
  Probe
cgtatactaatctcatccgaagacg

SEQ ID NO: 187426 - DNA, 25 bp, Artificial
  Probe
ggctcaaatcacagtttcatgccta

SEQ ID NO: 187427 - DNA, 25 bp, Artificial
  Probe
gtcccttcactaggattaaaaactg

SEQ ID NO: 187428 - DNA, 25 bp, Artificial
  Probe
caccaatgatactgaagctacgaat

SEQ ID NO: 187429 - DNA, 25 bp, Artificial
  Probe
cttcgtctattagaagtggataatc

SEQ ID NO: 187430 - DNA, 25 bp, Artificial
  Probe
gtctaaatcaagctacagtgacatc

SEQ ID NO: 187431 - DNA, 25 bp, Artificial
  Probe
tgctctgaaatctgcggctcaaatc

SEQ ID NO: 187432 - DNA, 25 bp, Artificial
  Probe
caatagacgcccaagaagtggaaac

SEQ ID NO: 187433 - DNA, 25 bp, Artificial
  Probe
gcctattgtactagaaatagtaccc

SEQ ID NO: 187434 - DNA, 25 bp, Artificial
  Probe
atgcctattgtactagaaatagtac

SEQ ID NO: 187435 - DNA, 25 bp, Artificial
  Probe
gtcttacactcatgagccgtccctt

SEQ ID NO: 187436 - DNA, 25 bp, Artificial
  Probe
tattctacgggcaatgctctgaaat

SEQ ID NO: 187437 - DNA, 25 bp, Artificial
  Probe
tgatactgaagctacgaatacaccg

SEQ ID NO: 187438 - DNA, 25 bp, Artificial
  Probe
atcgaccaggcctattctacgggca

SEQ ID NO: 187439 - DNA, 25 bp, Artificial
  Probe
atgagccgtcccttcactaggatta

SEQ ID NO: 187440 - DNA, 25 bp, Artificial
  Probe
atactgaagctacgaatacaccgac

SEQ ID NO: 187441 - DNA, 25 bp, Artificial
  Probe
gtttcatgcctattgtactagaaat

SEQ ID NO: 187442 - DNA, 25 bp, Artificial
  Probe
atcaagctacagtgacatcaaatcg

SEQ ID NO: 187443 - DNA, 25 bp, Artificial
  Probe
caggcctattctacgggcaatgctc

SEQ ID NO: 187444 - DNA, 25 bp, Artificial
  Probe
aaaccaggtgagcttcgtctattag

SEQ ID NO: 187445 - DNA, 25 bp, Artificial
  Probe
tcatcacaggcctaacaatatgtag

SEQ ID NO: 187446 - DNA, 25 bp, Artificial
  Probe
caggcctaacaatatgtagatatag

SEQ ID NO: 187447 - DNA, 25 bp, Artificial
  Probe
actgtgaatctaacaacaggaaatc

SEQ ID NO: 187448 - DNA, 25 bp, Artificial
  Probe
agtaatccattggtcttaggaacca

SEQ ID NO: 187449 - DNA, 25 bp, Artificial
  Probe
gcaagaactgctaattcatgcaccc

SEQ ID NO: 187450 - DNA, 25 bp, Artificial
  Probe
aacattagactgtgaatctaacaac

SEQ ID NO: 187451 - DNA, 25 bp, Artificial
  Probe
taatccattggtcttaggaaccaaa

SEQ ID NO: 187452 - DNA, 25 bp, Artificial
  Probe
agaactgctaattcatgcacccata

SEQ ID NO: 187453 - DNA, 25 bp, Artificial
  Probe
attccttatttaccaagaaagtatg

SEQ ID NO: 187454 - DNA, 25 bp, Artificial
  Probe
atttaccaagaaagtatgcaagaac

SEQ ID NO: 187455 - DNA, 25 bp, Artificial
  Probe
caaaaaccttggtgcaactccaaat

SEQ ID NO: 187456 - DNA, 25 bp, Artificial
  Probe
gtaatccattggtcttaggaaccaa

SEQ ID NO: 187457 - DNA, 25 bp, Artificial
  Probe
accttggtgcaactccaaataaaag

SEQ ID NO: 187458 - DNA, 25 bp, Artificial
  Probe
atcacaggcctaacaatatgtagat

SEQ ID NO: 187459 - DNA, 25 bp, Artificial
  Probe
ctcatcacaggcctaacaatatgta

SEQ ID NO: 187460 - DNA, 25 bp, Artificial
  Probe
ttacttttataggatagaagtaatc

SEQ ID NO: 187461 - DNA, 25 bp, Artificial
  Probe
caagaactgctaattcatgcaccca

SEQ ID NO: 187462 - DNA, 25 bp, Artificial
  Probe
cttatttaccaagaaagtatgcaag

SEQ ID NO: 187463 - DNA, 25 bp, Artificial
  Probe
acattagactgtgaatctaacaaca

SEQ ID NO: 187464 - DNA, 25 bp, Artificial
  Probe
cttggtgcaactccaaataaaagta

SEQ ID NO: 187465 - DNA, 25 bp, Artificial
  Probe
tctaacaacaggaaatcaaattcct

SEQ ID NO: 187466 - DNA, 25 bp, Artificial
  Probe
ctgtgaatctaacaacaggaaatca

SEQ ID NO: 187467 - DNA, 25 bp, Artificial
  Probe
tatgcaagaactgctaattcatgca

SEQ ID NO: 187468 - DNA, 25 bp, Artificial
  Probe
cacaggcctaacaatatgtagatat

SEQ ID NO: 187469 - DNA, 25 bp, Artificial
  Probe
tcaaattccttatttaccaagaaag

SEQ ID NO: 187470 - DNA, 25 bp, Artificial
  Probe
ttacaaaaaacattagactgtgaat

SEQ ID NO: 187471 - DNA, 25 bp, Artificial
  Probe
catatggctttcttacttttatagg

SEQ ID NO: 187472 - DNA, 25 bp, Artificial
  Probe
gaatctaacaacaggaaatcaaatt

SEQ ID NO: 187473 - DNA, 25 bp, Artificial
  Probe
acctaaaacatatggctttcttact

SEQ ID NO: 187474 - DNA, 25 bp, Artificial
  Probe
tcacaggcctaacaatatgtagata

SEQ ID NO: 187475 - DNA, 25 bp, Artificial
  Probe
aattcatgcacccatacctaaaaca

SEQ ID NO: 187476 - DNA, 25 bp, Artificial
  Probe
acaggcctaacaatatgtagatata

SEQ ID NO: 187477 - DNA, 25 bp, Artificial
  Probe
tcatgcacccatacctaaaacatat

SEQ ID NO: 187478 - DNA, 25 bp, Artificial
  Probe
ctgctaattcatgcacccataccta

SEQ ID NO: 187479 - DNA, 25 bp, Artificial
  Probe
atgcaagaactgctaattcatgcac

SEQ ID NO: 187480 - DNA, 25 bp, Artificial
  Probe
agaagtaatccattggtcttaggaa

SEQ ID NO: 187481 - DNA, 25 bp, Artificial
  Probe
acaaaaaacattagactgtgaatct

SEQ ID NO: 187482 - DNA, 25 bp, Artificial
  Probe
tgcaagaactgctaattcatgcacc

SEQ ID NO: 187483 - DNA, 25 bp, Artificial
  Probe
ttcttacttttataggatagaagta

SEQ ID NO: 187484 - DNA, 25 bp, Artificial
  Probe
gaagtaatccattggtcttaggaac

SEQ ID NO: 187485 - DNA, 25 bp, Artificial
  Probe
gaaatcaaattccttatttaccaag

SEQ ID NO: 187486 - DNA, 25 bp, Artificial
  Probe
catcacaggcctaacaatatgtaga

SEQ ID NO: 187487 - DNA, 25 bp, Artificial
  Probe
ttatttaccaagaaagtatgcaaga

SEQ ID NO: 187488 - DNA, 25 bp, Artificial
  Probe
tgtgaatctaacaacaggaaatcaa

SEQ ID NO: 187489 - DNA, 25 bp, Artificial
  Probe
gtgaatctaacaacaggaaatcaaa

SEQ ID NO: 187490 - DNA, 25 bp, Artificial
  Probe
atagtttacaaaaaacattagactg

SEQ ID NO: 187491 - DNA, 25 bp, Artificial
  Probe
gccctgttctgttcttctccactgt

SEQ ID NO: 187492 - DNA, 25 bp, Artificial
  Probe
tcaaaagtccttggaccatgaccgt

SEQ ID NO: 187493 - DNA, 25 bp, Artificial
  Probe
ctcaacagagaactgatttgagcta

SEQ ID NO: 187494 - DNA, 25 bp, Artificial
  Probe
gtaccactgtggattactaaatatt

SEQ ID NO: 187495 - DNA, 25 bp, Artificial
  Probe
gttgatccttgtgtcctacaccacc

SEQ ID NO: 187496 - DNA, 25 bp, Artificial
  Probe
ccttggaccatgaccgtgacttcag

SEQ ID NO: 187497 - DNA, 25 bp, Artificial
  Probe
aaactggaggacagcctgccctcaa

SEQ ID NO: 187498 - DNA, 25 bp, Artificial
  Probe
ctactgacttccaggcacacgtgta

SEQ ID NO: 187499 - DNA, 25 bp, Artificial
  Probe
gtttccatgtctaagtacagacatg

SEQ ID NO: 187500 - DNA, 25 bp, Artificial
  Probe
ccctctctgtgctcaacagagaact

SEQ ID NO: 187501 - DNA, 25 bp, Artificial
  Probe
gtgttgatccttgtgtcctacacca

SEQ ID NO: 187502 - DNA, 25 bp, Artificial
  Probe
catgtctaagtacagacatgggtgt

SEQ ID NO: 187503 - DNA, 25 bp, Artificial
  Probe
catcattgcagtttccatgtctaag

SEQ ID NO: 187504 - DNA, 25 bp, Artificial
  Probe
caattttgcacctgcaaactggagg

SEQ ID NO: 187505 - DNA, 25 bp, Artificial
  Probe
ggaccatgaccgtgacttcagcagt

SEQ ID NO: 187506 - DNA, 25 bp, Artificial
  Probe
agaactgatttgagctactatcttg

SEQ ID NO: 187507 - DNA, 25 bp, Artificial
  Probe
tctctgtgctcaacagagaactgat

SEQ ID NO: 187508 - DNA, 25 bp, Artificial
  Probe
tgacttccaggcacacgtgtaccac

SEQ ID NO: 187509 - DNA, 25 bp, Artificial
  Probe
gggtgttgatccttgtgtcctacac

SEQ ID NO: 187510 - DNA, 25 bp, Artificial
  Probe
gatttcacacccaggataatgtgcc

SEQ ID NO: 187511 - DNA, 25 bp, Artificial
  Probe
gtaagatttcacacccaggataatg

SEQ ID NO: 187512 - DNA, 25 bp, Artificial
  Probe
aaagtccttggaccatgaccgtgac

SEQ ID NO: 187513 - DNA, 25 bp, Artificial
  Probe
tggaggacagcctgccctcaaaagt

SEQ ID NO: 187514 - DNA, 25 bp, Artificial
  Probe
aatattatctaacatgcatggctgc

SEQ ID NO: 187515 - DNA, 25 bp, Artificial
  Probe
acagacatgggtgttgatccttgtg

SEQ ID NO: 187516 - DNA, 25 bp, Artificial
  Probe
gagctactatcttgctatgttaacc

SEQ ID NO: 187517 - DNA, 25 bp, Artificial
  Probe
ctgcaaactggaggacagcctgccc

SEQ ID NO: 187518 - DNA, 25 bp, Artificial
  Probe
tttgcacctgcaaactggaggacag

SEQ ID NO: 187519 - DNA, 25 bp, Artificial
  Probe
tacagacatgggtgttgatccttgt

SEQ ID NO: 187520 - DNA, 25 bp, Artificial
  Probe
atctaacatgcatggctgcatacag

SEQ ID NO: 187521 - DNA, 25 bp, Artificial
  Probe
ctaagtacagacatgggtgttgatc

SEQ ID NO: 187522 - DNA, 25 bp, Artificial
  Probe
agcctgccctcaaaagtccttggac

SEQ ID NO: 187523 - DNA, 25 bp, Artificial
  Probe
gataatgtgccctgttctgttcttc

SEQ ID NO: 187524 - DNA, 25 bp, Artificial
  Probe
gctatgttaaccatcttgactactg

SEQ ID NO: 187525 - DNA, 25 bp, Artificial
  Probe
tacagtaagatttcacacccaggat

SEQ ID NO: 187526 - DNA, 25 bp, Artificial
  Probe
taagtacagacatgggtgttgatcc

SEQ ID NO: 187527 - DNA, 25 bp, Artificial
  Probe
aacatgcatggctgcatacagtaag

SEQ ID NO: 187528 - DNA, 25 bp, Artificial
  Probe
gacagcctgccctcaaaagtccttg

SEQ ID NO: 187529 - DNA, 25 bp, Artificial
  Probe
ctgccctcaaaagtccttggaccat

SEQ ID NO: 187530 - DNA, 25 bp, Artificial
  Probe
accatcttgactactgacttccagg

SEQ ID NO: 187531 - DNA, 25 bp, Artificial
  Probe
cccaggataatgtgccctgttctgt

SEQ ID NO: 187532 - DNA, 25 bp, Artificial
  Probe
gaactgatttgagctactatcttgc

SEQ ID NO: 187533 - DNA, 25 bp, Artificial
  Probe
gtgtgactccactctgctctcatta

SEQ ID NO: 187534 - DNA, 25 bp, Artificial
  Probe
agacatgggtgttgatccttgtgtc

SEQ ID NO: 187535 - DNA, 25 bp, Artificial
  Probe
tggctgcatacagtaagatttcaca

SEQ ID NO: 187536 - DNA, 25 bp, Artificial
  Probe
gtgctcaacagagaactgatttgag

SEQ ID NO: 187537 - DNA, 25 bp, Artificial
  Probe
ctgaaggtacccacagaagccttca

SEQ ID NO: 187538 - DNA, 25 bp, Artificial
  Probe
cttcggttctctatttgtccaagga

SEQ ID NO: 187539 - DNA, 25 bp, Artificial
  Probe
ggttctctatttgtccaaggataat

SEQ ID NO: 187540 - DNA, 25 bp, Artificial
  Probe
aggtacccacagaagccttcattta

SEQ ID NO: 187541 - DNA, 25 bp, Artificial
  Probe
cacagcttcggttctctatttgtcc

SEQ ID NO: 187542 - DNA, 25 bp, Artificial
  Probe
tcctgataaagaagccacttcaaat

SEQ ID NO: 187543 - DNA, 25 bp, Artificial
  Probe
tcacagcttcggttctctatttgtc

SEQ ID NO: 187544 - DNA, 25 bp, Artificial
  Probe
ctcacagcttcggttctctatttgt

SEQ ID NO: 187545 - DNA, 25 bp, Artificial
  Probe
tgtcatagaaatgccactgtatcct

SEQ ID NO: 187546 - DNA, 25 bp, Artificial
  Probe
gtacccacagaagccttcatttact

SEQ ID NO: 187547 - DNA, 25 bp, Artificial
  Probe
ctgtcatagaaatgccactgtatcc

SEQ ID NO: 187548 - DNA, 25 bp, Artificial
  Probe
ttccttcttctcacagcttcggttc

SEQ ID NO: 187549 - DNA, 25 bp, Artificial
  Probe
aaatgccactgtatccttccttctt

SEQ ID NO: 187550 - DNA, 25 bp, Artificial
  Probe
gaaggtacccacagaagccttcatt

SEQ ID NO: 187551 - DNA, 25 bp, Artificial
  Probe
gcttcggttctctatttgtccaagg

SEQ ID NO: 187552 - DNA, 25 bp, Artificial
  Probe
ttttctgaaggtacccacagaagcc

SEQ ID NO: 187553 - DNA, 25 bp, Artificial
  Probe
atttgtccaaggataatagttctgc

SEQ ID NO: 187554 - DNA, 25 bp, Artificial
  Probe
cctaaactcaatgtaaaagatcctg

SEQ ID NO: 187555 - DNA, 25 bp, Artificial
  Probe
cttctcacagcttcggttctctatt

SEQ ID NO: 187556 - DNA, 25 bp, Artificial
  Probe
ccttcatttactactgtcatagaaa

SEQ ID NO: 187557 - DNA, 25 bp, Artificial
  Probe
tgttttctgaaggtacccacagaag

SEQ ID NO: 187558 - DNA, 25 bp, Artificial
  Probe
tttgtccaaggataatagttctgca

SEQ ID NO: 187559 - DNA, 25 bp, Artificial
  Probe
tctctatttgtccaaggataatagt

SEQ ID NO: 187560 - DNA, 25 bp, Artificial
  Probe
ataatagttctgcattatatagttc

SEQ ID NO: 187561 - DNA, 25 bp, Artificial
  Probe
ctctaatgaaaaccagaaaacagaa

SEQ ID NO: 187562 - DNA, 25 bp, Artificial
  Probe
tctatttgtccaaggataatagttc

SEQ ID NO: 187563 - DNA, 25 bp, Artificial
  Probe
ttgttttctgaaggtacccacagaa

SEQ ID NO: 187564 - DNA, 25 bp, Artificial
  Probe
tctgaaggtacccacagaagccttc

SEQ ID NO: 187565 - DNA, 25 bp, Artificial
  Probe
tactgtcatagaaatgccactgtat

SEQ ID NO: 187566 - DNA, 25 bp, Artificial
  Probe
ctactgtcatagaaatgccactgta

SEQ ID NO: 187567 - DNA, 25 bp, Artificial
  Probe
agcttcggttctctatttgtccaag

SEQ ID NO: 187568 - DNA, 25 bp, Artificial
  Probe
ggtacccacagaagccttcatttac

SEQ ID NO: 187569 - DNA, 25 bp, Artificial
  Probe
gttttctgaaggtacccacagaagc

SEQ ID NO: 187570 - DNA, 25 bp, Artificial
  Probe
ttctctatttgtccaaggataatag

SEQ ID NO: 187571 - DNA, 25 bp, Artificial
  Probe
aaggtacccacagaagccttcattt

SEQ ID NO: 187572 - DNA, 25 bp, Artificial
  Probe
gttctctatttgtccaaggataata

SEQ ID NO: 187573 - DNA, 25 bp, Artificial
  Probe
acagcttcggttctctatttgtcca

SEQ ID NO: 187574 - DNA, 25 bp, Artificial
  Probe
ttcggttctctatttgtccaaggat

SEQ ID NO: 187575 - DNA, 25 bp, Artificial
  Probe
ctctatttgtccaaggataatagtt

SEQ ID NO: 187576 - DNA, 25 bp, Artificial
  Probe
ctatttgtccaaggataatagttct

SEQ ID NO: 187577 - DNA, 25 bp, Artificial
  Probe
cggttctctatttgtccaaggataa

SEQ ID NO: 187578 - DNA, 25 bp, Artificial
  Probe
cagcttcggttctctatttgtccaa

SEQ ID NO: 187579 - DNA, 25 bp, Artificial
  Probe
tcggttctctatttgtccaaggata

SEQ ID NO: 187580 - DNA, 25 bp, Artificial
  Probe
tgaaggtacccacagaagccttcat

SEQ ID NO: 187581 - DNA, 25 bp, Artificial
  Probe
tatttgtccaaggataatagttctg

SEQ ID NO: 187582 - DNA, 25 bp, Artificial
  Probe
aggaaagatcctgctgttttgtttt

SEQ ID NO: 187583 - DNA, 25 bp, Artificial
  Probe
tgcctagtgccactgtctggctagg

SEQ ID NO: 187584 - DNA, 25 bp, Artificial
  Probe
gataattgttgacattcccccatgc

SEQ ID NO: 187585 - DNA, 25 bp, Artificial
  Probe
acattaccattacgaggatacacag

SEQ ID NO: 187586 - DNA, 25 bp, Artificial
  Probe
tctggctaggcacacccactatcaa

SEQ ID NO: 187587 - DNA, 25 bp, Artificial
  Probe
ctgacttgaggtacaacttctgttt

SEQ ID NO: 187588 - DNA, 25 bp, Artificial
  Probe
cattccgatgacaggtgtgatagat

SEQ ID NO: 187589 - DNA, 25 bp, Artificial
  Probe
gttgtgcgggctggtccttcccaca

SEQ ID NO: 187590 - DNA, 25 bp, Artificial
  Probe
ttttctgagggcagaaacgtctaat

SEQ ID NO: 187591 - DNA, 25 bp, Artificial
  Probe
cagaaacgtctaatgtgacgactct

SEQ ID NO: 187592 - DNA, 25 bp, Artificial
  Probe
cacagcacagcgaaatcattccgat

SEQ ID NO: 187593 - DNA, 25 bp, Artificial
  Probe
gtctggctaggcacacccactatca

SEQ ID NO: 187594 - DNA, 25 bp, Artificial
  Probe
cctatagtgcaaaggttgtgcgggc

SEQ ID NO: 187595 - DNA, 25 bp, Artificial
  Probe
aaacgtctaatgtgacgactcttca

SEQ ID NO: 187596 - DNA, 25 bp, Artificial
  Probe
cgggctggtccttcccacaatgcag

SEQ ID NO: 187597 - DNA, 25 bp, Artificial
  Probe
ctggtccttcccacaatgcagtact

SEQ ID NO: 187598 - DNA, 25 bp, Artificial
  Probe
cattacgaggatacacagcacagcg

SEQ ID NO: 187599 - DNA, 25 bp, Artificial
  Probe
gactcttcacattaccattacgagg

SEQ ID NO: 187600 - DNA, 25 bp, Artificial
  Probe
ctactttttctgagggcagaaacgt

SEQ ID NO: 187601 - DNA, 25 bp, Artificial
  Probe
agtgccactgtctggctaggcacac

SEQ ID NO: 187602 - DNA, 25 bp, Artificial
  Probe
tggcctatagtgcaaaggttgtgcg

SEQ ID NO: 187603 - DNA, 25 bp, Artificial
  Probe
ctgactgcctagtgccactgtctgg

SEQ ID NO: 187604 - DNA, 25 bp, Artificial
  Probe
ccacaatgcagtactgtaatccccg

SEQ ID NO: 187605 - DNA, 25 bp, Artificial
  Probe
gtcctgactgcctagtgccactgtc

SEQ ID NO: 187606 - DNA, 25 bp, Artificial
  Probe
agccagaactaagtcacttgcccca

SEQ ID NO: 187607 - DNA, 25 bp, Artificial
  Probe
ctgcctagtgccactgtctggctag

SEQ ID NO: 187608 - DNA, 25 bp, Artificial
  Probe
ctatagtgcaaaggttgtgcgggct

SEQ ID NO: 187609 - DNA, 25 bp, Artificial
  Probe
gtctaatgtgacgactcttcacatt

SEQ ID NO: 187610 - DNA, 25 bp, Artificial
  Probe
tcactgttagccagaactaagtcac

SEQ ID NO: 187611 - DNA, 25 bp, Artificial
  Probe
tttctgagggcagaaacgtctaatg

SEQ ID NO: 187612 - DNA, 25 bp, Artificial
  Probe
cagcgaaatcattccgatgacaggt

SEQ ID NO: 187613 - DNA, 25 bp, Artificial
  Probe
gttcacctgtcatggcagcctgtac

SEQ ID NO: 187614 - DNA, 25 bp, Artificial
  Probe
tgtttcactgttagccagaactaag

SEQ ID NO: 187615 - DNA, 25 bp, Artificial
  Probe
gagagctaacatgcaactgccgagt

SEQ ID NO: 187616 - DNA, 25 bp, Artificial
  Probe
ctaacatgcaactgccgagtgtttc

SEQ ID NO: 187617 - DNA, 25 bp, Artificial
  Probe
gtccgtccgtcctgactgcctagtg

SEQ ID NO: 187618 - DNA, 25 bp, Artificial
  Probe
gaaatcattccgatgacaggtgtga

SEQ ID NO: 187619 - DNA, 25 bp, Artificial
  Probe
ggttgtgcgggctggtccttcccac

SEQ ID NO: 187620 - DNA, 25 bp, Artificial
  Probe
gtccttcccacaatgcagtactgta

SEQ ID NO: 187621 - DNA, 25 bp, Artificial
  Probe
cttgaggtacaacttctgttttgga

SEQ ID NO: 187622 - DNA, 25 bp, Artificial
  Probe
gacttgaggtacaacttctgttttg

SEQ ID NO: 187623 - DNA, 25 bp, Artificial
  Probe
ctatcaacctggttcacctgtcatg

SEQ ID NO: 187624 - DNA, 25 bp, Artificial
  Probe
atgcaactgccgagtgtttcactgt

SEQ ID NO: 187625 - DNA, 25 bp, Artificial
  Probe
ccgacgctggcctatagtgcaaagg

SEQ ID NO: 187626 - DNA, 25 bp, Artificial
  Probe
gatacacagcacagcgaaatcattc

SEQ ID NO: 187627 - DNA, 25 bp, Artificial
  Probe
ttacgaggatacacagcacagcgaa

SEQ ID NO: 187628 - DNA, 25 bp, Artificial
  Probe
ttcccccatgctactttttctgagg

SEQ ID NO: 187629 - DNA, 25 bp, Artificial
  Probe
agagaagtcagtcacaggtaacaca

SEQ ID NO: 187630 - DNA, 25 bp, Artificial
  Probe
ctggttccgggagaagaaagagcta

SEQ ID NO: 187631 - DNA, 25 bp, Artificial
  Probe
ttcctgttcagcaagggcaccaagg

SEQ ID NO: 187632 - DNA, 25 bp, Artificial
  Probe
gaaagagctactgtttatgtgccag

SEQ ID NO: 187633 - DNA, 25 bp, Artificial
  Probe
tcctgttcagcaagggcaccaaggg

SEQ ID NO: 187634 - DNA, 25 bp, Artificial
  Probe
ttcagcaagggcaccaagggcccag

SEQ ID NO: 187635 - DNA, 25 bp, Artificial
  Probe
tgtgccagacagtggtagctccctc

SEQ ID NO: 187636 - DNA, 25 bp, Artificial
  Probe
tgtgagaccaaggtgatggtactgc

SEQ ID NO: 187637 - DNA, 25 bp, Artificial
  Probe
gaaaccgactacgatgagtacgcgt

SEQ ID NO: 187638 - DNA, 25 bp, Artificial
  Probe
gcctcgcctccaattcaagctggtt

SEQ ID NO: 187639 - DNA, 25 bp, Artificial
  Probe
ctctcagtggtagaaaccgactacg

SEQ ID NO: 187640 - DNA, 25 bp, Artificial
  Probe
agggcccaggccaggacttccgcat

SEQ ID NO: 187641 - DNA, 25 bp, Artificial
  Probe
ccagtgtgagaccaaggtgatggta

SEQ ID NO: 187642 - DNA, 25 bp, Artificial
  Probe
ctactgtttatgtgccagacagtgg

SEQ ID NO: 187643 - DNA, 25 bp, Artificial
  Probe
agaccaaggtgatggtactgcagcc

SEQ ID NO: 187644 - DNA, 25 bp, Artificial
  Probe
cagcttctgaaggaggaactgaagg

SEQ ID NO: 187645 - DNA, 25 bp, Artificial
  Probe
attcatcacctttagcaaggaccag

SEQ ID NO: 187646 - DNA, 25 bp, Artificial
  Probe
gaaattcatcacctttagcaaggac

SEQ ID NO: 187647 - DNA, 25 bp, Artificial
  Probe
gaccagggcctcacagaggaggaca

SEQ ID NO: 187648 - DNA, 25 bp, Artificial
  Probe
gttcccggacagtacacctacaaca

SEQ ID NO: 187649 - DNA, 25 bp, Artificial
  Probe
gagaaattcatcacctttagcaagg

SEQ ID NO: 187650 - DNA, 25 bp, Artificial
  Probe
caaccggataagtgcattcaagagt

SEQ ID NO: 187651 - DNA, 25 bp, Artificial
  Probe
tcagtcacaggtaacacatggtgat

SEQ ID NO: 187652 - DNA, 25 bp, Artificial
  Probe
accgactacgatgagtacgcgttcc

SEQ ID NO: 187653 - DNA, 25 bp, Artificial
  Probe
ttagcaaggaccagggcctcacaga

SEQ ID NO: 187654 - DNA, 25 bp, Artificial
  Probe
acagcagagcccagcttctgaagga

SEQ ID NO: 187655 - DNA, 25 bp, Artificial
  Probe
actacgatgagtacgcgttcctgtt

SEQ ID NO: 187656 - DNA, 25 bp, Artificial
  Probe
gatgagtacgcgttcctgttcagca

SEQ ID NO: 187657 - DNA, 25 bp, Artificial
  Probe
aagagctactgtttatgtgccagac

SEQ ID NO: 187658 - DNA, 25 bp, Artificial
  Probe
gcaagggcaccaagggcccaggcca

SEQ ID NO: 187659 - DNA, 25 bp, Artificial
  Probe
tgtttatgtgccagacagtggtagc

SEQ ID NO: 187660 - DNA, 25 bp, Artificial
  Probe
ggcctcacagaggaggacattgttt

SEQ ID NO: 187661 - DNA, 25 bp, Artificial
  Probe
cccaaccggataagtgcattcaaga

SEQ ID NO: 187662 - DNA, 25 bp, Artificial
  Probe
ttcccggacagtacacctacaacag

SEQ ID NO: 187663 - DNA, 25 bp, Artificial
  Probe
gaagtcagtcacaggtaacacatgg

SEQ ID NO: 187664 - DNA, 25 bp, Artificial
  Probe
cattcaagagtaaacacaggtgaga

SEQ ID NO: 187665 - DNA, 25 bp, Artificial
  Probe
attcaagctggttccgggagaagaa

SEQ ID NO: 187666 - DNA, 25 bp, Artificial
  Probe
aaaccagtgtgagaccaaggtgatg

SEQ ID NO: 187667 - DNA, 25 bp, Artificial
  Probe
cttcctaaggaaaaaccagtgtgag

SEQ ID NO: 187668 - DNA, 25 bp, Artificial
  Probe
cactccctctcagtggtagaaaccg

SEQ ID NO: 187669 - DNA, 25 bp, Artificial
  Probe
ttcctaaggaaaaaccagtgtgaga

SEQ ID NO: 187670 - DNA, 25 bp, Artificial
  Probe
aggagaaattcatcacctttagcaa

SEQ ID NO: 187671 - DNA, 25 bp, Artificial
  Probe
tggtagaaaccgactacgatgagta

SEQ ID NO: 187672 - DNA, 25 bp, Artificial
  Probe
ggcccaggccaggacttccgcatgg

SEQ ID NO: 187673 - DNA, 25 bp, Artificial
  Probe
tcgcctccaattcaagctggttccg

SEQ ID NO: 187674 - DNA, 25 bp, Artificial
  Probe
gagcccagcttctgaaggaggaact

SEQ ID NO: 187675 - DNA, 25 bp, Artificial
  Probe
cttaagagtgtcatctgcctagtgg

SEQ ID NO: 187676 - DNA, 25 bp, Artificial
  Probe
ggctgtgtgttacagcagtgagtct

SEQ ID NO: 187677 - DNA, 25 bp, Artificial
  Probe
tcatctgcctagtggcctcttgact

SEQ ID NO: 187678 - DNA, 25 bp, Artificial
  Probe
gagagggcatctgaggctctttgaa

SEQ ID NO: 187679 - DNA, 25 bp, Artificial
  Probe
caaacttctgcacaggctgtgtgtt

SEQ ID NO: 187680 - DNA, 25 bp, Artificial
  Probe
ccaaagtctcttaagagtgtcatct

SEQ ID NO: 187681 - DNA, 25 bp, Artificial
  Probe
cctagtggcctcttgacttggccac

SEQ ID NO: 187682 - DNA, 25 bp, Artificial
  Probe
ggcatctgaggctctttgaaccttg

SEQ ID NO: 187683 - DNA, 25 bp, Artificial
  Probe
atcaatgtgcttagcccatctcaag

SEQ ID NO: 187684 - DNA, 25 bp, Artificial
  Probe
gcccaaagtctcttaagagtgtcat

SEQ ID NO: 187685 - DNA, 25 bp, Artificial
  Probe
ggcctcttgacttggccacttccta

SEQ ID NO: 187686 - DNA, 25 bp, Artificial
  Probe
acagcagtgagtctagcccagcaga

SEQ ID NO: 187687 - DNA, 25 bp, Artificial
  Probe
agagggcatctgaggctctttgaac

SEQ ID NO: 187688 - DNA, 25 bp, Artificial
  Probe
ttactgtgaacttggtgcccaaagt

SEQ ID NO: 187689 - DNA, 25 bp, Artificial
  Probe
ctgtgaacttggtgcccaaagtctc

SEQ ID NO: 187690 - DNA, 25 bp, Artificial
  Probe
tgcctagtggcctcttgacttggcc

SEQ ID NO: 187691 - DNA, 25 bp, Artificial
  Probe
cttacagaaggcacaaacttctgca

SEQ ID NO: 187692 - DNA, 25 bp, Artificial
  Probe
acttggtgcccaaagtctcttaaga

SEQ ID NO: 187693 - DNA, 25 bp, Artificial
  Probe
gcatcaatgtgcttagcccatctca

SEQ ID NO: 187694 - DNA, 25 bp, Artificial
  Probe
ttctgcacaggctgtgtgttacagc

SEQ ID NO: 187695 - DNA, 25 bp, Artificial
  Probe
ttgacttggccacttcctaaggaga

SEQ ID NO: 187696 - DNA, 25 bp, Artificial
  Probe
tctcaagtgtttactgtgaacttgg

SEQ ID NO: 187697 - DNA, 25 bp, Artificial
  Probe
cttgacttggccacttcctaaggag

SEQ ID NO: 187698 - DNA, 25 bp, Artificial
  Probe
gacttggccacttcctaaggagagg

SEQ ID NO: 187699 - DNA, 25 bp, Artificial
  Probe
aagtgtttactgtgaacttggtgcc

SEQ ID NO: 187700 - DNA, 25 bp, Artificial
  Probe
cccctctgtacagcatcaatgtgct

SEQ ID NO: 187701 - DNA, 25 bp, Artificial
  Probe
cccagcagagatgtggatgatacaa

SEQ ID NO: 187702 - DNA, 25 bp, Artificial
  Probe
agcagtgagtctagcccagcagaga

SEQ ID NO: 187703 - DNA, 25 bp, Artificial
  Probe
agaaggcacaaacttctgcacaggc

SEQ ID NO: 187704 - DNA, 25 bp, Artificial
  Probe
tgtgcttagcccatctcaagtgttt

SEQ ID NO: 187705 - DNA, 25 bp, Artificial
  Probe
aaacttctgcacaggctgtgtgtta

SEQ ID NO: 187706 - DNA, 25 bp, Artificial
  Probe
caagtgtttactgtgaacttggtgc

SEQ ID NO: 187707 - DNA, 25 bp, Artificial
  Probe
ctcttaagagtgtcatctgcctagt

SEQ ID NO: 187708 - DNA, 25 bp, Artificial
  Probe
aacttggtgcccaaagtctcttaag

SEQ ID NO: 187709 - DNA, 25 bp, Artificial
  Probe
aagagtgtcatctgcctagtggcct

SEQ ID NO: 187710 - DNA, 25 bp, Artificial
  Probe
gtgttacagcagtgagtctagccca

SEQ ID NO: 187711 - DNA, 25 bp, Artificial
  Probe
tgtgtgcaagtatcccttacagaag

SEQ ID NO: 187712 - DNA, 25 bp, Artificial
  Probe
gtggcctcttgacttggccacttcc

SEQ ID NO: 187713 - DNA, 25 bp, Artificial
  Probe
gcacaaacttctgcacaggctgtgt

SEQ ID NO: 187714 - DNA, 25 bp, Artificial
  Probe
gtatcccttacagaaggcacaaact

SEQ ID NO: 187715 - DNA, 25 bp, Artificial
  Probe
tgtgttacagcagtgagtctagccc

SEQ ID NO: 187716 - DNA, 25 bp, Artificial
  Probe
ctgcacaggctgtgtgttacagcag

SEQ ID NO: 187717 - DNA, 25 bp, Artificial
  Probe
tgcaagtatcccttacagaaggcac

SEQ ID NO: 187718 - DNA, 25 bp, Artificial
  Probe
tgagtctagcccagcagagatgtgg

SEQ ID NO: 187719 - DNA, 25 bp, Artificial
  Probe
gtgtcatctgcctagtggcctcttg

SEQ ID NO: 187720 - DNA, 25 bp, Artificial
  Probe
acagcatcaatgtgcttagcccatc

SEQ ID NO: 187721 - DNA, 25 bp, Artificial
  Probe
acacagcagggacctgagcctcctg

SEQ ID NO: 187722 - DNA, 25 bp, Artificial
  Probe
attggtaataatacccatgttaccg

SEQ ID NO: 187723 - DNA, 25 bp, Artificial
  Probe
gtaagtcccttgacctctctggcct

SEQ ID NO: 187724 - DNA, 25 bp, Artificial
  Probe
aggctacagctctgtcctccgtctt

SEQ ID NO: 187725 - DNA, 25 bp, Artificial
  Probe
caaccccagctaaactgagtcttgg

SEQ ID NO: 187726 - DNA, 25 bp, Artificial
  Probe
cccagctaaactgagtcttggggga

SEQ ID NO: 187727 - DNA, 25 bp, Artificial
  Probe
gttctcagagcctgcccagatcaca

SEQ ID NO: 187728 - DNA, 25 bp, Artificial
  Probe
tagacctagtggacacagaggggct

SEQ ID NO: 187729 - DNA, 25 bp, Artificial
  Probe
gagcgaaacccaagttttgacccat

SEQ ID NO: 187730 - DNA, 25 bp, Artificial
  Probe
gctctctctcaccaggtgttcattc

SEQ ID NO: 187731 - DNA, 25 bp, Artificial
  Probe
ctgctggctgtgtggccttaagtaa

SEQ ID NO: 187732 - DNA, 25 bp, Artificial
  Probe
gcgaaacccaagttttgacccattg

SEQ ID NO: 187733 - DNA, 25 bp, Artificial
  Probe
gagcacacagccttccttgtgggga

SEQ ID NO: 187734 - DNA, 25 bp, Artificial
  Probe
agggactgaggctcgtattcctaag

SEQ ID NO: 187735 - DNA, 25 bp, Artificial
  Probe
agagcccatgtttgcctcccaggac

SEQ ID NO: 187736 - DNA, 25 bp, Artificial
  Probe
atgagagacttgctgtgtccaaccc

SEQ ID NO: 187737 - DNA, 25 bp, Artificial
  Probe
aaggattgaccgacaccgtataaga

SEQ ID NO: 187738 - DNA, 25 bp, Artificial
  Probe
ggactgcctcaccacagactcttgt

SEQ ID NO: 187739 - DNA, 25 bp, Artificial
  Probe
aagatctgagtgatcaggcagcagg

SEQ ID NO: 187740 - DNA, 25 bp, Artificial
  Probe
atttgagagcccatgtttgcctccc

SEQ ID NO: 187741 - DNA, 25 bp, Artificial
  Probe
agaagatctgagtgatcaggcagca

SEQ ID NO: 187742 - DNA, 25 bp, Artificial
  Probe
aaagcatttgcagagcacacagcct

SEQ ID NO: 187743 - DNA, 25 bp, Artificial
  Probe
tctcccttctctgcatctagagaga

SEQ ID NO: 187744 - DNA, 25 bp, Artificial
  Probe
gtcatgcccagaaatacccctaatg

SEQ ID NO: 187745 - DNA, 25 bp, Artificial
  Probe
taactgtgtattttctgagtgcttc

SEQ ID NO: 187746 - DNA, 25 bp, Artificial
  Probe
ctctgcatctagagagatattctga

SEQ ID NO: 187747 - DNA, 25 bp, Artificial
  Probe
cctactctatagaatgtatgcattg

SEQ ID NO: 187748 - DNA, 25 bp, Artificial
  Probe
acactcagccctcatgagagacttg

SEQ ID NO: 187749 - DNA, 25 bp, Artificial
  Probe
acgggtcccatgtggcatagttata

SEQ ID NO: 187750 - DNA, 25 bp, Artificial
  Probe
gtgcttcttccgtgccttggttttg

SEQ ID NO: 187751 - DNA, 25 bp, Artificial
  Probe
tgctgaggaccaagagcaaatgtct

SEQ ID NO: 187752 - DNA, 25 bp, Artificial
  Probe
cgaccagaagttatatcagggaatt

SEQ ID NO: 187753 - DNA, 25 bp, Artificial
  Probe
cctcatcatagaaatagggacaagg

SEQ ID NO: 187754 - DNA, 25 bp, Artificial
  Probe
gtgccttggttttgcccacacactc

SEQ ID NO: 187755 - DNA, 25 bp, Artificial
  Probe
ggacaaggatgcacctaccttgtag

SEQ ID NO: 187756 - DNA, 25 bp, Artificial
  Probe
ggagacacttttcaagttcctgctg

SEQ ID NO: 187757 - DNA, 25 bp, Artificial
  Probe
ctactctatagaatgtatgcattgg

SEQ ID NO: 187758 - DNA, 25 bp, Artificial
  Probe
gagttgctgatgtgaccacgccgct

SEQ ID NO: 187759 - DNA, 25 bp, Artificial
  Probe
atatcagggaattggggtcacagtc

SEQ ID NO: 187760 - DNA, 25 bp, Artificial
  Probe
catagccatctactaaaggccctag

SEQ ID NO: 187761 - DNA, 25 bp, Artificial
  Probe
attacagtcttcattgttctcagag

SEQ ID NO: 187762 - DNA, 25 bp, Artificial
  Probe
cccattggagtaggagacagtagct

SEQ ID NO: 187763 - DNA, 25 bp, Artificial
  Probe
ccgacaccgtataagaaaagcattt

SEQ ID NO: 187764 - DNA, 25 bp, Artificial
  Probe
cacctaccttgtagggagttggaag

SEQ ID NO: 187765 - DNA, 25 bp, Artificial
  Probe
cttgttccctcatcatagaaatagg

SEQ ID NO: 187766 - DNA, 25 bp, Artificial
  Probe
cgtcttcccagtcatgcccagaaat

SEQ ID NO: 187767 - DNA, 25 bp, Artificial
  Probe
ggaatatgcctgtgcctagggagtt

SEQ ID NO: 187768 - DNA, 25 bp, Artificial
  Probe
atgcctgtgcctagggagttttata

SEQ ID NO: 187769 - DNA, 25 bp, Artificial
  Probe
ttaatccttggcacttccagccgtc

SEQ ID NO: 187770 - DNA, 25 bp, Artificial
  Probe
cagccgtcgggagatagaggcaaaa

SEQ ID NO: 187771 - DNA, 25 bp, Artificial
  Probe
ccttcgcaggagagccaggtttggt

SEQ ID NO: 187772 - DNA, 25 bp, Artificial
  Probe
gttgcccagcattcgggaagctcta

SEQ ID NO: 187773 - DNA, 25 bp, Artificial
  Probe
tttataccagaataaccttcgcagg

SEQ ID NO: 187774 - DNA, 25 bp, Artificial
  Probe
acagcgtgtttcaggccagctagag

SEQ ID NO: 187775 - DNA, 25 bp, Artificial
  Probe
agacagatagatcctggcaagaaaa

SEQ ID NO: 187776 - DNA, 25 bp, Artificial
  Probe
ctgtatacctaaaagcccagtgttt

SEQ ID NO: 187777 - DNA, 25 bp, Artificial
  Probe
ccagccgtcgggagatagaggcaaa

SEQ ID NO: 187778 - DNA, 25 bp, Artificial
  Probe
ataaccttcgcaggagagccaggtt

SEQ ID NO: 187779 - DNA, 25 bp, Artificial
  Probe
tcaagagttcaaactcattctgtgc

SEQ ID NO: 187780 - DNA, 25 bp, Artificial
  Probe
ctgtgcctagggagttttataccag

SEQ ID NO: 187781 - DNA, 25 bp, Artificial
  Probe
tgtgcctagggagttttataccaga

SEQ ID NO: 187782 - DNA, 25 bp, Artificial
  Probe
aggccagctagagagacagatagat

SEQ ID NO: 187783 - DNA, 25 bp, Artificial
  Probe
ggtttggtgctgtatacctaaaagc

SEQ ID NO: 187784 - DNA, 25 bp, Artificial
  Probe
cacttccagccgtcgggagatagag

SEQ ID NO: 187785 - DNA, 25 bp, Artificial
  Probe
ccagaataaccttcgcaggagagcc

SEQ ID NO: 187786 - DNA, 25 bp, Artificial
  Probe
ccaggtttggtgctgtatacctaaa

SEQ ID NO: 187787 - DNA, 25 bp, Artificial
  Probe
gaactacacatgaccttgactccag

SEQ ID NO: 187788 - DNA, 25 bp, Artificial
  Probe
gactccaggaaaacagcaggaggga

SEQ ID NO: 187789 - DNA, 25 bp, Artificial
  Probe
aaagctagcctggtttatacagcgt

SEQ ID NO: 187790 - DNA, 25 bp, Artificial
  Probe
tcgggaagctctacaattaatcctt

SEQ ID NO: 187791 - DNA, 25 bp, Artificial
  Probe
tatgcctgtgcctagggagttttat

SEQ ID NO: 187792 - DNA, 25 bp, Artificial
  Probe
ttcaagaccatctggggccaacacg

SEQ ID NO: 187793 - DNA, 25 bp, Artificial
  Probe
taggctgggtttgagggtactcaac

SEQ ID NO: 187794 - DNA, 25 bp, Artificial
  Probe
cttggcacttccagccgtcgggaga

SEQ ID NO: 187795 - DNA, 25 bp, Artificial
  Probe
tggaaattcaagaccatctggggcc

SEQ ID NO: 187796 - DNA, 25 bp, Artificial
  Probe
agcattcgggaagctctacaattaa

SEQ ID NO: 187797 - DNA, 25 bp, Artificial
  Probe
atgaagttgcccagcattcgggaag

SEQ ID NO: 187798 - DNA, 25 bp, Artificial
  Probe
gaagctctacaattaatccttggca

SEQ ID NO: 187799 - DNA, 25 bp, Artificial
  Probe
ggctcagttggatgaagttgcccag

SEQ ID NO: 187800 - DNA, 25 bp, Artificial
  Probe
ttgagggtactcaaccttaatccca

SEQ ID NO: 187801 - DNA, 25 bp, Artificial
  Probe
atggaatatgcctgtgcctagggag

SEQ ID NO: 187802 - DNA, 25 bp, Artificial
  Probe
cctggtttatacagcgtgtttcagg

SEQ ID NO: 187803 - DNA, 25 bp, Artificial
  Probe
aagcccagtgtttgtaggtagaggc

SEQ ID NO: 187804 - DNA, 25 bp, Artificial
  Probe
ctaaaagcccagtgtttgtaggtag

SEQ ID NO: 187805 - DNA, 25 bp, Artificial
  Probe
gagggtactcaaccttaatcccagc

SEQ ID NO: 187806 - DNA, 25 bp, Artificial
  Probe
cccagtgtttgtaggtagaggcaaa

SEQ ID NO: 187807 - DNA, 25 bp, Artificial
  Probe
ccatctggggccaacacgaactaca

SEQ ID NO: 187808 - DNA, 25 bp, Artificial
  Probe
gagagccaggtttggtgctgtatac

SEQ ID NO: 187809 - DNA, 25 bp, Artificial
  Probe
gtttatacagcgtgtttcaggccag

SEQ ID NO: 187810 - DNA, 25 bp, Artificial
  Probe
ctagcctggtttatacagcgtgttt

SEQ ID NO: 187811 - DNA, 25 bp, Artificial
  Probe
gtttcaggccagctagagagacaga

SEQ ID NO: 187812 - DNA, 25 bp, Artificial
  Probe
ggccaacacgaactacacatgacct

SEQ ID NO: 187813 - DNA, 25 bp, Artificial
  Probe
ctgacacgtttcttcttgggaagag

SEQ ID NO: 187814 - DNA, 25 bp, Artificial
  Probe
aagtctttattcctgtgacactgac

SEQ ID NO: 187815 - DNA, 25 bp, Artificial
  Probe
agtagtgttctttctctaccttctg

SEQ ID NO: 187816 - DNA, 25 bp, Artificial
  Probe
ctctgagccaggtgtagacctggct

SEQ ID NO: 187817 - DNA, 25 bp, Artificial
  Probe
tttaatcgacgagaccacagaattc

SEQ ID NO: 187818 - DNA, 25 bp, Artificial
  Probe
tattcctgtgacactgacacgtttc

SEQ ID NO: 187819 - DNA, 25 bp, Artificial
  Probe
acacttttaatcgacgagaccacag

SEQ ID NO: 187820 - DNA, 25 bp, Artificial
  Probe
tctgagccaggtgtagacctggctg

SEQ ID NO: 187821 - DNA, 25 bp, Artificial
  Probe
agccaggtgtagacctggctgtctt

SEQ ID NO: 187822 - DNA, 25 bp, Artificial
  Probe
tgcttccaaaagagttacctttggg

SEQ ID NO: 187823 - DNA, 25 bp, Artificial
  Probe
tctctgagccaggtgtagacctggc

SEQ ID NO: 187824 - DNA, 25 bp, Artificial
  Probe
tcctgtgacactgacacgtttcttc

SEQ ID NO: 187825 - DNA, 25 bp, Artificial
  Probe
ttattcctgtgacactgacacgttt

SEQ ID NO: 187826 - DNA, 25 bp, Artificial
  Probe
gtctttattcctgtgacactgacac

SEQ ID NO: 187827 - DNA, 25 bp, Artificial
  Probe
ctttattcctgtgacactgacacgt

SEQ ID NO: 187828 - DNA, 25 bp, Artificial
  Probe
gacactgacacgtttcttcttggga

SEQ ID NO: 187829 - DNA, 25 bp, Artificial
  Probe
acacgtttcttcttgggaagagagg

SEQ ID NO: 187830 - DNA, 25 bp, Artificial
  Probe
cttttaatcgacgagaccacagaat

SEQ ID NO: 187831 - DNA, 25 bp, Artificial
  Probe
gtagtgttctttctctaccttctgc

SEQ ID NO: 187832 - DNA, 25 bp, Artificial
  Probe
acttttaatcgacgagaccacagaa

SEQ ID NO: 187833 - DNA, 25 bp, Artificial
  Probe
ctgtgacactgacacgtttcttctt

SEQ ID NO: 187834 - DNA, 25 bp, Artificial
  Probe
tccccttcttctctgagccaggtgt

SEQ ID NO: 187835 - DNA, 25 bp, Artificial
  Probe
tctttattcctgtgacactgacacg

SEQ ID NO: 187836 - DNA, 25 bp, Artificial
  Probe
cacttttaatcgacgagaccacaga

SEQ ID NO: 187837 - DNA, 25 bp, Artificial
  Probe
ttcctgtgacactgacacgtttctt

SEQ ID NO: 187838 - DNA, 25 bp, Artificial
  Probe
acactgacacgtttcttcttgggaa

SEQ ID NO: 187839 - DNA, 25 bp, Artificial
  Probe
cctgtgacactgacacgtttcttct

SEQ ID NO: 187840 - DNA, 25 bp, Artificial
  Probe
agtctttattcctgtgacactgaca

SEQ ID NO: 187841 - DNA, 25 bp, Artificial
  Probe
actgacacgtttcttcttgggaaga

SEQ ID NO: 187842 - DNA, 25 bp, Artificial
  Probe
tttattcctgtgacactgacacgtt

SEQ ID NO: 187843 - DNA, 25 bp, Artificial
  Probe
tgtgacactgacacgtttcttcttg

SEQ ID NO: 187844 - DNA, 25 bp, Artificial
  Probe
tgacactgacacgtttcttcttggg

SEQ ID NO: 187845 - DNA, 25 bp, Artificial
  Probe
ctgcttccaaaagagttacctttgg

SEQ ID NO: 187846 - DNA, 25 bp, Artificial
  Probe
ttctctgagccaggtgtagacctgg

SEQ ID NO: 187847 - DNA, 25 bp, Artificial
  Probe
cttctctgagccaggtgtagacctg

SEQ ID NO: 187848 - DNA, 25 bp, Artificial
  Probe
ccccttcttctctgagccaggtgta

SEQ ID NO: 187849 - DNA, 25 bp, Artificial
  Probe
cccttcttctctgagccaggtgtag

SEQ ID NO: 187850 - DNA, 25 bp, Artificial
  Probe
gtgacactgacacgtttcttcttgg

SEQ ID NO: 187851 - DNA, 25 bp, Artificial
  Probe
cactgacacgtttcttcttgggaag

SEQ ID NO: 187852 - DNA, 25 bp, Artificial
  Probe
ccttcttctctgagccaggtgtaga

SEQ ID NO: 187853 - DNA, 25 bp, Artificial
  Probe
tgacacgtttcttcttgggaagaga

SEQ ID NO: 187854 - DNA, 25 bp, Artificial
  Probe
attcctgtgacactgacacgtttct

SEQ ID NO: 187855 - DNA, 25 bp, Artificial
  Probe
cacgtttcttcttgggaagagaggg

SEQ ID NO: 187856 - DNA, 25 bp, Artificial
  Probe
tccaaaagagttacctttggggctg

SEQ ID NO: 187857 - DNA, 25 bp, Artificial
  Probe
ctgagccaggtgtagacctggctgt

SEQ ID NO: 187858 - DNA, 25 bp, Artificial
  Probe
ttttaatcgacgagaccacagaatt

SEQ ID NO: 187859 - DNA, 25 bp, Artificial
  Probe
tattaagtccccaatgtgaaatctg

SEQ ID NO: 187860 - DNA, 25 bp, Artificial
  Probe
actccgcatccgaagatatgaagtg

SEQ ID NO: 187861 - DNA, 25 bp, Artificial
  Probe
agcaggtccgcaaagctccctctgg

SEQ ID NO: 187862 - DNA, 25 bp, Artificial
  Probe
tgaaatctgtctgttcagagtgtgc

SEQ ID NO: 187863 - DNA, 25 bp, Artificial
  Probe
ccggcgcagtgctgaggactacgaa

SEQ ID NO: 187864 - DNA, 25 bp, Artificial
  Probe
ctgaggactacgaatacccatcgta

SEQ ID NO: 187865 - DNA, 25 bp, Artificial
  Probe
tagcccgatacatccagcaggtccg

SEQ ID NO: 187866 - DNA, 25 bp, Artificial
  Probe
ctacgaatacccatcgtagtgggcc

SEQ ID NO: 187867 - DNA, 25 bp, Artificial
  Probe
atgagaaaacaaccacgcacacgac

SEQ ID NO: 187868 - DNA, 25 bp, Artificial
  Probe
ctgggcgcactgctagcccgataca

SEQ ID NO: 187869 - DNA, 25 bp, Artificial
  Probe
tcgtagtgggccagcctctcggcgc

SEQ ID NO: 187870 - DNA, 25 bp, Artificial
  Probe
agctgactccgcatccgaagatatg

SEQ ID NO: 187871 - DNA, 25 bp, Artificial
  Probe
caatgtgaaatctgtctgttcagag

SEQ ID NO: 187872 - DNA, 25 bp, Artificial
  Probe
agtgggccagcctctcggcgctgct

SEQ ID NO: 187873 - DNA, 25 bp, Artificial
  Probe
tggaaaccgccaagccagctgactc

SEQ ID NO: 187874 - DNA, 25 bp, Artificial
  Probe
ttggaaaccgccaagccagctgact

SEQ ID NO: 187875 - DNA, 25 bp, Artificial
  Probe
tctggccgcatgtccgttcttaaga

SEQ ID NO: 187876 - DNA, 25 bp, Artificial
  Probe
gccggtagtccctgtagaagctgtg

SEQ ID NO: 187877 - DNA, 25 bp, Artificial
  Probe
gctgactccgcatccgaagatatga

SEQ ID NO: 187878 - DNA, 25 bp, Artificial
  Probe
gccgcatgtccgttcttaagaacct

SEQ ID NO: 187879 - DNA, 25 bp, Artificial
  Probe
cgcatccgaagatatgaagtgcggc

SEQ ID NO: 187880 - DNA, 25 bp, Artificial
  Probe
gactacatgggctggatggatttcg

SEQ ID NO: 187881 - DNA, 25 bp, Artificial
  Probe
tacatccagcaggtccgcaaagctc

SEQ ID NO: 187882 - DNA, 25 bp, Artificial
  Probe
ctcgcctctaatgtttgacattttg

SEQ ID NO: 187883 - DNA, 25 bp, Artificial
  Probe
ttaagaacctgcagggcctggaccc

SEQ ID NO: 187884 - DNA, 25 bp, Artificial
  Probe
aggactacgaatacccatcgtagtg

SEQ ID NO: 187885 - DNA, 25 bp, Artificial
  Probe
tagctggacagcagccgttggaaac

SEQ ID NO: 187886 - DNA, 25 bp, Artificial
  Probe
ccgatacatccagcaggtccgcaaa

SEQ ID NO: 187887 - DNA, 25 bp, Artificial
  Probe
ccacaggataagtgaccgggactac

SEQ ID NO: 187888 - DNA, 25 bp, Artificial
  Probe
tgctagcccgatacatccagcaggt

SEQ ID NO: 187889 - DNA, 25 bp, Artificial
  Probe
tggaccctagccacaggataagtga

SEQ ID NO: 187890 - DNA, 25 bp, Artificial
  Probe
tagaagctgtggaccctatggagca

SEQ ID NO: 187891 - DNA, 25 bp, Artificial
  Probe
tgcagggcctggaccctagccacag

SEQ ID NO: 187892 - DNA, 25 bp, Artificial
  Probe
cctctggccgcatgtccgttcttaa

SEQ ID NO: 187893 - DNA, 25 bp, Artificial
  Probe
cctctaatgtttgacattttgagtt

SEQ ID NO: 187894 - DNA, 25 bp, Artificial
  Probe
gggcctggaccctagccacaggata

SEQ ID NO: 187895 - DNA, 25 bp, Artificial
  Probe
ggacagcagccgttggaaaccgcca

SEQ ID NO: 187896 - DNA, 25 bp, Artificial
  Probe
cagccgttggaaaccgccaagccag

SEQ ID NO: 187897 - DNA, 25 bp, Artificial
  Probe
gggcgcactgctagcccgatacatc

SEQ ID NO: 187898 - DNA, 25 bp, Artificial
  Probe
tgggccagcctctcggcgctgcttg

SEQ ID NO: 187899 - DNA, 25 bp, Artificial
  Probe
aagccagctgactccgcatccgaag

SEQ ID NO: 187900 - DNA, 25 bp, Artificial
  Probe
tacatgggctggatggatttcggcc

SEQ ID NO: 187901 - DNA, 25 bp, Artificial
  Probe
tgagaaaacaaccacgcacacgacc

SEQ ID NO: 187902 - DNA, 25 bp, Artificial
  Probe
tacccatcgtagtgggccagcctct

SEQ ID NO: 187903 - DNA, 25 bp, Artificial
  Probe
tggcgcagccggtagtccctgtaga

SEQ ID NO: 187904 - DNA, 25 bp, Artificial
  Probe
cagtgctgaggactacgaataccca

SEQ ID NO: 187905 - DNA, 25 bp, Artificial
  Probe
gccctgcattgctcagtcaataata

SEQ ID NO: 187906 - DNA, 25 bp, Artificial
  Probe
gggacataatctgagggctgctagc

SEQ ID NO: 187907 - DNA, 25 bp, Artificial
  Probe
gggcagggcaattcaccctggaaga

SEQ ID NO: 187908 - DNA, 25 bp, Artificial
  Probe
aatggccaagaactagttcagggct

SEQ ID NO: 187909 - DNA, 25 bp, Artificial
  Probe
gcaattcaccctggaagaggaagta

SEQ ID NO: 187910 - DNA, 25 bp, Artificial
  Probe
taatctgagggctgctagccctgca

SEQ ID NO: 187911 - DNA, 25 bp, Artificial
  Probe
tcaccctggaagaggaagtagaagg

SEQ ID NO: 187912 - DNA, 25 bp, Artificial
  Probe
agccctgcattgctcagtcaataat

SEQ ID NO: 187913 - DNA, 25 bp, Artificial
  Probe
caagaactagttcagggctgactag

SEQ ID NO: 187914 - DNA, 25 bp, Artificial
  Probe
ttcaccctggaagaggaagtagaag

SEQ ID NO: 187915 - DNA, 25 bp, Artificial
  Probe
gctgctagccctgcattgctcagtc

SEQ ID NO: 187916 - DNA, 25 bp, Artificial
  Probe
caccctggaagaggaagtagaaggg

SEQ ID NO: 187917 - DNA, 25 bp, Artificial
  Probe
ctagttcagggctgactagagggct

SEQ ID NO: 187918 - DNA, 25 bp, Artificial
  Probe
ggcaattcaccctggaagaggaagt

SEQ ID NO: 187919 - DNA, 25 bp, Artificial
  Probe
tagccctgcattgctcagtcaataa

SEQ ID NO: 187920 - DNA, 25 bp, Artificial
  Probe
ccctgcattgctcagtcaataataa

SEQ ID NO: 187921 - DNA, 25 bp, Artificial
  Probe
caatggccaagaactagttcagggc

SEQ ID NO: 187922 - DNA, 25 bp, Artificial
  Probe
ctgctagccctgcattgctcagtca

SEQ ID NO: 187923 - DNA, 25 bp, Artificial
  Probe
aattcaccctggaagaggaagtaga

SEQ ID NO: 187924 - DNA, 25 bp, Artificial
  Probe
caattcaccctggaagaggaagtag

SEQ ID NO: 187925 - DNA, 25 bp, Artificial
  Probe
tcagggctgactagagggctgcaca

SEQ ID NO: 187926 - DNA, 25 bp, Artificial
  Probe
gcagggcaattcaccctggaagagg

SEQ ID NO: 187927 - DNA, 25 bp, Artificial
  Probe
ttcagggctgactagagggctgcac

SEQ ID NO: 187928 - DNA, 25 bp, Artificial
  Probe
ggccaagaactagttcagggctgac

SEQ ID NO: 187929 - DNA, 25 bp, Artificial
  Probe
tggccaagaactagttcagggctga

SEQ ID NO: 187930 - DNA, 25 bp, Artificial
  Probe
acagtggggcagggcaattcaccct

SEQ ID NO: 187931 - DNA, 25 bp, Artificial
  Probe
ggctgctagccctgcattgctcagt

SEQ ID NO: 187932 - DNA, 25 bp, Artificial
  Probe
aacaatggccaagaactagttcagg

SEQ ID NO: 187933 - DNA, 25 bp, Artificial
  Probe
atctgagggctgctagccctgcatt

SEQ ID NO: 187934 - DNA, 25 bp, Artificial
  Probe
gggctgctagccctgcattgctcag

SEQ ID NO: 187935 - DNA, 25 bp, Artificial
  Probe
gaaacaatggccaagaactagttca

SEQ ID NO: 187936 - DNA, 25 bp, Artificial
  Probe
gacataatctgagggctgctagccc

SEQ ID NO: 187937 - DNA, 25 bp, Artificial
  Probe
ggcagggcaattcaccctggaagag

SEQ ID NO: 187938 - DNA, 25 bp, Artificial
  Probe
attcaccctggaagaggaagtagaa

SEQ ID NO: 187939 - DNA, 25 bp, Artificial
  Probe
cagggctgactagagggctgcacac

SEQ ID NO: 187940 - DNA, 25 bp, Artificial
  Probe
ccaagaactagttcagggctgacta

SEQ ID NO: 187941 - DNA, 25 bp, Artificial
  Probe
gccaagaactagttcagggctgact

SEQ ID NO: 187942 - DNA, 25 bp, Artificial
  Probe
atggccaagaactagttcagggctg

SEQ ID NO: 187943 - DNA, 25 bp, Artificial
  Probe
aagaactagttcagggctgactaga

SEQ ID NO: 187944 - DNA, 25 bp, Artificial
  Probe
gggcaattcaccctggaagaggaag

SEQ ID NO: 187945 - DNA, 25 bp, Artificial
  Probe
agggctgactagagggctgcacaca

SEQ ID NO: 187946 - DNA, 25 bp, Artificial
  Probe
tgctagccctgcattgctcagtcaa

SEQ ID NO: 187947 - DNA, 25 bp, Artificial
  Probe
acaatggccaagaactagttcaggg

SEQ ID NO: 187948 - DNA, 25 bp, Artificial
  Probe
ctagccctgcattgctcagtcaata

SEQ ID NO: 187949 - DNA, 25 bp, Artificial
  Probe
gctagccctgcattgctcagtcaat

SEQ ID NO: 187950 - DNA, 25 bp, Artificial
  Probe
ggacataatctgagggctgctagcc

SEQ ID NO: 187951 - DNA, 25 bp, Artificial
  Probe
gtaattcaaagagcacgcaatgcag

SEQ ID NO: 187952 - DNA, 25 bp, Artificial
  Probe
ccgccaagtggctgaaggaaaggca

SEQ ID NO: 187953 - DNA, 25 bp, Artificial
  Probe
agtgagcgcgtacagctcctccaca

SEQ ID NO: 187954 - DNA, 25 bp, Artificial
  Probe
aattcaaagagcacgcaatgcagaa

SEQ ID NO: 187955 - DNA, 25 bp, Artificial
  Probe
gtaaacgcatcttgaggaggccgcc

SEQ ID NO: 187956 - DNA, 25 bp, Artificial
  Probe
gtcgcttgcctctcgtgtttacttt

SEQ ID NO: 187957 - DNA, 25 bp, Artificial
  Probe
cgccaagtggctgaaggaaaggcac

SEQ ID NO: 187958 - DNA, 25 bp, Artificial
  Probe
aaacgcatcttgaggaggccgccaa

SEQ ID NO: 187959 - DNA, 25 bp, Artificial
  Probe
ggtcgcttgcctctcgtgtttactt

SEQ ID NO: 187960 - DNA, 25 bp, Artificial
  Probe
aaacgtaatgctgaggccgttaaag

SEQ ID NO: 187961 - DNA, 25 bp, Artificial
  Probe
gaacgcgagcctcatcaacgccaaa

SEQ ID NO: 187962 - DNA, 25 bp, Artificial
  Probe
aaagagcacgcaatgcagaagagaa

SEQ ID NO: 187963 - DNA, 25 bp, Artificial
  Probe
gcacgcaatgcagaagagaaggcca

SEQ ID NO: 187964 - DNA, 25 bp, Artificial
  Probe
aacgcatcttgaggaggccgccaag

SEQ ID NO: 187965 - DNA, 25 bp, Artificial
  Probe
gagtaaacgcatcttgaggaggccg

SEQ ID NO: 187966 - DNA, 25 bp, Artificial
  Probe
gcgagcctcatcaacgccaaaaaga

SEQ ID NO: 187967 - DNA, 25 bp, Artificial
  Probe
tcgcttgctgggtcgcttgcctctc

SEQ ID NO: 187968 - DNA, 25 bp, Artificial
  Probe
gttcacaccaaaatcagtgcagagt

SEQ ID NO: 187969 - DNA, 25 bp, Artificial
  Probe
agagcacgcaatgcagaagagaagg

SEQ ID NO: 187970 - DNA, 25 bp, Artificial
  Probe
gagcacgcaatgcagaagagaaggc

SEQ ID NO: 187971 - DNA, 25 bp, Artificial
  Probe
gggtcgcttgcctctcgtgtttact

SEQ ID NO: 187972 - DNA, 25 bp, Artificial
  Probe
ccttgggtcgcttgctgggtcgctt

SEQ ID NO: 187973 - DNA, 25 bp, Artificial
  Probe
aacgtaatgctgaggccgttaaagg

SEQ ID NO: 187974 - DNA, 25 bp, Artificial
  Probe
tgctgggtcgcttgcctctcgtgtt

SEQ ID NO: 187975 - DNA, 25 bp, Artificial
  Probe
agtaattcaaagagcacgcaatgca

SEQ ID NO: 187976 - DNA, 25 bp, Artificial
  Probe
ggccagggtacgtgaacttgaagga

SEQ ID NO: 187977 - DNA, 25 bp, Artificial
  Probe
agcacgcaatgcagaagagaaggcc

SEQ ID NO: 187978 - DNA, 25 bp, Artificial
  Probe
gaaacgtaatgctgaggccgttaaa

SEQ ID NO: 187979 - DNA, 25 bp, Artificial
  Probe
accaaaatcagtgcagagtaaacgc

SEQ ID NO: 187980 - DNA, 25 bp, Artificial
  Probe
attacaggcgaaggtgaaatcttac

SEQ ID NO: 187981 - DNA, 25 bp, Artificial
  Probe
ttgctgggtcgcttgcctctcgtgt

SEQ ID NO: 187982 - DNA, 25 bp, Artificial
  Probe
taattcaaagagcacgcaatgcaga

SEQ ID NO: 187983 - DNA, 25 bp, Artificial
  Probe
acaccaaaatcagtgcagagtaaac

SEQ ID NO: 187984 - DNA, 25 bp, Artificial
  Probe
aattacaggcgaaggtgaaatctta

SEQ ID NO: 187985 - DNA, 25 bp, Artificial
  Probe
ttcacaccaaaatcagtgcagagta

SEQ ID NO: 187986 - DNA, 25 bp, Artificial
  Probe
aacgcgagcctcatcaacgccaaaa

SEQ ID NO: 187987 - DNA, 25 bp, Artificial
  Probe
caccaaaatcagtgcagagtaaacg

SEQ ID NO: 187988 - DNA, 25 bp, Artificial
  Probe
cgcgagcctcatcaacgccaaaaag

SEQ ID NO: 187989 - DNA, 25 bp, Artificial
  Probe
cgcttgcctctcgtgtttacttttc

SEQ ID NO: 187990 - DNA, 25 bp, Artificial
  Probe
acgcgagcctcatcaacgccaaaaa

SEQ ID NO: 187991 - DNA, 25 bp, Artificial
  Probe
tcacaccaaaatcagtgcagagtaa

SEQ ID NO: 187992 - DNA, 25 bp, Artificial
  Probe
taaacgcatcttgaggaggccgcca

SEQ ID NO: 187993 - DNA, 25 bp, Artificial
  Probe
cacaccaaaatcagtgcagagtaaa

SEQ ID NO: 187994 - DNA, 25 bp, Artificial
  Probe
agtaaacgcatcttgaggaggccgc

SEQ ID NO: 187995 - DNA, 25 bp, Artificial
  Probe
caaagagcacgcaatgcagaagaga

SEQ ID NO: 187996 - DNA, 25 bp, Artificial
  Probe
aagagcacgcaatgcagaagagaag

SEQ ID NO: 187997 - DNA, 25 bp, Artificial
  Probe
tccatgcagaatgtgacagccagaa

SEQ ID NO: 187998 - DNA, 25 bp, Artificial
  Probe
catggccacagtagattctctaata

SEQ ID NO: 187999 - DNA, 25 bp, Artificial
  Probe
gacaaagctatcacctgctatgaca

SEQ ID NO: 188000 - DNA, 25 bp, Artificial
  Probe
ggattaaggccctaatcttcttatt

SEQ ID NO: 188001 - DNA, 25 bp, Artificial
  Probe
aacgatcttgtaagaactggctgtc

SEQ ID NO: 188002 - DNA, 25 bp, Artificial
  Probe
tattcccagtcagtgtacctttatg

SEQ ID NO: 188003 - DNA, 25 bp, Artificial
  Probe
gaacccaactgcacaacgatcttgt

SEQ ID NO: 188004 - DNA, 25 bp, Artificial
  Probe
atcacctgctatgacagaataattg

SEQ ID NO: 188005 - DNA, 25 bp, Artificial
  Probe
catccaggagtctggcaagaacagg

SEQ ID NO: 188006 - DNA, 25 bp, Artificial
  Probe
tctaaatttgctcagaagttgaaac

SEQ ID NO: 188007 - DNA, 25 bp, Artificial
  Probe
ttgccttttcctttcctgacccagg

SEQ ID NO: 188008 - DNA, 25 bp, Artificial
  Probe
cgatcttgtaagaactggctgtcat

SEQ ID NO: 188009 - DNA, 25 bp, Artificial
  Probe
cccaactgcacaacgatcttgtaag

SEQ ID NO: 188010 - DNA, 25 bp, Artificial
  Probe
tgacagccagaatggcggagtactt

SEQ ID NO: 188011 - DNA, 25 bp, Artificial
  Probe
actggctgtcatttgtgggtcaatg

SEQ ID NO: 188012 - DNA, 25 bp, Artificial
  Probe
tccaccatggccacagtagattctc

SEQ ID NO: 188013 - DNA, 25 bp, Artificial
  Probe
gacccaggctgcagaacatttttct

SEQ ID NO: 188014 - DNA, 25 bp, Artificial
  Probe
actgcacaacgatcttgtaagaact

SEQ ID NO: 188015 - DNA, 25 bp, Artificial
  Probe
ctaaatttgctcagaagttgaaaca

SEQ ID NO: 188016 - DNA, 25 bp, Artificial
  Probe
tcttgtaagaactggctgtcatttg

SEQ ID NO: 188017 - DNA, 25 bp, Artificial
  Probe
tagctctattagtatgtgaactctt

SEQ ID NO: 188018 - DNA, 25 bp, Artificial
  Probe
agtacttagtctaaatttgctcaga

SEQ ID NO: 188019 - DNA, 25 bp, Artificial
  Probe
atgcagaatgtgacagccagaatgg

SEQ ID NO: 188020 - DNA, 25 bp, Artificial
  Probe
ttagctctattagtatgtgaactct

SEQ ID NO: 188021 - DNA, 25 bp, Artificial
  Probe
agagacaaagctatcacctgctatg

SEQ ID NO: 188022 - DNA, 25 bp, Artificial
  Probe
gtcactatatcttgttcagcattgc

SEQ ID NO: 188023 - DNA, 25 bp, Artificial
  Probe
attttatccatgcagaatgtgacag

SEQ ID NO: 188024 - DNA, 25 bp, Artificial
  Probe
tgtcactatatcttgttcagcattg

SEQ ID NO: 188025 - DNA, 25 bp, Artificial
  Probe
acctgctatgacagaataattgctt

SEQ ID NO: 188026 - DNA, 25 bp, Artificial
  Probe
cttagtctaaatttgctcagaagtt

SEQ ID NO: 188027 - DNA, 25 bp, Artificial
  Probe
cagaatggcggagtacttagtctaa

SEQ ID NO: 188028 - DNA, 25 bp, Artificial
  Probe
tttcctttcctgacccaggctgcag

SEQ ID NO: 188029 - DNA, 25 bp, Artificial
  Probe
tctttagctctattagtatgtgaac

SEQ ID NO: 188030 - DNA, 25 bp, Artificial
  Probe
ctgacccaggctgcagaacattttt

SEQ ID NO: 188031 - DNA, 25 bp, Artificial
  Probe
agaactggctgtcatttgtgggtca

SEQ ID NO: 188032 - DNA, 25 bp, Artificial
  Probe
tacttagtctaaatttgctcagaag

SEQ ID NO: 188033 - DNA, 25 bp, Artificial
  Probe
ccacattttatccatgcagaatgtg

SEQ ID NO: 188034 - DNA, 25 bp, Artificial
  Probe
ccctccatccaggagtctggcaaga

SEQ ID NO: 188035 - DNA, 25 bp, Artificial
  Probe
ttttcctttcctgacccaggctgca

SEQ ID NO: 188036 - DNA, 25 bp, Artificial
  Probe
cctgacccaggctgcagaacatttt

SEQ ID NO: 188037 - DNA, 25 bp, Artificial
  Probe
atgtgacagccagaatggcggagta

SEQ ID NO: 188038 - DNA, 25 bp, Artificial
  Probe
caaagctatcacctgctatgacaga

SEQ ID NO: 188039 - DNA, 25 bp, Artificial
  Probe
gtcagtgtacctttatgctccattt

SEQ ID NO: 188040 - DNA, 25 bp, Artificial
  Probe
ggctgtcatttgtgggtcaatgcta

SEQ ID NO: 188041 - DNA, 25 bp, Artificial
  Probe
tccatccaggagtctggcaagaaca

SEQ ID NO: 188042 - DNA, 25 bp, Artificial
  Probe
gctatcacctgctatgacagaataa

SEQ ID NO: 188043 - DNA, 25 bp, Artificial
  Probe
ctatgtatggtgcttcattgccaat

SEQ ID NO: 188044 - DNA, 25 bp, Artificial
  Probe
ttcattgccaatgtgcgtgcagtct

SEQ ID NO: 188045 - DNA, 25 bp, Artificial
  Probe
gcttcattgccaatgtgcgtgcagt

SEQ ID NO: 188046 - DNA, 25 bp, Artificial
  Probe
acatactatgtatggtgcttcattg

SEQ ID NO: 188047 - DNA, 25 bp, Artificial
  Probe
caatgtgcgtgcagtctttgttctc

SEQ ID NO: 188048 - DNA, 25 bp, Artificial
  Probe
tatggtgcttcattgccaatgtgcg

SEQ ID NO: 188049 - DNA, 25 bp, Artificial
  Probe
atgtgcgtgcagtctttgttctcct

SEQ ID NO: 188050 - DNA, 25 bp, Artificial
  Probe
cgtgaaaaactgtgtccgaggacaa

SEQ ID NO: 188051 - DNA, 25 bp, Artificial
  Probe
tctcctccgtgaaaaactgtgtccg

SEQ ID NO: 188052 - DNA, 25 bp, Artificial
  Probe
gtgaaaaactgtgtccgaggacaaa

SEQ ID NO: 188053 - DNA, 25 bp, Artificial
  Probe
cacggatgtacgtggcgtgtgacat

SEQ ID NO: 188054 - DNA, 25 bp, Artificial
  Probe
cgtgcagtctttgttctcctccgtg

SEQ ID NO: 188055 - DNA, 25 bp, Artificial
  Probe
atactatgtatggtgcttcattgcc

SEQ ID NO: 188056 - DNA, 25 bp, Artificial
  Probe
aatgtgcgtgcagtctttgttctcc

SEQ ID NO: 188057 - DNA, 25 bp, Artificial
  Probe
tactatgtatggtgcttcattgcca

SEQ ID NO: 188058 - DNA, 25 bp, Artificial
  Probe
tgcgtgcagtctttgttctcctccg

SEQ ID NO: 188059 - DNA, 25 bp, Artificial
  Probe
tgaaaaactgtgtccgaggacaaag

SEQ ID NO: 188060 - DNA, 25 bp, Artificial
  Probe
tcctccgtgaaaaactgtgtccgag

SEQ ID NO: 188061 - DNA, 25 bp, Artificial
  Probe
atggtgcttcattgccaatgtgcgt

SEQ ID NO: 188062 - DNA, 25 bp, Artificial
  Probe
tgcagtctttgttctcctccgtgaa

SEQ ID NO: 188063 - DNA, 25 bp, Artificial
  Probe
gtgcagtctttgttctcctccgtga

SEQ ID NO: 188064 - DNA, 25 bp, Artificial
  Probe
tccgtgaaaaactgtgtccgaggac

SEQ ID NO: 188065 - DNA, 25 bp, Artificial
  Probe
acacggatgtacgtggcgtgtgaca

SEQ ID NO: 188066 - DNA, 25 bp, Artificial
  Probe
gcagtctttgttctcctccgtgaaa

SEQ ID NO: 188067 - DNA, 25 bp, Artificial
  Probe
gcgtgcagtctttgttctcctccgt

SEQ ID NO: 188068 - DNA, 25 bp, Artificial
  Probe
cttcattgccaatgtgcgtgcagtc

SEQ ID NO: 188069 - DNA, 25 bp, Artificial
  Probe
gccaatgtgcgtgcagtctttgttc

SEQ ID NO: 188070 - DNA, 25 bp, Artificial
  Probe
atgtacgtggcgtgtgacattcctg

SEQ ID NO: 188071 - DNA, 25 bp, Artificial
  Probe
gtgcgtgcagtctttgttctcctcc

SEQ ID NO: 188072 - DNA, 25 bp, Artificial
  Probe
catactatgtatggtgcttcattgc

SEQ ID NO: 188073 - DNA, 25 bp, Artificial
  Probe
tgtatggtgcttcattgccaatgtg

SEQ ID NO: 188074 - DNA, 25 bp, Artificial
  Probe
tgccaatgtgcgtgcagtctttgtt

SEQ ID NO: 188075 - DNA, 25 bp, Artificial
  Probe
actatgtatggtgcttcattgccaa

SEQ ID NO: 188076 - DNA, 25 bp, Artificial
  Probe
ccaatgtgcgtgcagtctttgttct

SEQ ID NO: 188077 - DNA, 25 bp, Artificial
  Probe
tgtacgtggcgtgtgacattcctga

SEQ ID NO: 188078 - DNA, 25 bp, Artificial
  Probe
tcattgccaatgtgcgtgcagtctt

SEQ ID NO: 188079 - DNA, 25 bp, Artificial
  Probe
atgtatggtgcttcattgccaatgt

SEQ ID NO: 188080 - DNA, 25 bp, Artificial
  Probe
ttctcctccgtgaaaaactgtgtcc

SEQ ID NO: 188081 - DNA, 25 bp, Artificial
  Probe
tatgtatggtgcttcattgccaatg

SEQ ID NO: 188082 - DNA, 25 bp, Artificial
  Probe
ctcctccgtgaaaaactgtgtccga

SEQ ID NO: 188083 - DNA, 25 bp, Artificial
  Probe
ctctcccgggacacggatgtacgtg

SEQ ID NO: 188084 - DNA, 25 bp, Artificial
  Probe
cagtctttgttctcctccgtgaaaa

SEQ ID NO: 188085 - DNA, 25 bp, Artificial
  Probe
ccgtgaaaaactgtgtccgaggaca

SEQ ID NO: 188086 - DNA, 25 bp, Artificial
  Probe
tgcttcattgccaatgtgcgtgcag

SEQ ID NO: 188087 - DNA, 25 bp, Artificial
  Probe
tgttctcctccgtgaaaaactgtgt

SEQ ID NO: 188088 - DNA, 25 bp, Artificial
  Probe
gtatggtgcttcattgccaatgtgc

SEQ ID NO: 188089 - DNA, 25 bp, Artificial
  Probe
aagccacaaatctgttctgttttcc

SEQ ID NO: 188090 - DNA, 25 bp, Artificial
  Probe
tgtacaagccacaaatctgttctgt

SEQ ID NO: 188091 - DNA, 25 bp, Artificial
  Probe
tgttttcctcaggtggactttgagc

SEQ ID NO: 188092 - DNA, 25 bp, Artificial
  Probe
aatctgttctgttttcctcaggtgg

SEQ ID NO: 188093 - DNA, 25 bp, Artificial
  Probe
tctgttctgttttcctcaggtggac

SEQ ID NO: 188094 - DNA, 25 bp, Artificial
  Probe
gccacaaatctgttctgttttcctc

SEQ ID NO: 188095 - DNA, 25 bp, Artificial
  Probe
aaatctgttctgttttcctcaggtg

SEQ ID NO: 188096 - DNA, 25 bp, Artificial
  Probe
caaatctgttctgttttcctcaggt

SEQ ID NO: 188097 - DNA, 25 bp, Artificial
  Probe
gttttcctcaggtggactttgagct

SEQ ID NO: 188098 - DNA, 25 bp, Artificial
  Probe
caagccacaaatctgttctgttttc

SEQ ID NO: 188099 - DNA, 25 bp, Artificial
  Probe
tctgttttcctcaggtggactttga

SEQ ID NO: 188100 - DNA, 25 bp, Artificial
  Probe
ctgttttcctcaggtggactttgag

SEQ ID NO: 188101 - DNA, 25 bp, Artificial
  Probe
gtacaagccacaaatctgttctgtt

SEQ ID NO: 188102 - DNA, 25 bp, Artificial
  Probe
tacaagccacaaatctgttctgttt

SEQ ID NO: 188103 - DNA, 25 bp, Artificial
  Probe
gttctgttttcctcaggtggacttt

SEQ ID NO: 188104 - DNA, 25 bp, Artificial
  Probe
tgttctgttttcctcaggtggactt

SEQ ID NO: 188105 - DNA, 25 bp, Artificial
  Probe
cacaaatctgttctgttttcctcag

SEQ ID NO: 188106 - DNA, 25 bp, Artificial
  Probe
atctgttctgttttcctcaggtgga

SEQ ID NO: 188107 - DNA, 25 bp, Artificial
  Probe
ccacaaatctgttctgttttcctca

SEQ ID NO: 188108 - DNA, 25 bp, Artificial
  Probe
ttctgttttcctcaggtggactttg

SEQ ID NO: 188109 - DNA, 25 bp, Artificial
  Probe
agccacaaatctgttctgttttcct

SEQ ID NO: 188110 - DNA, 25 bp, Artificial
  Probe
ctgttctgttttcctcaggtggact

SEQ ID NO: 188111 - DNA, 25 bp, Artificial
  Probe
ttttcctcaggtggactttgagctg

SEQ ID NO: 188112 - DNA, 25 bp, Artificial
  Probe
acaaatctgttctgttttcctcagg

SEQ ID NO: 188113 - DNA, 25 bp, Artificial
  Probe
acaagccacaaatctgttctgtttt

SEQ ID NO: 188114 - DNA, 25 bp, Artificial
  Probe
gcaaccaccaagtcctttcgttctg

SEQ ID NO: 188115 - DNA, 25 bp, Artificial
  Probe
acccaagaggagagaggctggttct

SEQ ID NO: 188116 - DNA, 25 bp, Artificial
  Probe
tcaccccttttctcttgagaacgcg

SEQ ID NO: 188117 - DNA, 25 bp, Artificial
  Probe
ccgctctcctttgtttatgcaaaag

SEQ ID NO: 188118 - DNA, 25 bp, Artificial
  Probe
gtttttaatctctgcgtgtgcatgt

SEQ ID NO: 188119 - DNA, 25 bp, Artificial
  Probe
tacctgacgacgtcccttgctctaa

SEQ ID NO: 188120 - DNA, 25 bp, Artificial
  Probe
gctctcctttgtttatgcaaaagcc

SEQ ID NO: 188121 - DNA, 25 bp, Artificial
  Probe
ccttcgcagtgacaagacttcccta

SEQ ID NO: 188122 - DNA, 25 bp, Artificial
  Probe
aaggtttttaatctctgcgtgtgca

SEQ ID NO: 188123 - DNA, 25 bp, Artificial
  Probe
ccttttctcttgagaacgcgccctg

SEQ ID NO: 188124 - DNA, 25 bp, Artificial
  Probe
tatgcaaaagcctccggagcgctgg

SEQ ID NO: 188125 - DNA, 25 bp, Artificial
  Probe
ctttgaggccgcagggctcaggtta

SEQ ID NO: 188126 - DNA, 25 bp, Artificial
  Probe
tcaacctcctaaacctggggctagg

SEQ ID NO: 188127 - DNA, 25 bp, Artificial
  Probe
gtgtctcctgattggctttgaggcc

SEQ ID NO: 188128 - DNA, 25 bp, Artificial
  Probe
gcatgttaccatactgggttggaat

SEQ ID NO: 188129 - DNA, 25 bp, Artificial
  Probe
tcctgattggctttgaggccgcagg

SEQ ID NO: 188130 - DNA, 25 bp, Artificial
  Probe
gaactgaacgttttagaagttccag

SEQ ID NO: 188131 - DNA, 25 bp, Artificial
  Probe
cccagcggagattaagccagaactg

SEQ ID NO: 188132 - DNA, 25 bp, Artificial
  Probe
gggagtgcccgacagcccctgaact

SEQ ID NO: 188133 - DNA, 25 bp, Artificial
  Probe
tgtcaccccttttctcttgagaacg

SEQ ID NO: 188134 - DNA, 25 bp, Artificial
  Probe
ctcctgattggctttgaggccgcag

SEQ ID NO: 188135 - DNA, 25 bp, Artificial
  Probe
tgctctaatgggaagtgaagtccta

SEQ ID NO: 188136 - DNA, 25 bp, Artificial
  Probe
aagttccagaggagagtcggatgcc

SEQ ID NO: 188137 - DNA, 25 bp, Artificial
  Probe
agtgtttttcatggttacctgacga

SEQ ID NO: 188138 - DNA, 25 bp, Artificial
  Probe
ggttacattcgcaagagttgcggag

SEQ ID NO: 188139 - DNA, 25 bp, Artificial
  Probe
aggccgcagggctcaggttacattc

SEQ ID NO: 188140 - DNA, 25 bp, Artificial
  Probe
taccatactgggttggaatgtgaac

SEQ ID NO: 188141 - DNA, 25 bp, Artificial
  Probe
ggagtgcccgacagcccctgaacta

SEQ ID NO: 188142 - DNA, 25 bp, Artificial
  Probe
acaagacttccctactgtgtttgtg

SEQ ID NO: 188143 - DNA, 25 bp, Artificial
  Probe
tttctcttgagaacgcgccctgaga

SEQ ID NO: 188144 - DNA, 25 bp, Artificial
  Probe
gctggctcccgcaggaggagtcttc

SEQ ID NO: 188145 - DNA, 25 bp, Artificial
  Probe
cccttgctctaatgggaagtgaagt

SEQ ID NO: 188146 - DNA, 25 bp, Artificial
  Probe
acattcgcaagagttgcggagcgcg

SEQ ID NO: 188147 - DNA, 25 bp, Artificial
  Probe
gccagaactgaacgttttagaagtt

SEQ ID NO: 188148 - DNA, 25 bp, Artificial
  Probe
cttccctactgtgtttgtgagcccc

SEQ ID NO: 188149 - DNA, 25 bp, Artificial
  Probe
tcctttgtttatgcaaaagcctccg

SEQ ID NO: 188150 - DNA, 25 bp, Artificial
  Probe
ggttctgcaccgattctgtgctggt

SEQ ID NO: 188151 - DNA, 25 bp, Artificial
  Probe
attctgtgctggtccgggagtgccc

SEQ ID NO: 188152 - DNA, 25 bp, Artificial
  Probe
agagaggctggttctgcaccgattc

SEQ ID NO: 188153 - DNA, 25 bp, Artificial
  Probe
agattaagccagaactgaacgtttt

SEQ ID NO: 188154 - DNA, 25 bp, Artificial
  Probe
tcctttcgttctgtgggcaacgaaa

SEQ ID NO: 188155 - DNA, 25 bp, Artificial
  Probe
ctcaacctcctaaacctggggctag

SEQ ID NO: 188156 - DNA, 25 bp, Artificial
  Probe
cgcaggaggagtcttccgcagccct

SEQ ID NO: 188157 - DNA, 25 bp, Artificial
  Probe
cggccccagcggagattaagccaga

SEQ ID NO: 188158 - DNA, 25 bp, Artificial
  Probe
ggctggttctgcaccgattctgtgc

SEQ ID NO: 188159 - DNA, 25 bp, Artificial
  Probe
agtgacaagacttccctactgtgtt

SEQ ID NO: 188160 - DNA, 25 bp, Artificial
  Probe
cgccattcaaggtcccaggaaactg

SEQ ID NO: 188161 - DNA, 25 bp, Artificial
  Probe
ttttcttcaacttggtagggcagtt

SEQ ID NO: 188162 - DNA, 25 bp, Artificial
  Probe
caaagtgtgagtccttactgtttga

SEQ ID NO: 188163 - DNA, 25 bp, Artificial
  Probe
acagttcttcaaagtgtgagtcctt

SEQ ID NO: 188164 - DNA, 25 bp, Artificial
  Probe
tgtttaagcatgatgtcagtgcagc

SEQ ID NO: 188165 - DNA, 25 bp, Artificial
  Probe
gctgtttacccaggaagaacaggaa

SEQ ID NO: 188166 - DNA, 25 bp, Artificial
  Probe
ttgaggttttattcccacaaatggt

SEQ ID NO: 188167 - DNA, 25 bp, Artificial
  Probe
tgccagcattttagccgaatttggg

SEQ ID NO: 188168 - DNA, 25 bp, Artificial
  Probe
caggtccatgggtcgtttgatgctg

SEQ ID NO: 188169 - DNA, 25 bp, Artificial
  Probe
cttcaacttggtagggcagttactt

SEQ ID NO: 188170 - DNA, 25 bp, Artificial
  Probe
aatggctgcttgcattttcctttta

SEQ ID NO: 188171 - DNA, 25 bp, Artificial
  Probe
tttagccgaatttggggagaactcg

SEQ ID NO: 188172 - DNA, 25 bp, Artificial
  Probe
ggagaactcgccattcaaggtccca

SEQ ID NO: 188173 - DNA, 25 bp, Artificial
  Probe
gccacatgctatttcctttacctgg

SEQ ID NO: 188174 - DNA, 25 bp, Artificial
  Probe
ttattatggttttgctctactcaga

SEQ ID NO: 188175 - DNA, 25 bp, Artificial
  Probe
tgctatttcctttacctgggaattt

SEQ ID NO: 188176 - DNA, 25 bp, Artificial
  Probe
ctcagagacacttgaggttggttat

SEQ ID NO: 188177 - DNA, 25 bp, Artificial
  Probe
atgtacttggcaagccacatgctat

SEQ ID NO: 188178 - DNA, 25 bp, Artificial
  Probe
tcccaggaaactggtgcaaatggat

SEQ ID NO: 188179 - DNA, 25 bp, Artificial
  Probe
ctaagattgccagcattttagccga

SEQ ID NO: 188180 - DNA, 25 bp, Artificial
  Probe
gctgcttgcattttccttttaaaga

SEQ ID NO: 188181 - DNA, 25 bp, Artificial
  Probe
aatttggggagaactcgccattcaa

SEQ ID NO: 188182 - DNA, 25 bp, Artificial
  Probe
ggttttattcccacaaatggtagct

SEQ ID NO: 188183 - DNA, 25 bp, Artificial
  Probe
ttttgaggttttattcccacaaatg

SEQ ID NO: 188184 - DNA, 25 bp, Artificial
  Probe
tgtcaggaggatgtacttggcaagc

SEQ ID NO: 188185 - DNA, 25 bp, Artificial
  Probe
agctgctaagattgccagcatttta

SEQ ID NO: 188186 - DNA, 25 bp, Artificial
  Probe
ctccaatgctgatcgcttgtgaaac

SEQ ID NO: 188187 - DNA, 25 bp, Artificial
  Probe
aatgctgatcgcttgtgaaactcag

SEQ ID NO: 188188 - DNA, 25 bp, Artificial
  Probe
tagggcagttacttttctctccaat

SEQ ID NO: 188189 - DNA, 25 bp, Artificial
  Probe
attcaaggtcccaggaaactggtgc

SEQ ID NO: 188190 - DNA, 25 bp, Artificial
  Probe
gtgtgagtccttactgtttgatttc

SEQ ID NO: 188191 - DNA, 25 bp, Artificial
  Probe
ggcaagccacatgctatttccttta

SEQ ID NO: 188192 - DNA, 25 bp, Artificial
  Probe
agccatcttgcctgctgtcaggagg

SEQ ID NO: 188193 - DNA, 25 bp, Artificial
  Probe
ttgatgctgtttacccaggaagaac

SEQ ID NO: 188194 - DNA, 25 bp, Artificial
  Probe
cttggtagggcagttacttttctct

SEQ ID NO: 188195 - DNA, 25 bp, Artificial
  Probe
aacacaggtaactggccaaggatgg

SEQ ID NO: 188196 - DNA, 25 bp, Artificial
  Probe
tttggggagaactcgccattcaagg

SEQ ID NO: 188197 - DNA, 25 bp, Artificial
  Probe
cttcaaagtgtgagtccttactgtt

SEQ ID NO: 188198 - DNA, 25 bp, Artificial
  Probe
gcagttacttttctctccaatgctg

SEQ ID NO: 188199 - DNA, 25 bp, Artificial
  Probe
atgaaatcacagttcttcaaagtgt

SEQ ID NO: 188200 - DNA, 25 bp, Artificial
  Probe
gatgtacttggcaagccacatgcta

SEQ ID NO: 188201 - DNA, 25 bp, Artificial
  Probe
ttttctctccaatgctgatcgcttg

SEQ ID NO: 188202 - DNA, 25 bp, Artificial
  Probe
acaacacaggtaactggccaaggat

SEQ ID NO: 188203 - DNA, 25 bp, Artificial
  Probe
gtcagtgcagccatcttgcctgctg

SEQ ID NO: 188204 - DNA, 25 bp, Artificial
  Probe
tttgcacaaagaagaggtgacacgt

SEQ ID NO: 188205 - DNA, 25 bp, Artificial
  Probe
tgtttacccaggaagaacaggaaga

SEQ ID NO: 188206 - DNA, 25 bp, Artificial
  Probe
aggcagacactgagtaattgttctt

SEQ ID NO: 188207 - DNA, 25 bp, Artificial
  Probe
accctgttggcctctggtggtaact

SEQ ID NO: 188208 - DNA, 25 bp, Artificial
  Probe
ttttgtccctactgggctcactcca

SEQ ID NO: 188209 - DNA, 25 bp, Artificial
  Probe
taagcacagcaatacatatgagtgt

SEQ ID NO: 188210 - DNA, 25 bp, Artificial
  Probe
gtccagattcaactccacaggacct

SEQ ID NO: 188211 - DNA, 25 bp, Artificial
  Probe
taccaggctgggtgcagacttccca

SEQ ID NO: 188212 - DNA, 25 bp, Artificial
  Probe
aaacccaccatagaatgctgatcag

SEQ ID NO: 188213 - DNA, 25 bp, Artificial
  Probe
aacttgtgttggtgtatgccatgac

SEQ ID NO: 188214 - DNA, 25 bp, Artificial
  Probe
ctgtttaaatagtcctttgcagagt

SEQ ID NO: 188215 - DNA, 25 bp, Artificial
  Probe
actgagtaattgttcttcagcctct

SEQ ID NO: 188216 - DNA, 25 bp, Artificial
  Probe
gccttaccaggctgggtgcagactt

SEQ ID NO: 188217 - DNA, 25 bp, Artificial
  Probe
tgggtgcagacttcccaagcctcac

SEQ ID NO: 188218 - DNA, 25 bp, Artificial
  Probe
tccagaacagccttaccaggctggg

SEQ ID NO: 188219 - DNA, 25 bp, Artificial
  Probe
tggagacacctgcacggctgcatcc

SEQ ID NO: 188220 - DNA, 25 bp, Artificial
  Probe
tcaatgtgggagtccagattcaact

SEQ ID NO: 188221 - DNA, 25 bp, Artificial
  Probe
ggagattctgcttcaaacccaccat

SEQ ID NO: 188222 - DNA, 25 bp, Artificial
  Probe
tgggagtccagattcaactccacag

SEQ ID NO: 188223 - DNA, 25 bp, Artificial
  Probe
aagggagattctgcttcaaacccac

SEQ ID NO: 188224 - DNA, 25 bp, Artificial
  Probe
cactgtttaaatagtcctttgcaga

SEQ ID NO: 188225 - DNA, 25 bp, Artificial
  Probe
tgttcttcagcctctcctcgttttg

SEQ ID NO: 188226 - DNA, 25 bp, Artificial
  Probe
ttggtgtatgccatgacaacactgt

SEQ ID NO: 188227 - DNA, 25 bp, Artificial
  Probe
ctccacagagggacaactcaatgtg

SEQ ID NO: 188228 - DNA, 25 bp, Artificial
  Probe
gcctctggtggtaacttgtgttggt

SEQ ID NO: 188229 - DNA, 25 bp, Artificial
  Probe
gtaaatgttccaagggagattctgc

SEQ ID NO: 188230 - DNA, 25 bp, Artificial
  Probe
cacagcaatacatatgagtgtaaaa

SEQ ID NO: 188231 - DNA, 25 bp, Artificial
  Probe
agagggacaactcaatgtgggagtc

SEQ ID NO: 188232 - DNA, 25 bp, Artificial
  Probe
ttgtgttggtgtatgccatgacaac

SEQ ID NO: 188233 - DNA, 25 bp, Artificial
  Probe
catcactcacggaggcagacactga

SEQ ID NO: 188234 - DNA, 25 bp, Artificial
  Probe
tagaatagtgctgttcacctaggag

SEQ ID NO: 188235 - DNA, 25 bp, Artificial
  Probe
ctctcctcgttttgtccctactggg

SEQ ID NO: 188236 - DNA, 25 bp, Artificial
  Probe
tctgactggacagagcagctctgga

SEQ ID NO: 188237 - DNA, 25 bp, Artificial
  Probe
gccatgacaacactgtttaaatagt

SEQ ID NO: 188238 - DNA, 25 bp, Artificial
  Probe
cccttccatagaatagtgctgttca

SEQ ID NO: 188239 - DNA, 25 bp, Artificial
  Probe
cagtcctgaccctgttggcctctgg

SEQ ID NO: 188240 - DNA, 25 bp, Artificial
  Probe
acctgcacggctgcatcccatgagg

SEQ ID NO: 188241 - DNA, 25 bp, Artificial
  Probe
agcctcacagtcctgaccctgttgg

SEQ ID NO: 188242 - DNA, 25 bp, Artificial
  Probe
agctctggacatcatcactgctggc

SEQ ID NO: 188243 - DNA, 25 bp, Artificial
  Probe
gtaattgttcttcagcctctcctcg

SEQ ID NO: 188244 - DNA, 25 bp, Artificial
  Probe
aagcctcacagtcctgaccctgttg

SEQ ID NO: 188245 - DNA, 25 bp, Artificial
  Probe
cacggaggcagacactgagtaattg

SEQ ID NO: 188246 - DNA, 25 bp, Artificial
  Probe
ttccatagaatagtgctgttcacct

SEQ ID NO: 188247 - DNA, 25 bp, Artificial
  Probe
tgaggtctgactggacagagcagct

SEQ ID NO: 188248 - DNA, 25 bp, Artificial
  Probe
ttgcctccagaacagccttaccagg

SEQ ID NO: 188249 - DNA, 25 bp, Artificial
  Probe
tcctgaccctgttggcctctggtgg

SEQ ID NO: 188250 - DNA, 25 bp, Artificial
  Probe
aatagtgctgttcacctaggaggag

SEQ ID NO: 188251 - DNA, 25 bp, Artificial
  Probe
agggggtatcaccttggagacacct

SEQ ID NO: 188252 - DNA, 25 bp, Artificial
  Probe
tgggctctagagtcgacctcaggca

SEQ ID NO: 188253 - DNA, 25 bp, Artificial
  Probe
cagcaaccgtagtgggctctagagt

SEQ ID NO: 188254 - DNA, 25 bp, Artificial
  Probe
agcagcaaccgtagtgggctctaga

SEQ ID NO: 188255 - DNA, 25 bp, Artificial
  Probe
caaccgtagtgggctctagagtcga

SEQ ID NO: 188256 - DNA, 25 bp, Artificial
  Probe
ctctagagtcgacctcaggcatgaa

SEQ ID NO: 188257 - DNA, 25 bp, Artificial
  Probe
tctagagtcgacctcaggcatgaag

SEQ ID NO: 188258 - DNA, 25 bp, Artificial
  Probe
gggctctagagtcgacctcaggcat

SEQ ID NO: 188259 - DNA, 25 bp, Artificial
  Probe
agtgggctctagagtcgacctcagg

SEQ ID NO: 188260 - DNA, 25 bp, Artificial
  Probe
aaccgtagtgggctctagagtcgac

SEQ ID NO: 188261 - DNA, 25 bp, Artificial
  Probe
cgtagtgggctctagagtcgacctc

SEQ ID NO: 188262 - DNA, 25 bp, Artificial
  Probe
gcaaccgtagtgggctctagagtcg

SEQ ID NO: 188263 - DNA, 25 bp, Artificial
  Probe
gtgggctctagagtcgacctcaggc

SEQ ID NO: 188264 - DNA, 25 bp, Artificial
  Probe
gtagtgggctctagagtcgacctca

SEQ ID NO: 188265 - DNA, 25 bp, Artificial
  Probe
gtcgacctcaggcatgaagcttgtc

SEQ ID NO: 188266 - DNA, 25 bp, Artificial
  Probe
gcagcaaccgtagtgggctctagag

SEQ ID NO: 188267 - DNA, 25 bp, Artificial
  Probe
ctagagtcgacctcaggcatgaagc

SEQ ID NO: 188268 - DNA, 25 bp, Artificial
  Probe
cagcagcaaccgtagtgggctctag

SEQ ID NO: 188269 - DNA, 25 bp, Artificial
  Probe
ggctctagagtcgacctcaggcatg

SEQ ID NO: 188270 - DNA, 25 bp, Artificial
  Probe
tcagcagcaaccgtagtgggctcta

SEQ ID NO: 188271 - DNA, 25 bp, Artificial
  Probe
gctctagagtcgacctcaggcatga

SEQ ID NO: 188272 - DNA, 25 bp, Artificial
  Probe
ccgtagtgggctctagagtcgacct

SEQ ID NO: 188273 - DNA, 25 bp, Artificial
  Probe
tagagtcgacctcaggcatgaagct

SEQ ID NO: 188274 - DNA, 25 bp, Artificial
  Probe
agcaaccgtagtgggctctagagtc

SEQ ID NO: 188275 - DNA, 25 bp, Artificial
  Probe
tagtgggctctagagtcgacctcag

SEQ ID NO: 188276 - DNA, 25 bp, Artificial
  Probe
agtcgacctcaggcatgaagcttgt

SEQ ID NO: 188277 - DNA, 25 bp, Artificial
  Probe
tcgacctcaggcatgaagcttgtct

SEQ ID NO: 188278 - DNA, 25 bp, Artificial
  Probe
accgtagtgggctctagagtcgacc

SEQ ID NO: 188279 - DNA, 25 bp, Artificial
  Probe
agagtcgacctcaggcatgaagctt

SEQ ID NO: 188280 - DNA, 25 bp, Artificial
  Probe
gagtcgacctcaggcatgaagcttg

SEQ ID NO: 188281 - DNA, 25 bp, Artificial
  Probe
ctttgagctgctggactacatagtg

SEQ ID NO: 188282 - DNA, 25 bp, Artificial
  Probe
ccccatcagtggtcatgggatggac

SEQ ID NO: 188283 - DNA, 25 bp, Artificial
  Probe
actagaggccagctttggccggcct

SEQ ID NO: 188284 - DNA, 25 bp, Artificial
  Probe
ccatcagtggtcatgggatggacag

SEQ ID NO: 188285 - DNA, 25 bp, Artificial
  Probe
atggagagccccatagtgtctcacc

SEQ ID NO: 188286 - DNA, 25 bp, Artificial
  Probe
acctgtgcctgtgcatttggaaaag

SEQ ID NO: 188287 - DNA, 25 bp, Artificial
  Probe
gccatggccatctttgagctgctgg

SEQ ID NO: 188288 - DNA, 25 bp, Artificial
  Probe
agagccccatagtgtctcaccgcgg

SEQ ID NO: 188289 - DNA, 25 bp, Artificial
  Probe
gacctgtgcctgtgcatttggaaaa

SEQ ID NO: 188290 - DNA, 25 bp, Artificial
  Probe
tagaggccagctttggccggcctgt

SEQ ID NO: 188291 - DNA, 25 bp, Artificial
  Probe
ctggacgccccatcagtggtcatgg

SEQ ID NO: 188292 - DNA, 25 bp, Artificial
  Probe
tgcctgtgcatttggaaaagcaaac

SEQ ID NO: 188293 - DNA, 25 bp, Artificial
  Probe
ggacctgtgcctgtgcatttggaaa

SEQ ID NO: 188294 - DNA, 25 bp, Artificial
  Probe
ctagaggccagctttggccggcctg

SEQ ID NO: 188295 - DNA, 25 bp, Artificial
  Probe
gacgccccatcagtggtcatgggat

SEQ ID NO: 188296 - DNA, 25 bp, Artificial
  Probe
gtcctgtggcacagcggccgccttt

SEQ ID NO: 188297 - DNA, 25 bp, Artificial
  Probe
tgatgccaaggaactagaggccagc

SEQ ID NO: 188298 - DNA, 25 bp, Artificial
  Probe
ctgtgcctgtgcatttggaaaagca

SEQ ID NO: 188299 - DNA, 25 bp, Artificial
  Probe
gccccatcagtggtcatgggatgga

SEQ ID NO: 188300 - DNA, 25 bp, Artificial
  Probe
cctgatgccaaggaactagaggcca

SEQ ID NO: 188301 - DNA, 25 bp, Artificial
  Probe
catcagtggtcatgggatggacagc

SEQ ID NO: 188302 - DNA, 25 bp, Artificial
  Probe
cctgtgcctgtgcatttggaaaagc

SEQ ID NO: 188303 - DNA, 25 bp, Artificial
  Probe
tgtcctgtggcacagcggccgcctt

SEQ ID NO: 188304 - DNA, 25 bp, Artificial
  Probe
ccagccatggccatctttgagctgc

SEQ ID NO: 188305 - DNA, 25 bp, Artificial
  Probe
cctggacgccccatcagtggtcatg

SEQ ID NO: 188306 - DNA, 25 bp, Artificial
  Probe
ctgatgccaaggaactagaggccag

SEQ ID NO: 188307 - DNA, 25 bp, Artificial
  Probe
catggccatctttgagctgctggac

SEQ ID NO: 188308 - DNA, 25 bp, Artificial
  Probe
tctttgagctgctggactacatagt

SEQ ID NO: 188309 - DNA, 25 bp, Artificial
  Probe
gagagccccatagtgtctcaccgcg

SEQ ID NO: 188310 - DNA, 25 bp, Artificial
  Probe
gcaggggacctgtgcctgtgcattt

SEQ ID NO: 188311 - DNA, 25 bp, Artificial
  Probe
tcatgggatggacagccgaccagcc

SEQ ID NO: 188312 - DNA, 25 bp, Artificial
  Probe
gccatctttgagctgctggactaca

SEQ ID NO: 188313 - DNA, 25 bp, Artificial
  Probe
gtgcctgtgcatttggaaaagcaaa

SEQ ID NO: 188314 - DNA, 25 bp, Artificial
  Probe
ggagagccccatagtgtctcaccgc

SEQ ID NO: 188315 - DNA, 25 bp, Artificial
  Probe
atctttgagctgctggactacatag

SEQ ID NO: 188316 - DNA, 25 bp, Artificial
  Probe
gtcatgggatggacagccgaccagc

SEQ ID NO: 188317 - DNA, 25 bp, Artificial
  Probe
cgccccatcagtggtcatgggatgg

SEQ ID NO: 188318 - DNA, 25 bp, Artificial
  Probe
gcctgtgcatttggaaaagcaaaca

SEQ ID NO: 188319 - DNA, 25 bp, Artificial
  Probe
catctttgagctgctggactacata

SEQ ID NO: 188320 - DNA, 25 bp, Artificial
  Probe
gatggacagccgaccagccatggcc

SEQ ID NO: 188321 - DNA, 25 bp, Artificial
  Probe
acagcggccgcctttggggacagca

SEQ ID NO: 188322 - DNA, 25 bp, Artificial
  Probe
tggccatctttgagctgctggacta

SEQ ID NO: 188323 - DNA, 25 bp, Artificial
  Probe
ggacgccccatcagtggtcatggga

SEQ ID NO: 188324 - DNA, 25 bp, Artificial
  Probe
gaactagaggccagctttggccggc

SEQ ID NO: 188325 - DNA, 25 bp, Artificial
  Probe
tggagagccccatagtgtctcaccg

SEQ ID NO: 188326 - DNA, 25 bp, Artificial
  Probe
gggacctgtgcctgtgcatttggaa

SEQ ID NO: 188327 - DNA, 25 bp, Artificial
  Probe
tgacctgctccttgcaggtgaccct

SEQ ID NO: 188328 - DNA, 25 bp, Artificial
  Probe
ttgtatgcctagaggaaatctgagc

SEQ ID NO: 188329 - DNA, 25 bp, Artificial
  Probe
aagaggcacagagtcaaggaatcag

SEQ ID NO: 188330 - DNA, 25 bp, Artificial
  Probe
taggaaccttacctggccctatact

SEQ ID NO: 188331 - DNA, 25 bp, Artificial
  Probe
ctattttgccccagggtaagaggca

SEQ ID NO: 188332 - DNA, 25 bp, Artificial
  Probe
ttctccctgctccagaggtgcaagt

SEQ ID NO: 188333 - DNA, 25 bp, Artificial
  Probe
tgcacagcccttaccttgcttgcag

SEQ ID NO: 188334 - DNA, 25 bp, Artificial
  Probe
cttgcttgcagtaggtgttagtcat

SEQ ID NO: 188335 - DNA, 25 bp, Artificial
  Probe
ctctcccagaaggaacccagtgatc

SEQ ID NO: 188336 - DNA, 25 bp, Artificial
  Probe
tgcaggtgaccctccaaccttattc

SEQ ID NO: 188337 - DNA, 25 bp, Artificial
  Probe
tctccaggtactactggggactgga

SEQ ID NO: 188338 - DNA, 25 bp, Artificial
  Probe
tggatgtaaccttgtaacctatagt

SEQ ID NO: 188339 - DNA, 25 bp, Artificial
  Probe
ttgctgcaagtaaggctggacctga

SEQ ID NO: 188340 - DNA, 25 bp, Artificial
  Probe
ctacttgttgtatgcctagaggaaa

SEQ ID NO: 188341 - DNA, 25 bp, Artificial
  Probe
agtctgggcgccagtgatcaaagtc

SEQ ID NO: 188342 - DNA, 25 bp, Artificial
  Probe
actgagatcttcttcctgttccaga

SEQ ID NO: 188343 - DNA, 25 bp, Artificial
  Probe
taagaggcacagagtcaaggaatca

SEQ ID NO: 188344 - DNA, 25 bp, Artificial
  Probe
aatcagttctgagaattccttagta

SEQ ID NO: 188345 - DNA, 25 bp, Artificial
  Probe
tcaaggaatcagttctgagaattcc

SEQ ID NO: 188346 - DNA, 25 bp, Artificial
  Probe
acctgaggggcacagctgtggctca

SEQ ID NO: 188347 - DNA, 25 bp, Artificial
  Probe
actgcagaccagcacttgcagtcct

SEQ ID NO: 188348 - DNA, 25 bp, Artificial
  Probe
gatcaaagtctgtccctgtcctctc

SEQ ID NO: 188349 - DNA, 25 bp, Artificial
  Probe
ctgtggctcacaaggcctgtgccta

SEQ ID NO: 188350 - DNA, 25 bp, Artificial
  Probe
ctgctcccacttgcttctgtgtcat

SEQ ID NO: 188351 - DNA, 25 bp, Artificial
  Probe
ggagagctgcacagcccttaccttg

SEQ ID NO: 188352 - DNA, 25 bp, Artificial
  Probe
ggcttgctgctcttgcttctccctg

SEQ ID NO: 188353 - DNA, 25 bp, Artificial
  Probe
ctctcccagtgtcctatgggtcgtg

SEQ ID NO: 188354 - DNA, 25 bp, Artificial
  Probe
agtgatcatgccaagatggcagggt

SEQ ID NO: 188355 - DNA, 25 bp, Artificial
  Probe
tcactgattgggtggcttgctgctc

SEQ ID NO: 188356 - DNA, 25 bp, Artificial
  Probe
aggaaccttacctggccctatactg

SEQ ID NO: 188357 - DNA, 25 bp, Artificial
  Probe
tgaggggcacagctgtggctcacaa

SEQ ID NO: 188358 - DNA, 25 bp, Artificial
  Probe
gtaacctatagtcagtcagtctctc

SEQ ID NO: 188359 - DNA, 25 bp, Artificial
  Probe
gccccagggtaagaggcacagagtc

SEQ ID NO: 188360 - DNA, 25 bp, Artificial
  Probe
aggaggtgagcctgcctgctcccac

SEQ ID NO: 188361 - DNA, 25 bp, Artificial
  Probe
gaagcctctattttgccccagggta

SEQ ID NO: 188362 - DNA, 25 bp, Artificial
  Probe
tccagaggtgcaagtctgggcgcca

SEQ ID NO: 188363 - DNA, 25 bp, Artificial
  Probe
cctgctgggtaggaaccttacctgg

SEQ ID NO: 188364 - DNA, 25 bp, Artificial
  Probe
ggtgggaagcctctattttgcccca

SEQ ID NO: 188365 - DNA, 25 bp, Artificial
  Probe
tgtgttcaatctacttgttgtatgc

SEQ ID NO: 188366 - DNA, 25 bp, Artificial
  Probe
aactgagatcttcttcctgttccag

SEQ ID NO: 188367 - DNA, 25 bp, Artificial
  Probe
cagctgtggctcacaaggcctgtgc

SEQ ID NO: 188368 - DNA, 25 bp, Artificial
  Probe
ctcccagtgtcctatgggtcgtggt

SEQ ID NO: 188369 - DNA, 25 bp, Artificial
  Probe
tctctctctctccaggtactactgg

SEQ ID NO: 188370 - DNA, 25 bp, Artificial
  Probe
gtcaaggaatcagttctgagaattc

SEQ ID NO: 188371 - DNA, 25 bp, Artificial
  Probe
agtagaagtgacctgctccttgcag

SEQ ID NO: 188372 - DNA, 25 bp, Artificial
  Probe
gtgttagtcatatgtgccatcactg

SEQ ID NO: 188373 - DNA, 25 bp, Artificial
  Probe
ttccaattgcagagcgtgccccaca

SEQ ID NO: 188374 - DNA, 25 bp, Artificial
  Probe
ggatcgaacctatgtttaacctcca

SEQ ID NO: 188375 - DNA, 25 bp, Artificial
  Probe
tgtgttttcatatggccacctgaaa

SEQ ID NO: 188376 - DNA, 25 bp, Artificial
  Probe
actcgctaagaatgactgtacggta

SEQ ID NO: 188377 - DNA, 25 bp, Artificial
  Probe
gtcaacctcataagacagagttcat

SEQ ID NO: 188378 - DNA, 25 bp, Artificial
  Probe
cggtacagccggattggactggcac

SEQ ID NO: 188379 - DNA, 25 bp, Artificial
  Probe
actgtacggtacagccggattggac

SEQ ID NO: 188380 - DNA, 25 bp, Artificial
  Probe
ttaggccatccgtccgtcgcatctt

SEQ ID NO: 188381 - DNA, 25 bp, Artificial
  Probe
aaatcaggttgagacgcatcgcaga

SEQ ID NO: 188382 - DNA, 25 bp, Artificial
  Probe
ctaagaatgactgtacggtacagcc

SEQ ID NO: 188383 - DNA, 25 bp, Artificial
  Probe
gagctaccagtttgcggtggcttca

SEQ ID NO: 188384 - DNA, 25 bp, Artificial
  Probe
tgacacttaaggaccttcaaaaaag

SEQ ID NO: 188385 - DNA, 25 bp, Artificial
  Probe
agctggactcggagtaaacattttg

SEQ ID NO: 188386 - DNA, 25 bp, Artificial
  Probe
gccatccgtccgtcgcatcttaaat

SEQ ID NO: 188387 - DNA, 25 bp, Artificial
  Probe
tgcccctgtcaacctcataagacag

SEQ ID NO: 188388 - DNA, 25 bp, Artificial
  Probe
cttaaattcggagttcattgggaca

SEQ ID NO: 188389 - DNA, 25 bp, Artificial
  Probe
gaccatgccatgacacacacacaag

SEQ ID NO: 188390 - DNA, 25 bp, Artificial
  Probe
tgtccattataatgacacttaagga

SEQ ID NO: 188391 - DNA, 25 bp, Artificial
  Probe
tcattgacatggttaaagctggact

SEQ ID NO: 188392 - DNA, 25 bp, Artificial
  Probe
tttcatatggccacctgaaagtcat

SEQ ID NO: 188393 - DNA, 25 bp, Artificial
  Probe
aatcaggttgagacgcatcgcagac

SEQ ID NO: 188394 - DNA, 25 bp, Artificial
  Probe
ctgtggtgatgctgggcatgttcac

SEQ ID NO: 188395 - DNA, 25 bp, Artificial
  Probe
ttgtccattataatgacacttaagg

SEQ ID NO: 188396 - DNA, 25 bp, Artificial
  Probe
gaccagctacatgctctttgtccat

SEQ ID NO: 188397 - DNA, 25 bp, Artificial
  Probe
tacccgccttcgtccaaaaatcagg

SEQ ID NO: 188398 - DNA, 25 bp, Artificial
  Probe
cgcatcttaaattcggagttcattg

SEQ ID NO: 188399 - DNA, 25 bp, Artificial
  Probe
tcctgacattgttaatcagaccatg

SEQ ID NO: 188400 - DNA, 25 bp, Artificial
  Probe
ttggactggcacacgcgaatcttcg

SEQ ID NO: 188401 - DNA, 25 bp, Artificial
  Probe
cctgaaagtcattgacatggttaaa

SEQ ID NO: 188402 - DNA, 25 bp, Artificial
  Probe
gatgctgggcatgttcacctggatc

SEQ ID NO: 188403 - DNA, 25 bp, Artificial
  Probe
cgtccaaaaatcaggttgagacgca

SEQ ID NO: 188404 - DNA, 25 bp, Artificial
  Probe
agccggattggactggcacacgcga

SEQ ID NO: 188405 - DNA, 25 bp, Artificial
  Probe
ttcaggactcgctaagaatgactgt

SEQ ID NO: 188406 - DNA, 25 bp, Artificial
  Probe
acattgttaatcagaccatgccatg

SEQ ID NO: 188407 - DNA, 25 bp, Artificial
  Probe
catggttaaagctggactcggagta

SEQ ID NO: 188408 - DNA, 25 bp, Artificial
  Probe
atgactgtacggtacagccggattg

SEQ ID NO: 188409 - DNA, 25 bp, Artificial
  Probe
accagtttgcggtggcttcaggact

SEQ ID NO: 188410 - DNA, 25 bp, Artificial
  Probe
ctggcacacgcgaatcttcgatgca

SEQ ID NO: 188411 - DNA, 25 bp, Artificial
  Probe
gttaatcagaccatgccatgacaca

SEQ ID NO: 188412 - DNA, 25 bp, Artificial
  Probe
aaagttaggccatccgtccgtcgca

SEQ ID NO: 188413 - DNA, 25 bp, Artificial
  Probe
gattggactggcacacgcgaatctt

SEQ ID NO: 188414 - DNA, 25 bp, Artificial
  Probe
acgaatatccctcctgggctcctga

SEQ ID NO: 188415 - DNA, 25 bp, Artificial
  Probe
gagacgcatcgcagaccagctacat

SEQ ID NO: 188416 - DNA, 25 bp, Artificial
  Probe
tccctcctgggctcctgacattgtt

SEQ ID NO: 188417 - DNA, 25 bp, Artificial
  Probe
gagttcattgggacatttcaaacat

SEQ ID NO: 188418 - DNA, 25 bp, Artificial
  Probe
attgacatggttaaagctggactcg

SEQ ID NO: 188419 - DNA, 25 bp, Artificial
  Probe
tcctgcacctaccagctggcgagag

SEQ ID NO: 188420 - DNA, 25 bp, Artificial
  Probe
cctgcacctaccagctggcgagagg

SEQ ID NO: 188421 - DNA, 25 bp, Artificial
  Probe
cttcaaggacttggtgtcctgcacc

SEQ ID NO: 188422 - DNA, 25 bp, Artificial
  Probe
acattaaccgagttcccgaggagca

SEQ ID NO: 188423 - DNA, 25 bp, Artificial
  Probe
gaccttcaaggacttggtgtcctgc

SEQ ID NO: 188424 - DNA, 25 bp, Artificial
  Probe
ttcccgaggagcagatgaccttcaa

SEQ ID NO: 188425 - DNA, 25 bp, Artificial
  Probe
aggcatggagtacttggcttcccaa

SEQ ID NO: 188426 - DNA, 25 bp, Artificial
  Probe
agcagatgaccttcaaggacttggt

SEQ ID NO: 188427 - DNA, 25 bp, Artificial
  Probe
tgaccttcaaggacttggtgtcctg

SEQ ID NO: 188428 - DNA, 25 bp, Artificial
  Probe
tcccgaggagcagatgaccttcaag

SEQ ID NO: 188429 - DNA, 25 bp, Artificial
  Probe
ccgagttcccgaggagcagatgacc

SEQ ID NO: 188430 - DNA, 25 bp, Artificial
  Probe
cgagttcccgaggagcagatgacct

SEQ ID NO: 188431 - DNA, 25 bp, Artificial
  Probe
ccaaaaatgtatccatcgagacttg

SEQ ID NO: 188432 - DNA, 25 bp, Artificial
  Probe
agatgaccttcaaggacttggtgtc

SEQ ID NO: 188433 - DNA, 25 bp, Artificial
  Probe
gttcccgaggagcagatgaccttca

SEQ ID NO: 188434 - DNA, 25 bp, Artificial
  Probe
agttcccgaggagcagatgaccttc

SEQ ID NO: 188435 - DNA, 25 bp, Artificial
  Probe
gtgtcctgcacctaccagctggcga

SEQ ID NO: 188436 - DNA, 25 bp, Artificial
  Probe
ggagtacttggcttcccaaaaatgt

SEQ ID NO: 188437 - DNA, 25 bp, Artificial
  Probe
aggagcagatgaccttcaaggactt

SEQ ID NO: 188438 - DNA, 25 bp, Artificial
  Probe
aatgtatccatcgagacttggcagc

SEQ ID NO: 188439 - DNA, 25 bp, Artificial
  Probe
cagatgaccttcaaggacttggtgt

SEQ ID NO: 188440 - DNA, 25 bp, Artificial
  Probe
gcagatgaccttcaaggacttggtg

SEQ ID NO: 188441 - DNA, 25 bp, Artificial
  Probe
ccttcaaggacttggtgtcctgcac

SEQ ID NO: 188442 - DNA, 25 bp, Artificial
  Probe
tcaaggacttggtgtcctgcaccta

SEQ ID NO: 188443 - DNA, 25 bp, Artificial
  Probe
accttcaaggacttggtgtcctgca

SEQ ID NO: 188444 - DNA, 25 bp, Artificial
  Probe
caaggacttggtgtcctgcacctac

SEQ ID NO: 188445 - DNA, 25 bp, Artificial
  Probe
ggagcagatgaccttcaaggacttg

SEQ ID NO: 188446 - DNA, 25 bp, Artificial
  Probe
tgtcctgcacctaccagctggcgag

SEQ ID NO: 188447 - DNA, 25 bp, Artificial
  Probe
accgagttcccgaggagcagatgac

SEQ ID NO: 188448 - DNA, 25 bp, Artificial
  Probe
tggcttcccaaaaatgtatccatcg

SEQ ID NO: 188449 - DNA, 25 bp, Artificial
  Probe
atgtatccatcgagacttggcagcc

SEQ ID NO: 188450 - DNA, 25 bp, Artificial
  Probe
aggacttggtgtcctgcacctacca

SEQ ID NO: 188451 - DNA, 25 bp, Artificial
  Probe
ggtgtcctgcacctaccagctggcg

SEQ ID NO: 188452 - DNA, 25 bp, Artificial
  Probe
cattaaccgagttcccgaggagcag

SEQ ID NO: 188453 - DNA, 25 bp, Artificial
  Probe
ggacttggtgtcctgcacctaccag

SEQ ID NO: 188454 - DNA, 25 bp, Artificial
  Probe
aaatgtatccatcgagacttggcag

SEQ ID NO: 188455 - DNA, 25 bp, Artificial
  Probe
gcttcccaaaaatgtatccatcgag

SEQ ID NO: 188456 - DNA, 25 bp, Artificial
  Probe
ggcttcccaaaaatgtatccatcga

SEQ ID NO: 188457 - DNA, 25 bp, Artificial
  Probe
gagttcccgaggagcagatgacctt

SEQ ID NO: 188458 - DNA, 25 bp, Artificial
  Probe
aaggacttggtgtcctgcacctacc

SEQ ID NO: 188459 - DNA, 25 bp, Artificial
  Probe
gatgaccttcaaggacttggtgtcc

SEQ ID NO: 188460 - DNA, 25 bp, Artificial
  Probe
ttggtgtcctgcacctaccagctgg

SEQ ID NO: 188461 - DNA, 25 bp, Artificial
  Probe
ctgcacctaccagctggcgagaggc

SEQ ID NO: 188462 - DNA, 25 bp, Artificial
  Probe
gcacctaccagctggcgagaggcat

SEQ ID NO: 188463 - DNA, 25 bp, Artificial
  Probe
gagtacttggcttcccaaaaatgta

SEQ ID NO: 188464 - DNA, 25 bp, Artificial
  Probe
gagcagatgaccttcaaggacttgg

SEQ ID NO: 188465 - DNA, 25 bp, Artificial
  Probe
gaggagttctgtgatccacgcaacc

SEQ ID NO: 188466 - DNA, 25 bp, Artificial
  Probe
gaagctggctttcgtaactagtggg

SEQ ID NO: 188467 - DNA, 25 bp, Artificial
  Probe
cgtgcaaatgcaagcgtacttaagg

SEQ ID NO: 188468 - DNA, 25 bp, Artificial
  Probe
actaatcttccaaagaaagagctga

SEQ ID NO: 188469 - DNA, 25 bp, Artificial
  Probe
tatcgcgcgtgcaaatgcaagcgta

SEQ ID NO: 188470 - DNA, 25 bp, Artificial
  Probe
cactaatcttccaaagaaagagctg

SEQ ID NO: 188471 - DNA, 25 bp, Artificial
  Probe
ctgaagctggctttcgtaactagtg

SEQ ID NO: 188472 - DNA, 25 bp, Artificial
  Probe
agttctgtgatccacgcaaccactt

SEQ ID NO: 188473 - DNA, 25 bp, Artificial
  Probe
agtatcgcgcgtgcaaatgcaagcg

SEQ ID NO: 188474 - DNA, 25 bp, Artificial
  Probe
gtgatccacgcaaccactttaaaag

SEQ ID NO: 188475 - DNA, 25 bp, Artificial
  Probe
gctgaagctggctttcgtaactagt

SEQ ID NO: 188476 - DNA, 25 bp, Artificial
  Probe
ggcttgaggagttctgtgatccacg

SEQ ID NO: 188477 - DNA, 25 bp, Artificial
  Probe
tgatccacgcaaccactttaaaagg

SEQ ID NO: 188478 - DNA, 25 bp, Artificial
  Probe
aatgcaagcgtacttaagggcaacc

SEQ ID NO: 188479 - DNA, 25 bp, Artificial
  Probe
atcttccaaagaaagagctgaagct

SEQ ID NO: 188480 - DNA, 25 bp, Artificial
  Probe
aggagttctgtgatccacgcaacca

SEQ ID NO: 188481 - DNA, 25 bp, Artificial
  Probe
gggcttgaggagttctgtgatccac

SEQ ID NO: 188482 - DNA, 25 bp, Artificial
  Probe
gcaagcgtacttaagggcaaccctt

SEQ ID NO: 188483 - DNA, 25 bp, Artificial
  Probe
agagccactaatcttccaaagaaag

SEQ ID NO: 188484 - DNA, 25 bp, Artificial
  Probe
gccactaatcttccaaagaaagagc

SEQ ID NO: 188485 - DNA, 25 bp, Artificial
  Probe
atgcaagcgtacttaagggcaaccc

SEQ ID NO: 188486 - DNA, 25 bp, Artificial
  Probe
gctggctttcgtaactagtgggttt

SEQ ID NO: 188487 - DNA, 25 bp, Artificial
  Probe
gcgcgtgcaaatgcaagcgtactta

SEQ ID NO: 188488 - DNA, 25 bp, Artificial
  Probe
gatccacgcaaccactttaaaaggc

SEQ ID NO: 188489 - DNA, 25 bp, Artificial
  Probe
gagccactaatcttccaaagaaaga

SEQ ID NO: 188490 - DNA, 25 bp, Artificial
  Probe
gtatcgcgcgtgcaaatgcaagcgt

SEQ ID NO: 188491 - DNA, 25 bp, Artificial
  Probe
atcgcgcgtgcaaatgcaagcgtac

SEQ ID NO: 188492 - DNA, 25 bp, Artificial
  Probe
aagctggctttcgtaactagtgggt

SEQ ID NO: 188493 - DNA, 25 bp, Artificial
  Probe
tcttccaaagaaagagctgaagctg

SEQ ID NO: 188494 - DNA, 25 bp, Artificial
  Probe
caaatgcaagcgtacttaagggcaa

SEQ ID NO: 188495 - DNA, 25 bp, Artificial
  Probe
aaatgcaagcgtacttaagggcaac

SEQ ID NO: 188496 - DNA, 25 bp, Artificial
  Probe
taatcttccaaagaaagagctgaag

SEQ ID NO: 188497 - DNA, 25 bp, Artificial
  Probe
gttctgtgatccacgcaaccacttt

SEQ ID NO: 188498 - DNA, 25 bp, Artificial
  Probe
tcgcgcgtgcaaatgcaagcgtact

SEQ ID NO: 188499 - DNA, 25 bp, Artificial
  Probe
gagtatcgcgcgtgcaaatgcaagc

SEQ ID NO: 188500 - DNA, 25 bp, Artificial
  Probe
tgcaagcgtacttaagggcaaccct

SEQ ID NO: 188501 - DNA, 25 bp, Artificial
  Probe
ctaatcttccaaagaaagagctgaa

SEQ ID NO: 188502 - DNA, 25 bp, Artificial
  Probe
aagagctgaagctggctttcgtaac

SEQ ID NO: 188503 - DNA, 25 bp, Artificial
  Probe
agggcttgaggagttctgtgatcca

SEQ ID NO: 188504 - DNA, 25 bp, Artificial
  Probe
ttgaggagttctgtgatccacgcaa

SEQ ID NO: 188505 - DNA, 25 bp, Artificial
  Probe
gagttctgtgatccacgcaaccact

SEQ ID NO: 188506 - DNA, 25 bp, Artificial
  Probe
aatcttccaaagaaagagctgaagc

SEQ ID NO: 188507 - DNA, 25 bp, Artificial
  Probe
tgaagctggctttcgtaactagtgg

SEQ ID NO: 188508 - DNA, 25 bp, Artificial
  Probe
agctggctttcgtaactagtgggtt

SEQ ID NO: 188509 - DNA, 25 bp, Artificial
  Probe
cgcgcgtgcaaatgcaagcgtactt

SEQ ID NO: 188510 - DNA, 25 bp, Artificial
  Probe
cgcgtgcaaatgcaagcgtacttaa

SEQ ID NO: 188511 - DNA, 25 bp, Artificial
  Probe
aactttgcggaatggcccgtccttg

SEQ ID NO: 188512 - DNA, 25 bp, Artificial
  Probe
ccacaccattgctgagtcctgcttt

SEQ ID NO: 188513 - DNA, 25 bp, Artificial
  Probe
tgtgctgaaacaaaccaatgcacat

SEQ ID NO: 188514 - DNA, 25 bp, Artificial
  Probe
tctgtttcctattggtgaagcactc

SEQ ID NO: 188515 - DNA, 25 bp, Artificial
  Probe
acttcagtagataggtgagctgaca

SEQ ID NO: 188516 - DNA, 25 bp, Artificial
  Probe
ctggggtctcgttcccactgaccta

SEQ ID NO: 188517 - DNA, 25 bp, Artificial
  Probe
gtgactcactcactagtaagcattt

SEQ ID NO: 188518 - DNA, 25 bp, Artificial
  Probe
agagagctccagagcctgcatttaa

SEQ ID NO: 188519 - DNA, 25 bp, Artificial
  Probe
actgccaagaagtgaaagggcttca

SEQ ID NO: 188520 - DNA, 25 bp, Artificial
  Probe
tcccataaggagtggccaatgagag

SEQ ID NO: 188521 - DNA, 25 bp, Artificial
  Probe
gagctcgttctcattttctgtttcc

SEQ ID NO: 188522 - DNA, 25 bp, Artificial
  Probe
ggaaagattctcctggggtctcgtt

SEQ ID NO: 188523 - DNA, 25 bp, Artificial
  Probe
attctcctggggtctcgttcccact

SEQ ID NO: 188524 - DNA, 25 bp, Artificial
  Probe
tggatagctgatctgggcttcttgg

SEQ ID NO: 188525 - DNA, 25 bp, Artificial
  Probe
gcatttaaacttctgggcttctctt

SEQ ID NO: 188526 - DNA, 25 bp, Artificial
  Probe
ggtctcgttcccactgacctagttc

SEQ ID NO: 188527 - DNA, 25 bp, Artificial
  Probe
gtgctggatagctgatctgggcttc

SEQ ID NO: 188528 - DNA, 25 bp, Artificial
  Probe
cttctgggcttctcttcttccattg

SEQ ID NO: 188529 - DNA, 25 bp, Artificial
  Probe
taaactttgcggaatggcccgtcct

SEQ ID NO: 188530 - DNA, 25 bp, Artificial
  Probe
tgacaagagggcttgagctcgttct

SEQ ID NO: 188531 - DNA, 25 bp, Artificial
  Probe
gtactcatgtaaactttgcggaatg

SEQ ID NO: 188532 - DNA, 25 bp, Artificial
  Probe
tcatgtaaactttgcggaatggccc

SEQ ID NO: 188533 - DNA, 25 bp, Artificial
  Probe
cttgttctccagaggtttggggagt

SEQ ID NO: 188534 - DNA, 25 bp, Artificial
  Probe
acgagctccagagaggaccctgggc

SEQ ID NO: 188535 - DNA, 25 bp, Artificial
  Probe
ttcctgcagagatgagctctctggc

SEQ ID NO: 188536 - DNA, 25 bp, Artificial
  Probe
gacttcagtagataggtgagctgac

SEQ ID NO: 188537 - DNA, 25 bp, Artificial
  Probe
tagtgccatgtttccatggagactt

SEQ ID NO: 188538 - DNA, 25 bp, Artificial
  Probe
ggagacttcactcaagtgttaattg

SEQ ID NO: 188539 - DNA, 25 bp, Artificial
  Probe
caccctctgcctttatccgatgatg

SEQ ID NO: 188540 - DNA, 25 bp, Artificial
  Probe
cggaatggcccgtccttggtgcttc

SEQ ID NO: 188541 - DNA, 25 bp, Artificial
  Probe
ctttgtggtgctggatagctgatct

SEQ ID NO: 188542 - DNA, 25 bp, Artificial
  Probe
gagactttggggttccgaatcccat

SEQ ID NO: 188543 - DNA, 25 bp, Artificial
  Probe
gagctctctggcattggggtgactt

SEQ ID NO: 188544 - DNA, 25 bp, Artificial
  Probe
acatcccacatactgccaagaagtg

SEQ ID NO: 188545 - DNA, 25 bp, Artificial
  Probe
tagtaagcattttcatttcctgcag

SEQ ID NO: 188546 - DNA, 25 bp, Artificial
  Probe
ttaccctggaaagagagctccagag

SEQ ID NO: 188547 - DNA, 25 bp, Artificial
  Probe
gggcttctcttcttccattgccttt

SEQ ID NO: 188548 - DNA, 25 bp, Artificial
  Probe
aaagggcttcaggaagacgagctcc

SEQ ID NO: 188549 - DNA, 25 bp, Artificial
  Probe
tccgatgatgtactcatgtaaactt

SEQ ID NO: 188550 - DNA, 25 bp, Artificial
  Probe
ctggcattggggtgacttcagtaga

SEQ ID NO: 188551 - DNA, 25 bp, Artificial
  Probe
cagagatgagctctctggcattggg

SEQ ID NO: 188552 - DNA, 25 bp, Artificial
  Probe
gctgatctgggcttcttgggaagtc

SEQ ID NO: 188553 - DNA, 25 bp, Artificial
  Probe
ctcctccatcagacatgagcttgca

SEQ ID NO: 188554 - DNA, 25 bp, Artificial
  Probe
gcctttctaagcagtggctcttttt

SEQ ID NO: 188555 - DNA, 25 bp, Artificial
  Probe
tcttccattgcctttctaagcagtg

SEQ ID NO: 188556 - DNA, 25 bp, Artificial
  Probe
ttggggttccgaatcccataaggag

SEQ ID NO: 188557 - DNA, 25 bp, Artificial
  Probe
gctctgtgctctcggccgacagtgc

SEQ ID NO: 188558 - DNA, 25 bp, Artificial
  Probe
agcaaggccagacggggtgtgctct

SEQ ID NO: 188559 - DNA, 25 bp, Artificial
  Probe
agacggggtgtgctctgtgctctcg

SEQ ID NO: 188560 - DNA, 25 bp, Artificial
  Probe
cggggtgtgctctgtgctctcggcc

SEQ ID NO: 188561 - DNA, 25 bp, Artificial
  Probe
aaggccagacggggtgtgctctgtg

SEQ ID NO: 188562 - DNA, 25 bp, Artificial
  Probe
agagcaaggccagacggggtgtgct

SEQ ID NO: 188563 - DNA, 25 bp, Artificial
  Probe
cagagcaaggccagacggggtgtgc

SEQ ID NO: 188564 - DNA, 25 bp, Artificial
  Probe
ggggtgtgctctgtgctctcggccg

SEQ ID NO: 188565 - DNA, 25 bp, Artificial
  Probe
acggggtgtgctctgtgctctcggc

SEQ ID NO: 188566 - DNA, 25 bp, Artificial
  Probe
gggtgtgctctgtgctctcggccga

SEQ ID NO: 188567 - DNA, 25 bp, Artificial
  Probe
ggccagacggggtgtgctctgtgct

SEQ ID NO: 188568 - DNA, 25 bp, Artificial
  Probe
ctgtgctctcggccgacagtgctga

SEQ ID NO: 188569 - DNA, 25 bp, Artificial
  Probe
ggtgtgctctgtgctctcggccgac

SEQ ID NO: 188570 - DNA, 25 bp, Artificial
  Probe
caaggccagacggggtgtgctctgt

SEQ ID NO: 188571 - DNA, 25 bp, Artificial
  Probe
ccagagcaaggccagacggggtgtg

SEQ ID NO: 188572 - DNA, 25 bp, Artificial
  Probe
gacggggtgtgctctgtgctctcgg

SEQ ID NO: 188573 - DNA, 25 bp, Artificial
  Probe
accagagcaaggccagacggggtgt

SEQ ID NO: 188574 - DNA, 25 bp, Artificial
  Probe
gtgctctgtgctctcggccgacagt

SEQ ID NO: 188575 - DNA, 25 bp, Artificial
  Probe
tctgtgctctcggccgacagtgctg

SEQ ID NO: 188576 - DNA, 25 bp, Artificial
  Probe
gtgtgctctgtgctctcggccgaca

SEQ ID NO: 188577 - DNA, 25 bp, Artificial
  Probe
ctctgtgctctcggccgacagtgct

SEQ ID NO: 188578 - DNA, 25 bp, Artificial
  Probe
cagacggggtgtgctctgtgctctc

SEQ ID NO: 188579 - DNA, 25 bp, Artificial
  Probe
tgctctgtgctctcggccgacagtg

SEQ ID NO: 188580 - DNA, 25 bp, Artificial
  Probe
gagcaaggccagacggggtgtgctc

SEQ ID NO: 188581 - DNA, 25 bp, Artificial
  Probe
aggccagacggggtgtgctctgtgc

SEQ ID NO: 188582 - DNA, 25 bp, Artificial
  Probe
ccagacggggtgtgctctgtgctct

SEQ ID NO: 188583 - DNA, 25 bp, Artificial
  Probe
gcaaggccagacggggtgtgctctg

SEQ ID NO: 188584 - DNA, 25 bp, Artificial
  Probe
gccagacggggtgtgctctgtgctc

SEQ ID NO: 188585 - DNA, 25 bp, Artificial
  Probe
tgtgctctgtgctctcggccgacag

SEQ ID NO: 188586 - DNA, 25 bp, Artificial
  Probe
actttcagtgactatgacatggcct

SEQ ID NO: 188587 - DNA, 25 bp, Artificial
  Probe
cagctcagactcatgccccggagaa

SEQ ID NO: 188588 - DNA, 25 bp, Artificial
  Probe
gtcacagtctcctcagctgaaacaa

SEQ ID NO: 188589 - DNA, 25 bp, Artificial
  Probe
cagtctcctcagctgaaacaacagc

SEQ ID NO: 188590 - DNA, 25 bp, Artificial
  Probe
tcccaatacctgcaaatggacagtc

SEQ ID NO: 188591 - DNA, 25 bp, Artificial
  Probe
tcagtgactatgacatggcctgggt

SEQ ID NO: 188592 - DNA, 25 bp, Artificial
  Probe
gtggtggttacactttctatcgcga

SEQ ID NO: 188593 - DNA, 25 bp, Artificial
  Probe
gttacactttctatcgcgactccgt

SEQ ID NO: 188594 - DNA, 25 bp, Artificial
  Probe
acagtctcctcagctgaaacaacag

SEQ ID NO: 188595 - DNA, 25 bp, Artificial
  Probe
actcccaatacctgcaaatggacag

SEQ ID NO: 188596 - DNA, 25 bp, Artificial
  Probe
atctacggagggtcccactactttg

SEQ ID NO: 188597 - DNA, 25 bp, Artificial
  Probe
gggaatgcaatccttgtggatgtac

SEQ ID NO: 188598 - DNA, 25 bp, Artificial
  Probe
tggaaggtccctgagactctcctgt

SEQ ID NO: 188599 - DNA, 25 bp, Artificial
  Probe
tactgtgcaagaatctacggagggt

SEQ ID NO: 188600 - DNA, 25 bp, Artificial
  Probe
agtggatcgcatccattactactgg

SEQ ID NO: 188601 - DNA, 25 bp, Artificial
  Probe
actgtgcaagaatctacggagggtc

SEQ ID NO: 188602 - DNA, 25 bp, Artificial
  Probe
cttattactgtgcaagaatctacgg

SEQ ID NO: 188603 - DNA, 25 bp, Artificial
  Probe
gtgcaagaatctacggagggtccca

SEQ ID NO: 188604 - DNA, 25 bp, Artificial
  Probe
ctgtgcaagaatctacggagggtcc

SEQ ID NO: 188605 - DNA, 25 bp, Artificial
  Probe
tggatcgcatccattactactggtg

SEQ ID NO: 188606 - DNA, 25 bp, Artificial
  Probe
cagctgaaacaacagccccatctgt

SEQ ID NO: 188607 - DNA, 25 bp, Artificial
  Probe
ttctatcgcgactccgtgaagggcc

SEQ ID NO: 188608 - DNA, 25 bp, Artificial
  Probe
tggttacactttctatcgcgactcc

SEQ ID NO: 188609 - DNA, 25 bp, Artificial
  Probe
ggtggttacactttctatcgcgact

SEQ ID NO: 188610 - DNA, 25 bp, Artificial
  Probe
ttacactttctatcgcgactccgtg

SEQ ID NO: 188611 - DNA, 25 bp, Artificial
  Probe
tccaacgaagggtctggagtggatc

SEQ ID NO: 188612 - DNA, 25 bp, Artificial
  Probe
aaggtccctgagactctcctgtgca

SEQ ID NO: 188613 - DNA, 25 bp, Artificial
  Probe
gtgactatgacatggcctgggtccg

SEQ ID NO: 188614 - DNA, 25 bp, Artificial
  Probe
ggagggtcccactactttgattact

SEQ ID NO: 188615 - DNA, 25 bp, Artificial
  Probe
tcagctgaaacaacagccccatctg

SEQ ID NO: 188616 - DNA, 25 bp, Artificial
  Probe
gagtggatcgcatccattactactg

SEQ ID NO: 188617 - DNA, 25 bp, Artificial
  Probe
ctttctatcgcgactccgtgaaggg

SEQ ID NO: 188618 - DNA, 25 bp, Artificial
  Probe
tatgacatggcctgggtccgccagg

SEQ ID NO: 188619 - DNA, 25 bp, Artificial
  Probe
tttcagtgactatgacatggcctgg

SEQ ID NO: 188620 - DNA, 25 bp, Artificial
  Probe
gatcgcatccattactactggtggt

SEQ ID NO: 188621 - DNA, 25 bp, Artificial
  Probe
ttactgtgcaagaatctacggaggg

SEQ ID NO: 188622 - DNA, 25 bp, Artificial
  Probe
acttattactgtgcaagaatctacg

SEQ ID NO: 188623 - DNA, 25 bp, Artificial
  Probe
gaaggtccctgagactctcctgtgc

SEQ ID NO: 188624 - DNA, 25 bp, Artificial
  Probe
ctcccaatacctgcaaatggacagt

SEQ ID NO: 188625 - DNA, 25 bp, Artificial
  Probe
agtgactatgacatggcctgggtcc

SEQ ID NO: 188626 - DNA, 25 bp, Artificial
  Probe
ggttacactttctatcgcgactccg

SEQ ID NO: 188627 - DNA, 25 bp, Artificial
  Probe
agtctcctcagctgaaacaacagcc

SEQ ID NO: 188628 - DNA, 25 bp, Artificial
  Probe
ggaatgcaatccttgtggatgtaca

SEQ ID NO: 188629 - DNA, 25 bp, Artificial
  Probe
ttcagtgactatgacatggcctggg

SEQ ID NO: 188630 - DNA, 25 bp, Artificial
  Probe
ggagtggatcgcatccattactact

SEQ ID NO: 188631 - DNA, 25 bp, Artificial
  Probe
tgtgcaagaatctacggagggtccc

SEQ ID NO: 188632 - DNA, 25 bp, Artificial
  Probe
gtcatctcattgctctttcctgaag

SEQ ID NO: 188633 - DNA, 25 bp, Artificial
  Probe
gccacatgaaagtcatctcattgct

SEQ ID NO: 188634 - DNA, 25 bp, Artificial
  Probe
cggtctgtgaaggttttcagctttg

SEQ ID NO: 188635 - DNA, 25 bp, Artificial
  Probe
tagccaaacaacagggttctaggaa

SEQ ID NO: 188636 - DNA, 25 bp, Artificial
  Probe
gaaacacaggaatgggcctgcctta

SEQ ID NO: 188637 - DNA, 25 bp, Artificial
  Probe
caacagggttctaggaagttagcca

SEQ ID NO: 188638 - DNA, 25 bp, Artificial
  Probe
cagagcccaggcagactccactgtg

SEQ ID NO: 188639 - DNA, 25 bp, Artificial
  Probe
ggcgaaatcttcaatagcttatctt

SEQ ID NO: 188640 - DNA, 25 bp, Artificial
  Probe
gttttgactttttccgtccgatgtg

SEQ ID NO: 188641 - DNA, 25 bp, Artificial
  Probe
gcatgttaggccagcgtgctaccgt

SEQ ID NO: 188642 - DNA, 25 bp, Artificial
  Probe
ccattccggtctgtgaaggttttca

SEQ ID NO: 188643 - DNA, 25 bp, Artificial
  Probe
ccctttcccaactgctcagaaatgg

SEQ ID NO: 188644 - DNA, 25 bp, Artificial
  Probe
gctctgtaccaagtcttagccaaac

SEQ ID NO: 188645 - DNA, 25 bp, Artificial
  Probe
gagagccagcagagcccaggcagac

SEQ ID NO: 188646 - DNA, 25 bp, Artificial
  Probe
tgccactgatttagccacatgaaag

SEQ ID NO: 188647 - DNA, 25 bp, Artificial
  Probe
ttactgagagccagcagagcccagg

SEQ ID NO: 188648 - DNA, 25 bp, Artificial
  Probe
gatttagccacatgaaagtcatctc

SEQ ID NO: 188649 - DNA, 25 bp, Artificial
  Probe
cttgtgcatgttaggccagcgtgct

SEQ ID NO: 188650 - DNA, 25 bp, Artificial
  Probe
tcatgctgccccttagtgttgtggt

SEQ ID NO: 188651 - DNA, 25 bp, Artificial
  Probe
ctctccatggaggagaaacacagga

SEQ ID NO: 188652 - DNA, 25 bp, Artificial
  Probe
gccttgtgcatgttaggccagcgtg

SEQ ID NO: 188653 - DNA, 25 bp, Artificial
  Probe
ctttgtgctttgtatctgtcagtgc

SEQ ID NO: 188654 - DNA, 25 bp, Artificial
  Probe
tgactttttccgtccgatgtgacca

SEQ ID NO: 188655 - DNA, 25 bp, Artificial
  Probe
ctgatttagccacatgaaagtcatc

SEQ ID NO: 188656 - DNA, 25 bp, Artificial
  Probe
tgccttactgagagccagcagagcc

SEQ ID NO: 188657 - DNA, 25 bp, Artificial
  Probe
gtgttgtggtgacctcttagtgttc

SEQ ID NO: 188658 - DNA, 25 bp, Artificial
  Probe
tcagtgctggcgaaatcttcaatag

SEQ ID NO: 188659 - DNA, 25 bp, Artificial
  Probe
aatggatcatgctgccccttagtgt

SEQ ID NO: 188660 - DNA, 25 bp, Artificial
  Probe
caggaatgggcctgccttactgaga

SEQ ID NO: 188661 - DNA, 25 bp, Artificial
  Probe
ccgatgtgaccaaataggagagtga

SEQ ID NO: 188662 - DNA, 25 bp, Artificial
  Probe
ctgagcccgaacttgtctcagctct

SEQ ID NO: 188663 - DNA, 25 bp, Artificial
  Probe
gccatctctttgtgctttgtatctg

SEQ ID NO: 188664 - DNA, 25 bp, Artificial
  Probe
cctcccagggccttgtgcatgttag

SEQ ID NO: 188665 - DNA, 25 bp, Artificial
  Probe
tagttttgactttttccgtccgatg

SEQ ID NO: 188666 - DNA, 25 bp, Artificial
  Probe
gttttcagctttgatatctttgaac

SEQ ID NO: 188667 - DNA, 25 bp, Artificial
  Probe
ttaggccagcgtgctaccgttaccc

SEQ ID NO: 188668 - DNA, 25 bp, Artificial
  Probe
gttaggccagcgtgctaccgttacc

SEQ ID NO: 188669 - DNA, 25 bp, Artificial
  Probe
ctcagaaatggatcatgctgcccct

SEQ ID NO: 188670 - DNA, 25 bp, Artificial
  Probe
caagtcttagccaaacaacagggtt

SEQ ID NO: 188671 - DNA, 25 bp, Artificial
  Probe
tatgtttgtgccactgatttagcca

SEQ ID NO: 188672 - DNA, 25 bp, Artificial
  Probe
gagcccgaacttgtctcagctctac

SEQ ID NO: 188673 - DNA, 25 bp, Artificial
  Probe
gtctctccatggaggagaaacacag

SEQ ID NO: 188674 - DNA, 25 bp, Artificial
  Probe
gtgacctcttagtgttcacctgccc

SEQ ID NO: 188675 - DNA, 25 bp, Artificial
  Probe
gtaccaagtcttagccaaacaacag

SEQ ID NO: 188676 - DNA, 25 bp, Artificial
  Probe
gatactgtctctccatggaggagaa

SEQ ID NO: 188677 - DNA, 25 bp, Artificial
  Probe
atctgtcagtgctggcgaaatcttc

SEQ ID NO: 188678 - DNA, 25 bp, Artificial
  Probe
cgtattcgacgttaaagcctgagac

SEQ ID NO: 188679 - DNA, 25 bp, Artificial
  Probe
ctgttaagtcgaagggagctcgatt

SEQ ID NO: 188680 - DNA, 25 bp, Artificial
  Probe
tccttctgttaagtcgaagggagct

SEQ ID NO: 188681 - DNA, 25 bp, Artificial
  Probe
gttaaagcctgagactaattctgat

SEQ ID NO: 188682 - DNA, 25 bp, Artificial
  Probe
gcggcgtattcgacgttaaagcctg

SEQ ID NO: 188683 - DNA, 25 bp, Artificial
  Probe
cgaagggagctcgatttgtttctgc

SEQ ID NO: 188684 - DNA, 25 bp, Artificial
  Probe
tttctagggagaaggagccgcttat

SEQ ID NO: 188685 - DNA, 25 bp, Artificial
  Probe
tctgattctccttctgttaagtcga

SEQ ID NO: 188686 - DNA, 25 bp, Artificial
  Probe
tcctgcggcgtattcgacgttaaag

SEQ ID NO: 188687 - DNA, 25 bp, Artificial
  Probe
ttctgattctccttctgttaagtcg

SEQ ID NO: 188688 - DNA, 25 bp, Artificial
  Probe
gtcctgcggcgtattcgacgttaaa

SEQ ID NO: 188689 - DNA, 25 bp, Artificial
  Probe
ggtcctgcggcgtattcgacgttaa

SEQ ID NO: 188690 - DNA, 25 bp, Artificial
  Probe
gtatttctagggagaaggagccgct

SEQ ID NO: 188691 - DNA, 25 bp, Artificial
  Probe
gattctccttctgttaagtcgaagg

SEQ ID NO: 188692 - DNA, 25 bp, Artificial
  Probe
gagactaattctgattctccttctg

SEQ ID NO: 188693 - DNA, 25 bp, Artificial
  Probe
tgtactcggctatgaagaatagggc

SEQ ID NO: 188694 - DNA, 25 bp, Artificial
  Probe
cagatatgttcttgtgcacttataa

SEQ ID NO: 188695 - DNA, 25 bp, Artificial
  Probe
acgttaaagcctgagactaattctg

SEQ ID NO: 188696 - DNA, 25 bp, Artificial
  Probe
aatagtcagatatgttcttgtgcac

SEQ ID NO: 188697 - DNA, 25 bp, Artificial
  Probe
tcagatatgttcttgtgcacttata

SEQ ID NO: 188698 - DNA, 25 bp, Artificial
  Probe
gacgttaaagcctgagactaattct

SEQ ID NO: 188699 - DNA, 25 bp, Artificial
  Probe
atagtcagatatgttcttgtgcact

SEQ ID NO: 188700 - DNA, 25 bp, Artificial
  Probe
tctgttaagtcgaagggagctcgat

SEQ ID NO: 188701 - DNA, 25 bp, Artificial
  Probe
agggagctcgatttgtttctgctag

SEQ ID NO: 188702 - DNA, 25 bp, Artificial
  Probe
cttgtgcacttataagtatttctag

SEQ ID NO: 188703 - DNA, 25 bp, Artificial
  Probe
gttcttgtgcacttataagtatttc

SEQ ID NO: 188704 - DNA, 25 bp, Artificial
  Probe
gctcgatttgtttctgctagggttg

SEQ ID NO: 188705 - DNA, 25 bp, Artificial
  Probe
aagggagctcgatttgtttctgcta

SEQ ID NO: 188706 - DNA, 25 bp, Artificial
  Probe
tcatattatggctattggtcaggcg

SEQ ID NO: 188707 - DNA, 25 bp, Artificial
  Probe
ggcgtattcgacgttaaagcctgag

SEQ ID NO: 188708 - DNA, 25 bp, Artificial
  Probe
ttctgttaagtcgaagggagctcga

SEQ ID NO: 188709 - DNA, 25 bp, Artificial
  Probe
ctgattctccttctgttaagtcgaa

SEQ ID NO: 188710 - DNA, 25 bp, Artificial
  Probe
tcgaagggagctcgatttgtttctg

SEQ ID NO: 188711 - DNA, 25 bp, Artificial
  Probe
taaagcctgagactaattctgattc

SEQ ID NO: 188712 - DNA, 25 bp, Artificial
  Probe
agtcgaagggagctcgatttgtttc

SEQ ID NO: 188713 - DNA, 25 bp, Artificial
  Probe
ctgcggcgtattcgacgttaaagcc

SEQ ID NO: 188714 - DNA, 25 bp, Artificial
  Probe
ttaaagcctgagactaattctgatt

SEQ ID NO: 188715 - DNA, 25 bp, Artificial
  Probe
catattatggctattggtcaggcgg

SEQ ID NO: 188716 - DNA, 25 bp, Artificial
  Probe
ccctttcaggggtaattgatatgat

SEQ ID NO: 188717 - DNA, 25 bp, Artificial
  Probe
ctcgatttgtttctgctagggttga

SEQ ID NO: 188718 - DNA, 25 bp, Artificial
  Probe
gcctgagactaattctgattctcct

SEQ ID NO: 188719 - DNA, 25 bp, Artificial
  Probe
attctccttctgttaagtcgaaggg

SEQ ID NO: 188720 - DNA, 25 bp, Artificial
  Probe
tatttctagggagaaggagccgctt

SEQ ID NO: 188721 - DNA, 25 bp, Artificial
  Probe
attcgacgttaaagcctgagactaa

SEQ ID NO: 188722 - DNA, 25 bp, Artificial
  Probe
agctcgatttgtttctgctagggtt

SEQ ID NO: 188723 - DNA, 25 bp, Artificial
  Probe
actcggctatgaagaatagggcgaa

SEQ ID NO: 188724 - DNA, 25 bp, Artificial
  Probe
caagaaggccctggagggcaaagaa

SEQ ID NO: 188725 - DNA, 25 bp, Artificial
  Probe
gccgtcttacacaagatcaagcacc

SEQ ID NO: 188726 - DNA, 25 bp, Artificial
  Probe
cgtaccgctgtggttcggcacatga

SEQ ID NO: 188727 - DNA, 25 bp, Artificial
  Probe
gaacgggatcggagccgcctcatct

SEQ ID NO: 188728 - DNA, 25 bp, Artificial
  Probe
ctagccacggagagctgctgacacc

SEQ ID NO: 188729 - DNA, 25 bp, Artificial
  Probe
atgacttcagggatgttctgggcac

SEQ ID NO: 188730 - DNA, 25 bp, Artificial
  Probe
acctctacctcatcatgcagctggt

SEQ ID NO: 188731 - DNA, 25 bp, Artificial
  Probe
aaactgaccaggagccctggctgtg

SEQ ID NO: 188732 - DNA, 25 bp, Artificial
  Probe
tccaagatggaggacccaggcagtg

SEQ ID NO: 188733 - DNA, 25 bp, Artificial
  Probe
tgtgctctccacagcctgtgggact

SEQ ID NO: 188734 - DNA, 25 bp, Artificial
  Probe
gaggacccaggcagtgtgctctcca

SEQ ID NO: 188735 - DNA, 25 bp, Artificial
  Probe
gccttctcagaagtgatcctggcag

SEQ ID NO: 188736 - DNA, 25 bp, Artificial
  Probe
tcctggcagaggacaagaggactca

SEQ ID NO: 188737 - DNA, 25 bp, Artificial
  Probe
tatactgctctgtggctacccgccg

SEQ ID NO: 188738 - DNA, 25 bp, Artificial
  Probe
actggtggccatcaaatgcattgcc

SEQ ID NO: 188739 - DNA, 25 bp, Artificial
  Probe
catcaaatgcattgccaagaaggcc

SEQ ID NO: 188740 - DNA, 25 bp, Artificial
  Probe
gacccaggcagtgtgctctccacag

SEQ ID NO: 188741 - DNA, 25 bp, Artificial
  Probe
tgacttcagggatgttctgggcacg

SEQ ID NO: 188742 - DNA, 25 bp, Artificial
  Probe
ctgctggtccataggagtcattgcc

SEQ ID NO: 188743 - DNA, 25 bp, Artificial
  Probe
gctacccgccgttctatgatgaaaa

SEQ ID NO: 188744 - DNA, 25 bp, Artificial
  Probe
cccaggtggaagcaggcagaagaca

SEQ ID NO: 188745 - DNA, 25 bp, Artificial
  Probe
tcatgcagctggtttcaggtggaga

SEQ ID NO: 188746 - DNA, 25 bp, Artificial
  Probe
aggctacacagaacgggatcggagc

SEQ ID NO: 188747 - DNA, 25 bp, Artificial
  Probe
gccaacgctgaataggcaaactgac

SEQ ID NO: 188748 - DNA, 25 bp, Artificial
  Probe
tccttattgggacgacatctctgac

SEQ ID NO: 188749 - DNA, 25 bp, Artificial
  Probe
agctagccacggagagctgctgaca

SEQ ID NO: 188750 - DNA, 25 bp, Artificial
  Probe
aaggaggctacacagaacgggatcg

SEQ ID NO: 188751 - DNA, 25 bp, Artificial
  Probe
tgaataggcaaactgaccaggagcc

SEQ ID NO: 188752 - DNA, 25 bp, Artificial
  Probe
caagaggactcagaaactggtggcc

SEQ ID NO: 188753 - DNA, 25 bp, Artificial
  Probe
tgatcctggcagaggacaagaggac

SEQ ID NO: 188754 - DNA, 25 bp, Artificial
  Probe
atgagatcgccgtcttacacaagat

SEQ ID NO: 188755 - DNA, 25 bp, Artificial
  Probe
acctgcacgacctgggcattgtgca

SEQ ID NO: 188756 - DNA, 25 bp, Artificial
  Probe
cgccgttctatgatgaaaatgatgc

SEQ ID NO: 188757 - DNA, 25 bp, Artificial
  Probe
aaatgatgccaaactttttgaacag

SEQ ID NO: 188758 - DNA, 25 bp, Artificial
  Probe
ccccaggtggaagcaggcagaagac

SEQ ID NO: 188759 - DNA, 25 bp, Artificial
  Probe
gatgaagactccaaaatcatgatct

SEQ ID NO: 188760 - DNA, 25 bp, Artificial
  Probe
gccaaactttttgaacagattttga

SEQ ID NO: 188761 - DNA, 25 bp, Artificial
  Probe
ttggcctctccaagatggaggaccc

SEQ ID NO: 188762 - DNA, 25 bp, Artificial
  Probe
cctggatgacatctatgagagtggg

SEQ ID NO: 188763 - DNA, 25 bp, Artificial
  Probe
tattgggacgacatctctgactctg

SEQ ID NO: 188764 - DNA, 25 bp, Artificial
  Probe
tggaagcaagctttcaatcgtaccg

SEQ ID NO: 188765 - DNA, 25 bp, Artificial
  Probe
tgggggccacctctacctcatcatg

SEQ ID NO: 188766 - DNA, 25 bp, Artificial
  Probe
ctacagtctggatgaagactccaaa

SEQ ID NO: 188767 - DNA, 25 bp, Artificial
  Probe
acattgtagccctggatgacatcta

SEQ ID NO: 188768 - DNA, 25 bp, Artificial
  Probe
taaagggaagctctgtgccgaattc

SEQ ID NO: 188769 - DNA, 25 bp, Artificial
  Probe
caagccagagaacctgctatactac

SEQ ID NO: 188770 - DNA, 25 bp, Artificial
  Probe
tggaggtacccctgagccttgcaca

SEQ ID NO: 188771 - DNA, 25 bp, Artificial
  Probe
agagctgaatgtccagctatcagca

SEQ ID NO: 188772 - DNA, 25 bp, Artificial
  Probe
gagggtccccggaagactcagcact

SEQ ID NO: 188773 - DNA, 25 bp, Artificial
  Probe
tccagctagccctcgcaggtgcaag

SEQ ID NO: 188774 - DNA, 25 bp, Artificial
  Probe
ctcaactttgagaagcgttaaaata

SEQ ID NO: 188775 - DNA, 25 bp, Artificial
  Probe
ttatcttgccggaggcgagcatgga

SEQ ID NO: 188776 - DNA, 25 bp, Artificial
  Probe
aatatgtgcagactccttggatgct

SEQ ID NO: 188777 - DNA, 25 bp, Artificial
  Probe
ttaggaccggcaatcacaccacatc

SEQ ID NO: 188778 - DNA, 25 bp, Artificial
  Probe
cagtcagggctgaacagtgagagct

SEQ ID NO: 188779 - DNA, 25 bp, Artificial
  Probe
acatccggctttatctgcacttcag

SEQ ID NO: 188780 - DNA, 25 bp, Artificial
  Probe
ggggtacatttgcacccctgggtag

SEQ ID NO: 188781 - DNA, 25 bp, Artificial
  Probe
ctgggtctgcaggagcacccggact

SEQ ID NO: 188782 - DNA, 25 bp, Artificial
  Probe
cctcaaggcatcagggaagcggcct

SEQ ID NO: 188783 - DNA, 25 bp, Artificial
  Probe
gactctcacttcaccagtggccagg

SEQ ID NO: 188784 - DNA, 25 bp, Artificial
  Probe
agccctccatatttactgtatgtag

SEQ ID NO: 188785 - DNA, 25 bp, Artificial
  Probe
attcaggacctgaggctagccctgc

SEQ ID NO: 188786 - DNA, 25 bp, Artificial
  Probe
ctacaaactactctgaaactcaggg

SEQ ID NO: 188787 - DNA, 25 bp, Artificial
  Probe
atgcggctggccagggtgaacctcc

SEQ ID NO: 188788 - DNA, 25 bp, Artificial
  Probe
cgcttctcccagagataagaaccac

SEQ ID NO: 188789 - DNA, 25 bp, Artificial
  Probe
agccttgcacagagccaggccaggg

SEQ ID NO: 188790 - DNA, 25 bp, Artificial
  Probe
ctctctgtgctttatttgagagaga

SEQ ID NO: 188791 - DNA, 25 bp, Artificial
  Probe
gtgttttgaagcagggctttctcac

SEQ ID NO: 188792 - DNA, 25 bp, Artificial
  Probe
cctcgcaggtgcaagaggctaggtt

SEQ ID NO: 188793 - DNA, 25 bp, Artificial
  Probe
ttacaaggctgagactatgaatgtc

SEQ ID NO: 188794 - DNA, 25 bp, Artificial
  Probe
tcagtcagggctgaacagtgagagc

SEQ ID NO: 188795 - DNA, 25 bp, Artificial
  Probe
gtagtccctgatccatgatccatca

SEQ ID NO: 188796 - DNA, 25 bp, Artificial
  Probe
gaagtacagaacctcaagttagggt

SEQ ID NO: 188797 - DNA, 25 bp, Artificial
  Probe
agcggcctgggcatggcttcatcct

SEQ ID NO: 188798 - DNA, 25 bp, Artificial
  Probe
ctggaaaccaaattgacctcaccag

SEQ ID NO: 188799 - DNA, 25 bp, Artificial
  Probe
taattgtggagctccagtttgggac

SEQ ID NO: 188800 - DNA, 25 bp, Artificial
  Probe
actcttcatcaattgtgcctcaagg

SEQ ID NO: 188801 - DNA, 25 bp, Artificial
  Probe
ctatgaatgtcagtcctcaactttg

SEQ ID NO: 188802 - DNA, 25 bp, Artificial
  Probe
cggtggacttggaccgctgagctct

SEQ ID NO: 188803 - DNA, 25 bp, Artificial
  Probe
cagggctttctcaccctggaaacca

SEQ ID NO: 188804 - DNA, 25 bp, Artificial
  Probe
tcaaggcttcagaaggtagagctgg

SEQ ID NO: 188805 - DNA, 25 bp, Artificial
  Probe
aaactcagggcagtagaagccccac

SEQ ID NO: 188806 - DNA, 25 bp, Artificial
  Probe
agtctctacctggtaccaaccacga

SEQ ID NO: 188807 - DNA, 25 bp, Artificial
  Probe
cactaatcccatcttgagagtactg

SEQ ID NO: 188808 - DNA, 25 bp, Artificial
  Probe
gttagatctccaaaaggctgggtgg

SEQ ID NO: 188809 - DNA, 25 bp, Artificial
  Probe
gagcacccggactccttagagggtc

SEQ ID NO: 188810 - DNA, 25 bp, Artificial
  Probe
aggcaacagtcagagtcccaatccc

SEQ ID NO: 188811 - DNA, 25 bp, Artificial
  Probe
gatgaccattcttggccggtcggcc

SEQ ID NO: 188812 - DNA, 25 bp, Artificial
  Probe
tgaacctcctggtgtctgtgtgggt

SEQ ID NO: 188813 - DNA, 25 bp, Artificial
  Probe
acttcagaagtttcctgtgcccacc

SEQ ID NO: 188814 - DNA, 25 bp, Artificial
  Probe
ctccagtttgggacagaagtacaga

SEQ ID NO: 188815 - DNA, 25 bp, Artificial
  Probe
gggaggacccaacgtctctattcag

SEQ ID NO: 188816 - DNA, 25 bp, Artificial
  Probe
taggtctgcaggagggaagccccct

SEQ ID NO: 188817 - DNA, 25 bp, Artificial
  Probe
aaaggctatggtccagtgtagccgg

SEQ ID NO: 188818 - DNA, 25 bp, Artificial
  Probe
tgagctcagtgtcagtggagacagt

SEQ ID NO: 188819 - DNA, 25 bp, Artificial
  Probe
tatttttccacgtgtccgcatcctg

SEQ ID NO: 188820 - DNA, 25 bp, Artificial
  Probe
gctacggagactcaggaaatgggca

SEQ ID NO: 188821 - DNA, 25 bp, Artificial
  Probe
acccggctggaaccagggcggcata

SEQ ID NO: 188822 - DNA, 25 bp, Artificial
  Probe
tgcctttggtagtcaaaagccttgg

SEQ ID NO: 188823 - DNA, 25 bp, Artificial
  Probe
acttgtagccaaaagaaggaaacag

SEQ ID NO: 188824 - DNA, 25 bp, Artificial
  Probe
cacacccatactgtgaaggcgaagc

SEQ ID NO: 188825 - DNA, 25 bp, Artificial
  Probe
aatctgactctgaatttcctaagag

SEQ ID NO: 188826 - DNA, 25 bp, Artificial
  Probe
gataaacttaacgacaggggccact

SEQ ID NO: 188827 - DNA, 25 bp, Artificial
  Probe
aagggagagcctacatggcaaaagg

SEQ ID NO: 188828 - DNA, 25 bp, Artificial
  Probe
acgcaggagctgaccgctcgatagc

SEQ ID NO: 188829 - DNA, 25 bp, Artificial
  Probe
ctatggtccagtgtagccggggtct

SEQ ID NO: 188830 - DNA, 25 bp, Artificial
  Probe
taacaatttcactgccaattggctg

SEQ ID NO: 188831 - DNA, 25 bp, Artificial
  Probe
gaaacagatggcatacgctgagaat

SEQ ID NO: 188832 - DNA, 25 bp, Artificial
  Probe
ggaggtgcctttcagactcaactat

SEQ ID NO: 188833 - DNA, 25 bp, Artificial
  Probe
taggaccagcagtcaggaatgaagg

SEQ ID NO: 188834 - DNA, 25 bp, Artificial
  Probe
atgagggatgcattccgttcccatg

SEQ ID NO: 188835 - DNA, 25 bp, Artificial
  Probe
acatctgagggacatatcaaacaac

SEQ ID NO: 188836 - DNA, 25 bp, Artificial
  Probe
agaagggttactttgtctctcagtg

SEQ ID NO: 188837 - DNA, 25 bp, Artificial
  Probe
tggggaactctgacaggagaaccac

SEQ ID NO: 188838 - DNA, 25 bp, Artificial
  Probe
aggggaacaacacatctgcatattg

SEQ ID NO: 188839 - DNA, 25 bp, Artificial
  Probe
attccaggggccttgggtgagctca

SEQ ID NO: 188840 - DNA, 25 bp, Artificial
  Probe
ggttccccattagaacctattccag

SEQ ID NO: 188841 - DNA, 25 bp, Artificial
  Probe
actgtgaaggcgaagcagggcccca

SEQ ID NO: 188842 - DNA, 25 bp, Artificial
  Probe
atcctccacttgtagccaaaagaag

SEQ ID NO: 188843 - DNA, 25 bp, Artificial
  Probe
tacgctgagaatggactcagccaca

SEQ ID NO: 188844 - DNA, 25 bp, Artificial
  Probe
accgtgcagaggaagtggccgacaa

SEQ ID NO: 188845 - DNA, 25 bp, Artificial
  Probe
agactcaggaaatgggcagagttca

SEQ ID NO: 188846 - DNA, 25 bp, Artificial
  Probe
ggaggagcactctgtgtaagaacac

SEQ ID NO: 188847 - DNA, 25 bp, Artificial
  Probe
gtgtttctggccaggctggagccaa

SEQ ID NO: 188848 - DNA, 25 bp, Artificial
  Probe
caacaccaagccacgcaggagctga

SEQ ID NO: 188849 - DNA, 25 bp, Artificial
  Probe
gaaataaacattggtctccaagcat

SEQ ID NO: 188850 - DNA, 25 bp, Artificial
  Probe
agccggggtctgtatggtaaacaga

SEQ ID NO: 188851 - DNA, 25 bp, Artificial
  Probe
gcttccatcgcctttcaaaatagga

SEQ ID NO: 188852 - DNA, 25 bp, Artificial
  Probe
ctacatggcaaaaggcccgtgaatc

SEQ ID NO: 188853 - DNA, 25 bp, Artificial
  Probe
ctaagagagaagaccccaggaaatt

SEQ ID NO: 188854 - DNA, 25 bp, Artificial
  Probe
gtgacctttcacctactaggtccta

SEQ ID NO: 188855 - DNA, 25 bp, Artificial
  Probe
tgaattttgcatggtgtttccctgt

SEQ ID NO: 188856 - DNA, 25 bp, Artificial
  Probe
ctgcctgggccctggggaactctga

SEQ ID NO: 188857 - DNA, 25 bp, Artificial
  Probe
ctgaagggtctgaaactgggtcact

SEQ ID NO: 188858 - DNA, 25 bp, Artificial
  Probe
ctgtgcgctggaataaacagatgaa

SEQ ID NO: 188859 - DNA, 25 bp, Artificial
  Probe
gttactttgtctctcagtgtcaaaa

SEQ ID NO: 188860 - DNA, 25 bp, Artificial
  Probe
ggtgcctttcagactcaactataac

SEQ ID NO: 188861 - DNA, 25 bp, Artificial
  Probe
cagaatcttccatgggagtttattt

SEQ ID NO: 188862 - DNA, 25 bp, Artificial
  Probe
ttcagaacttcatctgccactggtt

SEQ ID NO: 188863 - DNA, 25 bp, Artificial
  Probe
aaacaaagcaaaactctgttcagaa

SEQ ID NO: 188864 - DNA, 25 bp, Artificial
  Probe
ctgttcagaacttcatctgccactg

SEQ ID NO: 188865 - DNA, 25 bp, Artificial
  Probe
gaacttcatctgccactggttattt

SEQ ID NO: 188866 - DNA, 25 bp, Artificial
  Probe
ctctgttcagaacttcatctgccac

SEQ ID NO: 188867 - DNA, 25 bp, Artificial
  Probe
tttttgtagagcttacttttattat

SEQ ID NO: 188868 - DNA, 25 bp, Artificial
  Probe
tcagaacttcatctgccactggtta

SEQ ID NO: 188869 - DNA, 25 bp, Artificial
  Probe
agcaaaactctgttcagaacttcat

SEQ ID NO: 188870 - DNA, 25 bp, Artificial
  Probe
caaaactctgttcagaacttcatct

SEQ ID NO: 188871 - DNA, 25 bp, Artificial
  Probe
cttcatctgccactggttatttttt

SEQ ID NO: 188872 - DNA, 25 bp, Artificial
  Probe
agaacttcatctgccactggttatt

SEQ ID NO: 188873 - DNA, 25 bp, Artificial
  Probe
atctgccactggttatttttttcta

SEQ ID NO: 188874 - DNA, 25 bp, Artificial
  Probe
tctgccactggttatttttttctaa

SEQ ID NO: 188875 - DNA, 25 bp, Artificial
  Probe
tgtagagcttacttttattattaaa

SEQ ID NO: 188876 - DNA, 25 bp, Artificial
  Probe
aaaaacaaagcaaaactctgttcag

SEQ ID NO: 188877 - DNA, 25 bp, Artificial
  Probe
gttcagaacttcatctgccactggt

SEQ ID NO: 188878 - DNA, 25 bp, Artificial
  Probe
aagcaaaactctgttcagaacttca

SEQ ID NO: 188879 - DNA, 25 bp, Artificial
  Probe
tgttcagaacttcatctgccactgg

SEQ ID NO: 188880 - DNA, 25 bp, Artificial
  Probe
gcaaaactctgttcagaacttcatc

SEQ ID NO: 188881 - DNA, 25 bp, Artificial
  Probe
aacttcatctgccactggttatttt

SEQ ID NO: 188882 - DNA, 25 bp, Artificial
  Probe
agcttacttttattattaaatgtat

SEQ ID NO: 188883 - DNA, 25 bp, Artificial
  Probe
aaagcaaaactctgttcagaacttc

SEQ ID NO: 188884 - DNA, 25 bp, Artificial
  Probe
tgccactggttatttttttctaaga

SEQ ID NO: 188885 - DNA, 25 bp, Artificial
  Probe
aacaaagcaaaactctgttcagaac

SEQ ID NO: 188886 - DNA, 25 bp, Artificial
  Probe
acttcatctgccactggttattttt

SEQ ID NO: 188887 - DNA, 25 bp, Artificial
  Probe
tagagcttacttttattattaaatg

SEQ ID NO: 188888 - DNA, 25 bp, Artificial
  Probe
ttgtagagcttacttttattattaa

SEQ ID NO: 188889 - DNA, 25 bp, Artificial
  Probe
agagcttacttttattattaaatgt

SEQ ID NO: 188890 - DNA, 25 bp, Artificial
  Probe
cagaacttcatctgccactggttat

SEQ ID NO: 188891 - DNA, 25 bp, Artificial
  Probe
catctgccactggttatttttttct

SEQ ID NO: 188892 - DNA, 25 bp, Artificial
  Probe
tcatctgccactggttatttttttc

SEQ ID NO: 188893 - DNA, 25 bp, Artificial
  Probe
caaaaacaaagcaaaactctgttca

SEQ ID NO: 188894 - DNA, 25 bp, Artificial
  Probe
cttacttttattattaaatgtattg

SEQ ID NO: 188895 - DNA, 25 bp, Artificial
  Probe
tttgtagagcttacttttattatta

SEQ ID NO: 188896 - DNA, 25 bp, Artificial
  Probe
ttttgtagagcttacttttattatt

SEQ ID NO: 188897 - DNA, 25 bp, Artificial
  Probe
caaagcaaaactctgttcagaactt

SEQ ID NO: 188898 - DNA, 25 bp, Artificial
  Probe
tctgttcagaacttcatctgccact

SEQ ID NO: 188899 - DNA, 25 bp, Artificial
  Probe
acaaagcaaaactctgttcagaact

SEQ ID NO: 188900 - DNA, 25 bp, Artificial
  Probe
aaaacaaagcaaaactctgttcaga

SEQ ID NO: 188901 - DNA, 25 bp, Artificial
  Probe
aaactctgttcagaacttcatctgc

SEQ ID NO: 188902 - DNA, 25 bp, Artificial
  Probe
aaaactctgttcagaacttcatctg

SEQ ID NO: 188903 - DNA, 25 bp, Artificial
  Probe
ctgccactggttatttttttctaag

SEQ ID NO: 188904 - DNA, 25 bp, Artificial
  Probe
ttcatctgccactggttattttttt

SEQ ID NO: 188905 - DNA, 25 bp, Artificial
  Probe
actaacctataacaggtagcaggtg

SEQ ID NO: 188906 - DNA, 25 bp, Artificial
  Probe
tttggtccacagtctcaactgggac

SEQ ID NO: 188907 - DNA, 25 bp, Artificial
  Probe
agtacccaggcaatgaagtagaatg

SEQ ID NO: 188908 - DNA, 25 bp, Artificial
  Probe
taacctataacaggtagcaggtgta

SEQ ID NO: 188909 - DNA, 25 bp, Artificial
  Probe
gtccacagtctcaactgggacctct

SEQ ID NO: 188910 - DNA, 25 bp, Artificial
  Probe
tccacagtctcaactgggacctctg

SEQ ID NO: 188911 - DNA, 25 bp, Artificial
  Probe
tggactaacctataacaggtagcag

SEQ ID NO: 188912 - DNA, 25 bp, Artificial
  Probe
tgcagacgcccgtccagtgaactca

SEQ ID NO: 188913 - DNA, 25 bp, Artificial
  Probe
cctttggtccacagtctcaactggg

SEQ ID NO: 188914 - DNA, 25 bp, Artificial
  Probe
tacccaggcaatgaagtagaatgtc

SEQ ID NO: 188915 - DNA, 25 bp, Artificial
  Probe
tgttccccctgtaacttctgattgt

SEQ ID NO: 188916 - DNA, 25 bp, Artificial
  Probe
cacggggtgcagacgcccgtccagt

SEQ ID NO: 188917 - DNA, 25 bp, Artificial
  Probe
gcagacgcccgtccagtgaactcaa

SEQ ID NO: 188918 - DNA, 25 bp, Artificial
  Probe
ccctttggtccacagtctcaactgg

SEQ ID NO: 188919 - DNA, 25 bp, Artificial
  Probe
ctataacaggtagcaggtgtattca

SEQ ID NO: 188920 - DNA, 25 bp, Artificial
  Probe
aacactggactaacctataacaggt

SEQ ID NO: 188921 - DNA, 25 bp, Artificial
  Probe
tcatgggttttgacctttgcaagcg

SEQ ID NO: 188922 - DNA, 25 bp, Artificial
  Probe
gagtacccaggcaatgaagtagaat

SEQ ID NO: 188923 - DNA, 25 bp, Artificial
  Probe
acactggactaacctataacaggta

SEQ ID NO: 188924 - DNA, 25 bp, Artificial
  Probe
agacgcccgtccagtgaactcaagc

SEQ ID NO: 188925 - DNA, 25 bp, Artificial
  Probe
tgggacctctgttccccctgtaact

SEQ ID NO: 188926 - DNA, 25 bp, Artificial
  Probe
ttgcaagcgagtacccaggcaatga

SEQ ID NO: 188927 - DNA, 25 bp, Artificial
  Probe
ggtccacagtctcaactgggacctc

SEQ ID NO: 188928 - DNA, 25 bp, Artificial
  Probe
gtattcatgggttttgacctttgca

SEQ ID NO: 188929 - DNA, 25 bp, Artificial
  Probe
cgtccagtgaactcaagcaggggag

SEQ ID NO: 188930 - DNA, 25 bp, Artificial
  Probe
ccgtccagtgaactcaagcagggga

SEQ ID NO: 188931 - DNA, 25 bp, Artificial
  Probe
cgcggacagcttacagctggagaag

SEQ ID NO: 188932 - DNA, 25 bp, Artificial
  Probe
ctcgcggacagcttacagctggaga

SEQ ID NO: 188933 - DNA, 25 bp, Artificial
  Probe
cgcccgtccagtgaactcaagcagg

SEQ ID NO: 188934 - DNA, 25 bp, Artificial
  Probe
gactaacctataacaggtagcaggt

SEQ ID NO: 188935 - DNA, 25 bp, Artificial
  Probe
tgtattcatgggttttgacctttgc

SEQ ID NO: 188936 - DNA, 25 bp, Artificial
  Probe
cacagtctcaactgggacctctgtt

SEQ ID NO: 188937 - DNA, 25 bp, Artificial
  Probe
gttccccctgtaacttctgattgtt

SEQ ID NO: 188938 - DNA, 25 bp, Artificial
  Probe
ggttttgacctttgcaagcgagtac

SEQ ID NO: 188939 - DNA, 25 bp, Artificial
  Probe
cctttgcaagcgagtacccaggcaa

SEQ ID NO: 188940 - DNA, 25 bp, Artificial
  Probe
attcatgggttttgacctttgcaag

SEQ ID NO: 188941 - DNA, 25 bp, Artificial
  Probe
gggttttgacctttgcaagcgagta

SEQ ID NO: 188942 - DNA, 25 bp, Artificial
  Probe
aagcgagtacccaggcaatgaagta

SEQ ID NO: 188943 - DNA, 25 bp, Artificial
  Probe
cactggactaacctataacaggtag

SEQ ID NO: 188944 - DNA, 25 bp, Artificial
  Probe
catgggttttgacctttgcaagcga

SEQ ID NO: 188945 - DNA, 25 bp, Artificial
  Probe
tgggttttgacctttgcaagcgagt

SEQ ID NO: 188946 - DNA, 25 bp, Artificial
  Probe
acctataacaggtagcaggtgtatt

SEQ ID NO: 188947 - DNA, 25 bp, Artificial
  Probe
ttgacctttgcaagcgagtacccag

SEQ ID NO: 188948 - DNA, 25 bp, Artificial
  Probe
tttgacctttgcaagcgagtaccca

SEQ ID NO: 188949 - DNA, 25 bp, Artificial
  Probe
tttgcaagcgagtacccaggcaatg

SEQ ID NO: 188950 - DNA, 25 bp, Artificial
  Probe
ctttggtccacagtctcaactggga

SEQ ID NO: 188951 - DNA, 25 bp, Artificial
  Probe
aaagtagtacagctagtacgatacg

SEQ ID NO: 188952 - DNA, 25 bp, Artificial
  Probe
agcgtgtctaagctcatgggtggcc

SEQ ID NO: 188953 - DNA, 25 bp, Artificial
  Probe
aactgtgtggctcagtgtgcattac

SEQ ID NO: 188954 - DNA, 25 bp, Artificial
  Probe
gtggtagcctgattatttgtgctgc

SEQ ID NO: 188955 - DNA, 25 bp, Artificial
  Probe
atttgtgctgccagtgaaaagtgct

SEQ ID NO: 188956 - DNA, 25 bp, Artificial
  Probe
cagcggcggatgatatcagtgagtc

SEQ ID NO: 188957 - DNA, 25 bp, Artificial
  Probe
taagctcatgggtggcctccagcgg

SEQ ID NO: 188958 - DNA, 25 bp, Artificial
  Probe
tggaccttgtcgagctggacgctga

SEQ ID NO: 188959 - DNA, 25 bp, Artificial
  Probe
ctgcagctcagaatctgctggggtg

SEQ ID NO: 188960 - DNA, 25 bp, Artificial
  Probe
ggctcagtgtgcattacaggtgttt

SEQ ID NO: 188961 - DNA, 25 bp, Artificial
  Probe
agaagtcgtgtaggagacagacctt

SEQ ID NO: 188962 - DNA, 25 bp, Artificial
  Probe
gataaagccacattaagttcccggt

SEQ ID NO: 188963 - DNA, 25 bp, Artificial
  Probe
tgctcttgagtttgtttaaacgagc

SEQ ID NO: 188964 - DNA, 25 bp, Artificial
  Probe
tcttcatttgctgtcaaagctaaag

SEQ ID NO: 188965 - DNA, 25 bp, Artificial
  Probe
caggtgtttagacttgcgaaacgct

SEQ ID NO: 188966 - DNA, 25 bp, Artificial
  Probe
gtattttacttatgactccaccagg

SEQ ID NO: 188967 - DNA, 25 bp, Artificial
  Probe
gaaatgtgctgctgtctcggtcttc

SEQ ID NO: 188968 - DNA, 25 bp, Artificial
  Probe
tgctgccagtgaaaagtgctattca

SEQ ID NO: 188969 - DNA, 25 bp, Artificial
  Probe
ctaattctttgagcagaacagatta

SEQ ID NO: 188970 - DNA, 25 bp, Artificial
  Probe
ctccctggatatagatacatctcgt

SEQ ID NO: 188971 - DNA, 25 bp, Artificial
  Probe
cacagcctgagaatgtttttcagaa

SEQ ID NO: 188972 - DNA, 25 bp, Artificial
  Probe
catctcgtgaatgtgacggagtgga

SEQ ID NO: 188973 - DNA, 25 bp, Artificial
  Probe
actccaccaggtagcgtgcttggaa

SEQ ID NO: 188974 - DNA, 25 bp, Artificial
  Probe
ttgtcgagctggacgctgatctcgc

SEQ ID NO: 188975 - DNA, 25 bp, Artificial
  Probe
agctctcacgtgcacacagcctgag

SEQ ID NO: 188976 - DNA, 25 bp, Artificial
  Probe
agaagtcagcttcattcttcatttg

SEQ ID NO: 188977 - DNA, 25 bp, Artificial
  Probe
gaccttattaactccctggatatag

SEQ ID NO: 188978 - DNA, 25 bp, Artificial
  Probe
aaatgtgctgctgtctcggtcttct

SEQ ID NO: 188979 - DNA, 25 bp, Artificial
  Probe
ggttcacccttcgttaagaagtcag

SEQ ID NO: 188980 - DNA, 25 bp, Artificial
  Probe
gagacagaccttattaactccctgg

SEQ ID NO: 188981 - DNA, 25 bp, Artificial
  Probe
gttctgatactgtgaggagcgtgtc

SEQ ID NO: 188982 - DNA, 25 bp, Artificial
  Probe
ttaatatgcaaaactgtgtggctca

SEQ ID NO: 188983 - DNA, 25 bp, Artificial
  Probe
ctccagcggcggatgatatcagtga

SEQ ID NO: 188984 - DNA, 25 bp, Artificial
  Probe
cgaaacgctgtttggcagaatgttt

SEQ ID NO: 188985 - DNA, 25 bp, Artificial
  Probe
ccttcgttaagaagtcagcttcatt

SEQ ID NO: 188986 - DNA, 25 bp, Artificial
  Probe
actccctggatatagatacatctcg

SEQ ID NO: 188987 - DNA, 25 bp, Artificial
  Probe
tatagatacatctcgtgaatgtgac

SEQ ID NO: 188988 - DNA, 25 bp, Artificial
  Probe
tttggccctttcaaaagtagtacag

SEQ ID NO: 188989 - DNA, 25 bp, Artificial
  Probe
tagataaagccacattaagttcccg

SEQ ID NO: 188990 - DNA, 25 bp, Artificial
  Probe
ccctttcaaaagtagtacagctagt

SEQ ID NO: 188991 - DNA, 25 bp, Artificial
  Probe
gtcagcttcattcttcatttgctgt

SEQ ID NO: 188992 - DNA, 25 bp, Artificial
  Probe
tcagtgagtcagcaggctacccagc

SEQ ID NO: 188993 - DNA, 25 bp, Artificial
  Probe
tgtgaggagcgtgtctaagctcatg

SEQ ID NO: 188994 - DNA, 25 bp, Artificial
  Probe
tgcctacctctgcactagctcgtgt

SEQ ID NO: 188995 - DNA, 25 bp, Artificial
  Probe
ttgctgctcttgagtttgtttaaac

SEQ ID NO: 188996 - DNA, 25 bp, Artificial
  Probe
atgatatcagtgagtcagcaggcta

SEQ ID NO: 188997 - DNA, 25 bp, Artificial
  Probe
ggttcatagatcagtctttagaaac

SEQ ID NO: 188998 - DNA, 25 bp, Artificial
  Probe
ggaaggcacctttactcaggaaaca

SEQ ID NO: 188999 - DNA, 25 bp, Artificial
  Probe
catggatacctcaggccccagttag

SEQ ID NO: 189000 - DNA, 25 bp, Artificial
  Probe
gtgggtctcagaagcactatgagga

SEQ ID NO: 189001 - DNA, 25 bp, Artificial
  Probe
acgttccagatatgggcacaaaaca

SEQ ID NO: 189002 - DNA, 25 bp, Artificial
  Probe
cctgctttgttgcaggtcatgggtg

SEQ ID NO: 189003 - DNA, 25 bp, Artificial
  Probe
cagtgcacctcagaaagtttttccc

SEQ ID NO: 189004 - DNA, 25 bp, Artificial
  Probe
tctcctgaagacagcaacaccgcat

SEQ ID NO: 189005 - DNA, 25 bp, Artificial
  Probe
gttcatagatcagtctttagaaacc

SEQ ID NO: 189006 - DNA, 25 bp, Artificial
  Probe
ggtatgagtgccaccaggcagtcac

SEQ ID NO: 189007 - DNA, 25 bp, Artificial
  Probe
atccggggcataaggttatgggctc

SEQ ID NO: 189008 - DNA, 25 bp, Artificial
  Probe
taagtctttcaaggattcatggtgc

SEQ ID NO: 189009 - DNA, 25 bp, Artificial
  Probe
gtattcaacagtcaataaagcttgc

SEQ ID NO: 189010 - DNA, 25 bp, Artificial
  Probe
agtcacagaggtcaggaaacttgag

SEQ ID NO: 189011 - DNA, 25 bp, Artificial
  Probe
tccaggcttccaagagcccagtgca

SEQ ID NO: 189012 - DNA, 25 bp, Artificial
  Probe
cacaaaacaaggtgtcagaggaaga

SEQ ID NO: 189013 - DNA, 25 bp, Artificial
  Probe
acctcaggccccagttagttggtct

SEQ ID NO: 189014 - DNA, 25 bp, Artificial
  Probe
atgcccaaaatgagcgtgcacaccc

SEQ ID NO: 189015 - DNA, 25 bp, Artificial
  Probe
agaccgagcttgaagcaggaactga

SEQ ID NO: 189016 - DNA, 25 bp, Artificial
  Probe
ctcactgggcatagggaaggcacct

SEQ ID NO: 189017 - DNA, 25 bp, Artificial
  Probe
tttgccacttagaggaggaaaacaa

SEQ ID NO: 189018 - DNA, 25 bp, Artificial
  Probe
gaaacttgagcaaggtaggagatcc

SEQ ID NO: 189019 - DNA, 25 bp, Artificial
  Probe
tccggggcataaggttatgggctct

SEQ ID NO: 189020 - DNA, 25 bp, Artificial
  Probe
tggagcttcctgtgagctgtgcttt

SEQ ID NO: 189021 - DNA, 25 bp, Artificial
  Probe
ctgcccaaggacctggtaacttcct

SEQ ID NO: 189022 - DNA, 25 bp, Artificial
  Probe
tctcaaaagtttctcgataccatgg

SEQ ID NO: 189023 - DNA, 25 bp, Artificial
  Probe
gtggccacatcctctcctgaagaca

SEQ ID NO: 189024 - DNA, 25 bp, Artificial
  Probe
cttcctagaagatcagaagttgtca

SEQ ID NO: 189025 - DNA, 25 bp, Artificial
  Probe
cccctctggagataagtaagtcttt

SEQ ID NO: 189026 - DNA, 25 bp, Artificial
  Probe
agctggaacattccaggatctggtt

SEQ ID NO: 189027 - DNA, 25 bp, Artificial
  Probe
aaagtcgtggccacatcctctcctg

SEQ ID NO: 189028 - DNA, 25 bp, Artificial
  Probe
aacttgagcaaggtaggagatccgg

SEQ ID NO: 189029 - DNA, 25 bp, Artificial
  Probe
atggtgactcactgggcatagggaa

SEQ ID NO: 189030 - DNA, 25 bp, Artificial
  Probe
aaagtagacctgctttgttgcaggt

SEQ ID NO: 189031 - DNA, 25 bp, Artificial
  Probe
agtctctttctcttgacaacagatg

SEQ ID NO: 189032 - DNA, 25 bp, Artificial
  Probe
ggtactcagctggaacattccagga

SEQ ID NO: 189033 - DNA, 25 bp, Artificial
  Probe
ggcaaaacagtctctttctcttgac

SEQ ID NO: 189034 - DNA, 25 bp, Artificial
  Probe
gaaacccctctacatgtgtacctcg

SEQ ID NO: 189035 - DNA, 25 bp, Artificial
  Probe
ataacaatgcctcatgggaaagtgg

SEQ ID NO: 189036 - DNA, 25 bp, Artificial
  Probe
tgcctcatgggaaagtggttcatag

SEQ ID NO: 189037 - DNA, 25 bp, Artificial
  Probe
aaggttatgggctcttataaccaca

SEQ ID NO: 189038 - DNA, 25 bp, Artificial
  Probe
aaggcaaaacagtctctttctcttg

SEQ ID NO: 189039 - DNA, 25 bp, Artificial
  Probe
taccaacaccaacaggacacgtacg

SEQ ID NO: 189040 - DNA, 25 bp, Artificial
  Probe
ggccctctagcctttgccacttaga

SEQ ID NO: 189041 - DNA, 25 bp, Artificial
  Probe
ctttcaaggattcatggtgccccac

SEQ ID NO: 189042 - DNA, 25 bp, Artificial
  Probe
ctcagaagcactatgaggaaagtat

SEQ ID NO: 189043 - DNA, 25 bp, Artificial
  Probe
gcttcatgccactgaatacgttgaa

SEQ ID NO: 189044 - DNA, 25 bp, Artificial
  Probe
ttgtatccaaggtgctgaatcttgg

SEQ ID NO: 189045 - DNA, 25 bp, Artificial
  Probe
catgccactgaatacgttgaaaaaa

SEQ ID NO: 189046 - DNA, 25 bp, Artificial
  Probe
gccgttctctcgtgggagacgcagg

SEQ ID NO: 189047 - DNA, 25 bp, Artificial
  Probe
ggagacgcaggcacaactctttata

SEQ ID NO: 189048 - DNA, 25 bp, Artificial
  Probe
tccaaggtgctgaatcttggaggag

SEQ ID NO: 189049 - DNA, 25 bp, Artificial
  Probe
caactctttatacggttggctctca

SEQ ID NO: 189050 - DNA, 25 bp, Artificial
  Probe
tgaaccgcttcatgccactgaatac

SEQ ID NO: 189051 - DNA, 25 bp, Artificial
  Probe
ctcgtgggagacgcaggcacaactc

SEQ ID NO: 189052 - DNA, 25 bp, Artificial
  Probe
aatcgtttcatcattcggcgtgcga

SEQ ID NO: 189053 - DNA, 25 bp, Artificial
  Probe
gatgatgaaccgcttcatgccactg

SEQ ID NO: 189054 - DNA, 25 bp, Artificial
  Probe
agctgtacaatcgtttcatcattcg

SEQ ID NO: 189055 - DNA, 25 bp, Artificial
  Probe
gtatccaaggtgctgaatcttggag

SEQ ID NO: 189056 - DNA, 25 bp, Artificial
  Probe
tcgtttcatcattcggcgtgcgaat

SEQ ID NO: 189057 - DNA, 25 bp, Artificial
  Probe
catattcatttgtatccaaggtgct

SEQ ID NO: 189058 - DNA, 25 bp, Artificial
  Probe
ggccgttctctcgtgggagacgcag

SEQ ID NO: 189059 - DNA, 25 bp, Artificial
  Probe
aagctgtacaatcgtttcatcattc

SEQ ID NO: 189060 - DNA, 25 bp, Artificial
  Probe
aaccgcttcatgccactgaatacgt

SEQ ID NO: 189061 - DNA, 25 bp, Artificial
  Probe
ttctctcgtgggagacgcaggcaca

SEQ ID NO: 189062 - DNA, 25 bp, Artificial
  Probe
caatcgtttcatcattcggcgtgcg

SEQ ID NO: 189063 - DNA, 25 bp, Artificial
  Probe
ttcatattcatttgtatccaaggtg

SEQ ID NO: 189064 - DNA, 25 bp, Artificial
  Probe
atttgtatccaaggtgctgaatctt

SEQ ID NO: 189065 - DNA, 25 bp, Artificial
  Probe
tgatgaaccgcttcatgccactgaa

SEQ ID NO: 189066 - DNA, 25 bp, Artificial
  Probe
ccgcttcatgccactgaatacgttg

SEQ ID NO: 189067 - DNA, 25 bp, Artificial
  Probe
cgtttcatcattcggcgtgcgaatt

SEQ ID NO: 189068 - DNA, 25 bp, Artificial
  Probe
agacgcaggcacaactctttatacg

SEQ ID NO: 189069 - DNA, 25 bp, Artificial
  Probe
gttctctcgtgggagacgcaggcac

SEQ ID NO: 189070 - DNA, 25 bp, Artificial
  Probe
tgtacaatcgtttcatcattcggcg

SEQ ID NO: 189071 - DNA, 25 bp, Artificial
  Probe
ttcggcattcgttatacggaagatg

SEQ ID NO: 189072 - DNA, 25 bp, Artificial
  Probe
tcatttgtatccaaggtgctgaatc

SEQ ID NO: 189073 - DNA, 25 bp, Artificial
  Probe
ctctcgtgggagacgcaggcacaac

SEQ ID NO: 189074 - DNA, 25 bp, Artificial
  Probe
tattcatttgtatccaaggtgctga

SEQ ID NO: 189075 - DNA, 25 bp, Artificial
  Probe
tttcatcattcggcgtgcgaattaa

SEQ ID NO: 189076 - DNA, 25 bp, Artificial
  Probe
attcgttatacggaagatgatgaac

SEQ ID NO: 189077 - DNA, 25 bp, Artificial
  Probe
cggcattcgttatacggaagatgat

SEQ ID NO: 189078 - DNA, 25 bp, Artificial
  Probe
gtacaatcgtttcatcattcggcgt

SEQ ID NO: 189079 - DNA, 25 bp, Artificial
  Probe
gcaggcacaactctttatacggttg

SEQ ID NO: 189080 - DNA, 25 bp, Artificial
  Probe
gagacgcaggcacaactctttatac

SEQ ID NO: 189081 - DNA, 25 bp, Artificial
  Probe
gattcatattcatttgtatccaagg

SEQ ID NO: 189082 - DNA, 25 bp, Artificial
  Probe
taagctgtacaatcgtttcatcatt

SEQ ID NO: 189083 - DNA, 25 bp, Artificial
  Probe
acaatcgtttcatcattcggcgtgc

SEQ ID NO: 189084 - DNA, 25 bp, Artificial
  Probe
atgaaccgcttcatgccactgaata

SEQ ID NO: 189085 - DNA, 25 bp, Artificial
  Probe
tgacattccggaaatttggatcgaa

SEQ ID NO: 189086 - DNA, 25 bp, Artificial
  Probe
cgttctctcgtgggagacgcaggca

SEQ ID NO: 189087 - DNA, 25 bp, Artificial
  Probe
ttcatgccactgaatacgttgaaaa

SEQ ID NO: 189088 - DNA, 25 bp, Artificial
  Probe
gcattcgttatacggaagatgatga

SEQ ID NO: 189089 - DNA, 25 bp, Artificial
  Probe
ttgacattccggaaatttggatcga

SEQ ID NO: 189090 - DNA, 25 bp, Artificial
  Probe
cttcatgccactgaatacgttgaaa

SEQ ID NO: 189091 - DNA, 25 bp, Artificial
  Probe
gcacaactctttatacggttggctc

SEQ ID NO: 189092 - DNA, 25 bp, Artificial
  Probe
gagctatatacggctgttgcagcag

SEQ ID NO: 189093 - DNA, 25 bp, Artificial
  Probe
tttaatacgtgagcgtgctaaaagc

SEQ ID NO: 189094 - DNA, 25 bp, Artificial
  Probe
ttctgcagggctgaaagcacaggtg

SEQ ID NO: 189095 - DNA, 25 bp, Artificial
  Probe
tgcgagcaaagcattctcatcagtc

SEQ ID NO: 189096 - DNA, 25 bp, Artificial
  Probe
tacacctctttacgtatatgatgtg

SEQ ID NO: 189097 - DNA, 25 bp, Artificial
  Probe
gaaagcacaggtggcatatgcgagc

SEQ ID NO: 189098 - DNA, 25 bp, Artificial
  Probe
tttccggcagaacgcatccactttc

SEQ ID NO: 189099 - DNA, 25 bp, Artificial
  Probe
ctatatacggctgttgcagcaggct

SEQ ID NO: 189100 - DNA, 25 bp, Artificial
  Probe
agtcgcaatgattcagctcgctgag

SEQ ID NO: 189101 - DNA, 25 bp, Artificial
  Probe
atgacattgttcttacacggcacaa

SEQ ID NO: 189102 - DNA, 25 bp, Artificial
  Probe
agcattctcatcagtcgcaatgatt

SEQ ID NO: 189103 - DNA, 25 bp, Artificial
  Probe
aagcaggcgtttatttctgcagggc

SEQ ID NO: 189104 - DNA, 25 bp, Artificial
  Probe
tgtggatgctctctatttagcggag

SEQ ID NO: 189105 - DNA, 25 bp, Artificial
  Probe
tcatttagaaatcggaggtgtggat

SEQ ID NO: 189106 - DNA, 25 bp, Artificial
  Probe
acaggtggcatatgcgagcaaagca

SEQ ID NO: 189107 - DNA, 25 bp, Artificial
  Probe
ttctttagatgtcgtatccggagag

SEQ ID NO: 189108 - DNA, 25 bp, Artificial
  Probe
gcaggcgtttatttctgcagggctg

SEQ ID NO: 189109 - DNA, 25 bp, Artificial
  Probe
atatgcgagcaaagcattctcatca

SEQ ID NO: 189110 - DNA, 25 bp, Artificial
  Probe
attctcatcagtcgcaatgattcag

SEQ ID NO: 189111 - DNA, 25 bp, Artificial
  Probe
caaagcattctcatcagtcgcaatg

SEQ ID NO: 189112 - DNA, 25 bp, Artificial
  Probe
tgctctctatttagcggagaaatat

SEQ ID NO: 189113 - DNA, 25 bp, Artificial
  Probe
tatatgatgtggctttaatacgtga

SEQ ID NO: 189114 - DNA, 25 bp, Artificial
  Probe
ttccggcagaacgcatccactttca

SEQ ID NO: 189115 - DNA, 25 bp, Artificial
  Probe
agcaaagcattctcatcagtcgcaa

SEQ ID NO: 189116 - DNA, 25 bp, Artificial
  Probe
tatacggctgttgcagcaggctttc

SEQ ID NO: 189117 - DNA, 25 bp, Artificial
  Probe
tggtacacctctttacgtatatgat

SEQ ID NO: 189118 - DNA, 25 bp, Artificial
  Probe
gttgcagcaggctttccggcagaac

SEQ ID NO: 189119 - DNA, 25 bp, Artificial
  Probe
ctttaagcaggcgtttatttctgca

SEQ ID NO: 189120 - DNA, 25 bp, Artificial
  Probe
gattcagctcgctgaggaagaggga

SEQ ID NO: 189121 - DNA, 25 bp, Artificial
  Probe
ggcacaagcagacaaaatcaacatg

SEQ ID NO: 189122 - DNA, 25 bp, Artificial
  Probe
agcacaggtggcatatgcgagcaaa

SEQ ID NO: 189123 - DNA, 25 bp, Artificial
  Probe
tcgcaatgattcagctcgctgagga

SEQ ID NO: 189124 - DNA, 25 bp, Artificial
  Probe
ctctatttagcggagaaatatggta

SEQ ID NO: 189125 - DNA, 25 bp, Artificial
  Probe
acggctgttgcagcaggctttccgg

SEQ ID NO: 189126 - DNA, 25 bp, Artificial
  Probe
acctctttacgtatatgatgtggct

SEQ ID NO: 189127 - DNA, 25 bp, Artificial
  Probe
tgtcgtatccggagagagctatata

SEQ ID NO: 189128 - DNA, 25 bp, Artificial
  Probe
agggctgaaagcacaggtggcatat

SEQ ID NO: 189129 - DNA, 25 bp, Artificial
  Probe
ttagaaatcggaggtgtggatgctc

SEQ ID NO: 189130 - DNA, 25 bp, Artificial
  Probe
aggtgtggatgctctctatttagcg

SEQ ID NO: 189131 - DNA, 25 bp, Artificial
  Probe
gtttatttctgcagggctgaaagca

SEQ ID NO: 189132 - DNA, 25 bp, Artificial
  Probe
gctgttgcagcaggctttccggcag

SEQ ID NO: 189133 - DNA, 25 bp, Artificial
  Probe
aagcagacaaaatcaacatggtcat

SEQ ID NO: 189134 - DNA, 25 bp, Artificial
  Probe
ggctttaatacgtgagcgtgctaaa

SEQ ID NO: 189135 - DNA, 25 bp, Artificial
  Probe
ggcgtttatttctgcagggctgaaa

SEQ ID NO: 189136 - DNA, 25 bp, Artificial
  Probe
ggctttccggcagaacgcatccact

SEQ ID NO: 189137 - DNA, 25 bp, Artificial
  Probe
ttagatgtcgtatccggagagagct

SEQ ID NO: 189138 - DNA, 25 bp, Artificial
  Probe
tttagatgtcgtatccggagagagc

SEQ ID NO: 189139 - DNA, 25 bp, Artificial
  Probe
ctgaaagcacaggtggcatatgcga

SEQ ID NO: 189140 - DNA, 25 bp, Artificial
  Probe
cgcaatgattcagctcgctgaggaa

SEQ ID NO: 189141 - DNA, 25 bp, Artificial
  Probe
gcaggctttccggcagaacgcatcc

SEQ ID NO: 189142 - DNA, 25 bp, Artificial
  Probe
tcgatcttcataacggacaaactga

SEQ ID NO: 189143 - DNA, 25 bp, Artificial
  Probe
gaagcgcatacgcatgactacatta

SEQ ID NO: 189144 - DNA, 25 bp, Artificial
  Probe
ggtcactccatcgatgttcttcttc

SEQ ID NO: 189145 - DNA, 25 bp, Artificial
  Probe
catcggctgcattgtggtggataat

SEQ ID NO: 189146 - DNA, 25 bp, Artificial
  Probe
cgggtcactccatcgatgttcttct

SEQ ID NO: 189147 - DNA, 25 bp, Artificial
  Probe
cgcttgagcaccgcatcggctgcat

SEQ ID NO: 189148 - DNA, 25 bp, Artificial
  Probe
tccatcgatgttcttcttcggatca

SEQ ID NO: 189149 - DNA, 25 bp, Artificial
  Probe
attcagctgctgggtgtccattgcc

SEQ ID NO: 189150 - DNA, 25 bp, Artificial
  Probe
atcggaacacattcagctgctgggt

SEQ ID NO: 189151 - DNA, 25 bp, Artificial
  Probe
atcacgcccggagtagaagcgcata

SEQ ID NO: 189152 - DNA, 25 bp, Artificial
  Probe
ggctcgcaaatctttgatacggccg

SEQ ID NO: 189153 - DNA, 25 bp, Artificial
  Probe
gtagaagcgcatacgcatgactaca

SEQ ID NO: 189154 - DNA, 25 bp, Artificial
  Probe
tcggaacacattcagctgctgggtg

SEQ ID NO: 189155 - DNA, 25 bp, Artificial
  Probe
accgcatcggctgcattgtggtgga

SEQ ID NO: 189156 - DNA, 25 bp, Artificial
  Probe
tctatgaaatcgtcgcttcttgaag

SEQ ID NO: 189157 - DNA, 25 bp, Artificial
  Probe
tggcgcttgagcaccgcatcggctg

SEQ ID NO: 189158 - DNA, 25 bp, Artificial
  Probe
tcgtcgcttcttgaagacctatgta

SEQ ID NO: 189159 - DNA, 25 bp, Artificial
  Probe
cattgccatatcggctcgcaaatct

SEQ ID NO: 189160 - DNA, 25 bp, Artificial
  Probe
tcacgcccggagtagaagcgcatac

SEQ ID NO: 189161 - DNA, 25 bp, Artificial
  Probe
gctcgcaaatctttgatacggccgg

SEQ ID NO: 189162 - DNA, 25 bp, Artificial
  Probe
tcgcttcttgaagacctatgtaaag

SEQ ID NO: 189163 - DNA, 25 bp, Artificial
  Probe
cggatcacgcccggagtagaagcgc

SEQ ID NO: 189164 - DNA, 25 bp, Artificial
  Probe
catacgcatgactacattacaacgg

SEQ ID NO: 189165 - DNA, 25 bp, Artificial
  Probe
tcaaagtttggtttcgatcttcata

SEQ ID NO: 189166 - DNA, 25 bp, Artificial
  Probe
atcggctcgcaaatctttgatacgg

SEQ ID NO: 189167 - DNA, 25 bp, Artificial
  Probe
gtccattgccatatcggctcgcaaa

SEQ ID NO: 189168 - DNA, 25 bp, Artificial
  Probe
cactccatcgatgttcttcttcgga

SEQ ID NO: 189169 - DNA, 25 bp, Artificial
  Probe
acgcatgactacattacaacgggcc

SEQ ID NO: 189170 - DNA, 25 bp, Artificial
  Probe
agctgctgggtgtccattgccatat

SEQ ID NO: 189171 - DNA, 25 bp, Artificial
  Probe
gcatacgcatgactacattacaacg

SEQ ID NO: 189172 - DNA, 25 bp, Artificial
  Probe
atgaaatcgtcgcttcttgaagacc

SEQ ID NO: 189173 - DNA, 25 bp, Artificial
  Probe
ggtgtccattgccatatcggctcgc

SEQ ID NO: 189174 - DNA, 25 bp, Artificial
  Probe
gcttgagcaccgcatcggctgcatt

SEQ ID NO: 189175 - DNA, 25 bp, Artificial
  Probe
cgatgttcttcttcggatcacgccc

SEQ ID NO: 189176 - DNA, 25 bp, Artificial
  Probe
gtattacaatcggaacacattcagc

SEQ ID NO: 189177 - DNA, 25 bp, Artificial
  Probe
gaagaactgcggatggcgcttgagc

SEQ ID NO: 189178 - DNA, 25 bp, Artificial
  Probe
ccattgccatatcggctcgcaaatc

SEQ ID NO: 189179 - DNA, 25 bp, Artificial
  Probe
ataatttctatgaaatcgtcgcttc

SEQ ID NO: 189180 - DNA, 25 bp, Artificial
  Probe
gaaacgggtcactccatcgatgttc

SEQ ID NO: 189181 - DNA, 25 bp, Artificial
  Probe
cagctgctgggtgtccattgccata

SEQ ID NO: 189182 - DNA, 25 bp, Artificial
  Probe
gatcttcataacggacaaactgaac

SEQ ID NO: 189183 - DNA, 25 bp, Artificial
  Probe
catatcggctcgcaaatctttgata

SEQ ID NO: 189184 - DNA, 25 bp, Artificial
  Probe
ctgctgggtgtccattgccatatcg

SEQ ID NO: 189185 - DNA, 25 bp, Artificial
  Probe
atttctatgaaatcgtcgcttcttg

SEQ ID NO: 189186 - DNA, 25 bp, Artificial
  Probe
ttcgatcttcataacggacaaactg

SEQ ID NO: 189187 - DNA, 25 bp, Artificial
  Probe
gcatcggctgcattgtggtggataa

SEQ ID NO: 189188 - DNA, 25 bp, Artificial
  Probe
aactgcggatggcgcttgagcaccg

SEQ ID NO: 189189 - DNA, 25 bp, Artificial
  Probe
catgactacattacaacgggccagg

SEQ ID NO: 189190 - DNA, 25 bp, Artificial
  Probe
gaacacattcagctgctgggtgtcc

SEQ ID NO: 189191 - DNA, 25 bp, Artificial
  Probe
caatcggaacacattcagctgctgg

SEQ ID NO: 189192 - DNA, 25 bp, Artificial
  Probe
ggcagagcccggtccattgtatcag

SEQ ID NO: 189193 - DNA, 25 bp, Artificial
  Probe
cccacctttgggtgatgggtgcctt

SEQ ID NO: 189194 - DNA, 25 bp, Artificial
  Probe
tgccttaggtcctctgcagctgtac

SEQ ID NO: 189195 - DNA, 25 bp, Artificial
  Probe
tcctggcctgagtggtgccctcctg

SEQ ID NO: 189196 - DNA, 25 bp, Artificial
  Probe
tacagaaggggctcttctctccaca

SEQ ID NO: 189197 - DNA, 25 bp, Artificial
  Probe
agatgtgtggagctaggagctacca

SEQ ID NO: 189198 - DNA, 25 bp, Artificial
  Probe
ctgcagctgtacagaaggggctctt

SEQ ID NO: 189199 - DNA, 25 bp, Artificial
  Probe
ctggacccacctttgggtgatgggt

SEQ ID NO: 189200 - DNA, 25 bp, Artificial
  Probe
acagggaggcccagggactgactcc

SEQ ID NO: 189201 - DNA, 25 bp, Artificial
  Probe
gtccattgtatcaggcagcccagcc

SEQ ID NO: 189202 - DNA, 25 bp, Artificial
  Probe
gggactggacccacctttgggtgat

SEQ ID NO: 189203 - DNA, 25 bp, Artificial
  Probe
cctctgcagctgtacagaaggggct

SEQ ID NO: 189204 - DNA, 25 bp, Artificial
  Probe
cctggcctgagtggtgccctcctgg

SEQ ID NO: 189205 - DNA, 25 bp, Artificial
  Probe
gatgggtgccttaggtcctctgcag

SEQ ID NO: 189206 - DNA, 25 bp, Artificial
  Probe
gtggttcctgcctggcctggacaca

SEQ ID NO: 189207 - DNA, 25 bp, Artificial
  Probe
ccttaggtcctctgcagctgtacag

SEQ ID NO: 189208 - DNA, 25 bp, Artificial
  Probe
tctccacagagctggggtgcagccc

SEQ ID NO: 189209 - DNA, 25 bp, Artificial
  Probe
aggcccagggactgactcctcctgg

SEQ ID NO: 189210 - DNA, 25 bp, Artificial
  Probe
tctggtggttcctgcctggcctgga

SEQ ID NO: 189211 - DNA, 25 bp, Artificial
  Probe
cacctttgggtgatgggtgccttag

SEQ ID NO: 189212 - DNA, 25 bp, Artificial
  Probe
ggtgccttaggtcctctgcagctgt

SEQ ID NO: 189213 - DNA, 25 bp, Artificial
  Probe
cactagatgtgtggagctaggagct

SEQ ID NO: 189214 - DNA, 25 bp, Artificial
  Probe
gtcctctgcagctgtacagaagggg

SEQ ID NO: 189215 - DNA, 25 bp, Artificial
  Probe
ggactgactcctcctggcctgagtg

SEQ ID NO: 189216 - DNA, 25 bp, Artificial
  Probe
ccacacgtgattttgaatgagtgta

SEQ ID NO: 189217 - DNA, 25 bp, Artificial
  Probe
acctctggtggttcctgcctggcct

SEQ ID NO: 189218 - DNA, 25 bp, Artificial
  Probe
aggtcctctgcagctgtacagaagg

SEQ ID NO: 189219 - DNA, 25 bp, Artificial
  Probe
gggctcttctctccacagagctggg

SEQ ID NO: 189220 - DNA, 25 bp, Artificial
  Probe
cccacacgtgattttgaatgagtgt

SEQ ID NO: 189221 - DNA, 25 bp, Artificial
  Probe
cctggcctggacacagggaggccca

SEQ ID NO: 189222 - DNA, 25 bp, Artificial
  Probe
ctagatgtgtggagctaggagctac

SEQ ID NO: 189223 - DNA, 25 bp, Artificial
  Probe
ccccagggcacatggcaagagggac

SEQ ID NO: 189224 - DNA, 25 bp, Artificial
  Probe
taacctggcccttggaataaagttg

SEQ ID NO: 189225 - DNA, 25 bp, Artificial
  Probe
tcctgcctggcctggacacagggag

SEQ ID NO: 189226 - DNA, 25 bp, Artificial
  Probe
ttaggtcctctgcagctgtacagaa

SEQ ID NO: 189227 - DNA, 25 bp, Artificial
  Probe
cagctgtacagaaggggctcttctc

SEQ ID NO: 189228 - DNA, 25 bp, Artificial
  Probe
tgatgggtgccttaggtcctctgca

SEQ ID NO: 189229 - DNA, 25 bp, Artificial
  Probe
ctcttctctccacagagctggggtg

SEQ ID NO: 189230 - DNA, 25 bp, Artificial
  Probe
gcacatggcaagagggactggaccc

SEQ ID NO: 189231 - DNA, 25 bp, Artificial
  Probe
gcccggtccattgtatcaggcagcc

SEQ ID NO: 189232 - DNA, 25 bp, Artificial
  Probe
ccggtccattgtatcaggcagccca

SEQ ID NO: 189233 - DNA, 25 bp, Artificial
  Probe
tccacctctggtggttcctgcctgg

SEQ ID NO: 189234 - DNA, 25 bp, Artificial
  Probe
aaggggctcttctctccacagagct

SEQ ID NO: 189235 - DNA, 25 bp, Artificial
  Probe
cagccccagggcacatggcaagagg

SEQ ID NO: 189236 - DNA, 25 bp, Artificial
  Probe
cagggactgactcctcctggcctga

SEQ ID NO: 189237 - DNA, 25 bp, Artificial
  Probe
ggaggcccagggactgactcctcct

SEQ ID NO: 189238 - DNA, 25 bp, Artificial
  Probe
ctcatgtgcgattggcaaacattct

SEQ ID NO: 189239 - DNA, 25 bp, Artificial
  Probe
acttggaacatgtgagtccttaata

SEQ ID NO: 189240 - DNA, 25 bp, Artificial
  Probe
tttgcgtggatatattcgagtcgtc

SEQ ID NO: 189241 - DNA, 25 bp, Artificial
  Probe
gtggctgacaggacagatgaagtca

SEQ ID NO: 189242 - DNA, 25 bp, Artificial
  Probe
tggtgcctcatgtgcgattggcaaa

SEQ ID NO: 189243 - DNA, 25 bp, Artificial
  Probe
cctatagtcctattaggaaaaactg

SEQ ID NO: 189244 - DNA, 25 bp, Artificial
  Probe
tatgcagatggcttgctgtgtttgc

SEQ ID NO: 189245 - DNA, 25 bp, Artificial
  Probe
cacacgtatagctgtattggaggat

SEQ ID NO: 189246 - DNA, 25 bp, Artificial
  Probe
gaacctggtgcctcatgtgcgattg

SEQ ID NO: 189247 - DNA, 25 bp, Artificial
  Probe
actgacctctctggaccttcttatg

SEQ ID NO: 189248 - DNA, 25 bp, Artificial
  Probe
tctccagagaaagtgcatggcatta

SEQ ID NO: 189249 - DNA, 25 bp, Artificial
  Probe
ggcaagtcactgacctctctggacc

SEQ ID NO: 189250 - DNA, 25 bp, Artificial
  Probe
caagagactgagtgtccacagattt

SEQ ID NO: 189251 - DNA, 25 bp, Artificial
  Probe
gattgaacctggtgcctcatgtgcg

SEQ ID NO: 189252 - DNA, 25 bp, Artificial
  Probe
gaacatgtgagtccttaataggtct

SEQ ID NO: 189253 - DNA, 25 bp, Artificial
  Probe
agactgagtgtccacagatttatat

SEQ ID NO: 189254 - DNA, 25 bp, Artificial
  Probe
tgagagtttccatgcctatgtggtc

SEQ ID NO: 189255 - DNA, 25 bp, Artificial
  Probe
aagttcccagcacttagtaggttca

SEQ ID NO: 189256 - DNA, 25 bp, Artificial
  Probe
taataggtctgtgtagtttcctgct

SEQ ID NO: 189257 - DNA, 25 bp, Artificial
  Probe
tggatatattcgagtcgtctccaga

SEQ ID NO: 189258 - DNA, 25 bp, Artificial
  Probe
tattggaggattgaacctggtgcct

SEQ ID NO: 189259 - DNA, 25 bp, Artificial
  Probe
tgaaaagttcccagcacttagtagg

SEQ ID NO: 189260 - DNA, 25 bp, Artificial
  Probe
gtcactgacctctctggaccttctt

SEQ ID NO: 189261 - DNA, 25 bp, Artificial
  Probe
aagttgggcatttggcaacaaaaca

SEQ ID NO: 189262 - DNA, 25 bp, Artificial
  Probe
aaatgagagtttccatgcctatgtg

SEQ ID NO: 189263 - DNA, 25 bp, Artificial
  Probe
agtttccatgcctatgtggtcttaa

SEQ ID NO: 189264 - DNA, 25 bp, Artificial
  Probe
cagcacttagtaggttcaataaatg

SEQ ID NO: 189265 - DNA, 25 bp, Artificial
  Probe
gattggcaaacattctacctccaag

SEQ ID NO: 189266 - DNA, 25 bp, Artificial
  Probe
gtccttaataggtctgtgtagtttc

SEQ ID NO: 189267 - DNA, 25 bp, Artificial
  Probe
ataggtctgtgtagtttcctgcttc

SEQ ID NO: 189268 - DNA, 25 bp, Artificial
  Probe
gacctctctggaccttcttatgtct

SEQ ID NO: 189269 - DNA, 25 bp, Artificial
  Probe
catgtgagtccttaataggtctgtg

SEQ ID NO: 189270 - DNA, 25 bp, Artificial
  Probe
gcaaagttgggcatttggcaacaaa

SEQ ID NO: 189271 - DNA, 25 bp, Artificial
  Probe
gcctcatgtgcgattggcaaacatt

SEQ ID NO: 189272 - DNA, 25 bp, Artificial
  Probe
cctatgtggtcttaaggaacagtgg

SEQ ID NO: 189273 - DNA, 25 bp, Artificial
  Probe
aggattgaacctggtgcctcatgtg

SEQ ID NO: 189274 - DNA, 25 bp, Artificial
  Probe
acatacacacgtatagctgtattgg

SEQ ID NO: 189275 - DNA, 25 bp, Artificial
  Probe
gcatttggcaacaaaacagggagga

SEQ ID NO: 189276 - DNA, 25 bp, Artificial
  Probe
cagcccctatagtcctattaggaaa

SEQ ID NO: 189277 - DNA, 25 bp, Artificial
  Probe
aacatgaaaagttcccagcacttag

SEQ ID NO: 189278 - DNA, 25 bp, Artificial
  Probe
gcacacatacacacgtatagctgta

SEQ ID NO: 189279 - DNA, 25 bp, Artificial
  Probe
aagcacacatacacacgtatagctg

SEQ ID NO: 189280 - DNA, 25 bp, Artificial
  Probe
ctatagtcctattaggaaaaactgt

SEQ ID NO: 189281 - DNA, 25 bp, Artificial
  Probe
gtttcctgcttctctggtacaataa

SEQ ID NO: 189282 - DNA, 25 bp, Artificial
  Probe
tgtggctgacaggacagatgaagtc

SEQ ID NO: 189283 - DNA, 25 bp, Artificial
  Probe
tgcagatggcttgctgtgtttgcgt

SEQ ID NO: 189284 - DNA, 25 bp, Artificial
  Probe
tgcggtgaacccaataagccaggca

SEQ ID NO: 189285 - DNA, 25 bp, Artificial
  Probe
atgacctgatgctgctccacctcag

SEQ ID NO: 189286 - DNA, 25 bp, Artificial
  Probe
attaagttcacctcctggataaaag

SEQ ID NO: 189287 - DNA, 25 bp, Artificial
  Probe
tgatggtgtgctccaaggcatcaca

SEQ ID NO: 189288 - DNA, 25 bp, Artificial
  Probe
ggctctgtcccatgcggtgaaccca

SEQ ID NO: 189289 - DNA, 25 bp, Artificial
  Probe
agcacctgccttgtctcaggctggg

SEQ ID NO: 189290 - DNA, 25 bp, Artificial
  Probe
ggaaaacccctgagtgtcacactgt

SEQ ID NO: 189291 - DNA, 25 bp, Artificial
  Probe
cagatctgatgctgtgtgcaggaga

SEQ ID NO: 189292 - DNA, 25 bp, Artificial
  Probe
agtgtgtgaacatccacctactgtc

SEQ ID NO: 189293 - DNA, 25 bp, Artificial
  Probe
gtgctccaaggcatcacatcatggg

SEQ ID NO: 189294 - DNA, 25 bp, Artificial
  Probe
ctactgtctaatgagaagtgcatca

SEQ ID NO: 189295 - DNA, 25 bp, Artificial
  Probe
gtgggaattccctgatgatctccag

SEQ ID NO: 189296 - DNA, 25 bp, Artificial
  Probe
ccctgagtgtcacactgtaccctga

SEQ ID NO: 189297 - DNA, 25 bp, Artificial
  Probe
acctcctggataaaagaagttatga

SEQ ID NO: 189298 - DNA, 25 bp, Artificial
  Probe
ctccagtgtgtgaacatccacctac

SEQ ID NO: 189299 - DNA, 25 bp, Artificial
  Probe
cctctgagtgggaattccctgatga

SEQ ID NO: 189300 - DNA, 25 bp, Artificial
  Probe
atcgatctgcccacgaaggagccca

SEQ ID NO: 189301 - DNA, 25 bp, Artificial
  Probe
tcatggggctctgtcccatgcggtg

SEQ ID NO: 189302 - DNA, 25 bp, Artificial
  Probe
aacccctctgagtgggaattccctg

SEQ ID NO: 189303 - DNA, 25 bp, Artificial
  Probe
ctgcccacgaaggagcccaaggtgg

SEQ ID NO: 189304 - DNA, 25 bp, Artificial
  Probe
gcgagcctgcggacatcacagatgg

SEQ ID NO: 189305 - DNA, 25 bp, Artificial
  Probe
tctgagtgggaattccctgatgatc

SEQ ID NO: 189306 - DNA, 25 bp, Artificial
  Probe
ggagcacctgccttgtctcaggctg

SEQ ID NO: 189307 - DNA, 25 bp, Artificial
  Probe
gtgaacccaataagccaggcatcta

SEQ ID NO: 189308 - DNA, 25 bp, Artificial
  Probe
tgtcccatgcggtgaacccaataag

SEQ ID NO: 189309 - DNA, 25 bp, Artificial
  Probe
agaagtgcatcaaagcctacaaaga

SEQ ID NO: 189310 - DNA, 25 bp, Artificial
  Probe
aggtgacagatctgatgctgtgtgc

SEQ ID NO: 189311 - DNA, 25 bp, Artificial
  Probe
gaacatccacctactgtctaatgag

SEQ ID NO: 189312 - DNA, 25 bp, Artificial
  Probe
gggctctgtcccatgcggtgaaccc

SEQ ID NO: 189313 - DNA, 25 bp, Artificial
  Probe
gtgaaggtcatcgatctgcccacga

SEQ ID NO: 189314 - DNA, 25 bp, Artificial
  Probe
ttatgaaggaaaacccctgagtgtc

SEQ ID NO: 189315 - DNA, 25 bp, Artificial
  Probe
ctgcggacatcacagatggggtgaa

SEQ ID NO: 189316 - DNA, 25 bp, Artificial
  Probe
cccatgcggtgaacccaataagcca

SEQ ID NO: 189317 - DNA, 25 bp, Artificial
  Probe
gaagtgcatcaaagcctacaaagaa

SEQ ID NO: 189318 - DNA, 25 bp, Artificial
  Probe
ggcatcacatcatggggctctgtcc

SEQ ID NO: 189319 - DNA, 25 bp, Artificial
  Probe
tcacagatggggtgaaggtcatcga

SEQ ID NO: 189320 - DNA, 25 bp, Artificial
  Probe
caaagacacttgcaggggtgactca

SEQ ID NO: 189321 - DNA, 25 bp, Artificial
  Probe
cccctcatctgtgatggtgtgctcc

SEQ ID NO: 189322 - DNA, 25 bp, Artificial
  Probe
acatcatggggctctgtcccatgcg

SEQ ID NO: 189323 - DNA, 25 bp, Artificial
  Probe
agcctgcggacatcacagatggggt

SEQ ID NO: 189324 - DNA, 25 bp, Artificial
  Probe
caacccctctgagtgggaattccct

SEQ ID NO: 189325 - DNA, 25 bp, Artificial
  Probe
aggtcatcgatctgcccacgaagga

SEQ ID NO: 189326 - DNA, 25 bp, Artificial
  Probe
aaggaaaacccctgagtgtcacact

SEQ ID NO: 189327 - DNA, 25 bp, Artificial
  Probe
aaacccctgagtgtcacactgtacc

SEQ ID NO: 189328 - DNA, 25 bp, Artificial
  Probe
ggggactacagcaatgacctgatgc

SEQ ID NO: 189329 - DNA, 25 bp, Artificial
  Probe
ggcaaagacacttgcaggggtgact

SEQ ID NO: 189330 - DNA, 25 bp, Artificial
  Probe
agtggctgtcattggtacaactttc

SEQ ID NO: 189331 - DNA, 25 bp, Artificial
  Probe
attggtacaactttctgcgggggtg

SEQ ID NO: 189332 - DNA, 25 bp, Artificial
  Probe
cattggtacaactttctgcgggggt

SEQ ID NO: 189333 - DNA, 25 bp, Artificial
  Probe
ctgtcattggtacaactttctgcgg

SEQ ID NO: 189334 - DNA, 25 bp, Artificial
  Probe
aagtggctgtcattggtacaacttt

SEQ ID NO: 189335 - DNA, 25 bp, Artificial
  Probe
gtcattggtacaactttctgcgggg

SEQ ID NO: 189336 - DNA, 25 bp, Artificial
  Probe
gtacaactttctgcgggggtgtcct

SEQ ID NO: 189337 - DNA, 25 bp, Artificial
  Probe
tgctgctactggacacacgatatca

SEQ ID NO: 189338 - DNA, 25 bp, Artificial
  Probe
cccgacaacgtgcgtatgaccacaa

SEQ ID NO: 189339 - DNA, 25 bp, Artificial
  Probe
ttggtacaactttctgcgggggtgt

SEQ ID NO: 189340 - DNA, 25 bp, Artificial
  Probe
ctgctgctactggacacacgatatc

SEQ ID NO: 189341 - DNA, 25 bp, Artificial
  Probe
tactggacacacgatatcatgtggt

SEQ ID NO: 189342 - DNA, 25 bp, Artificial
  Probe
gctgctactggacacacgatatcat

SEQ ID NO: 189343 - DNA, 25 bp, Artificial
  Probe
ggcaagtggctgtcattggtacaac

SEQ ID NO: 189344 - DNA, 25 bp, Artificial
  Probe
gtggctgtcattggtacaactttct

SEQ ID NO: 189345 - DNA, 25 bp, Artificial
  Probe
tggcaagtggctgtcattggtacaa

SEQ ID NO: 189346 - DNA, 25 bp, Artificial
  Probe
ggctgtcattggtacaactttctgc

SEQ ID NO: 189347 - DNA, 25 bp, Artificial
  Probe
tggtacaactttctgcgggggtgtc

SEQ ID NO: 189348 - DNA, 25 bp, Artificial
  Probe
tacaactttctgcgggggtgtcctg

SEQ ID NO: 189349 - DNA, 25 bp, Artificial
  Probe
gctgtcattggtacaactttctgcg

SEQ ID NO: 189350 - DNA, 25 bp, Artificial
  Probe
tggctgtcattggtacaactttctg

SEQ ID NO: 189351 - DNA, 25 bp, Artificial
  Probe
tcattggtacaactttctgcggggg

SEQ ID NO: 189352 - DNA, 25 bp, Artificial
  Probe
gacaacgtgcgtatgaccacaacaa

SEQ ID NO: 189353 - DNA, 25 bp, Artificial
  Probe
cctgctgctactggacacacgatat

SEQ ID NO: 189354 - DNA, 25 bp, Artificial
  Probe
ctgctactggacacacgatatcatg

SEQ ID NO: 189355 - DNA, 25 bp, Artificial
  Probe
tgtcattggtacaactttctgcggg

SEQ ID NO: 189356 - DNA, 25 bp, Artificial
  Probe
caagtggctgtcattggtacaactt

SEQ ID NO: 189357 - DNA, 25 bp, Artificial
  Probe
gctactggacacacgatatcatgtg

SEQ ID NO: 189358 - DNA, 25 bp, Artificial
  Probe
ccgacaacgtgcgtatgaccacaac

SEQ ID NO: 189359 - DNA, 25 bp, Artificial
  Probe
tgctactggacacacgatatcatgt

SEQ ID NO: 189360 - DNA, 25 bp, Artificial
  Probe
cgacaacgtgcgtatgaccacaaca

SEQ ID NO: 189361 - DNA, 25 bp, Artificial
  Probe
gcaagtggctgtcattggtacaact

SEQ ID NO: 189362 - DNA, 25 bp, Artificial
  Probe
agtcatacgacattagctaaaaatg

SEQ ID NO: 189363 - DNA, 25 bp, Artificial
  Probe
gcagtccctggacacagttttgcag

SEQ ID NO: 189364 - DNA, 25 bp, Artificial
  Probe
taccctcacgactctgcggaatttg

SEQ ID NO: 189365 - DNA, 25 bp, Artificial
  Probe
accctcacgactctgcggaatttgg

SEQ ID NO: 189366 - DNA, 25 bp, Artificial
  Probe
ctgagatatgctctgttgctcctgc

SEQ ID NO: 189367 - DNA, 25 bp, Artificial
  Probe
gtccctggacacagttttgcagttt

SEQ ID NO: 189368 - DNA, 25 bp, Artificial
  Probe
agtccctggacacagttttgcagtt

SEQ ID NO: 189369 - DNA, 25 bp, Artificial
  Probe
cacagttttgcagttttttccctgt

SEQ ID NO: 189370 - DNA, 25 bp, Artificial
  Probe
tggacacagttttgcagttttttcc

SEQ ID NO: 189371 - DNA, 25 bp, Artificial
  Probe
aaaaactcaatgagaacatgaagat

SEQ ID NO: 189372 - DNA, 25 bp, Artificial
  Probe
gacacagttttgcagttttttccct

SEQ ID NO: 189373 - DNA, 25 bp, Artificial
  Probe
catacgacattagctaaaaatgtgt

SEQ ID NO: 189374 - DNA, 25 bp, Artificial
  Probe
gagcagtccctggacacagttttgc

SEQ ID NO: 189375 - DNA, 25 bp, Artificial
  Probe
ctggacacagttttgcagttttttc

SEQ ID NO: 189376 - DNA, 25 bp, Artificial
  Probe
ggaagcttcccagtagctgaaaaaa

SEQ ID NO: 189377 - DNA, 25 bp, Artificial
  Probe
atgctctgttgctcctgctgaagtg

SEQ ID NO: 189378 - DNA, 25 bp, Artificial
  Probe
agcagtccctggacacagttttgca

SEQ ID NO: 189379 - DNA, 25 bp, Artificial
  Probe
aggaagcttcccagtagctgaaaaa

SEQ ID NO: 189380 - DNA, 25 bp, Artificial
  Probe
acacagttttgcagttttttccctg

SEQ ID NO: 189381 - DNA, 25 bp, Artificial
  Probe
ttaccctcacgactctgcggaattt

SEQ ID NO: 189382 - DNA, 25 bp, Artificial
  Probe
gattttgagcagtccctggacacag

SEQ ID NO: 189383 - DNA, 25 bp, Artificial
  Probe
tgagcagtccctggacacagttttg

SEQ ID NO: 189384 - DNA, 25 bp, Artificial
  Probe
agattttgagcagtccctggacaca

SEQ ID NO: 189385 - DNA, 25 bp, Artificial
  Probe
tgctctgttgctcctgctgaagtgt

SEQ ID NO: 189386 - DNA, 25 bp, Artificial
  Probe
cagtccctggacacagttttgcagt

SEQ ID NO: 189387 - DNA, 25 bp, Artificial
  Probe
cttatcaatcactgtgactgatttg

SEQ ID NO: 189388 - DNA, 25 bp, Artificial
  Probe
ccctggacacagttttgcagttttt

SEQ ID NO: 189389 - DNA, 25 bp, Artificial
  Probe
aataagacgctttaccctcacgact

SEQ ID NO: 189390 - DNA, 25 bp, Artificial
  Probe
ttgagcagtccctggacacagtttt

SEQ ID NO: 189391 - DNA, 25 bp, Artificial
  Probe
ggaaaatcacaatccacattcggaa

SEQ ID NO: 189392 - DNA, 25 bp, Artificial
  Probe
ttatcaatcactgtgactgatttgt

SEQ ID NO: 189393 - DNA, 25 bp, Artificial
  Probe
tgtccgggaagtcatacgacattag

SEQ ID NO: 189394 - DNA, 25 bp, Artificial
  Probe
gtccgggaagtcatacgacattagc

SEQ ID NO: 189395 - DNA, 25 bp, Artificial
  Probe
tagaaactaccttctgaagaaaata

SEQ ID NO: 189396 - DNA, 25 bp, Artificial
  Probe
tcatacgacattagctaaaaatgtg

SEQ ID NO: 189397 - DNA, 25 bp, Artificial
  Probe
gaagcttcccagtagctgaaaaaat

SEQ ID NO: 189398 - DNA, 25 bp, Artificial
  Probe
ctcacgactctgcggaatttgggca

SEQ ID NO: 189399 - DNA, 25 bp, Artificial
  Probe
ctttaccctcacgactctgcggaat

SEQ ID NO: 189400 - DNA, 25 bp, Artificial
  Probe
aagattttgagcagtccctggacac

SEQ ID NO: 189401 - DNA, 25 bp, Artificial
  Probe
gaagtcatacgacattagctaaaaa

SEQ ID NO: 189402 - DNA, 25 bp, Artificial
  Probe
cctggacacagttttgcagtttttt

SEQ ID NO: 189403 - DNA, 25 bp, Artificial
  Probe
ttattgattattacctaattaagtg

SEQ ID NO: 189404 - DNA, 25 bp, Artificial
  Probe
aagcttcccagtagctgaaaaaatt

SEQ ID NO: 189405 - DNA, 25 bp, Artificial
  Probe
tccctggacacagttttgcagtttt

SEQ ID NO: 189406 - DNA, 25 bp, Artificial
  Probe
gtcatacgacattagctaaaaatgt

SEQ ID NO: 189407 - DNA, 25 bp, Artificial
  Probe
gaaataagacgctttaccctcacga

SEQ ID NO: 189408 - DNA, 25 bp, Artificial
  Probe
aacaccctggtgtgtgtgcagaaag

SEQ ID NO: 189409 - DNA, 25 bp, Artificial
  Probe
agtcacctgggaaggaaacaccctg

SEQ ID NO: 189410 - DNA, 25 bp, Artificial
  Probe
ggccggaacgtcaagaccctagtca

SEQ ID NO: 189411 - DNA, 25 bp, Artificial
  Probe
aacgtcaagaccctagtcacctggg

SEQ ID NO: 189412 - DNA, 25 bp, Artificial
  Probe
caagaccctagtcacctgggaagga

SEQ ID NO: 189413 - DNA, 25 bp, Artificial
  Probe
aaacaccctggtgtgtgtgcagaaa

SEQ ID NO: 189414 - DNA, 25 bp, Artificial
  Probe
acaccctggtgtgtgtgcagaaagg

SEQ ID NO: 189415 - DNA, 25 bp, Artificial
  Probe
ctggtgtgtgtgcagaaaggggaga

SEQ ID NO: 189416 - DNA, 25 bp, Artificial
  Probe
gtcaagaccctagtcacctgggaag

SEQ ID NO: 189417 - DNA, 25 bp, Artificial
  Probe
ccctggtgtgtgtgcagaaagggga

SEQ ID NO: 189418 - DNA, 25 bp, Artificial
  Probe
ggaaggaaacaccctggtgtgtgtg

SEQ ID NO: 189419 - DNA, 25 bp, Artificial
  Probe
gaaggaaacaccctggtgtgtgtgc

SEQ ID NO: 189420 - DNA, 25 bp, Artificial
  Probe
tcaagaccctagtcacctgggaagg

SEQ ID NO: 189421 - DNA, 25 bp, Artificial
  Probe
tggtgtgtgtgcagaaaggggagaa

SEQ ID NO: 189422 - DNA, 25 bp, Artificial
  Probe
gccggaacgtcaagaccctagtcac

SEQ ID NO: 189423 - DNA, 25 bp, Artificial
  Probe
tagtcacctgggaaggaaacaccct

SEQ ID NO: 189424 - DNA, 25 bp, Artificial
  Probe
cggaacgtcaagaccctagtcacct

SEQ ID NO: 189425 - DNA, 25 bp, Artificial
  Probe
gaacgtcaagaccctagtcacctgg

SEQ ID NO: 189426 - DNA, 25 bp, Artificial
  Probe
ggtgtgtgtgcagaaaggggagaag

SEQ ID NO: 189427 - DNA, 25 bp, Artificial
  Probe
aggaaacaccctggtgtgtgtgcag

SEQ ID NO: 189428 - DNA, 25 bp, Artificial
  Probe
ggaacgtcaagaccctagtcacctg

SEQ ID NO: 189429 - DNA, 25 bp, Artificial
  Probe
cctggtgtgtgtgcagaaaggggag

SEQ ID NO: 189430 - DNA, 25 bp, Artificial
  Probe
caccctggtgtgtgtgcagaaaggg

SEQ ID NO: 189431 - DNA, 25 bp, Artificial
  Probe
acgtcaagaccctagtcacctggga

SEQ ID NO: 189432 - DNA, 25 bp, Artificial
  Probe
accctggtgtgtgtgcagaaagggg

SEQ ID NO: 189433 - DNA, 25 bp, Artificial
  Probe
cgtcaagaccctagtcacctgggaa

SEQ ID NO: 189434 - DNA, 25 bp, Artificial
  Probe
gaaacaccctggtgtgtgtgcagaa

SEQ ID NO: 189435 - DNA, 25 bp, Artificial
  Probe
tgtgtgtgcagaaaggggagaagga

SEQ ID NO: 189436 - DNA, 25 bp, Artificial
  Probe
aaggaaacaccctggtgtgtgtgca

SEQ ID NO: 189437 - DNA, 25 bp, Artificial
  Probe
ggaaacaccctggtgtgtgtgcaga

SEQ ID NO: 189438 - DNA, 25 bp, Artificial
  Probe
tctgtagggctggacctttggccaa

SEQ ID NO: 189439 - DNA, 25 bp, Artificial
  Probe
cttctgcaggcctggatctcgacac

SEQ ID NO: 189440 - DNA, 25 bp, Artificial
  Probe
tagggctggacctttggccaaggac

SEQ ID NO: 189441 - DNA, 25 bp, Artificial
  Probe
gacacacgaatactgaacaatggct

SEQ ID NO: 189442 - DNA, 25 bp, Artificial
  Probe
agggctggacctttggccaaggaca

SEQ ID NO: 189443 - DNA, 25 bp, Artificial
  Probe
aatactgaacaatggctaggaggct

SEQ ID NO: 189444 - DNA, 25 bp, Artificial
  Probe
cgaatactgaacaatggctaggagg

SEQ ID NO: 189445 - DNA, 25 bp, Artificial
  Probe
cctttggccaaggacacacgaatac

SEQ ID NO: 189446 - DNA, 25 bp, Artificial
  Probe
tctttgccaagctaatctgtagggc

SEQ ID NO: 189447 - DNA, 25 bp, Artificial
  Probe
gccaaggacacacgaatactgaaca

SEQ ID NO: 189448 - DNA, 25 bp, Artificial
  Probe
ttgccaagctaatctgtagggctgg

SEQ ID NO: 189449 - DNA, 25 bp, Artificial
  Probe
ctgtccagacacatgccttctttgc

SEQ ID NO: 189450 - DNA, 25 bp, Artificial
  Probe
gccttctttgccaagctaatctgta

SEQ ID NO: 189451 - DNA, 25 bp, Artificial
  Probe
gaacaatggctaggaggctttaccg

SEQ ID NO: 189452 - DNA, 25 bp, Artificial
  Probe
acctttggccaaggacacacgaata

SEQ ID NO: 189453 - DNA, 25 bp, Artificial
  Probe
ttctgcaggcctggatctcgacacc

SEQ ID NO: 189454 - DNA, 25 bp, Artificial
  Probe
aagctaatctgtagggctggacctt

SEQ ID NO: 189455 - DNA, 25 bp, Artificial
  Probe
acaatggctaggaggctttaccgca

SEQ ID NO: 189456 - DNA, 25 bp, Artificial
  Probe
ttggccaaggacacacgaatactga

SEQ ID NO: 189457 - DNA, 25 bp, Artificial
  Probe
cacacgaatactgaacaatggctag

SEQ ID NO: 189458 - DNA, 25 bp, Artificial
  Probe
ctgaacaatggctaggaggctttac

SEQ ID NO: 189459 - DNA, 25 bp, Artificial
  Probe
caaggacacacgaatactgaacaat

SEQ ID NO: 189460 - DNA, 25 bp, Artificial
  Probe
ctgcaggcctggatctcgacaccat

SEQ ID NO: 189461 - DNA, 25 bp, Artificial
  Probe
gacacatgccttctttgccaagcta

SEQ ID NO: 189462 - DNA, 25 bp, Artificial
  Probe
tttggccaaggacacacgaatactg

SEQ ID NO: 189463 - DNA, 25 bp, Artificial
  Probe
tggccaaggacacacgaatactgaa

SEQ ID NO: 189464 - DNA, 25 bp, Artificial
  Probe
caggcctggatctcgacaccatagg

SEQ ID NO: 189465 - DNA, 25 bp, Artificial
  Probe
tgaacaatggctaggaggctttacc

SEQ ID NO: 189466 - DNA, 25 bp, Artificial
  Probe
tgcaggcctggatctcgacaccata

SEQ ID NO: 189467 - DNA, 25 bp, Artificial
  Probe
cacgaatactgaacaatggctagga

SEQ ID NO: 189468 - DNA, 25 bp, Artificial
  Probe
ctgtagggctggacctttggccaag

SEQ ID NO: 189469 - DNA, 25 bp, Artificial
  Probe
gggctggacctttggccaaggacac

SEQ ID NO: 189470 - DNA, 25 bp, Artificial
  Probe
aatctgtagggctggacctttggcc

SEQ ID NO: 189471 - DNA, 25 bp, Artificial
  Probe
ggacacacgaatactgaacaatggc

SEQ ID NO: 189472 - DNA, 25 bp, Artificial
  Probe
tgccaagctaatctgtagggctgga

SEQ ID NO: 189473 - DNA, 25 bp, Artificial
  Probe
cagacacatgccttctttgccaagc

SEQ ID NO: 189474 - DNA, 25 bp, Artificial
  Probe
cctgtccagacacatgccttctttg

SEQ ID NO: 189475 - DNA, 25 bp, Artificial
  Probe
ctttgccaagctaatctgtagggct

SEQ ID NO: 189476 - DNA, 25 bp, Artificial
  Probe
tgtccagacacatgccttctttgcc

SEQ ID NO: 189477 - DNA, 25 bp, Artificial
  Probe
ccaagctaatctgtagggctggacc

SEQ ID NO: 189478 - DNA, 25 bp, Artificial
  Probe
cttctttgccaagctaatctgtagg

SEQ ID NO: 189479 - DNA, 25 bp, Artificial
  Probe
acacgaatactgaacaatggctagg

SEQ ID NO: 189480 - DNA, 25 bp, Artificial
  Probe
ccttctttgccaagctaatctgtag

SEQ ID NO: 189481 - DNA, 25 bp, Artificial
  Probe
atctgtagggctggacctttggcca

SEQ ID NO: 189482 - DNA, 25 bp, Artificial
  Probe
aaggacacacgaatactgaacaatg

SEQ ID NO: 189483 - DNA, 25 bp, Artificial
  Probe
ggacctttggccaaggacacacgaa

SEQ ID NO: 189484 - DNA, 25 bp, Artificial
  Probe
ctgtttgaagtcatcctcagtctac

SEQ ID NO: 189485 - DNA, 25 bp, Artificial
  Probe
tcatcctcagtctacaaggtgttct

SEQ ID NO: 189486 - DNA, 25 bp, Artificial
  Probe
tgcctcttgtgtgttcctttacaag

SEQ ID NO: 189487 - DNA, 25 bp, Artificial
  Probe
tgaagtcatcctcagtctacaaggt

SEQ ID NO: 189488 - DNA, 25 bp, Artificial
  Probe
gcctgtttgaagtcatcctcagtct

SEQ ID NO: 189489 - DNA, 25 bp, Artificial
  Probe
cctttacaaggaatctctatctggt

SEQ ID NO: 189490 - DNA, 25 bp, Artificial
  Probe
agtcatcctcagtctacaaggtgtt

SEQ ID NO: 189491 - DNA, 25 bp, Artificial
  Probe
tacaaggaatctctatctggtggag

SEQ ID NO: 189492 - DNA, 25 bp, Artificial
  Probe
gaagagagctaacacttctggatac

SEQ ID NO: 189493 - DNA, 25 bp, Artificial
  Probe
gtttgaagtcatcctcagtctacaa

SEQ ID NO: 189494 - DNA, 25 bp, Artificial
  Probe
ctcttgtgtgttcctttacaaggaa

SEQ ID NO: 189495 - DNA, 25 bp, Artificial
  Probe
gtgttcctttacaaggaatctctat

SEQ ID NO: 189496 - DNA, 25 bp, Artificial
  Probe
cagtctacaaggtgttcttgcctct

SEQ ID NO: 189497 - DNA, 25 bp, Artificial
  Probe
aagtcatcctcagtctacaaggtgt

SEQ ID NO: 189498 - DNA, 25 bp, Artificial
  Probe
catcctcagtctacaaggtgttctt

SEQ ID NO: 189499 - DNA, 25 bp, Artificial
  Probe
tgtgtgttcctttacaaggaatctc

SEQ ID NO: 189500 - DNA, 25 bp, Artificial
  Probe
tctacaaggtgttcttgcctcttgt

SEQ ID NO: 189501 - DNA, 25 bp, Artificial
  Probe
tgcctgtttgaagtcatcctcagtc

SEQ ID NO: 189502 - DNA, 25 bp, Artificial
  Probe
tcagtctacaaggtgttcttgcctc

SEQ ID NO: 189503 - DNA, 25 bp, Artificial
  Probe
agagagctaacacttctggatactt

SEQ ID NO: 189504 - DNA, 25 bp, Artificial
  Probe
atcctcagtctacaaggtgttcttg

SEQ ID NO: 189505 - DNA, 25 bp, Artificial
  Probe
cctcagtctacaaggtgttcttgcc

SEQ ID NO: 189506 - DNA, 25 bp, Artificial
  Probe
agtctacaaggtgttcttgcctctt

SEQ ID NO: 189507 - DNA, 25 bp, Artificial
  Probe
aagagagctaacacttctggatact

SEQ ID NO: 189508 - DNA, 25 bp, Artificial
  Probe
ctcagtctacaaggtgttcttgcct

SEQ ID NO: 189509 - DNA, 25 bp, Artificial
  Probe
tcttgtgtgttcctttacaaggaat

SEQ ID NO: 189510 - DNA, 25 bp, Artificial
  Probe
ttgtgtgttcctttacaaggaatct

SEQ ID NO: 189511 - DNA, 25 bp, Artificial
  Probe
tcctttacaaggaatctctatctgg

SEQ ID NO: 189512 - DNA, 25 bp, Artificial
  Probe
acaaggtgttcttgcctcttgtgtg

SEQ ID NO: 189513 - DNA, 25 bp, Artificial
  Probe
tcctcagtctacaaggtgttcttgc

SEQ ID NO: 189514 - DNA, 25 bp, Artificial
  Probe
cctcttgtgtgttcctttacaagga

SEQ ID NO: 189515 - DNA, 25 bp, Artificial
  Probe
gaagtcatcctcagtctacaaggtg

SEQ ID NO: 189516 - DNA, 25 bp, Artificial
  Probe
cttgcctcttgtgtgttcctttaca

SEQ ID NO: 189517 - DNA, 25 bp, Artificial
  Probe
tttacaaggaatctctatctggtgg

SEQ ID NO: 189518 - DNA, 25 bp, Artificial
  Probe
tgtttgaagtcatcctcagtctaca

SEQ ID NO: 189519 - DNA, 25 bp, Artificial
  Probe
cttgtgtgttcctttacaaggaatc

SEQ ID NO: 189520 - DNA, 25 bp, Artificial
  Probe
gtcatcctcagtctacaaggtgttc

SEQ ID NO: 189521 - DNA, 25 bp, Artificial
  Probe
ctttacaaggaatctctatctggtg

SEQ ID NO: 189522 - DNA, 25 bp, Artificial
  Probe
tacaaggtgttcttgcctcttgtgt

SEQ ID NO: 189523 - DNA, 25 bp, Artificial
  Probe
gtgtgttcctttacaaggaatctct

SEQ ID NO: 189524 - DNA, 25 bp, Artificial
  Probe
gcctcttgtgtgttcctttacaagg

SEQ ID NO: 189525 - DNA, 25 bp, Artificial
  Probe
tttgaagtcatcctcagtctacaag

SEQ ID NO: 189526 - DNA, 25 bp, Artificial
  Probe
ttgcctcttgtgtgttcctttacaa

SEQ ID NO: 189527 - DNA, 25 bp, Artificial
  Probe
ggtgttcttgcctcttgtgtgttcc

SEQ ID NO: 189528 - DNA, 25 bp, Artificial
  Probe
ttgaagtcatcctcagtctacaagg

SEQ ID NO: 189529 - DNA, 25 bp, Artificial
  Probe
gtctacaaggtgttcttgcctcttg

SEQ ID NO: 189530 - DNA, 25 bp, Artificial
  Probe
agagttacgacgtattcaaggacct

SEQ ID NO: 189531 - DNA, 25 bp, Artificial
  Probe
agaagctgcgcttcccggccgagga

SEQ ID NO: 189532 - DNA, 25 bp, Artificial
  Probe
ccgggttatctccatgcagaaaggg

SEQ ID NO: 189533 - DNA, 25 bp, Artificial
  Probe
accgaggcggacgagcagcagctca

SEQ ID NO: 189534 - DNA, 25 bp, Artificial
  Probe
gatgctcgcggcatttggcacaatg

SEQ ID NO: 189535 - DNA, 25 bp, Artificial
  Probe
tggcgtagacaatccgggccacccg

SEQ ID NO: 189536 - DNA, 25 bp, Artificial
  Probe
tcaacccagacaacctgcagggcgg

SEQ ID NO: 189537 - DNA, 25 bp, Artificial
  Probe
ggctttacgttggacgacgccatcc

SEQ ID NO: 189538 - DNA, 25 bp, Artificial
  Probe
cgaggcggacgagcagcagctcatt

SEQ ID NO: 189539 - DNA, 25 bp, Artificial
  Probe
atgacaataagacgttcctggtgtg

SEQ ID NO: 189540 - DNA, 25 bp, Artificial
  Probe
actggccggatgctcgcggcatttg

SEQ ID NO: 189541 - DNA, 25 bp, Artificial
  Probe
cgagaagctggcagtagaagccctg

SEQ ID NO: 189542 - DNA, 25 bp, Artificial
  Probe
gcacggcggctaccagcccagtgat

SEQ ID NO: 189543 - DNA, 25 bp, Artificial
  Probe
tgctgacccccgagctgtacgcgga

SEQ ID NO: 189544 - DNA, 25 bp, Artificial
  Probe
aacagccacaacacgcagaagctgc

SEQ ID NO: 189545 - DNA, 25 bp, Artificial
  Probe
tcgaggaccggcacggcggctacca

SEQ ID NO: 189546 - DNA, 25 bp, Artificial
  Probe
tccctgatctgagcagccacaacaa

SEQ ID NO: 189547 - DNA, 25 bp, Artificial
  Probe
tacgacgtattcaaggaccttttcg

SEQ ID NO: 189548 - DNA, 25 bp, Artificial
  Probe
agcgccgcgccatcgagaagctggc

SEQ ID NO: 189549 - DNA, 25 bp, Artificial
  Probe
gagcacaagactgacctcaacccag

SEQ ID NO: 189550 - DNA, 25 bp, Artificial
  Probe
acatcatgacagtgggtgcagtggc

SEQ ID NO: 189551 - DNA, 25 bp, Artificial
  Probe
tctgcgttcctgctccgtcggaatc

SEQ ID NO: 189552 - DNA, 25 bp, Artificial
  Probe
aagtgcacgccgagcggctttacgt

SEQ ID NO: 189553 - DNA, 25 bp, Artificial
  Probe
atgagcacaagactgacctcaaccc

SEQ ID NO: 189554 - DNA, 25 bp, Artificial
  Probe
tctgagcagccacaacaaccatatg

SEQ ID NO: 189555 - DNA, 25 bp, Artificial
  Probe
gagctccgtgccaagtgcacgccga

SEQ ID NO: 189556 - DNA, 25 bp, Artificial
  Probe
gggccacccgtacatcatgacagtg

SEQ ID NO: 189557 - DNA, 25 bp, Artificial
  Probe
cgtgccaagtgcacgccgagcggct

SEQ ID NO: 189558 - DNA, 25 bp, Artificial
  Probe
ggatgaattccctgatctgagcagc

SEQ ID NO: 189559 - DNA, 25 bp, Artificial
  Probe
caggccgaagcatccgcggcttctg

SEQ ID NO: 189560 - DNA, 25 bp, Artificial
  Probe
cccaactacgtgctgagctcgcggg

SEQ ID NO: 189561 - DNA, 25 bp, Artificial
  Probe
aactacgtgctgagctcgcgggtgc

SEQ ID NO: 189562 - DNA, 25 bp, Artificial
  Probe
gcccagtgatgagcacaagactgac

SEQ ID NO: 189563 - DNA, 25 bp, Artificial
  Probe
cgccatccagactggcgtagacaat

SEQ ID NO: 189564 - DNA, 25 bp, Artificial
  Probe
gccacaacacgcagaagctgcgctt

SEQ ID NO: 189565 - DNA, 25 bp, Artificial
  Probe
aacacgcagaagctgcgcttcccgg

SEQ ID NO: 189566 - DNA, 25 bp, Artificial
  Probe
agctgtacgcggagctccgtgccaa

SEQ ID NO: 189567 - DNA, 25 bp, Artificial
  Probe
tttggcacaatgacaataagacgtt

SEQ ID NO: 189568 - DNA, 25 bp, Artificial
  Probe
acgttcctggtgtggatcaacgagg

SEQ ID NO: 189569 - DNA, 25 bp, Artificial
  Probe
acaggccgaagcatccgcggcttct

SEQ ID NO: 189570 - DNA, 25 bp, Artificial
  Probe
ctcaagagcatgaccgaggcggacg

SEQ ID NO: 189571 - DNA, 25 bp, Artificial
  Probe
cccggccgaggatgaattccctgat

SEQ ID NO: 189572 - DNA, 25 bp, Artificial
  Probe
cgcggagctccgtgccaagtgcacg

SEQ ID NO: 189573 - DNA, 25 bp, Artificial
  Probe
tgacccccgagctgtacgcggagct

SEQ ID NO: 189574 - DNA, 25 bp, Artificial
  Probe
cgactggccggatgctcgcggcatt

SEQ ID NO: 189575 - DNA, 25 bp, Artificial
  Probe
gcttcccggccgaggatgaattccc

SEQ ID NO: 189576 - DNA, 25 bp, Artificial
  Probe
tactaccagctctcaagctgtgttt

SEQ ID NO: 189577 - DNA, 25 bp, Artificial
  Probe
tctcaagctgtgtttctggattaca

SEQ ID NO: 189578 - DNA, 25 bp, Artificial
  Probe
tgtgtttctggattacaggccttca

SEQ ID NO: 189579 - DNA, 25 bp, Artificial
  Probe
acatgagtactaccagctctcaagc

SEQ ID NO: 189580 - DNA, 25 bp, Artificial
  Probe
cagctctcaagctgtgtttctggat

SEQ ID NO: 189581 - DNA, 25 bp, Artificial
  Probe
tgtttctggattacaggccttcaag

SEQ ID NO: 189582 - DNA, 25 bp, Artificial
  Probe
tgcacatgagtactaccagctctca

SEQ ID NO: 189583 - DNA, 25 bp, Artificial
  Probe
ttgtgcacatgagtactaccagctc

SEQ ID NO: 189584 - DNA, 25 bp, Artificial
  Probe
tcaagctgtgtttctggattacagg

SEQ ID NO: 189585 - DNA, 25 bp, Artificial
  Probe
ctctcaagctgtgtttctggattac

SEQ ID NO: 189586 - DNA, 25 bp, Artificial
  Probe
accagctctcaagctgtgtttctgg

SEQ ID NO: 189587 - DNA, 25 bp, Artificial
  Probe
gctctcaagctgtgtttctggatta

SEQ ID NO: 189588 - DNA, 25 bp, Artificial
  Probe
gttgtgcacatgagtactaccagct

SEQ ID NO: 189589 - DNA, 25 bp, Artificial
  Probe
gctgtgtttctggattacaggcctt

SEQ ID NO: 189590 - DNA, 25 bp, Artificial
  Probe
gtgtttctggattacaggccttcaa

SEQ ID NO: 189591 - DNA, 25 bp, Artificial
  Probe
atgagtactaccagctctcaagctg

SEQ ID NO: 189592 - DNA, 25 bp, Artificial
  Probe
caagctgtgtttctggattacaggc

SEQ ID NO: 189593 - DNA, 25 bp, Artificial
  Probe
gtactaccagctctcaagctgtgtt

SEQ ID NO: 189594 - DNA, 25 bp, Artificial
  Probe
agctgtgtttctggattacaggcct

SEQ ID NO: 189595 - DNA, 25 bp, Artificial
  Probe
actaccagctctcaagctgtgtttc

SEQ ID NO: 189596 - DNA, 25 bp, Artificial
  Probe
gcacatgagtactaccagctctcaa

SEQ ID NO: 189597 - DNA, 25 bp, Artificial
  Probe
aagctgtgtttctggattacaggcc

SEQ ID NO: 189598 - DNA, 25 bp, Artificial
  Probe
agctctcaagctgtgtttctggatt

SEQ ID NO: 189599 - DNA, 25 bp, Artificial
  Probe
ccagctctcaagctgtgtttctgga

SEQ ID NO: 189600 - DNA, 25 bp, Artificial
  Probe
ttctggattacaggccttcaagagc

SEQ ID NO: 189601 - DNA, 25 bp, Artificial
  Probe
catgagtactaccagctctcaagct

SEQ ID NO: 189602 - DNA, 25 bp, Artificial
  Probe
taccagctctcaagctgtgtttctg

SEQ ID NO: 189603 - DNA, 25 bp, Artificial
  Probe
gagtactaccagctctcaagctgtg

SEQ ID NO: 189604 - DNA, 25 bp, Artificial
  Probe
cacatgagtactaccagctctcaag

SEQ ID NO: 189605 - DNA, 25 bp, Artificial
  Probe
tgagtactaccagctctcaagctgt

SEQ ID NO: 189606 - DNA, 25 bp, Artificial
  Probe
ggttgtgcacatgagtactaccagc

SEQ ID NO: 189607 - DNA, 25 bp, Artificial
  Probe
tttctggattacaggccttcaagag

SEQ ID NO: 189608 - DNA, 25 bp, Artificial
  Probe
ctcaagctgtgtttctggattacag

SEQ ID NO: 189609 - DNA, 25 bp, Artificial
  Probe
tgtgcacatgagtactaccagctct

SEQ ID NO: 189610 - DNA, 25 bp, Artificial
  Probe
agtactaccagctctcaagctgtgt

SEQ ID NO: 189611 - DNA, 25 bp, Artificial
  Probe
ctaccagctctcaagctgtgtttct

SEQ ID NO: 189612 - DNA, 25 bp, Artificial
  Probe
ctgtgtttctggattacaggccttc

SEQ ID NO: 189613 - DNA, 25 bp, Artificial
  Probe
gtgcacatgagtactaccagctctc

SEQ ID NO: 189614 - DNA, 25 bp, Artificial
  Probe
gtttctggattacaggccttcaaga

SEQ ID NO: 189615 - DNA, 25 bp, Artificial
  Probe
aactgggcataacatgttgactgcc

SEQ ID NO: 189616 - DNA, 25 bp, Artificial
  Probe
cctcagactgtaaggcctgtgtatc

SEQ ID NO: 189617 - DNA, 25 bp, Artificial
  Probe
ggctccatctgtgtacggcagcacc

SEQ ID NO: 189618 - DNA, 25 bp, Artificial
  Probe
ccaggtcttgtctgtagctctgcct

SEQ ID NO: 189619 - DNA, 25 bp, Artificial
  Probe
ctggggttcccgtgaactgggcata

SEQ ID NO: 189620 - DNA, 25 bp, Artificial
  Probe
tgtctgccagcctgccactctgtgg

SEQ ID NO: 189621 - DNA, 25 bp, Artificial
  Probe
cgtgaactgggcataacatgttgac

SEQ ID NO: 189622 - DNA, 25 bp, Artificial
  Probe
gttcccgtgaactgggcataacatg

SEQ ID NO: 189623 - DNA, 25 bp, Artificial
  Probe
agctcttgtgatctcgagtccccag

SEQ ID NO: 189624 - DNA, 25 bp, Artificial
  Probe
tttccagctgtgcagttctgcccca

SEQ ID NO: 189625 - DNA, 25 bp, Artificial
  Probe
gttctgccccactgtctgaacaggt

SEQ ID NO: 189626 - DNA, 25 bp, Artificial
  Probe
caggcttcctatctccactctgtag

SEQ ID NO: 189627 - DNA, 25 bp, Artificial
  Probe
agccccttgatgtgagcgtagcagg

SEQ ID NO: 189628 - DNA, 25 bp, Artificial
  Probe
agctgtgcagttctgccccactgtc

SEQ ID NO: 189629 - DNA, 25 bp, Artificial
  Probe
agcgtagcagggaaggcttgcaatt

SEQ ID NO: 189630 - DNA, 25 bp, Artificial
  Probe
aaggcttgcaattagactcgtttaa

SEQ ID NO: 189631 - DNA, 25 bp, Artificial
  Probe
taacatgttgactgcctcagactgt

SEQ ID NO: 189632 - DNA, 25 bp, Artificial
  Probe
aagactctctttgttcttgcattgg

SEQ ID NO: 189633 - DNA, 25 bp, Artificial
  Probe
gctgtgcagttctgccccactgtct

SEQ ID NO: 189634 - DNA, 25 bp, Artificial
  Probe
gggtaattccagaggctccatctgt

SEQ ID NO: 189635 - DNA, 25 bp, Artificial
  Probe
accagctcagctcttgtgatctcga

SEQ ID NO: 189636 - DNA, 25 bp, Artificial
  Probe
gagtccccaggtcttgtctgtagct

SEQ ID NO: 189637 - DNA, 25 bp, Artificial
  Probe
gcttgcaattagactcgtttaataa

SEQ ID NO: 189638 - DNA, 25 bp, Artificial
  Probe
tagtacaaccagtttaagagtattc

SEQ ID NO: 189639 - DNA, 25 bp, Artificial
  Probe
gtgtatccctgctccgaattcctgt

SEQ ID NO: 189640 - DNA, 25 bp, Artificial
  Probe
ctggcagtctcctggggttcccgtg

SEQ ID NO: 189641 - DNA, 25 bp, Artificial
  Probe
tgtgatctcgagtccccaggtcttg

SEQ ID NO: 189642 - DNA, 25 bp, Artificial
  Probe
gcataacatgttgactgcctcagac

SEQ ID NO: 189643 - DNA, 25 bp, Artificial
  Probe
gtctcctggggttcccgtgaactgg

SEQ ID NO: 189644 - DNA, 25 bp, Artificial
  Probe
gtgaaaccaccagctcagctcttgt

SEQ ID NO: 189645 - DNA, 25 bp, Artificial
  Probe
agtctcctggggttcccgtgaactg

SEQ ID NO: 189646 - DNA, 25 bp, Artificial
  Probe
aaggcctgtgtatccctgctccgaa

SEQ ID NO: 189647 - DNA, 25 bp, Artificial
  Probe
ggtcttgtctgtagctctgcctctg

SEQ ID NO: 189648 - DNA, 25 bp, Artificial
  Probe
tgtggttcagagtctctgtggtgcc

SEQ ID NO: 189649 - DNA, 25 bp, Artificial
  Probe
tgcctcagactgtaaggcctgtgta

SEQ ID NO: 189650 - DNA, 25 bp, Artificial
  Probe
cactctgtagtacaaccagtttaag

SEQ ID NO: 189651 - DNA, 25 bp, Artificial
  Probe
gttgactgcctcagactgtaaggcc

SEQ ID NO: 189652 - DNA, 25 bp, Artificial
  Probe
tctcgagtccccaggtcttgtctgt

SEQ ID NO: 189653 - DNA, 25 bp, Artificial
  Probe
ccccttgatgtgagcgtagcaggga

SEQ ID NO: 189654 - DNA, 25 bp, Artificial
  Probe
ctgtgtatccctgctccgaattcct

SEQ ID NO: 189655 - DNA, 25 bp, Artificial
  Probe
ttgactgcctcagactgtaaggcct

SEQ ID NO: 189656 - DNA, 25 bp, Artificial
  Probe
cctctgggtaattccagaggctcca

SEQ ID NO: 189657 - DNA, 25 bp, Artificial
  Probe
gagtctctgtggtgccagtgaaacc

SEQ ID NO: 189658 - DNA, 25 bp, Artificial
  Probe
ctgccccactgtctgaacaggtttg

SEQ ID NO: 189659 - DNA, 25 bp, Artificial
  Probe
gactgtaaggcctgtgtatccctgc

SEQ ID NO: 189660 - DNA, 25 bp, Artificial
  Probe
ggcttcctatctccactctgtagta

SEQ ID NO: 189661 - DNA, 25 bp, Artificial
  Probe
acgaaccatgggtttcttctgaact

SEQ ID NO: 189662 - DNA, 25 bp, Artificial
  Probe
actctggtggatacagacagctcca

SEQ ID NO: 189663 - DNA, 25 bp, Artificial
  Probe
cctttccgctaaggactctggtgga

SEQ ID NO: 189664 - DNA, 25 bp, Artificial
  Probe
gtgtaacctaatctagagtaaacaa

SEQ ID NO: 189665 - DNA, 25 bp, Artificial
  Probe
caaagcaaagcctttccgctaagga

SEQ ID NO: 189666 - DNA, 25 bp, Artificial
  Probe
cttagtttgcaaagtcagtgcattt

SEQ ID NO: 189667 - DNA, 25 bp, Artificial
  Probe
ctcattttatagcaattgcgttctg

SEQ ID NO: 189668 - DNA, 25 bp, Artificial
  Probe
atgggtttcttctgaactatctcag

SEQ ID NO: 189669 - DNA, 25 bp, Artificial
  Probe
ttccgctaaggactctggtggatac

SEQ ID NO: 189670 - DNA, 25 bp, Artificial
  Probe
ggatagaccttccagcctgcccagg

SEQ ID NO: 189671 - DNA, 25 bp, Artificial
  Probe
gacagtccagctgtcagagagtgga

SEQ ID NO: 189672 - DNA, 25 bp, Artificial
  Probe
ggagacagtccagctgtcagagagt

SEQ ID NO: 189673 - DNA, 25 bp, Artificial
  Probe
agctattttacaaacaatatgggac

SEQ ID NO: 189674 - DNA, 25 bp, Artificial
  Probe
agctgtcagagagtggatagacctt

SEQ ID NO: 189675 - DNA, 25 bp, Artificial
  Probe
ctacacttgaaaattgctagatggt

SEQ ID NO: 189676 - DNA, 25 bp, Artificial
  Probe
gaaagcgtcccatgaagaagaaaca

SEQ ID NO: 189677 - DNA, 25 bp, Artificial
  Probe
gtgccttgcctttcctctcagcatt

SEQ ID NO: 189678 - DNA, 25 bp, Artificial
  Probe
cagccctacacttgaaaattgctag

SEQ ID NO: 189679 - DNA, 25 bp, Artificial
  Probe
agtcagtgcattttagttctaaatc

SEQ ID NO: 189680 - DNA, 25 bp, Artificial
  Probe
cattttatagcaattgcgttctgaa

SEQ ID NO: 189681 - DNA, 25 bp, Artificial
  Probe
aaccatgggtttcttctgaactatc

SEQ ID NO: 189682 - DNA, 25 bp, Artificial
  Probe
ggactctggtggatacagacagctc

SEQ ID NO: 189683 - DNA, 25 bp, Artificial
  Probe
aagcctttccgctaaggactctggt

SEQ ID NO: 189684 - DNA, 25 bp, Artificial
  Probe
agtggatagaccttccagcctgccc

SEQ ID NO: 189685 - DNA, 25 bp, Artificial
  Probe
aggtgccttgcctttcctctcagca

SEQ ID NO: 189686 - DNA, 25 bp, Artificial
  Probe
aagcaaagcctttccgctaaggact

SEQ ID NO: 189687 - DNA, 25 bp, Artificial
  Probe
gatagaccttccagcctgcccaggg

SEQ ID NO: 189688 - DNA, 25 bp, Artificial
  Probe
tgcaaagtcagtgcattttagttct

SEQ ID NO: 189689 - DNA, 25 bp, Artificial
  Probe
gtggatacagacagctccactggct

SEQ ID NO: 189690 - DNA, 25 bp, Artificial
  Probe
aaaccaaggagacagtccagctgtc

SEQ ID NO: 189691 - DNA, 25 bp, Artificial
  Probe
gatacagacagctccactggctggg

SEQ ID NO: 189692 - DNA, 25 bp, Artificial
  Probe
agagaggtgccttgcctttcctctc

SEQ ID NO: 189693 - DNA, 25 bp, Artificial
  Probe
ttgcaaagtcagtgcattttagttc

SEQ ID NO: 189694 - DNA, 25 bp, Artificial
  Probe
tccagcctgcccagggcaaagggag

SEQ ID NO: 189695 - DNA, 25 bp, Artificial
  Probe
gacttagtttgcaaagtcagtgcat

SEQ ID NO: 189696 - DNA, 25 bp, Artificial
  Probe
ggatacagacagctccactggctgg

SEQ ID NO: 189697 - DNA, 25 bp, Artificial
  Probe
caagctattttacaaacaatatggg

SEQ ID NO: 189698 - DNA, 25 bp, Artificial
  Probe
caaagtcagtgcattttagttctaa

SEQ ID NO: 189699 - DNA, 25 bp, Artificial
  Probe
aagagaggtgccttgcctttcctct

SEQ ID NO: 189700 - DNA, 25 bp, Artificial
  Probe
gctaaggactctggtggatacagac

SEQ ID NO: 189701 - DNA, 25 bp, Artificial
  Probe
cagctgtcagagagtggatagacct

SEQ ID NO: 189702 - DNA, 25 bp, Artificial
  Probe
ccaaggagacagtccagctgtcaga

SEQ ID NO: 189703 - DNA, 25 bp, Artificial
  Probe
ggtttcttctgaactatctcagccc

SEQ ID NO: 189704 - DNA, 25 bp, Artificial
  Probe
gccctacacttgaaaattgctagat

SEQ ID NO: 189705 - DNA, 25 bp, Artificial
  Probe
gctattttacaaacaatatgggact

SEQ ID NO: 189706 - DNA, 25 bp, Artificial
  Probe
aggactctggtggatacagacagct

SEQ ID NO: 189707 - DNA, 25 bp, Artificial
  Probe
caattcatttatagccttagtggat

SEQ ID NO: 189708 - DNA, 25 bp, Artificial
  Probe
tcctagcagagatgcaaaaggccaa

SEQ ID NO: 189709 - DNA, 25 bp, Artificial
  Probe
acccatggcgtctacgcattgccag

SEQ ID NO: 189710 - DNA, 25 bp, Artificial
  Probe
cacagccttaccaactctgtgcagt

SEQ ID NO: 189711 - DNA, 25 bp, Artificial
  Probe
tgctcaaaacattgaaggagagctt

SEQ ID NO: 189712 - DNA, 25 bp, Artificial
  Probe
ctggcaaagtcttccccaagctcaa

SEQ ID NO: 189713 - DNA, 25 bp, Artificial
  Probe
ggtgctgaacgcaatcccaattctc

SEQ ID NO: 189714 - DNA, 25 bp, Artificial
  Probe
gtatgaggaccctttcttcaacagg

SEQ ID NO: 189715 - DNA, 25 bp, Artificial
  Probe
ccttcgccaaggaggctgaacatcc

SEQ ID NO: 189716 - DNA, 25 bp, Artificial
  Probe
atttgagtatgaggaccctttcttc

SEQ ID NO: 189717 - DNA, 25 bp, Artificial
  Probe
tcttctccccggtttggtctgattg

SEQ ID NO: 189718 - DNA, 25 bp, Artificial
  Probe
cagcctacagatagcctggaagcct

SEQ ID NO: 189719 - DNA, 25 bp, Artificial
  Probe
tgatgccttcctagcagagatgcaa

SEQ ID NO: 189720 - DNA, 25 bp, Artificial
  Probe
aatcaaaaggtgtggtccttgcacc

SEQ ID NO: 189721 - DNA, 25 bp, Artificial
  Probe
agattcctgggctgcctggcaaagt

SEQ ID NO: 189722 - DNA, 25 bp, Artificial
  Probe
ggaccctttcttcaacaggatgctc

SEQ ID NO: 189723 - DNA, 25 bp, Artificial
  Probe
ccgtgcgggaactgctggtgaccta

SEQ ID NO: 189724 - DNA, 25 bp, Artificial
  Probe
tctgcgcttggtggtgattgacctg

SEQ ID NO: 189725 - DNA, 25 bp, Artificial
  Probe
tactgcccatctataatcacctggg

SEQ ID NO: 189726 - DNA, 25 bp, Artificial
  Probe
acctctgtgacaccttcgccaagga

SEQ ID NO: 189727 - DNA, 25 bp, Artificial
  Probe
ttatacaagcttcgaagccgctatg

SEQ ID NO: 189728 - DNA, 25 bp, Artificial
  Probe
cccgagacattaaattccaaggctt

SEQ ID NO: 189729 - DNA, 25 bp, Artificial
  Probe
cttgtttatgctcgtcgatttgagt

SEQ ID NO: 189730 - DNA, 25 bp, Artificial
  Probe
tagttgtgatcaacgggctgaaggc

SEQ ID NO: 189731 - DNA, 25 bp, Artificial
  Probe
ttgcagacatcgtcccgacaaatat

SEQ ID NO: 189732 - DNA, 25 bp, Artificial
  Probe
cccaattctccttcagattcctggg

SEQ ID NO: 189733 - DNA, 25 bp, Artificial
  Probe
aggacaccggcttcatggcagaggt

SEQ ID NO: 189734 - DNA, 25 bp, Artificial
  Probe
cttcaacaggatgctcaaaacattg

SEQ ID NO: 189735 - DNA, 25 bp, Artificial
  Probe
cctgagtaaggctgtgagcaacgtg

SEQ ID NO: 189736 - DNA, 25 bp, Artificial
  Probe
gctcaattcatttatagccttagtg

SEQ ID NO: 189737 - DNA, 25 bp, Artificial
  Probe
tttgcagacatcgtcccgacaaata

SEQ ID NO: 189738 - DNA, 25 bp, Artificial
  Probe
atcccagcatcctcctgagtaaggc

SEQ ID NO: 189739 - DNA, 25 bp, Artificial
  Probe
gggctccattcttctccccggtttg

SEQ ID NO: 189740 - DNA, 25 bp, Artificial
  Probe
tcacctgggctatgggaacaaatca

SEQ ID NO: 189741 - DNA, 25 bp, Artificial
  Probe
aggaggctgaacatcccttcaatcc

SEQ ID NO: 189742 - DNA, 25 bp, Artificial
  Probe
ggaggctgaacatcccttcaatccc

SEQ ID NO: 189743 - DNA, 25 bp, Artificial
  Probe
gtgctgaacgcaatcccaattctcc

SEQ ID NO: 189744 - DNA, 25 bp, Artificial
  Probe
ggctccattcttctccccggtttgg

SEQ ID NO: 189745 - DNA, 25 bp, Artificial
  Probe
aactctgtgcagtggctcgctagca

SEQ ID NO: 189746 - DNA, 25 bp, Artificial
  Probe
catcccgagacattaaattccaagg

SEQ ID NO: 189747 - DNA, 25 bp, Artificial
  Probe
aaatctgcgcttggtggtgattgac

SEQ ID NO: 189748 - DNA, 25 bp, Artificial
  Probe
tcctgggctgcctggcaaagtcttc

SEQ ID NO: 189749 - DNA, 25 bp, Artificial
  Probe
tggcagaggtgctgaacgcaatccc

SEQ ID NO: 189750 - DNA, 25 bp, Artificial
  Probe
agctttggagaggacaccggcttca

SEQ ID NO: 189751 - DNA, 25 bp, Artificial
  Probe
cgtgcgggaactgctggtgacctat

SEQ ID NO: 189752 - DNA, 25 bp, Artificial
  Probe
gcattgccagttactccacagcctt

SEQ ID NO: 189753 - DNA, 25 bp, Artificial
  Probe
tgtctcagagcaagtatcctcagaa

SEQ ID NO: 189754 - DNA, 25 bp, Artificial
  Probe
ggtctgcctgggtctcttaattcct

SEQ ID NO: 189755 - DNA, 25 bp, Artificial
  Probe
gtttactgatccattgaataactga

SEQ ID NO: 189756 - DNA, 25 bp, Artificial
  Probe
gtgctctccctaagggtcccaaagt

SEQ ID NO: 189757 - DNA, 25 bp, Artificial
  Probe
attcctatcagctctggaatcactg

SEQ ID NO: 189758 - DNA, 25 bp, Artificial
  Probe
aaattattgtctcagagcaagtatc

SEQ ID NO: 189759 - DNA, 25 bp, Artificial
  Probe
cctcacgggagagaagctacctgtt

SEQ ID NO: 189760 - DNA, 25 bp, Artificial
  Probe
gtctcttaattcctatcagctctgg

SEQ ID NO: 189761 - DNA, 25 bp, Artificial
  Probe
catccctgatggtgataaaatgggt

SEQ ID NO: 189762 - DNA, 25 bp, Artificial
  Probe
tgccatgtgctctccctaagggtcc

SEQ ID NO: 189763 - DNA, 25 bp, Artificial
  Probe
tggtgagcctcaaggcactagatgc

SEQ ID NO: 189764 - DNA, 25 bp, Artificial
  Probe
caaggcactagatgccatgtgctct

SEQ ID NO: 189765 - DNA, 25 bp, Artificial
  Probe
agagaagctacctgtttactgatcc

SEQ ID NO: 189766 - DNA, 25 bp, Artificial
  Probe
taccgctaaacatgaagagatgtgt

SEQ ID NO: 189767 - DNA, 25 bp, Artificial
  Probe
ccaattcagcaggaaagaaggagag

SEQ ID NO: 189768 - DNA, 25 bp, Artificial
  Probe
gggagccatccctgatggtgataaa

SEQ ID NO: 189769 - DNA, 25 bp, Artificial
  Probe
atccattgaataactgattttggtc

SEQ ID NO: 189770 - DNA, 25 bp, Artificial
  Probe
ctaagggtcccaaagtgtccatcca

SEQ ID NO: 189771 - DNA, 25 bp, Artificial
  Probe
gcccacacagcctagcaggagtctg

SEQ ID NO: 189772 - DNA, 25 bp, Artificial
  Probe
gtgtccatccagatcccatgtgaag

SEQ ID NO: 189773 - DNA, 25 bp, Artificial
  Probe
ctagatgccatgtgctctccctaag

SEQ ID NO: 189774 - DNA, 25 bp, Artificial
  Probe
tgggtttttatcgacctcacgggag

SEQ ID NO: 189775 - DNA, 25 bp, Artificial
  Probe
ataactgattttggtccaatgccaa

SEQ ID NO: 189776 - DNA, 25 bp, Artificial
  Probe
ggtcccaaagtgtccatccagatcc

SEQ ID NO: 189777 - DNA, 25 bp, Artificial
  Probe
agagcagtgaccacgcaagcgcgtc

SEQ ID NO: 189778 - DNA, 25 bp, Artificial
  Probe
ccattgaataactgattttggtcca

SEQ ID NO: 189779 - DNA, 25 bp, Artificial
  Probe
tttatcgacctcacgggagagaagc

SEQ ID NO: 189780 - DNA, 25 bp, Artificial
  Probe
attattgtctcagagcaagtatcct

SEQ ID NO: 189781 - DNA, 25 bp, Artificial
  Probe
gaatcactggtgagcctcaaggcac

SEQ ID NO: 189782 - DNA, 25 bp, Artificial
  Probe
ctgatccattgaataactgattttg

SEQ ID NO: 189783 - DNA, 25 bp, Artificial
  Probe
atgccatgtgctctccctaagggtc

SEQ ID NO: 189784 - DNA, 25 bp, Artificial
  Probe
ccaaagtgtccatccagatcccatg

SEQ ID NO: 189785 - DNA, 25 bp, Artificial
  Probe
cactggtgagcctcaaggcactaga

SEQ ID NO: 189786 - DNA, 25 bp, Artificial
  Probe
gtcagcccacacagcctagcaggag

SEQ ID NO: 189787 - DNA, 25 bp, Artificial
  Probe
catccagatcccatgtgaagcacgg

SEQ ID NO: 189788 - DNA, 25 bp, Artificial
  Probe
gctacctgtttactgatccattgaa

SEQ ID NO: 189789 - DNA, 25 bp, Artificial
  Probe
gaggcataccgctaaacatgaagag

SEQ ID NO: 189790 - DNA, 25 bp, Artificial
  Probe
attttggtccaatgccaattcagca

SEQ ID NO: 189791 - DNA, 25 bp, Artificial
  Probe
acagcctagcaggagtctggcgcag

SEQ ID NO: 189792 - DNA, 25 bp, Artificial
  Probe
ccaatgccaattcagcaggaaagaa

SEQ ID NO: 189793 - DNA, 25 bp, Artificial
  Probe
cgacctcacgggagagaagctacct

SEQ ID NO: 189794 - DNA, 25 bp, Artificial
  Probe
atgtgctctccctaagggtcccaaa

SEQ ID NO: 189795 - DNA, 25 bp, Artificial
  Probe
aattggtctgcctgggtctcttaat

SEQ ID NO: 189796 - DNA, 25 bp, Artificial
  Probe
cagaaattggtctgcctgggtctct

SEQ ID NO: 189797 - DNA, 25 bp, Artificial
  Probe
tgtttactgatccattgaataactg

SEQ ID NO: 189798 - DNA, 25 bp, Artificial
  Probe
gcactagatgccatgtgctctccct

SEQ ID NO: 189799 - DNA, 25 bp, Artificial
  Probe
cccatccagacaagagcttttcaga

SEQ ID NO: 189800 - DNA, 25 bp, Artificial
  Probe
ccagccagctaaagggagtcagcaa

SEQ ID NO: 189801 - DNA, 25 bp, Artificial
  Probe
gctccagccagctaaagggagtcag

SEQ ID NO: 189802 - DNA, 25 bp, Artificial
  Probe
ctatgtctgagtgttgcttctcctt

SEQ ID NO: 189803 - DNA, 25 bp, Artificial
  Probe
ttgagtgcagcctgaacatctaagg

SEQ ID NO: 189804 - DNA, 25 bp, Artificial
  Probe
tttctgccgcattcctggcagcctg

SEQ ID NO: 189805 - DNA, 25 bp, Artificial
  Probe
cctttcttagagacagtcgtgtgtg

SEQ ID NO: 189806 - DNA, 25 bp, Artificial
  Probe
tggcctgtcacttcacctagcagat

SEQ ID NO: 189807 - DNA, 25 bp, Artificial
  Probe
ctgagtgttgcttctcctttcttag

SEQ ID NO: 189808 - DNA, 25 bp, Artificial
  Probe
tagggtttggcctgccctatgtctg

SEQ ID NO: 189809 - DNA, 25 bp, Artificial
  Probe
cacttcacctagcagatgaaacatg

SEQ ID NO: 189810 - DNA, 25 bp, Artificial
  Probe
ccagtttctttctgccgcattcctg

SEQ ID NO: 189811 - DNA, 25 bp, Artificial
  Probe
agacttgagtgcagcctgaacatct

SEQ ID NO: 189812 - DNA, 25 bp, Artificial
  Probe
cacctagcagatgaaacatgagtct

SEQ ID NO: 189813 - DNA, 25 bp, Artificial
  Probe
cgcattcctggcagcctgaatatct

SEQ ID NO: 189814 - DNA, 25 bp, Artificial
  Probe
ctgccgcattcctggcagcctgaat

SEQ ID NO: 189815 - DNA, 25 bp, Artificial
  Probe
ctagtatttccttagctccagccag

SEQ ID NO: 189816 - DNA, 25 bp, Artificial
  Probe
cctgaacatctaaggacatttgtac

SEQ ID NO: 189817 - DNA, 25 bp, Artificial
  Probe
ttagctccagccagctaaagggagt

SEQ ID NO: 189818 - DNA, 25 bp, Artificial
  Probe
tttggcctgccctatgtctgagtgt

SEQ ID NO: 189819 - DNA, 25 bp, Artificial
  Probe
gtatttccttagctccagccagcta

SEQ ID NO: 189820 - DNA, 25 bp, Artificial
  Probe
tttccttagctccagccagctaaag

SEQ ID NO: 189821 - DNA, 25 bp, Artificial
  Probe
ccatccagacaagagcttttcagaa

SEQ ID NO: 189822 - DNA, 25 bp, Artificial
  Probe
caagagcttttcagaaccacccgtc

SEQ ID NO: 189823 - DNA, 25 bp, Artificial
  Probe
gcagcctgaatatctaaagttctat

SEQ ID NO: 189824 - DNA, 25 bp, Artificial
  Probe
cctatgtctgagtgttgcttctcct

SEQ ID NO: 189825 - DNA, 25 bp, Artificial
  Probe
acatctaaggacatttgtacttgca

SEQ ID NO: 189826 - DNA, 25 bp, Artificial
  Probe
gagtcagcaacttgacatcttcccc

SEQ ID NO: 189827 - DNA, 25 bp, Artificial
  Probe
ggagacttgagtgcagcctgaacat

SEQ ID NO: 189828 - DNA, 25 bp, Artificial
  Probe
gcctgtcacttcacctagcagatga

SEQ ID NO: 189829 - DNA, 25 bp, Artificial
  Probe
tctctcttgcagcttcctctctggg

SEQ ID NO: 189830 - DNA, 25 bp, Artificial
  Probe
tctaaggacatttgtacttgcaggg

SEQ ID NO: 189831 - DNA, 25 bp, Artificial
  Probe
ggagtcagcaacttgacatcttccc

SEQ ID NO: 189832 - DNA, 25 bp, Artificial
  Probe
acaagagcttttcagaaccacccgt

SEQ ID NO: 189833 - DNA, 25 bp, Artificial
  Probe
ctcctttcttagagacagtcgtgtg

SEQ ID NO: 189834 - DNA, 25 bp, Artificial
  Probe
gcctagtatttccttagctccagcc

SEQ ID NO: 189835 - DNA, 25 bp, Artificial
  Probe
cttcacctagcagatgaaacatgag

SEQ ID NO: 189836 - DNA, 25 bp, Artificial
  Probe
atgtctgagtgttgcttctcctttc

SEQ ID NO: 189837 - DNA, 25 bp, Artificial
  Probe
gtggagcctagtatttccttagctc

SEQ ID NO: 189838 - DNA, 25 bp, Artificial
  Probe
gagcctagtatttccttagctccag

SEQ ID NO: 189839 - DNA, 25 bp, Artificial
  Probe
gtcacttcacctagcagatgaaaca

SEQ ID NO: 189840 - DNA, 25 bp, Artificial
  Probe
gtcagcaacttgacatcttccccag

SEQ ID NO: 189841 - DNA, 25 bp, Artificial
  Probe
ctttcttagagacagtcgtgtgtgt

SEQ ID NO: 189842 - DNA, 25 bp, Artificial
  Probe
gagacttgagtgcagcctgaacatc

SEQ ID NO: 189843 - DNA, 25 bp, Artificial
  Probe
cagacaagagcttttcagaaccacc

SEQ ID NO: 189844 - DNA, 25 bp, Artificial
  Probe
ttcctggcagcctgaatatctaaag

SEQ ID NO: 189845 - DNA, 25 bp, Artificial
  Probe
tccctccatggaaatctaccattcc

SEQ ID NO: 189846 - DNA, 25 bp, Artificial
  Probe
tccatggaaatctaccattcctcat

SEQ ID NO: 189847 - DNA, 25 bp, Artificial
  Probe
atctaccattcctcattaacccctt

SEQ ID NO: 189848 - DNA, 25 bp, Artificial
  Probe
catggaaatctaccattcctcatta

SEQ ID NO: 189849 - DNA, 25 bp, Artificial
  Probe
aatctaccattcctcattaacccct

SEQ ID NO: 189850 - DNA, 25 bp, Artificial
  Probe
ctaccattcctcattaaccccttga

SEQ ID NO: 189851 - DNA, 25 bp, Artificial
  Probe
ctccctccatggaaatctaccattc

SEQ ID NO: 189852 - DNA, 25 bp, Artificial
  Probe
ccatggaaatctaccattcctcatt

SEQ ID NO: 189853 - DNA, 25 bp, Artificial
  Probe
accattcctcattaaccccttgact

SEQ ID NO: 189854 - DNA, 25 bp, Artificial
  Probe
cctcattaaccccttgactatgaaa

SEQ ID NO: 189855 - DNA, 25 bp, Artificial
  Probe
ccctccatggaaatctaccattcct

SEQ ID NO: 189856 - DNA, 25 bp, Artificial
  Probe
cattcctcattaaccccttgactat

SEQ ID NO: 189857 - DNA, 25 bp, Artificial
  Probe
ctgatggccatggtcaagaaaaaaa

SEQ ID NO: 189858 - DNA, 25 bp, Artificial
  Probe
gatggccatggtcaagaaaaaaaat

SEQ ID NO: 189859 - DNA, 25 bp, Artificial
  Probe
tcctcattaaccccttgactatgaa

SEQ ID NO: 189860 - DNA, 25 bp, Artificial
  Probe
ccattcctcattaaccccttgacta

SEQ ID NO: 189861 - DNA, 25 bp, Artificial
  Probe
taaccccttgactatgaaacagact

SEQ ID NO: 189862 - DNA, 25 bp, Artificial
  Probe
cctctccctccatggaaatctacca

SEQ ID NO: 189863 - DNA, 25 bp, Artificial
  Probe
aaccccttgactatgaaacagactg

SEQ ID NO: 189864 - DNA, 25 bp, Artificial
  Probe
gaaatctaccattcctcattaaccc

SEQ ID NO: 189865 - DNA, 25 bp, Artificial
  Probe
tctccctccatggaaatctaccatt

SEQ ID NO: 189866 - DNA, 25 bp, Artificial
  Probe
tctaccattcctcattaaccccttg

SEQ ID NO: 189867 - DNA, 25 bp, Artificial
  Probe
ggaaatctaccattcctcattaacc

SEQ ID NO: 189868 - DNA, 25 bp, Artificial
  Probe
cattaaccccttgactatgaaacag

SEQ ID NO: 189869 - DNA, 25 bp, Artificial
  Probe
tggaaatctaccattcctcattaac

SEQ ID NO: 189870 - DNA, 25 bp, Artificial
  Probe
ctctccctccatggaaatctaccat

SEQ ID NO: 189871 - DNA, 25 bp, Artificial
  Probe
attcctcattaaccccttgactatg

SEQ ID NO: 189872 - DNA, 25 bp, Artificial
  Probe
attaaccccttgactatgaaacaga

SEQ ID NO: 189873 - DNA, 25 bp, Artificial
  Probe
tcattaaccccttgactatgaaaca

SEQ ID NO: 189874 - DNA, 25 bp, Artificial
  Probe
ctccatggaaatctaccattcctca

SEQ ID NO: 189875 - DNA, 25 bp, Artificial
  Probe
ctcattaaccccttgactatgaaac

SEQ ID NO: 189876 - DNA, 25 bp, Artificial
  Probe
ttaaccccttgactatgaaacagac

SEQ ID NO: 189877 - DNA, 25 bp, Artificial
  Probe
atggaaatctaccattcctcattaa

SEQ ID NO: 189878 - DNA, 25 bp, Artificial
  Probe
taccattcctcattaaccccttgac

SEQ ID NO: 189879 - DNA, 25 bp, Artificial
  Probe
ttcctcattaaccccttgactatga

SEQ ID NO: 189880 - DNA, 25 bp, Artificial
  Probe
cctccatggaaatctaccattcctc

SEQ ID NO: 189881 - DNA, 25 bp, Artificial
  Probe
ggtctgaattctatgtctacaggtt

SEQ ID NO: 189882 - DNA, 25 bp, Artificial
  Probe
tctgattctgggagacctgctggag

SEQ ID NO: 189883 - DNA, 25 bp, Artificial
  Probe
agccccagtgtacaagatttgcttt

SEQ ID NO: 189884 - DNA, 25 bp, Artificial
  Probe
ccaaggttgctgagtcattcctcac

SEQ ID NO: 189885 - DNA, 25 bp, Artificial
  Probe
gagaccaggcccaaggttgctgagt

SEQ ID NO: 189886 - DNA, 25 bp, Artificial
  Probe
agtagccccagtgtacaagatttgc

SEQ ID NO: 189887 - DNA, 25 bp, Artificial
  Probe
gctgaggcagtcagccgactcactt

SEQ ID NO: 189888 - DNA, 25 bp, Artificial
  Probe
acaccattgatatgactcccaagga

SEQ ID NO: 189889 - DNA, 25 bp, Artificial
  Probe
agatttgctttgtagcccgctgatt

SEQ ID NO: 189890 - DNA, 25 bp, Artificial
  Probe
aggcccaaggttgctgagtcattcc

SEQ ID NO: 189891 - DNA, 25 bp, Artificial
  Probe
cctgctggagaccaggcccaaggtt

SEQ ID NO: 189892 - DNA, 25 bp, Artificial
  Probe
ccccagtgtacaagatttgctttgt

SEQ ID NO: 189893 - DNA, 25 bp, Artificial
  Probe
agcccgctgattgtgctgaggcagt

SEQ ID NO: 189894 - DNA, 25 bp, Artificial
  Probe
tggatcctaacaccattgatatgac

SEQ ID NO: 189895 - DNA, 25 bp, Artificial
  Probe
tgctgaggcagtcagccgactcact

SEQ ID NO: 189896 - DNA, 25 bp, Artificial
  Probe
accaggcccaaggttgctgagtcat

SEQ ID NO: 189897 - DNA, 25 bp, Artificial
  Probe
gtagccccagtgtacaagatttgct

SEQ ID NO: 189898 - DNA, 25 bp, Artificial
  Probe
ctgaattctatgtctacaggtttgc

SEQ ID NO: 189899 - DNA, 25 bp, Artificial
  Probe
ctgtggatcctaacaccattgatat

SEQ ID NO: 189900 - DNA, 25 bp, Artificial
  Probe
ggttgctgagtcattcctcacttct

SEQ ID NO: 189901 - DNA, 25 bp, Artificial
  Probe
tttgtagcccgctgattgtgctgag

SEQ ID NO: 189902 - DNA, 25 bp, Artificial
  Probe
ggcagtcagccgactcacttctgtt

SEQ ID NO: 189903 - DNA, 25 bp, Artificial
  Probe
ccgctgattgtgctgaggcagtcag

SEQ ID NO: 189904 - DNA, 25 bp, Artificial
  Probe
attctgggagacctgctggagacca

SEQ ID NO: 189905 - DNA, 25 bp, Artificial
  Probe
gcctcagtccccatttatcaggtct

SEQ ID NO: 189906 - DNA, 25 bp, Artificial
  Probe
agccgactcacttctgttcaaaatg

SEQ ID NO: 189907 - DNA, 25 bp, Artificial
  Probe
ttgtagcccgctgattgtgctgagg

SEQ ID NO: 189908 - DNA, 25 bp, Artificial
  Probe
ggatcctaacaccattgatatgact

SEQ ID NO: 189909 - DNA, 25 bp, Artificial
  Probe
gactcacttctgttcaaaatggccc

SEQ ID NO: 189910 - DNA, 25 bp, Artificial
  Probe
gatttgctttgtagcccgctgattg

SEQ ID NO: 189911 - DNA, 25 bp, Artificial
  Probe
caggcccaaggttgctgagtcattc

SEQ ID NO: 189912 - DNA, 25 bp, Artificial
  Probe
tggccccatttttctgattctggga

SEQ ID NO: 189913 - DNA, 25 bp, Artificial
  Probe
aaatggccccatttttctgattctg

SEQ ID NO: 189914 - DNA, 25 bp, Artificial
  Probe
gccgactcacttctgttcaaaatgg

SEQ ID NO: 189915 - DNA, 25 bp, Artificial
  Probe
ctgattgtgctgaggcagtcagccg

SEQ ID NO: 189916 - DNA, 25 bp, Artificial
  Probe
gtcagccgactcacttctgttcaaa

SEQ ID NO: 189917 - DNA, 25 bp, Artificial
  Probe
caaagtagccccagtgtacaagatt

SEQ ID NO: 189918 - DNA, 25 bp, Artificial
  Probe
ctgattctgggagacctgctggaga

SEQ ID NO: 189919 - DNA, 25 bp, Artificial
  Probe
gttgctgagtcattcctcacttctt

SEQ ID NO: 189920 - DNA, 25 bp, Artificial
  Probe
tgtacaagatttgctttgtagcccg

SEQ ID NO: 189921 - DNA, 25 bp, Artificial
  Probe
ccccatttttctgattctgggagac

SEQ ID NO: 189922 - DNA, 25 bp, Artificial
  Probe
ttgtgctgaggcagtcagccgactc

SEQ ID NO: 189923 - DNA, 25 bp, Artificial
  Probe
ccatttttctgattctgggagacct

SEQ ID NO: 189924 - DNA, 25 bp, Artificial
  Probe
ctgctggagaccaggcccaaggttg

SEQ ID NO: 189925 - DNA, 25 bp, Artificial
  Probe
aaggttgctgagtcattcctcactt

SEQ ID NO: 189926 - DNA, 25 bp, Artificial
  Probe
aacaccattgatatgactcccaagg

SEQ ID NO: 189927 - DNA, 25 bp, Artificial
  Probe
cacctcagacagaacacactgaaca

SEQ ID NO: 189928 - DNA, 25 bp, Artificial
  Probe
gaatccacctcagacagaacacact

SEQ ID NO: 189929 - DNA, 25 bp, Artificial
  Probe
gaacacactgaacacacataaatgg

SEQ ID NO: 189930 - DNA, 25 bp, Artificial
  Probe
acctcagacagaacacactgaacac

SEQ ID NO: 189931 - DNA, 25 bp, Artificial
  Probe
agctcttggctaagaatccacctca

SEQ ID NO: 189932 - DNA, 25 bp, Artificial
  Probe
agaatccacctcagacagaacacac

SEQ ID NO: 189933 - DNA, 25 bp, Artificial
  Probe
cctcagacagaacacactgaacaca

SEQ ID NO: 189934 - DNA, 25 bp, Artificial
  Probe
ctgaacacacataaatgggtctctg

SEQ ID NO: 189935 - DNA, 25 bp, Artificial
  Probe
cttggctaagaatccacctcagaca

SEQ ID NO: 189936 - DNA, 25 bp, Artificial
  Probe
gagctcttggctaagaatccacctc

SEQ ID NO: 189937 - DNA, 25 bp, Artificial
  Probe
aagaatccacctcagacagaacaca

SEQ ID NO: 189938 - DNA, 25 bp, Artificial
  Probe
acacacataaatgggtctctgccag

SEQ ID NO: 189939 - DNA, 25 bp, Artificial
  Probe
actgaacacacataaatgggtctct

SEQ ID NO: 189940 - DNA, 25 bp, Artificial
  Probe
gctcttggctaagaatccacctcag

SEQ ID NO: 189941 - DNA, 25 bp, Artificial
  Probe
ctgagctcttggctaagaatccacc

SEQ ID NO: 189942 - DNA, 25 bp, Artificial
  Probe
acactgaacacacataaatgggtct

SEQ ID NO: 189943 - DNA, 25 bp, Artificial
  Probe
ttggctaagaatccacctcagacag

SEQ ID NO: 189944 - DNA, 25 bp, Artificial
  Probe
agaacacactgaacacacataaatg

SEQ ID NO: 189945 - DNA, 25 bp, Artificial
  Probe
ctaagaatccacctcagacagaaca

SEQ ID NO: 189946 - DNA, 25 bp, Artificial
  Probe
cacactgaacacacataaatgggtc

SEQ ID NO: 189947 - DNA, 25 bp, Artificial
  Probe
cacacataaatgggtctctgccagc

SEQ ID NO: 189948 - DNA, 25 bp, Artificial
  Probe
aatccacctcagacagaacacactg

SEQ ID NO: 189949 - DNA, 25 bp, Artificial
  Probe
acacactgaacacacataaatgggt

SEQ ID NO: 189950 - DNA, 25 bp, Artificial
  Probe
cactgaacacacataaatgggtctc

SEQ ID NO: 189951 - DNA, 25 bp, Artificial
  Probe
tgagctcttggctaagaatccacct

SEQ ID NO: 189952 - DNA, 25 bp, Artificial
  Probe
acagaacacactgaacacacataaa

SEQ ID NO: 189953 - DNA, 25 bp, Artificial
  Probe
cagacagaacacactgaacacacat

SEQ ID NO: 189954 - DNA, 25 bp, Artificial
  Probe
gctaagaatccacctcagacagaac

SEQ ID NO: 189955 - DNA, 25 bp, Artificial
  Probe
cagaacacactgaacacacataaat

SEQ ID NO: 189956 - DNA, 25 bp, Artificial
  Probe
atccacctcagacagaacacactga

SEQ ID NO: 189957 - DNA, 25 bp, Artificial
  Probe
tcagacagaacacactgaacacaca

SEQ ID NO: 189958 - DNA, 25 bp, Artificial
  Probe
aacacacataaatgggtctctgcca

SEQ ID NO: 189959 - DNA, 25 bp, Artificial
  Probe
ctcttggctaagaatccacctcaga

SEQ ID NO: 189960 - DNA, 25 bp, Artificial
  Probe
agacagaacacactgaacacacata

SEQ ID NO: 189961 - DNA, 25 bp, Artificial
  Probe
ggctaagaatccacctcagacagaa

SEQ ID NO: 189962 - DNA, 25 bp, Artificial
  Probe
aacacactgaacacacataaatggg

SEQ ID NO: 189963 - DNA, 25 bp, Artificial
  Probe
gacagaacacactgaacacacataa

SEQ ID NO: 189964 - DNA, 25 bp, Artificial
  Probe
taagaatccacctcagacagaacac

SEQ ID NO: 189965 - DNA, 25 bp, Artificial
  Probe
ccacctcagacagaacacactgaac

SEQ ID NO: 189966 - DNA, 25 bp, Artificial
  Probe
tggctaagaatccacctcagacaga

SEQ ID NO: 189967 - DNA, 25 bp, Artificial
  Probe
tccacctcagacagaacacactgaa

SEQ ID NO: 189968 - DNA, 25 bp, Artificial
  Probe
ctcagacagaacacactgaacacac

SEQ ID NO: 189969 - DNA, 25 bp, Artificial
  Probe
tcttggctaagaatccacctcagac

SEQ ID NO: 189970 - DNA, 25 bp, Artificial
  Probe
tgaacacacataaatgggtctctgc

SEQ ID NO: 189971 - DNA, 25 bp, Artificial
  Probe
ggcagcatggctatgaccatgcagt

SEQ ID NO: 189972 - DNA, 25 bp, Artificial
  Probe
gggatctcaaatctgtatgacctct

SEQ ID NO: 189973 - DNA, 25 bp, Artificial
  Probe
gacctctgtcccagaggaaaactca

SEQ ID NO: 189974 - DNA, 25 bp, Artificial
  Probe
tcacactgctttcagactgatagct

SEQ ID NO: 189975 - DNA, 25 bp, Artificial
  Probe
aatctgtatgacctctgtcccagag

SEQ ID NO: 189976 - DNA, 25 bp, Artificial
  Probe
atggctatgaccatgcagtggctgg

SEQ ID NO: 189977 - DNA, 25 bp, Artificial
  Probe
ctggggatctcaaatctgtatgacc

SEQ ID NO: 189978 - DNA, 25 bp, Artificial
  Probe
tgctttcagactgatagctaaccag

SEQ ID NO: 189979 - DNA, 25 bp, Artificial
  Probe
gtcccagaggaaaactcaagtcagt

SEQ ID NO: 189980 - DNA, 25 bp, Artificial
  Probe
atctgtatgacctctgtcccagagg

SEQ ID NO: 189981 - DNA, 25 bp, Artificial
  Probe
ctctgtcccagaggaaaactcaagt

SEQ ID NO: 189982 - DNA, 25 bp, Artificial
  Probe
agcatggctatgaccatgcagtggc

SEQ ID NO: 189983 - DNA, 25 bp, Artificial
  Probe
agaagggcagcatggctatgaccat

SEQ ID NO: 189984 - DNA, 25 bp, Artificial
  Probe
gatctcaaatctgtatgacctctgt

SEQ ID NO: 189985 - DNA, 25 bp, Artificial
  Probe
agactgatagctaaccaggacatca

SEQ ID NO: 189986 - DNA, 25 bp, Artificial
  Probe
cactgctttcagactgatagctaac

SEQ ID NO: 189987 - DNA, 25 bp, Artificial
  Probe
catcacactgctttcagactgatag

SEQ ID NO: 189988 - DNA, 25 bp, Artificial
  Probe
ctgtcccagaggaaaactcaagtca

SEQ ID NO: 189989 - DNA, 25 bp, Artificial
  Probe
ttcagactgatagctaaccaggaca

SEQ ID NO: 189990 - DNA, 25 bp, Artificial
  Probe
acctctgtcccagaggaaaactcaa

SEQ ID NO: 189991 - DNA, 25 bp, Artificial
  Probe
ctgatagctaaccaggacatcaagc

SEQ ID NO: 189992 - DNA, 25 bp, Artificial
  Probe
ctgtatgacctctgtcccagaggaa

SEQ ID NO: 189993 - DNA, 25 bp, Artificial
  Probe
caaatctgtatgacctctgtcccag

SEQ ID NO: 189994 - DNA, 25 bp, Artificial
  Probe
tgtcccagaggaaaactcaagtcag

SEQ ID NO: 189995 - DNA, 25 bp, Artificial
  Probe
tcagactgatagctaaccaggacat

SEQ ID NO: 189996 - DNA, 25 bp, Artificial
  Probe
gactgatagctaaccaggacatcaa

SEQ ID NO: 189997 - DNA, 25 bp, Artificial
  Probe
tcaaaatgcttgtggattggggcca

SEQ ID NO: 189998 - DNA, 25 bp, Artificial
  Probe
ggatctcaaatctgtatgacctctg

SEQ ID NO: 189999 - DNA, 25 bp, Artificial
  Probe
cctctgtcccagaggaaaactcaag

SEQ ID NO: 190000 - DNA, 25 bp, Artificial
  Probe
actgctttcagactgatagctaacc

SEQ ID NO: 190001 - DNA, 25 bp, Artificial
  Probe
tttcagactgatagctaaccaggac

SEQ ID NO: 190002 - DNA, 25 bp, Artificial
  Probe
gatagctaaccaggacatcaagctt

SEQ ID NO: 190003 - DNA, 25 bp, Artificial
  Probe
ctttcagactgatagctaaccagga

SEQ ID NO: 190004 - DNA, 25 bp, Artificial
  Probe
gctttcagactgatagctaaccagg

SEQ ID NO: 190005 - DNA, 25 bp, Artificial
  Probe
gtatgacctctgtcccagaggaaaa

SEQ ID NO: 190006 - DNA, 25 bp, Artificial
  Probe
tctgtcccagaggaaaactcaagtc

SEQ ID NO: 190007 - DNA, 25 bp, Artificial
  Probe
cacactgctttcagactgatagcta

SEQ ID NO: 190008 - DNA, 25 bp, Artificial
  Probe
tgatagctaaccaggacatcaagct

SEQ ID NO: 190009 - DNA, 25 bp, Artificial
  Probe
ctgctttcagactgatagctaacca

SEQ ID NO: 190010 - DNA, 25 bp, Artificial
  Probe
catggctatgaccatgcagtggctg

SEQ ID NO: 190011 - DNA, 25 bp, Artificial
  Probe
gcatggctatgaccatgcagtggct

SEQ ID NO: 190012 - DNA, 25 bp, Artificial
  Probe
ttcaaaatgcttgtggattggggcc

SEQ ID NO: 190013 - DNA, 25 bp, Artificial
  Probe
tctgtatgacctctgtcccagagga

SEQ ID NO: 190014 - DNA, 25 bp, Artificial
  Probe
gggcagcatggctatgaccatgcag

SEQ ID NO: 190015 - DNA, 25 bp, Artificial
  Probe
ggggatctcaaatctgtatgacctc

SEQ ID NO: 190016 - DNA, 25 bp, Artificial
  Probe
cagactgatagctaaccaggacatc

SEQ ID NO: 190017 - DNA, 25 bp, Artificial
  Probe
ctgcctcttgtttcccaggtgtgaa

SEQ ID NO: 190018 - DNA, 25 bp, Artificial
  Probe
agagtgggctaatcagcagaacaag

SEQ ID NO: 190019 - DNA, 25 bp, Artificial
  Probe
tgtttcccaggtgtgaatgaggcag

SEQ ID NO: 190020 - DNA, 25 bp, Artificial
  Probe
gtttgccataagtcaggtgcaaagg

SEQ ID NO: 190021 - DNA, 25 bp, Artificial
  Probe
tttcccaggtgtgaatgaggcagga

SEQ ID NO: 190022 - DNA, 25 bp, Artificial
  Probe
tctagtcagcagctcttagaggaga

SEQ ID NO: 190023 - DNA, 25 bp, Artificial
  Probe
aaccgggctatctgggtttgccata

SEQ ID NO: 190024 - DNA, 25 bp, Artificial
  Probe
cttgcttgctctagtcagcagctct

SEQ ID NO: 190025 - DNA, 25 bp, Artificial
  Probe
ttgcttcctgcctcttgtttcccag

SEQ ID NO: 190026 - DNA, 25 bp, Artificial
  Probe
gctatctgggtttgccataagtcag

SEQ ID NO: 190027 - DNA, 25 bp, Artificial
  Probe
aacgcaatggccatccttgcttgct

SEQ ID NO: 190028 - DNA, 25 bp, Artificial
  Probe
gggctatctgggtttgccataagtc

SEQ ID NO: 190029 - DNA, 25 bp, Artificial
  Probe
gtaaccgggctatctgggtttgcca

SEQ ID NO: 190030 - DNA, 25 bp, Artificial
  Probe
cctgcctcttgtttcccaggtgtga

SEQ ID NO: 190031 - DNA, 25 bp, Artificial
  Probe
taacctgacagcttgcttcctgcct

SEQ ID NO: 190032 - DNA, 25 bp, Artificial
  Probe
catccttgcttgctctagtcagcag

SEQ ID NO: 190033 - DNA, 25 bp, Artificial
  Probe
agtcagcagctcttagaggagatgg

SEQ ID NO: 190034 - DNA, 25 bp, Artificial
  Probe
cagcttgcttcctgcctcttgtttc

SEQ ID NO: 190035 - DNA, 25 bp, Artificial
  Probe
ttgctctagtcagcagctcttagag

SEQ ID NO: 190036 - DNA, 25 bp, Artificial
  Probe
cgcaatggccatccttgcttgctct

SEQ ID NO: 190037 - DNA, 25 bp, Artificial
  Probe
gctggcgccaagagggaaacgcaat

SEQ ID NO: 190038 - DNA, 25 bp, Artificial
  Probe
acgccagaagagtgggctaatcagc

SEQ ID NO: 190039 - DNA, 25 bp, Artificial
  Probe
ctgacagcttgcttcctgcctcttg

SEQ ID NO: 190040 - DNA, 25 bp, Artificial
  Probe
tgcttcctgcctcttgtttcccagg

SEQ ID NO: 190041 - DNA, 25 bp, Artificial
  Probe
gacgcaggcgcgaccacagggacca

SEQ ID NO: 190042 - DNA, 25 bp, Artificial
  Probe
cacagacatgagaccataggggagc

SEQ ID NO: 190043 - DNA, 25 bp, Artificial
  Probe
ggctatctgggtttgccataagtca

SEQ ID NO: 190044 - DNA, 25 bp, Artificial
  Probe
aggacgccagaagagtgggctaatc

SEQ ID NO: 190045 - DNA, 25 bp, Artificial
  Probe
cccctacacagacatgagaccatag

SEQ ID NO: 190046 - DNA, 25 bp, Artificial
  Probe
tctgggtttgccataagtcaggtgc

SEQ ID NO: 190047 - DNA, 25 bp, Artificial
  Probe
tggccatccttgcttgctctagtca

SEQ ID NO: 190048 - DNA, 25 bp, Artificial
  Probe
ggaggcagcattaccatgcctagct

SEQ ID NO: 190049 - DNA, 25 bp, Artificial
  Probe
tcccccgaggtaaccgggctatctg

SEQ ID NO: 190050 - DNA, 25 bp, Artificial
  Probe
ggtggcctcaaggataggcgctccc

SEQ ID NO: 190051 - DNA, 25 bp, Artificial
  Probe
gcagcattaccatgcctagcttcct

SEQ ID NO: 190052 - DNA, 25 bp, Artificial
  Probe
acatgagaccataggggagctgtct

SEQ ID NO: 190053 - DNA, 25 bp, Artificial
  Probe
gggctaatcagcagaacaagttagg

SEQ ID NO: 190054 - DNA, 25 bp, Artificial
  Probe
ctcttgtttcccaggtgtgaatgag

SEQ ID NO: 190055 - DNA, 25 bp, Artificial
  Probe
ggtttgccataagtcaggtgcaaag

SEQ ID NO: 190056 - DNA, 25 bp, Artificial
  Probe
aatcagcagaacaagttaggcctgg

SEQ ID NO: 190057 - DNA, 25 bp, Artificial
  Probe
ccctacacagacatgagaccatagg

SEQ ID NO: 190058 - DNA, 25 bp, Artificial
  Probe
cataagtcaggtgcaaaggagctgg

SEQ ID NO: 190059 - DNA, 25 bp, Artificial
  Probe
gacgccagaagagtgggctaatcag

SEQ ID NO: 190060 - DNA, 25 bp, Artificial
  Probe
gaattgggacgcaggcgcgaccaca

SEQ ID NO: 190061 - DNA, 25 bp, Artificial
  Probe
ttgccataagtcaggtgcaaaggag

SEQ ID NO: 190062 - DNA, 25 bp, Artificial
  Probe
ggcagcattaccatgcctagcttcc

SEQ ID NO: 190063 - DNA, 25 bp, Artificial
  Probe
tctgactctgtagtctttgattggc

SEQ ID NO: 190064 - DNA, 25 bp, Artificial
  Probe
agaatacagctatggagccttgaat

SEQ ID NO: 190065 - DNA, 25 bp, Artificial
  Probe
ggtttattggggtgactcccagcca

SEQ ID NO: 190066 - DNA, 25 bp, Artificial
  Probe
ctccctcttacatgaggaaatcggg

SEQ ID NO: 190067 - DNA, 25 bp, Artificial
  Probe
actctgtagtctttgattggctggg

SEQ ID NO: 190068 - DNA, 25 bp, Artificial
  Probe
ccttgaatctaccaagatttggggg

SEQ ID NO: 190069 - DNA, 25 bp, Artificial
  Probe
tgtggctaagggtctgactctgtag

SEQ ID NO: 190070 - DNA, 25 bp, Artificial
  Probe
tgttactgtggctaagggtctgact

SEQ ID NO: 190071 - DNA, 25 bp, Artificial
  Probe
gccacaagctcttcccaaaggacat

SEQ ID NO: 190072 - DNA, 25 bp, Artificial
  Probe
gaagggtggtcctgtaatagtacca

SEQ ID NO: 190073 - DNA, 25 bp, Artificial
  Probe
tggctaagggtctgactctgtagtc

SEQ ID NO: 190074 - DNA, 25 bp, Artificial
  Probe
ttactgtggctaagggtctgactct

SEQ ID NO: 190075 - DNA, 25 bp, Artificial
  Probe
caggtcacctgttgctctgctcttc

SEQ ID NO: 190076 - DNA, 25 bp, Artificial
  Probe
agggtggtcctgtaatagtaccaag

SEQ ID NO: 190077 - DNA, 25 bp, Artificial
  Probe
gaggaaatcgggaccctcttaccat

SEQ ID NO: 190078 - DNA, 25 bp, Artificial
  Probe
aatacagctatggagccttgaatct

SEQ ID NO: 190079 - DNA, 25 bp, Artificial
  Probe
agccacaagctcttcccaaaggaca

SEQ ID NO: 190080 - DNA, 25 bp, Artificial
  Probe
ttattggggtgactcccagccacaa

SEQ ID NO: 190081 - DNA, 25 bp, Artificial
  Probe
ctgctcttctgtgtagattgaggtt

SEQ ID NO: 190082 - DNA, 25 bp, Artificial
  Probe
aatatatccaggtcacctgttgctc

SEQ ID NO: 190083 - DNA, 25 bp, Artificial
  Probe
ctctgctcttctgtgtagattgagg

SEQ ID NO: 190084 - DNA, 25 bp, Artificial
  Probe
tctcagaaacaatgttactgtggct

SEQ ID NO: 190085 - DNA, 25 bp, Artificial
  Probe
gctcttcccaaaggacattaaaaga

SEQ ID NO: 190086 - DNA, 25 bp, Artificial
  Probe
agagctccctcttacatgaggaaat

SEQ ID NO: 190087 - DNA, 25 bp, Artificial
  Probe
ctctgtagtctttgattggctgggt

SEQ ID NO: 190088 - DNA, 25 bp, Artificial
  Probe
cctgttgctctgctcttctgtgtag

SEQ ID NO: 190089 - DNA, 25 bp, Artificial
  Probe
acctgttgctctgctcttctgtgta

SEQ ID NO: 190090 - DNA, 25 bp, Artificial
  Probe
agctatggagccttgaatctaccaa

SEQ ID NO: 190091 - DNA, 25 bp, Artificial
  Probe
attctcagaaacaatgttactgtgg

SEQ ID NO: 190092 - DNA, 25 bp, Artificial
  Probe
ctaagggtctgactctgtagtcttt

SEQ ID NO: 190093 - DNA, 25 bp, Artificial
  Probe
cttacatgaggaaatcgggaccctc

SEQ ID NO: 190094 - DNA, 25 bp, Artificial
  Probe
cttgaatctaccaagatttgggggt

SEQ ID NO: 190095 - DNA, 25 bp, Artificial
  Probe
cattctcagaaacaatgttactgtg

SEQ ID NO: 190096 - DNA, 25 bp, Artificial
  Probe
ttcccaaaggacattaaaagagctc

SEQ ID NO: 190097 - DNA, 25 bp, Artificial
  Probe
gaatacagctatggagccttgaatc

SEQ ID NO: 190098 - DNA, 25 bp, Artificial
  Probe
aagagctccctcttacatgaggaaa

SEQ ID NO: 190099 - DNA, 25 bp, Artificial
  Probe
atatatccaggtcacctgttgctct

SEQ ID NO: 190100 - DNA, 25 bp, Artificial
  Probe
gctaagggtctgactctgtagtctt

SEQ ID NO: 190101 - DNA, 25 bp, Artificial
  Probe
atatccaggtcacctgttgctctgc

SEQ ID NO: 190102 - DNA, 25 bp, Artificial
  Probe
gactctgtagtctttgattggctgg

SEQ ID NO: 190103 - DNA, 25 bp, Artificial
  Probe
tatggagccttgaatctaccaagat

SEQ ID NO: 190104 - DNA, 25 bp, Artificial
  Probe
acaatgttactgtggctaagggtct

SEQ ID NO: 190105 - DNA, 25 bp, Artificial
  Probe
agctcttcccaaaggacattaaaag

SEQ ID NO: 190106 - DNA, 25 bp, Artificial
  Probe
gctctgctcttctgtgtagattgag

SEQ ID NO: 190107 - DNA, 25 bp, Artificial
  Probe
ggggtgactcccagccacaagctct

SEQ ID NO: 190108 - DNA, 25 bp, Artificial
  Probe
atacagctatggagccttgaatcta

SEQ ID NO: 190109 - DNA, 25 bp, Artificial
  Probe
tactgccttttactggtatcaacag

SEQ ID NO: 190110 - DNA, 25 bp, Artificial
  Probe
aaaggcgcatactgccttttactgg

SEQ ID NO: 190111 - DNA, 25 bp, Artificial
  Probe
agacattattgaccaaacagacttg

SEQ ID NO: 190112 - DNA, 25 bp, Artificial
  Probe
agatcccatcctctgaagaaggaga

SEQ ID NO: 190113 - DNA, 25 bp, Artificial
  Probe
gaaccaagctgtctgtcctggagga

SEQ ID NO: 190114 - DNA, 25 bp, Artificial
  Probe
gaccgggaccaacaatgaaagattg

SEQ ID NO: 190115 - DNA, 25 bp, Artificial
  Probe
tactggtatcaacagaaccagaaaa

SEQ ID NO: 190116 - DNA, 25 bp, Artificial
  Probe
gtgtgtcccagacttacactgcacc

SEQ ID NO: 190117 - DNA, 25 bp, Artificial
  Probe
tgaagtaacccagactccaagatac

SEQ ID NO: 190118 - DNA, 25 bp, Artificial
  Probe
gccagcagtctgaccgggaccaaca

SEQ ID NO: 190119 - DNA, 25 bp, Artificial
  Probe
gagatcccatcctctgaagaaggag

SEQ ID NO: 190120 - DNA, 25 bp, Artificial
  Probe
ttctgtgccagcagtctgaccggga

SEQ ID NO: 190121 - DNA, 25 bp, Artificial
  Probe
ttgaccaaacagacttggtcaagaa

SEQ ID NO: 190122 - DNA, 25 bp, Artificial
  Probe
gtttttcggccatggaaccaagctg

SEQ ID NO: 190123 - DNA, 25 bp, Artificial
  Probe
gcatactgccttttactggtatcaa

SEQ ID NO: 190124 - DNA, 25 bp, Artificial
  Probe
gtagtcctgaaaaggcgcatactgc

SEQ ID NO: 190125 - DNA, 25 bp, Artificial
  Probe
ctgtgccagcagtctgaccgggacc

SEQ ID NO: 190126 - DNA, 25 bp, Artificial
  Probe
cagctcagtgtgtcccagacttaca

SEQ ID NO: 190127 - DNA, 25 bp, Artificial
  Probe
tcccatcctctgaagaaggagactc

SEQ ID NO: 190128 - DNA, 25 bp, Artificial
  Probe
gaagtaacccagactccaagatacc

SEQ ID NO: 190129 - DNA, 25 bp, Artificial
  Probe
gacttacactgcaccctggagatcc

SEQ ID NO: 190130 - DNA, 25 bp, Artificial
  Probe
gactccaagatacctgatcaaagag

SEQ ID NO: 190131 - DNA, 25 bp, Artificial
  Probe
tgccttttactggtatcaacagaac

SEQ ID NO: 190132 - DNA, 25 bp, Artificial
  Probe
atggaaccaagctgtctgtcctgga

SEQ ID NO: 190133 - DNA, 25 bp, Artificial
  Probe
atatgagctgtagtcctgaaaaggc

SEQ ID NO: 190134 - DNA, 25 bp, Artificial
  Probe
ctgaagtaacccagactccaagata

SEQ ID NO: 190135 - DNA, 25 bp, Artificial
  Probe
ccatggaaccaagctgtctgtcctg

SEQ ID NO: 190136 - DNA, 25 bp, Artificial
  Probe
agctgtagtcctgaaaaggcgcata

SEQ ID NO: 190137 - DNA, 25 bp, Artificial
  Probe
ccagacttacactgcaccctggaga

SEQ ID NO: 190138 - DNA, 25 bp, Artificial
  Probe
tgaccaaacagacttggtcaagaag

SEQ ID NO: 190139 - DNA, 25 bp, Artificial
  Probe
gcgcatactgccttttactggtatc

SEQ ID NO: 190140 - DNA, 25 bp, Artificial
  Probe
atacctgatcaaagagaaaggacag

SEQ ID NO: 190141 - DNA, 25 bp, Artificial
  Probe
cttttactggtatcaacagaaccag

SEQ ID NO: 190142 - DNA, 25 bp, Artificial
  Probe
gccttttactggtatcaacagaacc

SEQ ID NO: 190143 - DNA, 25 bp, Artificial
  Probe
gtaacccagactccaagatacctga

SEQ ID NO: 190144 - DNA, 25 bp, Artificial
  Probe
tacctgatcaaagagaaaggacaga

SEQ ID NO: 190145 - DNA, 25 bp, Artificial
  Probe
agtaacccagactccaagatacctg

SEQ ID NO: 190146 - DNA, 25 bp, Artificial
  Probe
attctcagctcagtgtgtcccagac

SEQ ID NO: 190147 - DNA, 25 bp, Artificial
  Probe
tcctctgaagaaggagactcagcat

SEQ ID NO: 190148 - DNA, 25 bp, Artificial
  Probe
tttttcggccatggaaccaagctgt

SEQ ID NO: 190149 - DNA, 25 bp, Artificial
  Probe
agtctgaccgggaccaacaatgaaa

SEQ ID NO: 190150 - DNA, 25 bp, Artificial
  Probe
cagactccaagatacctgatcaaag

SEQ ID NO: 190151 - DNA, 25 bp, Artificial
  Probe
gttgctgaagtaacccagactccaa

SEQ ID NO: 190152 - DNA, 25 bp, Artificial
  Probe
ccgggaccaacaatgaaagattgtt

SEQ ID NO: 190153 - DNA, 25 bp, Artificial
  Probe
agtgtgtcccagacttacactgcac

SEQ ID NO: 190154 - DNA, 25 bp, Artificial
  Probe
catcctctgaagaaggagactcagc

SEQ ID NO: 190155 - DNA, 25 bp, Artificial
  Probe
tgttagtgctcagactatccatcaa

SEQ ID NO: 190156 - DNA, 25 bp, Artificial
  Probe
cagactatccatcaatggccagctg

SEQ ID NO: 190157 - DNA, 25 bp, Artificial
  Probe
ggagtccaggacagggctcatatga

SEQ ID NO: 190158 - DNA, 25 bp, Artificial
  Probe
cttggatgttagtgctcagactatc

SEQ ID NO: 190159 - DNA, 25 bp, Artificial
  Probe
gtccaggacagggctcatatgagca

SEQ ID NO: 190160 - DNA, 25 bp, Artificial
  Probe
ccaggacagggctcatatgagcagt

SEQ ID NO: 190161 - DNA, 25 bp, Artificial
  Probe
tagtgctcagactatccatcaatgg

SEQ ID NO: 190162 - DNA, 25 bp, Artificial
  Probe
gatgttagtgctcagactatccatc

SEQ ID NO: 190163 - DNA, 25 bp, Artificial
  Probe
ggacagggctcatatgagcagtatt

SEQ ID NO: 190164 - DNA, 25 bp, Artificial
  Probe
agtccaggacagggctcatatgagc

SEQ ID NO: 190165 - DNA, 25 bp, Artificial
  Probe
tggatgttagtgctcagactatcca

SEQ ID NO: 190166 - DNA, 25 bp, Artificial
  Probe
gttagtgctcagactatccatcaat

SEQ ID NO: 190167 - DNA, 25 bp, Artificial
  Probe
acagggctcatatgagcagtatttc

SEQ ID NO: 190168 - DNA, 25 bp, Artificial
  Probe
ggatgttagtgctcagactatccat

SEQ ID NO: 190169 - DNA, 25 bp, Artificial
  Probe
agactatccatcaatggccagctgt

SEQ ID NO: 190170 - DNA, 25 bp, Artificial
  Probe
tcagactatccatcaatggccagct

SEQ ID NO: 190171 - DNA, 25 bp, Artificial
  Probe
gacagggctcatatgagcagtattt

SEQ ID NO: 190172 - DNA, 25 bp, Artificial
  Probe
cctggagtccaggacagggctcata

SEQ ID NO: 190173 - DNA, 25 bp, Artificial
  Probe
tgctcagactatccatcaatggcca

SEQ ID NO: 190174 - DNA, 25 bp, Artificial
  Probe
tgcctggagtccaggacagggctca

SEQ ID NO: 190175 - DNA, 25 bp, Artificial
  Probe
aggacagggctcatatgagcagtat

SEQ ID NO: 190176 - DNA, 25 bp, Artificial
  Probe
atgttagtgctcagactatccatca

SEQ ID NO: 190177 - DNA, 25 bp, Artificial
  Probe
gtgctcagactatccatcaatggcc

SEQ ID NO: 190178 - DNA, 25 bp, Artificial
  Probe
gagtccaggacagggctcatatgag

SEQ ID NO: 190179 - DNA, 25 bp, Artificial
  Probe
tggagtccaggacagggctcatatg

SEQ ID NO: 190180 - DNA, 25 bp, Artificial
  Probe
gctcagactatccatcaatggccag

SEQ ID NO: 190181 - DNA, 25 bp, Artificial
  Probe
ttagtgctcagactatccatcaatg

SEQ ID NO: 190182 - DNA, 25 bp, Artificial
  Probe
agtgctcagactatccatcaatggc

SEQ ID NO: 190183 - DNA, 25 bp, Artificial
  Probe
gtgcctggagtccaggacagggctc

SEQ ID NO: 190184 - DNA, 25 bp, Artificial
  Probe
caggacagggctcatatgagcagta

SEQ ID NO: 190185 - DNA, 25 bp, Artificial
  Probe
tccaggacagggctcatatgagcag

SEQ ID NO: 190186 - DNA, 25 bp, Artificial
  Probe
ctggagtccaggacagggctcatat

SEQ ID NO: 190187 - DNA, 25 bp, Artificial
  Probe
gcctggagtccaggacagggctcat

SEQ ID NO: 190188 - DNA, 25 bp, Artificial
  Probe
ctcagactatccatcaatggccagc

SEQ ID NO: 190189 - DNA, 25 bp, Artificial
  Probe
cagggctcatatgagcagtatttcg

SEQ ID NO: 190190 - DNA, 25 bp, Artificial
  Probe
tgtgcctggagtccaggacagggct

SEQ ID NO: 190191 - DNA, 25 bp, Artificial
  Probe
agcaaacatcagatcgtgccccgac

SEQ ID NO: 190192 - DNA, 25 bp, Artificial
  Probe
agcggactaggctgcaacagcttcc

SEQ ID NO: 190193 - DNA, 25 bp, Artificial
  Probe
tttcaagaacctgctagaccacctg

SEQ ID NO: 190194 - DNA, 25 bp, Artificial
  Probe
cttttggctcccaggccatattgga

SEQ ID NO: 190195 - DNA, 25 bp, Artificial
  Probe
acagcttccggtaccgaagataaca

SEQ ID NO: 190196 - DNA, 25 bp, Artificial
  Probe
aagatgaggtcatgcctccgcaggc

SEQ ID NO: 190197 - DNA, 25 bp, Artificial
  Probe
atggatttcaagaacctgctagacc

SEQ ID NO: 190198 - DNA, 25 bp, Artificial
  Probe
attgacaggattggagcccagagcg

SEQ ID NO: 190199 - DNA, 25 bp, Artificial
  Probe
agggcttcttcctcttcctggcctt

SEQ ID NO: 190200 - DNA, 25 bp, Artificial
  Probe
tgctcgagcagatcgcaaaagatcc

SEQ ID NO: 190201 - DNA, 25 bp, Artificial
  Probe
gatcccaagcccttgcggtgtgtca

SEQ ID NO: 190202 - DNA, 25 bp, Artificial
  Probe
actgagggctctgctcgctggccct

SEQ ID NO: 190203 - DNA, 25 bp, Artificial
  Probe
accaagggcttcttcctcttcctgg

SEQ ID NO: 190204 - DNA, 25 bp, Artificial
  Probe
aataccctcctggagctgcagcttc

SEQ ID NO: 190205 - DNA, 25 bp, Artificial
  Probe
ctcttgaaaagcaaactgagggctc

SEQ ID NO: 190206 - DNA, 25 bp, Artificial
  Probe
ctcccaggccatattggagcaaatc

SEQ ID NO: 190207 - DNA, 25 bp, Artificial
  Probe
caaactgagggctctgctcgctggc

SEQ ID NO: 190208 - DNA, 25 bp, Artificial
  Probe
tggccttttggctcccaggccatat

SEQ ID NO: 190209 - DNA, 25 bp, Artificial
  Probe
attggagcccagagcggactaggct

SEQ ID NO: 190210 - DNA, 25 bp, Artificial
  Probe
atgggctccttctccatcaccaagg

SEQ ID NO: 190211 - DNA, 25 bp, Artificial
  Probe
gcaaaagatcccaagcccttgcggt

SEQ ID NO: 190212 - DNA, 25 bp, Artificial
  Probe
ctgtcttcatctatcacgatcgatg

SEQ ID NO: 190213 - DNA, 25 bp, Artificial
  Probe
aggccctgagcgagcagaccgatga

SEQ ID NO: 190214 - DNA, 25 bp, Artificial
  Probe
gggcggcacttagctccctctctga

SEQ ID NO: 190215 - DNA, 25 bp, Artificial
  Probe
gctggccctcggagcctgcgaagat

SEQ ID NO: 190216 - DNA, 25 bp, Artificial
  Probe
actctgcatattaaggtagatcctc

SEQ ID NO: 190217 - DNA, 25 bp, Artificial
  Probe
tgaggtcatgcctccgcaggccctg

SEQ ID NO: 190218 - DNA, 25 bp, Artificial
  Probe
tcacccctttcagaaagcagttgga

SEQ ID NO: 190219 - DNA, 25 bp, Artificial
  Probe
agatctgatggatttcaagaacctg

SEQ ID NO: 190220 - DNA, 25 bp, Artificial
  Probe
caacccgtctcagagagatggaggt

SEQ ID NO: 190221 - DNA, 25 bp, Artificial
  Probe
tggtgaataccctcctggagctgca

SEQ ID NO: 190222 - DNA, 25 bp, Artificial
  Probe
tctcccactctgcatattaaggtag

SEQ ID NO: 190223 - DNA, 25 bp, Artificial
  Probe
ctatcacgatcgatgttaagtgtag

SEQ ID NO: 190224 - DNA, 25 bp, Artificial
  Probe
ctcctggagctgcagcttcctgtct

SEQ ID NO: 190225 - DNA, 25 bp, Artificial
  Probe
gccctcggagcctgcgaagatcaag

SEQ ID NO: 190226 - DNA, 25 bp, Artificial
  Probe
cacccctttcagaaagcagttggaa

SEQ ID NO: 190227 - DNA, 25 bp, Artificial
  Probe
cgaagatcaagctgcttcgggggta

SEQ ID NO: 190228 - DNA, 25 bp, Artificial
  Probe
ctctgaggtgcctccctggactggg

SEQ ID NO: 190229 - DNA, 25 bp, Artificial
  Probe
gctgcagcttcctgtcttcatctat

SEQ ID NO: 190230 - DNA, 25 bp, Artificial
  Probe
cctgagcgagcagaccgatgaagcg

SEQ ID NO: 190231 - DNA, 25 bp, Artificial
  Probe
atccgaataaacttcagcaccacgg

SEQ ID NO: 190232 - DNA, 25 bp, Artificial
  Probe
ccactgagaggtggtgaataccctc

SEQ ID NO: 190233 - DNA, 25 bp, Artificial
  Probe
acttagctccctctctgaggtgcct

SEQ ID NO: 190234 - DNA, 25 bp, Artificial
  Probe
gcagatcgcaaaagatcccaagccc

SEQ ID NO: 190235 - DNA, 25 bp, Artificial
  Probe
gtctcagagagatggaggtgctctc

SEQ ID NO: 190236 - DNA, 25 bp, Artificial
  Probe
cctccgatagatctgccctcttgaa

SEQ ID NO: 190237 - DNA, 25 bp, Artificial
  Probe
gccctcttgctgtccctgtcctatg

SEQ ID NO: 190238 - DNA, 25 bp, Artificial
  Probe
tccctgtcctatggcacgcatattc

SEQ ID NO: 190239 - DNA, 25 bp, Artificial
  Probe
gcatattcctgccttgctccctcac

SEQ ID NO: 190240 - DNA, 25 bp, Artificial
  Probe
cctaccatggagagctaacaccccc

SEQ ID NO: 190241 - DNA, 25 bp, Artificial
  Probe
atattcctgccttgctccctcactc

SEQ ID NO: 190242 - DNA, 25 bp, Artificial
  Probe
ccctgtcctatggcacgcatattcc

SEQ ID NO: 190243 - DNA, 25 bp, Artificial
  Probe
ctcttgctgtccctgtcctatggca

SEQ ID NO: 190244 - DNA, 25 bp, Artificial
  Probe
ctggaccaagttggaacagcagcca

SEQ ID NO: 190245 - DNA, 25 bp, Artificial
  Probe
agttggaacagcagccatctcagcc

SEQ ID NO: 190246 - DNA, 25 bp, Artificial
  Probe
ccctcttgctgtccctgtcctatgg

SEQ ID NO: 190247 - DNA, 25 bp, Artificial
  Probe
gatctggaccaagttggaacagcag

SEQ ID NO: 190248 - DNA, 25 bp, Artificial
  Probe
ttggaacagcagccatctcagccgc

SEQ ID NO: 190249 - DNA, 25 bp, Artificial
  Probe
ctgatctggaccaagttggaacagc

SEQ ID NO: 190250 - DNA, 25 bp, Artificial
  Probe
cgcatattcctgccttgctccctca

SEQ ID NO: 190251 - DNA, 25 bp, Artificial
  Probe
ggccctcttgctgtccctgtcctat

SEQ ID NO: 190252 - DNA, 25 bp, Artificial
  Probe
gggccctcttgctgtccctgtccta

SEQ ID NO: 190253 - DNA, 25 bp, Artificial
  Probe
acgcatattcctgccttgctccctc

SEQ ID NO: 190254 - DNA, 25 bp, Artificial
  Probe
gttggaacagcagccatctcagccg

SEQ ID NO: 190255 - DNA, 25 bp, Artificial
  Probe
ctgtcctatggcacgcatattcctg

SEQ ID NO: 190256 - DNA, 25 bp, Artificial
  Probe
atggagagctaacacccccaccaac

SEQ ID NO: 190257 - DNA, 25 bp, Artificial
  Probe
tgatctggaccaagttggaacagca

SEQ ID NO: 190258 - DNA, 25 bp, Artificial
  Probe
tggcacgcatattcctgccttgctc

SEQ ID NO: 190259 - DNA, 25 bp, Artificial
  Probe
atctggaccaagttggaacagcagc

SEQ ID NO: 190260 - DNA, 25 bp, Artificial
  Probe
caagttggaacagcagccatctcag

SEQ ID NO: 190261 - DNA, 25 bp, Artificial
  Probe
catattcctgccttgctccctcact

SEQ ID NO: 190262 - DNA, 25 bp, Artificial
  Probe
tgtccctgtcctatggcacgcatat

SEQ ID NO: 190263 - DNA, 25 bp, Artificial
  Probe
ccaccaaccagcagaatggacattc

SEQ ID NO: 190264 - DNA, 25 bp, Artificial
  Probe
tctgatctggaccaagttggaacag

SEQ ID NO: 190265 - DNA, 25 bp, Artificial
  Probe
ctaccatggagagctaacaccccca

SEQ ID NO: 190266 - DNA, 25 bp, Artificial
  Probe
ggcacgcatattcctgccttgctcc

SEQ ID NO: 190267 - DNA, 25 bp, Artificial
  Probe
cacgcatattcctgccttgctccct

SEQ ID NO: 190268 - DNA, 25 bp, Artificial
  Probe
gctgtccctgtcctatggcacgcat

SEQ ID NO: 190269 - DNA, 25 bp, Artificial
  Probe
gtccctgtcctatggcacgcatatt

SEQ ID NO: 190270 - DNA, 25 bp, Artificial
  Probe
tctggaccaagttggaacagcagcc

SEQ ID NO: 190271 - DNA, 25 bp, Artificial
  Probe
tcttgctgtccctgtcctatggcac

SEQ ID NO: 190272 - DNA, 25 bp, Artificial
  Probe
aagttggaacagcagccatctcagc

SEQ ID NO: 190273 - DNA, 25 bp, Artificial
  Probe
catggagagctaacacccccaccaa

SEQ ID NO: 190274 - DNA, 25 bp, Artificial
  Probe
tggagagctaacacccccaccaacc

SEQ ID NO: 190275 - DNA, 25 bp, Artificial
  Probe
ggagagctaacacccccaccaacca

SEQ ID NO: 190276 - DNA, 25 bp, Artificial
  Probe
cctgtcctatggcacgcatattcct

SEQ ID NO: 190277 - DNA, 25 bp, Artificial
  Probe
ggggccctcttgctgtccctgtcct

SEQ ID NO: 190278 - DNA, 25 bp, Artificial
  Probe
ctgtccctgtcctatggcacgcata

SEQ ID NO: 190279 - DNA, 25 bp, Artificial
  Probe
ccccaccaaccagcagaatggacat

SEQ ID NO: 190280 - DNA, 25 bp, Artificial
  Probe
cttgctgtccctgtcctatggcacg

SEQ ID NO: 190281 - DNA, 25 bp, Artificial
  Probe
tgctgtccctgtcctatggcacgca

SEQ ID NO: 190282 - DNA, 25 bp, Artificial
  Probe
cctcttgctgtccctgtcctatggc

SEQ ID NO: 190283 - DNA, 25 bp, Artificial
  Probe
cctaaagtgctacagttgcatagaa

SEQ ID NO: 190284 - DNA, 25 bp, Artificial
  Probe
cagttgcatagaagtcccacttaat

SEQ ID NO: 190285 - DNA, 25 bp, Artificial
  Probe
gtgctacagttgcatagaagtccca

SEQ ID NO: 190286 - DNA, 25 bp, Artificial
  Probe
tgccccaagtttcctcaaagaaccg

SEQ ID NO: 190287 - DNA, 25 bp, Artificial
  Probe
agaagtcccacttaatgctaactgc

SEQ ID NO: 190288 - DNA, 25 bp, Artificial
  Probe
tctgccttccaatctgccccaagtt

SEQ ID NO: 190289 - DNA, 25 bp, Artificial
  Probe
atagaagtcccacttaatgctaact

SEQ ID NO: 190290 - DNA, 25 bp, Artificial
  Probe
aagctgtagagggctctgtaagacg

SEQ ID NO: 190291 - DNA, 25 bp, Artificial
  Probe
tactctgatggagtgtgtgtttctc

SEQ ID NO: 190292 - DNA, 25 bp, Artificial
  Probe
agggctctgtaagacggacagcaaa

SEQ ID NO: 190293 - DNA, 25 bp, Artificial
  Probe
gctgtagagggctctgtaagacgga

SEQ ID NO: 190294 - DNA, 25 bp, Artificial
  Probe
tgtagagggctctgtaagacggaca

SEQ ID NO: 190295 - DNA, 25 bp, Artificial
  Probe
tgctacagttgcatagaagtcccac

SEQ ID NO: 190296 - DNA, 25 bp, Artificial
  Probe
actctgatggagtgtgtgtttctca

SEQ ID NO: 190297 - DNA, 25 bp, Artificial
  Probe
gttgcatagaagtcccacttaatgc

SEQ ID NO: 190298 - DNA, 25 bp, Artificial
  Probe
ctgtagagggctctgtaagacggac

SEQ ID NO: 190299 - DNA, 25 bp, Artificial
  Probe
taaagtgctacagttgcatagaagt

SEQ ID NO: 190300 - DNA, 25 bp, Artificial
  Probe
caagtttcctcaaagaaccgagatc

SEQ ID NO: 190301 - DNA, 25 bp, Artificial
  Probe
ttgcatagaagtcccacttaatgct

SEQ ID NO: 190302 - DNA, 25 bp, Artificial
  Probe
tttcctcaaagaaccgagatcctgg

SEQ ID NO: 190303 - DNA, 25 bp, Artificial
  Probe
agtttcctcaaagaaccgagatcct

SEQ ID NO: 190304 - DNA, 25 bp, Artificial
  Probe
tagaagtcccacttaatgctaactg

SEQ ID NO: 190305 - DNA, 25 bp, Artificial
  Probe
aagtcccacttaatgctaactgctc

SEQ ID NO: 190306 - DNA, 25 bp, Artificial
  Probe
tctcaggtgttagaagctgtagagg

SEQ ID NO: 190307 - DNA, 25 bp, Artificial
  Probe
ctgggtaccgttgtctacacgaagg

SEQ ID NO: 190308 - DNA, 25 bp, Artificial
  Probe
atggagtgtgtgtttctcaggtgtt

SEQ ID NO: 190309 - DNA, 25 bp, Artificial
  Probe
agagggctctgtaagacggacagca

SEQ ID NO: 190310 - DNA, 25 bp, Artificial
  Probe
gtgttagaagctgtagagggctctg

SEQ ID NO: 190311 - DNA, 25 bp, Artificial
  Probe
gtttcctcaaagaaccgagatcctg

SEQ ID NO: 190312 - DNA, 25 bp, Artificial
  Probe
tttctcaggtgttagaagctgtaga

SEQ ID NO: 190313 - DNA, 25 bp, Artificial
  Probe
tgctaactgctcaacagctacctgc

SEQ ID NO: 190314 - DNA, 25 bp, Artificial
  Probe
gaagtcccacttaatgctaactgct

SEQ ID NO: 190315 - DNA, 25 bp, Artificial
  Probe
tagagggctctgtaagacggacagc

SEQ ID NO: 190316 - DNA, 25 bp, Artificial
  Probe
gctaactgctcaacagctacctgcc

SEQ ID NO: 190317 - DNA, 25 bp, Artificial
  Probe
aactgctcaacagctacctgcccct

SEQ ID NO: 190318 - DNA, 25 bp, Artificial
  Probe
gtagagggctctgtaagacggacag

SEQ ID NO: 190319 - DNA, 25 bp, Artificial
  Probe
agtgctacagttgcatagaagtccc

SEQ ID NO: 190320 - DNA, 25 bp, Artificial
  Probe
atgctaactgctcaacagctacctg

SEQ ID NO: 190321 - DNA, 25 bp, Artificial
  Probe
agttgcatagaagtcccacttaatg

SEQ ID NO: 190322 - DNA, 25 bp, Artificial
  Probe
aaagtgctacagttgcatagaagtc

SEQ ID NO: 190323 - DNA, 25 bp, Artificial
  Probe
aatgctaactgctcaacagctacct

SEQ ID NO: 190324 - DNA, 25 bp, Artificial
  Probe
ctctgatggagtgtgtgtttctcag

SEQ ID NO: 190325 - DNA, 25 bp, Artificial
  Probe
ctaaagtgctacagttgcatagaag

SEQ ID NO: 190326 - DNA, 25 bp, Artificial
  Probe
ccaatctgccccaagtttcctcaaa

SEQ ID NO: 190327 - DNA, 25 bp, Artificial
  Probe
aagtgctacagttgcatagaagtcc

SEQ ID NO: 190328 - DNA, 25 bp, Artificial
  Probe
ccaagtttcctcaaagaaccgagat

SEQ ID NO: 190329 - DNA, 25 bp, Artificial
  Probe
cacatggtggccaaaggagcagctg

SEQ ID NO: 190330 - DNA, 25 bp, Artificial
  Probe
gtccttactgtaaaatgcttcttgt

SEQ ID NO: 190331 - DNA, 25 bp, Artificial
  Probe
ttgtcatgcgccacaaaggggccaa

SEQ ID NO: 190332 - DNA, 25 bp, Artificial
  Probe
tgaagcccctggacaaggctgtctt

SEQ ID NO: 190333 - DNA, 25 bp, Artificial
  Probe
catgaccaacctatgaagcccctgg

SEQ ID NO: 190334 - DNA, 25 bp, Artificial
  Probe
ccgactctttgtgaagaaggaaaag

SEQ ID NO: 190335 - DNA, 25 bp, Artificial
  Probe
tggattgagtttgtcatgcgccaca

SEQ ID NO: 190336 - DNA, 25 bp, Artificial
  Probe
agtcagatttgttcaatgcactaaa

SEQ ID NO: 190337 - DNA, 25 bp, Artificial
  Probe
catgcgccacaaaggggccaagcac

SEQ ID NO: 190338 - DNA, 25 bp, Artificial
  Probe
cagatttgttcaatgcactaaagga

SEQ ID NO: 190339 - DNA, 25 bp, Artificial
  Probe
ttgagtttgtcatgcgccacaaagg

SEQ ID NO: 190340 - DNA, 25 bp, Artificial
  Probe
atgcactacaggaatgaaatttcag

SEQ ID NO: 190341 - DNA, 25 bp, Artificial
  Probe
tctctggatgtgattggattcctgc

SEQ ID NO: 190342 - DNA, 25 bp, Artificial
  Probe
atgtgattggattcctgctcacctg

SEQ ID NO: 190343 - DNA, 25 bp, Artificial
  Probe
cactgaatatcaggacaatgtcaaa

SEQ ID NO: 190344 - DNA, 25 bp, Artificial
  Probe
accaacctatgaagcccctggacaa

SEQ ID NO: 190345 - DNA, 25 bp, Artificial
  Probe
tgtggttgtcaaccattcaccatga

SEQ ID NO: 190346 - DNA, 25 bp, Artificial
  Probe
caatgtcaaagtcagatttgttcaa

SEQ ID NO: 190347 - DNA, 25 bp, Artificial
  Probe
aaaggagcagctgttacactgaata

SEQ ID NO: 190348 - DNA, 25 bp, Artificial
  Probe
tgctgtgtggttgtcaaccattcac

SEQ ID NO: 190349 - DNA, 25 bp, Artificial
  Probe
agagctcatttacaatgcactacag

SEQ ID NO: 190350 - DNA, 25 bp, Artificial
  Probe
aaatgctgtgtggttgtcaaccatt

SEQ ID NO: 190351 - DNA, 25 bp, Artificial
  Probe
aaagtcagatttgttcaatgcacta

SEQ ID NO: 190352 - DNA, 25 bp, Artificial
  Probe
ggttgtcaaccattcaccatgacca

SEQ ID NO: 190353 - DNA, 25 bp, Artificial
  Probe
aatatcaggacaatgtcaaagtcag

SEQ ID NO: 190354 - DNA, 25 bp, Artificial
  Probe
agcccctggacaaggctgtcttctg

SEQ ID NO: 190355 - DNA, 25 bp, Artificial
  Probe
gccaagcacctgaggccacttggac

SEQ ID NO: 190356 - DNA, 25 bp, Artificial
  Probe
cacaaaggggccaagcacctgaggc

SEQ ID NO: 190357 - DNA, 25 bp, Artificial
  Probe
atgaccttccctggtaccagtacca

SEQ ID NO: 190358 - DNA, 25 bp, Artificial
  Probe
cacctgttcggcagtcattgcagtc

SEQ ID NO: 190359 - DNA, 25 bp, Artificial
  Probe
ttttgtcaaggcagatcatctttgt

SEQ ID NO: 190360 - DNA, 25 bp, Artificial
  Probe
gtttatttaccgactctttgtgaag

SEQ ID NO: 190361 - DNA, 25 bp, Artificial
  Probe
ataacattgcccacatggtggccaa

SEQ ID NO: 190362 - DNA, 25 bp, Artificial
  Probe
ctatgaagcccctggacaaggctgt

SEQ ID NO: 190363 - DNA, 25 bp, Artificial
  Probe
acatgataacattgcccacatggtg

SEQ ID NO: 190364 - DNA, 25 bp, Artificial
  Probe
ctgctcacctgttcggcagtcattg

SEQ ID NO: 190365 - DNA, 25 bp, Artificial
  Probe
cctggacaaggctgtcttctggatt

SEQ ID NO: 190366 - DNA, 25 bp, Artificial
  Probe
cctggtaccagtaccactctctgga

SEQ ID NO: 190367 - DNA, 25 bp, Artificial
  Probe
tggccaaaggagcagctgttacact

SEQ ID NO: 190368 - DNA, 25 bp, Artificial
  Probe
ggctgtcttctggattgagtttgtc

SEQ ID NO: 190369 - DNA, 25 bp, Artificial
  Probe
gcacctgaggccacttggacatgac

SEQ ID NO: 190370 - DNA, 25 bp, Artificial
  Probe
ttgcccacatggtggccaaaggagc

SEQ ID NO: 190371 - DNA, 25 bp, Artificial
  Probe
agtagagctcatttacaatgcacta

SEQ ID NO: 190372 - DNA, 25 bp, Artificial
  Probe
tggacatgaccttccctggtaccag

SEQ ID NO: 190373 - DNA, 25 bp, Artificial
  Probe
atatcaggacaatgtcaaagtcaga

SEQ ID NO: 190374 - DNA, 25 bp, Artificial
  Probe
caaggctgtcttctggattgagttt

SEQ ID NO: 190375 - DNA, 25 bp, Artificial
  Probe
cccacgacagaaggggagcagaaag

SEQ ID NO: 190376 - DNA, 25 bp, Artificial
  Probe
gctgcacccacgacagaaggggagc

SEQ ID NO: 190377 - DNA, 25 bp, Artificial
  Probe
tggtcccaggctgcacccacgacag

SEQ ID NO: 190378 - DNA, 25 bp, Artificial
  Probe
ccaccatgccaagtggtcccaggct

SEQ ID NO: 190379 - DNA, 25 bp, Artificial
  Probe
agaaagcccatgaagtggtgaagtt

SEQ ID NO: 190380 - DNA, 25 bp, Artificial
  Probe
cacgacagaaggggagcagaaagcc

SEQ ID NO: 190381 - DNA, 25 bp, Artificial
  Probe
cagaaaatcactgtgagccttgttc

SEQ ID NO: 190382 - DNA, 25 bp, Artificial
  Probe
agcagaaagcccatgaagtggtgaa

SEQ ID NO: 190383 - DNA, 25 bp, Artificial
  Probe
ccaggctgcacccacgacagaaggg

SEQ ID NO: 190384 - DNA, 25 bp, Artificial
  Probe
ggctgcacccacgacagaaggggag

SEQ ID NO: 190385 - DNA, 25 bp, Artificial
  Probe
tgcacccacgacagaaggggagcag

SEQ ID NO: 190386 - DNA, 25 bp, Artificial
  Probe
gaaagcccatgaagtggtgaagttc

SEQ ID NO: 190387 - DNA, 25 bp, Artificial
  Probe
accatgccaagtggtcccaggctgc

SEQ ID NO: 190388 - DNA, 25 bp, Artificial
  Probe
aagccagaaaatcactgtgagcctt

SEQ ID NO: 190389 - DNA, 25 bp, Artificial
  Probe
ctttactgctgtacctccaccatgc

SEQ ID NO: 190390 - DNA, 25 bp, Artificial
  Probe
caggctgcacccacgacagaagggg

SEQ ID NO: 190391 - DNA, 25 bp, Artificial
  Probe
ctggaccctggctttactgctgtac

SEQ ID NO: 190392 - DNA, 25 bp, Artificial
  Probe
agcccatgaagtggtgaagttcatg

SEQ ID NO: 190393 - DNA, 25 bp, Artificial
  Probe
agaacaaagccagaaaatcactgtg

SEQ ID NO: 190394 - DNA, 25 bp, Artificial
  Probe
acccacgacagaaggggagcagaaa

SEQ ID NO: 190395 - DNA, 25 bp, Artificial
  Probe
gaccctggctttactgctgtacctc

SEQ ID NO: 190396 - DNA, 25 bp, Artificial
  Probe
tacctccaccatgccaagtggtccc

SEQ ID NO: 190397 - DNA, 25 bp, Artificial
  Probe
cagaaagcccatgaagtggtgaagt

SEQ ID NO: 190398 - DNA, 25 bp, Artificial
  Probe
actgctgtacctccaccatgccaag

SEQ ID NO: 190399 - DNA, 25 bp, Artificial
  Probe
aggctgcacccacgacagaagggga

SEQ ID NO: 190400 - DNA, 25 bp, Artificial
  Probe
aagcccatgaagtggtgaagttcat

SEQ ID NO: 190401 - DNA, 25 bp, Artificial
  Probe
caagtggtcccaggctgcacccacg

SEQ ID NO: 190402 - DNA, 25 bp, Artificial
  Probe
tggaccctggctttactgctgtacc

SEQ ID NO: 190403 - DNA, 25 bp, Artificial
  Probe
atgccaagtggtcccaggctgcacc

SEQ ID NO: 190404 - DNA, 25 bp, Artificial
  Probe
aaagccagaaaatcactgtgagcct

SEQ ID NO: 190405 - DNA, 25 bp, Artificial
  Probe
aacaaagccagaaaatcactgtgag

SEQ ID NO: 190406 - DNA, 25 bp, Artificial
  Probe
caccatgccaagtggtcccaggctg

SEQ ID NO: 190407 - DNA, 25 bp, Artificial
  Probe
ggaccctggctttactgctgtacct

SEQ ID NO: 190408 - DNA, 25 bp, Artificial
  Probe
tttactgctgtacctccaccatgcc

SEQ ID NO: 190409 - DNA, 25 bp, Artificial
  Probe
agccagaaaatcactgtgagccttg

SEQ ID NO: 190410 - DNA, 25 bp, Artificial
  Probe
caaagccagaaaatcactgtgagcc

SEQ ID NO: 190411 - DNA, 25 bp, Artificial
  Probe
cacccacgacagaaggggagcagaa

SEQ ID NO: 190412 - DNA, 25 bp, Artificial
  Probe
gagcagaaagcccatgaagtggtga

SEQ ID NO: 190413 - DNA, 25 bp, Artificial
  Probe
ctgcacccacgacagaaggggagca

SEQ ID NO: 190414 - DNA, 25 bp, Artificial
  Probe
aaagcccatgaagtggtgaagttca

SEQ ID NO: 190415 - DNA, 25 bp, Artificial
  Probe
gccaagtggtcccaggctgcaccca

SEQ ID NO: 190416 - DNA, 25 bp, Artificial
  Probe
ccatgccaagtggtcccaggctgca

SEQ ID NO: 190417 - DNA, 25 bp, Artificial
  Probe
ggagcagaaagcccatgaagtggtg

SEQ ID NO: 190418 - DNA, 25 bp, Artificial
  Probe
catgccaagtggtcccaggctgcac

SEQ ID NO: 190419 - DNA, 25 bp, Artificial
  Probe
gcacccacgacagaaggggagcaga

SEQ ID NO: 190420 - DNA, 25 bp, Artificial
  Probe
gcagaaagcccatgaagtggtgaag

SEQ ID NO: 190421 - DNA, 25 bp, Artificial
  Probe
agacagctacagtgtacttatatat

SEQ ID NO: 190422 - DNA, 25 bp, Artificial
  Probe
agacagctacagtgtacttatataa

SEQ ID NO: 190423 - DNA, 25 bp, Artificial
  Probe
gcttacctaggaagcgcaaggccct

SEQ ID NO: 190424 - DNA, 25 bp, Artificial
  Probe
tgagttcaattccagcaaccacatg

SEQ ID NO: 190425 - DNA, 25 bp, Artificial
  Probe
tggtggctcacaaccatctgtaaag

SEQ ID NO: 190426 - DNA, 25 bp, Artificial
  Probe
gtcctgagttcaattccagcaacca

SEQ ID NO: 190427 - DNA, 25 bp, Artificial
  Probe
gatccgatgccctcttctggtgtgt

SEQ ID NO: 190428 - DNA, 25 bp, Artificial
  Probe
gtctgaagacagctacagtgtactt

SEQ ID NO: 190429 - DNA, 25 bp, Artificial
  Probe
tgtatctgaagacagctacagtgta

SEQ ID NO: 190430 - DNA, 25 bp, Artificial
  Probe
gtggtagagcgcttacctaggaagc

SEQ ID NO: 190431 - DNA, 25 bp, Artificial
  Probe
gaagacagctacagtgtacttatat

SEQ ID NO: 190432 - DNA, 25 bp, Artificial
  Probe
ggtcatgagttcaattccagcaacc

SEQ ID NO: 190433 - DNA, 25 bp, Artificial
  Probe
tggctcacaaccatctgtaaagaga

SEQ ID NO: 190434 - DNA, 25 bp, Artificial
  Probe
tcacaaccatctgtaaagagatccg

SEQ ID NO: 190435 - DNA, 25 bp, Artificial
  Probe
agcacccgactgctcttccaaaggt

SEQ ID NO: 190436 - DNA, 25 bp, Artificial
  Probe
catggtggctcacaaccatctgtaa

SEQ ID NO: 190437 - DNA, 25 bp, Artificial
  Probe
ccatctgtaaagagatctgatgccc

SEQ ID NO: 190438 - DNA, 25 bp, Artificial
  Probe
ttctggtgtgtctgaagacagctac

SEQ ID NO: 190439 - DNA, 25 bp, Artificial
  Probe
taaagagatctgatgccctcttctg

SEQ ID NO: 190440 - DNA, 25 bp, Artificial
  Probe
atctgtaaagagatccgatgccctc

SEQ ID NO: 190441 - DNA, 25 bp, Artificial
  Probe
atggtggctcacaaccatctgtaaa

SEQ ID NO: 190442 - DNA, 25 bp, Artificial
  Probe
tcaattccagcaaccacatggtggc

SEQ ID NO: 190443 - DNA, 25 bp, Artificial
  Probe
gctcagtggtagagcgcttacctag

SEQ ID NO: 190444 - DNA, 25 bp, Artificial
  Probe
gtggttaagagcacccgactgctct

SEQ ID NO: 190445 - DNA, 25 bp, Artificial
  Probe
taaagagatccgatgccctcttctg

SEQ ID NO: 190446 - DNA, 25 bp, Artificial
  Probe
ttccagaggtcatgagttcaattcc

SEQ ID NO: 190447 - DNA, 25 bp, Artificial
  Probe
tctggtgtatctgaagacagctaca

SEQ ID NO: 190448 - DNA, 25 bp, Artificial
  Probe
cctaggaagcgcaaggccctgggtt

SEQ ID NO: 190449 - DNA, 25 bp, Artificial
  Probe
gtcatgagttcaattccagcaacca

SEQ ID NO: 190450 - DNA, 25 bp, Artificial
  Probe
gcaaccacatggtggctcacaacca

SEQ ID NO: 190451 - DNA, 25 bp, Artificial
  Probe
atctgaagacagctacagtgtactt

SEQ ID NO: 190452 - DNA, 25 bp, Artificial
  Probe
ttccagcaaccacatggtggctcac

SEQ ID NO: 190453 - DNA, 25 bp, Artificial
  Probe
agcaaccacatggtggctcacaacc

SEQ ID NO: 190454 - DNA, 25 bp, Artificial
  Probe
tcagcggttaagagcgcccgactgc

SEQ ID NO: 190455 - DNA, 25 bp, Artificial
  Probe
ggatttagctcagtggtagagcgct

SEQ ID NO: 190456 - DNA, 25 bp, Artificial
  Probe
tggctcagcggttaagagcgcccga

SEQ ID NO: 190457 - DNA, 25 bp, Artificial
  Probe
tccagcaaccacatggtggctcaca

SEQ ID NO: 190458 - DNA, 25 bp, Artificial
  Probe
gtgtctgaagacagctacagtgtac

SEQ ID NO: 190459 - DNA, 25 bp, Artificial
  Probe
gcccgactgctcttccagaggtcat

SEQ ID NO: 190460 - DNA, 25 bp, Artificial
  Probe
aagagcacccgactgctcttccaaa

SEQ ID NO: 190461 - DNA, 25 bp, Artificial
  Probe
aagagcgcccgactgctcttccaga

SEQ ID NO: 190462 - DNA, 25 bp, Artificial
  Probe
agttcaattccagcaaccacatggt

SEQ ID NO: 190463 - DNA, 25 bp, Artificial
  Probe
gatctgatgccctcttctggtgtat

SEQ ID NO: 190464 - DNA, 25 bp, Artificial
  Probe
gagttcaattccagcaaccacatgg

SEQ ID NO: 190465 - DNA, 25 bp, Artificial
  Probe
ccgactgctcttccaaaggtcctga

SEQ ID NO: 190466 - DNA, 25 bp, Artificial
  Probe
gtggctcacaaccatctgtaaagag

SEQ ID NO: 190467 - DNA, 25 bp, Artificial
  Probe
tgtatgactttgtatcgattccaga

SEQ ID NO: 190468 - DNA, 25 bp, Artificial
  Probe
cgattccagactgctgactttgata

SEQ ID NO: 190469 - DNA, 25 bp, Artificial
  Probe
tatgactttgtatcgattccagact

SEQ ID NO: 190470 - DNA, 25 bp, Artificial
  Probe
tctctgtctcctgcaggtgccacct

SEQ ID NO: 190471 - DNA, 25 bp, Artificial
  Probe
gttggggaggtctggggtcagagag

SEQ ID NO: 190472 - DNA, 25 bp, Artificial
  Probe
tgtctcctgcaggtgccacctgtga

SEQ ID NO: 190473 - DNA, 25 bp, Artificial
  Probe
agactgctgactttgataaggggtt

SEQ ID NO: 190474 - DNA, 25 bp, Artificial
  Probe
tatcgattccagactgctgactttg

SEQ ID NO: 190475 - DNA, 25 bp, Artificial
  Probe
tgctgactttgataaggggttgggg

SEQ ID NO: 190476 - DNA, 25 bp, Artificial
  Probe
tgtatcgattccagactgctgactt

SEQ ID NO: 190477 - DNA, 25 bp, Artificial
  Probe
ctgctgactttgataaggggttggg

SEQ ID NO: 190478 - DNA, 25 bp, Artificial
  Probe
tgactttgtatcgattccagactgc

SEQ ID NO: 190479 - DNA, 25 bp, Artificial
  Probe
gtctcctgcaggtgccacctgtgag

SEQ ID NO: 190480 - DNA, 25 bp, Artificial
  Probe
gtgtatgactttgtatcgattccag

SEQ ID NO: 190481 - DNA, 25 bp, Artificial
  Probe
gattccagactgctgactttgataa

SEQ ID NO: 190482 - DNA, 25 bp, Artificial
  Probe
gaggtctggggtcagagagaattgc

SEQ ID NO: 190483 - DNA, 25 bp, Artificial
  Probe
ccagactgctgactttgataagggg

SEQ ID NO: 190484 - DNA, 25 bp, Artificial
  Probe
tcgattccagactgctgactttgat

SEQ ID NO: 190485 - DNA, 25 bp, Artificial
  Probe
atgactttgtatcgattccagactg

SEQ ID NO: 190486 - DNA, 25 bp, Artificial
  Probe
tttgtatcgattccagactgctgac

SEQ ID NO: 190487 - DNA, 25 bp, Artificial
  Probe
ctgactttgataaggggttggggag

SEQ ID NO: 190488 - DNA, 25 bp, Artificial
  Probe
tttgataaggggttggggaggtctg

SEQ ID NO: 190489 - DNA, 25 bp, Artificial
  Probe
ttgataaggggttggggaggtctgg

SEQ ID NO: 190490 - DNA, 25 bp, Artificial
  Probe
tctgtctcctgcaggtgccacctgt

SEQ ID NO: 190491 - DNA, 25 bp, Artificial
  Probe
acccttctctgtctcctgcaggtgc

SEQ ID NO: 190492 - DNA, 25 bp, Artificial
  Probe
tccagactgctgactttgataaggg

SEQ ID NO: 190493 - DNA, 25 bp, Artificial
  Probe
gactttgtatcgattccagactgct

SEQ ID NO: 190494 - DNA, 25 bp, Artificial
  Probe
tctcctgcaggtgccacctgtgagg

SEQ ID NO: 190495 - DNA, 25 bp, Artificial
  Probe
ctctgtctcctgcaggtgccacctg

SEQ ID NO: 190496 - DNA, 25 bp, Artificial
  Probe
gggaggtctggggtcagagagaatt

SEQ ID NO: 190497 - DNA, 25 bp, Artificial
  Probe
tgactttgataaggggttggggagg

SEQ ID NO: 190498 - DNA, 25 bp, Artificial
  Probe
atcgattccagactgctgactttga

SEQ ID NO: 190499 - DNA, 25 bp, Artificial
  Probe
aacccttctctgtctcctgcaggtg

SEQ ID NO: 190500 - DNA, 25 bp, Artificial
  Probe
actttgtatcgattccagactgctg

SEQ ID NO: 190501 - DNA, 25 bp, Artificial
  Probe
ctgtctcctgcaggtgccacctgtg

SEQ ID NO: 190502 - DNA, 25 bp, Artificial
  Probe
ctttgtatcgattccagactgctga

SEQ ID NO: 190503 - DNA, 25 bp, Artificial
  Probe
ttgtatcgattccagactgctgact

SEQ ID NO: 190504 - DNA, 25 bp, Artificial
  Probe
cagactgctgactttgataaggggt

SEQ ID NO: 190505 - DNA, 25 bp, Artificial
  Probe
ttccagactgctgactttgataagg

SEQ ID NO: 190506 - DNA, 25 bp, Artificial
  Probe
tgataaggggttggggaggtctggg

SEQ ID NO: 190507 - DNA, 25 bp, Artificial
  Probe
gtatgactttgtatcgattccagac

SEQ ID NO: 190508 - DNA, 25 bp, Artificial
  Probe
ccttctctgtctcctgcaggtgcca

SEQ ID NO: 190509 - DNA, 25 bp, Artificial
  Probe
gggttggggaggtctggggtcagag

SEQ ID NO: 190510 - DNA, 25 bp, Artificial
  Probe
attccagactgctgactttgataag

SEQ ID NO: 190511 - DNA, 25 bp, Artificial
  Probe
tgtgtatgactttgtatcgattcca

SEQ ID NO: 190512 - DNA, 25 bp, Artificial
  Probe
gtatcgattccagactgctgacttt

SEQ ID NO: 190513 - DNA, 25 bp, Artificial
  Probe
cagattccacaaaaggttctttgga

SEQ ID NO: 190514 - DNA, 25 bp, Artificial
  Probe
ttagctgagacaatgggcaaagcag

SEQ ID NO: 190515 - DNA, 25 bp, Artificial
  Probe
ggactccaatgcaaacctgctaaac

SEQ ID NO: 190516 - DNA, 25 bp, Artificial
  Probe
gaatgacctccttggtcatccaaaa

SEQ ID NO: 190517 - DNA, 25 bp, Artificial
  Probe
caaatgacattcatagacagggtta

SEQ ID NO: 190518 - DNA, 25 bp, Artificial
  Probe
atgagtagagctcgttgacaatgca

SEQ ID NO: 190519 - DNA, 25 bp, Artificial
  Probe
ctctccaggccataaaattgaaaag

SEQ ID NO: 190520 - DNA, 25 bp, Artificial
  Probe
gctgtaaaatgcttcttgttcattt

SEQ ID NO: 190521 - DNA, 25 bp, Artificial
  Probe
gatcctactgggatttggagtttcc

SEQ ID NO: 190522 - DNA, 25 bp, Artificial
  Probe
cattaccaaatgttgactacattgg

SEQ ID NO: 190523 - DNA, 25 bp, Artificial
  Probe
catgaccaacctatgaaacccctgg

SEQ ID NO: 190524 - DNA, 25 bp, Artificial
  Probe
ctccaggccataaaattgaaaagtc

SEQ ID NO: 190525 - DNA, 25 bp, Artificial
  Probe
tgctatgtggctgtcaaccattcac

SEQ ID NO: 190526 - DNA, 25 bp, Artificial
  Probe
ttaatgccaagaattgggatccatt

SEQ ID NO: 190527 - DNA, 25 bp, Artificial
  Probe
agtcagatttgttcaatgcacttaa

SEQ ID NO: 190528 - DNA, 25 bp, Artificial
  Probe
cctgctaaacccttgcccaaggata

SEQ ID NO: 190529 - DNA, 25 bp, Artificial
  Probe
aaaggccaacgcaattgcatgggcc

SEQ ID NO: 190530 - DNA, 25 bp, Artificial
  Probe
caatgcactacaggaatgaaattta

SEQ ID NO: 190531 - DNA, 25 bp, Artificial
  Probe
agctgatagccgaagtgctccacat

SEQ ID NO: 190532 - DNA, 25 bp, Artificial
  Probe
cagatttgttcaatgcacttaagga

SEQ ID NO: 190533 - DNA, 25 bp, Artificial
  Probe
gtcagcagcatgacagaagaaaagg

SEQ ID NO: 190534 - DNA, 25 bp, Artificial
  Probe
gtcaggattgggtggccaaatgaca

SEQ ID NO: 190535 - DNA, 25 bp, Artificial
  Probe
ggtcatccaaaaaccaaagcctttg

SEQ ID NO: 190536 - DNA, 25 bp, Artificial
  Probe
gaagtgctccacattccttttctgt

SEQ ID NO: 190537 - DNA, 25 bp, Artificial
  Probe
ttcctatgtttggagaacaacatga

SEQ ID NO: 190538 - DNA, 25 bp, Artificial
  Probe
cgattctttgcaaagaagcaaaaga

SEQ ID NO: 190539 - DNA, 25 bp, Artificial
  Probe
acttttggttccatatgtttaatgc

SEQ ID NO: 190540 - DNA, 25 bp, Artificial
  Probe
tgtcagatcctgtggctgcctgtgg

SEQ ID NO: 190541 - DNA, 25 bp, Artificial
  Probe
caatgtcaaagtcagatttgttcaa

SEQ ID NO: 190542 - DNA, 25 bp, Artificial
  Probe
atttgatggcaaaatcccagcaact

SEQ ID NO: 190543 - DNA, 25 bp, Artificial
  Probe
cagaaatgtggctcattagatccta

SEQ ID NO: 190544 - DNA, 25 bp, Artificial
  Probe
atactgagattttgggaaggcccac

SEQ ID NO: 190545 - DNA, 25 bp, Artificial
  Probe
gttcatttaccgattctttgcaaag

SEQ ID NO: 190546 - DNA, 25 bp, Artificial
  Probe
tccagagctctggagagcatggtgt

SEQ ID NO: 190547 - DNA, 25 bp, Artificial
  Probe
tcttatgtgcctgtaattttgtcag

SEQ ID NO: 190548 - DNA, 25 bp, Artificial
  Probe
caccaccttagctgagacaatgggc

SEQ ID NO: 190549 - DNA, 25 bp, Artificial
  Probe
gtggccaaatgacattcatagacag

SEQ ID NO: 190550 - DNA, 25 bp, Artificial
  Probe
ttatactgagattttgggaaggccc

SEQ ID NO: 190551 - DNA, 25 bp, Artificial
  Probe
aggcagatcatcattgtaagaagac

SEQ ID NO: 190552 - DNA, 25 bp, Artificial
  Probe
gtacagtcttcgtgcctctccaggc

SEQ ID NO: 190553 - DNA, 25 bp, Artificial
  Probe
ttttctctggggtcaatggtcagca

SEQ ID NO: 190554 - DNA, 25 bp, Artificial
  Probe
attccttttctgtacagtcttcgtg

SEQ ID NO: 190555 - DNA, 25 bp, Artificial
  Probe
cctggtaccagtaccactctctgga

SEQ ID NO: 190556 - DNA, 25 bp, Artificial
  Probe
tggctgtcaaccattcaccatgacc

SEQ ID NO: 190557 - DNA, 25 bp, Artificial
  Probe
caacatgataacattgcccacatgg

SEQ ID NO: 190558 - DNA, 25 bp, Artificial
  Probe
tggacataaccttccctggtaccag

SEQ ID NO: 190559 - DNA, 25 bp, Artificial
  Probe
taggacagctccagaggtctgctgc

SEQ ID NO: 190560 - DNA, 25 bp, Artificial
  Probe
tcctctgctgagtgtcccgtcatct

SEQ ID NO: 190561 - DNA, 25 bp, Artificial
  Probe
gtgtttgacccctctagattctcac

SEQ ID NO: 190562 - DNA, 25 bp, Artificial
  Probe
gtctgctgcctgcaatacctgcatt

SEQ ID NO: 190563 - DNA, 25 bp, Artificial
  Probe
acctctgtcacatgggaccacctgg

SEQ ID NO: 190564 - DNA, 25 bp, Artificial
  Probe
tgattcccatcctctgctgagtgtc

SEQ ID NO: 190565 - DNA, 25 bp, Artificial
  Probe
aggtctgctgcctgcaatacctgca

SEQ ID NO: 190566 - DNA, 25 bp, Artificial
  Probe
tcccggtccctatggcaagacttgt

SEQ ID NO: 190567 - DNA, 25 bp, Artificial
  Probe
gccatgcttatctgccattctcagg

SEQ ID NO: 190568 - DNA, 25 bp, Artificial
  Probe
cctgccagattgctcatgagcacac

SEQ ID NO: 190569 - DNA, 25 bp, Artificial
  Probe
ctgagtgtcccgtcatctcattttt

SEQ ID NO: 190570 - DNA, 25 bp, Artificial
  Probe
cttcagaaggccaggaagaagaggc

SEQ ID NO: 190571 - DNA, 25 bp, Artificial
  Probe
ctctgctgagtgtcccgtcatctca

SEQ ID NO: 190572 - DNA, 25 bp, Artificial
  Probe
catcctctgctgagtgtcccgtcat

SEQ ID NO: 190573 - DNA, 25 bp, Artificial
  Probe
agtcgagagctcagctcccctgtca

SEQ ID NO: 190574 - DNA, 25 bp, Artificial
  Probe
acctgcatttgttactggctaattt

SEQ ID NO: 190575 - DNA, 25 bp, Artificial
  Probe
gcttatctgccattctcaggaggag

SEQ ID NO: 190576 - DNA, 25 bp, Artificial
  Probe
tgcttatctgccattctcaggagga

SEQ ID NO: 190577 - DNA, 25 bp, Artificial
  Probe
gtgatggaacctctgtcacatggga

SEQ ID NO: 190578 - DNA, 25 bp, Artificial
  Probe
ggtccctatggcaagacttgtgttg

SEQ ID NO: 190579 - DNA, 25 bp, Artificial
  Probe
gccatagccatgcttatctgccatt

SEQ ID NO: 190580 - DNA, 25 bp, Artificial
  Probe
gatggccgtttgtcccgccgggcct

SEQ ID NO: 190581 - DNA, 25 bp, Artificial
  Probe
gattgctcatgagcacacagatgga

SEQ ID NO: 190582 - DNA, 25 bp, Artificial
  Probe
agccatgcttatctgccattctcag

SEQ ID NO: 190583 - DNA, 25 bp, Artificial
  Probe
gatcccggtccctatggcaagactt

SEQ ID NO: 190584 - DNA, 25 bp, Artificial
  Probe
tctttgattcccatcctctgctgag

SEQ ID NO: 190585 - DNA, 25 bp, Artificial
  Probe
ctgcatttgttactggctaatttat

SEQ ID NO: 190586 - DNA, 25 bp, Artificial
  Probe
ccagaggtctgctgcctgcaatacc

SEQ ID NO: 190587 - DNA, 25 bp, Artificial
  Probe
ctacccaccagtaccttctgtgagt

SEQ ID NO: 190588 - DNA, 25 bp, Artificial
  Probe
gacagctccagaggtctgctgcctg

SEQ ID NO: 190589 - DNA, 25 bp, Artificial
  Probe
gccgggcctgccagattgctcatga

SEQ ID NO: 190590 - DNA, 25 bp, Artificial
  Probe
ctgcgtctcaagaagctaagataaa

SEQ ID NO: 190591 - DNA, 25 bp, Artificial
  Probe
ccagattgctcatgagcacacagat

SEQ ID NO: 190592 - DNA, 25 bp, Artificial
  Probe
cgtctcaagaagctaagataaatct

SEQ ID NO: 190593 - DNA, 25 bp, Artificial
  Probe
ccaggatcccggtccctatggcaag

SEQ ID NO: 190594 - DNA, 25 bp, Artificial
  Probe
ttcagaaggccaggaagaagaggca

SEQ ID NO: 190595 - DNA, 25 bp, Artificial
  Probe
gcctgcaatacctgcatttgttact

SEQ ID NO: 190596 - DNA, 25 bp, Artificial
  Probe
ttctgggtgatggaacctctgtcac

SEQ ID NO: 190597 - DNA, 25 bp, Artificial
  Probe
gagataggacagctccagaggtctg

SEQ ID NO: 190598 - DNA, 25 bp, Artificial
  Probe
tgcagagcattctgggtgatggaac

SEQ ID NO: 190599 - DNA, 25 bp, Artificial
  Probe
gagcattctgggtgatggaacctct

SEQ ID NO: 190600 - DNA, 25 bp, Artificial
  Probe
ctgcctgcaatacctgcatttgtta

SEQ ID NO: 190601 - DNA, 25 bp, Artificial
  Probe
tcgccatagccatgcttatctgcca

SEQ ID NO: 190602 - DNA, 25 bp, Artificial
  Probe
tccacctgcgtctcaagaagctaag

SEQ ID NO: 190603 - DNA, 25 bp, Artificial
  Probe
cacctgcgtctcaagaagctaagat

SEQ ID NO: 190604 - DNA, 25 bp, Artificial
  Probe
gtccctatggcaagacttgtgttga

SEQ ID NO: 190605 - DNA, 25 bp, Artificial
  Probe
ttccgggaagatctacaggaagcat

SEQ ID NO: 190606 - DNA, 25 bp, Artificial
  Probe
atctggagagcgatgaccgagatca

SEQ ID NO: 190607 - DNA, 25 bp, Artificial
  Probe
caagtacctcttgttcaccatggtg

SEQ ID NO: 190608 - DNA, 25 bp, Artificial
  Probe
ttcatcgcccagcatctggagagcg

SEQ ID NO: 190609 - DNA, 25 bp, Artificial
  Probe
gagcgatgaccgagatcaaagtgta

SEQ ID NO: 190610 - DNA, 25 bp, Artificial
  Probe
aagtctgcagtcagctcccacacag

SEQ ID NO: 190611 - DNA, 25 bp, Artificial
  Probe
atccaacctctatgggagttccatg

SEQ ID NO: 190612 - DNA, 25 bp, Artificial
  Probe
aacctctatgggagttccatgtact

SEQ ID NO: 190613 - DNA, 25 bp, Artificial
  Probe
ttgacataccgctcattggcaagta

SEQ ID NO: 190614 - DNA, 25 bp, Artificial
  Probe
agccagctgcacttggccacagctg

SEQ ID NO: 190615 - DNA, 25 bp, Artificial
  Probe
ttgaagtcagcctggtcagggtccc

SEQ ID NO: 190616 - DNA, 25 bp, Artificial
  Probe
gaagcgtcccggtcttgaagtcagc

SEQ ID NO: 190617 - DNA, 25 bp, Artificial
  Probe
ctgcatctctgtgctgctggcactc

SEQ ID NO: 190618 - DNA, 25 bp, Artificial
  Probe
ccttttccatcgtcaccactgtgtg

SEQ ID NO: 190619 - DNA, 25 bp, Artificial
  Probe
atgcccgtctgaggtcctccgggag

SEQ ID NO: 190620 - DNA, 25 bp, Artificial
  Probe
gcactcacaccatggcatcctgggt

SEQ ID NO: 190621 - DNA, 25 bp, Artificial
  Probe
tgccgctcctaagtctgcagtcagc

SEQ ID NO: 190622 - DNA, 25 bp, Artificial
  Probe
tggcatcctgggtcaaggagtgctt

SEQ ID NO: 190623 - DNA, 25 bp, Artificial
  Probe
tgtactttgtgaaccctgtccctgc

SEQ ID NO: 190624 - DNA, 25 bp, Artificial
  Probe
gatactgcagccacctctgccttag

SEQ ID NO: 190625 - DNA, 25 bp, Artificial
  Probe
cagcatctggagagcgatgaccgag

SEQ ID NO: 190626 - DNA, 25 bp, Artificial
  Probe
gggtcaaggagtgcttcctgcacaa

SEQ ID NO: 190627 - DNA, 25 bp, Artificial
  Probe
tgacataccgctcattggcaagtac

SEQ ID NO: 190628 - DNA, 25 bp, Artificial
  Probe
tctctgtgctgctggcactcacgtt

SEQ ID NO: 190629 - DNA, 25 bp, Artificial
  Probe
tgtgtgtgtcctcaatgtgcaccac

SEQ ID NO: 190630 - DNA, 25 bp, Artificial
  Probe
acagctgatactgcagccacctctg

SEQ ID NO: 190631 - DNA, 25 bp, Artificial
  Probe
taagtctgcagtcagctcccacaca

SEQ ID NO: 190632 - DNA, 25 bp, Artificial
  Probe
aggttccgggaagatctacaggaag

SEQ ID NO: 190633 - DNA, 25 bp, Artificial
  Probe
gctctgcatctctgtgctgctggca

SEQ ID NO: 190634 - DNA, 25 bp, Artificial
  Probe
tctacaggaagcattagagggtgtc

SEQ ID NO: 190635 - DNA, 25 bp, Artificial
  Probe
agcattagagggtgtcagcttcatc

SEQ ID NO: 190636 - DNA, 25 bp, Artificial
  Probe
cttcatgaagcgtcccggtcttgaa

SEQ ID NO: 190637 - DNA, 25 bp, Artificial
  Probe
cagggatgcccgtctgaggtcctcc

SEQ ID NO: 190638 - DNA, 25 bp, Artificial
  Probe
gtgtcagcttcatcgcccagcatct

SEQ ID NO: 190639 - DNA, 25 bp, Artificial
  Probe
gccgctcctaagtctgcagtcagct

SEQ ID NO: 190640 - DNA, 25 bp, Artificial
  Probe
tgtgctgctggcactcacgttcttc

SEQ ID NO: 190641 - DNA, 25 bp, Artificial
  Probe
tggccacagctgatactgcagccac

SEQ ID NO: 190642 - DNA, 25 bp, Artificial
  Probe
tgctggtcaccttttccatcgtcac

SEQ ID NO: 190643 - DNA, 25 bp, Artificial
  Probe
gcccatccaacctctatgggagttc

SEQ ID NO: 190644 - DNA, 25 bp, Artificial
  Probe
gtcagcctggtcagggtccctcatc

SEQ ID NO: 190645 - DNA, 25 bp, Artificial
  Probe
ctacaggaagcattagagggtgtca

SEQ ID NO: 190646 - DNA, 25 bp, Artificial
  Probe
ctgcacttggccacagctgatactg

SEQ ID NO: 190647 - DNA, 25 bp, Artificial
  Probe
tctggagagcgatgaccgagatcaa

SEQ ID NO: 190648 - DNA, 25 bp, Artificial
  Probe
agggatgcccgtctgaggtcctccg

SEQ ID NO: 190649 - DNA, 25 bp, Artificial
  Probe
cggtcttgaagtcagcctggtcagg

SEQ ID NO: 190650 - DNA, 25 bp, Artificial
  Probe
ggagtgcttcctgcacaaactgccc

SEQ ID NO: 190651 - DNA, 25 bp, Artificial
  Probe
acatcggaagaatgcacaggctcga

SEQ ID NO: 190652 - DNA, 25 bp, Artificial
  Probe
atgatgaaagttgtcctggttacac

SEQ ID NO: 190653 - DNA, 25 bp, Artificial
  Probe
gagtatttccccaagcccaatgaat

SEQ ID NO: 190654 - DNA, 25 bp, Artificial
  Probe
actgaaggaaatccacactgttgtt

SEQ ID NO: 190655 - DNA, 25 bp, Artificial
  Probe
gcggtatcagcctgtcgtggacttg

SEQ ID NO: 190656 - DNA, 25 bp, Artificial
  Probe
catctcattgtgaatgcacgtgtat

SEQ ID NO: 190657 - DNA, 25 bp, Artificial
  Probe
gaacgttccctacaggtattttcag

SEQ ID NO: 190658 - DNA, 25 bp, Artificial
  Probe
atcattctgaacatcggaagaatgc

SEQ ID NO: 190659 - DNA, 25 bp, Artificial
  Probe
cagccatttggctttgggccccgca

SEQ ID NO: 190660 - DNA, 25 bp, Artificial
  Probe
ggctcgagtatttccccaagcccaa

SEQ ID NO: 190661 - DNA, 25 bp, Artificial
  Probe
cactgttgttggtgacagagacata

SEQ ID NO: 190662 - DNA, 25 bp, Artificial
  Probe
aacagctatactgaaggaaatccac

SEQ ID NO: 190663 - DNA, 25 bp, Artificial
  Probe
atgacgtgattgacggctacccggt

SEQ ID NO: 190664 - DNA, 25 bp, Artificial
  Probe
ggacagccccattgtggaaataatt

SEQ ID NO: 190665 - DNA, 25 bp, Artificial
  Probe
tttgcaatgcctgtacatctcattg

SEQ ID NO: 190666 - DNA, 25 bp, Artificial
  Probe
ttcattaacgagagcctgcggtatc

SEQ ID NO: 190667 - DNA, 25 bp, Artificial
  Probe
gcctgcggtatcagcctgtcgtgga

SEQ ID NO: 190668 - DNA, 25 bp, Artificial
  Probe
cagagccctggaggatgacgtgatt

SEQ ID NO: 190669 - DNA, 25 bp, Artificial
  Probe
agccctggaggatgacgtgattgac

SEQ ID NO: 190670 - DNA, 25 bp, Artificial
  Probe
ttaacgagagcctgcggtatcagcc

SEQ ID NO: 190671 - DNA, 25 bp, Artificial
  Probe
gaggacagccccattgtggaaataa

SEQ ID NO: 190672 - DNA, 25 bp, Artificial
  Probe
tttgagaagaacgttccctacaggt

SEQ ID NO: 190673 - DNA, 25 bp, Artificial
  Probe
ataatgacttgtccttgcatctaga

SEQ ID NO: 190674 - DNA, 25 bp, Artificial
  Probe
ttccatgtgaagacattgcaaaaaa

SEQ ID NO: 190675 - DNA, 25 bp, Artificial
  Probe
catcgccatggtgatgatgaaagtt

SEQ ID NO: 190676 - DNA, 25 bp, Artificial
  Probe
gccatttggctttgggccccgcagc

SEQ ID NO: 190677 - DNA, 25 bp, Artificial
  Probe
tctcatcgcagagtatccggaggtg

SEQ ID NO: 190678 - DNA, 25 bp, Artificial
  Probe
acttgtccttgcatctagatgagga

SEQ ID NO: 190679 - DNA, 25 bp, Artificial
  Probe
gccccgcagctgtgctgggaagtac

SEQ ID NO: 190680 - DNA, 25 bp, Artificial
  Probe
tccttgcatctagatgaggacagcc

SEQ ID NO: 190681 - DNA, 25 bp, Artificial
  Probe
gtattttcagccatttggctttggg

SEQ ID NO: 190682 - DNA, 25 bp, Artificial
  Probe
gatgacgtgattgacggctacccgg

SEQ ID NO: 190683 - DNA, 25 bp, Artificial
  Probe
ggaaacagctatactgaaggaaatc

SEQ ID NO: 190684 - DNA, 25 bp, Artificial
  Probe
ctagatgaggacagccccattgtgg

SEQ ID NO: 190685 - DNA, 25 bp, Artificial
  Probe
gaaagttgtcctggttacacttttg

SEQ ID NO: 190686 - DNA, 25 bp, Artificial
  Probe
acaggtattttcagccatttggctt

SEQ ID NO: 190687 - DNA, 25 bp, Artificial
  Probe
tggaaaacttcattaacgagagcct

SEQ ID NO: 190688 - DNA, 25 bp, Artificial
  Probe
tgttgcttctcatcgcagagtatcc

SEQ ID NO: 190689 - DNA, 25 bp, Artificial
  Probe
agggaactaacatcattctgaacat

SEQ ID NO: 190690 - DNA, 25 bp, Artificial
  Probe
gagagcctgcggtatcagcctgtcg

SEQ ID NO: 190691 - DNA, 25 bp, Artificial
  Probe
gaatgcacaggctcgagtatttccc

SEQ ID NO: 190692 - DNA, 25 bp, Artificial
  Probe
tggacttggtcatgcgcagagccct

SEQ ID NO: 190693 - DNA, 25 bp, Artificial
  Probe
aagtacatcgccatggtgatgatga

SEQ ID NO: 190694 - DNA, 25 bp, Artificial
  Probe
tgagaagaacgttccctacaggtat

SEQ ID NO: 190695 - DNA, 25 bp, Artificial
  Probe
ttgtcctggttacacttttgaaacg

SEQ ID NO: 190696 - DNA, 25 bp, Artificial
  Probe
cccgcagctgtgctgggaagtacat

SEQ ID NO: 190697 - DNA, 25 bp, Artificial
  Probe
gtccgcgagcagtgagcggtaaaat

SEQ ID NO: 190698 - DNA, 25 bp, Artificial
  Probe
gtacttctctggtcttcagtcattg

SEQ ID NO: 190699 - DNA, 25 bp, Artificial
  Probe
ctctggtcttcagtcattgtatgat

SEQ ID NO: 190700 - DNA, 25 bp, Artificial
  Probe
attctgtggcttatgaaagaagcgc

SEQ ID NO: 190701 - DNA, 25 bp, Artificial
  Probe
tcaatgtacttctctggtcttcagt

SEQ ID NO: 190702 - DNA, 25 bp, Artificial
  Probe
gtttcaatgtacttctctggtcttc

SEQ ID NO: 190703 - DNA, 25 bp, Artificial
  Probe
gactctatttgtatcctagcagcat

SEQ ID NO: 190704 - DNA, 25 bp, Artificial
  Probe
tgactctatttgtatcctagcagca

SEQ ID NO: 190705 - DNA, 25 bp, Artificial
  Probe
gcattgtaattctaatgtggtgacc

SEQ ID NO: 190706 - DNA, 25 bp, Artificial
  Probe
ttctctggtcttcagtcattgtatg

SEQ ID NO: 190707 - DNA, 25 bp, Artificial
  Probe
catctccatctgtgtccgcgagcag

SEQ ID NO: 190708 - DNA, 25 bp, Artificial
  Probe
aatgtggtgacctcctcagacagaa

SEQ ID NO: 190709 - DNA, 25 bp, Artificial
  Probe
ttctaatgtggtgacctcctcagac

SEQ ID NO: 190710 - DNA, 25 bp, Artificial
  Probe
atctccatctgtgtccgcgagcagt

SEQ ID NO: 190711 - DNA, 25 bp, Artificial
  Probe
tctgactctatttgtatcctagcag

SEQ ID NO: 190712 - DNA, 25 bp, Artificial
  Probe
caatgtacttctctggtcttcagtc

SEQ ID NO: 190713 - DNA, 25 bp, Artificial
  Probe
aattctaatgtggtgacctcctcag

SEQ ID NO: 190714 - DNA, 25 bp, Artificial
  Probe
attgtaattctaatgtggtgacctc

SEQ ID NO: 190715 - DNA, 25 bp, Artificial
  Probe
tctggtcttcagtcattgtatgatg

SEQ ID NO: 190716 - DNA, 25 bp, Artificial
  Probe
tggtgacctcctcagacagaagtag

SEQ ID NO: 190717 - DNA, 25 bp, Artificial
  Probe
aaagtttcaatgtacttctctggtc

SEQ ID NO: 190718 - DNA, 25 bp, Artificial
  Probe
tctaatgtggtgacctcctcagaca

SEQ ID NO: 190719 - DNA, 25 bp, Artificial
  Probe
ttcaatgtacttctctggtcttcag

SEQ ID NO: 190720 - DNA, 25 bp, Artificial
  Probe
ctggtcttcagtcattgtatgatgt

SEQ ID NO: 190721 - DNA, 25 bp, Artificial
  Probe
aagtttcaatgtacttctctggtct

SEQ ID NO: 190722 - DNA, 25 bp, Artificial
  Probe
tctccatctgtgtccgcgagcagtg

SEQ ID NO: 190723 - DNA, 25 bp, Artificial
  Probe
agtttcaatgtacttctctggtctt

SEQ ID NO: 190724 - DNA, 25 bp, Artificial
  Probe
tgtccgcgagcagtgagcggtaaaa

SEQ ID NO: 190725 - DNA, 25 bp, Artificial
  Probe
tcatctccatctgtgtccgcgagca

SEQ ID NO: 190726 - DNA, 25 bp, Artificial
  Probe
ctaatgtggtgacctcctcagacag

SEQ ID NO: 190727 - DNA, 25 bp, Artificial
  Probe
tccgcgagcagtgagcggtaaaata

SEQ ID NO: 190728 - DNA, 25 bp, Artificial
  Probe
actctatttgtatcctagcagcatg

SEQ ID NO: 190729 - DNA, 25 bp, Artificial
  Probe
ttcatctccatctgtgtccgcgagc

SEQ ID NO: 190730 - DNA, 25 bp, Artificial
  Probe
gtggtgacctcctcagacagaagta

SEQ ID NO: 190731 - DNA, 25 bp, Artificial
  Probe
taatgtggtgacctcctcagacaga

SEQ ID NO: 190732 - DNA, 25 bp, Artificial
  Probe
aatgtacttctctggtcttcagtca

SEQ ID NO: 190733 - DNA, 25 bp, Artificial
  Probe
tgtacttctctggtcttcagtcatt

SEQ ID NO: 190734 - DNA, 25 bp, Artificial
  Probe
taattctaatgtggtgacctcctca

SEQ ID NO: 190735 - DNA, 25 bp, Artificial
  Probe
ttctgtggcttatgaaagaagcgca

SEQ ID NO: 190736 - DNA, 25 bp, Artificial
  Probe
ccgcgagcagtgagcggtaaaataa

SEQ ID NO: 190737 - DNA, 25 bp, Artificial
  Probe
atgtggtgacctcctcagacagaag

SEQ ID NO: 190738 - DNA, 25 bp, Artificial
  Probe
tctctggtcttcagtcattgtatga

SEQ ID NO: 190739 - DNA, 25 bp, Artificial
  Probe
cttctctggtcttcagtcattgtat

SEQ ID NO: 190740 - DNA, 25 bp, Artificial
  Probe
attctaatgtggtgacctcctcaga

SEQ ID NO: 190741 - DNA, 25 bp, Artificial
  Probe
ttgtaattctaatgtggtgacctcc

SEQ ID NO: 190742 - DNA, 25 bp, Artificial
  Probe
tacttctctggtcttcagtcattgt

SEQ ID NO: 190743 - DNA, 25 bp, Artificial
  Probe
ccttgggcttgctgttaaggaatta

SEQ ID NO: 190744 - DNA, 25 bp, Artificial
  Probe
taaagacgctgtctgtgatcatggg

SEQ ID NO: 190745 - DNA, 25 bp, Artificial
  Probe
tgctacagactctgccctactacga

SEQ ID NO: 190746 - DNA, 25 bp, Artificial
  Probe
catgccgtgggctcctctgaggacc

SEQ ID NO: 190747 - DNA, 25 bp, Artificial
  Probe
cgaataatgccatagagacggtgag

SEQ ID NO: 190748 - DNA, 25 bp, Artificial
  Probe
tggtgcccttctgtggctctgagga

SEQ ID NO: 190749 - DNA, 25 bp, Artificial
  Probe
aagatccaacctgtcacacacagtg

SEQ ID NO: 190750 - DNA, 25 bp, Artificial
  Probe
tgagcattaacaacaatggggctgt

SEQ ID NO: 190751 - DNA, 25 bp, Artificial
  Probe
tgccctactacgaataatgccatag

SEQ ID NO: 190752 - DNA, 25 bp, Artificial
  Probe
ccaaggactgtaatctggtttacct

SEQ ID NO: 190753 - DNA, 25 bp, Artificial
  Probe
atcggtcatattggactatgacacc

SEQ ID NO: 190754 - DNA, 25 bp, Artificial
  Probe
cttctgtggctctgaggagacccag

SEQ ID NO: 190755 - DNA, 25 bp, Artificial
  Probe
tctctagcttcaagggaaatgactt

SEQ ID NO: 190756 - DNA, 25 bp, Artificial
  Probe
cagccttatcggtcatattggacta

SEQ ID NO: 190757 - DNA, 25 bp, Artificial
  Probe
tacctgatccctcatgccgtgggct

SEQ ID NO: 190758 - DNA, 25 bp, Artificial
  Probe
tcgaactgtatggtgcccttctgtg

SEQ ID NO: 190759 - DNA, 25 bp, Artificial
  Probe
caccttcgatgtgtttgtgtggttt

SEQ ID NO: 190760 - DNA, 25 bp, Artificial
  Probe
cctctgaggacctgaagaaggaaga

SEQ ID NO: 190761 - DNA, 25 bp, Artificial
  Probe
ctgaggagacccagccattctgcat

SEQ ID NO: 190762 - DNA, 25 bp, Artificial
  Probe
agacccagccattctgcatcgattc

SEQ ID NO: 190763 - DNA, 25 bp, Artificial
  Probe
tgtatggtgcccttctgtggctctg

SEQ ID NO: 190764 - DNA, 25 bp, Artificial
  Probe
cacgagttcccttgggcttgctgtt

SEQ ID NO: 190765 - DNA, 25 bp, Artificial
  Probe
agccactggagaagctgtccccagc

SEQ ID NO: 190766 - DNA, 25 bp, Artificial
  Probe
aattaacaggagatccctctgctgc

SEQ ID NO: 190767 - DNA, 25 bp, Artificial
  Probe
atctctgaggccacgagttcccttg

SEQ ID NO: 190768 - DNA, 25 bp, Artificial
  Probe
tcctcatctctgaggccacgagttc

SEQ ID NO: 190769 - DNA, 25 bp, Artificial
  Probe
cagtggacagcattccacttgaata

SEQ ID NO: 190770 - DNA, 25 bp, Artificial
  Probe
atgctgacttccagaaggcgttctc

SEQ ID NO: 190771 - DNA, 25 bp, Artificial
  Probe
atgacttcggctctgaaatcagttt

SEQ ID NO: 190772 - DNA, 25 bp, Artificial
  Probe
gtggtgttttccagccaccatgagc

SEQ ID NO: 190773 - DNA, 25 bp, Artificial
  Probe
atgtccttcaagagggagacgaaag

SEQ ID NO: 190774 - DNA, 25 bp, Artificial
  Probe
aatagctaagccactggagaagctg

SEQ ID NO: 190775 - DNA, 25 bp, Artificial
  Probe
tgggcgaattcttccctgaacccca

SEQ ID NO: 190776 - DNA, 25 bp, Artificial
  Probe
cattaacaacaatggggctgtggtg

SEQ ID NO: 190777 - DNA, 25 bp, Artificial
  Probe
ccgaggctccatctccaaggactgt

SEQ ID NO: 190778 - DNA, 25 bp, Artificial
  Probe
gttcccttgggcttgctgttaagga

SEQ ID NO: 190779 - DNA, 25 bp, Artificial
  Probe
tggacaattacgaagcttctcaaac

SEQ ID NO: 190780 - DNA, 25 bp, Artificial
  Probe
ccatagagacggtgagcattaacaa

SEQ ID NO: 190781 - DNA, 25 bp, Artificial
  Probe
tactacgaataatgccatagagacg

SEQ ID NO: 190782 - DNA, 25 bp, Artificial
  Probe
gtctctctagaaaagatccaacctg

SEQ ID NO: 190783 - DNA, 25 bp, Artificial
  Probe
agactctgccctactacgaataatg

SEQ ID NO: 190784 - DNA, 25 bp, Artificial
  Probe
tcactgattccagtgtattctctag

SEQ ID NO: 190785 - DNA, 25 bp, Artificial
  Probe
caacaatggggctgtggtgttttcc

SEQ ID NO: 190786 - DNA, 25 bp, Artificial
  Probe
aaagttctaaagacgctgtctgtga

SEQ ID NO: 190787 - DNA, 25 bp, Artificial
  Probe
catattggactatgacaccgatgtc

SEQ ID NO: 190788 - DNA, 25 bp, Artificial
  Probe
tgcatcgattccatcaccttcgatg

SEQ ID NO: 190789 - DNA, 25 bp, Artificial
  Probe
tttttcctcttcagaaatggaccca

SEQ ID NO: 190790 - DNA, 25 bp, Artificial
  Probe
atttggttgtgtcagagaacgttga

SEQ ID NO: 190791 - DNA, 25 bp, Artificial
  Probe
tggtcaatttggttgtgtcagagaa

SEQ ID NO: 190792 - DNA, 25 bp, Artificial
  Probe
gatccttggtcaatttggttgtgtc

SEQ ID NO: 190793 - DNA, 25 bp, Artificial
  Probe
catctttctgatccttggtcaattt

SEQ ID NO: 190794 - DNA, 25 bp, Artificial
  Probe
tttcctcttcagaaatggacccagc

SEQ ID NO: 190795 - DNA, 25 bp, Artificial
  Probe
atctttctgatccttggtcaatttg

SEQ ID NO: 190796 - DNA, 25 bp, Artificial
  Probe
tacactagccctgcaatttgtcctg

SEQ ID NO: 190797 - DNA, 25 bp, Artificial
  Probe
tttctgatccttggtcaatttggtt

SEQ ID NO: 190798 - DNA, 25 bp, Artificial
  Probe
ttattttctcctaaaaatatgaaca

SEQ ID NO: 190799 - DNA, 25 bp, Artificial
  Probe
gttgttgtggctttatttttcctct

SEQ ID NO: 190800 - DNA, 25 bp, Artificial
  Probe
ttttcctcttcagaaatggacccag

SEQ ID NO: 190801 - DNA, 25 bp, Artificial
  Probe
atccttggtcaatttggttgtgtca

SEQ ID NO: 190802 - DNA, 25 bp, Artificial
  Probe
gtcacatagcttacactagccctgc

SEQ ID NO: 190803 - DNA, 25 bp, Artificial
  Probe
tctgatccttggtcaatttggttgt

SEQ ID NO: 190804 - DNA, 25 bp, Artificial
  Probe
tatgaacattgtcacatagcttaca

SEQ ID NO: 190805 - DNA, 25 bp, Artificial
  Probe
tgaaaggttgttgtggctttatttt

SEQ ID NO: 190806 - DNA, 25 bp, Artificial
  Probe
tctttctgatccttggtcaatttgg

SEQ ID NO: 190807 - DNA, 25 bp, Artificial
  Probe
ttcctcttcagaaatggacccagca

SEQ ID NO: 190808 - DNA, 25 bp, Artificial
  Probe
ctgatccttggtcaatttggttgtg

SEQ ID NO: 190809 - DNA, 25 bp, Artificial
  Probe
ttctcctaaaaatatgaacattgtc

SEQ ID NO: 190810 - DNA, 25 bp, Artificial
  Probe
ggttgtgtcagagaacgttgactat

SEQ ID NO: 190811 - DNA, 25 bp, Artificial
  Probe
tcttcagaaatggacccagcacaag

SEQ ID NO: 190812 - DNA, 25 bp, Artificial
  Probe
agaaatggacccagcacaagaaaat

SEQ ID NO: 190813 - DNA, 25 bp, Artificial
  Probe
tcctcttcagaaatggacccagcac

SEQ ID NO: 190814 - DNA, 25 bp, Artificial
  Probe
ctttctgatccttggtcaatttggt

SEQ ID NO: 190815 - DNA, 25 bp, Artificial
  Probe
ttcagaaatggacccagcacaagaa

SEQ ID NO: 190816 - DNA, 25 bp, Artificial
  Probe
tcacatagcttacactagccctgca

SEQ ID NO: 190817 - DNA, 25 bp, Artificial
  Probe
tgtcacatagcttacactagccctg

SEQ ID NO: 190818 - DNA, 25 bp, Artificial
  Probe
cttggtcaatttggttgtgtcagag

SEQ ID NO: 190819 - DNA, 25 bp, Artificial
  Probe
ttctgatccttggtcaatttggttg

SEQ ID NO: 190820 - DNA, 25 bp, Artificial
  Probe
aatatgaacattgtcacatagctta

SEQ ID NO: 190821 - DNA, 25 bp, Artificial
  Probe
gaacattgtcacatagcttacacta

SEQ ID NO: 190822 - DNA, 25 bp, Artificial
  Probe
gacccagcacaagaaaataaaaaca

SEQ ID NO: 190823 - DNA, 25 bp, Artificial
  Probe
tgatccttggtcaatttggttgtgt

SEQ ID NO: 190824 - DNA, 25 bp, Artificial
  Probe
tccttggtcaatttggttgtgtcag

SEQ ID NO: 190825 - DNA, 25 bp, Artificial
  Probe
acactagccctgcaatttgtcctgg

SEQ ID NO: 190826 - DNA, 25 bp, Artificial
  Probe
ctcttcagaaatggacccagcacaa

SEQ ID NO: 190827 - DNA, 25 bp, Artificial
  Probe
tcaatttggttgtgtcagagaacgt

SEQ ID NO: 190828 - DNA, 25 bp, Artificial
  Probe
cctcttcagaaatggacccagcaca

SEQ ID NO: 190829 - DNA, 25 bp, Artificial
  Probe
tttctcctaaaaatatgaacattgt

SEQ ID NO: 190830 - DNA, 25 bp, Artificial
  Probe
aaatctgaaaggttgttgtggcttt

SEQ ID NO: 190831 - DNA, 25 bp, Artificial
  Probe
cattttattttctcctaaaaatatg

SEQ ID NO: 190832 - DNA, 25 bp, Artificial
  Probe
ccttggtcaatttggttgtgtcaga

SEQ ID NO: 190833 - DNA, 25 bp, Artificial
  Probe
cttcagaaatggacccagcacaaga

SEQ ID NO: 190834 - DNA, 25 bp, Artificial
  Probe
atctgaaaggttgttgtggctttat

SEQ ID NO: 190835 - DNA, 25 bp, Artificial
  Probe
agagtcagtgtcattacctggaatg

SEQ ID NO: 190836 - DNA, 25 bp, Artificial
  Probe
acacctgttgacagccccgatgact

SEQ ID NO: 190837 - DNA, 25 bp, Artificial
  Probe
tctctcctggggatttctggggacg

SEQ ID NO: 190838 - DNA, 25 bp, Artificial
  Probe
agcacagcaaatcctcagacacctg

SEQ ID NO: 190839 - DNA, 25 bp, Artificial
  Probe
caaattctctcctggggatttctgg

SEQ ID NO: 190840 - DNA, 25 bp, Artificial
  Probe
tccaaacggccagagcacctgcgta

SEQ ID NO: 190841 - DNA, 25 bp, Artificial
  Probe
ctcagacacctgtggaatacccaat

SEQ ID NO: 190842 - DNA, 25 bp, Artificial
  Probe
ggtgcttcagccagcacagcaaatc

SEQ ID NO: 190843 - DNA, 25 bp, Artificial
  Probe
acagcccaactctgggccatacaaa

SEQ ID NO: 190844 - DNA, 25 bp, Artificial
  Probe
gattcaaagtttactcgtcagacac

SEQ ID NO: 190845 - DNA, 25 bp, Artificial
  Probe
tgccaaccaggtctttctgggtttt

SEQ ID NO: 190846 - DNA, 25 bp, Artificial
  Probe
tgcttcagccagcacagcaaatcct

SEQ ID NO: 190847 - DNA, 25 bp, Artificial
  Probe
ttgacagccccgatgactcaactct

SEQ ID NO: 190848 - DNA, 25 bp, Artificial
  Probe
agcttttcctatgatctccaaacgg

SEQ ID NO: 190849 - DNA, 25 bp, Artificial
  Probe
ctctcagtgaaagtgccaaccaggt

SEQ ID NO: 190850 - DNA, 25 bp, Artificial
  Probe
agtgaaagtgccaaccaggtctttc

SEQ ID NO: 190851 - DNA, 25 bp, Artificial
  Probe
agagcacctgcgtatgaatctatga

SEQ ID NO: 190852 - DNA, 25 bp, Artificial
  Probe
tctcaaagagtcagtgtcattacct

SEQ ID NO: 190853 - DNA, 25 bp, Artificial
  Probe
aaatggcagtctcaaagagtcagtg

SEQ ID NO: 190854 - DNA, 25 bp, Artificial
  Probe
tcaaagtttactcgtcagacacctg

SEQ ID NO: 190855 - DNA, 25 bp, Artificial
  Probe
ggacgaggtgcttcagccagcacag

SEQ ID NO: 190856 - DNA, 25 bp, Artificial
  Probe
gtcagacacctgttgacagccccga

SEQ ID NO: 190857 - DNA, 25 bp, Artificial
  Probe
gcctgtcagcccagtcaaattctct

SEQ ID NO: 190858 - DNA, 25 bp, Artificial
  Probe
acctgcgtatgaatctatgatgaaa

SEQ ID NO: 190859 - DNA, 25 bp, Artificial
  Probe
gtcagcccagtcaaattctctcctg

SEQ ID NO: 190860 - DNA, 25 bp, Artificial
  Probe
acgaacgcctgtcagcccagtcaaa

SEQ ID NO: 190861 - DNA, 25 bp, Artificial
  Probe
ttcagccagcacagcaaatcctcag

SEQ ID NO: 190862 - DNA, 25 bp, Artificial
  Probe
atcctcagacacctgtggaataccc

SEQ ID NO: 190863 - DNA, 25 bp, Artificial
  Probe
tcagccagcacagcaaatcctcaga

SEQ ID NO: 190864 - DNA, 25 bp, Artificial
  Probe
cgaacgcctgtcagcccagtcaaat

SEQ ID NO: 190865 - DNA, 25 bp, Artificial
  Probe
tttactcgtcagacacctgttgaca

SEQ ID NO: 190866 - DNA, 25 bp, Artificial
  Probe
agccagcacagcaaatcctcagaca

SEQ ID NO: 190867 - DNA, 25 bp, Artificial
  Probe
agacacctgtggaatacccaatgga

SEQ ID NO: 190868 - DNA, 25 bp, Artificial
  Probe
ggccagagcacctgcgtatgaatct

SEQ ID NO: 190869 - DNA, 25 bp, Artificial
  Probe
ccaaacggccagagcacctgcgtat

SEQ ID NO: 190870 - DNA, 25 bp, Artificial
  Probe
acgaggtgcttcagccagcacagca

SEQ ID NO: 190871 - DNA, 25 bp, Artificial
  Probe
gacagcccaactctgggccatacaa

SEQ ID NO: 190872 - DNA, 25 bp, Artificial
  Probe
tatgatctccaaacggccagagcac

SEQ ID NO: 190873 - DNA, 25 bp, Artificial
  Probe
ttctggggacgaggtgcttcagcca

SEQ ID NO: 190874 - DNA, 25 bp, Artificial
  Probe
ctctcctggggatttctggggacga

SEQ ID NO: 190875 - DNA, 25 bp, Artificial
  Probe
aaacggccagagcacctgcgtatga

SEQ ID NO: 190876 - DNA, 25 bp, Artificial
  Probe
agccccgatgactcaactctcagtg

SEQ ID NO: 190877 - DNA, 25 bp, Artificial
  Probe
atttctggggacgaggtgcttcagc

SEQ ID NO: 190878 - DNA, 25 bp, Artificial
  Probe
caaagtttactcgtcagacacctgt

SEQ ID NO: 190879 - DNA, 25 bp, Artificial
  Probe
tttcctatgatctccaaacggccag

SEQ ID NO: 190880 - DNA, 25 bp, Artificial
  Probe
gcttttcctatgatctccaaacggc

SEQ ID NO: 190881 - DNA, 25 bp, Artificial
  Probe
tctcggaggtgctcaagcgactgcg

SEQ ID NO: 190882 - DNA, 25 bp, Artificial
  Probe
gcacgagaagttctcggaggtgctc

SEQ ID NO: 190883 - DNA, 25 bp, Artificial
  Probe
gctactcattgagatggagcagcgg

SEQ ID NO: 190884 - DNA, 25 bp, Artificial
  Probe
ggcctcactcagattgaaactctct

SEQ ID NO: 190885 - DNA, 25 bp, Artificial
  Probe
aactatgagttcatgtggaaccctc

SEQ ID NO: 190886 - DNA, 25 bp, Artificial
  Probe
acctgggaaagcacgagaagttctc

SEQ ID NO: 190887 - DNA, 25 bp, Artificial
  Probe
tcattgagatggagcagcggcttga

SEQ ID NO: 190888 - DNA, 25 bp, Artificial
  Probe
agctactcattgagatggagcagcg

SEQ ID NO: 190889 - DNA, 25 bp, Artificial
  Probe
agttctcggaggtgctcaagcgact

SEQ ID NO: 190890 - DNA, 25 bp, Artificial
  Probe
ttcacgcgattctgcactggcctca

SEQ ID NO: 190891 - DNA, 25 bp, Artificial
  Probe
agaactatgagttcatgtggaaccc

SEQ ID NO: 190892 - DNA, 25 bp, Artificial
  Probe
ctcattgagatggagcagcggcttg

SEQ ID NO: 190893 - DNA, 25 bp, Artificial
  Probe
tctgcactggcctcactcagattga

SEQ ID NO: 190894 - DNA, 25 bp, Artificial
  Probe
actggcctcactcagattgaaactc

SEQ ID NO: 190895 - DNA, 25 bp, Artificial
  Probe
ggtgctcaagcgactgcggcttcag

SEQ ID NO: 190896 - DNA, 25 bp, Artificial
  Probe
tgaagctactcattgagatggagca

SEQ ID NO: 190897 - DNA, 25 bp, Artificial
  Probe
gattgaaactctcttcaagtctaag

SEQ ID NO: 190898 - DNA, 25 bp, Artificial
  Probe
gttctcggaggtgctcaagcgactg

SEQ ID NO: 190899 - DNA, 25 bp, Artificial
  Probe
gtgctcaagcgactgcggcttcaga

SEQ ID NO: 190900 - DNA, 25 bp, Artificial
  Probe
aagctactcattgagatggagcagc

SEQ ID NO: 190901 - DNA, 25 bp, Artificial
  Probe
gcactggcctcactcagattgaaac

SEQ ID NO: 190902 - DNA, 25 bp, Artificial
  Probe
ctcttcaagtctaagaactatgagt

SEQ ID NO: 190903 - DNA, 25 bp, Artificial
  Probe
tcttcaagtctaagaactatgagtt

SEQ ID NO: 190904 - DNA, 25 bp, Artificial
  Probe
agaagttctcggaggtgctcaagcg

SEQ ID NO: 190905 - DNA, 25 bp, Artificial
  Probe
actcattgagatggagcagcggctt

SEQ ID NO: 190906 - DNA, 25 bp, Artificial
  Probe
gcgattctgcactggcctcactcag

SEQ ID NO: 190907 - DNA, 25 bp, Artificial
  Probe
tactcattgagatggagcagcggct

SEQ ID NO: 190908 - DNA, 25 bp, Artificial
  Probe
cccacctgggaaagcacgagaagtt

SEQ ID NO: 190909 - DNA, 25 bp, Artificial
  Probe
ctggcctcactcagattgaaactct

SEQ ID NO: 190910 - DNA, 25 bp, Artificial
  Probe
ttcaagtctaagaactatgagttca

SEQ ID NO: 190911 - DNA, 25 bp, Artificial
  Probe
ctatgagttcatgtggaaccctcac

SEQ ID NO: 190912 - DNA, 25 bp, Artificial
  Probe
ttctcggaggtgctcaagcgactgc

SEQ ID NO: 190913 - DNA, 25 bp, Artificial
  Probe
cactggcctcactcagattgaaact

SEQ ID NO: 190914 - DNA, 25 bp, Artificial
  Probe
tctcttcaagtctaagaactatgag

SEQ ID NO: 190915 - DNA, 25 bp, Artificial
  Probe
gtgaagctactcattgagatggagc

SEQ ID NO: 190916 - DNA, 25 bp, Artificial
  Probe
ctactcattgagatggagcagcggc

SEQ ID NO: 190917 - DNA, 25 bp, Artificial
  Probe
aagttctcggaggtgctcaagcgac

SEQ ID NO: 190918 - DNA, 25 bp, Artificial
  Probe
aagcacgagaagttctcggaggtgc

SEQ ID NO: 190919 - DNA, 25 bp, Artificial
  Probe
gaagctactcattgagatggagcag

SEQ ID NO: 190920 - DNA, 25 bp, Artificial
  Probe
ctgcactggcctcactcagattgaa

SEQ ID NO: 190921 - DNA, 25 bp, Artificial
  Probe
gaagttctcggaggtgctcaagcga

SEQ ID NO: 190922 - DNA, 25 bp, Artificial
  Probe
tgctcaagcgactgcggcttcagaa

SEQ ID NO: 190923 - DNA, 25 bp, Artificial
  Probe
cacgagaagttctcggaggtgctca

SEQ ID NO: 190924 - DNA, 25 bp, Artificial
  Probe
aaagcacgagaagttctcggaggtg

SEQ ID NO: 190925 - DNA, 25 bp, Artificial
  Probe
tggcctcactcagattgaaactctc

SEQ ID NO: 190926 - DNA, 25 bp, Artificial
  Probe
ccacctgggaaagcacgagaagttc

SEQ ID NO: 190927 - DNA, 25 bp, Artificial
  Probe
ccactgttagaatggggtagaattc

SEQ ID NO: 190928 - DNA, 25 bp, Artificial
  Probe
tccctgaagcacttttggcaagtca

SEQ ID NO: 190929 - DNA, 25 bp, Artificial
  Probe
tcagccatcagagaagcctgttgcc

SEQ ID NO: 190930 - DNA, 25 bp, Artificial
  Probe
tcagagaagcctgttgccatctgct

SEQ ID NO: 190931 - DNA, 25 bp, Artificial
  Probe
agcatgaacctatgctccctgaagc

SEQ ID NO: 190932 - DNA, 25 bp, Artificial
  Probe
agtcagccatcagagaagcctgttg

SEQ ID NO: 190933 - DNA, 25 bp, Artificial
  Probe
cagccatcagagaagcctgttgcca

SEQ ID NO: 190934 - DNA, 25 bp, Artificial
  Probe
agccatcagagaagcctgttgccat

SEQ ID NO: 190935 - DNA, 25 bp, Artificial
  Probe
atgaacctatgctccctgaagcact

SEQ ID NO: 190936 - DNA, 25 bp, Artificial
  Probe
tccccactgttagaatggggtagaa

SEQ ID NO: 190937 - DNA, 25 bp, Artificial
  Probe
cctatgctccctgaagcacttttgg

SEQ ID NO: 190938 - DNA, 25 bp, Artificial
  Probe
tgctccctgaagcacttttggcaag

SEQ ID NO: 190939 - DNA, 25 bp, Artificial
  Probe
ctccctgaagcacttttggcaagtc

SEQ ID NO: 190940 - DNA, 25 bp, Artificial
  Probe
ctgaagcacttttggcaagtcagcc

SEQ ID NO: 190941 - DNA, 25 bp, Artificial
  Probe
gcacttttggcaagtcagccatcag

SEQ ID NO: 190942 - DNA, 25 bp, Artificial
  Probe
ctcagcatgaacctatgctccctga

SEQ ID NO: 190943 - DNA, 25 bp, Artificial
  Probe
cctgaagcacttttggcaagtcagc

SEQ ID NO: 190944 - DNA, 25 bp, Artificial
  Probe
acctatgctccctgaagcacttttg

SEQ ID NO: 190945 - DNA, 25 bp, Artificial
  Probe
ttttggcaagtcagccatcagagaa

SEQ ID NO: 190946 - DNA, 25 bp, Artificial
  Probe
ccccactgttagaatggggtagaat

SEQ ID NO: 190947 - DNA, 25 bp, Artificial
  Probe
gatacagaaatctactcagcatgaa

SEQ ID NO: 190948 - DNA, 25 bp, Artificial
  Probe
agcacttttggcaagtcagccatca

SEQ ID NO: 190949 - DNA, 25 bp, Artificial
  Probe
aagatacagaaatctactcagcatg

SEQ ID NO: 190950 - DNA, 25 bp, Artificial
  Probe
tcagcatgaacctatgctccctgaa

SEQ ID NO: 190951 - DNA, 25 bp, Artificial
  Probe
gcaagtcagccatcagagaagcctg

SEQ ID NO: 190952 - DNA, 25 bp, Artificial
  Probe
gctccctgaagcacttttggcaagt

SEQ ID NO: 190953 - DNA, 25 bp, Artificial
  Probe
cttttggcaagtcagccatcagaga

SEQ ID NO: 190954 - DNA, 25 bp, Artificial
  Probe
agagaagcctgttgccatctgctcc

SEQ ID NO: 190955 - DNA, 25 bp, Artificial
  Probe
cacttttggcaagtcagccatcaga

SEQ ID NO: 190956 - DNA, 25 bp, Artificial
  Probe
catgaacctatgctccctgaagcac

SEQ ID NO: 190957 - DNA, 25 bp, Artificial
  Probe
atcagagaagcctgttgccatctgc

SEQ ID NO: 190958 - DNA, 25 bp, Artificial
  Probe
ctatgctccctgaagcacttttggc

SEQ ID NO: 190959 - DNA, 25 bp, Artificial
  Probe
acttttggcaagtcagccatcagag

SEQ ID NO: 190960 - DNA, 25 bp, Artificial
  Probe
ggcaagtcagccatcagagaagcct

SEQ ID NO: 190961 - DNA, 25 bp, Artificial
  Probe
agatacagaaatctactcagcatga

SEQ ID NO: 190962 - DNA, 25 bp, Artificial
  Probe
cagagaagcctgttgccatctgctc

SEQ ID NO: 190963 - DNA, 25 bp, Artificial
  Probe
cagcatgaacctatgctccctgaag

SEQ ID NO: 190964 - DNA, 25 bp, Artificial
  Probe
caagtcagccatcagagaagcctgt

SEQ ID NO: 190965 - DNA, 25 bp, Artificial
  Probe
actcagcatgaacctatgctccctg

SEQ ID NO: 190966 - DNA, 25 bp, Artificial
  Probe
tatgctccctgaagcacttttggca

SEQ ID NO: 190967 - DNA, 25 bp, Artificial
  Probe
atgctccctgaagcacttttggcaa

SEQ ID NO: 190968 - DNA, 25 bp, Artificial
  Probe
aagtcagccatcagagaagcctgtt

SEQ ID NO: 190969 - DNA, 25 bp, Artificial
  Probe
gcatgaacctatgctccctgaagca

SEQ ID NO: 190970 - DNA, 25 bp, Artificial
  Probe
gaaatctactcagcatgaacctatg

SEQ ID NO: 190971 - DNA, 25 bp, Artificial
  Probe
gtcagccatcagagaagcctgttgc

SEQ ID NO: 190972 - DNA, 25 bp, Artificial
  Probe
cccactgttagaatggggtagaatt

SEQ ID NO: 190973 - DNA, 25 bp, Artificial
  Probe
cagggaacagactgcctgatgtctg

SEQ ID NO: 190974 - DNA, 25 bp, Artificial
  Probe
tatccgaggcaaagggcaggcccag

SEQ ID NO: 190975 - DNA, 25 bp, Artificial
  Probe
cacaggcttcccagggaacagactg

SEQ ID NO: 190976 - DNA, 25 bp, Artificial
  Probe
taaccacaggcactgtggaagggtg

SEQ ID NO: 190977 - DNA, 25 bp, Artificial
  Probe
gaagctcagctcctgcctcagtttc

SEQ ID NO: 190978 - DNA, 25 bp, Artificial
  Probe
caggggaagctcagctcctgcctca

SEQ ID NO: 190979 - DNA, 25 bp, Artificial
  Probe
ctgaattatccgaggcaaagggcag

SEQ ID NO: 190980 - DNA, 25 bp, Artificial
  Probe
tgtctgatcactctgagcatctccc

SEQ ID NO: 190981 - DNA, 25 bp, Artificial
  Probe
gacatacttgcacagcctgcctcta

SEQ ID NO: 190982 - DNA, 25 bp, Artificial
  Probe
tgaggtctgggcttcccaattcgtc

SEQ ID NO: 190983 - DNA, 25 bp, Artificial
  Probe
ggtgagcacctacctccttcagagg

SEQ ID NO: 190984 - DNA, 25 bp, Artificial
  Probe
atagacctggctctcggggtaactc

SEQ ID NO: 190985 - DNA, 25 bp, Artificial
  Probe
caggtgagcacctacctccttcaga

SEQ ID NO: 190986 - DNA, 25 bp, Artificial
  Probe
ttacaccgtcccaggtgagcaccta

SEQ ID NO: 190987 - DNA, 25 bp, Artificial
  Probe
tgggaattaaccacgcgagagtcag

SEQ ID NO: 190988 - DNA, 25 bp, Artificial
  Probe
ttcgtcacagaagctgctggagctg

SEQ ID NO: 190989 - DNA, 25 bp, Artificial
  Probe
cttaccgacagtcttcaagaccaag

SEQ ID NO: 190990 - DNA, 25 bp, Artificial
  Probe
ttcccagagccgttaaacttcgaca

SEQ ID NO: 190991 - DNA, 25 bp, Artificial
  Probe
acctacctccttcagaggtgtcaca

SEQ ID NO: 190992 - DNA, 25 bp, Artificial
  Probe
ttggcttcaggcagggtctctctat

SEQ ID NO: 190993 - DNA, 25 bp, Artificial
  Probe
tcaggcagggtctctctatatcata

SEQ ID NO: 190994 - DNA, 25 bp, Artificial
  Probe
cctgaagggttttgggcagcagcaa

SEQ ID NO: 190995 - DNA, 25 bp, Artificial
  Probe
gtgtcatgagtttcaatccaatcct

SEQ ID NO: 190996 - DNA, 25 bp, Artificial
  Probe
gtttactttggcttcaggcagggtc

SEQ ID NO: 190997 - DNA, 25 bp, Artificial
  Probe
tagcttttcccagagccgttaaact

SEQ ID NO: 190998 - DNA, 25 bp, Artificial
  Probe
actccccagtctgacactggtttct

SEQ ID NO: 190999 - DNA, 25 bp, Artificial
  Probe
gtctctctatatcatagacctggct

SEQ ID NO: 191000 - DNA, 25 bp, Artificial
  Probe
taaccacgcgagagtcaggaaacgg

SEQ ID NO: 191001 - DNA, 25 bp, Artificial
  Probe
gatttgtgtcatgagtttcaatcca

SEQ ID NO: 191002 - DNA, 25 bp, Artificial
  Probe
agcaatgaaaagacctcatgtcctt

SEQ ID NO: 191003 - DNA, 25 bp, Artificial
  Probe
catcatctgggaaccaaagatgggg

SEQ ID NO: 191004 - DNA, 25 bp, Artificial
  Probe
ttcattacaccgtcccaggtgagca

SEQ ID NO: 191005 - DNA, 25 bp, Artificial
  Probe
gggctgtgacggtgagcacctacct

SEQ ID NO: 191006 - DNA, 25 bp, Artificial
  Probe
ctcagaggccccttggtttgctctc

SEQ ID NO: 191007 - DNA, 25 bp, Artificial
  Probe
tccacgatgcaggtgagcaccgagg

SEQ ID NO: 191008 - DNA, 25 bp, Artificial
  Probe
acagactgcctgatgtctgatgtct

SEQ ID NO: 191009 - DNA, 25 bp, Artificial
  Probe
actgcctctccaacagagtgcagga

SEQ ID NO: 191010 - DNA, 25 bp, Artificial
  Probe
aagggcaggcccagtgagatagctt

SEQ ID NO: 191011 - DNA, 25 bp, Artificial
  Probe
tgtgtgtctgaggtctgggcttccc

SEQ ID NO: 191012 - DNA, 25 bp, Artificial
  Probe
tttgggcagcagcaatgaaaagacc

SEQ ID NO: 191013 - DNA, 25 bp, Artificial
  Probe
ttttgggcagcagcaatgaaaagac

SEQ ID NO: 191014 - DNA, 25 bp, Artificial
  Probe
cttcaccaaactgaattatccgagg

SEQ ID NO: 191015 - DNA, 25 bp, Artificial
  Probe
acggtgagcacctaccttgccgctt

SEQ ID NO: 191016 - DNA, 25 bp, Artificial
  Probe
agattgggcagcagatcccttaacc

SEQ ID NO: 191017 - DNA, 25 bp, Artificial
  Probe
caggcagggtctctctatatcatag

SEQ ID NO: 191018 - DNA, 25 bp, Artificial
  Probe
acgcgagagtcaggaaacggaaaga

SEQ ID NO: 191019 - DNA, 25 bp, Artificial
  Probe
acttggaggtgcaagccaagctgct

SEQ ID NO: 191020 - DNA, 25 bp, Artificial
  Probe
ctgctgctgccaaagctgccgctaa

SEQ ID NO: 191021 - DNA, 25 bp, Artificial
  Probe
ccctggtggtgttactggtattgga

SEQ ID NO: 191022 - DNA, 25 bp, Artificial
  Probe
tgctgccaaagctgccaagtatgga

SEQ ID NO: 191023 - DNA, 25 bp, Artificial
  Probe
tgctaaggcggctgccaaagcccag

SEQ ID NO: 191024 - DNA, 25 bp, Artificial
  Probe
tttcctggctatggtgttggagctg

SEQ ID NO: 191025 - DNA, 25 bp, Artificial
  Probe
agccgccaaggcaggccagtatggt

SEQ ID NO: 191026 - DNA, 25 bp, Artificial
  Probe
tgccgctgccaaagctgccaagtac

SEQ ID NO: 191027 - DNA, 25 bp, Artificial
  Probe
actggtcctggcaccggccttgtac

SEQ ID NO: 191028 - DNA, 25 bp, Artificial
  Probe
cactgccaggtgcagtgccaggtgt

SEQ ID NO: 191029 - DNA, 25 bp, Artificial
  Probe
gtgtgtcccctgctgcagctgctaa

SEQ ID NO: 191030 - DNA, 25 bp, Artificial
  Probe
tggagtgccaggagcaggtacccct

SEQ ID NO: 191031 - DNA, 25 bp, Artificial
  Probe
aaagctgccaagtacggtgccggag

SEQ ID NO: 191032 - DNA, 25 bp, Artificial
  Probe
ctgtaggccttggaggtgtgtcccc

SEQ ID NO: 191033 - DNA, 25 bp, Artificial
  Probe
tgcccagtacggtcttggtggagct

SEQ ID NO: 191034 - DNA, 25 bp, Artificial
  Probe
gtgcactgccaggtgcagtaccagg

SEQ ID NO: 191035 - DNA, 25 bp, Artificial
  Probe
gtgcagtaccaggtgcactgccagg

SEQ ID NO: 191036 - DNA, 25 bp, Artificial
  Probe
atccctggtgctgtaggccttggag

SEQ ID NO: 191037 - DNA, 25 bp, Artificial
  Probe
actgccaggtgcagtaccaggtgca

SEQ ID NO: 191038 - DNA, 25 bp, Artificial
  Probe
ctggtggctttcctggctatggtgt

SEQ ID NO: 191039 - DNA, 25 bp, Artificial
  Probe
tgcaagccaagctgctgctgccgct

SEQ ID NO: 191040 - DNA, 25 bp, Artificial
  Probe
tgttactggtattggaactggtcct

SEQ ID NO: 191041 - DNA, 25 bp, Artificial
  Probe
gtaccaggtgcactgccaggtgcag

SEQ ID NO: 191042 - DNA, 25 bp, Artificial
  Probe
tgctggtgtccctggatttggagct

SEQ ID NO: 191043 - DNA, 25 bp, Artificial
  Probe
gtcaccagctgcagctgccaaagct

SEQ ID NO: 191044 - DNA, 25 bp, Artificial
  Probe
aaagctgctgccaaagctgccaagt

SEQ ID NO: 191045 - DNA, 25 bp, Artificial
  Probe
taaatacggagcagcaggtggcctt

SEQ ID NO: 191046 - DNA, 25 bp, Artificial
  Probe
taccaggtgcactgccaggtgcagt

SEQ ID NO: 191047 - DNA, 25 bp, Artificial
  Probe
aaggcagccgccaaggcaggccagt

SEQ ID NO: 191048 - DNA, 25 bp, Artificial
  Probe
agcaggtacccctgcggctgcagct

SEQ ID NO: 191049 - DNA, 25 bp, Artificial
  Probe
gcagggacaccagctgctgccaaat

SEQ ID NO: 191050 - DNA, 25 bp, Artificial
  Probe
caggtgcagtaccaggtgcactgcc

SEQ ID NO: 191051 - DNA, 25 bp, Artificial
  Probe
agctgccaagtatggagccagaggt

SEQ ID NO: 191052 - DNA, 25 bp, Artificial
  Probe
ttggccctggtggtgttactggtat

SEQ ID NO: 191053 - DNA, 25 bp, Artificial
  Probe
atcttggaggagcagggacaccagc

SEQ ID NO: 191054 - DNA, 25 bp, Artificial
  Probe
tgtacctggtgatcttggaggagca

SEQ ID NO: 191055 - DNA, 25 bp, Artificial
  Probe
gagtgatccctggtgctgtaggcct

SEQ ID NO: 191056 - DNA, 25 bp, Artificial
  Probe
gttggcatcccgacatacggggttg

SEQ ID NO: 191057 - DNA, 25 bp, Artificial
  Probe
cagtacagagctgctgctgggcttg

SEQ ID NO: 191058 - DNA, 25 bp, Artificial
  Probe
tgatcttggaggagcagggacacca

SEQ ID NO: 191059 - DNA, 25 bp, Artificial
  Probe
ctggtatcggaggtccaggcattgt

SEQ ID NO: 191060 - DNA, 25 bp, Artificial
  Probe
agctggacttggaggtgcaagccaa

SEQ ID NO: 191061 - DNA, 25 bp, Artificial
  Probe
cagctgctgccaaatctgctgctaa

SEQ ID NO: 191062 - DNA, 25 bp, Artificial
  Probe
gagcagggacaccagctgctgccaa

SEQ ID NO: 191063 - DNA, 25 bp, Artificial
  Probe
aggcctggtgccaggtgcagtacca

SEQ ID NO: 191064 - DNA, 25 bp, Artificial
  Probe
tggaccaggggctgtgtcaccagct

SEQ ID NO: 191065 - DNA, 25 bp, Artificial
  Probe
atatgaagaggtggtgccaggctct

SEQ ID NO: 191066 - DNA, 25 bp, Artificial
  Probe
tgacctttccgctcctgggcctttg

SEQ ID NO: 191067 - DNA, 25 bp, Artificial
  Probe
aaaccctgtcggttttctgaggatg

SEQ ID NO: 191068 - DNA, 25 bp, Artificial
  Probe
gcctttgggcctttggtgaggcttc

SEQ ID NO: 191069 - DNA, 25 bp, Artificial
  Probe
ctctctcaagtgagggcttttatat

SEQ ID NO: 191070 - DNA, 25 bp, Artificial
  Probe
gcagatccggtggaagggctcccta

SEQ ID NO: 191071 - DNA, 25 bp, Artificial
  Probe
aaggctgaacacagtgaagacactc

SEQ ID NO: 191072 - DNA, 25 bp, Artificial
  Probe
gctgccccaggatggagccttcgct

SEQ ID NO: 191073 - DNA, 25 bp, Artificial
  Probe
ctgaatagaccaagccgagcttgca

SEQ ID NO: 191074 - DNA, 25 bp, Artificial
  Probe
ctgctgcagtgttgggacctcgagt

SEQ ID NO: 191075 - DNA, 25 bp, Artificial
  Probe
ctccctagagtaataagagagaagg

SEQ ID NO: 191076 - DNA, 25 bp, Artificial
  Probe
gtgcccaagacttggggcgcagccc

SEQ ID NO: 191077 - DNA, 25 bp, Artificial
  Probe
tatgaagaggtggtgccaggctctc

SEQ ID NO: 191078 - DNA, 25 bp, Artificial
  Probe
ccctagcacaaaggatatgaagagg

SEQ ID NO: 191079 - DNA, 25 bp, Artificial
  Probe
atgtgcttactcgtttctttgaaat

SEQ ID NO: 191080 - DNA, 25 bp, Artificial
  Probe
gcggagttcgaccaatcatcggcgg

SEQ ID NO: 191081 - DNA, 25 bp, Artificial
  Probe
cgcggcggtcgctctctcaagtgag

SEQ ID NO: 191082 - DNA, 25 bp, Artificial
  Probe
agggggtcttctccaaagcacgagg

SEQ ID NO: 191083 - DNA, 25 bp, Artificial
  Probe
gctcagccaatcataacaggtggcg

SEQ ID NO: 191084 - DNA, 25 bp, Artificial
  Probe
ggttccccctagcacaaaggatatg

SEQ ID NO: 191085 - DNA, 25 bp, Artificial
  Probe
caaatattcgtgagccgcgggcatc

SEQ ID NO: 191086 - DNA, 25 bp, Artificial
  Probe
tccaggacccggtcggaatgacctt

SEQ ID NO: 191087 - DNA, 25 bp, Artificial
  Probe
tcggcctacggcagctaggggttcc

SEQ ID NO: 191088 - DNA, 25 bp, Artificial
  Probe
tggtattccgcgtccgcggtgcaga

SEQ ID NO: 191089 - DNA, 25 bp, Artificial
  Probe
tgtaatgggccgacgctgccccagg

SEQ ID NO: 191090 - DNA, 25 bp, Artificial
  Probe
ttgaaaacatgtcatttgcgtctga

SEQ ID NO: 191091 - DNA, 25 bp, Artificial
  Probe
tccgcggtgcagactgtcctcgact

SEQ ID NO: 191092 - DNA, 25 bp, Artificial
  Probe
gcagctaggggttccggcgaactct

SEQ ID NO: 191093 - DNA, 25 bp, Artificial
  Probe
tctttggcaggctctctcaacgcga

SEQ ID NO: 191094 - DNA, 25 bp, Artificial
  Probe
cctagcaacggttgccgggacacgc

SEQ ID NO: 191095 - DNA, 25 bp, Artificial
  Probe
atgatttattgcttactctgtcctg

SEQ ID NO: 191096 - DNA, 25 bp, Artificial
  Probe
gttgactgcagcacccaagttccga

SEQ ID NO: 191097 - DNA, 25 bp, Artificial
  Probe
caaagcacgaggagcgcggtgtaat

SEQ ID NO: 191098 - DNA, 25 bp, Artificial
  Probe
cctagcagcggcttctgacggatgg

SEQ ID NO: 191099 - DNA, 25 bp, Artificial
  Probe
ctcgactccaggacccggtcggaat

SEQ ID NO: 191100 - DNA, 25 bp, Artificial
  Probe
gtggaacatttcatttcgccccaat

SEQ ID NO: 191101 - DNA, 25 bp, Artificial
  Probe
tgtaccctacttgcttgagtgggtg

SEQ ID NO: 191102 - DNA, 25 bp, Artificial
  Probe
gtcccacaagacgtgggctgcactc

SEQ ID NO: 191103 - DNA, 25 bp, Artificial
  Probe
ggggctcatttgaatacccaaatat

SEQ ID NO: 191104 - DNA, 25 bp, Artificial
  Probe
ctttgggcctttggtgaggcttcag

SEQ ID NO: 191105 - DNA, 25 bp, Artificial
  Probe
ccctagcaacggttgccgggacacg

SEQ ID NO: 191106 - DNA, 25 bp, Artificial
  Probe
taggctcctcctagcagcggcttct

SEQ ID NO: 191107 - DNA, 25 bp, Artificial
  Probe
gcgaccgaggtgagcgtgcaacctc

SEQ ID NO: 191108 - DNA, 25 bp, Artificial
  Probe
caccacctgagtaaaaaccctgtcg

SEQ ID NO: 191109 - DNA, 25 bp, Artificial
  Probe
tgactttcggggtcgttcttcaagt

SEQ ID NO: 191110 - DNA, 25 bp, Artificial
  Probe
ttttctagtaagagcgatccccttc

SEQ ID NO: 191111 - DNA, 25 bp, Artificial
  Probe
ggagctctcttcaagatcatacttg

SEQ ID NO: 191112 - DNA, 25 bp, Artificial
  Probe
tacaaacatggagtttggggctgcc

SEQ ID NO: 191113 - DNA, 25 bp, Artificial
  Probe
tgctccatggattctggaggtttaa

SEQ ID NO: 191114 - DNA, 25 bp, Artificial
  Probe
gctctcttcaagatcatacttgaga

SEQ ID NO: 191115 - DNA, 25 bp, Artificial
  Probe
gtcatgtcaaaaataccataaggaa

SEQ ID NO: 191116 - DNA, 25 bp, Artificial
  Probe
attctacaaacatggagtttggggc

SEQ ID NO: 191117 - DNA, 25 bp, Artificial
  Probe
ctcctggaggatgaggagaaccaag

SEQ ID NO: 191118 - DNA, 25 bp, Artificial
  Probe
ttggggctgcccaaaggaacctgtt

SEQ ID NO: 191119 - DNA, 25 bp, Artificial
  Probe
tccctctgctccatggattctggag

SEQ ID NO: 191120 - DNA, 25 bp, Artificial
  Probe
atgcttatgtttgtactcctggagg

SEQ ID NO: 191121 - DNA, 25 bp, Artificial
  Probe
gtatggtgatcttagaggaggaccc

SEQ ID NO: 191122 - DNA, 25 bp, Artificial
  Probe
cttatgtttgtactcctggaggatg

SEQ ID NO: 191123 - DNA, 25 bp, Artificial
  Probe
ggagaaccaaggagctctcttcaag

SEQ ID NO: 191124 - DNA, 25 bp, Artificial
  Probe
agctctcttcaagatcatacttgag

SEQ ID NO: 191125 - DNA, 25 bp, Artificial
  Probe
caaacggttggaggtatagactgca

SEQ ID NO: 191126 - DNA, 25 bp, Artificial
  Probe
ctccctctgctccatggattctgga

SEQ ID NO: 191127 - DNA, 25 bp, Artificial
  Probe
aaggagctctcttcaagatcatact

SEQ ID NO: 191128 - DNA, 25 bp, Artificial
  Probe
ggaacctgtttataagcacctactc

SEQ ID NO: 191129 - DNA, 25 bp, Artificial
  Probe
aatgcttatgtttgtactcctggag

SEQ ID NO: 191130 - DNA, 25 bp, Artificial
  Probe
tactcctggaggatgaggagaacca

SEQ ID NO: 191131 - DNA, 25 bp, Artificial
  Probe
ggctgcccaaaggaacctgtttata

SEQ ID NO: 191132 - DNA, 25 bp, Artificial
  Probe
gtactcctggaggatgaggagaacc

SEQ ID NO: 191133 - DNA, 25 bp, Artificial
  Probe
gcttatgtttgtactcctggaggat

SEQ ID NO: 191134 - DNA, 25 bp, Artificial
  Probe
ctctgctccatggattctggaggtt

SEQ ID NO: 191135 - DNA, 25 bp, Artificial
  Probe
gggctgcccaaaggaacctgtttat

SEQ ID NO: 191136 - DNA, 25 bp, Artificial
  Probe
tctacaaacatggagtttggggctg

SEQ ID NO: 191137 - DNA, 25 bp, Artificial
  Probe
cctctgctccatggattctggaggt

SEQ ID NO: 191138 - DNA, 25 bp, Artificial
  Probe
gagaaccaaggagctctcttcaaga

SEQ ID NO: 191139 - DNA, 25 bp, Artificial
  Probe
tatggtgatcttagaggaggaccca

SEQ ID NO: 191140 - DNA, 25 bp, Artificial
  Probe
gcccaaaggaacctgtttataagca

SEQ ID NO: 191141 - DNA, 25 bp, Artificial
  Probe
agaaccaaggagctctcttcaagat

SEQ ID NO: 191142 - DNA, 25 bp, Artificial
  Probe
atggtgatcttagaggaggacccaa

SEQ ID NO: 191143 - DNA, 25 bp, Artificial
  Probe
accaaggagctctcttcaagatcat

SEQ ID NO: 191144 - DNA, 25 bp, Artificial
  Probe
cagtcatgtcaaaaataccataagg

SEQ ID NO: 191145 - DNA, 25 bp, Artificial
  Probe
ctccatggattctggaggtttaaca

SEQ ID NO: 191146 - DNA, 25 bp, Artificial
  Probe
caaggagctctcttcaagatcatac

SEQ ID NO: 191147 - DNA, 25 bp, Artificial
  Probe
ctgcccaaaggaacctgtttataag

SEQ ID NO: 191148 - DNA, 25 bp, Artificial
  Probe
ctgctccatggattctggaggttta

SEQ ID NO: 191149 - DNA, 25 bp, Artificial
  Probe
caaaggaacctgtttataagcacct

SEQ ID NO: 191150 - DNA, 25 bp, Artificial
  Probe
ttctacaaacatggagtttggggct

SEQ ID NO: 191151 - DNA, 25 bp, Artificial
  Probe
caaacatggagtttggggctgccca

SEQ ID NO: 191152 - DNA, 25 bp, Artificial
  Probe
tggggctgcccaaaggaacctgttt

SEQ ID NO: 191153 - DNA, 25 bp, Artificial
  Probe
tgcccaaaggaacctgtttataagc

SEQ ID NO: 191154 - DNA, 25 bp, Artificial
  Probe
tccatggattctggaggtttaacaa

SEQ ID NO: 191155 - DNA, 25 bp, Artificial
  Probe
tgtactcctggaggatgaggagaac

SEQ ID NO: 191156 - DNA, 25 bp, Artificial
  Probe
aaccaaggagctctcttcaagatca

SEQ ID NO: 191157 - DNA, 25 bp, Artificial
  Probe
tcagtgatgtccttaaaatgtggtc

SEQ ID NO: 191158 - DNA, 25 bp, Artificial
  Probe
tgccaaaacgtgtatgacaagctgt

SEQ ID NO: 191159 - DNA, 25 bp, Artificial
  Probe
tgtgtaccaccacactcagcaggga

SEQ ID NO: 191160 - DNA, 25 bp, Artificial
  Probe
agaccgacagtttggccatccctac

SEQ ID NO: 191161 - DNA, 25 bp, Artificial
  Probe
gagaatactgccaaaacgtgtatga

SEQ ID NO: 191162 - DNA, 25 bp, Artificial
  Probe
atgacaatcaaagctggcccgaaga

SEQ ID NO: 191163 - DNA, 25 bp, Artificial
  Probe
aaagctggcccgaagaacacaattt

SEQ ID NO: 191164 - DNA, 25 bp, Artificial
  Probe
ggcctctctatgtagccctggctgc

SEQ ID NO: 191165 - DNA, 25 bp, Artificial
  Probe
tttggccatccctaccagtacttgc

SEQ ID NO: 191166 - DNA, 25 bp, Artificial
  Probe
ccttgaactcccagagatccattgt

SEQ ID NO: 191167 - DNA, 25 bp, Artificial
  Probe
gaagcttctcagaccgacagtttgg

SEQ ID NO: 191168 - DNA, 25 bp, Artificial
  Probe
cagtgatgtccttaaaatgtggtct

SEQ ID NO: 191169 - DNA, 25 bp, Artificial
  Probe
gccaacctgtacaaaatggtcctat

SEQ ID NO: 191170 - DNA, 25 bp, Artificial
  Probe
tgtttctgagacagggcctctctat

SEQ ID NO: 191171 - DNA, 25 bp, Artificial
  Probe
tgcagagtcctggaagaaatttacc

SEQ ID NO: 191172 - DNA, 25 bp, Artificial
  Probe
ctggccttgaactcccagagatcca

SEQ ID NO: 191173 - DNA, 25 bp, Artificial
  Probe
atccctaccagtacttgcctctgag

SEQ ID NO: 191174 - DNA, 25 bp, Artificial
  Probe
tgcctctgagattaaatgggattgc

SEQ ID NO: 191175 - DNA, 25 bp, Artificial
  Probe
agtgttttgactgtatcctggtttc

SEQ ID NO: 191176 - DNA, 25 bp, Artificial
  Probe
atgtggtctgccaacctgtacaaaa

SEQ ID NO: 191177 - DNA, 25 bp, Artificial
  Probe
tcccagagatccattgtctctgtcc

SEQ ID NO: 191178 - DNA, 25 bp, Artificial
  Probe
tctttttggcctctgcagagtcctg

SEQ ID NO: 191179 - DNA, 25 bp, Artificial
  Probe
cctaccagtacttgcctctgagatt

SEQ ID NO: 191180 - DNA, 25 bp, Artificial
  Probe
tttgtttctgagacagggcctctct

SEQ ID NO: 191181 - DNA, 25 bp, Artificial
  Probe
ccagtacttgcctctgagattaaat

SEQ ID NO: 191182 - DNA, 25 bp, Artificial
  Probe
cttgcctctgagattaaatgggatt

SEQ ID NO: 191183 - DNA, 25 bp, Artificial
  Probe
gggattgctggtgtgtaccaccaca

SEQ ID NO: 191184 - DNA, 25 bp, Artificial
  Probe
cttctcagaccgacagtttggccat

SEQ ID NO: 191185 - DNA, 25 bp, Artificial
  Probe
tctatgtagccctggctgccctgga

SEQ ID NO: 191186 - DNA, 25 bp, Artificial
  Probe
gacagtttggccatccctaccagta

SEQ ID NO: 191187 - DNA, 25 bp, Artificial
  Probe
tgtaaaccaggctggccttgaactc

SEQ ID NO: 191188 - DNA, 25 bp, Artificial
  Probe
accaggctggccttgaactcccaga

SEQ ID NO: 191189 - DNA, 25 bp, Artificial
  Probe
tgatgtccttaaaatgtggtctgcc

SEQ ID NO: 191190 - DNA, 25 bp, Artificial
  Probe
ttaaaatgtggtctgccaacctgta

SEQ ID NO: 191191 - DNA, 25 bp, Artificial
  Probe
tgtagccctggctgccctggaactc

SEQ ID NO: 191192 - DNA, 25 bp, Artificial
  Probe
tggtgtgtaccaccacactcagcag

SEQ ID NO: 191193 - DNA, 25 bp, Artificial
  Probe
acagtttggccatccctaccagtac

SEQ ID NO: 191194 - DNA, 25 bp, Artificial
  Probe
cccgaagaacacaatttgtgacttt

SEQ ID NO: 191195 - DNA, 25 bp, Artificial
  Probe
gtatgacaagctgtatcactgcctt

SEQ ID NO: 191196 - DNA, 25 bp, Artificial
  Probe
gacaatcaaagctggcccgaagaac

SEQ ID NO: 191197 - DNA, 25 bp, Artificial
  Probe
atgatgacaatcaaagctggcccga

SEQ ID NO: 191198 - DNA, 25 bp, Artificial
  Probe
tgagacagggcctctctatgtagcc

SEQ ID NO: 191199 - DNA, 25 bp, Artificial
  Probe
aaacgtgtatgacaagctgtatcac

SEQ ID NO: 191200 - DNA, 25 bp, Artificial
  Probe
cctggctgccctggaactcactgtg

SEQ ID NO: 191201 - DNA, 25 bp, Artificial
  Probe
cactgtgtaaaccaggctggccttg

SEQ ID NO: 191202 - DNA, 25 bp, Artificial
  Probe
gctgggattgctggtgtgtaccacc

SEQ ID NO: 191203 - DNA, 25 bp, Artificial
  Probe
taagaccctgggtttagatggctta

SEQ ID NO: 191204 - DNA, 25 bp, Artificial
  Probe
ccctgggtttagatggcttatcagg

SEQ ID NO: 191205 - DNA, 25 bp, Artificial
  Probe
ctttggagacccagatgtttcagaa

SEQ ID NO: 191206 - DNA, 25 bp, Artificial
  Probe
aaccagagctccacctggggccagg

SEQ ID NO: 191207 - DNA, 25 bp, Artificial
  Probe
tcagaatgcacattctggaagccaa

SEQ ID NO: 191208 - DNA, 25 bp, Artificial
  Probe
caggcagacggcaaatcttccgaag

SEQ ID NO: 191209 - DNA, 25 bp, Artificial
  Probe
ttatcaggaaagagcacccattgct

SEQ ID NO: 191210 - DNA, 25 bp, Artificial
  Probe
atcctggaaactcttctacccagtg

SEQ ID NO: 191211 - DNA, 25 bp, Artificial
  Probe
ctgcccgggttttagagaagagaga

SEQ ID NO: 191212 - DNA, 25 bp, Artificial
  Probe
acgtgcgaagggacccacaatcctg

SEQ ID NO: 191213 - DNA, 25 bp, Artificial
  Probe
cctggataacccaataagaccctgg

SEQ ID NO: 191214 - DNA, 25 bp, Artificial
  Probe
cgcgtccaccagctctctagtgtgg

SEQ ID NO: 191215 - DNA, 25 bp, Artificial
  Probe
gcgaagggacccacaatcctggaaa

SEQ ID NO: 191216 - DNA, 25 bp, Artificial
  Probe
tggataacccaataagaccctgggt

SEQ ID NO: 191217 - DNA, 25 bp, Artificial
  Probe
attctggaagccaatggctactccc

SEQ ID NO: 191218 - DNA, 25 bp, Artificial
  Probe
accacagattgatccctaaggacac

SEQ ID NO: 191219 - DNA, 25 bp, Artificial
  Probe
tcaggaaagagcacccattgctaag

SEQ ID NO: 191220 - DNA, 25 bp, Artificial
  Probe
ccaccactgacaatgttgctgctgt

SEQ ID NO: 191221 - DNA, 25 bp, Artificial
  Probe
acacgtccaccatggcagatgcaca

SEQ ID NO: 191222 - DNA, 25 bp, Artificial
  Probe
ccaataagaccctgggtttagatgg

SEQ ID NO: 191223 - DNA, 25 bp, Artificial
  Probe
gacggcaaatcttccgaaggctgtg

SEQ ID NO: 191224 - DNA, 25 bp, Artificial
  Probe
tctggaagccaatggctactcccac

SEQ ID NO: 191225 - DNA, 25 bp, Artificial
  Probe
gagagtgcaagtctatcctggataa

SEQ ID NO: 191226 - DNA, 25 bp, Artificial
  Probe
gcagacaggcagacggcaaatcttc

SEQ ID NO: 191227 - DNA, 25 bp, Artificial
  Probe
ttctacccagtggttccacaaccag

SEQ ID NO: 191228 - DNA, 25 bp, Artificial
  Probe
aatgactttggagacccagatgttt

SEQ ID NO: 191229 - DNA, 25 bp, Artificial
  Probe
acccagatgtttcagaatgcacatt

SEQ ID NO: 191230 - DNA, 25 bp, Artificial
  Probe
acccagtggttccacaaccagagct

SEQ ID NO: 191231 - DNA, 25 bp, Artificial
  Probe
tggaaactcttctacccagtggttc

SEQ ID NO: 191232 - DNA, 25 bp, Artificial
  Probe
ccctaaggacacagggcaaagggag

SEQ ID NO: 191233 - DNA, 25 bp, Artificial
  Probe
caccatcactgtccaaggttcagca

SEQ ID NO: 191234 - DNA, 25 bp, Artificial
  Probe
ggacccacaatcctggaaactcttc

SEQ ID NO: 191235 - DNA, 25 bp, Artificial
  Probe
gtccaaggttcagcaaccgcgtcca

SEQ ID NO: 191236 - DNA, 25 bp, Artificial
  Probe
gcacattctggaagccaatggctac

SEQ ID NO: 191237 - DNA, 25 bp, Artificial
  Probe
gcttttgcagacaggcagacggcaa

SEQ ID NO: 191238 - DNA, 25 bp, Artificial
  Probe
gggccaggtccaagccagctacacg

SEQ ID NO: 191239 - DNA, 25 bp, Artificial
  Probe
aggaggatcaccaaaggctgcccgg

SEQ ID NO: 191240 - DNA, 25 bp, Artificial
  Probe
agtggttccacaaccagagctccac

SEQ ID NO: 191241 - DNA, 25 bp, Artificial
  Probe
gtctatcctggataacccaataaga

SEQ ID NO: 191242 - DNA, 25 bp, Artificial
  Probe
acctggggccaggtccaagccagct

SEQ ID NO: 191243 - DNA, 25 bp, Artificial
  Probe
agactctgacccagttcttgaatga

SEQ ID NO: 191244 - DNA, 25 bp, Artificial
  Probe
catcagactctgacccagttcttga

SEQ ID NO: 191245 - DNA, 25 bp, Artificial
  Probe
gaggatcaccaaaggctgcccgggt

SEQ ID NO: 191246 - DNA, 25 bp, Artificial
  Probe
gaaagagcacccattgctaagctca

SEQ ID NO: 191247 - DNA, 25 bp, Artificial
  Probe
gaatggcgcacaccagcctcagcga

SEQ ID NO: 191248 - DNA, 25 bp, Artificial
  Probe
ccagctctctagtgtggttccatgc

SEQ ID NO: 191249 - DNA, 25 bp, Artificial
  Probe
ccttcctctgggttctgtactctaa

SEQ ID NO: 191250 - DNA, 25 bp, Artificial
  Probe
ggatgaacggggaccgcatcgactc

SEQ ID NO: 191251 - DNA, 25 bp, Artificial
  Probe
catgttccagcctttctttgatatg

SEQ ID NO: 191252 - DNA, 25 bp, Artificial
  Probe
acagaagcatcagttttctatatgt

SEQ ID NO: 191253 - DNA, 25 bp, Artificial
  Probe
tcccggatgtggatttcttaaaaga

SEQ ID NO: 191254 - DNA, 25 bp, Artificial
  Probe
taggagtctcaaggagggaatctcc

SEQ ID NO: 191255 - DNA, 25 bp, Artificial
  Probe
gctccatagcccagctttacagttc

SEQ ID NO: 191256 - DNA, 25 bp, Artificial
  Probe
agccgcatggaatgagacagaagca

SEQ ID NO: 191257 - DNA, 25 bp, Artificial
  Probe
gtaggagtctcaaggagggaatctc

SEQ ID NO: 191258 - DNA, 25 bp, Artificial
  Probe
aacgagctgcttcattccctccagt

SEQ ID NO: 191259 - DNA, 25 bp, Artificial
  Probe
actacgggcctctgagcttccacaa

SEQ ID NO: 191260 - DNA, 25 bp, Artificial
  Probe
tgcccaggctaacctgcgccaggag

SEQ ID NO: 191261 - DNA, 25 bp, Artificial
  Probe
ctacgcacgcgtctgcaggagcggc

SEQ ID NO: 191262 - DNA, 25 bp, Artificial
  Probe
agggaatctcccagctttccgaggt

SEQ ID NO: 191263 - DNA, 25 bp, Artificial
  Probe
tgttcgaccaacaatcctgcccagg

SEQ ID NO: 191264 - DNA, 25 bp, Artificial
  Probe
agagggtgctctagatgacaccagg

SEQ ID NO: 191265 - DNA, 25 bp, Artificial
  Probe
atgagccccaggacatccaccattt

SEQ ID NO: 191266 - DNA, 25 bp, Artificial
  Probe
caccagggattctgaaatgaagctg

SEQ ID NO: 191267 - DNA, 25 bp, Artificial
  Probe
tgctcaacagtttagaggaagccaa

SEQ ID NO: 191268 - DNA, 25 bp, Artificial
  Probe
cagttttctatatgtaggagtctca

SEQ ID NO: 191269 - DNA, 25 bp, Artificial
  Probe
ataactccacaggatgcctgaagat

SEQ ID NO: 191270 - DNA, 25 bp, Artificial
  Probe
agaagtgccaagagatcttgtctgt

SEQ ID NO: 191271 - DNA, 25 bp, Artificial
  Probe
gaagtctccaaggataaccctaagt

SEQ ID NO: 191272 - DNA, 25 bp, Artificial
  Probe
ttccaggaccggttcttcacccatg

SEQ ID NO: 191273 - DNA, 25 bp, Artificial
  Probe
ggttcttcacccatgagccccagga

SEQ ID NO: 191274 - DNA, 25 bp, Artificial
  Probe
acacagtggcagagaaagcgctaca

SEQ ID NO: 191275 - DNA, 25 bp, Artificial
  Probe
acctcatccctgctggaacagctga

SEQ ID NO: 191276 - DNA, 25 bp, Artificial
  Probe
ccctctgggaagagtgtaagccctg

SEQ ID NO: 191277 - DNA, 25 bp, Artificial
  Probe
ctctaatgcctgcacttgatgctct

SEQ ID NO: 191278 - DNA, 25 bp, Artificial
  Probe
ccagctagaggagtttctgaaccag

SEQ ID NO: 191279 - DNA, 25 bp, Artificial
  Probe
atggacgtccagctccatagcccag

SEQ ID NO: 191280 - DNA, 25 bp, Artificial
  Probe
gttggtcgccagctagaggagtttc

SEQ ID NO: 191281 - DNA, 25 bp, Artificial
  Probe
gagcttccacaacatgttccagcct

SEQ ID NO: 191282 - DNA, 25 bp, Artificial
  Probe
acacaagcggcctcatttcttgtac

SEQ ID NO: 191283 - DNA, 25 bp, Artificial
  Probe
gagtgtaagccctgcctgaagcaca

SEQ ID NO: 191284 - DNA, 25 bp, Artificial
  Probe
aggttgctgcagacccctagagaac

SEQ ID NO: 191285 - DNA, 25 bp, Artificial
  Probe
tcttgtaccccaagtcccgcttggt

SEQ ID NO: 191286 - DNA, 25 bp, Artificial
  Probe
aaagcgctacaggaataccgcagga

SEQ ID NO: 191287 - DNA, 25 bp, Artificial
  Probe
ggtgaagctgtttgactctgacccc

SEQ ID NO: 191288 - DNA, 25 bp, Artificial
  Probe
cagagctcacccttctacttctgga

SEQ ID NO: 191289 - DNA, 25 bp, Artificial
  Probe
gaagctgaaggctttcccggaagtg

SEQ ID NO: 191290 - DNA, 25 bp, Artificial
  Probe
ggacagcttcactcgggcgtctggc

SEQ ID NO: 191291 - DNA, 25 bp, Artificial
  Probe
gaagatgacccgacagtgtgcaagg

SEQ ID NO: 191292 - DNA, 25 bp, Artificial
  Probe
gtgacaacccattcttctgactcag

SEQ ID NO: 191293 - DNA, 25 bp, Artificial
  Probe
ggataaccctaagtttatggacaca

SEQ ID NO: 191294 - DNA, 25 bp, Artificial
  Probe
gcatcgactccctgctggagagtga

SEQ ID NO: 191295 - DNA, 25 bp, Artificial
  Probe
tactgttgaaacagaccatagatac

SEQ ID NO: 191296 - DNA, 25 bp, Artificial
  Probe
ttaactgattcagaaaagggcctgt

SEQ ID NO: 191297 - DNA, 25 bp, Artificial
  Probe
atgttttgcagaaatggctactaca

SEQ ID NO: 191298 - DNA, 25 bp, Artificial
  Probe
gctactacagaccaacaaagaccag

SEQ ID NO: 191299 - DNA, 25 bp, Artificial
  Probe
agcagttctagcataacaaggatat

SEQ ID NO: 191300 - DNA, 25 bp, Artificial
  Probe
tcatatttgccaagccaacaaggaa

SEQ ID NO: 191301 - DNA, 25 bp, Artificial
  Probe
gcacccaatgcatagaataacacag

SEQ ID NO: 191302 - DNA, 25 bp, Artificial
  Probe
cagttaccgtaatgttttgcagaaa

SEQ ID NO: 191303 - DNA, 25 bp, Artificial
  Probe
ctcaaagattgcacccaatgcatag

SEQ ID NO: 191304 - DNA, 25 bp, Artificial
  Probe
atttgccaagccaacaaggaaatgg

SEQ ID NO: 191305 - DNA, 25 bp, Artificial
  Probe
tcattttgagaatcaaccagttcga

SEQ ID NO: 191306 - DNA, 25 bp, Artificial
  Probe
aatatcagttgactcaaagattgca

SEQ ID NO: 191307 - DNA, 25 bp, Artificial
  Probe
aggacactgtgagcacattactgtt

SEQ ID NO: 191308 - DNA, 25 bp, Artificial
  Probe
agtggagcagttctagcataacaag

SEQ ID NO: 191309 - DNA, 25 bp, Artificial
  Probe
acagaccatagatacagggtaaaat

SEQ ID NO: 191310 - DNA, 25 bp, Artificial
  Probe
agctgaagttaatccaccaggacac

SEQ ID NO: 191311 - DNA, 25 bp, Artificial
  Probe
gaaacagaccatagatacagggtaa

SEQ ID NO: 191312 - DNA, 25 bp, Artificial
  Probe
cagttctagcataacaaggatataa

SEQ ID NO: 191313 - DNA, 25 bp, Artificial
  Probe
gaaatggctactacagaccaacaaa

SEQ ID NO: 191314 - DNA, 25 bp, Artificial
  Probe
atctgatgagtggagcagttctagc

SEQ ID NO: 191315 - DNA, 25 bp, Artificial
  Probe
ctgattcagaaaagggcctgtatca

SEQ ID NO: 191316 - DNA, 25 bp, Artificial
  Probe
gcctgtatcaactctcgagaatttt

SEQ ID NO: 191317 - DNA, 25 bp, Artificial
  Probe
tctttcttaactgattcagaaaagg

SEQ ID NO: 191318 - DNA, 25 bp, Artificial
  Probe
taccagttaccgtaatgttttgcag

SEQ ID NO: 191319 - DNA, 25 bp, Artificial
  Probe
gcacattactgttgaaacagaccat

SEQ ID NO: 191320 - DNA, 25 bp, Artificial
  Probe
gaataacacagcaaattggattcaa

SEQ ID NO: 191321 - DNA, 25 bp, Artificial
  Probe
aaagggcctgtatcaactctcgaga

SEQ ID NO: 191322 - DNA, 25 bp, Artificial
  Probe
gttccataagcgatatgttggactg

SEQ ID NO: 191323 - DNA, 25 bp, Artificial
  Probe
ttccataagcgatatgttggactgg

SEQ ID NO: 191324 - DNA, 25 bp, Artificial
  Probe
taccgtaatgttttgcagaaatggc

SEQ ID NO: 191325 - DNA, 25 bp, Artificial
  Probe
tgcagaaatggctactacagaccaa

SEQ ID NO: 191326 - DNA, 25 bp, Artificial
  Probe
aagattgcacccaatgcatagaata

SEQ ID NO: 191327 - DNA, 25 bp, Artificial
  Probe
cttggttccataagcgatatgttgg

SEQ ID NO: 191328 - DNA, 25 bp, Artificial
  Probe
accaggacactgtgagcacattact

SEQ ID NO: 191329 - DNA, 25 bp, Artificial
  Probe
gccaagccaacaaggaaatgggaaa

SEQ ID NO: 191330 - DNA, 25 bp, Artificial
  Probe
accagctgaagttaatccaccagga

SEQ ID NO: 191331 - DNA, 25 bp, Artificial
  Probe
ttttgagaatcaaccagttcgattt

SEQ ID NO: 191332 - DNA, 25 bp, Artificial
  Probe
ctggatctgatgagtggagcagttc

SEQ ID NO: 191333 - DNA, 25 bp, Artificial
  Probe
gcaaataccagttaccgtaatgttt

SEQ ID NO: 191334 - DNA, 25 bp, Artificial
  Probe
aaagcaaataccagttaccgtaatg

SEQ ID NO: 191335 - DNA, 25 bp, Artificial
  Probe
gattgcacccaatgcatagaataac

SEQ ID NO: 191336 - DNA, 25 bp, Artificial
  Probe
caaagaccagctgaagttaatccac

SEQ ID NO: 191337 - DNA, 25 bp, Artificial
  Probe
tagaataacacagcaaattggattc

SEQ ID NO: 191338 - DNA, 25 bp, Artificial
  Probe
ctcatatttgccaagccaacaagga

SEQ ID NO: 191339 - DNA, 25 bp, Artificial
  Probe
actacagaccaacaaagaccagctg

SEQ ID NO: 191340 - DNA, 25 bp, Artificial
  Probe
caacaaagaccagctgaagttaatc

SEQ ID NO: 191341 - DNA, 25 bp, Artificial
  Probe
acttcataagtatagacgagagcag

SEQ ID NO: 191342 - DNA, 25 bp, Artificial
  Probe
acgagagcagagcactctgtggagt

SEQ ID NO: 191343 - DNA, 25 bp, Artificial
  Probe
gcgacatgtctcatacttcataagt

SEQ ID NO: 191344 - DNA, 25 bp, Artificial
  Probe
gatttacccagcttgagatttttcc

SEQ ID NO: 191345 - DNA, 25 bp, Artificial
  Probe
caatgattcaactggaagaggtgct

SEQ ID NO: 191346 - DNA, 25 bp, Artificial
  Probe
cccagtgacatagatgctctcagag

SEQ ID NO: 191347 - DNA, 25 bp, Artificial
  Probe
acccagcttgagatttttcccagcc

SEQ ID NO: 191348 - DNA, 25 bp, Artificial
  Probe
actgtgtctcagaggggaaacccag

SEQ ID NO: 191349 - DNA, 25 bp, Artificial
  Probe
agatgctctcagagagggagagaac

SEQ ID NO: 191350 - DNA, 25 bp, Artificial
  Probe
cactctgtggagtctcctgttagca

SEQ ID NO: 191351 - DNA, 25 bp, Artificial
  Probe
cagcctaagcaggtgggcactgtgt

SEQ ID NO: 191352 - DNA, 25 bp, Artificial
  Probe
ggtcttctaatagctaagcattttc

SEQ ID NO: 191353 - DNA, 25 bp, Artificial
  Probe
aggagtctgtgtgagtggacctaca

SEQ ID NO: 191354 - DNA, 25 bp, Artificial
  Probe
tcaactggaagaggtgcttttacaa

SEQ ID NO: 191355 - DNA, 25 bp, Artificial
  Probe
tgccagcctaagcaggtgggcactg

SEQ ID NO: 191356 - DNA, 25 bp, Artificial
  Probe
gatgctctcagagagggagagaaca

SEQ ID NO: 191357 - DNA, 25 bp, Artificial
  Probe
tgcccaagaaatgcatttaacatgt

SEQ ID NO: 191358 - DNA, 25 bp, Artificial
  Probe
aggagcgacatgtctcatacttcat

SEQ ID NO: 191359 - DNA, 25 bp, Artificial
  Probe
gtctcctgttagcagccttaccact

SEQ ID NO: 191360 - DNA, 25 bp, Artificial
  Probe
ttacccagcttgagatttttcccag

SEQ ID NO: 191361 - DNA, 25 bp, Artificial
  Probe
gtctcagaggggaaacccagtgaca

SEQ ID NO: 191362 - DNA, 25 bp, Artificial
  Probe
aagcaggtgggcactgtgtctcaga

SEQ ID NO: 191363 - DNA, 25 bp, Artificial
  Probe
catagatgctctcagagagggagag

SEQ ID NO: 191364 - DNA, 25 bp, Artificial
  Probe
cctataaatgccagcctaagcaggt

SEQ ID NO: 191365 - DNA, 25 bp, Artificial
  Probe
attcaactggaagaggtgcttttac

SEQ ID NO: 191366 - DNA, 25 bp, Artificial
  Probe
ttctgaggagcgacatgtctcatac

SEQ ID NO: 191367 - DNA, 25 bp, Artificial
  Probe
tctgtgtgagtggacctacaaggtc

SEQ ID NO: 191368 - DNA, 25 bp, Artificial
  Probe
atagctaagcattttcttgtcctag

SEQ ID NO: 191369 - DNA, 25 bp, Artificial
  Probe
aggggaaacccagtgacatagatgc

SEQ ID NO: 191370 - DNA, 25 bp, Artificial
  Probe
agcctaagcaggtgggcactgtgtc

SEQ ID NO: 191371 - DNA, 25 bp, Artificial
  Probe
tctcagaggggaaacccagtgacat

SEQ ID NO: 191372 - DNA, 25 bp, Artificial
  Probe
gccagcctaagcaggtgggcactgt

SEQ ID NO: 191373 - DNA, 25 bp, Artificial
  Probe
ggcactgtgtctcagaggggaaacc

SEQ ID NO: 191374 - DNA, 25 bp, Artificial
  Probe
taagatttacccagcttgagatttt

SEQ ID NO: 191375 - DNA, 25 bp, Artificial
  Probe
ggggccacaatgattcaactggaag

SEQ ID NO: 191376 - DNA, 25 bp, Artificial
  Probe
acatgttcagaacaggggctccctc

SEQ ID NO: 191377 - DNA, 25 bp, Artificial
  Probe
agaacatgttcagaacaggggctcc

SEQ ID NO: 191378 - DNA, 25 bp, Artificial
  Probe
tcgtttctgaggagcgacatgtctc

SEQ ID NO: 191379 - DNA, 25 bp, Artificial
  Probe
atacttcataagtatagacgagagc

SEQ ID NO: 191380 - DNA, 25 bp, Artificial
  Probe
ctgaggagcgacatgtctcatactt

SEQ ID NO: 191381 - DNA, 25 bp, Artificial
  Probe
tgtgtgagtggacctacaaggtctt

SEQ ID NO: 191382 - DNA, 25 bp, Artificial
  Probe
taaatgccagcctaagcaggtgggc

SEQ ID NO: 191383 - DNA, 25 bp, Artificial
  Probe
ctcctaagatttacccagcttgaga

SEQ ID NO: 191384 - DNA, 25 bp, Artificial
  Probe
cctacaaggtcttctaatagctaag

SEQ ID NO: 191385 - DNA, 25 bp, Artificial
  Probe
tctcctaagatttacccagcttgag

SEQ ID NO: 191386 - DNA, 25 bp, Artificial
  Probe
gagagcagagcactctgtggagtct

SEQ ID NO: 191387 - DNA, 25 bp, Artificial
  Probe
agaaggactgggacagtttgctcaa

SEQ ID NO: 191388 - DNA, 25 bp, Artificial
  Probe
ttattcgtttcaatgttcctaatgg

SEQ ID NO: 191389 - DNA, 25 bp, Artificial
  Probe
tcaccacacaggagctggctgacgc

SEQ ID NO: 191390 - DNA, 25 bp, Artificial
  Probe
gatcccaacttcatcgaggtcacca

SEQ ID NO: 191391 - DNA, 25 bp, Artificial
  Probe
gctcccggacagcaggtcctatgtc

SEQ ID NO: 191392 - DNA, 25 bp, Artificial
  Probe
actgggacagtttgctcaagatccc

SEQ ID NO: 191393 - DNA, 25 bp, Artificial
  Probe
caatgttcctaatgggttcgtttca

SEQ ID NO: 191394 - DNA, 25 bp, Artificial
  Probe
gcagacagttccacggcagcgccag

SEQ ID NO: 191395 - DNA, 25 bp, Artificial
  Probe
ggagctccaggcagacagttccacg

SEQ ID NO: 191396 - DNA, 25 bp, Artificial
  Probe
ggacagtttgctcaagatcccaact

SEQ ID NO: 191397 - DNA, 25 bp, Artificial
  Probe
gtcttgatttcagaaggactgggac

SEQ ID NO: 191398 - DNA, 25 bp, Artificial
  Probe
gccgcagacaacatcctcagcgggg

SEQ ID NO: 191399 - DNA, 25 bp, Artificial
  Probe
ccagaggacgagagctgtgtatatg

SEQ ID NO: 191400 - DNA, 25 bp, Artificial
  Probe
ctatgtcagcaacctgtagtccgca

SEQ ID NO: 191401 - DNA, 25 bp, Artificial
  Probe
cagcctggtggaagcggtcttgatt

SEQ ID NO: 191402 - DNA, 25 bp, Artificial
  Probe
ttcagaagtgcctcactgttctcgt

SEQ ID NO: 191403 - DNA, 25 bp, Artificial
  Probe
acaggagctggctgacgcctgcgat

SEQ ID NO: 191404 - DNA, 25 bp, Artificial
  Probe
agcgctcccggacagcaggtcctat

SEQ ID NO: 191405 - DNA, 25 bp, Artificial
  Probe
ccagcagcctggtggaagcggtctt

SEQ ID NO: 191406 - DNA, 25 bp, Artificial
  Probe
tcttgatttcagaaggactgggaca

SEQ ID NO: 191407 - DNA, 25 bp, Artificial
  Probe
cgcctgcgatatgacaatagaggag

SEQ ID NO: 191408 - DNA, 25 bp, Artificial
  Probe
ccacacaggagctggctgacgcctg

SEQ ID NO: 191409 - DNA, 25 bp, Artificial
  Probe
gtcccagaggacgagagctgtgtat

SEQ ID NO: 191410 - DNA, 25 bp, Artificial
  Probe
agcaacctgtagtccgcagggctgg

SEQ ID NO: 191411 - DNA, 25 bp, Artificial
  Probe
ggttcgtttcagaagtgcctcactg

SEQ ID NO: 191412 - DNA, 25 bp, Artificial
  Probe
gagaacgccgcagacaacatcctca

SEQ ID NO: 191413 - DNA, 25 bp, Artificial
  Probe
tttgtgaactgcagggacccagggc

SEQ ID NO: 191414 - DNA, 25 bp, Artificial
  Probe
aagcgctcccggacagcaggtccta

SEQ ID NO: 191415 - DNA, 25 bp, Artificial
  Probe
tttcagaaggactgggacagtttgc

SEQ ID NO: 191416 - DNA, 25 bp, Artificial
  Probe
aggactgggacagtttgctcaagat

SEQ ID NO: 191417 - DNA, 25 bp, Artificial
  Probe
gaagcggtcttgatttcagaaggac

SEQ ID NO: 191418 - DNA, 25 bp, Artificial
  Probe
caacttcatcgaggtcaccacacag

SEQ ID NO: 191419 - DNA, 25 bp, Artificial
  Probe
ggcaccctcttaccttttgtgaact

SEQ ID NO: 191420 - DNA, 25 bp, Artificial
  Probe
cagcaggtcctatgtcagcaacctg

SEQ ID NO: 191421 - DNA, 25 bp, Artificial
  Probe
gacagtttgctcaagatcccaactt

SEQ ID NO: 191422 - DNA, 25 bp, Artificial
  Probe
ccctcttaccttttgtgaactgcag

SEQ ID NO: 191423 - DNA, 25 bp, Artificial
  Probe
gcaccctcttaccttttgtgaactg

SEQ ID NO: 191424 - DNA, 25 bp, Artificial
  Probe
ctggctgacgcctgcgatatgacaa

SEQ ID NO: 191425 - DNA, 25 bp, Artificial
  Probe
gctcaagatcccaacttcatcgagg

SEQ ID NO: 191426 - DNA, 25 bp, Artificial
  Probe
cctatgtcagcaacctgtagtccgc

SEQ ID NO: 191427 - DNA, 25 bp, Artificial
  Probe
cgaggtcaccacacaggagctggct

SEQ ID NO: 191428 - DNA, 25 bp, Artificial
  Probe
gttcctaatgggttcgtttcagaag

SEQ ID NO: 191429 - DNA, 25 bp, Artificial
  Probe
ggctggagctccaggcagacagttc

SEQ ID NO: 191430 - DNA, 25 bp, Artificial
  Probe
ctgacgcctgcgatatgacaataga

SEQ ID NO: 191431 - DNA, 25 bp, Artificial
  Probe
atgtcagcaacctgtagtccgcagg

SEQ ID NO: 191432 - DNA, 25 bp, Artificial
  Probe
aggagctggctgacgcctgcgatat

SEQ ID NO: 191433 - DNA, 25 bp, Artificial
  Probe
agccaagaggacttctctctcattc

SEQ ID NO: 191434 - DNA, 25 bp, Artificial
  Probe
agaggacttctctctcattctggag

SEQ ID NO: 191435 - DNA, 25 bp, Artificial
  Probe
tggaagctgcagtcacccaaagccc

SEQ ID NO: 191436 - DNA, 25 bp, Artificial
  Probe
gtcgccagactaataaccacgacta

SEQ ID NO: 191437 - DNA, 25 bp, Artificial
  Probe
atggaagctgcagtcacccaaagcc

SEQ ID NO: 191438 - DNA, 25 bp, Artificial
  Probe
tgacattgagctgtcgccagactaa

SEQ ID NO: 191439 - DNA, 25 bp, Artificial
  Probe
aagaggacttctctctcattctgga

SEQ ID NO: 191440 - DNA, 25 bp, Artificial
  Probe
gtgacattgagctgtcgccagacta

SEQ ID NO: 191441 - DNA, 25 bp, Artificial
  Probe
catggaagctgcagtcacccaaagc

SEQ ID NO: 191442 - DNA, 25 bp, Artificial
  Probe
agctgtcgccagactaataaccacg

SEQ ID NO: 191443 - DNA, 25 bp, Artificial
  Probe
gaggacttctctctcattctggagt

SEQ ID NO: 191444 - DNA, 25 bp, Artificial
  Probe
acatggaagctgcagtcacccaaag

SEQ ID NO: 191445 - DNA, 25 bp, Artificial
  Probe
cttctctctcattctggagtcagct

SEQ ID NO: 191446 - DNA, 25 bp, Artificial
  Probe
ctgtcgccagactaataaccacgac

SEQ ID NO: 191447 - DNA, 25 bp, Artificial
  Probe
gacttctctctcattctggagtcag

SEQ ID NO: 191448 - DNA, 25 bp, Artificial
  Probe
gacattgagctgtcgccagactaat

SEQ ID NO: 191449 - DNA, 25 bp, Artificial
  Probe
gaccaagccaagaggacttctctct

SEQ ID NO: 191450 - DNA, 25 bp, Artificial
  Probe
tctgtgccagcagtgataactgggg

SEQ ID NO: 191451 - DNA, 25 bp, Artificial
  Probe
cctcaagaccaagccaagaggactt

SEQ ID NO: 191452 - DNA, 25 bp, Artificial
  Probe
ctctcattctggagtcagcttctct

SEQ ID NO: 191453 - DNA, 25 bp, Artificial
  Probe
ctctctcattctggagtcagcttct

SEQ ID NO: 191454 - DNA, 25 bp, Artificial
  Probe
caagaccaagccaagaggacttctc

SEQ ID NO: 191455 - DNA, 25 bp, Artificial
  Probe
cacatggaagctgcagtcacccaaa

SEQ ID NO: 191456 - DNA, 25 bp, Artificial
  Probe
aaggcctcaagaccaagccaagagg

SEQ ID NO: 191457 - DNA, 25 bp, Artificial
  Probe
aggcctcaagaccaagccaagagga

SEQ ID NO: 191458 - DNA, 25 bp, Artificial
  Probe
aggtgacattgagctgtcgccagac

SEQ ID NO: 191459 - DNA, 25 bp, Artificial
  Probe
aagaccaagccaagaggacttctct

SEQ ID NO: 191460 - DNA, 25 bp, Artificial
  Probe
gcctcaagaccaagccaagaggact

SEQ ID NO: 191461 - DNA, 25 bp, Artificial
  Probe
ggtgacattgagctgtcgccagact

SEQ ID NO: 191462 - DNA, 25 bp, Artificial
  Probe
ggacttctctctcattctggagtca

SEQ ID NO: 191463 - DNA, 25 bp, Artificial
  Probe
tctcattctggagtcagcttctctc

SEQ ID NO: 191464 - DNA, 25 bp, Artificial
  Probe
aggacttctctctcattctggagtc

SEQ ID NO: 191465 - DNA, 25 bp, Artificial
  Probe
accaagccaagaggacttctctctc

SEQ ID NO: 191466 - DNA, 25 bp, Artificial
  Probe
acttctctctcattctggagtcagc

SEQ ID NO: 191467 - DNA, 25 bp, Artificial
  Probe
gccaagaggacttctctctcattct

SEQ ID NO: 191468 - DNA, 25 bp, Artificial
  Probe
ggcctcaagaccaagccaagaggac

SEQ ID NO: 191469 - DNA, 25 bp, Artificial
  Probe
acacatggaagctgcagtcacccaa

SEQ ID NO: 191470 - DNA, 25 bp, Artificial
  Probe
gagctgtcgccagactaataaccac

SEQ ID NO: 191471 - DNA, 25 bp, Artificial
  Probe
caaggcctcaagaccaagccaagag

SEQ ID NO: 191472 - DNA, 25 bp, Artificial
  Probe
caagaggacttctctctcattctgg

SEQ ID NO: 191473 - DNA, 25 bp, Artificial
  Probe
aacacatggaagctgcagtcaccca

SEQ ID NO: 191474 - DNA, 25 bp, Artificial
  Probe
tgagctgtcgccagactaataacca

SEQ ID NO: 191475 - DNA, 25 bp, Artificial
  Probe
tgtcgccagactaataaccacgact

SEQ ID NO: 191476 - DNA, 25 bp, Artificial
  Probe
ccaagaggacttctctctcattctg

SEQ ID NO: 191477 - DNA, 25 bp, Artificial
  Probe
gctgtcgccagactaataaccacga

SEQ ID NO: 191478 - DNA, 25 bp, Artificial
  Probe
caagccaagaggacttctctctcat

SEQ ID NO: 191479 - DNA, 25 bp, Artificial
  Probe
ttccttctatatgtaaagagaacag

SEQ ID NO: 191480 - DNA, 25 bp, Artificial
  Probe
acagaaccatgtcagttacagtgca

SEQ ID NO: 191481 - DNA, 25 bp, Artificial
  Probe
ccccctctgtgatgataaacagaat

SEQ ID NO: 191482 - DNA, 25 bp, Artificial
  Probe
cagttacagtgcatagtcaaagggg

SEQ ID NO: 191483 - DNA, 25 bp, Artificial
  Probe
tctggcttgtctgagccttttttcc

SEQ ID NO: 191484 - DNA, 25 bp, Artificial
  Probe
tcttagagggttttaggtagacaga

SEQ ID NO: 191485 - DNA, 25 bp, Artificial
  Probe
aggaagtatcctttctggcttgtct

SEQ ID NO: 191486 - DNA, 25 bp, Artificial
  Probe
ccctctgtgatgataaacagaattc

SEQ ID NO: 191487 - DNA, 25 bp, Artificial
  Probe
cctttctggcttgtctgagcctttt

SEQ ID NO: 191488 - DNA, 25 bp, Artificial
  Probe
accatgtcagttacagtgcatagtc

SEQ ID NO: 191489 - DNA, 25 bp, Artificial
  Probe
cagaaccatgtcagttacagtgcat

SEQ ID NO: 191490 - DNA, 25 bp, Artificial
  Probe
aaccatgtcagttacagtgcatagt

SEQ ID NO: 191491 - DNA, 25 bp, Artificial
  Probe
gaaccatgtcagttacagtgcatag

SEQ ID NO: 191492 - DNA, 25 bp, Artificial
  Probe
ttcttagagggttttaggtagacag

SEQ ID NO: 191493 - DNA, 25 bp, Artificial
  Probe
cttccttctatatgtaaagagaaca

SEQ ID NO: 191494 - DNA, 25 bp, Artificial
  Probe
aacagaaccatgtcagttacagtgc

SEQ ID NO: 191495 - DNA, 25 bp, Artificial
  Probe
tcctttctggcttgtctgagccttt

SEQ ID NO: 191496 - DNA, 25 bp, Artificial
  Probe
agaacagaaccatgtcagttacagt

SEQ ID NO: 191497 - DNA, 25 bp, Artificial
  Probe
tttttccccctctgtgatgataaac

SEQ ID NO: 191498 - DNA, 25 bp, Artificial
  Probe
caggaagtatcctttctggcttgtc

SEQ ID NO: 191499 - DNA, 25 bp, Artificial
  Probe
tcagttacagtgcatagtcaaaggg

SEQ ID NO: 191500 - DNA, 25 bp, Artificial
  Probe
aagcaaagcaagggtactggacatt

SEQ ID NO: 191501 - DNA, 25 bp, Artificial
  Probe
tccttctatatgtaaagagaacaga

SEQ ID NO: 191502 - DNA, 25 bp, Artificial
  Probe
gcaggaagtatcctttctggcttgt

SEQ ID NO: 191503 - DNA, 25 bp, Artificial
  Probe
gagccttttttccccctctgtgatg

SEQ ID NO: 191504 - DNA, 25 bp, Artificial
  Probe
ctggcttgtctgagccttttttccc

SEQ ID NO: 191505 - DNA, 25 bp, Artificial
  Probe
gaagtatcctttctggcttgtctga

SEQ ID NO: 191506 - DNA, 25 bp, Artificial
  Probe
tgtcagttacagtgcatagtcaaag

SEQ ID NO: 191507 - DNA, 25 bp, Artificial
  Probe
agaaccatgtcagttacagtgcata

SEQ ID NO: 191508 - DNA, 25 bp, Artificial
  Probe
gagaacagaaccatgtcagttacag

SEQ ID NO: 191509 - DNA, 25 bp, Artificial
  Probe
gtcagttacagtgcatagtcaaagg

SEQ ID NO: 191510 - DNA, 25 bp, Artificial
  Probe
agtatcctttctggcttgtctgagc

SEQ ID NO: 191511 - DNA, 25 bp, Artificial
  Probe
agagaacagaaccatgtcagttaca

SEQ ID NO: 191512 - DNA, 25 bp, Artificial
  Probe
ccatgtcagttacagtgcatagtca

SEQ ID NO: 191513 - DNA, 25 bp, Artificial
  Probe
tggcttgtctgagccttttttcccc

SEQ ID NO: 191514 - DNA, 25 bp, Artificial
  Probe
tatcctttctggcttgtctgagcct

SEQ ID NO: 191515 - DNA, 25 bp, Artificial
  Probe
catgtcagttacagtgcatagtcaa

SEQ ID NO: 191516 - DNA, 25 bp, Artificial
  Probe
atgtcagttacagtgcatagtcaaa

SEQ ID NO: 191517 - DNA, 25 bp, Artificial
  Probe
aagtatcctttctggcttgtctgag

SEQ ID NO: 191518 - DNA, 25 bp, Artificial
  Probe
gaacagaaccatgtcagttacagtg

SEQ ID NO: 191519 - DNA, 25 bp, Artificial
  Probe
agttacagtgcatagtcaaaggggg

SEQ ID NO: 191520 - DNA, 25 bp, Artificial
  Probe
cccctctgtgatgataaacagaatt

SEQ ID NO: 191521 - DNA, 25 bp, Artificial
  Probe
ctttctggcttgtctgagccttttt

SEQ ID NO: 191522 - DNA, 25 bp, Artificial
  Probe
ggaagtatcctttctggcttgtctg

SEQ ID NO: 191523 - DNA, 25 bp, Artificial
  Probe
atagtcaaagggggaagggcaggca

SEQ ID NO: 191524 - DNA, 25 bp, Artificial
  Probe
atcctttctggcttgtctgagcctt

SEQ ID NO: 191525 - DNA, 25 bp, Artificial
  Probe
tgccacatacagcataccttctgcg

SEQ ID NO: 191526 - DNA, 25 bp, Artificial
  Probe
tctatgttgctttaatcttggctgg

SEQ ID NO: 191527 - DNA, 25 bp, Artificial
  Probe
gccacatacagcataccttctgcga

SEQ ID NO: 191528 - DNA, 25 bp, Artificial
  Probe
tgcaggaggcttcagaaggtttcca

SEQ ID NO: 191529 - DNA, 25 bp, Artificial
  Probe
tgacagctggcctcagctgcttctt

SEQ ID NO: 191530 - DNA, 25 bp, Artificial
  Probe
cgtgtctagaaagtcacaggagcca

SEQ ID NO: 191531 - DNA, 25 bp, Artificial
  Probe
cttggctggccagatctcaagtact

SEQ ID NO: 191532 - DNA, 25 bp, Artificial
  Probe
atgaaagtcagaagccattgcctag

SEQ ID NO: 191533 - DNA, 25 bp, Artificial
  Probe
tgtctagaaagtcacaggagccact

SEQ ID NO: 191534 - DNA, 25 bp, Artificial
  Probe
gaaagtcacaggagccactgtctgg

SEQ ID NO: 191535 - DNA, 25 bp, Artificial
  Probe
aaccacatggcagtcaaactcacag

SEQ ID NO: 191536 - DNA, 25 bp, Artificial
  Probe
gtcacaggagccactgtctggcact

SEQ ID NO: 191537 - DNA, 25 bp, Artificial
  Probe
cagtcacgcatctctaaccacatgg

SEQ ID NO: 191538 - DNA, 25 bp, Artificial
  Probe
actgggctggcagtgaagataaaac

SEQ ID NO: 191539 - DNA, 25 bp, Artificial
  Probe
gccattcacttcaatgttttaatgg

SEQ ID NO: 191540 - DNA, 25 bp, Artificial
  Probe
ttgctttaatcttggctggccagat

SEQ ID NO: 191541 - DNA, 25 bp, Artificial
  Probe
ggacgtggatcctgctgacagctgc

SEQ ID NO: 191542 - DNA, 25 bp, Artificial
  Probe
aggcttcagaaggtttccatcgtga

SEQ ID NO: 191543 - DNA, 25 bp, Artificial
  Probe
gcagaaaattctctgccacatacag

SEQ ID NO: 191544 - DNA, 25 bp, Artificial
  Probe
actcacagcaaatcaacaggaaagc

SEQ ID NO: 191545 - DNA, 25 bp, Artificial
  Probe
agctgctgacagctggcctcagctg

SEQ ID NO: 191546 - DNA, 25 bp, Artificial
  Probe
gcttctgtggatcacttcctcatcc

SEQ ID NO: 191547 - DNA, 25 bp, Artificial
  Probe
tccatcgtgaggatgaaagtcagaa

SEQ ID NO: 191548 - DNA, 25 bp, Artificial
  Probe
cacttcaatgttttaatggcagaaa

SEQ ID NO: 191549 - DNA, 25 bp, Artificial
  Probe
gactgttcacataaattcacattgg

SEQ ID NO: 191550 - DNA, 25 bp, Artificial
  Probe
acagctggcctcagctgcttctttt

SEQ ID NO: 191551 - DNA, 25 bp, Artificial
  Probe
tctgtaaaccgcatggggatagcag

SEQ ID NO: 191552 - DNA, 25 bp, Artificial
  Probe
ctgggctggcagtgaagataaaacg

SEQ ID NO: 191553 - DNA, 25 bp, Artificial
  Probe
gaagccattgcctagccattcactt

SEQ ID NO: 191554 - DNA, 25 bp, Artificial
  Probe
tagaaagtcacaggagccactgtct

SEQ ID NO: 191555 - DNA, 25 bp, Artificial
  Probe
gcatctctaaccacatggcagtcaa

SEQ ID NO: 191556 - DNA, 25 bp, Artificial
  Probe
ctgtaaaccgcatggggatagcaga

SEQ ID NO: 191557 - DNA, 25 bp, Artificial
  Probe
caacaggaaagcacggcagggtgtt

SEQ ID NO: 191558 - DNA, 25 bp, Artificial
  Probe
cctgcaggaggcttcagaaggtttc

SEQ ID NO: 191559 - DNA, 25 bp, Artificial
  Probe
ttcacattggggacgtggatcctgc

SEQ ID NO: 191560 - DNA, 25 bp, Artificial
  Probe
cataaattcacattggggacgtgga

SEQ ID NO: 191561 - DNA, 25 bp, Artificial
  Probe
ggtttccatcgtgaggatgaaagtc

SEQ ID NO: 191562 - DNA, 25 bp, Artificial
  Probe
gcttcagaaggtttccatcgtgagg

SEQ ID NO: 191563 - DNA, 25 bp, Artificial
  Probe
catgttctgtaaaccgcatggggat

SEQ ID NO: 191564 - DNA, 25 bp, Artificial
  Probe
tactgaaggtgcatgttctgtaaac

SEQ ID NO: 191565 - DNA, 25 bp, Artificial
  Probe
gtttctacctctgtagactgttcac

SEQ ID NO: 191566 - DNA, 25 bp, Artificial
  Probe
caactgtttctacctctgtagactg

SEQ ID NO: 191567 - DNA, 25 bp, Artificial
  Probe
gtcaaactcacagcaaatcaacagg

SEQ ID NO: 191568 - DNA, 25 bp, Artificial
  Probe
aaccgcatggggatagcagaaaatt

SEQ ID NO: 191569 - DNA, 25 bp, Artificial
  Probe
attggggacgtggatcctgctgaca

SEQ ID NO: 191570 - DNA, 25 bp, Artificial
  Probe
caacaaattggtactgaaggtgcat

SEQ ID NO: 191571 - DNA, 25 bp, Artificial
  Probe
cattaaagagtccttcactcgtctg

SEQ ID NO: 191572 - DNA, 25 bp, Artificial
  Probe
ttcactcgtctgaccgagctggtgc

SEQ ID NO: 191573 - DNA, 25 bp, Artificial
  Probe
cacaaaacagtactaccggcgagcc

SEQ ID NO: 191574 - DNA, 25 bp, Artificial
  Probe
tgagtacgccccagaaggcgtccag

SEQ ID NO: 191575 - DNA, 25 bp, Artificial
  Probe
agacggcatcaaagtgaggatacag

SEQ ID NO: 191576 - DNA, 25 bp, Artificial
  Probe
ggatggtctccgaacatgtgccagc

SEQ ID NO: 191577 - DNA, 25 bp, Artificial
  Probe
agaagatcctcatcgggaataaggc

SEQ ID NO: 191578 - DNA, 25 bp, Artificial
  Probe
cacatcatgaagtgggtcagtgacg

SEQ ID NO: 191579 - DNA, 25 bp, Artificial
  Probe
gagggtcctgtgtggaatcctccct

SEQ ID NO: 191580 - DNA, 25 bp, Artificial
  Probe
ccccagaaggcgtccagaagatcct

SEQ ID NO: 191581 - DNA, 25 bp, Artificial
  Probe
gtactaccggcgagcccagggaata

SEQ ID NO: 191582 - DNA, 25 bp, Artificial
  Probe
accatcgaagtagacggcatcaaag

SEQ ID NO: 191583 - DNA, 25 bp, Artificial
  Probe
tcacaggaaagagctggatggtctc

SEQ ID NO: 191584 - DNA, 25 bp, Artificial
  Probe
ccgagctggtgctgcaggctcacag

SEQ ID NO: 191585 - DNA, 25 bp, Artificial
  Probe
agcagctggctaaggagtatggcat

SEQ ID NO: 191586 - DNA, 25 bp, Artificial
  Probe
agaggtaccagactatcacaaaaca

SEQ ID NO: 191587 - DNA, 25 bp, Artificial
  Probe
gcaaactcttcaaagacctgctggt

SEQ ID NO: 191588 - DNA, 25 bp, Artificial
  Probe
gaaacaagtgcctgcaccaacctta

SEQ ID NO: 191589 - DNA, 25 bp, Artificial
  Probe
aactgaaggcccagcaaactcttca

SEQ ID NO: 191590 - DNA, 25 bp, Artificial
  Probe
aggcaaaactgaaggcccagcaaac

SEQ ID NO: 191591 - DNA, 25 bp, Artificial
  Probe
acgtggatgagtacgccccagaagg

SEQ ID NO: 191592 - DNA, 25 bp, Artificial
  Probe
gtacgccccagaaggcgtccagaag

SEQ ID NO: 191593 - DNA, 25 bp, Artificial
  Probe
tgctgagggtcctgtgtggaatcct

SEQ ID NO: 191594 - DNA, 25 bp, Artificial
  Probe
aagagctggatggtctccgaacatg

SEQ ID NO: 191595 - DNA, 25 bp, Artificial
  Probe
ctcatcgggaataaggctgacgaag

SEQ ID NO: 191596 - DNA, 25 bp, Artificial
  Probe
cagcagctggctaaggagtatggca

SEQ ID NO: 191597 - DNA, 25 bp, Artificial
  Probe
gggagtctggcctttgtcatcactg

SEQ ID NO: 191598 - DNA, 25 bp, Artificial
  Probe
agcagcgagcgctcttatcagcaca

SEQ ID NO: 191599 - DNA, 25 bp, Artificial
  Probe
tgaaaaccatcgaagtagacggcat

SEQ ID NO: 191600 - DNA, 25 bp, Artificial
  Probe
atgagctcgcactggccgagctgga

SEQ ID NO: 191601 - DNA, 25 bp, Artificial
  Probe
gactatcacaaaacagtactaccgg

SEQ ID NO: 191602 - DNA, 25 bp, Artificial
  Probe
caaagacctgctggtgctgagggtc

SEQ ID NO: 191603 - DNA, 25 bp, Artificial
  Probe
gtgctgcaggctcacaggaaagagc

SEQ ID NO: 191604 - DNA, 25 bp, Artificial
  Probe
agtatggcatggacttctacgaaac

SEQ ID NO: 191605 - DNA, 25 bp, Artificial
  Probe
tatttttagtctacgacattagcag

SEQ ID NO: 191606 - DNA, 25 bp, Artificial
  Probe
ggtaccagactatcacaaaacagta

SEQ ID NO: 191607 - DNA, 25 bp, Artificial
  Probe
tgcaggctcacaggaaagagctgga

SEQ ID NO: 191608 - DNA, 25 bp, Artificial
  Probe
gtagacggcatcaaagtgaggatac

SEQ ID NO: 191609 - DNA, 25 bp, Artificial
  Probe
ctcgtctgaccgagctggtgctgca

SEQ ID NO: 191610 - DNA, 25 bp, Artificial
  Probe
gtcagtgacgtggatgagtacgccc

SEQ ID NO: 191611 - DNA, 25 bp, Artificial
  Probe
ccatcgaagtagacggcatcaaagt

SEQ ID NO: 191612 - DNA, 25 bp, Artificial
  Probe
caatgagctcgcactggccgagctg

SEQ ID NO: 191613 - DNA, 25 bp, Artificial
  Probe
tcctcatcgggaataaggctgacga

SEQ ID NO: 191614 - DNA, 25 bp, Artificial
  Probe
ttcaaagacctgctggtgctgaggg

SEQ ID NO: 191615 - DNA, 25 bp, Artificial
  Probe
aggcagggagtctggcctttgtcat

SEQ ID NO: 191616 - DNA, 25 bp, Artificial
  Probe
acattagcagcgagcgctcttatca

SEQ ID NO: 191617 - DNA, 25 bp, Artificial
  Probe
tgtctccggccacatgtggcaagat

SEQ ID NO: 191618 - DNA, 25 bp, Artificial
  Probe
gtaacagtccaacagtccgcggctg

SEQ ID NO: 191619 - DNA, 25 bp, Artificial
  Probe
gtgctggtaacagtccaacagtccg

SEQ ID NO: 191620 - DNA, 25 bp, Artificial
  Probe
tgtttggaactctgctgaagggctg

SEQ ID NO: 191621 - DNA, 25 bp, Artificial
  Probe
tagacttctaggtgatgcatctaag

SEQ ID NO: 191622 - DNA, 25 bp, Artificial
  Probe
caatagaggcatatgcgctgtcatt

SEQ ID NO: 191623 - DNA, 25 bp, Artificial
  Probe
cttctaggtgatgcatctaagaaag

SEQ ID NO: 191624 - DNA, 25 bp, Artificial
  Probe
gcatatgcgctgtcatttttccttt

SEQ ID NO: 191625 - DNA, 25 bp, Artificial
  Probe
ctgaagggctgctgaaaagcacggt

SEQ ID NO: 191626 - DNA, 25 bp, Artificial
  Probe
ctgctgaagggctgctgaaaagcac

SEQ ID NO: 191627 - DNA, 25 bp, Artificial
  Probe
agtccgcggctgctcattcttgccg

SEQ ID NO: 191628 - DNA, 25 bp, Artificial
  Probe
cgtgtgtttggaactctgctgaagg

SEQ ID NO: 191629 - DNA, 25 bp, Artificial
  Probe
catttgagagccattagacttctag

SEQ ID NO: 191630 - DNA, 25 bp, Artificial
  Probe
taacgtgtgtttggaactctgctga

SEQ ID NO: 191631 - DNA, 25 bp, Artificial
  Probe
attagacttctaggtgatgcatcta

SEQ ID NO: 191632 - DNA, 25 bp, Artificial
  Probe
tactgtattgtctccggccacatgt

SEQ ID NO: 191633 - DNA, 25 bp, Artificial
  Probe
gccattagacttctaggtgatgcat

SEQ ID NO: 191634 - DNA, 25 bp, Artificial
  Probe
taatcacacaatagaggcatatgcg

SEQ ID NO: 191635 - DNA, 25 bp, Artificial
  Probe
aatagaggcatatgcgctgtcattt

SEQ ID NO: 191636 - DNA, 25 bp, Artificial
  Probe
gattaatcacacaatagaggcatat

SEQ ID NO: 191637 - DNA, 25 bp, Artificial
  Probe
atgacatttgagagccattagactt

SEQ ID NO: 191638 - DNA, 25 bp, Artificial
  Probe
aacagtccaacagtccgcggctgct

SEQ ID NO: 191639 - DNA, 25 bp, Artificial
  Probe
aagattaatcacacaatagaggcat

SEQ ID NO: 191640 - DNA, 25 bp, Artificial
  Probe
agcattactgtattgtctccggcca

SEQ ID NO: 191641 - DNA, 25 bp, Artificial
  Probe
ctggtaacagtccaacagtccgcgg

SEQ ID NO: 191642 - DNA, 25 bp, Artificial
  Probe
tgctgaagggctgctgaaaagcacg

SEQ ID NO: 191643 - DNA, 25 bp, Artificial
  Probe
tgtgtttggaactctgctgaagggc

SEQ ID NO: 191644 - DNA, 25 bp, Artificial
  Probe
acggtgctggtaacagtccaacagt

SEQ ID NO: 191645 - DNA, 25 bp, Artificial
  Probe
tttggaactctgctgaagggctgct

SEQ ID NO: 191646 - DNA, 25 bp, Artificial
  Probe
aagggctgctgaaaagcacggtgct

SEQ ID NO: 191647 - DNA, 25 bp, Artificial
  Probe
tctccggccacatgtggcaagatca

SEQ ID NO: 191648 - DNA, 25 bp, Artificial
  Probe
gccacatgtggcaagatcatcatta

SEQ ID NO: 191649 - DNA, 25 bp, Artificial
  Probe
aggcatatgcgctgtcatttttcct

SEQ ID NO: 191650 - DNA, 25 bp, Artificial
  Probe
ctgctgaaaagcacggtgctggtaa

SEQ ID NO: 191651 - DNA, 25 bp, Artificial
  Probe
ccacatgtggcaagatcatcattag

SEQ ID NO: 191652 - DNA, 25 bp, Artificial
  Probe
tgtaacgtgtgtttggaactctgct

SEQ ID NO: 191653 - DNA, 25 bp, Artificial
  Probe
aaagcacggtgctggtaacagtcca

SEQ ID NO: 191654 - DNA, 25 bp, Artificial
  Probe
gcacggtgctggtaacagtccaaca

SEQ ID NO: 191655 - DNA, 25 bp, Artificial
  Probe
tgaaaagcacggtgctggtaacagt

SEQ ID NO: 191656 - DNA, 25 bp, Artificial
  Probe
ttgctgtaacgtgtgtttggaactc

SEQ ID NO: 191657 - DNA, 25 bp, Artificial
  Probe
acagtccgcggctgctcattcttgc

SEQ ID NO: 191658 - DNA, 25 bp, Artificial
  Probe
tggaactctgctgaagggctgctga

SEQ ID NO: 191659 - DNA, 25 bp, Artificial
  Probe
atcacacaatagaggcatatgcgct

SEQ ID NO: 191660 - DNA, 25 bp, Artificial
  Probe
tccggccacatgtggcaagatcatc

SEQ ID NO: 191661 - DNA, 25 bp, Artificial
  Probe
ttgtctccggccacatgtggcaaga

SEQ ID NO: 191662 - DNA, 25 bp, Artificial
  Probe
agagccattagacttctaggtgatg

SEQ ID NO: 191663 - DNA, 25 bp, Artificial
  Probe
acaggagatctcctcgctggcagac

SEQ ID NO: 191664 - DNA, 25 bp, Artificial
  Probe
tcgctggcagacagtctccagttgg

SEQ ID NO: 191665 - DNA, 25 bp, Artificial
  Probe
acacgaggtttattcgcacacggtg

SEQ ID NO: 191666 - DNA, 25 bp, Artificial
  Probe
actgtatggcaacgtgttctcgcag

SEQ ID NO: 191667 - DNA, 25 bp, Artificial
  Probe
ctctgatgagttggaacagttcgcc

SEQ ID NO: 191668 - DNA, 25 bp, Artificial
  Probe
tggcattgggcacactgtatggcaa

SEQ ID NO: 191669 - DNA, 25 bp, Artificial
  Probe
caggggatcagcagccacacgaggt

SEQ ID NO: 191670 - DNA, 25 bp, Artificial
  Probe
actggaaacgcatttcctcaagtgt

SEQ ID NO: 191671 - DNA, 25 bp, Artificial
  Probe
cgtgtctggttctgtaatagaagac

SEQ ID NO: 191672 - DNA, 25 bp, Artificial
  Probe
tcgcacacggtgaaaacagatgcgt

SEQ ID NO: 191673 - DNA, 25 bp, Artificial
  Probe
gctggcagacagtctccagttggag

SEQ ID NO: 191674 - DNA, 25 bp, Artificial
  Probe
ggatcagcagccacacgaggtttat

SEQ ID NO: 191675 - DNA, 25 bp, Artificial
  Probe
gtgtcaagggcgtactggaaacgca

SEQ ID NO: 191676 - DNA, 25 bp, Artificial
  Probe
gtttattcgcacacggtgaaaacag

SEQ ID NO: 191677 - DNA, 25 bp, Artificial
  Probe
cgccaggggatcagcagccacacga

SEQ ID NO: 191678 - DNA, 25 bp, Artificial
  Probe
cgctgcactgggagcagtgcttgat

SEQ ID NO: 191679 - DNA, 25 bp, Artificial
  Probe
gcattgacaagatcgccgctcaggg

SEQ ID NO: 191680 - DNA, 25 bp, Artificial
  Probe
aatcaagttgggtttcacgcaagcc

SEQ ID NO: 191681 - DNA, 25 bp, Artificial
  Probe
acactgtatggcaacgtgttctcgc

SEQ ID NO: 191682 - DNA, 25 bp, Artificial
  Probe
ccaggggatcagcagccacacgagg

SEQ ID NO: 191683 - DNA, 25 bp, Artificial
  Probe
gtcctgccacgatctctgactggag

SEQ ID NO: 191684 - DNA, 25 bp, Artificial
  Probe
attcatccacaggaagcccgaccag

SEQ ID NO: 191685 - DNA, 25 bp, Artificial
  Probe
ggtttattcgcacacggtgaaaaca

SEQ ID NO: 191686 - DNA, 25 bp, Artificial
  Probe
gggcacactgtatggcaacgtgttc

SEQ ID NO: 191687 - DNA, 25 bp, Artificial
  Probe
ctgcagcacaggagatctcctcgct

SEQ ID NO: 191688 - DNA, 25 bp, Artificial
  Probe
gtgtcccaagcctgcagcacaggag

SEQ ID NO: 191689 - DNA, 25 bp, Artificial
  Probe
ctggcattgggcacactgtatggca

SEQ ID NO: 191690 - DNA, 25 bp, Artificial
  Probe
acaggaagcccgaccagcattgaca

SEQ ID NO: 191691 - DNA, 25 bp, Artificial
  Probe
tcctcgctggcagacagtctccagt

SEQ ID NO: 191692 - DNA, 25 bp, Artificial
  Probe
atctctgactggaggaagcaaggag

SEQ ID NO: 191693 - DNA, 25 bp, Artificial
  Probe
caagggcgtactggaaacgcatttc

SEQ ID NO: 191694 - DNA, 25 bp, Artificial
  Probe
tgagttggaacagttcgccaaacaa

SEQ ID NO: 191695 - DNA, 25 bp, Artificial
  Probe
ggcagacagtctccagttggagaaa

SEQ ID NO: 191696 - DNA, 25 bp, Artificial
  Probe
aacagatgcgtcctgccacgatctc

SEQ ID NO: 191697 - DNA, 25 bp, Artificial
  Probe
attgggcacactgtatggcaacgtg

SEQ ID NO: 191698 - DNA, 25 bp, Artificial
  Probe
aagcccgaccagcattgacaagatc

SEQ ID NO: 191699 - DNA, 25 bp, Artificial
  Probe
agttggaacagttcgccaaacaatt

SEQ ID NO: 191700 - DNA, 25 bp, Artificial
  Probe
gaaacgcatttcctcaagtgtccca

SEQ ID NO: 191701 - DNA, 25 bp, Artificial
  Probe
aatgactccgccaggggatcagcag

SEQ ID NO: 191702 - DNA, 25 bp, Artificial
  Probe
aggaggctgattcatccacaggaag

SEQ ID NO: 191703 - DNA, 25 bp, Artificial
  Probe
ctgccacgatctctgactggaggaa

SEQ ID NO: 191704 - DNA, 25 bp, Artificial
  Probe
attcgcacacggtgaaaacagatgc

SEQ ID NO: 191705 - DNA, 25 bp, Artificial
  Probe
ccgaccagcattgacaagatcgccg

SEQ ID NO: 191706 - DNA, 25 bp, Artificial
  Probe
gtatggcaacgtgttctcgcagact

SEQ ID NO: 191707 - DNA, 25 bp, Artificial
  Probe
atgcgtcctgccacgatctctgact

SEQ ID NO: 191708 - DNA, 25 bp, Artificial
  Probe
cacaggagatctcctcgctggcaga

SEQ ID NO: 191709 - DNA, 25 bp, Artificial
  Probe
ctcttaactggaccaaatagcaaag

SEQ ID NO: 191710 - DNA, 25 bp, Artificial
  Probe
agatgggtactttcacttcacccct

SEQ ID NO: 191711 - DNA, 25 bp, Artificial
  Probe
gttacttaccgacttgtctactgtt

SEQ ID NO: 191712 - DNA, 25 bp, Artificial
  Probe
agctcacatataaaagtcaaacgga

SEQ ID NO: 191713 - DNA, 25 bp, Artificial
  Probe
aagattttacaacgtgtgccgcctc

SEQ ID NO: 191714 - DNA, 25 bp, Artificial
  Probe
cagttttcttgaactagactggccc

SEQ ID NO: 191715 - DNA, 25 bp, Artificial
  Probe
ggcagagcaaagcacgctggttctg

SEQ ID NO: 191716 - DNA, 25 bp, Artificial
  Probe
ttctgagatgggtactttcacttca

SEQ ID NO: 191717 - DNA, 25 bp, Artificial
  Probe
agcaaagcacgctggttctgctaaa

SEQ ID NO: 191718 - DNA, 25 bp, Artificial
  Probe
agggatagccagttttcttgaacta

SEQ ID NO: 191719 - DNA, 25 bp, Artificial
  Probe
tttcttgaactagactggcccccag

SEQ ID NO: 191720 - DNA, 25 bp, Artificial
  Probe
acgtagccagggatagccagttttc

SEQ ID NO: 191721 - DNA, 25 bp, Artificial
  Probe
ttaccgacttgtctactgttcccag

SEQ ID NO: 191722 - DNA, 25 bp, Artificial
  Probe
gaaacctcttaactggaccaaatag

SEQ ID NO: 191723 - DNA, 25 bp, Artificial
  Probe
ggaagccccaggagctctactccat

SEQ ID NO: 191724 - DNA, 25 bp, Artificial
  Probe
ggaccaaatagcaaagccccagaga

SEQ ID NO: 191725 - DNA, 25 bp, Artificial
  Probe
gatgggtactttcacttcacccctt

SEQ ID NO: 191726 - DNA, 25 bp, Artificial
  Probe
aaagccccagagacagccggaagcc

SEQ ID NO: 191727 - DNA, 25 bp, Artificial
  Probe
tgtgccttccatctacctttctgag

SEQ ID NO: 191728 - DNA, 25 bp, Artificial
  Probe
gtcaaacggaaccaagcgtttgcca

SEQ ID NO: 191729 - DNA, 25 bp, Artificial
  Probe
tctgtttttcctgtaacctcagggg

SEQ ID NO: 191730 - DNA, 25 bp, Artificial
  Probe
gaatatcttcaagtgctcttttgtt

SEQ ID NO: 191731 - DNA, 25 bp, Artificial
  Probe
acgtgtgccgcctctgtttttcctg

SEQ ID NO: 191732 - DNA, 25 bp, Artificial
  Probe
tctcttgcagaggagtggacatcct

SEQ ID NO: 191733 - DNA, 25 bp, Artificial
  Probe
agaagtgcaatctgtctcttgcaga

SEQ ID NO: 191734 - DNA, 25 bp, Artificial
  Probe
tactccatgaagattttacaacgtg

SEQ ID NO: 191735 - DNA, 25 bp, Artificial
  Probe
caaacggaaccaagcgtttgccagc

SEQ ID NO: 191736 - DNA, 25 bp, Artificial
  Probe
caagaaacacagtgggaaggaaggc

SEQ ID NO: 191737 - DNA, 25 bp, Artificial
  Probe
accaaatagcaaagccccagagaca

SEQ ID NO: 191738 - DNA, 25 bp, Artificial
  Probe
gttctgctaaactgtgccttccatc

SEQ ID NO: 191739 - DNA, 25 bp, Artificial
  Probe
ccagcagactggaatatcttcaagt

SEQ ID NO: 191740 - DNA, 25 bp, Artificial
  Probe
ttttacaacgtgtgccgcctctgtt

SEQ ID NO: 191741 - DNA, 25 bp, Artificial
  Probe
acctttctgagatgggtactttcac

SEQ ID NO: 191742 - DNA, 25 bp, Artificial
  Probe
gagctctactccatgaagattttac

SEQ ID NO: 191743 - DNA, 25 bp, Artificial
  Probe
tagcaaagccccagagacagccgga

SEQ ID NO: 191744 - DNA, 25 bp, Artificial
  Probe
cagactggaatatcttcaagtgctc

SEQ ID NO: 191745 - DNA, 25 bp, Artificial
  Probe
aaacgaccaccaagaaacacagtgg

SEQ ID NO: 191746 - DNA, 25 bp, Artificial
  Probe
tagctcacatataaaagtcaaacgg

SEQ ID NO: 191747 - DNA, 25 bp, Artificial
  Probe
tctaacgtagccagggatagccagt

SEQ ID NO: 191748 - DNA, 25 bp, Artificial
  Probe
tagccagttttcttgaactagactg

SEQ ID NO: 191749 - DNA, 25 bp, Artificial
  Probe
ccccagcagactggaatatcttcaa

SEQ ID NO: 191750 - DNA, 25 bp, Artificial
  Probe
actccatgaagattttacaacgtgt

SEQ ID NO: 191751 - DNA, 25 bp, Artificial
  Probe
tgttacttaccgacttgtctactgt

SEQ ID NO: 191752 - DNA, 25 bp, Artificial
  Probe
gacttgtctactgttcccagtaact

SEQ ID NO: 191753 - DNA, 25 bp, Artificial
  Probe
gtagccagggatagccagttttctt

SEQ ID NO: 191754 - DNA, 25 bp, Artificial
  Probe
aggcagagcaaagcacgctggttct

SEQ ID NO: 191755 - DNA, 25 bp, Artificial
  Probe
gtagagtgtgctgattcacgttcag

SEQ ID NO: 191756 - DNA, 25 bp, Artificial
  Probe
ctgcttgggttttgaatttactgca

SEQ ID NO: 191757 - DNA, 25 bp, Artificial
  Probe
gagcccctttttgtcttagccctgt

SEQ ID NO: 191758 - DNA, 25 bp, Artificial
  Probe
gtctctttccagtcccagacctgag

SEQ ID NO: 191759 - DNA, 25 bp, Artificial
  Probe
aggaccatcacatgtgtcccagcca

SEQ ID NO: 191760 - DNA, 25 bp, Artificial
  Probe
aaggctgctggctggagcccctttt

SEQ ID NO: 191761 - DNA, 25 bp, Artificial
  Probe
ttgttttccaagattcaaattgctg

SEQ ID NO: 191762 - DNA, 25 bp, Artificial
  Probe
cccagagccactgacttggaggcac

SEQ ID NO: 191763 - DNA, 25 bp, Artificial
  Probe
cggctgcacccatgatgcagggcct

SEQ ID NO: 191764 - DNA, 25 bp, Artificial
  Probe
ctcttacagtgagaatcaaattggc

SEQ ID NO: 191765 - DNA, 25 bp, Artificial
  Probe
actcattccagaacccctaaagtgg

SEQ ID NO: 191766 - DNA, 25 bp, Artificial
  Probe
cgtggcattctgtcagagtaaaagg

SEQ ID NO: 191767 - DNA, 25 bp, Artificial
  Probe
agggcctaccagactctgcggaccg

SEQ ID NO: 191768 - DNA, 25 bp, Artificial
  Probe
ctgtacccgctcactgcagggcagg

SEQ ID NO: 191769 - DNA, 25 bp, Artificial
  Probe
ctgtgtcctttttacaccaacctgg

SEQ ID NO: 191770 - DNA, 25 bp, Artificial
  Probe
caccgggcactcactgtatttgttt

SEQ ID NO: 191771 - DNA, 25 bp, Artificial
  Probe
ccttggaaggcgtggcattctgtca

SEQ ID NO: 191772 - DNA, 25 bp, Artificial
  Probe
tgtgtcctttttacaccaacctggt

SEQ ID NO: 191773 - DNA, 25 bp, Artificial
  Probe
caagattcaaattgctgcttgggtt

SEQ ID NO: 191774 - DNA, 25 bp, Artificial
  Probe
gaaacatgtctgaactgtgtccttt

SEQ ID NO: 191775 - DNA, 25 bp, Artificial
  Probe
acactgtagcccatggcccttggtc

SEQ ID NO: 191776 - DNA, 25 bp, Artificial
  Probe
gttttgaatttactgcagctgtcag

SEQ ID NO: 191777 - DNA, 25 bp, Artificial
  Probe
accgcaccgggcactcactgtattt

SEQ ID NO: 191778 - DNA, 25 bp, Artificial
  Probe
agcagacactgtagcccatggccct

SEQ ID NO: 191779 - DNA, 25 bp, Artificial
  Probe
gcagctgtcagtgtaaagaaacatg

SEQ ID NO: 191780 - DNA, 25 bp, Artificial
  Probe
tcagtggaggccagcaagagccaaa

SEQ ID NO: 191781 - DNA, 25 bp, Artificial
  Probe
gctgctggctggagcccctttttgt

SEQ ID NO: 191782 - DNA, 25 bp, Artificial
  Probe
ggctggctagagaccttggcactgt

SEQ ID NO: 191783 - DNA, 25 bp, Artificial
  Probe
ttggaggcaccctggtctgtgaaga

SEQ ID NO: 191784 - DNA, 25 bp, Artificial
  Probe
gctgcttgggttttgaatttactgc

SEQ ID NO: 191785 - DNA, 25 bp, Artificial
  Probe
cagagcctccacagctcttacagtg

SEQ ID NO: 191786 - DNA, 25 bp, Artificial
  Probe
tgaacagaatgtgtccacctttaag

SEQ ID NO: 191787 - DNA, 25 bp, Artificial
  Probe
ccactccttggaaggcgtggcattc

SEQ ID NO: 191788 - DNA, 25 bp, Artificial
  Probe
tgctgattcacgttcagcgtgtggg

SEQ ID NO: 191789 - DNA, 25 bp, Artificial
  Probe
atttattgcattgctgggaaagacc

SEQ ID NO: 191790 - DNA, 25 bp, Artificial
  Probe
tgtctgaactgtgtcctttttacac

SEQ ID NO: 191791 - DNA, 25 bp, Artificial
  Probe
tgacttggaggcaccctggtctgtg

SEQ ID NO: 191792 - DNA, 25 bp, Artificial
  Probe
agtggggttcccagagccactgact

SEQ ID NO: 191793 - DNA, 25 bp, Artificial
  Probe
cttggcactgtagtgaacagaatgt

SEQ ID NO: 191794 - DNA, 25 bp, Artificial
  Probe
ccctggtctgtgaagagtcagtgga

SEQ ID NO: 191795 - DNA, 25 bp, Artificial
  Probe
tgatgcagggcctaccagactctgc

SEQ ID NO: 191796 - DNA, 25 bp, Artificial
  Probe
caccccagggttaactcattccaga

SEQ ID NO: 191797 - DNA, 25 bp, Artificial
  Probe
ttattgcattgctgggaaagaccgc

SEQ ID NO: 191798 - DNA, 25 bp, Artificial
  Probe
gtcacactggttgtttctccattaa

SEQ ID NO: 191799 - DNA, 25 bp, Artificial
  Probe
caccaacctggtaaaaatgctcttg

SEQ ID NO: 191800 - DNA, 25 bp, Artificial
  Probe
cacatgtgtcccagccacttagtgg

SEQ ID NO: 191801 - DNA, 25 bp, Artificial
  Probe
aatctgataaactccaagaagaagc

SEQ ID NO: 191802 - DNA, 25 bp, Artificial
  Probe
caccaactggggatcaagttttcat

SEQ ID NO: 191803 - DNA, 25 bp, Artificial
  Probe
accaactggggatcaagttttcata

SEQ ID NO: 191804 - DNA, 25 bp, Artificial
  Probe
ggtatgtcagacttactaatccccc

SEQ ID NO: 191805 - DNA, 25 bp, Artificial
  Probe
taccagctatgtttagctgtagctc

SEQ ID NO: 191806 - DNA, 25 bp, Artificial
  Probe
ccagccaccaactggggatcaagtt

SEQ ID NO: 191807 - DNA, 25 bp, Artificial
  Probe
ctcatggcaagctcagtggagagga

SEQ ID NO: 191808 - DNA, 25 bp, Artificial
  Probe
tcattgcagagtacttagtatacca

SEQ ID NO: 191809 - DNA, 25 bp, Artificial
  Probe
aactccaagaagaagcagaactgag

SEQ ID NO: 191810 - DNA, 25 bp, Artificial
  Probe
gcacgttttccagaaagtataacac

SEQ ID NO: 191811 - DNA, 25 bp, Artificial
  Probe
tgcccagccaccaactggggatcaa

SEQ ID NO: 191812 - DNA, 25 bp, Artificial
  Probe
aggtatgtcagacttactaatcccc

SEQ ID NO: 191813 - DNA, 25 bp, Artificial
  Probe
aatactttgggcactagaagtcacc

SEQ ID NO: 191814 - DNA, 25 bp, Artificial
  Probe
ctaaaaatactttgggcactagaag

SEQ ID NO: 191815 - DNA, 25 bp, Artificial
  Probe
tatatacgctaccagctatgtttag

SEQ ID NO: 191816 - DNA, 25 bp, Artificial
  Probe
gcaagctcagtggagaggagttcac

SEQ ID NO: 191817 - DNA, 25 bp, Artificial
  Probe
acgctaccagctatgtttagctgta

SEQ ID NO: 191818 - DNA, 25 bp, Artificial
  Probe
gaaacaaactagaccagaatattgc

SEQ ID NO: 191819 - DNA, 25 bp, Artificial
  Probe
tagaccagaatattgccatggggcg

SEQ ID NO: 191820 - DNA, 25 bp, Artificial
  Probe
tgctgtaggctagaacaggaaacaa

SEQ ID NO: 191821 - DNA, 25 bp, Artificial
  Probe
tagaagtcaccctgagctgatcaag

SEQ ID NO: 191822 - DNA, 25 bp, Artificial
  Probe
gcactagaagtcaccctgagctgat

SEQ ID NO: 191823 - DNA, 25 bp, Artificial
  Probe
gctgatcaagcacacaaatctgata

SEQ ID NO: 191824 - DNA, 25 bp, Artificial
  Probe
cccaggtgctgtaggctagaacagg

SEQ ID NO: 191825 - DNA, 25 bp, Artificial
  Probe
gaatcaccaaattggagcatttacc

SEQ ID NO: 191826 - DNA, 25 bp, Artificial
  Probe
cacctgataacattagggaatcacc

SEQ ID NO: 191827 - DNA, 25 bp, Artificial
  Probe
tcccaatatgtaagagcacgttttc

SEQ ID NO: 191828 - DNA, 25 bp, Artificial
  Probe
tctaagaacccaggtgctgtaggct

SEQ ID NO: 191829 - DNA, 25 bp, Artificial
  Probe
tttcgtattcccaatatgtaagagc

SEQ ID NO: 191830 - DNA, 25 bp, Artificial
  Probe
cttcctctaagaacccaggtgctgt

SEQ ID NO: 191831 - DNA, 25 bp, Artificial
  Probe
gagaggagttcacttcctctaagaa

SEQ ID NO: 191832 - DNA, 25 bp, Artificial
  Probe
taggcttgtccctcagtgtcattgc

SEQ ID NO: 191833 - DNA, 25 bp, Artificial
  Probe
caaactagaccagaatattgccatg

SEQ ID NO: 191834 - DNA, 25 bp, Artificial
  Probe
attagggaatcaccaaattggagca

SEQ ID NO: 191835 - DNA, 25 bp, Artificial
  Probe
gggcggctgcctagtcaccagaaag

SEQ ID NO: 191836 - DNA, 25 bp, Artificial
  Probe
cttctaaaaatactttgggcactag

SEQ ID NO: 191837 - DNA, 25 bp, Artificial
  Probe
ctgataaactccaagaagaagcaga

SEQ ID NO: 191838 - DNA, 25 bp, Artificial
  Probe
cacaagcacacctgataacattagg

SEQ ID NO: 191839 - DNA, 25 bp, Artificial
  Probe
taaactccaagaagaagcagaactg

SEQ ID NO: 191840 - DNA, 25 bp, Artificial
  Probe
atacaattctgtatataggcttgtc

SEQ ID NO: 191841 - DNA, 25 bp, Artificial
  Probe
atgtaagagcacgttttccagaaag

SEQ ID NO: 191842 - DNA, 25 bp, Artificial
  Probe
ggaaacaaactagaccagaatattg

SEQ ID NO: 191843 - DNA, 25 bp, Artificial
  Probe
aagctcagtggagaggagttcactt

SEQ ID NO: 191844 - DNA, 25 bp, Artificial
  Probe
gtagctcatggcaagctcagtggag

SEQ ID NO: 191845 - DNA, 25 bp, Artificial
  Probe
ctgtatataggcttgtccctcagtg

SEQ ID NO: 191846 - DNA, 25 bp, Artificial
  Probe
tagctgtagctcatggcaagctcag

SEQ ID NO: 191847 - DNA, 25 bp, Artificial
  Probe
aagcccaggacactaggctttctcc

SEQ ID NO: 191848 - DNA, 25 bp, Artificial
  Probe
tccagactcagtggatctgaagaag

SEQ ID NO: 191849 - DNA, 25 bp, Artificial
  Probe
ctaagcccaggacactaggctttct

SEQ ID NO: 191850 - DNA, 25 bp, Artificial
  Probe
gtccagcatctaagcccaggacact

SEQ ID NO: 191851 - DNA, 25 bp, Artificial
  Probe
cggactgtctcgtctctctggtgac

SEQ ID NO: 191852 - DNA, 25 bp, Artificial
  Probe
agtccagcatctaagcccaggacac

SEQ ID NO: 191853 - DNA, 25 bp, Artificial
  Probe
caatgtggacctgctccctaaagag

SEQ ID NO: 191854 - DNA, 25 bp, Artificial
  Probe
gacctcctcgaccaatgtggacctg

SEQ ID NO: 191855 - DNA, 25 bp, Artificial
  Probe
ctccagactcagtggatctgaagaa

SEQ ID NO: 191856 - DNA, 25 bp, Artificial
  Probe
tgtctcgtctctctggtgacctcct

SEQ ID NO: 191857 - DNA, 25 bp, Artificial
  Probe
acctgctccctaaagagtccagcat

SEQ ID NO: 191858 - DNA, 25 bp, Artificial
  Probe
atgtggacctgctccctaaagagtc

SEQ ID NO: 191859 - DNA, 25 bp, Artificial
  Probe
tgctccctaaagagtccagcatcta

SEQ ID NO: 191860 - DNA, 25 bp, Artificial
  Probe
tgacctcctcgaccaatgtggacct

SEQ ID NO: 191861 - DNA, 25 bp, Artificial
  Probe
ctaggctttctccagactcagtgga

SEQ ID NO: 191862 - DNA, 25 bp, Artificial
  Probe
gctttctccagactcagtggatctg

SEQ ID NO: 191863 - DNA, 25 bp, Artificial
  Probe
ggacactaggctttctccagactca

SEQ ID NO: 191864 - DNA, 25 bp, Artificial
  Probe
gcatctaagcccaggacactaggct

SEQ ID NO: 191865 - DNA, 25 bp, Artificial
  Probe
taaagagtccagcatctaagcccag

SEQ ID NO: 191866 - DNA, 25 bp, Artificial
  Probe
aagagtccagcatctaagcccagga

SEQ ID NO: 191867 - DNA, 25 bp, Artificial
  Probe
gcccaggacactaggctttctccag

SEQ ID NO: 191868 - DNA, 25 bp, Artificial
  Probe
tccctaaagagtccagcatctaagc

SEQ ID NO: 191869 - DNA, 25 bp, Artificial
  Probe
gaccaatgtggacctgctccctaaa

SEQ ID NO: 191870 - DNA, 25 bp, Artificial
  Probe
tggtgacctcctcgaccaatgtgga

SEQ ID NO: 191871 - DNA, 25 bp, Artificial
  Probe
gactgtctcgtctctctggtgacct

SEQ ID NO: 191872 - DNA, 25 bp, Artificial
  Probe
gctccctaaagagtccagcatctaa

SEQ ID NO: 191873 - DNA, 25 bp, Artificial
  Probe
actgtctcgtctctctggtgacctc

SEQ ID NO: 191874 - DNA, 25 bp, Artificial
  Probe
atctaagcccaggacactaggcttt

SEQ ID NO: 191875 - DNA, 25 bp, Artificial
  Probe
aggacactaggctttctccagactc

SEQ ID NO: 191876 - DNA, 25 bp, Artificial
  Probe
ggacctgctccctaaagagtccagc

SEQ ID NO: 191877 - DNA, 25 bp, Artificial
  Probe
ctcggactgtctcgtctctctggtg

SEQ ID NO: 191878 - DNA, 25 bp, Artificial
  Probe
tctctggtgacctcctcgaccaatg

SEQ ID NO: 191879 - DNA, 25 bp, Artificial
  Probe
tcgaccaatgtggacctgctcccta

SEQ ID NO: 191880 - DNA, 25 bp, Artificial
  Probe
ctccctaaagagtccagcatctaag

SEQ ID NO: 191881 - DNA, 25 bp, Artificial
  Probe
ctgctccctaaagagtccagcatct

SEQ ID NO: 191882 - DNA, 25 bp, Artificial
  Probe
gagtccagcatctaagcccaggaca

SEQ ID NO: 191883 - DNA, 25 bp, Artificial
  Probe
acactaggctttctccagactcagt

SEQ ID NO: 191884 - DNA, 25 bp, Artificial
  Probe
cgaccaatgtggacctgctccctaa

SEQ ID NO: 191885 - DNA, 25 bp, Artificial
  Probe
ttctccagactcagtggatctgaag

SEQ ID NO: 191886 - DNA, 25 bp, Artificial
  Probe
ctttctccagactcagtggatctga

SEQ ID NO: 191887 - DNA, 25 bp, Artificial
  Probe
ggctttctccagactcagtggatct

SEQ ID NO: 191888 - DNA, 25 bp, Artificial
  Probe
ggtgacctcctcgaccaatgtggac

SEQ ID NO: 191889 - DNA, 25 bp, Artificial
  Probe
cactaggctttctccagactcagtg

SEQ ID NO: 191890 - DNA, 25 bp, Artificial
  Probe
cctcggactgtctcgtctctctggt

SEQ ID NO: 191891 - DNA, 25 bp, Artificial
  Probe
ccaatgtggacctgctccctaaaga

SEQ ID NO: 191892 - DNA, 25 bp, Artificial
  Probe
ctaaagagtccagcatctaagccca

SEQ ID NO: 191893 - DNA, 25 bp, Artificial
  Probe
ggtctacctgggattttacagaggg

SEQ ID NO: 191894 - DNA, 25 bp, Artificial
  Probe
ggtatacgtgggaccagatcaacta

SEQ ID NO: 191895 - DNA, 25 bp, Artificial
  Probe
agaagactgaccagtgtcggatgca

SEQ ID NO: 191896 - DNA, 25 bp, Artificial
  Probe
accaagctttgaacggatacctcat

SEQ ID NO: 191897 - DNA, 25 bp, Artificial
  Probe
gaacggatacctcattctgcccatt

SEQ ID NO: 191898 - DNA, 25 bp, Artificial
  Probe
gggaccagatcaactactctacatc

SEQ ID NO: 191899 - DNA, 25 bp, Artificial
  Probe
cctggttgtccatatggaaagtgag

SEQ ID NO: 191900 - DNA, 25 bp, Artificial
  Probe
tgggaccagatcaactactctacat

SEQ ID NO: 191901 - DNA, 25 bp, Artificial
  Probe
gttaaaacccgtcatcctgctgctc

SEQ ID NO: 191902 - DNA, 25 bp, Artificial
  Probe
cgtgggaccagatcaactactctac

SEQ ID NO: 191903 - DNA, 25 bp, Artificial
  Probe
gaaggccttctggtctacctgggat

SEQ ID NO: 191904 - DNA, 25 bp, Artificial
  Probe
tgctgctcaagaagactgaccagtg

SEQ ID NO: 191905 - DNA, 25 bp, Artificial
  Probe
agttaaaacccgtcatcctgctgct

SEQ ID NO: 191906 - DNA, 25 bp, Artificial
  Probe
ttagaaaacaacacccaggaattgt

SEQ ID NO: 191907 - DNA, 25 bp, Artificial
  Probe
acacccaggaattgtttctactggg

SEQ ID NO: 191908 - DNA, 25 bp, Artificial
  Probe
caagaagactgaccagtgtcggatg

SEQ ID NO: 191909 - DNA, 25 bp, Artificial
  Probe
ggggttgtcatctcccatagcccac

SEQ ID NO: 191910 - DNA, 25 bp, Artificial
  Probe
aaacccgtcatcctgctgctcaaga

SEQ ID NO: 191911 - DNA, 25 bp, Artificial
  Probe
ggatacctcattctgcccattccga

SEQ ID NO: 191912 - DNA, 25 bp, Artificial
  Probe
tcatcctgctgctcaagaagactga

SEQ ID NO: 191913 - DNA, 25 bp, Artificial
  Probe
gaagactgaccagtgtcggatgcac

SEQ ID NO: 191914 - DNA, 25 bp, Artificial
  Probe
agggaaggccttctggtctacctgg

SEQ ID NO: 191915 - DNA, 25 bp, Artificial
  Probe
gactgaccagtgtcggatgcaccaa

SEQ ID NO: 191916 - DNA, 25 bp, Artificial
  Probe
caccaagctttgaacggatacctca

SEQ ID NO: 191917 - DNA, 25 bp, Artificial
  Probe
tatacgtgggaccagatcaactact

SEQ ID NO: 191918 - DNA, 25 bp, Artificial
  Probe
cttctggtctacctgggattttaca

SEQ ID NO: 191919 - DNA, 25 bp, Artificial
  Probe
acctgggattttacagagggctttg

SEQ ID NO: 191920 - DNA, 25 bp, Artificial
  Probe
ggccttctggtctacctgggatttt

SEQ ID NO: 191921 - DNA, 25 bp, Artificial
  Probe
tctgaagttaaaacccgtcatcctg

SEQ ID NO: 191922 - DNA, 25 bp, Artificial
  Probe
gagaaactgtcttattctctagaag

SEQ ID NO: 191923 - DNA, 25 bp, Artificial
  Probe
gccttctggtctacctgggatttta

SEQ ID NO: 191924 - DNA, 25 bp, Artificial
  Probe
gtttctactgggtcctggttgtcca

SEQ ID NO: 191925 - DNA, 25 bp, Artificial
  Probe
ggaaggccttctggtctacctggga

SEQ ID NO: 191926 - DNA, 25 bp, Artificial
  Probe
caacacccaggaattgtttctactg

SEQ ID NO: 191927 - DNA, 25 bp, Artificial
  Probe
gaaactgtcttattctctagaaggc

SEQ ID NO: 191928 - DNA, 25 bp, Artificial
  Probe
agctttgaacggatacctcattctg

SEQ ID NO: 191929 - DNA, 25 bp, Artificial
  Probe
ttctggtctacctgggattttacag

SEQ ID NO: 191930 - DNA, 25 bp, Artificial
  Probe
ttattctctagaaggctcggaggga

SEQ ID NO: 191931 - DNA, 25 bp, Artificial
  Probe
aattgtttctactgggtcctggttg

SEQ ID NO: 191932 - DNA, 25 bp, Artificial
  Probe
gtcctggttgtccatatggaaagtg

SEQ ID NO: 191933 - DNA, 25 bp, Artificial
  Probe
ttttacaacccttgtcgggctggag

SEQ ID NO: 191934 - DNA, 25 bp, Artificial
  Probe
gaccagtgtcggatgcaccaagctt

SEQ ID NO: 191935 - DNA, 25 bp, Artificial
  Probe
gagggaaggccttctggtctacctg

SEQ ID NO: 191936 - DNA, 25 bp, Artificial
  Probe
tgattagaaaacaacacccaggaat

SEQ ID NO: 191937 - DNA, 25 bp, Artificial
  Probe
ctgctcaagaagactgaccagtgtc

SEQ ID NO: 191938 - DNA, 25 bp, Artificial
  Probe
ccaggaattgtttctactgggtcct

SEQ ID NO: 191939 - DNA, 25 bp, Artificial
  Probe
cgttgccagcccttggtgttggatg

SEQ ID NO: 191940 - DNA, 25 bp, Artificial
  Probe
tttaagcggcccactctccgaagag

SEQ ID NO: 191941 - DNA, 25 bp, Artificial
  Probe
aagaccctccaggaatctgcaatcc

SEQ ID NO: 191942 - DNA, 25 bp, Artificial
  Probe
tgatgcaggcactactggggacccg

SEQ ID NO: 191943 - DNA, 25 bp, Artificial
  Probe
gccaccgagccacatgccaagaaaa

SEQ ID NO: 191944 - DNA, 25 bp, Artificial
  Probe
atacgacgtggaagcaaaagtcacc

SEQ ID NO: 191945 - DNA, 25 bp, Artificial
  Probe
cgcctccagaaaacttcagttgaag

SEQ ID NO: 191946 - DNA, 25 bp, Artificial
  Probe
gcacgcgttgccagcccttggtgtt

SEQ ID NO: 191947 - DNA, 25 bp, Artificial
  Probe
cactgagattgcagatctgacccag

SEQ ID NO: 191948 - DNA, 25 bp, Artificial
  Probe
ctgagcacgcgttgccagcccttgg

SEQ ID NO: 191949 - DNA, 25 bp, Artificial
  Probe
tgccaccgagccacatgccaagaaa

SEQ ID NO: 191950 - DNA, 25 bp, Artificial
  Probe
gccgcgttctgagcacgcgttgcca

SEQ ID NO: 191951 - DNA, 25 bp, Artificial
  Probe
ctacctctggagatcagcatggcgg

SEQ ID NO: 191952 - DNA, 25 bp, Artificial
  Probe
agatctgacccagaagatctatgac

SEQ ID NO: 191953 - DNA, 25 bp, Artificial
  Probe
cgctcgtgtggacaaagtggatgaa

SEQ ID NO: 191954 - DNA, 25 bp, Artificial
  Probe
tgatgctgcagattgcgaagcagga

SEQ ID NO: 191955 - DNA, 25 bp, Artificial
  Probe
cgcgttctgagcacgcgttgccagc

SEQ ID NO: 191956 - DNA, 25 bp, Artificial
  Probe
aagggccgcgttctgagcacgcgtt

SEQ ID NO: 191957 - DNA, 25 bp, Artificial
  Probe
ctctccgaagagtgagaatctcggc

SEQ ID NO: 191958 - DNA, 25 bp, Artificial
  Probe
gcagcttcacgctcgtgtggacaaa

SEQ ID NO: 191959 - DNA, 25 bp, Artificial
  Probe
ctatgccggcagcttcacgctcgtg

SEQ ID NO: 191960 - DNA, 25 bp, Artificial
  Probe
gcaaaagtcaccaagaacatcactg

SEQ ID NO: 191961 - DNA, 25 bp, Artificial
  Probe
gcaatcccattctctacctctggag

SEQ ID NO: 191962 - DNA, 25 bp, Artificial
  Probe
ccagaaaacttcagttgaagactct

SEQ ID NO: 191963 - DNA, 25 bp, Artificial
  Probe
tcggcagatgccatgatgcaggcac

SEQ ID NO: 191964 - DNA, 25 bp, Artificial
  Probe
ggcagatgccatgatgcaggcacta

SEQ ID NO: 191965 - DNA, 25 bp, Artificial
  Probe
tctgagcacgcgttgccagcccttg

SEQ ID NO: 191966 - DNA, 25 bp, Artificial
  Probe
ggccaaggaatccttggacctgagg

SEQ ID NO: 191967 - DNA, 25 bp, Artificial
  Probe
gcccactctccgaagagtgagaatc

SEQ ID NO: 191968 - DNA, 25 bp, Artificial
  Probe
gccggcagcttcacgctcgtgtgga

SEQ ID NO: 191969 - DNA, 25 bp, Artificial
  Probe
gattgcagatctgacccagaagatc

SEQ ID NO: 191970 - DNA, 25 bp, Artificial
  Probe
aaacttcagttgaagactctgatgc

SEQ ID NO: 191971 - DNA, 25 bp, Artificial
  Probe
agatctatgacctgcgtggcaagtt

SEQ ID NO: 191972 - DNA, 25 bp, Artificial
  Probe
gatgccatgatgcaggcactactgg

SEQ ID NO: 191973 - DNA, 25 bp, Artificial
  Probe
ctatgacctgcgtggcaagtttaag

SEQ ID NO: 191974 - DNA, 25 bp, Artificial
  Probe
cccattctctacctctggagatcag

SEQ ID NO: 191975 - DNA, 25 bp, Artificial
  Probe
acatcactgagattgcagatctgac

SEQ ID NO: 191976 - DNA, 25 bp, Artificial
  Probe
agcggcccactctccgaagagtgag

SEQ ID NO: 191977 - DNA, 25 bp, Artificial
  Probe
gcttcaggacctatgccggcagctt

SEQ ID NO: 191978 - DNA, 25 bp, Artificial
  Probe
gagattgcagatctgacccagaaga

SEQ ID NO: 191979 - DNA, 25 bp, Artificial
  Probe
gggctttgaagagcttcaggaccta

SEQ ID NO: 191980 - DNA, 25 bp, Artificial
  Probe
catgatgcaggcactactggggacc

SEQ ID NO: 191981 - DNA, 25 bp, Artificial
  Probe
atgccatgatgcaggcactactggg

SEQ ID NO: 191982 - DNA, 25 bp, Artificial
  Probe
cctgcgtggcaagtttaagcggccc

SEQ ID NO: 191983 - DNA, 25 bp, Artificial
  Probe
tgcgtggcaagtttaagcggcccac

SEQ ID NO: 191984 - DNA, 25 bp, Artificial
  Probe
gagatacgacgtggaagcaaaagtc

SEQ ID NO: 191985 - DNA, 25 bp, Artificial
  Probe
gccgtgtacccaatggctaccactg

SEQ ID NO: 191986 - DNA, 25 bp, Artificial
  Probe
ctgagggtcagagtggccttccagc

SEQ ID NO: 191987 - DNA, 25 bp, Artificial
  Probe
tgctccagaaagagcccctgagcca

SEQ ID NO: 191988 - DNA, 25 bp, Artificial
  Probe
ctgcactttgggactcagcaccggc

SEQ ID NO: 191989 - DNA, 25 bp, Artificial
  Probe
acacaatgccctgctccagaaagag

SEQ ID NO: 191990 - DNA, 25 bp, Artificial
  Probe
ttctgaacacaatgccctgctccag

SEQ ID NO: 191991 - DNA, 25 bp, Artificial
  Probe
cgcattggctctgacccttacctag

SEQ ID NO: 191992 - DNA, 25 bp, Artificial
  Probe
cgctcctccaggacttcctatgtgt

SEQ ID NO: 191993 - DNA, 25 bp, Artificial
  Probe
tccgttaatgggagccccttgatgt

SEQ ID NO: 191994 - DNA, 25 bp, Artificial
  Probe
cagcatcacctacaagacggccaat

SEQ ID NO: 191995 - DNA, 25 bp, Artificial
  Probe
atggctaccactgcactttgggact

SEQ ID NO: 191996 - DNA, 25 bp, Artificial
  Probe
tacaagacggccaattcctcgcctg

SEQ ID NO: 191997 - DNA, 25 bp, Artificial
  Probe
acaatgccctgctccagaaagagcc

SEQ ID NO: 191998 - DNA, 25 bp, Artificial
  Probe
acaagacggccaattcctcgcctgt

SEQ ID NO: 191999 - DNA, 25 bp, Artificial
  Probe
accacccagaccaggatcactggtg

SEQ ID NO: 192000 - DNA, 25 bp, Artificial
  Probe
ctagcttctggctcccgcattggct

SEQ ID NO: 192001 - DNA, 25 bp, Artificial
  Probe
tcctccaggacttcctatgtgtcct

SEQ ID NO: 192002 - DNA, 25 bp, Artificial
  Probe
gtctggacagtgaggcctctgccca

SEQ ID NO: 192003 - DNA, 25 bp, Artificial
  Probe
atctggtgctagcacgccgggccga

SEQ ID NO: 192004 - DNA, 25 bp, Artificial
  Probe
tgacccttacctagggcagcgtctg

SEQ ID NO: 192005 - DNA, 25 bp, Artificial
  Probe
aacagcggcactagagccaggaccc

SEQ ID NO: 192006 - DNA, 25 bp, Artificial
  Probe
gcatcacctacaagacggccaattc

SEQ ID NO: 192007 - DNA, 25 bp, Artificial
  Probe
cttacctagggcagcgtctggacag

SEQ ID NO: 192008 - DNA, 25 bp, Artificial
  Probe
tcctcgcctgtccactttgctgagg

SEQ ID NO: 192009 - DNA, 25 bp, Artificial
  Probe
taccactgcactttgggactcagca

SEQ ID NO: 192010 - DNA, 25 bp, Artificial
  Probe
gcagcgtctggacagtgaggcctct

SEQ ID NO: 192011 - DNA, 25 bp, Artificial
  Probe
catatcgccaacagcggcactagag

SEQ ID NO: 192012 - DNA, 25 bp, Artificial
  Probe
ccgcagggcagtggttccgttaatg

SEQ ID NO: 192013 - DNA, 25 bp, Artificial
  Probe
aatgggagccccttgatgtcaacat

SEQ ID NO: 192014 - DNA, 25 bp, Artificial
  Probe
gcagtggttccgttaatgggagccc

SEQ ID NO: 192015 - DNA, 25 bp, Artificial
  Probe
cacccgcagggcagtggttccgtta

SEQ ID NO: 192016 - DNA, 25 bp, Artificial
  Probe
ctgaggatacactcacctttgaaga

SEQ ID NO: 192017 - DNA, 25 bp, Artificial
  Probe
tttgggactcagcaccggcgtccgg

SEQ ID NO: 192018 - DNA, 25 bp, Artificial
  Probe
tcacctttgaagaggccgtggccac

SEQ ID NO: 192019 - DNA, 25 bp, Artificial
  Probe
tcagccgcggcctttctgaacacaa

SEQ ID NO: 192020 - DNA, 25 bp, Artificial
  Probe
gaaagagcccctgagccagcctcta

SEQ ID NO: 192021 - DNA, 25 bp, Artificial
  Probe
cacaacctgcctgaggatacactca

SEQ ID NO: 192022 - DNA, 25 bp, Artificial
  Probe
gtacccaatggctaccactgcactt

SEQ ID NO: 192023 - DNA, 25 bp, Artificial
  Probe
ttgaagaggccgtggccaccaactc

SEQ ID NO: 192024 - DNA, 25 bp, Artificial
  Probe
gccaacagcggcactagagccagga

SEQ ID NO: 192025 - DNA, 25 bp, Artificial
  Probe
tggttccgttaatgggagccccttg

SEQ ID NO: 192026 - DNA, 25 bp, Artificial
  Probe
tggctctgacccttacctagggcag

SEQ ID NO: 192027 - DNA, 25 bp, Artificial
  Probe
ctgagccagcctctagcttctggct

SEQ ID NO: 192028 - DNA, 25 bp, Artificial
  Probe
tccactttgctgagggtcagagtgg

SEQ ID NO: 192029 - DNA, 25 bp, Artificial
  Probe
gtcagagtggccttccagccttctc

SEQ ID NO: 192030 - DNA, 25 bp, Artificial
  Probe
tctgcccacaacctgcctgaggata

SEQ ID NO: 192031 - DNA, 25 bp, Artificial
  Probe
ggagacacacttaccacttggctag

SEQ ID NO: 192032 - DNA, 25 bp, Artificial
  Probe
ttaaccctggatcctgtgctggaca

SEQ ID NO: 192033 - DNA, 25 bp, Artificial
  Probe
tgcaggcggagacacacttaccact

SEQ ID NO: 192034 - DNA, 25 bp, Artificial
  Probe
ggcgatcaccactgtctaaacatca

SEQ ID NO: 192035 - DNA, 25 bp, Artificial
  Probe
tgtcgtcagatgctgcagctggctc

SEQ ID NO: 192036 - DNA, 25 bp, Artificial
  Probe
tctgcctcccagtaaaacagtcatg

SEQ ID NO: 192037 - DNA, 25 bp, Artificial
  Probe
ccgcagtctgccaagaccaggttct

SEQ ID NO: 192038 - DNA, 25 bp, Artificial
  Probe
tggatcctgtgctggacactaagga

SEQ ID NO: 192039 - DNA, 25 bp, Artificial
  Probe
ttaccacttggctagtgtgggaaag

SEQ ID NO: 192040 - DNA, 25 bp, Artificial
  Probe
tgcagctggctctgcctcccagtaa

SEQ ID NO: 192041 - DNA, 25 bp, Artificial
  Probe
agactggtggagtgcctcctgtcgt

SEQ ID NO: 192042 - DNA, 25 bp, Artificial
  Probe
aagactggtggagtgcctcctgtcg

SEQ ID NO: 192043 - DNA, 25 bp, Artificial
  Probe
accctggatcctgtgctggacacta

SEQ ID NO: 192044 - DNA, 25 bp, Artificial
  Probe
accacttggctagtgtgggaaaggc

SEQ ID NO: 192045 - DNA, 25 bp, Artificial
  Probe
gccaagaccaggttctggaaaaact

SEQ ID NO: 192046 - DNA, 25 bp, Artificial
  Probe
tcagatgctgcagctggctctgcct

SEQ ID NO: 192047 - DNA, 25 bp, Artificial
  Probe
tcgtcagatgctgcagctggctctg

SEQ ID NO: 192048 - DNA, 25 bp, Artificial
  Probe
ataccagatgccagcccaacggcga

SEQ ID NO: 192049 - DNA, 25 bp, Artificial
  Probe
ttaagataccagatgccagcccaac

SEQ ID NO: 192050 - DNA, 25 bp, Artificial
  Probe
gcctcccagtaaaacagtcatgaaa

SEQ ID NO: 192051 - DNA, 25 bp, Artificial
  Probe
gctggctctgcctcccagtaaaaca

SEQ ID NO: 192052 - DNA, 25 bp, Artificial
  Probe
ggccaagactggtggagtgcctcct

SEQ ID NO: 192053 - DNA, 25 bp, Artificial
  Probe
aggcggagacacacttaccacttgg

SEQ ID NO: 192054 - DNA, 25 bp, Artificial
  Probe
ccaacggcgatcaccactgtctaaa

SEQ ID NO: 192055 - DNA, 25 bp, Artificial
  Probe
tgcctcctgtcgtcagatgctgcag

SEQ ID NO: 192056 - DNA, 25 bp, Artificial
  Probe
ggagtgcctcctgtcgtcagatgct

SEQ ID NO: 192057 - DNA, 25 bp, Artificial
  Probe
ttattaaccctggatcctgtgctgg

SEQ ID NO: 192058 - DNA, 25 bp, Artificial
  Probe
ctgcaggcggagacacacttaccac

SEQ ID NO: 192059 - DNA, 25 bp, Artificial
  Probe
aactgcaggcggagacacacttacc

SEQ ID NO: 192060 - DNA, 25 bp, Artificial
  Probe
gatcctgtgctggacactaaggaga

SEQ ID NO: 192061 - DNA, 25 bp, Artificial
  Probe
agacacacttaccacttggctagtg

SEQ ID NO: 192062 - DNA, 25 bp, Artificial
  Probe
tgtgctggacactaaggagaaactg

SEQ ID NO: 192063 - DNA, 25 bp, Artificial
  Probe
aaacttaagataccagatgccagcc

SEQ ID NO: 192064 - DNA, 25 bp, Artificial
  Probe
gtctgccaagaccaggttctggaaa

SEQ ID NO: 192065 - DNA, 25 bp, Artificial
  Probe
ctgcctcccagtaaaacagtcatga

SEQ ID NO: 192066 - DNA, 25 bp, Artificial
  Probe
tggagtgcctcctgtcgtcagatgc

SEQ ID NO: 192067 - DNA, 25 bp, Artificial
  Probe
taccacttggctagtgtgggaaagg

SEQ ID NO: 192068 - DNA, 25 bp, Artificial
  Probe
acttattaaccctggatcctgtgct

SEQ ID NO: 192069 - DNA, 25 bp, Artificial
  Probe
ctcctgtcgtcagatgctgcagctg

SEQ ID NO: 192070 - DNA, 25 bp, Artificial
  Probe
tggtggagtgcctcctgtcgtcaga

SEQ ID NO: 192071 - DNA, 25 bp, Artificial
  Probe
gagacacacttaccacttggctagt

SEQ ID NO: 192072 - DNA, 25 bp, Artificial
  Probe
ggtggagtgcctcctgtcgtcagat

SEQ ID NO: 192073 - DNA, 25 bp, Artificial
  Probe
taagataccagatgccagcccaacg

SEQ ID NO: 192074 - DNA, 25 bp, Artificial
  Probe
gctctgcctcccagtaaaacagtca

SEQ ID NO: 192075 - DNA, 25 bp, Artificial
  Probe
agatgctgcagctggctctgcctcc

SEQ ID NO: 192076 - DNA, 25 bp, Artificial
  Probe
ctgccaagaccaggttctggaaaaa

SEQ ID NO: 192077 - DNA, 25 bp, Artificial
  Probe
cctggaaacaactggaggtgctgag

SEQ ID NO: 192078 - DNA, 25 bp, Artificial
  Probe
ccaggatgcatatgccctccattgc

SEQ ID NO: 192079 - DNA, 25 bp, Artificial
  Probe
tgcgctgctgtctcctggaaacaac

SEQ ID NO: 192080 - DNA, 25 bp, Artificial
  Probe
cagcaggagcccatgcaagcagaac

SEQ ID NO: 192081 - DNA, 25 bp, Artificial
  Probe
agcaggtctgcaccacactctcaag

SEQ ID NO: 192082 - DNA, 25 bp, Artificial
  Probe
attgccctgccagcaggagcccatg

SEQ ID NO: 192083 - DNA, 25 bp, Artificial
  Probe
gggttctgtgcctgcgctgctgtct

SEQ ID NO: 192084 - DNA, 25 bp, Artificial
  Probe
ggtggtgactgtctttgtgctatgc

SEQ ID NO: 192085 - DNA, 25 bp, Artificial
  Probe
agccaggccctttcagcagcctgtg

SEQ ID NO: 192086 - DNA, 25 bp, Artificial
  Probe
ctttccagcgggttctgtgcctgcg

SEQ ID NO: 192087 - DNA, 25 bp, Artificial
  Probe
gatgccattctatgtagtgcagctt

SEQ ID NO: 192088 - DNA, 25 bp, Artificial
  Probe
aacttccgacgctctttccagcggg

SEQ ID NO: 192089 - DNA, 25 bp, Artificial
  Probe
tgcaagcaggtctgcaccacactct

SEQ ID NO: 192090 - DNA, 25 bp, Artificial
  Probe
aggagcctcaggactcctgctagcc

SEQ ID NO: 192091 - DNA, 25 bp, Artificial
  Probe
caagaaaactcctgttgtcactaag

SEQ ID NO: 192092 - DNA, 25 bp, Artificial
  Probe
ctaatggtggtgactgtctttgtgc

SEQ ID NO: 192093 - DNA, 25 bp, Artificial
  Probe
gtgcctgcgctgctgtctcctggaa

SEQ ID NO: 192094 - DNA, 25 bp, Artificial
  Probe
ctgttgtcactaagccaggcccttt

SEQ ID NO: 192095 - DNA, 25 bp, Artificial
  Probe
tcaaaagcagaggtggcccaggatg

SEQ ID NO: 192096 - DNA, 25 bp, Artificial
  Probe
aacctgcctgcaagcgagtcccttt

SEQ ID NO: 192097 - DNA, 25 bp, Artificial
  Probe
gtttcctctcagacaacttccgacg

SEQ ID NO: 192098 - DNA, 25 bp, Artificial
  Probe
agcctcgatgccactgtcaaccatg

SEQ ID NO: 192099 - DNA, 25 bp, Artificial
  Probe
tggtttcctctcagacaacttccga

SEQ ID NO: 192100 - DNA, 25 bp, Artificial
  Probe
aagcgagtccctttcaccaagacca

SEQ ID NO: 192101 - DNA, 25 bp, Artificial
  Probe
cgacgctctttccagcgggttctgt

SEQ ID NO: 192102 - DNA, 25 bp, Artificial
  Probe
tgtcactaagccaggccctttcagc

SEQ ID NO: 192103 - DNA, 25 bp, Artificial
  Probe
ccgattctctatggtttcctctcag

SEQ ID NO: 192104 - DNA, 25 bp, Artificial
  Probe
ggactactatgctactgctctcaaa

SEQ ID NO: 192105 - DNA, 25 bp, Artificial
  Probe
gtgctgaggaagagcccctggacta

SEQ ID NO: 192106 - DNA, 25 bp, Artificial
  Probe
gtgttctgtccctaggagcctcagg

SEQ ID NO: 192107 - DNA, 25 bp, Artificial
  Probe
gattctctatggtttcctctcagac

SEQ ID NO: 192108 - DNA, 25 bp, Artificial
  Probe
aggaagagcccctggactactatgc

SEQ ID NO: 192109 - DNA, 25 bp, Artificial
  Probe
actgtctttgtgctatgctggatgc

SEQ ID NO: 192110 - DNA, 25 bp, Artificial
  Probe
ctgcctctcctaggactgactggct

SEQ ID NO: 192111 - DNA, 25 bp, Artificial
  Probe
ttgtcaccagcctcgatgccactgt

SEQ ID NO: 192112 - DNA, 25 bp, Artificial
  Probe
actatgctactgctctcaaaagcag

SEQ ID NO: 192113 - DNA, 25 bp, Artificial
  Probe
ctgtgcctgcgctgctgtctcctgg

SEQ ID NO: 192114 - DNA, 25 bp, Artificial
  Probe
cagaggtggcccaggatgcatatgc

SEQ ID NO: 192115 - DNA, 25 bp, Artificial
  Probe
tctgtccctaggagcctcaggactc

SEQ ID NO: 192116 - DNA, 25 bp, Artificial
  Probe
gccagcaacttcaagaaaactcctg

SEQ ID NO: 192117 - DNA, 25 bp, Artificial
  Probe
atgctggatgccattctatgtagtg

SEQ ID NO: 192118 - DNA, 25 bp, Artificial
  Probe
cctaggagcctcaggactcctgcta

SEQ ID NO: 192119 - DNA, 25 bp, Artificial
  Probe
cgatgccactgtcaaccatgtgtcc

SEQ ID NO: 192120 - DNA, 25 bp, Artificial
  Probe
gcagaacctgcctgcaagcgagtcc

SEQ ID NO: 192121 - DNA, 25 bp, Artificial
  Probe
aaactcctgttgtcactaagccagg

SEQ ID NO: 192122 - DNA, 25 bp, Artificial
  Probe
gcaacttcaagaaaactcctgttgt

SEQ ID NO: 192123 - DNA, 25 bp, Artificial
  Probe
cttttccaaccaaagagaaagcaag

SEQ ID NO: 192124 - DNA, 25 bp, Artificial
  Probe
cacttaaatttgagtgcttagaact

SEQ ID NO: 192125 - DNA, 25 bp, Artificial
  Probe
cacgcagaagtctgaagctgtggtg

SEQ ID NO: 192126 - DNA, 25 bp, Artificial
  Probe
tcggcctttcttggtcttcttccca

SEQ ID NO: 192127 - DNA, 25 bp, Artificial
  Probe
tgaagctgtggtggacgaatcctgc

SEQ ID NO: 192128 - DNA, 25 bp, Artificial
  Probe
tccaaccaaagagaaagcaagattt

SEQ ID NO: 192129 - DNA, 25 bp, Artificial
  Probe
tgccactaacacttaaatttgagtg

SEQ ID NO: 192130 - DNA, 25 bp, Artificial
  Probe
gtccctctgcactgggtggcacctt

SEQ ID NO: 192131 - DNA, 25 bp, Artificial
  Probe
tgcaagtgtccctctgcactgggtg

SEQ ID NO: 192132 - DNA, 25 bp, Artificial
  Probe
gtaccagtagctgaggagtttcttc

SEQ ID NO: 192133 - DNA, 25 bp, Artificial
  Probe
atttgagtgcttagaactccagtcc

SEQ ID NO: 192134 - DNA, 25 bp, Artificial
  Probe
ccttgcagaccagatggtgagagtt

SEQ ID NO: 192135 - DNA, 25 bp, Artificial
  Probe
agtctgaagctgtggtggacgaatc

SEQ ID NO: 192136 - DNA, 25 bp, Artificial
  Probe
gtagctgaggagtttcttcggcctt

SEQ ID NO: 192137 - DNA, 25 bp, Artificial
  Probe
gttctttctgcctcatctgcccttg

SEQ ID NO: 192138 - DNA, 25 bp, Artificial
  Probe
tgtggtggacgaatcctgctcctcc

SEQ ID NO: 192139 - DNA, 25 bp, Artificial
  Probe
gcgacttaacacatgttctttctgc

SEQ ID NO: 192140 - DNA, 25 bp, Artificial
  Probe
accagtagctgaggagtttcttcgg

SEQ ID NO: 192141 - DNA, 25 bp, Artificial
  Probe
agcaagatttatagcccaagtcatg

SEQ ID NO: 192142 - DNA, 25 bp, Artificial
  Probe
gcactgggtggcaccttgcagacca

SEQ ID NO: 192143 - DNA, 25 bp, Artificial
  Probe
tagaactccagtcctatgggggtca

SEQ ID NO: 192144 - DNA, 25 bp, Artificial
  Probe
ggtggcaccttgcagaccagatggt

SEQ ID NO: 192145 - DNA, 25 bp, Artificial
  Probe
ttccacgcagaagtctgaagctgtg

SEQ ID NO: 192146 - DNA, 25 bp, Artificial
  Probe
tcttcttcccacctggaggacttta

SEQ ID NO: 192147 - DNA, 25 bp, Artificial
  Probe
tgaggagtttcttcggcctttcttg

SEQ ID NO: 192148 - DNA, 25 bp, Artificial
  Probe
atctgcccttgcaagtgtccctctg

SEQ ID NO: 192149 - DNA, 25 bp, Artificial
  Probe
gatttatagcccaagtcatgccact

SEQ ID NO: 192150 - DNA, 25 bp, Artificial
  Probe
acttaaatttgagtgcttagaactc

SEQ ID NO: 192151 - DNA, 25 bp, Artificial
  Probe
actccagtcctatgggggtcagact

SEQ ID NO: 192152 - DNA, 25 bp, Artificial
  Probe
atgggggtcagactttttgcctcaa

SEQ ID NO: 192153 - DNA, 25 bp, Artificial
  Probe
agctgaggagtttcttcggcctttc

SEQ ID NO: 192154 - DNA, 25 bp, Artificial
  Probe
agcgacttaacacatgttctttctg

SEQ ID NO: 192155 - DNA, 25 bp, Artificial
  Probe
ctgaggagtttcttcggcctttctt

SEQ ID NO: 192156 - DNA, 25 bp, Artificial
  Probe
gctgtggtggacgaatcctgctcct

SEQ ID NO: 192157 - DNA, 25 bp, Artificial
  Probe
ctttcttggtcttcttcccacctgg

SEQ ID NO: 192158 - DNA, 25 bp, Artificial
  Probe
ctctgcactgggtggcaccttgcag

SEQ ID NO: 192159 - DNA, 25 bp, Artificial
  Probe
cttgcagaccagatggtgagagttt

SEQ ID NO: 192160 - DNA, 25 bp, Artificial
  Probe
gtcctatgggggtcagactttttgc

SEQ ID NO: 192161 - DNA, 25 bp, Artificial
  Probe
cacctggaggactttaacacgagta

SEQ ID NO: 192162 - DNA, 25 bp, Artificial
  Probe
tcttcccacctggaggactttaaca

SEQ ID NO: 192163 - DNA, 25 bp, Artificial
  Probe
ggggtcagactttttgcctcaaata

SEQ ID NO: 192164 - DNA, 25 bp, Artificial
  Probe
actgggtggcaccttgcagaccaga

SEQ ID NO: 192165 - DNA, 25 bp, Artificial
  Probe
gcagtaccagtagctgaggagtttc

SEQ ID NO: 192166 - DNA, 25 bp, Artificial
  Probe
tcttggtcttcttcccacctggagg

SEQ ID NO: 192167 - DNA, 25 bp, Artificial
  Probe
ttcccacctggaggactttaacacg

SEQ ID NO: 192168 - DNA, 25 bp, Artificial
  Probe
cttagaactccagtcctatgggggt

SEQ ID NO: 192169 - DNA, 25 bp, Artificial
  Probe
taaggtccccagcaatgcgcacagg

SEQ ID NO: 192170 - DNA, 25 bp, Artificial
  Probe
ctagtagcttgaaagcctttggagg

SEQ ID NO: 192171 - DNA, 25 bp, Artificial
  Probe
actcccagcagtgttacttccttag

SEQ ID NO: 192172 - DNA, 25 bp, Artificial
  Probe
acccattagttttgttcttctgcag

SEQ ID NO: 192173 - DNA, 25 bp, Artificial
  Probe
ccaaatgttggaatggcaggtctgg

SEQ ID NO: 192174 - DNA, 25 bp, Artificial
  Probe
ggtgccttggacttcaacaaatgtc

SEQ ID NO: 192175 - DNA, 25 bp, Artificial
  Probe
gtctggtaagccagcgcacttggat

SEQ ID NO: 192176 - DNA, 25 bp, Artificial
  Probe
gttggctactgtaaggtccccagca

SEQ ID NO: 192177 - DNA, 25 bp, Artificial
  Probe
aggtccccagcaatgcgcacaggtc

SEQ ID NO: 192178 - DNA, 25 bp, Artificial
  Probe
cacaacttagatatctagtgaaaga

SEQ ID NO: 192179 - DNA, 25 bp, Artificial
  Probe
gtttcttgaaactacacagaatgtc

SEQ ID NO: 192180 - DNA, 25 bp, Artificial
  Probe
ccccataagtgcttaacatttgttg

SEQ ID NO: 192181 - DNA, 25 bp, Artificial
  Probe
agaatgtcacaacttagatatctag

SEQ ID NO: 192182 - DNA, 25 bp, Artificial
  Probe
gaaagcctttggaggacaggaaatc

SEQ ID NO: 192183 - DNA, 25 bp, Artificial
  Probe
aatgtcacaacttagatatctagtg

SEQ ID NO: 192184 - DNA, 25 bp, Artificial
  Probe
tctgttggctactgtaaggtcccca

SEQ ID NO: 192185 - DNA, 25 bp, Artificial
  Probe
aatctgttggctactgtaaggtccc

SEQ ID NO: 192186 - DNA, 25 bp, Artificial
  Probe
agcttgaaagcctttggaggacagg

SEQ ID NO: 192187 - DNA, 25 bp, Artificial
  Probe
gtaagccagcgcacttggattttgt

SEQ ID NO: 192188 - DNA, 25 bp, Artificial
  Probe
ccattagttttgttcttctgcagct

SEQ ID NO: 192189 - DNA, 25 bp, Artificial
  Probe
gcaggtctggtaagccagcgcactt

SEQ ID NO: 192190 - DNA, 25 bp, Artificial
  Probe
aatggcaggtctggtaagccagcgc

SEQ ID NO: 192191 - DNA, 25 bp, Artificial
  Probe
ccataagtgcttaacatttgttgaa

SEQ ID NO: 192192 - DNA, 25 bp, Artificial
  Probe
gcagtgttacttccttagcttacca

SEQ ID NO: 192193 - DNA, 25 bp, Artificial
  Probe
agcagggtgccttggacttcaacaa

SEQ ID NO: 192194 - DNA, 25 bp, Artificial
  Probe
ttgtttcttgaaactacacagaatg

SEQ ID NO: 192195 - DNA, 25 bp, Artificial
  Probe
taagccagcgcacttggattttgtt

SEQ ID NO: 192196 - DNA, 25 bp, Artificial
  Probe
gcctacaattgcatgtattgaaatt

SEQ ID NO: 192197 - DNA, 25 bp, Artificial
  Probe
ttggaatggcaggtctggtaagcca

SEQ ID NO: 192198 - DNA, 25 bp, Artificial
  Probe
acttccttagcttaccaaatgttgg

SEQ ID NO: 192199 - DNA, 25 bp, Artificial
  Probe
actagtagcttgaaagcctttggag

SEQ ID NO: 192200 - DNA, 25 bp, Artificial
  Probe
cccataagtgcttaacatttgttga

SEQ ID NO: 192201 - DNA, 25 bp, Artificial
  Probe
atgtcacaacttagatatctagtga

SEQ ID NO: 192202 - DNA, 25 bp, Artificial
  Probe
agcctttggaggacaggaaatctgt

SEQ ID NO: 192203 - DNA, 25 bp, Artificial
  Probe
tgtaaggtccccagcaatgcgcaca

SEQ ID NO: 192204 - DNA, 25 bp, Artificial
  Probe
atactgcctacaattgcatgtattg

SEQ ID NO: 192205 - DNA, 25 bp, Artificial
  Probe
tataagcaactagtagcttgaaagc

SEQ ID NO: 192206 - DNA, 25 bp, Artificial
  Probe
gctactgtaaggtccccagcaatgc

SEQ ID NO: 192207 - DNA, 25 bp, Artificial
  Probe
ttaccaaatgttggaatggcaggtc

SEQ ID NO: 192208 - DNA, 25 bp, Artificial
  Probe
gccttggacttcaacaaatgtcctt

SEQ ID NO: 192209 - DNA, 25 bp, Artificial
  Probe
cttgaaagcctttggaggacaggaa

SEQ ID NO: 192210 - DNA, 25 bp, Artificial
  Probe
aaatctgttggctactgtaaggtcc

SEQ ID NO: 192211 - DNA, 25 bp, Artificial
  Probe
ccttagcttaccaaatgttggaatg

SEQ ID NO: 192212 - DNA, 25 bp, Artificial
  Probe
agcaactagtagcttgaaagccttt

SEQ ID NO: 192213 - DNA, 25 bp, Artificial
  Probe
ctcccagcagtgttacttccttagc

SEQ ID NO: 192214 - DNA, 25 bp, Artificial
  Probe
gtcacaacttagatatctagtgaaa

SEQ ID NO: 192215 - DNA, 25 bp, Artificial
  Probe
aagacctccgacgtggtggtagctg

SEQ ID NO: 192216 - DNA, 25 bp, Artificial
  Probe
gaagtcctggggttccaagatcacc

SEQ ID NO: 192217 - DNA, 25 bp, Artificial
  Probe
tgaagctggccactcctgcccagtt

SEQ ID NO: 192218 - DNA, 25 bp, Artificial
  Probe
atacaatgccctcaagacccctgag

SEQ ID NO: 192219 - DNA, 25 bp, Artificial
  Probe
aagatcaccgatgtgatgacctgcg

SEQ ID NO: 192220 - DNA, 25 bp, Artificial
  Probe
ccatcgtgtccgaggctgactgcaa

SEQ ID NO: 192221 - DNA, 25 bp, Artificial
  Probe
actcctgcccagttctctgagactg

SEQ ID NO: 192222 - DNA, 25 bp, Artificial
  Probe
cctgaagatcgcacaggtctttaag

SEQ ID NO: 192223 - DNA, 25 bp, Artificial
  Probe
actctgctgaagctggccactcctg

SEQ ID NO: 192224 - DNA, 25 bp, Artificial
  Probe
gctgactgcaagaagtcctggggtt

SEQ ID NO: 192225 - DNA, 25 bp, Artificial
  Probe
ggcaagaccaaatacaatgccctca

SEQ ID NO: 192226 - DNA, 25 bp, Artificial
  Probe
gggttccaagatcaccgatgtgatg

SEQ ID NO: 192227 - DNA, 25 bp, Artificial
  Probe
agagaacatccaggtcctgaagatc

SEQ ID NO: 192228 - DNA, 25 bp, Artificial
  Probe
gcaatgacatcactctgctgaagct

SEQ ID NO: 192229 - DNA, 25 bp, Artificial
  Probe
ctgcgcaggcgctagcggcgtctct

SEQ ID NO: 192230 - DNA, 25 bp, Artificial
  Probe
aatgccctcaagacccctgagaagc

SEQ ID NO: 192231 - DNA, 25 bp, Artificial
  Probe
tgcgcaggcgctagcggcgtctctt

SEQ ID NO: 192232 - DNA, 25 bp, Artificial
  Probe
tcgatgatgacttccctcctggcac

SEQ ID NO: 192233 - DNA, 25 bp, Artificial
  Probe
cggcgtctcttcctgcatgggtgac

SEQ ID NO: 192234 - DNA, 25 bp, Artificial
  Probe
actgtgtgcgccaccactggctggg

SEQ ID NO: 192235 - DNA, 25 bp, Artificial
  Probe
actgctgcccactgcggggtcaaga

SEQ ID NO: 192236 - DNA, 25 bp, Artificial
  Probe
tcaagacctccgacgtggtggtagc

SEQ ID NO: 192237 - DNA, 25 bp, Artificial
  Probe
gagagtttgaccagggctccgacga

SEQ ID NO: 192238 - DNA, 25 bp, Artificial
  Probe
acccctgagaagctgcagcaggccg

SEQ ID NO: 192239 - DNA, 25 bp, Artificial
  Probe
tccaggtcctgaagatcgcacaggt

SEQ ID NO: 192240 - DNA, 25 bp, Artificial
  Probe
cactgcggggtcaagacctccgacg

SEQ ID NO: 192241 - DNA, 25 bp, Artificial
  Probe
agctggagagtttgaccagggctcc

SEQ ID NO: 192242 - DNA, 25 bp, Artificial
  Probe
gctccgacgaagagaacatccaggt

SEQ ID NO: 192243 - DNA, 25 bp, Artificial
  Probe
tagctggagagtttgaccagggctc

SEQ ID NO: 192244 - DNA, 25 bp, Artificial
  Probe
tttgaccagggctccgacgaagaga

SEQ ID NO: 192245 - DNA, 25 bp, Artificial
  Probe
tgcaagaagtcctggggttccaaga

SEQ ID NO: 192246 - DNA, 25 bp, Artificial
  Probe
tgccgtgtgtctacccaacgtcgat

SEQ ID NO: 192247 - DNA, 25 bp, Artificial
  Probe
tgagactgtgtctgccgtgtgtcta

SEQ ID NO: 192248 - DNA, 25 bp, Artificial
  Probe
atatgttcactgtgcgcaatgacat

SEQ ID NO: 192249 - DNA, 25 bp, Artificial
  Probe
gcgctagcggcgtctcttcctgcat

SEQ ID NO: 192250 - DNA, 25 bp, Artificial
  Probe
ccccaagttcaatatgttcactgtg

SEQ ID NO: 192251 - DNA, 25 bp, Artificial
  Probe
cctcaagacccctgagaagctgcag

SEQ ID NO: 192252 - DNA, 25 bp, Artificial
  Probe
ttcactgtgcgcaatgacatcactc

SEQ ID NO: 192253 - DNA, 25 bp, Artificial
  Probe
cgcacaggtctttaagaaccccaag

SEQ ID NO: 192254 - DNA, 25 bp, Artificial
  Probe
tgatgacttccctcctggcactgtg

SEQ ID NO: 192255 - DNA, 25 bp, Artificial
  Probe
ctgtgtctgccgtgtgtctacccaa

SEQ ID NO: 192256 - DNA, 25 bp, Artificial
  Probe
tccgaggctgactgcaagaagtcct

SEQ ID NO: 192257 - DNA, 25 bp, Artificial
  Probe
gatgtgatgacctgcgcaggcgcta

SEQ ID NO: 192258 - DNA, 25 bp, Artificial
  Probe
ctgcccatcgtgtccgaggctgact

SEQ ID NO: 192259 - DNA, 25 bp, Artificial
  Probe
ctgcggggtcaagacctccgacgtg

SEQ ID NO: 192260 - DNA, 25 bp, Artificial
  Probe
ttccactcctgctgtgtattcccga

SEQ ID NO: 192261 - DNA, 25 bp, Artificial
  Probe
agattactgggttgtgcctactcca

SEQ ID NO: 192262 - DNA, 25 bp, Artificial
  Probe
aggaggacctgctggaacccagata

SEQ ID NO: 192263 - DNA, 25 bp, Artificial
  Probe
aaagcacaaatctactggagatgtg

SEQ ID NO: 192264 - DNA, 25 bp, Artificial
  Probe
gtgcatgctgcttgggcaaaggtaa

SEQ ID NO: 192265 - DNA, 25 bp, Artificial
  Probe
tgacttctgccagtgcatgctgctt

SEQ ID NO: 192266 - DNA, 25 bp, Artificial
  Probe
aattctcttgacttgtgaaagtggc

SEQ ID NO: 192267 - DNA, 25 bp, Artificial
  Probe
tctcttgacttgtgaaagtggccca

SEQ ID NO: 192268 - DNA, 25 bp, Artificial
  Probe
caggaggacctgctggaacccagat

SEQ ID NO: 192269 - DNA, 25 bp, Artificial
  Probe
cagctgcacttgctaaggactgggt

SEQ ID NO: 192270 - DNA, 25 bp, Artificial
  Probe
gcaggaggacctgctggaacccaga

SEQ ID NO: 192271 - DNA, 25 bp, Artificial
  Probe
agctgcacttgctaaggactgggtg

SEQ ID NO: 192272 - DNA, 25 bp, Artificial
  Probe
agtgaggtgccaggtcacagagaca

SEQ ID NO: 192273 - DNA, 25 bp, Artificial
  Probe
caggcaggaggacctgctggaaccc

SEQ ID NO: 192274 - DNA, 25 bp, Artificial
  Probe
aatctactggagatgtgtgtgccaa

SEQ ID NO: 192275 - DNA, 25 bp, Artificial
  Probe
caaatctactggagatgtgtgtgcc

SEQ ID NO: 192276 - DNA, 25 bp, Artificial
  Probe
tttcagctgcaagtcggtagggcga

SEQ ID NO: 192277 - DNA, 25 bp, Artificial
  Probe
ggtgccaggtcacagagacagaccc

SEQ ID NO: 192278 - DNA, 25 bp, Artificial
  Probe
ttggccaagaacaaccacttcacag

SEQ ID NO: 192279 - DNA, 25 bp, Artificial
  Probe
gccagtgcatgctgcttgggcaaag

SEQ ID NO: 192280 - DNA, 25 bp, Artificial
  Probe
ttcagctgcaagtcggtagggcgaa

SEQ ID NO: 192281 - DNA, 25 bp, Artificial
  Probe
tgctgcttgggcaaaggtaattctc

SEQ ID NO: 192282 - DNA, 25 bp, Artificial
  Probe
tcactcaatcacttccctggctgtg

SEQ ID NO: 192283 - DNA, 25 bp, Artificial
  Probe
acagctgcacttgctaaggactggg

SEQ ID NO: 192284 - DNA, 25 bp, Artificial
  Probe
aggcaggaggacctgctggaaccca

SEQ ID NO: 192285 - DNA, 25 bp, Artificial
  Probe
tttcctgacttctgccagtgcatgc

SEQ ID NO: 192286 - DNA, 25 bp, Artificial
  Probe
ctgccagtgcatgctgcttgggcaa

SEQ ID NO: 192287 - DNA, 25 bp, Artificial
  Probe
aggtgccaggtcacagagacagacc

SEQ ID NO: 192288 - DNA, 25 bp, Artificial
  Probe
gagattactgggttgtgcctactcc

SEQ ID NO: 192289 - DNA, 25 bp, Artificial
  Probe
ctgacttctgccagtgcatgctgct

SEQ ID NO: 192290 - DNA, 25 bp, Artificial
  Probe
gttttggccaagaacaaccacttca

SEQ ID NO: 192291 - DNA, 25 bp, Artificial
  Probe
ctgcaagtcggtagggcgaaaagtt

SEQ ID NO: 192292 - DNA, 25 bp, Artificial
  Probe
tcctttcagctgcaagtcggtaggg

SEQ ID NO: 192293 - DNA, 25 bp, Artificial
  Probe
ccagtgcatgctgcttgggcaaagg

SEQ ID NO: 192294 - DNA, 25 bp, Artificial
  Probe
ggtcttccatgaggtcaaggtgttt

SEQ ID NO: 192295 - DNA, 25 bp, Artificial
  Probe
tatcagagatgcaggcaggaggacc

SEQ ID NO: 192296 - DNA, 25 bp, Artificial
  Probe
caatcacttccctggctgtgaaaaa

SEQ ID NO: 192297 - DNA, 25 bp, Artificial
  Probe
cagtgcatgctgcttgggcaaaggt

SEQ ID NO: 192298 - DNA, 25 bp, Artificial
  Probe
caaaggtaattctcttgacttgtga

SEQ ID NO: 192299 - DNA, 25 bp, Artificial
  Probe
acttctgccagtgcatgctgcttgg

SEQ ID NO: 192300 - DNA, 25 bp, Artificial
  Probe
agtgcatgctgcttgggcaaaggta

SEQ ID NO: 192301 - DNA, 25 bp, Artificial
  Probe
tgaggtgccaggtcacagagacaga

SEQ ID NO: 192302 - DNA, 25 bp, Artificial
  Probe
gtggtcttccatgaggtcaaggtgt

SEQ ID NO: 192303 - DNA, 25 bp, Artificial
  Probe
cttctgccagtgcatgctgcttggg

SEQ ID NO: 192304 - DNA, 25 bp, Artificial
  Probe
cctttcagctgcaagtcggtagggc

SEQ ID NO: 192305 - DNA, 25 bp, Artificial
  Probe
gacttctgccagtgcatgctgcttg

SEQ ID NO: 192306 - DNA, 25 bp, Artificial
  Probe
tggccaagaacaaccacttcacagg

SEQ ID NO: 192307 - DNA, 25 bp, Artificial
  Probe
cgttcaggaaggatccaaagggatt

SEQ ID NO: 192308 - DNA, 25 bp, Artificial
  Probe
tcaccactatgtcaaacagagtctg

SEQ ID NO: 192309 - DNA, 25 bp, Artificial
  Probe
gactccagatgaaacagttactact

SEQ ID NO: 192310 - DNA, 25 bp, Artificial
  Probe
acttcaattgccagccatcaagctg

SEQ ID NO: 192311 - DNA, 25 bp, Artificial
  Probe
ctccacgctactgtagctcacagat

SEQ ID NO: 192312 - DNA, 25 bp, Artificial
  Probe
cactctggaaaattgccagataaca

SEQ ID NO: 192313 - DNA, 25 bp, Artificial
  Probe
tagagcggaaactctgcatggctgc

SEQ ID NO: 192314 - DNA, 25 bp, Artificial
  Probe
gatgagccatctcataaaactagcc

SEQ ID NO: 192315 - DNA, 25 bp, Artificial
  Probe
atctgtgaggcgttcaggaaggatc

SEQ ID NO: 192316 - DNA, 25 bp, Artificial
  Probe
ttcaccccgggacttccgagtgttg

SEQ ID NO: 192317 - DNA, 25 bp, Artificial
  Probe
aattgccagccatcaagctgccaac

SEQ ID NO: 192318 - DNA, 25 bp, Artificial
  Probe
agtcaccagccacaggaatttcccg

SEQ ID NO: 192319 - DNA, 25 bp, Artificial
  Probe
gagagactccagatgaaacagttac

SEQ ID NO: 192320 - DNA, 25 bp, Artificial
  Probe
acttccgagtgttgcacgaaggagg

SEQ ID NO: 192321 - DNA, 25 bp, Artificial
  Probe
tattcgaatattccagcaattacgg

SEQ ID NO: 192322 - DNA, 25 bp, Artificial
  Probe
ctccccggaagagctggcagacatg

SEQ ID NO: 192323 - DNA, 25 bp, Artificial
  Probe
atctgtggaaacttatccaaaaaga

SEQ ID NO: 192324 - DNA, 25 bp, Artificial
  Probe
ctgtgctgagggagcagatcccaac

SEQ ID NO: 192325 - DNA, 25 bp, Artificial
  Probe
ggagccgacgaatgatgagatctgt

SEQ ID NO: 192326 - DNA, 25 bp, Artificial
  Probe
aaatgagagacatcctgcagtcctg

SEQ ID NO: 192327 - DNA, 25 bp, Artificial
  Probe
gcctccaagtgctgctccataaact

SEQ ID NO: 192328 - DNA, 25 bp, Artificial
  Probe
aaattggcggaacgactgaggacaa

SEQ ID NO: 192329 - DNA, 25 bp, Artificial
  Probe
gagctgcctgaacacacattaaaaa

SEQ ID NO: 192330 - DNA, 25 bp, Artificial
  Probe
cacaatatgctgcatatggaaagga

SEQ ID NO: 192331 - DNA, 25 bp, Artificial
  Probe
caaggatgagccatctcataaaact

SEQ ID NO: 192332 - DNA, 25 bp, Artificial
  Probe
ttgaagagtgctgttacgaaacaac

SEQ ID NO: 192333 - DNA, 25 bp, Artificial
  Probe
gccaactgctgaaccacttcaattg

SEQ ID NO: 192334 - DNA, 25 bp, Artificial
  Probe
gctcacagattgatgcagaaatgag

SEQ ID NO: 192335 - DNA, 25 bp, Artificial
  Probe
cagtcctgatgcagggtatatgcaa

SEQ ID NO: 192336 - DNA, 25 bp, Artificial
  Probe
aagaggcaactaacttctttcattg

SEQ ID NO: 192337 - DNA, 25 bp, Artificial
  Probe
agggtatatgcaatgccttggacct

SEQ ID NO: 192338 - DNA, 25 bp, Artificial
  Probe
cttctttcattgaaaaggggcaaga

SEQ ID NO: 192339 - DNA, 25 bp, Artificial
  Probe
gtagctacttcatgccaactgctga

SEQ ID NO: 192340 - DNA, 25 bp, Artificial
  Probe
gaacacatttactgagtacaagaaa

SEQ ID NO: 192341 - DNA, 25 bp, Artificial
  Probe
gccgatcagtttctattcgaatatt

SEQ ID NO: 192342 - DNA, 25 bp, Artificial
  Probe
ttaagtcctgtgaaagtgacgcccc

SEQ ID NO: 192343 - DNA, 25 bp, Artificial
  Probe
aatcaagcaaataccacagagatgg

SEQ ID NO: 192344 - DNA, 25 bp, Artificial
  Probe
tggcggaacgactgaggacaaaaat

SEQ ID NO: 192345 - DNA, 25 bp, Artificial
  Probe
aaagtaccaactgctaacctggagg

SEQ ID NO: 192346 - DNA, 25 bp, Artificial
  Probe
ggaaactctgcatggctgccctcag

SEQ ID NO: 192347 - DNA, 25 bp, Artificial
  Probe
tggatacgaccctgaaaacccttag

SEQ ID NO: 192348 - DNA, 25 bp, Artificial
  Probe
caaagttctggatacgaccctgaaa

SEQ ID NO: 192349 - DNA, 25 bp, Artificial
  Probe
ggagcagatcccaactgctatgaca

SEQ ID NO: 192350 - DNA, 25 bp, Artificial
  Probe
catcaagctgccaaccagcaaagac

SEQ ID NO: 192351 - DNA, 25 bp, Artificial
  Probe
tgtgctttttgaaggagagactcca

SEQ ID NO: 192352 - DNA, 25 bp, Artificial
  Probe
aatgtgtgcagattattccgagaac

SEQ ID NO: 192353 - DNA, 25 bp, Artificial
  Probe
agttcggccagaccagaccccagga

SEQ ID NO: 192354 - DNA, 25 bp, Artificial
  Probe
acatggagaggactttccaggcatg

SEQ ID NO: 192355 - DNA, 25 bp, Artificial
  Probe
aagggaatgcttcctggaccttgca

SEQ ID NO: 192356 - DNA, 25 bp, Artificial
  Probe
gcttcccaagcgtgggtctggcctc

SEQ ID NO: 192357 - DNA, 25 bp, Artificial
  Probe
gagactgttgccttcatatacctcc

SEQ ID NO: 192358 - DNA, 25 bp, Artificial
  Probe
ggcttacagttctgggatgaaccct

SEQ ID NO: 192359 - DNA, 25 bp, Artificial
  Probe
gtccttgctctaaggggaccagaaa

SEQ ID NO: 192360 - DNA, 25 bp, Artificial
  Probe
agaccagaccccaggagagtaaggg

SEQ ID NO: 192361 - DNA, 25 bp, Artificial
  Probe
cggccagaccagaccccaggagagt

SEQ ID NO: 192362 - DNA, 25 bp, Artificial
  Probe
agcaggaatcatctccaacactcag

SEQ ID NO: 192363 - DNA, 25 bp, Artificial
  Probe
agagactgactatccggctacatgg

SEQ ID NO: 192364 - DNA, 25 bp, Artificial
  Probe
atgagagactgactatccggctaca

SEQ ID NO: 192365 - DNA, 25 bp, Artificial
  Probe
aggaatcatctccaacactcaggtc

SEQ ID NO: 192366 - DNA, 25 bp, Artificial
  Probe
cactcaggtccctgacccaggagga

SEQ ID NO: 192367 - DNA, 25 bp, Artificial
  Probe
caagcgtgggtctggcctcccaagg

SEQ ID NO: 192368 - DNA, 25 bp, Artificial
  Probe
ccaggcatgaacatgccagagactg

SEQ ID NO: 192369 - DNA, 25 bp, Artificial
  Probe
aacttcagcagttcggccagaccag

SEQ ID NO: 192370 - DNA, 25 bp, Artificial
  Probe
ttttcttgtctgtggctgaagaggc

SEQ ID NO: 192371 - DNA, 25 bp, Artificial
  Probe
tggaccttgcaatggcctggcttcc

SEQ ID NO: 192372 - DNA, 25 bp, Artificial
  Probe
ggtccctgacccaggaggaagaagc

SEQ ID NO: 192373 - DNA, 25 bp, Artificial
  Probe
gcactattcaagcaggaatcatctc

SEQ ID NO: 192374 - DNA, 25 bp, Artificial
  Probe
actcaggtccctgacccaggaggaa

SEQ ID NO: 192375 - DNA, 25 bp, Artificial
  Probe
aatgccagcctctctacctgggact

SEQ ID NO: 192376 - DNA, 25 bp, Artificial
  Probe
cctcccaggagatgccagaggttag

SEQ ID NO: 192377 - DNA, 25 bp, Artificial
  Probe
agtcacccagacctggctgttttct

SEQ ID NO: 192378 - DNA, 25 bp, Artificial
  Probe
cggaaaatactcaggacttgcactt

SEQ ID NO: 192379 - DNA, 25 bp, Artificial
  Probe
cttgcaatggcctggcttccctggg

SEQ ID NO: 192380 - DNA, 25 bp, Artificial
  Probe
ccaggagatgccagaggttagagcc

SEQ ID NO: 192381 - DNA, 25 bp, Artificial
  Probe
tgactatccggctacatggagagga

SEQ ID NO: 192382 - DNA, 25 bp, Artificial
  Probe
acgattcttgcttcccaagcgtggg

SEQ ID NO: 192383 - DNA, 25 bp, Artificial
  Probe
aatactcaggacttgcactttcacg

SEQ ID NO: 192384 - DNA, 25 bp, Artificial
  Probe
gaggtaacttcagcagttcggccag

SEQ ID NO: 192385 - DNA, 25 bp, Artificial
  Probe
gccagaggttagagccccagagtcc

SEQ ID NO: 192386 - DNA, 25 bp, Artificial
  Probe
cccagacctggctgttttcttgtct

SEQ ID NO: 192387 - DNA, 25 bp, Artificial
  Probe
cggctacatggagaggactttccag

SEQ ID NO: 192388 - DNA, 25 bp, Artificial
  Probe
gtccctgacccaggaggaagaagcc

SEQ ID NO: 192389 - DNA, 25 bp, Artificial
  Probe
ccccaggagagtaagggctgctagt

SEQ ID NO: 192390 - DNA, 25 bp, Artificial
  Probe
tttcacgattcttgcttcccaagcg

SEQ ID NO: 192391 - DNA, 25 bp, Artificial
  Probe
gacttgcactttcacgattcttgct

SEQ ID NO: 192392 - DNA, 25 bp, Artificial
  Probe
cacccgagtggcttacagttctggg

SEQ ID NO: 192393 - DNA, 25 bp, Artificial
  Probe
ggttagagccccagagtccttgctc

SEQ ID NO: 192394 - DNA, 25 bp, Artificial
  Probe
ctggctgttttcttgtctgtggctg

SEQ ID NO: 192395 - DNA, 25 bp, Artificial
  Probe
agagtaagggctgctagtcacccag

SEQ ID NO: 192396 - DNA, 25 bp, Artificial
  Probe
actttccaggcatgaacatgccaga

SEQ ID NO: 192397 - DNA, 25 bp, Artificial
  Probe
gggaggcctcactctgcactattca

SEQ ID NO: 192398 - DNA, 25 bp, Artificial
  Probe
ccaagcgtgggtctggcctcccaag

SEQ ID NO: 192399 - DNA, 25 bp, Artificial
  Probe
tctggtcctgcctttctgtgaaagc

SEQ ID NO: 192400 - DNA, 25 bp, Artificial
  Probe
aagcaaagcgcaagatggccttggc

SEQ ID NO: 192401 - DNA, 25 bp, Artificial
  Probe
agtcaggatctaactcctatgcccc

SEQ ID NO: 192402 - DNA, 25 bp, Artificial
  Probe
gcaagatggccttggcccgtgaaag

SEQ ID NO: 192403 - DNA, 25 bp, Artificial
  Probe
aaatgagcgcaatgctgaagcaaag

SEQ ID NO: 192404 - DNA, 25 bp, Artificial
  Probe
ctgccacatgcctgcgttgttgggt

SEQ ID NO: 192405 - DNA, 25 bp, Artificial
  Probe
tgggtgccataattaactggctagg

SEQ ID NO: 192406 - DNA, 25 bp, Artificial
  Probe
cgagtcaggatctaactcctatgcc

SEQ ID NO: 192407 - DNA, 25 bp, Artificial
  Probe
ccaccctggaggtgatcgaggtgca

SEQ ID NO: 192408 - DNA, 25 bp, Artificial
  Probe
tggtcctgcctttctgtgaaagcag

SEQ ID NO: 192409 - DNA, 25 bp, Artificial
  Probe
tgcgttgttgggtgccataattaac

SEQ ID NO: 192410 - DNA, 25 bp, Artificial
  Probe
agcagctgccacatgcctgcgttgt

SEQ ID NO: 192411 - DNA, 25 bp, Artificial
  Probe
agaagagcctgaacggacagccagg

SEQ ID NO: 192412 - DNA, 25 bp, Artificial
  Probe
aggtgcaccgagtgggcaactccaa

SEQ ID NO: 192413 - DNA, 25 bp, Artificial
  Probe
gccataattaactggctaggctact

SEQ ID NO: 192414 - DNA, 25 bp, Artificial
  Probe
ctggctgccgtttttcattgtggct

SEQ ID NO: 192415 - DNA, 25 bp, Artificial
  Probe
ggactccgtgcactaatggggcagt

SEQ ID NO: 192416 - DNA, 25 bp, Artificial
  Probe
aagggagcaggcaccagcttaggaa

SEQ ID NO: 192417 - DNA, 25 bp, Artificial
  Probe
accctggaggtgatcgaggtgcacc

SEQ ID NO: 192418 - DNA, 25 bp, Artificial
  Probe
tttcattgtggctctggtcctgcct

SEQ ID NO: 192419 - DNA, 25 bp, Artificial
  Probe
ttgttgggtgccataattaactggc

SEQ ID NO: 192420 - DNA, 25 bp, Artificial
  Probe
cgcaagactgtcaggaaggtggaaa

SEQ ID NO: 192421 - DNA, 25 bp, Artificial
  Probe
acgaggccaccctggaggtgatcga

SEQ ID NO: 192422 - DNA, 25 bp, Artificial
  Probe
gggcaactccaaagagcaccttcct

SEQ ID NO: 192423 - DNA, 25 bp, Artificial
  Probe
ctccgtgcactaatggggcagtgag

SEQ ID NO: 192424 - DNA, 25 bp, Artificial
  Probe
tgtgaaagcagctgccacatgcctg

SEQ ID NO: 192425 - DNA, 25 bp, Artificial
  Probe
atgctgaagcaaagcgcaagatggc

SEQ ID NO: 192426 - DNA, 25 bp, Artificial
  Probe
ccaagaagagcctgaacggacagcc

SEQ ID NO: 192427 - DNA, 25 bp, Artificial
  Probe
tgcctgcgttgttgggtgccataat

SEQ ID NO: 192428 - DNA, 25 bp, Artificial
  Probe
aattaactggctaggctactccaac

SEQ ID NO: 192429 - DNA, 25 bp, Artificial
  Probe
cacatgcctgcgttgttgggtgcca

SEQ ID NO: 192430 - DNA, 25 bp, Artificial
  Probe
tggctctggtcctgcctttctgtga

SEQ ID NO: 192431 - DNA, 25 bp, Artificial
  Probe
gagcctgaacggacagccaggtagt

SEQ ID NO: 192432 - DNA, 25 bp, Artificial
  Probe
agcctgaacggacagccaggtagtg

SEQ ID NO: 192433 - DNA, 25 bp, Artificial
  Probe
gctcaatccggttatttatgcttat

SEQ ID NO: 192434 - DNA, 25 bp, Artificial
  Probe
gcagctgccacatgcctgcgttgtt

SEQ ID NO: 192435 - DNA, 25 bp, Artificial
  Probe
caaagcgcaagatggccttggcccg

SEQ ID NO: 192436 - DNA, 25 bp, Artificial
  Probe
gcttaggaacttcgtcggcaccgcc

SEQ ID NO: 192437 - DNA, 25 bp, Artificial
  Probe
cgcaagatggccttggcccgtgaaa

SEQ ID NO: 192438 - DNA, 25 bp, Artificial
  Probe
ccagcgagtcaggatctaactccta

SEQ ID NO: 192439 - DNA, 25 bp, Artificial
  Probe
ctctgcccagcgagtcaggatctaa

SEQ ID NO: 192440 - DNA, 25 bp, Artificial
  Probe
tgctcaatccggttatttatgctta

SEQ ID NO: 192441 - DNA, 25 bp, Artificial
  Probe
ataatcaagtgcaagttctgccgcc

SEQ ID NO: 192442 - DNA, 25 bp, Artificial
  Probe
caccgagtgggcaactccaaagagc

SEQ ID NO: 192443 - DNA, 25 bp, Artificial
  Probe
ctgcctttctgtgaaagcagctgcc

SEQ ID NO: 192444 - DNA, 25 bp, Artificial
  Probe
cgaggtgcaccgagtgggcaactcc

SEQ ID NO: 192445 - DNA, 25 bp, Artificial
  Probe
ccaagttggacagtggcagggtcct

SEQ ID NO: 192446 - DNA, 25 bp, Artificial
  Probe
cctgcgcgaccagatccctgagttg

SEQ ID NO: 192447 - DNA, 25 bp, Artificial
  Probe
cttggaacgtcagaggagaaacgag

SEQ ID NO: 192448 - DNA, 25 bp, Artificial
  Probe
acagtggcagggtcctgaaacagat

SEQ ID NO: 192449 - DNA, 25 bp, Artificial
  Probe
tcggactcgctgctgtcctccgagt

SEQ ID NO: 192450 - DNA, 25 bp, Artificial
  Probe
acaagaggcggacacacaacgtctt

SEQ ID NO: 192451 - DNA, 25 bp, Artificial
  Probe
cccaggtcctcagacaccgaggaaa

SEQ ID NO: 192452 - DNA, 25 bp, Artificial
  Probe
acagttgaaacacaaactcgaacag

SEQ ID NO: 192453 - DNA, 25 bp, Artificial
  Probe
ggccgctgccaaactggtctccgag

SEQ ID NO: 192454 - DNA, 25 bp, Artificial
  Probe
tcatctcagaaaaggacttactgag

SEQ ID NO: 192455 - DNA, 25 bp, Artificial
  Probe
tggacttcaaaaaatgcatgctcaa

SEQ ID NO: 192456 - DNA, 25 bp, Artificial
  Probe
agacaccgaggaaaacgacaagagg

SEQ ID NO: 192457 - DNA, 25 bp, Artificial
  Probe
ccgagtgcatcgacccctcagtggt

SEQ ID NO: 192458 - DNA, 25 bp, Artificial
  Probe
tgcgcgcaaagacagcaccagcctg

SEQ ID NO: 192459 - DNA, 25 bp, Artificial
  Probe
ccagctgccaagagggccaagttgg

SEQ ID NO: 192460 - DNA, 25 bp, Artificial
  Probe
atccccatcaagaggccacagcaaa

SEQ ID NO: 192461 - DNA, 25 bp, Artificial
  Probe
gtgcataaactgaccggaagtgagg

SEQ ID NO: 192462 - DNA, 25 bp, Artificial
  Probe
cttactgaggaaacggcgagaacag

SEQ ID NO: 192463 - DNA, 25 bp, Artificial
  Probe
ctggaatctcgagtgtaaggagaac

SEQ ID NO: 192464 - DNA, 25 bp, Artificial
  Probe
ccctgagcccctagtgctgcatgaa

SEQ ID NO: 192465 - DNA, 25 bp, Artificial
  Probe
gcctaacctcacaaccttggctggg

SEQ ID NO: 192466 - DNA, 25 bp, Artificial
  Probe
ggtgccatgtctctactcaccagca

SEQ ID NO: 192467 - DNA, 25 bp, Artificial
  Probe
gatgagcacaaactcatctcagaaa

SEQ ID NO: 192468 - DNA, 25 bp, Artificial
  Probe
gcctacatcctgtccgttcaagcag

SEQ ID NO: 192469 - DNA, 25 bp, Artificial
  Probe
gaaacgagctgaagcgtagcttttt

SEQ ID NO: 192470 - DNA, 25 bp, Artificial
  Probe
atcaagaggccacagcaaacctcca

SEQ ID NO: 192471 - DNA, 25 bp, Artificial
  Probe
accagcagcgactctgaagaagaac

SEQ ID NO: 192472 - DNA, 25 bp, Artificial
  Probe
aaatcttccggtgtacatagggcct

SEQ ID NO: 192473 - DNA, 25 bp, Artificial
  Probe
cgcgcaaagacagcaccagcctgag

SEQ ID NO: 192474 - DNA, 25 bp, Artificial
  Probe
tggggctttgggacttcagccataa

SEQ ID NO: 192475 - DNA, 25 bp, Artificial
  Probe
cctccacaaggaaggactatccagc

SEQ ID NO: 192476 - DNA, 25 bp, Artificial
  Probe
acacagcccactggtcctcaagagg

SEQ ID NO: 192477 - DNA, 25 bp, Artificial
  Probe
atgttaactgcctcaaagttaaggc

SEQ ID NO: 192478 - DNA, 25 bp, Artificial
  Probe
tgcctcaaagttaaggcataaaaga

SEQ ID NO: 192479 - DNA, 25 bp, Artificial
  Probe
ctagtgctgcatgaagagacaccgc

SEQ ID NO: 192480 - DNA, 25 bp, Artificial
  Probe
gcttttttgccctgcgcgaccagat

SEQ ID NO: 192481 - DNA, 25 bp, Artificial
  Probe
ccaccagcagcgactctgaagaaga

SEQ ID NO: 192482 - DNA, 25 bp, Artificial
  Probe
tcctgacgatgagaccttcatcaag

SEQ ID NO: 192483 - DNA, 25 bp, Artificial
  Probe
gatccctgagttggaaaacaacgaa

SEQ ID NO: 192484 - DNA, 25 bp, Artificial
  Probe
aggacttactgaggaaacggcgaga

SEQ ID NO: 192485 - DNA, 25 bp, Artificial
  Probe
cagggtcctgaaacagatcagcaac

SEQ ID NO: 192486 - DNA, 25 bp, Artificial
  Probe
gtccgagtgcatcgacccctcagtg

SEQ ID NO: 192487 - DNA, 25 bp, Artificial
  Probe
cctgccaagaggtccgagtcagggt

SEQ ID NO: 192488 - DNA, 25 bp, Artificial
  Probe
taaggagaacggttccttctgacag

SEQ ID NO: 192489 - DNA, 25 bp, Artificial
  Probe
agatcagcaacaaccgcaaatgctc

SEQ ID NO: 192490 - DNA, 25 bp, Artificial
  Probe
gaagctggcctcttaccaggctgcg

SEQ ID NO: 192491 - DNA, 25 bp, Artificial
  Probe
agtgtccagggacagctgaaggaca

SEQ ID NO: 192492 - DNA, 25 bp, Artificial
  Probe
agaggcagctctggagcacgaagaa

SEQ ID NO: 192493 - DNA, 25 bp, Artificial
  Probe
ggcagctctggagcacgaagaagcc

SEQ ID NO: 192494 - DNA, 25 bp, Artificial
  Probe
ttttcgtggctcctgaccatcctgc

SEQ ID NO: 192495 - DNA, 25 bp, Artificial
  Probe
tgtatgttttcgtggctcctgacca

SEQ ID NO: 192496 - DNA, 25 bp, Artificial
  Probe
tgttttcgtggctcctgaccatcct

SEQ ID NO: 192497 - DNA, 25 bp, Artificial
  Probe
ctctggagcacgaagaagccaagat

SEQ ID NO: 192498 - DNA, 25 bp, Artificial
  Probe
agagatcgagcagctgaagaggaac

SEQ ID NO: 192499 - DNA, 25 bp, Artificial
  Probe
ggctcctgaccatcctgcttaattt

SEQ ID NO: 192500 - DNA, 25 bp, Artificial
  Probe
gcagctctggagcacgaagaagcca

SEQ ID NO: 192501 - DNA, 25 bp, Artificial
  Probe
taccagaggacagtggagaccatgc

SEQ ID NO: 192502 - DNA, 25 bp, Artificial
  Probe
atcctcaggatccagcttgaactga

SEQ ID NO: 192503 - DNA, 25 bp, Artificial
  Probe
gcagagaccatcaagcacctccgga

SEQ ID NO: 192504 - DNA, 25 bp, Artificial
  Probe
agatcctcaggatccagcttgaact

SEQ ID NO: 192505 - DNA, 25 bp, Artificial
  Probe
cagaggcagctctggagcacgaaga

SEQ ID NO: 192506 - DNA, 25 bp, Artificial
  Probe
atgtatgttttcgtggctcctgacc

SEQ ID NO: 192507 - DNA, 25 bp, Artificial
  Probe
gaccatcaagcacctccggagtgtc

SEQ ID NO: 192508 - DNA, 25 bp, Artificial
  Probe
gagatcgagcagctgaagaggaact

SEQ ID NO: 192509 - DNA, 25 bp, Artificial
  Probe
ccagcttgaactgacgcaggtgaaa

SEQ ID NO: 192510 - DNA, 25 bp, Artificial
  Probe
gagaccatcaagcacctccggagtg

SEQ ID NO: 192511 - DNA, 25 bp, Artificial
  Probe
aactaccagaggacagtggagacca

SEQ ID NO: 192512 - DNA, 25 bp, Artificial
  Probe
aggaactaccagaggacagtggaga

SEQ ID NO: 192513 - DNA, 25 bp, Artificial
  Probe
ggatccagcttgaactgacgcaggt

SEQ ID NO: 192514 - DNA, 25 bp, Artificial
  Probe
tcgtggctcctgaccatcctgctta

SEQ ID NO: 192515 - DNA, 25 bp, Artificial
  Probe
gccaggccgcagagaccatcaagca

SEQ ID NO: 192516 - DNA, 25 bp, Artificial
  Probe
agaggaactaccagaggacagtgga

SEQ ID NO: 192517 - DNA, 25 bp, Artificial
  Probe
ccagggacagctgaaggacacccag

SEQ ID NO: 192518 - DNA, 25 bp, Artificial
  Probe
cagcttgaactgacgcaggtgaaat

SEQ ID NO: 192519 - DNA, 25 bp, Artificial
  Probe
ctgacgcaggtgaaatcagagatcg

SEQ ID NO: 192520 - DNA, 25 bp, Artificial
  Probe
aggagtgagcatgtcctcctggtga

SEQ ID NO: 192521 - DNA, 25 bp, Artificial
  Probe
atcgagcagctgaagaggaactacc

SEQ ID NO: 192522 - DNA, 25 bp, Artificial
  Probe
aagatcctcaggatccagcttgaac

SEQ ID NO: 192523 - DNA, 25 bp, Artificial
  Probe
gtccagggacagctgaaggacaccc

SEQ ID NO: 192524 - DNA, 25 bp, Artificial
  Probe
cagtggagaccatgcagggcgccct

SEQ ID NO: 192525 - DNA, 25 bp, Artificial
  Probe
aagcacctccggagtgtccagggac

SEQ ID NO: 192526 - DNA, 25 bp, Artificial
  Probe
cacctccggagtgtccagggacagc

SEQ ID NO: 192527 - DNA, 25 bp, Artificial
  Probe
acagtggagaccatgcagggcgccc

SEQ ID NO: 192528 - DNA, 25 bp, Artificial
  Probe
ctaccagaggacagtggagaccatg

SEQ ID NO: 192529 - DNA, 25 bp, Artificial
  Probe
tgtccagggacagctgaaggacacc

SEQ ID NO: 192530 - DNA, 25 bp, Artificial
  Probe
aggccgcagagaccatcaagcacct

SEQ ID NO: 192531 - DNA, 25 bp, Artificial
  Probe
agcagaggcagctctggagcacgaa

SEQ ID NO: 192532 - DNA, 25 bp, Artificial
  Probe
ttgaactgacgcaggtgaaatcaga

SEQ ID NO: 192533 - DNA, 25 bp, Artificial
  Probe
tgaactgacgcaggtgaaatcagag

SEQ ID NO: 192534 - DNA, 25 bp, Artificial
  Probe
cctccggagtgtccagggacagctg

SEQ ID NO: 192535 - DNA, 25 bp, Artificial
  Probe
cagaatgtatgttttcgtggctcct

SEQ ID NO: 192536 - DNA, 25 bp, Artificial
  Probe
aggcagctctggagcacgaagaagc

SEQ ID NO: 192537 - DNA, 25 bp, Artificial
  Probe
atgcacatgtgaaggccctgctgca

SEQ ID NO: 192538 - DNA, 25 bp, Artificial
  Probe
catagctgagccaggcagatactac

SEQ ID NO: 192539 - DNA, 25 bp, Artificial
  Probe
cagaagttggtttcagcatgtatct

SEQ ID NO: 192540 - DNA, 25 bp, Artificial
  Probe
ctgcctgaaatgcatgtgggtgatt

SEQ ID NO: 192541 - DNA, 25 bp, Artificial
  Probe
ctgctgcagaagagacccaagccag

SEQ ID NO: 192542 - DNA, 25 bp, Artificial
  Probe
tcgtgcaggcagtgtcagatgcccg

SEQ ID NO: 192543 - DNA, 25 bp, Artificial
  Probe
gagaatcatagctgagccaggcaga

SEQ ID NO: 192544 - DNA, 25 bp, Artificial
  Probe
catgtatctgcttgacattggtggt

SEQ ID NO: 192545 - DNA, 25 bp, Artificial
  Probe
cctgggtctgaagacacgaagctta

SEQ ID NO: 192546 - DNA, 25 bp, Artificial
  Probe
atcggatcgtcgagcgctgtagcct

SEQ ID NO: 192547 - DNA, 25 bp, Artificial
  Probe
cgtcgagcgctgtagcctgcctgaa

SEQ ID NO: 192548 - DNA, 25 bp, Artificial
  Probe
gcccatgtcttgtgcccaggagagc

SEQ ID NO: 192549 - DNA, 25 bp, Artificial
  Probe
cagaagagacccaagccagatgaga

SEQ ID NO: 192550 - DNA, 25 bp, Artificial
  Probe
tctgaagacacgaagcttaaatttg

SEQ ID NO: 192551 - DNA, 25 bp, Artificial
  Probe
aacgagcaaactttgatgtattacg

SEQ ID NO: 192552 - DNA, 25 bp, Artificial
  Probe
gcttcccgccagaagtggaggagca

SEQ ID NO: 192553 - DNA, 25 bp, Artificial
  Probe
gcagatactacgtcgcatcagcttt

SEQ ID NO: 192554 - DNA, 25 bp, Artificial
  Probe
ctgcagcctgtgcttctgctagtat

SEQ ID NO: 192555 - DNA, 25 bp, Artificial
  Probe
acttgcagtgaatatcattgccaaa

SEQ ID NO: 192556 - DNA, 25 bp, Artificial
  Probe
agaccggctcggacgatgaagatga

SEQ ID NO: 192557 - DNA, 25 bp, Artificial
  Probe
tgtttgagaacatgggtgcatacac

SEQ ID NO: 192558 - DNA, 25 bp, Artificial
  Probe
agcgctgtagcctgcctgaaatgca

SEQ ID NO: 192559 - DNA, 25 bp, Artificial
  Probe
tcggactctggagtgagaatcatag

SEQ ID NO: 192560 - DNA, 25 bp, Artificial
  Probe
tgtatagatgccattcttgtagctc

SEQ ID NO: 192561 - DNA, 25 bp, Artificial
  Probe
ggtcatttaactgcattctttatga

SEQ ID NO: 192562 - DNA, 25 bp, Artificial
  Probe
cacacttgcagtgaatatcattgcc

SEQ ID NO: 192563 - DNA, 25 bp, Artificial
  Probe
tgagtcaaacgagcaaactttgatg

SEQ ID NO: 192564 - DNA, 25 bp, Artificial
  Probe
cttcccgccagaagtggaggagcag

SEQ ID NO: 192565 - DNA, 25 bp, Artificial
  Probe
atgttggcactctgcccatgtcttg

SEQ ID NO: 192566 - DNA, 25 bp, Artificial
  Probe
tggtggctttcctgggtctgaagac

SEQ ID NO: 192567 - DNA, 25 bp, Artificial
  Probe
atttgaggagatcaccagtgtaatc

SEQ ID NO: 192568 - DNA, 25 bp, Artificial
  Probe
gaacatgggtgcatacactgttgct

SEQ ID NO: 192569 - DNA, 25 bp, Artificial
  Probe
cagagccatggcttcccgccagaag

SEQ ID NO: 192570 - DNA, 25 bp, Artificial
  Probe
ctgctagtatcaatgtatagatgcc

SEQ ID NO: 192571 - DNA, 25 bp, Artificial
  Probe
caggatgttggcactctgcccatgt

SEQ ID NO: 192572 - DNA, 25 bp, Artificial
  Probe
atgtgaaggccctgctgcagaagag

SEQ ID NO: 192573 - DNA, 25 bp, Artificial
  Probe
tgtatgggtcatttaactgcattct

SEQ ID NO: 192574 - DNA, 25 bp, Artificial
  Probe
gagaagtattactcatccagcatct

SEQ ID NO: 192575 - DNA, 25 bp, Artificial
  Probe
tacgtcgcatcagctttcacacttg

SEQ ID NO: 192576 - DNA, 25 bp, Artificial
  Probe
cccaagccagatgagaagtattact

SEQ ID NO: 192577 - DNA, 25 bp, Artificial
  Probe
ggctcggacgatgaagatgagtcaa

SEQ ID NO: 192578 - DNA, 25 bp, Artificial
  Probe
agagccatggcttcccgccagaagt

SEQ ID NO: 192579 - DNA, 25 bp, Artificial
  Probe
tgcattctttatgaccatgcacatg

SEQ ID NO: 192580 - DNA, 25 bp, Artificial
  Probe
aagcaaatccagagccatggcttcc

SEQ ID NO: 192581 - DNA, 25 bp, Artificial
  Probe
ggatggaccgtcaccctgcagcctg

SEQ ID NO: 192582 - DNA, 25 bp, Artificial
  Probe
actctgcccatgtcttgtgcccagg

SEQ ID NO: 192583 - DNA, 25 bp, Artificial
  Probe
tgctgtaagtgagcagtggacacgt

SEQ ID NO: 192584 - DNA, 25 bp, Artificial
  Probe
ccacaggggcccaaatgtggggtca

SEQ ID NO: 192585 - DNA, 25 bp, Artificial
  Probe
gtcatttccggctgctgtaagtgag

SEQ ID NO: 192586 - DNA, 25 bp, Artificial
  Probe
tctgcatccgttacatctccactgg

SEQ ID NO: 192587 - DNA, 25 bp, Artificial
  Probe
cttttttgaaagcttcctagctggg

SEQ ID NO: 192588 - DNA, 25 bp, Artificial
  Probe
gggccgctctgcatccgttacatct

SEQ ID NO: 192589 - DNA, 25 bp, Artificial
  Probe
aggacagaactttctccaattactg

SEQ ID NO: 192590 - DNA, 25 bp, Artificial
  Probe
ttccggctgctgtaagtgagcagtg

SEQ ID NO: 192591 - DNA, 25 bp, Artificial
  Probe
ccaaatgtggggtcacatggtcttg

SEQ ID NO: 192592 - DNA, 25 bp, Artificial
  Probe
gggtgactcagctgcactggtgact

SEQ ID NO: 192593 - DNA, 25 bp, Artificial
  Probe
ggtcaaccaccttagttagataatc

SEQ ID NO: 192594 - DNA, 25 bp, Artificial
  Probe
aaccatacaccgtgtaccacagggg

SEQ ID NO: 192595 - DNA, 25 bp, Artificial
  Probe
atttactgaaaaactgcacaggaag

SEQ ID NO: 192596 - DNA, 25 bp, Artificial
  Probe
tgggtgactcagctgcactggtgac

SEQ ID NO: 192597 - DNA, 25 bp, Artificial
  Probe
ttatgcactggataaccatacaccg

SEQ ID NO: 192598 - DNA, 25 bp, Artificial
  Probe
atctaatttcatagcgggccgctct

SEQ ID NO: 192599 - DNA, 25 bp, Artificial
  Probe
caccgtgtaccacaggggcccaaat

SEQ ID NO: 192600 - DNA, 25 bp, Artificial
  Probe
gactcacttcaatgtgtcatttccg

SEQ ID NO: 192601 - DNA, 25 bp, Artificial
  Probe
caggggcccaaatgtggggtcacat

SEQ ID NO: 192602 - DNA, 25 bp, Artificial
  Probe
caatttactgaaaaactgcacagga

SEQ ID NO: 192603 - DNA, 25 bp, Artificial
  Probe
gaaacagccagctcctggtcaacca

SEQ ID NO: 192604 - DNA, 25 bp, Artificial
  Probe
gtgaatctaatttcatagcgggccg

SEQ ID NO: 192605 - DNA, 25 bp, Artificial
  Probe
actgggtgactcagctgcactggtg

SEQ ID NO: 192606 - DNA, 25 bp, Artificial
  Probe
cagctcctggtcaaccaccttagtt

SEQ ID NO: 192607 - DNA, 25 bp, Artificial
  Probe
gctgctgtaagtgagcagtggacac

SEQ ID NO: 192608 - DNA, 25 bp, Artificial
  Probe
accgtgtaccacaggggcccaaatg

SEQ ID NO: 192609 - DNA, 25 bp, Artificial
  Probe
accatacaccgtgtaccacaggggc

SEQ ID NO: 192610 - DNA, 25 bp, Artificial
  Probe
ctgcacaggaaggtaacgtgaatct

SEQ ID NO: 192611 - DNA, 25 bp, Artificial
  Probe
atacaccgtgtaccacaggggccca

SEQ ID NO: 192612 - DNA, 25 bp, Artificial
  Probe
ttttttgaaagcttcctagctgggg

SEQ ID NO: 192613 - DNA, 25 bp, Artificial
  Probe
gcatccgttacatctccactggaaa

SEQ ID NO: 192614 - DNA, 25 bp, Artificial
  Probe
gtgactcacttcaatgtgtcatttc

SEQ ID NO: 192615 - DNA, 25 bp, Artificial
  Probe
tgaaaaactgcacaggaaggtaacg

SEQ ID NO: 192616 - DNA, 25 bp, Artificial
  Probe
aatacattcagaagccgagtgggaa

SEQ ID NO: 192617 - DNA, 25 bp, Artificial
  Probe
aaactgcacaggaaggtaacgtgaa

SEQ ID NO: 192618 - DNA, 25 bp, Artificial
  Probe
tccaatacattcagaagccgagtgg

SEQ ID NO: 192619 - DNA, 25 bp, Artificial
  Probe
gggctgtgtgacctaacaggacaga

SEQ ID NO: 192620 - DNA, 25 bp, Artificial
  Probe
ccaattactgggtgactcagctgca

SEQ ID NO: 192621 - DNA, 25 bp, Artificial
  Probe
ccaatttactgaaaaactgcacagg

SEQ ID NO: 192622 - DNA, 25 bp, Artificial
  Probe
caatgtgtcatttccggctgctgta

SEQ ID NO: 192623 - DNA, 25 bp, Artificial
  Probe
ttttccaatacattcagaagccgag

SEQ ID NO: 192624 - DNA, 25 bp, Artificial
  Probe
gtgactcagctgcactggtgactca

SEQ ID NO: 192625 - DNA, 25 bp, Artificial
  Probe
ggataaccatacaccgtgtaccaca

SEQ ID NO: 192626 - DNA, 25 bp, Artificial
  Probe
gacctaacaggacagaactttctcc

SEQ ID NO: 192627 - DNA, 25 bp, Artificial
  Probe
tacaccgtgtaccacaggggcccaa

SEQ ID NO: 192628 - DNA, 25 bp, Artificial
  Probe
ttctccaattactgggtgactcagc

SEQ ID NO: 192629 - DNA, 25 bp, Artificial
  Probe
gacactggtcgccaagggacaggag

SEQ ID NO: 192630 - DNA, 25 bp, Artificial
  Probe
agacactggtcgccaagggacagga

SEQ ID NO: 192631 - DNA, 25 bp, Artificial
  Probe
cagtttttgtagttttggccatcat

SEQ ID NO: 192632 - DNA, 25 bp, Artificial
  Probe
ctccaacttacttctgttgttcttg

SEQ ID NO: 192633 - DNA, 25 bp, Artificial
  Probe
gaaacacaggcaggtacagctccca

SEQ ID NO: 192634 - DNA, 25 bp, Artificial
  Probe
acactggtcgccaagggacaggagc

SEQ ID NO: 192635 - DNA, 25 bp, Artificial
  Probe
agaaacacaggcaggtacagctccc

SEQ ID NO: 192636 - DNA, 25 bp, Artificial
  Probe
ccaccgactccaacttacttctgtt

SEQ ID NO: 192637 - DNA, 25 bp, Artificial
  Probe
tccaacttacttctgttgttcttgg

SEQ ID NO: 192638 - DNA, 25 bp, Artificial
  Probe
atgggctgtggcagactttgcagca

SEQ ID NO: 192639 - DNA, 25 bp, Artificial
  Probe
actggtcgccaagggacaggagctg

SEQ ID NO: 192640 - DNA, 25 bp, Artificial
  Probe
tttttgtagttttggccatcattgg

SEQ ID NO: 192641 - DNA, 25 bp, Artificial
  Probe
gcagtttttgtagttttggccatca

SEQ ID NO: 192642 - DNA, 25 bp, Artificial
  Probe
gacaggagctggattaccgagtgag

SEQ ID NO: 192643 - DNA, 25 bp, Artificial
  Probe
accgactccaacttacttctgttgt

SEQ ID NO: 192644 - DNA, 25 bp, Artificial
  Probe
ctgtggcagtttttgtagttttggc

SEQ ID NO: 192645 - DNA, 25 bp, Artificial
  Probe
ggctgtggcagactttgcagcatgg

SEQ ID NO: 192646 - DNA, 25 bp, Artificial
  Probe
gactccaacttacttctgttgttct

SEQ ID NO: 192647 - DNA, 25 bp, Artificial
  Probe
tccaccgactccaacttacttctgt

SEQ ID NO: 192648 - DNA, 25 bp, Artificial
  Probe
ggagctgtggcagtttttgtagttt

SEQ ID NO: 192649 - DNA, 25 bp, Artificial
  Probe
cagacactggtcgccaagggacagg

SEQ ID NO: 192650 - DNA, 25 bp, Artificial
  Probe
tggtcgccaagggacaggagctgga

SEQ ID NO: 192651 - DNA, 25 bp, Artificial
  Probe
cgactccaacttacttctgttgttc

SEQ ID NO: 192652 - DNA, 25 bp, Artificial
  Probe
tgtggcagactttgcagcatggatc

SEQ ID NO: 192653 - DNA, 25 bp, Artificial
  Probe
ttttgtagttttggccatcattgga

SEQ ID NO: 192654 - DNA, 25 bp, Artificial
  Probe
agtttttgtagttttggccatcatt

SEQ ID NO: 192655 - DNA, 25 bp, Artificial
  Probe
caacttacttctgttgttcttggag

SEQ ID NO: 192656 - DNA, 25 bp, Artificial
  Probe
gagctgtggcagtttttgtagtttt

SEQ ID NO: 192657 - DNA, 25 bp, Artificial
  Probe
aacttacttctgttgttcttggagc

SEQ ID NO: 192658 - DNA, 25 bp, Artificial
  Probe
tgaaaacatgggctgtggcagactt

SEQ ID NO: 192659 - DNA, 25 bp, Artificial
  Probe
aaaacatgggctgtggcagactttg

SEQ ID NO: 192660 - DNA, 25 bp, Artificial
  Probe
gggctgtggcagactttgcagcatg

SEQ ID NO: 192661 - DNA, 25 bp, Artificial
  Probe
ggcagtttttgtagttttggccatc

SEQ ID NO: 192662 - DNA, 25 bp, Artificial
  Probe
tgggctgtggcagactttgcagcat

SEQ ID NO: 192663 - DNA, 25 bp, Artificial
  Probe
ctgaaaacatgggctgtggcagact

SEQ ID NO: 192664 - DNA, 25 bp, Artificial
  Probe
aaacacaggcaggtacagctcccag

SEQ ID NO: 192665 - DNA, 25 bp, Artificial
  Probe
gctgtggcagactttgcagcatgga

SEQ ID NO: 192666 - DNA, 25 bp, Artificial
  Probe
ctgtggcagactttgcagcatggat

SEQ ID NO: 192667 - DNA, 25 bp, Artificial
  Probe
ccaacttacttctgttgttcttgga

SEQ ID NO: 192668 - DNA, 25 bp, Artificial
  Probe
gctgtggcagtttttgtagttttgg

SEQ ID NO: 192669 - DNA, 25 bp, Artificial
  Probe
catgggctgtggcagactttgcagc

SEQ ID NO: 192670 - DNA, 25 bp, Artificial
  Probe
gagcagacactggtcgccaagggac

SEQ ID NO: 192671 - DNA, 25 bp, Artificial
  Probe
agctgtggcagtttttgtagttttg

SEQ ID NO: 192672 - DNA, 25 bp, Artificial
  Probe
cactggtcgccaagggacaggagct

SEQ ID NO: 192673 - DNA, 25 bp, Artificial
  Probe
ttcttggagctgtggcagtttttgt

SEQ ID NO: 192674 - DNA, 25 bp, Artificial
  Probe
gcagacactggtcgccaagggacag

SEQ ID NO: 192675 - DNA, 25 bp, Artificial
  Probe
cacatccttaaatcccggagaggtg

SEQ ID NO: 192676 - DNA, 25 bp, Artificial
  Probe
tactcttgggacagggacaaattct

SEQ ID NO: 192677 - DNA, 25 bp, Artificial
  Probe
atcccggagaggtgaattgggacct

SEQ ID NO: 192678 - DNA, 25 bp, Artificial
  Probe
ctgtgcacatccttaaatcccggag

SEQ ID NO: 192679 - DNA, 25 bp, Artificial
  Probe
tcccttggggctttaccaggagagg

SEQ ID NO: 192680 - DNA, 25 bp, Artificial
  Probe
ccaaggaccaaagatggaggtcctt

SEQ ID NO: 192681 - DNA, 25 bp, Artificial
  Probe
ggacatagacaaagccctgagcaga

SEQ ID NO: 192682 - DNA, 25 bp, Artificial
  Probe
agcaggcacggctgtgcacatcctt

SEQ ID NO: 192683 - DNA, 25 bp, Artificial
  Probe
acagggacaaattcttcttggctca

SEQ ID NO: 192684 - DNA, 25 bp, Artificial
  Probe
taaactagctttacccttggcggtg

SEQ ID NO: 192685 - DNA, 25 bp, Artificial
  Probe
tggactcatagttgccctcagagcc

SEQ ID NO: 192686 - DNA, 25 bp, Artificial
  Probe
cctttgagaagcaggcacggctgtg

SEQ ID NO: 192687 - DNA, 25 bp, Artificial
  Probe
ggacaaattcttcttggctcaccct

SEQ ID NO: 192688 - DNA, 25 bp, Artificial
  Probe
tggaggtcctttctacatctctttt

SEQ ID NO: 192689 - DNA, 25 bp, Artificial
  Probe
agaccaaacggtggttctgtcttct

SEQ ID NO: 192690 - DNA, 25 bp, Artificial
  Probe
ggtgggactccctcttcaactgaag

SEQ ID NO: 192691 - DNA, 25 bp, Artificial
  Probe
cggctgtgcacatccttaaatcccg

SEQ ID NO: 192692 - DNA, 25 bp, Artificial
  Probe
atgtattcaaagtagccttgagcca

SEQ ID NO: 192693 - DNA, 25 bp, Artificial
  Probe
gaagcagaacctaaactagctttac

SEQ ID NO: 192694 - DNA, 25 bp, Artificial
  Probe
ggtgaattgggacctcaaggttatc

SEQ ID NO: 192695 - DNA, 25 bp, Artificial
  Probe
ctccaagaccaaacggtggttctgt

SEQ ID NO: 192696 - DNA, 25 bp, Artificial
  Probe
cagggccatctctcccttggggctt

SEQ ID NO: 192697 - DNA, 25 bp, Artificial
  Probe
tcagggccatctctcccttggggct

SEQ ID NO: 192698 - DNA, 25 bp, Artificial
  Probe
agcagaagccaggacatctggactc

SEQ ID NO: 192699 - DNA, 25 bp, Artificial
  Probe
agttgccctcagagccctagcaatg

SEQ ID NO: 192700 - DNA, 25 bp, Artificial
  Probe
tcatagttgccctcagagccctagc

SEQ ID NO: 192701 - DNA, 25 bp, Artificial
  Probe
tcccggagaggtgaattgggacctc

SEQ ID NO: 192702 - DNA, 25 bp, Artificial
  Probe
tgaattgggacctcaaggttatcct

SEQ ID NO: 192703 - DNA, 25 bp, Artificial
  Probe
cttccttttgcctgagtgacctttg

SEQ ID NO: 192704 - DNA, 25 bp, Artificial
  Probe
ccactaaacccctttgagaagcagg

SEQ ID NO: 192705 - DNA, 25 bp, Artificial
  Probe
aaagtagccttgagccaaggaccaa

SEQ ID NO: 192706 - DNA, 25 bp, Artificial
  Probe
caggacatctggactcatagttgcc

SEQ ID NO: 192707 - DNA, 25 bp, Artificial
  Probe
caactgaagctggatgtattcaaag

SEQ ID NO: 192708 - DNA, 25 bp, Artificial
  Probe
accaaagatggaggtcctttctaca

SEQ ID NO: 192709 - DNA, 25 bp, Artificial
  Probe
cttctgcttccttttgcctgagtga

SEQ ID NO: 192710 - DNA, 25 bp, Artificial
  Probe
tggacatagacaaagccctgagcag

SEQ ID NO: 192711 - DNA, 25 bp, Artificial
  Probe
tagacaaagccctgagcagaagcca

SEQ ID NO: 192712 - DNA, 25 bp, Artificial
  Probe
agagccctagcaatgatacccacac

SEQ ID NO: 192713 - DNA, 25 bp, Artificial
  Probe
caaggttatccttggctatatgaca

SEQ ID NO: 192714 - DNA, 25 bp, Artificial
  Probe
tgagaagcaggcacggctgtgcaca

SEQ ID NO: 192715 - DNA, 25 bp, Artificial
  Probe
tgagcagaagccaggacatctggac

SEQ ID NO: 192716 - DNA, 25 bp, Artificial
  Probe
ctcagagccctagcaatgataccca

SEQ ID NO: 192717 - DNA, 25 bp, Artificial
  Probe
cttaaatcccggagaggtgaattgg

SEQ ID NO: 192718 - DNA, 25 bp, Artificial
  Probe
gctatatgacatgtttgaggccagc

SEQ ID NO: 192719 - DNA, 25 bp, Artificial
  Probe
cttcacctccaagaccaaacggtgg

SEQ ID NO: 192720 - DNA, 25 bp, Artificial
  Probe
ctttgggtacaaggacagagactgg

SEQ ID NO: 192721 - DNA, 25 bp, Artificial
  Probe
ccagagacctattagagggatgctt

SEQ ID NO: 192722 - DNA, 25 bp, Artificial
  Probe
gtcattcttgttgacgacatcaaac

SEQ ID NO: 192723 - DNA, 25 bp, Artificial
  Probe
ccggagtagcccaggcagaccttag

SEQ ID NO: 192724 - DNA, 25 bp, Artificial
  Probe
ctctggaccctttgaccctcagtga

SEQ ID NO: 192725 - DNA, 25 bp, Artificial
  Probe
ttccttagacagttttctcagaatg

SEQ ID NO: 192726 - DNA, 25 bp, Artificial
  Probe
tctcagaatgccaggaaacacagcg

SEQ ID NO: 192727 - DNA, 25 bp, Artificial
  Probe
agcgcattcatttcagatgggtggt

SEQ ID NO: 192728 - DNA, 25 bp, Artificial
  Probe
gcaccatctgcttttgcctctgttt

SEQ ID NO: 192729 - DNA, 25 bp, Artificial
  Probe
ttcttgttgacgacatcaaactttg

SEQ ID NO: 192730 - DNA, 25 bp, Artificial
  Probe
ggaaaaataccatctgacgataagt

SEQ ID NO: 192731 - DNA, 25 bp, Artificial
  Probe
cgttggtggacagtgacaagctaga

SEQ ID NO: 192732 - DNA, 25 bp, Artificial
  Probe
accctttgaccctcagtgatggtag

SEQ ID NO: 192733 - DNA, 25 bp, Artificial
  Probe
tattcctgaccctctggaccctttg

SEQ ID NO: 192734 - DNA, 25 bp, Artificial
  Probe
tgtttagttcccttgaggtccaggt

SEQ ID NO: 192735 - DNA, 25 bp, Artificial
  Probe
ctccctctgcagagtacaagcagtg

SEQ ID NO: 192736 - DNA, 25 bp, Artificial
  Probe
gcgttcatttgcattcacgcaccat

SEQ ID NO: 192737 - DNA, 25 bp, Artificial
  Probe
gggatgcttgggtgtttagttccct

SEQ ID NO: 192738 - DNA, 25 bp, Artificial
  Probe
gaaacacagcgcattcatttcagat

SEQ ID NO: 192739 - DNA, 25 bp, Artificial
  Probe
tcgactggtcggattcagccaggga

SEQ ID NO: 192740 - DNA, 25 bp, Artificial
  Probe
tcccttgaggtccaggtaaggagga

SEQ ID NO: 192741 - DNA, 25 bp, Artificial
  Probe
acagaagtcccattactcagctctg

SEQ ID NO: 192742 - DNA, 25 bp, Artificial
  Probe
tggaaaaataccatctgacgataag

SEQ ID NO: 192743 - DNA, 25 bp, Artificial
  Probe
tcggattcagccagggaccgccagc

SEQ ID NO: 192744 - DNA, 25 bp, Artificial
  Probe
cagtgacaagctagacattgcagag

SEQ ID NO: 192745 - DNA, 25 bp, Artificial
  Probe
tgcattcacgcaccatctgcttttg

SEQ ID NO: 192746 - DNA, 25 bp, Artificial
  Probe
tgctttgcacagagccagagaccta

SEQ ID NO: 192747 - DNA, 25 bp, Artificial
  Probe
gccaggaaacacagcgcattcattt

SEQ ID NO: 192748 - DNA, 25 bp, Artificial
  Probe
ctcagtgatggtagccggagtagcc

SEQ ID NO: 192749 - DNA, 25 bp, Artificial
  Probe
acgcaccatctgcttttgcctctgt

SEQ ID NO: 192750 - DNA, 25 bp, Artificial
  Probe
aataccatctgacgataagtgcttt

SEQ ID NO: 192751 - DNA, 25 bp, Artificial
  Probe
ggatctttgcctcgtccagtgggag

SEQ ID NO: 192752 - DNA, 25 bp, Artificial
  Probe
agttttctcagaatgccaggaaaca

SEQ ID NO: 192753 - DNA, 25 bp, Artificial
  Probe
tggatctttgcctcgtccagtggga

SEQ ID NO: 192754 - DNA, 25 bp, Artificial
  Probe
gagtacaagcagtgcgttcatttgc

SEQ ID NO: 192755 - DNA, 25 bp, Artificial
  Probe
gctctggatctttgcctcgtccagt

SEQ ID NO: 192756 - DNA, 25 bp, Artificial
  Probe
cgacatcaaactttgaagaaacaga

SEQ ID NO: 192757 - DNA, 25 bp, Artificial
  Probe
ccagggaccgccagctccaggatgt

SEQ ID NO: 192758 - DNA, 25 bp, Artificial
  Probe
ggcagaccttaggagaggccccgtc

SEQ ID NO: 192759 - DNA, 25 bp, Artificial
  Probe
agcgttggtggacagtgacaagcta

SEQ ID NO: 192760 - DNA, 25 bp, Artificial
  Probe
acaagcagtgcgttcatttgcattc

SEQ ID NO: 192761 - DNA, 25 bp, Artificial
  Probe
gctaaggtttgcaccctatgttcgg

SEQ ID NO: 192762 - DNA, 25 bp, Artificial
  Probe
ctggaccctttgaccctcagtgatg

SEQ ID NO: 192763 - DNA, 25 bp, Artificial
  Probe
gcttgggtgtttagttcccttgagg

SEQ ID NO: 192764 - DNA, 25 bp, Artificial
  Probe
gcattcacgcaccatctgcttttgc

SEQ ID NO: 192765 - DNA, 25 bp, Artificial
  Probe
aatgtgctaaggtttgcaccctatg

SEQ ID NO: 192766 - DNA, 25 bp, Artificial
  Probe
gacattgcagagctcctcacaactc

SEQ ID NO: 192767 - DNA, 25 bp, Artificial
  Probe
ggaaaacttgatgtctccagcaggc

SEQ ID NO: 192768 - DNA, 25 bp, Artificial
  Probe
ctccagccttccacaggacagtgtg

SEQ ID NO: 192769 - DNA, 25 bp, Artificial
  Probe
tgctacacacagtggagagtaggga

SEQ ID NO: 192770 - DNA, 25 bp, Artificial
  Probe
ctctttgacagagcagagaacttca

SEQ ID NO: 192771 - DNA, 25 bp, Artificial
  Probe
ttctccaggaagtttctcctctttg

SEQ ID NO: 192772 - DNA, 25 bp, Artificial
  Probe
ctccgtctataagaagttaaaggat

SEQ ID NO: 192773 - DNA, 25 bp, Artificial
  Probe
aagagaggacacctgccattgtgac

SEQ ID NO: 192774 - DNA, 25 bp, Artificial
  Probe
cagtgttccctggtttaatggtgta

SEQ ID NO: 192775 - DNA, 25 bp, Artificial
  Probe
agctctattcatcgtgtcagaaaaa

SEQ ID NO: 192776 - DNA, 25 bp, Artificial
  Probe
gttaaaggatccaccaatccgaaag

SEQ ID NO: 192777 - DNA, 25 bp, Artificial
  Probe
gaactgaaccaaatactcttaagtg

SEQ ID NO: 192778 - DNA, 25 bp, Artificial
  Probe
agccttgtgtcttctcttcagactc

SEQ ID NO: 192779 - DNA, 25 bp, Artificial
  Probe
agaggagccttgtgtcttctcttca

SEQ ID NO: 192780 - DNA, 25 bp, Artificial
  Probe
gaagcgaaagcttcatgtgacatcc

SEQ ID NO: 192781 - DNA, 25 bp, Artificial
  Probe
taccaggggtgtcaatacttagaga

SEQ ID NO: 192782 - DNA, 25 bp, Artificial
  Probe
gccatgcgtggactagctcacacca

SEQ ID NO: 192783 - DNA, 25 bp, Artificial
  Probe
tctgagagcagcactgaggaggaca

SEQ ID NO: 192784 - DNA, 25 bp, Artificial
  Probe
ctcatggttcagataattggatgca

SEQ ID NO: 192785 - DNA, 25 bp, Artificial
  Probe
cttaagtgttcctttgaatctcagt

SEQ ID NO: 192786 - DNA, 25 bp, Artificial
  Probe
agtagggaggctgtcctcctggaaa

SEQ ID NO: 192787 - DNA, 25 bp, Artificial
  Probe
gtgcatgttcttcactttttgctac

SEQ ID NO: 192788 - DNA, 25 bp, Artificial
  Probe
tccgctttgccgatctccgtctata

SEQ ID NO: 192789 - DNA, 25 bp, Artificial
  Probe
gaaacaagaaccatatctgcagaga

SEQ ID NO: 192790 - DNA, 25 bp, Artificial
  Probe
ctcagccatgcgtggactagctcac

SEQ ID NO: 192791 - DNA, 25 bp, Artificial
  Probe
cccaacctaagcacacatgaagaga

SEQ ID NO: 192792 - DNA, 25 bp, Artificial
  Probe
aggacatttagtctaacaagagcca

SEQ ID NO: 192793 - DNA, 25 bp, Artificial
  Probe
acaagtgtgtggacttcctgctctg

SEQ ID NO: 192794 - DNA, 25 bp, Artificial
  Probe
ggtgagaatgctgttcctttccgtc

SEQ ID NO: 192795 - DNA, 25 bp, Artificial
  Probe
agaaggtgccacctaaactgtaatg

SEQ ID NO: 192796 - DNA, 25 bp, Artificial
  Probe
aagtttctcctctttgacagagcag

SEQ ID NO: 192797 - DNA, 25 bp, Artificial
  Probe
attggatgcacaaaagctctattca

SEQ ID NO: 192798 - DNA, 25 bp, Artificial
  Probe
cagatgtgactggaagcgaaagctt

SEQ ID NO: 192799 - DNA, 25 bp, Artificial
  Probe
cagcaggctgcatcccggctctgag

SEQ ID NO: 192800 - DNA, 25 bp, Artificial
  Probe
caatccgaaaggacatttagtctaa

SEQ ID NO: 192801 - DNA, 25 bp, Artificial
  Probe
catacctggagaaggcaagatttat

SEQ ID NO: 192802 - DNA, 25 bp, Artificial
  Probe
ctcctggaaagaggagccttgtgtc

SEQ ID NO: 192803 - DNA, 25 bp, Artificial
  Probe
aagcacacatgaagagaggacacct

SEQ ID NO: 192804 - DNA, 25 bp, Artificial
  Probe
aggatttataacttctgccagcctt

SEQ ID NO: 192805 - DNA, 25 bp, Artificial
  Probe
ggctatctgagcttcttttccttct

SEQ ID NO: 192806 - DNA, 25 bp, Artificial
  Probe
cacctaaactgtaatgaaagctgta

SEQ ID NO: 192807 - DNA, 25 bp, Artificial
  Probe
cttcactttttgctacacacagtgg

SEQ ID NO: 192808 - DNA, 25 bp, Artificial
  Probe
agagcagagaacttcacaggaaaac

SEQ ID NO: 192809 - DNA, 25 bp, Artificial
  Probe
cacaggacagtgtgagcgaaagaag

SEQ ID NO: 192810 - DNA, 25 bp, Artificial
  Probe
aaagccaatggcagcctcaaaaata

SEQ ID NO: 192811 - DNA, 25 bp, Artificial
  Probe
gaagtcagtctcagccatgcgtgga

SEQ ID NO: 192812 - DNA, 25 bp, Artificial
  Probe
aggacccctggcaggtgagaatgct

SEQ ID NO: 192813 - DNA, 25 bp, Artificial
  Probe
cttaagctggggtgacaaagcgtat

SEQ ID NO: 192814 - DNA, 25 bp, Artificial
  Probe
tgtcctcctcggtactgcaagaaac

SEQ ID NO: 192815 - DNA, 25 bp, Artificial
  Probe
gatgtgcctcggtggcacaatgcct

SEQ ID NO: 192816 - DNA, 25 bp, Artificial
  Probe
tggcacaatgcctgcctggtaagtg

SEQ ID NO: 192817 - DNA, 25 bp, Artificial
  Probe
ggtgccattcccagagtcttaagct

SEQ ID NO: 192818 - DNA, 25 bp, Artificial
  Probe
attgagcacagaggatgtgcctcgg

SEQ ID NO: 192819 - DNA, 25 bp, Artificial
  Probe
cctgcctggtaagtgtaaagccacg

SEQ ID NO: 192820 - DNA, 25 bp, Artificial
  Probe
acaatgcctgcctggtaagtgtaaa

SEQ ID NO: 192821 - DNA, 25 bp, Artificial
  Probe
gtccccctaacattgagcacagagg

SEQ ID NO: 192822 - DNA, 25 bp, Artificial
  Probe
ccggtcatgggcaagcctagatgtt

SEQ ID NO: 192823 - DNA, 25 bp, Artificial
  Probe
tgcctcggtggcacaatgcctgcct

SEQ ID NO: 192824 - DNA, 25 bp, Artificial
  Probe
cactgtggttttatgagacgtcccc

SEQ ID NO: 192825 - DNA, 25 bp, Artificial
  Probe
acgcaggaggcaaaccaggagactg

SEQ ID NO: 192826 - DNA, 25 bp, Artificial
  Probe
ctgcctggatttctgtgtcctcctc

SEQ ID NO: 192827 - DNA, 25 bp, Artificial
  Probe
agccacgggtttgatccccggcact

SEQ ID NO: 192828 - DNA, 25 bp, Artificial
  Probe
ggcactcaaacaacaacgcactgac

SEQ ID NO: 192829 - DNA, 25 bp, Artificial
  Probe
tcggcaggctcatgggatatgtgtt

SEQ ID NO: 192830 - DNA, 25 bp, Artificial
  Probe
aggagactggccaggttgagctaca

SEQ ID NO: 192831 - DNA, 25 bp, Artificial
  Probe
tacctaggcatctgtggccaggagg

SEQ ID NO: 192832 - DNA, 25 bp, Artificial
  Probe
gactggccaggttgagctacagaga

SEQ ID NO: 192833 - DNA, 25 bp, Artificial
  Probe
ttgtaactacgcaggaggcaaacca

SEQ ID NO: 192834 - DNA, 25 bp, Artificial
  Probe
taactacgcaggaggcaaaccagga

SEQ ID NO: 192835 - DNA, 25 bp, Artificial
  Probe
aagtgtgtagtagcttcctgattac

SEQ ID NO: 192836 - DNA, 25 bp, Artificial
  Probe
tcggtggcacaatgcctgcctggta

SEQ ID NO: 192837 - DNA, 25 bp, Artificial
  Probe
gttgagctacagagacacagacaaa

SEQ ID NO: 192838 - DNA, 25 bp, Artificial
  Probe
tctgtgtcctcctcggtactgcaag

SEQ ID NO: 192839 - DNA, 25 bp, Artificial
  Probe
tggaaggatcccactgtggttttat

SEQ ID NO: 192840 - DNA, 25 bp, Artificial
  Probe
taagctggggtgacaaagcgtatcc

SEQ ID NO: 192841 - DNA, 25 bp, Artificial
  Probe
gattacctaggcatctgtggccagg

SEQ ID NO: 192842 - DNA, 25 bp, Artificial
  Probe
gtcctcctcggtactgcaagaaacc

SEQ ID NO: 192843 - DNA, 25 bp, Artificial
  Probe
cattcccagagtcttaagctggggt

SEQ ID NO: 192844 - DNA, 25 bp, Artificial
  Probe
aggctcatgggatatgtgtttacac

SEQ ID NO: 192845 - DNA, 25 bp, Artificial
  Probe
aggtgaggtgactgcctggatttct

SEQ ID NO: 192846 - DNA, 25 bp, Artificial
  Probe
tacggccggtcatgggcaagcctag

SEQ ID NO: 192847 - DNA, 25 bp, Artificial
  Probe
ccacccagtccaggtgtggtgccat

SEQ ID NO: 192848 - DNA, 25 bp, Artificial
  Probe
aaaccaggagactggccaggttgag

SEQ ID NO: 192849 - DNA, 25 bp, Artificial
  Probe
ctgtcggcaggctcatgggatatgt

SEQ ID NO: 192850 - DNA, 25 bp, Artificial
  Probe
aggcaaaccaggagactggccaggt

SEQ ID NO: 192851 - DNA, 25 bp, Artificial
  Probe
acaacaacgcactgacagctccttg

SEQ ID NO: 192852 - DNA, 25 bp, Artificial
  Probe
catgggcaagcctagatgtttattt

SEQ ID NO: 192853 - DNA, 25 bp, Artificial
  Probe
agaggatgtgcctcggtggcacaat

SEQ ID NO: 192854 - DNA, 25 bp, Artificial
  Probe
aggtgtggtgccattcccagagtct

SEQ ID NO: 192855 - DNA, 25 bp, Artificial
  Probe
tacgcaggaggcaaaccaggagact

SEQ ID NO: 192856 - DNA, 25 bp, Artificial
  Probe
cagagtcttaagctggggtgacaaa

SEQ ID NO: 192857 - DNA, 25 bp, Artificial
  Probe
cggcactcaaacaacaacgcactga

SEQ ID NO: 192858 - DNA, 25 bp, Artificial
  Probe
gatttctgtgtcctcctcggtactg

SEQ ID NO: 192859 - DNA, 25 bp, Artificial
  Probe
accagaagagtcctgtcttgatacc

SEQ ID NO: 192860 - DNA, 25 bp, Artificial
  Probe
cttgcccaggccaaagaagagaacg

SEQ ID NO: 192861 - DNA, 25 bp, Artificial
  Probe
gtaactaacaatctgaaatcactgg

SEQ ID NO: 192862 - DNA, 25 bp, Artificial
  Probe
ctgtatataaaccaaaccagaagag

SEQ ID NO: 192863 - DNA, 25 bp, Artificial
  Probe
agtagcgacctggaagaggagctca

SEQ ID NO: 192864 - DNA, 25 bp, Artificial
  Probe
ggacagtttctaaactggagaagac

SEQ ID NO: 192865 - DNA, 25 bp, Artificial
  Probe
aactaacaatctgaaatcactggag

SEQ ID NO: 192866 - DNA, 25 bp, Artificial
  Probe
cactccagagagtgcaccctgtctt

SEQ ID NO: 192867 - DNA, 25 bp, Artificial
  Probe
tccagagagtgcaccctgtcttcct

SEQ ID NO: 192868 - DNA, 25 bp, Artificial
  Probe
actaccatgtctccaccttgctgga

SEQ ID NO: 192869 - DNA, 25 bp, Artificial
  Probe
tcgtaagttggtcatcctggagggt

SEQ ID NO: 192870 - DNA, 25 bp, Artificial
  Probe
gcttgcatcagacactggaccagac

SEQ ID NO: 192871 - DNA, 25 bp, Artificial
  Probe
ccgagctgagtttgcggaaaggaca

SEQ ID NO: 192872 - DNA, 25 bp, Artificial
  Probe
gatagagaaccgagccatgaaagac

SEQ ID NO: 192873 - DNA, 25 bp, Artificial
  Probe
agaagagtcctgtcttgataccaac

SEQ ID NO: 192874 - DNA, 25 bp, Artificial
  Probe
agaagttccgcttactaccatgtct

SEQ ID NO: 192875 - DNA, 25 bp, Artificial
  Probe
tactaccatgtctccaccttgctgg

SEQ ID NO: 192876 - DNA, 25 bp, Artificial
  Probe
gcatcagacactggaccagacacta

SEQ ID NO: 192877 - DNA, 25 bp, Artificial
  Probe
tgcttctgaaaagtactctgaaaag

SEQ ID NO: 192878 - DNA, 25 bp, Artificial
  Probe
tgataccaactccactccagagagt

SEQ ID NO: 192879 - DNA, 25 bp, Artificial
  Probe
atcactggaggctgcttctgaaaag

SEQ ID NO: 192880 - DNA, 25 bp, Artificial
  Probe
taaaccaaaccagaagagtcctgtc

SEQ ID NO: 192881 - DNA, 25 bp, Artificial
  Probe
aaaccaaaccagaagagtcctgtct

SEQ ID NO: 192882 - DNA, 25 bp, Artificial
  Probe
caccttgctggaaaggccaagcaga

SEQ ID NO: 192883 - DNA, 25 bp, Artificial
  Probe
gagtcctgtcttgataccaactcca

SEQ ID NO: 192884 - DNA, 25 bp, Artificial
  Probe
tggaccagacactaaacgaacttaa

SEQ ID NO: 192885 - DNA, 25 bp, Artificial
  Probe
gagaacgtgggcttgcatcagacac

SEQ ID NO: 192886 - DNA, 25 bp, Artificial
  Probe
tgaaatcactggaggctgcttctga

SEQ ID NO: 192887 - DNA, 25 bp, Artificial
  Probe
agaacgtgggcttgcatcagacact

SEQ ID NO: 192888 - DNA, 25 bp, Artificial
  Probe
actccagagagtgcaccctgtcttc

SEQ ID NO: 192889 - DNA, 25 bp, Artificial
  Probe
cactggaggctgcttctgaaaagta

SEQ ID NO: 192890 - DNA, 25 bp, Artificial
  Probe
gagagtgcaccctgtcttcctctct

SEQ ID NO: 192891 - DNA, 25 bp, Artificial
  Probe
agtttctaaactggagaagacaatc

SEQ ID NO: 192892 - DNA, 25 bp, Artificial
  Probe
caatctgaaatcactggaggctgct

SEQ ID NO: 192893 - DNA, 25 bp, Artificial
  Probe
tttctaaactggagaagacaatcga

SEQ ID NO: 192894 - DNA, 25 bp, Artificial
  Probe
gtatataaaccaaaccagaagagtc

SEQ ID NO: 192895 - DNA, 25 bp, Artificial
  Probe
gtagcgacctggaagaggagctcaa

SEQ ID NO: 192896 - DNA, 25 bp, Artificial
  Probe
gagtgcaccctgtcttcctctctta

SEQ ID NO: 192897 - DNA, 25 bp, Artificial
  Probe
tgctcgtaagttggtcatcctggag

SEQ ID NO: 192898 - DNA, 25 bp, Artificial
  Probe
tataaaccaaaccagaagagtcctg

SEQ ID NO: 192899 - DNA, 25 bp, Artificial
  Probe
cactggaccagacactaaacgaact

SEQ ID NO: 192900 - DNA, 25 bp, Artificial
  Probe
aggctgcttctgaaaagtactctga

SEQ ID NO: 192901 - DNA, 25 bp, Artificial
  Probe
gaagttccgcttactaccatgtctc

SEQ ID NO: 192902 - DNA, 25 bp, Artificial
  Probe
catgtctccaccttgctggaaaggc

SEQ ID NO: 192903 - DNA, 25 bp, Artificial
  Probe
ggctgcttctgaaaagtactctgaa

SEQ ID NO: 192904 - DNA, 25 bp, Artificial
  Probe
cttctgaaaagtactctgaaaagga

SEQ ID NO: 192905 - DNA, 25 bp, Artificial
  Probe
aggaagggacgctcacctttgagct

SEQ ID NO: 192906 - DNA, 25 bp, Artificial
  Probe
cgccttcttttctgcgactcggatc

SEQ ID NO: 192907 - DNA, 25 bp, Artificial
  Probe
caagatctcggctggcttgatgacg

SEQ ID NO: 192908 - DNA, 25 bp, Artificial
  Probe
catactggcagatgacgtcccctgc

SEQ ID NO: 192909 - DNA, 25 bp, Artificial
  Probe
ttgagctcctccacaaatagccctg

SEQ ID NO: 192910 - DNA, 25 bp, Artificial
  Probe
ttcgaagttgagagttcggtaccca

SEQ ID NO: 192911 - DNA, 25 bp, Artificial
  Probe
gagagaaacgcctgcctctttggga

SEQ ID NO: 192912 - DNA, 25 bp, Artificial
  Probe
agggggcccttgtgaaccaccacat

SEQ ID NO: 192913 - DNA, 25 bp, Artificial
  Probe
agggatgctaaacaccattgggctc

SEQ ID NO: 192914 - DNA, 25 bp, Artificial
  Probe
caaatagccctggtggctgccacag

SEQ ID NO: 192915 - DNA, 25 bp, Artificial
  Probe
agaatgcaagcacaaagccatctgc

SEQ ID NO: 192916 - DNA, 25 bp, Artificial
  Probe
aggattgccgaaactgtacagcggt

SEQ ID NO: 192917 - DNA, 25 bp, Artificial
  Probe
cgagattcatcaactctctaccagg

SEQ ID NO: 192918 - DNA, 25 bp, Artificial
  Probe
accaccctggccaagacagaaggat

SEQ ID NO: 192919 - DNA, 25 bp, Artificial
  Probe
cgctacactgggacctacaatgctt

SEQ ID NO: 192920 - DNA, 25 bp, Artificial
  Probe
ccttcagatccaaggtgaaggccag

SEQ ID NO: 192921 - DNA, 25 bp, Artificial
  Probe
ttccctcaggattggcctctacgat

SEQ ID NO: 192922 - DNA, 25 bp, Artificial
  Probe
tattcattgggcagcccacagaggt

SEQ ID NO: 192923 - DNA, 25 bp, Artificial
  Probe
atctgcacgggatcaaaccccgcta

SEQ ID NO: 192924 - DNA, 25 bp, Artificial
  Probe
agccggcgtttctgcctgcctagca

SEQ ID NO: 192925 - DNA, 25 bp, Artificial
  Probe
caccaaggaaggaccggcagccttt

SEQ ID NO: 192926 - DNA, 25 bp, Artificial
  Probe
tgctttgaacagctgaagaaagagc

SEQ ID NO: 192927 - DNA, 25 bp, Artificial
  Probe
taaaggtgtcttagggaccatcacc

SEQ ID NO: 192928 - DNA, 25 bp, Artificial
  Probe
actcctggcctctccggtggatgtg

SEQ ID NO: 192929 - DNA, 25 bp, Artificial
  Probe
gaagggacgctcacctttgagctcc

SEQ ID NO: 192930 - DNA, 25 bp, Artificial
  Probe
ggcagcctttttcaaagggtttgcg

SEQ ID NO: 192931 - DNA, 25 bp, Artificial
  Probe
caagatcttctcagccggcgtttct

SEQ ID NO: 192932 - DNA, 25 bp, Artificial
  Probe
gactcctaatctaatgagaaatgtc

SEQ ID NO: 192933 - DNA, 25 bp, Artificial
  Probe
atccgggcttaaagagcgagaggaa

SEQ ID NO: 192934 - DNA, 25 bp, Artificial
  Probe
cctggccaagacagaaggattgccg

SEQ ID NO: 192935 - DNA, 25 bp, Artificial
  Probe
atcagctttgcttccctcaggattg

SEQ ID NO: 192936 - DNA, 25 bp, Artificial
  Probe
ttccttttggtctctgccctccgag

SEQ ID NO: 192937 - DNA, 25 bp, Artificial
  Probe
cctggaacgtcatcatgtttgtgtg

SEQ ID NO: 192938 - DNA, 25 bp, Artificial
  Probe
tctgcctgcctagcagacatcatca

SEQ ID NO: 192939 - DNA, 25 bp, Artificial
  Probe
gggttttgcaccacactcctggcct

SEQ ID NO: 192940 - DNA, 25 bp, Artificial
  Probe
gagattcatcaactctctaccagga

SEQ ID NO: 192941 - DNA, 25 bp, Artificial
  Probe
aagagctgatgaagtcccggcagac

SEQ ID NO: 192942 - DNA, 25 bp, Artificial
  Probe
ccctgccatttactgtcagctcttg

SEQ ID NO: 192943 - DNA, 25 bp, Artificial
  Probe
agggtttgcgccttcttttctgcga

SEQ ID NO: 192944 - DNA, 25 bp, Artificial
  Probe
cgtggcggtattcattgggcagccc

SEQ ID NO: 192945 - DNA, 25 bp, Artificial
  Probe
ctccggtggatgtggtaaaaacgag

SEQ ID NO: 192946 - DNA, 25 bp, Artificial
  Probe
gccctccgagccaagatggtgagtt

SEQ ID NO: 192947 - DNA, 25 bp, Artificial
  Probe
tggctgccacagaagttcgaagttg

SEQ ID NO: 192948 - DNA, 25 bp, Artificial
  Probe
cacataggcgacttggagaaaggga

SEQ ID NO: 192949 - DNA, 25 bp, Artificial
  Probe
cttccagtactattaggtataaagg

SEQ ID NO: 192950 - DNA, 25 bp, Artificial
  Probe
gcagcctttttcaaagggtttgcgc

SEQ ID NO: 192951 - DNA, 25 bp, Artificial
  Probe
tccgcatgcaagaggagaaaaatgg

SEQ ID NO: 192952 - DNA, 25 bp, Artificial
  Probe
tcctgtcactgctgcagatgatggg

SEQ ID NO: 192953 - DNA, 25 bp, Artificial
  Probe
ctgcctggaccacagcaacagatca

SEQ ID NO: 192954 - DNA, 25 bp, Artificial
  Probe
tacactcttcaaaggctatggcgtg

SEQ ID NO: 192955 - DNA, 25 bp, Artificial
  Probe
gcaaaacaactcaggcgcctctcta

SEQ ID NO: 192956 - DNA, 25 bp, Artificial
  Probe
atgaacagatttgcagcttcaccca

SEQ ID NO: 192957 - DNA, 25 bp, Artificial
  Probe
agcgggcaaaacaactcaggcgcct

SEQ ID NO: 192958 - DNA, 25 bp, Artificial
  Probe
ggcagaaccatagtaccctggaccc

SEQ ID NO: 192959 - DNA, 25 bp, Artificial
  Probe
tactcagaaactggaagacttcatg

SEQ ID NO: 192960 - DNA, 25 bp, Artificial
  Probe
ctgctgcagatgatgggtcaaatga

SEQ ID NO: 192961 - DNA, 25 bp, Artificial
  Probe
aggcgaacaggctacctacaataca

SEQ ID NO: 192962 - DNA, 25 bp, Artificial
  Probe
ctctctatagccacattgagagatt

SEQ ID NO: 192963 - DNA, 25 bp, Artificial
  Probe
tcaaggttactcagaaactggaaga

SEQ ID NO: 192964 - DNA, 25 bp, Artificial
  Probe
atttgcagcttcacccacagggcag

SEQ ID NO: 192965 - DNA, 25 bp, Artificial
  Probe
attcagtgatgaagtacctgcctgg

SEQ ID NO: 192966 - DNA, 25 bp, Artificial
  Probe
agcctcttctttgctgggtctgaga

SEQ ID NO: 192967 - DNA, 25 bp, Artificial
  Probe
acgctacggcttccttctactcatg

SEQ ID NO: 192968 - DNA, 25 bp, Artificial
  Probe
tcaagatgttgcagggcacttgtgg

SEQ ID NO: 192969 - DNA, 25 bp, Artificial
  Probe
cctgagcaaaacagtctccaatgtt

SEQ ID NO: 192970 - DNA, 25 bp, Artificial
  Probe
gcgaacaggctacctacaatacact

SEQ ID NO: 192971 - DNA, 25 bp, Artificial
  Probe
aatggcaattcagagttccacatga

SEQ ID NO: 192972 - DNA, 25 bp, Artificial
  Probe
tcaggcgcctctctatagccacatt

SEQ ID NO: 192973 - DNA, 25 bp, Artificial
  Probe
tctgagacagtcagctccacactac

SEQ ID NO: 192974 - DNA, 25 bp, Artificial
  Probe
agaacctagtgatgacaacactaag

SEQ ID NO: 192975 - DNA, 25 bp, Artificial
  Probe
ggaccacagcaacagatcatcaagg

SEQ ID NO: 192976 - DNA, 25 bp, Artificial
  Probe
ggcaattcagagttccacatgaaga

SEQ ID NO: 192977 - DNA, 25 bp, Artificial
  Probe
cggagttcctgtcactgctgcagat

SEQ ID NO: 192978 - DNA, 25 bp, Artificial
  Probe
ctagtgatgacaacactaagcctct

SEQ ID NO: 192979 - DNA, 25 bp, Artificial
  Probe
gtgatgacaacactaagcctcttct

SEQ ID NO: 192980 - DNA, 25 bp, Artificial
  Probe
ctatttgatcaagatgttgcagggc

SEQ ID NO: 192981 - DNA, 25 bp, Artificial
  Probe
tgacatgttccattcagtgatgaag

SEQ ID NO: 192982 - DNA, 25 bp, Artificial
  Probe
ttccattcagtgatgaagtacctgc

SEQ ID NO: 192983 - DNA, 25 bp, Artificial
  Probe
tggacgaggcgaacaggctacctac

SEQ ID NO: 192984 - DNA, 25 bp, Artificial
  Probe
atgttgcagggcacttgtggagccc

SEQ ID NO: 192985 - DNA, 25 bp, Artificial
  Probe
tttctcatccgcatgcaagaggaga

SEQ ID NO: 192986 - DNA, 25 bp, Artificial
  Probe
gatcaagatgttgcagggcacttgt

SEQ ID NO: 192987 - DNA, 25 bp, Artificial
  Probe
acactaagcctcttctttgctgggt

SEQ ID NO: 192988 - DNA, 25 bp, Artificial
  Probe
gaagtacctgcctggaccacagcaa

SEQ ID NO: 192989 - DNA, 25 bp, Artificial
  Probe
agtgatgaagtacctgcctggacca

SEQ ID NO: 192990 - DNA, 25 bp, Artificial
  Probe
ttctcatccgcatgcaagaggagaa

SEQ ID NO: 192991 - DNA, 25 bp, Artificial
  Probe
acaatacactcttcaaaggctatgg

SEQ ID NO: 192992 - DNA, 25 bp, Artificial
  Probe
gcgcctctctatagccacattgaga

SEQ ID NO: 192993 - DNA, 25 bp, Artificial
  Probe
gggcacttgtggagcccccattgac

SEQ ID NO: 192994 - DNA, 25 bp, Artificial
  Probe
tgatgaagtacctgcctggaccaca

SEQ ID NO: 192995 - DNA, 25 bp, Artificial
  Probe
aggcagaaccatagtaccctggacc

SEQ ID NO: 192996 - DNA, 25 bp, Artificial
  Probe
cagggcacttgtggagcccccattg

SEQ ID NO: 192997 - DNA, 25 bp, Artificial
  Probe
aggaggcctgccagaattacaaagt

SEQ ID NO: 192998 - DNA, 25 bp, Artificial
  Probe
gaaacacccagtaggcagcagtaac

SEQ ID NO: 192999 - DNA, 25 bp, Artificial
  Probe
ctctatcaccagcattcaggaggga

SEQ ID NO: 193000 - DNA, 25 bp, Artificial
  Probe
ctcccttacaatacgtgtgtccaag

SEQ ID NO: 193001 - DNA, 25 bp, Artificial
  Probe
ccatggctcaaatgtggaaaccaaa

SEQ ID NO: 193002 - DNA, 25 bp, Artificial
  Probe
cacccagtaggcagcagtaacaaca

SEQ ID NO: 193003 - DNA, 25 bp, Artificial
  Probe
accatggtttcctgctactcatgaa

SEQ ID NO: 193004 - DNA, 25 bp, Artificial
  Probe
tcattaggcctcctctttgctggga

SEQ ID NO: 193005 - DNA, 25 bp, Artificial
  Probe
agggaacatggctccctaggaggcc

SEQ ID NO: 193006 - DNA, 25 bp, Artificial
  Probe
attgatttctcttagaccataagag

SEQ ID NO: 193007 - DNA, 25 bp, Artificial
  Probe
tcagtcagctccacgctataccatg

SEQ ID NO: 193008 - DNA, 25 bp, Artificial
  Probe
tcatggggcaaaggtggctcacctc

SEQ ID NO: 193009 - DNA, 25 bp, Artificial
  Probe
tggtagggcataccatggctcaaat

SEQ ID NO: 193010 - DNA, 25 bp, Artificial
  Probe
gtcatctcccttacaatacgtgtgt

SEQ ID NO: 193011 - DNA, 25 bp, Artificial
  Probe
caatacgtgtgtccaagaactcaaa

SEQ ID NO: 193012 - DNA, 25 bp, Artificial
  Probe
aacatggctccctaggaggcctgcc

SEQ ID NO: 193013 - DNA, 25 bp, Artificial
  Probe
agcttttggaagtgtcatctccctt

SEQ ID NO: 193014 - DNA, 25 bp, Artificial
  Probe
attggactctatcaccagcattcag

SEQ ID NO: 193015 - DNA, 25 bp, Artificial
  Probe
acacagttagctaggattgacacat

SEQ ID NO: 193016 - DNA, 25 bp, Artificial
  Probe
cactcagtcctctacacaagagcag

SEQ ID NO: 193017 - DNA, 25 bp, Artificial
  Probe
agctaggattgacacattggactct

SEQ ID NO: 193018 - DNA, 25 bp, Artificial
  Probe
gcataccatggctcaaatgtggaaa

SEQ ID NO: 193019 - DNA, 25 bp, Artificial
  Probe
gatgtcatcattaggcctcctcttt

SEQ ID NO: 193020 - DNA, 25 bp, Artificial
  Probe
ctagtgatgtcatcattaggcctcc

SEQ ID NO: 193021 - DNA, 25 bp, Artificial
  Probe
ttgatttctcttagaccataagagt

SEQ ID NO: 193022 - DNA, 25 bp, Artificial
  Probe
aactgagactcatggggcaaaggtg

SEQ ID NO: 193023 - DNA, 25 bp, Artificial
  Probe
tctgcagaagctgtcctgcccttct

SEQ ID NO: 193024 - DNA, 25 bp, Artificial
  Probe
caacgtacaggttcaaaagatagaa

SEQ ID NO: 193025 - DNA, 25 bp, Artificial
  Probe
aattcagacaataaagcttgatagc

SEQ ID NO: 193026 - DNA, 25 bp, Artificial
  Probe
aagacacagttagctaggattgaca

SEQ ID NO: 193027 - DNA, 25 bp, Artificial
  Probe
actgggtcagtcagctccacgctat

SEQ ID NO: 193028 - DNA, 25 bp, Artificial
  Probe
gtgaaactcatctcaaaaaaggaac

SEQ ID NO: 193029 - DNA, 25 bp, Artificial
  Probe
ggcagcagtaacaacaactgagact

SEQ ID NO: 193030 - DNA, 25 bp, Artificial
  Probe
ggctcacctctgcagaagctgtcct

SEQ ID NO: 193031 - DNA, 25 bp, Artificial
  Probe
caagcccaacgtacaggttcaaaag

SEQ ID NO: 193032 - DNA, 25 bp, Artificial
  Probe
ccagtaggcagcagtaacaacaact

SEQ ID NO: 193033 - DNA, 25 bp, Artificial
  Probe
ggcctcctctttgctgggactgggt

SEQ ID NO: 193034 - DNA, 25 bp, Artificial
  Probe
tttctcttagaccataagagtccag

SEQ ID NO: 193035 - DNA, 25 bp, Artificial
  Probe
aagagcagcatgtccccaagcccaa

SEQ ID NO: 193036 - DNA, 25 bp, Artificial
  Probe
gactcatggggcaaaggtggctcac

SEQ ID NO: 193037 - DNA, 25 bp, Artificial
  Probe
ggcaaaggtggctcacctctgcaga

SEQ ID NO: 193038 - DNA, 25 bp, Artificial
  Probe
ccctaggaggcctgccagaattaca

SEQ ID NO: 193039 - DNA, 25 bp, Artificial
  Probe
ctgtatccaaagctatttggttata

SEQ ID NO: 193040 - DNA, 25 bp, Artificial
  Probe
gacacattggactctatcaccagca

SEQ ID NO: 193041 - DNA, 25 bp, Artificial
  Probe
ggaggcctgccagaattacaaagtg

SEQ ID NO: 193042 - DNA, 25 bp, Artificial
  Probe
acatggctccctaggaggcctgcca

SEQ ID NO: 193043 - DNA, 25 bp, Artificial
  Probe
tcttcaaggaaagacacccactgta

SEQ ID NO: 193044 - DNA, 25 bp, Artificial
  Probe
gacacccactgtagggtttgatttc

SEQ ID NO: 193045 - DNA, 25 bp, Artificial
  Probe
caaactttggcctggcctgtgtcct

SEQ ID NO: 193046 - DNA, 25 bp, Artificial
  Probe
atccaggtgttgtaagcatctgttt

SEQ ID NO: 193047 - DNA, 25 bp, Artificial
  Probe
aaatgcaaactttggcctggcctgt

SEQ ID NO: 193048 - DNA, 25 bp, Artificial
  Probe
gattttccttgagctaataaatgca

SEQ ID NO: 193049 - DNA, 25 bp, Artificial
  Probe
tttggcctggcctgtgtcctatata

SEQ ID NO: 193050 - DNA, 25 bp, Artificial
  Probe
tgcaagtatacattggcacgagggt

SEQ ID NO: 193051 - DNA, 25 bp, Artificial
  Probe
cagtaccttgtgtgggttcttacaa

SEQ ID NO: 193052 - DNA, 25 bp, Artificial
  Probe
cctgttggctttgagactgtagtat

SEQ ID NO: 193053 - DNA, 25 bp, Artificial
  Probe
tcgaacttactctcaaaatgcaagg

SEQ ID NO: 193054 - DNA, 25 bp, Artificial
  Probe
caaatccatttgctgaagagtaatt

SEQ ID NO: 193055 - DNA, 25 bp, Artificial
  Probe
ctccctgagagagagtcaaccttag

SEQ ID NO: 193056 - DNA, 25 bp, Artificial
  Probe
gtgaatcgaacttactctcaaaatg

SEQ ID NO: 193057 - DNA, 25 bp, Artificial
  Probe
ccttcttcccggagcactggcttta

SEQ ID NO: 193058 - DNA, 25 bp, Artificial
  Probe
ttagtttgttcaaatccatttgctg

SEQ ID NO: 193059 - DNA, 25 bp, Artificial
  Probe
caagaatcaccttcttcccggagca

SEQ ID NO: 193060 - DNA, 25 bp, Artificial
  Probe
tagggtttgatttcctactggctcc

SEQ ID NO: 193061 - DNA, 25 bp, Artificial
  Probe
agaaggctccggtttaccatctctc

SEQ ID NO: 193062 - DNA, 25 bp, Artificial
  Probe
agagtcaaccttagtattctctgca

SEQ ID NO: 193063 - DNA, 25 bp, Artificial
  Probe
ctctcaaaatgcaaggttagtttgt

SEQ ID NO: 193064 - DNA, 25 bp, Artificial
  Probe
ttgatttcctactggctcctgtcac

SEQ ID NO: 193065 - DNA, 25 bp, Artificial
  Probe
cctactggctcctgtcacatcaatg

SEQ ID NO: 193066 - DNA, 25 bp, Artificial
  Probe
ggacattatccatgttataaatgac

SEQ ID NO: 193067 - DNA, 25 bp, Artificial
  Probe
tgtcctatataagtggcaccatgtg

SEQ ID NO: 193068 - DNA, 25 bp, Artificial
  Probe
ggcagagaaggctccggtttaccat

SEQ ID NO: 193069 - DNA, 25 bp, Artificial
  Probe
tagtattctctgcaagtatacattg

SEQ ID NO: 193070 - DNA, 25 bp, Artificial
  Probe
tatataagtggcaccatgtgtctcc

SEQ ID NO: 193071 - DNA, 25 bp, Artificial
  Probe
gctcctgtcacatcaatggacatta

SEQ ID NO: 193072 - DNA, 25 bp, Artificial
  Probe
taaatgcaggcctgttggctttgag

SEQ ID NO: 193073 - DNA, 25 bp, Artificial
  Probe
ccttgtgtgggttcttacaaacaat

SEQ ID NO: 193074 - DNA, 25 bp, Artificial
  Probe
tggatgtcatgattttccttgagct

SEQ ID NO: 193075 - DNA, 25 bp, Artificial
  Probe
aggtatgccaagaatcaccttcttc

SEQ ID NO: 193076 - DNA, 25 bp, Artificial
  Probe
gtgctaccagggtgttaaatgcagg

SEQ ID NO: 193077 - DNA, 25 bp, Artificial
  Probe
ggtgttaaatgcaggcctgttggct

SEQ ID NO: 193078 - DNA, 25 bp, Artificial
  Probe
cctggtcttcaaggaaagacaccca

SEQ ID NO: 193079 - DNA, 25 bp, Artificial
  Probe
ccactgtagggtttgatttcctact

SEQ ID NO: 193080 - DNA, 25 bp, Artificial
  Probe
gtcacatcaatggacattatccatg

SEQ ID NO: 193081 - DNA, 25 bp, Artificial
  Probe
gtcaaccttagtattctctgcaagt

SEQ ID NO: 193082 - DNA, 25 bp, Artificial
  Probe
agctaataaatgcaaactttggcct

SEQ ID NO: 193083 - DNA, 25 bp, Artificial
  Probe
tttttgtgtctatagccagtacctt

SEQ ID NO: 193084 - DNA, 25 bp, Artificial
  Probe
ccatatttatgtgtgaatcgaactt

SEQ ID NO: 193085 - DNA, 25 bp, Artificial
  Probe
ctggctttagttcctggagtgaaaa

SEQ ID NO: 193086 - DNA, 25 bp, Artificial
  Probe
ctgtagtatggcagagaaggctccg

SEQ ID NO: 193087 - DNA, 25 bp, Artificial
  Probe
ttctctgcaagtatacattggcacg

SEQ ID NO: 193088 - DNA, 25 bp, Artificial
  Probe
ctaccagggtgttaaatgcaggcct

SEQ ID NO: 193089 - DNA, 25 bp, Artificial
  Probe
tgaccttgccccaaacggtttgttg

SEQ ID NO: 193090 - DNA, 25 bp, Artificial
  Probe
tcacttacatcagtgctgcatgaca

SEQ ID NO: 193091 - DNA, 25 bp, Artificial
  Probe
agggccttgccagtatggagctgtt

SEQ ID NO: 193092 - DNA, 25 bp, Artificial
  Probe
taaagtccaggaagagattggccaa

SEQ ID NO: 193093 - DNA, 25 bp, Artificial
  Probe
caccgcagcccctgtatgttggaca

SEQ ID NO: 193094 - DNA, 25 bp, Artificial
  Probe
tacttcatacccaagggaacagcag

SEQ ID NO: 193095 - DNA, 25 bp, Artificial
  Probe
gacaggatccacatgccctacacaa

SEQ ID NO: 193096 - DNA, 25 bp, Artificial
  Probe
ccaacccagagatgtttgacccagg

SEQ ID NO: 193097 - DNA, 25 bp, Artificial
  Probe
gggagacaccgcagcccctgtatgt

SEQ ID NO: 193098 - DNA, 25 bp, Artificial
  Probe
catacccaagggaacagcagtacta

SEQ ID NO: 193099 - DNA, 25 bp, Artificial
  Probe
ccctgtatgttggacaggatccaca

SEQ ID NO: 193100 - DNA, 25 bp, Artificial
  Probe
gctcttgatgaagtacccacacatc

SEQ ID NO: 193101 - DNA, 25 bp, Artificial
  Probe
gatccaaaggacatcgatataaact

SEQ ID NO: 193102 - DNA, 25 bp, Artificial
  Probe
cactttctagatgagaatggaaact

SEQ ID NO: 193103 - DNA, 25 bp, Artificial
  Probe
ccatgattcatgaggttcagagata

SEQ ID NO: 193104 - DNA, 25 bp, Artificial
  Probe
actgaaatctctgtctgatccaaag

SEQ ID NO: 193105 - DNA, 25 bp, Artificial
  Probe
tacacaaatgccatgattcatgagg

SEQ ID NO: 193106 - DNA, 25 bp, Artificial
  Probe
ttggccaagtgattgggagacaccg

SEQ ID NO: 193107 - DNA, 25 bp, Artificial
  Probe
acatcaagcttaacgctgagatttg

SEQ ID NO: 193108 - DNA, 25 bp, Artificial
  Probe
tacatcagtgctgcatgacagtaag

SEQ ID NO: 193109 - DNA, 25 bp, Artificial
  Probe
acatcacttacatcagtgctgcatg

SEQ ID NO: 193110 - DNA, 25 bp, Artificial
  Probe
tgtgacactaaattcagagactact

SEQ ID NO: 193111 - DNA, 25 bp, Artificial
  Probe
agtgactacttcatgcctttctcag

SEQ ID NO: 193112 - DNA, 25 bp, Artificial
  Probe
atcacagataaagtccaggaagaga

SEQ ID NO: 193113 - DNA, 25 bp, Artificial
  Probe
ttcagagactacttcatacccaagg

SEQ ID NO: 193114 - DNA, 25 bp, Artificial
  Probe
ggaacagcagtactaacatcactta

SEQ ID NO: 193115 - DNA, 25 bp, Artificial
  Probe
gagatatattgaccttgccccaaac

SEQ ID NO: 193116 - DNA, 25 bp, Artificial
  Probe
ctacttcatgcctttctcagcagga

SEQ ID NO: 193117 - DNA, 25 bp, Artificial
  Probe
tgccccaaacggtttgttgcatgaa

SEQ ID NO: 193118 - DNA, 25 bp, Artificial
  Probe
tatgttggacaggatccacatgccc

SEQ ID NO: 193119 - DNA, 25 bp, Artificial
  Probe
gatgaagtacccacacatcacagat

SEQ ID NO: 193120 - DNA, 25 bp, Artificial
  Probe
gatataaactcaatacgttctgagt

SEQ ID NO: 193121 - DNA, 25 bp, Artificial
  Probe
caggtcactttctagatgagaatgg

SEQ ID NO: 193122 - DNA, 25 bp, Artificial
  Probe
atatattgaccttgccccaaacggt

SEQ ID NO: 193123 - DNA, 25 bp, Artificial
  Probe
tcactttctagatgagaatggaaac

SEQ ID NO: 193124 - DNA, 25 bp, Artificial
  Probe
gattggccaagtgattgggagacac

SEQ ID NO: 193125 - DNA, 25 bp, Artificial
  Probe
aaagtccaggaagagattggccaag

SEQ ID NO: 193126 - DNA, 25 bp, Artificial
  Probe
tgattgggagacaccgcagcccctg

SEQ ID NO: 193127 - DNA, 25 bp, Artificial
  Probe
cttgccagtatggagctgtttttgt

SEQ ID NO: 193128 - DNA, 25 bp, Artificial
  Probe
ttctcagcaggaaaacggaaatgtg

SEQ ID NO: 193129 - DNA, 25 bp, Artificial
  Probe
ccacacatcacagataaagtccagg

SEQ ID NO: 193130 - DNA, 25 bp, Artificial
  Probe
tacccaagggaacagcagtactaac

SEQ ID NO: 193131 - DNA, 25 bp, Artificial
  Probe
cgatataaactcaatacgttctgag

SEQ ID NO: 193132 - DNA, 25 bp, Artificial
  Probe
tgctgcatgacagtaaggaattccc

SEQ ID NO: 193133 - DNA, 25 bp, Artificial
  Probe
cagagatgtttgacccaggtcactt

SEQ ID NO: 193134 - DNA, 25 bp, Artificial
  Probe
actttccagctgtgcttcattcctg

SEQ ID NO: 193135 - DNA, 25 bp, Artificial
  Probe
ttcttcactctgtgtctattcaaac

SEQ ID NO: 193136 - DNA, 25 bp, Artificial
  Probe
cccactttgcacacatatagacttt

SEQ ID NO: 193137 - DNA, 25 bp, Artificial
  Probe
tttgcacacatatagactttatcct

SEQ ID NO: 193138 - DNA, 25 bp, Artificial
  Probe
catatagactttatccttcttcact

SEQ ID NO: 193139 - DNA, 25 bp, Artificial
  Probe
ttcactctgtgtctattcaaacgta

SEQ ID NO: 193140 - DNA, 25 bp, Artificial
  Probe
ttatccttcttcactctgtgtctat

SEQ ID NO: 193141 - DNA, 25 bp, Artificial
  Probe
cacatatagactttatccttcttca

SEQ ID NO: 193142 - DNA, 25 bp, Artificial
  Probe
ctctgtgtctattcaaacgtataat

SEQ ID NO: 193143 - DNA, 25 bp, Artificial
  Probe
tcttccctgaatcctcccactttgc

SEQ ID NO: 193144 - DNA, 25 bp, Artificial
  Probe
tatagactttatccttcttcactct

SEQ ID NO: 193145 - DNA, 25 bp, Artificial
  Probe
ctttgcacacatatagactttatcc

SEQ ID NO: 193146 - DNA, 25 bp, Artificial
  Probe
agactttatccttcttcactctgtg

SEQ ID NO: 193147 - DNA, 25 bp, Artificial
  Probe
agaagagattcttccctgaatcctc

SEQ ID NO: 193148 - DNA, 25 bp, Artificial
  Probe
gaagagattcttccctgaatcctcc

SEQ ID NO: 193149 - DNA, 25 bp, Artificial
  Probe
ccactttgcacacatatagacttta

SEQ ID NO: 193150 - DNA, 25 bp, Artificial
  Probe
ccagaagagattcttccctgaatcc

SEQ ID NO: 193151 - DNA, 25 bp, Artificial
  Probe
tgcacacatatagactttatccttc

SEQ ID NO: 193152 - DNA, 25 bp, Artificial
  Probe
actctgtgtctattcaaacgtataa

SEQ ID NO: 193153 - DNA, 25 bp, Artificial
  Probe
atagactttatccttcttcactctg

SEQ ID NO: 193154 - DNA, 25 bp, Artificial
  Probe
cactttgcacacatatagactttat

SEQ ID NO: 193155 - DNA, 25 bp, Artificial
  Probe
tttatccttcttcactctgtgtcta

SEQ ID NO: 193156 - DNA, 25 bp, Artificial
  Probe
ctttatccttcttcactctgtgtct

SEQ ID NO: 193157 - DNA, 25 bp, Artificial
  Probe
gattcttccctgaatcctcccactt

SEQ ID NO: 193158 - DNA, 25 bp, Artificial
  Probe
tcactctgtgtctattcaaacgtat

SEQ ID NO: 193159 - DNA, 25 bp, Artificial
  Probe
cttcttcactctgtgtctattcaaa

SEQ ID NO: 193160 - DNA, 25 bp, Artificial
  Probe
tccctgaatcctcccactttgcaca

SEQ ID NO: 193161 - DNA, 25 bp, Artificial
  Probe
aagagattcttccctgaatcctccc

SEQ ID NO: 193162 - DNA, 25 bp, Artificial
  Probe
ttccctgaatcctcccactttgcac

SEQ ID NO: 193163 - DNA, 25 bp, Artificial
  Probe
atccttcttcactctgtgtctattc

SEQ ID NO: 193164 - DNA, 25 bp, Artificial
  Probe
acacatatagactttatccttcttc

SEQ ID NO: 193165 - DNA, 25 bp, Artificial
  Probe
gagattcttccctgaatcctcccac

SEQ ID NO: 193166 - DNA, 25 bp, Artificial
  Probe
tcctcccactttgcacacatataga

SEQ ID NO: 193167 - DNA, 25 bp, Artificial
  Probe
tagactttatccttcttcactctgt

SEQ ID NO: 193168 - DNA, 25 bp, Artificial
  Probe
cacacatatagactttatccttctt

SEQ ID NO: 193169 - DNA, 25 bp, Artificial
  Probe
cccagaagagattcttccctgaatc

SEQ ID NO: 193170 - DNA, 25 bp, Artificial
  Probe
ttcttccctgaatcctcccactttg

SEQ ID NO: 193171 - DNA, 25 bp, Artificial
  Probe
agagattcttccctgaatcctccca

SEQ ID NO: 193172 - DNA, 25 bp, Artificial
  Probe
tcccactttgcacacatatagactt

SEQ ID NO: 193173 - DNA, 25 bp, Artificial
  Probe
cactctgtgtctattcaaacgtata

SEQ ID NO: 193174 - DNA, 25 bp, Artificial
  Probe
atatagactttatccttcttcactc

SEQ ID NO: 193175 - DNA, 25 bp, Artificial
  Probe
ctcccactttgcacacatatagact

SEQ ID NO: 193176 - DNA, 25 bp, Artificial
  Probe
actttgcacacatatagactttatc

SEQ ID NO: 193177 - DNA, 25 bp, Artificial
  Probe
ccttcttcactctgtgtctattcaa

SEQ ID NO: 193178 - DNA, 25 bp, Artificial
  Probe
tcttcactctgtgtctattcaaacg

SEQ ID NO: 193179 - DNA, 25 bp, Artificial
  Probe
cagaagagattcttccctgaatcct

SEQ ID NO: 193180 - DNA, 25 bp, Artificial
  Probe
actttatccttcttcactctgtgtc

SEQ ID NO: 193181 - DNA, 25 bp, Artificial
  Probe
cagtcctgtgggagaacatcttgct

SEQ ID NO: 193182 - DNA, 25 bp, Artificial
  Probe
catcactggaatttccatcgcccga

SEQ ID NO: 193183 - DNA, 25 bp, Artificial
  Probe
tgtatcgatgccacagaattgtgaa

SEQ ID NO: 193184 - DNA, 25 bp, Artificial
  Probe
tatcaccagcagacactgccggact

SEQ ID NO: 193185 - DNA, 25 bp, Artificial
  Probe
attgtgtgtccgtccgtggagccag

SEQ ID NO: 193186 - DNA, 25 bp, Artificial
  Probe
gcgtctactgcagatgtccagctag

SEQ ID NO: 193187 - DNA, 25 bp, Artificial
  Probe
ctggccatgcattgcccatgagtga

SEQ ID NO: 193188 - DNA, 25 bp, Artificial
  Probe
ctttagtgagccattgttgtacgtc

SEQ ID NO: 193189 - DNA, 25 bp, Artificial
  Probe
ccctctcttggacagtcttctgggc

SEQ ID NO: 193190 - DNA, 25 bp, Artificial
  Probe
catgcattgcccatgagtgaacgta

SEQ ID NO: 193191 - DNA, 25 bp, Artificial
  Probe
ggagaacatcttgctagaaggaacc

SEQ ID NO: 193192 - DNA, 25 bp, Artificial
  Probe
tgtgaattgtgtgtccgtccgtgga

SEQ ID NO: 193193 - DNA, 25 bp, Artificial
  Probe
tggacagtcttctgggcccttccaa

SEQ ID NO: 193194 - DNA, 25 bp, Artificial
  Probe
tcccccgtgtgaagtgtgttatcac

SEQ ID NO: 193195 - DNA, 25 bp, Artificial
  Probe
tggatgtatcgatgccacagaattg

SEQ ID NO: 193196 - DNA, 25 bp, Artificial
  Probe
tgtccagctaggaaagagtcccctc

SEQ ID NO: 193197 - DNA, 25 bp, Artificial
  Probe
tgtggacatggcactgctgttccgt

SEQ ID NO: 193198 - DNA, 25 bp, Artificial
  Probe
tgggcagtcctgtgggagaacatct

SEQ ID NO: 193199 - DNA, 25 bp, Artificial
  Probe
ccatgagtgaacgtagcggcacccc

SEQ ID NO: 193200 - DNA, 25 bp, Artificial
  Probe
ttgtacgtctagtaaactttgtact

SEQ ID NO: 193201 - DNA, 25 bp, Artificial
  Probe
tgctagaaggaaccaacccacgaaa

SEQ ID NO: 193202 - DNA, 25 bp, Artificial
  Probe
ccccgtgtgaagtgtgttatcacca

SEQ ID NO: 193203 - DNA, 25 bp, Artificial
  Probe
tgtgtccgtccgtggagccagtcct

SEQ ID NO: 193204 - DNA, 25 bp, Artificial
  Probe
ttccatcgcccgaattctttagtga

SEQ ID NO: 193205 - DNA, 25 bp, Artificial
  Probe
aagtgtgttatcaccagcagacact

SEQ ID NO: 193206 - DNA, 25 bp, Artificial
  Probe
gtccgtggagccagtcctagccaca

SEQ ID NO: 193207 - DNA, 25 bp, Artificial
  Probe
cgatgccacagaattgtgaattgtg

SEQ ID NO: 193208 - DNA, 25 bp, Artificial
  Probe
atggcactgctgttccgttcccttc

SEQ ID NO: 193209 - DNA, 25 bp, Artificial
  Probe
cgaattctttagtgagccattgttg

SEQ ID NO: 193210 - DNA, 25 bp, Artificial
  Probe
cctgccatcccgtctggatgtatcg

SEQ ID NO: 193211 - DNA, 25 bp, Artificial
  Probe
cattgttgtacgtctagtaaacttt

SEQ ID NO: 193212 - DNA, 25 bp, Artificial
  Probe
tcctgtgggagaacatcttgctaga

SEQ ID NO: 193213 - DNA, 25 bp, Artificial
  Probe
tcaagttcgacctggccatgcattg

SEQ ID NO: 193214 - DNA, 25 bp, Artificial
  Probe
gaacgtagcggcaccccggtgcgtc

SEQ ID NO: 193215 - DNA, 25 bp, Artificial
  Probe
ctggaatttccatcgcccgaattct

SEQ ID NO: 193216 - DNA, 25 bp, Artificial
  Probe
gtccgtccgtggagccagtcctagc

SEQ ID NO: 193217 - DNA, 25 bp, Artificial
  Probe
ccagtcctagccacattattgacag

SEQ ID NO: 193218 - DNA, 25 bp, Artificial
  Probe
caccccggtgcgtctactgcagatg

SEQ ID NO: 193219 - DNA, 25 bp, Artificial
  Probe
aattgtgaattgtgtgtccgtccgt

SEQ ID NO: 193220 - DNA, 25 bp, Artificial
  Probe
atcttgctagaaggaaccaacccac

SEQ ID NO: 193221 - DNA, 25 bp, Artificial
  Probe
acattattgacagtcttgcattttg

SEQ ID NO: 193222 - DNA, 25 bp, Artificial
  Probe
cattattgacagtcttgcattttgt

SEQ ID NO: 193223 - DNA, 25 bp, Artificial
  Probe
ctactgcagatgtccagctaggaaa

SEQ ID NO: 193224 - DNA, 25 bp, Artificial
  Probe
ggagccagtcctagccacattattg

SEQ ID NO: 193225 - DNA, 25 bp, Artificial
  Probe
ttcgacctggccatgcattgcccat

SEQ ID NO: 193226 - DNA, 25 bp, Artificial
  Probe
cttccaagcccatccgtggagtcgg

SEQ ID NO: 193227 - DNA, 25 bp, Artificial
  Probe
gatgagaccctgatgtggaaggtac

SEQ ID NO: 193228 - DNA, 25 bp, Artificial
  Probe
tcccgcctgacaaaatggaaacaca

SEQ ID NO: 193229 - DNA, 25 bp, Artificial
  Probe
tttggcaggtctctcttggggagaa

SEQ ID NO: 193230 - DNA, 25 bp, Artificial
  Probe
tgccaggaatcttgaagtcaaagag

SEQ ID NO: 193231 - DNA, 25 bp, Artificial
  Probe
tgtatggagcactctggtgggttcc

SEQ ID NO: 193232 - DNA, 25 bp, Artificial
  Probe
agaggtcccctgcaagggacaccca

SEQ ID NO: 193233 - DNA, 25 bp, Artificial
  Probe
gagtaggaagcctcatggcagcttc

SEQ ID NO: 193234 - DNA, 25 bp, Artificial
  Probe
tcacctcttcctcttggcttcagag

SEQ ID NO: 193235 - DNA, 25 bp, Artificial
  Probe
cactcctgatgctgaccttggcctt

SEQ ID NO: 193236 - DNA, 25 bp, Artificial
  Probe
aaatgatcctctgttggctcttttt

SEQ ID NO: 193237 - DNA, 25 bp, Artificial
  Probe
gaaaggacagttgcagctgcctact

SEQ ID NO: 193238 - DNA, 25 bp, Artificial
  Probe
caaacagacaagcaggcgggcagtc

SEQ ID NO: 193239 - DNA, 25 bp, Artificial
  Probe
cggggactcccgattgcattcactc

SEQ ID NO: 193240 - DNA, 25 bp, Artificial
  Probe
caagcaacccagatatgaactcccg

SEQ ID NO: 193241 - DNA, 25 bp, Artificial
  Probe
gagaaatgatcctctgttggctctt

SEQ ID NO: 193242 - DNA, 25 bp, Artificial
  Probe
ctctctggacaagatgagaccctga

SEQ ID NO: 193243 - DNA, 25 bp, Artificial
  Probe
gaggtcccctgcaagggacacccag

SEQ ID NO: 193244 - DNA, 25 bp, Artificial
  Probe
ggcaccagctccaagatgtaccttc

SEQ ID NO: 193245 - DNA, 25 bp, Artificial
  Probe
accaagctccaataaacgtactagg

SEQ ID NO: 193246 - DNA, 25 bp, Artificial
  Probe
accctacagatgagcgaaaatgtat

SEQ ID NO: 193247 - DNA, 25 bp, Artificial
  Probe
ccagccattatgtggcctagtgggt

SEQ ID NO: 193248 - DNA, 25 bp, Artificial
  Probe
tcctcccaagtttcttctctggaga

SEQ ID NO: 193249 - DNA, 25 bp, Artificial
  Probe
ggactcccgattgcattcactctta

SEQ ID NO: 193250 - DNA, 25 bp, Artificial
  Probe
ggagctgttacaggaggaagcttct

SEQ ID NO: 193251 - DNA, 25 bp, Artificial
  Probe
cctgagccctggtccagttgggctg

SEQ ID NO: 193252 - DNA, 25 bp, Artificial
  Probe
gtgggttcccaagcttgccccttct

SEQ ID NO: 193253 - DNA, 25 bp, Artificial
  Probe
ccctgagccctggtccagttgggct

SEQ ID NO: 193254 - DNA, 25 bp, Artificial
  Probe
tcatttctgagacattcatgcactg

SEQ ID NO: 193255 - DNA, 25 bp, Artificial
  Probe
ctcttggcttcagagatggaaatgg

SEQ ID NO: 193256 - DNA, 25 bp, Artificial
  Probe
gaacccagcacaaaagttcttcaag

SEQ ID NO: 193257 - DNA, 25 bp, Artificial
  Probe
gatgtaccttcctcctttatgccag

SEQ ID NO: 193258 - DNA, 25 bp, Artificial
  Probe
gaaggtactttgctgtgcctggtgt

SEQ ID NO: 193259 - DNA, 25 bp, Artificial
  Probe
ggtctcctttctcaacatatgtgta

SEQ ID NO: 193260 - DNA, 25 bp, Artificial
  Probe
cccgcctgacaaaatggaaacacac

SEQ ID NO: 193261 - DNA, 25 bp, Artificial
  Probe
gaaataataccctacagatgagcga

SEQ ID NO: 193262 - DNA, 25 bp, Artificial
  Probe
tttttgtgggtccatttggcaggtc

SEQ ID NO: 193263 - DNA, 25 bp, Artificial
  Probe
cccagccattatgtggcctagtggg

SEQ ID NO: 193264 - DNA, 25 bp, Artificial
  Probe
tcttctctggagaagtttttctaaa

SEQ ID NO: 193265 - DNA, 25 bp, Artificial
  Probe
agcgagtcgccctgtgcttcaaaaa

SEQ ID NO: 193266 - DNA, 25 bp, Artificial
  Probe
caagggacacccagcaccaacgagg

SEQ ID NO: 193267 - DNA, 25 bp, Artificial
  Probe
ccatggtgcctgtagtatagctggg

SEQ ID NO: 193268 - DNA, 25 bp, Artificial
  Probe
acaggaggaagcttctttggggcat

SEQ ID NO: 193269 - DNA, 25 bp, Artificial
  Probe
gtttaagtctggagtaggaagcctc

SEQ ID NO: 193270 - DNA, 25 bp, Artificial
  Probe
aggcgggcagtcagaagcctgccca

SEQ ID NO: 193271 - DNA, 25 bp, Artificial
  Probe
tttctaaaccaaacagacaagcagg

SEQ ID NO: 193272 - DNA, 25 bp, Artificial
  Probe
cagactgtcggctgccttgactgcc

SEQ ID NO: 193273 - DNA, 25 bp, Artificial
  Probe
acacccacagtacaatcttagaggt

SEQ ID NO: 193274 - DNA, 25 bp, Artificial
  Probe
tgctagtcccagtgcctcctacggt

SEQ ID NO: 193275 - DNA, 25 bp, Artificial
  Probe
caatcttagaggtgctagtcccagt

SEQ ID NO: 193276 - DNA, 25 bp, Artificial
  Probe
accccattttctagttggcagcaat

SEQ ID NO: 193277 - DNA, 25 bp, Artificial
  Probe
ccccattttctagttggcagcaatg

SEQ ID NO: 193278 - DNA, 25 bp, Artificial
  Probe
cccattttctagttggcagcaatgg

SEQ ID NO: 193279 - DNA, 25 bp, Artificial
  Probe
ggttagcacctagaggccacaacta

SEQ ID NO: 193280 - DNA, 25 bp, Artificial
  Probe
acaatcttagaggtgctagtcccag

SEQ ID NO: 193281 - DNA, 25 bp, Artificial
  Probe
aacacccacagtacaatcttagagg

SEQ ID NO: 193282 - DNA, 25 bp, Artificial
  Probe
tcttagaggtgctagtcccagtgcc

SEQ ID NO: 193283 - DNA, 25 bp, Artificial
  Probe
agtacaatcttagaggtgctagtcc

SEQ ID NO: 193284 - DNA, 25 bp, Artificial
  Probe
caggctgaggttagcacctagaggc

SEQ ID NO: 193285 - DNA, 25 bp, Artificial
  Probe
cccacagtacaatcttagaggtgct

SEQ ID NO: 193286 - DNA, 25 bp, Artificial
  Probe
gaggttagcacctagaggccacaac

SEQ ID NO: 193287 - DNA, 25 bp, Artificial
  Probe
cagtacaatcttagaggtgctagtc

SEQ ID NO: 193288 - DNA, 25 bp, Artificial
  Probe
ctcctaccccattttctagttggca

SEQ ID NO: 193289 - DNA, 25 bp, Artificial
  Probe
cacaggctgaggttagcacctagag

SEQ ID NO: 193290 - DNA, 25 bp, Artificial
  Probe
acccacagtacaatcttagaggtgc

SEQ ID NO: 193291 - DNA, 25 bp, Artificial
  Probe
tagaggtgctagtcccagtgcctcc

SEQ ID NO: 193292 - DNA, 25 bp, Artificial
  Probe
gcacaggctgaggttagcacctaga

SEQ ID NO: 193293 - DNA, 25 bp, Artificial
  Probe
agaggccacaactaacatccccgat

SEQ ID NO: 193294 - DNA, 25 bp, Artificial
  Probe
tacaatcttagaggtgctagtccca

SEQ ID NO: 193295 - DNA, 25 bp, Artificial
  Probe
tccccgatccatacctcaacaccca

SEQ ID NO: 193296 - DNA, 25 bp, Artificial
  Probe
cacagtacaatcttagaggtgctag

SEQ ID NO: 193297 - DNA, 25 bp, Artificial
  Probe
aggctgaggttagcacctagaggcc

SEQ ID NO: 193298 - DNA, 25 bp, Artificial
  Probe
ctgaggttagcacctagaggccaca

SEQ ID NO: 193299 - DNA, 25 bp, Artificial
  Probe
ttagaggtgctagtcccagtgcctc

SEQ ID NO: 193300 - DNA, 25 bp, Artificial
  Probe
taccccattttctagttggcagcaa

SEQ ID NO: 193301 - DNA, 25 bp, Artificial
  Probe
cacccacagtacaatcttagaggtg

SEQ ID NO: 193302 - DNA, 25 bp, Artificial
  Probe
gctgaggttagcacctagaggccac

SEQ ID NO: 193303 - DNA, 25 bp, Artificial
  Probe
tgaggttagcacctagaggccacaa

SEQ ID NO: 193304 - DNA, 25 bp, Artificial
  Probe
gtacaatcttagaggtgctagtccc

SEQ ID NO: 193305 - DNA, 25 bp, Artificial
  Probe
gtgctagtcccagtgcctcctacgg

SEQ ID NO: 193306 - DNA, 25 bp, Artificial
  Probe
aatcttagaggtgctagtcccagtg

SEQ ID NO: 193307 - DNA, 25 bp, Artificial
  Probe
tagaggccacaactaacatccccga

SEQ ID NO: 193308 - DNA, 25 bp, Artificial
  Probe
acagtacaatcttagaggtgctagt

SEQ ID NO: 193309 - DNA, 25 bp, Artificial
  Probe
agaggtgctagtcccagtgcctcct

SEQ ID NO: 193310 - DNA, 25 bp, Artificial
  Probe
ccacagtacaatcttagaggtgcta

SEQ ID NO: 193311 - DNA, 25 bp, Artificial
  Probe
ggtgctagtcccagtgcctcctacg

SEQ ID NO: 193312 - DNA, 25 bp, Artificial
  Probe
gcctcctacggtcctccttcctcct

SEQ ID NO: 193313 - DNA, 25 bp, Artificial
  Probe
ctaccccattttctagttggcagca

SEQ ID NO: 193314 - DNA, 25 bp, Artificial
  Probe
atcttagaggtgctagtcccagtgc

SEQ ID NO: 193315 - DNA, 25 bp, Artificial
  Probe
cttagaggtgctagtcccagtgcct

SEQ ID NO: 193316 - DNA, 25 bp, Artificial
  Probe
gttagcacctagaggccacaactaa

SEQ ID NO: 193317 - DNA, 25 bp, Artificial
  Probe
ccattttctagttggcagcaatggg

SEQ ID NO: 193318 - DNA, 25 bp, Artificial
  Probe
aggttagcacctagaggccacaact

SEQ ID NO: 193319 - DNA, 25 bp, Artificial
  Probe
ggagcctcactctaggccaggctga

SEQ ID NO: 193320 - DNA, 25 bp, Artificial
  Probe
tacacaggcctggaggccgcacggc

SEQ ID NO: 193321 - DNA, 25 bp, Artificial
  Probe
aaccttccggcagcagggcaagggc

SEQ ID NO: 193322 - DNA, 25 bp, Artificial
  Probe
tccctgctctgtttctgggctccag

SEQ ID NO: 193323 - DNA, 25 bp, Artificial
  Probe
cttctctgcccaactagagctggct

SEQ ID NO: 193324 - DNA, 25 bp, Artificial
  Probe
aacagtggctgctgacccaagctgc

SEQ ID NO: 193325 - DNA, 25 bp, Artificial
  Probe
actagagctggctagcatgaaggga

SEQ ID NO: 193326 - DNA, 25 bp, Artificial
  Probe
aaggcaagaccaggacgtggaaacg

SEQ ID NO: 193327 - DNA, 25 bp, Artificial
  Probe
agatacccatgttgagcatccaccc

SEQ ID NO: 193328 - DNA, 25 bp, Artificial
  Probe
agggagacagcagttcccaagtgga

SEQ ID NO: 193329 - DNA, 25 bp, Artificial
  Probe
tttatctcagtctcgggtacctgcc

SEQ ID NO: 193330 - DNA, 25 bp, Artificial
  Probe
aggggtgtcttgtggccttcatcat

SEQ ID NO: 193331 - DNA, 25 bp, Artificial
  Probe
aagctgcgcacttggccatggcgag

SEQ ID NO: 193332 - DNA, 25 bp, Artificial
  Probe
ttgggggctcctgtccacttcccag

SEQ ID NO: 193333 - DNA, 25 bp, Artificial
  Probe
ggtcagtggccagatacccatgttg

SEQ ID NO: 193334 - DNA, 25 bp, Artificial
  Probe
acttggatgagatccggcacttcct

SEQ ID NO: 193335 - DNA, 25 bp, Artificial
  Probe
ggcccgtgcgccatcaccatgggat

SEQ ID NO: 193336 - DNA, 25 bp, Artificial
  Probe
acaggagatggcttcccttcagcac

SEQ ID NO: 193337 - DNA, 25 bp, Artificial
  Probe
cagttcccaagtggagtagagaggt

SEQ ID NO: 193338 - DNA, 25 bp, Artificial
  Probe
ggcaccaatgtgctggctcacctgc

SEQ ID NO: 193339 - DNA, 25 bp, Artificial
  Probe
ctcacgccggaggatgccaccagtg

SEQ ID NO: 193340 - DNA, 25 bp, Artificial
  Probe
gtctcaggttctcctcattcctgca

SEQ ID NO: 193341 - DNA, 25 bp, Artificial
  Probe
tgcacccagtaacagccccagtgtg

SEQ ID NO: 193342 - DNA, 25 bp, Artificial
  Probe
cagccccagtactgacacaataaag

SEQ ID NO: 193343 - DNA, 25 bp, Artificial
  Probe
cagagctgtcactgggctggttcga

SEQ ID NO: 193344 - DNA, 25 bp, Artificial
  Probe
aggagagacttactcaggagtcgct

SEQ ID NO: 193345 - DNA, 25 bp, Artificial
  Probe
agtgagttccgctgcctcacgccgg

SEQ ID NO: 193346 - DNA, 25 bp, Artificial
  Probe
cccagtgtgaccagctctgtggtgg

SEQ ID NO: 193347 - DNA, 25 bp, Artificial
  Probe
ctggctcctaagtctgggaatgagg

SEQ ID NO: 193348 - DNA, 25 bp, Artificial
  Probe
aagcttgggggctcctgtccacttc

SEQ ID NO: 193349 - DNA, 25 bp, Artificial
  Probe
cacttccaaagctggggaaccccag

SEQ ID NO: 193350 - DNA, 25 bp, Artificial
  Probe
aggccaggctgacatcccttcctgg

SEQ ID NO: 193351 - DNA, 25 bp, Artificial
  Probe
ccaagctgcgcacttggccatggcg

SEQ ID NO: 193352 - DNA, 25 bp, Artificial
  Probe
acgtactggccgtgcaccgaacctt

SEQ ID NO: 193353 - DNA, 25 bp, Artificial
  Probe
taccttcaccacctggggagtcagc

SEQ ID NO: 193354 - DNA, 25 bp, Artificial
  Probe
caccctgtgtccagagctgtcactg

SEQ ID NO: 193355 - DNA, 25 bp, Artificial
  Probe
cagggcaagggctccgtcctgctgt

SEQ ID NO: 193356 - DNA, 25 bp, Artificial
  Probe
gtggggacacctggactccttctta

SEQ ID NO: 193357 - DNA, 25 bp, Artificial
  Probe
gtttccaggccatgggcccgtgcgc

SEQ ID NO: 193358 - DNA, 25 bp, Artificial
  Probe
tcccttcctggctcctaagtctggg

SEQ ID NO: 193359 - DNA, 25 bp, Artificial
  Probe
cctccacttggatgagatccggcac

SEQ ID NO: 193360 - DNA, 25 bp, Artificial
  Probe
atggtggcatcattggggtacagac

SEQ ID NO: 193361 - DNA, 25 bp, Artificial
  Probe
gctccagtgcggtgccctggttctt

SEQ ID NO: 193362 - DNA, 25 bp, Artificial
  Probe
ccgggctgtgctcatgtgcgagaac

SEQ ID NO: 193363 - DNA, 25 bp, Artificial
  Probe
ctgaggccctgcatctgcctcttgg

SEQ ID NO: 193364 - DNA, 25 bp, Artificial
  Probe
gagttcctaggctgccagcggcgcc

SEQ ID NO: 193365 - DNA, 25 bp, Artificial
  Probe
acactgcaagtgtggcccctgctca

SEQ ID NO: 193366 - DNA, 25 bp, Artificial
  Probe
gacaacagtgtttcttaatcattgt

SEQ ID NO: 193367 - DNA, 25 bp, Artificial
  Probe
tcttgcagtctttcccagtgaaaac

SEQ ID NO: 193368 - DNA, 25 bp, Artificial
  Probe
aagtgtggcccctgctcataatttt

SEQ ID NO: 193369 - DNA, 25 bp, Artificial
  Probe
tcaagacggttcacgtgtgtaagct

SEQ ID NO: 193370 - DNA, 25 bp, Artificial
  Probe
aacattatagatgctgcaagataca

SEQ ID NO: 193371 - DNA, 25 bp, Artificial
  Probe
cgatttattcagaatcagagcatta

SEQ ID NO: 193372 - DNA, 25 bp, Artificial
  Probe
ccttgttgtctcagaagaaatgggt

SEQ ID NO: 193373 - DNA, 25 bp, Artificial
  Probe
tttcttcttgcagtctttcccagtg

SEQ ID NO: 193374 - DNA, 25 bp, Artificial
  Probe
tcttttccttgttgtctcagaagaa

SEQ ID NO: 193375 - DNA, 25 bp, Artificial
  Probe
ggactgttgggctcttttccttgtt

SEQ ID NO: 193376 - DNA, 25 bp, Artificial
  Probe
aagtcaagacggttcacgtgtgtaa

SEQ ID NO: 193377 - DNA, 25 bp, Artificial
  Probe
aaacggtaaattctgctgtttgcat

SEQ ID NO: 193378 - DNA, 25 bp, Artificial
  Probe
ggctcttttccttgttgtctcagaa

SEQ ID NO: 193379 - DNA, 25 bp, Artificial
  Probe
tcctaagagacaacagtgtttctta

SEQ ID NO: 193380 - DNA, 25 bp, Artificial
  Probe
tcccgttgaagacgatcaaaagaga

SEQ ID NO: 193381 - DNA, 25 bp, Artificial
  Probe
tgggctcttttccttgttgtctcag

SEQ ID NO: 193382 - DNA, 25 bp, Artificial
  Probe
catgctttgttgattgcacagtaga

SEQ ID NO: 193383 - DNA, 25 bp, Artificial
  Probe
tcactctcacggaaaggctggaaca

SEQ ID NO: 193384 - DNA, 25 bp, Artificial
  Probe
attatagatgctgcaagatacactg

SEQ ID NO: 193385 - DNA, 25 bp, Artificial
  Probe
aaccgaagtcaagacggttcacgtg

SEQ ID NO: 193386 - DNA, 25 bp, Artificial
  Probe
cagaaaccgaagtcaagacggttca

SEQ ID NO: 193387 - DNA, 25 bp, Artificial
  Probe
caagcagtcccgttgaagacgatca

SEQ ID NO: 193388 - DNA, 25 bp, Artificial
  Probe
agagacaacagtgtttcttaatcat

SEQ ID NO: 193389 - DNA, 25 bp, Artificial
  Probe
ttcccagtgaaaacggtaaattctg

SEQ ID NO: 193390 - DNA, 25 bp, Artificial
  Probe
ttgtaacttagagtccgatttattc

SEQ ID NO: 193391 - DNA, 25 bp, Artificial
  Probe
ttaaagcaggcgatcacatgctttg

SEQ ID NO: 193392 - DNA, 25 bp, Artificial
  Probe
cttgcttcaagcagtcccgttgaag

SEQ ID NO: 193393 - DNA, 25 bp, Artificial
  Probe
taaattctgctgtttgcatagaatc

SEQ ID NO: 193394 - DNA, 25 bp, Artificial
  Probe
agacggttcacgtgtgtaagctgtg

SEQ ID NO: 193395 - DNA, 25 bp, Artificial
  Probe
catagatcttagctcactctcacgg

SEQ ID NO: 193396 - DNA, 25 bp, Artificial
  Probe
gcagtctttcccagtgaaaacggta

SEQ ID NO: 193397 - DNA, 25 bp, Artificial
  Probe
ctacccctggactgttgggctcttt

SEQ ID NO: 193398 - DNA, 25 bp, Artificial
  Probe
actctcacggaaaggctggaacatt

SEQ ID NO: 193399 - DNA, 25 bp, Artificial
  Probe
aacatttcctaagagacaacagtgt

SEQ ID NO: 193400 - DNA, 25 bp, Artificial
  Probe
tgtaacttagagtccgatttattca

SEQ ID NO: 193401 - DNA, 25 bp, Artificial
  Probe
tgtgtaagctgtgtccttcctaccc

SEQ ID NO: 193402 - DNA, 25 bp, Artificial
  Probe
tagctcactctcacggaaaggctgg

SEQ ID NO: 193403 - DNA, 25 bp, Artificial
  Probe
cataattttgccttctgaattgtga

SEQ ID NO: 193404 - DNA, 25 bp, Artificial
  Probe
acttagagtccgatttattcagaat

SEQ ID NO: 193405 - DNA, 25 bp, Artificial
  Probe
ggcccctgctcataattttgccttc

SEQ ID NO: 193406 - DNA, 25 bp, Artificial
  Probe
catcagaaaccgaagtcaagacggt

SEQ ID NO: 193407 - DNA, 25 bp, Artificial
  Probe
gactgttgggctcttttccttgttg

SEQ ID NO: 193408 - DNA, 25 bp, Artificial
  Probe
tacccctggactgttgggctctttt

SEQ ID NO: 193409 - DNA, 25 bp, Artificial
  Probe
agatgctgcaagatacactgcaagt

SEQ ID NO: 193410 - DNA, 25 bp, Artificial
  Probe
gaaaccgaagtcaagacggttcacg

SEQ ID NO: 193411 - DNA, 25 bp, Artificial
  Probe
tgacagctgaattgggatggtctgc

SEQ ID NO: 193412 - DNA, 25 bp, Artificial
  Probe
acccagaggaggtgacggagctctt

SEQ ID NO: 193413 - DNA, 25 bp, Artificial
  Probe
tggggcccaagtttcaggggatcca

SEQ ID NO: 193414 - DNA, 25 bp, Artificial
  Probe
gaacaaatcatgttaccagcaaaag

SEQ ID NO: 193415 - DNA, 25 bp, Artificial
  Probe
gccgctggcccgaatgcgcacagag

SEQ ID NO: 193416 - DNA, 25 bp, Artificial
  Probe
gtctggcttccgaccgttcccagag

SEQ ID NO: 193417 - DNA, 25 bp, Artificial
  Probe
gctctggagcgagcagatgcccaga

SEQ ID NO: 193418 - DNA, 25 bp, Artificial
  Probe
cacctgcttctccttctgtgtgcaa

SEQ ID NO: 193419 - DNA, 25 bp, Artificial
  Probe
cagggctcaaggatgccctcctggc

SEQ ID NO: 193420 - DNA, 25 bp, Artificial
  Probe
gtctgaactgtaactcataaagatc

SEQ ID NO: 193421 - DNA, 25 bp, Artificial
  Probe
attgttggaggcagccagggctcaa

SEQ ID NO: 193422 - DNA, 25 bp, Artificial
  Probe
tcttgactgcgatgcgagccccgca

SEQ ID NO: 193423 - DNA, 25 bp, Artificial
  Probe
gctggaagcgcatgagttgaacgct

SEQ ID NO: 193424 - DNA, 25 bp, Artificial
  Probe
ccacgtgagcctcatcgagtgcggg

SEQ ID NO: 193425 - DNA, 25 bp, Artificial
  Probe
agctgaattgggatggtctgcatca

SEQ ID NO: 193426 - DNA, 25 bp, Artificial
  Probe
aatagtgcaaacatcttcatgggtc

SEQ ID NO: 193427 - DNA, 25 bp, Artificial
  Probe
ttaccagcaaaagatctaagctaga

SEQ ID NO: 193428 - DNA, 25 bp, Artificial
  Probe
cgctcgaaggtctgtgcgagagtct

SEQ ID NO: 193429 - DNA, 25 bp, Artificial
  Probe
atctgtggctgctgcccgggcatgc

SEQ ID NO: 193430 - DNA, 25 bp, Artificial
  Probe
tgaaaaggcgccactccgggcgtgt

SEQ ID NO: 193431 - DNA, 25 bp, Artificial
  Probe
cgcgaggccttctctgatctgcagg

SEQ ID NO: 193432 - DNA, 25 bp, Artificial
  Probe
aaccgggtcagaacaaatcatgtta

SEQ ID NO: 193433 - DNA, 25 bp, Artificial
  Probe
ctgtaatgctggacgcggcttgttc

SEQ ID NO: 193434 - DNA, 25 bp, Artificial
  Probe
tcgaagccatgcaccgcgaggcctt

SEQ ID NO: 193435 - DNA, 25 bp, Artificial
  Probe
agccttccatgaaaagctggagggc

SEQ ID NO: 193436 - DNA, 25 bp, Artificial
  Probe
atgtgaatgttcttgggaccatccg

SEQ ID NO: 193437 - DNA, 25 bp, Artificial
  Probe
aagccctgagcgaggcgcaggaccc

SEQ ID NO: 193438 - DNA, 25 bp, Artificial
  Probe
aattggatgtcagagactcggaatc

SEQ ID NO: 193439 - DNA, 25 bp, Artificial
  Probe
agagccctcatttgtctccccgagt

SEQ ID NO: 193440 - DNA, 25 bp, Artificial
  Probe
ttctcagaatcatttgaaatagtgc

SEQ ID NO: 193441 - DNA, 25 bp, Artificial
  Probe
cggggcagtgcacacagccttccat

SEQ ID NO: 193442 - DNA, 25 bp, Artificial
  Probe
gtgcaaccgcacacttctcagaatc

SEQ ID NO: 193443 - DNA, 25 bp, Artificial
  Probe
agttgaacgctgtgggtgctgtact

SEQ ID NO: 193444 - DNA, 25 bp, Artificial
  Probe
actatgtagccctgtctgaactgta

SEQ ID NO: 193445 - DNA, 25 bp, Artificial
  Probe
ctctgatctgcaggtccaggagggt

SEQ ID NO: 193446 - DNA, 25 bp, Artificial
  Probe
agtttcaggggatccagacacgccc

SEQ ID NO: 193447 - DNA, 25 bp, Artificial
  Probe
ggagcgagcagatgcccagacccgc

SEQ ID NO: 193448 - DNA, 25 bp, Artificial
  Probe
gtttgatggggctgccattccacga

SEQ ID NO: 193449 - DNA, 25 bp, Artificial
  Probe
tggctccctggagatactggaattg

SEQ ID NO: 193450 - DNA, 25 bp, Artificial
  Probe
ccactccgggcgtgtgctggtgact

SEQ ID NO: 193451 - DNA, 25 bp, Artificial
  Probe
cttctcagaatcatttgaaatagtg

SEQ ID NO: 193452 - DNA, 25 bp, Artificial
  Probe
tccctggagatactggaattggatg

SEQ ID NO: 193453 - DNA, 25 bp, Artificial
  Probe
acctctttgcccactatcagcgtgg

SEQ ID NO: 193454 - DNA, 25 bp, Artificial
  Probe
gatgtactggtctgtaatgctggac

SEQ ID NO: 193455 - DNA, 25 bp, Artificial
  Probe
cgctggaagcgcatgagttgaacgc

SEQ ID NO: 193456 - DNA, 25 bp, Artificial
  Probe
gtctgtgcgagagtctggcgatcct

SEQ ID NO: 193457 - DNA, 25 bp, Artificial
  Probe
acagggtcagcctctggacacttgg

SEQ ID NO: 193458 - DNA, 25 bp, Artificial
  Probe
acaggagcagggacgtcctgccaca

SEQ ID NO: 193459 - DNA, 25 bp, Artificial
  Probe
gcctgtgagctaccactttcctaaa

SEQ ID NO: 193460 - DNA, 25 bp, Artificial
  Probe
cagtgtttctgtgctctgccgcctg

SEQ ID NO: 193461 - DNA, 25 bp, Artificial
  Probe
acaggcacgcacagggtcagcctct

SEQ ID NO: 193462 - DNA, 25 bp, Artificial
  Probe
agcagggacgtcctgccacacaggc

SEQ ID NO: 193463 - DNA, 25 bp, Artificial
  Probe
cagcctctggacacttggcttgggc

SEQ ID NO: 193464 - DNA, 25 bp, Artificial
  Probe
agcaaacaggagcagggacgtcctg

SEQ ID NO: 193465 - DNA, 25 bp, Artificial
  Probe
gactctggcatctggctgggcacac

SEQ ID NO: 193466 - DNA, 25 bp, Artificial
  Probe
ttacaaagggaatctctggtccaga

SEQ ID NO: 193467 - DNA, 25 bp, Artificial
  Probe
tgcacacttgagaagcaaacaggag

SEQ ID NO: 193468 - DNA, 25 bp, Artificial
  Probe
acgcacagggtcagcctctggacac

SEQ ID NO: 193469 - DNA, 25 bp, Artificial
  Probe
ctgcacacttgagaagcaaacagga

SEQ ID NO: 193470 - DNA, 25 bp, Artificial
  Probe
acacttgagaagcaaacaggagcag

SEQ ID NO: 193471 - DNA, 25 bp, Artificial
  Probe
cgcctgtgagctaccactttcctaa

SEQ ID NO: 193472 - DNA, 25 bp, Artificial
  Probe
aaggctccacgcatttgacttttaa

SEQ ID NO: 193473 - DNA, 25 bp, Artificial
  Probe
cagatttacgccttacaaagggaat

SEQ ID NO: 193474 - DNA, 25 bp, Artificial
  Probe
cctctggacacttggcttgggctgc

SEQ ID NO: 193475 - DNA, 25 bp, Artificial
  Probe
cacacttgagaagcaaacaggagca

SEQ ID NO: 193476 - DNA, 25 bp, Artificial
  Probe
caagaaggctccacgcatttgactt

SEQ ID NO: 193477 - DNA, 25 bp, Artificial
  Probe
tacgccttacaaagggaatctctgg

SEQ ID NO: 193478 - DNA, 25 bp, Artificial
  Probe
tgtgagctaccactttcctaaatag

SEQ ID NO: 193479 - DNA, 25 bp, Artificial
  Probe
cgcatttgacttttaagacttggtg

SEQ ID NO: 193480 - DNA, 25 bp, Artificial
  Probe
gctccacgcatttgacttttaagac

SEQ ID NO: 193481 - DNA, 25 bp, Artificial
  Probe
cacgcacagggtcagcctctggaca

SEQ ID NO: 193482 - DNA, 25 bp, Artificial
  Probe
accagtgtttctgtgctctgccgcc

SEQ ID NO: 193483 - DNA, 25 bp, Artificial
  Probe
ctgatggtggttaggctgcacactt

SEQ ID NO: 193484 - DNA, 25 bp, Artificial
  Probe
ccttacaaagggaatctctggtcca

SEQ ID NO: 193485 - DNA, 25 bp, Artificial
  Probe
acccaccagtgtttctgtgctctgc

SEQ ID NO: 193486 - DNA, 25 bp, Artificial
  Probe
gggtcagcctctggacacttggctt

SEQ ID NO: 193487 - DNA, 25 bp, Artificial
  Probe
gtttctgtgctctgccgcctgtgag

SEQ ID NO: 193488 - DNA, 25 bp, Artificial
  Probe
gctgatggtggttaggctgcacact

SEQ ID NO: 193489 - DNA, 25 bp, Artificial
  Probe
gcacgcacagggtcagcctctggac

SEQ ID NO: 193490 - DNA, 25 bp, Artificial
  Probe
acacaggcacgcacagggtcagcct

SEQ ID NO: 193491 - DNA, 25 bp, Artificial
  Probe
tttacgccttacaaagggaatctct

SEQ ID NO: 193492 - DNA, 25 bp, Artificial
  Probe
tctgccgcctgtgagctaccacttt

SEQ ID NO: 193493 - DNA, 25 bp, Artificial
  Probe
agaagcaaacaggagcagggacgtc

SEQ ID NO: 193494 - DNA, 25 bp, Artificial
  Probe
agacttggtgtttggttcttcattc

SEQ ID NO: 193495 - DNA, 25 bp, Artificial
  Probe
tgccacacaggcacgcacagggtca

SEQ ID NO: 193496 - DNA, 25 bp, Artificial
  Probe
ccaccagtgtttctgtgctctgccg

SEQ ID NO: 193497 - DNA, 25 bp, Artificial
  Probe
tgtttctgtgctctgccgcctgtga

SEQ ID NO: 193498 - DNA, 25 bp, Artificial
  Probe
tggtggttaggctgcacacttgaga

SEQ ID NO: 193499 - DNA, 25 bp, Artificial
  Probe
ggttaggctgcacacttgagaagca

SEQ ID NO: 193500 - DNA, 25 bp, Artificial
  Probe
cacgcatttgacttttaagacttgg

SEQ ID NO: 193501 - DNA, 25 bp, Artificial
  Probe
gtgtttctgtgctctgccgcctgtg

SEQ ID NO: 193502 - DNA, 25 bp, Artificial
  Probe
ccacgcatttgacttttaagacttg

SEQ ID NO: 193503 - DNA, 25 bp, Artificial
  Probe
agacttggctagacaagcaggggta

SEQ ID NO: 193504 - DNA, 25 bp, Artificial
  Probe
ctaggcaagttgaccgttagctatt

SEQ ID NO: 193505 - DNA, 25 bp, Artificial
  Probe
atctagactccattggatctctctg

SEQ ID NO: 193506 - DNA, 25 bp, Artificial
  Probe
gctatttttccctctgaagatttga

SEQ ID NO: 193507 - DNA, 25 bp, Artificial
  Probe
gactatgcgccctcttattactgca

SEQ ID NO: 193508 - DNA, 25 bp, Artificial
  Probe
tgcagacttggctagacaagcaggg

SEQ ID NO: 193509 - DNA, 25 bp, Artificial
  Probe
ttatttaacagactgccaccaggag

SEQ ID NO: 193510 - DNA, 25 bp, Artificial
  Probe
atttgattcgagttgcagacttggc

SEQ ID NO: 193511 - DNA, 25 bp, Artificial
  Probe
taacagactgccaccaggagtccag

SEQ ID NO: 193512 - DNA, 25 bp, Artificial
  Probe
gatgctcttctgtaaaagttactaa

SEQ ID NO: 193513 - DNA, 25 bp, Artificial
  Probe
ctctgaagatttgattcgagttgca

SEQ ID NO: 193514 - DNA, 25 bp, Artificial
  Probe
ccatttgtaggtttctaggcaagtt

SEQ ID NO: 193515 - DNA, 25 bp, Artificial
  Probe
tttttccctctgaagatttgattcg

SEQ ID NO: 193516 - DNA, 25 bp, Artificial
  Probe
gttagctatttttccctctgaagat

SEQ ID NO: 193517 - DNA, 25 bp, Artificial
  Probe
atccagctgtcatgcctggttcagt

SEQ ID NO: 193518 - DNA, 25 bp, Artificial
  Probe
ggatctctctgaatatgggaatatc

SEQ ID NO: 193519 - DNA, 25 bp, Artificial
  Probe
agctgtcatgcctggttcagtgtct

SEQ ID NO: 193520 - DNA, 25 bp, Artificial
  Probe
cccaatagtttatccagctgtcatg

SEQ ID NO: 193521 - DNA, 25 bp, Artificial
  Probe
tcttgttcctctgtagttgtaccta

SEQ ID NO: 193522 - DNA, 25 bp, Artificial
  Probe
gcaagttgaccgttagctatttttc

SEQ ID NO: 193523 - DNA, 25 bp, Artificial
  Probe
tctctctgaatatgggaatatctaa

SEQ ID NO: 193524 - DNA, 25 bp, Artificial
  Probe
gtctactgactatgcgccctcttat

SEQ ID NO: 193525 - DNA, 25 bp, Artificial
  Probe
ttctatcaacattggctagctttgt

SEQ ID NO: 193526 - DNA, 25 bp, Artificial
  Probe
tgaccgttagctatttttccctctg

SEQ ID NO: 193527 - DNA, 25 bp, Artificial
  Probe
tagctttgtttcagggcactaaaag

SEQ ID NO: 193528 - DNA, 25 bp, Artificial
  Probe
cttctatcaacattggctagctttg

SEQ ID NO: 193529 - DNA, 25 bp, Artificial
  Probe
gtccagtgtttcttgttcctctgta

SEQ ID NO: 193530 - DNA, 25 bp, Artificial
  Probe
cattggatctctctgaatatgggaa

SEQ ID NO: 193531 - DNA, 25 bp, Artificial
  Probe
ctaacttaagaagctttgagatttc

SEQ ID NO: 193532 - DNA, 25 bp, Artificial
  Probe
taagctgactccaagtacatttagt

SEQ ID NO: 193533 - DNA, 25 bp, Artificial
  Probe
gtacctaagctgactccaagtacat

SEQ ID NO: 193534 - DNA, 25 bp, Artificial
  Probe
atctgtaagactattacagtattgc

SEQ ID NO: 193535 - DNA, 25 bp, Artificial
  Probe
gcacgagccttatcccatttgtagg

SEQ ID NO: 193536 - DNA, 25 bp, Artificial
  Probe
gagttgcagacttggctagacaagc

SEQ ID NO: 193537 - DNA, 25 bp, Artificial
  Probe
ttgtaggtttctaggcaagttgacc

SEQ ID NO: 193538 - DNA, 25 bp, Artificial
  Probe
gagccttatcccatttgtaggtttc

SEQ ID NO: 193539 - DNA, 25 bp, Artificial
  Probe
attactgcatgcagtaattcaactg

SEQ ID NO: 193540 - DNA, 25 bp, Artificial
  Probe
attaaaaagctgatgctcttctgta

SEQ ID NO: 193541 - DNA, 25 bp, Artificial
  Probe
catgcagtaattcaactggaaatag

SEQ ID NO: 193542 - DNA, 25 bp, Artificial
  Probe
gactccaagtacatttagtatgaaa

SEQ ID NO: 193543 - DNA, 25 bp, Artificial
  Probe
ccgttagctatttttccctctgaag

SEQ ID NO: 193544 - DNA, 25 bp, Artificial
  Probe
aaagctgatgctcttctgtaaaagt

SEQ ID NO: 193545 - DNA, 25 bp, Artificial
  Probe
tatttaacagactgccaccaggagt

SEQ ID NO: 193546 - DNA, 25 bp, Artificial
  Probe
ggtttctaggcaagttgaccgttag

SEQ ID NO: 193547 - DNA, 25 bp, Artificial
  Probe
atcaacattggctagctttgtttca

SEQ ID NO: 193548 - DNA, 25 bp, Artificial
  Probe
gccctcttattactgcatgcagtaa

SEQ ID NO: 193549 - DNA, 25 bp, Artificial
  Probe
gtggaccttctagagaactcccttg

SEQ ID NO: 193550 - DNA, 25 bp, Artificial
  Probe
ctagagacctcgtttgtcttcccct

SEQ ID NO: 193551 - DNA, 25 bp, Artificial
  Probe
cgcttacccccagaggtcgaatgtg

SEQ ID NO: 193552 - DNA, 25 bp, Artificial
  Probe
tcgaatgtgcgcagataactctcct

SEQ ID NO: 193553 - DNA, 25 bp, Artificial
  Probe
tgtttcccatatggtgcctgcaccc

SEQ ID NO: 193554 - DNA, 25 bp, Artificial
  Probe
gagagcagctcctccgagagtattt

SEQ ID NO: 193555 - DNA, 25 bp, Artificial
  Probe
gttttcatctgtttcccatatggtg

SEQ ID NO: 193556 - DNA, 25 bp, Artificial
  Probe
actcccttggggtgttctgaaatat

SEQ ID NO: 193557 - DNA, 25 bp, Artificial
  Probe
ttgctcccagagaattccccgctta

SEQ ID NO: 193558 - DNA, 25 bp, Artificial
  Probe
ctttgagtttgctcccagagaattc

SEQ ID NO: 193559 - DNA, 25 bp, Artificial
  Probe
tagggctctgggaccaccctgacac

SEQ ID NO: 193560 - DNA, 25 bp, Artificial
  Probe
cgagacttctctcttccctagagac

SEQ ID NO: 193561 - DNA, 25 bp, Artificial
  Probe
ccgagacttctctcttccctagaga

SEQ ID NO: 193562 - DNA, 25 bp, Artificial
  Probe
gaccaactccttcgtgctctaggtc

SEQ ID NO: 193563 - DNA, 25 bp, Artificial
  Probe
cttgttcctcctagggctctgggac

SEQ ID NO: 193564 - DNA, 25 bp, Artificial
  Probe
cttctagagaactcccttggggtgt

SEQ ID NO: 193565 - DNA, 25 bp, Artificial
  Probe
actctgaggacatcccagtggacct

SEQ ID NO: 193566 - DNA, 25 bp, Artificial
  Probe
gcagctcctccgagagtatttgaca

SEQ ID NO: 193567 - DNA, 25 bp, Artificial
  Probe
tatggtgcctgcaccccaaggagag

SEQ ID NO: 193568 - DNA, 25 bp, Artificial
  Probe
tgcctgcaccccaaggagagcagct

SEQ ID NO: 193569 - DNA, 25 bp, Artificial
  Probe
agcatcccctttgaaacagtctttg

SEQ ID NO: 193570 - DNA, 25 bp, Artificial
  Probe
gctctaggtccacctcgaactactt

SEQ ID NO: 193571 - DNA, 25 bp, Artificial
  Probe
ttttcatctgtttcccatatggtgc

SEQ ID NO: 193572 - DNA, 25 bp, Artificial
  Probe
cctccgagagtatttgacaaccttt

SEQ ID NO: 193573 - DNA, 25 bp, Artificial
  Probe
tgccgggcccctggttctgttttca

SEQ ID NO: 193574 - DNA, 25 bp, Artificial
  Probe
agagtatttgacaacctttatgctg

SEQ ID NO: 193575 - DNA, 25 bp, Artificial
  Probe
gagtttgctcccagagaattccccg

SEQ ID NO: 193576 - DNA, 25 bp, Artificial
  Probe
gcccctggttctgttttcatctgtt

SEQ ID NO: 193577 - DNA, 25 bp, Artificial
  Probe
agggctctgggaccaccctgacaca

SEQ ID NO: 193578 - DNA, 25 bp, Artificial
  Probe
cttcgtgctctaggtccacctcgaa

SEQ ID NO: 193579 - DNA, 25 bp, Artificial
  Probe
ccttggggtgttctgaaatatcacc

SEQ ID NO: 193580 - DNA, 25 bp, Artificial
  Probe
catatggtgcctgcaccccaaggag

SEQ ID NO: 193581 - DNA, 25 bp, Artificial
  Probe
cccaaggagagcagctcctccgaga

SEQ ID NO: 193582 - DNA, 25 bp, Artificial
  Probe
gataactctccttttactctgagga

SEQ ID NO: 193583 - DNA, 25 bp, Artificial
  Probe
ggtccacctcgaactactttatgcc

SEQ ID NO: 193584 - DNA, 25 bp, Artificial
  Probe
tccttttactctgaggacatcccag

SEQ ID NO: 193585 - DNA, 25 bp, Artificial
  Probe
agataactctccttttactctgagg

SEQ ID NO: 193586 - DNA, 25 bp, Artificial
  Probe
atgttcctgatcacctcctgccggg

SEQ ID NO: 193587 - DNA, 25 bp, Artificial
  Probe
ctctcttccctagagacctcgtttg

SEQ ID NO: 193588 - DNA, 25 bp, Artificial
  Probe
gagacctcgtttgtcttccccttgt

SEQ ID NO: 193589 - DNA, 25 bp, Artificial
  Probe
gtgcgcagataactctccttttact

SEQ ID NO: 193590 - DNA, 25 bp, Artificial
  Probe
tgaggacatcccagtggaccttcta

SEQ ID NO: 193591 - DNA, 25 bp, Artificial
  Probe
catctgtttcccatatggtgcctgc

SEQ ID NO: 193592 - DNA, 25 bp, Artificial
  Probe
agaggtcgaatgtgcgcagataact

SEQ ID NO: 193593 - DNA, 25 bp, Artificial
  Probe
cccttgttcctcctagggctctggg

SEQ ID NO: 193594 - DNA, 25 bp, Artificial
  Probe
taggtccacctcgaactactttatg

SEQ ID NO: 193595 - DNA, 25 bp, Artificial
  Probe
tcaacatacatcattccaggagatg

SEQ ID NO: 193596 - DNA, 25 bp, Artificial
  Probe
ccttgtgtctgaaattggagtagtc

SEQ ID NO: 193597 - DNA, 25 bp, Artificial
  Probe
cctgaagccctgagggagagatttg

SEQ ID NO: 193598 - DNA, 25 bp, Artificial
  Probe
gagtagtctccaatttatccttcag

SEQ ID NO: 193599 - DNA, 25 bp, Artificial
  Probe
ccagcatcattttgggaaaagaatt

SEQ ID NO: 193600 - DNA, 25 bp, Artificial
  Probe
aattggagtagtctccaatttatcc

SEQ ID NO: 193601 - DNA, 25 bp, Artificial
  Probe
gggcaagttccgtatggttcctggt

SEQ ID NO: 193602 - DNA, 25 bp, Artificial
  Probe
ctatgacgtttttggtgatttccat

SEQ ID NO: 193603 - DNA, 25 bp, Artificial
  Probe
gctgtcgctagctctctctcttttt

SEQ ID NO: 193604 - DNA, 25 bp, Artificial
  Probe
ccgaaatgccaaagatgtcgtcgtt

SEQ ID NO: 193605 - DNA, 25 bp, Artificial
  Probe
gataatctatctttgccgaaatgcc

SEQ ID NO: 193606 - DNA, 25 bp, Artificial
  Probe
tgccagagaccatgatagatctaaa

SEQ ID NO: 193607 - DNA, 25 bp, Artificial
  Probe
aatcgcctagaatagtgaaaactca

SEQ ID NO: 193608 - DNA, 25 bp, Artificial
  Probe
aagataatctatctttgccgaaatg

SEQ ID NO: 193609 - DNA, 25 bp, Artificial
  Probe
gctgatagagttcctggagagagac

SEQ ID NO: 193610 - DNA, 25 bp, Artificial
  Probe
caaagatgtcgtcgtttcttattac

SEQ ID NO: 193611 - DNA, 25 bp, Artificial
  Probe
gccagatgaccttctcattgttact

SEQ ID NO: 193612 - DNA, 25 bp, Artificial
  Probe
tccgtatggttcctggtatgatcat

SEQ ID NO: 193613 - DNA, 25 bp, Artificial
  Probe
gaatagtgaaaactcacctgccagc

SEQ ID NO: 193614 - DNA, 25 bp, Artificial
  Probe
gaagtgaactgaaccgggtgatttc

SEQ ID NO: 193615 - DNA, 25 bp, Artificial
  Probe
ccacttccctgaagccctgagggag

SEQ ID NO: 193616 - DNA, 25 bp, Artificial
  Probe
cctaaatctttttctgaatttgtgg

SEQ ID NO: 193617 - DNA, 25 bp, Artificial
  Probe
aaatttagagcagagctctgagaca

SEQ ID NO: 193618 - DNA, 25 bp, Artificial
  Probe
actaccagcagcaaatgaaggactg

SEQ ID NO: 193619 - DNA, 25 bp, Artificial
  Probe
aagtatcgcctttcatgagaaaggg

SEQ ID NO: 193620 - DNA, 25 bp, Artificial
  Probe
gcaaatgaaggactgccctgtgaaa

SEQ ID NO: 193621 - DNA, 25 bp, Artificial
  Probe
agacgttgaaacattcttggcaagg

SEQ ID NO: 193622 - DNA, 25 bp, Artificial
  Probe
tctttgccgaaatgccaaagatgtc

SEQ ID NO: 193623 - DNA, 25 bp, Artificial
  Probe
tcattccaggagatgaagaacaatc

SEQ ID NO: 193624 - DNA, 25 bp, Artificial
  Probe
ctggcagcacatggattagtgaaat

SEQ ID NO: 193625 - DNA, 25 bp, Artificial
  Probe
ttgttacttatcctaaatctggcag

SEQ ID NO: 193626 - DNA, 25 bp, Artificial
  Probe
tcagcagagctagtagacagaatca

SEQ ID NO: 193627 - DNA, 25 bp, Artificial
  Probe
aggatgcactttttaacagaatacc

SEQ ID NO: 193628 - DNA, 25 bp, Artificial
  Probe
tgaaaactcacctgccagctaagct

SEQ ID NO: 193629 - DNA, 25 bp, Artificial
  Probe
gatgtcgtcgtttcttattactact

SEQ ID NO: 193630 - DNA, 25 bp, Artificial
  Probe
taagctccttccagcatcattttgg

SEQ ID NO: 193631 - DNA, 25 bp, Artificial
  Probe
agatctaaaagtatcgcctttcatg

SEQ ID NO: 193632 - DNA, 25 bp, Artificial
  Probe
ttcaccaaatattgggaagacgttg

SEQ ID NO: 193633 - DNA, 25 bp, Artificial
  Probe
tgcaccaattattcaatgctgccag

SEQ ID NO: 193634 - DNA, 25 bp, Artificial
  Probe
ttcctggtatgatcatgtaaaatct

SEQ ID NO: 193635 - DNA, 25 bp, Artificial
  Probe
gacctggagtgcagaaatgaagatc

SEQ ID NO: 193636 - DNA, 25 bp, Artificial
  Probe
acacaagcattgtcctctaatagtg

SEQ ID NO: 193637 - DNA, 25 bp, Artificial
  Probe
tgccctgtgaaatttagagcagagc

SEQ ID NO: 193638 - DNA, 25 bp, Artificial
  Probe
atggataaacggttcaccaaatatt

SEQ ID NO: 193639 - DNA, 25 bp, Artificial
  Probe
aggaatcgcctagaatagtgaaaac

SEQ ID NO: 193640 - DNA, 25 bp, Artificial
  Probe
gatttgaggagcactaccagcagca

SEQ ID NO: 193641 - DNA, 25 bp, Artificial
  Probe
tatgttattggttccagaaaaatcc

SEQ ID NO: 193642 - DNA, 25 bp, Artificial
  Probe
gtgttaactgagagcaccactccag

SEQ ID NO: 193643 - DNA, 25 bp, Artificial
  Probe
gaatatagcatccaggtaactaact

SEQ ID NO: 193644 - DNA, 25 bp, Artificial
  Probe
tgtcagacctaatggcatttgaaac

SEQ ID NO: 193645 - DNA, 25 bp, Artificial
  Probe
actccagcgagatggcagcaatctt

SEQ ID NO: 193646 - DNA, 25 bp, Artificial
  Probe
ctttgtagtgttaactgagagcacc

SEQ ID NO: 193647 - DNA, 25 bp, Artificial
  Probe
gacacagctttcatactgtactgtt

SEQ ID NO: 193648 - DNA, 25 bp, Artificial
  Probe
accactccagcgagatggcagcaat

SEQ ID NO: 193649 - DNA, 25 bp, Artificial
  Probe
acacgttgccgtagggagattccgg

SEQ ID NO: 193650 - DNA, 25 bp, Artificial
  Probe
tttaggggagcctcggtattcagag

SEQ ID NO: 193651 - DNA, 25 bp, Artificial
  Probe
cctcggtattcagagatgatacaga

SEQ ID NO: 193652 - DNA, 25 bp, Artificial
  Probe
attaactcggtgatttttgtcagac

SEQ ID NO: 193653 - DNA, 25 bp, Artificial
  Probe
atacagaatatagcatccaggtaac

SEQ ID NO: 193654 - DNA, 25 bp, Artificial
  Probe
actcggtgatttttgtcagacctaa

SEQ ID NO: 193655 - DNA, 25 bp, Artificial
  Probe
agacctaatggcatttgaaacagtt

SEQ ID NO: 193656 - DNA, 25 bp, Artificial
  Probe
gtcattggtgtggttgggccacttc

SEQ ID NO: 193657 - DNA, 25 bp, Artificial
  Probe
ggagattccggcttggaactagttt

SEQ ID NO: 193658 - DNA, 25 bp, Artificial
  Probe
cagcttggcagagaatgaagctttg

SEQ ID NO: 193659 - DNA, 25 bp, Artificial
  Probe
gctacagaggcaatgggtcattggt

SEQ ID NO: 193660 - DNA, 25 bp, Artificial
  Probe
aagttttaagcctggtcagatgcta

SEQ ID NO: 193661 - DNA, 25 bp, Artificial
  Probe
tgctacagaggcaatgggtcattgg

SEQ ID NO: 193662 - DNA, 25 bp, Artificial
  Probe
agaatgaagctttgacacagctttc

SEQ ID NO: 193663 - DNA, 25 bp, Artificial
  Probe
gtgatttttgtcagacctaatggca

SEQ ID NO: 193664 - DNA, 25 bp, Artificial
  Probe
cacttctgtgcgtaaagatgtgaga

SEQ ID NO: 193665 - DNA, 25 bp, Artificial
  Probe
tgtgagtgccctttgtagtgttaac

SEQ ID NO: 193666 - DNA, 25 bp, Artificial
  Probe
gttctgataggatttcagggaagcc

SEQ ID NO: 193667 - DNA, 25 bp, Artificial
  Probe
gcaatcttggaccttatcttgataa

SEQ ID NO: 193668 - DNA, 25 bp, Artificial
  Probe
tccggcttggaactagtttgggaag

SEQ ID NO: 193669 - DNA, 25 bp, Artificial
  Probe
aagttttctgcgaagctctagatgg

SEQ ID NO: 193670 - DNA, 25 bp, Artificial
  Probe
cgagatggcagcaatcttggacctt

SEQ ID NO: 193671 - DNA, 25 bp, Artificial
  Probe
gcatccaggtaactaacttcagaag

SEQ ID NO: 193672 - DNA, 25 bp, Artificial
  Probe
gggagcctcggtattcagagatgat

SEQ ID NO: 193673 - DNA, 25 bp, Artificial
  Probe
tgtggttgggccacttctgtgcgta

SEQ ID NO: 193674 - DNA, 25 bp, Artificial
  Probe
cattggtgtggttgggccacttctg

SEQ ID NO: 193675 - DNA, 25 bp, Artificial
  Probe
ctagatggtgtgagtgccctttgta

SEQ ID NO: 193676 - DNA, 25 bp, Artificial
  Probe
aggataagttttctgcgaagctcta

SEQ ID NO: 193677 - DNA, 25 bp, Artificial
  Probe
ttagaaatcgtttaggggagcctcg

SEQ ID NO: 193678 - DNA, 25 bp, Artificial
  Probe
tgaagctttgacacagctttcatac

SEQ ID NO: 193679 - DNA, 25 bp, Artificial
  Probe
caagctgcagcttggcagagaatga

SEQ ID NO: 193680 - DNA, 25 bp, Artificial
  Probe
gggccacttctgtgcgtaaagatgt

SEQ ID NO: 193681 - DNA, 25 bp, Artificial
  Probe
cctaatggcatttgaaacagttata

SEQ ID NO: 193682 - DNA, 25 bp, Artificial
  Probe
gagcaccactccagcgagatggcag

SEQ ID NO: 193683 - DNA, 25 bp, Artificial
  Probe
ctgcagcttggcagagaatgaagct

SEQ ID NO: 193684 - DNA, 25 bp, Artificial
  Probe
cacacgttgccgtagggagattccg

SEQ ID NO: 193685 - DNA, 25 bp, Artificial
  Probe
ttctgataggatttcagggaagcca

SEQ ID NO: 193686 - DNA, 25 bp, Artificial
  Probe
agaagcacacgttgccgtagggaga

SEQ ID NO: 193687 - DNA, 25 bp, Artificial
  Probe
tctcatacacagaatgatgggtttc

SEQ ID NO: 193688 - DNA, 25 bp, Artificial
  Probe
tctttccatggcttcttgaatgccc

SEQ ID NO: 193689 - DNA, 25 bp, Artificial
  Probe
ccctccatgtagcttaagctgtgaa

SEQ ID NO: 193690 - DNA, 25 bp, Artificial
  Probe
gatgactctcaaattgaatgtatcc

SEQ ID NO: 193691 - DNA, 25 bp, Artificial
  Probe
tggcttcttgaatgcccatttctca

SEQ ID NO: 193692 - DNA, 25 bp, Artificial
  Probe
cgagtcccttagcaacccaggctga

SEQ ID NO: 193693 - DNA, 25 bp, Artificial
  Probe
ttcctatttctgtgcagcctaagtg

SEQ ID NO: 193694 - DNA, 25 bp, Artificial
  Probe
aagtgacatgtgacacacagactag

SEQ ID NO: 193695 - DNA, 25 bp, Artificial
  Probe
caaatgatacccatggagcaaggtt

SEQ ID NO: 193696 - DNA, 25 bp, Artificial
  Probe
gtttcacggtgatgtcttcctttca

SEQ ID NO: 193697 - DNA, 25 bp, Artificial
  Probe
gttggcaaatgatacccatggagca

SEQ ID NO: 193698 - DNA, 25 bp, Artificial
  Probe
ttcacggtgatgtcttcctttcatg

SEQ ID NO: 193699 - DNA, 25 bp, Artificial
  Probe
gttactcttcctatttctgtgcagc

SEQ ID NO: 193700 - DNA, 25 bp, Artificial
  Probe
ttctgtgcagcctaagtgttaagaa

SEQ ID NO: 193701 - DNA, 25 bp, Artificial
  Probe
agtgacatgtgacacacagactagc

SEQ ID NO: 193702 - DNA, 25 bp, Artificial
  Probe
acccatggagcaaggttactcttcc

SEQ ID NO: 193703 - DNA, 25 bp, Artificial
  Probe
cgagctttatccacgggactcctta

SEQ ID NO: 193704 - DNA, 25 bp, Artificial
  Probe
gtgaactcactgtacttcctgtttt

SEQ ID NO: 193705 - DNA, 25 bp, Artificial
  Probe
ctgtgcagcctaagtgttaagaata

SEQ ID NO: 193706 - DNA, 25 bp, Artificial
  Probe
gatacccatggagcaaggttactct

SEQ ID NO: 193707 - DNA, 25 bp, Artificial
  Probe
tgggtttcacggtgatgtcttcctt

SEQ ID NO: 193708 - DNA, 25 bp, Artificial
  Probe
tcatttcagccgagtcccttagcaa

SEQ ID NO: 193709 - DNA, 25 bp, Artificial
  Probe
aaatgatacccatggagcaaggtta

SEQ ID NO: 193710 - DNA, 25 bp, Artificial
  Probe
catttctcatacacagaatgatggg

SEQ ID NO: 193711 - DNA, 25 bp, Artificial
  Probe
agcaacccaggctgactgggaccct

SEQ ID NO: 193712 - DNA, 25 bp, Artificial
  Probe
tcctgttttcacttattttaggaag

SEQ ID NO: 193713 - DNA, 25 bp, Artificial
  Probe
tcttcctatttctgtgcagcctaag

SEQ ID NO: 193714 - DNA, 25 bp, Artificial
  Probe
atcatgcatttattacctaagtagg

SEQ ID NO: 193715 - DNA, 25 bp, Artificial
  Probe
tgcagcgagctttatccacgggact

SEQ ID NO: 193716 - DNA, 25 bp, Artificial
  Probe
aggctgactgggaccctccatgtag

SEQ ID NO: 193717 - DNA, 25 bp, Artificial
  Probe
ctatttctgtgcagcctaagtgtta

SEQ ID NO: 193718 - DNA, 25 bp, Artificial
  Probe
atttcagccgagtcccttagcaacc

SEQ ID NO: 193719 - DNA, 25 bp, Artificial
  Probe
ttggcaaatgatacccatggagcaa

SEQ ID NO: 193720 - DNA, 25 bp, Artificial
  Probe
tgactgggaccctccatgtagctta

SEQ ID NO: 193721 - DNA, 25 bp, Artificial
  Probe
ccttagcaacccaggctgactggga

SEQ ID NO: 193722 - DNA, 25 bp, Artificial
  Probe
tcatgtctttattcttgtgcggtga

SEQ ID NO: 193723 - DNA, 25 bp, Artificial
  Probe
ttcttagaacaagtttgatgactct

SEQ ID NO: 193724 - DNA, 25 bp, Artificial
  Probe
gagcaaggttactcttcctatttct

SEQ ID NO: 193725 - DNA, 25 bp, Artificial
  Probe
agtcccttagcaacccaggctgact

SEQ ID NO: 193726 - DNA, 25 bp, Artificial
  Probe
catacacagaatgatgggtttcacg

SEQ ID NO: 193727 - DNA, 25 bp, Artificial
  Probe
gtagcttaagctgtgaactcactgt

SEQ ID NO: 193728 - DNA, 25 bp, Artificial
  Probe
catgtctttattcttgtgcggtgat

SEQ ID NO: 193729 - DNA, 25 bp, Artificial
  Probe
atgtgacacacagactagcaaatcc

SEQ ID NO: 193730 - DNA, 25 bp, Artificial
  Probe
tgatgactctcaaattgaatgtatc

SEQ ID NO: 193731 - DNA, 25 bp, Artificial
  Probe
cacggtgatgtcttcctttcatgtc

SEQ ID NO: 193732 - DNA, 25 bp, Artificial
  Probe
catgcatttattacctaagtaggat

SEQ ID NO: 193733 - DNA, 25 bp, Artificial
  Probe
gccacagtgactaacaagcatataa

SEQ ID NO: 193734 - DNA, 25 bp, Artificial
  Probe
agaagcaagcaaacacactgaagtc

SEQ ID NO: 193735 - DNA, 25 bp, Artificial
  Probe
ctctcaagagttactgaagttgttt

SEQ ID NO: 193736 - DNA, 25 bp, Artificial
  Probe
cacactgaagtccagttttaagaaa

SEQ ID NO: 193737 - DNA, 25 bp, Artificial
  Probe
ttctctcaagagttactgaagttgt

SEQ ID NO: 193738 - DNA, 25 bp, Artificial
  Probe
cactgaagtccagttttaagaaata

SEQ ID NO: 193739 - DNA, 25 bp, Artificial
  Probe
agcttccatgaaactcccctagttg

SEQ ID NO: 193740 - DNA, 25 bp, Artificial
  Probe
tcccctagttgtctggttaactcgg

SEQ ID NO: 193741 - DNA, 25 bp, Artificial
  Probe
ctcccctagttgtctggttaactcg

SEQ ID NO: 193742 - DNA, 25 bp, Artificial
  Probe
tagttgtctggttaactcggttcct

SEQ ID NO: 193743 - DNA, 25 bp, Artificial
  Probe
taatgccacagtgactaacaagcat

SEQ ID NO: 193744 - DNA, 25 bp, Artificial
  Probe
agtatttcccaatactgtagaatag

SEQ ID NO: 193745 - DNA, 25 bp, Artificial
  Probe
taaatcattgactccctgtcctgtg

SEQ ID NO: 193746 - DNA, 25 bp, Artificial
  Probe
aacgtaactgttaccactgcacttg

SEQ ID NO: 193747 - DNA, 25 bp, Artificial
  Probe
cctgtatttctctcaagagttactg

SEQ ID NO: 193748 - DNA, 25 bp, Artificial
  Probe
acttgtgaactttcgtgtcattgtt

SEQ ID NO: 193749 - DNA, 25 bp, Artificial
  Probe
cctgtcctgtgctctgtgacttaac

SEQ ID NO: 193750 - DNA, 25 bp, Artificial
  Probe
attgactccctgtcctgtgctctgt

SEQ ID NO: 193751 - DNA, 25 bp, Artificial
  Probe
agcaagcaaacacactgaagtccag

SEQ ID NO: 193752 - DNA, 25 bp, Artificial
  Probe
gcttccatgaaactcccctagttgt

SEQ ID NO: 193753 - DNA, 25 bp, Artificial
  Probe
tggttaactcggttcctgtgttgat

SEQ ID NO: 193754 - DNA, 25 bp, Artificial
  Probe
actccctgtcctgtgctctgtgact

SEQ ID NO: 193755 - DNA, 25 bp, Artificial
  Probe
tcattgactccctgtcctgtgctct

SEQ ID NO: 193756 - DNA, 25 bp, Artificial
  Probe
tactgtagaatagcttccatgaaac

SEQ ID NO: 193757 - DNA, 25 bp, Artificial
  Probe
ctcggttcctgtgttgatttatcta

SEQ ID NO: 193758 - DNA, 25 bp, Artificial
  Probe
acacactgaagtccagttttaagaa

SEQ ID NO: 193759 - DNA, 25 bp, Artificial
  Probe
atgaaactcccctagttgtctggtt

SEQ ID NO: 193760 - DNA, 25 bp, Artificial
  Probe
ctctgtgacttaacgtaactgttac

SEQ ID NO: 193761 - DNA, 25 bp, Artificial
  Probe
aattagcctgtatttctctcaagag

SEQ ID NO: 193762 - DNA, 25 bp, Artificial
  Probe
tgcacttgtgaactttcgtgtcatt

SEQ ID NO: 193763 - DNA, 25 bp, Artificial
  Probe
tcgtgtcattgttttgtgttcaccc

SEQ ID NO: 193764 - DNA, 25 bp, Artificial
  Probe
tgtctggttaactcggttcctgtgt

SEQ ID NO: 193765 - DNA, 25 bp, Artificial
  Probe
gtagaatagcttccatgaaactccc

SEQ ID NO: 193766 - DNA, 25 bp, Artificial
  Probe
tttaaagtcttttaatgccacagtg

SEQ ID NO: 193767 - DNA, 25 bp, Artificial
  Probe
tgtgctctgtgacttaacgtaactg

SEQ ID NO: 193768 - DNA, 25 bp, Artificial
  Probe
gacttaacgtaactgttaccactgc

SEQ ID NO: 193769 - DNA, 25 bp, Artificial
  Probe
gttcctgtgttgatttatctaaatc

SEQ ID NO: 193770 - DNA, 25 bp, Artificial
  Probe
gcaaacacactgaagtccagtttta

SEQ ID NO: 193771 - DNA, 25 bp, Artificial
  Probe
ctgttaccactgcacttgtgaactt

SEQ ID NO: 193772 - DNA, 25 bp, Artificial
  Probe
ttttaatgccacagtgactaacaag

SEQ ID NO: 193773 - DNA, 25 bp, Artificial
  Probe
agttgtctggttaactcggttcctg

SEQ ID NO: 193774 - DNA, 25 bp, Artificial
  Probe
gtatttcccaatactgtagaatagc

SEQ ID NO: 193775 - DNA, 25 bp, Artificial
  Probe
tgaaactcccctagttgtctggtta

SEQ ID NO: 193776 - DNA, 25 bp, Artificial
  Probe
cggttcctgtgttgatttatctaaa

SEQ ID NO: 193777 - DNA, 25 bp, Artificial
  Probe
ttaccactgcacttgtgaactttcg

SEQ ID NO: 193778 - DNA, 25 bp, Artificial
  Probe
aaagtcttttaatgccacagtgact

SEQ ID NO: 193779 - DNA, 25 bp, Artificial
  Probe
tctgactccttttactccgagtctg

SEQ ID NO: 193780 - DNA, 25 bp, Artificial
  Probe
cctgtgagcagatcagcccggagga

SEQ ID NO: 193781 - DNA, 25 bp, Artificial
  Probe
ctatcctagcacaccagagccttgt

SEQ ID NO: 193782 - DNA, 25 bp, Artificial
  Probe
acatgttatgctttgatatagagcc

SEQ ID NO: 193783 - DNA, 25 bp, Artificial
  Probe
cctgcaggcggagaccgacaagttg

SEQ ID NO: 193784 - DNA, 25 bp, Artificial
  Probe
gccccatctgcaaaatcccagaaga

SEQ ID NO: 193785 - DNA, 25 bp, Artificial
  Probe
ctgctaagtgcagaaaccgaagaaa

SEQ ID NO: 193786 - DNA, 25 bp, Artificial
  Probe
ttgaaccggaagcactgcatacccc

SEQ ID NO: 193787 - DNA, 25 bp, Artificial
  Probe
gtgctacccgttgtcatctcctttc

SEQ ID NO: 193788 - DNA, 25 bp, Artificial
  Probe
gtctggttttcacctatcctagcac

SEQ ID NO: 193789 - DNA, 25 bp, Artificial
  Probe
gtgccttgtatctccctttctccag

SEQ ID NO: 193790 - DNA, 25 bp, Artificial
  Probe
agagccttgttcctcagcccatcga

SEQ ID NO: 193791 - DNA, 25 bp, Artificial
  Probe
tcagtggcagccaggaattgcagtg

SEQ ID NO: 193792 - DNA, 25 bp, Artificial
  Probe
agaaggaacgccttgagctggtgct

SEQ ID NO: 193793 - DNA, 25 bp, Artificial
  Probe
accccttgcaggtgctacccgttgt

SEQ ID NO: 193794 - DNA, 25 bp, Artificial
  Probe
acaggtggtaccagcagcacgagtg

SEQ ID NO: 193795 - DNA, 25 bp, Artificial
  Probe
tcatttcctgggacccagcggctat

SEQ ID NO: 193796 - DNA, 25 bp, Artificial
  Probe
gcctatcataatttgcatacagaga

SEQ ID NO: 193797 - DNA, 25 bp, Artificial
  Probe
agctggtgctggaagcccatcgccc

SEQ ID NO: 193798 - DNA, 25 bp, Artificial
  Probe
aagagtagcagcagcagtggtgacc

SEQ ID NO: 193799 - DNA, 25 bp, Artificial
  Probe
aggacaccctgtaggctcctcctga

SEQ ID NO: 193800 - DNA, 25 bp, Artificial
  Probe
ccgaccaggagtcatacgagcccta

SEQ ID NO: 193801 - DNA, 25 bp, Artificial
  Probe
atcctagcacaccagagccttgttc

SEQ ID NO: 193802 - DNA, 25 bp, Artificial
  Probe
agacgcgagcggaacaagctagcag

SEQ ID NO: 193803 - DNA, 25 bp, Artificial
  Probe
tgttcatccagcaggcctggaccat

SEQ ID NO: 193804 - DNA, 25 bp, Artificial
  Probe
agagaaaatatgtccctctgccaga

SEQ ID NO: 193805 - DNA, 25 bp, Artificial
  Probe
gtgccctttaactagcctagaacac

SEQ ID NO: 193806 - DNA, 25 bp, Artificial
  Probe
gacccgtacttgaaccggaagcact

SEQ ID NO: 193807 - DNA, 25 bp, Artificial
  Probe
attgcagtggatggtgcagcctcat

SEQ ID NO: 193808 - DNA, 25 bp, Artificial
  Probe
aagagctgcagaagcagaaggaacg

SEQ ID NO: 193809 - DNA, 25 bp, Artificial
  Probe
cctggctttgtgaggcacccagcca

SEQ ID NO: 193810 - DNA, 25 bp, Artificial
  Probe
aaggacacaggtggtaccagcagca

SEQ ID NO: 193811 - DNA, 25 bp, Artificial
  Probe
ggtcttttatctctttcaagtagaa

SEQ ID NO: 193812 - DNA, 25 bp, Artificial
  Probe
tgagatcgaagagctgcagaagcag

SEQ ID NO: 193813 - DNA, 25 bp, Artificial
  Probe
gttatccagcctactctaagcctag

SEQ ID NO: 193814 - DNA, 25 bp, Artificial
  Probe
gtagcagcagcagtggtgacccctc

SEQ ID NO: 193815 - DNA, 25 bp, Artificial
  Probe
tgatgccttgcagaccactttccca

SEQ ID NO: 193816 - DNA, 25 bp, Artificial
  Probe
tttccctgttcatccagcaggcctg

SEQ ID NO: 193817 - DNA, 25 bp, Artificial
  Probe
aggaattgacagacttcctgcaggc

SEQ ID NO: 193818 - DNA, 25 bp, Artificial
  Probe
aggagtcatacgagccctagggcca

SEQ ID NO: 193819 - DNA, 25 bp, Artificial
  Probe
ctgcaaaatcccagaagaagacaag

SEQ ID NO: 193820 - DNA, 25 bp, Artificial
  Probe
tcagcccatcgaaagagtagcagca

SEQ ID NO: 193821 - DNA, 25 bp, Artificial
  Probe
cgacgcaggccctgtgagcagatca

SEQ ID NO: 193822 - DNA, 25 bp, Artificial
  Probe
cagcagcaccaggacaccctgtagg

SEQ ID NO: 193823 - DNA, 25 bp, Artificial
  Probe
catgccccaaaccagcaggtctttt

SEQ ID NO: 193824 - DNA, 25 bp, Artificial
  Probe
cacactcctggctttgtgaggcacc

SEQ ID NO: 193825 - DNA, 25 bp, Artificial
  Probe
cttgcagcaggagtccgagtgcaga

SEQ ID NO: 193826 - DNA, 25 bp, Artificial
  Probe
ttctctcacgctaaggggctgagtg

SEQ ID NO: 193827 - DNA, 25 bp, Artificial
  Probe
gtcttttcacgtgtcctgagccggc

SEQ ID NO: 193828 - DNA, 25 bp, Artificial
  Probe
tctctcacgctaaggggctgagtgc

SEQ ID NO: 193829 - DNA, 25 bp, Artificial
  Probe
gcccacgggagtctccttgcagcag

SEQ ID NO: 193830 - DNA, 25 bp, Artificial
  Probe
tcttttcacgtgtcctgagccggcc

SEQ ID NO: 193831 - DNA, 25 bp, Artificial
  Probe
tgcgcgctgcgctgtcttttcacgt

SEQ ID NO: 193832 - DNA, 25 bp, Artificial
  Probe
cttctctcacgctaaggggctgagt

SEQ ID NO: 193833 - DNA, 25 bp, Artificial
  Probe
cgcgctgcgctgtcttttcacgtgt

SEQ ID NO: 193834 - DNA, 25 bp, Artificial
  Probe
ggcccacgggagtctccttgcagca

SEQ ID NO: 193835 - DNA, 25 bp, Artificial
  Probe
gagtctccttgcagcaggagtccga

SEQ ID NO: 193836 - DNA, 25 bp, Artificial
  Probe
tgcgctgtcttttcacgtgtcctga

SEQ ID NO: 193837 - DNA, 25 bp, Artificial
  Probe
ctcagcggccgacctggaaaagcct

SEQ ID NO: 193838 - DNA, 25 bp, Artificial
  Probe
ggcttgttctttcacctcagcggcc

SEQ ID NO: 193839 - DNA, 25 bp, Artificial
  Probe
gcgctgcgctgtcttttcacgtgtc

SEQ ID NO: 193840 - DNA, 25 bp, Artificial
  Probe
ccgacctggaaaagcctagaaagtg

SEQ ID NO: 193841 - DNA, 25 bp, Artificial
  Probe
ggagtcctggccaccaatcggcgcg

SEQ ID NO: 193842 - DNA, 25 bp, Artificial
  Probe
gccgacctggaaaagcctagaaagt

SEQ ID NO: 193843 - DNA, 25 bp, Artificial
  Probe
ctccttgcagcaggagtccgagtgc

SEQ ID NO: 193844 - DNA, 25 bp, Artificial
  Probe
aggggcttgttctttcacctcagcg

SEQ ID NO: 193845 - DNA, 25 bp, Artificial
  Probe
tccttgcagcaggagtccgagtgca

SEQ ID NO: 193846 - DNA, 25 bp, Artificial
  Probe
cgggagtctccttgcagcaggagtc

SEQ ID NO: 193847 - DNA, 25 bp, Artificial
  Probe
ttgttctttcacctcagcggccgac

SEQ ID NO: 193848 - DNA, 25 bp, Artificial
  Probe
gcgcgctgcgctgtcttttcacgtg

SEQ ID NO: 193849 - DNA, 25 bp, Artificial
  Probe
tctccttgcagcaggagtccgagtg

SEQ ID NO: 193850 - DNA, 25 bp, Artificial
  Probe
cgctgcgctgtcttttcacgtgtcc

SEQ ID NO: 193851 - DNA, 25 bp, Artificial
  Probe
ttttcacgtgtcctgagccggccca

SEQ ID NO: 193852 - DNA, 25 bp, Artificial
  Probe
ccacgggagtctccttgcagcagga

SEQ ID NO: 193853 - DNA, 25 bp, Artificial
  Probe
acgggagtctccttgcagcaggagt

SEQ ID NO: 193854 - DNA, 25 bp, Artificial
  Probe
agtctccttgcagcaggagtccgag

SEQ ID NO: 193855 - DNA, 25 bp, Artificial
  Probe
cagcggccgacctggaaaagcctag

SEQ ID NO: 193856 - DNA, 25 bp, Artificial
  Probe
cttgttctttcacctcagcggccga

SEQ ID NO: 193857 - DNA, 25 bp, Artificial
  Probe
gcttgttctttcacctcagcggccg

SEQ ID NO: 193858 - DNA, 25 bp, Artificial
  Probe
agcggccgacctggaaaagcctaga

SEQ ID NO: 193859 - DNA, 25 bp, Artificial
  Probe
gtggccgccttctctcacgctaagg

SEQ ID NO: 193860 - DNA, 25 bp, Artificial
  Probe
agcctagaaagtgctccccttttct

SEQ ID NO: 193861 - DNA, 25 bp, Artificial
  Probe
gggcttgttctttcacctcagcggc

SEQ ID NO: 193862 - DNA, 25 bp, Artificial
  Probe
gctgcgctgtcttttcacgtgtcct

SEQ ID NO: 193863 - DNA, 25 bp, Artificial
  Probe
ggccgacctggaaaagcctagaaag

SEQ ID NO: 193864 - DNA, 25 bp, Artificial
  Probe
gctgtcttttcacgtgtcctgagcc

SEQ ID NO: 193865 - DNA, 25 bp, Artificial
  Probe
gcgctgtcttttcacgtgtcctgag

SEQ ID NO: 193866 - DNA, 25 bp, Artificial
  Probe
tgtcttttcacgtgtcctgagccgg

SEQ ID NO: 193867 - DNA, 25 bp, Artificial
  Probe
ccttgcagcaggagtccgagtgcag

SEQ ID NO: 193868 - DNA, 25 bp, Artificial
  Probe
gcctagaaagtgctccccttttctt

SEQ ID NO: 193869 - DNA, 25 bp, Artificial
  Probe
gcggccgacctggaaaagcctagaa

SEQ ID NO: 193870 - DNA, 25 bp, Artificial
  Probe
agtggccgccttctctcacgctaag

SEQ ID NO: 193871 - DNA, 25 bp, Artificial
  Probe
agtcatgcagtcaccctcttagact

SEQ ID NO: 193872 - DNA, 25 bp, Artificial
  Probe
ggtctgggctggagaaaccatcacc

SEQ ID NO: 193873 - DNA, 25 bp, Artificial
  Probe
gctggagaaaccatcaccgacggtg

SEQ ID NO: 193874 - DNA, 25 bp, Artificial
  Probe
gaccctgcaaatgaagggcctgctt

SEQ ID NO: 193875 - DNA, 25 bp, Artificial
  Probe
acccaagagacctggctgtgaccag

SEQ ID NO: 193876 - DNA, 25 bp, Artificial
  Probe
tgtgaccagtcatgcagtcaccctc

SEQ ID NO: 193877 - DNA, 25 bp, Artificial
  Probe
ggcctgcttctaaacagtgtggaac

SEQ ID NO: 193878 - DNA, 25 bp, Artificial
  Probe
cccagaccctgcaaatgaagggcct

SEQ ID NO: 193879 - DNA, 25 bp, Artificial
  Probe
ctggctgtgaccagtcatgcagtca

SEQ ID NO: 193880 - DNA, 25 bp, Artificial
  Probe
cctggctgtgaccagtcatgcagtc

SEQ ID NO: 193881 - DNA, 25 bp, Artificial
  Probe
gtttgacccaagagacctggctgtg

SEQ ID NO: 193882 - DNA, 25 bp, Artificial
  Probe
atgaagggcctgcttctaaacagtg

SEQ ID NO: 193883 - DNA, 25 bp, Artificial
  Probe
aagagacctggctgtgaccagtcat

SEQ ID NO: 193884 - DNA, 25 bp, Artificial
  Probe
cggtctgggctggagaaaccatcac

SEQ ID NO: 193885 - DNA, 25 bp, Artificial
  Probe
tttgacccaagagacctggctgtga

SEQ ID NO: 193886 - DNA, 25 bp, Artificial
  Probe
tggaacagtttgacccaagagacct

SEQ ID NO: 193887 - DNA, 25 bp, Artificial
  Probe
gcccagaccctgcaaatgaagggcc

SEQ ID NO: 193888 - DNA, 25 bp, Artificial
  Probe
agtttgacccaagagacctggctgt

SEQ ID NO: 193889 - DNA, 25 bp, Artificial
  Probe
acagtttgacccaagagacctggct

SEQ ID NO: 193890 - DNA, 25 bp, Artificial
  Probe
tgcttctaaacagtgtggaacagtt

SEQ ID NO: 193891 - DNA, 25 bp, Artificial
  Probe
ccctgcaaatgaagggcctgcttct

SEQ ID NO: 193892 - DNA, 25 bp, Artificial
  Probe
ctgtgaccagtcatgcagtcaccct

SEQ ID NO: 193893 - DNA, 25 bp, Artificial
  Probe
ccagtcatgcagtcaccctcttaga

SEQ ID NO: 193894 - DNA, 25 bp, Artificial
  Probe
aagggcctgcttctaaacagtgtgg

SEQ ID NO: 193895 - DNA, 25 bp, Artificial
  Probe
ccaccatggcagtggacaaggcata

SEQ ID NO: 193896 - DNA, 25 bp, Artificial
  Probe
cttctaaacagtgtggaacagtttg

SEQ ID NO: 193897 - DNA, 25 bp, Artificial
  Probe
ctgaggcggtgaccttgaccccagc

SEQ ID NO: 193898 - DNA, 25 bp, Artificial
  Probe
ctgcttctaaacagtgtggaacagt

SEQ ID NO: 193899 - DNA, 25 bp, Artificial
  Probe
tagctgaggcggtgaccttgacccc

SEQ ID NO: 193900 - DNA, 25 bp, Artificial
  Probe
ctggagaaaccatcaccgacggtgg

SEQ ID NO: 193901 - DNA, 25 bp, Artificial
  Probe
cagcccagaccctgcaaatgaaggg

SEQ ID NO: 193902 - DNA, 25 bp, Artificial
  Probe
tggagaaaccatcaccgacggtgga

SEQ ID NO: 193903 - DNA, 25 bp, Artificial
  Probe
tgcagtcaccctcttagactgggcc

SEQ ID NO: 193904 - DNA, 25 bp, Artificial
  Probe
gtcggtctgggctggagaaaccatc

SEQ ID NO: 193905 - DNA, 25 bp, Artificial
  Probe
atgcagtcaccctcttagactgggc

SEQ ID NO: 193906 - DNA, 25 bp, Artificial
  Probe
ccatggcagtggacaaggcataaaa

SEQ ID NO: 193907 - DNA, 25 bp, Artificial
  Probe
gctgtgaccagtcatgcagtcaccc

SEQ ID NO: 193908 - DNA, 25 bp, Artificial
  Probe
gacctggctgtgaccagtcatgcag

SEQ ID NO: 193909 - DNA, 25 bp, Artificial
  Probe
gtgaccagtcatgcagtcaccctct

SEQ ID NO: 193910 - DNA, 25 bp, Artificial
  Probe
agacctggctgtgaccagtcatgca

SEQ ID NO: 193911 - DNA, 25 bp, Artificial
  Probe
tgaagggcctgcttctaaacagtgt

SEQ ID NO: 193912 - DNA, 25 bp, Artificial
  Probe
cagtcatgcagtcaccctcttagac

SEQ ID NO: 193913 - DNA, 25 bp, Artificial
  Probe
aaatgaagggcctgcttctaaacag

SEQ ID NO: 193914 - DNA, 25 bp, Artificial
  Probe
agagacctggctgtgaccagtcatg

SEQ ID NO: 193915 - DNA, 25 bp, Artificial
  Probe
cccaccatggcagtggacaaggcat

SEQ ID NO: 193916 - DNA, 25 bp, Artificial
  Probe
gctgaggcggtgaccttgaccccag

SEQ ID NO: 193917 - DNA, 25 bp, Artificial
  Probe
tactgaggtgccgttccgtctgatg

SEQ ID NO: 193918 - DNA, 25 bp, Artificial
  Probe
aaggtgaagctcacggtgtcaggct

SEQ ID NO: 193919 - DNA, 25 bp, Artificial
  Probe
aggtgaagctcacggtgtcaggctt

SEQ ID NO: 193920 - DNA, 25 bp, Artificial
  Probe
tcaaggtgaagctcacggtgtcagg

SEQ ID NO: 193921 - DNA, 25 bp, Artificial
  Probe
agtgaagtggctactgaggtgccgt

SEQ ID NO: 193922 - DNA, 25 bp, Artificial
  Probe
gtgaagtggctactgaggtgccgtt

SEQ ID NO: 193923 - DNA, 25 bp, Artificial
  Probe
tatcaaggtgaagctcacggtgtca

SEQ ID NO: 193924 - DNA, 25 bp, Artificial
  Probe
actgaggtgccgttccgtctgatgc

SEQ ID NO: 193925 - DNA, 25 bp, Artificial
  Probe
gtggctactgaggtgccgttccgtc

SEQ ID NO: 193926 - DNA, 25 bp, Artificial
  Probe
tggctactgaggtgccgttccgtct

SEQ ID NO: 193927 - DNA, 25 bp, Artificial
  Probe
ggctactgaggtgccgttccgtctg

SEQ ID NO: 193928 - DNA, 25 bp, Artificial
  Probe
ctcccagaaataaagtctgctcgtc

SEQ ID NO: 193929 - DNA, 25 bp, Artificial
  Probe
ctggtgtcataccatatcaaggtga

SEQ ID NO: 193930 - DNA, 25 bp, Artificial
  Probe
tgtcataccatatcaaggtgaagct

SEQ ID NO: 193931 - DNA, 25 bp, Artificial
  Probe
tgaggtgccgttccgtctgatgcac

SEQ ID NO: 193932 - DNA, 25 bp, Artificial
  Probe
ggtgccgttccgtctgatgcacccc

SEQ ID NO: 193933 - DNA, 25 bp, Artificial
  Probe
tcctggtgtcataccatatcaaggt

SEQ ID NO: 193934 - DNA, 25 bp, Artificial
  Probe
tccagtgaagtggctactgaggtgc

SEQ ID NO: 193935 - DNA, 25 bp, Artificial
  Probe
tgaagtggctactgaggtgccgttc

SEQ ID NO: 193936 - DNA, 25 bp, Artificial
  Probe
atcaaggtgaagctcacggtgtcag

SEQ ID NO: 193937 - DNA, 25 bp, Artificial
  Probe
ggtgtcataccatatcaaggtgaag

SEQ ID NO: 193938 - DNA, 25 bp, Artificial
  Probe
taccatatcaaggtgaagctcacgg

SEQ ID NO: 193939 - DNA, 25 bp, Artificial
  Probe
tgccgttccgtctgatgcaccccca

SEQ ID NO: 193940 - DNA, 25 bp, Artificial
  Probe
ccgttccgtctgatgcacccccagc

SEQ ID NO: 193941 - DNA, 25 bp, Artificial
  Probe
accatatcaaggtgaagctcacggt

SEQ ID NO: 193942 - DNA, 25 bp, Artificial
  Probe
ccatatcaaggtgaagctcacggtg

SEQ ID NO: 193943 - DNA, 25 bp, Artificial
  Probe
cataccatatcaaggtgaagctcac

SEQ ID NO: 193944 - DNA, 25 bp, Artificial
  Probe
aagtggctactgaggtgccgttccg

SEQ ID NO: 193945 - DNA, 25 bp, Artificial
  Probe
agtggctactgaggtgccgttccgt

SEQ ID NO: 193946 - DNA, 25 bp, Artificial
  Probe
gaggtgccgttccgtctgatgcacc

SEQ ID NO: 193947 - DNA, 25 bp, Artificial
  Probe
ctactgaggtgccgttccgtctgat

SEQ ID NO: 193948 - DNA, 25 bp, Artificial
  Probe
tcataccatatcaaggtgaagctca

SEQ ID NO: 193949 - DNA, 25 bp, Artificial
  Probe
tctcccagaaataaagtctgctcgt

SEQ ID NO: 193950 - DNA, 25 bp, Artificial
  Probe
ctgaggtgccgttccgtctgatgca

SEQ ID NO: 193951 - DNA, 25 bp, Artificial
  Probe
tggtgtcataccatatcaaggtgaa

SEQ ID NO: 193952 - DNA, 25 bp, Artificial
  Probe
aggtgccgttccgtctgatgcaccc

SEQ ID NO: 193953 - DNA, 25 bp, Artificial
  Probe
cagtgaagtggctactgaggtgccg

SEQ ID NO: 193954 - DNA, 25 bp, Artificial
  Probe
ccagtgaagtggctactgaggtgcc

SEQ ID NO: 193955 - DNA, 25 bp, Artificial
  Probe
gtgtcataccatatcaaggtgaagc

SEQ ID NO: 193956 - DNA, 25 bp, Artificial
  Probe
gttccgtctgatgcacccccagcct

SEQ ID NO: 193957 - DNA, 25 bp, Artificial
  Probe
caaggtgaagctcacggtgtcaggc

SEQ ID NO: 193958 - DNA, 25 bp, Artificial
  Probe
ataccatatcaaggtgaagctcacg

SEQ ID NO: 193959 - DNA, 25 bp, Artificial
  Probe
cctggtgtcataccatatcaaggtg

SEQ ID NO: 193960 - DNA, 25 bp, Artificial
  Probe
atatcaaggtgaagctcacggtgtc

SEQ ID NO: 193961 - DNA, 25 bp, Artificial
  Probe
gaagtggctactgaggtgccgttcc

SEQ ID NO: 193962 - DNA, 25 bp, Artificial
  Probe
gtcataccatatcaaggtgaagctc

SEQ ID NO: 193963 - DNA, 25 bp, Artificial
  Probe
tcaggacgcagcagctccctgagca

SEQ ID NO: 193964 - DNA, 25 bp, Artificial
  Probe
tgttgtctccagagcatgacactgc

SEQ ID NO: 193965 - DNA, 25 bp, Artificial
  Probe
atgacactgcattccctgacctgtg

SEQ ID NO: 193966 - DNA, 25 bp, Artificial
  Probe
tccagaagcagatgctggaaggatg

SEQ ID NO: 193967 - DNA, 25 bp, Artificial
  Probe
acatagctagctataaagcagaaat

SEQ ID NO: 193968 - DNA, 25 bp, Artificial
  Probe
tctcgtgagcatagccgggatagag

SEQ ID NO: 193969 - DNA, 25 bp, Artificial
  Probe
aagttaagtcctccagactaaatga

SEQ ID NO: 193970 - DNA, 25 bp, Artificial
  Probe
tcccgagccttctcgtgagcatagc

SEQ ID NO: 193971 - DNA, 25 bp, Artificial
  Probe
agcatagccgggatagaggtcaaag

SEQ ID NO: 193972 - DNA, 25 bp, Artificial
  Probe
agactaaatgagcatgcctagcaga

SEQ ID NO: 193973 - DNA, 25 bp, Artificial
  Probe
cctccagagttaggtatgaccagcc

SEQ ID NO: 193974 - DNA, 25 bp, Artificial
  Probe
tgctgctgtagtcatgaaacataca

SEQ ID NO: 193975 - DNA, 25 bp, Artificial
  Probe
gggccctgctgctcagtcagagtgt

SEQ ID NO: 193976 - DNA, 25 bp, Artificial
  Probe
agtctgagtgctagccagtgttgtc

SEQ ID NO: 193977 - DNA, 25 bp, Artificial
  Probe
agcagctccctgagcatgcgactca

SEQ ID NO: 193978 - DNA, 25 bp, Artificial
  Probe
tgcgactcaccctgctgctgtagtc

SEQ ID NO: 193979 - DNA, 25 bp, Artificial
  Probe
actaaatgagcatgcctagcagact

SEQ ID NO: 193980 - DNA, 25 bp, Artificial
  Probe
aagcagatgctggaaggatggtctc

SEQ ID NO: 193981 - DNA, 25 bp, Artificial
  Probe
aatgagcatgcctagcagacttggg

SEQ ID NO: 193982 - DNA, 25 bp, Artificial
  Probe
atatccacaggaagccagtctgagt

SEQ ID NO: 193983 - DNA, 25 bp, Artificial
  Probe
accctgctgctgtagtcatgaaaca

SEQ ID NO: 193984 - DNA, 25 bp, Artificial
  Probe
tctggtcaaagctaggcctgaggag

SEQ ID NO: 193985 - DNA, 25 bp, Artificial
  Probe
cttcccgagccttctcgtgagcata

SEQ ID NO: 193986 - DNA, 25 bp, Artificial
  Probe
gaaggatggtctccatcctcaggac

SEQ ID NO: 193987 - DNA, 25 bp, Artificial
  Probe
agcagatgctggaaggatggtctcc

SEQ ID NO: 193988 - DNA, 25 bp, Artificial
  Probe
agatacttcatcaatctttgtgtag

SEQ ID NO: 193989 - DNA, 25 bp, Artificial
  Probe
caatctttgtgtagtgtacattcat

SEQ ID NO: 193990 - DNA, 25 bp, Artificial
  Probe
cacagtgctgtaacaagttaagtcc

SEQ ID NO: 193991 - DNA, 25 bp, Artificial
  Probe
ttaggtatgaccagcccagtccttc

SEQ ID NO: 193992 - DNA, 25 bp, Artificial
  Probe
tgcattccctgacctgtgtccacag

SEQ ID NO: 193993 - DNA, 25 bp, Artificial
  Probe
ggacgcagcagctccctgagcatgc

SEQ ID NO: 193994 - DNA, 25 bp, Artificial
  Probe
gcctagcagacttgggtcctccaga

SEQ ID NO: 193995 - DNA, 25 bp, Artificial
  Probe
ggaggcttggcatatccacaggaag

SEQ ID NO: 193996 - DNA, 25 bp, Artificial
  Probe
agttaggtatgaccagcccagtcct

SEQ ID NO: 193997 - DNA, 25 bp, Artificial
  Probe
gtgtcctcagtttaagatacttcat

SEQ ID NO: 193998 - DNA, 25 bp, Artificial
  Probe
ctataaagcagaaattccagaagca

SEQ ID NO: 193999 - DNA, 25 bp, Artificial
  Probe
tgtgagtttggcactctggtcaaag

SEQ ID NO: 194000 - DNA, 25 bp, Artificial
  Probe
atagctagctataaagcagaaattc

SEQ ID NO: 194001 - DNA, 25 bp, Artificial
  Probe
tgagtgctagccagtgttgtctcca

SEQ ID NO: 194002 - DNA, 25 bp, Artificial
  Probe
tggcatatccacaggaagccagtct

SEQ ID NO: 194003 - DNA, 25 bp, Artificial
  Probe
gtaacaagttaagtcctccagacta

SEQ ID NO: 194004 - DNA, 25 bp, Artificial
  Probe
atagccgggatagaggtcaaaggtc

SEQ ID NO: 194005 - DNA, 25 bp, Artificial
  Probe
ccagtgttgtctccagagcatgaca

SEQ ID NO: 194006 - DNA, 25 bp, Artificial
  Probe
cagaaattccagaagcagatgctgg

SEQ ID NO: 194007 - DNA, 25 bp, Artificial
  Probe
ggtctccatcctcaggacgcagcag

SEQ ID NO: 194008 - DNA, 25 bp, Artificial
  Probe
agcagacttgggtcctccagagtta

SEQ ID NO: 194009 - DNA, 25 bp, Artificial
  Probe
gtccgagagatttctggtaacgaac

SEQ ID NO: 194010 - DNA, 25 bp, Artificial
  Probe
ggacctggaccatggagggaaataa

SEQ ID NO: 194011 - DNA, 25 bp, Artificial
  Probe
tgatggcacttggaaagtagaccgg

SEQ ID NO: 194012 - DNA, 25 bp, Artificial
  Probe
ccagcttcttggagcctggcgcaat

SEQ ID NO: 194013 - DNA, 25 bp, Artificial
  Probe
gaggccaagcggatctttaagaagg

SEQ ID NO: 194014 - DNA, 25 bp, Artificial
  Probe
tgatgttgtgtttgaactcggcgtc

SEQ ID NO: 194015 - DNA, 25 bp, Artificial
  Probe
aagccttgtcagagccaaagaagta

SEQ ID NO: 194016 - DNA, 25 bp, Artificial
  Probe
tgacatcatggcatttgatggcact

SEQ ID NO: 194017 - DNA, 25 bp, Artificial
  Probe
ttgtgtttgaactcggcgtcgactt

SEQ ID NO: 194018 - DNA, 25 bp, Artificial
  Probe
cacatatgaaggagtggaggccaag

SEQ ID NO: 194019 - DNA, 25 bp, Artificial
  Probe
gtcaaagaatcaagcaacttccgaa

SEQ ID NO: 194020 - DNA, 25 bp, Artificial
  Probe
aggaagcttggagctcatgacaact

SEQ ID NO: 194021 - DNA, 25 bp, Artificial
  Probe
tggcgcaatgcagaagggctagctt

SEQ ID NO: 194022 - DNA, 25 bp, Artificial
  Probe
agtctagcagatggaacagaactca

SEQ ID NO: 194023 - DNA, 25 bp, Artificial
  Probe
agctgattgctgtccgagagatttc

SEQ ID NO: 194024 - DNA, 25 bp, Artificial
  Probe
cctggaccatggagggaaataaact

SEQ ID NO: 194025 - DNA, 25 bp, Artificial
  Probe
tttgatggcacttggaaagtagacc

SEQ ID NO: 194026 - DNA, 25 bp, Artificial
  Probe
catggcatttgatggcacttggaaa

SEQ ID NO: 194027 - DNA, 25 bp, Artificial
  Probe
ttgaactcggcgtcgactttgccta

SEQ ID NO: 194028 - DNA, 25 bp, Artificial
  Probe
agatggaacagaactcactgggacc

SEQ ID NO: 194029 - DNA, 25 bp, Artificial
  Probe
agatttctggtaacgaactaatcca

SEQ ID NO: 194030 - DNA, 25 bp, Artificial
  Probe
gataatgcaggctcactcactgtgt

SEQ ID NO: 194031 - DNA, 25 bp, Artificial
  Probe
cttccgaaacattgatgttgtgttt

SEQ ID NO: 194032 - DNA, 25 bp, Artificial
  Probe
agcctggcgcaatgcagaagggcta

SEQ ID NO: 194033 - DNA, 25 bp, Artificial
  Probe
gattgctgtccgagagatttctggt

SEQ ID NO: 194034 - DNA, 25 bp, Artificial
  Probe
cttcttggagcctggcgcaatgcag

SEQ ID NO: 194035 - DNA, 25 bp, Artificial
  Probe
tcgctgataatgcaggctcactcac

SEQ ID NO: 194036 - DNA, 25 bp, Artificial
  Probe
aagcaacttccgaaacattgatgtt

SEQ ID NO: 194037 - DNA, 25 bp, Artificial
  Probe
tctccatctcgctgataatgcaggc

SEQ ID NO: 194038 - DNA, 25 bp, Artificial
  Probe
aagggctagcttggtgtcggattcc

SEQ ID NO: 194039 - DNA, 25 bp, Artificial
  Probe
cttgtcagagccaaagaagtaaaag

SEQ ID NO: 194040 - DNA, 25 bp, Artificial
  Probe
aaggaataggccagcttcttggagc

SEQ ID NO: 194041 - DNA, 25 bp, Artificial
  Probe
ctcactgggacctggaccatggagg

SEQ ID NO: 194042 - DNA, 25 bp, Artificial
  Probe
aacagaactcactgggacctggacc

SEQ ID NO: 194043 - DNA, 25 bp, Artificial
  Probe
ggattcctttctccatctcgctgat

SEQ ID NO: 194044 - DNA, 25 bp, Artificial
  Probe
ccaagcggatctttaagaaggaata

SEQ ID NO: 194045 - DNA, 25 bp, Artificial
  Probe
gaatcaagcaacttccgaaacattg

SEQ ID NO: 194046 - DNA, 25 bp, Artificial
  Probe
gcttggtgtcggattcctttctcca

SEQ ID NO: 194047 - DNA, 25 bp, Artificial
  Probe
gtcgactttgcctatagtctagcag

SEQ ID NO: 194048 - DNA, 25 bp, Artificial
  Probe
atccaaacctacacatatgaaggag

SEQ ID NO: 194049 - DNA, 25 bp, Artificial
  Probe
tgacgatcacacaggaaggaaataa

SEQ ID NO: 194050 - DNA, 25 bp, Artificial
  Probe
tgcttccaagccttgtcagagccaa

SEQ ID NO: 194051 - DNA, 25 bp, Artificial
  Probe
cacttggaaagtagaccggaatgag

SEQ ID NO: 194052 - DNA, 25 bp, Artificial
  Probe
gaactcactgggacctggaccatgg

SEQ ID NO: 194053 - DNA, 25 bp, Artificial
  Probe
gatttctggtaacgaactaatccaa

SEQ ID NO: 194054 - DNA, 25 bp, Artificial
  Probe
aaggagctgattgctgtccgagaga

SEQ ID NO: 194055 - DNA, 25 bp, Artificial
  Probe
aaacgtgctgcagatagctcatgac

SEQ ID NO: 194056 - DNA, 25 bp, Artificial
  Probe
gacatttcacacacgcagtcggtat

SEQ ID NO: 194057 - DNA, 25 bp, Artificial
  Probe
acacgcagtcggtatccgccaggca

SEQ ID NO: 194058 - DNA, 25 bp, Artificial
  Probe
gcttcaccccattctgagtttgtcc

SEQ ID NO: 194059 - DNA, 25 bp, Artificial
  Probe
tggaccagaccctggcagtctatca

SEQ ID NO: 194060 - DNA, 25 bp, Artificial
  Probe
ctgagcaggctgcagggctctctgc

SEQ ID NO: 194061 - DNA, 25 bp, Artificial
  Probe
tcggtatccgccaggcagagggtca

SEQ ID NO: 194062 - DNA, 25 bp, Artificial
  Probe
acgcagtcggtatccgccaggcaga

SEQ ID NO: 194063 - DNA, 25 bp, Artificial
  Probe
caagatggaccagaccctggcagtc

SEQ ID NO: 194064 - DNA, 25 bp, Artificial
  Probe
gtcaccaggatcaatgacatttcac

SEQ ID NO: 194065 - DNA, 25 bp, Artificial
  Probe
ccaaaacgtgctgcagatagctcat

SEQ ID NO: 194066 - DNA, 25 bp, Artificial
  Probe
tatccgccaggcagagggtcaccgg

SEQ ID NO: 194067 - DNA, 25 bp, Artificial
  Probe
tccgccaggcagagggtcaccggtt

SEQ ID NO: 194068 - DNA, 25 bp, Artificial
  Probe
tgctggccttctccaagagctgctc

SEQ ID NO: 194069 - DNA, 25 bp, Artificial
  Probe
gcagatagctcatgacctggagaac

SEQ ID NO: 194070 - DNA, 25 bp, Artificial
  Probe
gatcaatgacatttcacacacgcag

SEQ ID NO: 194071 - DNA, 25 bp, Artificial
  Probe
gtcaccggtttggacttcattcccg

SEQ ID NO: 194072 - DNA, 25 bp, Artificial
  Probe
aggctgcagggctctctgcaggaca

SEQ ID NO: 194073 - DNA, 25 bp, Artificial
  Probe
agatagctcatgacctggagaacct

SEQ ID NO: 194074 - DNA, 25 bp, Artificial
  Probe
tcaccggtttggacttcattcccgg

SEQ ID NO: 194075 - DNA, 25 bp, Artificial
  Probe
tttcacacacgcagtcggtatccgc

SEQ ID NO: 194076 - DNA, 25 bp, Artificial
  Probe
atgttcaagctgtgcctatccacaa

SEQ ID NO: 194077 - DNA, 25 bp, Artificial
  Probe
agtccaggatgacaccaaaaccctc

SEQ ID NO: 194078 - DNA, 25 bp, Artificial
  Probe
caaagtccaggatgacaccaaaacc

SEQ ID NO: 194079 - DNA, 25 bp, Artificial
  Probe
agccagagagcctggatggcgtcct

SEQ ID NO: 194080 - DNA, 25 bp, Artificial
  Probe
ctgcagaagccagagagcctggatg

SEQ ID NO: 194081 - DNA, 25 bp, Artificial
  Probe
gtggcctgcagaagccagagagcct

SEQ ID NO: 194082 - DNA, 25 bp, Artificial
  Probe
ggatgacaccaaaaccctcatcaag

SEQ ID NO: 194083 - DNA, 25 bp, Artificial
  Probe
ggcttcaccccattctgagtttgtc

SEQ ID NO: 194084 - DNA, 25 bp, Artificial
  Probe
gcttgccttcccaaaacgtgctgca

SEQ ID NO: 194085 - DNA, 25 bp, Artificial
  Probe
agacccgtggcctgcagaagccaga

SEQ ID NO: 194086 - DNA, 25 bp, Artificial
  Probe
tcaccccattctgagtttgtccaag

SEQ ID NO: 194087 - DNA, 25 bp, Artificial
  Probe
cctcatcaagaccattgtcaccagg

SEQ ID NO: 194088 - DNA, 25 bp, Artificial
  Probe
gcctggatggcgtcctggaagcctc

SEQ ID NO: 194089 - DNA, 25 bp, Artificial
  Probe
aggatcaatgacatttcacacacgc

SEQ ID NO: 194090 - DNA, 25 bp, Artificial
  Probe
gtccaggatgacaccaaaaccctca

SEQ ID NO: 194091 - DNA, 25 bp, Artificial
  Probe
ccagaccctggcagtctatcaacag

SEQ ID NO: 194092 - DNA, 25 bp, Artificial
  Probe
catctgctggccttctccaagagct

SEQ ID NO: 194093 - DNA, 25 bp, Artificial
  Probe
cctgcagaagccagagagcctggat

SEQ ID NO: 194094 - DNA, 25 bp, Artificial
  Probe
caatgacatttcacacacgcagtcg

SEQ ID NO: 194095 - DNA, 25 bp, Artificial
  Probe
gagggtcaccggtttggacttcatt

SEQ ID NO: 194096 - DNA, 25 bp, Artificial
  Probe
gtttggacttcattcccgggcttca

SEQ ID NO: 194097 - DNA, 25 bp, Artificial
  Probe
gccgcagacccgtggcctgcagaag

SEQ ID NO: 194098 - DNA, 25 bp, Artificial
  Probe
ggcagtctatcaacagatcctcacc

SEQ ID NO: 194099 - DNA, 25 bp, Artificial
  Probe
tcaagctgtgcctatccacaaagtc

SEQ ID NO: 194100 - DNA, 25 bp, Artificial
  Probe
tttggacttcattcccgggcttcac

SEQ ID NO: 194101 - DNA, 25 bp, Artificial
  Probe
tgaccacgctgctggaccctgcatt

SEQ ID NO: 194102 - DNA, 25 bp, Artificial
  Probe
agaactcattcttagaggcaaagca

SEQ ID NO: 194103 - DNA, 25 bp, Artificial
  Probe
cgtgccataggactcatcactgctt

SEQ ID NO: 194104 - DNA, 25 bp, Artificial
  Probe
ctgcgtgccataggactcatcactg

SEQ ID NO: 194105 - DNA, 25 bp, Artificial
  Probe
gccaagaactcattcttagaggcaa

SEQ ID NO: 194106 - DNA, 25 bp, Artificial
  Probe
ttcctgaatggtaatggtgactgtc

SEQ ID NO: 194107 - DNA, 25 bp, Artificial
  Probe
actcattcttagaggcaaagcagcc

SEQ ID NO: 194108 - DNA, 25 bp, Artificial
  Probe
cccaggtctgcgtgccataggactc

SEQ ID NO: 194109 - DNA, 25 bp, Artificial
  Probe
tctctgtgacaccacagctttgcct

SEQ ID NO: 194110 - DNA, 25 bp, Artificial
  Probe
tcacaccgtgtgcttgtattcctga

SEQ ID NO: 194111 - DNA, 25 bp, Artificial
  Probe
ctgcattgctgaaccccatgctgct

SEQ ID NO: 194112 - DNA, 25 bp, Artificial
  Probe
attcttagaggcaaagcagcccaag

SEQ ID NO: 194113 - DNA, 25 bp, Artificial
  Probe
tggaccctgcattgctgaaccccat

SEQ ID NO: 194114 - DNA, 25 bp, Artificial
  Probe
gtaatggtgactgtcactcaggaac

SEQ ID NO: 194115 - DNA, 25 bp, Artificial
  Probe
ctgctggaccctgcattgctgaacc

SEQ ID NO: 194116 - DNA, 25 bp, Artificial
  Probe
gtgccataggactcatcactgcttc

SEQ ID NO: 194117 - DNA, 25 bp, Artificial
  Probe
gaaccccatgctgctggaccctgtg

SEQ ID NO: 194118 - DNA, 25 bp, Artificial
  Probe
tgccataggactcatcactgcttcc

SEQ ID NO: 194119 - DNA, 25 bp, Artificial
  Probe
gaccacgctgctggaccctgcattg

SEQ ID NO: 194120 - DNA, 25 bp, Artificial
  Probe
gtctgcgtgccataggactcatcac

SEQ ID NO: 194121 - DNA, 25 bp, Artificial
  Probe
cacaccgtgtgcttgtattcctgaa

SEQ ID NO: 194122 - DNA, 25 bp, Artificial
  Probe
aagccagccaagaactcattcttag

SEQ ID NO: 194123 - DNA, 25 bp, Artificial
  Probe
ttcttagaggcaaagcagcccaagc

SEQ ID NO: 194124 - DNA, 25 bp, Artificial
  Probe
accgtgtgcttgtattcctgaatgg

SEQ ID NO: 194125 - DNA, 25 bp, Artificial
  Probe
cttagaggcaaagcagcccaagccc

SEQ ID NO: 194126 - DNA, 25 bp, Artificial
  Probe
gaactcattcttagaggcaaagcag

SEQ ID NO: 194127 - DNA, 25 bp, Artificial
  Probe
tcggcccaggtctgcgtgccatagg

SEQ ID NO: 194128 - DNA, 25 bp, Artificial
  Probe
tgctggaccctgcattgctgaaccc

SEQ ID NO: 194129 - DNA, 25 bp, Artificial
  Probe
atggtgactgtcactcaggaaccac

SEQ ID NO: 194130 - DNA, 25 bp, Artificial
  Probe
ccagccaagaactcattcttagagg

SEQ ID NO: 194131 - DNA, 25 bp, Artificial
  Probe
cgtgtgcttgtattcctgaatggta

SEQ ID NO: 194132 - DNA, 25 bp, Artificial
  Probe
ttagaggcaaagcagcccaagcccg

SEQ ID NO: 194133 - DNA, 25 bp, Artificial
  Probe
gccagccaagaactcattcttagag

SEQ ID NO: 194134 - DNA, 25 bp, Artificial
  Probe
cagccaagaactcattcttagaggc

SEQ ID NO: 194135 - DNA, 25 bp, Artificial
  Probe
ggaccctgcattgctgaaccccatg

SEQ ID NO: 194136 - DNA, 25 bp, Artificial
  Probe
ttgctgaaccccatgctgctggacc

SEQ ID NO: 194137 - DNA, 25 bp, Artificial
  Probe
cataggactcatcactgcttccctg

SEQ ID NO: 194138 - DNA, 25 bp, Artificial
  Probe
ccttctctgtgacaccacagctttg

SEQ ID NO: 194139 - DNA, 25 bp, Artificial
  Probe
tgaaccccatgctgctggaccctgt

SEQ ID NO: 194140 - DNA, 25 bp, Artificial
  Probe
caagaactcattcttagaggcaaag

SEQ ID NO: 194141 - DNA, 25 bp, Artificial
  Probe
gctgctggaccctgcattgctgaac

SEQ ID NO: 194142 - DNA, 25 bp, Artificial
  Probe
gtgactgtcactcaggaaccaccac

SEQ ID NO: 194143 - DNA, 25 bp, Artificial
  Probe
aatggtgactgtcactcaggaacca

SEQ ID NO: 194144 - DNA, 25 bp, Artificial
  Probe
taggactcatcactgcttccctgac

SEQ ID NO: 194145 - DNA, 25 bp, Artificial
  Probe
ggtctgcgtgccataggactcatca

SEQ ID NO: 194146 - DNA, 25 bp, Artificial
  Probe
taatggtgactgtcactcaggaacc

SEQ ID NO: 194147 - DNA, 25 bp, Artificial
  Probe
gaaggccatggttgccctcattgat

SEQ ID NO: 194148 - DNA, 25 bp, Artificial
  Probe
tgccctcattgatgtcttccatcag

SEQ ID NO: 194149 - DNA, 25 bp, Artificial
  Probe
acttcctggaggaaatcaaagagca

SEQ ID NO: 194150 - DNA, 25 bp, Artificial
  Probe
gccatggttgccctcattgatgtct

SEQ ID NO: 194151 - DNA, 25 bp, Artificial
  Probe
aaaggtgaccaggagcctccgggat

SEQ ID NO: 194152 - DNA, 25 bp, Artificial
  Probe
atggttgccctcattgatgtcttcc

SEQ ID NO: 194153 - DNA, 25 bp, Artificial
  Probe
gctggagaaggccatggttgccctc

SEQ ID NO: 194154 - DNA, 25 bp, Artificial
  Probe
ttgatgtcttccatcagtattcagg

SEQ ID NO: 194155 - DNA, 25 bp, Artificial
  Probe
ccatggttgccctcattgatgtctt

SEQ ID NO: 194156 - DNA, 25 bp, Artificial
  Probe
ctcacttcctggaggaaatcaaaga

SEQ ID NO: 194157 - DNA, 25 bp, Artificial
  Probe
ctctctcacttcctggaggaaatca

SEQ ID NO: 194158 - DNA, 25 bp, Artificial
  Probe
gccctcattgatgtcttccatcagt

SEQ ID NO: 194159 - DNA, 25 bp, Artificial
  Probe
agctctctcacttcctggaggaaat

SEQ ID NO: 194160 - DNA, 25 bp, Artificial
  Probe
gctctctcacttcctggaggaaatc

SEQ ID NO: 194161 - DNA, 25 bp, Artificial
  Probe
caagcacaagctgaagaagtcagaa

SEQ ID NO: 194162 - DNA, 25 bp, Artificial
  Probe
atgtcttccatcagtattcagggag

SEQ ID NO: 194163 - DNA, 25 bp, Artificial
  Probe
caacgagctctctcacttcctggag

SEQ ID NO: 194164 - DNA, 25 bp, Artificial
  Probe
attgatgtcttccatcagtattcag

SEQ ID NO: 194165 - DNA, 25 bp, Artificial
  Probe
aacgagctctctcacttcctggagg

SEQ ID NO: 194166 - DNA, 25 bp, Artificial
  Probe
acaacgagctctctcacttcctgga

SEQ ID NO: 194167 - DNA, 25 bp, Artificial
  Probe
tctctcacttcctggaggaaatcaa

SEQ ID NO: 194168 - DNA, 25 bp, Artificial
  Probe
gagaaggccatggttgccctcattg

SEQ ID NO: 194169 - DNA, 25 bp, Artificial
  Probe
agctcatcaacaacgagctctctca

SEQ ID NO: 194170 - DNA, 25 bp, Artificial
  Probe
tcacttcctggaggaaatcaaagag

SEQ ID NO: 194171 - DNA, 25 bp, Artificial
  Probe
aaggagctcatcaacaacgagctct

SEQ ID NO: 194172 - DNA, 25 bp, Artificial
  Probe
cgagctctctcacttcctggaggaa

SEQ ID NO: 194173 - DNA, 25 bp, Artificial
  Probe
agaaggccatggttgccctcattga

SEQ ID NO: 194174 - DNA, 25 bp, Artificial
  Probe
cctccgggatgtctgagctggagaa

SEQ ID NO: 194175 - DNA, 25 bp, Artificial
  Probe
gatgtcttccatcagtattcaggga

SEQ ID NO: 194176 - DNA, 25 bp, Artificial
  Probe
tgaccaggagcctccgggatgtctg

SEQ ID NO: 194177 - DNA, 25 bp, Artificial
  Probe
gagctctctcacttcctggaggaaa

SEQ ID NO: 194178 - DNA, 25 bp, Artificial
  Probe
ggagctcatcaacaacgagctctct

SEQ ID NO: 194179 - DNA, 25 bp, Artificial
  Probe
acgagctctctcacttcctggagga

SEQ ID NO: 194180 - DNA, 25 bp, Artificial
  Probe
ctctcacttcctggaggaaatcaaa

SEQ ID NO: 194181 - DNA, 25 bp, Artificial
  Probe
cattgatgtcttccatcagtattca

SEQ ID NO: 194182 - DNA, 25 bp, Artificial
  Probe
tctcacttcctggaggaaatcaaag

SEQ ID NO: 194183 - DNA, 25 bp, Artificial
  Probe
gttgccctcattgatgtcttccatc

SEQ ID NO: 194184 - DNA, 25 bp, Artificial
  Probe
tggttgccctcattgatgtcttcca

SEQ ID NO: 194185 - DNA, 25 bp, Artificial
  Probe
aaggccatggttgccctcattgatg

SEQ ID NO: 194186 - DNA, 25 bp, Artificial
  Probe
tgtcttccatcagtattcagggaga

SEQ ID NO: 194187 - DNA, 25 bp, Artificial
  Probe
tgatgtcttccatcagtattcaggg

SEQ ID NO: 194188 - DNA, 25 bp, Artificial
  Probe
aggagctcatcaacaacgagctctc

SEQ ID NO: 194189 - DNA, 25 bp, Artificial
  Probe
catggttgccctcattgatgtcttc

SEQ ID NO: 194190 - DNA, 25 bp, Artificial
  Probe
gagctcatcaacaacgagctctctc

SEQ ID NO: 194191 - DNA, 25 bp, Artificial
  Probe
ggttgccctcattgatgtcttccat

SEQ ID NO: 194192 - DNA, 25 bp, Artificial
  Probe
ttgccctcattgatgtcttccatca

SEQ ID NO: 194193 - DNA, 25 bp, Artificial
  Probe
gcatcgatgacctaacgggagaacc

SEQ ID NO: 194194 - DNA, 25 bp, Artificial
  Probe
aacctctgattcagcgtgaggacga

SEQ ID NO: 194195 - DNA, 25 bp, Artificial
  Probe
ctctgattcagcgtgaggacgacaa

SEQ ID NO: 194196 - DNA, 25 bp, Artificial
  Probe
agactgtgggcatcgatgacctaac

SEQ ID NO: 194197 - DNA, 25 bp, Artificial
  Probe
ttcagcgtgaggacgacaaaccaga

SEQ ID NO: 194198 - DNA, 25 bp, Artificial
  Probe
aacgggagaacctctgattcagcgt

SEQ ID NO: 194199 - DNA, 25 bp, Artificial
  Probe
gacctaacgggagaacctctgattc

SEQ ID NO: 194200 - DNA, 25 bp, Artificial
  Probe
tgacctaacgggagaacctctgatt

SEQ ID NO: 194201 - DNA, 25 bp, Artificial
  Probe
ggacgacaaaccagagacggtgatc

SEQ ID NO: 194202 - DNA, 25 bp, Artificial
  Probe
taacgggagaacctctgattcagcg

SEQ ID NO: 194203 - DNA, 25 bp, Artificial
  Probe
aagactgtgggcatcgatgacctaa

SEQ ID NO: 194204 - DNA, 25 bp, Artificial
  Probe
acgggagaacctctgattcagcgtg

SEQ ID NO: 194205 - DNA, 25 bp, Artificial
  Probe
acgacaaaccagagacggtgatcaa

SEQ ID NO: 194206 - DNA, 25 bp, Artificial
  Probe
catcgatgacctaacgggagaacct

SEQ ID NO: 194207 - DNA, 25 bp, Artificial
  Probe
gacgacaaaccagagacggtgatca

SEQ ID NO: 194208 - DNA, 25 bp, Artificial
  Probe
cctaacgggagaacctctgattcag

SEQ ID NO: 194209 - DNA, 25 bp, Artificial
  Probe
gacaaaccagagacggtgatcaaga

SEQ ID NO: 194210 - DNA, 25 bp, Artificial
  Probe
attcagcgtgaggacgacaaaccag

SEQ ID NO: 194211 - DNA, 25 bp, Artificial
  Probe
ctgattcagcgtgaggacgacaaac

SEQ ID NO: 194212 - DNA, 25 bp, Artificial
  Probe
gattcagcgtgaggacgacaaacca

SEQ ID NO: 194213 - DNA, 25 bp, Artificial
  Probe
aaagcgtatgaagcccagacagagc

SEQ ID NO: 194214 - DNA, 25 bp, Artificial
  Probe
gagaacctctgattcagcgtgagga

SEQ ID NO: 194215 - DNA, 25 bp, Artificial
  Probe
cctcccaagactgtgggcatcgatg

SEQ ID NO: 194216 - DNA, 25 bp, Artificial
  Probe
ctgtgggcatcgatgacctaacggg

SEQ ID NO: 194217 - DNA, 25 bp, Artificial
  Probe
agaacctctgattcagcgtgaggac

SEQ ID NO: 194218 - DNA, 25 bp, Artificial
  Probe
aaaccagagacggtgatcaagagat

SEQ ID NO: 194219 - DNA, 25 bp, Artificial
  Probe
tgggcatcgatgacctaacgggaga

SEQ ID NO: 194220 - DNA, 25 bp, Artificial
  Probe
atcgatgacctaacgggagaacctc

SEQ ID NO: 194221 - DNA, 25 bp, Artificial
  Probe
tgtgggcatcgatgacctaacggga

SEQ ID NO: 194222 - DNA, 25 bp, Artificial
  Probe
actgtgggcatcgatgacctaacgg

SEQ ID NO: 194223 - DNA, 25 bp, Artificial
  Probe
ggcatcgatgacctaacgggagaac

SEQ ID NO: 194224 - DNA, 25 bp, Artificial
  Probe
ggagaacctctgattcagcgtgagg

SEQ ID NO: 194225 - DNA, 25 bp, Artificial
  Probe
gactgtgggcatcgatgacctaacg

SEQ ID NO: 194226 - DNA, 25 bp, Artificial
  Probe
ctaacgggagaacctctgattcagc

SEQ ID NO: 194227 - DNA, 25 bp, Artificial
  Probe
aaccagagacggtgatcaagagatt

SEQ ID NO: 194228 - DNA, 25 bp, Artificial
  Probe
gggcatcgatgacctaacgggagaa

SEQ ID NO: 194229 - DNA, 25 bp, Artificial
  Probe
tgattcagcgtgaggacgacaaacc

SEQ ID NO: 194230 - DNA, 25 bp, Artificial
  Probe
acaaaccagagacggtgatcaagag

SEQ ID NO: 194231 - DNA, 25 bp, Artificial
  Probe
ctcccaagactgtgggcatcgatga

SEQ ID NO: 194232 - DNA, 25 bp, Artificial
  Probe
acctaacgggagaacctctgattca

SEQ ID NO: 194233 - DNA, 25 bp, Artificial
  Probe
gaacctctgattcagcgtgaggacg

SEQ ID NO: 194234 - DNA, 25 bp, Artificial
  Probe
gggagaacctctgattcagcgtgag

SEQ ID NO: 194235 - DNA, 25 bp, Artificial
  Probe
accagagacggtgatcaagagattg

SEQ ID NO: 194236 - DNA, 25 bp, Artificial
  Probe
cgggagaacctctgattcagcgtga

SEQ ID NO: 194237 - DNA, 25 bp, Artificial
  Probe
tctgattcagcgtgaggacgacaaa

SEQ ID NO: 194238 - DNA, 25 bp, Artificial
  Probe
cgacaaaccagagacggtgatcaag

SEQ ID NO: 194239 - DNA, 25 bp, Artificial
  Probe
gctcgccatgatgctcaacactacg

SEQ ID NO: 194240 - DNA, 25 bp, Artificial
  Probe
tacgctctctgcttgcttcctgagc

SEQ ID NO: 194241 - DNA, 25 bp, Artificial
  Probe
gggccacatccgacatggagctgag

SEQ ID NO: 194242 - DNA, 25 bp, Artificial
  Probe
agaactgcccaagaggaggcaagag

SEQ ID NO: 194243 - DNA, 25 bp, Artificial
  Probe
tgctcgccatgatgctcaacactac

SEQ ID NO: 194244 - DNA, 25 bp, Artificial
  Probe
ccacatccgacatggagctgagaca

SEQ ID NO: 194245 - DNA, 25 bp, Artificial
  Probe
agctgagacagtgtctcccctgcgg

SEQ ID NO: 194246 - DNA, 25 bp, Artificial
  Probe
ctctgcttgcttcctgagcctgctg

SEQ ID NO: 194247 - DNA, 25 bp, Artificial
  Probe
ctacgctctctgcttgcttcctgag

SEQ ID NO: 194248 - DNA, 25 bp, Artificial
  Probe
ctgagacagtgtctcccctgcggcc

SEQ ID NO: 194249 - DNA, 25 bp, Artificial
  Probe
caagagggccacatccgacatggag

SEQ ID NO: 194250 - DNA, 25 bp, Artificial
  Probe
atgctcgccatgatgctcaacacta

SEQ ID NO: 194251 - DNA, 25 bp, Artificial
  Probe
agtgcccacctatgctcgccatgat

SEQ ID NO: 194252 - DNA, 25 bp, Artificial
  Probe
acttccagaactgcccaagaggagg

SEQ ID NO: 194253 - DNA, 25 bp, Artificial
  Probe
tcgccatgatgctcaacactacgct

SEQ ID NO: 194254 - DNA, 25 bp, Artificial
  Probe
gctacttccagaactgcccaagagg

SEQ ID NO: 194255 - DNA, 25 bp, Artificial
  Probe
ggcaagagggccacatccgacatgg

SEQ ID NO: 194256 - DNA, 25 bp, Artificial
  Probe
tctctgcttgcttcctgagcctgct

SEQ ID NO: 194257 - DNA, 25 bp, Artificial
  Probe
tgatgctcaacactacgctctctgc

SEQ ID NO: 194258 - DNA, 25 bp, Artificial
  Probe
gccatgatgctcaacactacgctct

SEQ ID NO: 194259 - DNA, 25 bp, Artificial
  Probe
ctgctacttccagaactgcccaaga

SEQ ID NO: 194260 - DNA, 25 bp, Artificial
  Probe
atccgacatggagctgagacagtgt

SEQ ID NO: 194261 - DNA, 25 bp, Artificial
  Probe
cccaagaggaggcaagagggccaca

SEQ ID NO: 194262 - DNA, 25 bp, Artificial
  Probe
ccagaactgcccaagaggaggcaag

SEQ ID NO: 194263 - DNA, 25 bp, Artificial
  Probe
aggcaagagggccacatccgacatg

SEQ ID NO: 194264 - DNA, 25 bp, Artificial
  Probe
gtgcccacctatgctcgccatgatg

SEQ ID NO: 194265 - DNA, 25 bp, Artificial
  Probe
cagaactgcccaagaggaggcaaga

SEQ ID NO: 194266 - DNA, 25 bp, Artificial
  Probe
ggccacatccgacatggagctgaga

SEQ ID NO: 194267 - DNA, 25 bp, Artificial
  Probe
gccacatccgacatggagctgagac

SEQ ID NO: 194268 - DNA, 25 bp, Artificial
  Probe
gcaagagggccacatccgacatgga

SEQ ID NO: 194269 - DNA, 25 bp, Artificial
  Probe
catccgacatggagctgagacagtg

SEQ ID NO: 194270 - DNA, 25 bp, Artificial
  Probe
cctatgctcgccatgatgctcaaca

SEQ ID NO: 194271 - DNA, 25 bp, Artificial
  Probe
ctacttccagaactgcccaagagga

SEQ ID NO: 194272 - DNA, 25 bp, Artificial
  Probe
gctgagacagtgtctcccctgcggc

SEQ ID NO: 194273 - DNA, 25 bp, Artificial
  Probe
acatccgacatggagctgagacagt

SEQ ID NO: 194274 - DNA, 25 bp, Artificial
  Probe
gatgctcaacactacgctctctgct

SEQ ID NO: 194275 - DNA, 25 bp, Artificial
  Probe
tgctacttccagaactgcccaagag

SEQ ID NO: 194276 - DNA, 25 bp, Artificial
  Probe
tatgctcgccatgatgctcaacact

SEQ ID NO: 194277 - DNA, 25 bp, Artificial
  Probe
gctctctgcttgcttcctgagcctg

SEQ ID NO: 194278 - DNA, 25 bp, Artificial
  Probe
aagagggccacatccgacatggagc

SEQ ID NO: 194279 - DNA, 25 bp, Artificial
  Probe
tacttccagaactgcccaagaggag

SEQ ID NO: 194280 - DNA, 25 bp, Artificial
  Probe
gagcctgctggccctcacctctgcc

SEQ ID NO: 194281 - DNA, 25 bp, Artificial
  Probe
ctatgctcgccatgatgctcaacac

SEQ ID NO: 194282 - DNA, 25 bp, Artificial
  Probe
atgatgctcaacactacgctctctg

SEQ ID NO: 194283 - DNA, 25 bp, Artificial
  Probe
actacgctctctgcttgcttcctga

SEQ ID NO: 194284 - DNA, 25 bp, Artificial
  Probe
cacatccgacatggagctgagacag

SEQ ID NO: 194285 - DNA, 25 bp, Artificial
  Probe
atcagctatttactgccaaagggaa

SEQ ID NO: 194286 - DNA, 25 bp, Artificial
  Probe
ggccacaagtgaggtcagcagacct

SEQ ID NO: 194287 - DNA, 25 bp, Artificial
  Probe
tgccccaaacaaatatgaaaaggtt

SEQ ID NO: 194288 - DNA, 25 bp, Artificial
  Probe
tacctgggccacaagtgaggtcagc

SEQ ID NO: 194289 - DNA, 25 bp, Artificial
  Probe
gccacaagtgaggtcagcagacctg

SEQ ID NO: 194290 - DNA, 25 bp, Artificial
  Probe
aatcagctatttactgccaaaggga

SEQ ID NO: 194291 - DNA, 25 bp, Artificial
  Probe
tgggccacaagtgaggtcagcagac

SEQ ID NO: 194292 - DNA, 25 bp, Artificial
  Probe
ccacaagtgaggtcagcagacctgc

SEQ ID NO: 194293 - DNA, 25 bp, Artificial
  Probe
caaatcagctatttactgccaaagg

SEQ ID NO: 194294 - DNA, 25 bp, Artificial
  Probe
cattatcaaggatggaccatgaaac

SEQ ID NO: 194295 - DNA, 25 bp, Artificial
  Probe
acacacacattcaggcaaatggtca

SEQ ID NO: 194296 - DNA, 25 bp, Artificial
  Probe
cacattcaggcaaatggtcaaatca

SEQ ID NO: 194297 - DNA, 25 bp, Artificial
  Probe
ctgccccaaacaaatatgaaaaggt

SEQ ID NO: 194298 - DNA, 25 bp, Artificial
  Probe
atggtcaaatcagctatttactgcc

SEQ ID NO: 194299 - DNA, 25 bp, Artificial
  Probe
atacctgggccacaagtgaggtcag

SEQ ID NO: 194300 - DNA, 25 bp, Artificial
  Probe
tgggtgcatacctgggccacaagtg

SEQ ID NO: 194301 - DNA, 25 bp, Artificial
  Probe
tatgcattatcaaggatggaccatg

SEQ ID NO: 194302 - DNA, 25 bp, Artificial
  Probe
ctgggccacaagtgaggtcagcaga

SEQ ID NO: 194303 - DNA, 25 bp, Artificial
  Probe
gggccacaagtgaggtcagcagacc

SEQ ID NO: 194304 - DNA, 25 bp, Artificial
  Probe
aatatgcattatcaaggatggacca

SEQ ID NO: 194305 - DNA, 25 bp, Artificial
  Probe
cacacacattcaggcaaatggtcaa

SEQ ID NO: 194306 - DNA, 25 bp, Artificial
  Probe
ctatttactgccaaagggaaatatt

SEQ ID NO: 194307 - DNA, 25 bp, Artificial
  Probe
ttatcaaggatggaccatgaaacaa

SEQ ID NO: 194308 - DNA, 25 bp, Artificial
  Probe
cctgccccaaacaaatatgaaaagg

SEQ ID NO: 194309 - DNA, 25 bp, Artificial
  Probe
acctgggccacaagtgaggtcagca

SEQ ID NO: 194310 - DNA, 25 bp, Artificial
  Probe
cacacacacattcaggcaaatggtc

SEQ ID NO: 194311 - DNA, 25 bp, Artificial
  Probe
aatggtcaaatcagctatttactgc

SEQ ID NO: 194312 - DNA, 25 bp, Artificial
  Probe
aattaatatgcattatcaaggatgg

SEQ ID NO: 194313 - DNA, 25 bp, Artificial
  Probe
catacctgggccacaagtgaggtca

SEQ ID NO: 194314 - DNA, 25 bp, Artificial
  Probe
aaatcagctatttactgccaaaggg

SEQ ID NO: 194315 - DNA, 25 bp, Artificial
  Probe
ctgggtgcatacctgggccacaagt

SEQ ID NO: 194316 - DNA, 25 bp, Artificial
  Probe
cattcaggcaaatggtcaaatcagc

SEQ ID NO: 194317 - DNA, 25 bp, Artificial
  Probe
ggtcaaatcagctatttactgccaa

SEQ ID NO: 194318 - DNA, 25 bp, Artificial
  Probe
aagtgaggtcagcagacctgcccca

SEQ ID NO: 194319 - DNA, 25 bp, Artificial
  Probe
atatgcattatcaaggatggaccat

SEQ ID NO: 194320 - DNA, 25 bp, Artificial
  Probe
ttttaaagcagaacacacacacaca

SEQ ID NO: 194321 - DNA, 25 bp, Artificial
  Probe
ttcactaaagcagtagaaattaata

SEQ ID NO: 194322 - DNA, 25 bp, Artificial
  Probe
tcagctatttactgccaaagggaaa

SEQ ID NO: 194323 - DNA, 25 bp, Artificial
  Probe
acacattcaggcaaatggtcaaatc

SEQ ID NO: 194324 - DNA, 25 bp, Artificial
  Probe
caaatggtcaaatcagctatttact

SEQ ID NO: 194325 - DNA, 25 bp, Artificial
  Probe
attatcaaggatggaccatgaaaca

SEQ ID NO: 194326 - DNA, 25 bp, Artificial
  Probe
cctgggccacaagtgaggtcagcag

SEQ ID NO: 194327 - DNA, 25 bp, Artificial
  Probe
acattcaggcaaatggtcaaatcag

SEQ ID NO: 194328 - DNA, 25 bp, Artificial
  Probe
ttaatatgcattatcaaggatggac

SEQ ID NO: 194329 - DNA, 25 bp, Artificial
  Probe
aaaggttcactaaagcagtagaaat

SEQ ID NO: 194330 - DNA, 25 bp, Artificial
  Probe
tttttttaaagcagaacacacacac

SEQ ID NO: 194331 - DNA, 25 bp, Artificial
  Probe
cgccttggcaaaagacaggaccaaa

SEQ ID NO: 194332 - DNA, 25 bp, Artificial
  Probe
tctttccctctgctgaaggccttca

SEQ ID NO: 194333 - DNA, 25 bp, Artificial
  Probe
gccaagaccgccttggcaaaagaca

SEQ ID NO: 194334 - DNA, 25 bp, Artificial
  Probe
agctgacccgggtagacatccacct

SEQ ID NO: 194335 - DNA, 25 bp, Artificial
  Probe
cagaatggagtgcatccggtggctc

SEQ ID NO: 194336 - DNA, 25 bp, Artificial
  Probe
gagtttgatgccagccttctgacct

SEQ ID NO: 194337 - DNA, 25 bp, Artificial
  Probe
cacctgctggaacttctcctctatg

SEQ ID NO: 194338 - DNA, 25 bp, Artificial
  Probe
tccggtggctcctcgctgcagcagg

SEQ ID NO: 194339 - DNA, 25 bp, Artificial
  Probe
gagtgcatccggtggctcctcgctg

SEQ ID NO: 194340 - DNA, 25 bp, Artificial
  Probe
aattggtaatatgtcccccagacca

SEQ ID NO: 194341 - DNA, 25 bp, Artificial
  Probe
gaatttgatgtttgaccaagtgccc

SEQ ID NO: 194342 - DNA, 25 bp, Artificial
  Probe
tgctgaaggccttcaagagcagaat

SEQ ID NO: 194343 - DNA, 25 bp, Artificial
  Probe
cctcgctgcagcaggagtggagttt

SEQ ID NO: 194344 - DNA, 25 bp, Artificial
  Probe
aagtccagaagacttggaaaagcta

SEQ ID NO: 194345 - DNA, 25 bp, Artificial
  Probe
tcactacttcaatgcccggggcaga

SEQ ID NO: 194346 - DNA, 25 bp, Artificial
  Probe
tgttgaagagccatggccaagacta

SEQ ID NO: 194347 - DNA, 25 bp, Artificial
  Probe
atccggtggctcctcgctgcagcag

SEQ ID NO: 194348 - DNA, 25 bp, Artificial
  Probe
gattttcaagttttagcggagctgc

SEQ ID NO: 194349 - DNA, 25 bp, Artificial
  Probe
agattgacgggatgaagctggcaca

SEQ ID NO: 194350 - DNA, 25 bp, Artificial
  Probe
ccggtacttgcctgcctttgaaaag

SEQ ID NO: 194351 - DNA, 25 bp, Artificial
  Probe
cgctagacagtgaagcacagttgct

SEQ ID NO: 194352 - DNA, 25 bp, Artificial
  Probe
aaagcttcccatggatgcaaaacaa

SEQ ID NO: 194353 - DNA, 25 bp, Artificial
  Probe
tccccaatgtgaagaagttcctgca

SEQ ID NO: 194354 - DNA, 25 bp, Artificial
  Probe
ttcaagagcagaatcagcagcctcc

SEQ ID NO: 194355 - DNA, 25 bp, Artificial
  Probe
atgtgaagaagttcctgcagcctgg

SEQ ID NO: 194356 - DNA, 25 bp, Artificial
  Probe
ccctgattgacatgtacaccgaagg

SEQ ID NO: 194357 - DNA, 25 bp, Artificial
  Probe
caagtgcccatggtggagattgacg

SEQ ID NO: 194358 - DNA, 25 bp, Artificial
  Probe
cctctatgggaaggacatgaaggag

SEQ ID NO: 194359 - DNA, 25 bp, Artificial
  Probe
tcgccaccaaatatgacctctatgg

SEQ ID NO: 194360 - DNA, 25 bp, Artificial
  Probe
attggtaatatgtcccccagaccaa

SEQ ID NO: 194361 - DNA, 25 bp, Artificial
  Probe
tccctctgctgaaggccttcaagag

SEQ ID NO: 194362 - DNA, 25 bp, Artificial
  Probe
gttcctgcagcctggcagtcagaga

SEQ ID NO: 194363 - DNA, 25 bp, Artificial
  Probe
aagtttatacaaagtccagaagact

SEQ ID NO: 194364 - DNA, 25 bp, Artificial
  Probe
ggtaacaagctgacccgggtagaca

SEQ ID NO: 194365 - DNA, 25 bp, Artificial
  Probe
ggcacagaccagagccattctcaac

SEQ ID NO: 194366 - DNA, 25 bp, Artificial
  Probe
tcctcgctgcagcaggagtggagtt

SEQ ID NO: 194367 - DNA, 25 bp, Artificial
  Probe
acagtgaagcacagttgctgctatg

SEQ ID NO: 194368 - DNA, 25 bp, Artificial
  Probe
ctccccaatgtgaagaagttcctgc

SEQ ID NO: 194369 - DNA, 25 bp, Artificial
  Probe
cctgcctttgaaaaggtgttgaaga

SEQ ID NO: 194370 - DNA, 25 bp, Artificial
  Probe
ctctatgttgaagagtttgatgcca

SEQ ID NO: 194371 - DNA, 25 bp, Artificial
  Probe
tgatgccagccttctgacctctttc

SEQ ID NO: 194372 - DNA, 25 bp, Artificial
  Probe
agtcagagaaagcttcccatggatg

SEQ ID NO: 194373 - DNA, 25 bp, Artificial
  Probe
gcctggcagtcagagaaagcttccc

SEQ ID NO: 194374 - DNA, 25 bp, Artificial
  Probe
gatgaagctggcacagaccagagcc

SEQ ID NO: 194375 - DNA, 25 bp, Artificial
  Probe
gtagacatccacctgctggaacttc

SEQ ID NO: 194376 - DNA, 25 bp, Artificial
  Probe
aggagagagccctgattgacatgta

SEQ ID NO: 194377 - DNA, 25 bp, Artificial
  Probe
gaggtctgccctgaactcagtctcc

SEQ ID NO: 194378 - DNA, 25 bp, Artificial
  Probe
acactgtctcagtgccagcctgttc

SEQ ID NO: 194379 - DNA, 25 bp, Artificial
  Probe
caacacctatattttcgaagttggc

SEQ ID NO: 194380 - DNA, 25 bp, Artificial
  Probe
ccccaaatgtaacactgtctcagtg

SEQ ID NO: 194381 - DNA, 25 bp, Artificial
  Probe
cacctatattttcgaagttggccca

SEQ ID NO: 194382 - DNA, 25 bp, Artificial
  Probe
cttttctgtgatttgaggtctgccc

SEQ ID NO: 194383 - DNA, 25 bp, Artificial
  Probe
tgctacactggcactcacagggagg

SEQ ID NO: 194384 - DNA, 25 bp, Artificial
  Probe
cacagcgccagaaccatgcctatga

SEQ ID NO: 194385 - DNA, 25 bp, Artificial
  Probe
gcactgtggttctctctccttcctg

SEQ ID NO: 194386 - DNA, 25 bp, Artificial
  Probe
cctcacagtccttttctgtgatttg

SEQ ID NO: 194387 - DNA, 25 bp, Artificial
  Probe
cttctgcactgtggttctctctcct

SEQ ID NO: 194388 - DNA, 25 bp, Artificial
  Probe
gcgccagaaccatgcctatgatact

SEQ ID NO: 194389 - DNA, 25 bp, Artificial
  Probe
acagtccttttctgtgatttgaggt

SEQ ID NO: 194390 - DNA, 25 bp, Artificial
  Probe
tcagtgccagcctgttcctggtggg

SEQ ID NO: 194391 - DNA, 25 bp, Artificial
  Probe
actggcactcacagggaggacctgt

SEQ ID NO: 194392 - DNA, 25 bp, Artificial
  Probe
tgatttgaggtctgccctgaactca

SEQ ID NO: 194393 - DNA, 25 bp, Artificial
  Probe
tggcccaatggagtaacaagtaggc

SEQ ID NO: 194394 - DNA, 25 bp, Artificial
  Probe
tctgcactgtggttctctctccttc

SEQ ID NO: 194395 - DNA, 25 bp, Artificial
  Probe
ggcaccctggccttctgcactgtgg

SEQ ID NO: 194396 - DNA, 25 bp, Artificial
  Probe
cgaagttggcccaatggagtaacaa

SEQ ID NO: 194397 - DNA, 25 bp, Artificial
  Probe
tgccccaggcctgtctcatctttaa

SEQ ID NO: 194398 - DNA, 25 bp, Artificial
  Probe
acaagtaggcccttgctacactggc

SEQ ID NO: 194399 - DNA, 25 bp, Artificial
  Probe
cctatattttcgaagttggcccaat

SEQ ID NO: 194400 - DNA, 25 bp, Artificial
  Probe
tgaggtctgccctgaactcagtctc

SEQ ID NO: 194401 - DNA, 25 bp, Artificial
  Probe
attggatcctgcaggcaccctggcc

SEQ ID NO: 194402 - DNA, 25 bp, Artificial
  Probe
tcaacacctatattttcgaagttgg

SEQ ID NO: 194403 - DNA, 25 bp, Artificial
  Probe
actcacagggaggacctgtccacat

SEQ ID NO: 194404 - DNA, 25 bp, Artificial
  Probe
agtccttttctgtgatttgaggtct

SEQ ID NO: 194405 - DNA, 25 bp, Artificial
  Probe
ggacctgtccacattggatcctgca

SEQ ID NO: 194406 - DNA, 25 bp, Artificial
  Probe
aagttggcccaatggagtaacaagt

SEQ ID NO: 194407 - DNA, 25 bp, Artificial
  Probe
cacattggatcctgcaggcaccctg

SEQ ID NO: 194408 - DNA, 25 bp, Artificial
  Probe
tgtctcagtgccagcctgttcctgg

SEQ ID NO: 194409 - DNA, 25 bp, Artificial
  Probe
actgtggttctctctccttcctgct

SEQ ID NO: 194410 - DNA, 25 bp, Artificial
  Probe
cacagggaggacctgtccacattgg

SEQ ID NO: 194411 - DNA, 25 bp, Artificial
  Probe
gttggcccaatggagtaacaagtag

SEQ ID NO: 194412 - DNA, 25 bp, Artificial
  Probe
tagtggtccccttctttattgacac

SEQ ID NO: 194413 - DNA, 25 bp, Artificial
  Probe
gcactcacagggaggacctgtccac

SEQ ID NO: 194414 - DNA, 25 bp, Artificial
  Probe
tgcactgtggttctctctccttcct

SEQ ID NO: 194415 - DNA, 25 bp, Artificial
  Probe
tattttcgaagttggcccaatggag

SEQ ID NO: 194416 - DNA, 25 bp, Artificial
  Probe
gggaggacctgtccacattggatcc

SEQ ID NO: 194417 - DNA, 25 bp, Artificial
  Probe
acctgtccacattggatcctgcagg

SEQ ID NO: 194418 - DNA, 25 bp, Artificial
  Probe
taggcccttgctacactggcactca

SEQ ID NO: 194419 - DNA, 25 bp, Artificial
  Probe
atagtggtccccttctttattgaca

SEQ ID NO: 194420 - DNA, 25 bp, Artificial
  Probe
gtggtccccttctttattgacacct

SEQ ID NO: 194421 - DNA, 25 bp, Artificial
  Probe
gccttctgcactgtggttctctctc

SEQ ID NO: 194422 - DNA, 25 bp, Artificial
  Probe
tgagaagaccacagcgccagaacca

SEQ ID NO: 194423 - DNA, 25 bp, Artificial
  Probe
aggttcggaccatgcggatgcacct

SEQ ID NO: 194424 - DNA, 25 bp, Artificial
  Probe
tgctttgggcggtcatgtccacagc

SEQ ID NO: 194425 - DNA, 25 bp, Artificial
  Probe
cggaccatgcggatgcacctgttca

SEQ ID NO: 194426 - DNA, 25 bp, Artificial
  Probe
gcacctgttcactgccttgcagctg

SEQ ID NO: 194427 - DNA, 25 bp, Artificial
  Probe
tggtcattggggacctactgcggca

SEQ ID NO: 194428 - DNA, 25 bp, Artificial
  Probe
ctgttcactgccttgcagctgctct

SEQ ID NO: 194429 - DNA, 25 bp, Artificial
  Probe
gtacttacccggatcttcactgagc

SEQ ID NO: 194430 - DNA, 25 bp, Artificial
  Probe
cttatacatgggagttacttccctt

SEQ ID NO: 194431 - DNA, 25 bp, Artificial
  Probe
tactgcggcagatccccctggctgt

SEQ ID NO: 194432 - DNA, 25 bp, Artificial
  Probe
tggccctgcttgtgggactctccat

SEQ ID NO: 194433 - DNA, 25 bp, Artificial
  Probe
cctgcttgtgggactctccatggtc

SEQ ID NO: 194434 - DNA, 25 bp, Artificial
  Probe
ggtcatgtccacagctgcttccctg

SEQ ID NO: 194435 - DNA, 25 bp, Artificial
  Probe
gagttacttcccttaatgggatcca

SEQ ID NO: 194436 - DNA, 25 bp, Artificial
  Probe
ttctacgagcggttgcacctgctac

SEQ ID NO: 194437 - DNA, 25 bp, Artificial
  Probe
ggcggtcatgtccacagctgcttcc

SEQ ID NO: 194438 - DNA, 25 bp, Artificial
  Probe
ctccatggtcattggggacctactg

SEQ ID NO: 194439 - DNA, 25 bp, Artificial
  Probe
tacatgggagttacttcccttaatg

SEQ ID NO: 194440 - DNA, 25 bp, Artificial
  Probe
catgggagttacttcccttaatggg

SEQ ID NO: 194441 - DNA, 25 bp, Artificial
  Probe
tcatcctcacagtgcctttgcgcat

SEQ ID NO: 194442 - DNA, 25 bp, Artificial
  Probe
gggactctccatggtcattggggac

SEQ ID NO: 194443 - DNA, 25 bp, Artificial
  Probe
tccaattctacgagcggttgcacct

SEQ ID NO: 194444 - DNA, 25 bp, Artificial
  Probe
atccaattctacgagcggttgcacc

SEQ ID NO: 194445 - DNA, 25 bp, Artificial
  Probe
gggatccaattctacgagcggttgc

SEQ ID NO: 194446 - DNA, 25 bp, Artificial
  Probe
tcacagtgcctttgcgcatggtggt

SEQ ID NO: 194447 - DNA, 25 bp, Artificial
  Probe
ttgcgcatggtggtacttacccgga

SEQ ID NO: 194448 - DNA, 25 bp, Artificial
  Probe
gcagctgctctgtctggccctgctt

SEQ ID NO: 194449 - DNA, 25 bp, Artificial
  Probe
gcggttgcacctgctactcatgccg

SEQ ID NO: 194450 - DNA, 25 bp, Artificial
  Probe
agaaggttcggaccatgcggatgca

SEQ ID NO: 194451 - DNA, 25 bp, Artificial
  Probe
gtcattggggacctactgcggcaga

SEQ ID NO: 194452 - DNA, 25 bp, Artificial
  Probe
ctggccctgctttgggcggtcatgt

SEQ ID NO: 194453 - DNA, 25 bp, Artificial
  Probe
ttggggacctactgcggcagatccc

SEQ ID NO: 194454 - DNA, 25 bp, Artificial
  Probe
ctatgtcaagaaggttcggaccatg

SEQ ID NO: 194455 - DNA, 25 bp, Artificial
  Probe
tgccttgcagctgctctgtctggcc

SEQ ID NO: 194456 - DNA, 25 bp, Artificial
  Probe
atggtggtacttacccggatcttca

SEQ ID NO: 194457 - DNA, 25 bp, Artificial
  Probe
cctcacagtgcctttgcgcatggtg

SEQ ID NO: 194458 - DNA, 25 bp, Artificial
  Probe
cattttcttatacatgggagttact

SEQ ID NO: 194459 - DNA, 25 bp, Artificial
  Probe
ttatacatgggagttacttccctta

SEQ ID NO: 194460 - DNA, 25 bp, Artificial
  Probe
gtgcctttgcgcatggtggtactta

SEQ ID NO: 194461 - DNA, 25 bp, Artificial
  Probe
cgcatggtggtacttacccggatct

SEQ ID NO: 194462 - DNA, 25 bp, Artificial
  Probe
cttgcagctgctctgtctggccctg

SEQ ID NO: 194463 - DNA, 25 bp, Artificial
  Probe
gatgttacctatgtcaagaaggttc

SEQ ID NO: 194464 - DNA, 25 bp, Artificial
  Probe
gttacttcccttaatgggatccaat

SEQ ID NO: 194465 - DNA, 25 bp, Artificial
  Probe
tcccttaatgggatccaattctacg

SEQ ID NO: 194466 - DNA, 25 bp, Artificial
  Probe
accatgcggatgcacctgttcactg

SEQ ID NO: 194467 - DNA, 25 bp, Artificial
  Probe
gtcatgtccacagctgcttccctgg

SEQ ID NO: 194468 - DNA, 25 bp, Artificial
  Probe
gtctggccctgctttgggcggtcat

SEQ ID NO: 194469 - DNA, 25 bp, Artificial
  Probe
aatacacaaggctgtaccactgcag

SEQ ID NO: 194470 - DNA, 25 bp, Artificial
  Probe
ggaaatgctggaagccgcttggctt

SEQ ID NO: 194471 - DNA, 25 bp, Artificial
  Probe
ctctaagaaacatggcggtccagcg

SEQ ID NO: 194472 - DNA, 25 bp, Artificial
  Probe
acggtccggtgcagggcgtcattca

SEQ ID NO: 194473 - DNA, 25 bp, Artificial
  Probe
gggacaatacacaaggctgtaccac

SEQ ID NO: 194474 - DNA, 25 bp, Artificial
  Probe
tccattgaagatcgtgtgatctcac

SEQ ID NO: 194475 - DNA, 25 bp, Artificial
  Probe
ttttgctctcccaggttccgaggcc

SEQ ID NO: 194476 - DNA, 25 bp, Artificial
  Probe
ggtccacgagaaacaagatgacttg

SEQ ID NO: 194477 - DNA, 25 bp, Artificial
  Probe
tgtcaggacagattacaggattaac

SEQ ID NO: 194478 - DNA, 25 bp, Artificial
  Probe
gtaccactgcaggacctcattttaa

SEQ ID NO: 194479 - DNA, 25 bp, Artificial
  Probe
tggtctgagtctcagactcatctgc

SEQ ID NO: 194480 - DNA, 25 bp, Artificial
  Probe
cagttgtggtgtcaggacagattac

SEQ ID NO: 194481 - DNA, 25 bp, Artificial
  Probe
accttcgtttcctgcggcggcttct

SEQ ID NO: 194482 - DNA, 25 bp, Artificial
  Probe
acttcgagcagaaggcaagcggtga

SEQ ID NO: 194483 - DNA, 25 bp, Artificial
  Probe
tgcccaataaacattccctatgtgg

SEQ ID NO: 194484 - DNA, 25 bp, Artificial
  Probe
ttgggattgcccaataaacattccc

SEQ ID NO: 194485 - DNA, 25 bp, Artificial
  Probe
cttgtggtgtgattgggattgccca

SEQ ID NO: 194486 - DNA, 25 bp, Artificial
  Probe
gaaacatggcggtccagcggatgaa

SEQ ID NO: 194487 - DNA, 25 bp, Artificial
  Probe
caagcggtgaaccagttgtggtgtc

SEQ ID NO: 194488 - DNA, 25 bp, Artificial
  Probe
gcccaataaacattccctatgtggt

SEQ ID NO: 194489 - DNA, 25 bp, Artificial
  Probe
tttgctctcccaggttccgaggccg

SEQ ID NO: 194490 - DNA, 25 bp, Artificial
  Probe
aatcctcactctaagaaacatggcg

SEQ ID NO: 194491 - DNA, 25 bp, Artificial
  Probe
ctgcggcggcttctgtcgtctcctt

SEQ ID NO: 194492 - DNA, 25 bp, Artificial
  Probe
taaacattccctatgtggtctgagt

SEQ ID NO: 194493 - DNA, 25 bp, Artificial
  Probe
aagccgcttggcttgtggtgtgatt

SEQ ID NO: 194494 - DNA, 25 bp, Artificial
  Probe
gacggtgtggccaatgtgtccattg

SEQ ID NO: 194495 - DNA, 25 bp, Artificial
  Probe
taactgaaggcgagcatgggttcca

SEQ ID NO: 194496 - DNA, 25 bp, Artificial
  Probe
cgagcagaaggcaagcggtgaacca

SEQ ID NO: 194497 - DNA, 25 bp, Artificial
  Probe
tatgtggtctgagtctcagactcat

SEQ ID NO: 194498 - DNA, 25 bp, Artificial
  Probe
tctcccggggaagcatggcgatgaa

SEQ ID NO: 194499 - DNA, 25 bp, Artificial
  Probe
tgaaggcgagcatgggttccatgtc

SEQ ID NO: 194500 - DNA, 25 bp, Artificial
  Probe
gtcgtctccttgctttttgctctcc

SEQ ID NO: 194501 - DNA, 25 bp, Artificial
  Probe
tgctttttgctctcccaggttccga

SEQ ID NO: 194502 - DNA, 25 bp, Artificial
  Probe
aagcggtgaaccagttgtggtgtca

SEQ ID NO: 194503 - DNA, 25 bp, Artificial
  Probe
gcggcttctgtcgtctccttgcttt

SEQ ID NO: 194504 - DNA, 25 bp, Artificial
  Probe
ggacaatacacaaggctgtaccact

SEQ ID NO: 194505 - DNA, 25 bp, Artificial
  Probe
gggattgcccaataaacattcccta

SEQ ID NO: 194506 - DNA, 25 bp, Artificial
  Probe
aacatggcggtccagcggatgaaga

SEQ ID NO: 194507 - DNA, 25 bp, Artificial
  Probe
ttgaagatcgtgtgatctcactctc

SEQ ID NO: 194508 - DNA, 25 bp, Artificial
  Probe
actggaaatgctggaagccgcttgg

SEQ ID NO: 194509 - DNA, 25 bp, Artificial
  Probe
gtgaaccagttgtggtgtcaggaca

SEQ ID NO: 194510 - DNA, 25 bp, Artificial
  Probe
gcgagcatgggttccatgtccatca

SEQ ID NO: 194511 - DNA, 25 bp, Artificial
  Probe
tgtccatcaatatggggacaataca

SEQ ID NO: 194512 - DNA, 25 bp, Artificial
  Probe
gcattccatcattggccgtactatg

SEQ ID NO: 194513 - DNA, 25 bp, Artificial
  Probe
catcattggccgtactatggtggtc

SEQ ID NO: 194514 - DNA, 25 bp, Artificial
  Probe
cggtgcagggcgtcattcacttcga

SEQ ID NO: 194515 - DNA, 25 bp, Artificial
  Probe
tagacctttgcctgtcttatgtgag

SEQ ID NO: 194516 - DNA, 25 bp, Artificial
  Probe
cttggtgtgagctgctcttgattga

SEQ ID NO: 194517 - DNA, 25 bp, Artificial
  Probe
agtaatcctttgtttagcggatatc

SEQ ID NO: 194518 - DNA, 25 bp, Artificial
  Probe
ggagtgacattgtgcctctgggttt

SEQ ID NO: 194519 - DNA, 25 bp, Artificial
  Probe
ctattaaaaccgactgtgtattgta

SEQ ID NO: 194520 - DNA, 25 bp, Artificial
  Probe
gggctctacctcactactgaacaaa

SEQ ID NO: 194521 - DNA, 25 bp, Artificial
  Probe
ctgggctctacctcactactgaaca

SEQ ID NO: 194522 - DNA, 25 bp, Artificial
  Probe
ttgtctattaaaaccgactgtgtat

SEQ ID NO: 194523 - DNA, 25 bp, Artificial
  Probe
aggcttgaattgcttggacgctgtc

SEQ ID NO: 194524 - DNA, 25 bp, Artificial
  Probe
ttatttatggccacagtttcacaga

SEQ ID NO: 194525 - DNA, 25 bp, Artificial
  Probe
ttgcttggacgctgtcactgtcatc

SEQ ID NO: 194526 - DNA, 25 bp, Artificial
  Probe
aggagtgacattgtgcctctgggtt

SEQ ID NO: 194527 - DNA, 25 bp, Artificial
  Probe
accttgtctattaaaaccgactgtg

SEQ ID NO: 194528 - DNA, 25 bp, Artificial
  Probe
gtcactgtcatcataaggccatcaa

SEQ ID NO: 194529 - DNA, 25 bp, Artificial
  Probe
caaagatattccatctctgtgttgg

SEQ ID NO: 194530 - DNA, 25 bp, Artificial
  Probe
gaacaaatcaacagacccaagctag

SEQ ID NO: 194531 - DNA, 25 bp, Artificial
  Probe
tcaaagatattccatctctgtgttg

SEQ ID NO: 194532 - DNA, 25 bp, Artificial
  Probe
gaggctgtaatcctgttctactgca

SEQ ID NO: 194533 - DNA, 25 bp, Artificial
  Probe
agaacagtacatacttggtgtgagc

SEQ ID NO: 194534 - DNA, 25 bp, Artificial
  Probe
aagatattccatctctgtgttgggg

SEQ ID NO: 194535 - DNA, 25 bp, Artificial
  Probe
ggccacagtttcacagaaacatcat

SEQ ID NO: 194536 - DNA, 25 bp, Artificial
  Probe
atcaacagacccaagctaggctcct

SEQ ID NO: 194537 - DNA, 25 bp, Artificial
  Probe
gagtggtagacctttgcctgtctta

SEQ ID NO: 194538 - DNA, 25 bp, Artificial
  Probe
gatgcaaaaactgttaccttgtcta

SEQ ID NO: 194539 - DNA, 25 bp, Artificial
  Probe
aggcactgtttgagaacagtacata

SEQ ID NO: 194540 - DNA, 25 bp, Artificial
  Probe
tttgtttagcggatatcacctagtg

SEQ ID NO: 194541 - DNA, 25 bp, Artificial
  Probe
cataagtaatcctttgtttagcgga

SEQ ID NO: 194542 - DNA, 25 bp, Artificial
  Probe
aatcctttgtttagcggatatcacc

SEQ ID NO: 194543 - DNA, 25 bp, Artificial
  Probe
tttttcacttgaaacgtgtaactag

SEQ ID NO: 194544 - DNA, 25 bp, Artificial
  Probe
gatatcacctagtggtctttattta

SEQ ID NO: 194545 - DNA, 25 bp, Artificial
  Probe
actgtcatcataaggccatcaaaga

SEQ ID NO: 194546 - DNA, 25 bp, Artificial
  Probe
gctgctcttgattgaacattttcat

SEQ ID NO: 194547 - DNA, 25 bp, Artificial
  Probe
ttagaggcttgaattgcttggacgc

SEQ ID NO: 194548 - DNA, 25 bp, Artificial
  Probe
ttcataagtaatcctttgtttagcg

SEQ ID NO: 194549 - DNA, 25 bp, Artificial
  Probe
tccatctctgtgttggggcctgtgg

SEQ ID NO: 194550 - DNA, 25 bp, Artificial
  Probe
acttgaaacgtgtaactaggctaag

SEQ ID NO: 194551 - DNA, 25 bp, Artificial
  Probe
tgaattgcttggacgctgtcactgt

SEQ ID NO: 194552 - DNA, 25 bp, Artificial
  Probe
cattttcattagaggcttgaattgc

SEQ ID NO: 194553 - DNA, 25 bp, Artificial
  Probe
cagacccaagctaggctcctgactg

SEQ ID NO: 194554 - DNA, 25 bp, Artificial
  Probe
atcctgttctactgcagttaggaaa

SEQ ID NO: 194555 - DNA, 25 bp, Artificial
  Probe
ctgtcttatgtgaggccctgggctc

SEQ ID NO: 194556 - DNA, 25 bp, Artificial
  Probe
ggccatcaaagatattccatctctg

SEQ ID NO: 194557 - DNA, 25 bp, Artificial
  Probe
cccaagctaggctcctgactgacaa

SEQ ID NO: 194558 - DNA, 25 bp, Artificial
  Probe
tatgtgaggccctgggctctacctc

SEQ ID NO: 194559 - DNA, 25 bp, Artificial
  Probe
ctgacaactgttaattcggagagga

SEQ ID NO: 194560 - DNA, 25 bp, Artificial
  Probe
gtggtagacctttgcctgtcttatg

SEQ ID NO: 194561 - DNA, 25 bp, Artificial
  Probe
ggtctctggccagtccctgcacaaa

SEQ ID NO: 194562 - DNA, 25 bp, Artificial
  Probe
aaagggtccatactctgttatcaag

SEQ ID NO: 194563 - DNA, 25 bp, Artificial
  Probe
accgtcttctccaggctgctttctg

SEQ ID NO: 194564 - DNA, 25 bp, Artificial
  Probe
atcctatccatattgtccaggaaag

SEQ ID NO: 194565 - DNA, 25 bp, Artificial
  Probe
ctctgttatcaagatgaggatcagg

SEQ ID NO: 194566 - DNA, 25 bp, Artificial
  Probe
ggaaagggtccatactctgttatca

SEQ ID NO: 194567 - DNA, 25 bp, Artificial
  Probe
ttcctagcccctggagaggctcagc

SEQ ID NO: 194568 - DNA, 25 bp, Artificial
  Probe
tccatactctgttatcaagatgagg

SEQ ID NO: 194569 - DNA, 25 bp, Artificial
  Probe
ctggaggcccagaatcctatccata

SEQ ID NO: 194570 - DNA, 25 bp, Artificial
  Probe
cagtccctgcacaaacaaatatagg

SEQ ID NO: 194571 - DNA, 25 bp, Artificial
  Probe
tcttctccaggctgctttctgtttc

SEQ ID NO: 194572 - DNA, 25 bp, Artificial
  Probe
atagggaaactattttcctgactgc

SEQ ID NO: 194573 - DNA, 25 bp, Artificial
  Probe
gactgccctacctggcacttgatct

SEQ ID NO: 194574 - DNA, 25 bp, Artificial
  Probe
gaaagggtccatactctgttatcaa

SEQ ID NO: 194575 - DNA, 25 bp, Artificial
  Probe
atccatattgtccaggaaagggtcc

SEQ ID NO: 194576 - DNA, 25 bp, Artificial
  Probe
tagcccctggagaggctcagcaggc

SEQ ID NO: 194577 - DNA, 25 bp, Artificial
  Probe
ggcccagaatcctatccatattgtc

SEQ ID NO: 194578 - DNA, 25 bp, Artificial
  Probe
cctggagaggctcagcaggccacca

SEQ ID NO: 194579 - DNA, 25 bp, Artificial
  Probe
aggaagcttcctagcccctggagag

SEQ ID NO: 194580 - DNA, 25 bp, Artificial
  Probe
ctagcccctggagaggctcagcagg

SEQ ID NO: 194581 - DNA, 25 bp, Artificial
  Probe
ggccagtccctgcacaaacaaatat

SEQ ID NO: 194582 - DNA, 25 bp, Artificial
  Probe
tttcacaggtctctggccagtccct

SEQ ID NO: 194583 - DNA, 25 bp, Artificial
  Probe
ctgcacaaacaaatatagggaaact

SEQ ID NO: 194584 - DNA, 25 bp, Artificial
  Probe
ctggagaggctcagcaggccaccag

SEQ ID NO: 194585 - DNA, 25 bp, Artificial
  Probe
cctgcacaaacaaatatagggaaac

SEQ ID NO: 194586 - DNA, 25 bp, Artificial
  Probe
agctggaggcccagaatcctatcca

SEQ ID NO: 194587 - DNA, 25 bp, Artificial
  Probe
aggatcaggaagcttcctagcccct

SEQ ID NO: 194588 - DNA, 25 bp, Artificial
  Probe
aggtctctggccagtccctgcacaa

SEQ ID NO: 194589 - DNA, 25 bp, Artificial
  Probe
tggagaggctcagcaggccaccaga

SEQ ID NO: 194590 - DNA, 25 bp, Artificial
  Probe
ccatccctggaggaagctggaagct

SEQ ID NO: 194591 - DNA, 25 bp, Artificial
  Probe
ctggccagtccctgcacaaacaaat

SEQ ID NO: 194592 - DNA, 25 bp, Artificial
  Probe
catccctggaggaagctggaagctg

SEQ ID NO: 194593 - DNA, 25 bp, Artificial
  Probe
gaatcctatccatattgtccaggaa

SEQ ID NO: 194594 - DNA, 25 bp, Artificial
  Probe
ttcacaggtctctggccagtccctg

SEQ ID NO: 194595 - DNA, 25 bp, Artificial
  Probe
ctattttcctgactgccctacctgg

SEQ ID NO: 194596 - DNA, 25 bp, Artificial
  Probe
ctgtttcacaggtctctggccagtc

SEQ ID NO: 194597 - DNA, 25 bp, Artificial
  Probe
attgtccaggaaagggtccatactc

SEQ ID NO: 194598 - DNA, 25 bp, Artificial
  Probe
ccgaaccagtttgcattggcccctg

SEQ ID NO: 194599 - DNA, 25 bp, Artificial
  Probe
tattttcctgactgccctacctggc

SEQ ID NO: 194600 - DNA, 25 bp, Artificial
  Probe
aagggtccatactctgttatcaaga

SEQ ID NO: 194601 - DNA, 25 bp, Artificial
  Probe
cagaatcctatccatattgtccagg

SEQ ID NO: 194602 - DNA, 25 bp, Artificial
  Probe
ggaaactattttcctgactgcccta

SEQ ID NO: 194603 - DNA, 25 bp, Artificial
  Probe
ccaggctgctttctgtttcacaggt

SEQ ID NO: 194604 - DNA, 25 bp, Artificial
  Probe
gggaaactattttcctgactgccct

SEQ ID NO: 194605 - DNA, 25 bp, Artificial
  Probe
tgactgccctacctggcacttgatc

SEQ ID NO: 194606 - DNA, 25 bp, Artificial
  Probe
cttcctagcccctggagaggctcag

SEQ ID NO: 194607 - DNA, 25 bp, Artificial
  Probe
acctagcagagaacacactcaaacg

SEQ ID NO: 194608 - DNA, 25 bp, Artificial
  Probe
aaagtctatcctaacatgacagtag

SEQ ID NO: 194609 - DNA, 25 bp, Artificial
  Probe
taaagtggactttgccgatattggc

SEQ ID NO: 194610 - DNA, 25 bp, Artificial
  Probe
acgctccattcaatcattaattggg

SEQ ID NO: 194611 - DNA, 25 bp, Artificial
  Probe
cctcctgaaaagagccggagcaaaa

SEQ ID NO: 194612 - DNA, 25 bp, Artificial
  Probe
ggaaagggcctcatcaaaagggaca

SEQ ID NO: 194613 - DNA, 25 bp, Artificial
  Probe
gtcgtctctgggattcctgagccct

SEQ ID NO: 194614 - DNA, 25 bp, Artificial
  Probe
agacactgaagaaggcgaggcgaaa

SEQ ID NO: 194615 - DNA, 25 bp, Artificial
  Probe
ggcctcatcaaaagggacagacact

SEQ ID NO: 194616 - DNA, 25 bp, Artificial
  Probe
tcatttgatgcctactattgctccg

SEQ ID NO: 194617 - DNA, 25 bp, Artificial
  Probe
ccgatattggctggagcgaatggat

SEQ ID NO: 194618 - DNA, 25 bp, Artificial
  Probe
ggtcctcaaagtctatcctaacatg

SEQ ID NO: 194619 - DNA, 25 bp, Artificial
  Probe
ctattgctccggagcctgccagttc

SEQ ID NO: 194620 - DNA, 25 bp, Artificial
  Probe
agcagtggatcgagcctcggaactg

SEQ ID NO: 194621 - DNA, 25 bp, Artificial
  Probe
aaagggacagacactgcagtttgat

SEQ ID NO: 194622 - DNA, 25 bp, Artificial
  Probe
aaagcagtggatcgagcctcggaac

SEQ ID NO: 194623 - DNA, 25 bp, Artificial
  Probe
acaagaatgtggtcctcaaagtcta

SEQ ID NO: 194624 - DNA, 25 bp, Artificial
  Probe
actgcagtttgatgagcagacactg

SEQ ID NO: 194625 - DNA, 25 bp, Artificial
  Probe
gctgtgttccggagaagatgtcctc

SEQ ID NO: 194626 - DNA, 25 bp, Artificial
  Probe
ttggctggagcgaatggattatctc

SEQ ID NO: 194627 - DNA, 25 bp, Artificial
  Probe
gtggatcgagcctcggaactgtgcc

SEQ ID NO: 194628 - DNA, 25 bp, Artificial
  Probe
ttgatgagcagacactgaagaaggc

SEQ ID NO: 194629 - DNA, 25 bp, Artificial
  Probe
tctgggattcctgagccctgctgtg

SEQ ID NO: 194630 - DNA, 25 bp, Artificial
  Probe
aactgtgcccgcaggtaccttaaag

SEQ ID NO: 194631 - DNA, 25 bp, Artificial
  Probe
tggactttgccgatattggctggag

SEQ ID NO: 194632 - DNA, 25 bp, Artificial
  Probe
tcagactcagcctcctgaaaagagc

SEQ ID NO: 194633 - DNA, 25 bp, Artificial
  Probe
atttttgtcttttgcactgccaatg

SEQ ID NO: 194634 - DNA, 25 bp, Artificial
  Probe
gctccattcaatcattaattgggtt

SEQ ID NO: 194635 - DNA, 25 bp, Artificial
  Probe
gtaccttaaagtggactttgccgat

SEQ ID NO: 194636 - DNA, 25 bp, Artificial
  Probe
atgagcagacactgaagaaggcgag

SEQ ID NO: 194637 - DNA, 25 bp, Artificial
  Probe
tgtgcttgtagataacctagcagag

SEQ ID NO: 194638 - DNA, 25 bp, Artificial
  Probe
gccaaagtctttgaagccatcaaat

SEQ ID NO: 194639 - DNA, 25 bp, Artificial
  Probe
cgcaggtaccttaaagtggactttg

SEQ ID NO: 194640 - DNA, 25 bp, Artificial
  Probe
ttccggagaagatgtcctcgctcag

SEQ ID NO: 194641 - DNA, 25 bp, Artificial
  Probe
gcattttgtcccaaaagatgtttta

SEQ ID NO: 194642 - DNA, 25 bp, Artificial
  Probe
gcagagaacacactcaaacgctcca

SEQ ID NO: 194643 - DNA, 25 bp, Artificial
  Probe
atttgatgcctactattgctccgga

SEQ ID NO: 194644 - DNA, 25 bp, Artificial
  Probe
ctttgccgatattggctggagcgaa

SEQ ID NO: 194645 - DNA, 25 bp, Artificial
  Probe
attcctgagccctgctgtgttccgg

SEQ ID NO: 194646 - DNA, 25 bp, Artificial
  Probe
gcctcggaactgtgcccgcaggtac

SEQ ID NO: 194647 - DNA, 25 bp, Artificial
  Probe
gcatcttgttctttgacgagaacaa

SEQ ID NO: 194648 - DNA, 25 bp, Artificial
  Probe
tgagccctgctgtgttccggagaag

SEQ ID NO: 194649 - DNA, 25 bp, Artificial
  Probe
gtctttgaagccatcaaatcacgcc

SEQ ID NO: 194650 - DNA, 25 bp, Artificial
  Probe
gttccccatgccaaagtctttgaag

SEQ ID NO: 194651 - DNA, 25 bp, Artificial
  Probe
cagacactgaagaaggcgaggcgaa

SEQ ID NO: 194652 - DNA, 25 bp, Artificial
  Probe
gccaatgcattttgtcccaaaagat

SEQ ID NO: 194653 - DNA, 25 bp, Artificial
  Probe
ctcagaagctgtgttacaaatagag

SEQ ID NO: 194654 - DNA, 25 bp, Artificial
  Probe
acaggttctgagtgtgaatatcgac

SEQ ID NO: 194655 - DNA, 25 bp, Artificial
  Probe
cccaggcgaacgtgggcacccttgg

SEQ ID NO: 194656 - DNA, 25 bp, Artificial
  Probe
ctgccctgtacttggggacccggag

SEQ ID NO: 194657 - DNA, 25 bp, Artificial
  Probe
tgctattatgtgttggtggcccgag

SEQ ID NO: 194658 - DNA, 25 bp, Artificial
  Probe
ttccttgtatggacggcaggcagag

SEQ ID NO: 194659 - DNA, 25 bp, Artificial
  Probe
acagtaaatcacagggaaggagact

SEQ ID NO: 194660 - DNA, 25 bp, Artificial
  Probe
tgccctgagatgtgaggagagtctt

SEQ ID NO: 194661 - DNA, 25 bp, Artificial
  Probe
acccttgggagcatgctgcctgagg

SEQ ID NO: 194662 - DNA, 25 bp, Artificial
  Probe
ggatttagctcagaagctgtgttac

SEQ ID NO: 194663 - DNA, 25 bp, Artificial
  Probe
cccttggtgtgaagtgtgacaggtc

SEQ ID NO: 194664 - DNA, 25 bp, Artificial
  Probe
tgaggaagtgccttgctggcattta

SEQ ID NO: 194665 - DNA, 25 bp, Artificial
  Probe
gtggcccgagggaccaacttcaagt

SEQ ID NO: 194666 - DNA, 25 bp, Artificial
  Probe
gttagaatattctggctcctacagt

SEQ ID NO: 194667 - DNA, 25 bp, Artificial
  Probe
aatagtgcagaaggtgctggcttca

SEQ ID NO: 194668 - DNA, 25 bp, Artificial
  Probe
tgagaaagacagtcccttagaggta

SEQ ID NO: 194669 - DNA, 25 bp, Artificial
  Probe
ggctctgaagagataccatggaata

SEQ ID NO: 194670 - DNA, 25 bp, Artificial
  Probe
agaggatatgtcctggctttgctgt

SEQ ID NO: 194671 - DNA, 25 bp, Artificial
  Probe
agagataccatggaatagggccccc

SEQ ID NO: 194672 - DNA, 25 bp, Artificial
  Probe
aaggattgtgtgcttggccatgcag

SEQ ID NO: 194673 - DNA, 25 bp, Artificial
  Probe
ggatccctgggaaggacaacccttg

SEQ ID NO: 194674 - DNA, 25 bp, Artificial
  Probe
cagtcccttagaggtaaatggatag

SEQ ID NO: 194675 - DNA, 25 bp, Artificial
  Probe
ccaacttcaagtgagaaagacagtc

SEQ ID NO: 194676 - DNA, 25 bp, Artificial
  Probe
cctggctgttctctgagctgttcag

SEQ ID NO: 194677 - DNA, 25 bp, Artificial
  Probe
ctggctcctacagtcaggcagggag

SEQ ID NO: 194678 - DNA, 25 bp, Artificial
  Probe
ccatgcaggcgctgtggtacctgct

SEQ ID NO: 194679 - DNA, 25 bp, Artificial
  Probe
cccctataaggagctagctgccctg

SEQ ID NO: 194680 - DNA, 25 bp, Artificial
  Probe
tgggccacaaagtccttgggaataa

SEQ ID NO: 194681 - DNA, 25 bp, Artificial
  Probe
atgggtccagggatcctctcacatt

SEQ ID NO: 194682 - DNA, 25 bp, Artificial
  Probe
actctccttccaaggcccaggagaa

SEQ ID NO: 194683 - DNA, 25 bp, Artificial
  Probe
tcacctgggcttatacttgggagag

SEQ ID NO: 194684 - DNA, 25 bp, Artificial
  Probe
ctatgatagggaactgggtgccctg

SEQ ID NO: 194685 - DNA, 25 bp, Artificial
  Probe
ctcctccaaggattgtgtgcttggc

SEQ ID NO: 194686 - DNA, 25 bp, Artificial
  Probe
tgtgaggagagtcttgtgtgcccca

SEQ ID NO: 194687 - DNA, 25 bp, Artificial
  Probe
gtccagggatcctctcacatttact

SEQ ID NO: 194688 - DNA, 25 bp, Artificial
  Probe
ctcttctgtaggagaagacagtaaa

SEQ ID NO: 194689 - DNA, 25 bp, Artificial
  Probe
agggtctcagataggaccaatccct

SEQ ID NO: 194690 - DNA, 25 bp, Artificial
  Probe
agctgttcagagagccagggttaga

SEQ ID NO: 194691 - DNA, 25 bp, Artificial
  Probe
tcacatcctggcactcaaagtgggc

SEQ ID NO: 194692 - DNA, 25 bp, Artificial
  Probe
gagcctgctattatgtgttggtggc

SEQ ID NO: 194693 - DNA, 25 bp, Artificial
  Probe
agggaaagcgtccaaggagatccca

SEQ ID NO: 194694 - DNA, 25 bp, Artificial
  Probe
ggaagtgccttgctggcatttaaat

SEQ ID NO: 194695 - DNA, 25 bp, Artificial
  Probe
caaggcccaggagaagggatccctg

SEQ ID NO: 194696 - DNA, 25 bp, Artificial
  Probe
aagtgtgacaggtcagaccagacca

SEQ ID NO: 194697 - DNA, 25 bp, Artificial
  Probe
gaacttcctgggagtccccagtgta

SEQ ID NO: 194698 - DNA, 25 bp, Artificial
  Probe
ggcacccttggtgtgaagtgtgaca

SEQ ID NO: 194699 - DNA, 25 bp, Artificial
  Probe
tctcgatctcctgaccagtgctggc

SEQ ID NO: 194700 - DNA, 25 bp, Artificial
  Probe
agatgtcttgaaatctcgatctcct

SEQ ID NO: 194701 - DNA, 25 bp, Artificial
  Probe
tctcctgaccagtgctggcatcaca

SEQ ID NO: 194702 - DNA, 25 bp, Artificial
  Probe
agaggctcatgtagttcacactgac

SEQ ID NO: 194703 - DNA, 25 bp, Artificial
  Probe
atgtcttgaaatctcgatctcctga

SEQ ID NO: 194704 - DNA, 25 bp, Artificial
  Probe
accagtgctggcatcacagccacat

SEQ ID NO: 194705 - DNA, 25 bp, Artificial
  Probe
tttaatgctggctgacttttttgcc

SEQ ID NO: 194706 - DNA, 25 bp, Artificial
  Probe
accgtgccacttttgtctgactttt

SEQ ID NO: 194707 - DNA, 25 bp, Artificial
  Probe
ctgacttttgtgtcattggactgtc

SEQ ID NO: 194708 - DNA, 25 bp, Artificial
  Probe
cctgaattgtgtgtctcatagaaaa

SEQ ID NO: 194709 - DNA, 25 bp, Artificial
  Probe
ttaatgctggctgacttttttgcca

SEQ ID NO: 194710 - DNA, 25 bp, Artificial
  Probe
gctcatgtagttcacactgacctca

SEQ ID NO: 194711 - DNA, 25 bp, Artificial
  Probe
ccacttttgtctgacttttgtgtca

SEQ ID NO: 194712 - DNA, 25 bp, Artificial
  Probe
tgtattctggccagaggctcatgta

SEQ ID NO: 194713 - DNA, 25 bp, Artificial
  Probe
tgctggctgacttttttgccacacc

SEQ ID NO: 194714 - DNA, 25 bp, Artificial
  Probe
agtgctggcatcacagccacatgga

SEQ ID NO: 194715 - DNA, 25 bp, Artificial
  Probe
gtatacccagattttaaagtgacta

SEQ ID NO: 194716 - DNA, 25 bp, Artificial
  Probe
gaaatctcgatctcctgaccagtgc

SEQ ID NO: 194717 - DNA, 25 bp, Artificial
  Probe
tattctggccagaggctcatgtagt

SEQ ID NO: 194718 - DNA, 25 bp, Artificial
  Probe
tcctgaccagtgctggcatcacagc

SEQ ID NO: 194719 - DNA, 25 bp, Artificial
  Probe
gtcttgaaatctcgatctcctgacc

SEQ ID NO: 194720 - DNA, 25 bp, Artificial
  Probe
gccacttttgtctgacttttgtgtc

SEQ ID NO: 194721 - DNA, 25 bp, Artificial
  Probe
gatctttaatgctggctgacttttt

SEQ ID NO: 194722 - DNA, 25 bp, Artificial
  Probe
ccaccgtgccacttttgtctgactt

SEQ ID NO: 194723 - DNA, 25 bp, Artificial
  Probe
acatggacgtatacccagattttaa

SEQ ID NO: 194724 - DNA, 25 bp, Artificial
  Probe
ggcatcacagccacatggacgtata

SEQ ID NO: 194725 - DNA, 25 bp, Artificial
  Probe
attggactgtcctgaattgtgtgtc

SEQ ID NO: 194726 - DNA, 25 bp, Artificial
  Probe
tgtcttgaaatctcgatctcctgac

SEQ ID NO: 194727 - DNA, 25 bp, Artificial
  Probe
ggacgtatacccagattttaaagtg

SEQ ID NO: 194728 - DNA, 25 bp, Artificial
  Probe
gtgccacttttgtctgacttttgtg

SEQ ID NO: 194729 - DNA, 25 bp, Artificial
  Probe
cgtatacccagattttaaagtgact

SEQ ID NO: 194730 - DNA, 25 bp, Artificial
  Probe
aattttgtattctggccagaggctc

SEQ ID NO: 194731 - DNA, 25 bp, Artificial
  Probe
ttgtgtcattggactgtcctgaatt

SEQ ID NO: 194732 - DNA, 25 bp, Artificial
  Probe
atgctggctgacttttttgccacac

SEQ ID NO: 194733 - DNA, 25 bp, Artificial
  Probe
caacgacatgatctttaatgctggc

SEQ ID NO: 194734 - DNA, 25 bp, Artificial
  Probe
gacgtatacccagattttaaagtga

SEQ ID NO: 194735 - DNA, 25 bp, Artificial
  Probe
acaacgacatgatctttaatgctgg

SEQ ID NO: 194736 - DNA, 25 bp, Artificial
  Probe
ttgtctgacttttgtgtcattggac

SEQ ID NO: 194737 - DNA, 25 bp, Artificial
  Probe
ctggccagaggctcatgtagttcac

SEQ ID NO: 194738 - DNA, 25 bp, Artificial
  Probe
catccaaagatgtcttgaaatctcg

SEQ ID NO: 194739 - DNA, 25 bp, Artificial
  Probe
tgctggcatcacagccacatggacg

SEQ ID NO: 194740 - DNA, 25 bp, Artificial
  Probe
aggcccctgactgtggcctgcacag

SEQ ID NO: 194741 - DNA, 25 bp, Artificial
  Probe
cttttgtgtcattggactgtcctga

SEQ ID NO: 194742 - DNA, 25 bp, Artificial
  Probe
gacttttgtgtcattggactgtcct

SEQ ID NO: 194743 - DNA, 25 bp, Artificial
  Probe
ttctcaggcccctgactgtggcctg

SEQ ID NO: 194744 - DNA, 25 bp, Artificial
  Probe
cttgaaatctcgatctcctgaccag

SEQ ID NO: 194745 - DNA, 25 bp, Artificial
  Probe
ggttggcagtgcagatcggaattcc

SEQ ID NO: 194746 - DNA, 25 bp, Artificial
  Probe
accaggacatctacgggcgtgagga

SEQ ID NO: 194747 - DNA, 25 bp, Artificial
  Probe
tatttttagacaagagtccactccg

SEQ ID NO: 194748 - DNA, 25 bp, Artificial
  Probe
accccttcatcttcctggtgcgaga

SEQ ID NO: 194749 - DNA, 25 bp, Artificial
  Probe
gagaagttgctgaccaaggagcaac

SEQ ID NO: 194750 - DNA, 25 bp, Artificial
  Probe
ggaagcctttattgctttcaaaaca

SEQ ID NO: 194751 - DNA, 25 bp, Artificial
  Probe
ccgctcctacactgtgggtgttacg

SEQ ID NO: 194752 - DNA, 25 bp, Artificial
  Probe
cccataggtctgagtaggtattttt

SEQ ID NO: 194753 - DNA, 25 bp, Artificial
  Probe
atgcgagacgagttgtagagtccaa

SEQ ID NO: 194754 - DNA, 25 bp, Artificial
  Probe
tggaggtgacccatgacctgcagaa

SEQ ID NO: 194755 - DNA, 25 bp, Artificial
  Probe
gccctagagccattacattacattg

SEQ ID NO: 194756 - DNA, 25 bp, Artificial
  Probe
tcctggtgcgagataatcagagcgg

SEQ ID NO: 194757 - DNA, 25 bp, Artificial
  Probe
gtagccagaggttcctgagacacat

SEQ ID NO: 194758 - DNA, 25 bp, Artificial
  Probe
acgtagaaccgctcgagcgcctgga

SEQ ID NO: 194759 - DNA, 25 bp, Artificial
  Probe
aggcaccaaccctggatagtccacg

SEQ ID NO: 194760 - DNA, 25 bp, Artificial
  Probe
agatgcgagacgagttgtagagtcc

SEQ ID NO: 194761 - DNA, 25 bp, Artificial
  Probe
ttctttgccgcagcagtgggagttg

SEQ ID NO: 194762 - DNA, 25 bp, Artificial
  Probe
aagctgcagctggtggagatgccct

SEQ ID NO: 194763 - DNA, 25 bp, Artificial
  Probe
caccaaccctggatagtccacgggt

SEQ ID NO: 194764 - DNA, 25 bp, Artificial
  Probe
accgtggcttcatggtgacccgctc

SEQ ID NO: 194765 - DNA, 25 bp, Artificial
  Probe
tgccctgagccctcggttttcctgt

SEQ ID NO: 194766 - DNA, 25 bp, Artificial
  Probe
tggagatgcccttggcccataagct

SEQ ID NO: 194767 - DNA, 25 bp, Artificial
  Probe
gcagccccaagctgttctatgccga

SEQ ID NO: 194768 - DNA, 25 bp, Artificial
  Probe
atctagcctcaacagtcaatcagtg

SEQ ID NO: 194769 - DNA, 25 bp, Artificial
  Probe
tacctggccagtgtgttccacgcca

SEQ ID NO: 194770 - DNA, 25 bp, Artificial
  Probe
ggagaccatgcataggagggctcct

SEQ ID NO: 194771 - DNA, 25 bp, Artificial
  Probe
aatcagagcggctccttgctgttca

SEQ ID NO: 194772 - DNA, 25 bp, Artificial
  Probe
ctatgacgacgagaaggagaagctg

SEQ ID NO: 194773 - DNA, 25 bp, Artificial
  Probe
gaggagctgcgcagccccaagctgt

SEQ ID NO: 194774 - DNA, 25 bp, Artificial
  Probe
aggagcaactaaagacctggatggg

SEQ ID NO: 194775 - DNA, 25 bp, Artificial
  Probe
ggttttcctgttcacctctgattcc

SEQ ID NO: 194776 - DNA, 25 bp, Artificial
  Probe
aagatggtagacaaccgtggcttca

SEQ ID NO: 194777 - DNA, 25 bp, Artificial
  Probe
ctggtccggcccaagggagacaaga

SEQ ID NO: 194778 - DNA, 25 bp, Artificial
  Probe
ggccaagcattctgtctgtgagaca

SEQ ID NO: 194779 - DNA, 25 bp, Artificial
  Probe
aggagcctgtggtcccagaactgcc

SEQ ID NO: 194780 - DNA, 25 bp, Artificial
  Probe
ctttaaccacaaaactaggagcctg

SEQ ID NO: 194781 - DNA, 25 bp, Artificial
  Probe
ccggcccaagggagacaagatgcga

SEQ ID NO: 194782 - DNA, 25 bp, Artificial
  Probe
ccttaaaatcgattctttgccgcag

SEQ ID NO: 194783 - DNA, 25 bp, Artificial
  Probe
ctgtctgtgagacaatcgagttggg

SEQ ID NO: 194784 - DNA, 25 bp, Artificial
  Probe
cacgccactgccttcgagtgggaca

SEQ ID NO: 194785 - DNA, 25 bp, Artificial
  Probe
caccaaggatgtggagcgcacggat

SEQ ID NO: 194786 - DNA, 25 bp, Artificial
  Probe
cttgctgttcattggccgcctggtc

SEQ ID NO: 194787 - DNA, 25 bp, Artificial
  Probe
tcctgagacacatgggtgctattgt

SEQ ID NO: 194788 - DNA, 25 bp, Artificial
  Probe
gatggggcactgctcgttaatgcca

SEQ ID NO: 194789 - DNA, 25 bp, Artificial
  Probe
tgttcatattcgtggccaagcattc

SEQ ID NO: 194790 - DNA, 25 bp, Artificial
  Probe
ggtgtcacagccattctagccctgc

SEQ ID NO: 194791 - DNA, 25 bp, Artificial
  Probe
ctccatcaccagaaagctttcagag

SEQ ID NO: 194792 - DNA, 25 bp, Artificial
  Probe
ttttggagaatcatcaactgtgcta

SEQ ID NO: 194793 - DNA, 25 bp, Artificial
  Probe
accagaaagctttcagagacaaatg

SEQ ID NO: 194794 - DNA, 25 bp, Artificial
  Probe
agcctggcagataccggttcatggg

SEQ ID NO: 194795 - DNA, 25 bp, Artificial
  Probe
aggggctcatcttggaacacagcat

SEQ ID NO: 194796 - DNA, 25 bp, Artificial
  Probe
catcctggatggaaaacatgccgga

SEQ ID NO: 194797 - DNA, 25 bp, Artificial
  Probe
tctggctctcaaagggtgttgatgg

SEQ ID NO: 194798 - DNA, 25 bp, Artificial
  Probe
tgcaagggcctcaggaatggcatca

SEQ ID NO: 194799 - DNA, 25 bp, Artificial
  Probe
cttctctccaagtcaccgatgcagt

SEQ ID NO: 194800 - DNA, 25 bp, Artificial
  Probe
tttccaaccgtgcatgctactccag

SEQ ID NO: 194801 - DNA, 25 bp, Artificial
  Probe
tggatgtccaaaaaacccagccgag

SEQ ID NO: 194802 - DNA, 25 bp, Artificial
  Probe
caatagttcaaatgcggggtttact

SEQ ID NO: 194803 - DNA, 25 bp, Artificial
  Probe
acatgccggaaggaaaatggcccaa

SEQ ID NO: 194804 - DNA, 25 bp, Artificial
  Probe
agttcagccgggagcctggcagata

SEQ ID NO: 194805 - DNA, 25 bp, Artificial
  Probe
agcgctatgacactaacgcccttct

SEQ ID NO: 194806 - DNA, 25 bp, Artificial
  Probe
ccatcacacatgcaagggcctcagg

SEQ ID NO: 194807 - DNA, 25 bp, Artificial
  Probe
tctcgagtagggagcgagtatgtca

SEQ ID NO: 194808 - DNA, 25 bp, Artificial
  Probe
tcaccgatgcagtgggacaatagtt

SEQ ID NO: 194809 - DNA, 25 bp, Artificial
  Probe
aacatgccggaaggaaaatggccca

SEQ ID NO: 194810 - DNA, 25 bp, Artificial
  Probe
gatgttcctacaaaactgagaataa

SEQ ID NO: 194811 - DNA, 25 bp, Artificial
  Probe
cacacagtgaatgtggatgtccaaa

SEQ ID NO: 194812 - DNA, 25 bp, Artificial
  Probe
atgccgtttctctggagaagggaga

SEQ ID NO: 194813 - DNA, 25 bp, Artificial
  Probe
tcaccactacccaggtgggaatgca

SEQ ID NO: 194814 - DNA, 25 bp, Artificial
  Probe
tgcttctgttcacactcccaggaac

SEQ ID NO: 194815 - DNA, 25 bp, Artificial
  Probe
aatttcttctggaagcaaaggacct

SEQ ID NO: 194816 - DNA, 25 bp, Artificial
  Probe
agtttcgatgcagttaaatttcttc

SEQ ID NO: 194817 - DNA, 25 bp, Artificial
  Probe
cttccttgtggttctgaattttgga

SEQ ID NO: 194818 - DNA, 25 bp, Artificial
  Probe
attacaaacctcaacgagcgctatg

SEQ ID NO: 194819 - DNA, 25 bp, Artificial
  Probe
gctactcagaactgtaccacgactt

SEQ ID NO: 194820 - DNA, 25 bp, Artificial
  Probe
gaacacagcatgaagactctcctcc

SEQ ID NO: 194821 - DNA, 25 bp, Artificial
  Probe
gatgtccaaaaaacccagccgagct

SEQ ID NO: 194822 - DNA, 25 bp, Artificial
  Probe
cagtgatgttgatacccatgccgtt

SEQ ID NO: 194823 - DNA, 25 bp, Artificial
  Probe
catagataaagtcttccttgtggtt

SEQ ID NO: 194824 - DNA, 25 bp, Artificial
  Probe
ccagggagctggatggcatagataa

SEQ ID NO: 194825 - DNA, 25 bp, Artificial
  Probe
tacatcccaaattccggacacagtg

SEQ ID NO: 194826 - DNA, 25 bp, Artificial
  Probe
ctacaggaaactatttcagatgttc

SEQ ID NO: 194827 - DNA, 25 bp, Artificial
  Probe
aactctgactaccacacagtgaatg

SEQ ID NO: 194828 - DNA, 25 bp, Artificial
  Probe
ttactgaggccaaccacacctggct

SEQ ID NO: 194829 - DNA, 25 bp, Artificial
  Probe
ccataacttactatggggaagaaat

SEQ ID NO: 194830 - DNA, 25 bp, Artificial
  Probe
tagccacactagacactctttccgg

SEQ ID NO: 194831 - DNA, 25 bp, Artificial
  Probe
caggaagctgacttccctttcaaca

SEQ ID NO: 194832 - DNA, 25 bp, Artificial
  Probe
cgagtatgtcaatgccatgaacatg

SEQ ID NO: 194833 - DNA, 25 bp, Artificial
  Probe
ggaaaatggcccaactggatgattg

SEQ ID NO: 194834 - DNA, 25 bp, Artificial
  Probe
tgtcagctgagagcaccgagaggac

SEQ ID NO: 194835 - DNA, 25 bp, Artificial
  Probe
taagtaccaatccagcctccaaagg

SEQ ID NO: 194836 - DNA, 25 bp, Artificial
  Probe
gttcctacaaaactgagaataagat

SEQ ID NO: 194837 - DNA, 25 bp, Artificial
  Probe
tgcatcctgagtgtattcttggtga

SEQ ID NO: 194838 - DNA, 25 bp, Artificial
  Probe
ccgggcctcacacatgtgaaacata

SEQ ID NO: 194839 - DNA, 25 bp, Artificial
  Probe
aaattcgaagtgcatcctgagtgta

SEQ ID NO: 194840 - DNA, 25 bp, Artificial
  Probe
gccaaggccgtttagaggatcttta

SEQ ID NO: 194841 - DNA, 25 bp, Artificial
  Probe
aagtgcatcctgagtgtattcttgg

SEQ ID NO: 194842 - DNA, 25 bp, Artificial
  Probe
agcccgggcctcacacatgtgaaac

SEQ ID NO: 194843 - DNA, 25 bp, Artificial
  Probe
cgccaaggccgtttagaggatcttt

SEQ ID NO: 194844 - DNA, 25 bp, Artificial
  Probe
catgttgtgttctggtgtgcctgag

SEQ ID NO: 194845 - DNA, 25 bp, Artificial
  Probe
cgaagtgcatcctgagtgtattctt

SEQ ID NO: 194846 - DNA, 25 bp, Artificial
  Probe
cgtgtctccatgttgtgttctggtg

SEQ ID NO: 194847 - DNA, 25 bp, Artificial
  Probe
gtgcatcctgagtgtattcttggtg

SEQ ID NO: 194848 - DNA, 25 bp, Artificial
  Probe
gtgtctccatgttgtgttctggtgt

SEQ ID NO: 194849 - DNA, 25 bp, Artificial
  Probe
tgtgttctggtgtgcctgagcgtta

SEQ ID NO: 194850 - DNA, 25 bp, Artificial
  Probe
ccatgttgtgttctggtgtgcctga

SEQ ID NO: 194851 - DNA, 25 bp, Artificial
  Probe
gaaacatatactctgctccgacatg

SEQ ID NO: 194852 - DNA, 25 bp, Artificial
  Probe
atgttgtgttctggtgtgcctgagc

SEQ ID NO: 194853 - DNA, 25 bp, Artificial
  Probe
catcctgagtgtattcttggtgaga

SEQ ID NO: 194854 - DNA, 25 bp, Artificial
  Probe
atgtgaaacatatactctgctccga

SEQ ID NO: 194855 - DNA, 25 bp, Artificial
  Probe
ttcgaagtgcatcctgagtgtattc

SEQ ID NO: 194856 - DNA, 25 bp, Artificial
  Probe
ttctggtgtgcctgagcgttaaagg

SEQ ID NO: 194857 - DNA, 25 bp, Artificial
  Probe
tttatcttcagctggagagacagct

SEQ ID NO: 194858 - DNA, 25 bp, Artificial
  Probe
cgggcctcacacatgtgaaacatat

SEQ ID NO: 194859 - DNA, 25 bp, Artificial
  Probe
cccagtccgccaaggccgtttagag

SEQ ID NO: 194860 - DNA, 25 bp, Artificial
  Probe
agtgcatcctgagtgtattcttggt

SEQ ID NO: 194861 - DNA, 25 bp, Artificial
  Probe
ttgttttatcttcagctggagagac

SEQ ID NO: 194862 - DNA, 25 bp, Artificial
  Probe
cccgggcctcacacatgtgaaacat

SEQ ID NO: 194863 - DNA, 25 bp, Artificial
  Probe
ttatcttcagctggagagacagctc

SEQ ID NO: 194864 - DNA, 25 bp, Artificial
  Probe
ccgtgtctccatgttgtgttctggt

SEQ ID NO: 194865 - DNA, 25 bp, Artificial
  Probe
tctccatgttgtgttctggtgtgcc

SEQ ID NO: 194866 - DNA, 25 bp, Artificial
  Probe
gcccgggcctcacacatgtgaaaca

SEQ ID NO: 194867 - DNA, 25 bp, Artificial
  Probe
gtctccatgttgtgttctggtgtgc

SEQ ID NO: 194868 - DNA, 25 bp, Artificial
  Probe
tgtgaaacatatactctgctccgac

SEQ ID NO: 194869 - DNA, 25 bp, Artificial
  Probe
gttttatcttcagctggagagacag

SEQ ID NO: 194870 - DNA, 25 bp, Artificial
  Probe
tatcttcagctggagagacagctca

SEQ ID NO: 194871 - DNA, 25 bp, Artificial
  Probe
tgtctccatgttgtgttctggtgtg

SEQ ID NO: 194872 - DNA, 25 bp, Artificial
  Probe
tgttttatcttcagctggagagaca

SEQ ID NO: 194873 - DNA, 25 bp, Artificial
  Probe
caaattcgaagtgcatcctgagtgt

SEQ ID NO: 194874 - DNA, 25 bp, Artificial
  Probe
ttgtgttctggtgtgcctgagcgtt

SEQ ID NO: 194875 - DNA, 25 bp, Artificial
  Probe
aagcccgggcctcacacatgtgaaa

SEQ ID NO: 194876 - DNA, 25 bp, Artificial
  Probe
ccgccaaggccgtttagaggatctt

SEQ ID NO: 194877 - DNA, 25 bp, Artificial
  Probe
attcgaagtgcatcctgagtgtatt

SEQ ID NO: 194878 - DNA, 25 bp, Artificial
  Probe
tcccagtccgccaaggccgtttaga

SEQ ID NO: 194879 - DNA, 25 bp, Artificial
  Probe
ggcctcacacatgtgaaacatatac

SEQ ID NO: 194880 - DNA, 25 bp, Artificial
  Probe
gtgaaacatatactctgctccgaca

SEQ ID NO: 194881 - DNA, 25 bp, Artificial
  Probe
gcaaattcgaagtgcatcctgagtg

SEQ ID NO: 194882 - DNA, 25 bp, Artificial
  Probe
gaagcccgggcctcacacatgtgaa

SEQ ID NO: 194883 - DNA, 25 bp, Artificial
  Probe
atagctattcagctcataggaggtg

SEQ ID NO: 194884 - DNA, 25 bp, Artificial
  Probe
tttggactatactctggcaaatgtc

SEQ ID NO: 194885 - DNA, 25 bp, Artificial
  Probe
ctgtatgaagcaggtccaaatgggc

SEQ ID NO: 194886 - DNA, 25 bp, Artificial
  Probe
tatgatagctattcagctcatagga

SEQ ID NO: 194887 - DNA, 25 bp, Artificial
  Probe
tattcaaatatgacctgtatgaagc

SEQ ID NO: 194888 - DNA, 25 bp, Artificial
  Probe
gaggtgccataccagccaccacgag

SEQ ID NO: 194889 - DNA, 25 bp, Artificial
  Probe
tgattttggactatactctggcaaa

SEQ ID NO: 194890 - DNA, 25 bp, Artificial
  Probe
gcatacctctaggatccattgatac

SEQ ID NO: 194891 - DNA, 25 bp, Artificial
  Probe
gtagcttcaaatgacattctagaag

SEQ ID NO: 194892 - DNA, 25 bp, Artificial
  Probe
gctattcagctcataggaggtgcca

SEQ ID NO: 194893 - DNA, 25 bp, Artificial
  Probe
ttacttgtgattttggactatactc

SEQ ID NO: 194894 - DNA, 25 bp, Artificial
  Probe
cttcaaatgacattctagaagtaga

SEQ ID NO: 194895 - DNA, 25 bp, Artificial
  Probe
accagccaccacgagcaggaagatg

SEQ ID NO: 194896 - DNA, 25 bp, Artificial
  Probe
caaatatgacctgtatgaagcaggt

SEQ ID NO: 194897 - DNA, 25 bp, Artificial
  Probe
ggaggtgccataccagccaccacga

SEQ ID NO: 194898 - DNA, 25 bp, Artificial
  Probe
aatatgatagctattcagctcatag

SEQ ID NO: 194899 - DNA, 25 bp, Artificial
  Probe
tgacctgtatgaagcaggtccaaat

SEQ ID NO: 194900 - DNA, 25 bp, Artificial
  Probe
taccagccaccacgagcaggaagat

SEQ ID NO: 194901 - DNA, 25 bp, Artificial
  Probe
agctcataggaggtgccataccagc

SEQ ID NO: 194902 - DNA, 25 bp, Artificial
  Probe
atatgacctgtatgaagcaggtcca

SEQ ID NO: 194903 - DNA, 25 bp, Artificial
  Probe
gcttcaaatgacattctagaagtag

SEQ ID NO: 194904 - DNA, 25 bp, Artificial
  Probe
ctttccagaaatagggctaattcaa

SEQ ID NO: 194905 - DNA, 25 bp, Artificial
  Probe
atctttccagaaatagggctaattc

SEQ ID NO: 194906 - DNA, 25 bp, Artificial
  Probe
atgacctgtatgaagcaggtccaaa

SEQ ID NO: 194907 - DNA, 25 bp, Artificial
  Probe
acctgtatgaagcaggtccaaatgg

SEQ ID NO: 194908 - DNA, 25 bp, Artificial
  Probe
tccaaatgggccaatatgatagcta

SEQ ID NO: 194909 - DNA, 25 bp, Artificial
  Probe
agtagcttcaaatgacattctagaa

SEQ ID NO: 194910 - DNA, 25 bp, Artificial
  Probe
agcaggtccaaatgggccaatatga

SEQ ID NO: 194911 - DNA, 25 bp, Artificial
  Probe
cagccaccacgagcaggaagatgtc

SEQ ID NO: 194912 - DNA, 25 bp, Artificial
  Probe
caccacgagcaggaagatgtcagaa

SEQ ID NO: 194913 - DNA, 25 bp, Artificial
  Probe
tggactatactctggcaaatgtcta

SEQ ID NO: 194914 - DNA, 25 bp, Artificial
  Probe
tcattttatctttccagaaataggg

SEQ ID NO: 194915 - DNA, 25 bp, Artificial
  Probe
ctattcagctcataggaggtgccat

SEQ ID NO: 194916 - DNA, 25 bp, Artificial
  Probe
atgaagcaggtccaaatgggccaat

SEQ ID NO: 194917 - DNA, 25 bp, Artificial
  Probe
ataggaggtgccataccagccacca

SEQ ID NO: 194918 - DNA, 25 bp, Artificial
  Probe
gaagcaggtccaaatgggccaatat

SEQ ID NO: 194919 - DNA, 25 bp, Artificial
  Probe
caaatgggccaatatgatagctatt

SEQ ID NO: 194920 - DNA, 25 bp, Artificial
  Probe
aggaggtgccataccagccaccacg

SEQ ID NO: 194921 - DNA, 25 bp, Artificial
  Probe
acttgtgattttggactatactctg

SEQ ID NO: 194922 - DNA, 25 bp, Artificial
  Probe
gtatgaagcaggtccaaatgggcca

SEQ ID NO: 194923 - DNA, 25 bp, Artificial
  Probe
aatatgacctgtatgaagcaggtcc

SEQ ID NO: 194924 - DNA, 25 bp, Artificial
  Probe
attttatctttccagaaatagggct

SEQ ID NO: 194925 - DNA, 25 bp, Artificial
  Probe
attcaaatatgacctgtatgaagca

SEQ ID NO: 194926 - DNA, 25 bp, Artificial
  Probe
tattcagctcataggaggtgccata

SEQ ID NO: 194927 - DNA, 25 bp, Artificial
  Probe
ttcgcatacctctaggatccattga

SEQ ID NO: 194928 - DNA, 25 bp, Artificial
  Probe
attcgcatacctctaggatccattg

SEQ ID NO: 194929 - DNA, 25 bp, Artificial
  Probe
gctccgaagttcaaccattcagtct

SEQ ID NO: 194930 - DNA, 25 bp, Artificial
  Probe
cagctacatatagtggaatggggca

SEQ ID NO: 194931 - DNA, 25 bp, Artificial
  Probe
attccctactctggtattcaaatgg

SEQ ID NO: 194932 - DNA, 25 bp, Artificial
  Probe
agcactaaggttgtccagtttcctt

SEQ ID NO: 194933 - DNA, 25 bp, Artificial
  Probe
tgggatcaaccctgccatgtaccag

SEQ ID NO: 194934 - DNA, 25 bp, Artificial
  Probe
tcaacgcacgggtatagtagttccg

SEQ ID NO: 194935 - DNA, 25 bp, Artificial
  Probe
caacgcacgggtatagtagttccgt

SEQ ID NO: 194936 - DNA, 25 bp, Artificial
  Probe
gcccagtaaggctccgaagttcaac

SEQ ID NO: 194937 - DNA, 25 bp, Artificial
  Probe
gctacatatagtggaatggggcagc

SEQ ID NO: 194938 - DNA, 25 bp, Artificial
  Probe
agtaaggctccgaagttcaaccatt

SEQ ID NO: 194939 - DNA, 25 bp, Artificial
  Probe
caagtcagctacatatagtggaatg

SEQ ID NO: 194940 - DNA, 25 bp, Artificial
  Probe
aggccacaaagtcagtaaaagtgct

SEQ ID NO: 194941 - DNA, 25 bp, Artificial
  Probe
atagtagttccgtatggctacaaac

SEQ ID NO: 194942 - DNA, 25 bp, Artificial
  Probe
gtacactctattttgggaattcaat

SEQ ID NO: 194943 - DNA, 25 bp, Artificial
  Probe
gtaccagagcccagtaaggctccga

SEQ ID NO: 194944 - DNA, 25 bp, Artificial
  Probe
tctcactgaaaacgatggtgacaaa

SEQ ID NO: 194945 - DNA, 25 bp, Artificial
  Probe
caaactcaacgcacgggtatagtag

SEQ ID NO: 194946 - DNA, 25 bp, Artificial
  Probe
atggggcagccctcatctgactgag

SEQ ID NO: 194947 - DNA, 25 bp, Artificial
  Probe
gtgttctagtacactctattttggg

SEQ ID NO: 194948 - DNA, 25 bp, Artificial
  Probe
tatctaaacaaactcaacgcacggg

SEQ ID NO: 194949 - DNA, 25 bp, Artificial
  Probe
taaacaaactcaacgcacgggtata

SEQ ID NO: 194950 - DNA, 25 bp, Artificial
  Probe
gacgcaagcaaaccaaggaaaaggc

SEQ ID NO: 194951 - DNA, 25 bp, Artificial
  Probe
gaaatgggatcaaccctgccatgta

SEQ ID NO: 194952 - DNA, 25 bp, Artificial
  Probe
cctgccatgtaccagagcccagtaa

SEQ ID NO: 194953 - DNA, 25 bp, Artificial
  Probe
aagtgttctagtacactctattttg

SEQ ID NO: 194954 - DNA, 25 bp, Artificial
  Probe
tcgaaatgggatcaaccctgccatg

SEQ ID NO: 194955 - DNA, 25 bp, Artificial
  Probe
ttcacaaaacatggaattcgaaatg

SEQ ID NO: 194956 - DNA, 25 bp, Artificial
  Probe
ttctcactgaaaacgatggtgacaa

SEQ ID NO: 194957 - DNA, 25 bp, Artificial
  Probe
cactaaggttgtccagtttccttat

SEQ ID NO: 194958 - DNA, 25 bp, Artificial
  Probe
gtagaagaccaagtcagctacatat

SEQ ID NO: 194959 - DNA, 25 bp, Artificial
  Probe
tacactctattttgggaattcaatg

SEQ ID NO: 194960 - DNA, 25 bp, Artificial
  Probe
agtacactctattttgggaattcaa

SEQ ID NO: 194961 - DNA, 25 bp, Artificial
  Probe
aagaccaagtcagctacatatagtg

SEQ ID NO: 194962 - DNA, 25 bp, Artificial
  Probe
gccatgtaccagagcccagtaaggc

SEQ ID NO: 194963 - DNA, 25 bp, Artificial
  Probe
cagagcccagtaaggctccgaagtt

SEQ ID NO: 194964 - DNA, 25 bp, Artificial
  Probe
ctcactgaaaacgatggtgacaaag

SEQ ID NO: 194965 - DNA, 25 bp, Artificial
  Probe
ctacatatagtggaatggggcagcc

SEQ ID NO: 194966 - DNA, 25 bp, Artificial
  Probe
tggggcagccctcatctgactgagg

SEQ ID NO: 194967 - DNA, 25 bp, Artificial
  Probe
cacaaaacatggaattcgaaatggg

SEQ ID NO: 194968 - DNA, 25 bp, Artificial
  Probe
ggcagccctcatctgactgagggag

SEQ ID NO: 194969 - DNA, 25 bp, Artificial
  Probe
gaccaagtcagctacatatagtgga

SEQ ID NO: 194970 - DNA, 25 bp, Artificial
  Probe
ggacgcaagcaaaccaaggaaaagg

SEQ ID NO: 194971 - DNA, 25 bp, Artificial
  Probe
tgaagcactaaggttgtccagtttc

SEQ ID NO: 194972 - DNA, 25 bp, Artificial
  Probe
gggcagccctcatctgactgaggga

SEQ ID NO: 194973 - DNA, 25 bp, Artificial
  Probe
agtagttccgtatggctacaaacaa

SEQ ID NO: 194974 - DNA, 25 bp, Artificial
  Probe
ttccctactctggtattcaaatgga

SEQ ID NO: 194975 - DNA, 25 bp, Artificial
  Probe
aaaggggctgatatcctctgatatg

SEQ ID NO: 194976 - DNA, 25 bp, Artificial
  Probe
gaaggacagagtccacaccagctgg

SEQ ID NO: 194977 - DNA, 25 bp, Artificial
  Probe
agaagcaggcccagggagaacacag

SEQ ID NO: 194978 - DNA, 25 bp, Artificial
  Probe
cgtatctaaggcaacgccacctgac

SEQ ID NO: 194979 - DNA, 25 bp, Artificial
  Probe
ctctgatatgatatcaacggctctc

SEQ ID NO: 194980 - DNA, 25 bp, Artificial
  Probe
gactcccatgcaaacagctgccatt

SEQ ID NO: 194981 - DNA, 25 bp, Artificial
  Probe
caagagtgacaggaccccaaagtcc

SEQ ID NO: 194982 - DNA, 25 bp, Artificial
  Probe
gcaagctggggctgcacaggcctaa

SEQ ID NO: 194983 - DNA, 25 bp, Artificial
  Probe
catttggcagggactcaggatactc

SEQ ID NO: 194984 - DNA, 25 bp, Artificial
  Probe
gtatctaaggcaacgccacctgact

SEQ ID NO: 194985 - DNA, 25 bp, Artificial
  Probe
caaacagctgccattcctgccaagg

SEQ ID NO: 194986 - DNA, 25 bp, Artificial
  Probe
gcccacaggctcgtcgcaagctggg

SEQ ID NO: 194987 - DNA, 25 bp, Artificial
  Probe
tcagcagtgatgactcaagaaggac

SEQ ID NO: 194988 - DNA, 25 bp, Artificial
  Probe
agactaaggacattcgtctatagca

SEQ ID NO: 194989 - DNA, 25 bp, Artificial
  Probe
gaatcgtatctaaggcaacgccacc

SEQ ID NO: 194990 - DNA, 25 bp, Artificial
  Probe
gccaaggtacctaggccgagcttca

SEQ ID NO: 194991 - DNA, 25 bp, Artificial
  Probe
ggaccaaagcttgttcaaaggggct

SEQ ID NO: 194992 - DNA, 25 bp, Artificial
  Probe
gatatgatatcaacggctctcattt

SEQ ID NO: 194993 - DNA, 25 bp, Artificial
  Probe
agcccacaggctcgtcgcaagctgg

SEQ ID NO: 194994 - DNA, 25 bp, Artificial
  Probe
ctggggctgcacaggcctaacagaa

SEQ ID NO: 194995 - DNA, 25 bp, Artificial
  Probe
agctgccattcctgccaaggtacct

SEQ ID NO: 194996 - DNA, 25 bp, Artificial
  Probe
tgatgactcaagaaggacagagtcc

SEQ ID NO: 194997 - DNA, 25 bp, Artificial
  Probe
cagaactgacactgtgaggaaagat

SEQ ID NO: 194998 - DNA, 25 bp, Artificial
  Probe
ctgtaggggaccaaagcttgttcaa

SEQ ID NO: 194999 - DNA, 25 bp, Artificial
  Probe
ttggggaatcgtatctaaggcaacg

SEQ ID NO: 195000 - DNA, 25 bp, Artificial
  Probe
atgactcaagaaggacagagtccac

SEQ ID NO: 195001 - DNA, 25 bp, Artificial
  Probe
cccaatcatttgtatgtgtgagttg

SEQ ID NO: 195002 - DNA, 25 bp, Artificial
  Probe
caccagctggaagtgagactaagga

SEQ ID NO: 195003 - DNA, 25 bp, Artificial
  Probe
aagcttgttcaaaggggctgatatc

SEQ ID NO: 195004 - DNA, 25 bp, Artificial
  Probe
caaagtccccaatcatttgtatgtg

SEQ ID NO: 195005 - DNA, 25 bp, Artificial
  Probe
gctcgtcgcaagctggggctgcaca

SEQ ID NO: 195006 - DNA, 25 bp, Artificial
  Probe
cgagcttcagcctcttaaatccaag

SEQ ID NO: 195007 - DNA, 25 bp, Artificial
  Probe
tgactcccatgcaaacagctgccat

SEQ ID NO: 195008 - DNA, 25 bp, Artificial
  Probe
gatatcaacggctctcatttggcag

SEQ ID NO: 195009 - DNA, 25 bp, Artificial
  Probe
gtacctaggccgagcttcagcctct

SEQ ID NO: 195010 - DNA, 25 bp, Artificial
  Probe
aaatccaagggagaagcaggcccag

SEQ ID NO: 195011 - DNA, 25 bp, Artificial
  Probe
ctcatcctgtggtcccaagagtgac

SEQ ID NO: 195012 - DNA, 25 bp, Artificial
  Probe
gccattcctgccaaggtacctaggc

SEQ ID NO: 195013 - DNA, 25 bp, Artificial
  Probe
ggagaacacagcagagtccagacta

SEQ ID NO: 195014 - DNA, 25 bp, Artificial
  Probe
ctcttaaatccaagggagaagcagg

SEQ ID NO: 195015 - DNA, 25 bp, Artificial
  Probe
cagtcaggtgtcagttcatgtaggg

SEQ ID NO: 195016 - DNA, 25 bp, Artificial
  Probe
ctctcatttggcagggactcaggat

SEQ ID NO: 195017 - DNA, 25 bp, Artificial
  Probe
gctgcacaggcctaacagaactgac

SEQ ID NO: 195018 - DNA, 25 bp, Artificial
  Probe
agatttgtcgatcagcagtgatgac

SEQ ID NO: 195019 - DNA, 25 bp, Artificial
  Probe
actggtccgctttgcccgagatgcc

SEQ ID NO: 195020 - DNA, 25 bp, Artificial
  Probe
aggcccagggagaacacagcagagt

SEQ ID NO: 195021 - DNA, 25 bp, Artificial
  Probe
acttctggaggtcgagagggcctct

SEQ ID NO: 195022 - DNA, 25 bp, Artificial
  Probe
ccgactgactgcagggacgcgatgc

SEQ ID NO: 195023 - DNA, 25 bp, Artificial
  Probe
ggagaaacctcagaatttctatgag

SEQ ID NO: 195024 - DNA, 25 bp, Artificial
  Probe
ggcctctggacatgtgggtgtcccc

SEQ ID NO: 195025 - DNA, 25 bp, Artificial
  Probe
caggacgccgcgattttgccttcag

SEQ ID NO: 195026 - DNA, 25 bp, Artificial
  Probe
tgcgccccgactgactgcagggacg

SEQ ID NO: 195027 - DNA, 25 bp, Artificial
  Probe
cgaggactcttaagggccgtggact

SEQ ID NO: 195028 - DNA, 25 bp, Artificial
  Probe
gccttcagtttctggtgaagtccaa

SEQ ID NO: 195029 - DNA, 25 bp, Artificial
  Probe
gccccgactgactgcagggacgcga

SEQ ID NO: 195030 - DNA, 25 bp, Artificial
  Probe
tccacacttctggaggtcgagaggg

SEQ ID NO: 195031 - DNA, 25 bp, Artificial
  Probe
cccaggcggacaggacgccgcgatt

SEQ ID NO: 195032 - DNA, 25 bp, Artificial
  Probe
cccagatgtcccaagacttgacacg

SEQ ID NO: 195033 - DNA, 25 bp, Artificial
  Probe
tttctggtgaagtccaagcccggct

SEQ ID NO: 195034 - DNA, 25 bp, Artificial
  Probe
agaccgaggactcttaagggccgtg

SEQ ID NO: 195035 - DNA, 25 bp, Artificial
  Probe
agctgactgagcatgaatgaccgtg

SEQ ID NO: 195036 - DNA, 25 bp, Artificial
  Probe
tggtgaagtccaagcccggctccgg

SEQ ID NO: 195037 - DNA, 25 bp, Artificial
  Probe
cgctcctggcgttggaaagcggtcc

SEQ ID NO: 195038 - DNA, 25 bp, Artificial
  Probe
ggctctccacacttctggaggtcga

SEQ ID NO: 195039 - DNA, 25 bp, Artificial
  Probe
gcgcctcctagtggactccagcgag

SEQ ID NO: 195040 - DNA, 25 bp, Artificial
  Probe
gacatgtgggtgtcccctggtgccc

SEQ ID NO: 195041 - DNA, 25 bp, Artificial
  Probe
cgcgattttgccttcagtttctggt

SEQ ID NO: 195042 - DNA, 25 bp, Artificial
  Probe
gtgcgccccgactgactgcagggac

SEQ ID NO: 195043 - DNA, 25 bp, Artificial
  Probe
actgagcatgaatgaccgtggacgg

SEQ ID NO: 195044 - DNA, 25 bp, Artificial
  Probe
actgcccagatgtcccaagacttga

SEQ ID NO: 195045 - DNA, 25 bp, Artificial
  Probe
tgactgagcatgaatgaccgtggac

SEQ ID NO: 195046 - DNA, 25 bp, Artificial
  Probe
aggagcgcagagaccgaggactctt

SEQ ID NO: 195047 - DNA, 25 bp, Artificial
  Probe
gagaaacctcagaatttctatgaga

SEQ ID NO: 195048 - DNA, 25 bp, Artificial
  Probe
ctgactgcagggacgcgatgcgccc

SEQ ID NO: 195049 - DNA, 25 bp, Artificial
  Probe
ccgctcctggcgttggaaagcggtc

SEQ ID NO: 195050 - DNA, 25 bp, Artificial
  Probe
acgccgcgattttgccttcagtttc

SEQ ID NO: 195051 - DNA, 25 bp, Artificial
  Probe
caggcggacaggacgccgcgatttt

SEQ ID NO: 195052 - DNA, 25 bp, Artificial
  Probe
acggctctccacacttctggaggtc

SEQ ID NO: 195053 - DNA, 25 bp, Artificial
  Probe
tgcgcctcctagtggactccagcga

SEQ ID NO: 195054 - DNA, 25 bp, Artificial
  Probe
gaaacctcagaatttctatgagacg

SEQ ID NO: 195055 - DNA, 25 bp, Artificial
  Probe
tgacacggctctccacacttctgga

SEQ ID NO: 195056 - DNA, 25 bp, Artificial
  Probe
gcgcagagaccgaggactcttaagg

SEQ ID NO: 195057 - DNA, 25 bp, Artificial
  Probe
tgggactgcccagatgtcccaagac

SEQ ID NO: 195058 - DNA, 25 bp, Artificial
  Probe
ctcctggcgttggaaagcggtccgc

SEQ ID NO: 195059 - DNA, 25 bp, Artificial
  Probe
gctctccacacttctggaggtcgag

SEQ ID NO: 195060 - DNA, 25 bp, Artificial
  Probe
gagagggtctcttgggcccctatat

SEQ ID NO: 195061 - DNA, 25 bp, Artificial
  Probe
cctcagaatttctatgagacgcccc

SEQ ID NO: 195062 - DNA, 25 bp, Artificial
  Probe
tgtcccaagacttgacacggctctc

SEQ ID NO: 195063 - DNA, 25 bp, Artificial
  Probe
cctctggacatgtgggtgtcccctg

SEQ ID NO: 195064 - DNA, 25 bp, Artificial
  Probe
cttcagtttctggtgaagtccaagc

SEQ ID NO: 195065 - DNA, 25 bp, Artificial
  Probe
cagatgtcccaagacttgacacggc

SEQ ID NO: 195066 - DNA, 25 bp, Artificial
  Probe
ttgacacggctctccacacttctgg

SEQ ID NO: 195067 - DNA, 25 bp, Artificial
  Probe
ctctttgtcaaatgctatgattctg

SEQ ID NO: 195068 - DNA, 25 bp, Artificial
  Probe
ggtaatgttagcacttgctaagcac

SEQ ID NO: 195069 - DNA, 25 bp, Artificial
  Probe
tatagcggccgcttctagctgtgtg

SEQ ID NO: 195070 - DNA, 25 bp, Artificial
  Probe
cgctctttgtcaaatgctatgattc

SEQ ID NO: 195071 - DNA, 25 bp, Artificial
  Probe
gctatgattctgtgacacaggagac

SEQ ID NO: 195072 - DNA, 25 bp, Artificial
  Probe
cttaacatcttacctgtggacaggg

SEQ ID NO: 195073 - DNA, 25 bp, Artificial
  Probe
tggaaactgcgctctttgtcaaatg

SEQ ID NO: 195074 - DNA, 25 bp, Artificial
  Probe
agctactaattaccagggtaatgtt

SEQ ID NO: 195075 - DNA, 25 bp, Artificial
  Probe
tgggatgcctcctaggactgtgcag

SEQ ID NO: 195076 - DNA, 25 bp, Artificial
  Probe
attaccagggtaatgttagcacttg

SEQ ID NO: 195077 - DNA, 25 bp, Artificial
  Probe
tgtgacacaggagacaatcgtccac

SEQ ID NO: 195078 - DNA, 25 bp, Artificial
  Probe
ggtgttcagtgtgttagcactctct

SEQ ID NO: 195079 - DNA, 25 bp, Artificial
  Probe
gttagcactctctgtcatctcagac

SEQ ID NO: 195080 - DNA, 25 bp, Artificial
  Probe
gttagcacttgctaagcacttatca

SEQ ID NO: 195081 - DNA, 25 bp, Artificial
  Probe
ttacctgtggacagggcaaatggaa

SEQ ID NO: 195082 - DNA, 25 bp, Artificial
  Probe
ttcagtgtgttagcactctctgtca

SEQ ID NO: 195083 - DNA, 25 bp, Artificial
  Probe
tctatagtgcacagccaacagctgc

SEQ ID NO: 195084 - DNA, 25 bp, Artificial
  Probe
agcggccgcttctagctgtgtgcat

SEQ ID NO: 195085 - DNA, 25 bp, Artificial
  Probe
tgttagcacttgctaagcacttatc

SEQ ID NO: 195086 - DNA, 25 bp, Artificial
  Probe
cagtgggatgcctcctaggactgtg

SEQ ID NO: 195087 - DNA, 25 bp, Artificial
  Probe
ccaacagctgccaacagtgggatgc

SEQ ID NO: 195088 - DNA, 25 bp, Artificial
  Probe
ccaacagtgggatgcctcctaggac

SEQ ID NO: 195089 - DNA, 25 bp, Artificial
  Probe
gccaacagtgggatgcctcctagga

SEQ ID NO: 195090 - DNA, 25 bp, Artificial
  Probe
ctatgattctgtgacacaggagaca

SEQ ID NO: 195091 - DNA, 25 bp, Artificial
  Probe
aaagtccttggaattaatagctact

SEQ ID NO: 195092 - DNA, 25 bp, Artificial
  Probe
gtgttcagtgtgttagcactctctg

SEQ ID NO: 195093 - DNA, 25 bp, Artificial
  Probe
tgtagtgctgcctaatctgtgtggt

SEQ ID NO: 195094 - DNA, 25 bp, Artificial
  Probe
tgattctgtgacacaggagacaatc

SEQ ID NO: 195095 - DNA, 25 bp, Artificial
  Probe
tagtgcacagccaacagctgccaac

SEQ ID NO: 195096 - DNA, 25 bp, Artificial
  Probe
accttaacatcttacctgtggacag

SEQ ID NO: 195097 - DNA, 25 bp, Artificial
  Probe
tcgtccacttatagcggccgcttct

SEQ ID NO: 195098 - DNA, 25 bp, Artificial
  Probe
taattaccagggtaatgttagcact

SEQ ID NO: 195099 - DNA, 25 bp, Artificial
  Probe
agctgccaacagtgggatgcctcct

SEQ ID NO: 195100 - DNA, 25 bp, Artificial
  Probe
acacaggagacaatcgtccacttat

SEQ ID NO: 195101 - DNA, 25 bp, Artificial
  Probe
ggccgcttctagctgtgtgcatgta

SEQ ID NO: 195102 - DNA, 25 bp, Artificial
  Probe
attaatagctactaattaccagggt

SEQ ID NO: 195103 - DNA, 25 bp, Artificial
  Probe
tgcatgtagtgctgcctaatctgtg

SEQ ID NO: 195104 - DNA, 25 bp, Artificial
  Probe
cctcctaggactgtgcaggtgcgag

SEQ ID NO: 195105 - DNA, 25 bp, Artificial
  Probe
aatggccagatcaccggagccagtc

SEQ ID NO: 195106 - DNA, 25 bp, Artificial
  Probe
ccagatcaccggagccagtctatag

SEQ ID NO: 195107 - DNA, 25 bp, Artificial
  Probe
ggatgcctcctaggactgtgcaggt

SEQ ID NO: 195108 - DNA, 25 bp, Artificial
  Probe
atcaccggagccagtctatagtgca

SEQ ID NO: 195109 - DNA, 25 bp, Artificial
  Probe
gcacagccaacagctgccaacagtg

SEQ ID NO: 195110 - DNA, 25 bp, Artificial
  Probe
tctgtgacacaggagacaatcgtcc

SEQ ID NO: 195111 - DNA, 25 bp, Artificial
  Probe
gtgttagcactctctgtcatctcag

SEQ ID NO: 195112 - DNA, 25 bp, Artificial
  Probe
acagccaacagctgccaacagtggg

SEQ ID NO: 195113 - DNA, 25 bp, Artificial
  Probe
cgttggagtctactgactcaaacat

SEQ ID NO: 195114 - DNA, 25 bp, Artificial
  Probe
gctcttgtcatgtacttcctgggaa

SEQ ID NO: 195115 - DNA, 25 bp, Artificial
  Probe
tacttcctgggaaggacctaccctg

SEQ ID NO: 195116 - DNA, 25 bp, Artificial
  Probe
gtctctagctcgttggagtctactg

SEQ ID NO: 195117 - DNA, 25 bp, Artificial
  Probe
tgactcccctacaaggctgtgtgat

SEQ ID NO: 195118 - DNA, 25 bp, Artificial
  Probe
gcattcagtcctatccacagagagc

SEQ ID NO: 195119 - DNA, 25 bp, Artificial
  Probe
tcatgtacttcctgggaaggaccta

SEQ ID NO: 195120 - DNA, 25 bp, Artificial
  Probe
aagctcttgtcatgtacttcctggg

SEQ ID NO: 195121 - DNA, 25 bp, Artificial
  Probe
caataatgtctctagctcgttggag

SEQ ID NO: 195122 - DNA, 25 bp, Artificial
  Probe
tagctcgttggagtctactgactca

SEQ ID NO: 195123 - DNA, 25 bp, Artificial
  Probe
tgtcatgtacttcctgggaaggacc

SEQ ID NO: 195124 - DNA, 25 bp, Artificial
  Probe
ctacaaggctgtgtgatccttcaaa

SEQ ID NO: 195125 - DNA, 25 bp, Artificial
  Probe
acagcattcagtcctatccacagag

SEQ ID NO: 195126 - DNA, 25 bp, Artificial
  Probe
aggccacagcattcagtcctatcca

SEQ ID NO: 195127 - DNA, 25 bp, Artificial
  Probe
tcaataatgtctctagctcgttgga

SEQ ID NO: 195128 - DNA, 25 bp, Artificial
  Probe
cagtcctatccacagagagcagcag

SEQ ID NO: 195129 - DNA, 25 bp, Artificial
  Probe
gaaggccacagcattcagtcctatc

SEQ ID NO: 195130 - DNA, 25 bp, Artificial
  Probe
gactcccctacaaggctgtgtgatc

SEQ ID NO: 195131 - DNA, 25 bp, Artificial
  Probe
cagcattcagtcctatccacagaga

SEQ ID NO: 195132 - DNA, 25 bp, Artificial
  Probe
agctcgttggagtctactgactcaa

SEQ ID NO: 195133 - DNA, 25 bp, Artificial
  Probe
atgtctctagctcgttggagtctac

SEQ ID NO: 195134 - DNA, 25 bp, Artificial
  Probe
agctcttgtcatgtacttcctggga

SEQ ID NO: 195135 - DNA, 25 bp, Artificial
  Probe
ctcttgtcatgtacttcctgggaag

SEQ ID NO: 195136 - DNA, 25 bp, Artificial
  Probe
aaagctcttgtcatgtacttcctgg

SEQ ID NO: 195137 - DNA, 25 bp, Artificial
  Probe
gctcgttggagtctactgactcaaa

SEQ ID NO: 195138 - DNA, 25 bp, Artificial
  Probe
cccctacaaggctgtgtgatccttc

SEQ ID NO: 195139 - DNA, 25 bp, Artificial
  Probe
taatgtctctagctcgttggagtct

SEQ ID NO: 195140 - DNA, 25 bp, Artificial
  Probe
tagaaaggcctgactcccctacaag

SEQ ID NO: 195141 - DNA, 25 bp, Artificial
  Probe
attcagtcctatccacagagagcag

SEQ ID NO: 195142 - DNA, 25 bp, Artificial
  Probe
ttggagtctactgactcaaacattt

SEQ ID NO: 195143 - DNA, 25 bp, Artificial
  Probe
gtcatgtacttcctgggaaggacct

SEQ ID NO: 195144 - DNA, 25 bp, Artificial
  Probe
ctctagctcgttggagtctactgac

SEQ ID NO: 195145 - DNA, 25 bp, Artificial
  Probe
tctctagctcgttggagtctactga

SEQ ID NO: 195146 - DNA, 25 bp, Artificial
  Probe
gaaaggcctgactcccctacaaggc

SEQ ID NO: 195147 - DNA, 25 bp, Artificial
  Probe
cattcagtcctatccacagagagca

SEQ ID NO: 195148 - DNA, 25 bp, Artificial
  Probe
aatgtctctagctcgttggagtcta

SEQ ID NO: 195149 - DNA, 25 bp, Artificial
  Probe
ttgtcatgtacttcctgggaaggac

SEQ ID NO: 195150 - DNA, 25 bp, Artificial
  Probe
ttcagtcctatccacagagagcagc

SEQ ID NO: 195151 - DNA, 25 bp, Artificial
  Probe
ataatgtctctagctcgttggagtc

SEQ ID NO: 195152 - DNA, 25 bp, Artificial
  Probe
ctagctcgttggagtctactgactc

SEQ ID NO: 195153 - DNA, 25 bp, Artificial
  Probe
tacaaggctgtgtgatccttcaaac

SEQ ID NO: 195154 - DNA, 25 bp, Artificial
  Probe
ctcgttggagtctactgactcaaac

SEQ ID NO: 195155 - DNA, 25 bp, Artificial
  Probe
tcttgtcatgtacttcctgggaagg

SEQ ID NO: 195156 - DNA, 25 bp, Artificial
  Probe
taaagctcttgtcatgtacttcctg

SEQ ID NO: 195157 - DNA, 25 bp, Artificial
  Probe
ctagaaaggcctgactcccctacaa

SEQ ID NO: 195158 - DNA, 25 bp, Artificial
  Probe
cctacaaggctgtgtgatccttcaa

SEQ ID NO: 195159 - DNA, 25 bp, Artificial
  Probe
gtggtacggccaacaagaccactct

SEQ ID NO: 195160 - DNA, 25 bp, Artificial
  Probe
gccaacaagaccactctgtatgcaa

SEQ ID NO: 195161 - DNA, 25 bp, Artificial
  Probe
ttgctctcccaaaacagattagtag

SEQ ID NO: 195162 - DNA, 25 bp, Artificial
  Probe
aagaccactctgtatgcaaaagccc

SEQ ID NO: 195163 - DNA, 25 bp, Artificial
  Probe
gcaaaagcccaacatggctgtaact

SEQ ID NO: 195164 - DNA, 25 bp, Artificial
  Probe
acggccaacaagaccactctgtatg

SEQ ID NO: 195165 - DNA, 25 bp, Artificial
  Probe
accactctgtatgcaaaagcccaac

SEQ ID NO: 195166 - DNA, 25 bp, Artificial
  Probe
attttggactgtggtacggccaaca

SEQ ID NO: 195167 - DNA, 25 bp, Artificial
  Probe
ctctgtatgcaaaagcccaacatgg

SEQ ID NO: 195168 - DNA, 25 bp, Artificial
  Probe
ccaacaagaccactctgtatgcaaa

SEQ ID NO: 195169 - DNA, 25 bp, Artificial
  Probe
gcccaacatggctgtaactggagat

SEQ ID NO: 195170 - DNA, 25 bp, Artificial
  Probe
tttggactgtggtacggccaacaag

SEQ ID NO: 195171 - DNA, 25 bp, Artificial
  Probe
aacaagaccactctgtatgcaaaag

SEQ ID NO: 195172 - DNA, 25 bp, Artificial
  Probe
tgcaaaagcccaacatggctgtaac

SEQ ID NO: 195173 - DNA, 25 bp, Artificial
  Probe
ttggactgtggtacggccaacaaga

SEQ ID NO: 195174 - DNA, 25 bp, Artificial
  Probe
tctgtatgcaaaagcccaacatggc

SEQ ID NO: 195175 - DNA, 25 bp, Artificial
  Probe
tggactgtggtacggccaacaagac

SEQ ID NO: 195176 - DNA, 25 bp, Artificial
  Probe
ggtacggccaacaagaccactctgt

SEQ ID NO: 195177 - DNA, 25 bp, Artificial
  Probe
tggtacggccaacaagaccactctg

SEQ ID NO: 195178 - DNA, 25 bp, Artificial
  Probe
tacggccaacaagaccactctgtat

SEQ ID NO: 195179 - DNA, 25 bp, Artificial
  Probe
ttgaaagacatttgctctcccaaaa

SEQ ID NO: 195180 - DNA, 25 bp, Artificial
  Probe
tgtggtacggccaacaagaccactc

SEQ ID NO: 195181 - DNA, 25 bp, Artificial
  Probe
cggccaacaagaccactctgtatgc

SEQ ID NO: 195182 - DNA, 25 bp, Artificial
  Probe
agaccactctgtatgcaaaagccca

SEQ ID NO: 195183 - DNA, 25 bp, Artificial
  Probe
agcccaacatggctgtaactggaga

SEQ ID NO: 195184 - DNA, 25 bp, Artificial
  Probe
gtacggccaacaagaccactctgta

SEQ ID NO: 195185 - DNA, 25 bp, Artificial
  Probe
ccaacatggctgtaactggagatga

SEQ ID NO: 195186 - DNA, 25 bp, Artificial
  Probe
ttattttggactgtggtacggccaa

SEQ ID NO: 195187 - DNA, 25 bp, Artificial
  Probe
gctctcccaaaacagattagtagaa

SEQ ID NO: 195188 - DNA, 25 bp, Artificial
  Probe
tttattttggactgtggtacggcca

SEQ ID NO: 195189 - DNA, 25 bp, Artificial
  Probe
tgctctcccaaaacagattagtaga

SEQ ID NO: 195190 - DNA, 25 bp, Artificial
  Probe
acaagaccactctgtatgcaaaagc

SEQ ID NO: 195191 - DNA, 25 bp, Artificial
  Probe
ctgtggtacggccaacaagaccact

SEQ ID NO: 195192 - DNA, 25 bp, Artificial
  Probe
actctgtatgcaaaagcccaacatg

SEQ ID NO: 195193 - DNA, 25 bp, Artificial
  Probe
ttttggactgtggtacggccaacaa

SEQ ID NO: 195194 - DNA, 25 bp, Artificial
  Probe
atgcaaaagcccaacatggctgtaa

SEQ ID NO: 195195 - DNA, 25 bp, Artificial
  Probe
catggctgtaactggagatgaaact

SEQ ID NO: 195196 - DNA, 25 bp, Artificial
  Probe
gaccactctgtatgcaaaagcccaa

SEQ ID NO: 195197 - DNA, 25 bp, Artificial
  Probe
acatggctgtaactggagatgaaac

SEQ ID NO: 195198 - DNA, 25 bp, Artificial
  Probe
caagaccactctgtatgcaaaagcc

SEQ ID NO: 195199 - DNA, 25 bp, Artificial
  Probe
caacatggctgtaactggagatgaa

SEQ ID NO: 195200 - DNA, 25 bp, Artificial
  Probe
cccaacatggctgtaactggagatg

SEQ ID NO: 195201 - DNA, 25 bp, Artificial
  Probe
aacatggctgtaactggagatgaaa

SEQ ID NO: 195202 - DNA, 25 bp, Artificial
  Probe
ggccaacaagaccactctgtatgca

SEQ ID NO: 195203 - DNA, 25 bp, Artificial
  Probe
tattttggactgtggtacggccaac

SEQ ID NO: 195204 - DNA, 25 bp, Artificial
  Probe
atggctgtaactggagatgaaactg

SEQ ID NO: 195205 - DNA, 25 bp, Artificial
  Probe
cagctgacattcctgttgagtttcc

SEQ ID NO: 195206 - DNA, 25 bp, Artificial
  Probe
gttgagtttccttattcacttcatg

SEQ ID NO: 195207 - DNA, 25 bp, Artificial
  Probe
cccataggacctactgtgtaccact

SEQ ID NO: 195208 - DNA, 25 bp, Artificial
  Probe
cccataggacctactgtgtgccact

SEQ ID NO: 195209 - DNA, 25 bp, Artificial
  Probe
ccataggacctactgtgtaccactt

SEQ ID NO: 195210 - DNA, 25 bp, Artificial
  Probe
accctttctgccacttagcatgtgt

SEQ ID NO: 195211 - DNA, 25 bp, Artificial
  Probe
ccataggacctactgtgtgccactt

SEQ ID NO: 195212 - DNA, 25 bp, Artificial
  Probe
aggacctactgtgtaccacttggtt

SEQ ID NO: 195213 - DNA, 25 bp, Artificial
  Probe
cctttctgccacttagcatgtgtat

SEQ ID NO: 195214 - DNA, 25 bp, Artificial
  Probe
gacattcctgttgagtttccttatt

SEQ ID NO: 195215 - DNA, 25 bp, Artificial
  Probe
ctactgtgtaccacttggtttctca

SEQ ID NO: 195216 - DNA, 25 bp, Artificial
  Probe
ctactgcgggccacttagtttcaca

SEQ ID NO: 195217 - DNA, 25 bp, Artificial
  Probe
gctgcagctgacattcctgttgagt

SEQ ID NO: 195218 - DNA, 25 bp, Artificial
  Probe
cctactgtgtaccacttggtttctc

SEQ ID NO: 195219 - DNA, 25 bp, Artificial
  Probe
actgcgggccacttagtttcacagc

SEQ ID NO: 195220 - DNA, 25 bp, Artificial
  Probe
actgtgtaccacttggtttctcaga

SEQ ID NO: 195221 - DNA, 25 bp, Artificial
  Probe
ttctgccacttagcatgtgtataat

SEQ ID NO: 195222 - DNA, 25 bp, Artificial
  Probe
ccacttagcatgtgtataatcagac

SEQ ID NO: 195223 - DNA, 25 bp, Artificial
  Probe
tgcgggccacttagtttcacagcct

SEQ ID NO: 195224 - DNA, 25 bp, Artificial
  Probe
tttctgccacttagcatgtgtataa

SEQ ID NO: 195225 - DNA, 25 bp, Artificial
  Probe
cgggccacttagtttcacagccttt

SEQ ID NO: 195226 - DNA, 25 bp, Artificial
  Probe
taccacttggtttctcagacagccc

SEQ ID NO: 195227 - DNA, 25 bp, Artificial
  Probe
tgtaccacttggtttctcagacagc

SEQ ID NO: 195228 - DNA, 25 bp, Artificial
  Probe
cacttagcatgtgtataatcagact

SEQ ID NO: 195229 - DNA, 25 bp, Artificial
  Probe
ataggacctactgtgtgccactttg

SEQ ID NO: 195230 - DNA, 25 bp, Artificial
  Probe
ataggacctactgtgtaccacttgg

SEQ ID NO: 195231 - DNA, 25 bp, Artificial
  Probe
ctgcagctgacattcctgttgagtt

SEQ ID NO: 195232 - DNA, 25 bp, Artificial
  Probe
ctaaggacctactgcgggccactta

SEQ ID NO: 195233 - DNA, 25 bp, Artificial
  Probe
cctaaggacctactgcgggccactt

SEQ ID NO: 195234 - DNA, 25 bp, Artificial
  Probe
ctcccataggacctactgtgtacca

SEQ ID NO: 195235 - DNA, 25 bp, Artificial
  Probe
tctgccacttagcatgtgtataatc

SEQ ID NO: 195236 - DNA, 25 bp, Artificial
  Probe
tgccacttagcatgtgtataatcag

SEQ ID NO: 195237 - DNA, 25 bp, Artificial
  Probe
tgacattcctgttgagtttccttat

SEQ ID NO: 195238 - DNA, 25 bp, Artificial
  Probe
aaatcaaccaatgtgaaagcccagg

SEQ ID NO: 195239 - DNA, 25 bp, Artificial
  Probe
ctgacattcctgttgagtttcctta

SEQ ID NO: 195240 - DNA, 25 bp, Artificial
  Probe
ctgtgtaccacttggtttctcagac

SEQ ID NO: 195241 - DNA, 25 bp, Artificial
  Probe
cataggacctactgtgtgccacttt

SEQ ID NO: 195242 - DNA, 25 bp, Artificial
  Probe
tactgcgggccacttagtttcacag

SEQ ID NO: 195243 - DNA, 25 bp, Artificial
  Probe
taggacctactgtgtaccacttggt

SEQ ID NO: 195244 - DNA, 25 bp, Artificial
  Probe
taggacctactgtgtgccactttgt

SEQ ID NO: 195245 - DNA, 25 bp, Artificial
  Probe
gcgggccacttagtttcacagcctt

SEQ ID NO: 195246 - DNA, 25 bp, Artificial
  Probe
gtgtaccacttggtttctcagacag

SEQ ID NO: 195247 - DNA, 25 bp, Artificial
  Probe
gacctactgtgtaccacttggtttc

SEQ ID NO: 195248 - DNA, 25 bp, Artificial
  Probe
gcagctgacattcctgttgagtttc

SEQ ID NO: 195249 - DNA, 25 bp, Artificial
  Probe
ccctttctgccacttagcatgtgta

SEQ ID NO: 195250 - DNA, 25 bp, Artificial
  Probe
ggccacttagtttcacagcctttcc

SEQ ID NO: 195251 - DNA, 25 bp, Artificial
  Probe
ctaccaactggagaactactgcaac

SEQ ID NO: 195252 - DNA, 25 bp, Artificial
  Probe
ccgtcgtgaagtggaggacccgcaa

SEQ ID NO: 195253 - DNA, 25 bp, Artificial
  Probe
tgctggccctgctcgtcctctggga

SEQ ID NO: 195254 - DNA, 25 bp, Artificial
  Probe
tggaggacccgcaagtgccacaact

SEQ ID NO: 195255 - DNA, 25 bp, Artificial
  Probe
caagtcccgtcgtgaagtggaggac

SEQ ID NO: 195256 - DNA, 25 bp, Artificial
  Probe
cccgcaagtgccacaactggagctg

SEQ ID NO: 195257 - DNA, 25 bp, Artificial
  Probe
gtggatcagtgctgcaccagcatct

SEQ ID NO: 195258 - DNA, 25 bp, Artificial
  Probe
aggacccgcaagtgccacaactgga

SEQ ID NO: 195259 - DNA, 25 bp, Artificial
  Probe
tcagaccttggcactggaggttgcc

SEQ ID NO: 195260 - DNA, 25 bp, Artificial
  Probe
caaacagcacctttgtggtcctcac

SEQ ID NO: 195261 - DNA, 25 bp, Artificial
  Probe
cagaagcgtggcattgtggatcagt

SEQ ID NO: 195262 - DNA, 25 bp, Artificial
  Probe
gctccctctaccaactggagaacta

SEQ ID NO: 195263 - DNA, 25 bp, Artificial
  Probe
acgtggtttcttctacacacccaag

SEQ ID NO: 195264 - DNA, 25 bp, Artificial
  Probe
accttggcactggaggttgcccggc

SEQ ID NO: 195265 - DNA, 25 bp, Artificial
  Probe
tggatcagtgctgcaccagcatctg

SEQ ID NO: 195266 - DNA, 25 bp, Artificial
  Probe
cgtggcattgtggatcagtgctgca

SEQ ID NO: 195267 - DNA, 25 bp, Artificial
  Probe
agaccttggcactggaggttgcccg

SEQ ID NO: 195268 - DNA, 25 bp, Artificial
  Probe
acccaagtcccgtcgtgaagtggag

SEQ ID NO: 195269 - DNA, 25 bp, Artificial
  Probe
ttgtcaaacagcacctttgtggtcc

SEQ ID NO: 195270 - DNA, 25 bp, Artificial
  Probe
ggatcttcagaccttggcactggag

SEQ ID NO: 195271 - DNA, 25 bp, Artificial
  Probe
tgcccaggcttttgtcaaacagcac

SEQ ID NO: 195272 - DNA, 25 bp, Artificial
  Probe
ccaagcctgcccaggcttttgtcaa

SEQ ID NO: 195273 - DNA, 25 bp, Artificial
  Probe
cattgtggatcagtgctgcaccagc

SEQ ID NO: 195274 - DNA, 25 bp, Artificial
  Probe
gctggccctgctcgtcctctgggag

SEQ ID NO: 195275 - DNA, 25 bp, Artificial
  Probe
caagtgccacaactggagctgggtg

SEQ ID NO: 195276 - DNA, 25 bp, Artificial
  Probe
tcccgtcgtgaagtggaggacccgc

SEQ ID NO: 195277 - DNA, 25 bp, Artificial
  Probe
atcttcagaccttggcactggaggt

SEQ ID NO: 195278 - DNA, 25 bp, Artificial
  Probe
tgtggggaacgtggtttcttctaca

SEQ ID NO: 195279 - DNA, 25 bp, Artificial
  Probe
cctttgtggtcctcacctggtggag

SEQ ID NO: 195280 - DNA, 25 bp, Artificial
  Probe
gcacctttgtggtcctcacctggtg

SEQ ID NO: 195281 - DNA, 25 bp, Artificial
  Probe
agcacctttgtggtcctcacctggt

SEQ ID NO: 195282 - DNA, 25 bp, Artificial
  Probe
gcattgtggatcagtgctgcaccag

SEQ ID NO: 195283 - DNA, 25 bp, Artificial
  Probe
ccttggcactggaggttgcccggca

SEQ ID NO: 195284 - DNA, 25 bp, Artificial
  Probe
gaacgtggtttcttctacacaccca

SEQ ID NO: 195285 - DNA, 25 bp, Artificial
  Probe
gccggggatcttcagaccttggcac

SEQ ID NO: 195286 - DNA, 25 bp, Artificial
  Probe
aacagcacctttgtggtcctcacct

SEQ ID NO: 195287 - DNA, 25 bp, Artificial
  Probe
gcaagtgccacaactggagctgggt

SEQ ID NO: 195288 - DNA, 25 bp, Artificial
  Probe
gcctgcccaggcttttgtcaaacag

SEQ ID NO: 195289 - DNA, 25 bp, Artificial
  Probe
gtggtttcttctacacacccaagtc

SEQ ID NO: 195290 - DNA, 25 bp, Artificial
  Probe
aagcgtggcattgtggatcagtgct

SEQ ID NO: 195291 - DNA, 25 bp, Artificial
  Probe
ttgcccggcagaagcgtggcattgt

SEQ ID NO: 195292 - DNA, 25 bp, Artificial
  Probe
tctaccaactggagaactactgcaa

SEQ ID NO: 195293 - DNA, 25 bp, Artificial
  Probe
ccctctaccaactggagaactactg

SEQ ID NO: 195294 - DNA, 25 bp, Artificial
  Probe
tggcattgtggatcagtgctgcacc

SEQ ID NO: 195295 - DNA, 25 bp, Artificial
  Probe
ggagcccaagcctgcccaggctttt

SEQ ID NO: 195296 - DNA, 25 bp, Artificial
  Probe
tggccctgtggatgcgcttcctgcc

SEQ ID NO: 195297 - DNA, 25 bp, Artificial
  Probe
accaactggagaactactgcaacta

SEQ ID NO: 195298 - DNA, 25 bp, Artificial
  Probe
ccgccgcgaagtggaggacccacaa

SEQ ID NO: 195299 - DNA, 25 bp, Artificial
  Probe
ttgtggttctcacttggtggaagct

SEQ ID NO: 195300 - DNA, 25 bp, Artificial
  Probe
gtggttctcacttggtggaagctct

SEQ ID NO: 195301 - DNA, 25 bp, Artificial
  Probe
tgctggccctgctcatcctctggga

SEQ ID NO: 195302 - DNA, 25 bp, Artificial
  Probe
aggacccacaagtggcacaactgga

SEQ ID NO: 195303 - DNA, 25 bp, Artificial
  Probe
catcgtggatcagtgctgcaccagc

SEQ ID NO: 195304 - DNA, 25 bp, Artificial
  Probe
agtgctgcaccagcatctgctctct

SEQ ID NO: 195305 - DNA, 25 bp, Artificial
  Probe
gcgtggattcttctacacacccatg

SEQ ID NO: 195306 - DNA, 25 bp, Artificial
  Probe
gcggcatcgtggatcagtgctgcac

SEQ ID NO: 195307 - DNA, 25 bp, Artificial
  Probe
caaacagcacctttgtggttctcac

SEQ ID NO: 195308 - DNA, 25 bp, Artificial
  Probe
ttctcacttggtggaagctctctac

SEQ ID NO: 195309 - DNA, 25 bp, Artificial
  Probe
cagaagcgcggcatcgtggatcagt

SEQ ID NO: 195310 - DNA, 25 bp, Artificial
  Probe
agcatctgctctctctaccaactgg

SEQ ID NO: 195311 - DNA, 25 bp, Artificial
  Probe
ggccggtgaccttcagaccttggca

SEQ ID NO: 195312 - DNA, 25 bp, Artificial
  Probe
ctctaccaactggagaactactgca

SEQ ID NO: 195313 - DNA, 25 bp, Artificial
  Probe
tcagtgctgcaccagcatctgctct

SEQ ID NO: 195314 - DNA, 25 bp, Artificial
  Probe
ggcatcgtggatcagtgctgcacca

SEQ ID NO: 195315 - DNA, 25 bp, Artificial
  Probe
cgcggcatcgtggatcagtgctgca

SEQ ID NO: 195316 - DNA, 25 bp, Artificial
  Probe
tggatcagtgctgcaccagcatctg

SEQ ID NO: 195317 - DNA, 25 bp, Artificial
  Probe
ggcttttgtcaaacagcacctttgt

SEQ ID NO: 195318 - DNA, 25 bp, Artificial
  Probe
gtggattcttctacacacccatgtc

SEQ ID NO: 195319 - DNA, 25 bp, Artificial
  Probe
ccggtgaccttcagaccttggcact

SEQ ID NO: 195320 - DNA, 25 bp, Artificial
  Probe
ccacaagtggcacaactggagctgg

SEQ ID NO: 195321 - DNA, 25 bp, Artificial
  Probe
ctgcccaggcttttgtcaaacagca

SEQ ID NO: 195322 - DNA, 25 bp, Artificial
  Probe
gctggccctgctcatcctctgggag

SEQ ID NO: 195323 - DNA, 25 bp, Artificial
  Probe
tcaaacagcacctttgtggttctca

SEQ ID NO: 195324 - DNA, 25 bp, Artificial
  Probe
cagcacctttgtggttctcacttgg

SEQ ID NO: 195325 - DNA, 25 bp, Artificial
  Probe
agcgtggattcttctacacacccat

SEQ ID NO: 195326 - DNA, 25 bp, Artificial
  Probe
aagcgcggcatcgtggatcagtgct

SEQ ID NO: 195327 - DNA, 25 bp, Artificial
  Probe
gcacctttgtggttctcacttggtg

SEQ ID NO: 195328 - DNA, 25 bp, Artificial
  Probe
cgccgcgaagtggaggacccacaag

SEQ ID NO: 195329 - DNA, 25 bp, Artificial
  Probe
cctgcccaggcttttgtcaaacagc

SEQ ID NO: 195330 - DNA, 25 bp, Artificial
  Probe
gaccttcagaccttggcactggagg

SEQ ID NO: 195331 - DNA, 25 bp, Artificial
  Probe
aacagcacctttgtggttctcactt

SEQ ID NO: 195332 - DNA, 25 bp, Artificial
  Probe
acaagtggcacaactggagctgggt

SEQ ID NO: 195333 - DNA, 25 bp, Artificial
  Probe
agtggaggacccacaagtggcacaa

SEQ ID NO: 195334 - DNA, 25 bp, Artificial
  Probe
gctctctctaccaactggagaacta

SEQ ID NO: 195335 - DNA, 25 bp, Artificial
  Probe
tggaagctctctacctggtgtgtgg

SEQ ID NO: 195336 - DNA, 25 bp, Artificial
  Probe
cccacaagtggcacaactggagctg

SEQ ID NO: 195337 - DNA, 25 bp, Artificial
  Probe
gcatctgctctctctaccaactgga

SEQ ID NO: 195338 - DNA, 25 bp, Artificial
  Probe
atggccctgtggatccgcttcctgc

SEQ ID NO: 195339 - DNA, 25 bp, Artificial
  Probe
ctctctaccaactggagaactactg

SEQ ID NO: 195340 - DNA, 25 bp, Artificial
  Probe
atctgctctctctaccaactggaga

SEQ ID NO: 195341 - DNA, 25 bp, Artificial
  Probe
cacttggtggaagctctctacctgg

SEQ ID NO: 195342 - DNA, 25 bp, Artificial
  Probe
ggtgaccttcagaccttggcactgg

SEQ ID NO: 195343 - DNA, 25 bp, Artificial
  Probe
aaacggtgtggatgtatctgaccct

SEQ ID NO: 195344 - DNA, 25 bp, Artificial
  Probe
gccgcgtgcccttcgcgctgaccag

SEQ ID NO: 195345 - DNA, 25 bp, Artificial
  Probe
ccggtaagaggcttctcgaagcgcc

SEQ ID NO: 195346 - DNA, 25 bp, Artificial
  Probe
accgccgcgtgcccttcgcgctgac

SEQ ID NO: 195347 - DNA, 25 bp, Artificial
  Probe
tgaccagtgactccaatatgcccga

SEQ ID NO: 195348 - DNA, 25 bp, Artificial
  Probe
gaccagtgactccaatatgcccgaa

SEQ ID NO: 195349 - DNA, 25 bp, Artificial
  Probe
cccttcgcgctgaccagtgactcca

SEQ ID NO: 195350 - DNA, 25 bp, Artificial
  Probe
accagtgactccaatatgcccgaag

SEQ ID NO: 195351 - DNA, 25 bp, Artificial
  Probe
ctgcccgccggtaagaggcttctcg

SEQ ID NO: 195352 - DNA, 25 bp, Artificial
  Probe
cggtaagaggcttctcgaagcgccc

SEQ ID NO: 195353 - DNA, 25 bp, Artificial
  Probe
cagtgactccaatatgcccgaagat

SEQ ID NO: 195354 - DNA, 25 bp, Artificial
  Probe
ccgccggtaagaggcttctcgaagc

SEQ ID NO: 195355 - DNA, 25 bp, Artificial
  Probe
ccagtgactccaatatgcccgaaga

SEQ ID NO: 195356 - DNA, 25 bp, Artificial
  Probe
ccttcgcgctgaccagtgactccaa

SEQ ID NO: 195357 - DNA, 25 bp, Artificial
  Probe
ttcgcgctgaccagtgactccaata

SEQ ID NO: 195358 - DNA, 25 bp, Artificial
  Probe
tgcccgccggtaagaggcttctcga

SEQ ID NO: 195359 - DNA, 25 bp, Artificial
  Probe
cttcgcgctgaccagtgactccaat

SEQ ID NO: 195360 - DNA, 25 bp, Artificial
  Probe
tcgaagcgcccgccgaagaccactc

SEQ ID NO: 195361 - DNA, 25 bp, Artificial
  Probe
aagcgcccgccgaagaccactccct

SEQ ID NO: 195362 - DNA, 25 bp, Artificial
  Probe
cgcgctgaccagtgactccaatatg

SEQ ID NO: 195363 - DNA, 25 bp, Artificial
  Probe
ccgccgcgtgcccttcgcgctgacc

SEQ ID NO: 195364 - DNA, 25 bp, Artificial
  Probe
ccgccgaagaccactccctcggcca

SEQ ID NO: 195365 - DNA, 25 bp, Artificial
  Probe
cgctaaacggtgtggatgtatctga

SEQ ID NO: 195366 - DNA, 25 bp, Artificial
  Probe
gccgaagaccactccctcggccacc

SEQ ID NO: 195367 - DNA, 25 bp, Artificial
  Probe
aacggtgtggatgtatctgaccctg

SEQ ID NO: 195368 - DNA, 25 bp, Artificial
  Probe
taagaggcttctcgaagcgcccgcc

SEQ ID NO: 195369 - DNA, 25 bp, Artificial
  Probe
ggtaagaggcttctcgaagcgcccg

SEQ ID NO: 195370 - DNA, 25 bp, Artificial
  Probe
gctgcccgccggtaagaggcttctc

SEQ ID NO: 195371 - DNA, 25 bp, Artificial
  Probe
cccgccggtaagaggcttctcgaag

SEQ ID NO: 195372 - DNA, 25 bp, Artificial
  Probe
gcccgccggtaagaggcttctcgaa

SEQ ID NO: 195373 - DNA, 25 bp, Artificial
  Probe
tgtggatgtatctgaccctggctcc

SEQ ID NO: 195374 - DNA, 25 bp, Artificial
  Probe
gatgtatctgaccctggctccagag

SEQ ID NO: 195375 - DNA, 25 bp, Artificial
  Probe
gcccgccgaagaccactccctcggc

SEQ ID NO: 195376 - DNA, 25 bp, Artificial
  Probe
gtaagaggcttctcgaagcgcccgc

SEQ ID NO: 195377 - DNA, 25 bp, Artificial
  Probe
gtggatgtatctgaccctggctcca

SEQ ID NO: 195378 - DNA, 25 bp, Artificial
  Probe
ttctcgaagcgcccgccgaagacca

SEQ ID NO: 195379 - DNA, 25 bp, Artificial
  Probe
ccgctaaacggtgtggatgtatctg

SEQ ID NO: 195380 - DNA, 25 bp, Artificial
  Probe
gcgctgaccagtgactccaatatgc

SEQ ID NO: 195381 - DNA, 25 bp, Artificial
  Probe
ctgaccagtgactccaatatgcccg

SEQ ID NO: 195382 - DNA, 25 bp, Artificial
  Probe
cgtgcccttcgcgctgaccagtgac

SEQ ID NO: 195383 - DNA, 25 bp, Artificial
  Probe
agtgactccaatatgcccgaagatt

SEQ ID NO: 195384 - DNA, 25 bp, Artificial
  Probe
tcgcgctgaccagtgactccaatat

SEQ ID NO: 195385 - DNA, 25 bp, Artificial
  Probe
cgctgcccgccggtaagaggcttct

SEQ ID NO: 195386 - DNA, 25 bp, Artificial
  Probe
gccggtaagaggcttctcgaagcgc

SEQ ID NO: 195387 - DNA, 25 bp, Artificial
  Probe
gctgaccagtgactccaatatgccc

SEQ ID NO: 195388 - DNA, 25 bp, Artificial
  Probe
cgctgaccagtgactccaatatgcc

SEQ ID NO: 195389 - DNA, 25 bp, Artificial
  Probe
gatttgtactatgaggcatactcct

SEQ ID NO: 195390 - DNA, 25 bp, Artificial
  Probe
agcacagtgtagtcagtgctccatc

SEQ ID NO: 195391 - DNA, 25 bp, Artificial
  Probe
ctcctagtagagaaccgaagtttca

SEQ ID NO: 195392 - DNA, 25 bp, Artificial
  Probe
tccaaagctacagaagagcacacag

SEQ ID NO: 195393 - DNA, 25 bp, Artificial
  Probe
gtactatgaggcatactcctagtag

SEQ ID NO: 195394 - DNA, 25 bp, Artificial
  Probe
gagaaccgaagtttcatcatgatga

SEQ ID NO: 195395 - DNA, 25 bp, Artificial
  Probe
tcaagccaaaggtaactttattgat

SEQ ID NO: 195396 - DNA, 25 bp, Artificial
  Probe
gagcacacagtctgacttgtaggtg

SEQ ID NO: 195397 - DNA, 25 bp, Artificial
  Probe
gacttgcacaatgattccagttgac

SEQ ID NO: 195398 - DNA, 25 bp, Artificial
  Probe
ccagttgacatgcaacatggacaga

SEQ ID NO: 195399 - DNA, 25 bp, Artificial
  Probe
cacacagtctgacttgtaggtgggt

SEQ ID NO: 195400 - DNA, 25 bp, Artificial
  Probe
ccctgcctgcggaattccgaaaaca

SEQ ID NO: 195401 - DNA, 25 bp, Artificial
  Probe
tgattccagttgacatgcaacatgg

SEQ ID NO: 195402 - DNA, 25 bp, Artificial
  Probe
agaagagcacacagtctgacttgta

SEQ ID NO: 195403 - DNA, 25 bp, Artificial
  Probe
cacagtgtagtcagtgctccatcac

SEQ ID NO: 195404 - DNA, 25 bp, Artificial
  Probe
tactcctagtagagaaccgaagttt

SEQ ID NO: 195405 - DNA, 25 bp, Artificial
  Probe
ttctatttccaaagctacagaagag

SEQ ID NO: 195406 - DNA, 25 bp, Artificial
  Probe
agaactgattctgagcacagtgtag

SEQ ID NO: 195407 - DNA, 25 bp, Artificial
  Probe
actatgaggcatactcctagtagag

SEQ ID NO: 195408 - DNA, 25 bp, Artificial
  Probe
caaagctacagaagagcacacagtc

SEQ ID NO: 195409 - DNA, 25 bp, Artificial
  Probe
cagttgacatgcaacatggacagaa

SEQ ID NO: 195410 - DNA, 25 bp, Artificial
  Probe
acttgcacaatgattccagttgaca

SEQ ID NO: 195411 - DNA, 25 bp, Artificial
  Probe
gattctgagcacagtgtagtcagtg

SEQ ID NO: 195412 - DNA, 25 bp, Artificial
  Probe
tgcctgcggaattccgaaaacaatt

SEQ ID NO: 195413 - DNA, 25 bp, Artificial
  Probe
ttgttcaagccaaaggtaactttat

SEQ ID NO: 195414 - DNA, 25 bp, Artificial
  Probe
tctgagcacagtgtagtcagtgctc

SEQ ID NO: 195415 - DNA, 25 bp, Artificial
  Probe
tatttccaaagctacagaagagcac

SEQ ID NO: 195416 - DNA, 25 bp, Artificial
  Probe
accgaagtttcatcatgatgagatg

SEQ ID NO: 195417 - DNA, 25 bp, Artificial
  Probe
agtgtagtcagtgctccatcactct

SEQ ID NO: 195418 - DNA, 25 bp, Artificial
  Probe
gctccatcactctgggttgcccaaa

SEQ ID NO: 195419 - DNA, 25 bp, Artificial
  Probe
caatgattccagttgacatgcaaca

SEQ ID NO: 195420 - DNA, 25 bp, Artificial
  Probe
actgattctgagcacagtgtagtca

SEQ ID NO: 195421 - DNA, 25 bp, Artificial
  Probe
aagacttgcacaatgattccagttg

SEQ ID NO: 195422 - DNA, 25 bp, Artificial
  Probe
ggcatactcctagtagagaaccgaa

SEQ ID NO: 195423 - DNA, 25 bp, Artificial
  Probe
tgtagtcagtgctccatcactctgg

SEQ ID NO: 195424 - DNA, 25 bp, Artificial
  Probe
aactgattctgagcacagtgtagtc

SEQ ID NO: 195425 - DNA, 25 bp, Artificial
  Probe
aagctacagaagagcacacagtctg

SEQ ID NO: 195426 - DNA, 25 bp, Artificial
  Probe
atactcctagtagagaaccgaagtt

SEQ ID NO: 195427 - DNA, 25 bp, Artificial
  Probe
atgaggcatactcctagtagagaac

SEQ ID NO: 195428 - DNA, 25 bp, Artificial
  Probe
gagcacagtgtagtcagtgctccat

SEQ ID NO: 195429 - DNA, 25 bp, Artificial
  Probe
attctgagcacagtgtagtcagtgc

SEQ ID NO: 195430 - DNA, 25 bp, Artificial
  Probe
gtcagtgctccatcactctgggttg

SEQ ID NO: 195431 - DNA, 25 bp, Artificial
  Probe
gctacagaagagcacacagtctgac

SEQ ID NO: 195432 - DNA, 25 bp, Artificial
  Probe
atttgtactatgaggcatactccta

SEQ ID NO: 195433 - DNA, 25 bp, Artificial
  Probe
ttattccagaaaagaactgattctg

SEQ ID NO: 195434 - DNA, 25 bp, Artificial
  Probe
ccgaagtttcatcatgatgagatgt

SEQ ID NO: 195435 - DNA, 25 bp, Artificial
  Probe
ttctctgttgatcctgatgggctcc

SEQ ID NO: 195436 - DNA, 25 bp, Artificial
  Probe
ctttgccagactgagccaaccaatc

SEQ ID NO: 195437 - DNA, 25 bp, Artificial
  Probe
tctgttgatcctgatgggctcctgg

SEQ ID NO: 195438 - DNA, 25 bp, Artificial
  Probe
tcatgctgtttatggagctgtattc

SEQ ID NO: 195439 - DNA, 25 bp, Artificial
  Probe
ctctgttgatcctgatgggctcctg

SEQ ID NO: 195440 - DNA, 25 bp, Artificial
  Probe
cttgcctttgccagactgagccaac

SEQ ID NO: 195441 - DNA, 25 bp, Artificial
  Probe
ctggagtcagccatgtgggtcatgc

SEQ ID NO: 195442 - DNA, 25 bp, Artificial
  Probe
agctgtattctctgttgatcctgat

SEQ ID NO: 195443 - DNA, 25 bp, Artificial
  Probe
tctctgttgatcctgatgggctcct

SEQ ID NO: 195444 - DNA, 25 bp, Artificial
  Probe
gctgtttatggagctgtattctctg

SEQ ID NO: 195445 - DNA, 25 bp, Artificial
  Probe
gagctgtattctctgttgatcctga

SEQ ID NO: 195446 - DNA, 25 bp, Artificial
  Probe
tcctgatgggctcctggggagcaat

SEQ ID NO: 195447 - DNA, 25 bp, Artificial
  Probe
cctgatgggctcctggggagcaatc

SEQ ID NO: 195448 - DNA, 25 bp, Artificial
  Probe
ctgtattctctgttgatcctgatgg

SEQ ID NO: 195449 - DNA, 25 bp, Artificial
  Probe
ggctcctggggagcaatcattcttg

SEQ ID NO: 195450 - DNA, 25 bp, Artificial
  Probe
tgctgtttatggagctgtattctct

SEQ ID NO: 195451 - DNA, 25 bp, Artificial
  Probe
ttgcctttgccagactgagccaacc

SEQ ID NO: 195452 - DNA, 25 bp, Artificial
  Probe
tggagctgtattctctgttgatcct

SEQ ID NO: 195453 - DNA, 25 bp, Artificial
  Probe
cctttgccagactgagccaaccaat

SEQ ID NO: 195454 - DNA, 25 bp, Artificial
  Probe
tgcctttgccagactgagccaacca

SEQ ID NO: 195455 - DNA, 25 bp, Artificial
  Probe
tggagtcagccatgtgggtcatgct

SEQ ID NO: 195456 - DNA, 25 bp, Artificial
  Probe
gggctcctggggagcaatcattctt

SEQ ID NO: 195457 - DNA, 25 bp, Artificial
  Probe
ctgcgccctggagtcagccatgtgg

SEQ ID NO: 195458 - DNA, 25 bp, Artificial
  Probe
cgccctggagtcagccatgtgggtc

SEQ ID NO: 195459 - DNA, 25 bp, Artificial
  Probe
gctcctggggagcaatcattcttgg

SEQ ID NO: 195460 - DNA, 25 bp, Artificial
  Probe
gccatgtgggtcatgctgtttatgg

SEQ ID NO: 195461 - DNA, 25 bp, Artificial
  Probe
attctctgttgatcctgatgggctc

SEQ ID NO: 195462 - DNA, 25 bp, Artificial
  Probe
tttgccagactgagccaaccaatca

SEQ ID NO: 195463 - DNA, 25 bp, Artificial
  Probe
gtattctctgttgatcctgatgggc

SEQ ID NO: 195464 - DNA, 25 bp, Artificial
  Probe
tgtattctctgttgatcctgatggg

SEQ ID NO: 195465 - DNA, 25 bp, Artificial
  Probe
atggagctgtattctctgttgatcc

SEQ ID NO: 195466 - DNA, 25 bp, Artificial
  Probe
cctacttgcctttgccagactgagc

SEQ ID NO: 195467 - DNA, 25 bp, Artificial
  Probe
tcctgcgccctggagtcagccatgt

SEQ ID NO: 195468 - DNA, 25 bp, Artificial
  Probe
cctgcgccctggagtcagccatgtg

SEQ ID NO: 195469 - DNA, 25 bp, Artificial
  Probe
tattctctgttgatcctgatgggct

SEQ ID NO: 195470 - DNA, 25 bp, Artificial
  Probe
tatggagctgtattctctgttgatc

SEQ ID NO: 195471 - DNA, 25 bp, Artificial
  Probe
ccatgtgggtcatgctgtttatgga

SEQ ID NO: 195472 - DNA, 25 bp, Artificial
  Probe
ctcctggggagcaatcattcttggg

SEQ ID NO: 195473 - DNA, 25 bp, Artificial
  Probe
ggagctgtattctctgttgatcctg

SEQ ID NO: 195474 - DNA, 25 bp, Artificial
  Probe
atcctgatgggctcctggggagcaa

SEQ ID NO: 195475 - DNA, 25 bp, Artificial
  Probe
gcctttgccagactgagccaaccaa

SEQ ID NO: 195476 - DNA, 25 bp, Artificial
  Probe
gctgtattctctgttgatcctgatg

SEQ ID NO: 195477 - DNA, 25 bp, Artificial
  Probe
catgctgtttatggagctgtattct

SEQ ID NO: 195478 - DNA, 25 bp, Artificial
  Probe
agactgagccaaccaatcactcctg

SEQ ID NO: 195479 - DNA, 25 bp, Artificial
  Probe
ctgttgatcctgatgggctcctggg

SEQ ID NO: 195480 - DNA, 25 bp, Artificial
  Probe
cagccatgtgggtcatgctgtttat

SEQ ID NO: 195481 - DNA, 25 bp, Artificial
  Probe
aggaacagttgacttctttcttact

SEQ ID NO: 195482 - DNA, 25 bp, Artificial
  Probe
ggaacagttgacttctttcttactg

SEQ ID NO: 195483 - DNA, 25 bp, Artificial
  Probe
ggtgcatgggggctgggaaacacaa

SEQ ID NO: 195484 - DNA, 25 bp, Artificial
  Probe
agttgacttctttcttactggtgca

SEQ ID NO: 195485 - DNA, 25 bp, Artificial
  Probe
cttactggtgcatgggggctgggaa

SEQ ID NO: 195486 - DNA, 25 bp, Artificial
  Probe
tgacttctttcttactggtgcatgg

SEQ ID NO: 195487 - DNA, 25 bp, Artificial
  Probe
ttcttactggtgcatgggggctggg

SEQ ID NO: 195488 - DNA, 25 bp, Artificial
  Probe
tcttactggtgcatgggggctggga

SEQ ID NO: 195489 - DNA, 25 bp, Artificial
  Probe
gacttctttcttactggtgcatggg

SEQ ID NO: 195490 - DNA, 25 bp, Artificial
  Probe
ctggtgcatgggggctgggaaacac

SEQ ID NO: 195491 - DNA, 25 bp, Artificial
  Probe
tgcatgggggctgggaaacacaagt

SEQ ID NO: 195492 - DNA, 25 bp, Artificial
  Probe
tactggtgcatgggggctgggaaac

SEQ ID NO: 195493 - DNA, 25 bp, Artificial
  Probe
actggtgcatgggggctgggaaaca

SEQ ID NO: 195494 - DNA, 25 bp, Artificial
  Probe
ctttcttactggtgcatgggggctg

SEQ ID NO: 195495 - DNA, 25 bp, Artificial
  Probe
tctttcttactggtgcatgggggct

SEQ ID NO: 195496 - DNA, 25 bp, Artificial
  Probe
tggtgcatgggggctgggaaacaca

SEQ ID NO: 195497 - DNA, 25 bp, Artificial
  Probe
cttctttcttactggtgcatggggg

SEQ ID NO: 195498 - DNA, 25 bp, Artificial
  Probe
acttctttcttactggtgcatgggg

SEQ ID NO: 195499 - DNA, 25 bp, Artificial
  Probe
acagttgacttctttcttactggtg

SEQ ID NO: 195500 - DNA, 25 bp, Artificial
  Probe
aacagttgacttctttcttactggt

SEQ ID NO: 195501 - DNA, 25 bp, Artificial
  Probe
tttcttactggtgcatgggggctgg

SEQ ID NO: 195502 - DNA, 25 bp, Artificial
  Probe
cagttgacttctttcttactggtgc

SEQ ID NO: 195503 - DNA, 25 bp, Artificial
  Probe
gttgacttctttcttactggtgcat

SEQ ID NO: 195504 - DNA, 25 bp, Artificial
  Probe
gtgcatgggggctgggaaacacaag

SEQ ID NO: 195505 - DNA, 25 bp, Artificial
  Probe
ttgacttctttcttactggtgcatg

SEQ ID NO: 195506 - DNA, 25 bp, Artificial
  Probe
ttactggtgcatgggggctgggaaa

SEQ ID NO: 195507 - DNA, 25 bp, Artificial
  Probe
ttctttcttactggtgcatgggggc

SEQ ID NO: 195508 - DNA, 25 bp, Artificial
  Probe
gaacagttgacttctttcttactgg

SEQ ID NO: 195509 - DNA, 25 bp, Artificial
  Probe
attgtgcacaagatgcccattgagg

SEQ ID NO: 195510 - DNA, 25 bp, Artificial
  Probe
caagatgcccattgaggtgtccccg

SEQ ID NO: 195511 - DNA, 25 bp, Artificial
  Probe
ggaacaaagtcttgatctcaggatg

SEQ ID NO: 195512 - DNA, 25 bp, Artificial
  Probe
acacaggtgaccatggggccctttg

SEQ ID NO: 195513 - DNA, 25 bp, Artificial
  Probe
gattgtgcacaagatgcccattgag

SEQ ID NO: 195514 - DNA, 25 bp, Artificial
  Probe
gcatttccagggtgcgacgcctgga

SEQ ID NO: 195515 - DNA, 25 bp, Artificial
  Probe
agcgacactgcactcatatgcatta

SEQ ID NO: 195516 - DNA, 25 bp, Artificial
  Probe
gcccattgaggtgtccccgagccag

SEQ ID NO: 195517 - DNA, 25 bp, Artificial
  Probe
catcttgccggaagtaagacacaag

SEQ ID NO: 195518 - DNA, 25 bp, Artificial
  Probe
gcgacactgcactcatatgcattaa

SEQ ID NO: 195519 - DNA, 25 bp, Artificial
  Probe
tggctgagtcagtcacctggattgt

SEQ ID NO: 195520 - DNA, 25 bp, Artificial
  Probe
cgtacactcttgttctccgggcgag

SEQ ID NO: 195521 - DNA, 25 bp, Artificial
  Probe
cattccgtacactcttgttctccgg

SEQ ID NO: 195522 - DNA, 25 bp, Artificial
  Probe
tcttgatctcaggatgaggtctgta

SEQ ID NO: 195523 - DNA, 25 bp, Artificial
  Probe
tcttgccggaagtaagacacaagga

SEQ ID NO: 195524 - DNA, 25 bp, Artificial
  Probe
gagccagctgtccacattccgtaca

SEQ ID NO: 195525 - DNA, 25 bp, Artificial
  Probe
gtaagacacaaggacacacaggtga

SEQ ID NO: 195526 - DNA, 25 bp, Artificial
  Probe
ccatggggccctttgacccttcttg

SEQ ID NO: 195527 - DNA, 25 bp, Artificial
  Probe
tgagtcagtcacctggattgtgcac

SEQ ID NO: 195528 - DNA, 25 bp, Artificial
  Probe
gaacaaagtcttgatctcaggatga

SEQ ID NO: 195529 - DNA, 25 bp, Artificial
  Probe
gtcacctggattgtgcacaagatgc

SEQ ID NO: 195530 - DNA, 25 bp, Artificial
  Probe
catggggccctttgacccttcttgc

SEQ ID NO: 195531 - DNA, 25 bp, Artificial
  Probe
gaggtgtccccgagccagctgtcca

SEQ ID NO: 195532 - DNA, 25 bp, Artificial
  Probe
cactggctgagtcagtcacctggat

SEQ ID NO: 195533 - DNA, 25 bp, Artificial
  Probe
ggctgagtcagtcacctggattgtg

SEQ ID NO: 195534 - DNA, 25 bp, Artificial
  Probe
cacaggtgaccatggggccctttga

SEQ ID NO: 195535 - DNA, 25 bp, Artificial
  Probe
agatgcccattgaggtgtccccgag

SEQ ID NO: 195536 - DNA, 25 bp, Artificial
  Probe
acctggattgtgcacaagatgccca

SEQ ID NO: 195537 - DNA, 25 bp, Artificial
  Probe
gagcgacactgcactcatatgcatt

SEQ ID NO: 195538 - DNA, 25 bp, Artificial
  Probe
ttgtgcacaagatgcccattgaggt

SEQ ID NO: 195539 - DNA, 25 bp, Artificial
  Probe
gtgcgcatttccagggtgcgacgcc

SEQ ID NO: 195540 - DNA, 25 bp, Artificial
  Probe
aagatgcccattgaggtgtccccga

SEQ ID NO: 195541 - DNA, 25 bp, Artificial
  Probe
tcagtcacctggattgtgcacaaga

SEQ ID NO: 195542 - DNA, 25 bp, Artificial
  Probe
cagtcacctggattgtgcacaagat

SEQ ID NO: 195543 - DNA, 25 bp, Artificial
  Probe
caccactggctgagtcagtcacctg

SEQ ID NO: 195544 - DNA, 25 bp, Artificial
  Probe
cacaagatgcccattgaggtgtccc

SEQ ID NO: 195545 - DNA, 25 bp, Artificial
  Probe
cttgatctcaggatgaggtctgtaa

SEQ ID NO: 195546 - DNA, 25 bp, Artificial
  Probe
gctgagtcagtcacctggattgtgc

SEQ ID NO: 195547 - DNA, 25 bp, Artificial
  Probe
cctggattgtgcacaagatgcccat

SEQ ID NO: 195548 - DNA, 25 bp, Artificial
  Probe
acacacaggtgaccatggggccctt

SEQ ID NO: 195549 - DNA, 25 bp, Artificial
  Probe
ctgctgcctgcctgccgggattact

SEQ ID NO: 195550 - DNA, 25 bp, Artificial
  Probe
ccgtacactcttgttctccgggcga

SEQ ID NO: 195551 - DNA, 25 bp, Artificial
  Probe
tggggccctttgacccttcttgcct

SEQ ID NO: 195552 - DNA, 25 bp, Artificial
  Probe
caaagtcttgatctcaggatgaggt

SEQ ID NO: 195553 - DNA, 25 bp, Artificial
  Probe
attccgtacactcttgttctccggg

SEQ ID NO: 195554 - DNA, 25 bp, Artificial
  Probe
acatcttgccggaagtaagacacaa

SEQ ID NO: 195555 - DNA, 25 bp, Artificial
  Probe
acttgctagcttggttgttttggtc

SEQ ID NO: 195556 - DNA, 25 bp, Artificial
  Probe
ctttagttcatgagctggtgttcat

SEQ ID NO: 195557 - DNA, 25 bp, Artificial
  Probe
gtatctggctcatggattgccaacc

SEQ ID NO: 195558 - DNA, 25 bp, Artificial
  Probe
cctgaattcccctgtaacttgctag

SEQ ID NO: 195559 - DNA, 25 bp, Artificial
  Probe
tcaaagatctgagcaggatacttca

SEQ ID NO: 195560 - DNA, 25 bp, Artificial
  Probe
ctggctcatggattgccaacctgaa

SEQ ID NO: 195561 - DNA, 25 bp, Artificial
  Probe
acccggccatcaagcgcctgtatat

SEQ ID NO: 195562 - DNA, 25 bp, Artificial
  Probe
ttgccagtttgcagggccacgctcg

SEQ ID NO: 195563 - DNA, 25 bp, Artificial
  Probe
cacacataccctggacttgcacaag

SEQ ID NO: 195564 - DNA, 25 bp, Artificial
  Probe
atgtaggacataactcacctttgaa

SEQ ID NO: 195565 - DNA, 25 bp, Artificial
  Probe
agggtatctggctcatggattgcca

SEQ ID NO: 195566 - DNA, 25 bp, Artificial
  Probe
gcaggatacttcatgtaggacataa

SEQ ID NO: 195567 - DNA, 25 bp, Artificial
  Probe
gatacttcatgtaggacataactca

SEQ ID NO: 195568 - DNA, 25 bp, Artificial
  Probe
tctgagcaggatacttcatgtagga

SEQ ID NO: 195569 - DNA, 25 bp, Artificial
  Probe
tggacttgcacaagggtcaaagatc

SEQ ID NO: 195570 - DNA, 25 bp, Artificial
  Probe
aagatctgagcaggatacttcatgt

SEQ ID NO: 195571 - DNA, 25 bp, Artificial
  Probe
gattgccaacctgaattcccctgta

SEQ ID NO: 195572 - DNA, 25 bp, Artificial
  Probe
ctccctctgcaccatgttcttgaga

SEQ ID NO: 195573 - DNA, 25 bp, Artificial
  Probe
cttgcacaagggtcaaagatctgag

SEQ ID NO: 195574 - DNA, 25 bp, Artificial
  Probe
gtaggacataactcacctttgaacc

SEQ ID NO: 195575 - DNA, 25 bp, Artificial
  Probe
accctggacttgcacaagggtcaaa

SEQ ID NO: 195576 - DNA, 25 bp, Artificial
  Probe
tcttcttctttagttcatgagctgg

SEQ ID NO: 195577 - DNA, 25 bp, Artificial
  Probe
ctgtaacttgctagcttggttgttt

SEQ ID NO: 195578 - DNA, 25 bp, Artificial
  Probe
aggatacttcatgtaggacataact

SEQ ID NO: 195579 - DNA, 25 bp, Artificial
  Probe
ctggtgttcattctctgtgtgtgtg

SEQ ID NO: 195580 - DNA, 25 bp, Artificial
  Probe
gagcaggatacttcatgtaggacat

SEQ ID NO: 195581 - DNA, 25 bp, Artificial
  Probe
aacccggccatcaagcgcctgtata

SEQ ID NO: 195582 - DNA, 25 bp, Artificial
  Probe
ggcttgccagtttgcagggccacgc

SEQ ID NO: 195583 - DNA, 25 bp, Artificial
  Probe
tgggcttgccagtttgcagggccac

SEQ ID NO: 195584 - DNA, 25 bp, Artificial
  Probe
ttagttcatgagctggtgttcattc

SEQ ID NO: 195585 - DNA, 25 bp, Artificial
  Probe
catgagctggtgttcattctctgtg

SEQ ID NO: 195586 - DNA, 25 bp, Artificial
  Probe
ggattgccaacctgaattcccctgt

SEQ ID NO: 195587 - DNA, 25 bp, Artificial
  Probe
ttggagcttgctgtgtttcccagcc

SEQ ID NO: 195588 - DNA, 25 bp, Artificial
  Probe
tggctcatggattgccaacctgaat

SEQ ID NO: 195589 - DNA, 25 bp, Artificial
  Probe
tttttggagcttgctgtgtttccca

SEQ ID NO: 195590 - DNA, 25 bp, Artificial
  Probe
tggcgagtttgctccccttggccct

SEQ ID NO: 195591 - DNA, 25 bp, Artificial
  Probe
tctgcaccatgttcttgagataaaa

SEQ ID NO: 195592 - DNA, 25 bp, Artificial
  Probe
cataccctggacttgcacaagggtc

SEQ ID NO: 195593 - DNA, 25 bp, Artificial
  Probe
gggtcaaagatctgagcaggatact

SEQ ID NO: 195594 - DNA, 25 bp, Artificial
  Probe
aggacataactcacctttgaacccg

SEQ ID NO: 195595 - DNA, 25 bp, Artificial
  Probe
ccctggacttgcacaagggtcaaag

SEQ ID NO: 195596 - DNA, 25 bp, Artificial
  Probe
gacataactcacctttgaacccggc

SEQ ID NO: 195597 - DNA, 25 bp, Artificial
  Probe
tcatggattgccaacctgaattccc

SEQ ID NO: 195598 - DNA, 25 bp, Artificial
  Probe
atctggctcatggattgccaacctg

SEQ ID NO: 195599 - DNA, 25 bp, Artificial
  Probe
ttgaacccggccatcaagcgcctgt

SEQ ID NO: 195600 - DNA, 25 bp, Artificial
  Probe
acacacacacacagcaagcttgtgg

SEQ ID NO: 195601 - DNA, 25 bp, Artificial
  Probe
cggtctctgcggagccagtatacac

SEQ ID NO: 195602 - DNA, 25 bp, Artificial
  Probe
cagacaattcaaagactggagaaga

SEQ ID NO: 195603 - DNA, 25 bp, Artificial
  Probe
tttcccagacccaggaggagcatga

SEQ ID NO: 195604 - DNA, 25 bp, Artificial
  Probe
ctaaaatcaaagttccgcgcgtgta

SEQ ID NO: 195605 - DNA, 25 bp, Artificial
  Probe
gactcaccatgtcagagtcaatcta

SEQ ID NO: 195606 - DNA, 25 bp, Artificial
  Probe
gagtcaatctaatctaagcttccag

SEQ ID NO: 195607 - DNA, 25 bp, Artificial
  Probe
agctagttcatgtgcgtctagtata

SEQ ID NO: 195608 - DNA, 25 bp, Artificial
  Probe
cagcatccctcttgcatgggccttt

SEQ ID NO: 195609 - DNA, 25 bp, Artificial
  Probe
aactaaaatcaaagttccgcgcgtg

SEQ ID NO: 195610 - DNA, 25 bp, Artificial
  Probe
ggcctttcccagacccaggaggagc

SEQ ID NO: 195611 - DNA, 25 bp, Artificial
  Probe
aagcttccagcatccctcttgcatg

SEQ ID NO: 195612 - DNA, 25 bp, Artificial
  Probe
gtccgaaagtatacccctctggtca

SEQ ID NO: 195613 - DNA, 25 bp, Artificial
  Probe
tgtacgtgtgcttgcccgctatgta

SEQ ID NO: 195614 - DNA, 25 bp, Artificial
  Probe
tttgtaaacccaagtagctagttca

SEQ ID NO: 195615 - DNA, 25 bp, Artificial
  Probe
tctggtcacatctacccctaaagtg

SEQ ID NO: 195616 - DNA, 25 bp, Artificial
  Probe
gacccggtggaaagcagctacccgg

SEQ ID NO: 195617 - DNA, 25 bp, Artificial
  Probe
cctgtgtttgtaaacccaagtagct

SEQ ID NO: 195618 - DNA, 25 bp, Artificial
  Probe
agcatccctcttgcatgggcctttc

SEQ ID NO: 195619 - DNA, 25 bp, Artificial
  Probe
ctggtcacatctacccctaaagtga

SEQ ID NO: 195620 - DNA, 25 bp, Artificial
  Probe
ttaccacagcgctgaacctgacgac

SEQ ID NO: 195621 - DNA, 25 bp, Artificial
  Probe
cgtgcaggcagacaattcaaagact

SEQ ID NO: 195622 - DNA, 25 bp, Artificial
  Probe
ggtggaaagcagctacccggcagaa

SEQ ID NO: 195623 - DNA, 25 bp, Artificial
  Probe
gtggacatttaccacagcgctgaac

SEQ ID NO: 195624 - DNA, 25 bp, Artificial
  Probe
ttgcatgggcctttcccagacccag

SEQ ID NO: 195625 - DNA, 25 bp, Artificial
  Probe
acgttttcgtgcaggcagacaattc

SEQ ID NO: 195626 - DNA, 25 bp, Artificial
  Probe
tgatctgatatttccgtttgtacat

SEQ ID NO: 195627 - DNA, 25 bp, Artificial
  Probe
aagttccgcgcgtgtacgtgtgctt

SEQ ID NO: 195628 - DNA, 25 bp, Artificial
  Probe
catgtgcgtctagtataggtggaca

SEQ ID NO: 195629 - DNA, 25 bp, Artificial
  Probe
gtcagagtcaatctaatctaagctt

SEQ ID NO: 195630 - DNA, 25 bp, Artificial
  Probe
catgtcagagtcaatctaatctaag

SEQ ID NO: 195631 - DNA, 25 bp, Artificial
  Probe
tgcatgggcctttcccagacccagg

SEQ ID NO: 195632 - DNA, 25 bp, Artificial
  Probe
tcatgtgcgtctagtataggtggac

SEQ ID NO: 195633 - DNA, 25 bp, Artificial
  Probe
cagagcggatttgagtctggcttgt

SEQ ID NO: 195634 - DNA, 25 bp, Artificial
  Probe
tgggcctttcccagacccaggagga

SEQ ID NO: 195635 - DNA, 25 bp, Artificial
  Probe
tggaaagcagctacccggcagaaac

SEQ ID NO: 195636 - DNA, 25 bp, Artificial
  Probe
gcagacaattcaaagactggagaag

SEQ ID NO: 195637 - DNA, 25 bp, Artificial
  Probe
cttttctagagcagagcggatttga

SEQ ID NO: 195638 - DNA, 25 bp, Artificial
  Probe
ctctgcggagccagtatacacgtgt

SEQ ID NO: 195639 - DNA, 25 bp, Artificial
  Probe
ttcaaagactggagaagaggacacg

SEQ ID NO: 195640 - DNA, 25 bp, Artificial
  Probe
gtgcttgcccgctatgtaatctcgt

SEQ ID NO: 195641 - DNA, 25 bp, Artificial
  Probe
taggtggacatttaccacagcgctg

SEQ ID NO: 195642 - DNA, 25 bp, Artificial
  Probe
caattcaaagactggagaagaggac

SEQ ID NO: 195643 - DNA, 25 bp, Artificial
  Probe
gagtctggcttgtccgaaagtatac

SEQ ID NO: 195644 - DNA, 25 bp, Artificial
  Probe
gtgtgacccggtggaaagcagctac

SEQ ID NO: 195645 - DNA, 25 bp, Artificial
  Probe
tttcgtgcaggcagacaattcaaag

SEQ ID NO: 195646 - DNA, 25 bp, Artificial
  Probe
ccctaaagtgaacgttttcgtgcag

SEQ ID NO: 195647 - DNA, 25 bp, Artificial
  Probe
gcagaccacagataagaaagatggc

SEQ ID NO: 195648 - DNA, 25 bp, Artificial
  Probe
gtagtgaccctggtcggaatcataa

SEQ ID NO: 195649 - DNA, 25 bp, Artificial
  Probe
gaccctggtcggaatcataattggc

SEQ ID NO: 195650 - DNA, 25 bp, Artificial
  Probe
gtcttgttagccattggcttcattg

SEQ ID NO: 195651 - DNA, 25 bp, Artificial
  Probe
cttgttagccattggcttcattgga

SEQ ID NO: 195652 - DNA, 25 bp, Artificial
  Probe
tagtgaccctggtcggaatcataat

SEQ ID NO: 195653 - DNA, 25 bp, Artificial
  Probe
gccattggcttcattggagggatca

SEQ ID NO: 195654 - DNA, 25 bp, Artificial
  Probe
ggtgaccagccactccacggacaag

SEQ ID NO: 195655 - DNA, 25 bp, Artificial
  Probe
ggtgaaacgcagaccacagataaga

SEQ ID NO: 195656 - DNA, 25 bp, Artificial
  Probe
aggaactgccgacctcaggaacctc

SEQ ID NO: 195657 - DNA, 25 bp, Artificial
  Probe
taacgcaggcggtgaaacgcagacc

SEQ ID NO: 195658 - DNA, 25 bp, Artificial
  Probe
gagtacgaccactgtcaaagcggtg

SEQ ID NO: 195659 - DNA, 25 bp, Artificial
  Probe
ttagccattggcttcattggaggga

SEQ ID NO: 195660 - DNA, 25 bp, Artificial
  Probe
cggtgaaacgcagaccacagataag

SEQ ID NO: 195661 - DNA, 25 bp, Artificial
  Probe
agatttctggaaggttctcgcccta

SEQ ID NO: 195662 - DNA, 25 bp, Artificial
  Probe
aaagcggtgaccagccactccacgg

SEQ ID NO: 195663 - DNA, 25 bp, Artificial
  Probe
tcaccccaatagagataacgcaggc

SEQ ID NO: 195664 - DNA, 25 bp, Artificial
  Probe
gaggaactgccgacctcaggaacct

SEQ ID NO: 195665 - DNA, 25 bp, Artificial
  Probe
acgcagaccacagataagaaagatg

SEQ ID NO: 195666 - DNA, 25 bp, Artificial
  Probe
attggcttcattggagggatcatca

SEQ ID NO: 195667 - DNA, 25 bp, Artificial
  Probe
gtcaaagcggtgaccagccactcca

SEQ ID NO: 195668 - DNA, 25 bp, Artificial
  Probe
ctgtcaaagcggtgaccagccactc

SEQ ID NO: 195669 - DNA, 25 bp, Artificial
  Probe
tggcgtcttgttagccattggcttc

SEQ ID NO: 195670 - DNA, 25 bp, Artificial
  Probe
accccaatagagataacgcaggcgg

SEQ ID NO: 195671 - DNA, 25 bp, Artificial
  Probe
ccccaatagagataacgcaggcggt

SEQ ID NO: 195672 - DNA, 25 bp, Artificial
  Probe
ccctggtcggaatcataattggcgt

SEQ ID NO: 195673 - DNA, 25 bp, Artificial
  Probe
gatttctggaaggttctcgccctaa

SEQ ID NO: 195674 - DNA, 25 bp, Artificial
  Probe
ccattgaggaactgccgacctcagg

SEQ ID NO: 195675 - DNA, 25 bp, Artificial
  Probe
tctggaaggttctcgccctaaagag

SEQ ID NO: 195676 - DNA, 25 bp, Artificial
  Probe
gaccactgtcaaagcggtgaccagc

SEQ ID NO: 195677 - DNA, 25 bp, Artificial
  Probe
tttctggaaggttctcgccctaaag

SEQ ID NO: 195678 - DNA, 25 bp, Artificial
  Probe
ctgtagtgaccctggtcggaatcat

SEQ ID NO: 195679 - DNA, 25 bp, Artificial
  Probe
tggcttcattggagggatcatcatt

SEQ ID NO: 195680 - DNA, 25 bp, Artificial
  Probe
ggttctcgccctaaagagccaaaca

SEQ ID NO: 195681 - DNA, 25 bp, Artificial
  Probe
tcataattggcgtcttgttagccat

SEQ ID NO: 195682 - DNA, 25 bp, Artificial
  Probe
ttggctgtagtgaccctggtcggaa

SEQ ID NO: 195683 - DNA, 25 bp, Artificial
  Probe
tagagataacgcaggcggtgaaacg

SEQ ID NO: 195684 - DNA, 25 bp, Artificial
  Probe
atggcttggctgtagtgaccctggt

SEQ ID NO: 195685 - DNA, 25 bp, Artificial
  Probe
cttggctgtagtgaccctggtcgga

SEQ ID NO: 195686 - DNA, 25 bp, Artificial
  Probe
cgcaggcggtgaaacgcagaccaca

SEQ ID NO: 195687 - DNA, 25 bp, Artificial
  Probe
ctggtcggaatcataattggcgtct

SEQ ID NO: 195688 - DNA, 25 bp, Artificial
  Probe
gccactccacggacaagaaaacaac

SEQ ID NO: 195689 - DNA, 25 bp, Artificial
  Probe
tccgaccacgatcacaaagaacatg

SEQ ID NO: 195690 - DNA, 25 bp, Artificial
  Probe
acatgagagtacgaccactgtcaaa

SEQ ID NO: 195691 - DNA, 25 bp, Artificial
  Probe
gtgaaacgcagaccacagataagaa

SEQ ID NO: 195692 - DNA, 25 bp, Artificial
  Probe
ccacgatcacaaagaacatgagagt

SEQ ID NO: 195693 - DNA, 25 bp, Artificial
  Probe
acatcaaagacagctcacctctggc

SEQ ID NO: 195694 - DNA, 25 bp, Artificial
  Probe
gaacagaactgtcacccataccaga

SEQ ID NO: 195695 - DNA, 25 bp, Artificial
  Probe
tgtcggatgaggacatcagagcaga

SEQ ID NO: 195696 - DNA, 25 bp, Artificial
  Probe
tcctgaccaaggatgaagatggaaa

SEQ ID NO: 195697 - DNA, 25 bp, Artificial
  Probe
ggctctcctggattctatacaacct

SEQ ID NO: 195698 - DNA, 25 bp, Artificial
  Probe
gtcacggtcatctcccgatgctgca

SEQ ID NO: 195699 - DNA, 25 bp, Artificial
  Probe
ttctctggacaataggaagccaaag

SEQ ID NO: 195700 - DNA, 25 bp, Artificial
  Probe
ctgccggcaggaagttcaggagctt

SEQ ID NO: 195701 - DNA, 25 bp, Artificial
  Probe
acatcagagcagaggccgacacctt

SEQ ID NO: 195702 - DNA, 25 bp, Artificial
  Probe
acccctgatgggatgcgcttccata

SEQ ID NO: 195703 - DNA, 25 bp, Artificial
  Probe
tgaacagaactgtcacccataccag

SEQ ID NO: 195704 - DNA, 25 bp, Artificial
  Probe
gccttatcagtatctttggaattca

SEQ ID NO: 195705 - DNA, 25 bp, Artificial
  Probe
ccagatcagggtttggatgagtttc

SEQ ID NO: 195706 - DNA, 25 bp, Artificial
  Probe
tgatcgccagcctttatcataaggt

SEQ ID NO: 195707 - DNA, 25 bp, Artificial
  Probe
ccaaccaacctggactattctctgg

SEQ ID NO: 195708 - DNA, 25 bp, Artificial
  Probe
gcctttatcataaggtgcattcttc

SEQ ID NO: 195709 - DNA, 25 bp, Artificial
  Probe
ccagtgggctctcctggattctata

SEQ ID NO: 195710 - DNA, 25 bp, Artificial
  Probe
gaccctgaaaacatcaaagacagct

SEQ ID NO: 195711 - DNA, 25 bp, Artificial
  Probe
agctgtcggatgaggacatcagagc

SEQ ID NO: 195712 - DNA, 25 bp, Artificial
  Probe
cattctgctcccagatggcaggacc

SEQ ID NO: 195713 - DNA, 25 bp, Artificial
  Probe
ggattctatacaacctggcgaacga

SEQ ID NO: 195714 - DNA, 25 bp, Artificial
  Probe
cgtctgagcaagagaccagaatgaa

SEQ ID NO: 195715 - DNA, 25 bp, Artificial
  Probe
tgccaggagaagtccagtgaatata

SEQ ID NO: 195716 - DNA, 25 bp, Artificial
  Probe
gggatgcgcttccataaggcctgca

SEQ ID NO: 195717 - DNA, 25 bp, Artificial
  Probe
gagaggccagttagtgtctgagcca

SEQ ID NO: 195718 - DNA, 25 bp, Artificial
  Probe
atcccagaatgaacagaactgtcac

SEQ ID NO: 195719 - DNA, 25 bp, Artificial
  Probe
tgtcacccataccagaatcttacgg

SEQ ID NO: 195720 - DNA, 25 bp, Artificial
  Probe
taccagaatcttacggagggccagc

SEQ ID NO: 195721 - DNA, 25 bp, Artificial
  Probe
tgccggcaggaagttcaggagcttc

SEQ ID NO: 195722 - DNA, 25 bp, Artificial
  Probe
tcactgatgccgtcatccgggagcg

SEQ ID NO: 195723 - DNA, 25 bp, Artificial
  Probe
acgcaaatttgagctcttattctcg

SEQ ID NO: 195724 - DNA, 25 bp, Artificial
  Probe
cccagatcagggtttggatgagttt

SEQ ID NO: 195725 - DNA, 25 bp, Artificial
  Probe
tcgtctaactgatcgccagccttta

SEQ ID NO: 195726 - DNA, 25 bp, Artificial
  Probe
acctcacagttggtctggagcaccc

SEQ ID NO: 195727 - DNA, 25 bp, Artificial
  Probe
gtgcattcttctccaaccaacctgg

SEQ ID NO: 195728 - DNA, 25 bp, Artificial
  Probe
tgaatatattgctgccatcctggag

SEQ ID NO: 195729 - DNA, 25 bp, Artificial
  Probe
aagccaaagaaacgtctgagcaaga

SEQ ID NO: 195730 - DNA, 25 bp, Artificial
  Probe
catggacctgctgtacaatctcacc

SEQ ID NO: 195731 - DNA, 25 bp, Artificial
  Probe
caaagacagctcacctctggcattt

SEQ ID NO: 195732 - DNA, 25 bp, Artificial
  Probe
ttctatacaacctggcgaacgaccc

SEQ ID NO: 195733 - DNA, 25 bp, Artificial
  Probe
gatgagtttctcaagtctaaggcca

SEQ ID NO: 195734 - DNA, 25 bp, Artificial
  Probe
ggtgcattcttctccaaccaacctg

SEQ ID NO: 195735 - DNA, 25 bp, Artificial
  Probe
cagtcacggtcatctcccgatgctg

SEQ ID NO: 195736 - DNA, 25 bp, Artificial
  Probe
catcctacctctgaggatcccagaa

SEQ ID NO: 195737 - DNA, 25 bp, Artificial
  Probe
cgggcgcgcagtgacctcacagttg

SEQ ID NO: 195738 - DNA, 25 bp, Artificial
  Probe
ccaaaggtatcatctgccttatcag

SEQ ID NO: 195739 - DNA, 25 bp, Artificial
  Probe
ctctattgctgaaggattcgaagat

SEQ ID NO: 195740 - DNA, 25 bp, Artificial
  Probe
agttgtcagaattatctctgttatc

SEQ ID NO: 195741 - DNA, 25 bp, Artificial
  Probe
cactactgtgagtggcctgcagatg

SEQ ID NO: 195742 - DNA, 25 bp, Artificial
  Probe
acagaaggccaggaagttgatcatg

SEQ ID NO: 195743 - DNA, 25 bp, Artificial
  Probe
gcagagctactggaccccgtgatcc

SEQ ID NO: 195744 - DNA, 25 bp, Artificial
  Probe
ctacgaactcggaagttatataagg

SEQ ID NO: 195745 - DNA, 25 bp, Artificial
  Probe
ctaatgggcaaaggacctgattcac

SEQ ID NO: 195746 - DNA, 25 bp, Artificial
  Probe
agaagacacttatcccaggctaatg

SEQ ID NO: 195747 - DNA, 25 bp, Artificial
  Probe
aatgagacccagaacgagccctacc

SEQ ID NO: 195748 - DNA, 25 bp, Artificial
  Probe
tctggagtaggctttacgacccttt

SEQ ID NO: 195749 - DNA, 25 bp, Artificial
  Probe
aagcttcatagacaccttgccatcg

SEQ ID NO: 195750 - DNA, 25 bp, Artificial
  Probe
gaggcttcaaccatataaaagcttc

SEQ ID NO: 195751 - DNA, 25 bp, Artificial
  Probe
gttatctctttatggaattcacaag

SEQ ID NO: 195752 - DNA, 25 bp, Artificial
  Probe
atgtactaccggaatgagacccaga

SEQ ID NO: 195753 - DNA, 25 bp, Artificial
  Probe
aactcaagagtgagactttaaaatc

SEQ ID NO: 195754 - DNA, 25 bp, Artificial
  Probe
gttgtcagaattatctctgttatct

SEQ ID NO: 195755 - DNA, 25 bp, Artificial
  Probe
cgtcctggtcaatgaaattctcaag

SEQ ID NO: 195756 - DNA, 25 bp, Artificial
  Probe
atcccccaggactgggccacagagt

SEQ ID NO: 195757 - DNA, 25 bp, Artificial
  Probe
agactttaaaatctgaggagttcct

SEQ ID NO: 195758 - DNA, 25 bp, Artificial
  Probe
ctctttatggaattcacaagcagaa

SEQ ID NO: 195759 - DNA, 25 bp, Artificial
  Probe
cagttgccagtgtaatcaggaaaag

SEQ ID NO: 195760 - DNA, 25 bp, Artificial
  Probe
agaacaaccagttgccagtgtaatc

SEQ ID NO: 195761 - DNA, 25 bp, Artificial
  Probe
caagttagcgtgcaagcatgaaaaa

SEQ ID NO: 195762 - DNA, 25 bp, Artificial
  Probe
actgggccacagagtgtatgggcac

SEQ ID NO: 195763 - DNA, 25 bp, Artificial
  Probe
gtaaagctgccctgggaatgtctga

SEQ ID NO: 195764 - DNA, 25 bp, Artificial
  Probe
gcacctgggccacagaggacgccat

SEQ ID NO: 195765 - DNA, 25 bp, Artificial
  Probe
aacaggtttcagacgaagcctacca

SEQ ID NO: 195766 - DNA, 25 bp, Artificial
  Probe
taaacatgaccaggtttatatccga

SEQ ID NO: 195767 - DNA, 25 bp, Artificial
  Probe
agttaggtcaaacttgtgggtctgc

SEQ ID NO: 195768 - DNA, 25 bp, Artificial
  Probe
cagtgcacaccgtgtctctctctga

SEQ ID NO: 195769 - DNA, 25 bp, Artificial
  Probe
gaggaccaggatctttttgaaatct

SEQ ID NO: 195770 - DNA, 25 bp, Artificial
  Probe
cctgtttccccctgaggggatcagc

SEQ ID NO: 195771 - DNA, 25 bp, Artificial
  Probe
ccacagctgccctctggagaagttt

SEQ ID NO: 195772 - DNA, 25 bp, Artificial
  Probe
gttgatcatgtattctgcatatgac

SEQ ID NO: 195773 - DNA, 25 bp, Artificial
  Probe
ctatgacaaacctcgcagccctgtt

SEQ ID NO: 195774 - DNA, 25 bp, Artificial
  Probe
gagtgttcacaatttcaccttccgc

SEQ ID NO: 195775 - DNA, 25 bp, Artificial
  Probe
ccatgactaagttgaaggagttgtc

SEQ ID NO: 195776 - DNA, 25 bp, Artificial
  Probe
atgaaattctcaagaacatgaagct

SEQ ID NO: 195777 - DNA, 25 bp, Artificial
  Probe
tgcagatggcgctagagctttataa

SEQ ID NO: 195778 - DNA, 25 bp, Artificial
  Probe
ggggaccttcgtggagatgtactac

SEQ ID NO: 195779 - DNA, 25 bp, Artificial
  Probe
gcgctagagctttataatggacttc

SEQ ID NO: 195780 - DNA, 25 bp, Artificial
  Probe
ggaatcccagactgctctggcagcc

SEQ ID NO: 195781 - DNA, 25 bp, Artificial
  Probe
ccctgggaatgtctgatgtaaaaac

SEQ ID NO: 195782 - DNA, 25 bp, Artificial
  Probe
gtgatcccccaggactgggccacag

SEQ ID NO: 195783 - DNA, 25 bp, Artificial
  Probe
ggggcgtcctggtcaatgaaattct

SEQ ID NO: 195784 - DNA, 25 bp, Artificial
  Probe
ccttcgtggagatgtactaccggaa

SEQ ID NO: 195785 - DNA, 25 bp, Artificial
  Probe
ctaagataccgcagtggggcactga

SEQ ID NO: 195786 - DNA, 25 bp, Artificial
  Probe
agtagcagctttctcccaagacctg

SEQ ID NO: 195787 - DNA, 25 bp, Artificial
  Probe
atcttggcctggacattcccaattt

SEQ ID NO: 195788 - DNA, 25 bp, Artificial
  Probe
catctcatgatagtttgctgcagtc

SEQ ID NO: 195789 - DNA, 25 bp, Artificial
  Probe
cccgcatacatctcatgatagtttg

SEQ ID NO: 195790 - DNA, 25 bp, Artificial
  Probe
ctcatgatagtttgctgcagtcctg

SEQ ID NO: 195791 - DNA, 25 bp, Artificial
  Probe
actaagataccgcagtggggcactg

SEQ ID NO: 195792 - DNA, 25 bp, Artificial
  Probe
catacatctcatgatagtttgctgc

SEQ ID NO: 195793 - DNA, 25 bp, Artificial
  Probe
gacctgtgtttactaagataccgca

SEQ ID NO: 195794 - DNA, 25 bp, Artificial
  Probe
cgcatacatctcatgatagtttgct

SEQ ID NO: 195795 - DNA, 25 bp, Artificial
  Probe
atacatctcatgatagtttgctgca

SEQ ID NO: 195796 - DNA, 25 bp, Artificial
  Probe
gtttactaagataccgcagtggggc

SEQ ID NO: 195797 - DNA, 25 bp, Artificial
  Probe
aagacctgtgtttactaagataccg

SEQ ID NO: 195798 - DNA, 25 bp, Artificial
  Probe
cgtcatgggggatgcccccaacttt

SEQ ID NO: 195799 - DNA, 25 bp, Artificial
  Probe
gtagcagctttctcccaagacctgt

SEQ ID NO: 195800 - DNA, 25 bp, Artificial
  Probe
tacatctcatgatagtttgctgcag

SEQ ID NO: 195801 - DNA, 25 bp, Artificial
  Probe
agataccgcagtggggcactgatta

SEQ ID NO: 195802 - DNA, 25 bp, Artificial
  Probe
atgatagtttgctgcagtcctgact

SEQ ID NO: 195803 - DNA, 25 bp, Artificial
  Probe
aatcttggcctggacattcccaatt

SEQ ID NO: 195804 - DNA, 25 bp, Artificial
  Probe
acacccgcatacatctcatgatagt

SEQ ID NO: 195805 - DNA, 25 bp, Artificial
  Probe
gacacccgcatacatctcatgatag

SEQ ID NO: 195806 - DNA, 25 bp, Artificial
  Probe
tgtttactaagataccgcagtgggg

SEQ ID NO: 195807 - DNA, 25 bp, Artificial
  Probe
ccgcatacatctcatgatagtttgc

SEQ ID NO: 195808 - DNA, 25 bp, Artificial
  Probe
aagataccgcagtggggcactgatt

SEQ ID NO: 195809 - DNA, 25 bp, Artificial
  Probe
gcatacatctcatgatagtttgctg

SEQ ID NO: 195810 - DNA, 25 bp, Artificial
  Probe
ggacacccgcatacatctcatgata

SEQ ID NO: 195811 - DNA, 25 bp, Artificial
  Probe
gagtagcagctttctcccaagacct

SEQ ID NO: 195812 - DNA, 25 bp, Artificial
  Probe
ctgcagtcctgactttgagaagcag

SEQ ID NO: 195813 - DNA, 25 bp, Artificial
  Probe
ccaagacctgtgtttactaagatac

SEQ ID NO: 195814 - DNA, 25 bp, Artificial
  Probe
catgatagtttgctgcagtcctgac

SEQ ID NO: 195815 - DNA, 25 bp, Artificial
  Probe
atctcatgatagtttgctgcagtcc

SEQ ID NO: 195816 - DNA, 25 bp, Artificial
  Probe
tctcatgatagtttgctgcagtcct

SEQ ID NO: 195817 - DNA, 25 bp, Artificial
  Probe
gatagtttgctgcagtcctgacttt

SEQ ID NO: 195818 - DNA, 25 bp, Artificial
  Probe
gtgtttactaagataccgcagtggg

SEQ ID NO: 195819 - DNA, 25 bp, Artificial
  Probe
agagtagcagctttctcccaagacc

SEQ ID NO: 195820 - DNA, 25 bp, Artificial
  Probe
tcatgatagtttgctgcagtcctga

SEQ ID NO: 195821 - DNA, 25 bp, Artificial
  Probe
atacgtcatgggggatgcccccaac

SEQ ID NO: 195822 - DNA, 25 bp, Artificial
  Probe
acatctcatgatagtttgctgcagt

SEQ ID NO: 195823 - DNA, 25 bp, Artificial
  Probe
taagataccgcagtggggcactgat

SEQ ID NO: 195824 - DNA, 25 bp, Artificial
  Probe
agacctgtgtttactaagataccgc

SEQ ID NO: 195825 - DNA, 25 bp, Artificial
  Probe
caagacctgtgtttactaagatacc

SEQ ID NO: 195826 - DNA, 25 bp, Artificial
  Probe
aagagtagcagctttctcccaagac

SEQ ID NO: 195827 - DNA, 25 bp, Artificial
  Probe
tttactaagataccgcagtggggca

SEQ ID NO: 195828 - DNA, 25 bp, Artificial
  Probe
tcttggcctggacattcccaatttg

SEQ ID NO: 195829 - DNA, 25 bp, Artificial
  Probe
tgatagtttgctgcagtcctgactt

SEQ ID NO: 195830 - DNA, 25 bp, Artificial
  Probe
acccgcatacatctcatgatagttt

SEQ ID NO: 195831 - DNA, 25 bp, Artificial
  Probe
cagtgtcatgcagcagaacctggta

SEQ ID NO: 195832 - DNA, 25 bp, Artificial
  Probe
gacctctgaacttcgggagttgcta

SEQ ID NO: 195833 - DNA, 25 bp, Artificial
  Probe
gtgcactcttcaagctcaggacacc

SEQ ID NO: 195834 - DNA, 25 bp, Artificial
  Probe
aggaagctgtgctctaccacaacca

SEQ ID NO: 195835 - DNA, 25 bp, Artificial
  Probe
cagtgacatggtgcactcttcaagc

SEQ ID NO: 195836 - DNA, 25 bp, Artificial
  Probe
gtgacatggtgcactcttcaagctc

SEQ ID NO: 195837 - DNA, 25 bp, Artificial
  Probe
gtatcactacctgcagtttgcctac

SEQ ID NO: 195838 - DNA, 25 bp, Artificial
  Probe
actacaaattgaacgatgtgcacca

SEQ ID NO: 195839 - DNA, 25 bp, Artificial
  Probe
tgcctactacaaattgaacgatgtg

SEQ ID NO: 195840 - DNA, 25 bp, Artificial
  Probe
tcttcaagctcaggacacctggctg

SEQ ID NO: 195841 - DNA, 25 bp, Artificial
  Probe
acaaccagacctctgaacttcggga

SEQ ID NO: 195842 - DNA, 25 bp, Artificial
  Probe
tatattaccgcttccaccgggctcg

SEQ ID NO: 195843 - DNA, 25 bp, Artificial
  Probe
acatgctctttgaccccaaggacag

SEQ ID NO: 195844 - DNA, 25 bp, Artificial
  Probe
acctggtatattaccgcttccaccg

SEQ ID NO: 195845 - DNA, 25 bp, Artificial
  Probe
agcagaacctggtatattaccgctt

SEQ ID NO: 195846 - DNA, 25 bp, Artificial
  Probe
ctctttgaccccaaggacagtgtca

SEQ ID NO: 195847 - DNA, 25 bp, Artificial
  Probe
ccccgggaggaagctgtgctctacc

SEQ ID NO: 195848 - DNA, 25 bp, Artificial
  Probe
tgaggctgagccagagcctgaactg

SEQ ID NO: 195849 - DNA, 25 bp, Artificial
  Probe
cagccccgggaggaagctgtgctct

SEQ ID NO: 195850 - DNA, 25 bp, Artificial
  Probe
gtatattaccgcttccaccgggctc

SEQ ID NO: 195851 - DNA, 25 bp, Artificial
  Probe
gcagtttgcctactacaaattgaac

SEQ ID NO: 195852 - DNA, 25 bp, Artificial
  Probe
gaccccaaggacagtgtcatgcagc

SEQ ID NO: 195853 - DNA, 25 bp, Artificial
  Probe
cctgaactggcctaagacagtgaca

SEQ ID NO: 195854 - DNA, 25 bp, Artificial
  Probe
ctgcagtttgcctactacaaattga

SEQ ID NO: 195855 - DNA, 25 bp, Artificial
  Probe
ttcaagctcaggacacctggctggg

SEQ ID NO: 195856 - DNA, 25 bp, Artificial
  Probe
agacagtgacatggtgcactcttca

SEQ ID NO: 195857 - DNA, 25 bp, Artificial
  Probe
accatgtatcactacctgcagtttg

SEQ ID NO: 195858 - DNA, 25 bp, Artificial
  Probe
gaacctggtatattaccgcttccac

SEQ ID NO: 195859 - DNA, 25 bp, Artificial
  Probe
gcagcagaacctggtatattaccgc

SEQ ID NO: 195860 - DNA, 25 bp, Artificial
  Probe
tagctacatgctctttgaccccaag

SEQ ID NO: 195861 - DNA, 25 bp, Artificial
  Probe
ctgaacttcgggagttgctagactt

SEQ ID NO: 195862 - DNA, 25 bp, Artificial
  Probe
gctagctacatgctctttgacccca

SEQ ID NO: 195863 - DNA, 25 bp, Artificial
  Probe
aaccagacctctgaacttcgggagt

SEQ ID NO: 195864 - DNA, 25 bp, Artificial
  Probe
aaattgaacgatgtgcaccaggctg

SEQ ID NO: 195865 - DNA, 25 bp, Artificial
  Probe
ccagagcctgaactggcctaagaca

SEQ ID NO: 195866 - DNA, 25 bp, Artificial
  Probe
gccaccatgtatcactacctgcagt

SEQ ID NO: 195867 - DNA, 25 bp, Artificial
  Probe
cacaaccagacctctgaacttcggg

SEQ ID NO: 195868 - DNA, 25 bp, Artificial
  Probe
cgcagcgctgctagctacatgctct

SEQ ID NO: 195869 - DNA, 25 bp, Artificial
  Probe
cctaagacagtgacatggtgcactc

SEQ ID NO: 195870 - DNA, 25 bp, Artificial
  Probe
tgagccagagcctgaactggcctaa

SEQ ID NO: 195871 - DNA, 25 bp, Artificial
  Probe
tgcccgcagcgctgctagctacatg

SEQ ID NO: 195872 - DNA, 25 bp, Artificial
  Probe
aggctgagccagagcctgaactggc

SEQ ID NO: 195873 - DNA, 25 bp, Artificial
  Probe
ggacagtgtcatgcagcagaacctg

SEQ ID NO: 195874 - DNA, 25 bp, Artificial
  Probe
acgatgtgcaccaggctgcccgcag

SEQ ID NO: 195875 - DNA, 25 bp, Artificial
  Probe
aagctgtgctctaccacaaccagac

SEQ ID NO: 195876 - DNA, 25 bp, Artificial
  Probe
cagaacctggtatattaccgcttcc

SEQ ID NO: 195877 - DNA, 25 bp, Artificial
  Probe
tatatttttgtacatattgttaggg

SEQ ID NO: 195878 - DNA, 25 bp, Artificial
  Probe
attttatatttttgtacatattgtt

SEQ ID NO: 195879 - DNA, 25 bp, Artificial
  Probe
tttttgtacatattgttaggggtca

SEQ ID NO: 195880 - DNA, 25 bp, Artificial
  Probe
gtacatattgttaggggtcagccat

SEQ ID NO: 195881 - DNA, 25 bp, Artificial
  Probe
gactaattccttacgcgtacgacca

SEQ ID NO: 195882 - DNA, 25 bp, Artificial
  Probe
ttgtacatattgttaggggtcagcc

SEQ ID NO: 195883 - DNA, 25 bp, Artificial
  Probe
ttttgtacatattgttaggggtcag

SEQ ID NO: 195884 - DNA, 25 bp, Artificial
  Probe
actaattccttacgcgtacgaccag

SEQ ID NO: 195885 - DNA, 25 bp, Artificial
  Probe
tcgactaattccttacgcgtacgac

SEQ ID NO: 195886 - DNA, 25 bp, Artificial
  Probe
tgttaggggtcagccatttttaatg

SEQ ID NO: 195887 - DNA, 25 bp, Artificial
  Probe
ttttatatttttgtacatattgtta

SEQ ID NO: 195888 - DNA, 25 bp, Artificial
  Probe
catattgttaggggtcagccatttt

SEQ ID NO: 195889 - DNA, 25 bp, Artificial
  Probe
tatttttgtacatattgttaggggt

SEQ ID NO: 195890 - DNA, 25 bp, Artificial
  Probe
atattgttaggggtcagccattttt

SEQ ID NO: 195891 - DNA, 25 bp, Artificial
  Probe
aggctcctacgggcaagcgggtagc

SEQ ID NO: 195892 - DNA, 25 bp, Artificial
  Probe
ctcgactaattccttacgcgtacga

SEQ ID NO: 195893 - DNA, 25 bp, Artificial
  Probe
tatttacattttatatttttgtaca

SEQ ID NO: 195894 - DNA, 25 bp, Artificial
  Probe
ttacattttatatttttgtacatat

SEQ ID NO: 195895 - DNA, 25 bp, Artificial
  Probe
atatttttgtacatattgttagggg

SEQ ID NO: 195896 - DNA, 25 bp, Artificial
  Probe
acattttatatttttgtacatattg

SEQ ID NO: 195897 - DNA, 25 bp, Artificial
  Probe
tattgttaggggtcagccattttta

SEQ ID NO: 195898 - DNA, 25 bp, Artificial
  Probe
ctaattccttacgcgtacgaccaga

SEQ ID NO: 195899 - DNA, 25 bp, Artificial
  Probe
ggctcctacgggcaagcgggtagct

SEQ ID NO: 195900 - DNA, 25 bp, Artificial
  Probe
gaggctcctacgggcaagcgggtag

SEQ ID NO: 195901 - DNA, 25 bp, Artificial
  Probe
tgaggctcctacgggcaagcgggta

SEQ ID NO: 195902 - DNA, 25 bp, Artificial
  Probe
taattccttacgcgtacgaccagac

SEQ ID NO: 195903 - DNA, 25 bp, Artificial
  Probe
ttgttaggggtcagccatttttaat

SEQ ID NO: 195904 - DNA, 25 bp, Artificial
  Probe
tacatattgttaggggtcagccatt

SEQ ID NO: 195905 - DNA, 25 bp, Artificial
  Probe
ttatatttttgtacatattgttagg

SEQ ID NO: 195906 - DNA, 25 bp, Artificial
  Probe
atttacattttatatttttgtacat

SEQ ID NO: 195907 - DNA, 25 bp, Artificial
  Probe
tttgtacatattgttaggggtcagc

SEQ ID NO: 195908 - DNA, 25 bp, Artificial
  Probe
acatattgttaggggtcagccattt

SEQ ID NO: 195909 - DNA, 25 bp, Artificial
  Probe
gaaaggactgatctcggccctctgt

SEQ ID NO: 195910 - DNA, 25 bp, Artificial
  Probe
ataactctggcgtagtcatagccac

SEQ ID NO: 195911 - DNA, 25 bp, Artificial
  Probe
acaaccctgagttgggcgagaaagg

SEQ ID NO: 195912 - DNA, 25 bp, Artificial
  Probe
gtcacttacaggaaatccctttttg

SEQ ID NO: 195913 - DNA, 25 bp, Artificial
  Probe
tctatctttcactgggctggagcac

SEQ ID NO: 195914 - DNA, 25 bp, Artificial
  Probe
cgaccctccaagttttagcgctgcg

SEQ ID NO: 195915 - DNA, 25 bp, Artificial
  Probe
aaggaaagaactctctcctgaaagt

SEQ ID NO: 195916 - DNA, 25 bp, Artificial
  Probe
ctgactcttgaaaacctcgaggtaa

SEQ ID NO: 195917 - DNA, 25 bp, Artificial
  Probe
gataggaaacctaggccagaggagc

SEQ ID NO: 195918 - DNA, 25 bp, Artificial
  Probe
tctctcctgaaagttgtccatcggt

SEQ ID NO: 195919 - DNA, 25 bp, Artificial
  Probe
tctttcacccggatcagcgggcttg

SEQ ID NO: 195920 - DNA, 25 bp, Artificial
  Probe
gaggtaaccggcaccgcgctttcgc

SEQ ID NO: 195921 - DNA, 25 bp, Artificial
  Probe
tgcccttgccaccttagatctgtct

SEQ ID NO: 195922 - DNA, 25 bp, Artificial
  Probe
agtcggaggcgtataactctggcgt

SEQ ID NO: 195923 - DNA, 25 bp, Artificial
  Probe
gctcaatctatctttcactgggctg

SEQ ID NO: 195924 - DNA, 25 bp, Artificial
  Probe
acaacaggctggataggaaacctag

SEQ ID NO: 195925 - DNA, 25 bp, Artificial
  Probe
atccacaatgtaaggaaggacaatc

SEQ ID NO: 195926 - DNA, 25 bp, Artificial
  Probe
cctccaagttttagcgctgcgcaac

SEQ ID NO: 195927 - DNA, 25 bp, Artificial
  Probe
tggctcgcagaactgcagcagtggc

SEQ ID NO: 195928 - DNA, 25 bp, Artificial
  Probe
gtcctggtcaacaaatcctctgctt

SEQ ID NO: 195929 - DNA, 25 bp, Artificial
  Probe
tttcactgggctggagcacgtacct

SEQ ID NO: 195930 - DNA, 25 bp, Artificial
  Probe
tggggagcctgtcacttacaggaaa

SEQ ID NO: 195931 - DNA, 25 bp, Artificial
  Probe
gtcacaattcactgcgggatactgc

SEQ ID NO: 195932 - DNA, 25 bp, Artificial
  Probe
ctaggccagaggagctgcctgaagt

SEQ ID NO: 195933 - DNA, 25 bp, Artificial
  Probe
cttgcaaacaggtcggcgtcttccc

SEQ ID NO: 195934 - DNA, 25 bp, Artificial
  Probe
ctccgagctgtgactggcccagtca

SEQ ID NO: 195935 - DNA, 25 bp, Artificial
  Probe
tttcgccgcttctggatgccaccgg

SEQ ID NO: 195936 - DNA, 25 bp, Artificial
  Probe
cactgcaggcactggatctcagtca

SEQ ID NO: 195937 - DNA, 25 bp, Artificial
  Probe
cgaccagcggcgtgtgctctgcgct

SEQ ID NO: 195938 - DNA, 25 bp, Artificial
  Probe
ttgagcctccgcaacgtgtcgtggg

SEQ ID NO: 195939 - DNA, 25 bp, Artificial
  Probe
ggaaatccctttttgcactctgaat

SEQ ID NO: 195940 - DNA, 25 bp, Artificial
  Probe
tcctggtttctgagggtcctggtca

SEQ ID NO: 195941 - DNA, 25 bp, Artificial
  Probe
ggtactaagtattgcccaagcacac

SEQ ID NO: 195942 - DNA, 25 bp, Artificial
  Probe
ctcaacttttcttgcaaacaggtcg

SEQ ID NO: 195943 - DNA, 25 bp, Artificial
  Probe
gtagtcatagccacagctctttcac

SEQ ID NO: 195944 - DNA, 25 bp, Artificial
  Probe
caacaacggatacctggctcgcaga

SEQ ID NO: 195945 - DNA, 25 bp, Artificial
  Probe
aaaggaaagaactctctcctgaaag

SEQ ID NO: 195946 - DNA, 25 bp, Artificial
  Probe
atagccacagctctttcacccggat

SEQ ID NO: 195947 - DNA, 25 bp, Artificial
  Probe
agcttagcgtgcttgatctcagtta

SEQ ID NO: 195948 - DNA, 25 bp, Artificial
  Probe
tgggtaaaagccaccaagcttgact

SEQ ID NO: 195949 - DNA, 25 bp, Artificial
  Probe
aatcccagtcggaggcgtataactc

SEQ ID NO: 195950 - DNA, 25 bp, Artificial
  Probe
tgtgctctgcgctggccgcagcaag

SEQ ID NO: 195951 - DNA, 25 bp, Artificial
  Probe
aatcttaatccacaatgtaaggaag

SEQ ID NO: 195952 - DNA, 25 bp, Artificial
  Probe
tggcccagtcagctaaactcgctca

SEQ ID NO: 195953 - DNA, 25 bp, Artificial
  Probe
gatccacaccaaaggaaagaactct

SEQ ID NO: 195954 - DNA, 25 bp, Artificial
  Probe
ttcgccgcttctggatgccaccgga

SEQ ID NO: 195955 - DNA, 25 bp, Artificial
  Probe
tgaaaatgacccaggaagagtacgc

SEQ ID NO: 195956 - DNA, 25 bp, Artificial
  Probe
cgctcctctgtgagatctgggatgt

SEQ ID NO: 195957 - DNA, 25 bp, Artificial
  Probe
tgttacttcaattttgtcaactgag

SEQ ID NO: 195958 - DNA, 25 bp, Artificial
  Probe
acaggctccatagaattgcttcccc

SEQ ID NO: 195959 - DNA, 25 bp, Artificial
  Probe
aagtgtcggggagctgaaaatgacc

SEQ ID NO: 195960 - DNA, 25 bp, Artificial
  Probe
gttttatcctccatgcggcaacatt

SEQ ID NO: 195961 - DNA, 25 bp, Artificial
  Probe
tccagacagacaatacataaaggat

SEQ ID NO: 195962 - DNA, 25 bp, Artificial
  Probe
tggtattggacttcccttcttttca

SEQ ID NO: 195963 - DNA, 25 bp, Artificial
  Probe
cgaaagagcggcatctccgatgagt

SEQ ID NO: 195964 - DNA, 25 bp, Artificial
  Probe
acgctgagatgctgatgtcttggag

SEQ ID NO: 195965 - DNA, 25 bp, Artificial
  Probe
tcaactgagacaataaactgaacgt

SEQ ID NO: 195966 - DNA, 25 bp, Artificial
  Probe
agtgtcggggagctgaaaatgaccc

SEQ ID NO: 195967 - DNA, 25 bp, Artificial
  Probe
tatgtacatgcgtcggaagtgccag

SEQ ID NO: 195968 - DNA, 25 bp, Artificial
  Probe
tcatttgtaccaggtctcactcaag

SEQ ID NO: 195969 - DNA, 25 bp, Artificial
  Probe
aaatgtgaagcagcatgcggatcag

SEQ ID NO: 195970 - DNA, 25 bp, Artificial
  Probe
attgccggctaaggaagtgcagaga

SEQ ID NO: 195971 - DNA, 25 bp, Artificial
  Probe
agaggctagctccttgtcctcctca

SEQ ID NO: 195972 - DNA, 25 bp, Artificial
  Probe
ggagaaaactgaactcactgtagac

SEQ ID NO: 195973 - DNA, 25 bp, Artificial
  Probe
gatgtcctacaaaaactctgcaaga

SEQ ID NO: 195974 - DNA, 25 bp, Artificial
  Probe
gatgagtacataaccccgatgttta

SEQ ID NO: 195975 - DNA, 25 bp, Artificial
  Probe
tcggaagtgccaggattgccggcta

SEQ ID NO: 195976 - DNA, 25 bp, Artificial
  Probe
aacagaaatggctaccagtcacgta

SEQ ID NO: 195977 - DNA, 25 bp, Artificial
  Probe
gcctgacagaactccggacattcaa

SEQ ID NO: 195978 - DNA, 25 bp, Artificial
  Probe
ggatcagacagtgaatgaggacagc

SEQ ID NO: 195979 - DNA, 25 bp, Artificial
  Probe
ttgtcctcctcagagcagcaacctg

SEQ ID NO: 195980 - DNA, 25 bp, Artificial
  Probe
actgagctagggaccgcctcgtttt

SEQ ID NO: 195981 - DNA, 25 bp, Artificial
  Probe
gcagacctgttggaagaaagaattc

SEQ ID NO: 195982 - DNA, 25 bp, Artificial
  Probe
gctctgctcacagcaattgtcatcc

SEQ ID NO: 195983 - DNA, 25 bp, Artificial
  Probe
ttaaatagctgttttcaactgagac

SEQ ID NO: 195984 - DNA, 25 bp, Artificial
  Probe
atctgggatgtgcagtgaaggacac

SEQ ID NO: 195985 - DNA, 25 bp, Artificial
  Probe
tgcaagatctaccagcccgagaacc

SEQ ID NO: 195986 - DNA, 25 bp, Artificial
  Probe
ttttcaataagaaacttcctgccgg

SEQ ID NO: 195987 - DNA, 25 bp, Artificial
  Probe
tctccagacagacaatacataaagg

SEQ ID NO: 195988 - DNA, 25 bp, Artificial
  Probe
ggtctcactcaagaatctcaatgaa

SEQ ID NO: 195989 - DNA, 25 bp, Artificial
  Probe
gtgacttgcggcaagtgacctccac

SEQ ID NO: 195990 - DNA, 25 bp, Artificial
  Probe
tattatggactcatacagcaaacag

SEQ ID NO: 195991 - DNA, 25 bp, Artificial
  Probe
aactgtaaatacaggctccatagaa

SEQ ID NO: 195992 - DNA, 25 bp, Artificial
  Probe
cactgtattttacaaggcttcggga

SEQ ID NO: 195993 - DNA, 25 bp, Artificial
  Probe
agaagcttcaggagcctctgctcga

SEQ ID NO: 195994 - DNA, 25 bp, Artificial
  Probe
ctacactgtattttacaaggcttcg

SEQ ID NO: 195995 - DNA, 25 bp, Artificial
  Probe
accaagctatgcagggagaaaactg

SEQ ID NO: 195996 - DNA, 25 bp, Artificial
  Probe
ctgcctcctgggtcgcctgacagaa

SEQ ID NO: 195997 - DNA, 25 bp, Artificial
  Probe
ccagcagaccctcctggattatatt

SEQ ID NO: 195998 - DNA, 25 bp, Artificial
  Probe
ggacattcaaccatcaccacgctga

SEQ ID NO: 195999 - DNA, 25 bp, Artificial
  Probe
cgttcagcggagattttcaataaga

SEQ ID NO: 196000 - DNA, 25 bp, Artificial
  Probe
gaatgccacaggagatcacaaataa

SEQ ID NO: 196001 - DNA, 25 bp, Artificial
  Probe
cttgaaacctggaaacctggctgtg

SEQ ID NO: 196002 - DNA, 25 bp, Artificial
  Probe
ctcctttgatgacgtagaccgcacc

SEQ ID NO: 196003 - DNA, 25 bp, Artificial
  Probe
tcaagaagttgtaccggcccttcca

SEQ ID NO: 196004 - DNA, 25 bp, Artificial
  Probe
acgctgccggcgtcatccacaggga

SEQ ID NO: 196005 - DNA, 25 bp, Artificial
  Probe
atcttgaattggatgcgttacacac

SEQ ID NO: 196006 - DNA, 25 bp, Artificial
  Probe
accagctgaaggagatcatgaaagt

SEQ ID NO: 196007 - DNA, 25 bp, Artificial
  Probe
ggtgacagcagctgaggcattagcc

SEQ ID NO: 196008 - DNA, 25 bp, Artificial
  Probe
cggcgtcatccacagggacttgaaa

SEQ ID NO: 196009 - DNA, 25 bp, Artificial
  Probe
agactctgagtgaagacagaatcca

SEQ ID NO: 196010 - DNA, 25 bp, Artificial
  Probe
ggaaacctggctgtgaacgaggact

SEQ ID NO: 196011 - DNA, 25 bp, Artificial
  Probe
tgacagcagctgaggcattagccca

SEQ ID NO: 196012 - DNA, 25 bp, Artificial
  Probe
catcatggcagagatgattactgga

SEQ ID NO: 196013 - DNA, 25 bp, Artificial
  Probe
ggatatgtggtaacccggtggtatc

SEQ ID NO: 196014 - DNA, 25 bp, Artificial
  Probe
caaggcccagaaatatgatgactcc

SEQ ID NO: 196015 - DNA, 25 bp, Artificial
  Probe
ctccctgagttggaaaagaaggatt

SEQ ID NO: 196016 - DNA, 25 bp, Artificial
  Probe
ccctcctgagtttgtacagaagcta

SEQ ID NO: 196017 - DNA, 25 bp, Artificial
  Probe
cgcacccttgaggaatggaagcgtg

SEQ ID NO: 196018 - DNA, 25 bp, Artificial
  Probe
cttgtgtatcagatgctgaaggggc

SEQ ID NO: 196019 - DNA, 25 bp, Artificial
  Probe
tgcatcatggcagagatgattactg

SEQ ID NO: 196020 - DNA, 25 bp, Artificial
  Probe
atcatgaaagtcacagggacacccc

SEQ ID NO: 196021 - DNA, 25 bp, Artificial
  Probe
tataaggaagtgctcagcttcaagc

SEQ ID NO: 196022 - DNA, 25 bp, Artificial
  Probe
gtaacccggtggtatcgggcaccag

SEQ ID NO: 196023 - DNA, 25 bp, Artificial
  Probe
gccaagcgcgcctacagagagttgc

SEQ ID NO: 196024 - DNA, 25 bp, Artificial
  Probe
taccggcccttccagtcggagctgt

SEQ ID NO: 196025 - DNA, 25 bp, Artificial
  Probe
tagattttggccttgccaggcaggc

SEQ ID NO: 196026 - DNA, 25 bp, Artificial
  Probe
acctgcagcccgttggctctggtgc

SEQ ID NO: 196027 - DNA, 25 bp, Artificial
  Probe
agaatccagtttcttgtgtatcaga

SEQ ID NO: 196028 - DNA, 25 bp, Artificial
  Probe
gtcctgaccaatgcaagccctcagg

SEQ ID NO: 196029 - DNA, 25 bp, Artificial
  Probe
gtatatccacgctgccggcgtcatc

SEQ ID NO: 196030 - DNA, 25 bp, Artificial
  Probe
acccttgaggaatggaagcgtgtta

SEQ ID NO: 196031 - DNA, 25 bp, Artificial
  Probe
agtgctcagcttcaagcctcccagg

SEQ ID NO: 196032 - DNA, 25 bp, Artificial
  Probe
ttttgcttctgtcctgaccaatgca

SEQ ID NO: 196033 - DNA, 25 bp, Artificial
  Probe
cacccatactttgagtcccttcggg

SEQ ID NO: 196034 - DNA, 25 bp, Artificial
  Probe
aacacatgcgccacgagaacgtcat

SEQ ID NO: 196035 - DNA, 25 bp, Artificial
  Probe
attactggaaagatcctgttcaaag

SEQ ID NO: 196036 - DNA, 25 bp, Artificial
  Probe
cgtgaatctcctggaaaagatgctg

SEQ ID NO: 196037 - DNA, 25 bp, Artificial
  Probe
gatgcgttacacacagacagtggac

SEQ ID NO: 196038 - DNA, 25 bp, Artificial
  Probe
cgtcattgggctgctggatgtgttc

SEQ ID NO: 196039 - DNA, 25 bp, Artificial
  Probe
gagttgcgcctcctcaaacacatgc

SEQ ID NO: 196040 - DNA, 25 bp, Artificial
  Probe
gaaatatgatgactcctttgatgac

SEQ ID NO: 196041 - DNA, 25 bp, Artificial
  Probe
agatcatgaaagtcacagggacacc

SEQ ID NO: 196042 - DNA, 25 bp, Artificial
  Probe
gttacacacagacagtggacatttg

SEQ ID NO: 196043 - DNA, 25 bp, Artificial
  Probe
ccacgagaacgtcattgggctgctg

SEQ ID NO: 196044 - DNA, 25 bp, Artificial
  Probe
tttggccttgccaggcaggcggaca

SEQ ID NO: 196045 - DNA, 25 bp, Artificial
  Probe
gctgaagtatatccacgctgccggc

SEQ ID NO: 196046 - DNA, 25 bp, Artificial
  Probe
ttcaagcctcccaggcagctaggag

SEQ ID NO: 196047 - DNA, 25 bp, Artificial
  Probe
ttgacctacccgaaggtaggcttct

SEQ ID NO: 196048 - DNA, 25 bp, Artificial
  Probe
gccctcatgagagaagaaggcgcta

SEQ ID NO: 196049 - DNA, 25 bp, Artificial
  Probe
acgtgaccaagagcaaagatagagg

SEQ ID NO: 196050 - DNA, 25 bp, Artificial
  Probe
actgaaaactggactgtttacaaca

SEQ ID NO: 196051 - DNA, 25 bp, Artificial
  Probe
aaactggactgtttacaacagtgac

SEQ ID NO: 196052 - DNA, 25 bp, Artificial
  Probe
ctacccgaaggtaggcttctacacg

SEQ ID NO: 196053 - DNA, 25 bp, Artificial
  Probe
ggctaagatgattcccgcttacgtg

SEQ ID NO: 196054 - DNA, 25 bp, Artificial
  Probe
atagaggaggttccaagggattcgc

SEQ ID NO: 196055 - DNA, 25 bp, Artificial
  Probe
accatgtggcccacagaatgggtta

SEQ ID NO: 196056 - DNA, 25 bp, Artificial
  Probe
ggagaacttttctaatcggaagtca

SEQ ID NO: 196057 - DNA, 25 bp, Artificial
  Probe
ctggctaagatgattcccgcttacg

SEQ ID NO: 196058 - DNA, 25 bp, Artificial
  Probe
aggttccaagggattcgcttagcac

SEQ ID NO: 196059 - DNA, 25 bp, Artificial
  Probe
ggttattatctttgcctaaagaagc

SEQ ID NO: 196060 - DNA, 25 bp, Artificial
  Probe
actccccgtgttaacaaccatgtgg

SEQ ID NO: 196061 - DNA, 25 bp, Artificial
  Probe
cgaaggtaggcttctacacgtgacc

SEQ ID NO: 196062 - DNA, 25 bp, Artificial
  Probe
tggcccacagaatgggttattatct

SEQ ID NO: 196063 - DNA, 25 bp, Artificial
  Probe
agaaggcgctagtcccctggacttt

SEQ ID NO: 196064 - DNA, 25 bp, Artificial
  Probe
ccacactcactctgcatgactagtg

SEQ ID NO: 196065 - DNA, 25 bp, Artificial
  Probe
gaagaaggcgctagtcccctggact

SEQ ID NO: 196066 - DNA, 25 bp, Artificial
  Probe
acactggactaagtgaagtgtccac

SEQ ID NO: 196067 - DNA, 25 bp, Artificial
  Probe
tgaggaaattcttggccctcatgag

SEQ ID NO: 196068 - DNA, 25 bp, Artificial
  Probe
cactcactctgcatgactagtgcag

SEQ ID NO: 196069 - DNA, 25 bp, Artificial
  Probe
ctgagtaccgtgtgaggaaattctt

SEQ ID NO: 196070 - DNA, 25 bp, Artificial
  Probe
gcgctagtcccctggactttgactg

SEQ ID NO: 196071 - DNA, 25 bp, Artificial
  Probe
atgactagtgcagtaaactgcctcg

SEQ ID NO: 196072 - DNA, 25 bp, Artificial
  Probe
tacaacagtgaccaagggaaacgac

SEQ ID NO: 196073 - DNA, 25 bp, Artificial
  Probe
accaaggtgatgatggcctgggatc

SEQ ID NO: 196074 - DNA, 25 bp, Artificial
  Probe
gttgcaatcaggagaacttttctaa

SEQ ID NO: 196075 - DNA, 25 bp, Artificial
  Probe
ccatgctggctaagatgattcccgc

SEQ ID NO: 196076 - DNA, 25 bp, Artificial
  Probe
ctttgcctaaagaagcaggattttt

SEQ ID NO: 196077 - DNA, 25 bp, Artificial
  Probe
ggatcgtcactcctcatactcaaga

SEQ ID NO: 196078 - DNA, 25 bp, Artificial
  Probe
cattttcagagatatttccaagttg

SEQ ID NO: 196079 - DNA, 25 bp, Artificial
  Probe
gttccaagggattcgcttagcactc

SEQ ID NO: 196080 - DNA, 25 bp, Artificial
  Probe
ggaaacgaccaaggtgatgatggcc

SEQ ID NO: 196081 - DNA, 25 bp, Artificial
  Probe
ctagtgcagtaaactgcctcgtgct

SEQ ID NO: 196082 - DNA, 25 bp, Artificial
  Probe
tggaaaacacttgacctacccgaag

SEQ ID NO: 196083 - DNA, 25 bp, Artificial
  Probe
tgatggcctgggatcgtcactcctc

SEQ ID NO: 196084 - DNA, 25 bp, Artificial
  Probe
ctgcctcgtgcttccgagatgtcct

SEQ ID NO: 196085 - DNA, 25 bp, Artificial
  Probe
aactggactgtttacaacagtgacc

SEQ ID NO: 196086 - DNA, 25 bp, Artificial
  Probe
aattcttggccctcatgagagaaga

SEQ ID NO: 196087 - DNA, 25 bp, Artificial
  Probe
cagtaaactgcctcgtgcttccgag

SEQ ID NO: 196088 - DNA, 25 bp, Artificial
  Probe
taccatgctggctaagatgattccc

SEQ ID NO: 196089 - DNA, 25 bp, Artificial
  Probe
actgtttacaacagtgaccaaggga

SEQ ID NO: 196090 - DNA, 25 bp, Artificial
  Probe
ttaacaaccatgtggcccacagaat

SEQ ID NO: 196091 - DNA, 25 bp, Artificial
  Probe
agtgcagtaaactgcctcgtgcttc

SEQ ID NO: 196092 - DNA, 25 bp, Artificial
  Probe
ctcatactcaagacactggactaag

SEQ ID NO: 196093 - DNA, 25 bp, Artificial
  Probe
acaggatagcggaccctggcgacaa

SEQ ID NO: 196094 - DNA, 25 bp, Artificial
  Probe
aacgaatgtaagttcctgggctgct

SEQ ID NO: 196095 - DNA, 25 bp, Artificial
  Probe
tgctgtcttttactgctgtgggatt

SEQ ID NO: 196096 - DNA, 25 bp, Artificial
  Probe
gttcctgggctgctgtcttttactg

SEQ ID NO: 196097 - DNA, 25 bp, Artificial
  Probe
gaggggattccacactgcatcgatc

SEQ ID NO: 196098 - DNA, 25 bp, Artificial
  Probe
ggggattccacactgcatcgatcca

SEQ ID NO: 196099 - DNA, 25 bp, Artificial
  Probe
caacgaatgtaagttcctgggctgc

SEQ ID NO: 196100 - DNA, 25 bp, Artificial
  Probe
actgcatcgatccagtcgacaggcg

SEQ ID NO: 196101 - DNA, 25 bp, Artificial
  Probe
gatccagtcgacaggcgagtcacag

SEQ ID NO: 196102 - DNA, 25 bp, Artificial
  Probe
agtcgacaggcgagtcacaggatag

SEQ ID NO: 196103 - DNA, 25 bp, Artificial
  Probe
attccacactgcatcgatccagtcg

SEQ ID NO: 196104 - DNA, 25 bp, Artificial
  Probe
tatcatcttatgctgctggaagctt

SEQ ID NO: 196105 - DNA, 25 bp, Artificial
  Probe
gaccctggcgacaacgaatgtaagt

SEQ ID NO: 196106 - DNA, 25 bp, Artificial
  Probe
ttgaagtcagcaaaaccagaaatca

SEQ ID NO: 196107 - DNA, 25 bp, Artificial
  Probe
ctggcgacaacgaatgtaagttcct

SEQ ID NO: 196108 - DNA, 25 bp, Artificial
  Probe
gcatcgatccagtcgacaggcgagt

SEQ ID NO: 196109 - DNA, 25 bp, Artificial
  Probe
ttactatcatcttatgctgctggaa

SEQ ID NO: 196110 - DNA, 25 bp, Artificial
  Probe
gctgctgtcttttactgctgtggga

SEQ ID NO: 196111 - DNA, 25 bp, Artificial
  Probe
agaggggattccacactgcatcgat

SEQ ID NO: 196112 - DNA, 25 bp, Artificial
  Probe
atcttatgctgctggaagcttaaag

SEQ ID NO: 196113 - DNA, 25 bp, Artificial
  Probe
tcgacaggcgagtcacaggatagcg

SEQ ID NO: 196114 - DNA, 25 bp, Artificial
  Probe
actatcatcttatgctgctggaagc

SEQ ID NO: 196115 - DNA, 25 bp, Artificial
  Probe
ttccacactgcatcgatccagtcga

SEQ ID NO: 196116 - DNA, 25 bp, Artificial
  Probe
ccctggcgacaacgaatgtaagttc

SEQ ID NO: 196117 - DNA, 25 bp, Artificial
  Probe
tcatcttatgctgctggaagcttaa

SEQ ID NO: 196118 - DNA, 25 bp, Artificial
  Probe
aggcgagtcacaggatagcggaccc

SEQ ID NO: 196119 - DNA, 25 bp, Artificial
  Probe
tcgatccagtcgacaggcgagtcac

SEQ ID NO: 196120 - DNA, 25 bp, Artificial
  Probe
ctgcatcgatccagtcgacaggcga

SEQ ID NO: 196121 - DNA, 25 bp, Artificial
  Probe
gaatgtaagttcctgggctgctgtc

SEQ ID NO: 196122 - DNA, 25 bp, Artificial
  Probe
aattactatcatcttatgctgctgg

SEQ ID NO: 196123 - DNA, 25 bp, Artificial
  Probe
cgagtcacaggatagcggaccctgg

SEQ ID NO: 196124 - DNA, 25 bp, Artificial
  Probe
acaacgaatgtaagttcctgggctg

SEQ ID NO: 196125 - DNA, 25 bp, Artificial
  Probe
acgaatgtaagttcctgggctgctg

SEQ ID NO: 196126 - DNA, 25 bp, Artificial
  Probe
cctgggctgctgtcttttactgctg

SEQ ID NO: 196127 - DNA, 25 bp, Artificial
  Probe
gggctgctgtcttttactgctgtgg

SEQ ID NO: 196128 - DNA, 25 bp, Artificial
  Probe
cacactgcatcgatccagtcgacag

SEQ ID NO: 196129 - DNA, 25 bp, Artificial
  Probe
acaggcgagtcacaggatagcggac

SEQ ID NO: 196130 - DNA, 25 bp, Artificial
  Probe
ggattccacactgcatcgatccagt

SEQ ID NO: 196131 - DNA, 25 bp, Artificial
  Probe
tttgaagtcagcaaaaccagaaatc

SEQ ID NO: 196132 - DNA, 25 bp, Artificial
  Probe
cggaccctggcgacaacgaatgtaa

SEQ ID NO: 196133 - DNA, 25 bp, Artificial
  Probe
cttatgctgctggaagcttaaagag

SEQ ID NO: 196134 - DNA, 25 bp, Artificial
  Probe
gatagcggaccctggcgacaacgaa

SEQ ID NO: 196135 - DNA, 25 bp, Artificial
  Probe
ttcctgggctgctgtcttttactgc

SEQ ID NO: 196136 - DNA, 25 bp, Artificial
  Probe
gcgagtcacaggatagcggaccctg

SEQ ID NO: 196137 - DNA, 25 bp, Artificial
  Probe
gtcgacaggcgagtcacaggatagc

SEQ ID NO: 196138 - DNA, 25 bp, Artificial
  Probe
aatgtaagttcctgggctgctgtct

SEQ ID NO: 196139 - DNA, 25 bp, Artificial
  Probe
agaagttcagaagcagcctttctgt

SEQ ID NO: 196140 - DNA, 25 bp, Artificial
  Probe
actcctagaatagtgctttgccctt

SEQ ID NO: 196141 - DNA, 25 bp, Artificial
  Probe
gaggcatctctactgttctgttagc

SEQ ID NO: 196142 - DNA, 25 bp, Artificial
  Probe
actgtagcgctgtgtcaccacatga

SEQ ID NO: 196143 - DNA, 25 bp, Artificial
  Probe
ctgctttcaacttaaatcactgagg

SEQ ID NO: 196144 - DNA, 25 bp, Artificial
  Probe
atccaattatgtgacaacctttgtg

SEQ ID NO: 196145 - DNA, 25 bp, Artificial
  Probe
tactgttctgttagcatcaggactg

SEQ ID NO: 196146 - DNA, 25 bp, Artificial
  Probe
caccacatgagaagttcagaagcag

SEQ ID NO: 196147 - DNA, 25 bp, Artificial
  Probe
gtgctttgcccttatcaatgaactg

SEQ ID NO: 196148 - DNA, 25 bp, Artificial
  Probe
ctgaggcatctctactgttctgtta

SEQ ID NO: 196149 - DNA, 25 bp, Artificial
  Probe
gtatccaattatgtgacaacctttg

SEQ ID NO: 196150 - DNA, 25 bp, Artificial
  Probe
ggtgcaagagccagtgtcctgcttt

SEQ ID NO: 196151 - DNA, 25 bp, Artificial
  Probe
gtagcgctgtgtcaccacatgagaa

SEQ ID NO: 196152 - DNA, 25 bp, Artificial
  Probe
gttctaactcctagaatagtgcttt

SEQ ID NO: 196153 - DNA, 25 bp, Artificial
  Probe
cactgaggcatctctactgttctgt

SEQ ID NO: 196154 - DNA, 25 bp, Artificial
  Probe
gactgtagcgctgtgtcaccacatg

SEQ ID NO: 196155 - DNA, 25 bp, Artificial
  Probe
ttctgttagcatcaggactgtagcg

SEQ ID NO: 196156 - DNA, 25 bp, Artificial
  Probe
aagttcagaagcagcctttctgtgg

SEQ ID NO: 196157 - DNA, 25 bp, Artificial
  Probe
ggactgtagcgctgtgtcaccacat

SEQ ID NO: 196158 - DNA, 25 bp, Artificial
  Probe
tgctgggtgcaagagccagtgtcct

SEQ ID NO: 196159 - DNA, 25 bp, Artificial
  Probe
ctagaatagtgctttgcccttatca

SEQ ID NO: 196160 - DNA, 25 bp, Artificial
  Probe
cctgatgctgggtgcaagagccagt

SEQ ID NO: 196161 - DNA, 25 bp, Artificial
  Probe
gagccagtgtcctgctttcaactta

SEQ ID NO: 196162 - DNA, 25 bp, Artificial
  Probe
catttgtacattcctgatgctgggt

SEQ ID NO: 196163 - DNA, 25 bp, Artificial
  Probe
gtgcaagagccagtgtcctgctttc

SEQ ID NO: 196164 - DNA, 25 bp, Artificial
  Probe
agcgctgtgtcaccacatgagaagt

SEQ ID NO: 196165 - DNA, 25 bp, Artificial
  Probe
gcaagagccagtgtcctgctttcaa

SEQ ID NO: 196166 - DNA, 25 bp, Artificial
  Probe
tgtcaccacatgagaagttcagaag

SEQ ID NO: 196167 - DNA, 25 bp, Artificial
  Probe
catcaggactgtagcgctgtgtcac

SEQ ID NO: 196168 - DNA, 25 bp, Artificial
  Probe
aatcactgaggcatctctactgttc

SEQ ID NO: 196169 - DNA, 25 bp, Artificial
  Probe
aagacatttgtacattcctgatgct

SEQ ID NO: 196170 - DNA, 25 bp, Artificial
  Probe
cattcctgatgctgggtgcaagagc

SEQ ID NO: 196171 - DNA, 25 bp, Artificial
  Probe
ctcctagaatagtgctttgccctta

SEQ ID NO: 196172 - DNA, 25 bp, Artificial
  Probe
gctttcaacttaaatcactgaggca

SEQ ID NO: 196173 - DNA, 25 bp, Artificial
  Probe
agtgctttgcccttatcaatgaact

SEQ ID NO: 196174 - DNA, 25 bp, Artificial
  Probe
agaagtatccaattatgtgacaacc

SEQ ID NO: 196175 - DNA, 25 bp, Artificial
  Probe
gtggcatgttctaactcctagaata

SEQ ID NO: 196176 - DNA, 25 bp, Artificial
  Probe
ttagcatcaggactgtagcgctgtg

SEQ ID NO: 196177 - DNA, 25 bp, Artificial
  Probe
tcctagaatagtgctttgcccttat

SEQ ID NO: 196178 - DNA, 25 bp, Artificial
  Probe
atgttctaactcctagaatagtgct

SEQ ID NO: 196179 - DNA, 25 bp, Artificial
  Probe
gccagtgtcctgctttcaacttaaa

SEQ ID NO: 196180 - DNA, 25 bp, Artificial
  Probe
atgctgggtgcaagagccagtgtcc

SEQ ID NO: 196181 - DNA, 25 bp, Artificial
  Probe
tgtacattcctgatgctgggtgcaa

SEQ ID NO: 196182 - DNA, 25 bp, Artificial
  Probe
atctctactgttctgttagcatcag

SEQ ID NO: 196183 - DNA, 25 bp, Artificial
  Probe
ggcatctctactgttctgttagcat

SEQ ID NO: 196184 - DNA, 25 bp, Artificial
  Probe
gcatctctactgttctgttagcatc

SEQ ID NO: 196185 - DNA, 25 bp, Artificial
  Probe
caatgaggccatctatgacatctgt

SEQ ID NO: 196186 - DNA, 25 bp, Artificial
  Probe
tcaccaatgcctgctttgagccagc

SEQ ID NO: 196187 - DNA, 25 bp, Artificial
  Probe
cactaacttaaacaggttgataggt

SEQ ID NO: 196188 - DNA, 25 bp, Artificial
  Probe
agcctaccatgaacagctttctgta

SEQ ID NO: 196189 - DNA, 25 bp, Artificial
  Probe
gctgagaaagcctaccatgaacagc

SEQ ID NO: 196190 - DNA, 25 bp, Artificial
  Probe
ctaacttaaacaggttgataggtca

SEQ ID NO: 196191 - DNA, 25 bp, Artificial
  Probe
ctgtcatctctgctgagaaagccta

SEQ ID NO: 196192 - DNA, 25 bp, Artificial
  Probe
gaacagctttctgtagcagagatca

SEQ ID NO: 196193 - DNA, 25 bp, Artificial
  Probe
tatgcccctgtcatctctgctgaga

SEQ ID NO: 196194 - DNA, 25 bp, Artificial
  Probe
tctgattgtgccttcatggtagaca

SEQ ID NO: 196195 - DNA, 25 bp, Artificial
  Probe
cttcatggtagacaatgaggccatc

SEQ ID NO: 196196 - DNA, 25 bp, Artificial
  Probe
atgcctgctttgagccagccaacca

SEQ ID NO: 196197 - DNA, 25 bp, Artificial
  Probe
ccctggagcactctgattgtgcctt

SEQ ID NO: 196198 - DNA, 25 bp, Artificial
  Probe
ttgatggggccctgaatgttgatct

SEQ ID NO: 196199 - DNA, 25 bp, Artificial
  Probe
agagatcaccaatgcctgctttgag

SEQ ID NO: 196200 - DNA, 25 bp, Artificial
  Probe
accaatgcctgctttgagccagcca

SEQ ID NO: 196201 - DNA, 25 bp, Artificial
  Probe
tgatctgacagaattccagaccaac

SEQ ID NO: 196202 - DNA, 25 bp, Artificial
  Probe
aattccagaccaacctggtgcccta

SEQ ID NO: 196203 - DNA, 25 bp, Artificial
  Probe
tcactgcttccctcagatttgatgg

SEQ ID NO: 196204 - DNA, 25 bp, Artificial
  Probe
tctatgacatctgtcgtagaaacct

SEQ ID NO: 196205 - DNA, 25 bp, Artificial
  Probe
gaaacctcgacattgagcgcccaac

SEQ ID NO: 196206 - DNA, 25 bp, Artificial
  Probe
ctctgctgagaaagcctaccatgaa

SEQ ID NO: 196207 - DNA, 25 bp, Artificial
  Probe
tctgtagcagagatcaccaatgcct

SEQ ID NO: 196208 - DNA, 25 bp, Artificial
  Probe
aatgttgatctgacagaattccaga

SEQ ID NO: 196209 - DNA, 25 bp, Artificial
  Probe
tcgtagaaacctcgacattgagcgc

SEQ ID NO: 196210 - DNA, 25 bp, Artificial
  Probe
gatctgacagaattccagaccaacc

SEQ ID NO: 196211 - DNA, 25 bp, Artificial
  Probe
gtcgtagaaacctcgacattgagcg

SEQ ID NO: 196212 - DNA, 25 bp, Artificial
  Probe
attgtgccttcatggtagacaatga

SEQ ID NO: 196213 - DNA, 25 bp, Artificial
  Probe
tacactaacttaaacaggttgatag

SEQ ID NO: 196214 - DNA, 25 bp, Artificial
  Probe
tgagaaagcctaccatgaacagctt

SEQ ID NO: 196215 - DNA, 25 bp, Artificial
  Probe
gcactctgattgtgccttcatggta

SEQ ID NO: 196216 - DNA, 25 bp, Artificial
  Probe
tctgacagaattccagaccaacctg

SEQ ID NO: 196217 - DNA, 25 bp, Artificial
  Probe
gagaaagcctaccatgaacagcttt

SEQ ID NO: 196218 - DNA, 25 bp, Artificial
  Probe
cctgaatgttgatctgacagaattc

SEQ ID NO: 196219 - DNA, 25 bp, Artificial
  Probe
tagaaacctcgacattgagcgccca

SEQ ID NO: 196220 - DNA, 25 bp, Artificial
  Probe
ctgaatgttgatctgacagaattcc

SEQ ID NO: 196221 - DNA, 25 bp, Artificial
  Probe
ctgtcgtagaaacctcgacattgag

SEQ ID NO: 196222 - DNA, 25 bp, Artificial
  Probe
taccatgaacagctttctgtagcag

SEQ ID NO: 196223 - DNA, 25 bp, Artificial
  Probe
cctcagatttgatggggccctgaat

SEQ ID NO: 196224 - DNA, 25 bp, Artificial
  Probe
atggggccctgaatgttgatctgac

SEQ ID NO: 196225 - DNA, 25 bp, Artificial
  Probe
acttatgcccctgtcatctctgctg

SEQ ID NO: 196226 - DNA, 25 bp, Artificial
  Probe
atctgtcgtagaaacctcgacattg

SEQ ID NO: 196227 - DNA, 25 bp, Artificial
  Probe
aggtcaaattgtgtcttccatcact

SEQ ID NO: 196228 - DNA, 25 bp, Artificial
  Probe
gaaagcctaccatgaacagctttct

SEQ ID NO: 196229 - DNA, 25 bp, Artificial
  Probe
aggccatctatgacatctgtcgtag

SEQ ID NO: 196230 - DNA, 25 bp, Artificial
  Probe
gtcaaattgtgtcttccatcactgc

SEQ ID NO: 196231 - DNA, 25 bp, Artificial
  Probe
tccagagaccagaaatttgaatctg

SEQ ID NO: 196232 - DNA, 25 bp, Artificial
  Probe
tgtggggcttcatacgcacaggtga

SEQ ID NO: 196233 - DNA, 25 bp, Artificial
  Probe
ccctccgaggctttgaccagcaaat

SEQ ID NO: 196234 - DNA, 25 bp, Artificial
  Probe
atctccaagcgctctggcctggatc

SEQ ID NO: 196235 - DNA, 25 bp, Artificial
  Probe
tctggagaaggctggcgttaatacc

SEQ ID NO: 196236 - DNA, 25 bp, Artificial
  Probe
aagtcacacaaggatttgctcttgg

SEQ ID NO: 196237 - DNA, 25 bp, Artificial
  Probe
aactcccgactaaccaactgcaggt

SEQ ID NO: 196238 - DNA, 25 bp, Artificial
  Probe
ttccttggccccaacgctggagaag

SEQ ID NO: 196239 - DNA, 25 bp, Artificial
  Probe
gtggttaagctgcacatctccaagc

SEQ ID NO: 196240 - DNA, 25 bp, Artificial
  Probe
tattgtcatgggagccactgtgcca

SEQ ID NO: 196241 - DNA, 25 bp, Artificial
  Probe
cacccggttcctgaaaggctgtgtc

SEQ ID NO: 196242 - DNA, 25 bp, Artificial
  Probe
ggcctgagctgacacccacagctat

SEQ ID NO: 196243 - DNA, 25 bp, Artificial
  Probe
ctttacaccactggagtatggctgt

SEQ ID NO: 196244 - DNA, 25 bp, Artificial
  Probe
cggctgctgaggttaagttaccatc

SEQ ID NO: 196245 - DNA, 25 bp, Artificial
  Probe
gaggacgtgggcacctttgacactg

SEQ ID NO: 196246 - DNA, 25 bp, Artificial
  Probe
cacaactgtctttacaccactggag

SEQ ID NO: 196247 - DNA, 25 bp, Artificial
  Probe
acatctatgccattggagatgttgc

SEQ ID NO: 196248 - DNA, 25 bp, Artificial
  Probe
aggtgatgcagacagtagggatcca

SEQ ID NO: 196249 - DNA, 25 bp, Artificial
  Probe
ctggctgaaggagtcccctgggaaa

SEQ ID NO: 196250 - DNA, 25 bp, Artificial
  Probe
aggatctcgcttctggcaaggagga

SEQ ID NO: 196251 - DNA, 25 bp, Artificial
  Probe
agatggtatgcatgagggagccccc

SEQ ID NO: 196252 - DNA, 25 bp, Artificial
  Probe
ccaacgctggagaagtcacacaagg

SEQ ID NO: 196253 - DNA, 25 bp, Artificial
  Probe
tggccctggagtgtgccggcttcct

SEQ ID NO: 196254 - DNA, 25 bp, Artificial
  Probe
tggttggagccagttatgtggccct

SEQ ID NO: 196255 - DNA, 25 bp, Artificial
  Probe
aagatggtatgcatgagggagcccc

SEQ ID NO: 196256 - DNA, 25 bp, Artificial
  Probe
agccttcacacactgccagtgtcag

SEQ ID NO: 196257 - DNA, 25 bp, Artificial
  Probe
aagatcattgtggatgcccaggagg

SEQ ID NO: 196258 - DNA, 25 bp, Artificial
  Probe
cggccaggagcatatagaggtttac

SEQ ID NO: 196259 - DNA, 25 bp, Artificial
  Probe
atagaggtttaccatgcatattaca

SEQ ID NO: 196260 - DNA, 25 bp, Artificial
  Probe
atctatgccattggagatgttgctg

SEQ ID NO: 196261 - DNA, 25 bp, Artificial
  Probe
acagtgctacataaagatggtatgc

SEQ ID NO: 196262 - DNA, 25 bp, Artificial
  Probe
ccacaactggtactgggcctgcact

SEQ ID NO: 196263 - DNA, 25 bp, Artificial
  Probe
tgtgtgtcctgcagggatgactgcc

SEQ ID NO: 196264 - DNA, 25 bp, Artificial
  Probe
tggatgcccaggaggccacctctgt

SEQ ID NO: 196265 - DNA, 25 bp, Artificial
  Probe
atgacggcctgtgcagaaaccccca

SEQ ID NO: 196266 - DNA, 25 bp, Artificial
  Probe
ccacggtcatgatgcgcagcgtgcc

SEQ ID NO: 196267 - DNA, 25 bp, Artificial
  Probe
gggaaatcctcaaccttaatgaatt

SEQ ID NO: 196268 - DNA, 25 bp, Artificial
  Probe
ccccacgtgggctgccaggtttgaa

SEQ ID NO: 196269 - DNA, 25 bp, Artificial
  Probe
gtactgggcctgcacttccttggcc

SEQ ID NO: 196270 - DNA, 25 bp, Artificial
  Probe
aaccctaagaatcagaagatcattg

SEQ ID NO: 196271 - DNA, 25 bp, Artificial
  Probe
ggtttgaacccctggcatttctgga

SEQ ID NO: 196272 - DNA, 25 bp, Artificial
  Probe
gctgtggctctccacggccaggagc

SEQ ID NO: 196273 - DNA, 25 bp, Artificial
  Probe
tggcgttaataccaaccctaagaat

SEQ ID NO: 196274 - DNA, 25 bp, Artificial
  Probe
ttggagccagttatgtggccctgga

SEQ ID NO: 196275 - DNA, 25 bp, Artificial
  Probe
aggatttgctcttgggatccagtgt

SEQ ID NO: 196276 - DNA, 25 bp, Artificial
  Probe
ctcgcagagatctgagaagatgtgg

SEQ ID NO: 196277 - DNA, 25 bp, Artificial
  Probe
ccctacggaagtagaagtgatggat

SEQ ID NO: 196278 - DNA, 25 bp, Artificial
  Probe
cgtgattaaaatcatctctagagtg

SEQ ID NO: 196279 - DNA, 25 bp, Artificial
  Probe
acgcattcagaggagaagagcagcg

SEQ ID NO: 196280 - DNA, 25 bp, Artificial
  Probe
gcagcccagcctccttgtgtgcaag

SEQ ID NO: 196281 - DNA, 25 bp, Artificial
  Probe
tgccctcctgtcaagcgcgagcgga

SEQ ID NO: 196282 - DNA, 25 bp, Artificial
  Probe
tattgccctcctgtcaagcgcgagc

SEQ ID NO: 196283 - DNA, 25 bp, Artificial
  Probe
tatatgctgtctcgtgattaaaatc

SEQ ID NO: 196284 - DNA, 25 bp, Artificial
  Probe
acggtcaaatgcacccattacagcc

SEQ ID NO: 196285 - DNA, 25 bp, Artificial
  Probe
cggcgggacggtcaaatgcacccat

SEQ ID NO: 196286 - DNA, 25 bp, Artificial
  Probe
ggaaaaccatacaacgtcacaagtg

SEQ ID NO: 196287 - DNA, 25 bp, Artificial
  Probe
agcctggggagttacttacatgttt

SEQ ID NO: 196288 - DNA, 25 bp, Artificial
  Probe
acggcgggacggtcaaatgcaccca

SEQ ID NO: 196289 - DNA, 25 bp, Artificial
  Probe
aagagcagcggcttccggctgaagc

SEQ ID NO: 196290 - DNA, 25 bp, Artificial
  Probe
gatggaaactattgccctcctgtca

SEQ ID NO: 196291 - DNA, 25 bp, Artificial
  Probe
catgtttatatgctgtctcgtgatt

SEQ ID NO: 196292 - DNA, 25 bp, Artificial
  Probe
agactctgatcatgaggatggaaac

SEQ ID NO: 196293 - DNA, 25 bp, Artificial
  Probe
tgctggcagttccagtccggaagcc

SEQ ID NO: 196294 - DNA, 25 bp, Artificial
  Probe
aagcgcgagcggacatcatctctaa

SEQ ID NO: 196295 - DNA, 25 bp, Artificial
  Probe
gattaaaatcatctctagagtgacc

SEQ ID NO: 196296 - DNA, 25 bp, Artificial
  Probe
actggacacagacagagcctgggga

SEQ ID NO: 196297 - DNA, 25 bp, Artificial
  Probe
tgcaagaactgtcagggagatctgc

SEQ ID NO: 196298 - DNA, 25 bp, Artificial
  Probe
acagacagagcctggggagttactt

SEQ ID NO: 196299 - DNA, 25 bp, Artificial
  Probe
ctgtcaagcgcgagcggacatcatc

SEQ ID NO: 196300 - DNA, 25 bp, Artificial
  Probe
cagcccctacggaagtagaagtgat

SEQ ID NO: 196301 - DNA, 25 bp, Artificial
  Probe
catctctaacgcattcagaggagaa

SEQ ID NO: 196302 - DNA, 25 bp, Artificial
  Probe
ctctgatcatgaggatggaaactat

SEQ ID NO: 196303 - DNA, 25 bp, Artificial
  Probe
aaccatacaacgtcacaagtgactg

SEQ ID NO: 196304 - DNA, 25 bp, Artificial
  Probe
acatcatctctaacgcattcagagg

SEQ ID NO: 196305 - DNA, 25 bp, Artificial
  Probe
tccggaagccggagaagactctgat

SEQ ID NO: 196306 - DNA, 25 bp, Artificial
  Probe
ttccagtccggaagccggagaagac

SEQ ID NO: 196307 - DNA, 25 bp, Artificial
  Probe
gttccagtccggaagccggagaaga

SEQ ID NO: 196308 - DNA, 25 bp, Artificial
  Probe
ctgctgctttttcaaacgaaggaaa

SEQ ID NO: 196309 - DNA, 25 bp, Artificial
  Probe
ccccacggcgggacggtcaaatgca

SEQ ID NO: 196310 - DNA, 25 bp, Artificial
  Probe
agatctgctggcagttccagtccgg

SEQ ID NO: 196311 - DNA, 25 bp, Artificial
  Probe
aaactattgccctcctgtcaagcgc

SEQ ID NO: 196312 - DNA, 25 bp, Artificial
  Probe
cggagaagactctgatcatgaggat

SEQ ID NO: 196313 - DNA, 25 bp, Artificial
  Probe
gttacttacatgtttatatgctgtc

SEQ ID NO: 196314 - DNA, 25 bp, Artificial
  Probe
aggaaaaccatacaacgtcacaagt

SEQ ID NO: 196315 - DNA, 25 bp, Artificial
  Probe
ggacggtcaaatgcacccattacag

SEQ ID NO: 196316 - DNA, 25 bp, Artificial
  Probe
gaactgtcagggagatctgctggca

SEQ ID NO: 196317 - DNA, 25 bp, Artificial
  Probe
gtcagggagatctgctggcagttcc

SEQ ID NO: 196318 - DNA, 25 bp, Artificial
  Probe
ttctacaaatggagagctaaacacg

SEQ ID NO: 196319 - DNA, 25 bp, Artificial
  Probe
cattacagcccctacggaagtagaa

SEQ ID NO: 196320 - DNA, 25 bp, Artificial
  Probe
gctgctttttcaaacgaaggaaaag

SEQ ID NO: 196321 - DNA, 25 bp, Artificial
  Probe
cagagcctggggagttacttacatg

SEQ ID NO: 196322 - DNA, 25 bp, Artificial
  Probe
gctgtctcgtgattaaaatcatctc

SEQ ID NO: 196323 - DNA, 25 bp, Artificial
  Probe
ctaccaagaccctggaagtcacagt

SEQ ID NO: 196324 - DNA, 25 bp, Artificial
  Probe
acttcataggtggtgtgtctctggg

SEQ ID NO: 196325 - DNA, 25 bp, Artificial
  Probe
gttcgctgtgctcacctggctgcaa

SEQ ID NO: 196326 - DNA, 25 bp, Artificial
  Probe
ctggctaccaagaccctggaagtca

SEQ ID NO: 196327 - DNA, 25 bp, Artificial
  Probe
actgtctacatcagccggacacagc

SEQ ID NO: 196328 - DNA, 25 bp, Artificial
  Probe
ttgtgagtttctgtgaccgtgggtc

SEQ ID NO: 196329 - DNA, 25 bp, Artificial
  Probe
tggcataccctgaccagcgagctgc

SEQ ID NO: 196330 - DNA, 25 bp, Artificial
  Probe
ataagaaatccaagcataagacgtg

SEQ ID NO: 196331 - DNA, 25 bp, Artificial
  Probe
ttgccgttggcctgaacagactgca

SEQ ID NO: 196332 - DNA, 25 bp, Artificial
  Probe
ccaatgacttcataggtggtgtgtc

SEQ ID NO: 196333 - DNA, 25 bp, Artificial
  Probe
agaagaagacgctgaacccggaatt

SEQ ID NO: 196334 - DNA, 25 bp, Artificial
  Probe
ggtgggcattgttcgctgtgctcac

SEQ ID NO: 196335 - DNA, 25 bp, Artificial
  Probe
cagccggacacagcagtggagcgct

SEQ ID NO: 196336 - DNA, 25 bp, Artificial
  Probe
gcagtggagcgctggcataccctga

SEQ ID NO: 196337 - DNA, 25 bp, Artificial
  Probe
ggagagactgtctacatcagccgga

SEQ ID NO: 196338 - DNA, 25 bp, Artificial
  Probe
cgagtgtgttgcacgtttacatggg

SEQ ID NO: 196339 - DNA, 25 bp, Artificial
  Probe
aattcttttatgagatggaactctc

SEQ ID NO: 196340 - DNA, 25 bp, Artificial
  Probe
gacacagcagtggagcgctggcata

SEQ ID NO: 196341 - DNA, 25 bp, Artificial
  Probe
tcacctggctgcaatggatgttaac

SEQ ID NO: 196342 - DNA, 25 bp, Artificial
  Probe
gatgttaacggctactctgaccctt

SEQ ID NO: 196343 - DNA, 25 bp, Artificial
  Probe
ctactctgacccttatgtgaagacg

SEQ ID NO: 196344 - DNA, 25 bp, Artificial
  Probe
tggagcgctggcataccctgaccag

SEQ ID NO: 196345 - DNA, 25 bp, Artificial
  Probe
agaccagacgtggataagaaatcca

SEQ ID NO: 196346 - DNA, 25 bp, Artificial
  Probe
gagaggcccagaaacactggagaga

SEQ ID NO: 196347 - DNA, 25 bp, Artificial
  Probe
cccaaccttcgcacgagtgtgttgc

SEQ ID NO: 196348 - DNA, 25 bp, Artificial
  Probe
ttcttttatgagatggaactctcca

SEQ ID NO: 196349 - DNA, 25 bp, Artificial
  Probe
tgagtttctgtgaccgtgggtctat

SEQ ID NO: 196350 - DNA, 25 bp, Artificial
  Probe
accaagaccctggaagtcacagtct

SEQ ID NO: 196351 - DNA, 25 bp, Artificial
  Probe
ggcattgttcgctgtgctcacctgg

SEQ ID NO: 196352 - DNA, 25 bp, Artificial
  Probe
gctggcataccctgaccagcgagct

SEQ ID NO: 196353 - DNA, 25 bp, Artificial
  Probe
tgtgaccgtgggtctatcttcttgt

SEQ ID NO: 196354 - DNA, 25 bp, Artificial
  Probe
ctgaacagactgcagctgcccagca

SEQ ID NO: 196355 - DNA, 25 bp, Artificial
  Probe
tgctcacctggctgcaatggatgtt

SEQ ID NO: 196356 - DNA, 25 bp, Artificial
  Probe
tttctgtgaccgtgggtctatcttc

SEQ ID NO: 196357 - DNA, 25 bp, Artificial
  Probe
acactggagagactgtctacatcag

SEQ ID NO: 196358 - DNA, 25 bp, Artificial
  Probe
tacatcagccggacacagcagtgga

SEQ ID NO: 196359 - DNA, 25 bp, Artificial
  Probe
gaagaagacgctgaacccggaattt

SEQ ID NO: 196360 - DNA, 25 bp, Artificial
  Probe
cagaaacactggagagactgtctac

SEQ ID NO: 196361 - DNA, 25 bp, Artificial
  Probe
acacagcagtggagcgctggcatac

SEQ ID NO: 196362 - DNA, 25 bp, Artificial
  Probe
atgagatggaactctccactctggc

SEQ ID NO: 196363 - DNA, 25 bp, Artificial
  Probe
acggctactctgacccttatgtgaa

SEQ ID NO: 196364 - DNA, 25 bp, Artificial
  Probe
gctgaacccggaatttaatgaggaa

SEQ ID NO: 196365 - DNA, 25 bp, Artificial
  Probe
ccaagcataagacgtgtgtaaagaa

SEQ ID NO: 196366 - DNA, 25 bp, Artificial
  Probe
ggaactctccactctggctaccaag

SEQ ID NO: 196367 - DNA, 25 bp, Artificial
  Probe
cactctggctaccaagaccctggaa

SEQ ID NO: 196368 - DNA, 25 bp, Artificial
  Probe
acagactgcagctgcccagcacagg

SEQ ID NO: 196369 - DNA, 25 bp, Artificial
  Probe
taacaaccccaaaggccagaacagc

SEQ ID NO: 196370 - DNA, 25 bp, Artificial
  Probe
agcctgcatttgctctaaaggtgca

SEQ ID NO: 196371 - DNA, 25 bp, Artificial
  Probe
gtgtatgctcagaccacgctgagat

SEQ ID NO: 196372 - DNA, 25 bp, Artificial
  Probe
accagagaactttcaaggtggtgat

SEQ ID NO: 196373 - DNA, 25 bp, Artificial
  Probe
ccacgctgagatacaacatgccctt

SEQ ID NO: 196374 - DNA, 25 bp, Artificial
  Probe
gctgaatacagcagcccctgcagct

SEQ ID NO: 196375 - DNA, 25 bp, Artificial
  Probe
gacagtacccctgacttgtaacaac

SEQ ID NO: 196376 - DNA, 25 bp, Artificial
  Probe
tatctgtggacaaggcattgctgga

SEQ ID NO: 196377 - DNA, 25 bp, Artificial
  Probe
accaacaacgtcctgttatatttgg

SEQ ID NO: 196378 - DNA, 25 bp, Artificial
  Probe
gaacctgcagcctgccattgtgaaa

SEQ ID NO: 196379 - DNA, 25 bp, Artificial
  Probe
gtgaccaccaacaacgtcctgttat

SEQ ID NO: 196380 - DNA, 25 bp, Artificial
  Probe
agattagagcacgtaagcagaacag

SEQ ID NO: 196381 - DNA, 25 bp, Artificial
  Probe
ctcagaccacgctgagatacaacat

SEQ ID NO: 196382 - DNA, 25 bp, Artificial
  Probe
ggtgcagacagtacccctgacttgt

SEQ ID NO: 196383 - DNA, 25 bp, Artificial
  Probe
caagacatcccagtaaagaacctgc

SEQ ID NO: 196384 - DNA, 25 bp, Artificial
  Probe
tggaatccccaaaccagagaacttt

SEQ ID NO: 196385 - DNA, 25 bp, Artificial
  Probe
agcccctgcagctcagacaaacaaa

SEQ ID NO: 196386 - DNA, 25 bp, Artificial
  Probe
agttacacggggagccgtccagcct

SEQ ID NO: 196387 - DNA, 25 bp, Artificial
  Probe
tgagatacaacatgcccttggagaa

SEQ ID NO: 196388 - DNA, 25 bp, Artificial
  Probe
ctctaaaggtgcagacagtacccct

SEQ ID NO: 196389 - DNA, 25 bp, Artificial
  Probe
ctcactagaaatcagttacacgggg

SEQ ID NO: 196390 - DNA, 25 bp, Artificial
  Probe
cgtccagcctccaacatggtgattg

SEQ ID NO: 196391 - DNA, 25 bp, Artificial
  Probe
taaagaacctgcagcctgccattgt

SEQ ID NO: 196392 - DNA, 25 bp, Artificial
  Probe
tataccgtcagtgtgtcaggggaag

SEQ ID NO: 196393 - DNA, 25 bp, Artificial
  Probe
tccagcctccaacatggtgattgct

SEQ ID NO: 196394 - DNA, 25 bp, Artificial
  Probe
attagagcacgtaagcagaacagaa

SEQ ID NO: 196395 - DNA, 25 bp, Artificial
  Probe
agaagtgaccaccaacaacgtcctg

SEQ ID NO: 196396 - DNA, 25 bp, Artificial
  Probe
atgtttgaaactcatatctgtggac

SEQ ID NO: 196397 - DNA, 25 bp, Artificial
  Probe
tggagaagcagcagcctgcatttgc

SEQ ID NO: 196398 - DNA, 25 bp, Artificial
  Probe
gcattgctggaatccccaaaccaga

SEQ ID NO: 196399 - DNA, 25 bp, Artificial
  Probe
aaggtgcagacagtacccctgactt

SEQ ID NO: 196400 - DNA, 25 bp, Artificial
  Probe
ctactatgagacagatgaagtggct

SEQ ID NO: 196401 - DNA, 25 bp, Artificial
  Probe
ggtaaccaatcagacactgtccttc

SEQ ID NO: 196402 - DNA, 25 bp, Artificial
  Probe
tgtaacaaccccaaaggccagaaca

SEQ ID NO: 196403 - DNA, 25 bp, Artificial
  Probe
tacaacatgcccttggagaagcagc

SEQ ID NO: 196404 - DNA, 25 bp, Artificial
  Probe
gctggaatccccaaaccagagaact

SEQ ID NO: 196405 - DNA, 25 bp, Artificial
  Probe
gaaatcagttacacggggagccgtc

SEQ ID NO: 196406 - DNA, 25 bp, Artificial
  Probe
aggatgtgtgtatgctcagaccacg

SEQ ID NO: 196407 - DNA, 25 bp, Artificial
  Probe
agacagtacccctgacttgtaacaa

SEQ ID NO: 196408 - DNA, 25 bp, Artificial
  Probe
tgacttgtaacaaccccaaaggcca

SEQ ID NO: 196409 - DNA, 25 bp, Artificial
  Probe
tccccaaaccagagaactttcaagg

SEQ ID NO: 196410 - DNA, 25 bp, Artificial
  Probe
tgaagtggcttttgctgaatacagc

SEQ ID NO: 196411 - DNA, 25 bp, Artificial
  Probe
agcacgtaagcagaacagaagtgac

SEQ ID NO: 196412 - DNA, 25 bp, Artificial
  Probe
ctgagatacaacatgcccttggaga

SEQ ID NO: 196413 - DNA, 25 bp, Artificial
  Probe
gtttgtctctgaaatacaaatactg

SEQ ID NO: 196414 - DNA, 25 bp, Artificial
  Probe
cctgccattgtgaaagtgtatgact

SEQ ID NO: 196415 - DNA, 25 bp, Artificial
  Probe
cagattagatattcccagggcgttt

SEQ ID NO: 196416 - DNA, 25 bp, Artificial
  Probe
agagtttacttctctatggtgctga

SEQ ID NO: 196417 - DNA, 25 bp, Artificial
  Probe
ccagggcgttttcaggagctgtaaa

SEQ ID NO: 196418 - DNA, 25 bp, Artificial
  Probe
acttactgtgatataagccaatgtg

SEQ ID NO: 196419 - DNA, 25 bp, Artificial
  Probe
ggaaccactttacctacttactgtg

SEQ ID NO: 196420 - DNA, 25 bp, Artificial
  Probe
tgtgtggtcgtgcatattgccagct

SEQ ID NO: 196421 - DNA, 25 bp, Artificial
  Probe
gaggaaccactttacctacttactg

SEQ ID NO: 196422 - DNA, 25 bp, Artificial
  Probe
tcccagggcgttttcaggagctgta

SEQ ID NO: 196423 - DNA, 25 bp, Artificial
  Probe
cactcctggcccttaggtggatttc

SEQ ID NO: 196424 - DNA, 25 bp, Artificial
  Probe
tttacttctctatggtgctgaagat

SEQ ID NO: 196425 - DNA, 25 bp, Artificial
  Probe
aagattgaaaccagggccttgcaca

SEQ ID NO: 196426 - DNA, 25 bp, Artificial
  Probe
tttgtgtggtcgtgcatattgccag

SEQ ID NO: 196427 - DNA, 25 bp, Artificial
  Probe
ttcagattagatattcccagggcgt

SEQ ID NO: 196428 - DNA, 25 bp, Artificial
  Probe
cctggcccttaggtggatttcagat

SEQ ID NO: 196429 - DNA, 25 bp, Artificial
  Probe
ttacttctctatggtgctgaagatt

SEQ ID NO: 196430 - DNA, 25 bp, Artificial
  Probe
ctcctggcccttaggtggatttcag

SEQ ID NO: 196431 - DNA, 25 bp, Artificial
  Probe
cttctctatggtgctgaagattgaa

SEQ ID NO: 196432 - DNA, 25 bp, Artificial
  Probe
tggtcgtgcatattgccagctgtgg

SEQ ID NO: 196433 - DNA, 25 bp, Artificial
  Probe
cggctgcactcctggcccttaggtg

SEQ ID NO: 196434 - DNA, 25 bp, Artificial
  Probe
attcccagggcgttttcaggagctg

SEQ ID NO: 196435 - DNA, 25 bp, Artificial
  Probe
tcagattagatattcccagggcgtt

SEQ ID NO: 196436 - DNA, 25 bp, Artificial
  Probe
tgtggtcgtgcatattgccagctgt

SEQ ID NO: 196437 - DNA, 25 bp, Artificial
  Probe
cccagggcgttttcaggagctgtaa

SEQ ID NO: 196438 - DNA, 25 bp, Artificial
  Probe
tctctatggtgctgaagattgaaac

SEQ ID NO: 196439 - DNA, 25 bp, Artificial
  Probe
gtttacttctctatggtgctgaaga

SEQ ID NO: 196440 - DNA, 25 bp, Artificial
  Probe
ctgtcccctgaaatattactaaggg

SEQ ID NO: 196441 - DNA, 25 bp, Artificial
  Probe
tcctggcccttaggtggatttcaga

SEQ ID NO: 196442 - DNA, 25 bp, Artificial
  Probe
tgtcccctgaaatattactaagggc

SEQ ID NO: 196443 - DNA, 25 bp, Artificial
  Probe
tggcccttaggtggatttcagatta

SEQ ID NO: 196444 - DNA, 25 bp, Artificial
  Probe
ggcccttaggtggatttcagattag

SEQ ID NO: 196445 - DNA, 25 bp, Artificial
  Probe
ttagatattcccagggcgttttcag

SEQ ID NO: 196446 - DNA, 25 bp, Artificial
  Probe
gagtttacttctctatggtgctgaa

SEQ ID NO: 196447 - DNA, 25 bp, Artificial
  Probe
tcccctgaaatattactaagggcaa

SEQ ID NO: 196448 - DNA, 25 bp, Artificial
  Probe
ttagagtttacttctctatggtgct

SEQ ID NO: 196449 - DNA, 25 bp, Artificial
  Probe
cagggcgttttcaggagctgtaaat

SEQ ID NO: 196450 - DNA, 25 bp, Artificial
  Probe
cccttaggtggatttcagattagat

SEQ ID NO: 196451 - DNA, 25 bp, Artificial
  Probe
ctgtttgtgtggtcgtgcatattgc

SEQ ID NO: 196452 - DNA, 25 bp, Artificial
  Probe
actgtcccctgaaatattactaagg

SEQ ID NO: 196453 - DNA, 25 bp, Artificial
  Probe
tctatggtgctgaagattgaaacca

SEQ ID NO: 196454 - DNA, 25 bp, Artificial
  Probe
tttagagtttacttctctatggtgc

SEQ ID NO: 196455 - DNA, 25 bp, Artificial
  Probe
acttctctatggtgctgaagattga

SEQ ID NO: 196456 - DNA, 25 bp, Artificial
  Probe
tgtttgtgtggtcgtgcatattgcc

SEQ ID NO: 196457 - DNA, 25 bp, Artificial
  Probe
ttcccagggcgttttcaggagctgt

SEQ ID NO: 196458 - DNA, 25 bp, Artificial
  Probe
ttgtgtggtcgtgcatattgccagc

SEQ ID NO: 196459 - DNA, 25 bp, Artificial
  Probe
ggtcgtgcatattgccagctgtggt

SEQ ID NO: 196460 - DNA, 25 bp, Artificial
  Probe
ctctatggtgctgaagattgaaacc

SEQ ID NO: 196461 - DNA, 25 bp, Artificial
  Probe
atataaaaccatgcaaagttagtgc

SEQ ID NO: 196462 - DNA, 25 bp, Artificial
  Probe
taggagcccagtctcctagcttcct

SEQ ID NO: 196463 - DNA, 25 bp, Artificial
  Probe
cttgctttggccatagggtctttaa

SEQ ID NO: 196464 - DNA, 25 bp, Artificial
  Probe
gtcaggctgtctaggcactcttgga

SEQ ID NO: 196465 - DNA, 25 bp, Artificial
  Probe
tggccatagggtctttaaatacttt

SEQ ID NO: 196466 - DNA, 25 bp, Artificial
  Probe
tgctttggccatagggtctttaaat

SEQ ID NO: 196467 - DNA, 25 bp, Artificial
  Probe
tctgataataggagcccagtctcct

SEQ ID NO: 196468 - DNA, 25 bp, Artificial
  Probe
ttggccatagggtctttaaatactt

SEQ ID NO: 196469 - DNA, 25 bp, Artificial
  Probe
tcctcagtagccactgtctttgctc

SEQ ID NO: 196470 - DNA, 25 bp, Artificial
  Probe
ttctgcaaatactgcctagtattag

SEQ ID NO: 196471 - DNA, 25 bp, Artificial
  Probe
tcaaaaccttgctttggccataggg

SEQ ID NO: 196472 - DNA, 25 bp, Artificial
  Probe
atactgcctagtattagccatacag

SEQ ID NO: 196473 - DNA, 25 bp, Artificial
  Probe
tgtgtttctgataataggagcccag

SEQ ID NO: 196474 - DNA, 25 bp, Artificial
  Probe
ctagtattagccatacagactgtgt

SEQ ID NO: 196475 - DNA, 25 bp, Artificial
  Probe
cctttagatcaaaaccttgctttgg

SEQ ID NO: 196476 - DNA, 25 bp, Artificial
  Probe
atccacttgaactttgttattgatg

SEQ ID NO: 196477 - DNA, 25 bp, Artificial
  Probe
aacaggcagataccaacagtctctt

SEQ ID NO: 196478 - DNA, 25 bp, Artificial
  Probe
tataaaaccatgcaaagttagtgca

SEQ ID NO: 196479 - DNA, 25 bp, Artificial
  Probe
ggctgtctaggcactcttggacaag

SEQ ID NO: 196480 - DNA, 25 bp, Artificial
  Probe
cagtctcctagcttcctgacatttg

SEQ ID NO: 196481 - DNA, 25 bp, Artificial
  Probe
gacatttgtgcaaggcccctagtta

SEQ ID NO: 196482 - DNA, 25 bp, Artificial
  Probe
cttgaactttgttattgatgccgag

SEQ ID NO: 196483 - DNA, 25 bp, Artificial
  Probe
gctgggagtcacagcccttgggcat

SEQ ID NO: 196484 - DNA, 25 bp, Artificial
  Probe
gcaaggcccctagttaaatcccact

SEQ ID NO: 196485 - DNA, 25 bp, Artificial
  Probe
aatactttcaaagcttgatctgctg

SEQ ID NO: 196486 - DNA, 25 bp, Artificial
  Probe
agtcacagcccttgggcatctttgc

SEQ ID NO: 196487 - DNA, 25 bp, Artificial
  Probe
ctttgttattgatgccgagtcctct

SEQ ID NO: 196488 - DNA, 25 bp, Artificial
  Probe
ggtctttaaatactttcaaagcttg

SEQ ID NO: 196489 - DNA, 25 bp, Artificial
  Probe
ataggagcccagtctcctagcttcc

SEQ ID NO: 196490 - DNA, 25 bp, Artificial
  Probe
ggcatctttgctaatccacttgaac

SEQ ID NO: 196491 - DNA, 25 bp, Artificial
  Probe
ttattgatgccgagtcctctctctt

SEQ ID NO: 196492 - DNA, 25 bp, Artificial
  Probe
gaaacaggcagataccaacagtctc

SEQ ID NO: 196493 - DNA, 25 bp, Artificial
  Probe
gccactgtctttgctcattgctttt

SEQ ID NO: 196494 - DNA, 25 bp, Artificial
  Probe
cagcccttgggcatctttgctaatc

SEQ ID NO: 196495 - DNA, 25 bp, Artificial
  Probe
ttgatgccgagtcctctctcttcct

SEQ ID NO: 196496 - DNA, 25 bp, Artificial
  Probe
aaaccatgcaaagttagtgcatagt

SEQ ID NO: 196497 - DNA, 25 bp, Artificial
  Probe
cactcttggacaagaagattcagaa

SEQ ID NO: 196498 - DNA, 25 bp, Artificial
  Probe
gataccaacagtctcttaaaaggaa

SEQ ID NO: 196499 - DNA, 25 bp, Artificial
  Probe
gaactttgttattgatgccgagtcc

SEQ ID NO: 196500 - DNA, 25 bp, Artificial
  Probe
tttctgataataggagcccagtctc

SEQ ID NO: 196501 - DNA, 25 bp, Artificial
  Probe
gtgcaaggcccctagttaaatccca

SEQ ID NO: 196502 - DNA, 25 bp, Artificial
  Probe
catacagactgtgtttctgataata

SEQ ID NO: 196503 - DNA, 25 bp, Artificial
  Probe
ctgcctagtattagccatacagact

SEQ ID NO: 196504 - DNA, 25 bp, Artificial
  Probe
gcaaatactgcctagtattagccat

SEQ ID NO: 196505 - DNA, 25 bp, Artificial
  Probe
gagtcacagcccttgggcatctttg

SEQ ID NO: 196506 - DNA, 25 bp, Artificial
  Probe
gactgtgtttctgataataggagcc

SEQ ID NO: 196507 - DNA, 25 bp, Artificial
  Probe
catgctgggagtgagctgcccacac

SEQ ID NO: 196508 - DNA, 25 bp, Artificial
  Probe
gtagaagctgtgtattcctgcctca

SEQ ID NO: 196509 - DNA, 25 bp, Artificial
  Probe
tcctgggacagtacagagtcctcag

SEQ ID NO: 196510 - DNA, 25 bp, Artificial
  Probe
tcattgccatgctgggagtgagctg

SEQ ID NO: 196511 - DNA, 25 bp, Artificial
  Probe
aacagtggcatgttgcataccaatg

SEQ ID NO: 196512 - DNA, 25 bp, Artificial
  Probe
ctccttcctgggacagtacagagtc

SEQ ID NO: 196513 - DNA, 25 bp, Artificial
  Probe
agccagtgcccgactgcagttcagt

SEQ ID NO: 196514 - DNA, 25 bp, Artificial
  Probe
ctgttaacagccagtgcccgactgc

SEQ ID NO: 196515 - DNA, 25 bp, Artificial
  Probe
caggccttttggagtagaagctgtg

SEQ ID NO: 196516 - DNA, 25 bp, Artificial
  Probe
gtcttgttagcctggtctgtctcca

SEQ ID NO: 196517 - DNA, 25 bp, Artificial
  Probe
gctgtgtattcctgcctcaaagcct

SEQ ID NO: 196518 - DNA, 25 bp, Artificial
  Probe
ggctgtcgctctgttaacagccagt

SEQ ID NO: 196519 - DNA, 25 bp, Artificial
  Probe
ttttccaggccttttggagtagaag

SEQ ID NO: 196520 - DNA, 25 bp, Artificial
  Probe
ataaccaggatctccccaagaagtc

SEQ ID NO: 196521 - DNA, 25 bp, Artificial
  Probe
tctctgccaaccaggtacataccag

SEQ ID NO: 196522 - DNA, 25 bp, Artificial
  Probe
cagcatcttctctgccaaccaggta

SEQ ID NO: 196523 - DNA, 25 bp, Artificial
  Probe
ttctcatctggcagtgctccaggac

SEQ ID NO: 196524 - DNA, 25 bp, Artificial
  Probe
ttgccatttgggaggcctgggtaca

SEQ ID NO: 196525 - DNA, 25 bp, Artificial
  Probe
tacataccagacagcggctgtcgct

SEQ ID NO: 196526 - DNA, 25 bp, Artificial
  Probe
aggacgtttgccatttgggaggcct

SEQ ID NO: 196527 - DNA, 25 bp, Artificial
  Probe
cttagcagtacttggaatagtcatt

SEQ ID NO: 196528 - DNA, 25 bp, Artificial
  Probe
tgccatgctgggagtgagctgccca

SEQ ID NO: 196529 - DNA, 25 bp, Artificial
  Probe
ccagacagcggctgtcgctctgtta

SEQ ID NO: 196530 - DNA, 25 bp, Artificial
  Probe
ctgcataaccaggatctccccaaga

SEQ ID NO: 196531 - DNA, 25 bp, Artificial
  Probe
gcttatcctgcataaccaggatctc

SEQ ID NO: 196532 - DNA, 25 bp, Artificial
  Probe
atagtcattgccatgctgggagtga

SEQ ID NO: 196533 - DNA, 25 bp, Artificial
  Probe
ctgttttcttagcagtacttggaat

SEQ ID NO: 196534 - DNA, 25 bp, Artificial
  Probe
atttgggaggcctgggtacactgtt

SEQ ID NO: 196535 - DNA, 25 bp, Artificial
  Probe
tcatgccagctgatgggtcagtttt

SEQ ID NO: 196536 - DNA, 25 bp, Artificial
  Probe
cctcagaaacagtggcatgttgcat

SEQ ID NO: 196537 - DNA, 25 bp, Artificial
  Probe
ccagctgatgggtcagttttccagg

SEQ ID NO: 196538 - DNA, 25 bp, Artificial
  Probe
tgcctcaaagcctacagagcttatc

SEQ ID NO: 196539 - DNA, 25 bp, Artificial
  Probe
ttggaatagtcattgccatgctggg

SEQ ID NO: 196540 - DNA, 25 bp, Artificial
  Probe
gtggaaaacggtcatgccagctgat

SEQ ID NO: 196541 - DNA, 25 bp, Artificial
  Probe
caggatctccccaagaagtcttgtt

SEQ ID NO: 196542 - DNA, 25 bp, Artificial
  Probe
ggacttctcatctggcagtgctcca

SEQ ID NO: 196543 - DNA, 25 bp, Artificial
  Probe
ggtcagttttccaggccttttggag

SEQ ID NO: 196544 - DNA, 25 bp, Artificial
  Probe
acagtacagagtcctcagaaacagt

SEQ ID NO: 196545 - DNA, 25 bp, Artificial
  Probe
ggtctgtctccactgactacacctg

SEQ ID NO: 196546 - DNA, 25 bp, Artificial
  Probe
agaagtcttgttagcctggtctgtc

SEQ ID NO: 196547 - DNA, 25 bp, Artificial
  Probe
tttcttagcagtacttggaatagtc

SEQ ID NO: 196548 - DNA, 25 bp, Artificial
  Probe
gggaggcctgggtacactgttttct

SEQ ID NO: 196549 - DNA, 25 bp, Artificial
  Probe
gttaacagccagtgcccgactgcag

SEQ ID NO: 196550 - DNA, 25 bp, Artificial
  Probe
ttcctgcctcaaagcctacagagct

SEQ ID NO: 196551 - DNA, 25 bp, Artificial
  Probe
agacagcggctgtcgctctgttaac

SEQ ID NO: 196552 - DNA, 25 bp, Artificial
  Probe
gtattcctgcctcaaagcctacaga

SEQ ID NO: 196553 - DNA, 25 bp, Artificial
  Probe
ttgcttctgcttttaacaccatggg

SEQ ID NO: 196554 - DNA, 25 bp, Artificial
  Probe
gttaatgatagtggtctctgctcac

SEQ ID NO: 196555 - DNA, 25 bp, Artificial
  Probe
ggtctctgctcacactgctatgtcc

SEQ ID NO: 196556 - DNA, 25 bp, Artificial
  Probe
cacagtgtgctacatgtcctgttaa

SEQ ID NO: 196557 - DNA, 25 bp, Artificial
  Probe
cgcgcttaccaagcacacagtgtgc

SEQ ID NO: 196558 - DNA, 25 bp, Artificial
  Probe
agctacatcaacaaggatgagcaga

SEQ ID NO: 196559 - DNA, 25 bp, Artificial
  Probe
ctttcgcgcttaccaagcacacagt

SEQ ID NO: 196560 - DNA, 25 bp, Artificial
  Probe
gtggtctctgctcacactgctatgt

SEQ ID NO: 196561 - DNA, 25 bp, Artificial
  Probe
aatgatagtggtctctgctcacact

SEQ ID NO: 196562 - DNA, 25 bp, Artificial
  Probe
gcttctgcttttaacaccatgggtc

SEQ ID NO: 196563 - DNA, 25 bp, Artificial
  Probe
cagtgtgctacatgtcctgttaatg

SEQ ID NO: 196564 - DNA, 25 bp, Artificial
  Probe
gcttttaacaccatgggtctcctta

SEQ ID NO: 196565 - DNA, 25 bp, Artificial
  Probe
ttgagctacatcaacaaggatgagc

SEQ ID NO: 196566 - DNA, 25 bp, Artificial
  Probe
atgatagtggtctctgctcacactg

SEQ ID NO: 196567 - DNA, 25 bp, Artificial
  Probe
taacaccatgggtctccttaaagag

SEQ ID NO: 196568 - DNA, 25 bp, Artificial
  Probe
gtcctgttaatgatagtggtctctg

SEQ ID NO: 196569 - DNA, 25 bp, Artificial
  Probe
acaccatgggtctccttaaagaggg

SEQ ID NO: 196570 - DNA, 25 bp, Artificial
  Probe
gctacatgtcctgttaatgatagtg

SEQ ID NO: 196571 - DNA, 25 bp, Artificial
  Probe
gatagtggtctctgctcacactgct

SEQ ID NO: 196572 - DNA, 25 bp, Artificial
  Probe
gtctacttgaatcctttcgcgctta

SEQ ID NO: 196573 - DNA, 25 bp, Artificial
  Probe
tgtcctgttaatgatagtggtctct

SEQ ID NO: 196574 - DNA, 25 bp, Artificial
  Probe
tttgcttctgcttttaacaccatgg

SEQ ID NO: 196575 - DNA, 25 bp, Artificial
  Probe
gtgtgctacatgtcctgttaatgat

SEQ ID NO: 196576 - DNA, 25 bp, Artificial
  Probe
cttctgcttttaacaccatgggtct

SEQ ID NO: 196577 - DNA, 25 bp, Artificial
  Probe
tgctcacactgctatgtccttaaag

SEQ ID NO: 196578 - DNA, 25 bp, Artificial
  Probe
tgtctacttgaatcctttcgcgctt

SEQ ID NO: 196579 - DNA, 25 bp, Artificial
  Probe
agaggaaggcctgtctacttgaatc

SEQ ID NO: 196580 - DNA, 25 bp, Artificial
  Probe
caccaccaggaaagatagaagagag

SEQ ID NO: 196581 - DNA, 25 bp, Artificial
  Probe
aggaaggcctgtctacttgaatcct

SEQ ID NO: 196582 - DNA, 25 bp, Artificial
  Probe
ctacatgtcctgttaatgatagtgg

SEQ ID NO: 196583 - DNA, 25 bp, Artificial
  Probe
gcctgtctacttgaatcctttcgcg

SEQ ID NO: 196584 - DNA, 25 bp, Artificial
  Probe
cgcttaccaagcacacagtgtgcta

SEQ ID NO: 196585 - DNA, 25 bp, Artificial
  Probe
ccaagcacacagtgtgctacatgtc

SEQ ID NO: 196586 - DNA, 25 bp, Artificial
  Probe
gctcacactgctatgtccttaaagt

SEQ ID NO: 196587 - DNA, 25 bp, Artificial
  Probe
gaggaaggcctgtctacttgaatcc

SEQ ID NO: 196588 - DNA, 25 bp, Artificial
  Probe
catcaacaaggatgagcagaagctg

SEQ ID NO: 196589 - DNA, 25 bp, Artificial
  Probe
ctacatcaacaaggatgagcagaag

SEQ ID NO: 196590 - DNA, 25 bp, Artificial
  Probe
tcgcgcttaccaagcacacagtgtg

SEQ ID NO: 196591 - DNA, 25 bp, Artificial
  Probe
tgcttctgcttttaacaccatgggt

SEQ ID NO: 196592 - DNA, 25 bp, Artificial
  Probe
ctgcttttaacaccatgggtctcct

SEQ ID NO: 196593 - DNA, 25 bp, Artificial
  Probe
taccaagcacacagtgtgctacatg

SEQ ID NO: 196594 - DNA, 25 bp, Artificial
  Probe
gtctctgctcacactgctatgtcct

SEQ ID NO: 196595 - DNA, 25 bp, Artificial
  Probe
aagcacacagtgtgctacatgtcct

SEQ ID NO: 196596 - DNA, 25 bp, Artificial
  Probe
gagctacatcaacaaggatgagcag

SEQ ID NO: 196597 - DNA, 25 bp, Artificial
  Probe
acatgtcctgttaatgatagtggtc

SEQ ID NO: 196598 - DNA, 25 bp, Artificial
  Probe
aggcctgtctacttgaatcctttcg

SEQ ID NO: 196599 - DNA, 25 bp, Artificial
  Probe
gcctctgactaaatggcttacgacc

SEQ ID NO: 196600 - DNA, 25 bp, Artificial
  Probe
gactaaatggcttacgaccaaagga

SEQ ID NO: 196601 - DNA, 25 bp, Artificial
  Probe
taatgccctgacagaagccagggag

SEQ ID NO: 196602 - DNA, 25 bp, Artificial
  Probe
aaaggaccattcaccctgcctcagg

SEQ ID NO: 196603 - DNA, 25 bp, Artificial
  Probe
ttcaccctgcctcaggatctaagca

SEQ ID NO: 196604 - DNA, 25 bp, Artificial
  Probe
tgactaaatggcttacgaccaaagg

SEQ ID NO: 196605 - DNA, 25 bp, Artificial
  Probe
cctctgactaaatggcttacgacca

SEQ ID NO: 196606 - DNA, 25 bp, Artificial
  Probe
atgccctgacagaagccagggagcc

SEQ ID NO: 196607 - DNA, 25 bp, Artificial
  Probe
ccctgcctcaggatctaagcagaaa

SEQ ID NO: 196608 - DNA, 25 bp, Artificial
  Probe
aatgtaatgccctgacagaagccag

SEQ ID NO: 196609 - DNA, 25 bp, Artificial
  Probe
acaggttcaaagcacactggcaatg

SEQ ID NO: 196610 - DNA, 25 bp, Artificial
  Probe
ggcttacgaccaaaggaccattcac

SEQ ID NO: 196611 - DNA, 25 bp, Artificial
  Probe
atggcttacgaccaaaggaccattc

SEQ ID NO: 196612 - DNA, 25 bp, Artificial
  Probe
tgtaatgccctgacagaagccaggg

SEQ ID NO: 196613 - DNA, 25 bp, Artificial
  Probe
tcaccctgcctcaggatctaagcag

SEQ ID NO: 196614 - DNA, 25 bp, Artificial
  Probe
taaatggcttacgaccaaaggacca

SEQ ID NO: 196615 - DNA, 25 bp, Artificial
  Probe
actggcaatgtaatgccctgacaga

SEQ ID NO: 196616 - DNA, 25 bp, Artificial
  Probe
caggttcaaagcacactggcaatgt

SEQ ID NO: 196617 - DNA, 25 bp, Artificial
  Probe
aggttcaaagcacactggcaatgta

SEQ ID NO: 196618 - DNA, 25 bp, Artificial
  Probe
gacaggttcaaagcacactggcaat

SEQ ID NO: 196619 - DNA, 25 bp, Artificial
  Probe
cagggagcctctgactaaatggctt

SEQ ID NO: 196620 - DNA, 25 bp, Artificial
  Probe
ctggcaatgtaatgccctgacagaa

SEQ ID NO: 196621 - DNA, 25 bp, Artificial
  Probe
agcacactggcaatgtaatgccctg

SEQ ID NO: 196622 - DNA, 25 bp, Artificial
  Probe
tggcttacgaccaaaggaccattca

SEQ ID NO: 196623 - DNA, 25 bp, Artificial
  Probe
ggttcaaagcacactggcaatgtaa

SEQ ID NO: 196624 - DNA, 25 bp, Artificial
  Probe
gccagggagcctctgactaaatggc

SEQ ID NO: 196625 - DNA, 25 bp, Artificial
  Probe
gcttacgaccaaaggaccattcacc

SEQ ID NO: 196626 - DNA, 25 bp, Artificial
  Probe
agggagcctctgactaaatggctta

SEQ ID NO: 196627 - DNA, 25 bp, Artificial
  Probe
gttcaaagcacactggcaatgtaat

SEQ ID NO: 196628 - DNA, 25 bp, Artificial
  Probe
aagccagggagcctctgactaaatg

SEQ ID NO: 196629 - DNA, 25 bp, Artificial
  Probe
aatgccctgacagaagccagggagc

SEQ ID NO: 196630 - DNA, 25 bp, Artificial
  Probe
tacgaccaaaggaccattcaccctg

SEQ ID NO: 196631 - DNA, 25 bp, Artificial
  Probe
aaatggcttacgaccaaaggaccat

SEQ ID NO: 196632 - DNA, 25 bp, Artificial
  Probe
acactggcaatgtaatgccctgaca

SEQ ID NO: 196633 - DNA, 25 bp, Artificial
  Probe
caccctgcctcaggatctaagcaga

SEQ ID NO: 196634 - DNA, 25 bp, Artificial
  Probe
ccagggagcctctgactaaatggct

SEQ ID NO: 196635 - DNA, 25 bp, Artificial
  Probe
tgccctgacagaagccagggagcct

SEQ ID NO: 196636 - DNA, 25 bp, Artificial
  Probe
atgtaatgccctgacagaagccagg

SEQ ID NO: 196637 - DNA, 25 bp, Artificial
  Probe
agcctctgactaaatggcttacgac

SEQ ID NO: 196638 - DNA, 25 bp, Artificial
  Probe
agccagggagcctctgactaaatgg

SEQ ID NO: 196639 - DNA, 25 bp, Artificial
  Probe
accctgcctcaggatctaagcagaa

SEQ ID NO: 196640 - DNA, 25 bp, Artificial
  Probe
gtaatgccctgacagaagccaggga

SEQ ID NO: 196641 - DNA, 25 bp, Artificial
  Probe
gcacactggcaatgtaatgccctga

SEQ ID NO: 196642 - DNA, 25 bp, Artificial
  Probe
cactggcaatgtaatgccctgacag

SEQ ID NO: 196643 - DNA, 25 bp, Artificial
  Probe
ttcaaagcacactggcaatgtaatg

SEQ ID NO: 196644 - DNA, 25 bp, Artificial
  Probe
aagcacactggcaatgtaatgccct

SEQ ID NO: 196645 - DNA, 25 bp, Artificial
  Probe
tcctgtctcctctgttggtttgtga

SEQ ID NO: 196646 - DNA, 25 bp, Artificial
  Probe
ccctcctgtctcctctgttggtttg

SEQ ID NO: 196647 - DNA, 25 bp, Artificial
  Probe
tatcattacagcatgtatattaaat

SEQ ID NO: 196648 - DNA, 25 bp, Artificial
  Probe
tttgacattttgtagctagtttaaa

SEQ ID NO: 196649 - DNA, 25 bp, Artificial
  Probe
gatttgacattttgtagctagttta

SEQ ID NO: 196650 - DNA, 25 bp, Artificial
  Probe
cattttgtagctagtttaaaattat

SEQ ID NO: 196651 - DNA, 25 bp, Artificial
  Probe
gataaatatcattacagcatgtata

SEQ ID NO: 196652 - DNA, 25 bp, Artificial
  Probe
taaatatcattacagcatgtatatt

SEQ ID NO: 196653 - DNA, 25 bp, Artificial
  Probe
tctcctctgttggtttgtgaagtga

SEQ ID NO: 196654 - DNA, 25 bp, Artificial
  Probe
tattaaatccctcctgtctcctctg

SEQ ID NO: 196655 - DNA, 25 bp, Artificial
  Probe
ctctgttggtttgtgaagtgatttg

SEQ ID NO: 196656 - DNA, 25 bp, Artificial
  Probe
atatcattacagcatgtatattaaa

SEQ ID NO: 196657 - DNA, 25 bp, Artificial
  Probe
ctcctctgttggtttgtgaagtgat

SEQ ID NO: 196658 - DNA, 25 bp, Artificial
  Probe
aaatatcattacagcatgtatatta

SEQ ID NO: 196659 - DNA, 25 bp, Artificial
  Probe
atattaaatccctcctgtctcctct

SEQ ID NO: 196660 - DNA, 25 bp, Artificial
  Probe
tctgttggtttgtgaagtgatttga

SEQ ID NO: 196661 - DNA, 25 bp, Artificial
  Probe
atgtatattaaatccctcctgtctc

SEQ ID NO: 196662 - DNA, 25 bp, Artificial
  Probe
ctgttggtttgtgaagtgatttgac

SEQ ID NO: 196663 - DNA, 25 bp, Artificial
  Probe
ctcctgtctcctctgttggtttgtg

SEQ ID NO: 196664 - DNA, 25 bp, Artificial
  Probe
atcattacagcatgtatattaaatc

SEQ ID NO: 196665 - DNA, 25 bp, Artificial
  Probe
tgatttgacattttgtagctagttt

SEQ ID NO: 196666 - DNA, 25 bp, Artificial
  Probe
ataaatatcattacagcatgtatat

SEQ ID NO: 196667 - DNA, 25 bp, Artificial
  Probe
cctctgttggtttgtgaagtgattt

SEQ ID NO: 196668 - DNA, 25 bp, Artificial
  Probe
ctgtctcctctgttggtttgtgaag

SEQ ID NO: 196669 - DNA, 25 bp, Artificial
  Probe
catgtatattaaatccctcctgtct

SEQ ID NO: 196670 - DNA, 25 bp, Artificial
  Probe
tatattaaatccctcctgtctcctc

SEQ ID NO: 196671 - DNA, 25 bp, Artificial
  Probe
ttgacattttgtagctagtttaaaa

SEQ ID NO: 196672 - DNA, 25 bp, Artificial
  Probe
tcattacagcatgtatattaaatcc

SEQ ID NO: 196673 - DNA, 25 bp, Artificial
  Probe
cctcctgtctcctctgttggtttgt

SEQ ID NO: 196674 - DNA, 25 bp, Artificial
  Probe
tgtatattaaatccctcctgtctcc

SEQ ID NO: 196675 - DNA, 25 bp, Artificial
  Probe
cattacagcatgtatattaaatccc

SEQ ID NO: 196676 - DNA, 25 bp, Artificial
  Probe
atttgacattttgtagctagtttaa

SEQ ID NO: 196677 - DNA, 25 bp, Artificial
  Probe
tgacattttgtagctagtttaaaat

SEQ ID NO: 196678 - DNA, 25 bp, Artificial
  Probe
gtctcctctgttggtttgtgaagtg

SEQ ID NO: 196679 - DNA, 25 bp, Artificial
  Probe
tcctctgttggtttgtgaagtgatt

SEQ ID NO: 196680 - DNA, 25 bp, Artificial
  Probe
aatatcattacagcatgtatattaa

SEQ ID NO: 196681 - DNA, 25 bp, Artificial
  Probe
cctgtctcctctgttggtttgtgaa

SEQ ID NO: 196682 - DNA, 25 bp, Artificial
  Probe
gacattttgtagctagtttaaaatt

SEQ ID NO: 196683 - DNA, 25 bp, Artificial
  Probe
tgtctcctctgttggtttgtgaagt

SEQ ID NO: 196684 - DNA, 25 bp, Artificial
  Probe
gtatattaaatccctcctgtctcct

SEQ ID NO: 196685 - DNA, 25 bp, Artificial
  Probe
ttctaagggtccaggaagctaccca

SEQ ID NO: 196686 - DNA, 25 bp, Artificial
  Probe
ctgaataatgtcttactgtagttgc

SEQ ID NO: 196687 - DNA, 25 bp, Artificial
  Probe
ttcagagccatgtgccaaaacagta

SEQ ID NO: 196688 - DNA, 25 bp, Artificial
  Probe
cagcaatcctttcagggttgaagca

SEQ ID NO: 196689 - DNA, 25 bp, Artificial
  Probe
acagtagtcatcaagtttcaaaatg

SEQ ID NO: 196690 - DNA, 25 bp, Artificial
  Probe
gagtgttcaacctccagcaatcctt

SEQ ID NO: 196691 - DNA, 25 bp, Artificial
  Probe
agcaatcctttcagggttgaagcag

SEQ ID NO: 196692 - DNA, 25 bp, Artificial
  Probe
actgtagttgcaaagccaaactgct

SEQ ID NO: 196693 - DNA, 25 bp, Artificial
  Probe
ttccacttgaaggtatttagaagct

SEQ ID NO: 196694 - DNA, 25 bp, Artificial
  Probe
tccacttgaaggtatttagaagcta

SEQ ID NO: 196695 - DNA, 25 bp, Artificial
  Probe
gtccaggaagctacccatctgttta

SEQ ID NO: 196696 - DNA, 25 bp, Artificial
  Probe
cccatctgtttagttactagtgact

SEQ ID NO: 196697 - DNA, 25 bp, Artificial
  Probe
tttagttactagtgactatgacacc

SEQ ID NO: 196698 - DNA, 25 bp, Artificial
  Probe
cttgctagacagtagtcatcaagtt

SEQ ID NO: 196699 - DNA, 25 bp, Artificial
  Probe
gaattcagagccatgtgccaaaaca

SEQ ID NO: 196700 - DNA, 25 bp, Artificial
  Probe
ttgactgaataactgctttaaggac

SEQ ID NO: 196701 - DNA, 25 bp, Artificial
  Probe
ctaagggtccaggaagctacccatc

SEQ ID NO: 196702 - DNA, 25 bp, Artificial
  Probe
aggtcaagagtttctaagggtccag

SEQ ID NO: 196703 - DNA, 25 bp, Artificial
  Probe
agttgcaaagccaaactgcttgtca

SEQ ID NO: 196704 - DNA, 25 bp, Artificial
  Probe
taatgtcttactgtagttgcaaagc

SEQ ID NO: 196705 - DNA, 25 bp, Artificial
  Probe
ttgttcctgacacaacacagttaag

SEQ ID NO: 196706 - DNA, 25 bp, Artificial
  Probe
cagtgtacacattttcaaaagtggg

SEQ ID NO: 196707 - DNA, 25 bp, Artificial
  Probe
cctccagcaatcctttcagggttga

SEQ ID NO: 196708 - DNA, 25 bp, Artificial
  Probe
ctcagtgtacacattttcaaaagtg

SEQ ID NO: 196709 - DNA, 25 bp, Artificial
  Probe
ctagacagtagtcatcaagtttcaa

SEQ ID NO: 196710 - DNA, 25 bp, Artificial
  Probe
aaatgctttgtgaagttcagccagt

SEQ ID NO: 196711 - DNA, 25 bp, Artificial
  Probe
gaaacgtaatgtctccagtcccctc

SEQ ID NO: 196712 - DNA, 25 bp, Artificial
  Probe
ctttcagggttgaagcagagaaagc

SEQ ID NO: 196713 - DNA, 25 bp, Artificial
  Probe
tcaacctccagcaatcctttcaggg

SEQ ID NO: 196714 - DNA, 25 bp, Artificial
  Probe
cagaaacgtaatgtctccagtcccc

SEQ ID NO: 196715 - DNA, 25 bp, Artificial
  Probe
tcctagttggatcagtttaatttca

SEQ ID NO: 196716 - DNA, 25 bp, Artificial
  Probe
agcagagaaagcactcagtgtacac

SEQ ID NO: 196717 - DNA, 25 bp, Artificial
  Probe
atcctttcagggttgaagcagagaa

SEQ ID NO: 196718 - DNA, 25 bp, Artificial
  Probe
actgctttaaggacaatgtcagaaa

SEQ ID NO: 196719 - DNA, 25 bp, Artificial
  Probe
gagaaagcactcagtgtacacattt

SEQ ID NO: 196720 - DNA, 25 bp, Artificial
  Probe
agtcatcaagtttcaaaatgctttg

SEQ ID NO: 196721 - DNA, 25 bp, Artificial
  Probe
cagatagttgtgtcttcctagttgg

SEQ ID NO: 196722 - DNA, 25 bp, Artificial
  Probe
gagccatgtgccaaaacagtaccac

SEQ ID NO: 196723 - DNA, 25 bp, Artificial
  Probe
gctgtgattctgtcccagatagttg

SEQ ID NO: 196724 - DNA, 25 bp, Artificial
  Probe
gtatatctatatctctaagctgttg

SEQ ID NO: 196725 - DNA, 25 bp, Artificial
  Probe
tacacattttcaaaagtgggaaaca

SEQ ID NO: 196726 - DNA, 25 bp, Artificial
  Probe
ttcaaaatgctttgtgaagttcagc

SEQ ID NO: 196727 - DNA, 25 bp, Artificial
  Probe
aggaagctacccatctgtttagtta

SEQ ID NO: 196728 - DNA, 25 bp, Artificial
  Probe
gactatgacaccattgttcctgaca

SEQ ID NO: 196729 - DNA, 25 bp, Artificial
  Probe
gccaaaacagtaccacagaacagct

SEQ ID NO: 196730 - DNA, 25 bp, Artificial
  Probe
tgattctgtcccagatagttgtgtc

SEQ ID NO: 196731 - DNA, 25 bp, Artificial
  Probe
cggtgccattacgttctgtgggctt

SEQ ID NO: 196732 - DNA, 25 bp, Artificial
  Probe
cttcagcccacctgaggcaaaagag

SEQ ID NO: 196733 - DNA, 25 bp, Artificial
  Probe
tctgcagacttcagcccacctgagg

SEQ ID NO: 196734 - DNA, 25 bp, Artificial
  Probe
cagtgttactgtgtccgggctgtag

SEQ ID NO: 196735 - DNA, 25 bp, Artificial
  Probe
gggggttctgcagacttcagcccac

SEQ ID NO: 196736 - DNA, 25 bp, Artificial
  Probe
tttcttcctccagaaagaggagcgc

SEQ ID NO: 196737 - DNA, 25 bp, Artificial
  Probe
tgccattacgttctgtgggcttcct

SEQ ID NO: 196738 - DNA, 25 bp, Artificial
  Probe
ctgtagttagggaccgtgcagtgct

SEQ ID NO: 196739 - DNA, 25 bp, Artificial
  Probe
tcagcccacctgaggcaaaagagca

SEQ ID NO: 196740 - DNA, 25 bp, Artificial
  Probe
tgtgagacattggttgcccacagtg

SEQ ID NO: 196741 - DNA, 25 bp, Artificial
  Probe
agtgttactgtgtccgggctgtagt

SEQ ID NO: 196742 - DNA, 25 bp, Artificial
  Probe
gaaatggcctttccacttgtctgat

SEQ ID NO: 196743 - DNA, 25 bp, Artificial
  Probe
tgagacattggttgcccacagtgtt

SEQ ID NO: 196744 - DNA, 25 bp, Artificial
  Probe
gtttcagtcccgtcagcccgaggag

SEQ ID NO: 196745 - DNA, 25 bp, Artificial
  Probe
ttctgtgggcttcctttgttctccc

SEQ ID NO: 196746 - DNA, 25 bp, Artificial
  Probe
gtttcttcctccagaaagaggagcg

SEQ ID NO: 196747 - DNA, 25 bp, Artificial
  Probe
ctattctctcggtgccattacgttc

SEQ ID NO: 196748 - DNA, 25 bp, Artificial
  Probe
ctctcggtgccattacgttctgtgg

SEQ ID NO: 196749 - DNA, 25 bp, Artificial
  Probe
agacttcagcccacctgaggcaaaa

SEQ ID NO: 196750 - DNA, 25 bp, Artificial
  Probe
cgggaaatggcctttccacttgtct

SEQ ID NO: 196751 - DNA, 25 bp, Artificial
  Probe
ggccattgtgagacattggttgccc

SEQ ID NO: 196752 - DNA, 25 bp, Artificial
  Probe
gcctttccacttgtctgatgcaatc

SEQ ID NO: 196753 - DNA, 25 bp, Artificial
  Probe
tctctcggtgccattacgttctgtg

SEQ ID NO: 196754 - DNA, 25 bp, Artificial
  Probe
ggttctgcagacttcagcccacctg

SEQ ID NO: 196755 - DNA, 25 bp, Artificial
  Probe
ctcccgattgtgtttcttcctccag

SEQ ID NO: 196756 - DNA, 25 bp, Artificial
  Probe
gtgccattacgttctgtgggcttcc

SEQ ID NO: 196757 - DNA, 25 bp, Artificial
  Probe
cattggttgcccacagtgttactgt

SEQ ID NO: 196758 - DNA, 25 bp, Artificial
  Probe
tctgtgggcttcctttgttctcccc

SEQ ID NO: 196759 - DNA, 25 bp, Artificial
  Probe
cccacctgaggcaaaagagcagtca

SEQ ID NO: 196760 - DNA, 25 bp, Artificial
  Probe
tcccgattgtgtttcttcctccaga

SEQ ID NO: 196761 - DNA, 25 bp, Artificial
  Probe
ggaaatggcctttccacttgtctga

SEQ ID NO: 196762 - DNA, 25 bp, Artificial
  Probe
tttcagtcccgtcagcccgaggaga

SEQ ID NO: 196763 - DNA, 25 bp, Artificial
  Probe
cattacgttctgtgggcttcctttg

SEQ ID NO: 196764 - DNA, 25 bp, Artificial
  Probe
gattgtgtttcttcctccagaaaga

SEQ ID NO: 196765 - DNA, 25 bp, Artificial
  Probe
ggcttcctttgttctcccctgattc

SEQ ID NO: 196766 - DNA, 25 bp, Artificial
  Probe
cgttctgtgggcttcctttgttctc

SEQ ID NO: 196767 - DNA, 25 bp, Artificial
  Probe
ccattgtgagacattggttgcccac

SEQ ID NO: 196768 - DNA, 25 bp, Artificial
  Probe
ccacctgaggcaaaagagcagtcac

SEQ ID NO: 196769 - DNA, 25 bp, Artificial
  Probe
cccacagtgttactgtgtccgggct

SEQ ID NO: 196770 - DNA, 25 bp, Artificial
  Probe
ttgtgagacattggttgcccacagt

SEQ ID NO: 196771 - DNA, 25 bp, Artificial
  Probe
ggttgcccacagtgttactgtgtcc

SEQ ID NO: 196772 - DNA, 25 bp, Artificial
  Probe
attggttgcccacagtgttactgtg

SEQ ID NO: 196773 - DNA, 25 bp, Artificial
  Probe
aagagcagtcactggcagtagttag

SEQ ID NO: 196774 - DNA, 25 bp, Artificial
  Probe
tgcccacagtgttactgtgtccggg

SEQ ID NO: 196775 - DNA, 25 bp, Artificial
  Probe
cccgattgtgtttcttcctccagaa

SEQ ID NO: 196776 - DNA, 25 bp, Artificial
  Probe
gaggccattgtgagacattggttgc

SEQ ID NO: 196777 - DNA, 25 bp, Artificial
  Probe
cagactatacaacatgtggggttta

SEQ ID NO: 196778 - DNA, 25 bp, Artificial
  Probe
cactttaacaatatggtggaacgtt

SEQ ID NO: 196779 - DNA, 25 bp, Artificial
  Probe
aatcactgtccatgggtcaaatttt

SEQ ID NO: 196780 - DNA, 25 bp, Artificial
  Probe
tcttgccgagtcatgccccacagat

SEQ ID NO: 196781 - DNA, 25 bp, Artificial
  Probe
tggaacgtttgtctatcttatcttg

SEQ ID NO: 196782 - DNA, 25 bp, Artificial
  Probe
cattgcgacacatccctacatagtg

SEQ ID NO: 196783 - DNA, 25 bp, Artificial
  Probe
ttcatgggctgttagaatatttcac

SEQ ID NO: 196784 - DNA, 25 bp, Artificial
  Probe
tctatcccagcctagagcacagaca

SEQ ID NO: 196785 - DNA, 25 bp, Artificial
  Probe
tagaccaacagcacagaatattagg

SEQ ID NO: 196786 - DNA, 25 bp, Artificial
  Probe
ttatcttgccgagtcatgccccaca

SEQ ID NO: 196787 - DNA, 25 bp, Artificial
  Probe
gccccacagataaatgaggaaagtc

SEQ ID NO: 196788 - DNA, 25 bp, Artificial
  Probe
cttgccgagtcatgccccacagata

SEQ ID NO: 196789 - DNA, 25 bp, Artificial
  Probe
ttttaactgcaatgactgaaagact

SEQ ID NO: 196790 - DNA, 25 bp, Artificial
  Probe
gagtcatgccccacagataaatgag

SEQ ID NO: 196791 - DNA, 25 bp, Artificial
  Probe
taactgcaatgactgaaagacttaa

SEQ ID NO: 196792 - DNA, 25 bp, Artificial
  Probe
caactgactgccatgaatagtgttt

SEQ ID NO: 196793 - DNA, 25 bp, Artificial
  Probe
atgtcaactgactgccatgaatagt

SEQ ID NO: 196794 - DNA, 25 bp, Artificial
  Probe
gctcaaggcaggaagccatacaatt

SEQ ID NO: 196795 - DNA, 25 bp, Artificial
  Probe
ctagagcacagacagaagagaatca

SEQ ID NO: 196796 - DNA, 25 bp, Artificial
  Probe
ccagcccaccaggattatttacatg

SEQ ID NO: 196797 - DNA, 25 bp, Artificial
  Probe
ggtttatgtcaactgactgccatga

SEQ ID NO: 196798 - DNA, 25 bp, Artificial
  Probe
agagaatcactgtccatgggtcaaa

SEQ ID NO: 196799 - DNA, 25 bp, Artificial
  Probe
gggtttatgtcaactgactgccatg

SEQ ID NO: 196800 - DNA, 25 bp, Artificial
  Probe
taaaggagctcaaggcaggaagcca

SEQ ID NO: 196801 - DNA, 25 bp, Artificial
  Probe
gcccaccaggattatttacatgata

SEQ ID NO: 196802 - DNA, 25 bp, Artificial
  Probe
aatccactttaacaatatggtggaa

SEQ ID NO: 196803 - DNA, 25 bp, Artificial
  Probe
ccagcctagagcacagacagaagag

SEQ ID NO: 196804 - DNA, 25 bp, Artificial
  Probe
atttcacagactatacaacatgtgg

SEQ ID NO: 196805 - DNA, 25 bp, Artificial
  Probe
gaagagaatcactgtccatgggtca

SEQ ID NO: 196806 - DNA, 25 bp, Artificial
  Probe
atgccccacagataaatgaggaaag

SEQ ID NO: 196807 - DNA, 25 bp, Artificial
  Probe
tctatcttatcttgccgagtcatgc

SEQ ID NO: 196808 - DNA, 25 bp, Artificial
  Probe
gagctcaaggcaggaagccatacaa

SEQ ID NO: 196809 - DNA, 25 bp, Artificial
  Probe
gaacgtttgtctatcttatcttgcc

SEQ ID NO: 196810 - DNA, 25 bp, Artificial
  Probe
attttaactgcaatgactgaaagac

SEQ ID NO: 196811 - DNA, 25 bp, Artificial
  Probe
caacatgtggggtttatgtcaactg

SEQ ID NO: 196812 - DNA, 25 bp, Artificial
  Probe
atagaccaacagcacagaatattag

SEQ ID NO: 196813 - DNA, 25 bp, Artificial
  Probe
ctatacaacatgtggggtttatgtc

SEQ ID NO: 196814 - DNA, 25 bp, Artificial
  Probe
gttatctatcccagcctagagcaca

SEQ ID NO: 196815 - DNA, 25 bp, Artificial
  Probe
ctgactgccatgaatagtgttttaa

SEQ ID NO: 196816 - DNA, 25 bp, Artificial
  Probe
attaaaggagctcaaggcaggaagc

SEQ ID NO: 196817 - DNA, 25 bp, Artificial
  Probe
ctatcccagcctagagcacagacag

SEQ ID NO: 196818 - DNA, 25 bp, Artificial
  Probe
tgatgttatctatcccagcctagag

SEQ ID NO: 196819 - DNA, 25 bp, Artificial
  Probe
ccaacagcacagaatattagggagg

SEQ ID NO: 196820 - DNA, 25 bp, Artificial
  Probe
aactgactgccatgaatagtgtttt

SEQ ID NO: 196821 - DNA, 25 bp, Artificial
  Probe
tttgtctatcttatcttgccgagtc

SEQ ID NO: 196822 - DNA, 25 bp, Artificial
  Probe
cagcccaccaggattatttacatga

SEQ ID NO: 196823 - DNA, 25 bp, Artificial
  Probe
tccactgcatttcctgcccaaagga

SEQ ID NO: 196824 - DNA, 25 bp, Artificial
  Probe
tgcccaaaggactcgggttgtctga

SEQ ID NO: 196825 - DNA, 25 bp, Artificial
  Probe
ggtttcaccctttctgatgcccaga

SEQ ID NO: 196826 - DNA, 25 bp, Artificial
  Probe
atctgggcagcagaaagggtgaaac

SEQ ID NO: 196827 - DNA, 25 bp, Artificial
  Probe
tcagagacacctggtttcacccttt

SEQ ID NO: 196828 - DNA, 25 bp, Artificial
  Probe
tcctgggtgctgcttctccttcctg

SEQ ID NO: 196829 - DNA, 25 bp, Artificial
  Probe
gaaccaagtcagtggcgtggaaaac

SEQ ID NO: 196830 - DNA, 25 bp, Artificial
  Probe
ctcactctgtgcagtcatgcccagt

SEQ ID NO: 196831 - DNA, 25 bp, Artificial
  Probe
atctatgaccttttattggcttcag

SEQ ID NO: 196832 - DNA, 25 bp, Artificial
  Probe
agagacacctggtttcaccctttct

SEQ ID NO: 196833 - DNA, 25 bp, Artificial
  Probe
tattggcttcagcactctcagagtt

SEQ ID NO: 196834 - DNA, 25 bp, Artificial
  Probe
ttgtatgccccttcgctcgtttcct

SEQ ID NO: 196835 - DNA, 25 bp, Artificial
  Probe
catttcctgcccaaaggactcgggt

SEQ ID NO: 196836 - DNA, 25 bp, Artificial
  Probe
cttcagcactctcagagttaataga

SEQ ID NO: 196837 - DNA, 25 bp, Artificial
  Probe
cttttattggcttcagcactctcag

SEQ ID NO: 196838 - DNA, 25 bp, Artificial
  Probe
tctgtgcagtcatgcccagtcactt

SEQ ID NO: 196839 - DNA, 25 bp, Artificial
  Probe
ctgcaccaccttaactgttgctttg

SEQ ID NO: 196840 - DNA, 25 bp, Artificial
  Probe
gatatgtgcaatgcagccctactct

SEQ ID NO: 196841 - DNA, 25 bp, Artificial
  Probe
caacagttaaggtggtgcaggtatc

SEQ ID NO: 196842 - DNA, 25 bp, Artificial
  Probe
atcgctgcatgatgcatctcagccc

SEQ ID NO: 196843 - DNA, 25 bp, Artificial
  Probe
gagaaccaagtcagtggcgtggaaa

SEQ ID NO: 196844 - DNA, 25 bp, Artificial
  Probe
ggccctgttaacagcctggcatggg

SEQ ID NO: 196845 - DNA, 25 bp, Artificial
  Probe
ttctgatgcccagatacctgcacca

SEQ ID NO: 196846 - DNA, 25 bp, Artificial
  Probe
tttgtatgccccttcgctcgtttcc

SEQ ID NO: 196847 - DNA, 25 bp, Artificial
  Probe
caccttaactgttgctttgtatgcc

SEQ ID NO: 196848 - DNA, 25 bp, Artificial
  Probe
actgtaccctcctgggtgctgcttc

SEQ ID NO: 196849 - DNA, 25 bp, Artificial
  Probe
ttttattggcttcagcactctcaga

SEQ ID NO: 196850 - DNA, 25 bp, Artificial
  Probe
tgttgctttgtatgccccttcgctc

SEQ ID NO: 196851 - DNA, 25 bp, Artificial
  Probe
tgcatgatgcatctcagcccgccta

SEQ ID NO: 196852 - DNA, 25 bp, Artificial
  Probe
gtttcaccctttctgatgcccagat

SEQ ID NO: 196853 - DNA, 25 bp, Artificial
  Probe
tttctgatgcccagatacctgcacc

SEQ ID NO: 196854 - DNA, 25 bp, Artificial
  Probe
cactgcatttcctgcccaaaggact

SEQ ID NO: 196855 - DNA, 25 bp, Artificial
  Probe
tatgtgcaatgcagccctactctgg

SEQ ID NO: 196856 - DNA, 25 bp, Artificial
  Probe
ggcatacaaaagcaacagttaaggt

SEQ ID NO: 196857 - DNA, 25 bp, Artificial
  Probe
atgatgcatctcagcccgcctagtg

SEQ ID NO: 196858 - DNA, 25 bp, Artificial
  Probe
acacctggtttcaccctttctgatg

SEQ ID NO: 196859 - DNA, 25 bp, Artificial
  Probe
tctcagcccgcctagtgatggttcc

SEQ ID NO: 196860 - DNA, 25 bp, Artificial
  Probe
catacaaaagcaacagttaaggtgg

SEQ ID NO: 196861 - DNA, 25 bp, Artificial
  Probe
atgaccttttattggcttcagcact

SEQ ID NO: 196862 - DNA, 25 bp, Artificial
  Probe
ctgttaacagcctggcatggggcag

SEQ ID NO: 196863 - DNA, 25 bp, Artificial
  Probe
ttcctgcccaaaggactcgggttgt

SEQ ID NO: 196864 - DNA, 25 bp, Artificial
  Probe
cactggtggccctgttaacagcctg

SEQ ID NO: 196865 - DNA, 25 bp, Artificial
  Probe
agggcatacaaaagcaacagttaag

SEQ ID NO: 196866 - DNA, 25 bp, Artificial
  Probe
ccttaactgttgctttgtatgcccc

SEQ ID NO: 196867 - DNA, 25 bp, Artificial
  Probe
cttaactgttgctttgtatgcccct

SEQ ID NO: 196868 - DNA, 25 bp, Artificial
  Probe
taactgttgctttgtatgccccttc

SEQ ID NO: 196869 - DNA, 25 bp, Artificial
  Probe
ccacgtgaagatgaccgatgacgag

SEQ ID NO: 196870 - DNA, 25 bp, Artificial
  Probe
atccacaatcaagttccagatgaag

SEQ ID NO: 196871 - DNA, 25 bp, Artificial
  Probe
caggcctaaacaaggcgggcaagtt

SEQ ID NO: 196872 - DNA, 25 bp, Artificial
  Probe
caagttccagatgaagaaggtgctg

SEQ ID NO: 196873 - DNA, 25 bp, Artificial
  Probe
tccgggctctgtacatcaagagcac

SEQ ID NO: 196874 - DNA, 25 bp, Artificial
  Probe
tatcctgggcccaggcctaaacaag

SEQ ID NO: 196875 - DNA, 25 bp, Artificial
  Probe
gtgtctggccgttgccgtcggccac

SEQ ID NO: 196876 - DNA, 25 bp, Artificial
  Probe
aagctggccaagaagtatgatgcct

SEQ ID NO: 196877 - DNA, 25 bp, Artificial
  Probe
tgtgtctggccgttgccgtcggcca

SEQ ID NO: 196878 - DNA, 25 bp, Artificial
  Probe
aagcaaatcccacgtatcctgggcc

SEQ ID NO: 196879 - DNA, 25 bp, Artificial
  Probe
gaaatccacaatcaagttccagatg

SEQ ID NO: 196880 - DNA, 25 bp, Artificial
  Probe
caagccccagcgtctgtattaggac

SEQ ID NO: 196881 - DNA, 25 bp, Artificial
  Probe
tggccgttgccgtcggccacgtgaa

SEQ ID NO: 196882 - DNA, 25 bp, Artificial
  Probe
cctgctgacacacaatgaaaacatg

SEQ ID NO: 196883 - DNA, 25 bp, Artificial
  Probe
ttttggcctccgagtctctgatcaa

SEQ ID NO: 196884 - DNA, 25 bp, Artificial
  Probe
aagtatgatgcctttttggcctccg

SEQ ID NO: 196885 - DNA, 25 bp, Artificial
  Probe
aggtgaaatccacaatcaagttcca

SEQ ID NO: 196886 - DNA, 25 bp, Artificial
  Probe
ggctctgtacatcaagagcaccatg

SEQ ID NO: 196887 - DNA, 25 bp, Artificial
  Probe
caagcaaatcccacgtatcctgggc

SEQ ID NO: 196888 - DNA, 25 bp, Artificial
  Probe
aaactggcagaacgtccgggctctg

SEQ ID NO: 196889 - DNA, 25 bp, Artificial
  Probe
gctccaataaacctcgttgctgcct

SEQ ID NO: 196890 - DNA, 25 bp, Artificial
  Probe
actggcagaacgtccgggctctgta

SEQ ID NO: 196891 - DNA, 25 bp, Artificial
  Probe
ggcccaggcctaaacaaggcgggca

SEQ ID NO: 196892 - DNA, 25 bp, Artificial
  Probe
cccacatggacatcgaggcgctcaa

SEQ ID NO: 196893 - DNA, 25 bp, Artificial
  Probe
cgtctgtattaggacgctccaataa

SEQ ID NO: 196894 - DNA, 25 bp, Artificial
  Probe
aaagctggccaagaagtatgatgcc

SEQ ID NO: 196895 - DNA, 25 bp, Artificial
  Probe
tacatcaagagcaccatgggcaagc

SEQ ID NO: 196896 - DNA, 25 bp, Artificial
  Probe
aaatcccacgtatcctgggcccagg

SEQ ID NO: 196897 - DNA, 25 bp, Artificial
  Probe
gcctttttggcctccgagtctctga

SEQ ID NO: 196898 - DNA, 25 bp, Artificial
  Probe
gtctacaacatccacctggctgtca

SEQ ID NO: 196899 - DNA, 25 bp, Artificial
  Probe
atgatgcctttttggcctccgagtc

SEQ ID NO: 196900 - DNA, 25 bp, Artificial
  Probe
cacacaatgaaaacatggtggccaa

SEQ ID NO: 196901 - DNA, 25 bp, Artificial
  Probe
gtattaggacgctccaataaacctc

SEQ ID NO: 196902 - DNA, 25 bp, Artificial
  Probe
acatggacatcgaggcgctcaagaa

SEQ ID NO: 196903 - DNA, 25 bp, Artificial
  Probe
tgaagatgaccgatgacgagctagt

SEQ ID NO: 196904 - DNA, 25 bp, Artificial
  Probe
caacttcttggtgtccttactcaag

SEQ ID NO: 196905 - DNA, 25 bp, Artificial
  Probe
tgggcaagccccagcgtctgtatta

SEQ ID NO: 196906 - DNA, 25 bp, Artificial
  Probe
gaacgtccgggctctgtacatcaag

SEQ ID NO: 196907 - DNA, 25 bp, Artificial
  Probe
tggtcaaaaagctggccaagaagta

SEQ ID NO: 196908 - DNA, 25 bp, Artificial
  Probe
catccacctggctgtcaacttcttg

SEQ ID NO: 196909 - DNA, 25 bp, Artificial
  Probe
cagccatgagcagcaaagtttcacg

SEQ ID NO: 196910 - DNA, 25 bp, Artificial
  Probe
gtctctgatcaagcaaatcccacgt

SEQ ID NO: 196911 - DNA, 25 bp, Artificial
  Probe
acatcgaggcgctcaagaagcttaa

SEQ ID NO: 196912 - DNA, 25 bp, Artificial
  Probe
ttgccgtcggccacgtgaagatgac

SEQ ID NO: 196913 - DNA, 25 bp, Artificial
  Probe
ttggtcaaaaagctggccaagaagt

SEQ ID NO: 196914 - DNA, 25 bp, Artificial
  Probe
aacttcttggtgtccttactcaaga

SEQ ID NO: 196915 - DNA, 25 bp, Artificial
  Probe
gaacaaatgtgacctgaccacaaag

SEQ ID NO: 196916 - DNA, 25 bp, Artificial
  Probe
agtagactacacaacagccaaggaa

SEQ ID NO: 196917 - DNA, 25 bp, Artificial
  Probe
gattcccttggaattccatttttgg

SEQ ID NO: 196918 - DNA, 25 bp, Artificial
  Probe
tctttcatgaccatggcagcggaga

SEQ ID NO: 196919 - DNA, 25 bp, Artificial
  Probe
gttggaaagtcttgccttctcctta

SEQ ID NO: 196920 - DNA, 25 bp, Artificial
  Probe
gatacggactatagagctagacggg

SEQ ID NO: 196921 - DNA, 25 bp, Artificial
  Probe
ctccagttattacagaggagcccat

SEQ ID NO: 196922 - DNA, 25 bp, Artificial
  Probe
agtagtagactacacaacagccaag

SEQ ID NO: 196923 - DNA, 25 bp, Artificial
  Probe
ttcaagatacggactatagagctag

SEQ ID NO: 196924 - DNA, 25 bp, Artificial
  Probe
ttgcagattcccttggaattccatt

SEQ ID NO: 196925 - DNA, 25 bp, Artificial
  Probe
ttattacagaggagcccatggaatc

SEQ ID NO: 196926 - DNA, 25 bp, Artificial
  Probe
aagtccaatgttaaaatccagagca

SEQ ID NO: 196927 - DNA, 25 bp, Artificial
  Probe
agaacagtctttcatgaccatggca

SEQ ID NO: 196928 - DNA, 25 bp, Artificial
  Probe
tacgccagcgaaaatgtcaacaagt

SEQ ID NO: 196929 - DNA, 25 bp, Artificial
  Probe
aggaatttgcagattcccttggaat

SEQ ID NO: 196930 - DNA, 25 bp, Artificial
  Probe
taggtttgcggatgacacgtatacg

SEQ ID NO: 196931 - DNA, 25 bp, Artificial
  Probe
gttaaaatccagagcactccagtca

SEQ ID NO: 196932 - DNA, 25 bp, Artificial
  Probe
agtccaatgttaaaatccagagcac

SEQ ID NO: 196933 - DNA, 25 bp, Artificial
  Probe
agcccatggaatcatagttgtgtat

SEQ ID NO: 196934 - DNA, 25 bp, Artificial
  Probe
ctatagagctagacgggaaaacaat

SEQ ID NO: 196935 - DNA, 25 bp, Artificial
  Probe
agttattacagaggagcccatggaa

SEQ ID NO: 196936 - DNA, 25 bp, Artificial
  Probe
gcagattcccttggaattccatttt

SEQ ID NO: 196937 - DNA, 25 bp, Artificial
  Probe
ttggaattccatttttggaaaccag

SEQ ID NO: 196938 - DNA, 25 bp, Artificial
  Probe
tcaagatacggactatagagctaga

SEQ ID NO: 196939 - DNA, 25 bp, Artificial
  Probe
aacggtttcgaacaatcacctccag

SEQ ID NO: 196940 - DNA, 25 bp, Artificial
  Probe
atgttaaaatccagagcactccagt

SEQ ID NO: 196941 - DNA, 25 bp, Artificial
  Probe
acagaggagcccatggaatcatagt

SEQ ID NO: 196942 - DNA, 25 bp, Artificial
  Probe
cggactatagagctagacgggaaaa

SEQ ID NO: 196943 - DNA, 25 bp, Artificial
  Probe
caatcacctccagttattacagagg

SEQ ID NO: 196944 - DNA, 25 bp, Artificial
  Probe
tgtgacctgaccacaaagaaagtag

SEQ ID NO: 196945 - DNA, 25 bp, Artificial
  Probe
gttactcctgattggcgactctggg

SEQ ID NO: 196946 - DNA, 25 bp, Artificial
  Probe
ggtttcgaacaatcacctccagtta

SEQ ID NO: 196947 - DNA, 25 bp, Artificial
  Probe
gaatttgcagattcccttggaattc

SEQ ID NO: 196948 - DNA, 25 bp, Artificial
  Probe
gtccttcaataacgtgaaacagtgg

SEQ ID NO: 196949 - DNA, 25 bp, Artificial
  Probe
acagtctttcatgaccatggcagcg

SEQ ID NO: 196950 - DNA, 25 bp, Artificial
  Probe
ccatggcagcggagattaaaaagcg

SEQ ID NO: 196951 - DNA, 25 bp, Artificial
  Probe
atacggactatagagctagacggga

SEQ ID NO: 196952 - DNA, 25 bp, Artificial
  Probe
caaatgtgacctgaccacaaagaaa

SEQ ID NO: 196953 - DNA, 25 bp, Artificial
  Probe
caagttactcctgattggcgactct

SEQ ID NO: 196954 - DNA, 25 bp, Artificial
  Probe
gaaagtcttgccttctccttaggtt

SEQ ID NO: 196955 - DNA, 25 bp, Artificial
  Probe
tctccttaggtttgcggatgacacg

SEQ ID NO: 196956 - DNA, 25 bp, Artificial
  Probe
ggaaaccagtgctaagaacgaaaag

SEQ ID NO: 196957 - DNA, 25 bp, Artificial
  Probe
atgatgtgacagaccaggagtcctt

SEQ ID NO: 196958 - DNA, 25 bp, Artificial
  Probe
aaatccagagcactccagtcaagca

SEQ ID NO: 196959 - DNA, 25 bp, Artificial
  Probe
ctgaccacaaagaaagtagtagact

SEQ ID NO: 196960 - DNA, 25 bp, Artificial
  Probe
attcaagttactcctgattggcgac

SEQ ID NO: 196961 - DNA, 25 bp, Artificial
  Probe
atggattccgtgaaggaacaacacc

SEQ ID NO: 196962 - DNA, 25 bp, Artificial
  Probe
aacactaccgggactggtcggatga

SEQ ID NO: 196963 - DNA, 25 bp, Artificial
  Probe
ggactggtcggatgaggcacctaaa

SEQ ID NO: 196964 - DNA, 25 bp, Artificial
  Probe
tcggatgaggcacctaaagatcgtc

SEQ ID NO: 196965 - DNA, 25 bp, Artificial
  Probe
aactggagtgccaaggctaagaggc

SEQ ID NO: 196966 - DNA, 25 bp, Artificial
  Probe
cctaaacccaagagggcagctgttg

SEQ ID NO: 196967 - DNA, 25 bp, Artificial
  Probe
accgaagattcagacatggattccg

SEQ ID NO: 196968 - DNA, 25 bp, Artificial
  Probe
atcgtctaccgaagattcagacatg

SEQ ID NO: 196969 - DNA, 25 bp, Artificial
  Probe
actggtcggatgaggcacctaaaga

SEQ ID NO: 196970 - DNA, 25 bp, Artificial
  Probe
gtcggatgaggcacctaaagatcgt

SEQ ID NO: 196971 - DNA, 25 bp, Artificial
  Probe
tccaaggcctaccaccttcagaagt

SEQ ID NO: 196972 - DNA, 25 bp, Artificial
  Probe
gatgaggcacctaaagatcgtctac

SEQ ID NO: 196973 - DNA, 25 bp, Artificial
  Probe
acactaccgggactggtcggatgag

SEQ ID NO: 196974 - DNA, 25 bp, Artificial
  Probe
caccttcagaagtcgacctgtggca

SEQ ID NO: 196975 - DNA, 25 bp, Artificial
  Probe
taaagatcgtctaccgaagattcag

SEQ ID NO: 196976 - DNA, 25 bp, Artificial
  Probe
gtgccaaggctaagaggcgaaacac

SEQ ID NO: 196977 - DNA, 25 bp, Artificial
  Probe
attcagacatggattccgtgaagga

SEQ ID NO: 196978 - DNA, 25 bp, Artificial
  Probe
acctgtggcaaatgtggctaccctg

SEQ ID NO: 196979 - DNA, 25 bp, Artificial
  Probe
tcgccggtagaagcaagatgacgaa

SEQ ID NO: 196980 - DNA, 25 bp, Artificial
  Probe
cctaaagatcgtctaccgaagattc

SEQ ID NO: 196981 - DNA, 25 bp, Artificial
  Probe
gtataactggagtgccaaggctaag

SEQ ID NO: 196982 - DNA, 25 bp, Artificial
  Probe
cctgccaagcgcaagagaaagtata

SEQ ID NO: 196983 - DNA, 25 bp, Artificial
  Probe
aagtataactggagtgccaaggcta

SEQ ID NO: 196984 - DNA, 25 bp, Artificial
  Probe
tggcctcgccggtagaagcaagatg

SEQ ID NO: 196985 - DNA, 25 bp, Artificial
  Probe
ggcacctaaagatcgtctaccgaag

SEQ ID NO: 196986 - DNA, 25 bp, Artificial
  Probe
gcaataagacgcacacgctgtgccg

SEQ ID NO: 196987 - DNA, 25 bp, Artificial
  Probe
tcagacatggattccgtgaaggaac

SEQ ID NO: 196988 - DNA, 25 bp, Artificial
  Probe
cagaagtcgacctgtggcaaatgtg

SEQ ID NO: 196989 - DNA, 25 bp, Artificial
  Probe
ctcgccggtagaagcaagatgacga

SEQ ID NO: 196990 - DNA, 25 bp, Artificial
  Probe
tgccaagcgcaagagaaagtataac

SEQ ID NO: 196991 - DNA, 25 bp, Artificial
  Probe
gaaagcgtcgcaataagacgcacac

SEQ ID NO: 196992 - DNA, 25 bp, Artificial
  Probe
caataagacgcacacgctgtgccgc

SEQ ID NO: 196993 - DNA, 25 bp, Artificial
  Probe
agattcagacatggattccgtgaag

SEQ ID NO: 196994 - DNA, 25 bp, Artificial
  Probe
cgtcgcaataagacgcacacgctgt

SEQ ID NO: 196995 - DNA, 25 bp, Artificial
  Probe
tcgacctgtggcaaatgtggctacc

SEQ ID NO: 196996 - DNA, 25 bp, Artificial
  Probe
gaagtcgacctgtggcaaatgtggc

SEQ ID NO: 196997 - DNA, 25 bp, Artificial
  Probe
acatggattccgtgaaggaacaaca

SEQ ID NO: 196998 - DNA, 25 bp, Artificial
  Probe
ttccggtctctttggcctcgccggt

SEQ ID NO: 196999 - DNA, 25 bp, Artificial
  Probe
aagaggcgaaacactaccgggactg

SEQ ID NO: 197000 - DNA, 25 bp, Artificial
  Probe
ctttggaaagcgtcgcaataagacg

SEQ ID NO: 197001 - DNA, 25 bp, Artificial
  Probe
tgccaaggctaagaggcgaaacact

SEQ ID NO: 197002 - DNA, 25 bp, Artificial
  Probe
gaggcgaaacactaccgggactggt

SEQ ID NO: 197003 - DNA, 25 bp, Artificial
  Probe
cagttcatcttgaggatttcaatcg

SEQ ID NO: 197004 - DNA, 25 bp, Artificial
  Probe
gctaccctgccaagcgcaagagaaa

SEQ ID NO: 197005 - DNA, 25 bp, Artificial
  Probe
acacctaaacccaagagggcagctg

SEQ ID NO: 197006 - DNA, 25 bp, Artificial
  Probe
gtctctttggcctcgccggtagaag

SEQ ID NO: 197007 - DNA, 25 bp, Artificial
  Probe
ttacattgccatgaagactgacccc

SEQ ID NO: 197008 - DNA, 25 bp, Artificial
  Probe
tacattgccatgaagactgacccca

SEQ ID NO: 197009 - DNA, 25 bp, Artificial
  Probe
tctcgctgtttacattgccatgaag

SEQ ID NO: 197010 - DNA, 25 bp, Artificial
  Probe
ccaggcctgatgcagctactataaa

SEQ ID NO: 197011 - DNA, 25 bp, Artificial
  Probe
atcagaccgctctcgctgtttacat

SEQ ID NO: 197012 - DNA, 25 bp, Artificial
  Probe
catcgatcagaccgctctcgctgtt

SEQ ID NO: 197013 - DNA, 25 bp, Artificial
  Probe
accgctctcgctgtttacattgcca

SEQ ID NO: 197014 - DNA, 25 bp, Artificial
  Probe
acattgccatgaagactgaccccag

SEQ ID NO: 197015 - DNA, 25 bp, Artificial
  Probe
gaccccaggcctgatgcagctacta

SEQ ID NO: 197016 - DNA, 25 bp, Artificial
  Probe
ccccaggcctgatgcagctactata

SEQ ID NO: 197017 - DNA, 25 bp, Artificial
  Probe
atgaagactgaccccaggcctgatg

SEQ ID NO: 197018 - DNA, 25 bp, Artificial
  Probe
cattgccatgaagactgaccccagg

SEQ ID NO: 197019 - DNA, 25 bp, Artificial
  Probe
tttacattgccatgaagactgaccc

SEQ ID NO: 197020 - DNA, 25 bp, Artificial
  Probe
tcgctgtttacattgccatgaagac

SEQ ID NO: 197021 - DNA, 25 bp, Artificial
  Probe
gaagactgaccccaggcctgatgca

SEQ ID NO: 197022 - DNA, 25 bp, Artificial
  Probe
gtttacattgccatgaagactgacc

SEQ ID NO: 197023 - DNA, 25 bp, Artificial
  Probe
gatcagaccgctctcgctgtttaca

SEQ ID NO: 197024 - DNA, 25 bp, Artificial
  Probe
aagactgaccccaggcctgatgcag

SEQ ID NO: 197025 - DNA, 25 bp, Artificial
  Probe
atcgatcagaccgctctcgctgttt

SEQ ID NO: 197026 - DNA, 25 bp, Artificial
  Probe
tcgatcagaccgctctcgctgttta

SEQ ID NO: 197027 - DNA, 25 bp, Artificial
  Probe
ctctcgctgtttacattgccatgaa

SEQ ID NO: 197028 - DNA, 25 bp, Artificial
  Probe
ctcgctgtttacattgccatgaaga

SEQ ID NO: 197029 - DNA, 25 bp, Artificial
  Probe
attgccatgaagactgaccccaggc

SEQ ID NO: 197030 - DNA, 25 bp, Artificial
  Probe
tgaagactgaccccaggcctgatgc

SEQ ID NO: 197031 - DNA, 25 bp, Artificial
  Probe
accccaggcctgatgcagctactat

SEQ ID NO: 197032 - DNA, 25 bp, Artificial
  Probe
cgatcagaccgctctcgctgtttac

SEQ ID NO: 197033 - DNA, 25 bp, Artificial
  Probe
gctctcgctgtttacattgccatga

SEQ ID NO: 197034 - DNA, 25 bp, Artificial
  Probe
cagaccgctctcgctgtttacattg

SEQ ID NO: 197035 - DNA, 25 bp, Artificial
  Probe
ccatgaagactgaccccaggcctga

SEQ ID NO: 197036 - DNA, 25 bp, Artificial
  Probe
gaccgctctcgctgtttacattgcc

SEQ ID NO: 197037 - DNA, 25 bp, Artificial
  Probe
tcagaccgctctcgctgtttacatt

SEQ ID NO: 197038 - DNA, 25 bp, Artificial
  Probe
ctgtttacattgccatgaagactga

SEQ ID NO: 197039 - DNA, 25 bp, Artificial
  Probe
catgaagactgaccccaggcctgat

SEQ ID NO: 197040 - DNA, 25 bp, Artificial
  Probe
cgctctcgctgtttacattgccatg

SEQ ID NO: 197041 - DNA, 25 bp, Artificial
  Probe
cccaggcctgatgcagctactataa

SEQ ID NO: 197042 - DNA, 25 bp, Artificial
  Probe
gccatgaagactgaccccaggcctg

SEQ ID NO: 197043 - DNA, 25 bp, Artificial
  Probe
acatcgatcagaccgctctcgctgt

SEQ ID NO: 197044 - DNA, 25 bp, Artificial
  Probe
ttgccatgaagactgaccccaggcc

SEQ ID NO: 197045 - DNA, 25 bp, Artificial
  Probe
cgctgtttacattgccatgaagact

SEQ ID NO: 197046 - DNA, 25 bp, Artificial
  Probe
agaccgctctcgctgtttacattgc

SEQ ID NO: 197047 - DNA, 25 bp, Artificial
  Probe
ccgctctcgctgtttacattgccat

SEQ ID NO: 197048 - DNA, 25 bp, Artificial
  Probe
cacatcgatcagaccgctctcgctg

SEQ ID NO: 197049 - DNA, 25 bp, Artificial
  Probe
tgccatgaagactgaccccaggcct

SEQ ID NO: 197050 - DNA, 25 bp, Artificial
  Probe
gctgtttacattgccatgaagactg

SEQ ID NO: 197051 - DNA, 25 bp, Artificial
  Probe
tgtttacattgccatgaagactgac

SEQ ID NO: 197052 - DNA, 25 bp, Artificial
  Probe
caggctcttaaaagccctagcaact

SEQ ID NO: 197053 - DNA, 25 bp, Artificial
  Probe
gaaagataccaaatctcctgggttt

SEQ ID NO: 197054 - DNA, 25 bp, Artificial
  Probe
gcagcaagtaggaccctgacagggt

SEQ ID NO: 197055 - DNA, 25 bp, Artificial
  Probe
agactttgctataaccctgactttg

SEQ ID NO: 197056 - DNA, 25 bp, Artificial
  Probe
aagcccctcttcttgctgtttcctg

SEQ ID NO: 197057 - DNA, 25 bp, Artificial
  Probe
agcacttgtcactgcctctgtaacc

SEQ ID NO: 197058 - DNA, 25 bp, Artificial
  Probe
gtcatcaattcctgccaaacacagg

SEQ ID NO: 197059 - DNA, 25 bp, Artificial
  Probe
tggatagttggctcccaacatgtga

SEQ ID NO: 197060 - DNA, 25 bp, Artificial
  Probe
agccttaccagctctcattttttgg

SEQ ID NO: 197061 - DNA, 25 bp, Artificial
  Probe
gcagctttgaccaccgtagccaagc

SEQ ID NO: 197062 - DNA, 25 bp, Artificial
  Probe
gaggaaccaagtgtttgaggccacg

SEQ ID NO: 197063 - DNA, 25 bp, Artificial
  Probe
agacagtagattgctagcagctttg

SEQ ID NO: 197064 - DNA, 25 bp, Artificial
  Probe
attttgggcaggtgcaggctccccg

SEQ ID NO: 197065 - DNA, 25 bp, Artificial
  Probe
gggtttgccaagagccctaaggagc

SEQ ID NO: 197066 - DNA, 25 bp, Artificial
  Probe
tctgttcacaaagatggctatttgg

SEQ ID NO: 197067 - DNA, 25 bp, Artificial
  Probe
taccgctctttcttcctgctgctgt

SEQ ID NO: 197068 - DNA, 25 bp, Artificial
  Probe
ccagcacttgtcactgcctctgtaa

SEQ ID NO: 197069 - DNA, 25 bp, Artificial
  Probe
gctatttggggcagcaagtaggacc

SEQ ID NO: 197070 - DNA, 25 bp, Artificial
  Probe
acccctcgagctcatgtgattggat

SEQ ID NO: 197071 - DNA, 25 bp, Artificial
  Probe
ccaacatgtgattattttgggcagg

SEQ ID NO: 197072 - DNA, 25 bp, Artificial
  Probe
gagcgggcaggattcctgagcccca

SEQ ID NO: 197073 - DNA, 25 bp, Artificial
  Probe
ggtctatctggagacagtagattgc

SEQ ID NO: 197074 - DNA, 25 bp, Artificial
  Probe
accctgacagggtggctttaggaga

SEQ ID NO: 197075 - DNA, 25 bp, Artificial
  Probe
gcaaaatagccttctaaagttaaag

SEQ ID NO: 197076 - DNA, 25 bp, Artificial
  Probe
attattttgggcaggtgcaggctcc

SEQ ID NO: 197077 - DNA, 25 bp, Artificial
  Probe
gccttaccagctctcattttttggt

SEQ ID NO: 197078 - DNA, 25 bp, Artificial
  Probe
ggtcatcaattcctgccaaacacag

SEQ ID NO: 197079 - DNA, 25 bp, Artificial
  Probe
accaagtgtttgaggccacgtgcct

SEQ ID NO: 197080 - DNA, 25 bp, Artificial
  Probe
aggctccccggcagatggggtctat

SEQ ID NO: 197081 - DNA, 25 bp, Artificial
  Probe
caaagatggctatttggggcagcaa

SEQ ID NO: 197082 - DNA, 25 bp, Artificial
  Probe
cacaaagatggctatttggggcagc

SEQ ID NO: 197083 - DNA, 25 bp, Artificial
  Probe
aacacaggctcttaaaagccctagc

SEQ ID NO: 197084 - DNA, 25 bp, Artificial
  Probe
tatctggagacagtagattgctagc

SEQ ID NO: 197085 - DNA, 25 bp, Artificial
  Probe
acgatgttcttgagaggaaccaagt

SEQ ID NO: 197086 - DNA, 25 bp, Artificial
  Probe
ttcctgagccccagagccatgtttt

SEQ ID NO: 197087 - DNA, 25 bp, Artificial
  Probe
cagatggggtctatctggagacagt

SEQ ID NO: 197088 - DNA, 25 bp, Artificial
  Probe
ttcattgcttacgatgttcttgaga

SEQ ID NO: 197089 - DNA, 25 bp, Artificial
  Probe
tgcctggaatgatgcggctttactc

SEQ ID NO: 197090 - DNA, 25 bp, Artificial
  Probe
gctgtgtccccagcacttgtcactg

SEQ ID NO: 197091 - DNA, 25 bp, Artificial
  Probe
tcatgtgattggatagttggctccc

SEQ ID NO: 197092 - DNA, 25 bp, Artificial
  Probe
ctccccggcagatggggtctatctg

SEQ ID NO: 197093 - DNA, 25 bp, Artificial
  Probe
aggtgtgctgtgtccccagcacttg

SEQ ID NO: 197094 - DNA, 25 bp, Artificial
  Probe
cctgccaaacacaggctcttaaaag

SEQ ID NO: 197095 - DNA, 25 bp, Artificial
  Probe
gccccagagccatgttttcttcctt

SEQ ID NO: 197096 - DNA, 25 bp, Artificial
  Probe
ctcgagctcatgtgattggatagtt

SEQ ID NO: 197097 - DNA, 25 bp, Artificial
  Probe
ctgaagccagggtacctggagcaac

SEQ ID NO: 197098 - DNA, 25 bp, Artificial
  Probe
ccccaagttgggagcctattgctgt

SEQ ID NO: 197099 - DNA, 25 bp, Artificial
  Probe
catatggccggcttatgagagaaag

SEQ ID NO: 197100 - DNA, 25 bp, Artificial
  Probe
ctaagaaatgcctggccaggcccca

SEQ ID NO: 197101 - DNA, 25 bp, Artificial
  Probe
tatctggctgacgagattctgtggg

SEQ ID NO: 197102 - DNA, 25 bp, Artificial
  Probe
ggcagcgttttgtccccatcgtggc

SEQ ID NO: 197103 - DNA, 25 bp, Artificial
  Probe
agctaaggtctggaaggaagccagt

SEQ ID NO: 197104 - DNA, 25 bp, Artificial
  Probe
actccagccttctgcagagagagtg

SEQ ID NO: 197105 - DNA, 25 bp, Artificial
  Probe
gggacaagaccctccttggctcagc

SEQ ID NO: 197106 - DNA, 25 bp, Artificial
  Probe
ccgctgtgtgcctggggtgttacaa

SEQ ID NO: 197107 - DNA, 25 bp, Artificial
  Probe
cttgtcctgagttgcggtccctcag

SEQ ID NO: 197108 - DNA, 25 bp, Artificial
  Probe
gctaaagaatcctgccagccaggga

SEQ ID NO: 197109 - DNA, 25 bp, Artificial
  Probe
gctatagaaggttcaggggtcctaa

SEQ ID NO: 197110 - DNA, 25 bp, Artificial
  Probe
ttcaggggtcctaaagctaaggtct

SEQ ID NO: 197111 - DNA, 25 bp, Artificial
  Probe
caggactggcttaccctatgtccct

SEQ ID NO: 197112 - DNA, 25 bp, Artificial
  Probe
gttacaagatacttgtcactatgct

SEQ ID NO: 197113 - DNA, 25 bp, Artificial
  Probe
gggcagcgttttgtccccatcgtgg

SEQ ID NO: 197114 - DNA, 25 bp, Artificial
  Probe
tcttggtcctccacgattcatcctg

SEQ ID NO: 197115 - DNA, 25 bp, Artificial
  Probe
tcccgggctcagctcaggactggct

SEQ ID NO: 197116 - DNA, 25 bp, Artificial
  Probe
cactcacttaggtgggcacatggaa

SEQ ID NO: 197117 - DNA, 25 bp, Artificial
  Probe
tgccctgttttgtcccccggagagg

SEQ ID NO: 197118 - DNA, 25 bp, Artificial
  Probe
gaggatggccgctattctgtggact

SEQ ID NO: 197119 - DNA, 25 bp, Artificial
  Probe
cacagcccgccagcttgatgaggac

SEQ ID NO: 197120 - DNA, 25 bp, Artificial
  Probe
tggaaggaagccagtcttggtcctc

SEQ ID NO: 197121 - DNA, 25 bp, Artificial
  Probe
gaccgcagcctgctggatgccctga

SEQ ID NO: 197122 - DNA, 25 bp, Artificial
  Probe
gtggcaaaggccaagcccaagttta

SEQ ID NO: 197123 - DNA, 25 bp, Artificial
  Probe
ggaccgcagcctgctggatgccctg

SEQ ID NO: 197124 - DNA, 25 bp, Artificial
  Probe
agcttgatgaggaccgcagcctgct

SEQ ID NO: 197125 - DNA, 25 bp, Artificial
  Probe
catcttggaaggtgtggtagaaacc

SEQ ID NO: 197126 - DNA, 25 bp, Artificial
  Probe
tgcctggggtgttacaagatacttg

SEQ ID NO: 197127 - DNA, 25 bp, Artificial
  Probe
cgcacctcctatctggctgacgaga

SEQ ID NO: 197128 - DNA, 25 bp, Artificial
  Probe
cacgattcatcctgccacaagcagg

SEQ ID NO: 197129 - DNA, 25 bp, Artificial
  Probe
cagccctgttcgtgccacgctaaag

SEQ ID NO: 197130 - DNA, 25 bp, Artificial
  Probe
agtggggactgctgccctgttttgt

SEQ ID NO: 197131 - DNA, 25 bp, Artificial
  Probe
caagcccaagtttagcatctctccg

SEQ ID NO: 197132 - DNA, 25 bp, Artificial
  Probe
tggcaaaggccaagcccaagtttag

SEQ ID NO: 197133 - DNA, 25 bp, Artificial
  Probe
cccctcggccagatgagggtctggc

SEQ ID NO: 197134 - DNA, 25 bp, Artificial
  Probe
gactactccaaattcgggaacaccg

SEQ ID NO: 197135 - DNA, 25 bp, Artificial
  Probe
aggctatagaaggttcaggggtcct

SEQ ID NO: 197136 - DNA, 25 bp, Artificial
  Probe
ggcattgggcaaacactgagatacc

SEQ ID NO: 197137 - DNA, 25 bp, Artificial
  Probe
acctggagatcattgtcatcttgga

SEQ ID NO: 197138 - DNA, 25 bp, Artificial
  Probe
gtgtctctgtcctctacccttgact

SEQ ID NO: 197139 - DNA, 25 bp, Artificial
  Probe
ttgactccagccttctgcagagaga

SEQ ID NO: 197140 - DNA, 25 bp, Artificial
  Probe
cccactcacttaggtgggcacatgg

SEQ ID NO: 197141 - DNA, 25 bp, Artificial
  Probe
gcaggagcctgtaccgggttatttt

SEQ ID NO: 197142 - DNA, 25 bp, Artificial
  Probe
caagcaggcaggtaattgggcaaaa

SEQ ID NO: 197143 - DNA, 25 bp, Artificial
  Probe
aatgattggagaccttgatggtccc

SEQ ID NO: 197144 - DNA, 25 bp, Artificial
  Probe
aatttctggccactggacactgtgg

SEQ ID NO: 197145 - DNA, 25 bp, Artificial
  Probe
agagctataaaacaccgagaactct

SEQ ID NO: 197146 - DNA, 25 bp, Artificial
  Probe
taaccaactgtttagcaactcaggc

SEQ ID NO: 197147 - DNA, 25 bp, Artificial
  Probe
tctgcagttaagatcttcagttaat

SEQ ID NO: 197148 - DNA, 25 bp, Artificial
  Probe
gagcagcttttaccttattggacta

SEQ ID NO: 197149 - DNA, 25 bp, Artificial
  Probe
gtttagcaactcaggcatgactttg

SEQ ID NO: 197150 - DNA, 25 bp, Artificial
  Probe
ttcgaaagctttgcaacaatcgcat

SEQ ID NO: 197151 - DNA, 25 bp, Artificial
  Probe
gagctggaccccagcgctttggcca

SEQ ID NO: 197152 - DNA, 25 bp, Artificial
  Probe
ccgagaactcttgatgtgttgtgaa

SEQ ID NO: 197153 - DNA, 25 bp, Artificial
  Probe
acaccgagaactcttgatgtgttgt

SEQ ID NO: 197154 - DNA, 25 bp, Artificial
  Probe
actgtgggagcagcttttaccttat

SEQ ID NO: 197155 - DNA, 25 bp, Artificial
  Probe
tataaaacaccgagaactcttgatg

SEQ ID NO: 197156 - DNA, 25 bp, Artificial
  Probe
accgagaactcttgatgtgttgtga

SEQ ID NO: 197157 - DNA, 25 bp, Artificial
  Probe
ctgtttagcaactcaggcatgactt

SEQ ID NO: 197158 - DNA, 25 bp, Artificial
  Probe
gacactgtgggagcagcttttacct

SEQ ID NO: 197159 - DNA, 25 bp, Artificial
  Probe
gcaactcaggcatgactttgcattt

SEQ ID NO: 197160 - DNA, 25 bp, Artificial
  Probe
aagagctataaaacaccgagaactc

SEQ ID NO: 197161 - DNA, 25 bp, Artificial
  Probe
accaactgtttagcaactcaggcat

SEQ ID NO: 197162 - DNA, 25 bp, Artificial
  Probe
cactgtgggagcagcttttacctta

SEQ ID NO: 197163 - DNA, 25 bp, Artificial
  Probe
agcagctttttaacaagagaactca

SEQ ID NO: 197164 - DNA, 25 bp, Artificial
  Probe
gccactggacactgtgggagcagct

SEQ ID NO: 197165 - DNA, 25 bp, Artificial
  Probe
agcaactcaggcatgactttgcatt

SEQ ID NO: 197166 - DNA, 25 bp, Artificial
  Probe
caactcaggcatgactttgcatttt

SEQ ID NO: 197167 - DNA, 25 bp, Artificial
  Probe
ggacactgtgggagcagcttttacc

SEQ ID NO: 197168 - DNA, 25 bp, Artificial
  Probe
aaatttctggccactggacactgtg

SEQ ID NO: 197169 - DNA, 25 bp, Artificial
  Probe
ccttcgaaagctttgcaacaatcgc

SEQ ID NO: 197170 - DNA, 25 bp, Artificial
  Probe
tgggagcagcttttaccttattgga

SEQ ID NO: 197171 - DNA, 25 bp, Artificial
  Probe
gcagcttttaccttattggactatc

SEQ ID NO: 197172 - DNA, 25 bp, Artificial
  Probe
gactatctccccttaagtgggaagg

SEQ ID NO: 197173 - DNA, 25 bp, Artificial
  Probe
ctcaggcatgactttgcatttttct

SEQ ID NO: 197174 - DNA, 25 bp, Artificial
  Probe
ctttcatagaaatttctggccactg

SEQ ID NO: 197175 - DNA, 25 bp, Artificial
  Probe
tgtgggagcagcttttaccttattg

SEQ ID NO: 197176 - DNA, 25 bp, Artificial
  Probe
gggagcagcttttaccttattggac

SEQ ID NO: 197177 - DNA, 25 bp, Artificial
  Probe
ttctggccactggacactgtgggag

SEQ ID NO: 197178 - DNA, 25 bp, Artificial
  Probe
actgtttagcaactcaggcatgact

SEQ ID NO: 197179 - DNA, 25 bp, Artificial
  Probe
catagaaatttctggccactggaca

SEQ ID NO: 197180 - DNA, 25 bp, Artificial
  Probe
ttaaccaactgtttagcaactcagg

SEQ ID NO: 197181 - DNA, 25 bp, Artificial
  Probe
ccaactgtttagcaactcaggcatg

SEQ ID NO: 197182 - DNA, 25 bp, Artificial
  Probe
tttctggccactggacactgtggga

SEQ ID NO: 197183 - DNA, 25 bp, Artificial
  Probe
actcaggcatgactttgcatttttc

SEQ ID NO: 197184 - DNA, 25 bp, Artificial
  Probe
ttattggactatctccccttaagtg

SEQ ID NO: 197185 - DNA, 25 bp, Artificial
  Probe
aactgtttagcaactcaggcatgac

SEQ ID NO: 197186 - DNA, 25 bp, Artificial
  Probe
gagctataaaacaccgagaactctt

SEQ ID NO: 197187 - DNA, 25 bp, Artificial
  Probe
ctggccactggacactgtgggagca

SEQ ID NO: 197188 - DNA, 25 bp, Artificial
  Probe
tattggactatctccccttaagtgg

SEQ ID NO: 197189 - DNA, 25 bp, Artificial
  Probe
ttcatagaaatttctggccactgga

SEQ ID NO: 197190 - DNA, 25 bp, Artificial
  Probe
tcttcggtgggatcccctcttgggt

SEQ ID NO: 197191 - DNA, 25 bp, Artificial
  Probe
cactgcccatgtcatccagcagtgg

SEQ ID NO: 197192 - DNA, 25 bp, Artificial
  Probe
cccatcataggtcaccctgatgcag

SEQ ID NO: 197193 - DNA, 25 bp, Artificial
  Probe
cttgggtcccccaatttgtcatcct

SEQ ID NO: 197194 - DNA, 25 bp, Artificial
  Probe
atttggaacattggacagaaactca

SEQ ID NO: 197195 - DNA, 25 bp, Artificial
  Probe
tgctggccacgcacccacagagaaa

SEQ ID NO: 197196 - DNA, 25 bp, Artificial
  Probe
cagggcggctggaggtttacctcac

SEQ ID NO: 197197 - DNA, 25 bp, Artificial
  Probe
tgtgtgtcagccagccatggcacag

SEQ ID NO: 197198 - DNA, 25 bp, Artificial
  Probe
cccatcttaccctcaggaggtctgg

SEQ ID NO: 197199 - DNA, 25 bp, Artificial
  Probe
ggccctccatcttgttttgtctctt

SEQ ID NO: 197200 - DNA, 25 bp, Artificial
  Probe
ctttaaagccttcagagccaggaga

SEQ ID NO: 197201 - DNA, 25 bp, Artificial
  Probe
ggcagtgtcccctcaggtgttagga

SEQ ID NO: 197202 - DNA, 25 bp, Artificial
  Probe
tctggtgagccgtagcagccactcc

SEQ ID NO: 197203 - DNA, 25 bp, Artificial
  Probe
acagggcggctggaggtttacctca

SEQ ID NO: 197204 - DNA, 25 bp, Artificial
  Probe
tcagagccaggagaactgtgtacat

SEQ ID NO: 197205 - DNA, 25 bp, Artificial
  Probe
ctacagacctcctgggggcaaggtg

SEQ ID NO: 197206 - DNA, 25 bp, Artificial
  Probe
gaggcaccctaaattacctgcccat

SEQ ID NO: 197207 - DNA, 25 bp, Artificial
  Probe
aggccacaaagatggggccccagct

SEQ ID NO: 197208 - DNA, 25 bp, Artificial
  Probe
tctagaggcctgaggcttctgggcc

SEQ ID NO: 197209 - DNA, 25 bp, Artificial
  Probe
tccccagaagttctgaggagtggag

SEQ ID NO: 197210 - DNA, 25 bp, Artificial
  Probe
gttttcaggggcatttgctgaccat

SEQ ID NO: 197211 - DNA, 25 bp, Artificial
  Probe
tatgaattggcctggtacccaaaat

SEQ ID NO: 197212 - DNA, 25 bp, Artificial
  Probe
agtccttttaacatgcattttctgg

SEQ ID NO: 197213 - DNA, 25 bp, Artificial
  Probe
ggctagagccatcaacaccggcttc

SEQ ID NO: 197214 - DNA, 25 bp, Artificial
  Probe
gcattttctggcaaaatccaaagct

SEQ ID NO: 197215 - DNA, 25 bp, Artificial
  Probe
ttgtctcttccctactgtcttcggt

SEQ ID NO: 197216 - DNA, 25 bp, Artificial
  Probe
gtcatccagcagtggccccgggtat

SEQ ID NO: 197217 - DNA, 25 bp, Artificial
  Probe
tgtttttaacctgttaacgcttgca

SEQ ID NO: 197218 - DNA, 25 bp, Artificial
  Probe
tgagaaggccgctacctggcctgac

SEQ ID NO: 197219 - DNA, 25 bp, Artificial
  Probe
caacagtcctactagtaatctagag

SEQ ID NO: 197220 - DNA, 25 bp, Artificial
  Probe
gcttctgggcccaggtgacaggact

SEQ ID NO: 197221 - DNA, 25 bp, Artificial
  Probe
ttttatctgtctctatcgcttggcc

SEQ ID NO: 197222 - DNA, 25 bp, Artificial
  Probe
ctccacggtgcctaggactgcggcg

SEQ ID NO: 197223 - DNA, 25 bp, Artificial
  Probe
tggcaaaatccaaagcttgggtttt

SEQ ID NO: 197224 - DNA, 25 bp, Artificial
  Probe
ggagcaagtggctgccttctgagca

SEQ ID NO: 197225 - DNA, 25 bp, Artificial
  Probe
ctagtgtggccctccatcttgtttt

SEQ ID NO: 197226 - DNA, 25 bp, Artificial
  Probe
ggtatttgccccaactcagtccttt

SEQ ID NO: 197227 - DNA, 25 bp, Artificial
  Probe
gttaacgcttgcaaacctaataaag

SEQ ID NO: 197228 - DNA, 25 bp, Artificial
  Probe
atatgtcacctgtgccactgcccat

SEQ ID NO: 197229 - DNA, 25 bp, Artificial
  Probe
gcccaggtgacaggactggcaccac

SEQ ID NO: 197230 - DNA, 25 bp, Artificial
  Probe
gtctctatcgcttggcctgagttgg

SEQ ID NO: 197231 - DNA, 25 bp, Artificial
  Probe
taggtcaccctgatgcaggcacctc

SEQ ID NO: 197232 - DNA, 25 bp, Artificial
  Probe
actagagaggttccatcaggcggga

SEQ ID NO: 197233 - DNA, 25 bp, Artificial
  Probe
gtacccaaaatatctcgaggcaccc

SEQ ID NO: 197234 - DNA, 25 bp, Artificial
  Probe
agtggctgccttctgagcacttggg

SEQ ID NO: 197235 - DNA, 25 bp, Artificial
  Probe
ccagtgttaatatgcctcgtgggat

SEQ ID NO: 197236 - DNA, 25 bp, Artificial
  Probe
tggacataaccttccctggtaccag

SEQ ID NO: 197237 - DNA, 25 bp, Artificial
  Probe
agaatgacctcctgggtcacccaaa

SEQ ID NO: 197238 - DNA, 25 bp, Artificial
  Probe
tttgatggcaaaaccccagcaacat

SEQ ID NO: 197239 - DNA, 25 bp, Artificial
  Probe
cacatggtggccaaaggagcagctg

SEQ ID NO: 197240 - DNA, 25 bp, Artificial
  Probe
cttctggattgagtttatcatgcgc

SEQ ID NO: 197241 - DNA, 25 bp, Artificial
  Probe
ttatcatgcgccacaaaggggccaa

SEQ ID NO: 197242 - DNA, 25 bp, Artificial
  Probe
ctgtttcattgaatatcaggacaat

SEQ ID NO: 197243 - DNA, 25 bp, Artificial
  Probe
accagcctatgaagcccctggacag

SEQ ID NO: 197244 - DNA, 25 bp, Artificial
  Probe
ctgtttggagatcaacctgataata

SEQ ID NO: 197245 - DNA, 25 bp, Artificial
  Probe
gaagtcatagacaatccgttctata

SEQ ID NO: 197246 - DNA, 25 bp, Artificial
  Probe
caacctgataatattgcccacatgg

SEQ ID NO: 197247 - DNA, 25 bp, Artificial
  Probe
tggtggagccaatggcctctatgag

SEQ ID NO: 197248 - DNA, 25 bp, Artificial
  Probe
tcagtgcactggaggaagtcataga

SEQ ID NO: 197249 - DNA, 25 bp, Artificial
  Probe
tcccgcagaatgacctcctgggtca

SEQ ID NO: 197250 - DNA, 25 bp, Artificial
  Probe
catgcgccacaaaggggccaagcac

SEQ ID NO: 197251 - DNA, 25 bp, Artificial
  Probe
attgagtttatcatgcgccacaaag

SEQ ID NO: 197252 - DNA, 25 bp, Artificial
  Probe
tctacaagtggctcccgcagaatga

SEQ ID NO: 197253 - DNA, 25 bp, Artificial
  Probe
ttgagtttatcatgcgccacaaagg

SEQ ID NO: 197254 - DNA, 25 bp, Artificial
  Probe
tctctggatgtgattggattcctgc

SEQ ID NO: 197255 - DNA, 25 bp, Artificial
  Probe
tactgtaaaatgtctcttgttcatg

SEQ ID NO: 197256 - DNA, 25 bp, Artificial
  Probe
gctcttactgtaaaatgtctcttgt

SEQ ID NO: 197257 - DNA, 25 bp, Artificial
  Probe
gcaaaaccccagcaacattaggacc

SEQ ID NO: 197258 - DNA, 25 bp, Artificial
  Probe
atgtgattggattcctgctcacctg

SEQ ID NO: 197259 - DNA, 25 bp, Artificial
  Probe
ttcaccatgaccagcctatgaagcc

SEQ ID NO: 197260 - DNA, 25 bp, Artificial
  Probe
cagcaacattaggacccaataccag

SEQ ID NO: 197261 - DNA, 25 bp, Artificial
  Probe
aaaccaaagcctttgtaactcatgg

SEQ ID NO: 197262 - DNA, 25 bp, Artificial
  Probe
gagatcaacctgataatattgccca

SEQ ID NO: 197263 - DNA, 25 bp, Artificial
  Probe
tgttatgttgttgtcaaccattcac

SEQ ID NO: 197264 - DNA, 25 bp, Artificial
  Probe
gttcatgtaccgattctttgtaaag

SEQ ID NO: 197265 - DNA, 25 bp, Artificial
  Probe
cacaaaggggccaagcacctgagac

SEQ ID NO: 197266 - DNA, 25 bp, Artificial
  Probe
gttgtcaaccattcaccatgaccag

SEQ ID NO: 197267 - DNA, 25 bp, Artificial
  Probe
tggcaaaaccccagcaacattagga

SEQ ID NO: 197268 - DNA, 25 bp, Artificial
  Probe
ctcttgttcatgtaccgattctttg

SEQ ID NO: 197269 - DNA, 25 bp, Artificial
  Probe
acctgataatattgcccacatggtg

SEQ ID NO: 197270 - DNA, 25 bp, Artificial
  Probe
ataatattgcccacatggtggccaa

SEQ ID NO: 197271 - DNA, 25 bp, Artificial
  Probe
ctatgaagcccctggacagagctgt

SEQ ID NO: 197272 - DNA, 25 bp, Artificial
  Probe
tggagatcaacctgataatattgcc

SEQ ID NO: 197273 - DNA, 25 bp, Artificial
  Probe
cacctgagaccacttggacataacc

SEQ ID NO: 197274 - DNA, 25 bp, Artificial
  Probe
cattcaccatgaccagcctatgaag

SEQ ID NO: 197275 - DNA, 25 bp, Artificial
  Probe
aaagttagattttctcagtgcactg

SEQ ID NO: 197276 - DNA, 25 bp, Artificial
  Probe
cctggtaccagtaccactctctgga

SEQ ID NO: 197277 - DNA, 25 bp, Artificial
  Probe
agtggctcccgcagaatgacctcct

SEQ ID NO: 197278 - DNA, 25 bp, Artificial
  Probe
ttgcccacatggtggccaaaggagc

SEQ ID NO: 197279 - DNA, 25 bp, Artificial
  Probe
gagccaatggcctctatgaggcaat

SEQ ID NO: 197280 - DNA, 25 bp, Artificial
  Probe
catgaccagcctatgaagcccctgg

SEQ ID NO: 197281 - DNA, 25 bp, Artificial
  Probe
gagaccacttggacataaccttccc

SEQ ID NO: 197282 - DNA, 25 bp, Artificial
  Probe
gcatttcaggttttcaacgcattcc

SEQ ID NO: 197283 - DNA, 25 bp, Artificial
  Probe
catttcaggttttcaacgcattccc

SEQ ID NO: 197284 - DNA, 25 bp, Artificial
  Probe
atcataagacacattcaaaacattt

SEQ ID NO: 197285 - DNA, 25 bp, Artificial
  Probe
gctactaaaggactgggcattagtt

SEQ ID NO: 197286 - DNA, 25 bp, Artificial
  Probe
agacacattcaaaacattttgctgc

SEQ ID NO: 197287 - DNA, 25 bp, Artificial
  Probe
aaaacattttgctgctattaagagt

SEQ ID NO: 197288 - DNA, 25 bp, Artificial
  Probe
tgcatttcaggttttcaacgcattc

SEQ ID NO: 197289 - DNA, 25 bp, Artificial
  Probe
tcctgcatttcaggttttcaacgca

SEQ ID NO: 197290 - DNA, 25 bp, Artificial
  Probe
ttttgctgctattaagagttacctt

SEQ ID NO: 197291 - DNA, 25 bp, Artificial
  Probe
tttgctgctattaagagttaccttt

SEQ ID NO: 197292 - DNA, 25 bp, Artificial
  Probe
aaatcataagacacattcaaaacat

SEQ ID NO: 197293 - DNA, 25 bp, Artificial
  Probe
actcctgcatttcaggttttcaacg

SEQ ID NO: 197294 - DNA, 25 bp, Artificial
  Probe
tttcaacgcattccctattcttctg

SEQ ID NO: 197295 - DNA, 25 bp, Artificial
  Probe
tcaggttttcaacgcattccctatt

SEQ ID NO: 197296 - DNA, 25 bp, Artificial
  Probe
aacattttgctgctattaagagtta

SEQ ID NO: 197297 - DNA, 25 bp, Artificial
  Probe
tgtgagcactcctgcatttcaggtt

SEQ ID NO: 197298 - DNA, 25 bp, Artificial
  Probe
gcattccctattcttctggattatt

SEQ ID NO: 197299 - DNA, 25 bp, Artificial
  Probe
attgtgagcactcctgcatttcagg

SEQ ID NO: 197300 - DNA, 25 bp, Artificial
  Probe
ctgcatttcaggttttcaacgcatt

SEQ ID NO: 197301 - DNA, 25 bp, Artificial
  Probe
attttgctgctattaagagttacct

SEQ ID NO: 197302 - DNA, 25 bp, Artificial
  Probe
acacattcaaaacattttgctgcta

SEQ ID NO: 197303 - DNA, 25 bp, Artificial
  Probe
aattgtgagcactcctgcatttcag

SEQ ID NO: 197304 - DNA, 25 bp, Artificial
  Probe
gtgagcactcctgcatttcaggttt

SEQ ID NO: 197305 - DNA, 25 bp, Artificial
  Probe
tcaacgcattccctattcttctgga

SEQ ID NO: 197306 - DNA, 25 bp, Artificial
  Probe
aggttttcaacgcattccctattct

SEQ ID NO: 197307 - DNA, 25 bp, Artificial
  Probe
aaaattgtgagcactcctgcatttc

SEQ ID NO: 197308 - DNA, 25 bp, Artificial
  Probe
acattttgctgctattaagagttac

SEQ ID NO: 197309 - DNA, 25 bp, Artificial
  Probe
cattttgctgctattaagagttacc

SEQ ID NO: 197310 - DNA, 25 bp, Artificial
  Probe
ctcctgcatttcaggttttcaacgc

SEQ ID NO: 197311 - DNA, 25 bp, Artificial
  Probe
cacattcaaaacattttgctgctat

SEQ ID NO: 197312 - DNA, 25 bp, Artificial
  Probe
aacgcattccctattcttctggatt

SEQ ID NO: 197313 - DNA, 25 bp, Artificial
  Probe
gagcactcctgcatttcaggttttc

SEQ ID NO: 197314 - DNA, 25 bp, Artificial
  Probe
gttttcaacgcattccctattcttc

SEQ ID NO: 197315 - DNA, 25 bp, Artificial
  Probe
acattcaaaacattttgctgctatt

SEQ ID NO: 197316 - DNA, 25 bp, Artificial
  Probe
ttgtgagcactcctgcatttcaggt

SEQ ID NO: 197317 - DNA, 25 bp, Artificial
  Probe
tgagcactcctgcatttcaggtttt

SEQ ID NO: 197318 - DNA, 25 bp, Artificial
  Probe
gaaatcataagacacattcaaaaca

SEQ ID NO: 197319 - DNA, 25 bp, Artificial
  Probe
ctactaaaggactgggcattagttt

SEQ ID NO: 197320 - DNA, 25 bp, Artificial
  Probe
ggctactaaaggactgggcattagt

SEQ ID NO: 197321 - DNA, 25 bp, Artificial
  Probe
attcaaaacattttgctgctattaa

SEQ ID NO: 197322 - DNA, 25 bp, Artificial
  Probe
aaattgtgagcactcctgcatttca

SEQ ID NO: 197323 - DNA, 25 bp, Artificial
  Probe
atttcaggttttcaacgcattccct

SEQ ID NO: 197324 - DNA, 25 bp, Artificial
  Probe
tttcaggttttcaacgcattcccta

SEQ ID NO: 197325 - DNA, 25 bp, Artificial
  Probe
cactcctgcatttcaggttttcaac

SEQ ID NO: 197326 - DNA, 25 bp, Artificial
  Probe
aatcataagacacattcaaaacatt

SEQ ID NO: 197327 - DNA, 25 bp, Artificial
  Probe
ataagacacattcaaaacattttgc

SEQ ID NO: 197328 - DNA, 25 bp, Artificial
  Probe
tggagcccctcaagttgaggaagag

SEQ ID NO: 197329 - DNA, 25 bp, Artificial
  Probe
ccctctggatagagaggaagcaggt

SEQ ID NO: 197330 - DNA, 25 bp, Artificial
  Probe
aggtgacagtttatccccatcacct

SEQ ID NO: 197331 - DNA, 25 bp, Artificial
  Probe
ccatcacctgggaccgtagtggaca

SEQ ID NO: 197332 - DNA, 25 bp, Artificial
  Probe
tctccccaagttctggactcttctg

SEQ ID NO: 197333 - DNA, 25 bp, Artificial
  Probe
cccctctggcactagatggacttgg

SEQ ID NO: 197334 - DNA, 25 bp, Artificial
  Probe
cctcttgtcccctgtggaatgtctg

SEQ ID NO: 197335 - DNA, 25 bp, Artificial
  Probe
ccctgaacctgaagaacctcctgga

SEQ ID NO: 197336 - DNA, 25 bp, Artificial
  Probe
agatcctcagatagggcaggcccag

SEQ ID NO: 197337 - DNA, 25 bp, Artificial
  Probe
agagatcttagctctttgctctccc

SEQ ID NO: 197338 - DNA, 25 bp, Artificial
  Probe
tgccagacccctgaacctgaagaac

SEQ ID NO: 197339 - DNA, 25 bp, Artificial
  Probe
tgagctgctgaggatgactgagatc

SEQ ID NO: 197340 - DNA, 25 bp, Artificial
  Probe
accgtagtggacaggaggcccctgc

SEQ ID NO: 197341 - DNA, 25 bp, Artificial
  Probe
agtccatgtgggagattgtgacctt

SEQ ID NO: 197342 - DNA, 25 bp, Artificial
  Probe
gaagattgtacactgcagctgccaa

SEQ ID NO: 197343 - DNA, 25 bp, Artificial
  Probe
tcccctttgcaggaggatctaggta

SEQ ID NO: 197344 - DNA, 25 bp, Artificial
  Probe
ttatccccatcacctgggaccgtag

SEQ ID NO: 197345 - DNA, 25 bp, Artificial
  Probe
agctgccaagcctgcggcaaggaac

SEQ ID NO: 197346 - DNA, 25 bp, Artificial
  Probe
gattgtgaccttggagtgccccggc

SEQ ID NO: 197347 - DNA, 25 bp, Artificial
  Probe
tggagccaagctgcacgatttaata

SEQ ID NO: 197348 - DNA, 25 bp, Artificial
  Probe
ggcaggaccctgctgactcaggtgc

SEQ ID NO: 197349 - DNA, 25 bp, Artificial
  Probe
cctggttgccatggagatctgaagg

SEQ ID NO: 197350 - DNA, 25 bp, Artificial
  Probe
ggctggtctttctgaaagaggtgac

SEQ ID NO: 197351 - DNA, 25 bp, Artificial
  Probe
gcatgccggcccagtccatgtggga

SEQ ID NO: 197352 - DNA, 25 bp, Artificial
  Probe
gtccatgtgggagattgtgaccttg

SEQ ID NO: 197353 - DNA, 25 bp, Artificial
  Probe
tagggcaggcccaggtcaggaccca

SEQ ID NO: 197354 - DNA, 25 bp, Artificial
  Probe
ctggtctttctgaaagaggtgacag

SEQ ID NO: 197355 - DNA, 25 bp, Artificial
  Probe
tgaagatgggccaggctcccagcca

SEQ ID NO: 197356 - DNA, 25 bp, Artificial
  Probe
gggctggagccaagctgcacgattt

SEQ ID NO: 197357 - DNA, 25 bp, Artificial
  Probe
tgaaaacagctgcaaccggtcctgc

SEQ ID NO: 197358 - DNA, 25 bp, Artificial
  Probe
tgcactgtgactcctgcatgccggc

SEQ ID NO: 197359 - DNA, 25 bp, Artificial
  Probe
agcagacatctttgggacttttctt

SEQ ID NO: 197360 - DNA, 25 bp, Artificial
  Probe
tccctccagagatcttagctctttg

SEQ ID NO: 197361 - DNA, 25 bp, Artificial
  Probe
aggtcaggacccagacaacggatgg

SEQ ID NO: 197362 - DNA, 25 bp, Artificial
  Probe
ctacatgcagggtgaagatgggcca

SEQ ID NO: 197363 - DNA, 25 bp, Artificial
  Probe
tcccctgtggaatgtctggtcccac

SEQ ID NO: 197364 - DNA, 25 bp, Artificial
  Probe
ggtgacagtttatccccatcacctg

SEQ ID NO: 197365 - DNA, 25 bp, Artificial
  Probe
cttctggagaggagccctctggata

SEQ ID NO: 197366 - DNA, 25 bp, Artificial
  Probe
gtgaagtgtggtctttcctttcagc

SEQ ID NO: 197367 - DNA, 25 bp, Artificial
  Probe
tgcaaccggtcctgccgtccttggg

SEQ ID NO: 197368 - DNA, 25 bp, Artificial
  Probe
gagccctctggatagagaggaagca

SEQ ID NO: 197369 - DNA, 25 bp, Artificial
  Probe
gggtatcatgtcagcatcccctttg

SEQ ID NO: 197370 - DNA, 25 bp, Artificial
  Probe
aggaagcagacatctttgggacttt

SEQ ID NO: 197371 - DNA, 25 bp, Artificial
  Probe
gccggcccagtccatgtgggagatt

SEQ ID NO: 197372 - DNA, 25 bp, Artificial
  Probe
ggagattgtgaccttggagtgcccc

SEQ ID NO: 197373 - DNA, 25 bp, Artificial
  Probe
ccagagtgtcactgaagaagaaaga

SEQ ID NO: 197374 - DNA, 25 bp, Artificial
  Probe
aaagcaatgaaacacctctttaagg

SEQ ID NO: 197375 - DNA, 25 bp, Artificial
  Probe
tgaaacacctctttaaggaaagaga

SEQ ID NO: 197376 - DNA, 25 bp, Artificial
  Probe
agattatttggattctcctacttgg

SEQ ID NO: 197377 - DNA, 25 bp, Artificial
  Probe
ctattatggggcattcattgacaga

SEQ ID NO: 197378 - DNA, 25 bp, Artificial
  Probe
cattcattgacagaacgtgtattaa

SEQ ID NO: 197379 - DNA, 25 bp, Artificial
  Probe
cagatatctgtagacactgtatttt

SEQ ID NO: 197380 - DNA, 25 bp, Artificial
  Probe
atgtgagatatctctgtctatctct

SEQ ID NO: 197381 - DNA, 25 bp, Artificial
  Probe
cacctctttaaggaaagagaaagat

SEQ ID NO: 197382 - DNA, 25 bp, Artificial
  Probe
tgttgctgtgttttcaaataccccc

SEQ ID NO: 197383 - DNA, 25 bp, Artificial
  Probe
acagttcacagatgaaggaaaccca

SEQ ID NO: 197384 - DNA, 25 bp, Artificial
  Probe
acgtggtgcatgtaggctatataac

SEQ ID NO: 197385 - DNA, 25 bp, Artificial
  Probe
cttctgtgataggtgacttcatgat

SEQ ID NO: 197386 - DNA, 25 bp, Artificial
  Probe
aagacagttcacagatgaaggaaac

SEQ ID NO: 197387 - DNA, 25 bp, Artificial
  Probe
aaatggcctattgaaatgcttttct

SEQ ID NO: 197388 - DNA, 25 bp, Artificial
  Probe
aagatacatctgttgctgtgttttc

SEQ ID NO: 197389 - DNA, 25 bp, Artificial
  Probe
ctgtattttcttgtgtgatcagatc

SEQ ID NO: 197390 - DNA, 25 bp, Artificial
  Probe
tggtatccccggtaagtcaaatata

SEQ ID NO: 197391 - DNA, 25 bp, Artificial
  Probe
acactgtattttcttgtgtgatcag

SEQ ID NO: 197392 - DNA, 25 bp, Artificial
  Probe
tgtaggctatataactccagattat

SEQ ID NO: 197393 - DNA, 25 bp, Artificial
  Probe
tatataaacaggtattcgcttaagc

SEQ ID NO: 197394 - DNA, 25 bp, Artificial
  Probe
tgaaggaaacccagattctgtaaat

SEQ ID NO: 197395 - DNA, 25 bp, Artificial
  Probe
gagggattctagctccaatctatta

SEQ ID NO: 197396 - DNA, 25 bp, Artificial
  Probe
gtgagatatctctgtctatctctat

SEQ ID NO: 197397 - DNA, 25 bp, Artificial
  Probe
gggttctttcactgaaatttttcat

SEQ ID NO: 197398 - DNA, 25 bp, Artificial
  Probe
ctgtagacactgtattttcttgtgt

SEQ ID NO: 197399 - DNA, 25 bp, Artificial
  Probe
ggtgacttcatgatgtggcatattc

SEQ ID NO: 197400 - DNA, 25 bp, Artificial
  Probe
gctatataactccagattatttgga

SEQ ID NO: 197401 - DNA, 25 bp, Artificial
  Probe
tcgagcactaggagggattctagct

SEQ ID NO: 197402 - DNA, 25 bp, Artificial
  Probe
gtattaagtggtctgtcaccagctg

SEQ ID NO: 197403 - DNA, 25 bp, Artificial
  Probe
tccaatctattatggggcattcatt

SEQ ID NO: 197404 - DNA, 25 bp, Artificial
  Probe
gtaccttatgatgaacaaagcaatg

SEQ ID NO: 197405 - DNA, 25 bp, Artificial
  Probe
ctattcatgccagaagcttctgtga

SEQ ID NO: 197406 - DNA, 25 bp, Artificial
  Probe
tctgtagacactgtattttcttgtg

SEQ ID NO: 197407 - DNA, 25 bp, Artificial
  Probe
agagaacccttgttagggtatagct

SEQ ID NO: 197408 - DNA, 25 bp, Artificial
  Probe
atttgaatcgtactattcatgccag

SEQ ID NO: 197409 - DNA, 25 bp, Artificial
  Probe
tcctacttgggtttgaacttagctt

SEQ ID NO: 197410 - DNA, 25 bp, Artificial
  Probe
tactattgtgtaccttatgatgaac

SEQ ID NO: 197411 - DNA, 25 bp, Artificial
  Probe
cattcactgattattcgagcactag

SEQ ID NO: 197412 - DNA, 25 bp, Artificial
  Probe
ccttgttagggtatagctgtgcatt

SEQ ID NO: 197413 - DNA, 25 bp, Artificial
  Probe
accagctgtggaaaacgtggtgcat

SEQ ID NO: 197414 - DNA, 25 bp, Artificial
  Probe
ggtattcgcttaagcatttataact

SEQ ID NO: 197415 - DNA, 25 bp, Artificial
  Probe
ggtatccccggtaagtcaaatatat

SEQ ID NO: 197416 - DNA, 25 bp, Artificial
  Probe
atgccagaagcttctgtgataggtg

SEQ ID NO: 197417 - DNA, 25 bp, Artificial
  Probe
gaaggaaacccagattctgtaaata

SEQ ID NO: 197418 - DNA, 25 bp, Artificial
  Probe
acaggtattcgcttaagcatttata

SEQ ID NO: 197419 - DNA, 25 bp, Artificial
  Probe
catattctggtatccccggtaagtc

SEQ ID NO: 197420 - DNA, 25 bp, Artificial
  Probe
gtagcttttccatcgctgtattata

SEQ ID NO: 197421 - DNA, 25 bp, Artificial
  Probe
ttagtaacttaacaatctcttgagg

SEQ ID NO: 197422 - DNA, 25 bp, Artificial
  Probe
gctgcacctataaagtcccagcttg

SEQ ID NO: 197423 - DNA, 25 bp, Artificial
  Probe
cactcacatgaggagagcctctatg

SEQ ID NO: 197424 - DNA, 25 bp, Artificial
  Probe
cttgtcagtagacatgtacagtgtt

SEQ ID NO: 197425 - DNA, 25 bp, Artificial
  Probe
gaacgtgtggactcgcagagacccc

SEQ ID NO: 197426 - DNA, 25 bp, Artificial
  Probe
agagcaggggtcaatcccatctgtg

SEQ ID NO: 197427 - DNA, 25 bp, Artificial
  Probe
agcttgtcagtagacatgtacagtg

SEQ ID NO: 197428 - DNA, 25 bp, Artificial
  Probe
ttgtgagtgttttccatgtccaata

SEQ ID NO: 197429 - DNA, 25 bp, Artificial
  Probe
agtcccagcttgtcagtagacatgt

SEQ ID NO: 197430 - DNA, 25 bp, Artificial
  Probe
tataaagtcccagcttgtcagtaga

SEQ ID NO: 197431 - DNA, 25 bp, Artificial
  Probe
atcttgtacaaaagcaaaaactgga

SEQ ID NO: 197432 - DNA, 25 bp, Artificial
  Probe
taaagtcccagcttgtcagtagaca

SEQ ID NO: 197433 - DNA, 25 bp, Artificial
  Probe
gtcaatcccatctgtgtataagtta

SEQ ID NO: 197434 - DNA, 25 bp, Artificial
  Probe
tttaaacatcactcacatgaggaga

SEQ ID NO: 197435 - DNA, 25 bp, Artificial
  Probe
tatgagtaagaccttcctgactatt

SEQ ID NO: 197436 - DNA, 25 bp, Artificial
  Probe
aggttgtgtgcctactgtagctttt

SEQ ID NO: 197437 - DNA, 25 bp, Artificial
  Probe
agtgttttccatgtccaatagagcc

SEQ ID NO: 197438 - DNA, 25 bp, Artificial
  Probe
tgagtgttttccatgtccaatagag

SEQ ID NO: 197439 - DNA, 25 bp, Artificial
  Probe
acttaacaatctcttgagggctgca

SEQ ID NO: 197440 - DNA, 25 bp, Artificial
  Probe
tctcttgagggctgcacctataaag

SEQ ID NO: 197441 - DNA, 25 bp, Artificial
  Probe
ggaatgtagcctgaacgtgtggact

SEQ ID NO: 197442 - DNA, 25 bp, Artificial
  Probe
taaacatcactcacatgaggagagc

SEQ ID NO: 197443 - DNA, 25 bp, Artificial
  Probe
acacagtgcacatatgagtaagacc

SEQ ID NO: 197444 - DNA, 25 bp, Artificial
  Probe
taaggtggacacagtgcacatatga

SEQ ID NO: 197445 - DNA, 25 bp, Artificial
  Probe
tgctataggttgtgtgcctactgta

SEQ ID NO: 197446 - DNA, 25 bp, Artificial
  Probe
aatgtagcctgaacgtgtggactcg

SEQ ID NO: 197447 - DNA, 25 bp, Artificial
  Probe
acagtgcacatatgagtaagacctt

SEQ ID NO: 197448 - DNA, 25 bp, Artificial
  Probe
gagtaagaccttcctgactatttta

SEQ ID NO: 197449 - DNA, 25 bp, Artificial
  Probe
cctctatgctataggttgtgtgcct

SEQ ID NO: 197450 - DNA, 25 bp, Artificial
  Probe
gcacctataaagtcccagcttgtca

SEQ ID NO: 197451 - DNA, 25 bp, Artificial
  Probe
ttccatgtccaatagagcctaactg

SEQ ID NO: 197452 - DNA, 25 bp, Artificial
  Probe
atgaggagagcctctatgctatagg

SEQ ID NO: 197453 - DNA, 25 bp, Artificial
  Probe
tgtgcctactgtagcttttccatcg

SEQ ID NO: 197454 - DNA, 25 bp, Artificial
  Probe
ttgagggctgcacctataaagtccc

SEQ ID NO: 197455 - DNA, 25 bp, Artificial
  Probe
agcaggggtcaatcccatctgtgta

SEQ ID NO: 197456 - DNA, 25 bp, Artificial
  Probe
ctataggttgtgtgcctactgtagc

SEQ ID NO: 197457 - DNA, 25 bp, Artificial
  Probe
ttttaaacatcactcacatgaggag

SEQ ID NO: 197458 - DNA, 25 bp, Artificial
  Probe
gttttccatgtccaatagagcctaa

SEQ ID NO: 197459 - DNA, 25 bp, Artificial
  Probe
ggggtcaatcccatctgtgtataag

SEQ ID NO: 197460 - DNA, 25 bp, Artificial
  Probe
tactgtagcttttccatcgctgtat

SEQ ID NO: 197461 - DNA, 25 bp, Artificial
  Probe
taacaatctcttgagggctgcacct

SEQ ID NO: 197462 - DNA, 25 bp, Artificial
  Probe
tcacatgaggagagcctctatgcta

SEQ ID NO: 197463 - DNA, 25 bp, Artificial
  Probe
aacatcactcacatgaggagagcct

SEQ ID NO: 197464 - DNA, 25 bp, Artificial
  Probe
aggagagcctctatgctataggttg

SEQ ID NO: 197465 - DNA, 25 bp, Artificial
  Probe
catgtccaatagagcctaactgttt

SEQ ID NO: 197466 - DNA, 25 bp, Artificial
  Probe
gacagtattctgtttagccaataaa

SEQ ID NO: 197467 - DNA, 25 bp, Artificial
  Probe
gaattatcaactgtcaacgacagta

SEQ ID NO: 197468 - DNA, 25 bp, Artificial
  Probe
agccaaatcccttgtgtggctcctc

SEQ ID NO: 197469 - DNA, 25 bp, Artificial
  Probe
cctggcctttgctgggttgactgtg

SEQ ID NO: 197470 - DNA, 25 bp, Artificial
  Probe
actgtcaacgacagtattctgttta

SEQ ID NO: 197471 - DNA, 25 bp, Artificial
  Probe
acgggctcttggtcacacacaaagc

SEQ ID NO: 197472 - DNA, 25 bp, Artificial
  Probe
gggtcttgtaacattgcttttctaa

SEQ ID NO: 197473 - DNA, 25 bp, Artificial
  Probe
cacacggagcgtgaattatcaactg

SEQ ID NO: 197474 - DNA, 25 bp, Artificial
  Probe
ccatacctggcctttgctgggttga

SEQ ID NO: 197475 - DNA, 25 bp, Artificial
  Probe
ccacttggggagacacacggagcgt

SEQ ID NO: 197476 - DNA, 25 bp, Artificial
  Probe
gtcctctttttctgacccagccatg

SEQ ID NO: 197477 - DNA, 25 bp, Artificial
  Probe
atgtggtcctctttttctgacccag

SEQ ID NO: 197478 - DNA, 25 bp, Artificial
  Probe
cagccatgtcacaaagctgaggaac

SEQ ID NO: 197479 - DNA, 25 bp, Artificial
  Probe
tctgctggtgattgatgtggtcctc

SEQ ID NO: 197480 - DNA, 25 bp, Artificial
  Probe
acgacagtattctgtttagccaata

SEQ ID NO: 197481 - DNA, 25 bp, Artificial
  Probe
ttggtcacacacaaagccatacctg

SEQ ID NO: 197482 - DNA, 25 bp, Artificial
  Probe
ctgtttagccaataaaacagatctg

SEQ ID NO: 197483 - DNA, 25 bp, Artificial
  Probe
gtggtcctctttttctgacccagcc

SEQ ID NO: 197484 - DNA, 25 bp, Artificial
  Probe
accactgagccaaatcccttgtgtg

SEQ ID NO: 197485 - DNA, 25 bp, Artificial
  Probe
gaacaggccacttggggagacacac

SEQ ID NO: 197486 - DNA, 25 bp, Artificial
  Probe
ctgctggtgattgatgtggtcctct

SEQ ID NO: 197487 - DNA, 25 bp, Artificial
  Probe
tctgacccagccatgtcacaaagct

SEQ ID NO: 197488 - DNA, 25 bp, Artificial
  Probe
gctcttggtcacacacaaagccata

SEQ ID NO: 197489 - DNA, 25 bp, Artificial
  Probe
tgaattatcaactgtcaacgacagt

SEQ ID NO: 197490 - DNA, 25 bp, Artificial
  Probe
acacacggagcgtgaattatcaact

SEQ ID NO: 197491 - DNA, 25 bp, Artificial
  Probe
aggaacaggccacttggggagacac

SEQ ID NO: 197492 - DNA, 25 bp, Artificial
  Probe
cactgagccaaatcccttgtgtggc

SEQ ID NO: 197493 - DNA, 25 bp, Artificial
  Probe
agacaagacgtgacggtcctatttt

SEQ ID NO: 197494 - DNA, 25 bp, Artificial
  Probe
acacaaagccatacctggcctttgc

SEQ ID NO: 197495 - DNA, 25 bp, Artificial
  Probe
ttgccgagagacaagacgtgacggt

SEQ ID NO: 197496 - DNA, 25 bp, Artificial
  Probe
ggtcttgtaacattgcttttctaac

SEQ ID NO: 197497 - DNA, 25 bp, Artificial
  Probe
ggagacacacggagcgtgaattatc

SEQ ID NO: 197498 - DNA, 25 bp, Artificial
  Probe
caaagccatacctggcctttgctgg

SEQ ID NO: 197499 - DNA, 25 bp, Artificial
  Probe
aacagttgccgagagacaagacgtg

SEQ ID NO: 197500 - DNA, 25 bp, Artificial
  Probe
gcatctgctggtgattgatgtggtc

SEQ ID NO: 197501 - DNA, 25 bp, Artificial
  Probe
gagccaaatcccttgtgtggctcct

SEQ ID NO: 197502 - DNA, 25 bp, Artificial
  Probe
ggtcacacacaaagccatacctggc

SEQ ID NO: 197503 - DNA, 25 bp, Artificial
  Probe
cacacaaagccatacctggcctttg

SEQ ID NO: 197504 - DNA, 25 bp, Artificial
  Probe
gattgatgtggtcctctttttctga

SEQ ID NO: 197505 - DNA, 25 bp, Artificial
  Probe
cgtgaattatcaactgtcaacgaca

SEQ ID NO: 197506 - DNA, 25 bp, Artificial
  Probe
gagaccactggcatctgctggtgat

SEQ ID NO: 197507 - DNA, 25 bp, Artificial
  Probe
ctggcatctgctggtgattgatgtg

SEQ ID NO: 197508 - DNA, 25 bp, Artificial
  Probe
agttgccgagagacaagacgtgacg

SEQ ID NO: 197509 - DNA, 25 bp, Artificial
  Probe
tggagagaccactggcatctgctgg

SEQ ID NO: 197510 - DNA, 25 bp, Artificial
  Probe
tcacaaagctgaggaacaggccact

SEQ ID NO: 197511 - DNA, 25 bp, Artificial
  Probe
cgtggagagaccactggcatctgct

SEQ ID NO: 197512 - DNA, 25 bp, Artificial
  Probe
ggttagctggcatcctgctttagcc

SEQ ID NO: 197513 - DNA, 25 bp, Artificial
  Probe
aggcagacatcttgatagttcagat

SEQ ID NO: 197514 - DNA, 25 bp, Artificial
  Probe
ctaagaaactgctgagcccttggta

SEQ ID NO: 197515 - DNA, 25 bp, Artificial
  Probe
agacatcttgatagttcagatgggc

SEQ ID NO: 197516 - DNA, 25 bp, Artificial
  Probe
tagcctgagacttgccctaagaaac

SEQ ID NO: 197517 - DNA, 25 bp, Artificial
  Probe
ttgaacaaggcagacatcttgatag

SEQ ID NO: 197518 - DNA, 25 bp, Artificial
  Probe
agcacacttcaattggtgtctcgag

SEQ ID NO: 197519 - DNA, 25 bp, Artificial
  Probe
agacttgccctaagaaactgctgag

SEQ ID NO: 197520 - DNA, 25 bp, Artificial
  Probe
gctttaatgtactgttgccagggaa

SEQ ID NO: 197521 - DNA, 25 bp, Artificial
  Probe
acaaggcagacatcttgatagttca

SEQ ID NO: 197522 - DNA, 25 bp, Artificial
  Probe
ttagcacacttcaattggtgtctcg

SEQ ID NO: 197523 - DNA, 25 bp, Artificial
  Probe
tgagacttgccctaagaaactgctg

SEQ ID NO: 197524 - DNA, 25 bp, Artificial
  Probe
ccttggtaaacgtctacacagtaag

SEQ ID NO: 197525 - DNA, 25 bp, Artificial
  Probe
tgtactgttgccagggaaggctttt

SEQ ID NO: 197526 - DNA, 25 bp, Artificial
  Probe
tttagcctgagacttgccctaagaa

SEQ ID NO: 197527 - DNA, 25 bp, Artificial
  Probe
catcttgatagttcagatgggcttt

SEQ ID NO: 197528 - DNA, 25 bp, Artificial
  Probe
ttggtgtctcgagcaactttaacac

SEQ ID NO: 197529 - DNA, 25 bp, Artificial
  Probe
tgccctaagaaactgctgagccctt

SEQ ID NO: 197530 - DNA, 25 bp, Artificial
  Probe
actgctgagcccttggtaaacgtct

SEQ ID NO: 197531 - DNA, 25 bp, Artificial
  Probe
gaacaaggcagacatcttgatagtt

SEQ ID NO: 197532 - DNA, 25 bp, Artificial
  Probe
aatttttagcacacttcaattggtg

SEQ ID NO: 197533 - DNA, 25 bp, Artificial
  Probe
aacgtctacacagtaagtttttctg

SEQ ID NO: 197534 - DNA, 25 bp, Artificial
  Probe
caactttaacacattgaagatgagg

SEQ ID NO: 197535 - DNA, 25 bp, Artificial
  Probe
cctgctttagcctgagacttgccct

SEQ ID NO: 197536 - DNA, 25 bp, Artificial
  Probe
tcaattggtgtctcgagcaacttta

SEQ ID NO: 197537 - DNA, 25 bp, Artificial
  Probe
cgtctacacagtaagtttttctgtc

SEQ ID NO: 197538 - DNA, 25 bp, Artificial
  Probe
cacagtaagtttttctgtctgttgg

SEQ ID NO: 197539 - DNA, 25 bp, Artificial
  Probe
gcatcctgctttagcctgagacttg

SEQ ID NO: 197540 - DNA, 25 bp, Artificial
  Probe
ctcgagcaactttaacacattgaag

SEQ ID NO: 197541 - DNA, 25 bp, Artificial
  Probe
tgggctttaatgtactgttgccagg

SEQ ID NO: 197542 - DNA, 25 bp, Artificial
  Probe
tgttgccagggaaggctttttctgg

SEQ ID NO: 197543 - DNA, 25 bp, Artificial
  Probe
tggtaaacgtctacacagtaagttt

SEQ ID NO: 197544 - DNA, 25 bp, Artificial
  Probe
ctttaatgtactgttgccagggaag

SEQ ID NO: 197545 - DNA, 25 bp, Artificial
  Probe
ctacacagtaagtttttctgtctgt

SEQ ID NO: 197546 - DNA, 25 bp, Artificial
  Probe
tttataagtgcatgtctccaacttg

SEQ ID NO: 197547 - DNA, 25 bp, Artificial
  Probe
ctgttgccagggaaggctttttctg

SEQ ID NO: 197548 - DNA, 25 bp, Artificial
  Probe
gtctcgagcaactttaacacattga

SEQ ID NO: 197549 - DNA, 25 bp, Artificial
  Probe
aattggtgtctcgagcaactttaac

SEQ ID NO: 197550 - DNA, 25 bp, Artificial
  Probe
gcccttggtaaacgtctacacagta

SEQ ID NO: 197551 - DNA, 25 bp, Artificial
  Probe
tggttagctggcatcctgctttagc

SEQ ID NO: 197552 - DNA, 25 bp, Artificial
  Probe
cgagcaactttaacacattgaagat

SEQ ID NO: 197553 - DNA, 25 bp, Artificial
  Probe
ttaatgtactgttgccagggaaggc

SEQ ID NO: 197554 - DNA, 25 bp, Artificial
  Probe
gcagacatcttgatagttcagatgg

SEQ ID NO: 197555 - DNA, 25 bp, Artificial
  Probe
taagtgcatgtctccaacttgtaac

SEQ ID NO: 197556 - DNA, 25 bp, Artificial
  Probe
gctgagcccttggtaaacgtctaca

SEQ ID NO: 197557 - DNA, 25 bp, Artificial
  Probe
tgactggttagctggcatcctgctt

SEQ ID NO: 197558 - DNA, 25 bp, Artificial
  Probe
gatggctgctggtgcacgattctta

SEQ ID NO: 197559 - DNA, 25 bp, Artificial
  Probe
ctgccaccctgtgtacagttttttc

SEQ ID NO: 197560 - DNA, 25 bp, Artificial
  Probe
ttttctggctctcagggtgttggct

SEQ ID NO: 197561 - DNA, 25 bp, Artificial
  Probe
ggtgtttccttcctgcgaacacctc

SEQ ID NO: 197562 - DNA, 25 bp, Artificial
  Probe
ctcttgatggctgctggtgcacgat

SEQ ID NO: 197563 - DNA, 25 bp, Artificial
  Probe
gtgtttccttcctgcgaacacctca

SEQ ID NO: 197564 - DNA, 25 bp, Artificial
  Probe
atggtgtttccttcctgcgaacacc

SEQ ID NO: 197565 - DNA, 25 bp, Artificial
  Probe
gccaccctgtgtacagttttttcct

SEQ ID NO: 197566 - DNA, 25 bp, Artificial
  Probe
acagccttttatacggtaattgatt

SEQ ID NO: 197567 - DNA, 25 bp, Artificial
  Probe
cactgccaccctgtgtacagttttt

SEQ ID NO: 197568 - DNA, 25 bp, Artificial
  Probe
tttctggctctcagggtgttggcta

SEQ ID NO: 197569 - DNA, 25 bp, Artificial
  Probe
gttctttgcgtttaatctaagtagc

SEQ ID NO: 197570 - DNA, 25 bp, Artificial
  Probe
tacagccttttatacggtaattgat

SEQ ID NO: 197571 - DNA, 25 bp, Artificial
  Probe
aaatggtgtttccttcctgcgaaca

SEQ ID NO: 197572 - DNA, 25 bp, Artificial
  Probe
tcaagttactccttctctccggagt

SEQ ID NO: 197573 - DNA, 25 bp, Artificial
  Probe
gcactgccaccctgtgtacagtttt

SEQ ID NO: 197574 - DNA, 25 bp, Artificial
  Probe
ggcttttctggctctcagggtgttg

SEQ ID NO: 197575 - DNA, 25 bp, Artificial
  Probe
tggtgcacgattcttatcaagttac

SEQ ID NO: 197576 - DNA, 25 bp, Artificial
  Probe
actcttgatggctgctggtgcacga

SEQ ID NO: 197577 - DNA, 25 bp, Artificial
  Probe
tctctccggagttcagtttaaagtt

SEQ ID NO: 197578 - DNA, 25 bp, Artificial
  Probe
gctggtgcacgattcttatcaagtt

SEQ ID NO: 197579 - DNA, 25 bp, Artificial
  Probe
gttacagccttttatacggtaattg

SEQ ID NO: 197580 - DNA, 25 bp, Artificial
  Probe
ctgctggtgcacgattcttatcaag

SEQ ID NO: 197581 - DNA, 25 bp, Artificial
  Probe
ctctcagggtgttggctagagacag

SEQ ID NO: 197582 - DNA, 25 bp, Artificial
  Probe
ctgtgtacagttttttccttgcatc

SEQ ID NO: 197583 - DNA, 25 bp, Artificial
  Probe
ctttgcgtttaatctaagtagctgt

SEQ ID NO: 197584 - DNA, 25 bp, Artificial
  Probe
tctttgcgtttaatctaagtagctg

SEQ ID NO: 197585 - DNA, 25 bp, Artificial
  Probe
agacagactcttgatggctgctggt

SEQ ID NO: 197586 - DNA, 25 bp, Artificial
  Probe
ttactccttctctccggagttcagt

SEQ ID NO: 197587 - DNA, 25 bp, Artificial
  Probe
tggctagagacagactcttgatggc

SEQ ID NO: 197588 - DNA, 25 bp, Artificial
  Probe
ggttgcatgttctttgcgtttaatc

SEQ ID NO: 197589 - DNA, 25 bp, Artificial
  Probe
tagagacagactcttgatggctgct

SEQ ID NO: 197590 - DNA, 25 bp, Artificial
  Probe
ctagagacagactcttgatggctgc

SEQ ID NO: 197591 - DNA, 25 bp, Artificial
  Probe
ccctgtgtacagttttttccttgca

SEQ ID NO: 197592 - DNA, 25 bp, Artificial
  Probe
cttgatggctgctggtgcacgattc

SEQ ID NO: 197593 - DNA, 25 bp, Artificial
  Probe
gctagagacagactcttgatggctg

SEQ ID NO: 197594 - DNA, 25 bp, Artificial
  Probe
cctgtgtacagttttttccttgcat

SEQ ID NO: 197595 - DNA, 25 bp, Artificial
  Probe
caagttactccttctctccggagtt

SEQ ID NO: 197596 - DNA, 25 bp, Artificial
  Probe
gtgcacgattcttatcaagttactc

SEQ ID NO: 197597 - DNA, 25 bp, Artificial
  Probe
acagactcttgatggctgctggtgc

SEQ ID NO: 197598 - DNA, 25 bp, Artificial
  Probe
caccctgtgtacagttttttccttg

SEQ ID NO: 197599 - DNA, 25 bp, Artificial
  Probe
gcttttctggctctcagggtgttgg

SEQ ID NO: 197600 - DNA, 25 bp, Artificial
  Probe
cttctctccggagttcagtttaaag

SEQ ID NO: 197601 - DNA, 25 bp, Artificial
  Probe
atcaagttactccttctctccggag

SEQ ID NO: 197602 - DNA, 25 bp, Artificial
  Probe
gctctcagggtgttggctagagaca

SEQ ID NO: 197603 - DNA, 25 bp, Artificial
  Probe
tggctgctggtgcacgattcttatc

SEQ ID NO: 197604 - DNA, 25 bp, Artificial
  Probe
cttctgatatgtgatcaaagaatcc

SEQ ID NO: 197605 - DNA, 25 bp, Artificial
  Probe
ttcctgtgtggcagtcactgtagtc

SEQ ID NO: 197606 - DNA, 25 bp, Artificial
  Probe
tactttcctgtgtggcagtcactgt

SEQ ID NO: 197607 - DNA, 25 bp, Artificial
  Probe
agcagccgccacagtaaatttcagg

SEQ ID NO: 197608 - DNA, 25 bp, Artificial
  Probe
tgtagtccttgctctaaagtgcttt

SEQ ID NO: 197609 - DNA, 25 bp, Artificial
  Probe
ctgtagtccttgctctaaagtgctt

SEQ ID NO: 197610 - DNA, 25 bp, Artificial
  Probe
gaggagttctattccctccttccta

SEQ ID NO: 197611 - DNA, 25 bp, Artificial
  Probe
ctgaggcttctgatatgtgatcaaa

SEQ ID NO: 197612 - DNA, 25 bp, Artificial
  Probe
tctcagatgccattggtccctgtgg

SEQ ID NO: 197613 - DNA, 25 bp, Artificial
  Probe
cgccacagtaaatttcaggacaatg

SEQ ID NO: 197614 - DNA, 25 bp, Artificial
  Probe
tcactgtagtccttgctctaaagtg

SEQ ID NO: 197615 - DNA, 25 bp, Artificial
  Probe
gtggcagtcactgtagtccttgctc

SEQ ID NO: 197616 - DNA, 25 bp, Artificial
  Probe
atgattttttcaggattagctggcc

SEQ ID NO: 197617 - DNA, 25 bp, Artificial
  Probe
gtcactgtagtccttgctctaaagt

SEQ ID NO: 197618 - DNA, 25 bp, Artificial
  Probe
attctgaggcttctgatatgtgatc

SEQ ID NO: 197619 - DNA, 25 bp, Artificial
  Probe
ggccaaaggagcagccgccacagta

SEQ ID NO: 197620 - DNA, 25 bp, Artificial
  Probe
tcctactttcctgtgtggcagtcac

SEQ ID NO: 197621 - DNA, 25 bp, Artificial
  Probe
gcagccgccacagtaaatttcagga

SEQ ID NO: 197622 - DNA, 25 bp, Artificial
  Probe
actgtagtccttgctctaaagtgct

SEQ ID NO: 197623 - DNA, 25 bp, Artificial
  Probe
cttttggttccaaacatttagagag

SEQ ID NO: 197624 - DNA, 25 bp, Artificial
  Probe
caatgataatgcatcacatgaatga

SEQ ID NO: 197625 - DNA, 25 bp, Artificial
  Probe
agtccttgctctaaagtgcttttta

SEQ ID NO: 197626 - DNA, 25 bp, Artificial
  Probe
ccatgattttttcaggattagctgg

SEQ ID NO: 197627 - DNA, 25 bp, Artificial
  Probe
catataattctgaggcttctgatat

SEQ ID NO: 197628 - DNA, 25 bp, Artificial
  Probe
cgttttctcagatgccattggtccc

SEQ ID NO: 197629 - DNA, 25 bp, Artificial
  Probe
cactgtagtccttgctctaaagtgc

SEQ ID NO: 197630 - DNA, 25 bp, Artificial
  Probe
tagtccttgctctaaagtgcttttt

SEQ ID NO: 197631 - DNA, 25 bp, Artificial
  Probe
agatgccattggtccctgtggagag

SEQ ID NO: 197632 - DNA, 25 bp, Artificial
  Probe
ggagcagccgccacagtaaatttca

SEQ ID NO: 197633 - DNA, 25 bp, Artificial
  Probe
tctgaggcttctgatatgtgatcaa

SEQ ID NO: 197634 - DNA, 25 bp, Artificial
  Probe
tacccatgattttttcaggattagc

SEQ ID NO: 197635 - DNA, 25 bp, Artificial
  Probe
tcagatgccattggtccctgtggag

SEQ ID NO: 197636 - DNA, 25 bp, Artificial
  Probe
ccgccacagtaaatttcaggacaat

SEQ ID NO: 197637 - DNA, 25 bp, Artificial
  Probe
cagatgccattggtccctgtggaga

SEQ ID NO: 197638 - DNA, 25 bp, Artificial
  Probe
gacttttggttccaaacatttagag

SEQ ID NO: 197639 - DNA, 25 bp, Artificial
  Probe
ttctcagatgccattggtccctgtg

SEQ ID NO: 197640 - DNA, 25 bp, Artificial
  Probe
acccatgattttttcaggattagct

SEQ ID NO: 197641 - DNA, 25 bp, Artificial
  Probe
agtcactgtagtccttgctctaaag

SEQ ID NO: 197642 - DNA, 25 bp, Artificial
  Probe
cctactttcctgtgtggcagtcact

SEQ ID NO: 197643 - DNA, 25 bp, Artificial
  Probe
catgattttttcaggattagctggc

SEQ ID NO: 197644 - DNA, 25 bp, Artificial
  Probe
gtccttgctctaaagtgctttttat

SEQ ID NO: 197645 - DNA, 25 bp, Artificial
  Probe
gccattggtccctgtggagagctga

SEQ ID NO: 197646 - DNA, 25 bp, Artificial
  Probe
attggtccctgtggagagctgatag

SEQ ID NO: 197647 - DNA, 25 bp, Artificial
  Probe
gacatataattctgaggcttctgat

SEQ ID NO: 197648 - DNA, 25 bp, Artificial
  Probe
ctcagatgccattggtccctgtgga

SEQ ID NO: 197649 - DNA, 25 bp, Artificial
  Probe
gagcagccgccacagtaaatttcag

SEQ ID NO: 197650 - DNA, 25 bp, Artificial
  Probe
tcatgcccagtgaggagtggtccag

SEQ ID NO: 197651 - DNA, 25 bp, Artificial
  Probe
aacatggtgcggagagtcctcaaaa

SEQ ID NO: 197652 - DNA, 25 bp, Artificial
  Probe
ggactggagagtcagcctgaaccct

SEQ ID NO: 197653 - DNA, 25 bp, Artificial
  Probe
atgaaatggccgtcaatttgtccga

SEQ ID NO: 197654 - DNA, 25 bp, Artificial
  Probe
agacacagtgttgctgctgcagtgg

SEQ ID NO: 197655 - DNA, 25 bp, Artificial
  Probe
acataccataactacttttgctggg

SEQ ID NO: 197656 - DNA, 25 bp, Artificial
  Probe
ttctgccagggacatgaaatggccg

SEQ ID NO: 197657 - DNA, 25 bp, Artificial
  Probe
acactctggcactggcagccaaaca

SEQ ID NO: 197658 - DNA, 25 bp, Artificial
  Probe
tgtcctgtgtttgactacgtgcccc

SEQ ID NO: 197659 - DNA, 25 bp, Artificial
  Probe
atcattggtacgaagactatcctgg

SEQ ID NO: 197660 - DNA, 25 bp, Artificial
  Probe
accaccgtgggaaacatggtgcgga

SEQ ID NO: 197661 - DNA, 25 bp, Artificial
  Probe
aagattcatttcacaagtttgtggc

SEQ ID NO: 197662 - DNA, 25 bp, Artificial
  Probe
tgatgagagcgatcagcaggagtcc

SEQ ID NO: 197663 - DNA, 25 bp, Artificial
  Probe
ggctcatcacggaccaccactggaa

SEQ ID NO: 197664 - DNA, 25 bp, Artificial
  Probe
gagtcagcctgaaccctcagtgcct

SEQ ID NO: 197665 - DNA, 25 bp, Artificial
  Probe
cgattaatgagctgctagtggaact

SEQ ID NO: 197666 - DNA, 25 bp, Artificial
  Probe
gaggaagttccatgtcattgctgca

SEQ ID NO: 197667 - DNA, 25 bp, Artificial
  Probe
tctgtggtgtgttacacatacatac

SEQ ID NO: 197668 - DNA, 25 bp, Artificial
  Probe
gtctgcgcacccatgttcaagctct

SEQ ID NO: 197669 - DNA, 25 bp, Artificial
  Probe
cctcctgagaccaccgtgggaaaca

SEQ ID NO: 197670 - DNA, 25 bp, Artificial
  Probe
aggtcagtgtccactgtcctgtgtt

SEQ ID NO: 197671 - DNA, 25 bp, Artificial
  Probe
ccacttaagtccaacatcattgagg

SEQ ID NO: 197672 - DNA, 25 bp, Artificial
  Probe
ctttcacagaaggagacattctgga

SEQ ID NO: 197673 - DNA, 25 bp, Artificial
  Probe
ccctctttatctccaacattggtgg

SEQ ID NO: 197674 - DNA, 25 bp, Artificial
  Probe
gagtcctcaaaatcatacgggagga

SEQ ID NO: 197675 - DNA, 25 bp, Artificial
  Probe
tctctcctcagttccccagtgaaga

SEQ ID NO: 197676 - DNA, 25 bp, Artificial
  Probe
agtggtccaggactgctcctgcctt

SEQ ID NO: 197677 - DNA, 25 bp, Artificial
  Probe
ctaatggatttgatccgcagagagg

SEQ ID NO: 197678 - DNA, 25 bp, Artificial
  Probe
aagctctggagcacatccactccaa

SEQ ID NO: 197679 - DNA, 25 bp, Artificial
  Probe
gtggagacacagtgttgctgctgca

SEQ ID NO: 197680 - DNA, 25 bp, Artificial
  Probe
agacattctggagaaggtcagtgtc

SEQ ID NO: 197681 - DNA, 25 bp, Artificial
  Probe
cgtcctacgtctaccgcctgatgag

SEQ ID NO: 197682 - DNA, 25 bp, Artificial
  Probe
gaccaccactggaacaacgccgggg

SEQ ID NO: 197683 - DNA, 25 bp, Artificial
  Probe
tgtcaataaaagctactggaagctc

SEQ ID NO: 197684 - DNA, 25 bp, Artificial
  Probe
catcgtctgcgcacccatgttcaag

SEQ ID NO: 197685 - DNA, 25 bp, Artificial
  Probe
gaaccagcttagacccggagtggag

SEQ ID NO: 197686 - DNA, 25 bp, Artificial
  Probe
ttccccagtgaagaagattcatttc

SEQ ID NO: 197687 - DNA, 25 bp, Artificial
  Probe
gaactggaaggcacaacggagaaca

SEQ ID NO: 197688 - DNA, 25 bp, Artificial
  Probe
gccttcctactcatgcccagtgagg

SEQ ID NO: 197689 - DNA, 25 bp, Artificial
  Probe
atcctgacgaccatgtcctctgaca

SEQ ID NO: 197690 - DNA, 25 bp, Artificial
  Probe
cttcgtggaaactctgaagcgaggt

SEQ ID NO: 197691 - DNA, 25 bp, Artificial
  Probe
tgtttgactacgtgccccctgacct

SEQ ID NO: 197692 - DNA, 25 bp, Artificial
  Probe
ggatttcagcttccattatgcccca

SEQ ID NO: 197693 - DNA, 25 bp, Artificial
  Probe
tttgctcagaaatgccttccagacc

SEQ ID NO: 197694 - DNA, 25 bp, Artificial
  Probe
caacgccggggacctaatggatttg

SEQ ID NO: 197695 - DNA, 25 bp, Artificial
  Probe
ggcagcccagaagaggaagttccat

SEQ ID NO: 197696 - DNA, 25 bp, Artificial
  Probe
gtcatgctgccgcaggatgatcagt

SEQ ID NO: 197697 - DNA, 25 bp, Artificial
  Probe
atgcaggagcttgaagcactcggct

SEQ ID NO: 197698 - DNA, 25 bp, Artificial
  Probe
atgctgccgcaggatgatcagtccg

SEQ ID NO: 197699 - DNA, 25 bp, Artificial
  Probe
aatggtcatgctgccgcaggatgat

SEQ ID NO: 197700 - DNA, 25 bp, Artificial
  Probe
catcccgagctgaatatcggggtca

SEQ ID NO: 197701 - DNA, 25 bp, Artificial
  Probe
agtttgtcagtgaccatcccgagct

SEQ ID NO: 197702 - DNA, 25 bp, Artificial
  Probe
cttctgggtgcataccagtcttacc

SEQ ID NO: 197703 - DNA, 25 bp, Artificial
  Probe
ggggccatgcaggagcttgaagcac

SEQ ID NO: 197704 - DNA, 25 bp, Artificial
  Probe
tgcataccagtcttaccaattataa

SEQ ID NO: 197705 - DNA, 25 bp, Artificial
  Probe
atcctgtctcccgatgaaaacatat

SEQ ID NO: 197706 - DNA, 25 bp, Artificial
  Probe
gtcattgccaatgatatggcagctt

SEQ ID NO: 197707 - DNA, 25 bp, Artificial
  Probe
agtgaccatcccgagctgaatatcg

SEQ ID NO: 197708 - DNA, 25 bp, Artificial
  Probe
tgcaaagtgaggcttctgggtgcat

SEQ ID NO: 197709 - DNA, 25 bp, Artificial
  Probe
ggtgcataccagtcttaccaattat

SEQ ID NO: 197710 - DNA, 25 bp, Artificial
  Probe
tctgcattttcttggagaaatttaa

SEQ ID NO: 197711 - DNA, 25 bp, Artificial
  Probe
atggcagcttctacatacgaattaa

SEQ ID NO: 197712 - DNA, 25 bp, Artificial
  Probe
tatggcagcttctacatacgaatta

SEQ ID NO: 197713 - DNA, 25 bp, Artificial
  Probe
cagtccggggcgctgcatagagtgc

SEQ ID NO: 197714 - DNA, 25 bp, Artificial
  Probe
gggccatgcaggagcttgaagcact

SEQ ID NO: 197715 - DNA, 25 bp, Artificial
  Probe
ctgtctcccgatgaaaacatatctt

SEQ ID NO: 197716 - DNA, 25 bp, Artificial
  Probe
gaagcactcggctgcaaagtgaggc

SEQ ID NO: 197717 - DNA, 25 bp, Artificial
  Probe
accttaatggtcatgctgccgcagg

SEQ ID NO: 197718 - DNA, 25 bp, Artificial
  Probe
ctgggtgcataccagtcttaccaat

SEQ ID NO: 197719 - DNA, 25 bp, Artificial
  Probe
tcaaaattgagctctaggcccaaaa

SEQ ID NO: 197720 - DNA, 25 bp, Artificial
  Probe
gcactcggctgcaaagtgaggcttc

SEQ ID NO: 197721 - DNA, 25 bp, Artificial
  Probe
tcctgtctcccgatgaaaacatatc

SEQ ID NO: 197722 - DNA, 25 bp, Artificial
  Probe
attccaggggccatgcaggagcttg

SEQ ID NO: 197723 - DNA, 25 bp, Artificial
  Probe
gatgtattgattccaggggccatgc

SEQ ID NO: 197724 - DNA, 25 bp, Artificial
  Probe
aattcaaaattgagctctaggccca

SEQ ID NO: 197725 - DNA, 25 bp, Artificial
  Probe
ggggtcattgccaatgatatggcag

SEQ ID NO: 197726 - DNA, 25 bp, Artificial
  Probe
caggatgatcagtccggggcgctgc

SEQ ID NO: 197727 - DNA, 25 bp, Artificial
  Probe
acgaccttaatggtcatgctgccgc

SEQ ID NO: 197728 - DNA, 25 bp, Artificial
  Probe
tctcccgatgaaaacatatcttttg

SEQ ID NO: 197729 - DNA, 25 bp, Artificial
  Probe
ctgcatagagtgctgtctgcatttt

SEQ ID NO: 197730 - DNA, 25 bp, Artificial
  Probe
caggagcttgaagcactcggctgca

SEQ ID NO: 197731 - DNA, 25 bp, Artificial
  Probe
gaccatcccgagctgaatatcgggg

SEQ ID NO: 197732 - DNA, 25 bp, Artificial
  Probe
gtattgattccaggggccatgcagg

SEQ ID NO: 197733 - DNA, 25 bp, Artificial
  Probe
ctgaatatcggggtcattgccaatg

SEQ ID NO: 197734 - DNA, 25 bp, Artificial
  Probe
gatgatcagtccggggcgctgcata

SEQ ID NO: 197735 - DNA, 25 bp, Artificial
  Probe
aatgatatggcagcttctacatacg

SEQ ID NO: 197736 - DNA, 25 bp, Artificial
  Probe
aaagtgaggcttctgggtgcatacc

SEQ ID NO: 197737 - DNA, 25 bp, Artificial
  Probe
gatatggcagcttctacatacgaat

SEQ ID NO: 197738 - DNA, 25 bp, Artificial
  Probe
ccgcaggatgatcagtccggggcgc

SEQ ID NO: 197739 - DNA, 25 bp, Artificial
  Probe
cggctgcaaagtgaggcttctgggt

SEQ ID NO: 197740 - DNA, 25 bp, Artificial
  Probe
tccggggcgctgcatagagtgctgt

SEQ ID NO: 197741 - DNA, 25 bp, Artificial
  Probe
gtgaggcttctgggtgcataccagt

SEQ ID NO: 197742 - DNA, 25 bp, Artificial
  Probe
gctgtctgcattttcttggagaaat

SEQ ID NO: 197743 - DNA, 25 bp, Artificial
  Probe
ctgtctgcattttcttggagaaatt

SEQ ID NO: 197744 - DNA, 25 bp, Artificial
  Probe
tgaatatcggggtcattgccaatga

SEQ ID NO: 197745 - DNA, 25 bp, Artificial
  Probe
aatatcggggtcattgccaatgata

SEQ ID NO: 197746 - DNA, 25 bp, Artificial
  Probe
tccgcttcaaggcagagcaaatgtg

SEQ ID NO: 197747 - DNA, 25 bp, Artificial
  Probe
taggtcaggtgcgttatctcagctt

SEQ ID NO: 197748 - DNA, 25 bp, Artificial
  Probe
gtctatcagtacgtcggcaatggaa

SEQ ID NO: 197749 - DNA, 25 bp, Artificial
  Probe
gcaaatgtgacactgtctatcagta

SEQ ID NO: 197750 - DNA, 25 bp, Artificial
  Probe
gcttcttcaggcggtagctgattct

SEQ ID NO: 197751 - DNA, 25 bp, Artificial
  Probe
cagcttcttcaggcggtagctgatt

SEQ ID NO: 197752 - DNA, 25 bp, Artificial
  Probe
agcagattcagtagcagatgccgtt

SEQ ID NO: 197753 - DNA, 25 bp, Artificial
  Probe
gaccattccgcttcaaggcagagca

SEQ ID NO: 197754 - DNA, 25 bp, Artificial
  Probe
gtagcagatgccgttcaaaaggtcg

SEQ ID NO: 197755 - DNA, 25 bp, Artificial
  Probe
caggtgcgttatctcagcttcttca

SEQ ID NO: 197756 - DNA, 25 bp, Artificial
  Probe
ccagaccattccgcttcaaggcaga

SEQ ID NO: 197757 - DNA, 25 bp, Artificial
  Probe
agcaaatgtgacactgtctatcagt

SEQ ID NO: 197758 - DNA, 25 bp, Artificial
  Probe
ggtagctgattctggaagcaacgtt

SEQ ID NO: 197759 - DNA, 25 bp, Artificial
  Probe
agtagcagatgccgttcaaaaggtc

SEQ ID NO: 197760 - DNA, 25 bp, Artificial
  Probe
agaccattccgcttcaaggcagagc

SEQ ID NO: 197761 - DNA, 25 bp, Artificial
  Probe
gtagctgattctggaagcaacgttc

SEQ ID NO: 197762 - DNA, 25 bp, Artificial
  Probe
aaatgtgacactgtctatcagtacg

SEQ ID NO: 197763 - DNA, 25 bp, Artificial
  Probe
cagtacgtcggcaatggaagaagac

SEQ ID NO: 197764 - DNA, 25 bp, Artificial
  Probe
gttctttccattcaccagaccattc

SEQ ID NO: 197765 - DNA, 25 bp, Artificial
  Probe
tccattctacaccatggtaaaagaa

SEQ ID NO: 197766 - DNA, 25 bp, Artificial
  Probe
cattcatacattaatgaataagctc

SEQ ID NO: 197767 - DNA, 25 bp, Artificial
  Probe
cttgtccgtgaagatgtattgcccg

SEQ ID NO: 197768 - DNA, 25 bp, Artificial
  Probe
gacattttatcttgtccgtgaagat

SEQ ID NO: 197769 - DNA, 25 bp, Artificial
  Probe
tctatcagtacgtcggcaatggaag

SEQ ID NO: 197770 - DNA, 25 bp, Artificial
  Probe
tgctgtttttccattctacaccatg

SEQ ID NO: 197771 - DNA, 25 bp, Artificial
  Probe
atctcagcttcttcaggcggtagct

SEQ ID NO: 197772 - DNA, 25 bp, Artificial
  Probe
gagacattttatcttgtccgtgaag

SEQ ID NO: 197773 - DNA, 25 bp, Artificial
  Probe
agctgattctggaagcaacgttctt

SEQ ID NO: 197774 - DNA, 25 bp, Artificial
  Probe
ttcagtagcagatgccgttcaaaag

SEQ ID NO: 197775 - DNA, 25 bp, Artificial
  Probe
tatcagtacgtcggcaatggaagaa

SEQ ID NO: 197776 - DNA, 25 bp, Artificial
  Probe
aggtgcgttatctcagcttcttcag

SEQ ID NO: 197777 - DNA, 25 bp, Artificial
  Probe
gacactgtctatcagtacgtcggca

SEQ ID NO: 197778 - DNA, 25 bp, Artificial
  Probe
ggatgctgtttttccattctacacc

SEQ ID NO: 197779 - DNA, 25 bp, Artificial
  Probe
tcagcttcttcaggcggtagctgat

SEQ ID NO: 197780 - DNA, 25 bp, Artificial
  Probe
tgcccgatgcaatgagaaaaacatt

SEQ ID NO: 197781 - DNA, 25 bp, Artificial
  Probe
tggaagcaacgttctttccattcac

SEQ ID NO: 197782 - DNA, 25 bp, Artificial
  Probe
tgaagatgtattgcccgatgcaatg

SEQ ID NO: 197783 - DNA, 25 bp, Artificial
  Probe
tgcgttatctcagcttcttcaggcg

SEQ ID NO: 197784 - DNA, 25 bp, Artificial
  Probe
actgtctatcagtacgtcggcaatg

SEQ ID NO: 197785 - DNA, 25 bp, Artificial
  Probe
gtcaggtgcgttatctcagcttctt

SEQ ID NO: 197786 - DNA, 25 bp, Artificial
  Probe
tcaccagaccattccgcttcaaggc

SEQ ID NO: 197787 - DNA, 25 bp, Artificial
  Probe
tgtattgcccgatgcaatgagaaaa

SEQ ID NO: 197788 - DNA, 25 bp, Artificial
  Probe
tttcatttggaggataggtcaggtg

SEQ ID NO: 197789 - DNA, 25 bp, Artificial
  Probe
ggcggtagctgattctggaagcaac

SEQ ID NO: 197790 - DNA, 25 bp, Artificial
  Probe
agattcagtagcagatgccgttcaa

SEQ ID NO: 197791 - DNA, 25 bp, Artificial
  Probe
tgattctggaagcaacgttctttcc

SEQ ID NO: 197792 - DNA, 25 bp, Artificial
  Probe
tcttcaggcggtagctgattctgga

SEQ ID NO: 197793 - DNA, 25 bp, Artificial
  Probe
cattccgcttcaaggcagagcaaat

SEQ ID NO: 197794 - DNA, 25 bp, Artificial
  Probe
atacagggatgctgtttttccattc

SEQ ID NO: 197795 - DNA, 25 bp, Artificial
  Probe
attttatcttgtccgtgaagatgta

SEQ ID NO: 197796 - DNA, 25 bp, Artificial
  Probe
catgttgcttaccgcaccattccgg

SEQ ID NO: 197797 - DNA, 25 bp, Artificial
  Probe
gaaatgacgttgccgattcaccagc

SEQ ID NO: 197798 - DNA, 25 bp, Artificial
  Probe
tactcacattcacacgcgattgcgc

SEQ ID NO: 197799 - DNA, 25 bp, Artificial
  Probe
tcacattcacacgcgattgcgcaat

SEQ ID NO: 197800 - DNA, 25 bp, Artificial
  Probe
acatttacacatctagcagtcagtt

SEQ ID NO: 197801 - DNA, 25 bp, Artificial
  Probe
cagcctttgccaatcgtgggtgaaa

SEQ ID NO: 197802 - DNA, 25 bp, Artificial
  Probe
ttgctcgtccatccctcaagagaga

SEQ ID NO: 197803 - DNA, 25 bp, Artificial
  Probe
tgaaatgacgttgccgattcaccag

SEQ ID NO: 197804 - DNA, 25 bp, Artificial
  Probe
tctgttaatctaacaatagactatt

SEQ ID NO: 197805 - DNA, 25 bp, Artificial
  Probe
tcacacgcgattgcgcaatgccata

SEQ ID NO: 197806 - DNA, 25 bp, Artificial
  Probe
cattcacacgcgattgcgcaatgcc

SEQ ID NO: 197807 - DNA, 25 bp, Artificial
  Probe
cataaatttcttcatcgacattttc

SEQ ID NO: 197808 - DNA, 25 bp, Artificial
  Probe
gcagccgttgcaggcgaagttgatt

SEQ ID NO: 197809 - DNA, 25 bp, Artificial
  Probe
ttgccgattcaccagcacttgctcg

SEQ ID NO: 197810 - DNA, 25 bp, Artificial
  Probe
attgcgcaatgccataaatttcttc

SEQ ID NO: 197811 - DNA, 25 bp, Artificial
  Probe
atgacgttgccgattcaccagcact

SEQ ID NO: 197812 - DNA, 25 bp, Artificial
  Probe
gattcaccagcacttgctcgtccat

SEQ ID NO: 197813 - DNA, 25 bp, Artificial
  Probe
tgtatagatgcagccgttgcaggcg

SEQ ID NO: 197814 - DNA, 25 bp, Artificial
  Probe
aatgctttagaaggatctgttaatc

SEQ ID NO: 197815 - DNA, 25 bp, Artificial
  Probe
atagatgcagccgttgcaggcgaag

SEQ ID NO: 197816 - DNA, 25 bp, Artificial
  Probe
cgccgaacatgttgcttaccgcacc

SEQ ID NO: 197817 - DNA, 25 bp, Artificial
  Probe
tatttaggtccagcagctacattta

SEQ ID NO: 197818 - DNA, 25 bp, Artificial
  Probe
gcgcaatgccataaatttcttcatc

SEQ ID NO: 197819 - DNA, 25 bp, Artificial
  Probe
catgaacagcctttgccaatcgtgg

SEQ ID NO: 197820 - DNA, 25 bp, Artificial
  Probe
gcttaccgcaccattccggagtgta

SEQ ID NO: 197821 - DNA, 25 bp, Artificial
  Probe
catccctcaagagagaatgcatgga

SEQ ID NO: 197822 - DNA, 25 bp, Artificial
  Probe
gacattttccttccgttccatatga

SEQ ID NO: 197823 - DNA, 25 bp, Artificial
  Probe
catctagcagtcagttcttgttttc

SEQ ID NO: 197824 - DNA, 25 bp, Artificial
  Probe
gccgaacatgttgcttaccgcacca

SEQ ID NO: 197825 - DNA, 25 bp, Artificial
  Probe
accgcaccattccggagtgtataga

SEQ ID NO: 197826 - DNA, 25 bp, Artificial
  Probe
ttaatacatgaacagcctttgccaa

SEQ ID NO: 197827 - DNA, 25 bp, Artificial
  Probe
gtcggttatttaggtccagcagcta

SEQ ID NO: 197828 - DNA, 25 bp, Artificial
  Probe
cggttatttaggtccagcagctaca

SEQ ID NO: 197829 - DNA, 25 bp, Artificial
  Probe
gcgattgcgcaatgccataaatttc

SEQ ID NO: 197830 - DNA, 25 bp, Artificial
  Probe
gctacatttacacatctagcagtca

SEQ ID NO: 197831 - DNA, 25 bp, Artificial
  Probe
tacacatctagcagtcagttcttgt

SEQ ID NO: 197832 - DNA, 25 bp, Artificial
  Probe
atattaggttcaggtgcataaggga

SEQ ID NO: 197833 - DNA, 25 bp, Artificial
  Probe
acacatctagcagtcagttcttgtt

SEQ ID NO: 197834 - DNA, 25 bp, Artificial
  Probe
gaacagcctttgccaatcgtgggtg

SEQ ID NO: 197835 - DNA, 25 bp, Artificial
  Probe
atttactcacattcacacgcgattg

SEQ ID NO: 197836 - DNA, 25 bp, Artificial
  Probe
cagcagctacatttacacatctagc

SEQ ID NO: 197837 - DNA, 25 bp, Artificial
  Probe
cgcgattgcgcaatgccataaattt

SEQ ID NO: 197838 - DNA, 25 bp, Artificial
  Probe
ctagcagtcagttcttgttttcaaa

SEQ ID NO: 197839 - DNA, 25 bp, Artificial
  Probe
tgaacagcctttgccaatcgtgggt

SEQ ID NO: 197840 - DNA, 25 bp, Artificial
  Probe
gaacatgttgcttaccgcaccattc

SEQ ID NO: 197841 - DNA, 25 bp, Artificial
  Probe
tgccataaatttcttcatcgacatt

SEQ ID NO: 197842 - DNA, 25 bp, Artificial
  Probe
ccctcaagagagaatgcatggaaag

SEQ ID NO: 197843 - DNA, 25 bp, Artificial
  Probe
gatgcagccgttgcaggcgaagttg

SEQ ID NO: 197844 - DNA, 25 bp, Artificial
  Probe
ggtccagcagctacatttacacatc

SEQ ID NO: 197845 - DNA, 25 bp, Artificial
  Probe
ttaggtccagcagctacatttacac

SEQ ID NO: 197846 - DNA, 25 bp, Artificial
  Probe
ctttgaactcaatgggcagcttcga

SEQ ID NO: 197847 - DNA, 25 bp, Artificial
  Probe
ttaaagacacccaggccatgaagga

SEQ ID NO: 197848 - DNA, 25 bp, Artificial
  Probe
cttgaggtcctgtcccatgggacag

SEQ ID NO: 197849 - DNA, 25 bp, Artificial
  Probe
tgtcttgctggcaggcagttctcac

SEQ ID NO: 197850 - DNA, 25 bp, Artificial
  Probe
gatgcacttccatcccaaggccttg

SEQ ID NO: 197851 - DNA, 25 bp, Artificial
  Probe
gggcactatccgaaaggttcacgtg

SEQ ID NO: 197852 - DNA, 25 bp, Artificial
  Probe
ttcaaagacttcacggctacctttg

SEQ ID NO: 197853 - DNA, 25 bp, Artificial
  Probe
ccctctgtgtgctcagcgccatgaa

SEQ ID NO: 197854 - DNA, 25 bp, Artificial
  Probe
tgtgaagggccaaattggggcccct

SEQ ID NO: 197855 - DNA, 25 bp, Artificial
  Probe
gacgttctctctgcagccatgtacc

SEQ ID NO: 197856 - DNA, 25 bp, Artificial
  Probe
gaatactcgtctctttcttcaagga

SEQ ID NO: 197857 - DNA, 25 bp, Artificial
  Probe
gtgctcagcgccatgaagatggaga

SEQ ID NO: 197858 - DNA, 25 bp, Artificial
  Probe
ggcccctatgcctgggaaggtcata

SEQ ID NO: 197859 - DNA, 25 bp, Artificial
  Probe
tacctgagggctaggccttgaggtc

SEQ ID NO: 197860 - DNA, 25 bp, Artificial
  Probe
gaaggtcatagacgtcaaggtggca

SEQ ID NO: 197861 - DNA, 25 bp, Artificial
  Probe
tcttactccagactggcagcctggc

SEQ ID NO: 197862 - DNA, 25 bp, Artificial
  Probe
cctttggccccctggatagcctgaa

SEQ ID NO: 197863 - DNA, 25 bp, Artificial
  Probe
atggagactgtggtgacttcgccca

SEQ ID NO: 197864 - DNA, 25 bp, Artificial
  Probe
ctgatgtctttgctcagttcaaaga

SEQ ID NO: 197865 - DNA, 25 bp, Artificial
  Probe
ctctgtgtgctcagcgccatgaaga

SEQ ID NO: 197866 - DNA, 25 bp, Artificial
  Probe
aaggagatgcacttccatcccaagg

SEQ ID NO: 197867 - DNA, 25 bp, Artificial
  Probe
ttgctggcaggcagttctcacatat

SEQ ID NO: 197868 - DNA, 25 bp, Artificial
  Probe
catgactctggaaggcgatgacctc

SEQ ID NO: 197869 - DNA, 25 bp, Artificial
  Probe
cccaagcctctcaacagaagctgtg

SEQ ID NO: 197870 - DNA, 25 bp, Artificial
  Probe
tgaagggccaaattggggcccctat

SEQ ID NO: 197871 - DNA, 25 bp, Artificial
  Probe
ctatgcctgggaaggtcatagacgt

SEQ ID NO: 197872 - DNA, 25 bp, Artificial
  Probe
tggccagaggcaggtgttctttgaa

SEQ ID NO: 197873 - DNA, 25 bp, Artificial
  Probe
ccaggccatgaaggagatgcacttc

SEQ ID NO: 197874 - DNA, 25 bp, Artificial
  Probe
aggcagtacctgagggctaggcctt

SEQ ID NO: 197875 - DNA, 25 bp, Artificial
  Probe
aacagaagctgtgcagccagggcag

SEQ ID NO: 197876 - DNA, 25 bp, Artificial
  Probe
ggccccctggatagcctgaatactc

SEQ ID NO: 197877 - DNA, 25 bp, Artificial
  Probe
acatcaaagccctggctgtaagcga

SEQ ID NO: 197878 - DNA, 25 bp, Artificial
  Probe
gacagcacacacactacctgcaatg

SEQ ID NO: 197879 - DNA, 25 bp, Artificial
  Probe
tccttgtcttgctggcaggcagttc

SEQ ID NO: 197880 - DNA, 25 bp, Artificial
  Probe
caggcccaggcagtacctgagggct

SEQ ID NO: 197881 - DNA, 25 bp, Artificial
  Probe
gaaggcgatgacctcatcctagaga

SEQ ID NO: 197882 - DNA, 25 bp, Artificial
  Probe
gacacccaggccatgaaggagatgc

SEQ ID NO: 197883 - DNA, 25 bp, Artificial
  Probe
gatagcctgaatactcgtctctttc

SEQ ID NO: 197884 - DNA, 25 bp, Artificial
  Probe
actgtggtgacttcgcccatggagg

SEQ ID NO: 197885 - DNA, 25 bp, Artificial
  Probe
ccttcagctatttgtccttgtcttg

SEQ ID NO: 197886 - DNA, 25 bp, Artificial
  Probe
atcccaaggccttgaaggatgtgaa

SEQ ID NO: 197887 - DNA, 25 bp, Artificial
  Probe
tcccttgaacctgaaggagctggag

SEQ ID NO: 197888 - DNA, 25 bp, Artificial
  Probe
ctctctgcagccatgtaccctgatg

SEQ ID NO: 197889 - DNA, 25 bp, Artificial
  Probe
tgtcccatgggacagcacacacact

SEQ ID NO: 197890 - DNA, 25 bp, Artificial
  Probe
cagcgccatgaagatggagactgtg

SEQ ID NO: 197891 - DNA, 25 bp, Artificial
  Probe
accaaggacatgactctggaaggcg

SEQ ID NO: 197892 - DNA, 25 bp, Artificial
  Probe
tggctgtaagcgacctgaaccgtgc

SEQ ID NO: 197893 - DNA, 25 bp, Artificial
  Probe
ctggttaaagacacccaggccatga

SEQ ID NO: 197894 - DNA, 25 bp, Artificial
  Probe
aggacatgactctggaaggcgatga

SEQ ID NO: 197895 - DNA, 25 bp, Artificial
  Probe
aggccttgaggtcctgtcccatggg

SEQ ID NO: 197896 - DNA, 25 bp, Artificial
  Probe
taagcgacctgaaccgtgctggcca

SEQ ID NO: 197897 - DNA, 25 bp, Artificial
  Probe
catagacgtcaaggtggcagcagga

SEQ ID NO: 197898 - DNA, 25 bp, Artificial
  Probe
attgagtgatcttactccagactgg

SEQ ID NO: 197899 - DNA, 25 bp, Artificial
  Probe
aattggggcccctatgcctgggaag

SEQ ID NO: 197900 - DNA, 25 bp, Artificial
  Probe
ctctggaaggcgatgacctcatcct

SEQ ID NO: 197901 - DNA, 25 bp, Artificial
  Probe
acctgaaccgtgctggccagaggca

SEQ ID NO: 197902 - DNA, 25 bp, Artificial
  Probe
tgcctgggaaggtcatagacgtcaa

SEQ ID NO: 197903 - DNA, 25 bp, Artificial
  Probe
ctgcagccatgtaccctgatgtctt

SEQ ID NO: 197904 - DNA, 25 bp, Artificial
  Probe
cccaaggccttgaaggatgtgaagg

SEQ ID NO: 197905 - DNA, 25 bp, Artificial
  Probe
gccttgaaggatgtgaagggccaaa

SEQ ID NO: 197906 - DNA, 25 bp, Artificial
  Probe
acttccatcccaaggccttgaagga

SEQ ID NO: 197907 - DNA, 25 bp, Artificial
  Probe
gtgacttcgcccatggagggcacta

SEQ ID NO: 197908 - DNA, 25 bp, Artificial
  Probe
tctggaaggcgatgacctcatccta

SEQ ID NO: 197909 - DNA, 25 bp, Artificial
  Probe
cccatggagggcactatccgaaagg

SEQ ID NO: 197910 - DNA, 25 bp, Artificial
  Probe
cctcatcctagagattgagtgatct

SEQ ID NO: 197911 - DNA, 25 bp, Artificial
  Probe
cttgcacatcaaagccctggctgta

SEQ ID NO: 197912 - DNA, 25 bp, Artificial
  Probe
cttcaaggacccaaaattgcagagg

SEQ ID NO: 197913 - DNA, 25 bp, Artificial
  Probe
tggagggcactatccgaaaggttca

SEQ ID NO: 197914 - DNA, 25 bp, Artificial
  Probe
gccctggctgtaagcgacctgaacc

SEQ ID NO: 197915 - DNA, 25 bp, Artificial
  Probe
tggaacggggcaagaccttgcacat

SEQ ID NO: 197916 - DNA, 25 bp, Artificial
  Probe
tgtctttgctcagttcaaagacttc

SEQ ID NO: 197917 - DNA, 25 bp, Artificial
  Probe
cagggcaggcccaggcagtacctga

SEQ ID NO: 197918 - DNA, 25 bp, Artificial
  Probe
gtcccatgggacagcacacacacta

SEQ ID NO: 197919 - DNA, 25 bp, Artificial
  Probe
acccaaaattgcagaggagtttgag

SEQ ID NO: 197920 - DNA, 25 bp, Artificial
  Probe
cttcgcccatggagggcactatccg

SEQ ID NO: 197921 - DNA, 25 bp, Artificial
  Probe
aactcaatgggcagcttcgatccat

SEQ ID NO: 197922 - DNA, 25 bp, Artificial
  Probe
ggaggtgaccccagaggacgttctc

SEQ ID NO: 197923 - DNA, 25 bp, Artificial
  Probe
catgggacagcacacacactacctg

SEQ ID NO: 197924 - DNA, 25 bp, Artificial
  Probe
tgaatactcgtctctttcttcaagg

SEQ ID NO: 197925 - DNA, 25 bp, Artificial
  Probe
catcctagagattgagtgatcttac

SEQ ID NO: 197926 - DNA, 25 bp, Artificial
  Probe
tatcttcaaggctgcctatggaggt

SEQ ID NO: 197927 - DNA, 25 bp, Artificial
  Probe
tgcatagctacgaggagctggaaga

SEQ ID NO: 197928 - DNA, 25 bp, Artificial
  Probe
acatcattaaggtggccaaggagaa

SEQ ID NO: 197929 - DNA, 25 bp, Artificial
  Probe
ctgggtatccgcacagtggctgtct

SEQ ID NO: 197930 - DNA, 25 bp, Artificial
  Probe
tgccaagcaggttggctatgagaat

SEQ ID NO: 197931 - DNA, 25 bp, Artificial
  Probe
tggtccaagcccagaggtggtccgc

SEQ ID NO: 197932 - DNA, 25 bp, Artificial
  Probe
agacaaggtggaagcccgggccatt

SEQ ID NO: 197933 - DNA, 25 bp, Artificial
  Probe
acgcctcaccagtgactctgtcaaa

SEQ ID NO: 197934 - DNA, 25 bp, Artificial
  Probe
aattccctgcatgaggcacacgagt

SEQ ID NO: 197935 - DNA, 25 bp, Artificial
  Probe
cgggcctaccctgaggccttggcag

SEQ ID NO: 197936 - DNA, 25 bp, Artificial
  Probe
caattccctgcatgaggcacacgag

SEQ ID NO: 197937 - DNA, 25 bp, Artificial
  Probe
gcccatcaagaaagtaatggtggcc

SEQ ID NO: 197938 - DNA, 25 bp, Artificial
  Probe
aacttgccaagcaggttggctatga

SEQ ID NO: 197939 - DNA, 25 bp, Artificial
  Probe
cctgcatgaggcacacgagttctct

SEQ ID NO: 197940 - DNA, 25 bp, Artificial
  Probe
aaattcattgagaagccaagacaca

SEQ ID NO: 197941 - DNA, 25 bp, Artificial
  Probe
ctcggagcaggacacaggccagatg

SEQ ID NO: 197942 - DNA, 25 bp, Artificial
  Probe
taccctgaggccttggcagcctttg

SEQ ID NO: 197943 - DNA, 25 bp, Artificial
  Probe
cccaggcctgccaagatgctggagt

SEQ ID NO: 197944 - DNA, 25 bp, Artificial
  Probe
tgctgtgcaccctggctatgggttc

SEQ ID NO: 197945 - DNA, 25 bp, Artificial
  Probe
ctgtctactcggagcaggacacagg

SEQ ID NO: 197946 - DNA, 25 bp, Artificial
  Probe
aaatgtccggcgtctggagtacaag

SEQ ID NO: 197947 - DNA, 25 bp, Artificial
  Probe
aagatgctggagtccgattcattgg

SEQ ID NO: 197948 - DNA, 25 bp, Artificial
  Probe
ctgcacattccagacatcattaagg

SEQ ID NO: 197949 - DNA, 25 bp, Artificial
  Probe
tggtgtagatgctgtgcaccctggc

SEQ ID NO: 197950 - DNA, 25 bp, Artificial
  Probe
caggccagatgcaccggcagaaagc

SEQ ID NO: 197951 - DNA, 25 bp, Artificial
  Probe
agatgcaccggcagaaagctgatga

SEQ ID NO: 197952 - DNA, 25 bp, Artificial
  Probe
tgagaagccaagacacattgaggtg

SEQ ID NO: 197953 - DNA, 25 bp, Artificial
  Probe
agatcctaggggaccaatatgggaa

SEQ ID NO: 197954 - DNA, 25 bp, Artificial
  Probe
ctctcagagagagcagactttgccc

SEQ ID NO: 197955 - DNA, 25 bp, Artificial
  Probe
gtttccctattatcttcaaggctgc

SEQ ID NO: 197956 - DNA, 25 bp, Artificial
  Probe
aattcattgagaagccaagacacat

SEQ ID NO: 197957 - DNA, 25 bp, Artificial
  Probe
cagcctttgggaatggggcattgtt

SEQ ID NO: 197958 - DNA, 25 bp, Artificial
  Probe
aatgcaggcactgtggagttcctgg

SEQ ID NO: 197959 - DNA, 25 bp, Artificial
  Probe
ctgaagttccaaacagttcgagggg

SEQ ID NO: 197960 - DNA, 25 bp, Artificial
  Probe
tgcacttgtatgagcgggactgctc

SEQ ID NO: 197961 - DNA, 25 bp, Artificial
  Probe
agcctaccttattggccgtgggctg

SEQ ID NO: 197962 - DNA, 25 bp, Artificial
  Probe
gctgatgaagcctaccttattggcc

SEQ ID NO: 197963 - DNA, 25 bp, Artificial
  Probe
tggcatgagggttgtgcatagctac

SEQ ID NO: 197964 - DNA, 25 bp, Artificial
  Probe
ttgctgcaggcgttccagtggtccc

SEQ ID NO: 197965 - DNA, 25 bp, Artificial
  Probe
cagactttgcccaggcctgccaaga

SEQ ID NO: 197966 - DNA, 25 bp, Artificial
  Probe
tgcaagcctacctgcacattccaga

SEQ ID NO: 197967 - DNA, 25 bp, Artificial
  Probe
cattgccattgctgcaggcgttcca

SEQ ID NO: 197968 - DNA, 25 bp, Artificial
  Probe
cgtgggctggctcctgtgcaagcct

SEQ ID NO: 197969 - DNA, 25 bp, Artificial
  Probe
gcactgtggagttcctggtggacaa

SEQ ID NO: 197970 - DNA, 25 bp, Artificial
  Probe
ggtgagattgccatccgagtgtttc

SEQ ID NO: 197971 - DNA, 25 bp, Artificial
  Probe
cctaggggaccaatatgggaacatc

SEQ ID NO: 197972 - DNA, 25 bp, Artificial
  Probe
gtggctgtctactcggagcaggaca

SEQ ID NO: 197973 - DNA, 25 bp, Artificial
  Probe
tgtggagttcctggtggacaagcat

SEQ ID NO: 197974 - DNA, 25 bp, Artificial
  Probe
ctctgtcaaacttgccaagcaggtt

SEQ ID NO: 197975 - DNA, 25 bp, Artificial
  Probe
ctacgaggagctggaagagaattac

SEQ ID NO: 197976 - DNA, 25 bp, Artificial
  Probe
accaatatgggaacatcttgcactt

SEQ ID NO: 197977 - DNA, 25 bp, Artificial
  Probe
ccttattggccgtgggctggctcct

SEQ ID NO: 197978 - DNA, 25 bp, Artificial
  Probe
gagagcagactttgcccaggcctgc

SEQ ID NO: 197979 - DNA, 25 bp, Artificial
  Probe
ttgtgcatagctacgaggagctgga

SEQ ID NO: 197980 - DNA, 25 bp, Artificial
  Probe
gaggctcctgggtgtccgccgatcc

SEQ ID NO: 197981 - DNA, 25 bp, Artificial
  Probe
tatggtttccctattatcttcaagg

SEQ ID NO: 197982 - DNA, 25 bp, Artificial
  Probe
tccagtggtccctggcactaattcc

SEQ ID NO: 197983 - DNA, 25 bp, Artificial
  Probe
tggctcctgtgcaagcctacctgca

SEQ ID NO: 197984 - DNA, 25 bp, Artificial
  Probe
gcaccagaaggtggtagagattgcc

SEQ ID NO: 197985 - DNA, 25 bp, Artificial
  Probe
ggccaacagaggtgagattgccatc

SEQ ID NO: 197986 - DNA, 25 bp, Artificial
  Probe
agagagcagactttgcccaggcctg

SEQ ID NO: 197987 - DNA, 25 bp, Artificial
  Probe
gagtacaagcccatcaagaaagtaa

SEQ ID NO: 197988 - DNA, 25 bp, Artificial
  Probe
tgtgcaagcctacctgcacattcca

SEQ ID NO: 197989 - DNA, 25 bp, Artificial
  Probe
atgcaggcactgtggagttcctggt

SEQ ID NO: 197990 - DNA, 25 bp, Artificial
  Probe
ggagcaggacacaggccagatgcac

SEQ ID NO: 197991 - DNA, 25 bp, Artificial
  Probe
gtggccaacagaggtgagattgcca

SEQ ID NO: 197992 - DNA, 25 bp, Artificial
  Probe
gtctggagtacaagcccatcaagaa

SEQ ID NO: 197993 - DNA, 25 bp, Artificial
  Probe
ggtgcagatcctaggggaccaatat

SEQ ID NO: 197994 - DNA, 25 bp, Artificial
  Probe
gagttctctaacacctatggtttcc

SEQ ID NO: 197995 - DNA, 25 bp, Artificial
  Probe
tatgagcgggactgctccatccagc

SEQ ID NO: 197996 - DNA, 25 bp, Artificial
  Probe
atgagcgggactgctccatccagcg

SEQ ID NO: 197997 - DNA, 25 bp, Artificial
  Probe
tgaggccttggcagcctttgggaat

SEQ ID NO: 197998 - DNA, 25 bp, Artificial
  Probe
aggacacaggccagatgcaccggca

SEQ ID NO: 197999 - DNA, 25 bp, Artificial
  Probe
caccggcagaaagctgatgaagcct

SEQ ID NO: 198000 - DNA, 25 bp, Artificial
  Probe
cagagctgggtatccgcacagtggc

SEQ ID NO: 198001 - DNA, 25 bp, Artificial
  Probe
ctatgagaatgcaggcactgtggag

SEQ ID NO: 198002 - DNA, 25 bp, Artificial
  Probe
gggcctaccctgaggccttggcagc

SEQ ID NO: 198003 - DNA, 25 bp, Artificial
  Probe
gaagcccgggccattgccattgctg

SEQ ID NO: 198004 - DNA, 25 bp, Artificial
  Probe
aagcccagaggtggtccgcaagatg

SEQ ID NO: 198005 - DNA, 25 bp, Artificial
  Probe
ttcattggtccaagcccagaggtgg

SEQ ID NO: 198006 - DNA, 25 bp, Artificial
  Probe
taggcctgcggcaggaaaacatccg

SEQ ID NO: 198007 - DNA, 25 bp, Artificial
  Probe
ttccagccagacactggccgcattg

SEQ ID NO: 198008 - DNA, 25 bp, Artificial
  Probe
ggcctgcacagaaccgggcccagaa

SEQ ID NO: 198009 - DNA, 25 bp, Artificial
  Probe
cattaccttggacacgtcatggtca

SEQ ID NO: 198010 - DNA, 25 bp, Artificial
  Probe
ccacatttgacgtggccatgcgctt

SEQ ID NO: 198011 - DNA, 25 bp, Artificial
  Probe
tcagagacatccttctgcgagaggg

SEQ ID NO: 198012 - DNA, 25 bp, Artificial
  Probe
tttgacgtggccatgcgcttcttgt

SEQ ID NO: 198013 - DNA, 25 bp, Artificial
  Probe
ccccagctggtttcagagacatcct

SEQ ID NO: 198014 - DNA, 25 bp, Artificial
  Probe
actagagtgcgcacacacgatctca

SEQ ID NO: 198015 - DNA, 25 bp, Artificial
  Probe
acaacctcttcagcatagagaactg

SEQ ID NO: 198016 - DNA, 25 bp, Artificial
  Probe
ggaaaacatccgaatcaatggttgt

SEQ ID NO: 198017 - DNA, 25 bp, Artificial
  Probe
agctgttccagctgcggcctgcaca

SEQ ID NO: 198018 - DNA, 25 bp, Artificial
  Probe
ctcaaaaagattgcaccctacgttg

SEQ ID NO: 198019 - DNA, 25 bp, Artificial
  Probe
aggagctccgggagctcatccccaa

SEQ ID NO: 198020 - DNA, 25 bp, Artificial
  Probe
ctcaacaaccagcagttcctagcgg

SEQ ID NO: 198021 - DNA, 25 bp, Artificial
  Probe
ggctttgccagagctgtgcggaatc

SEQ ID NO: 198022 - DNA, 25 bp, Artificial
  Probe
acttgccactagagtgcgcacacac

SEQ ID NO: 198023 - DNA, 25 bp, Artificial
  Probe
acatcccattccagatgctactgag

SEQ ID NO: 198024 - DNA, 25 bp, Artificial
  Probe
gcctgcggcaggaaaacatccgaat

SEQ ID NO: 198025 - DNA, 25 bp, Artificial
  Probe
agattgcaccctacgttgcccacaa

SEQ ID NO: 198026 - DNA, 25 bp, Artificial
  Probe
ctggtccatgctcagatccatgtgt

SEQ ID NO: 198027 - DNA, 25 bp, Artificial
  Probe
ttgacgtggccatgcgcttcttgta

SEQ ID NO: 198028 - DNA, 25 bp, Artificial
  Probe
ccagccagacactggccgcattgag

SEQ ID NO: 198029 - DNA, 25 bp, Artificial
  Probe
gcccagaagttgctacattaccttg

SEQ ID NO: 198030 - DNA, 25 bp, Artificial
  Probe
ttgctacattaccttggacacgtca

SEQ ID NO: 198031 - DNA, 25 bp, Artificial
  Probe
tgcaggtggagcacacggtcactga

SEQ ID NO: 198032 - DNA, 25 bp, Artificial
  Probe
tcatcgatgagaaccccgagctgtt

SEQ ID NO: 198033 - DNA, 25 bp, Artificial
  Probe
atcgaggtcaattcccgcctgcagg

SEQ ID NO: 198034 - DNA, 25 bp, Artificial
  Probe
cagatccatgtgtccgaaggccgga

SEQ ID NO: 198035 - DNA, 25 bp, Artificial
  Probe
ttgccactagagtgcgcacacacga

SEQ ID NO: 198036 - DNA, 25 bp, Artificial
  Probe
ggaggagccacatttgacgtggcca

SEQ ID NO: 198037 - DNA, 25 bp, Artificial
  Probe
gggtcaccactgaggaccctgcacg

SEQ ID NO: 198038 - DNA, 25 bp, Artificial
  Probe
aatggttgtgccattcagtgtcggg

SEQ ID NO: 198039 - DNA, 25 bp, Artificial
  Probe
tgaggaccctgcacgcagcttccag

SEQ ID NO: 198040 - DNA, 25 bp, Artificial
  Probe
cgagctgttccagctgcggcctgca

SEQ ID NO: 198041 - DNA, 25 bp, Artificial
  Probe
tgtcgggtcaccactgaggaccctg

SEQ ID NO: 198042 - DNA, 25 bp, Artificial
  Probe
tccatgtgtccgaaggccggagcct

SEQ ID NO: 198043 - DNA, 25 bp, Artificial
  Probe
ccagcagttcctagcgggcattgtg

SEQ ID NO: 198044 - DNA, 25 bp, Artificial
  Probe
tcactacttgccactagagtgcgca

SEQ ID NO: 198045 - DNA, 25 bp, Artificial
  Probe
ccgcattgaggttttccggagtggt

SEQ ID NO: 198046 - DNA, 25 bp, Artificial
  Probe
tcagtgtcgggtcaccactgaggac

SEQ ID NO: 198047 - DNA, 25 bp, Artificial
  Probe
atgagaaccccgagctgttccagct

SEQ ID NO: 198048 - DNA, 25 bp, Artificial
  Probe
tgccattcagtgtcgggtcaccact

SEQ ID NO: 198049 - DNA, 25 bp, Artificial
  Probe
agattacagatgtggacctggtcca

SEQ ID NO: 198050 - DNA, 25 bp, Artificial
  Probe
ccatgtgtccgaaggccggagcctg

SEQ ID NO: 198051 - DNA, 25 bp, Artificial
  Probe
cgtcatggtcaatggccctaccact

SEQ ID NO: 198052 - DNA, 25 bp, Artificial
  Probe
cgggatgcccaccagtcactacttg

SEQ ID NO: 198053 - DNA, 25 bp, Artificial
  Probe
ctgtgcggaatcaccaggggctgct

SEQ ID NO: 198054 - DNA, 25 bp, Artificial
  Probe
accgggcccagaagttgctacatta

SEQ ID NO: 198055 - DNA, 25 bp, Artificial
  Probe
cctagcgggcattgtggacacccag

SEQ ID NO: 198056 - DNA, 25 bp, Artificial
  Probe
gacactggccgcattgaggttttcc

SEQ ID NO: 198057 - DNA, 25 bp, Artificial
  Probe
ttcttgtatgagtgcccctggcggc

SEQ ID NO: 198058 - DNA, 25 bp, Artificial
  Probe
ttgtggacacccagttcatcgatga

SEQ ID NO: 198059 - DNA, 25 bp, Artificial
  Probe
aacatccgaatcaatggttgtgcca

SEQ ID NO: 198060 - DNA, 25 bp, Artificial
  Probe
aatcaatggttgtgccattcagtgt

SEQ ID NO: 198061 - DNA, 25 bp, Artificial
  Probe
ctgacctaggcctgcggcaggaaaa

SEQ ID NO: 198062 - DNA, 25 bp, Artificial
  Probe
gagcctgcctgacctaggcctgcgg

SEQ ID NO: 198063 - DNA, 25 bp, Artificial
  Probe
aagattgcaccctacgttgcccaca

SEQ ID NO: 198064 - DNA, 25 bp, Artificial
  Probe
tcaaaaagattgcaccctacgttgc

SEQ ID NO: 198065 - DNA, 25 bp, Artificial
  Probe
caccagtcactacttgccactagag

SEQ ID NO: 198066 - DNA, 25 bp, Artificial
  Probe
gtggccatgcgcttcttgtatgagt

SEQ ID NO: 198067 - DNA, 25 bp, Artificial
  Probe
cctgtggaccccattgttcctgtgg

SEQ ID NO: 198068 - DNA, 25 bp, Artificial
  Probe
cagctgcggcctgcacagaaccggg

SEQ ID NO: 198069 - DNA, 25 bp, Artificial
  Probe
gaaccccgagctgttccagctgcgg

SEQ ID NO: 198070 - DNA, 25 bp, Artificial
  Probe
ttcctagcgggcattgtggacaccc

SEQ ID NO: 198071 - DNA, 25 bp, Artificial
  Probe
agctgcggcctgcacagaaccgggc

SEQ ID NO: 198072 - DNA, 25 bp, Artificial
  Probe
ttgccagagctgtgcggaatcacca

SEQ ID NO: 198073 - DNA, 25 bp, Artificial
  Probe
atcaccaggggctgctgctaatgga

SEQ ID NO: 198074 - DNA, 25 bp, Artificial
  Probe
gcacacacgatctcaaaaagattgc

SEQ ID NO: 198075 - DNA, 25 bp, Artificial
  Probe
ctcttcagcatagagaactggggag

SEQ ID NO: 198076 - DNA, 25 bp, Artificial
  Probe
cagctggtttcagagacatccttct

SEQ ID NO: 198077 - DNA, 25 bp, Artificial
  Probe
ggagcctgcctgacctaggcctgcg

SEQ ID NO: 198078 - DNA, 25 bp, Artificial
  Probe
gggatgcccaccagtcactacttgc

SEQ ID NO: 198079 - DNA, 25 bp, Artificial
  Probe
caattcccgcctgcaggtggagcac

SEQ ID NO: 198080 - DNA, 25 bp, Artificial
  Probe
cacggtcactgaggagattacagat

SEQ ID NO: 198081 - DNA, 25 bp, Artificial
  Probe
tggagcacacggtcactgaggagat

SEQ ID NO: 198082 - DNA, 25 bp, Artificial
  Probe
ccagtcactacttgccactagagtg

SEQ ID NO: 198083 - DNA, 25 bp, Artificial
  Probe
ttgttcctgtggtgcccataggccc

SEQ ID NO: 198084 - DNA, 25 bp, Artificial
  Probe
tggacacaaccttccgggatgccca

SEQ ID NO: 198085 - DNA, 25 bp, Artificial
  Probe
aaggccggagcctgcctgacctagg

SEQ ID NO: 198086 - DNA, 25 bp, Artificial
  Probe
acacatcagggtcaggtgtggcagc

SEQ ID NO: 198087 - DNA, 25 bp, Artificial
  Probe
tgccaaacatgctgctgggcatgga

SEQ ID NO: 198088 - DNA, 25 bp, Artificial
  Probe
cctgtgcacaagctggggctgatgt

SEQ ID NO: 198089 - DNA, 25 bp, Artificial
  Probe
tgacaccatcctccaagattgtggg

SEQ ID NO: 198090 - DNA, 25 bp, Artificial
  Probe
aactacctgccaaacatgctgctgg

SEQ ID NO: 198091 - DNA, 25 bp, Artificial
  Probe
tggagtactacatgggcttagctga

SEQ ID NO: 198092 - DNA, 25 bp, Artificial
  Probe
accaactaccctgacaacgtggtct

SEQ ID NO: 198093 - DNA, 25 bp, Artificial
  Probe
ccatgacacatcagggtcaggtgtg

SEQ ID NO: 198094 - DNA, 25 bp, Artificial
  Probe
tggcattccccatgggggtttccct

SEQ ID NO: 198095 - DNA, 25 bp, Artificial
  Probe
catgttggcctgtgcacaagctggg

SEQ ID NO: 198096 - DNA, 25 bp, Artificial
  Probe
cccgctctgtggtggagttcctgca

SEQ ID NO: 198097 - DNA, 25 bp, Artificial
  Probe
cagtcgcactaaatactcactggag

SEQ ID NO: 198098 - DNA, 25 bp, Artificial
  Probe
atgttgtggatgtggcagtcgactc

SEQ ID NO: 198099 - DNA, 25 bp, Artificial
  Probe
gtcttccggatctttgactccctta

SEQ ID NO: 198100 - DNA, 25 bp, Artificial
  Probe
agaatggcatggacgtcttccggat

SEQ ID NO: 198101 - DNA, 25 bp, Artificial
  Probe
acttccaggcccacagcatgggact

SEQ ID NO: 198102 - DNA, 25 bp, Artificial
  Probe
tatgtggaggctaaccagatgctgg

SEQ ID NO: 198103 - DNA, 25 bp, Artificial
  Probe
ctgggggacctcatcaaggtgacac

SEQ ID NO: 198104 - DNA, 25 bp, Artificial
  Probe
tgtggatgtggcagtcgactctatg

SEQ ID NO: 198105 - DNA, 25 bp, Artificial
  Probe
ttcatggtgcagaacgggttgagcc

SEQ ID NO: 198106 - DNA, 25 bp, Artificial
  Probe
taactacctgccaaacatgctgctg

SEQ ID NO: 198107 - DNA, 25 bp, Artificial
  Probe
tgggctacaccaactaccctgacaa

SEQ ID NO: 198108 - DNA, 25 bp, Artificial
  Probe
gcctttgattgcacggctaccatga

SEQ ID NO: 198109 - DNA, 25 bp, Artificial
  Probe
catccatacccatgacacatcaggg

SEQ ID NO: 198110 - DNA, 25 bp, Artificial
  Probe
tgattgcacggctaccatgaagtct

SEQ ID NO: 198111 - DNA, 25 bp, Artificial
  Probe
catcagggtcaggtgtggcagccat

SEQ ID NO: 198112 - DNA, 25 bp, Artificial
  Probe
agctcaggcagaagagctgtccttc

SEQ ID NO: 198113 - DNA, 25 bp, Artificial
  Probe
caaacatgctgctgggcatggaagc

SEQ ID NO: 198114 - DNA, 25 bp, Artificial
  Probe
gggatctggcccagttcatggtgca

SEQ ID NO: 198115 - DNA, 25 bp, Artificial
  Probe
ttcctgcagggctacattggcattc

SEQ ID NO: 198116 - DNA, 25 bp, Artificial
  Probe
cagaggtacccctggagcgtgtgtt

SEQ ID NO: 198117 - DNA, 25 bp, Artificial
  Probe
caagttcaaggaggtcaagaaggcc

SEQ ID NO: 198118 - DNA, 25 bp, Artificial
  Probe
caggcctgctgaagcctgcagcatg

SEQ ID NO: 198119 - DNA, 25 bp, Artificial
  Probe
tccgttctaaggtgctaaaggacct

SEQ ID NO: 198120 - DNA, 25 bp, Artificial
  Probe
gccatgttggcctgtgcacaagctg

SEQ ID NO: 198121 - DNA, 25 bp, Artificial
  Probe
aggtgctaaaggacctgccaaggat

SEQ ID NO: 198122 - DNA, 25 bp, Artificial
  Probe
aggtacccctggagcgtgtgtttga

SEQ ID NO: 198123 - DNA, 25 bp, Artificial
  Probe
ctgtgcacaagctggggctgatgtt

SEQ ID NO: 198124 - DNA, 25 bp, Artificial
  Probe
atccagggggccagtacaccaacct

SEQ ID NO: 198125 - DNA, 25 bp, Artificial
  Probe
ctacattggcattccccatgggggt

SEQ ID NO: 198126 - DNA, 25 bp, Artificial
  Probe
caagttctgtgaggtggccaaagag

SEQ ID NO: 198127 - DNA, 25 bp, Artificial
  Probe
acacgggtgacgtggctgaccccag

SEQ ID NO: 198128 - DNA, 25 bp, Artificial
  Probe
gcttagctgaagaactggtgcgagc

SEQ ID NO: 198129 - DNA, 25 bp, Artificial
  Probe
ggggccagtacaccaacctacactt

SEQ ID NO: 198130 - DNA, 25 bp, Artificial
  Probe
agaactggtgcgagccggcactcac

SEQ ID NO: 198131 - DNA, 25 bp, Artificial
  Probe
gaagctcaggcagaagagctgtcct

SEQ ID NO: 198132 - DNA, 25 bp, Artificial
  Probe
ggctgaccccagtcgcactaaatac

SEQ ID NO: 198133 - DNA, 25 bp, Artificial
  Probe
tcacagcccagcatgggggccctgg

SEQ ID NO: 198134 - DNA, 25 bp, Artificial
  Probe
tgcattaaggacatggcaggcctgc

SEQ ID NO: 198135 - DNA, 25 bp, Artificial
  Probe
ggatgacctcacagcccagcatggg

SEQ ID NO: 198136 - DNA, 25 bp, Artificial
  Probe
ggtgacgtggctgaccccagtcgca

SEQ ID NO: 198137 - DNA, 25 bp, Artificial
  Probe
cgttctaaggtgctaaaggacctgc

SEQ ID NO: 198138 - DNA, 25 bp, Artificial
  Probe
taaggacatggcaggcctgctgaag

SEQ ID NO: 198139 - DNA, 25 bp, Artificial
  Probe
ccgctctgtggtggagttcctgcag

SEQ ID NO: 198140 - DNA, 25 bp, Artificial
  Probe
ctggagcgtgtgtttgactacagtg

SEQ ID NO: 198141 - DNA, 25 bp, Artificial
  Probe
ctgctgaagcctgcagcatgcacca

SEQ ID NO: 198142 - DNA, 25 bp, Artificial
  Probe
ggcctgtaccaaagggactcctctg

SEQ ID NO: 198143 - DNA, 25 bp, Artificial
  Probe
catcaaggtgacaccatcctccaag

SEQ ID NO: 198144 - DNA, 25 bp, Artificial
  Probe
gcatggacgtcttccggatctttga

SEQ ID NO: 198145 - DNA, 25 bp, Artificial
  Probe
gtgacgtggctgaccccagtcgcac

SEQ ID NO: 198146 - DNA, 25 bp, Artificial
  Probe
ggcaggcctgctgaagcctgcagca

SEQ ID NO: 198147 - DNA, 25 bp, Artificial
  Probe
taaatactcactggagtactacatg

SEQ ID NO: 198148 - DNA, 25 bp, Artificial
  Probe
ggggctgtatgcagcctttgattgc

SEQ ID NO: 198149 - DNA, 25 bp, Artificial
  Probe
gtaccaaagggactcctctggacac

SEQ ID NO: 198150 - DNA, 25 bp, Artificial
  Probe
ctgaagaactggtgcgagccggcac

SEQ ID NO: 198151 - DNA, 25 bp, Artificial
  Probe
gccctggtggcctgtaccaaaggga

SEQ ID NO: 198152 - DNA, 25 bp, Artificial
  Probe
atgaagtctggcaactcagacgtgt

SEQ ID NO: 198153 - DNA, 25 bp, Artificial
  Probe
cggcactcacatcctctgcattaag

SEQ ID NO: 198154 - DNA, 25 bp, Artificial
  Probe
tggtggagttcctgcagggctacat

SEQ ID NO: 198155 - DNA, 25 bp, Artificial
  Probe
gtggaagctgccatctcctacacgg

SEQ ID NO: 198156 - DNA, 25 bp, Artificial
  Probe
aggcagaagctcaggcagaagagct

SEQ ID NO: 198157 - DNA, 25 bp, Artificial
  Probe
aagcctgcagcatgcaccatgctgg

SEQ ID NO: 198158 - DNA, 25 bp, Artificial
  Probe
cacagcccagcatgggggccctggt

SEQ ID NO: 198159 - DNA, 25 bp, Artificial
  Probe
gacgtcttccggatctttgactccc

SEQ ID NO: 198160 - DNA, 25 bp, Artificial
  Probe
tactacatgggcttagctgaagaac

SEQ ID NO: 198161 - DNA, 25 bp, Artificial
  Probe
gacctcatcaaggtgacaccatcct

SEQ ID NO: 198162 - DNA, 25 bp, Artificial
  Probe
tgaacccttccgttctaaggtgcta

SEQ ID NO: 198163 - DNA, 25 bp, Artificial
  Probe
ctcctacacgggtgacgtggctgac

SEQ ID NO: 198164 - DNA, 25 bp, Artificial
  Probe
caactcagacgtgtatgagaatgag

SEQ ID NO: 198165 - DNA, 25 bp, Artificial
  Probe
tgtggcagccatgttggcctgtgca

SEQ ID NO: 198166 - DNA, 25 bp, Artificial
  Probe
tagcaactattaccatgttttgttg

SEQ ID NO: 198167 - DNA, 25 bp, Artificial
  Probe
attaagttcacctcctggataaaag

SEQ ID NO: 198168 - DNA, 25 bp, Artificial
  Probe
atgacctgatgctgctccacctcag

SEQ ID NO: 198169 - DNA, 25 bp, Artificial
  Probe
cacacccgacaacgtggagacgact

SEQ ID NO: 198170 - DNA, 25 bp, Artificial
  Probe
ctggggcagcaccaaacccctgaat

SEQ ID NO: 198171 - DNA, 25 bp, Artificial
  Probe
gggcaatgtcccatgtgctgaaccc

SEQ ID NO: 198172 - DNA, 25 bp, Artificial
  Probe
gcaagggtgactcaggaggccccct

SEQ ID NO: 198173 - DNA, 25 bp, Artificial
  Probe
tgaaggtcattgatctgcccacgga

SEQ ID NO: 198174 - DNA, 25 bp, Artificial
  Probe
tgacatcacagatggggtgaaggtc

SEQ ID NO: 198175 - DNA, 25 bp, Artificial
  Probe
cacctcctggccagtctcggattgt

SEQ ID NO: 198176 - DNA, 25 bp, Artificial
  Probe
attgatctgcccacggaggagccca

SEQ ID NO: 198177 - DNA, 25 bp, Artificial
  Probe
atttgaagatgaaccctttgctcag

SEQ ID NO: 198178 - DNA, 25 bp, Artificial
  Probe
gaaacaacctatttgaagatgaacc

SEQ ID NO: 198179 - DNA, 25 bp, Artificial
  Probe
ctactgtctaatgagaagtgcatcg

SEQ ID NO: 198180 - DNA, 25 bp, Artificial
  Probe
acctcctggataaaagaagttatga

SEQ ID NO: 198181 - DNA, 25 bp, Artificial
  Probe
gtgtcctgatagacccgagctgggt

SEQ ID NO: 198182 - DNA, 25 bp, Artificial
  Probe
tctcatgctgtgtgcaggagagatg

SEQ ID NO: 198183 - DNA, 25 bp, Artificial
  Probe
ccaaccctggcaagtggctatcatc

SEQ ID NO: 198184 - DNA, 25 bp, Artificial
  Probe
ggtttgtcaaccaaagcttccctca

SEQ ID NO: 198185 - DNA, 25 bp, Artificial
  Probe
tctgcccacggaggagcccaaggtg

SEQ ID NO: 198186 - DNA, 25 bp, Artificial
  Probe
gatagacccgagctgggtgatcacg

SEQ ID NO: 198187 - DNA, 25 bp, Artificial
  Probe
aggtgtctacactaaacttattaag

SEQ ID NO: 198188 - DNA, 25 bp, Artificial
  Probe
catcgtggggcaatgtcccatgtgc

SEQ ID NO: 198189 - DNA, 25 bp, Artificial
  Probe
cagtaccggtttgtcaaccaaagct

SEQ ID NO: 198190 - DNA, 25 bp, Artificial
  Probe
ggtgtctacactaaacttattaagt

SEQ ID NO: 198191 - DNA, 25 bp, Artificial
  Probe
ggagcacctgccttgcctcgggctg

SEQ ID NO: 198192 - DNA, 25 bp, Artificial
  Probe
agaagtgcatcgaagcctacgaaca

SEQ ID NO: 198193 - DNA, 25 bp, Artificial
  Probe
ctcagcgagcctgctgacatcacag

SEQ ID NO: 198194 - DNA, 25 bp, Artificial
  Probe
gctgcccactgctatagcaactatt

SEQ ID NO: 198195 - DNA, 25 bp, Artificial
  Probe
aggtgacagatctcatgctgtgtgc

SEQ ID NO: 198196 - DNA, 25 bp, Artificial
  Probe
ccagtctcggattgttggaggatat

SEQ ID NO: 198197 - DNA, 25 bp, Artificial
  Probe
taccatgttttgttgggtcgaaaca

SEQ ID NO: 198198 - DNA, 25 bp, Artificial
  Probe
gccatttctcatgaggaaccacacc

SEQ ID NO: 198199 - DNA, 25 bp, Artificial
  Probe
agcctacgaacagaaggtgacagat

SEQ ID NO: 198200 - DNA, 25 bp, Artificial
  Probe
tgactacaagccatttctcatgagg

SEQ ID NO: 198201 - DNA, 25 bp, Artificial
  Probe
atcatcaatgaatacctatgcgggg

SEQ ID NO: 198202 - DNA, 25 bp, Artificial
  Probe
ttatgaaggaaaacccctgagtgtc

SEQ ID NO: 198203 - DNA, 25 bp, Artificial
  Probe
gatggacgcaaagacacttgcaagg

SEQ ID NO: 198204 - DNA, 25 bp, Artificial
  Probe
cccctcatctgtgatggtgtgcttc

SEQ ID NO: 198205 - DNA, 25 bp, Artificial
  Probe
tgggtcgaaacaacctatttgaaga

SEQ ID NO: 198206 - DNA, 25 bp, Artificial
  Probe
gagcacctgccttgcctcgggctgg

SEQ ID NO: 198207 - DNA, 25 bp, Artificial
  Probe
ggaattacctgatgatctccagtgt

SEQ ID NO: 198208 - DNA, 25 bp, Artificial
  Probe
ggtgatcacggctgcccactgctat

SEQ ID NO: 198209 - DNA, 25 bp, Artificial
  Probe
gtcccatgtgctgaaccctataacc

SEQ ID NO: 198210 - DNA, 25 bp, Artificial
  Probe
tgatgctgcacctcctggccagtct

SEQ ID NO: 198211 - DNA, 25 bp, Artificial
  Probe
gcaccaaacccctgaattgggaatt

SEQ ID NO: 198212 - DNA, 25 bp, Artificial
  Probe
cttgggtcattttttcaagattcag

SEQ ID NO: 198213 - DNA, 25 bp, Artificial
  Probe
tgttttcagagatggcatctagggc

SEQ ID NO: 198214 - DNA, 25 bp, Artificial
  Probe
aaccgcttctttctctctttgcagg

SEQ ID NO: 198215 - DNA, 25 bp, Artificial
  Probe
ttccgatgaggctgcctttcttgtt

SEQ ID NO: 198216 - DNA, 25 bp, Artificial
  Probe
ttcagaatgactactgatgttttca

SEQ ID NO: 198217 - DNA, 25 bp, Artificial
  Probe
agtcgcagtctcagcctgcagcgga

SEQ ID NO: 198218 - DNA, 25 bp, Artificial
  Probe
cctgttttcgtgaagccagagatcc

SEQ ID NO: 198219 - DNA, 25 bp, Artificial
  Probe
ggaatcgagccttgaaaccttttag

SEQ ID NO: 198220 - DNA, 25 bp, Artificial
  Probe
gactactgatgttttcagagatggc

SEQ ID NO: 198221 - DNA, 25 bp, Artificial
  Probe
ctagtcctcggacaccgaagccaga

SEQ ID NO: 198222 - DNA, 25 bp, Artificial
  Probe
aaagggagcttctctgtctaccctc

SEQ ID NO: 198223 - DNA, 25 bp, Artificial
  Probe
tggaatagagtcaccccaaatcccc

SEQ ID NO: 198224 - DNA, 25 bp, Artificial
  Probe
ggcatctagggcttcttctctacgt

SEQ ID NO: 198225 - DNA, 25 bp, Artificial
  Probe
acacccagtcctctctggaggaaga

SEQ ID NO: 198226 - DNA, 25 bp, Artificial
  Probe
agcctgcagcggactgcgccaagtc

SEQ ID NO: 198227 - DNA, 25 bp, Artificial
  Probe
cttggaatagagtcaccccaaatcc

SEQ ID NO: 198228 - DNA, 25 bp, Artificial
  Probe
tctctacgtcctaagggaaggattt

SEQ ID NO: 198229 - DNA, 25 bp, Artificial
  Probe
cctcggacaccgaagccagagagga

SEQ ID NO: 198230 - DNA, 25 bp, Artificial
  Probe
acgtttggccgcattccaaggcttc

SEQ ID NO: 198231 - DNA, 25 bp, Artificial
  Probe
gcctttcttgtttccttgtgacggt

SEQ ID NO: 198232 - DNA, 25 bp, Artificial
  Probe
attcagaatgactactgatgttttc

SEQ ID NO: 198233 - DNA, 25 bp, Artificial
  Probe
agaatcactggcaggacccaagaaa

SEQ ID NO: 198234 - DNA, 25 bp, Artificial
  Probe
tttctttcttggaatagagtcaccc

SEQ ID NO: 198235 - DNA, 25 bp, Artificial
  Probe
gactccggcggcaaaaggtgaccag

SEQ ID NO: 198236 - DNA, 25 bp, Artificial
  Probe
ttcagagatggcatctagggcttct

SEQ ID NO: 198237 - DNA, 25 bp, Artificial
  Probe
gaatcgagccttgaaaccttttaga

SEQ ID NO: 198238 - DNA, 25 bp, Artificial
  Probe
gagcttctctgtctaccctcctagt

SEQ ID NO: 198239 - DNA, 25 bp, Artificial
  Probe
gagatggcatctagggcttcttctc

SEQ ID NO: 198240 - DNA, 25 bp, Artificial
  Probe
gaatcactggcaggacccaagaaaa

SEQ ID NO: 198241 - DNA, 25 bp, Artificial
  Probe
aatcttggcccctattggcagtcgc

SEQ ID NO: 198242 - DNA, 25 bp, Artificial
  Probe
cttctttctctctttgcagggtgag

SEQ ID NO: 198243 - DNA, 25 bp, Artificial
  Probe
tctttcttggaatagagtcacccca

SEQ ID NO: 198244 - DNA, 25 bp, Artificial
  Probe
ctctctggaggaagaaaagggagct

SEQ ID NO: 198245 - DNA, 25 bp, Artificial
  Probe
gcgctccctttctcctggtagcttt

SEQ ID NO: 198246 - DNA, 25 bp, Artificial
  Probe
aggcccggtggttgtccagctcctc

SEQ ID NO: 198247 - DNA, 25 bp, Artificial
  Probe
gacaccgaagccagagaggactccg

SEQ ID NO: 198248 - DNA, 25 bp, Artificial
  Probe
ctccggcggcaaaaggtgaccagga

SEQ ID NO: 198249 - DNA, 25 bp, Artificial
  Probe
agtctcagcctgcagcggactgcgc

SEQ ID NO: 198250 - DNA, 25 bp, Artificial
  Probe
gccagagaggactccggcggcaaaa

SEQ ID NO: 198251 - DNA, 25 bp, Artificial
  Probe
gccagagatcccttgggtcattttt

SEQ ID NO: 198252 - DNA, 25 bp, Artificial
  Probe
aggcttccgatgaggctgcctttct

SEQ ID NO: 198253 - DNA, 25 bp, Artificial
  Probe
tgtgtctgtccctgttttcgtgaag

SEQ ID NO: 198254 - DNA, 25 bp, Artificial
  Probe
aggatgggaatcgagccttgaaacc

SEQ ID NO: 198255 - DNA, 25 bp, Artificial
  Probe
attggcagtcgcagtctcagcctgc

SEQ ID NO: 198256 - DNA, 25 bp, Artificial
  Probe
cttgtttccttgtgacggttgttga

SEQ ID NO: 198257 - DNA, 25 bp, Artificial
  Probe
cttgggaacgtttggccgcattcca

SEQ ID NO: 198258 - DNA, 25 bp, Artificial
  Probe
ggatcgtttctgacgcaaatcaaac

SEQ ID NO: 198259 - DNA, 25 bp, Artificial
  Probe
tagcacttttaatagcactctgacg

SEQ ID NO: 198260 - DNA, 25 bp, Artificial
  Probe
cgtttctgacgcaaatcaaaccagc

SEQ ID NO: 198261 - DNA, 25 bp, Artificial
  Probe
ctgacgcaaatcaaaccagcctagc

SEQ ID NO: 198262 - DNA, 25 bp, Artificial
  Probe
tattattattatttttcctcggcgt

SEQ ID NO: 198263 - DNA, 25 bp, Artificial
  Probe
gtttaatcgtctcctctctctctct

SEQ ID NO: 198264 - DNA, 25 bp, Artificial
  Probe
ctgtaccgggatcgtttctgacgca

SEQ ID NO: 198265 - DNA, 25 bp, Artificial
  Probe
gcacttttaatagcactctgacggc

SEQ ID NO: 198266 - DNA, 25 bp, Artificial
  Probe
cactctgacggctccggtttaatcg

SEQ ID NO: 198267 - DNA, 25 bp, Artificial
  Probe
ttaatagcactctgacggctccggt

SEQ ID NO: 198268 - DNA, 25 bp, Artificial
  Probe
tctctctctctctcttaggaaatca

SEQ ID NO: 198269 - DNA, 25 bp, Artificial
  Probe
accgggatcgtttctgacgcaaatc

SEQ ID NO: 198270 - DNA, 25 bp, Artificial
  Probe
cctgtaccgggatcgtttctgacgc

SEQ ID NO: 198271 - DNA, 25 bp, Artificial
  Probe
atagcactctgacggctccggttta

SEQ ID NO: 198272 - DNA, 25 bp, Artificial
  Probe
gacgcaaatcaaaccagcctagcac

SEQ ID NO: 198273 - DNA, 25 bp, Artificial
  Probe
cggctccggtttaatcgtctcctct

SEQ ID NO: 198274 - DNA, 25 bp, Artificial
  Probe
acttttaatagcactctgacggctc

SEQ ID NO: 198275 - DNA, 25 bp, Artificial
  Probe
cgggatcgtttctgacgcaaatcaa

SEQ ID NO: 198276 - DNA, 25 bp, Artificial
  Probe
gggatcgtttctgacgcaaatcaaa

SEQ ID NO: 198277 - DNA, 25 bp, Artificial
  Probe
tctctctctcttaggaaatcaaaga

SEQ ID NO: 198278 - DNA, 25 bp, Artificial
  Probe
tgtaccgggatcgtttctgacgcaa

SEQ ID NO: 198279 - DNA, 25 bp, Artificial
  Probe
ccattctaggaaaattccaattgcc

SEQ ID NO: 198280 - DNA, 25 bp, Artificial
  Probe
cacttttaatagcactctgacggct

SEQ ID NO: 198281 - DNA, 25 bp, Artificial
  Probe
ctctctctcttaggaaatcaaagag

SEQ ID NO: 198282 - DNA, 25 bp, Artificial
  Probe
gcctagcacttttaatagcactctg

SEQ ID NO: 198283 - DNA, 25 bp, Artificial
  Probe
ccgggatcgtttctgacgcaaatca

SEQ ID NO: 198284 - DNA, 25 bp, Artificial
  Probe
tgacggctccggtttaatcgtctcc

SEQ ID NO: 198285 - DNA, 25 bp, Artificial
  Probe
ggctccggtttaatcgtctcctctc

SEQ ID NO: 198286 - DNA, 25 bp, Artificial
  Probe
taatagcactctgacggctccggtt

SEQ ID NO: 198287 - DNA, 25 bp, Artificial
  Probe
tttaatagcactctgacggctccgg

SEQ ID NO: 198288 - DNA, 25 bp, Artificial
  Probe
agcacttttaatagcactctgacgg

SEQ ID NO: 198289 - DNA, 25 bp, Artificial
  Probe
ctagcacttttaatagcactctgac

SEQ ID NO: 198290 - DNA, 25 bp, Artificial
  Probe
ttttaatagcactctgacggctccg

SEQ ID NO: 198291 - DNA, 25 bp, Artificial
  Probe
gacggctccggtttaatcgtctcct

SEQ ID NO: 198292 - DNA, 25 bp, Artificial
  Probe
tctctctcttaggaaatcaaagagc

SEQ ID NO: 198293 - DNA, 25 bp, Artificial
  Probe
aatagcactctgacggctccggttt

SEQ ID NO: 198294 - DNA, 25 bp, Artificial
  Probe
agccattctaggaaaattccaattg

SEQ ID NO: 198295 - DNA, 25 bp, Artificial
  Probe
taccgggatcgtttctgacgcaaat

SEQ ID NO: 198296 - DNA, 25 bp, Artificial
  Probe
gtaccgggatcgtttctgacgcaaa

SEQ ID NO: 198297 - DNA, 25 bp, Artificial
  Probe
cttttaatagcactctgacggctcc

SEQ ID NO: 198298 - DNA, 25 bp, Artificial
  Probe
tctgacgcaaatcaaaccagcctag

SEQ ID NO: 198299 - DNA, 25 bp, Artificial
  Probe
tgacgcaaatcaaaccagcctagca

SEQ ID NO: 198300 - DNA, 25 bp, Artificial
  Probe
gctccggtttaatcgtctcctctct

SEQ ID NO: 198301 - DNA, 25 bp, Artificial
  Probe
ctgacggctccggtttaatcgtctc

SEQ ID NO: 198302 - DNA, 25 bp, Artificial
  Probe
aaagccattctaggaaaattccaat

SEQ ID NO: 198303 - DNA, 25 bp, Artificial
  Probe
gtttctgacgcaaatcaaaccagcc

SEQ ID NO: 198304 - DNA, 25 bp, Artificial
  Probe
ctcccagagggtgctaaaggaggaa

SEQ ID NO: 198305 - DNA, 25 bp, Artificial
  Probe
gaccttcaaagtcatctttgacacg

SEQ ID NO: 198306 - DNA, 25 bp, Artificial
  Probe
actacagcagggagtcccacctgct

SEQ ID NO: 198307 - DNA, 25 bp, Artificial
  Probe
aaggtcaaaggtttcctcagccaag

SEQ ID NO: 198308 - DNA, 25 bp, Artificial
  Probe
tggaatcattgtgacacagaccttt

SEQ ID NO: 198309 - DNA, 25 bp, Artificial
  Probe
tgggcatgggcttccctgctcaggc

SEQ ID NO: 198310 - DNA, 25 bp, Artificial
  Probe
gaagtgttttctgtctactacagca

SEQ ID NO: 198311 - DNA, 25 bp, Artificial
  Probe
actggctctccaaggcctggacatc

SEQ ID NO: 198312 - DNA, 25 bp, Artificial
  Probe
gacatctccttctacctgggaggca

SEQ ID NO: 198313 - DNA, 25 bp, Artificial
  Probe
atcgggttcgccttggcccgctaag

SEQ ID NO: 198314 - DNA, 25 bp, Artificial
  Probe
tgctcaagaaaatgccctcggtccg

SEQ ID NO: 198315 - DNA, 25 bp, Artificial
  Probe
acccactgggcctgtctgggtcctg

SEQ ID NO: 198316 - DNA, 25 bp, Artificial
  Probe
gtgctgggaggcagtgaccctcaac

SEQ ID NO: 198317 - DNA, 25 bp, Artificial
  Probe
aggaggatgcctctctgggcactct

SEQ ID NO: 198318 - DNA, 25 bp, Artificial
  Probe
ggtcctcaccaactacttggatacc

SEQ ID NO: 198319 - DNA, 25 bp, Artificial
  Probe
cctgatacccttcatgctggccaag

SEQ ID NO: 198320 - DNA, 25 bp, Artificial
  Probe
gtagcttcagtctcccgacagacac

SEQ ID NO: 198321 - DNA, 25 bp, Artificial
  Probe
ctctgtggggcctgccaccttgttg

SEQ ID NO: 198322 - DNA, 25 bp, Artificial
  Probe
ggggccattctgtctggctctgccc

SEQ ID NO: 198323 - DNA, 25 bp, Artificial
  Probe
agtagacatgaccaggatcagtgct

SEQ ID NO: 198324 - DNA, 25 bp, Artificial
  Probe
gaggtcaccgagctgcccctgatac

SEQ ID NO: 198325 - DNA, 25 bp, Artificial
  Probe
gagtcatccctgtcttcgaccacat

SEQ ID NO: 198326 - DNA, 25 bp, Artificial
  Probe
atgactcctcggaatcctctagcta

SEQ ID NO: 198327 - DNA, 25 bp, Artificial
  Probe
ccactatggatcagggaaggtcaaa

SEQ ID NO: 198328 - DNA, 25 bp, Artificial
  Probe
ccgtggtcctcaccaactacttgga

SEQ ID NO: 198329 - DNA, 25 bp, Artificial
  Probe
ataattacgttgtgaactgtagcca

SEQ ID NO: 198330 - DNA, 25 bp, Artificial
  Probe
ttcgaccacattctctcccagaggg

SEQ ID NO: 198331 - DNA, 25 bp, Artificial
  Probe
tcccgacagacacagccagctttgg

SEQ ID NO: 198332 - DNA, 25 bp, Artificial
  Probe
gttgtgaactgtagccaggtaccca

SEQ ID NO: 198333 - DNA, 25 bp, Artificial
  Probe
agccctgggagtcaaagagaagaga

SEQ ID NO: 198334 - DNA, 25 bp, Artificial
  Probe
cctgccaccttgttgtgtgaggagg

SEQ ID NO: 198335 - DNA, 25 bp, Artificial
  Probe
cccaacatagggacactggacacag

SEQ ID NO: 198336 - DNA, 25 bp, Artificial
  Probe
ggcacatcctatatctcgggcccta

SEQ ID NO: 198337 - DNA, 25 bp, Artificial
  Probe
ctcctggcagatcaccatgaagggg

SEQ ID NO: 198338 - DNA, 25 bp, Artificial
  Probe
gtgagattcacaacctctatgactc

SEQ ID NO: 198339 - DNA, 25 bp, Artificial
  Probe
aaagccttggctggaccagatgggc

SEQ ID NO: 198340 - DNA, 25 bp, Artificial
  Probe
ggttcagccaacctctgggtgccct

SEQ ID NO: 198341 - DNA, 25 bp, Artificial
  Probe
gctaagctcctctgtcacccagtga

SEQ ID NO: 198342 - DNA, 25 bp, Artificial
  Probe
cagtggtggacactggcacatccta

SEQ ID NO: 198343 - DNA, 25 bp, Artificial
  Probe
ctagctacatggagaatgggactga

SEQ ID NO: 198344 - DNA, 25 bp, Artificial
  Probe
taccagctccctgcagttgatcatg

SEQ ID NO: 198345 - DNA, 25 bp, Artificial
  Probe
tgggactgaattcaccatccactat

SEQ ID NO: 198346 - DNA, 25 bp, Artificial
  Probe
agtgtggtcccctctacactgcctg

SEQ ID NO: 198347 - DNA, 25 bp, Artificial
  Probe
tgctggccaagtttgacggggttct

SEQ ID NO: 198348 - DNA, 25 bp, Artificial
  Probe
atgaccaggatcagtgctgaatggg

SEQ ID NO: 198349 - DNA, 25 bp, Artificial
  Probe
cagccaagatgtggtaactgtgggt

SEQ ID NO: 198350 - DNA, 25 bp, Artificial
  Probe
ctttgtcactccattttgtacttac

SEQ ID NO: 198351 - DNA, 25 bp, Artificial
  Probe
tcactccattttgtacttacgactt

SEQ ID NO: 198352 - DNA, 25 bp, Artificial
  Probe
tgaagatctttgtcactccattttg

SEQ ID NO: 198353 - DNA, 25 bp, Artificial
  Probe
gtgatcgatccaaagcaggaaagtg

SEQ ID NO: 198354 - DNA, 25 bp, Artificial
  Probe
gatcgatccaaagcaggaaagtgac

SEQ ID NO: 198355 - DNA, 25 bp, Artificial
  Probe
ttttgtacttacgactttgggagat

SEQ ID NO: 198356 - DNA, 25 bp, Artificial
  Probe
ttgtacttacgactttgggagataa

SEQ ID NO: 198357 - DNA, 25 bp, Artificial
  Probe
tcgatccaaagcaggaaagtgacca

SEQ ID NO: 198358 - DNA, 25 bp, Artificial
  Probe
actgcaatcaaaggtcaaagcatac

SEQ ID NO: 198359 - DNA, 25 bp, Artificial
  Probe
cactccattttgtacttacgacttt

SEQ ID NO: 198360 - DNA, 25 bp, Artificial
  Probe
atcgatccaaagcaggaaagtgacc

SEQ ID NO: 198361 - DNA, 25 bp, Artificial
  Probe
aagatctttgtcactccattttgta

SEQ ID NO: 198362 - DNA, 25 bp, Artificial
  Probe
agtgatcgatccaaagcaggaaagt

SEQ ID NO: 198363 - DNA, 25 bp, Artificial
  Probe
atctttgtcactccattttgtactt

SEQ ID NO: 198364 - DNA, 25 bp, Artificial
  Probe
ttgtcactccattttgtacttacga

SEQ ID NO: 198365 - DNA, 25 bp, Artificial
  Probe
caaactgcaatcaaaggtcaaagca

SEQ ID NO: 198366 - DNA, 25 bp, Artificial
  Probe
tttgtacttacgactttgggagata

SEQ ID NO: 198367 - DNA, 25 bp, Artificial
  Probe
gagtgatcgatccaaagcaggaaag

SEQ ID NO: 198368 - DNA, 25 bp, Artificial
  Probe
tgtggacaaactgcaatcaaaggtc

SEQ ID NO: 198369 - DNA, 25 bp, Artificial
  Probe
aaatcataagcgaagagtgatcgat

SEQ ID NO: 198370 - DNA, 25 bp, Artificial
  Probe
tttgtcactccattttgtacttacg

SEQ ID NO: 198371 - DNA, 25 bp, Artificial
  Probe
aaactgcaatcaaaggtcaaagcat

SEQ ID NO: 198372 - DNA, 25 bp, Artificial
  Probe
tgatcgatccaaagcaggaaagtga

SEQ ID NO: 198373 - DNA, 25 bp, Artificial
  Probe
gtgaagatctttgtcactccatttt

SEQ ID NO: 198374 - DNA, 25 bp, Artificial
  Probe
gtcactccattttgtacttacgact

SEQ ID NO: 198375 - DNA, 25 bp, Artificial
  Probe
agatctttgtcactccattttgtac

SEQ ID NO: 198376 - DNA, 25 bp, Artificial
  Probe
actccattttgtacttacgactttg

SEQ ID NO: 198377 - DNA, 25 bp, Artificial
  Probe
tgtcactccattttgtacttacgac

SEQ ID NO: 198378 - DNA, 25 bp, Artificial
  Probe
acaaactgcaatcaaaggtcaaagc

SEQ ID NO: 198379 - DNA, 25 bp, Artificial
  Probe
agagtgatcgatccaaagcaggaaa

SEQ ID NO: 198380 - DNA, 25 bp, Artificial
  Probe
agaactcacttaccaaactgaggaa

SEQ ID NO: 198381 - DNA, 25 bp, Artificial
  Probe
tctttgtcactccattttgtactta

SEQ ID NO: 198382 - DNA, 25 bp, Artificial
  Probe
tgtacttacgactttgggagataaa

SEQ ID NO: 198383 - DNA, 25 bp, Artificial
  Probe
aaaatcataagcgaagagtgatcga

SEQ ID NO: 198384 - DNA, 25 bp, Artificial
  Probe
tccattttgtacttacgactttggg

SEQ ID NO: 198385 - DNA, 25 bp, Artificial
  Probe
gatctttgtcactccattttgtact

SEQ ID NO: 198386 - DNA, 25 bp, Artificial
  Probe
tctcaggctccaggaccttgtggac

SEQ ID NO: 198387 - DNA, 25 bp, Artificial
  Probe
ggacaaactgcaatcaaaggtcaaa

SEQ ID NO: 198388 - DNA, 25 bp, Artificial
  Probe
ctccattttgtacttacgactttgg

SEQ ID NO: 198389 - DNA, 25 bp, Artificial
  Probe
gacaaactgcaatcaaaggtcaaag

SEQ ID NO: 198390 - DNA, 25 bp, Artificial
  Probe
cgatccaaagcaggaaagtgaccaa

SEQ ID NO: 198391 - DNA, 25 bp, Artificial
  Probe
gaagatctttgtcactccattttgt

SEQ ID NO: 198392 - DNA, 25 bp, Artificial
  Probe
aactgcaatcaaaggtcaaagcata

SEQ ID NO: 198393 - DNA, 25 bp, Artificial
  Probe
cattttgtacttacgactttgggag

SEQ ID NO: 198394 - DNA, 25 bp, Artificial
  Probe
caatcaaaggtcaaagcatacaaga

SEQ ID NO: 198395 - DNA, 25 bp, Artificial
  Probe
gtatctctgtcactaactcgtgtct

SEQ ID NO: 198396 - DNA, 25 bp, Artificial
  Probe
acgcagacagaggactcacaactct

SEQ ID NO: 198397 - DNA, 25 bp, Artificial
  Probe
acagaaatttatcctggagtgatac

SEQ ID NO: 198398 - DNA, 25 bp, Artificial
  Probe
tggtatatgcggtccaaccggaact

SEQ ID NO: 198399 - DNA, 25 bp, Artificial
  Probe
cgtacactgtagtggacagaaattt

SEQ ID NO: 198400 - DNA, 25 bp, Artificial
  Probe
tctggggacgcagacagaggactca

SEQ ID NO: 198401 - DNA, 25 bp, Artificial
  Probe
gtctcatcgtcactgcgtcaaacaa

SEQ ID NO: 198402 - DNA, 25 bp, Artificial
  Probe
ctaactcgtgtctcttgacaaaaag

SEQ ID NO: 198403 - DNA, 25 bp, Artificial
  Probe
aactctactgggtagacgtgggagt

SEQ ID NO: 198404 - DNA, 25 bp, Artificial
  Probe
ttaggaatttactccactcacacgg

SEQ ID NO: 198405 - DNA, 25 bp, Artificial
  Probe
tcctggagtgatacatcgtaaccga

SEQ ID NO: 198406 - DNA, 25 bp, Artificial
  Probe
cagaaatttatcctggagtgataca

SEQ ID NO: 198407 - DNA, 25 bp, Artificial
  Probe
acgtcaagtggtatatgcggtccaa

SEQ ID NO: 198408 - DNA, 25 bp, Artificial
  Probe
aaagtaaccgactcgcgagaactcg

SEQ ID NO: 198409 - DNA, 25 bp, Artificial
  Probe
ttagtctggcgcaacaaccacaata

SEQ ID NO: 198410 - DNA, 25 bp, Artificial
  Probe
gagtgatacatcgtaaccgaccgga

SEQ ID NO: 198411 - DNA, 25 bp, Artificial
  Probe
caaccggaacttgagggtcgtctgg

SEQ ID NO: 198412 - DNA, 25 bp, Artificial
  Probe
cgcgtctcatcgtcactgcgtcaaa

SEQ ID NO: 198413 - DNA, 25 bp, Artificial
  Probe
cggacgtcaagtggtatatgcggtc

SEQ ID NO: 198414 - DNA, 25 bp, Artificial
  Probe
gtcactaactcgtgtctcttgacaa

SEQ ID NO: 198415 - DNA, 25 bp, Artificial
  Probe
aaatttatcctggagtgatacatcg

SEQ ID NO: 198416 - DNA, 25 bp, Artificial
  Probe
ctattggcaatctttttcgagtgag

SEQ ID NO: 198417 - DNA, 25 bp, Artificial
  Probe
tgagtcctgcggtggacacgatcca

SEQ ID NO: 198418 - DNA, 25 bp, Artificial
  Probe
aaccgactcgcgagaactcgtggtg

SEQ ID NO: 198419 - DNA, 25 bp, Artificial
  Probe
acatcgtaaccgaccggacgtcaag

SEQ ID NO: 198420 - DNA, 25 bp, Artificial
  Probe
tcacaactctactgggtagacgtgg

SEQ ID NO: 198421 - DNA, 25 bp, Artificial
  Probe
tgatacatcgtaaccgaccggacgt

SEQ ID NO: 198422 - DNA, 25 bp, Artificial
  Probe
gtttgggtccgcagtatctctgtca

SEQ ID NO: 198423 - DNA, 25 bp, Artificial
  Probe
aaactcgttcataatttgagtcctg

SEQ ID NO: 198424 - DNA, 25 bp, Artificial
  Probe
tgtacctagaactgaagtaccattc

SEQ ID NO: 198425 - DNA, 25 bp, Artificial
  Probe
ggcgcaacaaccacaataacaagga

SEQ ID NO: 198426 - DNA, 25 bp, Artificial
  Probe
taactcgtgtctcttgacaaaaagg

SEQ ID NO: 198427 - DNA, 25 bp, Artificial
  Probe
ctctgtcactaactcgtgtctcttg

SEQ ID NO: 198428 - DNA, 25 bp, Artificial
  Probe
ctcttgacaaaaaggctgagtctga

SEQ ID NO: 198429 - DNA, 25 bp, Artificial
  Probe
tccaaccggaacttgagggtcgtct

SEQ ID NO: 198430 - DNA, 25 bp, Artificial
  Probe
ggagcgtttgggtccgcagtatctc

SEQ ID NO: 198431 - DNA, 25 bp, Artificial
  Probe
taatttgagtcctgcggtggacacg

SEQ ID NO: 198432 - DNA, 25 bp, Artificial
  Probe
atatgcggtccaaccggaacttgag

SEQ ID NO: 198433 - DNA, 25 bp, Artificial
  Probe
caggtcttagtctggcgcaacaacc

SEQ ID NO: 198434 - DNA, 25 bp, Artificial
  Probe
ctggggacgcagacagaggactcac

SEQ ID NO: 198435 - DNA, 25 bp, Artificial
  Probe
cgtgtctcttgacaaaaaggctgag

SEQ ID NO: 198436 - DNA, 25 bp, Artificial
  Probe
ccactcacacggaacgtacactgta

SEQ ID NO: 198437 - DNA, 25 bp, Artificial
  Probe
aaagtgtacgattcaggtcttagtc

SEQ ID NO: 198438 - DNA, 25 bp, Artificial
  Probe
gaatttactccactcacacggaacg

SEQ ID NO: 198439 - DNA, 25 bp, Artificial
  Probe
taaccgaccggacgtcaagtggtat

SEQ ID NO: 198440 - DNA, 25 bp, Artificial
  Probe
cgtcaagtggtatatgcggtccaac

SEQ ID NO: 198441 - DNA, 25 bp, Artificial
  Probe
cagctgactcgctacactacatgga

SEQ ID NO: 198442 - DNA, 25 bp, Artificial
  Probe
ggcctaacagggatcgtactatcta

SEQ ID NO: 198443 - DNA, 25 bp, Artificial
  Probe
catgatacatactacgtagtagctc

SEQ ID NO: 198444 - DNA, 25 bp, Artificial
  Probe
tttatcttcttattcacagtagggg

SEQ ID NO: 198445 - DNA, 25 bp, Artificial
  Probe
gtagtagctcacttccactatgtct

SEQ ID NO: 198446 - DNA, 25 bp, Artificial
  Probe
tacgtagtagctcacttccactatg

SEQ ID NO: 198447 - DNA, 25 bp, Artificial
  Probe
aacagggatcgtactatctaactca

SEQ ID NO: 198448 - DNA, 25 bp, Artificial
  Probe
acagggatcgtactatctaactcat

SEQ ID NO: 198449 - DNA, 25 bp, Artificial
  Probe
gagccttagggtttatcttcttatt

SEQ ID NO: 198450 - DNA, 25 bp, Artificial
  Probe
ttccactatgtcttatctataggag

SEQ ID NO: 198451 - DNA, 25 bp, Artificial
  Probe
tgtcttatctataggagcagtattc

SEQ ID NO: 198452 - DNA, 25 bp, Artificial
  Probe
ttcctacaggcgtaaaagtattcag

SEQ ID NO: 198453 - DNA, 25 bp, Artificial
  Probe
agggtttatcttcttattcacagta

SEQ ID NO: 198454 - DNA, 25 bp, Artificial
  Probe
tccactatgtcttatctataggagc

SEQ ID NO: 198455 - DNA, 25 bp, Artificial
  Probe
cgccatattatgagccttagggttt

SEQ ID NO: 198456 - DNA, 25 bp, Artificial
  Probe
gggatcgtactatctaactcatccc

SEQ ID NO: 198457 - DNA, 25 bp, Artificial
  Probe
ctacactacatggaggaaatatcaa

SEQ ID NO: 198458 - DNA, 25 bp, Artificial
  Probe
ttagggtttatcttcttattcacag

SEQ ID NO: 198459 - DNA, 25 bp, Artificial
  Probe
gggtttatcttcttattcacagtag

SEQ ID NO: 198460 - DNA, 25 bp, Artificial
  Probe
gactcgctacactacatggaggaaa

SEQ ID NO: 198461 - DNA, 25 bp, Artificial
  Probe
agtattcagctgactcgctacacta

SEQ ID NO: 198462 - DNA, 25 bp, Artificial
  Probe
tcgctacactacatggaggaaatat

SEQ ID NO: 198463 - DNA, 25 bp, Artificial
  Probe
tagggggcctaacagggatcgtact

SEQ ID NO: 198464 - DNA, 25 bp, Artificial
  Probe
cactatgtcttatctataggagcag

SEQ ID NO: 198465 - DNA, 25 bp, Artificial
  Probe
cttatctataggagcagtattcgcc

SEQ ID NO: 198466 - DNA, 25 bp, Artificial
  Probe
tataggagcagtattcgccatcata

SEQ ID NO: 198467 - DNA, 25 bp, Artificial
  Probe
ccgccatattatgagccttagggtt

SEQ ID NO: 198468 - DNA, 25 bp, Artificial
  Probe
gtacttcatgatacatactacgtag

SEQ ID NO: 198469 - DNA, 25 bp, Artificial
  Probe
gccttagggtttatcttcttattca

SEQ ID NO: 198470 - DNA, 25 bp, Artificial
  Probe
cttcatgatacatactacgtagtag

SEQ ID NO: 198471 - DNA, 25 bp, Artificial
  Probe
agctgactcgctacactacatggag

SEQ ID NO: 198472 - DNA, 25 bp, Artificial
  Probe
tacactacatggaggaaatatcaaa

SEQ ID NO: 198473 - DNA, 25 bp, Artificial
  Probe
ccactatgtcttatctataggagca

SEQ ID NO: 198474 - DNA, 25 bp, Artificial
  Probe
aaagtattcagctgactcgctacac

SEQ ID NO: 198475 - DNA, 25 bp, Artificial
  Probe
tctataggagcagtattcgccatca

SEQ ID NO: 198476 - DNA, 25 bp, Artificial
  Probe
ttatctataggagcagtattcgcca

SEQ ID NO: 198477 - DNA, 25 bp, Artificial
  Probe
cccgccatattatgagccttagggt

SEQ ID NO: 198478 - DNA, 25 bp, Artificial
  Probe
ggtttatcttcttattcacagtagg

SEQ ID NO: 198479 - DNA, 25 bp, Artificial
  Probe
tgagccttagggtttatcttcttat

SEQ ID NO: 198480 - DNA, 25 bp, Artificial
  Probe
ttcatgatacatactacgtagtagc

SEQ ID NO: 198481 - DNA, 25 bp, Artificial
  Probe
cgcaattcctacaggcgtaaaagta

SEQ ID NO: 198482 - DNA, 25 bp, Artificial
  Probe
attatgagccttagggtttatcttc

SEQ ID NO: 198483 - DNA, 25 bp, Artificial
  Probe
cctaacagggatcgtactatctaac

SEQ ID NO: 198484 - DNA, 25 bp, Artificial
  Probe
tcctacaggcgtaaaagtattcagc

SEQ ID NO: 198485 - DNA, 25 bp, Artificial
  Probe
atctataggagcagtattcgccatc

SEQ ID NO: 198486 - DNA, 25 bp, Artificial
  Probe
tgactcgctacactacatggaggaa

SEQ ID NO: 198487 - DNA, 25 bp, Artificial
  Probe
tatccttgtcaaacagcgtcacgta

SEQ ID NO: 198488 - DNA, 25 bp, Artificial
  Probe
gtgtcaaactctcttacgcaaaagt

SEQ ID NO: 198489 - DNA, 25 bp, Artificial
  Probe
aatctttccttatggagagtgtcct

SEQ ID NO: 198490 - DNA, 25 bp, Artificial
  Probe
gaaatagctgtcatatccttgtcaa

SEQ ID NO: 198491 - DNA, 25 bp, Artificial
  Probe
cgcaaaagtaatctttccttatgga

SEQ ID NO: 198492 - DNA, 25 bp, Artificial
  Probe
tcagaaagctctgcaacaatgaagt

SEQ ID NO: 198493 - DNA, 25 bp, Artificial
  Probe
acaagcttcttagacgctggagtat

SEQ ID NO: 198494 - DNA, 25 bp, Artificial
  Probe
tagctgtcatatccttgtcaaacag

SEQ ID NO: 198495 - DNA, 25 bp, Artificial
  Probe
cagcgtcacgtagaaaccctcgtgt

SEQ ID NO: 198496 - DNA, 25 bp, Artificial
  Probe
gtagaaaccctcgtgtcaaactctc

SEQ ID NO: 198497 - DNA, 25 bp, Artificial
  Probe
cgtgtcaaactctcttacgcaaaag

SEQ ID NO: 198498 - DNA, 25 bp, Artificial
  Probe
caaacattgtcatgaaatagctgtc

SEQ ID NO: 198499 - DNA, 25 bp, Artificial
  Probe
gtcatatccttgtcaaacagcgtca

SEQ ID NO: 198500 - DNA, 25 bp, Artificial
  Probe
tcaaacagcgtcacgtagaaaccct

SEQ ID NO: 198501 - DNA, 25 bp, Artificial
  Probe
caaacagcgtcacgtagaaaccctc

SEQ ID NO: 198502 - DNA, 25 bp, Artificial
  Probe
ttagacgctggagtatccaaacatt

SEQ ID NO: 198503 - DNA, 25 bp, Artificial
  Probe
atgccatctagttgagttaaaacct

SEQ ID NO: 198504 - DNA, 25 bp, Artificial
  Probe
tgccatctagttgagttaaaacctc

SEQ ID NO: 198505 - DNA, 25 bp, Artificial
  Probe
cgtcacgtagaaaccctcgtgtcaa

SEQ ID NO: 198506 - DNA, 25 bp, Artificial
  Probe
tggagtatccaaacattgtcatgaa

SEQ ID NO: 198507 - DNA, 25 bp, Artificial
  Probe
tccttgtcaaacagcgtcacgtaga

SEQ ID NO: 198508 - DNA, 25 bp, Artificial
  Probe
gagtatccaaacattgtcatgaaat

SEQ ID NO: 198509 - DNA, 25 bp, Artificial
  Probe
gtatccaaacattgtcatgaaatag

SEQ ID NO: 198510 - DNA, 25 bp, Artificial
  Probe
ctgtcatatccttgtcaaacagcgt

SEQ ID NO: 198511 - DNA, 25 bp, Artificial
  Probe
tgaaatagctgtcatatccttgtca

SEQ ID NO: 198512 - DNA, 25 bp, Artificial
  Probe
catatccttgtcaaacagcgtcacg

SEQ ID NO: 198513 - DNA, 25 bp, Artificial
  Probe
gtaatctttccttatggagagtgtc

SEQ ID NO: 198514 - DNA, 25 bp, Artificial
  Probe
cgctggagtatccaaacattgtcat

SEQ ID NO: 198515 - DNA, 25 bp, Artificial
  Probe
tgtcaaacagcgtcacgtagaaacc

SEQ ID NO: 198516 - DNA, 25 bp, Artificial
  Probe
cttcttagacgctggagtatccaaa

SEQ ID NO: 198517 - DNA, 25 bp, Artificial
  Probe
aacagcgtcacgtagaaaccctcgt

SEQ ID NO: 198518 - DNA, 25 bp, Artificial
  Probe
agctgtcatatccttgtcaaacagc

SEQ ID NO: 198519 - DNA, 25 bp, Artificial
  Probe
gcaaaagtaatctttccttatggag

SEQ ID NO: 198520 - DNA, 25 bp, Artificial
  Probe
acattgtcatgaaatagctgtcata

SEQ ID NO: 198521 - DNA, 25 bp, Artificial
  Probe
cattgtcatgaaatagctgtcatat

SEQ ID NO: 198522 - DNA, 25 bp, Artificial
  Probe
taatctttccttatggagagtgtcc

SEQ ID NO: 198523 - DNA, 25 bp, Artificial
  Probe
ggatgccatctagttgagttaaaac

SEQ ID NO: 198524 - DNA, 25 bp, Artificial
  Probe
tccaaacattgtcatgaaatagctg

SEQ ID NO: 198525 - DNA, 25 bp, Artificial
  Probe
gctgtcatatccttgtcaaacagcg

SEQ ID NO: 198526 - DNA, 25 bp, Artificial
  Probe
caagcttcttagacgctggagtatc

SEQ ID NO: 198527 - DNA, 25 bp, Artificial
  Probe
tttccttatggagagtgtcctttct

SEQ ID NO: 198528 - DNA, 25 bp, Artificial
  Probe
cagaaagctctgcaacaatgaagta

SEQ ID NO: 198529 - DNA, 25 bp, Artificial
  Probe
agacgctggagtatccaaacattgt

SEQ ID NO: 198530 - DNA, 25 bp, Artificial
  Probe
tcttagacgctggagtatccaaaca

SEQ ID NO: 198531 - DNA, 25 bp, Artificial
  Probe
cgtagaaaccctcgtgtcaaactct

SEQ ID NO: 198532 - DNA, 25 bp, Artificial
  Probe
ctggagtatccaaacattgtcatga

SEQ ID NO: 198533 - DNA, 25 bp, Artificial
  Probe
aagtcttatatctggcaaaccttga

SEQ ID NO: 198534 - DNA, 25 bp, Artificial
  Probe
gcaaaccttgacagtccagaagaac

SEQ ID NO: 198535 - DNA, 25 bp, Artificial
  Probe
tctcaagtcttatatctggcaaacc

SEQ ID NO: 198536 - DNA, 25 bp, Artificial
  Probe
ttgacagtccagaagaactagagta

SEQ ID NO: 198537 - DNA, 25 bp, Artificial
  Probe
ctggcaaaccttgacagtccagaag

SEQ ID NO: 198538 - DNA, 25 bp, Artificial
  Probe
tcaagtcttatatctggcaaacctt

SEQ ID NO: 198539 - DNA, 25 bp, Artificial
  Probe
ttgacagtcctctcaactttcctaa

SEQ ID NO: 198540 - DNA, 25 bp, Artificial
  Probe
aaccttgacagtccagaagaactag

SEQ ID NO: 198541 - DNA, 25 bp, Artificial
  Probe
gttatacccagtctcaagtcttata

SEQ ID NO: 198542 - DNA, 25 bp, Artificial
  Probe
acccagtctcaagtcttatatctgg

SEQ ID NO: 198543 - DNA, 25 bp, Artificial
  Probe
atgtaatgttatacccagtctcaag

SEQ ID NO: 198544 - DNA, 25 bp, Artificial
  Probe
attgtttgacagtcctctcaacttt

SEQ ID NO: 198545 - DNA, 25 bp, Artificial
  Probe
aaaccttgacagtccagaagaacta

SEQ ID NO: 198546 - DNA, 25 bp, Artificial
  Probe
ccttgacagtccagaagaactagag

SEQ ID NO: 198547 - DNA, 25 bp, Artificial
  Probe
ccttctgtgagctaagataaaaaaa

SEQ ID NO: 198548 - DNA, 25 bp, Artificial
  Probe
tatatctggcaaaccttgacagtcc

SEQ ID NO: 198549 - DNA, 25 bp, Artificial
  Probe
tcatgtaatgttatacccagtctca

SEQ ID NO: 198550 - DNA, 25 bp, Artificial
  Probe
cttatatctggcaaaccttgacagt

SEQ ID NO: 198551 - DNA, 25 bp, Artificial
  Probe
tctcagccttctgtgagctaagata

SEQ ID NO: 198552 - DNA, 25 bp, Artificial
  Probe
tccttctcagccttctgtgagctaa

SEQ ID NO: 198553 - DNA, 25 bp, Artificial
  Probe
tcagccttctgtgagctaagataaa

SEQ ID NO: 198554 - DNA, 25 bp, Artificial
  Probe
taaattgtttgacagtcctctcaac

SEQ ID NO: 198555 - DNA, 25 bp, Artificial
  Probe
ggcaaaccttgacagtccagaagaa

SEQ ID NO: 198556 - DNA, 25 bp, Artificial
  Probe
tctggcaaaccttgacagtccagaa

SEQ ID NO: 198557 - DNA, 25 bp, Artificial
  Probe
accttgacagtccagaagaactaga

SEQ ID NO: 198558 - DNA, 25 bp, Artificial
  Probe
agtcttatatctggcaaaccttgac

SEQ ID NO: 198559 - DNA, 25 bp, Artificial
  Probe
acagtcctctcaactttcctaattc

SEQ ID NO: 198560 - DNA, 25 bp, Artificial
  Probe
ttatatctggcaaaccttgacagtc

SEQ ID NO: 198561 - DNA, 25 bp, Artificial
  Probe
caaaccttgacagtccagaagaact

SEQ ID NO: 198562 - DNA, 25 bp, Artificial
  Probe
caagtcttatatctggcaaaccttg

SEQ ID NO: 198563 - DNA, 25 bp, Artificial
  Probe
tatctggcaaaccttgacagtccag

SEQ ID NO: 198564 - DNA, 25 bp, Artificial
  Probe
ctcagccttctgtgagctaagataa

SEQ ID NO: 198565 - DNA, 25 bp, Artificial
  Probe
cccagtctcaagtcttatatctggc

SEQ ID NO: 198566 - DNA, 25 bp, Artificial
  Probe
tcttatatctggcaaaccttgacag

SEQ ID NO: 198567 - DNA, 25 bp, Artificial
  Probe
cttgacagtccagaagaactagagt

SEQ ID NO: 198568 - DNA, 25 bp, Artificial
  Probe
ccagtctcaagtcttatatctggca

SEQ ID NO: 198569 - DNA, 25 bp, Artificial
  Probe
ttctcagccttctgtgagctaagat

SEQ ID NO: 198570 - DNA, 25 bp, Artificial
  Probe
atctggcaaaccttgacagtccaga

SEQ ID NO: 198571 - DNA, 25 bp, Artificial
  Probe
tacccagtctcaagtcttatatctg

SEQ ID NO: 198572 - DNA, 25 bp, Artificial
  Probe
tgtaatgttatacccagtctcaagt

SEQ ID NO: 198573 - DNA, 25 bp, Artificial
  Probe
agccttctgtgagctaagataaaaa

SEQ ID NO: 198574 - DNA, 25 bp, Artificial
  Probe
cagccttctgtgagctaagataaaa

SEQ ID NO: 198575 - DNA, 25 bp, Artificial
  Probe
cagtctcaagtcttatatctggcaa

SEQ ID NO: 198576 - DNA, 25 bp, Artificial
  Probe
agtctcaagtcttatatctggcaaa

SEQ ID NO: 198577 - DNA, 25 bp, Artificial
  Probe
gtctcaagtcttatatctggcaaac

SEQ ID NO: 198578 - DNA, 25 bp, Artificial
  Probe
tggcaaaccttgacagtccagaaga

SEQ ID NO: 198579 - DNA, 25 bp, Artificial
  Probe
tccgcgtcccgaatgctgacattga

SEQ ID NO: 198580 - DNA, 25 bp, Artificial
  Probe
gcgcttctctcgtcggcggacttgt

SEQ ID NO: 198581 - DNA, 25 bp, Artificial
  Probe
cgtaccgggcgatgcttgtgcctga

SEQ ID NO: 198582 - DNA, 25 bp, Artificial
  Probe
atgtccaaggattggccgcttgtcg

SEQ ID NO: 198583 - DNA, 25 bp, Artificial
  Probe
atgctgacattgacgtagtcgttgt

SEQ ID NO: 198584 - DNA, 25 bp, Artificial
  Probe
aaatgatccgcgtcccgaatgctga

SEQ ID NO: 198585 - DNA, 25 bp, Artificial
  Probe
tcatgtccaaggattggccgcttgt

SEQ ID NO: 198586 - DNA, 25 bp, Artificial
  Probe
tcggcggacttgtgatcggcctgca

SEQ ID NO: 198587 - DNA, 25 bp, Artificial
  Probe
taaagctgtctgaagcggacaagct

SEQ ID NO: 198588 - DNA, 25 bp, Artificial
  Probe
atcagccgtaccgggcgatgcttgt

SEQ ID NO: 198589 - DNA, 25 bp, Artificial
  Probe
cggcctgcatgaggatgacgagacc

SEQ ID NO: 198590 - DNA, 25 bp, Artificial
  Probe
tgcttccgaaggagtttccatatgc

SEQ ID NO: 198591 - DNA, 25 bp, Artificial
  Probe
aaagcaagtgctgtcagcaatatcc

SEQ ID NO: 198592 - DNA, 25 bp, Artificial
  Probe
gtgctgtcagcaatatcctcattgc

SEQ ID NO: 198593 - DNA, 25 bp, Artificial
  Probe
agggcgcatatggaacggctctcag

SEQ ID NO: 198594 - DNA, 25 bp, Artificial
  Probe
ctgcgatcatgtccaaggattggcc

SEQ ID NO: 198595 - DNA, 25 bp, Artificial
  Probe
tgaagggcgcatatggaacggctct

SEQ ID NO: 198596 - DNA, 25 bp, Artificial
  Probe
cggctctcagcggagcaggcccaac

SEQ ID NO: 198597 - DNA, 25 bp, Artificial
  Probe
aagcaagtgctgtcagcaatatcct

SEQ ID NO: 198598 - DNA, 25 bp, Artificial
  Probe
cgcttcatttccctcattgtgaagt

SEQ ID NO: 198599 - DNA, 25 bp, Artificial
  Probe
tgctgacattgacgtagtcgttgtc

SEQ ID NO: 198600 - DNA, 25 bp, Artificial
  Probe
tcagcggagcaggcccaacgattct

SEQ ID NO: 198601 - DNA, 25 bp, Artificial
  Probe
acgtcgccgagatgaagggcgcata

SEQ ID NO: 198602 - DNA, 25 bp, Artificial
  Probe
tgcatttagcgagtctagaagaagg

SEQ ID NO: 198603 - DNA, 25 bp, Artificial
  Probe
atgacgagacccaaatgatccgcgt

SEQ ID NO: 198604 - DNA, 25 bp, Artificial
  Probe
tgatcggcctgcatgaggatgacga

SEQ ID NO: 198605 - DNA, 25 bp, Artificial
  Probe
atgaattatgcggcttaaagctgtc

SEQ ID NO: 198606 - DNA, 25 bp, Artificial
  Probe
cggacaatgctggcgcttctctcgt

SEQ ID NO: 198607 - DNA, 25 bp, Artificial
  Probe
cggacaagctgcatttagcgagtct

SEQ ID NO: 198608 - DNA, 25 bp, Artificial
  Probe
tgttccatcagccgtaccgggcgat

SEQ ID NO: 198609 - DNA, 25 bp, Artificial
  Probe
gacttgtgatcggcctgcatgagga

SEQ ID NO: 198610 - DNA, 25 bp, Artificial
  Probe
agtttccatatgccgatgccgtaaa

SEQ ID NO: 198611 - DNA, 25 bp, Artificial
  Probe
tgctggcgcttctctcgtcggcgga

SEQ ID NO: 198612 - DNA, 25 bp, Artificial
  Probe
gcccaacgattctcgtcatgaccga

SEQ ID NO: 198613 - DNA, 25 bp, Artificial
  Probe
acattgacgtagtcgttgtcattcc

SEQ ID NO: 198614 - DNA, 25 bp, Artificial
  Probe
aggatatgttccatcagccgtaccg

SEQ ID NO: 198615 - DNA, 25 bp, Artificial
  Probe
caagagacgcgagagacgtgcttcc

SEQ ID NO: 198616 - DNA, 25 bp, Artificial
  Probe
atatcctcattgctgcgatcatgtc

SEQ ID NO: 198617 - DNA, 25 bp, Artificial
  Probe
gacacccggacaatgctggcgcttc

SEQ ID NO: 198618 - DNA, 25 bp, Artificial
  Probe
gagacgcgagagacgtgcttccgaa

SEQ ID NO: 198619 - DNA, 25 bp, Artificial
  Probe
agctcgcgcttcatttccctcattg

SEQ ID NO: 198620 - DNA, 25 bp, Artificial
  Probe
ccaacgattctcgtcatgaccgaaa

SEQ ID NO: 198621 - DNA, 25 bp, Artificial
  Probe
ccgggcgatgcttgtgcctgagctg

SEQ ID NO: 198622 - DNA, 25 bp, Artificial
  Probe
gagcaggcccaacgattctcgtcat

SEQ ID NO: 198623 - DNA, 25 bp, Artificial
  Probe
aattatgcggcttaaagctgtctga

SEQ ID NO: 198624 - DNA, 25 bp, Artificial
  Probe
atgctggcgcttctctcgtcggcgg

SEQ ID NO: 198625 - DNA, 25 bp, Artificial
  Probe
ctttttatgaagtgctgacaagaga

SEQ ID NO: 198626 - DNA, 25 bp, Artificial
  Probe
gagcgaaatcctttatatcaagtaa

SEQ ID NO: 198627 - DNA, 25 bp, Artificial
  Probe
tgcttgtgcctgagctgtcaaaagt

SEQ ID NO: 198628 - DNA, 25 bp, Artificial
  Probe
tcattgctgcgatcatgtccaagga

SEQ ID NO: 198629 - DNA, 25 bp, Artificial
  Probe
tgatgttttagcgatcccggtcgga

SEQ ID NO: 198630 - DNA, 25 bp, Artificial
  Probe
tgagaaatcaccgattgcccttgtc

SEQ ID NO: 198631 - DNA, 25 bp, Artificial
  Probe
ggaaggcgtcaatcctacgggatca

SEQ ID NO: 198632 - DNA, 25 bp, Artificial
  Probe
acctcttattcacctgccgaagctg

SEQ ID NO: 198633 - DNA, 25 bp, Artificial
  Probe
cactgcgtactggaagggcttcaag

SEQ ID NO: 198634 - DNA, 25 bp, Artificial
  Probe
cgctgctgcggcagcatatgcagcc

SEQ ID NO: 198635 - DNA, 25 bp, Artificial
  Probe
catgtacggagccgagattatcgca

SEQ ID NO: 198636 - DNA, 25 bp, Artificial
  Probe
tatgtgcgcgtcaacaggtaacact

SEQ ID NO: 198637 - DNA, 25 bp, Artificial
  Probe
aggtaacacttccgctgctgcggca

SEQ ID NO: 198638 - DNA, 25 bp, Artificial
  Probe
aaactgctgccttcgaagtgtgcga

SEQ ID NO: 198639 - DNA, 25 bp, Artificial
  Probe
ggttatggctgtggcaaaggcaaaa

SEQ ID NO: 198640 - DNA, 25 bp, Artificial
  Probe
ttagcgatcccggtcggaaatgctg

SEQ ID NO: 198641 - DNA, 25 bp, Artificial
  Probe
gtctgagcagctcggaattgagctt

SEQ ID NO: 198642 - DNA, 25 bp, Artificial
  Probe
cacttccgctgctgcggcagcatat

SEQ ID NO: 198643 - DNA, 25 bp, Artificial
  Probe
cgctcaagctgtcatgtacggagcc

SEQ ID NO: 198644 - DNA, 25 bp, Artificial
  Probe
gaaatgcattgtcatcatcccgaac

SEQ ID NO: 198645 - DNA, 25 bp, Artificial
  Probe
catcactgcgtactggaagggcttc

SEQ ID NO: 198646 - DNA, 25 bp, Artificial
  Probe
ggaaaggacttatccatcaatataa

SEQ ID NO: 198647 - DNA, 25 bp, Artificial
  Probe
ttatggctgtggcaaaggcaaaaga

SEQ ID NO: 198648 - DNA, 25 bp, Artificial
  Probe
tgagcttcatgtcaaaacggaaggc

SEQ ID NO: 198649 - DNA, 25 bp, Artificial
  Probe
cctgccgaagctgtctgagcagctc

SEQ ID NO: 198650 - DNA, 25 bp, Artificial
  Probe
ggcggcaatcgtgcgcaatgaagtg

SEQ ID NO: 198651 - DNA, 25 bp, Artificial
  Probe
ttaaaattgtccgttccatctgtga

SEQ ID NO: 198652 - DNA, 25 bp, Artificial
  Probe
agatcgcggaatggttatggctgtg

SEQ ID NO: 198653 - DNA, 25 bp, Artificial
  Probe
gaaacaatagcgacagccattcgta

SEQ ID NO: 198654 - DNA, 25 bp, Artificial
  Probe
agctgtcatgtacggagccgagatt

SEQ ID NO: 198655 - DNA, 25 bp, Artificial
  Probe
attcacctgccgaagctgtctgagc

SEQ ID NO: 198656 - DNA, 25 bp, Artificial
  Probe
agctcggaattgagcttcatgtcaa

SEQ ID NO: 198657 - DNA, 25 bp, Artificial
  Probe
catgaaggaaacacacctcttattc

SEQ ID NO: 198658 - DNA, 25 bp, Artificial
  Probe
tgcagcccgtgctaacatgaaatgc

SEQ ID NO: 198659 - DNA, 25 bp, Artificial
  Probe
gaagctgtctgagcagctcggaatt

SEQ ID NO: 198660 - DNA, 25 bp, Artificial
  Probe
gtgcgcgtcaacaggtaacacttcc

SEQ ID NO: 198661 - DNA, 25 bp, Artificial
  Probe
tcatgtcaaaacggaaggcgtcaat

SEQ ID NO: 198662 - DNA, 25 bp, Artificial
  Probe
gaaatcaccgattgcccttgtcaac

SEQ ID NO: 198663 - DNA, 25 bp, Artificial
  Probe
tatcgcaattgacggaaactttgac

SEQ ID NO: 198664 - DNA, 25 bp, Artificial
  Probe
aactgctgccttcgaagtgtgcgaa

SEQ ID NO: 198665 - DNA, 25 bp, Artificial
  Probe
aacacttccgctgctgcggcagcat

SEQ ID NO: 198666 - DNA, 25 bp, Artificial
  Probe
aactcgctcaagctgtcatgtacgg

SEQ ID NO: 198667 - DNA, 25 bp, Artificial
  Probe
atcaccgattgcccttgtcaactca

SEQ ID NO: 198668 - DNA, 25 bp, Artificial
  Probe
tgcggcggcaatcgtgcgcaatgaa

SEQ ID NO: 198669 - DNA, 25 bp, Artificial
  Probe
gcgtcaatcctacgggatcatttaa

SEQ ID NO: 198670 - DNA, 25 bp, Artificial
  Probe
gattgcccttgtcaactcagtcaac

SEQ ID NO: 198671 - DNA, 25 bp, Artificial
  Probe
aaatgctggaaacatcactgcgtac

SEQ ID NO: 198672 - DNA, 25 bp, Artificial
  Probe
aatgcattgtcatcatcccgaacgg

SEQ ID NO: 198673 - DNA, 25 bp, Artificial
  Probe
cacaggccttccgaaaatgcgcggc

SEQ ID NO: 198674 - DNA, 25 bp, Artificial
  Probe
cagcatatgcagcccgtgctaacat

SEQ ID NO: 198675 - DNA, 25 bp, Artificial
  Probe
ccgttccatctgtgagaaatcaccg

SEQ ID NO: 198676 - DNA, 25 bp, Artificial
  Probe
tgacacgattatgtgcgcgtcaaca

SEQ ID NO: 198677 - DNA, 25 bp, Artificial
  Probe
tgcggcagcatatgcagcccgtgct

SEQ ID NO: 198678 - DNA, 25 bp, Artificial
  Probe
gtacggagccgagattatcgcaatt

SEQ ID NO: 198679 - DNA, 25 bp, Artificial
  Probe
ctgtccatgtgaaggtgtggagcga

SEQ ID NO: 198680 - DNA, 25 bp, Artificial
  Probe
tctctgtcactgttcccggaagcac

SEQ ID NO: 198681 - DNA, 25 bp, Artificial
  Probe
tgaagctgaccgtctttgaaagcga

SEQ ID NO: 198682 - DNA, 25 bp, Artificial
  Probe
actgaaagatccgaacacagcggtc

SEQ ID NO: 198683 - DNA, 25 bp, Artificial
  Probe
cctgtcacattgccgactgatgaag

SEQ ID NO: 198684 - DNA, 25 bp, Artificial
  Probe
ataacctgatctaccaagtggctaa

SEQ ID NO: 198685 - DNA, 25 bp, Artificial
  Probe
gaaccaggttcttgcgcgtctatcg

SEQ ID NO: 198686 - DNA, 25 bp, Artificial
  Probe
ttcagtcggaatggcgctcagcaga

SEQ ID NO: 198687 - DNA, 25 bp, Artificial
  Probe
aacacagcggtcgacatttcagaaa

SEQ ID NO: 198688 - DNA, 25 bp, Artificial
  Probe
gttctctgtcactgttcccggaagc

SEQ ID NO: 198689 - DNA, 25 bp, Artificial
  Probe
tcactgttcccggaagcacagctaa

SEQ ID NO: 198690 - DNA, 25 bp, Artificial
  Probe
cccgtgtatgaacgaagccgacatg

SEQ ID NO: 198691 - DNA, 25 bp, Artificial
  Probe
ccgacatgctgttctctgtcactgt

SEQ ID NO: 198692 - DNA, 25 bp, Artificial
  Probe
ctgtaaaggcagccgaggaatccaa

SEQ ID NO: 198693 - DNA, 25 bp, Artificial
  Probe
ttcgcggtacagataacctgatcta

SEQ ID NO: 198694 - DNA, 25 bp, Artificial
  Probe
cagtcgccggaattcgcggtacaga

SEQ ID NO: 198695 - DNA, 25 bp, Artificial
  Probe
gcggtcgacatttcagaaatcaagc

SEQ ID NO: 198696 - DNA, 25 bp, Artificial
  Probe
acgaagccgacatgctgttctctgt

SEQ ID NO: 198697 - DNA, 25 bp, Artificial
  Probe
tgcgcgtctatcgcaggagtgctga

SEQ ID NO: 198698 - DNA, 25 bp, Artificial
  Probe
gacagcatccttgaatatgtaaaag

SEQ ID NO: 198699 - DNA, 25 bp, Artificial
  Probe
tcagaaatcaagcctgtcacattgc

SEQ ID NO: 198700 - DNA, 25 bp, Artificial
  Probe
tatcagctgatcgcccgtgtagaag

SEQ ID NO: 198701 - DNA, 25 bp, Artificial
  Probe
tctatcgcaggagtgctgaaacagg

SEQ ID NO: 198702 - DNA, 25 bp, Artificial
  Probe
catttcagaaatcaagcctgtcaca

SEQ ID NO: 198703 - DNA, 25 bp, Artificial
  Probe
ctcctgtccatgtgaaggtgtggag

SEQ ID NO: 198704 - DNA, 25 bp, Artificial
  Probe
gtatgaacgaagccgacatgctgtt

SEQ ID NO: 198705 - DNA, 25 bp, Artificial
  Probe
ggcagcaaggtcgtagctgtgttaa

SEQ ID NO: 198706 - DNA, 25 bp, Artificial
  Probe
aagctgaccgtctttgaaagcgaca

SEQ ID NO: 198707 - DNA, 25 bp, Artificial
  Probe
gcttgcacgcggccttggcagcagc

SEQ ID NO: 198708 - DNA, 25 bp, Artificial
  Probe
cacattgccgactgatgaagacagc

SEQ ID NO: 198709 - DNA, 25 bp, Artificial
  Probe
cgtctatcgcaggagtgctgaaaca

SEQ ID NO: 198710 - DNA, 25 bp, Artificial
  Probe
ggttcttgcgcgtctatcgcaggag

SEQ ID NO: 198711 - DNA, 25 bp, Artificial
  Probe
attcagtcggaatggcgctcagcag

SEQ ID NO: 198712 - DNA, 25 bp, Artificial
  Probe
tcggaatggcgctcagcagatattt

SEQ ID NO: 198713 - DNA, 25 bp, Artificial
  Probe
tgctgttctctgtcactgttcccgg

SEQ ID NO: 198714 - DNA, 25 bp, Artificial
  Probe
tttgcagaaccaggttcttgcgcgt

SEQ ID NO: 198715 - DNA, 25 bp, Artificial
  Probe
aggtgtggagcgacatcccgcttgc

SEQ ID NO: 198716 - DNA, 25 bp, Artificial
  Probe
gatccgaacacagcggtcgacattt

SEQ ID NO: 198717 - DNA, 25 bp, Artificial
  Probe
gatgaaatccttcacgcatatcagc

SEQ ID NO: 198718 - DNA, 25 bp, Artificial
  Probe
gatgaagacagcatccttgaatatg

SEQ ID NO: 198719 - DNA, 25 bp, Artificial
  Probe
gatatttgaagctgaccgtctttga

SEQ ID NO: 198720 - DNA, 25 bp, Artificial
  Probe
tgatctaccaagtggctaaacggac

SEQ ID NO: 198721 - DNA, 25 bp, Artificial
  Probe
ggagcggcccgtgtatgaacgaagc

SEQ ID NO: 198722 - DNA, 25 bp, Artificial
  Probe
tcagctgatcgcccgtgtagaaggc

SEQ ID NO: 198723 - DNA, 25 bp, Artificial
  Probe
tggcgctcagcagatatttgaagct

SEQ ID NO: 198724 - DNA, 25 bp, Artificial
  Probe
tgaccgtctttgaaagcgacaaatg

SEQ ID NO: 198725 - DNA, 25 bp, Artificial
  Probe
cgcttgcacgcggccttggcagcag

SEQ ID NO: 198726 - DNA, 25 bp, Artificial
  Probe
acattgccgactgatgaagacagca

SEQ ID NO: 198727 - DNA, 25 bp, Artificial
  Probe
gtacagataacctgatctaccaagt

SEQ ID NO: 198728 - DNA, 25 bp, Artificial
  Probe
gcccgtgtagaaggcgtgtttgcag

SEQ ID NO: 198729 - DNA, 25 bp, Artificial
  Probe
gataattatcggaagcagtgccttc

SEQ ID NO: 198730 - DNA, 25 bp, Artificial
  Probe
tggtcttcagggaagctctgtcgtt

SEQ ID NO: 198731 - DNA, 25 bp, Artificial
  Probe
aggttgaactaggtccttctgctgg

SEQ ID NO: 198732 - DNA, 25 bp, Artificial
  Probe
aattctaagtccagtgagttgtggc

SEQ ID NO: 198733 - DNA, 25 bp, Artificial
  Probe
tgtcatctacccagtagtctttagt

SEQ ID NO: 198734 - DNA, 25 bp, Artificial
  Probe
acaatatccgatgagctagaagagg

SEQ ID NO: 198735 - DNA, 25 bp, Artificial
  Probe
agtgacctccatatgttacactaag

SEQ ID NO: 198736 - DNA, 25 bp, Artificial
  Probe
agcagaacacactgccgagctcggt

SEQ ID NO: 198737 - DNA, 25 bp, Artificial
  Probe
gatttagctggcttccattccccta

SEQ ID NO: 198738 - DNA, 25 bp, Artificial
  Probe
ttgcacttacggtcagcacttgcgg

SEQ ID NO: 198739 - DNA, 25 bp, Artificial
  Probe
aattatcggaagcagtgccttccat

SEQ ID NO: 198740 - DNA, 25 bp, Artificial
  Probe
tcttcatgcgatgacatcttcaaag

SEQ ID NO: 198741 - DNA, 25 bp, Artificial
  Probe
atcagtgacagagttcactataaat

SEQ ID NO: 198742 - DNA, 25 bp, Artificial
  Probe
gtctgtttacaggaataaggcctta

SEQ ID NO: 198743 - DNA, 25 bp, Artificial
  Probe
aattatcgggaacagtgtttcccat

SEQ ID NO: 198744 - DNA, 25 bp, Artificial
  Probe
tgtctatatcggagacagtgacctc

SEQ ID NO: 198745 - DNA, 25 bp, Artificial
  Probe
aacttgttttcttgccagcaaggtt

SEQ ID NO: 198746 - DNA, 25 bp, Artificial
  Probe
tgcaggcatgcaagctttccctata

SEQ ID NO: 198747 - DNA, 25 bp, Artificial
  Probe
acggtcagcacttgcgggctttaga

SEQ ID NO: 198748 - DNA, 25 bp, Artificial
  Probe
taattatcgggaacagtgtttccca

SEQ ID NO: 198749 - DNA, 25 bp, Artificial
  Probe
ttatttaggatgagaccagaagcca

SEQ ID NO: 198750 - DNA, 25 bp, Artificial
  Probe
agaccagaagccaaagacttcaagt

SEQ ID NO: 198751 - DNA, 25 bp, Artificial
  Probe
aaagcagcatctgctaatgagaccc

SEQ ID NO: 198752 - DNA, 25 bp, Artificial
  Probe
gctggcttccattcccctaaagtag

SEQ ID NO: 198753 - DNA, 25 bp, Artificial
  Probe
agtcgtattagagcttggtgcatgc

SEQ ID NO: 198754 - DNA, 25 bp, Artificial
  Probe
ttgcctaccacagtgtctatatcgg

SEQ ID NO: 198755 - DNA, 25 bp, Artificial
  Probe
tttgtctgtttacaggaataaggcc

SEQ ID NO: 198756 - DNA, 25 bp, Artificial
  Probe
ctaatgagacccacagatactggaa

SEQ ID NO: 198757 - DNA, 25 bp, Artificial
  Probe
atgacagttatactgtcgttttctt

SEQ ID NO: 198758 - DNA, 25 bp, Artificial
  Probe
cagtgtcttccataatgtataaaga

SEQ ID NO: 198759 - DNA, 25 bp, Artificial
  Probe
tgcctgaaggatttagctggcttcc

SEQ ID NO: 198760 - DNA, 25 bp, Artificial
  Probe
gccagcaaggttgaactaggtcctt

SEQ ID NO: 198761 - DNA, 25 bp, Artificial
  Probe
ttagctggcttccattcccctaaag

SEQ ID NO: 198762 - DNA, 25 bp, Artificial
  Probe
cacattatcgggagcagtgtcttcc

SEQ ID NO: 198763 - DNA, 25 bp, Artificial
  Probe
acagtgtctatatcggagacagtga

SEQ ID NO: 198764 - DNA, 25 bp, Artificial
  Probe
gtttttgcctaccacagtgtctata

SEQ ID NO: 198765 - DNA, 25 bp, Artificial
  Probe
tggaagttttgcacttacggtcagc

SEQ ID NO: 198766 - DNA, 25 bp, Artificial
  Probe
tacactaagggtgtacgtaattatc

SEQ ID NO: 198767 - DNA, 25 bp, Artificial
  Probe
gaagccaaagacttcaagttttctc

SEQ ID NO: 198768 - DNA, 25 bp, Artificial
  Probe
ggtaccgagctctggccaaagtgct

SEQ ID NO: 198769 - DNA, 25 bp, Artificial
  Probe
cccgggtaccgagctctggccaaag

SEQ ID NO: 198770 - DNA, 25 bp, Artificial
  Probe
aacaggtttagactcagtctgtcag

SEQ ID NO: 198771 - DNA, 25 bp, Artificial
  Probe
gagctgtatgcctgaaggatttagc

SEQ ID NO: 198772 - DNA, 25 bp, Artificial
  Probe
gacagttacttttcagaagaggtgc

SEQ ID NO: 198773 - DNA, 25 bp, Artificial
  Probe
gtcatctacccagtagtctttagtt

SEQ ID NO: 198774 - DNA, 25 bp, Artificial
  Probe
catatgttacactaagggtgtacgt

SEQ ID NO: 198775 - DNA, 25 bp, Artificial
  Probe
atcgggaacagtgtttcccataatt

SEQ ID NO: 198776 - DNA, 25 bp, Artificial
  Probe
tccagtgagttgtggccaagttaaa

SEQ ID NO: 198777 - DNA, 25 bp, Artificial
  Probe
taggtccttctgctggataaaagaa

SEQ ID NO: 198778 - DNA, 25 bp, Artificial
  Probe
gatgagaccagaagccaaagacttc

SEQ ID NO: 198779 - DNA, 25 bp, Artificial
  Probe
ccacagatactggaagttttgcact

SEQ ID NO: 198780 - DNA, 25 bp, Artificial
  Probe
caatatccgatgagctagaagagga

SEQ ID NO: 198781 - DNA, 25 bp, Artificial
  Probe
atactggaagttttgcacttacggt

SEQ ID NO: 198782 - DNA, 25 bp, Artificial
  Probe
tcgggaacagtgtttcccataattt

SEQ ID NO: 198783 - DNA, 25 bp, Artificial
  Probe
agttttgcacttacggtcagcactt

SEQ ID NO: 198784 - DNA, 25 bp, Artificial
  Probe
ttcagaagaggtgcaacttgttttc

SEQ ID NO: 198785 - DNA, 25 bp, Artificial
  Probe
ggaagcagtgccttccataattatg

SEQ ID NO: 198786 - DNA, 25 bp, Artificial
  Probe
ttatgacagttatactgtcgttttc

SEQ ID NO: 198787 - DNA, 25 bp, Artificial
  Probe
agaggtgcaacttgttttcttgcca

SEQ ID NO: 198788 - DNA, 25 bp, Artificial
  Probe
caattgagctgtatgcctgaaggat

SEQ ID NO: 198789 - DNA, 25 bp, Artificial
  Probe
gtgctggtcttcagggaagctctgt

SEQ ID NO: 198790 - DNA, 25 bp, Artificial
  Probe
agccaaacaatatccgatgagctag

SEQ ID NO: 198791 - DNA, 25 bp, Artificial
  Probe
cgagctctggccaaagtgctggtct

SEQ ID NO: 198792 - DNA, 25 bp, Artificial
  Probe
taataaaagcagcatctgctaatga

SEQ ID NO: 198793 - DNA, 25 bp, Artificial
  Probe
gcatgcaagctttccctatagtgag

SEQ ID NO: 198794 - DNA, 25 bp, Artificial
  Probe
ttatttatcagtgacagagttcact

SEQ ID NO: 198795 - DNA, 25 bp, Artificial
  Probe
gcacttgcgggctttagaaaggaga

SEQ ID NO: 198796 - DNA, 25 bp, Artificial
  Probe
tcagtgacagagttcactataaata

SEQ ID NO: 198797 - DNA, 25 bp, Artificial
  Probe
gccacaagccaaacaatatccgatg

SEQ ID NO: 198798 - DNA, 25 bp, Artificial
  Probe
caaacttaactcacattatcgggag

SEQ ID NO: 198799 - DNA, 25 bp, Artificial
  Probe
cacttgcgggctttagaaaggagaa

SEQ ID NO: 198800 - DNA, 25 bp, Artificial
  Probe
gtgccttccataattatgacagtta

SEQ ID NO: 198801 - DNA, 25 bp, Artificial
  Probe
tctgctaatgagacccacagatact

SEQ ID NO: 198802 - DNA, 25 bp, Artificial
  Probe
tgttttcttgccagcaaggttgaac

SEQ ID NO: 198803 - DNA, 25 bp, Artificial
  Probe
gtagtttttgcctaccacagtgtct

SEQ ID NO: 198804 - DNA, 25 bp, Artificial
  Probe
tagagcttggtgcatgcctgcaggt

SEQ ID NO: 198805 - DNA, 25 bp, Artificial
  Probe
cctttgtgttatttaggatgagacc

SEQ ID NO: 198806 - DNA, 25 bp, Artificial
  Probe
taactcacattatcgggagcagtgt

SEQ ID NO: 198807 - DNA, 25 bp, Artificial
  Probe
ctctgtcgtttttggcactgagata

SEQ ID NO: 198808 - DNA, 25 bp, Artificial
  Probe
atttatcagtgacagagttcactat

SEQ ID NO: 198809 - DNA, 25 bp, Artificial
  Probe
agccagaatacatatactcctcgtg

SEQ ID NO: 198810 - DNA, 25 bp, Artificial
  Probe
aactggggatccatatacacctggc

SEQ ID NO: 198811 - DNA, 25 bp, Artificial
  Probe
cccagtggaggctcctgagggttat

SEQ ID NO: 198812 - DNA, 25 bp, Artificial
  Probe
ccatgctaattttggcactaaaaag

SEQ ID NO: 198813 - DNA, 25 bp, Artificial
  Probe
cttggtgaccataaattcaggtagt

SEQ ID NO: 198814 - DNA, 25 bp, Artificial
  Probe
gaccttcaattctttggacatgctc

SEQ ID NO: 198815 - DNA, 25 bp, Artificial
  Probe
caattctttggacatgctcatctag

SEQ ID NO: 198816 - DNA, 25 bp, Artificial
  Probe
atacgttccccgttgttgaggcaga

SEQ ID NO: 198817 - DNA, 25 bp, Artificial
  Probe
gaaccagaccgctacattgtagtag

SEQ ID NO: 198818 - DNA, 25 bp, Artificial
  Probe
catctttggcgttattaaaggctat

SEQ ID NO: 198819 - DNA, 25 bp, Artificial
  Probe
cctcctagttggaatatagattcct

SEQ ID NO: 198820 - DNA, 25 bp, Artificial
  Probe
caaagtctggcgagatgaacattat

SEQ ID NO: 198821 - DNA, 25 bp, Artificial
  Probe
tccagtgtgggaacaggtcttctgt

SEQ ID NO: 198822 - DNA, 25 bp, Artificial
  Probe
ctcctgagggttatgtggcatttag

SEQ ID NO: 198823 - DNA, 25 bp, Artificial
  Probe
gcaacttcaaggtttctgccagccc

SEQ ID NO: 198824 - DNA, 25 bp, Artificial
  Probe
ctggactgcaggagactatggagct

SEQ ID NO: 198825 - DNA, 25 bp, Artificial
  Probe
cagtttccgccatctcagtcatctg

SEQ ID NO: 198826 - DNA, 25 bp, Artificial
  Probe
ttcagcaaagtctggcgagatgaac

SEQ ID NO: 198827 - DNA, 25 bp, Artificial
  Probe
aaaggttgcaaatgcccaaagcttt

SEQ ID NO: 198828 - DNA, 25 bp, Artificial
  Probe
tcatctaggaactggggatccatat

SEQ ID NO: 198829 - DNA, 25 bp, Artificial
  Probe
gtttctcaaaacttggtgaccataa

SEQ ID NO: 198830 - DNA, 25 bp, Artificial
  Probe
ctatgaggaaccagaccgctacatt

SEQ ID NO: 198831 - DNA, 25 bp, Artificial
  Probe
tctgttgaaacttgcccaagtattc

SEQ ID NO: 198832 - DNA, 25 bp, Artificial
  Probe
actgcaggagactatggagctgttg

SEQ ID NO: 198833 - DNA, 25 bp, Artificial
  Probe
tgaccataaattcaggtagtaacat

SEQ ID NO: 198834 - DNA, 25 bp, Artificial
  Probe
agctcctgcagaaaagctattcaaa

SEQ ID NO: 198835 - DNA, 25 bp, Artificial
  Probe
aggtagtaacattgacccagtggag

SEQ ID NO: 198836 - DNA, 25 bp, Artificial
  Probe
cattgtagtaggagcccagagagac

SEQ ID NO: 198837 - DNA, 25 bp, Artificial
  Probe
gggtacctttcatctttgcatctaa

SEQ ID NO: 198838 - DNA, 25 bp, Artificial
  Probe
attgacccagtggaggctcctgagg

SEQ ID NO: 198839 - DNA, 25 bp, Artificial
  Probe
gataaagtcgtcctgggtactagca

SEQ ID NO: 198840 - DNA, 25 bp, Artificial
  Probe
gaaacttgcccaagtattctcagat

SEQ ID NO: 198841 - DNA, 25 bp, Artificial
  Probe
ttcacagaatcaaaatgtgaagctc

SEQ ID NO: 198842 - DNA, 25 bp, Artificial
  Probe
acccagcaggagtattatctttgcc

SEQ ID NO: 198843 - DNA, 25 bp, Artificial
  Probe
taacattgacccagtggaggctcct

SEQ ID NO: 198844 - DNA, 25 bp, Artificial
  Probe
agctgagccagaatacatatactcc

SEQ ID NO: 198845 - DNA, 25 bp, Artificial
  Probe
ggctcctgagggttatgtggcattt

SEQ ID NO: 198846 - DNA, 25 bp, Artificial
  Probe
aaggctttcacttacattaatctgg

SEQ ID NO: 198847 - DNA, 25 bp, Artificial
  Probe
gaatacttaacatctttggcgttat

SEQ ID NO: 198848 - DNA, 25 bp, Artificial
  Probe
ttgcaaatgcccaaagctttaatgc

SEQ ID NO: 198849 - DNA, 25 bp, Artificial
  Probe
atctggataaagtcgtcctgggtac

SEQ ID NO: 198850 - DNA, 25 bp, Artificial
  Probe
tgttgcgaagtccagtgtgggaaca

SEQ ID NO: 198851 - DNA, 25 bp, Artificial
  Probe
atactcctcgtgaggctggatctca

SEQ ID NO: 198852 - DNA, 25 bp, Artificial
  Probe
ctacatggacaggaatacgttcccc

SEQ ID NO: 198853 - DNA, 25 bp, Artificial
  Probe
tatggagctgttggtccgactgagt

SEQ ID NO: 198854 - DNA, 25 bp, Artificial
  Probe
acaagaatacttaacatctttggcg

SEQ ID NO: 198855 - DNA, 25 bp, Artificial
  Probe
gaggggtacctttcatctttgcatc

SEQ ID NO: 198856 - DNA, 25 bp, Artificial
  Probe
ctggatctcagaaagacgagaatct

SEQ ID NO: 198857 - DNA, 25 bp, Artificial
  Probe
acatctttggcgttattaaaggcta

SEQ ID NO: 198858 - DNA, 25 bp, Artificial
  Probe
aggagtattatctttgccagctgga

SEQ ID NO: 198859 - DNA, 25 bp, Artificial
  Probe
tccccgttgttgaggcagaccttca

SEQ ID NO: 198860 - DNA, 25 bp, Artificial
  Probe
tcctcgtgaggctggatctcagaaa

SEQ ID NO: 198861 - DNA, 25 bp, Artificial
  Probe
gtagtaacattgacccagtggaggc

SEQ ID NO: 198862 - DNA, 25 bp, Artificial
  Probe
ataatgcaggacgtaaagcatccga

SEQ ID NO: 198863 - DNA, 25 bp, Artificial
  Probe
aacagtgtttctcaaaacttggtga

SEQ ID NO: 198864 - DNA, 25 bp, Artificial
  Probe
ggatttagacccagcaggagtatta

SEQ ID NO: 198865 - DNA, 25 bp, Artificial
  Probe
ggatccatatacacctggctttcct

SEQ ID NO: 198866 - DNA, 25 bp, Artificial
  Probe
gctaattttggcactaaaaaggact

SEQ ID NO: 198867 - DNA, 25 bp, Artificial
  Probe
ggaaggaaactgtcctcctagttgg

SEQ ID NO: 198868 - DNA, 25 bp, Artificial
  Probe
cattaatctggataaagtcgtcctg

SEQ ID NO: 198869 - DNA, 25 bp, Artificial
  Probe
acttacattaatctggataaagtcg

SEQ ID NO: 198870 - DNA, 25 bp, Artificial
  Probe
agtcgtcctgggtactagcaacttc

SEQ ID NO: 198871 - DNA, 25 bp, Artificial
  Probe
atgactttaaattcagcaaagtctg

SEQ ID NO: 198872 - DNA, 25 bp, Artificial
  Probe
gattcctcatgtaagctggaacttt

SEQ ID NO: 198873 - DNA, 25 bp, Artificial
  Probe
gcccaagtattctcagatatgattt

SEQ ID NO: 198874 - DNA, 25 bp, Artificial
  Probe
atgaggaaccagaccgctacattgt

SEQ ID NO: 198875 - DNA, 25 bp, Artificial
  Probe
cactgtgaacaatgtactgaaagaa

SEQ ID NO: 198876 - DNA, 25 bp, Artificial
  Probe
cgaagtccagtgtgggaacaggtct

SEQ ID NO: 198877 - DNA, 25 bp, Artificial
  Probe
tagtaggagcccagagagacgcttg

SEQ ID NO: 198878 - DNA, 25 bp, Artificial
  Probe
gtgggaacaggtcttctgttgaaac

SEQ ID NO: 198879 - DNA, 25 bp, Artificial
  Probe
agctggaactttcacagaatcaaaa

SEQ ID NO: 198880 - DNA, 25 bp, Artificial
  Probe
aagacgagaatcttgcctattatat

SEQ ID NO: 198881 - DNA, 25 bp, Artificial
  Probe
gactatggagctgttggtccgactg

SEQ ID NO: 198882 - DNA, 25 bp, Artificial
  Probe
tcaaaatgtgaagctcactgtgaac

SEQ ID NO: 198883 - DNA, 25 bp, Artificial
  Probe
tggaatatagattcctcatgtaagc

SEQ ID NO: 198884 - DNA, 25 bp, Artificial
  Probe
ggctttcacttacattaatctggat

SEQ ID NO: 198885 - DNA, 25 bp, Artificial
  Probe
ctattcaaaaacatggaaggaaact

SEQ ID NO: 198886 - DNA, 25 bp, Artificial
  Probe
gttactggtaaactggtccatgcta

SEQ ID NO: 198887 - DNA, 25 bp, Artificial
  Probe
aaacttggtgaccataaattcaggt

SEQ ID NO: 198888 - DNA, 25 bp, Artificial
  Probe
gacaggaatacgttccccgttgttg

SEQ ID NO: 198889 - DNA, 25 bp, Artificial
  Probe
gctttcaatgaaacgctcttcagaa

SEQ ID NO: 198890 - DNA, 25 bp, Artificial
  Probe
aaggatctgaaccagttcaaagcag

SEQ ID NO: 198891 - DNA, 25 bp, Artificial
  Probe
gaatcccagcagtttctttctgttt

SEQ ID NO: 198892 - DNA, 25 bp, Artificial
  Probe
agtgcagggttggacccacacttca

SEQ ID NO: 198893 - DNA, 25 bp, Artificial
  Probe
gtcagaaccagttgtaagaacattg

SEQ ID NO: 198894 - DNA, 25 bp, Artificial
  Probe
ccagttcaaagcagatataaaagat

SEQ ID NO: 198895 - DNA, 25 bp, Artificial
  Probe
ttgtgctaaattttcattagagctc

SEQ ID NO: 198896 - DNA, 25 bp, Artificial
  Probe
cttgagctggttgtgctaaattttc

SEQ ID NO: 198897 - DNA, 25 bp, Artificial
  Probe
gggcactactagtatcttgaggtgg

SEQ ID NO: 198898 - DNA, 25 bp, Artificial
  Probe
atatgggtctaagtctacaatggct

SEQ ID NO: 198899 - DNA, 25 bp, Artificial
  Probe
gttggccctggctacgtggactatt

SEQ ID NO: 198900 - DNA, 25 bp, Artificial
  Probe
tgtgctaaattttcattagagctcg

SEQ ID NO: 198901 - DNA, 25 bp, Artificial
  Probe
acaactgattttcataatgctgaga

SEQ ID NO: 198902 - DNA, 25 bp, Artificial
  Probe
ggagtatcacttcctgtcaccctat

SEQ ID NO: 198903 - DNA, 25 bp, Artificial
  Probe
ctactgtcatttatgaaggatctga

SEQ ID NO: 198904 - DNA, 25 bp, Artificial
  Probe
gctataagtcctgagggcactacta

SEQ ID NO: 198905 - DNA, 25 bp, Artificial
  Probe
gcactaaactagatacctatgagat

SEQ ID NO: 198906 - DNA, 25 bp, Artificial
  Probe
tttagtgcagggttggacccacact

SEQ ID NO: 198907 - DNA, 25 bp, Artificial
  Probe
ccttgctctttgcttcatggtcatg

SEQ ID NO: 198908 - DNA, 25 bp, Artificial
  Probe
caatgaaacgctcttcagaaaccag

SEQ ID NO: 198909 - DNA, 25 bp, Artificial
  Probe
agacttcgtcagaaaaatatcactg

SEQ ID NO: 198910 - DNA, 25 bp, Artificial
  Probe
gactacttccgtgctacttctagac

SEQ ID NO: 198911 - DNA, 25 bp, Artificial
  Probe
gggtagtctgtttctagacttgagc

SEQ ID NO: 198912 - DNA, 25 bp, Artificial
  Probe
ctttagtggagaacctgagacttcg

SEQ ID NO: 198913 - DNA, 25 bp, Artificial
  Probe
gactatccttatttgggcactaaac

SEQ ID NO: 198914 - DNA, 25 bp, Artificial
  Probe
aagtggagtatcacttcctgtcacc

SEQ ID NO: 198915 - DNA, 25 bp, Artificial
  Probe
cagcaaactactgtcatttatgaag

SEQ ID NO: 198916 - DNA, 25 bp, Artificial
  Probe
gatgtacaacagcaaactactgtca

SEQ ID NO: 198917 - DNA, 25 bp, Artificial
  Probe
gtggtcgctgggtgtgattccccat

SEQ ID NO: 198918 - DNA, 25 bp, Artificial
  Probe
agttacagtggacaacactttccat

SEQ ID NO: 198919 - DNA, 25 bp, Artificial
  Probe
cgtgctacttctagactaacaactg

SEQ ID NO: 198920 - DNA, 25 bp, Artificial
  Probe
agaacattgctataagtcctgaggg

SEQ ID NO: 198921 - DNA, 25 bp, Artificial
  Probe
tctgaaccagttcaaagcagatata

SEQ ID NO: 198922 - DNA, 25 bp, Artificial
  Probe
ccttatttgggcactaaactagata

SEQ ID NO: 198923 - DNA, 25 bp, Artificial
  Probe
accctggactatgagatgtacaaca

SEQ ID NO: 198924 - DNA, 25 bp, Artificial
  Probe
tttgcttcatggtcatgaaaatgtc

SEQ ID NO: 198925 - DNA, 25 bp, Artificial
  Probe
taaacttacccatgacattgagttg

SEQ ID NO: 198926 - DNA, 25 bp, Artificial
  Probe
agtcctgagggcactactagtatct

SEQ ID NO: 198927 - DNA, 25 bp, Artificial
  Probe
caaacagattcgtcatgagggaaat

SEQ ID NO: 198928 - DNA, 25 bp, Artificial
  Probe
ttgcaaatgccctctctggtgacat

SEQ ID NO: 198929 - DNA, 25 bp, Artificial
  Probe
tctaatgtgtttaggcagcagcttt

SEQ ID NO: 198930 - DNA, 25 bp, Artificial
  Probe
gagtcttttgtaataccttgctctt

SEQ ID NO: 198931 - DNA, 25 bp, Artificial
  Probe
cacaccctctcagctttagtggaga

SEQ ID NO: 198932 - DNA, 25 bp, Artificial
  Probe
gtgctacttctagactaacaactga

SEQ ID NO: 198933 - DNA, 25 bp, Artificial
  Probe
aatggttcgtacagcagcagaggtg

SEQ ID NO: 198934 - DNA, 25 bp, Artificial
  Probe
agatgtacaacagcaaactactgtc

SEQ ID NO: 198935 - DNA, 25 bp, Artificial
  Probe
ggacaacactttccatgttcatgat

SEQ ID NO: 198936 - DNA, 25 bp, Artificial
  Probe
tcagaaaccagttggccctggctac

SEQ ID NO: 198937 - DNA, 25 bp, Artificial
  Probe
ctctggtgacatttggaatattgac

SEQ ID NO: 198938 - DNA, 25 bp, Artificial
  Probe
aggtggccggtcagttcattattaa

SEQ ID NO: 198939 - DNA, 25 bp, Artificial
  Probe
cttcatggtcatgaaaatgtcagaa

SEQ ID NO: 198940 - DNA, 25 bp, Artificial
  Probe
ctgtcaccctatgtatctccaagag

SEQ ID NO: 198941 - DNA, 25 bp, Artificial
  Probe
cgctgggtgtgattccccatctcca

SEQ ID NO: 198942 - DNA, 25 bp, Artificial
  Probe
attcagggagttgcaaatgccctct

SEQ ID NO: 198943 - DNA, 25 bp, Artificial
  Probe
gaaagttcctcagctcaaccaaatg

SEQ ID NO: 198944 - DNA, 25 bp, Artificial
  Probe
aaatgtcagaaccagttgtaagaac

SEQ ID NO: 198945 - DNA, 25 bp, Artificial
  Probe
cgacacatcttctggggctctggct

SEQ ID NO: 198946 - DNA, 25 bp, Artificial
  Probe
gtaataccttgctctttgcttcatg

SEQ ID NO: 198947 - DNA, 25 bp, Artificial
  Probe
tcaagttacagtggacaacactttc

SEQ ID NO: 198948 - DNA, 25 bp, Artificial
  Probe
cagtggacaacactttccatgttca

SEQ ID NO: 198949 - DNA, 25 bp, Artificial
  Probe
gtgtttaggcagcagcttttagtgc

SEQ ID NO: 198950 - DNA, 25 bp, Artificial
  Probe
agaggtggccggtcagttcattatt

SEQ ID NO: 198951 - DNA, 25 bp, Artificial
  Probe
tcttctggggctctggctctcacac

SEQ ID NO: 198952 - DNA, 25 bp, Artificial
  Probe
ctgattttcataatgctgagaaaac

SEQ ID NO: 198953 - DNA, 25 bp, Artificial
  Probe
tacccaatcatctaatgtgtttagg

SEQ ID NO: 198954 - DNA, 25 bp, Artificial
  Probe
tgagtcttttgtaataccttgctct

SEQ ID NO: 198955 - DNA, 25 bp, Artificial
  Probe
tttcttgcatattcaggaatcccag

SEQ ID NO: 198956 - DNA, 25 bp, Artificial
  Probe
accagttggccctggctacgtggac

SEQ ID NO: 198957 - DNA, 25 bp, Artificial
  Probe
ctagacttgagctggttgtgctaaa

SEQ ID NO: 198958 - DNA, 25 bp, Artificial
  Probe
gtgtgattccccatctccatctgac

SEQ ID NO: 198959 - DNA, 25 bp, Artificial
  Probe
gacaatgctgcattcccttttcttg

SEQ ID NO: 198960 - DNA, 25 bp, Artificial
  Probe
atcttctggggctctggctctcaca

SEQ ID NO: 198961 - DNA, 25 bp, Artificial
  Probe
ttcaggaatcccagcagtttctttc

SEQ ID NO: 198962 - DNA, 25 bp, Artificial
  Probe
gtctacaatggctgtattctgctcg

SEQ ID NO: 198963 - DNA, 25 bp, Artificial
  Probe
gatgaggactatccttatttgggca

SEQ ID NO: 198964 - DNA, 25 bp, Artificial
  Probe
ctgctttcaatgaaacgctcttcag

SEQ ID NO: 198965 - DNA, 25 bp, Artificial
  Probe
cagattcgtcatgagggaaatcaat

SEQ ID NO: 198966 - DNA, 25 bp, Artificial
  Probe
gacattgagttgaccctggactatg

SEQ ID NO: 198967 - DNA, 25 bp, Artificial
  Probe
tggagaacctgagacttcgtcagaa

SEQ ID NO: 198968 - DNA, 25 bp, Artificial
  Probe
ggttggacccacacttcaagttaca

SEQ ID NO: 198969 - DNA, 25 bp, Artificial
  Probe
ttcagcttcacggtgatgaaaaacc

SEQ ID NO: 198970 - DNA, 25 bp, Artificial
  Probe
aatatcagcaggcggctattggtaa

SEQ ID NO: 198971 - DNA, 25 bp, Artificial
  Probe
gcgcttcaccatcaagataacacaa

SEQ ID NO: 198972 - DNA, 25 bp, Artificial
  Probe
agctcgacgtcattcagcttcacgg

SEQ ID NO: 198973 - DNA, 25 bp, Artificial
  Probe
tgcggcggaatcacaggctgattac

SEQ ID NO: 198974 - DNA, 25 bp, Artificial
  Probe
atgtgtgccggaatatcagcaggcg

SEQ ID NO: 198975 - DNA, 25 bp, Artificial
  Probe
caaacttctcagcgtaaagcaatcc

SEQ ID NO: 198976 - DNA, 25 bp, Artificial
  Probe
tgccggaatatcagcaggcggctat

SEQ ID NO: 198977 - DNA, 25 bp, Artificial
  Probe
ttgcggcggaatcacaggctgatta

SEQ ID NO: 198978 - DNA, 25 bp, Artificial
  Probe
agcaggcggctattggtaaacgctg

SEQ ID NO: 198979 - DNA, 25 bp, Artificial
  Probe
agctgacaggctgtgaaatatggaa

SEQ ID NO: 198980 - DNA, 25 bp, Artificial
  Probe
tgtcacgtattgccaagagcttgaa

SEQ ID NO: 198981 - DNA, 25 bp, Artificial
  Probe
tgattcatctgtaaaagggtctaga

SEQ ID NO: 198982 - DNA, 25 bp, Artificial
  Probe
agacgatgtcacgtattgccaagag

SEQ ID NO: 198983 - DNA, 25 bp, Artificial
  Probe
tggctgaaccaagttcgtgtcgaaa

SEQ ID NO: 198984 - DNA, 25 bp, Artificial
  Probe
cttgaagctcgacgtcattcagctt

SEQ ID NO: 198985 - DNA, 25 bp, Artificial
  Probe
acgtattgccaagagcttgaagctc

SEQ ID NO: 198986 - DNA, 25 bp, Artificial
  Probe
aatccatgctttgtttagggagtga

SEQ ID NO: 198987 - DNA, 25 bp, Artificial
  Probe
cacaggctgattacctaggatttat

SEQ ID NO: 198988 - DNA, 25 bp, Artificial
  Probe
tgattgattcatctgtaaaagggtc

SEQ ID NO: 198989 - DNA, 25 bp, Artificial
  Probe
ctgctcttcgcaagctgacaggctg

SEQ ID NO: 198990 - DNA, 25 bp, Artificial
  Probe
atttgcagcttgcggcggaatcaca

SEQ ID NO: 198991 - DNA, 25 bp, Artificial
  Probe
atgctgctgctcttcgcaagctgac

SEQ ID NO: 198992 - DNA, 25 bp, Artificial
  Probe
ttgccaagagcttgaagctcgacgt

SEQ ID NO: 198993 - DNA, 25 bp, Artificial
  Probe
ggaaggcgcttcaccatcaagataa

SEQ ID NO: 198994 - DNA, 25 bp, Artificial
  Probe
atgttgacggctttgtgattgattc

SEQ ID NO: 198995 - DNA, 25 bp, Artificial
  Probe
gcgagctgtacttatcggtgaatca

SEQ ID NO: 198996 - DNA, 25 bp, Artificial
  Probe
acttatcggtgaatcattgatgaga

SEQ ID NO: 198997 - DNA, 25 bp, Artificial
  Probe
tttcttgggaatgtgtgccggaata

SEQ ID NO: 198998 - DNA, 25 bp, Artificial
  Probe
gcaagctgacaggctgtgaaatatg

SEQ ID NO: 198999 - DNA, 25 bp, Artificial
  Probe
acgtcattcagcttcacggtgatga

SEQ ID NO: 199000 - DNA, 25 bp, Artificial
  Probe
taatgttgacggctttgtgattgat

SEQ ID NO: 199001 - DNA, 25 bp, Artificial
  Probe
aaccggcggatgctgctgctcttcg

SEQ ID NO: 199002 - DNA, 25 bp, Artificial
  Probe
attcagcttcacggtgatgaaaaac

SEQ ID NO: 199003 - DNA, 25 bp, Artificial
  Probe
cagcaggcggctattggtaaacgct

SEQ ID NO: 199004 - DNA, 25 bp, Artificial
  Probe
cgcaagctgacaggctgtgaaatat

SEQ ID NO: 199005 - DNA, 25 bp, Artificial
  Probe
ctgctgctcttcgcaagctgacagg

SEQ ID NO: 199006 - DNA, 25 bp, Artificial
  Probe
aaaggatttgcagcttgcggcggaa

SEQ ID NO: 199007 - DNA, 25 bp, Artificial
  Probe
aagcaatccatgctttgtttaggga

SEQ ID NO: 199008 - DNA, 25 bp, Artificial
  Probe
tgtacttatcggtgaatcattgatg

SEQ ID NO: 199009 - DNA, 25 bp, Artificial
  Probe
aatgtgtgccggaatatcagcaggc

SEQ ID NO: 199010 - DNA, 25 bp, Artificial
  Probe
gtattgccaagagcttgaagctcga

SEQ ID NO: 199011 - DNA, 25 bp, Artificial
  Probe
ttaacatttgtcaatgaacatgggg

SEQ ID NO: 199012 - DNA, 25 bp, Artificial
  Probe
gtgttgcattttcttgggaatgtgt

SEQ ID NO: 199013 - DNA, 25 bp, Artificial
  Probe
atcagcaggcggctattggtaaacg

SEQ ID NO: 199014 - DNA, 25 bp, Artificial
  Probe
cggcggatgctgctgctcttcgcaa

SEQ ID NO: 199015 - DNA, 25 bp, Artificial
  Probe
gatgctgctgctcttcgcaagctga

SEQ ID NO: 199016 - DNA, 25 bp, Artificial
  Probe
tatggaaggcgcttcaccatcaaga

SEQ ID NO: 199017 - DNA, 25 bp, Artificial
  Probe
gtgtgccggaatatcagcaggcggc

SEQ ID NO: 199018 - DNA, 25 bp, Artificial
  Probe
cgatgtcacgtattgccaagagctt

SEQ ID NO: 199019 - DNA, 25 bp, Artificial
  Probe
agtcgatggacttcctgatattgtt

SEQ ID NO: 199020 - DNA, 25 bp, Artificial
  Probe
agaacggtgttgcatcgatacaggc

SEQ ID NO: 199021 - DNA, 25 bp, Artificial
  Probe
tgcgctgctgaaaacgattcatatt

SEQ ID NO: 199022 - DNA, 25 bp, Artificial
  Probe
tgcctcggcagctggtgcgaaaatc

SEQ ID NO: 199023 - DNA, 25 bp, Artificial
  Probe
ggtgtattgcctacattgggtttga

SEQ ID NO: 199024 - DNA, 25 bp, Artificial
  Probe
cgatacaggcaggtgctggcattgt

SEQ ID NO: 199025 - DNA, 25 bp, Artificial
  Probe
aatatcgactcttgtattacgattc

SEQ ID NO: 199026 - DNA, 25 bp, Artificial
  Probe
gacatgtttcatagcaaggaggata

SEQ ID NO: 199027 - DNA, 25 bp, Artificial
  Probe
cagatttctacaattgtgcgttgac

SEQ ID NO: 199028 - DNA, 25 bp, Artificial
  Probe
tatgatgatggcagcggaaatgact

SEQ ID NO: 199029 - DNA, 25 bp, Artificial
  Probe
tggacttcctgatattgttgataca

SEQ ID NO: 199030 - DNA, 25 bp, Artificial
  Probe
ggcaatgcgggcacacgctcttaca

SEQ ID NO: 199031 - DNA, 25 bp, Artificial
  Probe
tatctcaacggcctcggcaattgtt

SEQ ID NO: 199032 - DNA, 25 bp, Artificial
  Probe
gcgggcacacgctcttacagtcgat

SEQ ID NO: 199033 - DNA, 25 bp, Artificial
  Probe
caggcaggtgctggcattgttgctg

SEQ ID NO: 199034 - DNA, 25 bp, Artificial
  Probe
tcttacagtcgatggacttcctgat

SEQ ID NO: 199035 - DNA, 25 bp, Artificial
  Probe
cgctaagcatggcaatcgctctgtc

SEQ ID NO: 199036 - DNA, 25 bp, Artificial
  Probe
tgtctcttctaaaagcggaagcgct

SEQ ID NO: 199037 - DNA, 25 bp, Artificial
  Probe
aattgttgcctcggcagctggtgcg

SEQ ID NO: 199038 - DNA, 25 bp, Artificial
  Probe
acacgctcttacagtcgatggactt

SEQ ID NO: 199039 - DNA, 25 bp, Artificial
  Probe
tctacaattgtgcgttgacggaaaa

SEQ ID NO: 199040 - DNA, 25 bp, Artificial
  Probe
gcaattgttgcctcggcagctggtg

SEQ ID NO: 199041 - DNA, 25 bp, Artificial
  Probe
gatattgtcaattcttgctcatcgg

SEQ ID NO: 199042 - DNA, 25 bp, Artificial
  Probe
tgtattacgattcgcacgatgagtg

SEQ ID NO: 199043 - DNA, 25 bp, Artificial
  Probe
ctggcattgttgctgattctgttcc

SEQ ID NO: 199044 - DNA, 25 bp, Artificial
  Probe
gactcttgtattacgattcgcacga

SEQ ID NO: 199045 - DNA, 25 bp, Artificial
  Probe
gatgatggcagcggaaatgactcct

SEQ ID NO: 199046 - DNA, 25 bp, Artificial
  Probe
gttgctgattctgttccggaagccg

SEQ ID NO: 199047 - DNA, 25 bp, Artificial
  Probe
aacggtgttgcatcgatacaggcag

SEQ ID NO: 199048 - DNA, 25 bp, Artificial
  Probe
gccggtgcgctgctgaaaacgattc

SEQ ID NO: 199049 - DNA, 25 bp, Artificial
  Probe
caatgcgggcacacgctcttacagt

SEQ ID NO: 199050 - DNA, 25 bp, Artificial
  Probe
catggcaatcgctctgtctcttcta

SEQ ID NO: 199051 - DNA, 25 bp, Artificial
  Probe
atatctcaacggcctcggcaattgt

SEQ ID NO: 199052 - DNA, 25 bp, Artificial
  Probe
gctgtaataaagccggtgcgctgct

SEQ ID NO: 199053 - DNA, 25 bp, Artificial
  Probe
agcggaaatgactccttctgaaatg

SEQ ID NO: 199054 - DNA, 25 bp, Artificial
  Probe
ctcttgtattacgattcgcacgatg

SEQ ID NO: 199055 - DNA, 25 bp, Artificial
  Probe
tactgccggtgaggctgaaacgctg

SEQ ID NO: 199056 - DNA, 25 bp, Artificial
  Probe
ctcttacagtcgatggacttcctga

SEQ ID NO: 199057 - DNA, 25 bp, Artificial
  Probe
gcatggcaatcgctctgtctcttct

SEQ ID NO: 199058 - DNA, 25 bp, Artificial
  Probe
tgtttcatagcaaggaggataaagc

SEQ ID NO: 199059 - DNA, 25 bp, Artificial
  Probe
ctcggcaattgttgcctcggcagct

SEQ ID NO: 199060 - DNA, 25 bp, Artificial
  Probe
gttgcatcgatacaggcaggtgctg

SEQ ID NO: 199061 - DNA, 25 bp, Artificial
  Probe
acgattcgcacgatgagtgtaaaga

SEQ ID NO: 199062 - DNA, 25 bp, Artificial
  Probe
acttcctgatattgttgatacatgc

SEQ ID NO: 199063 - DNA, 25 bp, Artificial
  Probe
ggtgctggcattgttgctgattctg

SEQ ID NO: 199064 - DNA, 25 bp, Artificial
  Probe
cagctggtgcgaaaatcgctaagca

SEQ ID NO: 199065 - DNA, 25 bp, Artificial
  Probe
gcttgcgggttttgtgaaggcaatg

SEQ ID NO: 199066 - DNA, 25 bp, Artificial
  Probe
cttactgccggtgaggctgaaacgc

SEQ ID NO: 199067 - DNA, 25 bp, Artificial
  Probe
caatcgctctgtctcttctaaaagc

SEQ ID NO: 199068 - DNA, 25 bp, Artificial
  Probe
ctctgtctcttctaaaagcggaagc

SEQ ID NO: 199069 - DNA, 25 bp, Artificial
  Probe
ggcgctgccgcgcagcttgaacgac

SEQ ID NO: 199070 - DNA, 25 bp, Artificial
  Probe
tcatttaaggaggcgctggcaagcc

SEQ ID NO: 199071 - DNA, 25 bp, Artificial
  Probe
atttacaggtgcagtcaccgaaaga

SEQ ID NO: 199072 - DNA, 25 bp, Artificial
  Probe
acactggttttgccggtagagcagc

SEQ ID NO: 199073 - DNA, 25 bp, Artificial
  Probe
tttaaggaggcgctggcaagcccga

SEQ ID NO: 199074 - DNA, 25 bp, Artificial
  Probe
gcgctgccgcgcagcttgaacgact

SEQ ID NO: 199075 - DNA, 25 bp, Artificial
  Probe
aggtgcagtcaccgaaagagagcgc

SEQ ID NO: 199076 - DNA, 25 bp, Artificial
  Probe
tgaggctgcgaaggcagatgcgatt

SEQ ID NO: 199077 - DNA, 25 bp, Artificial
  Probe
attacaagcggaggcgctgccgcgc

SEQ ID NO: 199078 - DNA, 25 bp, Artificial
  Probe
agagcagcctttcgagaaacgttca

SEQ ID NO: 199079 - DNA, 25 bp, Artificial
  Probe
gtttcacaaatggcagacttgaaga

SEQ ID NO: 199080 - DNA, 25 bp, Artificial
  Probe
tttaatgcgggagctgcgatttaca

SEQ ID NO: 199081 - DNA, 25 bp, Artificial
  Probe
agatttacaggtgcagtcaccgaaa

SEQ ID NO: 199082 - DNA, 25 bp, Artificial
  Probe
gagctgcgatttacacggcgggaat

SEQ ID NO: 199083 - DNA, 25 bp, Artificial
  Probe
tagactatgaggctgcgaaggcaga

SEQ ID NO: 199084 - DNA, 25 bp, Artificial
  Probe
gattttgtgcctgtgcagattgcaa

SEQ ID NO: 199085 - DNA, 25 bp, Artificial
  Probe
tcaccgaaagagagcgcctatctca

SEQ ID NO: 199086 - DNA, 25 bp, Artificial
  Probe
cagatgcgatttccgttttaacaga

SEQ ID NO: 199087 - DNA, 25 bp, Artificial
  Probe
gagctggcgttagagacgattacaa

SEQ ID NO: 199088 - DNA, 25 bp, Artificial
  Probe
tttatcgggttgattgccgaagtga

SEQ ID NO: 199089 - DNA, 25 bp, Artificial
  Probe
tatcgggttgattgccgaagtgaag

SEQ ID NO: 199090 - DNA, 25 bp, Artificial
  Probe
caccgaaagagagcgcctatctcat

SEQ ID NO: 199091 - DNA, 25 bp, Artificial
  Probe
agacgattacaagcggaggcgctgc

SEQ ID NO: 199092 - DNA, 25 bp, Artificial
  Probe
tttgtgcctgtgcagattgcaatag

SEQ ID NO: 199093 - DNA, 25 bp, Artificial
  Probe
tgattgccgaagtgaagaaagcatc

SEQ ID NO: 199094 - DNA, 25 bp, Artificial
  Probe
tacggcttttaatgcgggagctgcg

SEQ ID NO: 199095 - DNA, 25 bp, Artificial
  Probe
atagactatgaggctgcgaaggcag

SEQ ID NO: 199096 - DNA, 25 bp, Artificial
  Probe
gaagatttcggtttcacaaatggca

SEQ ID NO: 199097 - DNA, 25 bp, Artificial
  Probe
tgcctgtgcagattgcaatagacta

SEQ ID NO: 199098 - DNA, 25 bp, Artificial
  Probe
gcgctggcaagcccgaatcggttta

SEQ ID NO: 199099 - DNA, 25 bp, Artificial
  Probe
cactggttttgccggtagagcagcc

SEQ ID NO: 199100 - DNA, 25 bp, Artificial
  Probe
tgcagtcaccgaaagagagcgccta

SEQ ID NO: 199101 - DNA, 25 bp, Artificial
  Probe
aagatttacaggtgcagtcaccgaa

SEQ ID NO: 199102 - DNA, 25 bp, Artificial
  Probe
gaggcgctgccgcgcagcttgaacg

SEQ ID NO: 199103 - DNA, 25 bp, Artificial
  Probe
ttacggcttttaatgcgggagctgc

SEQ ID NO: 199104 - DNA, 25 bp, Artificial
  Probe
cgattacaagcggaggcgctgccgc

SEQ ID NO: 199105 - DNA, 25 bp, Artificial
  Probe
gactatgaggctgcgaaggcagatg

SEQ ID NO: 199106 - DNA, 25 bp, Artificial
  Probe
ggattttgtgcctgtgcagattgca

SEQ ID NO: 199107 - DNA, 25 bp, Artificial
  Probe
gatgcgatttccgttttaacagaca

SEQ ID NO: 199108 - DNA, 25 bp, Artificial
  Probe
gcgcctatctcattcagaatatttt

SEQ ID NO: 199109 - DNA, 25 bp, Artificial
  Probe
ccgcgcagcttgaacgactaaagca

SEQ ID NO: 199110 - DNA, 25 bp, Artificial
  Probe
gcatcgccgtcaaaagggcttatta

SEQ ID NO: 199111 - DNA, 25 bp, Artificial
  Probe
gcagcagttccgctttatctattac

SEQ ID NO: 199112 - DNA, 25 bp, Artificial
  Probe
gcgcagcttgaacgactaaagcaga

SEQ ID NO: 199113 - DNA, 25 bp, Artificial
  Probe
tcggtttcacaaatggcagacttga

SEQ ID NO: 199114 - DNA, 25 bp, Artificial
  Probe
agtcaccgaaagagagcgcctatct

SEQ ID NO: 199115 - DNA, 25 bp, Artificial
  Probe
gagcgcctatctcattcagaatatt

SEQ ID NO: 199116 - DNA, 25 bp, Artificial
  Probe
cgttcatttaaggaggcgctggcaa

SEQ ID NO: 199117 - DNA, 25 bp, Artificial
  Probe
aaagcagcagttccgctttatctat

SEQ ID NO: 199118 - DNA, 25 bp, Artificial
  Probe
ttaatgcgggagctgcgatttacac

SEQ ID NO: 199119 - DNA, 25 bp, Artificial
  Probe
gtattttgaatctgcatttctgggc

SEQ ID NO: 199120 - DNA, 25 bp, Artificial
  Probe
ggttgaagaatcctctcatacccct

SEQ ID NO: 199121 - DNA, 25 bp, Artificial
  Probe
cttcttgggagcaaacagacccaga

SEQ ID NO: 199122 - DNA, 25 bp, Artificial
  Probe
gcaaacagacccagagaaacggcaa

SEQ ID NO: 199123 - DNA, 25 bp, Artificial
  Probe
ccaacaaggaacttgtcagaacaaa

SEQ ID NO: 199124 - DNA, 25 bp, Artificial
  Probe
ttgggagcaaacagacccagagaaa

SEQ ID NO: 199125 - DNA, 25 bp, Artificial
  Probe
gaaactgagtcacctaaagttcact

SEQ ID NO: 199126 - DNA, 25 bp, Artificial
  Probe
ttgtcagaacaaaggcccctgggga

SEQ ID NO: 199127 - DNA, 25 bp, Artificial
  Probe
cacgagtacatctcttacattagag

SEQ ID NO: 199128 - DNA, 25 bp, Artificial
  Probe
gagctcattctcaacacgagtacat

SEQ ID NO: 199129 - DNA, 25 bp, Artificial
  Probe
tcaggcttttttggttgaagaatcc

SEQ ID NO: 199130 - DNA, 25 bp, Artificial
  Probe
ctgtcagatttcaggcttttttggt

SEQ ID NO: 199131 - DNA, 25 bp, Artificial
  Probe
tcccggaaactgagtcacctaaagt

SEQ ID NO: 199132 - DNA, 25 bp, Artificial
  Probe
ggaaaaccctgatttcatgtattca

SEQ ID NO: 199133 - DNA, 25 bp, Artificial
  Probe
tactgccccatattataccaggtcg

SEQ ID NO: 199134 - DNA, 25 bp, Artificial
  Probe
cttaacatttctgtcagatttcagg

SEQ ID NO: 199135 - DNA, 25 bp, Artificial
  Probe
ttgatgccttcttgggagcaaacag

SEQ ID NO: 199136 - DNA, 25 bp, Artificial
  Probe
agacccagagaaacggcaagtttgg

SEQ ID NO: 199137 - DNA, 25 bp, Artificial
  Probe
caagtttggtgtccaacaaggaact

SEQ ID NO: 199138 - DNA, 25 bp, Artificial
  Probe
tttctgggcacagttccagaatata

SEQ ID NO: 199139 - DNA, 25 bp, Artificial
  Probe
gtgatttaaatcaagcccaggtcca

SEQ ID NO: 199140 - DNA, 25 bp, Artificial
  Probe
ccaggtccacagagctcattctcaa

SEQ ID NO: 199141 - DNA, 25 bp, Artificial
  Probe
ggaacttgtcagaacaaaggcccct

SEQ ID NO: 199142 - DNA, 25 bp, Artificial
  Probe
tgccttcttgggagcaaacagaccc

SEQ ID NO: 199143 - DNA, 25 bp, Artificial
  Probe
aatctgcatttctgggcacagttcc

SEQ ID NO: 199144 - DNA, 25 bp, Artificial
  Probe
actgccccatattataccaggtcgc

SEQ ID NO: 199145 - DNA, 25 bp, Artificial
  Probe
tctgtcagatttcaggcttttttgg

SEQ ID NO: 199146 - DNA, 25 bp, Artificial
  Probe
atataatcccggaaactgagtcacc

SEQ ID NO: 199147 - DNA, 25 bp, Artificial
  Probe
tttctggactgataatgacctctga

SEQ ID NO: 199148 - DNA, 25 bp, Artificial
  Probe
cggaaactgagtcacctaaagttca

SEQ ID NO: 199149 - DNA, 25 bp, Artificial
  Probe
caggcttttttggttgaagaatcct

SEQ ID NO: 199150 - DNA, 25 bp, Artificial
  Probe
taccaggtcgcctgagacctttctg

SEQ ID NO: 199151 - DNA, 25 bp, Artificial
  Probe
cccctggggagtattttgaatctgc

SEQ ID NO: 199152 - DNA, 25 bp, Artificial
  Probe
catttctgtcagatttcaggctttt

SEQ ID NO: 199153 - DNA, 25 bp, Artificial
  Probe
ggcccctggggagtattttgaatct

SEQ ID NO: 199154 - DNA, 25 bp, Artificial
  Probe
tctgggcacagttccagaatatata

SEQ ID NO: 199155 - DNA, 25 bp, Artificial
  Probe
tggactgataatgacctctgaggta

SEQ ID NO: 199156 - DNA, 25 bp, Artificial
  Probe
gggagcaaacagacccagagaaacg

SEQ ID NO: 199157 - DNA, 25 bp, Artificial
  Probe
ctgataatgacctctgaggtagatt

SEQ ID NO: 199158 - DNA, 25 bp, Artificial
  Probe
gtacatctcttacattagaggaata

SEQ ID NO: 199159 - DNA, 25 bp, Artificial
  Probe
taaatcaagcccaggtccacagagc

SEQ ID NO: 199160 - DNA, 25 bp, Artificial
  Probe
tgatttaaatcaagcccaggtccac

SEQ ID NO: 199161 - DNA, 25 bp, Artificial
  Probe
agcccaggtccacagagctcattct

SEQ ID NO: 199162 - DNA, 25 bp, Artificial
  Probe
ggcaagtttggtgtccaacaaggaa

SEQ ID NO: 199163 - DNA, 25 bp, Artificial
  Probe
tattataccaggtcgcctgagacct

SEQ ID NO: 199164 - DNA, 25 bp, Artificial
  Probe
gaaacggcaagtttggtgtccaaca

SEQ ID NO: 199165 - DNA, 25 bp, Artificial
  Probe
cacaaagcccaagaaacaaggtgac

SEQ ID NO: 199166 - DNA, 25 bp, Artificial
  Probe
cacacaaagcccaagaaacaaggtg

SEQ ID NO: 199167 - DNA, 25 bp, Artificial
  Probe
ttcttcctcatgctggagtcggctt

SEQ ID NO: 199168 - DNA, 25 bp, Artificial
  Probe
tccccaatgggtacaaggtctccag

SEQ ID NO: 199169 - DNA, 25 bp, Artificial
  Probe
aggctgatccattactcatatggtg

SEQ ID NO: 199170 - DNA, 25 bp, Artificial
  Probe
aaatttcttcctcatgctggagtcg

SEQ ID NO: 199171 - DNA, 25 bp, Artificial
  Probe
gggcatggtctgaggctgatccatt

SEQ ID NO: 199172 - DNA, 25 bp, Artificial
  Probe
acaaggtctccagaccaaacaaaga

SEQ ID NO: 199173 - DNA, 25 bp, Artificial
  Probe
acaacaacatgtactggtatcggca

SEQ ID NO: 199174 - DNA, 25 bp, Artificial
  Probe
agctgcagtcacacaaagcccaaga

SEQ ID NO: 199175 - DNA, 25 bp, Artificial
  Probe
caaagcccaagaaacaaggtgacag

SEQ ID NO: 199176 - DNA, 25 bp, Artificial
  Probe
agacatctgtgtacttctgtgccag

SEQ ID NO: 199177 - DNA, 25 bp, Artificial
  Probe
aatgggtacaaggtctccagaccaa

SEQ ID NO: 199178 - DNA, 25 bp, Artificial
  Probe
ggagatgtccccaatgggtacaagg

SEQ ID NO: 199179 - DNA, 25 bp, Artificial
  Probe
tgaggctgatccattactcatatgg

SEQ ID NO: 199180 - DNA, 25 bp, Artificial
  Probe
ccccaatgggtacaaggtctccaga

SEQ ID NO: 199181 - DNA, 25 bp, Artificial
  Probe
gcagtcacacaaagcccaagaaaca

SEQ ID NO: 199182 - DNA, 25 bp, Artificial
  Probe
gatccattactcatatggtgctaac

SEQ ID NO: 199183 - DNA, 25 bp, Artificial
  Probe
tcacaacaacatgtactggtatcgg

SEQ ID NO: 199184 - DNA, 25 bp, Artificial
  Probe
tactcatatggtgctaacagtactg

SEQ ID NO: 199185 - DNA, 25 bp, Artificial
  Probe
gtccccaatgggtacaaggtctcca

SEQ ID NO: 199186 - DNA, 25 bp, Artificial
  Probe
atcacaacaacatgtactggtatcg

SEQ ID NO: 199187 - DNA, 25 bp, Artificial
  Probe
actcatatggtgctaacagtactga

SEQ ID NO: 199188 - DNA, 25 bp, Artificial
  Probe
tgatccattactcatatggtgctaa

SEQ ID NO: 199189 - DNA, 25 bp, Artificial
  Probe
gctgcagtcacacaaagcccaagaa

SEQ ID NO: 199190 - DNA, 25 bp, Artificial
  Probe
gaagctgcagtcacacaaagcccaa

SEQ ID NO: 199191 - DNA, 25 bp, Artificial
  Probe
atgggtacaaggtctccagaccaaa

SEQ ID NO: 199192 - DNA, 25 bp, Artificial
  Probe
caacatgtactggtatcggcaggac

SEQ ID NO: 199193 - DNA, 25 bp, Artificial
  Probe
agatgtccccaatgggtacaaggtc

SEQ ID NO: 199194 - DNA, 25 bp, Artificial
  Probe
tcatatggtgctaacagtactgaga

SEQ ID NO: 199195 - DNA, 25 bp, Artificial
  Probe
tccattactcatatggtgctaacag

SEQ ID NO: 199196 - DNA, 25 bp, Artificial
  Probe
atttcttcctcatgctggagtcggc

SEQ ID NO: 199197 - DNA, 25 bp, Artificial
  Probe
atggtctgaggctgatccattactc

SEQ ID NO: 199198 - DNA, 25 bp, Artificial
  Probe
tacaaggtctccagaccaaacaaag

SEQ ID NO: 199199 - DNA, 25 bp, Artificial
  Probe
caacaacatgtactggtatcggcag

SEQ ID NO: 199200 - DNA, 25 bp, Artificial
  Probe
ttcctcatgctggagtcggcttccc

SEQ ID NO: 199201 - DNA, 25 bp, Artificial
  Probe
cctctcagacatctgtgtacttctg

SEQ ID NO: 199202 - DNA, 25 bp, Artificial
  Probe
gctgatccattactcatatggtgct

SEQ ID NO: 199203 - DNA, 25 bp, Artificial
  Probe
tctcagacatctgtgtacttctgtg

SEQ ID NO: 199204 - DNA, 25 bp, Artificial
  Probe
catctgtgtacttctgtgccagcag

SEQ ID NO: 199205 - DNA, 25 bp, Artificial
  Probe
aagcccaagaaacaaggtgacagta

SEQ ID NO: 199206 - DNA, 25 bp, Artificial
  Probe
acaacatgtactggtatcggcagga

SEQ ID NO: 199207 - DNA, 25 bp, Artificial
  Probe
acatgtactggtatcggcaggacat

SEQ ID NO: 199208 - DNA, 25 bp, Artificial
  Probe
attactcatatggtgctaacagtac

SEQ ID NO: 199209 - DNA, 25 bp, Artificial
  Probe
gacatctgtgtacttctgtgccagc

SEQ ID NO: 199210 - DNA, 25 bp, Artificial
  Probe
ctgaggctgatccattactcatatg

SEQ ID NO: 199211 - DNA, 25 bp, Artificial
  Probe
ctcaatggaacttattgctggaagt

SEQ ID NO: 199212 - DNA, 25 bp, Artificial
  Probe
caaccctagactcgtcctcactatc

SEQ ID NO: 199213 - DNA, 25 bp, Artificial
  Probe
tggaacttattgctggaagtgttga

SEQ ID NO: 199214 - DNA, 25 bp, Artificial
  Probe
ggctctaccccattggtagctcttt

SEQ ID NO: 199215 - DNA, 25 bp, Artificial
  Probe
ttgatgcccaaccctagactcgtcc

SEQ ID NO: 199216 - DNA, 25 bp, Artificial
  Probe
gaacttattgctggaagtgttgaca

SEQ ID NO: 199217 - DNA, 25 bp, Artificial
  Probe
actcaatggaacttattgctggaag

SEQ ID NO: 199218 - DNA, 25 bp, Artificial
  Probe
gaggctctaccccattggtagctct

SEQ ID NO: 199219 - DNA, 25 bp, Artificial
  Probe
ccatgccaactcaatggaacttatt

SEQ ID NO: 199220 - DNA, 25 bp, Artificial
  Probe
acttattgctggaagtgttgacacg

SEQ ID NO: 199221 - DNA, 25 bp, Artificial
  Probe
aggctctaccccattggtagctctt

SEQ ID NO: 199222 - DNA, 25 bp, Artificial
  Probe
gactcgtcctcactatccggcctgt

SEQ ID NO: 199223 - DNA, 25 bp, Artificial
  Probe
ttttgatgcccaaccctagactcgt

SEQ ID NO: 199224 - DNA, 25 bp, Artificial
  Probe
gatgcccaaccctagactcgtcctc

SEQ ID NO: 199225 - DNA, 25 bp, Artificial
  Probe
tgccaactcaatggaacttattgct

SEQ ID NO: 199226 - DNA, 25 bp, Artificial
  Probe
catgccaactcaatggaacttattg

SEQ ID NO: 199227 - DNA, 25 bp, Artificial
  Probe
accctagactcgtcctcactatccg

SEQ ID NO: 199228 - DNA, 25 bp, Artificial
  Probe
ctcgtcctcactatccggcctgtga

SEQ ID NO: 199229 - DNA, 25 bp, Artificial
  Probe
aacttattgctggaagtgttgacac

SEQ ID NO: 199230 - DNA, 25 bp, Artificial
  Probe
aaccctagactcgtcctcactatcc

SEQ ID NO: 199231 - DNA, 25 bp, Artificial
  Probe
atgccaactcaatggaacttattgc

SEQ ID NO: 199232 - DNA, 25 bp, Artificial
  Probe
actcgtcctcactatccggcctgtg

SEQ ID NO: 199233 - DNA, 25 bp, Artificial
  Probe
aactcaatggaacttattgctggaa

SEQ ID NO: 199234 - DNA, 25 bp, Artificial
  Probe
atgcccaaccctagactcgtcctca

SEQ ID NO: 199235 - DNA, 25 bp, Artificial
  Probe
cgtcctcactatccggcctgtgagc

SEQ ID NO: 199236 - DNA, 25 bp, Artificial
  Probe
cctagactcgtcctcactatccggc

SEQ ID NO: 199237 - DNA, 25 bp, Artificial
  Probe
caatggaacttattgctggaagtgt

SEQ ID NO: 199238 - DNA, 25 bp, Artificial
  Probe
atggaacttattgctggaagtgttg

SEQ ID NO: 199239 - DNA, 25 bp, Artificial
  Probe
tgccatccatgccaactcaatggaa

SEQ ID NO: 199240 - DNA, 25 bp, Artificial
  Probe
gctctaccccattggtagctctttg

SEQ ID NO: 199241 - DNA, 25 bp, Artificial
  Probe
caactcaatggaacttattgctgga

SEQ ID NO: 199242 - DNA, 25 bp, Artificial
  Probe
tagactcgtcctcactatccggcct

SEQ ID NO: 199243 - DNA, 25 bp, Artificial
  Probe
gttttgatgcccaaccctagactcg

SEQ ID NO: 199244 - DNA, 25 bp, Artificial
  Probe
atccatgccaactcaatggaactta

SEQ ID NO: 199245 - DNA, 25 bp, Artificial
  Probe
tcgtcctcactatccggcctgtgag

SEQ ID NO: 199246 - DNA, 25 bp, Artificial
  Probe
agactcgtcctcactatccggcctg

SEQ ID NO: 199247 - DNA, 25 bp, Artificial
  Probe
ggaacttattgctggaagtgttgac

SEQ ID NO: 199248 - DNA, 25 bp, Artificial
  Probe
tccatgccaactcaatggaacttat

SEQ ID NO: 199249 - DNA, 25 bp, Artificial
  Probe
tgatgcccaaccctagactcgtcct

SEQ ID NO: 199250 - DNA, 25 bp, Artificial
  Probe
tttgatgcccaaccctagactcgtc

SEQ ID NO: 199251 - DNA, 25 bp, Artificial
  Probe
tcaatggaacttattgctggaagtg

SEQ ID NO: 199252 - DNA, 25 bp, Artificial
  Probe
tgcccaaccctagactcgtcctcac

SEQ ID NO: 199253 - DNA, 25 bp, Artificial
  Probe
tgaggctctaccccattggtagctc

SEQ ID NO: 199254 - DNA, 25 bp, Artificial
  Probe
ccaaccctagactcgtcctcactat

SEQ ID NO: 199255 - DNA, 25 bp, Artificial
  Probe
cccaaccctagactcgtcctcacta

SEQ ID NO: 199256 - DNA, 25 bp, Artificial
  Probe
catccatgccaactcaatggaactt

SEQ ID NO: 199257 - DNA, 25 bp, Artificial
  Probe
ctcctgaacaagtaagtgtctgatt

SEQ ID NO: 199258 - DNA, 25 bp, Artificial
  Probe
tctcagtttctacttattagctgtg

SEQ ID NO: 199259 - DNA, 25 bp, Artificial
  Probe
cttgtttctcagaagttccaccttg

SEQ ID NO: 199260 - DNA, 25 bp, Artificial
  Probe
accagtatccatactgatgttaagg

SEQ ID NO: 199261 - DNA, 25 bp, Artificial
  Probe
aagagtttaggtctagcctaagcta

SEQ ID NO: 199262 - DNA, 25 bp, Artificial
  Probe
cactgtttgttcagtagttggaaca

SEQ ID NO: 199263 - DNA, 25 bp, Artificial
  Probe
tcactgtttgttcagtagttggaac

SEQ ID NO: 199264 - DNA, 25 bp, Artificial
  Probe
gtgaccggccctaagtcacacagct

SEQ ID NO: 199265 - DNA, 25 bp, Artificial
  Probe
gaacaaaactatctctgatggggaa

SEQ ID NO: 199266 - DNA, 25 bp, Artificial
  Probe
agctcgaagctgaaagtatgttcgt

SEQ ID NO: 199267 - DNA, 25 bp, Artificial
  Probe
agttgccttgggagctcgaagctga

SEQ ID NO: 199268 - DNA, 25 bp, Artificial
  Probe
gattctcaaagttgccttgggagct

SEQ ID NO: 199269 - DNA, 25 bp, Artificial
  Probe
gaggatatggcagctgtctgagtca

SEQ ID NO: 199270 - DNA, 25 bp, Artificial
  Probe
ccagaaccagtatccatactgatgt

SEQ ID NO: 199271 - DNA, 25 bp, Artificial
  Probe
ctgagtcactgtttgttcagtagtt

SEQ ID NO: 199272 - DNA, 25 bp, Artificial
  Probe
gccattttaggctcaaatctcagtt

SEQ ID NO: 199273 - DNA, 25 bp, Artificial
  Probe
ttacttgattctcaaagttgccttg

SEQ ID NO: 199274 - DNA, 25 bp, Artificial
  Probe
ggtctcccagaaccagtatccatac

SEQ ID NO: 199275 - DNA, 25 bp, Artificial
  Probe
ggagctcgaagctgaaagtatgttc

SEQ ID NO: 199276 - DNA, 25 bp, Artificial
  Probe
ttccttgtggtctcccagaaccagt

SEQ ID NO: 199277 - DNA, 25 bp, Artificial
  Probe
ttaggtctagcctaagctacatgat

SEQ ID NO: 199278 - DNA, 25 bp, Artificial
  Probe
aaactatctctgatggggaaacagg

SEQ ID NO: 199279 - DNA, 25 bp, Artificial
  Probe
gctgtgggtctatgggcaactgttc

SEQ ID NO: 199280 - DNA, 25 bp, Artificial
  Probe
tggaagcccctcaattcacacagac

SEQ ID NO: 199281 - DNA, 25 bp, Artificial
  Probe
cccagaaccagtatccatactgatg

SEQ ID NO: 199282 - DNA, 25 bp, Artificial
  Probe
agacatcttgtgaccggccctaagt

SEQ ID NO: 199283 - DNA, 25 bp, Artificial
  Probe
tgtgaccggccctaagtcacacagc

SEQ ID NO: 199284 - DNA, 25 bp, Artificial
  Probe
aactatctctgatggggaaacaggt

SEQ ID NO: 199285 - DNA, 25 bp, Artificial
  Probe
agaacaaaactatctctgatgggga

SEQ ID NO: 199286 - DNA, 25 bp, Artificial
  Probe
acagaagtccagcttctgtaccctg

SEQ ID NO: 199287 - DNA, 25 bp, Artificial
  Probe
tgacaaattgtggttccttgtggtc

SEQ ID NO: 199288 - DNA, 25 bp, Artificial
  Probe
ctcctgtctgaaaaggaggatatgg

SEQ ID NO: 199289 - DNA, 25 bp, Artificial
  Probe
acttattagctgtgggtctatgggc

SEQ ID NO: 199290 - DNA, 25 bp, Artificial
  Probe
gtccagcttctgtaccctggaagcc

SEQ ID NO: 199291 - DNA, 25 bp, Artificial
  Probe
ggccctaagtcacacagctcctgaa

SEQ ID NO: 199292 - DNA, 25 bp, Artificial
  Probe
ttctgtaccctggaagcccctcaat

SEQ ID NO: 199293 - DNA, 25 bp, Artificial
  Probe
ctggaagcccctcaattcacacaga

SEQ ID NO: 199294 - DNA, 25 bp, Artificial
  Probe
acagtattgaacagtccatacttga

SEQ ID NO: 199295 - DNA, 25 bp, Artificial
  Probe
gtctagcctaagctacatgattacc

SEQ ID NO: 199296 - DNA, 25 bp, Artificial
  Probe
agagagacatcttgtgaccggccct

SEQ ID NO: 199297 - DNA, 25 bp, Artificial
  Probe
gtattgaacagtccatacttgattt

SEQ ID NO: 199298 - DNA, 25 bp, Artificial
  Probe
gggtctatgggcaactgttctcctg

SEQ ID NO: 199299 - DNA, 25 bp, Artificial
  Probe
ccatactgatgttaagggagacaga

SEQ ID NO: 199300 - DNA, 25 bp, Artificial
  Probe
tctgtaccctggaagcccctcaatt

SEQ ID NO: 199301 - DNA, 25 bp, Artificial
  Probe
attagctgtgggtctatgggcaact

SEQ ID NO: 199302 - DNA, 25 bp, Artificial
  Probe
tgtctgattgacaaattgtggttcc

SEQ ID NO: 199303 - DNA, 25 bp, Artificial
  Probe
ttccctcctgggagacagagggcgc

SEQ ID NO: 199304 - DNA, 25 bp, Artificial
  Probe
gggatcataggtccttatctctccc

SEQ ID NO: 199305 - DNA, 25 bp, Artificial
  Probe
actcaagtccgcaacccacaaagtg

SEQ ID NO: 199306 - DNA, 25 bp, Artificial
  Probe
agcagacatccattccctcctggga

SEQ ID NO: 199307 - DNA, 25 bp, Artificial
  Probe
tctcccaattatgagtgctactcgg

SEQ ID NO: 199308 - DNA, 25 bp, Artificial
  Probe
agatgggacgcagctaaccgatctg

SEQ ID NO: 199309 - DNA, 25 bp, Artificial
  Probe
ggtccttatctctcccaattatgag

SEQ ID NO: 199310 - DNA, 25 bp, Artificial
  Probe
agcccttcgggtgtcgtttgtgaag

SEQ ID NO: 199311 - DNA, 25 bp, Artificial
  Probe
gaaagtgtaactcaccggggcaaga

SEQ ID NO: 199312 - DNA, 25 bp, Artificial
  Probe
gggctggctcaatcgggccatcttc

SEQ ID NO: 199313 - DNA, 25 bp, Artificial
  Probe
atgtcccacataatcctgcaaggac

SEQ ID NO: 199314 - DNA, 25 bp, Artificial
  Probe
cttccccgctactgtccatggttga

SEQ ID NO: 199315 - DNA, 25 bp, Artificial
  Probe
ccatggttgacaaggtctagaaagg

SEQ ID NO: 199316 - DNA, 25 bp, Artificial
  Probe
actcaccggggcaagaagatgggac

SEQ ID NO: 199317 - DNA, 25 bp, Artificial
  Probe
tggagagccccaaactaaagccccg

SEQ ID NO: 199318 - DNA, 25 bp, Artificial
  Probe
cagaaagtgtaactcaccggggcaa

SEQ ID NO: 199319 - DNA, 25 bp, Artificial
  Probe
tctagaaaggagctctccaaactca

SEQ ID NO: 199320 - DNA, 25 bp, Artificial
  Probe
tcagccgaggccaaccgtgagtatc

SEQ ID NO: 199321 - DNA, 25 bp, Artificial
  Probe
cacaggcctgcgactggacacagct

SEQ ID NO: 199322 - DNA, 25 bp, Artificial
  Probe
cactcccaagtccaaagtgtcaagt

SEQ ID NO: 199323 - DNA, 25 bp, Artificial
  Probe
cgactggacacagcttgatgaggag

SEQ ID NO: 199324 - DNA, 25 bp, Artificial
  Probe
taagcaccagggaaaggagaaagcc

SEQ ID NO: 199325 - DNA, 25 bp, Artificial
  Probe
gaagtctagggctggcaaaggcaca

SEQ ID NO: 199326 - DNA, 25 bp, Artificial
  Probe
gctaagcactcctgggcagaatcct

SEQ ID NO: 199327 - DNA, 25 bp, Artificial
  Probe
gagctctccaaactcaagtccgcaa

SEQ ID NO: 199328 - DNA, 25 bp, Artificial
  Probe
acttcctgactaatctctgcctgag

SEQ ID NO: 199329 - DNA, 25 bp, Artificial
  Probe
ctcctgggagacagagggcgcctct

SEQ ID NO: 199330 - DNA, 25 bp, Artificial
  Probe
aggtctccaggctctctgcagagtc

SEQ ID NO: 199331 - DNA, 25 bp, Artificial
  Probe
gtctgtgttagaagggactgctgct

SEQ ID NO: 199332 - DNA, 25 bp, Artificial
  Probe
tggccctagcccttcgggtgtcgtt

SEQ ID NO: 199333 - DNA, 25 bp, Artificial
  Probe
ctcctccgctgattcgagagaggga

SEQ ID NO: 199334 - DNA, 25 bp, Artificial
  Probe
gtgctcagcacaagaacccatcgac

SEQ ID NO: 199335 - DNA, 25 bp, Artificial
  Probe
ctctgcagagtcagaaagtgtaact

SEQ ID NO: 199336 - DNA, 25 bp, Artificial
  Probe
ggtcggagtgtgctcagcacaagaa

SEQ ID NO: 199337 - DNA, 25 bp, Artificial
  Probe
agtccaaagtgtcaagtttcctcct

SEQ ID NO: 199338 - DNA, 25 bp, Artificial
  Probe
ctagggctggcaaaggcacaattga

SEQ ID NO: 199339 - DNA, 25 bp, Artificial
  Probe
aatctctgcctgagcccgcttggaa

SEQ ID NO: 199340 - DNA, 25 bp, Artificial
  Probe
tagtgggacccctattgaaattctc

SEQ ID NO: 199341 - DNA, 25 bp, Artificial
  Probe
gttgcttgctttcctaaagtcactt

SEQ ID NO: 199342 - DNA, 25 bp, Artificial
  Probe
aggcacaattgaagtcagggctggc

SEQ ID NO: 199343 - DNA, 25 bp, Artificial
  Probe
ttcctggtagagaagtctagggctg

SEQ ID NO: 199344 - DNA, 25 bp, Artificial
  Probe
gcagacatccattccctcctgggag

SEQ ID NO: 199345 - DNA, 25 bp, Artificial
  Probe
tttggcctggacaccagggccacgg

SEQ ID NO: 199346 - DNA, 25 bp, Artificial
  Probe
aaccaaatgtacttggggaaatcag

SEQ ID NO: 199347 - DNA, 25 bp, Artificial
  Probe
ccttgaggctgaagtttttaagcac

SEQ ID NO: 199348 - DNA, 25 bp, Artificial
  Probe
ctccgctgattcgagagagggagcc

SEQ ID NO: 199349 - DNA, 25 bp, Artificial
  Probe
gaaaggacccaaaggcgtgcggctc

SEQ ID NO: 199350 - DNA, 25 bp, Artificial
  Probe
gtgcaatcctggcataggaaaggac

SEQ ID NO: 199351 - DNA, 25 bp, Artificial
  Probe
gggcccttctctgagagtgcactgt

SEQ ID NO: 199352 - DNA, 25 bp, Artificial
  Probe
gtgcactgtgcaatcctggcatagg

SEQ ID NO: 199353 - DNA, 25 bp, Artificial
  Probe
ggaaaggacccaaaggcgtgcggct

SEQ ID NO: 199354 - DNA, 25 bp, Artificial
  Probe
gtaacggggcccttctctgagagtg

SEQ ID NO: 199355 - DNA, 25 bp, Artificial
  Probe
taacggggcccttctctgagagtgc

SEQ ID NO: 199356 - DNA, 25 bp, Artificial
  Probe
atcccctgctcaaacctaactggct

SEQ ID NO: 199357 - DNA, 25 bp, Artificial
  Probe
gcactgtgcaatcctggcataggaa

SEQ ID NO: 199358 - DNA, 25 bp, Artificial
  Probe
cgtgcggctccggagcgcatttccc

SEQ ID NO: 199359 - DNA, 25 bp, Artificial
  Probe
aacggggcccttctctgagagtgca

SEQ ID NO: 199360 - DNA, 25 bp, Artificial
  Probe
tcccagaatcccctgctcaaaccta

SEQ ID NO: 199361 - DNA, 25 bp, Artificial
  Probe
cccttctctgagagtgcactgtgca

SEQ ID NO: 199362 - DNA, 25 bp, Artificial
  Probe
gcaatcctggcataggaaaggaccc

SEQ ID NO: 199363 - DNA, 25 bp, Artificial
  Probe
tgagagtgcactgtgcaatcctggc

SEQ ID NO: 199364 - DNA, 25 bp, Artificial
  Probe
agagtgcactgtgcaatcctggcat

SEQ ID NO: 199365 - DNA, 25 bp, Artificial
  Probe
tgcggctccggagcgcatttcccag

SEQ ID NO: 199366 - DNA, 25 bp, Artificial
  Probe
acggggcccttctctgagagtgcac

SEQ ID NO: 199367 - DNA, 25 bp, Artificial
  Probe
ggcccttctctgagagtgcactgtg

SEQ ID NO: 199368 - DNA, 25 bp, Artificial
  Probe
tctctgagagtgcactgtgcaatcc

SEQ ID NO: 199369 - DNA, 25 bp, Artificial
  Probe
agtgcactgtgcaatcctggcatag

SEQ ID NO: 199370 - DNA, 25 bp, Artificial
  Probe
ctccggagcgcatttcccagaatcc

SEQ ID NO: 199371 - DNA, 25 bp, Artificial
  Probe
ttctctgagagtgcactgtgcaatc

SEQ ID NO: 199372 - DNA, 25 bp, Artificial
  Probe
tgcactgtgcaatcctggcatagga

SEQ ID NO: 199373 - DNA, 25 bp, Artificial
  Probe
atcctggcataggaaaggacccaaa

SEQ ID NO: 199374 - DNA, 25 bp, Artificial
  Probe
cggggcccttctctgagagtgcact

SEQ ID NO: 199375 - DNA, 25 bp, Artificial
  Probe
gctccggagcgcatttcccagaatc

SEQ ID NO: 199376 - DNA, 25 bp, Artificial
  Probe
caatcctggcataggaaaggaccca

SEQ ID NO: 199377 - DNA, 25 bp, Artificial
  Probe
cgtaacggggcccttctctgagagt

SEQ ID NO: 199378 - DNA, 25 bp, Artificial
  Probe
aaggacccaaaggcgtgcggctccg

SEQ ID NO: 199379 - DNA, 25 bp, Artificial
  Probe
ctctgagagtgcactgtgcaatcct

SEQ ID NO: 199380 - DNA, 25 bp, Artificial
  Probe
cactgtgcaatcctggcataggaaa

SEQ ID NO: 199381 - DNA, 25 bp, Artificial
  Probe
ggggcccttctctgagagtgcactg

SEQ ID NO: 199382 - DNA, 25 bp, Artificial
  Probe
ctgagagtgcactgtgcaatcctgg

SEQ ID NO: 199383 - DNA, 25 bp, Artificial
  Probe
gagtgcactgtgcaatcctggcata

SEQ ID NO: 199384 - DNA, 25 bp, Artificial
  Probe
aatcctggcataggaaaggacccaa

SEQ ID NO: 199385 - DNA, 25 bp, Artificial
  Probe
cttctctgagagtgcactgtgcaat

SEQ ID NO: 199386 - DNA, 25 bp, Artificial
  Probe
tgcaatcctggcataggaaaggacc

SEQ ID NO: 199387 - DNA, 25 bp, Artificial
  Probe
aggcgtgcggctccggagcgcattt

SEQ ID NO: 199388 - DNA, 25 bp, Artificial
  Probe
gcccttctctgagagtgcactgtgc

SEQ ID NO: 199389 - DNA, 25 bp, Artificial
  Probe
ggctccggagcgcatttcccagaat

SEQ ID NO: 199390 - DNA, 25 bp, Artificial
  Probe
actgtgcaatcctggcataggaaag

SEQ ID NO: 199391 - DNA, 25 bp, Artificial
  Probe
tctgagagtgcactgtgcaatcctg

SEQ ID NO: 199392 - DNA, 25 bp, Artificial
  Probe
ccttctctgagagtgcactgtgcaa

SEQ ID NO: 199393 - DNA, 25 bp, Artificial
  Probe
ctgtgcaatcctggcataggaaagg

SEQ ID NO: 199394 - DNA, 25 bp, Artificial
  Probe
gtgcggctccggagcgcatttccca

SEQ ID NO: 199395 - DNA, 25 bp, Artificial
  Probe
cagtgactacgtacatctggacggg

SEQ ID NO: 199396 - DNA, 25 bp, Artificial
  Probe
gacaacagggaaccagcagttgtgg

SEQ ID NO: 199397 - DNA, 25 bp, Artificial
  Probe
tctggccgttcgtgggcctctacac

SEQ ID NO: 199398 - DNA, 25 bp, Artificial
  Probe
agatgtcacctgtgcctgaggctcc

SEQ ID NO: 199399 - DNA, 25 bp, Artificial
  Probe
ttggacttactctcttgggcgacag

SEQ ID NO: 199400 - DNA, 25 bp, Artificial
  Probe
cacatacctttgtagatgtcacctg

SEQ ID NO: 199401 - DNA, 25 bp, Artificial
  Probe
aggacaacagggaaccagcagttgt

SEQ ID NO: 199402 - DNA, 25 bp, Artificial
  Probe
gtcacctgtgcctgaggctccttga

SEQ ID NO: 199403 - DNA, 25 bp, Artificial
  Probe
tacctttgtagatgtcacctgtgcc

SEQ ID NO: 199404 - DNA, 25 bp, Artificial
  Probe
acatacctttgtagatgtcacctgt

SEQ ID NO: 199405 - DNA, 25 bp, Artificial
  Probe
cttgggcgacagagagctaaggtaa

SEQ ID NO: 199406 - DNA, 25 bp, Artificial
  Probe
aattcctgacttcatctggccgttc

SEQ ID NO: 199407 - DNA, 25 bp, Artificial
  Probe
tctcatcctgggattctgaagtgtt

SEQ ID NO: 199408 - DNA, 25 bp, Artificial
  Probe
cctgacttcatctggccgttcgtgg

SEQ ID NO: 199409 - DNA, 25 bp, Artificial
  Probe
tgtgcctgaggctccttgaatacca

SEQ ID NO: 199410 - DNA, 25 bp, Artificial
  Probe
cctttagcctagttggacttactct

SEQ ID NO: 199411 - DNA, 25 bp, Artificial
  Probe
taagtgtctaagcaggctcgagctc

SEQ ID NO: 199412 - DNA, 25 bp, Artificial
  Probe
ctttgtagatgtcacctgtgcctga

SEQ ID NO: 199413 - DNA, 25 bp, Artificial
  Probe
ttcatctggccgttcgtgggcctct

SEQ ID NO: 199414 - DNA, 25 bp, Artificial
  Probe
cgttcgtgggcctctacactgtcct

SEQ ID NO: 199415 - DNA, 25 bp, Artificial
  Probe
tcaaaactctcatcctgggattctg

SEQ ID NO: 199416 - DNA, 25 bp, Artificial
  Probe
ctctggaggacaacagggaaccagc

SEQ ID NO: 199417 - DNA, 25 bp, Artificial
  Probe
aacagggaaccagcagttgtggcag

SEQ ID NO: 199418 - DNA, 25 bp, Artificial
  Probe
gtctaagcaggctcgagctcacaga

SEQ ID NO: 199419 - DNA, 25 bp, Artificial
  Probe
ctaagcaggctcgagctcacagaat

SEQ ID NO: 199420 - DNA, 25 bp, Artificial
  Probe
gcctctacactgtcctttagcctag

SEQ ID NO: 199421 - DNA, 25 bp, Artificial
  Probe
ggctctggaggacaacagggaacca

SEQ ID NO: 199422 - DNA, 25 bp, Artificial
  Probe
gcacacagtgactacgtacatctgg

SEQ ID NO: 199423 - DNA, 25 bp, Artificial
  Probe
aaattgaggtacatttcctgccttg

SEQ ID NO: 199424 - DNA, 25 bp, Artificial
  Probe
tgggcctctacactgtcctttagcc

SEQ ID NO: 199425 - DNA, 25 bp, Artificial
  Probe
ctctcttgggcgacagagagctaag

SEQ ID NO: 199426 - DNA, 25 bp, Artificial
  Probe
tacgtacatctggacgggtcccacc

SEQ ID NO: 199427 - DNA, 25 bp, Artificial
  Probe
gaggtacatttcctgccttgacctc

SEQ ID NO: 199428 - DNA, 25 bp, Artificial
  Probe
acactgtcctttagcctagttggac

SEQ ID NO: 199429 - DNA, 25 bp, Artificial
  Probe
gcccaaattcctgacttcatctggc

SEQ ID NO: 199430 - DNA, 25 bp, Artificial
  Probe
attgaggtacatttcctgccttgac

SEQ ID NO: 199431 - DNA, 25 bp, Artificial
  Probe
tctacactgtcctttagcctagttg

SEQ ID NO: 199432 - DNA, 25 bp, Artificial
  Probe
gggttggtgcccaaattcctgactt

SEQ ID NO: 199433 - DNA, 25 bp, Artificial
  Probe
aagtgtctaagcaggctcgagctca

SEQ ID NO: 199434 - DNA, 25 bp, Artificial
  Probe
aggtacatttcctgccttgacctcc

SEQ ID NO: 199435 - DNA, 25 bp, Artificial
  Probe
cacctgtgcctgaggctccttgaat

SEQ ID NO: 199436 - DNA, 25 bp, Artificial
  Probe
gctcgagctcacagaatcttttaaa

SEQ ID NO: 199437 - DNA, 25 bp, Artificial
  Probe
gaggctccttgaataccagtagggg

SEQ ID NO: 199438 - DNA, 25 bp, Artificial
  Probe
aaactctcatcctgggattctgaag

SEQ ID NO: 199439 - DNA, 25 bp, Artificial
  Probe
tgtcctttagcctagttggacttac

SEQ ID NO: 199440 - DNA, 25 bp, Artificial
  Probe
ccaaattcctgacttcatctggccg

SEQ ID NO: 199441 - DNA, 25 bp, Artificial
  Probe
gaagacacctgaataaacctctggc

SEQ ID NO: 199442 - DNA, 25 bp, Artificial
  Probe
ctgagcacagacactcagtaaccct

SEQ ID NO: 199443 - DNA, 25 bp, Artificial
  Probe
tggatcctgtacaacctggcaaggc

SEQ ID NO: 199444 - DNA, 25 bp, Artificial
  Probe
aaatgacatcacattgcaggctccc

SEQ ID NO: 199445 - DNA, 25 bp, Artificial
  Probe
gacatcacattgcaggctccctgtg

SEQ ID NO: 199446 - DNA, 25 bp, Artificial
  Probe
cacattgcaggctccctgtgtggtg

SEQ ID NO: 199447 - DNA, 25 bp, Artificial
  Probe
ctaagaccattgaggcagcttaaat

SEQ ID NO: 199448 - DNA, 25 bp, Artificial
  Probe
caccactgtgcctgtcgtattcgaa

SEQ ID NO: 199449 - DNA, 25 bp, Artificial
  Probe
ctcagtggccaaccagtcctgctga

SEQ ID NO: 199450 - DNA, 25 bp, Artificial
  Probe
gcccctgagcacagacactcagtaa

SEQ ID NO: 199451 - DNA, 25 bp, Artificial
  Probe
gagacactgtctcaggaaataaggt

SEQ ID NO: 199452 - DNA, 25 bp, Artificial
  Probe
tcccacttgttcttccttgggctgg

SEQ ID NO: 199453 - DNA, 25 bp, Artificial
  Probe
gcctgtcgtattcgaaggtattttt

SEQ ID NO: 199454 - DNA, 25 bp, Artificial
  Probe
gaaagtgcaccactgtgcctgtcgt

SEQ ID NO: 199455 - DNA, 25 bp, Artificial
  Probe
aatcagagctccaggttgtaagaga

SEQ ID NO: 199456 - DNA, 25 bp, Artificial
  Probe
tttaaaatgacatcacattgcaggc

SEQ ID NO: 199457 - DNA, 25 bp, Artificial
  Probe
accatagatgcttaggtttattggc

SEQ ID NO: 199458 - DNA, 25 bp, Artificial
  Probe
ggatggagcccctgagcacagacac

SEQ ID NO: 199459 - DNA, 25 bp, Artificial
  Probe
tcagtaaccctgtgtaaactccccg

SEQ ID NO: 199460 - DNA, 25 bp, Artificial
  Probe
tcccaggagagaagtctgggagccc

SEQ ID NO: 199461 - DNA, 25 bp, Artificial
  Probe
tcaggttcccacttgttcttccttg

SEQ ID NO: 199462 - DNA, 25 bp, Artificial
  Probe
caggttcccacttgttcttccttgg

SEQ ID NO: 199463 - DNA, 25 bp, Artificial
  Probe
gtctgggagcccttcaaaatgatgt

SEQ ID NO: 199464 - DNA, 25 bp, Artificial
  Probe
agtttcccaggagagaagtctggga

SEQ ID NO: 199465 - DNA, 25 bp, Artificial
  Probe
gactgaagacacctgaataaacctc

SEQ ID NO: 199466 - DNA, 25 bp, Artificial
  Probe
gggaagtttcccaggagagaagtct

SEQ ID NO: 199467 - DNA, 25 bp, Artificial
  Probe
gtcctttcaggttcccacttgttct

SEQ ID NO: 199468 - DNA, 25 bp, Artificial
  Probe
gagaagtctgggagcccttcaaaat

SEQ ID NO: 199469 - DNA, 25 bp, Artificial
  Probe
cactgtctcaggaaataaggtggat

SEQ ID NO: 199470 - DNA, 25 bp, Artificial
  Probe
agctccaggttgtaagagacactgt

SEQ ID NO: 199471 - DNA, 25 bp, Artificial
  Probe
gttcccacttgttcttccttgggct

SEQ ID NO: 199472 - DNA, 25 bp, Artificial
  Probe
ttgtaagagacactgtctcaggaaa

SEQ ID NO: 199473 - DNA, 25 bp, Artificial
  Probe
tgtgatgtctaagaccattgaggca

SEQ ID NO: 199474 - DNA, 25 bp, Artificial
  Probe
tgatgactgaagacacctgaataaa

SEQ ID NO: 199475 - DNA, 25 bp, Artificial
  Probe
ttaaaatgacatcacattgcaggct

SEQ ID NO: 199476 - DNA, 25 bp, Artificial
  Probe
agacactcagtaaccctgtgtaaac

SEQ ID NO: 199477 - DNA, 25 bp, Artificial
  Probe
atcctgtacaacctggcaaggcacc

SEQ ID NO: 199478 - DNA, 25 bp, Artificial
  Probe
gcccttcaaaatgatgttaaatgat

SEQ ID NO: 199479 - DNA, 25 bp, Artificial
  Probe
ggaggcaccatagatgcttaggttt

SEQ ID NO: 199480 - DNA, 25 bp, Artificial
  Probe
ttgcaggctccctgtgtggtgatgt

SEQ ID NO: 199481 - DNA, 25 bp, Artificial
  Probe
gatgtccaaggcttgtgatgtctaa

SEQ ID NO: 199482 - DNA, 25 bp, Artificial
  Probe
tgtaagagacactgtctcaggaaat

SEQ ID NO: 199483 - DNA, 25 bp, Artificial
  Probe
agtgcaccactgtgcctgtcgtatt

SEQ ID NO: 199484 - DNA, 25 bp, Artificial
  Probe
cactgtcctggatcctgtacaacct

SEQ ID NO: 199485 - DNA, 25 bp, Artificial
  Probe
caaggcttgtgatgtctaagaccat

SEQ ID NO: 199486 - DNA, 25 bp, Artificial
  Probe
gagacaggaggatcccagggcctca

SEQ ID NO: 199487 - DNA, 25 bp, Artificial
  Probe
ctgcaccctccagtcttattaatct

SEQ ID NO: 199488 - DNA, 25 bp, Artificial
  Probe
gtggaaccgctgagcacagtgacct

SEQ ID NO: 199489 - DNA, 25 bp, Artificial
  Probe
accctcctacctcttgagatctctg

SEQ ID NO: 199490 - DNA, 25 bp, Artificial
  Probe
ttaatctcccgctgctgttcccagg

SEQ ID NO: 199491 - DNA, 25 bp, Artificial
  Probe
acctcttgagatctctgaataaaga

SEQ ID NO: 199492 - DNA, 25 bp, Artificial
  Probe
gctgagcacagtgacctcacagctg

SEQ ID NO: 199493 - DNA, 25 bp, Artificial
  Probe
acagctgccttgggacctcctcgcc

SEQ ID NO: 199494 - DNA, 25 bp, Artificial
  Probe
gacctcacagctgccttgggacctc

SEQ ID NO: 199495 - DNA, 25 bp, Artificial
  Probe
ctcacagctgccttgggacctcctc

SEQ ID NO: 199496 - DNA, 25 bp, Artificial
  Probe
ctgagcacagtgacctcacagctgc

SEQ ID NO: 199497 - DNA, 25 bp, Artificial
  Probe
gcacagtgacctcacagctgccttg

SEQ ID NO: 199498 - DNA, 25 bp, Artificial
  Probe
ctcctacctcttgagatctctgaat

SEQ ID NO: 199499 - DNA, 25 bp, Artificial
  Probe
tcttgagatctctgaataaagaatt

SEQ ID NO: 199500 - DNA, 25 bp, Artificial
  Probe
ggaaccgctgagcacagtgacctca

SEQ ID NO: 199501 - DNA, 25 bp, Artificial
  Probe
cgctgagcacagtgacctcacagct

SEQ ID NO: 199502 - DNA, 25 bp, Artificial
  Probe
agtcttattaatctcccgctgctgt

SEQ ID NO: 199503 - DNA, 25 bp, Artificial
  Probe
gaaccgctgagcacagtgacctcac

SEQ ID NO: 199504 - DNA, 25 bp, Artificial
  Probe
tgccttgggacctcctcgcccaccc

SEQ ID NO: 199505 - DNA, 25 bp, Artificial
  Probe
agcacagtgacctcacagctgcctt

SEQ ID NO: 199506 - DNA, 25 bp, Artificial
  Probe
ggtggaaccgctgagcacagtgacc

SEQ ID NO: 199507 - DNA, 25 bp, Artificial
  Probe
cctcttgagatctctgaataaagaa

SEQ ID NO: 199508 - DNA, 25 bp, Artificial
  Probe
ccagtcttattaatctcccgctgct

SEQ ID NO: 199509 - DNA, 25 bp, Artificial
  Probe
ctccagtcttattaatctcccgctg

SEQ ID NO: 199510 - DNA, 25 bp, Artificial
  Probe
accgctgagcacagtgacctcacag

SEQ ID NO: 199511 - DNA, 25 bp, Artificial
  Probe
tggaaccgctgagcacagtgacctc

SEQ ID NO: 199512 - DNA, 25 bp, Artificial
  Probe
ctcttgagatctctgaataaagaat

SEQ ID NO: 199513 - DNA, 25 bp, Artificial
  Probe
tcttattaatctcccgctgctgttc

SEQ ID NO: 199514 - DNA, 25 bp, Artificial
  Probe
acagtgacctcacagctgccttggg

SEQ ID NO: 199515 - DNA, 25 bp, Artificial
  Probe
gtcttattaatctcccgctgctgtt

SEQ ID NO: 199516 - DNA, 25 bp, Artificial
  Probe
tgagcacagtgacctcacagctgcc

SEQ ID NO: 199517 - DNA, 25 bp, Artificial
  Probe
cctcacagctgccttgggacctcct

SEQ ID NO: 199518 - DNA, 25 bp, Artificial
  Probe
cacagtgacctcacagctgccttgg

SEQ ID NO: 199519 - DNA, 25 bp, Artificial
  Probe
ccgctgagcacagtgacctcacagc

SEQ ID NO: 199520 - DNA, 25 bp, Artificial
  Probe
gtgacctcacagctgccttgggacc

SEQ ID NO: 199521 - DNA, 25 bp, Artificial
  Probe
ttattaatctcccgctgctgttccc

SEQ ID NO: 199522 - DNA, 25 bp, Artificial
  Probe
tgacctcacagctgccttgggacct

SEQ ID NO: 199523 - DNA, 25 bp, Artificial
  Probe
gccttgggacctcctcgcccaccct

SEQ ID NO: 199524 - DNA, 25 bp, Artificial
  Probe
tacctcttgagatctctgaataaag

SEQ ID NO: 199525 - DNA, 25 bp, Artificial
  Probe
aaccgctgagcacagtgacctcaca

SEQ ID NO: 199526 - DNA, 25 bp, Artificial
  Probe
ctacctcttgagatctctgaataaa

SEQ ID NO: 199527 - DNA, 25 bp, Artificial
  Probe
attaatctcccgctgctgttcccag

SEQ ID NO: 199528 - DNA, 25 bp, Artificial
  Probe
cctccagtcttattaatctcccgct

SEQ ID NO: 199529 - DNA, 25 bp, Artificial
  Probe
gagcacagtgacctcacagctgcct

SEQ ID NO: 199530 - DNA, 25 bp, Artificial
  Probe
cagtgacctcacagctgccttggga

SEQ ID NO: 199531 - DNA, 25 bp, Artificial
  Probe
agtgacctcacagctgccttgggac

SEQ ID NO: 199532 - DNA, 25 bp, Artificial
  Probe
cagtcttattaatctcccgctgctg

SEQ ID NO: 199533 - DNA, 25 bp, Artificial
  Probe
caacacaatgtcaggacttgactgt

SEQ ID NO: 199534 - DNA, 25 bp, Artificial
  Probe
ttgtatgttgcacatagccaacatt

SEQ ID NO: 199535 - DNA, 25 bp, Artificial
  Probe
ctcactagtagtaggggaataacat

SEQ ID NO: 199536 - DNA, 25 bp, Artificial
  Probe
tgactcattggaaacaacagcaaag

SEQ ID NO: 199537 - DNA, 25 bp, Artificial
  Probe
cacaatgtcaggacttgactgttct

SEQ ID NO: 199538 - DNA, 25 bp, Artificial
  Probe
tcaggacttgactgttctcagggag

SEQ ID NO: 199539 - DNA, 25 bp, Artificial
  Probe
atgtgcagtatacaacacaatgtca

SEQ ID NO: 199540 - DNA, 25 bp, Artificial
  Probe
tgtcaggacttgactgttctcaggg

SEQ ID NO: 199541 - DNA, 25 bp, Artificial
  Probe
cttagaatttatagccatggaacat

SEQ ID NO: 199542 - DNA, 25 bp, Artificial
  Probe
gcctaggttctagtattaagtttca

SEQ ID NO: 199543 - DNA, 25 bp, Artificial
  Probe
acaatgtcaggacttgactgttctc

SEQ ID NO: 199544 - DNA, 25 bp, Artificial
  Probe
aaacttactaagtatcagcatagga

SEQ ID NO: 199545 - DNA, 25 bp, Artificial
  Probe
gtgcagtatacaacacaatgtcagg

SEQ ID NO: 199546 - DNA, 25 bp, Artificial
  Probe
gccttgttctcactagtagtagggg

SEQ ID NO: 199547 - DNA, 25 bp, Artificial
  Probe
ggaaaaactttctgaaaccttcatg

SEQ ID NO: 199548 - DNA, 25 bp, Artificial
  Probe
agctgatctgatcaatatcataaga

SEQ ID NO: 199549 - DNA, 25 bp, Artificial
  Probe
aagctgatctgatcaatatcataag

SEQ ID NO: 199550 - DNA, 25 bp, Artificial
  Probe
agaatatcagaaagcctaggttcta

SEQ ID NO: 199551 - DNA, 25 bp, Artificial
  Probe
tcagaaagcctaggttctagtatta

SEQ ID NO: 199552 - DNA, 25 bp, Artificial
  Probe
cttactaagtatcagcataggatgt

SEQ ID NO: 199553 - DNA, 25 bp, Artificial
  Probe
gtaccattttgattgtatgttgcac

SEQ ID NO: 199554 - DNA, 25 bp, Artificial
  Probe
cctgagccttgttctcactagtagt

SEQ ID NO: 199555 - DNA, 25 bp, Artificial
  Probe
gcacatagccaacattggaaaaact

SEQ ID NO: 199556 - DNA, 25 bp, Artificial
  Probe
ttctcactagtagtaggggaataac

SEQ ID NO: 199557 - DNA, 25 bp, Artificial
  Probe
gaatttatagccatggaacatcaaa

SEQ ID NO: 199558 - DNA, 25 bp, Artificial
  Probe
tgcagtatacaacacaatgtcagga

SEQ ID NO: 199559 - DNA, 25 bp, Artificial
  Probe
ccctgagccttgttctcactagtag

SEQ ID NO: 199560 - DNA, 25 bp, Artificial
  Probe
acacaatgtcaggacttgactgttc

SEQ ID NO: 199561 - DNA, 25 bp, Artificial
  Probe
gtgaccttactttacccctgagcct

SEQ ID NO: 199562 - DNA, 25 bp, Artificial
  Probe
aggacttgactgttctcagggaggc

SEQ ID NO: 199563 - DNA, 25 bp, Artificial
  Probe
cttgttctcactagtagtaggggaa

SEQ ID NO: 199564 - DNA, 25 bp, Artificial
  Probe
aatgtgaccttactttacccctgag

SEQ ID NO: 199565 - DNA, 25 bp, Artificial
  Probe
catgactcattggaaacaacagcaa

SEQ ID NO: 199566 - DNA, 25 bp, Artificial
  Probe
ctgatctgatcaatatcataagaga

SEQ ID NO: 199567 - DNA, 25 bp, Artificial
  Probe
ttgcacatagccaacattggaaaaa

SEQ ID NO: 199568 - DNA, 25 bp, Artificial
  Probe
ctacatgactcattggaaacaacag

SEQ ID NO: 199569 - DNA, 25 bp, Artificial
  Probe
ggggaataacatctaccctgcctac

SEQ ID NO: 199570 - DNA, 25 bp, Artificial
  Probe
tacccctgagccttgttctcactag

SEQ ID NO: 199571 - DNA, 25 bp, Artificial
  Probe
cagaaagcctaggttctagtattaa

SEQ ID NO: 199572 - DNA, 25 bp, Artificial
  Probe
tctcactagtagtaggggaataaca

SEQ ID NO: 199573 - DNA, 25 bp, Artificial
  Probe
actcattggaaacaacagcaaagct

SEQ ID NO: 199574 - DNA, 25 bp, Artificial
  Probe
ttttgattgtatgttgcacatagcc

SEQ ID NO: 199575 - DNA, 25 bp, Artificial
  Probe
cttgactgttctcagggaggcagaa

SEQ ID NO: 199576 - DNA, 25 bp, Artificial
  Probe
ccattttgattgtatgttgcacata

SEQ ID NO: 199577 - DNA, 25 bp, Artificial
  Probe
aacttactaagtatcagcataggat

SEQ ID NO: 199578 - DNA, 25 bp, Artificial
  Probe
gtatgttgcacatagccaacattgg

SEQ ID NO: 199579 - DNA, 25 bp, Artificial
  Probe
attgtctggccttcctctgaactgg

SEQ ID NO: 199580 - DNA, 25 bp, Artificial
  Probe
tcaggggccatttgggagcccaagt

SEQ ID NO: 199581 - DNA, 25 bp, Artificial
  Probe
gaatggtctgaatcccactgacctg

SEQ ID NO: 199582 - DNA, 25 bp, Artificial
  Probe
atttgggagcccaagtgggcaacac

SEQ ID NO: 199583 - DNA, 25 bp, Artificial
  Probe
aaacttcccagctgtgtttccaagc

SEQ ID NO: 199584 - DNA, 25 bp, Artificial
  Probe
taaccagtcacagacatacacaagg

SEQ ID NO: 199585 - DNA, 25 bp, Artificial
  Probe
gatcttagattcaggcccctaaatc

SEQ ID NO: 199586 - DNA, 25 bp, Artificial
  Probe
tgagcaggcttgtgtgaaaaatacc

SEQ ID NO: 199587 - DNA, 25 bp, Artificial
  Probe
gacagaagccacacgcatcattgta

SEQ ID NO: 199588 - DNA, 25 bp, Artificial
  Probe
tttactgccaaatgagtaaactcgg

SEQ ID NO: 199589 - DNA, 25 bp, Artificial
  Probe
gcaacacttctacaccatggaaacg

SEQ ID NO: 199590 - DNA, 25 bp, Artificial
  Probe
ggagggttagcctggacctgattct

SEQ ID NO: 199591 - DNA, 25 bp, Artificial
  Probe
cttggagctcacagtcttgaagggg

SEQ ID NO: 199592 - DNA, 25 bp, Artificial
  Probe
gcccaagtgggcaacacttctacac

SEQ ID NO: 199593 - DNA, 25 bp, Artificial
  Probe
gaaacgactagacttaagagtatca

SEQ ID NO: 199594 - DNA, 25 bp, Artificial
  Probe
ctgtatttctagagatcttagattc

SEQ ID NO: 199595 - DNA, 25 bp, Artificial
  Probe
ccaaagtagcccaagctgtatttct

SEQ ID NO: 199596 - DNA, 25 bp, Artificial
  Probe
aacgactagacttaagagtatcaag

SEQ ID NO: 199597 - DNA, 25 bp, Artificial
  Probe
acctgagcaggcttgtgtgaaaaat

SEQ ID NO: 199598 - DNA, 25 bp, Artificial
  Probe
gattcaggcccctaaatcagaccct

SEQ ID NO: 199599 - DNA, 25 bp, Artificial
  Probe
agatcttagattcaggcccctaaat

SEQ ID NO: 199600 - DNA, 25 bp, Artificial
  Probe
tggacctgattcttcacaactcagg

SEQ ID NO: 199601 - DNA, 25 bp, Artificial
  Probe
gaatcccactgacctgagcaggctt

SEQ ID NO: 199602 - DNA, 25 bp, Artificial
  Probe
cacacagagagaagtcttggagctc

SEQ ID NO: 199603 - DNA, 25 bp, Artificial
  Probe
gactccatttactgccaaatgagta

SEQ ID NO: 199604 - DNA, 25 bp, Artificial
  Probe
ctagagatcttagattcaggcccct

SEQ ID NO: 199605 - DNA, 25 bp, Artificial
  Probe
aagtcttggagctcacagtcttgaa

SEQ ID NO: 199606 - DNA, 25 bp, Artificial
  Probe
gagctctgtacattatctactaagc

SEQ ID NO: 199607 - DNA, 25 bp, Artificial
  Probe
accatggaaacgactagacttaaga

SEQ ID NO: 199608 - DNA, 25 bp, Artificial
  Probe
tctttaattgtctggccttcctctg

SEQ ID NO: 199609 - DNA, 25 bp, Artificial
  Probe
tactcaagaatggtctgaatcccac

SEQ ID NO: 199610 - DNA, 25 bp, Artificial
  Probe
aactcaggctctttactcaagaatg

SEQ ID NO: 199611 - DNA, 25 bp, Artificial
  Probe
agtgaaggtggctggctgtccatcc

SEQ ID NO: 199612 - DNA, 25 bp, Artificial
  Probe
cttcctctgaactgggagctccgtg

SEQ ID NO: 199613 - DNA, 25 bp, Artificial
  Probe
tggggtctaaccagtcacagacata

SEQ ID NO: 199614 - DNA, 25 bp, Artificial
  Probe
ccctcaggggccatttgggagccca

SEQ ID NO: 199615 - DNA, 25 bp, Artificial
  Probe
gccacacgcatcattgtaactgctc

SEQ ID NO: 199616 - DNA, 25 bp, Artificial
  Probe
acttctacaccatggaaacgactag

SEQ ID NO: 199617 - DNA, 25 bp, Artificial
  Probe
atttctagagatcttagattcaggc

SEQ ID NO: 199618 - DNA, 25 bp, Artificial
  Probe
attgtaactgctctttaattgtctg

SEQ ID NO: 199619 - DNA, 25 bp, Artificial
  Probe
tgggagcccaagtgggcaacacttc

SEQ ID NO: 199620 - DNA, 25 bp, Artificial
  Probe
agaatggtctgaatcccactgacct

SEQ ID NO: 199621 - DNA, 25 bp, Artificial
  Probe
ctgccaaatgagtaaactcgggagg

SEQ ID NO: 199622 - DNA, 25 bp, Artificial
  Probe
actgacctgagcaggcttgtgtgaa

SEQ ID NO: 199623 - DNA, 25 bp, Artificial
  Probe
tagacagaagccacacgcatcattg

SEQ ID NO: 199624 - DNA, 25 bp, Artificial
  Probe
cactcccaaagtagcccaagctgta

SEQ ID NO: 199625 - DNA, 25 bp, Artificial
  Probe
acgtcgcagagatgtagagaagtcg

SEQ ID NO: 199626 - DNA, 25 bp, Artificial
  Probe
gtagacagcagctcctctcataatg

SEQ ID NO: 199627 - DNA, 25 bp, Artificial
  Probe
gtcccctttccacttgagatgtttc

SEQ ID NO: 199628 - DNA, 25 bp, Artificial
  Probe
gtatgtcaacccaggatatggttgt

SEQ ID NO: 199629 - DNA, 25 bp, Artificial
  Probe
gacgtcgcagagatgtagagaagtc

SEQ ID NO: 199630 - DNA, 25 bp, Artificial
  Probe
tcttatatgacgtcgcagagatgta

SEQ ID NO: 199631 - DNA, 25 bp, Artificial
  Probe
aaatgacatgcaggttaagtgccca

SEQ ID NO: 199632 - DNA, 25 bp, Artificial
  Probe
ctaaccagggatggaaggacccgca

SEQ ID NO: 199633 - DNA, 25 bp, Artificial
  Probe
ggaaggacccgcaagcttagtgttg

SEQ ID NO: 199634 - DNA, 25 bp, Artificial
  Probe
aagctcgccctgagaacagctcagg

SEQ ID NO: 199635 - DNA, 25 bp, Artificial
  Probe
actccatggtagaagtaccatttgg

SEQ ID NO: 199636 - DNA, 25 bp, Artificial
  Probe
gtagaagtaccatttgggccataaa

SEQ ID NO: 199637 - DNA, 25 bp, Artificial
  Probe
gttggtaaaagctcgccctgagaac

SEQ ID NO: 199638 - DNA, 25 bp, Artificial
  Probe
aaggctaactcctcagccagcatca

SEQ ID NO: 199639 - DNA, 25 bp, Artificial
  Probe
gaaagtgactctaaccagggatgga

SEQ ID NO: 199640 - DNA, 25 bp, Artificial
  Probe
cacaacttcttatatgacgtcgcag

SEQ ID NO: 199641 - DNA, 25 bp, Artificial
  Probe
atggcagccattcttgctttcaccc

SEQ ID NO: 199642 - DNA, 25 bp, Artificial
  Probe
accattaattccatgacccagcagg

SEQ ID NO: 199643 - DNA, 25 bp, Artificial
  Probe
caacatctggaaggagggccagaaa

SEQ ID NO: 199644 - DNA, 25 bp, Artificial
  Probe
ctgtgagctctccaggctgtaaggg

SEQ ID NO: 199645 - DNA, 25 bp, Artificial
  Probe
tccacttgagatgtttctcccagac

SEQ ID NO: 199646 - DNA, 25 bp, Artificial
  Probe
agaattgtcccctttccacttgaga

SEQ ID NO: 199647 - DNA, 25 bp, Artificial
  Probe
ttgagatgtttctcccagacgcccc

SEQ ID NO: 199648 - DNA, 25 bp, Artificial
  Probe
ggtccagaagcaggttgcctcctaa

SEQ ID NO: 199649 - DNA, 25 bp, Artificial
  Probe
catgcttccctaaacggttttgtgg

SEQ ID NO: 199650 - DNA, 25 bp, Artificial
  Probe
cagaaaggactgctgtgaagggtca

SEQ ID NO: 199651 - DNA, 25 bp, Artificial
  Probe
aggctaactcctcagccagcatcat

SEQ ID NO: 199652 - DNA, 25 bp, Artificial
  Probe
ctcttggcttcttggcttctgtagt

SEQ ID NO: 199653 - DNA, 25 bp, Artificial
  Probe
ttcttggcttctgtagttctcctag

SEQ ID NO: 199654 - DNA, 25 bp, Artificial
  Probe
gcctgagcagccttcccgtggacat

SEQ ID NO: 199655 - DNA, 25 bp, Artificial
  Probe
gtttattcatagatgccaacatctg

SEQ ID NO: 199656 - DNA, 25 bp, Artificial
  Probe
cctagctaactgctcttgctaactg

SEQ ID NO: 199657 - DNA, 25 bp, Artificial
  Probe
tcttccttgaccatgtgccccaatg

SEQ ID NO: 199658 - DNA, 25 bp, Artificial
  Probe
acccatcaaattctatcctgggaag

SEQ ID NO: 199659 - DNA, 25 bp, Artificial
  Probe
gtcaccagccagctaataaagacct

SEQ ID NO: 199660 - DNA, 25 bp, Artificial
  Probe
tctccaggctgtaaggggcctgagc

SEQ ID NO: 199661 - DNA, 25 bp, Artificial
  Probe
gttgcctcctaagcttctttgtcac

SEQ ID NO: 199662 - DNA, 25 bp, Artificial
  Probe
caacccaggatatggttgttggtaa

SEQ ID NO: 199663 - DNA, 25 bp, Artificial
  Probe
ccatgcacagtaagaaagtgactct

SEQ ID NO: 199664 - DNA, 25 bp, Artificial
  Probe
taagtgcccaaggttacctgttggg

SEQ ID NO: 199665 - DNA, 25 bp, Artificial
  Probe
tcagtgtaagtcacacagatgaggg

SEQ ID NO: 199666 - DNA, 25 bp, Artificial
  Probe
caaggttacctgttgggtaccacat

SEQ ID NO: 199667 - DNA, 25 bp, Artificial
  Probe
gtgggcagaattgtcccctttccac

SEQ ID NO: 199668 - DNA, 25 bp, Artificial
  Probe
gtcagtgtaagtcacacagatgagg

SEQ ID NO: 199669 - DNA, 25 bp, Artificial
  Probe
gttgacacagactcccagaccttag

SEQ ID NO: 199670 - DNA, 25 bp, Artificial
  Probe
agactcccagaccttagcacaactg

SEQ ID NO: 199671 - DNA, 25 bp, Artificial
  Probe
cgacactcatggaaatgttgtagaa

SEQ ID NO: 199672 - DNA, 25 bp, Artificial
  Probe
taggaagtcaaacctcatccgccac

SEQ ID NO: 199673 - DNA, 25 bp, Artificial
  Probe
aagtcacacccgaattccatgcaag

SEQ ID NO: 199674 - DNA, 25 bp, Artificial
  Probe
tgactgcagcacaggcatctgagca

SEQ ID NO: 199675 - DNA, 25 bp, Artificial
  Probe
gagatcatctgtacgcattaaccac

SEQ ID NO: 199676 - DNA, 25 bp, Artificial
  Probe
atgggaagtcacacccgaattccat

SEQ ID NO: 199677 - DNA, 25 bp, Artificial
  Probe
gcccaccagaaaactcacaaggcag

SEQ ID NO: 199678 - DNA, 25 bp, Artificial
  Probe
cctgtgactgcagcacaggcatctg

SEQ ID NO: 199679 - DNA, 25 bp, Artificial
  Probe
gcctaaggagcctgtgactgcagca

SEQ ID NO: 199680 - DNA, 25 bp, Artificial
  Probe
aacacgacactcatggaaatgttgt

SEQ ID NO: 199681 - DNA, 25 bp, Artificial
  Probe
cacagacaagacatttaccctagtg

SEQ ID NO: 199682 - DNA, 25 bp, Artificial
  Probe
tctgcgagaagtagacagggaagct

SEQ ID NO: 199683 - DNA, 25 bp, Artificial
  Probe
tgggacatcctgacgtcaaacccca

SEQ ID NO: 199684 - DNA, 25 bp, Artificial
  Probe
tgtgactgcagcacaggcatctgag

SEQ ID NO: 199685 - DNA, 25 bp, Artificial
  Probe
acttgtgcagcctaaggagcctgtg

SEQ ID NO: 199686 - DNA, 25 bp, Artificial
  Probe
gtatgacgactatgggaagtcacac

SEQ ID NO: 199687 - DNA, 25 bp, Artificial
  Probe
cccacactcagatagcgagtgctgc

SEQ ID NO: 199688 - DNA, 25 bp, Artificial
  Probe
ttgtaaatcgaacctcgtcgcccac

SEQ ID NO: 199689 - DNA, 25 bp, Artificial
  Probe
agacatttaccctagtgaacagtcc

SEQ ID NO: 199690 - DNA, 25 bp, Artificial
  Probe
taggtattcgagatcatctgtacgc

SEQ ID NO: 199691 - DNA, 25 bp, Artificial
  Probe
atgcacttgtgcagcctaaggagcc

SEQ ID NO: 199692 - DNA, 25 bp, Artificial
  Probe
actcagatagcgagtgctgcagtca

SEQ ID NO: 199693 - DNA, 25 bp, Artificial
  Probe
tgcagcacaggcatctgagcataag

SEQ ID NO: 199694 - DNA, 25 bp, Artificial
  Probe
taaacacgacactcatggaaatgtt

SEQ ID NO: 199695 - DNA, 25 bp, Artificial
  Probe
gtgcagcctaaggagcctgtgactg

SEQ ID NO: 199696 - DNA, 25 bp, Artificial
  Probe
gaacagtcctgttaattccaaagat

SEQ ID NO: 199697 - DNA, 25 bp, Artificial
  Probe
gtacgcattaaccacagacaagaca

SEQ ID NO: 199698 - DNA, 25 bp, Artificial
  Probe
aactcacaaggcagagacggtgaga

SEQ ID NO: 199699 - DNA, 25 bp, Artificial
  Probe
accagaaaactcacaaggcagagac

SEQ ID NO: 199700 - DNA, 25 bp, Artificial
  Probe
gggaagctcagtgacactcagtaga

SEQ ID NO: 199701 - DNA, 25 bp, Artificial
  Probe
tagttgtaaatcgaacctcgtcgcc

SEQ ID NO: 199702 - DNA, 25 bp, Artificial
  Probe
cctaaacacgacactcatggaaatg

SEQ ID NO: 199703 - DNA, 25 bp, Artificial
  Probe
ccatgcaagacgtgggacatcctga

SEQ ID NO: 199704 - DNA, 25 bp, Artificial
  Probe
cagaaaactcacaaggcagagacgg

SEQ ID NO: 199705 - DNA, 25 bp, Artificial
  Probe
ccacactcagatagcgagtgctgca

SEQ ID NO: 199706 - DNA, 25 bp, Artificial
  Probe
cacaaggcagagacggtgagatttc

SEQ ID NO: 199707 - DNA, 25 bp, Artificial
  Probe
gacaagacatttaccctagtgaaca

SEQ ID NO: 199708 - DNA, 25 bp, Artificial
  Probe
aaggagcctgtgactgcagcacagg

SEQ ID NO: 199709 - DNA, 25 bp, Artificial
  Probe
agtatgacgactatgggaagtcaca

SEQ ID NO: 199710 - DNA, 25 bp, Artificial
  Probe
gcaagacgtgggacatcctgacgtc

SEQ ID NO: 199711 - DNA, 25 bp, Artificial
  Probe
ccaccagaaaactcacaaggcagag

SEQ ID NO: 199712 - DNA, 25 bp, Artificial
  Probe
actatgggaagtcacacccgaattc

SEQ ID NO: 199713 - DNA, 25 bp, Artificial
  Probe
tctgtacgcattaaccacagacaag

SEQ ID NO: 199714 - DNA, 25 bp, Artificial
  Probe
ttctttagttgtaaatcgaacctcg

SEQ ID NO: 199715 - DNA, 25 bp, Artificial
  Probe
gttgtaaatcgaacctcgtcgccca

SEQ ID NO: 199716 - DNA, 25 bp, Artificial
  Probe
ctgagcataaggtctgcgagaagta

SEQ ID NO: 199717 - DNA, 25 bp, Artificial
  Probe
tgcctctggcccattgagtgttttc

SEQ ID NO: 199718 - DNA, 25 bp, Artificial
  Probe
gctctgaacctgcctctggcccatt

SEQ ID NO: 199719 - DNA, 25 bp, Artificial
  Probe
tgaacctgcctctggcccattgagt

SEQ ID NO: 199720 - DNA, 25 bp, Artificial
  Probe
gcctctggcccattgagtgttttca

SEQ ID NO: 199721 - DNA, 25 bp, Artificial
  Probe
aacctgcctctggcccattgagtgt

SEQ ID NO: 199722 - DNA, 25 bp, Artificial
  Probe
tttcacatctttgaacaaagagaag

SEQ ID NO: 199723 - DNA, 25 bp, Artificial
  Probe
ttttcacatctttgaacaaagagaa

SEQ ID NO: 199724 - DNA, 25 bp, Artificial
  Probe
acctgcctctggcccattgagtgtt

SEQ ID NO: 199725 - DNA, 25 bp, Artificial
  Probe
agtgttttcacatctttgaacaaag

SEQ ID NO: 199726 - DNA, 25 bp, Artificial
  Probe
attgagtgttttcacatctttgaac

SEQ ID NO: 199727 - DNA, 25 bp, Artificial
  Probe
tgttttcacatctttgaacaaagag

SEQ ID NO: 199728 - DNA, 25 bp, Artificial
  Probe
tctgaacctgcctctggcccattga

SEQ ID NO: 199729 - DNA, 25 bp, Artificial
  Probe
gcccattgagtgttttcacatcttt

SEQ ID NO: 199730 - DNA, 25 bp, Artificial
  Probe
ctctgaacctgcctctggcccattg

SEQ ID NO: 199731 - DNA, 25 bp, Artificial
  Probe
gagtgttttcacatctttgaacaaa

SEQ ID NO: 199732 - DNA, 25 bp, Artificial
  Probe
ctggcccattgagtgttttcacatc

SEQ ID NO: 199733 - DNA, 25 bp, Artificial
  Probe
tctggcccattgagtgttttcacat

SEQ ID NO: 199734 - DNA, 25 bp, Artificial
  Probe
ggctctgaacctgcctctggcccat

SEQ ID NO: 199735 - DNA, 25 bp, Artificial
  Probe
cattgagtgttttcacatctttgaa

SEQ ID NO: 199736 - DNA, 25 bp, Artificial
  Probe
cctgcctctggcccattgagtgttt

SEQ ID NO: 199737 - DNA, 25 bp, Artificial
  Probe
ggcccattgagtgttttcacatctt

SEQ ID NO: 199738 - DNA, 25 bp, Artificial
  Probe
ccattgagtgttttcacatctttga

SEQ ID NO: 199739 - DNA, 25 bp, Artificial
  Probe
tgagtgttttcacatctttgaacaa

SEQ ID NO: 199740 - DNA, 25 bp, Artificial
  Probe
cctctggcccattgagtgttttcac

SEQ ID NO: 199741 - DNA, 25 bp, Artificial
  Probe
ttgagtgttttcacatctttgaaca

SEQ ID NO: 199742 - DNA, 25 bp, Artificial
  Probe
gtgttttcacatctttgaacaaaga

SEQ ID NO: 199743 - DNA, 25 bp, Artificial
  Probe
gttttcacatctttgaacaaagaga

SEQ ID NO: 199744 - DNA, 25 bp, Artificial
  Probe
ctgcctctggcccattgagtgtttt

SEQ ID NO: 199745 - DNA, 25 bp, Artificial
  Probe
ctctggcccattgagtgttttcaca

SEQ ID NO: 199746 - DNA, 25 bp, Artificial
  Probe
tggcccattgagtgttttcacatct

SEQ ID NO: 199747 - DNA, 25 bp, Artificial
  Probe
cccattgagtgttttcacatctttg

SEQ ID NO: 199748 - DNA, 25 bp, Artificial
  Probe
ctgggctgctgagctggccctgttc

SEQ ID NO: 199749 - DNA, 25 bp, Artificial
  Probe
ggatattcacaatgcagccctcctt

SEQ ID NO: 199750 - DNA, 25 bp, Artificial
  Probe
ggctcaacagcctggcacagggcag

SEQ ID NO: 199751 - DNA, 25 bp, Artificial
  Probe
gtggtggtcacagctatttcttcaa

SEQ ID NO: 199752 - DNA, 25 bp, Artificial
  Probe
tctccctttaacagttccccatggg

SEQ ID NO: 199753 - DNA, 25 bp, Artificial
  Probe
gccccacaggaagagaaggctgtgt

SEQ ID NO: 199754 - DNA, 25 bp, Artificial
  Probe
tcaccgaaggactccggttgtcgga

SEQ ID NO: 199755 - DNA, 25 bp, Artificial
  Probe
ggaagcatcaaatcggactggctgg

SEQ ID NO: 199756 - DNA, 25 bp, Artificial
  Probe
ggcctggcctatggatggctcccct

SEQ ID NO: 199757 - DNA, 25 bp, Artificial
  Probe
gttacagcacactcagagtcaacag

SEQ ID NO: 199758 - DNA, 25 bp, Artificial
  Probe
cctggatgcagtcgtggacctgcag

SEQ ID NO: 199759 - DNA, 25 bp, Artificial
  Probe
cttctccttcacctggtgatttcag

SEQ ID NO: 199760 - DNA, 25 bp, Artificial
  Probe
gcacttttactactttagctgtttg

SEQ ID NO: 199761 - DNA, 25 bp, Artificial
  Probe
tccccatgggaaatggcaaaaagta

SEQ ID NO: 199762 - DNA, 25 bp, Artificial
  Probe
ccagagacatctggtgtctccctta

SEQ ID NO: 199763 - DNA, 25 bp, Artificial
  Probe
atgagtactgggtctattctgccag

SEQ ID NO: 199764 - DNA, 25 bp, Artificial
  Probe
tttttgtgcccaaagaaaggtgctg

SEQ ID NO: 199765 - DNA, 25 bp, Artificial
  Probe
cctcctcactttgtgtagaagcaac

SEQ ID NO: 199766 - DNA, 25 bp, Artificial
  Probe
gtttgccctttgctgtttggttcaa

SEQ ID NO: 199767 - DNA, 25 bp, Artificial
  Probe
atcaaatcggactggctgggctgct

SEQ ID NO: 199768 - DNA, 25 bp, Artificial
  Probe
tggaccccggtttcccgaagctcat

SEQ ID NO: 199769 - DNA, 25 bp, Artificial
  Probe
taaaggcaccctttgagtggcaaaa

SEQ ID NO: 199770 - DNA, 25 bp, Artificial
  Probe
tccacacttcaggttctccagcatg

SEQ ID NO: 199771 - DNA, 25 bp, Artificial
  Probe
ggacatcactgcacgatgcatctgg

SEQ ID NO: 199772 - DNA, 25 bp, Artificial
  Probe
agaggataccccaagccactgacca

SEQ ID NO: 199773 - DNA, 25 bp, Artificial
  Probe
ggcttcctgctcagccttcttgctt

SEQ ID NO: 199774 - DNA, 25 bp, Artificial
  Probe
tgctctgtagttaatcagccttctc

SEQ ID NO: 199775 - DNA, 25 bp, Artificial
  Probe
acaagaagacatacatcttttctgg

SEQ ID NO: 199776 - DNA, 25 bp, Artificial
  Probe
tcttcgcagggaatgagtactgggt

SEQ ID NO: 199777 - DNA, 25 bp, Artificial
  Probe
ctggggacaagttctggagatacaa

SEQ ID NO: 199778 - DNA, 25 bp, Artificial
  Probe
tcaaggatcggtttatttggcggac

SEQ ID NO: 199779 - DNA, 25 bp, Artificial
  Probe
tgcccaaagaaaggtgctgaccgta

SEQ ID NO: 199780 - DNA, 25 bp, Artificial
  Probe
tattcacaatgcagccctcctttgg

SEQ ID NO: 199781 - DNA, 25 bp, Artificial
  Probe
ttacctgaagttggagaaccaaagt

SEQ ID NO: 199782 - DNA, 25 bp, Artificial
  Probe
gtacaatcttcactgcacaccgggc

SEQ ID NO: 199783 - DNA, 25 bp, Artificial
  Probe
agaaggctgtgttcttcgcagggaa

SEQ ID NO: 199784 - DNA, 25 bp, Artificial
  Probe
cacactgcatttttctcaccgaagg

SEQ ID NO: 199785 - DNA, 25 bp, Artificial
  Probe
gtgaagaggcctggttaccctgtct

SEQ ID NO: 199786 - DNA, 25 bp, Artificial
  Probe
ccagcactttggaaagaggataccc

SEQ ID NO: 199787 - DNA, 25 bp, Artificial
  Probe
gtagaagcaactccagtcacttcct

SEQ ID NO: 199788 - DNA, 25 bp, Artificial
  Probe
gccctttgctgtttggttcaacctt

SEQ ID NO: 199789 - DNA, 25 bp, Artificial
  Probe
aggagaaccaagtcatcggcttcct

SEQ ID NO: 199790 - DNA, 25 bp, Artificial
  Probe
gcctttaactggagtaagaacaaga

SEQ ID NO: 199791 - DNA, 25 bp, Artificial
  Probe
ttacggctgccctggcacttttact

SEQ ID NO: 199792 - DNA, 25 bp, Artificial
  Probe
cacctggtgatttcagatttaagag

SEQ ID NO: 199793 - DNA, 25 bp, Artificial
  Probe
ggcactggtggctcaacagcctggc

SEQ ID NO: 199794 - DNA, 25 bp, Artificial
  Probe
ggagtgcattttgctctcatgtctc

SEQ ID NO: 199795 - DNA, 25 bp, Artificial
  Probe
ttcacctatggtaggattggatgtc

SEQ ID NO: 199796 - DNA, 25 bp, Artificial
  Probe
cggggccttgcctagcaagcgctct

SEQ ID NO: 199797 - DNA, 25 bp, Artificial
  Probe
ctcaggtctgccatccaggtggctt

SEQ ID NO: 199798 - DNA, 25 bp, Artificial
  Probe
caagtgctggggtcgttactatgac

SEQ ID NO: 199799 - DNA, 25 bp, Artificial
  Probe
cacctatggtaggattggatgtctg

SEQ ID NO: 199800 - DNA, 25 bp, Artificial
  Probe
gaaatgcagtattctgagggccaga

SEQ ID NO: 199801 - DNA, 25 bp, Artificial
  Probe
catccaggtggcttcaagtaatcat

SEQ ID NO: 199802 - DNA, 25 bp, Artificial
  Probe
ttacattggtgctaaggattaaacc

SEQ ID NO: 199803 - DNA, 25 bp, Artificial
  Probe
gattaaaccaggtcctctgaaaaag

SEQ ID NO: 199804 - DNA, 25 bp, Artificial
  Probe
ggatgtctgattgcttactaaactt

SEQ ID NO: 199805 - DNA, 25 bp, Artificial
  Probe
ctttacaggggattgtttcacctat

SEQ ID NO: 199806 - DNA, 25 bp, Artificial
  Probe
aacccggggccttgcctagcaagcg

SEQ ID NO: 199807 - DNA, 25 bp, Artificial
  Probe
caccacactttacaggggattgttt

SEQ ID NO: 199808 - DNA, 25 bp, Artificial
  Probe
tacattggtgctaaggattaaacca

SEQ ID NO: 199809 - DNA, 25 bp, Artificial
  Probe
ttagcaatgcaccacactttacagg

SEQ ID NO: 199810 - DNA, 25 bp, Artificial
  Probe
gagccatctttggttccccaaaaag

SEQ ID NO: 199811 - DNA, 25 bp, Artificial
  Probe
gaacccggggccttgcctagcaagc

SEQ ID NO: 199812 - DNA, 25 bp, Artificial
  Probe
ggccagatggggtcatcagatagct

SEQ ID NO: 199813 - DNA, 25 bp, Artificial
  Probe
cgtgtgctgtgtgtttgcagtattc

SEQ ID NO: 199814 - DNA, 25 bp, Artificial
  Probe
tcatcagatagcttggaactggagt

SEQ ID NO: 199815 - DNA, 25 bp, Artificial
  Probe
ttctgagggccagatggggtcatca

SEQ ID NO: 199816 - DNA, 25 bp, Artificial
  Probe
ccattaaccattgagccatctttgg

SEQ ID NO: 199817 - DNA, 25 bp, Artificial
  Probe
gattctttcaaatgagtttgtggcc

SEQ ID NO: 199818 - DNA, 25 bp, Artificial
  Probe
gtcgttactatgacactatacccag

SEQ ID NO: 199819 - DNA, 25 bp, Artificial
  Probe
gatgtctgattgcttactaaacttt

SEQ ID NO: 199820 - DNA, 25 bp, Artificial
  Probe
acttgctctctggtgtatggttttc

SEQ ID NO: 199821 - DNA, 25 bp, Artificial
  Probe
ctttcaaatgagtttgtggccagag

SEQ ID NO: 199822 - DNA, 25 bp, Artificial
  Probe
attctgagggccagatggggtcatc

SEQ ID NO: 199823 - DNA, 25 bp, Artificial
  Probe
gacactatacccagctcaggtctgc

SEQ ID NO: 199824 - DNA, 25 bp, Artificial
  Probe
cattaaccattgagccatctttggt

SEQ ID NO: 199825 - DNA, 25 bp, Artificial
  Probe
ttacaggggattgtttcacctatgg

SEQ ID NO: 199826 - DNA, 25 bp, Artificial
  Probe
cctctcaagtgctggggtcgttact

SEQ ID NO: 199827 - DNA, 25 bp, Artificial
  Probe
tggggtcatcagatagcttggaact

SEQ ID NO: 199828 - DNA, 25 bp, Artificial
  Probe
ccagctcaggtctgccatccaggtg

SEQ ID NO: 199829 - DNA, 25 bp, Artificial
  Probe
atgcagtattctgagggccagatgg

SEQ ID NO: 199830 - DNA, 25 bp, Artificial
  Probe
gctggggtcgttactatgacactat

SEQ ID NO: 199831 - DNA, 25 bp, Artificial
  Probe
ctgccatccaggtggcttcaagtaa

SEQ ID NO: 199832 - DNA, 25 bp, Artificial
  Probe
tggcttcaagtaatcattgactggg

SEQ ID NO: 199833 - DNA, 25 bp, Artificial
  Probe
gcatttctaaacaatgaatgacttg

SEQ ID NO: 199834 - DNA, 25 bp, Artificial
  Probe
gtggcttcaagtaatcattgactgg

SEQ ID NO: 199835 - DNA, 25 bp, Artificial
  Probe
acaatgaatgacttgctctctggtg

SEQ ID NO: 199836 - DNA, 25 bp, Artificial
  Probe
tccaggtggcttcaagtaatcattg

SEQ ID NO: 199837 - DNA, 25 bp, Artificial
  Probe
aaccattgagccatctttggttccc

SEQ ID NO: 199838 - DNA, 25 bp, Artificial
  Probe
actatacccagctcaggtctgccat

SEQ ID NO: 199839 - DNA, 25 bp, Artificial
  Probe
actatgacactatacccagctcagg

SEQ ID NO: 199840 - DNA, 25 bp, Artificial
  Probe
cgtgtatggctgagctcagtgatgt

SEQ ID NO: 199841 - DNA, 25 bp, Artificial
  Probe
agccaaactctgtccccgtgtgctg

SEQ ID NO: 199842 - DNA, 25 bp, Artificial
  Probe
tctgtccccgtgtgctgtgtgtggc

SEQ ID NO: 199843 - DNA, 25 bp, Artificial
  Probe
gtgtatggctgagctcagtgatgtc

SEQ ID NO: 199844 - DNA, 25 bp, Artificial
  Probe
gtgtgtggctcgtgtatggctgagc

SEQ ID NO: 199845 - DNA, 25 bp, Artificial
  Probe
atggctgagctcagtgatgtctaga

SEQ ID NO: 199846 - DNA, 25 bp, Artificial
  Probe
gctcgtgtatggctgagctcagtga

SEQ ID NO: 199847 - DNA, 25 bp, Artificial
  Probe
gctgagctcagtgatgtctagaggg

SEQ ID NO: 199848 - DNA, 25 bp, Artificial
  Probe
cagtgatgtctagagggccgctaga

SEQ ID NO: 199849 - DNA, 25 bp, Artificial
  Probe
agtgatgtctagagggccgctagag

SEQ ID NO: 199850 - DNA, 25 bp, Artificial
  Probe
gagctcagtgatgtctagagggccg

SEQ ID NO: 199851 - DNA, 25 bp, Artificial
  Probe
agctcagtgatgtctagagggccgc

SEQ ID NO: 199852 - DNA, 25 bp, Artificial
  Probe
accctgaacggagccaaactctgtc

SEQ ID NO: 199853 - DNA, 25 bp, Artificial
  Probe
ctgaacggagccaaactctgtcccc

SEQ ID NO: 199854 - DNA, 25 bp, Artificial
  Probe
gctcagtgatgtctagagggccgct

SEQ ID NO: 199855 - DNA, 25 bp, Artificial
  Probe
gaacggagccaaactctgtccccgt

SEQ ID NO: 199856 - DNA, 25 bp, Artificial
  Probe
ataccctgaacggagccaaactctg

SEQ ID NO: 199857 - DNA, 25 bp, Artificial
  Probe
cggagccaaactctgtccccgtgtg

SEQ ID NO: 199858 - DNA, 25 bp, Artificial
  Probe
tgagctcagtgatgtctagagggcc

SEQ ID NO: 199859 - DNA, 25 bp, Artificial
  Probe
tatggctgagctcagtgatgtctag

SEQ ID NO: 199860 - DNA, 25 bp, Artificial
  Probe
tcgtgtatggctgagctcagtgatg

SEQ ID NO: 199861 - DNA, 25 bp, Artificial
  Probe
taccctgaacggagccaaactctgt

SEQ ID NO: 199862 - DNA, 25 bp, Artificial
  Probe
tgaacggagccaaactctgtccccg

SEQ ID NO: 199863 - DNA, 25 bp, Artificial
  Probe
tggctgagctcagtgatgtctagag

SEQ ID NO: 199864 - DNA, 25 bp, Artificial
  Probe
acggagccaaactctgtccccgtgt

SEQ ID NO: 199865 - DNA, 25 bp, Artificial
  Probe
gtccccgtgtgctgtgtgtggctcg

SEQ ID NO: 199866 - DNA, 25 bp, Artificial
  Probe
ctgtgtgtggctcgtgtatggctga

SEQ ID NO: 199867 - DNA, 25 bp, Artificial
  Probe
tccccgtgtgctgtgtgtggctcgt

SEQ ID NO: 199868 - DNA, 25 bp, Artificial
  Probe
ctcagtgatgtctagagggccgcta

SEQ ID NO: 199869 - DNA, 25 bp, Artificial
  Probe
tgtccccgtgtgctgtgtgtggctc

SEQ ID NO: 199870 - DNA, 25 bp, Artificial
  Probe
tcagtgatgtctagagggccgctag

SEQ ID NO: 199871 - DNA, 25 bp, Artificial
  Probe
actctgtccccgtgtgctgtgtgtg

SEQ ID NO: 199872 - DNA, 25 bp, Artificial
  Probe
tgtatggctgagctcagtgatgtct

SEQ ID NO: 199873 - DNA, 25 bp, Artificial
  Probe
aactctgtccccgtgtgctgtgtgt

SEQ ID NO: 199874 - DNA, 25 bp, Artificial
  Probe
tgtggctcgtgtatggctgagctca

SEQ ID NO: 199875 - DNA, 25 bp, Artificial
  Probe
ctctgtccccgtgtgctgtgtgtgg

SEQ ID NO: 199876 - DNA, 25 bp, Artificial
  Probe
gagccaaactctgtccccgtgtgct

SEQ ID NO: 199877 - DNA, 25 bp, Artificial
  Probe
ctcgtgtatggctgagctcagtgat

SEQ ID NO: 199878 - DNA, 25 bp, Artificial
  Probe
ctgtccccgtgtgctgtgtgtggct

SEQ ID NO: 199879 - DNA, 25 bp, Artificial
  Probe
gtatggctgagctcagtgatgtcta

SEQ ID NO: 199880 - DNA, 25 bp, Artificial
  Probe
ggctgagctcagtgatgtctagagg

SEQ ID NO: 199881 - DNA, 25 bp, Artificial
  Probe
ctgagctcagtgatgtctagagggc

SEQ ID NO: 199882 - DNA, 25 bp, Artificial
  Probe
ggagccaaactctgtccccgtgtgc

SEQ ID NO: 199883 - DNA, 25 bp, Artificial
  Probe
aacggagccaaactctgtccccgtg

SEQ ID NO: 199884 - DNA, 25 bp, Artificial
  Probe
gtggctcgtgtatggctgagctcag

SEQ ID NO: 199885 - DNA, 25 bp, Artificial
  Probe
gccaaactctgtccccgtgtgctgt

SEQ ID NO: 199886 - DNA, 25 bp, Artificial
  Probe
gtgtcccagtgaactgggcctttca

SEQ ID NO: 199887 - DNA, 25 bp, Artificial
  Probe
gtaacagctgcctgcccagagacag

SEQ ID NO: 199888 - DNA, 25 bp, Artificial
  Probe
agagctcaggactaaatgagcttgg

SEQ ID NO: 199889 - DNA, 25 bp, Artificial
  Probe
ctcaggactaaatgagcttggtgtc

SEQ ID NO: 199890 - DNA, 25 bp, Artificial
  Probe
ctgtcctttctgtggcctctgacct

SEQ ID NO: 199891 - DNA, 25 bp, Artificial
  Probe
ctacccagcggctttcctaagggat

SEQ ID NO: 199892 - DNA, 25 bp, Artificial
  Probe
ctctcccatgggattgtgggaacca

SEQ ID NO: 199893 - DNA, 25 bp, Artificial
  Probe
ccccagtgatgtctgggaggactgt

SEQ ID NO: 199894 - DNA, 25 bp, Artificial
  Probe
tctagtaatgcctgtcctttctgtg

SEQ ID NO: 199895 - DNA, 25 bp, Artificial
  Probe
gtactctctctttaggttcttcgct

SEQ ID NO: 199896 - DNA, 25 bp, Artificial
  Probe
ctcccatgggattgtgggaaccagg

SEQ ID NO: 199897 - DNA, 25 bp, Artificial
  Probe
gtggtggtagcacttttcagtttcc

SEQ ID NO: 199898 - DNA, 25 bp, Artificial
  Probe
ccagccagtttctgttgcctagtaa

SEQ ID NO: 199899 - DNA, 25 bp, Artificial
  Probe
gtccccaggatcactcctacttgaa

SEQ ID NO: 199900 - DNA, 25 bp, Artificial
  Probe
ctccagccagtttctgttgcctagt

SEQ ID NO: 199901 - DNA, 25 bp, Artificial
  Probe
tggtccccaggatcactcctacttg

SEQ ID NO: 199902 - DNA, 25 bp, Artificial
  Probe
atgagcttggtgtcccagtgaactg

SEQ ID NO: 199903 - DNA, 25 bp, Artificial
  Probe
aggactaaatgagcttggtgtccca

SEQ ID NO: 199904 - DNA, 25 bp, Artificial
  Probe
gaaatttctagtaatgcctgtcctt

SEQ ID NO: 199905 - DNA, 25 bp, Artificial
  Probe
gtgaactgggcctttcagaactgtg

SEQ ID NO: 199906 - DNA, 25 bp, Artificial
  Probe
atgtctgggaggactgtgcttgcca

SEQ ID NO: 199907 - DNA, 25 bp, Artificial
  Probe
gtttctgttgcctagtaacagctgc

SEQ ID NO: 199908 - DNA, 25 bp, Artificial
  Probe
tctgggaggactgtgcttgccaccc

SEQ ID NO: 199909 - DNA, 25 bp, Artificial
  Probe
ctctctctttaggttcttcgctatg

SEQ ID NO: 199910 - DNA, 25 bp, Artificial
  Probe
tgggttgcctagcaacactgcatcc

SEQ ID NO: 199911 - DNA, 25 bp, Artificial
  Probe
taggttcttcgctatgttcctccct

SEQ ID NO: 199912 - DNA, 25 bp, Artificial
  Probe
ctccccagtgatgtctgggaggact

SEQ ID NO: 199913 - DNA, 25 bp, Artificial
  Probe
gccagtttctgttgcctagtaacag

SEQ ID NO: 199914 - DNA, 25 bp, Artificial
  Probe
tggtgtcccagtgaactgggccttt

SEQ ID NO: 199915 - DNA, 25 bp, Artificial
  Probe
gggctggtccccaggatcactccta

SEQ ID NO: 199916 - DNA, 25 bp, Artificial
  Probe
cctagtaacagctgcctgcccagag

SEQ ID NO: 199917 - DNA, 25 bp, Artificial
  Probe
gcttggtgtcccagtgaactgggcc

SEQ ID NO: 199918 - DNA, 25 bp, Artificial
  Probe
ctctccagccagtttctgttgccta

SEQ ID NO: 199919 - DNA, 25 bp, Artificial
  Probe
gttgcctagcaacactgcatcctct

SEQ ID NO: 199920 - DNA, 25 bp, Artificial
  Probe
ggtagcacttttcagtttcctgttg

SEQ ID NO: 199921 - DNA, 25 bp, Artificial
  Probe
gggaggactgtgcttgccaccctac

SEQ ID NO: 199922 - DNA, 25 bp, Artificial
  Probe
ccagagctcaggactaaatgagctt

SEQ ID NO: 199923 - DNA, 25 bp, Artificial
  Probe
ggatgggttgcctagcaacactgca

SEQ ID NO: 199924 - DNA, 25 bp, Artificial
  Probe
gcctgtcctttctgtggcctctgac

SEQ ID NO: 199925 - DNA, 25 bp, Artificial
  Probe
ctctttaggttcttcgctatgttcc

SEQ ID NO: 199926 - DNA, 25 bp, Artificial
  Probe
ctgtggcctctgacctttccttgtt

SEQ ID NO: 199927 - DNA, 25 bp, Artificial
  Probe
gtcccagtgaactgggcctttcaga

SEQ ID NO: 199928 - DNA, 25 bp, Artificial
  Probe
gtggcctctgacctttccttgttcc

SEQ ID NO: 199929 - DNA, 25 bp, Artificial
  Probe
gcctttcagaactgtggcttcctcc

SEQ ID NO: 199930 - DNA, 25 bp, Artificial
  Probe
ggcctctctcccatgggattgtggg

SEQ ID NO: 199931 - DNA, 25 bp, Artificial
  Probe
gcctctctcccatgggattgtggga

SEQ ID NO: 199932 - DNA, 25 bp, Artificial
  Probe
ctaacccaaacacagaaagacatac

SEQ ID NO: 199933 - DNA, 25 bp, Artificial
  Probe
ttcgtaggcaaatggctggaactgg

SEQ ID NO: 199934 - DNA, 25 bp, Artificial
  Probe
attcgtaggcaaatggctggaactg

SEQ ID NO: 199935 - DNA, 25 bp, Artificial
  Probe
gatcaaaaactcaggggacaacaga

SEQ ID NO: 199936 - DNA, 25 bp, Artificial
  Probe
aaatgttcaacatctttagtcataa

SEQ ID NO: 199937 - DNA, 25 bp, Artificial
  Probe
aattcacagctgaggaatgccgaat

SEQ ID NO: 199938 - DNA, 25 bp, Artificial
  Probe
atctttagtcataagggaaatgcaa

SEQ ID NO: 199939 - DNA, 25 bp, Artificial
  Probe
catctttagtcataagggaaatgca

SEQ ID NO: 199940 - DNA, 25 bp, Artificial
  Probe
gaggaatgccgaatggctgagaaac

SEQ ID NO: 199941 - DNA, 25 bp, Artificial
  Probe
aaaaactcaggggacaacagatgct

SEQ ID NO: 199942 - DNA, 25 bp, Artificial
  Probe
agatcaaaaactcaggggacaacag

SEQ ID NO: 199943 - DNA, 25 bp, Artificial
  Probe
aatgccgaatggctgagaaacacct

SEQ ID NO: 199944 - DNA, 25 bp, Artificial
  Probe
atcaaaaactcaggggacaacagat

SEQ ID NO: 199945 - DNA, 25 bp, Artificial
  Probe
aacatctttagtcataagggaaatg

SEQ ID NO: 199946 - DNA, 25 bp, Artificial
  Probe
cacagctgaggaatgccgaatggct

SEQ ID NO: 199947 - DNA, 25 bp, Artificial
  Probe
atgttcaacatctttagtcataagg

SEQ ID NO: 199948 - DNA, 25 bp, Artificial
  Probe
ggaatgccgaatggctgagaaacac

SEQ ID NO: 199949 - DNA, 25 bp, Artificial
  Probe
tgaggaatgccgaatggctgagaaa

SEQ ID NO: 199950 - DNA, 25 bp, Artificial
  Probe
agctgaggaatgccgaatggctgag

SEQ ID NO: 199951 - DNA, 25 bp, Artificial
  Probe
attcacagctgaggaatgccgaatg

SEQ ID NO: 199952 - DNA, 25 bp, Artificial
  Probe
tcgtaggcaaatggctggaactgga

SEQ ID NO: 199953 - DNA, 25 bp, Artificial
  Probe
tcacagctgaggaatgccgaatggc

SEQ ID NO: 199954 - DNA, 25 bp, Artificial
  Probe
tcaacatctttagtcataagggaaa

SEQ ID NO: 199955 - DNA, 25 bp, Artificial
  Probe
aaactcaggggacaacagatgctgg

SEQ ID NO: 199956 - DNA, 25 bp, Artificial
  Probe
aaaactcaggggacaacagatgctg

SEQ ID NO: 199957 - DNA, 25 bp, Artificial
  Probe
ggacaacagatgctggcgaggatgt

SEQ ID NO: 199958 - DNA, 25 bp, Artificial
  Probe
ctgaggaatgccgaatggctgagaa

SEQ ID NO: 199959 - DNA, 25 bp, Artificial
  Probe
tgttcaacatctttagtcataaggg

SEQ ID NO: 199960 - DNA, 25 bp, Artificial
  Probe
aggaatgccgaatggctgagaaaca

SEQ ID NO: 199961 - DNA, 25 bp, Artificial
  Probe
actcaggggacaacagatgctggcg

SEQ ID NO: 199962 - DNA, 25 bp, Artificial
  Probe
gaattcacagctgaggaatgccgaa

SEQ ID NO: 199963 - DNA, 25 bp, Artificial
  Probe
gttcaacatctttagtcataaggga

SEQ ID NO: 199964 - DNA, 25 bp, Artificial
  Probe
ttcacagctgaggaatgccgaatgg

SEQ ID NO: 199965 - DNA, 25 bp, Artificial
  Probe
cctgagatttcacctcacaccagtg

SEQ ID NO: 199966 - DNA, 25 bp, Artificial
  Probe
aactcaggggacaacagatgctggc

SEQ ID NO: 199967 - DNA, 25 bp, Artificial
  Probe
ttcaacatctttagtcataagggaa

SEQ ID NO: 199968 - DNA, 25 bp, Artificial
  Probe
atgccgaatggctgagaaacaccta

SEQ ID NO: 199969 - DNA, 25 bp, Artificial
  Probe
acatctttagtcataagggaaatgc

SEQ ID NO: 199970 - DNA, 25 bp, Artificial
  Probe
caacatctttagtcataagggaaat

SEQ ID NO: 199971 - DNA, 25 bp, Artificial
  Probe
gggacaacagatgctggcgaggatg

SEQ ID NO: 199972 - DNA, 25 bp, Artificial
  Probe
caggggacaacagatgctggcgagg

SEQ ID NO: 199973 - DNA, 25 bp, Artificial
  Probe
caaaaactcaggggacaacagatgc

SEQ ID NO: 199974 - DNA, 25 bp, Artificial
  Probe
agctaacccaaacacagaaagacat

SEQ ID NO: 199975 - DNA, 25 bp, Artificial
  Probe
cagctgaggaatgccgaatggctga

SEQ ID NO: 199976 - DNA, 25 bp, Artificial
  Probe
aatgttcaacatctttagtcataag

SEQ ID NO: 199977 - DNA, 25 bp, Artificial
  Probe
aaacaaagaattcacagctgaggaa

SEQ ID NO: 199978 - DNA, 25 bp, Artificial
  Probe
agttacagattgaactcctgttcta

SEQ ID NO: 199979 - DNA, 25 bp, Artificial
  Probe
tctcaattgattgttcacagtcagt

SEQ ID NO: 199980 - DNA, 25 bp, Artificial
  Probe
ttgattgttcacagtcagttacaga

SEQ ID NO: 199981 - DNA, 25 bp, Artificial
  Probe
gattgaactcctgttctacactttc

SEQ ID NO: 199982 - DNA, 25 bp, Artificial
  Probe
tacagattgaactcctgttctacac

SEQ ID NO: 199983 - DNA, 25 bp, Artificial
  Probe
gttacagattgaactcctgttctac

SEQ ID NO: 199984 - DNA, 25 bp, Artificial
  Probe
ctcaattgattgttcacagtcagtt

SEQ ID NO: 199985 - DNA, 25 bp, Artificial
  Probe
tgttcacagtcagttacagattgaa

SEQ ID NO: 199986 - DNA, 25 bp, Artificial
  Probe
cacagtcagttacagattgaactcc

SEQ ID NO: 199987 - DNA, 25 bp, Artificial
  Probe
cagattgaactcctgttctacactt

SEQ ID NO: 199988 - DNA, 25 bp, Artificial
  Probe
agattgaactcctgttctacacttt

SEQ ID NO: 199989 - DNA, 25 bp, Artificial
  Probe
ttatctcaattgattgttcacagtc

SEQ ID NO: 199990 - DNA, 25 bp, Artificial
  Probe
atctcaattgattgttcacagtcag

SEQ ID NO: 199991 - DNA, 25 bp, Artificial
  Probe
tgaactcctgttctacactttcccc

SEQ ID NO: 199992 - DNA, 25 bp, Artificial
  Probe
ttgaactcctgttctacactttccc

SEQ ID NO: 199993 - DNA, 25 bp, Artificial
  Probe
tcacagtcagttacagattgaactc

SEQ ID NO: 199994 - DNA, 25 bp, Artificial
  Probe
gttatctcaattgattgttcacagt

SEQ ID NO: 199995 - DNA, 25 bp, Artificial
  Probe
attgaactcctgttctacactttcc

SEQ ID NO: 199996 - DNA, 25 bp, Artificial
  Probe
acagtcagttacagattgaactcct

SEQ ID NO: 199997 - DNA, 25 bp, Artificial
  Probe
acagattgaactcctgttctacact

SEQ ID NO: 199998 - DNA, 25 bp, Artificial
  Probe
ttgttcacagtcagttacagattga

SEQ ID NO: 199999 - DNA, 25 bp, Artificial
  Probe
aattgattgttcacagtcagttaca

SEQ ID NO: 200000 - DNA, 25 bp, Artificial
  Probe
caattgattgttcacagtcagttac

SEQ ID NO: 200001 - DNA, 25 bp, Artificial
  Probe
ttcacagtcagttacagattgaact

SEQ ID NO: 200002 - DNA, 25 bp, Artificial
  Probe
tgagttatctcaattgattgttcac

SEQ ID NO: 200003 - DNA, 25 bp, Artificial
  Probe
attgattgttcacagtcagttacag

SEQ ID NO: 200004 - DNA, 25 bp, Artificial
  Probe
tatctcaattgattgttcacagtca

SEQ ID NO: 200005 - DNA, 25 bp, Artificial
  Probe
gttcacagtcagttacagattgaac

SEQ ID NO: 200006 - DNA, 25 bp, Artificial
  Probe
agttatctcaattgattgttcacag

SEQ ID NO: 200007 - DNA, 25 bp, Artificial
  Probe
tcaattgattgttcacagtcagtta

SEQ ID NO: 200008 - DNA, 25 bp, Artificial
  Probe
ttacagattgaactcctgttctaca

SEQ ID NO: 200009 - DNA, 25 bp, Artificial
  Probe
tgttctacactttccccccttctca

SEQ ID NO: 200010 - DNA, 25 bp, Artificial
  Probe
gagttatctcaattgattgttcaca

SEQ ID NO: 200011 - DNA, 25 bp, Artificial
  Probe
atccaagccgaattcttggcaggat

SEQ ID NO: 200012 - DNA, 25 bp, Artificial
  Probe
ttcttggcaggatatccatcacact

SEQ ID NO: 200013 - DNA, 25 bp, Artificial
  Probe
tccatcacactggcggccgctcgag

SEQ ID NO: 200014 - DNA, 25 bp, Artificial
  Probe
tttagagggcccaattcaccctata

SEQ ID NO: 200015 - DNA, 25 bp, Artificial
  Probe
agccgaattcttggcaggatatcca

SEQ ID NO: 200016 - DNA, 25 bp, Artificial
  Probe
tagagggcccaattcaccctatagt

SEQ ID NO: 200017 - DNA, 25 bp, Artificial
  Probe
caagccgaattcttggcaggatatc

SEQ ID NO: 200018 - DNA, 25 bp, Artificial
  Probe
tccaagccgaattcttggcaggata

SEQ ID NO: 200019 - DNA, 25 bp, Artificial
  Probe
ggatatccatcacactggcggccgc

SEQ ID NO: 200020 - DNA, 25 bp, Artificial
  Probe
gcaggatatccatcacactggcggc

SEQ ID NO: 200021 - DNA, 25 bp, Artificial
  Probe
acacacacacaatccaagccgaatt

SEQ ID NO: 200022 - DNA, 25 bp, Artificial
  Probe
agagggcccaattcaccctatagtg

SEQ ID NO: 200023 - DNA, 25 bp, Artificial
  Probe
acacaatcacacacacacaatccaa

SEQ ID NO: 200024 - DNA, 25 bp, Artificial
  Probe
ccgaattcttggcaggatatccatc

SEQ ID NO: 200025 - DNA, 25 bp, Artificial
  Probe
atccatttagagggcccaattcacc

SEQ ID NO: 200026 - DNA, 25 bp, Artificial
  Probe
attcttggcaggatatccatcacac

SEQ ID NO: 200027 - DNA, 25 bp, Artificial
  Probe
gcttcaatagatgtggaggtgaacc

SEQ ID NO: 200028 - DNA, 25 bp, Artificial
  Probe
ttagagggcccaattcaccctatag

SEQ ID NO: 200029 - DNA, 25 bp, Artificial
  Probe
cttcaatagatgtggaggtgaacca

SEQ ID NO: 200030 - DNA, 25 bp, Artificial
  Probe
actggcggccgctcgagcatccatt

SEQ ID NO: 200031 - DNA, 25 bp, Artificial
  Probe
tcttggcaggatatccatcacactg

SEQ ID NO: 200032 - DNA, 25 bp, Artificial
  Probe
acaatccaagccgaattcttggcag

SEQ ID NO: 200033 - DNA, 25 bp, Artificial
  Probe
cgaattcttggcaggatatccatca

SEQ ID NO: 200034 - DNA, 25 bp, Artificial
  Probe
atttagagggcccaattcaccctat

SEQ ID NO: 200035 - DNA, 25 bp, Artificial
  Probe
tccatttagagggcccaattcaccc

SEQ ID NO: 200036 - DNA, 25 bp, Artificial
  Probe
agcttcaatagatgtggaggtgaac

SEQ ID NO: 200037 - DNA, 25 bp, Artificial
  Probe
ccaagccgaattcttggcaggatat

SEQ ID NO: 200038 - DNA, 25 bp, Artificial
  Probe
aatcacacacacacaatccaagccg

SEQ ID NO: 200039 - DNA, 25 bp, Artificial
  Probe
caggatatccatcacactggcggcc

SEQ ID NO: 200040 - DNA, 25 bp, Artificial
  Probe
catccatttagagggcccaattcac

SEQ ID NO: 200041 - DNA, 25 bp, Artificial
  Probe
ttcaatagatgtggaggtgaaccaa

SEQ ID NO: 200042 - DNA, 25 bp, Artificial
  Probe
atatccatcacactggcggccgctc

SEQ ID NO: 200043 - DNA, 25 bp, Artificial
  Probe
aatccaagccgaattcttggcagga

SEQ ID NO: 200044 - DNA, 25 bp, Artificial
  Probe
caatccaagccgaattcttggcagg

SEQ ID NO: 200045 - DNA, 25 bp, Artificial
  Probe
ggcaggatatccatcacactggcgg

SEQ ID NO: 200046 - DNA, 25 bp, Artificial
  Probe
cactggcggccgctcgagcatccat

SEQ ID NO: 200047 - DNA, 25 bp, Artificial
  Probe
ttggcaggatatccatcacactggc

SEQ ID NO: 200048 - DNA, 25 bp, Artificial
  Probe
aagccgaattcttggcaggatatcc

SEQ ID NO: 200049 - DNA, 25 bp, Artificial
  Probe
aattcttggcaggatatccatcaca

SEQ ID NO: 200050 - DNA, 25 bp, Artificial
  Probe
aggatatccatcacactggcggccg

SEQ ID NO: 200051 - DNA, 25 bp, Artificial
  Probe
tcacacacacacaatccaagccgaa

SEQ ID NO: 200052 - DNA, 25 bp, Artificial
  Probe
gatatccatcacactggcggccgct

SEQ ID NO: 200053 - DNA, 25 bp, Artificial
  Probe
tggcaggatatccatcacactggcg

SEQ ID NO: 200054 - DNA, 25 bp, Artificial
  Probe
cttggcaggatatccatcacactgg

SEQ ID NO: 200055 - DNA, 25 bp, Artificial
  Probe
gaattcttggcaggatatccatcac

SEQ ID NO: 200056 - DNA, 25 bp, Artificial
  Probe
acaatcacacacacacaatccaagc

SEQ ID NO: 200057 - DNA, 25 bp, Artificial
  Probe
aattgatacctcatctttccgagag

SEQ ID NO: 200058 - DNA, 25 bp, Artificial
  Probe
ctggacttatgcattttggaggtac

SEQ ID NO: 200059 - DNA, 25 bp, Artificial
  Probe
actgcatttgggttcttccgatggg

SEQ ID NO: 200060 - DNA, 25 bp, Artificial
  Probe
aggtaactgtttgctgcctgttgtt

SEQ ID NO: 200061 - DNA, 25 bp, Artificial
  Probe
atacctcatctttccgagagttcag

SEQ ID NO: 200062 - DNA, 25 bp, Artificial
  Probe
gcatgtatcttccacactgcttgac

SEQ ID NO: 200063 - DNA, 25 bp, Artificial
  Probe
ttgctgcctgttgttacttgtgtag

SEQ ID NO: 200064 - DNA, 25 bp, Artificial
  Probe
ctctcagagatgcagtgtaaattga

SEQ ID NO: 200065 - DNA, 25 bp, Artificial
  Probe
gtaaaaggctcctcaggcactgact

SEQ ID NO: 200066 - DNA, 25 bp, Artificial
  Probe
attcgttgatcttcgctgtatgaca

SEQ ID NO: 200067 - DNA, 25 bp, Artificial
  Probe
ctgcatgtatcttccacactgcttg

SEQ ID NO: 200068 - DNA, 25 bp, Artificial
  Probe
gaggtactgcatgtatcttccacac

SEQ ID NO: 200069 - DNA, 25 bp, Artificial
  Probe
cattttggaggtactgcatgtatct

SEQ ID NO: 200070 - DNA, 25 bp, Artificial
  Probe
ggatgatccgttctcgtggtgctgc

SEQ ID NO: 200071 - DNA, 25 bp, Artificial
  Probe
agtatgtgaagctgcttttgcactg

SEQ ID NO: 200072 - DNA, 25 bp, Artificial
  Probe
ctgacgcattttgataagtttggct

SEQ ID NO: 200073 - DNA, 25 bp, Artificial
  Probe
gttgatcttcgctgtatgacagtta

SEQ ID NO: 200074 - DNA, 25 bp, Artificial
  Probe
actgactgcatttgggttcttccga

SEQ ID NO: 200075 - DNA, 25 bp, Artificial
  Probe
tttctctgatctgtgtgtttgcacc

SEQ ID NO: 200076 - DNA, 25 bp, Artificial
  Probe
gcttttgcactgacgcattttgata

SEQ ID NO: 200077 - DNA, 25 bp, Artificial
  Probe
agctgcttttgcactgacgcatttt

SEQ ID NO: 200078 - DNA, 25 bp, Artificial
  Probe
ctctctcattcaaggtaactgtttg

SEQ ID NO: 200079 - DNA, 25 bp, Artificial
  Probe
gtaactgtttgctgcctgttgttac

SEQ ID NO: 200080 - DNA, 25 bp, Artificial
  Probe
ggtactgcatgtatcttccacactg

SEQ ID NO: 200081 - DNA, 25 bp, Artificial
  Probe
ttccgagagttcagagcacagggcg

SEQ ID NO: 200082 - DNA, 25 bp, Artificial
  Probe
ctgttgttacttgtgtagcattcta

SEQ ID NO: 200083 - DNA, 25 bp, Artificial
  Probe
gacttatgcattttggaggtactgc

SEQ ID NO: 200084 - DNA, 25 bp, Artificial
  Probe
cttatgcattttggaggtactgcat

SEQ ID NO: 200085 - DNA, 25 bp, Artificial
  Probe
tgcttttgcactgacgcattttgat

SEQ ID NO: 200086 - DNA, 25 bp, Artificial
  Probe
ctcaggcactgactgcatttgggtt

SEQ ID NO: 200087 - DNA, 25 bp, Artificial
  Probe
cttgacattttctctgatctgtgtg

SEQ ID NO: 200088 - DNA, 25 bp, Artificial
  Probe
ctcatctttccgagagttcagagca

SEQ ID NO: 200089 - DNA, 25 bp, Artificial
  Probe
tttggaggtactgcatgtatcttcc

SEQ ID NO: 200090 - DNA, 25 bp, Artificial
  Probe
ttgcactgacgcattttgataagtt

SEQ ID NO: 200091 - DNA, 25 bp, Artificial
  Probe
gggaaacgttttcctctctcattca

SEQ ID NO: 200092 - DNA, 25 bp, Artificial
  Probe
actgcttgacattttctctgatctg

SEQ ID NO: 200093 - DNA, 25 bp, Artificial
  Probe
tcttctaattcgttgatcttcgctg

SEQ ID NO: 200094 - DNA, 25 bp, Artificial
  Probe
ctgctggacttatgcattttggagg

SEQ ID NO: 200095 - DNA, 25 bp, Artificial
  Probe
cttgtgtagcattctagaaaatggc

SEQ ID NO: 200096 - DNA, 25 bp, Artificial
  Probe
ttcaaggtaactgtttgctgcctgt

SEQ ID NO: 200097 - DNA, 25 bp, Artificial
  Probe
gtgtttgcaccaactcattaaaaga

SEQ ID NO: 200098 - DNA, 25 bp, Artificial
  Probe
agttcagagcacagggcggcagtat

SEQ ID NO: 200099 - DNA, 25 bp, Artificial
  Probe
ctgcatttgggttcttccgatgggg

SEQ ID NO: 200100 - DNA, 25 bp, Artificial
  Probe
atggtaaaaggctcctcaggcactg

SEQ ID NO: 200101 - DNA, 25 bp, Artificial
  Probe
cgctaatgacaaccttgactctcag

SEQ ID NO: 200102 - DNA, 25 bp, Artificial
  Probe
tgcagaaatatcttctaattcgttg

SEQ ID NO: 200103 - DNA, 25 bp, Artificial
  Probe
gaaagacctgggtgtactactgggc

SEQ ID NO: 200104 - DNA, 25 bp, Artificial
  Probe
tgggtgtactactgggcaacccctc

SEQ ID NO: 200105 - DNA, 25 bp, Artificial
  Probe
ctgggtgtactactgggcaacccct

SEQ ID NO: 200106 - DNA, 25 bp, Artificial
  Probe
ctccccaaggcataggatatagaag

SEQ ID NO: 200107 - DNA, 25 bp, Artificial
  Probe
atgaggtgtctttcttgtatgccac

SEQ ID NO: 200108 - DNA, 25 bp, Artificial
  Probe
ccacaatgtccatgggagatgaatg

SEQ ID NO: 200109 - DNA, 25 bp, Artificial
  Probe
atgtccatgggagatgaatgtatcc

SEQ ID NO: 200110 - DNA, 25 bp, Artificial
  Probe
tgtctttcttgtatgccactctgcc

SEQ ID NO: 200111 - DNA, 25 bp, Artificial
  Probe
gacctgggtgtactactgggcaacc

SEQ ID NO: 200112 - DNA, 25 bp, Artificial
  Probe
gtgtctttcttgtatgccactctgc

SEQ ID NO: 200113 - DNA, 25 bp, Artificial
  Probe
ttcttgtatgccactctgccctgtg

SEQ ID NO: 200114 - DNA, 25 bp, Artificial
  Probe
cacagattttgctgtacatatggat

SEQ ID NO: 200115 - DNA, 25 bp, Artificial
  Probe
tccacaatgtccatgggagatgaat

SEQ ID NO: 200116 - DNA, 25 bp, Artificial
  Probe
tgtatgccactctgccctgtgtagt

SEQ ID NO: 200117 - DNA, 25 bp, Artificial
  Probe
tgcctctgtgccaggccaggaagtt

SEQ ID NO: 200118 - DNA, 25 bp, Artificial
  Probe
ccagctgctccacaatgtccatggg

SEQ ID NO: 200119 - DNA, 25 bp, Artificial
  Probe
tgctccacaatgtccatgggagatg

SEQ ID NO: 200120 - DNA, 25 bp, Artificial
  Probe
caaccccatgaggtgtctttcttgt

SEQ ID NO: 200121 - DNA, 25 bp, Artificial
  Probe
ggaaccttagtgtatacctcctcac

SEQ ID NO: 200122 - DNA, 25 bp, Artificial
  Probe
agctgctccacaatgtccatgggag

SEQ ID NO: 200123 - DNA, 25 bp, Artificial
  Probe
tattattcagccacgaggtgtcttt

SEQ ID NO: 200124 - DNA, 25 bp, Artificial
  Probe
cagctgggtttgtcctggatgtatg

SEQ ID NO: 200125 - DNA, 25 bp, Artificial
  Probe
ctgttctgtttctgttggtgataca

SEQ ID NO: 200126 - DNA, 25 bp, Artificial
  Probe
ttattcagccacgaggtgtcttttt

SEQ ID NO: 200127 - DNA, 25 bp, Artificial
  Probe
tccacagattttgctgtacatatgg

SEQ ID NO: 200128 - DNA, 25 bp, Artificial
  Probe
gcagctgggtttgtcctggatgtat

SEQ ID NO: 200129 - DNA, 25 bp, Artificial
  Probe
tgttcttggccatcacccagctgct

SEQ ID NO: 200130 - DNA, 25 bp, Artificial
  Probe
gtctttcttgtatgccactctgccc

SEQ ID NO: 200131 - DNA, 25 bp, Artificial
  Probe
actctgccctgtgtagtctcactac

SEQ ID NO: 200132 - DNA, 25 bp, Artificial
  Probe
ctccacaatgtccatgggagatgaa

SEQ ID NO: 200133 - DNA, 25 bp, Artificial
  Probe
ccacagattttgctgtacatatgga

SEQ ID NO: 200134 - DNA, 25 bp, Artificial
  Probe
ccatgaggtgtctttcttgtatgcc

SEQ ID NO: 200135 - DNA, 25 bp, Artificial
  Probe
tctccccaaggcataggatatagaa

SEQ ID NO: 200136 - DNA, 25 bp, Artificial
  Probe
cccatgaggtgtctttcttgtatgc

SEQ ID NO: 200137 - DNA, 25 bp, Artificial
  Probe
cactctgccctgtgtagtctcacta

SEQ ID NO: 200138 - DNA, 25 bp, Artificial
  Probe
aagacctgggtgtactactgggcaa

SEQ ID NO: 200139 - DNA, 25 bp, Artificial
  Probe
ccccatgaggtgtctttcttgtatg

SEQ ID NO: 200140 - DNA, 25 bp, Artificial
  Probe
atccacagattttgctgtacatatg

SEQ ID NO: 200141 - DNA, 25 bp, Artificial
  Probe
aggtgtctttcttgtatgccactct

SEQ ID NO: 200142 - DNA, 25 bp, Artificial
  Probe
cagctgctccacaatgtccatggga

SEQ ID NO: 200143 - DNA, 25 bp, Artificial
  Probe
ccccaaggcataggatatagaaggc

SEQ ID NO: 200144 - DNA, 25 bp, Artificial
  Probe
gaggtgtctttcttgtatgccactc

SEQ ID NO: 200145 - DNA, 25 bp, Artificial
  Probe
ctgctccacaatgtccatgggagat

SEQ ID NO: 200146 - DNA, 25 bp, Artificial
  Probe
catgaggtgtctttcttgtatgcca

SEQ ID NO: 200147 - DNA, 25 bp, Artificial
  Probe
cttgtatgccactctgccctgtgta

SEQ ID NO: 200148 - DNA, 25 bp, Artificial
  Probe
attattcagccacgaggtgtctttt

SEQ ID NO: 200149 - DNA, 25 bp, Artificial
  Probe
gtacaatcatgagtccaacatttga

SEQ ID NO: 200150 - DNA, 25 bp, Artificial
  Probe
atttgacacgtctgtcaactttaga

SEQ ID NO: 200151 - DNA, 25 bp, Artificial
  Probe
cagtccaagcagtaactatgttctt

SEQ ID NO: 200152 - DNA, 25 bp, Artificial
  Probe
ctttagatgtcacttctggtgatat

SEQ ID NO: 200153 - DNA, 25 bp, Artificial
  Probe
actaagctagccagcctcaaacgag

SEQ ID NO: 200154 - DNA, 25 bp, Artificial
  Probe
ctgtcaactttagatgtcacttctg

SEQ ID NO: 200155 - DNA, 25 bp, Artificial
  Probe
tcaactttagatgtcacttctggtg

SEQ ID NO: 200156 - DNA, 25 bp, Artificial
  Probe
tgtacaatcatgagtccaacatttg

SEQ ID NO: 200157 - DNA, 25 bp, Artificial
  Probe
tgagtccaacatttgacacgtctgt

SEQ ID NO: 200158 - DNA, 25 bp, Artificial
  Probe
agtcccaaccgcagtccaagcagta

SEQ ID NO: 200159 - DNA, 25 bp, Artificial
  Probe
ctttactttcacaggccctaaagag

SEQ ID NO: 200160 - DNA, 25 bp, Artificial
  Probe
ttgtagactaagctagccagcctca

SEQ ID NO: 200161 - DNA, 25 bp, Artificial
  Probe
gtccaacatttgacacgtctgtcaa

SEQ ID NO: 200162 - DNA, 25 bp, Artificial
  Probe
tgtgtacaatcatgagtccaacatt

SEQ ID NO: 200163 - DNA, 25 bp, Artificial
  Probe
tccgggactgaagctagagaaaagg

SEQ ID NO: 200164 - DNA, 25 bp, Artificial
  Probe
gcagtccaagcagtaactatgttct

SEQ ID NO: 200165 - DNA, 25 bp, Artificial
  Probe
tgactagtcccaaccgcagtccaag

SEQ ID NO: 200166 - DNA, 25 bp, Artificial
  Probe
acacgtctgtcaactttagatgtca

SEQ ID NO: 200167 - DNA, 25 bp, Artificial
  Probe
catttgacacgtctgtcaactttag

SEQ ID NO: 200168 - DNA, 25 bp, Artificial
  Probe
ttgacacgtctgtcaactttagatg

SEQ ID NO: 200169 - DNA, 25 bp, Artificial
  Probe
gtgtacaatcatgagtccaacattt

SEQ ID NO: 200170 - DNA, 25 bp, Artificial
  Probe
agttttgtagactaagctagccagc

SEQ ID NO: 200171 - DNA, 25 bp, Artificial
  Probe
tgattgtgtacaatcatgagtccaa

SEQ ID NO: 200172 - DNA, 25 bp, Artificial
  Probe
agtccaacatttgacacgtctgtca

SEQ ID NO: 200173 - DNA, 25 bp, Artificial
  Probe
tcatgagtccaacatttgacacgtc

SEQ ID NO: 200174 - DNA, 25 bp, Artificial
  Probe
tttgtagactaagctagccagcctc

SEQ ID NO: 200175 - DNA, 25 bp, Artificial
  Probe
atgagtccaacatttgacacgtctg

SEQ ID NO: 200176 - DNA, 25 bp, Artificial
  Probe
acgtctgtcaactttagatgtcact

SEQ ID NO: 200177 - DNA, 25 bp, Artificial
  Probe
tgtagactaagctagccagcctcaa

SEQ ID NO: 200178 - DNA, 25 bp, Artificial
  Probe
cgtctgtcaactttagatgtcactt

SEQ ID NO: 200179 - DNA, 25 bp, Artificial
  Probe
agtccaagcagtaactatgttcttt

SEQ ID NO: 200180 - DNA, 25 bp, Artificial
  Probe
caaccgcagtccaagcagtaactat

SEQ ID NO: 200181 - DNA, 25 bp, Artificial
  Probe
ccaaccgcagtccaagcagtaacta

SEQ ID NO: 200182 - DNA, 25 bp, Artificial
  Probe
gtcccaaccgcagtccaagcagtaa

SEQ ID NO: 200183 - DNA, 25 bp, Artificial
  Probe
gtctgtcaactttagatgtcacttc

SEQ ID NO: 200184 - DNA, 25 bp, Artificial
  Probe
attgtgtacaatcatgagtccaaca

SEQ ID NO: 200185 - DNA, 25 bp, Artificial
  Probe
atcatgagtccaacatttgacacgt

SEQ ID NO: 200186 - DNA, 25 bp, Artificial
  Probe
aatcatgagtccaacatttgacacg

SEQ ID NO: 200187 - DNA, 25 bp, Artificial
  Probe
ccgcagtccaagcagtaactatgtt

SEQ ID NO: 200188 - DNA, 25 bp, Artificial
  Probe
gtcaactttagatgtcacttctggt

SEQ ID NO: 200189 - DNA, 25 bp, Artificial
  Probe
tgacacgtctgtcaactttagatgt

SEQ ID NO: 200190 - DNA, 25 bp, Artificial
  Probe
gtgactagtcccaaccgcagtccaa

SEQ ID NO: 200191 - DNA, 25 bp, Artificial
  Probe
agctagccagcctcaaacgagaacc

SEQ ID NO: 200192 - DNA, 25 bp, Artificial
  Probe
gtagactaagctagccagcctcaaa

SEQ ID NO: 200193 - DNA, 25 bp, Artificial
  Probe
aactttagatgtcacttctggtgat

SEQ ID NO: 200194 - DNA, 25 bp, Artificial
  Probe
gtccaagcagtaactatgttcttta

SEQ ID NO: 200195 - DNA, 25 bp, Artificial
  Probe
ggattgtcctatgtgtctttgcttc

SEQ ID NO: 200196 - DNA, 25 bp, Artificial
  Probe
ggggtcgctcagctcctcctaactg

SEQ ID NO: 200197 - DNA, 25 bp, Artificial
  Probe
ttaagtctcctaggtggtgacgggt

SEQ ID NO: 200198 - DNA, 25 bp, Artificial
  Probe
taaacatggtagctgccaagaagga

SEQ ID NO: 200199 - DNA, 25 bp, Artificial
  Probe
atgtgtctttgcttctgtgctgctg

SEQ ID NO: 200200 - DNA, 25 bp, Artificial
  Probe
tggctaggccccaggataggtacct

SEQ ID NO: 200201 - DNA, 25 bp, Artificial
  Probe
aagagcactacaagttgtgtgtaca

SEQ ID NO: 200202 - DNA, 25 bp, Artificial
  Probe
tgacttgtctcacagccatgcaacc

SEQ ID NO: 200203 - DNA, 25 bp, Artificial
  Probe
ccttgcctcctgtgctgacttagca

SEQ ID NO: 200204 - DNA, 25 bp, Artificial
  Probe
cctccctggcagtggcacaactgga

SEQ ID NO: 200205 - DNA, 25 bp, Artificial
  Probe
gctgacatgacctccctggcagtgg

SEQ ID NO: 200206 - DNA, 25 bp, Artificial
  Probe
ttttggaggcccatatgtccattca

SEQ ID NO: 200207 - DNA, 25 bp, Artificial
  Probe
tttggggaccccatagagcactgca

SEQ ID NO: 200208 - DNA, 25 bp, Artificial
  Probe
agagcactgcactgactgagggatg

SEQ ID NO: 200209 - DNA, 25 bp, Artificial
  Probe
tgtaggttttggaggcccatatgtc

SEQ ID NO: 200210 - DNA, 25 bp, Artificial
  Probe
acatgacctccctggcagtggcaca

SEQ ID NO: 200211 - DNA, 25 bp, Artificial
  Probe
ctgcactgactgagggatggtaaca

SEQ ID NO: 200212 - DNA, 25 bp, Artificial
  Probe
ctgtgctgacatgacctccctggca

SEQ ID NO: 200213 - DNA, 25 bp, Artificial
  Probe
ctgtgctgacttagcaggggataaa

SEQ ID NO: 200214 - DNA, 25 bp, Artificial
  Probe
tctttgcttctgtgctgctgatgct

SEQ ID NO: 200215 - DNA, 25 bp, Artificial
  Probe
caagttgtgtgtacatgcgtgcatg

SEQ ID NO: 200216 - DNA, 25 bp, Artificial
  Probe
aacccttgcctcctgtgctgactta

SEQ ID NO: 200217 - DNA, 25 bp, Artificial
  Probe
tagctgccaagaaggagtgagaatc

SEQ ID NO: 200218 - DNA, 25 bp, Artificial
  Probe
gagaatccttccttaagtctcctag

SEQ ID NO: 200219 - DNA, 25 bp, Artificial
  Probe
gtcctatgtgtctttgcttctgtgc

SEQ ID NO: 200220 - DNA, 25 bp, Artificial
  Probe
ggagtgagaatccttccttaagtct

SEQ ID NO: 200221 - DNA, 25 bp, Artificial
  Probe
tacatgcgtgcatgtgcatatgtgg

SEQ ID NO: 200222 - DNA, 25 bp, Artificial
  Probe
tgctctgccctgtgctgacatgacc

SEQ ID NO: 200223 - DNA, 25 bp, Artificial
  Probe
gtgagaatccttccttaagtctcct

SEQ ID NO: 200224 - DNA, 25 bp, Artificial
  Probe
ggccccaggataggtacctatttgg

SEQ ID NO: 200225 - DNA, 25 bp, Artificial
  Probe
acaagttgtgtgtacatgcgtgcat

SEQ ID NO: 200226 - DNA, 25 bp, Artificial
  Probe
agcactgcactgactgagggatggt

SEQ ID NO: 200227 - DNA, 25 bp, Artificial
  Probe
tcagctcctcctaactggattgtcc

SEQ ID NO: 200228 - DNA, 25 bp, Artificial
  Probe
aacctttgaaagagcactacaagtt

SEQ ID NO: 200229 - DNA, 25 bp, Artificial
  Probe
acctatttggggaccccatagagca

SEQ ID NO: 200230 - DNA, 25 bp, Artificial
  Probe
ctatgtgtctttgcttctgtgctgc

SEQ ID NO: 200231 - DNA, 25 bp, Artificial
  Probe
agctgccaagaaggagtgagaatcc

SEQ ID NO: 200232 - DNA, 25 bp, Artificial
  Probe
gagcactacaagttgtgtgtacatg

SEQ ID NO: 200233 - DNA, 25 bp, Artificial
  Probe
ctttgaaagagcactacaagttgtg

SEQ ID NO: 200234 - DNA, 25 bp, Artificial
  Probe
ttcatgaccagtgacttgtctcaca

SEQ ID NO: 200235 - DNA, 25 bp, Artificial
  Probe
gacctccctggcagtggcacaactg

SEQ ID NO: 200236 - DNA, 25 bp, Artificial
  Probe
gctctgccctgtgctgacatgacct

SEQ ID NO: 200237 - DNA, 25 bp, Artificial
  Probe
catgaccagtgacttgtctcacagc

SEQ ID NO: 200238 - DNA, 25 bp, Artificial
  Probe
tatgtccattcatgaccagtgactt

SEQ ID NO: 200239 - DNA, 25 bp, Artificial
  Probe
cctatgtgtctttgcttctgtgctg

SEQ ID NO: 200240 - DNA, 25 bp, Artificial
  Probe
ggtcgctcagctcctcctaactgga

SEQ ID NO: 200241 - DNA, 25 bp, Artificial
  Probe
cagggcttctttagcttttattctg

SEQ ID NO: 200242 - DNA, 25 bp, Artificial
  Probe
actggatactgtcaagaggtaattc

SEQ ID NO: 200243 - DNA, 25 bp, Artificial
  Probe
gcccctttgctatttgcagacctta

SEQ ID NO: 200244 - DNA, 25 bp, Artificial
  Probe
agaataagtccacaatctttgtaag

SEQ ID NO: 200245 - DNA, 25 bp, Artificial
  Probe
attcgccctggctatgccagggctc

SEQ ID NO: 200246 - DNA, 25 bp, Artificial
  Probe
ctttagcttttattctgtgaacaga

SEQ ID NO: 200247 - DNA, 25 bp, Artificial
  Probe
tttcctgttatgatacatttgcacg

SEQ ID NO: 200248 - DNA, 25 bp, Artificial
  Probe
ggctgatgtggcaccttgaaaatag

SEQ ID NO: 200249 - DNA, 25 bp, Artificial
  Probe
cccctgcgcagaacacgaggatggg

SEQ ID NO: 200250 - DNA, 25 bp, Artificial
  Probe
gaataagtccacaatctttgtaaga

SEQ ID NO: 200251 - DNA, 25 bp, Artificial
  Probe
atttgcacgtacagccctgaatgca

SEQ ID NO: 200252 - DNA, 25 bp, Artificial
  Probe
tttgggtaagccagggcttctttag

SEQ ID NO: 200253 - DNA, 25 bp, Artificial
  Probe
tgctatgtcccctgcgcagaacacg

SEQ ID NO: 200254 - DNA, 25 bp, Artificial
  Probe
gctcgttcctttcctgttatgatac

SEQ ID NO: 200255 - DNA, 25 bp, Artificial
  Probe
agggctccggccatcagaacagtgc

SEQ ID NO: 200256 - DNA, 25 bp, Artificial
  Probe
aaagtgcatctcagcactgcttaga

SEQ ID NO: 200257 - DNA, 25 bp, Artificial
  Probe
tggatgcactgctaagcggcgcaga

SEQ ID NO: 200258 - DNA, 25 bp, Artificial
  Probe
gaagaaagcccactggctcgttcct

SEQ ID NO: 200259 - DNA, 25 bp, Artificial
  Probe
gttttcttagccagtgggcaaagtg

SEQ ID NO: 200260 - DNA, 25 bp, Artificial
  Probe
acccacaggcataagaaaagtgcat

SEQ ID NO: 200261 - DNA, 25 bp, Artificial
  Probe
tccttcactgggacgcactggatac

SEQ ID NO: 200262 - DNA, 25 bp, Artificial
  Probe
ccagggcagttctgggaggttctct

SEQ ID NO: 200263 - DNA, 25 bp, Artificial
  Probe
tcaagaggtaattcgccctggctat

SEQ ID NO: 200264 - DNA, 25 bp, Artificial
  Probe
cccacgctctgctgactgcagtgtg

SEQ ID NO: 200265 - DNA, 25 bp, Artificial
  Probe
cctgaatgcaggtgcagttttggtt

SEQ ID NO: 200266 - DNA, 25 bp, Artificial
  Probe
tctttagcttttattctgtgaacag

SEQ ID NO: 200267 - DNA, 25 bp, Artificial
  Probe
gaaggtgtgcaccacgacacacgca

SEQ ID NO: 200268 - DNA, 25 bp, Artificial
  Probe
cacgtacagccctgaatgcaggtgc

SEQ ID NO: 200269 - DNA, 25 bp, Artificial
  Probe
ctgatgtggcaccttgaaaatagaa

SEQ ID NO: 200270 - DNA, 25 bp, Artificial
  Probe
tgtcccctgcgcagaacacgaggat

SEQ ID NO: 200271 - DNA, 25 bp, Artificial
  Probe
ttttatgcccctttgctatttgcag

SEQ ID NO: 200272 - DNA, 25 bp, Artificial
  Probe
ggtaattcgccctggctatgccagg

SEQ ID NO: 200273 - DNA, 25 bp, Artificial
  Probe
ttttcttagccagtgggcaaagtga

SEQ ID NO: 200274 - DNA, 25 bp, Artificial
  Probe
tactgtcaagaggtaattcgccctg

SEQ ID NO: 200275 - DNA, 25 bp, Artificial
  Probe
cacccacaggcataagaaaagtgca

SEQ ID NO: 200276 - DNA, 25 bp, Artificial
  Probe
agatgtgactcctgtgctgtgggaa

SEQ ID NO: 200277 - DNA, 25 bp, Artificial
  Probe
cttttattctgtgaacagatgtgac

SEQ ID NO: 200278 - DNA, 25 bp, Artificial
  Probe
agtgcatttggtggtttcgttctct

SEQ ID NO: 200279 - DNA, 25 bp, Artificial
  Probe
ttgctaatgctgctttgcaaataaa

SEQ ID NO: 200280 - DNA, 25 bp, Artificial
  Probe
aggtgtgcaccacgacacacgcagc

SEQ ID NO: 200281 - DNA, 25 bp, Artificial
  Probe
taattttgggtaagccagggcttct

SEQ ID NO: 200282 - DNA, 25 bp, Artificial
  Probe
catgccgaggagtcgccatttagct

SEQ ID NO: 200283 - DNA, 25 bp, Artificial
  Probe
ccactggctcgttcctttcctgtta

SEQ ID NO: 200284 - DNA, 25 bp, Artificial
  Probe
ttgccgagcctgtgctcctgtgggt

SEQ ID NO: 200285 - DNA, 25 bp, Artificial
  Probe
ctgtccatgccgaggagtcgccatt

SEQ ID NO: 200286 - DNA, 25 bp, Artificial
  Probe
cgcagccctgccagggcagttctgg

SEQ ID NO: 200287 - DNA, 25 bp, Artificial
  Probe
ctttgcccatggtggcaatgacgtc

SEQ ID NO: 200288 - DNA, 25 bp, Artificial
  Probe
caatgacgtcagcaatgccatcggc

SEQ ID NO: 200289 - DNA, 25 bp, Artificial
  Probe
ctccgatccaagaaggctgttgact

SEQ ID NO: 200290 - DNA, 25 bp, Artificial
  Probe
tcaggataagcctgaagtgtccctt

SEQ ID NO: 200291 - DNA, 25 bp, Artificial
  Probe
ttttatggcctggtttgtcaccgtc

SEQ ID NO: 200292 - DNA, 25 bp, Artificial
  Probe
tgccatcggccctctggttgctttg

SEQ ID NO: 200293 - DNA, 25 bp, Artificial
  Probe
catatggcttctgctttatggtggt

SEQ ID NO: 200294 - DNA, 25 bp, Artificial
  Probe
tgtgtcagtgtctgggaccatcgca

SEQ ID NO: 200295 - DNA, 25 bp, Artificial
  Probe
ctgttggctggctccgatccaagaa

SEQ ID NO: 200296 - DNA, 25 bp, Artificial
  Probe
ggctctcttgaagaatggtatgatc

SEQ ID NO: 200297 - DNA, 25 bp, Artificial
  Probe
ctctcttgaagaatggtatgatcag

SEQ ID NO: 200298 - DNA, 25 bp, Artificial
  Probe
ccagtttctgcagatccttacagcc

SEQ ID NO: 200299 - DNA, 25 bp, Artificial
  Probe
tgacgtcagcaatgccatcggccct

SEQ ID NO: 200300 - DNA, 25 bp, Artificial
  Probe
tgttgactggcgactgtttcgaaac

SEQ ID NO: 200301 - DNA, 25 bp, Artificial
  Probe
atccaagaaggctgttgactggcga

SEQ ID NO: 200302 - DNA, 25 bp, Artificial
  Probe
agagatgtcactacaaaagaggcaa

SEQ ID NO: 200303 - DNA, 25 bp, Artificial
  Probe
tgtcactacaaaagaggcaacaccc

SEQ ID NO: 200304 - DNA, 25 bp, Artificial
  Probe
gtgtctgttggctggctccgatcca

SEQ ID NO: 200305 - DNA, 25 bp, Artificial
  Probe
cagtgtctgggaccatcgcacacac

SEQ ID NO: 200306 - DNA, 25 bp, Artificial
  Probe
cagtgttcaagcacatcattctgcc

SEQ ID NO: 200307 - DNA, 25 bp, Artificial
  Probe
gcccatggtggcaatgacgtcagca

SEQ ID NO: 200308 - DNA, 25 bp, Artificial
  Probe
tctgtggtgtctgttggctggctcc

SEQ ID NO: 200309 - DNA, 25 bp, Artificial
  Probe
gaggcaacacccatatggcttctgc

SEQ ID NO: 200310 - DNA, 25 bp, Artificial
  Probe
tggtggcaatgacgtcagcaatgcc

SEQ ID NO: 200311 - DNA, 25 bp, Artificial
  Probe
gtgctgctatcatggcagtgttcaa

SEQ ID NO: 200312 - DNA, 25 bp, Artificial
  Probe
caagaaggctgttgactggcgactg

SEQ ID NO: 200313 - DNA, 25 bp, Artificial
  Probe
tctggggttatcagtgctgctatca

SEQ ID NO: 200314 - DNA, 25 bp, Artificial
  Probe
tggctggctccgatccaagaaggct

SEQ ID NO: 200315 - DNA, 25 bp, Artificial
  Probe
gccctctggttgctttgtatcttgt

SEQ ID NO: 200316 - DNA, 25 bp, Artificial
  Probe
agcacatcattctgccggtgtgaag

SEQ ID NO: 200317 - DNA, 25 bp, Artificial
  Probe
cagtggctctcttgaagaatggtat

SEQ ID NO: 200318 - DNA, 25 bp, Artificial
  Probe
cacccatatggcttctgctttatgg

SEQ ID NO: 200319 - DNA, 25 bp, Artificial
  Probe
ctatttctggggttatcagtgctgc

SEQ ID NO: 200320 - DNA, 25 bp, Artificial
  Probe
tacaaaagaggcaacacccatatgg

SEQ ID NO: 200321 - DNA, 25 bp, Artificial
  Probe
tcactgtggtcgtcgcatcaaacat

SEQ ID NO: 200322 - DNA, 25 bp, Artificial
  Probe
catggcagtgttcaagcacatcatt

SEQ ID NO: 200323 - DNA, 25 bp, Artificial
  Probe
ctcagaattgtgtcagtgtctggga

SEQ ID NO: 200324 - DNA, 25 bp, Artificial
  Probe
ctctgtggtgtctgttggctggctc

SEQ ID NO: 200325 - DNA, 25 bp, Artificial
  Probe
atctgccttcactgtggtcgtcgca

SEQ ID NO: 200326 - DNA, 25 bp, Artificial
  Probe
ttccagtttctgcagatccttacag

SEQ ID NO: 200327 - DNA, 25 bp, Artificial
  Probe
gtcccttctcttccagtttctgcag

SEQ ID NO: 200328 - DNA, 25 bp, Artificial
  Probe
ggtttgtcaccgtccctatttctgg

SEQ ID NO: 200329 - DNA, 25 bp, Artificial
  Probe
cgtccctatttctggggttatcagt

SEQ ID NO: 200330 - DNA, 25 bp, Artificial
  Probe
tgtcaccgtccctatttctggggtt

SEQ ID NO: 200331 - DNA, 25 bp, Artificial
  Probe
gtcgcatcaaacattggccttccca

SEQ ID NO: 200332 - DNA, 25 bp, Artificial
  Probe
gtttcgaaacatttttatggcctgg

SEQ ID NO: 200333 - DNA, 25 bp, Artificial
  Probe
ctgggctctgactgcgctacagcgg

SEQ ID NO: 200334 - DNA, 25 bp, Artificial
  Probe
ggataaggcgggaccctgagattta

SEQ ID NO: 200335 - DNA, 25 bp, Artificial
  Probe
gcaccctcttgctagtccctagatg

SEQ ID NO: 200336 - DNA, 25 bp, Artificial
  Probe
accctcttgctagtccctagatggg

SEQ ID NO: 200337 - DNA, 25 bp, Artificial
  Probe
aaagttgaagccacgtgatctcagc

SEQ ID NO: 200338 - DNA, 25 bp, Artificial
  Probe
agttgaagccacgtgatctcagccc

SEQ ID NO: 200339 - DNA, 25 bp, Artificial
  Probe
gggacaccgcttactttccctctgg

SEQ ID NO: 200340 - DNA, 25 bp, Artificial
  Probe
ttccagtccagtgctactgtgcctg

SEQ ID NO: 200341 - DNA, 25 bp, Artificial
  Probe
accctgagatttagagctggcggtg

SEQ ID NO: 200342 - DNA, 25 bp, Artificial
  Probe
tgctgggctctgactgcgctacagc

SEQ ID NO: 200343 - DNA, 25 bp, Artificial
  Probe
ccatccagttaaaaggaggtgctgg

SEQ ID NO: 200344 - DNA, 25 bp, Artificial
  Probe
cagtccagtgctactgtgcctgggc

SEQ ID NO: 200345 - DNA, 25 bp, Artificial
  Probe
tcagttcggacatcaggtatgtgag

SEQ ID NO: 200346 - DNA, 25 bp, Artificial
  Probe
catccagttaaaaggaggtgctggg

SEQ ID NO: 200347 - DNA, 25 bp, Artificial
  Probe
tgaagccacgtgatctcagccccat

SEQ ID NO: 200348 - DNA, 25 bp, Artificial
  Probe
cagttcggacatcaggtatgtgaga

SEQ ID NO: 200349 - DNA, 25 bp, Artificial
  Probe
gacaccgcttactttccctctggta

SEQ ID NO: 200350 - DNA, 25 bp, Artificial
  Probe
tagccttgggctccaggcttccagg

SEQ ID NO: 200351 - DNA, 25 bp, Artificial
  Probe
gttgaagccacgtgatctcagcccc

SEQ ID NO: 200352 - DNA, 25 bp, Artificial
  Probe
cagttaaaaggaggtgctgggctct

SEQ ID NO: 200353 - DNA, 25 bp, Artificial
  Probe
tagaagccggataaggcgggaccct

SEQ ID NO: 200354 - DNA, 25 bp, Artificial
  Probe
cccatccagttaaaaggaggtgctg

SEQ ID NO: 200355 - DNA, 25 bp, Artificial
  Probe
ttcggacatcaggtatgtgagacgg

SEQ ID NO: 200356 - DNA, 25 bp, Artificial
  Probe
tccagtgctactgtgcctgggctag

SEQ ID NO: 200357 - DNA, 25 bp, Artificial
  Probe
cctgggctagctagaccagaccggc

SEQ ID NO: 200358 - DNA, 25 bp, Artificial
  Probe
tactttccctctggtactacagctg

SEQ ID NO: 200359 - DNA, 25 bp, Artificial
  Probe
gaccctgagatttagagctggcggt

SEQ ID NO: 200360 - DNA, 25 bp, Artificial
  Probe
agccttgggctccaggcttccaggg

SEQ ID NO: 200361 - DNA, 25 bp, Artificial
  Probe
ccagtgctactgtgcctgggctagc

SEQ ID NO: 200362 - DNA, 25 bp, Artificial
  Probe
cttccagtccagtgctactgtgcct

SEQ ID NO: 200363 - DNA, 25 bp, Artificial
  Probe
gtagccttgggctccaggcttccag

SEQ ID NO: 200364 - DNA, 25 bp, Artificial
  Probe
tgcctgggctagctagaccagaccg

SEQ ID NO: 200365 - DNA, 25 bp, Artificial
  Probe
gtccagtgctactgtgcctgggcta

SEQ ID NO: 200366 - DNA, 25 bp, Artificial
  Probe
aaggcgggaccctgagatttagagc

SEQ ID NO: 200367 - DNA, 25 bp, Artificial
  Probe
ttaaaaggaggtgctgggctctgac

SEQ ID NO: 200368 - DNA, 25 bp, Artificial
  Probe
ctctgactgcgctacagcggatttt

SEQ ID NO: 200369 - DNA, 25 bp, Artificial
  Probe
gtgctgggctctgactgcgctacag

SEQ ID NO: 200370 - DNA, 25 bp, Artificial
  Probe
actttccctctggtactacagctgg

SEQ ID NO: 200371 - DNA, 25 bp, Artificial
  Probe
aggtgctgggctctgactgcgctac

SEQ ID NO: 200372 - DNA, 25 bp, Artificial
  Probe
cgggaccctgagatttagagctggc

SEQ ID NO: 200373 - DNA, 25 bp, Artificial
  Probe
tgggctagctagaccagaccggccc

SEQ ID NO: 200374 - DNA, 25 bp, Artificial
  Probe
gcttactttccctctggtactacag

SEQ ID NO: 200375 - DNA, 25 bp, Artificial
  Probe
tccctctggtactacagctggaatt

SEQ ID NO: 200376 - DNA, 25 bp, Artificial
  Probe
aggcgggaccctgagatttagagct

SEQ ID NO: 200377 - DNA, 25 bp, Artificial
  Probe
ctgtgcctgggctagctagaccaga

SEQ ID NO: 200378 - DNA, 25 bp, Artificial
  Probe
tgactgcgctacagcggatttttga

SEQ ID NO: 200379 - DNA, 25 bp, Artificial
  Probe
ccaacatttggctgaacttgaaggg

SEQ ID NO: 200380 - DNA, 25 bp, Artificial
  Probe
cattcccgtgggtgttatcatccct

SEQ ID NO: 200381 - DNA, 25 bp, Artificial
  Probe
gctgataagtcaaccctgtctcagg

SEQ ID NO: 200382 - DNA, 25 bp, Artificial
  Probe
agtgaggttgcagcaggtttgatcc

SEQ ID NO: 200383 - DNA, 25 bp, Artificial
  Probe
aggctggcacccagataggcaaggt

SEQ ID NO: 200384 - DNA, 25 bp, Artificial
  Probe
tgggtgttatcatccctgagggctg

SEQ ID NO: 200385 - DNA, 25 bp, Artificial
  Probe
cctgaggctggcacccagataggca

SEQ ID NO: 200386 - DNA, 25 bp, Artificial
  Probe
ataagtcaaccctgtctcagggtcc

SEQ ID NO: 200387 - DNA, 25 bp, Artificial
  Probe
ggttgccttaaactggcaggtggtc

SEQ ID NO: 200388 - DNA, 25 bp, Artificial
  Probe
gggtcctgaggctggcacccagata

SEQ ID NO: 200389 - DNA, 25 bp, Artificial
  Probe
agtaaccttggctctttagggctgg

SEQ ID NO: 200390 - DNA, 25 bp, Artificial
  Probe
gttgccttaaactggcaggtggtcg

SEQ ID NO: 200391 - DNA, 25 bp, Artificial
  Probe
cctgtctcagggtcctgaggctggc

SEQ ID NO: 200392 - DNA, 25 bp, Artificial
  Probe
cagataggcaaggtcaccttgacac

SEQ ID NO: 200393 - DNA, 25 bp, Artificial
  Probe
acccagataggcaaggtcaccttga

SEQ ID NO: 200394 - DNA, 25 bp, Artificial
  Probe
gggctgataagtcaaccctgtctca

SEQ ID NO: 200395 - DNA, 25 bp, Artificial
  Probe
caaccctgtctcagggtcctgaggc

SEQ ID NO: 200396 - DNA, 25 bp, Artificial
  Probe
aagccattcccgtgggtgttatcat

SEQ ID NO: 200397 - DNA, 25 bp, Artificial
  Probe
ggaggtcaagctccatgccatccta

SEQ ID NO: 200398 - DNA, 25 bp, Artificial
  Probe
ccctgagggctgataagtcaaccct

SEQ ID NO: 200399 - DNA, 25 bp, Artificial
  Probe
atccctgagggctgataagtcaacc

SEQ ID NO: 200400 - DNA, 25 bp, Artificial
  Probe
ccagagtaaccttggctctttaggg

SEQ ID NO: 200401 - DNA, 25 bp, Artificial
  Probe
gtttgatcctgacagcctcatccta

SEQ ID NO: 200402 - DNA, 25 bp, Artificial
  Probe
catttggctgaacttgaagggcaaa

SEQ ID NO: 200403 - DNA, 25 bp, Artificial
  Probe
ctcagggtcctgaggctggcaccca

SEQ ID NO: 200404 - DNA, 25 bp, Artificial
  Probe
aagggaggtcaagctccatgccatc

SEQ ID NO: 200405 - DNA, 25 bp, Artificial
  Probe
ctccccaacatttggctgaacttga

SEQ ID NO: 200406 - DNA, 25 bp, Artificial
  Probe
cgtcggcaccacagcctaagctgga

SEQ ID NO: 200407 - DNA, 25 bp, Artificial
  Probe
cttccctaagccattcccgtgggtg

SEQ ID NO: 200408 - DNA, 25 bp, Artificial
  Probe
aagtcaaccctgtctcagggtcctg

SEQ ID NO: 200409 - DNA, 25 bp, Artificial
  Probe
aagggttgccttaaactggcaggtg

SEQ ID NO: 200410 - DNA, 25 bp, Artificial
  Probe
ggcaccacagcctaagctggagaga

SEQ ID NO: 200411 - DNA, 25 bp, Artificial
  Probe
tagggtctccccaacatttggctga

SEQ ID NO: 200412 - DNA, 25 bp, Artificial
  Probe
ggaactctgacctatgtccctcttc

SEQ ID NO: 200413 - DNA, 25 bp, Artificial
  Probe
gggcgtcggcaccacagcctaagct

SEQ ID NO: 200414 - DNA, 25 bp, Artificial
  Probe
ccttaaactggcaggtggtcgagtg

SEQ ID NO: 200415 - DNA, 25 bp, Artificial
  Probe
ccctttcccactgactgtgaatgtc

SEQ ID NO: 200416 - DNA, 25 bp, Artificial
  Probe
cttaaactggcaggtggtcgagtgc

SEQ ID NO: 200417 - DNA, 25 bp, Artificial
  Probe
tggcacccagataggcaaggtcacc

SEQ ID NO: 200418 - DNA, 25 bp, Artificial
  Probe
tggctgaacttgaagggcaaaggtc

SEQ ID NO: 200419 - DNA, 25 bp, Artificial
  Probe
acagcctaagctggagagaagtgag

SEQ ID NO: 200420 - DNA, 25 bp, Artificial
  Probe
ccttggctctttagggctggtgcag

SEQ ID NO: 200421 - DNA, 25 bp, Artificial
  Probe
tccctaagccattcccgtgggtgtt

SEQ ID NO: 200422 - DNA, 25 bp, Artificial
  Probe
gtcgagtgcgctgtgtccttggaac

SEQ ID NO: 200423 - DNA, 25 bp, Artificial
  Probe
gggaaggcacccttcctctgtactc

SEQ ID NO: 200424 - DNA, 25 bp, Artificial
  Probe
aggtcaagctccatgccatcctaac

SEQ ID NO: 200425 - DNA, 25 bp, Artificial
  Probe
gcttaatcccagagcctggctcctt

SEQ ID NO: 200426 - DNA, 25 bp, Artificial
  Probe
aacacgtctgtgaacttgatgttcc

SEQ ID NO: 200427 - DNA, 25 bp, Artificial
  Probe
aaacctcggtgtgtgctcccggctc

SEQ ID NO: 200428 - DNA, 25 bp, Artificial
  Probe
tgcatatttagtggttggtgtcctc

SEQ ID NO: 200429 - DNA, 25 bp, Artificial
  Probe
gcccttgtacttgtttgagtgggca

SEQ ID NO: 200430 - DNA, 25 bp, Artificial
  Probe
tctgcatgctctgctgcccttgtgc

SEQ ID NO: 200431 - DNA, 25 bp, Artificial
  Probe
ggaggaatgctttgcctcgtcctgt

SEQ ID NO: 200432 - DNA, 25 bp, Artificial
  Probe
gccaagagccctagttggtggagct

SEQ ID NO: 200433 - DNA, 25 bp, Artificial
  Probe
agtgctgcagcttccggctgagccg

SEQ ID NO: 200434 - DNA, 25 bp, Artificial
  Probe
gcctctgccaatgtgaaaacacaat

SEQ ID NO: 200435 - DNA, 25 bp, Artificial
  Probe
tccggccctggcaatgcgtgcgtgc

SEQ ID NO: 200436 - DNA, 25 bp, Artificial
  Probe
ctccctggagcagtgctggaagtga

SEQ ID NO: 200437 - DNA, 25 bp, Artificial
  Probe
aagggcggccgcatacatatgtagt

SEQ ID NO: 200438 - DNA, 25 bp, Artificial
  Probe
cttgatgttccttggatgtttaatc

SEQ ID NO: 200439 - DNA, 25 bp, Artificial
  Probe
agctgcttgccatggccgctgcatc

SEQ ID NO: 200440 - DNA, 25 bp, Artificial
  Probe
cccaggcttgggacgatggccctgc

SEQ ID NO: 200441 - DNA, 25 bp, Artificial
  Probe
gctggttagctctgccgccacattc

SEQ ID NO: 200442 - DNA, 25 bp, Artificial
  Probe
tctgctccttccactctggatgttt

SEQ ID NO: 200443 - DNA, 25 bp, Artificial
  Probe
gagctagagtgtgctggttagctct

SEQ ID NO: 200444 - DNA, 25 bp, Artificial
  Probe
tcaccacacagaagagacaatccag

SEQ ID NO: 200445 - DNA, 25 bp, Artificial
  Probe
tgtgccactacagcttccgcagagc

SEQ ID NO: 200446 - DNA, 25 bp, Artificial
  Probe
gtgctggaagtgagcagctgcccca

SEQ ID NO: 200447 - DNA, 25 bp, Artificial
  Probe
gaggccaggcccttgtacttgtttg

SEQ ID NO: 200448 - DNA, 25 bp, Artificial
  Probe
tccactctggatgttttcaggaaga

SEQ ID NO: 200449 - DNA, 25 bp, Artificial
  Probe
caggcccgcgacacctgggaggaat

SEQ ID NO: 200450 - DNA, 25 bp, Artificial
  Probe
tcctctctcccagaagagctgggga

SEQ ID NO: 200451 - DNA, 25 bp, Artificial
  Probe
gctccaaatgccatggcggcctctt

SEQ ID NO: 200452 - DNA, 25 bp, Artificial
  Probe
gggtagagcggctcttcactgtgcc

SEQ ID NO: 200453 - DNA, 25 bp, Artificial
  Probe
aagagccctagttggtggagctaga

SEQ ID NO: 200454 - DNA, 25 bp, Artificial
  Probe
gcaatgcgtgcgtgcgccctgcatg

SEQ ID NO: 200455 - DNA, 25 bp, Artificial
  Probe
tcaaccccgcagtggggtagcatgg

SEQ ID NO: 200456 - DNA, 25 bp, Artificial
  Probe
gtgcgtgcgccctgcatgtgctcac

SEQ ID NO: 200457 - DNA, 25 bp, Artificial
  Probe
tcagtgctgcagcttccggctgagc

SEQ ID NO: 200458 - DNA, 25 bp, Artificial
  Probe
acaatccaggagtcccaggcatgcc

SEQ ID NO: 200459 - DNA, 25 bp, Artificial
  Probe
cgtctgtacaatcagaatttggggg

SEQ ID NO: 200460 - DNA, 25 bp, Artificial
  Probe
gagcgcctcgggaaacttgaagctt

SEQ ID NO: 200461 - DNA, 25 bp, Artificial
  Probe
gaaacttgaagcttctctgctcctt

SEQ ID NO: 200462 - DNA, 25 bp, Artificial
  Probe
tgctggaagtgagcagctgccccac

SEQ ID NO: 200463 - DNA, 25 bp, Artificial
  Probe
cacggctccctggagcagtgctgga

SEQ ID NO: 200464 - DNA, 25 bp, Artificial
  Probe
tgctgggcgccgtacacgctcctaa

SEQ ID NO: 200465 - DNA, 25 bp, Artificial
  Probe
actgtgccactacagcttccgcaga

SEQ ID NO: 200466 - DNA, 25 bp, Artificial
  Probe
cacaggacagtcagcaggagagcag

SEQ ID NO: 200467 - DNA, 25 bp, Artificial
  Probe
tgcttgccccgtctgtacaatcaga

SEQ ID NO: 200468 - DNA, 25 bp, Artificial
  Probe
tctgtgggccaactcggccgtcaac

SEQ ID NO: 200469 - DNA, 25 bp, Artificial
  Probe
atggccgctgcatccccgattactg

SEQ ID NO: 200470 - DNA, 25 bp, Artificial
  Probe
ccaggcttgggacgatggccctgcc

SEQ ID NO: 200471 - DNA, 25 bp, Artificial
  Probe
agccagtcagtgagtggctgttacg

SEQ ID NO: 200472 - DNA, 25 bp, Artificial
  Probe
caggcctggcacagcccggaggtac

SEQ ID NO: 200473 - DNA, 25 bp, Artificial
  Probe
agctgcccaggcaacttacagtggc

SEQ ID NO: 200474 - DNA, 25 bp, Artificial
  Probe
aatacagtggcctcagtgatggcta

SEQ ID NO: 200475 - DNA, 25 bp, Artificial
  Probe
cttatagcagccaggtgatgcaggg

SEQ ID NO: 200476 - DNA, 25 bp, Artificial
  Probe
tgcgtccacatgagagggctgccct

SEQ ID NO: 200477 - DNA, 25 bp, Artificial
  Probe
atggggcttatagcagccaggtgat

SEQ ID NO: 200478 - DNA, 25 bp, Artificial
  Probe
ggcaacttacagtggcctggagagc

SEQ ID NO: 200479 - DNA, 25 bp, Artificial
  Probe
gatgaggtctggtgcctatagtgca

SEQ ID NO: 200480 - DNA, 25 bp, Artificial
  Probe
gggccttatgacaggcctggcacag

SEQ ID NO: 200481 - DNA, 25 bp, Artificial
  Probe
cttacagtggcctggagagccagtc

SEQ ID NO: 200482 - DNA, 25 bp, Artificial
  Probe
agaagcagtggcagctatgtccaag

SEQ ID NO: 200483 - DNA, 25 bp, Artificial
  Probe
atgtccaaggacagggccaacatgc

SEQ ID NO: 200484 - DNA, 25 bp, Artificial
  Probe
aaggacagggccaacatgcagcaca

SEQ ID NO: 200485 - DNA, 25 bp, Artificial
  Probe
agagggctgccctacaaagcaacgg

SEQ ID NO: 200486 - DNA, 25 bp, Artificial
  Probe
gtcatactcagatccacctctgaag

SEQ ID NO: 200487 - DNA, 25 bp, Artificial
  Probe
cggctacagcggtcagaacagcatg

SEQ ID NO: 200488 - DNA, 25 bp, Artificial
  Probe
agagccagtcagtgagtggctgtta

SEQ ID NO: 200489 - DNA, 25 bp, Artificial
  Probe
atgtctgtgcagaggcctgggcctt

SEQ ID NO: 200490 - DNA, 25 bp, Artificial
  Probe
ggcacagcccggaggtacattggca

SEQ ID NO: 200491 - DNA, 25 bp, Artificial
  Probe
tccactcaaccctgtgagagttcat

SEQ ID NO: 200492 - DNA, 25 bp, Artificial
  Probe
caacatgcagcacagatacatagaa

SEQ ID NO: 200493 - DNA, 25 bp, Artificial
  Probe
ccctgtgagagttcatattgagatt

SEQ ID NO: 200494 - DNA, 25 bp, Artificial
  Probe
cccggaggtacattggcattgtgaa

SEQ ID NO: 200495 - DNA, 25 bp, Artificial
  Probe
tgtgcagaggcctgggccttatgac

SEQ ID NO: 200496 - DNA, 25 bp, Artificial
  Probe
gttcacagtgcagagcaccaccggc

SEQ ID NO: 200497 - DNA, 25 bp, Artificial
  Probe
cggagacagcgagttcacagtgcag

SEQ ID NO: 200498 - DNA, 25 bp, Artificial
  Probe
catgggtgtgtcagctgcccaggca

SEQ ID NO: 200499 - DNA, 25 bp, Artificial
  Probe
ccctacaaagcaacggagaacgaca

SEQ ID NO: 200500 - DNA, 25 bp, Artificial
  Probe
ctcagtgatggctatggcttcacca

SEQ ID NO: 200501 - DNA, 25 bp, Artificial
  Probe
ggtacattggcattgtgaaacaggc

SEQ ID NO: 200502 - DNA, 25 bp, Artificial
  Probe
ctcagatccacctctgaagtttatg

SEQ ID NO: 200503 - DNA, 25 bp, Artificial
  Probe
atagcagccaggtgatgcagggcat

SEQ ID NO: 200504 - DNA, 25 bp, Artificial
  Probe
acaggcctggcacagcccggaggta

SEQ ID NO: 200505 - DNA, 25 bp, Artificial
  Probe
cattggcattgtgaaacaggcaggc

SEQ ID NO: 200506 - DNA, 25 bp, Artificial
  Probe
cggtcagaacagcatgggtggatat

SEQ ID NO: 200507 - DNA, 25 bp, Artificial
  Probe
ctggtgcctatagtgcaggctatgg

SEQ ID NO: 200508 - DNA, 25 bp, Artificial
  Probe
cagtgatggctatggcttcaccact

SEQ ID NO: 200509 - DNA, 25 bp, Artificial
  Probe
cgtccacatgagagggctgccctac

SEQ ID NO: 200510 - DNA, 25 bp, Artificial
  Probe
ttatgacaggcctggcacagcccgg

SEQ ID NO: 200511 - DNA, 25 bp, Artificial
  Probe
tagcaatggggcttatagcagccag

SEQ ID NO: 200512 - DNA, 25 bp, Artificial
  Probe
tggctatggcttcaccactgacctg

SEQ ID NO: 200513 - DNA, 25 bp, Artificial
  Probe
gggtgtgtcagctgcccaggcaact

SEQ ID NO: 200514 - DNA, 25 bp, Artificial
  Probe
acatgagagggctgccctacaaagc

SEQ ID NO: 200515 - DNA, 25 bp, Artificial
  Probe
tacagcggtcagaacagcatgggtg

SEQ ID NO: 200516 - DNA, 25 bp, Artificial
  Probe
gaggcctgggccttatgacaggcct

SEQ ID NO: 200517 - DNA, 25 bp, Artificial
  Probe
tttggttttcactcttcaccgttag

SEQ ID NO: 200518 - DNA, 25 bp, Artificial
  Probe
aaacccatcactaggctgaggggca

SEQ ID NO: 200519 - DNA, 25 bp, Artificial
  Probe
ggggcagcactgagcacccaattcc

SEQ ID NO: 200520 - DNA, 25 bp, Artificial
  Probe
gtgtctgctgccacaggcatctgtt

SEQ ID NO: 200521 - DNA, 25 bp, Artificial
  Probe
cagacccattagaagaaaagtttgg

SEQ ID NO: 200522 - DNA, 25 bp, Artificial
  Probe
atcactaggctgaggggcagcactg

SEQ ID NO: 200523 - DNA, 25 bp, Artificial
  Probe
ctgaggggcagcactgagcacccaa

SEQ ID NO: 200524 - DNA, 25 bp, Artificial
  Probe
ggccctgctccttggctcttgtctg

SEQ ID NO: 200525 - DNA, 25 bp, Artificial
  Probe
atgaccggtggcatgtctgacagga

SEQ ID NO: 200526 - DNA, 25 bp, Artificial
  Probe
tagggtgtctgctgccacaggcatc

SEQ ID NO: 200527 - DNA, 25 bp, Artificial
  Probe
ttccactgggagtttaatgggagtc

SEQ ID NO: 200528 - DNA, 25 bp, Artificial
  Probe
ttcctctggggactttctggggcca

SEQ ID NO: 200529 - DNA, 25 bp, Artificial
  Probe
ggttttcactcttcaccgttagatt

SEQ ID NO: 200530 - DNA, 25 bp, Artificial
  Probe
ggtcgctggtcagtctccactggcc

SEQ ID NO: 200531 - DNA, 25 bp, Artificial
  Probe
tctccactggccacaaaggaaaatg

SEQ ID NO: 200532 - DNA, 25 bp, Artificial
  Probe
tctcatgaccggtggcatgtctgac

SEQ ID NO: 200533 - DNA, 25 bp, Artificial
  Probe
gccgtgggtcgctggtcagtctcca

SEQ ID NO: 200534 - DNA, 25 bp, Artificial
  Probe
gatgtcatggaaacccatcactagg

SEQ ID NO: 200535 - DNA, 25 bp, Artificial
  Probe
ctgccagggacctcccgggaatgga

SEQ ID NO: 200536 - DNA, 25 bp, Artificial
  Probe
gtctgccagggacctcccgggaatg

SEQ ID NO: 200537 - DNA, 25 bp, Artificial
  Probe
ctttctggggccaagaactcaggcc

SEQ ID NO: 200538 - DNA, 25 bp, Artificial
  Probe
agaactcaggccagaaggccaccca

SEQ ID NO: 200539 - DNA, 25 bp, Artificial
  Probe
gtggctctcatgaccggtggcatgt

SEQ ID NO: 200540 - DNA, 25 bp, Artificial
  Probe
agaaggccacccaggacagggtgaa

SEQ ID NO: 200541 - DNA, 25 bp, Artificial
  Probe
ctggccacaaaggaaaatggagtgg

SEQ ID NO: 200542 - DNA, 25 bp, Artificial
  Probe
actcaggccagaaggccacccagga

SEQ ID NO: 200543 - DNA, 25 bp, Artificial
  Probe
aagatagggccctgctccttggctc

SEQ ID NO: 200544 - DNA, 25 bp, Artificial
  Probe
taatgggagtcagacccattagaag

SEQ ID NO: 200545 - DNA, 25 bp, Artificial
  Probe
gtgtggctctcatgaccggtggcat

SEQ ID NO: 200546 - DNA, 25 bp, Artificial
  Probe
tgcataggaagttccctccagggag

SEQ ID NO: 200547 - DNA, 25 bp, Artificial
  Probe
ccactgggagtttaatgggagtcag

SEQ ID NO: 200548 - DNA, 25 bp, Artificial
  Probe
ggaatgtagggtgtctgctgccaca

SEQ ID NO: 200549 - DNA, 25 bp, Artificial
  Probe
cagaccaggcaggtgtggctctcat

SEQ ID NO: 200550 - DNA, 25 bp, Artificial
  Probe
ggtggcatccgtgtcagaccaggca

SEQ ID NO: 200551 - DNA, 25 bp, Artificial
  Probe
gtcagtctccactggccacaaagga

SEQ ID NO: 200552 - DNA, 25 bp, Artificial
  Probe
ggccaagaactcaggccagaaggcc

SEQ ID NO: 200553 - DNA, 25 bp, Artificial
  Probe
atccgtgtcagaccaggcaggtgtg

SEQ ID NO: 200554 - DNA, 25 bp, Artificial
  Probe
tctggggactttctggggccaagaa

SEQ ID NO: 200555 - DNA, 25 bp, Artificial
  Probe
ttggctcttgtctgccagggacctc

SEQ ID NO: 200556 - DNA, 25 bp, Artificial
  Probe
tctgacaggatgtcatggaaaccca

SEQ ID NO: 200557 - DNA, 25 bp, Artificial
  Probe
tcatggaaacccatcactaggctga

SEQ ID NO: 200558 - DNA, 25 bp, Artificial
  Probe
aaggccacccaggacagggtgaagc

SEQ ID NO: 200559 - DNA, 25 bp, Artificial
  Probe
accaggcaggtgtggctctcatgac

SEQ ID NO: 200560 - DNA, 25 bp, Artificial
  Probe
ctgctccttggctcttgtctgccag

SEQ ID NO: 200561 - DNA, 25 bp, Artificial
  Probe
aatgggagtcagacccattagaaga

SEQ ID NO: 200562 - DNA, 25 bp, Artificial
  Probe
ctggggccaagaactcaggccagaa

SEQ ID NO: 200563 - DNA, 25 bp, Artificial
  Probe
tgacctttgcctttgctagataagg

SEQ ID NO: 200564 - DNA, 25 bp, Artificial
  Probe
ctctaaatgtttcagaactgagttg

SEQ ID NO: 200565 - DNA, 25 bp, Artificial
  Probe
agttgtacagagtgcttcataccca

SEQ ID NO: 200566 - DNA, 25 bp, Artificial
  Probe
aaagttgtacagagtgcttcatacc

SEQ ID NO: 200567 - DNA, 25 bp, Artificial
  Probe
ctccttctgaaagttgtacagagtg

SEQ ID NO: 200568 - DNA, 25 bp, Artificial
  Probe
agcttcctgaattgttcgaaaatac

SEQ ID NO: 200569 - DNA, 25 bp, Artificial
  Probe
agtcttgactcttttcagatgcaag

SEQ ID NO: 200570 - DNA, 25 bp, Artificial
  Probe
tttaagtcttgactcttttcagatg

SEQ ID NO: 200571 - DNA, 25 bp, Artificial
  Probe
ttgtacagagtgcttcatacccatt

SEQ ID NO: 200572 - DNA, 25 bp, Artificial
  Probe
cttgacactgtattagcttcctgaa

SEQ ID NO: 200573 - DNA, 25 bp, Artificial
  Probe
gactcttttcagatgcaagaaactg

SEQ ID NO: 200574 - DNA, 25 bp, Artificial
  Probe
ttctagcttgacactgtattagctt

SEQ ID NO: 200575 - DNA, 25 bp, Artificial
  Probe
aacagtgacctttgcctttgctaga

SEQ ID NO: 200576 - DNA, 25 bp, Artificial
  Probe
tgcaagaaactgacagcgctgtacg

SEQ ID NO: 200577 - DNA, 25 bp, Artificial
  Probe
ttgactcttttcagatgcaagaaac

SEQ ID NO: 200578 - DNA, 25 bp, Artificial
  Probe
aggaaaacccatgtatgtctcctct

SEQ ID NO: 200579 - DNA, 25 bp, Artificial
  Probe
ttagcttcctgaattgttcgaaaat

SEQ ID NO: 200580 - DNA, 25 bp, Artificial
  Probe
ctgtattagcttcctgaattgttcg

SEQ ID NO: 200581 - DNA, 25 bp, Artificial
  Probe
gcctttgctagataaggaggaaaac

SEQ ID NO: 200582 - DNA, 25 bp, Artificial
  Probe
taagtcttgactcttttcagatgca

SEQ ID NO: 200583 - DNA, 25 bp, Artificial
  Probe
tgttaaaaacagtgacctttgcctt

SEQ ID NO: 200584 - DNA, 25 bp, Artificial
  Probe
cttttcagatgcaagaaactgacag

SEQ ID NO: 200585 - DNA, 25 bp, Artificial
  Probe
tattagcttcctgaattgttcgaaa

SEQ ID NO: 200586 - DNA, 25 bp, Artificial
  Probe
tcctccttctgaaagttgtacagag

SEQ ID NO: 200587 - DNA, 25 bp, Artificial
  Probe
gtacagagtgcttcatacccattgt

SEQ ID NO: 200588 - DNA, 25 bp, Artificial
  Probe
gacactgtattagcttcctgaattg

SEQ ID NO: 200589 - DNA, 25 bp, Artificial
  Probe
acctttgcctttgctagataaggag

SEQ ID NO: 200590 - DNA, 25 bp, Artificial
  Probe
agcttgacactgtattagcttcctg

SEQ ID NO: 200591 - DNA, 25 bp, Artificial
  Probe
ttaaaaacagtgacctttgcctttg

SEQ ID NO: 200592 - DNA, 25 bp, Artificial
  Probe
cactgtattagcttcctgaattgtt

SEQ ID NO: 200593 - DNA, 25 bp, Artificial
  Probe
cttttctagcttgacactgtattag

SEQ ID NO: 200594 - DNA, 25 bp, Artificial
  Probe
tcttgactcttttcagatgcaagaa

SEQ ID NO: 200595 - DNA, 25 bp, Artificial
  Probe
tctctaaatgtttcagaactgagtt

SEQ ID NO: 200596 - DNA, 25 bp, Artificial
  Probe
ctcttttcagatgcaagaaactgac

SEQ ID NO: 200597 - DNA, 25 bp, Artificial
  Probe
ggaaaacccatgtatgtctcctctc

SEQ ID NO: 200598 - DNA, 25 bp, Artificial
  Probe
gcttcctgaattgttcgaaaatact

SEQ ID NO: 200599 - DNA, 25 bp, Artificial
  Probe
ccttctgaaagttgtacagagtgct

SEQ ID NO: 200600 - DNA, 25 bp, Artificial
  Probe
ctagcttgacactgtattagcttcc

SEQ ID NO: 200601 - DNA, 25 bp, Artificial
  Probe
gtgacctttgcctttgctagataag

SEQ ID NO: 200602 - DNA, 25 bp, Artificial
  Probe
gagtccaatttcctccttctgaaag

SEQ ID NO: 200603 - DNA, 25 bp, Artificial
  Probe
ttttcagatgcaagaaactgacagc

SEQ ID NO: 200604 - DNA, 25 bp, Artificial
  Probe
tttcctccttctgaaagttgtacag

SEQ ID NO: 200605 - DNA, 25 bp, Artificial
  Probe
cttctgaaagttgtacagagtgctt

SEQ ID NO: 200606 - DNA, 25 bp, Artificial
  Probe
ttgacactgtattagcttcctgaat

SEQ ID NO: 200607 - DNA, 25 bp, Artificial
  Probe
tagcttgacactgtattagcttcct

SEQ ID NO: 200608 - DNA, 25 bp, Artificial
  Probe
ctttgcctttgctagataaggagga

SEQ ID NO: 200609 - DNA, 25 bp, Artificial
  Probe
tcttccagcagctgtcaggggtcaa

SEQ ID NO: 200610 - DNA, 25 bp, Artificial
  Probe
aactgacccagagtggccccagcaa

SEQ ID NO: 200611 - DNA, 25 bp, Artificial
  Probe
ctgcttctggccttgtcgggtgtga

SEQ ID NO: 200612 - DNA, 25 bp, Artificial
  Probe
ggacggtgacggaccctttctgtga

SEQ ID NO: 200613 - DNA, 25 bp, Artificial
  Probe
atgtaggcctcctggtgcccatctc

SEQ ID NO: 200614 - DNA, 25 bp, Artificial
  Probe
gcctgctgatgttcacctggggctg

SEQ ID NO: 200615 - DNA, 25 bp, Artificial
  Probe
agcatgagcgcctttggtacctact

SEQ ID NO: 200616 - DNA, 25 bp, Artificial
  Probe
ccatctccgcagagcctgctgatgt

SEQ ID NO: 200617 - DNA, 25 bp, Artificial
  Probe
ttcatcgctggttttgcagtaggct

SEQ ID NO: 200618 - DNA, 25 bp, Artificial
  Probe
tgacggaccctttctgtgactggca

SEQ ID NO: 200619 - DNA, 25 bp, Artificial
  Probe
ccctgagctgagctggcttcgggtt

SEQ ID NO: 200620 - DNA, 25 bp, Artificial
  Probe
gggctgagcaccagggcttccagct

SEQ ID NO: 200621 - DNA, 25 bp, Artificial
  Probe
gttttcagcatgagcgcctttggta

SEQ ID NO: 200622 - DNA, 25 bp, Artificial
  Probe
tcaaactgacccagagtggccccag

SEQ ID NO: 200623 - DNA, 25 bp, Artificial
  Probe
tgttcactgctgtggcggccctcat

SEQ ID NO: 200624 - DNA, 25 bp, Artificial
  Probe
gagcaccagggcttccagctggcta

SEQ ID NO: 200625 - DNA, 25 bp, Artificial
  Probe
cttgtcgggtgtgatcatggttttc

SEQ ID NO: 200626 - DNA, 25 bp, Artificial
  Probe
cctcggtcactgtgggcatcatcca

SEQ ID NO: 200627 - DNA, 25 bp, Artificial
  Probe
catggacagagcagggcgaaaactg

SEQ ID NO: 200628 - DNA, 25 bp, Artificial
  Probe
gtcactgtgggcatcatccaggttc

SEQ ID NO: 200629 - DNA, 25 bp, Artificial
  Probe
agctgtcaggggtcaacgccatcat

SEQ ID NO: 200630 - DNA, 25 bp, Artificial
  Probe
gctggcttcgggtttcaaaaggagt

SEQ ID NO: 200631 - DNA, 25 bp, Artificial
  Probe
cagggcgaaaactgcttctggcctt

SEQ ID NO: 200632 - DNA, 25 bp, Artificial
  Probe
gccttgtcgggtgtgatcatggttt

SEQ ID NO: 200633 - DNA, 25 bp, Artificial
  Probe
ccatctttgaggaggccaagttcaa

SEQ ID NO: 200634 - DNA, 25 bp, Artificial
  Probe
ggtcttccagcagctgtcaggggtc

SEQ ID NO: 200635 - DNA, 25 bp, Artificial
  Probe
catgtaggcctcctggtgcccatct

SEQ ID NO: 200636 - DNA, 25 bp, Artificial
  Probe
cagctggctatgctgaggcgccctg

SEQ ID NO: 200637 - DNA, 25 bp, Artificial
  Probe
agcagcctggcctcggtcactgtgg

SEQ ID NO: 200638 - DNA, 25 bp, Artificial
  Probe
tgaggcgccctggtgtccacaagcc

SEQ ID NO: 200639 - DNA, 25 bp, Artificial
  Probe
aggacagcagcctggcctcggtcac

SEQ ID NO: 200640 - DNA, 25 bp, Artificial
  Probe
agagccccctgttggggctgagcac

SEQ ID NO: 200641 - DNA, 25 bp, Artificial
  Probe
cgaaaactgcttctggccttgtcgg

SEQ ID NO: 200642 - DNA, 25 bp, Artificial
  Probe
gcctttggtacctacttcaaactga

SEQ ID NO: 200643 - DNA, 25 bp, Artificial
  Probe
ctgaggcgccctggtgtccacaagc

SEQ ID NO: 200644 - DNA, 25 bp, Artificial
  Probe
cttctggccttgtcgggtgtgatca

SEQ ID NO: 200645 - DNA, 25 bp, Artificial
  Probe
ttgaggaggccaagttcaaggacag

SEQ ID NO: 200646 - DNA, 25 bp, Artificial
  Probe
ctgtggcggccctcatcatggacag

SEQ ID NO: 200647 - DNA, 25 bp, Artificial
  Probe
ctggctgtaggcagcatgtgcctct

SEQ ID NO: 200648 - DNA, 25 bp, Artificial
  Probe
ggggtcaacgccatcatgttctatg

SEQ ID NO: 200649 - DNA, 25 bp, Artificial
  Probe
tgtcaggggtcaacgccatcatgtt

SEQ ID NO: 200650 - DNA, 25 bp, Artificial
  Probe
ttggggctgagcaccagggcttcca

SEQ ID NO: 200651 - DNA, 25 bp, Artificial
  Probe
gctgagctggcttcgggtttcaaaa

SEQ ID NO: 200652 - DNA, 25 bp, Artificial
  Probe
gttctatgccaacaccatctttgag

SEQ ID NO: 200653 - DNA, 25 bp, Artificial
  Probe
gtcaacgccatcatgttctatgcca

SEQ ID NO: 200654 - DNA, 25 bp, Artificial
  Probe
tgtgatcatggttttcagcatgagc

SEQ ID NO: 200655 - DNA, 25 bp, Artificial
  Probe
gtgccgtgcgttaccatggagcctg

SEQ ID NO: 200656 - DNA, 25 bp, Artificial
  Probe
tcttcagccaaggaaggagtgtgcc

SEQ ID NO: 200657 - DNA, 25 bp, Artificial
  Probe
accaaagaccaagacaacgaccagg

SEQ ID NO: 200658 - DNA, 25 bp, Artificial
  Probe
ctagcataccagcaacaggagtctt

SEQ ID NO: 200659 - DNA, 25 bp, Artificial
  Probe
aagggtacaactacagctacaaggt

SEQ ID NO: 200660 - DNA, 25 bp, Artificial
  Probe
cagctacaaggtttctgaaatgaag

SEQ ID NO: 200661 - DNA, 25 bp, Artificial
  Probe
acagctccttccagatccagggaga

SEQ ID NO: 200662 - DNA, 25 bp, Artificial
  Probe
gggtacaactacagctacaaggttt

SEQ ID NO: 200663 - DNA, 25 bp, Artificial
  Probe
ttcagccaaggaaggagtgtgccac

SEQ ID NO: 200664 - DNA, 25 bp, Artificial
  Probe
catggagcctggtggtactctgatt

SEQ ID NO: 200665 - DNA, 25 bp, Artificial
  Probe
caaactctagcataccagcaacagg

SEQ ID NO: 200666 - DNA, 25 bp, Artificial
  Probe
caaagaccaagacaacgaccaggga

SEQ ID NO: 200667 - DNA, 25 bp, Artificial
  Probe
ccaaagaccaagacaacgaccaggg

SEQ ID NO: 200668 - DNA, 25 bp, Artificial
  Probe
agaccaagacaacgaccagggatcc

SEQ ID NO: 200669 - DNA, 25 bp, Artificial
  Probe
aactacagctacaaggtttctgaaa

SEQ ID NO: 200670 - DNA, 25 bp, Artificial
  Probe
tacaactacagctacaaggtttctg

SEQ ID NO: 200671 - DNA, 25 bp, Artificial
  Probe
taccagcaacaggagtcttctatct

SEQ ID NO: 200672 - DNA, 25 bp, Artificial
  Probe
ccgtgcgttaccatggagcctggtg

SEQ ID NO: 200673 - DNA, 25 bp, Artificial
  Probe
actctagcataccagcaacaggagt

SEQ ID NO: 200674 - DNA, 25 bp, Artificial
  Probe
catgactttgccaagtacagctcct

SEQ ID NO: 200675 - DNA, 25 bp, Artificial
  Probe
ctctagcataccagcaacaggagtc

SEQ ID NO: 200676 - DNA, 25 bp, Artificial
  Probe
cagctccttccagatccagggagag

SEQ ID NO: 200677 - DNA, 25 bp, Artificial
  Probe
atgactttgccaagtacagctcctt

SEQ ID NO: 200678 - DNA, 25 bp, Artificial
  Probe
cataccagcaacaggagtcttctat

SEQ ID NO: 200679 - DNA, 25 bp, Artificial
  Probe
tagcataccagcaacaggagtcttc

SEQ ID NO: 200680 - DNA, 25 bp, Artificial
  Probe
aagaccaagacaacgaccagggatc

SEQ ID NO: 200681 - DNA, 25 bp, Artificial
  Probe
tggagcctggtggtactctgattgt

SEQ ID NO: 200682 - DNA, 25 bp, Artificial
  Probe
acaactacagctacaaggtttctga

SEQ ID NO: 200683 - DNA, 25 bp, Artificial
  Probe
ccatggagcctggtggtactctgat

SEQ ID NO: 200684 - DNA, 25 bp, Artificial
  Probe
aaactctagcataccagcaacagga

SEQ ID NO: 200685 - DNA, 25 bp, Artificial
  Probe
tgaaggtgcgcctcatctagctccc

SEQ ID NO: 200686 - DNA, 25 bp, Artificial
  Probe
caccaaagaccaagacaacgaccag

SEQ ID NO: 200687 - DNA, 25 bp, Artificial
  Probe
gcataccagcaacaggagtcttcta

SEQ ID NO: 200688 - DNA, 25 bp, Artificial
  Probe
gccgtgcgttaccatggagcctggt

SEQ ID NO: 200689 - DNA, 25 bp, Artificial
  Probe
gaccaagacaacgaccagggatcct

SEQ ID NO: 200690 - DNA, 25 bp, Artificial
  Probe
gtacaactacagctacaaggtttct

SEQ ID NO: 200691 - DNA, 25 bp, Artificial
  Probe
gtacagctccttccagatccaggga

SEQ ID NO: 200692 - DNA, 25 bp, Artificial
  Probe
cccagggaaccaatgagctgcgggt

SEQ ID NO: 200693 - DNA, 25 bp, Artificial
  Probe
attctggggaacttcctcggtggtg

SEQ ID NO: 200694 - DNA, 25 bp, Artificial
  Probe
actacagctacaaggtttctgaaat

SEQ ID NO: 200695 - DNA, 25 bp, Artificial
  Probe
taccatggagcctggtggtactctg

SEQ ID NO: 200696 - DNA, 25 bp, Artificial
  Probe
caagtacagctccttccagatccag

SEQ ID NO: 200697 - DNA, 25 bp, Artificial
  Probe
cttcagccaaggaaggagtgtgcca

SEQ ID NO: 200698 - DNA, 25 bp, Artificial
  Probe
tcagccaaggaaggagtgtgccacc

SEQ ID NO: 200699 - DNA, 25 bp, Artificial
  Probe
agtacagctccttccagatccaggg

SEQ ID NO: 200700 - DNA, 25 bp, Artificial
  Probe
ctgtgccgtgcgttaccatggagcc

SEQ ID NO: 200701 - DNA, 25 bp, Artificial
  Probe
tggctgcaacgcagggcagagattc

SEQ ID NO: 200702 - DNA, 25 bp, Artificial
  Probe
ccttcggaagcgaacctgggcaggc

SEQ ID NO: 200703 - DNA, 25 bp, Artificial
  Probe
gatccttcggaagcgaacctgggca

SEQ ID NO: 200704 - DNA, 25 bp, Artificial
  Probe
ttgtcccgcggccagtcccttcaac

SEQ ID NO: 200705 - DNA, 25 bp, Artificial
  Probe
tctggagatccttcggaagcgaacc

SEQ ID NO: 200706 - DNA, 25 bp, Artificial
  Probe
caacgcagggcagagattctggaga

SEQ ID NO: 200707 - DNA, 25 bp, Artificial
  Probe
ttctggagatccttcggaagcgaac

SEQ ID NO: 200708 - DNA, 25 bp, Artificial
  Probe
aactggctgcaacgcagggcagaga

SEQ ID NO: 200709 - DNA, 25 bp, Artificial
  Probe
actggctgcaacgcagggcagagat

SEQ ID NO: 200710 - DNA, 25 bp, Artificial
  Probe
caaaactggctgcaacgcagggcag

SEQ ID NO: 200711 - DNA, 25 bp, Artificial
  Probe
aacgcagggcagagattctggagat

SEQ ID NO: 200712 - DNA, 25 bp, Artificial
  Probe
agatccttcggaagcgaacctgggc

SEQ ID NO: 200713 - DNA, 25 bp, Artificial
  Probe
aaaactggctgcaacgcagggcaga

SEQ ID NO: 200714 - DNA, 25 bp, Artificial
  Probe
ggagatccttcggaagcgaacctgg

SEQ ID NO: 200715 - DNA, 25 bp, Artificial
  Probe
cggaagcgaacctgggcaggccgga

SEQ ID NO: 200716 - DNA, 25 bp, Artificial
  Probe
ccaaaactggctgcaacgcagggca

SEQ ID NO: 200717 - DNA, 25 bp, Artificial
  Probe
ccccaaaactggctgcaacgcaggg

SEQ ID NO: 200718 - DNA, 25 bp, Artificial
  Probe
cagtcccttcaacgccacgccctcc

SEQ ID NO: 200719 - DNA, 25 bp, Artificial
  Probe
tccttcggaagcgaacctgggcagg

SEQ ID NO: 200720 - DNA, 25 bp, Artificial
  Probe
gcgaacctgggcaggccggaaataa

SEQ ID NO: 200721 - DNA, 25 bp, Artificial
  Probe
acgcagggcagagattctggagatc

SEQ ID NO: 200722 - DNA, 25 bp, Artificial
  Probe
ttcggaagcgaacctgggcaggccg

SEQ ID NO: 200723 - DNA, 25 bp, Artificial
  Probe
cttcggaagcgaacctgggcaggcc

SEQ ID NO: 200724 - DNA, 25 bp, Artificial
  Probe
tctttgtcccgcggccagtcccttc

SEQ ID NO: 200725 - DNA, 25 bp, Artificial
  Probe
agagattctggagatccttcggaag

SEQ ID NO: 200726 - DNA, 25 bp, Artificial
  Probe
gcaacgcagggcagagattctggag

SEQ ID NO: 200727 - DNA, 25 bp, Artificial
  Probe
gagatccttcggaagcgaacctggg

SEQ ID NO: 200728 - DNA, 25 bp, Artificial
  Probe
attctggagatccttcggaagcgaa

SEQ ID NO: 200729 - DNA, 25 bp, Artificial
  Probe
gaagcgaacctgggcaggccggaaa

SEQ ID NO: 200730 - DNA, 25 bp, Artificial
  Probe
ttctttgtcccgcggccagtccctt

SEQ ID NO: 200731 - DNA, 25 bp, Artificial
  Probe
agattctggagatccttcggaagcg

SEQ ID NO: 200732 - DNA, 25 bp, Artificial
  Probe
gagattctggagatccttcggaagc

SEQ ID NO: 200733 - DNA, 25 bp, Artificial
  Probe
gctgcaacgcagggcagagattctg

SEQ ID NO: 200734 - DNA, 25 bp, Artificial
  Probe
ctggagatccttcggaagcgaacct

SEQ ID NO: 200735 - DNA, 25 bp, Artificial
  Probe
aaactggctgcaacgcagggcagag

SEQ ID NO: 200736 - DNA, 25 bp, Artificial
  Probe
ctggctgcaacgcagggcagagatt

SEQ ID NO: 200737 - DNA, 25 bp, Artificial
  Probe
cccgcggccagtcccttcaacgcca

SEQ ID NO: 200738 - DNA, 25 bp, Artificial
  Probe
gattctggagatccttcggaagcga

SEQ ID NO: 200739 - DNA, 25 bp, Artificial
  Probe
ctcctccccaaaactggctgcaacg

SEQ ID NO: 200740 - DNA, 25 bp, Artificial
  Probe
cccaaaactggctgcaacgcagggc

SEQ ID NO: 200741 - DNA, 25 bp, Artificial
  Probe
cgcagggcagagattctggagatcc

SEQ ID NO: 200742 - DNA, 25 bp, Artificial
  Probe
tgcaacgcagggcagagattctgga

SEQ ID NO: 200743 - DNA, 25 bp, Artificial
  Probe
ctccccaaaactggctgcaacgcag

SEQ ID NO: 200744 - DNA, 25 bp, Artificial
  Probe
gcggccagtcccttcaacgccacgc

SEQ ID NO: 200745 - DNA, 25 bp, Artificial
  Probe
gtcccgcggccagtcccttcaacgc

SEQ ID NO: 200746 - DNA, 25 bp, Artificial
  Probe
ggctgcaacgcagggcagagattct

SEQ ID NO: 200747 - DNA, 25 bp, Artificial
  Probe
agttccgaagtggtcacatcgtacc

SEQ ID NO: 200748 - DNA, 25 bp, Artificial
  Probe
cagatacaaatgctgctgaatgaaa

SEQ ID NO: 200749 - DNA, 25 bp, Artificial
  Probe
cagtcatcctccagtttggtcatgc

SEQ ID NO: 200750 - DNA, 25 bp, Artificial
  Probe
tggtccttttgtcttttcacagaaa

SEQ ID NO: 200751 - DNA, 25 bp, Artificial
  Probe
gccagccaaggctgcgtagagaaat

SEQ ID NO: 200752 - DNA, 25 bp, Artificial
  Probe
cacttcaaaagtgttggataccaaa

SEQ ID NO: 200753 - DNA, 25 bp, Artificial
  Probe
cctaatgacctaagaaaatgctgat

SEQ ID NO: 200754 - DNA, 25 bp, Artificial
  Probe
ggtcacatcgtaccatatgcttcaa

SEQ ID NO: 200755 - DNA, 25 bp, Artificial
  Probe
aggcgcgcagttataatggggccca

SEQ ID NO: 200756 - DNA, 25 bp, Artificial
  Probe
tacacctggacaaagcagttgagca

SEQ ID NO: 200757 - DNA, 25 bp, Artificial
  Probe
tagaatctggacatacgggtaagac

SEQ ID NO: 200758 - DNA, 25 bp, Artificial
  Probe
tgaagacgcacagacccctcaagaa

SEQ ID NO: 200759 - DNA, 25 bp, Artificial
  Probe
ctgctctcgctcatgggctacttca

SEQ ID NO: 200760 - DNA, 25 bp, Artificial
  Probe
tgggttctttccttctccttcacga

SEQ ID NO: 200761 - DNA, 25 bp, Artificial
  Probe
gatctgaagaaccactaccaggaca

SEQ ID NO: 200762 - DNA, 25 bp, Artificial
  Probe
tgtttgcagagctgaaattttccta

SEQ ID NO: 200763 - DNA, 25 bp, Artificial
  Probe
aaattccagatacaaatgctgctga

SEQ ID NO: 200764 - DNA, 25 bp, Artificial
  Probe
gaatctggacatacgggtaagacat

SEQ ID NO: 200765 - DNA, 25 bp, Artificial
  Probe
cttctccttcacgaaggacacaaag

SEQ ID NO: 200766 - DNA, 25 bp, Artificial
  Probe
cctcccagtgtttgcagagctgaaa

SEQ ID NO: 200767 - DNA, 25 bp, Artificial
  Probe
ccttgtatgaggatctgaagaacca

SEQ ID NO: 200768 - DNA, 25 bp, Artificial
  Probe
gttatctttcgttccatcatggctc

SEQ ID NO: 200769 - DNA, 25 bp, Artificial
  Probe
ccaaggctgcgtagagaaataaagt

SEQ ID NO: 200770 - DNA, 25 bp, Artificial
  Probe
ttggtccttttgtcttttcacagaa

SEQ ID NO: 200771 - DNA, 25 bp, Artificial
  Probe
tgactctccctggagcagctctctt

SEQ ID NO: 200772 - DNA, 25 bp, Artificial
  Probe
ttcctaatgacctaagaaaatgctg

SEQ ID NO: 200773 - DNA, 25 bp, Artificial
  Probe
tgaaaaggtgttacccttagctcac

SEQ ID NO: 200774 - DNA, 25 bp, Artificial
  Probe
accaaagcacagtggcagctgggtg

SEQ ID NO: 200775 - DNA, 25 bp, Artificial
  Probe
tcgaacctgattcaaagaaattttg

SEQ ID NO: 200776 - DNA, 25 bp, Artificial
  Probe
tcagagctgtcaaactagtaaagaa

SEQ ID NO: 200777 - DNA, 25 bp, Artificial
  Probe
atcatgttgggttctttccttctcc

SEQ ID NO: 200778 - DNA, 25 bp, Artificial
  Probe
agaagcaaaggtctcagccggtctc

SEQ ID NO: 200779 - DNA, 25 bp, Artificial
  Probe
agcaaaggtctcagccggtctcttc

SEQ ID NO: 200780 - DNA, 25 bp, Artificial
  Probe
ccgacttccttgactgttgcctggt

SEQ ID NO: 200781 - DNA, 25 bp, Artificial
  Probe
ttggtcatgcggagaccctcctacc

SEQ ID NO: 200782 - DNA, 25 bp, Artificial
  Probe
cggacctgtttgaggcgcgcagtta

SEQ ID NO: 200783 - DNA, 25 bp, Artificial
  Probe
ggtaagacatgactctccctggagc

SEQ ID NO: 200784 - DNA, 25 bp, Artificial
  Probe
taacacttcaaaagtgttggatacc

SEQ ID NO: 200785 - DNA, 25 bp, Artificial
  Probe
acaattttgaggagcaggtgcatcg

SEQ ID NO: 200786 - DNA, 25 bp, Artificial
  Probe
ctaatatttgtgctttaccattgtg

SEQ ID NO: 200787 - DNA, 25 bp, Artificial
  Probe
tccatccctcggacctgtttgaggc

SEQ ID NO: 200788 - DNA, 25 bp, Artificial
  Probe
taaaggcagcaacaggaggatctct

SEQ ID NO: 200789 - DNA, 25 bp, Artificial
  Probe
cctggagcagctctcttcagaaaaa

SEQ ID NO: 200790 - DNA, 25 bp, Artificial
  Probe
tgttggataccaaagcacagtggca

SEQ ID NO: 200791 - DNA, 25 bp, Artificial
  Probe
ttcacgaaggacacaaagaaggaag

SEQ ID NO: 200792 - DNA, 25 bp, Artificial
  Probe
taaagaatgtaacctacccaaggtg

SEQ ID NO: 200793 - DNA, 25 bp, Artificial
  Probe
tccggaacagcctggcaggtttgcc

SEQ ID NO: 200794 - DNA, 25 bp, Artificial
  Probe
ttcttggaagagtagccaagcctct

SEQ ID NO: 200795 - DNA, 25 bp, Artificial
  Probe
ccccaaaatgtgatgcttgtcccga

SEQ ID NO: 200796 - DNA, 25 bp, Artificial
  Probe
taaaggtgacccttctttgctactt

SEQ ID NO: 200797 - DNA, 25 bp, Artificial
  Probe
ttgttaaaggtgacccttctttgct

SEQ ID NO: 200798 - DNA, 25 bp, Artificial
  Probe
gttggagacccctctgcagatcacc

SEQ ID NO: 200799 - DNA, 25 bp, Artificial
  Probe
ctgagtctggcagttcttggaagag

SEQ ID NO: 200800 - DNA, 25 bp, Artificial
  Probe
cacatgagacttttctaggtggagt

SEQ ID NO: 200801 - DNA, 25 bp, Artificial
  Probe
caggtttgccaagcttctgctgcgc

SEQ ID NO: 200802 - DNA, 25 bp, Artificial
  Probe
cttcctgtccccaaaatgtgatgct

SEQ ID NO: 200803 - DNA, 25 bp, Artificial
  Probe
gccctataccaagcagaagtatccg

SEQ ID NO: 200804 - DNA, 25 bp, Artificial
  Probe
tgacccttctttgctacttaagggg

SEQ ID NO: 200805 - DNA, 25 bp, Artificial
  Probe
cgctccattggattgaaatgcctgg

SEQ ID NO: 200806 - DNA, 25 bp, Artificial
  Probe
agtagccaagcctctgtacatataa

SEQ ID NO: 200807 - DNA, 25 bp, Artificial
  Probe
tccccaaaatgtgatgcttgtcccg

SEQ ID NO: 200808 - DNA, 25 bp, Artificial
  Probe
aggtgacccttctttgctacttaag

SEQ ID NO: 200809 - DNA, 25 bp, Artificial
  Probe
tttctacacatgagacttttctagg

SEQ ID NO: 200810 - DNA, 25 bp, Artificial
  Probe
attgaaatgcctggaacacctcttc

SEQ ID NO: 200811 - DNA, 25 bp, Artificial
  Probe
ttttcacttgccatggaaagcaaac

SEQ ID NO: 200812 - DNA, 25 bp, Artificial
  Probe
gaagagtagccaagcctctgtacat

SEQ ID NO: 200813 - DNA, 25 bp, Artificial
  Probe
gaaatgcctggaacacctcttcttc

SEQ ID NO: 200814 - DNA, 25 bp, Artificial
  Probe
gttcttggaagagtagccaagcctc

SEQ ID NO: 200815 - DNA, 25 bp, Artificial
  Probe
agtatccggaacagcctggcaggtt

SEQ ID NO: 200816 - DNA, 25 bp, Artificial
  Probe
cattggattgaaatgcctggaacac

SEQ ID NO: 200817 - DNA, 25 bp, Artificial
  Probe
gtagccaagcctctgtacatataat

SEQ ID NO: 200818 - DNA, 25 bp, Artificial
  Probe
taaggggctgagtctggcagttctt

SEQ ID NO: 200819 - DNA, 25 bp, Artificial
  Probe
agaagtatccggaacagcctggcag

SEQ ID NO: 200820 - DNA, 25 bp, Artificial
  Probe
tctgcagatcacctgaaactcctcg

SEQ ID NO: 200821 - DNA, 25 bp, Artificial
  Probe
cccttctttgctacttaaggggctg

SEQ ID NO: 200822 - DNA, 25 bp, Artificial
  Probe
gctgagtctggcagttcttggaaga

SEQ ID NO: 200823 - DNA, 25 bp, Artificial
  Probe
tacttaaggggctgagtctggcagt

SEQ ID NO: 200824 - DNA, 25 bp, Artificial
  Probe
ctttgctacttaaggggctgagtct

SEQ ID NO: 200825 - DNA, 25 bp, Artificial
  Probe
ataccaagcagaagtatccggaaca

SEQ ID NO: 200826 - DNA, 25 bp, Artificial
  Probe
ccctataccaagcagaagtatccgg

SEQ ID NO: 200827 - DNA, 25 bp, Artificial
  Probe
cgagccctataccaagcagaagtat

SEQ ID NO: 200828 - DNA, 25 bp, Artificial
  Probe
gcctggcaggtttgccaagcttctg

SEQ ID NO: 200829 - DNA, 25 bp, Artificial
  Probe
tgcagatcacctgaaactcctcggc

SEQ ID NO: 200830 - DNA, 25 bp, Artificial
  Probe
cctcatggagatgttggagacccct

SEQ ID NO: 200831 - DNA, 25 bp, Artificial
  Probe
gtctggcagttcttggaagagtagc

SEQ ID NO: 200832 - DNA, 25 bp, Artificial
  Probe
atgtgatgcttgtcccgaataacta

SEQ ID NO: 200833 - DNA, 25 bp, Artificial
  Probe
ccagctctgcgctccattggattga

SEQ ID NO: 200834 - DNA, 25 bp, Artificial
  Probe
aggtttgccaagcttctgctgcgcc

SEQ ID NO: 200835 - DNA, 25 bp, Artificial
  Probe
tggcagttcttggaagagtagccaa

SEQ ID NO: 200836 - DNA, 25 bp, Artificial
  Probe
agacccctctgcagatcacctgaaa

SEQ ID NO: 200837 - DNA, 25 bp, Artificial
  Probe
ctataccaagcagaagtatccggaa

SEQ ID NO: 200838 - DNA, 25 bp, Artificial
  Probe
aaatgtgatgcttgtcccgaataac

SEQ ID NO: 200839 - DNA, 25 bp, Artificial
  Probe
ccagtgaccttctctgcattaactg

SEQ ID NO: 200840 - DNA, 25 bp, Artificial
  Probe
gggagacccccgttaacagcactat

SEQ ID NO: 200841 - DNA, 25 bp, Artificial
  Probe
atcctgcctgtttccctcggtgatc

SEQ ID NO: 200842 - DNA, 25 bp, Artificial
  Probe
ccagtctgagcgtctccagtgacct

SEQ ID NO: 200843 - DNA, 25 bp, Artificial
  Probe
tacatctcaggctgcggctgctgct

SEQ ID NO: 200844 - DNA, 25 bp, Artificial
  Probe
cctcggtgatccatccgttcaggca

SEQ ID NO: 200845 - DNA, 25 bp, Artificial
  Probe
tgtttccctcggtgatccatccgtt

SEQ ID NO: 200846 - DNA, 25 bp, Artificial
  Probe
gtctccagtgaccttctctgcatta

SEQ ID NO: 200847 - DNA, 25 bp, Artificial
  Probe
cttctgtgcgctcctctgaagagcg

SEQ ID NO: 200848 - DNA, 25 bp, Artificial
  Probe
tgaccctacatctcaggctgcggct

SEQ ID NO: 200849 - DNA, 25 bp, Artificial
  Probe
gtgatccatccgttcaggcaatgga

SEQ ID NO: 200850 - DNA, 25 bp, Artificial
  Probe
gatccatccgttcaggcaatggaga

SEQ ID NO: 200851 - DNA, 25 bp, Artificial
  Probe
aaatcctgcctgtttccctcggtga

SEQ ID NO: 200852 - DNA, 25 bp, Artificial
  Probe
ttagctccaagtcctggcagggtgg

SEQ ID NO: 200853 - DNA, 25 bp, Artificial
  Probe
ctccaagcactctatctataaaggg

SEQ ID NO: 200854 - DNA, 25 bp, Artificial
  Probe
gctaaactgccaaaatcctgcctgt

SEQ ID NO: 200855 - DNA, 25 bp, Artificial
  Probe
tgcctgtttccctcggtgatccatc

SEQ ID NO: 200856 - DNA, 25 bp, Artificial
  Probe
tcttctgtgcgctcctctgaagagc

SEQ ID NO: 200857 - DNA, 25 bp, Artificial
  Probe
actgaccctacatctcaggctgcgg

SEQ ID NO: 200858 - DNA, 25 bp, Artificial
  Probe
gctcctctgaagagcgctgtacctc

SEQ ID NO: 200859 - DNA, 25 bp, Artificial
  Probe
gcattaactgtcagtgctacagata

SEQ ID NO: 200860 - DNA, 25 bp, Artificial
  Probe
ggaaatcatagcagtccatttctac

SEQ ID NO: 200861 - DNA, 25 bp, Artificial
  Probe
agaagttcttctgtgcgctcctctg

SEQ ID NO: 200862 - DNA, 25 bp, Artificial
  Probe
ttaagctgcagaaactgagaccacc

SEQ ID NO: 200863 - DNA, 25 bp, Artificial
  Probe
agcgctgtacctcctctgaactcat

SEQ ID NO: 200864 - DNA, 25 bp, Artificial
  Probe
tccctcggtgatccatccgttcagg

SEQ ID NO: 200865 - DNA, 25 bp, Artificial
  Probe
gaccctacatctcaggctgcggctg

SEQ ID NO: 200866 - DNA, 25 bp, Artificial
  Probe
ctcggtgatccatccgttcaggcaa

SEQ ID NO: 200867 - DNA, 25 bp, Artificial
  Probe
tctgtgcgctcctctgaagagcgct

SEQ ID NO: 200868 - DNA, 25 bp, Artificial
  Probe
tctgaggcagggtttggtgccccct

SEQ ID NO: 200869 - DNA, 25 bp, Artificial
  Probe
ctctatctataaagggaccccgcta

SEQ ID NO: 200870 - DNA, 25 bp, Artificial
  Probe
gctgctgctgtcacttcaggatgaa

SEQ ID NO: 200871 - DNA, 25 bp, Artificial
  Probe
atctccagtctgagcgtctccagtg

SEQ ID NO: 200872 - DNA, 25 bp, Artificial
  Probe
ccgcccttagattggaaatcatagc

SEQ ID NO: 200873 - DNA, 25 bp, Artificial
  Probe
ctgctgctgtcacttcaggatgaaa

SEQ ID NO: 200874 - DNA, 25 bp, Artificial
  Probe
tcacctggagctacgaaaaggtaaa

SEQ ID NO: 200875 - DNA, 25 bp, Artificial
  Probe
cgcccttagattggaaatcatagca

SEQ ID NO: 200876 - DNA, 25 bp, Artificial
  Probe
gaagttcttctgtgcgctcctctga

SEQ ID NO: 200877 - DNA, 25 bp, Artificial
  Probe
tctgaagagcgctgtacctcctctg

SEQ ID NO: 200878 - DNA, 25 bp, Artificial
  Probe
aactgtcagtgctacagatattttt

SEQ ID NO: 200879 - DNA, 25 bp, Artificial
  Probe
tatttttagctccaagtcctggcag

SEQ ID NO: 200880 - DNA, 25 bp, Artificial
  Probe
cctccaaggatctccagtctgagcg

SEQ ID NO: 200881 - DNA, 25 bp, Artificial
  Probe
ttaactgtcagtgctacagatattt

SEQ ID NO: 200882 - DNA, 25 bp, Artificial
  Probe
ccttctctgcattaactgtcagtgc

SEQ ID NO: 200883 - DNA, 25 bp, Artificial
  Probe
cgctaaactgccaaaatcctgcctg

SEQ ID NO: 200884 - DNA, 25 bp, Artificial
  Probe
acagcactatgagtattggccaagc

SEQ ID NO: 200885 - DNA, 25 bp, Artificial
  Probe
gcatacagaatgcatgcaaggacgc

SEQ ID NO: 200886 - DNA, 25 bp, Artificial
  Probe
ctgctgcttggtgttccggctggaa

SEQ ID NO: 200887 - DNA, 25 bp, Artificial
  Probe
atacagaatgcatgcaaggacgccc

SEQ ID NO: 200888 - DNA, 25 bp, Artificial
  Probe
agagcttcagcagtactgcatacag

SEQ ID NO: 200889 - DNA, 25 bp, Artificial
  Probe
ttcagcagtactgcatacagaatgc

SEQ ID NO: 200890 - DNA, 25 bp, Artificial
  Probe
cagagcttcagcagtactgcataca

SEQ ID NO: 200891 - DNA, 25 bp, Artificial
  Probe
tgctgcttggtgttccggctggaag

SEQ ID NO: 200892 - DNA, 25 bp, Artificial
  Probe
acagaatgcatgcaaggacgccctg

SEQ ID NO: 200893 - DNA, 25 bp, Artificial
  Probe
agcagtactgcatacagaatgcatg

SEQ ID NO: 200894 - DNA, 25 bp, Artificial
  Probe
tcagcagtactgcatacagaatgca

SEQ ID NO: 200895 - DNA, 25 bp, Artificial
  Probe
tactgcatacagaatgcatgcaagg

SEQ ID NO: 200896 - DNA, 25 bp, Artificial
  Probe
tctcaggcagctgcagagcttcagc

SEQ ID NO: 200897 - DNA, 25 bp, Artificial
  Probe
catgcaaggacgccctgctgcttgg

SEQ ID NO: 200898 - DNA, 25 bp, Artificial
  Probe
ctctcaggcagctgcagagcttcag

SEQ ID NO: 200899 - DNA, 25 bp, Artificial
  Probe
gtactgcatacagaatgcatgcaag

SEQ ID NO: 200900 - DNA, 25 bp, Artificial
  Probe
gcagagcttcagcagtactgcatac

SEQ ID NO: 200901 - DNA, 25 bp, Artificial
  Probe
catacagaatgcatgcaaggacgcc

SEQ ID NO: 200902 - DNA, 25 bp, Artificial
  Probe
aatgcatgcaaggacgccctgctgc

SEQ ID NO: 200903 - DNA, 25 bp, Artificial
  Probe
gcatgcaaggacgccctgctgcttg

SEQ ID NO: 200904 - DNA, 25 bp, Artificial
  Probe
tgcatacagaatgcatgcaaggacg

SEQ ID NO: 200905 - DNA, 25 bp, Artificial
  Probe
agtactgcatacagaatgcatgcaa

SEQ ID NO: 200906 - DNA, 25 bp, Artificial
  Probe
gcagtactgcatacagaatgcatgc

SEQ ID NO: 200907 - DNA, 25 bp, Artificial
  Probe
tgcatgcaaggacgccctgctgctt

SEQ ID NO: 200908 - DNA, 25 bp, Artificial
  Probe
tcaggcagctgcagagcttcagcag

SEQ ID NO: 200909 - DNA, 25 bp, Artificial
  Probe
cagcagtactgcatacagaatgcat

SEQ ID NO: 200910 - DNA, 25 bp, Artificial
  Probe
agcttcagcagtactgcatacagaa

SEQ ID NO: 200911 - DNA, 25 bp, Artificial
  Probe
agaatgcatgcaaggacgccctgct

SEQ ID NO: 200912 - DNA, 25 bp, Artificial
  Probe
ctgcatacagaatgcatgcaaggac

SEQ ID NO: 200913 - DNA, 25 bp, Artificial
  Probe
ctcaggcagctgcagagcttcagca

SEQ ID NO: 200914 - DNA, 25 bp, Artificial
  Probe
atgcatgcaaggacgccctgctgct

SEQ ID NO: 200915 - DNA, 25 bp, Artificial
  Probe
gcttcagcagtactgcatacagaat

SEQ ID NO: 200916 - DNA, 25 bp, Artificial
  Probe
tgcagagcttcagcagtactgcata

SEQ ID NO: 200917 - DNA, 25 bp, Artificial
  Probe
acgccctgctgcttggtgttccggc

SEQ ID NO: 200918 - DNA, 25 bp, Artificial
  Probe
cagtactgcatacagaatgcatgca

SEQ ID NO: 200919 - DNA, 25 bp, Artificial
  Probe
tctctcaggcagctgcagagcttca

SEQ ID NO: 200920 - DNA, 25 bp, Artificial
  Probe
cttcagcagtactgcatacagaatg

SEQ ID NO: 200921 - DNA, 25 bp, Artificial
  Probe
gtctctcaggcagctgcagagcttc

SEQ ID NO: 200922 - DNA, 25 bp, Artificial
  Probe
gagcttcagcagtactgcatacaga

SEQ ID NO: 200923 - DNA, 25 bp, Artificial
  Probe
actgcatacagaatgcatgcaagga

SEQ ID NO: 200924 - DNA, 25 bp, Artificial
  Probe
gaatgcatgcaaggacgccctgctg

SEQ ID NO: 200925 - DNA, 25 bp, Artificial
  Probe
gctgcttggtgttccggctggaagc

SEQ ID NO: 200926 - DNA, 25 bp, Artificial
  Probe
ggtctctcaggcagctgcagagctt

SEQ ID NO: 200927 - DNA, 25 bp, Artificial
  Probe
aggcagctgcagagcttcagcagta

SEQ ID NO: 200928 - DNA, 25 bp, Artificial
  Probe
gattcagccggagttcagatcttaa

SEQ ID NO: 200929 - DNA, 25 bp, Artificial
  Probe
ggattcagccggagttcagatctta

SEQ ID NO: 200930 - DNA, 25 bp, Artificial
  Probe
tccaagtgcatcagagggtccacag

SEQ ID NO: 200931 - DNA, 25 bp, Artificial
  Probe
ggcgtccaactttctagctcatcgt

SEQ ID NO: 200932 - DNA, 25 bp, Artificial
  Probe
aacgttcattgtagaatccacacag

SEQ ID NO: 200933 - DNA, 25 bp, Artificial
  Probe
agggtccacagtgaagacaaaccgt

SEQ ID NO: 200934 - DNA, 25 bp, Artificial
  Probe
agttcagatcttaacgttcattgta

SEQ ID NO: 200935 - DNA, 25 bp, Artificial
  Probe
agctcatcgtggagttcacacagga

SEQ ID NO: 200936 - DNA, 25 bp, Artificial
  Probe
agagggtccacagtgaagacaaacc

SEQ ID NO: 200937 - DNA, 25 bp, Artificial
  Probe
cttcagtgtagagtctcaccttcaa

SEQ ID NO: 200938 - DNA, 25 bp, Artificial
  Probe
ttctgtcgggcgtccaactttctag

SEQ ID NO: 200939 - DNA, 25 bp, Artificial
  Probe
tctgtcgggcgtccaactttctagc

SEQ ID NO: 200940 - DNA, 25 bp, Artificial
  Probe
gcatcagagggtccacagtgaagac

SEQ ID NO: 200941 - DNA, 25 bp, Artificial
  Probe
tcttcagttggagctcatacctcaa

SEQ ID NO: 200942 - DNA, 25 bp, Artificial
  Probe
tctccaagtgcatcagagggtccac

SEQ ID NO: 200943 - DNA, 25 bp, Artificial
  Probe
ggagttcagatcttaacgttcattg

SEQ ID NO: 200944 - DNA, 25 bp, Artificial
  Probe
tttctagctcatcgtggagttcaca

SEQ ID NO: 200945 - DNA, 25 bp, Artificial
  Probe
ttctggcccatcagagaggccacac

SEQ ID NO: 200946 - DNA, 25 bp, Artificial
  Probe
ttcagtcgagtctcaattctccaag

SEQ ID NO: 200947 - DNA, 25 bp, Artificial
  Probe
agatcttaacgttcattgtagaatc

SEQ ID NO: 200948 - DNA, 25 bp, Artificial
  Probe
ttcattgtagaatccacacaggaga

SEQ ID NO: 200949 - DNA, 25 bp, Artificial
  Probe
aacgcttccggcagaggtcctacct

SEQ ID NO: 200950 - DNA, 25 bp, Artificial
  Probe
ggcttcagtgtagagtctcaccttc

SEQ ID NO: 200951 - DNA, 25 bp, Artificial
  Probe
aagggcttcagtgtagagtctcacc

SEQ ID NO: 200952 - DNA, 25 bp, Artificial
  Probe
tgtcgggcgtccaactttctagctc

SEQ ID NO: 200953 - DNA, 25 bp, Artificial
  Probe
gccttcagtcgagtctcaattctcc

SEQ ID NO: 200954 - DNA, 25 bp, Artificial
  Probe
agtgtagagtctcaccttcaagccc

SEQ ID NO: 200955 - DNA, 25 bp, Artificial
  Probe
tctggcccatcagagaggccacacg

SEQ ID NO: 200956 - DNA, 25 bp, Artificial
  Probe
ccggagttcagatcttaacgttcat

SEQ ID NO: 200957 - DNA, 25 bp, Artificial
  Probe
agccggagttcagatcttaacgttc

SEQ ID NO: 200958 - DNA, 25 bp, Artificial
  Probe
caagtgcatcagagggtccacagtg

SEQ ID NO: 200959 - DNA, 25 bp, Artificial
  Probe
caaaccgtatcagtgctcagagtgt

SEQ ID NO: 200960 - DNA, 25 bp, Artificial
  Probe
ccaactttctagctcatcgtggagt

SEQ ID NO: 200961 - DNA, 25 bp, Artificial
  Probe
agtctcaattctccaagtgcatcag

SEQ ID NO: 200962 - DNA, 25 bp, Artificial
  Probe
gtaaagccttcagtcgagtctcaat

SEQ ID NO: 200963 - DNA, 25 bp, Artificial
  Probe
gacaaaccgtatcagtgctcagagt

SEQ ID NO: 200964 - DNA, 25 bp, Artificial
  Probe
gaagacaaaccgtatcagtgctcag

SEQ ID NO: 200965 - DNA, 25 bp, Artificial
  Probe
agggcttcagtgtagagtctcacct

SEQ ID NO: 200966 - DNA, 25 bp, Artificial
  Probe
ctagctcatcgtggagttcacacag

SEQ ID NO: 200967 - DNA, 25 bp, Artificial
  Probe
aattctccaagtgcatcagagggtc

SEQ ID NO: 200968 - DNA, 25 bp, Artificial
  Probe
tgtagagtctcaccttcaagcccac

SEQ ID NO: 200969 - DNA, 25 bp, Artificial
  Probe
gagaggcttctgtcgggcgtccaac

SEQ ID NO: 200970 - DNA, 25 bp, Artificial
  Probe
gttggagctcatacctcaaagccca

SEQ ID NO: 200971 - DNA, 25 bp, Artificial
  Probe
cgagtctcaattctccaagtgcatc

SEQ ID NO: 200972 - DNA, 25 bp, Artificial
  Probe
cagccggagttcagatcttaacgtt

SEQ ID NO: 200973 - DNA, 25 bp, Artificial
  Probe
gatcttaacgttcattgtagaatcc

SEQ ID NO: 200974 - DNA, 25 bp, Artificial
  Probe
ctgtggccatttaaggctgcatgga

SEQ ID NO: 200975 - DNA, 25 bp, Artificial
  Probe
gaaatatccataactaactgtggcc

SEQ ID NO: 200976 - DNA, 25 bp, Artificial
  Probe
ggctttgtcttaacttgtgccagtc

SEQ ID NO: 200977 - DNA, 25 bp, Artificial
  Probe
caatctacagacatgcagttgtttt

SEQ ID NO: 200978 - DNA, 25 bp, Artificial
  Probe
gttcttcagcaaatagacatgacca

SEQ ID NO: 200979 - DNA, 25 bp, Artificial
  Probe
aaggccccttcttgtctgtattcac

SEQ ID NO: 200980 - DNA, 25 bp, Artificial
  Probe
agttcttcagcaaatagacatgacc

SEQ ID NO: 200981 - DNA, 25 bp, Artificial
  Probe
acgggctttgtcttaacttgtgcca

SEQ ID NO: 200982 - DNA, 25 bp, Artificial
  Probe
actcagagccaattgatattgatat

SEQ ID NO: 200983 - DNA, 25 bp, Artificial
  Probe
tgtgtatttttccttgtcaaggccc

SEQ ID NO: 200984 - DNA, 25 bp, Artificial
  Probe
ctaactgtggccatttaaggctgca

SEQ ID NO: 200985 - DNA, 25 bp, Artificial
  Probe
aagttcttcagcaaatagacatgac

SEQ ID NO: 200986 - DNA, 25 bp, Artificial
  Probe
agaagttcttcagcaaatagacatg

SEQ ID NO: 200987 - DNA, 25 bp, Artificial
  Probe
gccatttaaggctgcatggatctgc

SEQ ID NO: 200988 - DNA, 25 bp, Artificial
  Probe
ttgagaagttcttcagcaaatagac

SEQ ID NO: 200989 - DNA, 25 bp, Artificial
  Probe
tctgtgtatttttccttgtcaaggc

SEQ ID NO: 200990 - DNA, 25 bp, Artificial
  Probe
aatagacatgaccaaaaagtgattc

SEQ ID NO: 200991 - DNA, 25 bp, Artificial
  Probe
ctctgtgtatttttccttgtcaagg

SEQ ID NO: 200992 - DNA, 25 bp, Artificial
  Probe
tttgtcttaacttgtgccagtcctc

SEQ ID NO: 200993 - DNA, 25 bp, Artificial
  Probe
gattgccaatccatctctgtgtatt

SEQ ID NO: 200994 - DNA, 25 bp, Artificial
  Probe
ggccccttcttgtctgtattcacat

SEQ ID NO: 200995 - DNA, 25 bp, Artificial
  Probe
caatcacgggctttgtcttaacttg

SEQ ID NO: 200996 - DNA, 25 bp, Artificial
  Probe
aaactcagagccaattgatattgat

SEQ ID NO: 200997 - DNA, 25 bp, Artificial
  Probe
ccataactaactgtggccatttaag

SEQ ID NO: 200998 - DNA, 25 bp, Artificial
  Probe
caaggccccttcttgtctgtattca

SEQ ID NO: 200999 - DNA, 25 bp, Artificial
  Probe
tgtcaaggccccttcttgtctgtat

SEQ ID NO: 201000 - DNA, 25 bp, Artificial
  Probe
acgacaatccctaatcttgagattg

SEQ ID NO: 201001 - DNA, 25 bp, Artificial
  Probe
gaagttcttcagcaaatagacatga

SEQ ID NO: 201002 - DNA, 25 bp, Artificial
  Probe
tcacgggctttgtcttaacttgtgc

SEQ ID NO: 201003 - DNA, 25 bp, Artificial
  Probe
ccaatcacgggctttgtcttaactt

SEQ ID NO: 201004 - DNA, 25 bp, Artificial
  Probe
ttttccttgtcaaggccccttcttg

SEQ ID NO: 201005 - DNA, 25 bp, Artificial
  Probe
cttgagattgccaatccatctctgt

SEQ ID NO: 201006 - DNA, 25 bp, Artificial
  Probe
gtcaaggccccttcttgtctgtatt

SEQ ID NO: 201007 - DNA, 25 bp, Artificial
  Probe
ctcagagccaattgatattgatata

SEQ ID NO: 201008 - DNA, 25 bp, Artificial
  Probe
atttaaggctgcatggatctgcccc

SEQ ID NO: 201009 - DNA, 25 bp, Artificial
  Probe
tgagattgccaatccatctctgtgt

SEQ ID NO: 201010 - DNA, 25 bp, Artificial
  Probe
tgtggccatttaaggctgcatggat

SEQ ID NO: 201011 - DNA, 25 bp, Artificial
  Probe
ccatttaaggctgcatggatctgcc

SEQ ID NO: 201012 - DNA, 25 bp, Artificial
  Probe
cataactaactgtggccatttaagg

SEQ ID NO: 201013 - DNA, 25 bp, Artificial
  Probe
caacaatctacagacatgcagttgt

SEQ ID NO: 201014 - DNA, 25 bp, Artificial
  Probe
tgtatttttccttgtcaaggcccct

SEQ ID NO: 201015 - DNA, 25 bp, Artificial
  Probe
acaatctacagacatgcagttgttt

SEQ ID NO: 201016 - DNA, 25 bp, Artificial
  Probe
actttctgaattgagaagttcttca

SEQ ID NO: 201017 - DNA, 25 bp, Artificial
  Probe
acaacaatctacagacatgcagttg

SEQ ID NO: 201018 - DNA, 25 bp, Artificial
  Probe
aactttctgaattgagaagttcttc

SEQ ID NO: 201019 - DNA, 25 bp, Artificial
  Probe
agattgccaatccatctctgtgtat

SEQ ID NO: 201020 - DNA, 25 bp, Artificial
  Probe
ccctaacagggaagacaaagggatg

SEQ ID NO: 201021 - DNA, 25 bp, Artificial
  Probe
agatgtgtgtcctgaaccgccctgt

SEQ ID NO: 201022 - DNA, 25 bp, Artificial
  Probe
taacagctaggagatgtcgaagcgg

SEQ ID NO: 201023 - DNA, 25 bp, Artificial
  Probe
atgttgggcatatgaccctttattt

SEQ ID NO: 201024 - DNA, 25 bp, Artificial
  Probe
ctcagacaagaccacgtatatactg

SEQ ID NO: 201025 - DNA, 25 bp, Artificial
  Probe
agcataactcgctttggagctgggg

SEQ ID NO: 201026 - DNA, 25 bp, Artificial
  Probe
tgtggacatgccagggactcagaca

SEQ ID NO: 201027 - DNA, 25 bp, Artificial
  Probe
acaatgcgcttctgtggccacctgg

SEQ ID NO: 201028 - DNA, 25 bp, Artificial
  Probe
ccctgttgtgcaaggagagagagca

SEQ ID NO: 201029 - DNA, 25 bp, Artificial
  Probe
aagtgcaggacatgggctccgtctt

SEQ ID NO: 201030 - DNA, 25 bp, Artificial
  Probe
ccaagcccatttggatggatcaaca

SEQ ID NO: 201031 - DNA, 25 bp, Artificial
  Probe
gacaaacccccagagagcttgcgaa

SEQ ID NO: 201032 - DNA, 25 bp, Artificial
  Probe
agcctggaagtttggccctggatcc

SEQ ID NO: 201033 - DNA, 25 bp, Artificial
  Probe
gatcaacacagattacatgccaaag

SEQ ID NO: 201034 - DNA, 25 bp, Artificial
  Probe
ataacagctaggagatgtcgaagcg

SEQ ID NO: 201035 - DNA, 25 bp, Artificial
  Probe
tactccaggaagaataacagctagg

SEQ ID NO: 201036 - DNA, 25 bp, Artificial
  Probe
ccttggaggccctggaagccgagct

SEQ ID NO: 201037 - DNA, 25 bp, Artificial
  Probe
ggtcccgaaccctgaggaggcctct

SEQ ID NO: 201038 - DNA, 25 bp, Artificial
  Probe
atagagctataactctagagtggcc

SEQ ID NO: 201039 - DNA, 25 bp, Artificial
  Probe
gggctccgtcttaaatacatccttc

SEQ ID NO: 201040 - DNA, 25 bp, Artificial
  Probe
tgccccatgccaaacattggctgag

SEQ ID NO: 201041 - DNA, 25 bp, Artificial
  Probe
tgccaaagaaccacacctctgattg

SEQ ID NO: 201042 - DNA, 25 bp, Artificial
  Probe
ttcactggaacctaggatctcccac

SEQ ID NO: 201043 - DNA, 25 bp, Artificial
  Probe
tcagttgggtgtccagatgtgtgtc

SEQ ID NO: 201044 - DNA, 25 bp, Artificial
  Probe
agttcaaggaggagaccgagagccc

SEQ ID NO: 201045 - DNA, 25 bp, Artificial
  Probe
taaagcaggccctgccaggctctgc

SEQ ID NO: 201046 - DNA, 25 bp, Artificial
  Probe
agagagagcagaccttggaggccct

SEQ ID NO: 201047 - DNA, 25 bp, Artificial
  Probe
ctgtaggtgctggactcatgggcct

SEQ ID NO: 201048 - DNA, 25 bp, Artificial
  Probe
ccaaacattggctgagctggggttt

SEQ ID NO: 201049 - DNA, 25 bp, Artificial
  Probe
ttccccttgagctgcggggcctctg

SEQ ID NO: 201050 - DNA, 25 bp, Artificial
  Probe
cttctgggctattaaactataaagg

SEQ ID NO: 201051 - DNA, 25 bp, Artificial
  Probe
cccgccatggtgtggccctgttgtg

SEQ ID NO: 201052 - DNA, 25 bp, Artificial
  Probe
gggtgtaaggcctgtttctgactat

SEQ ID NO: 201053 - DNA, 25 bp, Artificial
  Probe
cccatccgttttacagttgggatag

SEQ ID NO: 201054 - DNA, 25 bp, Artificial
  Probe
ctctttcggggaatggagatttcta

SEQ ID NO: 201055 - DNA, 25 bp, Artificial
  Probe
gaccccttggatgcagccctctgaa

SEQ ID NO: 201056 - DNA, 25 bp, Artificial
  Probe
tacccggctccagtttatttgccct

SEQ ID NO: 201057 - DNA, 25 bp, Artificial
  Probe
cctctggccatgaggctgtgcttgg

SEQ ID NO: 201058 - DNA, 25 bp, Artificial
  Probe
agatttctaaagagacttctgggct

SEQ ID NO: 201059 - DNA, 25 bp, Artificial
  Probe
ctctgccaaagtgtggtaaagggaa

SEQ ID NO: 201060 - DNA, 25 bp, Artificial
  Probe
gaagccgagctgcaggcagaagcca

SEQ ID NO: 201061 - DNA, 25 bp, Artificial
  Probe
ggcctctgtgccacactgtaagacc

SEQ ID NO: 201062 - DNA, 25 bp, Artificial
  Probe
tcccaaaactgttccggaaggccag

SEQ ID NO: 201063 - DNA, 25 bp, Artificial
  Probe
ggcctctggccatgaggctgtgctt

SEQ ID NO: 201064 - DNA, 25 bp, Artificial
  Probe
ccggaaggccagacttggctggcct

SEQ ID NO: 201065 - DNA, 25 bp, Artificial
  Probe
cgaaccctgaggaggcctctggcca

SEQ ID NO: 201066 - DNA, 25 bp, Artificial
  Probe
gtcagaagtcacacctcatcgtaca

SEQ ID NO: 201067 - DNA, 25 bp, Artificial
  Probe
tgcttctcttaccagacatatgaag

SEQ ID NO: 201068 - DNA, 25 bp, Artificial
  Probe
atcaaaatctaaatacgacgaagcg

SEQ ID NO: 201069 - DNA, 25 bp, Artificial
  Probe
gcttctcttaccagacatatgaaga

SEQ ID NO: 201070 - DNA, 25 bp, Artificial
  Probe
cccagttatgaggttgcaagatgca

SEQ ID NO: 201071 - DNA, 25 bp, Artificial
  Probe
tcaagcaaatcgagggccttactca

SEQ ID NO: 201072 - DNA, 25 bp, Artificial
  Probe
gtgcttagccaccacaattagtatt

SEQ ID NO: 201073 - DNA, 25 bp, Artificial
  Probe
gtgtgttttactgtacaatggccat

SEQ ID NO: 201074 - DNA, 25 bp, Artificial
  Probe
cttgaactccccaaaaatgtgcctg

SEQ ID NO: 201075 - DNA, 25 bp, Artificial
  Probe
gaccacatgaccaaaatatggttta

SEQ ID NO: 201076 - DNA, 25 bp, Artificial
  Probe
ttgaatgtggcaaggccttcaaaca

SEQ ID NO: 201077 - DNA, 25 bp, Artificial
  Probe
gagaaaccctataaaccctatgagt

SEQ ID NO: 201078 - DNA, 25 bp, Artificial
  Probe
gggccttactcaacaccagagagtt

SEQ ID NO: 201079 - DNA, 25 bp, Artificial
  Probe
gacatatgaagactcactcggaaga

SEQ ID NO: 201080 - DNA, 25 bp, Artificial
  Probe
tttactgtacaatggccatattgat

SEQ ID NO: 201081 - DNA, 25 bp, Artificial
  Probe
tcagggattctcttagcctcacttt

SEQ ID NO: 201082 - DNA, 25 bp, Artificial
  Probe
accctatgagtgtgttgaatgtggc

SEQ ID NO: 201083 - DNA, 25 bp, Artificial
  Probe
aagggaactcgtgttacacacacac

SEQ ID NO: 201084 - DNA, 25 bp, Artificial
  Probe
catgctgaccttgaagtttttatgt

SEQ ID NO: 201085 - DNA, 25 bp, Artificial
  Probe
tttgaaatgtttaaccctcaagatg

SEQ ID NO: 201086 - DNA, 25 bp, Artificial
  Probe
gctaaccaagaacttgttatgttaa

SEQ ID NO: 201087 - DNA, 25 bp, Artificial
  Probe
ggaactcgtgttacacacacacaca

SEQ ID NO: 201088 - DNA, 25 bp, Artificial
  Probe
taatgtgggaactctgacaggtgac

SEQ ID NO: 201089 - DNA, 25 bp, Artificial
  Probe
tcagtcagaagtcacacctcatcgt

SEQ ID NO: 201090 - DNA, 25 bp, Artificial
  Probe
agaagaccacatgaccaaaatatgg

SEQ ID NO: 201091 - DNA, 25 bp, Artificial
  Probe
tgaacagaatcttaccatattagtg

SEQ ID NO: 201092 - DNA, 25 bp, Artificial
  Probe
acttgttatgttaaaccatgctgac

SEQ ID NO: 201093 - DNA, 25 bp, Artificial
  Probe
tgttatgttaaaccatgctgacctt

SEQ ID NO: 201094 - DNA, 25 bp, Artificial
  Probe
ttagcctcactttcccagttatgag

SEQ ID NO: 201095 - DNA, 25 bp, Artificial
  Probe
ctcggaagaacaatctcaggaggaa

SEQ ID NO: 201096 - DNA, 25 bp, Artificial
  Probe
ctagcttcctttgttaatgtcttcg

SEQ ID NO: 201097 - DNA, 25 bp, Artificial
  Probe
aactttctttccaggaaatagtgtg

SEQ ID NO: 201098 - DNA, 25 bp, Artificial
  Probe
gaaaggccttcaatgcaaaatcaca

SEQ ID NO: 201099 - DNA, 25 bp, Artificial
  Probe
ccctcaagatgtatttagtttgatg

SEQ ID NO: 201100 - DNA, 25 bp, Artificial
  Probe
taatgattggccaggtagtctcagg

SEQ ID NO: 201101 - DNA, 25 bp, Artificial
  Probe
aggttgcaagatgcacagcagcaaa

SEQ ID NO: 201102 - DNA, 25 bp, Artificial
  Probe
tgcggaaaggccttcaatgcaaaat

SEQ ID NO: 201103 - DNA, 25 bp, Artificial
  Probe
ctttctttccaggaaatagtgtgtt

SEQ ID NO: 201104 - DNA, 25 bp, Artificial
  Probe
gctcacggaacatcataactacgaa

SEQ ID NO: 201105 - DNA, 25 bp, Artificial
  Probe
tatgtttactgaaatactagggcct

SEQ ID NO: 201106 - DNA, 25 bp, Artificial
  Probe
actagggcctgtgtaaaatacaggc

SEQ ID NO: 201107 - DNA, 25 bp, Artificial
  Probe
cagtaattcatgtactttttacgcg

SEQ ID NO: 201108 - DNA, 25 bp, Artificial
  Probe
gcgagggtatcctctggtatcgcct

SEQ ID NO: 201109 - DNA, 25 bp, Artificial
  Probe
ctctgacaggtgactggtttgaaat

SEQ ID NO: 201110 - DNA, 25 bp, Artificial
  Probe
gatgcacagcagcaaaatcaaaatc

SEQ ID NO: 201111 - DNA, 25 bp, Artificial
  Probe
ttaaaccatgctgaccttgaagttt

SEQ ID NO: 201112 - DNA, 25 bp, Artificial
  Probe
tgaccatggctctggggaagactgt

SEQ ID NO: 201113 - DNA, 25 bp, Artificial
  Probe
cacgaatagaagctgaccgggaggc

SEQ ID NO: 201114 - DNA, 25 bp, Artificial
  Probe
ggagcaaaggtcacatccattttgc

SEQ ID NO: 201115 - DNA, 25 bp, Artificial
  Probe
cttatctgtgccagagtggcagctg

SEQ ID NO: 201116 - DNA, 25 bp, Artificial
  Probe
tccttggctctcagtcgcttccaaa

SEQ ID NO: 201117 - DNA, 25 bp, Artificial
  Probe
aacacagcaagaagtcaactatgga

SEQ ID NO: 201118 - DNA, 25 bp, Artificial
  Probe
cttgtggcatgaggacacgaataga

SEQ ID NO: 201119 - DNA, 25 bp, Artificial
  Probe
ttcccacacggctgtctgcgagttc

SEQ ID NO: 201120 - DNA, 25 bp, Artificial
  Probe
cacacggctgtctgcgagttcccag

SEQ ID NO: 201121 - DNA, 25 bp, Artificial
  Probe
tgtgtcactatagtagacaacggtc

SEQ ID NO: 201122 - DNA, 25 bp, Artificial
  Probe
ggctctggggaagactgtgtcacta

SEQ ID NO: 201123 - DNA, 25 bp, Artificial
  Probe
caccagaggaccaaaggtggtcctt

SEQ ID NO: 201124 - DNA, 25 bp, Artificial
  Probe
atctggttgagcacggagcaaaggt

SEQ ID NO: 201125 - DNA, 25 bp, Artificial
  Probe
aaattcagttactggtttctcaagt

SEQ ID NO: 201126 - DNA, 25 bp, Artificial
  Probe
tgagcacggagcaaaggtcacatcc

SEQ ID NO: 201127 - DNA, 25 bp, Artificial
  Probe
ggttgagcacggagcaaaggtcaca

SEQ ID NO: 201128 - DNA, 25 bp, Artificial
  Probe
tgtggaatgacatctcctgccaagc

SEQ ID NO: 201129 - DNA, 25 bp, Artificial
  Probe
gaatagaagctgaccgggaggcacc

SEQ ID NO: 201130 - DNA, 25 bp, Artificial
  Probe
caacggtctgtggaatgacatctcc

SEQ ID NO: 201131 - DNA, 25 bp, Artificial
  Probe
gcccaatgaccatggctctggggaa

SEQ ID NO: 201132 - DNA, 25 bp, Artificial
  Probe
cagcctgaggaaaccagtgcctcca

SEQ ID NO: 201133 - DNA, 25 bp, Artificial
  Probe
atccattttgctaggaacacagcaa

SEQ ID NO: 201134 - DNA, 25 bp, Artificial
  Probe
ctctggggaagactgtgtcactata

SEQ ID NO: 201135 - DNA, 25 bp, Artificial
  Probe
gaatgacatctcctgccaagcttcc

SEQ ID NO: 201136 - DNA, 25 bp, Artificial
  Probe
aggaccaaaggtggtccttatctgt

SEQ ID NO: 201137 - DNA, 25 bp, Artificial
  Probe
tgccagagtggcagctgatctcagc

SEQ ID NO: 201138 - DNA, 25 bp, Artificial
  Probe
ggtccttatctgtgccagagtggca

SEQ ID NO: 201139 - DNA, 25 bp, Artificial
  Probe
aatgaccatggctctggggaagact

SEQ ID NO: 201140 - DNA, 25 bp, Artificial
  Probe
tttgctaggaacacagcaagaagtc

SEQ ID NO: 201141 - DNA, 25 bp, Artificial
  Probe
agtagacaacggtctgtggaatgac

SEQ ID NO: 201142 - DNA, 25 bp, Artificial
  Probe
gaggcaccaggatctggttgagcac

SEQ ID NO: 201143 - DNA, 25 bp, Artificial
  Probe
gagttcccagcctgaggaaaccagt

SEQ ID NO: 201144 - DNA, 25 bp, Artificial
  Probe
aagactgtgtcactatagtagacaa

SEQ ID NO: 201145 - DNA, 25 bp, Artificial
  Probe
ctatagtagacaacggtctgtggaa

SEQ ID NO: 201146 - DNA, 25 bp, Artificial
  Probe
ggaagactgtgtcactatagtagac

SEQ ID NO: 201147 - DNA, 25 bp, Artificial
  Probe
tgaggaaaccagtgcctccatcgtc

SEQ ID NO: 201148 - DNA, 25 bp, Artificial
  Probe
tttgcttgtggcatgaggacacgaa

SEQ ID NO: 201149 - DNA, 25 bp, Artificial
  Probe
tctgtgccagagtggcagctgatct

SEQ ID NO: 201150 - DNA, 25 bp, Artificial
  Probe
cagttactggtttctcaagtttagt

SEQ ID NO: 201151 - DNA, 25 bp, Artificial
  Probe
ctgtctgcgagttcccagcctgagg

SEQ ID NO: 201152 - DNA, 25 bp, Artificial
  Probe
ctgcgagttcccagcctgaggaaac

SEQ ID NO: 201153 - DNA, 25 bp, Artificial
  Probe
ggctgtctgcgagttcccagcctga

SEQ ID NO: 201154 - DNA, 25 bp, Artificial
  Probe
cttggctctcagtcgcttccaaaga

SEQ ID NO: 201155 - DNA, 25 bp, Artificial
  Probe
ctgcccttttcaccagaggaccaaa

SEQ ID NO: 201156 - DNA, 25 bp, Artificial
  Probe
aagctgaccgggaggcaccaggatc

SEQ ID NO: 201157 - DNA, 25 bp, Artificial
  Probe
gctaggaacacagcaagaagtcaac

SEQ ID NO: 201158 - DNA, 25 bp, Artificial
  Probe
accatcagtccttcctcataataac

SEQ ID NO: 201159 - DNA, 25 bp, Artificial
  Probe
ccatcagtccttcctcataataacc

SEQ ID NO: 201160 - DNA, 25 bp, Artificial
  Probe
gataccatcagtccttcctcataat

SEQ ID NO: 201161 - DNA, 25 bp, Artificial
  Probe
gacacaagggacacaaacagccatg

SEQ ID NO: 201162 - DNA, 25 bp, Artificial
  Probe
tcctcataataaccctggaagggct

SEQ ID NO: 201163 - DNA, 25 bp, Artificial
  Probe
accctggaagggctaggaggacaca

SEQ ID NO: 201164 - DNA, 25 bp, Artificial
  Probe
acaggataccatcagtccttcctca

SEQ ID NO: 201165 - DNA, 25 bp, Artificial
  Probe
cagtccttcctcataataaccctgg

SEQ ID NO: 201166 - DNA, 25 bp, Artificial
  Probe
ataataaccctggaagggctaggag

SEQ ID NO: 201167 - DNA, 25 bp, Artificial
  Probe
caagggacacaaacagccatgtgct

SEQ ID NO: 201168 - DNA, 25 bp, Artificial
  Probe
tccttcctcataataaccctggaag

SEQ ID NO: 201169 - DNA, 25 bp, Artificial
  Probe
agggacacaaacagccatgtgctgg

SEQ ID NO: 201170 - DNA, 25 bp, Artificial
  Probe
gggacacaaacagccatgtgctggg

SEQ ID NO: 201171 - DNA, 25 bp, Artificial
  Probe
ttaatacaggataccatcagtcctt

SEQ ID NO: 201172 - DNA, 25 bp, Artificial
  Probe
tcagtccttcctcataataaccctg

SEQ ID NO: 201173 - DNA, 25 bp, Artificial
  Probe
taataaccctggaagggctaggagg

SEQ ID NO: 201174 - DNA, 25 bp, Artificial
  Probe
ttcctcataataaccctggaagggc

SEQ ID NO: 201175 - DNA, 25 bp, Artificial
  Probe
cataataaccctggaagggctagga

SEQ ID NO: 201176 - DNA, 25 bp, Artificial
  Probe
ggacacaaacagccatgtgctgggc

SEQ ID NO: 201177 - DNA, 25 bp, Artificial
  Probe
aggataccatcagtccttcctcata

SEQ ID NO: 201178 - DNA, 25 bp, Artificial
  Probe
cctcataataaccctggaagggcta

SEQ ID NO: 201179 - DNA, 25 bp, Artificial
  Probe
acaaacagccatgtgctgggctctg

SEQ ID NO: 201180 - DNA, 25 bp, Artificial
  Probe
cttcctcataataaccctggaaggg

SEQ ID NO: 201181 - DNA, 25 bp, Artificial
  Probe
gttaatacaggataccatcagtcct

SEQ ID NO: 201182 - DNA, 25 bp, Artificial
  Probe
ctcataataaccctggaagggctag

SEQ ID NO: 201183 - DNA, 25 bp, Artificial
  Probe
taaccctggaagggctaggaggaca

SEQ ID NO: 201184 - DNA, 25 bp, Artificial
  Probe
ccttcctcataataaccctggaagg

SEQ ID NO: 201185 - DNA, 25 bp, Artificial
  Probe
ccctggaagggctaggaggacacaa

SEQ ID NO: 201186 - DNA, 25 bp, Artificial
  Probe
caggataccatcagtccttcctcat

SEQ ID NO: 201187 - DNA, 25 bp, Artificial
  Probe
acaagggacacaaacagccatgtgc

SEQ ID NO: 201188 - DNA, 25 bp, Artificial
  Probe
caaacagccatgtgctgggctctgg

SEQ ID NO: 201189 - DNA, 25 bp, Artificial
  Probe
ataccatcagtccttcctcataata

SEQ ID NO: 201190 - DNA, 25 bp, Artificial
  Probe
taatacaggataccatcagtccttc

SEQ ID NO: 201191 - DNA, 25 bp, Artificial
  Probe
gacacaaacagccatgtgctgggct

SEQ ID NO: 201192 - DNA, 25 bp, Artificial
  Probe
aatacaggataccatcagtccttcc

SEQ ID NO: 201193 - DNA, 25 bp, Artificial
  Probe
taccatcagtccttcctcataataa

SEQ ID NO: 201194 - DNA, 25 bp, Artificial
  Probe
ggataccatcagtccttcctcataa

SEQ ID NO: 201195 - DNA, 25 bp, Artificial
  Probe
agtccttcctcataataaccctgga

SEQ ID NO: 201196 - DNA, 25 bp, Artificial
  Probe
acacaaacagccatgtgctgggctc

SEQ ID NO: 201197 - DNA, 25 bp, Artificial
  Probe
aagggacacaaacagccatgtgctg

SEQ ID NO: 201198 - DNA, 25 bp, Artificial
  Probe
catcagtccttcctcataataaccc

SEQ ID NO: 201199 - DNA, 25 bp, Artificial
  Probe
gtccttcctcataataaccctggaa

SEQ ID NO: 201200 - DNA, 25 bp, Artificial
  Probe
tcataataaccctggaagggctagg

SEQ ID NO: 201201 - DNA, 25 bp, Artificial
  Probe
atacaggataccatcagtccttcct

SEQ ID NO: 201202 - DNA, 25 bp, Artificial
  Probe
cacaaacagccatgtgctgggctct

SEQ ID NO: 201203 - DNA, 25 bp, Artificial
  Probe
aaacagccatgtgctgggctctgga

SEQ ID NO: 201204 - DNA, 25 bp, Artificial
  Probe
atgctgagcccaagcacctccgaag

SEQ ID NO: 201205 - DNA, 25 bp, Artificial
  Probe
gacagtacaggctctctcggggctg

SEQ ID NO: 201206 - DNA, 25 bp, Artificial
  Probe
tcccctagggacagaggcgctgcac

SEQ ID NO: 201207 - DNA, 25 bp, Artificial
  Probe
tctatggaggacagtacaggctctc

SEQ ID NO: 201208 - DNA, 25 bp, Artificial
  Probe
tgttctcatctgtggggcctccggc

SEQ ID NO: 201209 - DNA, 25 bp, Artificial
  Probe
tttccagtaaggaaatggcaacatg

SEQ ID NO: 201210 - DNA, 25 bp, Artificial
  Probe
agaggccctggctttctggctcttg

SEQ ID NO: 201211 - DNA, 25 bp, Artificial
  Probe
caagcacctccgaaggactttccag

SEQ ID NO: 201212 - DNA, 25 bp, Artificial
  Probe
tgtcacctggctactactattaaag

SEQ ID NO: 201213 - DNA, 25 bp, Artificial
  Probe
tgacaaagcccatgccacctggaag

SEQ ID NO: 201214 - DNA, 25 bp, Artificial
  Probe
ctggcaagcttgtgtgttcaaagaa

SEQ ID NO: 201215 - DNA, 25 bp, Artificial
  Probe
cacctggaagtgtcaccttcccttg

SEQ ID NO: 201216 - DNA, 25 bp, Artificial
  Probe
tgtcttgtcacctggctactactat

SEQ ID NO: 201217 - DNA, 25 bp, Artificial
  Probe
ttgacaaagcccatgccacctggaa

SEQ ID NO: 201218 - DNA, 25 bp, Artificial
  Probe
ggaagtgtcaccttcccttgtccac

SEQ ID NO: 201219 - DNA, 25 bp, Artificial
  Probe
atgccacctggaagtgtcaccttcc

SEQ ID NO: 201220 - DNA, 25 bp, Artificial
  Probe
ttgggtcctgccttgacaaagccca

SEQ ID NO: 201221 - DNA, 25 bp, Artificial
  Probe
ccatcctgggccttgtttcatacta

SEQ ID NO: 201222 - DNA, 25 bp, Artificial
  Probe
ggtcctgccttgacaaagcccatgc

SEQ ID NO: 201223 - DNA, 25 bp, Artificial
  Probe
agtgaggaccctgttctcatctgtg

SEQ ID NO: 201224 - DNA, 25 bp, Artificial
  Probe
cacctccgaaggactttccagtaag

SEQ ID NO: 201225 - DNA, 25 bp, Artificial
  Probe
gcaagccctgcctgccagggaaggt

SEQ ID NO: 201226 - DNA, 25 bp, Artificial
  Probe
gtttcatactagaggccctggcttt

SEQ ID NO: 201227 - DNA, 25 bp, Artificial
  Probe
ttaatctatggaggacagtacaggc

SEQ ID NO: 201228 - DNA, 25 bp, Artificial
  Probe
ctttctggctcttgggtcctgcctt

SEQ ID NO: 201229 - DNA, 25 bp, Artificial
  Probe
gctgaccctggcaagcttgtgtgtt

SEQ ID NO: 201230 - DNA, 25 bp, Artificial
  Probe
ggacagaggcgctgcaccatcctgg

SEQ ID NO: 201231 - DNA, 25 bp, Artificial
  Probe
aaagcccatgccacctggaagtgtc

SEQ ID NO: 201232 - DNA, 25 bp, Artificial
  Probe
gccctggctttctggctcttgggtc

SEQ ID NO: 201233 - DNA, 25 bp, Artificial
  Probe
atctatggaggacagtacaggctct

SEQ ID NO: 201234 - DNA, 25 bp, Artificial
  Probe
tggctttctggctcttgggtcctgc

SEQ ID NO: 201235 - DNA, 25 bp, Artificial
  Probe
gctcttgggtcctgccttgacaaag

SEQ ID NO: 201236 - DNA, 25 bp, Artificial
  Probe
tactagaggccctggctttctggct

SEQ ID NO: 201237 - DNA, 25 bp, Artificial
  Probe
aatggcaacatgtgacagtgaggac

SEQ ID NO: 201238 - DNA, 25 bp, Artificial
  Probe
gtgacagtgaggaccctgttctcat

SEQ ID NO: 201239 - DNA, 25 bp, Artificial
  Probe
gctgcaccatcctgggccttgtttc

SEQ ID NO: 201240 - DNA, 25 bp, Artificial
  Probe
ctggctcttgggtcctgccttgaca

SEQ ID NO: 201241 - DNA, 25 bp, Artificial
  Probe
ccctagggacagaggcgctgcacca

SEQ ID NO: 201242 - DNA, 25 bp, Artificial
  Probe
cgaaggactttccagtaaggaaatg

SEQ ID NO: 201243 - DNA, 25 bp, Artificial
  Probe
cccagccaactggtcactgtcttgt

SEQ ID NO: 201244 - DNA, 25 bp, Artificial
  Probe
gagctcatgctgagcccaagcacct

SEQ ID NO: 201245 - DNA, 25 bp, Artificial
  Probe
agcccaagcacctccgaaggacttt

SEQ ID NO: 201246 - DNA, 25 bp, Artificial
  Probe
ctgggccttgtttcatactagaggc

SEQ ID NO: 201247 - DNA, 25 bp, Artificial
  Probe
tggccagcacgctgaccctggcaag

SEQ ID NO: 201248 - DNA, 25 bp, Artificial
  Probe
gccttgtttcatactagaggccctg

SEQ ID NO: 201249 - DNA, 25 bp, Artificial
  Probe
gccctgagctcatgctgagcccaag

SEQ ID NO: 201250 - DNA, 25 bp, Artificial
  Probe
atttgcaccgaatacctacgcgtcc

SEQ ID NO: 201251 - DNA, 25 bp, Artificial
  Probe
ctggactgtccattagctcagctcc

SEQ ID NO: 201252 - DNA, 25 bp, Artificial
  Probe
accaccaggaactgcaggagttgag

SEQ ID NO: 201253 - DNA, 25 bp, Artificial
  Probe
tcctcttaaggatgggtttacgcag

SEQ ID NO: 201254 - DNA, 25 bp, Artificial
  Probe
ctccctcactgtggatgtgatgtct

SEQ ID NO: 201255 - DNA, 25 bp, Artificial
  Probe
ctgtaccattgttgccgccacaagt

SEQ ID NO: 201256 - DNA, 25 bp, Artificial
  Probe
cgcaggggaaccactgtcttccctt

SEQ ID NO: 201257 - DNA, 25 bp, Artificial
  Probe
ccttctgaccctgtcatgactactg

SEQ ID NO: 201258 - DNA, 25 bp, Artificial
  Probe
ggctgtcagcaatgttctcagtaca

SEQ ID NO: 201259 - DNA, 25 bp, Artificial
  Probe
attacaccaaattctgcatggggtg

SEQ ID NO: 201260 - DNA, 25 bp, Artificial
  Probe
attagctcagctccaccggctgtca

SEQ ID NO: 201261 - DNA, 25 bp, Artificial
  Probe
acctgttcagccttattgagaccca

SEQ ID NO: 201262 - DNA, 25 bp, Artificial
  Probe
tcttctgcagccagcgcaggggaac

SEQ ID NO: 201263 - DNA, 25 bp, Artificial
  Probe
tattgagacccatgaagcaaagcct

SEQ ID NO: 201264 - DNA, 25 bp, Artificial
  Probe
gggtttgccacctcttccgtccttg

SEQ ID NO: 201265 - DNA, 25 bp, Artificial
  Probe
agctccaccggctgtcagcaatgtt

SEQ ID NO: 201266 - DNA, 25 bp, Artificial
  Probe
tgcagccagcgcaggggaaccactg

SEQ ID NO: 201267 - DNA, 25 bp, Artificial
  Probe
gaagtgatcattacaccaaattctg

SEQ ID NO: 201268 - DNA, 25 bp, Artificial
  Probe
gaactgcaggagttgagcagagtct

SEQ ID NO: 201269 - DNA, 25 bp, Artificial
  Probe
gaagacctgttcagccttattgaga

SEQ ID NO: 201270 - DNA, 25 bp, Artificial
  Probe
ttagctcagctccaccggctgtcag

SEQ ID NO: 201271 - DNA, 25 bp, Artificial
  Probe
actgccgagaagtgatcattacacc

SEQ ID NO: 201272 - DNA, 25 bp, Artificial
  Probe
gctatggttatttgcaccgaatacc

SEQ ID NO: 201273 - DNA, 25 bp, Artificial
  Probe
taaggatgggtttacgcaggtccag

SEQ ID NO: 201274 - DNA, 25 bp, Artificial
  Probe
actgcaggagttgagcagagtctgt

SEQ ID NO: 201275 - DNA, 25 bp, Artificial
  Probe
tgacaactgccgagaagtgatcatt

SEQ ID NO: 201276 - DNA, 25 bp, Artificial
  Probe
gacactgacaactgccgagaagtga

SEQ ID NO: 201277 - DNA, 25 bp, Artificial
  Probe
ccatctttgtcaccaccaggaactg

SEQ ID NO: 201278 - DNA, 25 bp, Artificial
  Probe
ttccaggacaaatgactggcacccc

SEQ ID NO: 201279 - DNA, 25 bp, Artificial
  Probe
ccaggaactgcaggagttgagcaga

SEQ ID NO: 201280 - DNA, 25 bp, Artificial
  Probe
tgtggatgtgatgtctcctgcttcc

SEQ ID NO: 201281 - DNA, 25 bp, Artificial
  Probe
gcgtccctttgaagaaggaaagaag

SEQ ID NO: 201282 - DNA, 25 bp, Artificial
  Probe
gatcattacaccaaattctgcatgg

SEQ ID NO: 201283 - DNA, 25 bp, Artificial
  Probe
agttgagcagagtctgtctggactg

SEQ ID NO: 201284 - DNA, 25 bp, Artificial
  Probe
atgggtttacgcaggtccagctgtc

SEQ ID NO: 201285 - DNA, 25 bp, Artificial
  Probe
agaagatttcccttccaggacaaat

SEQ ID NO: 201286 - DNA, 25 bp, Artificial
  Probe
tgactactgcaaaggcagacacctc

SEQ ID NO: 201287 - DNA, 25 bp, Artificial
  Probe
aggtccagctgtcatcagtcagccc

SEQ ID NO: 201288 - DNA, 25 bp, Artificial
  Probe
tgaagcaaagcctcttaagctctac

SEQ ID NO: 201289 - DNA, 25 bp, Artificial
  Probe
tacgcgtccctttgaagaaggaaag

SEQ ID NO: 201290 - DNA, 25 bp, Artificial
  Probe
ttaaggatgggtttacgcaggtcca

SEQ ID NO: 201291 - DNA, 25 bp, Artificial
  Probe
agccttattgagacccatgaagcaa

SEQ ID NO: 201292 - DNA, 25 bp, Artificial
  Probe
tttgtcaccaccaggaactgcagga

SEQ ID NO: 201293 - DNA, 25 bp, Artificial
  Probe
ccagcgcaggggaaccactgtcttc

SEQ ID NO: 201294 - DNA, 25 bp, Artificial
  Probe
acccatgaagcaaagcctcttaagc

SEQ ID NO: 201295 - DNA, 25 bp, Artificial
  Probe
cccccattactcctcttaaggatgg

SEQ ID NO: 201296 - DNA, 25 bp, Artificial
  Probe
ccaacctgtcaacaccccagccaag

SEQ ID NO: 201297 - DNA, 25 bp, Artificial
  Probe
aggggtgtcctccaaggaaatggca

SEQ ID NO: 201298 - DNA, 25 bp, Artificial
  Probe
tgaatacaacgcagaaggggtgtcc

SEQ ID NO: 201299 - DNA, 25 bp, Artificial
  Probe
caggccaacaagcatgtctggttag

SEQ ID NO: 201300 - DNA, 25 bp, Artificial
  Probe
accatcaatggtggcagccagtttg

SEQ ID NO: 201301 - DNA, 25 bp, Artificial
  Probe
gggtgtcctccaaggaaatggcaac

SEQ ID NO: 201302 - DNA, 25 bp, Artificial
  Probe
agaaggggtgtcctccaaggaaatg

SEQ ID NO: 201303 - DNA, 25 bp, Artificial
  Probe
ggtggcagccagtttgaatacaacg

SEQ ID NO: 201304 - DNA, 25 bp, Artificial
  Probe
gtggcagccagtttgaatacaacgc

SEQ ID NO: 201305 - DNA, 25 bp, Artificial
  Probe
atggcaactcagctcgccttcatgc

SEQ ID NO: 201306 - DNA, 25 bp, Artificial
  Probe
ggggtgtcctccaaggaaatggcaa

SEQ ID NO: 201307 - DNA, 25 bp, Artificial
  Probe
ggaaatggcaactcagctcgccttc

SEQ ID NO: 201308 - DNA, 25 bp, Artificial
  Probe
agagaccatcaatggtggcagccag

SEQ ID NO: 201309 - DNA, 25 bp, Artificial
  Probe
gagaccatcaatggtggcagccagt

SEQ ID NO: 201310 - DNA, 25 bp, Artificial
  Probe
gagagaccatcaatggtggcagcca

SEQ ID NO: 201311 - DNA, 25 bp, Artificial
  Probe
ccgtgcccaggccaacaagcatgtc

SEQ ID NO: 201312 - DNA, 25 bp, Artificial
  Probe
tggtggcagccagtttgaatacaac

SEQ ID NO: 201313 - DNA, 25 bp, Artificial
  Probe
tgtcctccaaggaaatggcaactca

SEQ ID NO: 201314 - DNA, 25 bp, Artificial
  Probe
gtgcccaggccaacaagcatgtctg

SEQ ID NO: 201315 - DNA, 25 bp, Artificial
  Probe
cagccagtttgaatacaacgcagaa

SEQ ID NO: 201316 - DNA, 25 bp, Artificial
  Probe
gaaatggcaactcagctcgccttca

SEQ ID NO: 201317 - DNA, 25 bp, Artificial
  Probe
gaatacaacgcagaaggggtgtcct

SEQ ID NO: 201318 - DNA, 25 bp, Artificial
  Probe
ttaggagagaccatcaatggtggca

SEQ ID NO: 201319 - DNA, 25 bp, Artificial
  Probe
tgtctggttaggagagaccatcaat

SEQ ID NO: 201320 - DNA, 25 bp, Artificial
  Probe
agaccatcaatggtggcagccagtt

SEQ ID NO: 201321 - DNA, 25 bp, Artificial
  Probe
gcccaggccaacaagcatgtctggt

SEQ ID NO: 201322 - DNA, 25 bp, Artificial
  Probe
tcctccaaggaaatggcaactcagc

SEQ ID NO: 201323 - DNA, 25 bp, Artificial
  Probe
aaatggcaactcagctcgccttcat

SEQ ID NO: 201324 - DNA, 25 bp, Artificial
  Probe
cagaaggggtgtcctccaaggaaat

SEQ ID NO: 201325 - DNA, 25 bp, Artificial
  Probe
tggcagccagtttgaatacaacgca

SEQ ID NO: 201326 - DNA, 25 bp, Artificial
  Probe
ccaggccaacaagcatgtctggtta

SEQ ID NO: 201327 - DNA, 25 bp, Artificial
  Probe
atacaacgcagaaggggtgtcctcc

SEQ ID NO: 201328 - DNA, 25 bp, Artificial
  Probe
gtcctccaaggaaatggcaactcag

SEQ ID NO: 201329 - DNA, 25 bp, Artificial
  Probe
tggcaactcagctcgccttcatgcg

SEQ ID NO: 201330 - DNA, 25 bp, Artificial
  Probe
aatacaacgcagaaggggtgtcctc

SEQ ID NO: 201331 - DNA, 25 bp, Artificial
  Probe
ggagagaccatcaatggtggcagcc

SEQ ID NO: 201332 - DNA, 25 bp, Artificial
  Probe
ggtgtcctccaaggaaatggcaact

SEQ ID NO: 201333 - DNA, 25 bp, Artificial
  Probe
gtgtcctccaaggaaatggcaactc

SEQ ID NO: 201334 - DNA, 25 bp, Artificial
  Probe
atggtggcagccagtttgaatacaa

SEQ ID NO: 201335 - DNA, 25 bp, Artificial
  Probe
aggagagaccatcaatggtggcagc

SEQ ID NO: 201336 - DNA, 25 bp, Artificial
  Probe
tgcccaggccaacaagcatgtctgg

SEQ ID NO: 201337 - DNA, 25 bp, Artificial
  Probe
cgtgcccaggccaacaagcatgtct

SEQ ID NO: 201338 - DNA, 25 bp, Artificial
  Probe
acgcagaaggggtgtcctccaagga

SEQ ID NO: 201339 - DNA, 25 bp, Artificial
  Probe
gaccatcaatggtggcagccagttt

SEQ ID NO: 201340 - DNA, 25 bp, Artificial
  Probe
ccagtttgaatacaacgcagaaggg

SEQ ID NO: 201341 - DNA, 25 bp, Artificial
  Probe
aatggcaactcagctcgccttcatg

SEQ ID NO: 201342 - DNA, 25 bp, Artificial
  Probe
atttattcaactcataatttatgtt

SEQ ID NO: 201343 - DNA, 25 bp, Artificial
  Probe
aagattgctgtattctatttattca

SEQ ID NO: 201344 - DNA, 25 bp, Artificial
  Probe
gtattctatttattcaactcataat

SEQ ID NO: 201345 - DNA, 25 bp, Artificial
  Probe
tctatttattcaactcataatttat

SEQ ID NO: 201346 - DNA, 25 bp, Artificial
  Probe
ttatgttactccctgatctttgtct

SEQ ID NO: 201347 - DNA, 25 bp, Artificial
  Probe
tgctgtattctatttattcaactca

SEQ ID NO: 201348 - DNA, 25 bp, Artificial
  Probe
atttatgttactccctgatctttgt

SEQ ID NO: 201349 - DNA, 25 bp, Artificial
  Probe
attgctgtattctatttattcaact

SEQ ID NO: 201350 - DNA, 25 bp, Artificial
  Probe
attctatttattcaactcataattt

SEQ ID NO: 201351 - DNA, 25 bp, Artificial
  Probe
ttgtcgtgacaaagcatttatttaa

SEQ ID NO: 201352 - DNA, 25 bp, Artificial
  Probe
ctgtattctatttattcaactcata

SEQ ID NO: 201353 - DNA, 25 bp, Artificial
  Probe
ttcaactcataatttatgttactcc

SEQ ID NO: 201354 - DNA, 25 bp, Artificial
  Probe
gattgctgtattctatttattcaac

SEQ ID NO: 201355 - DNA, 25 bp, Artificial
  Probe
tcaactcataatttatgttactccc

SEQ ID NO: 201356 - DNA, 25 bp, Artificial
  Probe
ttgctgtattctatttattcaactc

SEQ ID NO: 201357 - DNA, 25 bp, Artificial
  Probe
taatttatgttactccctgatcttt

SEQ ID NO: 201358 - DNA, 25 bp, Artificial
  Probe
tgtattctatttattcaactcataa

SEQ ID NO: 201359 - DNA, 25 bp, Artificial
  Probe
aactcataatttatgttactccctg

SEQ ID NO: 201360 - DNA, 25 bp, Artificial
  Probe
ctatttattcaactcataatttatg

SEQ ID NO: 201361 - DNA, 25 bp, Artificial
  Probe
attcaactcataatttatgttactc

SEQ ID NO: 201362 - DNA, 25 bp, Artificial
  Probe
cataatttatgttactccctgatct

SEQ ID NO: 201363 - DNA, 25 bp, Artificial
  Probe
tttatgttactccctgatctttgtc

SEQ ID NO: 201364 - DNA, 25 bp, Artificial
  Probe
ataatttatgttactccctgatctt

SEQ ID NO: 201365 - DNA, 25 bp, Artificial
  Probe
ttattcaactcataatttatgttac

SEQ ID NO: 201366 - DNA, 25 bp, Artificial
  Probe
tattcaactcataatttatgttact

SEQ ID NO: 201367 - DNA, 25 bp, Artificial
  Probe
agattgctgtattctatttattcaa

SEQ ID NO: 201368 - DNA, 25 bp, Artificial
  Probe
gctgtattctatttattcaactcat

SEQ ID NO: 201369 - DNA, 25 bp, Artificial
  Probe
ttctatttattcaactcataattta

SEQ ID NO: 201370 - DNA, 25 bp, Artificial
  Probe
tattctatttattcaactcataatt

SEQ ID NO: 201371 - DNA, 25 bp, Artificial
  Probe
tttattcaactcataatttatgtta

SEQ ID NO: 201372 - DNA, 25 bp, Artificial
  Probe
aatttatgttactccctgatctttg

SEQ ID NO: 201373 - DNA, 25 bp, Artificial
  Probe
tcataatttatgttactccctgatc

SEQ ID NO: 201374 - DNA, 25 bp, Artificial
  Probe
tatttattcaactcataatttatgt

SEQ ID NO: 201375 - DNA, 25 bp, Artificial
  Probe
tttctttctgacgatagaagaactc

SEQ ID NO: 201376 - DNA, 25 bp, Artificial
  Probe
tgcctgagtacaggaaagggttctg

SEQ ID NO: 201377 - DNA, 25 bp, Artificial
  Probe
gagaggaatgcaccttaccgggcga

SEQ ID NO: 201378 - DNA, 25 bp, Artificial
  Probe
ttaccggtacaggaacataaactat

SEQ ID NO: 201379 - DNA, 25 bp, Artificial
  Probe
tgtctcaacacgacaatacagaatg

SEQ ID NO: 201380 - DNA, 25 bp, Artificial
  Probe
tactgagtggttaccggtacaggaa

SEQ ID NO: 201381 - DNA, 25 bp, Artificial
  Probe
tcttgagcactgatataagtcactt

SEQ ID NO: 201382 - DNA, 25 bp, Artificial
  Probe
tcgttagacatgtgaactagtcaag

SEQ ID NO: 201383 - DNA, 25 bp, Artificial
  Probe
aactataatttctgatcagaacagg

SEQ ID NO: 201384 - DNA, 25 bp, Artificial
  Probe
aacagtggcccagactctcacctgt

SEQ ID NO: 201385 - DNA, 25 bp, Artificial
  Probe
gtctcaacacgacaatacagaatgt

SEQ ID NO: 201386 - DNA, 25 bp, Artificial
  Probe
actgaatcttaacgagtttactgag

SEQ ID NO: 201387 - DNA, 25 bp, Artificial
  Probe
tttacagataccttttagctcctgg

SEQ ID NO: 201388 - DNA, 25 bp, Artificial
  Probe
tttacatgtccaatctggcatttag

SEQ ID NO: 201389 - DNA, 25 bp, Artificial
  Probe
tttacatgagctatatagactctgg

SEQ ID NO: 201390 - DNA, 25 bp, Artificial
  Probe
acgtttaagacgtactccctatatg

SEQ ID NO: 201391 - DNA, 25 bp, Artificial
  Probe
gtagttttacagataccttttagct

SEQ ID NO: 201392 - DNA, 25 bp, Artificial
  Probe
aaactgaatcttaacgagtttactg

SEQ ID NO: 201393 - DNA, 25 bp, Artificial
  Probe
taacgagtttactgagtggttaccg

SEQ ID NO: 201394 - DNA, 25 bp, Artificial
  Probe
acatcaagtcacatgcccgcagaac

SEQ ID NO: 201395 - DNA, 25 bp, Artificial
  Probe
gctatatagactctgggagagaaac

SEQ ID NO: 201396 - DNA, 25 bp, Artificial
  Probe
tcccaacacgcgtagaccgcgtagt

SEQ ID NO: 201397 - DNA, 25 bp, Artificial
  Probe
atcatgatgggcagtgcctgagtac

SEQ ID NO: 201398 - DNA, 25 bp, Artificial
  Probe
tgttgctatcatgatgggcagtgcc

SEQ ID NO: 201399 - DNA, 25 bp, Artificial
  Probe
agactctgggagagaaacagtggcc

SEQ ID NO: 201400 - DNA, 25 bp, Artificial
  Probe
agaatgtacaaagtcgctcaactcc

SEQ ID NO: 201401 - DNA, 25 bp, Artificial
  Probe
aacccacagagaggaatgcacctta

SEQ ID NO: 201402 - DNA, 25 bp, Artificial
  Probe
atgtgaactagtcaagtctacagtc

SEQ ID NO: 201403 - DNA, 25 bp, Artificial
  Probe
acagggtacccctttacatgagcta

SEQ ID NO: 201404 - DNA, 25 bp, Artificial
  Probe
gcgtagaccgcgtagtgacatcaag

SEQ ID NO: 201405 - DNA, 25 bp, Artificial
  Probe
atgggcagtgcctgagtacaggaaa

SEQ ID NO: 201406 - DNA, 25 bp, Artificial
  Probe
ttctgatcagaacagggtacccctt

SEQ ID NO: 201407 - DNA, 25 bp, Artificial
  Probe
aatctggcatttaggaacaacaaat

SEQ ID NO: 201408 - DNA, 25 bp, Artificial
  Probe
gactctcacctgtgtttatacttcg

SEQ ID NO: 201409 - DNA, 25 bp, Artificial
  Probe
ctatatagactctgggagagaaaca

SEQ ID NO: 201410 - DNA, 25 bp, Artificial
  Probe
acatgcccgcagaacccacagagag

SEQ ID NO: 201411 - DNA, 25 bp, Artificial
  Probe
gaactagtcaagtctacagtctccc

SEQ ID NO: 201412 - DNA, 25 bp, Artificial
  Probe
aagggttctggtatgtcttcaaact

SEQ ID NO: 201413 - DNA, 25 bp, Artificial
  Probe
gtttaagacgtactccctatatgtc

SEQ ID NO: 201414 - DNA, 25 bp, Artificial
  Probe
agcactgatataagtcacttagacc

SEQ ID NO: 201415 - DNA, 25 bp, Artificial
  Probe
gtccaaaattactcttgagcactga

SEQ ID NO: 201416 - DNA, 25 bp, Artificial
  Probe
gaatgtacaaagtcgctcaactccc

SEQ ID NO: 201417 - DNA, 25 bp, Artificial
  Probe
ggaatgcaccttaccgggcgaaact

SEQ ID NO: 201418 - DNA, 25 bp, Artificial
  Probe
attactcttgagcactgatataagt

SEQ ID NO: 201419 - DNA, 25 bp, Artificial
  Probe
tgtccaaaattactcttgagcactg

SEQ ID NO: 201420 - DNA, 25 bp, Artificial
  Probe
ataagtcacttagaccttctttgag

SEQ ID NO: 201421 - DNA, 25 bp, Artificial
  Probe
ttgactctgggcacaattgaaccaa

SEQ ID NO: 201422 - DNA, 25 bp, Artificial
  Probe
gctagcgttgactctgggcacaatt

SEQ ID NO: 201423 - DNA, 25 bp, Artificial
  Probe
tctctaactcggttctgttttgaca

SEQ ID NO: 201424 - DNA, 25 bp, Artificial
  Probe
caacaattgactttggtgtacagtg

SEQ ID NO: 201425 - DNA, 25 bp, Artificial
  Probe
ttggtgtacagtgcagtgaacacat

SEQ ID NO: 201426 - DNA, 25 bp, Artificial
  Probe
gactttggtgtacagtgcagtgaac

SEQ ID NO: 201427 - DNA, 25 bp, Artificial
  Probe
gaactcctacttaagtattcgtcag

SEQ ID NO: 201428 - DNA, 25 bp, Artificial
  Probe
ccttttgtctctaactcggttctgt

SEQ ID NO: 201429 - DNA, 25 bp, Artificial
  Probe
agatagctagcgttgactctgggca

SEQ ID NO: 201430 - DNA, 25 bp, Artificial
  Probe
ctcggttctgttttgacagccacac

SEQ ID NO: 201431 - DNA, 25 bp, Artificial
  Probe
gcatccttttgtctctaactcggtt

SEQ ID NO: 201432 - DNA, 25 bp, Artificial
  Probe
tagatcaaactgtggcacagtaact

SEQ ID NO: 201433 - DNA, 25 bp, Artificial
  Probe
acagtgcagtgaacacatagaactc

SEQ ID NO: 201434 - DNA, 25 bp, Artificial
  Probe
atctttccaacaattgactttggtg

SEQ ID NO: 201435 - DNA, 25 bp, Artificial
  Probe
gccacacaatcttggcatgtattaa

SEQ ID NO: 201436 - DNA, 25 bp, Artificial
  Probe
caattgactttggtgtacagtgcag

SEQ ID NO: 201437 - DNA, 25 bp, Artificial
  Probe
cggttctgttttgacagccacacaa

SEQ ID NO: 201438 - DNA, 25 bp, Artificial
  Probe
aactcggttctgttttgacagccac

SEQ ID NO: 201439 - DNA, 25 bp, Artificial
  Probe
tcaagttcaaaaaccgtcaaatgag

SEQ ID NO: 201440 - DNA, 25 bp, Artificial
  Probe
aacatagatcaaactgtggcacagt

SEQ ID NO: 201441 - DNA, 25 bp, Artificial
  Probe
ttaagtattcgtcagcatccttttg

SEQ ID NO: 201442 - DNA, 25 bp, Artificial
  Probe
catcagatagctagcgttgactctg

SEQ ID NO: 201443 - DNA, 25 bp, Artificial
  Probe
gggtagcgcagtattctctctggcc

SEQ ID NO: 201444 - DNA, 25 bp, Artificial
  Probe
tctctctggccagtatgagtgaagt

SEQ ID NO: 201445 - DNA, 25 bp, Artificial
  Probe
cagcatccttttgtctctaactcgg

SEQ ID NO: 201446 - DNA, 25 bp, Artificial
  Probe
aaatcgcaaggagtgtgacagctga

SEQ ID NO: 201447 - DNA, 25 bp, Artificial
  Probe
gaaacatagatcaaactgtggcaca

SEQ ID NO: 201448 - DNA, 25 bp, Artificial
  Probe
atcgcaaggagtgtgacagctgatt

SEQ ID NO: 201449 - DNA, 25 bp, Artificial
  Probe
cacaatcttggcatgtattaagtaa

SEQ ID NO: 201450 - DNA, 25 bp, Artificial
  Probe
tctgggcacaattgaaccaattccc

SEQ ID NO: 201451 - DNA, 25 bp, Artificial
  Probe
ctctggccagtatgagtgaagttta

SEQ ID NO: 201452 - DNA, 25 bp, Artificial
  Probe
gcaagccttataagccctaaagcat

SEQ ID NO: 201453 - DNA, 25 bp, Artificial
  Probe
ttgacagccacacaatcttggcatg

SEQ ID NO: 201454 - DNA, 25 bp, Artificial
  Probe
tgtacagtgcagtgaacacatagaa

SEQ ID NO: 201455 - DNA, 25 bp, Artificial
  Probe
cagtattctctctggccagtatgag

SEQ ID NO: 201456 - DNA, 25 bp, Artificial
  Probe
tacagtgcagtgaacacatagaact

SEQ ID NO: 201457 - DNA, 25 bp, Artificial
  Probe
tcaaactgtggcacagtaactcatc

SEQ ID NO: 201458 - DNA, 25 bp, Artificial
  Probe
gttctgttttgacagccacacaatc

SEQ ID NO: 201459 - DNA, 25 bp, Artificial
  Probe
gtattcgtcagcatccttttgtctc

SEQ ID NO: 201460 - DNA, 25 bp, Artificial
  Probe
gttttgacagccacacaatcttggc

SEQ ID NO: 201461 - DNA, 25 bp, Artificial
  Probe
acaattgactttggtgtacagtgca

SEQ ID NO: 201462 - DNA, 25 bp, Artificial
  Probe
agccctaaagcattaagttgcactt

SEQ ID NO: 201463 - DNA, 25 bp, Artificial
  Probe
tccttttgtctctaactcggttctg

SEQ ID NO: 201464 - DNA, 25 bp, Artificial
  Probe
tagcgttgactctgggcacaattga

SEQ ID NO: 201465 - DNA, 25 bp, Artificial
  Probe
ttataagccctaaagcattaagttg

SEQ ID NO: 201466 - DNA, 25 bp, Artificial
  Probe
ccctaaagcattaagttgcactttg

SEQ ID NO: 201467 - DNA, 25 bp, Artificial
  Probe
atgcaatagtcaatacgctgtgctc

SEQ ID NO: 201468 - DNA, 25 bp, Artificial
  Probe
tgatggacttgtaagacctgtgtcc

SEQ ID NO: 201469 - DNA, 25 bp, Artificial
  Probe
ctggtgaagggtctgcctatctttc

SEQ ID NO: 201470 - DNA, 25 bp, Artificial
  Probe
gctcatgtgcagtccccatggtggc

SEQ ID NO: 201471 - DNA, 25 bp, Artificial
  Probe
actttccgggccagcttttcatgct

SEQ ID NO: 201472 - DNA, 25 bp, Artificial
  Probe
attgctactgcctgggtcatctgct

SEQ ID NO: 201473 - DNA, 25 bp, Artificial
  Probe
gtcatctgctggtgaagggtctgcc

SEQ ID NO: 201474 - DNA, 25 bp, Artificial
  Probe
gctggtgaagggtctgcctatcttt

SEQ ID NO: 201475 - DNA, 25 bp, Artificial
  Probe
ctgtgtggttccacggccatcctct

SEQ ID NO: 201476 - DNA, 25 bp, Artificial
  Probe
tatggcacaggatgcaatagtcaat

SEQ ID NO: 201477 - DNA, 25 bp, Artificial
  Probe
tgcccttagaatcaagatgaagcca

SEQ ID NO: 201478 - DNA, 25 bp, Artificial
  Probe
aaacccatcgtcttacacagatgag

SEQ ID NO: 201479 - DNA, 25 bp, Artificial
  Probe
gcttgtatggcacaggatgcaatag

SEQ ID NO: 201480 - DNA, 25 bp, Artificial
  Probe
ccccatggtggctctgcaagcattc

SEQ ID NO: 201481 - DNA, 25 bp, Artificial
  Probe
tcacgacgtgtttggcacattgttg

SEQ ID NO: 201482 - DNA, 25 bp, Artificial
  Probe
gctaaaatgcccttagaatcaagat

SEQ ID NO: 201483 - DNA, 25 bp, Artificial
  Probe
ttctgatggacttgtaagacctgtg

SEQ ID NO: 201484 - DNA, 25 bp, Artificial
  Probe
agacattgttgctacatatttctga

SEQ ID NO: 201485 - DNA, 25 bp, Artificial
  Probe
agaacgggcctcagcttgacttggg

SEQ ID NO: 201486 - DNA, 25 bp, Artificial
  Probe
ctcagcttgacttgggtcaggctgt

SEQ ID NO: 201487 - DNA, 25 bp, Artificial
  Probe
gaagggtctgcctatctttctcttt

SEQ ID NO: 201488 - DNA, 25 bp, Artificial
  Probe
ttggtttttctatgcctagggctgg

SEQ ID NO: 201489 - DNA, 25 bp, Artificial
  Probe
agggtctgcctatctttctcttttg

SEQ ID NO: 201490 - DNA, 25 bp, Artificial
  Probe
gacttgtaagacctgtgtcccagcc

SEQ ID NO: 201491 - DNA, 25 bp, Artificial
  Probe
tggcacattgttggtttttctatgc

SEQ ID NO: 201492 - DNA, 25 bp, Artificial
  Probe
gcaatagtcaatacgctgtgctcat

SEQ ID NO: 201493 - DNA, 25 bp, Artificial
  Probe
aaatggctaaaatgcccttagaatc

SEQ ID NO: 201494 - DNA, 25 bp, Artificial
  Probe
ctgcctgggtcatctgctggtgaag

SEQ ID NO: 201495 - DNA, 25 bp, Artificial
  Probe
tacaaagttccaagggattgcttag

SEQ ID NO: 201496 - DNA, 25 bp, Artificial
  Probe
cttccatgcctacaaagttccaagg

SEQ ID NO: 201497 - DNA, 25 bp, Artificial
  Probe
gccagcttttcatgctctgtttcat

SEQ ID NO: 201498 - DNA, 25 bp, Artificial
  Probe
atctgctggtgaagggtctgcctat

SEQ ID NO: 201499 - DNA, 25 bp, Artificial
  Probe
tgcatgtgggagcttgtatggcaca

SEQ ID NO: 201500 - DNA, 25 bp, Artificial
  Probe
ggtggctctgcaagcattcccatcc

SEQ ID NO: 201501 - DNA, 25 bp, Artificial
  Probe
ctactgcctgggtcatctgctggtg

SEQ ID NO: 201502 - DNA, 25 bp, Artificial
  Probe
tcctctccattgctactgcctgggt

SEQ ID NO: 201503 - DNA, 25 bp, Artificial
  Probe
tcctcttccatcatactgccatggg

SEQ ID NO: 201504 - DNA, 25 bp, Artificial
  Probe
gtcaggctgtgtggttccacggcca

SEQ ID NO: 201505 - DNA, 25 bp, Artificial
  Probe
tgcctatctttctcttttgtgcaag

SEQ ID NO: 201506 - DNA, 25 bp, Artificial
  Probe
gcaaggagactttccgggccagctt

SEQ ID NO: 201507 - DNA, 25 bp, Artificial
  Probe
ctccattgctactgcctgggtcatc

SEQ ID NO: 201508 - DNA, 25 bp, Artificial
  Probe
gtcttacacagatgagcttcctacc

SEQ ID NO: 201509 - DNA, 25 bp, Artificial
  Probe
tagtcaatacgctgtgctcatgtgc

SEQ ID NO: 201510 - DNA, 25 bp, Artificial
  Probe
ctcttccatcatactgccatgggaa

SEQ ID NO: 201511 - DNA, 25 bp, Artificial
  Probe
catcatactgccatgggaagaggct

SEQ ID NO: 201512 - DNA, 25 bp, Artificial
  Probe
cttgggtcaggctgtgtggttccac

SEQ ID NO: 201513 - DNA, 25 bp, Artificial
  Probe
tagtgtggtcagagacttagcacca

SEQ ID NO: 201514 - DNA, 25 bp, Artificial
  Probe
gtgccgagcacagttactggaaggc

SEQ ID NO: 201515 - DNA, 25 bp, Artificial
  Probe
tcattagtagtgtggtcagagactt

SEQ ID NO: 201516 - DNA, 25 bp, Artificial
  Probe
gcccagtgaacctggcattggaagc

SEQ ID NO: 201517 - DNA, 25 bp, Artificial
  Probe
ctttattaatcattagtagtgtggt

SEQ ID NO: 201518 - DNA, 25 bp, Artificial
  Probe
cagtgaacctggcattggaagccca

SEQ ID NO: 201519 - DNA, 25 bp, Artificial
  Probe
tttattaatcattagtagtgtggtc

SEQ ID NO: 201520 - DNA, 25 bp, Artificial
  Probe
tattccatctttattaatcattagt

SEQ ID NO: 201521 - DNA, 25 bp, Artificial
  Probe
tcagagacttagcaccattggtctc

SEQ ID NO: 201522 - DNA, 25 bp, Artificial
  Probe
ggcttaaccaaagttttgatgcctg

SEQ ID NO: 201523 - DNA, 25 bp, Artificial
  Probe
agcccagtgaacctggcattggaag

SEQ ID NO: 201524 - DNA, 25 bp, Artificial
  Probe
tggtcagagacttagcaccattggt

SEQ ID NO: 201525 - DNA, 25 bp, Artificial
  Probe
acttagcaccattggtctcccccaa

SEQ ID NO: 201526 - DNA, 25 bp, Artificial
  Probe
ccgagcacagttactggaaggctta

SEQ ID NO: 201527 - DNA, 25 bp, Artificial
  Probe
gagcacagttactggaaggcttaac

SEQ ID NO: 201528 - DNA, 25 bp, Artificial
  Probe
atcattagtagtgtggtcagagact

SEQ ID NO: 201529 - DNA, 25 bp, Artificial
  Probe
agacttagcaccattggtctccccc

SEQ ID NO: 201530 - DNA, 25 bp, Artificial
  Probe
atctttattaatcattagtagtgtg

SEQ ID NO: 201531 - DNA, 25 bp, Artificial
  Probe
aatcattagtagtgtggtcagagac

SEQ ID NO: 201532 - DNA, 25 bp, Artificial
  Probe
ttagcaccattggtctcccccaacc

SEQ ID NO: 201533 - DNA, 25 bp, Artificial
  Probe
tgccgagcacagttactggaaggct

SEQ ID NO: 201534 - DNA, 25 bp, Artificial
  Probe
gcacagttactggaaggcttaacca

SEQ ID NO: 201535 - DNA, 25 bp, Artificial
  Probe
agagacttagcaccattggtctccc

SEQ ID NO: 201536 - DNA, 25 bp, Artificial
  Probe
tccatctttattaatcattagtagt

SEQ ID NO: 201537 - DNA, 25 bp, Artificial
  Probe
cgagcacagttactggaaggcttaa

SEQ ID NO: 201538 - DNA, 25 bp, Artificial
  Probe
cttagcaccattggtctcccccaac

SEQ ID NO: 201539 - DNA, 25 bp, Artificial
  Probe
cagagacttagcaccattggtctcc

SEQ ID NO: 201540 - DNA, 25 bp, Artificial
  Probe
cacagttactggaaggcttaaccaa

SEQ ID NO: 201541 - DNA, 25 bp, Artificial
  Probe
agcacagttactggaaggcttaacc

SEQ ID NO: 201542 - DNA, 25 bp, Artificial
  Probe
catctttattaatcattagtagtgt

SEQ ID NO: 201543 - DNA, 25 bp, Artificial
  Probe
tctttattaatcattagtagtgtgg

SEQ ID NO: 201544 - DNA, 25 bp, Artificial
  Probe
ccagtgaacctggcattggaagccc

SEQ ID NO: 201545 - DNA, 25 bp, Artificial
  Probe
gacttagcaccattggtctccccca

SEQ ID NO: 201546 - DNA, 25 bp, Artificial
  Probe
gtcagagacttagcaccattggtct

SEQ ID NO: 201547 - DNA, 25 bp, Artificial
  Probe
attagtagtgtggtcagagacttag

SEQ ID NO: 201548 - DNA, 25 bp, Artificial
  Probe
ttccatctttattaatcattagtag

SEQ ID NO: 201549 - DNA, 25 bp, Artificial
  Probe
gagacttagcaccattggtctcccc

SEQ ID NO: 201550 - DNA, 25 bp, Artificial
  Probe
gccgagcacagttactggaaggctt

SEQ ID NO: 201551 - DNA, 25 bp, Artificial
  Probe
attaatcattagtagtgtggtcaga

SEQ ID NO: 201552 - DNA, 25 bp, Artificial
  Probe
cccagtgaacctggcattggaagcc

SEQ ID NO: 201553 - DNA, 25 bp, Artificial
  Probe
ggtcagagacttagcaccattggtc

SEQ ID NO: 201554 - DNA, 25 bp, Artificial
  Probe
gcaccattggtctcccccaacctgg

SEQ ID NO: 201555 - DNA, 25 bp, Artificial
  Probe
gcttaaccaaagttttgatgcctgg

SEQ ID NO: 201556 - DNA, 25 bp, Artificial
  Probe
agtgaacctggcattggaagcccac

SEQ ID NO: 201557 - DNA, 25 bp, Artificial
  Probe
taatcattagtagtgtggtcagaga

SEQ ID NO: 201558 - DNA, 25 bp, Artificial
  Probe
aggcttaaccaaagttttgatgcct

SEQ ID NO: 201559 - DNA, 25 bp, Artificial
  Probe
gagagaacccatacctttttagcta

SEQ ID NO: 201560 - DNA, 25 bp, Artificial
  Probe
gataactacaggtcccatgatgcag

SEQ ID NO: 201561 - DNA, 25 bp, Artificial
  Probe
aatggtcttgggagagagaacccat

SEQ ID NO: 201562 - DNA, 25 bp, Artificial
  Probe
gaaagctgctcatccctagccagag

SEQ ID NO: 201563 - DNA, 25 bp, Artificial
  Probe
gctctccaagcagacaataaagctt

SEQ ID NO: 201564 - DNA, 25 bp, Artificial
  Probe
gcaaaaggccagacgggtccttcca

SEQ ID NO: 201565 - DNA, 25 bp, Artificial
  Probe
ctctatttacccagaactggaaagt

SEQ ID NO: 201566 - DNA, 25 bp, Artificial
  Probe
gttcaaggtcgattttctgtgaagc

SEQ ID NO: 201567 - DNA, 25 bp, Artificial
  Probe
agggataactacaggtcccatgatg

SEQ ID NO: 201568 - DNA, 25 bp, Artificial
  Probe
tcgcaaaaggccagacgggtccttc

SEQ ID NO: 201569 - DNA, 25 bp, Artificial
  Probe
gctccaacagccacataggagagtt

SEQ ID NO: 201570 - DNA, 25 bp, Artificial
  Probe
cccatacctttttagctaaatgtgg

SEQ ID NO: 201571 - DNA, 25 bp, Artificial
  Probe
gcttgtctggtgaaggatttctacc

SEQ ID NO: 201572 - DNA, 25 bp, Artificial
  Probe
ctaccccaaagatgtgaatataagt

SEQ ID NO: 201573 - DNA, 25 bp, Artificial
  Probe
cttccacctggtgattgctccagtg

SEQ ID NO: 201574 - DNA, 25 bp, Artificial
  Probe
tgaaggatttctaccccaaagatgt

SEQ ID NO: 201575 - DNA, 25 bp, Artificial
  Probe
gttagcactttctgtttctcctgat

SEQ ID NO: 201576 - DNA, 25 bp, Artificial
  Probe
cctttttagctaaatgtggaaagct

SEQ ID NO: 201577 - DNA, 25 bp, Artificial
  Probe
ttgactgccaagttattcttttaag

SEQ ID NO: 201578 - DNA, 25 bp, Artificial
  Probe
tgaatataagtctcagatcgtccaa

SEQ ID NO: 201579 - DNA, 25 bp, Artificial
  Probe
tgaagcacagcaaggctgacggaac

SEQ ID NO: 201580 - DNA, 25 bp, Artificial
  Probe
aaggctgacggaaccttccacctgg

SEQ ID NO: 201581 - DNA, 25 bp, Artificial
  Probe
cctagtagcactagggtgtgaacaa

SEQ ID NO: 201582 - DNA, 25 bp, Artificial
  Probe
tcatctttggacaaggaacccaagt

SEQ ID NO: 201583 - DNA, 25 bp, Artificial
  Probe
atgttagcactttctgtttctcctg

SEQ ID NO: 201584 - DNA, 25 bp, Artificial
  Probe
gaggtagggcccactctctgtgttt

SEQ ID NO: 201585 - DNA, 25 bp, Artificial
  Probe
gaacaatgttagcactttctgtttc

SEQ ID NO: 201586 - DNA, 25 bp, Artificial
  Probe
aagtctcagatcgtccaagaagata

SEQ ID NO: 201587 - DNA, 25 bp, Artificial
  Probe
gttcatcctttatagggataactac

SEQ ID NO: 201588 - DNA, 25 bp, Artificial
  Probe
tatttacccagaactggaaagtggg

SEQ ID NO: 201589 - DNA, 25 bp, Artificial
  Probe
attgctccagtgaggcttgaagaca

SEQ ID NO: 201590 - DNA, 25 bp, Artificial
  Probe
ctgccaagttattcttttaaggtgg

SEQ ID NO: 201591 - DNA, 25 bp, Artificial
  Probe
gaacccaagtgactgtggaaccaaa

SEQ ID NO: 201592 - DNA, 25 bp, Artificial
  Probe
atgtggaaagctgctcatccctagc

SEQ ID NO: 201593 - DNA, 25 bp, Artificial
  Probe
gagagagaacccatacctttttagc

SEQ ID NO: 201594 - DNA, 25 bp, Artificial
  Probe
cagccacataggagagttttcctag

SEQ ID NO: 201595 - DNA, 25 bp, Artificial
  Probe
tggtatcgcaaaaggccagacgggt

SEQ ID NO: 201596 - DNA, 25 bp, Artificial
  Probe
aggccagacgggtccttccagttca

SEQ ID NO: 201597 - DNA, 25 bp, Artificial
  Probe
gtgaaggatttctaccccaaagatg

SEQ ID NO: 201598 - DNA, 25 bp, Artificial
  Probe
taccccaaagatgtgaatataagtc

SEQ ID NO: 201599 - DNA, 25 bp, Artificial
  Probe
acagcaaggctgacggaaccttcca

SEQ ID NO: 201600 - DNA, 25 bp, Artificial
  Probe
acataggagagttttcctagtagca

SEQ ID NO: 201601 - DNA, 25 bp, Artificial
  Probe
ctgtcttcattatgaaaaatggaac

SEQ ID NO: 201602 - DNA, 25 bp, Artificial
  Probe
tgcttgtctggtgaaggatttctac

SEQ ID NO: 201603 - DNA, 25 bp, Artificial
  Probe
taggagagttttcctagtagcacta

SEQ ID NO: 201604 - DNA, 25 bp, Artificial
  Probe
ggaaccttccacctggtgattgctc

SEQ ID NO: 201605 - DNA, 25 bp, Artificial
  Probe
tctacagcctcctctttttgctggg

SEQ ID NO: 201606 - DNA, 25 bp, Artificial
  Probe
tcctctttttgctggggctgctagg

SEQ ID NO: 201607 - DNA, 25 bp, Artificial
  Probe
ctatgcccatatcctggctgtgctg

SEQ ID NO: 201608 - DNA, 25 bp, Artificial
  Probe
tttagaactagttgcctggagcccc

SEQ ID NO: 201609 - DNA, 25 bp, Artificial
  Probe
tgagccagcgcactgccctgagcag

SEQ ID NO: 201610 - DNA, 25 bp, Artificial
  Probe
caacatgtgcccaattttatggcta

SEQ ID NO: 201611 - DNA, 25 bp, Artificial
  Probe
aaattagcagatagcactcagccat

SEQ ID NO: 201612 - DNA, 25 bp, Artificial
  Probe
cattgccagtacaacttcccacagg

SEQ ID NO: 201613 - DNA, 25 bp, Artificial
  Probe
gctccacctggctgtggccgatgta

SEQ ID NO: 201614 - DNA, 25 bp, Artificial
  Probe
ggtctctgtgtgctctttgccctcc

SEQ ID NO: 201615 - DNA, 25 bp, Artificial
  Probe
agcgcactgccctgagcagcacaga

SEQ ID NO: 201616 - DNA, 25 bp, Artificial
  Probe
gggctagctctaacttacccataac

SEQ ID NO: 201617 - DNA, 25 bp, Artificial
  Probe
gatgtactgctggtactaaccctcc

SEQ ID NO: 201618 - DNA, 25 bp, Artificial
  Probe
cagatttcatcttcctgtcagccag

SEQ ID NO: 201619 - DNA, 25 bp, Artificial
  Probe
cctggtggtgttagtggatatcctt

SEQ ID NO: 201620 - DNA, 25 bp, Artificial
  Probe
tgagaaccactctcagctccaagga

SEQ ID NO: 201621 - DNA, 25 bp, Artificial
  Probe
tgctcatgcgcctgggccgctctga

SEQ ID NO: 201622 - DNA, 25 bp, Artificial
  Probe
gaccccctatcacctggtggtgtta

SEQ ID NO: 201623 - DNA, 25 bp, Artificial
  Probe
tccttatggacgtgggagttttggc

SEQ ID NO: 201624 - DNA, 25 bp, Artificial
  Probe
aaatgtggatgttgctcatgcgcct

SEQ ID NO: 201625 - DNA, 25 bp, Artificial
  Probe
tgctgggactcagtgacagctcagc

SEQ ID NO: 201626 - DNA, 25 bp, Artificial
  Probe
catgggctacatgcactgctgcctc

SEQ ID NO: 201627 - DNA, 25 bp, Artificial
  Probe
ctctatgcctttgtgggagtgaagt

SEQ ID NO: 201628 - DNA, 25 bp, Artificial
  Probe
cagatctaccgcagggacccctggg

SEQ ID NO: 201629 - DNA, 25 bp, Artificial
  Probe
gcagtggctgctgtgctactgagcc

SEQ ID NO: 201630 - DNA, 25 bp, Artificial
  Probe
agctccaaggacagcagcaccttta

SEQ ID NO: 201631 - DNA, 25 bp, Artificial
  Probe
gtgctgctggtctccagaggccaga

SEQ ID NO: 201632 - DNA, 25 bp, Artificial
  Probe
tccactgctctatgcctttgtggga

SEQ ID NO: 201633 - DNA, 25 bp, Artificial
  Probe
cagctccaaggacagcagcaccttt

SEQ ID NO: 201634 - DNA, 25 bp, Artificial
  Probe
ttgtagttgggctagctctaactta

SEQ ID NO: 201635 - DNA, 25 bp, Artificial
  Probe
cccacaggtgggtcggactgctctg

SEQ ID NO: 201636 - DNA, 25 bp, Artificial
  Probe
caaatagcactgaaggccaggcctt

SEQ ID NO: 201637 - DNA, 25 bp, Artificial
  Probe
tccctgtgtgagaagaggaagagac

SEQ ID NO: 201638 - DNA, 25 bp, Artificial
  Probe
ggagcctgtgcaacccaagtcctaa

SEQ ID NO: 201639 - DNA, 25 bp, Artificial
  Probe
atgccacccagatctaccgcaggga

SEQ ID NO: 201640 - DNA, 25 bp, Artificial
  Probe
cagcggcagccttcatcttcacgga

SEQ ID NO: 201641 - DNA, 25 bp, Artificial
  Probe
ccctgcctccgctgttttagaacta

SEQ ID NO: 201642 - DNA, 25 bp, Artificial
  Probe
ttgacagaaccttcctgccagtcct

SEQ ID NO: 201643 - DNA, 25 bp, Artificial
  Probe
ggtctccaatatctcaacatgtgcc

SEQ ID NO: 201644 - DNA, 25 bp, Artificial
  Probe
gccagccatgatcagcgcctcaatg

SEQ ID NO: 201645 - DNA, 25 bp, Artificial
  Probe
tgagcagcacagacaccttcctgct

SEQ ID NO: 201646 - DNA, 25 bp, Artificial
  Probe
cccactgtgggcagtagatgctgct

SEQ ID NO: 201647 - DNA, 25 bp, Artificial
  Probe
gctgtgctgctggtctccagaggcc

SEQ ID NO: 201648 - DNA, 25 bp, Artificial
  Probe
ctttcgagctatgaggctagtggtg

SEQ ID NO: 201649 - DNA, 25 bp, Artificial
  Probe
tgtggggtctctgtgtgctctttgc

SEQ ID NO: 201650 - DNA, 25 bp, Artificial
  Probe
gacccctgggtacgtgtagccctca

SEQ ID NO: 201651 - DNA, 25 bp, Artificial
  Probe
tgtttggtcactgactgaataatac

SEQ ID NO: 201652 - DNA, 25 bp, Artificial
  Probe
ttctcaaaactgacagttctgttgt

SEQ ID NO: 201653 - DNA, 25 bp, Artificial
  Probe
gaaagtcgtgcctcaaattagaata

SEQ ID NO: 201654 - DNA, 25 bp, Artificial
  Probe
tcctccaagatctccagtgaaagtc

SEQ ID NO: 201655 - DNA, 25 bp, Artificial
  Probe
tgttagtcattctcaaaactgacag

SEQ ID NO: 201656 - DNA, 25 bp, Artificial
  Probe
gttgtaacctgttagtcattctcaa

SEQ ID NO: 201657 - DNA, 25 bp, Artificial
  Probe
gtcattctcaaaactgacagttctg

SEQ ID NO: 201658 - DNA, 25 bp, Artificial
  Probe
attctcaaaactgacagttctgttg

SEQ ID NO: 201659 - DNA, 25 bp, Artificial
  Probe
tggtcactgactgaataatacagtc

SEQ ID NO: 201660 - DNA, 25 bp, Artificial
  Probe
ctgggtttacccagtcctccaagat

SEQ ID NO: 201661 - DNA, 25 bp, Artificial
  Probe
agatctccagtgaaagtcgtgcctc

SEQ ID NO: 201662 - DNA, 25 bp, Artificial
  Probe
atagaacttgagtctgaagacaacg

SEQ ID NO: 201663 - DNA, 25 bp, Artificial
  Probe
acttgagtctgaagacaacgattat

SEQ ID NO: 201664 - DNA, 25 bp, Artificial
  Probe
gtcactgactgaataatacagtcac

SEQ ID NO: 201665 - DNA, 25 bp, Artificial
  Probe
cagtcctccaagatctccagtgaaa

SEQ ID NO: 201666 - DNA, 25 bp, Artificial
  Probe
tctcaaaactgacagttctgttgtt

SEQ ID NO: 201667 - DNA, 25 bp, Artificial
  Probe
tcaaaactgacagttctgttgttaa

SEQ ID NO: 201668 - DNA, 25 bp, Artificial
  Probe
aaactgacagttctgttgttaactg

SEQ ID NO: 201669 - DNA, 25 bp, Artificial
  Probe
tctccagtgaaagtcgtgcctcaaa

SEQ ID NO: 201670 - DNA, 25 bp, Artificial
  Probe
gtttggtcactgactgaataataca

SEQ ID NO: 201671 - DNA, 25 bp, Artificial
  Probe
tccttgagtcactgggtttacccag

SEQ ID NO: 201672 - DNA, 25 bp, Artificial
  Probe
caacgattatctttggaggaacaag

SEQ ID NO: 201673 - DNA, 25 bp, Artificial
  Probe
ttccttgagtcactgggtttaccca

SEQ ID NO: 201674 - DNA, 25 bp, Artificial
  Probe
agaacttgagtctgaagacaacgat

SEQ ID NO: 201675 - DNA, 25 bp, Artificial
  Probe
aatagaacttgagtctgaagacaac

SEQ ID NO: 201676 - DNA, 25 bp, Artificial
  Probe
cagttctgttgttaactgttctaat

SEQ ID NO: 201677 - DNA, 25 bp, Artificial
  Probe
ccacgttgtaacctgttagtcattc

SEQ ID NO: 201678 - DNA, 25 bp, Artificial
  Probe
cgtgcctcaaattagaatagaactt

SEQ ID NO: 201679 - DNA, 25 bp, Artificial
  Probe
aaccacgttgtaacctgttagtcat

SEQ ID NO: 201680 - DNA, 25 bp, Artificial
  Probe
tctctgcttctctcttgcataggta

SEQ ID NO: 201681 - DNA, 25 bp, Artificial
  Probe
cagtgaaagtcgtgcctcaaattag

SEQ ID NO: 201682 - DNA, 25 bp, Artificial
  Probe
gttagtcattctcaaaactgacagt

SEQ ID NO: 201683 - DNA, 25 bp, Artificial
  Probe
aagtcgtgcctcaaattagaataga

SEQ ID NO: 201684 - DNA, 25 bp, Artificial
  Probe
gtcgtgcctcaaattagaatagaac

SEQ ID NO: 201685 - DNA, 25 bp, Artificial
  Probe
ccagtgaaagtcgtgcctcaaatta

SEQ ID NO: 201686 - DNA, 25 bp, Artificial
  Probe
aattcctttccttgagtcactgggt

SEQ ID NO: 201687 - DNA, 25 bp, Artificial
  Probe
atctccagtgaaagtcgtgcctcaa

SEQ ID NO: 201688 - DNA, 25 bp, Artificial
  Probe
ggaacagaaaccacgttgtaacctg

SEQ ID NO: 201689 - DNA, 25 bp, Artificial
  Probe
ccaagatctccagtgaaagtcgtgc

SEQ ID NO: 201690 - DNA, 25 bp, Artificial
  Probe
tgggtttacccagtcctccaagatc

SEQ ID NO: 201691 - DNA, 25 bp, Artificial
  Probe
gtcactgggtttacccagtcctcca

SEQ ID NO: 201692 - DNA, 25 bp, Artificial
  Probe
gaacagaaaccacgttgtaacctgt

SEQ ID NO: 201693 - DNA, 25 bp, Artificial
  Probe
agacaacgattatctttggaggaac

SEQ ID NO: 201694 - DNA, 25 bp, Artificial
  Probe
ccagtcctccaagatctccagtgaa

SEQ ID NO: 201695 - DNA, 25 bp, Artificial
  Probe
ggtttacccagtcctccaagatctc

SEQ ID NO: 201696 - DNA, 25 bp, Artificial
  Probe
cagaaaccacgttgtaacctgttag

SEQ ID NO: 201697 - DNA, 25 bp, Artificial
  Probe
gcaaatgctgcctggctttgtattc

SEQ ID NO: 201698 - DNA, 25 bp, Artificial
  Probe
gcagctaccaagattccaaataaag

SEQ ID NO: 201699 - DNA, 25 bp, Artificial
  Probe
atggagcaaatgctgcctggctttg

SEQ ID NO: 201700 - DNA, 25 bp, Artificial
  Probe
cacccttttgattggagcttttgtg

SEQ ID NO: 201701 - DNA, 25 bp, Artificial
  Probe
acccaagagaagactctttcccatg

SEQ ID NO: 201702 - DNA, 25 bp, Artificial
  Probe
gatctccggcaaaatgaaaactcag

SEQ ID NO: 201703 - DNA, 25 bp, Artificial
  Probe
attggagcttttgtgatgcagctac

SEQ ID NO: 201704 - DNA, 25 bp, Artificial
  Probe
tcacatatgcaatttgaggtccaat

SEQ ID NO: 201705 - DNA, 25 bp, Artificial
  Probe
ctggctttgtattccccatttagga

SEQ ID NO: 201706 - DNA, 25 bp, Artificial
  Probe
taccttgagatctccggcaaaatga

SEQ ID NO: 201707 - DNA, 25 bp, Artificial
  Probe
aaactcaggcagtttagtccatagt

SEQ ID NO: 201708 - DNA, 25 bp, Artificial
  Probe
ctagtgtttgtgctaacgtagtcag

SEQ ID NO: 201709 - DNA, 25 bp, Artificial
  Probe
ctcacttgctgcagatggagcaaat

SEQ ID NO: 201710 - DNA, 25 bp, Artificial
  Probe
tttgtattccccatttaggagtcta

SEQ ID NO: 201711 - DNA, 25 bp, Artificial
  Probe
agactctttcccatggtgttgtcct

SEQ ID NO: 201712 - DNA, 25 bp, Artificial
  Probe
tccggcagtggttgtgatttagagc

SEQ ID NO: 201713 - DNA, 25 bp, Artificial
  Probe
gagatctccggcaaaatgaaaactc

SEQ ID NO: 201714 - DNA, 25 bp, Artificial
  Probe
gccaaacgtgctaaaggcttttcta

SEQ ID NO: 201715 - DNA, 25 bp, Artificial
  Probe
gagaagactctttcccatggtgttg

SEQ ID NO: 201716 - DNA, 25 bp, Artificial
  Probe
gaagcaagtgcctcactcacttgct

SEQ ID NO: 201717 - DNA, 25 bp, Artificial
  Probe
ccatggtgttgtcctgggtccggca

SEQ ID NO: 201718 - DNA, 25 bp, Artificial
  Probe
tgatttagagccaaacgtgctaaag

SEQ ID NO: 201719 - DNA, 25 bp, Artificial
  Probe
tgctgcagatggagcaaatgctgcc

SEQ ID NO: 201720 - DNA, 25 bp, Artificial
  Probe
cctgtttgaacattcagcacaaaag

SEQ ID NO: 201721 - DNA, 25 bp, Artificial
  Probe
ttttgtcacagatgcccctagtgtt

SEQ ID NO: 201722 - DNA, 25 bp, Artificial
  Probe
ccggcagtggttgtgatttagagcc

SEQ ID NO: 201723 - DNA, 25 bp, Artificial
  Probe
tatgcaatttgaggtccaatccttc

SEQ ID NO: 201724 - DNA, 25 bp, Artificial
  Probe
ctaacgtagtcagaagcaagtgcct

SEQ ID NO: 201725 - DNA, 25 bp, Artificial
  Probe
tcatcgtgtccctgtttgaacattc

SEQ ID NO: 201726 - DNA, 25 bp, Artificial
  Probe
cacagatgcccctagtgtttgtgct

SEQ ID NO: 201727 - DNA, 25 bp, Artificial
  Probe
tgattcatcgtgtccctgtttgaac

SEQ ID NO: 201728 - DNA, 25 bp, Artificial
  Probe
gatggagcaaatgctgcctggcttt

SEQ ID NO: 201729 - DNA, 25 bp, Artificial
  Probe
aaatgaaaactcaggcagtttagtc

SEQ ID NO: 201730 - DNA, 25 bp, Artificial
  Probe
cttgctgcagatggagcaaatgctg

SEQ ID NO: 201731 - DNA, 25 bp, Artificial
  Probe
ttaaatcgtgttttgtcacagatgc

SEQ ID NO: 201732 - DNA, 25 bp, Artificial
  Probe
gcaatttgaggtccaatccttccct

SEQ ID NO: 201733 - DNA, 25 bp, Artificial
  Probe
gtattccccatttaggagtctatca

SEQ ID NO: 201734 - DNA, 25 bp, Artificial
  Probe
atgctgcctggctttgtattcccca

SEQ ID NO: 201735 - DNA, 25 bp, Artificial
  Probe
cccatttaggagtctatcacatatg

SEQ ID NO: 201736 - DNA, 25 bp, Artificial
  Probe
tgtttgtgctaacgtagtcagaagc

SEQ ID NO: 201737 - DNA, 25 bp, Artificial
  Probe
cgtgctaaaggcttttctaccttga

SEQ ID NO: 201738 - DNA, 25 bp, Artificial
  Probe
gtttgaacattcagcacaaaagtct

SEQ ID NO: 201739 - DNA, 25 bp, Artificial
  Probe
cccttttgattggagcttttgtgat

SEQ ID NO: 201740 - DNA, 25 bp, Artificial
  Probe
gtccctgtttgaacattcagcacaa

SEQ ID NO: 201741 - DNA, 25 bp, Artificial
  Probe
cagtttagtccatagtagtactatt

SEQ ID NO: 201742 - DNA, 25 bp, Artificial
  Probe
gatgcagctaccaagattccaaata

SEQ ID NO: 201743 - DNA, 25 bp, Artificial
  Probe
tccgctctgcccaaagtcagaacat

SEQ ID NO: 201744 - DNA, 25 bp, Artificial
  Probe
cccatcctgtctcagaggggctgac

SEQ ID NO: 201745 - DNA, 25 bp, Artificial
  Probe
ggggtgtttttctctgtcttgcaca

SEQ ID NO: 201746 - DNA, 25 bp, Artificial
  Probe
agaggctgggccaccgcttcccaga

SEQ ID NO: 201747 - DNA, 25 bp, Artificial
  Probe
tggcagccctgagtttgcgtagaga

SEQ ID NO: 201748 - DNA, 25 bp, Artificial
  Probe
cctgctactttggaaggtcggaagg

SEQ ID NO: 201749 - DNA, 25 bp, Artificial
  Probe
gggcaaacaggcacccctgctttgg

SEQ ID NO: 201750 - DNA, 25 bp, Artificial
  Probe
agcctatttaagagcggcatcagct

SEQ ID NO: 201751 - DNA, 25 bp, Artificial
  Probe
tggatctggttgcaatgtgaccccc

SEQ ID NO: 201752 - DNA, 25 bp, Artificial
  Probe
ttcccagcacacctgctactttgga

SEQ ID NO: 201753 - DNA, 25 bp, Artificial
  Probe
tcgcatggtgctactgaaccccatc

SEQ ID NO: 201754 - DNA, 25 bp, Artificial
  Probe
tcagggattccgagcccagagtgag

SEQ ID NO: 201755 - DNA, 25 bp, Artificial
  Probe
ccatcctgagtgtagtggtaatttt

SEQ ID NO: 201756 - DNA, 25 bp, Artificial
  Probe
gtctgaacacgtccatcaaggccct

SEQ ID NO: 201757 - DNA, 25 bp, Artificial
  Probe
tctcagaggggctgacagatgctct

SEQ ID NO: 201758 - DNA, 25 bp, Artificial
  Probe
ccagcaaaagcaactgtggatctgg

SEQ ID NO: 201759 - DNA, 25 bp, Artificial
  Probe
aagggacctaagcacagtcctgacc

SEQ ID NO: 201760 - DNA, 25 bp, Artificial
  Probe
ggtacacagattcttcagatcatga

SEQ ID NO: 201761 - DNA, 25 bp, Artificial
  Probe
ttctgttgggccaatttgtggtaca

SEQ ID NO: 201762 - DNA, 25 bp, Artificial
  Probe
cttgattaagccaaatgtagcaagg

SEQ ID NO: 201763 - DNA, 25 bp, Artificial
  Probe
tttaagagcggcatcagctggggcc

SEQ ID NO: 201764 - DNA, 25 bp, Artificial
  Probe
ctcagaggggctgacagatgctctg

SEQ ID NO: 201765 - DNA, 25 bp, Artificial
  Probe
attccgagcccagagtgagggcaga

SEQ ID NO: 201766 - DNA, 25 bp, Artificial
  Probe
caaagtcagaacattggggaccagt

SEQ ID NO: 201767 - DNA, 25 bp, Artificial
  Probe
ccccgatccatttttgcctttgcgg

SEQ ID NO: 201768 - DNA, 25 bp, Artificial
  Probe
ggaccagtggctctaacctgccttc

SEQ ID NO: 201769 - DNA, 25 bp, Artificial
  Probe
cccatcctgagtgtagtggtaattt

SEQ ID NO: 201770 - DNA, 25 bp, Artificial
  Probe
agaacattggggaccagtggctcta

SEQ ID NO: 201771 - DNA, 25 bp, Artificial
  Probe
gagaactacaccagcaaaagcaact

SEQ ID NO: 201772 - DNA, 25 bp, Artificial
  Probe
gtgacctgctttttggctgatatca

SEQ ID NO: 201773 - DNA, 25 bp, Artificial
  Probe
ctgaccactgctaccaacctagtgg

SEQ ID NO: 201774 - DNA, 25 bp, Artificial
  Probe
tgccagatggattgcacagagaggt

SEQ ID NO: 201775 - DNA, 25 bp, Artificial
  Probe
cctgctttggaaagccacggcccgg

SEQ ID NO: 201776 - DNA, 25 bp, Artificial
  Probe
tgggccaggtgacctgctttttggc

SEQ ID NO: 201777 - DNA, 25 bp, Artificial
  Probe
cctccctacataggaccagctgtag

SEQ ID NO: 201778 - DNA, 25 bp, Artificial
  Probe
catttttgcctttgcggctggactc

SEQ ID NO: 201779 - DNA, 25 bp, Artificial
  Probe
gggacctaagcacagtcctgaccct

SEQ ID NO: 201780 - DNA, 25 bp, Artificial
  Probe
tgcctttgcggctggactctcaggg

SEQ ID NO: 201781 - DNA, 25 bp, Artificial
  Probe
ttctctgtcttgcacaacatagggg

SEQ ID NO: 201782 - DNA, 25 bp, Artificial
  Probe
tgctaccaacctagtgggtaaggga

SEQ ID NO: 201783 - DNA, 25 bp, Artificial
  Probe
actacaccattacattgccagatgg

SEQ ID NO: 201784 - DNA, 25 bp, Artificial
  Probe
tacataggaccagctgtaggggtgt

SEQ ID NO: 201785 - DNA, 25 bp, Artificial
  Probe
ccccaacatcgcatggtgctactga

SEQ ID NO: 201786 - DNA, 25 bp, Artificial
  Probe
cctgagtttgcgtagagaccccatc

SEQ ID NO: 201787 - DNA, 25 bp, Artificial
  Probe
tgctttttggctgatatcatactac

SEQ ID NO: 201788 - DNA, 25 bp, Artificial
  Probe
aggtgagagctcagaccacagctgt

SEQ ID NO: 201789 - DNA, 25 bp, Artificial
  Probe
tctcatgacagctgtttggttctcc

SEQ ID NO: 201790 - DNA, 25 bp, Artificial
  Probe
acccctatctagatgtagaggcatg

SEQ ID NO: 201791 - DNA, 25 bp, Artificial
  Probe
gggctcttctatctattttgtaaaa

SEQ ID NO: 201792 - DNA, 25 bp, Artificial
  Probe
tgtttggttctccatgacccctatc

SEQ ID NO: 201793 - DNA, 25 bp, Artificial
  Probe
ggatgatgcctgtcaaggtcccacc

SEQ ID NO: 201794 - DNA, 25 bp, Artificial
  Probe
ccggatgatgcctgtcaaggtccca

SEQ ID NO: 201795 - DNA, 25 bp, Artificial
  Probe
ttgagttttaccactcctcctagtg

SEQ ID NO: 201796 - DNA, 25 bp, Artificial
  Probe
cggctgttctcatgacagctgtttg

SEQ ID NO: 201797 - DNA, 25 bp, Artificial
  Probe
tgggggcacccattagaatctttgc

SEQ ID NO: 201798 - DNA, 25 bp, Artificial
  Probe
ccctatctagatgtagaggcatgga

SEQ ID NO: 201799 - DNA, 25 bp, Artificial
  Probe
atgacccctatctagatgtagaggc

SEQ ID NO: 201800 - DNA, 25 bp, Artificial
  Probe
ctccatgacccctatctagatgtag

SEQ ID NO: 201801 - DNA, 25 bp, Artificial
  Probe
gtgagtcagggatttcccgaacttg

SEQ ID NO: 201802 - DNA, 25 bp, Artificial
  Probe
gtgtcccggatgatgcctgtcaagg

SEQ ID NO: 201803 - DNA, 25 bp, Artificial
  Probe
tccggctgttctcatgacagctgtt

SEQ ID NO: 201804 - DNA, 25 bp, Artificial
  Probe
ttggttctccatgacccctatctag

SEQ ID NO: 201805 - DNA, 25 bp, Artificial
  Probe
tgagttttaccactcctcctagtgg

SEQ ID NO: 201806 - DNA, 25 bp, Artificial
  Probe
ccggctgttctcatgacagctgttt

SEQ ID NO: 201807 - DNA, 25 bp, Artificial
  Probe
gagttttaccactcctcctagtggc

SEQ ID NO: 201808 - DNA, 25 bp, Artificial
  Probe
gagtcagggatttcccgaacttgag

SEQ ID NO: 201809 - DNA, 25 bp, Artificial
  Probe
cccctatctagatgtagaggcatgg

SEQ ID NO: 201810 - DNA, 25 bp, Artificial
  Probe
tgagtcagggatttcccgaacttga

SEQ ID NO: 201811 - DNA, 25 bp, Artificial
  Probe
gttctcatgacagctgtttggttct

SEQ ID NO: 201812 - DNA, 25 bp, Artificial
  Probe
tgttctcatgacagctgtttggttc

SEQ ID NO: 201813 - DNA, 25 bp, Artificial
  Probe
ccatgacccctatctagatgtagag

SEQ ID NO: 201814 - DNA, 25 bp, Artificial
  Probe
gggggcacccattagaatctttgcc

SEQ ID NO: 201815 - DNA, 25 bp, Artificial
  Probe
tgggctcttctatctattttgtaaa

SEQ ID NO: 201816 - DNA, 25 bp, Artificial
  Probe
cctatctagatgtagaggcatggag

SEQ ID NO: 201817 - DNA, 25 bp, Artificial
  Probe
tgtcccggatgatgcctgtcaaggt

SEQ ID NO: 201818 - DNA, 25 bp, Artificial
  Probe
cggatgatgcctgtcaaggtcccac

SEQ ID NO: 201819 - DNA, 25 bp, Artificial
  Probe
gctgttctcatgacagctgtttggt

SEQ ID NO: 201820 - DNA, 25 bp, Artificial
  Probe
tccatgacccctatctagatgtaga

SEQ ID NO: 201821 - DNA, 25 bp, Artificial
  Probe
tggttctccatgacccctatctaga

SEQ ID NO: 201822 - DNA, 25 bp, Artificial
  Probe
ctgttctcatgacagctgtttggtt

SEQ ID NO: 201823 - DNA, 25 bp, Artificial
  Probe
catgacccctatctagatgtagagg

SEQ ID NO: 201824 - DNA, 25 bp, Artificial
  Probe
cactcctcctagtggctgccttagg

SEQ ID NO: 201825 - DNA, 25 bp, Artificial
  Probe
gacccctatctagatgtagaggcat

SEQ ID NO: 201826 - DNA, 25 bp, Artificial
  Probe
gatgatgcctgtcaaggtcccacct

SEQ ID NO: 201827 - DNA, 25 bp, Artificial
  Probe
ctccggctgttctcatgacagctgt

SEQ ID NO: 201828 - DNA, 25 bp, Artificial
  Probe
cctccggctgttctcatgacagctg

SEQ ID NO: 201829 - DNA, 25 bp, Artificial
  Probe
ggctgttctcatgacagctgtttgg

SEQ ID NO: 201830 - DNA, 25 bp, Artificial
  Probe
gggcacccattagaatctttgcccg

SEQ ID NO: 201831 - DNA, 25 bp, Artificial
  Probe
ggggcacccattagaatctttgccc

SEQ ID NO: 201832 - DNA, 25 bp, Artificial
  Probe
ttctcatgacagctgtttggttctc

SEQ ID NO: 201833 - DNA, 25 bp, Artificial
  Probe
tacccagagatgctcctgagctcac

SEQ ID NO: 201834 - DNA, 25 bp, Artificial
  Probe
ggcacccattagaatctttgcccgg

SEQ ID NO: 201835 - DNA, 25 bp, Artificial
  Probe
cttgtctggcattgcagtgttgttt

SEQ ID NO: 201836 - DNA, 25 bp, Artificial
  Probe
gccttgtctggcattgcagtgttgt

SEQ ID NO: 201837 - DNA, 25 bp, Artificial
  Probe
cgcccctgtgcgacagtggggttct

SEQ ID NO: 201838 - DNA, 25 bp, Artificial
  Probe
caggggccttgtctggcattgcagt

SEQ ID NO: 201839 - DNA, 25 bp, Artificial
  Probe
ccatcctgtccctcaaattacgggt

SEQ ID NO: 201840 - DNA, 25 bp, Artificial
  Probe
agctgaggcccaagggagcaagaca

SEQ ID NO: 201841 - DNA, 25 bp, Artificial
  Probe
ttgcagtgttgtttgtatctggacc

SEQ ID NO: 201842 - DNA, 25 bp, Artificial
  Probe
ccaggagcaccaaatgagaatgtaa

SEQ ID NO: 201843 - DNA, 25 bp, Artificial
  Probe
aagggagcaagacaccccatggggc

SEQ ID NO: 201844 - DNA, 25 bp, Artificial
  Probe
cttctatcagaaaggtttattccag

SEQ ID NO: 201845 - DNA, 25 bp, Artificial
  Probe
accccatggggctcaccagtgagat

SEQ ID NO: 201846 - DNA, 25 bp, Artificial
  Probe
aggcccaagggagcaagacacccca

SEQ ID NO: 201847 - DNA, 25 bp, Artificial
  Probe
gccataacttctatcagaaaggttt

SEQ ID NO: 201848 - DNA, 25 bp, Artificial
  Probe
tctgctcttatgtggcaagcctctc

SEQ ID NO: 201849 - DNA, 25 bp, Artificial
  Probe
accgttgtagagagggctggacttc

SEQ ID NO: 201850 - DNA, 25 bp, Artificial
  Probe
tcaccagtgagatggcacaggcagg

SEQ ID NO: 201851 - DNA, 25 bp, Artificial
  Probe
ttggcctttttggtgcccaaagctg

SEQ ID NO: 201852 - DNA, 25 bp, Artificial
  Probe
ccactgctaccttacagggaccgtt

SEQ ID NO: 201853 - DNA, 25 bp, Artificial
  Probe
tcttatgtggcaagcctctctccta

SEQ ID NO: 201854 - DNA, 25 bp, Artificial
  Probe
aagctgaggcccaagggagcaagac

SEQ ID NO: 201855 - DNA, 25 bp, Artificial
  Probe
aaaggcaaagctgaggcccaaggga

SEQ ID NO: 201856 - DNA, 25 bp, Artificial
  Probe
acagtggggttctggctccctcact

SEQ ID NO: 201857 - DNA, 25 bp, Artificial
  Probe
ctggcattgcagtgttgtttgtatc

SEQ ID NO: 201858 - DNA, 25 bp, Artificial
  Probe
gtgagtcatagctcgacacctccag

SEQ ID NO: 201859 - DNA, 25 bp, Artificial
  Probe
cagtgttgtttgtatctggacctgt

SEQ ID NO: 201860 - DNA, 25 bp, Artificial
  Probe
agagagggctggacttcatgtccag

SEQ ID NO: 201861 - DNA, 25 bp, Artificial
  Probe
atctggacctgtatatttgtaaagc

SEQ ID NO: 201862 - DNA, 25 bp, Artificial
  Probe
tgatctcctgactggccagggccag

SEQ ID NO: 201863 - DNA, 25 bp, Artificial
  Probe
gtggcaagcctctctcctacatggc

SEQ ID NO: 201864 - DNA, 25 bp, Artificial
  Probe
gagcctgtagggaggctctgctctt

SEQ ID NO: 201865 - DNA, 25 bp, Artificial
  Probe
ctggccagggccaggagcaccaaat

SEQ ID NO: 201866 - DNA, 25 bp, Artificial
  Probe
aaagctgagcctgtagggaggctct

SEQ ID NO: 201867 - DNA, 25 bp, Artificial
  Probe
agggagcaagacaccccatggggct

SEQ ID NO: 201868 - DNA, 25 bp, Artificial
  Probe
tgggccttggcctttttggtgccca

SEQ ID NO: 201869 - DNA, 25 bp, Artificial
  Probe
gggtggccataacttctatcagaaa

SEQ ID NO: 201870 - DNA, 25 bp, Artificial
  Probe
tgtccctcaaattacgggtacctga

SEQ ID NO: 201871 - DNA, 25 bp, Artificial
  Probe
aagcaggggccttgtctggcattgc

SEQ ID NO: 201872 - DNA, 25 bp, Artificial
  Probe
ctgtccctcaaattacgggtacctg

SEQ ID NO: 201873 - DNA, 25 bp, Artificial
  Probe
ctgctaccttacagggaccgttgta

SEQ ID NO: 201874 - DNA, 25 bp, Artificial
  Probe
tttttggtgcccaaagctgagcctg

SEQ ID NO: 201875 - DNA, 25 bp, Artificial
  Probe
gtcatagctcgacacctccaggctg

SEQ ID NO: 201876 - DNA, 25 bp, Artificial
  Probe
ctcctacatggcaccttgtgcctgg

SEQ ID NO: 201877 - DNA, 25 bp, Artificial
  Probe
gcgacagtggggttctggctccctc

SEQ ID NO: 201878 - DNA, 25 bp, Artificial
  Probe
tgcccaaagctgagcctgtagggag

SEQ ID NO: 201879 - DNA, 25 bp, Artificial
  Probe
acatggcaccttgtgcctggggtga

SEQ ID NO: 201880 - DNA, 25 bp, Artificial
  Probe
tgtggcaagcctctctcctacatgg

SEQ ID NO: 201881 - DNA, 25 bp, Artificial
  Probe
tggttatgccttcaccacgggatca

SEQ ID NO: 201882 - DNA, 25 bp, Artificial
  Probe
aatggttatgccttcaccacgggat

SEQ ID NO: 201883 - DNA, 25 bp, Artificial
  Probe
atctgggatgccatgaagggtgacc

SEQ ID NO: 201884 - DNA, 25 bp, Artificial
  Probe
gttatgccttcaccacgggatcaga

SEQ ID NO: 201885 - DNA, 25 bp, Artificial
  Probe
ctgatcaggagctgctcatgtattc

SEQ ID NO: 201886 - DNA, 25 bp, Artificial
  Probe
caaccaaatcatcaccagctctggg

SEQ ID NO: 201887 - DNA, 25 bp, Artificial
  Probe
cctgcgggctgatcaggagctgctc

SEQ ID NO: 201888 - DNA, 25 bp, Artificial
  Probe
caaatcatcaccagctctggggaca

SEQ ID NO: 201889 - DNA, 25 bp, Artificial
  Probe
tgataaccgtgtgagctgccttggg

SEQ ID NO: 201890 - DNA, 25 bp, Artificial
  Probe
tgaccgtgcaggtgtcctcgctggc

SEQ ID NO: 201891 - DNA, 25 bp, Artificial
  Probe
aaccaaatcatcaccagctctgggg

SEQ ID NO: 201892 - DNA, 25 bp, Artificial
  Probe
caggagctgctcatgtattcccacg

SEQ ID NO: 201893 - DNA, 25 bp, Artificial
  Probe
aggtgtcctcgctggccatgataac

SEQ ID NO: 201894 - DNA, 25 bp, Artificial
  Probe
ctggccatgataaccgtgtgagctg

SEQ ID NO: 201895 - DNA, 25 bp, Artificial
  Probe
accacgggatcagatgatgccacat

SEQ ID NO: 201896 - DNA, 25 bp, Artificial
  Probe
acctgcgggctgatcaggagctgct

SEQ ID NO: 201897 - DNA, 25 bp, Artificial
  Probe
tgatcaggagctgctcatgtattcc

SEQ ID NO: 201898 - DNA, 25 bp, Artificial
  Probe
gcaacatctgggatgccatgaaggg

SEQ ID NO: 201899 - DNA, 25 bp, Artificial
  Probe
cgggctgatcaggagctgctcatgt

SEQ ID NO: 201900 - DNA, 25 bp, Artificial
  Probe
atgtcgcctgtttgacctgcgggct

SEQ ID NO: 201901 - DNA, 25 bp, Artificial
  Probe
tgtgccgacagacattcataggtca

SEQ ID NO: 201902 - DNA, 25 bp, Artificial
  Probe
tgcctccatcaagctgtgggatgtt

SEQ ID NO: 201903 - DNA, 25 bp, Artificial
  Probe
tccatgtgccgacagacattcatag

SEQ ID NO: 201904 - DNA, 25 bp, Artificial
  Probe
tggacgacaaccaaatcatcaccag

SEQ ID NO: 201905 - DNA, 25 bp, Artificial
  Probe
cttcaccacgggatcagatgatgcc

SEQ ID NO: 201906 - DNA, 25 bp, Artificial
  Probe
ataaccgtgtgagctgccttggggt

SEQ ID NO: 201907 - DNA, 25 bp, Artificial
  Probe
tcacgaatcggacatcaatgctgtg

SEQ ID NO: 201908 - DNA, 25 bp, Artificial
  Probe
tcgcctgtttgacctgcgggctgat

SEQ ID NO: 201909 - DNA, 25 bp, Artificial
  Probe
cacgaatcggacatcaatgctgtgg

SEQ ID NO: 201910 - DNA, 25 bp, Artificial
  Probe
tatgccttcaccacgggatcagatg

SEQ ID NO: 201911 - DNA, 25 bp, Artificial
  Probe
atactgggtacctctcctgctgccg

SEQ ID NO: 201912 - DNA, 25 bp, Artificial
  Probe
ccacatgtcgcctgtttgacctgcg

SEQ ID NO: 201913 - DNA, 25 bp, Artificial
  Probe
gtgcaggtgtcctcgctggccatga

SEQ ID NO: 201914 - DNA, 25 bp, Artificial
  Probe
aatcatcaccagctctggggacacc

SEQ ID NO: 201915 - DNA, 25 bp, Artificial
  Probe
ataggtcacgaatcggacatcaatg

SEQ ID NO: 201916 - DNA, 25 bp, Artificial
  Probe
ggacgacaaccaaatcatcaccagc

SEQ ID NO: 201917 - DNA, 25 bp, Artificial
  Probe
acagacattcataggtcacgaatcg

SEQ ID NO: 201918 - DNA, 25 bp, Artificial
  Probe
ccatgataaccgtgtgagctgcctt

SEQ ID NO: 201919 - DNA, 25 bp, Artificial
  Probe
gctgctgctcgctggctatgacgac

SEQ ID NO: 201920 - DNA, 25 bp, Artificial
  Probe
tgcgggctgatcaggagctgctcat

SEQ ID NO: 201921 - DNA, 25 bp, Artificial
  Probe
tcctcgctggccatgataaccgtgt

SEQ ID NO: 201922 - DNA, 25 bp, Artificial
  Probe
tccatcaagctgtgggatgttcggg

SEQ ID NO: 201923 - DNA, 25 bp, Artificial
  Probe
caacatctgggatgccatgaagggt

SEQ ID NO: 201924 - DNA, 25 bp, Artificial
  Probe
acatgtcgcctgtttgacctgcggg

SEQ ID NO: 201925 - DNA, 25 bp, Artificial
  Probe
atgcctccatcaagctgtgggatgt

SEQ ID NO: 201926 - DNA, 25 bp, Artificial
  Probe
attcataggtcacgaatcggacatc

SEQ ID NO: 201927 - DNA, 25 bp, Artificial
  Probe
ttcgacattgagagtgtgaccccag

SEQ ID NO: 201928 - DNA, 25 bp, Artificial
  Probe
agctcaagaggcttcagatctaaga

SEQ ID NO: 201929 - DNA, 25 bp, Artificial
  Probe
caggctaccggcacagttactgcta

SEQ ID NO: 201930 - DNA, 25 bp, Artificial
  Probe
ttttggccaaactggcttcgacttg

SEQ ID NO: 201931 - DNA, 25 bp, Artificial
  Probe
ttttcccgagacaggctacagcagc

SEQ ID NO: 201932 - DNA, 25 bp, Artificial
  Probe
gtgacattcaaaagggcctcctttt

SEQ ID NO: 201933 - DNA, 25 bp, Artificial
  Probe
acaggctacagcagcaggctaccgg

SEQ ID NO: 201934 - DNA, 25 bp, Artificial
  Probe
cactctataaaggattttggccaaa

SEQ ID NO: 201935 - DNA, 25 bp, Artificial
  Probe
gcttcgacttggaccctggaacatc

SEQ ID NO: 201936 - DNA, 25 bp, Artificial
  Probe
gagtgtgaccccagattggtgtctt

SEQ ID NO: 201937 - DNA, 25 bp, Artificial
  Probe
acagcagcaggctaccggcacagtt

SEQ ID NO: 201938 - DNA, 25 bp, Artificial
  Probe
ttccctcttccctgagaagaagttt

SEQ ID NO: 201939 - DNA, 25 bp, Artificial
  Probe
tctaccgttcctctttgtgttcctg

SEQ ID NO: 201940 - DNA, 25 bp, Artificial
  Probe
aagtttcgacattgagagtgtgacc

SEQ ID NO: 201941 - DNA, 25 bp, Artificial
  Probe
ctttttaactgtagcttcaatgtag

SEQ ID NO: 201942 - DNA, 25 bp, Artificial
  Probe
gagcagctcaagaggcttcagatct

SEQ ID NO: 201943 - DNA, 25 bp, Artificial
  Probe
ttccctgagaagaagtttcgacatt

SEQ ID NO: 201944 - DNA, 25 bp, Artificial
  Probe
caatgtagttggttttcccgagaca

SEQ ID NO: 201945 - DNA, 25 bp, Artificial
  Probe
cagggcccctgactgaagagtagta

SEQ ID NO: 201946 - DNA, 25 bp, Artificial
  Probe
tgtgtgtttacagaaccagcagtct

SEQ ID NO: 201947 - DNA, 25 bp, Artificial
  Probe
ggctacagcagcaggctaccggcac

SEQ ID NO: 201948 - DNA, 25 bp, Artificial
  Probe
cttggaccctggaacatcatttttt

SEQ ID NO: 201949 - DNA, 25 bp, Artificial
  Probe
cgacttggaccctggaacatcattt

SEQ ID NO: 201950 - DNA, 25 bp, Artificial
  Probe
cgagacaggctacagcagcaggcta

SEQ ID NO: 201951 - DNA, 25 bp, Artificial
  Probe
gtagcttcaatgtagttggttttcc

SEQ ID NO: 201952 - DNA, 25 bp, Artificial
  Probe
atttgtgttccctcttccctgagaa

SEQ ID NO: 201953 - DNA, 25 bp, Artificial
  Probe
ccagattggtgtcttctgtgaagat

SEQ ID NO: 201954 - DNA, 25 bp, Artificial
  Probe
tttgcactctataaaggattttggc

SEQ ID NO: 201955 - DNA, 25 bp, Artificial
  Probe
cacagttactgctatgtgtgttttt

SEQ ID NO: 201956 - DNA, 25 bp, Artificial
  Probe
tcgcagggcccctgactgaagagta

SEQ ID NO: 201957 - DNA, 25 bp, Artificial
  Probe
acagaaccagcagtctcgcagggcc

SEQ ID NO: 201958 - DNA, 25 bp, Artificial
  Probe
ttggttttcccgagacaggctacag

SEQ ID NO: 201959 - DNA, 25 bp, Artificial
  Probe
attgagagtgtgaccccagattggt

SEQ ID NO: 201960 - DNA, 25 bp, Artificial
  Probe
attacgtatgagcagctcaagaggc

SEQ ID NO: 201961 - DNA, 25 bp, Artificial
  Probe
ggccaaactggcttcgacttggacc

SEQ ID NO: 201962 - DNA, 25 bp, Artificial
  Probe
agcttcaatgtagttggttttcccg

SEQ ID NO: 201963 - DNA, 25 bp, Artificial
  Probe
tggacctctacaagggtactttgga

SEQ ID NO: 201964 - DNA, 25 bp, Artificial
  Probe
cgttcctctttgtgttcctgatgta

SEQ ID NO: 201965 - DNA, 25 bp, Artificial
  Probe
ctctacaagggtactttggatggta

SEQ ID NO: 201966 - DNA, 25 bp, Artificial
  Probe
gttactgctatgtgtgtttttgacc

SEQ ID NO: 201967 - DNA, 25 bp, Artificial
  Probe
cagcagcaggctaccggcacagtta

SEQ ID NO: 201968 - DNA, 25 bp, Artificial
  Probe
ttttattacgtatgagcagctcaag

SEQ ID NO: 201969 - DNA, 25 bp, Artificial
  Probe
tgtagttggttttcccgagacaggc

SEQ ID NO: 201970 - DNA, 25 bp, Artificial
  Probe
acattgagagtgtgaccccagattg

SEQ ID NO: 201971 - DNA, 25 bp, Artificial
  Probe
aggattttggccaaactggcttcga

SEQ ID NO: 201972 - DNA, 25 bp, Artificial
  Probe
ggcctcctttttaactgtagcttca

SEQ ID NO: 201973 - DNA, 25 bp, Artificial
  Probe
gggacaaccgccagagccagccttt

SEQ ID NO: 201974 - DNA, 25 bp, Artificial
  Probe
tcctcagagatgaaagggtggccat

SEQ ID NO: 201975 - DNA, 25 bp, Artificial
  Probe
caccaccgggtgttcccaagtgctg

SEQ ID NO: 201976 - DNA, 25 bp, Artificial
  Probe
ggcaggctcagcaatgccacaagcc

SEQ ID NO: 201977 - DNA, 25 bp, Artificial
  Probe
caggcgaaccctgcagcatacaaca

SEQ ID NO: 201978 - DNA, 25 bp, Artificial
  Probe
ccatgcccatgtctggcatgccgat

SEQ ID NO: 201979 - DNA, 25 bp, Artificial
  Probe
ctgacatgtccctggtgggacactg

SEQ ID NO: 201980 - DNA, 25 bp, Artificial
  Probe
taggggctctagtcctcccagtgca

SEQ ID NO: 201981 - DNA, 25 bp, Artificial
  Probe
cccagtgcaatgatgtcatcaagaa

SEQ ID NO: 201982 - DNA, 25 bp, Artificial
  Probe
caacagcagtttgctccccaggcga

SEQ ID NO: 201983 - DNA, 25 bp, Artificial
  Probe
ccagcagaaacgagagctgatgaac

SEQ ID NO: 201984 - DNA, 25 bp, Artificial
  Probe
gtcttggcaggctcagcaatgccac

SEQ ID NO: 201985 - DNA, 25 bp, Artificial
  Probe
gctcgtgtcctttacaggggtagtc

SEQ ID NO: 201986 - DNA, 25 bp, Artificial
  Probe
ataccccgtaattctcaaggatttg

SEQ ID NO: 201987 - DNA, 25 bp, Artificial
  Probe
acagcagtttgctccccaggcgaac

SEQ ID NO: 201988 - DNA, 25 bp, Artificial
  Probe
atctcctcctgaggaggtccccata

SEQ ID NO: 201989 - DNA, 25 bp, Artificial
  Probe
aatgatgtcatcaagaatggggcct

SEQ ID NO: 201990 - DNA, 25 bp, Artificial
  Probe
cctccacaacagtttccgtatgcga

SEQ ID NO: 201991 - DNA, 25 bp, Artificial
  Probe
tacctgatgccctgcctctgtgtgg

SEQ ID NO: 201992 - DNA, 25 bp, Artificial
  Probe
accattgggacataaggagtcattg

SEQ ID NO: 201993 - DNA, 25 bp, Artificial
  Probe
agcgcactgtctacctgatgccctg

SEQ ID NO: 201994 - DNA, 25 bp, Artificial
  Probe
agcttggaagcaaggccagcgtgac

SEQ ID NO: 201995 - DNA, 25 bp, Artificial
  Probe
cctcatgtaggatgtgatctggaga

SEQ ID NO: 201996 - DNA, 25 bp, Artificial
  Probe
ctgccttgaggcagcaagtggccct

SEQ ID NO: 201997 - DNA, 25 bp, Artificial
  Probe
agaatggggccttcccagaatgcca

SEQ ID NO: 201998 - DNA, 25 bp, Artificial
  Probe
cgtaattctcaaggatttgtcattg

SEQ ID NO: 201999 - DNA, 25 bp, Artificial
  Probe
accgccagagccagcctttggtagg

SEQ ID NO: 202000 - DNA, 25 bp, Artificial
  Probe
ggaagcaaggccagcgtgaccacca

SEQ ID NO: 202001 - DNA, 25 bp, Artificial
  Probe
tgtttctttcaagtactggcgtcac

SEQ ID NO: 202002 - DNA, 25 bp, Artificial
  Probe
acctgcagcagcagaggatggcgat

SEQ ID NO: 202003 - DNA, 25 bp, Artificial
  Probe
ctaatctgttaggacaagaacatga

SEQ ID NO: 202004 - DNA, 25 bp, Artificial
  Probe
tacgctcgtgtcctttacaggggta

SEQ ID NO: 202005 - DNA, 25 bp, Artificial
  Probe
gatgaccatgactcccatgcccatg

SEQ ID NO: 202006 - DNA, 25 bp, Artificial
  Probe
gatgccctgcctctgtgtggcatgg

SEQ ID NO: 202007 - DNA, 25 bp, Artificial
  Probe
tctcctgtcagtgcaatcagtgttt

SEQ ID NO: 202008 - DNA, 25 bp, Artificial
  Probe
atgatgtcatcaagaatggggcctt

SEQ ID NO: 202009 - DNA, 25 bp, Artificial
  Probe
tttctgtcctgcagcactggaaggg

SEQ ID NO: 202010 - DNA, 25 bp, Artificial
  Probe
tggccatcagggaacttggccagga

SEQ ID NO: 202011 - DNA, 25 bp, Artificial
  Probe
ccatgtctggcatgccgatgggtcc

SEQ ID NO: 202012 - DNA, 25 bp, Artificial
  Probe
gaatggctcttttccccaacagcag

SEQ ID NO: 202013 - DNA, 25 bp, Artificial
  Probe
cataaatctagatggctagggtttc

SEQ ID NO: 202014 - DNA, 25 bp, Artificial
  Probe
tttacaggggtagtccccagagtct

SEQ ID NO: 202015 - DNA, 25 bp, Artificial
  Probe
catggtgcagcatccccagactgca

SEQ ID NO: 202016 - DNA, 25 bp, Artificial
  Probe
cagactgcacccatgtatcagtcct

SEQ ID NO: 202017 - DNA, 25 bp, Artificial
  Probe
caacagtttccgtatgcgacaaatt

SEQ ID NO: 202018 - DNA, 25 bp, Artificial
  Probe
agagctgatgaaccatcacctgcag

SEQ ID NO: 202019 - DNA, 25 bp, Artificial
  Probe
gtcagatcacctgattcaaacagac

SEQ ID NO: 202020 - DNA, 25 bp, Artificial
  Probe
gcattctattcttggtccaggaaag

SEQ ID NO: 202021 - DNA, 25 bp, Artificial
  Probe
aatgagcattctattcttggtccag

SEQ ID NO: 202022 - DNA, 25 bp, Artificial
  Probe
atctgcaccgaaagcccaagccaaa

SEQ ID NO: 202023 - DNA, 25 bp, Artificial
  Probe
caaactcttcttgctgttgatggca

SEQ ID NO: 202024 - DNA, 25 bp, Artificial
  Probe
tgccccacaagaaaatggagaatta

SEQ ID NO: 202025 - DNA, 25 bp, Artificial
  Probe
tctggctacagaagataggtcagat

SEQ ID NO: 202026 - DNA, 25 bp, Artificial
  Probe
ttgttttgccccacaagaaaatgga

SEQ ID NO: 202027 - DNA, 25 bp, Artificial
  Probe
aggtcagatcacctgattcaaacag

SEQ ID NO: 202028 - DNA, 25 bp, Artificial
  Probe
gtaatgagcattctattcttggtcc

SEQ ID NO: 202029 - DNA, 25 bp, Artificial
  Probe
acacagtcaatctgcaccgaaagcc

SEQ ID NO: 202030 - DNA, 25 bp, Artificial
  Probe
gccccacaagaaaatggagaattac

SEQ ID NO: 202031 - DNA, 25 bp, Artificial
  Probe
atagctggtgcattttaaccaacca

SEQ ID NO: 202032 - DNA, 25 bp, Artificial
  Probe
gttttgccccacaagaaaatggaga

SEQ ID NO: 202033 - DNA, 25 bp, Artificial
  Probe
gattcaaacagacacagtcaatctg

SEQ ID NO: 202034 - DNA, 25 bp, Artificial
  Probe
ccaagccaaactcttcttgctgttg

SEQ ID NO: 202035 - DNA, 25 bp, Artificial
  Probe
tcttggtccaggaaagtaaattcct

SEQ ID NO: 202036 - DNA, 25 bp, Artificial
  Probe
gactattcttagattgttttgcccc

SEQ ID NO: 202037 - DNA, 25 bp, Artificial
  Probe
agctggtgcattttaaccaaccaac

SEQ ID NO: 202038 - DNA, 25 bp, Artificial
  Probe
gatcacctgattcaaacagacacag

SEQ ID NO: 202039 - DNA, 25 bp, Artificial
  Probe
cttagattgttttgccccacaagaa

SEQ ID NO: 202040 - DNA, 25 bp, Artificial
  Probe
agttcgaagaattctggctacagaa

SEQ ID NO: 202041 - DNA, 25 bp, Artificial
  Probe
ctattcttggtccaggaaagtaaat

SEQ ID NO: 202042 - DNA, 25 bp, Artificial
  Probe
tgagcattctattcttggtccagga

SEQ ID NO: 202043 - DNA, 25 bp, Artificial
  Probe
tctattcttggtccaggaaagtaaa

SEQ ID NO: 202044 - DNA, 25 bp, Artificial
  Probe
aagccaaactcttcttgctgttgat

SEQ ID NO: 202045 - DNA, 25 bp, Artificial
  Probe
cttcttgctgttgatggcattaaag

SEQ ID NO: 202046 - DNA, 25 bp, Artificial
  Probe
aatctgcaccgaaagcccaagccaa

SEQ ID NO: 202047 - DNA, 25 bp, Artificial
  Probe
ttctggctacagaagataggtcaga

SEQ ID NO: 202048 - DNA, 25 bp, Artificial
  Probe
aacagacacagtcaatctgcaccga

SEQ ID NO: 202049 - DNA, 25 bp, Artificial
  Probe
cagtcaatctgcaccgaaagcccaa

SEQ ID NO: 202050 - DNA, 25 bp, Artificial
  Probe
tcttcttgctgttgatggcattaaa

SEQ ID NO: 202051 - DNA, 25 bp, Artificial
  Probe
aagataggtcagatcacctgattca

SEQ ID NO: 202052 - DNA, 25 bp, Artificial
  Probe
aattctggctacagaagataggtca

SEQ ID NO: 202053 - DNA, 25 bp, Artificial
  Probe
agcccaagccaaactcttcttgctg

SEQ ID NO: 202054 - DNA, 25 bp, Artificial
  Probe
attctattcttggtccaggaaagta

SEQ ID NO: 202055 - DNA, 25 bp, Artificial
  Probe
tcttagattgttttgccccacaaga

SEQ ID NO: 202056 - DNA, 25 bp, Artificial
  Probe
gcccaagccaaactcttcttgctgt

SEQ ID NO: 202057 - DNA, 25 bp, Artificial
  Probe
ttcttagattgttttgccccacaag

SEQ ID NO: 202058 - DNA, 25 bp, Artificial
  Probe
gaattctggctacagaagataggtc

SEQ ID NO: 202059 - DNA, 25 bp, Artificial
  Probe
acagtcaatctgcaccgaaagccca

SEQ ID NO: 202060 - DNA, 25 bp, Artificial
  Probe
tgactattcttagattgttttgccc

SEQ ID NO: 202061 - DNA, 25 bp, Artificial
  Probe
ctcttcttgctgttgatggcattaa

SEQ ID NO: 202062 - DNA, 25 bp, Artificial
  Probe
tgttttgccccacaagaaaatggag

SEQ ID NO: 202063 - DNA, 25 bp, Artificial
  Probe
gacacagtcaatctgcaccgaaagc

SEQ ID NO: 202064 - DNA, 25 bp, Artificial
  Probe
gataggtcagatcacctgattcaaa

SEQ ID NO: 202065 - DNA, 25 bp, Artificial
  Probe
tgagcgatggcgtgtctttctcccc

SEQ ID NO: 202066 - DNA, 25 bp, Artificial
  Probe
ctatatttgcactggggaagacata

SEQ ID NO: 202067 - DNA, 25 bp, Artificial
  Probe
cctgctagaccctcagaggaaccag

SEQ ID NO: 202068 - DNA, 25 bp, Artificial
  Probe
cacgtgaatgctcagttgtattttt

SEQ ID NO: 202069 - DNA, 25 bp, Artificial
  Probe
actgtcctgtgatcccaagtccctt

SEQ ID NO: 202070 - DNA, 25 bp, Artificial
  Probe
caaacacagcgtggttgttgagtag

SEQ ID NO: 202071 - DNA, 25 bp, Artificial
  Probe
agtagtcgctcatgagcgatggcgt

SEQ ID NO: 202072 - DNA, 25 bp, Artificial
  Probe
cgatggcgtgtctttctcccctgac

SEQ ID NO: 202073 - DNA, 25 bp, Artificial
  Probe
tgccccacgtgaatgctcagttgta

SEQ ID NO: 202074 - DNA, 25 bp, Artificial
  Probe
ctatgtatgcggagtatgactcata

SEQ ID NO: 202075 - DNA, 25 bp, Artificial
  Probe
tagtcgctcatgagcgatggcgtgt

SEQ ID NO: 202076 - DNA, 25 bp, Artificial
  Probe
tttgcactggggaagacatattcct

SEQ ID NO: 202077 - DNA, 25 bp, Artificial
  Probe
gaaatgtgcctgctagaccctcaga

SEQ ID NO: 202078 - DNA, 25 bp, Artificial
  Probe
agctgccccacgtgaatgctcagtt

SEQ ID NO: 202079 - DNA, 25 bp, Artificial
  Probe
ttactgtcagcctggagaatggaag

SEQ ID NO: 202080 - DNA, 25 bp, Artificial
  Probe
ttgagtagtcgctcatgagcgatgg

SEQ ID NO: 202081 - DNA, 25 bp, Artificial
  Probe
tgttaaaagaactgtcctgtgatcc

SEQ ID NO: 202082 - DNA, 25 bp, Artificial
  Probe
cgctcatgagcgatggcgtgtcttt

SEQ ID NO: 202083 - DNA, 25 bp, Artificial
  Probe
gctcatgagcgatggcgtgtctttc

SEQ ID NO: 202084 - DNA, 25 bp, Artificial
  Probe
agaactgtcctgtgatcccaagtcc

SEQ ID NO: 202085 - DNA, 25 bp, Artificial
  Probe
gatttctgctttcatctatgtatgc

SEQ ID NO: 202086 - DNA, 25 bp, Artificial
  Probe
ggttgttgagtagtcgctcatgagc

SEQ ID NO: 202087 - DNA, 25 bp, Artificial
  Probe
tcagcctggagaatggaagaggcta

SEQ ID NO: 202088 - DNA, 25 bp, Artificial
  Probe
atacaacttctatatttgcactggg

SEQ ID NO: 202089 - DNA, 25 bp, Artificial
  Probe
gatggagagctcacccaaatcctat

SEQ ID NO: 202090 - DNA, 25 bp, Artificial
  Probe
gatgatttctgctttcatctatgta

SEQ ID NO: 202091 - DNA, 25 bp, Artificial
  Probe
caaagctgccccacgtgaatgctca

SEQ ID NO: 202092 - DNA, 25 bp, Artificial
  Probe
tctattttaacaaagcagaatggtc

SEQ ID NO: 202093 - DNA, 25 bp, Artificial
  Probe
ccctcagaggaaccagtgatggaga

SEQ ID NO: 202094 - DNA, 25 bp, Artificial
  Probe
ttaaaagaactgtcctgtgatccca

SEQ ID NO: 202095 - DNA, 25 bp, Artificial
  Probe
aatgacaaacacagcgtggttgttg

SEQ ID NO: 202096 - DNA, 25 bp, Artificial
  Probe
ttcatctatgtatgcggagtatgac

SEQ ID NO: 202097 - DNA, 25 bp, Artificial
  Probe
cactgtcaatggtgtgaattctggg

SEQ ID NO: 202098 - DNA, 25 bp, Artificial
  Probe
acattattactgtcagcctggagaa

SEQ ID NO: 202099 - DNA, 25 bp, Artificial
  Probe
cagcgtggttgttgagtagtcgctc

SEQ ID NO: 202100 - DNA, 25 bp, Artificial
  Probe
atgaaagcacattattactgtcagc

SEQ ID NO: 202101 - DNA, 25 bp, Artificial
  Probe
gtgatggagagctcacccaaatcct

SEQ ID NO: 202102 - DNA, 25 bp, Artificial
  Probe
gagagctcacccaaatcctatgtcc

SEQ ID NO: 202103 - DNA, 25 bp, Artificial
  Probe
aggatgatttctgctttcatctatg

SEQ ID NO: 202104 - DNA, 25 bp, Artificial
  Probe
tgtgcctgctagaccctcagaggaa

SEQ ID NO: 202105 - DNA, 25 bp, Artificial
  Probe
ccaaaacaatgacaaacacagcgtg

SEQ ID NO: 202106 - DNA, 25 bp, Artificial
  Probe
actgtcagcctggagaatggaagag

SEQ ID NO: 202107 - DNA, 25 bp, Artificial
  Probe
acaatgacaaacacagcgtggttgt

SEQ ID NO: 202108 - DNA, 25 bp, Artificial
  Probe
tatgtatgcggagtatgactcatac

SEQ ID NO: 202109 - DNA, 25 bp, Artificial
  Probe
aagatgaaagcgacccaagattatt

SEQ ID NO: 202110 - DNA, 25 bp, Artificial
  Probe
tgaaagcgacccaagattattcatg

SEQ ID NO: 202111 - DNA, 25 bp, Artificial
  Probe
ggtctgaagcttcaaagccagcacg

SEQ ID NO: 202112 - DNA, 25 bp, Artificial
  Probe
tggtgtgctggacactacgggcttc

SEQ ID NO: 202113 - DNA, 25 bp, Artificial
  Probe
attatgcgtgggtctgaagcttcaa

SEQ ID NO: 202114 - DNA, 25 bp, Artificial
  Probe
tcaaagccagcacggttcaggtagt

SEQ ID NO: 202115 - DNA, 25 bp, Artificial
  Probe
cttgctcttgctccgggagctgcca

SEQ ID NO: 202116 - DNA, 25 bp, Artificial
  Probe
cttgctccgggagctgccagaggct

SEQ ID NO: 202117 - DNA, 25 bp, Artificial
  Probe
cgtgggtctgaagcttcaaagccag

SEQ ID NO: 202118 - DNA, 25 bp, Artificial
  Probe
aagcttcaaagccagcacggttcag

SEQ ID NO: 202119 - DNA, 25 bp, Artificial
  Probe
cgggagctgccagaggctgtaccct

SEQ ID NO: 202120 - DNA, 25 bp, Artificial
  Probe
cgaattatgcgtgggtctgaagctt

SEQ ID NO: 202121 - DNA, 25 bp, Artificial
  Probe
ccgaattatgcgtgggtctgaagct

SEQ ID NO: 202122 - DNA, 25 bp, Artificial
  Probe
tgggtctgaagcttcaaagccagca

SEQ ID NO: 202123 - DNA, 25 bp, Artificial
  Probe
gctccgggagctgccagaggctgta

SEQ ID NO: 202124 - DNA, 25 bp, Artificial
  Probe
ttatgcgtgggtctgaagcttcaaa

SEQ ID NO: 202125 - DNA, 25 bp, Artificial
  Probe
atgagccgaattatgcgtgggtctg

SEQ ID NO: 202126 - DNA, 25 bp, Artificial
  Probe
atgcgtgggtctgaagcttcaaagc

SEQ ID NO: 202127 - DNA, 25 bp, Artificial
  Probe
gccgaattatgcgtgggtctgaagc

SEQ ID NO: 202128 - DNA, 25 bp, Artificial
  Probe
gagctgccagaggctgtacccttca

SEQ ID NO: 202129 - DNA, 25 bp, Artificial
  Probe
ttcaaagccagcacggttcaggtag

SEQ ID NO: 202130 - DNA, 25 bp, Artificial
  Probe
ccgggagctgccagaggctgtaccc

SEQ ID NO: 202131 - DNA, 25 bp, Artificial
  Probe
tgagccgaattatgcgtgggtctga

SEQ ID NO: 202132 - DNA, 25 bp, Artificial
  Probe
gggagctgccagaggctgtaccctt

SEQ ID NO: 202133 - DNA, 25 bp, Artificial
  Probe
tgcgtgggtctgaagcttcaaagcc

SEQ ID NO: 202134 - DNA, 25 bp, Artificial
  Probe
ggtgtgctggacactacgggcttca

SEQ ID NO: 202135 - DNA, 25 bp, Artificial
  Probe
ttgctccgggagctgccagaggctg

SEQ ID NO: 202136 - DNA, 25 bp, Artificial
  Probe
tcttgctccgggagctgccagaggc

SEQ ID NO: 202137 - DNA, 25 bp, Artificial
  Probe
ctcttgctccgggagctgccagagg

SEQ ID NO: 202138 - DNA, 25 bp, Artificial
  Probe
gagccgaattatgcgtgggtctgaa

SEQ ID NO: 202139 - DNA, 25 bp, Artificial
  Probe
agatgagccgaattatgcgtgggtc

SEQ ID NO: 202140 - DNA, 25 bp, Artificial
  Probe
tgtgctggacactacgggcttcact

SEQ ID NO: 202141 - DNA, 25 bp, Artificial
  Probe
tgaagcttcaaagccagcacggttc

SEQ ID NO: 202142 - DNA, 25 bp, Artificial
  Probe
gtgtgctggacactacgggcttcac

SEQ ID NO: 202143 - DNA, 25 bp, Artificial
  Probe
gtgctggacactacgggcttcactt

SEQ ID NO: 202144 - DNA, 25 bp, Artificial
  Probe
tctgaagcttcaaagccagcacggt

SEQ ID NO: 202145 - DNA, 25 bp, Artificial
  Probe
ggcttgttccctgctcccatcccta

SEQ ID NO: 202146 - DNA, 25 bp, Artificial
  Probe
agcttcaaagccagcacggttcagg

SEQ ID NO: 202147 - DNA, 25 bp, Artificial
  Probe
gatgagccgaattatgcgtgggtct

SEQ ID NO: 202148 - DNA, 25 bp, Artificial
  Probe
tccgggagctgccagaggctgtacc

SEQ ID NO: 202149 - DNA, 25 bp, Artificial
  Probe
tatgcgtgggtctgaagcttcaaag

SEQ ID NO: 202150 - DNA, 25 bp, Artificial
  Probe
ggagctgccagaggctgtacccttc

SEQ ID NO: 202151 - DNA, 25 bp, Artificial
  Probe
aattatgcgtgggtctgaagcttca

SEQ ID NO: 202152 - DNA, 25 bp, Artificial
  Probe
tgctggacactacgggcttcacttc

SEQ ID NO: 202153 - DNA, 25 bp, Artificial
  Probe
ctgaagcttcaaagccagcacggtt

SEQ ID NO: 202154 - DNA, 25 bp, Artificial
  Probe
gtctgaagcttcaaagccagcacgg

SEQ ID NO: 202155 - DNA, 25 bp, Artificial
  Probe
cttcaaagccagcacggttcaggta

SEQ ID NO: 202156 - DNA, 25 bp, Artificial
  Probe
gcttcaaagccagcacggttcaggt

SEQ ID NO: 202157 - DNA, 25 bp, Artificial
  Probe
agtgctgctgctttcactgctgcac

SEQ ID NO: 202158 - DNA, 25 bp, Artificial
  Probe
gctgctgctttcactgctgcaccaa

SEQ ID NO: 202159 - DNA, 25 bp, Artificial
  Probe
agggtcacatttagtgctgctgctt

SEQ ID NO: 202160 - DNA, 25 bp, Artificial
  Probe
gtcacatttagtgctgctgctttca

SEQ ID NO: 202161 - DNA, 25 bp, Artificial
  Probe
gggatcacctatcatcctgaggccc

SEQ ID NO: 202162 - DNA, 25 bp, Artificial
  Probe
caagggtcacatttagtgctgctgc

SEQ ID NO: 202163 - DNA, 25 bp, Artificial
  Probe
ccaacccaagggtcacatttagtgc

SEQ ID NO: 202164 - DNA, 25 bp, Artificial
  Probe
ggtcacatttagtgctgctgctttc

SEQ ID NO: 202165 - DNA, 25 bp, Artificial
  Probe
agggatcacctatcatcctgaggcc

SEQ ID NO: 202166 - DNA, 25 bp, Artificial
  Probe
tgctgctttcactgctgcaccaatg

SEQ ID NO: 202167 - DNA, 25 bp, Artificial
  Probe
cttctgcagggatcacctatcatcc

SEQ ID NO: 202168 - DNA, 25 bp, Artificial
  Probe
ttctgcagggatcacctatcatcct

SEQ ID NO: 202169 - DNA, 25 bp, Artificial
  Probe
caccaatgcccttggctggcctgag

SEQ ID NO: 202170 - DNA, 25 bp, Artificial
  Probe
aacgtggctccagcagcctggacac

SEQ ID NO: 202171 - DNA, 25 bp, Artificial
  Probe
tctgcagggatcacctatcatcctg

SEQ ID NO: 202172 - DNA, 25 bp, Artificial
  Probe
gggtcacatttagtgctgctgcttt

SEQ ID NO: 202173 - DNA, 25 bp, Artificial
  Probe
gtgctgctgctttcactgctgcacc

SEQ ID NO: 202174 - DNA, 25 bp, Artificial
  Probe
gcaccaatgcccttggctggcctga

SEQ ID NO: 202175 - DNA, 25 bp, Artificial
  Probe
acccttgcctcttctgcagggatca

SEQ ID NO: 202176 - DNA, 25 bp, Artificial
  Probe
ttagtgctgctgctttcactgctgc

SEQ ID NO: 202177 - DNA, 25 bp, Artificial
  Probe
caacccaagggtcacatttagtgct

SEQ ID NO: 202178 - DNA, 25 bp, Artificial
  Probe
aacccttgcctcttctgcagggatc

SEQ ID NO: 202179 - DNA, 25 bp, Artificial
  Probe
catttagtgctgctgctttcactgc

SEQ ID NO: 202180 - DNA, 25 bp, Artificial
  Probe
gcagggatcacctatcatcctgagg

SEQ ID NO: 202181 - DNA, 25 bp, Artificial
  Probe
cacatttagtgctgctgctttcact

SEQ ID NO: 202182 - DNA, 25 bp, Artificial
  Probe
acatttagtgctgctgctttcactg

SEQ ID NO: 202183 - DNA, 25 bp, Artificial
  Probe
tgctgctgctttcactgctgcacca

SEQ ID NO: 202184 - DNA, 25 bp, Artificial
  Probe
tttcactgctgcaccaatgcccttg

SEQ ID NO: 202185 - DNA, 25 bp, Artificial
  Probe
cttgcctcttctgcagggatcacct

SEQ ID NO: 202186 - DNA, 25 bp, Artificial
  Probe
ctgctgctttcactgctgcaccaat

SEQ ID NO: 202187 - DNA, 25 bp, Artificial
  Probe
tagtgctgctgctttcactgctgca

SEQ ID NO: 202188 - DNA, 25 bp, Artificial
  Probe
ttcactgctgcaccaatgcccttgg

SEQ ID NO: 202189 - DNA, 25 bp, Artificial
  Probe
tcttctgcagggatcacctatcatc

SEQ ID NO: 202190 - DNA, 25 bp, Artificial
  Probe
ccaagggtcacatttagtgctgctg

SEQ ID NO: 202191 - DNA, 25 bp, Artificial
  Probe
tgcctcttctgcagggatcacctat

SEQ ID NO: 202192 - DNA, 25 bp, Artificial
  Probe
atttagtgctgctgctttcactgct

SEQ ID NO: 202193 - DNA, 25 bp, Artificial
  Probe
ctgctgcaccaatgcccttggctgg

SEQ ID NO: 202194 - DNA, 25 bp, Artificial
  Probe
aatgcccttggctggcctgagcagc

SEQ ID NO: 202195 - DNA, 25 bp, Artificial
  Probe
aagggtcacatttagtgctgctgct

SEQ ID NO: 202196 - DNA, 25 bp, Artificial
  Probe
gctgctttcactgctgcaccaatgc

SEQ ID NO: 202197 - DNA, 25 bp, Artificial
  Probe
aacccaagggtcacatttagtgctg

SEQ ID NO: 202198 - DNA, 25 bp, Artificial
  Probe
ttgcctcttctgcagggatcaccta

SEQ ID NO: 202199 - DNA, 25 bp, Artificial
  Probe
cccaagggtcacatttagtgctgct

SEQ ID NO: 202200 - DNA, 25 bp, Artificial
  Probe
cagggatcacctatcatcctgaggc

SEQ ID NO: 202201 - DNA, 25 bp, Artificial
  Probe
acccaagggtcacatttagtgctgc

SEQ ID NO: 202202 - DNA, 25 bp, Artificial
  Probe
actgctgcaccaatgcccttggctg

SEQ ID NO: 202203 - DNA, 25 bp, Artificial
  Probe
acgagcagctcaacacgcgggtgcg

SEQ ID NO: 202204 - DNA, 25 bp, Artificial
  Probe
actcacgtggacaaggcaagcttcc

SEQ ID NO: 202205 - DNA, 25 bp, Artificial
  Probe
cgaggacgaaactcagcacgagcag

SEQ ID NO: 202206 - DNA, 25 bp, Artificial
  Probe
gcaggagacgcctcactgagagaac

SEQ ID NO: 202207 - DNA, 25 bp, Artificial
  Probe
gacggaaaccgcttcctggagcgcc

SEQ ID NO: 202208 - DNA, 25 bp, Artificial
  Probe
cacgagcagctcaacacgcgggtgc

SEQ ID NO: 202209 - DNA, 25 bp, Artificial
  Probe
caagcttccgggtggacgcctttgg

SEQ ID NO: 202210 - DNA, 25 bp, Artificial
  Probe
cctactcacgtggacaaggcaagct

SEQ ID NO: 202211 - DNA, 25 bp, Artificial
  Probe
tggagcgccagagcaccgtaccact

SEQ ID NO: 202212 - DNA, 25 bp, Artificial
  Probe
tactcacgtggacaaggcaagcttc

SEQ ID NO: 202213 - DNA, 25 bp, Artificial
  Probe
gcctactcacgtggacaaggcaagc

SEQ ID NO: 202214 - DNA, 25 bp, Artificial
  Probe
cagcctactcacgtggacaaggcaa

SEQ ID NO: 202215 - DNA, 25 bp, Artificial
  Probe
acgcctcactgagagaactggagag

SEQ ID NO: 202216 - DNA, 25 bp, Artificial
  Probe
ctggcggacggcagcctactcacgt

SEQ ID NO: 202217 - DNA, 25 bp, Artificial
  Probe
aaactcagcacgagcagctcaacac

SEQ ID NO: 202218 - DNA, 25 bp, Artificial
  Probe
ggccgcgttcttctggctgctctgc

SEQ ID NO: 202219 - DNA, 25 bp, Artificial
  Probe
ttctggctgctctgcgtcttgggga

SEQ ID NO: 202220 - DNA, 25 bp, Artificial
  Probe
ttctcgatgtcctgctgaaccacga

SEQ ID NO: 202221 - DNA, 25 bp, Artificial
  Probe
gacgaaactcagcacgagcagctca

SEQ ID NO: 202222 - DNA, 25 bp, Artificial
  Probe
ggacggcagcctactcacgtggaca

SEQ ID NO: 202223 - DNA, 25 bp, Artificial
  Probe
aactcagcacgagcagctcaacacg

SEQ ID NO: 202224 - DNA, 25 bp, Artificial
  Probe
gccgcgttcttctggctgctctgcg

SEQ ID NO: 202225 - DNA, 25 bp, Artificial
  Probe
ggagcgccagagcaccgtaccactg

SEQ ID NO: 202226 - DNA, 25 bp, Artificial
  Probe
cgttcttctggctgctctgcgtctt

SEQ ID NO: 202227 - DNA, 25 bp, Artificial
  Probe
attctcgatgtcctgctgaaccacg

SEQ ID NO: 202228 - DNA, 25 bp, Artificial
  Probe
gctgctctgcgtcttggggacctac

SEQ ID NO: 202229 - DNA, 25 bp, Artificial
  Probe
tgctctgcgtcttggggacctaccc

SEQ ID NO: 202230 - DNA, 25 bp, Artificial
  Probe
ggctgctctgcgtcttggggaccta

SEQ ID NO: 202231 - DNA, 25 bp, Artificial
  Probe
tcagcacgagcagctcaacacgcgg

SEQ ID NO: 202232 - DNA, 25 bp, Artificial
  Probe
tgcgcctcatctaccgcttgggcgg

SEQ ID NO: 202233 - DNA, 25 bp, Artificial
  Probe
gaaactcagcacgagcagctcaaca

SEQ ID NO: 202234 - DNA, 25 bp, Artificial
  Probe
ggaaaccgcttcctggagcgccaga

SEQ ID NO: 202235 - DNA, 25 bp, Artificial
  Probe
agacgcctcactgagagaactggag

SEQ ID NO: 202236 - DNA, 25 bp, Artificial
  Probe
cggcagcctactcacgtggacaagg

SEQ ID NO: 202237 - DNA, 25 bp, Artificial
  Probe
ctcacgtggacaaggcaagcttccg

SEQ ID NO: 202238 - DNA, 25 bp, Artificial
  Probe
acaaggcaagcttccgggtggacgc

SEQ ID NO: 202239 - DNA, 25 bp, Artificial
  Probe
cggacggcagcctactcacgtggac

SEQ ID NO: 202240 - DNA, 25 bp, Artificial
  Probe
ttcttctggctgctctgcgtcttgg

SEQ ID NO: 202241 - DNA, 25 bp, Artificial
  Probe
tcgatgtcctgctgaaccacgagtt

SEQ ID NO: 202242 - DNA, 25 bp, Artificial
  Probe
cgatgtcctgctgaaccacgagttg

SEQ ID NO: 202243 - DNA, 25 bp, Artificial
  Probe
ctcgatgtcctgctgaaccacgagt

SEQ ID NO: 202244 - DNA, 25 bp, Artificial
  Probe
caggagacgcctcactgagagaact

SEQ ID NO: 202245 - DNA, 25 bp, Artificial
  Probe
cttcattctcgatgtcctgctgaac

SEQ ID NO: 202246 - DNA, 25 bp, Artificial
  Probe
cgcctcactgagagaactggagagg

SEQ ID NO: 202247 - DNA, 25 bp, Artificial
  Probe
aaccgcttcctggagcgccagagca

SEQ ID NO: 202248 - DNA, 25 bp, Artificial
  Probe
acgaaactcagcacgagcagctcaa

SEQ ID NO: 202249 - DNA, 25 bp, Artificial
  Probe
aatgccagttttggaatcgaacctc

SEQ ID NO: 202250 - DNA, 25 bp, Artificial
  Probe
aagggaagctctgaggcccagttca

SEQ ID NO: 202251 - DNA, 25 bp, Artificial
  Probe
agagtcattgccattaccgaggcta

SEQ ID NO: 202252 - DNA, 25 bp, Artificial
  Probe
ggagggctccctactctctgaccat

SEQ ID NO: 202253 - DNA, 25 bp, Artificial
  Probe
ccgggcggccagactctgaacagac

SEQ ID NO: 202254 - DNA, 25 bp, Artificial
  Probe
gcggccagactctgaacagaccgtc

SEQ ID NO: 202255 - DNA, 25 bp, Artificial
  Probe
atgccagttttggaatcgaacctct

SEQ ID NO: 202256 - DNA, 25 bp, Artificial
  Probe
acgtacagagtcattgccattaccg

SEQ ID NO: 202257 - DNA, 25 bp, Artificial
  Probe
gtacagagtcattgccattaccgag

SEQ ID NO: 202258 - DNA, 25 bp, Artificial
  Probe
ggcccagttcaaaacagatctctta

SEQ ID NO: 202259 - DNA, 25 bp, Artificial
  Probe
agggaagctctgaggcccagttcaa

SEQ ID NO: 202260 - DNA, 25 bp, Artificial
  Probe
ggccagactctgaacagaccgtcca

SEQ ID NO: 202261 - DNA, 25 bp, Artificial
  Probe
ggcggccagactctgaacagaccgt

SEQ ID NO: 202262 - DNA, 25 bp, Artificial
  Probe
aacagcatattattcacttggaaag

SEQ ID NO: 202263 - DNA, 25 bp, Artificial
  Probe
agttttggaatcgaacctctgcaca

SEQ ID NO: 202264 - DNA, 25 bp, Artificial
  Probe
gtgcccaattccaccgttgctgtga

SEQ ID NO: 202265 - DNA, 25 bp, Artificial
  Probe
ctctgcgactaaggtggctgctggc

SEQ ID NO: 202266 - DNA, 25 bp, Artificial
  Probe
gagaatgccagttttggaatcgaac

SEQ ID NO: 202267 - DNA, 25 bp, Artificial
  Probe
ttgagccgaacctgccgaagcccta

SEQ ID NO: 202268 - DNA, 25 bp, Artificial
  Probe
gtcattgccattaccgaggctatgt

SEQ ID NO: 202269 - DNA, 25 bp, Artificial
  Probe
cagcatattattcacttggaaagaa

SEQ ID NO: 202270 - DNA, 25 bp, Artificial
  Probe
ttccaccgttgctgtgagtgcctgc

SEQ ID NO: 202271 - DNA, 25 bp, Artificial
  Probe
tgtgagtgcctgctttggactcaga

SEQ ID NO: 202272 - DNA, 25 bp, Artificial
  Probe
ttgccattaccgaggctatgtggag

SEQ ID NO: 202273 - DNA, 25 bp, Artificial
  Probe
agggagtgcccaattccaccgttgc

SEQ ID NO: 202274 - DNA, 25 bp, Artificial
  Probe
ttgctgggcccagtcctcgaggccg

SEQ ID NO: 202275 - DNA, 25 bp, Artificial
  Probe
gccagactctgaacagaccgtccat

SEQ ID NO: 202276 - DNA, 25 bp, Artificial
  Probe
cgttgctgtgagtgcctgctttgga

SEQ ID NO: 202277 - DNA, 25 bp, Artificial
  Probe
cgcctctctgcgactaaggtggctg

SEQ ID NO: 202278 - DNA, 25 bp, Artificial
  Probe
tgctgcatttggagaatgccagttt

SEQ ID NO: 202279 - DNA, 25 bp, Artificial
  Probe
aggagggctccctactctctgacca

SEQ ID NO: 202280 - DNA, 25 bp, Artificial
  Probe
gattgctgcatttggagaatgccag

SEQ ID NO: 202281 - DNA, 25 bp, Artificial
  Probe
cgggcggccagactctgaacagacc

SEQ ID NO: 202282 - DNA, 25 bp, Artificial
  Probe
tctgaccatcccaacgtacagagtc

SEQ ID NO: 202283 - DNA, 25 bp, Artificial
  Probe
ttgctgcatttggagaatgccagtt

SEQ ID NO: 202284 - DNA, 25 bp, Artificial
  Probe
tgccgaagccctagccatggggccg

SEQ ID NO: 202285 - DNA, 25 bp, Artificial
  Probe
cgtgtggcttgctgggcccagtcct

SEQ ID NO: 202286 - DNA, 25 bp, Artificial
  Probe
cagactctgaacagaccgtccatct

SEQ ID NO: 202287 - DNA, 25 bp, Artificial
  Probe
gcgttgagccgaacctgccgaagcc

SEQ ID NO: 202288 - DNA, 25 bp, Artificial
  Probe
gcatattattcacttggaaagaaac

SEQ ID NO: 202289 - DNA, 25 bp, Artificial
  Probe
tggactcagaggattgctgcatttg

SEQ ID NO: 202290 - DNA, 25 bp, Artificial
  Probe
ccaattccaccgttgctgtgagtgc

SEQ ID NO: 202291 - DNA, 25 bp, Artificial
  Probe
gctctgaggcccagttcaaaacaga

SEQ ID NO: 202292 - DNA, 25 bp, Artificial
  Probe
ctgcatttggagaatgccagttttg

SEQ ID NO: 202293 - DNA, 25 bp, Artificial
  Probe
gactctgaacagaccgtccatcttt

SEQ ID NO: 202294 - DNA, 25 bp, Artificial
  Probe
gttgagccgaacctgccgaagccct

SEQ ID NO: 202295 - DNA, 25 bp, Artificial
  Probe
gactggtacacagaacacatggcca

SEQ ID NO: 202296 - DNA, 25 bp, Artificial
  Probe
ggcctcctcttttgggagccattgt

SEQ ID NO: 202297 - DNA, 25 bp, Artificial
  Probe
ctgagacttcacacttatccccgtg

SEQ ID NO: 202298 - DNA, 25 bp, Artificial
  Probe
ccgacaagcgcgatccggatgctca

SEQ ID NO: 202299 - DNA, 25 bp, Artificial
  Probe
gacctgcccgtgattagctgggcat

SEQ ID NO: 202300 - DNA, 25 bp, Artificial
  Probe
gattagctgggcattgtcatggctc

SEQ ID NO: 202301 - DNA, 25 bp, Artificial
  Probe
tagagtacggattctctgagacttc

SEQ ID NO: 202302 - DNA, 25 bp, Artificial
  Probe
acacagaacacatggccatgagggg

SEQ ID NO: 202303 - DNA, 25 bp, Artificial
  Probe
cccgtgattagctgggcattgtcat

SEQ ID NO: 202304 - DNA, 25 bp, Artificial
  Probe
gcctccaactgagaaaggaccagag

SEQ ID NO: 202305 - DNA, 25 bp, Artificial
  Probe
tgggtgagcagcttgcgcctccaac

SEQ ID NO: 202306 - DNA, 25 bp, Artificial
  Probe
tccaactgagaaaggaccagagggt

SEQ ID NO: 202307 - DNA, 25 bp, Artificial
  Probe
ctcttctgggtgagcagcttgcgcc

SEQ ID NO: 202308 - DNA, 25 bp, Artificial
  Probe
taccatgctaactcctccggactgg

SEQ ID NO: 202309 - DNA, 25 bp, Artificial
  Probe
tgtcatggctcttctgggtgagcag

SEQ ID NO: 202310 - DNA, 25 bp, Artificial
  Probe
gtctgagacctaccatgctaactcc

SEQ ID NO: 202311 - DNA, 25 bp, Artificial
  Probe
agcttgcgcctccaactgagaaagg

SEQ ID NO: 202312 - DNA, 25 bp, Artificial
  Probe
taggcaacaccactgtcttgtctga

SEQ ID NO: 202313 - DNA, 25 bp, Artificial
  Probe
gcagcttgcgcctccaactgagaaa

SEQ ID NO: 202314 - DNA, 25 bp, Artificial
  Probe
cattgtcatggctcttctgggtgag

SEQ ID NO: 202315 - DNA, 25 bp, Artificial
  Probe
accatgctaactcctccggactggt

SEQ ID NO: 202316 - DNA, 25 bp, Artificial
  Probe
tcctagccgacaagcgcgatccgga

SEQ ID NO: 202317 - DNA, 25 bp, Artificial
  Probe
tgggagccattgtccccttaggcaa

SEQ ID NO: 202318 - DNA, 25 bp, Artificial
  Probe
caagccggcctcctcttttgggagc

SEQ ID NO: 202319 - DNA, 25 bp, Artificial
  Probe
cttggaaggacctgcccgtgattag

SEQ ID NO: 202320 - DNA, 25 bp, Artificial
  Probe
caaatcagtttttccaagccggcct

SEQ ID NO: 202321 - DNA, 25 bp, Artificial
  Probe
ttgtcatggctcttctgggtgagca

SEQ ID NO: 202322 - DNA, 25 bp, Artificial
  Probe
atcagtttttccaagccggcctcct

SEQ ID NO: 202323 - DNA, 25 bp, Artificial
  Probe
ccaggccaatggtggtgccttggaa

SEQ ID NO: 202324 - DNA, 25 bp, Artificial
  Probe
accactgtcttgtctgagacctacc

SEQ ID NO: 202325 - DNA, 25 bp, Artificial
  Probe
tgggcattgtcatggctcttctggg

SEQ ID NO: 202326 - DNA, 25 bp, Artificial
  Probe
cccttaggcaacaccactgtcttgt

SEQ ID NO: 202327 - DNA, 25 bp, Artificial
  Probe
gtagagtacggattctctgagactt

SEQ ID NO: 202328 - DNA, 25 bp, Artificial
  Probe
taactcctccggactggtacacaga

SEQ ID NO: 202329 - DNA, 25 bp, Artificial
  Probe
tacggattctctgagacttcacact

SEQ ID NO: 202330 - DNA, 25 bp, Artificial
  Probe
gacttcacacttatccccgtgtgtc

SEQ ID NO: 202331 - DNA, 25 bp, Artificial
  Probe
cttttgggagccattgtccccttag

SEQ ID NO: 202332 - DNA, 25 bp, Artificial
  Probe
catgctaactcctccggactggtac

SEQ ID NO: 202333 - DNA, 25 bp, Artificial
  Probe
aggacctgcccgtgattagctgggc

SEQ ID NO: 202334 - DNA, 25 bp, Artificial
  Probe
ggattctctgagacttcacacttat

SEQ ID NO: 202335 - DNA, 25 bp, Artificial
  Probe
ccggactggtacacagaacacatgg

SEQ ID NO: 202336 - DNA, 25 bp, Artificial
  Probe
gtgccttggaaggacctgcccgtga

SEQ ID NO: 202337 - DNA, 25 bp, Artificial
  Probe
tcctcttttgggagccattgtcccc

SEQ ID NO: 202338 - DNA, 25 bp, Artificial
  Probe
agccggcctcctcttttgggagcca

SEQ ID NO: 202339 - DNA, 25 bp, Artificial
  Probe
tggtgccttggaaggacctgcccgt

SEQ ID NO: 202340 - DNA, 25 bp, Artificial
  Probe
ggactggtacacagaacacatggcc

SEQ ID NO: 202341 - DNA, 25 bp, Artificial
  Probe
tcttcatggcaaacggatgcgttcc

SEQ ID NO: 202342 - DNA, 25 bp, Artificial
  Probe
ttccgaactggatcccggatgctgc

SEQ ID NO: 202343 - DNA, 25 bp, Artificial
  Probe
gtctccttccgaagccatggaggtg

SEQ ID NO: 202344 - DNA, 25 bp, Artificial
  Probe
ctgcaatgatctaaaactggaatca

SEQ ID NO: 202345 - DNA, 25 bp, Artificial
  Probe
tgtgcgtctccttccgaagccatgg

SEQ ID NO: 202346 - DNA, 25 bp, Artificial
  Probe
gttcctgtgcgtctccttccgaagc

SEQ ID NO: 202347 - DNA, 25 bp, Artificial
  Probe
gaacacagtctgcaatgatctaaaa

SEQ ID NO: 202348 - DNA, 25 bp, Artificial
  Probe
cccaagtgaagtcacagatgcaggt

SEQ ID NO: 202349 - DNA, 25 bp, Artificial
  Probe
tgctgcagtctgtgcctgcccaagt

SEQ ID NO: 202350 - DNA, 25 bp, Artificial
  Probe
ctgtgcgtctccttccgaagccatg

SEQ ID NO: 202351 - DNA, 25 bp, Artificial
  Probe
ccttccgaagccatggaggtgcatt

SEQ ID NO: 202352 - DNA, 25 bp, Artificial
  Probe
cagactttacccttggagtcaagtg

SEQ ID NO: 202353 - DNA, 25 bp, Artificial
  Probe
cagtctgcaatgatctaaaactgga

SEQ ID NO: 202354 - DNA, 25 bp, Artificial
  Probe
agtcaagtgggcagctgctcatatt

SEQ ID NO: 202355 - DNA, 25 bp, Artificial
  Probe
gatgcgttcctgtgcgtctccttcc

SEQ ID NO: 202356 - DNA, 25 bp, Artificial
  Probe
caaacggatgcgttcctgtgcgtct

SEQ ID NO: 202357 - DNA, 25 bp, Artificial
  Probe
agtgaagtcacagatgcaggtggct

SEQ ID NO: 202358 - DNA, 25 bp, Artificial
  Probe
gatgcaggtggcttcgttgctacac

SEQ ID NO: 202359 - DNA, 25 bp, Artificial
  Probe
catcttcatggcaaacggatgcgtt

SEQ ID NO: 202360 - DNA, 25 bp, Artificial
  Probe
tttgaaaacatgacacacacaggct

SEQ ID NO: 202361 - DNA, 25 bp, Artificial
  Probe
aactggaatcatacaaacccttagg

SEQ ID NO: 202362 - DNA, 25 bp, Artificial
  Probe
ggaatcatacaaacccttaggtcct

SEQ ID NO: 202363 - DNA, 25 bp, Artificial
  Probe
cacagatgcaggtggcttcgttgct

SEQ ID NO: 202364 - DNA, 25 bp, Artificial
  Probe
atggcaaacggatgcgttcctgtgc

SEQ ID NO: 202365 - DNA, 25 bp, Artificial
  Probe
tggggttccgaactggatcccggat

SEQ ID NO: 202366 - DNA, 25 bp, Artificial
  Probe
tctgcaatgatctaaaactggaatc

SEQ ID NO: 202367 - DNA, 25 bp, Artificial
  Probe
gcagtctgtgcctgcccaagtgaag

SEQ ID NO: 202368 - DNA, 25 bp, Artificial
  Probe
cacagtctgcaatgatctaaaactg

SEQ ID NO: 202369 - DNA, 25 bp, Artificial
  Probe
tgagcagactttacccttggagtca

SEQ ID NO: 202370 - DNA, 25 bp, Artificial
  Probe
tgtgcatcttcatggcaaacggatg

SEQ ID NO: 202371 - DNA, 25 bp, Artificial
  Probe
accccatggcctgagcagactttac

SEQ ID NO: 202372 - DNA, 25 bp, Artificial
  Probe
ttccaagctaagaggcgatttaaat

SEQ ID NO: 202373 - DNA, 25 bp, Artificial
  Probe
catggaggtgcattgctgctgcagt

SEQ ID NO: 202374 - DNA, 25 bp, Artificial
  Probe
cgttcctgtgcgtctccttccgaag

SEQ ID NO: 202375 - DNA, 25 bp, Artificial
  Probe
ggaatgaacacagtctgcaatgatc

SEQ ID NO: 202376 - DNA, 25 bp, Artificial
  Probe
aacatgacacacacaggcttgtgca

SEQ ID NO: 202377 - DNA, 25 bp, Artificial
  Probe
caccccatggcctgagcagacttta

SEQ ID NO: 202378 - DNA, 25 bp, Artificial
  Probe
tgaaaacatgacacacacaggcttg

SEQ ID NO: 202379 - DNA, 25 bp, Artificial
  Probe
cgtctccttccgaagccatggaggt

SEQ ID NO: 202380 - DNA, 25 bp, Artificial
  Probe
catgacacacacaggcttgtgcatc

SEQ ID NO: 202381 - DNA, 25 bp, Artificial
  Probe
catggcaaacggatgcgttcctgtg

SEQ ID NO: 202382 - DNA, 25 bp, Artificial
  Probe
actggatcccggatgctgcagtctg

SEQ ID NO: 202383 - DNA, 25 bp, Artificial
  Probe
acacacacaggcttgtgcatcttca

SEQ ID NO: 202384 - DNA, 25 bp, Artificial
  Probe
cttggagtcaagtgggcagctgctc

SEQ ID NO: 202385 - DNA, 25 bp, Artificial
  Probe
ctgtgcctgcccaagtgaagtcaca

SEQ ID NO: 202386 - DNA, 25 bp, Artificial
  Probe
caggtggcttcgttgctacacaccc

SEQ ID NO: 202387 - DNA, 25 bp, Artificial
  Probe
ataaccagagtcctcacatctgcag

SEQ ID NO: 202388 - DNA, 25 bp, Artificial
  Probe
tcctcacagcaagtaaaggaaagaa

SEQ ID NO: 202389 - DNA, 25 bp, Artificial
  Probe
cagacaggccattcagcctggtttc

SEQ ID NO: 202390 - DNA, 25 bp, Artificial
  Probe
tacacggagagcaagcaaagtgttc

SEQ ID NO: 202391 - DNA, 25 bp, Artificial
  Probe
gaggtatcactgtcccagtgttttc

SEQ ID NO: 202392 - DNA, 25 bp, Artificial
  Probe
gacaggccattcagcctggtttcta

SEQ ID NO: 202393 - DNA, 25 bp, Artificial
  Probe
ccctgaagacggtgttcccacaata

SEQ ID NO: 202394 - DNA, 25 bp, Artificial
  Probe
taaccagagtcctcacatctgcagg

SEQ ID NO: 202395 - DNA, 25 bp, Artificial
  Probe
tttctaagtgccaggcctctctgag

SEQ ID NO: 202396 - DNA, 25 bp, Artificial
  Probe
caactagaggccagtttttctaagt

SEQ ID NO: 202397 - DNA, 25 bp, Artificial
  Probe
tcacatggtttgttgagaatctcag

SEQ ID NO: 202398 - DNA, 25 bp, Artificial
  Probe
gttacctaataacaactagaggcca

SEQ ID NO: 202399 - DNA, 25 bp, Artificial
  Probe
ccctgctttggctgcttctctcggt

SEQ ID NO: 202400 - DNA, 25 bp, Artificial
  Probe
tttcttcctcacagcaagtaaagga

SEQ ID NO: 202401 - DNA, 25 bp, Artificial
  Probe
aagtgccaggcctctctgaggtatc

SEQ ID NO: 202402 - DNA, 25 bp, Artificial
  Probe
ttcccattgtggaaattcggcccag

SEQ ID NO: 202403 - DNA, 25 bp, Artificial
  Probe
tgtagagacaaccagacaggccatt

SEQ ID NO: 202404 - DNA, 25 bp, Artificial
  Probe
ctggtttctatctccctgaagacgg

SEQ ID NO: 202405 - DNA, 25 bp, Artificial
  Probe
taataacaactagaggccagttttt

SEQ ID NO: 202406 - DNA, 25 bp, Artificial
  Probe
agctccagagtgtagagacaaccag

SEQ ID NO: 202407 - DNA, 25 bp, Artificial
  Probe
aacacaccctgctttggctgcttct

SEQ ID NO: 202408 - DNA, 25 bp, Artificial
  Probe
gctttggctgcttctctcggtcagt

SEQ ID NO: 202409 - DNA, 25 bp, Artificial
  Probe
cgtccaagtgtggtttctatggtat

SEQ ID NO: 202410 - DNA, 25 bp, Artificial
  Probe
agacaaccagacaggccattcagcc

SEQ ID NO: 202411 - DNA, 25 bp, Artificial
  Probe
ttggctgcttctctcggtcagtccc

SEQ ID NO: 202412 - DNA, 25 bp, Artificial
  Probe
accagacaggccattcagcctggtt

SEQ ID NO: 202413 - DNA, 25 bp, Artificial
  Probe
aatacacggagagcaagcaaagtgt

SEQ ID NO: 202414 - DNA, 25 bp, Artificial
  Probe
attcagcctggtttctatctccctg

SEQ ID NO: 202415 - DNA, 25 bp, Artificial
  Probe
tttctatctccctgaagacggtgtt

SEQ ID NO: 202416 - DNA, 25 bp, Artificial
  Probe
tgaagacggtgttcccacaataacc

SEQ ID NO: 202417 - DNA, 25 bp, Artificial
  Probe
tgtgtgtacacgtgctcacatggtt

SEQ ID NO: 202418 - DNA, 25 bp, Artificial
  Probe
gtgttcccacaataaccagagtcct

SEQ ID NO: 202419 - DNA, 25 bp, Artificial
  Probe
gtcccctttagagatggacacaaaa

SEQ ID NO: 202420 - DNA, 25 bp, Artificial
  Probe
tatcactgtcccagtgttttcctgt

SEQ ID NO: 202421 - DNA, 25 bp, Artificial
  Probe
gaaatacacggagagcaagcaaagt

SEQ ID NO: 202422 - DNA, 25 bp, Artificial
  Probe
gacggtgttcccacaataaccagag

SEQ ID NO: 202423 - DNA, 25 bp, Artificial
  Probe
aagtgttcaacagagactcacgtcc

SEQ ID NO: 202424 - DNA, 25 bp, Artificial
  Probe
tggacacaaaaagacactgatagag

SEQ ID NO: 202425 - DNA, 25 bp, Artificial
  Probe
agtttttctaagtgccaggcctctc

SEQ ID NO: 202426 - DNA, 25 bp, Artificial
  Probe
cacgttacctaataacaactagagg

SEQ ID NO: 202427 - DNA, 25 bp, Artificial
  Probe
ccctttagagatggacacaaaaaga

SEQ ID NO: 202428 - DNA, 25 bp, Artificial
  Probe
atctccctgaagacggtgttcccac

SEQ ID NO: 202429 - DNA, 25 bp, Artificial
  Probe
tttgttgagaatctcagctccagag

SEQ ID NO: 202430 - DNA, 25 bp, Artificial
  Probe
aggtggtgtccaacacaccctgctt

SEQ ID NO: 202431 - DNA, 25 bp, Artificial
  Probe
ggtgtccaacacaccctgctttggc

SEQ ID NO: 202432 - DNA, 25 bp, Artificial
  Probe
gccattcagcctggtttctatctcc

SEQ ID NO: 202433 - DNA, 25 bp, Artificial
  Probe
tcttaacacttctgcctgtgctgaa

SEQ ID NO: 202434 - DNA, 25 bp, Artificial
  Probe
tgaggcccaagttgaatttggattc

SEQ ID NO: 202435 - DNA, 25 bp, Artificial
  Probe
tctgcagacattgaggcccaagttg

SEQ ID NO: 202436 - DNA, 25 bp, Artificial
  Probe
agactggccatttgatgacggagct

SEQ ID NO: 202437 - DNA, 25 bp, Artificial
  Probe
aagctgaaggtatccatctgcagac

SEQ ID NO: 202438 - DNA, 25 bp, Artificial
  Probe
ctttttaatgttttctgctgcgaaa

SEQ ID NO: 202439 - DNA, 25 bp, Artificial
  Probe
acttctgcctgtgctgaagagaagc

SEQ ID NO: 202440 - DNA, 25 bp, Artificial
  Probe
cagcccctgtggagatctcgtacga

SEQ ID NO: 202441 - DNA, 25 bp, Artificial
  Probe
acaagttcaccgaggaactcaagaa

SEQ ID NO: 202442 - DNA, 25 bp, Artificial
  Probe
cgagaacatgcgttttctgataact

SEQ ID NO: 202443 - DNA, 25 bp, Artificial
  Probe
cattgaggcccaagttgaatttgga

SEQ ID NO: 202444 - DNA, 25 bp, Artificial
  Probe
tttaatgttttctgctgcgaaacat

SEQ ID NO: 202445 - DNA, 25 bp, Artificial
  Probe
agtttgtgatgctacctatgacaaa

SEQ ID NO: 202446 - DNA, 25 bp, Artificial
  Probe
ttttctgctgcgaaacatttcaaga

SEQ ID NO: 202447 - DNA, 25 bp, Artificial
  Probe
agggatccacgttctagactggcca

SEQ ID NO: 202448 - DNA, 25 bp, Artificial
  Probe
ttatttgccataatgaaccgtccag

SEQ ID NO: 202449 - DNA, 25 bp, Artificial
  Probe
agtggattcttaacacttctgcctg

SEQ ID NO: 202450 - DNA, 25 bp, Artificial
  Probe
gatccacgttctagactggccattt

SEQ ID NO: 202451 - DNA, 25 bp, Artificial
  Probe
gccccctaatcagatagtagatgat

SEQ ID NO: 202452 - DNA, 25 bp, Artificial
  Probe
aacacttctgcctgtgctgaagaga

SEQ ID NO: 202453 - DNA, 25 bp, Artificial
  Probe
cgtacgagaacatgcgttttctgat

SEQ ID NO: 202454 - DNA, 25 bp, Artificial
  Probe
ctggccatttgatgacggagctccg

SEQ ID NO: 202455 - DNA, 25 bp, Artificial
  Probe
ccaacgggcactgctgtgttcagta

SEQ ID NO: 202456 - DNA, 25 bp, Artificial
  Probe
aatgcgactctcaacaagttcaccg

SEQ ID NO: 202457 - DNA, 25 bp, Artificial
  Probe
ggccatttgatgacggagctccgcc

SEQ ID NO: 202458 - DNA, 25 bp, Artificial
  Probe
caccgaggaactcaagaagtacgga

SEQ ID NO: 202459 - DNA, 25 bp, Artificial
  Probe
tttttggaagctgaaggtatccatc

SEQ ID NO: 202460 - DNA, 25 bp, Artificial
  Probe
atgacaaagctccagttgaaaaaga

SEQ ID NO: 202461 - DNA, 25 bp, Artificial
  Probe
gattggctaaacctgttaaagacca

SEQ ID NO: 202462 - DNA, 25 bp, Artificial
  Probe
ggatccacgttctagactggccatt

SEQ ID NO: 202463 - DNA, 25 bp, Artificial
  Probe
tgcctgtgctgaagagaagcttcat

SEQ ID NO: 202464 - DNA, 25 bp, Artificial
  Probe
acattgaggcccaagttgaatttgg

SEQ ID NO: 202465 - DNA, 25 bp, Artificial
  Probe
ccctaatcagatagtagatgattgg

SEQ ID NO: 202466 - DNA, 25 bp, Artificial
  Probe
ctgctgcgaaacatttcaagattta

SEQ ID NO: 202467 - DNA, 25 bp, Artificial
  Probe
cttgcactgattgaatgcggaatga

SEQ ID NO: 202468 - DNA, 25 bp, Artificial
  Probe
gagatctcgtacgagaacatgcgtt

SEQ ID NO: 202469 - DNA, 25 bp, Artificial
  Probe
cgactctcaacaagttcaccgagga

SEQ ID NO: 202470 - DNA, 25 bp, Artificial
  Probe
tttgtgatgctacctatgacaaagc

SEQ ID NO: 202471 - DNA, 25 bp, Artificial
  Probe
tggctaaacctgttaaagaccaaat

SEQ ID NO: 202472 - DNA, 25 bp, Artificial
  Probe
ctcaacaagttcaccgaggaactca

SEQ ID NO: 202473 - DNA, 25 bp, Artificial
  Probe
agttgcacttgcactgattgaatgc

SEQ ID NO: 202474 - DNA, 25 bp, Artificial
  Probe
gaacatgcgttttctgataactcac

SEQ ID NO: 202475 - DNA, 25 bp, Artificial
  Probe
ggtatccatctgcagacattgaggc

SEQ ID NO: 202476 - DNA, 25 bp, Artificial
  Probe
atgattggctaaacctgttaaagac

SEQ ID NO: 202477 - DNA, 25 bp, Artificial
  Probe
agcttcataaggaacaagcaagttg

SEQ ID NO: 202478 - DNA, 25 bp, Artificial
  Probe
tttgccataatgaaccgtccagccc

SEQ ID NO: 202479 - DNA, 25 bp, Artificial
  Probe
tgatttgtccggataccagtctgga

SEQ ID NO: 202480 - DNA, 25 bp, Artificial
  Probe
cctagccaaaggagcagaggagatg

SEQ ID NO: 202481 - DNA, 25 bp, Artificial
  Probe
gatcctcaaggagcaggagaacagg

SEQ ID NO: 202482 - DNA, 25 bp, Artificial
  Probe
tgtagtgatttgtccggataccagt

SEQ ID NO: 202483 - DNA, 25 bp, Artificial
  Probe
ttaaagtcaccgttgcaggcttggc

SEQ ID NO: 202484 - DNA, 25 bp, Artificial
  Probe
cctgtggacatcatgcggcgagctg

SEQ ID NO: 202485 - DNA, 25 bp, Artificial
  Probe
agttttgatgcctgggaaccgcgca

SEQ ID NO: 202486 - DNA, 25 bp, Artificial
  Probe
acgcggaacgtgcttcacagtggcg

SEQ ID NO: 202487 - DNA, 25 bp, Artificial
  Probe
aaatggcatccaaaagagctctggt

SEQ ID NO: 202488 - DNA, 25 bp, Artificial
  Probe
gtggcggctaactgctctcgttcgc

SEQ ID NO: 202489 - DNA, 25 bp, Artificial
  Probe
cgtgcttcacagtggcggctaactg

SEQ ID NO: 202490 - DNA, 25 bp, Artificial
  Probe
aacacgcggaacgtgcttcacagtg

SEQ ID NO: 202491 - DNA, 25 bp, Artificial
  Probe
cagggttgacctcctaaagggatat

SEQ ID NO: 202492 - DNA, 25 bp, Artificial
  Probe
tctggtcatcctagccaaaggagca

SEQ ID NO: 202493 - DNA, 25 bp, Artificial
  Probe
agccgtgatgtagtgatttgtccgg

SEQ ID NO: 202494 - DNA, 25 bp, Artificial
  Probe
aagagctctggtcatcctagccaaa

SEQ ID NO: 202495 - DNA, 25 bp, Artificial
  Probe
cggaacgtgcttcacagtggcggct

SEQ ID NO: 202496 - DNA, 25 bp, Artificial
  Probe
tgaaggagatcctcaaggagcagga

SEQ ID NO: 202497 - DNA, 25 bp, Artificial
  Probe
tgttcttccaggaggaaatctgggt

SEQ ID NO: 202498 - DNA, 25 bp, Artificial
  Probe
ttccaggaggaaatctgggtgcaca

SEQ ID NO: 202499 - DNA, 25 bp, Artificial
  Probe
gagccgtctggcagggttgacctcc

SEQ ID NO: 202500 - DNA, 25 bp, Artificial
  Probe
taccagtctggaagaagcaaaaaca

SEQ ID NO: 202501 - DNA, 25 bp, Artificial
  Probe
ccaaagttttgatgcctgggaaccg

SEQ ID NO: 202502 - DNA, 25 bp, Artificial
  Probe
ccaaaagagctctggtcatcctagc

SEQ ID NO: 202503 - DNA, 25 bp, Artificial
  Probe
atagaaatggcatccaaaagagctc

SEQ ID NO: 202504 - DNA, 25 bp, Artificial
  Probe
ttgatgcctgggaaccgcgcaggaa

SEQ ID NO: 202505 - DNA, 25 bp, Artificial
  Probe
tctgggtgcacagaacttatctgag

SEQ ID NO: 202506 - DNA, 25 bp, Artificial
  Probe
ggagatcctcaaggagcaggagaac

SEQ ID NO: 202507 - DNA, 25 bp, Artificial
  Probe
cacagtggcggctaactgctctcgt

SEQ ID NO: 202508 - DNA, 25 bp, Artificial
  Probe
catcatgcggcgagctgggattaaa

SEQ ID NO: 202509 - DNA, 25 bp, Artificial
  Probe
gaaggaccccgtgcagtgtagccgt

SEQ ID NO: 202510 - DNA, 25 bp, Artificial
  Probe
gtagccgtgatgtagtgatttgtcc

SEQ ID NO: 202511 - DNA, 25 bp, Artificial
  Probe
gaaccgcgcaggaaaaacacgcgga

SEQ ID NO: 202512 - DNA, 25 bp, Artificial
  Probe
aggaaatctgggtgcacagaactta

SEQ ID NO: 202513 - DNA, 25 bp, Artificial
  Probe
tgatgcctgggaaccgcgcaggaaa

SEQ ID NO: 202514 - DNA, 25 bp, Artificial
  Probe
tgatgtagtgatttgtccggatacc

SEQ ID NO: 202515 - DNA, 25 bp, Artificial
  Probe
gttgacctcctaaagggatattcca

SEQ ID NO: 202516 - DNA, 25 bp, Artificial
  Probe
tggagacagtgattcctgtggacat

SEQ ID NO: 202517 - DNA, 25 bp, Artificial
  Probe
catgcggcgagctgggattaaagtc

SEQ ID NO: 202518 - DNA, 25 bp, Artificial
  Probe
aagtcaccgttgcaggcttggctgg

SEQ ID NO: 202519 - DNA, 25 bp, Artificial
  Probe
cgtctggcagggttgacctcctaaa

SEQ ID NO: 202520 - DNA, 25 bp, Artificial
  Probe
ttgacctcctaaagggatattccat

SEQ ID NO: 202521 - DNA, 25 bp, Artificial
  Probe
cccgtgcagtgtagccgtgatgtag

SEQ ID NO: 202522 - DNA, 25 bp, Artificial
  Probe
gtcatcctagccaaaggagcagagg

SEQ ID NO: 202523 - DNA, 25 bp, Artificial
  Probe
tgggaaccgcgcaggaaaaacacgc

SEQ ID NO: 202524 - DNA, 25 bp, Artificial
  Probe
cacagaacttatctgagtcggcttt

SEQ ID NO: 202525 - DNA, 25 bp, Artificial
  Probe
aatccattcctttgttgaagtctgg

SEQ ID NO: 202526 - DNA, 25 bp, Artificial
  Probe
tggagtctaacttcttgagttcttt

SEQ ID NO: 202527 - DNA, 25 bp, Artificial
  Probe
ggttgtaccagtctgcaatcccagc

SEQ ID NO: 202528 - DNA, 25 bp, Artificial
  Probe
gcatcagctgtcacccaagtttttg

SEQ ID NO: 202529 - DNA, 25 bp, Artificial
  Probe
tgttgaagtctggagtctttccagc

SEQ ID NO: 202530 - DNA, 25 bp, Artificial
  Probe
tgaacattgctttaggtgctttggc

SEQ ID NO: 202531 - DNA, 25 bp, Artificial
  Probe
aatcccagcaacaatgcaggagtgt

SEQ ID NO: 202532 - DNA, 25 bp, Artificial
  Probe
gtgctttggccattcgatattcctc

SEQ ID NO: 202533 - DNA, 25 bp, Artificial
  Probe
agcccctctatcagaaagtaagatg

SEQ ID NO: 202534 - DNA, 25 bp, Artificial
  Probe
gggttatttggctctctggagtcta

SEQ ID NO: 202535 - DNA, 25 bp, Artificial
  Probe
actgaacattgctttaggtgctttg

SEQ ID NO: 202536 - DNA, 25 bp, Artificial
  Probe
cagctgtcacccaagtttttgattt

SEQ ID NO: 202537 - DNA, 25 bp, Artificial
  Probe
ctttaggtgctttggccattcgata

SEQ ID NO: 202538 - DNA, 25 bp, Artificial
  Probe
aattttctgaggaacctccacattg

SEQ ID NO: 202539 - DNA, 25 bp, Artificial
  Probe
ggtgctttggccattcgatattcct

SEQ ID NO: 202540 - DNA, 25 bp, Artificial
  Probe
tgtcacccaagtttttgattttagc

SEQ ID NO: 202541 - DNA, 25 bp, Artificial
  Probe
gtctgcaatcccagcaacaatgcag

SEQ ID NO: 202542 - DNA, 25 bp, Artificial
  Probe
tcttttggtatatgcccaagagaag

SEQ ID NO: 202543 - DNA, 25 bp, Artificial
  Probe
agtctaacttcttgagttctttgta

SEQ ID NO: 202544 - DNA, 25 bp, Artificial
  Probe
tagctggtcctcaggcagttcaatg

SEQ ID NO: 202545 - DNA, 25 bp, Artificial
  Probe
aagtatagctggtcctcaggcagtt

SEQ ID NO: 202546 - DNA, 25 bp, Artificial
  Probe
gtaccagtctgcaatcccagcaaca

SEQ ID NO: 202547 - DNA, 25 bp, Artificial
  Probe
ggtatatgcccaagagaagtatagc

SEQ ID NO: 202548 - DNA, 25 bp, Artificial
  Probe
ttctgaggaacctccacattgattt

SEQ ID NO: 202549 - DNA, 25 bp, Artificial
  Probe
acatccttgccagcatcagctgtca

SEQ ID NO: 202550 - DNA, 25 bp, Artificial
  Probe
gtccaattttctgaggaacctccac

SEQ ID NO: 202551 - DNA, 25 bp, Artificial
  Probe
tgtaccagtctgcaatcccagcaac

SEQ ID NO: 202552 - DNA, 25 bp, Artificial
  Probe
tggccattcgatattcctcagcttg

SEQ ID NO: 202553 - DNA, 25 bp, Artificial
  Probe
aggctgctatgaacatagtggaaca

SEQ ID NO: 202554 - DNA, 25 bp, Artificial
  Probe
atattcctcagcttggaatgttttg

SEQ ID NO: 202555 - DNA, 25 bp, Artificial
  Probe
gtctttccagcttctggctaatata

SEQ ID NO: 202556 - DNA, 25 bp, Artificial
  Probe
tcaggcagttcaatgtccaattttc

SEQ ID NO: 202557 - DNA, 25 bp, Artificial
  Probe
ctttggccattcgatattcctcagc

SEQ ID NO: 202558 - DNA, 25 bp, Artificial
  Probe
ttggctctctggagtctaacttctt

SEQ ID NO: 202559 - DNA, 25 bp, Artificial
  Probe
agtatagctggtcctcaggcagttc

SEQ ID NO: 202560 - DNA, 25 bp, Artificial
  Probe
ggagcatcttttggtatatgcccaa

SEQ ID NO: 202561 - DNA, 25 bp, Artificial
  Probe
tatgcccaagagaagtatagctggt

SEQ ID NO: 202562 - DNA, 25 bp, Artificial
  Probe
gttggagcatcttttggtatatgcc

SEQ ID NO: 202563 - DNA, 25 bp, Artificial
  Probe
ttgaagtctggagtctttccagctt

SEQ ID NO: 202564 - DNA, 25 bp, Artificial
  Probe
ggctgctatgaacatagtggaacat

SEQ ID NO: 202565 - DNA, 25 bp, Artificial
  Probe
ttgccagcatcagctgtcacccaag

SEQ ID NO: 202566 - DNA, 25 bp, Artificial
  Probe
agtggttgtaccagtctgcaatccc

SEQ ID NO: 202567 - DNA, 25 bp, Artificial
  Probe
tggtcctcaggcagttcaatgtcca

SEQ ID NO: 202568 - DNA, 25 bp, Artificial
  Probe
tccattcctttgttgaagtctggag

SEQ ID NO: 202569 - DNA, 25 bp, Artificial
  Probe
atcttttggtatatgcccaagagaa

SEQ ID NO: 202570 - DNA, 25 bp, Artificial
  Probe
attcctcagcttggaatgttttgtt

SEQ ID NO: 202571 - DNA, 25 bp, Artificial
  Probe
acaatatgcagattctgtcgataat

SEQ ID NO: 202572 - DNA, 25 bp, Artificial
  Probe
caagcctaggtaatcctccagtcta

SEQ ID NO: 202573 - DNA, 25 bp, Artificial
  Probe
gtgatggcaacaagcctaggtaatc

SEQ ID NO: 202574 - DNA, 25 bp, Artificial
  Probe
agattcaaattcagtgacatgttca

SEQ ID NO: 202575 - DNA, 25 bp, Artificial
  Probe
taacaaaactagcttttctgtgatg

SEQ ID NO: 202576 - DNA, 25 bp, Artificial
  Probe
cgccaagactgttgccatcaatttt

SEQ ID NO: 202577 - DNA, 25 bp, Artificial
  Probe
tcaactgactttgaacaatatgcag

SEQ ID NO: 202578 - DNA, 25 bp, Artificial
  Probe
gatgctatatccaaggcttctaact

SEQ ID NO: 202579 - DNA, 25 bp, Artificial
  Probe
gaaagatgctatatccaaggcttct

SEQ ID NO: 202580 - DNA, 25 bp, Artificial
  Probe
gttgccatcaattttctcttgactg

SEQ ID NO: 202581 - DNA, 25 bp, Artificial
  Probe
aaggtaaacacgatgtccctcacag

SEQ ID NO: 202582 - DNA, 25 bp, Artificial
  Probe
acagtgaaactgtgcactcaactga

SEQ ID NO: 202583 - DNA, 25 bp, Artificial
  Probe
acacgatgtccctcacagtgctggg

SEQ ID NO: 202584 - DNA, 25 bp, Artificial
  Probe
tggagtgtgccctggctttacacgc

SEQ ID NO: 202585 - DNA, 25 bp, Artificial
  Probe
atccaaggcttctaacttctcagtg

SEQ ID NO: 202586 - DNA, 25 bp, Artificial
  Probe
attcatgccaagaaggtaaacacga

SEQ ID NO: 202587 - DNA, 25 bp, Artificial
  Probe
atgattcatgccaagaaggtaaaca

SEQ ID NO: 202588 - DNA, 25 bp, Artificial
  Probe
gattctgtcgataatgtaaaaccaa

SEQ ID NO: 202589 - DNA, 25 bp, Artificial
  Probe
ggaagtacagtgctgtcaagcttgg

SEQ ID NO: 202590 - DNA, 25 bp, Artificial
  Probe
agtcatgattcatgccaagaaggta

SEQ ID NO: 202591 - DNA, 25 bp, Artificial
  Probe
ctttacacgctgctttataaaggca

SEQ ID NO: 202592 - DNA, 25 bp, Artificial
  Probe
tgaacaatatgcagattctgtcgat

SEQ ID NO: 202593 - DNA, 25 bp, Artificial
  Probe
aaactagcttttctgtgatggcaac

SEQ ID NO: 202594 - DNA, 25 bp, Artificial
  Probe
agctaacaaaactagcttttctgtg

SEQ ID NO: 202595 - DNA, 25 bp, Artificial
  Probe
ccccagcgggaagtacagtgctgtc

SEQ ID NO: 202596 - DNA, 25 bp, Artificial
  Probe
cacaacagtgaaactgtgcactcaa

SEQ ID NO: 202597 - DNA, 25 bp, Artificial
  Probe
caactgactttgaacaatatgcaga

SEQ ID NO: 202598 - DNA, 25 bp, Artificial
  Probe
cgatgtccctcacagtgctgggact

SEQ ID NO: 202599 - DNA, 25 bp, Artificial
  Probe
caagcttggtcagtatggagattca

SEQ ID NO: 202600 - DNA, 25 bp, Artificial
  Probe
ttctgtgatggcaacaagcctaggt

SEQ ID NO: 202601 - DNA, 25 bp, Artificial
  Probe
gtgcactcaactgactttgaacaat

SEQ ID NO: 202602 - DNA, 25 bp, Artificial
  Probe
ggcttctaacttctcagtgcttcaa

SEQ ID NO: 202603 - DNA, 25 bp, Artificial
  Probe
gactgttgccatcaattttctcttg

SEQ ID NO: 202604 - DNA, 25 bp, Artificial
  Probe
ccctggctttacacgctgctttata

SEQ ID NO: 202605 - DNA, 25 bp, Artificial
  Probe
gaattcgaccctgctatagccatct

SEQ ID NO: 202606 - DNA, 25 bp, Artificial
  Probe
ctgctgctcgccaagactgttgcca

SEQ ID NO: 202607 - DNA, 25 bp, Artificial
  Probe
ttgccacagcccaagagtcatgatt

SEQ ID NO: 202608 - DNA, 25 bp, Artificial
  Probe
ggctttacacgctgctttataaagg

SEQ ID NO: 202609 - DNA, 25 bp, Artificial
  Probe
acgctgctttataaaggcaccgaaa

SEQ ID NO: 202610 - DNA, 25 bp, Artificial
  Probe
tgactttgaacaatatgcagattct

SEQ ID NO: 202611 - DNA, 25 bp, Artificial
  Probe
tggcaacaagcctaggtaatcctcc

SEQ ID NO: 202612 - DNA, 25 bp, Artificial
  Probe
gcttttctgtgatggcaacaagcct

SEQ ID NO: 202613 - DNA, 25 bp, Artificial
  Probe
gcagattctgtcgataatgtaaaac

SEQ ID NO: 202614 - DNA, 25 bp, Artificial
  Probe
cccaagagtcatgattcatgccaag

SEQ ID NO: 202615 - DNA, 25 bp, Artificial
  Probe
gtaaacacgatgtccctcacagtgc

SEQ ID NO: 202616 - DNA, 25 bp, Artificial
  Probe
gtgtgccctggctttacacgctgct

SEQ ID NO: 202617 - DNA, 25 bp, Artificial
  Probe
cgaaggcacaccacgaggtccacag

SEQ ID NO: 202618 - DNA, 25 bp, Artificial
  Probe
agtggcccctcttggcctaaaggat

SEQ ID NO: 202619 - DNA, 25 bp, Artificial
  Probe
agcagggaaacactttcacgtgttc

SEQ ID NO: 202620 - DNA, 25 bp, Artificial
  Probe
aaagcatctccaaacccgaaggcac

SEQ ID NO: 202621 - DNA, 25 bp, Artificial
  Probe
taaagcacccagctctgccttggga

SEQ ID NO: 202622 - DNA, 25 bp, Artificial
  Probe
gtaaaaggcttctatcccccagaca

SEQ ID NO: 202623 - DNA, 25 bp, Artificial
  Probe
tggcctaaaggatgccaacacctac

SEQ ID NO: 202624 - DNA, 25 bp, Artificial
  Probe
tcgtgcaccgggactggctcaatgg

SEQ ID NO: 202625 - DNA, 25 bp, Artificial
  Probe
cacctgcatggtaaaaggcttctat

SEQ ID NO: 202626 - DNA, 25 bp, Artificial
  Probe
accatactgagaagagtctctccca

SEQ ID NO: 202627 - DNA, 25 bp, Artificial
  Probe
gcctcccaaggaagagatgacccag

SEQ ID NO: 202628 - DNA, 25 bp, Artificial
  Probe
tccagtggcccctcttggcctaaag

SEQ ID NO: 202629 - DNA, 25 bp, Artificial
  Probe
tccacaggtatacaccatggcgcct

SEQ ID NO: 202630 - DNA, 25 bp, Artificial
  Probe
atcgagaaaagcatctccaaacccg

SEQ ID NO: 202631 - DNA, 25 bp, Artificial
  Probe
agatgaacgggcagccacaggaaaa

SEQ ID NO: 202632 - DNA, 25 bp, Artificial
  Probe
tacagcaagctcaatgtaaagaaag

SEQ ID NO: 202633 - DNA, 25 bp, Artificial
  Probe
gccccggagaagcagtccaacagca

SEQ ID NO: 202634 - DNA, 25 bp, Artificial
  Probe
gagaagcagtccaacagcactttac

SEQ ID NO: 202635 - DNA, 25 bp, Artificial
  Probe
gagaagagtctctcccactctcctg

SEQ ID NO: 202636 - DNA, 25 bp, Artificial
  Probe
aagagatgacccagagtcaagtcag

SEQ ID NO: 202637 - DNA, 25 bp, Artificial
  Probe
aagcatctccaaacccgaaggcaca

SEQ ID NO: 202638 - DNA, 25 bp, Artificial
  Probe
agtcaacagtggagcattccctgcc

SEQ ID NO: 202639 - DNA, 25 bp, Artificial
  Probe
ggactggctcaatggcaagacgttc

SEQ ID NO: 202640 - DNA, 25 bp, Artificial
  Probe
acgttcaaatgcaaagtcaacagtg

SEQ ID NO: 202641 - DNA, 25 bp, Artificial
  Probe
ccagacatttatacggagtggaaga

SEQ ID NO: 202642 - DNA, 25 bp, Artificial
  Probe
gagttacttcctctacagcaagctc

SEQ ID NO: 202643 - DNA, 25 bp, Artificial
  Probe
tgcatgagggcctgcacaaccacca

SEQ ID NO: 202644 - DNA, 25 bp, Artificial
  Probe
atgatcccagagtccagtggcccct

SEQ ID NO: 202645 - DNA, 25 bp, Artificial
  Probe
cctctacagcaagctcaatgtaaag

SEQ ID NO: 202646 - DNA, 25 bp, Artificial
  Probe
gtgcaccgggactggctcaatggca

SEQ ID NO: 202647 - DNA, 25 bp, Artificial
  Probe
acactccacctacgatggacacaga

SEQ ID NO: 202648 - DNA, 25 bp, Artificial
  Probe
ctatcccccagacatttatacggag

SEQ ID NO: 202649 - DNA, 25 bp, Artificial
  Probe
aatggcaagacgttcaaatgcaaag

SEQ ID NO: 202650 - DNA, 25 bp, Artificial
  Probe
ctctgccttgggaccctgcaaaaaa

SEQ ID NO: 202651 - DNA, 25 bp, Artificial
  Probe
cctcccaaggaagagatgacccaga

SEQ ID NO: 202652 - DNA, 25 bp, Artificial
  Probe
ccactctcctggtaaatgatcccag

SEQ ID NO: 202653 - DNA, 25 bp, Artificial
  Probe
gaaacatggcagcagggaaacactt

SEQ ID NO: 202654 - DNA, 25 bp, Artificial
  Probe
actgagaagagtctctcccactctc

SEQ ID NO: 202655 - DNA, 25 bp, Artificial
  Probe
gcagccacaggaaaactacaagaac

SEQ ID NO: 202656 - DNA, 25 bp, Artificial
  Probe
tacaagaacactccacctacgatgg

SEQ ID NO: 202657 - DNA, 25 bp, Artificial
  Probe
tctgtgctgcatgagggcctgcaca

SEQ ID NO: 202658 - DNA, 25 bp, Artificial
  Probe
cagtcagtgaactccccatcgtgca

SEQ ID NO: 202659 - DNA, 25 bp, Artificial
  Probe
tgtaaataaagcacccagctctgcc

SEQ ID NO: 202660 - DNA, 25 bp, Artificial
  Probe
cccctcttggcctaaaggatgccaa

SEQ ID NO: 202661 - DNA, 25 bp, Artificial
  Probe
cgatggacacagatgggagttactt

SEQ ID NO: 202662 - DNA, 25 bp, Artificial
  Probe
gatgggagttacttcctctacagca

SEQ ID NO: 202663 - DNA, 25 bp, Artificial
  Probe
catctactatgcagacacagtgaag

SEQ ID NO: 202664 - DNA, 25 bp, Artificial
  Probe
tactatgcagacacagtgaagggcc

SEQ ID NO: 202665 - DNA, 25 bp, Artificial
  Probe
gtattactgtgcaagtgatgtgcct

SEQ ID NO: 202666 - DNA, 25 bp, Artificial
  Probe
cggttacatctactatgcagacaca

SEQ ID NO: 202667 - DNA, 25 bp, Artificial
  Probe
tgccttgtattactgtgcaagtgat

SEQ ID NO: 202668 - DNA, 25 bp, Artificial
  Probe
agcggttacatctactatgcagaca

SEQ ID NO: 202669 - DNA, 25 bp, Artificial
  Probe
agtagtagcggttacatctactatg

SEQ ID NO: 202670 - DNA, 25 bp, Artificial
  Probe
gaacaccctgtacctgcaaatgacc

SEQ ID NO: 202671 - DNA, 25 bp, Artificial
  Probe
caccctgtacctgcaaatgaccagt

SEQ ID NO: 202672 - DNA, 25 bp, Artificial
  Probe
actatgcagacacagtgaagggccg

SEQ ID NO: 202673 - DNA, 25 bp, Artificial
  Probe
gtctgaagacactgccttgtattac

SEQ ID NO: 202674 - DNA, 25 bp, Artificial
  Probe
gttacatctactatgcagacacagt

SEQ ID NO: 202675 - DNA, 25 bp, Artificial
  Probe
tattactgtgcaagtgatgtgccta

SEQ ID NO: 202676 - DNA, 25 bp, Artificial
  Probe
tgtattactgtgcaagtgatgtgcc

SEQ ID NO: 202677 - DNA, 25 bp, Artificial
  Probe
tagcggttacatctactatgcagac

SEQ ID NO: 202678 - DNA, 25 bp, Artificial
  Probe
agtagcggttacatctactatgcag

SEQ ID NO: 202679 - DNA, 25 bp, Artificial
  Probe
cactgccttgtattactgtgcaagt

SEQ ID NO: 202680 - DNA, 25 bp, Artificial
  Probe
cactttcagtaactatggaatgaac

SEQ ID NO: 202681 - DNA, 25 bp, Artificial
  Probe
agaacaccctgtacctgcaaatgac

SEQ ID NO: 202682 - DNA, 25 bp, Artificial
  Probe
aggtctgaagacactgccttgtatt

SEQ ID NO: 202683 - DNA, 25 bp, Artificial
  Probe
ccttgtattactgtgcaagtgatgt

SEQ ID NO: 202684 - DNA, 25 bp, Artificial
  Probe
caagaacaccctgtacctgcaaatg

SEQ ID NO: 202685 - DNA, 25 bp, Artificial
  Probe
actgtgcaagtgatgtgcctacccg

SEQ ID NO: 202686 - DNA, 25 bp, Artificial
  Probe
ggttacatctactatgcagacacag

SEQ ID NO: 202687 - DNA, 25 bp, Artificial
  Probe
aaatgccaagaacaccctgtacctg

SEQ ID NO: 202688 - DNA, 25 bp, Artificial
  Probe
tacccgggccccatatactacggat

SEQ ID NO: 202689 - DNA, 25 bp, Artificial
  Probe
tacatctactatgcagacacagtga

SEQ ID NO: 202690 - DNA, 25 bp, Artificial
  Probe
acatctactatgcagacacagtgaa

SEQ ID NO: 202691 - DNA, 25 bp, Artificial
  Probe
acaccctgtacctgcaaatgaccag

SEQ ID NO: 202692 - DNA, 25 bp, Artificial
  Probe
ttactgtgcaagtgatgtgcctacc

SEQ ID NO: 202693 - DNA, 25 bp, Artificial
  Probe
ctgtgcaagtgatgtgcctacccgg

SEQ ID NO: 202694 - DNA, 25 bp, Artificial
  Probe
tctgaggtctgaagacactgccttg

SEQ ID NO: 202695 - DNA, 25 bp, Artificial
  Probe
ctttcagtaactatggaatgaactg

SEQ ID NO: 202696 - DNA, 25 bp, Artificial
  Probe
aatgccaagaacaccctgtacctgc

SEQ ID NO: 202697 - DNA, 25 bp, Artificial
  Probe
ctgccttgtattactgtgcaagtga

SEQ ID NO: 202698 - DNA, 25 bp, Artificial
  Probe
gccttgtattactgtgcaagtgatg

SEQ ID NO: 202699 - DNA, 25 bp, Artificial
  Probe
actttcagtaactatggaatgaact

SEQ ID NO: 202700 - DNA, 25 bp, Artificial
  Probe
agtgatgtgcctacccgggccccat

SEQ ID NO: 202701 - DNA, 25 bp, Artificial
  Probe
aagtgatgtgcctacccgggcccca

SEQ ID NO: 202702 - DNA, 25 bp, Artificial
  Probe
tgtgcaagtgatgtgcctacccggg

SEQ ID NO: 202703 - DNA, 25 bp, Artificial
  Probe
tagtagcggttacatctactatgca

SEQ ID NO: 202704 - DNA, 25 bp, Artificial
  Probe
accctgtacctgcaaatgaccagtc

SEQ ID NO: 202705 - DNA, 25 bp, Artificial
  Probe
gtagcggttacatctactatgcaga

SEQ ID NO: 202706 - DNA, 25 bp, Artificial
  Probe
gaatgaactggattcgccaggctcc

SEQ ID NO: 202707 - DNA, 25 bp, Artificial
  Probe
ggtctgaagacactgccttgtatta

SEQ ID NO: 202708 - DNA, 25 bp, Artificial
  Probe
ttacatctactatgcagacacagtg

SEQ ID NO: 202709 - DNA, 25 bp, Artificial
  Probe
cttctgatggggaagacgagcagca

SEQ ID NO: 202710 - DNA, 25 bp, Artificial
  Probe
agaacaagctgatcgccctgggaga

SEQ ID NO: 202711 - DNA, 25 bp, Artificial
  Probe
tgcacgccacggtggtgaaggttcc

SEQ ID NO: 202712 - DNA, 25 bp, Artificial
  Probe
aagaggatgctcttggtaccatact

SEQ ID NO: 202713 - DNA, 25 bp, Artificial
  Probe
tctccctgaaattaaagtttggctt

SEQ ID NO: 202714 - DNA, 25 bp, Artificial
  Probe
gccttaccgcacaagctccggatta

SEQ ID NO: 202715 - DNA, 25 bp, Artificial
  Probe
acacagcctatctcggcttcggact

SEQ ID NO: 202716 - DNA, 25 bp, Artificial
  Probe
gatcgccctgggagaagaaaatgcc

SEQ ID NO: 202717 - DNA, 25 bp, Artificial
  Probe
gacgagcagcaggtccccaaaggcc

SEQ ID NO: 202718 - DNA, 25 bp, Artificial
  Probe
ctcggtgcaggtgacgaacattcaa

SEQ ID NO: 202719 - DNA, 25 bp, Artificial
  Probe
tcagagctcgctctcggatgtgtct

SEQ ID NO: 202720 - DNA, 25 bp, Artificial
  Probe
tggtctcgctcaagagattcatagc

SEQ ID NO: 202721 - DNA, 25 bp, Artificial
  Probe
aagcatggcgcttcgggtacggccc

SEQ ID NO: 202722 - DNA, 25 bp, Artificial
  Probe
gtagccggaagttgcatctctgtca

SEQ ID NO: 202723 - DNA, 25 bp, Artificial
  Probe
ccatccattctccagtggagctgca

SEQ ID NO: 202724 - DNA, 25 bp, Artificial
  Probe
atcgccctgggagaagaaaatgcca

SEQ ID NO: 202725 - DNA, 25 bp, Artificial
  Probe
agctttggacagtgagttcgaaggc

SEQ ID NO: 202726 - DNA, 25 bp, Artificial
  Probe
gggtggcaaacttatccgcagaggt

SEQ ID NO: 202727 - DNA, 25 bp, Artificial
  Probe
gaagaaaatgccactttaaaagctg

SEQ ID NO: 202728 - DNA, 25 bp, Artificial
  Probe
gctatgcgtggaagaggatgctctt

SEQ ID NO: 202729 - DNA, 25 bp, Artificial
  Probe
taaagtgtgtacgttgccagtttca

SEQ ID NO: 202730 - DNA, 25 bp, Artificial
  Probe
attctccagtggagctgcagcgggt

SEQ ID NO: 202731 - DNA, 25 bp, Artificial
  Probe
gtctggtgtccttgtgtacacaacg

SEQ ID NO: 202732 - DNA, 25 bp, Artificial
  Probe
catgagcctgcgatggtagccggaa

SEQ ID NO: 202733 - DNA, 25 bp, Artificial
  Probe
agtggctataaggtttccgaggctg

SEQ ID NO: 202734 - DNA, 25 bp, Artificial
  Probe
tcagggtaccttcaaaacgggtgtg

SEQ ID NO: 202735 - DNA, 25 bp, Artificial
  Probe
catgcaggtcaaagtggaagctttg

SEQ ID NO: 202736 - DNA, 25 bp, Artificial
  Probe
ggcgcttcgggtacggcccattcct

SEQ ID NO: 202737 - DNA, 25 bp, Artificial
  Probe
cgagcatgagcctgcgatggtagcc

SEQ ID NO: 202738 - DNA, 25 bp, Artificial
  Probe
gcctccatctaccagagctacatgg

SEQ ID NO: 202739 - DNA, 25 bp, Artificial
  Probe
tgggcggcaaaactcagggtacctt

SEQ ID NO: 202740 - DNA, 25 bp, Artificial
  Probe
gaggctgtacataccgaacgttatt

SEQ ID NO: 202741 - DNA, 25 bp, Artificial
  Probe
gcaagtcttctgatggggaagacga

SEQ ID NO: 202742 - DNA, 25 bp, Artificial
  Probe
gtcatcaagcactctcctcagagct

SEQ ID NO: 202743 - DNA, 25 bp, Artificial
  Probe
ctgtcatcaagcactctcctcagag

SEQ ID NO: 202744 - DNA, 25 bp, Artificial
  Probe
cgcccaagaaatccagaaactcagt

SEQ ID NO: 202745 - DNA, 25 bp, Artificial
  Probe
cagaaactcagtaatcccacagctg

SEQ ID NO: 202746 - DNA, 25 bp, Artificial
  Probe
tgatcaagcaggagcccgtggagtt

SEQ ID NO: 202747 - DNA, 25 bp, Artificial
  Probe
aagacgagcagcaggtccccaaagg

SEQ ID NO: 202748 - DNA, 25 bp, Artificial
  Probe
ggagcacacacaggaaagccccgca

SEQ ID NO: 202749 - DNA, 25 bp, Artificial
  Probe
ccccagaggctgtacataccgaacg

SEQ ID NO: 202750 - DNA, 25 bp, Artificial
  Probe
ttaaagtttggcttaattagctcca

SEQ ID NO: 202751 - DNA, 25 bp, Artificial
  Probe
ggctataaggtttccgaggctgaga

SEQ ID NO: 202752 - DNA, 25 bp, Artificial
  Probe
tgggtagctctttctccacctactc

SEQ ID NO: 202753 - DNA, 25 bp, Artificial
  Probe
ctgccggagccctgagaacaagttc

SEQ ID NO: 202754 - DNA, 25 bp, Artificial
  Probe
ctcctttctcggtgcaggtgacgaa

SEQ ID NO: 202755 - DNA, 25 bp, Artificial
  Probe
tagagttggctttatgggacacagc

SEQ ID NO: 202756 - DNA, 25 bp, Artificial
  Probe
gacacagctggacaggaagattatg

SEQ ID NO: 202757 - DNA, 25 bp, Artificial
  Probe
ggctttatgggacacagctggacag

SEQ ID NO: 202758 - DNA, 25 bp, Artificial
  Probe
cagacactgatgttatactgatgtg

SEQ ID NO: 202759 - DNA, 25 bp, Artificial
  Probe
agacatgcttgctcatagtcttcag

SEQ ID NO: 202760 - DNA, 25 bp, Artificial
  Probe
agtgttcagcaaagaccaaagacgg

SEQ ID NO: 202761 - DNA, 25 bp, Artificial
  Probe
tggactccagaagtcaagcatttct

SEQ ID NO: 202762 - DNA, 25 bp, Artificial
  Probe
ccagacactgatgttatactgatgt

SEQ ID NO: 202763 - DNA, 25 bp, Artificial
  Probe
ggtaagacatgcttgctcatagtct

SEQ ID NO: 202764 - DNA, 25 bp, Artificial
  Probe
gttagccaaaatgaagcaggagccg

SEQ ID NO: 202765 - DNA, 25 bp, Artificial
  Probe
gtttatgtgcccacggtgtttgaaa

SEQ ID NO: 202766 - DNA, 25 bp, Artificial
  Probe
agagttggctttatgggacacagct

SEQ ID NO: 202767 - DNA, 25 bp, Artificial
  Probe
tacatggagtgttcagcaaagacca

SEQ ID NO: 202768 - DNA, 25 bp, Artificial
  Probe
caggattggcgcttttgggtacatg

SEQ ID NO: 202769 - DNA, 25 bp, Artificial
  Probe
agccctgatagtttagaaaacatcc

SEQ ID NO: 202770 - DNA, 25 bp, Artificial
  Probe
gcaggagccggtaaaacctgaagaa

SEQ ID NO: 202771 - DNA, 25 bp, Artificial
  Probe
gcaaggaccagttcccagaggttta

SEQ ID NO: 202772 - DNA, 25 bp, Artificial
  Probe
tcttcggaatgatgagcacacaagg

SEQ ID NO: 202773 - DNA, 25 bp, Artificial
  Probe
gctgccatcaggaagaaactggtga

SEQ ID NO: 202774 - DNA, 25 bp, Artificial
  Probe
agtcttcagcaaggaccagttccca

SEQ ID NO: 202775 - DNA, 25 bp, Artificial
  Probe
tttgagatggccacgagagctgctc

SEQ ID NO: 202776 - DNA, 25 bp, Artificial
  Probe
tggcaaacaggattggcgcttttgg

SEQ ID NO: 202777 - DNA, 25 bp, Artificial
  Probe
cttgtggtaagacatgcttgctcat

SEQ ID NO: 202778 - DNA, 25 bp, Artificial
  Probe
aaggatcttcggaatgatgagcaca

SEQ ID NO: 202779 - DNA, 25 bp, Artificial
  Probe
atatggcaaacaggattggcgcttt

SEQ ID NO: 202780 - DNA, 25 bp, Artificial
  Probe
caaagaccaaagacggagtgagaga

SEQ ID NO: 202781 - DNA, 25 bp, Artificial
  Probe
ttttccatcgacagccctgatagtt

SEQ ID NO: 202782 - DNA, 25 bp, Artificial
  Probe
aagtcaagcatttctgtccaaatgt

SEQ ID NO: 202783 - DNA, 25 bp, Artificial
  Probe
tgccatcaggaagaaactggtgatt

SEQ ID NO: 202784 - DNA, 25 bp, Artificial
  Probe
acatggagtgttcagcaaagaccaa

SEQ ID NO: 202785 - DNA, 25 bp, Artificial
  Probe
cagaggtttatgtgcccacggtgtt

SEQ ID NO: 202786 - DNA, 25 bp, Artificial
  Probe
ccggtaaaacctgaagaaggcagag

SEQ ID NO: 202787 - DNA, 25 bp, Artificial
  Probe
tcatagtcttcagcaaggaccagtt

SEQ ID NO: 202788 - DNA, 25 bp, Artificial
  Probe
ttatactgatgtgtttttccatcga

SEQ ID NO: 202789 - DNA, 25 bp, Artificial
  Probe
tatgaccgtctgaggcctctctcct

SEQ ID NO: 202790 - DNA, 25 bp, Artificial
  Probe
agattatgaccgtctgaggcctctc

SEQ ID NO: 202791 - DNA, 25 bp, Artificial
  Probe
gcgcttttgggtacatggagtgttc

SEQ ID NO: 202792 - DNA, 25 bp, Artificial
  Probe
agtcggggtgcctcatcttgtgaag

SEQ ID NO: 202793 - DNA, 25 bp, Artificial
  Probe
cttcagcaaggaccagttcccagag

SEQ ID NO: 202794 - DNA, 25 bp, Artificial
  Probe
catcgacagccctgatagtttagaa

SEQ ID NO: 202795 - DNA, 25 bp, Artificial
  Probe
ataagtgatggctgccatcaggaag

SEQ ID NO: 202796 - DNA, 25 bp, Artificial
  Probe
tctgcaagctagacgcgggaagaaa

SEQ ID NO: 202797 - DNA, 25 bp, Artificial
  Probe
cacagctggacaggaagattatgac

SEQ ID NO: 202798 - DNA, 25 bp, Artificial
  Probe
cttttgggtacatggagtgttcagc

SEQ ID NO: 202799 - DNA, 25 bp, Artificial
  Probe
cttcataagtgatggctgccatcag

SEQ ID NO: 202800 - DNA, 25 bp, Artificial
  Probe
tggctttatgggacacagctggaca

SEQ ID NO: 202801 - DNA, 25 bp, Artificial
  Probe
aatctaaggagttgccgttgtactg

SEQ ID NO: 202802 - DNA, 25 bp, Artificial
  Probe
caagtttgaccatgcaatggtagct

SEQ ID NO: 202803 - DNA, 25 bp, Artificial
  Probe
tcttccgtacaggatggacgtggag

SEQ ID NO: 202804 - DNA, 25 bp, Artificial
  Probe
tgagctcaagagtgtagagaaccag

SEQ ID NO: 202805 - DNA, 25 bp, Artificial
  Probe
cttcaatgcgaccttccatatctgg

SEQ ID NO: 202806 - DNA, 25 bp, Artificial
  Probe
caagaaaaccaatgtcttcaatgcg

SEQ ID NO: 202807 - DNA, 25 bp, Artificial
  Probe
cttgtggcacacagttgggtaatgt

SEQ ID NO: 202808 - DNA, 25 bp, Artificial
  Probe
tccatatctggcacagcggacaatt

SEQ ID NO: 202809 - DNA, 25 bp, Artificial
  Probe
ttacaatatgacagttttcagagca

SEQ ID NO: 202810 - DNA, 25 bp, Artificial
  Probe
ggtttaactctgtcctcacttctag

SEQ ID NO: 202811 - DNA, 25 bp, Artificial
  Probe
tggactgtgtgcagcagttcaaaga

SEQ ID NO: 202812 - DNA, 25 bp, Artificial
  Probe
atggaaatcactcgtatctggagtc

SEQ ID NO: 202813 - DNA, 25 bp, Artificial
  Probe
gagagactcgattttgtcttccgta

SEQ ID NO: 202814 - DNA, 25 bp, Artificial
  Probe
tgaacagctacagagggagctgaag

SEQ ID NO: 202815 - DNA, 25 bp, Artificial
  Probe
ctttggccaataagatgggtctgaa

SEQ ID NO: 202816 - DNA, 25 bp, Artificial
  Probe
ggcagaaaacctggagaaggtccag

SEQ ID NO: 202817 - DNA, 25 bp, Artificial
  Probe
tgtagagaaccagatgcgctatgcc

SEQ ID NO: 202818 - DNA, 25 bp, Artificial
  Probe
cacgccatgtatagcaaagagccct

SEQ ID NO: 202819 - DNA, 25 bp, Artificial
  Probe
agagactggaccaggaggaagctca

SEQ ID NO: 202820 - DNA, 25 bp, Artificial
  Probe
ttaaaaggcagcagctggagctgga

SEQ ID NO: 202821 - DNA, 25 bp, Artificial
  Probe
ctggaccaggaggaagctcagtacc

SEQ ID NO: 202822 - DNA, 25 bp, Artificial
  Probe
ctgtcctcacttctagtattgaacg

SEQ ID NO: 202823 - DNA, 25 bp, Artificial
  Probe
cagtaccagcgagaatatagtgaat

SEQ ID NO: 202824 - DNA, 25 bp, Artificial
  Probe
atgagctcaagagtgtagagaacca

SEQ ID NO: 202825 - DNA, 25 bp, Artificial
  Probe
gactgggtcgcttgcccagtgctcc

SEQ ID NO: 202826 - DNA, 25 bp, Artificial
  Probe
agctggagctggatgatgagctcaa

SEQ ID NO: 202827 - DNA, 25 bp, Artificial
  Probe
ggactgtgtgcagcagttcaaagaa

SEQ ID NO: 202828 - DNA, 25 bp, Artificial
  Probe
atcaatgctgcctggggccagacag

SEQ ID NO: 202829 - DNA, 25 bp, Artificial
  Probe
gtggcggctcctattccatcaaaac

SEQ ID NO: 202830 - DNA, 25 bp, Artificial
  Probe
ggacaacaagtttgaccatgcaatg

SEQ ID NO: 202831 - DNA, 25 bp, Artificial
  Probe
cagctggagctggatgatgagctca

SEQ ID NO: 202832 - DNA, 25 bp, Artificial
  Probe
ccgtagtttggctcaaccccatgct

SEQ ID NO: 202833 - DNA, 25 bp, Artificial
  Probe
cactggaggcagtggcggctcctat

SEQ ID NO: 202834 - DNA, 25 bp, Artificial
  Probe
gacaagctcaagaaaaccaatgtct

SEQ ID NO: 202835 - DNA, 25 bp, Artificial
  Probe
cagtggcggctcctattccatcaaa

SEQ ID NO: 202836 - DNA, 25 bp, Artificial
  Probe
tagtttggctcaaccccatgctgtc

SEQ ID NO: 202837 - DNA, 25 bp, Artificial
  Probe
aatgaaatcaatgctgcctggggcc

SEQ ID NO: 202838 - DNA, 25 bp, Artificial
  Probe
gaggaagctcagtaccagcgagaat

SEQ ID NO: 202839 - DNA, 25 bp, Artificial
  Probe
ctcctgtggaatggaatgaaatcaa

SEQ ID NO: 202840 - DNA, 25 bp, Artificial
  Probe
tttcagactgggtcgcttgcccagt

SEQ ID NO: 202841 - DNA, 25 bp, Artificial
  Probe
ttgagatgagatgcttgtggcacac

SEQ ID NO: 202842 - DNA, 25 bp, Artificial
  Probe
atttaaaaggcagcagctggagctg

SEQ ID NO: 202843 - DNA, 25 bp, Artificial
  Probe
tcaatgcgaccttccatatctggca

SEQ ID NO: 202844 - DNA, 25 bp, Artificial
  Probe
acactggaggcagtggcggctccta

SEQ ID NO: 202845 - DNA, 25 bp, Artificial
  Probe
ctgcctggggccagacagtgttgtt

SEQ ID NO: 202846 - DNA, 25 bp, Artificial
  Probe
atgagggcgacagtgaacagctaca

SEQ ID NO: 202847 - DNA, 25 bp, Artificial
  Probe
aagtctacctgtgtcttcaagatgg

SEQ ID NO: 202848 - DNA, 25 bp, Artificial
  Probe
ccaaactatggtctctatcttagga

SEQ ID NO: 202849 - DNA, 25 bp, Artificial
  Probe
tccatagttatctgatcagaggatt

SEQ ID NO: 202850 - DNA, 25 bp, Artificial
  Probe
ctatcttaggagtgttgtgggtcca

SEQ ID NO: 202851 - DNA, 25 bp, Artificial
  Probe
cctgtgtcttcaagatggttatatt

SEQ ID NO: 202852 - DNA, 25 bp, Artificial
  Probe
agatctctaagtctacctgtgtctt

SEQ ID NO: 202853 - DNA, 25 bp, Artificial
  Probe
ctaagtctacctgtgtcttcaagat

SEQ ID NO: 202854 - DNA, 25 bp, Artificial
  Probe
gtccatagttatctgatcagaggat

SEQ ID NO: 202855 - DNA, 25 bp, Artificial
  Probe
tctacctgtgtcttcaagatggtta

SEQ ID NO: 202856 - DNA, 25 bp, Artificial
  Probe
agtctacctgtgtcttcaagatggt

SEQ ID NO: 202857 - DNA, 25 bp, Artificial
  Probe
tttgggctctgtgtgataacatgac

SEQ ID NO: 202858 - DNA, 25 bp, Artificial
  Probe
ctctatcttaggagtgttgtgggtc

SEQ ID NO: 202859 - DNA, 25 bp, Artificial
  Probe
ccagaatgatgtctgtcttttctct

SEQ ID NO: 202860 - DNA, 25 bp, Artificial
  Probe
agtccatagttatctgatcagagga

SEQ ID NO: 202861 - DNA, 25 bp, Artificial
  Probe
gattagatctctaagtctacctgtg

SEQ ID NO: 202862 - DNA, 25 bp, Artificial
  Probe
tctatcttaggagtgttgtgggtcc

SEQ ID NO: 202863 - DNA, 25 bp, Artificial
  Probe
tagatctctaagtctacctgtgtct

SEQ ID NO: 202864 - DNA, 25 bp, Artificial
  Probe
tatctgatcagaggattagatctct

SEQ ID NO: 202865 - DNA, 25 bp, Artificial
  Probe
acctgtgtcttcaagatggttatat

SEQ ID NO: 202866 - DNA, 25 bp, Artificial
  Probe
ttagatctctaagtctacctgtgtc

SEQ ID NO: 202867 - DNA, 25 bp, Artificial
  Probe
actatggtctctatcttaggagtgt

SEQ ID NO: 202868 - DNA, 25 bp, Artificial
  Probe
tagtccatagttatctgatcagagg

SEQ ID NO: 202869 - DNA, 25 bp, Artificial
  Probe
ctacctgtgtcttcaagatggttat

SEQ ID NO: 202870 - DNA, 25 bp, Artificial
  Probe
aactatggtctctatcttaggagtg

SEQ ID NO: 202871 - DNA, 25 bp, Artificial
  Probe
caaactatggtctctatcttaggag

SEQ ID NO: 202872 - DNA, 25 bp, Artificial
  Probe
atagtccatagttatctgatcagag

SEQ ID NO: 202873 - DNA, 25 bp, Artificial
  Probe
cccaaactatggtctctatcttagg

SEQ ID NO: 202874 - DNA, 25 bp, Artificial
  Probe
atatagtccatagttatctgatcag

SEQ ID NO: 202875 - DNA, 25 bp, Artificial
  Probe
ctatggtctctatcttaggagtgtt

SEQ ID NO: 202876 - DNA, 25 bp, Artificial
  Probe
tatagtccatagttatctgatcaga

SEQ ID NO: 202877 - DNA, 25 bp, Artificial
  Probe
ttgggctctgtgtgataacatgact

SEQ ID NO: 202878 - DNA, 25 bp, Artificial
  Probe
cagaatgatgtctgtcttttctctt

SEQ ID NO: 202879 - DNA, 25 bp, Artificial
  Probe
gtctacctgtgtcttcaagatggtt

SEQ ID NO: 202880 - DNA, 25 bp, Artificial
  Probe
tccagaatgatgtctgtcttttctc

SEQ ID NO: 202881 - DNA, 25 bp, Artificial
  Probe
attagatctctaagtctacctgtgt

SEQ ID NO: 202882 - DNA, 25 bp, Artificial
  Probe
taagtctacctgtgtcttcaagatg

SEQ ID NO: 202883 - DNA, 25 bp, Artificial
  Probe
ttatctgatcagaggattagatctc

SEQ ID NO: 202884 - DNA, 25 bp, Artificial
  Probe
gggctctgtgtgataacatgacttg

SEQ ID NO: 202885 - DNA, 25 bp, Artificial
  Probe
ccatagttatctgatcagaggatta

SEQ ID NO: 202886 - DNA, 25 bp, Artificial
  Probe
ttgtgggtccagaatgatgtctgtc

SEQ ID NO: 202887 - DNA, 25 bp, Artificial
  Probe
tgggctctgtgtgataacatgactt

SEQ ID NO: 202888 - DNA, 25 bp, Artificial
  Probe
tacctgtgtcttcaagatggttata

SEQ ID NO: 202889 - DNA, 25 bp, Artificial
  Probe
gatctctaagtctacctgtgtcttc

SEQ ID NO: 202890 - DNA, 25 bp, Artificial
  Probe
aaactatggtctctatcttaggagt

SEQ ID NO: 202891 - DNA, 25 bp, Artificial
  Probe
ggattagatctctaagtctacctgt

SEQ ID NO: 202892 - DNA, 25 bp, Artificial
  Probe
tgggtccagaatgatgtctgtcttt

SEQ ID NO: 202893 - DNA, 25 bp, Artificial
  Probe
ggtcttccaagtacccatctcggcg

SEQ ID NO: 202894 - DNA, 25 bp, Artificial
  Probe
gctcccaaatccaggcaaggacttt

SEQ ID NO: 202895 - DNA, 25 bp, Artificial
  Probe
actggtcttccaagtacccatctcg

SEQ ID NO: 202896 - DNA, 25 bp, Artificial
  Probe
ggaaaatcttcaggaacggtatcag

SEQ ID NO: 202897 - DNA, 25 bp, Artificial
  Probe
ccaaatccaggcaaggactttcttc

SEQ ID NO: 202898 - DNA, 25 bp, Artificial
  Probe
ggtgactgtcccagctgactccgtt

SEQ ID NO: 202899 - DNA, 25 bp, Artificial
  Probe
ttcttccatcaagttcatggtccag

SEQ ID NO: 202900 - DNA, 25 bp, Artificial
  Probe
tgtctggaaaatcttcaggaacggt

SEQ ID NO: 202901 - DNA, 25 bp, Artificial
  Probe
tcatgcagagggtccagctggcgcc

SEQ ID NO: 202902 - DNA, 25 bp, Artificial
  Probe
agcacgcctggcttgattccacgac

SEQ ID NO: 202903 - DNA, 25 bp, Artificial
  Probe
catctcggcggtgactgtcccagct

SEQ ID NO: 202904 - DNA, 25 bp, Artificial
  Probe
actgtcccagctgactccgttgtac

SEQ ID NO: 202905 - DNA, 25 bp, Artificial
  Probe
gactttcttccatcaagttcatggt

SEQ ID NO: 202906 - DNA, 25 bp, Artificial
  Probe
cggtgtaaaagcacccacacttaca

SEQ ID NO: 202907 - DNA, 25 bp, Artificial
  Probe
ccaagtacccatctcggcggtgact

SEQ ID NO: 202908 - DNA, 25 bp, Artificial
  Probe
taagaaatggcgtgctcccaaatcc

SEQ ID NO: 202909 - DNA, 25 bp, Artificial
  Probe
ctgtgcagcctgtgcacggcaggat

SEQ ID NO: 202910 - DNA, 25 bp, Artificial
  Probe
tttgtctggaaaatcttcaggaacg

SEQ ID NO: 202911 - DNA, 25 bp, Artificial
  Probe
gatagactggtcttccaagtaccca

SEQ ID NO: 202912 - DNA, 25 bp, Artificial
  Probe
atgcagagggtccagctggcgcctc

SEQ ID NO: 202913 - DNA, 25 bp, Artificial
  Probe
gcacccacacttacagcagttctga

SEQ ID NO: 202914 - DNA, 25 bp, Artificial
  Probe
gtaaaagcacccacacttacagcag

SEQ ID NO: 202915 - DNA, 25 bp, Artificial
  Probe
tggcgtgctcccaaatccaggcaag

SEQ ID NO: 202916 - DNA, 25 bp, Artificial
  Probe
ccacgtggcggtgtaaaagcaccca

SEQ ID NO: 202917 - DNA, 25 bp, Artificial
  Probe
aggactttcttccatcaagttcatg

SEQ ID NO: 202918 - DNA, 25 bp, Artificial
  Probe
ttctggtttgtctggaaaatcttca

SEQ ID NO: 202919 - DNA, 25 bp, Artificial
  Probe
cttcaggaacggtatcagtagtgag

SEQ ID NO: 202920 - DNA, 25 bp, Artificial
  Probe
aaatcttcaggaacggtatcagtag

SEQ ID NO: 202921 - DNA, 25 bp, Artificial
  Probe
tcggcggtgactgtcccagctgact

SEQ ID NO: 202922 - DNA, 25 bp, Artificial
  Probe
tggcttgattccacgacctccagct

SEQ ID NO: 202923 - DNA, 25 bp, Artificial
  Probe
cagttctggtttgtctggaaaatct

SEQ ID NO: 202924 - DNA, 25 bp, Artificial
  Probe
taggagcacgcctggcttgattcca

SEQ ID NO: 202925 - DNA, 25 bp, Artificial
  Probe
ttcaggaacggtatcagtagtgagc

SEQ ID NO: 202926 - DNA, 25 bp, Artificial
  Probe
ttccaagtacccatctcggcggtga

SEQ ID NO: 202927 - DNA, 25 bp, Artificial
  Probe
acgacctccagctgtgcagcctgtg

SEQ ID NO: 202928 - DNA, 25 bp, Artificial
  Probe
gaaatggcgtgctcccaaatccagg

SEQ ID NO: 202929 - DNA, 25 bp, Artificial
  Probe
gggaggccattctttcacacccagc

SEQ ID NO: 202930 - DNA, 25 bp, Artificial
  Probe
gcaaggactttcttccatcaagttc

SEQ ID NO: 202931 - DNA, 25 bp, Artificial
  Probe
tggaaaatcttcaggaacggtatca

SEQ ID NO: 202932 - DNA, 25 bp, Artificial
  Probe
cagggaggccattctttcacaccca

SEQ ID NO: 202933 - DNA, 25 bp, Artificial
  Probe
cctgtgcacggcaggatagactggt

SEQ ID NO: 202934 - DNA, 25 bp, Artificial
  Probe
aggatagactggtcttccaagtacc

SEQ ID NO: 202935 - DNA, 25 bp, Artificial
  Probe
gcacggcaggatagactggtcttcc

SEQ ID NO: 202936 - DNA, 25 bp, Artificial
  Probe
gacctccagctgtgcagcctgtgca

SEQ ID NO: 202937 - DNA, 25 bp, Artificial
  Probe
tgcagcctgtgcacggcaggataga

SEQ ID NO: 202938 - DNA, 25 bp, Artificial
  Probe
tgattccacgacctccagctgtgca

SEQ ID NO: 202939 - DNA, 25 bp, Artificial
  Probe
aacatttcggcatgctccaccgctg

SEQ ID NO: 202940 - DNA, 25 bp, Artificial
  Probe
aactggaggcctttaaggagcgtgt

SEQ ID NO: 202941 - DNA, 25 bp, Artificial
  Probe
gagaaagacatcagtgcgtgaccct

SEQ ID NO: 202942 - DNA, 25 bp, Artificial
  Probe
agaacatgccctggaatgtggacac

SEQ ID NO: 202943 - DNA, 25 bp, Artificial
  Probe
agcgcaagctgaaggaactggaagt

SEQ ID NO: 202944 - DNA, 25 bp, Artificial
  Probe
ggaggtctacgaatctctgcctgag

SEQ ID NO: 202945 - DNA, 25 bp, Artificial
  Probe
ggccaagagtctgaaggtcgacccc

SEQ ID NO: 202946 - DNA, 25 bp, Artificial
  Probe
agttggccaagagtctgaaggtcga

SEQ ID NO: 202947 - DNA, 25 bp, Artificial
  Probe
cattgacctggaagtcgaggagaag

SEQ ID NO: 202948 - DNA, 25 bp, Artificial
  Probe
agaagctggaggacatgcggcaaaa

SEQ ID NO: 202949 - DNA, 25 bp, Artificial
  Probe
acctggtgtgcgaggagacagccaa

SEQ ID NO: 202950 - DNA, 25 bp, Artificial
  Probe
catcagcaagatggatcctactgat

SEQ ID NO: 202951 - DNA, 25 bp, Artificial
  Probe
gaatgtggacacactcagcaaagat

SEQ ID NO: 202952 - DNA, 25 bp, Artificial
  Probe
tgccctggaatgtggacacactcag

SEQ ID NO: 202953 - DNA, 25 bp, Artificial
  Probe
agcagaaacacaagaccttcgttga

SEQ ID NO: 202954 - DNA, 25 bp, Artificial
  Probe
atgctccaccgctgggatgacagcc

SEQ ID NO: 202955 - DNA, 25 bp, Artificial
  Probe
caagaccttcgttgaaaaatacgag

SEQ ID NO: 202956 - DNA, 25 bp, Artificial
  Probe
ggggacccattgctggaagccgtcc

SEQ ID NO: 202957 - DNA, 25 bp, Artificial
  Probe
cacaagaccttcgttgaaaaatacg

SEQ ID NO: 202958 - DNA, 25 bp, Artificial
  Probe
ggatgtacagatgctgcaagacgcc

SEQ ID NO: 202959 - DNA, 25 bp, Artificial
  Probe
agatcaaacatttcggcatgctcca

SEQ ID NO: 202960 - DNA, 25 bp, Artificial
  Probe
cttcaagtatgaactggaggccttt

SEQ ID NO: 202961 - DNA, 25 bp, Artificial
  Probe
agagcatggtcaataccaagcctga

SEQ ID NO: 202962 - DNA, 25 bp, Artificial
  Probe
tgccctgatggagcaggtggctcac

SEQ ID NO: 202963 - DNA, 25 bp, Artificial
  Probe
gaaacagatcaaacatttcggcatg

SEQ ID NO: 202964 - DNA, 25 bp, Artificial
  Probe
ctgccgggaatgcaagcgcaaggta

SEQ ID NO: 202965 - DNA, 25 bp, Artificial
  Probe
gctaggccctggtggcctggaccct

SEQ ID NO: 202966 - DNA, 25 bp, Artificial
  Probe
cctgcttccggcagtttttcaccaa

SEQ ID NO: 202967 - DNA, 25 bp, Artificial
  Probe
gaggagacagccaactacctggtta

SEQ ID NO: 202968 - DNA, 25 bp, Artificial
  Probe
gggcttcaagtatgaactggaggcc

SEQ ID NO: 202969 - DNA, 25 bp, Artificial
  Probe
ccaagcctgagaaggcagaggaaga

SEQ ID NO: 202970 - DNA, 25 bp, Artificial
  Probe
aagctggaggacatgcggcaaaaag

SEQ ID NO: 202971 - DNA, 25 bp, Artificial
  Probe
tcgattctggcctctgggtccccaa

SEQ ID NO: 202972 - DNA, 25 bp, Artificial
  Probe
tggcctggaccctgtggaggtctac

SEQ ID NO: 202973 - DNA, 25 bp, Artificial
  Probe
cagaaacacaagaccttcgttgaaa

SEQ ID NO: 202974 - DNA, 25 bp, Artificial
  Probe
tggtcaataccaagcctgagaaggc

SEQ ID NO: 202975 - DNA, 25 bp, Artificial
  Probe
ataccaagcctgagaaggcagagga

SEQ ID NO: 202976 - DNA, 25 bp, Artificial
  Probe
aagatcaagactgctgaccagcagt

SEQ ID NO: 202977 - DNA, 25 bp, Artificial
  Probe
tgatggagcaggtggctcaccagac

SEQ ID NO: 202978 - DNA, 25 bp, Artificial
  Probe
catggagggcttcaagtatgaactg

SEQ ID NO: 202979 - DNA, 25 bp, Artificial
  Probe
tcatcctggagttggccaagagtct

SEQ ID NO: 202980 - DNA, 25 bp, Artificial
  Probe
cccggggacccattgctggaagccg

SEQ ID NO: 202981 - DNA, 25 bp, Artificial
  Probe
ccaagtatcacatgcagcgttgcat

SEQ ID NO: 202982 - DNA, 25 bp, Artificial
  Probe
ccagcgcaagctgaaggaactggaa

SEQ ID NO: 202983 - DNA, 25 bp, Artificial
  Probe
gaatgcaagcgcaaggtagccgagt

SEQ ID NO: 202984 - DNA, 25 bp, Artificial
  Probe
gatgacagccagaagtacctgtcag

SEQ ID NO: 202985 - DNA, 25 bp, Artificial
  Probe
gcctttctttcagacaaaaagttgt

SEQ ID NO: 202986 - DNA, 25 bp, Artificial
  Probe
tgaccaggatgacgatataggcttg

SEQ ID NO: 202987 - DNA, 25 bp, Artificial
  Probe
gctaaactattatgaccttgttaga

SEQ ID NO: 202988 - DNA, 25 bp, Artificial
  Probe
ggaagcctttctttcagacaaaaag

SEQ ID NO: 202989 - DNA, 25 bp, Artificial
  Probe
ctttcagacaaaaagttgttcaagt

SEQ ID NO: 202990 - DNA, 25 bp, Artificial
  Probe
ttatgaccttgttagaactgaaatc

SEQ ID NO: 202991 - DNA, 25 bp, Artificial
  Probe
aagacagtatctacgggaactgaat

SEQ ID NO: 202992 - DNA, 25 bp, Artificial
  Probe
tcattaaagtattccgggaagcctt

SEQ ID NO: 202993 - DNA, 25 bp, Artificial
  Probe
aagaggaaccttgttcttctggtga

SEQ ID NO: 202994 - DNA, 25 bp, Artificial
  Probe
aactattatgaccttgttagaactg

SEQ ID NO: 202995 - DNA, 25 bp, Artificial
  Probe
catcctattgataaatgggcaattg

SEQ ID NO: 202996 - DNA, 25 bp, Artificial
  Probe
acgatataggcttggtttctctctg

SEQ ID NO: 202997 - DNA, 25 bp, Artificial
  Probe
ctattatgaccttgttagaactgaa

SEQ ID NO: 202998 - DNA, 25 bp, Artificial
  Probe
gtctgccatagagaaacgaaaacga

SEQ ID NO: 202999 - DNA, 25 bp, Artificial
  Probe
gaaatcctctcttactacctgtgga

SEQ ID NO: 203000 - DNA, 25 bp, Artificial
  Probe
ttcagatatacatgaactgactgtg

SEQ ID NO: 203001 - DNA, 25 bp, Artificial
  Probe
catccttccttgaaggaagttttgg

SEQ ID NO: 203002 - DNA, 25 bp, Artificial
  Probe
ctcagcaagacattaaagtgtcaat

SEQ ID NO: 203003 - DNA, 25 bp, Artificial
  Probe
tgatcattaaagtattccgggaagc

SEQ ID NO: 203004 - DNA, 25 bp, Artificial
  Probe
gcacagtctgccatagagaaacgaa

SEQ ID NO: 203005 - DNA, 25 bp, Artificial
  Probe
taaatgggcaattgctgatgcacag

SEQ ID NO: 203006 - DNA, 25 bp, Artificial
  Probe
agtggactaccatgtatccctctac

SEQ ID NO: 203007 - DNA, 25 bp, Artificial
  Probe
gacaaaatccatccttccttgaagg

SEQ ID NO: 203008 - DNA, 25 bp, Artificial
  Probe
taaagtggactaccatgtatccctc

SEQ ID NO: 203009 - DNA, 25 bp, Artificial
  Probe
gatatacatgaactgactgtgaaac

SEQ ID NO: 203010 - DNA, 25 bp, Artificial
  Probe
tccgggaagcctttctttcagacaa

SEQ ID NO: 203011 - DNA, 25 bp, Artificial
  Probe
cttctggtgagctaaactattatga

SEQ ID NO: 203012 - DNA, 25 bp, Artificial
  Probe
accatgtatccctctacattgtggc

SEQ ID NO: 203013 - DNA, 25 bp, Artificial
  Probe
ccctctacattgtggctgtattgga

SEQ ID NO: 203014 - DNA, 25 bp, Artificial
  Probe
agctaaactattatgaccttgttag

SEQ ID NO: 203015 - DNA, 25 bp, Artificial
  Probe
tctacgggaactgaatatgatcatt

SEQ ID NO: 203016 - DNA, 25 bp, Artificial
  Probe
gtttgaccaggatgacgatataggc

SEQ ID NO: 203017 - DNA, 25 bp, Artificial
  Probe
tatccggcattatgaaatatctcag

SEQ ID NO: 203018 - DNA, 25 bp, Artificial
  Probe
gtatctacgggaactgaatatgatc

SEQ ID NO: 203019 - DNA, 25 bp, Artificial
  Probe
tctttcagacaaaaagttgttcaag

SEQ ID NO: 203020 - DNA, 25 bp, Artificial
  Probe
tgaccttgttagaactgaaatcgca

SEQ ID NO: 203021 - DNA, 25 bp, Artificial
  Probe
tgtggacaaaatccatccttccttg

SEQ ID NO: 203022 - DNA, 25 bp, Artificial
  Probe
ctctgtgaagaggaaccttgttctt

SEQ ID NO: 203023 - DNA, 25 bp, Artificial
  Probe
gtggactaccatgtatccctctaca

SEQ ID NO: 203024 - DNA, 25 bp, Artificial
  Probe
gaaatatctcagcaagacattaaag

SEQ ID NO: 203025 - DNA, 25 bp, Artificial
  Probe
catgtttgaccaggatgacgatata

SEQ ID NO: 203026 - DNA, 25 bp, Artificial
  Probe
ttccgggaagcctttctttcagaca

SEQ ID NO: 203027 - DNA, 25 bp, Artificial
  Probe
gtataaagtggactaccatgtatcc

SEQ ID NO: 203028 - DNA, 25 bp, Artificial
  Probe
gatggacatgtttgaccaggatgac

SEQ ID NO: 203029 - DNA, 25 bp, Artificial
  Probe
tgatgcacagtctgccatagagaaa

SEQ ID NO: 203030 - DNA, 25 bp, Artificial
  Probe
aaatccatccttccttgaaggaagt

SEQ ID NO: 203031 - DNA, 25 bp, Artificial
  Probe
caccaggatgtacttacccgggcct

SEQ ID NO: 203032 - DNA, 25 bp, Artificial
  Probe
ttacttaccattaaattgcaatggg

SEQ ID NO: 203033 - DNA, 25 bp, Artificial
  Probe
atcttgaggctggaagaaacaggct

SEQ ID NO: 203034 - DNA, 25 bp, Artificial
  Probe
aacaggcttctgacctggttctttt

SEQ ID NO: 203035 - DNA, 25 bp, Artificial
  Probe
caatgggtagtccttgctgcccact

SEQ ID NO: 203036 - DNA, 25 bp, Artificial
  Probe
gaaatgctcatatctgtgaactgag

SEQ ID NO: 203037 - DNA, 25 bp, Artificial
  Probe
gctgcccacttgactacatctggaa

SEQ ID NO: 203038 - DNA, 25 bp, Artificial
  Probe
taccattaaattgcaatgggtagtc

SEQ ID NO: 203039 - DNA, 25 bp, Artificial
  Probe
gcttttcactcctggggtcacatga

SEQ ID NO: 203040 - DNA, 25 bp, Artificial
  Probe
ttgatttttgccacagtgcttgggc

SEQ ID NO: 203041 - DNA, 25 bp, Artificial
  Probe
atattggaagttgacgggatcacca

SEQ ID NO: 203042 - DNA, 25 bp, Artificial
  Probe
gagaaggctttcatctttttactta

SEQ ID NO: 203043 - DNA, 25 bp, Artificial
  Probe
gactacatctggaatgaactacata

SEQ ID NO: 203044 - DNA, 25 bp, Artificial
  Probe
atctgtgaactgagaaggctttcat

SEQ ID NO: 203045 - DNA, 25 bp, Artificial
  Probe
cttcattatagatgtgatttgccgg

SEQ ID NO: 203046 - DNA, 25 bp, Artificial
  Probe
catgatctttttgcagagacaagta

SEQ ID NO: 203047 - DNA, 25 bp, Artificial
  Probe
cacttgcatgccagaagagacttca

SEQ ID NO: 203048 - DNA, 25 bp, Artificial
  Probe
tctttttgcagagacaagtatatac

SEQ ID NO: 203049 - DNA, 25 bp, Artificial
  Probe
tatctacatgcctgcatggacactt

SEQ ID NO: 203050 - DNA, 25 bp, Artificial
  Probe
gatccagatcttgaggctggaagaa

SEQ ID NO: 203051 - DNA, 25 bp, Artificial
  Probe
aattgcaatgggtagtccttgctgc

SEQ ID NO: 203052 - DNA, 25 bp, Artificial
  Probe
cagtgcttgggcttttcactcctgg

SEQ ID NO: 203053 - DNA, 25 bp, Artificial
  Probe
tcactcctggggtcacatgatcttt

SEQ ID NO: 203054 - DNA, 25 bp, Artificial
  Probe
tatattggaagttgacgggatcacc

SEQ ID NO: 203055 - DNA, 25 bp, Artificial
  Probe
gagaaatgctcatatctgtgaactg

SEQ ID NO: 203056 - DNA, 25 bp, Artificial
  Probe
aagtatataccacacagcacccagg

SEQ ID NO: 203057 - DNA, 25 bp, Artificial
  Probe
tgccacagtgcttgggcttttcact

SEQ ID NO: 203058 - DNA, 25 bp, Artificial
  Probe
aatgaactacatatagtccagagat

SEQ ID NO: 203059 - DNA, 25 bp, Artificial
  Probe
ggtagtccttgctgcccacttgact

SEQ ID NO: 203060 - DNA, 25 bp, Artificial
  Probe
atgagaggtctatctacatgcctgc

SEQ ID NO: 203061 - DNA, 25 bp, Artificial
  Probe
atgcctgcatggacacttgcatgcc

SEQ ID NO: 203062 - DNA, 25 bp, Artificial
  Probe
agaggtctatctacatgcctgcatg

SEQ ID NO: 203063 - DNA, 25 bp, Artificial
  Probe
cattaaattgcaatgggtagtcctt

SEQ ID NO: 203064 - DNA, 25 bp, Artificial
  Probe
gaagttgacgggatcaccaggatgt

SEQ ID NO: 203065 - DNA, 25 bp, Artificial
  Probe
cttgactacatctggaatgaactac

SEQ ID NO: 203066 - DNA, 25 bp, Artificial
  Probe
acttaccattaaattgcaatgggta

SEQ ID NO: 203067 - DNA, 25 bp, Artificial
  Probe
aactgagaaggctttcatcttttta

SEQ ID NO: 203068 - DNA, 25 bp, Artificial
  Probe
tggacacttgcatgccagaagagac

SEQ ID NO: 203069 - DNA, 25 bp, Artificial
  Probe
cacttgactacatctggaatgaact

SEQ ID NO: 203070 - DNA, 25 bp, Artificial
  Probe
tttttgcagagacaagtatatacca

SEQ ID NO: 203071 - DNA, 25 bp, Artificial
  Probe
ggtctatctacatgcctgcatggac

SEQ ID NO: 203072 - DNA, 25 bp, Artificial
  Probe
gagggctcgcctgtgatccagatct

SEQ ID NO: 203073 - DNA, 25 bp, Artificial
  Probe
gatcttgaggctggaagaaacaggc

SEQ ID NO: 203074 - DNA, 25 bp, Artificial
  Probe
atgccagaagagacttcattataga

SEQ ID NO: 203075 - DNA, 25 bp, Artificial
  Probe
cttgctgcccacttgactacatctg

SEQ ID NO: 203076 - DNA, 25 bp, Artificial
  Probe
tagtccagagatggagggctcgcct

SEQ ID NO: 203077 - DNA, 25 bp, Artificial
  Probe
tgcttctgcttatgcggttggagac

SEQ ID NO: 203078 - DNA, 25 bp, Artificial
  Probe
ctgctgctgccatcgctgtggtaaa

SEQ ID NO: 203079 - DNA, 25 bp, Artificial
  Probe
tgtctctgctgctgccatcgctgtg

SEQ ID NO: 203080 - DNA, 25 bp, Artificial
  Probe
tttggttcagaatggcatgtctctc

SEQ ID NO: 203081 - DNA, 25 bp, Artificial
  Probe
tctgctgctgccatcgctgtggtaa

SEQ ID NO: 203082 - DNA, 25 bp, Artificial
  Probe
aagatgtttggctccaacttggatc

SEQ ID NO: 203083 - DNA, 25 bp, Artificial
  Probe
ccataaggggcagtactttggagaa

SEQ ID NO: 203084 - DNA, 25 bp, Artificial
  Probe
agtcagccacaagaacacacccaga

SEQ ID NO: 203085 - DNA, 25 bp, Artificial
  Probe
gagattgcccactgccataaggggc

SEQ ID NO: 203086 - DNA, 25 bp, Artificial
  Probe
agatgtgatgaatctcggagccttc

SEQ ID NO: 203087 - DNA, 25 bp, Artificial
  Probe
gatgtttggctccaacttggatcta

SEQ ID NO: 203088 - DNA, 25 bp, Artificial
  Probe
ttactccagcccaggtttcacgttt

SEQ ID NO: 203089 - DNA, 25 bp, Artificial
  Probe
gtgataccaaatccttccagtcagc

SEQ ID NO: 203090 - DNA, 25 bp, Artificial
  Probe
ctttgcttctgaacgccgtcattag

SEQ ID NO: 203091 - DNA, 25 bp, Artificial
  Probe
aatctcggagccttctcagtgtgat

SEQ ID NO: 203092 - DNA, 25 bp, Artificial
  Probe
gccttctcagtgtgataccaaatcc

SEQ ID NO: 203093 - DNA, 25 bp, Artificial
  Probe
cttccactttgcttctgaacgccgt

SEQ ID NO: 203094 - DNA, 25 bp, Artificial
  Probe
ttgagattgcccactgccataaggg

SEQ ID NO: 203095 - DNA, 25 bp, Artificial
  Probe
gtcagccacaagaacacacccagaa

SEQ ID NO: 203096 - DNA, 25 bp, Artificial
  Probe
ttctgaacgccgtcattagaccact

SEQ ID NO: 203097 - DNA, 25 bp, Artificial
  Probe
cacgattactccagcccaggtttca

SEQ ID NO: 203098 - DNA, 25 bp, Artificial
  Probe
cccgggcagtagatgtgatgaatct

SEQ ID NO: 203099 - DNA, 25 bp, Artificial
  Probe
aagaggaacatctcacattacgaag

SEQ ID NO: 203100 - DNA, 25 bp, Artificial
  Probe
gaccccgggcagtagatgtgatgaa

SEQ ID NO: 203101 - DNA, 25 bp, Artificial
  Probe
cccactgccataaggggcagtactt

SEQ ID NO: 203102 - DNA, 25 bp, Artificial
  Probe
cataaggggcagtactttggagaac

SEQ ID NO: 203103 - DNA, 25 bp, Artificial
  Probe
tgctgccatcgctgtggtaaagggc

SEQ ID NO: 203104 - DNA, 25 bp, Artificial
  Probe
gttcagaatggcatgtctctccagc

SEQ ID NO: 203105 - DNA, 25 bp, Artificial
  Probe
gatgaatctcggagccttctcagtg

SEQ ID NO: 203106 - DNA, 25 bp, Artificial
  Probe
atgcggttggagacgtcaaatgctt

SEQ ID NO: 203107 - DNA, 25 bp, Artificial
  Probe
ttgcccactgccataaggggcagta

SEQ ID NO: 203108 - DNA, 25 bp, Artificial
  Probe
tgagcatcttgattagaagcaagac

SEQ ID NO: 203109 - DNA, 25 bp, Artificial
  Probe
ctgcttatgcggttggagacgtcaa

SEQ ID NO: 203110 - DNA, 25 bp, Artificial
  Probe
gaaccaggaggttgagattgcccac

SEQ ID NO: 203111 - DNA, 25 bp, Artificial
  Probe
ttatgtcacgattactccagcccag

SEQ ID NO: 203112 - DNA, 25 bp, Artificial
  Probe
gcagtactttggagaacttgccctg

SEQ ID NO: 203113 - DNA, 25 bp, Artificial
  Probe
tggatctattggaccccgggcagta

SEQ ID NO: 203114 - DNA, 25 bp, Artificial
  Probe
cagtgtgataccaaatccttccagt

SEQ ID NO: 203115 - DNA, 25 bp, Artificial
  Probe
cattacgaagaacagctggtgaaga

SEQ ID NO: 203116 - DNA, 25 bp, Artificial
  Probe
catctcacattacgaagaacagctg

SEQ ID NO: 203117 - DNA, 25 bp, Artificial
  Probe
gtcattagaccacttatgtcacgat

SEQ ID NO: 203118 - DNA, 25 bp, Artificial
  Probe
cagtactttggagaacttgccctgg

SEQ ID NO: 203119 - DNA, 25 bp, Artificial
  Probe
ccaagagctgcttctgcttatgcgg

SEQ ID NO: 203120 - DNA, 25 bp, Artificial
  Probe
gaacatctcacattacgaagaacag

SEQ ID NO: 203121 - DNA, 25 bp, Artificial
  Probe
catcgctgtggtaaagggcacttag

SEQ ID NO: 203122 - DNA, 25 bp, Artificial
  Probe
gctgtctctgctgctgccatcgctg

SEQ ID NO: 203123 - DNA, 25 bp, Artificial
  Probe
catcgaggccaattcgcagtacttc

SEQ ID NO: 203124 - DNA, 25 bp, Artificial
  Probe
tcgttttgcccgtctctggatcctc

SEQ ID NO: 203125 - DNA, 25 bp, Artificial
  Probe
gtgtcagtggcctacattgcgggct

SEQ ID NO: 203126 - DNA, 25 bp, Artificial
  Probe
gcgctcgtgggtaagccagcactgc

SEQ ID NO: 203127 - DNA, 25 bp, Artificial
  Probe
ggcgtgtgcttcgtgggcctcaaca

SEQ ID NO: 203128 - DNA, 25 bp, Artificial
  Probe
gaaccactccgaggacggaactcct

SEQ ID NO: 203129 - DNA, 25 bp, Artificial
  Probe
gcatggagagaccaccgtgtgaagc

SEQ ID NO: 203130 - DNA, 25 bp, Artificial
  Probe
atcctcacatggtcggtgctgtgct

SEQ ID NO: 203131 - DNA, 25 bp, Artificial
  Probe
tggtgtgcaacgagcgcttctctga

SEQ ID NO: 203132 - DNA, 25 bp, Artificial
  Probe
aattcgcagtacttccacctggccg

SEQ ID NO: 203133 - DNA, 25 bp, Artificial
  Probe
gccttccgcgagcactgggagcgct

SEQ ID NO: 203134 - DNA, 25 bp, Artificial
  Probe
gtgggcctcaacaggctggacccgc

SEQ ID NO: 203135 - DNA, 25 bp, Artificial
  Probe
gctataagtttctgggtgagcgcga

SEQ ID NO: 203136 - DNA, 25 bp, Artificial
  Probe
gcgtgtgcttcgtgggcctcaacag

SEQ ID NO: 203137 - DNA, 25 bp, Artificial
  Probe
gcgcttctactttcttcacggtcac

SEQ ID NO: 203138 - DNA, 25 bp, Artificial
  Probe
agccggcatggagagaccaccgtgt

SEQ ID NO: 203139 - DNA, 25 bp, Artificial
  Probe
gaaggctgtactatactcttcatga

SEQ ID NO: 203140 - DNA, 25 bp, Artificial
  Probe
ctccgaggacggaactcctgcgcta

SEQ ID NO: 203141 - DNA, 25 bp, Artificial
  Probe
gccagcactgcaagagcctagccat

SEQ ID NO: 203142 - DNA, 25 bp, Artificial
  Probe
gtcctatctcagctataagtttctg

SEQ ID NO: 203143 - DNA, 25 bp, Artificial
  Probe
aaggtgccgtcctatctcagctata

SEQ ID NO: 203144 - DNA, 25 bp, Artificial
  Probe
ggggtgcaccctacggactcctatt

SEQ ID NO: 203145 - DNA, 25 bp, Artificial
  Probe
aaccactccgaggacggaactcctg

SEQ ID NO: 203146 - DNA, 25 bp, Artificial
  Probe
accgtctgggctgcagcctggcgct

SEQ ID NO: 203147 - DNA, 25 bp, Artificial
  Probe
tcaacaggctggacccgctgcgagg

SEQ ID NO: 203148 - DNA, 25 bp, Artificial
  Probe
cgtctcaccaacagccggcatggag

SEQ ID NO: 203149 - DNA, 25 bp, Artificial
  Probe
cgcgtggtgtgcaacgagcgcttct

SEQ ID NO: 203150 - DNA, 25 bp, Artificial
  Probe
agtggcctacattgcgggcttcgtg

SEQ ID NO: 203151 - DNA, 25 bp, Artificial
  Probe
gcttcgtgggcctcaacaggctgga

SEQ ID NO: 203152 - DNA, 25 bp, Artificial
  Probe
ggccagaaccactccgaggacggaa

SEQ ID NO: 203153 - DNA, 25 bp, Artificial
  Probe
gcgtctcaccaacagccggcatgga

SEQ ID NO: 203154 - DNA, 25 bp, Artificial
  Probe
gctgtactatactcttcatgatgct

SEQ ID NO: 203155 - DNA, 25 bp, Artificial
  Probe
attgcgggcttcgtgctccaggagc

SEQ ID NO: 203156 - DNA, 25 bp, Artificial
  Probe
agcgctcgtgggtaagccagcactg

SEQ ID NO: 203157 - DNA, 25 bp, Artificial
  Probe
tgggccagatcgacggcgacctgct

SEQ ID NO: 203158 - DNA, 25 bp, Artificial
  Probe
gccatgggccagatcgacggcgacc

SEQ ID NO: 203159 - DNA, 25 bp, Artificial
  Probe
cttcctgtccggttgctacaccatg

SEQ ID NO: 203160 - DNA, 25 bp, Artificial
  Probe
ttccgcgagcactgggagcgctcgt

SEQ ID NO: 203161 - DNA, 25 bp, Artificial
  Probe
ccaacagccggcatggagagaccac

SEQ ID NO: 203162 - DNA, 25 bp, Artificial
  Probe
cgtgggtaagccagcactgcaagag

SEQ ID NO: 203163 - DNA, 25 bp, Artificial
  Probe
ctctgaggacggttatcgcacggtg

SEQ ID NO: 203164 - DNA, 25 bp, Artificial
  Probe
ctgcgcttctactttcttcacggtc

SEQ ID NO: 203165 - DNA, 25 bp, Artificial
  Probe
acattgcgggcttcgtgctccagga

SEQ ID NO: 203166 - DNA, 25 bp, Artificial
  Probe
gagaccaccgtgtgaagcggtctcg

SEQ ID NO: 203167 - DNA, 25 bp, Artificial
  Probe
ctcaacaggctggacccgctgcgag

SEQ ID NO: 203168 - DNA, 25 bp, Artificial
  Probe
aggacggaactcctgcgctactcac

SEQ ID NO: 203169 - DNA, 25 bp, Artificial
  Probe
cttttaatcatgagcctgtttattg

SEQ ID NO: 203170 - DNA, 25 bp, Artificial
  Probe
cggacgtgctacactcgctaccaga

SEQ ID NO: 203171 - DNA, 25 bp, Artificial
  Probe
taatcatgagcctgtttattgccat

SEQ ID NO: 203172 - DNA, 25 bp, Artificial
  Probe
acattagtcacgacaacataggtgg

SEQ ID NO: 203173 - DNA, 25 bp, Artificial
  Probe
atctacccctggatgcgcaagctgc

SEQ ID NO: 203174 - DNA, 25 bp, Artificial
  Probe
ctggatgcgcaagctgcacattagt

SEQ ID NO: 203175 - DNA, 25 bp, Artificial
  Probe
ttagtcacgacaacataggtggccc

SEQ ID NO: 203176 - DNA, 25 bp, Artificial
  Probe
gatgcgcaagctgcacattagtcac

SEQ ID NO: 203177 - DNA, 25 bp, Artificial
  Probe
tgccctttgcctctccgagagacaa

SEQ ID NO: 203178 - DNA, 25 bp, Artificial
  Probe
cgtagtgtcagtactaaggtgactt

SEQ ID NO: 203179 - DNA, 25 bp, Artificial
  Probe
tgaaatagcacatgccctttgcctc

SEQ ID NO: 203180 - DNA, 25 bp, Artificial
  Probe
actctccgtagtgtcagtactaagg

SEQ ID NO: 203181 - DNA, 25 bp, Artificial
  Probe
cctgacccgccgaagaaggattgaa

SEQ ID NO: 203182 - DNA, 25 bp, Artificial
  Probe
acgacaacataggtggcccagaagg

SEQ ID NO: 203183 - DNA, 25 bp, Artificial
  Probe
cataggtggcccagaaggcaaaagg

SEQ ID NO: 203184 - DNA, 25 bp, Artificial
  Probe
cccgccgaagaaggattgaaatagc

SEQ ID NO: 203185 - DNA, 25 bp, Artificial
  Probe
tctccgtagtgtcagtactaaggtg

SEQ ID NO: 203186 - DNA, 25 bp, Artificial
  Probe
aagggcccggacgtgctacactcgc

SEQ ID NO: 203187 - DNA, 25 bp, Artificial
  Probe
attgaaatagcacatgccctttgcc

SEQ ID NO: 203188 - DNA, 25 bp, Artificial
  Probe
agctgcacattagtcacgacaacat

SEQ ID NO: 203189 - DNA, 25 bp, Artificial
  Probe
tggatgcgcaagctgcacattagtc

SEQ ID NO: 203190 - DNA, 25 bp, Artificial
  Probe
tagtcacgacaacataggtggccca

SEQ ID NO: 203191 - DNA, 25 bp, Artificial
  Probe
gccctttgcctctccgagagacaaa

SEQ ID NO: 203192 - DNA, 25 bp, Artificial
  Probe
ggacgtgctacactcgctaccagac

SEQ ID NO: 203193 - DNA, 25 bp, Artificial
  Probe
ctccgtagtgtcagtactaaggtga

SEQ ID NO: 203194 - DNA, 25 bp, Artificial
  Probe
tctacccctggatgcgcaagctgca

SEQ ID NO: 203195 - DNA, 25 bp, Artificial
  Probe
tgcgcaagctgcacattagtcacga

SEQ ID NO: 203196 - DNA, 25 bp, Artificial
  Probe
cgacaacataggtggcccagaaggc

SEQ ID NO: 203197 - DNA, 25 bp, Artificial
  Probe
gcacattagtcacgacaacataggt

SEQ ID NO: 203198 - DNA, 25 bp, Artificial
  Probe
tgcacattagtcacgacaacatagg

SEQ ID NO: 203199 - DNA, 25 bp, Artificial
  Probe
atgccctttgcctctccgagagaca

SEQ ID NO: 203200 - DNA, 25 bp, Artificial
  Probe
ccgtagtgtcagtactaaggtgact

SEQ ID NO: 203201 - DNA, 25 bp, Artificial
  Probe
cacgacaacataggtggcccagaag

SEQ ID NO: 203202 - DNA, 25 bp, Artificial
  Probe
tttgcctctccgagagacaaattaa

SEQ ID NO: 203203 - DNA, 25 bp, Artificial
  Probe
gggcccggacgtgctacactcgcta

SEQ ID NO: 203204 - DNA, 25 bp, Artificial
  Probe
atcatgagcctgtttattgccatta

SEQ ID NO: 203205 - DNA, 25 bp, Artificial
  Probe
ccctggatgcgcaagctgcacatta

SEQ ID NO: 203206 - DNA, 25 bp, Artificial
  Probe
aaagggcccggacgtgctacactcg

SEQ ID NO: 203207 - DNA, 25 bp, Artificial
  Probe
caagctgcacattagtcacgacaac

SEQ ID NO: 203208 - DNA, 25 bp, Artificial
  Probe
cgcaagctgcacattagtcacgaca

SEQ ID NO: 203209 - DNA, 25 bp, Artificial
  Probe
ttgcctctccgagagacaaattaaa

SEQ ID NO: 203210 - DNA, 25 bp, Artificial
  Probe
aactctccgtagtgtcagtactaag

SEQ ID NO: 203211 - DNA, 25 bp, Artificial
  Probe
attagtcacgacaacataggtggcc

SEQ ID NO: 203212 - DNA, 25 bp, Artificial
  Probe
tgacccgccgaagaaggattgaaat

SEQ ID NO: 203213 - DNA, 25 bp, Artificial
  Probe
agatctacccctggatgcgcaagct

SEQ ID NO: 203214 - DNA, 25 bp, Artificial
  Probe
gatctacccctggatgcgcaagctg

SEQ ID NO: 203215 - DNA, 25 bp, Artificial
  Probe
tgagcttactggtaagaccattgtg

SEQ ID NO: 203216 - DNA, 25 bp, Artificial
  Probe
gtcatcgactacctttgagtccacc

SEQ ID NO: 203217 - DNA, 25 bp, Artificial
  Probe
gacctagatcagtttctgtcactta

SEQ ID NO: 203218 - DNA, 25 bp, Artificial
  Probe
gacacctgtaaggaagcactggtca

SEQ ID NO: 203219 - DNA, 25 bp, Artificial
  Probe
ctggtcatcgactacctttgagtcc

SEQ ID NO: 203220 - DNA, 25 bp, Artificial
  Probe
gtttctgtcacttatgtgcccaact

SEQ ID NO: 203221 - DNA, 25 bp, Artificial
  Probe
ggcccgcctgggaaagcacaaactc

SEQ ID NO: 203222 - DNA, 25 bp, Artificial
  Probe
gcatttagacccacttgcaactgta

SEQ ID NO: 203223 - DNA, 25 bp, Artificial
  Probe
ggaagcactggtcatcgactacctt

SEQ ID NO: 203224 - DNA, 25 bp, Artificial
  Probe
agagacatctgtcctggttactgct

SEQ ID NO: 203225 - DNA, 25 bp, Artificial
  Probe
tcacatgagcttactggtaagacca

SEQ ID NO: 203226 - DNA, 25 bp, Artificial
  Probe
tctgtcctggttactgcttagtgga

SEQ ID NO: 203227 - DNA, 25 bp, Artificial
  Probe
aaggaagcactggtcatcgactacc

SEQ ID NO: 203228 - DNA, 25 bp, Artificial
  Probe
tcctggttggtgtctgtgtgtgacc

SEQ ID NO: 203229 - DNA, 25 bp, Artificial
  Probe
aacggcctgctgacctggacaactt

SEQ ID NO: 203230 - DNA, 25 bp, Artificial
  Probe
ggcattaaaggcagctcacatgagc

SEQ ID NO: 203231 - DNA, 25 bp, Artificial
  Probe
atattgttgtcttattctggggcac

SEQ ID NO: 203232 - DNA, 25 bp, Artificial
  Probe
acctgtaaggaagcactggtcatcg

SEQ ID NO: 203233 - DNA, 25 bp, Artificial
  Probe
cactggtcatcgactacctttgagt

SEQ ID NO: 203234 - DNA, 25 bp, Artificial
  Probe
tggttggtgtctgtgtgtgaccccc

SEQ ID NO: 203235 - DNA, 25 bp, Artificial
  Probe
ggttggacacctgtaaggaagcact

SEQ ID NO: 203236 - DNA, 25 bp, Artificial
  Probe
gcccgcctgggaaagcacaaactca

SEQ ID NO: 203237 - DNA, 25 bp, Artificial
  Probe
taaaggcagctcacatgagcttact

SEQ ID NO: 203238 - DNA, 25 bp, Artificial
  Probe
tataatctagagacctagatcagtt

SEQ ID NO: 203239 - DNA, 25 bp, Artificial
  Probe
gggaaagcacaaactcacaacccac

SEQ ID NO: 203240 - DNA, 25 bp, Artificial
  Probe
gttgtcttattctggggcacagtct

SEQ ID NO: 203241 - DNA, 25 bp, Artificial
  Probe
cctggacaactttgccagggttgga

SEQ ID NO: 203242 - DNA, 25 bp, Artificial
  Probe
taaggaagcactggtcatcgactac

SEQ ID NO: 203243 - DNA, 25 bp, Artificial
  Probe
tatataatctagagacctagatcag

SEQ ID NO: 203244 - DNA, 25 bp, Artificial
  Probe
cctagatcagtttctgtcacttatg

SEQ ID NO: 203245 - DNA, 25 bp, Artificial
  Probe
agtggaacggcctgctgacctggac

SEQ ID NO: 203246 - DNA, 25 bp, Artificial
  Probe
gcagctcacatgagcttactggtaa

SEQ ID NO: 203247 - DNA, 25 bp, Artificial
  Probe
tcgtctatataatctagagacctag

SEQ ID NO: 203248 - DNA, 25 bp, Artificial
  Probe
cttgcaactgtacagagcgatatgg

SEQ ID NO: 203249 - DNA, 25 bp, Artificial
  Probe
gagcttactggtaagaccattgtgg

SEQ ID NO: 203250 - DNA, 25 bp, Artificial
  Probe
gacaactttgccagggttggacacc

SEQ ID NO: 203251 - DNA, 25 bp, Artificial
  Probe
actttgccagggttggacacctgta

SEQ ID NO: 203252 - DNA, 25 bp, Artificial
  Probe
ctgcttagtggaacggcctgctgac

SEQ ID NO: 203253 - DNA, 25 bp, Artificial
  Probe
aagatgcgatcttccaaccctgcct

SEQ ID NO: 203254 - DNA, 25 bp, Artificial
  Probe
cccccaagagacatctgtcctggtt

SEQ ID NO: 203255 - DNA, 25 bp, Artificial
  Probe
tgggaaagcacaaactcacaaccca

SEQ ID NO: 203256 - DNA, 25 bp, Artificial
  Probe
acgctctgcttgtccgagcgccagg

SEQ ID NO: 203257 - DNA, 25 bp, Artificial
  Probe
gaaatgcatttagacccacttgcaa

SEQ ID NO: 203258 - DNA, 25 bp, Artificial
  Probe
gaacggcctgctgacctggacaact

SEQ ID NO: 203259 - DNA, 25 bp, Artificial
  Probe
tggacacctgtaaggaagcactggt

SEQ ID NO: 203260 - DNA, 25 bp, Artificial
  Probe
tttagacccacttgcaactgtacag

SEQ ID NO: 203261 - DNA, 25 bp, Artificial
  Probe
atactagggtcttcatattcctgct

SEQ ID NO: 203262 - DNA, 25 bp, Artificial
  Probe
cctgctgctggttgtctggtgctga

SEQ ID NO: 203263 - DNA, 25 bp, Artificial
  Probe
ttcatattcctgctgctggttgtct

SEQ ID NO: 203264 - DNA, 25 bp, Artificial
  Probe
agtctaactcctatccgtggacgtt

SEQ ID NO: 203265 - DNA, 25 bp, Artificial
  Probe
tcttcatattcctgctgctggttgt

SEQ ID NO: 203266 - DNA, 25 bp, Artificial
  Probe
cacatactagggtcttcatattcct

SEQ ID NO: 203267 - DNA, 25 bp, Artificial
  Probe
gtcttcatattcctgctgctggttg

SEQ ID NO: 203268 - DNA, 25 bp, Artificial
  Probe
gtcacatactagggtcttcatattc

SEQ ID NO: 203269 - DNA, 25 bp, Artificial
  Probe
ggagtcacatactagggtcttcata

SEQ ID NO: 203270 - DNA, 25 bp, Artificial
  Probe
tggagtcacatactagggtcttcat

SEQ ID NO: 203271 - DNA, 25 bp, Artificial
  Probe
acatactagggtcttcatattcctg

SEQ ID NO: 203272 - DNA, 25 bp, Artificial
  Probe
tgctgctggttgtctggtgctgatg

SEQ ID NO: 203273 - DNA, 25 bp, Artificial
  Probe
catattcctgctgctggttgtctgg

SEQ ID NO: 203274 - DNA, 25 bp, Artificial
  Probe
gatggagtcacatactagggtcttc

SEQ ID NO: 203275 - DNA, 25 bp, Artificial
  Probe
tcatattcctgctgctggttgtctg

SEQ ID NO: 203276 - DNA, 25 bp, Artificial
  Probe
ctatccgtggacgttcggtggcacc

SEQ ID NO: 203277 - DNA, 25 bp, Artificial
  Probe
actagggtcttcatattcctgctgc

SEQ ID NO: 203278 - DNA, 25 bp, Artificial
  Probe
tattcctgctgctggttgtctggtg

SEQ ID NO: 203279 - DNA, 25 bp, Artificial
  Probe
tctaactcctatccgtggacgttcg

SEQ ID NO: 203280 - DNA, 25 bp, Artificial
  Probe
cctatccgtggacgttcggtggcac

SEQ ID NO: 203281 - DNA, 25 bp, Artificial
  Probe
ctagggtcttcatattcctgctgct

SEQ ID NO: 203282 - DNA, 25 bp, Artificial
  Probe
cagtctaactcctatccgtggacgt

SEQ ID NO: 203283 - DNA, 25 bp, Artificial
  Probe
atggagtcacatactagggtcttca

SEQ ID NO: 203284 - DNA, 25 bp, Artificial
  Probe
tcctatccgtggacgttcggtggca

SEQ ID NO: 203285 - DNA, 25 bp, Artificial
  Probe
tagggtcttcatattcctgctgctg

SEQ ID NO: 203286 - DNA, 25 bp, Artificial
  Probe
gcagtctaactcctatccgtggacg

SEQ ID NO: 203287 - DNA, 25 bp, Artificial
  Probe
taactcctatccgtggacgttcggt

SEQ ID NO: 203288 - DNA, 25 bp, Artificial
  Probe
agtcacatactagggtcttcatatt

SEQ ID NO: 203289 - DNA, 25 bp, Artificial
  Probe
ctaactcctatccgtggacgttcgg

SEQ ID NO: 203290 - DNA, 25 bp, Artificial
  Probe
agggtcttcatattcctgctgctgg

SEQ ID NO: 203291 - DNA, 25 bp, Artificial
  Probe
tcacatactagggtcttcatattcc

SEQ ID NO: 203292 - DNA, 25 bp, Artificial
  Probe
atattcctgctgctggttgtctggt

SEQ ID NO: 203293 - DNA, 25 bp, Artificial
  Probe
gagtcacatactagggtcttcatat

SEQ ID NO: 203294 - DNA, 25 bp, Artificial
  Probe
gtctaactcctatccgtggacgttc

SEQ ID NO: 203295 - DNA, 25 bp, Artificial
  Probe
aactcctatccgtggacgttcggtg

SEQ ID NO: 203296 - DNA, 25 bp, Artificial
  Probe
cttcatattcctgctgctggttgtc

SEQ ID NO: 203297 - DNA, 25 bp, Artificial
  Probe
actcctatccgtggacgttcggtgg

SEQ ID NO: 203298 - DNA, 25 bp, Artificial
  Probe
catactagggtcttcatattcctgc

SEQ ID NO: 203299 - DNA, 25 bp, Artificial
  Probe
attcctgctgctggttgtctggtgc

SEQ ID NO: 203300 - DNA, 25 bp, Artificial
  Probe
tactagggtcttcatattcctgctg

SEQ ID NO: 203301 - DNA, 25 bp, Artificial
  Probe
atccgtggacgttcggtggcaccaa

SEQ ID NO: 203302 - DNA, 25 bp, Artificial
  Probe
tatccgtggacgttcggtggcacca

SEQ ID NO: 203303 - DNA, 25 bp, Artificial
  Probe
ctcctatccgtggacgttcggtggc

SEQ ID NO: 203304 - DNA, 25 bp, Artificial
  Probe
atgaacatgccactcaactccttgg

SEQ ID NO: 203305 - DNA, 25 bp, Artificial
  Probe
gacatccatgtgacacagtctcctg

SEQ ID NO: 203306 - DNA, 25 bp, Artificial
  Probe
tagatctggcacacagtattctctt

SEQ ID NO: 203307 - DNA, 25 bp, Artificial
  Probe
tggtatcagcagaaaccagggaaat

SEQ ID NO: 203308 - DNA, 25 bp, Artificial
  Probe
accagggaaatctcctcagctcctg

SEQ ID NO: 203309 - DNA, 25 bp, Artificial
  Probe
acatccatgtgacacagtctcctgc

SEQ ID NO: 203310 - DNA, 25 bp, Artificial
  Probe
catgttacacagaaacatgaacatg

SEQ ID NO: 203311 - DNA, 25 bp, Artificial
  Probe
gttacacagaaacatgaacatgcca

SEQ ID NO: 203312 - DNA, 25 bp, Artificial
  Probe
gctactctggtttacaggtggtaaa

SEQ ID NO: 203313 - DNA, 25 bp, Artificial
  Probe
gtaaatgtgacatccatgtgacaca

SEQ ID NO: 203314 - DNA, 25 bp, Artificial
  Probe
cagggaaatctcctcagctcctgat

SEQ ID NO: 203315 - DNA, 25 bp, Artificial
  Probe
ggctgctactctggtttacaggtgg

SEQ ID NO: 203316 - DNA, 25 bp, Artificial
  Probe
gatctggcacacagtattctcttaa

SEQ ID NO: 203317 - DNA, 25 bp, Artificial
  Probe
ctccctgtctgcatctccggaagaa

SEQ ID NO: 203318 - DNA, 25 bp, Artificial
  Probe
cttgggttggctgctactctggttt

SEQ ID NO: 203319 - DNA, 25 bp, Artificial
  Probe
gaaaccagggaaatctcctcagctc

SEQ ID NO: 203320 - DNA, 25 bp, Artificial
  Probe
tgccactcaactccttgggttggct

SEQ ID NO: 203321 - DNA, 25 bp, Artificial
  Probe
ctactctggtttacaggtggtaaat

SEQ ID NO: 203322 - DNA, 25 bp, Artificial
  Probe
gggaaatctcctcagctcctgatct

SEQ ID NO: 203323 - DNA, 25 bp, Artificial
  Probe
ggttggctgctactctggtttacag

SEQ ID NO: 203324 - DNA, 25 bp, Artificial
  Probe
tggcacacagtattctcttaagatc

SEQ ID NO: 203325 - DNA, 25 bp, Artificial
  Probe
ggcacacagtattctcttaagatca

SEQ ID NO: 203326 - DNA, 25 bp, Artificial
  Probe
tgtgacatccatgtgacacagtctc

SEQ ID NO: 203327 - DNA, 25 bp, Artificial
  Probe
aaaccagggaaatctcctcagctcc

SEQ ID NO: 203328 - DNA, 25 bp, Artificial
  Probe
ccctgtctgcatctccggaagaaat

SEQ ID NO: 203329 - DNA, 25 bp, Artificial
  Probe
taaatgtgacatccatgtgacacag

SEQ ID NO: 203330 - DNA, 25 bp, Artificial
  Probe
atccatgtgacacagtctcctgcct

SEQ ID NO: 203331 - DNA, 25 bp, Artificial
  Probe
gtgacatccatgtgacacagtctcc

SEQ ID NO: 203332 - DNA, 25 bp, Artificial
  Probe
gcacacagtattctcttaagatcag

SEQ ID NO: 203333 - DNA, 25 bp, Artificial
  Probe
cctgtctgcatctccggaagaaatt

SEQ ID NO: 203334 - DNA, 25 bp, Artificial
  Probe
cacagtattctcttaagatcagcag

SEQ ID NO: 203335 - DNA, 25 bp, Artificial
  Probe
atggtatcagcagaaaccagggaaa

SEQ ID NO: 203336 - DNA, 25 bp, Artificial
  Probe
aactccttgggttggctgctactct

SEQ ID NO: 203337 - DNA, 25 bp, Artificial
  Probe
tggcagatggggtcccatcaaggtt

SEQ ID NO: 203338 - DNA, 25 bp, Artificial
  Probe
tgaacatgccactcaactccttggg

SEQ ID NO: 203339 - DNA, 25 bp, Artificial
  Probe
ggtatcagcagaaaccagggaaatc

SEQ ID NO: 203340 - DNA, 25 bp, Artificial
  Probe
ccatcacatgccaggcaagccagga

SEQ ID NO: 203341 - DNA, 25 bp, Artificial
  Probe
caactccttgggttggctgctactc

SEQ ID NO: 203342 - DNA, 25 bp, Artificial
  Probe
ggaaatctcctcagctcctgatcta

SEQ ID NO: 203343 - DNA, 25 bp, Artificial
  Probe
tgttacacagaaacatgaacatgcc

SEQ ID NO: 203344 - DNA, 25 bp, Artificial
  Probe
ccttgggttggctgctactctggtt

SEQ ID NO: 203345 - DNA, 25 bp, Artificial
  Probe
tcagcagaaaccagggaaatctcct

SEQ ID NO: 203346 - DNA, 25 bp, Artificial
  Probe
aacatgccactcaactccttgggtt

SEQ ID NO: 203347 - DNA, 25 bp, Artificial
  Probe
tgctactctggtttacaggtggtaa

SEQ ID NO: 203348 - DNA, 25 bp, Artificial
  Probe
acatgccactcaactccttgggttg

SEQ ID NO: 203349 - DNA, 25 bp, Artificial
  Probe
tatcagcagaaaccagggaaatctc

SEQ ID NO: 203350 - DNA, 25 bp, Artificial
  Probe
aagtggatttcagatcccataattt

SEQ ID NO: 203351 - DNA, 25 bp, Artificial
  Probe
gcacctgtcaacatatattgttaga

SEQ ID NO: 203352 - DNA, 25 bp, Artificial
  Probe
tctggcctggtgctttaggagagtt

SEQ ID NO: 203353 - DNA, 25 bp, Artificial
  Probe
gaaacagctaaacctctggcctggt

SEQ ID NO: 203354 - DNA, 25 bp, Artificial
  Probe
agttgagatcctatgtcacacttcg

SEQ ID NO: 203355 - DNA, 25 bp, Artificial
  Probe
aacagctaaacctctggcctggtgc

SEQ ID NO: 203356 - DNA, 25 bp, Artificial
  Probe
ttggaagcttgacacacaaacacac

SEQ ID NO: 203357 - DNA, 25 bp, Artificial
  Probe
gcctggtgctttaggagagttgaac

SEQ ID NO: 203358 - DNA, 25 bp, Artificial
  Probe
ctatgtcacacttcgggaaaccttt

SEQ ID NO: 203359 - DNA, 25 bp, Artificial
  Probe
gttgaacccctgctagtgtaattgg

SEQ ID NO: 203360 - DNA, 25 bp, Artificial
  Probe
tttacaaaactgcaaaccctgagtg

SEQ ID NO: 203361 - DNA, 25 bp, Artificial
  Probe
aaccctgagtgacaagaagtcctgc

SEQ ID NO: 203362 - DNA, 25 bp, Artificial
  Probe
cctgctagtgtaattggaagcttga

SEQ ID NO: 203363 - DNA, 25 bp, Artificial
  Probe
cctgtcaacatatattgttagagaa

SEQ ID NO: 203364 - DNA, 25 bp, Artificial
  Probe
tggtgctttaggagagttgaacccc

SEQ ID NO: 203365 - DNA, 25 bp, Artificial
  Probe
agtgacaagaagtcctgcaatgatg

SEQ ID NO: 203366 - DNA, 25 bp, Artificial
  Probe
tctacggatgcctcaggatgatcag

SEQ ID NO: 203367 - DNA, 25 bp, Artificial
  Probe
ggacctagttcaaagtggatttcag

SEQ ID NO: 203368 - DNA, 25 bp, Artificial
  Probe
aaacctctggcctggtgctttagga

SEQ ID NO: 203369 - DNA, 25 bp, Artificial
  Probe
tttaagattatacatccagtcagga

SEQ ID NO: 203370 - DNA, 25 bp, Artificial
  Probe
aggcagaaaacatcccgtgccagaa

SEQ ID NO: 203371 - DNA, 25 bp, Artificial
  Probe
caagaagtcctgcaatgatgtgatt

SEQ ID NO: 203372 - DNA, 25 bp, Artificial
  Probe
acctagttcaaagtggatttcagat

SEQ ID NO: 203373 - DNA, 25 bp, Artificial
  Probe
agaactatttctacggatgcctcag

SEQ ID NO: 203374 - DNA, 25 bp, Artificial
  Probe
tcacacttcgggaaacctttgattt

SEQ ID NO: 203375 - DNA, 25 bp, Artificial
  Probe
atagagaactatttctacggatgcc

SEQ ID NO: 203376 - DNA, 25 bp, Artificial
  Probe
gcctcaggatgatcagagattaata

SEQ ID NO: 203377 - DNA, 25 bp, Artificial
  Probe
ggaagcttgacacacaaacacacac

SEQ ID NO: 203378 - DNA, 25 bp, Artificial
  Probe
acatcccgtgccagaagagccattg

SEQ ID NO: 203379 - DNA, 25 bp, Artificial
  Probe
ctatttctacggatgcctcaggatg

SEQ ID NO: 203380 - DNA, 25 bp, Artificial
  Probe
atatgaaacagctaaacctctggcc

SEQ ID NO: 203381 - DNA, 25 bp, Artificial
  Probe
gccagaagagccattgccttttcaa

SEQ ID NO: 203382 - DNA, 25 bp, Artificial
  Probe
gttgagatcctatgtcacacttcgg

SEQ ID NO: 203383 - DNA, 25 bp, Artificial
  Probe
agtggatttcagatcccataattta

SEQ ID NO: 203384 - DNA, 25 bp, Artificial
  Probe
gagttgaacccctgctagtgtaatt

SEQ ID NO: 203385 - DNA, 25 bp, Artificial
  Probe
cagaagagccattgccttttcaaca

SEQ ID NO: 203386 - DNA, 25 bp, Artificial
  Probe
tacaaaactgcaaaccctgagtgac

SEQ ID NO: 203387 - DNA, 25 bp, Artificial
  Probe
ccgtgccagaagagccattgccttt

SEQ ID NO: 203388 - DNA, 25 bp, Artificial
  Probe
aactgcaaaccctgagtgacaagaa

SEQ ID NO: 203389 - DNA, 25 bp, Artificial
  Probe
tatttctacggatgcctcaggatga

SEQ ID NO: 203390 - DNA, 25 bp, Artificial
  Probe
ttttaagattatacatccagtcagg

SEQ ID NO: 203391 - DNA, 25 bp, Artificial
  Probe
aattggaagcttgacacacaaacac

SEQ ID NO: 203392 - DNA, 25 bp, Artificial
  Probe
cagctaaacctctggcctggtgctt

SEQ ID NO: 203393 - DNA, 25 bp, Artificial
  Probe
ttaagattatacatccagtcaggaa

SEQ ID NO: 203394 - DNA, 25 bp, Artificial
  Probe
tttacctaggacctagttcaaagtg

SEQ ID NO: 203395 - DNA, 25 bp, Artificial
  Probe
aagattatacatccagtcaggaagc

SEQ ID NO: 203396 - DNA, 25 bp, Artificial
  Probe
actgaccaggactagggagcaggcc

SEQ ID NO: 203397 - DNA, 25 bp, Artificial
  Probe
ttgtcgccttgaagcggtcggatct

SEQ ID NO: 203398 - DNA, 25 bp, Artificial
  Probe
cagatctaagagtcgccctgtcttt

SEQ ID NO: 203399 - DNA, 25 bp, Artificial
  Probe
gttcgtctctgatcgccgcgggtct

SEQ ID NO: 203400 - DNA, 25 bp, Artificial
  Probe
agacgagatcgctgcacccttgcaa

SEQ ID NO: 203401 - DNA, 25 bp, Artificial
  Probe
gtcagatctaagagtcgccctgtct

SEQ ID NO: 203402 - DNA, 25 bp, Artificial
  Probe
cgccaatgggctgagattgggaccc

SEQ ID NO: 203403 - DNA, 25 bp, Artificial
  Probe
ggttcccctgttcgtctctgatcgc

SEQ ID NO: 203404 - DNA, 25 bp, Artificial
  Probe
ggttagacgagatcgctgcaccctt

SEQ ID NO: 203405 - DNA, 25 bp, Artificial
  Probe
ggtgccctgttgtcgccttgaagcg

SEQ ID NO: 203406 - DNA, 25 bp, Artificial
  Probe
tcgccaatgggctgagattgggacc

SEQ ID NO: 203407 - DNA, 25 bp, Artificial
  Probe
ccgaggccggagaccccaaggtcag

SEQ ID NO: 203408 - DNA, 25 bp, Artificial
  Probe
gctggcgcagactcgccaatgggct

SEQ ID NO: 203409 - DNA, 25 bp, Artificial
  Probe
ccgagatcttggtgccctgttgtcg

SEQ ID NO: 203410 - DNA, 25 bp, Artificial
  Probe
cgcagactcgccaatgggctgagat

SEQ ID NO: 203411 - DNA, 25 bp, Artificial
  Probe
gagagatctctggacttggaaattc

SEQ ID NO: 203412 - DNA, 25 bp, Artificial
  Probe
cgagatcgctgcacccttgcaagga

SEQ ID NO: 203413 - DNA, 25 bp, Artificial
  Probe
ggaatctgtgcactctattgggggt

SEQ ID NO: 203414 - DNA, 25 bp, Artificial
  Probe
cactgaccaggactagggagcaggc

SEQ ID NO: 203415 - DNA, 25 bp, Artificial
  Probe
ttgggcgctcccactacgccgagat

SEQ ID NO: 203416 - DNA, 25 bp, Artificial
  Probe
attgggggtcagatctaagagtcgc

SEQ ID NO: 203417 - DNA, 25 bp, Artificial
  Probe
atcgctgcacccttgcaaggaatct

SEQ ID NO: 203418 - DNA, 25 bp, Artificial
  Probe
gttgagcgggcactgaccaggacta

SEQ ID NO: 203419 - DNA, 25 bp, Artificial
  Probe
tgaagcggtcggatctcctcttgtc

SEQ ID NO: 203420 - DNA, 25 bp, Artificial
  Probe
ctctattgggggtcagatctaagag

SEQ ID NO: 203421 - DNA, 25 bp, Artificial
  Probe
cctgttgtcgccttgaagcggtcgg

SEQ ID NO: 203422 - DNA, 25 bp, Artificial
  Probe
tcggcacccgggttgtgccctcggt

SEQ ID NO: 203423 - DNA, 25 bp, Artificial
  Probe
gctgagattgggacccggattcccg

SEQ ID NO: 203424 - DNA, 25 bp, Artificial
  Probe
ctcttgtctctgtgcgctcggagag

SEQ ID NO: 203425 - DNA, 25 bp, Artificial
  Probe
tgtgcactctattgggggtcagatc

SEQ ID NO: 203426 - DNA, 25 bp, Artificial
  Probe
cctgttcgtctctgatcgccgcggg

SEQ ID NO: 203427 - DNA, 25 bp, Artificial
  Probe
caaggtcagagcagcgacaaggcgc

SEQ ID NO: 203428 - DNA, 25 bp, Artificial
  Probe
atcttggtgccctgttgtcgccttg

SEQ ID NO: 203429 - DNA, 25 bp, Artificial
  Probe
taagagtcgccctgtctttgggcgc

SEQ ID NO: 203430 - DNA, 25 bp, Artificial
  Probe
gccttgaagcggtcggatctcctct

SEQ ID NO: 203431 - DNA, 25 bp, Artificial
  Probe
gccggagaccccaaggtcagagcag

SEQ ID NO: 203432 - DNA, 25 bp, Artificial
  Probe
caaggaatctgtgcactctattggg

SEQ ID NO: 203433 - DNA, 25 bp, Artificial
  Probe
gcacccgggttgtgccctcggttag

SEQ ID NO: 203434 - DNA, 25 bp, Artificial
  Probe
ttgagcgggcactgaccaggactag

SEQ ID NO: 203435 - DNA, 25 bp, Artificial
  Probe
caggccgagcgctcgttttccctgg

SEQ ID NO: 203436 - DNA, 25 bp, Artificial
  Probe
cactacgccgagatcttggtgccct

SEQ ID NO: 203437 - DNA, 25 bp, Artificial
  Probe
tcgctggcgcagactcgccaatggg

SEQ ID NO: 203438 - DNA, 25 bp, Artificial
  Probe
gcagactcgccaatgggctgagatt

SEQ ID NO: 203439 - DNA, 25 bp, Artificial
  Probe
ttgtgccctcggttagacgagatcg

SEQ ID NO: 203440 - DNA, 25 bp, Artificial
  Probe
ggccgagcgctcgttttccctgggc

SEQ ID NO: 203441 - DNA, 25 bp, Artificial
  Probe
gagtcgccctgtctttgggcgctcc

SEQ ID NO: 203442 - DNA, 25 bp, Artificial
  Probe
gaagctcgggttccttagctggtgc

SEQ ID NO: 203443 - DNA, 25 bp, Artificial
  Probe
atcttccacttgcacacggagcagt

SEQ ID NO: 203444 - DNA, 25 bp, Artificial
  Probe
acttgcacacggagcagtcggtggc

SEQ ID NO: 203445 - DNA, 25 bp, Artificial
  Probe
gggatcagctgactctcccggctgc

SEQ ID NO: 203446 - DNA, 25 bp, Artificial
  Probe
agctcgggttccttagctggtgccc

SEQ ID NO: 203447 - DNA, 25 bp, Artificial
  Probe
ttccttagctggtgcccaagacgcc

SEQ ID NO: 203448 - DNA, 25 bp, Artificial
  Probe
cccagaggaagctcgggttccttag

SEQ ID NO: 203449 - DNA, 25 bp, Artificial
  Probe
cacgcaggatcacgatgctgcccag

SEQ ID NO: 203450 - DNA, 25 bp, Artificial
  Probe
aggatcacgatgctgcccagcctgg

SEQ ID NO: 203451 - DNA, 25 bp, Artificial
  Probe
agctctgtcagtttcctcggcggcg

SEQ ID NO: 203452 - DNA, 25 bp, Artificial
  Probe
gaccccagaggaagctcgggttcct

SEQ ID NO: 203453 - DNA, 25 bp, Artificial
  Probe
tcctggaccccagaggaagctcggg

SEQ ID NO: 203454 - DNA, 25 bp, Artificial
  Probe
gctcgggttccttagctggtgccca

SEQ ID NO: 203455 - DNA, 25 bp, Artificial
  Probe
cggggctccgctaggggtctctctc

SEQ ID NO: 203456 - DNA, 25 bp, Artificial
  Probe
cggatcttccacttgcacacggagc

SEQ ID NO: 203457 - DNA, 25 bp, Artificial
  Probe
ggtgcggcggatcttccacttgcac

SEQ ID NO: 203458 - DNA, 25 bp, Artificial
  Probe
cacacggagcagtcggtggcccacg

SEQ ID NO: 203459 - DNA, 25 bp, Artificial
  Probe
ggttccttagctggtgcccaagacg

SEQ ID NO: 203460 - DNA, 25 bp, Artificial
  Probe
cttggttcctggaccccagaggaag

SEQ ID NO: 203461 - DNA, 25 bp, Artificial
  Probe
cgggatcagctgactctcccggctg

SEQ ID NO: 203462 - DNA, 25 bp, Artificial
  Probe
gctccagctctgtcagtttcctcgg

SEQ ID NO: 203463 - DNA, 25 bp, Artificial
  Probe
ctggaccccagaggaagctcgggtt

SEQ ID NO: 203464 - DNA, 25 bp, Artificial
  Probe
ctccgctaggggtctctctcgggtg

SEQ ID NO: 203465 - DNA, 25 bp, Artificial
  Probe
ttgcacacggagcagtcggtggccc

SEQ ID NO: 203466 - DNA, 25 bp, Artificial
  Probe
aggaagctcgggttccttagctggt

SEQ ID NO: 203467 - DNA, 25 bp, Artificial
  Probe
caggatcacgatgctgcccagcctg

SEQ ID NO: 203468 - DNA, 25 bp, Artificial
  Probe
cttccacttgcacacggagcagtcg

SEQ ID NO: 203469 - DNA, 25 bp, Artificial
  Probe
gttccttagctggtgcccaagacgc

SEQ ID NO: 203470 - DNA, 25 bp, Artificial
  Probe
ttcctggaccccagaggaagctcgg

SEQ ID NO: 203471 - DNA, 25 bp, Artificial
  Probe
tgcggcggatcttccacttgcacac

SEQ ID NO: 203472 - DNA, 25 bp, Artificial
  Probe
cgggttccttagctggtgcccaaga

SEQ ID NO: 203473 - DNA, 25 bp, Artificial
  Probe
ggtggcccacgcaggatcacgatgc

SEQ ID NO: 203474 - DNA, 25 bp, Artificial
  Probe
tccagctctgtcagtttcctcggcg

SEQ ID NO: 203475 - DNA, 25 bp, Artificial
  Probe
ggcccacgcaggatcacgatgctgc

SEQ ID NO: 203476 - DNA, 25 bp, Artificial
  Probe
tcccttggttcctggaccccagagg

SEQ ID NO: 203477 - DNA, 25 bp, Artificial
  Probe
tggaccccagaggaagctcgggttc

SEQ ID NO: 203478 - DNA, 25 bp, Artificial
  Probe
tttgcgctcgggtgcagctccccgg

SEQ ID NO: 203479 - DNA, 25 bp, Artificial
  Probe
acgcaggatcacgatgctgcccagc

SEQ ID NO: 203480 - DNA, 25 bp, Artificial
  Probe
ggcggatcttccacttgcacacgga

SEQ ID NO: 203481 - DNA, 25 bp, Artificial
  Probe
gcaggatcacgatgctgcccagcct

SEQ ID NO: 203482 - DNA, 25 bp, Artificial
  Probe
ttccacttgcacacggagcagtcgg

SEQ ID NO: 203483 - DNA, 25 bp, Artificial
  Probe
ggatcttccacttgcacacggagca

SEQ ID NO: 203484 - DNA, 25 bp, Artificial
  Probe
cagctctgtcagtttcctcggcggc

SEQ ID NO: 203485 - DNA, 25 bp, Artificial
  Probe
gtggcccacgcaggatcacgatgct

SEQ ID NO: 203486 - DNA, 25 bp, Artificial
  Probe
agtcggtggcccacgcaggatcacg

SEQ ID NO: 203487 - DNA, 25 bp, Artificial
  Probe
cggcggatcttccacttgcacacgg

SEQ ID NO: 203488 - DNA, 25 bp, Artificial
  Probe
aaggctatgtgactcctgtacggaa

SEQ ID NO: 203489 - DNA, 25 bp, Artificial
  Probe
gatgcttctcatgactctttcagat

SEQ ID NO: 203490 - DNA, 25 bp, Artificial
  Probe
gagctttacctatgggttgctgtag

SEQ ID NO: 203491 - DNA, 25 bp, Artificial
  Probe
agtgctaacatcacaggttttgtga

SEQ ID NO: 203492 - DNA, 25 bp, Artificial
  Probe
ggtactgcacaccaagcattcaatt

SEQ ID NO: 203493 - DNA, 25 bp, Artificial
  Probe
cagtgagaacgctagtgctaacatc

SEQ ID NO: 203494 - DNA, 25 bp, Artificial
  Probe
gcatttagtgccttccacttcacag

SEQ ID NO: 203495 - DNA, 25 bp, Artificial
  Probe
gaattgcttcacaagccagcttccc

SEQ ID NO: 203496 - DNA, 25 bp, Artificial
  Probe
aggtcttgaggctgaggcaacctat

SEQ ID NO: 203497 - DNA, 25 bp, Artificial
  Probe
gacaaacccaagtgcccagaaacaa

SEQ ID NO: 203498 - DNA, 25 bp, Artificial
  Probe
ctgtggaattgcttcacaagccagc

SEQ ID NO: 203499 - DNA, 25 bp, Artificial
  Probe
ttgatgcttctcatgactctttcag

SEQ ID NO: 203500 - DNA, 25 bp, Artificial
  Probe
gggtactgcacaccaagcattcaat

SEQ ID NO: 203501 - DNA, 25 bp, Artificial
  Probe
catcacaggttttgtgaacctccca

SEQ ID NO: 203502 - DNA, 25 bp, Artificial
  Probe
tgtagcatctattgggcccgtctct

SEQ ID NO: 203503 - DNA, 25 bp, Artificial
  Probe
ggcttttgctgcagttggtgcgata

SEQ ID NO: 203504 - DNA, 25 bp, Artificial
  Probe
tgaggctgaggcaacctatccatat

SEQ ID NO: 203505 - DNA, 25 bp, Artificial
  Probe
cagaaacaagtctctattggtttac

SEQ ID NO: 203506 - DNA, 25 bp, Artificial
  Probe
acccaagtgcccagaaacaagtctc

SEQ ID NO: 203507 - DNA, 25 bp, Artificial
  Probe
attaatggcttcatgaagatagcca

SEQ ID NO: 203508 - DNA, 25 bp, Artificial
  Probe
agaaggtcagatgtctctcaaaact

SEQ ID NO: 203509 - DNA, 25 bp, Artificial
  Probe
aagacggaccctgcaggtaccacag

SEQ ID NO: 203510 - DNA, 25 bp, Artificial
  Probe
tctcctgagtgctttcaacagttga

SEQ ID NO: 203511 - DNA, 25 bp, Artificial
  Probe
gcaattgatgcttctcatgactctt

SEQ ID NO: 203512 - DNA, 25 bp, Artificial
  Probe
tgtgacaaacccaagtgcccagaaa

SEQ ID NO: 203513 - DNA, 25 bp, Artificial
  Probe
cctgtacggaatcagggtaaatgcg

SEQ ID NO: 203514 - DNA, 25 bp, Artificial
  Probe
tcccaccgaatgagctttacctatg

SEQ ID NO: 203515 - DNA, 25 bp, Artificial
  Probe
atgcggctcttgttgggcttttgct

SEQ ID NO: 203516 - DNA, 25 bp, Artificial
  Probe
tgggcccgtctctgcggcaattgat

SEQ ID NO: 203517 - DNA, 25 bp, Artificial
  Probe
catgactctttcagattctacagtg

SEQ ID NO: 203518 - DNA, 25 bp, Artificial
  Probe
ctttcagattctacagtggaggtgt

SEQ ID NO: 203519 - DNA, 25 bp, Artificial
  Probe
ggtaaatgcggctcttgttgggctt

SEQ ID NO: 203520 - DNA, 25 bp, Artificial
  Probe
ctgctgtgacaaacccaagtgccca

SEQ ID NO: 203521 - DNA, 25 bp, Artificial
  Probe
ctatgggttgctgtagcatctattg

SEQ ID NO: 203522 - DNA, 25 bp, Artificial
  Probe
gatgtctctcaaaactggcaacctc

SEQ ID NO: 203523 - DNA, 25 bp, Artificial
  Probe
ctatccatatgaaggaaaagacgga

SEQ ID NO: 203524 - DNA, 25 bp, Artificial
  Probe
caggtaccacagtgagaacgctagt

SEQ ID NO: 203525 - DNA, 25 bp, Artificial
  Probe
tttacctatgggttgctgtagcatc

SEQ ID NO: 203526 - DNA, 25 bp, Artificial
  Probe
cattaatggcttcatgaagatagcc

SEQ ID NO: 203527 - DNA, 25 bp, Artificial
  Probe
gtcttgaggctgaggcaacctatcc

SEQ ID NO: 203528 - DNA, 25 bp, Artificial
  Probe
actcctgtacggaatcagggtaaat

SEQ ID NO: 203529 - DNA, 25 bp, Artificial
  Probe
ggaaggctatgtgactcctgtacgg

SEQ ID NO: 203530 - DNA, 25 bp, Artificial
  Probe
cgtctctgcggcaattgatgcttct

SEQ ID NO: 203531 - DNA, 25 bp, Artificial
  Probe
cttttgctgcagttggtgcgataga

SEQ ID NO: 203532 - DNA, 25 bp, Artificial
  Probe
gacagcatttagtgccttccacttc

SEQ ID NO: 203533 - DNA, 25 bp, Artificial
  Probe
ctattgggcccgtctctgcggcaat

SEQ ID NO: 203534 - DNA, 25 bp, Artificial
  Probe
gatagagtccagataaccaatgaga

SEQ ID NO: 203535 - DNA, 25 bp, Artificial
  Probe
ggaaaagaccttcttgccatggggc

SEQ ID NO: 203536 - DNA, 25 bp, Artificial
  Probe
gggaaaagaccttcttgccatgggg

SEQ ID NO: 203537 - DNA, 25 bp, Artificial
  Probe
gttgctcccactaggggaaagattg

SEQ ID NO: 203538 - DNA, 25 bp, Artificial
  Probe
ctcaaagttcagtcataaagtaaga

SEQ ID NO: 203539 - DNA, 25 bp, Artificial
  Probe
aacagccagccataagacccagaca

SEQ ID NO: 203540 - DNA, 25 bp, Artificial
  Probe
tattctgggctaagggcgcacagaa

SEQ ID NO: 203541 - DNA, 25 bp, Artificial
  Probe
cagatttcatgaagctcagagagat

SEQ ID NO: 203542 - DNA, 25 bp, Artificial
  Probe
atagggagacagtcctcattcctct

SEQ ID NO: 203543 - DNA, 25 bp, Artificial
  Probe
cgcttaggcagagtagcatttttag

SEQ ID NO: 203544 - DNA, 25 bp, Artificial
  Probe
tttagattctgtgacttttgctaca

SEQ ID NO: 203545 - DNA, 25 bp, Artificial
  Probe
gagacagtcctcattcctctgtaat

SEQ ID NO: 203546 - DNA, 25 bp, Artificial
  Probe
ggttcactggctcaaagttcagtca

SEQ ID NO: 203547 - DNA, 25 bp, Artificial
  Probe
ccagataaccaatgagatagggaga

SEQ ID NO: 203548 - DNA, 25 bp, Artificial
  Probe
agagatgaatacacctgcctgggat

SEQ ID NO: 203549 - DNA, 25 bp, Artificial
  Probe
gatcaaacagccagccataagaccc

SEQ ID NO: 203550 - DNA, 25 bp, Artificial
  Probe
agataagtactcaccaacccttagg

SEQ ID NO: 203551 - DNA, 25 bp, Artificial
  Probe
agggcgcacagaagtgcgcactgtc

SEQ ID NO: 203552 - DNA, 25 bp, Artificial
  Probe
gagaacccagatagagtccagataa

SEQ ID NO: 203553 - DNA, 25 bp, Artificial
  Probe
ctggctcaaagttcagtcataaagt

SEQ ID NO: 203554 - DNA, 25 bp, Artificial
  Probe
acccagacagggtttgggttcactg

SEQ ID NO: 203555 - DNA, 25 bp, Artificial
  Probe
aggagactgaatcctggagttgtgc

SEQ ID NO: 203556 - DNA, 25 bp, Artificial
  Probe
tcccactaggggaaagattgtggag

SEQ ID NO: 203557 - DNA, 25 bp, Artificial
  Probe
cctacagaaaggtattctgggctaa

SEQ ID NO: 203558 - DNA, 25 bp, Artificial
  Probe
agttgctcccactaggggaaagatt

SEQ ID NO: 203559 - DNA, 25 bp, Artificial
  Probe
tacagacagatttcatgaagctcag

SEQ ID NO: 203560 - DNA, 25 bp, Artificial
  Probe
gataagtactcaccaacccttaggt

SEQ ID NO: 203561 - DNA, 25 bp, Artificial
  Probe
agactgaatcctggagttgtgcgag

SEQ ID NO: 203562 - DNA, 25 bp, Artificial
  Probe
tcatgaagctcagagagatgaatac

SEQ ID NO: 203563 - DNA, 25 bp, Artificial
  Probe
tttcgcttaggcagagtagcatttt

SEQ ID NO: 203564 - DNA, 25 bp, Artificial
  Probe
cgatctcagagaacccagatagagt

SEQ ID NO: 203565 - DNA, 25 bp, Artificial
  Probe
cataagacccagacagggtttgggt

SEQ ID NO: 203566 - DNA, 25 bp, Artificial
  Probe
aagattgtggagttctcctatgtac

SEQ ID NO: 203567 - DNA, 25 bp, Artificial
  Probe
aatacacctgcctgggatcaaacag

SEQ ID NO: 203568 - DNA, 25 bp, Artificial
  Probe
gaccttcttgccatggggctgcagg

SEQ ID NO: 203569 - DNA, 25 bp, Artificial
  Probe
acccagatagagtccagataaccaa

SEQ ID NO: 203570 - DNA, 25 bp, Artificial
  Probe
tggcacagttgctcccactagggga

SEQ ID NO: 203571 - DNA, 25 bp, Artificial
  Probe
acagatttcatgaagctcagagaga

SEQ ID NO: 203572 - DNA, 25 bp, Artificial
  Probe
taacccaagacacctttcgcttagg

SEQ ID NO: 203573 - DNA, 25 bp, Artificial
  Probe
acagaagtgcgcactgtcggaatct

SEQ ID NO: 203574 - DNA, 25 bp, Artificial
  Probe
gtattctgggctaagggcgcacaga

SEQ ID NO: 203575 - DNA, 25 bp, Artificial
  Probe
catgaagctcagagagatgaataca

SEQ ID NO: 203576 - DNA, 25 bp, Artificial
  Probe
aggtatccagacatagaccagctgc

SEQ ID NO: 203577 - DNA, 25 bp, Artificial
  Probe
cacctgcctgggatcaaacagccag

SEQ ID NO: 203578 - DNA, 25 bp, Artificial
  Probe
tccagacatagaccagctgcagaaa

SEQ ID NO: 203579 - DNA, 25 bp, Artificial
  Probe
gctaagggcgcacagaagtgcgcac

SEQ ID NO: 203580 - DNA, 25 bp, Artificial
  Probe
tggtttccttgataaggggacaggc

SEQ ID NO: 203581 - DNA, 25 bp, Artificial
  Probe
ggctctgcaggctccaaggacctgt

SEQ ID NO: 203582 - DNA, 25 bp, Artificial
  Probe
gttggggctatttctgtcctttctg

SEQ ID NO: 203583 - DNA, 25 bp, Artificial
  Probe
ggctatttctgtcctttctgcctcc

SEQ ID NO: 203584 - DNA, 25 bp, Artificial
  Probe
gggaaccgaacagtgtagagaccaa

SEQ ID NO: 203585 - DNA, 25 bp, Artificial
  Probe
caggcccactttggagctaaggagg

SEQ ID NO: 203586 - DNA, 25 bp, Artificial
  Probe
gggcctctccaatctcaaagctgca

SEQ ID NO: 203587 - DNA, 25 bp, Artificial
  Probe
ggtgggcctctccaatctcaaagct

SEQ ID NO: 203588 - DNA, 25 bp, Artificial
  Probe
tctaggctctaggacaagctggtgg

SEQ ID NO: 203589 - DNA, 25 bp, Artificial
  Probe
gctctaggctctaggacaagctggt

SEQ ID NO: 203590 - DNA, 25 bp, Artificial
  Probe
caggctccaaggacctgtggtggct

SEQ ID NO: 203591 - DNA, 25 bp, Artificial
  Probe
tgctactctccctggaaagttgggg

SEQ ID NO: 203592 - DNA, 25 bp, Artificial
  Probe
tcctggaccttcatgggctctgcag

SEQ ID NO: 203593 - DNA, 25 bp, Artificial
  Probe
ctccaaggacctgtggtggctgtga

SEQ ID NO: 203594 - DNA, 25 bp, Artificial
  Probe
tgtgactaagggacccaggtgtcct

SEQ ID NO: 203595 - DNA, 25 bp, Artificial
  Probe
atctcaaagctgcaggtctccacag

SEQ ID NO: 203596 - DNA, 25 bp, Artificial
  Probe
tgggctctaggctctaggacaagct

SEQ ID NO: 203597 - DNA, 25 bp, Artificial
  Probe
ctgcaggctccaaggacctgtggtg

SEQ ID NO: 203598 - DNA, 25 bp, Artificial
  Probe
ggccacttcaggagggaaaagtgct

SEQ ID NO: 203599 - DNA, 25 bp, Artificial
  Probe
tactctccctggaaagttggggcta

SEQ ID NO: 203600 - DNA, 25 bp, Artificial
  Probe
ggtctccacagaatgacgcacacac

SEQ ID NO: 203601 - DNA, 25 bp, Artificial
  Probe
accaaaagagtgctactctccctgg

SEQ ID NO: 203602 - DNA, 25 bp, Artificial
  Probe
agaggatggtcctggaccttcatgg

SEQ ID NO: 203603 - DNA, 25 bp, Artificial
  Probe
tctccctggaaagttggggctattt

SEQ ID NO: 203604 - DNA, 25 bp, Artificial
  Probe
aagtgctggtctgtgactaagggac

SEQ ID NO: 203605 - DNA, 25 bp, Artificial
  Probe
tcccatgggacctggggccacttca

SEQ ID NO: 203606 - DNA, 25 bp, Artificial
  Probe
cttcatgggctctgcaggctccaag

SEQ ID NO: 203607 - DNA, 25 bp, Artificial
  Probe
tccctctgggctctaggctctagga

SEQ ID NO: 203608 - DNA, 25 bp, Artificial
  Probe
ggggacaggcccactttggagctaa

SEQ ID NO: 203609 - DNA, 25 bp, Artificial
  Probe
gctggtctgtgactaagggacccag

SEQ ID NO: 203610 - DNA, 25 bp, Artificial
  Probe
catgggctctgcaggctccaaggac

SEQ ID NO: 203611 - DNA, 25 bp, Artificial
  Probe
gaaccgaacagtgtagagaccaaaa

SEQ ID NO: 203612 - DNA, 25 bp, Artificial
  Probe
gctcccatgggacctggggccactt

SEQ ID NO: 203613 - DNA, 25 bp, Artificial
  Probe
ccaaaagagtgctactctccctgga

SEQ ID NO: 203614 - DNA, 25 bp, Artificial
  Probe
ctctccaatctcaaagctgcaggtc

SEQ ID NO: 203615 - DNA, 25 bp, Artificial
  Probe
tcaaagctgcaggtctccacagaat

SEQ ID NO: 203616 - DNA, 25 bp, Artificial
  Probe
accttcatgggctctgcaggctcca

SEQ ID NO: 203617 - DNA, 25 bp, Artificial
  Probe
tccctggaaagttggggctatttct

SEQ ID NO: 203618 - DNA, 25 bp, Artificial
  Probe
agttggggctatttctgtcctttct

SEQ ID NO: 203619 - DNA, 25 bp, Artificial
  Probe
aagagtgctactctccctggaaagt

SEQ ID NO: 203620 - DNA, 25 bp, Artificial
  Probe
caggtctccacagaatgacgcacac

SEQ ID NO: 203621 - DNA, 25 bp, Artificial
  Probe
ctccctctgggctctaggctctagg

SEQ ID NO: 203622 - DNA, 25 bp, Artificial
  Probe
aggatggtcctggaccttcatgggc

SEQ ID NO: 203623 - DNA, 25 bp, Artificial
  Probe
agagtgctactctccctggaaagtt

SEQ ID NO: 203624 - DNA, 25 bp, Artificial
  Probe
tggtctgtgactaagggacccaggt

SEQ ID NO: 203625 - DNA, 25 bp, Artificial
  Probe
cctctgggctctaggctctaggaca

SEQ ID NO: 203626 - DNA, 25 bp, Artificial
  Probe
cctttccttggctttgatcatgcta

SEQ ID NO: 203627 - DNA, 25 bp, Artificial
  Probe
taacctctatacctgtgaggttgtt

SEQ ID NO: 203628 - DNA, 25 bp, Artificial
  Probe
gggcagtctcctaaactgctgatct

SEQ ID NO: 203629 - DNA, 25 bp, Artificial
  Probe
acgggctgatgctgcaccaactgta

SEQ ID NO: 203630 - DNA, 25 bp, Artificial
  Probe
aagacagcacgtacagcatgagcag

SEQ ID NO: 203631 - DNA, 25 bp, Artificial
  Probe
caagagcttcaacaggaatgagtgt

SEQ ID NO: 203632 - DNA, 25 bp, Artificial
  Probe
cagagacatcagtgtcaagtggaag

SEQ ID NO: 203633 - DNA, 25 bp, Artificial
  Probe
gacagcacgtacagcatgagcagca

SEQ ID NO: 203634 - DNA, 25 bp, Artificial
  Probe
tcctaaggtcttggagacttcccca

SEQ ID NO: 203635 - DNA, 25 bp, Artificial
  Probe
gcttcaacaggaatgagtgttagac

SEQ ID NO: 203636 - DNA, 25 bp, Artificial
  Probe
acctaccactgttgcggtgctccaa

SEQ ID NO: 203637 - DNA, 25 bp, Artificial
  Probe
taccagcagaaaccagggcagtctc

SEQ ID NO: 203638 - DNA, 25 bp, Artificial
  Probe
cacaagcgacctaccactgttgcgg

SEQ ID NO: 203639 - DNA, 25 bp, Artificial
  Probe
atacctgtgaggttgttcataagac

SEQ ID NO: 203640 - DNA, 25 bp, Artificial
  Probe
ccagcagaaaccagggcagtctcct

SEQ ID NO: 203641 - DNA, 25 bp, Artificial
  Probe
gggctgatgctgcaccaactgtatc

SEQ ID NO: 203642 - DNA, 25 bp, Artificial
  Probe
tcacccgtcgtcaagagcttcaaca

SEQ ID NO: 203643 - DNA, 25 bp, Artificial
  Probe
gcgacctaccactgttgcggtgctc

SEQ ID NO: 203644 - DNA, 25 bp, Artificial
  Probe
aggacagcaaagacagcacgtacag

SEQ ID NO: 203645 - DNA, 25 bp, Artificial
  Probe
gatcaggacagcaaagacagcacgt

SEQ ID NO: 203646 - DNA, 25 bp, Artificial
  Probe
actgatcaggacagcaaagacagca

SEQ ID NO: 203647 - DNA, 25 bp, Artificial
  Probe
acctctatacctgtgaggttgttca

SEQ ID NO: 203648 - DNA, 25 bp, Artificial
  Probe
gtcttggagacttccccacaagcga

SEQ ID NO: 203649 - DNA, 25 bp, Artificial
  Probe
tacctgtgaggttgttcataagaca

SEQ ID NO: 203650 - DNA, 25 bp, Artificial
  Probe
tccctcctaaggtcttggagacttc

SEQ ID NO: 203651 - DNA, 25 bp, Artificial
  Probe
actgttgcggtgctccaaacctcct

SEQ ID NO: 203652 - DNA, 25 bp, Artificial
  Probe
acctgtgaggttgttcataagacat

SEQ ID NO: 203653 - DNA, 25 bp, Artificial
  Probe
caaaggtcctgaggtgccacctgct

SEQ ID NO: 203654 - DNA, 25 bp, Artificial
  Probe
caaagacagcacgtacagcatgagc

SEQ ID NO: 203655 - DNA, 25 bp, Artificial
  Probe
gcacgtacagcatgagcagcaccct

SEQ ID NO: 203656 - DNA, 25 bp, Artificial
  Probe
agtgttagacccaaaggtcctgagg

SEQ ID NO: 203657 - DNA, 25 bp, Artificial
  Probe
ctaaggtcttggagacttccccaca

SEQ ID NO: 203658 - DNA, 25 bp, Artificial
  Probe
tgtcctggacagtgttactgatcag

SEQ ID NO: 203659 - DNA, 25 bp, Artificial
  Probe
ttccctcctaaggtcttggagactt

SEQ ID NO: 203660 - DNA, 25 bp, Artificial
  Probe
gacctaccactgttgcggtgctcca

SEQ ID NO: 203661 - DNA, 25 bp, Artificial
  Probe
aaggtcctgaggtgccacctgctcc

SEQ ID NO: 203662 - DNA, 25 bp, Artificial
  Probe
ggacagtgttactgatcaggacagc

SEQ ID NO: 203663 - DNA, 25 bp, Artificial
  Probe
tatcccagagacatcagtgtcaagt

SEQ ID NO: 203664 - DNA, 25 bp, Artificial
  Probe
gaaaccagggcagtctcctaaactg

SEQ ID NO: 203665 - DNA, 25 bp, Artificial
  Probe
ctatacctgtgaggttgttcataag

SEQ ID NO: 203666 - DNA, 25 bp, Artificial
  Probe
cttcaacaggaatgagtgttagacc

SEQ ID NO: 203667 - DNA, 25 bp, Artificial
  Probe
aaacgggctgatgctgcaccaactg

SEQ ID NO: 203668 - DNA, 25 bp, Artificial
  Probe
aaccagggcagtctcctaaactgct

SEQ ID NO: 203669 - DNA, 25 bp, Artificial
  Probe
acgagatggtgtcctggacagtgtt

SEQ ID NO: 203670 - DNA, 25 bp, Artificial
  Probe
ctttccttggctttgatcatgctaa

SEQ ID NO: 203671 - DNA, 25 bp, Artificial
  Probe
gacagcaaagacagcacgtacagca

SEQ ID NO: 203672 - DNA, 25 bp, Artificial
  Probe
tgtcctgaattcatgaagaaactac

SEQ ID NO: 203673 - DNA, 25 bp, Artificial
  Probe
agaatggcgtcataagagggcagcc

SEQ ID NO: 203674 - DNA, 25 bp, Artificial
  Probe
accaaagatccctgacaagcagtta

SEQ ID NO: 203675 - DNA, 25 bp, Artificial
  Probe
aatgtccacagatccgactctggcc

SEQ ID NO: 203676 - DNA, 25 bp, Artificial
  Probe
cacagatccgactctggcctcggat

SEQ ID NO: 203677 - DNA, 25 bp, Artificial
  Probe
taacaaacttaaagccagtcaggcg

SEQ ID NO: 203678 - DNA, 25 bp, Artificial
  Probe
gatccttcagaagcagaggccccac

SEQ ID NO: 203679 - DNA, 25 bp, Artificial
  Probe
tgcagcagtgatcaatggctctcag

SEQ ID NO: 203680 - DNA, 25 bp, Artificial
  Probe
tacaaccaacagtaaggacttacgt

SEQ ID NO: 203681 - DNA, 25 bp, Artificial
  Probe
ctaagaatggcgtcataagagggca

SEQ ID NO: 203682 - DNA, 25 bp, Artificial
  Probe
gtctgtcaatgacatgtcttcaatg

SEQ ID NO: 203683 - DNA, 25 bp, Artificial
  Probe
tagacgaagctctccagcacccgta

SEQ ID NO: 203684 - DNA, 25 bp, Artificial
  Probe
ctatagctttgagaaactgtttcct

SEQ ID NO: 203685 - DNA, 25 bp, Artificial
  Probe
agagggcagccgtctcctttaggtg

SEQ ID NO: 203686 - DNA, 25 bp, Artificial
  Probe
ctggctatagctttgagaaactgtt

SEQ ID NO: 203687 - DNA, 25 bp, Artificial
  Probe
ctttgagaaactgtttcctgatgtg

SEQ ID NO: 203688 - DNA, 25 bp, Artificial
  Probe
gagaaactgtttcctgatgtgcttt

SEQ ID NO: 203689 - DNA, 25 bp, Artificial
  Probe
atctccgtagacgaagctctccagc

SEQ ID NO: 203690 - DNA, 25 bp, Artificial
  Probe
aatgctggtgatagatgcgtccaaa

SEQ ID NO: 203691 - DNA, 25 bp, Artificial
  Probe
cctgacaagcagttagatgaaaggg

SEQ ID NO: 203692 - DNA, 25 bp, Artificial
  Probe
cagtcaggcgagagatttgttatct

SEQ ID NO: 203693 - DNA, 25 bp, Artificial
  Probe
gtgatagatgcgtccaaaaggatct

SEQ ID NO: 203694 - DNA, 25 bp, Artificial
  Probe
gccagtcaggcgagagatttgttat

SEQ ID NO: 203695 - DNA, 25 bp, Artificial
  Probe
ctgatgtgcttttcccagctgactc

SEQ ID NO: 203696 - DNA, 25 bp, Artificial
  Probe
tcctttaggtgcagcagtgatcaat

SEQ ID NO: 203697 - DNA, 25 bp, Artificial
  Probe
aacagacctaagtacgctggctata

SEQ ID NO: 203698 - DNA, 25 bp, Artificial
  Probe
tcataagagggcagccgtctccttt

SEQ ID NO: 203699 - DNA, 25 bp, Artificial
  Probe
agcatccggtctcttcgccgtctgt

SEQ ID NO: 203700 - DNA, 25 bp, Artificial
  Probe
gagggcagccgtctcctttaggtgc

SEQ ID NO: 203701 - DNA, 25 bp, Artificial
  Probe
tggctctcagcatccggtctcttcg

SEQ ID NO: 203702 - DNA, 25 bp, Artificial
  Probe
gtgatcaatggctctcagcatccgg

SEQ ID NO: 203703 - DNA, 25 bp, Artificial
  Probe
tggcgtcataagagggcagccgtct

SEQ ID NO: 203704 - DNA, 25 bp, Artificial
  Probe
tcctgatgtgcttttcccagctgac

SEQ ID NO: 203705 - DNA, 25 bp, Artificial
  Probe
tgacatgtcttcaatgtccacagat

SEQ ID NO: 203706 - DNA, 25 bp, Artificial
  Probe
acagacctaagtacgctggctatag

SEQ ID NO: 203707 - DNA, 25 bp, Artificial
  Probe
cagcacccgtacatcaacgtctggt

SEQ ID NO: 203708 - DNA, 25 bp, Artificial
  Probe
gcttttcccagctgactcagaacat

SEQ ID NO: 203709 - DNA, 25 bp, Artificial
  Probe
ttaaagccagtcaggcgagagattt

SEQ ID NO: 203710 - DNA, 25 bp, Artificial
  Probe
acctaagtacgctggctatagcttt

SEQ ID NO: 203711 - DNA, 25 bp, Artificial
  Probe
gtctcttcgccgtctgtcaatgaca

SEQ ID NO: 203712 - DNA, 25 bp, Artificial
  Probe
cataacaaacttaaagccagtcagg

SEQ ID NO: 203713 - DNA, 25 bp, Artificial
  Probe
atgctggtgatagatgcgtccaaaa

SEQ ID NO: 203714 - DNA, 25 bp, Artificial
  Probe
aagtacgctggctatagctttgaga

SEQ ID NO: 203715 - DNA, 25 bp, Artificial
  Probe
ctacaaccaacagtaaggacttacg

SEQ ID NO: 203716 - DNA, 25 bp, Artificial
  Probe
gtagacgaagctctccagcacccgt

SEQ ID NO: 203717 - DNA, 25 bp, Artificial
  Probe
aaacttaaagccagtcaggcgagag

SEQ ID NO: 203718 - DNA, 25 bp, Artificial
  Probe
tgccttaaaactgtcaggggtacga

SEQ ID NO: 203719 - DNA, 25 bp, Artificial
  Probe
cactactgtggctgaccctgagagt

SEQ ID NO: 203720 - DNA, 25 bp, Artificial
  Probe
aactgtcaggggtacgaaatgtact

SEQ ID NO: 203721 - DNA, 25 bp, Artificial
  Probe
cttggtcattttgttatagatgcac

SEQ ID NO: 203722 - DNA, 25 bp, Artificial
  Probe
ctgccttaaaactgtcaggggtacg

SEQ ID NO: 203723 - DNA, 25 bp, Artificial
  Probe
ccgaagtcatgcagctggcactact

SEQ ID NO: 203724 - DNA, 25 bp, Artificial
  Probe
gttatagatgcaccagtcactacat

SEQ ID NO: 203725 - DNA, 25 bp, Artificial
  Probe
atgaacactgccttaaaactgtcag

SEQ ID NO: 203726 - DNA, 25 bp, Artificial
  Probe
agtcaatcaagactccagcaagaag

SEQ ID NO: 203727 - DNA, 25 bp, Artificial
  Probe
atagatgcaccagtcactacatttg

SEQ ID NO: 203728 - DNA, 25 bp, Artificial
  Probe
cactgccttaaaactgtcaggggta

SEQ ID NO: 203729 - DNA, 25 bp, Artificial
  Probe
ctccagcaagaagctagtaaatggt

SEQ ID NO: 203730 - DNA, 25 bp, Artificial
  Probe
tgtggctgaccctgagagtcaaagt

SEQ ID NO: 203731 - DNA, 25 bp, Artificial
  Probe
gctgaccctgagagtcaaagtgaaa

SEQ ID NO: 203732 - DNA, 25 bp, Artificial
  Probe
gaaatttgcctgagatccctcttgg

SEQ ID NO: 203733 - DNA, 25 bp, Artificial
  Probe
atttgcctgagatccctcttggtca

SEQ ID NO: 203734 - DNA, 25 bp, Artificial
  Probe
accctgagagtcaaagtgaaatttg

SEQ ID NO: 203735 - DNA, 25 bp, Artificial
  Probe
ctactgtggctgaccctgagagtca

SEQ ID NO: 203736 - DNA, 25 bp, Artificial
  Probe
ccccgaagtcatgcagctggcacta

SEQ ID NO: 203737 - DNA, 25 bp, Artificial
  Probe
cactacatttggagtcaatcaagac

SEQ ID NO: 203738 - DNA, 25 bp, Artificial
  Probe
gtcactacatttggagtcaatcaag

SEQ ID NO: 203739 - DNA, 25 bp, Artificial
  Probe
agctggcactactgtggctgaccct

SEQ ID NO: 203740 - DNA, 25 bp, Artificial
  Probe
tccctcttggtcattttgttataga

SEQ ID NO: 203741 - DNA, 25 bp, Artificial
  Probe
tgagatccctcttggtcattttgtt

SEQ ID NO: 203742 - DNA, 25 bp, Artificial
  Probe
gatccagaacatctctcatcactgg

SEQ ID NO: 203743 - DNA, 25 bp, Artificial
  Probe
ctcttggtcattttgttatagatgc

SEQ ID NO: 203744 - DNA, 25 bp, Artificial
  Probe
ttgttatagatgcaccagtcactac

SEQ ID NO: 203745 - DNA, 25 bp, Artificial
  Probe
accagtcactacatttggagtcaat

SEQ ID NO: 203746 - DNA, 25 bp, Artificial
  Probe
ttttgttatagatgcaccagtcact

SEQ ID NO: 203747 - DNA, 25 bp, Artificial
  Probe
ctggcactactgtggctgaccctga

SEQ ID NO: 203748 - DNA, 25 bp, Artificial
  Probe
aacactgccttaaaactgtcagggg

SEQ ID NO: 203749 - DNA, 25 bp, Artificial
  Probe
acatttggagtcaatcaagactcca

SEQ ID NO: 203750 - DNA, 25 bp, Artificial
  Probe
actgccctgttttcatccccaagag

SEQ ID NO: 203751 - DNA, 25 bp, Artificial
  Probe
gccctgttttcatccccaagagatg

SEQ ID NO: 203752 - DNA, 25 bp, Artificial
  Probe
catgcagctggcactactgtggctg

SEQ ID NO: 203753 - DNA, 25 bp, Artificial
  Probe
tttgttatagatgcaccagtcacta

SEQ ID NO: 203754 - DNA, 25 bp, Artificial
  Probe
tgaacactgccttaaaactgtcagg

SEQ ID NO: 203755 - DNA, 25 bp, Artificial
  Probe
gttttcatccccaagagatgattta

SEQ ID NO: 203756 - DNA, 25 bp, Artificial
  Probe
ctgccctgttttcatccccaagaga

SEQ ID NO: 203757 - DNA, 25 bp, Artificial
  Probe
atgcagctggcactactgtggctga

SEQ ID NO: 203758 - DNA, 25 bp, Artificial
  Probe
gtggctgaccctgagagtcaaagtg

SEQ ID NO: 203759 - DNA, 25 bp, Artificial
  Probe
ctacatttggagtcaatcaagactc

SEQ ID NO: 203760 - DNA, 25 bp, Artificial
  Probe
aagactccagcaagaagctagtaaa

SEQ ID NO: 203761 - DNA, 25 bp, Artificial
  Probe
gcctgagatccctcttggtcatttt

SEQ ID NO: 203762 - DNA, 25 bp, Artificial
  Probe
tggagtcaatcaagactccagcaag

SEQ ID NO: 203763 - DNA, 25 bp, Artificial
  Probe
tgaaatttgcctgagatccctcttg

SEQ ID NO: 203764 - DNA, 25 bp, Artificial
  Probe
tggactcgcccgtgccttttaactc

SEQ ID NO: 203765 - DNA, 25 bp, Artificial
  Probe
gggaactcctacagagctggctctg

SEQ ID NO: 203766 - DNA, 25 bp, Artificial
  Probe
tctgccagacctgtgcgaccggagg

SEQ ID NO: 203767 - DNA, 25 bp, Artificial
  Probe
tacagagctggctctgagaaacgtc

SEQ ID NO: 203768 - DNA, 25 bp, Artificial
  Probe
gcgaccggaggactaggaagcctac

SEQ ID NO: 203769 - DNA, 25 bp, Artificial
  Probe
cagacctgtgcgaccggaggactag

SEQ ID NO: 203770 - DNA, 25 bp, Artificial
  Probe
aaagcctgtttattctaactctggt

SEQ ID NO: 203771 - DNA, 25 bp, Artificial
  Probe
acacgggttaacttgatagtctggg

SEQ ID NO: 203772 - DNA, 25 bp, Artificial
  Probe
agtctggggatctggttttggactc

SEQ ID NO: 203773 - DNA, 25 bp, Artificial
  Probe
gtcttctgccagacctgtgcgaccg

SEQ ID NO: 203774 - DNA, 25 bp, Artificial
  Probe
agaagcaggtcttctgccagacctg

SEQ ID NO: 203775 - DNA, 25 bp, Artificial
  Probe
tgtctttgggtaaagccaagttatc

SEQ ID NO: 203776 - DNA, 25 bp, Artificial
  Probe
tctggggatctggttttggactcgc

SEQ ID NO: 203777 - DNA, 25 bp, Artificial
  Probe
cctctggctcccaaagaggggtaat

SEQ ID NO: 203778 - DNA, 25 bp, Artificial
  Probe
ctaactctggttttcttggtgtcgt

SEQ ID NO: 203779 - DNA, 25 bp, Artificial
  Probe
cgacacgggttaacttgatagtctg

SEQ ID NO: 203780 - DNA, 25 bp, Artificial
  Probe
ggctctgagaaacgtctgaggccat

SEQ ID NO: 203781 - DNA, 25 bp, Artificial
  Probe
gggcgacacgggttaacttgatagt

SEQ ID NO: 203782 - DNA, 25 bp, Artificial
  Probe
ggaagcctactctgacatcttcctc

SEQ ID NO: 203783 - DNA, 25 bp, Artificial
  Probe
tctggctcccaaagaggggtaataa

SEQ ID NO: 203784 - DNA, 25 bp, Artificial
  Probe
agagctggctctgagaaacgtctga

SEQ ID NO: 203785 - DNA, 25 bp, Artificial
  Probe
ctggttttggactcgcccgtgcctt

SEQ ID NO: 203786 - DNA, 25 bp, Artificial
  Probe
tggctcccaaagaggggtaataatg

SEQ ID NO: 203787 - DNA, 25 bp, Artificial
  Probe
actaggaagcctactctgacatctt

SEQ ID NO: 203788 - DNA, 25 bp, Artificial
  Probe
gaactcctacagagctggctctgag

SEQ ID NO: 203789 - DNA, 25 bp, Artificial
  Probe
ctgccagacctgtgcgaccggagga

SEQ ID NO: 203790 - DNA, 25 bp, Artificial
  Probe
aggtcttctgccagacctgtgcgac

SEQ ID NO: 203791 - DNA, 25 bp, Artificial
  Probe
ctggctctgagaaacgtctgaggcc

SEQ ID NO: 203792 - DNA, 25 bp, Artificial
  Probe
caagaagcaggtcttctgccagacc

SEQ ID NO: 203793 - DNA, 25 bp, Artificial
  Probe
gctggctctgagaaacgtctgaggc

SEQ ID NO: 203794 - DNA, 25 bp, Artificial
  Probe
ggatctggttttggactcgcccgtg

SEQ ID NO: 203795 - DNA, 25 bp, Artificial
  Probe
gggatctggttttggactcgcccgt

SEQ ID NO: 203796 - DNA, 25 bp, Artificial
  Probe
gcaagaagcaggtcttctgccagac

SEQ ID NO: 203797 - DNA, 25 bp, Artificial
  Probe
aagcctgtttattctaactctggtt

SEQ ID NO: 203798 - DNA, 25 bp, Artificial
  Probe
tggggatctggttttggactcgccc

SEQ ID NO: 203799 - DNA, 25 bp, Artificial
  Probe
tctaactctggttttcttggtgtcg

SEQ ID NO: 203800 - DNA, 25 bp, Artificial
  Probe
tctgagaaacgtctgaggccattcg

SEQ ID NO: 203801 - DNA, 25 bp, Artificial
  Probe
tctatctttctttccaggctgctgc

SEQ ID NO: 203802 - DNA, 25 bp, Artificial
  Probe
ggtaaagccaagttatcccataagc

SEQ ID NO: 203803 - DNA, 25 bp, Artificial
  Probe
ctctatctttctttccaggctgctg

SEQ ID NO: 203804 - DNA, 25 bp, Artificial
  Probe
aagcaggtcttctgccagacctgtg

SEQ ID NO: 203805 - DNA, 25 bp, Artificial
  Probe
agcctgtttattctaactctggttt

SEQ ID NO: 203806 - DNA, 25 bp, Artificial
  Probe
ggcgacacgggttaacttgatagtc

SEQ ID NO: 203807 - DNA, 25 bp, Artificial
  Probe
gactaggaagcctactctgacatct

SEQ ID NO: 203808 - DNA, 25 bp, Artificial
  Probe
gagaaacgtctgaggccattcggtt

SEQ ID NO: 203809 - DNA, 25 bp, Artificial
  Probe
gggggaactcctacagagctggctc

SEQ ID NO: 203810 - DNA, 25 bp, Artificial
  Probe
attccttggtgttgctgagcagtta

SEQ ID NO: 203811 - DNA, 25 bp, Artificial
  Probe
ttaagatacctcagaagggcattct

SEQ ID NO: 203812 - DNA, 25 bp, Artificial
  Probe
ccaagattccttggtgttgctgagc

SEQ ID NO: 203813 - DNA, 25 bp, Artificial
  Probe
tcattccgtccaagattccttggtg

SEQ ID NO: 203814 - DNA, 25 bp, Artificial
  Probe
attgctctgctcaccaatttccagg

SEQ ID NO: 203815 - DNA, 25 bp, Artificial
  Probe
cccgactgagggatgctgatcctat

SEQ ID NO: 203816 - DNA, 25 bp, Artificial
  Probe
gacagctgtggacagtggaattgct

SEQ ID NO: 203817 - DNA, 25 bp, Artificial
  Probe
gccatctcaggaaggacagaatccc

SEQ ID NO: 203818 - DNA, 25 bp, Artificial
  Probe
acagctgtggacagtggaattgctc

SEQ ID NO: 203819 - DNA, 25 bp, Artificial
  Probe
cagaagccacatcagactggctcaa

SEQ ID NO: 203820 - DNA, 25 bp, Artificial
  Probe
aagctttttgccacagaagccacat

SEQ ID NO: 203821 - DNA, 25 bp, Artificial
  Probe
agatacctcagaagggcattctgat

SEQ ID NO: 203822 - DNA, 25 bp, Artificial
  Probe
agggatgctgatcctattctgagat

SEQ ID NO: 203823 - DNA, 25 bp, Artificial
  Probe
tccgtccaagattccttggtgttgc

SEQ ID NO: 203824 - DNA, 25 bp, Artificial
  Probe
agtggcttggccatctcaggaagga

SEQ ID NO: 203825 - DNA, 25 bp, Artificial
  Probe
tttttgccacagaagccacatcaga

SEQ ID NO: 203826 - DNA, 25 bp, Artificial
  Probe
ggatgctgatcctattctgagatgt

SEQ ID NO: 203827 - DNA, 25 bp, Artificial
  Probe
agctgtggacagtggaattgctctg

SEQ ID NO: 203828 - DNA, 25 bp, Artificial
  Probe
ggtttaagatacctcagaagggcat

SEQ ID NO: 203829 - DNA, 25 bp, Artificial
  Probe
attccgtccaagattccttggtgtt

SEQ ID NO: 203830 - DNA, 25 bp, Artificial
  Probe
gtttaagatacctcagaagggcatt

SEQ ID NO: 203831 - DNA, 25 bp, Artificial
  Probe
atcctattctgagatgtgagatggc

SEQ ID NO: 203832 - DNA, 25 bp, Artificial
  Probe
agattccttggtgttgctgagcagt

SEQ ID NO: 203833 - DNA, 25 bp, Artificial
  Probe
tggcttggccatctcaggaaggaca

SEQ ID NO: 203834 - DNA, 25 bp, Artificial
  Probe
acagtggaattgctctgctcaccaa

SEQ ID NO: 203835 - DNA, 25 bp, Artificial
  Probe
tccaagattccttggtgttgctgag

SEQ ID NO: 203836 - DNA, 25 bp, Artificial
  Probe
actgagggatgctgatcctattctg

SEQ ID NO: 203837 - DNA, 25 bp, Artificial
  Probe
ctcagaagggcattctgattggcat

SEQ ID NO: 203838 - DNA, 25 bp, Artificial
  Probe
aagccacatcagactggctcaacgc

SEQ ID NO: 203839 - DNA, 25 bp, Artificial
  Probe
tggaattgctctgctcaccaatttc

SEQ ID NO: 203840 - DNA, 25 bp, Artificial
  Probe
catcagactggctcaacgccaacaa

SEQ ID NO: 203841 - DNA, 25 bp, Artificial
  Probe
tggctcaacgccaacaatgttcctg

SEQ ID NO: 203842 - DNA, 25 bp, Artificial
  Probe
cgactgagggatgctgatcctattc

SEQ ID NO: 203843 - DNA, 25 bp, Artificial
  Probe
cctattctgagatgtgagatggctt

SEQ ID NO: 203844 - DNA, 25 bp, Artificial
  Probe
accccagtggcttggccatctcagg

SEQ ID NO: 203845 - DNA, 25 bp, Artificial
  Probe
gccacagaagccacatcagactggc

SEQ ID NO: 203846 - DNA, 25 bp, Artificial
  Probe
ccatctcaggaaggacagaatccca

SEQ ID NO: 203847 - DNA, 25 bp, Artificial
  Probe
ctgagggatgctgatcctattctga

SEQ ID NO: 203848 - DNA, 25 bp, Artificial
  Probe
gaagccacatcagactggctcaacg

SEQ ID NO: 203849 - DNA, 25 bp, Artificial
  Probe
ggctcaacgccaacaatgttcctgc

SEQ ID NO: 203850 - DNA, 25 bp, Artificial
  Probe
ctgatcctattctgagatgtgagat

SEQ ID NO: 203851 - DNA, 25 bp, Artificial
  Probe
agtggaattgctctgctcaccaatt

SEQ ID NO: 203852 - DNA, 25 bp, Artificial
  Probe
cagaagggcattctgattggcatcc

SEQ ID NO: 203853 - DNA, 25 bp, Artificial
  Probe
tggccatctcaggaaggacagaatc

SEQ ID NO: 203854 - DNA, 25 bp, Artificial
  Probe
ttttgccacagaagccacatcagac

SEQ ID NO: 203855 - DNA, 25 bp, Artificial
  Probe
cagactggctcaacgccaacaatgt

SEQ ID NO: 203856 - DNA, 25 bp, Artificial
  Probe
tgcctcttttgttgccgtaagactg

SEQ ID NO: 203857 - DNA, 25 bp, Artificial
  Probe
agctactgtagttcataaagttcac

SEQ ID NO: 203858 - DNA, 25 bp, Artificial
  Probe
gagatgagcctctgccagctgcttc

SEQ ID NO: 203859 - DNA, 25 bp, Artificial
  Probe
caacaataactgaagctactgtagt

SEQ ID NO: 203860 - DNA, 25 bp, Artificial
  Probe
aagacatgcaagatttcatgccaaa

SEQ ID NO: 203861 - DNA, 25 bp, Artificial
  Probe
cctattgctctgtgtggtaggtgtg

SEQ ID NO: 203862 - DNA, 25 bp, Artificial
  Probe
agaagacagcgttgggacctcattg

SEQ ID NO: 203863 - DNA, 25 bp, Artificial
  Probe
aaattctgcctcttttgttgccgta

SEQ ID NO: 203864 - DNA, 25 bp, Artificial
  Probe
ctctgcatgaccttagctggttcca

SEQ ID NO: 203865 - DNA, 25 bp, Artificial
  Probe
gttgtcatgccagtgccttccctct

SEQ ID NO: 203866 - DNA, 25 bp, Artificial
  Probe
cgtaagactgctaacatgggaaaga

SEQ ID NO: 203867 - DNA, 25 bp, Artificial
  Probe
gctgagaagctttgcccaacaacaa

SEQ ID NO: 203868 - DNA, 25 bp, Artificial
  Probe
ctgaagctactgtagttcataaagt

SEQ ID NO: 203869 - DNA, 25 bp, Artificial
  Probe
ccctgagagatgagcctctgccagc

SEQ ID NO: 203870 - DNA, 25 bp, Artificial
  Probe
tagctgagaagctttgcccaacaac

SEQ ID NO: 203871 - DNA, 25 bp, Artificial
  Probe
atcataaaggctgaagcagagccct

SEQ ID NO: 203872 - DNA, 25 bp, Artificial
  Probe
tgttctgaagacatgcaagatttca

SEQ ID NO: 203873 - DNA, 25 bp, Artificial
  Probe
gatgtcattgggttcctattgctct

SEQ ID NO: 203874 - DNA, 25 bp, Artificial
  Probe
gctccaatgaattcactatgttctg

SEQ ID NO: 203875 - DNA, 25 bp, Artificial
  Probe
gttcataaagttcacatggctttat

SEQ ID NO: 203876 - DNA, 25 bp, Artificial
  Probe
aggaacctgttgtcatgccagtgcc

SEQ ID NO: 203877 - DNA, 25 bp, Artificial
  Probe
tgccttccctctaaaagaagacagc

SEQ ID NO: 203878 - DNA, 25 bp, Artificial
  Probe
aacctgttgtcatgccagtgccttc

SEQ ID NO: 203879 - DNA, 25 bp, Artificial
  Probe
cctcattgaacatggctccaatgaa

SEQ ID NO: 203880 - DNA, 25 bp, Artificial
  Probe
tccgctcaactctgcatgaccttag

SEQ ID NO: 203881 - DNA, 25 bp, Artificial
  Probe
ccctctaaaagaagacagcgttggg

SEQ ID NO: 203882 - DNA, 25 bp, Artificial
  Probe
gaagcagagccctgagagatgagcc

SEQ ID NO: 203883 - DNA, 25 bp, Artificial
  Probe
aggctgaagcagagccctgagagat

SEQ ID NO: 203884 - DNA, 25 bp, Artificial
  Probe
acatggctttatagcctttgcaaaa

SEQ ID NO: 203885 - DNA, 25 bp, Artificial
  Probe
aaaggctgaagcagagccctgagag

SEQ ID NO: 203886 - DNA, 25 bp, Artificial
  Probe
gacagcgttgggacctcattgaaca

SEQ ID NO: 203887 - DNA, 25 bp, Artificial
  Probe
gaacatggctccaatgaattcacta

SEQ ID NO: 203888 - DNA, 25 bp, Artificial
  Probe
tagttcataaagttcacatggcttt

SEQ ID NO: 203889 - DNA, 25 bp, Artificial
  Probe
aagctactgtagttcataaagttca

SEQ ID NO: 203890 - DNA, 25 bp, Artificial
  Probe
gtgtggtattcatcatcacaaaatt

SEQ ID NO: 203891 - DNA, 25 bp, Artificial
  Probe
aaaggagccaagcacctccgctcaa

SEQ ID NO: 203892 - DNA, 25 bp, Artificial
  Probe
agttcacatggctttatagcctttg

SEQ ID NO: 203893 - DNA, 25 bp, Artificial
  Probe
caataactgaagctactgtagttca

SEQ ID NO: 203894 - DNA, 25 bp, Artificial
  Probe
aactgaagctactgtagttcataaa

SEQ ID NO: 203895 - DNA, 25 bp, Artificial
  Probe
ggctttatagcctttgcaaaacata

SEQ ID NO: 203896 - DNA, 25 bp, Artificial
  Probe
catcataaaggctgaagcagagccc

SEQ ID NO: 203897 - DNA, 25 bp, Artificial
  Probe
acaacaataactgaagctactgtag

SEQ ID NO: 203898 - DNA, 25 bp, Artificial
  Probe
cttttgttgccgtaagactgctaac

SEQ ID NO: 203899 - DNA, 25 bp, Artificial
  Probe
gagagatgagcctctgccagctgct

SEQ ID NO: 203900 - DNA, 25 bp, Artificial
  Probe
agtagcatcataaaggctgaagcag

SEQ ID NO: 203901 - DNA, 25 bp, Artificial
  Probe
ccaatgaattcactatgttctgaag

SEQ ID NO: 203902 - DNA, 25 bp, Artificial
  Probe
gttattgatgctctgctttgcagga

SEQ ID NO: 203903 - DNA, 25 bp, Artificial
  Probe
actcagaatggacatgagggcccat

SEQ ID NO: 203904 - DNA, 25 bp, Artificial
  Probe
tggcagattatcactgtctacagta

SEQ ID NO: 203905 - DNA, 25 bp, Artificial
  Probe
atctcctaggcgtttgatttatctt

SEQ ID NO: 203906 - DNA, 25 bp, Artificial
  Probe
catgtctgtgtctctgggagacaca

SEQ ID NO: 203907 - DNA, 25 bp, Artificial
  Probe
tcagaactcagaatggacatgaggg

SEQ ID NO: 203908 - DNA, 25 bp, Artificial
  Probe
tctctcaccatcagcagcctggagt

SEQ ID NO: 203909 - DNA, 25 bp, Artificial
  Probe
accagggaaatctcctaggcgtttg

SEQ ID NO: 203910 - DNA, 25 bp, Artificial
  Probe
ctccatgtctgtgtctctgggagac

SEQ ID NO: 203911 - DNA, 25 bp, Artificial
  Probe
aggttcagcggcagtaagtctggat

SEQ ID NO: 203912 - DNA, 25 bp, Artificial
  Probe
taggcgtttgatttatcttgcaacg

SEQ ID NO: 203913 - DNA, 25 bp, Artificial
  Probe
tattctctcaccatcagcagcctgg

SEQ ID NO: 203914 - DNA, 25 bp, Artificial
  Probe
agccagatgcgacattcagatgacc

SEQ ID NO: 203915 - DNA, 25 bp, Artificial
  Probe
cgtttgatttatcttgcaacgacct

SEQ ID NO: 203916 - DNA, 25 bp, Artificial
  Probe
atgtggcagattatcactgtctaca

SEQ ID NO: 203917 - DNA, 25 bp, Artificial
  Probe
ccttgccgggcaagtcaggacgttg

SEQ ID NO: 203918 - DNA, 25 bp, Artificial
  Probe
ctgctttgcaggagccagatgcgac

SEQ ID NO: 203919 - DNA, 25 bp, Artificial
  Probe
gtttcttgggttattgatgctctgc

SEQ ID NO: 203920 - DNA, 25 bp, Artificial
  Probe
agaatggacatgagggcccatgctc

SEQ ID NO: 203921 - DNA, 25 bp, Artificial
  Probe
cagtttcttgggttattgatgctct

SEQ ID NO: 203922 - DNA, 25 bp, Artificial
  Probe
gggaaatctcctaggcgtttgattt

SEQ ID NO: 203923 - DNA, 25 bp, Artificial
  Probe
catgctcagtttcttgggttattga

SEQ ID NO: 203924 - DNA, 25 bp, Artificial
  Probe
gcaggagccagatgcgacattcaga

SEQ ID NO: 203925 - DNA, 25 bp, Artificial
  Probe
catcctccatgtctgtgtctctggg

SEQ ID NO: 203926 - DNA, 25 bp, Artificial
  Probe
tcctccatgtctgtgtctctgggag

SEQ ID NO: 203927 - DNA, 25 bp, Artificial
  Probe
ctctgctttgcaggagccagatgcg

SEQ ID NO: 203928 - DNA, 25 bp, Artificial
  Probe
tttatcttgcaacgaccttggcaga

SEQ ID NO: 203929 - DNA, 25 bp, Artificial
  Probe
gcagattatcactgtctacagtata

SEQ ID NO: 203930 - DNA, 25 bp, Artificial
  Probe
tctgggagacacagtcactattcct

SEQ ID NO: 203931 - DNA, 25 bp, Artificial
  Probe
ttatcactgtctacagtataatgag

SEQ ID NO: 203932 - DNA, 25 bp, Artificial
  Probe
tccatcctccatgtctgtgtctctg

SEQ ID NO: 203933 - DNA, 25 bp, Artificial
  Probe
cagcggcagtaagtctggatcagat

SEQ ID NO: 203934 - DNA, 25 bp, Artificial
  Probe
tgctctgctttgcaggagccagatg

SEQ ID NO: 203935 - DNA, 25 bp, Artificial
  Probe
tccttgccgggcaagtcaggacgtt

SEQ ID NO: 203936 - DNA, 25 bp, Artificial
  Probe
tgggttattgatgctctgctttgca

SEQ ID NO: 203937 - DNA, 25 bp, Artificial
  Probe
gtcactattccttgccgggcaagtc

SEQ ID NO: 203938 - DNA, 25 bp, Artificial
  Probe
acatgagggcccatgctcagtttct

SEQ ID NO: 203939 - DNA, 25 bp, Artificial
  Probe
tttgcaggagccagatgcgacattc

SEQ ID NO: 203940 - DNA, 25 bp, Artificial
  Probe
tgtaatctggttccagcagaaacca

SEQ ID NO: 203941 - DNA, 25 bp, Artificial
  Probe
attgatgctctgctttgcaggagcc

SEQ ID NO: 203942 - DNA, 25 bp, Artificial
  Probe
cttgggttattgatgctctgctttg

SEQ ID NO: 203943 - DNA, 25 bp, Artificial
  Probe
atttatgtaatctggttccagcaga

SEQ ID NO: 203944 - DNA, 25 bp, Artificial
  Probe
gatgctctgctttgcaggagccaga

SEQ ID NO: 203945 - DNA, 25 bp, Artificial
  Probe
attctctcaccatcagcagcctgga

SEQ ID NO: 203946 - DNA, 25 bp, Artificial
  Probe
cctaggcgtttgatttatcttgcaa

SEQ ID NO: 203947 - DNA, 25 bp, Artificial
  Probe
agtcagaactcagaatggacatgag

SEQ ID NO: 203948 - DNA, 25 bp, Artificial
  Probe
ctcaagttgcccaatgaggccaatt

SEQ ID NO: 203949 - DNA, 25 bp, Artificial
  Probe
gggaagtacgaccatgcttcagtct

SEQ ID NO: 203950 - DNA, 25 bp, Artificial
  Probe
atgggagttctctccgatgtctcct

SEQ ID NO: 203951 - DNA, 25 bp, Artificial
  Probe
tagggtggcttatgggtccaccctt

SEQ ID NO: 203952 - DNA, 25 bp, Artificial
  Probe
aacaggctatcaagtcttagctatc

SEQ ID NO: 203953 - DNA, 25 bp, Artificial
  Probe
gagttctctccgatgtctcctaggt

SEQ ID NO: 203954 - DNA, 25 bp, Artificial
  Probe
caccagaatttggtaagttgacata

SEQ ID NO: 203955 - DNA, 25 bp, Artificial
  Probe
ttgacatactctaagatgtagacca

SEQ ID NO: 203956 - DNA, 25 bp, Artificial
  Probe
gcttatgggtccacccttccaatca

SEQ ID NO: 203957 - DNA, 25 bp, Artificial
  Probe
atacaggattgcatcaaaagttgca

SEQ ID NO: 203958 - DNA, 25 bp, Artificial
  Probe
aattggccaaacaggctatcaagtc

SEQ ID NO: 203959 - DNA, 25 bp, Artificial
  Probe
agttgcccaatgaggccaattggcc

SEQ ID NO: 203960 - DNA, 25 bp, Artificial
  Probe
cagaactcaagttgccctgtgaaaa

SEQ ID NO: 203961 - DNA, 25 bp, Artificial
  Probe
gtgaaaactcaagttgcccaatgag

SEQ ID NO: 203962 - DNA, 25 bp, Artificial
  Probe
taatagggtggcttatgggtccacc

SEQ ID NO: 203963 - DNA, 25 bp, Artificial
  Probe
ccctgtgaaaactcaagttgcccaa

SEQ ID NO: 203964 - DNA, 25 bp, Artificial
  Probe
gtggcttatgggtccacccttccaa

SEQ ID NO: 203965 - DNA, 25 bp, Artificial
  Probe
ggccaattggccaaacaggctatca

SEQ ID NO: 203966 - DNA, 25 bp, Artificial
  Probe
caggtcaccagaatttggtaagttg

SEQ ID NO: 203967 - DNA, 25 bp, Artificial
  Probe
attgcatcaaaagttgcaaatcctg

SEQ ID NO: 203968 - DNA, 25 bp, Artificial
  Probe
atcaaaagttgcaaatcctggaatt

SEQ ID NO: 203969 - DNA, 25 bp, Artificial
  Probe
gatagaatgtactgccacaggtcac

SEQ ID NO: 203970 - DNA, 25 bp, Artificial
  Probe
accatgtacaagtggaatgtttgca

SEQ ID NO: 203971 - DNA, 25 bp, Artificial
  Probe
aagttccaatcctattaatagggtg

SEQ ID NO: 203972 - DNA, 25 bp, Artificial
  Probe
ctcaagttgccctgtgaaaactcaa

SEQ ID NO: 203973 - DNA, 25 bp, Artificial
  Probe
aaatcagaactcaagttgccctgtg

SEQ ID NO: 203974 - DNA, 25 bp, Artificial
  Probe
aggccaatgggagttctctccgatg

SEQ ID NO: 203975 - DNA, 25 bp, Artificial
  Probe
ggtcaccagaatttggtaagttgac

SEQ ID NO: 203976 - DNA, 25 bp, Artificial
  Probe
catactctaagatgtagaccatgta

SEQ ID NO: 203977 - DNA, 25 bp, Artificial
  Probe
gaggccaatgggagttctctccgat

SEQ ID NO: 203978 - DNA, 25 bp, Artificial
  Probe
tcctaggtgacaggtcaaaaagttc

SEQ ID NO: 203979 - DNA, 25 bp, Artificial
  Probe
aatgaggccaattggccaaacaggc

SEQ ID NO: 203980 - DNA, 25 bp, Artificial
  Probe
cccaagactcagaaggtaagctggt

SEQ ID NO: 203981 - DNA, 25 bp, Artificial
  Probe
ctggacaatctgatacttggaagat

SEQ ID NO: 203982 - DNA, 25 bp, Artificial
  Probe
ggccaaacaggctatcaagtcttag

SEQ ID NO: 203983 - DNA, 25 bp, Artificial
  Probe
ttgcactaagtaactgttagacaag

SEQ ID NO: 203984 - DNA, 25 bp, Artificial
  Probe
tgtttgcactaagtaactgttagac

SEQ ID NO: 203985 - DNA, 25 bp, Artificial
  Probe
ctctaagatgtagaccatgtacaag

SEQ ID NO: 203986 - DNA, 25 bp, Artificial
  Probe
caatcctattaatagggtggcttat

SEQ ID NO: 203987 - DNA, 25 bp, Artificial
  Probe
gaccatgtacaagtggaatgtttgc

SEQ ID NO: 203988 - DNA, 25 bp, Artificial
  Probe
ggctatcaagtcttagctatcaata

SEQ ID NO: 203989 - DNA, 25 bp, Artificial
  Probe
cagtctctgttgtatgtggtgcagg

SEQ ID NO: 203990 - DNA, 25 bp, Artificial
  Probe
gaatgtactgccacaggtcaccaga

SEQ ID NO: 203991 - DNA, 25 bp, Artificial
  Probe
cccaatgaggccaattggccaaaca

SEQ ID NO: 203992 - DNA, 25 bp, Artificial
  Probe
tgaaaactcaagttgcccaatgagg

SEQ ID NO: 203993 - DNA, 25 bp, Artificial
  Probe
actcccctggacaatctgatacttg

SEQ ID NO: 203994 - DNA, 25 bp, Artificial
  Probe
tgcagttccagaagacgcggtgccc

SEQ ID NO: 203995 - DNA, 25 bp, Artificial
  Probe
accctggctacacaggacagttgga

SEQ ID NO: 203996 - DNA, 25 bp, Artificial
  Probe
cacggctgctgacaaggccgatgag

SEQ ID NO: 203997 - DNA, 25 bp, Artificial
  Probe
tccaccggctgcttgtctgtttgtt

SEQ ID NO: 203998 - DNA, 25 bp, Artificial
  Probe
tgagagccaggctcccactgcagtt

SEQ ID NO: 203999 - DNA, 25 bp, Artificial
  Probe
acacaggacagttggaaaagcgtct

SEQ ID NO: 204000 - DNA, 25 bp, Artificial
  Probe
aagcgtctttaagaggctcgttgat

SEQ ID NO: 204001 - DNA, 25 bp, Artificial
  Probe
actgcagttccagaagacgcggtgc

SEQ ID NO: 204002 - DNA, 25 bp, Artificial
  Probe
aagatgagagccaggctcccactgc

SEQ ID NO: 204003 - DNA, 25 bp, Artificial
  Probe
aaagcgtctttaagaggctcgttga

SEQ ID NO: 204004 - DNA, 25 bp, Artificial
  Probe
ggccaggcacaagaccctggctaca

SEQ ID NO: 204005 - DNA, 25 bp, Artificial
  Probe
ccctggctacacaggacagttggaa

SEQ ID NO: 204006 - DNA, 25 bp, Artificial
  Probe
ccggctgcttgtctgtttgtttatc

SEQ ID NO: 204007 - DNA, 25 bp, Artificial
  Probe
caagaccctggctacacaggacagt

SEQ ID NO: 204008 - DNA, 25 bp, Artificial
  Probe
tgtccaccggctgcttgtctgtttg

SEQ ID NO: 204009 - DNA, 25 bp, Artificial
  Probe
cccactgcagttccagaagacgcgg

SEQ ID NO: 204010 - DNA, 25 bp, Artificial
  Probe
tccacggctgctgacaaggccgatg

SEQ ID NO: 204011 - DNA, 25 bp, Artificial
  Probe
agaccctggctacacaggacagttg

SEQ ID NO: 204012 - DNA, 25 bp, Artificial
  Probe
caccggctgcttgtctgtttgttta

SEQ ID NO: 204013 - DNA, 25 bp, Artificial
  Probe
gctcccactgcagttccagaagacg

SEQ ID NO: 204014 - DNA, 25 bp, Artificial
  Probe
ctggctacacaggacagttggaaaa

SEQ ID NO: 204015 - DNA, 25 bp, Artificial
  Probe
gctcttctgtccaccggctgcttgt

SEQ ID NO: 204016 - DNA, 25 bp, Artificial
  Probe
cagaagacgcggtgccctccgtttc

SEQ ID NO: 204017 - DNA, 25 bp, Artificial
  Probe
aaagggccaggcacaagaccctggc

SEQ ID NO: 204018 - DNA, 25 bp, Artificial
  Probe
cactgcagttccagaagacgcggtg

SEQ ID NO: 204019 - DNA, 25 bp, Artificial
  Probe
ccaccggctgcttgtctgtttgttt

SEQ ID NO: 204020 - DNA, 25 bp, Artificial
  Probe
gggccaggcacaagaccctggctac

SEQ ID NO: 204021 - DNA, 25 bp, Artificial
  Probe
ggctcccactgcagttccagaagac

SEQ ID NO: 204022 - DNA, 25 bp, Artificial
  Probe
gctacacaggacagttggaaaagcg

SEQ ID NO: 204023 - DNA, 25 bp, Artificial
  Probe
ctgcagttccagaagacgcggtgcc

SEQ ID NO: 204024 - DNA, 25 bp, Artificial
  Probe
agggccaggcacaagaccctggcta

SEQ ID NO: 204025 - DNA, 25 bp, Artificial
  Probe
ggcacaagaccctggctacacagga

SEQ ID NO: 204026 - DNA, 25 bp, Artificial
  Probe
gaccctggctacacaggacagttgg

SEQ ID NO: 204027 - DNA, 25 bp, Artificial
  Probe
accggctgcttgtctgtttgtttat

SEQ ID NO: 204028 - DNA, 25 bp, Artificial
  Probe
ggaaaagcgtctttaagaggctcgt

SEQ ID NO: 204029 - DNA, 25 bp, Artificial
  Probe
ggctacacaggacagttggaaaagc

SEQ ID NO: 204030 - DNA, 25 bp, Artificial
  Probe
tcccactgcagttccagaagacgcg

SEQ ID NO: 204031 - DNA, 25 bp, Artificial
  Probe
ccactgcagttccagaagacgcggt

SEQ ID NO: 204032 - DNA, 25 bp, Artificial
  Probe
tacacaggacagttggaaaagcgtc

SEQ ID NO: 204033 - DNA, 25 bp, Artificial
  Probe
tggctacacaggacagttggaaaag

SEQ ID NO: 204034 - DNA, 25 bp, Artificial
  Probe
ctacacaggacagttggaaaagcgt

SEQ ID NO: 204035 - DNA, 25 bp, Artificial
  Probe
gcagttccagaagacgcggtgccct

SEQ ID NO: 204036 - DNA, 25 bp, Artificial
  Probe
ctgtccaccggctgcttgtctgttt

SEQ ID NO: 204037 - DNA, 25 bp, Artificial
  Probe
agcgtctttaagaggctcgttgatt

SEQ ID NO: 204038 - DNA, 25 bp, Artificial
  Probe
aggctcccactgcagttccagaaga

SEQ ID NO: 204039 - DNA, 25 bp, Artificial
  Probe
ccacggctgctgacaaggccgatga

SEQ ID NO: 204040 - DNA, 25 bp, Artificial
  Probe
gggtttacacctcttgcctggtgaa

SEQ ID NO: 204041 - DNA, 25 bp, Artificial
  Probe
gagaactttgtgggaaagggcaatt

SEQ ID NO: 204042 - DNA, 25 bp, Artificial
  Probe
ataggaaaagagcacccccaatact

SEQ ID NO: 204043 - DNA, 25 bp, Artificial
  Probe
cttgcctggtgaaaacctgtggtaa

SEQ ID NO: 204044 - DNA, 25 bp, Artificial
  Probe
caaattgccatatagggggtgacta

SEQ ID NO: 204045 - DNA, 25 bp, Artificial
  Probe
tgccatatagggggtgactaccaaa

SEQ ID NO: 204046 - DNA, 25 bp, Artificial
  Probe
gcccaaattgccatatagggggtga

SEQ ID NO: 204047 - DNA, 25 bp, Artificial
  Probe
tgcctggtgaaaacctgtggtaaac

SEQ ID NO: 204048 - DNA, 25 bp, Artificial
  Probe
cccccggcccaaattgccatatagg

SEQ ID NO: 204049 - DNA, 25 bp, Artificial
  Probe
cccaaattgccatatagggggtgac

SEQ ID NO: 204050 - DNA, 25 bp, Artificial
  Probe
ggtgactaccaaaaactgcgccggg

SEQ ID NO: 204051 - DNA, 25 bp, Artificial
  Probe
tgcgccggggtttacacctcttgcc

SEQ ID NO: 204052 - DNA, 25 bp, Artificial
  Probe
cggggtttacacctcttgcctggtg

SEQ ID NO: 204053 - DNA, 25 bp, Artificial
  Probe
ctcttgcctggtgaaaacctgtggt

SEQ ID NO: 204054 - DNA, 25 bp, Artificial
  Probe
cgccggggtttacacctcttgcctg

SEQ ID NO: 204055 - DNA, 25 bp, Artificial
  Probe
tgaaaacctgtggtaaaccacataa

SEQ ID NO: 204056 - DNA, 25 bp, Artificial
  Probe
gaaaagagcacccccaatactcttt

SEQ ID NO: 204057 - DNA, 25 bp, Artificial
  Probe
gtaaaccacataaaacgctttcgct

SEQ ID NO: 204058 - DNA, 25 bp, Artificial
  Probe
ccaaattgccatatagggggtgact

SEQ ID NO: 204059 - DNA, 25 bp, Artificial
  Probe
acacctcttgcctggtgaaaacctg

SEQ ID NO: 204060 - DNA, 25 bp, Artificial
  Probe
ggaaaagagcacccccaatactctt

SEQ ID NO: 204061 - DNA, 25 bp, Artificial
  Probe
attgccatatagggggtgactacca

SEQ ID NO: 204062 - DNA, 25 bp, Artificial
  Probe
ctgcgccggggtttacacctcttgc

SEQ ID NO: 204063 - DNA, 25 bp, Artificial
  Probe
cctcttgcctggtgaaaacctgtgg

SEQ ID NO: 204064 - DNA, 25 bp, Artificial
  Probe
cacataaaacgctttcgcttacaaa

SEQ ID NO: 204065 - DNA, 25 bp, Artificial
  Probe
cccggcccaaattgccatatagggg

SEQ ID NO: 204066 - DNA, 25 bp, Artificial
  Probe
gtttacacctcttgcctggtgaaaa

SEQ ID NO: 204067 - DNA, 25 bp, Artificial
  Probe
accacataaaacgctttcgcttaca

SEQ ID NO: 204068 - DNA, 25 bp, Artificial
  Probe
tgactaccaaaaactgcgccggggt

SEQ ID NO: 204069 - DNA, 25 bp, Artificial
  Probe
tcttgcctggtgaaaacctgtggta

SEQ ID NO: 204070 - DNA, 25 bp, Artificial
  Probe
cacctcttgcctggtgaaaacctgt

SEQ ID NO: 204071 - DNA, 25 bp, Artificial
  Probe
tcccccggcccaaattgccatatag

SEQ ID NO: 204072 - DNA, 25 bp, Artificial
  Probe
gggtgactaccaaaaactgcgccgg

SEQ ID NO: 204073 - DNA, 25 bp, Artificial
  Probe
ggtttacacctcttgcctggtgaaa

SEQ ID NO: 204074 - DNA, 25 bp, Artificial
  Probe
ttgcctggtgaaaacctgtggtaaa

SEQ ID NO: 204075 - DNA, 25 bp, Artificial
  Probe
aattgccatatagggggtgactacc

SEQ ID NO: 204076 - DNA, 25 bp, Artificial
  Probe
tacacctcttgcctggtgaaaacct

SEQ ID NO: 204077 - DNA, 25 bp, Artificial
  Probe
acctcttgcctggtgaaaacctgtg

SEQ ID NO: 204078 - DNA, 25 bp, Artificial
  Probe
aaattgccatatagggggtgactac

SEQ ID NO: 204079 - DNA, 25 bp, Artificial
  Probe
aggaaaagagcacccccaatactct

SEQ ID NO: 204080 - DNA, 25 bp, Artificial
  Probe
gtgactaccaaaaactgcgccgggg

SEQ ID NO: 204081 - DNA, 25 bp, Artificial
  Probe
atccccctatagtgaggcgaattaa

SEQ ID NO: 204082 - DNA, 25 bp, Artificial
  Probe
tggtaaaccacataaaacgctttcg

SEQ ID NO: 204083 - DNA, 25 bp, Artificial
  Probe
ccacataaaacgctttcgcttacaa

SEQ ID NO: 204084 - DNA, 25 bp, Artificial
  Probe
ggggtttacacctcttgcctggtga

SEQ ID NO: 204085 - DNA, 25 bp, Artificial
  Probe
taaaccacataaaacgctttcgctt

SEQ ID NO: 204086 - DNA, 25 bp, Artificial
  Probe
agagaagttttccatcagtcatcca

SEQ ID NO: 204087 - DNA, 25 bp, Artificial
  Probe
actgtgaactctgcaatcaaatatg

SEQ ID NO: 204088 - DNA, 25 bp, Artificial
  Probe
tcacactgagggtgttcaggccact

SEQ ID NO: 204089 - DNA, 25 bp, Artificial
  Probe
acttctggggcctggctatgggctt

SEQ ID NO: 204090 - DNA, 25 bp, Artificial
  Probe
gtagaacttccctgagaatggagtg

SEQ ID NO: 204091 - DNA, 25 bp, Artificial
  Probe
tccctgagaatggagtgtcacactg

SEQ ID NO: 204092 - DNA, 25 bp, Artificial
  Probe
tggagtgtcacactgagggtgttca

SEQ ID NO: 204093 - DNA, 25 bp, Artificial
  Probe
ctgagggtgttcaggccacttctgt

SEQ ID NO: 204094 - DNA, 25 bp, Artificial
  Probe
tcctgatgacggaggcttatatttc

SEQ ID NO: 204095 - DNA, 25 bp, Artificial
  Probe
ttggtgaaggctcaaagctgacagt

SEQ ID NO: 204096 - DNA, 25 bp, Artificial
  Probe
gacctttgacctgatagcactttct

SEQ ID NO: 204097 - DNA, 25 bp, Artificial
  Probe
ctggctatgggcttggagctctcgt

SEQ ID NO: 204098 - DNA, 25 bp, Artificial
  Probe
gcactttctactgtgaactctgcaa

SEQ ID NO: 204099 - DNA, 25 bp, Artificial
  Probe
tatgggcttggagctctcgtccacc

SEQ ID NO: 204100 - DNA, 25 bp, Artificial
  Probe
gcttggagctctcgtccaccaatct

SEQ ID NO: 204101 - DNA, 25 bp, Artificial
  Probe
agtgtcacactgagggtgttcaggc

SEQ ID NO: 204102 - DNA, 25 bp, Artificial
  Probe
cacatcctgatgacggaggcttata

SEQ ID NO: 204103 - DNA, 25 bp, Artificial
  Probe
gtgaactctgcaatcaaatatgaaa

SEQ ID NO: 204104 - DNA, 25 bp, Artificial
  Probe
gaaggaccatctgtaagagtagaac

SEQ ID NO: 204105 - DNA, 25 bp, Artificial
  Probe
gagaagttttccatcagtcatccaa

SEQ ID NO: 204106 - DNA, 25 bp, Artificial
  Probe
attgcctcaagagacctttgacctg

SEQ ID NO: 204107 - DNA, 25 bp, Artificial
  Probe
ataacaccgggcagctatactttgg

SEQ ID NO: 204108 - DNA, 25 bp, Artificial
  Probe
atggagtgtcacactgagggtgttc

SEQ ID NO: 204109 - DNA, 25 bp, Artificial
  Probe
gctgcttctgctacttctggggcct

SEQ ID NO: 204110 - DNA, 25 bp, Artificial
  Probe
ttctgctacttctggggcctggcta

SEQ ID NO: 204111 - DNA, 25 bp, Artificial
  Probe
ggtgttcaggccacttctgtagcct

SEQ ID NO: 204112 - DNA, 25 bp, Artificial
  Probe
ttgaagatgttgctgcttctgctac

SEQ ID NO: 204113 - DNA, 25 bp, Artificial
  Probe
ttgacctgatagcactttctactgt

SEQ ID NO: 204114 - DNA, 25 bp, Artificial
  Probe
tgaaggctcaaagctgacagtgctg

SEQ ID NO: 204115 - DNA, 25 bp, Artificial
  Probe
tggctatgggcttggagctctcgtc

SEQ ID NO: 204116 - DNA, 25 bp, Artificial
  Probe
aagagaagttttccatcagtcatcc

SEQ ID NO: 204117 - DNA, 25 bp, Artificial
  Probe
taagagtagaacttccctgagaatg

SEQ ID NO: 204118 - DNA, 25 bp, Artificial
  Probe
accaatctcccagaaggaccatctg

SEQ ID NO: 204119 - DNA, 25 bp, Artificial
  Probe
tcgtcaattgcctcaagagaccttt

SEQ ID NO: 204120 - DNA, 25 bp, Artificial
  Probe
ggccacttctgtagcctggtatcgt

SEQ ID NO: 204121 - DNA, 25 bp, Artificial
  Probe
atactttggtgaaggctcaaagctg

SEQ ID NO: 204122 - DNA, 25 bp, Artificial
  Probe
caagagacctttgacctgatagcac

SEQ ID NO: 204123 - DNA, 25 bp, Artificial
  Probe
gaagatgttgctgcttctgctactt

SEQ ID NO: 204124 - DNA, 25 bp, Artificial
  Probe
ggtatcgtcaattgcctcaagagac

SEQ ID NO: 204125 - DNA, 25 bp, Artificial
  Probe
ttttaaatgcacatcctgatgacgg

SEQ ID NO: 204126 - DNA, 25 bp, Artificial
  Probe
agatgttgctgcttctgctacttct

SEQ ID NO: 204127 - DNA, 25 bp, Artificial
  Probe
aagagtagaacttccctgagaatgg

SEQ ID NO: 204128 - DNA, 25 bp, Artificial
  Probe
acttctgtagcctggtatcgtcaat

SEQ ID NO: 204129 - DNA, 25 bp, Artificial
  Probe
ggaccatctgtaagagtagaacttc

SEQ ID NO: 204130 - DNA, 25 bp, Artificial
  Probe
cagaaggaccatctgtaagagtaga

SEQ ID NO: 204131 - DNA, 25 bp, Artificial
  Probe
cccagaaggaccatctgtaagagta

SEQ ID NO: 204132 - DNA, 25 bp, Artificial
  Probe
tgctcaccaagtctggcaggagtgc

SEQ ID NO: 204133 - DNA, 25 bp, Artificial
  Probe
gtgctcaccaagtctggcaggagtg

SEQ ID NO: 204134 - DNA, 25 bp, Artificial
  Probe
ctaccacttgcagttattcgaggaa

SEQ ID NO: 204135 - DNA, 25 bp, Artificial
  Probe
aggctgccatctaccacttgcagtt

SEQ ID NO: 204136 - DNA, 25 bp, Artificial
  Probe
tatcgtgctcaccaagtctggcagg

SEQ ID NO: 204137 - DNA, 25 bp, Artificial
  Probe
gcagaggctgccatctaccacttgc

SEQ ID NO: 204138 - DNA, 25 bp, Artificial
  Probe
agtggggccattatcgtgctcacca

SEQ ID NO: 204139 - DNA, 25 bp, Artificial
  Probe
agaggctgccatctaccacttgcag

SEQ ID NO: 204140 - DNA, 25 bp, Artificial
  Probe
ttgcagttattcgaggaactccgcc

SEQ ID NO: 204141 - DNA, 25 bp, Artificial
  Probe
tcaagtgctgcagtggggccattat

SEQ ID NO: 204142 - DNA, 25 bp, Artificial
  Probe
gccatctaccacttgcagttattcg

SEQ ID NO: 204143 - DNA, 25 bp, Artificial
  Probe
catctaccacttgcagttattcgag

SEQ ID NO: 204144 - DNA, 25 bp, Artificial
  Probe
tgcccgagaggcagaggctgccatc

SEQ ID NO: 204145 - DNA, 25 bp, Artificial
  Probe
gctcaccaagtctggcaggagtgct

SEQ ID NO: 204146 - DNA, 25 bp, Artificial
  Probe
cacttgcagttattcgaggaactcc

SEQ ID NO: 204147 - DNA, 25 bp, Artificial
  Probe
gcctccttcaagtgctgcagtgggg

SEQ ID NO: 204148 - DNA, 25 bp, Artificial
  Probe
attatcgtgctcaccaagtctggca

SEQ ID NO: 204149 - DNA, 25 bp, Artificial
  Probe
cagaggctgccatctaccacttgca

SEQ ID NO: 204150 - DNA, 25 bp, Artificial
  Probe
tctaccacttgcagttattcgagga

SEQ ID NO: 204151 - DNA, 25 bp, Artificial
  Probe
cttcaagtgctgcagtggggccatt

SEQ ID NO: 204152 - DNA, 25 bp, Artificial
  Probe
cttgcagttattcgaggaactccgc

SEQ ID NO: 204153 - DNA, 25 bp, Artificial
  Probe
agaggcagaggctgccatctaccac

SEQ ID NO: 204154 - DNA, 25 bp, Artificial
  Probe
cgtgctcaccaagtctggcaggagt

SEQ ID NO: 204155 - DNA, 25 bp, Artificial
  Probe
gcagtggggccattatcgtgctcac

SEQ ID NO: 204156 - DNA, 25 bp, Artificial
  Probe
gctgccatctaccacttgcagttat

SEQ ID NO: 204157 - DNA, 25 bp, Artificial
  Probe
taccacttgcagttattcgaggaac

SEQ ID NO: 204158 - DNA, 25 bp, Artificial
  Probe
aggcctccttcaagtgctgcagtgg

SEQ ID NO: 204159 - DNA, 25 bp, Artificial
  Probe
accacttgcagttattcgaggaact

SEQ ID NO: 204160 - DNA, 25 bp, Artificial
  Probe
tgcagtggggccattatcgtgctca

SEQ ID NO: 204161 - DNA, 25 bp, Artificial
  Probe
ccacttgcagttattcgaggaactc

SEQ ID NO: 204162 - DNA, 25 bp, Artificial
  Probe
ggctgccatctaccacttgcagtta

SEQ ID NO: 204163 - DNA, 25 bp, Artificial
  Probe
acttgcagttattcgaggaactccg

SEQ ID NO: 204164 - DNA, 25 bp, Artificial
  Probe
caagtgctgcagtggggccattatc

SEQ ID NO: 204165 - DNA, 25 bp, Artificial
  Probe
tggggccattatcgtgctcaccaag

SEQ ID NO: 204166 - DNA, 25 bp, Artificial
  Probe
cctccttcaagtgctgcagtggggc

SEQ ID NO: 204167 - DNA, 25 bp, Artificial
  Probe
gaggctgccatctaccacttgcagt

SEQ ID NO: 204168 - DNA, 25 bp, Artificial
  Probe
ttatcgtgctcaccaagtctggcag

SEQ ID NO: 204169 - DNA, 25 bp, Artificial
  Probe
gcccgagaggcagaggctgccatct

SEQ ID NO: 204170 - DNA, 25 bp, Artificial
  Probe
atcgtgctcaccaagtctggcagga

SEQ ID NO: 204171 - DNA, 25 bp, Artificial
  Probe
tccttcaagtgctgcagtggggcca

SEQ ID NO: 204172 - DNA, 25 bp, Artificial
  Probe
cagtggggccattatcgtgctcacc

SEQ ID NO: 204173 - DNA, 25 bp, Artificial
  Probe
ggggccattatcgtgctcaccaagt

SEQ ID NO: 204174 - DNA, 25 bp, Artificial
  Probe
ttcaagtgctgcagtggggccatta

SEQ ID NO: 204175 - DNA, 25 bp, Artificial
  Probe
ggcctccttcaagtgctgcagtggg

SEQ ID NO: 204176 - DNA, 25 bp, Artificial
  Probe
ggccattatcgtgctcaccaagtct

SEQ ID NO: 204177 - DNA, 25 bp, Artificial
  Probe
atctaccacttgcagttattcgagg

SEQ ID NO: 204178 - DNA, 25 bp, Artificial
  Probe
tccgtcgacctgcagccaagcttgg

SEQ ID NO: 204179 - DNA, 25 bp, Artificial
  Probe
gatccgtcgacctgcagccaagctt

SEQ ID NO: 204180 - DNA, 25 bp, Artificial
  Probe
cctgcagccaagcttggcactggcc

SEQ ID NO: 204181 - DNA, 25 bp, Artificial
  Probe
accatgattacgaattcccggggat

SEQ ID NO: 204182 - DNA, 25 bp, Artificial
  Probe
gaattcccggggatccgtcgacctg

SEQ ID NO: 204183 - DNA, 25 bp, Artificial
  Probe
tatgaccatgattacgaattcccgg

SEQ ID NO: 204184 - DNA, 25 bp, Artificial
  Probe
gggatccgtcgacctgcagccaagc

SEQ ID NO: 204185 - DNA, 25 bp, Artificial
  Probe
ccggggatccgtcgacctgcagcca

SEQ ID NO: 204186 - DNA, 25 bp, Artificial
  Probe
ggggatccgtcgacctgcagccaag

SEQ ID NO: 204187 - DNA, 25 bp, Artificial
  Probe
atccgtcgacctgcagccaagcttg

SEQ ID NO: 204188 - DNA, 25 bp, Artificial
  Probe
atgaccatgattacgaattcccggg

SEQ ID NO: 204189 - DNA, 25 bp, Artificial
  Probe
ccgtcgacctgcagccaagcttggc

SEQ ID NO: 204190 - DNA, 25 bp, Artificial
  Probe
gtcgacctgcagccaagcttggcac

SEQ ID NO: 204191 - DNA, 25 bp, Artificial
  Probe
ctgcagccaagcttggcactggccg

SEQ ID NO: 204192 - DNA, 25 bp, Artificial
  Probe
ggatccgtcgacctgcagccaagct

SEQ ID NO: 204193 - DNA, 25 bp, Artificial
  Probe
tcccggggatccgtcgacctgcagc

SEQ ID NO: 204194 - DNA, 25 bp, Artificial
  Probe
ttcccggggatccgtcgacctgcag

SEQ ID NO: 204195 - DNA, 25 bp, Artificial
  Probe
ctatgaccatgattacgaattcccg

SEQ ID NO: 204196 - DNA, 25 bp, Artificial
  Probe
acctgcagccaagcttggcactggc

SEQ ID NO: 204197 - DNA, 25 bp, Artificial
  Probe
cgacctgcagccaagcttggcactg

SEQ ID NO: 204198 - DNA, 25 bp, Artificial
  Probe
tgaccatgattacgaattcccgggg

SEQ ID NO: 204199 - DNA, 25 bp, Artificial
  Probe
cccggggatccgtcgacctgcagcc

SEQ ID NO: 204200 - DNA, 25 bp, Artificial
  Probe
cgtcgacctgcagccaagcttggca

SEQ ID NO: 204201 - DNA, 25 bp, Artificial
  Probe
gacctgcagccaagcttggcactgg

SEQ ID NO: 204202 - DNA, 25 bp, Artificial
  Probe
tcgacctgcagccaagcttggcact

SEQ ID NO: 204203 - DNA, 25 bp, Artificial
  Probe
cggggatccgtcgacctgcagccaa

SEQ ID NO: 204204 - DNA, 25 bp, Artificial
  Probe
tgcagccaagcttggcactggccgt

SEQ ID NO: 204205 - DNA, 25 bp, Artificial
  Probe
tgattacgaattcccggggatccgt

SEQ ID NO: 204206 - DNA, 25 bp, Artificial
  Probe
cagccaagcttggcactggccgtcg

SEQ ID NO: 204207 - DNA, 25 bp, Artificial
  Probe
attcccggggatccgtcgacctgca

SEQ ID NO: 204208 - DNA, 25 bp, Artificial
  Probe
catgattacgaattcccggggatcc

SEQ ID NO: 204209 - DNA, 25 bp, Artificial
  Probe
gcagccaagcttggcactggccgtc

SEQ ID NO: 204210 - DNA, 25 bp, Artificial
  Probe
atgattacgaattcccggggatccg

SEQ ID NO: 204211 - DNA, 25 bp, Artificial
  Probe
ccatgattacgaattcccggggatc

SEQ ID NO: 204212 - DNA, 25 bp, Artificial
  Probe
gtttctactgttggtttatatcaac

SEQ ID NO: 204213 - DNA, 25 bp, Artificial
  Probe
atcttgaccccagacattggggtcc

SEQ ID NO: 204214 - DNA, 25 bp, Artificial
  Probe
gacagggaagcctggtatgctgcaa

SEQ ID NO: 204215 - DNA, 25 bp, Artificial
  Probe
gagaggacattccaatcataggctg

SEQ ID NO: 204216 - DNA, 25 bp, Artificial
  Probe
gaagtcccttccactgctgtgttcc

SEQ ID NO: 204217 - DNA, 25 bp, Artificial
  Probe
aatatctgggaagtcccttccactg

SEQ ID NO: 204218 - DNA, 25 bp, Artificial
  Probe
cacagaccgctttctaagggtaatt

SEQ ID NO: 204219 - DNA, 25 bp, Artificial
  Probe
tatcttgaccccagacattggggtc

SEQ ID NO: 204220 - DNA, 25 bp, Artificial
  Probe
acaaggacagggaagcctggtatgc

SEQ ID NO: 204221 - DNA, 25 bp, Artificial
  Probe
cctctctgtcctcctgttaattagg

SEQ ID NO: 204222 - DNA, 25 bp, Artificial
  Probe
aatctgtgggattgcaaagatcaca

SEQ ID NO: 204223 - DNA, 25 bp, Artificial
  Probe
gcaatctgtgggattgcaaagatca

SEQ ID NO: 204224 - DNA, 25 bp, Artificial
  Probe
cagaaacatacaagctgtcagcttt

SEQ ID NO: 204225 - DNA, 25 bp, Artificial
  Probe
aagctgtcagctttgcacaaggaca

SEQ ID NO: 204226 - DNA, 25 bp, Artificial
  Probe
caacaaccaggaatggctgtagatt

SEQ ID NO: 204227 - DNA, 25 bp, Artificial
  Probe
aagatcacaaagtttctactgttgg

SEQ ID NO: 204228 - DNA, 25 bp, Artificial
  Probe
ttggtttatatcaacaaccaggaat

SEQ ID NO: 204229 - DNA, 25 bp, Artificial
  Probe
ttcagtatcttgaccccagacattg

SEQ ID NO: 204230 - DNA, 25 bp, Artificial
  Probe
ctgtgttccagaagtgttggtaaac

SEQ ID NO: 204231 - DNA, 25 bp, Artificial
  Probe
ccaggaagctcctctgtgtcctcat

SEQ ID NO: 204232 - DNA, 25 bp, Artificial
  Probe
atgtcaacagcagaaacatacaagc

SEQ ID NO: 204233 - DNA, 25 bp, Artificial
  Probe
tcctggagtacaaacctttgttcac

SEQ ID NO: 204234 - DNA, 25 bp, Artificial
  Probe
ctaacctcctctacttgagaggaca

SEQ ID NO: 204235 - DNA, 25 bp, Artificial
  Probe
tgctgcaatctgtgggattgcaaag

SEQ ID NO: 204236 - DNA, 25 bp, Artificial
  Probe
ggtttttcacagaccgctttctaag

SEQ ID NO: 204237 - DNA, 25 bp, Artificial
  Probe
gaagctcctctgtgtcctcataaac

SEQ ID NO: 204238 - DNA, 25 bp, Artificial
  Probe
ggtaaacagcccacaaatgtcaaca

SEQ ID NO: 204239 - DNA, 25 bp, Artificial
  Probe
gcccacaaatgtcaacagcagaaac

SEQ ID NO: 204240 - DNA, 25 bp, Artificial
  Probe
tacttgagaggacattccaatcata

SEQ ID NO: 204241 - DNA, 25 bp, Artificial
  Probe
atcatgtctggatccccaggaagct

SEQ ID NO: 204242 - DNA, 25 bp, Artificial
  Probe
cagacattggggtccaacacttttt

SEQ ID NO: 204243 - DNA, 25 bp, Artificial
  Probe
cacaaagtttctactgttggtttat

SEQ ID NO: 204244 - DNA, 25 bp, Artificial
  Probe
cattggggtccaacactttttaatg

SEQ ID NO: 204245 - DNA, 25 bp, Artificial
  Probe
acctttgttcacagtgttcagtatc

SEQ ID NO: 204246 - DNA, 25 bp, Artificial
  Probe
aacatacaagctgtcagctttgcac

SEQ ID NO: 204247 - DNA, 25 bp, Artificial
  Probe
ttgcacaaggacagggaagcctggt

SEQ ID NO: 204248 - DNA, 25 bp, Artificial
  Probe
gaccccagacattggggtccaacac

SEQ ID NO: 204249 - DNA, 25 bp, Artificial
  Probe
atatctgggaagtcccttccactgc

SEQ ID NO: 204250 - DNA, 25 bp, Artificial
  Probe
cttccactgctgtgttccagaagtg

SEQ ID NO: 204251 - DNA, 25 bp, Artificial
  Probe
gtcctcctgttaattaggtcactta

SEQ ID NO: 204252 - DNA, 25 bp, Artificial
  Probe
ttatttcctggagtacaaacctttg

SEQ ID NO: 204253 - DNA, 25 bp, Artificial
  Probe
gtctggatccccaggaagctcctct

SEQ ID NO: 204254 - DNA, 25 bp, Artificial
  Probe
gatccccaggaagctcctctgtgtc

SEQ ID NO: 204255 - DNA, 25 bp, Artificial
  Probe
ttcacagaccgctttctaagggtaa

SEQ ID NO: 204256 - DNA, 25 bp, Artificial
  Probe
gacattccaatcataggctgcccat

SEQ ID NO: 204257 - DNA, 25 bp, Artificial
  Probe
gttccagaagtgttggtaaacagcc

SEQ ID NO: 204258 - DNA, 25 bp, Artificial
  Probe
cttggcagcaattcccttttggcag

SEQ ID NO: 204259 - DNA, 25 bp, Artificial
  Probe
ccacgtggcccctaagggcatggac

SEQ ID NO: 204260 - DNA, 25 bp, Artificial
  Probe
atgagggaccacagtgcggagaatg

SEQ ID NO: 204261 - DNA, 25 bp, Artificial
  Probe
cacgtggcccctaagggcatggacg

SEQ ID NO: 204262 - DNA, 25 bp, Artificial
  Probe
tcacttcactgggcgcgcgtcttac

SEQ ID NO: 204263 - DNA, 25 bp, Artificial
  Probe
cagaccaaagggccacggactgggg

SEQ ID NO: 204264 - DNA, 25 bp, Artificial
  Probe
accacagtgcggagaatgtccttcc

SEQ ID NO: 204265 - DNA, 25 bp, Artificial
  Probe
ccacagtgcggagaatgtccttccc

SEQ ID NO: 204266 - DNA, 25 bp, Artificial
  Probe
gaccacagtgcggagaatgtccttc

SEQ ID NO: 204267 - DNA, 25 bp, Artificial
  Probe
accatgagggaccacagtgcggaga

SEQ ID NO: 204268 - DNA, 25 bp, Artificial
  Probe
catgagggaccacagtgcggagaat

SEQ ID NO: 204269 - DNA, 25 bp, Artificial
  Probe
aaaccatgagggaccacagtgcgga

SEQ ID NO: 204270 - DNA, 25 bp, Artificial
  Probe
atcggctccacgtggcccctaaggg

SEQ ID NO: 204271 - DNA, 25 bp, Artificial
  Probe
agagccgaccgatcggctccacgtg

SEQ ID NO: 204272 - DNA, 25 bp, Artificial
  Probe
acgtggcccctaagggcatggacgg

SEQ ID NO: 204273 - DNA, 25 bp, Artificial
  Probe
ggtataacaagagccgaccgatcgg

SEQ ID NO: 204274 - DNA, 25 bp, Artificial
  Probe
tagtgccctccagaccaaagggcca

SEQ ID NO: 204275 - DNA, 25 bp, Artificial
  Probe
tacacagcgacggaccctataaaac

SEQ ID NO: 204276 - DNA, 25 bp, Artificial
  Probe
taacaagagccgaccgatcggctcc

SEQ ID NO: 204277 - DNA, 25 bp, Artificial
  Probe
gaaaccatgagggaccacagtgcgg

SEQ ID NO: 204278 - DNA, 25 bp, Artificial
  Probe
gtattggtaaatccgtattggcacc

SEQ ID NO: 204279 - DNA, 25 bp, Artificial
  Probe
ttcccttttggcagctgggtataac

SEQ ID NO: 204280 - DNA, 25 bp, Artificial
  Probe
aagagccgaccgatcggctccacgt

SEQ ID NO: 204281 - DNA, 25 bp, Artificial
  Probe
catggacggacgggtattggtaaat

SEQ ID NO: 204282 - DNA, 25 bp, Artificial
  Probe
ccgtagtgccctccagaccaaaggg

SEQ ID NO: 204283 - DNA, 25 bp, Artificial
  Probe
gagccgaccgatcggctccacgtgg

SEQ ID NO: 204284 - DNA, 25 bp, Artificial
  Probe
ttggcagcaattcccttttggcagc

SEQ ID NO: 204285 - DNA, 25 bp, Artificial
  Probe
gcttggcagcaattcccttttggca

SEQ ID NO: 204286 - DNA, 25 bp, Artificial
  Probe
ggcagcaattcccttttggcagctg

SEQ ID NO: 204287 - DNA, 25 bp, Artificial
  Probe
agtgccctccagaccaaagggccac

SEQ ID NO: 204288 - DNA, 25 bp, Artificial
  Probe
atttcacttcactgggcgcgcgtct

SEQ ID NO: 204289 - DNA, 25 bp, Artificial
  Probe
gcccctaagggcatggacggacggg

SEQ ID NO: 204290 - DNA, 25 bp, Artificial
  Probe
ccctttacacagcgacggaccctat

SEQ ID NO: 204291 - DNA, 25 bp, Artificial
  Probe
gggccacggactgggggaaaccatg

SEQ ID NO: 204292 - DNA, 25 bp, Artificial
  Probe
ccatgagggaccacagtgcggagaa

SEQ ID NO: 204293 - DNA, 25 bp, Artificial
  Probe
cgatcggctccacgtggcccctaag

SEQ ID NO: 204294 - DNA, 25 bp, Artificial
  Probe
tatttcacttcactgggcgcgcgtc

SEQ ID NO: 204295 - DNA, 25 bp, Artificial
  Probe
ggaaaccatgagggaccacagtgcg

SEQ ID NO: 204296 - DNA, 25 bp, Artificial
  Probe
ccccgtagtgccctccagaccaaag

SEQ ID NO: 204297 - DNA, 25 bp, Artificial
  Probe
ttggtaaatccgtattggcaccgcc

SEQ ID NO: 204298 - DNA, 25 bp, Artificial
  Probe
tattggcaccgccctttacacagcg

SEQ ID NO: 204299 - DNA, 25 bp, Artificial
  Probe
cagcaattcccttttggcagctggg

SEQ ID NO: 204300 - DNA, 25 bp, Artificial
  Probe
gcggagaatgtccttccccggtatg

SEQ ID NO: 204301 - DNA, 25 bp, Artificial
  Probe
cacggactgggggaaaccatgaggg

SEQ ID NO: 204302 - DNA, 25 bp, Artificial
  Probe
aaccatgagggaccacagtgcggag

SEQ ID NO: 204303 - DNA, 25 bp, Artificial
  Probe
gtagtgccctccagaccaaagggcc

SEQ ID NO: 204304 - DNA, 25 bp, Artificial
  Probe
tcttggcttttcaaaagtaccgtgg

SEQ ID NO: 204305 - DNA, 25 bp, Artificial
  Probe
gtccagttccaatgccagaagtccc

SEQ ID NO: 204306 - DNA, 25 bp, Artificial
  Probe
ggtttggtccaggtgtccagttcca

SEQ ID NO: 204307 - DNA, 25 bp, Artificial
  Probe
atgacctgagtttgagcccagggtc

SEQ ID NO: 204308 - DNA, 25 bp, Artificial
  Probe
cctatattctcagagcccttgcctg

SEQ ID NO: 204309 - DNA, 25 bp, Artificial
  Probe
gcccttgcctgacacatatgtcaca

SEQ ID NO: 204310 - DNA, 25 bp, Artificial
  Probe
gccctccttaggttctgtttcataa

SEQ ID NO: 204311 - DNA, 25 bp, Artificial
  Probe
aagccctccttaggttctgtttcat

SEQ ID NO: 204312 - DNA, 25 bp, Artificial
  Probe
gtactgtaagtccttcatctttagt

SEQ ID NO: 204313 - DNA, 25 bp, Artificial
  Probe
agctggatctcttggcttttcaaaa

SEQ ID NO: 204314 - DNA, 25 bp, Artificial
  Probe
acctcgatgacctgagtttgagccc

SEQ ID NO: 204315 - DNA, 25 bp, Artificial
  Probe
tctctgtccttatacacccagaagg

SEQ ID NO: 204316 - DNA, 25 bp, Artificial
  Probe
ttgcctgacacatatgtcacaaaga

SEQ ID NO: 204317 - DNA, 25 bp, Artificial
  Probe
tgtactgtaagtccttcatctttag

SEQ ID NO: 204318 - DNA, 25 bp, Artificial
  Probe
ctatattctcagagcccttgcctga

SEQ ID NO: 204319 - DNA, 25 bp, Artificial
  Probe
cgtggtacctggtggcaacctcgat

SEQ ID NO: 204320 - DNA, 25 bp, Artificial
  Probe
ggatctcttggcttttcaaaagtac

SEQ ID NO: 204321 - DNA, 25 bp, Artificial
  Probe
ttaataaagccctccttaggttctg

SEQ ID NO: 204322 - DNA, 25 bp, Artificial
  Probe
tctcagagcccttgcctgacacata

SEQ ID NO: 204323 - DNA, 25 bp, Artificial
  Probe
cagaagaccagcaaaggcaattagc

SEQ ID NO: 204324 - DNA, 25 bp, Artificial
  Probe
gcctgttccctatattctcagagcc

SEQ ID NO: 204325 - DNA, 25 bp, Artificial
  Probe
ttctcagagcccttgcctgacacat

SEQ ID NO: 204326 - DNA, 25 bp, Artificial
  Probe
ccacagactggctgtcttaagtatt

SEQ ID NO: 204327 - DNA, 25 bp, Artificial
  Probe
taataaagccctccttaggttctgt

SEQ ID NO: 204328 - DNA, 25 bp, Artificial
  Probe
tcacattcgtgtacagtttaagaca

SEQ ID NO: 204329 - DNA, 25 bp, Artificial
  Probe
agaagaccagcaaaggcaattagca

SEQ ID NO: 204330 - DNA, 25 bp, Artificial
  Probe
ctctgtccttatacacccagaaggt

SEQ ID NO: 204331 - DNA, 25 bp, Artificial
  Probe
tggcagaagaccagcaaaggcaatt

SEQ ID NO: 204332 - DNA, 25 bp, Artificial
  Probe
ttatgatctgttgatgttccaaagc

SEQ ID NO: 204333 - DNA, 25 bp, Artificial
  Probe
gtacctggtggcaacctcgatgacc

SEQ ID NO: 204334 - DNA, 25 bp, Artificial
  Probe
gttccaatgccagaagtccccacag

SEQ ID NO: 204335 - DNA, 25 bp, Artificial
  Probe
gttccagtccccaactagttatgat

SEQ ID NO: 204336 - DNA, 25 bp, Artificial
  Probe
actagttatgatctgttgatgttcc

SEQ ID NO: 204337 - DNA, 25 bp, Artificial
  Probe
gtatgtactgtaagtccttcatctt

SEQ ID NO: 204338 - DNA, 25 bp, Artificial
  Probe
agttccaatgccagaagtccccaca

SEQ ID NO: 204339 - DNA, 25 bp, Artificial
  Probe
tcaaaagtaccgtggtacctggtgg

SEQ ID NO: 204340 - DNA, 25 bp, Artificial
  Probe
accagcaaaggcaattagcaaatta

SEQ ID NO: 204341 - DNA, 25 bp, Artificial
  Probe
agtatttcacattcgtgtacagttt

SEQ ID NO: 204342 - DNA, 25 bp, Artificial
  Probe
ctagttatgatctgttgatgttcca

SEQ ID NO: 204343 - DNA, 25 bp, Artificial
  Probe
acattcgtgtacagtttaagacaat

SEQ ID NO: 204344 - DNA, 25 bp, Artificial
  Probe
acatatgtcacaaagaagatggcag

SEQ ID NO: 204345 - DNA, 25 bp, Artificial
  Probe
agagcccttgcctgacacatatgtc

SEQ ID NO: 204346 - DNA, 25 bp, Artificial
  Probe
ccagtccccaactagttatgatctg

SEQ ID NO: 204347 - DNA, 25 bp, Artificial
  Probe
gttccctatattctcagagcccttg

SEQ ID NO: 204348 - DNA, 25 bp, Artificial
  Probe
cagcctgttccctatattctcagag

SEQ ID NO: 204349 - DNA, 25 bp, Artificial
  Probe
gatgtgtcttctctgtccttataca

SEQ ID NO: 204350 - DNA, 25 bp, Artificial
  Probe
agcctgctttgtcttcatttagtag

SEQ ID NO: 204351 - DNA, 25 bp, Artificial
  Probe
agtagactatttttctctccttctt

SEQ ID NO: 204352 - DNA, 25 bp, Artificial
  Probe
agactatttttctctccttctttct

SEQ ID NO: 204353 - DNA, 25 bp, Artificial
  Probe
tcttcatttagtagactatttttct

SEQ ID NO: 204354 - DNA, 25 bp, Artificial
  Probe
ttgtcttcatttagtagactatttt

SEQ ID NO: 204355 - DNA, 25 bp, Artificial
  Probe
aaatacccagcctgctttgtcttca

SEQ ID NO: 204356 - DNA, 25 bp, Artificial
  Probe
tcatttagtagactatttttctctc

SEQ ID NO: 204357 - DNA, 25 bp, Artificial
  Probe
tagtagactatttttctctccttct

SEQ ID NO: 204358 - DNA, 25 bp, Artificial
  Probe
gaaaatacccagcctgctttgtctt

SEQ ID NO: 204359 - DNA, 25 bp, Artificial
  Probe
tctctccttctttcttttttcttct

SEQ ID NO: 204360 - DNA, 25 bp, Artificial
  Probe
cctgctttgtcttcatttagtagac

SEQ ID NO: 204361 - DNA, 25 bp, Artificial
  Probe
tagactatttttctctccttctttc

SEQ ID NO: 204362 - DNA, 25 bp, Artificial
  Probe
ctttgtcttcatttagtagactatt

SEQ ID NO: 204363 - DNA, 25 bp, Artificial
  Probe
gactatttttctctccttctttctt

SEQ ID NO: 204364 - DNA, 25 bp, Artificial
  Probe
tttgaaaatacccagcctgctttgt

SEQ ID NO: 204365 - DNA, 25 bp, Artificial
  Probe
ttagtagactatttttctctccttc

SEQ ID NO: 204366 - DNA, 25 bp, Artificial
  Probe
gtcttcatttagtagactatttttc

SEQ ID NO: 204367 - DNA, 25 bp, Artificial
  Probe
acccagcctgctttgtcttcattta

SEQ ID NO: 204368 - DNA, 25 bp, Artificial
  Probe
gcctgctttgtcttcatttagtaga

SEQ ID NO: 204369 - DNA, 25 bp, Artificial
  Probe
ctgctttgtcttcatttagtagact

SEQ ID NO: 204370 - DNA, 25 bp, Artificial
  Probe
ttgaaaatacccagcctgctttgtc

SEQ ID NO: 204371 - DNA, 25 bp, Artificial
  Probe
tttttgaaaatacccagcctgcttt

SEQ ID NO: 204372 - DNA, 25 bp, Artificial
  Probe
aatacccagcctgctttgtcttcat

SEQ ID NO: 204373 - DNA, 25 bp, Artificial
  Probe
cccagcctgctttgtcttcatttag

SEQ ID NO: 204374 - DNA, 25 bp, Artificial
  Probe
gctttgtcttcatttagtagactat

SEQ ID NO: 204375 - DNA, 25 bp, Artificial
  Probe
tgtcttcatttagtagactattttt

SEQ ID NO: 204376 - DNA, 25 bp, Artificial
  Probe
tttgtcttcatttagtagactattt

SEQ ID NO: 204377 - DNA, 25 bp, Artificial
  Probe
ctttttgaaaatacccagcctgctt

SEQ ID NO: 204378 - DNA, 25 bp, Artificial
  Probe
ttactttttgaaaatacccagcctg

SEQ ID NO: 204379 - DNA, 25 bp, Artificial
  Probe
actttttgaaaatacccagcctgct

SEQ ID NO: 204380 - DNA, 25 bp, Artificial
  Probe
ccagcctgctttgtcttcatttagt

SEQ ID NO: 204381 - DNA, 25 bp, Artificial
  Probe
cttcatttagtagactatttttctc

SEQ ID NO: 204382 - DNA, 25 bp, Artificial
  Probe
tgctttgtcttcatttagtagacta

SEQ ID NO: 204383 - DNA, 25 bp, Artificial
  Probe
atacccagcctgctttgtcttcatt

SEQ ID NO: 204384 - DNA, 25 bp, Artificial
  Probe
ttttgaaaatacccagcctgctttg

SEQ ID NO: 204385 - DNA, 25 bp, Artificial
  Probe
cagcctgctttgtcttcatttagta

SEQ ID NO: 204386 - DNA, 25 bp, Artificial
  Probe
tacccagcctgctttgtcttcattt

SEQ ID NO: 204387 - DNA, 25 bp, Artificial
  Probe
tactttttgaaaatacccagcctgc

SEQ ID NO: 204388 - DNA, 25 bp, Artificial
  Probe
tgaaaatacccagcctgctttgtct

SEQ ID NO: 204389 - DNA, 25 bp, Artificial
  Probe
gtagactatttttctctccttcttt

SEQ ID NO: 204390 - DNA, 25 bp, Artificial
  Probe
gtacacgagtgctcagctggtagag

SEQ ID NO: 204391 - DNA, 25 bp, Artificial
  Probe
tacacgagtgctcagctggtagagc

SEQ ID NO: 204392 - DNA, 25 bp, Artificial
  Probe
caagagcccaccgggcccggcatcc

SEQ ID NO: 204393 - DNA, 25 bp, Artificial
  Probe
ccaccgggcccggcatccaagaggg

SEQ ID NO: 204394 - DNA, 25 bp, Artificial
  Probe
gtgcctactccggccagctgccgcc

SEQ ID NO: 204395 - DNA, 25 bp, Artificial
  Probe
catccaagagggtgcgcacggcgta

SEQ ID NO: 204396 - DNA, 25 bp, Artificial
  Probe
acctcttggaggagcggcggccacg

SEQ ID NO: 204397 - DNA, 25 bp, Artificial
  Probe
ggagcgcacgccacctcttggagga

SEQ ID NO: 204398 - DNA, 25 bp, Artificial
  Probe
ggctaacctgctgaacctcaccgaa

SEQ ID NO: 204399 - DNA, 25 bp, Artificial
  Probe
gcgtacacgagtgctcagctggtag

SEQ ID NO: 204400 - DNA, 25 bp, Artificial
  Probe
cgcacgccacctcttggaggagcgg

SEQ ID NO: 204401 - DNA, 25 bp, Artificial
  Probe
cccggcatccaagagggtgcgcacg

SEQ ID NO: 204402 - DNA, 25 bp, Artificial
  Probe
ggagatggctaacctgctgaacctc

SEQ ID NO: 204403 - DNA, 25 bp, Artificial
  Probe
tgctgaacctcaccgaacgccagat

SEQ ID NO: 204404 - DNA, 25 bp, Artificial
  Probe
gcggcggccacgtgcctactccggc

SEQ ID NO: 204405 - DNA, 25 bp, Artificial
  Probe
gaccagaaggccaagggcatcctgc

SEQ ID NO: 204406 - DNA, 25 bp, Artificial
  Probe
ggtgcgcacggcgtacacgagtgct

SEQ ID NO: 204407 - DNA, 25 bp, Artificial
  Probe
agtgctcagctggtagagctggaga

SEQ ID NO: 204408 - DNA, 25 bp, Artificial
  Probe
cacgagtgctcagctggtagagctg

SEQ ID NO: 204409 - DNA, 25 bp, Artificial
  Probe
tggagatggctaacctgctgaacct

SEQ ID NO: 204410 - DNA, 25 bp, Artificial
  Probe
agatggctaacctgctgaacctcac

SEQ ID NO: 204411 - DNA, 25 bp, Artificial
  Probe
gagatggctaacctgctgaacctca

SEQ ID NO: 204412 - DNA, 25 bp, Artificial
  Probe
aagggcatcctgcattctcccgcag

SEQ ID NO: 204413 - DNA, 25 bp, Artificial
  Probe
aaggccaagggcatcctgcattctc

SEQ ID NO: 204414 - DNA, 25 bp, Artificial
  Probe
accagaaggccaagggcatcctgca

SEQ ID NO: 204415 - DNA, 25 bp, Artificial
  Probe
acggcgtacacgagtgctcagctgg

SEQ ID NO: 204416 - DNA, 25 bp, Artificial
  Probe
tggctaacctgctgaacctcaccga

SEQ ID NO: 204417 - DNA, 25 bp, Artificial
  Probe
atggctaacctgctgaacctcaccg

SEQ ID NO: 204418 - DNA, 25 bp, Artificial
  Probe
cacctcttggaggagcggcggccac

SEQ ID NO: 204419 - DNA, 25 bp, Artificial
  Probe
gcccggcatccaagagggtgcgcac

SEQ ID NO: 204420 - DNA, 25 bp, Artificial
  Probe
ggcgtacacgagtgctcagctggta

SEQ ID NO: 204421 - DNA, 25 bp, Artificial
  Probe
ccacctcttggaggagcggcggcca

SEQ ID NO: 204422 - DNA, 25 bp, Artificial
  Probe
gccagtccccggagcgcacgccacc

SEQ ID NO: 204423 - DNA, 25 bp, Artificial
  Probe
tcctgcattctcccgcaggccagtc

SEQ ID NO: 204424 - DNA, 25 bp, Artificial
  Probe
cgccgcgtggagatggctaacctgc

SEQ ID NO: 204425 - DNA, 25 bp, Artificial
  Probe
gtgcgcacggcgtacacgagtgctc

SEQ ID NO: 204426 - DNA, 25 bp, Artificial
  Probe
acacgagtgctcagctggtagagct

SEQ ID NO: 204427 - DNA, 25 bp, Artificial
  Probe
gatggctaacctgctgaacctcacc

SEQ ID NO: 204428 - DNA, 25 bp, Artificial
  Probe
agggcatcctgcattctcccgcagg

SEQ ID NO: 204429 - DNA, 25 bp, Artificial
  Probe
cacgccacctcttggaggagcggcg

SEQ ID NO: 204430 - DNA, 25 bp, Artificial
  Probe
tggaggagcggcggccacgtgccta

SEQ ID NO: 204431 - DNA, 25 bp, Artificial
  Probe
ggaccagaaggccaagggcatcctg

SEQ ID NO: 204432 - DNA, 25 bp, Artificial
  Probe
cggagcgcacgccacctcttggagg

SEQ ID NO: 204433 - DNA, 25 bp, Artificial
  Probe
aggccaagggcatcctgcattctcc

SEQ ID NO: 204434 - DNA, 25 bp, Artificial
  Probe
gctaacctgctgaacctcaccgaac

SEQ ID NO: 204435 - DNA, 25 bp, Artificial
  Probe
atccaagagggtgcgcacggcgtac

SEQ ID NO: 204436 - DNA, 25 bp, Artificial
  Probe
gcattaactcgctgagcggaaaaaa

SEQ ID NO: 204437 - DNA, 25 bp, Artificial
  Probe
gctgaggttcttgtttaccagcatt

SEQ ID NO: 204438 - DNA, 25 bp, Artificial
  Probe
atggaggccgacgacaccgacagcc

SEQ ID NO: 204439 - DNA, 25 bp, Artificial
  Probe
ggcgtgctcggctttgaccttcagc

SEQ ID NO: 204440 - DNA, 25 bp, Artificial
  Probe
ggtttgcaaatggaggccgacgaca

SEQ ID NO: 204441 - DNA, 25 bp, Artificial
  Probe
gggaaccgctcattcatttccactc

SEQ ID NO: 204442 - DNA, 25 bp, Artificial
  Probe
gcctgcggcatttgggctttgctcc

SEQ ID NO: 204443 - DNA, 25 bp, Artificial
  Probe
agcgtttccgaggatcttcgctctt

SEQ ID NO: 204444 - DNA, 25 bp, Artificial
  Probe
tgcaagagctccacggcacgcggcg

SEQ ID NO: 204445 - DNA, 25 bp, Artificial
  Probe
ttgggctttgctcctctttctgtac

SEQ ID NO: 204446 - DNA, 25 bp, Artificial
  Probe
gtgctcggctttgaccttcagcgag

SEQ ID NO: 204447 - DNA, 25 bp, Artificial
  Probe
gcacgcggcgtgctcggctttgacc

SEQ ID NO: 204448 - DNA, 25 bp, Artificial
  Probe
agggggaaccgctcattcatttcca

SEQ ID NO: 204449 - DNA, 25 bp, Artificial
  Probe
ccagcgtttccgaggatcttcgctc

SEQ ID NO: 204450 - DNA, 25 bp, Artificial
  Probe
gctttgaccttcagcgagccggagc

SEQ ID NO: 204451 - DNA, 25 bp, Artificial
  Probe
gaggctgaggttcttgtttaccagc

SEQ ID NO: 204452 - DNA, 25 bp, Artificial
  Probe
accagcattaactcgctgagcggaa

SEQ ID NO: 204453 - DNA, 25 bp, Artificial
  Probe
cgcggccgccgctttgtgtgtcctg

SEQ ID NO: 204454 - DNA, 25 bp, Artificial
  Probe
ctgtccagcgtttccgaggatcttc

SEQ ID NO: 204455 - DNA, 25 bp, Artificial
  Probe
cacgcggcgtgctcggctttgacct

SEQ ID NO: 204456 - DNA, 25 bp, Artificial
  Probe
cggcatttgggctttgctcctcttt

SEQ ID NO: 204457 - DNA, 25 bp, Artificial
  Probe
gcgtttccgaggatcttcgctcttg

SEQ ID NO: 204458 - DNA, 25 bp, Artificial
  Probe
tgcatctctgggtttgcaaatggag

SEQ ID NO: 204459 - DNA, 25 bp, Artificial
  Probe
tcccctcttctgcatctctgggttt

SEQ ID NO: 204460 - DNA, 25 bp, Artificial
  Probe
ctgaggttcttgtttaccagcatta

SEQ ID NO: 204461 - DNA, 25 bp, Artificial
  Probe
ctcggctttgaccttcagcgagccg

SEQ ID NO: 204462 - DNA, 25 bp, Artificial
  Probe
cggccgccgctttgtgtgtcctgga

SEQ ID NO: 204463 - DNA, 25 bp, Artificial
  Probe
cggtgaggctgaggttcttgtttac

SEQ ID NO: 204464 - DNA, 25 bp, Artificial
  Probe
tctgggtttgcaaatggaggccgac

SEQ ID NO: 204465 - DNA, 25 bp, Artificial
  Probe
cgctttgtgtgtcctggatttggat

SEQ ID NO: 204466 - DNA, 25 bp, Artificial
  Probe
cttctgcatctctgggtttgcaaat

SEQ ID NO: 204467 - DNA, 25 bp, Artificial
  Probe
gttcttgtttaccagcattaactcg

SEQ ID NO: 204468 - DNA, 25 bp, Artificial
  Probe
cttgtttaccagcattaactcgctg

SEQ ID NO: 204469 - DNA, 25 bp, Artificial
  Probe
catttgggctttgctcctctttctg

SEQ ID NO: 204470 - DNA, 25 bp, Artificial
  Probe
gggacttcggaccatctcgccaact

SEQ ID NO: 204471 - DNA, 25 bp, Artificial
  Probe
aactccggctcttggcgactgccga

SEQ ID NO: 204472 - DNA, 25 bp, Artificial
  Probe
cccgcctgcggcatttgggctttgc

SEQ ID NO: 204473 - DNA, 25 bp, Artificial
  Probe
agagcgcgcgcgtagagcccccagt

SEQ ID NO: 204474 - DNA, 25 bp, Artificial
  Probe
ggctttgctcctctttctgtacatt

SEQ ID NO: 204475 - DNA, 25 bp, Artificial
  Probe
catctctgggtttgcaaatggaggc

SEQ ID NO: 204476 - DNA, 25 bp, Artificial
  Probe
gtttgcaaatggaggccgacgacac

SEQ ID NO: 204477 - DNA, 25 bp, Artificial
  Probe
tcctgtccagcgtttccgaggatct

SEQ ID NO: 204478 - DNA, 25 bp, Artificial
  Probe
tgcgatcccgaactccggctcttgg

SEQ ID NO: 204479 - DNA, 25 bp, Artificial
  Probe
gaactccggctcttggcgactgccg

SEQ ID NO: 204480 - DNA, 25 bp, Artificial
  Probe
aaatggaggccgacgacaccgacag

SEQ ID NO: 204481 - DNA, 25 bp, Artificial
  Probe
ggacttcggaccatctcgccaactg

SEQ ID NO: 204482 - DNA, 25 bp, Artificial
  Probe
tgtaaaactgcagtcatcttggacc

SEQ ID NO: 204483 - DNA, 25 bp, Artificial
  Probe
ggttttgcgtagcacctcgtctctc

SEQ ID NO: 204484 - DNA, 25 bp, Artificial
  Probe
tttgcgtagcacctcgtctctcgtg

SEQ ID NO: 204485 - DNA, 25 bp, Artificial
  Probe
tcctgcttaaggtgttctaattttc

SEQ ID NO: 204486 - DNA, 25 bp, Artificial
  Probe
aatcttcagatgcagtggttttgcg

SEQ ID NO: 204487 - DNA, 25 bp, Artificial
  Probe
ttgctattcaactcctgcttaaggt

SEQ ID NO: 204488 - DNA, 25 bp, Artificial
  Probe
tttttgtaaaactgcagtcatcttg

SEQ ID NO: 204489 - DNA, 25 bp, Artificial
  Probe
aaccaagctgtgatacgtggaatgg

SEQ ID NO: 204490 - DNA, 25 bp, Artificial
  Probe
ccaagctgtgatacgtggaatggtt

SEQ ID NO: 204491 - DNA, 25 bp, Artificial
  Probe
caaatcttcagatgcagtggttttg

SEQ ID NO: 204492 - DNA, 25 bp, Artificial
  Probe
ttttgcgtagcacctcgtctctcgt

SEQ ID NO: 204493 - DNA, 25 bp, Artificial
  Probe
ctcctgcttaaggtgttctaatttt

SEQ ID NO: 204494 - DNA, 25 bp, Artificial
  Probe
caactcctgcttaaggtgttctaat

SEQ ID NO: 204495 - DNA, 25 bp, Artificial
  Probe
aactcctgcttaaggtgttctaatt

SEQ ID NO: 204496 - DNA, 25 bp, Artificial
  Probe
actcctgcttaaggtgttctaattt

SEQ ID NO: 204497 - DNA, 25 bp, Artificial
  Probe
tcaactcctgcttaaggtgttctaa

SEQ ID NO: 204498 - DNA, 25 bp, Artificial
  Probe
attcaactcctgcttaaggtgttct

SEQ ID NO: 204499 - DNA, 25 bp, Artificial
  Probe
tcttcagatgcagtggttttgcgta

SEQ ID NO: 204500 - DNA, 25 bp, Artificial
  Probe
cccaaccaagctgtgatacgtggaa

SEQ ID NO: 204501 - DNA, 25 bp, Artificial
  Probe
ttaaacccaaccaagctgtgatacg

SEQ ID NO: 204502 - DNA, 25 bp, Artificial
  Probe
aaatcttcagatgcagtggttttgc

SEQ ID NO: 204503 - DNA, 25 bp, Artificial
  Probe
gctattcaactcctgcttaaggtgt

SEQ ID NO: 204504 - DNA, 25 bp, Artificial
  Probe
ttcaactcctgcttaaggtgttcta

SEQ ID NO: 204505 - DNA, 25 bp, Artificial
  Probe
gcccatctttttgtaaaactgcagt

SEQ ID NO: 204506 - DNA, 25 bp, Artificial
  Probe
attgctattcaactcctgcttaagg

SEQ ID NO: 204507 - DNA, 25 bp, Artificial
  Probe
tcagatgcagtggttttgcgtagca

SEQ ID NO: 204508 - DNA, 25 bp, Artificial
  Probe
accaagctgtgatacgtggaatggt

SEQ ID NO: 204509 - DNA, 25 bp, Artificial
  Probe
tattcaactcctgcttaaggtgttc

SEQ ID NO: 204510 - DNA, 25 bp, Artificial
  Probe
gtggttttgcgtagcacctcgtctc

SEQ ID NO: 204511 - DNA, 25 bp, Artificial
  Probe
ttgcgtagcacctcgtctctcgtgt

SEQ ID NO: 204512 - DNA, 25 bp, Artificial
  Probe
acccaaccaagctgtgatacgtgga

SEQ ID NO: 204513 - DNA, 25 bp, Artificial
  Probe
gtaaaactgcagtcatcttggacct

SEQ ID NO: 204514 - DNA, 25 bp, Artificial
  Probe
ccaaccaagctgtgatacgtggaat

SEQ ID NO: 204515 - DNA, 25 bp, Artificial
  Probe
tggttttgcgtagcacctcgtctct

SEQ ID NO: 204516 - DNA, 25 bp, Artificial
  Probe
cagatgcagtggttttgcgtagcac

SEQ ID NO: 204517 - DNA, 25 bp, Artificial
  Probe
aaacccaaccaagctgtgatacgtg

SEQ ID NO: 204518 - DNA, 25 bp, Artificial
  Probe
cttcagatgcagtggttttgcgtag

SEQ ID NO: 204519 - DNA, 25 bp, Artificial
  Probe
atgcagtggttttgcgtagcacctc

SEQ ID NO: 204520 - DNA, 25 bp, Artificial
  Probe
ttcagatgcagtggttttgcgtagc

SEQ ID NO: 204521 - DNA, 25 bp, Artificial
  Probe
tgctattcaactcctgcttaaggtg

SEQ ID NO: 204522 - DNA, 25 bp, Artificial
  Probe
tgcccatctttttgtaaaactgcag

SEQ ID NO: 204523 - DNA, 25 bp, Artificial
  Probe
caaccaagctgtgatacgtggaatg

SEQ ID NO: 204524 - DNA, 25 bp, Artificial
  Probe
tttgtaaaactgcagtcatcttgga

SEQ ID NO: 204525 - DNA, 25 bp, Artificial
  Probe
agtggttttgcgtagcacctcgtct

SEQ ID NO: 204526 - DNA, 25 bp, Artificial
  Probe
cctgcttaaggtgttctaattttct

SEQ ID NO: 204527 - DNA, 25 bp, Artificial
  Probe
ttttgtaaaactgcagtcatcttgg

SEQ ID NO: 204528 - DNA, 25 bp, Artificial
  Probe
agcctacggggcattgtcaagcatc

SEQ ID NO: 204529 - DNA, 25 bp, Artificial
  Probe
ttggtccatatccagggacggctcc

SEQ ID NO: 204530 - DNA, 25 bp, Artificial
  Probe
tggcaacagcctacggggcattgtc

SEQ ID NO: 204531 - DNA, 25 bp, Artificial
  Probe
tgcccttctggaatgaagaaattgt

SEQ ID NO: 204532 - DNA, 25 bp, Artificial
  Probe
tcccttcatagaatctagtcagaag

SEQ ID NO: 204533 - DNA, 25 bp, Artificial
  Probe
ctgtgagagcctgaaggatactatt

SEQ ID NO: 204534 - DNA, 25 bp, Artificial
  Probe
actcttcccacaattaggtaactgg

SEQ ID NO: 204535 - DNA, 25 bp, Artificial
  Probe
ctgaaggatactattgccagggcac

SEQ ID NO: 204536 - DNA, 25 bp, Artificial
  Probe
tgcgtaaagccatggaagctgtggc

SEQ ID NO: 204537 - DNA, 25 bp, Artificial
  Probe
gctgcttgaccctactgtgtgggtt

SEQ ID NO: 204538 - DNA, 25 bp, Artificial
  Probe
agccatggaagctgtggctgctcag

SEQ ID NO: 204539 - DNA, 25 bp, Artificial
  Probe
cccatcgtctatgaactggacaaga

SEQ ID NO: 204540 - DNA, 25 bp, Artificial
  Probe
tcaagcatctggagggtctgtcaga

SEQ ID NO: 204541 - DNA, 25 bp, Artificial
  Probe
gagaagctgtggtccagttttgtcc

SEQ ID NO: 204542 - DNA, 25 bp, Artificial
  Probe
ggagaagctgtggtccagttttgtc

SEQ ID NO: 204543 - DNA, 25 bp, Artificial
  Probe
agtcagaagaagacctctggggtgc

SEQ ID NO: 204544 - DNA, 25 bp, Artificial
  Probe
tcatggagctgaacctgccaactgg

SEQ ID NO: 204545 - DNA, 25 bp, Artificial
  Probe
catctttaggatcttcagtttaagt

SEQ ID NO: 204546 - DNA, 25 bp, Artificial
  Probe
gggcataacaactaagtctctttcc

SEQ ID NO: 204547 - DNA, 25 bp, Artificial
  Probe
gatactattgccagggcactgccct

SEQ ID NO: 204548 - DNA, 25 bp, Artificial
  Probe
tgaggaccagctaccctcctgtgag

SEQ ID NO: 204549 - DNA, 25 bp, Artificial
  Probe
tcagaagaagacctctggggtgcag

SEQ ID NO: 204550 - DNA, 25 bp, Artificial
  Probe
tcttcagtttaagttgtagctgcag

SEQ ID NO: 204551 - DNA, 25 bp, Artificial
  Probe
cccttctacagcaacatcagcaagg

SEQ ID NO: 204552 - DNA, 25 bp, Artificial
  Probe
gagacgatcttacgatgtcccgcca

SEQ ID NO: 204553 - DNA, 25 bp, Artificial
  Probe
gccacactgactacatctttaggat

SEQ ID NO: 204554 - DNA, 25 bp, Artificial
  Probe
gtggctcccattctccttttagtat

SEQ ID NO: 204555 - DNA, 25 bp, Artificial
  Probe
atgaactggacaagaacttgaagcc

SEQ ID NO: 204556 - DNA, 25 bp, Artificial
  Probe
ttgaagcccatcaagcccatgcagt

SEQ ID NO: 204557 - DNA, 25 bp, Artificial
  Probe
taagttgtagctgcagatagggacc

SEQ ID NO: 204558 - DNA, 25 bp, Artificial
  Probe
ggagcctgatcatcccttctacagc

SEQ ID NO: 204559 - DNA, 25 bp, Artificial
  Probe
gcagatagggacctgtggctcccat

SEQ ID NO: 204560 - DNA, 25 bp, Artificial
  Probe
caatggagcctgatcatcccttcta

SEQ ID NO: 204561 - DNA, 25 bp, Artificial
  Probe
gggtctgtcagaagaggccatcatg

SEQ ID NO: 204562 - DNA, 25 bp, Artificial
  Probe
tgactacatctttaggatcttcagt

SEQ ID NO: 204563 - DNA, 25 bp, Artificial
  Probe
ctgcccatggcaacagcctacgggg

SEQ ID NO: 204564 - DNA, 25 bp, Artificial
  Probe
tcatagaatctagtcagaagaagac

SEQ ID NO: 204565 - DNA, 25 bp, Artificial
  Probe
gggacctgtggctcccattctcctt

SEQ ID NO: 204566 - DNA, 25 bp, Artificial
  Probe
gaccctactgtgtgggttcagaact

SEQ ID NO: 204567 - DNA, 25 bp, Artificial
  Probe
gacaagaacttgaagcccatcaagc

SEQ ID NO: 204568 - DNA, 25 bp, Artificial
  Probe
ttgtagctgcagatagggacctgtg

SEQ ID NO: 204569 - DNA, 25 bp, Artificial
  Probe
gatcttcagtttaagttgtagctgc

SEQ ID NO: 204570 - DNA, 25 bp, Artificial
  Probe
acctctggggtgcaggctcttggtc

SEQ ID NO: 204571 - DNA, 25 bp, Artificial
  Probe
cacaattaggtaactgggggcctag

SEQ ID NO: 204572 - DNA, 25 bp, Artificial
  Probe
agctaccctcctgtgagagcctgaa

SEQ ID NO: 204573 - DNA, 25 bp, Artificial
  Probe
ctgccacactgactacatctttagg

SEQ ID NO: 204574 - DNA, 25 bp, Artificial
  Probe
acttaagcagctggttgacagatgc

SEQ ID NO: 204575 - DNA, 25 bp, Artificial
  Probe
caaccccagagagaaggctgtggct

SEQ ID NO: 204576 - DNA, 25 bp, Artificial
  Probe
tctatcagaacattcaggatggaag

SEQ ID NO: 204577 - DNA, 25 bp, Artificial
  Probe
cacggagctactatagaggagctgc

SEQ ID NO: 204578 - DNA, 25 bp, Artificial
  Probe
gtacatataaccacttaagcagctg

SEQ ID NO: 204579 - DNA, 25 bp, Artificial
  Probe
ctatcagaacattcaggatggaagc

SEQ ID NO: 204580 - DNA, 25 bp, Artificial
  Probe
gctgttacacggagctactatagag

SEQ ID NO: 204581 - DNA, 25 bp, Artificial
  Probe
cagaacattcaggatggaagcctgg

SEQ ID NO: 204582 - DNA, 25 bp, Artificial
  Probe
tacacggagctactatagaggagct

SEQ ID NO: 204583 - DNA, 25 bp, Artificial
  Probe
acacggagctactatagaggagctg

SEQ ID NO: 204584 - DNA, 25 bp, Artificial
  Probe
cttaagcagctggttgacagatgca

SEQ ID NO: 204585 - DNA, 25 bp, Artificial
  Probe
acatataaccacttaagcagctggt

SEQ ID NO: 204586 - DNA, 25 bp, Artificial
  Probe
gttcagagctgttacacggagctac

SEQ ID NO: 204587 - DNA, 25 bp, Artificial
  Probe
atctatcagaacattcaggatggaa

SEQ ID NO: 204588 - DNA, 25 bp, Artificial
  Probe
agaacattcaggatggaagcctgga

SEQ ID NO: 204589 - DNA, 25 bp, Artificial
  Probe
catataaccacttaagcagctggtt

SEQ ID NO: 204590 - DNA, 25 bp, Artificial
  Probe
gaaggctgtggctgctagtgacctc

SEQ ID NO: 204591 - DNA, 25 bp, Artificial
  Probe
aaggctgtggctgctagtgacctct

SEQ ID NO: 204592 - DNA, 25 bp, Artificial
  Probe
atgacatcaccagaagaagtacata

SEQ ID NO: 204593 - DNA, 25 bp, Artificial
  Probe
tatgacatcaccagaagaagtacat

SEQ ID NO: 204594 - DNA, 25 bp, Artificial
  Probe
atataaccacttaagcagctggttg

SEQ ID NO: 204595 - DNA, 25 bp, Artificial
  Probe
gacatcaccagaagaagtacatata

SEQ ID NO: 204596 - DNA, 25 bp, Artificial
  Probe
taaccacttaagcagctggttgaca

SEQ ID NO: 204597 - DNA, 25 bp, Artificial
  Probe
atggtgtatgacatcaccagaagaa

SEQ ID NO: 204598 - DNA, 25 bp, Artificial
  Probe
acggagctactatagaggagctgca

SEQ ID NO: 204599 - DNA, 25 bp, Artificial
  Probe
aacattcaggatggaagcctggatc

SEQ ID NO: 204600 - DNA, 25 bp, Artificial
  Probe
ctgttacacggagctactatagagg

SEQ ID NO: 204601 - DNA, 25 bp, Artificial
  Probe
gtatgacatcaccagaagaagtaca

SEQ ID NO: 204602 - DNA, 25 bp, Artificial
  Probe
accccagagagaaggctgtggctgc

SEQ ID NO: 204603 - DNA, 25 bp, Artificial
  Probe
ataaccacttaagcagctggttgac

SEQ ID NO: 204604 - DNA, 25 bp, Artificial
  Probe
ttcagagctgttacacggagctact

SEQ ID NO: 204605 - DNA, 25 bp, Artificial
  Probe
tgttacacggagctactatagagga

SEQ ID NO: 204606 - DNA, 25 bp, Artificial
  Probe
aaccccagagagaaggctgtggctg

SEQ ID NO: 204607 - DNA, 25 bp, Artificial
  Probe
tcagaacattcaggatggaagcctg

SEQ ID NO: 204608 - DNA, 25 bp, Artificial
  Probe
ccacttaagcagctggttgacagat

SEQ ID NO: 204609 - DNA, 25 bp, Artificial
  Probe
acattcaggatggaagcctggatct

SEQ ID NO: 204610 - DNA, 25 bp, Artificial
  Probe
gaagtacatataaccacttaagcag

SEQ ID NO: 204611 - DNA, 25 bp, Artificial
  Probe
aaatctatcagaacattcaggatgg

SEQ ID NO: 204612 - DNA, 25 bp, Artificial
  Probe
tacatataaccacttaagcagctgg

SEQ ID NO: 204613 - DNA, 25 bp, Artificial
  Probe
ggtgtatgacatcaccagaagaagt

SEQ ID NO: 204614 - DNA, 25 bp, Artificial
  Probe
aggttcagagctgttacacggagct

SEQ ID NO: 204615 - DNA, 25 bp, Artificial
  Probe
accacttaagcagctggttgacaga

SEQ ID NO: 204616 - DNA, 25 bp, Artificial
  Probe
gttacacggagctactatagaggag

SEQ ID NO: 204617 - DNA, 25 bp, Artificial
  Probe
tatcagaacattcaggatggaagcc

SEQ ID NO: 204618 - DNA, 25 bp, Artificial
  Probe
tgtatgacatcaccagaagaagtac

SEQ ID NO: 204619 - DNA, 25 bp, Artificial
  Probe
aaccacttaagcagctggttgacag

SEQ ID NO: 204620 - DNA, 25 bp, Artificial
  Probe
agcgcccttcactctgaaggtcaac

SEQ ID NO: 204621 - DNA, 25 bp, Artificial
  Probe
ggcttcatacctgtgaagccatccg

SEQ ID NO: 204622 - DNA, 25 bp, Artificial
  Probe
aacattcagaggactgaagtgaaca

SEQ ID NO: 204623 - DNA, 25 bp, Artificial
  Probe
cattcagaggactgaagtgaacacc

SEQ ID NO: 204624 - DNA, 25 bp, Artificial
  Probe
ggagaacgacccaactccaacatgg

SEQ ID NO: 204625 - DNA, 25 bp, Artificial
  Probe
gaagcgcccttcactctgaaggtca

SEQ ID NO: 204626 - DNA, 25 bp, Artificial
  Probe
ttaaactttgataaggcagaacatc

SEQ ID NO: 204627 - DNA, 25 bp, Artificial
  Probe
gaagccatccgtgaaaaagctccaa

SEQ ID NO: 204628 - DNA, 25 bp, Artificial
  Probe
gaccagtctaacattcagaggactg

SEQ ID NO: 204629 - DNA, 25 bp, Artificial
  Probe
tgtcaggcttcatacctgtgaagcc

SEQ ID NO: 204630 - DNA, 25 bp, Artificial
  Probe
gtctaacattcagaggactgaagtg

SEQ ID NO: 204631 - DNA, 25 bp, Artificial
  Probe
gaacatcacagaaagttccagatcc

SEQ ID NO: 204632 - DNA, 25 bp, Artificial
  Probe
ccttaaactttgataaggcagaaca

SEQ ID NO: 204633 - DNA, 25 bp, Artificial
  Probe
gacccaactccaacatggtcattgt

SEQ ID NO: 204634 - DNA, 25 bp, Artificial
  Probe
ctaacattcagaggactgaagtgaa

SEQ ID NO: 204635 - DNA, 25 bp, Artificial
  Probe
ggtgtcaggcttcatacctgtgaag

SEQ ID NO: 204636 - DNA, 25 bp, Artificial
  Probe
agtctaacattcagaggactgaagt

SEQ ID NO: 204637 - DNA, 25 bp, Artificial
  Probe
taaggcagaacatcacagaaagttc

SEQ ID NO: 204638 - DNA, 25 bp, Artificial
  Probe
tcatacctgtgaagccatccgtgaa

SEQ ID NO: 204639 - DNA, 25 bp, Artificial
  Probe
gaagtgaacaccaaccacgttctaa

SEQ ID NO: 204640 - DNA, 25 bp, Artificial
  Probe
gcagaacatcacagaaagttccaga

SEQ ID NO: 204641 - DNA, 25 bp, Artificial
  Probe
tgaagtgaacaccaaccacgttcta

SEQ ID NO: 204642 - DNA, 25 bp, Artificial
  Probe
tgaaaaagctccaagaccagtctaa

SEQ ID NO: 204643 - DNA, 25 bp, Artificial
  Probe
tccaagaccagtctaacattcagag

SEQ ID NO: 204644 - DNA, 25 bp, Artificial
  Probe
cgacccaactccaacatggtcattg

SEQ ID NO: 204645 - DNA, 25 bp, Artificial
  Probe
gcgcccttcactctgaaggtcaaca

SEQ ID NO: 204646 - DNA, 25 bp, Artificial
  Probe
gcccttcactctgaaggtcaacact

SEQ ID NO: 204647 - DNA, 25 bp, Artificial
  Probe
agttccagatccacatcaacgtaag

SEQ ID NO: 204648 - DNA, 25 bp, Artificial
  Probe
gtgaaaaagctccaagaccagtcta

SEQ ID NO: 204649 - DNA, 25 bp, Artificial
  Probe
catccgtgaaaaagctccaagacca

SEQ ID NO: 204650 - DNA, 25 bp, Artificial
  Probe
tgaagccatccgtgaaaaagctcca

SEQ ID NO: 204651 - DNA, 25 bp, Artificial
  Probe
acctgtgaagccatccgtgaaaaag

SEQ ID NO: 204652 - DNA, 25 bp, Artificial
  Probe
tgaattcgccattgaagaatacagt

SEQ ID NO: 204653 - DNA, 25 bp, Artificial
  Probe
gaaagttccagatccacatcaacgt

SEQ ID NO: 204654 - DNA, 25 bp, Artificial
  Probe
aagaccagtctaacattcagaggac

SEQ ID NO: 204655 - DNA, 25 bp, Artificial
  Probe
aagccatccgtgaaaaagctccaag

SEQ ID NO: 204656 - DNA, 25 bp, Artificial
  Probe
gtgtcaggcttcatacctgtgaagc

SEQ ID NO: 204657 - DNA, 25 bp, Artificial
  Probe
ttcatacctgtgaagccatccgtga

SEQ ID NO: 204658 - DNA, 25 bp, Artificial
  Probe
attcgccattgaagaatacagtgcc

SEQ ID NO: 204659 - DNA, 25 bp, Artificial
  Probe
ttgaagaatacagtgcccctttcag

SEQ ID NO: 204660 - DNA, 25 bp, Artificial
  Probe
gttccagatccacatcaacgtaagc

SEQ ID NO: 204661 - DNA, 25 bp, Artificial
  Probe
cctgtgaagccatccgtgaaaaagc

SEQ ID NO: 204662 - DNA, 25 bp, Artificial
  Probe
cccaactccaacatggtcattgttg

SEQ ID NO: 204663 - DNA, 25 bp, Artificial
  Probe
tccgtgaaaaagctccaagaccagt

SEQ ID NO: 204664 - DNA, 25 bp, Artificial
  Probe
aggcagaacatcacagaaagttcca

SEQ ID NO: 204665 - DNA, 25 bp, Artificial
  Probe
tgaagaatacagtgcccctttcagt

SEQ ID NO: 204666 - DNA, 25 bp, Artificial
  Probe
tatcgatgaacatgccacaaagagg

SEQ ID NO: 204667 - DNA, 25 bp, Artificial
  Probe
cctcatgctctgatactgatagcat

SEQ ID NO: 204668 - DNA, 25 bp, Artificial
  Probe
tgccaatgacatcaccaacgaccga

SEQ ID NO: 204669 - DNA, 25 bp, Artificial
  Probe
ccagcctaggcaagaagtacaaggg

SEQ ID NO: 204670 - DNA, 25 bp, Artificial
  Probe
aatgccacctcatgctctgatactg

SEQ ID NO: 204671 - DNA, 25 bp, Artificial
  Probe
agtacaagggccagaaggacttggt

SEQ ID NO: 204672 - DNA, 25 bp, Artificial
  Probe
aagatggatgctactgccaatgaca

SEQ ID NO: 204673 - DNA, 25 bp, Artificial
  Probe
tgaatggcaggatcttgaccctttt

SEQ ID NO: 204674 - DNA, 25 bp, Artificial
  Probe
catttgagcaagtttatcgatgaac

SEQ ID NO: 204675 - DNA, 25 bp, Artificial
  Probe
tgacatcaccaacgaccgatacaag

SEQ ID NO: 204676 - DNA, 25 bp, Artificial
  Probe
gccacctcatgctctgatactgata

SEQ ID NO: 204677 - DNA, 25 bp, Artificial
  Probe
ggtcatcgccaagatggatgctact

SEQ ID NO: 204678 - DNA, 25 bp, Artificial
  Probe
catcgccaagatggatgctactgcc

SEQ ID NO: 204679 - DNA, 25 bp, Artificial
  Probe
agacactgtagtggacagctttggc

SEQ ID NO: 204680 - DNA, 25 bp, Artificial
  Probe
aggacttggtcatcgccaagatgga

SEQ ID NO: 204681 - DNA, 25 bp, Artificial
  Probe
tgccacctcatgctctgatactgat

SEQ ID NO: 204682 - DNA, 25 bp, Artificial
  Probe
ctcatgctctgatactgatagcatg

SEQ ID NO: 204683 - DNA, 25 bp, Artificial
  Probe
aatggcaggatcttgaccctttttt

SEQ ID NO: 204684 - DNA, 25 bp, Artificial
  Probe
gacactgtagtggacagctttggcc

SEQ ID NO: 204685 - DNA, 25 bp, Artificial
  Probe
ccagaaggacttggtcatcgccaag

SEQ ID NO: 204686 - DNA, 25 bp, Artificial
  Probe
atgaacatgccacaaagaggagcag

SEQ ID NO: 204687 - DNA, 25 bp, Artificial
  Probe
agggatcagacactgtagtggacag

SEQ ID NO: 204688 - DNA, 25 bp, Artificial
  Probe
gccaatgacatcaccaacgaccgat

SEQ ID NO: 204689 - DNA, 25 bp, Artificial
  Probe
ctgatactgatagcatgatgacttg

SEQ ID NO: 204690 - DNA, 25 bp, Artificial
  Probe
ggatcagacactgtagtggacagct

SEQ ID NO: 204691 - DNA, 25 bp, Artificial
  Probe
cttcaaacaagtaagttttggatct

SEQ ID NO: 204692 - DNA, 25 bp, Artificial
  Probe
tgaacatgccacaaagaggagcagg

SEQ ID NO: 204693 - DNA, 25 bp, Artificial
  Probe
ccacctcatgctctgatactgatag

SEQ ID NO: 204694 - DNA, 25 bp, Artificial
  Probe
atcgccaagatggatgctactgcca

SEQ ID NO: 204695 - DNA, 25 bp, Artificial
  Probe
atcagacactgtagtggacagcttt

SEQ ID NO: 204696 - DNA, 25 bp, Artificial
  Probe
tacaagggccagaaggacttggtca

SEQ ID NO: 204697 - DNA, 25 bp, Artificial
  Probe
tcttcaaacaagtaagttttggatc

SEQ ID NO: 204698 - DNA, 25 bp, Artificial
  Probe
agatggatgctactgccaatgacat

SEQ ID NO: 204699 - DNA, 25 bp, Artificial
  Probe
caccatctattttgcccccagtggg

SEQ ID NO: 204700 - DNA, 25 bp, Artificial
  Probe
aagggccagaaggacttggtcatcg

SEQ ID NO: 204701 - DNA, 25 bp, Artificial
  Probe
ttggtcatcgccaagatggatgcta

SEQ ID NO: 204702 - DNA, 25 bp, Artificial
  Probe
cgccaagatggatgctactgccaat

SEQ ID NO: 204703 - DNA, 25 bp, Artificial
  Probe
gaaggacttggtcatcgccaagatg

SEQ ID NO: 204704 - DNA, 25 bp, Artificial
  Probe
gatgaacatgccacaaagaggagca

SEQ ID NO: 204705 - DNA, 25 bp, Artificial
  Probe
gctactgccaatgacatcaccaacg

SEQ ID NO: 204706 - DNA, 25 bp, Artificial
  Probe
ctctgatactgatagcatgatgact

SEQ ID NO: 204707 - DNA, 25 bp, Artificial
  Probe
gatgctactgccaatgacatcacca

SEQ ID NO: 204708 - DNA, 25 bp, Artificial
  Probe
gatggatgctactgccaatgacatc

SEQ ID NO: 204709 - DNA, 25 bp, Artificial
  Probe
gtttatcgatgaacatgccacaaag

SEQ ID NO: 204710 - DNA, 25 bp, Artificial
  Probe
gtacaagggccagaaggacttggtc

SEQ ID NO: 204711 - DNA, 25 bp, Artificial
  Probe
catgctctgatactgatagcatgat

SEQ ID NO: 204712 - DNA, 25 bp, Artificial
  Probe
cgtggccgtgggactccaacctgtt

SEQ ID NO: 204713 - DNA, 25 bp, Artificial
  Probe
gacgttggcactgtcatcaggcctc

SEQ ID NO: 204714 - DNA, 25 bp, Artificial
  Probe
cgttggcactgtcatcaggcctctg

SEQ ID NO: 204715 - DNA, 25 bp, Artificial
  Probe
tgtttcatcagcatttgacgttggc

SEQ ID NO: 204716 - DNA, 25 bp, Artificial
  Probe
tgtcatcaggcctctgactcgaggc

SEQ ID NO: 204717 - DNA, 25 bp, Artificial
  Probe
tttgacgttggcactgtcatcaggc

SEQ ID NO: 204718 - DNA, 25 bp, Artificial
  Probe
cgaggctactgctggcccagatcct

SEQ ID NO: 204719 - DNA, 25 bp, Artificial
  Probe
ctcgaggctactgctggcccagatc

SEQ ID NO: 204720 - DNA, 25 bp, Artificial
  Probe
gtcatcaggcctctgactcgaggct

SEQ ID NO: 204721 - DNA, 25 bp, Artificial
  Probe
cagcatttgacgttggcactgtcat

SEQ ID NO: 204722 - DNA, 25 bp, Artificial
  Probe
ttgaggccttctgttccaaacttat

SEQ ID NO: 204723 - DNA, 25 bp, Artificial
  Probe
atcagcatttgacgttggcactgtc

SEQ ID NO: 204724 - DNA, 25 bp, Artificial
  Probe
aggcctctgactcgaggctactgct

SEQ ID NO: 204725 - DNA, 25 bp, Artificial
  Probe
ggcccattcttggtcttggggttca

SEQ ID NO: 204726 - DNA, 25 bp, Artificial
  Probe
gactcgaggctactgctggcccaga

SEQ ID NO: 204727 - DNA, 25 bp, Artificial
  Probe
acagttgaggccttctgttccaaac

SEQ ID NO: 204728 - DNA, 25 bp, Artificial
  Probe
cattcttggtcttggggttcacagt

SEQ ID NO: 204729 - DNA, 25 bp, Artificial
  Probe
agcatttgacgttggcactgtcatc

SEQ ID NO: 204730 - DNA, 25 bp, Artificial
  Probe
tgacgttggcactgtcatcaggcct

SEQ ID NO: 204731 - DNA, 25 bp, Artificial
  Probe
ggactccaacctgtttcatcagcat

SEQ ID NO: 204732 - DNA, 25 bp, Artificial
  Probe
ccattcttggtcttggggttcacag

SEQ ID NO: 204733 - DNA, 25 bp, Artificial
  Probe
aacctgtttcatcagcatttgacgt

SEQ ID NO: 204734 - DNA, 25 bp, Artificial
  Probe
cgtgggactccaacctgtttcatca

SEQ ID NO: 204735 - DNA, 25 bp, Artificial
  Probe
cttggggttcacagttgaggccttc

SEQ ID NO: 204736 - DNA, 25 bp, Artificial
  Probe
ctgactcgaggctactgctggccca

SEQ ID NO: 204737 - DNA, 25 bp, Artificial
  Probe
gtcttggggttcacagttgaggcct

SEQ ID NO: 204738 - DNA, 25 bp, Artificial
  Probe
gggttcacagttgaggccttctgtt

SEQ ID NO: 204739 - DNA, 25 bp, Artificial
  Probe
ggcactgtcatcaggcctctgactc

SEQ ID NO: 204740 - DNA, 25 bp, Artificial
  Probe
cagttgaggccttctgttccaaact

SEQ ID NO: 204741 - DNA, 25 bp, Artificial
  Probe
tggccgtgggactccaacctgtttc

SEQ ID NO: 204742 - DNA, 25 bp, Artificial
  Probe
ggttcacagttgaggccttctgttc

SEQ ID NO: 204743 - DNA, 25 bp, Artificial
  Probe
tggggttcacagttgaggccttctg

SEQ ID NO: 204744 - DNA, 25 bp, Artificial
  Probe
catcaggcctctgactcgaggctac

SEQ ID NO: 204745 - DNA, 25 bp, Artificial
  Probe
tgggactccaacctgtttcatcagc

SEQ ID NO: 204746 - DNA, 25 bp, Artificial
  Probe
tcatcagcatttgacgttggcactg

SEQ ID NO: 204747 - DNA, 25 bp, Artificial
  Probe
ttggcactgtcatcaggcctctgac

SEQ ID NO: 204748 - DNA, 25 bp, Artificial
  Probe
gccgtgggactccaacctgtttcat

SEQ ID NO: 204749 - DNA, 25 bp, Artificial
  Probe
gaggcccattcttggtcttggggtt

SEQ ID NO: 204750 - DNA, 25 bp, Artificial
  Probe
caacctgtttcatcagcatttgacg

SEQ ID NO: 204751 - DNA, 25 bp, Artificial
  Probe
ggcctctgactcgaggctactgctg

SEQ ID NO: 204752 - DNA, 25 bp, Artificial
  Probe
tttcatcagcatttgacgttggcac

SEQ ID NO: 204753 - DNA, 25 bp, Artificial
  Probe
gcctctgactcgaggctactgctgg

SEQ ID NO: 204754 - DNA, 25 bp, Artificial
  Probe
gaggccttctgttccaaacttatgt

SEQ ID NO: 204755 - DNA, 25 bp, Artificial
  Probe
cctgtttcatcagcatttgacgttg

SEQ ID NO: 204756 - DNA, 25 bp, Artificial
  Probe
ggccttctgttccaaacttatgttc

SEQ ID NO: 204757 - DNA, 25 bp, Artificial
  Probe
gcccattcttggtcttggggttcac

SEQ ID NO: 204758 - DNA, 25 bp, Artificial
  Probe
ctgtgcctggggattacaccgtgaa

SEQ ID NO: 204759 - DNA, 25 bp, Artificial
  Probe
tgaagtggctcacaaagcagcagaa

SEQ ID NO: 204760 - DNA, 25 bp, Artificial
  Probe
gcttatcttaccactgagccagctc

SEQ ID NO: 204761 - DNA, 25 bp, Artificial
  Probe
catatgtgctcctggcttatcttac

SEQ ID NO: 204762 - DNA, 25 bp, Artificial
  Probe
cactgtagtggctctccacgctttg

SEQ ID NO: 204763 - DNA, 25 bp, Artificial
  Probe
agagagtcacattgccgactgtgcc

SEQ ID NO: 204764 - DNA, 25 bp, Artificial
  Probe
gtcacattgccgactgtgcctgggg

SEQ ID NO: 204765 - DNA, 25 bp, Artificial
  Probe
actgagccagctccaacccaagagg

SEQ ID NO: 204766 - DNA, 25 bp, Artificial
  Probe
aggtgtcaaatcagacggtgaactt

SEQ ID NO: 204767 - DNA, 25 bp, Artificial
  Probe
caagaggacctaacggctgccatgc

SEQ ID NO: 204768 - DNA, 25 bp, Artificial
  Probe
gccgactgtgcctggggattacacc

SEQ ID NO: 204769 - DNA, 25 bp, Artificial
  Probe
cactttcacaagagctaagaaagct

SEQ ID NO: 204770 - DNA, 25 bp, Artificial
  Probe
gctccaacccaagaggacctaacgg

SEQ ID NO: 204771 - DNA, 25 bp, Artificial
  Probe
tgctcctggcttatcttaccactga

SEQ ID NO: 204772 - DNA, 25 bp, Artificial
  Probe
cagaagtcagcaataaccatgtctt

SEQ ID NO: 204773 - DNA, 25 bp, Artificial
  Probe
accatccgttcttcgggcacatttt

SEQ ID NO: 204774 - DNA, 25 bp, Artificial
  Probe
ctccagacatccttgaaatacagtg

SEQ ID NO: 204775 - DNA, 25 bp, Artificial
  Probe
tcgtgaagtggctcacaaagcagca

SEQ ID NO: 204776 - DNA, 25 bp, Artificial
  Probe
gtgtcaaatcagacggtgaacttgt

SEQ ID NO: 204777 - DNA, 25 bp, Artificial
  Probe
gggtccgccactttcacaagagcta

SEQ ID NO: 204778 - DNA, 25 bp, Artificial
  Probe
ctaacggctgccatgctcatcgtga

SEQ ID NO: 204779 - DNA, 25 bp, Artificial
  Probe
agaaggctgtgtctacctccagaca

SEQ ID NO: 204780 - DNA, 25 bp, Artificial
  Probe
tgtgctcctggcttatcttaccact

SEQ ID NO: 204781 - DNA, 25 bp, Artificial
  Probe
tttcacaagagctaagaaagctgca

SEQ ID NO: 204782 - DNA, 25 bp, Artificial
  Probe
tgagccagctccaacccaagaggac

SEQ ID NO: 204783 - DNA, 25 bp, Artificial
  Probe
acggtggcttctcttccacccagga

SEQ ID NO: 204784 - DNA, 25 bp, Artificial
  Probe
tgcctggggattacaccgtgaaggt

SEQ ID NO: 204785 - DNA, 25 bp, Artificial
  Probe
atccttgaaatacagtgttctcccg

SEQ ID NO: 204786 - DNA, 25 bp, Artificial
  Probe
ggtggcttctcttccacccaggaca

SEQ ID NO: 204787 - DNA, 25 bp, Artificial
  Probe
gtcagcaataaccatgtcttgattt

SEQ ID NO: 204788 - DNA, 25 bp, Artificial
  Probe
aggacactgtagtggctctccacgc

SEQ ID NO: 204789 - DNA, 25 bp, Artificial
  Probe
cattgccgactgtgcctggggatta

SEQ ID NO: 204790 - DNA, 25 bp, Artificial
  Probe
ggacctaacggctgccatgctcatc

SEQ ID NO: 204791 - DNA, 25 bp, Artificial
  Probe
agcagaattcccacggtggcttctc

SEQ ID NO: 204792 - DNA, 25 bp, Artificial
  Probe
agctccaacccaagaggacctaacg

SEQ ID NO: 204793 - DNA, 25 bp, Artificial
  Probe
tagtggctctccacgctttgtccaa

SEQ ID NO: 204794 - DNA, 25 bp, Artificial
  Probe
tcttccacccaggacactgtagtgg

SEQ ID NO: 204795 - DNA, 25 bp, Artificial
  Probe
gaattcccacggtggcttctcttcc

SEQ ID NO: 204796 - DNA, 25 bp, Artificial
  Probe
aagcagcagaattcccacggtggct

SEQ ID NO: 204797 - DNA, 25 bp, Artificial
  Probe
gtgtctacctccagacatccttgaa

SEQ ID NO: 204798 - DNA, 25 bp, Artificial
  Probe
cctggggattacaccgtgaaggtga

SEQ ID NO: 204799 - DNA, 25 bp, Artificial
  Probe
ctcatcgtgaagtggctcacaaagc

SEQ ID NO: 204800 - DNA, 25 bp, Artificial
  Probe
caaatcagacggtgaacttgtcctt

SEQ ID NO: 204801 - DNA, 25 bp, Artificial
  Probe
gacatccttgaaatacagtgttctc

SEQ ID NO: 204802 - DNA, 25 bp, Artificial
  Probe
attattactccagagagtcacattg

SEQ ID NO: 204803 - DNA, 25 bp, Artificial
  Probe
cgccactttcacaagagctaagaaa

SEQ ID NO: 204804 - DNA, 25 bp, Artificial
  Probe
tgccctaggggtccaaccttggcaa

SEQ ID NO: 204805 - DNA, 25 bp, Artificial
  Probe
gtcatctccagtatctagcagtcac

SEQ ID NO: 204806 - DNA, 25 bp, Artificial
  Probe
tacctagaacggtcttcctttgttg

SEQ ID NO: 204807 - DNA, 25 bp, Artificial
  Probe
ggctctgtcatcattattttgatgt

SEQ ID NO: 204808 - DNA, 25 bp, Artificial
  Probe
ctcggcaggctaatgtgaactagat

SEQ ID NO: 204809 - DNA, 25 bp, Artificial
  Probe
tcctctgcagcttctaggttttatt

SEQ ID NO: 204810 - DNA, 25 bp, Artificial
  Probe
gttccctgtttaagatcaggagggt

SEQ ID NO: 204811 - DNA, 25 bp, Artificial
  Probe
gtgtccctgaaaatgcaaaagaaga

SEQ ID NO: 204812 - DNA, 25 bp, Artificial
  Probe
tgacttactttcttacctagaacgg

SEQ ID NO: 204813 - DNA, 25 bp, Artificial
  Probe
tgctatgaccccagaactacagatt

SEQ ID NO: 204814 - DNA, 25 bp, Artificial
  Probe
taaactggttttgaaccatattgtc

SEQ ID NO: 204815 - DNA, 25 bp, Artificial
  Probe
ccaaaccagaacaagaaagaggctg

SEQ ID NO: 204816 - DNA, 25 bp, Artificial
  Probe
tcattgcaaaggatgtattgcattc

SEQ ID NO: 204817 - DNA, 25 bp, Artificial
  Probe
tctcagcaagaagttgggagccaga

SEQ ID NO: 204818 - DNA, 25 bp, Artificial
  Probe
gtgacttactttcttacctagaacg

SEQ ID NO: 204819 - DNA, 25 bp, Artificial
  Probe
agataagaactgcacattcatggtt

SEQ ID NO: 204820 - DNA, 25 bp, Artificial
  Probe
tatgatctcggcaggctaatgtgaa

SEQ ID NO: 204821 - DNA, 25 bp, Artificial
  Probe
atgtagaagacacaacctttgagtc

SEQ ID NO: 204822 - DNA, 25 bp, Artificial
  Probe
acaggcataaaatccctggaatacc

SEQ ID NO: 204823 - DNA, 25 bp, Artificial
  Probe
ctgccctaggggtccaaccttggca

SEQ ID NO: 204824 - DNA, 25 bp, Artificial
  Probe
agcagtcaccctagctgctatgacc

SEQ ID NO: 204825 - DNA, 25 bp, Artificial
  Probe
tggccgtgtccctgaaaatgcaaaa

SEQ ID NO: 204826 - DNA, 25 bp, Artificial
  Probe
attcttgtatcgttccctgtttaag

SEQ ID NO: 204827 - DNA, 25 bp, Artificial
  Probe
ctccagcgaatttcctctgcagctt

SEQ ID NO: 204828 - DNA, 25 bp, Artificial
  Probe
gcacattcatggttgtacccttacc

SEQ ID NO: 204829 - DNA, 25 bp, Artificial
  Probe
caaaccagaacaagaaagaggctgt

SEQ ID NO: 204830 - DNA, 25 bp, Artificial
  Probe
ccatttttggtattaagtggacatc

SEQ ID NO: 204831 - DNA, 25 bp, Artificial
  Probe
gtattctctgttcctgatgctatcc

SEQ ID NO: 204832 - DNA, 25 bp, Artificial
  Probe
tgctactcatggagccctactattc

SEQ ID NO: 204833 - DNA, 25 bp, Artificial
  Probe
tccaaccttggcaaaaccaagggct

SEQ ID NO: 204834 - DNA, 25 bp, Artificial
  Probe
actggggtccaaagtagtgttgcac

SEQ ID NO: 204835 - DNA, 25 bp, Artificial
  Probe
accaatctttgactcattcactggg

SEQ ID NO: 204836 - DNA, 25 bp, Artificial
  Probe
tagaacggtcttcctttgttggatt

SEQ ID NO: 204837 - DNA, 25 bp, Artificial
  Probe
tcctgagttgaatgttgggctctgt

SEQ ID NO: 204838 - DNA, 25 bp, Artificial
  Probe
tgaatgttgggctctgtcatcatta

SEQ ID NO: 204839 - DNA, 25 bp, Artificial
  Probe
cctagctgctatgaccccagaacta

SEQ ID NO: 204840 - DNA, 25 bp, Artificial
  Probe
aacaggcataaaatccctggaatac

SEQ ID NO: 204841 - DNA, 25 bp, Artificial
  Probe
ccatattgtccaaggcaacctctag

SEQ ID NO: 204842 - DNA, 25 bp, Artificial
  Probe
aggatgtattgcattccactgtctc

SEQ ID NO: 204843 - DNA, 25 bp, Artificial
  Probe
tttatttgctctgtcatgacttgca

SEQ ID NO: 204844 - DNA, 25 bp, Artificial
  Probe
aggtgtccatgagttaaagcaccac

SEQ ID NO: 204845 - DNA, 25 bp, Artificial
  Probe
ggtatatggctatgatctcggcagg

SEQ ID NO: 204846 - DNA, 25 bp, Artificial
  Probe
agggtgtgcaacctttgctttacca

SEQ ID NO: 204847 - DNA, 25 bp, Artificial
  Probe
gagccctactattcttgtatcgttc

SEQ ID NO: 204848 - DNA, 25 bp, Artificial
  Probe
taaactcctgctactcatggagccc

SEQ ID NO: 204849 - DNA, 25 bp, Artificial
  Probe
tgctaaggtgtccatgagttaaagc

SEQ ID NO: 204850 - DNA, 25 bp, Artificial
  Probe
cacgctgcggggtatcttccgccag

SEQ ID NO: 204851 - DNA, 25 bp, Artificial
  Probe
agataaagccaaacagcgcaacgtg

SEQ ID NO: 204852 - DNA, 25 bp, Artificial
  Probe
gccatgggcaactgcgcgtgaaagc

SEQ ID NO: 204853 - DNA, 25 bp, Artificial
  Probe
gctccttggtcaaggccatgggcaa

SEQ ID NO: 204854 - DNA, 25 bp, Artificial
  Probe
atcttccgccagctgcctgagagct

SEQ ID NO: 204855 - DNA, 25 bp, Artificial
  Probe
aactggacacgctgcggggtatctt

SEQ ID NO: 204856 - DNA, 25 bp, Artificial
  Probe
gagttgaccagtgacaatgaccgcc

SEQ ID NO: 204857 - DNA, 25 bp, Artificial
  Probe
ggagttgaccagtgacaatgaccgc

SEQ ID NO: 204858 - DNA, 25 bp, Artificial
  Probe
tggtcaaggccatgggcaactgcgc

SEQ ID NO: 204859 - DNA, 25 bp, Artificial
  Probe
agctgagccgtgaactggacacgct

SEQ ID NO: 204860 - DNA, 25 bp, Artificial
  Probe
tgagagctccttggtcaaggccatg

SEQ ID NO: 204861 - DNA, 25 bp, Artificial
  Probe
gataaagccaaacagcgcaacgtgg

SEQ ID NO: 204862 - DNA, 25 bp, Artificial
  Probe
tcgctcaagggcttggctggtccgc

SEQ ID NO: 204863 - DNA, 25 bp, Artificial
  Probe
gaccagtgacaatgaccgcctgcgc

SEQ ID NO: 204864 - DNA, 25 bp, Artificial
  Probe
cgccagctgcctgagagctccttgg

SEQ ID NO: 204865 - DNA, 25 bp, Artificial
  Probe
ttggagttgaccagtgacaatgacc

SEQ ID NO: 204866 - DNA, 25 bp, Artificial
  Probe
cacttgcagttccagatcgcacact

SEQ ID NO: 204867 - DNA, 25 bp, Artificial
  Probe
aggccatgggcaactgcgcgtgaaa

SEQ ID NO: 204868 - DNA, 25 bp, Artificial
  Probe
gctgagccgtgaactggacacgctg

SEQ ID NO: 204869 - DNA, 25 bp, Artificial
  Probe
tgcggggtatcttccgccagctgcc

SEQ ID NO: 204870 - DNA, 25 bp, Artificial
  Probe
ctgcctgagagctccttggtcaagg

SEQ ID NO: 204871 - DNA, 25 bp, Artificial
  Probe
cgctcaagggcttggctggtccgca

SEQ ID NO: 204872 - DNA, 25 bp, Artificial
  Probe
gttgaccagtgacaatgaccgcctg

SEQ ID NO: 204873 - DNA, 25 bp, Artificial
  Probe
cgctgcggggtatcttccgccagct

SEQ ID NO: 204874 - DNA, 25 bp, Artificial
  Probe
gagctccttggtcaaggccatgggc

SEQ ID NO: 204875 - DNA, 25 bp, Artificial
  Probe
aaggccatgggcaactgcgcgtgaa

SEQ ID NO: 204876 - DNA, 25 bp, Artificial
  Probe
ccagtgacaatgaccgcctgcgcaa

SEQ ID NO: 204877 - DNA, 25 bp, Artificial
  Probe
gagataaagccaaacagcgcaacgt

SEQ ID NO: 204878 - DNA, 25 bp, Artificial
  Probe
agctccttggtcaaggccatgggca

SEQ ID NO: 204879 - DNA, 25 bp, Artificial
  Probe
ttggtcaaggccatgggcaactgcg

SEQ ID NO: 204880 - DNA, 25 bp, Artificial
  Probe
ctgagccgtgaactggacacgctgc

SEQ ID NO: 204881 - DNA, 25 bp, Artificial
  Probe
tgcctgagagctccttggtcaaggc

SEQ ID NO: 204882 - DNA, 25 bp, Artificial
  Probe
gccagctgcctgagagctccttggt

SEQ ID NO: 204883 - DNA, 25 bp, Artificial
  Probe
ttccagatcgcacactgcggccaga

SEQ ID NO: 204884 - DNA, 25 bp, Artificial
  Probe
ttgcagttccagatcgcacactgcg

SEQ ID NO: 204885 - DNA, 25 bp, Artificial
  Probe
cagctgcctgagagctccttggtca

SEQ ID NO: 204886 - DNA, 25 bp, Artificial
  Probe
cctgagagctccttggtcaaggcca

SEQ ID NO: 204887 - DNA, 25 bp, Artificial
  Probe
acagctgagccgtgaactggacacg

SEQ ID NO: 204888 - DNA, 25 bp, Artificial
  Probe
gttccagatcgcacactgcggccag

SEQ ID NO: 204889 - DNA, 25 bp, Artificial
  Probe
tgagccgtgaactggacacgctgcg

SEQ ID NO: 204890 - DNA, 25 bp, Artificial
  Probe
ctcacttgcagttccagatcgcaca

SEQ ID NO: 204891 - DNA, 25 bp, Artificial
  Probe
cgagataaagccaaacagcgcaacg

SEQ ID NO: 204892 - DNA, 25 bp, Artificial
  Probe
ttgaccagtgacaatgaccgcctgc

SEQ ID NO: 204893 - DNA, 25 bp, Artificial
  Probe
acaatgaccgcctgcgcaagcgggt

SEQ ID NO: 204894 - DNA, 25 bp, Artificial
  Probe
tgcagttccagatcgcacactgcgg

SEQ ID NO: 204895 - DNA, 25 bp, Artificial
  Probe
ccagctgcctgagagctccttggtc

SEQ ID NO: 204896 - DNA, 25 bp, Artificial
  Probe
acttagaaagggtcggatgtactga

SEQ ID NO: 204897 - DNA, 25 bp, Artificial
  Probe
tatgagtttcttgtcccgttgagcc

SEQ ID NO: 204898 - DNA, 25 bp, Artificial
  Probe
tttcaaaggtagagccagagaaggg

SEQ ID NO: 204899 - DNA, 25 bp, Artificial
  Probe
ttgtcccgttgagccagcattgcgt

SEQ ID NO: 204900 - DNA, 25 bp, Artificial
  Probe
aggtagagccagagaagggggaaat

SEQ ID NO: 204901 - DNA, 25 bp, Artificial
  Probe
aatatctactatgctgtgaatagga

SEQ ID NO: 204902 - DNA, 25 bp, Artificial
  Probe
gaaatatctactatgctgtgaatag

SEQ ID NO: 204903 - DNA, 25 bp, Artificial
  Probe
gccagcattgcgtgagagtaaaggg

SEQ ID NO: 204904 - DNA, 25 bp, Artificial
  Probe
gaaagggtcggatgtactgaagaaa

SEQ ID NO: 204905 - DNA, 25 bp, Artificial
  Probe
cgttgagccagcattgcgtgagagt

SEQ ID NO: 204906 - DNA, 25 bp, Artificial
  Probe
cagcattgcgtgagagtaaagggaa

SEQ ID NO: 204907 - DNA, 25 bp, Artificial
  Probe
atctactatgctgtgaataggaata

SEQ ID NO: 204908 - DNA, 25 bp, Artificial
  Probe
gcattgcgtgagagtaaagggaaga

SEQ ID NO: 204909 - DNA, 25 bp, Artificial
  Probe
ctactatgctgtgaataggaataat

SEQ ID NO: 204910 - DNA, 25 bp, Artificial
  Probe
agagtagacctgctgaagatatata

SEQ ID NO: 204911 - DNA, 25 bp, Artificial
  Probe
agaaagggtcggatgtactgaagaa

SEQ ID NO: 204912 - DNA, 25 bp, Artificial
  Probe
aaatatctactatgctgtgaatagg

SEQ ID NO: 204913 - DNA, 25 bp, Artificial
  Probe
agggtcggatgtactgaagaaacag

SEQ ID NO: 204914 - DNA, 25 bp, Artificial
  Probe
aacttagaaagggtcggatgtactg

SEQ ID NO: 204915 - DNA, 25 bp, Artificial
  Probe
agacctgctgaagatatatatttca

SEQ ID NO: 204916 - DNA, 25 bp, Artificial
  Probe
cattgcgtgagagtaaagggaagaa

SEQ ID NO: 204917 - DNA, 25 bp, Artificial
  Probe
gtcccgttgagccagcattgcgtga

SEQ ID NO: 204918 - DNA, 25 bp, Artificial
  Probe
agccagcattgcgtgagagtaaagg

SEQ ID NO: 204919 - DNA, 25 bp, Artificial
  Probe
gttgagccagcattgcgtgagagta

SEQ ID NO: 204920 - DNA, 25 bp, Artificial
  Probe
ggtagagccagagaagggggaaata

SEQ ID NO: 204921 - DNA, 25 bp, Artificial
  Probe
ccgttgagccagcattgcgtgagag

SEQ ID NO: 204922 - DNA, 25 bp, Artificial
  Probe
aaaaagagtagacctgctgaagata

SEQ ID NO: 204923 - DNA, 25 bp, Artificial
  Probe
tctactatgctgtgaataggaataa

SEQ ID NO: 204924 - DNA, 25 bp, Artificial
  Probe
gagtagacctgctgaagatatatat

SEQ ID NO: 204925 - DNA, 25 bp, Artificial
  Probe
gggaaatatctactatgctgtgaat

SEQ ID NO: 204926 - DNA, 25 bp, Artificial
  Probe
tagacctgctgaagatatatatttc

SEQ ID NO: 204927 - DNA, 25 bp, Artificial
  Probe
ccagcattgcgtgagagtaaaggga

SEQ ID NO: 204928 - DNA, 25 bp, Artificial
  Probe
ttgagccagcattgcgtgagagtaa

SEQ ID NO: 204929 - DNA, 25 bp, Artificial
  Probe
agtttcttgtcccgttgagccagca

SEQ ID NO: 204930 - DNA, 25 bp, Artificial
  Probe
ctatgagtttcttgtcccgttgagc

SEQ ID NO: 204931 - DNA, 25 bp, Artificial
  Probe
tgagccagcattgcgtgagagtaaa

SEQ ID NO: 204932 - DNA, 25 bp, Artificial
  Probe
cttgtcccgttgagccagcattgcg

SEQ ID NO: 204933 - DNA, 25 bp, Artificial
  Probe
agtagacctgctgaagatatatatt

SEQ ID NO: 204934 - DNA, 25 bp, Artificial
  Probe
aaaagagtagacctgctgaagatat

SEQ ID NO: 204935 - DNA, 25 bp, Artificial
  Probe
cccgttgagccagcattgcgtgaga

SEQ ID NO: 204936 - DNA, 25 bp, Artificial
  Probe
tgtcccgttgagccagcattgcgtg

SEQ ID NO: 204937 - DNA, 25 bp, Artificial
  Probe
atatttcaaaggtagagccagagaa

SEQ ID NO: 204938 - DNA, 25 bp, Artificial
  Probe
atttcaaaggtagagccagagaagg

SEQ ID NO: 204939 - DNA, 25 bp, Artificial
  Probe
tcccgttgagccagcattgcgtgag

SEQ ID NO: 204940 - DNA, 25 bp, Artificial
  Probe
aagagtagacctgctgaagatatat

SEQ ID NO: 204941 - DNA, 25 bp, Artificial
  Probe
actatgagtttcttgtcccgttgag

SEQ ID NO: 204942 - DNA, 25 bp, Artificial
  Probe
gaactggaagtccagtaccagggca

SEQ ID NO: 204943 - DNA, 25 bp, Artificial
  Probe
ggatttgcccggaaccctcatcttc

SEQ ID NO: 204944 - DNA, 25 bp, Artificial
  Probe
tgtaatcggatttgcccggaaccct

SEQ ID NO: 204945 - DNA, 25 bp, Artificial
  Probe
tccctttgcgggaacgatggtgtga

SEQ ID NO: 204946 - DNA, 25 bp, Artificial
  Probe
ccagtgcctgccacctgagaaaggc

SEQ ID NO: 204947 - DNA, 25 bp, Artificial
  Probe
gagcagtccctttgcgggaacgatg

SEQ ID NO: 204948 - DNA, 25 bp, Artificial
  Probe
cagctccacttgtgtggtggatcag

SEQ ID NO: 204949 - DNA, 25 bp, Artificial
  Probe
actgtgtgacctgtaatcggatttg

SEQ ID NO: 204950 - DNA, 25 bp, Artificial
  Probe
gatttgcccggaaccctcatcttca

SEQ ID NO: 204951 - DNA, 25 bp, Artificial
  Probe
ccctttgcgggaacgatggtgtgac

SEQ ID NO: 204952 - DNA, 25 bp, Artificial
  Probe
ataatgcctactgtgtgacctgtaa

SEQ ID NO: 204953 - DNA, 25 bp, Artificial
  Probe
aagagcagccggaactggaagtcca

SEQ ID NO: 204954 - DNA, 25 bp, Artificial
  Probe
cgatggtgtgacttactccagtgcc

SEQ ID NO: 204955 - DNA, 25 bp, Artificial
  Probe
gatgttttctgtccaggcagctcca

SEQ ID NO: 204956 - DNA, 25 bp, Artificial
  Probe
ttgcgggaacgatggtgtgacttac

SEQ ID NO: 204957 - DNA, 25 bp, Artificial
  Probe
ccggaaccctcatcttcagagcagt

SEQ ID NO: 204958 - DNA, 25 bp, Artificial
  Probe
gcctactgtgtgacctgtaatcgga

SEQ ID NO: 204959 - DNA, 25 bp, Artificial
  Probe
tcaaggccagatgtaaagagcagcc

SEQ ID NO: 204960 - DNA, 25 bp, Artificial
  Probe
tgttttctgtccaggcagctccact

SEQ ID NO: 204961 - DNA, 25 bp, Artificial
  Probe
cagtgcctgccacctgagaaaggcc

SEQ ID NO: 204962 - DNA, 25 bp, Artificial
  Probe
tcttcagagcagtccctttgcggga

SEQ ID NO: 204963 - DNA, 25 bp, Artificial
  Probe
tgtgacctgtaatcggatttgcccg

SEQ ID NO: 204964 - DNA, 25 bp, Artificial
  Probe
tccacttgtgtggtggatcagacca

SEQ ID NO: 204965 - DNA, 25 bp, Artificial
  Probe
tgtgtgacctgtaatcggatttgcc

SEQ ID NO: 204966 - DNA, 25 bp, Artificial
  Probe
tgccacctgagaaaggccacctgct

SEQ ID NO: 204967 - DNA, 25 bp, Artificial
  Probe
tgtgacttactccagtgcctgccac

SEQ ID NO: 204968 - DNA, 25 bp, Artificial
  Probe
tggatcagaccaataatgcctactg

SEQ ID NO: 204969 - DNA, 25 bp, Artificial
  Probe
agtgcctgccacctgagaaaggcca

SEQ ID NO: 204970 - DNA, 25 bp, Artificial
  Probe
atgttttctgtccaggcagctccac

SEQ ID NO: 204971 - DNA, 25 bp, Artificial
  Probe
caataatgcctactgtgtgacctgt

SEQ ID NO: 204972 - DNA, 25 bp, Artificial
  Probe
agccggaactggaagtccagtacca

SEQ ID NO: 204973 - DNA, 25 bp, Artificial
  Probe
accaataatgcctactgtgtgacct

SEQ ID NO: 204974 - DNA, 25 bp, Artificial
  Probe
tggtgtgacttactccagtgcctgc

SEQ ID NO: 204975 - DNA, 25 bp, Artificial
  Probe
gagaaaggccacctgcttgctgggc

SEQ ID NO: 204976 - DNA, 25 bp, Artificial
  Probe
cctcatcttcagagcagtccctttg

SEQ ID NO: 204977 - DNA, 25 bp, Artificial
  Probe
cggaaccctcatcttcagagcagtc

SEQ ID NO: 204978 - DNA, 25 bp, Artificial
  Probe
ctgagaaaggccacctgcttgctgg

SEQ ID NO: 204979 - DNA, 25 bp, Artificial
  Probe
cagagcagtccctttgcgggaacga

SEQ ID NO: 204980 - DNA, 25 bp, Artificial
  Probe
ctcaaggccagatgtaaagagcagc

SEQ ID NO: 204981 - DNA, 25 bp, Artificial
  Probe
tcagaccaataatgcctactgtgtg

SEQ ID NO: 204982 - DNA, 25 bp, Artificial
  Probe
gaaaggccacctgcttgctgggcag

SEQ ID NO: 204983 - DNA, 25 bp, Artificial
  Probe
acttgtgtggtggatcagaccaata

SEQ ID NO: 204984 - DNA, 25 bp, Artificial
  Probe
atcttcagagcagtccctttgcggg

SEQ ID NO: 204985 - DNA, 25 bp, Artificial
  Probe
ctttgcgggaacgatggtgtgactt

SEQ ID NO: 204986 - DNA, 25 bp, Artificial
  Probe
aagtccagtaccagggcaaatgtaa

SEQ ID NO: 204987 - DNA, 25 bp, Artificial
  Probe
gccacctgagaaaggccacctgctt

SEQ ID NO: 204988 - DNA, 25 bp, Artificial
  Probe
gccctatctgagacttgcaaacacg

SEQ ID NO: 204989 - DNA, 25 bp, Artificial
  Probe
ttgtaccctgggtctagttcttaca

SEQ ID NO: 204990 - DNA, 25 bp, Artificial
  Probe
agacttgcaaacacgtggcagagac

SEQ ID NO: 204991 - DNA, 25 bp, Artificial
  Probe
gaaggggccattgtaccctgggtct

SEQ ID NO: 204992 - DNA, 25 bp, Artificial
  Probe
ccgccctatctgagacttgcaaaca

SEQ ID NO: 204993 - DNA, 25 bp, Artificial
  Probe
cttgcaaacacgtggcagagacatt

SEQ ID NO: 204994 - DNA, 25 bp, Artificial
  Probe
ctgagacttgcaaacacgtggcaga

SEQ ID NO: 204995 - DNA, 25 bp, Artificial
  Probe
tggcagagacattgtccctcttggg

SEQ ID NO: 204996 - DNA, 25 bp, Artificial
  Probe
catcagttggattaccccctaggaa

SEQ ID NO: 204997 - DNA, 25 bp, Artificial
  Probe
attgtccctcttgggcacaaggacc

SEQ ID NO: 204998 - DNA, 25 bp, Artificial
  Probe
tcatcagttggattaccccctagga

SEQ ID NO: 204999 - DNA, 25 bp, Artificial
  Probe
ggggccctgctgagagagcagtcca

SEQ ID NO: 205000 - DNA, 25 bp, Artificial
  Probe
taccctgggtctagttcttacagga

SEQ ID NO: 205001 - DNA, 25 bp, Artificial
  Probe
agacattgtccctcttgggcacaag

SEQ ID NO: 205002 - DNA, 25 bp, Artificial
  Probe
gggccctgctgagagagcagtccaa

SEQ ID NO: 205003 - DNA, 25 bp, Artificial
  Probe
cacattcaaaaacatggattctggg

SEQ ID NO: 205004 - DNA, 25 bp, Artificial
  Probe
tgagacttgcaaacacgtggcagag

SEQ ID NO: 205005 - DNA, 25 bp, Artificial
  Probe
gccctgctgagagagcagtccaaga

SEQ ID NO: 205006 - DNA, 25 bp, Artificial
  Probe
tctgagacttgcaaacacgtggcag

SEQ ID NO: 205007 - DNA, 25 bp, Artificial
  Probe
cattgtccctcttgggcacaaggac

SEQ ID NO: 205008 - DNA, 25 bp, Artificial
  Probe
gagacttgcaaacacgtggcagaga

SEQ ID NO: 205009 - DNA, 25 bp, Artificial
  Probe
cctaggaaggggccattgtaccctg

SEQ ID NO: 205010 - DNA, 25 bp, Artificial
  Probe
ctatctgagacttgcaaacacgtgg

SEQ ID NO: 205011 - DNA, 25 bp, Artificial
  Probe
aggggccattgtaccctgggtctag

SEQ ID NO: 205012 - DNA, 25 bp, Artificial
  Probe
gacttgcaaacacgtggcagagaca

SEQ ID NO: 205013 - DNA, 25 bp, Artificial
  Probe
ccctgctgagagagcagtccaagaa

SEQ ID NO: 205014 - DNA, 25 bp, Artificial
  Probe
acttgcaaacacgtggcagagacat

SEQ ID NO: 205015 - DNA, 25 bp, Artificial
  Probe
tcagttggattaccccctaggaagg

SEQ ID NO: 205016 - DNA, 25 bp, Artificial
  Probe
gccattgtaccctgggtctagttct

SEQ ID NO: 205017 - DNA, 25 bp, Artificial
  Probe
tgtaccctgggtctagttcttacag

SEQ ID NO: 205018 - DNA, 25 bp, Artificial
  Probe
ccctatctgagacttgcaaacacgt

SEQ ID NO: 205019 - DNA, 25 bp, Artificial
  Probe
gtaccctgggtctagttcttacagg

SEQ ID NO: 205020 - DNA, 25 bp, Artificial
  Probe
acattgtccctcttgggcacaagga

SEQ ID NO: 205021 - DNA, 25 bp, Artificial
  Probe
tcacattcaaaaacatggattctgg

SEQ ID NO: 205022 - DNA, 25 bp, Artificial
  Probe
tatctgagacttgcaaacacgtggc

SEQ ID NO: 205023 - DNA, 25 bp, Artificial
  Probe
cgccctatctgagacttgcaaacac

SEQ ID NO: 205024 - DNA, 25 bp, Artificial
  Probe
tctttccctcacattcaaaaacatg

SEQ ID NO: 205025 - DNA, 25 bp, Artificial
  Probe
cctatctgagacttgcaaacacgtg

SEQ ID NO: 205026 - DNA, 25 bp, Artificial
  Probe
aacacgtggcagagacattgtccct

SEQ ID NO: 205027 - DNA, 25 bp, Artificial
  Probe
gacattgtccctcttgggcacaagg

SEQ ID NO: 205028 - DNA, 25 bp, Artificial
  Probe
cattcaaaaacatggattctgggta

SEQ ID NO: 205029 - DNA, 25 bp, Artificial
  Probe
atcagttggattaccccctaggaag

SEQ ID NO: 205030 - DNA, 25 bp, Artificial
  Probe
atctgagacttgcaaacacgtggca

SEQ ID NO: 205031 - DNA, 25 bp, Artificial
  Probe
acacgtggcagagacattgtccctc

SEQ ID NO: 205032 - DNA, 25 bp, Artificial
  Probe
ggccctgctgagagagcagtccaag

SEQ ID NO: 205033 - DNA, 25 bp, Artificial
  Probe
caaacacgtggcagagacattgtcc

SEQ ID NO: 205034 - DNA, 25 bp, Artificial
  Probe
actcggcaaacctagtgtgctatgc

SEQ ID NO: 205035 - DNA, 25 bp, Artificial
  Probe
atattctcttacctagccagatggt

SEQ ID NO: 205036 - DNA, 25 bp, Artificial
  Probe
gtctactcggcaaacctagtgtgct

SEQ ID NO: 205037 - DNA, 25 bp, Artificial
  Probe
tacctagccagatggtttcttgcaa

SEQ ID NO: 205038 - DNA, 25 bp, Artificial
  Probe
ctctacgaagaactggcaatatgaa

SEQ ID NO: 205039 - DNA, 25 bp, Artificial
  Probe
ctaaattatgttgttctctacgaag

SEQ ID NO: 205040 - DNA, 25 bp, Artificial
  Probe
atatcctgtcgatgggtatctaaat

SEQ ID NO: 205041 - DNA, 25 bp, Artificial
  Probe
gcaaacctagtgtgctatgcctaag

SEQ ID NO: 205042 - DNA, 25 bp, Artificial
  Probe
tatatcctgtcgatgggtatctaaa

SEQ ID NO: 205043 - DNA, 25 bp, Artificial
  Probe
attctcttacctagccagatggttt

SEQ ID NO: 205044 - DNA, 25 bp, Artificial
  Probe
gaatattctcttacctagccagatg

SEQ ID NO: 205045 - DNA, 25 bp, Artificial
  Probe
agccagatggtttcttgcaatatat

SEQ ID NO: 205046 - DNA, 25 bp, Artificial
  Probe
catatcagtttgtggacattcctca

SEQ ID NO: 205047 - DNA, 25 bp, Artificial
  Probe
tatcagtttgtggacattcctcact

SEQ ID NO: 205048 - DNA, 25 bp, Artificial
  Probe
aagcatatcagtttgtggacattcc

SEQ ID NO: 205049 - DNA, 25 bp, Artificial
  Probe
ttgttctctacgaagaactggcaat

SEQ ID NO: 205050 - DNA, 25 bp, Artificial
  Probe
aatatatcctgtcgatgggtatcta

SEQ ID NO: 205051 - DNA, 25 bp, Artificial
  Probe
tactcggcaaacctagtgtgctatg

SEQ ID NO: 205052 - DNA, 25 bp, Artificial
  Probe
agtttgtggacattcctcactgtgg

SEQ ID NO: 205053 - DNA, 25 bp, Artificial
  Probe
tcagtttgtggacattcctcactgt

SEQ ID NO: 205054 - DNA, 25 bp, Artificial
  Probe
gttctctacgaagaactggcaatat

SEQ ID NO: 205055 - DNA, 25 bp, Artificial
  Probe
aattatgttgttctctacgaagaac

SEQ ID NO: 205056 - DNA, 25 bp, Artificial
  Probe
gacattcctcactgtggtcagaaaa

SEQ ID NO: 205057 - DNA, 25 bp, Artificial
  Probe
gtttgtggacattcctcactgtggt

SEQ ID NO: 205058 - DNA, 25 bp, Artificial
  Probe
gtgtgctatgcctaagcatatcagt

SEQ ID NO: 205059 - DNA, 25 bp, Artificial
  Probe
tatgttgttctctacgaagaactgg

SEQ ID NO: 205060 - DNA, 25 bp, Artificial
  Probe
ttcctcactgtggtcagaaaatata

SEQ ID NO: 205061 - DNA, 25 bp, Artificial
  Probe
tatgcctaagcatatcagtttgtgg

SEQ ID NO: 205062 - DNA, 25 bp, Artificial
  Probe
tcttacctagccagatggtttcttg

SEQ ID NO: 205063 - DNA, 25 bp, Artificial
  Probe
atatatcctgtcgatgggtatctaa

SEQ ID NO: 205064 - DNA, 25 bp, Artificial
  Probe
gtgctatgcctaagcatatcagttt

SEQ ID NO: 205065 - DNA, 25 bp, Artificial
  Probe
tgcctaagcatatcagtttgtggac

SEQ ID NO: 205066 - DNA, 25 bp, Artificial
  Probe
tctacgaagaactggcaatatgaat

SEQ ID NO: 205067 - DNA, 25 bp, Artificial
  Probe
ggcaaacctagtgtgctatgcctaa

SEQ ID NO: 205068 - DNA, 25 bp, Artificial
  Probe
tgtggacattcctcactgtggtcag

SEQ ID NO: 205069 - DNA, 25 bp, Artificial
  Probe
cctagtgtgctatgcctaagcatat

SEQ ID NO: 205070 - DNA, 25 bp, Artificial
  Probe
caaacctagtgtgctatgcctaagc

SEQ ID NO: 205071 - DNA, 25 bp, Artificial
  Probe
taagcatatcagtttgtggacattc

SEQ ID NO: 205072 - DNA, 25 bp, Artificial
  Probe
tgttgttctctacgaagaactggca

SEQ ID NO: 205073 - DNA, 25 bp, Artificial
  Probe
tgtgctatgcctaagcatatcagtt

SEQ ID NO: 205074 - DNA, 25 bp, Artificial
  Probe
tggacattcctcactgtggtcagaa

SEQ ID NO: 205075 - DNA, 25 bp, Artificial
  Probe
acattcctcactgtggtcagaaaat

SEQ ID NO: 205076 - DNA, 25 bp, Artificial
  Probe
ctagccagatggtttcttgcaatat

SEQ ID NO: 205077 - DNA, 25 bp, Artificial
  Probe
cctgtcgatgggtatctaaattatg

SEQ ID NO: 205078 - DNA, 25 bp, Artificial
  Probe
atatcagtttgtggacattcctcac

SEQ ID NO: 205079 - DNA, 25 bp, Artificial
  Probe
cttacctagccagatggtttcttgc

SEQ ID NO: 205080 - DNA, 25 bp, Artificial
  Probe
cacaacctggtgctcttccgtaagg

SEQ ID NO: 205081 - DNA, 25 bp, Artificial
  Probe
gctgtcccgcctagaactagagcgc

SEQ ID NO: 205082 - DNA, 25 bp, Artificial
  Probe
tacacgaagaggagcttcgagacct

SEQ ID NO: 205083 - DNA, 25 bp, Artificial
  Probe
cgaaattgagttcctcaagaagcta

SEQ ID NO: 205084 - DNA, 25 bp, Artificial
  Probe
acaacctggtgctcttccgtaagga

SEQ ID NO: 205085 - DNA, 25 bp, Artificial
  Probe
ggtgctcttccgtaaggacgtggac

SEQ ID NO: 205086 - DNA, 25 bp, Artificial
  Probe
cgctcaagcagaggttagaagaaga

SEQ ID NO: 205087 - DNA, 25 bp, Artificial
  Probe
tcttccgtaaggacgtggacgacgc

SEQ ID NO: 205088 - DNA, 25 bp, Artificial
  Probe
aaattgagttcctcaagaagctaca

SEQ ID NO: 205089 - DNA, 25 bp, Artificial
  Probe
attgagttcctcaagaagctacacg

SEQ ID NO: 205090 - DNA, 25 bp, Artificial
  Probe
cccgcctagaactagagcgcaagat

SEQ ID NO: 205091 - DNA, 25 bp, Artificial
  Probe
ctcaagaagctacacgaagaggagc

SEQ ID NO: 205092 - DNA, 25 bp, Artificial
  Probe
aggacgtggacgacgccacgctgtc

SEQ ID NO: 205093 - DNA, 25 bp, Artificial
  Probe
caagaagctacacgaagaggagctt

SEQ ID NO: 205094 - DNA, 25 bp, Artificial
  Probe
agtgtgagattcactctgagtcaaa

SEQ ID NO: 205095 - DNA, 25 bp, Artificial
  Probe
atccagagtctgacgtgcgaagtgg

SEQ ID NO: 205096 - DNA, 25 bp, Artificial
  Probe
tgagttcctcaagaagctacacgaa

SEQ ID NO: 205097 - DNA, 25 bp, Artificial
  Probe
ccagagtctgacgtgcgaagtggac

SEQ ID NO: 205098 - DNA, 25 bp, Artificial
  Probe
taaggacgtggacgacgccacgctg

SEQ ID NO: 205099 - DNA, 25 bp, Artificial
  Probe
gatccagagtctgacgtgcgaagtg

SEQ ID NO: 205100 - DNA, 25 bp, Artificial
  Probe
acacgaagaggagcttcgagacctg

SEQ ID NO: 205101 - DNA, 25 bp, Artificial
  Probe
tataagtcaaaatacgctgacctgt

SEQ ID NO: 205102 - DNA, 25 bp, Artificial
  Probe
gcctagaactagagcgcaagatcga

SEQ ID NO: 205103 - DNA, 25 bp, Artificial
  Probe
cgcctagaactagagcgcaagatcg

SEQ ID NO: 205104 - DNA, 25 bp, Artificial
  Probe
accagctgtgccagcaggagctgcg

SEQ ID NO: 205105 - DNA, 25 bp, Artificial
  Probe
tgaagccagagctgaccgcggcgct

SEQ ID NO: 205106 - DNA, 25 bp, Artificial
  Probe
aacctggtgctcttccgtaaggacg

SEQ ID NO: 205107 - DNA, 25 bp, Artificial
  Probe
gaaattgagttcctcaagaagctac

SEQ ID NO: 205108 - DNA, 25 bp, Artificial
  Probe
tccgtaaggacgtggacgacgccac

SEQ ID NO: 205109 - DNA, 25 bp, Artificial
  Probe
gctacacgaagaggagcttcgagac

SEQ ID NO: 205110 - DNA, 25 bp, Artificial
  Probe
catcgcggcgaagaatctgcaggag

SEQ ID NO: 205111 - DNA, 25 bp, Artificial
  Probe
agaagctacacgaagaggagcttcg

SEQ ID NO: 205112 - DNA, 25 bp, Artificial
  Probe
cagatccagagtctgacgtgcgaag

SEQ ID NO: 205113 - DNA, 25 bp, Artificial
  Probe
gtcagatccagagtctgacgtgcga

SEQ ID NO: 205114 - DNA, 25 bp, Artificial
  Probe
aagaggagcttcgagacctgcaggt

SEQ ID NO: 205115 - DNA, 25 bp, Artificial
  Probe
gtaaggacgtggacgacgccacgct

SEQ ID NO: 205116 - DNA, 25 bp, Artificial
  Probe
acctggtgctcttccgtaaggacgt

SEQ ID NO: 205117 - DNA, 25 bp, Artificial
  Probe
ctcttccgtaaggacgtggacgacg

SEQ ID NO: 205118 - DNA, 25 bp, Artificial
  Probe
gccgaccagctgtgccagcaggagc

SEQ ID NO: 205119 - DNA, 25 bp, Artificial
  Probe
gttcctcaagaagctacacgaagag

SEQ ID NO: 205120 - DNA, 25 bp, Artificial
  Probe
aacatcgcggcgaagaatctgcagg

SEQ ID NO: 205121 - DNA, 25 bp, Artificial
  Probe
ggcgctcaagcagaggttagaagaa

SEQ ID NO: 205122 - DNA, 25 bp, Artificial
  Probe
ttccgtaaggacgtggacgacgcca

SEQ ID NO: 205123 - DNA, 25 bp, Artificial
  Probe
cgctgtcccgcctagaactagagcg

SEQ ID NO: 205124 - DNA, 25 bp, Artificial
  Probe
cgccgaccagctgtgccagcaggag

SEQ ID NO: 205125 - DNA, 25 bp, Artificial
  Probe
gtcccgcctagaactagagcgcaag

SEQ ID NO: 205126 - DNA, 25 bp, Artificial
  Probe
cagtgtaagctgcttagatctgtta

SEQ ID NO: 205127 - DNA, 25 bp, Artificial
  Probe
ttaaaagtatcttcaggttgacgtc

SEQ ID NO: 205128 - DNA, 25 bp, Artificial
  Probe
gtttagccatcttctgctcttggta

SEQ ID NO: 205129 - DNA, 25 bp, Artificial
  Probe
aacagggaagccatacgtcggtggc

SEQ ID NO: 205130 - DNA, 25 bp, Artificial
  Probe
gatttcaaggggagcagatgacact

SEQ ID NO: 205131 - DNA, 25 bp, Artificial
  Probe
ctgttttccacaaaaccagttagtg

SEQ ID NO: 205132 - DNA, 25 bp, Artificial
  Probe
tttttccctgcagtattgtttagcc

SEQ ID NO: 205133 - DNA, 25 bp, Artificial
  Probe
tgtaccacagttaagtatagtttgc

SEQ ID NO: 205134 - DNA, 25 bp, Artificial
  Probe
taccacagttaagtatagtttgcaa

SEQ ID NO: 205135 - DNA, 25 bp, Artificial
  Probe
gaaggagatccttgttcttggttct

SEQ ID NO: 205136 - DNA, 25 bp, Artificial
  Probe
ggctctggctgtcgttgttggtact

SEQ ID NO: 205137 - DNA, 25 bp, Artificial
  Probe
aacagcaacaaagtctgctttgtaa

SEQ ID NO: 205138 - DNA, 25 bp, Artificial
  Probe
gatgtcctcacctagtgtttctcct

SEQ ID NO: 205139 - DNA, 25 bp, Artificial
  Probe
atgctattaccatacagagctaccg

SEQ ID NO: 205140 - DNA, 25 bp, Artificial
  Probe
attcgggaaccaagcgctctctctc

SEQ ID NO: 205141 - DNA, 25 bp, Artificial
  Probe
agcgtgttcatgaatgcatgcagga

SEQ ID NO: 205142 - DNA, 25 bp, Artificial
  Probe
tgttccccggcactttttaatcaag

SEQ ID NO: 205143 - DNA, 25 bp, Artificial
  Probe
gcgcgtatttccacttgaaacaatt

SEQ ID NO: 205144 - DNA, 25 bp, Artificial
  Probe
gaagcaaatcggtccaccaggaact

SEQ ID NO: 205145 - DNA, 25 bp, Artificial
  Probe
acgtcggtggcgaagtgaagcaaat

SEQ ID NO: 205146 - DNA, 25 bp, Artificial
  Probe
tcgtcacggaagagataaggcctaa

SEQ ID NO: 205147 - DNA, 25 bp, Artificial
  Probe
cacaaaaccagttagtgaaatgata

SEQ ID NO: 205148 - DNA, 25 bp, Artificial
  Probe
taatgtccatttgctttcaatagtg

SEQ ID NO: 205149 - DNA, 25 bp, Artificial
  Probe
ggtgtcactgggtcccttagagttt

SEQ ID NO: 205150 - DNA, 25 bp, Artificial
  Probe
cttatcattgacaagagatttcaag

SEQ ID NO: 205151 - DNA, 25 bp, Artificial
  Probe
caacaaagtctgctttgtaaatagt

SEQ ID NO: 205152 - DNA, 25 bp, Artificial
  Probe
ggagcagatgacactcttggcattg

SEQ ID NO: 205153 - DNA, 25 bp, Artificial
  Probe
gattctttatactaaagctgttgac

SEQ ID NO: 205154 - DNA, 25 bp, Artificial
  Probe
gatccttgttcttggttctcccaaa

SEQ ID NO: 205155 - DNA, 25 bp, Artificial
  Probe
cgtcacagttctaccgttagtttct

SEQ ID NO: 205156 - DNA, 25 bp, Artificial
  Probe
tgctgatgccgctgtatcttaaccc

SEQ ID NO: 205157 - DNA, 25 bp, Artificial
  Probe
gcatcaaatatgtaccacagttaag

SEQ ID NO: 205158 - DNA, 25 bp, Artificial
  Probe
gtatagtttgcaagctttcaacagg

SEQ ID NO: 205159 - DNA, 25 bp, Artificial
  Probe
tgacatgagccatgggttgcggtaa

SEQ ID NO: 205160 - DNA, 25 bp, Artificial
  Probe
gatagaatcttactcatccacatgg

SEQ ID NO: 205161 - DNA, 25 bp, Artificial
  Probe
cactttctgaagttggttctgcttt

SEQ ID NO: 205162 - DNA, 25 bp, Artificial
  Probe
ccagtggtgcatgtttgagcaaatg

SEQ ID NO: 205163 - DNA, 25 bp, Artificial
  Probe
agtctaacagggaagccatacgtcg

SEQ ID NO: 205164 - DNA, 25 bp, Artificial
  Probe
ctgctcttggtaaggttgacatagt

SEQ ID NO: 205165 - DNA, 25 bp, Artificial
  Probe
gcatgtctctcttgctgatgccgct

SEQ ID NO: 205166 - DNA, 25 bp, Artificial
  Probe
cttactcatccacatggcaccagag

SEQ ID NO: 205167 - DNA, 25 bp, Artificial
  Probe
cgtcggtggcgaagtgaagcaaatc

SEQ ID NO: 205168 - DNA, 25 bp, Artificial
  Probe
atttcaaggggagcagatgacactc

SEQ ID NO: 205169 - DNA, 25 bp, Artificial
  Probe
gtttcacagacaaccttcaatgtag

SEQ ID NO: 205170 - DNA, 25 bp, Artificial
  Probe
gttctcccaaaccttaatggaacag

SEQ ID NO: 205171 - DNA, 25 bp, Artificial
  Probe
gtctctcttgctgatgccgctgtat

SEQ ID NO: 205172 - DNA, 25 bp, Artificial
  Probe
cgcccctatagtgagctcgaattta

SEQ ID NO: 205173 - DNA, 25 bp, Artificial
  Probe
ttcgcccctatagtgagctcgaatt

SEQ ID NO: 205174 - DNA, 25 bp, Artificial
  Probe
ttttaaacaacgttcgttgactctg

SEQ ID NO: 205175 - DNA, 25 bp, Artificial
  Probe
aaattcgcccctatagtgagctcga

SEQ ID NO: 205176 - DNA, 25 bp, Artificial
  Probe
aattcgcccctatagtgagctcgaa

SEQ ID NO: 205177 - DNA, 25 bp, Artificial
  Probe
tttaactcctcacgaataccacccg

SEQ ID NO: 205178 - DNA, 25 bp, Artificial
  Probe
gaatttacaatttcacttggcccga

SEQ ID NO: 205179 - DNA, 25 bp, Artificial
  Probe
atagtgagctcgaatttacaatttc

SEQ ID NO: 205180 - DNA, 25 bp, Artificial
  Probe
ccagcttgccgaaaaagccgaaaag

SEQ ID NO: 205181 - DNA, 25 bp, Artificial
  Probe
ctttgccgttaccccacacttacat

SEQ ID NO: 205182 - DNA, 25 bp, Artificial
  Probe
tcggaacccaaattcgcccctatag

SEQ ID NO: 205183 - DNA, 25 bp, Artificial
  Probe
tccccagcttgccgaaaaagccgaa

SEQ ID NO: 205184 - DNA, 25 bp, Artificial
  Probe
tgccaaatgcccaaattaaacccgt

SEQ ID NO: 205185 - DNA, 25 bp, Artificial
  Probe
tcgcccctatagtgagctcgaattt

SEQ ID NO: 205186 - DNA, 25 bp, Artificial
  Probe
ggcgggcatcggaacccaaattcgc

SEQ ID NO: 205187 - DNA, 25 bp, Artificial
  Probe
cctatagtgagctcgaatttacaat

SEQ ID NO: 205188 - DNA, 25 bp, Artificial
  Probe
ccaatggtcccaaaatgtgaaaaat

SEQ ID NO: 205189 - DNA, 25 bp, Artificial
  Probe
ttcacccaatggtcccaaaatgtga

SEQ ID NO: 205190 - DNA, 25 bp, Artificial
  Probe
ttcgttgactctggaaaaacctttg

SEQ ID NO: 205191 - DNA, 25 bp, Artificial
  Probe
gcgggcatcggaacccaaattcgcc

SEQ ID NO: 205192 - DNA, 25 bp, Artificial
  Probe
cagcttgccgaaaaagccgaaaagt

SEQ ID NO: 205193 - DNA, 25 bp, Artificial
  Probe
ttacaatttcacttggcccgacgtt

SEQ ID NO: 205194 - DNA, 25 bp, Artificial
  Probe
gcccctatagtgagctcgaatttac

SEQ ID NO: 205195 - DNA, 25 bp, Artificial
  Probe
cgaatttacaatttcacttggcccg

SEQ ID NO: 205196 - DNA, 25 bp, Artificial
  Probe
ttaaacaacgttcgttgactctgga

SEQ ID NO: 205197 - DNA, 25 bp, Artificial
  Probe
ttgactctggaaaaacctttgccgt

SEQ ID NO: 205198 - DNA, 25 bp, Artificial
  Probe
tttcacccaatggtcccaaaatgtg

SEQ ID NO: 205199 - DNA, 25 bp, Artificial
  Probe
tttgcccaccctgaatgccaaatgc

SEQ ID NO: 205200 - DNA, 25 bp, Artificial
  Probe
caatggtcccaaaatgtgaaaaatc

SEQ ID NO: 205201 - DNA, 25 bp, Artificial
  Probe
gttgactctggaaaaacctttgccg

SEQ ID NO: 205202 - DNA, 25 bp, Artificial
  Probe
agctcgaatttacaatttcacttgg

SEQ ID NO: 205203 - DNA, 25 bp, Artificial
  Probe
atttacaatttcacttggcccgacg

SEQ ID NO: 205204 - DNA, 25 bp, Artificial
  Probe
caaattcgcccctatagtgagctcg

SEQ ID NO: 205205 - DNA, 25 bp, Artificial
  Probe
cccctatagtgagctcgaatttaca

SEQ ID NO: 205206 - DNA, 25 bp, Artificial
  Probe
tgactctggaaaaacctttgccgtt

SEQ ID NO: 205207 - DNA, 25 bp, Artificial
  Probe
tacaatttcacttggcccgacgttt

SEQ ID NO: 205208 - DNA, 25 bp, Artificial
  Probe
atcacccccattttttcacccaatg

SEQ ID NO: 205209 - DNA, 25 bp, Artificial
  Probe
ccctatagtgagctcgaatttacaa

SEQ ID NO: 205210 - DNA, 25 bp, Artificial
  Probe
tcgttgactctggaaaaacctttgc

SEQ ID NO: 205211 - DNA, 25 bp, Artificial
  Probe
tttacaatttcacttggcccgacgt

SEQ ID NO: 205212 - DNA, 25 bp, Artificial
  Probe
ttatccccagcttgccgaaaaagcc

SEQ ID NO: 205213 - DNA, 25 bp, Artificial
  Probe
ctatagtgagctcgaatttacaatt

SEQ ID NO: 205214 - DNA, 25 bp, Artificial
  Probe
tagtgagctcgaatttacaatttca

SEQ ID NO: 205215 - DNA, 25 bp, Artificial
  Probe
tcgaatttacaatttcacttggccc

SEQ ID NO: 205216 - DNA, 25 bp, Artificial
  Probe
tttaaacaacgttcgttgactctgg

SEQ ID NO: 205217 - DNA, 25 bp, Artificial
  Probe
taaacaacgttcgttgactctggaa

SEQ ID NO: 205218 - DNA, 25 bp, Artificial
  Probe
catgtgcctgtttcatgttctatgt

SEQ ID NO: 205219 - DNA, 25 bp, Artificial
  Probe
gactgtcatgtgttccttagtactg

SEQ ID NO: 205220 - DNA, 25 bp, Artificial
  Probe
gtgcctgtttcatgttctatgtcat

SEQ ID NO: 205221 - DNA, 25 bp, Artificial
  Probe
aggccacctactcttgacgattcca

SEQ ID NO: 205222 - DNA, 25 bp, Artificial
  Probe
ttccttagtactgtactcccatgtg

SEQ ID NO: 205223 - DNA, 25 bp, Artificial
  Probe
acgtgctcacttacccatgtgcttg

SEQ ID NO: 205224 - DNA, 25 bp, Artificial
  Probe
acttacccatgtgcttgcttgtgag

SEQ ID NO: 205225 - DNA, 25 bp, Artificial
  Probe
agtgactgtcatgtgttccttagta

SEQ ID NO: 205226 - DNA, 25 bp, Artificial
  Probe
gttccttagtactgtactcccatgt

SEQ ID NO: 205227 - DNA, 25 bp, Artificial
  Probe
cctgtttcatgttctatgtcatgtg

SEQ ID NO: 205228 - DNA, 25 bp, Artificial
  Probe
gcttgtgagccatgtgcctgtttca

SEQ ID NO: 205229 - DNA, 25 bp, Artificial
  Probe
atgtgttccttagtactgtactccc

SEQ ID NO: 205230 - DNA, 25 bp, Artificial
  Probe
cacttacccatgtgcttgcttgtga

SEQ ID NO: 205231 - DNA, 25 bp, Artificial
  Probe
gtgttccttagtactgtactcccat

SEQ ID NO: 205232 - DNA, 25 bp, Artificial
  Probe
gtttcatgttctatgtcatgtgacc

SEQ ID NO: 205233 - DNA, 25 bp, Artificial
  Probe
ccttagtactgtactcccatgtggt

SEQ ID NO: 205234 - DNA, 25 bp, Artificial
  Probe
ccacctactcttgacgattccagtg

SEQ ID NO: 205235 - DNA, 25 bp, Artificial
  Probe
ctcacttacccatgtgcttgcttgt

SEQ ID NO: 205236 - DNA, 25 bp, Artificial
  Probe
ctactcttgacgattccagtgcagt

SEQ ID NO: 205237 - DNA, 25 bp, Artificial
  Probe
tgtgcttgcttgtgagccatgtgcc

SEQ ID NO: 205238 - DNA, 25 bp, Artificial
  Probe
ctgtcatgtgttccttagtactgta

SEQ ID NO: 205239 - DNA, 25 bp, Artificial
  Probe
agccatgtgcctgtttcatgttcta

SEQ ID NO: 205240 - DNA, 25 bp, Artificial
  Probe
tactcttgacgattccagtgcagta

SEQ ID NO: 205241 - DNA, 25 bp, Artificial
  Probe
ttacccatgtgcttgcttgtgagcc

SEQ ID NO: 205242 - DNA, 25 bp, Artificial
  Probe
ccatgtgcctgtttcatgttctatg

SEQ ID NO: 205243 - DNA, 25 bp, Artificial
  Probe
ttgtgagccatgtgcctgtttcatg

SEQ ID NO: 205244 - DNA, 25 bp, Artificial
  Probe
tgactgtcatgtgttccttagtact

SEQ ID NO: 205245 - DNA, 25 bp, Artificial
  Probe
gagccatgtgcctgtttcatgttct

SEQ ID NO: 205246 - DNA, 25 bp, Artificial
  Probe
cacctactcttgacgattccagtgc

SEQ ID NO: 205247 - DNA, 25 bp, Artificial
  Probe
gctgggtgtctctttggcctgtgaa

SEQ ID NO: 205248 - DNA, 25 bp, Artificial
  Probe
tccaggccacctactcttgacgatt

SEQ ID NO: 205249 - DNA, 25 bp, Artificial
  Probe
tgcctgtttcatgttctatgtcatg

SEQ ID NO: 205250 - DNA, 25 bp, Artificial
  Probe
gctcacttacccatgtgcttgcttg

SEQ ID NO: 205251 - DNA, 25 bp, Artificial
  Probe
tgcttgcttgtgagccatgtgcctg

SEQ ID NO: 205252 - DNA, 25 bp, Artificial
  Probe
atggtcaggtcacagtccggtgcct

SEQ ID NO: 205253 - DNA, 25 bp, Artificial
  Probe
tagtgactgtcatgtgttccttagt

SEQ ID NO: 205254 - DNA, 25 bp, Artificial
  Probe
catggtcaggtcacagtccggtgcc

SEQ ID NO: 205255 - DNA, 25 bp, Artificial
  Probe
ggccacctactcttgacgattccag

SEQ ID NO: 205256 - DNA, 25 bp, Artificial
  Probe
ctcttgacgattccagtgcagtagt

SEQ ID NO: 205257 - DNA, 25 bp, Artificial
  Probe
ccatggtcaggtcacagtccggtgc

SEQ ID NO: 205258 - DNA, 25 bp, Artificial
  Probe
ccgtggctgggtgtctctttggcct

SEQ ID NO: 205259 - DNA, 25 bp, Artificial
  Probe
gtcatgtgttccttagtactgtact

SEQ ID NO: 205260 - DNA, 25 bp, Artificial
  Probe
tgcttgtgagccatgtgcctgtttc

SEQ ID NO: 205261 - DNA, 25 bp, Artificial
  Probe
catgtgcttgcttgtgagccatgtg

SEQ ID NO: 205262 - DNA, 25 bp, Artificial
  Probe
atgtgcctgtttcatgttctatgtc

SEQ ID NO: 205263 - DNA, 25 bp, Artificial
  Probe
cccatgtgcttgcttgtgagccatg

SEQ ID NO: 205264 - DNA, 25 bp, Artificial
  Probe
tcttaaacagcaaagggaagacggc

SEQ ID NO: 205265 - DNA, 25 bp, Artificial
  Probe
ttataaatccctgtggactgataat

SEQ ID NO: 205266 - DNA, 25 bp, Artificial
  Probe
tggacatcaacttaaacttgatgat

SEQ ID NO: 205267 - DNA, 25 bp, Artificial
  Probe
gaattttctgattttgatctcctcg

SEQ ID NO: 205268 - DNA, 25 bp, Artificial
  Probe
accagatagcctttcatttaagctg

SEQ ID NO: 205269 - DNA, 25 bp, Artificial
  Probe
gattttgatctcctcgatgctcttt

SEQ ID NO: 205270 - DNA, 25 bp, Artificial
  Probe
aacttgatgatcttaaacagcaaag

SEQ ID NO: 205271 - DNA, 25 bp, Artificial
  Probe
cagcctgtcagtaggactttataaa

SEQ ID NO: 205272 - DNA, 25 bp, Artificial
  Probe
caatgtcaagcacactgaccagaga

SEQ ID NO: 205273 - DNA, 25 bp, Artificial
  Probe
tgatatccatgtacaaccagatagc

SEQ ID NO: 205274 - DNA, 25 bp, Artificial
  Probe
gaagacggctatgaccatagacatc

SEQ ID NO: 205275 - DNA, 25 bp, Artificial
  Probe
gcctttcatttaagctgatatctga

SEQ ID NO: 205276 - DNA, 25 bp, Artificial
  Probe
gaattccttctgagcctgcctcaca

SEQ ID NO: 205277 - DNA, 25 bp, Artificial
  Probe
tcacggtcgtgataaacacacaaat

SEQ ID NO: 205278 - DNA, 25 bp, Artificial
  Probe
gatatccatgtacaaccagatagcc

SEQ ID NO: 205279 - DNA, 25 bp, Artificial
  Probe
caggaagaagcctaccagaatccac

SEQ ID NO: 205280 - DNA, 25 bp, Artificial
  Probe
catggtcatggtcagaggcatggtc

SEQ ID NO: 205281 - DNA, 25 bp, Artificial
  Probe
gtgtgatagctaccacatcaccata

SEQ ID NO: 205282 - DNA, 25 bp, Artificial
  Probe
tctttcttaacttatacagcgtagg

SEQ ID NO: 205283 - DNA, 25 bp, Artificial
  Probe
ttgtgacataagtcatcaagccatg

SEQ ID NO: 205284 - DNA, 25 bp, Artificial
  Probe
accaaggtcataagcatgggcatgg

SEQ ID NO: 205285 - DNA, 25 bp, Artificial
  Probe
atactacatctacacagatacaggg

SEQ ID NO: 205286 - DNA, 25 bp, Artificial
  Probe
cctagctcagccagctgttatctct

SEQ ID NO: 205287 - DNA, 25 bp, Artificial
  Probe
taggaaggatccaaccatagaaaca

SEQ ID NO: 205288 - DNA, 25 bp, Artificial
  Probe
aagccagttagtaggaaggatccaa

SEQ ID NO: 205289 - DNA, 25 bp, Artificial
  Probe
ccacaagtgtcctgggcgcccatgg

SEQ ID NO: 205290 - DNA, 25 bp, Artificial
  Probe
ttccagaagcaacttcccacaagtg

SEQ ID NO: 205291 - DNA, 25 bp, Artificial
  Probe
aggacagagggcttcaccttgaacc

SEQ ID NO: 205292 - DNA, 25 bp, Artificial
  Probe
ggaaggatccaaccatagaaacaac

SEQ ID NO: 205293 - DNA, 25 bp, Artificial
  Probe
taaatccctgtggactgataataaa

SEQ ID NO: 205294 - DNA, 25 bp, Artificial
  Probe
ccagtgggacatggtcatggtcaga

SEQ ID NO: 205295 - DNA, 25 bp, Artificial
  Probe
tgaaccaatacaggaagaagcctac

SEQ ID NO: 205296 - DNA, 25 bp, Artificial
  Probe
gccatccttctgaattccttctgag

SEQ ID NO: 205297 - DNA, 25 bp, Artificial
  Probe
cacacgctctctgaaccaatacagg

SEQ ID NO: 205298 - DNA, 25 bp, Artificial
  Probe
atacagcgtaggaatctttacaaat

SEQ ID NO: 205299 - DNA, 25 bp, Artificial
  Probe
ctacatctacacagatacaggggag

SEQ ID NO: 205300 - DNA, 25 bp, Artificial
  Probe
gatttgatccctgatatccatgtac

SEQ ID NO: 205301 - DNA, 25 bp, Artificial
  Probe
tcctgggcgcccatggaagccagtt

SEQ ID NO: 205302 - DNA, 25 bp, Artificial
  Probe
gacagagggcttcaccttgaaccct

SEQ ID NO: 205303 - DNA, 25 bp, Artificial
  Probe
ggaatctttacaaatgctttcccag

SEQ ID NO: 205304 - DNA, 25 bp, Artificial
  Probe
acaatgtcaagcacactgaccagag

SEQ ID NO: 205305 - DNA, 25 bp, Artificial
  Probe
gacaagctcttctgaagacaatact

SEQ ID NO: 205306 - DNA, 25 bp, Artificial
  Probe
gatatctgactttccagaagcaact

SEQ ID NO: 205307 - DNA, 25 bp, Artificial
  Probe
ttcactgaaggtgtgatagctacca

SEQ ID NO: 205308 - DNA, 25 bp, Artificial
  Probe
ataagcatgggcatggtattggcca

SEQ ID NO: 205309 - DNA, 25 bp, Artificial
  Probe
cctttgacaagctcttctgaagaca

SEQ ID NO: 205310 - DNA, 25 bp, Artificial
  Probe
cacatggcaaatctaaagggtatgc

SEQ ID NO: 205311 - DNA, 25 bp, Artificial
  Probe
gacttcaagccacaaggaaagaaga

SEQ ID NO: 205312 - DNA, 25 bp, Artificial
  Probe
atttgagggctctgttcgtgcaaga

SEQ ID NO: 205313 - DNA, 25 bp, Artificial
  Probe
ttaaagtgccccagaacccacatgg

SEQ ID NO: 205314 - DNA, 25 bp, Artificial
  Probe
agacttcaagccacaaggaaagaag

SEQ ID NO: 205315 - DNA, 25 bp, Artificial
  Probe
ccaaaactctgtttgtcaaaggtct

SEQ ID NO: 205316 - DNA, 25 bp, Artificial
  Probe
agtcagccatccaaaactctgtttg

SEQ ID NO: 205317 - DNA, 25 bp, Artificial
  Probe
cccacatggcaaatctaaagggtat

SEQ ID NO: 205318 - DNA, 25 bp, Artificial
  Probe
tcatttgagggctctgttcgtgcaa

SEQ ID NO: 205319 - DNA, 25 bp, Artificial
  Probe
ctgaggataccactgaagagacctt

SEQ ID NO: 205320 - DNA, 25 bp, Artificial
  Probe
gagaagtcagccatccaaaactctg

SEQ ID NO: 205321 - DNA, 25 bp, Artificial
  Probe
ttggactgggccaaacctaagggtg

SEQ ID NO: 205322 - DNA, 25 bp, Artificial
  Probe
aggataccactgaagagaccttaaa

SEQ ID NO: 205323 - DNA, 25 bp, Artificial
  Probe
agatgccaaagctgccaaggaggcc

SEQ ID NO: 205324 - DNA, 25 bp, Artificial
  Probe
tcacctaatgcgagaagtcagccat

SEQ ID NO: 205325 - DNA, 25 bp, Artificial
  Probe
ataccactgaagagaccttaaaaga

SEQ ID NO: 205326 - DNA, 25 bp, Artificial
  Probe
taatgcgagaagtcagccatccaaa

SEQ ID NO: 205327 - DNA, 25 bp, Artificial
  Probe
aaactctgtttgtcaaaggtctgtc

SEQ ID NO: 205328 - DNA, 25 bp, Artificial
  Probe
aactctgtttgtcaaaggtctgtct

SEQ ID NO: 205329 - DNA, 25 bp, Artificial
  Probe
gaagtcagccatccaaaactctgtt

SEQ ID NO: 205330 - DNA, 25 bp, Artificial
  Probe
catttgagggctctgttcgtgcaag

SEQ ID NO: 205331 - DNA, 25 bp, Artificial
  Probe
ttgagggctctgttcgtgcaagaat

SEQ ID NO: 205332 - DNA, 25 bp, Artificial
  Probe
gactgggccaaacctaagggtgaag

SEQ ID NO: 205333 - DNA, 25 bp, Artificial
  Probe
gggctctgttcgtgcaagaatagta

SEQ ID NO: 205334 - DNA, 25 bp, Artificial
  Probe
ggggagacttcaagccacaaggaaa

SEQ ID NO: 205335 - DNA, 25 bp, Artificial
  Probe
gctctgttcgtgcaagaatagtaac

SEQ ID NO: 205336 - DNA, 25 bp, Artificial
  Probe
ttgtcaaaggtctgtctgaggatac

SEQ ID NO: 205337 - DNA, 25 bp, Artificial
  Probe
ccaaagctgccaaggaggccatgga

SEQ ID NO: 205338 - DNA, 25 bp, Artificial
  Probe
gaagatgccaaagctgccaaggagg

SEQ ID NO: 205339 - DNA, 25 bp, Artificial
  Probe
aacccacatggcaaatctaaagggt

SEQ ID NO: 205340 - DNA, 25 bp, Artificial
  Probe
tgaggataccactgaagagacctta

SEQ ID NO: 205341 - DNA, 25 bp, Artificial
  Probe
gtcaaaggtctgtctgaggatacca

SEQ ID NO: 205342 - DNA, 25 bp, Artificial
  Probe
agaagtcagccatccaaaactctgt

SEQ ID NO: 205343 - DNA, 25 bp, Artificial
  Probe
gccaaagctgccaaggaggccatgg

SEQ ID NO: 205344 - DNA, 25 bp, Artificial
  Probe
catccaaaactctgtttgtcaaagg

SEQ ID NO: 205345 - DNA, 25 bp, Artificial
  Probe
gtcagccatccaaaactctgtttgt

SEQ ID NO: 205346 - DNA, 25 bp, Artificial
  Probe
ctctgttcgtgcaagaatagtaact

SEQ ID NO: 205347 - DNA, 25 bp, Artificial
  Probe
acctaatgcgagaagtcagccatcc

SEQ ID NO: 205348 - DNA, 25 bp, Artificial
  Probe
tgtctgaggataccactgaagagac

SEQ ID NO: 205349 - DNA, 25 bp, Artificial
  Probe
ctgttcgtgcaagaatagtaactga

SEQ ID NO: 205350 - DNA, 25 bp, Artificial
  Probe
ctgtttgtcaaaggtctgtctgagg

SEQ ID NO: 205351 - DNA, 25 bp, Artificial
  Probe
ctaatgcgagaagtcagccatccaa

SEQ ID NO: 205352 - DNA, 25 bp, Artificial
  Probe
aagtgccccagaacccacatggcaa

SEQ ID NO: 205353 - DNA, 25 bp, Artificial
  Probe
aaaggtctgtctgaggataccactg

SEQ ID NO: 205354 - DNA, 25 bp, Artificial
  Probe
tggactgggccaaacctaagggtga

SEQ ID NO: 205355 - DNA, 25 bp, Artificial
  Probe
aagctgccaaggaggccatggaaga

SEQ ID NO: 205356 - DNA, 25 bp, Artificial
  Probe
acccgaagctactgtgtgtgtgaat

SEQ ID NO: 205357 - DNA, 25 bp, Artificial
  Probe
aattccttttgttcgcatggtcaca

SEQ ID NO: 205358 - DNA, 25 bp, Artificial
  Probe
gctactgtgtgtgtgaatgaacact

SEQ ID NO: 205359 - DNA, 25 bp, Artificial
  Probe
tctaatacggtcacagtagtcttga

SEQ ID NO: 205360 - DNA, 25 bp, Artificial
  Probe
acggtcacagtagtcttgataacca

SEQ ID NO: 205361 - DNA, 25 bp, Artificial
  Probe
ggagacctcacagacccgaagctac

SEQ ID NO: 205362 - DNA, 25 bp, Artificial
  Probe
cacagacccgaagctactgtgtgtg

SEQ ID NO: 205363 - DNA, 25 bp, Artificial
  Probe
ctaatacggtcacagtagtcttgat

SEQ ID NO: 205364 - DNA, 25 bp, Artificial
  Probe
gcctcatacccgaatgctgtacatc

SEQ ID NO: 205365 - DNA, 25 bp, Artificial
  Probe
ttcgcatggtcacacactgatgctt

SEQ ID NO: 205366 - DNA, 25 bp, Artificial
  Probe
tcgcatggtcacacactgatgcttg

SEQ ID NO: 205367 - DNA, 25 bp, Artificial
  Probe
ccgaagctactgtgtgtgtgaatga

SEQ ID NO: 205368 - DNA, 25 bp, Artificial
  Probe
atacggtcacagtagtcttgataac

SEQ ID NO: 205369 - DNA, 25 bp, Artificial
  Probe
cagacccgaagctactgtgtgtgtg

SEQ ID NO: 205370 - DNA, 25 bp, Artificial
  Probe
tttgttcgcatggtcacacactgat

SEQ ID NO: 205371 - DNA, 25 bp, Artificial
  Probe
tcacagacccgaagctactgtgtgt

SEQ ID NO: 205372 - DNA, 25 bp, Artificial
  Probe
caaggagacctcacagacccgaagc

SEQ ID NO: 205373 - DNA, 25 bp, Artificial
  Probe
ccattctgggatctaatacggtcac

SEQ ID NO: 205374 - DNA, 25 bp, Artificial
  Probe
tacccgggaacaaggagacctcaca

SEQ ID NO: 205375 - DNA, 25 bp, Artificial
  Probe
ttctgggatctaatacggtcacagt

SEQ ID NO: 205376 - DNA, 25 bp, Artificial
  Probe
ccgaatgctgtacatctatttgatt

SEQ ID NO: 205377 - DNA, 25 bp, Artificial
  Probe
ctactgtgtgtgtgaatgaacactc

SEQ ID NO: 205378 - DNA, 25 bp, Artificial
  Probe
gacccgaagctactgtgtgtgtgaa

SEQ ID NO: 205379 - DNA, 25 bp, Artificial
  Probe
tacccgaatgctgtacatctatttg

SEQ ID NO: 205380 - DNA, 25 bp, Artificial
  Probe
ttgttcgcatggtcacacactgatg

SEQ ID NO: 205381 - DNA, 25 bp, Artificial
  Probe
cgaatgctgtacatctatttgattg

SEQ ID NO: 205382 - DNA, 25 bp, Artificial
  Probe
tacggtcacagtagtcttgataacc

SEQ ID NO: 205383 - DNA, 25 bp, Artificial
  Probe
cccgaatgctgtacatctatttgat

SEQ ID NO: 205384 - DNA, 25 bp, Artificial
  Probe
atctaatacggtcacagtagtcttg

SEQ ID NO: 205385 - DNA, 25 bp, Artificial
  Probe
tgttcgcatggtcacacactgatgc

SEQ ID NO: 205386 - DNA, 25 bp, Artificial
  Probe
cggtcacagtagtcttgataaccag

SEQ ID NO: 205387 - DNA, 25 bp, Artificial
  Probe
gatctaatacggtcacagtagtctt

SEQ ID NO: 205388 - DNA, 25 bp, Artificial
  Probe
gcatggtcacacactgatgcttgcc

SEQ ID NO: 205389 - DNA, 25 bp, Artificial
  Probe
ccttttgttcgcatggtcacacact

SEQ ID NO: 205390 - DNA, 25 bp, Artificial
  Probe
taatacggtcacagtagtcttgata

SEQ ID NO: 205391 - DNA, 25 bp, Artificial
  Probe
agctactgtgtgtgtgaatgaacac

SEQ ID NO: 205392 - DNA, 25 bp, Artificial
  Probe
aaattccttttgttcgcatggtcac

SEQ ID NO: 205393 - DNA, 25 bp, Artificial
  Probe
acagacccgaagctactgtgtgtgt

SEQ ID NO: 205394 - DNA, 25 bp, Artificial
  Probe
cccgaagctactgtgtgtgtgaatg

SEQ ID NO: 205395 - DNA, 25 bp, Artificial
  Probe
cgcatggtcacacactgatgcttgc

SEQ ID NO: 205396 - DNA, 25 bp, Artificial
  Probe
ttttgttcgcatggtcacacactga

SEQ ID NO: 205397 - DNA, 25 bp, Artificial
  Probe
ctcacagacccgaagctactgtgtg

SEQ ID NO: 205398 - DNA, 25 bp, Artificial
  Probe
aggagacctcacagacccgaagcta

SEQ ID NO: 205399 - DNA, 25 bp, Artificial
  Probe
cattctgggatctaatacggtcaca

SEQ ID NO: 205400 - DNA, 25 bp, Artificial
  Probe
gagacctcacagacccgaagctact

SEQ ID NO: 205401 - DNA, 25 bp, Artificial
  Probe
ggtcacagtagtcttgataaccaga

SEQ ID NO: 205402 - DNA, 25 bp, Artificial
  Probe
tgccaagctggtgtccttccatgat

SEQ ID NO: 205403 - DNA, 25 bp, Artificial
  Probe
gtgcctacaggagaaggtggcacca

SEQ ID NO: 205404 - DNA, 25 bp, Artificial
  Probe
gtgcttccaacaggtgcccaggcca

SEQ ID NO: 205405 - DNA, 25 bp, Artificial
  Probe
ctcttccatgatcgtttacagtcag

SEQ ID NO: 205406 - DNA, 25 bp, Artificial
  Probe
tgcccagggttttgccccaagtcct

SEQ ID NO: 205407 - DNA, 25 bp, Artificial
  Probe
tgaatcggccaaagggcgctacttg

SEQ ID NO: 205408 - DNA, 25 bp, Artificial
  Probe
tgcctacaggagaaggtggcaccat

SEQ ID NO: 205409 - DNA, 25 bp, Artificial
  Probe
aagctggcattatgctggagccttg

SEQ ID NO: 205410 - DNA, 25 bp, Artificial
  Probe
aaactgcttcaaagggaagtttctg

SEQ ID NO: 205411 - DNA, 25 bp, Artificial
  Probe
acgaggacctcctacacatctgact

SEQ ID NO: 205412 - DNA, 25 bp, Artificial
  Probe
catgatcgtttacagtcagtggaac

SEQ ID NO: 205413 - DNA, 25 bp, Artificial
  Probe
aaggtggcaccatggacagccaagc

SEQ ID NO: 205414 - DNA, 25 bp, Artificial
  Probe
gcgtctgtcattttgcctttaacaa

SEQ ID NO: 205415 - DNA, 25 bp, Artificial
  Probe
taacaaaactgcttcaaagggaagt

SEQ ID NO: 205416 - DNA, 25 bp, Artificial
  Probe
acaaggtgttgcttgaatcggccaa

SEQ ID NO: 205417 - DNA, 25 bp, Artificial
  Probe
caggccacatgcatctcacaacaga

SEQ ID NO: 205418 - DNA, 25 bp, Artificial
  Probe
tctgactccgtggtgcctacaggag

SEQ ID NO: 205419 - DNA, 25 bp, Artificial
  Probe
gagccttgtacgtggctcctgagct

SEQ ID NO: 205420 - DNA, 25 bp, Artificial
  Probe
gccaaagggcgctacttggtgccca

SEQ ID NO: 205421 - DNA, 25 bp, Artificial
  Probe
tatgctggagccttgtacgtggctc

SEQ ID NO: 205422 - DNA, 25 bp, Artificial
  Probe
cctgccaagctggtgtccttccatg

SEQ ID NO: 205423 - DNA, 25 bp, Artificial
  Probe
gccagcaagggcataaggtgaagct

SEQ ID NO: 205424 - DNA, 25 bp, Artificial
  Probe
acccttgctgctttagaccctatag

SEQ ID NO: 205425 - DNA, 25 bp, Artificial
  Probe
atctcacaacagagggctgtgtttg

SEQ ID NO: 205426 - DNA, 25 bp, Artificial
  Probe
gcattatgctggagccttgtacgtg

SEQ ID NO: 205427 - DNA, 25 bp, Artificial
  Probe
tacagtcagtggaacaaggtgttgc

SEQ ID NO: 205428 - DNA, 25 bp, Artificial
  Probe
ttgctgctttagaccctatagggtg

SEQ ID NO: 205429 - DNA, 25 bp, Artificial
  Probe
cttgaatcggccaaagggcgctact

SEQ ID NO: 205430 - DNA, 25 bp, Artificial
  Probe
gttttgccccaagtcctcacttacg

SEQ ID NO: 205431 - DNA, 25 bp, Artificial
  Probe
gtgttgcttgaatcggccaaagggc

SEQ ID NO: 205432 - DNA, 25 bp, Artificial
  Probe
acagtcagtggaacaaggtgttgct

SEQ ID NO: 205433 - DNA, 25 bp, Artificial
  Probe
cttccatgatcgtttacagtcagtg

SEQ ID NO: 205434 - DNA, 25 bp, Artificial
  Probe
ctcctacacatctgactccgtggtg

SEQ ID NO: 205435 - DNA, 25 bp, Artificial
  Probe
ttcagacccggacagcgcaagccaa

SEQ ID NO: 205436 - DNA, 25 bp, Artificial
  Probe
aagacttcagctcgatgatgcgtct

SEQ ID NO: 205437 - DNA, 25 bp, Artificial
  Probe
caaagggcgctacttggtgcccagg

SEQ ID NO: 205438 - DNA, 25 bp, Artificial
  Probe
catctgactccgtggtgcctacagg

SEQ ID NO: 205439 - DNA, 25 bp, Artificial
  Probe
ggcgctacttggtgcccagggtttt

SEQ ID NO: 205440 - DNA, 25 bp, Artificial
  Probe
aagtcctcacttacgatcatagctg

SEQ ID NO: 205441 - DNA, 25 bp, Artificial
  Probe
atgacagtgacgaggacctcctaca

SEQ ID NO: 205442 - DNA, 25 bp, Artificial
  Probe
caacaggtgcccaggccacatgcat

SEQ ID NO: 205443 - DNA, 25 bp, Artificial
  Probe
gtttcttctgccagcaagggcataa

SEQ ID NO: 205444 - DNA, 25 bp, Artificial
  Probe
cttctgccagcaagggcataaggtg

SEQ ID NO: 205445 - DNA, 25 bp, Artificial
  Probe
ttaacaaaactgcttcaaagggaag

SEQ ID NO: 205446 - DNA, 25 bp, Artificial
  Probe
ggcaccatggacagccaagcatctc

SEQ ID NO: 205447 - DNA, 25 bp, Artificial
  Probe
tggtgcccagggttttgccccaagt

SEQ ID NO: 205448 - DNA, 25 bp, Artificial
  Probe
tcaaaatccaaaatgacaagatgcg

SEQ ID NO: 205449 - DNA, 25 bp, Artificial
  Probe
gaaatggcacataggcttctattac

SEQ ID NO: 205450 - DNA, 25 bp, Artificial
  Probe
tacactgtccgagacctcctggtca

SEQ ID NO: 205451 - DNA, 25 bp, Artificial
  Probe
ttggatgtcttccaaactgtcaaga

SEQ ID NO: 205452 - DNA, 25 bp, Artificial
  Probe
cattccagtcaaacggggcgaagag

SEQ ID NO: 205453 - DNA, 25 bp, Artificial
  Probe
ctgctacaaggtggtacaggagtac

SEQ ID NO: 205454 - DNA, 25 bp, Artificial
  Probe
taaatgtgttagcactatagtcctt

SEQ ID NO: 205455 - DNA, 25 bp, Artificial
  Probe
gagttttacagatcattccatatga

SEQ ID NO: 205456 - DNA, 25 bp, Artificial
  Probe
ttctccacacaactgaggacttctg

SEQ ID NO: 205457 - DNA, 25 bp, Artificial
  Probe
aaattgggccagattattctttgct

SEQ ID NO: 205458 - DNA, 25 bp, Artificial
  Probe
aagattcctacatcgccagccaggg

SEQ ID NO: 205459 - DNA, 25 bp, Artificial
  Probe
tatgccaacttcaagtgacagggga

SEQ ID NO: 205460 - DNA, 25 bp, Artificial
  Probe
gcactatagtccttttccagtgttt

SEQ ID NO: 205461 - DNA, 25 bp, Artificial
  Probe
accttccagccaacatgaagaagaa

SEQ ID NO: 205462 - DNA, 25 bp, Artificial
  Probe
ctgcggctgcagaggccacacatgg

SEQ ID NO: 205463 - DNA, 25 bp, Artificial
  Probe
caaacataagagtcattccaggtaa

SEQ ID NO: 205464 - DNA, 25 bp, Artificial
  Probe
ctatgtgaacgcatccttcattgat

SEQ ID NO: 205465 - DNA, 25 bp, Artificial
  Probe
cagtactggccatctgatggcctgg

SEQ ID NO: 205466 - DNA, 25 bp, Artificial
  Probe
aagagaacacagactatgtgaacgc

SEQ ID NO: 205467 - DNA, 25 bp, Artificial
  Probe
ctagcaacaatggactagaggagga

SEQ ID NO: 205468 - DNA, 25 bp, Artificial
  Probe
aactgaggacttctggcgaatgatc

SEQ ID NO: 205469 - DNA, 25 bp, Artificial
  Probe
atggagacatcacagttgagctgaa

SEQ ID NO: 205470 - DNA, 25 bp, Artificial
  Probe
ataatgagaccagagcagcatccct

SEQ ID NO: 205471 - DNA, 25 bp, Artificial
  Probe
ccaatatcagccacctcaggagtgg

SEQ ID NO: 205472 - DNA, 25 bp, Artificial
  Probe
cccacagacaggagaattgccttta

SEQ ID NO: 205473 - DNA, 25 bp, Artificial
  Probe
ggaatggaagtcctgctccattgta

SEQ ID NO: 205474 - DNA, 25 bp, Artificial
  Probe
taacagagtgatcattccagtcaaa

SEQ ID NO: 205475 - DNA, 25 bp, Artificial
  Probe
cttctattacctattaggtggagat

SEQ ID NO: 205476 - DNA, 25 bp, Artificial
  Probe
catcacagttgagctgaagaaggag

SEQ ID NO: 205477 - DNA, 25 bp, Artificial
  Probe
gggaaccatcccatcactgtgcact

SEQ ID NO: 205478 - DNA, 25 bp, Artificial
  Probe
gtcaccaacaccagggagaacaaga

SEQ ID NO: 205479 - DNA, 25 bp, Artificial
  Probe
cattccatatgaatttaacagagtg

SEQ ID NO: 205480 - DNA, 25 bp, Artificial
  Probe
caaagcacaaagttctcggagctct

SEQ ID NO: 205481 - DNA, 25 bp, Artificial
  Probe
aaatccaaaatgacaagatgcgtac

SEQ ID NO: 205482 - DNA, 25 bp, Artificial
  Probe
ctcctggtcaccaacaccagggaga

SEQ ID NO: 205483 - DNA, 25 bp, Artificial
  Probe
gcagtcagggaaccatcccatcact

SEQ ID NO: 205484 - DNA, 25 bp, Artificial
  Probe
ccattgtaatgctaacagaactgga

SEQ ID NO: 205485 - DNA, 25 bp, Artificial
  Probe
gaattttggatgtcttccaaactgt

SEQ ID NO: 205486 - DNA, 25 bp, Artificial
  Probe
attccaggtaactcggtgccaacta

SEQ ID NO: 205487 - DNA, 25 bp, Artificial
  Probe
taccggcagaaagattcctacatcg

SEQ ID NO: 205488 - DNA, 25 bp, Artificial
  Probe
gctgcagaggccacacatggtccag

SEQ ID NO: 205489 - DNA, 25 bp, Artificial
  Probe
aatgtgagagctacactgtccgaga

SEQ ID NO: 205490 - DNA, 25 bp, Artificial
  Probe
gccagattattctttgcttcaaatg

SEQ ID NO: 205491 - DNA, 25 bp, Artificial
  Probe
tggttgtctcacgtccccaggccgg

SEQ ID NO: 205492 - DNA, 25 bp, Artificial
  Probe
gatggcctggtgtcctatggagaca

SEQ ID NO: 205493 - DNA, 25 bp, Artificial
  Probe
aaggcccacagacaggagaattgcc

SEQ ID NO: 205494 - DNA, 25 bp, Artificial
  Probe
tgactgtgtgtttggaaggctgctc

SEQ ID NO: 205495 - DNA, 25 bp, Artificial
  Probe
aggacaggcagatgcccccatttcc

SEQ ID NO: 205496 - DNA, 25 bp, Artificial
  Probe
cgctgttgttctgttgactgtgtgt

SEQ ID NO: 205497 - DNA, 25 bp, Artificial
  Probe
cacctcttagggatctgcgaggagc

SEQ ID NO: 205498 - DNA, 25 bp, Artificial
  Probe
tgacattgacgctgagatccatgac

SEQ ID NO: 205499 - DNA, 25 bp, Artificial
  Probe
ctgtccccagtgtccgtaaagctta

SEQ ID NO: 205500 - DNA, 25 bp, Artificial
  Probe
gcactggtcctatgggttgcgccct

SEQ ID NO: 205501 - DNA, 25 bp, Artificial
  Probe
catttccttgtctctgaacaagctg

SEQ ID NO: 205502 - DNA, 25 bp, Artificial
  Probe
cagtggtccgggtgctggcttcttt

SEQ ID NO: 205503 - DNA, 25 bp, Artificial
  Probe
actgatggccgctgttgttctgttg

SEQ ID NO: 205504 - DNA, 25 bp, Artificial
  Probe
aatctagtacaggtgcctgtcccca

SEQ ID NO: 205505 - DNA, 25 bp, Artificial
  Probe
tctatacccagcagcgtagatttca

SEQ ID NO: 205506 - DNA, 25 bp, Artificial
  Probe
ccgcatttctatacccagcagcgta

SEQ ID NO: 205507 - DNA, 25 bp, Artificial
  Probe
gtgcctgtccccagtgtccgtaaag

SEQ ID NO: 205508 - DNA, 25 bp, Artificial
  Probe
gaatgcactgtccactggccccgtt

SEQ ID NO: 205509 - DNA, 25 bp, Artificial
  Probe
agaatggaaacgatccccaaactga

SEQ ID NO: 205510 - DNA, 25 bp, Artificial
  Probe
atttctatacccagcagcgtagatt

SEQ ID NO: 205511 - DNA, 25 bp, Artificial
  Probe
gaaacgatccccaaactgatggccg

SEQ ID NO: 205512 - DNA, 25 bp, Artificial
  Probe
aattgtgtgggcttccgcatttcta

SEQ ID NO: 205513 - DNA, 25 bp, Artificial
  Probe
atgcactggcccagaaggatccaca

SEQ ID NO: 205514 - DNA, 25 bp, Artificial
  Probe
cagtttctgtggagtcagtggtccg

SEQ ID NO: 205515 - DNA, 25 bp, Artificial
  Probe
acttcgaatgcactgtccactggcc

SEQ ID NO: 205516 - DNA, 25 bp, Artificial
  Probe
tccccaaactgatggccgctgttgt

SEQ ID NO: 205517 - DNA, 25 bp, Artificial
  Probe
ctcttagggatctgcgaggagctct

SEQ ID NO: 205518 - DNA, 25 bp, Artificial
  Probe
attctttccaagagatgggcaagga

SEQ ID NO: 205519 - DNA, 25 bp, Artificial
  Probe
tggcagaaccccagaacttcgaatg

SEQ ID NO: 205520 - DNA, 25 bp, Artificial
  Probe
tgctccagccagcactggtcctatg

SEQ ID NO: 205521 - DNA, 25 bp, Artificial
  Probe
tggaaggctgctccagccagcactg

SEQ ID NO: 205522 - DNA, 25 bp, Artificial
  Probe
tctgtaattgtgtgggcttccgcat

SEQ ID NO: 205523 - DNA, 25 bp, Artificial
  Probe
gatctgcgaggagctctggaacgtc

SEQ ID NO: 205524 - DNA, 25 bp, Artificial
  Probe
cccagtgtccgtaaagcttaggaca

SEQ ID NO: 205525 - DNA, 25 bp, Artificial
  Probe
tggccccgttcacctcttagggatc

SEQ ID NO: 205526 - DNA, 25 bp, Artificial
  Probe
gatcaaatggcagaaccccagaact

SEQ ID NO: 205527 - DNA, 25 bp, Artificial
  Probe
tcaaatggcagaaccccagaacttc

SEQ ID NO: 205528 - DNA, 25 bp, Artificial
  Probe
tggtccgggtgctggcttctttcca

SEQ ID NO: 205529 - DNA, 25 bp, Artificial
  Probe
gggtgctggcttctttccaaagtat

SEQ ID NO: 205530 - DNA, 25 bp, Artificial
  Probe
gaatggaaacgatccccaaactgat

SEQ ID NO: 205531 - DNA, 25 bp, Artificial
  Probe
attgtgtgggcttccgcatttctat

SEQ ID NO: 205532 - DNA, 25 bp, Artificial
  Probe
gatgtaatgcactggcccagaagga

SEQ ID NO: 205533 - DNA, 25 bp, Artificial
  Probe
ccacaacatccgagtgtgacattga

SEQ ID NO: 205534 - DNA, 25 bp, Artificial
  Probe
aagatgtaatgcactggcccagaag

SEQ ID NO: 205535 - DNA, 25 bp, Artificial
  Probe
ctttccaagagatgggcaaggagga

SEQ ID NO: 205536 - DNA, 25 bp, Artificial
  Probe
tgtgtgtttggaaggctgctccagc

SEQ ID NO: 205537 - DNA, 25 bp, Artificial
  Probe
ctctggaacgtctgattgaagagga

SEQ ID NO: 205538 - DNA, 25 bp, Artificial
  Probe
gtgggcttccgcatttctataccca

SEQ ID NO: 205539 - DNA, 25 bp, Artificial
  Probe
agatgcccccatttccttgtctctg

SEQ ID NO: 205540 - DNA, 25 bp, Artificial
  Probe
ggttgttgcaggtgactagccgcct

SEQ ID NO: 205541 - DNA, 25 bp, Artificial
  Probe
cgccatgatagaacacagcgcacat

SEQ ID NO: 205542 - DNA, 25 bp, Artificial
  Probe
cgcagctgagctgaaatgtatactt

SEQ ID NO: 205543 - DNA, 25 bp, Artificial
  Probe
atgatagaacacagcgcacatgcac

SEQ ID NO: 205544 - DNA, 25 bp, Artificial
  Probe
cttaacttctagtcgcgctcgctcg

SEQ ID NO: 205545 - DNA, 25 bp, Artificial
  Probe
cgaaacccagcgttcttcaggagat

SEQ ID NO: 205546 - DNA, 25 bp, Artificial
  Probe
gcacgcacaaatgcactcacgcaat

SEQ ID NO: 205547 - DNA, 25 bp, Artificial
  Probe
tcatctacaaggaagtaatgaactc

SEQ ID NO: 205548 - DNA, 25 bp, Artificial
  Probe
aactaagttaaatctttctgcgtgc

SEQ ID NO: 205549 - DNA, 25 bp, Artificial
  Probe
aatctttctgcgtgcttctccagag

SEQ ID NO: 205550 - DNA, 25 bp, Artificial
  Probe
ctaagaacggcgtagtcaaaggcca

SEQ ID NO: 205551 - DNA, 25 bp, Artificial
  Probe
tgacagcagcctggaagcctcggcg

SEQ ID NO: 205552 - DNA, 25 bp, Artificial
  Probe
gacgccatgatagaacacagcgcac

SEQ ID NO: 205553 - DNA, 25 bp, Artificial
  Probe
ctgacagcagcctggaagcctcggc

SEQ ID NO: 205554 - DNA, 25 bp, Artificial
  Probe
cggcgtagtcaaaggccagccctca

SEQ ID NO: 205555 - DNA, 25 bp, Artificial
  Probe
gcgttcttcaggagatgacgccatg

SEQ ID NO: 205556 - DNA, 25 bp, Artificial
  Probe
ttctagtcgcgctcgctcgactttg

SEQ ID NO: 205557 - DNA, 25 bp, Artificial
  Probe
ttgcaggtgactagccgcctgcctg

SEQ ID NO: 205558 - DNA, 25 bp, Artificial
  Probe
tgcagcagtgaacagcagtgagagt

SEQ ID NO: 205559 - DNA, 25 bp, Artificial
  Probe
agaacggcgtagtcaaaggccagcc

SEQ ID NO: 205560 - DNA, 25 bp, Artificial
  Probe
aatgtatacttaacttctagtcgcg

SEQ ID NO: 205561 - DNA, 25 bp, Artificial
  Probe
ggagatgacgccatgatagaacaca

SEQ ID NO: 205562 - DNA, 25 bp, Artificial
  Probe
gaactcatctacaaggaagtaatga

SEQ ID NO: 205563 - DNA, 25 bp, Artificial
  Probe
ttcaggtgcagcagtgaacagcagt

SEQ ID NO: 205564 - DNA, 25 bp, Artificial
  Probe
cagcagtgaacagcagtgagagtct

SEQ ID NO: 205565 - DNA, 25 bp, Artificial
  Probe
cgcacatgcacacacacagagcttg

SEQ ID NO: 205566 - DNA, 25 bp, Artificial
  Probe
gcacaaatgcactcacgcaatgtca

SEQ ID NO: 205567 - DNA, 25 bp, Artificial
  Probe
gttctgtatcgcagctgagctgaaa

SEQ ID NO: 205568 - DNA, 25 bp, Artificial
  Probe
acatgcacacacacagagcttgtac

SEQ ID NO: 205569 - DNA, 25 bp, Artificial
  Probe
accgctgggttgttgcaggtgacta

SEQ ID NO: 205570 - DNA, 25 bp, Artificial
  Probe
atgacgccatgatagaacacagcgc

SEQ ID NO: 205571 - DNA, 25 bp, Artificial
  Probe
acagcgcacatgcacacacacagag

SEQ ID NO: 205572 - DNA, 25 bp, Artificial
  Probe
gcgcacatgcacacacacagagctt

SEQ ID NO: 205573 - DNA, 25 bp, Artificial
  Probe
cagagttctgtatcgcagctgagct

SEQ ID NO: 205574 - DNA, 25 bp, Artificial
  Probe
gcagtgaacagcagtgagagtctcc

SEQ ID NO: 205575 - DNA, 25 bp, Artificial
  Probe
caccatcgaagaatggaaagaactc

SEQ ID NO: 205576 - DNA, 25 bp, Artificial
  Probe
ccatgatagaacacagcgcacatgc

SEQ ID NO: 205577 - DNA, 25 bp, Artificial
  Probe
cttcaggagatgacgccatgataga

SEQ ID NO: 205578 - DNA, 25 bp, Artificial
  Probe
gcatccgacactgacagcagcctgg

SEQ ID NO: 205579 - DNA, 25 bp, Artificial
  Probe
atgcactcacgcaatgtcaagaaaa

SEQ ID NO: 205580 - DNA, 25 bp, Artificial
  Probe
gcacacacacagagcttgtacacac

SEQ ID NO: 205581 - DNA, 25 bp, Artificial
  Probe
cgacactgacagcagcctggaagcc

SEQ ID NO: 205582 - DNA, 25 bp, Artificial
  Probe
taagaacggcgtagtcaaaggccag

SEQ ID NO: 205583 - DNA, 25 bp, Artificial
  Probe
agtcgcgctcgctcgactttggtct

SEQ ID NO: 205584 - DNA, 25 bp, Artificial
  Probe
caggtgcagcagtgaacagcagtga

SEQ ID NO: 205585 - DNA, 25 bp, Artificial
  Probe
gttaaatctttctgcgtgcttctcc

SEQ ID NO: 205586 - DNA, 25 bp, Artificial
  Probe
gacgtaccatgtatttcagtgaaat

SEQ ID NO: 205587 - DNA, 25 bp, Artificial
  Probe
ggcgacgtaccatgtatttcagtga

SEQ ID NO: 205588 - DNA, 25 bp, Artificial
  Probe
agggcgacgtaccatgtatttcagt

SEQ ID NO: 205589 - DNA, 25 bp, Artificial
  Probe
aggaggattatctggtccaggcaga

SEQ ID NO: 205590 - DNA, 25 bp, Artificial
  Probe
tccctggttaggaagggactactcg

SEQ ID NO: 205591 - DNA, 25 bp, Artificial
  Probe
cttaattagccaaggcagaagagag

SEQ ID NO: 205592 - DNA, 25 bp, Artificial
  Probe
aactttgtctgcttcttaccaggtg

SEQ ID NO: 205593 - DNA, 25 bp, Artificial
  Probe
tgggaactttgtctgcttcttacca

SEQ ID NO: 205594 - DNA, 25 bp, Artificial
  Probe
cgtaccatgtatttcagtgaaatat

SEQ ID NO: 205595 - DNA, 25 bp, Artificial
  Probe
ggaggattatctggtccaggcagaa

SEQ ID NO: 205596 - DNA, 25 bp, Artificial
  Probe
acgtaccatgtatttcagtgaaata

SEQ ID NO: 205597 - DNA, 25 bp, Artificial
  Probe
gggcgacgtaccatgtatttcagtg

SEQ ID NO: 205598 - DNA, 25 bp, Artificial
  Probe
ctttgtctgcttcttaccaggtggg

SEQ ID NO: 205599 - DNA, 25 bp, Artificial
  Probe
aagcctttgccaccagttctctgca

SEQ ID NO: 205600 - DNA, 25 bp, Artificial
  Probe
gcttaattagccaaggcagaagaga

SEQ ID NO: 205601 - DNA, 25 bp, Artificial
  Probe
gggaactttgtctgcttcttaccag

SEQ ID NO: 205602 - DNA, 25 bp, Artificial
  Probe
cgacgtaccatgtatttcagtgaaa

SEQ ID NO: 205603 - DNA, 25 bp, Artificial
  Probe
gcgacgtaccatgtatttcagtgaa

SEQ ID NO: 205604 - DNA, 25 bp, Artificial
  Probe
tttgtctgcttcttaccaggtggga

SEQ ID NO: 205605 - DNA, 25 bp, Artificial
  Probe
taagcctttgccaccagttctctgc

SEQ ID NO: 205606 - DNA, 25 bp, Artificial
  Probe
actttgtctgcttcttaccaggtgg

SEQ ID NO: 205607 - DNA, 25 bp, Artificial
  Probe
tatccctggttaggaagggactact

SEQ ID NO: 205608 - DNA, 25 bp, Artificial
  Probe
ggaactttgtctgcttcttaccagg

SEQ ID NO: 205609 - DNA, 25 bp, Artificial
  Probe
gagggcgacgtaccatgtatttcag

SEQ ID NO: 205610 - DNA, 25 bp, Artificial
  Probe
gaactttgtctgcttcttaccaggt

SEQ ID NO: 205611 - DNA, 25 bp, Artificial
  Probe
gatagatcttagtggctcttgcagc

SEQ ID NO: 205612 - DNA, 25 bp, Artificial
  Probe
aatgcagagcagtccccactggatc

SEQ ID NO: 205613 - DNA, 25 bp, Artificial
  Probe
caactgccatgaaaaaggaaggcaa

SEQ ID NO: 205614 - DNA, 25 bp, Artificial
  Probe
gctagttttcctgtgattcaactta

SEQ ID NO: 205615 - DNA, 25 bp, Artificial
  Probe
atgccccagtcctgggctcacaaga

SEQ ID NO: 205616 - DNA, 25 bp, Artificial
  Probe
tctctgctagttttcctgtgattca

SEQ ID NO: 205617 - DNA, 25 bp, Artificial
  Probe
tgctatgcgcagacccaggctgaaa

SEQ ID NO: 205618 - DNA, 25 bp, Artificial
  Probe
caccgcagcaactgccatgaaaaag

SEQ ID NO: 205619 - DNA, 25 bp, Artificial
  Probe
cttgtactcagcaggggcactacgt

SEQ ID NO: 205620 - DNA, 25 bp, Artificial
  Probe
tgcatggaaacatgccccagtcctg

SEQ ID NO: 205621 - DNA, 25 bp, Artificial
  Probe
gaaacatgccccagtcctgggctca

SEQ ID NO: 205622 - DNA, 25 bp, Artificial
  Probe
cagcaggggcactacgtggtcgttt

SEQ ID NO: 205623 - DNA, 25 bp, Artificial
  Probe
tcgctgtctgcctttgctatgcgca

SEQ ID NO: 205624 - DNA, 25 bp, Artificial
  Probe
tctggacagccctataggatagatc

SEQ ID NO: 205625 - DNA, 25 bp, Artificial
  Probe
ctgttggtggtgcatggaaacatgc

SEQ ID NO: 205626 - DNA, 25 bp, Artificial
  Probe
cagcaactgccatgaaaaaggaagg

SEQ ID NO: 205627 - DNA, 25 bp, Artificial
  Probe
ccagtcctgggctcacaagaattcg

SEQ ID NO: 205628 - DNA, 25 bp, Artificial
  Probe
ctccacagtgtgataaatggaagaa

SEQ ID NO: 205629 - DNA, 25 bp, Artificial
  Probe
cttatcactggcatagccttgtact

SEQ ID NO: 205630 - DNA, 25 bp, Artificial
  Probe
agtggctcttgcagcccagtaaaag

SEQ ID NO: 205631 - DNA, 25 bp, Artificial
  Probe
ctgctagtttctctgctagttttcc

SEQ ID NO: 205632 - DNA, 25 bp, Artificial
  Probe
cttgagacttagttttctggttact

SEQ ID NO: 205633 - DNA, 25 bp, Artificial
  Probe
gctcacaagaattcgctgtctgcct

SEQ ID NO: 205634 - DNA, 25 bp, Artificial
  Probe
agaactctgaggtatccctgtagct

SEQ ID NO: 205635 - DNA, 25 bp, Artificial
  Probe
ctcttgcagcccagtaaaagcctgt

SEQ ID NO: 205636 - DNA, 25 bp, Artificial
  Probe
acaagaattcgctgtctgcctttgc

SEQ ID NO: 205637 - DNA, 25 bp, Artificial
  Probe
gtgattcaacttacatttctgtctg

SEQ ID NO: 205638 - DNA, 25 bp, Artificial
  Probe
agtttctctgctagttttcctgtga

SEQ ID NO: 205639 - DNA, 25 bp, Artificial
  Probe
acagccctataggatagatcttagt

SEQ ID NO: 205640 - DNA, 25 bp, Artificial
  Probe
cttctctgctagtttctctgctagt

SEQ ID NO: 205641 - DNA, 25 bp, Artificial
  Probe
tgaaaagatctcagcagccttctgt

SEQ ID NO: 205642 - DNA, 25 bp, Artificial
  Probe
gctagtttctctgctagttttcctg

SEQ ID NO: 205643 - DNA, 25 bp, Artificial
  Probe
ctgcctttgctatgcgcagacccag

SEQ ID NO: 205644 - DNA, 25 bp, Artificial
  Probe
atgcgcagacccaggctgaaaccaa

SEQ ID NO: 205645 - DNA, 25 bp, Artificial
  Probe
gcaaacttctctgctagtttctctg

SEQ ID NO: 205646 - DNA, 25 bp, Artificial
  Probe
agaattggggtcctaactccacagt

SEQ ID NO: 205647 - DNA, 25 bp, Artificial
  Probe
tctggttactttaactgaaaagatc

SEQ ID NO: 205648 - DNA, 25 bp, Artificial
  Probe
gtccaaagactttgcttaatgttat

SEQ ID NO: 205649 - DNA, 25 bp, Artificial
  Probe
ctcagcaggggcactacgtggtcgt

SEQ ID NO: 205650 - DNA, 25 bp, Artificial
  Probe
ctgaggtatccctgtagctgtcaat

SEQ ID NO: 205651 - DNA, 25 bp, Artificial
  Probe
ctcccttatcactggcatagccttg

SEQ ID NO: 205652 - DNA, 25 bp, Artificial
  Probe
tttgctatgcgcagacccaggctga

SEQ ID NO: 205653 - DNA, 25 bp, Artificial
  Probe
aactgaaaagatctcagcagccttc

SEQ ID NO: 205654 - DNA, 25 bp, Artificial
  Probe
tggatccaccgcagcaactgccatg

SEQ ID NO: 205655 - DNA, 25 bp, Artificial
  Probe
ccagtaaaagcctgtcctgttggtg

SEQ ID NO: 205656 - DNA, 25 bp, Artificial
  Probe
atcttagtggctcttgcagcccagt

SEQ ID NO: 205657 - DNA, 25 bp, Artificial
  Probe
atccagttaagaaacatctgaagca

SEQ ID NO: 205658 - DNA, 25 bp, Artificial
  Probe
tcctagatggacatcaggaatcaaa

SEQ ID NO: 205659 - DNA, 25 bp, Artificial
  Probe
acaccgcttttgtcgcagccaggac

SEQ ID NO: 205660 - DNA, 25 bp, Artificial
  Probe
tccgaagttttgcaaaccctttgct

SEQ ID NO: 205661 - DNA, 25 bp, Artificial
  Probe
agtcccttacacaccgcttttgtcg

SEQ ID NO: 205662 - DNA, 25 bp, Artificial
  Probe
cctcccttgggctagcaggaaaggc

SEQ ID NO: 205663 - DNA, 25 bp, Artificial
  Probe
aatctgtaacccatcctagatggac

SEQ ID NO: 205664 - DNA, 25 bp, Artificial
  Probe
gaagaaatctgtaacccatcctaga

SEQ ID NO: 205665 - DNA, 25 bp, Artificial
  Probe
ccagccagtgtatatgaacaggatg

SEQ ID NO: 205666 - DNA, 25 bp, Artificial
  Probe
gcaaggtcccctttgcttcccgtat

SEQ ID NO: 205667 - DNA, 25 bp, Artificial
  Probe
tccacctatgagtgcaatagaacca

SEQ ID NO: 205668 - DNA, 25 bp, Artificial
  Probe
actcatgttaaaacggcctcccttg

SEQ ID NO: 205669 - DNA, 25 bp, Artificial
  Probe
agaagaaatctgtaacccatcctag

SEQ ID NO: 205670 - DNA, 25 bp, Artificial
  Probe
ttacacaccgcttttgtcgcagcca

SEQ ID NO: 205671 - DNA, 25 bp, Artificial
  Probe
gaagcaactcaatgccatcacgggc

SEQ ID NO: 205672 - DNA, 25 bp, Artificial
  Probe
gggaactttacagcataccaattat

SEQ ID NO: 205673 - DNA, 25 bp, Artificial
  Probe
atgacttgagcgaacaaatggcgag

SEQ ID NO: 205674 - DNA, 25 bp, Artificial
  Probe
aagagagtcacaagccaacagagga

SEQ ID NO: 205675 - DNA, 25 bp, Artificial
  Probe
cgtatctgtgccaacagcccctgaa

SEQ ID NO: 205676 - DNA, 25 bp, Artificial
  Probe
atggtcatgaggtcccgaagatgca

SEQ ID NO: 205677 - DNA, 25 bp, Artificial
  Probe
acccatcctagatggacatcaggaa

SEQ ID NO: 205678 - DNA, 25 bp, Artificial
  Probe
gtcccctttgcttcccgtatctgtg

SEQ ID NO: 205679 - DNA, 25 bp, Artificial
  Probe
aacaggatgacttgagcgaacaaat

SEQ ID NO: 205680 - DNA, 25 bp, Artificial
  Probe
tgaacaggatgacttgagcgaacaa

SEQ ID NO: 205681 - DNA, 25 bp, Artificial
  Probe
gctaatgaagcaactcaatgccatc

SEQ ID NO: 205682 - DNA, 25 bp, Artificial
  Probe
cgaagatgcatcttaactacaaagt

SEQ ID NO: 205683 - DNA, 25 bp, Artificial
  Probe
gccaacagcccctgaagtgtctgaa

SEQ ID NO: 205684 - DNA, 25 bp, Artificial
  Probe
gaaacatctgaagcacttcagaaga

SEQ ID NO: 205685 - DNA, 25 bp, Artificial
  Probe
catgaggtcccgaagatgcatctta

SEQ ID NO: 205686 - DNA, 25 bp, Artificial
  Probe
gtgtccaaaaactctaaaccagtgt

SEQ ID NO: 205687 - DNA, 25 bp, Artificial
  Probe
cctgaagtgtctgaagagagtcaca

SEQ ID NO: 205688 - DNA, 25 bp, Artificial
  Probe
acgggctccgccttttgacatgcat

SEQ ID NO: 205689 - DNA, 25 bp, Artificial
  Probe
cccttgggctagcaggaaaggcaag

SEQ ID NO: 205690 - DNA, 25 bp, Artificial
  Probe
aacagaggatccagccagtgtatat

SEQ ID NO: 205691 - DNA, 25 bp, Artificial
  Probe
aagatggtcatgaggtcccgaagat

SEQ ID NO: 205692 - DNA, 25 bp, Artificial
  Probe
gcacttcagaagaaatctgtaaccc

SEQ ID NO: 205693 - DNA, 25 bp, Artificial
  Probe
acttgagcgaacaaatggcgagttt

SEQ ID NO: 205694 - DNA, 25 bp, Artificial
  Probe
tgcttcccgtatctgtgccaacagc

SEQ ID NO: 205695 - DNA, 25 bp, Artificial
  Probe
aaacggcctcccttgggctagcagg

SEQ ID NO: 205696 - DNA, 25 bp, Artificial
  Probe
aacggcctcccttgggctagcagga

SEQ ID NO: 205697 - DNA, 25 bp, Artificial
  Probe
aactctaaaccagtgtacaggtcca

SEQ ID NO: 205698 - DNA, 25 bp, Artificial
  Probe
cttcccaagactcatgttaaaacgg

SEQ ID NO: 205699 - DNA, 25 bp, Artificial
  Probe
ctttgcttcccgtatctgtgccaac

SEQ ID NO: 205700 - DNA, 25 bp, Artificial
  Probe
atctgtgccaacagcccctgaagtg

SEQ ID NO: 205701 - DNA, 25 bp, Artificial
  Probe
ctccacctatgagtgcaatagaacc

SEQ ID NO: 205702 - DNA, 25 bp, Artificial
  Probe
tgtgtccaaaaactctaaaccagtg

SEQ ID NO: 205703 - DNA, 25 bp, Artificial
  Probe
taatgaggatcttgggagctccgac

SEQ ID NO: 205704 - DNA, 25 bp, Artificial
  Probe
acagacttctagaagattgtgctac

SEQ ID NO: 205705 - DNA, 25 bp, Artificial
  Probe
aagtacattggctttgcaggtagct

SEQ ID NO: 205706 - DNA, 25 bp, Artificial
  Probe
tgatggccatgtagccgaggacacc

SEQ ID NO: 205707 - DNA, 25 bp, Artificial
  Probe
acttctagaagattgtgctacatct

SEQ ID NO: 205708 - DNA, 25 bp, Artificial
  Probe
ttgagggacggttcacctgttaatg

SEQ ID NO: 205709 - DNA, 25 bp, Artificial
  Probe
tacacaattagtttagaggtagcca

SEQ ID NO: 205710 - DNA, 25 bp, Artificial
  Probe
gtgagagccaaaacgacacagactt

SEQ ID NO: 205711 - DNA, 25 bp, Artificial
  Probe
ctcctacctgtgtggctgatctgat

SEQ ID NO: 205712 - DNA, 25 bp, Artificial
  Probe
gatcttgggagctccgactaccttg

SEQ ID NO: 205713 - DNA, 25 bp, Artificial
  Probe
ccctcctacctgtgtggctgatctg

SEQ ID NO: 205714 - DNA, 25 bp, Artificial
  Probe
ggacggttcacctgttaatgaggat

SEQ ID NO: 205715 - DNA, 25 bp, Artificial
  Probe
acgacacagacttctagaagattgt

SEQ ID NO: 205716 - DNA, 25 bp, Artificial
  Probe
ctatgtcatttgtggtgagagccaa

SEQ ID NO: 205717 - DNA, 25 bp, Artificial
  Probe
ccaaaacgacacagacttctagaag

SEQ ID NO: 205718 - DNA, 25 bp, Artificial
  Probe
ttagaggtagccaccacgatggact

SEQ ID NO: 205719 - DNA, 25 bp, Artificial
  Probe
ttgcaggtagctcctgatctcccag

SEQ ID NO: 205720 - DNA, 25 bp, Artificial
  Probe
ttgatgcaattgagggacggttcac

SEQ ID NO: 205721 - DNA, 25 bp, Artificial
  Probe
accacgatggactatgtcatttgtg

SEQ ID NO: 205722 - DNA, 25 bp, Artificial
  Probe
tacctgtgtggctgatctgatcttg

SEQ ID NO: 205723 - DNA, 25 bp, Artificial
  Probe
catacacaattagtttagaggtagc

SEQ ID NO: 205724 - DNA, 25 bp, Artificial
  Probe
cttgatccatggtttgatgcaattg

SEQ ID NO: 205725 - DNA, 25 bp, Artificial
  Probe
gccgaggacaccagggtgaagtaca

SEQ ID NO: 205726 - DNA, 25 bp, Artificial
  Probe
tcagtgatggccatgtagccgagga

SEQ ID NO: 205727 - DNA, 25 bp, Artificial
  Probe
tgcaattgagggacggttcacctgt

SEQ ID NO: 205728 - DNA, 25 bp, Artificial
  Probe
ggacaccagggtgaagtacattggc

SEQ ID NO: 205729 - DNA, 25 bp, Artificial
  Probe
acggttcacctgttaatgaggatct

SEQ ID NO: 205730 - DNA, 25 bp, Artificial
  Probe
tgtcctcagtgatggccatgtagcc

SEQ ID NO: 205731 - DNA, 25 bp, Artificial
  Probe
ctgtgtggctgatctgatcttgctt

SEQ ID NO: 205732 - DNA, 25 bp, Artificial
  Probe
atgtagccgaggacaccagggtgaa

SEQ ID NO: 205733 - DNA, 25 bp, Artificial
  Probe
gaggatcttgggagctccgactacc

SEQ ID NO: 205734 - DNA, 25 bp, Artificial
  Probe
ccatggtttgatgcaattgagggac

SEQ ID NO: 205735 - DNA, 25 bp, Artificial
  Probe
gctccgactaccttgggtttgtaca

SEQ ID NO: 205736 - DNA, 25 bp, Artificial
  Probe
catttgtggtgagagccaaaacgac

SEQ ID NO: 205737 - DNA, 25 bp, Artificial
  Probe
catacatacacaattagtttagagg

SEQ ID NO: 205738 - DNA, 25 bp, Artificial
  Probe
ttgggagctccgactaccttgggtt

SEQ ID NO: 205739 - DNA, 25 bp, Artificial
  Probe
gactatgtcatttgtggtgagagcc

SEQ ID NO: 205740 - DNA, 25 bp, Artificial
  Probe
aggacaccagggtgaagtacattgg

SEQ ID NO: 205741 - DNA, 25 bp, Artificial
  Probe
tgtcatttgtggtgagagccaaaac

SEQ ID NO: 205742 - DNA, 25 bp, Artificial
  Probe
aggtagctcctgatctcccaggcac

SEQ ID NO: 205743 - DNA, 25 bp, Artificial
  Probe
gccatgtagccgaggacaccagggt

SEQ ID NO: 205744 - DNA, 25 bp, Artificial
  Probe
gatctgatcttgcttgttccataca

SEQ ID NO: 205745 - DNA, 25 bp, Artificial
  Probe
tagccgaggacaccagggtgaagta

SEQ ID NO: 205746 - DNA, 25 bp, Artificial
  Probe
gaagattgtgctacatcttgatcca

SEQ ID NO: 205747 - DNA, 25 bp, Artificial
  Probe
gactaccttgggtttgtacaatttg

SEQ ID NO: 205748 - DNA, 25 bp, Artificial
  Probe
aaacgacacagacttctagaagatt

SEQ ID NO: 205749 - DNA, 25 bp, Artificial
  Probe
ccatctcagaagcagaatcttctag

SEQ ID NO: 205750 - DNA, 25 bp, Artificial
  Probe
gaatctgacgaatctcaccattccg

SEQ ID NO: 205751 - DNA, 25 bp, Artificial
  Probe
catcttctgaggtcaattaaagaag

SEQ ID NO: 205752 - DNA, 25 bp, Artificial
  Probe
gctggatgaaccaagcgtggaaaca

SEQ ID NO: 205753 - DNA, 25 bp, Artificial
  Probe
gcagaatcttctagccccacagaat

SEQ ID NO: 205754 - DNA, 25 bp, Artificial
  Probe
gactgaggtcaaagtccaggagttt

SEQ ID NO: 205755 - DNA, 25 bp, Artificial
  Probe
cctagaccctaagagtaaggaagat

SEQ ID NO: 205756 - DNA, 25 bp, Artificial
  Probe
tgaaccaagcgtggaaacacacagc

SEQ ID NO: 205757 - DNA, 25 bp, Artificial
  Probe
gtcctagaccctaagagtaaggaag

SEQ ID NO: 205758 - DNA, 25 bp, Artificial
  Probe
gaccatgcagagagcgaggattctg

SEQ ID NO: 205759 - DNA, 25 bp, Artificial
  Probe
tcaccattccgatgaatctgatgag

SEQ ID NO: 205760 - DNA, 25 bp, Artificial
  Probe
gaagcctgacccatctcagaagcag

SEQ ID NO: 205761 - DNA, 25 bp, Artificial
  Probe
ctgtgaactcggatgaatctgacga

SEQ ID NO: 205762 - DNA, 25 bp, Artificial
  Probe
ctgtgtcctctgaagaaacggatga

SEQ ID NO: 205763 - DNA, 25 bp, Artificial
  Probe
gattctgtgaactcggatgaatctg

SEQ ID NO: 205764 - DNA, 25 bp, Artificial
  Probe
tcctctgaagaaacggatgacttta

SEQ ID NO: 205765 - DNA, 25 bp, Artificial
  Probe
cgaggattctgtgaactcggatgaa

SEQ ID NO: 205766 - DNA, 25 bp, Artificial
  Probe
tagccacttggctgaagcctgaccc

SEQ ID NO: 205767 - DNA, 25 bp, Artificial
  Probe
ccacatggacgatgatgacgacgac

SEQ ID NO: 205768 - DNA, 25 bp, Artificial
  Probe
tctgacgaatctcaccattccgatg

SEQ ID NO: 205769 - DNA, 25 bp, Artificial
  Probe
ctcagatgctgtagccacttggctg

SEQ ID NO: 205770 - DNA, 25 bp, Artificial
  Probe
ctcaccattccgatgaatctgatga

SEQ ID NO: 205771 - DNA, 25 bp, Artificial
  Probe
actcggatgaatctgacgaatctca

SEQ ID NO: 205772 - DNA, 25 bp, Artificial
  Probe
caatgaaagccatgaccacatggac

SEQ ID NO: 205773 - DNA, 25 bp, Artificial
  Probe
gacgaatctcaccattccgatgaat

SEQ ID NO: 205774 - DNA, 25 bp, Artificial
  Probe
gcagacgttttgactccaatcgccc

SEQ ID NO: 205775 - DNA, 25 bp, Artificial
  Probe
gaattctgtgtcctctgaagaaacg

SEQ ID NO: 205776 - DNA, 25 bp, Artificial
  Probe
agaaggcgcattacagcaaacactc

SEQ ID NO: 205777 - DNA, 25 bp, Artificial
  Probe
ccacagaattctgtgtcctctgaag

SEQ ID NO: 205778 - DNA, 25 bp, Artificial
  Probe
tgagcttagttcgttgtttcatgca

SEQ ID NO: 205779 - DNA, 25 bp, Artificial
  Probe
attccgatgaatctgatgagtcctt

SEQ ID NO: 205780 - DNA, 25 bp, Artificial
  Probe
gacccatctcagaagcagaatcttc

SEQ ID NO: 205781 - DNA, 25 bp, Artificial
  Probe
atgaaccaagcgtggaaacacacag

SEQ ID NO: 205782 - DNA, 25 bp, Artificial
  Probe
ctggatgaaccaagcgtggaaacac

SEQ ID NO: 205783 - DNA, 25 bp, Artificial
  Probe
gccacttggctgaagcctgacccat

SEQ ID NO: 205784 - DNA, 25 bp, Artificial
  Probe
aattctgtgtcctctgaagaaacgg

SEQ ID NO: 205785 - DNA, 25 bp, Artificial
  Probe
ttggctgaagcctgacccatctcag

SEQ ID NO: 205786 - DNA, 25 bp, Artificial
  Probe
cagcacacaagcagacgttttgact

SEQ ID NO: 205787 - DNA, 25 bp, Artificial
  Probe
tcttctagccccacagaattctgtg

SEQ ID NO: 205788 - DNA, 25 bp, Artificial
  Probe
gatgaatctgacgaatctcaccatt

SEQ ID NO: 205789 - DNA, 25 bp, Artificial
  Probe
gagaccatgcagagagcgaggattc

SEQ ID NO: 205790 - DNA, 25 bp, Artificial
  Probe
ggctgaagcctgacccatctcagaa

SEQ ID NO: 205791 - DNA, 25 bp, Artificial
  Probe
gaatctcaccattccgatgaatctg

SEQ ID NO: 205792 - DNA, 25 bp, Artificial
  Probe
agctagtcctagaccctaagagtaa

SEQ ID NO: 205793 - DNA, 25 bp, Artificial
  Probe
atgaggacaagctagtcctagaccc

SEQ ID NO: 205794 - DNA, 25 bp, Artificial
  Probe
gagttcatcttctgaggtcaattaa

SEQ ID NO: 205795 - DNA, 25 bp, Artificial
  Probe
tggcatggagtcagctggaattcat

SEQ ID NO: 205796 - DNA, 25 bp, Artificial
  Probe
aagctgtgctacgtagccctggatt

SEQ ID NO: 205797 - DNA, 25 bp, Artificial
  Probe
cgtagccctggattttgagaatgag

SEQ ID NO: 205798 - DNA, 25 bp, Artificial
  Probe
agaagctgtgctacgtagccctgga

SEQ ID NO: 205799 - DNA, 25 bp, Artificial
  Probe
gagtcagctggaattcatgagacaa

SEQ ID NO: 205800 - DNA, 25 bp, Artificial
  Probe
tacgtagccctggattttgagaatg

SEQ ID NO: 205801 - DNA, 25 bp, Artificial
  Probe
ctacgtagccctggattttgagaat

SEQ ID NO: 205802 - DNA, 25 bp, Artificial
  Probe
tcattggcatggagtcagctggaat

SEQ ID NO: 205803 - DNA, 25 bp, Artificial
  Probe
ggcatggagtcagctggaattcatg

SEQ ID NO: 205804 - DNA, 25 bp, Artificial
  Probe
agctgtgctacgtagccctggattt

SEQ ID NO: 205805 - DNA, 25 bp, Artificial
  Probe
tgtgcgagacatcaaggagaagctg

SEQ ID NO: 205806 - DNA, 25 bp, Artificial
  Probe
agatcaagatcatcgctcctccgga

SEQ ID NO: 205807 - DNA, 25 bp, Artificial
  Probe
acgtagccctggattttgagaatga

SEQ ID NO: 205808 - DNA, 25 bp, Artificial
  Probe
gtcagctggaattcatgagacaaca

SEQ ID NO: 205809 - DNA, 25 bp, Artificial
  Probe
ttggcatggagtcagctggaattca

SEQ ID NO: 205810 - DNA, 25 bp, Artificial
  Probe
agtcagctggaattcatgagacaac

SEQ ID NO: 205811 - DNA, 25 bp, Artificial
  Probe
ttgtgcgagacatcaaggagaagct

SEQ ID NO: 205812 - DNA, 25 bp, Artificial
  Probe
aatgagatggccacggcggcttcgt

SEQ ID NO: 205813 - DNA, 25 bp, Artificial
  Probe
attgtgcgagacatcaaggagaagc

SEQ ID NO: 205814 - DNA, 25 bp, Artificial
  Probe
aagatcaagatcatcgctcctccgg

SEQ ID NO: 205815 - DNA, 25 bp, Artificial
  Probe
gctgtgctacgtagccctggatttt

SEQ ID NO: 205816 - DNA, 25 bp, Artificial
  Probe
tcgctcctccggagcggaagtactc

SEQ ID NO: 205817 - DNA, 25 bp, Artificial
  Probe
gctacgtagccctggattttgagaa

SEQ ID NO: 205818 - DNA, 25 bp, Artificial
  Probe
tgaagatcaagatcatcgctcctcc

SEQ ID NO: 205819 - DNA, 25 bp, Artificial
  Probe
gagaagctgtgctacgtagccctgg

SEQ ID NO: 205820 - DNA, 25 bp, Artificial
  Probe
cattggcatggagtcagctggaatt

SEQ ID NO: 205821 - DNA, 25 bp, Artificial
  Probe
agacatcaaggagaagctgtgctac

SEQ ID NO: 205822 - DNA, 25 bp, Artificial
  Probe
ggagtcagctggaattcatgagaca

SEQ ID NO: 205823 - DNA, 25 bp, Artificial
  Probe
ttcattggcatggagtcagctggaa

SEQ ID NO: 205824 - DNA, 25 bp, Artificial
  Probe
attggcatggagtcagctggaattc

SEQ ID NO: 205825 - DNA, 25 bp, Artificial
  Probe
caagatcatcgctcctccggagcgg

SEQ ID NO: 205826 - DNA, 25 bp, Artificial
  Probe
gaagctgtgctacgtagccctggat

SEQ ID NO: 205827 - DNA, 25 bp, Artificial
  Probe
gcatggagtcagctggaattcatga

SEQ ID NO: 205828 - DNA, 25 bp, Artificial
  Probe
aggagaagctgtgctacgtagccct

SEQ ID NO: 205829 - DNA, 25 bp, Artificial
  Probe
aagatcatcgctcctccggagcgga

SEQ ID NO: 205830 - DNA, 25 bp, Artificial
  Probe
ggagaagctgtgctacgtagccctg

SEQ ID NO: 205831 - DNA, 25 bp, Artificial
  Probe
gctgacctgacctgatattcaacta

SEQ ID NO: 205832 - DNA, 25 bp, Artificial
  Probe
atggctgacctgacctgatattcaa

SEQ ID NO: 205833 - DNA, 25 bp, Artificial
  Probe
gcctgtctgtttcttgtaaaaccct

SEQ ID NO: 205834 - DNA, 25 bp, Artificial
  Probe
actgaatggctgacctgacctgata

SEQ ID NO: 205835 - DNA, 25 bp, Artificial
  Probe
tggctgacctgacctgatattcaac

SEQ ID NO: 205836 - DNA, 25 bp, Artificial
  Probe
catcgagtaccgatcacagaagacc

SEQ ID NO: 205837 - DNA, 25 bp, Artificial
  Probe
tcgagtaccgatcacagaagacctc

SEQ ID NO: 205838 - DNA, 25 bp, Artificial
  Probe
agtaccgatcacagaagacctcacg

SEQ ID NO: 205839 - DNA, 25 bp, Artificial
  Probe
ctgaactgggcagactgcaaaataa

SEQ ID NO: 205840 - DNA, 25 bp, Artificial
  Probe
tcacgccttcccattgttgacattg

SEQ ID NO: 205841 - DNA, 25 bp, Artificial
  Probe
cgagtaccgatcacagaagacctca

SEQ ID NO: 205842 - DNA, 25 bp, Artificial
  Probe
cccattgttgacattgcacccatgg

SEQ ID NO: 205843 - DNA, 25 bp, Artificial
  Probe
tgaatggctgacctgacctgatatt

SEQ ID NO: 205844 - DNA, 25 bp, Artificial
  Probe
attgtcttcctgtaagacctttggg

SEQ ID NO: 205845 - DNA, 25 bp, Artificial
  Probe
aatggctgacctgacctgatattca

SEQ ID NO: 205846 - DNA, 25 bp, Artificial
  Probe
gatctgcactgaatggctgacctga

SEQ ID NO: 205847 - DNA, 25 bp, Artificial
  Probe
gtaccgatcacagaagacctcacgc

SEQ ID NO: 205848 - DNA, 25 bp, Artificial
  Probe
atcgagtaccgatcacagaagacct

SEQ ID NO: 205849 - DNA, 25 bp, Artificial
  Probe
ttattgtcttcctgtaagacctttg

SEQ ID NO: 205850 - DNA, 25 bp, Artificial
  Probe
agacctttgggtcaaggcggagaca

SEQ ID NO: 205851 - DNA, 25 bp, Artificial
  Probe
acgccttcccattgttgacattgca

SEQ ID NO: 205852 - DNA, 25 bp, Artificial
  Probe
ccagaagacccctacaggtgctggg

SEQ ID NO: 205853 - DNA, 25 bp, Artificial
  Probe
tcactctaggatctgcactgaatgg

SEQ ID NO: 205854 - DNA, 25 bp, Artificial
  Probe
taagagacctgaactgggcagactg

SEQ ID NO: 205855 - DNA, 25 bp, Artificial
  Probe
aggatctgcactgaatggctgacct

SEQ ID NO: 205856 - DNA, 25 bp, Artificial
  Probe
tcttcctgtaagacctttgggtcaa

SEQ ID NO: 205857 - DNA, 25 bp, Artificial
  Probe
atctgcactgaatggctgacctgac

SEQ ID NO: 205858 - DNA, 25 bp, Artificial
  Probe
gcactgaatggctgacctgacctga

SEQ ID NO: 205859 - DNA, 25 bp, Artificial
  Probe
cctgaactgggcagactgcaaaata

SEQ ID NO: 205860 - DNA, 25 bp, Artificial
  Probe
atagggcctgtctgtttcttgtaaa

SEQ ID NO: 205861 - DNA, 25 bp, Artificial
  Probe
ctaggatctgcactgaatggctgac

SEQ ID NO: 205862 - DNA, 25 bp, Artificial
  Probe
ctctaggatctgcactgaatggctg

SEQ ID NO: 205863 - DNA, 25 bp, Artificial
  Probe
tgtcttcctgtaagacctttgggtc

SEQ ID NO: 205864 - DNA, 25 bp, Artificial
  Probe
tagggcctgtctgtttcttgtaaaa

SEQ ID NO: 205865 - DNA, 25 bp, Artificial
  Probe
agtcactctaggatctgcactgaat

SEQ ID NO: 205866 - DNA, 25 bp, Artificial
  Probe
tcccattgttgacattgcacccatg

SEQ ID NO: 205867 - DNA, 25 bp, Artificial
  Probe
ggacatagggcctgtctgtttcttg

SEQ ID NO: 205868 - DNA, 25 bp, Artificial
  Probe
agagacctgaactgggcagactgca

SEQ ID NO: 205869 - DNA, 25 bp, Artificial
  Probe
ctgtaagacctttgggtcaaggcgg

SEQ ID NO: 205870 - DNA, 25 bp, Artificial
  Probe
gcagtcactctaggatctgcactga

SEQ ID NO: 205871 - DNA, 25 bp, Artificial
  Probe
aagagacctgaactgggcagactgc

SEQ ID NO: 205872 - DNA, 25 bp, Artificial
  Probe
ccatcatcgagtaccgatcacagaa

SEQ ID NO: 205873 - DNA, 25 bp, Artificial
  Probe
caatccattgcgaacccaaaggacc

SEQ ID NO: 205874 - DNA, 25 bp, Artificial
  Probe
cctgtaagacctttgggtcaaggcg

SEQ ID NO: 205875 - DNA, 25 bp, Artificial
  Probe
ttcctgtaagacctttgggtcaagg

SEQ ID NO: 205876 - DNA, 25 bp, Artificial
  Probe
gtcactctaggatctgcactgaatg

SEQ ID NO: 205877 - DNA, 25 bp, Artificial
  Probe
tcttataaagggtgccactgttgat

SEQ ID NO: 205878 - DNA, 25 bp, Artificial
  Probe
gctctcaaaagcaggccccaagaag

SEQ ID NO: 205879 - DNA, 25 bp, Artificial
  Probe
gacccttaggtgtatatctaaagac

SEQ ID NO: 205880 - DNA, 25 bp, Artificial
  Probe
ttgagccctgccagggcacatagaa

SEQ ID NO: 205881 - DNA, 25 bp, Artificial
  Probe
gtctcctgtacattgctctgtgacc

SEQ ID NO: 205882 - DNA, 25 bp, Artificial
  Probe
tgaaatcaaggctgcctgtgtgtaa

SEQ ID NO: 205883 - DNA, 25 bp, Artificial
  Probe
aggtgaaccgattggcaaaatacac

SEQ ID NO: 205884 - DNA, 25 bp, Artificial
  Probe
tggcaaaatacacagaacaggaggg

SEQ ID NO: 205885 - DNA, 25 bp, Artificial
  Probe
aaggtgaaccgattggcaaaataca

SEQ ID NO: 205886 - DNA, 25 bp, Artificial
  Probe
tttgattgggactggctggccacaa

SEQ ID NO: 205887 - DNA, 25 bp, Artificial
  Probe
ctgcctgtgtgtaaggaatggttca

SEQ ID NO: 205888 - DNA, 25 bp, Artificial
  Probe
agggagagtctcaagccgagacatc

SEQ ID NO: 205889 - DNA, 25 bp, Artificial
  Probe
aggaaacagagcagcctgcccgtgg

SEQ ID NO: 205890 - DNA, 25 bp, Artificial
  Probe
cctgacctgggcagacccttaggtg

SEQ ID NO: 205891 - DNA, 25 bp, Artificial
  Probe
tcttactgcttcgttcacttacgag

SEQ ID NO: 205892 - DNA, 25 bp, Artificial
  Probe
ggcaaaatacacagaacaggaggga

SEQ ID NO: 205893 - DNA, 25 bp, Artificial
  Probe
ccacaactggcagttggtctagctc

SEQ ID NO: 205894 - DNA, 25 bp, Artificial
  Probe
aacagagcagcctgcccgtggtgtc

SEQ ID NO: 205895 - DNA, 25 bp, Artificial
  Probe
caacttcatgcatgtggctctcaaa

SEQ ID NO: 205896 - DNA, 25 bp, Artificial
  Probe
ctggtgcacacagtctcctgatatc

SEQ ID NO: 205897 - DNA, 25 bp, Artificial
  Probe
tgtaaccggtcctttagcccagtag

SEQ ID NO: 205898 - DNA, 25 bp, Artificial
  Probe
ctgttttgaaatcaaggctgcctgt

SEQ ID NO: 205899 - DNA, 25 bp, Artificial
  Probe
tggttcaattcttataaagggtgcc

SEQ ID NO: 205900 - DNA, 25 bp, Artificial
  Probe
agcacagggtctggaaaggtgaacc

SEQ ID NO: 205901 - DNA, 25 bp, Artificial
  Probe
tctttatctgttttgaaatcaaggc

SEQ ID NO: 205902 - DNA, 25 bp, Artificial
  Probe
ttctttaggagaaagctgcgtcctg

SEQ ID NO: 205903 - DNA, 25 bp, Artificial
  Probe
ttccatgttgcctggcagagacagc

SEQ ID NO: 205904 - DNA, 25 bp, Artificial
  Probe
tgttttgaaagcagtgttgctgacc

SEQ ID NO: 205905 - DNA, 25 bp, Artificial
  Probe
gtcacctccaaatgtaaccggtcct

SEQ ID NO: 205906 - DNA, 25 bp, Artificial
  Probe
gagaaagctgcgtcctgtttctgtg

SEQ ID NO: 205907 - DNA, 25 bp, Artificial
  Probe
ttgttgatgggcactctcctgagct

SEQ ID NO: 205908 - DNA, 25 bp, Artificial
  Probe
ccgcacaaaaggaacggcagtttat

SEQ ID NO: 205909 - DNA, 25 bp, Artificial
  Probe
gaaagctgcgtcctgtttctgtgga

SEQ ID NO: 205910 - DNA, 25 bp, Artificial
  Probe
cacagggtctggaaaggtgaaccga

SEQ ID NO: 205911 - DNA, 25 bp, Artificial
  Probe
ggtttaatacatgcagccctttcct

SEQ ID NO: 205912 - DNA, 25 bp, Artificial
  Probe
ccccatgttttaatgatggtttaat

SEQ ID NO: 205913 - DNA, 25 bp, Artificial
  Probe
ttacgaggtcacatatagaacaaac

SEQ ID NO: 205914 - DNA, 25 bp, Artificial
  Probe
ctgagctttgcttgagtgagaagct

SEQ ID NO: 205915 - DNA, 25 bp, Artificial
  Probe
taaccggtcctttagcccagtagag

SEQ ID NO: 205916 - DNA, 25 bp, Artificial
  Probe
agactgtcccgcacaaaaggaacgg

SEQ ID NO: 205917 - DNA, 25 bp, Artificial
  Probe
aaagttgagccctgccagggcacat

SEQ ID NO: 205918 - DNA, 25 bp, Artificial
  Probe
tgtggccctggcacagctcccggat

SEQ ID NO: 205919 - DNA, 25 bp, Artificial
  Probe
tggtttaatacatgcagccctttcc

SEQ ID NO: 205920 - DNA, 25 bp, Artificial
  Probe
ccgtggtgtctttatctgttttgaa

SEQ ID NO: 205921 - DNA, 25 bp, Artificial
  Probe
gagacatcttgcttactagccacac

SEQ ID NO: 205922 - DNA, 25 bp, Artificial
  Probe
atgaagatgtgctgccctctctttc

SEQ ID NO: 205923 - DNA, 25 bp, Artificial
  Probe
gaatttaaggcctaatccacaggtt

SEQ ID NO: 205924 - DNA, 25 bp, Artificial
  Probe
atactggtctggaaagttcaactac

SEQ ID NO: 205925 - DNA, 25 bp, Artificial
  Probe
tcaactactggctagcctgcagagt

SEQ ID NO: 205926 - DNA, 25 bp, Artificial
  Probe
ctggaaagttcaactactggctagc

SEQ ID NO: 205927 - DNA, 25 bp, Artificial
  Probe
gatagcacacacttgagacatataa

SEQ ID NO: 205928 - DNA, 25 bp, Artificial
  Probe
ccccatggtacagtaataagactca

SEQ ID NO: 205929 - DNA, 25 bp, Artificial
  Probe
ggctcttctctgactagatcctaac

SEQ ID NO: 205930 - DNA, 25 bp, Artificial
  Probe
aacctatagggagacaggcaattgt

SEQ ID NO: 205931 - DNA, 25 bp, Artificial
  Probe
ttaatagggccaagaacctataggg

SEQ ID NO: 205932 - DNA, 25 bp, Artificial
  Probe
acccatacctggtaccattaatagg

SEQ ID NO: 205933 - DNA, 25 bp, Artificial
  Probe
gcctaatccacaggttgaaacccat

SEQ ID NO: 205934 - DNA, 25 bp, Artificial
  Probe
aacatttccatcaagctgatactgg

SEQ ID NO: 205935 - DNA, 25 bp, Artificial
  Probe
actaaggatagcacacacttgagac

SEQ ID NO: 205936 - DNA, 25 bp, Artificial
  Probe
tggtaccattaatagggccaagaac

SEQ ID NO: 205937 - DNA, 25 bp, Artificial
  Probe
atccacaggttgaaacccatacctg

SEQ ID NO: 205938 - DNA, 25 bp, Artificial
  Probe
agccatatatgtaggctcttctctg

SEQ ID NO: 205939 - DNA, 25 bp, Artificial
  Probe
gtcactactagaagagaaaggtaac

SEQ ID NO: 205940 - DNA, 25 bp, Artificial
  Probe
tgcaagtaagaacctactttctggt

SEQ ID NO: 205941 - DNA, 25 bp, Artificial
  Probe
gaacataacagtcagaccctagtac

SEQ ID NO: 205942 - DNA, 25 bp, Artificial
  Probe
caatgtcatgcaagtaagaacctac

SEQ ID NO: 205943 - DNA, 25 bp, Artificial
  Probe
gtttggtccagttctacctcccagc

SEQ ID NO: 205944 - DNA, 25 bp, Artificial
  Probe
gccaagaacctatagggagacaggc

SEQ ID NO: 205945 - DNA, 25 bp, Artificial
  Probe
aaactgatattgtcactactagaag

SEQ ID NO: 205946 - DNA, 25 bp, Artificial
  Probe
taagaacctactttctggttgaatt

SEQ ID NO: 205947 - DNA, 25 bp, Artificial
  Probe
ctacgtgaatcacctgcctggctct

SEQ ID NO: 205948 - DNA, 25 bp, Artificial
  Probe
ccacaggttgaaacccatacctggt

SEQ ID NO: 205949 - DNA, 25 bp, Artificial
  Probe
ttccctacgtgaatcacctgcctgg

SEQ ID NO: 205950 - DNA, 25 bp, Artificial
  Probe
actctaggctaccttctgccacatg

SEQ ID NO: 205951 - DNA, 25 bp, Artificial
  Probe
taggctaccttctgccacatggcta

SEQ ID NO: 205952 - DNA, 25 bp, Artificial
  Probe
tactggctagcctgcagagtgatga

SEQ ID NO: 205953 - DNA, 25 bp, Artificial
  Probe
accttagccatatatgtaggctctt

SEQ ID NO: 205954 - DNA, 25 bp, Artificial
  Probe
agcctgcagagtgatgaaaactgat

SEQ ID NO: 205955 - DNA, 25 bp, Artificial
  Probe
cagccccatggtacagtaataagac

SEQ ID NO: 205956 - DNA, 25 bp, Artificial
  Probe
acagtcagaccctagtactaaggat

SEQ ID NO: 205957 - DNA, 25 bp, Artificial
  Probe
ggttgaaacccatacctggtaccat

SEQ ID NO: 205958 - DNA, 25 bp, Artificial
  Probe
atggccaacggctgtgtagtggtac

SEQ ID NO: 205959 - DNA, 25 bp, Artificial
  Probe
ctgatattgtcactactagaagaga

SEQ ID NO: 205960 - DNA, 25 bp, Artificial
  Probe
ctgtgtagtggtaccaatgtcatgc

SEQ ID NO: 205961 - DNA, 25 bp, Artificial
  Probe
ccctagtactaaggatagcacacac

SEQ ID NO: 205962 - DNA, 25 bp, Artificial
  Probe
ggtaccatgcatctgtctcatcaca

SEQ ID NO: 205963 - DNA, 25 bp, Artificial
  Probe
agtttggtccagttctacctcccag

SEQ ID NO: 205964 - DNA, 25 bp, Artificial
  Probe
ctgccacatggctaattacctatgt

SEQ ID NO: 205965 - DNA, 25 bp, Artificial
  Probe
tcactactagaagagaaaggtaacc

SEQ ID NO: 205966 - DNA, 25 bp, Artificial
  Probe
tactttctggttgaatttaaggcct

SEQ ID NO: 205967 - DNA, 25 bp, Artificial
  Probe
gttgaaacccatacctggtaccatt

SEQ ID NO: 205968 - DNA, 25 bp, Artificial
  Probe
gaacctatagggagacaggcaattg

SEQ ID NO: 205969 - DNA, 25 bp, Artificial
  Probe
gagccaagtgctttcttgggtgaca

SEQ ID NO: 205970 - DNA, 25 bp, Artificial
  Probe
tgcgacactccacacgagaggctaa

SEQ ID NO: 205971 - DNA, 25 bp, Artificial
  Probe
atccccgtgtctgatgatggatgtg

SEQ ID NO: 205972 - DNA, 25 bp, Artificial
  Probe
cctacagaaagtacacagaacagat

SEQ ID NO: 205973 - DNA, 25 bp, Artificial
  Probe
gacacaggagcagcttctacgttcg

SEQ ID NO: 205974 - DNA, 25 bp, Artificial
  Probe
gagcagcttctacgttcgattgagc

SEQ ID NO: 205975 - DNA, 25 bp, Artificial
  Probe
cacacgagaggctaacaatattgta

SEQ ID NO: 205976 - DNA, 25 bp, Artificial
  Probe
cttgggtgacacaggagcagcttct

SEQ ID NO: 205977 - DNA, 25 bp, Artificial
  Probe
gcagcttctacgttcgattgagcgg

SEQ ID NO: 205978 - DNA, 25 bp, Artificial
  Probe
aaatgttgcagtggaagccctggga

SEQ ID NO: 205979 - DNA, 25 bp, Artificial
  Probe
tggccaatataatccccgtgtctga

SEQ ID NO: 205980 - DNA, 25 bp, Artificial
  Probe
ggtgacacaggagcagcttctacgt

SEQ ID NO: 205981 - DNA, 25 bp, Artificial
  Probe
gctaaccagtggaagtggccaatat

SEQ ID NO: 205982 - DNA, 25 bp, Artificial
  Probe
aggagcagcttctacgttcgattga

SEQ ID NO: 205983 - DNA, 25 bp, Artificial
  Probe
ccctgctaaccagtggaagtggcca

SEQ ID NO: 205984 - DNA, 25 bp, Artificial
  Probe
taaccagtggaagtggccaatataa

SEQ ID NO: 205985 - DNA, 25 bp, Artificial
  Probe
gtttgcgacactccacacgagaggc

SEQ ID NO: 205986 - DNA, 25 bp, Artificial
  Probe
tttcttgggtgacacaggagcagct

SEQ ID NO: 205987 - DNA, 25 bp, Artificial
  Probe
tcctaaacatgcagcctacagaaag

SEQ ID NO: 205988 - DNA, 25 bp, Artificial
  Probe
tgacacaggagcagcttctacgttc

SEQ ID NO: 205989 - DNA, 25 bp, Artificial
  Probe
ccgtgtctgatgatggatgtggatc

SEQ ID NO: 205990 - DNA, 25 bp, Artificial
  Probe
gtggccaatataatccccgtgtctg

SEQ ID NO: 205991 - DNA, 25 bp, Artificial
  Probe
aagtggccaatataatccccgtgtc

SEQ ID NO: 205992 - DNA, 25 bp, Artificial
  Probe
agcttctacgttcgattgagcgggc

SEQ ID NO: 205993 - DNA, 25 bp, Artificial
  Probe
caagtgctttcttgggtgacacagg

SEQ ID NO: 205994 - DNA, 25 bp, Artificial
  Probe
gacactccacacgagaggctaacaa

SEQ ID NO: 205995 - DNA, 25 bp, Artificial
  Probe
ccgtttgcgacactccacacgagag

SEQ ID NO: 205996 - DNA, 25 bp, Artificial
  Probe
atataatccccgtgtctgatgatgg

SEQ ID NO: 205997 - DNA, 25 bp, Artificial
  Probe
ttgggtgacacaggagcagcttcta

SEQ ID NO: 205998 - DNA, 25 bp, Artificial
  Probe
cccctgctaaccagtggaagtggcc

SEQ ID NO: 205999 - DNA, 25 bp, Artificial
  Probe
agcctacagaaagtacacagaacag

SEQ ID NO: 206000 - DNA, 25 bp, Artificial
  Probe
gctttcttgggtgacacaggagcag

SEQ ID NO: 206001 - DNA, 25 bp, Artificial
  Probe
aaccagtggaagtggccaatataat

SEQ ID NO: 206002 - DNA, 25 bp, Artificial
  Probe
ccccgtgtctgatgatggatgtgga

SEQ ID NO: 206003 - DNA, 25 bp, Artificial
  Probe
tctacgttcgattgagcgggcctgg

SEQ ID NO: 206004 - DNA, 25 bp, Artificial
  Probe
ttgcgacactccacacgagaggcta

SEQ ID NO: 206005 - DNA, 25 bp, Artificial
  Probe
cttctacgttcgattgagcgggcct

SEQ ID NO: 206006 - DNA, 25 bp, Artificial
  Probe
acatgcagcctacagaaagtacaca

SEQ ID NO: 206007 - DNA, 25 bp, Artificial
  Probe
tgctttcttgggtgacacaggagca

SEQ ID NO: 206008 - DNA, 25 bp, Artificial
  Probe
atgcagcctacagaaagtacacaga

SEQ ID NO: 206009 - DNA, 25 bp, Artificial
  Probe
catgcagcctacagaaagtacacag

SEQ ID NO: 206010 - DNA, 25 bp, Artificial
  Probe
gccaagtgctttcttgggtgacaca

SEQ ID NO: 206011 - DNA, 25 bp, Artificial
  Probe
actccacacgagaggctaacaatat

SEQ ID NO: 206012 - DNA, 25 bp, Artificial
  Probe
aacatgcagcctacagaaagtacac

SEQ ID NO: 206013 - DNA, 25 bp, Artificial
  Probe
taatccccgtgtctgatgatggatg

SEQ ID NO: 206014 - DNA, 25 bp, Artificial
  Probe
ttctacgttcgattgagcgggcctg

SEQ ID NO: 206015 - DNA, 25 bp, Artificial
  Probe
agtctcagttcagaaaattccagaa

SEQ ID NO: 206016 - DNA, 25 bp, Artificial
  Probe
atcacagtcctagtggggaagctgc

SEQ ID NO: 206017 - DNA, 25 bp, Artificial
  Probe
acctgaaatgcatgaacagaaaccc

SEQ ID NO: 206018 - DNA, 25 bp, Artificial
  Probe
tcacagtcctagtggggaagctgcc

SEQ ID NO: 206019 - DNA, 25 bp, Artificial
  Probe
gtctcagttcagaaaattccagaag

SEQ ID NO: 206020 - DNA, 25 bp, Artificial
  Probe
atttgatatcgacatggatgcacca

SEQ ID NO: 206021 - DNA, 25 bp, Artificial
  Probe
ctccgctgctaacctgaaatgcatg

SEQ ID NO: 206022 - DNA, 25 bp, Artificial
  Probe
tgcatgaacagaaacccatagtatt

SEQ ID NO: 206023 - DNA, 25 bp, Artificial
  Probe
atgcatgaacagaaacccatagtat

SEQ ID NO: 206024 - DNA, 25 bp, Artificial
  Probe
cactccgctgctaacctgaaatgca

SEQ ID NO: 206025 - DNA, 25 bp, Artificial
  Probe
gctgctaacctgaaatgcatgaaca

SEQ ID NO: 206026 - DNA, 25 bp, Artificial
  Probe
ctgctaacctgaaatgcatgaacag

SEQ ID NO: 206027 - DNA, 25 bp, Artificial
  Probe
tccgctgctaacctgaaatgcatga

SEQ ID NO: 206028 - DNA, 25 bp, Artificial
  Probe
actccgctgctaacctgaaatgcat

SEQ ID NO: 206029 - DNA, 25 bp, Artificial
  Probe
aaggcaggatcacagtcctagtggg

SEQ ID NO: 206030 - DNA, 25 bp, Artificial
  Probe
aaaggcaggatcacagtcctagtgg

SEQ ID NO: 206031 - DNA, 25 bp, Artificial
  Probe
cagtctcagttcagaaaattccaga

SEQ ID NO: 206032 - DNA, 25 bp, Artificial
  Probe
gcatgaacagaaacccatagtattt

SEQ ID NO: 206033 - DNA, 25 bp, Artificial
  Probe
gcaggatcacagtcctagtggggaa

SEQ ID NO: 206034 - DNA, 25 bp, Artificial
  Probe
gaatttgatatcgacatggatgcac

SEQ ID NO: 206035 - DNA, 25 bp, Artificial
  Probe
ctaacctgaaatgcatgaacagaaa

SEQ ID NO: 206036 - DNA, 25 bp, Artificial
  Probe
ggatcacagtcctagtggggaagct

SEQ ID NO: 206037 - DNA, 25 bp, Artificial
  Probe
ccgctgctaacctgaaatgcatgaa

SEQ ID NO: 206038 - DNA, 25 bp, Artificial
  Probe
tgctaacctgaaatgcatgaacaga

SEQ ID NO: 206039 - DNA, 25 bp, Artificial
  Probe
aatttgatatcgacatggatgcacc

SEQ ID NO: 206040 - DNA, 25 bp, Artificial
  Probe
tctcagttcagaaaattccagaaga

SEQ ID NO: 206041 - DNA, 25 bp, Artificial
  Probe
ctcagttcagaaaattccagaagaa

SEQ ID NO: 206042 - DNA, 25 bp, Artificial
  Probe
taacctgaaatgcatgaacagaaac

SEQ ID NO: 206043 - DNA, 25 bp, Artificial
  Probe
acactccgctgctaacctgaaatgc

SEQ ID NO: 206044 - DNA, 25 bp, Artificial
  Probe
caggatcacagtcctagtggggaag

SEQ ID NO: 206045 - DNA, 25 bp, Artificial
  Probe
aatgcatgaacagaaacccatagta

SEQ ID NO: 206046 - DNA, 25 bp, Artificial
  Probe
aacctgaaatgcatgaacagaaacc

SEQ ID NO: 206047 - DNA, 25 bp, Artificial
  Probe
aggatcacagtcctagtggggaagc

SEQ ID NO: 206048 - DNA, 25 bp, Artificial
  Probe
cgctgctaacctgaaatgcatgaac

SEQ ID NO: 206049 - DNA, 25 bp, Artificial
  Probe
gaacagaaacccatagtatttatgc

SEQ ID NO: 206050 - DNA, 25 bp, Artificial
  Probe
tcagtctcagttcagaaaattccag

SEQ ID NO: 206051 - DNA, 25 bp, Artificial
  Probe
gatcacagtcctagtggggaagctg

SEQ ID NO: 206052 - DNA, 25 bp, Artificial
  Probe
gctaacctgaaatgcatgaacagaa

SEQ ID NO: 206053 - DNA, 25 bp, Artificial
  Probe
tgcatcctccagtgtgaagagaagg

SEQ ID NO: 206054 - DNA, 25 bp, Artificial
  Probe
tctttgcaccaaagccatggccagt

SEQ ID NO: 206055 - DNA, 25 bp, Artificial
  Probe
cgctgctctttaccagtcgaaagcc

SEQ ID NO: 206056 - DNA, 25 bp, Artificial
  Probe
tgctctttaccagtcgaaagcctcg

SEQ ID NO: 206057 - DNA, 25 bp, Artificial
  Probe
cagtcgaaagcctcggagatgcagc

SEQ ID NO: 206058 - DNA, 25 bp, Artificial
  Probe
atggccagtgactctgagcagctca

SEQ ID NO: 206059 - DNA, 25 bp, Artificial
  Probe
taatgtgtagccagaaggagcccct

SEQ ID NO: 206060 - DNA, 25 bp, Artificial
  Probe
agctgtgcatcctccagtgtgaaga

SEQ ID NO: 206061 - DNA, 25 bp, Artificial
  Probe
gtgcatcctccagtgtgaagagaag

SEQ ID NO: 206062 - DNA, 25 bp, Artificial
  Probe
ctttaccagtcgaaagcctcggaga

SEQ ID NO: 206063 - DNA, 25 bp, Artificial
  Probe
agcttcaacctgaagctgtgcatcc

SEQ ID NO: 206064 - DNA, 25 bp, Artificial
  Probe
cctctctggactctttgcaccaaag

SEQ ID NO: 206065 - DNA, 25 bp, Artificial
  Probe
gaaagcctcggagatgcagcacctg

SEQ ID NO: 206066 - DNA, 25 bp, Artificial
  Probe
ctgtgcatcctccagtgtgaagaga

SEQ ID NO: 206067 - DNA, 25 bp, Artificial
  Probe
ctgaagctgtgcatcctccagtgtg

SEQ ID NO: 206068 - DNA, 25 bp, Artificial
  Probe
tggccagtgactctgagcagctcag

SEQ ID NO: 206069 - DNA, 25 bp, Artificial
  Probe
aagccatggccagtgactctgagca

SEQ ID NO: 206070 - DNA, 25 bp, Artificial
  Probe
tctggactctttgcaccaaagccat

SEQ ID NO: 206071 - DNA, 25 bp, Artificial
  Probe
tcaacctgaagctgtgcatcctcca

SEQ ID NO: 206072 - DNA, 25 bp, Artificial
  Probe
ctctgcaccagaatggtaatgtgta

SEQ ID NO: 206073 - DNA, 25 bp, Artificial
  Probe
tggactctttgcaccaaagccatgg

SEQ ID NO: 206074 - DNA, 25 bp, Artificial
  Probe
tccgctgctctttaccagtcgaaag

SEQ ID NO: 206075 - DNA, 25 bp, Artificial
  Probe
gaagctgtgcatcctccagtgtgaa

SEQ ID NO: 206076 - DNA, 25 bp, Artificial
  Probe
actctgcaccagaatggtaatgtgt

SEQ ID NO: 206077 - DNA, 25 bp, Artificial
  Probe
ttaccagtcgaaagcctcggagatg

SEQ ID NO: 206078 - DNA, 25 bp, Artificial
  Probe
cctccagtgtgaagagaaggtcttc

SEQ ID NO: 206079 - DNA, 25 bp, Artificial
  Probe
acctgaagctgtgcatcctccagtg

SEQ ID NO: 206080 - DNA, 25 bp, Artificial
  Probe
cttcaacctgaagctgtgcatcctc

SEQ ID NO: 206081 - DNA, 25 bp, Artificial
  Probe
gctgctctttaccagtcgaaagcct

SEQ ID NO: 206082 - DNA, 25 bp, Artificial
  Probe
ctcggagatgcagcacctgaagaga

SEQ ID NO: 206083 - DNA, 25 bp, Artificial
  Probe
aaagcctcggagatgcagcacctga

SEQ ID NO: 206084 - DNA, 25 bp, Artificial
  Probe
tctgcaccagaatggtaatgtgtag

SEQ ID NO: 206085 - DNA, 25 bp, Artificial
  Probe
tgcaccaaagccatggccagtgact

SEQ ID NO: 206086 - DNA, 25 bp, Artificial
  Probe
gcaccaaagccatggccagtgactc

SEQ ID NO: 206087 - DNA, 25 bp, Artificial
  Probe
gctctttaccagtcgaaagcctcgg

SEQ ID NO: 206088 - DNA, 25 bp, Artificial
  Probe
gccatggccagtgactctgagcagc

SEQ ID NO: 206089 - DNA, 25 bp, Artificial
  Probe
actctttgcaccaaagccatggcca

SEQ ID NO: 206090 - DNA, 25 bp, Artificial
  Probe
cggagatgcagcacctgaagagaat

SEQ ID NO: 206091 - DNA, 25 bp, Artificial
  Probe
gcatcctccagtgtgaagagaaggt

SEQ ID NO: 206092 - DNA, 25 bp, Artificial
  Probe
aaagccatggccagtgactctgagc

SEQ ID NO: 206093 - DNA, 25 bp, Artificial
  Probe
tgcaccagaatggtaatgtgtagcc

SEQ ID NO: 206094 - DNA, 25 bp, Artificial
  Probe
aatgtgtagccagaaggagcccctc

SEQ ID NO: 206095 - DNA, 25 bp, Artificial
  Probe
tctctggactctttgcaccaaagcc

SEQ ID NO: 206096 - DNA, 25 bp, Artificial
  Probe
cttctactgagcaaaatggttaata

SEQ ID NO: 206097 - DNA, 25 bp, Artificial
  Probe
cgaaagcctcggagatgcagcacct

SEQ ID NO: 206098 - DNA, 25 bp, Artificial
  Probe
ggactctttgcaccaaagccatggc

SEQ ID NO: 206099 - DNA, 25 bp, Artificial
  Probe
gtacatgattttgtgccacccttgg

SEQ ID NO: 206100 - DNA, 25 bp, Artificial
  Probe
tgccaattctgctaactgtgcatag

SEQ ID NO: 206101 - DNA, 25 bp, Artificial
  Probe
gagcctttcctctgccaattctgct

SEQ ID NO: 206102 - DNA, 25 bp, Artificial
  Probe
tctgtatacatgagcctttcctctg

SEQ ID NO: 206103 - DNA, 25 bp, Artificial
  Probe
gtcctgagcctttgtggccatcagg

SEQ ID NO: 206104 - DNA, 25 bp, Artificial
  Probe
tcccaacaggagaggcagaagagca

SEQ ID NO: 206105 - DNA, 25 bp, Artificial
  Probe
tcacttgaggtacatgattttgtgc

SEQ ID NO: 206106 - DNA, 25 bp, Artificial
  Probe
tttgtgccacccttgggtacctgtc

SEQ ID NO: 206107 - DNA, 25 bp, Artificial
  Probe
tggccttctgtatacatgagccttt

SEQ ID NO: 206108 - DNA, 25 bp, Artificial
  Probe
ggccttctgtatacatgagcctttc

SEQ ID NO: 206109 - DNA, 25 bp, Artificial
  Probe
catgtcacttgaggtacatgatttt

SEQ ID NO: 206110 - DNA, 25 bp, Artificial
  Probe
ccaattctgctaactgtgcatagaa

SEQ ID NO: 206111 - DNA, 25 bp, Artificial
  Probe
ttctgctaactgtgcatagaaaaag

SEQ ID NO: 206112 - DNA, 25 bp, Artificial
  Probe
gccttctgtatacatgagcctttcc

SEQ ID NO: 206113 - DNA, 25 bp, Artificial
  Probe
tacatgattttgtgccacccttggg

SEQ ID NO: 206114 - DNA, 25 bp, Artificial
  Probe
acagagcccacagtagaaaggcaca

SEQ ID NO: 206115 - DNA, 25 bp, Artificial
  Probe
tgtagatgcatgtcacttgaggtac

SEQ ID NO: 206116 - DNA, 25 bp, Artificial
  Probe
tgagcctttcctctgccaattctgc

SEQ ID NO: 206117 - DNA, 25 bp, Artificial
  Probe
ccttgtcccaacaggagaggcagaa

SEQ ID NO: 206118 - DNA, 25 bp, Artificial
  Probe
tttacagagcccacagtagaaaggc

SEQ ID NO: 206119 - DNA, 25 bp, Artificial
  Probe
ttacagagcccacagtagaaaggca

SEQ ID NO: 206120 - DNA, 25 bp, Artificial
  Probe
gtgtgcatgcatgtagatgcatgtc

SEQ ID NO: 206121 - DNA, 25 bp, Artificial
  Probe
ttgtgccacccttgggtacctgtcc

SEQ ID NO: 206122 - DNA, 25 bp, Artificial
  Probe
tacccttgtcccaacaggagaggca

SEQ ID NO: 206123 - DNA, 25 bp, Artificial
  Probe
tgtcccaacaggagaggcagaagag

SEQ ID NO: 206124 - DNA, 25 bp, Artificial
  Probe
tgaggagcccccaaaattttctggg

SEQ ID NO: 206125 - DNA, 25 bp, Artificial
  Probe
tggccatcaggacaggagtatgcga

SEQ ID NO: 206126 - DNA, 25 bp, Artificial
  Probe
catcaggacaggagtatgcgagtgc

SEQ ID NO: 206127 - DNA, 25 bp, Artificial
  Probe
ttgtggccatcaggacaggagtatg

SEQ ID NO: 206128 - DNA, 25 bp, Artificial
  Probe
tcctctgccaattctgctaactgtg

SEQ ID NO: 206129 - DNA, 25 bp, Artificial
  Probe
gcatgtcacttgaggtacatgattt

SEQ ID NO: 206130 - DNA, 25 bp, Artificial
  Probe
gccatcaggacaggagtatgcgagt

SEQ ID NO: 206131 - DNA, 25 bp, Artificial
  Probe
gcctttgtggccatcaggacaggag

SEQ ID NO: 206132 - DNA, 25 bp, Artificial
  Probe
gtcccaacaggagaggcagaagagc

SEQ ID NO: 206133 - DNA, 25 bp, Artificial
  Probe
catgtagatgcatgtcacttgaggt

SEQ ID NO: 206134 - DNA, 25 bp, Artificial
  Probe
tacagagcccacagtagaaaggcac

SEQ ID NO: 206135 - DNA, 25 bp, Artificial
  Probe
tgattttgtgccacccttgggtacc

SEQ ID NO: 206136 - DNA, 25 bp, Artificial
  Probe
cttgggtacctgtccctactcaggg

SEQ ID NO: 206137 - DNA, 25 bp, Artificial
  Probe
gagcccacagtagaaaggcacagca

SEQ ID NO: 206138 - DNA, 25 bp, Artificial
  Probe
ggatttttacagagcccacagtaga

SEQ ID NO: 206139 - DNA, 25 bp, Artificial
  Probe
cctgagcctttgtggccatcaggac

SEQ ID NO: 206140 - DNA, 25 bp, Artificial
  Probe
atcaggacaggagtatgcgagtgca

SEQ ID NO: 206141 - DNA, 25 bp, Artificial
  Probe
atgagcctttcctctgccaattctg

SEQ ID NO: 206142 - DNA, 25 bp, Artificial
  Probe
agatgcatgtcacttgaggtacatg

SEQ ID NO: 206143 - DNA, 25 bp, Artificial
  Probe
aggtcctgagcctttgtggccatca

SEQ ID NO: 206144 - DNA, 25 bp, Artificial
  Probe
tgtggccatcaggacaggagtatgc

SEQ ID NO: 206145 - DNA, 25 bp, Artificial
  Probe
cctcaagctggcaggccttgctgca

SEQ ID NO: 206146 - DNA, 25 bp, Artificial
  Probe
tgctttggtgcttaggtgcacttac

SEQ ID NO: 206147 - DNA, 25 bp, Artificial
  Probe
caggccttgctgcagacagcgtgac

SEQ ID NO: 206148 - DNA, 25 bp, Artificial
  Probe
cagtaaagaacctgattctgagttt

SEQ ID NO: 206149 - DNA, 25 bp, Artificial
  Probe
agctggcaggccttgctgcagacag

SEQ ID NO: 206150 - DNA, 25 bp, Artificial
  Probe
tggtgcttaggtgcacttacaacat

SEQ ID NO: 206151 - DNA, 25 bp, Artificial
  Probe
gtaaagaacctgattctgagtttca

SEQ ID NO: 206152 - DNA, 25 bp, Artificial
  Probe
ggtgcacttacaacatgaatgcatc

SEQ ID NO: 206153 - DNA, 25 bp, Artificial
  Probe
tgagcatagcaggtcagtaaagaac

SEQ ID NO: 206154 - DNA, 25 bp, Artificial
  Probe
agcatagcaggtcagtaaagaacct

SEQ ID NO: 206155 - DNA, 25 bp, Artificial
  Probe
tgcttaggtgcacttacaacatgaa

SEQ ID NO: 206156 - DNA, 25 bp, Artificial
  Probe
tggcaggccttgctgcagacagcgt

SEQ ID NO: 206157 - DNA, 25 bp, Artificial
  Probe
acccattggaacgtaaatcagaata

SEQ ID NO: 206158 - DNA, 25 bp, Artificial
  Probe
ccttagttggaagcatggtggaaca

SEQ ID NO: 206159 - DNA, 25 bp, Artificial
  Probe
cctgattctgagtttcaacccattg

SEQ ID NO: 206160 - DNA, 25 bp, Artificial
  Probe
ctggcaggccttgctgcagacagcg

SEQ ID NO: 206161 - DNA, 25 bp, Artificial
  Probe
gccttgctgcagacagcgtgacact

SEQ ID NO: 206162 - DNA, 25 bp, Artificial
  Probe
ggtgcttaggtgcacttacaacatg

SEQ ID NO: 206163 - DNA, 25 bp, Artificial
  Probe
gcacttacaacatgaatgcatcagc

SEQ ID NO: 206164 - DNA, 25 bp, Artificial
  Probe
cacttcccaccttagttggaagcat

SEQ ID NO: 206165 - DNA, 25 bp, Artificial
  Probe
ttcagatttgagcatagcaggtcag

SEQ ID NO: 206166 - DNA, 25 bp, Artificial
  Probe
acactggcagagacagcccaggggc

SEQ ID NO: 206167 - DNA, 25 bp, Artificial
  Probe
acagcgtgacactggcagagacagc

SEQ ID NO: 206168 - DNA, 25 bp, Artificial
  Probe
agaccgaattctagaatgaagaacg

SEQ ID NO: 206169 - DNA, 25 bp, Artificial
  Probe
ataagcggcaatgattcagatcagc

SEQ ID NO: 206170 - DNA, 25 bp, Artificial
  Probe
agaatgaagaacgagcccgggcgtt

SEQ ID NO: 206171 - DNA, 25 bp, Artificial
  Probe
cagaagccctcaagctggcaggcct

SEQ ID NO: 206172 - DNA, 25 bp, Artificial
  Probe
taaagaacctgattctgagtttcaa

SEQ ID NO: 206173 - DNA, 25 bp, Artificial
  Probe
actggcagagacagcccaggggccc

SEQ ID NO: 206174 - DNA, 25 bp, Artificial
  Probe
cagagacagcccaggggcccttggc

SEQ ID NO: 206175 - DNA, 25 bp, Artificial
  Probe
tgcacttacaacatgaatgcatcag

SEQ ID NO: 206176 - DNA, 25 bp, Artificial
  Probe
tccaccctagaagaaaagagaccga

SEQ ID NO: 206177 - DNA, 25 bp, Artificial
  Probe
ctgcagacagcgtgacactggcaga

SEQ ID NO: 206178 - DNA, 25 bp, Artificial
  Probe
ttaaaaatgcagaagccctcaagct

SEQ ID NO: 206179 - DNA, 25 bp, Artificial
  Probe
tgacactggcagagacagcccaggg

SEQ ID NO: 206180 - DNA, 25 bp, Artificial
  Probe
cgtgctttggtgcttaggtgcactt

SEQ ID NO: 206181 - DNA, 25 bp, Artificial
  Probe
ccaccttagttggaagcatggtgga

SEQ ID NO: 206182 - DNA, 25 bp, Artificial
  Probe
ttctgagtttcaacccattggaacg

SEQ ID NO: 206183 - DNA, 25 bp, Artificial
  Probe
agaagccctcaagctggcaggcctt

SEQ ID NO: 206184 - DNA, 25 bp, Artificial
  Probe
cgtgacactggcagagacagcccag

SEQ ID NO: 206185 - DNA, 25 bp, Artificial
  Probe
ttcaacccattggaacgtaaatcag

SEQ ID NO: 206186 - DNA, 25 bp, Artificial
  Probe
ttttcagatttgagcatagcaggtc

SEQ ID NO: 206187 - DNA, 25 bp, Artificial
  Probe
aagccctcaagctggcaggccttgc

SEQ ID NO: 206188 - DNA, 25 bp, Artificial
  Probe
cccattggaacgtaaatcagaataa

SEQ ID NO: 206189 - DNA, 25 bp, Artificial
  Probe
atgcagaagccctcaagctggcagg

SEQ ID NO: 206190 - DNA, 25 bp, Artificial
  Probe
cttgctgcagacagcgtgacactgg

SEQ ID NO: 206191 - DNA, 25 bp, Artificial
  Probe
tctgctcgacaagttccttatcaag

SEQ ID NO: 206192 - DNA, 25 bp, Artificial
  Probe
ctgcaatgattttcagtacgagagc

SEQ ID NO: 206193 - DNA, 25 bp, Artificial
  Probe
tatcaagaactgcaatgattttcag

SEQ ID NO: 206194 - DNA, 25 bp, Artificial
  Probe
gctctgctcgacaagttccttatca

SEQ ID NO: 206195 - DNA, 25 bp, Artificial
  Probe
agcagaaaaccatggcagatgggaa

SEQ ID NO: 206196 - DNA, 25 bp, Artificial
  Probe
tgctatagctgagctggacacatta

SEQ ID NO: 206197 - DNA, 25 bp, Artificial
  Probe
agctgagctggacacattaaacgag

SEQ ID NO: 206198 - DNA, 25 bp, Artificial
  Probe
gcaatgatgtcttggctctgctcga

SEQ ID NO: 206199 - DNA, 25 bp, Artificial
  Probe
tggttgaagcttctgaggcagcgta

SEQ ID NO: 206200 - DNA, 25 bp, Artificial
  Probe
gttccttatcaagaactgcaatgat

SEQ ID NO: 206201 - DNA, 25 bp, Artificial
  Probe
tcgatgatgctatagctgagctgga

SEQ ID NO: 206202 - DNA, 25 bp, Artificial
  Probe
aactgcaatgattttcagtacgaga

SEQ ID NO: 206203 - DNA, 25 bp, Artificial
  Probe
gtcttggctctgctcgacaagttcc

SEQ ID NO: 206204 - DNA, 25 bp, Artificial
  Probe
tcttggctctgctcgacaagttcct

SEQ ID NO: 206205 - DNA, 25 bp, Artificial
  Probe
acaagccttcgatgatgctatagct

SEQ ID NO: 206206 - DNA, 25 bp, Artificial
  Probe
agaactgcaatgattttcagtacga

SEQ ID NO: 206207 - DNA, 25 bp, Artificial
  Probe
caaacaagccttcgatgatgctata

SEQ ID NO: 206208 - DNA, 25 bp, Artificial
  Probe
ccaaacaagccttcgatgatgctat

SEQ ID NO: 206209 - DNA, 25 bp, Artificial
  Probe
tgatgctatagctgagctggacaca

SEQ ID NO: 206210 - DNA, 25 bp, Artificial
  Probe
atgtcttggctctgctcgacaagtt

SEQ ID NO: 206211 - DNA, 25 bp, Artificial
  Probe
gaaggcaactgaagacccatcaggt

SEQ ID NO: 206212 - DNA, 25 bp, Artificial
  Probe
agcgaccagcaggatgaagaagccg

SEQ ID NO: 206213 - DNA, 25 bp, Artificial
  Probe
tgatgtcttggctctgctcgacaag

SEQ ID NO: 206214 - DNA, 25 bp, Artificial
  Probe
gaactgcaatgattttcagtacgag

SEQ ID NO: 206215 - DNA, 25 bp, Artificial
  Probe
agccttcgatgatgctatagctgag

SEQ ID NO: 206216 - DNA, 25 bp, Artificial
  Probe
cgagcgaccagcaggatgaagaagc

SEQ ID NO: 206217 - DNA, 25 bp, Artificial
  Probe
agtcaaagcctatcgggagaagatt

SEQ ID NO: 206218 - DNA, 25 bp, Artificial
  Probe
tctgaggcagcgtataaggaagcct

SEQ ID NO: 206219 - DNA, 25 bp, Artificial
  Probe
ggttgaagcttctgaggcagcgtat

SEQ ID NO: 206220 - DNA, 25 bp, Artificial
  Probe
agcttctgaggcagcgtataaggaa

SEQ ID NO: 206221 - DNA, 25 bp, Artificial
  Probe
ataaggaagccttcgaaatcagcaa

SEQ ID NO: 206222 - DNA, 25 bp, Artificial
  Probe
aactgaagacccatcaggtccctgg

SEQ ID NO: 206223 - DNA, 25 bp, Artificial
  Probe
cgaccagcaggatgaagaagccgga

SEQ ID NO: 206224 - DNA, 25 bp, Artificial
  Probe
tttgcaatgatgtcttggctctgct

SEQ ID NO: 206225 - DNA, 25 bp, Artificial
  Probe
aggcaactgaagacccatcaggtcc

SEQ ID NO: 206226 - DNA, 25 bp, Artificial
  Probe
caatgattttcagtacgagagcaag

SEQ ID NO: 206227 - DNA, 25 bp, Artificial
  Probe
cttcgatgatgctatagctgagctg

SEQ ID NO: 206228 - DNA, 25 bp, Artificial
  Probe
acagtttgcaatgatgtcttggctc

SEQ ID NO: 206229 - DNA, 25 bp, Artificial
  Probe
atcaagaactgcaatgattttcagt

SEQ ID NO: 206230 - DNA, 25 bp, Artificial
  Probe
tagctgagctggacacattaaacga

SEQ ID NO: 206231 - DNA, 25 bp, Artificial
  Probe
ttgaagcttctgaggcagcgtataa

SEQ ID NO: 206232 - DNA, 25 bp, Artificial
  Probe
aaagtcaaagcctatcgggagaaga

SEQ ID NO: 206233 - DNA, 25 bp, Artificial
  Probe
gcaatgattttcagtacgagagcaa

SEQ ID NO: 206234 - DNA, 25 bp, Artificial
  Probe
tattagtagcattgagcagaaaacc

SEQ ID NO: 206235 - DNA, 25 bp, Artificial
  Probe
aagttccttatcaagaactgcaatg

SEQ ID NO: 206236 - DNA, 25 bp, Artificial
  Probe
tataaggaagccttcgaaatcagca

SEQ ID NO: 206237 - DNA, 25 bp, Artificial
  Probe
gtccctgcaactcaatgagacccag

SEQ ID NO: 206238 - DNA, 25 bp, Artificial
  Probe
ttctggtcccatctggggagctcct

SEQ ID NO: 206239 - DNA, 25 bp, Artificial
  Probe
gacgtcttctccagcgcagaccttt

SEQ ID NO: 206240 - DNA, 25 bp, Artificial
  Probe
caggcttctccctgggctgagattt

SEQ ID NO: 206241 - DNA, 25 bp, Artificial
  Probe
tcatctgagaaatccagctcctcgc

SEQ ID NO: 206242 - DNA, 25 bp, Artificial
  Probe
accaccaagcagctcacagagctgg

SEQ ID NO: 206243 - DNA, 25 bp, Artificial
  Probe
ctggggagctcctggctaagataag

SEQ ID NO: 206244 - DNA, 25 bp, Artificial
  Probe
tagccgcgtccctgcaactcaatga

SEQ ID NO: 206245 - DNA, 25 bp, Artificial
  Probe
cttctccagcgcagacctttgactg

SEQ ID NO: 206246 - DNA, 25 bp, Artificial
  Probe
ccaccaagcagctcacagagctgga

SEQ ID NO: 206247 - DNA, 25 bp, Artificial
  Probe
cctgcttcagagacgtcttctccag

SEQ ID NO: 206248 - DNA, 25 bp, Artificial
  Probe
cagacctttgactggatgaaagtta

SEQ ID NO: 206249 - DNA, 25 bp, Artificial
  Probe
cccatctggggagctcctggctaag

SEQ ID NO: 206250 - DNA, 25 bp, Artificial
  Probe
gaatcatctgagaaatccagctcct

SEQ ID NO: 206251 - DNA, 25 bp, Artificial
  Probe
agcccgcagtgagatagccgcgtcc

SEQ ID NO: 206252 - DNA, 25 bp, Artificial
  Probe
tgggtcaacccaacgcagtgcgcac

SEQ ID NO: 206253 - DNA, 25 bp, Artificial
  Probe
tcccatctggggagctcctggctaa

SEQ ID NO: 206254 - DNA, 25 bp, Artificial
  Probe
gccgcgtccctgcaactcaatgaga

SEQ ID NO: 206255 - DNA, 25 bp, Artificial
  Probe
ccgcagtgagatagccgcgtccctg

SEQ ID NO: 206256 - DNA, 25 bp, Artificial
  Probe
tctcttcctttctggtcccatctgg

SEQ ID NO: 206257 - DNA, 25 bp, Artificial
  Probe
gtacctaacaagagcccgcagtgag

SEQ ID NO: 206258 - DNA, 25 bp, Artificial
  Probe
ttcccctgcttcagagacgtcttct

SEQ ID NO: 206259 - DNA, 25 bp, Artificial
  Probe
gaagcctgtcgttcccctgcttcag

SEQ ID NO: 206260 - DNA, 25 bp, Artificial
  Probe
tcgccgcatgaagcagaagaagcgc

SEQ ID NO: 206261 - DNA, 25 bp, Artificial
  Probe
caagaagcctgtcgttcccctgctt

SEQ ID NO: 206262 - DNA, 25 bp, Artificial
  Probe
gtgggtcaacccaacgcagtgcgca

SEQ ID NO: 206263 - DNA, 25 bp, Artificial
  Probe
tgtcgttcccctgcttcagagacgt

SEQ ID NO: 206264 - DNA, 25 bp, Artificial
  Probe
ctcctggaagcgatgagaaaactga

SEQ ID NO: 206265 - DNA, 25 bp, Artificial
  Probe
agaatcatctgagaaatccagctcc

SEQ ID NO: 206266 - DNA, 25 bp, Artificial
  Probe
acaagagcccgcagtgagatagccg

SEQ ID NO: 206267 - DNA, 25 bp, Artificial
  Probe
tggctacgtgggtcaacccaacgca

SEQ ID NO: 206268 - DNA, 25 bp, Artificial
  Probe
cttcctttctggtcccatctgggga

SEQ ID NO: 206269 - DNA, 25 bp, Artificial
  Probe
tcaacaagtacctaacaagagcccg

SEQ ID NO: 206270 - DNA, 25 bp, Artificial
  Probe
gagatagccgcgtccctgcaactca

SEQ ID NO: 206271 - DNA, 25 bp, Artificial
  Probe
ttctccctgggctgagatttcttac

SEQ ID NO: 206272 - DNA, 25 bp, Artificial
  Probe
ccctgggctgagatttcttacccaa

SEQ ID NO: 206273 - DNA, 25 bp, Artificial
  Probe
gacccaggcttctccctgggctgag

SEQ ID NO: 206274 - DNA, 25 bp, Artificial
  Probe
gagagtatggctacgtgggtcaacc

SEQ ID NO: 206275 - DNA, 25 bp, Artificial
  Probe
aagaggggctcttgcccatgtcacc

SEQ ID NO: 206276 - DNA, 25 bp, Artificial
  Probe
gaaagaggggctcttgcccatgtca

SEQ ID NO: 206277 - DNA, 25 bp, Artificial
  Probe
agtatggctacgtgggtcaacccaa

SEQ ID NO: 206278 - DNA, 25 bp, Artificial
  Probe
ggagctcctggctaagataagatat

SEQ ID NO: 206279 - DNA, 25 bp, Artificial
  Probe
gctgagatttcttacccaaagcaca

SEQ ID NO: 206280 - DNA, 25 bp, Artificial
  Probe
caactcaatgagacccaggtgaaga

SEQ ID NO: 206281 - DNA, 25 bp, Artificial
  Probe
ctttctggtcccatctggggagctc

SEQ ID NO: 206282 - DNA, 25 bp, Artificial
  Probe
ggctgagatttcttacccaaagcac

SEQ ID NO: 206283 - DNA, 25 bp, Artificial
  Probe
cattccaccagcagcgaggaagtaa

SEQ ID NO: 206284 - DNA, 25 bp, Artificial
  Probe
tcatgaccagccttcagcaggagta

SEQ ID NO: 206285 - DNA, 25 bp, Artificial
  Probe
agaagcagatgctgacagctgctca

SEQ ID NO: 206286 - DNA, 25 bp, Artificial
  Probe
atctacttgatgttattgatcaagc

SEQ ID NO: 206287 - DNA, 25 bp, Artificial
  Probe
gcataccttccctttagtttgttgg

SEQ ID NO: 206288 - DNA, 25 bp, Artificial
  Probe
tgacagctgctcacgccctggctgt

SEQ ID NO: 206289 - DNA, 25 bp, Artificial
  Probe
gttttgagagcataccttcccttta

SEQ ID NO: 206290 - DNA, 25 bp, Artificial
  Probe
cgatccaatgacaaggtatatgaaa

SEQ ID NO: 206291 - DNA, 25 bp, Artificial
  Probe
ctggcgcagcagtatgtcatgacca

SEQ ID NO: 206292 - DNA, 25 bp, Artificial
  Probe
gcactcacagctccaactgatgaca

SEQ ID NO: 206293 - DNA, 25 bp, Artificial
  Probe
ggagggctcccaagacactgagact

SEQ ID NO: 206294 - DNA, 25 bp, Artificial
  Probe
cagaagagtacgtccctatggtgaa

SEQ ID NO: 206295 - DNA, 25 bp, Artificial
  Probe
cttcagcaggagtacaagaagcaga

SEQ ID NO: 206296 - DNA, 25 bp, Artificial
  Probe
aaactctggatccaaaatgtggcat

SEQ ID NO: 206297 - DNA, 25 bp, Artificial
  Probe
ggctttctgccctttgggagatctt

SEQ ID NO: 206298 - DNA, 25 bp, Artificial
  Probe
ttctttagatgtccagttgttacac

SEQ ID NO: 206299 - DNA, 25 bp, Artificial
  Probe
agccagcacccatcgagagatcgag

SEQ ID NO: 206300 - DNA, 25 bp, Artificial
  Probe
ccatcgagagatcgagatggcacag

SEQ ID NO: 206301 - DNA, 25 bp, Artificial
  Probe
gatgccaagaatctacttgatgtta

SEQ ID NO: 206302 - DNA, 25 bp, Artificial
  Probe
tcccaagacactgagactggctatc

SEQ ID NO: 206303 - DNA, 25 bp, Artificial
  Probe
atagtgttcagaaaactctggatcc

SEQ ID NO: 206304 - DNA, 25 bp, Artificial
  Probe
gctagggcagacacggccacactga

SEQ ID NO: 206305 - DNA, 25 bp, Artificial
  Probe
attgatcaagcgagactgaaaatgc

SEQ ID NO: 206306 - DNA, 25 bp, Artificial
  Probe
ctacttgatgttattgatcaagcga

SEQ ID NO: 206307 - DNA, 25 bp, Artificial
  Probe
gagatcttctctagcattccaccag

SEQ ID NO: 206308 - DNA, 25 bp, Artificial
  Probe
actgaaaatgctagggcagacacgg

SEQ ID NO: 206309 - DNA, 25 bp, Artificial
  Probe
ctttctgccctttgggagatcttct

SEQ ID NO: 206310 - DNA, 25 bp, Artificial
  Probe
aaatgctagggcagacacggccaca

SEQ ID NO: 206311 - DNA, 25 bp, Artificial
  Probe
cctagtgaaggctgtcattgagatg

SEQ ID NO: 206312 - DNA, 25 bp, Artificial
  Probe
ccatgcattctgttaggtggttttg

SEQ ID NO: 206313 - DNA, 25 bp, Artificial
  Probe
gtctgtcttcccagggaggatcccg

SEQ ID NO: 206314 - DNA, 25 bp, Artificial
  Probe
ccaagaatctacttgatgttattga

SEQ ID NO: 206315 - DNA, 25 bp, Artificial
  Probe
accagcagcgaggaagtaaccttgt

SEQ ID NO: 206316 - DNA, 25 bp, Artificial
  Probe
agacacggccacactgagccactgg

SEQ ID NO: 206317 - DNA, 25 bp, Artificial
  Probe
tggatccaaaatgtggcatttttct

SEQ ID NO: 206318 - DNA, 25 bp, Artificial
  Probe
tcatactgaccatgacttcgaattg

SEQ ID NO: 206319 - DNA, 25 bp, Artificial
  Probe
ccctatggtgaaggaagttggcctg

SEQ ID NO: 206320 - DNA, 25 bp, Artificial
  Probe
gatgtccagcaaaatccaaccagct

SEQ ID NO: 206321 - DNA, 25 bp, Artificial
  Probe
ttctctagcattccaccagcagcga

SEQ ID NO: 206322 - DNA, 25 bp, Artificial
  Probe
gcacagaagctgctgaactccgact

SEQ ID NO: 206323 - DNA, 25 bp, Artificial
  Probe
ctgaaagtctctcttgtataagttt

SEQ ID NO: 206324 - DNA, 25 bp, Artificial
  Probe
ccacactgagccactggccattgaa

SEQ ID NO: 206325 - DNA, 25 bp, Artificial
  Probe
ccatgacttcgaattggaagagaag

SEQ ID NO: 206326 - DNA, 25 bp, Artificial
  Probe
agatggcacagaagctgctgaactc

SEQ ID NO: 206327 - DNA, 25 bp, Artificial
  Probe
aaccagctcctccagaagagtacgt

SEQ ID NO: 206328 - DNA, 25 bp, Artificial
  Probe
tgatcaagcgagactgaaaatgcta

SEQ ID NO: 206329 - DNA, 25 bp, Artificial
  Probe
aacgtgaatgaaccagcctctgaca

SEQ ID NO: 206330 - DNA, 25 bp, Artificial
  Probe
tgctgctccttctcctgggttccag

SEQ ID NO: 206331 - DNA, 25 bp, Artificial
  Probe
agaattaactctggatctcgggcca

SEQ ID NO: 206332 - DNA, 25 bp, Artificial
  Probe
ctgatcagacgaaactttgtgctga

SEQ ID NO: 206333 - DNA, 25 bp, Artificial
  Probe
accctggatcaataagatcttgagg

SEQ ID NO: 206334 - DNA, 25 bp, Artificial
  Probe
atgaaccagcctctgacacactgca

SEQ ID NO: 206335 - DNA, 25 bp, Artificial
  Probe
gagaaagccaagctaaccctaggcg

SEQ ID NO: 206336 - DNA, 25 bp, Artificial
  Probe
acttcaacttcattccacccgggag

SEQ ID NO: 206337 - DNA, 25 bp, Artificial
  Probe
tgggatagcccaaggcattgcatcc

SEQ ID NO: 206338 - DNA, 25 bp, Artificial
  Probe
ggcctatctagaaattgtcacttct

SEQ ID NO: 206339 - DNA, 25 bp, Artificial
  Probe
caaactatgataagcgtttggttct

SEQ ID NO: 206340 - DNA, 25 bp, Artificial
  Probe
aggagccccaatcctgcaaacactt

SEQ ID NO: 206341 - DNA, 25 bp, Artificial
  Probe
gtcctcctaggagctcataacaaaa

SEQ ID NO: 206342 - DNA, 25 bp, Artificial
  Probe
gacacatggcagaagctcgaggttg

SEQ ID NO: 206343 - DNA, 25 bp, Artificial
  Probe
caataaagagccagatcctagactg

SEQ ID NO: 206344 - DNA, 25 bp, Artificial
  Probe
aggatgaatctccatgctctgtgtc

SEQ ID NO: 206345 - DNA, 25 bp, Artificial
  Probe
cagaagctcgaggttgaaaagcaat

SEQ ID NO: 206346 - DNA, 25 bp, Artificial
  Probe
gtcacttctgacaattacctgtcag

SEQ ID NO: 206347 - DNA, 25 bp, Artificial
  Probe
atcatcgggggcacggagtgcatac

SEQ ID NO: 206348 - DNA, 25 bp, Artificial
  Probe
aaagccaagctaaccctaggcgtgg

SEQ ID NO: 206349 - DNA, 25 bp, Artificial
  Probe
ctgtgtgctgggatagcccaaggca

SEQ ID NO: 206350 - DNA, 25 bp, Artificial
  Probe
tctgacacactgcaggaagtaaaga

SEQ ID NO: 206351 - DNA, 25 bp, Artificial
  Probe
ttggttctccatgacatcatgttac

SEQ ID NO: 206352 - DNA, 25 bp, Artificial
  Probe
tccacccgggagaatgtgcagggca

SEQ ID NO: 206353 - DNA, 25 bp, Artificial
  Probe
tacgtacatccgaatgcaaagcccc

SEQ ID NO: 206354 - DNA, 25 bp, Artificial
  Probe
ataagcgtttggttctccatgacat

SEQ ID NO: 206355 - DNA, 25 bp, Artificial
  Probe
caagtcacagaaagttcctaaaagt

SEQ ID NO: 206356 - DNA, 25 bp, Artificial
  Probe
ccctacatggcctatctagaaattg

SEQ ID NO: 206357 - DNA, 25 bp, Artificial
  Probe
gaaatctggagctggaatcgtgcag

SEQ ID NO: 206358 - DNA, 25 bp, Artificial
  Probe
tgtgcaggacggtctataaccgtcc

SEQ ID NO: 206359 - DNA, 25 bp, Artificial
  Probe
taaagatgagactccaggagcccca

SEQ ID NO: 206360 - DNA, 25 bp, Artificial
  Probe
tctcctgggttccagcaccaaagct

SEQ ID NO: 206361 - DNA, 25 bp, Artificial
  Probe
ggacggtctataaccgtcctcctag

SEQ ID NO: 206362 - DNA, 25 bp, Artificial
  Probe
atctcgggccagtgtgtgaggaaat

SEQ ID NO: 206363 - DNA, 25 bp, Artificial
  Probe
cccctcagagaggatgaatctccat

SEQ ID NO: 206364 - DNA, 25 bp, Artificial
  Probe
tgagactccaggagccccaatcctg

SEQ ID NO: 206365 - DNA, 25 bp, Artificial
  Probe
tcgggggcacggagtgcataccaca

SEQ ID NO: 206366 - DNA, 25 bp, Artificial
  Probe
cagaatctcccattacagaccctgg

SEQ ID NO: 206367 - DNA, 25 bp, Artificial
  Probe
aacacaagtcccagttgtgtgtggg

SEQ ID NO: 206368 - DNA, 25 bp, Artificial
  Probe
tcatccaaactatgataagcgtttg

SEQ ID NO: 206369 - DNA, 25 bp, Artificial
  Probe
gactgcagctcactgtgcaggacgg

SEQ ID NO: 206370 - DNA, 25 bp, Artificial
  Probe
cagcaccaaagctggggagatcatc

SEQ ID NO: 206371 - DNA, 25 bp, Artificial
  Probe
taactctggatctcgggccagtgtg

SEQ ID NO: 206372 - DNA, 25 bp, Artificial
  Probe
ctcgggccagtgtgtgaggaaatct

SEQ ID NO: 206373 - DNA, 25 bp, Artificial
  Probe
cacactgcaggaagtaaagatgaga

SEQ ID NO: 206374 - DNA, 25 bp, Artificial
  Probe
gtcccagttgtgtgtgggcaacccc

SEQ ID NO: 206375 - DNA, 25 bp, Artificial
  Probe
cccagtcctgttcaagatggtgaaa

SEQ ID NO: 206376 - DNA, 25 bp, Artificial
  Probe
ctggacacaagggtttgtctttcaa

SEQ ID NO: 206377 - DNA, 25 bp, Artificial
  Probe
tctttcaatagatcgcagcgaggga

SEQ ID NO: 206378 - DNA, 25 bp, Artificial
  Probe
ggacacaagggtttgtctttcaata

SEQ ID NO: 206379 - DNA, 25 bp, Artificial
  Probe
tcctgttcaagatggtgaaatgggc

SEQ ID NO: 206380 - DNA, 25 bp, Artificial
  Probe
ttgtctttcaatagatcgcagcgag

SEQ ID NO: 206381 - DNA, 25 bp, Artificial
  Probe
actaataaagctggacacaagggtt

SEQ ID NO: 206382 - DNA, 25 bp, Artificial
  Probe
cacaagggtttgtctttcaatagat

SEQ ID NO: 206383 - DNA, 25 bp, Artificial
  Probe
aagctggacacaagggtttgtcttt

SEQ ID NO: 206384 - DNA, 25 bp, Artificial
  Probe
ctaataaagctggacacaagggttt

SEQ ID NO: 206385 - DNA, 25 bp, Artificial
  Probe
tcaatagatcgcagcgagggagctg

SEQ ID NO: 206386 - DNA, 25 bp, Artificial
  Probe
gcccagtcctgttcaagatggtgaa

SEQ ID NO: 206387 - DNA, 25 bp, Artificial
  Probe
tagatcgcagcgagggagctgctct

SEQ ID NO: 206388 - DNA, 25 bp, Artificial
  Probe
ataaagctggacacaagggtttgtc

SEQ ID NO: 206389 - DNA, 25 bp, Artificial
  Probe
ggcccagtcctgttcaagatggtga

SEQ ID NO: 206390 - DNA, 25 bp, Artificial
  Probe
gtttgtctttcaatagatcgcagcg

SEQ ID NO: 206391 - DNA, 25 bp, Artificial
  Probe
agatcgcagcgagggagctgctctg

SEQ ID NO: 206392 - DNA, 25 bp, Artificial
  Probe
agggtttgtctttcaatagatcgca

SEQ ID NO: 206393 - DNA, 25 bp, Artificial
  Probe
acacaagggtttgtctttcaataga

SEQ ID NO: 206394 - DNA, 25 bp, Artificial
  Probe
taaggcccagtcctgttcaagatgg

SEQ ID NO: 206395 - DNA, 25 bp, Artificial
  Probe
agctggacacaagggtttgtctttc

SEQ ID NO: 206396 - DNA, 25 bp, Artificial
  Probe
gtcctgttcaagatggtgaaatggg

SEQ ID NO: 206397 - DNA, 25 bp, Artificial
  Probe
taataaagctggacacaagggtttg

SEQ ID NO: 206398 - DNA, 25 bp, Artificial
  Probe
aaggcccagtcctgttcaagatggt

SEQ ID NO: 206399 - DNA, 25 bp, Artificial
  Probe
caatagatcgcagcgagggagctgc

SEQ ID NO: 206400 - DNA, 25 bp, Artificial
  Probe
gatggtgaaatgggcccctgccgca

SEQ ID NO: 206401 - DNA, 25 bp, Artificial
  Probe
tcgcagcgagggagctgctctgcta

SEQ ID NO: 206402 - DNA, 25 bp, Artificial
  Probe
atagatcgcagcgagggagctgctc

SEQ ID NO: 206403 - DNA, 25 bp, Artificial
  Probe
ataaggcccagtcctgttcaagatg

SEQ ID NO: 206404 - DNA, 25 bp, Artificial
  Probe
cgcagcgagggagctgctctgctac

SEQ ID NO: 206405 - DNA, 25 bp, Artificial
  Probe
acaagggtttgtctttcaatagatc

SEQ ID NO: 206406 - DNA, 25 bp, Artificial
  Probe
tggacacaagggtttgtctttcaat

SEQ ID NO: 206407 - DNA, 25 bp, Artificial
  Probe
taaagctggacacaagggtttgtct

SEQ ID NO: 206408 - DNA, 25 bp, Artificial
  Probe
tttgtctttcaatagatcgcagcga

SEQ ID NO: 206409 - DNA, 25 bp, Artificial
  Probe
gtctttcaatagatcgcagcgaggg

SEQ ID NO: 206410 - DNA, 25 bp, Artificial
  Probe
ctttcaatagatcgcagcgagggag

SEQ ID NO: 206411 - DNA, 25 bp, Artificial
  Probe
aagggtttgtctttcaatagatcgc

SEQ ID NO: 206412 - DNA, 25 bp, Artificial
  Probe
caagggtttgtctttcaatagatcg

SEQ ID NO: 206413 - DNA, 25 bp, Artificial
  Probe
atggtgaaatgggcccctgccgcag

SEQ ID NO: 206414 - DNA, 25 bp, Artificial
  Probe
gggtttgtctttcaatagatcgcag

SEQ ID NO: 206415 - DNA, 25 bp, Artificial
  Probe
cagtcctgttcaagatggtgaaatg

SEQ ID NO: 206416 - DNA, 25 bp, Artificial
  Probe
aaagctggacacaagggtttgtctt

SEQ ID NO: 206417 - DNA, 25 bp, Artificial
  Probe
aggcccagtcctgttcaagatggtg

SEQ ID NO: 206418 - DNA, 25 bp, Artificial
  Probe
ggtttgtctttcaatagatcgcagc

SEQ ID NO: 206419 - DNA, 25 bp, Artificial
  Probe
ccagtcctgttcaagatggtgaaat

SEQ ID NO: 206420 - DNA, 25 bp, Artificial
  Probe
tgtctttcaatagatcgcagcgagg

SEQ ID NO: 206421 - DNA, 25 bp, Artificial
  Probe
aatgtatttccgagcattacgtacc

SEQ ID NO: 206422 - DNA, 25 bp, Artificial
  Probe
tgaaatcgatgtccagttgagggtc

SEQ ID NO: 206423 - DNA, 25 bp, Artificial
  Probe
ctggcaaaagatcacatccgaagag

SEQ ID NO: 206424 - DNA, 25 bp, Artificial
  Probe
ggttctctggaagagcagctgtaga

SEQ ID NO: 206425 - DNA, 25 bp, Artificial
  Probe
attctctggattatagtacaatctg

SEQ ID NO: 206426 - DNA, 25 bp, Artificial
  Probe
tctggcttgaatgcagacattctct

SEQ ID NO: 206427 - DNA, 25 bp, Artificial
  Probe
ctctggaagagcagctgtagagaga

SEQ ID NO: 206428 - DNA, 25 bp, Artificial
  Probe
acaatctggctgtaacacagacaca

SEQ ID NO: 206429 - DNA, 25 bp, Artificial
  Probe
cccgaatgtatttccgagcattacg

SEQ ID NO: 206430 - DNA, 25 bp, Artificial
  Probe
tctggctgtaacacagacacaccct

SEQ ID NO: 206431 - DNA, 25 bp, Artificial
  Probe
gtgtttcacccgaatgtatttccga

SEQ ID NO: 206432 - DNA, 25 bp, Artificial
  Probe
gctgtaacacagacacacccttagt

SEQ ID NO: 206433 - DNA, 25 bp, Artificial
  Probe
gacatcgggtccttacagatggtta

SEQ ID NO: 206434 - DNA, 25 bp, Artificial
  Probe
ccagttgagggtcagacagagtgac

SEQ ID NO: 206435 - DNA, 25 bp, Artificial
  Probe
tccagttgagggtcagacagagtga

SEQ ID NO: 206436 - DNA, 25 bp, Artificial
  Probe
tccagcaatttgtgaattcaataga

SEQ ID NO: 206437 - DNA, 25 bp, Artificial
  Probe
attatagtacaatctggctgtaaca

SEQ ID NO: 206438 - DNA, 25 bp, Artificial
  Probe
gcaaaagatcacatccgaagagctt

SEQ ID NO: 206439 - DNA, 25 bp, Artificial
  Probe
tatgagtgtttcacccgaatgtatt

SEQ ID NO: 206440 - DNA, 25 bp, Artificial
  Probe
acatggtttctctggcaaaagatca

SEQ ID NO: 206441 - DNA, 25 bp, Artificial
  Probe
atccagcaatttgtgaattcaatag

SEQ ID NO: 206442 - DNA, 25 bp, Artificial
  Probe
agatcacatccgaagagcttctagg

SEQ ID NO: 206443 - DNA, 25 bp, Artificial
  Probe
ggtccttacagatggttataagcta

SEQ ID NO: 206444 - DNA, 25 bp, Artificial
  Probe
gtatttccgagcattacgtaccttc

SEQ ID NO: 206445 - DNA, 25 bp, Artificial
  Probe
tccctaacagtgaaggaaagttagt

SEQ ID NO: 206446 - DNA, 25 bp, Artificial
  Probe
agcttctaggtttatatgatctggc

SEQ ID NO: 206447 - DNA, 25 bp, Artificial
  Probe
gatgtccagttgagggtcagacaga

SEQ ID NO: 206448 - DNA, 25 bp, Artificial
  Probe
agtagtcacttttgaaatcgatgtc

SEQ ID NO: 206449 - DNA, 25 bp, Artificial
  Probe
gagcattacgtaccttcctagaact

SEQ ID NO: 206450 - DNA, 25 bp, Artificial
  Probe
atccctaacagtgaaggaaagttag

SEQ ID NO: 206451 - DNA, 25 bp, Artificial
  Probe
ttccgagcattacgtaccttcctag

SEQ ID NO: 206452 - DNA, 25 bp, Artificial
  Probe
tctctggcaaaagatcacatccgaa

SEQ ID NO: 206453 - DNA, 25 bp, Artificial
  Probe
atctggcttgaatgcagacattctc

SEQ ID NO: 206454 - DNA, 25 bp, Artificial
  Probe
gtacaatctggctgtaacacagaca

SEQ ID NO: 206455 - DNA, 25 bp, Artificial
  Probe
tggttataagctaccatgtggatac

SEQ ID NO: 206456 - DNA, 25 bp, Artificial
  Probe
aagatgtgctcaattcacgtgagaa

SEQ ID NO: 206457 - DNA, 25 bp, Artificial
  Probe
cttttgaaatcgatgtccagttgag

SEQ ID NO: 206458 - DNA, 25 bp, Artificial
  Probe
cttgaatgcagacattctctggatt

SEQ ID NO: 206459 - DNA, 25 bp, Artificial
  Probe
ttacttaaaccagaaaaggacatcg

SEQ ID NO: 206460 - DNA, 25 bp, Artificial
  Probe
ttctctggattatagtacaatctgg

SEQ ID NO: 206461 - DNA, 25 bp, Artificial
  Probe
aaggacatcgggtccttacagatgg

SEQ ID NO: 206462 - DNA, 25 bp, Artificial
  Probe
ccgaagagcttctaggtttatatga

SEQ ID NO: 206463 - DNA, 25 bp, Artificial
  Probe
aagctaccatgtggatactaggaat

SEQ ID NO: 206464 - DNA, 25 bp, Artificial
  Probe
tatagtacaatctggctgtaacaca

SEQ ID NO: 206465 - DNA, 25 bp, Artificial
  Probe
tagtacctccaacatggtttctctg

SEQ ID NO: 206466 - DNA, 25 bp, Artificial
  Probe
ggtttctctggcaaaagatcacatc

SEQ ID NO: 206467 - DNA, 25 bp, Artificial
  Probe
accccgatgcaattcaccctggaag

SEQ ID NO: 206468 - DNA, 25 bp, Artificial
  Probe
aagatcgcttcatggcttccaaccc

SEQ ID NO: 206469 - DNA, 25 bp, Artificial
  Probe
caactggactctaaggagaggtcca

SEQ ID NO: 206470 - DNA, 25 bp, Artificial
  Probe
aacattgacaagaggttgctgcttc

SEQ ID NO: 206471 - DNA, 25 bp, Artificial
  Probe
tgtctgctgctatcattcagcgtaa

SEQ ID NO: 206472 - DNA, 25 bp, Artificial
  Probe
cagcctctgaaggtaaagtatccgt

SEQ ID NO: 206473 - DNA, 25 bp, Artificial
  Probe
ctgaggagaactccattgtgcaagt

SEQ ID NO: 206474 - DNA, 25 bp, Artificial
  Probe
tcttcgaatccagatggaagatcgc

SEQ ID NO: 206475 - DNA, 25 bp, Artificial
  Probe
actgctgaggagaactccattgtgc

SEQ ID NO: 206476 - DNA, 25 bp, Artificial
  Probe
agacggatgggagttcctccacaac

SEQ ID NO: 206477 - DNA, 25 bp, Artificial
  Probe
tcaattgtttacagcctctgaaggt

SEQ ID NO: 206478 - DNA, 25 bp, Artificial
  Probe
tctgtcactgccactctgtgagaca

SEQ ID NO: 206479 - DNA, 25 bp, Artificial
  Probe
cccgatgcaattcaccctggaagct

SEQ ID NO: 206480 - DNA, 25 bp, Artificial
  Probe
tgactgtttcaacaaatactcaagg

SEQ ID NO: 206481 - DNA, 25 bp, Artificial
  Probe
gtaaagtatccgtgtcaactggact

SEQ ID NO: 206482 - DNA, 25 bp, Artificial
  Probe
caaatactcaaggtcagtgcctata

SEQ ID NO: 206483 - DNA, 25 bp, Artificial
  Probe
cgaatccagatggaagatcgcttca

SEQ ID NO: 206484 - DNA, 25 bp, Artificial
  Probe
aaggtcagtgcctataccagacagt

SEQ ID NO: 206485 - DNA, 25 bp, Artificial
  Probe
tgctgaggagaactccattgtgcaa

SEQ ID NO: 206486 - DNA, 25 bp, Artificial
  Probe
tgtttcaacaaatactcaaggtcag

SEQ ID NO: 206487 - DNA, 25 bp, Artificial
  Probe
caccccagaaaagacggatgggagt

SEQ ID NO: 206488 - DNA, 25 bp, Artificial
  Probe
tgcaattcaccctggaagctcggtg

SEQ ID NO: 206489 - DNA, 25 bp, Artificial
  Probe
gacagtgacctctgtcactgccact

SEQ ID NO: 206490 - DNA, 25 bp, Artificial
  Probe
ggtatcaacattgacaagaggttgc

SEQ ID NO: 206491 - DNA, 25 bp, Artificial
  Probe
aggtccatgccaaactgactgtttc

SEQ ID NO: 206492 - DNA, 25 bp, Artificial
  Probe
tcaacattgacaagaggttgctgct

SEQ ID NO: 206493 - DNA, 25 bp, Artificial
  Probe
agtgacctctgtcactgccactctg

SEQ ID NO: 206494 - DNA, 25 bp, Artificial
  Probe
attcaccctggaagctcggtgaagg

SEQ ID NO: 206495 - DNA, 25 bp, Artificial
  Probe
actctgtgagacagggtatcaacat

SEQ ID NO: 206496 - DNA, 25 bp, Artificial
  Probe
ctaaggagaggtccatgccaaactg

SEQ ID NO: 206497 - DNA, 25 bp, Artificial
  Probe
acactgctgaggagaactccattgt

SEQ ID NO: 206498 - DNA, 25 bp, Artificial
  Probe
ctgctatcattcagcgtaattatag

SEQ ID NO: 206499 - DNA, 25 bp, Artificial
  Probe
actcaaggtcagtgcctataccaga

SEQ ID NO: 206500 - DNA, 25 bp, Artificial
  Probe
ctctaaggagaggtccatgccaaac

SEQ ID NO: 206501 - DNA, 25 bp, Artificial
  Probe
ttgtttacagcctctgaaggtaaag

SEQ ID NO: 206502 - DNA, 25 bp, Artificial
  Probe
gtccatgccaaactgactgtttcaa

SEQ ID NO: 206503 - DNA, 25 bp, Artificial
  Probe
tgacaagaggttgctgcttccatta

SEQ ID NO: 206504 - DNA, 25 bp, Artificial
  Probe
aaggagaggtccatgccaaactgac

SEQ ID NO: 206505 - DNA, 25 bp, Artificial
  Probe
caacaaatactcaaggtcagtgcct

SEQ ID NO: 206506 - DNA, 25 bp, Artificial
  Probe
gactgtttcaacaaatactcaaggt

SEQ ID NO: 206507 - DNA, 25 bp, Artificial
  Probe
agagatggacgctcttcgaatccag

SEQ ID NO: 206508 - DNA, 25 bp, Artificial
  Probe
tggactctaaggagaggtccatgcc

SEQ ID NO: 206509 - DNA, 25 bp, Artificial
  Probe
ggaagatcgcttcatggcttccaac

SEQ ID NO: 206510 - DNA, 25 bp, Artificial
  Probe
gatgggagttcctccacaacctctc

SEQ ID NO: 206511 - DNA, 25 bp, Artificial
  Probe
gacctctgtcactgccactctgtga

SEQ ID NO: 206512 - DNA, 25 bp, Artificial
  Probe
aatcaattgtttacagcctctgaag

SEQ ID NO: 206513 - DNA, 25 bp, Artificial
  Probe
ggttctgtgccctggaagaggacaa

SEQ ID NO: 206514 - DNA, 25 bp, Artificial
  Probe
taggtctcccctagtacacggcggg

SEQ ID NO: 206515 - DNA, 25 bp, Artificial
  Probe
gaggacgccatctccatttcccagg

SEQ ID NO: 206516 - DNA, 25 bp, Artificial
  Probe
gagctgccccggtctcagagatgaa

SEQ ID NO: 206517 - DNA, 25 bp, Artificial
  Probe
tctctgcctctgaccgagtgtgaag

SEQ ID NO: 206518 - DNA, 25 bp, Artificial
  Probe
ctatcccaggcgtcttctgagaagg

SEQ ID NO: 206519 - DNA, 25 bp, Artificial
  Probe
gaattaaaagctctagagagctgcc

SEQ ID NO: 206520 - DNA, 25 bp, Artificial
  Probe
ggggattcccactgggactccaact

SEQ ID NO: 206521 - DNA, 25 bp, Artificial
  Probe
tgccctggaagaggacaagccctcc

SEQ ID NO: 206522 - DNA, 25 bp, Artificial
  Probe
gtggtcaggcatggttctgtgccct

SEQ ID NO: 206523 - DNA, 25 bp, Artificial
  Probe
actgggactccaactcctcttcaga

SEQ ID NO: 206524 - DNA, 25 bp, Artificial
  Probe
gctctagagagctgccccggtctca

SEQ ID NO: 206525 - DNA, 25 bp, Artificial
  Probe
agaggacgccatctccatttcccag

SEQ ID NO: 206526 - DNA, 25 bp, Artificial
  Probe
ggcacataggtctcccctagtacac

SEQ ID NO: 206527 - DNA, 25 bp, Artificial
  Probe
agccaggcacataggtctcccctag

SEQ ID NO: 206528 - DNA, 25 bp, Artificial
  Probe
cctggccctgcctaggagagaggcc

SEQ ID NO: 206529 - DNA, 25 bp, Artificial
  Probe
tgaccgagtgtgaaggggattccca

SEQ ID NO: 206530 - DNA, 25 bp, Artificial
  Probe
cacatgggccgctgaactgtgtcca

SEQ ID NO: 206531 - DNA, 25 bp, Artificial
  Probe
ctcctggaagagtattactgttggg

SEQ ID NO: 206532 - DNA, 25 bp, Artificial
  Probe
cctctgaccgagtgtgaaggggatt

SEQ ID NO: 206533 - DNA, 25 bp, Artificial
  Probe
tccccaggactctgttctcctgttt

SEQ ID NO: 206534 - DNA, 25 bp, Artificial
  Probe
tggccctgcctaggagagaggccct

SEQ ID NO: 206535 - DNA, 25 bp, Artificial
  Probe
tggaactcagtctgcgctcctgttc

SEQ ID NO: 206536 - DNA, 25 bp, Artificial
  Probe
ttctagtcaggcttcacctgaggac

SEQ ID NO: 206537 - DNA, 25 bp, Artificial
  Probe
acggcgggccctgtccaaaggctga

SEQ ID NO: 206538 - DNA, 25 bp, Artificial
  Probe
caactcctcttcagacactgtggaa

SEQ ID NO: 206539 - DNA, 25 bp, Artificial
  Probe
tctgactatcccaggcgtcttctga

SEQ ID NO: 206540 - DNA, 25 bp, Artificial
  Probe
agagatgaattctgcccttccttcc

SEQ ID NO: 206541 - DNA, 25 bp, Artificial
  Probe
ctgtgtccagctgtgggcagctgca

SEQ ID NO: 206542 - DNA, 25 bp, Artificial
  Probe
ataggtctcccctagtacacggcgg

SEQ ID NO: 206543 - DNA, 25 bp, Artificial
  Probe
tcttcagacactgtggaagtgggag

SEQ ID NO: 206544 - DNA, 25 bp, Artificial
  Probe
ggcagctgcacagcagaggacgcca

SEQ ID NO: 206545 - DNA, 25 bp, Artificial
  Probe
ttccttcctctcctggaagagtatt

SEQ ID NO: 206546 - DNA, 25 bp, Artificial
  Probe
cccggtctcagagatgaattctgcc

SEQ ID NO: 206547 - DNA, 25 bp, Artificial
  Probe
aagagagggctgttccacatgggcc

SEQ ID NO: 206548 - DNA, 25 bp, Artificial
  Probe
cggggtctgactatcccaggcgtct

SEQ ID NO: 206549 - DNA, 25 bp, Artificial
  Probe
cagcccggggtctgactatcccagg

SEQ ID NO: 206550 - DNA, 25 bp, Artificial
  Probe
tgggactccaactcctcttcagaca

SEQ ID NO: 206551 - DNA, 25 bp, Artificial
  Probe
agtgctgccagaattaaaagctcta

SEQ ID NO: 206552 - DNA, 25 bp, Artificial
  Probe
ggctgttccacatgggccgctgaac

SEQ ID NO: 206553 - DNA, 25 bp, Artificial
  Probe
gcacagcagaggacgccatctccat

SEQ ID NO: 206554 - DNA, 25 bp, Artificial
  Probe
cacggcgggccctgtccaaaggctg

SEQ ID NO: 206555 - DNA, 25 bp, Artificial
  Probe
cagagatgaattctgcccttccttc

SEQ ID NO: 206556 - DNA, 25 bp, Artificial
  Probe
ggggtctctgcctctgaccgagtgt

SEQ ID NO: 206557 - DNA, 25 bp, Artificial
  Probe
gtagcctggccctgcctaggagaga

SEQ ID NO: 206558 - DNA, 25 bp, Artificial
  Probe
aggcatggttctgtgccctggaaga

SEQ ID NO: 206559 - DNA, 25 bp, Artificial
  Probe
ccttaaccctgaggttatagcgcat

SEQ ID NO: 206560 - DNA, 25 bp, Artificial
  Probe
tgaccagctccattccttaacgctg

SEQ ID NO: 206561 - DNA, 25 bp, Artificial
  Probe
ccttaacgctgaggttataaacgca

SEQ ID NO: 206562 - DNA, 25 bp, Artificial
  Probe
aggaacttggcctcagatccttgcc

SEQ ID NO: 206563 - DNA, 25 bp, Artificial
  Probe
ccagctccattccttaacgctgagg

SEQ ID NO: 206564 - DNA, 25 bp, Artificial
  Probe
ggttatagcgaatgcactgaccagc

SEQ ID NO: 206565 - DNA, 25 bp, Artificial
  Probe
gttataaacgcatgcactgaccagc

SEQ ID NO: 206566 - DNA, 25 bp, Artificial
  Probe
ccttaaccctgaggttatagcgaat

SEQ ID NO: 206567 - DNA, 25 bp, Artificial
  Probe
cagctccattccttaaccctgaggt

SEQ ID NO: 206568 - DNA, 25 bp, Artificial
  Probe
ctcacacaggtgataggaacttggc

SEQ ID NO: 206569 - DNA, 25 bp, Artificial
  Probe
cttaacgctgaggttataaacgcat

SEQ ID NO: 206570 - DNA, 25 bp, Artificial
  Probe
gaatgcactgaccagctccattcct

SEQ ID NO: 206571 - DNA, 25 bp, Artificial
  Probe
aacgcatgcactgaccagctccatt

SEQ ID NO: 206572 - DNA, 25 bp, Artificial
  Probe
gctccattccttaaccctgaggtta

SEQ ID NO: 206573 - DNA, 25 bp, Artificial
  Probe
gctccattccttaacgctgaggtta

SEQ ID NO: 206574 - DNA, 25 bp, Artificial
  Probe
atagcgcatgcactgaccagctcca

SEQ ID NO: 206575 - DNA, 25 bp, Artificial
  Probe
ttccttaacgctgaggttataaacg

SEQ ID NO: 206576 - DNA, 25 bp, Artificial
  Probe
ggttataaacgcatgcactgaccag

SEQ ID NO: 206577 - DNA, 25 bp, Artificial
  Probe
ccctgaggttatagcgcatgcactg

SEQ ID NO: 206578 - DNA, 25 bp, Artificial
  Probe
ggttataaacgcatgcactggcatg

SEQ ID NO: 206579 - DNA, 25 bp, Artificial
  Probe
ccctgaggttatagcacatgcactg

SEQ ID NO: 206580 - DNA, 25 bp, Artificial
  Probe
ggttatagcgcatgcactgaccagc

SEQ ID NO: 206581 - DNA, 25 bp, Artificial
  Probe
agatccttgcctgtaggtcaagtgc

SEQ ID NO: 206582 - DNA, 25 bp, Artificial
  Probe
ctttctaattagtcgacttgttaag

SEQ ID NO: 206583 - DNA, 25 bp, Artificial
  Probe
tgaccacgtccattccttaacgctg

SEQ ID NO: 206584 - DNA, 25 bp, Artificial
  Probe
accctgaggttatagcgcatgcact

SEQ ID NO: 206585 - DNA, 25 bp, Artificial
  Probe
cgctgaggttatagcgcatgcactg

SEQ ID NO: 206586 - DNA, 25 bp, Artificial
  Probe
agcgcatgcactgaccacgtccatt

SEQ ID NO: 206587 - DNA, 25 bp, Artificial
  Probe
agcgcatgcactgaccagctccatt

SEQ ID NO: 206588 - DNA, 25 bp, Artificial
  Probe
ttataaacgcatgcactgaccagct

SEQ ID NO: 206589 - DNA, 25 bp, Artificial
  Probe
tatagcgcatgcactgaccagctcc

SEQ ID NO: 206590 - DNA, 25 bp, Artificial
  Probe
gccatggaacgatctccccagacag

SEQ ID NO: 206591 - DNA, 25 bp, Artificial
  Probe
ttaaccctgaggttatagcgcatgc

SEQ ID NO: 206592 - DNA, 25 bp, Artificial
  Probe
gtccattccttaacgctgaggttat

SEQ ID NO: 206593 - DNA, 25 bp, Artificial
  Probe
gaccagctccattccttaacgctga

SEQ ID NO: 206594 - DNA, 25 bp, Artificial
  Probe
aaccctgaggttatagcgaatgcac

SEQ ID NO: 206595 - DNA, 25 bp, Artificial
  Probe
gtcgacttgttaagggccagcactt

SEQ ID NO: 206596 - DNA, 25 bp, Artificial
  Probe
agctccattccttaaccctgaggtt

SEQ ID NO: 206597 - DNA, 25 bp, Artificial
  Probe
agctccattccttaacgctgaggtt

SEQ ID NO: 206598 - DNA, 25 bp, Artificial
  Probe
ttaacgctgaggttataaacgcatg

SEQ ID NO: 206599 - DNA, 25 bp, Artificial
  Probe
taaccctgaggttatagcgcatgca

SEQ ID NO: 206600 - DNA, 25 bp, Artificial
  Probe
aggttatagcgcatgcactgaccag

SEQ ID NO: 206601 - DNA, 25 bp, Artificial
  Probe
agcacatgcactgaccagctccatt

SEQ ID NO: 206602 - DNA, 25 bp, Artificial
  Probe
taacgctgaggttataaacgcatgc

SEQ ID NO: 206603 - DNA, 25 bp, Artificial
  Probe
aaacgcatgcactggcatgcttagc

SEQ ID NO: 206604 - DNA, 25 bp, Artificial
  Probe
aaacgcatgcactgaccagctccat

SEQ ID NO: 206605 - DNA, 25 bp, Artificial
  Probe
tgagtttgaggaagtcagggcagga

SEQ ID NO: 206606 - DNA, 25 bp, Artificial
  Probe
ggcaggacaggaactctggggttga

SEQ ID NO: 206607 - DNA, 25 bp, Artificial
  Probe
cagcaatggcaaccaacagggatgg

SEQ ID NO: 206608 - DNA, 25 bp, Artificial
  Probe
gaactctggggttgaaagctgagtt

SEQ ID NO: 206609 - DNA, 25 bp, Artificial
  Probe
ctctggggttgaaagctgagttccc

SEQ ID NO: 206610 - DNA, 25 bp, Artificial
  Probe
ggtgagccagcaatggcaaccaaca

SEQ ID NO: 206611 - DNA, 25 bp, Artificial
  Probe
gtgagccagcaatggcaaccaacag

SEQ ID NO: 206612 - DNA, 25 bp, Artificial
  Probe
gttgaaagctgagttccccctccct

SEQ ID NO: 206613 - DNA, 25 bp, Artificial
  Probe
gtgggtgagccagcaatggcaacca

SEQ ID NO: 206614 - DNA, 25 bp, Artificial
  Probe
agaagggtgggtgagccagcaatgg

SEQ ID NO: 206615 - DNA, 25 bp, Artificial
  Probe
caacagggatggtgagtttgaggaa

SEQ ID NO: 206616 - DNA, 25 bp, Artificial
  Probe
ttgaggaagtcagggcaggacagga

SEQ ID NO: 206617 - DNA, 25 bp, Artificial
  Probe
aggaactctggggttgaaagctgag

SEQ ID NO: 206618 - DNA, 25 bp, Artificial
  Probe
gcaatggcaaccaacagggatggtg

SEQ ID NO: 206619 - DNA, 25 bp, Artificial
  Probe
caatggcaaccaacagggatggtga

SEQ ID NO: 206620 - DNA, 25 bp, Artificial
  Probe
tttgaggaagtcagggcaggacagg

SEQ ID NO: 206621 - DNA, 25 bp, Artificial
  Probe
tgggtgagccagcaatggcaaccaa

SEQ ID NO: 206622 - DNA, 25 bp, Artificial
  Probe
gtgagggctgagggaggctagaaga

SEQ ID NO: 206623 - DNA, 25 bp, Artificial
  Probe
gccagcaatggcaaccaacagggat

SEQ ID NO: 206624 - DNA, 25 bp, Artificial
  Probe
agtcagggcaggacaggaactctgg

SEQ ID NO: 206625 - DNA, 25 bp, Artificial
  Probe
agcaatggcaaccaacagggatggt

SEQ ID NO: 206626 - DNA, 25 bp, Artificial
  Probe
agccagcaatggcaaccaacaggga

SEQ ID NO: 206627 - DNA, 25 bp, Artificial
  Probe
caggacaggaactctggggttgaaa

SEQ ID NO: 206628 - DNA, 25 bp, Artificial
  Probe
atggcaaccaacagggatggtgagt

SEQ ID NO: 206629 - DNA, 25 bp, Artificial
  Probe
tgagggctgagggaggctagaagaa

SEQ ID NO: 206630 - DNA, 25 bp, Artificial
  Probe
gcaaccaacagggatggtgagtttg

SEQ ID NO: 206631 - DNA, 25 bp, Artificial
  Probe
ccagcaatggcaaccaacagggatg

SEQ ID NO: 206632 - DNA, 25 bp, Artificial
  Probe
gggtgagccagcaatggcaaccaac

SEQ ID NO: 206633 - DNA, 25 bp, Artificial
  Probe
gaaagctgagttccccctccctcct

SEQ ID NO: 206634 - DNA, 25 bp, Artificial
  Probe
gaagtcagggcaggacaggaactct

SEQ ID NO: 206635 - DNA, 25 bp, Artificial
  Probe
acctccgtgtgggtgagggctgagg

SEQ ID NO: 206636 - DNA, 25 bp, Artificial
  Probe
tgggtgagggctgagggaggctaga

SEQ ID NO: 206637 - DNA, 25 bp, Artificial
  Probe
ggtgggtgagccagcaatggcaacc

SEQ ID NO: 206638 - DNA, 25 bp, Artificial
  Probe
tgagccagcaatggcaaccaacagg

SEQ ID NO: 206639 - DNA, 25 bp, Artificial
  Probe
aatggcaaccaacagggatggtgag

SEQ ID NO: 206640 - DNA, 25 bp, Artificial
  Probe
ccgtgtgggtgagggctgagggagg

SEQ ID NO: 206641 - DNA, 25 bp, Artificial
  Probe
aggaagtcagggcaggacaggaact

SEQ ID NO: 206642 - DNA, 25 bp, Artificial
  Probe
tggcaaccaacagggatggtgagtt

SEQ ID NO: 206643 - DNA, 25 bp, Artificial
  Probe
actctggggttgaaagctgagttcc

SEQ ID NO: 206644 - DNA, 25 bp, Artificial
  Probe
caaccaacagggatggtgagtttga

SEQ ID NO: 206645 - DNA, 25 bp, Artificial
  Probe
aagtcagggcaggacaggaactctg

SEQ ID NO: 206646 - DNA, 25 bp, Artificial
  Probe
aactctggggttgaaagctgagttc

SEQ ID NO: 206647 - DNA, 25 bp, Artificial
  Probe
ggaagtcagggcaggacaggaactc

SEQ ID NO: 206648 - DNA, 25 bp, Artificial
  Probe
gcaggacaggaactctggggttgaa

SEQ ID NO: 206649 - DNA, 25 bp, Artificial
  Probe
tccctccttcagcagccctttctcc

SEQ ID NO: 206650 - DNA, 25 bp, Artificial
  Probe
aagaagggtgggtgagccagcaatg

SEQ ID NO: 206651 - DNA, 25 bp, Artificial
  Probe
tcattgtacctagaatcctgtcttg

SEQ ID NO: 206652 - DNA, 25 bp, Artificial
  Probe
gatcattgttcttgtggatttactc

SEQ ID NO: 206653 - DNA, 25 bp, Artificial
  Probe
tcacaaagctagaaaactggtacgc

SEQ ID NO: 206654 - DNA, 25 bp, Artificial
  Probe
aagactgaggaagctctgtgagcta

SEQ ID NO: 206655 - DNA, 25 bp, Artificial
  Probe
ctctgcagccagtccattatgaaga

SEQ ID NO: 206656 - DNA, 25 bp, Artificial
  Probe
tgtgttactcagtagattcttctag

SEQ ID NO: 206657 - DNA, 25 bp, Artificial
  Probe
atgggagtcttgtctttgtcatttc

SEQ ID NO: 206658 - DNA, 25 bp, Artificial
  Probe
gaacacaagctgatgcttttctcac

SEQ ID NO: 206659 - DNA, 25 bp, Artificial
  Probe
gttaggtcctcacctatatcaagtt

SEQ ID NO: 206660 - DNA, 25 bp, Artificial
  Probe
aagatgggctttaggaccatatcca

SEQ ID NO: 206661 - DNA, 25 bp, Artificial
  Probe
cctgccctatgcacatagttgtttt

SEQ ID NO: 206662 - DNA, 25 bp, Artificial
  Probe
tgtgctgctataatgggatttatcc

SEQ ID NO: 206663 - DNA, 25 bp, Artificial
  Probe
agaacagatacacaggctctctcac

SEQ ID NO: 206664 - DNA, 25 bp, Artificial
  Probe
cttgtggatttactctgtattaact

SEQ ID NO: 206665 - DNA, 25 bp, Artificial
  Probe
ctggtatttgggtgactggaacaca

SEQ ID NO: 206666 - DNA, 25 bp, Artificial
  Probe
tggcccacaaaaagggtctgtttgt

SEQ ID NO: 206667 - DNA, 25 bp, Artificial
  Probe
atgaaatttggcagccagaaccaga

SEQ ID NO: 206668 - DNA, 25 bp, Artificial
  Probe
ctgtagcttattgtctactttagag

SEQ ID NO: 206669 - DNA, 25 bp, Artificial
  Probe
ccattttggctatcttttagcatcg

SEQ ID NO: 206670 - DNA, 25 bp, Artificial
  Probe
tagacactgtagcttattgtctact

SEQ ID NO: 206671 - DNA, 25 bp, Artificial
  Probe
gagagagctgccagagagattcttc

SEQ ID NO: 206672 - DNA, 25 bp, Artificial
  Probe
accctatgcctttgtgcttgtcttt

SEQ ID NO: 206673 - DNA, 25 bp, Artificial
  Probe
tgcactctgaatattgagaacagat

SEQ ID NO: 206674 - DNA, 25 bp, Artificial
  Probe
cttctaggcttgctattttgtgtag

SEQ ID NO: 206675 - DNA, 25 bp, Artificial
  Probe
gggttctacgccagccagtgggcaa

SEQ ID NO: 206676 - DNA, 25 bp, Artificial
  Probe
ccattgggaagattccagaggatga

SEQ ID NO: 206677 - DNA, 25 bp, Artificial
  Probe
gtctttcttctggtgtgttaggtcc

SEQ ID NO: 206678 - DNA, 25 bp, Artificial
  Probe
cgccttactaaagaagaaagactga

SEQ ID NO: 206679 - DNA, 25 bp, Artificial
  Probe
acttggtctccattttggctatctt

SEQ ID NO: 206680 - DNA, 25 bp, Artificial
  Probe
caccttatgtcatagtcattcacgg

SEQ ID NO: 206681 - DNA, 25 bp, Artificial
  Probe
ctcccaaggttcattcccctgtgat

SEQ ID NO: 206682 - DNA, 25 bp, Artificial
  Probe
gatgtcccagcaagacccattacca

SEQ ID NO: 206683 - DNA, 25 bp, Artificial
  Probe
gctgtggtccactcattttcaactt

SEQ ID NO: 206684 - DNA, 25 bp, Artificial
  Probe
acacaaggcctacacaaagctactg

SEQ ID NO: 206685 - DNA, 25 bp, Artificial
  Probe
cctacctgccctatgcacatagttg

SEQ ID NO: 206686 - DNA, 25 bp, Artificial
  Probe
tagaatcctgtcttgttagaaccag

SEQ ID NO: 206687 - DNA, 25 bp, Artificial
  Probe
cagtgtgtcacaaaagcttttggaa

SEQ ID NO: 206688 - DNA, 25 bp, Artificial
  Probe
cattaccaacaccttcctggagaga

SEQ ID NO: 206689 - DNA, 25 bp, Artificial
  Probe
actttcctgcactctgaatattgag

SEQ ID NO: 206690 - DNA, 25 bp, Artificial
  Probe
caaagctactggtatttgggtgact

SEQ ID NO: 206691 - DNA, 25 bp, Artificial
  Probe
gttgccagctgattctaatttttct

SEQ ID NO: 206692 - DNA, 25 bp, Artificial
  Probe
tcccaaggttcattcccctgtgatc

SEQ ID NO: 206693 - DNA, 25 bp, Artificial
  Probe
ccctatgcctttgtgcttgtctttc

SEQ ID NO: 206694 - DNA, 25 bp, Artificial
  Probe
aaagcacagtaacttggtctccatt

SEQ ID NO: 206695 - DNA, 25 bp, Artificial
  Probe
tacgccagccagtgggcaagatttt

SEQ ID NO: 206696 - DNA, 25 bp, Artificial
  Probe
tggtacgccttactaaagaagaaag

SEQ ID NO: 206697 - DNA, 25 bp, Artificial
  Probe
ccgttgtggagctccgaaatctgaa

SEQ ID NO: 206698 - DNA, 25 bp, Artificial
  Probe
ggtacgttcatctaaatctcccctg

SEQ ID NO: 206699 - DNA, 25 bp, Artificial
  Probe
aatgagtttcactggcagaaagctg

SEQ ID NO: 206700 - DNA, 25 bp, Artificial
  Probe
ttcttcagaagagtgcttcagagag

SEQ ID NO: 206701 - DNA, 25 bp, Artificial
  Probe
tacagatcacccttctcagcactgg

SEQ ID NO: 206702 - DNA, 25 bp, Artificial
  Probe
tgagttggtggtgtgactagccttc

SEQ ID NO: 206703 - DNA, 25 bp, Artificial
  Probe
agagtgcttcagagagtcctctcct

SEQ ID NO: 206704 - DNA, 25 bp, Artificial
  Probe
gcactggaatattcctctgctttaa

SEQ ID NO: 206705 - DNA, 25 bp, Artificial
  Probe
gtgtgactagccttcttcagaagag

SEQ ID NO: 206706 - DNA, 25 bp, Artificial
  Probe
ttcagaagagtgcttcagagagtcc

SEQ ID NO: 206707 - DNA, 25 bp, Artificial
  Probe
gtggagctccgaaatctgaaatgag

SEQ ID NO: 206708 - DNA, 25 bp, Artificial
  Probe
gaaatgagtttcactggcagaaagc

SEQ ID NO: 206709 - DNA, 25 bp, Artificial
  Probe
ccactaattccgttgtggagctccg

SEQ ID NO: 206710 - DNA, 25 bp, Artificial
  Probe
actggaatattcctctgctttaaag

SEQ ID NO: 206711 - DNA, 25 bp, Artificial
  Probe
caagaagctccactaattccgttgt

SEQ ID NO: 206712 - DNA, 25 bp, Artificial
  Probe
catcttcacaagactgttacctggt

SEQ ID NO: 206713 - DNA, 25 bp, Artificial
  Probe
agtttcactggcagaaagctgagtt

SEQ ID NO: 206714 - DNA, 25 bp, Artificial
  Probe
gtgcttcagagagtcctctcctcct

SEQ ID NO: 206715 - DNA, 25 bp, Artificial
  Probe
cagaagagtgcttcagagagtcctc

SEQ ID NO: 206716 - DNA, 25 bp, Artificial
  Probe
agccttcttcagaagagtgcttcag

SEQ ID NO: 206717 - DNA, 25 bp, Artificial
  Probe
aattcaatttgttccatgggctcca

SEQ ID NO: 206718 - DNA, 25 bp, Artificial
  Probe
ttggtggtgtgactagccttcttca

SEQ ID NO: 206719 - DNA, 25 bp, Artificial
  Probe
tgttccatgggctccaaaactcaag

SEQ ID NO: 206720 - DNA, 25 bp, Artificial
  Probe
ctagccttcttcagaagagtgcttc

SEQ ID NO: 206721 - DNA, 25 bp, Artificial
  Probe
tactaagtcccttttgaattatgag

SEQ ID NO: 206722 - DNA, 25 bp, Artificial
  Probe
aaactcaaggcctgagcattattgt

SEQ ID NO: 206723 - DNA, 25 bp, Artificial
  Probe
tctgaaatgagtttcactggcagaa

SEQ ID NO: 206724 - DNA, 25 bp, Artificial
  Probe
ttctcagcactggaatattcctctg

SEQ ID NO: 206725 - DNA, 25 bp, Artificial
  Probe
gttacctggtacgttcatctaaatc

SEQ ID NO: 206726 - DNA, 25 bp, Artificial
  Probe
actagccttcttcagaagagtgctt

SEQ ID NO: 206727 - DNA, 25 bp, Artificial
  Probe
tttcactggcagaaagctgagttgg

SEQ ID NO: 206728 - DNA, 25 bp, Artificial
  Probe
ctaagtcccttttgaattatgagga

SEQ ID NO: 206729 - DNA, 25 bp, Artificial
  Probe
tcatcttcacaagactgttacctgg

SEQ ID NO: 206730 - DNA, 25 bp, Artificial
  Probe
tcactggcagaaagctgagttggtg

SEQ ID NO: 206731 - DNA, 25 bp, Artificial
  Probe
ctccgaaatctgaaatgagtttcac

SEQ ID NO: 206732 - DNA, 25 bp, Artificial
  Probe
tccatgggctccaaaactcaaggcc

SEQ ID NO: 206733 - DNA, 25 bp, Artificial
  Probe
ggcctgagcattattgtgaaacctt

SEQ ID NO: 206734 - DNA, 25 bp, Artificial
  Probe
atctgaaatgagtttcactggcaga

SEQ ID NO: 206735 - DNA, 25 bp, Artificial
  Probe
agaagctccactaattccgttgtgg

SEQ ID NO: 206736 - DNA, 25 bp, Artificial
  Probe
caatttgttccatgggctccaaaac

SEQ ID NO: 206737 - DNA, 25 bp, Artificial
  Probe
gctccaaaactcaaggcctgagcat

SEQ ID NO: 206738 - DNA, 25 bp, Artificial
  Probe
cctttctccaataaagtgtccagtg

SEQ ID NO: 206739 - DNA, 25 bp, Artificial
  Probe
gtgactagccttcttcagaagagtg

SEQ ID NO: 206740 - DNA, 25 bp, Artificial
  Probe
gaatattcctctgctttaaagccag

SEQ ID NO: 206741 - DNA, 25 bp, Artificial
  Probe
ataattcaatttgttccatgggctc

SEQ ID NO: 206742 - DNA, 25 bp, Artificial
  Probe
aagctccactaattccgttgtggag

SEQ ID NO: 206743 - DNA, 25 bp, Artificial
  Probe
tggcagtgcttcaggggtgctttct

SEQ ID NO: 206744 - DNA, 25 bp, Artificial
  Probe
tccaagagggctgagccttctcttc

SEQ ID NO: 206745 - DNA, 25 bp, Artificial
  Probe
gtctctgacctttcccagggctagc

SEQ ID NO: 206746 - DNA, 25 bp, Artificial
  Probe
ggttgtctctgacctttcccagggc

SEQ ID NO: 206747 - DNA, 25 bp, Artificial
  Probe
gctgagccttctcttctgtccgcag

SEQ ID NO: 206748 - DNA, 25 bp, Artificial
  Probe
gtgctttctggctcccagacatcta

SEQ ID NO: 206749 - DNA, 25 bp, Artificial
  Probe
gcttcaggggtgctttctggctccc

SEQ ID NO: 206750 - DNA, 25 bp, Artificial
  Probe
caggggtgctttctggctcccagac

SEQ ID NO: 206751 - DNA, 25 bp, Artificial
  Probe
tggctcccagacatctagggctcca

SEQ ID NO: 206752 - DNA, 25 bp, Artificial
  Probe
ctgggttgtctctgacctttcccag

SEQ ID NO: 206753 - DNA, 25 bp, Artificial
  Probe
actgggttgtctctgacctttccca

SEQ ID NO: 206754 - DNA, 25 bp, Artificial
  Probe
ctccaagagggctgagccttctctt

SEQ ID NO: 206755 - DNA, 25 bp, Artificial
  Probe
cagggccctgaggtctctgagcagt

SEQ ID NO: 206756 - DNA, 25 bp, Artificial
  Probe
gttgtctctgacctttcccagggct

SEQ ID NO: 206757 - DNA, 25 bp, Artificial
  Probe
cattcactgggttgtctctgacctt

SEQ ID NO: 206758 - DNA, 25 bp, Artificial
  Probe
gctagccttcactgccctagtggca

SEQ ID NO: 206759 - DNA, 25 bp, Artificial
  Probe
ggctcccagacatctagggctccag

SEQ ID NO: 206760 - DNA, 25 bp, Artificial
  Probe
ttcactgccctagtggcagtgcttc

SEQ ID NO: 206761 - DNA, 25 bp, Artificial
  Probe
ccattcactgggttgtctctgacct

SEQ ID NO: 206762 - DNA, 25 bp, Artificial
  Probe
ggctccagactccaagagggctgag

SEQ ID NO: 206763 - DNA, 25 bp, Artificial
  Probe
gcctatggccccagcttgctaggtc

SEQ ID NO: 206764 - DNA, 25 bp, Artificial
  Probe
ccttcactgccctagtggcagtgct

SEQ ID NO: 206765 - DNA, 25 bp, Artificial
  Probe
cagcgcctgctctctgcaacttgat

SEQ ID NO: 206766 - DNA, 25 bp, Artificial
  Probe
ttctggctcccagacatctagggct

SEQ ID NO: 206767 - DNA, 25 bp, Artificial
  Probe
catctagggctccagactccaagag

SEQ ID NO: 206768 - DNA, 25 bp, Artificial
  Probe
gctcccagacatctagggctccaga

SEQ ID NO: 206769 - DNA, 25 bp, Artificial
  Probe
gggctagccttcactgccctagtgg

SEQ ID NO: 206770 - DNA, 25 bp, Artificial
  Probe
tcccagacatctagggctccagact

SEQ ID NO: 206771 - DNA, 25 bp, Artificial
  Probe
atctagggctccagactccaagagg

SEQ ID NO: 206772 - DNA, 25 bp, Artificial
  Probe
tatggccccagcttgctaggtcacc

SEQ ID NO: 206773 - DNA, 25 bp, Artificial
  Probe
tgggttgtctctgacctttcccagg

SEQ ID NO: 206774 - DNA, 25 bp, Artificial
  Probe
caccccattcactgggttgtctctg

SEQ ID NO: 206775 - DNA, 25 bp, Artificial
  Probe
gcctgctctctgcaacttgatttcc

SEQ ID NO: 206776 - DNA, 25 bp, Artificial
  Probe
gcgcctgctctctgcaacttgattt

SEQ ID NO: 206777 - DNA, 25 bp, Artificial
  Probe
agggctccagactccaagagggctg

SEQ ID NO: 206778 - DNA, 25 bp, Artificial
  Probe
tctggctcccagacatctagggctc

SEQ ID NO: 206779 - DNA, 25 bp, Artificial
  Probe
cctatggccccagcttgctaggtca

SEQ ID NO: 206780 - DNA, 25 bp, Artificial
  Probe
gagggctgagccttctcttctgtcc

SEQ ID NO: 206781 - DNA, 25 bp, Artificial
  Probe
ccagactccaagagggctgagcctt

SEQ ID NO: 206782 - DNA, 25 bp, Artificial
  Probe
gtgcttcaggggtgctttctggctc

SEQ ID NO: 206783 - DNA, 25 bp, Artificial
  Probe
ccaagagggctgagccttctcttct

SEQ ID NO: 206784 - DNA, 25 bp, Artificial
  Probe
tttctggctcccagacatctagggc

SEQ ID NO: 206785 - DNA, 25 bp, Artificial
  Probe
gacatctagggctccagactccaag

SEQ ID NO: 206786 - DNA, 25 bp, Artificial
  Probe
agggctagccttcactgccctagtg

SEQ ID NO: 206787 - DNA, 25 bp, Artificial
  Probe
ctagggctccagactccaagagggc

SEQ ID NO: 206788 - DNA, 25 bp, Artificial
  Probe
ctccagactccaagagggctgagcc

SEQ ID NO: 206789 - DNA, 25 bp, Artificial
  Probe
tactaagtcggtaaaggtgagcctg

SEQ ID NO: 206790 - DNA, 25 bp, Artificial
  Probe
tcaccattactaagtcggtaaaggt

SEQ ID NO: 206791 - DNA, 25 bp, Artificial
  Probe
tgtattacgcaaagtaccaactgag

SEQ ID NO: 206792 - DNA, 25 bp, Artificial
  Probe
cgcaaagtaccaactgagccaaaaa

SEQ ID NO: 206793 - DNA, 25 bp, Artificial
  Probe
attacgcaaagtaccaactgagcca

SEQ ID NO: 206794 - DNA, 25 bp, Artificial
  Probe
atgtattacgcaaagtaccaactga

SEQ ID NO: 206795 - DNA, 25 bp, Artificial
  Probe
ttcaaatgcatgttcatgtatgtac

SEQ ID NO: 206796 - DNA, 25 bp, Artificial
  Probe
actaagatcggagtccattgcaaaa

SEQ ID NO: 206797 - DNA, 25 bp, Artificial
  Probe
aaggaatcacccaaggaagagaagg

SEQ ID NO: 206798 - DNA, 25 bp, Artificial
  Probe
agtccttgggggaattcaaatgcat

SEQ ID NO: 206799 - DNA, 25 bp, Artificial
  Probe
gtagccaaggaatcacccaaggaag

SEQ ID NO: 206800 - DNA, 25 bp, Artificial
  Probe
agatcggagtccattgcaaaaggtt

SEQ ID NO: 206801 - DNA, 25 bp, Artificial
  Probe
ttatgtttacctcactggtgcattt

SEQ ID NO: 206802 - DNA, 25 bp, Artificial
  Probe
aggaaatgatcaccattactaagtc

SEQ ID NO: 206803 - DNA, 25 bp, Artificial
  Probe
aggtcacttcacatgccatagtcaa

SEQ ID NO: 206804 - DNA, 25 bp, Artificial
  Probe
acctttgaggagaagctggtgtcaa

SEQ ID NO: 206805 - DNA, 25 bp, Artificial
  Probe
atcacccaaggaagagaaggtggag

SEQ ID NO: 206806 - DNA, 25 bp, Artificial
  Probe
catgaggagacctttgaggagaagc

SEQ ID NO: 206807 - DNA, 25 bp, Artificial
  Probe
aaatgcatgttcatgtatgtaccta

SEQ ID NO: 206808 - DNA, 25 bp, Artificial
  Probe
ctttgaggagaagctggtgtcaact

SEQ ID NO: 206809 - DNA, 25 bp, Artificial
  Probe
gatcaccattactaagtcggtaaag

SEQ ID NO: 206810 - DNA, 25 bp, Artificial
  Probe
agacctttgaggagaagctggtgtc

SEQ ID NO: 206811 - DNA, 25 bp, Artificial
  Probe
ggtcacttcacatgccatagtcaag

SEQ ID NO: 206812 - DNA, 25 bp, Artificial
  Probe
taaaggtgagcctggagaaagacac

SEQ ID NO: 206813 - DNA, 25 bp, Artificial
  Probe
ctcctcagtccttgggggaattcaa

SEQ ID NO: 206814 - DNA, 25 bp, Artificial
  Probe
agtccattgcaaaaggttaagccat

SEQ ID NO: 206815 - DNA, 25 bp, Artificial
  Probe
atgatcaccattactaagtcggtaa

SEQ ID NO: 206816 - DNA, 25 bp, Artificial
  Probe
acttcacatgccatagtcaaggaag

SEQ ID NO: 206817 - DNA, 25 bp, Artificial
  Probe
gcaaagtaccaactgagccaaaaat

SEQ ID NO: 206818 - DNA, 25 bp, Artificial
  Probe
aaggtgagcctggagaaagacacca

SEQ ID NO: 206819 - DNA, 25 bp, Artificial
  Probe
cttcacatgccatagtcaaggaagt

SEQ ID NO: 206820 - DNA, 25 bp, Artificial
  Probe
tgccatagtcaaggaagtcacccag

SEQ ID NO: 206821 - DNA, 25 bp, Artificial
  Probe
tttcaaaatgcatgtgattgacagc

SEQ ID NO: 206822 - DNA, 25 bp, Artificial
  Probe
tagaaaaggtcacttcacatgccat

SEQ ID NO: 206823 - DNA, 25 bp, Artificial
  Probe
agccaaggaatcacccaaggaagag

SEQ ID NO: 206824 - DNA, 25 bp, Artificial
  Probe
aaaggtcacttcacatgccatagtc

SEQ ID NO: 206825 - DNA, 25 bp, Artificial
  Probe
tgatcaccattactaagtcggtaaa

SEQ ID NO: 206826 - DNA, 25 bp, Artificial
  Probe
tcggagtccattgcaaaaggttaag

SEQ ID NO: 206827 - DNA, 25 bp, Artificial
  Probe
caatttcaaaatgcatgtgattgac

SEQ ID NO: 206828 - DNA, 25 bp, Artificial
  Probe
gtccattgcaaaaggttaagccata

SEQ ID NO: 206829 - DNA, 25 bp, Artificial
  Probe
atcggagtccattgcaaaaggttaa

SEQ ID NO: 206830 - DNA, 25 bp, Artificial
  Probe
caaatgcatgttcatgtatgtacct

SEQ ID NO: 206831 - DNA, 25 bp, Artificial
  Probe
gactaagatcggagtccattgcaaa

SEQ ID NO: 206832 - DNA, 25 bp, Artificial
  Probe
cctcctcagtccttgggggaattca

SEQ ID NO: 206833 - DNA, 25 bp, Artificial
  Probe
ttactaagtcggtaaaggtgagcct

SEQ ID NO: 206834 - DNA, 25 bp, Artificial
  Probe
tgaatacttatgtttacctcactgg

SEQ ID NO: 206835 - DNA, 25 bp, Artificial
  Probe
tactggacacgaaaactttgtctaa

SEQ ID NO: 206836 - DNA, 25 bp, Artificial
  Probe
cagtcgcagcactaaaaatggatga

SEQ ID NO: 206837 - DNA, 25 bp, Artificial
  Probe
ttactggacacgaaaactttgtcta

SEQ ID NO: 206838 - DNA, 25 bp, Artificial
  Probe
cttttattctgttactggacacgaa

SEQ ID NO: 206839 - DNA, 25 bp, Artificial
  Probe
ctctattgtacgtttacagtcgcag

SEQ ID NO: 206840 - DNA, 25 bp, Artificial
  Probe
actggacacgaaaactttgtctaat

SEQ ID NO: 206841 - DNA, 25 bp, Artificial
  Probe
ttacagtcgcagcactaaaaatgga

SEQ ID NO: 206842 - DNA, 25 bp, Artificial
  Probe
aggccttttattctgttactggaca

SEQ ID NO: 206843 - DNA, 25 bp, Artificial
  Probe
gttactggacacgaaaactttgtct

SEQ ID NO: 206844 - DNA, 25 bp, Artificial
  Probe
atgttttgctactcttgtcagacaa

SEQ ID NO: 206845 - DNA, 25 bp, Artificial
  Probe
tgtacgtttacagtcgcagcactaa

SEQ ID NO: 206846 - DNA, 25 bp, Artificial
  Probe
gctagtctatacttcaatgttaggg

SEQ ID NO: 206847 - DNA, 25 bp, Artificial
  Probe
ttctgttactggacacgaaaacttt

SEQ ID NO: 206848 - DNA, 25 bp, Artificial
  Probe
gggtttgctgcatctcagcagttgg

SEQ ID NO: 206849 - DNA, 25 bp, Artificial
  Probe
atgctagtctatacttcaatgttag

SEQ ID NO: 206850 - DNA, 25 bp, Artificial
  Probe
ctgttactggacacgaaaactttgt

SEQ ID NO: 206851 - DNA, 25 bp, Artificial
  Probe
taatgttttgctactcttgtcagac

SEQ ID NO: 206852 - DNA, 25 bp, Artificial
  Probe
tgctagtctatacttcaatgttagg

SEQ ID NO: 206853 - DNA, 25 bp, Artificial
  Probe
tctattgtacgtttacagtcgcagc

SEQ ID NO: 206854 - DNA, 25 bp, Artificial
  Probe
ctagtctatacttcaatgttagggg

SEQ ID NO: 206855 - DNA, 25 bp, Artificial
  Probe
ctattgtacgtttacagtcgcagca

SEQ ID NO: 206856 - DNA, 25 bp, Artificial
  Probe
ataatgttttgctactcttgtcaga

SEQ ID NO: 206857 - DNA, 25 bp, Artificial
  Probe
ttttattctgttactggacacgaaa

SEQ ID NO: 206858 - DNA, 25 bp, Artificial
  Probe
gtacgtttacagtcgcagcactaaa

SEQ ID NO: 206859 - DNA, 25 bp, Artificial
  Probe
ttgctactcttgtcagacaatggct

SEQ ID NO: 206860 - DNA, 25 bp, Artificial
  Probe
atgggtttgctgcatctcagcagtt

SEQ ID NO: 206861 - DNA, 25 bp, Artificial
  Probe
tactctattgtacgtttacagtcgc

SEQ ID NO: 206862 - DNA, 25 bp, Artificial
  Probe
tacagtcgcagcactaaaaatggat

SEQ ID NO: 206863 - DNA, 25 bp, Artificial
  Probe
tgataatgttttgctactcttgtca

SEQ ID NO: 206864 - DNA, 25 bp, Artificial
  Probe
actctattgtacgtttacagtcgca

SEQ ID NO: 206865 - DNA, 25 bp, Artificial
  Probe
atactctattgtacgtttacagtcg

SEQ ID NO: 206866 - DNA, 25 bp, Artificial
  Probe
gtcgcagcactaaaaatggatgaca

SEQ ID NO: 206867 - DNA, 25 bp, Artificial
  Probe
gccttttattctgttactggacacg

SEQ ID NO: 206868 - DNA, 25 bp, Artificial
  Probe
attgtacgtttacagtcgcagcact

SEQ ID NO: 206869 - DNA, 25 bp, Artificial
  Probe
gaaaggccttttattctgttactgg

SEQ ID NO: 206870 - DNA, 25 bp, Artificial
  Probe
tgttttgctactcttgtcagacaat

SEQ ID NO: 206871 - DNA, 25 bp, Artificial
  Probe
atgaaaggccttttattctgttact

SEQ ID NO: 206872 - DNA, 25 bp, Artificial
  Probe
agtcgcagcactaaaaatggatgac

SEQ ID NO: 206873 - DNA, 25 bp, Artificial
  Probe
gtttacagtcgcagcactaaaaatg

SEQ ID NO: 206874 - DNA, 25 bp, Artificial
  Probe
tattctgttactggacacgaaaact

SEQ ID NO: 206875 - DNA, 25 bp, Artificial
  Probe
gataatgttttgctactcttgtcag

SEQ ID NO: 206876 - DNA, 25 bp, Artificial
  Probe
tgaaaggccttttattctgttactg

SEQ ID NO: 206877 - DNA, 25 bp, Artificial
  Probe
ttttgctactcttgtcagacaatgg

SEQ ID NO: 206878 - DNA, 25 bp, Artificial
  Probe
tctgttactggacacgaaaactttg

SEQ ID NO: 206879 - DNA, 25 bp, Artificial
  Probe
ccttttattctgttactggacacga

SEQ ID NO: 206880 - DNA, 25 bp, Artificial
  Probe
acagtcgcagcactaaaaatggatg

SEQ ID NO: 206881 - DNA, 25 bp, Artificial
  Probe
ggctaagttgactgctcccaagaaa

SEQ ID NO: 206882 - DNA, 25 bp, Artificial
  Probe
atcaaacgggtacttgcagctctgc

SEQ ID NO: 206883 - DNA, 25 bp, Artificial
  Probe
gctaagttgactgctcccaagaaat

SEQ ID NO: 206884 - DNA, 25 bp, Artificial
  Probe
ggaactctagactcaaagatcaaac

SEQ ID NO: 206885 - DNA, 25 bp, Artificial
  Probe
caggtcatcgggaatatgttcaaat

SEQ ID NO: 206886 - DNA, 25 bp, Artificial
  Probe
ttgactgctcccaagaaatctgtga

SEQ ID NO: 206887 - DNA, 25 bp, Artificial
  Probe
atatgagccattggacctcacaggt

SEQ ID NO: 206888 - DNA, 25 bp, Artificial
  Probe
tatttcatatatgagccattggacc

SEQ ID NO: 206889 - DNA, 25 bp, Artificial
  Probe
agacacatgattctaaccaggtggg

SEQ ID NO: 206890 - DNA, 25 bp, Artificial
  Probe
ccttttagtcagagtttggggcttg

SEQ ID NO: 206891 - DNA, 25 bp, Artificial
  Probe
tctgtgacttggaactctagactca

SEQ ID NO: 206892 - DNA, 25 bp, Artificial
  Probe
tatgagccattggacctcacaggtc

SEQ ID NO: 206893 - DNA, 25 bp, Artificial
  Probe
actcaaagatcaaacgggtacttgc

SEQ ID NO: 206894 - DNA, 25 bp, Artificial
  Probe
taggcagttgtgtagccttttagtc

SEQ ID NO: 206895 - DNA, 25 bp, Artificial
  Probe
cttggaactctagactcaaagatca

SEQ ID NO: 206896 - DNA, 25 bp, Artificial
  Probe
ctctagactcaaagatcaaacgggt

SEQ ID NO: 206897 - DNA, 25 bp, Artificial
  Probe
ctcccaagaaatctgtgacttggaa

SEQ ID NO: 206898 - DNA, 25 bp, Artificial
  Probe
tgattctaaccaggtgggctaagtt

SEQ ID NO: 206899 - DNA, 25 bp, Artificial
  Probe
tgtcctgaattaacacagtgtgtgg

SEQ ID NO: 206900 - DNA, 25 bp, Artificial
  Probe
aaacgggtacttgcagctctgcttg

SEQ ID NO: 206901 - DNA, 25 bp, Artificial
  Probe
tggacctcacaggtcatcgggaata

SEQ ID NO: 206902 - DNA, 25 bp, Artificial
  Probe
catatatgagccattggacctcaca

SEQ ID NO: 206903 - DNA, 25 bp, Artificial
  Probe
tggaactctagactcaaagatcaaa

SEQ ID NO: 206904 - DNA, 25 bp, Artificial
  Probe
gaactctagactcaaagatcaaacg

SEQ ID NO: 206905 - DNA, 25 bp, Artificial
  Probe
gaaatctgtgacttggaactctaga

SEQ ID NO: 206906 - DNA, 25 bp, Artificial
  Probe
gatcaaacgggtacttgcagctctg

SEQ ID NO: 206907 - DNA, 25 bp, Artificial
  Probe
agccattggacctcacaggtcatcg

SEQ ID NO: 206908 - DNA, 25 bp, Artificial
  Probe
cctgaattaacacagtgtgtggtgt

SEQ ID NO: 206909 - DNA, 25 bp, Artificial
  Probe
aggcagttgtgtagccttttagtca

SEQ ID NO: 206910 - DNA, 25 bp, Artificial
  Probe
tgctcccaagaaatctgtgacttgg

SEQ ID NO: 206911 - DNA, 25 bp, Artificial
  Probe
ggaaactaggcagttgtgtagcctt

SEQ ID NO: 206912 - DNA, 25 bp, Artificial
  Probe
actgctcccaagaaatctgtgactt

SEQ ID NO: 206913 - DNA, 25 bp, Artificial
  Probe
actaggcagttgtgtagccttttag

SEQ ID NO: 206914 - DNA, 25 bp, Artificial
  Probe
attggacctcacaggtcatcgggaa

SEQ ID NO: 206915 - DNA, 25 bp, Artificial
  Probe
tagccttttagtcagagtttggggc

SEQ ID NO: 206916 - DNA, 25 bp, Artificial
  Probe
cctcacaggtcatcgggaatatgtt

SEQ ID NO: 206917 - DNA, 25 bp, Artificial
  Probe
atttcatatatgagccattggacct

SEQ ID NO: 206918 - DNA, 25 bp, Artificial
  Probe
gattctaaccaggtgggctaagttg

SEQ ID NO: 206919 - DNA, 25 bp, Artificial
  Probe
gatgtcctgaattaacacagtgtgt

SEQ ID NO: 206920 - DNA, 25 bp, Artificial
  Probe
tggaaactaggcagttgtgtagcct

SEQ ID NO: 206921 - DNA, 25 bp, Artificial
  Probe
ttatttcatatatgagccattggac

SEQ ID NO: 206922 - DNA, 25 bp, Artificial
  Probe
caagaaatctgtgacttggaactct

SEQ ID NO: 206923 - DNA, 25 bp, Artificial
  Probe
aagacacatgattctaaccaggtgg

SEQ ID NO: 206924 - DNA, 25 bp, Artificial
  Probe
cattggacctcacaggtcatcggga

SEQ ID NO: 206925 - DNA, 25 bp, Artificial
  Probe
aaccaggtgggctaagttgactgct

SEQ ID NO: 206926 - DNA, 25 bp, Artificial
  Probe
attctaaccaggtgggctaagttga

SEQ ID NO: 206927 - DNA, 25 bp, Artificial
  Probe
acagactctccaagcctgaggtctt

SEQ ID NO: 206928 - DNA, 25 bp, Artificial
  Probe
aaggttacaaacagcatacactgga

SEQ ID NO: 206929 - DNA, 25 bp, Artificial
  Probe
gcgtgggcctttccacaaggttaca

SEQ ID NO: 206930 - DNA, 25 bp, Artificial
  Probe
ggttacaaacagcatacactggaga

SEQ ID NO: 206931 - DNA, 25 bp, Artificial
  Probe
cttatagtatcctttgggttcaaca

SEQ ID NO: 206932 - DNA, 25 bp, Artificial
  Probe
tccaagcctgaggtcttatagtatc

SEQ ID NO: 206933 - DNA, 25 bp, Artificial
  Probe
agcctgaggtcttatagtatccttt

SEQ ID NO: 206934 - DNA, 25 bp, Artificial
  Probe
gacagactctccaagcctgaggtct

SEQ ID NO: 206935 - DNA, 25 bp, Artificial
  Probe
gttacaaacagcatacactggagac

SEQ ID NO: 206936 - DNA, 25 bp, Artificial
  Probe
ctccaagcctgaggtcttatagtat

SEQ ID NO: 206937 - DNA, 25 bp, Artificial
  Probe
tctgcgtgggcctttccacaaggtt

SEQ ID NO: 206938 - DNA, 25 bp, Artificial
  Probe
ccaagcctgaggtcttatagtatcc

SEQ ID NO: 206939 - DNA, 25 bp, Artificial
  Probe
tacaaacagcatacactggagactc

SEQ ID NO: 206940 - DNA, 25 bp, Artificial
  Probe
aacagcatacactggagactctggt

SEQ ID NO: 206941 - DNA, 25 bp, Artificial
  Probe
caaacagcatacactggagactctg

SEQ ID NO: 206942 - DNA, 25 bp, Artificial
  Probe
atacactggagactctggtgggccg

SEQ ID NO: 206943 - DNA, 25 bp, Artificial
  Probe
gcctttccacaaggttacaaacagc

SEQ ID NO: 206944 - DNA, 25 bp, Artificial
  Probe
gacattatgacaacaacttccaggt

SEQ ID NO: 206945 - DNA, 25 bp, Artificial
  Probe
acactggagactctggtgggccgct

SEQ ID NO: 206946 - DNA, 25 bp, Artificial
  Probe
ctgcgacagactctccaagcctgag

SEQ ID NO: 206947 - DNA, 25 bp, Artificial
  Probe
ctctccaagcctgaggtcttatagt

SEQ ID NO: 206948 - DNA, 25 bp, Artificial
  Probe
gtatcctttgggttcaacatagttt

SEQ ID NO: 206949 - DNA, 25 bp, Artificial
  Probe
tctccaagcctgaggtcttatagta

SEQ ID NO: 206950 - DNA, 25 bp, Artificial
  Probe
gtcttatagtatcctttgggttcaa

SEQ ID NO: 206951 - DNA, 25 bp, Artificial
  Probe
tcaccctgggacattgtgttggact

SEQ ID NO: 206952 - DNA, 25 bp, Artificial
  Probe
gcgacagactctccaagcctgaggt

SEQ ID NO: 206953 - DNA, 25 bp, Artificial
  Probe
tatcctttgggttcaacatagtttg

SEQ ID NO: 206954 - DNA, 25 bp, Artificial
  Probe
aggctgcaccactggcaaaatgcag

SEQ ID NO: 206955 - DNA, 25 bp, Artificial
  Probe
tgcgacagactctccaagcctgagg

SEQ ID NO: 206956 - DNA, 25 bp, Artificial
  Probe
aggttacaaacagcatacactggag

SEQ ID NO: 206957 - DNA, 25 bp, Artificial
  Probe
atcctttgggttcaacatagtttgt

SEQ ID NO: 206958 - DNA, 25 bp, Artificial
  Probe
aagcctgaggtcttatagtatcctt

SEQ ID NO: 206959 - DNA, 25 bp, Artificial
  Probe
actctccaagcctgaggtcttatag

SEQ ID NO: 206960 - DNA, 25 bp, Artificial
  Probe
tacactggagactctggtgggccgc

SEQ ID NO: 206961 - DNA, 25 bp, Artificial
  Probe
ggtcttatagtatcctttgggttca

SEQ ID NO: 206962 - DNA, 25 bp, Artificial
  Probe
tgcaccactggcaaaatgcaggccc

SEQ ID NO: 206963 - DNA, 25 bp, Artificial
  Probe
agacattatgacaacaacttccagg

SEQ ID NO: 206964 - DNA, 25 bp, Artificial
  Probe
caccactggcaaaatgcaggcccta

SEQ ID NO: 206965 - DNA, 25 bp, Artificial
  Probe
acagcatacactggagactctggtg

SEQ ID NO: 206966 - DNA, 25 bp, Artificial
  Probe
ggcctttccacaaggttacaaacag

SEQ ID NO: 206967 - DNA, 25 bp, Artificial
  Probe
gcttgacctgcctgcgacagactct

SEQ ID NO: 206968 - DNA, 25 bp, Artificial
  Probe
tcttatagtatcctttgggttcaac

SEQ ID NO: 206969 - DNA, 25 bp, Artificial
  Probe
cgacagactctccaagcctgaggtc

SEQ ID NO: 206970 - DNA, 25 bp, Artificial
  Probe
tgcgtgggcctttccacaaggttac

SEQ ID NO: 206971 - DNA, 25 bp, Artificial
  Probe
caagcctgaggtcttatagtatcct

SEQ ID NO: 206972 - DNA, 25 bp, Artificial
  Probe
ctgcgtgggcctttccacaaggtta

SEQ ID NO: 206973 - DNA, 25 bp, Artificial
  Probe
taaagtccaggaagagattgaccgt

SEQ ID NO: 206974 - DNA, 25 bp, Artificial
  Probe
tggatgttacaaaccctcgtgattt

SEQ ID NO: 206975 - DNA, 25 bp, Artificial
  Probe
agctaaagtccaggaagagattgac

SEQ ID NO: 206976 - DNA, 25 bp, Artificial
  Probe
gagattgaccgtgtgattggcagac

SEQ ID NO: 206977 - DNA, 25 bp, Artificial
  Probe
tgtggcggccgcaagcttattcctc

SEQ ID NO: 206978 - DNA, 25 bp, Artificial
  Probe
tgtgattggcagacatcgcagcccc

SEQ ID NO: 206979 - DNA, 25 bp, Artificial
  Probe
attggatgttacaaaccctcgtgat

SEQ ID NO: 206980 - DNA, 25 bp, Artificial
  Probe
tagaagaacaccaggaatcattgga

SEQ ID NO: 206981 - DNA, 25 bp, Artificial
  Probe
tgagatatgctctcctgcttctgat

SEQ ID NO: 206982 - DNA, 25 bp, Artificial
  Probe
accctcgtgattttgttgattatta

SEQ ID NO: 206983 - DNA, 25 bp, Artificial
  Probe
caccaggaatcattggatgttacaa

SEQ ID NO: 206984 - DNA, 25 bp, Artificial
  Probe
cccacatgtcacagctaaagtccag

SEQ ID NO: 206985 - DNA, 25 bp, Artificial
  Probe
caaaccctcgtgattttgttgatta

SEQ ID NO: 206986 - DNA, 25 bp, Artificial
  Probe
aagatccagaaagcacatgcagttt

SEQ ID NO: 206987 - DNA, 25 bp, Artificial
  Probe
atgagcacaacattgagatatgctc

SEQ ID NO: 206988 - DNA, 25 bp, Artificial
  Probe
tggatctcattggtgcagggacaga

SEQ ID NO: 206989 - DNA, 25 bp, Artificial
  Probe
atcgcagcccctgcatgcaggatag

SEQ ID NO: 206990 - DNA, 25 bp, Artificial
  Probe
gtacccacatgtcacagctaaagtc

SEQ ID NO: 206991 - DNA, 25 bp, Artificial
  Probe
cattgagatatgctctcctgcttct

SEQ ID NO: 206992 - DNA, 25 bp, Artificial
  Probe
cctcgtgattttgttgattattacc

SEQ ID NO: 206993 - DNA, 25 bp, Artificial
  Probe
tgttacaaaccctcgtgattttgtt

SEQ ID NO: 206994 - DNA, 25 bp, Artificial
  Probe
atgcagtatcatggatctcattggt

SEQ ID NO: 206995 - DNA, 25 bp, Artificial
  Probe
ggaacattgaggaccgtgttcaaga

SEQ ID NO: 206996 - DNA, 25 bp, Artificial
  Probe
tgaaaatctgacatgcagtatcatg

SEQ ID NO: 206997 - DNA, 25 bp, Artificial
  Probe
ttgaggaccgtgttcaagaggaagc

SEQ ID NO: 206998 - DNA, 25 bp, Artificial
  Probe
acatgcagtatcatggatctcattg

SEQ ID NO: 206999 - DNA, 25 bp, Artificial
  Probe
tcacatgaaaatctgacatgcagta

SEQ ID NO: 207000 - DNA, 25 bp, Artificial
  Probe
gattggcagacatcgcagcccctgc

SEQ ID NO: 207001 - DNA, 25 bp, Artificial
  Probe
tctcattggtgcagggacagagaca

SEQ ID NO: 207002 - DNA, 25 bp, Artificial
  Probe
agaggaagcacagtgcctagtggaa

SEQ ID NO: 207003 - DNA, 25 bp, Artificial
  Probe
cagtgcctagtggaagaactgagga

SEQ ID NO: 207004 - DNA, 25 bp, Artificial
  Probe
gatgaagtacccacatgtcacagct

SEQ ID NO: 207005 - DNA, 25 bp, Artificial
  Probe
aagcacagtgcctagtggaagaact

SEQ ID NO: 207006 - DNA, 25 bp, Artificial
  Probe
accgtgttcaagaggaagcacagtg

SEQ ID NO: 207007 - DNA, 25 bp, Artificial
  Probe
ttctgatgaagtacccacatgtcac

SEQ ID NO: 207008 - DNA, 25 bp, Artificial
  Probe
gaagaacaccaggaatcattggatg

SEQ ID NO: 207009 - DNA, 25 bp, Artificial
  Probe
attcacatgaaaatctgacatgcag

SEQ ID NO: 207010 - DNA, 25 bp, Artificial
  Probe
gagacaatgagcacaacattgagat

SEQ ID NO: 207011 - DNA, 25 bp, Artificial
  Probe
aaatctgacatgcagtatcatggat

SEQ ID NO: 207012 - DNA, 25 bp, Artificial
  Probe
acattgagatatgctctcctgcttc

SEQ ID NO: 207013 - DNA, 25 bp, Artificial
  Probe
cgtgtgattggcagacatcgcagcc

SEQ ID NO: 207014 - DNA, 25 bp, Artificial
  Probe
tgaccgtgtgattggcagacatcgc

SEQ ID NO: 207015 - DNA, 25 bp, Artificial
  Probe
cattgaggaccgtgttcaagaggaa

SEQ ID NO: 207016 - DNA, 25 bp, Artificial
  Probe
cctgcatgcaggatagaaaacacat

SEQ ID NO: 207017 - DNA, 25 bp, Artificial
  Probe
ttaagatccagaaagcacatgcagt

SEQ ID NO: 207018 - DNA, 25 bp, Artificial
  Probe
catgaaaatctgacatgcagtatca

SEQ ID NO: 207019 - DNA, 25 bp, Artificial
  Probe
tgtttcctcattttcaatgtgatgg

SEQ ID NO: 207020 - DNA, 25 bp, Artificial
  Probe
aaaggccggctcagctgagacagaa

SEQ ID NO: 207021 - DNA, 25 bp, Artificial
  Probe
tgcaatgttccgttctgaggagtcc

SEQ ID NO: 207022 - DNA, 25 bp, Artificial
  Probe
gaggagcctaaacaagccgatgtgc

SEQ ID NO: 207023 - DNA, 25 bp, Artificial
  Probe
agggagatggctctgctactaccga

SEQ ID NO: 207024 - DNA, 25 bp, Artificial
  Probe
accttctgaggagaagaagggcgaa

SEQ ID NO: 207025 - DNA, 25 bp, Artificial
  Probe
cccagcaaggcaggagatgcacctt

SEQ ID NO: 207026 - DNA, 25 bp, Artificial
  Probe
agcaaatgtgccaattagcgtaact

SEQ ID NO: 207027 - DNA, 25 bp, Artificial
  Probe
gcggccccttcagaggaaaaggccg

SEQ ID NO: 207028 - DNA, 25 bp, Artificial
  Probe
ggagcctaaacaagccgatgtgcct

SEQ ID NO: 207029 - DNA, 25 bp, Artificial
  Probe
tccgttctgaggagtccaaaatatt

SEQ ID NO: 207030 - DNA, 25 bp, Artificial
  Probe
gcccagcaaggcaggagatgcacct

SEQ ID NO: 207031 - DNA, 25 bp, Artificial
  Probe
agtgctgctaaagctaccactgata

SEQ ID NO: 207032 - DNA, 25 bp, Artificial
  Probe
tgctgtgctgtatgagaagaaccaa

SEQ ID NO: 207033 - DNA, 25 bp, Artificial
  Probe
gccccttcagaggaaaaggccggct

SEQ ID NO: 207034 - DNA, 25 bp, Artificial
  Probe
ctcccgttgctgatggtgtggagaa

SEQ ID NO: 207035 - DNA, 25 bp, Artificial
  Probe
gaaggatgatgctcccgttgctgat

SEQ ID NO: 207036 - DNA, 25 bp, Artificial
  Probe
agccaccagccctaaggctgaggag

SEQ ID NO: 207037 - DNA, 25 bp, Artificial
  Probe
taaggctgcaaccaaaattcaggct

SEQ ID NO: 207038 - DNA, 25 bp, Artificial
  Probe
atgctcccgttgctgatggtgtgga

SEQ ID NO: 207039 - DNA, 25 bp, Artificial
  Probe
ttcaggctagcttccgtggacacat

SEQ ID NO: 207040 - DNA, 25 bp, Artificial
  Probe
ctaaacaagccgatgtgcctgctgc

SEQ ID NO: 207041 - DNA, 25 bp, Artificial
  Probe
taaacaagccgatgtgcctgctgct

SEQ ID NO: 207042 - DNA, 25 bp, Artificial
  Probe
tggctctgctactaccgatgcagcc

SEQ ID NO: 207043 - DNA, 25 bp, Artificial
  Probe
cctgctgcagaggatgctgccaagg

SEQ ID NO: 207044 - DNA, 25 bp, Artificial
  Probe
aaagtgctgctaaagctaccactga

SEQ ID NO: 207045 - DNA, 25 bp, Artificial
  Probe
ctcagctgagacagaaagtgctgct

SEQ ID NO: 207046 - DNA, 25 bp, Artificial
  Probe
gcaggagatgcaccttctgaggaga

SEQ ID NO: 207047 - DNA, 25 bp, Artificial
  Probe
ccttcagaggaaaaggccggctcag

SEQ ID NO: 207048 - DNA, 25 bp, Artificial
  Probe
aaattcaggctagcttccgtggaca

SEQ ID NO: 207049 - DNA, 25 bp, Artificial
  Probe
gtgatgcaccagctgctgaggccga

SEQ ID NO: 207050 - DNA, 25 bp, Artificial
  Probe
ctaaggctgaggagcccagcaaggc

SEQ ID NO: 207051 - DNA, 25 bp, Artificial
  Probe
caccagctgctgaggccgaggccaa

SEQ ID NO: 207052 - DNA, 25 bp, Artificial
  Probe
caaccaaaattcaggctagcttccg

SEQ ID NO: 207053 - DNA, 25 bp, Artificial
  Probe
aaagcagccaagctgaggaggagaa

SEQ ID NO: 207054 - DNA, 25 bp, Artificial
  Probe
ctgcagaggatgctgccaaggcagc

SEQ ID NO: 207055 - DNA, 25 bp, Artificial
  Probe
aagcagccaagctgaggaggagaaa

SEQ ID NO: 207056 - DNA, 25 bp, Artificial
  Probe
cagccctaaggctgaggagcccagc

SEQ ID NO: 207057 - DNA, 25 bp, Artificial
  Probe
agaaggatgatgctcccgttgctga

SEQ ID NO: 207058 - DNA, 25 bp, Artificial
  Probe
atgcggccccttcagaggaaaaggc

SEQ ID NO: 207059 - DNA, 25 bp, Artificial
  Probe
taaagctaccactgataactcgccg

SEQ ID NO: 207060 - DNA, 25 bp, Artificial
  Probe
ggctagcttccgtggacacataaca

SEQ ID NO: 207061 - DNA, 25 bp, Artificial
  Probe
ccgtggacacataacaaggaaaaag

SEQ ID NO: 207062 - DNA, 25 bp, Artificial
  Probe
gtttcctcattttcaatgtgatgga

SEQ ID NO: 207063 - DNA, 25 bp, Artificial
  Probe
tgcaccttctgaggagaagaagggc

SEQ ID NO: 207064 - DNA, 25 bp, Artificial
  Probe
ctgctgcagaggatgctgccaaggc

SEQ ID NO: 207065 - DNA, 25 bp, Artificial
  Probe
cttttagagaagattccctggactc

SEQ ID NO: 207066 - DNA, 25 bp, Artificial
  Probe
ccagcatcttttagagaagattccc

SEQ ID NO: 207067 - DNA, 25 bp, Artificial
  Probe
tcaggcacccggaatgtggactagc

SEQ ID NO: 207068 - DNA, 25 bp, Artificial
  Probe
tcttcagtgtccagatgtggtctgt

SEQ ID NO: 207069 - DNA, 25 bp, Artificial
  Probe
tcagtaccatctccagggcaaagat

SEQ ID NO: 207070 - DNA, 25 bp, Artificial
  Probe
ctccagggcaaagatccgaaccgtg

SEQ ID NO: 207071 - DNA, 25 bp, Artificial
  Probe
ttttagagaagattccctggactct

SEQ ID NO: 207072 - DNA, 25 bp, Artificial
  Probe
accagcatcttttagagaagattcc

SEQ ID NO: 207073 - DNA, 25 bp, Artificial
  Probe
tcagtgtccagatgtggtctgtgtg

SEQ ID NO: 207074 - DNA, 25 bp, Artificial
  Probe
cccggaatgtggactagccggctca

SEQ ID NO: 207075 - DNA, 25 bp, Artificial
  Probe
gcacctttcttcagtgtccagatgt

SEQ ID NO: 207076 - DNA, 25 bp, Artificial
  Probe
agcagcatcagtaccatctccaggg

SEQ ID NO: 207077 - DNA, 25 bp, Artificial
  Probe
ctacattgcttgctgggcacctttc

SEQ ID NO: 207078 - DNA, 25 bp, Artificial
  Probe
tggactctggttctgtacatctcag

SEQ ID NO: 207079 - DNA, 25 bp, Artificial
  Probe
tctgtacatctcaggcacccggaat

SEQ ID NO: 207080 - DNA, 25 bp, Artificial
  Probe
ccccaatgaagattctaccaatgtg

SEQ ID NO: 207081 - DNA, 25 bp, Artificial
  Probe
cctttcttcagtgtccagatgtggt

SEQ ID NO: 207082 - DNA, 25 bp, Artificial
  Probe
gaagattccctggactctggttctg

SEQ ID NO: 207083 - DNA, 25 bp, Artificial
  Probe
ctggcctacattgcttgctgggcac

SEQ ID NO: 207084 - DNA, 25 bp, Artificial
  Probe
atcgtgctggcctacattgcttgct

SEQ ID NO: 207085 - DNA, 25 bp, Artificial
  Probe
ctttgtcatcgtgctggcctacatt

SEQ ID NO: 207086 - DNA, 25 bp, Artificial
  Probe
gagaatgcccccaatgaagattcta

SEQ ID NO: 207087 - DNA, 25 bp, Artificial
  Probe
tacatctcaggcacccggaatgtgg

SEQ ID NO: 207088 - DNA, 25 bp, Artificial
  Probe
ttgtcatcgtgctggcctacattgc

SEQ ID NO: 207089 - DNA, 25 bp, Artificial
  Probe
gcccccaatgaagattctaccaatg

SEQ ID NO: 207090 - DNA, 25 bp, Artificial
  Probe
tcccgggtcagcagcatcagtacca

SEQ ID NO: 207091 - DNA, 25 bp, Artificial
  Probe
catctccagggcaaagatccgaacc

SEQ ID NO: 207092 - DNA, 25 bp, Artificial
  Probe
ttctgtacatctcaggcacccggaa

SEQ ID NO: 207093 - DNA, 25 bp, Artificial
  Probe
accttcccgggtcagcagcatcagt

SEQ ID NO: 207094 - DNA, 25 bp, Artificial
  Probe
tttagagaagattccctggactctg

SEQ ID NO: 207095 - DNA, 25 bp, Artificial
  Probe
caatgaagattctaccaatgtggct

SEQ ID NO: 207096 - DNA, 25 bp, Artificial
  Probe
gtctgtgtgggatgagaatgccccc

SEQ ID NO: 207097 - DNA, 25 bp, Artificial
  Probe
aggcacccggaatgtggactagccg

SEQ ID NO: 207098 - DNA, 25 bp, Artificial
  Probe
ttgctgggcacctttcttcagtgtc

SEQ ID NO: 207099 - DNA, 25 bp, Artificial
  Probe
gcacccggaatgtggactagccggc

SEQ ID NO: 207100 - DNA, 25 bp, Artificial
  Probe
ctttcttcagtgtccagatgtggtc

SEQ ID NO: 207101 - DNA, 25 bp, Artificial
  Probe
tacattgcttgctgggcacctttct

SEQ ID NO: 207102 - DNA, 25 bp, Artificial
  Probe
gagaagattccctggactctggttc

SEQ ID NO: 207103 - DNA, 25 bp, Artificial
  Probe
cgtgctggcctacattgcttgctgg

SEQ ID NO: 207104 - DNA, 25 bp, Artificial
  Probe
tgctgggcacctttcttcagtgtcc

SEQ ID NO: 207105 - DNA, 25 bp, Artificial
  Probe
gattccctggactctggttctgtac

SEQ ID NO: 207106 - DNA, 25 bp, Artificial
  Probe
agaatgcccccaatgaagattctac

SEQ ID NO: 207107 - DNA, 25 bp, Artificial
  Probe
cccaatgaagattctaccaatgtgg

SEQ ID NO: 207108 - DNA, 25 bp, Artificial
  Probe
agtaccatctccagggcaaagatcc

SEQ ID NO: 207109 - DNA, 25 bp, Artificial
  Probe
gaatgcccccaatgaagattctacc

SEQ ID NO: 207110 - DNA, 25 bp, Artificial
  Probe
ggtcagcagcatcagtaccatctcc

SEQ ID NO: 207111 - DNA, 25 bp, Artificial
  Probe
tccagtacatgagagtctgaggaca

SEQ ID NO: 207112 - DNA, 25 bp, Artificial
  Probe
ccttcaccagcacgtgtctaggctt

SEQ ID NO: 207113 - DNA, 25 bp, Artificial
  Probe
ttggttggacccaaatcaaacgctc

SEQ ID NO: 207114 - DNA, 25 bp, Artificial
  Probe
cttgctgcagacaacagacccagaa

SEQ ID NO: 207115 - DNA, 25 bp, Artificial
  Probe
cctcaacaagggagtgaatgactac

SEQ ID NO: 207116 - DNA, 25 bp, Artificial
  Probe
ccgggatgctgcatccagagaaggc

SEQ ID NO: 207117 - DNA, 25 bp, Artificial
  Probe
tctctgccccacttctgaatgtcag

SEQ ID NO: 207118 - DNA, 25 bp, Artificial
  Probe
aggctgtccccatggaggtctgtgc

SEQ ID NO: 207119 - DNA, 25 bp, Artificial
  Probe
acgcatgcacatgcatacactcacg

SEQ ID NO: 207120 - DNA, 25 bp, Artificial
  Probe
agagaccatgatttctaactaccga

SEQ ID NO: 207121 - DNA, 25 bp, Artificial
  Probe
ctccctctaccaaggcgtattaagc

SEQ ID NO: 207122 - DNA, 25 bp, Artificial
  Probe
tcaacgatgagctggccaagggctt

SEQ ID NO: 207123 - DNA, 25 bp, Artificial
  Probe
aagatgggcctcagaggccacagcg

SEQ ID NO: 207124 - DNA, 25 bp, Artificial
  Probe
ctgttatctccaaggctagaccacc

SEQ ID NO: 207125 - DNA, 25 bp, Artificial
  Probe
cagcctctaccctgatgtcaacgat

SEQ ID NO: 207126 - DNA, 25 bp, Artificial
  Probe
aacagtggtctctgccccacttctg

SEQ ID NO: 207127 - DNA, 25 bp, Artificial
  Probe
gcctcctgcttgctgcagacaacag

SEQ ID NO: 207128 - DNA, 25 bp, Artificial
  Probe
tgtaattccagatgcgtagcacatc

SEQ ID NO: 207129 - DNA, 25 bp, Artificial
  Probe
aggctagaccaccttttcactcttg

SEQ ID NO: 207130 - DNA, 25 bp, Artificial
  Probe
agaaggcgcaagtgagactgatcga

SEQ ID NO: 207131 - DNA, 25 bp, Artificial
  Probe
aacttggagcttcttggaacagtgg

SEQ ID NO: 207132 - DNA, 25 bp, Artificial
  Probe
ccccacagatggagattgaaggctt

SEQ ID NO: 207133 - DNA, 25 bp, Artificial
  Probe
tgcagacaacagacccagaaggaaa

SEQ ID NO: 207134 - DNA, 25 bp, Artificial
  Probe
tgagactgatcgaatccaaagtcgg

SEQ ID NO: 207135 - DNA, 25 bp, Artificial
  Probe
gcctgcgaggagagaccatgatttc

SEQ ID NO: 207136 - DNA, 25 bp, Artificial
  Probe
gagaccatgatttctaactaccgaa

SEQ ID NO: 207137 - DNA, 25 bp, Artificial
  Probe
acatgcatacactcacgcacgtgca

SEQ ID NO: 207138 - DNA, 25 bp, Artificial
  Probe
gcccgcgaatctgtcttccggcttg

SEQ ID NO: 207139 - DNA, 25 bp, Artificial
  Probe
gacctcgacttccagatccacaaga

SEQ ID NO: 207140 - DNA, 25 bp, Artificial
  Probe
tgaacctgttccaggcattcctcaa

SEQ ID NO: 207141 - DNA, 25 bp, Artificial
  Probe
ggcttctagccttattcccacagat

SEQ ID NO: 207142 - DNA, 25 bp, Artificial
  Probe
ggccacagcgggacctgccatttgt

SEQ ID NO: 207143 - DNA, 25 bp, Artificial
  Probe
gtcacgaatgtattcgtctcattaa

SEQ ID NO: 207144 - DNA, 25 bp, Artificial
  Probe
agattgaaggctttgtgatcctgcc

SEQ ID NO: 207145 - DNA, 25 bp, Artificial
  Probe
atgcatacactcacgcacgtgcacg

SEQ ID NO: 207146 - DNA, 25 bp, Artificial
  Probe
ccttcatgtctgacggagtgctggc

SEQ ID NO: 207147 - DNA, 25 bp, Artificial
  Probe
ccatggaggtctgtgcaagtgagaa

SEQ ID NO: 207148 - DNA, 25 bp, Artificial
  Probe
gaacaataagcctttgatcagactt

SEQ ID NO: 207149 - DNA, 25 bp, Artificial
  Probe
ggttttgagtgcaccttctcacctt

SEQ ID NO: 207150 - DNA, 25 bp, Artificial
  Probe
tttattgctagaccatctggtctga

SEQ ID NO: 207151 - DNA, 25 bp, Artificial
  Probe
gcctcagaggccacagcgggacctg

SEQ ID NO: 207152 - DNA, 25 bp, Artificial
  Probe
gaaagatgggcctcagaggccacag

SEQ ID NO: 207153 - DNA, 25 bp, Artificial
  Probe
tccacaagaacttcctatacttggg

SEQ ID NO: 207154 - DNA, 25 bp, Artificial
  Probe
taccgaacaataagcctttgatcag

SEQ ID NO: 207155 - DNA, 25 bp, Artificial
  Probe
ggctttgtgatcctgcccagctccg

SEQ ID NO: 207156 - DNA, 25 bp, Artificial
  Probe
cttgcctcctgcttgctgcagacaa

SEQ ID NO: 207157 - DNA, 25 bp, Artificial
  Probe
tctcccagctccagacagaggtgga

SEQ ID NO: 207158 - DNA, 25 bp, Artificial
  Probe
cgccctcaagggtggcaagaagcag

SEQ ID NO: 207159 - DNA, 25 bp, Artificial
  Probe
aggccaagcgcaaccacctgcgggt

SEQ ID NO: 207160 - DNA, 25 bp, Artificial
  Probe
aagcccacttgaaggacacccagct

SEQ ID NO: 207161 - DNA, 25 bp, Artificial
  Probe
gagaacatcgccatcgtggagcggc

SEQ ID NO: 207162 - DNA, 25 bp, Artificial
  Probe
acaccctgctgcaggcggagctgga

SEQ ID NO: 207163 - DNA, 25 bp, Artificial
  Probe
agaacatggagcagaccatcaagga

SEQ ID NO: 207164 - DNA, 25 bp, Artificial
  Probe
caagaagaacttggtgcggctgcag

SEQ ID NO: 207165 - DNA, 25 bp, Artificial
  Probe
gaggaacaggccaacaccaacctgt

SEQ ID NO: 207166 - DNA, 25 bp, Artificial
  Probe
tctcagacctgactgaacagctggg

SEQ ID NO: 207167 - DNA, 25 bp, Artificial
  Probe
ctcagtcaggccaatagaatagcct

SEQ ID NO: 207168 - DNA, 25 bp, Artificial
  Probe
ctaccagacagaggaagacaagaag

SEQ ID NO: 207169 - DNA, 25 bp, Artificial
  Probe
aggccaacaccaacctgtccaagtt

SEQ ID NO: 207170 - DNA, 25 bp, Artificial
  Probe
ggccaagcgcaaccacctgcgggtg

SEQ ID NO: 207171 - DNA, 25 bp, Artificial
  Probe
aggcccagaagcacttgaagaacgc

SEQ ID NO: 207172 - DNA, 25 bp, Artificial
  Probe
gtgcagctgctgcactcccagaaca

SEQ ID NO: 207173 - DNA, 25 bp, Artificial
  Probe
acaagaagaacttggtgcggctgca

SEQ ID NO: 207174 - DNA, 25 bp, Artificial
  Probe
aatatgaatgcttgactttgcctgt

SEQ ID NO: 207175 - DNA, 25 bp, Artificial
  Probe
gctgcagttgaaggtgaaggcctac

SEQ ID NO: 207176 - DNA, 25 bp, Artificial
  Probe
cctacaagcgccaggctgaagaggc

SEQ ID NO: 207177 - DNA, 25 bp, Artificial
  Probe
aaggtgaaggcctacaagcgccagg

SEQ ID NO: 207178 - DNA, 25 bp, Artificial
  Probe
cgagcgggtgcagctgctgcactcc

SEQ ID NO: 207179 - DNA, 25 bp, Artificial
  Probe
agcctcgctgttgctatcccacaat

SEQ ID NO: 207180 - DNA, 25 bp, Artificial
  Probe
cacctggagcgcatgaagaagaaca

SEQ ID NO: 207181 - DNA, 25 bp, Artificial
  Probe
caggagctgatcgagaccagcgagc

SEQ ID NO: 207182 - DNA, 25 bp, Artificial
  Probe
tggcgccaagcagaaaatgcacgat

SEQ ID NO: 207183 - DNA, 25 bp, Artificial
  Probe
tggagcggcgcaacaccctgctgca

SEQ ID NO: 207184 - DNA, 25 bp, Artificial
  Probe
gccaagaaggccatcacagatgccg

SEQ ID NO: 207185 - DNA, 25 bp, Artificial
  Probe
ccatgatggccgaggagctgaagaa

SEQ ID NO: 207186 - DNA, 25 bp, Artificial
  Probe
caccagcctcatcaaccagaagaag

SEQ ID NO: 207187 - DNA, 25 bp, Artificial
  Probe
ctgcagaaactggaggcccgggtcc

SEQ ID NO: 207188 - DNA, 25 bp, Artificial
  Probe
tggcaagaagcagctgcagaaactg

SEQ ID NO: 207189 - DNA, 25 bp, Artificial
  Probe
agggcgacctcaatgagatggagat

SEQ ID NO: 207190 - DNA, 25 bp, Artificial
  Probe
aggacctgcagcaccggctggacga

SEQ ID NO: 207191 - DNA, 25 bp, Artificial
  Probe
catcaaccagaagaagaagatggat

SEQ ID NO: 207192 - DNA, 25 bp, Artificial
  Probe
ccgcaaggtgcagcacgagctggat

SEQ ID NO: 207193 - DNA, 25 bp, Artificial
  Probe
gacctcaatgagatggagatccagc

SEQ ID NO: 207194 - DNA, 25 bp, Artificial
  Probe
agcgagcggcgcatcaaggagctca

SEQ ID NO: 207195 - DNA, 25 bp, Artificial
  Probe
aggcagagcagatcgccctcaaggg

SEQ ID NO: 207196 - DNA, 25 bp, Artificial
  Probe
ctcccagctccagacagaggtggag

SEQ ID NO: 207197 - DNA, 25 bp, Artificial
  Probe
ctgcaggacctggtggacaagctgc

SEQ ID NO: 207198 - DNA, 25 bp, Artificial
  Probe
atgaggaataacctgtccagcagaa

SEQ ID NO: 207199 - DNA, 25 bp, Artificial
  Probe
cggacattgccgagtcccaggtcaa

SEQ ID NO: 207200 - DNA, 25 bp, Artificial
  Probe
cctggagcgcatgaagaagaacatg

SEQ ID NO: 207201 - DNA, 25 bp, Artificial
  Probe
gaagaacgcccaagcccacttgaag

SEQ ID NO: 207202 - DNA, 25 bp, Artificial
  Probe
tgacgacctgaaggagaacatcgcc

SEQ ID NO: 207203 - DNA, 25 bp, Artificial
  Probe
tcaacgagatggagatccagctcag

SEQ ID NO: 207204 - DNA, 25 bp, Artificial
  Probe
tctcccagctccagacagaggtgga

SEQ ID NO: 207205 - DNA, 25 bp, Artificial
  Probe
gaacctactgcgactgcaggacctg

SEQ ID NO: 207206 - DNA, 25 bp, Artificial
  Probe
cgccctcaagggtggcaagaagcag

SEQ ID NO: 207207 - DNA, 25 bp, Artificial
  Probe
catgccaaccgcatggctgctgagg

SEQ ID NO: 207208 - DNA, 25 bp, Artificial
  Probe
cctcatcaaccagaagaagaagatg

SEQ ID NO: 207209 - DNA, 25 bp, Artificial
  Probe
gagaacatcgccatcgtggagcggc

SEQ ID NO: 207210 - DNA, 25 bp, Artificial
  Probe
atgccgccatgatggccgaggagct

SEQ ID NO: 207211 - DNA, 25 bp, Artificial
  Probe
tcgccatcgtggagcggcgcaacaa

SEQ ID NO: 207212 - DNA, 25 bp, Artificial
  Probe
gcatggctgctgaggcccagaaaca

SEQ ID NO: 207213 - DNA, 25 bp, Artificial
  Probe
aagtgaagagcctccagagtttgct

SEQ ID NO: 207214 - DNA, 25 bp, Artificial
  Probe
ggccatcacagatgccgccatgatg

SEQ ID NO: 207215 - DNA, 25 bp, Artificial
  Probe
gtgcagctgctgcactcccagaaca

SEQ ID NO: 207216 - DNA, 25 bp, Artificial
  Probe
agcagatcgccctcaagggtggcaa

SEQ ID NO: 207217 - DNA, 25 bp, Artificial
  Probe
caagatcctccgagcccagctggag

SEQ ID NO: 207218 - DNA, 25 bp, Artificial
  Probe
tcctccgagcccagctggagttcaa

SEQ ID NO: 207219 - DNA, 25 bp, Artificial
  Probe
cgagcgggtgcagctgctgcactcc

SEQ ID NO: 207220 - DNA, 25 bp, Artificial
  Probe
agagcaggagctgatcgagaccagc

SEQ ID NO: 207221 - DNA, 25 bp, Artificial
  Probe
caggagctgatcgagaccagcgagc

SEQ ID NO: 207222 - DNA, 25 bp, Artificial
  Probe
tggagcggcgcaacaacctgctgca

SEQ ID NO: 207223 - DNA, 25 bp, Artificial
  Probe
cagagcaggagctgatcgagaccag

SEQ ID NO: 207224 - DNA, 25 bp, Artificial
  Probe
gccaagaaggccatcacagatgccg

SEQ ID NO: 207225 - DNA, 25 bp, Artificial
  Probe
ccatgatggccgaggagctgaagaa

SEQ ID NO: 207226 - DNA, 25 bp, Artificial
  Probe
acaacctgctgcaggcggagctgga

SEQ ID NO: 207227 - DNA, 25 bp, Artificial
  Probe
caccagcctcatcaaccagaagaag

SEQ ID NO: 207228 - DNA, 25 bp, Artificial
  Probe
tggcaagaagcagctgcagaagctg

SEQ ID NO: 207229 - DNA, 25 bp, Artificial
  Probe
agatggagatccagctcagtcatgc

SEQ ID NO: 207230 - DNA, 25 bp, Artificial
  Probe
agatccagctcagtcatgccaaccg

SEQ ID NO: 207231 - DNA, 25 bp, Artificial
  Probe
agggcgacctcaacgagatggagat

SEQ ID NO: 207232 - DNA, 25 bp, Artificial
  Probe
tcagtcatgccaaccgcatggctgc

SEQ ID NO: 207233 - DNA, 25 bp, Artificial
  Probe
tgacgcagtccgtgccaatgacgac

SEQ ID NO: 207234 - DNA, 25 bp, Artificial
  Probe
aggacctgcagcaccggctggacga

SEQ ID NO: 207235 - DNA, 25 bp, Artificial
  Probe
cgacctgaaggagaacatcgccatc

SEQ ID NO: 207236 - DNA, 25 bp, Artificial
  Probe
agcgagcggcgcatcaaggagctca

SEQ ID NO: 207237 - DNA, 25 bp, Artificial
  Probe
aggcagagcagatcgccctcaaggg

SEQ ID NO: 207238 - DNA, 25 bp, Artificial
  Probe
ctcccagctccagacagaggtggag

SEQ ID NO: 207239 - DNA, 25 bp, Artificial
  Probe
gagcccagctggagttcaaccagat

SEQ ID NO: 207240 - DNA, 25 bp, Artificial
  Probe
agatcgccctcaagggtggcaagaa

SEQ ID NO: 207241 - DNA, 25 bp, Artificial
  Probe
accaacctgtccaagttccgcaagg

SEQ ID NO: 207242 - DNA, 25 bp, Artificial
  Probe
aggcccagaaacaagtgaagagcct

SEQ ID NO: 207243 - DNA, 25 bp, Artificial
  Probe
ctgctgaggcccagaaacaagtgaa

SEQ ID NO: 207244 - DNA, 25 bp, Artificial
  Probe
acagatgccgccatgatggccgagg

SEQ ID NO: 207245 - DNA, 25 bp, Artificial
  Probe
gggtgcagctgctgcactcccagaa

SEQ ID NO: 207246 - DNA, 25 bp, Artificial
  Probe
aacatggagcagaccatcaaggacc

SEQ ID NO: 207247 - DNA, 25 bp, Artificial
  Probe
ctcagtcatgccaaccgcatggctg

SEQ ID NO: 207248 - DNA, 25 bp, Artificial
  Probe
aggacctggtggacaagctgcagtt

SEQ ID NO: 207249 - DNA, 25 bp, Artificial
  Probe
gtggggacgcctatcggctcccctt

SEQ ID NO: 207250 - DNA, 25 bp, Artificial
  Probe
caagtatccttacttgtcaccagag

SEQ ID NO: 207251 - DNA, 25 bp, Artificial
  Probe
ccttcttgacggtagaaagaatgga

SEQ ID NO: 207252 - DNA, 25 bp, Artificial
  Probe
tttcactttgctaaatagtttctgg

SEQ ID NO: 207253 - DNA, 25 bp, Artificial
  Probe
gatggagtccaccagcattgagtat

SEQ ID NO: 207254 - DNA, 25 bp, Artificial
  Probe
tgtgacgcagaggaactgcaacctc

SEQ ID NO: 207255 - DNA, 25 bp, Artificial
  Probe
cctcatagactccaaaggctatgga

SEQ ID NO: 207256 - DNA, 25 bp, Artificial
  Probe
gggcctcatagactccaaaggctat

SEQ ID NO: 207257 - DNA, 25 bp, Artificial
  Probe
ctctcatgcagcaaggatcagagct

SEQ ID NO: 207258 - DNA, 25 bp, Artificial
  Probe
tactgtttgtgattgcgaggttcac

SEQ ID NO: 207259 - DNA, 25 bp, Artificial
  Probe
ttagcatcctttaccggaagcccaa

SEQ ID NO: 207260 - DNA, 25 bp, Artificial
  Probe
aatatggggcagtcagagatggctc

SEQ ID NO: 207261 - DNA, 25 bp, Artificial
  Probe
tgtgggctttcatgagcagtagaca

SEQ ID NO: 207262 - DNA, 25 bp, Artificial
  Probe
agatggctcgacgatgaccttcttc

SEQ ID NO: 207263 - DNA, 25 bp, Artificial
  Probe
gcacatatttggaggacagatttca

SEQ ID NO: 207264 - DNA, 25 bp, Artificial
  Probe
acagatttcagaggactatgtcttt

SEQ ID NO: 207265 - DNA, 25 bp, Artificial
  Probe
cactttgctaaatagtttctggttt

SEQ ID NO: 207266 - DNA, 25 bp, Artificial
  Probe
gggcaaatcttctttcacaagtatc

SEQ ID NO: 207267 - DNA, 25 bp, Artificial
  Probe
ccacacgtccgctgcacatatttgg

SEQ ID NO: 207268 - DNA, 25 bp, Artificial
  Probe
tctggccaaacaaaccaagatagaa

SEQ ID NO: 207269 - DNA, 25 bp, Artificial
  Probe
acgaggggatccaaagggtgctcac

SEQ ID NO: 207270 - DNA, 25 bp, Artificial
  Probe
tttctggtttggagttggagctctc

SEQ ID NO: 207271 - DNA, 25 bp, Artificial
  Probe
gagacagtggcgtgatcaaagaaca

SEQ ID NO: 207272 - DNA, 25 bp, Artificial
  Probe
tgctcgcctgcctaggagtcagttg

SEQ ID NO: 207273 - DNA, 25 bp, Artificial
  Probe
ctcacatagatattacttgagaagt

SEQ ID NO: 207274 - DNA, 25 bp, Artificial
  Probe
aaagctcacatagatattacttgag

SEQ ID NO: 207275 - DNA, 25 bp, Artificial
  Probe
tcacaccctacgagtggtataaccc

SEQ ID NO: 207276 - DNA, 25 bp, Artificial
  Probe
agtggggacgcctatcggctcccct

SEQ ID NO: 207277 - DNA, 25 bp, Artificial
  Probe
gacagtggcgtgatcaaagaacaca

SEQ ID NO: 207278 - DNA, 25 bp, Artificial
  Probe
ataaccccagtcgtggacagagggg

SEQ ID NO: 207279 - DNA, 25 bp, Artificial
  Probe
gcctaggagtcagttgtgtactgtt

SEQ ID NO: 207280 - DNA, 25 bp, Artificial
  Probe
tcagagatggctcgacgatgacctt

SEQ ID NO: 207281 - DNA, 25 bp, Artificial
  Probe
tcttttcagatgaatttgtatgcac

SEQ ID NO: 207282 - DNA, 25 bp, Artificial
  Probe
ccagcattgagtatgtgacgcagag

SEQ ID NO: 207283 - DNA, 25 bp, Artificial
  Probe
agagcgcactggttaaaaacagtga

SEQ ID NO: 207284 - DNA, 25 bp, Artificial
  Probe
catcgattccgcagacgatctggcc

SEQ ID NO: 207285 - DNA, 25 bp, Artificial
  Probe
gatgcccaaggctctatcgaccaga

SEQ ID NO: 207286 - DNA, 25 bp, Artificial
  Probe
ttttcagatgaatttgtatgcacac

SEQ ID NO: 207287 - DNA, 25 bp, Artificial
  Probe
gaggactatgtctttatccataacc

SEQ ID NO: 207288 - DNA, 25 bp, Artificial
  Probe
aagggtgctcaccaccgactacgca

SEQ ID NO: 207289 - DNA, 25 bp, Artificial
  Probe
atttcctccgataaattgctatgtg

SEQ ID NO: 207290 - DNA, 25 bp, Artificial
  Probe
ggctgccttcttgacggtagaaaga

SEQ ID NO: 207291 - DNA, 25 bp, Artificial
  Probe
ccagagacgaactcagagaaaagag

SEQ ID NO: 207292 - DNA, 25 bp, Artificial
  Probe
ctaagggcaaatcttctttcacaag

SEQ ID NO: 207293 - DNA, 25 bp, Artificial
  Probe
ctatcgaccagaatagttggaggaa

SEQ ID NO: 207294 - DNA, 25 bp, Artificial
  Probe
ttaaaaacagtgacgaggggatcca

SEQ ID NO: 207295 - DNA, 25 bp, Artificial
  Probe
gtgtcagaactgaatggggacatcc

SEQ ID NO: 207296 - DNA, 25 bp, Artificial
  Probe
tcactggtcatggtgtcagaactga

SEQ ID NO: 207297 - DNA, 25 bp, Artificial
  Probe
accagagacgtgattcaccaacttc

SEQ ID NO: 207298 - DNA, 25 bp, Artificial
  Probe
ttcaccaacttctcggagccagaga

SEQ ID NO: 207299 - DNA, 25 bp, Artificial
  Probe
agacgtgattcaccaacttctcgga

SEQ ID NO: 207300 - DNA, 25 bp, Artificial
  Probe
caaagacttttctgctggtgtcggg

SEQ ID NO: 207301 - DNA, 25 bp, Artificial
  Probe
atggggacatccttgagaaagcccc

SEQ ID NO: 207302 - DNA, 25 bp, Artificial
  Probe
gcactcaggcatgcacagggcaggt

SEQ ID NO: 207303 - DNA, 25 bp, Artificial
  Probe
atctagctcaatgcaaaatgaagat

SEQ ID NO: 207304 - DNA, 25 bp, Artificial
  Probe
cgtgattcaccaacttctcggagcc

SEQ ID NO: 207305 - DNA, 25 bp, Artificial
  Probe
atgtcactggtcatggtgtcagaac

SEQ ID NO: 207306 - DNA, 25 bp, Artificial
  Probe
agacttttctgctggtgtcgggcag

SEQ ID NO: 207307 - DNA, 25 bp, Artificial
  Probe
gaaactgcctctgctacgtctttcc

SEQ ID NO: 207308 - DNA, 25 bp, Artificial
  Probe
aactgaatggggacatccttgagaa

SEQ ID NO: 207309 - DNA, 25 bp, Artificial
  Probe
catggtgtcagaactgaatggggac

SEQ ID NO: 207310 - DNA, 25 bp, Artificial
  Probe
ggggacatccttgagaaagccccca

SEQ ID NO: 207311 - DNA, 25 bp, Artificial
  Probe
aggcactcaggcatgcacagggcag

SEQ ID NO: 207312 - DNA, 25 bp, Artificial
  Probe
accgggccaacattaacccatctag

SEQ ID NO: 207313 - DNA, 25 bp, Artificial
  Probe
atgacagtgtcaccaggggcctgag

SEQ ID NO: 207314 - DNA, 25 bp, Artificial
  Probe
catcctatgacagtgtcaccagggg

SEQ ID NO: 207315 - DNA, 25 bp, Artificial
  Probe
ctggtcatggtgtcagaactgaatg

SEQ ID NO: 207316 - DNA, 25 bp, Artificial
  Probe
tggggacatccttgagaaagccccc

SEQ ID NO: 207317 - DNA, 25 bp, Artificial
  Probe
caatgcatgtcactggtcatggtgt

SEQ ID NO: 207318 - DNA, 25 bp, Artificial
  Probe
ggtgtcagaactgaatggggacatc

SEQ ID NO: 207319 - DNA, 25 bp, Artificial
  Probe
tgaggtcgctgctaaggaaggaaac

SEQ ID NO: 207320 - DNA, 25 bp, Artificial
  Probe
ctgaatggggacatccttgagaaag

SEQ ID NO: 207321 - DNA, 25 bp, Artificial
  Probe
tgattcaccaacttctcggagccag

SEQ ID NO: 207322 - DNA, 25 bp, Artificial
  Probe
ccaacttctcggagccagagacaca

SEQ ID NO: 207323 - DNA, 25 bp, Artificial
  Probe
aagacttttctgctggtgtcgggca

SEQ ID NO: 207324 - DNA, 25 bp, Artificial
  Probe
tgtgaccagagacgtgattcaccaa

SEQ ID NO: 207325 - DNA, 25 bp, Artificial
  Probe
aatggggacatccttgagaaagccc

SEQ ID NO: 207326 - DNA, 25 bp, Artificial
  Probe
acgtgattcaccaacttctcggagc

SEQ ID NO: 207327 - DNA, 25 bp, Artificial
  Probe
tgacagtgtcaccaggggcctgagt

SEQ ID NO: 207328 - DNA, 25 bp, Artificial
  Probe
agtgaccgggccaacattaacccat

SEQ ID NO: 207329 - DNA, 25 bp, Artificial
  Probe
aggtcgctgctaaggaaggaaacag

SEQ ID NO: 207330 - DNA, 25 bp, Artificial
  Probe
gggccaacattaacccatctagctc

SEQ ID NO: 207331 - DNA, 25 bp, Artificial
  Probe
cgggccaacattaacccatctagct

SEQ ID NO: 207332 - DNA, 25 bp, Artificial
  Probe
gaccgggccaacattaacccatcta

SEQ ID NO: 207333 - DNA, 25 bp, Artificial
  Probe
gtgaccgggccaacattaacccatc

SEQ ID NO: 207334 - DNA, 25 bp, Artificial
  Probe
ctagctcaatgcaaaatgaagatga

SEQ ID NO: 207335 - DNA, 25 bp, Artificial
  Probe
ccatctagctcaatgcaaaatgaag

SEQ ID NO: 207336 - DNA, 25 bp, Artificial
  Probe
atcctatgacagtgtcaccaggggc

SEQ ID NO: 207337 - DNA, 25 bp, Artificial
  Probe
gtcgctgctaaggaaggaaacagcc

SEQ ID NO: 207338 - DNA, 25 bp, Artificial
  Probe
ggtcgctgctaaggaaggaaacagc

SEQ ID NO: 207339 - DNA, 25 bp, Artificial
  Probe
tgtcactggtcatggtgtcagaact

SEQ ID NO: 207340 - DNA, 25 bp, Artificial
  Probe
cctatgacagtgtcaccaggggcct

SEQ ID NO: 207341 - DNA, 25 bp, Artificial
  Probe
cccacttaactgtgaagaagatctt

SEQ ID NO: 207342 - DNA, 25 bp, Artificial
  Probe
tccccaacagtgtgaagttagaatt

SEQ ID NO: 207343 - DNA, 25 bp, Artificial
  Probe
tcagaaataccatactgtgaatggc

SEQ ID NO: 207344 - DNA, 25 bp, Artificial
  Probe
cagccagagaggtcgaagtggttcc

SEQ ID NO: 207345 - DNA, 25 bp, Artificial
  Probe
gaacatcacctacgagattattttg

SEQ ID NO: 207346 - DNA, 25 bp, Artificial
  Probe
tcttggtaaacttccccaacagtgt

SEQ ID NO: 207347 - DNA, 25 bp, Artificial
  Probe
cgtttgtcacctttgatgaccatga

SEQ ID NO: 207348 - DNA, 25 bp, Artificial
  Probe
acatcacctacgagattattttgag

SEQ ID NO: 207349 - DNA, 25 bp, Artificial
  Probe
agggtcatccaagcaagatcacaat

SEQ ID NO: 207350 - DNA, 25 bp, Artificial
  Probe
tccaagcaagatcacaatttggtta

SEQ ID NO: 207351 - DNA, 25 bp, Artificial
  Probe
ggtcatccaagcaagatcacaattt

SEQ ID NO: 207352 - DNA, 25 bp, Artificial
  Probe
ccacttaactgtgaagaagatcttt

SEQ ID NO: 207353 - DNA, 25 bp, Artificial
  Probe
aagacactgaagaacatcacctacg

SEQ ID NO: 207354 - DNA, 25 bp, Artificial
  Probe
tttgatgaccatgactctgtggata

SEQ ID NO: 207355 - DNA, 25 bp, Artificial
  Probe
gaagaacatcacctacgagattatt

SEQ ID NO: 207356 - DNA, 25 bp, Artificial
  Probe
gtgaactcagccaagcacagtggtg

SEQ ID NO: 207357 - DNA, 25 bp, Artificial
  Probe
ccaagcacagtggtggcagggccta

SEQ ID NO: 207358 - DNA, 25 bp, Artificial
  Probe
attcagaaataccatactgtgaatg

SEQ ID NO: 207359 - DNA, 25 bp, Artificial
  Probe
tgttattcagaaataccatactgtg

SEQ ID NO: 207360 - DNA, 25 bp, Artificial
  Probe
cacctacgagattattttgagcagt

SEQ ID NO: 207361 - DNA, 25 bp, Artificial
  Probe
atcttggtaaacttccccaacagtg

SEQ ID NO: 207362 - DNA, 25 bp, Artificial
  Probe
gtaaacttccccaacagtgtgaagt

SEQ ID NO: 207363 - DNA, 25 bp, Artificial
  Probe
gaactcagccaagcacagtggtggc

SEQ ID NO: 207364 - DNA, 25 bp, Artificial
  Probe
acctacgagattattttgagcagta

SEQ ID NO: 207365 - DNA, 25 bp, Artificial
  Probe
gagatggctagtgcttcatccagcc

SEQ ID NO: 207366 - DNA, 25 bp, Artificial
  Probe
ctcagccaagcacagtggtggcagg

SEQ ID NO: 207367 - DNA, 25 bp, Artificial
  Probe
ccccaacagtgtgaagttagaattc

SEQ ID NO: 207368 - DNA, 25 bp, Artificial
  Probe
aacttcagtggtcgtggtggctttg

SEQ ID NO: 207369 - DNA, 25 bp, Artificial
  Probe
gcccacttaactgtgaagaagatct

SEQ ID NO: 207370 - DNA, 25 bp, Artificial
  Probe
aacttccccaacagtgtgaagttag

SEQ ID NO: 207371 - DNA, 25 bp, Artificial
  Probe
tgcgtttgtcacctttgatgaccat

SEQ ID NO: 207372 - DNA, 25 bp, Artificial
  Probe
aactcagccaagcacagtggtggca

SEQ ID NO: 207373 - DNA, 25 bp, Artificial
  Probe
gggatttgcgtttgtcacctttgat

SEQ ID NO: 207374 - DNA, 25 bp, Artificial
  Probe
agacactgaagaacatcacctacga

SEQ ID NO: 207375 - DNA, 25 bp, Artificial
  Probe
cagaaataccatactgtgaatggcc

SEQ ID NO: 207376 - DNA, 25 bp, Artificial
  Probe
cttcatccagccagagaggtcgaag

SEQ ID NO: 207377 - DNA, 25 bp, Artificial
  Probe
atgaccatgactctgtggataagat

SEQ ID NO: 207378 - DNA, 25 bp, Artificial
  Probe
ccatgactctgtggataagattgtt

SEQ ID NO: 207379 - DNA, 25 bp, Artificial
  Probe
gaacttcagtggtcgtggtggcttt

SEQ ID NO: 207380 - DNA, 25 bp, Artificial
  Probe
agtgcttcatccagccagagaggtc

SEQ ID NO: 207381 - DNA, 25 bp, Artificial
  Probe
ccagccagagaggtcgaagtggttc

SEQ ID NO: 207382 - DNA, 25 bp, Artificial
  Probe
acctttgatgaccatgactctgtgg

SEQ ID NO: 207383 - DNA, 25 bp, Artificial
  Probe
ttccccaacagtgtgaagttagaat

SEQ ID NO: 207384 - DNA, 25 bp, Artificial
  Probe
ggctagtgcttcatccagccagaga

SEQ ID NO: 207385 - DNA, 25 bp, Artificial
  Probe
taattacagccaggaaacaaagctt

SEQ ID NO: 207386 - DNA, 25 bp, Artificial
  Probe
ggatttgcgtttgtcacctttgatg

SEQ ID NO: 207387 - DNA, 25 bp, Artificial
  Probe
cagtatagtaccttattctctgctg

SEQ ID NO: 207388 - DNA, 25 bp, Artificial
  Probe
agtgggtgtcgtactccaaggagac

SEQ ID NO: 207389 - DNA, 25 bp, Artificial
  Probe
ttgtggaaacttcagtcatacataa

SEQ ID NO: 207390 - DNA, 25 bp, Artificial
  Probe
tgggtgtcgtactccaaggagacaa

SEQ ID NO: 207391 - DNA, 25 bp, Artificial
  Probe
tcgtactccaaggagacaaacactt

SEQ ID NO: 207392 - DNA, 25 bp, Artificial
  Probe
tctctgctgtgttaagtgggtgtcg

SEQ ID NO: 207393 - DNA, 25 bp, Artificial
  Probe
gtatagtaccttattctctgctgtg

SEQ ID NO: 207394 - DNA, 25 bp, Artificial
  Probe
cgtactccaaggagacaaacacttt

SEQ ID NO: 207395 - DNA, 25 bp, Artificial
  Probe
ttaagtgggtgtcgtactccaagga

SEQ ID NO: 207396 - DNA, 25 bp, Artificial
  Probe
tagtaccttattctctgctgtgtta

SEQ ID NO: 207397 - DNA, 25 bp, Artificial
  Probe
ccttattctctgctgtgttaagtgg

SEQ ID NO: 207398 - DNA, 25 bp, Artificial
  Probe
gtgggtgtcgtactccaaggagaca

SEQ ID NO: 207399 - DNA, 25 bp, Artificial
  Probe
tatagtaccttattctctgctgtgt

SEQ ID NO: 207400 - DNA, 25 bp, Artificial
  Probe
atagtaccttattctctgctgtgtt

SEQ ID NO: 207401 - DNA, 25 bp, Artificial
  Probe
accttattctctgctgtgttaagtg

SEQ ID NO: 207402 - DNA, 25 bp, Artificial
  Probe
ctgctgtgttaagtgggtgtcgtac

SEQ ID NO: 207403 - DNA, 25 bp, Artificial
  Probe
aagtgggtgtcgtactccaaggaga

SEQ ID NO: 207404 - DNA, 25 bp, Artificial
  Probe
gggtgtcgtactccaaggagacaaa

SEQ ID NO: 207405 - DNA, 25 bp, Artificial
  Probe
ggtgtcgtactccaaggagacaaac

SEQ ID NO: 207406 - DNA, 25 bp, Artificial
  Probe
tgttaagtgggtgtcgtactccaag

SEQ ID NO: 207407 - DNA, 25 bp, Artificial
  Probe
agtatagtaccttattctctgctgt

SEQ ID NO: 207408 - DNA, 25 bp, Artificial
  Probe
ttctctgctgtgttaagtgggtgtc

SEQ ID NO: 207409 - DNA, 25 bp, Artificial
  Probe
ctctgctgtgttaagtgggtgtcgt

SEQ ID NO: 207410 - DNA, 25 bp, Artificial
  Probe
taccttattctctgctgtgttaagt

SEQ ID NO: 207411 - DNA, 25 bp, Artificial
  Probe
taagtgggtgtcgtactccaaggag

SEQ ID NO: 207412 - DNA, 25 bp, Artificial
  Probe
gtcgtactccaaggagacaaacact

SEQ ID NO: 207413 - DNA, 25 bp, Artificial
  Probe
agtaccttattctctgctgtgttaa

SEQ ID NO: 207414 - DNA, 25 bp, Artificial
  Probe
gtaccttattctctgctgtgttaag

SEQ ID NO: 207415 - DNA, 25 bp, Artificial
  Probe
cttattctctgctgtgttaagtggg

SEQ ID NO: 207416 - DNA, 25 bp, Artificial
  Probe
tcgggattggctgtcattgcatcgg

SEQ ID NO: 207417 - DNA, 25 bp, Artificial
  Probe
caaggccgtacacacaggaactgca

SEQ ID NO: 207418 - DNA, 25 bp, Artificial
  Probe
aagccaggttatccatcactgggag

SEQ ID NO: 207419 - DNA, 25 bp, Artificial
  Probe
aaagccaggttatccatcactggga

SEQ ID NO: 207420 - DNA, 25 bp, Artificial
  Probe
gtcttctacattctggttggcggcc

SEQ ID NO: 207421 - DNA, 25 bp, Artificial
  Probe
catcactgggagtgtgggagaaaac

SEQ ID NO: 207422 - DNA, 25 bp, Artificial
  Probe
aggttatccatcactgggagtgtgg

SEQ ID NO: 207423 - DNA, 25 bp, Artificial
  Probe
acacaggaactgcaattagacaaag

SEQ ID NO: 207424 - DNA, 25 bp, Artificial
  Probe
ctatggtgtagcaacgcccaagggt

SEQ ID NO: 207425 - DNA, 25 bp, Artificial
  Probe
ccaaggccgtacacacaggaactgc

SEQ ID NO: 207426 - DNA, 25 bp, Artificial
  Probe
tacacacaggaactgcaattagaca

SEQ ID NO: 207427 - DNA, 25 bp, Artificial
  Probe
cgggattggctgtcattgcatcgga

SEQ ID NO: 207428 - DNA, 25 bp, Artificial
  Probe
cgtacacacaggaactgcaattaga

SEQ ID NO: 207429 - DNA, 25 bp, Artificial
  Probe
caaagccaggttatccatcactggg

SEQ ID NO: 207430 - DNA, 25 bp, Artificial
  Probe
attggctgtcattgcatcggaccta

SEQ ID NO: 207431 - DNA, 25 bp, Artificial
  Probe
tatggtgtagcaacgcccaagggtt

SEQ ID NO: 207432 - DNA, 25 bp, Artificial
  Probe
ccatcactgggagtgtgggagaaaa

SEQ ID NO: 207433 - DNA, 25 bp, Artificial
  Probe
acacacaggaactgcaattagacaa

SEQ ID NO: 207434 - DNA, 25 bp, Artificial
  Probe
cacacaggaactgcaattagacaaa

SEQ ID NO: 207435 - DNA, 25 bp, Artificial
  Probe
caaagttcgggattggctgtcattg

SEQ ID NO: 207436 - DNA, 25 bp, Artificial
  Probe
gggattggctgtcattgcatcggac

SEQ ID NO: 207437 - DNA, 25 bp, Artificial
  Probe
gccgtacacacaggaactgcaatta

SEQ ID NO: 207438 - DNA, 25 bp, Artificial
  Probe
ttcgggattggctgtcattgcatcg

SEQ ID NO: 207439 - DNA, 25 bp, Artificial
  Probe
aaagttcgggattggctgtcattgc

SEQ ID NO: 207440 - DNA, 25 bp, Artificial
  Probe
tcttctacattctggttggcggcct

SEQ ID NO: 207441 - DNA, 25 bp, Artificial
  Probe
tgccttgagcctgagcaacgtagca

SEQ ID NO: 207442 - DNA, 25 bp, Artificial
  Probe
cgtcttctacattctggttggcggc

SEQ ID NO: 207443 - DNA, 25 bp, Artificial
  Probe
agccaggttatccatcactgggagt

SEQ ID NO: 207444 - DNA, 25 bp, Artificial
  Probe
ggctgtcattgcatcggacctacca

SEQ ID NO: 207445 - DNA, 25 bp, Artificial
  Probe
ccgtacacacaggaactgcaattag

SEQ ID NO: 207446 - DNA, 25 bp, Artificial
  Probe
tggctgtcattgcatcggacctacc

SEQ ID NO: 207447 - DNA, 25 bp, Artificial
  Probe
gattggctgtcattgcatcggacct

SEQ ID NO: 207448 - DNA, 25 bp, Artificial
  Probe
caattagacaaagttcgggattggc

SEQ ID NO: 207449 - DNA, 25 bp, Artificial
  Probe
gttatccatcactgggagtgtggga

SEQ ID NO: 207450 - DNA, 25 bp, Artificial
  Probe
caggttatccatcactgggagtgtg

SEQ ID NO: 207451 - DNA, 25 bp, Artificial
  Probe
cttctacattctggttggcggcctg

SEQ ID NO: 207452 - DNA, 25 bp, Artificial
  Probe
aggccgtacacacaggaactgcaat

SEQ ID NO: 207453 - DNA, 25 bp, Artificial
  Probe
ctacattctggttggcggcctgggc

SEQ ID NO: 207454 - DNA, 25 bp, Artificial
  Probe
cccaaggccgtacacacaggaactg

SEQ ID NO: 207455 - DNA, 25 bp, Artificial
  Probe
ggattggctgtcattgcatcggacc

SEQ ID NO: 207456 - DNA, 25 bp, Artificial
  Probe
gaaacaaagccaggttatccatcac

SEQ ID NO: 207457 - DNA, 25 bp, Artificial
  Probe
tagcaacgcccaagggttcctcatt

SEQ ID NO: 207458 - DNA, 25 bp, Artificial
  Probe
tccatcactgggagtgtgggagaaa

SEQ ID NO: 207459 - DNA, 25 bp, Artificial
  Probe
aaggccgtacacacaggaactgcaa

SEQ ID NO: 207460 - DNA, 25 bp, Artificial
  Probe
ccaggttatccatcactgggagtgt

SEQ ID NO: 207461 - DNA, 25 bp, Artificial
  Probe
gtagcaacgcccaagggttcctcat

SEQ ID NO: 207462 - DNA, 25 bp, Artificial
  Probe
tcctacaatcaccagcagagggttg

SEQ ID NO: 207463 - DNA, 25 bp, Artificial
  Probe
ttgtaacccagtcatgaaaaagtgc

SEQ ID NO: 207464 - DNA, 25 bp, Artificial
  Probe
atgtctcctacaatcaccagcagag

SEQ ID NO: 207465 - DNA, 25 bp, Artificial
  Probe
acaatcaccagcagagggttgtttt

SEQ ID NO: 207466 - DNA, 25 bp, Artificial
  Probe
taggtacatgctctttgtaacccag

SEQ ID NO: 207467 - DNA, 25 bp, Artificial
  Probe
aggtacatgctctttgtaacccagt

SEQ ID NO: 207468 - DNA, 25 bp, Artificial
  Probe
gccctcatttgatgtgatttaaact

SEQ ID NO: 207469 - DNA, 25 bp, Artificial
  Probe
ataaggaatccatcagcattactgt

SEQ ID NO: 207470 - DNA, 25 bp, Artificial
  Probe
ttgtagctacttgtctacagccctc

SEQ ID NO: 207471 - DNA, 25 bp, Artificial
  Probe
ctacagccctcatttgatgtgattt

SEQ ID NO: 207472 - DNA, 25 bp, Artificial
  Probe
taaagaagccagcagagtgacgaga

SEQ ID NO: 207473 - DNA, 25 bp, Artificial
  Probe
cagggtcttctgttgatttcttaaa

SEQ ID NO: 207474 - DNA, 25 bp, Artificial
  Probe
cctaaagaagccagcagagtgacga

SEQ ID NO: 207475 - DNA, 25 bp, Artificial
  Probe
tgtctacagccctcatttgatgtga

SEQ ID NO: 207476 - DNA, 25 bp, Artificial
  Probe
aggaatccatcagcattactgtaac

SEQ ID NO: 207477 - DNA, 25 bp, Artificial
  Probe
ggtacatgctctttgtaacccagtc

SEQ ID NO: 207478 - DNA, 25 bp, Artificial
  Probe
tgtctcctacaatcaccagcagagg

SEQ ID NO: 207479 - DNA, 25 bp, Artificial
  Probe
agccctcatttgatgtgatttaaac

SEQ ID NO: 207480 - DNA, 25 bp, Artificial
  Probe
tctcctacaatcaccagcagagggt

SEQ ID NO: 207481 - DNA, 25 bp, Artificial
  Probe
taaggaatccatcagcattactgta

SEQ ID NO: 207482 - DNA, 25 bp, Artificial
  Probe
ctaaagaagccagcagagtgacgag

SEQ ID NO: 207483 - DNA, 25 bp, Artificial
  Probe
taacccagtcatgaaaaagtgcttt

SEQ ID NO: 207484 - DNA, 25 bp, Artificial
  Probe
ggaatccatcagcattactgtaact

SEQ ID NO: 207485 - DNA, 25 bp, Artificial
  Probe
atgctctttgtaacccagtcatgaa

SEQ ID NO: 207486 - DNA, 25 bp, Artificial
  Probe
ctttgtaacccagtcatgaaaaagt

SEQ ID NO: 207487 - DNA, 25 bp, Artificial
  Probe
tacagggtcttctgttgatttctta

SEQ ID NO: 207488 - DNA, 25 bp, Artificial
  Probe
gctacttgtctacagccctcatttg

SEQ ID NO: 207489 - DNA, 25 bp, Artificial
  Probe
aatcaccagcagagggttgttttat

SEQ ID NO: 207490 - DNA, 25 bp, Artificial
  Probe
cattgtagctacttgtctacagccc

SEQ ID NO: 207491 - DNA, 25 bp, Artificial
  Probe
acatgctctttgtaacccagtcatg

SEQ ID NO: 207492 - DNA, 25 bp, Artificial
  Probe
aactcctaaagaagccagcagagtg

SEQ ID NO: 207493 - DNA, 25 bp, Artificial
  Probe
tacaatcaccagcagagggttgttt

SEQ ID NO: 207494 - DNA, 25 bp, Artificial
  Probe
attacagggtcttctgttgatttct

SEQ ID NO: 207495 - DNA, 25 bp, Artificial
  Probe
tattacagggtcttctgttgatttc

SEQ ID NO: 207496 - DNA, 25 bp, Artificial
  Probe
gtacatgctctttgtaacccagtca

SEQ ID NO: 207497 - DNA, 25 bp, Artificial
  Probe
ccactgttcttggagttattgttct

SEQ ID NO: 207498 - DNA, 25 bp, Artificial
  Probe
tctttgtaacccagtcatgaaaaag

SEQ ID NO: 207499 - DNA, 25 bp, Artificial
  Probe
catacccaagaagaaagggatacat

SEQ ID NO: 207500 - DNA, 25 bp, Artificial
  Probe
tacagccctcatttgatgtgattta

SEQ ID NO: 207501 - DNA, 25 bp, Artificial
  Probe
catttaggtacatgctctttgtaac

SEQ ID NO: 207502 - DNA, 25 bp, Artificial
  Probe
gtctacagccctcatttgatgtgat

SEQ ID NO: 207503 - DNA, 25 bp, Artificial
  Probe
gtagctacttgtctacagccctcat

SEQ ID NO: 207504 - DNA, 25 bp, Artificial
  Probe
acagccctcatttgatgtgatttaa

SEQ ID NO: 207505 - DNA, 25 bp, Artificial
  Probe
agccactgttcttggagttattgtt

SEQ ID NO: 207506 - DNA, 25 bp, Artificial
  Probe
tttaggtacatgctctttgtaaccc

SEQ ID NO: 207507 - DNA, 25 bp, Artificial
  Probe
atacatttaggtacatgctctttgt

SEQ ID NO: 207508 - DNA, 25 bp, Artificial
  Probe
ttattttgttaacaattcatatctt

SEQ ID NO: 207509 - DNA, 25 bp, Artificial
  Probe
ctgagttctctgtgttgttgcagaa

SEQ ID NO: 207510 - DNA, 25 bp, Artificial
  Probe
catatcttgtgttcagttactttgg

SEQ ID NO: 207511 - DNA, 25 bp, Artificial
  Probe
agcatttccttcttgagcttatttt

SEQ ID NO: 207512 - DNA, 25 bp, Artificial
  Probe
tgttgttgcagaattggagttggga

SEQ ID NO: 207513 - DNA, 25 bp, Artificial
  Probe
gagcatttccttcttgagcttattt

SEQ ID NO: 207514 - DNA, 25 bp, Artificial
  Probe
tgcgctcagagcatttccttcttga

SEQ ID NO: 207515 - DNA, 25 bp, Artificial
  Probe
agagcatttccttcttgagcttatt

SEQ ID NO: 207516 - DNA, 25 bp, Artificial
  Probe
ctgcgctcagagcatttccttcttg

SEQ ID NO: 207517 - DNA, 25 bp, Artificial
  Probe
gcatttccttcttgagcttattttg

SEQ ID NO: 207518 - DNA, 25 bp, Artificial
  Probe
aattcatatcttgtgttcagttact

SEQ ID NO: 207519 - DNA, 25 bp, Artificial
  Probe
ctgtgttgttgcagaattggagttg

SEQ ID NO: 207520 - DNA, 25 bp, Artificial
  Probe
cgctcagagcatttccttcttgagc

SEQ ID NO: 207521 - DNA, 25 bp, Artificial
  Probe
attttgttaacaattcatatcttgt

SEQ ID NO: 207522 - DNA, 25 bp, Artificial
  Probe
ttcatatcttgtgttcagttacttt

SEQ ID NO: 207523 - DNA, 25 bp, Artificial
  Probe
cagagcatttccttcttgagcttat

SEQ ID NO: 207524 - DNA, 25 bp, Artificial
  Probe
cctgcgctcagagcatttccttctt

SEQ ID NO: 207525 - DNA, 25 bp, Artificial
  Probe
ttgttaacaattcatatcttgtgtt

SEQ ID NO: 207526 - DNA, 25 bp, Artificial
  Probe
atgctgagttctctgtgttgttgca

SEQ ID NO: 207527 - DNA, 25 bp, Artificial
  Probe
gcgctcagagcatttccttcttgag

SEQ ID NO: 207528 - DNA, 25 bp, Artificial
  Probe
gttgcagaattggagttgggatgat

SEQ ID NO: 207529 - DNA, 25 bp, Artificial
  Probe
tcatatcttgtgttcagttactttg

SEQ ID NO: 207530 - DNA, 25 bp, Artificial
  Probe
taacaattcatatcttgtgttcagt

SEQ ID NO: 207531 - DNA, 25 bp, Artificial
  Probe
ctcagagcatttccttcttgagctt

SEQ ID NO: 207532 - DNA, 25 bp, Artificial
  Probe
gctcagagcatttccttcttgagct

SEQ ID NO: 207533 - DNA, 25 bp, Artificial
  Probe
agatgctgagttctctgtgttgttg

SEQ ID NO: 207534 - DNA, 25 bp, Artificial
  Probe
ttgttgcagaattggagttgggatg

SEQ ID NO: 207535 - DNA, 25 bp, Artificial
  Probe
gtaagatgctgagttctctgtgttg

SEQ ID NO: 207536 - DNA, 25 bp, Artificial
  Probe
tgagttctctgtgttgttgcagaat

SEQ ID NO: 207537 - DNA, 25 bp, Artificial
  Probe
agttctctgtgttgttgcagaattg

SEQ ID NO: 207538 - DNA, 25 bp, Artificial
  Probe
acctgcgctcagagcatttccttct

SEQ ID NO: 207539 - DNA, 25 bp, Artificial
  Probe
tgctgagttctctgtgttgttgcag

SEQ ID NO: 207540 - DNA, 25 bp, Artificial
  Probe
ctctgtgttgttgcagaattggagt

SEQ ID NO: 207541 - DNA, 25 bp, Artificial
  Probe
gatgctgagttctctgtgttgttgc

SEQ ID NO: 207542 - DNA, 25 bp, Artificial
  Probe
ttgcagaattggagttgggatgatc

SEQ ID NO: 207543 - DNA, 25 bp, Artificial
  Probe
tcagagcatttccttcttgagctta

SEQ ID NO: 207544 - DNA, 25 bp, Artificial
  Probe
acaattcatatcttgtgttcagtta

SEQ ID NO: 207545 - DNA, 25 bp, Artificial
  Probe
atatcttgtgttcagttactttggg

SEQ ID NO: 207546 - DNA, 25 bp, Artificial
  Probe
ttctctgtgttgttgcagaattgga

SEQ ID NO: 207547 - DNA, 25 bp, Artificial
  Probe
tttccttcttgagcttattttgtta

SEQ ID NO: 207548 - DNA, 25 bp, Artificial
  Probe
atttccttcttgagcttattttgtt

SEQ ID NO: 207549 - DNA, 25 bp, Artificial
  Probe
gctgagttctctgtgttgttgcaga

SEQ ID NO: 207550 - DNA, 25 bp, Artificial
  Probe
tccttcttgagcttattttgttaac

SEQ ID NO: 207551 - DNA, 25 bp, Artificial
  Probe
gttaacaattcatatcttgtgttca

SEQ ID NO: 207552 - DNA, 25 bp, Artificial
  Probe
tcttgagcttattttgttaacaatt

SEQ ID NO: 207553 - DNA, 25 bp, Artificial
  Probe
tacctgcgctcagagcatttccttc

SEQ ID NO: 207554 - DNA, 25 bp, Artificial
  Probe
taccctggggcatcaagtccctgta

SEQ ID NO: 207555 - DNA, 25 bp, Artificial
  Probe
ccatgttgcatgtggcttcctctgg

SEQ ID NO: 207556 - DNA, 25 bp, Artificial
  Probe
cagaagtgtgctttatcagtttttc

SEQ ID NO: 207557 - DNA, 25 bp, Artificial
  Probe
ctcccatggatgacagataatgcca

SEQ ID NO: 207558 - DNA, 25 bp, Artificial
  Probe
ttttctgcttttgtgagggtactca

SEQ ID NO: 207559 - DNA, 25 bp, Artificial
  Probe
gtaccatgttgcatgtggcttcctc

SEQ ID NO: 207560 - DNA, 25 bp, Artificial
  Probe
taccatgttgcatgtggcttcctct

SEQ ID NO: 207561 - DNA, 25 bp, Artificial
  Probe
aagtaccatgttgcatgtggcttcc

SEQ ID NO: 207562 - DNA, 25 bp, Artificial
  Probe
tcaagtccctgtaggaccaaggacc

SEQ ID NO: 207563 - DNA, 25 bp, Artificial
  Probe
tctgctacatatgcactggaggcat

SEQ ID NO: 207564 - DNA, 25 bp, Artificial
  Probe
accctggggcatcaagtccctgtag

SEQ ID NO: 207565 - DNA, 25 bp, Artificial
  Probe
ccatcctctgctacatatgcactgg

SEQ ID NO: 207566 - DNA, 25 bp, Artificial
  Probe
ctcttttctgcttttgtgagggtac

SEQ ID NO: 207567 - DNA, 25 bp, Artificial
  Probe
catcctctgctacatatgcactgga

SEQ ID NO: 207568 - DNA, 25 bp, Artificial
  Probe
atcaagtccctgtaggaccaaggac

SEQ ID NO: 207569 - DNA, 25 bp, Artificial
  Probe
atctacacttagatggagttggtca

SEQ ID NO: 207570 - DNA, 25 bp, Artificial
  Probe
catctacacttagatggagttggtc

SEQ ID NO: 207571 - DNA, 25 bp, Artificial
  Probe
agtaccatgttgcatgtggcttcct

SEQ ID NO: 207572 - DNA, 25 bp, Artificial
  Probe
ctggggcatcaagtccctgtaggac

SEQ ID NO: 207573 - DNA, 25 bp, Artificial
  Probe
accatgttgcatgtggcttcctctg

SEQ ID NO: 207574 - DNA, 25 bp, Artificial
  Probe
acatctacacttagatggagttggt

SEQ ID NO: 207575 - DNA, 25 bp, Artificial
  Probe
tcaagtaccatgttgcatgtggctt

SEQ ID NO: 207576 - DNA, 25 bp, Artificial
  Probe
ctctgctacatatgcactggaggca

SEQ ID NO: 207577 - DNA, 25 bp, Artificial
  Probe
cttttctgcttttgtgagggtactc

SEQ ID NO: 207578 - DNA, 25 bp, Artificial
  Probe
tctgcttttgtgagggtactcaccc

SEQ ID NO: 207579 - DNA, 25 bp, Artificial
  Probe
caagtccctgtaggaccaaggacct

SEQ ID NO: 207580 - DNA, 25 bp, Artificial
  Probe
tgatcaagtaccatgttgcatgtgg

SEQ ID NO: 207581 - DNA, 25 bp, Artificial
  Probe
atcaagtaccatgttgcatgtggct

SEQ ID NO: 207582 - DNA, 25 bp, Artificial
  Probe
atcctctgctacatatgcactggag

SEQ ID NO: 207583 - DNA, 25 bp, Artificial
  Probe
cctcttttctgcttttgtgagggta

SEQ ID NO: 207584 - DNA, 25 bp, Artificial
  Probe
tggggcatcaagtccctgtaggacc

SEQ ID NO: 207585 - DNA, 25 bp, Artificial
  Probe
gatcaagtaccatgttgcatgtggc

SEQ ID NO: 207586 - DNA, 25 bp, Artificial
  Probe
gccatcctctgctacatatgcactg

SEQ ID NO: 207587 - DNA, 25 bp, Artificial
  Probe
tttctgcttttgtgagggtactcac

SEQ ID NO: 207588 - DNA, 25 bp, Artificial
  Probe
ccctggggcatcaagtccctgtagg

SEQ ID NO: 207589 - DNA, 25 bp, Artificial
  Probe
cctggggcatcaagtccctgtagga

SEQ ID NO: 207590 - DNA, 25 bp, Artificial
  Probe
cctcccatggatgacagataatgcc

SEQ ID NO: 207591 - DNA, 25 bp, Artificial
  Probe
catcaagtccctgtaggaccaagga

SEQ ID NO: 207592 - DNA, 25 bp, Artificial
  Probe
gcatcaagtccctgtaggaccaagg

SEQ ID NO: 207593 - DNA, 25 bp, Artificial
  Probe
ttctgcttttgtgagggtactcacc

SEQ ID NO: 207594 - DNA, 25 bp, Artificial
  Probe
ctaccctggggcatcaagtccctgt

SEQ ID NO: 207595 - DNA, 25 bp, Artificial
  Probe
cacatctacacttagatggagttgg

SEQ ID NO: 207596 - DNA, 25 bp, Artificial
  Probe
caagtaccatgttgcatgtggcttc

SEQ ID NO: 207597 - DNA, 25 bp, Artificial
  Probe
ctgagtaggctaagctctgccctac

SEQ ID NO: 207598 - DNA, 25 bp, Artificial
  Probe
ccagctctggtagacggttctggaa

SEQ ID NO: 207599 - DNA, 25 bp, Artificial
  Probe
cattcctaaatctcaagggctagtt

SEQ ID NO: 207600 - DNA, 25 bp, Artificial
  Probe
tcctaaatctcaagggctagtttcc

SEQ ID NO: 207601 - DNA, 25 bp, Artificial
  Probe
atctccccttgacctgagtgatgag

SEQ ID NO: 207602 - DNA, 25 bp, Artificial
  Probe
ttgacctgagtgatgaggtggtccc

SEQ ID NO: 207603 - DNA, 25 bp, Artificial
  Probe
tctgctgctgtgtctttatctatcc

SEQ ID NO: 207604 - DNA, 25 bp, Artificial
  Probe
atctctgctgctgtgtctttatcta

SEQ ID NO: 207605 - DNA, 25 bp, Artificial
  Probe
ctctgctgctgtgtctttatctatc

SEQ ID NO: 207606 - DNA, 25 bp, Artificial
  Probe
cagctctggtagacggttctggaat

SEQ ID NO: 207607 - DNA, 25 bp, Artificial
  Probe
tgacctgagtgatgaggtggtccca

SEQ ID NO: 207608 - DNA, 25 bp, Artificial
  Probe
tgctagccccagctctggtagacgg

SEQ ID NO: 207609 - DNA, 25 bp, Artificial
  Probe
tccccttgacctgagtgatgaggtg

SEQ ID NO: 207610 - DNA, 25 bp, Artificial
  Probe
aatctcaagggctagtttccctgag

SEQ ID NO: 207611 - DNA, 25 bp, Artificial
  Probe
ccgccctaggacctgtgctacagag

SEQ ID NO: 207612 - DNA, 25 bp, Artificial
  Probe
gtgtctttatctatccctgctagcc

SEQ ID NO: 207613 - DNA, 25 bp, Artificial
  Probe
gccccagctctggtagacggttctg

SEQ ID NO: 207614 - DNA, 25 bp, Artificial
  Probe
tcaagggctagtttccctgaggagc

SEQ ID NO: 207615 - DNA, 25 bp, Artificial
  Probe
tgatctctgctgctgtgtctttatc

SEQ ID NO: 207616 - DNA, 25 bp, Artificial
  Probe
gaccgccctaggacctgtgctacag

SEQ ID NO: 207617 - DNA, 25 bp, Artificial
  Probe
ctccccttgacctgagtgatgaggt

SEQ ID NO: 207618 - DNA, 25 bp, Artificial
  Probe
ccccagctctggtagacggttctgg

SEQ ID NO: 207619 - DNA, 25 bp, Artificial
  Probe
tcccagagctgatctctgctgctgt

SEQ ID NO: 207620 - DNA, 25 bp, Artificial
  Probe
tgctgtgtctttatctatccctgct

SEQ ID NO: 207621 - DNA, 25 bp, Artificial
  Probe
attcctaaatctcaagggctagttt

SEQ ID NO: 207622 - DNA, 25 bp, Artificial
  Probe
actgagtaggctaagctctgcccta

SEQ ID NO: 207623 - DNA, 25 bp, Artificial
  Probe
agagctgatctctgctgctgtgtct

SEQ ID NO: 207624 - DNA, 25 bp, Artificial
  Probe
ccctaggacctgtgctacagagggg

SEQ ID NO: 207625 - DNA, 25 bp, Artificial
  Probe
ctgatctctgctgctgtgtctttat

SEQ ID NO: 207626 - DNA, 25 bp, Artificial
  Probe
tgaggtggtcccagagctgatctct

SEQ ID NO: 207627 - DNA, 25 bp, Artificial
  Probe
gacagaacattcctaaatctcaagg

SEQ ID NO: 207628 - DNA, 25 bp, Artificial
  Probe
gctgtgtctttatctatccctgcta

SEQ ID NO: 207629 - DNA, 25 bp, Artificial
  Probe
ctatgaccgccctaggacctgtgct

SEQ ID NO: 207630 - DNA, 25 bp, Artificial
  Probe
gtcccagagctgatctctgctgctg

SEQ ID NO: 207631 - DNA, 25 bp, Artificial
  Probe
cctaggacctgtgctacagaggggt

SEQ ID NO: 207632 - DNA, 25 bp, Artificial
  Probe
tggtcccagagctgatctctgctgc

SEQ ID NO: 207633 - DNA, 25 bp, Artificial
  Probe
tagccccagctctggtagacggttc

SEQ ID NO: 207634 - DNA, 25 bp, Artificial
  Probe
aggtggtcccagagctgatctctgc

SEQ ID NO: 207635 - DNA, 25 bp, Artificial
  Probe
tctgccctactcatcctgttggaac

SEQ ID NO: 207636 - DNA, 25 bp, Artificial
  Probe
taggctaagctctgccctactcatc

SEQ ID NO: 207637 - DNA, 25 bp, Artificial
  Probe
cagagctgatctctgctgctgtgtc

SEQ ID NO: 207638 - DNA, 25 bp, Artificial
  Probe
gtaggctaagctctgccctactcat

SEQ ID NO: 207639 - DNA, 25 bp, Artificial
  Probe
ctcaagggctagtttccctgaggag

SEQ ID NO: 207640 - DNA, 25 bp, Artificial
  Probe
agggcactgagtaggctaagctctg

SEQ ID NO: 207641 - DNA, 25 bp, Artificial
  Probe
gccctaggacctgtgctacagaggg

SEQ ID NO: 207642 - DNA, 25 bp, Artificial
  Probe
atctcaagggctagtttccctgagg

SEQ ID NO: 207643 - DNA, 25 bp, Artificial
  Probe
gcaaatgtgccgagcttgaagaaga

SEQ ID NO: 207644 - DNA, 25 bp, Artificial
  Probe
agattcaggagatccagctgaaaga

SEQ ID NO: 207645 - DNA, 25 bp, Artificial
  Probe
ctagggccaggcacagaccgtgctt

SEQ ID NO: 207646 - DNA, 25 bp, Artificial
  Probe
agcgctcaataaaactacagttctg

SEQ ID NO: 207647 - DNA, 25 bp, Artificial
  Probe
caaatgtgccgagcttgaagaagag

SEQ ID NO: 207648 - DNA, 25 bp, Artificial
  Probe
gcgggaaaccgctgaagctgacgta

SEQ ID NO: 207649 - DNA, 25 bp, Artificial
  Probe
tgacgaacaacttgaagtcactgga

SEQ ID NO: 207650 - DNA, 25 bp, Artificial
  Probe
agggctgagctctcggaaggcaaat

SEQ ID NO: 207651 - DNA, 25 bp, Artificial
  Probe
aggttctctctgacaagctgaagga

SEQ ID NO: 207652 - DNA, 25 bp, Artificial
  Probe
tcatcgagagcgatctggagcgtgc

SEQ ID NO: 207653 - DNA, 25 bp, Artificial
  Probe
cagcctgcagcgagagctggaccag

SEQ ID NO: 207654 - DNA, 25 bp, Artificial
  Probe
gaaagaggccaagcacattgctgaa

SEQ ID NO: 207655 - DNA, 25 bp, Artificial
  Probe
agatccggagcctgcaggaacaggc

SEQ ID NO: 207656 - DNA, 25 bp, Artificial
  Probe
tactctcagaaagaagacaagtatg

SEQ ID NO: 207657 - DNA, 25 bp, Artificial
  Probe
tgaagtcactggaggctcaggctga

SEQ ID NO: 207658 - DNA, 25 bp, Artificial
  Probe
agcgcggaggcagagcacagcctca

SEQ ID NO: 207659 - DNA, 25 bp, Artificial
  Probe
tcactggaggctcaggctgagaagt

SEQ ID NO: 207660 - DNA, 25 bp, Artificial
  Probe
ctcaggagcgtctggccacagctct

SEQ ID NO: 207661 - DNA, 25 bp, Artificial
  Probe
gacatttttgtctcagcgctcaata

SEQ ID NO: 207662 - DNA, 25 bp, Artificial
  Probe
ctctcggaaggcaaatgtgccgagc

SEQ ID NO: 207663 - DNA, 25 bp, Artificial
  Probe
tagggccaggcacagaccgtgcttt

SEQ ID NO: 207664 - DNA, 25 bp, Artificial
  Probe
cacagctctacagaagctggaggag

SEQ ID NO: 207665 - DNA, 25 bp, Artificial
  Probe
aagctgcgggaaaccgctgaagctg

SEQ ID NO: 207666 - DNA, 25 bp, Artificial
  Probe
aacggtgacgaacaacttgaagtca

SEQ ID NO: 207667 - DNA, 25 bp, Artificial
  Probe
agaggtggcccgtaagctggtcatc
